United States Patent Application Publication US 2006/0134663 A1 - sequence listing, part 97

SEQ ID NO: 288942 - DNA, 1000 bp, Homo Sapiens
ctccagggttttgctttgtccttttgtgaccgttagtctctaagctttaccaggagcagcctgggttcagccagtcagtgactggtgggtttgaatctgcacttatccccaccacctggggacccccttgttgtgtccaggactccccctgtgtcagtgctctgctctcaccctgcccaagactcacctcccttcccctctgcaggccgacggcaggaggacagtcgggtgatggtgtattctgccctgcgcatcccacccgaggactgagggaacctaggggggacccctgggcctggggtgccctcctgatgtcctcgccctgtatttctccatctccagttctggacagtgcaggttgccaagaaaagggacctagtttagccattgccctggagatgaaattaatggaggctcaaggatagatgagctctgagtttctcagtactccctcaagactggacatcttggtctttttctcaggcctgagggggaaccatttttggtgtgataaataccctaaactgcctttttttcttttttgaggtggggggagggaggaggtatattggaactcttctaacctccttgggctatattttctctcctcgagttgctcctcatggctgggctcatttcggtccctttctccttggtcccagaccttgggggaaaggaaggaagtgcatgtttgggaactggcattactggaactaatggttttaacctccttaaccaccagcatccctcctctccccaaggtgaagtggagggtgctgtggtgagctggccactccagagctgcagtgccactggaggagtcagactaccatgacatcgtagggaaggaggggagatttttttgtagtttttaattggggtgtgggaggggcggggaggttttctataaactgtatcattttctgctgagggtggagtgtcccatccttttaatcaaggtgattgtgattttgactaataaaaaagaatttgtaaaaaa

SEQ ID NO: 288943 - DNA, 1000 bp, Homo Sapiens
tattatgaaaatgagacttttttagtttgatgtgtgtttcccaaactagagataaaactagtaagatttagtatcgtttataacatttgaatttttgctccatgagtacaactaatttttataagtaaatattgggtttatatgaaaaatggggtgtcagtcttttcacacgcccagcaggtaacaatgtgggaagctggcagggtcattgatagcaagtaagtacttcctgaaggctttccagttcaaaagattacaagccattctgcctgccaaacaaattatattctgaagatgcctgttttgtaacccttgatgtgaattttttggtgtctgaaatttacaaaagaatgaaattgaaattgtaaaacactaaatgctttgggtttattttgaagtaatctgttactttaaaatgtcaacattaggaagccataaaacaagatattatgaaacccagtattataaatgttatctacatctaaagtattttaaaataacttattggcatctttattctttttttccttacaagatttagaatctttttggttatatgtctatttttcaattttgttatatttttaatttaagtggccaatgtggttatgaacaagatttgtatggtcagcttctgttctttcctaaaacttcagataaatatcattttagctataacctaaaaaagtgtttaaataaaatgacagatgttaatttaaaagcagcatatgctaatttactttttcatatgatgatggtctaatggaagttacatatgctttcttttgtcctaactctgaaaagtatatgtcagagttctggaatatgtctttagccaagaattttattcacttaaatttgtttacaacttgtataaagcaaaaaagaatgtgtgtaactatagtgaacgcatagttttgcttatattatgtgatgtttgccaaaaaaagaataaaaaatgaatgaattaaatcaaaaaaaaaaaaaaaaaaaaaaaaaa

SEQ ID NO: 288944 - DNA, 1000 bp, Homo Sapiens
caagagaagaaaagaccaggattagggacagagggcggcttcagatgcacattctagctggtataatgggcgttctgaagggcgtagttatagaagtagaagtaggagccgagataaatcccataggcataaaagggcccgacgctcccgggaggggagttcttcgaatcccagtgaccgttggcgtcactgaagacttcagctgcacagtagatttggaaataattatgttttttaaatgcagtcaaattcagttgggtggttactatttttgtatctaaaacttctggggctggattcttttaatcccttgactatttagagtcattgggagggctgcagtttcaacagctagatatcctggatattgtttgcaccatccattgtccctgtaccagagtatgtatcctgaactttggttcataaatatggctcttgaacccatagaccccagttgaagatggaattttcaggaaagggaaaatactagataattctagaattctagtcttcgtgttagatgtttatagcccagcatcttgggacctttccagttactaggtttggacagcttgatgtgaacgaatgggataggatttttaaaatcagccagctccatgcccaaaccttcctgtttgcagaactttttaatgtcttttctttttcattaaaacttttttgttcgatatgcctctttccacattttttccttgcaatgtatttattatttatttgtatttaggtgaaattcacataacataaagttaaccattttaaagggaacaattcagtggcatttggtactgaacatccacagtgttgtgtaaccattgcctctgtctagttccaaaacatttttttatcatcccaaaatgaaaccctgtagccattaaacaagagctccccgtttcctccctcctccctgtccctagcaaccaccagtggacttcctgtttatgggtttgcctattctggatctttcataaaaatggaattacac

SEQ ID NO: 288945 - DNA, 1000 bp, Homo Sapiens; identical to SEQ ID NO: 222556

SEQ ID NO: 288946 - DNA, 1000 bp, Homo Sapiens; identical to SEQ ID NO: 117311

SEQ ID NO: 288947 - DNA, 1000 bp, Homo Sapiens; identical to SEQ ID NO: 117313

SEQ ID NO: 288948 - DNA, 1000 bp, Homo Sapiens; identical to SEQ ID NO: 222557

SEQ ID NO: 288949 - DNA, 1000 bp, Homo Sapiens
ccacaggacaccgcaccctgaaggtcctcagggaccagatgaggagggatccagagggtgcccagatcctgcaggagcgtccccggatttcgacatccaccctcgacctgggcaagctccagagcctgccggaaggctccctcggtcgcgagtatctccgtttcctggatgtgaacagggtctccccagacacccgagcacccacccgcttcgtggatgatgaggagctagcgtatgtaattcagcggtaccgggaggtgcacgacatgcttcacaccctgctggggatgcccaccaacatcctgggggagatcgtggtgaaatggtttgaggctgtccagactggcctgcccatgtgcatcctgggtgcattctttggaccgatccgacttggcgctcagagcctgcaagtgctggtctcggagttgatcccatgggccgttcagaacgggcgcagagcccattgtgtcctcaacctgtactatgagcggcgctgggagcagtccctgagggctctgcgggaggagctgggcattacagcaccacccatgcacgtccagggcttggcctgagctcctgagccagcggggcctggcctacctcccccatcccctgcttcccttggaggcagagggctcccttgactacctttgttcctcttctttgaacactgacccttggacaacatttatcataatttgtcataaccactgctgagtggccttgaggacgaaccccgcagggagcaagcagtacagtggcattcccagggggaccagcagctacccaaggagaaccatgcatgaacagtatcagtcgtctgggctcatgctgggattgtgcagtgctcctgttgcaactcctcccagccagccaggtttgctgggggccaggctgggtgtcctcacaggagtgagggctacacccaattccaaaagcctgagaagagagaagtggagggggaggcgagtgtgtgaataaaggctcccatcaggtcaaa

SEQ ID NO: 288950 - DNA, 1000 bp, Homo Sapiens
cggatccggcgttctccactgatcttttccaaggctgtacagacatggcggcggcttttcggaaggcggctaagtcccggcagcgggaacacagagagcgaagcgagcctggctttcgaaaacatctgggcctgctggagaaaaagaaagattacaaacttcgtgcagatgactaccgtaaaaaacaagaatacctcaaagctcttcggaagaaggctcttgaaaaaaatccagatgaattctactacaaaatgactcgggttaaactccaggatggagtacatattattaaggagactaaggaagaagtaaccccagaacaactaaagctgatgagaactcaggacgtcaaatatatagaaatgaagagggttgcagaagctaagaaaatcgaaagactaaaatcagagctccatctgctggatttccaggggaagcaacagaacaagcatgtgttcttttttgacaccaaaaaggaagttgaacagtttgatgtcgcaactcacctgcaaacagccccggagctagtcgacagagtctttaataggcccaggatagagaccttgcagaaagaaaaagtgaaaggagttaccaatcagactggacttaagcgaatagctaaagaaaggcaaaagcagtataactgcctgacacagcggattgaacgagagaagaaattgttcgttattgctcagaaaattcaaacacgcaaagatcttatggataaaactcagaaagtgaaggtgaagaaagaaacggtgaactccccagctatttataaatttcagagtcgtcgaaaacgttgacgtgttatagataagccttgtcattctgtatcaaaaatctgttgtcgttttctagtaacttcaaattccattactccaaatggcatggttttccggtttgtaaccataactaaattgtcagtctgacatttaatgtctttctatggacaacattaaatctccctcccttctgtaattgtttttggattgtgaaa

SEQ ID NO: 288951 - DNA, 1000 bp, Homo Sapiens
actattcggtgaaaaccaacaagagtacaaaacagcaggctttggaagtgataaagcagttaaaagagaaaatgaagatagaacgtgctcacatgaggcttcggttcatccttccagtcaatgaaggcaagaagctgaaagaaaagctcaagccactgatcaaggtcatagaaagtgaagattatggccaacagttagaaatcgtatgtctgattgacccgggctgcttccgagaaattgatgagctaataaaaaaggaaactaaaggcaaaggttctttggaagtactcaatctgaaagatgtagaagaaggagatgagaaatttgaatgacacccatcaatctcttcacctctaaaacactaaagtgtttccgtttccgacggcactgtttcatgtctgtggtctgccaaatacttgcttaaactatttgacattttctatctttgtgttaacagtggacacagcaaggctttcctacataagtataataatgtgggaatgatttggttttaattataaactggggtctaaatcctaaagcaaaattgaaactccaagatgcaaagtccagagtggcattttgctactctgtctcatgccttgatagctttccaaaatgaaagttacttgaggcagctcttgtgggtgaaaagttatttgtacagtagagtaagattattaggggtatgtctatacaacaaaagggggggtctttcctaaaaaagaaaacatatgatgcttcatttctacttaatggaacttgtgttctgagggtcattatggtatcgtaatgtaaagcttggatgatgttcctgattatctgagaaacagatatagaaaaattgtgccggacttacctttcattgaacatgctgccataacttagattattcttggttaaaaaataaaagtcacttatttctaattcttaaagtttataatatatattaatatagctaaaattgtatgtaatcaataaaaccactcttatgtttatt

SEQ ID NO: 288952 - DNA, 1000 bp, Homo Sapiens
tcaataagatccttgcctatgaatacccctcccttttgcgctgttaaatttgcaatgagaagcaaatttacagtaccataactaataaagcagggtacagatataaactactgcatcttttctataaaactgtgattaagaattctacctctcctgtatggctgttactgtactgtactctctgactccttacctaacaatgaatttgttacataatcttctacatgtatgatttgtgccactgatcttaaacctatgattcagtaacttcttaccatataaaaacgataattgctttatttggaaaagaatttaggaatactaaggacaattatttttatagacaaagtaaaaagacagatatttaagaggcataaccaaaaaagcaaaacttgtaaacagagtaaaaatctttaatatttctaaagacatactgtttatctgcttcatatgctttttttaatttcactattccatttctaaattaaagttatgctaaattgagtaagctgtttatcacttaacagctcattttgtctttttaaatatacaaattttaaaaatactacaatatttaactaaggcccaaccgatttccataatgtagcagttaccgtgttcacctcacactaaggcctagagtttgctctgatatgcatttggatgattaatgttatgctgttctttcatgtgaatgtcaagacatggagggtgtttgtaattttatggtaaaattaatccttcttacacataatggtgtcttaaaattgacaaaaaatgagcacttacagttgtatgtctactcaaatgaaaattctttatctgaaattttaaaagacattgattccgcatgtaaggatttttcatctgaagtacaataatgcacaatcagtgttgctcaaactgctttatacttataaacagccatcttaaataagcaacgtattgtgagtactgatatgtatataataaaaattatcaaagaaaaaaaaaaaaaaga

SEQ ID NO: 288953 - DNA, 1000 bp, Homo Sapiens
acttgggcctggagacagggaatggtggaggggttatcaacctcaatgcctttgaccccacactcccgaagacgatgacgcagttcctagagcagggagaggccaccctctcagtggcaagaagagccctggctgcccagttgccagtcctaccacggtcggaggtaaccttcctggctccagtcacacgaccagataaggtggtgtgtgtgggcatgaattatgtggaccactgcaaagaacagaacgtgcccgtgcccaaggagcccatcatcttcagcaagtttgccagctccatcgtggggccctatgatgaggtggtcctcccaccacagagccaggaggtagattgggaagtggagctggccgtggtcattggaaagaaaggcaagcacatcaaggccacagatgctatggcccacgtgggcggcttcactgtggctcatgacgtgagtgctcgtgactggcaaatgagacgtaatgggaaacaatggctgctgggaaaaaccttcgacaccttctgccctctgggccctgccttggtgaccaaggacagtgtagcagatccacacaacttaaagatctgctgccgagtgaatggggaagtggtccagagcggcaacaccaaccagatggtattcaagacagaggacctgatagcctgggtctcccagtttgttaccttttacccaggggatgtcatcctaactgggacccccccaggtgtcggtgtattcaggaaacctcctgtctttctcaagaagggggatgaagtccagtgtgagattgaagaactaggtgtcatcatcaacaaggtggtgtgatggctcctgcacaggccctgcacataggatgagggcatctgctcccactcagcctagcccagggaaaggcccagtgacaggtgtggacaggtgccagccctgcaagccgcctcttctcggtagaagggagaaggacagagctctcttcaataaattcgtcaggtcaaagcagcaaa

SEQ ID NO: 288954 - DNA, 840 bp, Homo Sapiens
ctctggcccaagatggtggcgcccagagcttcgctcttgctgctcccctgaggtgaactgaagccagcagccccgcatcatgtcaaagctcggccgggccgcccggggcctcaggaagcccgaggtcggcggtgtgatccgggcgatcgtgcgggcaggcctggccatgcccgggcccccactaggcccagtgctgggtcagagaggcgtttccatcaaccagttttgcaaggagttcaatgagaggacaaaggacatcaaggaaggcattcctctgcctaccaagattttagtgaagcctgacaggacatttgaaattaagattggacagcccactgtttcctacttcctgaaggcagcagctgggattgaaaagggggcccggcaaacagggaaagaggtggcaggcctggtgaccttgaagcatgtgtatgagattgcccgcatcaaagctcaggatgaggcatttgccctgcaggatgtacccctgtcgtctgttgtccgctccatcatcgggtctgcccgttctctgggcattcgcgtggtgaaggacctcagttcagaagagcttgcagctttccagaaggaacgagccatcttcctggctgctcagaaggaggcagatttggctgcccaagaagaagctgccaagaagtgacccttgccccaccaactcccagatttcaaaggaggtagttgcaaaagctgtgcccaaggggaggaaggaggtcacaccaatatgatgatggttttcatgactttgaatgatatatttttgtacatctagctgtatcgaggcatcaggcctgaataaacatcctttcttacccaaaaaaaaaa

SEQ ID NO: 288955 - DNA, 1000 bp, Homo Sapiens
aaaaagaaaagttaaagcaagaaagactagagaaaataaaacagcgtgataagaggctggagtgggaaatgatgtgcagagtaaagccagatgttgtccaagacaaagagacagagagaaatcttcagagaattgcaacaaggggtgtggtgcaattatttaatgctgttcagaaacatcaaaagaatgttgatgaaaaggttaaggaagctggaagttctatgagaaagcgtgctaagttgatatcaactgtttccaagaaagatttcatcagtgttttgagagggatggatggaagtacaaatgagactgcttcaagcaggaagaaaccaaaagccaaacagactgaagtgaaatcagaagaaggcccaggttggacgatcctacgtgatgatttcatgatgggagcatctatgaaagactgggacaaggaaagtgatgggccagatgacagcagaccagaatctgcaagtgactctgatacataaagcatcataggaaatacaattgcagtcgttttattttttctagaaaaatatgtcatcctctgatagttggggaattataaggataccatttgtaagaaagccaaaagacttttgccagatttcatatttccccttttcatgtacactttatatatacttcattaaaattatattttaaacccttgtataattttaagcattgttcctcagaacatttgtaaaaggatatatttctgcttgaccagcgagatgtgcattttgccaggatcatattggtcatgtctattggtgtattatttcagtatcaccaatgttttcagaaatacagtactaattcatcattaaactctttgaagttaatatttttctgccttctaacttatagactcaactatgtatctgtagtttttgggaatggttggtgttttttgctttgtgttgggaagttattgagaaaacctatataataaaatttaaaattataaaaaaaaaaaaaaaaaaaaaaaaaaaaa

SEQ ID NO: 288956 - DNA, 1000 bp, Homo Sapiens; identical to SEQ ID NO: 117316

SEQ ID NO: 288957 - DNA, 1000 bp, Homo Sapiens; identical to SEQ ID NO: 117317

SEQ ID NO: 288958 - DNA, 1000 bp, Homo Sapiens
gattactggcgtgagccaccactcctagccttaatgcatattcttaaatatacaaaggtagatttgttatgaaaattgctttggggctctaataacctaccttttaagaatgagaaactgctgggcttaagggagttcagtatgaatcaagattgaaccattcaaatgtggctgtgatttctgcatatatcatagatgggatccttctgagaatactggaatagggaattaggacaccaagccaattcagctgtgaaccttattcttgtacttttctttcttgctggtaattttatggagcaggttaagaaggctgctctgtgttaggataaactgtataccaataatgttgacaacctgtaatgagtgttgcattttacttcttgtatcttttccttcctaccttgatgccagtaatctataagggatctttatagtttgaatgtatttgaataacttcagtatactttagttctacttttttatttgactcacaaccattcttaggtctcaagtattcccatgtgttttaaaagcctgaagtcagtgagatgaaattcaacatcaagaatttgaagtaacttgtaaggaaaaataatataaagataccattggggcagtggctcacacctgtaatctcagcactttgggaggctgaggtggaaggatcacttgaagccagagtttgagaccagcctgtgcaacacagcaagaccccgtctctacaaaaacttaaaaaattagctggctgtggtgttgctcacccatagttccagctactcgggaagctgaggcagtaagatcacttgagcccaggaggccgatgctgcagtgaactgtgattgttccactacagtccagcctgggtgacagagaaaagaaaaagaaaacattacataatttggctagagcataataatttgattttctggtttttgaaaatttgagttgcaataaaaggatatttcagtgtgcgatttcaaaaaaaaaaaaaaaaaaa

SEQ ID NO: 288959 - DNA, 1000 bp, Homo Sapiens
ttcggaacgatttggaacgaaaggaagtggaagaaacgcggaaccatggccgctgtggttgctgtttgcggtggtctagggaggaagaagttgacacacttggtaacggctgctgtcagccttacacatcccgggactcacacggtgctttggagaagaggttgttcacaacaggtatccagcaatgaggacctgcccatttcaatggaaaatccttataaagaacctcttaagaaatgtatcttgtgtggaaagcatgtagattataagaatgtacagcttttgtcccagtttgtttctccatttactggatgcatttatggaaggcacattacaggtctttgtgggaagaaacagaaagaaatcacaaaagcaattaagagagctcaaataatggggtttatgccagttacatacaaggatcctgcatatctcaaggaccctaaagtttgtaacatcagatatcgggaataaattctatcacgttaccactaataaacttattttacagtaagtggttgtatgatgccaatactgactcaaaccaacctttggatagaaaagtgtttgaggagtgaggtaaagaatgacacttccccttcataccaatgtccattaagcagattgcttatttaaaatgttaacactcatcacattttatctatgttgaataaaagtggttctgtgtgattgtcatttatatctgatccccaaatagctcatacaataatccattcaatagaatggaattaaaactgttcagaatgattttccaactagcaaatataagtatgcctggttaagatatcttccctttgtagaaatgttacattgggatggatagtggtgctgtcacagaaggacaaaatattcctagacgagtctatcctcaaaccagtagtgtcttttacatgaagagatgatttacacctaatagacattgaatatgatagacatacatgtatatatgtatcagttctgagttccactggcctatccc

SEQ ID NO: 288960 - DNA, 527 bp, Homo Sapiens
acgcttgatccccggccgcggggccaggaagtcggagtttgagccccggaggcagagcggctgccatggccaagtacctggcccagatcattgtgatgggcgtgcaggtggtgggcagggcctttgcacgggccttgcggcaggagtttgcagccagccgggccgcagctgatgcccgaggacgcgctggacaccggtctgcagccgcttccaacctctccggcctcagcctccaggaggcacagcagattctcaacgtgtccaagctgagccctgaggaggtccagaagaactatgaacacttatttaaggtgaatgataaatccgtgggtggctccttctacctgcagtcaaaggtggtccgcgcaaaggagcgcctggatgaggaactcaaaatccaggcccaggaggacagagaaaaagggcagatgccccatacgtgactgctcggctccccccgcccaccccgccgcctctaatttatagcttggtaataaatttcttttctgcaaaaaaaaaaaaaaaaa

SEQ ID NO: 288961 - DNA, 1000 bp, Homo Sapiens
ttaaatctcttaatacacagagaactcccaatcttgctcatctaaataaggaaagacttggtgtatagtgtgatggtttagtcttaaggattaagacatttttggtacttgcatttgacttacgatgtatctgtgaaaatgggatgatattgacaaatggagactcctacctcaatagttaatggaataataagaggctactgttgtgtctaatgttcttcaaaaaagtaatatcctcacttggagagtgtcaaatacatactttgaggattgactttatataaggtgccctgtagaactctgttacacatatttttgacccatattatttacaatgtcttgataattctacctttttagagcaagaatagtatctgctaatgtaagggacatctgtatttaactcctttgtagacatgaatttctatcaaaatgttctttgcactgtaacagagattccttttttcaataatcttaattcaaaagcattattagacttgaaagggtttgataatctcccagtccttagtaaagattgagagaggctggagcagttttcagttttaaatgagtctgcagttaatatcaaatgtgagtttgggactgcctggcaacatttatatttcttattcagaacccttgatgagactatttttaaacatactagtctgctgatagaaagcactatacatcctattgtttctttctttccaaaatcagccttctgtctgtaacaaaaatgtactttatagagatggaggaaaaggtctaatactacatagccttaagtgtttctgtcattgttcaagtgtattttctgtaacagaaacatatttggaatgtttttcttttccccttataaattgtaattcctgaaatactgctgctttaaaaagtcccactgtcagattatattatctaacaattgaatattgtaaatatacttgtcttacctctcaataaaagggtacttttctatcaaaaaaaaaaaaaaaaaaaa

SEQ ID NO: 288962 - DNA, 1000 bp, Homo Sapiens; identical to SEQ ID NO: 117318

SEQ ID NO: 288963 - DNA, 812 bp, Homo Sapiens
ggcgcagtggccgaggctggagcggcaggcggatcgccccgaccctcactcctggcgtctgagtctctggcgtaccatgctgagtgggcggctggtcctgggtctggtctccatggctggccgcgtttgtttgtgccagggcagcgcgggatccggggccatcggtccggtggaggccgccattcgcacgaagttggaggaggccctgagccccgaggtgctagagcttcgcaacgagagcggtggccacgcggtcccgcctggcagtgagactcacttccgcgtggctgtggtgagctctcgtttcgagggactgagccccctacaacgacaccggctggtccacgcagcgctggccgaggagctgggaggtccggtccatgcgctggccatccaggcacggacccccgcccagtggagagagaactctcagctggacactagccccccatgcctgggtgggaacaagaaaactctaggaaccccctgaaccccaagagagggaggacccaggatccgaatgggctgggtgagcacgaattaccgaggccttccctttgatacagtccaggatttgtaagggatgaagacccctgggccccattctgttggggtccatacatactctccgaagatagcaacttgcttcaggtcaaagtgaacccgagaaaagagaagaatcactcactactgctcttgccctggactattcaggaagggcagcccggatgttccatgttaaatcgtgacagaattgcaccagacctgatgagttggaaacaatcctatacattaaaagaaattacactaaa

SEQ ID NO: 288964 - DNA, 1000 bp, Homo Sapiens; identical to SEQ ID NO: 117319

SEQ ID NO: 288965 - DNA, 1000 bp, Homo Sapiens; identical to SEQ ID NO: 117320

SEQ ID NO: 288966 - DNA, 1000 bp, Homo Sapiens; identical to SEQ ID NO: 117321

SEQ ID NO: 288967 - DNA, 1000 bp, Homo Sapiens; identical to SEQ ID NO: 117322

SEQ ID NO: 288968 - DNA, 1000 bp, Homo Sapiens
gcgaggctttcgtgaaaagtcagagctcattaagcaccagaggtgtcaagtgacggtccccttggaggaatggtctttgcatctgactacttccttctgcaactgtgttcttccattagcttccatgacactctcctgctttatttttttctacatctctagcctttgctgtttcctctcctaccccacctttagattttactcagagttcagtctccagccctacaatctgagggacacctttaccaggtccccttcctaaccctccagtcccaaatccaagattctttaaccacactctaaaagttcttcagactcaggacttaaacatagccacgccaccttggccttcaatgacagggatctagcaatgctgcatcatcagccttccaataccaggtttaagggtattttaaacacagctcctcttaaatcctccaatctcagtacccagtgttttagccatgctcgggtggctaaattacatccaggaatggtgccagggcctttagccatttgtctctcctcacactccagcccatatggcccaggttctgacagtttgccttactcccttgggctggggctagccctacctgataccctgtgtcaatgagtgtaccttggagagctatccactcaggccccagtgcctctatttgctaagggactctgccacagaaaagaaggggagagatgttcatgtaacctcaaaatacttaggcttggttttgatgctagagaggaaaaaggacttggagagagagaaggaatggctggtccagaggcttttgtccactccctctcactggaagtggttgatctccagggaatccccaaggttagcctgcttaggggaagggctaggggtacctggaatgtaggatctcccccatgcctggcctaccaccctaatgtgtctggaattggtgggttcttggtcttgctgacttcaagaatgaagccgtggaccctcacggtgagtgttacaattcttaaa

SEQ ID NO: 288969 - DNA, 1000 bp, Homo Sapiens
tttatgcaaaagaaagtgctacaattcctaatcattttagacactttaggagggggtgaagttgtatgataaagcagatattttaattatttgttatctttttgtattgcaagaaatttcttgctagtgaatcaagaaaacatccaggttgacagtctaaaatggctactggtattttagttaattcaaaaatgaaacttttcagtgattcactttactaacattctatttgagaaggcttattggtaaagtttggggataaaggcattgcttaacttcttatataatttaggtataaattctgtgacatgctcttgagctttaccctagttgaacatacatgtgtagatttacacatactgtttcattctaaaatttagaaattgttcattaaatcccatttgaggtataagtcactcaggaagttaaaatatctctacacgtatatttttacattaaaaatacagtgttagcataaatccccttttcaggaagaacaaaaatgtcagtgcatagttagataaaatggtaaaatgttttactgaaagcatacttttttggaaaatagattcatgaagcctttaagtgctgcttctgtcagtcaaacgttaaaaactttaacattttcaaagtgcccagactgtgtacaaagacacatgtaatggagattgtacaggttgtttttttgtttgaacctttgaaagagtttaatcttaacgttttctaattttaaaattttaaaatcttgtttaacaaaagcttgtattaagatactgttttcatttcattacagaattgtttataaaagttcatttgttgaaaaataaggatcctttttaataccacagcatttgtactgttcctttttaatatactgaaaatataaaaggaaaaaaaaaaaaaaaaaaaaaaaaaaaaaaaaaaaaaaaaaaaaaaaaaaaaaaaaaaaaaaaaaaaaaaaaaaaaaaaaaaaaaaaaaaaaaaaaaaaaaaaaaaaaaa

SEQ ID NO: 288970 - DNA, 1000 bp, Homo Sapiens; identical to SEQ ID NO: 117323

SEQ ID NO: 288971 - DNA, 1000 bp, Homo Sapiens
atgtacagcttgcaagtagaagtctcaggcaacagattaaaccagcagtgactataaagctacaccttaatcaaaatggagatcacaacaccaaagttctgcagacagacccagccaccctgctccatttggttcaacaactggaacaagcattggaagagatgaagacaaatcactgtaggagagttgttcgcaacatcaagtagtaccagttttaaggttttaattcatttgaatcacttatgaattgatgatatacagcaattacttttcaaaattaattttttattaattcatgatgataaatacatagtattcctcagtatctattccaagatactgaggtcataatcagaagctaagctgggtgcagtggctcatgccagttatcccagcactttgggaggccgaggtgggcaaatcatgaggtcaggagattgagaccttcctggctaacatggtgaaaccccatctctactaaaaatataaaaaattagccaggtgtggtggcacgcatctatcagagtcccagctactcaggaggctgaggcaggagaatcgcttgaacctgggaggtggaggttgcagtgagctgagattgtgccactgcactccagcctgggtgacagagtgagactccatctcaaaaataataataataataataaagtaaaaataaaaataaaaaagtaatcagaagctaaagtaaagttcctttcctggtgctaactgtggtcttcttgacacattaagatgtattttgtattttaagagtctcatgctctaccgttggaactagccagatggccattattttgtattttaaatacataaataggattgaatcaactagaaatgaatctatatgttctgtatatatgaatgactatcttgtttttgctacttcttttgactgcttaattttattattttcatctttattgatcaaatttgaaaataaaattcacaatgtaatactactaaaaaaaaaaaaaaaaaa

SEQ ID NO: 288972 - DNA, 1000 bp, Homo Sapiens
ttttaaccctggtttacccgtggaagtgcccctgtggctggcgattaacctgaaacaaagacagaaatgtcgcctgctccctccagagtggatggatgtagaaaagttggagaagatgagggatcatgaacgaaaggaagaaacttttaccccaatgcccagcccttactacatggaacttacgaagctcctgttaaatcatgcttcagacaacatcccgaaggcagacgaaatccggaccctggtcaaggatatgtgggacactcgtatagccaaactccgagtgtctgctgacagctttgtgagacagcaggaggcacatgccaagctggataacttgaccttgatggagatcaacaccagcgggactttcctcacacaagcgctcaaccacatgtacaaactccgcacgaacctccagcctctggagagtactcagtctcaggacttctagagaaaggcctggtgcaggcggcttgctgggggatgtgagcgctcaggatgtgatgaggtactcgtggttctggagctctagaaacacttctgatgcatgaaaaatgtgtgatggtgcaaggaatggattcaggatgttgttggagaaacaagtttgtgattagtccttaaaacttagctccctgggacattcttcaattccacatctgtttctagaaaccagccctttttccccccacttttgagaaataaaaaagccttaggtaaataagtcattctccctagcagagccacttgggtctcctgcatggaagccgtcacacttgggcaggtgttcagtgactggtaggtgtagatacagcaggagtggccatgtggtccacggctttttaccccttcttgatcctgatttcttgggctgaatttagactctctcacagaggtggctcacagagaaggatggcagatggtgcagccaacaatgctgaccggtgcttatcctctaagccctgatccacaataaaaatggacccaactcaaaaaaaaa

SEQ ID NO: 288973 - DNA, 1000 bp, Homo Sapiens; identical to SEQ ID NO: 222561

SEQ ID NO: 288974 - DNA, 1000 bp, Homo Sapiens; identical to SEQ ID NO: 117324

SEQ ID NO: 288975 - DNA, 988 bp, Homo Sapiens; identical to SEQ ID NO: 30199

SEQ ID NO: 288976 - DNA, 1000 bp, Homo Sapiens
ttggtttggctgctaaacttatggagttactagaggagatttcagaaagaaagggtggattttttgtggatctctttgtaagagtatctaaccaagttgcagttaacatgtacaagcagttgggctacagtgtatataggacggtcatagagtactattcggccagcaacggggagcctgatgaggacgcttatgatatgaggaaagcactttccagggatactgagaagaaatccatcataccattacctcatcctgtgaggcctgaagacattgaataaccctgggcagtggttcttaggcagatactctagatgctttatggacaatattattttcattggatgattctggagctctattaggagaaaagtaatcattttaggtcttaaagacttcaagaaaatacaggttatcaatttattttaaatctcattgtttccagttagcaatatcatacctattaaagctgttcattgtaacaaaattcaatcaaaaaggcagctaggtcagaaggaaacataccactctcatggttcatagtattcactgtatgtatgctagggaaaagacttgctccagtctcctcctcagttctgtgcctgagaaccactgctgcatatatttgtttttaaattttgtattgaactgttaattgaagctttaaaagcatatatgaaatgtataaatctaagatgtataatacattattgactctatgaatgttttctgaagtttgttagtcatttgtaaaactaaatcagattgtaatcccagtactttgggaggccaaggcaggctgattgcttgaggtcaggagtttgagaccagcctggccaaaatctatactaaaaaaaatacaaaaattagctgggcatcccagctatgcagaagctgaagcacaagaattgcttgaaccctggaggtggaggttgcagtgagctgagatcgtcccactgcactccagcccgggcaacagagtaagaccctgcctcaagaa

SEQ ID NO: 288977 - DNA, 1000 bp, Homo Sapiens; identical to SEQ ID NO: 222562

SEQ ID NO: 288978 - DNA, 1000 bp, Homo Sapiens; identical to SEQ ID NO: 117325

SEQ ID NO: 288979 - DNA, 1000 bp, Homo Sapiens; identical to SEQ ID NO: 117326

SEQ ID NO: 288980 - DNA, 1000 bp, Homo Sapiens; identical to SEQ ID NO: 117328

SEQ ID NO: 288981 - DNA, 1000 bp, Homo Sapiens; identical to SEQ ID NO: 117329

SEQ ID NO: 288982 - DNA, 1000 bp, Homo Sapiens; identical to SEQ ID NO: 222565

SEQ ID NO: 288983 - DNA, 1000 bp, Homo Sapiens; identical to SEQ ID NO: 118626

SEQ ID NO: 288984 - DNA, 1000 bp, Homo Sapiens
ggaaggaagttgaaatgcaaattttgtcataaaagaggagccaccgtgggatgtgatttaaaaaactgtaacaagaattaccactttttctgtgccaagaaggacgacgcagttccacagtctgatggagttcgaggaatttataaactgctttgccagcaacatgctcaattcccgatcatcgctcaaagtgctaaattttcaggagtgaaaagaaaaagaggaaggaagaaacccctctcaggcaatcatgtacagccacccgaaacaatgaaatgtaatacattcataagacaagtgaaagaagagcatggcagacacacagatgcaactgtgaaagttccttttcttaagaaatgcaagggaagcaggacttcttaattacttacttgaagaaatattagacaaagttcattcaattccagaaaaactcatggatgagacttacttcagaatcagactatgaagaaatcgggagtgcactttttgactgtagattgttcgaagacacatttgtaaattttcaagcagcaatagagaaaaaaattcatgcatctcaacaaaggtggcagcagttgaaggaagagattgagctacttcaggacttaaaacaaaccttgtgctcttttcaagaaaatagagatcttatgtcaagttctacatcaatatcatccctgtcttattagggattaccatttcctaagccaagagtcatgtcaaattgcaatcaggctcaaaaccagagaccaggctgtgaaatccacacatctttagaactagtcgtctcctcttggcctcagcagctcttccctgttcttactggttgacattttgatcactctttgcacactcttgtgttttttgctcactgtcacactcccagcacctagtatgctcagtaaatgtttgtggaataagtgcataaaatgttcttaacctttgattctacttacagcccatgatagcctcttagatataataaatttggattatactaaaa

SEQ ID NO: 288985 - DNA, 1000 bp, Homo Sapiens
attggtagcatcactgttactgataatttatcatatacacttgtcaatttttcctttgttatcttaaaagatctgccttagcaatggctcctttttcatgttgatctttaaattttcccacaccataagagaggagcaaaggaaattaccagtttagactaagttacagtatgtgtttcataagtgattaaagctatatcattcccagttattagttaacacaaattcagccacattctgagtattgtttgttcacctttcagacttggtgatactggacatgtcagtgtaaataacactaaggttaggatcttctaagtgtataactgtctcctaagcccatcactgtggcacactgtagagtgagcttatagtttaattgagatatttatcttgtggaaatattaaaaagcctatgcttgtgtaagtgaaaaaaaatcacattcatttgtttaaaaatgtaaagctattttgtagaggctcagtacttttccaatgcactgttgtatgaatgcattaaaaattgtaaagtaccatgcttagaactgagaaaactgctttttgtgagccaacatagtaacaaacacaccaaacaaagtacaaagctgcttttgtaagtgtgtagatgtcaagagcagaacatatctataatatttaatgtgtgaacagctactgtgacatgcaaaggaaaggacagtgcagaattaaaccgtgttgaagaccagtggaaattgtataatttaacttggatttaggcaggaagtgaaatatgggaggagtaaagaaaactgaagaatttaaagttttcctgaagacagtaataatgcagacacaaactggtttcatatggtgagagcagccacagcagcagcttgacctggtattctacctgagtagatgaagcagaagatcagcaagtttggcagagttttggtttaagaaaaacaaaccactactacctagcacaagttaaatttacaagtctgctcctcaaaaatga

SEQ ID NO: 288986 - DNA, 1000 bp, Homo Sapiens; identical to SEQ ID NO: 117330

SEQ ID NO: 288987 - DNA, 1000 bp, Homo Sapiens
agccactaataacattgggctaatatctgctgtgcttctctgacaggtagtcatgaaaatcaaatgatgcaaaatatatacaagcactttgtaaattgtaaaatgatacaaaatttaaagtttatagagccagttacaaaatcctattagtcatatatttatagattgtgttcacagcaatcatttaaccacaaataaaatatcccttgatgatactgccataatgatatgtccattattagattatgttacatgacaaagttgaaggaatttggcagatgcagttaaggttcctaaacaactcactttgagactgttgaaagggcctgacctaatccaagtgaaccccttgcaagaagaattctccttgtaagccttgaagaagtatgtgagagggccacattggctaaaacctaaaggtggcctctaggagatgagacctaccttccagttgtcagcaagcaggaaaaaaaaattgggacctcagttgcaaccacaaggaactgaattctgccaaaaatctgagtcagcttagaagagtactccaagcttcagatgataaccacagcctgggctgacacctggatttcagctttgcatgatcctcagtatgagaatctatctgttctgtgctggacttctaatatatagaactgtgagataatgggtcacattggctggatgtggtggctcatacctgtaaatcccagcactttgggaggccgaggcaggcagatcacctgaggtcaagagttcaagaccggcctggccaacatggtgaaaccccgtctctactaaaaatacaaaaattagacgagcgtggtggtggacacctgtagtcccagctgcttgggaggctgaggcaggagactagctggaaccagggaggtagaggttgcagtgagctgagatcgtgccactgcactccagcctgggtgacagagtgagactccatcataaataaataaataaataaatgggtcccattaagcctttaaaa

SEQ ID NO: 288988 - DNA, 598 bp, Homo Sapiens; identical to SEQ ID NO: 117331

SEQ ID NO: 288989 - DNA, 1000 bp, Homo Sapiens; identical to SEQ ID NO: 117333

SEQ ID NO: 288990 - DNA, 1000 bp, Homo Sapiens; identical to SEQ ID NO: 117334

SEQ ID NO: 288991 - DNA, 1000 bp, Homo Sapiens
ggatgaccctggcctggcaaggtggacccctggcaaggaggagtccctcaacttatgtcactgtgcagagctcggctgcaggacccagggggtctgttccttccccgcgatgccgcaggcccccattgacggcaggatcgctgactgccgcctgctgtgggattacgtgtatcagctgctccttgatacccgatatgagccctacatcaagtgggaagacaaggacgccaagatcttccgagttgtggatccaaatgggctcgccagactctggggaaatcacaagaaccgggtgaacatgacctacgagaagatgtctcgtgccctgcgccactattataagcttaatatcattaagaaggaaccggggcagaaactcctgttcagatttctaaagactccgggaaagatggtccaggacaagcacagccacctggagccgctggagagccaggagcaggacagaatagagttcaaggacaagaggccagaaatctctccgtgaggggcaggtggactccaggcacccggtaccgatggggcagggaccgagtctcccatgaaggcagactcctcctcccagcagagcagcaggatccccagccagactctgtacccacaggattacagccattgcttgggaaggctgggaggcctcccatccaggacactgggggcaggagtgtcatcttttgggcagggcaatcctggggctaaatgaggtacaggggaatggactctcccctactgcacccctgggagaggaagccaggcaccgatagagcacccagccccacccctgtaaatggaatttaccagatgaagggaatgaagtccctcactgagcctcagatttcctcacctgtgaaatgggctgaggcaggaaatgggaaaaagtgttagtgcttccaggcggcactgacagcctcagtaacaataaaaacaatggtagctgaaaaaaaaaaaaaaaaaaaaaaaaaaaaaaaaaaaaaaaaaaaaa

SEQ ID NO: 288992 - DNA, 1000 bp, Homo Sapiens; identical to SEQ ID NO: 117335

SEQ ID NO: 288993 - DNA, 1000 bp, Homo Sapiens
gcaggtggggctggaggtggaagcagtggtttaccaccatccaccaaaaagtcaggccagaagcctgtcttagatgttcatgcagaactagacagaattacacgaaaaccagttacagtttctcccacaacacctacatctcctacggaaggagaagcttcttgaagataccaaataaagccatttattctgttttctgggataatgtaaacatgcctctgccttttccttcaaaagtgggaattagaaagctggagtgcttcttcagatggactaaatttatgtcgtgtgtgtgtgtgtgtgtgtgtgtggttacccattttttagaaggagccgtacagaagaaaaattattctacattatgtaggattgctgtttgcattgccattttgcataagaaagtaatttttgattttgaaaatctcaaaacttttagatctgaaatacagccatgtgatcgatcatattctaaaggctatttaaaacatgtaaaaggatttggggacggcagaaaacatgcagtttgggcattgactgacttggaagtctaagcttattttagttataactattaaaatcatttttaaaaatttgttagttttgctgacagagaaaaatcgtcagttgtcagattttgcacaccacaataaatgtaccaccacacacggaatatgctaagaaaactatcagatagcgtttgatacactagtcattgtctcaatcactgatcctgtaagttgtcatcaaaatatgatttagaaatattggccaaggtgttgctttaactgaggagaaaagaaagcacactgcctaaatgtgtaaaagaaaaatgcagaggttattaaaatgtaaagaagtaacaatctttggatttgtctatacatatatatatatatatcgctttgccttaatatacccccttttttgtttgtgactttcaactgtaatcagttaataaagtatttattctctgcattcaggttcaaaaaaaaaaaaaaaa

SEQ ID NO: 288994 - DNA, 1000 bp, Homo Sapiens; identical to SEQ ID NO: 118925

SEQ ID NO: 288995 - DNA, 1000 bp, Homo Sapiens; identical to SEQ ID NO: 117336

SEQ ID NO: 288996 - DNA, 1000 bp, Homo Sapiens; identical to SEQ ID NO: 117338

SEQ ID NO: 288997 - DNA, 1000 bp, Homo Sapiens
ctccaagcttcagcagtttgggggctcctcggcagctggcggcgctctgccctgggcccgaggaggcagtgggggaggcggagacagccaccacgggggagccagctatgtccccgagaggacctcctccctgcagcggcagagactctccgacgactcccagtcctcactcctctccaagcctgtcagcagcctgtttcagaactggcccaaaccacctctgccgccactccccaccggaacaggggtctcccctacagccgctgcggccccaggggccacctcaccctcagcctcctcctcctccacgtccacccgccacctccagggcgtggagttcgagatgcggccccctctgctccgccgggcccccagcccctcgctgctgcccgcctcggagcacaaggtcagccctgcgcccaggccctcgtccctgcccatcctgccttccggacccctctacccaggcctctttgacatccgtggctccccaactggaggggcaggaggctcggctgaccccttcgccccagtctttgtgccgccacacccggggatatccggggggctcgggggagccttgtcaggggcctcgcgctccctctcaccgacccgcctgctctcgctgcccccggacaagccgtttggcgctaaacctctggggttctggaccaagttcgacgtggctgattggctggagtggctgggtttggcggagcaccgagcccagttcctggaccacgagatcgatggctcccacctgcccgccttgaccaaggaggactacgtcgatctaggtgtgaccagggtgggccaccgcatgaacatcgaccgggctctcaaattcttcctggagaggtgatggctggcctggacggaccagccccgtccacagaactcttgagcctgctggcctcttgacctctgacccctgactgtcattctctccccgggccagggactctgttcaaactgcgccctgccctcatcttccaaggcc

SEQ ID NO: 288998 - DNA, 1000 bp, Homo Sapiens; identical to SEQ ID NO: 117339

SEQ ID NO: 288999 - DNA, 1000 bp, Homo Sapiens; identical to SEQ ID NO: 222569

SEQ ID NO: 289000 - DNA, 1000 bp, Homo Sapiens; identical to SEQ ID NO: 117340

SEQ ID NO: 289001 - DNA, 1000 bp, Homo Sapiens; identical to SEQ ID NO: 222570

SEQ ID NO: 289002 - DNA, 1000 bp, Homo Sapiens
cccaccaggggctggaagccctcctgagccacagacgtggcattgtgtttctagagacctcagagagaatggagccaccccatttggtctcctgttccgtagagtctgctgccaagatttatcctgagtggcctgtggtgttctttatgaagggtcttactgattccacaccgatgccctcaaactccacatacccagctttttccttcctgtcagcaatagacaacgttttcctcttccctttggatatgaaaaggctgcttgaagacacaccattgttttcatggtacaatcaaatcaacgccagcgcagagagaaactggctccacatcagctcggatgcatcccgcctggccatcatctggaaatacggtggcatctacatggacaccgatgtcatctccatcaggcccatccctgaggagaactttttggctgcgcaggcttctcggtactctagtaatggaatatttgggttcctcccccaccacccctttttgtgggaatgcatggaaaactttgttgaacactataattcagccatttggggcaaccaaggccctgagttgatgacaaggatgttgagggtatggtgtaaacttgaagacttccaggaggtgagcgacctcaggtgtctgaacatatccttcttacacccccaaagattttaccccatctcctatcgagagtggaggcgctactatgaagtgtgggatacagagccaagcttcaatgtctcttatgccctgcatttgtggaaccacatgaaccaggaggggcgggctgtgattagaggaagcaacacactggtggaaaatctctatcgcaagcactgtcccaggacttacagggacctgattaaaggcccagaggggtcagtgactggggagctgggtccaggtaacaaataaagctaacactcgtttgctgctgctgcagtgtggaaatggaaaaaaaaaaaaaaaaaaaaaaaaaaaaaaaaaaaaaaaaaaaaaaaaaa

SEQ ID NO: 289003 - DNA, 1000 bp, Homo Sapiens
tacaatttaaggaggatggcacttgggcaccgatgagatcaaaaaaggaagtacaggaagtttctgcctcttacaatggagtcgatggatgcttgagctccacattggagcatcaggtagcgtctcaccaccagtcctcaaataaaaacaagaaagtagaagtgattgacctaaccatagacagttcatctgatgaagaggaagaagagccatctgccaagaggacctgtccttccctatctcccacatcaccactaaataataaaggcattttaagtcttccacatcaagcatctccagtatcccgcaccccaagccttcctgctgtagacacaagctacattaatacctccctcatccaagactataggcatcctttccacatgacacccatgccttacgacttacaaggattagatttctttcctttcttatcaggagacaatcagcattacaacacctccttgcttgccgctgcagcagcagcagtttcagatgatcaagacctcctacactcgtctcggtttttcccgtatacctcctcacagatgtttcttgatcagttaagtgcaggaggcagtacttctctgccaaccaccaatggaagcagtagtggcagtaacagcagcctggtttcttccaacagcctaagggaaagccatagccacaccgtcacaaacaggagcagcacggacacggcatccatctttggcatcataccagacattatttcattggactgattcccaggccctgctgctcccatccccaccccagatcgaatgaacttggcagaaagaagagaactttgtgctctgttttaccttactctgtttagaaaagtatacaagcgtgttttttttcctttttttagggaaaaaattaaaagaaatgtacagagaacaaaactatattttcagttttacttttgtatataaatctaagactgcctgtgtgataaaacacttgtttaaaaaaaaaaaaaaaaaaaaaaaaaaaa

SEQ ID NO: 289004 - DNA, 1000 bp, Homo Sapiens; identical to SEQ ID NO: 117341

SEQ ID NO: 289005 - DNA, 1000 bp, Homo Sapiens; identical to SEQ ID NO: 222572

SEQ ID NO: 289006 - DNA, 1000 bp, Homo Sapiens; identical to SEQ ID NO: 117342

SEQ ID NO: 289007 - DNA, 1000 bp, Homo Sapiens; identical to SEQ ID NO: 222573

SEQ ID NO: 289008 - DNA, 887 bp, Homo Sapiens
gttgcctaaacctctgccacccacctgtgaacttcactttgccacagggaggcactgaactgaaaaactgccttgtaagaggtgtcgcccctctgtctactccctttcttatatcaagaggggaaaaacacgtaactacctctacccgatctggtcaccatacgcctattacctttactgttacaagtaccggatcactctccgggagaagatgctgcctcgttgttataaaagcatcacttataaggaagaggaggacttgacactccagccccgttcctgcctccagtgctcctgagtccctagtaggcctccaggagggcaaaagcaccgagcagggtaaccacgaccagcttaaagaactgtattcggctgggaacttgacggtgctggctactgaccccctgctccaccaggacccagtacagttagactttcacttccgccttacctcccagacctctgcccattggcacggccttctctgtgaccgtcgactcttcctggatatcccatatcaggccttggatcaaggcaaccgggaaagtttgactgcaaccctggagtacgtggaagagaagacaaatgtggactctgtgtttgtgaacttccagaatgatcggaacgacagaggtgccctgctgcgggccttcagctacatgggctttgaggtggtcagaccagatcaccctgccctccctcccttggacaatgtcatctttatggtgtatccccttgaaagggatgttggccacctgcccagtgagcctccttgaacatgcttattccaacgctttgaggggctggaagccttgacacatggaatcaggggcccgggatgtgattcaggacactttccatcctaggaataaagggtagtgccatcc

SEQ ID NO: 289009 - DNA, 1000 bp, Homo Sapiens
ttccaggtcatgttcttcttctctgcattggtgctcactttgtgttttactgttcatctgtgcagtatctctgaagccccacttacagaggttgcaaagggcattcccccacagcaaacccctcaggaccctccattgtcatcagatggaatgtacgagtatggttctatcgagaaagttaaaaatggttacgtaaatccagagctggcaatgcagggagcaaaaaacaaaaatcatgctgaacagactcgcagggcaatgacattaaagtcactgctgagagcactggtgaacatgcctcctcactaccgctacctttgcatcagccacctcattggatggacggccttcctgtccaacatgctgttcttcacagatttcatgggccagattgtgtaccgcggggatccctatagtgcacacaactccacagagtttctcatctacgaaagaggagtcgaggttggatgttggggcttctgcatcaactccgtgttttcctcactttattcttactttcagaaagttttggtatcctacattggattaaagggtctttacttcacgggatatttgctgtttggcctggggacgggatttattgggctcttcccgaatgtctactccaccctggtcctgtgcagcctgtttggtgtaatgtccagcaccctgtacactgtgccctttaacctcattactgagtaccaccgcgaggaagaaaaggagaggcagcaggccccaggaggggacccagacaacagcgtgagagggaagggcatggactgcgccaccctcacatgcatggtgcagctggctcagatcctggtcggaggtggcctgggctttctggtcaacacagccgggaccgttgtcgtcgtggtgatcacagcgtctgcggtggcactgataggctgttgctttgtcgctctctttgttagatatgtggattaggtcaataaagagacaatgaccctaacctcagaaaaaaaaaaaaaaaaaa

SEQ ID NO: 289010 - DNA, 1000 bp, Homo Sapiens
aagttttctttccgaagttcaagctagatcagaagtatgagatgcatgagctgcttaggcagatgggaatcagaagaatcttctcaccctttgctgaccttagtgaactctcagctactggaagaaatctccaagtatccagggttttacaaagaacagtgattgaagttgatgaaaggggcactgaggcagtggcaggaatcttgtcagaaattactgcttattccatgcctcctgtcatcaaagtggaccggccatttcatttcatgatctatgaagaaacctctggaatgcttctgtttctgggcagggtggtgaatccgactctcctataattcaggacacgcataagcacttcgcgtgtagtagatgctgaatctgaggtatcaaacacacacaggataccagcaatggatggcaggggagagtgttccttttgttcttaactagtttagggtgttctcaaataaatacagtagtccccacttatctgagggggatacattcaaagacccccagcagatgcctgaaacggtggacagtgctgaaccttatatatattttttcctacacatacatacctatgataaagtttaatttataaattaggcacagtaagagattaacaataataacaacattaagtaaaatgagttacttgaatgcaagcactgcaataccataacagtcaaactgattatagagaaggctactaagtgactcatgggcgaggagcatagacagtgtggagacattgggcaaggggagaattcacatcctgggtgggacagagcaggacaatgcaagattccatcccactactcagaatggcatgctgcttaagacttttagattgtttatttctggaatttttcatttaatgtttttggaccatggttgaccatggttaactgagactgcagaaagcaaaaccatggataagggaggactactacaaaagcattaaattgatacatattttttaaaaaaaaaaaaaaaa

SEQ ID NO: 289011 - DNA, 1000 bp, Homo Sapiens
ggctgtgacaggaggacatgctcagatacaggcagggacacacacccagacacccacccagaccgtggagcaggacagcagccaccagacaggaagcaccagcacccagacacaggagtccaccaatggccagaacagagggactgagatccacggtcaaggcaggagccagaccagccaggctgtgacaggaggacacactcagatacaggcagggtcacacaccgagactgtggagcaggacagaagccaaactgtaagccacggaggggctagagaacagggacagacccagacgcagccaggcagtggtcaaagatggatgcaagtgagcaaccctgaggcaggagagacagtaccgggaggacaggcccagactggggcaagcactgagtcaggaaggcaggagtggagcagcactcacccaaggcgctgtgtgacagaagggcagggagacagacagcccacagtggttggtgaggaatgggttgatgaccactcaagggagacagtgatcctcaggctggaccagggcaacttgcataccagtgtttcctcagcacagggccaggatgcagcccagtcagaagagaagcgaggcatcacagctagagagctgtattcctacttgagaagcaccaagccatgacttccccgactccaatgtccagtactggaagaagacagctggagagagtttggcttgtcctgcatggccaatccagtgggtgcatccctggacatcagctcttcattatgcagcttcccttttaggtctttctcaatgagataatttctgcaaggagctttctatcctgaactcttctttcttacctgctttgcggtgcagaccctctcaggagcaggaagactcagagcaagtcacccctttgtactgaattgtcctcatcttgtggggggtttcaggactatttttatctctgacatctctctattgccccatctaccctaatgcatcaataaaaccttaagccgctgg

SEQ ID NO: 289012 - DNA, 1000 bp, Homo Sapiens
tcaggatctggagatggagtccatgaaggctctggagaaactagtcaaaaggagacatccacctgtgatatttgccagtttggtgcagaatgtgacgaagatgccgaggatgtctggtgtgtgtgtaatattgactgttctcaaaccaacttcaatcccctctgcgcttctgatgggaaatcttatgataatgcatgccaaatcaaagaagcatcgtgtcagaaacaggagaaaattgaagtcatgtctttgggtcgatgtcaagataacacaactacaactactaagtctgaagatgggcattatgcaagaacagattatgcagagaatgctaacaaattagaagaaagtgccagagaacaccacataccttgtccggaacattacaatggcttctgcatgcatgggaagtgtgagcattctatcaatatgcaggagccatcttgcaggtgtgatgctggttatactggacaacactgtgaaaaaaaggactacagtgttctatacgttgttcccggtcctgtacgatttcagtatgtcttaatcgcagctgtgattggaacaattcagattgctgtcatctgtgtggtggtcctctgcatcacaaggaaatgccccagaagcaacagaattcacagacagaagcaaaatacagggcactacagttcagacaatacaacaagagcgtccacgaggttaatctaaagggagcatgtttcacagtggctggactaccgagagcttggactacacaatacagtattatagacaaaagaataagacaagagatctacacatgttgccttgcatttgtggtaatctacaccaatgaaaacatgtactacagctatatttgattatgtatggatatatttgaaatagtatacattgtcttgatgttttttctgtaatgtaaataaactatttatatcacacaatatagttttttctttcccatgtatttgttatatataataaatactcagtgatgagaaaaaaa

SEQ ID NO: 289013 - DNA, 1000 bp, Homo Sapiens; identical to SEQ ID NO: 222575

SEQ ID NO: 289014 - DNA, 1000 bp, Homo Sapiens; identical to SEQ ID NO: 117343

SEQ ID NO: 289015 - DNA, 1000 bp, Homo Sapiens
gtttttagttctccttgattctttgttttcttcctttatcgtttttaggtttggtatgtgttgttttatttccatggttcctcaagtttcctttttaaacatttgcatttgctggacaattgcaattttttttaaaaaattcccctacccctgtttaaagctgaaaaatacatttggttcatgtgcattgtttacaaagcaaaaagaaaaaagaggaaaaaaaggcaaaaaatattgtgaaagaaaaaaaacaacttaatatattttggattaatatttggtatttcttttaaagtattttttgtgctgtgaacattttctgccaaagaccatgatgtgtgtctgtatgtttaagttatcgtaaatatttaaaatgtaaacatggctgttttgttatgccaccctgtaccaggattgctgccgcattccactgggtataacagtattttaattaaaaaaaaataattaaaagtgatgtctttgcacaggtgagactttgcactgagggaagggaaagggtgaggattttggggggccacccaagtcatagtccaatctcttcaaggacccaagatagaatttaggaattttgtgaagctgcattaaggatagagttggaatgaggatgtggctggcatttttcccctttcatagataacatttcttgaaggctgggaggggaaggagggcctggcagatggcagcctcccgaggtagggctgtgttctaatcagctttgttcggccacacgctgtggttatccacagtgggagtgggtgtccaaagatggctttatccttcccccactccttttcccactcccacctagcacataaagttttgtccgaaaccatccagaaggccaggcaccatgcagaggacattcaagaatgtgcatgttcttagccaccgcctccctcctttgctgtgacatcaccactctttcctgatgctcaggaaagcatattgctccaattcaaaattaaagaaagccattctc

SEQ ID NO: 289016 - DNA, 1000 bp, Homo Sapiens; identical to SEQ ID NO: 222578

SEQ ID NO: 289017 - DNA, 1000 bp, Homo Sapiens; identical to SEQ ID NO: 117345

SEQ ID NO: 289018 - DNA, 1000 bp, Homo Sapiens
ccacagcagtgggaccaaggagaccaggctggagctgagggagatgatcagccatgaacaagagagcgtgctcaagaagctgtccaaggacggctccacagaggcaggtgagagcagtcacgaggaggacacggatggccacgtggctgcggggtcgactttagccaggcggaaaaggagcgccggggctggcagccactgtcaaaagacctccctgcgggtaaacttcgaggacatcggctgggacagctggatcattgcacccaaggagtatgaagcctacgagtgtaagggcggctgcttcttccccttggctgacgatgtgacgccgacgaaacacgctatcgtgcagaccctggtgcatctcaagttccccacaaaggtgggcaaggcctgctgtgtgcccaccaaactgagccccatctccgtcctctacaaggatgacatgggggtgcccaccctcaagtaccattacgagggcatgagcgtggcagagtgtgggtgcaggtagtatctgcctgcggggctggggaggcaggccaaaggggctccacatgagaggtcctgcatgcccctgggcacaacaaggactgattcaatctgcatgccagcctggaggaggaaagggagcctgctctccctccccacaccccacccaaagcatacaccgctgagctcaactgccagggaaggctaaggaaatggggatttgagcacaacaggaaagcctgggagggttgttgggatgcaaggaggtgatgaaaaggagacagggggaaaaataatccatagtcagcagaaaacaacagcagtgagccagaggagcacaggcgggcaggtcactgcagagactgatggaagttagagaggtggaggaggccagctcgctccaaaacccttggggagtagagggaaggagcaggccgcgtgtcacacccatcattgtatgttatttcccacaacccagttggaggggcatggcttccaatttagagacccg

SEQ ID NO: 289019 - DNA, 1000 bp, Homo Sapiens; identical to SEQ ID NO: 222580

SEQ ID NO: 289020 - DNA, 1000 bp, Homo Sapiens
catggagaacagaatgaaatggccagattgaaagcagcactgattcgagaatatgaagataacgatgaagttcacatagaggttcataatcctcggaatacagaagcagtgaccttaaacttcagaggagaaaaactagccaaggttatgggatttttagcagacaaaaaaccagaacaaggccagcgggtctcaggaatacttgttaaaagaaactttaattatcacatactttctccttgcgacctgtccaattatactgacctggccatgagcacggtgaagcagacccaagccattccatatactggtccctttaatttgctctgttaccagctgcagaaattgacaggtgatgtggaagaattagaaattcaagaaaaacctgctctgaaagtgttcaaaaatattactgtaatacaagaaccaggcatggtggtattagaatggctggcaaacccttctaatgatatgtatgcagatacagtaacaactgtgatattggaagttcagtcaaatcccaaaataagaaaaggtgcagtacagaaggtttctaaaaaattagaaatgcacgtttacagcaagaggttggagatcatgctccaggacatatttggagaagactgtgtaagtgtaaaggatgactctattcttagcgtcacagtggacgggaaaactgccaaccttaacttggagacacggactgtagaatgtgaagagggaagtgaagacgatgaatccctccgagaaatggtggagctggctgcacagagactgtacgaggccctgacgccagttcactgagactgtgcctgtatatgaactttgaaaaaatacttgactctacttttgttacctaaaataaaatgcattcgtttctctgggaaaaaaaaaaaaaaaaaaaaaaaaaaaaaaaaaaaaaaaaaaaaaaaaaaaaaaaaaaaaaaaaaaaaaaaaaaaaaaaaaaaaaaaaaaaaaaaaaaaaaaaaaaaaaaaaaaa

SEQ ID NO: 289021 - DNA, 1000 bp, Homo Sapiens
aagctaggatgggagctgagggggaaggaagtaggggaatggaagtggaaggatgcagcccccccagacctgccgagaggcctcatgcatgtgcatgagtgtgcccatgggcagacatgtgcctgtcccagcacagcgggcagaatgagattgtccacactggccccaccctccaagtcgacctctaccccatggtatgtagtggagcatcagggtaggctatcttctctgccttcaatcttcagggactgcagggaagagggaagcacgcacagcacggttcctctctccactgcattgtttcactgggctcacctgcttctgaaaacggctccctgtcttgggctctaatgaggatctggggttgggagaggctgttggtctgagggcagtaatcacaggctgcaggctagagggggcagttatgactgcctgaaagtgggtgagggattgcacttcagaaaaacatctaaaaaacttagtctatgtttgaattccccacctccatcccatctatgggaagagccgttcagtgtttagagagtggggagatgggtccctgcacttggcctctccataagccttggagggtcagggctgataccaggggtcctggcaagccattgggcagagacagaccacaagagcagggcatttttttacgctgggcatacatatgcacacaagcatgcacagaggcatgtcccgtgcccagcctctccaccgtcactgtccgctgctggctggaggggatgcaggggtagtgtatgcagaccttccactgggcaaatgccatgtgtcaggagggaaaggcctaggaagcccccatggggaaggttctggatttattccctcctctaaatgctataaatacgttagcacttgagtcgactggaggctgccaggaattcaggatgcatacagctgtaatttaacccagagcagctccacgtgagagcattaaagatgtaatgaagatgtttaaaaaaaaaaaaaaaaa

SEQ ID NO: 289022 - DNA, 1000 bp, Homo Sapiens; identical to SEQ ID NO: 222581

SEQ ID NO: 289023 - DNA, 1000 bp, Homo Sapiens
agaggctgagtgatgaacatgaacctgaacaaagaaagaaaattaagaggaggaatcaagccatttacgctgcagtggatgatgatgatgatgatgcagcttaagatgatttacttgttttgtttttgtgtttgttttgcttttttgagatggagtttcactcttgtcacctagactggagtgcaatggcgtgatctcggctcaccgcaacctccgcctcccaggttcaagcaattctcctgcctcagcctcccaagtaggtgggactacaggtgcccgccaccacacccggctaatttttgcatttttagtaatgacagggtttcaccatgttggccaggctggtctccaactcctgacctcaggcgatccacctgtcttggccttctaaagtgctgggattacaggcgtgagccactgtgcctggccgacaatttacttgtcttagtattatatgtagatatgtgattttttgagactgtatttttagagctgaatttttgactaaagacttaactttataataatgaagatacattagagaattttagttagatattgactttatctttaggcttttgtatgtttcagatgcaaacatattaaagtttcatatatttacttgactgggtatctttttttttgaagacatacattattcacttccatttttacaataaacacttacttaacatctactctgtgccaagcactctgctataatatgggaccataaagatgagtaagacaaggatttttgcctccaaggacttgttatcactgtaaacattttgatgtatacaatatggctatattatattttgttttataaaatcaagtctttgtatatattatgatgtatgctttcttttcatttattataaatatttttcctgatcagcttttaatatctgtcaaataaaaattgaaattgaagatggtatataagatttcaggaaataaactactctgaatactaaacaaaaaaaaaaaaaaaaaa

SEQ ID NO: 289024 - DNA, 1000 bp, Homo Sapiens
cccaagagatccaatttgtttttctgatgaatagtgttcagtaaaatgaagcagtcttaagagtgactaataatttcaaagtgatttttcgtctattcttaatattttttaattatttatttttaagagttttataccttgagcagatacaatgatctgctttagtgagaggacaatttctgattgattgttttctcttcaggccatctcacctcttcattctcttgttacatttgaagcagttgatataatgggtttatactttaaaagatagacatggtgccatgaagttggggagttgggtgaattatcccattctagttacagaggagctttccttaaatgccctttaacttctaggttttgttcaagaagttcattttctgagtaaaaggtattttcatatatgttgggggaaaattaactcatctaaaaagaatcttattaggtatttgaactctaaaactaacagataagacagatatgtaccttattagagcaccagaactaatttgctaagtcttttgtttagtcctgcaagactgatgcttaatacacagtctgttctcctgtgtctaggtcaggaactccagtttgcttttctgttttgtgtcctggtagcagctgttgagtaactttcattggaggttgggaaggaagtgaggagaaagtgttcttgtttagtgttttatttcctataataggatgctgcctaacccagttcatctctatgtcctgttcactgaatattccgggtaattgaaagaaaatataatggatgggctccattaaaaccagctcaaaaataaattcttgtcagtaaagatttcttgtcaagatgtcttggattgcacttttgttgaggaaagacagtgtaaatagttaaagaatgttgataaaattgaaacatttggttgtggaattgtgtgtggttttagagggtttctgtttgtgaaatgtatgtattaaaaataataaaattccagaaactaacattgta

SEQ ID NO: 289025 - DNA, 1000 bp, Homo Sapiens; identical to SEQ ID NO: 222582

SEQ ID NO: 289026 - DNA, 1000 bp, Homo Sapiens
ggctgagtcccgagatcgtgcacttcaacctttacccccagccgggccgtcgggacgtggaggtcaagccagcagacaggcacaacctgctgcggccagagaccgtggagagcctgttctacctgtaccgcgtcacaggggaccgcaaataccaggactggggctgggagattctgcagagcttcagccgattcacacgggtcccctcgggtggctattcttccatcaacaatgtccaggatcctcagaagcccgagcctagggacaagatggagagcttcttcctgggggagacgctcaagtatctgttcttgctcttctccgatgacccaaacctgctcagcctggatgcctacgtgttcaacaccgaagcccaccctctgcctatctggacccctgcctagggtggatggctgctggtgtggggacttcgggtgggcagaggcaccttgctgggtctgtggcattttccaagggcccacgtagcaccggcaaccgccaagtggcccaggctctgaactggctctgggctcctcctcgtctctgctttaatcaggacaccgtgaggacaagtgaggccgtcagtcttggtgtgatgcggggtgggctgggccgctggagcctccgcctgcttcctccagaagacacgaatcatgactcacgattgctgaagcctgagcaggtctctgtgggccgaccagaggggggcttcgaggtggtccctggtactggggtgaccgagtggacagcccagggtgcagctctgcccgggctcgtgaagcctcagatgtccccaatccaagggtctggaggggctgccgtgactccagaggcctgaggctccagggctggctctggtgtttacaagctggactcagggatcctcctggccgccccgcagggggcttggagggctggacggcaagtccgtctagctcacgggcccctccagtggaatgggtcttttcggtggagataaaagttgatttgctctaaccgc

SEQ ID NO: 289027 - DNA, 1000 bp, Homo Sapiens; identical to SEQ ID NO: 117348

SEQ ID NO: 289028 - DNA, 1000 bp, Homo Sapiens; identical to SEQ ID NO: 117349

SEQ ID NO: 289029 - DNA, 1000 bp, Homo Sapiens
ttggccaggctgatctcaaactcctgacctcaagtgatctgcccgcctcggcctcccaaagtgctggaaccacaggcctgagccactgtgcccagccttgtttgcttttttaacagataacagtgtgctcatagaaactgctttgacatgactgcaatcatgtgcttcatagaaacttaattagattataccactagagtcttcagatttttatactttttttttttgaaacggagtctcactctgtcaccaggctggagtgcagtgccgcaatctcggctcactgcaacctccgcctcccaggttcaagcaattctcctgcctcagcctcccgagtagctgggattacaagtgcgcactaccacacccagctaatttttgcatttttacttgacagggtttcaccatgttggctaggatagtttcaccaggatctcttggcctcatgatcagcctgcctcggcctcccaaagtgctgggattacaggtgtgagccaccgtgcccagcctatacttccctttttgaataccatttggtgttttgaagaattaacagctttgtgaacgtggcagtgcttgtgattcaggcttccattgagaccaaggggagaacctggttgcaggacaaacagacggacagcgtgtggcagtgtttaaatgctcttctgaaggctgatacgacagctctctgtgcactgattgcatatgcatcccaagattatattattgttttctactgctatgtgtcacactttgccaaacaggatgtggaaaatgaataagcggttttcttaggcacttcttaacagacaattggtcaaaatgaactccattgcttaagaaacacataaacaccatttagtcactgaacatagctatatgtatggttgttactatgggaaatcttgttttgccaattttctttgaaaattctggcagaccaaggttctttttgtttacataatacttgaaaaataaaaatgaacaagctaacaaacta

SEQ ID NO: 289030 - DNA, 1000 bp, Homo Sapiens
aacacttaatggaatttttaagtctgttctgttaggtagatggtgatgctcttgttattttcacttattcaggctggattacttcttacttagttactaactcaatgaggaaaaaatccctacaggatctttttttgcaaacaactgatatatgcagacaaatttttgacaaattcaccttttaaacacgacgttaaccgatttgtgaaggttttctttagcttacattttaaacatacacaataaacactaatcctccaaactttcactgtttttattagtatgaatataaaatttgaaggtttggccaattagtacaagtctcatgatataatcacagcctgcatacatatgcacagatccagttagtgagtttgtcaagcttaatctaattggttaagtctaaagagattattattccttgatgtttgctttgtattggctacaaatgtgcagaggtaatacatatgtgatgtcgatgtctctgtctttttttttgtctttaaaaaataattggcagcaactgtatttgaataaaatgatttcttagtatgattgtacagtaatgaatgaaagtggaacatgtttctttttgaaagggagagaattgaccatttattgttgtgatgtttaagttataacttattgagcacttttagtagtgataactgtttttaaacttgcctaatacctttcttgggtattgtttgtaatgtgacttatttaacgccttctttgtttgtttaagttgctgctttaggttaacagcgtgttttagaagatttaaatttctttcctgtctgcacaattagctattcagagcaagagggcctgattttatagaagccccttgaaaagaggtccagatgagagcagagatacagtgagaaattatgtgatctgtgtgttgtgggaagagaattttcaatatgtaactacggagctgtagtgccattagaaactgtgaatttccaaataaatctgaacacttgtctttatt

SEQ ID NO: 289031 - DNA, 1000 bp, Homo Sapiens
tccgctttggactgccttcgccggaccatgtcttagggcttcctgtaggtaactatgtccagctcttggcaaaaatcgataatgaattggtggtcagggcttacacccctgtctccagtgatgatgacagaggctttgtggacctaattataaagatctacttcaaaaatgtacacccccaatatcctgaaggtgggaagatgactcagtatttggagaacatgaaaatcggggagaccatcttttttcgagggccaaggggacgcttgttttaccatgggccagggaatcttggaatcagaccagaccagacgagtgagcctaaaaaaacactggccgatcacctgggaatgattgctgggggcacaggcatcacacccatgttgcagctcattcgccacatcaccaaggaccccagtgacaggaccaggatgtccctcatctttgccaaccagacagaggaggatatcttggtcagaaaagagcttgaagaaattgccaggactcacccagaccagttcaacctgtggtacaccctggacaggcctcccattggctggaagtacagctcaggcttcgttactgccgacatgatcaaggagcaccttcctcctccagcgaagtccacgctcatcctggtgtgtggcccgccaccactaatccagacggcggctcaccctaacctggagaagctgggttatacccaggacatgattttcacctactaacacctccacgtgctcagcaattttgcatgtcccttttcatctgtttcagagtaagttcaatttcaccacggtaaactgggatgttttcaaaagtgccttgccatgtaccttcgcgcacacactggttctcctcttttgggtgtgggcctaacaaaaagggctcaaggggctggagactggctgctggggcctccttgcttggaggctggaaagagctccatttcagtatctttctccgtggttttgtgaaataaactcaagtacaaagcaga

SEQ ID NO: 289032 - DNA, 1000 bp, Homo Sapiens; identical to SEQ ID NO: 222583

SEQ ID NO: 289033 - DNA, 1000 bp, Homo Sapiens; identical to SEQ ID NO: 222584

SEQ ID NO: 289034 - DNA, 1000 bp, Homo Sapiens
aaccaagaattcaacaagaggaagggcaaaatcaaagtttcagcaatgggctggcttgtctagacatggttttaagaatagctgacgtgaaggaagaggatttattgctgcagtacgactgtctggccctgaatttgcatggcttgagaaggcacaccgtaagactaagtaggaaaaatccaattgatcatcatagcatctactgcataattgcagtatgtagtgtatttttaatgctaatcaatgtcctggttatcatcctaaaaatgttctggattgaggccactctgctctggagagacatagctaaaccttacaagactaggaatgatggaaagctctatgatgcttatgttgtctacccacggaactacaaatccagtacagatggggccagtcgtgtagagcactttgttcaccagattctgcctgatgttcttgaaaataaatgtggctataccttatgcatttatgggagagatatgctacctggagaagatgtagtcactgcagtggaaaccaacatacgaaagagcaggcggcacattttcatcctgacccctcagatcactcacaataaggagtttgcctacgagcaggaggttgccctgcactgtgccctcatccagaacgacgccaaggtgatacttattgagatggaggctctgagcgagctggacatgctgcaggctgaggcgcttcaggactccctccagcatcttatgaaagtacaggggaccatcaagtggagggaggaccacattgccaataaaaggtccctgaattctaaattctggaagcacgtgaggtaccaaatgcctgtgccaagcaaaattcccagaaaggcctctagtttgactcccttggctgcccagaagcaatagtgcctgctgtgatgtgcaaaggcatctgagtttgaagctttcctgacttctcctagctggcttatgcccctgcactgaagtgtgaggagcaggaatattaaagggattcaggcctc

SEQ ID NO: 289035 - DNA, 1000 bp, Homo Sapiens
aaggtgaggcccaactgaatcgtggggtgagctttatagccagtagaggtggagggaccctggcatgtgccaaagaagaggccctctgggtgatgaagtgaccatcacatttggaaagtgatcaaccactgttccttctatggggctcttgctctaatgtctatggtgagaacacaggccccgccccttcccttgtagagccatagaaatattctggcttggggcagcagtcccttcttcccttgatcatctcgccctgttcctacacttacgggtgtatctccaaatcctctcccaattttattcccttattcatttcaagagctccaatggggtctccagctgaaagcccctccgggaggcaggttggaaggcaggcaccacggcaggttttccgcgatgatgtcacctagcagggcttcaggggttcccactaggatgcagagatgacctctcgctgcctcacaagcagtgacacctcgggtcctttccgttgctatggtgaaaattcctggatggaatggatcacatgagggtttcttgttgcttttggagggtgtgggggatattttgttttggtttttctgcaggttccatgaaaacagcccttttccaagcccattgtttctgtcatggtttccatctgtcctgagcaagtcattcctttgttatttagcatttcgaacatctcggccattcaaagcccccatgttctctgcactgtttggccagcataacctctagcatcgattcaaagcagagttttaacctgacggcatggaatgtataaatgagggtgggtccttctgcagatactctaatcactacattgctttttctataaaactacccataagcctttaacctttaaagaaaaatgaaaaaggttagtgtttgggggccgggggaggactgaccgcttcataagccagtacgtctgagctgagtatgtttcaataaaccttttgatatttctcaaaaaaaaaaaaaaaaaaaaaaa

SEQ ID NO: 289036 - DNA, 1000 bp, Homo Sapiens
cagtgcccatgagaagcggctcacattgccccccagcgagatcaccctgctctgacccagcccccagccctccagtaccttctgccagaagactcactgtgtggcctcagagaaatcactgaacctctcaggatcaatgacccctgtaaggggccagagccttggaggacactaagaggaggcaggaggagcaactcaaatccccaagaacacaagaagacccatcctgaactgggatggaatggcagcatgcaaacttggatcagatagcaggaggaactttcaaaagtctggcccactgtgcagtggagcagaaggcaggaccatgaggcctcctgccatgtacccattgcagaccctgcccctaactcctgcctatgacacagaagccccacaccagttgcccagatgaactggcctctgcctttggtttactcagggtctgatgttggaatctgctccaactccacaccctagcccttacatgtcctcctaaggggcccctccttgtgctgccagtcagcctggatttctggtctttggttatttctgtgcaaacaaaaggtgtgcctggcagccatttctccatggagttgctaagtggccggaaaacaagcctgagggaggaggcaggagttggagttaccttaggcccctgattcactgcctatgaacagaccatcccccactccttgggtatccccaaccccagacccccatcacttgatgggccacacaagtttgagagtggtacaagggagaagtttgggaaaagccttcttggaaaatgggacattagcattgagttttgaaagatgagtaggagtttgctaagaatagatggaagacagcaggataaacattccagagaaaatcatgtttattccctgctgtatcttccagaacctaggaggatgcctaacagagagtaagcacttaaaaaatatttgtcatatgaatgaaaaaataaacgagtgaatgttgataaaaaaaaaaaaaa

SEQ ID NO: 289037 - DNA, 1000 bp, Homo Sapiens; identical to SEQ ID NO: 222586

SEQ ID NO: 289038 - DNA, 1000 bp, Homo Sapiens
tgacagatgaactggctgccttacaaataactggagtcaaaacaacatgtctgtgtcctaatttcgtaaacactggcttcatcaaaaatccaagtacaagtttgggacccactctggaacctgaggaagtggtaaacaggctgatgcatgggattctgactgagcagaagatgatttttattccatcttctatagcttttttaacaacattggaaaggatccttcctgagcgtttcctggcagttttaaaacgaaaaatcagtgttaagtttgatgcagttattggatataaaatgaaagcgcaataagcacctagttttctgaaaactgatttaccaggtttaggttgatgtcatctaatagtgccagaattttaatgtttgaacttctgttttttctaattatccccatttcttcaatatcatttttgaggctttggcagtcttcatttactaccacttgttctttagccaaaagctgattacatatgatataaacagagaaatacctttagaggtgactttaaggaaaatgaagaaaaagaaccaaaatgactttattaaaataatttccaagattatttgtggctcacctgaaggctttgcaaaatttgtaccataaccgtttatttaacatatatttttatttttgattgcacttaaattttgtataatttgtgtttctttttctgttctacataaaatcagaaacttcaagctctctaaataaaatgaaggactatatctagtggtatttcacaatgaatatcatgaactctcaatgggtaggtttcatcctacccattgccactctgtttcctgagagatacctcacattccaatgccaaacatttctgcacagggaagctagaggtggatacacgtgttgcaagtataaaagcatcactgggatttaaggagaattgagagaatgtacccacaaatggcagcaataataaatggatcacacttaaaaaaaaaaaaaaaaaaaaaaaaaaaaa

SEQ ID NO: 289039 - DNA, 1000 bp, Homo Sapiens; identical to SEQ ID NO: 117351

SEQ ID NO: 289040 - DNA, 1000 bp, Homo Sapiens
tttatgttgctggtaagagaatttatttactaaatgcactatgtataaagtgaaagatagtttacttatctgactttgatattagatggctgacattagtgcacataatgcagagtttaaccttgattcttcaacagagtccagatttaaatgtctacttagttaattagttagctgatattcttccacaattaatatattcaatttcccatcagtatatcactttaaattttatgtttttctaaggaaactttccacagaattttaaacaactgatgcatccatactcagggtgtagggagaatactttgcatttaaaaaccctgtccacctgtcaccagcacaagagaattagagcttcagtgagaatttagaaaaattatactaaagtgagatgcattttttctcattttcagcaagactcctctaagcatttactcatttactgtattcctgctctgaagatgtggatacagaattagtcactcttgtcactttatttatttattggtttttttttaaccatctgtgtacattcctttcatagggtagagttctagttctagaagttcttattttgtttttgttgtaatgtttgaatactatttaatatccggttttaatattgctggatttgctacctttggttacttgtgcagtgttaaaagtaatccactttcttgtttaatataccagatacatagcaaaagcagcttggaataattatagctgtttatttggctgtgctcagttactatattaagatcttgtactgtgtaacagtaactcttttttgcttttcagtaatttaatatgttcacttaacaaaatacgaactttgagatgcactaaagttttgtttcagcagtggctcaaaaaatttcagaaattacttttgtaattatttgcaattaattgttcttttatcttacaattgtttaagcctgtgatctttcttctcccagctaagagttcttcaataaatttaagaaatacctgg

SEQ ID NO: 289041 - DNA, 1000 bp, Homo Sapiens
ccgagaacagcctcctgattattattctgagtgtgatcttcataaagggcaactgtgcctctgaggaggtcatctgggaagtgctgaatgcagtaggggtatatgctgggagggagcacttcgtctatggggagcctagggagctcctcactaaagtttgggtgcagggacattacctggagtatcgggaggtgccccacagttctcctccatattatgaattcctgtggggtccaagagcccattcagaaagcatcaagaagaaagtactagagtttttagccaagctgaacaacactgttcctagttcctttccatcctggtacaaggatgctttgaaagatgtggaagagagagtccaggccacaattgataccgcagatgatgccactgtcatggccagtgaaagcctcagtgtcatgtccagcaacgtctccttttctgagtgaagtctaggatagtttcttccccttgtgtttgaacagggcagtttaggttctaggtagtggagggccaggtggggctcgaggaacgtagtgttctttgcatttctgtcccatatgggtgatgtagagatttacctgtttttcagtattttctaaatgcttttcctttgaatagcaggtagttagcttcagagtgttaatttatgaatattagtcgcacatgtattgctctttatctggtttaagagtaacagtttgatattttgttaaaaaaatggaaataccttctcccttattttgtgatctgtaacagggtagtgtggtattgtaataggcatttttttttttttttacaatgtgcaataactcagcagttaaatagtggaacaaaattgaagggtggtcagtagtttcatttccttgtcctgcttattcttttgttcttgaaaattatatatacctggctttgcttagcttgttgaagaaagtagcagaaattaaatcttaataaaagaaagccccactaaaaaaaaaaaaaaaaaaaaaaaaaaaaa

SEQ ID NO: 289042 - DNA, 1000 bp, Homo Sapiens; identical to SEQ ID NO: 117352

SEQ ID NO: 289043 - DNA, 1000 bp, Homo Sapiens
acatattcatcactttaacaataagggaacaaaatttagtattcaagctgagtgagaatactggttcaatggacatgtccctaagataaaccagaattggcagttaatttaggcgtctagaaaatctcagttcccaccagtaaaattatcctgagtagctaatgcaccttgagaaaaatctggcatactgaataagtaacattaacttgggagccaagagctgggtaagccttacctttagactactctgtgactacagaaataaagccagcacttttggaactaataagccttcacttgtcagtatcataaagagtattgcccaactgaactttgctcccactggtttaatagttacttatttctgcctaagcactcaccttccgattttacccaagtatatatataggatagaaaaaaatgcattatatttgagagctcacttcgcccgaattacaaaatgagtgtttttagattcaagtgacggtaaaaggatttgttcccttcagtgacttgagtgttttagttatgcataagtatttctagcaaaggaagggtagaaaggaattgaaaattaatttacactagttgctacttgggaataaagggctttttgaggggggtatggatattaaatgttttcgttatatacttatccctattaaaacaggcagttgtttctttgaatatgcctaaataacagtattcttaaaatctgacagacaagtaacatgtcaattacttgatattccttgtctccagtaccacaggccactcttgacatcccatgtttgcctggataaagttcctcatttcaaacagtatacatacttctttgcagttcattatagtaaggcttaacctgtaaacagtatctgatggcccacctataaataaaattcagcattctatttttaataatttgtatgccaccaatttgtattatttgtctcaataaatacttagtcatcgatgcaaaaaaaaaaaaaaaaaaaaaaaa

SEQ ID NO: 289044 - DNA, 1000 bp, Homo Sapiens
agccagttcttagtaaaaccacttgatatgattgttgggaaggcatggaatatgtttgcttcaaaagcctacattcatcagtacacaaaatttggaatcgaagaagaggactttttagacagtttcacgtcattagagcaggttgttgccagttactgtaatctctgatcttgaacaatgggaaaagtataccttaaggcatttctggactaaaatattttcaatactattttctctgtaaagttttcaaagttctccatcctggctaacacggtgaaacaccgtctctaccagaaaatacaaaaaattagccaggcgcggtggcgggtgcctgtagtcccagctactcgggaggctgaggcaggagaatgacgtgaacccaggaggcggagcttgcagtgagccgagatcgcgccactgcactccagcctgggcgacagagcgagactccgtctcaaaaaaaaaaaaaaaaaaaaatgttttcaaagttccattctgttaaagtaaccacgtagaatgctgagtctattctgcatactatgcccacagaaaaggaagaaaactttttaaaatggagaatcgcatgttttcaatgaaaacattcacttggtatttcatttgtaagaaaaaaaaatggtgcttttataaagaactttggggaaacactttgctgaaatgttgggactctggaactagccaagaaaagagaatattctctttgtctacatgttcctaaatctttactccaaaacaactccaaaaacaactcacaaagcatgaaccaaactttcacagcataatttcaagctaaggaattgtaattctgtacttaatatattcatgtttgaaatgaatgctttgaaccacaggagggagatgttgtcaaatgctacagtgtgaacatgtattttgaatattctgtaacagggcaagtttccactctaagcagctatttaaaaataaatatgaggattttggtaataaatgcttatgcttaagt

SEQ ID NO: 289045 - DNA, 1000 bp, Homo Sapiens; identical to SEQ ID NO: 117353

SEQ ID NO: 289046 - DNA, 1000 bp, Homo Sapiens; identical to SEQ ID NO: 222592

SEQ ID NO: 289047 - DNA, 1000 bp, Homo Sapiens
cccttcatttaccgccattctgctcgagcacatgaaaggaatcacactgtacagaaacgctatgaatgtaaacaatgtggaaaaacctacatatcttctgtaggttttcaagcacatgaaagaactcacactggagaaaaaccctatgaatgtaaaaaatgtgggaaagtgttcgtatatcacaactctgctcaaagacatgaaaagactcatactggagagaaaccctacaaatgcaaggaatgtgggaaagccttcagttaccactgtactgctcaaaaacatgagaggaatcacactgcacagaaacactatgaatgtaaactgtgtgggaaaacttacttgtctcctttaggttttcaagcacatgaaagtactcacactggagataaaccctttgagtgtaaaaaatgtggaaaagcatttagatactactactcagctcaaagacatgaaaggactcatactggagagaaaccctacaaatgtaaggaatgtgggaaagccttttattgttgcagttctgcccgaagacatgaaaggatgcacactgcaaagaaacagtatgaatgtaaaaaatgtgggaaaacatacattactcttgcaggtttccagatacatgaaagaacccacactggagagaaaccttatgaatgtaaacagtgtggtaaagccttcagtagttccagttatattcatatacatgaacgaattcatactggagagaaaccctatgaatgtaaagaatgtggaaaacccttcagtttccttacaggctttcgagtgcacatgagaatgcacactggagagaaaccttataaatgtaaggattgtggcaacgccttcatttggcgtgcatccttacaataccatgtgaagaaagtgcacgctgaatagaaactataaatgtaaatatcgaaagtttttcaattttaacgattttcaaagttgatatgaaagttcatactggagggtagttgcaaaaaaaaaaaaaaaaaaa

SEQ ID NO: 289048 - DNA, 1000 bp, Homo Sapiens; identical to SEQ ID NO: 222593

SEQ ID NO: 289049 - DNA, 1000 bp, Homo Sapiens; identical to SEQ ID NO: 222595

SEQ ID NO: 289050 - DNA, 1000 bp, Homo Sapiens; identical to SEQ ID NO: 117355

SEQ ID NO: 289051 - DNA, 1000 bp, Homo Sapiens
ctgataaccagggttggttcctggagaattcactcattgattcatttgttcacacaacaaaactaggtgactaagtgaaggcaaaaacaagaaatgggcagacgtcatcctttggctcaaagccagatgtccgtgtggaggggacatagacactgcatgggccctatgtggctctgcattctagtcagacatctaacacctccccaagcttcttgctataatgtaggaatagatgaatagctacagaatcacacaactagaaagtgtcacctatgacaagagcagtgaaggtgaggtacttgctgccacagcagaatctaaagaaagcattgagtcctggggctggacgaggttaccagggaaggcttgcttggaaaagtgactaatgagtcaggagcaaggaacgtccagggagtgggagcagcacatgcgcgtgctgtggcaggaggacgcatcccaatcgggagggagagacagagacagagccgatggggccagagcaggcagaacaggcggagcacggcgagtactgacagaggggacgttgggaggggccaccctgcacaggaccctggcaaggattttgtcatcatctggagagtggttgaaagccaaaggaagaggtgatcgataggaatccagacctaggctgaggatcgcccactggagccagtggcatggaggatttcggtagatttgaaagcttgtttggggaaagcatccaaatttaaagggccggtacataggaggagagaaaatggggatgccaagaatttttagaatttttgagaattttttaagaattcattggttataagcaacagttgcccattgaccagacttaagtcaagaaggagcattagcctggtgtggtggctcatgcctgtaatccctgcaatttgggagaccaaatgagaaggattgcttgagcccaggagtttgagaccagccagggcaacaaagtgataccctgtctctacaaaaaaaaaaaaaaaaaaaa

SEQ ID NO: 289052 - DNA, 1000 bp, Homo Sapiens; identical to SEQ ID NO: 222596

SEQ ID NO: 289053 - DNA, 1000 bp, Homo Sapiens
taggatctacttgctggtttttctttttgatccaaatgtgtgatctgccctgataaataacaagttatagtaccatctcccccgccaataaaaaagagaagaaaaaagagaaacccgtggcactatgtaaataaagtaagcatactttgttgttagtaaatagatgaggcatgcctgggaaatgctcccttggcataaatagcaatcaattataattagtaaacaggtgtaccaataaaaagaatttacatgataggttaacaaggaccaggaaagtgagtttcctgaaggagttctttgttcctgatcaaagaaattgatacctgttagcattcactgccaccatattttaaggagaaagaactctattggtgtcgtctgagcagccatttaaaaattggaatctaaaggatggttgctgatgtactgtgtggtctggtagaagtggggaaatatgagagatggaggaaaaacttgattatgtcttccatggcatatttactcttactttacttcgtgccaaatcaaatgaaacaagccgtcttacaagtcgttattgcctttaaaaatctgttccgtttttttcccaggtacttaaaatacaagtgccagtaagtggttcttatgtgttttggggggaaaattttatttcccttttcttctgatatttaaaaaattcatcgatctttcaagatgaaccaaggttttttaaaagaaatataggaaacacttcattctttataaaactttctataatgccttatttgaatgttaatcttatgtgctttctaaaaaatgttgtgaaataccaaacttatggattatcactaggttatcaagcatatattagtctttatcagaataaaatgaaatttcataactgtggctattactttgttcttggtccttcacagggcctgctccatcccaccttcctttctgctgcctgatgtctcaatggcttctgaatgactgttctaataaatgatcttaaaacagt

SEQ ID NO: 289054 - DNA, 1000 bp, Homo Sapiens; identical to SEQ ID NO: 117356

SEQ ID NO: 289055 - DNA, 1000 bp, Homo Sapiens
tcttcagcgtcatcttcgtcaacagtattaactccagggccccttgtggcctctgcatctggtgttggaggccagcagtttttgcacattatccatcccgtaccgccttcaagtcccatgaatttacagtctaacaaactgagtcatgttcaccgcatccccgtggtggtacagtcggtgcctgttgtctacacagctgtaaggtcacctggaaatgtgaacaacactattgtcgtgccgcttttggaggatgggagaggccatggcaaagcacaaatggacccccgaggcctatctcccagacaaagtaaaagtgacagtgatgatgatgacctgccaaatgtgaccttagatagcgttaatgaaactggatctacggccctttccatagccagagcagtacaagagtaagtatcacattcacaggatgaattaagaattgccaaggtgttcaatggataatggaaactgcagcatctcctgtcccccagccatgtcattctagctgtgaactggcacgaatgtcagcagcttttcattcagctgaatgctctttgggagattagggcagagaatggagtgttttaatgagttggaaattcatgctttgatgagatataagacctatgtgcatcttttctaatacctcctgcacccttctcctgaactctgcaaaaaaaaaaaaattgttatttttgaatgtcactatttgattatcatcatcattattattacacaaagtcaagggaaatatggcaaagtattgttatcttgttttgataggaaattacagaatagctttttggaagatttaaatttggaaaataatatgttcatcctttgaaaagtagtactcatatgttatttttaaatgaatcttttctctgtccttttacctggaccgcagggttagatttcagccctcgtttattgaaaatagctgcttttctatcagtcaaccttgtacctagaattgaacctaaatgattgaaaaaaaaaa

SEQ ID NO: 289056 - DNA, 829 bp, Homo Sapiens
ggagactgcgccgacatggagctgttcctcgcgggccgccgggtgctggtcaccggggcaggcaaaggtatagggcgcggcacggtccaggcgctgcacgcgacgggcgcgcgggtggtggctgtgagccggactcaggcggatcttgacagccttgtccgcgagtgcccggggatagaacccgtgtgcgtggacctgggtgactgggaggccaccgagcgggcgctgggcagcgtgggccccgtggacctgctggtgaacaacgccgctgtcgccctgctgcagcccttcctggaggtcaccaaggaggcctttgacagatcctttgaggtgaacctgcgtgcggtcatccaggtgtcgcagattgtggccaggggcttaatagcccggggagtcccaggggccatcgtgaatgtctccagccagtgctcccagcgggcagtaactaaccatagcgtctactgctccaccaagggtgccctggacatgctgaccaaggtgatggccctagagctcgggccccacaagatccgagtgaatgcagtaaaccccacagtggtgatgacgtccatgggccaggccacctggagtgacccccacaaggccaagactatgctgaaccgaatcccacttggcaagtttgctgaggtagagcacgtggtgaacgccatcctctttctgctgagtgaccgaagtggcatgaccacgggttccactttgccggtggaagggggcttctgggcctgctgagctccctccacacacctcaagccccatgccgtgctcatcctacccccaatccctccaataaacctgattctgctgccca

SEQ ID NO: 289057 - DNA, 1000 bp, Homo Sapiens
tccagaaccacaagtaaaattggaggatgtcctcccactggcctttactcgcctttgtgaacctaaagaagcttcctacagtctcatcaggaaatatgtgtctcagtattatcctaagcttagagtggacatcaggcctcagctgttgaagaacgctctgcagagagcagtagagaggggccagttagaacagataactggcaaaggtgcttcggggacattccagctgaagaaatcaggggagaaacccctgcttggtggaagcctgatggaatatgcaatcttgtctgccattgctgccatgaatgagccgaagacctgctctaccactgctctgaagaagtatgtcctagagaatcacccaggaaccaattctaactatcaaatgcatttgctgaaaaaaaccctgcagaaatgcgaaaagaatgggtggatggaacagatctctgggaaagggttcagtggcaccttccagctctgttttccctattatcccagcccaggagttctgtttccgaagaaagagccagatgattctagagatgaggatgaagatgaagatgagtcatcagaagaagactctgaggatgaagagccgccacctaagagaaggttgcagaagaaaaccccagccaagtccccagggaaggccgcatctgtgaagcagagagggtccaaacctgcacctaaagtctcagctgcccagcgggggaaagctaggcccttgcctaagaaagcacctcctaaggccaaaacgcctgccaagaagaccagaccctcatccacagtcatcaagaaacctagtggtggctcctcaaagaagcctgcaaccagtgcaagaaaggaagtaaaattgccgggcaagggcaaatccaccatgaagaagtctttcagagtgaaaaagtaaattttataggaaaaaagggtatcatgatgaaattcaaaatcttattttctaagcacttttgatatcaagcaagtggcttcctttttgagatat

SEQ ID NO: 289058 - DNA, 1000 bp, Homo Sapiens
tatctatgtaaagttattagaatggtatctgttcattttagtgatatgaagatcacaactaacaactgacaaatcagagtttgccagttcaaattcagcatggctgcagctgattaagaaattgatatgattattctttgctagcctctcttactaatggaattatatactggccagtaaaatgggcctcccaattgctgtttcagcaggttttaaaccttcaggaacaccagttaggaaaatagctccagaaaatatagatatattttatttttattaaaatggcagtctacatcataattggcatttctcaagactgtctttaccagaatctgtgtgaaataaggcaatctagtctccttgaaaaaaaaatctcttggatgtttaggaaggaagacttggccgtgatgtggtgtcctggctttgtggtgtagtgctgtgtgtatggagttagtgtaaaaacatggattacaccaagtggaagaaacgtcttcttgccaagctcattcttagaacttacacatctagaacagcttccactttggcagtgaggtcgtagccttttaggtggaagaagtgagggtgcagcgtgtcagacacaacattcatgttactcttacattggaatctgaaggtagttcagacttcgtgggttttgtttttaagcaaaacaatgtgaaaacatttaagtttgaaatgttgcatttgaagttatgatcatttaatatattcatattaccaagactattatactggaagtggtttttgtgttataaaggtttaattttacataaggcagttacttaatgtgatttttaacccttaaaaaagtggagatgtatacatttgttaacaatgccatgaaagcattttctttctcctaaggaaaagtgaatttcttatcagaatatctggctggccctgtaatttaaattaaaataaaattttggagaaacaaaaaaaaaaaaaaaaaaaaaaaaaaaaaaaaaaaaaaaaaaaa

SEQ ID NO: 289059 - DNA, 1000 bp, Homo Sapiens
agcgcactcatcaggaaactccgggacgttttacagcagaggctgatcaaattcttcattgaccagagtaaaaaagatgctgagaagtatgcaaagttttttgaagattacggcctgttcatgcgggagggcattgtgaccgccaccgagcaggaggtcaaggaggacatagcaaagctgctgcgctacgagtcctcggcgctgccctccgggcagctaaccagcctctcagaatacgccagccgcatgcgggccggcacccgcaacatctactacctgtgcgcccccaaccgtcacctggcagagcactcaccctactatgaggccatgaagaagaaagacacagaggttctcttctgctttgagcagtttgatgagctcaccctgctgcaccttcgtgagtttgacaagaagaagctgatctctgtggagacggacatagtcgtggatcactacaaggaggagaagtttgaggacaggtccccagccgccgagtgcctatcagagaaggagacggaggagctcatggcctggatgagaaatgtgctggggtcgcgtgtcaccaacgtgaaggtgaccctccgactggacacccaccctgccatggtcaccgtgctggagatgggggctgcccgccacttcctgcgcatgcagcagctggccaagacccaggaggagcgcgcacagctcctgcagcccacgctggagatcaaccccaggcacgcgctcatcaagaagctgaatcagctgcgcgcaagcgagcctggcctggctcagctgctggtggatcagatatacgagaacgccatgattgctgctggacttgttgacgaccctagggccatggtgggccgcttgaatgagctgcttgtcaaggccctggagcgacactgacagccagggggccagaaggactgacaccacagatgacagccccacctccttgagctttatttacctaaatttaaaggtatttcttaacccgaaaaaaaaaaaaaaa

SEQ ID NO: 289060 - DNA, 1000 bp, Homo Sapiens
accgcaagtgaaggatctgaacaaccaaagaagagagcctctatccagaggacctcagcaccccctagtaggcctcctccacccagagccactgcaagccccaggccctcctcagggaacataccttccagccctacagcctctggagggggttcacccaccagccctagggcctccttggggactgggactgcaagtcctaggacctccctagaggtctctcctaatccagaaccaccagagaagccagtaagaactcctgaggccaaagaaaatgaaaacatccacaatcagaaccctgaagaactttgtacttcccccaccttaatgacatctcaggttgcttcagagcctggagaggcaaagaagatggaagacaaggaaaaggataataagcttatctcagctaactcctcggagggccaagaccagcttcaagtctccatggtaccagaaaacaacaacctcacagcacctgaacctcaagaagaggtatccacaagtgaaaatccacaactctgaagagaaactaccaagactcctcctgccccaaacctcgccagagaagctcttcaaccagagggtataggtcagagggatataagagccagcatccatccctgggttctcagtaggaatgctggtgctgtctaaagacctggcattaatggaggcggaggagcagccttacgggagggatggagggaggcaggctggggagaagagaacattagactcagggaatatttaattctggttttagcattattagaataagactttatacattaactaaagtggagctttaatcactataaaaagcaaaagtatctatagacacagacacttgcctatacagagacataaccacacacactcagaggatagtgaacaaatctgtctttgacttacgacccattttgcaagacttaaagccggaagaacacattttcagattgttaaataaagtctgattctgactaaaaaaaaaaaaaaaaaa

SEQ ID NO: 289061 - DNA, 1000 bp, Homo Sapiens; identical to SEQ ID NO: 117357

SEQ ID NO: 289062 - DNA, 1000 bp, Homo Sapiens
ccacattgatgacttgtttccttttttcttttcttttcttttcttttttctttctttctaaaatagattggtctgagaagaaaataagtaatttgaggccatttggaagatgggcccaatttcttaagtgatgagagagcacgaaattccataaccagtacaggcctgtgcttttacatgggctttttagttcacaaagcactttcaaatttatgggacaggaaatgcaggatgggactccccagggaacgcagggtgaagggaacaaagctggaggctctggagctgggtctgttttgacggtcaagtccagggctcattttggttattctactgcctctaggccagggtagtcctaacacagcctgacataggagagcccctggctgagcatggcagccttgaagacaccacaggccaaaacatgaggggcagaaatgggatcacagagtctgttgctagaatcttggcaacatacagcaggaaagccttgataaatcgggagtccaaaggagacaccatatttatggagaacattaggacaaaaagtcaccaacttactttgtaacattttaataatgacttaagggtcaagattttttcttctgaaaattatgttctgagttaggcagaacatagccatggccctgggccaccctgtgctatctgaaatgacctcaatacactaatgccaacctcagcgtcatgccagaatgcacagggcagcccagggagatcacacctttggcaaagtccagacaaggcccactgcagttcctatggcgccagtcaccagctcctagacagcacttgggtaccccattggggtcttggagaggaagacatgtgaacataacggttccctgaaattgctcctacccatccatatttctggtcatgctttcagtctgacaaaaatggatgatactgctgtttttggtaacaaacagtgaatattcataagaacaccaaaaaaaaaaaaaaaaaaaaaaaaaaaaaa

SEQ ID NO: 289063 - DNA, 1000 bp, Homo Sapiens
gtgccatgatctctctagaaattccgcaagtcaacatcatgacaaaaatggatctgctgagtaaaaaagcaaaaaaggaaattgagaaatttttagatccagacatgtattctttattagaagattctacaagtgacttaagaagcaaaaaattcaagaaactgactaaagctatatgtggactgattgatgactacagcatggttcgatttttaccttacgatcagtcagatgaagaaagcatgaacattgcattgcagcatattgattttgccattcaatatggagaagacctagaatttaaagaaccaaaggaacgtgaagatgagtcttcctctatgtttgacgaatattttcaagaatgccaggatgaatgaagagtttactaaaagtaaccatctaaagagcttgtggccaaaccagcagaacattcttctcttcaaaggatgcaatagtagaaagctacttattttaatgaaaaaaagtaaaacttcgttctttatcagcctcatgcctgaatcaaatttttaattattctgaaactgctgctgtttaaagtggaatcttttagtattataacagcatcactttagattttgtaagtcaaaattgaaatgaatgcacatagatttatatataaattagcacctgagctaaggttaaggctggtctaaacttattttcactttttgtattatttttgagatgcaggaattactgtaacaaaatatgtatgtccgaagggaaaaagctgcaaggatatatataagaccactgcttatctgtatcttcccattttcctatattgaaaatgtatattatttatataacttaaaaagtaaaaataactatgttttgagatatgtatgtgtatatataaaagaaacaaaggtttttaatgattcttggacctagataacaagtaaaaaaaaaaaaaaaaaaaaaaaaaaaaaaaaaaaaaaaaaaaaaaaaaaaaaaaaaaaaaaaaaaaaaaaaaaaa

SEQ ID NO: 289064 - DNA, 1000 bp, Homo Sapiens
taaagagctacagaaagttcaggatatcaaagaagtcaagcaaaacatccatcttatccgagcccctcttgcaggcaaagggaaacagttggaagagaaaatggtacagcagttacaagaggatgtggacatggaagatgctccttaaaaatctctgtaaccatttcttttatgtacatttgaaaatgccctttggatacttggaactgctaaattattttattttttacataaggtcacttaaatgaaaagcgattaaaagacatctttcctgcattgccatctacataatatcagatattacggatgttagattgcatctcagtgttaaatctttactgatagatgtacttaagtaaatcatgaaaattctacttgtaactatagaagtgaattgtggacgtaaaatggttgtgctatttggataatggcactaggcagcatttgtatagtaactaatggcaaaaattcatggctagtgatgtataaaataaaatattctttgcagtaaaatattccctttgttaatgttatagaaggggggatacaaaaaggaactaacaatttgtatggcagtgtcagatatttttattttagtatttcctgttttggtttatttgcatcttagaagagcataatgacattgtttgatgaagcctaattatgctggactgttttgacctggtttaacccttctgataggtagttgtggatgctggggatgagaactgaataatctttgcctggagtgacactacactctagaatttccactttggagaatactcagttccaacttgtgattcctgatagaacagactttacttttctagcccagcattgatctagaagcagaggaatcccagcgccttttaaaagttgttatgtggttttcttttaaaaagctcctgtttttggaaagtagaatttatgggtacaacgtatgttcattatttgtacataaaataaaaccatttaaaaagtaaaaaaaaaaaaaaaa

SEQ ID NO: 289065 - DNA, 1000 bp, Homo Sapiens
cgcgcaagaacttctcggtgagccacctcctggacctggaagaggtggcggcggccgggcggctggcggcgcgccccggggccagggccgaggcgcgggagggcgcagcacgggagccgtccgggggcagcagcggcagcgaggcggcgccgcaggatggtgagtgtcccagcccggggcgcggtagcgccgccaagcggaagaagaagcagcggcggaaccgcaccacgttcaacagcagccaactgcaggcgctggagcgcgtgttcgagcgcacgcactaccccgacgcctttgtgcgcgaggagcttgcccggcgcgtcaacctcagcgaggcgcgcgttcaggtctggtttcagaaccgccgcgccaagttccgcaggaatgaaagggccatgctggccagccgctctgcctcgctgctcaagtcctacagccaggaggccgccatcgagcagcccgtggctccccggcccaccgccctgagtccagattatctctcctggacagcctcgtccccctacagcacagtgccaccctacagccctgggagctcaggccccgcaaccccaggggtcaacatggccaacagcatcgccagcctccgtctcaaggccaaggagttcagcctgcaccacagccaggtgcctacggtgaactgaagtccagtcccaccaggacccagacgcctccctgggtggacagcaatagaaaagggggcagacgcccaggaagtgaccttctcctggatgagctctcctggcccgtctgtccagcctggactcccgagcccacgaggctgttgaggcccctgcagccgggcccagctcttctgtccttggccaccagagactgcagcccacaacccttggaggggttgggccggaaggtggaagagcctgccaaggacctcatttagtttgtgtattaaaaccaaaaagcttttgtctttaagaaataaaaccatttttttaagccccaaaaaaaaaaaaaaaaaaaa

SEQ ID NO: 289066 - DNA, 796 bp, Homo Sapiens; identical to SEQ ID NO: 222599

SEQ ID NO: 289067 - DNA, 1000 bp, Homo Sapiens; identical to SEQ ID NO: 222600

SEQ ID NO: 289068 - DNA, 1000 bp, Homo Sapiens; identical to SEQ ID NO: 222602

SEQ ID NO: 289069 - DNA, 1000 bp, Homo Sapiens
ggtgaatgatgtctggaacttcaagatgacgggcaggtatgagatgtacgcacgggagctcgccgaagctgtcaagtccaactacagccccaccatcgtgaaagagtagccggcttcagtgcctgccttggggtgaggaagacacctctgccccagtggattagcaagtgtggcaggcttaacatgtccaggttctccccaataacattgtccaggttggttttaaaattcccaggcagggggagagtggcatggggagtgacttcttaatgggtaaggggctgcttacttctggggtattggaaatgtttggggactaggtagaggtgaatgtactaaatgccactgaatttgtatacttcagaatgtttgttatgtaaattttacctcaactaaaaaaaaaaatgcccaggtactgcttgtgcaggtggatttgaggttaggcagatgatgctgtccatcccgtacaccagtgggaagagggtgagggctgatccagagaccctgagcctacagcaaggctgtggtgggtcggatggtctttggatgtgtcagcttagctaggccacagtcaccagtaattcaatcagacactaatctaggtatttctgtgaaggtattttgtagatgtgacagaagtccattcccaattgactaagtaagtgagattatctcagataatctgggtcagcctgacctgattagtcagaaggcctaaagaacagagctaagggtttccctgaggaagaaattctgcctgaggacagcagcccagtgcttggcgagagttcctgacagtctgcccttctgatagcctgcctcacagagtttagacatgactagccagctcctacaatcactgaagtcaattccttgcaataaatctcaatatatcccctaaaaaaaaaaaaaaaaaaaaaaaaaaaaaaaaaaaaaaaaaaaaaaaaaaaaaaaaaaaaaaaaaaaaaaaaaaaaaaaaaaaaaaaaaaaaaaaaaaaaa

SEQ ID NO: 289070 - DNA, 1000 bp, Homo Sapiens; identical to SEQ ID NO: 222604

SEQ ID NO: 289071 - DNA, 1000 bp, Homo Sapiens; identical to SEQ ID NO: 222605

SEQ ID NO: 289072 - DNA, 1000 bp, Homo Sapiens; identical to SEQ ID NO: 117363

SEQ ID NO: 289073 - DNA, 1000 bp, Homo Sapiens; identical to SEQ ID NO: 117364

SEQ ID NO: 289074 - DNA, 1000 bp, Homo Sapiens
atgccaaccgggcaagcagcgggggtggcggaggaggcctcatggaggaaatgaacaaactgctggccaagaggagaaaagcagcctcccagtcagacaagccagccgagaagaaggaagatgaaagccaaatggaagatcctagtacctccccctctccggggacccgagcagccagccagccacctaactcctcagaggctggccggaagccctgggagcggagcaactcggtggagaagcctgtgtcctcgattctgtccagaaccccgtctgtggcaaagagccccgaagctaagagcccccttcagtcgcagcctcactctaggatgaagcctgctgggagcgtgaatgacatggccctggatgccttcgacttggaccggatgaagcaggagatcctagaggaggtggtgagagagctccacaaggtgaaggaggagatcatcgacgccatcaggcaggagctgagtgggatcagcaccacgtaaggggccggcctcgctgcgctgattcgtcgagcccatccggcgacagaggacagccagaagcccagccagccccagactccagtgcaccagagcacgcacaggagcctgggcgcgctgctgtgaaacgtcctgacctgtgatcacacatgacagtgaggaaaccaagtgcaactcctgggtttttttagattctgcctgacacggaacaccaggtctgctcgtcttttttgtgttttatatttgcttatttaaggtacatttctttgggtttctagagacgcccctaagtcacctgcttcattagacggtttccaggttttctcccaggtgacgctgttagcgcctcagctggcggtgacagccggcccagcgtggcgccaccacacaccgcagagctgtccaggcacagctccgtccccagcgctcatggtgttgaaactgtctgtcatgcaccacggtgtctgtgtccacacagtaataaacggtttactgtccgcaaaaaaaaaaaa

SEQ ID NO: 289075 - DNA, 1000 bp, Homo Sapiens
tttaattatgtgctcttaatatttgaagatgagagttaatacctgagatgtttttctgcaaccaaaattcattaaatttggctgccttatcctttttttaagctaatgaaactacaggtttgaaaaatgacaaagctgttcagatgatgctattaaagaaatgtgtgtactaagcaaaaatatataaatagtgacaaatacacattaccaagcttatcttgcaagggagttattttcatctaacatagaaagtgtgttttatcagacaaatgcttttattttcattctaataatttgatacagaaattagtaaaggcatttttttctttttttttccagtaaatacattgggtctataaatgtgcatttgtaagggccacaaaagtgaacgtgtggtactgtagtaccacgtgggagacctctggttatggtttagtcctagttcctttgttactcctgtgagcaccgagaagaactgggcgactcccagtcccacctgtgctgtgacagtcccacgtggctatgacagactgtttagtacttacccttctcaggttcctcagtgcaggggtgcatcagggcctcaataataggggtatacctgggaggatccagcagtaatccccagggtactaggattactagtactctgatggaactagtcttccttccttattcctcgaacatgcagtacataaaaaggggaaaaggagaaaaaaaaagccttactttgttttacttgccatttattgtaaggaaactttaaagcattttttaggaaatactcaaaagcaaggttggaaaatgttttatctttctatagaaagttgggtacagtatgtaactgcgggaaacccactgcccctttgtaagctgtggaacccaaactgtatggggatatttgatgttttcagaaagaggaagaaaatatggtccaaattaaattttccaaagatacctcaaaaaaaaaaaaaaaaaaaaaaaaaaaaaaaaaaaaaaa

SEQ ID NO: 289076 - DNA, 1000 bp, Homo Sapiens
gaaggacaaattgaaattgtctgccaataccaaggatattcttgtatatttgaaaaataacttattatttgaattgttgtggttttgtttgtatttgagagctcttgttagctgatattcatgtttgaggtcataaaattgtctctggtctgaccaaacagaagtcatctttacagaggtgatatgcttgatctacacagagatgtgacttgatctgtagcaccaatacaatgtaggtctcagtttgagagaaataggaagccctttgcagttgaggtgttaggaacctgctggtcatggtgtggaaggccaaatgaagctgccacagggtttcttgtcagtcctttgggaaatgggagggagtagtttggggaggagggtgggaaccctaatttccacagaatgaaattttgatgttaaatgacatgtatacaaattcttccttaagtgaaagttatgctgcatcgaattgtaactgaaagtatagatccaacaaatagagactgggttctagagagttctggtctatagaaacccaaaactaaaatctctcataactcaagtatggaatactttttttaaagaaattcttatcatgggtgttgtaataatgaagacgaatttgactttatgcagtgttctgcagcatgcctcccccacatctcatagcaccaggttgtgtctgacctgacataccctgcagctctcagctggctgcagtaacattttgtgggagaaagaggagctggagttacagaaatgattgtctcttggttctcagtttttagcccttgagaggacatacttttccagcctcatgggtatggcactcttaattaaaatttcagtggctgtttactggatgaggcagatttttcacatttttgccaattaaatatattttatatatagtaaggttaattttttcagtttttttaatgtaaaagcaagtgaaattttaataaacttctgtaatttcccaaaaaaaaaaaaaaaaaaa

SEQ ID NO: 289077 - DNA, 1000 bp, Homo Sapiens; identical to SEQ ID NO: 222606

SEQ ID NO: 289078 - DNA, 1000 bp, Homo Sapiens
tcaaagttgctcagcggagcccagtagattcaggcaccatcctccgagaacccaccacgaaatccgtcccagtcaataatcttcctgagagaagtccgactgacagccccagagagggcctgagggtcaagcgaggccgacttgtccccagccccaaagctggactggagtccaacggcagtgagaactgtaaggtccagtgaaggcactttgtgtgtcagtacccctgggaggtgccagtcattgaatagataaggctgtgcctacaggacttctctttagtcagggcatgctttattagtgaggagaaaacaattccttagaagtcttaaatatattgtactctttagatctcccatgtgtaggtattgaaaaagtttggaagcactgatcacctgttagcattgccattcctctactgcaatgtaaatagtataaagctatgtatataaagctttttggtaatatgttacaattaaaatgacaagcactatatcacaatctctgtttgtatgtgggttttacactaaaaaaatgcaaaacacattttattcttctaattaacagctcctaggaaaatgtagacttttgctttatgatattctatctgtagtatgaggcatggaatagttttgtatcgggaatttctcagagctgagtaaaatgaaggaaaagcatgttatgtgtttttaaggaaaatgtgcacacatatacatgtaggagtgtttatctttctcttacaatctgttttagacatctttgcttatgaaacctgtacatatgtgtgtgtgggtatgtgtttatttccagtgagggctgcaggcttcctagaggtgtgctataccatgcgtctgtcgttgtgcttttttctgtttttagaccaattttttacagttctttggtaagcattgtcgtatctggtgatggattaacatatagcctttgttttctaataaaatagtcgccttcgttttctgtaaaaaaaaaaaaaaaaaaaaaa

SEQ ID NO: 289079 - DNA, 1000 bp, Homo Sapiens; identical to SEQ ID NO: 117367

SEQ ID NO: 289080 - DNA, 1000 bp, Homo Sapiens; identical to SEQ ID NO: 222608

SEQ ID NO: 289081 - DNA, 1000 bp, Homo Sapiens; identical to SEQ ID NO: 222609

SEQ ID NO: 289082 - DNA, 1000 bp, Homo Sapiens
tatctgcagtctttcacagatttgtattatgctgaagagtttcatctgacaatctgcttcaagaaatctcagaaaatatgataacattttaactttcgttttagagcacgttttggtcatttttaaaaatacctaaagtgccagaccggaacctatagctactgctagaagtcttaaaaaaaccaacagcagcacaggatgtattaagaattatatgaagtcaggtttgtttttttttttttttttttcaaagcacagtactgttagctgtttttgtggacaggattcgattaagtattccctcttgtcaaactggaagctaggggaaaaagagggatttttatcctttactcttctagagtactgttaatgcccctttcccacagtcttttatataattaaatatatgtcaatacacattagaatcagatttgaaaaagttaaaacaatttcattgttgtaattgttccctttctgttttcatatagtgaataacctttaaagggttgttttgttttgttttgaattataggagttataatctttggagatgattgcatatctcattagatatgcaatataaatttatctgagtgaacaaagtgctaaataaatagatctacattttgtacatatttatataaaatttacctttaagtatttactttaaaaaatttaatggcttaactcgaacttgaagacacatacttcaactgtccttattgtccattaaactgataattttgatttttcttgcttttatagattttactatataggaatcaagatttaagaaattttgcattaaaaatagtgtaccaatgcttcatatacgttagttatttgctattatgtagggaagaggattgttatttcaaagatatattaaagaacagttgcatctgaatataatcatgatgcattcaatgaagttcatatccatgaattcactcctaatataccctaataaagtggttgaaaccgaaaaaaaaaaaaaaaa

SEQ ID NO: 289083 - DNA, 1000 bp, Homo Sapiens
ttctactgtattcccaaaaggcaatattaaggtagatagatgattagtagtatattgttacacactattttggaattagagaacatacagaaggaatttaggggcttaaacattacgactgaatgcactttagtataaagggcacagtttgtatatttttaaatgaataccaatttaattttttagtatttacctgttaagagattatttagtctttaaattttttaggttaattttcttgctgtgatatatatgaggaatttactactttatgtcctgctctctaaactacatcctgaactcgacgtcctgaggtataatacaacagagcactttttgaggcaattgaaaaaccaacctacactcttcggtgcttagagagatctgctgtctcccaaataagcttttgtatctgccagtgaatttactgtactccaaatgattgctttcttttctggtgatatctgtgcttctcataattactgaaagctgcaatattttagtaataccttcgggatcactgtcccccatcttccgtgttagagcaaagtgaagagtttaaaggaggaagaagaaagaactgtcttacaccacttgagctcagacctctaaaccctgtatttcccttatgatgtcccctttttgagacactaatttttaaatacttactagctctgaaatatattgatttttatcacagtattctcagggtgaaattaaaccaactataggcctttttcttgggatgattttctagtcttaaggtttggggacattataaacttgagtacatttgttgtacacagttgatattccaaattgtatggatgggagggagaggtgtcttaagctgtaggcttttctttgtactgcatttatagagatttagctttaatattttttagagatgtaaaacattctgctttcttagtcttacctagtctgaaacatttttattcaataaagattttaattaaaatttgaaaaaaaaaaaaaaaaa

SEQ ID NO: 289084 - DNA, 1000 bp, Homo Sapiens; identical to SEQ ID NO: 117368

SEQ ID NO: 289085 - DNA, 1000 bp, Homo Sapiens; identical to SEQ ID NO: 117369

SEQ ID NO: 289086 - DNA, 518 bp, Homo Sapiens; identical to SEQ ID NO: 117370

SEQ ID NO: 289087 - DNA, 1000 bp, Homo Sapiens
gatggaaggaatctgtggagaccccatcctcctccctgcacactgtggatgacatggtaccctggctggaccacatactggcctctttcttcaacctctctaatatgggctccagacggatctctaaggttcccagctctcagggttgactctgttccatcctctgtgcaaaatcctcctgtgcttccctttggccctctgtgctcttgtctggttttccccagaaactctcaccctcactccatctcccactgcggtctaacaaatctcctttcgtctctcagaacgggtcttgcaggcagtttgggtatgtcattcattttccttagtgtaaaactagcacgttgcccgcttcccttcacattagaaaacaagatcagcctgtgcaacatggtgaaacctcatctctaccaacaaaacaaaaaaacacaaaaattagccaggtgtggtggtgcatccctatactcccagcaactcggggggctgaggtgggagaatggcttgagcctgggaggcagaggttgcagtgagctgagatcacaccactgcactctagctcgggtgacgaagcctgaccttgtctcaaaaaatacagggatgaatatgtcaattaccctgatttgatcatagcacgttgtatacatgtactgcaatattgctgtccaccccataaatatgtacaattatgtatacatttttaaaatcataaaaataagataatgcaccgtctccacccctctcatatttactttctgaaggaaatgttaggtcttctcaaggtaaagttctatatttattatagcgtttaggcatttcttgaccatctaatgagtgtaaaactgtaccactgggccaagtgcagtggatcatgtctgtaatcctagcactgtgggaggccaaggcaggaggatcgcttgagcccaggagttcaagaccagcctgggcaacatagtgagaccccatctctacttaaaataaagaagtaaaaattgttttaaaa

SEQ ID NO: 289088 - DNA, 1000 bp, Homo Sapiens
gcatcctggagggctgtgccttcctcaatgggtctccgcagaacaccctggtgcccggagctcttgagctcgcgtggcagcaccgggtttttgtgggcggagatgacttcaagtcaggccagaccaaagtcaagtccgtgcttgtggacttcctcattggctccggcctcaagaccatgtccatcgtgagttacaaccacctgggcaacaacgatggggagaacctatcggcgccattgcagttccgctctaaggaggtgtccaagagcaacgtggtggacgacatggtgcagagcaacccagtgctctatacgcccggcgaagagcctgaccactgcgtggtcatcaagtatgtgccgtacgtgggtgacagcaagcgcgcgctggatgagtatacctcggagctgatgctgggcggaaccaacacactggtgctgcacaacacgtgtgaggactcgctgctggccgcacccatcatgctggacctagcgctgctgaccgagctgtgccagcgcgtgagcttctgcactgacatggaccccgagccgcagaccttccaccccgtgctgtccctgctcagcttcctcttcaaggcgccactagtgccgcccggcagcccggtggtcaatgcgcttttccgccagcgcagctgcatcgagaacatcctcagggcctgcgtggggctcccgccacagaaccacatgctcctggaacacaaaatggagcgcccagggcccagcctcaagcgagttggacccgtggctgccacctaccctatgttgaacaagaaaggaccggtacccgctgccaccaatggctgcaccggtgatgccaatgggcatctgcaagaggagcccccaatgcccaccacctgaggccccggtcacacagtttctcggctcttcctccccgctgccccccacgaccctaccttgaaggcccccacaaataaaggcgctgccactcagccctcaaaaaaaaaaaaaaaaaaaaaaaaaaa

SEQ ID NO: 289089 - DNA, 1000 bp, Homo Sapiens; identical to SEQ ID NO: 117371

SEQ ID NO: 289090 - DNA, 1000 bp, Homo Sapiens
caacagtaattcagcaaatgacgttgatttcagcacaactttgacataagctctacattgcgattgtgacaacatagcttatgaaatcttttcagcttattaagtagctctttggtaaacaccaaagaagtttctgatagtgtctgcacaacagcaaaccaacatttggtgaggaattagcaatttcttgccaaagaaaattgattctgcccaattattttttgagctacacttgtgttttagaatatctgtttctgtaatattgagagttattttatagaaatgatttcttaattagctgttgtgagatatttctcgggtccttgcagaaaaaaacatacagactgtgaacaaatcattcacaaacagaataaaacagagccaacaacagtattttaagggtcacttgcctcctgttgacacaattgttgctaaatcaaaagaagcgttgtccaggtgtgtctacatctagtgttacttttaatgagaatttgaatgtttattgaacaatagtacttgaatgaacatttataaatgtaattattgcgatcactggttaagaatgttttatatatccttataatatttttcactgatcaaaatgttgttctgctttttcatttcttaaggaatacatgtttgggatttttattttttacgtgtccgaagataagctccaggtcttatcgtatcccttgccatctgaacttgtttgcactgcttctgtttgaaagagcatcttgaaaaacttccccggtatgatgattgttggtaacaactttttctatagtcattgatggagtagatcatgatggaggggaaatcactggagatcaaatatgtaaaatcatttcaaatataaaatccagtttactcatggattttagctattttttcactgggtaaattatactacatttatttacaaatgagtttatgcattttcatggctcttaataaacatattgttttcccttgaaaaaaaaaaaaaaaaaaaaaa

SEQ ID NO: 289091 - DNA, 1000 bp, Homo Sapiens; identical to SEQ ID NO: 117372

SEQ ID NO: 289092 - DNA, 1000 bp, Homo Sapiens
gtggacactcagagtgatctcatagccactcagagagatctcatagccactcagaaagatctcatagccactcagagagatctcatagccactcagagagatctcatagtcactcagagagatctcgtggccactgagagagatctcataaatcagtcagggagatctcatggccaatcagaaagacatcagagatactcaacaggtaaaaatacaataactacttaatcatcagaacaatgtgttgaattctgtggaaatagaaaagcatatatctatattctaatggctaaatatgtatttgttgaaacatgtatattgggacaaagacataaatattagaatggaggtaatacatacatagtatcaatattgtttcaacttgatgtcctctaagctatcatccagttacccaagatgtcccattaagttgttcccggtaggtctgctttccctggaagagccgtatgtactcagcctttcctattgggccttccccacaattagaatattttgacttagtgtcctgtcccccttggacgttccaacttgacttagtgtccagtgccccttggacattccaacctggtaggtaagctaatctaacaactaactgccaaattgataatatataatctatgataatgaatatctcttttgtgtctccttcctaagccatcctcagagagtccttagcagacaaatggtagatgtatctttgggcagctgaacttttctgctttcctcaaatcagaccatatgagaggatatattctatgcatagatgtaatgctaaccttctgaatatattttgaatacatttatatattcactgttgccttataaaactgttagggtaggtctgtctaccctagcaaaagaaacacagaaatttaaatgtactgggagttatkkkkttaaaaacacaagatatgttaactgcagtttgtttggttattcaataaaagttttagttttaaaaaaaaaaaaaaaaaaacaa

SEQ ID NO: 289093 - DNA, 1000 bp, Homo Sapiens; identical to SEQ ID NO: 117373

SEQ ID NO: 289094 - DNA, 1000 bp, Homo Sapiens; identical to SEQ ID NO: 117375

SEQ ID NO: 289095 - DNA, 1000 bp, Homo Sapiens; identical to SEQ ID NO: 117376

SEQ ID NO: 289096 - DNA, 1000 bp, Homo Sapiens
tatgacacattccatactgtggctgacatgatgtatttctgccagatgctggcagttgtggaaactatcaatgcagcaattggagtcactacgtcaccggtgctgccttctctgatccagcttcttggaagaaattttattttgtttatcatctttggcaccatggaagaaatgcagaacaaagctgtggttttctttgtgttttatttgtggagtgcaattgaaattttcaggtactctttctacatgctgacgtgcattgacatggattggaaggtgctcacatggcttcgttacactctgtggattcccttatatccactgggatgtttggtggaagctgtctcagtgattcagtccattccaatattcaatgagaccggacgattcagtttcacattgccatatccagtgaaaatcaaagttagattttccttttttcttcagatttatcttataatgatatttttaggtttatacataaattttcgtcacctttataaacagcgcagacggcgctatggaaaaaaaagaaaaagatccactaaaaagaaagatttagatggcttcttgccagtttgagcctaatctgattcttacagttttaccttcttgaaccaatgtaaaagtttttttaatgttaaatgattaaattctcagtgaggctatcttccttttccccagtaacattcctgaatttactgttatcttattgtagtacttgcatgacatggattcctgatatctgatgagaggttcattcttgtgtattcagttaatgacaccaaaaggctcagcccaccccaaccctatctcatgttcagtctgtctaatacatgccagagatttttttttcaaaaagtgctttatccctacaatgtactgacagttcttacagttgaggatttggttcttttcagctaattgcttggtggattaaaaaaagcaagactaatgtcaactctaatggaaggctggttaaaagtggactcaggcaagg

SEQ ID NO: 289097 - DNA, 1000 bp, Homo Sapiens; identical to SEQ ID NO: 222614

SEQ ID NO: 289098 - DNA, 1000 bp, Homo Sapiens; identical to SEQ ID NO: 117377

SEQ ID NO: 289099 - DNA, 1000 bp, Homo Sapiens
caatctggagacggccatgtctgtgattggagacagaaggtcccgggagcagaaagccaaacaggagcgggagaaagaactggcaaaagtcactatcaagaaggaagatctggagctaataatgactgagatggagatatctcgagcagcagcagaacgcagtttgcgggaacacatgggcaacgtggtagaggcgcttattgccctaaccaactgatgcgtgctttctcaaatatacctactggattaatttatggcaataaaatttttttttgtctttttcagttttatcatcttgggtcaagtagagtgtatactatatcctatgttgtggagaatttatatgttggagactaactgaatttaagtgacccattaaaatctagcacacctgtatgaaaaatcagtgtagaagaatacctcatgtgcagatgctaggtggcaggccagtctcattcatctgactagctctcaacagtattcaaggtacatctggagtctcagcagagttactgtactcaaatggcatgtgtctccaagacagcttatgaatatctaaaaggccagctacctgcctaggagccactatatatatagatagatgtaggttatgaacccagttcataggccaccttgagttagaattttggtacctacaacatgcttgattttgagtgattaaaaaaaaataatttggctgggtgctgtggctcacgcctctaatcccagcactttgggaggtcgaggcaggtagatcacgaggtcaggaattcaagaccagcctggccaacatgtgaaaccccgtctccactgaaaatagaaaaattagctgggcatggtggtgggcgcctataatcccagctattctggaggctgaggcaggaatcgcttgaaattggaaagcagaggttgcagtgagctgagatcacactactgtactactgtactccagcctgggggaaagagtgaaactccatctcaaaaaaaaaaaaaaaaaaaa

SEQ ID NO: 289100 - DNA, 1000 bp, Homo Sapiens
tcggccagtcataaaagatgacaacagcagccaggccaacctttgaacctgccagaggtggaaggggaaaaggagaaggtgatttgagccaactttcaaagcagtattcaagcagagacctaccctctcatacaaagataaaatacagacagactactcaggatgcccctgaagaggttcgtaaccgtgacttcaggagagagttggaagaaagagagagagctgctgcaagagagaaaaatagggatcgtccaacccgagaacatacaacctcctcttcagtgtcaaaaaagccacggttagaccagattcctgccgccaaccttgatgcagatgaccctctaacagatgaggaagatgaagattttgaagaagaaagtgatgatgatgatactgcagctcttcttgcagaactggaaaaaattaaaaaagaaagagctgaagagcaggccaggaaggaccaagaacaaaaagctgaagaagagaggattcgtatggaaaacattctgagcggaaaccctctccttaatctcactggcccatcccagcctcaggccaacttcaaagttaaaagaaggtgggatgatgacgttgtcttcaagaactgtgcaaaaggtgtagatgaccagaagaaagacaaaagatttgtaaatgacacactgcgatctgaatttcacaaaaagttcatggagaaatatattaaatagtacagttttatgtgcttaattaaagactgtaaaacgtaaaggatcattctgactttttttatgagtttttttttcttttcccctgtctaaattgtgtgtgggcttccccagttttaaactcctatctttttctttagtgataccttacttgataatggacttgggaataggtttaacccagtttgcattctccaaatgtttccagtgatatgttttcctgggaaaagcaaatctgcctgtaataaatatttttaatctaaataaaaaaaaaaaaaaaaaaaaaaaaaaaaaaa

SEQ ID NO: 289101 - DNA, 1000 bp, Homo Sapiens
tacagcaacccaacgtctcatcttcccatagtaaagatgacggcgccttgaggtaagctacaggcaacaccacttccgcgtttctcttgcgccctggtccaagatggcggatgaagccacgcgacgtgttgtgtctgagatcccggtgctgaagactaacgccggaccccgagatcgtgagttgtgggtgcagcgactgaaggaggaatatcagtcccttatccggtatgtggagaacaacaagaatgctgacaacgattggttccgactggagtccaacaaggaaggaactcggtggtttggaaaatgctggtatatccatgacctcctgaaatatgagtttgacatcgagtttgacattcctatcacatatcctactactgccccagaaattgcagttcctgagctggatggaaagacagcaaagatgtacaggggtggcaaaatatgcctgacggatcatttcaaacctttgtgggccaggaatgtgcccaaatttggactagctcatctcatggctctggggctgggtccatggctggcagtggaaatccctgatctgattcagaagggcgtcatccaccacaaagagaaatgcaaccaatgaagaatcaagccactgaggcagggcagagggacctttgataggctacgatactattttcctgtgcatcacacttaactcatctaactgcttccccggacaccctccacctctagttgttactaagtagctgcagtaggcattgctggggaagaaacaaacacacaccaaacagtactgctacttagtttctaaggctgcacagggaagggaaagactgggctttggacaatctagaggtaatttatatccgcccccaggtggagcaacatgcgattctggaggcacgggggtaactgaaagtgagtacatatagtctttctggtttctggagataacccatcaataaaagctgcttcctctggtaaaaaaaaaaaaaaaaaaaaaaaaaaaaaa

SEQ ID NO: 289102 - DNA, 1000 bp, Homo Sapiens
catacaagcaagtgaagatcgaccagattgaggatttacaagaccagctagaggatatgatggaagatgcaaatgaaatccaagaagcactgagtcgcagttatggcaccccagaactggatgaagatgatttagaagcagagttggatgcactaggtgatgagcttctggctgatgaagacagttcttatttggatgaggcagcatctgcacctgcaattccagaaggtgttcccactgatacaaaaaacaaggatggagttctggtggatgaatttggattgccacagatccctgcttcatagatttgcatcattcaagcatatcttgtaaaacaaacacatattatgggactaggaaatatttatctttccaaatttgccataacagatttaggtttctttcctttctttgaaggaaagtttaattacattgctcttttattttttccattaagagactcattgcttgggaaatgctttcttcgtactaaaatttgattcctttttttcttatgaaaaacgaactcagtttaaaagtatttttagctcgtatgacttgttttcattcattaataataatttgaaataaaactaaggaaatggaatcttaaaagtctatgacagtgtaactctacagtctcaaaatgacctgataaattgataagacaaagatgagattattggggctgttcatattatgattcagaatcattttctattgtggtattataggttggttaaagtgatggcctttttgatgggttttgttgtgtcttgtgaacaagtcgttactgtgtccattattggaatggaattatcactactgtatcatgagtgggtattttgattctatggttccctcagtattacatcttgacttgtaatcaattatgaatatttcttgatatttaatgtataggacatttatttatactcaataaatatttttcaaaaggaaaaaaaaaaaaatcaaaaaaaaaaaaaaaaaaaaaaaaaaa

SEQ ID NO: 289103 - DNA, 1000 bp, Homo Sapiens; identical to SEQ ID NO: 117381

SEQ ID NO: 289104 - DNA, 1000 bp, Homo Sapiens; identical to SEQ ID NO: 117382

SEQ ID NO: 289105 - DNA, 1000 bp, Homo Sapiens; identical to SEQ ID NO: 117383

SEQ ID NO: 289106 - DNA, 914 bp, Homo Sapiens; identical to SEQ ID NO: 22485

SEQ ID NO: 289107 - DNA, 875 bp, Homo Sapiens
ggcctttccctcaggttttcctcttccccactgcggctccccagtcggcgcttgcgcggagaactcagcgctgagattgtctaaagccccaggaaaaatggtggaaaattcaccgtcgccattgccagaaagagcgatttatggctttgttcttttcttaagctcccaatttggcttcaaaaatctgaagggatctcgtgtttgctgagtgttccgtgtgccagcactagcctaggaggttttagtctctacaaatatttatacagcaccagacgcgatggcaaagtggataaagcctggtccctgcccttaaggaggtcgtggtcttgtggaggagacagatggtactttacctcgtgtgggcctttattcctgaatcttggctaaactctttaggtttaacctattggcctcaaaaatattgggcagttgcattacctgtctacctccttattgctatagtaattggctacgtgctcttgtttgggattaacatgatgagtacctctccactcgactccatccatacaatcacagataactatgcaaaaaatcaacagcagaagaaataccaagaggaggccattccagccttaagagatatttctattagtgaagtaaaccaaatgttctttcttgcagccaaagaactttacaccaaaaactgaactgtgtgtaaccatagtaacaccaagcacgtatttatttataagtttttgccattataattttgaccataaattaatttgaccatctctcttattaatagagaagtaaaaaatgtaagttgaccttctcttagattatgttcaatgaatattgtaaatgttcaagtattgttaatgaatagaataaatacaatattgcattcccat

SEQ ID NO: 289108 - DNA, 1000 bp, Homo Sapiens; identical to SEQ ID NO: 117386

SEQ ID NO: 289109 - DNA, 1000 bp, Homo Sapiens; identical to SEQ ID NO: 222618

SEQ ID NO: 289110 - DNA, 1000 bp, Homo Sapiens
gctgacgcagaacgcagattgtgtggtggtgctggacaacacagccctgaaccggattgccacagaccgcctgcacatccagaacccgtccttctcccagatcaaccagctggtgtccaccatcatgtcggccagcaccaccaccctgcgctaccccggctacatgaacaatgacctcatcggcctcatcgcctcgctcattcccaccccacggctccactttctcatgaccggctacaccccgctcactacagaccagtcagtggccagcgtgaggaagaccacggtcctggatgtcatgaggcggctgctgcagcccaagaacgtgatggtgtccacaggccgagaccgccagaccaaccactgctacatcgccatcctcaacatcatccagggagaggtggaccccacccaggtccacaagagcctgcagaggatccgggaacggaagttggccaacttcatcccgtggggccccgccagcatccaggtggccctgtcgaggaagtctccctacctgccctcggcccaccgggtcagcgggctcatgatggccaaccacaccagcatctcctcgctctttgaaagttcctgccagcagtttgacaagctgcggaagcgggatgccttcctcgagcagttccgtaaggaggacatgttcaaggacaactttgatgagatggacaggtctagggaggttgttcaggagctcattgatgagtaccatgcggccacccagccagactacatttcctggggcacccaggagcagtgatttccctccccactactccttctccttctagatggtaaccacagcctcgaccatgcctgctccctctgacccagcttcacctcatggacaacccttcttggttcatctccagcccgtgagctggtcctgcttcctcccttccatgccctaacttttaatatgcttgttcagctctaataaagtaataaagcttggttgtcagtataaaaaaaaaaaaaaaaaaaa

SEQ ID NO: 289111 - DNA, 654 bp, Homo Sapiens
gcagatggtaggaaatggagacggagaaatggcactaatggcccagccacctgagatgggatacctgggagggacatcttttcaagtagaggctgtgttggggcatggtgagagagggtcttagcaggtaaccttcctttcctctccagactgaggaatcagagttctgattgtggagtgcctctctctaggacggggctgcagcataggagtctcagctgcttacatccaggtccaggattatgtctgctaacagacgctggtgggtaccacctgacgacgaagactgtgtgtctgagaagctcctgaggaagactcgggaatctccactggtgcctataggcttaggaggctgcttggtggtagcagcatacaggatttaccggctgaggtctcgtggttccaccaagatgtccatacacctgattcacacccgagtggcagcgcaggcctgtgcagtgggtgcaatcatgctaggtgctgtgtacacaatgtacagcgattacgtcaagaggatggcacaggatgctggagagaagtaggactcctataggagccggggctgtccaactcccctaactcaatccctggtacattcctaataaagcagttttgaggaaaaacaaaaaaaaaaaaaaaaaaaaaaaaaaaaaa

SEQ ID NO: 289112 - DNA, 1000 bp, Homo Sapiens; identical to SEQ ID NO: 222620

SEQ ID NO: 289113 - DNA, 1000 bp, Homo Sapiens; identical to SEQ ID NO: 117388

SEQ ID NO: 289114 - DNA, 1000 bp, Homo Sapiens
ggaccacgtccccacccgagcactgctggccagtgcgcccgactctgcgcaacgagctggacaccttctctgtccacttctacatcttctttggcccaagtgtggcccttccccctgagcgcccagccgtgttcgccatgaggctgttgccagtgctggacagtggaggcgtcctcagcctggagctccagctcaatgcgagctccgtgcgccaggaaaacgtgacggtgtttggatgcttgactcacgaggtgcccttgagcctgggggatgcagcagtgacctgttccaaagagtccctggccggcttcctcctctctgtcagtgccaccaccagggttgccaggctgcgaatcccattcccgcagacggggacctggttcctggccctccgctccctgtgcggggtggggcctcggttcgtgcggtgccgcaacgcgacggccgaggtgcggatgcgcaccttcctgtccccatgcgtggacgactgcgggccctacggccagtgcaagctgctgcgcacacacaattatctgtacgcagcctgcgagtgcaaggccgggtggagaggctggggctgcaccgacagtgcagatgcgctcacctatggattccagctgctgtccacactcctgctctgcctgagcaacctcatgtttctgccacctgtggtcctggccattcggagtcgatatgtgctggaagctgcagtctacaccttcaccatgttcttctccacggtatgcggtggtgtctgcatcttatcactgggtgcttgtgcatggtggtgggtcacagtctgtatttccaccacgttctccgagggtttgggaatgtctgtgccttcactgtgtcttctacagacagagacagcagtgcttcccaaactgtcatgcatagataatggtcatttttgtaagacacattggagtaaatgaacaaaactgtttgcaacttaataaagtaagtttgggcctccaaaaaaaaaaaaaaaaaaaaa

SEQ ID NO: 289115 - DNA, 1000 bp, Homo Sapiens; identical to SEQ ID NO: 117390

SEQ ID NO: 289116 - DNA, 1000 bp, Homo Sapiens; identical to SEQ ID NO: 222623

SEQ ID NO: 289117 - DNA, 1000 bp, Homo Sapiens
ctgccctctccgtgcaatgtcactgctcgtgtggtctccagcaagggattcgggcgaagacaaacggatgcacccgtctttagaaccaaaaatattctctcacagatttcattcctgtttttatatatatattttttgttgtcgttttaacatctccacgtccctagcataaaaagaaaaagaaaaaaatttaaactgctttttcggaagaacaacaacaaaaaagaggtaaagacgaatctataaagtaccgagacttcctgggcaaagaatggacaatcagtttccttcctgtgtcgatgtcgatgttgtctgtgcaggagatgcagtttttgtgtagagaatgtaaattttctgtaaccttttgaaatctagttactaataagcactactgtaatttagcacagtttaactccaccctcatttaaacttcctttgattctttccgaccatgaaatagtgcatagtttgcctggagaatccactcacgttcataaagagaatgttgatggcgccgtgtagaagccgctctgtatccatccacgcgtgcagagctgccagcagggagctcacagaaggggagggagcaccaggccagctgagctgcacccacagtcccgagactgggatcccccaccccaacagtgattttggaaaaaaaaatgaaagttctgttcgtttatccattgcgatctggggagccccatctcgatatttccaatcctggctacttttcttagagaaaataagtcctttttttctggccttgctaatggcaacagaagaaagggcttctttgcgtggtcccctgctggtgggggtgggtccccagggggccccctgcggcctgggcccccctgcccacggccagcttcctgctgatgaacatgctgtttgtattgttttaggaaaccaggctgttttgtgaataaaacgaatgcatgtttgtgtcacgaaaaaaaaaaaaaaaaaaaaaaaaaaaaaaaaaaaaaaaaaaaaa

SEQ ID NO: 289118 - DNA, 1000 bp, Homo Sapiens
ctacagcctggtgctctctctgcagttcctgctgctgtcctatgacctctttgtcaattccttctcagaactgctccaaaagactcctgtcatccagcttgtgctcttcatcatccaggatattgcagtcctcttcaacatcatcatcattttcctcatgttcttcaacaccttcgtcttccaggctggcctggtcaacctcctattccataagttcaaagggaccatcatcctgacagctgtgtactttgccctcagcatctcccttcatgtctgggtcatgaacttacgctggaaaaactccaacagcttcatatggacagatggacttcaaatgctgtttgtattccagagactagcagcagtgttgtactgctacttctataaacggacagccgtaagactaggcgatcctcacttctaccaggactctttgtggctgcgcaaggagttcatgcaagttcgaaggtgacctcttgtcacactgatggatacttttccttcctgatagaagccacatttgctgctttgcagggagagttggccctatgcatgggcaaacagctggactttccaaggaaggttcagactagctgtgttcagcattcaagaaggaagatcctccctcttgcacaattagagtgtccccatcggtctccagtgcggcatcccttccttgccttctacctctgttccaccccctttccttcctttcctctctgtaccattcattctccctgaccggcctttcttgccgagggttctgtggctcttacccttgtgaagcttttcctttagcctgggacagaaggacctcccagcccccaaaggatctcccagtgaccaaaggatgcgaagagtgatagttacgtgctcctgactgatcacaccgcagacatttagatttttatacccaaggcactttaaaaaaatgttttataaatagagaataaattgaattcttgttcctaaaaaaaaaaaaaaaaaaaaaaaaaaaaaa

SEQ ID NO: 289119 - DNA, 1000 bp, Homo Sapiens
gtcgttgagcctttgagaacttctgttccaaggctcccatcagagagtaagaaggaagactcctctgacgctacccaagtcccccaagcaagtctcaaagccagtgatctctctgactttcaatcagtttccaagctaaaccagggcaagccatgcacatgcataggcaaggaatgccagtgtaagagatggcatgatatggaagtgtattccttttcaggcctgcagagtgtccctcccttggctccagaacgaagatccacacttgaggactactctcagtcgctgcacgccagaactctgtctggctctccccgatcctgttctgagcaagctcgagtcttcgtggatgatgtgaccattgaggacctgtcaggctacatggagtattacttgtatattcccaagaaaatgtcccacatggcagaaatgatgtacacctgatagcaagaagctaattcatatgctttaaaccaatgaaggcttgtcaaagagatttagttaatggcagaccttgtggccactttgtgtgagaagacatctctttctgctcactgtgcttgcaataaaaacttttcttggcatctcagttaatcttcattctttcaacttactctcttgagttcttacatacacttcaaggcgagcagatcaaagaaaaatcccccttatttagaaatgttcctgggggatgaagaaaccataattacttgagactggcagcagtgggtatatggtaaaagcctttgtaaaacagtgcatttttcagatttgtttaaggtttgctagccaaggaaagtaaaatgtgattttgtaactgcactaaacatttgtcatgctgtagttgccagcccagaatattagaagttacaagactgatttaaaccgtctctgatttaatgcaagatatattgtgtctataaaggtttctcttgttattgttaagccagagatctaaggtttagattcaatttgaataaactagctggcctgccctcta

SEQ ID NO: 289120 - DNA, 1000 bp, Homo Sapiens; identical to SEQ ID NO: 222625

SEQ ID NO: 289121 - DNA, 1000 bp, Homo Sapiens
accgtgcttcaggcagttggtggaggccttttatattacgccttcccatacattatattagtgttatctttggttactctggctgtgtacatgtctgcttctgaaatagagaactgctatgatcttctggtcagaaagaaaagacttattgttctcttcagccactggttacttcatgcctatggaataatctccatttccagagtggataaacttgagcaagatttgccccttttggctttggtacctacaccagcccttttttacttgttcactgcaaaatttaccgaaccttcaaggatactctcagaaggagccaatggacactgagtgtagacatgtgaaatgccaaaaacctgagaagtgctcctaataaaaaagtaaatcaatcttaacagtgtatgagaactattctatcatatatgggaacaagattgtcagtatatcttaatgtttgggtttgtctttgttttgtttatggttagacttacagacttggaaaatgcaaaactctgtaatactctgttacacagggtaatattatctgctacactggaaggccgctaggaagccctcgcttctctcaacagttcagctgttctttagggcaaaatcatgtttctgtgtacctagcaatgtgttcccattttattaagaaaagctttaacacgtgtaatctgcagtccttaacagtggcgtaattgtacgtacctgttgtgtttcagtttgtttttcacctataatgaattgtaaaaacaaacatacttgtggggtctgatagcaaacatagaaatgatgtatattgttttttgttatctatttattttcatcaatacagtattttgatgtattgcaaaaatagataataatttatataacaggttttctgtttatagattggttcaagatttgtttggattattgttcctgtaaagaaaacaataataaaaagcttacctacataaaattacaaaaaaaaaaaaaaaaaaaaaaaaaaaaa

SEQ ID NO: 289122 - DNA, 1000 bp, Homo Sapiens
ggccttgaggggcgaccagagcgcttacctctggtgcctgaatctcctcggaggatgatgacccggagccaggatgccactttctccccaggctcagagcaggctgaaaagagccctggtcccattgtctctcgaactcggagctgggactcttccagtcctgttgaccgtcctgagccagaggctgctagccccaccaccagaactcgcccagtgacccgaagcatgggaacaggagacacccctggcctggaggtaccatctagccctctgcggaaagccaagcgagctcgcctctgctcctccagcagttcggacacatcttcccgaagcttctttgatcccacctctcagcatagagactggtgcccttgggtgaatatcacacttggcaaagaaagcagggagaatggtggaactgaaccagatgccagcgccccagcagagccaggctggaaagcagtgctgaccatcctcttggcgcacaaacagtctagccagccagctgaaacggactccatgagtctctctgagaaatcaaggaaagtattccgaatatttcggcagtgggaatctctgtgctcatgctgaagatactccagcgccttcctggagatagctggaatgagagtgactttttgaaaaattaaggctgagttcctttcggtcagctgacactaagtttttcctgttctgggttaatcataaggagccccctgccatagcaaaggcagtgagtgtcaactatctgcatctggctgagagagacccgtttcctttcagggatgtggacagggtaagggcagcaagcatggttctgttaaaggagtgtgggattaacagactagaaggaagactaaggacctgaccacccatttcagcatcttcaatgtggagcagtgttctgaggactcttctatcctaggactatgacagtgtgtattaataaaatatttgctaagattctcaaaaaaaaaaaaaaaaaaaaaaaaaaaaaaaa

SEQ ID NO: 289123 - DNA, 1000 bp, Homo Sapiens
gagcaatctgaatccaaatgcaaaggagtttgttcctggggtgaagtacggaaatatttgagtagacggggccctcttttggtggatgtagcacaatttccacactgtgaaggcagtattagaagacttaattgtaaaagctctcttgtcactgtgttacacttatgcattgccaaagtttttgttagtcttgcatgcttaataaaagtgctgagactgttactaagtaaaaagctgtcaaacatttactgaaaatagaattggccccatggcttgatgtgaagacagcaaggaaagaagcaccagtcaagttgtgaacaagcaccaaattaaaagacctaaaccttaccaaattgtctttttttgaggctaatctatcacttgttaatgtctaaactttaaaatcagtacatttaatttgagttccaactgttaagcatatttctcagacttaaatttgattatgtccccatcaaaaagaatctccattttctgaaggtctgttagttaatttgagataatttgttaaaggcaagtatgtcatattactgaggctacaagttagtcagcagatgagtgccagtccagccttttctggtatgttattgttagaaatattgagttctaatgttacatctgaggaagtatgtaatttgagaattgtaacttctaagggattcactgcatcatagctatgcctgtatggagtctaacatatgaccaataccaacccataatccagctgaacaaagatactgtaacatgatttgagtggtgcttttccttgctttgttaaccatcacgagagtctgcagcacaacttttaacaaagctagaacagttttggcttcttaaacttcatatttgggtaggttaagctgccatacgtgttcagtgtgaatagtgtttaagttgaaaatattgtaaaaaaattatattttttcaaaaatatttaaaaaaataaataatagtagaactgagcaaaaaaaaaaaaaaaaaa

SEQ ID NO: 289124 - DNA, 1000 bp, Homo Sapiens; identical to SEQ ID NO: 222626

SEQ ID NO: 289125 - DNA, 1000 bp, Homo Sapiens
acacggagaagccagagcctgagcggtcccctcctaaccgcaagcgtcctgctaacgagaaggcaactgatgactatcattatgagaagttcaagaaaatgaataggcggtactgagttgtgcagagtgggatgtaaatatcgccttcctctccctatatccctcccatgaaaaatggcttcctggccgggcgtggtggctcctgcctgtaatcccagcactttgggaggccgaggtgggcggatcacctgaggtcgggagtttgagaccagcctgaccaacatggagaaacccagtctctactgaaaatacagaaaagttagccaggcgtggtggcacatgcctgtaatcccagctgctcaggaggctgaggcaggagaattgcttgaacccaagaggcggaggttgtggtgagccgagattgcacctttgtactccagcctgggcaacgagcaaaaaactctgtctcaaaaaaaaaaactaccacacaaagaaaagaaatggcttccaggacagagcatgctcatttgctggcggacagttccagaaacagaccctgttagtccttctacttacctgctggatttttcaagcactaaatttataactttttgaaacaaaataatgtgtaattttccatttgggggcaaactctattcttgtgagcattattaaatcttgtttgtaaatatattgtctttctcttaatatttgctctgggtcaggaagaagctgttcacggtgtgataatactctttagattgtgctttcattattatagatgcatcatgtcttctgctttcacgtgtctgggatggggtcagaaatgcatcctccagctgacagaaaaatccaggatgagatcagaaggatactggtgttttctgacttttacaaaattacttgtttgttttcattaaaaaaaaagcataaactatgtttcttattactattagaattattaaatttcaaaatgaaaaaaaaaaaaaaaaaaaaaaat

SEQ ID NO: 289126 - DNA, 1000 bp, Homo Sapiens
cattacccaaaccatattgcacttttagttccctagttttctaggtgagcttcattccctgaaaggaggatgatgatatctaggcataacctagcctgtgaggaacctagttaggaaagacaactgacatttattgaatatcatgcactagtcccttacatatgtcatattttaattatagaaatcagtagcaaaaagaatcttggggattttccatctgacttccctggccatcttatcccatccttgcactaccagaagattcatacacttttgagactccagtgagacgctgttttcaccccttcctcctcctagcctctctcccaaaaagtaaaacacaatgctgaagaaatattggtgtgacttttgaatgttaccgattggatgtaaaatgctatcgagggaagaaaaagctcttccaaagagaggagccactggaaggaacagagcaatactataccttcctcgcaactacctgtgatgtctgaccagaacattagcaaggccaaggaactttaaccacagtataactaagaaatggcatagagtgaggggcactgaaagaaactgcccgttcccctaggagctttgagcatttctctgcaggggacagtagtaatataattctctcttctcctttcccacattctttgatctggaacataaactaaggaaggggcttagatgcatttcctttctgaggcagcagtaagaaattggttcacagtttccaacttgtaagttgagtagtgctaactgctgacttctcccttttcttcaccccagccccaaataacattctgccatgttcctagatctttagttaccaatccaccgtgctcagcccagtttttcatattttttagataagtttaatataaaagcgatggctccagctactcgggaggctgaggtaggaggattgcttgtggctgggaattcaagacctctctaggcaacatagtgagacccacctctaaaaaaaaaaaaaaaaaaa

SEQ ID NO: 289127 - DNA, 1000 bp, Homo Sapiens; identical to SEQ ID NO: 117399

SEQ ID NO: 289128 - DNA, 1000 bp, Homo Sapiens
ttgttattacttactacccaatttcattatcctcccttcctctttccatttctattctctctcacttgaattctggcattatttttagtggcctctactgataatacctaccctagagtacataaaaattatattaaaagaggaagtagcagtatgcataattttaacagattctataatgggtgcctcaaaatatgtattgtgccattccgcaaatttaaaagctaattgaggacaatttttttttaatttcctaaatgagaccaccttggatttttatttttgccatttagatgtttatacttatttagcttttataaaacataagccaagctaaatcccacataacaactctggtattcttccctcatatgagcagtgattttatttgttacccaccttagatagactaagaaagttctagtcttgtttctccttctccccgcttccctggggtttttccttaccataagtattctggtccgagggttcagttcctttagtcaagatgtcacaagtttaaaaacaaaacttgagaaactaccaaaggctcaggagttgtccactttgttgaaatccattaaattagagaagtctcactaacagatgtatttaaatataggtacaacaaataatttctttttctccccttccccaaattacagtcagcatttaaagctgtttatggcttgccatcagcattattctggtaggcttgttagtgttaaaatctatttgatttttttttttttttttgcctcttaaagtctaattttaggatggatgaattcagatgtttaccagagtgtgtattttacataatgttcttgattaaaaagacttgtttgtaaattatccgttgtttttgcatatgcccagttgatgtgataaaattttcattgtcttgccatataaagccttggttatcaacaggtggaatgtagatattgtaaagctttttgtgaattaaaagtgcaaaataaagcaaccacatttaagt

SEQ ID NO: 289129 - DNA, 1000 bp, Homo Sapiens
ccacatagagaaccaagacgagtgcgttctgaatgtgatctctcacgcccgtctctggcagaccactgaggaaatccccaagagagagacctactgcccggtcatcgtggacaacctaatacagctgtgtaaatctcagattctcaagcatccttctctggccaggaggatctgtgtccaaaactccacgttttctgctacctggaaccgagagtctcttctccttcaagtccgtggttctggtggagcccgactgagcactaaggatcctctgcccaccatcgcctccagagaggagattgaagctactaagaatcatgttctagagaccttctaccccatatcacccatcatcgatcttcatgaatgcaatatttatgatgtgaaaaatgacacaggattccaggaaggctatccttacccctatccccataccctgtacttactggacaaagccaatttacgaccacaccgccttcaaccagatcagctgcgggccaagatgatcctgtttgcttttggcagtgccctggctcaggcccggctcctctatgggaatgatgccaaggtcttggagcagcccgtggtggtgcagagcgtgggcacggatggacgtgtcttccatttcctagtgtttcaactgaataccacagacctggactgtaacgagggtgtcaagaatttggcctgggtggactcagaccagctcctctatcagcatttttggtgtctcccagtgatcaaaaagagagtggttgtggaacctgttgggccagttggtttcaagccagagacattcagaaagtttttagctctatatttgcatggtgctgcgtgagcggaggacccctctgaatcctgaaacccctcttgcctctcttccacggaagagggcctgggccccgtggagcctcagtgcccgtttggcctgctgctctcgctgacaataaagagcccttgcgttgcaaaaaaaaaaaaaaaaaaaaaaaaaaaaaaaaaa

SEQ ID NO: 289130 - DNA, 847 bp, Homo Sapiens
ggagctaagccagacccgggtggcggtggcagctgcgaaacccagggagccgatgccacgtgacccaatgtggacttcttttaaacctttctaatgcccataacccagcctcagacccatggagcccacgagagactgcccgctgttcgggggcgccttttccgccatcctccccatgggggccattgacgtaagcgacctccgaccggtcccggacaatcaagaagttttctgccatcccgtgacggaccagagcctgatagtggaacttctcgagctgcaggcccacgtacggggcgaagcggctgcgcggtaccactttgaggatgttggtggcgtgcagggggctagggctgtccatgtggagtctgttcagcctctcagtttggagaacctggccctgaggggccgctgtcaagaagcctgggtcctctctggcaagcagcagatagctaaggaaaaccagcaggtagcaaaggacgtgacacttcatcaggccttgctgaggctgccccagtaccagactgatctcttgcttaccttcaatcagcccccccctgacaacaggtcatctcttggccccgaaaatctgtcacctgcaccctggagcctgggtgactttgaacagctggtgaccagtctgacccttcacgatcctaacatctttggtccccagtaaaggcgctgaagcactgcatgatgttgctgagaacttggggactcggttctgtgagggggaaaagaggttgaaaagagggtttcctcttatttcttccctgtgcgtaaacataagacaatccctcttcagaataaacttgctttataatcaaaaaaaaaaaaaaaaaaa

SEQ ID NO: 289131 - DNA, 716 bp, Homo Sapiens; identical to SEQ ID NO: 117400

SEQ ID NO: 289132 - DNA, 1000 bp, Homo Sapiens
tttcgtggagttgaagaaaagaaatcattagaaattctcctaaaagatgaccgtctggatactgagaaactttgtacttttagtcagaggttccctctcccgtccatgtaccgtgcattggtatggaaggtgcttctaggaatcttgcctccacaccacgagtcccatgccaaggtgatgatgtatcgtaaggagcagtacttggatgtccttcatgccctgaaagtcgttcgctttgttagtgatgccacacctcaggctgaagtctatctccgcatgtatcagctggagtctgggaagttacctcgaagtccctcttttccactggagccagatgatgaagtgtttcttgccatagctaaagccatggaggaaatggtggaagatagtgtcgactgttactggatcacccgacgctttgtgaaccaattaaataccaagtaccgggattccttgccccagttgccaaaagcgtttgaacaatacttgaatctggaagatggcagactgctgactcatctgaggatgtgttccgcggcgcccaaacttccttatgatctctggttcaagaggtgctttgcgggatgtttgcctgaatccagtttacagagggtttgggataaagttgtgagtggatcctgtaagatcctagtttttgtagctgtcgaaattttattaacctttaaaataaaagttatggcactgaacagtgcagagaagataacaaagtttctggaaaatattccccaggacagctcagacgcgatcgtgagcaaggccattgacttgtggcacaaacactgtgggaccccggtccattcaagctgaacgcacccgctggttgtggaccgtctgccaggcaccacagtgagcattgtgttcttggcatgtgatctgggaaactgattgaataatacacttttcttgctttggtgctcaaagtggtttttttcccccaataaaattatttaattgaaaaaaaaaaaaaaaaaaaaaaaaa

SEQ ID NO: 289133 - DNA, 1000 bp, Homo Sapiens; identical to SEQ ID NO: 117402

SEQ ID NO: 289134 - DNA, 1000 bp, Homo Sapiens
ttcagtgtcctgaaagattcctttcctatccatccttccatccagttctctgaatctttaatgaaatcatttgccagagcgaggtaatcatctgcatttggctactgcaaagctgtccgttgtattccttgctcacttgctactagcaggcgacttaggaaataatgatgttggcaccagttccccctggatgggctatagccagaacatttacttcaactctaccttagtagatacaagtagagaatatggagaggatcattacattgaaaagtaaatgttttattagttcattgcctgcacttactggtcggaagagagaaagaacagtttcagtattgagatggctcaggagaggctctttgatttttaaagttttggggtggggggttgtgtgtggtttctttcttttgaattttaatttaggtgttttgggtttttttcctttaaagagaatagtgttcacaaaatttgagctgctctttggcttttgctataagggaaacagagtggcctggctgatttgaataaatgtttctttcctctccaccatctcacattttgcttttaagtgaacactttttccccattgagcatcttgaacatactttttttccaaataaattactcatccttaaagtttactccactttgacaaaagatacgcccttctccctgcacataaagcaggttgtagaacgtggcattcttgggcaagtaggtagactttacccagtctctttccttttttgctgatgtgtgctctctctctctctttctctctctctctctctctctctctctctctgtctgtctcgcttgctcgctctcgctgtttctctctctttgaggcatttgtttggaaaaaatcgttgagatgcccaagaacctgggataattctttactttttttgaaataaaggaaaggaaattcaaaaaaaaaaaaaaaaaaaaaaaaaaaaaaaaaaaaaaaaaaaaaaaaaaaaaaaaaaaaaaaaaa

SEQ ID NO: 289135 - DNA, 1000 bp, Homo Sapiens
gtattaaaagatacttcttatggaaaacctgtggatatctgggctttgggctgtatgatcattgagatggccactggaaatccctatcttcctagtagttctgatttggatttactccataaaattgttttgaaagtgggcaatttgtcacctcacttgcagaatatcttttccaagagccccatttttgctggggtagttcttcctcaagttcaacaccccaaaaatgcaagaaaaaaatatccaaagcttaatggattgttggcagatatagttcatgcttgtttacaaattgatcctgctgacaggatatcatctagtgatcttttgcatcatgagtattttactagagatggatttattgaaaaattcatgccagaactgaaagctaaattactgcaggaagcaaaagtcaattcattaataaagccaaaagagagttctaaagaaaatgaactcaggaaagatgaaagaaaaacagtttataccaatacactgctaagtagttcagttttgggagaggaaatagaaaaagagaaaaagcccaaggagatcaaagtcagagttattaaagtcaaaggaggaagaggagatatctcagaaccaaaaaagaaagagtatgaaggtggacttggtcaacaggatgcaaatgaaaatgttcatcctatgtctccagatacaaaacttgtaaccattgaaccaccaaaccctatcaatcccagcactaactgtaatggcttgaaagaaaatccacattgcggaggttctgtgacaatgccacccatcaatctaactaacagtaatttgatggctgcaaatctcagttcaaatctctttcaccccagtgtgaggtgagctgtaacagagaagaaacctaaataatacaacattcctgtataatggtatttcaaagaatcgtgttcatagtgtctgtatgtaaactgaacttgaagaaaatatattgaaattaaagctgtataatgggccaaaaaaaaaaaaa

SEQ ID NO: 289136 - DNA, 1000 bp, Homo Sapiens; identical to SEQ ID NO: 117403

SEQ ID NO: 289137 - DNA, 1000 bp, Homo Sapiens; identical to SEQ ID NO: 222630

SEQ ID NO: 289138 - DNA, 1000 bp, Homo Sapiens; identical to SEQ ID NO: 117404

SEQ ID NO: 289139 - DNA, 1000 bp, Homo Sapiens
cagaacttacgggtggaaagacagaagagacttgaaagaataaagcagaaacagtctgaacttcaacaacttattctacagcaaattgctttcaagaacctggtgctgagaaaccagtatgtggaggagcaggtcagccagcggccgctgcccaactcagtcatccacgtgcccttcatcatcatcagcagtagcaagaagaccgtcatcaactgcagcatctccgacgacaaatcagaatatctgtttaagtttaacagctcctttgaaatccacgatgacacagaagtgctgatgtggatgggcatgacttttgggctagagtccgggagctgctctgccgaagaccttaaaatggccagaaatttggtcccaaaggctctggagccgtacgtgacagaaatggctcagggaacttttggaggtgtgttcacgacggcaggttccaggtctaatggcacgtggctttctgccagtgacctgaccaacattgcgattgggatgctggccacaagctccggtggatctcagtacagtggctccagggtggagaccccagcagtcgaggaggaagaggaggaggacaacaacgatgacgacctcagtgagaatgacgaggatgactgacgtcctctcgccttaagattcagcttcaggaaaacatttagggaaaagaaactttttttttttttttaatgtgaggttttctgtttcttttttgcctactcccaagaagatattggtaagctatagaatttagatatgcacctctgataagcaaggattgtttcccgtatgattaagacgtgctgttgatgtgtgttttgataccagtgtgctgacacagaatctttatttactttttaggattttgtgttttcattttctatttttctttaaatgcagagttcattgttgccccttaacagtttttcctgagtttactgaagaaattgtacttcatccacatccatgaaaataaaatgctctccttttgtgc

SEQ ID NO: 289140 - DNA, 1000 bp, Homo Sapiens; identical to SEQ ID NO: 117405

SEQ ID NO: 289141 - DNA, 1000 bp, Homo Sapiens
tgttggtttctcagggagtattgctaaaatgccaaaaaggaagttgttcaaatgccactcagtatgaggacactggagatctaaaagtgaataatggcacaagaagaaatataagtaataaggacctttgtgcttcgagatctgcagaccagacagtactatgccaatcagaatggctcaaataccaagggaagtgttattggttctctaatgagatgaaaagctggagtgacagttatgtgtattgtttggaaagaaaatctcatctactaatcatacatgaccaacttgaaatggcttttatacagaaaaacctaagacaattaaactacgtatggattgggcttaactttacctccttgaaaatgacatggacttgggtggatggttctccaatagattcaaagatattcttcataaagggaccagctaaagaaaacagctgtgctgccattaaggaaagcaaaattttctctgaaacctgcagcagtgttttcaaatggatttgtcagtattagagtttgacaaaattcacagtgaaataatcaatgatcactatttttggcctattagtttctaatattaatctccaggtgtaagattttaaagtgcaattaaatgccaaaatctcttctcccttctccctccatcatcgacactggtctagcctcagagtaacccctgttaacaaactaaaatgtacacttcaaaatttttacgtgatagtataaaccaatgtgacttcatgtgatcatatccaggatttttattcgtcgcttattttatgccaaatgtgatcaaattatgcctgtttttctgtatcttgcgttttaaattcttaataaggtcctaaacaaaatttcttatatttctaatggttgaattataatgtgggtttatacattttttacccttttgtcaaagagaattaactttgtttccaggcttttgctactcttcactcagctacaataaacatcctgaatgttttcttaaaaaa

SEQ ID NO: 289142 - DNA, 1000 bp, Homo Sapiens; identical to SEQ ID NO: 117407

SEQ ID NO: 289143 - DNA, 1000 bp, Homo Sapiens
gcccccttccttgtgacctggaccctccattgtacctggctgagactgtcagcctcctggaggagtggggtccaccttcttcttgccctatgcagtgcaagctcacttctcacccagcaaggttgactcatctgcctccatgtctctggggctttgctgttgccctgaaacctagctgggctggtcttgctcccagcttgcttccccctcctcggatgtccctttgcaggcccctgtcgttcctccggcaccagtgtccttggctgccatggcaagctcatcaggggcttgtaccctggtcaccaagcatggtagcagctgcctgcattgtatctccatctggtcactgcaggtgccaacccttcatcccccatgttttcctgggccatggagggctgacctccgtttctggggaatgtggctgagctgtggtaaccagctacaccccaggtgctctttccatggtggtgcctgctcatcttgctgatgcaaactaggaagttaggctgcatctcggagtggctttcgctggagaggtgctttgctgtctctcagactcagtcactgtgttccctccccgcctctcttatctccatggctgtttgcagctctcccaggtactttggggtctgagctggaattcctttgtggtttgctcttctgcttctcactcttgtattaagaaggattccacaaagggagagtggcatccctgctgctgctgtgccagaccagagtttcctgaggggccctgaccctaaccctccagctcagccctgtacacctgaccctgtaaatgagtggggtttgctgactgtaatccctgacaccagtaaaaccaaaaggactcttgggggctcagtgtgagagccagggttacctactctgccaagtgaggacaaactgctaggctgtatcccataatttcaggatgagaaacattaacaataaaaatttgtagtaaacataacctcatgaagaactaaaaaaaaaaaaaaaa

SEQ ID NO: 289144 - DNA, 1000 bp, Homo Sapiens; identical to SEQ ID NO: 117408

SEQ ID NO: 289145 - DNA, 1000 bp, Homo Sapiens
tctgcgtctcatttctggattcctaccccctcttctagtcttgcccaagtagtcctgccaggcacatgccccatttggcacaggcctgcattcttgtcgtgccgtcctgggcctcaggctgtctgggaggggagatgctcacatttgtacaggctacatagactggtgcaagcagtgctggattccaggagtcttggcatctcatagcttgtccccgtgaggagtgagcagagggtctgggatttctgctttcagcaaaagcagtctgactcagtgggcagaatggaggggcccctctagccaggctcttacgccatggttatgagcaggttgatgagggtccttcggccagcacaaccttcctccctactcacggcatggagtctgactgcatggaagttccagatcctgacagagagaactgggaaggatccaggttcgcttccgttggtagcttgagtcccatgcctccaccctgccatctgaggaaggggtgacaagtggtcaaggagctgtggccacagacttttccagggtggtccttggcaggtgaggtgcgtctgtgccacccttgtcaggagccattgacgacgggccccccctggaccccccgggacctcagagtgggggcaggcagaagggagaaccagctcaagacattttggaggatctggccctggggttcttcagagaacaccctctaggggctttggggacatggcctgtccccacatccagcacttgcctccgccatggtcactcggcagcccttttcccaggagaagacacctctgggagcctgctcagtgcttgtcctgccatcctgtgtcctgggactgagggttactccagttgctctgtgttgcatactctcccccgcaagcctgtgtatgaagaattgtcccctggcttccagcaggccatggctggctgttttgtgactgttacattgtgcaggggtaattattagcgtggcttttaaaaaaaaaaaaaaaaaaaa

SEQ ID NO: 289146 - DNA, 1000 bp, Homo Sapiens; identical to SEQ ID NO: 222633

SEQ ID NO: 289147 - DNA, 1000 bp, Homo Sapiens
gtgcacagccgagaagtggtcaagctagaatgggaccccaggtttgtgctccctactctccaccgataacctatcaaagggctttgcaagagcttttgactaatcgtctgtcaatggttcttcattcacgtattaattgcacatcagtatgtgccaaatctactagacattggagaaacagtaggaacaacacatggtaccggcacatggatctttcaggaaaacgaagtaggtaataaacaggaaaaagcccgagtctgatgctaagaagaacataaacaggatgctgagagattgggtctctccacattgccccggctgctctccaacccctgagttcaagtgattcacctcccttggcctcccaaagtactgggattacaggcgtgagccaccgtgcctggctgagaagatggatttaagacatattttggaggtaacattgtcaggacttcctgaaggattagatgtggaagggaaggataagaaacagaccaaggataactttcaaatgtatggttaagcaactggatggataatgatgccattgagtgagtgaaaaacttgatggaagtggaagattcagagttcatttctatctaggttaatttgagacataccagagcataagttaagtaagtaattgaatattggagtggagacttatttgtctaccgaattattgttttctttgtcggacatacacctacactgcattcctcaaagtaaaatttaagtgtggctctgtgcctatgctctccccagcggaaagtgaccagaagaggtgtgcagtttccaggcctggcccatacagacctccaacaggtgctcccctgtgctgttactccttctgccaactggaagcagatggtgaccaggctctggagaaggcaaggcctgaagatgggagattcctaagtggaggagaactgtgccttactgacctaaatatccactcagtattgttatgtgagaataaataaacttgtgttgaccgttt

SEQ ID NO: 289148 - DNA, 1000 bp, Homo Sapiens; identical to SEQ ID NO: 222635

SEQ ID NO: 289149 - DNA, 1000 bp, Homo Sapiens; identical to SEQ ID NO: 222636

SEQ ID NO: 289150 - DNA, 1000 bp, Homo Sapiens; identical to SEQ ID NO: 117410

SEQ ID NO: 289151 - DNA, 1000 bp, Homo Sapiens
gagtttgtcacttagacctcttggctgttaactgaaactgaacttgctcacatcatctgcttccctgtaatgaactatgagggttctttatcctagtttctatttatgaagatggttgaaaattttcaagacacaagattttgaaaactcactgaattatgggcaaaaccatgactttcattgggcagacagagtcttctaagcccacagggatccccagatggatttttcaggacaaatggctcatgtgcctgtacttattgtctctgtggtgtgtcaagaagtagctaatggtttcatctgaaagctgccatagaaattctgtgaaccagaatgagacaaggcagcaggcatacagaaggtttgtcctgctctgggaagcatggaggatgttgtacttcactcctctctgagggtgtctaggaatacagaagctccttgacttacatctcaataaacccatcgtaagtccaaaatattggaagttgaaaatgcattgaatacacccaacctactgaacatcgtagcttagccaagcctaccttaaatgctctgagaacacttatattagcctacagctgggaaaaatcatttaacacaaagcctatcttctaatgaagtatggaatatctcatgtaatttattgaatactgtactgaaggtgaaaaccagaatggttgtatggatatgcgaagtatggtttctactgaatgtgtattgctttcccatcatcataaaatttttaaaaatcctaagttgaatcattgttagtccgggaccttcagtactgccaagtcccagagaaaacccttttactctggggagaacccactgatggctcattagatctgtcccttccccgaggtccgtgtgtgactttgagcaaaaagtgacttctttttgtgaatgtaaaatttgtgaaacttgagtttttccaatgtgctgtaaagtgttttattgtaaattgctcatctcaataaaatttacttcaggtttgtgg

SEQ ID NO: 289152 - DNA, 1000 bp, Homo Sapiens
atcccatactatctgcttggatttggagagccaaaaaataaagctgattgtcatgtgattaaatatctgatcaacaggtatgaatataacttaaatcagcatatttttgccatggtaataaattgtcctataaactatttatatatttttgttcttcataattatcactaataagcatcagtttgttgtttttaaaaggatatttaagtgagcattttctagttcatatgaaaataaccatagtacaggatgatttctgtccacacaaaggttaaattagattgcacagttaattttcacttatatttatggtactattatgtgggtgatgcctttttcttttaagcccagtacatatattatgcctgcctaagttctgaactggggctgtatttcagtagttgtagaattattgatatttagttttgatagctaatgtttaattgtttggatctgcacagtttggtttttgcacaaaagtcatttaaaaaaatctgagtaattgtcaaatattaaaagaaagatattcttcctgtaaggaatacagtttttagtcaaagtggccattacatcctctttttaatttacataatacagatacttgagaaagttgttgtggtgttgtatgccaagaaaattctttttattggtgcctatattgtaacaattatttttaatgcattgtattttgaagtaacggttcagttaaatttttcacctgctgtgtaactgaagcacaattacagtttataatcatctgtagaagtctggagataattttgcaactcatgttatgggttaaatgaatatttttgtaaaagtaaaagcaacaaatttataaattgattatttgaaactttacaacacaattgcatcccaaatacaaattgtattgcttattcattatagctattcgtcctgtaatctgtttctaggtgaagcatactccagtgttttaggggttttgaaaataaatatttaaatttcacagtcaaaaaaa

SEQ ID NO: 289153 - DNA, 1000 bp, Homo Sapiens
tgaacgtgacagaccctcctcagaacttgactgtgactgtcttccaaggagaaggcacagcatccacagctctggggaacagctcatctctttcagtcctagagggccagtctctgcgcttggtctgtgctgttgacagcaatccccctgccaggctgagctggacctggaggagtctgaccctgtacccctcacagccctcaaaccctctggtactggagctgcaagtgcacctgggggatgaaggggaattcacctgtcgagctcagaactctctgggttcccagcacgtttccctgaacctctccctgcaacaggagtacacaggcaaaatgaggcctgtatcaggagtgttgctgggggcggtcgggggagctggagccacagccctggtcttcctctccttctgtgtcatcttcattgtagtgaggtcctgcaggaagaaatcggcaaggccagcagcggacgtgggagacataggcatgaaggatgcaaacaccatcaggggctcagctctcagggtaacctgactgagtcctgggcagatgataacccccgacaccatggcctggctgcccactcctcaggggaggaaagagagatccagtatgcacccctcagctttcataagggggagcctcaggacctatcaggacaagaagccaccaacaatgagtactcagagatcaagatccccaagtaagaaaatgcagaggctcgggcttgtttgagggttcacgacccctccagcaaaggagtctgaggctgattccagtagaattagcagccctcaatgctgtgcaacaagacatcagaacttattcctcttgtctaactgaaaatgcatgcctgatgaccaaactctccctttccccatccaatcggtccacactccccgccctggcctctggtacccaccattctcctctgtacttctctaaggatgactactttagattccgaatatagtgagattgtaacgtgaaaaaaaaaaaaaaaa

SEQ ID NO: 289154 - DNA, 1000 bp, Homo Sapiens; identical to SEQ ID NO: 117411

SEQ ID NO: 289155 - DNA, 1000 bp, Homo Sapiens; identical to SEQ ID NO: 117412

SEQ ID NO: 289156 - DNA, 1000 bp, Homo Sapiens
agaaccagcagggccaggacattgacgacaactgggtgaaagacagaaaaaaggagtttgaggagctcattgactccaaccacgacggcatcgtgaccgccgaggagctggagaacgtgcccacactcccgctgcagccaataggcaccttaaatagccacttcgtgcggctggccgcggagctcggagggggaaaggcgacgctgacctgtgccccgctcgcccgcagagctacatggaccccatgaacgagtacaacgcgctgaacgaggccaagcagatgatcgccgtcgccgacgagaaccagaaccaccacctggagcccgaggaggtgctcaagtacagcgagttcttcacgggcagcaagctggtggactacgcgcgcagcgtgcacgaggagttttgagcgcccggccgcgccccgcgccgccccccacgcaccaccgggggggcctcgcgggtgactccggcctccgtggctgtcccggaccccacctcttctctgccgcccaccaccggccgaccgaccgcggcttccccagttgatgagcggcgtgtcccctctgcagcgcgcaccccggcggggctttggctgtgacgcggtcggggcgcggggctggtctgtggccccgcggcgcgcctcctccctggtccctcgaaatcgtggcatctcacttctgagaacgaaatctcgcttcagtcactctgccgaaggcgctgacggcatcgcggccggaacctctgggcccggcccctcccagggccgccgctccgtgggaaaaaacagctcctccatttccttggaaactgaacgattattaaaaatagataaacttcgctggaaatgagtagccaggaagttcaggggagggtccggggtccttcccggggcctggcgtgtcggaaccacccaggtcccgcagctgcctctgagaaaatccaaatattttttgtgacaagaatcacaaacatttactttaaatataaaaaaaaaaaaaaa

SEQ ID NO: 289157 - DNA, 1000 bp, Homo Sapiens
tggaattacgttacagattcgaagagagagaggacgaccgttcttccctccccacccatacaagttatggaagcaagagagagagcgccgagtgacaaacattctggaccctagctaccacattcctccattgagagagaggctctatggccgattaacccagattaaagggctcttccagaaggagcagccagctggagagagaacgcctttgcttctgtagatgcccaggggcttggtcagtgtgcctcagctttggagttcatgcctggagtggttcaacagtctctggtgcaagtctaataagagatcaggcatatatatctgttctttgcataatattatggtgcccttattgatatatggtaagggtgtactaggggattaggatgattgtaagagaatgagaaagatgaccaaaaggttggtggtagggaggctttttcttatttccaaatacttgagaaattaccttttggtttacaaatctatgatcaacttattccattaaatagatacattaaaaaaattaaaaactgcaaaaaaaaaaaaaaaactggtgtttctttttataaccccttgaaacaagtctctcacctgagcctgtctaaactttcggagggagtttattattgagtctttatctgtgacagtatttggagatttagggatttgatacttaggcctttgaattttagaatacaaaaagagaagcaagccagacatggtggctcacacctgtaatcccaatactgggaagccaaggtgggagtatcgcttgagcccaggagtttgagaccgacatgggcaacatgacaagaccccatctctacaaaaaaaattaaaaaattagccaggcatggtggcacatgcctactcccagctcccaaggagactgagatgggaggatccctggagccctgaagattgaggctacagtgagccttgattgtgtcactgcactccagcttgggtgacagagaccctgtctcgagaaatt

SEQ ID NO: 289158 - DNA, 1000 bp, Homo Sapiens
ttgcagcagagctgccgctacatggaggctgagctcaaggaattatctagtgccctgaccacaccagagatgcagaaagaaatccaggagttaaagaaggaatgcgctggctacagagagagattgaagaacattaaagcagctaccaatcatgtgactccagaagagaaagagcaggtgtacagagagaggcagaagtactgtaaggagtggaggaagaggaagaggatggctacagagctgtctgatgcaatacttgaaggataccccaagagcaagaagcagttctttgaggaagttgggatagagacggatgaagattacaacgtcacactcccagacccctgaggggcccacggtcaggactggtggggactgcaggatgtcagaagagtgagatgtcttgcactggctaccttgtttttggttggcttttgttgttgttcctcttacttttcactttagcagagcagtcaggagacaagcataaaccagagcactgggtagagaggatgagggctggtggctgggggtagaccccacgcatttcattgtctaaattgcagtagcttgaggttaacatttagacttggaacaatgctaaaggaaagcatttggcaatatttattataatttaattttatataaaaatatttaatttcctctggatagtcaaacctgccagatatcaaacctgaggaaggcagaagtgaatttggagaactagggtagagagaggttgctataaaacgagcatttggagggcccacggcttcactcaggacctgctgggcttgtgtaccccaggagcccttttaagtatcttttgtacgcttttcaccccacccccaagtcctgggagaaatgcaggcaacactgagacatgggagaggccaagatatgcttgacagaaagggtgattttgaggctcagttaatatttcaaaattgtaaccgtagcaaaactgcattggtatttagaaaaataaaaaatttccaat

SEQ ID NO: 289159 - DNA, 1000 bp, Homo Sapiens
aagcagtttttgcactagaaatttttgctgttcccaatctaaacttttctggtattgtatatatgcactttaatatcttatttatgccttgctggagttttgttttgttgctccaatttttaacttgggggtgaaagatttaagaactcagcctcactagatcaacggaccaaataaacaattcctgaagacagtttttcatagtgtaggattttgaagaagtgtttttcttaaagcagatacgatgacataaggcgtaaatatggcaaacagatcttttcattcacgtgctttctgggtctgtatgaacataagtaagacacaaggtactgtctcttcatgcattctctgcaggaagaaagtttgatggtatcgtgatttctattgagttcaaattaacttgcttaagtgtcatactttactggctttgccctgcacaccaatattccttttaaaccataaatattttaaataatatttcttaagagtgataaataacattttttcctaaaaattatgttttcttagtttcataataatctgcactgttcatccccttgcattctaagtgatagaagagcaacactttcaaaccaaatctcactgaatgccagtgatttcatatgaaagatgcatgcctctttggctctttgaacatttagcaagtattgggaattttctattagcagtggtgttttaattggttgaattccacttagttctccacagtgttttgtatgtgtttggggcttggtgattattttgaaagatacattttttaaagaattaggaacattttttgcaaaatgctaatcagaatataattttcccaatgtcaggtatagaagttatcccattcttctttacctggtctccttccttcgtctagaaccttccccacagtagctaatcctaacaactttttatttatgttctttgataataatagctcatcccgctcatgattatagctacccacaaaaaataaaacaacaacaac

SEQ ID NO: 289160 - DNA, 1000 bp, Homo Sapiens; identical to SEQ ID NO: 222638

SEQ ID NO: 289161 - DNA, 1000 bp, Homo Sapiens; identical to SEQ ID NO: 222639

SEQ ID NO: 289162 - DNA, 1000 bp, Homo Sapiens
gtacgccagcgtgttcttcctcactgccatgagtgtgacgcgctaccattcggtggcctcggctctgaagagccaccggacccgaggacacggccggggcgactgctgcggccggagcctgggggacagctgctgcttctcggccaaggcgctgtgtgtgtggatctgggctttggccgcgctggcctcgctgcccagtgccattttctccaccacggtcaaggtgatgggcgaggagctgtgcctggtgcgtttcccggacaagttgctgggccgcgacaggcagttctggctgggcctctaccactcgcagaaggtgctgttgggcttcgtgctgccgctgggcatcattatcttgtgctacctgctgctggtgcgcttcatcgccgaccgccgcgcggcggggaccaaaggaggggccgcggtagccggaggacgcccgaccggagccagcgcccggagactgtcgaaggtcaccaaatcagtgaccatcgttgtcctgtccttcttcctgtgttggctgcccaaccaggcgctcaccacctggagcatcctcatcaagttcaacgcggtgcccttcagccaggagtatttcctgtgccaggtatacgcgttccctgtgagcgtgtgcctagcgcactccaacagctgcctcaaccccgtcctctactgcctcgtgcgccgcgagttccgcaaggcgctcaagagcctgctgtggcgcatcgcgtctccttcgatcaccagcatgcgccccttcaccgccactaccaagccggagcacgaggatcaggggctgcaggccccggcgccgccccacgcggccgcggagccggacctgctctactacccacctggcgtcgtggtctacagcggggggcgctacgacctgctgcccagcagctctgcctactgacgcaggcctcaggcccagggcgcgccgtcggggcaaggtggccttccccgggcggtaaagaggtgaaaggatgaaggagggctgggg

SEQ ID NO: 289163 - DNA, 1000 bp, Homo Sapiens; identical to SEQ ID NO: 117415

SEQ ID NO: 289164 - DNA, 1000 bp, Homo Sapiens; identical to SEQ ID NO: 117416

SEQ ID NO: 289165 - DNA, 1000 bp, Homo Sapiens; identical to SEQ ID NO: 222640

SEQ ID NO: 289166 - DNA, 1000 bp, Homo Sapiens
cctaccggatagaaagtgatgaggaagaggactttgaaaatgtaggcaaagtggggagcccattggactatagcttagtggacttaccttcaaccaatggacagagccctggcaaagccattgagaacttgattggcaagcctactgagaagtctcagacccccaaggacaacagcacagccagtgcaagcctagcctccaatgggacaagtggtgggcaggaggcaggagcaccagaagaggaggaagatgagcttttgagagtgactgaccttgttgattatgtctgtaacagtgaacagttataagactttttttccatttttgtgctaatttattccacggtagctctcacaccagcgggccagttattaaaagctgtttaatttttcctagaaaactccactacagaatgacttttagaagaaaaatttcaacaaatcctgaagtctttctgtgaagtgaccagttctgaactttgaagataaataattgctgtaaattccttttgattttctttttccaggttcatggtccttggtaatttcattcatggaaaaaaatcttattataataacaacaaagatttgtatatttttgactttatatttcctgagctctcctgactttgtgaaaaagggtggatgaaaatgcattccgaatctgtgagggcccaaaacagaatttaggggtgggtgaaagcacttgtgctttagctttttcatattaaatatatattatatttaaacattcatggcatagatgatgatttacagacaatttaaaagttcaagtctgtactgttacagtttgagaattgtagataacatcatacataagtcatttagtaacagcctttgtgaaatgaacttgtttactattggagataaccacacttaataaagaagagacagtgaaagtaccatcataattaacctaaatttttgttatagcagagtttcttgtttaaaaaaaaataaaatcatctgaaaagcaaaaa

SEQ ID NO: 289167 - DNA, 1000 bp, Homo Sapiens
ttatgcgtgcccctcacctggcgctgcgacagggacttggactgcagcgatggcagcgatgaggaggagtgcaggattgagccatgtacccagaaagggcaatgcccaccgccccctggcctcccctgcccctgcaccggcgtcagtgactgctctgggggaactgacaagaaactgcgcaactgcagccgcctggcctgcctagcaggcgagctccgttgcacgctgagcgatgactgcattccactcacgtggcgctgcgacggccacccagactgtcccgactccagcgacgagctcggctgtggaaccaatgagatcctcccggaaggggatgccacaaccatggggccccctgtgaccctggagagtgtcacctctctcaggaatgccacaaccatggggccccctgtgaccctggagagtgtcccctctgtcgggaatgccacatcctcctctgccggagaccagtctggaagcccaactgcctatggggttattgcagctgctgcggtgctcagtgcaagcctggtcaccgccaccctcctccttttgtcctggctccgagcccaggagcgcctccgcccactggggttactggtggccatgaaggagtccctgctgctgtcagaacagaagacctcgctgccctgaggacaagcacttgccaccaccgtcactcagccctgggcgtagccggacaggaggagagcagtgatgcggatgggtacccgggcacaccagccctcagagacctgagctcttctggccacgtggaacctcgaacccgagctcctgcagaagtggccctggagattgagggtccctggacactccctatggagatccggggagctaggatggggaacctgccacagccagaactgaggggctggccccaggcagctcccagggggtagaacggccctgtgcttaagacactcctgctgccccgtctgagggtggcgattaaagttgcttcacatcctcaaaaaaaaaa

SEQ ID NO: 289168 - DNA, 1000 bp, Homo Sapiens
ccttctgagcgtggggccagctccccccgcgcgcccacccacactcactccatgctcccggaaatcgagaggaagatccattagttctttggggacgttgtgattctctgtgatgctgaaaacactcatataggattgtgggaaatcctgattctcttttttatttcgtttgatttcttgtgttttatttgccaaatgttaccaatcagtgagcaagcaagcacagccaaaatcggacctcagctttagtccgtcttcacacacaaataagaaaacggcaaacccaccccattttttaattttattattattaattttttttgttggcaaaagaatctcaggaacggccctgggccacctactatattaatcatgctagtaacatgaaaaatgatgggctcctcctaataggaaggcgaggagaggagaaggccaggggaatgaattcaagagagatgtccacggacgaaacatacggtgaataattcacgctcacgtcgttcttccacagtatcttgttttgatcatttccactgcacatttctcctcaagaaaagcgaaaggacagactgttggctttgtgtttggaggataggagggagagagggaaggggctgaggaaatctctggggtaagagtaaaggcttccagaagacatgctgctatggtcactgaggggttagctttatctgctgttgttgatgcatccgtccaagttcactgcctttattttccctcctccctcttgttttagctgttacacacacagtaatacctgaatatccaacggtatagatcacaagggggggatgttaaatgttaatctaaaatatagctaaaaaaagattttgacataaaagagccttgattttaaaaaaaaaagagagagagatgtaatttaaaaagtttattataaattaaattcagcaaaaaaagatttgctacaaagtatagagaagtataaaataaaagttattgtttgaaaaaaaaaaaaaaaaaa

SEQ ID NO: 289169 - DNA, 1000 bp, Homo Sapiens; identical to SEQ ID NO: 222643

SEQ ID NO: 289170 - DNA, 727 bp, Homo Sapiens
gaacgagggtcctagctgccgccacccgaacagcctgtcctggtgccccggctccctgccccgcgcccagtcatgaccctgcgcccctcactcctcccgctccatctgctgctgctgctgctgctcagtgcggcggtgtgccgggctgaggctgggctcgaaaccgaaagtcccgtccggaccctccaagtggagaccctggtggagcccccagaaccatgtgccgagcccgctgcttttggagacacgcttcacatacactacacgggaagcttggtagatggacgtattattgacacctccctgaccagagaccctctggttatagaacttggccaaaagcaggtgattccaggtctggagcagagtcttctcgacatgtgtgtgggagagaagcgaagggcaatcattccttctcacttggcctatggaaaacggggatttccaccatctgtcccagcggatgcagtggtgcagtatgacgtggagctgattgcactaatccgagccaactactggctaaagctggtgaagggcattttgcctctggtagggatggccatggtgccagccctcctgggcctcattgggtatcacctatacagaaaggccaatagacccaaagtctccaaaaagaagctcaaggaagagaaacgaaacaagagcaaaaagaaataataaataataaattttaaaaaacttaaaaaaaaaaaaaaaaaaaaaaaaa

SEQ ID NO: 289171 - DNA, 1000 bp, Homo Sapiens; identical to SEQ ID NO: 117419

SEQ ID NO: 289172 - DNA, 1000 bp, Homo Sapiens
ctgctccagctggccctggccgacctcttgctggccctgactctgcccttcgcggcagcaggggctcttcagggctggagtctgggaagtgccacctgccgcaccatctctggcctctactcggcctccttccacgccggcttcctcttcctggcctgtatcagcgccgaccgctacgtggccatcgcgcgagcgctcccagccgggccgcggccctccactcccggccgcgcacacttggtctccgtcatcgtgtggctgctgtcactgctcctggcgctgcctgcgctgctcttcagccaggatgggcagcgggaaggccaacgacgctgtcgcctcatcttccccgagggcctcacgcagacggtgaagggggcgagcgccgtggcgcaggtggccctgggcttcgcgctgccgctgggcgtcatggtagcctgctacgcgcttctgggccgcacgctgctggccgccagggggcccgagcgccggcgtgcgctgcgcgtcgtggtggctctggtggcggccttcgtggtgctgcagctgccctacagcctcgccctgctgctggatactgccgatctactggctgcgcgcgagcggagctgccctgccagcaaacgcaaggatgtcgcactgctggtgaccagcggcttggccctcgcccgctgtggcctcaatcccgttctctacgccttcctgggcctgcgcttccgccaggacctgcggaggctgctacggggtgggagctcgccctcagggcctcaaccccgccgcggctgcccccgccggccccgcctttcttcctgctcagctcccacggagacccacagtctctcctgggacaactagggctgcgaatctagaggagggggcaggctgagggtcgtgggaaaggggagtaggtgggggaacactgagaaagaggcagggacctaaagggactacctctgtgccttgccacattaaattgataacatggaaatgaaaaaaaaaaaaaaaa

SEQ ID NO: 289173 - DNA, 1000 bp, Homo Sapiens; identical to SEQ ID NO: 222644

SEQ ID NO: 289174 - DNA, 1000 bp, Homo Sapiens; identical to SEQ ID NO: 117420

SEQ ID NO: 289175 - DNA, 1000 bp, Homo Sapiens
accaggtctctaggggcctgagagaggccctctagagaatccagggaaactgtgagcccaggagttgcccatctatggtttcattcctcccctggctcttctccctcttcaggccataatttccctggtgccaatttcttttcctcctggggcatcctcatcccagggctctctgctgtagattggctgtgccagcttccaacaggttactggcaatgccagtgagtttctgtaggccctaagctgaagaagtgaggcagtgattctgcctccatcctggtttccccaaagccccagggcaccatccttaagggagaaggtctacagttatcattattttaattccattactttcagtctggaaaactaagctagtcagaactgtcatcttgcttcccaatctaagaacctgtggccctggaacacttttcaagaattggttcattttgctttacacagtagatctgttccaacagttctgtgtaaaccaaatgctatttttcaatgcatttggactgctgaccatttaaaagcagcctatgattgcttctttttgtaaagcaagcaacctccctccactttagctgttttgactatttgaattttcacatattgggcttacccagagtggagcacacctccagggcatgtggctgacactgggtcaatgtctgcatctgtgctgtgtgtgtagtgtggttggccagtaggtgagtatccctgtgtgtgtgagtgaagccactccccaggctggtgctctcctcctgtgcccagtgactgcccagtggcagctcagctgcccttcactcccacctgctgccaaagtccctgtgctaatgggattacaaatacaaaaagtggaaaaaaattttcgtaaactttgttttatattaaaagaaaaatccataagtctgtgtgtgttaaacatgaggttctgcctctgtggctgtgtttgaaaaaataaagttttattagaataatccattttcccaagcaaaaa

SEQ ID NO: 289176 - DNA, 1000 bp, Homo Sapiens
aacaaaagaccccataattagggaaaagacttacaatgcccttaataacttgagtgtgaacgcagaaaatcagggcaagattaagacgtacatcagtcaagtgtgtgatgacaccatggtctgtcgcttggactcagctgtgcagatggctgggctaagactgttaaccaacatgactgtgactaatcattaccaacatttgctttcctattcttttccagacttttttgctttgttattcctgggaaatcacttcaccaagatacagattatgaaactaattataaactttactgaaaatccagccatgacaagagagctggtcagttgtaaagtaccatcagaattgatttccctctttaataaagaatgggatagagagattcttcttaatatccttaccctatttgagaatataaatgacaacataaaaaatgaagggctcgcatcatccaggaaagaattcagcagaagttcactttttttcttattcaaagagtctggagtttgtgttaagaaaatcaaagcactagcaaatcacaatgatctggtggtgaaagtaaaagtcctgaaagtattaaccaaactctaatttggagtctgtcccaaacaatattgagatatttgcagttggtacgatgtgatttgtaaattctttgtttttcattgtgcgtatatggtaaagagatcttttcagctgctattttggaataatgactatcatatatcataacagtgactgatgttggttgtaatggttgggtttaggatgaaccattttaaggatgccaaatgaaatattagtatttgtacacagaaagaatttattgatttgatcttattacctagattgagattttttaatctttcctctacctaaactgacaatgaattggttatacatcatgcataagctacacttttatattagtttatatttgttattctaagacttgtgtttcatcaataaagttgtgttttaagcagcagaaaaaaaaaa

SEQ ID NO: 289177 - DNA, 1000 bp, Homo Sapiens
cacttgaaactaagaccaccaccaaattatctatgttggaactacacggaaacccctttgaatgcacctgtgacattggagatttccgaagatggatggatgaacatctgaatgtcaaaattcccagactggtagatgtcatttgtgccagtcctggggatcaaagagggaagagtattgtgagtctggagctaacaacttgtgtttcagatgtcactgcagtgatattatttttcttcacgttctttatcaccaccatggttatgttggctgccctggctcaccatttgttttactgggatgtttggtttatatataatgtgtgtttagctaaggtaaaaggctacaggtctctttccacatcccaaactttctatgatgcttacatttcttatgacaccaaagatgcctctgttactgactgggtgataaatgagctgcgctaccaccttgaagagagccgagacaaaaacgttctcctttgtctagaggagagggattgggatccgggattggccatcatcgacaacctcatgcagagcatcaaccaaagcaagaaaacagtatttgttttaaccaaaaaatatgcaaaaagctggaactttaaaacagctttttacttggctttgcagaggctaatggatgagaacatggatgtgattatatttatcctgctggagccagtgttacagcattctcagtatttgaggctacggcagcggatctgtaagagctccatcctccagtggcctgacaacccgaaggcagaaggcttgttttggcaaactctgagaaatgtggtcttgactgaaaatgattcacggtataacaatatgtatgtcgattccattaagcaatactaactgacgttaagtcatgatttcgcgccataataaagatgcaaaggaatgacatttctgtattagttatctattgctatgtaacaaattatcccaaaacttagtggtttaaaacaacacatttgctggcccacagtttt

SEQ ID NO: 289178 - DNA, 1000 bp, Homo Sapiens
aaaggactttaaatgacgttttccaccaccaaggaaacagccacctagccaacgggatagctgggagtatggccaccctgctccacgatgcggtaatgaatccagcagaagtggtgaagcagcgcttgcagatgtacaactcgcagcaccggtcagcaatcagctgcatccggacggtgtggaggaccgaggggttgggggccttctaccggagctacaccacgcagctgaccatgaacatccccttccagtccatccacttcatcacctatgagttcctgcaggagcaggtcaacccccaccggacctacaacccgcagtcccacatcatctcaggcgggctggccggggccctcgccgcggccgccacgacccccctggacgtctgtaagacccttctgaacactcaggagaacgtggccctctcgctggccaacatcagcggccggctgtcgggtatggccaatgccttccggacggtgtaccagctcaacggcctgccggctacttcaaaggcatccaggcgcgtgtcatctaccagatgccctccaccgccatttcttggtctgtctatgagttcttcaagtactttctcaccaagcgccagctggaaaatcgagctccatactaaaggaagggatcatagaatcttttcttaaagtcattctctgcctgcatccagccccttgccctctcctcacacgtagatcatttttttttttgcagggtgctgcctatgggccctctgctccccaatgccttagagagaggaggggacggcacggccgctcaccggaaggctgtgtgcggggacatccgaggtggtggtggacaggaaggacttgggaaggggagcgagaaattgctttttctcttcctccctgggcagaatgtagcttttctgcttcactgtggcagcctcctccctggatccttagatcccagaggagggaagaaaatttgcagtgactgaaaacagtaaaaaaaaaaaaaaaaaaaa

SEQ ID NO: 289179 - DNA, 1000 bp, Homo Sapiens; identical to SEQ ID NO: 117421

SEQ ID NO: 289180 - DNA, 1000 bp, Homo Sapiens; identical to SEQ ID NO: 117422

SEQ ID NO: 289181 - DNA, 1000 bp, Homo Sapiens
tggatagccagtttgtgtgtgtagaaagcctggtgacagcgctggtggacatgtaccctcacgtgttccgcaagaagaaccggagggaagtcctcatccttggagtatctgtcgtctccttccttgtggggctgatcatgctcacagagggcggaatgtacgtgttccagctctttgactactatgcggccagtggcatgtgcctcctgttcgtggccatcttcgagtccctctgtgtggcttgggtttacggagccaagcgcttctacgacaacatcgaagacatgattgggtacaggccatggcctcttatcaaatactgttggctcttcctcacaccagctgtgtgcacagccacctttctcttctccctgataaagtacactccgctgacctacaacaagaagtacacgtacccgtggtggggcgatgccctgggctggctcctggctctgtcctccatggtctgcattcctgcctggagcctctacagactcggaaccctcaagggccccttcagagagagaatccgtcagctcatgtgcccagccgaggacttgccccagcggaacccagcaggaccctcggctcccgccacccccaggacctcactgctcagactcacagagctagagtctcactgctagggggcaggcccttggatggtgcctgtgtgcctggccttggggatggctgtggagggaacgtggcggaagcagccccatgtgcttccctgcccccgacctggagtggataagacaagaggggtattttggagtccacctgctgagctggaggcctcccactgcaacttttcagctcaggggttgttgaacagatgtgaaaggccagtgccaagagtgtccctctgagacccttgggaagctgggtgggggctggtaggtggggcgagacttgctggcttcgggccctctcatccttcattccattaaatccacattcttcccgcaaaaaaaaaaaaaaaaaaaaaaaaaaaaaa

SEQ ID NO: 289182 - DNA, 1000 bp, Homo Sapiens; identical to SEQ ID NO: 117424

SEQ ID NO: 289183 - DNA, 1000 bp, Homo Sapiens
tatctagatgtgtaagtgttttttttaaaatcacatggaacggttttttttatactaaaaagtggagggagatttgtttaaacaagtatttctaaaagaaatatgtacatagttctggaaattatttgtggtaaggaaatattctttactccagttgcatttctcagacaataaagtggtgcatccatgctacctcctactttgtcaacaaagatgctatttaccctttacatttttgtatcataatagattttaaaaatctaatgttctttattgcaagacattcttttgttaacaggtttgtttctttttaatgttttacctaaaatttgacatgcttacaggacaggtttgcctcttactttatttaacattgtagaaatgtaattaataaacaatgctcactacacagtttagaatagacgttctcatttatattatcttccaaatttgatcagttagcaaaacttaatacaccaattaaaatatttctacatatgagaatgtttacaatttaaattttagaacttgttttggatgtgattatatgtacgaaaatcgtgtaacactatgctcatgctaagaaccgacataacagaattactgaaataaatgtgctgtgaggaatggaaaatatggtgcaggtgtcttggtcatgataaattgtgattctttttaaaaattttttccaaaaacaattaggtattttaatctgaaatcagattcctttacaaacaacaagtttttgtatgcaagcaccattttatttcatgtagtatggctaatactatagttgaaccaaggatatgcattgattctttgcttcgtatgtaaataaagttaaaaacagttaaaataaggagtattttggtagagtatatacatacctcactgccagtgaaattgctttcctatggtatatctccttaccagaaaaatctctaaataaaaaaaggtttaaagaaaattaaaaaaaaaaaaaaaaaaaaaaaaaaaaaaa

SEQ ID NO: 289184 - DNA, 1000 bp, Homo Sapiens; identical to SEQ ID NO: 117425

SEQ ID NO: 289185 - DNA, 1000 bp, Homo Sapiens; identical to SEQ ID NO: 222649

SEQ ID NO: 289186 - DNA, 1000 bp, Homo Sapiens
taagcacaatggctagtgtatgcagagtcatgctggaaacaccggaatacagaagcagatttacaaatgaagagacagtgtcattctgcttgagggtaatggtgggtgtcataatactctatgaccacgtacatccagtgggagcatttgctaaaacttccaaaattgatatgaaaggttgtatcaaagttcttaaggaccaacctcctaatagtgtggaaggtcttctaaatgctctcaggtacacaacaaaacatttgaatgatgagactacctccaagcaaattaaatccatgctgcaataacaattctggaataagcacctgctgtagacagaagacagtattctgcaatgactgagaatgcagttttttagtgattgcaattactatctcatttattcttgcttttatttctttcctctgttcctcttccctcttttttaatcatgttcttaagacttcttttctgtgccaaaatcagtaaagttacactctgaagggatatcatcctttcaaacgggccatctaaggcagctaattatgcattgcattggggtctctactgagaaaaattctgtgacttgaactaaatatttttaaatgtggattttttttgaaactaatatttaatattgcttctcctgcatggcaaaactgcctattctgctatttaaaaaccctcaatgactttattttctactgccgcctttttcatgtgcaaccaaaatgaaaatgtttaaattaactgtgttgtacaaatggtacccaacacaaactttttttaaattagtaatacttttgtttaaagttttaagtttgcattttgactttttttgtaaggatgtatgttgtgtgtttaacctttattaactaacgttaaaagctgtgatgtgtgcgtagaatattacgtatgcatgttcatgtctaaagaatggctgttgatgataaaataaaaatcagctttcatttttctaaaaaaaaaaaaaaaaaaaaaaaaa

SEQ ID NO: 289187 - DNA, 1000 bp, Homo Sapiens
agctgaacaggccaaagccagactacagctggttcttgaagctgctgcaaaagctgatgaagcattgaaagccaaagaaagaaatgaggaagaagcaaagagaagaaaggaggaagaccaagccaccctggtagaacaagtaaaaagagtaaaagaaattgaagctattgaaagtgattcttttgttcagcagacattcagatcaagtaaagaagtcaaaaagtcagtggaacctagtgaagtgaaacaagcaacttcaacatcaggaccagcatcagcagttgctgatccacccagtactgaaaaagaaatagatcctaccagcatccctactgctatcaagtaccaagatgacaattccctggcccatccaaatttatttatcgagaaagctgatgctgaggaaaaatggttcaagagattaattgctctccgacaagaaagactaatgggcagtcctgtggcctaagtaatatacatatagttggattggattgtcagcagtaacattggaaatttaggtttttaaatcccaatattaactttttactcttaaaaagaattttgctgattatatataaaggtagtctcatttcatttgtctctcatgtaggcttgaatatttgttaatttgaattaaatcaaacattgtaaaaattaaaacaaaatttaagattgcatgaaaatgttatactgttaataaagctaaacataaataagtctgttaaaatgaatggtagacactagtgtttcttagtgcaattcaaaaaatgtcaagatgtcatttaaagacacaattttgattaattatgcatacatgagaattgaattacatgctataaatatgagatttcatcttccgtatggtattcaaccatttttaaatattttatttcaccatattgcaaatttttaggcacaataaaaagcaccctaaacaatgtaagcagaatgtgcatgttaaagaacatatttatggaaaaaaaaaaaaaaaaaaaaa

SEQ ID NO: 289188 - DNA, 1000 bp, Homo Sapiens
tatagatcaaaatgtgaaacattttatgttcaatccatatttgtcttgcacattataaatatatttttattttttagtaatttaggggagggaggagggagaaagggataatgatgcccttggcataattcacaaaagcagctgtgacaacctccaatcagtttacttcatttcaaaactatttccaatcacaaggaaagatttatttaaaatatactcgtacatttcacctgtggatgtctataacttcatcctcagtatgttcccaaatctgtgctggcattgaaaggacaaaacattatactagtgggtttttctactaattattttttgaagcattattttcccaacacaaaagagcttttttctcggtataatgaaaattgaaatcctatgtgtattcaatagtaaatagacaaattttattttttatttccacttgaagagttacatttcgtataaaagtttacaaataacggtttttattttgattttttcagtataaaaaaagttgccttgatggcatattatgatgtaatgctaattgcttgtaggatagtaaatggtcagtattgaaacctaatctctagctgccgtcttgtagatatgaacgaatgttcaccaagcatgtattttgtattttgttgcattgtacactgcaactaataagccaaggaatcgacatatattaggtgcgtgtactgtttctaaaaaccacaaactaagaatgataaattatcaatatagtttagtatttgctaattttactacactcttttgttatgtatatgtagggaagtcatagggattataaattcaatttgagtaaaatttaaaaccatatattttatgataaagggcctttaacttaagatggccaaagcactgatattatatatttgctgtaaagagaattataagagttttatttttctgatattaaaagttacttgataaagacttgtttccattaacttgaaaaaaaaaaaaaaaaaaaaaa

SEQ ID NO: 289189 - DNA, 1000 bp, Homo Sapiens
attcctcgtggtcatcgaagaggtcgaattgatgacttgcgataccagatagatgataaaccaaacaaccagattcgaatatccaagcaactcgcagagtttgtgccattggattattctgttcctatagaaatccccactataaaatgtaaaccagacaaacttccattattcaaacggcagtatgaaaaccacatatttgttggctcaaaaactgcagatccttgctgttacggtcacacccagtttcatctgttacctgacaaattaagaagggaaaggcttttgagacaaaactgtgctgatcagatagaagttgtttttagagctaatgctattgcaagcctttttgcttggactggagcacaagctatgtatcaaggattctggagtgaagcagatgttactcgaccttttgtctcccaggctgtgatcacagatggaaaatacttttcctttttctgctaccagctaaatactttggcactgactacacaagctgatcaaaataaccctcgtaaaaatatatgttggggtacacaaagtaagcctctttatgaaacaattgaggataatgatgtgaaaggttttaatgatgatgttctacttcagatagttcactttctactgaatagaccaaaagaagaaaaatcacagctgttggaaaactgaaaaagcatatttgattgagaactgtgggaatatttaaattttactgaaggaacaataatgatgagatttgtaactgtcaactattaaatacattgatttttgagacaaatatttcttatgtcaacctgttattagatctcttactctgctcaaattcatcactgaaagatttaattttagttaccttttgttgatttaaaaataattgcatttgtatattgctaactgataagacaaattgagttattgagctattaaatgcacattttaatataaatgcagaaatcccaaataaaatgctaacatactgaaaaaaaaaaaaaaaaaa

SEQ ID NO: 289190 - DNA, 1000 bp, Homo Sapiens; identical to SEQ ID NO: 222650

SEQ ID NO: 289191 - DNA, 1000 bp, Homo Sapiens
atctgctgcatacccaacagtaacttggacaaggctccagtccagcttctgatgcatagacctgaaaaagacagatgtccccaggcagggcctcgagaacgagttcggtttaatgaaaaagtacagtaccatggctattgtcctgactgtgatacccggtataacataaaaaacagggaggtccacttacacagtgaacctgtccacccaccgggaaagattcctcaccaaggccctcccctccctcctacaccccatctccctcctttcccactagaaaatgggggaatgggaataagccacagtaacagcttcccccctatcagacctgcaactgtgcctcctcccactgcaccaaaaccacagaagacgatcttgaggaagtcaaccactacaaccgtgtgatgtatgccattaaaaaaattgtttttttaattttctatattataaacataaaataagtaatgagcactttctactcaagcaataaaaagcccaaatatattaatcctgcattcagcaaagtggcataaaaatcacctggtaagtatgcagcacattgcttatatcctgggtatgcattattttaaatgttgtatcattaaaaacctcagaatgatgaaaaatatgaatgatgcattgtttttgcaattgacctatgacaaactgtgaacctgcagatttcacctattttgatttactataagagctgggatttgattcattttatttatgcctaagtcatctatgcattaacatgtcatattcttaactttgatctaatgctttttactaggaaattttaatactgaaggactattttattatttttttctaaagatgtttgtcactagtttttcattattaaatgctgaggccaataccaagaagtttattttctatattatacaattatgaattacatgctcagctatatatgtaataaaatactttggtctgtggaaaaaaaaaaaaaaaaaaaaaaaaaaaaaaaaaaaaa

SEQ ID NO: 289192 - DNA, 1000 bp, Homo Sapiens
actgaagaggaaaaggatactggagatctaaaagatagctctctcttgaaaacaaaaaggaaacataagaaaaaacataaagagagacataaaatgggagaagaagttataccattaagagtgctatcaaagagcgaatggatggatttgaaaaaagagtatttagcgctacaaaaagctagcatggcttctttaaaaaaaacaatatcccaaataaaatcagagtcagaaatggaaacagacagtggagtacctcaaaacactggaatgaaaaatgaaaaaacagccaacagggaagagtgtcgcacccaggagaaagttaatgcaacaggaccacagttcgtgagtggagtgattgtgaagatcattagcacagagcctctacctggcaggaaacaagtccgggatactttggcagcaatctcagaagttctttatgttgatttgctagaaggggatacagaatgccatgctagatttaagactcctgaggatgctcaagcagtaataaatgcctatacagaaattaacaaggaacactgctggaaactcgagatcctttctggtgatcacgaacaaaggtattggcagaagattttggttgatagacaggcaaaacttaatcagcctcgggaaaagaaaagaggcactgaaaagttaatcaccaaagctgaaaagattagactggcaaagactcaacaagcgagtaaacatataagattttctgaatatgattgaaaaaaaaaacagttcacctcttaatacttcacaagatacttgagctgttcttgggagattcacttttattatggtagcactgcataattaatgtgtttttaattaaaagaaatatctttgttccttaacttgtaaataagacttttttctagagacaaatatgatgtataccacaatttttcttaaacattttatttgttgaaattatcttagatgtcagtgtcaggtgatttagtaaataaatgtgttttgaacattaaaa

SEQ ID NO: 289193 - DNA, 1000 bp, Homo Sapiens; identical to SEQ ID NO: 117427

SEQ ID NO: 289194 - DNA, 1000 bp, Homo Sapiens; identical to SEQ ID NO: 222653

SEQ ID NO: 289195 - DNA, 1000 bp, Homo Sapiens; identical to SEQ ID NO: 118902

SEQ ID NO: 289196 - DNA, 1000 bp, Homo Sapiens; identical to SEQ ID NO: 222655

SEQ ID NO: 289197 - DNA, 929 bp, Homo Sapiens
gggcggcggcgcgcgggtgcgatcgcggagctgtgaggcgcaggcagggctctggggcacctagagaccggggccggagacgtggcagccgccctgcccgccagaaagtttcctagaagtttgctgggcgcgggcgcacgactgactggctggaccatgaacgtgttccgaatcctcggcgacctgagccacctcctggccatgatcttgctgctggggaagatctggaggtccaagtgctgcaagggcatctctgggaagagccagatcctgtttgctctcgtcttcaccaccaggtacctggacctgttcaccaacttcatctccatctacaacacagtaatgaaggtggtttttctcctctgtgcctatgttacagtgtacatgatatatgggaaattccgtaaaacttttgacagtgagaatgacacattccgcctggagtttcttctggtcccagtcattggcctttccttccttgaaaactacagtttcactctgctggagatcctctggactttctctatctatctggaatcagtggctatcctgccccagctcttcatgatcagcaagactggagaggctgagaccataactactcactacctgttctttctgggtctgtaccgggcactctacctggctaactggatcaggcggtaccagactgagaatttctatgaccaaattgcagtcgtgtctggagtagtacaaaccatcttctactgtgacttcttctacttgtatgtgaccaaaggtaggtcctgggatgacagcaatgctgacactggcctaaggagttactcatccatttaataagtattccagcagatacagatgtgaacagtcaagtctctgccatccacaatgcttgtgttctaatgcaagaagacaaatattttcaataaagaaacaaatgccataaa

SEQ ID NO: 289198 - DNA, 1000 bp, Homo Sapiens
gcgcgggaggagtgtgacccaggtgccgcttcctctcgccgccgagggtcaggagcccgggagcgcgaccctcccccggcccggcctggcccggcctggccagtccccgcggtctctgcccgggctgacgcccaggaatgtggtcgacgagaagccccaacagcacggcgtggcctctcagcctcgagcctgatccagggatgtctggatggccggatggcagaatggagacctccacccccaccataatggacattgtcgtcattgcaggtgtgattgctgctgtggccatcgtcctagtctccctcctcttcgtcatgctgcgctacatgtaccggcacaagggcacgtaccacaccaatgaggccaagggcacggagtttgctgagagtgcagatgcagccctgcagggagaccctgccctccaagatgctggtgatagcagcagaaaggagtactttatttgagggacaacagacttcacttccctgaatgcctcccccatctccatcaggaaaaatacaccccatcgcccagcacccctgctgataccaccagacagagagagagagcacttgattcttcccgagatagccacctggaaacactaggtgcctgcccagggaggaacggaggaggactcgcgctacaagaggccactcccagggacccagggaggcgatggccaccccagaggccaccttttgctccacggaggtgggagaaaatctgggcacatggggccccctgggcagtgcaggacaacatcagctcactggcaggaaagtccttgttgagggtgagggggtgctggggtacccgggggctggggaagcaaggaaataagtcatctgtatgctgactggggataatggcatcaaatgtcagtccttgacatttggggggaacagcaggtgccagagctaaaaggtacctttgtctgccattgatccagctcagaacgattggaaataaatttgaaatgtaaccgagcaaaaaa

SEQ ID NO: 289199 - DNA, 1000 bp, Homo Sapiens; identical to SEQ ID NO: 117428

SEQ ID NO: 289200 - DNA, 1000 bp, Homo Sapiens
cctaccacgtcccaggcgaagggaccgagcccccagaccaacaaggaactgggaaactttttccggagcctgtggggaccttatgctggctgggcccaagcggctggatcagatgcctcctgaagaattacagacttcttcctctagacttggagggcctccttggcaatgcatttgatggccaccagcttctgcgtcctcttatcttctgccaggatcacctccgagaaggcccccctatcgggagaggggattcacaaggtgaagaactggaaccccagcttccctccagcctctcctccattccctatgggttctgtgaccactgctggaccaaggacgtggatgaccctcccctagtcactcatccatcccctggctccagagatggtcacatgacccaggcctggccagtcaaagtagtctctcccctggccacagtaattggtcatgtgatgcaagccagcttactagcactttgagaatgagtctcctgttgagctggtaggatgtaagcctggagctaatggcgatcatctttgccaccacctggggagagcctgcttgggaatgaaattaacacaaaggaagtccaacctgagaaatggccaaatatatttcctgataacattatgtggccctctggatccagccatgcctgaggtctacccctgggcttttggattatgtgtacagttggttcatccctttttctgctaattcgagtcatggctaatttaacaccctttagaaccttaaagaaccatcagcatcacccgggaacttttttagaaatgcaaaatctctactgctttggatcctgggtcaaaaaaaagaaaaaaaaagaaatgcaaaactttaggccctgccccagatttactaaatcaatctgcagtttaacaaaatcctcaggtgatttgtatgctcattgaactttaagaagcagtgttttagaacaggttcttaaaaaggatcaaaaaaaaaaaaaaaaaaaaaaaaa

SEQ ID NO: 289201 - DNA, 1000 bp, Homo Sapiens
agctcagatctcctttcaaagtagtggctttctggatggtaattccatcttaaggtgtcagaactattttcaaatgctgcctttgacagttcttggaattttctgatattaagcagttccatgcaaatattcgtgttttataaatagctctcatagtctgctccatcttgatagttaagtgatttctgaagcgtttgtgtgtgtgttgatcaggttgtgtgatatttttgcttgatagagaatcaaatttgaaacaattaaccagccagtagattgtctgtcagtgaccttctgtagtaataaagtttttgccactgtaaataaaaacagtatccgtagctatcaggatcattgcgcactcatatatgctaagccttctgttctctaatagaagcctttcttttccattgtttctggatatttgtattatccaaatgtgcttatttctttgccttagcacacgttttatggagtacttgttatactaggtttgatttgaaactggtgcttgtcgcagaactgtcagagcatgaggagcgctcctcctgtgggtggacgcattcacgcactcccaggttgcacctgctgctggcggtgagcagggggttcagcagcttgaccgatgccccccgagggggctctccccagcttaaactttgttgtttaaatttgttaactttttatattaatgactattgaaagtggtaataaaaatttatattataggcttcaatgttttcatgaatgttacccaaaaagctgtgttttctttggtcagaggtcaaaatttatgaaaaacaaaatgctgtatgaatggaaatcattttgcaattgagtgacacttcattgtaattcacagtgtaaatttaatccaaactgaaattttgtttcaactgaatttgtaattaactctgaatttgtttttaatcattagtaatatttcagttgggtatctttttaagtaaaaacaacaaataaactctgtacatgtaaaacgtga

SEQ ID NO: 289202 - DNA, 1000 bp, Homo Sapiens; identical to SEQ ID NO: 117429

SEQ ID NO: 289203 - DNA, 1000 bp, Homo Sapiens
ataccttctcagatgctttagaaacatgcaacaccaactccttttctaccctcctctctgtccatacctacaaggccaaggacaaacgccatcttcatccttcttagaaagagatctattaccccattaggggagacagagagagtgaatggaggagtaccgagctggctatggacttgggtgtctggcaaacacagcttcagtctcactacttctgacactctggttattgggcactaagggccagactggaaagtcacttgagacacattctcagtttgttgcagtgccaggaatgctgcgctgctgctgctgcgcacctggcccatgctgtccctggcttccatgccgtccaggccctgccagaaaaggaaattggcatgcaattctaaactgcagtgactgggatgggaggggaggggagcagtgttgatgccaaaatacccacggggtctaccagccatggggtttgcttgcttaggagtagttgtttcagaggtgattacaggcctgggtttgactgtgcttaccaatgagtggtttttgagctatgagaaagtggatgggagtgggaggaggagagatgggtgaagacaaaagagttctttatgagcctcgatgttccctggtaaacttttaaaaaggccttctctcatgatctaagtcttggactggtggcatcatgtaactgctaaccttacagtaaaaacccaagaatgggtcaaaaatgtcttcccagtttctccaagctgcttctggaatgcaggtctgtcggctgggtgctctccagcagctgctcctgcctgattcaactgtagcctgtaatgggtaaaagccacatttaggaggtggtctgatcatagaacaccttaggaagaaagtccatgagactttctgactaggaaaccatgtggtttgaacttgaagaaaaatgtagacccatctgggttaattttcctacaatctgactcaactgccaggtgaaaaaaaaaaaaaaaaa

SEQ ID NO: 289204 - DNA, 1000 bp, Homo Sapiens; identical to SEQ ID NO: 117431

SEQ ID NO: 289205 - DNA, 1000 bp, Homo Sapiens; identical to SEQ ID NO: 117432

SEQ ID NO: 289206 - DNA, 1000 bp, Homo Sapiens
gctcatggcgacctgctgcccctcaccaacgacgacagcctgcaccgggccctggccagcgggcccccgccactgcgcctactggtgcagaagcgggcagaagctgactccagcggcctggcttttgcctccaactctctgcagcggcgcaagaaagggctcttgctgcggccagtggcacccctgcgcacccggccacccttgctaatcagcctgccccaagatttccgccaggtttcctcagtcatagacgtggacctactgcctgagacccaccgacgggtgcggctgcacaagcatggttcagaccgccccctgggcttctacatccgagatggcatgagcgtgcgtgtggctccccagggcctggagcgggttccaggaatcttcatctcccgcctggtacgtgggggtctggctgagagtacagggctgctggcggtcagtgatgagatcctcgaggtcaatggcattgaagtagccgggaagaccttggaccaagtgacggacatgatggttgccaacagccataacctcattgtcactgtcaagcccgccaaccagcgcaataacgtggtgcgaggggcatctgggcgtttgacaggtcctccctctgcagggcctgggcctgctgagcctgatagtgacgatgacagcagtgacctggtcattgagaaccgccagcctcccagttccaatgggctgtctcaggggcccccgtgctgggacctgcaccctggctgccgacatcctggtacccgcagctctctgccctccctggatgaccaggagcaggccagttctggctgggggagtcgcattcgaggagatggtagtggcttcagcctctgacagtcaggatgaagccccatgccactccacactgctgggacatggcagggacttcacagtgggggtttttagctggctcacagggctccctcagcctggggaacattaaaggttttctacaaatacaaaaaaaaaaaaaaaaaaaaaa

SEQ ID NO: 289207 - DNA, 1000 bp, Homo Sapiens; identical to SEQ ID NO: 222659

SEQ ID NO: 289208 - DNA, 1000 bp, Homo Sapiens
agcgctgcttcattttgtatagggcttttctgtttgttacaagccaaacattgcctgtctttgcttcccgtccctgaatgcctttttgtgccagactgtcccaagaatcctaatttgtattccatagaggtattttatttttaatcctagagcttcttattgatggatcctttagaattgcctacctaaaaggtaaactatactatccttataaatactgatcaatcccagttctccccctaaaaatgaatacatagtaggactatagcaaatgtgtttgatgggtaattctagactgggactatggtacccttttccagagttttaaaattcaaccttcattacagacaaagttttctcccagaaggaatggattgatagattttgattaaagtaagggtggaaggaaatctgtagctggatttaccacaagtgacatctagaaactatagttcacaggacagagcagagccatggagaataagcattgactaccttgagttctcctagtgaggagttctggtataaaatttaagattactaccagtaaccaacttaaagcaaactataggggtccctaattttggatttttccttaagtgtaagaaacaatgcttcaaatgttaagaaataacagtctgggcaaagaacgcatattctataggaagccaggtttacaataggtaagaataaactgtattaagtagatgtaatgactagaaagctgctttgctccctatattgagaaattgtggacatggtatgtgttatccaaagaacattgggctagaagatagatttctatccttagctttggcattattgactggattgacttgaacaagtcgcttaacttctacaagcttgtttccttatttgtcaaattagattacactaggaaacgattctcgaacatgttttaaccttacaactctttgttcaaataaatctttcaatgaatccccaacataaaaaaaaaaaaaaaaaaaaaaaaaaaaaa

SEQ ID NO: 289209 - DNA, 1000 bp, Homo Sapiens
atggaagtgcctatgttatcttccctgggggtcaccaattcaaaaagcggttcatctgaagactccagtgatcagtatctacaagcacctaattctaccaatcaaatgttatatggattacagtcacctggaaatatttttctgccaaactccatcaccccagaagcacttagttgctcctttcatccttcctatgacttttatagatacaatttctctatgccatctagactgataagtggttccaaccatcttaaagtgaatgacgacagtcaagtttcttttggagaaggcaaatgtaatcatgttcattggtatccagcaattaaccattacctttagtaagacaatagcatttctagaacaattacatgtaaacaaatattttctttatttgtagccaaagaaatttcaacagttattgggcttaaaaagcatcattacaatacagtatttctttgttatacatttaaagatttaaagtgccttatcaaataatattcatgaagagttgtttataatgtcaaatgaaacctacaggaatctctgattacagtggccttgagcttcaaaatgagatatgcaataaatattatttgatgatactccaccagtgaaaattgatgctaagtgatgggattttcaattatactgaagctagttcaccacgttaactgcattttacacattgacaatgacaaaaagaagatggatgtaattctcatgaaagcagtgaagcaatttcagttttaaaaatgaagatcggctttcatgtaattatctagtagttgtagaagaaaatttaattatttgtttgcctcatgcctttatactttgctgttgaagaaactactaatctcaatttaagatacaaataaggacacaaactttcaagtattatattttatttatctttgtagcctaaagaccatttaatcttgaaggaacacaaagatcaaatgaaaagtaaaacactctaaataaatttgcttttattttc

SEQ ID NO: 289210 - DNA, 1000 bp, Homo Sapiens; identical to SEQ ID NO: 117435

SEQ ID NO: 289211 - DNA, 1000 bp, Homo Sapiens
gaaacaggtcttgaagctgacccatttgccccagaccctgacaatccacctcatgcgattctccatcaggaattcacagacgagaaagatctgccactccctgtacttcccccagagcttggatttcagccagatccttccaatgaagcgagagtcttgtgatgctgaggagcagtctggagggcagtatgagctttttgctgtgattgcgcacgtgggaatggcagactccggtcattactgtgtctacatccggaatgctgtggatggaaaatggttctgcttcaatgactccaatatttgcttggtgtcctgggaagacatccagtgtacctacggaaatcctaactaccactggcaggaaactgcatatcttctggtttacatgaagatggagtgctaatggaaatgcccaaaaccttcagagattgacacgctgtcattttccatttccgttcctggatctacggagtcttctaagagattttgcaatgaggagaagcattgttttcaaactatataactgagccttatttataattagggatattatcaaaatatgtaaccatgaggcccctcaggtcctgatcagtcagaatggatgctttcaccagcagacccggccatgtggctgctcggtcctgggtgctcgctgctgtgcaagacattagccctttagttatgagcctgtgggaacttcaggggttcccagtggggagagcagtggcagtgggaggcatctgggggccaaaggtcagtggcagggggtatttcagtattatacaactgctgtgaccagacttgtatactggctgaatatcagtgctgtttgtaatttttcactttgagaaccaacattaattccatatgaatcaagtgttttgtaactgctattcatttattcagcaaatatttattgatcatctcttctccataagatagtgtgataaacacagtcatgaataaagttattttccacaaaaaaaaaaaaaaaaaaaaa

SEQ ID NO: 289212 - DNA, 1000 bp, Homo Sapiens; identical to SEQ ID NO: 222662

SEQ ID NO: 289213 - DNA, 1000 bp, Homo Sapiens
agtggaccaagatactttagactgtgacaatcctgaagaagagcagtttgctcttgaagtactgccagatgtcctggaaaaacactatggatataaactcttcatcccagaaagagacctgattccaagtggaacatacatggaagatctcacaagatatgttgaacaaagcagaagacttattatcgtgctaactccagactatattctcagacggggatggagtattttcgaactggaaagcagactccataacatgctagtcagtggagaaatcaaagtgattttgattgagtgtacagaattaaaagggaaagtgaattgccaggaagtggaatcactaaagcgtagcatcaaacttctgtccctgatcaagtggaagggatccaaaagcagcaaattaaattctaagttttggaagcacttagtatatgaaatgcccatcaagaaaaaagaaatgctacctcggtgccatgttctggactccgcagaacaaggactttttggagaactccagcctataccctctattgccatgaccagtacttcagccactctggtgtcatctcaggctgatctccctgaattccacccttcagattcaatgcaaatcaggcactgttgcagaggttataaacatgagataccagccacgaccttgccagtaccttccttaggcaaccaccatacttattgtaacctgcctctgacgctactcaacggacagctaccccttaataacaccctgaaagatacccaggaatttcacaggaacagttctttgctgcctttatcctccaaagagcttagctttaccagtgatatttggtagtgaaaaatctgaattcctctgaacagctagataagcatagagaatttctgttataccaagcataaagtacacctaataacgttgtgttaaaaaagtgtttgaagaaaaaggtacaaaaatggcttttatacttaaatatttttgtttacatttccagaatagtggggg

SEQ ID NO: 289214 - DNA, 1000 bp, Homo Sapiens
ctgcaaaacccaacccatgctgctggctgtgggatttttggtgtaagcctatctatgcactctatcagccagaatttggcatttagctcttagttaaatctagtaaaggacagtctattgtttaaagagaaggtgcatttgttcctcaatcaagcaagagcacctgtgttgtactgctttatatctcatgtatatttatagtaatgaaaagactttttaaattgtacacgtttcagtgcctttcttgtgttatgaaaggcaggtagatattatagccataggtaaaaatccatagttaaattgcacactgaccttaaatctctctgtgtatgcccttgtatcttgcatgttaaaagttggattattgggcatgtgtggcagcctgccctgctacatgctagacaagtgtgctttagtacatagccacaagttcttcattctttaaaatgttttgacagatcatctcataataaaaataattcaggaaaactatggggaaatagttacatttcacaaaagatattttaaactctttgtaaaacttagataatagagcctagcagttactttgtatctaattgatacattttatgttaatttaccaccatacattttattaatcaaaattgtatagcatgtgactcttttggctttcagagttctcaaaaatattattttgttgcatgtactgtatgtttagaggcaaccaattatatactcaatatggttttactgtgccttacacaaagagaaactctatacagaatgtatatcatggggtggggtaacagagtctttactgcactgttaggtgatggcacacagagcatgtcccagaacatttctgtgcttaattacccaaccaaagagatctgaagtatgtatgtcgtactgtaatgggggtttatgcctggacaattaagtgttttatttgttttctgaaatgatgtgaacttatttttctaaacactatgctaaataaactttatatttatacata

SEQ ID NO: 289215 - DNA, 1000 bp, Homo Sapiens
ttattagtatttttccggtgaacagaagatttgtttggatttaaacatttactaagacagtacctattaggaaaaccaaatattgcaaatggtcaattcgattttaatttctcaaaagatactctgttatccagaagattaaaatgcctacattgagtgcttaaaaaaaaaaacaactgtgatgatgtgagcagaatggcaagtaagttaagcatttttgatcctgtaatcatggtatcattacaatgaaaggaattcacaaactactgccagaggaagtttgttttttaatttaagagggaaatataacctataaatttgtttcttccaagcttagctcttaaatttgggagactcaaagttaaacatcctcaacagagttttatttataattttgaattgtcaatttgtattttgctactgatctgtgatcaaccattttaactttcatctctagggatgtttaacatttataattgcaaaataaaccaactataaaaaaagaaactaagagagaattggtactttaattacttgtgtgtttgcaaataggctccattttccatgttgagtagattataaccttattaactaggcataggcctaagaaaggtggcaatgaactgtgcatgtaaattttaaatgggtactttgtgcaattcgttaaaagaagatactctatgaatatgattctatatattgaaatcagaaaacctaccaaacaaaaacatcagaagctgctgccataatgactattttctactgtaggctgctttggaaataattcccatatccttgctttgtaagttggtaatatcactatgcatttctacacattttataaatttgatttatgcagattttgatacactgtatgtttctgtagaaattgtataaatattcaaaattttattaggataaatttgagaaacttacgtatatcttaattctgggttgcttgttttttaggtgacaaaaataaaatattgtattttaattc

SEQ ID NO: 289216 - DNA, 1000 bp, Homo Sapiens; identical to SEQ ID NO: 222663

SEQ ID NO: 289217 - DNA, 1000 bp, Homo Sapiens
tctggagggagtcctttcctgccagccccacgagagcttgggggaagtgatcgacaggattgctcgggagcaggtacacaggctggtgctagtggacgagacccagcatctcttgggcgtggtctccctctccgacatccttcaggcactggtgctcagccctgctggcatcgatgccctcggggcctgagaagatctgagtcctcaatcccaagccacctgcacacctggaagccaatgaagggaactggagaactcagccttcatcttcccccacccccatttgctggttcagctatgattcaggcttcttcagccctcccaaattgcccttgccctacctgtgctcccagaagccctcgggcatgcccagtgcaccatgggatgatgaaattaaggagaacagctgagtcaagcttggaggtccctgaaccagaggcactaggattaccccagggccatctgtgctccatgcccgcccatccccttgccgcctgactgggtcggatggccccagtgggtttagtcagggcttctggattcctcggtttctgggctacctatggcttcagccttcagctcctgggagtcccagctgttgttcccagcaacgtcgccactgccctcctactctccaggctttgtcatttcaaggctgctgaaatgctgcatttcaggggccaccatggagcagccgttatttatagaactgcctgttggaggtggggagtcctccctccattcttgtccagaaaactccttagctctcgcagtgagccatgttcttagtctccagggatggatggccttgtatatggacccctgagaatgagcaattgagaaaacaaaacaaaaggaacaatccatgaacttagattttattggtttcactcaaaatgctgcagtcatttgacctgaacttgtggcaagagacttgtgctttctaaattcaaagactagaaggaaaatggataaaaatcacaagtgccgtttctcttgc

SEQ ID NO: 289218 - DNA, 1000 bp, Homo Sapiens
ctctcaggtgtctgtaaaggagaggagccaaaaatattgagacccccaagacgaccccggaaacccaaaacattaaataaccctgaagactccacatactattatctacttcataagtcaatccaagaagaaaaacgaagaccaaggaaagacagtcagggaaaattattagatttggaagatttctattataaggaatttttgcccagtcgttctggaccaaaggaacatagccctagtttaagagaacgaagaccacagcaagaactccagaatcaatgtattaaggctaatgaaaggtgctgggcggcggagagccccgagaaggaggaggagagagagccagcagccaacccctacgacttcaggaggctcctgcgcaaaacctcccagcgccggcgcctcgtccagcagtcctaaccgttcaacgaggcagtcaccgccgtcggaaggcgctggagcctgcggggcagcaggggccaagcaggcactctggggctggcaccagcaggcactgaagctgcggccctgatctccgcagaggctgcctgctgcgctcggccctcaagtgcccgggccggccttcgtgctccgaaacaagagacctgggagccctcgggaaacctcccccgacgctctctctcggaactcccgcaccctcctttctcaccagcccgccagttgtggcaaccctgtccttgttcccctaatctatcactttgttctttttttttgtgactcctgtggactccactgcgcctgggatctcgccaacccctctctcatttggggtgactgaattcacagatttttttttttattggaaacggcttttcttggccaacagaacacttgctagcggttgaatcttagagaaaaaagcccgggaggggtggggagaatttcgaagatgtatttcatctcaagcttgctctttctcttcctttggttattaaggtcactaaataaaggaagtgccttggaaaaaaaaaaaaaaaaa

SEQ ID NO: 289219 - DNA, 1000 bp, Homo Sapiens
ggccttctaccccatcccctggcaggactggaagaagtactttgaggacatcaaccccgaggagctgccgcggctgctcagtgccacctatgctgtccacgtgtggaacaagaagagccagggcacgcggttcgaggccacgtccagggcactgctggcccagctgcatgcccgctactgccccacgacgcacgaggccatgaaaatgtacttgtgaggggcccgccaggtcacctccccaacctgctcctgatggggcactgggccgcccttcccggggaggcaagattgagggcccgggagagggaggcccgagctgccaccgggcttaggcaggctgttgaggagctgtgggagcaggcccagtgggaggctgtggacaccccgaggacagtgtcctgtctcgaggcagggctgacacatggtgccatagccagcggagggcgctcagtgagtgccccgggccttctagacaacaggcaggaaggatgaacctcagggcacccccaggtggtgcggaaagccaggcagttgggacagaggtgcccacgagggcagaggccggtgctaaggggatggggaagaagggacaagattcccagagaggagaggaggctgttggtaggaaagtggcagggctgggggagacccagccccaagggtccggggcggaggatgctttgttcttttctggttttggttcctctttcgcggggggtgggggaggtcaacagggactgagtggggcagaggcccagaagtgccagcctggggagccgtttgggggcagccccttctgcccaccccatccttcttcctctccagagatgccaggggggcgtgtatgctctgccccttccctcagacaggggctgggtggggaggctctttaggctcaggagaagcattttaaagaaacccccaccctgccgcccgcattataaacacaggagaataatcaatagaataaaagtgaccgactgtcaaaaaaaaaaaaaaa

SEQ ID NO: 289220 - DNA, 1000 bp, Homo Sapiens; identical to SEQ ID NO: 222665

SEQ ID NO: 289221 - DNA, 1000 bp, Homo Sapiens; identical to SEQ ID NO: 115318

SEQ ID NO: 289222 - DNA, 1000 bp, Homo Sapiens; identical to SEQ ID NO: 117437

SEQ ID NO: 289223 - DNA, 1000 bp, Homo Sapiens; identical to SEQ ID NO: 222666

SEQ ID NO: 289224 - DNA, 1000 bp, Homo Sapiens; identical to SEQ ID NO: 222667

SEQ ID NO: 289225 - DNA, 1000 bp, Homo Sapiens
tttttttttttaaagacagattctcactcagttgcccaggctggattgcggtggcgctgtctcagctcactgcaacctccgcctcccaggttcaagtgattctcctgcctcatcctcctgagtagctgggattacaggcgtgtgccaccatgcccaacctatttttgtattttttagtagagacggggttcaccatgttggccaggcttgtctcaaactcctaacctcaactgatccacctgcctcagcctcccaaagtgccgccgggattacaggcgtgagccaccatgcctggccttcattatctcttttttaaaaatgaaaaagtttataatttacattcagtaaaatcaccctttttagtgtctagtctgtgaattttgacaaatgcatggttttgtaaccaatcgataggacagttctgccacccaggacattcccctctgttcctctgttcctctcttctcctgccccctagcaaccactggtgttttctgtccctcttgttcattgacatttattttaaaataaaatattttaaaatctactttttggtgtacagttctgagttttggcaaatgcagtcaagtcactaccaccaccacaattaacagctatatcaccctccagtaaattccctgtggtcagctccttccccaccttttaccgtggcaaccgtcaagctattctctgtccctataccaggtgtcatcaaatttttttctggaaaggcccatgcagtaaatagttcaagctttgtgggcttttatagtctctgttgctgctgctgaactcagctgttgtagcacgaaagcagccaggtaattactagatgaaggaatgcaggtggctgtgtttcaatagagctttatttctgcaaactgaaacttgagttttgtgtaattttcatgtgtcatgaaatactgttttctccaaccatttaataatgtaaatacttgctagcttatgtgccattaaaaaatgacttgatttggcttac

SEQ ID NO: 289226 - DNA, 1000 bp, Homo Sapiens
tttctatgttacaagattcaggtgccactttatgtcgtaacagtgtattgtggcctcatagtcacaaccaggcacagaaaaaagaagagacaatctctagtccagaggctaatgtccagacccagcatccacattacagcagagaggaattgaattcgatgactcttggtgaggtagagcaactgaatgcaaagctcctacagcaaatccaggtttttgaagagttaactcaccaagtgcaagaaaaagattctttggcctcacagctccatgtccgccacgttgccatcgaacagcttctgaagaactgttctaagttaccatgtctgcaagtagggcgaacaggaatgaagtcgcacctacccataaacaactgacctaaacagacttacttcgtatgccctgccctttattggtctcccagacatgcaaactttgaagaagtttgaagaaagttgtggtccgtttttttatggtcattaaatttgccaaacataaggcagtatttaacatctttgtcaaataaagcagatcattatactctagtcttctagggctaatcattttggctcatttggggactcttttttcccagaattactaaacaaattttatcacatgtgactacttaaatatactgttacagtgtcattttattaaacattttaattcacctgtcaaaacaacagattaactccttagtgtaaactactagagataatttttaagagggaaatggaattcatatcacctcttatttattatgagcaatattttaatataaaaattttatatgtgaaaatgctattttaggtactttgccattctctttataaatgtgtatttgagtggttctgtatatttatttacattatcatgtgtgaatatgttcacccatatttcaggtcactgcattttattctcttaatacaatgttttcacaacggttaccttgctttccaaagataaatatattttggattagaaaaaaaaaaaaaaa

SEQ ID NO: 289227 - DNA, 1000 bp, Homo Sapiens; identical to SEQ ID NO: 222668

SEQ ID NO: 289228 - DNA, 1000 bp, Homo Sapiens
ggctccccaggcccctccctgcctcgggcagcccccagccctcctccttacccaacctcccatccagaaccttgctgccagggcctcccagctcgctcctgcgccaaaggccagctgtcaggtgctatgcggggtcaccagcagagtgcccgctggcaggtgggggcttccccgcttccggggtctgccccaggactcctgggtggacctcccccacccacctccgctgactcctgcaggcactggggagctctgctggaattgggggtttaaaacttcattagcagatttgtgctcttccatactgtttgtttgtttgttaggtgaaatacagtgtggtgagctgcactggtgacaacagcccttacctggctggggaggtgtctccagcgagagctcactcccgcctacagccactcacaccccggggacaggaagctgtagagttggcgggccaggagggcagttgagagctggccagcggagggtgcagggaagcccagctgtgctcaactctcctgcctccgccttccaccctgggcccagggacagacagacattgccctcagaagggcagggaggaggttgtcctggagaggcctgtaggtccattcttcacccgtccctaccaggccaactcggcctgcaggaagggagacctgcagggcgctacccctgcgcccccacacacagtagggccagaacaccatcccctccaccggggtgtgccgaggacagtggggaggagaggagaggggcagcttcctcctggccccaggaagggctggcatcgggttcctggcacagcccctcctgtccaggactttatcatcggcagacctcagaagacaacacacaaaggtttcttttttcttagcttcatttctcttaaaaaacaaggaacaagaaaacattgcaccagcgttctaagcctcaaacaaaacacaaaacaaatccccctgcgaagcaacaataaactttacatctctttggcaacaat

SEQ ID NO: 289229 - DNA, 1000 bp, Homo Sapiens
ccttctcaagctggctcactcagacacattgggacaaaccctggacagccatgccagagagaggcctttgaccggccccagagctaaaagcaccagagaaaatcaaatgcttcctactcagcgtgacccaacttttctagtgtgccacggccccaccacctcctgcagtacccacaccatcaccactgctttctcttccaacagtgatctgtattcttagtttcattattttcttttgattgatatgacactatataaaattttcatttgagaatttctcaattgtatctagttaaatagcacagtttggaaacttgtctgagactgactttatcaataatctaaccgacaaagatcatatccatgtgtatgtggttagacatttttatttcattgactaacccaggacagtttcagtgatgcaaattgtgtgccctctggttcagctgaaacagtcctggactttcaaaaaccttgaataagtctcccacagttgtataaattggacaatttaggaattttaaactttagatgatcatttggttccatttttatttcatttttatttttgttaatgcaaacaggacttaaatgaactttgatctctgttttaaagattattaaaaaacattgtgtatctatacatatggctcttgaggacttagctttcactacactacaggatatgatctccatgtagtccatataaacctgcagagtgattttccagagtgctcgatactgttaattacatctccattagggctgaaaagaatgacctacgtttctgtatacagctgtgttgcttttgatgttgtgttactgtacacagaagtgtgtgcactgaggctctgcgtgtggtccgtatggaaaacctggtagccctgcgagttaagtactgcttccattcattgtttacgctggaatttttctccccatggaatgtaagtaaaacttaagtgtttgtcatcaataaatggtaatactaaaaaaaaaaaaa

SEQ ID NO: 289230 - DNA, 1000 bp, Homo Sapiens; identical to SEQ ID NO: 117438

SEQ ID NO: 289231 - DNA, 1000 bp, Homo Sapiens
ctctctcattgtctgtgtagagtgttatacttgggaatataaaggaggtgaccaaatcagtgtgaggaggtagatttggctcctctgcttctcacgggactatttccaccacccccagttagcaccattaactcctcctgagctctgataagagaatcaacatttctcaataatttcctccacaaattattaatgaaaataagaattattttgatggctctaacaatgacatttatatcacatgttttctctggagtattctataagttttatgttaaatcaataaagaccactttacaaaagtattatcagatgctttcctgcacattaaggagaaatctatagaactgaatgagaaccaacaagtaaatatttttggtcattgtaatcactgttggcgtggggcctttgtcagaactagaatttgattattaacataggtgaaagttaatccactgtgactttgcccattgtttagaaagaatattcatagtttaattatgccttttttgatcaggcacagtggctcacgcctgtaatcctagcagtttgggaggctgagccgggtggatcgcctgaggtcaggagttcaagacaagcctggcctacatggttgaaaccccatctctactaaaaatacacaaattagctaggcatggtggactcgcctgtaatctcactacacaggaggctgaggcaggagaatcacttgaacctgggaggcggatgttgaagtgagctgagattgcaccactgcactccagtctgggtgagagtgagactcagtcttaaaaaaatatgcctttttgaagcacgtacattttgtaacaaagaactgaagctcttattatattattagttttgatttaatgttttcagcccatctcctttcatatttctgggagacagaaaacatgtttccctacacctcttgcattccatcctcaacacccaactgtctcgatgcaatgaacacttaataaaaaacagtcgattggtc

SEQ ID NO: 289232 - DNA, 1000 bp, Homo Sapiens
gttgtgggctgcctttgtttggatgctgtccaccaatctgagcctagggcaagaaggccagaaatgggccgtgagctctcacaggctcagactaaatcagaggtcaaggcttcccctgagtaaggtccatttcttcccaggaatccaatctcctgtggatggagctatctctacatttaaaaatctcttctctttccactttgggtccctgccctgctcgtcaaagtgactagccaaattgacccctccaacagaaagtaatctttgttcccaagggctgatggcttagcttgtactaccccaaacattaaccctgagctttcttcatggaaccacttgaatgatggatggaagagctataagaggtggtaggcataggggcaagccatgtaagctgaggattggggatggtttcatcaacataagaggccaggaacttgacccctttgaattgtgcatctcaggcacttcaaaactaaaaccaaatttagcataggaaaaagttgtttaatgctcagggcagaaatttgggaagttgaaatcctctgttggctttgggttgtataaggaggatcaaaacaacagaggaaatgctgactttctagctttgcatgacacctggagcaatgcactgtacctgcctcactcctgtccagtggtcaggtttcccccgaccttccctcacccccagaaacacttgcttacagaccgaaactggcatcttactcttggcaccttgacttgcaccctctgaggttccaactcagtcattctttgtccagcagaggagaatcagaaatgagcccttcaggattaatcctcttgcaccagctctcagagaaatgctgggtatccctgtccgtccctatctgtccatcctggggcctggtaatggccacagttattgttttaaatgccaacactgtcttctcatgttcttccgtggggcattgattaatgagcatttgttggctcctaaattagacaatccattctcttg

SEQ ID NO: 289233 - DNA, 1000 bp, Homo Sapiens; identical to SEQ ID NO: 117439

SEQ ID NO: 289234 - DNA, 847 bp, Homo Sapiens
gcgagcggcttccgccgggctgctccgcgggcgcgtcggccatgagcgagttgccgggcgacgtgcgggcgtttctgcgggagcacccgagcctgcggctccagacggacgcccgcaaggtgaggtgcatcctgacaggtcacgagctgccctgccgcctgccggagctccaggtctacacccgcggcaaaaagtaccagcggctggtccgcgcctccccggccttcgactatgcagagttcgagccgcacatcgtgcccagcaccaagaacccgcaccagttgttctgcaaactcaccctgcggcacatcaacaagtgcccagaacacgtgctgaggcacacccagggccggcggtaccagcgagctctgtgtaaatatgaagaatgtcagaagcaaggggtggagtacgtgcctgcctgcctggtgcaccggaggaggaggagggaggaccagatggacggtgacgggcctcgcccgcgggaagccttctgggagcccacatccagtgatgaggggggagctgcaagtgatgacagcatgacagacctgtacccacctgagctattcaccagaaaggaccttggaagcacggaggatggggatggcactgatgactttttgacagacaaagaggatgagaaggcaaagcccccaagagagaaggccactgatgagggcaggagagagacgaccgtgtaccgagggctggtccagaagcgcgggaagaagcagttgggctcgttgaaaaagaagttcaagagtcatcaccgcaaacccaagagcttcagctcctgtaaacagccaggttaataaaagcacatgccgtgaaaaaaaaaaaaaaaaaa

SEQ ID NO: 289235 - DNA, 1000 bp, Homo Sapiens
aatagtcatgatacatctagagaatgaaagaaaactgtaagggaggagaaggaggggaatacattccctatatgggatgttcctactgttaactctggggaacagatagctccgggggcagcagatgagttcctctggctgactctatctgtagccacatggggacctgcctacgtgtgaacaaaatgaactgcacttatcacacaaggatttctttgaagacatgctactggggtgggaagcagtgaggttttattccccatctcctaactacagggagctctgccatgtcattttggccttcctgaaactaggacaggttgtctatcggggggcttcccccagagaggtttagtgggagaatgtcagtgaatgggatagttcacctcatgggacaacccagaatctgatcaccaggacataggaatggccccatcagatttcttgagccattttgtcacttggaagaaaatagtgtacctttgtatttatttaagagtgctcaaggcctaatagcaataaacaggtctagccaagaaattacaagctattctgttagctgggagtgctctctataagctgattaaggtactgataggaactctttgttattcatgttggttggggattagaaatttgtttttgtacatttatttcaaatgaggaggaggtcattttttctctcaaaaaatgagtatttattattgtcttactgatttctttgattatatacctctcctcctcagttcactcttgttttttttctttctctttggcttttgcttttgctctctctcacttctttcttattttgttgcattggtagagtgttgtatggctagcattgtattgtatgtaattaattttgcacaaaagcaaacatttagcatagtaggttaattttgtttgtttttatgaccatgccaaaataatattctgggctggtggagaacaaaggactgttctttaggactgaaacttgattttgctcatagtaagt

SEQ ID NO: 289236 - DNA, 1000 bp, Homo Sapiens; identical to SEQ ID NO: 117440

SEQ ID NO: 289237 - DNA, 1000 bp, Homo Sapiens; identical to SEQ ID NO: 222670

SEQ ID NO: 289238 - DNA, 1000 bp, Homo Sapiens; identical to SEQ ID NO: 117441

SEQ ID NO: 289239 - DNA, 1000 bp, Homo Sapiens; identical to SEQ ID NO: 117442

SEQ ID NO: 289240 - DNA, 1000 bp, Homo Sapiens
actactacgacaagaacatcatgagcaaggtgcatggcaagcgctacgcctaccgcttcgacttccagggcctggcgcaggcctgccagccgccgcccgcgcacgctcatgccgccgccgcagctgctgccgccgccgcggccgcccaggacggcgcgctctacaagctgcccgccggcctcgccccgctgcccttccccggcctctccaaactcaacctcatggccgcctcggccggggtcgcgcccgccggcttctcctactggccgggcccgggccccgccgccaccgctgccgccgccaccgccgcgctctaccccagtcccagcttgcagcccccgcccgggcccttcggggccgtggccgcagcctcgcacttggggggccattaccactagacggggcggtcgggtgcctgcggcctcgcccgcacgcctagagtctcgcccgatcccatcggcatcccggggagggcccgggagcctccgtcaaccgtcctctaatccagagtttactccacctgccgcacttagcagggggacgggaccgaagctccctcaatccttgtctggtactagatttgctcctgtcccaccccgcagtcccctgaggagggcgatgtgcgccctctttcactttttttcttctaggtctccaggtcccggaggggatttgtggacctctcttgtctccccaccactccagtgcatttccgcctggctcctagaagccccattcaatatcactactctttaacgagtgccaaatcttttcccacttttgctcttccccaaggaactgctcccacctcagcacgtggaggcctctcacggtcctccttcctgggacctgagcaggtttggtgaaagccaccgtcctccgtgacacacggcccccttcctcctgtccccacactcccaggagaaactcccggtgtgtttctgaccctttcagccccattaaagctcctgagctctcaaaaaaaaaaaaaaaaaaaaaa

SEQ ID NO: 289241 - DNA, 1000 bp, Homo Sapiens
tggaagttatctgtcagatgaagggcactattgggtgggcctggatatcagccctgccatgctggatgaggctgtggaccgagagatagagggagacctgctgctgggggatatgggccagggcatcccattcaagccaggcacatttgatggttgcatcagcatttctgctgtgcagtggctctgtaatgctaacaagaagtctgaaaaccctgccaagcgcctgtactgcttttttgcttctcttttttctgttctcgtccggggatcccgagctgtcctgcagctgtaccctgagaactcagagcagttggagctgatcacaacccaggccacaaaggcaggcttctccggtggcatggtggtagactaccctaacagtgccaaagcaaagaaattctacctctgcttgttttctgggccttcgacctttataccagaggggctgagtgaaaatcaggatgaagttgaacccagggagtctgtgttcaccaatgagaggttcccattaaggatgtcgaggcggggaatggtgaggaagagtcgggcatgggtgctggagaagaaggagcggcacaggcgccagggcagggaagtcagacctgacacccagtacaccggccgcaagcgcaagccccgcttctaagtcaccacgcggttctggaaaggcacttgcctctgcacttttctatattgttcagctgacaaagtagtattttagaaaagttctaaagttataaaaatgttttctgcagtaaaaaaaaagttctctgggccgggcgtggtggctcacacctgtaatcccagcaccttgggaggctgaggtgggaggatcatttgaggccaggagtttgagacctgcctgggcaacataatgaaacttcctttccagggaggaaaaaaaaaaaaaaaaaaagctctgagagcatcttattttgtttaaaggcaagaaataaaatttccttttgtggaaaaaaaaaaaaaaaaaaaaaaaaaaaaa

SEQ ID NO: 289242 - DNA, 1000 bp, Homo Sapiens; identical to SEQ ID NO: 220420

SEQ ID NO: 289243 - DNA, 1000 bp, Homo Sapiens
atatttttatcacggggcagtgggagggcttgggcttttagccacagctgttttaagacttctgatctcctgccctgcaggaataggtgggaagtcattgaatttttacactatagtaatttgcattcccacataagtttgagtgttacgaaaacattcctttaaagggatctgtgctacacaaaatatgccaggacctcacagacaaagccattgctagaaatgtcattccaatgatcagatctggaaacaggctgccataaccacttttccttcttgtagactcagctcacctgtatatttaaactgttcttggcatcttgaaacacctatttctactcaggtactcattgtcctgttactgattcacctttctgatccttttcaaccagttttcccccaaggggggaaattttacttaacctctagtatttgaacaactcaatatttgaattgttgccccatttgcttttacctgtactgtattcttggtcatctcaaatggcgtctaaacccagctactttgcattccagaagtttccattccctccaattccacctaatttttcatctgtcctagttactggctctttcttcatgtcttatttctcttgctttgggagcttaaaagattttacaagacctaattttgggttccttccttggagccatagttaccctgccaagaagagtagaaaatgggttcaactcctgtttcgctccaccaacacctctgtgagtctcatcatcagctgagcgatgatgccttacaggttgcatagcactggaactttcctagagtaacggctctgctgccagggtttctctgggctcattcttccactgacttaattatgatctatgcctaacagagccccagtacaactattttgcagaatggctgttaccctagaattactatagcacatattgagatatagttgtactccctagtagataggaactgaccccaacaataaactttgataataaagacaat

SEQ ID NO: 289244 - DNA, 1000 bp, Homo Sapiens; identical to SEQ ID NO: 222674

SEQ ID NO: 289245 - DNA, 1000 bp, Homo Sapiens
cagaaccatcccatccattcactgttcagctgtactgtgatttagtttttacaccgttaaaaccctgagtggattgcttggtttaatgcatataaacagtactttatctacttaaagcaaagttttgctttcttgaatgactttttctgtgagatgaatttttgataagaactagggaaaacatgtcttttaggtgtcttgctgatgactatccataggaggaatggctatcccaaaaaaagttccgcaaaaaagtagatgagtttcttttttttttaagcactaaagaacaaaatgcatttttcattaatacaggcttctgatgaaccaggaatcctgttttcgtaaagttccaatgttgatgagagtaaattcttaagcatttgtcctagaggtgaaagcagctgaatgtttctgaaccatcaagaggcaaacaaacaggagtttgtttcttgaacctgcttatgcacacagctcttaactcctcatgaggcacacagctcttaactcctgatgaaccaaggatttactcataactttctccttgtcatggaggcttaatagacaacagaataaatgcatttcttgggcctcttataaacttgggaattcttagaaagctgcttctattaccaggctgtaatagctggtatagtttttttttttttctcttaagatgttctgttattagtctgagacagccatttttttgttttaaggaaaaatatcagtcagtgctccgggaggtaatttcctgtggggtctgcaccctcctgtctgggtggtggatgtgggtttgagaagtaggagagcagggtggtaccgtgtgggctcttaccctttatgtgattttggacaacagtgccttccattaaagttctttttatcaactgtaaaaaaaaaaaaaaaaaaaaaaaaaaaaaaaaaaaaaaaaaaaaaaaaaaaaaaaaaaaaaaaaaaaaaaaaaaaaaaaaaaaaaaaaaaaaaaaaaaaaaaaaaa

SEQ ID NO: 289246 - DNA, 1000 bp, Homo Sapiens; identical to SEQ ID NO: 117443

SEQ ID NO: 289247 - DNA, 1000 bp, Homo Sapiens; identical to SEQ ID NO: 117444

SEQ ID NO: 289248 - DNA, 1000 bp, Homo Sapiens
cttaagaattttatggcatggcccaattgatataaacatttagaaggaaatgaaaagctaaaataggaagtaattattcctctaaagaaacattttgagcaaggcagtttagagaatcctaatgtctacactggcatagcacgagccatgtaagcttcttttttttctatgcaagagtattgatgtatgtgctgaatcttcacagacttgtcaatacacaggcagtattctaaaatagcactgaacagggagtcaggagactattgtctcctaaacccaggactagagttccctcgtactgtcactcctttggtcattaaatgcactgggcttgcccgcactttggccttcctagaacactgcttcataacctctctgtctgacttctgcatctccttccaggtcagctcattcacaagagttgctcccaagcctggatgagttgcaccttgcatcttgagcatgcatttctcacaataattattaagctgtgtgataatttctgctttcaggacactcatccattatcttggctgtgagctccttgggtacgggtaccttgtatgtttacttttatatccctagcacaaagcaagtgcctggcacatagtcagtgccctaagtattcgtagagtgaagaatgccagcctctcttgtccctggtttccttatgtgttgaatgtggttgagtttgtccattgctagggagagacttccagtaataaaatttactattctagatgcttctactgttatgttttatctgcccatttatctttcttagttaccaggagaaatgtgtgacacctatattataatgaaaacaatctcattacttatagtttatctatattaaacaaatttaattgcattttaaagcattctttgatactgttgcttttgcaataaatatggataatcttggttataagggagttaaaacaatgctgtaataaataaagtgtttcatgtgatcaaaatcaaaaaaaaaaaaaaaaaa

SEQ ID NO: 289249 - DNA, 1000 bp, Homo Sapiens
ccacacagaatggacccacggccccacccagcgccgtcagcgcccggcactgccacccgggtccgggccgctgcctgcacgtgggatccgtcgggcagccggggacagaagagaccccgccgttgggacgcagggcagagccggccacctagtcccttccagccagcagaggcgagggaaggcgtcactgccccggcggggagacgggcaggacgccctgccccgcaccagcagcctccgccggggcgccctcagctccctgcttggctctgtctctccacacccggcagggccgcgggctgccccagccctgggggtcgtgggcagctgctactcagtgccaaccccgtggggcacagagccatatacctcgctgtccggcccccaccccagcctcgccttcccaccccatcgtctccacttcaggaaaagccgcactttacacccccacctgcctcttccccctccatccctgctccccgatcctgagcggttggggtggggtccctcagcaaccccaggcgtgggtttgaggagacaggtgatttacatcccctttgctgtcctcccccggtaccaaggcagggagcctccggaggagccggccctgctggccacgcaggggccagactccagcctgtttccccagccctgcaggtcttccttctgtgggaagcttcctagcaagatggcttggagtcctggtccccctcctccctggccctctcgttcgtttctgtttctgtttacacgttggagtggggtcctccgtgggcggcggcgcgccctgccccgggtgtcgtccggcctcttgtgctcgagcccctttccgagttggactcgaccatccctcaccccaccaaggaccacactgtgaagtgataactgccttgaacccccctttgctgttttatttattaaacttgatttgaagcccaaaaaaaaaaaaaaaaaaaaaaaaaaaaaaaaaaaaaaaaaaaaaaaaaaaaaaaaaaaaaaa

SEQ ID NO: 289250 - DNA, 1000 bp, Homo Sapiens; identical to SEQ ID NO: 117445

SEQ ID NO: 289251 - DNA, 1000 bp, Homo Sapiens
aagtctccgcaggtgctgtgaagagccttccatggtagagatttctcttaagagtgtgatttctcatagggctagtaagggagattgtatacctgttgtccacagtcttcaggcagctccccaggtctctgaaccccagagtgtcatcattggagagagcagtgactgcgagagatggtggaggccgctaagcatggtagaggctagaggaagtctatccacaggcagttgtgttcccagcaattcctcccatcctgcatggttcacaccaagagaaccttcagatcctaccagcaaccgtagcaccttccacccaggggactcccagaagccagtaaagagaccaggagccacctcaatcagcaggacagcctcactgcccctcttgcagagtcccctttgcccatcctgaatgcacagtctccctgctcatgcccttcagtcccctgcttggctgtatgcactgtctatattgcactgagagaggaagggacagcaggagtgaggtgaagagggcggagagagggggcaggctcggcaccggccctcccagcccggccagcctgagcttgctgccctccagtagagacagaggggcagtgtttgcatgggaggtgtttctgcctgtccctgcctgatgtccctggtggagcaggtacctccgggcgggcaagcctctgatttgcacacctgaaaatcgcggaattgagtttcgatagattgatttttaaaacttttttggagtagggggtataggggaatcatttaatttaaatcattaagattcccctgctcaaacccagattcctgtgtacagatgctatttagagggaatcagaaaaatgccaagccttttctctttgaatgtgctatttttataactgaacttgtacatatgtataaagagagacacatcttccttttactaactggataaaaaaatcttaaataaaatggagtgagataattttatgtaaaaaaaaaaaaaaaaaaaaaaaaa

SEQ ID NO: 289252 - DNA, 1000 bp, Homo Sapiens
ttgacagcctagcgtttgatgattttaaagccttatgtataaataaaccaaaggaagtaagcagtcatattgctaatttgctaactcctatctattgaatggtgaagttttaaaaatttccccaggtaagtttaagattcaaacaccatctattgagcacctacattgtgtgccaggtagtaaaataggtgctttcatacacattgtctcaattcctgtgaggtcagaattatctctgcatttgaaacttgaggaaacatgctcagagtgcaagaagcttccttgcctgagatcacctagaaaggaaccctcagagccggcaactgaatcttggtccctgtgatgtcaagcccattgctctcccactgcagaacatggcctctagattaatgccaccgattcaggaacacctccgacagtcttgaaatacccccatgttgccttgtttgttttttccttctggcttcttctattacagtctcttcattggaagctctgtaggccaaggccagagctgatactgacacggagccaatgcagatagcacatcagatgctaggggtcgctgggaggattaagggacttaatctgctaggaacacctgtacttgaagtggaggaggctagggggccacagttgctgcttcattaacatagaggttttggatttttttctcttgtggtttgttttttaagtggattggcagactccttgttgcttaagagtggctttctaggcaggccactggcatctgaattcatcattgacaataaatgtaagaaattggaataaaaaagagagacctgctgttattcgcttttgttctccagtgatttgattaactcagggcaaggctgaatatcagagtgtatcgcactgaagaataataatccattcagtaatgttatagttatcctcaatctaaatatgtcaactgtcattttgctgcttttcaaataaaatacttgaaaactgtcaaaaaaaaaaaaaaaaaaaaaaa

SEQ ID NO: 289253 - DNA, 1000 bp, Homo Sapiens; identical to SEQ ID NO: 117446

SEQ ID NO: 289254 - DNA, 1000 bp, Homo Sapiens
ccccatcaaattagctgtgacccagcccaacagcagcttctttgcagggatgctggagggggagctgaacaaactcagcttctccccaatggccaagaatgcagaaaatgaggacctggcgctcggcccctgcccatgcccatcgaagtcccagatggccacaaggggcctgctggaccttgacaaccctgagctggagacagaaacctcctcaacgcactcagaatcttctgtggttgtggacctgccggacacccccttcatctttgagcacaccgtcaacaattccacagctgtgatttcctggacctacgccttgggcaagcagccggtcagtttctaccagctcctgttacaggaggtggccaagacacaggagaatgagttgcccgaggcaaagaatcgtccatggatcttcaacaagattttgggcactactgtcaagctgatggagctaaagcctaacacgtgttactgcctcagtgtccgtgcagccaacacagctggggtggggaagtggtgcaagccctacaaatttgcaaccctggccactgacttcagcagctttcctgagaactaccccatccagatcaccgtgcggcgcaaggaaccccggcaaaagatcgtgtccatcgggccggaggagatgcggaggctggaggatctggaatacctatttccctgttaagggggagggccccaggacacccctcacctactttcagcttcaaccccaggccctcagaaaccagagccatgagacctaccataccaccagcaccctgcgggcccggggtctggcagagtggtatgggcaccccacccctgggctggggccaaggctacataggggccccattcacctggaggcatctcaggccaggccatgccaggctcagccactgcccacagctgctagactccctcctcctccaaatctgggctgggtctaggtccctcattaaagaactgcaggtcatccagcaaaaaaaaaaaaaaa

SEQ ID NO: 289255 - DNA, 1000 bp, Homo Sapiens
cagaacagtgggctgggggagaatgagaccttgtctgggcgggacatcgagcaccacctcgccaatgtcagcatgtttttctacaatgaccttgtcaatggcaccaccctgcaaacgaggctgggaagcaagctgctcatcactgccagccaggacccactccaaccgacggagaccaggtttgttgatggaagagccattctgcagtgggacatctttgcctccaatgggatcattcatgtcatttccaggcctttaaaagcaccccctgcccccgtgaccttgacccacactggcttgggagcagggatcttctttgccatcatcctggtgactggggctgttgccttggctgcttactcctactttcggataaaccggagaacaatcggcttccagcattttgagtcggaagaggacattaatgttgcagctcttggcaagcagcagcctgagaatatctcgaaccccttgtatgagagcacaacctcagctcccccagaaccttcctacgaccccttcacggactctgaagaacggcagcttgagggcaatgaccccttgaggacactgtgagggcctggacgggagatgccagccatcactcactgccacctgggccatcaactgtgaattctcagcaccagttgccttttaggaacgtaaagtcctttaagcactcagaagccatacctcatctctctggctgatctgggggttgtttctgtgggtgagagatgtgttgctgtgcccacccagtacagcttcctcctctgaccctttggctcttcttcctttgtactcttcagctggcacctgctccattctgccctacatgatgggtaactgtgatctttcttccctgttagattgtaagcctccgtctttgtatcccagcccctagcccagtgcctgacacaggaactgtgcacaataaaggtttatggaacagaaacaaagtcaaaaaaaaaaaaaaaaaaaaaaaaaaaaaaaaaaaaaa

SEQ ID NO: 289256 - DNA, 1000 bp, Homo Sapiens; identical to SEQ ID NO: 222677

SEQ ID NO: 289257 - DNA, 1000 bp, Homo Sapiens
tggaggtgtcctcggaagaccacatggacgacggttcccccatccgcctccgtgtgcagatcagcctgagtcagggcagcgctgtgtttgacttcagcggcactgggccggaggtgtttggtaatctcaacgcaccgcgggccgtaaccctgtccgccctcatctactgcctgcgctgtctggtgggccgcgacatcccactcaaccagggctgcctggcgccagtgcgcgtggtcattccccgaggctccatcctggacccgtcgcccgaggcggcggtggtgggcggcaacgtgctcacgtcgcagcgcgtggtggatgtcatcctgggggcctttggggcctgcgccgcctcccagggctgcatgaacaacgtgaccctgggcaacgcccacatgggctactacgagacggtggcgggcggcgcgggcgcgggtcccagctggcacgggcgcagcggtgtgcacagccacatgaccaacacacgcatcaccgaccctgagatcctggagagccggtacccggtcatcctgcgccgcttcgagctgcggcggggctcggggggcagaggccgcttccgaggcggcgacggcgtcacccgcgagctgctctttcgtgaggaggcgctgctgtcagtgctgaccgagcgccgcgccttccggccatacgggctccacgggggcgagcctggcgcccgcggcctaaacctgctgatccgcaaaaacggccggacggtgaatctgggcggcaagacgtcggtgaccgtgtaccccggggatgtgttctgtctccacacgcccggcggcggtggctatggggacccggaggaccccgccccaccgccggggtcgcccccgcaagcactggcctttcccgagcacggcagcgtctatgagtatcgccgggcccaggaggccgtgtgaggatcccgcaataaagatgccttaagtctcccggttctggggacgcagctaaaaaaaaaaaaaaaaaaaaaaaaaaa

SEQ ID NO: 289258 - DNA, 1000 bp, Homo Sapiens; identical to SEQ ID NO: 117447

SEQ ID NO: 289259 - DNA, 1000 bp, Homo Sapiens; identical to SEQ ID NO: 117448

SEQ ID NO: 289260 - DNA, 1000 bp, Homo Sapiens; identical to SEQ ID NO: 222679

SEQ ID NO: 289261 - DNA, 1000 bp, Homo Sapiens
cagttctacaagctacctggggcatctatgacaaggactcagtgcttcggaaagccctgcatgacagcctgcatgactgttcacattggttttacacacgctggaaagattgggaatcatggtattctcagagctttggtttacatttttccttgagagaagaacaatggcaagaagactgggcatttatactctctcttgctagtcagcctggagcaagtttggagcagacgcacatttttgtactggcacatattcttagacgaccaattatagtttatggagtaaaatattacaagagtttccggggagaaactttaggatatactcggtttcaaggtgtttatctgcctttgttgtgggaacagagtttttgttggaaaagtccgattgctctgggttatacgaggggccacttctctgctttggttgccatggaaaatgatggctatggcaaccgaggtgctggtgctaatctcaataccgatgatgatgtcaccatcacatttttgcctctggttgacagtgaaaggaagctactccatgtgcacttcctttctgctcaggagctaggtaatgaggaacagcaagaaaaactgctcagggagtggctggactgctgtgtgacggaggggggagttctggttgccatgcagaagagttctcggcggcgaaatcaccccctggtcactcagatggtagaaaaatggcttgaccgctaccgacagatccggccgtgtacatccctgtctgatggagaggaagatgaggatgatgaagatgaatgaaaaaaaaaatcaaacagcagaagaccaaggcatcagatctgtaatgaccctaaagttagtgtggtgctcctaagcagaatatgcagcatggagcgagccataccctgccggatctgctcccaagttatctttctgttccacacacaccttatggagataatgcctctgctgcatgaggagacagagaacttttgttgaactacagttttgta

SEQ ID NO: 289262 - DNA, 1000 bp, Homo Sapiens; identical to SEQ ID NO: 117450

SEQ ID NO: 289263 - DNA, 1000 bp, Homo Sapiens; identical to SEQ ID NO: 117451

SEQ ID NO: 289264 - DNA, 1000 bp, Homo Sapiens; identical to SEQ ID NO: 222682

SEQ ID NO: 289265 - DNA, 1000 bp, Homo Sapiens
acttaatctccaaataagtacgataacatagtcatagtcccacccaacatgatgcagttatcttgcatacaactgaagacaactaaccctttccccaacagagcccaccagcagtggtggagatgtcggtccatgagcgcacacacaagactgagggactgtcggccctcccaggtggtgtcaacacaacatcacacacaggtgggggggcctgatagcccagcacccatgatacagggcctaccaatgcttaaaaccacacccagggagcccacagaggcactcagtgggtggtggggtgatggatacacatctatcaggcacagggcggaggtgggcaccactgagttgcactcagcaaacacattgggtatcttgtgcccaaggcctgtatttgtggagctgatgttttagtgagagacagtaaatgtgacaaaagtaaaatatatcagatggtgagaaaacagaaaaatgagatcagaagtggagatgttggggccaggcacagtggcccaggcctgtaatcccatcactttgggaggtgcaggcaggcagatggcttgagcccaggaattcaagaccagtccgagcaacatagcaaaagcccttatctgcaaaaaattcaaaaattagccaggtgtggtggtgcgtgcccaggttcccaggtactcggaggctgagaggtgggaggatgccttgagcttgagaggttgaagctgcagtgagctgtgatcgcaccactgcactccagcttggttcatggagaccctgtttttttaaaaaaagaagtggaggtgtttacaccagcaaaatactcattttttaagtgtaattaagttgaagatcaaaaaatggaaatgtataattaaatcatacttagcaaatctaacacatgaaatgtaacatctgcatatggagaaccgtgttactttattgaaaaacattaaaagtttgagaacttaaaaaaaaaaaaaaaaaaaaaaaaaaaaaaaaaaaaaaa

SEQ ID NO: 289266 - DNA, 1000 bp, Homo Sapiens
aggacacattttttccttcatattttttctgtgaatttataggctaggaaggctattgaagcctcaattatgggtcttcattttgagatcgttttctatgagctgaactgaggatatcaatggttatctcaaaatcgtcttttaggagatccccaattgactcagagtttgaggagttagtatcacagaattagatttttttaaagcatttgtacgtttccattcccaaatatgtagctgtggttcttgaaaacacatcctacattgcatatgggcatagcagtttttgacccaggcagaataagttaatatttaattaaatattgctttgaagatggcgctctgggcatgagcatggggctccatgacttcccttctatccccatgagcccctcctccatccagcgacaagccatgggcatgcatacaatgcagcaagaccaacacaagagcaatattgaattgttcattctatctaaaattacatgtatataaaatatataatttatcttcctgcatttttgaagtataaagtcataaattgtacatatctgtaagctagtatatttgtttcactgtttgtaatatttaagaaatgctcattctttgtagaacaaaaatgtattaaatattttaaaaattgctctgtgatacttaatttttttccccaaaatttgtaatgtgttgcttctacataagttctctggaaatatctacaactaataggacacatgtaaatccttgaagacacatcctggaattcataccccacaaggacagtgtgtatacaaagtatttgcagagcatgacttttatatgtgtgggatatcaatgtgtatatttatatttaaagtgtatttattgttacaagtctattctctattatattttatttactctgcggttataaaaatcacccttgcatacaagtttctagttgccagtgatgttctggaaataatgggagatattacaataaagctacagttatgacaccctg

SEQ ID NO: 289267 - DNA, 1000 bp, Homo Sapiens; identical to SEQ ID NO: 117452

SEQ ID NO: 289268 - DNA, 1000 bp, Homo Sapiens; identical to SEQ ID NO: 117453

SEQ ID NO: 289269 - DNA, 1000 bp, Homo Sapiens; identical to SEQ ID NO: 117454

SEQ ID NO: 289270 - DNA, 1000 bp, Homo Sapiens; identical to SEQ ID NO: 117455

SEQ ID NO: 289271 - DNA, 1000 bp, Homo Sapiens; identical to SEQ ID NO: 222685

SEQ ID NO: 289272 - DNA, 1000 bp, Homo Sapiens; identical to SEQ ID NO: 222686

SEQ ID NO: 289273 - DNA, 1000 bp, Homo Sapiens
cacaccaaaccctggattagagcaagggctcgaagggagtattgggagaatctgctgccagcttcaggcagacctttctgtccttcgctgtcaaagccagacttctaaggagtagtgaaagaaaaccctgaaataatcgaacaggaaaaagttgccctcaagcctgacctggaaccgttcctcaccttcatcctcaccatgccctgctatctccagctgctgagcagctgaggtgctgcagccccttcccttccagcccacaagtgtgtgcatattgagctcctgctgtggttaagcactgcaacagactctaccagagatgcaaagagaagcgagagaggcaccttgttctccaagaacttactgtccaatcatgctgtggtgcattcctttgaagatcatgaagaatagccaaacttgtctttgagggtgaatttgacactttaaaataatcagaagtcactgagacccaaagctagtgaataattcaagtgactaagctagatacttgaggatgatagagcaacactaaactaaagcaatgagtctgctttttttaatgatttatacaatgactccaaaggcaatcccaaagaaaagatgtaaagaatgttttgagcaatggtagcattattgaaataaatgtttaactatccaaagtgattactttcaaagatgatttttacttaaagatattaggtctggccaggcgaagtgactcacacctgcaatcccagcactttgggaggccgaggcgggcggatcacctgaggtcagcagttcaagaccagcctgaccaacatggtgaaaccctgtctctaccaaaatacaaaaattagccgggcatgatggcgggtgcctgtaatcccagctactcgggaggctgaggcaggagaatcgcttgaacccaggaggcggagcttgcagtgagccgagatcaggccattgcacttcagcctgggtgacagagtgagactccatctcaaaaaaaaaaaaaaaa

SEQ ID NO: 289274 - DNA, 1000 bp, Homo Sapiens
ctagcaaatcttcagcccaaaagacctaaaacaataaagcagcgccatgtgagaaaaaagagaaaaataaaggatatgttgaatacacctttgtgtccttcacacagcagtttacatccagtgctgttaccttcagatgtatttgaccaaccacaacctgtaggtaacaaaagaattgaattccatatatctaccgacatgccagctgcatttaagaaagatttagaaaaggaacaaaattgtgaggaaaaaaatcatgatttacctgctactgaagttgatgcatccaatataggatttggaaaaatcttccccaaacctaatttggacatcacagaggagattaaagaagactctgatgaaatgccttcagaatgtatttctagaagggaattggaaaagggcagaatttctagagaagaaatggaaacactttcagttttcagaagttatgaaccgggtgaaccaaactgtagaatttatgtaaagaatttagctaaacatgttcaagaaaaggaccttaaatatatttttggaagatatgttgacttttcatcagaaacacagcggatcatgtttgatatacgtttgatgaaagaaggtcgtatgaaaggacaagctttcattggacttcctaatgaaaaagcagcagcaaaagccttaaaggaagctaatggatatgtgctttttggaaaacccatggtggttcagtttgctcgatctgctagaccaaaacaagatcctaaggaaggaaaaagaaagtgttaaaaattaataaaggtttttttgaatcccgtgtccttcaagtgctttctaactttgagaggaagaaattgaccacctggactatggaactgtgcgtaacagctttgaaagtgtatttaaaaattaaatctatatgcctttaaatcagtgaattggaaacatattacatgtattttaatgattttcctcaaatataataaattgtttcctttccaataaaaaaaaaaaaaaaaaa

SEQ ID NO: 289275 - DNA, 1000 bp, Homo Sapiens; identical to SEQ ID NO: 117458

SEQ ID NO: 289276 - DNA, 1000 bp, Homo Sapiens; identical to SEQ ID NO: 222688

SEQ ID NO: 289277 - DNA, 1000 bp, Homo Sapiens; identical to SEQ ID NO: 222689

SEQ ID NO: 289278 - DNA, 1000 bp, Homo Sapiens
ataatctggcaatttctgaaaccagtcagaaaagacatatatttccatgcctttttaaagaattatttttacctgttttatattcacagttggtgtcctgtcactttgttttaaaataagctagaaccaggatgcttccttattggaaaggctttgccagtccttaaggtacaatgagtgatgctgcaacttgcaaatgtaccagcatttaaaatttcttttcctgggaatcaaggtaactcacacgactacttgcagtacaaattttttgcttctctttcgacatgaaatgtacttggtgggttttccttccttttattaaactaaaactgtgtggaaaaggttgatttttcttaatagattctggattccactcacagggagatgggattcctttcttgtccaaacaaagggagttgctctaaagcgagcatcagttaaaatgtaggggaaaatgtattctgtatgtagtgtagataatactttgtgaatggacaacagttacatagtgtcttggtagcaccagccagtgtttcccagcccagagtttactgacttgtaattctctatccaggacatcaggagtgagggatggaaaaggggataaaaggcctggagccacactctatatggctgaggaaggagctagggaaagagatagacacaatggggtgaaaacaattttgccgcccctgcctggaaactgctggtggggaaatgatggtgaagggtgtttgcttgaactcatgagacggtccaaatctcataaactagccttctcaaaatcccagcaatataaagcactgtttttcttcagtcgtttaaataaacttgtaaatacattgaagtttacatttccatgtgctgttgatcaacggcgccacctgtgtttgctgagactggtctctgagagagttttatgtcgatcgaggcctgttgctcattaagctgagtgcagacgtccttaatccctgcagatagtgggatgaaagcaagttct

SEQ ID NO: 289279 - DNA, 1000 bp, Homo Sapiens
gatttgcttcgactagaaactccaaaccatgttactctaggcacaatcggtgtcaatcgctctcaggctccagtgctgttgtcacagaaatttgataaccgaggaaggaaaatgtcgcttaatgcctatgcactggatttctacaaacatggttccttgataggattagtccaggataacaggatgaatgaaggagatgcttattatttgttgaaggattttgcactcaccattaaatctatcagtgtttccttgcgtgagctatgtgaaaatgaagacgacaacgttgtcttagcctttgaacaactgagtacaactttttgggaaaagttaaacaaagtctaaaaacaaagtctatgcaaaccacttaaaaataattccatagtagtttttcaggtcacgtttttgattcttatgcttcttgccagaaatacattatgataaagtggaaatacattacgatgaagtggaaagagcaaacactttggaatcaaacagagttgcaatcaaacctgcaatgttctgtcatgaatactcacaaattatttagtatacctgaatcttggtttctttttataactgagtaataatggttacatctcaggtagtttgaggattgactaaaaaaatgcgagaatgttgtatgtgactgaataacaatttttactctgcgaagccaaagtaaatataatattatcagtaactttatccccagtgtcagtatttataaaatgtttattaaggctagaaaaaatgaatacaatatcctgaaggtgaaatatattctcttcaattagcataaatatgatttacataagttagctatacagctattgagatagtactttctagtaaacttaaactactttttaaacatacattttgtgatgatttaacaaaaatatagagaatgatttgctttattgtaattgtatataagtgactggaaaagcacaaagaaataaagtgggttcgatctgttaaataaaaaaaaaaaaaa

SEQ ID NO: 289280 - DNA, 1000 bp, Homo Sapiens
tctaaaagtacttcacagtcaagtgagagttctgtcaaattctcttgcaagttaaccaatgaagatgtgaaacagaagcaaccttttttcaatagactatataaaacggtggcatggaagttggtagctgttggtggctttagtcccaatgtgaatcatggagagctcctaaatgcagctattgaggctctgaaagcaacactggatgtattttttgtcccactaaaagaattggcagatctgcctcaaaataagagctctcaagaaagtattgtttgtgaattgaggtgcaagtctgtgtatttgggcactggctgtggaaaaagcaaagaaaatgcaaaagcagttgcatcaagagaagcattgaagttatttctcaagaaaaaggtggtggtaaaaatatgtaaaaggaaatacagaggcagtgaaatagaagatctagtactccttgatgaagaatcgaggcctgtaaacttacctccagcactaaaacatcctcaagaattactataatgtgtccaaaatatcactgcatacaatatctggtatttgaagagaaaaactgacttttgtatagtataaaacacaggctttcacaaattttgtattgctttttttccagttttgcagaaaatttacattctagttctcttcacacagtagcagttgtaaataatttatgaatgacagtacacattaaaaggtatgcattagcagcatattagtatgctgttttatttgctgaagaaaatactgtcttctatttttaatgatacattaggtacgatgtgtagttcggtagagtcccaaaatttttgtactactttcaatttggtgaaaatgtattaagttgtctaccatgttttcttttctagctgaataaaccacatcaaaggaaagggaccacagtatttgaatgtttgaaagtctgtaaagcttaaggttttaaaaatgttgcccgtaatgttgaacgtgtctgttagaaaaaaaaaaaaaaaaa

SEQ ID NO: 289281 - DNA, 1000 bp, Homo Sapiens; identical to SEQ ID NO: 117459

SEQ ID NO: 289282 - DNA, 1000 bp, Homo Sapiens; identical to SEQ ID NO: 222691

SEQ ID NO: 289283 - DNA, 1000 bp, Homo Sapiens; identical to SEQ ID NO: 117460

SEQ ID NO: 289284 - DNA, 1000 bp, Homo Sapiens; identical to SEQ ID NO: 222695

SEQ ID NO: 289285 - DNA, 1000 bp, Homo Sapiens; identical to SEQ ID NO: 222696

SEQ ID NO: 289286 - DNA, 1000 bp, Homo Sapiens
agaaaaagagtttatttttgtgtaaaggtcacccacgcagaagtcttcctgtgcagggtgctttggtagccatcagagaggaaccaagggcaacatcttttcttcccaggcgttcttctctgggtgctttattctcttctttttctttatttcgcccccacccccatcccctgccttttttttttttttttttttttttttttgtatagaaacagatccatttcttggtaatcaaagcacatttgtttggtcttcctccaaccctttgcatttgatttctaaacattccttcatatgcctttaatgaaagccagcaattatcccatgggccctacttgaatttatctgaggcagctacagattgccctgcaagatgagtttttggagataaatgaaataactggacacacactcacacaagtaacaccacagcagacctcggagtactgctaagtgtacctgtgtcaaatccgcacaggactcaatatagcaatttattcttgatgtatgcaattgcacattgtaattatattaacagagcacactaataatttgtatagattatatatattagatcttgggtatggtttttaccttctcccatggggaacttcttccttcctgatgtggaattgtacatttaaagcttggtcggtgacctttgcataccatcaacgagcacagctaagaacagagtgagagaggcccatggctgattttaccatgtgcccagattaatgtatatagttgattggaatgaggttttatgaatattcatgtttttgaaggcctttaatttctgtctgcatattagcttttaatgtgtgattttaagagagaatactttgacacctgtaaaaatcaaaatactactctttataagacatttcacaaatattcacttacattacaggctggaagtattttattcatatgtatatttataccaataaaatgattttacaagtggaaaaaaaaaaaaaaaaaaaaaaaaaaaaaa

SEQ ID NO: 289287 - DNA, 1000 bp, Homo Sapiens
tatatatcctacaattgatatattgctttattcacacttttattgtggctgaatttttgtgcctatctataaaacacactttcaaattatttgaattaccaagacgtctgcttttgtgacagtcagaaaacacacctggaatacgatgcagcccaccattaactcattcatgtagtttattcaagtgatttatgtatttaaactaaatattgaaaatgttagtcaaattgtggtttgcttgtcaggtatttatatcagtctgtagtggattcccaaatttcaaagctcttttaatgtaatggacaaaaataagatatgagaatattattgatgaattttcataaggtggaattgatcttaatctactaacagagaagggtagacagtttgtgttaaatgttggcatttacttgtattgaccaaagttttgcagctctactatattctgtgctcaggactaaaatgctgttaatttttttttttttttccagtgctgtgcatatattctgtgatgggaaacattgttgatgtcctaacagaaatatattttgatctattttcctatggagttgtttctattatgaccatttaattttgtttttatttaatagtagtatttccttcccttttatctaattttttatatgctgctaaatatattttaaatatactatgtttgcgaaccttggtagctatgatgagagctattatcatctgtggtgggaaaagctatgtaaataggtagattgtatagagagactatcttgtgttgtgcctgtatgaatttttaaaagttgttgactggattttgcaaaaggatgtataatatttctgtctgctcagaatattaatttgtaaattctgcaagtttaatttttatgtagatggtataacatttgaaaatattgtcttatgtgattttttcccctgaaaatatttgcttgtaaatgaaaacttagctagggcttaaataaacatgttgctatgaaattaaaaaaaa

SEQ ID NO: 289288 - DNA, 1000 bp, Homo Sapiens; identical to SEQ ID NO: 222697

SEQ ID NO: 289289 - DNA, 1000 bp, Homo Sapiens; identical to SEQ ID NO: 117461

SEQ ID NO: 289290 - DNA, 1000 bp, Homo Sapiens
tctactagtttaccacaattacagctctcttttaagcctcagaaaaaaatctcacttccgtcttgaagtcttaatccacgctttttatatccatgtgcctactccttctctgaaatctcctatggtttatctttttattcatttaatatcccacgaattgattttattatatattttttatggttgcatgtggtctttctagttatagcaatatacacatacatgcataaatacatatacacctatgtaaatgtgtgttgggagtatgtattcacacacatacatataccccaaggccatgtgtcatctttatcaatatttaagttttggaattgttttgtttgcctcctatatcatggaataaatggtaaagagggctaatttattactctaagtggatttcttattacattaatatcagacatatagaatgtactttgttttactatttgtaagatacaaaggtatataaactgacatacatcagcttgaaacctgagataatgctaaaatgttctaattattttaaatgtttaaagaggacaaccatgtaatgttgctaaacatgaaaaatgtcatcaagtggaataaagaatagctgaagttaacatttgggggaaattgagctgaaaacaaaaatatgagtattttgataccttttctttaccatgagactcttgactatgaagtcaaatttatctaaaggaaaaacaggaattctggagacctgtgtaaaagcagactattatcttcctactgtgagagtactaaaattaaaatacgtttaatgacgttttcctcaatgtaaaagcattgaagtaaatgtttcttttatgttgcagatacatagttgctctagagatcacctttttctttatgcattgtgaatagcagtctgcatcctaagtttaaaatatttgagaatcctctatgggactctctgtaaatgttttaaatactgttgttttcaataaatattttatactaaaaaaaaaaaaaa

SEQ ID NO: 289291 - DNA, 1000 bp, Homo Sapiens; identical to SEQ ID NO: 117462

SEQ ID NO: 289292 - DNA, 1000 bp, Homo Sapiens
gtcagatgatgacgggtttgagatagtgcctattgaggacccagcgaaacatcggatactggaccccgaaggccttgctctaggtgctgttattgcctcttccaaaaaggccaagagagacctcatagataactccttcaaccggtacacatttaatgaggatgagggggagcttccggagtggtttgtgcaagaggaaaagcagcaccggatacgacagttgcctgttggtaagaaggaggtggagcattaccggaaacgctggcgggaaatcaatgcacgtcccatcaagaaggtggctgaggctaaggctagaaagaaaaggaggatgctgaagaggctggagcagaccaggaagaaggcagaagccgtggtgaacacagtggacatctcagaacgagagaaagtggcacagctgcgaagtctctacaagaaggctgggcttggcaaggagaaacgccatgtcacctacgttgtagccaaaaaaggtgtgggccgcaaagtgcgccggccagctggagtcagaggtcatttcaaggtggtggactcaaggatgaagaaggaccaaagagcacagcaacgtaaggaacaaaagaaaaaacacaaacggaagtaagcagagctgccaggctcccaggagagcatggggactaggaggaagggtgtggcatggctcagtctggcccccttgattaccggcctagcccctgctcacatcacagctgtctgaagaacagtgaggtggagtgcctagaactcccgtggtggtcctgagcagagaggaggatgtcctcctgcctgcctgaaggtctcccatgaaaacactgctgaactgtgttgacactcatgaccctttttttaaaccgttaaagggaagttcggtgttggagcgatactcaatgtagtcagtctacacctggacgtgtgggccacttaagccctccccacccccatcctattcctaaataaaaccaggataatggaaaaaaaaaaaaaaaaa

SEQ ID NO: 289293 - DNA, 1000 bp, Homo Sapiens; identical to SEQ ID NO: 117463

SEQ ID NO: 289294 - DNA, 1000 bp, Homo Sapiens
tgagagttcacactggagaaaggccttatgagtgcagtgactgtgggaaatcctttgctgaaaactccagccttattaaacacttgagagttcacactggaggaaggccatatgaatgcattgattgtggaaaatcatttcgccacagttcttcgttccgtcgccatcagggagttcatactggaatgaggccttataagtgaagcaaattttggaaattctcttgcccaggctttttgctccttcaaggccagagagttcacaccagatcaaggtgttatgagtgtgacaaatggggaatattctttagctagaatgctagcttctttacataaaagagtgctcccactgaagaagtgccttttgagtgcaatgaatgtgagaaagccttcagccctctctcattggttaccacaatatttacatgaggaaaataccacagatgtggaggtaatattattttttcttcaatataacactggaggaaaccccttatgaggatgccatctgcctaaattgaatgtcatacatcaaatagctgcatacattccaggtatgtgggaactgcatagtatttttcgacctgcccaggtctcttgctagacttctgtgacttacagttctcttctaaaaagcatttcacctttaccacttggcaggtgcccacagtacatcattcgcctaactcatcatgatccagaagtaactttgattttgtttcattcaacagagggattttttagtatcctcagcactcattctattctcattcctttctctccaatgagttaggccatgaacctgactcatttttggcacagaggactcttctgataacttgaaaaaatggactacctttttcagggatcttttggatctcacagagttcttaagatggaattttccagcctgccagtcatgaatctcagacagcctgccacctattgccctgatttgtgttataataaaggccttgttgcttaaaaaaaaaaaaaaaaaa

SEQ ID NO: 289295 - DNA, 1000 bp, Homo Sapiens
ttttcccctaataaaattatggatatgggcagtcatcaatggctgccaaaaccattaagtggaaagctgattaaaaaacaaaaatttctaatggatttatcaaactgtcccaaatcctgataaatattaacatcacagaggaagaccagacattatgggcctggaagtactataggagtgcacacatcacccgtgacatggtcttgccaaataattaaacctgaatttgatcaggtctctggatcttatttgcaattcaaaagaaattttaaaaaaatcctactaacaccaccacaaatatgcaatcagcaatatccagaaaggggaaattcacaggacaaaaacctggttttcttttttggtttcttcaaccaaaaaagaaagaaattgcaaaggaccaaaaaaatgttggggaatctatacattataagggacttaacaactaaagggcaacatatagactttagatcctaatttgagcaaaatctaaaatcaattattaggcaatcagaaaaatttgaacacagactagatatttgaggatattaaggtactatattattgaagattccatggttatgttttttaaagagttcatgccttttagagatacatactaaagtatttgtaaataaatgacatgatctagaatcagtaattttgtgtttggggtgtgggggtggtgaaagggaagtagaaccgaaacaagattagtcctgagttaacaatggctgcaagctggatacatggaattcagcacacttttctccctcttactgattatgcttttgaaattttctcttgtaaaacatttagaaaacaaaaacaaaaaaaatgtgatttgtttctgtcttcaaaatctcattagaattttttcactggaggaagattttcccttgcttctgcataaaattttaactccataacttataagctcactctttattgttactttctaattgacaaataaaaattgtatattaaaaaaaaaaaaaaaaaa

SEQ ID NO: 289296 - DNA, 1000 bp, Homo Sapiens; identical to SEQ ID NO: 222698

SEQ ID NO: 289297 - DNA, 1000 bp, Homo Sapiens; identical to SEQ ID NO: 222699

SEQ ID NO: 289298 - DNA, 1000 bp, Homo Sapiens; identical to SEQ ID NO: 222700

SEQ ID NO: 289299 - DNA, 1000 bp, Homo Sapiens; identical to SEQ ID NO: 222701

SEQ ID NO: 289300 - DNA, 1000 bp, Homo Sapiens
aaagcctttcaaacttccatcaatcctaagctaaaaatctttattacctgtatatccttttcagttaactgagaggaagggatttggaaaccatgtacttttggggagtaattgattaaaaacaatggctgattggcattgttaatgaaggctttatttgtgaggatgatgctggtaaatggagcatgcttagagtactaaattgatctaatgagaatttggatgaacataaacttaattttggatttaatataacattccagtcagacgcatgtaaacagaatatttgaatctttgtacctccatacaagtgttagcctgccaggctgtaagcttaccttaattaaactttcagtgaaagtggaattattaagatataaatttatatttgtgctttttgtcagtgtgtaagctgtgtagaaattctttgatgtattagttgtattaatgtaaagtagaaacccattgttgaaactcctgtagctattatgcttttaatattgttttaatgatcttccttagaaataggcccataaaaatggtctggaagccaaaccaaagtatggtataatgtagatattgtaaagcagtaaactgaaaacatgtcctggcatgtattcagccatgtttaagtgacttttctgtaattgtaaaataaaaacttcaaatgggacctaaaacagtgatgtaaaagaactggttttggaaatttagcctaatttatctataagatggctgctaaattgatttttcagttctttttatcatctagaatataatagatatagaaatgaataatatgaagaacagtagtttgctttgaaatactaataaacttttatttaaaatgcttcatttttacttcttaaaatgtgctttggattcttaaattttgtttcactgaatgttcaatgttttaaatggcgattaaaatactctgctgtatatagtagtttttgagtaaatatttgcaataaaaatctgcccccgaataaaaaaa

SEQ ID NO: 289301 - DNA, 1000 bp, Homo Sapiens
tatgaagaactggaaatcattaagaaagggtttcccttccttaaagctcaggggtactattagttaggagttgactaactcaacctgtaaaacaccactcctccttccaaagttgtatatataatattgcaggttaaattactttatgtcaggtcctatgaagaaagatacggtttcagactgaaaacatgtttcacaggtgtttgcttccttccagagcagagttccctattcccctggcataaagaatgtatatatattttgaaatatggctgagaacatgtcattggtttgtgaggcctaaggtgaagcactcctggcagccacactgtgtagtgtatttgagggatcagtcatccctcttgtatgctgggcctggttgccctacctcgaacaagcaccagcttttcacacaaggagagatgtggggctgggagtcctctccccatcctattgcatctcctttcttattataagctgttccagttcacaggcagcaaacctcctgggtttgaaaaattccaacttatttttatctttaatcctgacattagctgacttgctagtgagcttgctttaaaaatctacactcttgcattcttaggcatacaggggaaatgttgaaaaggaaggtggaaaaccaagaatttagtttgccaatgattgcctctgattcttgtaagtttgagttccacaagggctaatttattccccttttacttgggttttggggtggtggaaagcgggaaatttgggtgatttgttgattggcaatgaggataaaatgttaatacttttttggggacttaacaactttatcctattctacaagtcagtaaaggaacaattggtactcacctcagtgctgcactcaactatggaaagaggcagagtttgcttgcccaattgccaaactaaagacatcagttcattggtcaaatatttgttacctggaatggaacttgaaagcaaatacatttggatttcaaatttcaaaaaa

SEQ ID NO: 289302 - DNA, 1000 bp, Homo Sapiens; identical to SEQ ID NO: 117465

SEQ ID NO: 289303 - DNA, 1000 bp, Homo Sapiens
tttttcaagttatccttttctgaggaaaattattctagaggaacctaaaaagggacaaaaaaattgaaacttcttaggagtctaatcttggtgccttctgttaaaagtcagtgtatcagaaaagaaagcagccatgtaagaggctaacttaaatagaagtgctagaaatatctttgtgtattaacatgcaataaaaggtaccattcaaagcagggggaaaggtaggaagaagaggtaatttttactgaaaattagggcaatgttggtcgccttttattaaaagctttttttaagctttcataaagattgctttttgctatttttgaaaatatggtattatagtttgtatggtaactggtcatatatgacagtctactgcatatatatgaatgactaggattaatctggtgtgtttacataggatatacatagttgaaatctagcatgaaaggttaaaaaggagatactgcacaatatttcttaaaagtaaaatgctgttattgtgatgagtctttggtttaacatcacagtattctgtgatgtctttttaactttttggaaagaggtatcatttgtagaaaaaatttgatttgggttaaatataggtttttaaaactataaatgttgtcttttttatatttttatgaaaaagcagtagaaaattacttttgaagaaaacaggctatttaaatattgaaatatatgtatgttgtgagtttaaggagcctgtaattgtcagttttacaaaaccatctgtgttcaatggttgtaaataaattctcaaaacatcatttcaaaggctgcctacagaatattatcacttgacagatagagttaataaattaccaatcaggcacattttataatgtttgtctctgtaaaggtaatattagcagttaaagaacacggatgagaaaagaatgtgttacataggttgcatcacttgcagttaaataaaactcacaatttgtgctcacaagcttaaaaaaaaaaaaaaaaa

SEQ ID NO: 289304 - DNA, 1000 bp, Homo Sapiens; identical to SEQ ID NO: 117466

SEQ ID NO: 289305 - DNA, 1000 bp, Homo Sapiens
tttctaagagagttcgcatacccttgcctgtgtctaatatactttgggaacattgtatacgattggctaatcgaactattgtagaaggatatgccaatgtcaagaaatgcagtaatgagggtcgtgccctgatgcaattggattttcaacagtttttaatgaaacttgaaaaactaacagatattagacccattcctgataaagaatttgtagaaacttatattaaagcttattacctaactgagaatgacatggaacggtggatcaaagagcacagggaatattcaacgaagcagctgaccaatctggtgaatgtttgcctgggatcccatatcaataagaaagcaagacaaaaacttctagcagctatagatgatatagacagacctaaaagataatgaacacagctctctttcctcaatggcattgatcctcactcaacatatatgacctgaaagccagtttttttatgcacttctgacaactatctgctaagaaaactttgtgcatgtttttttgactggaaagtggaaaatattgaaatgtgtgtggtgttctcatgacttttatatgctgtggtctcttcaacttttggtctcatttgttgtaatctgaaatgatgttgccgccttgtcataacaatggttatgtgactacagttatacattttacagaagaatgtaccataagtatataattagaagaacagtggcttaatatatgtatgggaagtttatggaaaatgaagttggcacttttctaccctctgagcttggttcttaataagcataatgtgagggtgaatatgtagtatctcctaattatgagcactgcatgagaattaaaaaacacatgtaagtaaaatagttgaaaaatcagtatgttctctgtttttaaaatgtcaaagtttatgtcagggttaatttagttataacaaagtgatcataatggtgaaatttaataaatatactctagtatgatcagcctaaaaaaaaaaaaa

SEQ ID NO: 289306 - DNA, 1000 bp, Homo Sapiens; identical to SEQ ID NO: 222702

SEQ ID NO: 289307 - DNA, 1000 bp, Homo Sapiens; identical to SEQ ID NO: 117467

SEQ ID NO: 289308 - DNA, 1000 bp, Homo Sapiens; identical to SEQ ID NO: 222703

SEQ ID NO: 289309 - DNA, 1000 bp, Homo Sapiens; identical to SEQ ID NO: 222704

SEQ ID NO: 289310 - DNA, 1000 bp, Homo Sapiens
ggttgagatggaatataccatgcagcagtgcaatgcatctgtttatatggaggccaaaaacaggggatggtgtgaagacatgctcaactataggatataagtactgatttgtaactttaaaggaattgcatttgtccttaagaataacagagtagttttcaatctggtcactcttttgggccaaacccaagagaattttaagaaatgtttcataggtataaaaaggtgatcgcctattactgacagtctcattgtagctctaaaaagcctaatgtatccactgtggaataaactccataggctcaactcttctggagttcacaatgcctccatacctctattcttgatagtgagccagtatctctaaggaaaggagagccgtatttttagtcatcctagggcaggagccactgtggcatctgaggaagacccagggtacagtattagcatttctttcaaccctaagtatgggcatgtgaccagagacactgccaaaccctaagaaatcattagggcatgatcatgctcaccatatttcacaaatgaaatcttaatgtgggctgttttttatgatcaaactgtcatccatgttgacctgatgaaaataacaccctccttcacctccctcagggtaatgaaagtagaaatttgactgaagctcctacttccttatacagcctttccttctgtgggcttgtcacttttcagtacatttctagtggggaagagcagggcgacccctctgctgggtttctccttaaatgtgaagcaaaataaatttatataatggaatttggtggcagtgactgatgtttgtctctagctaaaaccaactgtttagttgactttttagttataggataagttggaagtccttgtttactggaatatattatgcttttgttaacacattagattaaatagaatttggtattctattataaatgtttattttttaaagcaataaataacttatttttggtaaaaaaaaaaaaaaaaa

SEQ ID NO: 289311 - DNA, 1000 bp, Homo Sapiens
agtgacagtccaggccagggacagaccttccttgggtcctttcctggaagccaccaccaccctgaatctcttcaccgtggaccagagttaccgctcgcggctgcagttctccacaccgaaggaggaggtgggcgccaacagacaggcgattaatgcggctcttacccaggcaaccaggactacagtatacattgtggacattcaggacatagattctgcagctcgggcccgacctcactcctacctcgatgcctactttgtcttccccaatgggtcagccctgacccttgatgagctgagtgtgatgatccggaatgatcaggactcgctgacgcagctgctgcagctggggctggtggtgctgggctcccaggagagccaggagtcagacctgtcgaaacagctcatcagtgtcatcataggattgggagtggctttgctgctggtccttgtgatcatgaccatggccttcgtgtgtgtgcggaagagctacaaccggaagcttcaagctatgaaggctgccaaggaggccaggaagacagcagcaggggtgatgccctcagcccctgccatcccagggactaacatgtacaacactgagcgagccaaccccatgctgaacctccccaacaaagacctgggcttggagtacctctctccctccaatgacctggactctgtcagcgtcaactccctggacgacaactctgtggatgtggacaagaacagtcaggaaatcaaggagcacaggccaccacacacaccaccagagccagatccagagcccctgagcgtggtcctgttaggacggcaggcaggcgcaagtggacagctggaggggccatcctacaccaacgctggcctggacaccacggacctgtgacaggggcccccactcttctggaccccttgaagaggccctaccacaccctaactgcacctgtctccctggagatgaaaatatatgacgctgccctgcaaaaaaaaaaaaaaaaaaaaa

SEQ ID NO: 289312 - DNA, 1000 bp, Homo Sapiens
tggcataaagcaaattgtaatttctcacacctctggaactgttaacccaatggaaagtacacctaacacaatcaaagcatttctctccaaacactgtgctgaccacccaaacaattgggatgatcacctatcagctgtttcatttgccttcaatgtaactcacttggaacctactaaaaatacaccatattttcaaatgtttagtcgaaatccttatatgcctgagacttcagatagtcttcatgaagtggatggtgataatacaagtatgtttgccaaaattctagatgcaattaaagaagctgataaaataatggagaataagacaacttcactgggccagatggagaacaacaatttggatgaactaaataaaagcaagatcattgttaaaaagaaacccaaacaattaaatccatttcatttaaaagtgggtcatgaagttttaagacaaaggaaaattggtggaaggatggtcgttttcagtctgaatgggttggtccttgtgtcatagactatattacagaaagtggatgtgctgtcctgagagacaacactggggttagactgaaaagacctatcaaaatgtcccaccttaagccctacataagagaatccagtgaacaagaaagtctttatctcttgcaaggttcagtagtggcagatcatgactacattggattgcctgaaattccgattggagcatatcaagcaaatattctggtggaagatgcaactattggtatagtcgataatgaattactgacatcaagcaaggatcgtgaactattagaatatagaaatacgaaaatctctccattgatagacgatcatagttctcttgaaaagcagactttcagtctgttggactcttcaaaccaggttcttgaatacttaagttagtaaataccaaaatttatttaaagtgcttgtttagaatataaattcttaatgatatcttattcattaaaaacgttgtatagaaaaaaaaaaaaaaaaa

SEQ ID NO: 289313 - DNA, 1000 bp, Homo Sapiens
agctggcctgagggcttcgggctgcggcacatgtcctccatggagcacacggaggagggcctccgggagcgacttgccgacgccatggccgagtcacctagccgggacgtcgtgggatccggaacagaacttcagcgagagggaagcatcgagactctgagtaacagctcaggctccaccagcggcagcataccaagaaactttgatggctaccgatctccgctgcccaccaatgagagccagcccctcagcctcttcccgactggcttcccgtaggtaccagcaacctgcttctgactggccagccccctcccctgctggaggaggggagaagccccgctctggtcctacccttcagtctctgctcttccttcatcaaccaccttccccaagcttagtgacagcagccgcccatcctacctggatggagaagagacccttctccaagcacctcagcgcacttgccctctgccacacctgtcggtggaggctgtggccaggagagactgtagaagctcggtccctgtgtatgtttgcatatgacatcctgcattggatccgcttttgtattttttaaccatacccacggtggggcgggtggggggagcctggaacagtgaccagatctgggggcctgagtggggacagagttgatcgtccacctggccattttgaccctgagtggacagtcacagcctcagctcatgtctggctgtgacacacactgcccccagcttcccttggtcagccccactccagcacggggtgaacggaggcccagagtactagggaaggaggaagggaggacatgcctcttcttcctcctttctttccccatctgttcctgggaagagtttgtctttcttatctttaagcccctttaccctggtcctgtactgatcagtgaaggaaaccgtggttactgaggccctgttgaaaagtgcacgtcttgtccaataaatcacgctgcagttggtgtccaaaaaaaaaaaaaaaaaaa

SEQ ID NO: 289314 - DNA, 1000 bp, Homo Sapiens
tacaagcaaatatctattctcaagtggtaagtccactgacttattttatgacaagaaatttcaacggaattttgccaaactattgatacataagggttgagagaaacaagcatctattgcagtttctttttgcgtacaaatgatcttacataaatctcatgcttgaccattcctttcttcataacaaaaaagtaagatattcggtatttaacactttgttatcaagcatattttaaaaagaactgtactgtaaatggaatgcttgacttagcaaaatttgtgctctttcatttgctgttagaaaaacagaattaacaaagacagtaatgtgaagagtgcattacactattcttattctttagtaacttgggtagtactgtaatatttttaatcatcttaaagtatgatttgatataatcttattgaaattaccttatcatgtcttagagcccgtctttatgtttaaaactaatttcttaaaataaagccttcagtaaatgttcattaccaacttgataaatgctactcataagagctggtttggggctatagcatatgcttttttttttttaattattacctgatttaaaaatctctgtaaaaacgtgtagtgtttcataaaatctgtaactcgcattttaatgatccgctattataagcttttaatagcatgaaaattgttaggctatataacattgccacttcaactctaaggaatatttttgagatatccctttggaagaccttgcttggaagagcctggacactaacaattctacaccaaattgtctcttcaaatacgtatggactggataactctgagaaacacatctagtataactgaataagcagagcatcaaattaaacagacagaaaccgaaagctctatataaatgctcagagttctttatgtatttcttattggcattcaacatatgtaaaatcagaaaacagggaaattttcattaaaaatattggtttgaaataaaaaaaaaaaaaa

SEQ ID NO: 289315 - DNA, 1000 bp, Homo Sapiens
tctgatcgatagaaacttccaggtgtccatgctggcagtggacgagatgtatgatgacctggctgtgctggagaaggacttgtactgggatgcagccgaggctcgcgccccatacacagcggctactgtcttccagctgcggcagccttccttccagggctccacctttgacatcacgctggccaaagaagacatgcagttccagcggctggacggcttggatggaccgatgggaggggcgcccggcgacttcctgcagcgcctcctgccggcgggcgcgggcatggtcgcgggaggcccgctggggcggcgcctgtcctttctactccgcaagaacagctgcgtgtcggaggcgtctactggggccagctgctcatgcgcggttgtccccgaaggcgcggccccggagtgcagctgcggggacccgctgctcgaccccggcctgccggagcccgaggccccgccccctgcgggtcccgaaccgcttaccctcatccctgggcctgtcgagcccttcagcatcgtgaccatgcccgggccccggggtccggcgccaccctggctgcccagccctattggcgaggaggaggagaatctggcctgagatcttagagcccagccccctaaggacagggaaccaggtccctgcacggcacccacgcaggtgtcccggtctgcataagcctcgtatgcctttgtaaagtccacctacacttttgaccagctctcgctgcccgcatgtgtttggcgctgtgctaggggcgggagttcttccagactcttggaccagcccgccctgaccaccagctctacttcccaacccccactgcctgagaggtctctatcagtgtcctgcctgaattctttccttcaagtgaagatgtgactgactacctcctcgagttgtcatgaggatgaaagaatggcattaaagcatttggtatacagtaggtgctcaataaattgctagtgatttttactcaaaaaaaaaaaaaaaaaa

SEQ ID NO: 289316 - DNA, 1000 bp, Homo Sapiens; identical to SEQ ID NO: 117468

SEQ ID NO: 289317 - DNA, 1000 bp, Homo Sapiens; identical to SEQ ID NO: 222706

SEQ ID NO: 289318 - DNA, 1000 bp, Homo Sapiens; identical to SEQ ID NO: 117469

SEQ ID NO: 289319 - DNA, 1000 bp, Homo Sapiens; identical to SEQ ID NO: 222708

SEQ ID NO: 289320 - DNA, 1000 bp, Homo Sapiens; identical to SEQ ID NO: 117470

SEQ ID NO: 289321 - DNA, 1000 bp, Homo Sapiens; identical to SEQ ID NO: 222709

SEQ ID NO: 289322 - DNA, 1000 bp, Homo Sapiens; identical to SEQ ID NO: 222711

SEQ ID NO: 289323 - DNA, 1000 bp, Homo Sapiens
gagtgaccaatttgaaggatttttagattatttaatctttgcttatgttgctttttcacatgcttaatgatggaaatgaaatgttaaatcaacaaaataagatccagtgtttcataacatttttataagtttggtaaactttagtcccattatatacttttggggacagtgttataaatcagaattttacgacagtttgcagaacactgatttgaaagcttcctatgcaaaatgagaaggggttcaaatatattaattatcattaagtattaaataataggcattagatgtctaatgtgagtataatttcatccaagccatctcagaaagtctaaaaggttggcagggggtcagctgaagacctcactggagtgggtcttaatttttaaaaagtgtctcactacacttaagacatgtgacacattcccattggtaacaattgctcaccatggcattgtctcaaaaaagactatggtggggagggtggcacattcctaatgggatgtacctctccccactccccttgcttgagaagcactactcaaaaatttaccagaccttacaactgtgataaaacttgaatgtgtatgatgaataaggccattcagttaactttacctccctttacccattgaaggggttccttttccattgctcagtttttagaaaataattctcatcttttttctaaagaaatgaatttgtggctggtctgaaggtagtgagttagctcaattgattgttcgcagtcagttatagatcaagctccttgttctactcttcccctcttctcactactgcacttgactagtcttaaaacaaagaaagaacgaatgaatgaatgaatctgtggctggatgcagtggctcgtgcctgtaatcccagcactttgggaggctgaagtgggaggactgcttgggcccaggaattcaggaccagtctgggcagcagggccagacactgtctctataaaaaaaaaaaaaaaaaaaaaaaaaaaaaa

SEQ ID NO: 289324 - DNA, 1000 bp, Homo Sapiens; identical to SEQ ID NO: 117472

SEQ ID NO: 289325 - DNA, 1000 bp, Homo Sapiens; identical to SEQ ID NO: 222714

SEQ ID NO: 289326 - DNA, 1000 bp, Homo Sapiens
tctttcttgctttctttcttgctttctttctttcttgctttctttcttctctctctctcttttttttttttttaaatagtgctagtttgggcacagagtaatttatattccctttggttaaaatgcaggctttttagccaacaacaaaagtgttttccccccacccccactcgcccaccagggtgatgccacttttgcctcctgccctgaaaattggacttaagatgccatgtcttggctgggattacaggcatgagccactgcacccagcccagttctttcttaaaacagctgagagttttgttttcttcagcgttcaccttccttgtctccagttccgatgctggcagtggttcctacctctgttgggtttctagatagtttgggaacggggttgatgggtttctgtgaaacacattttccaagtcttgggctttctctggaggggaaggtggatgctggcgggtgacttgcagtgggcgcctggcagtgggtgtggactgtaactgacaggtggaaatgagtaggggcactattgttccctccatgccagctttttttttgctggaaatgccccctccacacccctggtagctctgtgtcctgagaaatccagagtgtgggagacatcactgcatctgtccccccagcttctgtgaagggaagctgtggcctcttttgaatgtggggaacaactgaagactcaggggtcacccagaggtctggtggaaagcaacttcaggtttcatcttgctctattcctcaaaggtctggtctgtgggcctctgaggagaaaacaggtctagccaagacagggacaaaatggggaagggggtgtgccaggcctgaactgagctaagcacctgccccgggctccacacttccatctttcttttgtcttcatttcacctctgtgtttaaagcactgtgtgacatagctccttagagatataacctattgtctgctcattgtcaaaaaaaaaaaaaaaaaaaaaaaaaa

SEQ ID NO: 289327 - DNA, 1000 bp, Homo Sapiens; identical to SEQ ID NO: 222716

SEQ ID NO: 289328 - DNA, 1000 bp, Homo Sapiens; identical to SEQ ID NO: 222717

SEQ ID NO: 289329 - DNA, 1000 bp, Homo Sapiens; identical to SEQ ID NO: 222718

SEQ ID NO: 289330 - DNA, 1000 bp, Homo Sapiens
tcctgaaggtgagccggctggaggcacaactgctcctggagcgctaccccgagtgcgggaacctgctgctgcggcccagcggggacggcgccgacggcgtgtcggtcaccacgcggcagatgcacaacgggacgcacgtggtccggcattacaaggtgaagcgggagggccccaagtacgtgatcgatgtggaacagccgttctcttgcacctccctggacgccgtggtcaactatttcgtgtcgcataccaaaaaggcgctggtgccattcctgttagacgaggactacgagaaggtgctaggctacgtggaagccgataaggagaatggcgagaatgtgtgggtggcgccctccgctccgggcccaggtcctgcaccctgcacaggtggccccaagccgctgtcacctgcgtctagccaggacaagctgcccccactgcccccactaccgaaccaggaagagaactacgtgacccccattggagatggcccagctgttgactatgagaaccaagatgtggcttcctctagttggccagtcatcctgaagccaaagaagttgccaaagcctcctgccaagcttccaaagccacccgttggacccaagccagtagagaaggggtttcaccatgttgcccaggctggtctcgaactcctgacctcaagtgatccacccacctcagcctcccaaagtgctgggattaccggcgtgagccaccacacctggcctcatctgtcttctcttccagagcccaaagtctttaatggtggcttgggcaggaagctgccagtcagttcagcccagcctctcttccccacagccgggctggcagacatgacggcagagctacagaagaagctggagaagaggcgggcactggagcactgattcggacacaccagggaccagcgggctagtcccagggcatggcccagcggccagattctttttcccaggattaaaactctgaccccaggaaaaaaaaaaaaaaaaaaaaa

SEQ ID NO: 289331 - DNA, 1000 bp, Homo Sapiens
agcggccgggccaagttctctgcagcctgtggtccccctgtgacccccgagtgtgaacactgtgggcaacgacaccagcttggtggccccatgtgggcagagcccatccatgacctggattttgtgggccgtgtcctggaggctgtgagcgctaaccccggccgcttccacacctcggagcggatccgaggggtcctgagcgtcatcactgaggagctcccggacgtgcctctgtactacaccctggaccagctgagcagcaccatccactgcaacacaccaagcctcctgcagttgcggtcggccctcctccacgctgacttccgggtctcactctcccacgcctgtaagaacgctgtgaagacggatgcccctgcctctgccctctgggacatcatgcgttgctgggagaaggaatgtccggtgaaacgggagcgactatcagagactagcccagcgttccgcattctcagtgtggagcccaggctgcaggccaacttcaccatccgggaagatgccaaccccagctcccgacagcgaggactcaagcgcttccaggctaacccggaggccaactggggtccccggcctcgtgcccggccagggggcaaggcggccgacgaagctatggaggagagacgcaggctgcttcagaacaagcggaaggagccgccggaagatgtggcccagcgggctgcccggctcaagacatttccttgcaagaggtttaaggagggcacctgtcaacgcggggaccagtgctgctactcccacagccccccgacacccagggtttctgctgatgctgcccctgactgtccagagacctccaaccagaccccccctggacctggggctgccgctgggccaggcatagactgaaccaataaagagatgtcacgtcaccttctcccgaaaaaaaaaaaaaaaaaaaaaaaaaaaaaaaaaaaaaaaaaaaaaaaaaaaaaaaaaaaaaaaaaaaaaaaaaaaaaaaaaaaaa

SEQ ID NO: 289332 - DNA, 1000 bp, Homo Sapiens; identical to SEQ ID NO: 117473

SEQ ID NO: 289333 - DNA, 1000 bp, Homo Sapiens; identical to SEQ ID NO: 117474

SEQ ID NO: 289334 - DNA, 1000 bp, Homo Sapiens; identical to SEQ ID NO: 222719

SEQ ID NO: 289335 - DNA, 1000 bp, Homo Sapiens; identical to SEQ ID NO: 117477

SEQ ID NO: 289336 - DNA, 1000 bp, Homo Sapiens; identical to SEQ ID NO: 117478

SEQ ID NO: 289337 - DNA, 1000 bp, Homo Sapiens; identical to SEQ ID NO: 222720

SEQ ID NO: 289338 - DNA, 1000 bp, Homo Sapiens
actgtccagattaagaatattaaggagctgtaaaattagcttgtagaaatggacttatccttaagttttaaaaagttaggaaatcctaaaaatgttaggcttcctgcacaagtggctatgttcatttaatggctagtgaacatgggaatgtatttttatcctcctagctggtggttctgtttggtaaaccagactagaatgatttgagaggggcaaagagaataggcaggaccttccttctatagctttacatatttagaatgttaatacttaatgacattgaagttaccttgcaatgattgataagaggattattaatatcagttaggggaatagggaggataggattttggtgccttcttcagcagacttgctccaagacaaagattctattttgatagtgcaagacaaaaggactcggaagaaaattggccatatgcctacagagcatacaactctgtggaactaaattgtttttactttgtgaaagctgctattttacggaaagattttgattatacagtttgtttttaaattgtcttttatatttatttgtatttggtaagaatcggttgttacacaagctgttctttcccagttacaaaatcctgtgttcggttgtaacctgaactcattaaaagacttgttttcaggtttatcaactgtttattttcactgacatttgagcatgttattttataaatgacgggattccagggtaggaagtgctttttattccccttttgttttttcttttaaaaaattacgtcagttaaaaaaataaaaaaactgcagtcttatggtttagaaaacttgtttagctccatagaggaaagaatgttaaactttgtattttaaaacatgattctctgaggttaaacttggttttcaaatgttatttttacttgtattttgcttttggtacggccagaaatcgagcttgttttttcatagttcctgatattttcagaaaaatcaaaataaatttgttccctaaaaa

SEQ ID NO: 289339 - DNA, 1000 bp, Homo Sapiens; identical to SEQ ID NO: 222722

SEQ ID NO: 289340 - DNA, 1000 bp, Homo Sapiens; identical to SEQ ID NO: 117479

SEQ ID NO: 289341 - DNA, 1000 bp, Homo Sapiens; identical to SEQ ID NO: 117480

SEQ ID NO: 289342 - DNA, 1000 bp, Homo Sapiens
tgttgctgtggccggctgactaaaacagttaaggaaacaactcgtactgaacccatcaacaccacttattcttacactgacttccaaaaggcagttaacaaactcctaactgcatcactgtaaagatctaccatttgctctgatatctctgatgttgctaattgagaaagtggtacaaagttagtcattacacagcccactaatgccttctcagtcaaactctcttatgccctggcaagccaatgaggataccctttgacaaaccctgtggataaaatgataatatcaaagtgctgggattgaacccttctaattttaaagaaccttgttattagaaaatctcagcctaatacaatctgaagttaagagttttagcagcattgtttttctaagtagatttagctatagattttcttctggccaaacaaggaagagtatatgcccttgtaaatgagtcttgttttgtttatttaaatagtcagtcaaaacgtagaaatcagtatacgtaaaataaaatgcatgagactattaaatcttttcatataccctacaaataaaatgaaatctgtgtgtggtcctggttgactgggcatctaaagggaatcagaaaagagattgtgaaaagttatatatatatcctcttccttattttagttttgctttttcctattttccataattaagtgccgtttacaaagtggcatcaaaaaattgaagcaggccaggcatggtggctcatgcctgtaatcccagcagtttgggaggctgagggcaggtggatcacttgagatcgggagttcgtgaccagcctggccggcatggtgaaagcccgtctctactgaaaatgtaaaaattagccgggcgtggtggcatgtgcctgtagtcgcagctacttgggaggctaagacaggagaattgcttgaacctgggaggtggaggttgcagtgagctgagatcgcgccactgcactccagcctgggcaacagtgagacaccgtctc

SEQ ID NO: 289343 - DNA, 1000 bp, Homo Sapiens; identical to SEQ ID NO: 222726

SEQ ID NO: 289344 - DNA, 1000 bp, Homo Sapiens
gttgctgtattatgggaagactcagttcaagtttggctgccatgcttatcgggatactgcacatgagatcatcattttctgggtggaagtattcagctaaagactggttgatgagtgatgtagactatttcagcttcttattttccacacttacagggttttcgaaagaggagttgacttggcttcagagccttcgaggagttcctcatgtcatccagacacagctttcccctgtgcttctctaccttacagatttggatcaatttttacaccactgggatgtaacagaggcagtttttcacagtttattggttattcctgcccgaagtcagaactttgacatcttgcaaagtgccatcagtaagcatttggttgggttgactgtaattcctgacagcacggctggctgtgtttttggtgttatctgtaagctcctggatcatacttgtgtagttagtgagactctactgccatttctggcttcttgttgctacagtcttctttattttctgctcactatagagaaaggggaagcagaacatctaagaaagagggacaagctgtggggggtctgtgtctccatcctggctctcttgcctcgagtcctcaggttgatgctgcagagcctgcgggtgaacagagttgggcctgaggagctgcctgttgtgggccagctgcttcgactgctgcttcagcatgcacccctcaggactcatatgttgaccaatgcgatcttggtgcagcagatcatcaagaatatcacgacattgaagagtggaagtgttcaggaacagtggctcacagacttacattactgctttaacgtgtatatcactgggcatccccaagggcccagtgcactggctacagtgtattgaagaggccatagtacctcctgtttgaagttgtttattcacatctatcttatttgaagaaaaagactgatgtaatagatctttgtcattaaagctgaacttttaaaaaaaaaaaaaaaaaaaaa

SEQ ID NO: 289345 - DNA, 1000 bp, Homo Sapiens; identical to SEQ ID NO: 117482

SEQ ID NO: 289346 - DNA, 1000 bp, Homo Sapiens
tccctggaggatcgggtgaagcggaatatctactctttacagagaacttcggtagctctggagaagaactttatgaaaagatgaaaactgtcccctctcttattggttttcctgcattttccagggaagctgctgaccccttaattctctttataagagttcaaatgacttctttcacagatgtcaaaccaccagtgttcaaagtgaccctgcttcattgagtcctgaaacagctcacttcctttgagagctagtgtgacttgctttgtgggacactcagtaactttgggttttgactctttaacgggtgggcactggaccatctcggtgggagtgcttgtgccactctggaaggctgttccctggggttgtgatgtttatcatgccacttccttcttacctgtgccaacagacctatttcactgcctcagcgtacaccagacccttcagaaacctctctggtgtcacccagatagattgtgcttactgagacaaatgaacgtttacttgatttagaagataatgtgacagaatgatgtcaggttaggtcaaagccaagggagtgacagaatctggaaaatcaaacaatacaaaaagccctaaatgaactgttaactatttgatctttggatgtaaaattgtaatgcgtatatgtacaaatgtacaatttttacatgcttttaaaaaaggttagctttgtgaaaataccttgtttggtcaatgactttactgggtaatagaaccacattgaaccttgatggcaagtaatacaataaggcaggccagctcgtttttctctctgaatctggctggtttaggaggagcctgggtttatcgacgagatctggagtatctattcttttccactgcttgcagtctccaatgtaggcagtgtaaaggtatagtaaaatgattttaggagtcagaaccaaattgccaatatgctccatggctcctaaaggaaaataaaatggaagtttttaaaaaaaaaaaaaaaaaa

SEQ ID NO: 289347 - DNA, 1000 bp, Homo Sapiens
ggtgggccccagcaaaggagtagctgccagggctcaacagctacgctctgtgacagcgcagagctcagcggcggcctttccctccctccgccaaggactcacggccaagccagctctcggggccttttttccactgcccatttggctactctgctgcaccaagcttgggagccagcctgccaacagccacctgggcctggcctccccactggctggccttgaggttggcagagtgggttgtggcgcttcctctctctgtgtgggaccaggacagtggcttaagtctccactccaggaaagaatcaaagtttctagagttgtgagaaaaccagagagtggctgtcctgattcttcactgtgaggggcgttcttcatgttctcccagctgttccaagactgggccgtagaattccatgtttcaggagcctaagaccctcccagagcccaggggcttcaccgcagaccccaagccattgagcacatcacccaaagcagtggccaacatcgcggacccctgtgccttgtcacagatgggtgctggtcctcaggcgttggggacactgctgggtcgatggggtcggattctgccagtttctgctctgcagccaaagatggtcagaagcattgtcacttcagtaacatcaagtgctcaaagacatggcaaccgttcagtggtacttaagtattcaaaatatacaactacagattctctgacagaaaccagcacggggtcttcaccttcattcaccccacaggcgacatgcgagggagaacagcatctcagtggtgatttccaaaccaagcctttgttttcggtgtggggttttgggggtttgctttaatgtttttgaaattgtaaatgttgggctttgtattttgatgtaaactgagcataatggcattttagggcctgtgaccaaaatgaagcttgtaacgacccatggatctgaataaacatgtccttgcttctgaaaaaaaaaaaaaaaaaaaaaaaaaaaaa

SEQ ID NO: 289348 - DNA, 1000 bp, Homo Sapiens; identical to SEQ ID NO: 222728

SEQ ID NO: 289349 - DNA, 1000 bp, Homo Sapiens; identical to SEQ ID NO: 222729

SEQ ID NO: 289350 - DNA, 1000 bp, Homo Sapiens
cgtcttatgcggatggcggggaaaggcctccattcgaacttttgtgcccaagaatgaacggcttcattatctcaggatgatggggctggaggtattgggagaaaagaagaaggaaggggttatcctcacaaatgagagtgcagccagcaccggacagccagacaatgacgtgactgagggacagagagcaggagagcccaacagcccagatgcagaagaggccaacagtccagacgtgacagcaggctgtgacccggcgggggtccatccaccccggtgagcaggcccaaggcagcgggggcccacacccctcacacgcaaaactggcttcttctggtcactggtgtctgaaaccaaatccagagcagcctgtggcctgtaaagcatatatttctaatgactgcagactggtgggatcataggagccttctgaatgaccaggactgctttctttggagctgatgaaaatgtactcttttagcgtgttagaaatcacttgttttattttgtttctttggccaagctgggtctagtgtttcttttgctgggaatagactttcaaaagttgtacttctatcaagaaacaaaactgcccttgcagaaatttcaggtcttttgttaagcctgtattggtcttaaggtgcagtattttttaaattattatttatagaaagaatctataaattcttggggaagtgtgttataagctttaataattacattgagctgcacctcagtggtgtgtcattaacatgcagtggggttaatatctgaggcctcagatgactttgtgccttttggaataaagggtaaaataaactctcccagagtaagagctgtatcgtgaattgtcatactaattattgagggggacttatgtgcttttattgaatggagtgctttacaatttttatttttaaatggggttgggatccttggaatatttcaataaaattgataaaatataaaaaaaaaaaaaaaaaaaaaaaaaaaaaaaaaa

SEQ ID NO: 289351 - DNA, 1000 bp, Homo Sapiens; identical to SEQ ID NO: 222732

SEQ ID NO: 289352 - DNA, 1000 bp, Homo Sapiens; identical to SEQ ID NO: 117483

SEQ ID NO: 289353 - DNA, 1000 bp, Homo Sapiens
atcccttgaaggctgagtttttgagggcagaaagctagctatgggtagccaggtgttacaaaggtgctgctccttctccaacccctacttggtttccctcaccccaagcctcatgttcataccagccagtgggttcagcagaacgcatgacaccttatcacctccctccttgggtgagctctgaacaccagctttggcccctccacagtaaggctgctacatcaggggcaaccctggctctatcattttccttttttgccaaaaggaccagtagcataggtgagccctgagcactaaaaggaggggtccctgaagctttcccactatagtgtggagttctgtccctgaggtgggtacagcagccttggttcctctgggggttgagaataagaatagtggggagggaaaaactcctccttgaagatttcctgtctcagagtcccagagaggtagaaaggaggaatttctgctggacttcatctgggcagaggaagggcggaatgaaggtagaaaaggcagaattacagctgagcggggacaacaaagagttcttctctgggaaaagttttgtctcagagcaaggatggaaaatggggacaacaaaggaaaagcaaagtgtgacccttgggtttggacagcccagaggcccagctccccagtataagccatacaggccagggacccacaggagagtggattagagcacaagtctggcctcactgagtggacaagagctgatgggcctcatcagggtgacattcaccccagggcagcctgaccactcttggcccctcaggcattatcccatttggaatgtgaatgtggtggcaaagtgggcagaggaccccacctgggaacctttttccctcagttagtggggagactagcacctaggtacccacatgggtatttatatctgaaccagacagacgcttgaatcaggcactatgttaagaaatatatttatttgctaatatatttatccacaaaaaaaaaaaaa

SEQ ID NO: 289354 - DNA, 1000 bp, Homo Sapiens; identical to SEQ ID NO: 222733

SEQ ID NO: 289355 - DNA, 1000 bp, Homo Sapiens
tattcttacgtgccagtgaggccctaaggtctcagtgcatagcatacctgccactctggatgttttcctgggcttcatatctgtatggcaaggagggagctgtccttcagcagacaaagtcaagcagctttaagtacaaggcagcttgaaacctctctgatgaaagtgaaaaatgtgggtagcttatactttcaaactaatgccagtgactagagagaggtttcattcatgatgtgtatttccaatttggtcttcaattcaagagatgcttcataaaacacttatagccttaaaccattcaagggctaattaaaaaaatagttatgaaatcttagccacaaaaaataaatcaggtaaacattttaacctgtcgttaagtgttgtaacttcaaaaaaccaaaatgcttattttaatgtgatttttctaaaactattgaaaaattaatatttctataatctattaaaaaaaatggagaatgttttctctcaaatttcctctgacccatgggaatgaaaatacttaaatactgtaaagcatatctattaataattcccccaattttttaaactaacaaaatggaatgttaactgaatggaattaaacatagcaattgtcaagccatcaaaattatatatcgaaccacttaggcatgttacggggtaaagtcctcacccctgcatttgagaaatattttattatttttattttaaggcaaaacagtgtttactgtgatgggcagaacagccttttgtatctaggagtccatttgagttctttccaatatttccatatcgttcataaatgtgtctgggggcttccttgtttggaaaatatggatatcgctttgttttcctttgaaagtaattatatcttaagaacatagtatcatgaatggagtagacagggaggctgcagaagccatttttctttgtagataaaaagcattatctatgattgttgtataataaattgatttttacattaaaaaaaaaaaaaaaa

SEQ ID NO: 289356 - DNA, 1000 bp, Homo Sapiens; identical to SEQ ID NO: 222735

SEQ ID NO: 289357 - DNA, 1000 bp, Homo Sapiens; identical to SEQ ID NO: 222736

SEQ ID NO: 289358 - DNA, 1000 bp, Homo Sapiens
cagagcgagactccctctcaaaaaaacaaaacaaacaaaaaagaagtgtgggcaaccaaatgtaggtaaggatgaagaagaacaggaactctcactggtggctgatgggattgcaaagcgtcagggcagctttgaaaaacttttcagcagtttcttataagcataacttatcatatggcccagccatttcactactagaaattgacccaagtgaactgaaaacttatgttcacacaaaaactcgcacatgactgtttatagcagcttcattcataattaccaaaaactagaaataacccagatatccttcaacaggtgattggataagctgttgatatccattccttgagtttatccatactcaacagtaaaaaatgaactcttggttcacacaataatatagacatatcttaaatccattttgctaagtgaaagaagctaggcctaaaagtctacatgttgggcgattctatttatatgacattctggaaaaggcaaaactatagggatgaagaacagatcagttgttgtcaggtttgagaaaaggagggaagtttgctacaaaggggctgcaaagggaataggctgatggagctgttctgtatggtactgtgtggtggatacatgacaatatccatttgcaaacacaagaactatacacatggccaggcgcggtggctcacacccgtaatcccagcactttgcggggccgaggcaggggaacacaaggtcaggagatcaagactgtcctggacaacatggtgaaaccctgtctctactgtctctaacatttgtaaacctgtctctaatttgtaatttgtaaaccctgtctctcatatttgtaaaaatacaaaaattagcttggcatggtggtgtgcgcctgtagtcccagctactaggaggctgaggcaggagaatcacttgaaccaggaaggcggactgcattccagcctgggcaacagagaaagactctgtctcaaaaaaaaaaaaaaaaaaaaaa

SEQ ID NO: 289359 - DNA, 1000 bp, Homo Sapiens; identical to SEQ ID NO: 117484

SEQ ID NO: 289360 - DNA, 1000 bp, Homo Sapiens; identical to SEQ ID NO: 220421

SEQ ID NO: 289361 - DNA, 1000 bp, Homo Sapiens; identical to SEQ ID NO: 222737

SEQ ID NO: 289362 - DNA, 1000 bp, Homo Sapiens; identical to SEQ ID NO: 117486

SEQ ID NO: 289363 - DNA, 1000 bp, Homo Sapiens
gttgttccagatatgcagagacaatgataaataaaacatataatctcttccataaggtatttattttttaatcaagggagatacacctatcagatgtttaaaataacaacactacccactgaaatcagggcatatagaatcattcagctaaagagtgacttctatgatgatggaacaggtctctaagctagtggttttcaaactggtacacattagactcacccgaggaattttaaaacagcctatatgcccagggcctaacttacactaattaaatctgaattttggggatgttgtatagggattagtattttttttaatctaggtgattccaatattcagccaactgtgagaatcaatggcctaaatgctttttataaacatttttataagtgtcaagataatggcacattgactttattttttcattggaagaaaatgcctgccaagtataaatgactctcatcttaaaacaaggttcttcaggtttctgcttgattgacttggtacaaacttgaagcaagttgccttctaatttttactccaagattgtttcatatctattccttaagtgtaaagaaatatataatgcatggtttgtaataaaatcttaatgtttaatgactgttctcatttctcaatgtaatttcatactgtttctctataaaatgatagtattccatttaacattactgatttttattaaaaacctggacagaaaattataaattataaatatgactttatcctggctataaaattattgaaccaaaatgaattctttctaaggcatttgaatactaaaacgtttattgtttatagatatgtaaaatgtggattatgttgcaaattgagattaaaattatttggggttttgtaacaatataattttgcttttgtattatagacaaatatataaataataaaggcaggcaactttcatttgcaaaaaaaaaaaaaaaaaaaaaaaaaaaaaaaaaaaaaaaaaaaaaaaaaaaaa

SEQ ID NO: 289364 - DNA, 1000 bp, Homo Sapiens; identical to SEQ ID NO: 222739

SEQ ID NO: 289365 - DNA, 1000 bp, Homo Sapiens; identical to SEQ ID NO: 222741

SEQ ID NO: 289366 - DNA, 1000 bp, Homo Sapiens
tggttttcatgccttgtccctgcctctacccccaccccttttgagtcgggtgactcatttttctgtgtagagactcggtggcccaggcaggaggtgaaagcagccatccggaaggccctggggacccttgtgcctgttgctcgccttcaggtcaccagctgagctgcgataggaaaatctgaatggaggcagcaaacagccaaaacaaacattccccacccggccctgtgcatatgaagtctttcttcccccaactcttgaacgatgatgatattcagacgaagcattgatgttatggaagaaagaaagaaacaaacaaaatatatatatatatgtccaaaaacagacaaatccaagggtgtgaggtaaacgagtgtctgcatttagattccacaaaaccaaaatccatgttgaacaaagttaagtccgtacacagtgactttttgggtgagccgtgtgtgtctgtctgttgtgtgtgtgcctcaagccctgttttcctgtgaagatactttgagtggcagccattctctccacgtgaaccacacgtctggagcacagacaggcctctcaaggtcattgatcttacgcatttactgtttaccgaacaaatgtctgactgtgtactcgggtgtactccgcagcattgtcgactgcagtcccctgtgtttgccagagatactgtgctcgaagtagaggttttactctactcatcactgcgatttgcacattgctccgtggacactcggaggcctgcgttctgttccctataaatggaagcgtgctctgagcctgtctgcctccctcggctgctgctggtcctcagtaccagcgcccgggggtgtccacaaccacttgggacagaagaaggtggaatttcagacagaagcttgactgggtcttcaatgacaggcttggactagctgtggcccagacatcggccctgcccagaattgccaggaggaggctttgcaggctctagaggagccgcagggcctgcctg

SEQ ID NO: 289367 - DNA, 1000 bp, Homo Sapiens; identical to SEQ ID NO: 117487

SEQ ID NO: 289368 - DNA, 1000 bp, Homo Sapiens; identical to SEQ ID NO: 222743

SEQ ID NO: 289369 - DNA, 1000 bp, Homo Sapiens; identical to SEQ ID NO: 222744

SEQ ID NO: 289370 - DNA, 1000 bp, Homo Sapiens; identical to SEQ ID NO: 222745

SEQ ID NO: 289371 - DNA, 1000 bp, Homo Sapiens; identical to SEQ ID NO: 222746

SEQ ID NO: 289372 - DNA, 1000 bp, Homo Sapiens
aattgtgttcttaaattcagtcatttgatattctgtgagacttcatatttctcatccctttattgctttttagcaaacataagaaaccatgagtcattttgtcatttagagtattctgataaaatctcttgaaaatactgaaatcaaaaggttaatgattttttgttcattctgatttgtcattttattatctgttatcggtctaaagtgctaatttacccatttgatttttctgctagacagataacttttaatttttcaaatttggcagacacttttttttttttttgaaaatctttccttccagatctgttgcccactgaacagccacccgtccctcactgtcctggtgtccgattgggctggatggtgttggggcatgatgtgtggaggaactggaaggtgctttaggtctggttcagggtcgggcattctttgttgtttgcacatctttttaaattttacaccttttcttaagaattctaatgccgtcttaagtttttataccaataatgctgagctttaagtgtaggatctggtagtacagacagtgtgatggatgatgctgctggttgtaaatttcatcgtgtgtgtctaattttttttcctgttgaatgggtaaaaacaaaacaaaactttttttagaagatgaatttgctgtcatgttttgtggaatgagggaccgttgagctcactaccacctggagtttgagttgaagcatgaaaatggtgcccatgcctgacgctccagcgcctggatctgcacgtgcccttgtagaggatccttaccgtcctagagagcagacgctttctgaaaactacttgctccaaaagaccctctgagttaacgtttcagctgtatcattagacttgtatttagagcgtgtcacttcctctgaactgttactgcctgaatggagtcctggacgacattgggtttttcctctaggagaatacaagccttaataaacaatactatttagcaaaaaaaaaaaaaaaa

SEQ ID NO: 289373 - DNA, 1000 bp, Homo Sapiens; identical to SEQ ID NO: 222747

SEQ ID NO: 289374 - DNA, 1000 bp, Homo Sapiens; identical to SEQ ID NO: 117488

SEQ ID NO: 289375 - DNA, 1000 bp, Homo Sapiens
ctgtagcccccaggaagagggcgcggaggcagcgggcgaggctgcagggcagtgcgacggcggcggaagcgtccctactgaggcggacccacctctgctccctcagcaagtcggacaccagactgcacgagctgcaccggggcccgcgcagcagcagggccctgcggcctgccagcatggatctcctgcgcccacactggctggaggtgtccagggacatcaccggaccgcaggcagccccctctgccttcccacaccaggagctgccccgggctctgccggcagctgcagccaccgcagggtgcgctggcctcgaggccacctattccaacgtggggctggcggcccttcccggggtcagcctggcggccagccctgtggtggccgagtatgcccgcgtccagaagcgcaaagggacccatcgcagtccccaagagccacagcaggggaagactgaggtgaccccggccgctcaggtggacgtcctgtactccagggtctgcaagcctaaaaggagggacccaggacccaccacagacccgctggaccccaagggccagggagcgattctggccctggcgggtgacctggcctaccagaccctcccgctcagggccctggatgtgggcagcggccccctggaaaacgtgtatgagagcatccgggagctgggggaccctgctggcaggagcagcacgtgcggggctgggacgccccctgcttccagctgccccagcctagggaggggctggagacccctccctgcctccctgccctgaacactcaaggacctgtgctccttcctccagagtgaggcccgtcccccgccccgccccgcctcacagctgacagcgccagtcccaggtccccgggctgccagcccgtgaggtccgtgaggtcctggccgctctgacagccgcggcctccccgggctccagagaaggcccgcgtctaaataaagcgccagcgcaggatgaaagcgaaaaaaaaaaaaaaaaaa

SEQ ID NO: 289376 - DNA, 1000 bp, Homo Sapiens; identical to SEQ ID NO: 117490

SEQ ID NO: 289377 - DNA, 1000 bp, Homo Sapiens; identical to SEQ ID NO: 222750

SEQ ID NO: 289378 - DNA, 1000 bp, Homo Sapiens; identical to SEQ ID NO: 117491

SEQ ID NO: 289379 - DNA, 1000 bp, Homo Sapiens
gcactgaccatgtcggaggacagacccatgctgcagttcctcctgcacaccagcttcctgtctcccctgttcatcctgtggctctggacaaagcccattgcacgggacttcctgcaccagccgccgtttggggagacgcgtttctccctgctgtccgattctgccttcgactctgggcgcctctggttgctggtggtgctgtgcctgctgcggctggcggtgacccggccccacctgcaggcctacctgtgcctggccaaggcccgggtggagcagctgcgaagggaggctggccgcatcgaagcccgtgaaatccagcagagggtggtccgagtctactgctatgtgaccgtggtgagcttgcagtacctgacgccgctcatcctcaccctcaactgcacacttctgctcaagacgctgggaggctattcctggggcctgggcccagctcctctactatcccccgacccatcctcagccagcgctgcccccatcggctctggggaggacgaagtccagcagactgcagcgcggattgccggggccctgggtggcctgcttactcccctcttcctccgtggcgtcctggcctacctcatctggtggacggctgcctgccagctgctcgccagccttttcggcctctacttccaccagcacttggcaggctcctagctgcctgcagaccctccaggggccctgaggtctgttcctggggcagcgggacactagcctgccccctctgtttgcgcccccgtgtccccagctgcaaggtggggccggactccccggcgttcccttcaccacagtgcctgacccgcggccccccttggacgccgagtttctgcctcagaactgtctctcctgggcccagcagcatgagggtcccgaggccattgtctccgaagcgtatgtgccaggtttgagtggcgagggtgatgctggctgctcttctgaacaaataaaggagcatgccgatttttaaaaaaaaaaaaaaaaa

SEQ ID NO: 289380 - DNA, 1000 bp, Homo Sapiens
ttctgaagcttccaacagcgaaccagtcaataaggaacaggatcaacggccactccacccagtggcaaatccacatgcagaaatctccaccaaggttccagcctccaaagtgaaagacgccgtggaacagcaaggggaggtgaagaagaataaaagagaaagaaaggaagaacggcagaagaaaaggaaaagagaaaagaaagaactaaagttagaaaaccaccaggaaaactcaaggaatcagaagcctaagaagcgcaaaaagggacaggaggctgaccttgaggctggtggggaggaagtccctgaggccaatggctctgcagggaagaggagcaagaagaagaagcagcgcaaggacagcgccagtgaggaagaggcacgcgtgggcgcagggaagaggaagcggaggcactcggaagttgaaacagattctaagaagaaaaagatgaagctcccagagcatcctgagggcggagaaccagaagacgatgaggctcctgcaaaaggtaaattcaactggaagggaactattaaagcaattctgaaacaggccccagacaatgaaataaccatcaaaaagctaaggaaaaaggttttagctcagtactacacagtgacagatgagcatcacagatccgaagaggaactcctggtcatctttaacaagaaaatcagcaagaaccctacctttaagttattaaaggacaaagtcaagcttgtgaaatgaacatttgtgtatttaaaaattgaatccattctgctgacttcttcctttcactgctgtttataaaatgtgtaatgaattctaacaactcaaattttgctttttgaagctgtatttttaagttaagaaaatatatttttggtataacttttatgagaaaaataaaatatattctggtccaaaaaaaaaaaaaaaaaaaaaaaaaaaaaaaaaaaaaaaaaaaaaaaaaaaaaaaaaaaaaaaaaaaaaaaaaaaaaaaaaaaaaaaaaaaaa

SEQ ID NO: 289381 - DNA, 1000 bp, Homo Sapiens
ccatcgtggggaacaaagtggacctcactgaggagggggccttggcgggccaggagaaggaagagtgcagtcccaatatggacgctggggaccgtgtctccccaagggcacctaagcaggtgcagctggaggatgcggtggccctttataaaaagatcctcaagtacaagatgctggatgagcaggatgtgccggccgctgagcaaatgtgctttgagaccagcgccaagaccggctacaatgtggacctcctgtttgagaccctctttgacctggtggtgccaatgatcttacagcagagagctgagaggccgtcacacacagtggatatatccagtcataagccacccaagaggaccagatctgggtgttgtgcctgactttcgagggcctcctggactcagactgtgcatgttgggaaggggtctgaccaggcaagctgtgatctgaaaggagcaaggaacagcaaggaattattttccagaatgacacccgcagcagaatgttggagtggaaatgatggctggctatgaagaggaggtcaacgtgtgtggtctcctcagtctctgtcagaggggtggggaggtgggaaacaggaatcctctgcaaagcccaatctgcagagtcgagacccctggtgctctctgccccgctgcctggcactggtcctttgcagccagccaccaacggcccccttgcccttgcagaggcagaagcctgcgtctgcacctgcacctctgaccgtttcagcaccctgggttgttaccacgtcctacaactctgacatttcttgttctcaagcgtttctcttcactgtgagttgtctttggtcctcccacttggtacttgtatcttgatgctttataatcctgactctcgacgtgttcatttatacaaaatcaggaataactttgtttttatactgattgcagcaatgttggctacatgtattattaaagaggatttttggaacaacttaaaaaaaaaaaaaaaaaaaaaa

SEQ ID NO: 289382 - DNA, 1000 bp, Homo Sapiens
agtacaagattctgctgtactcattggatggccggttgttgtccacgtacagcgcttacgagtggtccctgggcatcaagtctgtggcctggagccccagcagtcagttcctggcagttgggagctatgatggaaaggtgcgcatccttaatcacgtgacttggaaaatgatcacggagtttgggcatcctgcagccattaatgatcccaagatagtggtgtataaggaggccgagaagagcccacagctgggactgggctgcctctccttcccgccgccccgggccggggccggccctctcccgagctcagagagtaaatatgagatcgcctctgtcccagtctccttacagacactgaaacctgttaccgacagagcaaacccgaaaatgggcataggaatgctggcatttagtcctgacagctacttcctggcgacaaggaacgacaacattcccaatgccgtctgggtctgggacattcagaagctgaggctgttcgcggtgctcgagcagctgtccccagtgcgcgcgtttcagtgggacccgcagcagccgcggctggccatctgcacgggaggcagcaggctctacctgtggtccccagcgggctgcatgtcggtgcaggtgcctggggaaggcgactttgcagtgctctctctgtgctggcatttaagcggagactcgatggccctcctcagcaaggatcacttctgcctctgcttcctggagacagaggcagtggtcggcacagcctgcagacagctgggcggccacacgtagcagcggtgcactaacgtgtgcagaaacagggctactctgtgtttccagtgtgggaaaaaacacagcttcaccaggaggttctccactgtggtggtctggattcagtgattgattctatttttctatagcaaagcatttttgtaaatatgtatggtataaaactgtagttttattatttaaaataaatacttgctgatttaaaaaaaaaaaaaaaaaaa

SEQ ID NO: 289383 - DNA, 1000 bp, Homo Sapiens
ctgaggaagataaacagaaaaactttctatttttacgactttgggataggaatatggacatagcaatgggctggaagggtgcccaggccatgcagtttggacaacctttggtttttgacatggcttacgaaaattatatgaaacgaaaagaattgcagaatactgtttcccagcttttagaaagtgaaggatggaacagaagaaatgttgatcctttccatatttatttctgcaatctaaaaatagatggtgctttgcacagagagttagttaaacggtatcaagaaaaatgggacaaattgcttttaacatcaacagaaaagtctcatgtagatttatttccaaaggacagtattatctatttaactgcagattctcccaatgttatgactactttcaggcatgacaaagtttatgtaattgggtcttttgttgataagagtatgcagccaggcacatccctagccaaggcaaaacggctgaacctggcaactgaatgccttccattagataaatatttacaatgggaaattggtaacaaaaatctcaccttagatcaaatgatacgtattttgttatgtctgaaaaacaatggtaattggcaagaggctctgcaattcgttcccaagagaaaacatactggttttctggagatttctcagcattctcaagagtttatcaacagactaaagaaggcaaagacttaattcattttcaaaaggttctctgaatgtgcacagaacacgtggctcaaatgagaacatttgatggcttaaaaagtaaatgcgttagaaatacagtcctgttaatgtatttcttcccaaacaattcatttttctcttctaaaggtagtctttcccaactgactgtagggttgtgtcttttcccaattaagtatctgcagaactttgggattatactttgtttactgtagaaagataataaaaagagttgtccaaaaaaaaaaaaaaaaaaaaaaaaaaaaaaaaaaaaaaaaaaa

SEQ ID NO: 289384 - DNA, 1000 bp, Homo Sapiens; identical to SEQ ID NO: 222752

SEQ ID NO: 289385 - DNA, 1000 bp, Homo Sapiens; identical to SEQ ID NO: 117492

SEQ ID NO: 289386 - DNA, 1000 bp, Homo Sapiens; identical to SEQ ID NO: 117494

SEQ ID NO: 289387 - DNA, 1000 bp, Homo Sapiens
ggcttgcaggctacttcatggaccacaccgtggccttcagggacctgccagtcaggatggtttgctccagcacctgctaccgggcagagacaaacacgggacaggaaccccgggggctgtatcgagtacaccacttcaccaaggtggagatgtttggggtgacaggccctgggctggagcagagctcacagctgctggaggagttcctgtcccttcagatggagatcttgacagagctgggcttgcacttccgggtcctggatatgcccacccaagaactgggcctccccgcctaccgcaagtttgacattgaggcctggatgccaggccgaggccgctttggagaggtcaccagtgcttccaactgcacagacttccagagccgccgcctccacatcatgttccagaccgaggctggggagctgcagtttgcccacacggtgaacgccaccgcctgtgctgtcccccgccttctcatcgcgctcctggagagtaaccagcagaaggacggctcagtgctcgtgccccctgccctccagtcctacctcggcactgatcggatcacagcccctacccacgtgcctctccagtacatcggccccaaccagccccggaagcctgggctgcctggccagcctgctgtaagctaagaacccacccacagcagccctcgggggtgtcactgcttcctggagttcaggagaccccggacacctgggacctgtgttgctgagcccgtcctgacatctgtgttcttcctgtcagctccacgcccgggcccctggaccacggggtccacctctcctctgtccttgctgcctcagagtcagtcactgaccctgttatcattgagggtcccagtgggaagcaggacgtctgggctttacggttctagggacaggagaagcagaggaagaggcttccatccctccttccttctttcctcctacagtgctgagcaaaaagtccccaataaatggtcaggacaaaaaaaaaaaaa

SEQ ID NO: 289388 - DNA, 1000 bp, Homo Sapiens; identical to SEQ ID NO: 220422

SEQ ID NO: 289389 - DNA, 1000 bp, Homo Sapiens; identical to SEQ ID NO: 223721

SEQ ID NO: 289390 - DNA, 1000 bp, Homo Sapiens
gagaatccaagcagcttcagtggcagtttaataagacatctgcaagttagtcacactttgttttatgatgatttcatagattttaatataattgaggaagctcttatccgaagagtcttagaccggtcacttcttgaatatgtgaatcactcgaacaccacataattttattaaaacgaagggaaaagggaccactgaattgcaccatttaagatgctgcttgaacaaatgggagggaagttgtcaatgattgatgggcaaaaatgtacaacacagttatgtgtttgtccatgtttattgttatagtgcatttaaaaactgctttaattttaatggtttaaatctgttttacatccttgagattcttacacatctaacaacaaaaaaaattatctacatcagtcattgttacatggaaaagacaggtggtaggcaagtaggtggaggatctcggtttgcaaattagataatactctgtgtataatgctacatatcaataactaccatcatggttaggcacgataactaatctttgttctgtgtaaaaaaatatggagagtgaaacaaagtgcagacattcaaagaaataagaaatctgctccaatgctcttgttctaatctctaataggttaacgttaataatcttgtatgggagttggaaaggaaaattttggaagtcaagaaagtccatttaggccggacgcggtggcttacgcttgtaatcccagcactttgggaggctgaagcaggcggatcacaaggtcaggagttcgagaccagcctggccaacactggtctctgtgaaactccgtctctactaaaaatacaaaaattagctggacgtgttggcgggcatctgtaataccagctacttgggaggctgaggcagaagaatcacttgaacccgggaggcagaggttacagtgagctgagatcgcaccagtacactccagcctgggtaacagagctagactccatctcaaaaaaaaaaaaaaaaaaa

SEQ ID NO: 289391 - DNA, 1000 bp, Homo Sapiens; identical to SEQ ID NO: 222756

SEQ ID NO: 289392 - DNA, 1000 bp, Homo Sapiens
tgagcggctgttagtgcgtcgcagctgctggcgatccggcgaccctcggccggcaggacccgcgggccacgcagccggggccttctcaacgcctcagtacctcggcgggaccgccatggttctgctgcacgtgaagcggggcgacgagagccagttcctgctgcaggcgcctgggagtaccgagctggaggagctcacggtgcaggtggcccgggtctataatgggcggctcaaggtgcagcgcctctgctcagaaatggaagaattagccgaacatggcatatttctccctcctaatatgcaaggactgaccgatgatcagattgaagaattgaaattgaaggatgaatggggtgaaaaatgcgtacccagcggaggtgcagtgtttaaaaaggatgatattggacgaaggaatgggcaagaaacaagtggaagccggtgtctgtgttaccatggagatggtgaaagatgccttggaccagcttcgaggcgcggtgatgattgtttaccccatggggttgccaccgtatgatcccatccgcatggagtttgaaaataaggaagacttgtcgggaacacaggcagggctcaacgtcattaaagaggcagaggcgcagctgtggtgggcagccaaggagctgagaagaacgaagaagctttcagactacgtggggaagaatgaaaaaaccaaaattatcgccaagattcagcaaaggggacagggagctccagcccgagagcctattattagcagtgaggagcagaagcagctgatgctgtactatcacagaagacaagaggagctcaagagattggaagaaaatgatgatgatgcctatttaaactcaccatgggcggataacactgctttgaaaagacattttcatggagtgaaagacataaagtggagaccaagatgaagttcaccagctgatgacacttccaaagagattagctcacctttctcctaggcaattataatttaaaaaaaaaaaaaaaa

SEQ ID NO: 289393 - DNA, 1000 bp, Homo Sapiens; identical to SEQ ID NO: 222757

SEQ ID NO: 289394 - DNA, 867 bp, Homo Sapiens
attgggctgagtcggagacttcctttcctgattggccgtgttgtacggcggcttctcgcgcagctgatgacctggaagtgatgcctaaagctgtggaccgcgtgggctcgcctccctgggactaggtttcagcggccgctgcgatgaccaaaataaaggcagatcccgacgggcccgaggctcaggcggaggcgtgttccggggagcgcacctaccaggagctgctggtcaaccagaaccccatcgcgcagcccctggcttctcgccgcctcacgcggaagctctacaaatgcatcaagaaagcggtgaagcagaagcagattcggcgcggggtgaaagaggttcagaaatttgtcaacaaaggagaaaaagggatcatggttttggcaggagacacactgcccattgaggtatactgccatctcccagtcatgtgtgaggaccgaaatttgccctatgtctatatcccctctaagacggacctgggtgcagccgcaggctccaagcgccccacctgtgtgataatggtcaagccccatgaggagtaccaggaggcttacgatgagtgcctggaggaggtgcagtccctgcccctacccctatgaggggctccggtagcacctgggcacctgccgctggaagctattgggctggcagcaggacgactggctgtcctcctgcccacccacactgacggcatcttcccagttccccaaggcacgccttcttcccaggcagctctaacagccctttcatgaaggtaatgctagtcttctgtccatcagtgccatttcctgtagaactaaaggctgttccaagaatgtggggtggggaaagtaaatgctaagactaaaaaaaaaaaaaaaa

SEQ ID NO: 289395 - DNA, 1000 bp, Homo Sapiens; identical to SEQ ID NO: 222758

SEQ ID NO: 289396 - DNA, 1000 bp, Homo Sapiens
gtagctgggattacaggcatctgccaccatgcccggcaaatttttgtgtttttagtagagacagggttttgccatgttggccaggctggtctcgaactcctgatctcaggtgattcacccgcctcagccttccaaagtgctgggattataggtgtgagccaccgtgcccggcctggatctgttttcttagcacgcagtgaggaatctttgtacttaaggccagggcaacaaagtcaagaggtcaaggtgtagggccatgaggcctggacctatgctgcaggcaagggtttccatccccgctgccctaggcactctcttcccaaggccaggttgggcacctggggaggtcagttcagaaatatctagcagagacctcttaaacccccatcccagcaccccatcctgttgttcccagagctggtctcccatgagtgtgctagagccagatagccgtggccccccacccatctcactcacacacacaggcatccatacaccccagaagacttcccaaatgaggccagactcagggtcacggggaatgtgcttctgcccctgtaagggctttggggaagggggcaacatagtagaggctggaaagagcccccaaacctgtgcccatgcccctccagccctgcgtttccattctgccttctcagagtgcccttgctgcacccagaccaccggccaggagagaccttctctcccactccagcccctctcactgcccttcaactagagctttcacctttttacatttcccttctgaaggacacaaatctgcttttctgcccatacactggcccaagggctcacctaacttgggagggaaggggctgttggtacaaggatgattttctgttaggctgccattttgcacggtctccccctccccatctgatgtgtcctgcccctcagctctttgccttatctgtgtcactgtcactttagcaaaaatacagcggccatttgtatcaaaaaaaaaaaaaaaaaaaaaaaa

SEQ ID NO: 289397 - DNA, 1000 bp, Homo Sapiens; identical to SEQ ID NO: 222759

SEQ ID NO: 289398 - DNA, 1000 bp, Homo Sapiens; identical to SEQ ID NO: 222760

SEQ ID NO: 289399 - DNA, 1000 bp, Homo Sapiens; identical to SEQ ID NO: 222761

SEQ ID NO: 289400 - DNA, 1000 bp, Homo Sapiens
gatgaggctgtatttttttttctttttcttgtttttgagacaagagtctcgctctgtcacccgggctggagtgtaacgtggcatgatctcagctcactgcaacctctgcctcctgggttcaagcgattatcctgcctcagcctcctgagtagctgggattacaggcatgcgccactatgcccagataatttttttgtatttttagtagagacagggtttcaccatgttggccaggctggtctggaactcctaacctcaggttatccacccaccttggcctcccaaagtgctgggattataggcatgaaccaccgtgcctggccaaagatgtaatttaaaatagttaggagggacttggcatgggccagctccgtgcatggcattttcacccccagagcttcctaatcctgttttcacacaggaagtttctaggtctttctagaacagctagaaatagtagctgactcccgcccaaggcccaaccttcaaaccctgagctcttcaggctgcatcctctggtgagctatagaggagaacgtggctcctaaactctagccatcctgtgggaggaaatagacttctttgggctgtggcttgcagaacaaactacactttttttccctctattgtttaaattttatttaataatttgtgtgtttttctgtctttattttctgtatttcacgtgttccttcactccctagaaactgcactttctttgaaaccataggtaatgaatcttactaggagaggcatggggatagagacagttctgggagtgtgacctgtaagcctcctgtagggcagtgccaggccttgattgcccacgttctctccgttccttcttccttcatacatttgaccacacagcctacacccagccccgagtgtgcatcacggtaaaagagctgagggctctcttcagggagcagcccatttaggtctcttttgttgttgttagggagaatacacatctttcttggaaaaaaaaaaaaaaaaa

SEQ ID NO: 289401 - DNA, 1000 bp, Homo Sapiens; identical to SEQ ID NO: 117498

SEQ ID NO: 289402 - DNA, 1000 bp, Homo Sapiens; identical to SEQ ID NO: 222762

SEQ ID NO: 289403 - DNA, 1000 bp, Homo Sapiens; identical to SEQ ID NO: 117499

SEQ ID NO: 289404 - DNA, 1000 bp, Homo Sapiens; identical to SEQ ID NO: 222764

SEQ ID NO: 289405 - DNA, 1000 bp, Homo Sapiens; identical to SEQ ID NO: 117500

SEQ ID NO: 289406 - DNA, 1000 bp, Homo Sapiens
actgctttcttttatcaaaaaattacgagaaccactcgttttgactattattttatcactctttgtgaaacttcacaatgttcgggaggacattgtgaatgatattacagctgaacacatttctatttggccatcttccattcccaacctccagtctgtggactttgaagctgtggcaatcacagtgaaagagctagttcgatatacactcagtataaatccaaataaccattcttggttaattatccaggcagatatttactttgcaacgaatcagtattcagcagctcttcactattacctccaggcaggagctgtgtgttctgacttctttaacaaggctgtgccccctgatgtttatacagaccaggtaataaaacgaatgataaaatgttgttctttgctgaattgccacacacaggtggctattttatgtcagttcctcagagaaattgactacaaaacagcgtttaaatctctgcaagaacaaaacagtcatgatgctatggactcctactacgactacatatgggatgttaccattttggaatacttgacttatcttcatcataaaagaggagaaacagataaaagacaaattgcaatcaaagccatcggccagacagagttgaatgcaagcaatccagaagaagtgttacagctggcagcgcagagaaggaaaaaaaagtttctccaagcaatggcaaaactttacttttaagcagttaaatttttttaacttttattttttaaacaatgggctaaaaataaacagtattaaaaggttaagtttatataatacatatgtacacaattagtggtgttttcttttcagacaaaatactgaaacaaatattagtttaaaaacaaactatacagaagacttcataccgtaacaataaatgtatagtttcttcaaagggagaagagattcacatatctgataacaaaataaactagcaatctagttttctaatctaaaaaaaaaaaaaaaaaaaaa

SEQ ID NO: 289407 - DNA, 1000 bp, Homo Sapiens; identical to SEQ ID NO: 117501

SEQ ID NO: 289408 - DNA, 1000 bp, Homo Sapiens
tcgtgttttagaaaggtatgtgaataaatatgttcatgctagtataagagttctgtgttactgtggttgactctaaactggggatctgatgtcagtagcaaatgggagagttgctttattctttgtgtatggatttttctaagtgtataaatattttccgacattaaaagacattttctctttgaggaagacacagtcataggtggtgcggagctgtggtccacctgctcctgctcctgactcactgctctttgctgttgcctgaggaccaagtctgtcaggaagctggctaggaagccttgcagcagccatggcttttaaacataccagaaaaacacccgtggagtcagaggtggcaattcaccgaattcatatcactctaacgagttgcaacgtaaaatccctggataaggtgtgtgctgacttgatctgaggagcaaaggaaaagaatcagtgaaaggaccagtttgaatgcctaccaagactttgagaatcactacaagaaaaacttacggtgaaggttctaaggcatgggatcgtttccagatgagaatccacaagcgactcattgacttgcgcagtcctcagatagttaagcagattacttccatcagtattgagccaggagttgagatggaagtcaccattgcaaatgcttaagtcaactgttttcataaattgattaccagttgttaaaaaattttcaaaaaaccgcaaaatttcaagaaattcacaaattatgggagcagttttaagtcttctttggttcagaacacaggtttttgcctaacccctggcatgattgcccataagaacatacatgtacagttgaactggtggttagctatacgggaaatggtaagtagtgttgtcttcagtatcttaatttgtttctgcaactgtgcactcctcccttggtggcaccctatgggtgtaggaaaaccactgttattaaacaggtgaaaaataaaaaatttttcaaaaaaaaaaaaaaaaaaaa

SEQ ID NO: 289409 - DNA, 1000 bp, Homo Sapiens; identical to SEQ ID NO: 117502

SEQ ID NO: 289410 - DNA, 1000 bp, Homo Sapiens
acaagatcctcagcgggcagcggaagctcgagatggaggggcggcaggtgctggaggtcaagatgcaggtggagtacatgtcattcagcgcacacgcggacgccaagggcatcatgcagctggtgggccaggcagagccggagagcgtgctgctggtgcatggcgaggccaagaagatggagttcctgaagcagaagatcgagcaggagctccgggtcaactgctacatgccggccaatggcgagacggtgacgctgcccacaagccccagcatccccgtaggcatctcgctggggctgctgaagcgggagatggcgcaggggctgctccctgaggccaagaagcctcggctcctgcacggcaccctgatcatgaaggacagcaacttccggctggtgtcctcagagcaagccctcaaagagctgggtctggctgagcaccagctgcgcttcacctgccgcgtgcacctgcatgacacacgcaaggagcaggagacggcattgcgcgtctacagccacctcaagagcgtcctgaaggaccactgtgtgcagcacctcccggacggctctgtgactgtggagtccgtcctcctccaggccgccgccccttctgaggacccaggcaccaaggtgctgctggtctcctggacctaccaggacgaggagctggggagcttcctcacatctctgctgaagaagggcctcccccaggcccccagctgaggccggcaactcacccagccgccacctctgccctctcccagctggacagaccctgggcctgcacttcaggactgtgggtgccctgggtgaacagaccctgcaggtcccatccctggggacagaggccttgtgtcacctgcctgcccaggcagctgtttgcagctgaagaaacaaactggtctccaggctgtcttgcctttattcctggttagggcaggtggtcctagacagcagtttccagtaaaagctgaacaaaagacaaaaaaaaaaaaaaaaaa

SEQ ID NO: 289411 - DNA, 1000 bp, Homo Sapiens; identical to SEQ ID NO: 117504

SEQ ID NO: 289412 - DNA, 1000 bp, Homo Sapiens
acccttattcctattacaaatttcagctgtgggatatttgctggtattctggcctcactggtaactcaacctgcgggtgttatcaaaactcatatgcagctttatccactgaagtttcaatggattggccaagcagtgacacttattttcaaagactatggactacgtggcttcttccaaggtggcatcccccgagccctccgcagaactctaatggcagcaatggcgtggacggtgtatgaagagatgatggccaagatgggcctgaagtcctgaccaagagaggactgggaacgggtgaaatctgttgccctgcctggtttctgccaagggctgctgcttcttactattctgcagtaagatgaagtcctacctggaaaaccaggcagaaattgtgttgcctttgccttcagtaatccccttaaggagaaaatatatggacctgatttcagccttcagaatctccaaaagaggagtcatcaattcatagagcacactagggtgttaggagagagctttgcatactctgagaggctacttggaaaggcattttcccaggagagctctgtcaggtggctgcgcttcagccccacccctacaccacagggtctccttgggtatgttcttgggcaagcaatcacaaagccagagaagctgtaagctgcctgccgggcctgaggagctccaaccagggaagactggatgtgaggagaggagtcactgtcaccaggtcacagactgactgaggtgatggtaggatgaggaggaacagatgcccttctttaattggttctcagttaacttctcagaggctctggagaacgggacagtggctttctagcctctgaatgttccaaataaaattttttggtcttggcccctgtactgttttacctctaaattctggcatttttttttccctgcaattaaagtgctgtactttatttattgaactttatcattgaaagctgtttggaaaacctaaaaaaaaaaaaaaaaa

SEQ ID NO: 289413 - DNA, 1000 bp, Homo Sapiens
gctttgtgatcctctccctgctgctggtgcccatgtactacatccccgccggctccttcagcggaaaccctcgtgggacactggaggatgcattggacgccttctgccaggtgggccagcagccgctcattgccgtggcactgctgggcaacatcagcagcattgccttcttcaacttcgcaggcatcagcgtcaccaaggaactgagcgccaccacccgcatggtgttggacagcttgcgcaccgttgtcatctgggcactgagcctggcactgggctgggaggccttccatgcactgcagatccttggcttcctcatactccttataggcactgccctctacaatgggctacaccgtccgctgctgggccgcctgtccaggggccggcccctggcagaggagagcgagcaggagagactgctgggtggcacccgcactcccatcaatgatgccagctgaggttccctggaggcttctactgccacccgggtgctccttctccctgagactgaggccacacaggctggtgggccccgaatgccctatccccaaggcctcaccctgtcccctccctgcagaacccccagggcagctgctgccacagaagataacaacacccaagtcctctttttctcactaccacctgcagggtggtgttacccagcccccacaagcctgagtgcagtggcacgatctcggcggctcactacaacctctgcctcaagcgatcctcccatctcagcctcccaaagtgctgggattacagacctgagccaccacacctgggcaacagagtgaaacctgtccctgttttcctgctcttactctcacctccgaggcctcctctgcctggaagagattacagggaaattccaggcaaaaaaaaaaaaaaaaaaaaaaaaaaaaaaaaaaaaaaaaaaaaaaaaaaaaaaaaaaaaaaaaaaaaaaaaaaaaaaaaaaaaaaaaaaaaaaaaaaaaaaaaaaaaaaaaaaaaaaaa

SEQ ID NO: 289414 - DNA, 1000 bp, Homo Sapiens
caccctcaataaacaccacaaagttcacactgcagaaaggccttatgtatgtggggaatgtgggaaagcttttatgttcaaatctaaacttgttaggcaccagagaactcacactggagaaaggccttttgagtgcagtgaatgtgggaaattttttagacaaagctataccctcgttgaacaccagaaaattcacactggattaaggccttacgactgtggacagtgcgggaaatcctttatccaaaagtctagcctcattcaacaccaagtggttcacacaggagaaaggccatatgagtgtggcaaatgtgggaagtcctttacacaacactctggcctcattctccaccgaaaatctcacactgtggagaggcctcgtgacagcagcaaatgtggaaaaccctacagcccaagatctaacattgtttaactcttgaaactccaaacctgagaaaagccttagacctgcagggaatgtgccatgtctttcttcagtgttatggctatagagagcctttgtgaaggagccgtctgcctaaagttaaacctcatacttctagacctcccgatgggtcagactcccattagttccaggcatatgtgtcttgcaggagctcctttgcatgttctaaactgctggaggcctttgccagagttaaatcattagtcacccttgcatactaaggcgaggcagatacacctgtgttctcccaacccttggaggaaattccttgagcagtctgagcctttaaggggaattccttcccttttctgactgattacagcatacatctgaccagttttggccagaagggcccagcctgggttctgctggaagctgatgtggaaggcttcccttcatggaaattcttgttttcacacaacacttggtagtttttccagcctccaagtcaccacctagtaactggctgcctcacattgctctggtttgtgtggtaataaaggccttatttttaaatctaaaaaaaaaaaaaaa

SEQ ID NO: 289415 - DNA, 1000 bp, Homo Sapiens
ataggaagtgcaaaaaaacggctccccaactccaccacagcttttgttcggaaagatgccttgccactgggaaccttttccaagtatacttggcatatcactaatatcctgcaagttaaacaaatcttagataccccagagatgcccttggaaatcacccgtagctttatccagaaccgagatgggacttatgagctatttaaatgccctaaagtggaagtagaaagcatagcagaaacctacggtcgtatagaaaaacaaccagtgctgcgacccttggaactaaaaacttttctcaaagttggcaacacttccccagatcaaaaggagccaacacctttcatcatcgagtggatcccagatatccttccccaatctaagattggcgagctgcggatcaagtttgagtatggccaccaccggaatgggcatgtggcggagtaccaagaccagcggccccccttggaccagcccttggaactggcccctctgaccactattactttcccttaaagcaaaacaagataataatcttttgctgcttaatttgcacatccccaccccttgacaactttaaatgctagttaggcacttagatggccctgttccttggtaaactgctcttagctaagatgcaaattctcagtgctttcaagtggattctgttgaagaaaatctcttgtaaatagcctttttgatgctgctgtgtacagtcttcattatgcattgggcagtatttctggctagagttttaaaaggaacagaaagaaaaccagcttattttccttcttacggactcatctttagcgtttatttcaaccttttgctaattctctgagaaatctgcagcactcagccatacaccaacagtgttggaaagttaacaccctggttagggcagaatgttaaagaccatcttggcagagttccagccacgctctttattctgttctcaaataaagcagtgtcactagtttttcctaaaaaaaaaaaaaaaaaa

SEQ ID NO: 289416 - DNA, 1000 bp, Homo Sapiens
caggaaatattaggaagctgtgattttcaaagctaattatgaaaacatttatcattggaatcagtggtgtgacaaacagtggcaaaacaacactggctaagaatttgcagaaacacctcccaaattgcagtgtcatatctcaggatgatttcttcaagccagagtctgagatagagacagataaaaatggatttttgcagtacgatgtgcttgaagcacttaacatggaaaaaatgatgtcagccatttcctgctggatggaaagcgcaagacactctgtggtatcaacagaccaggaaagtgctgaggaaattcccattttaatcatcgaaggttttcttctttttaattataagccccttgacactatatggaatagaagctatttcctgactattccatatgaagaatgtaaaaggaggaggagtacaagggtctatcagcctccagactctccgggatactttgatggccatgtgtggcccatgtatctaaagtacagacaagaaatgcaggacatcacatgggaagttgtgtacctggatggaacaaaatctgaagaggacctctttttgcaagtatatgaagatctaatacaagaactagcaaagcaaaagtgtttgcaagtgacagcataaagacggaacacaacaaatccttcctgaagtgaattaggaaactccaaggagtaatttaagaaccttcaccaagatacaatgtatactgtggtacaatgacagccattgtttcatatgtttgatttttattgcacatggttttcccaacatgtggaacaataaatatccatgccaatggacaggactgtaccttagcaagttgctccctctccagggagcgcatagatacagcagagctcacagtgagtcagaaagtctccactttctgaacatagctctataacaatgattgtcaaacttttctaactggagctcagagtaagaaataaagattacatcacaatccaaaaaaaaaaaaaaaa

SEQ ID NO: 289417 - DNA, 1000 bp, Homo Sapiens; identical to SEQ ID NO: 117508

SEQ ID NO: 289418 - DNA, 1000 bp, Homo Sapiens; identical to SEQ ID NO: 222768

SEQ ID NO: 289419 - DNA, 1000 bp, Homo Sapiens
cccttctgtttcttcaattgctatttggacaatcctgagaagacagctgcatcagaacaaggggacttttacatcacaggggaccgagctcgcatggacaaggatggctacttttggttcatgggaagaaacgacgatgtgatcaattcttcaagctaccggatcgggcctgttgaagtggaaagtgccctggcagagcatcctgctgtcctggagtcggctgtggtcagcagcccagaccccatcaggggagaggtggtaaaggcatttatagtccttactccagcctactcctctcatgacccagaggcactaacgcgggaactccaggagcatgtgaaaagggtgactgctccatacaaataccccaggaaggtggcctttgtttcagaactgccaaagacggtttctggaaagatccaaaggagtaaattgcgaagtcaggagtgggggaaatgaggtgcaccccaggaaggccccgtagacctccgaagactccacaagaaactaatggatcactggtcagtccccatggggagcatcatctcttcgaccctaaagatgtcaaaggtgtgcagcttccaaacggcatccccaggatcactgggcaatgctggaaagagcaaaagaatatcattggccctgatcacatagatgctgcgccgcctagcaaatgcttggtggttcgacttctccctctgtctgggggcaggctcagcatctgcccactggtctcactaagagctttcagatttccctccataggacaggttaccatagacttggggcacttgtgggtactcattttctgccagtgggaatgtaaaggcttcatcctttgtatgtaaccatttggcaaaagtatgcaggaacataaaataaaatatcctttagctcagaaattctatcttcgggagtcaccacaaaagaaaaaaatcaaaatgcagaaaatgtgtggtgcactaagatgatcacacagcattaaaactaaaaaaaaaaa

SEQ ID NO: 289420 - DNA, 1000 bp, Homo Sapiens; identical to SEQ ID NO: 118685

SEQ ID NO: 289421 - DNA, 1000 bp, Homo Sapiens; identical to SEQ ID NO: 222770

SEQ ID NO: 289422 - DNA, 1000 bp, Homo Sapiens
acatggaagaatgtttatcggctgggctgcagtgcccccaccctcaccttctcctggtgcattcttgtttcatccctgcttctggacttggggtaccctcccaattgccacatcctatctggtcctcttccccagccccatgtggtgacctctttgtcaagagcttgggaacgggccagcctggggaggtaagactgcatcactcccctcctctcccttcctgtgtggcccttgtgaatcagcctccccactctccttggtcattctcaagagtatgagagacagagctccaggcatgtcccatccccatgcacatgtggtaacacacacctgtatcacacatgtgcttacatttccactcacatgcacctctgagcctcccttgctgtcttggacctgtctgttgggtttagtccgtggacatttcagagggagatccccctcccatttaactgtcctcacaggcccttgcctaggatggatgaccaacactgcactcaatgagccagcctctcttttgggggaatcaagcatttgcttcctctagactacagcagggaaagggaggagaaatctgatgtctcaactggcacatgaagcccattcttggaactatgcaaagggcagaggctgggagtttggacgcttagctcctacccctgtcctacctcaccggggcactttcaggggccaggggcctctgaagtctctaggcctatatgggacaatcaattctgactgagctcccccattcccctcgggtgaggatgactgttatttttgtagctgagaacgtggaatcccacgggtttttactgcccttcacccaacctctcccacctccaccccacaatgaatgtatttattgtgagaatggctacacttctttaggaatgcccccacttacaaccaggtgggtggaacaggcatgtgacagagtggggagcctgggctcagctcctccccctgccgttggttaataaacaccctttttccccac

SEQ ID NO: 289423 - DNA, 1000 bp, Homo Sapiens; identical to SEQ ID NO: 117510

SEQ ID NO: 289424 - DNA, 1000 bp, Homo Sapiens
tcctcaaacaaactccacaactgcaggatatttggccttgacattaaaggcagagactgtggcaatgaggcagctaagtggttcaccaacttcttgaaaactgaagcgtatagattggttcaatttgagacaaacatgaagggaagaacatcaagaaaacttctccccactcttgatcagaatttccaggtggcctacccagactactgcccgctcctgatcatgacagatgcctccctggtagatttgaataccaggatggagaagaaaatgaaaatggagaatttcaggccaaatattgtggtgaccggctgtgatgcttttgaggaggatacctgggatgaactcctaattggtagtgtagaagtgaaaaaggtaatggcatgccccaggtgtattttgacaacggtggacccagacactggagtcatagacaggaaacagccactggacaccctgaagagctaccgcctgtgtgatccttctgagagggaattgtacaagttgtctccactttttgggatctattattcagtggaaaaaattggaagcctgagagttggtgaccctgtgtatcggatggtgtagtgatgagtgatggatccactagggtgatatggcttcagcaaccaggagggattgactgagatcttaacaacagcagcaacgatacatcagcaaatccttattatccagccttcaactatctttaccctggaaaacaatctcgatttttgacttttcaaagttgtgtatgctccaggttaatgcaaggaaagtattagaggggggaatatgaaagtatatatataaattttaggtactgaaggctttaaaaataattaagatcatcaaaaatgctattttgaatgttatcatggctattacacttttacttcctgactttaatattgatgaataaagcaagtttaatgaatcaactaaaaagctgcaaaaaaaaaaaaaaaaaaaaaaaaaaaaaaaaaaaaaaaaaaaaaaa

SEQ ID NO: 289425 - DNA, 1000 bp, Homo Sapiens; identical to SEQ ID NO: 117511

SEQ ID NO: 289426 - DNA, 1000 bp, Homo Sapiens
gcaagcctctgggtgtgtgtgtgtgtgtgcgtgcgtgtgtgtgtgtgtgtccgtgtgtgtgtgtgtgtgtccacactggccagcctccctacttaccaaggttctccactgcttaccttttccagtgggacagtacagtgtgagcccccgggaagtactgcctgacctatcctaagcttttacacttggattttagccatcatatgttggccaggtttcactgcagcctgcccgaggctaactggctagagcctccaggccctatgatgctccctgcccaggccatatcctttattcctgctgagcttcctggctgaatagatgaaatggggtcaagcccaggcagctcattcactatctgtgatccacctcagggcacgggcaaacacataggcttgcgtcttaaagccagctcctctgccagaccccgttgtaatgtgccacaacaccctcaatagtcagggcaactggtggagcatggaagtcgaatttccttttctgttaggagctactcctgggaacccctctcagggctgcagcttacaggtgggcagctgtgattgcacaacttgaagggccatcattcacatctattcagtgggagtggggtccctgggattgggcagtgtggtggccctgtgtctcctcacctctgctcctgtcttcatcaccttctctctggaagggaagaggagttggaaggtctctggttttcttttctttttttttttttgccaaaggtttacttccagcatctgagctctggctctcacccctgaagctcagttatagtgcactgatgaactgagaggatgcgtgtggatgtgtgtgcatgcctgagtgcgttttttggggaggggtgtttatttttagtaccccattctggggttctctgatgcagtgtggatgtgaagatatggtaccttctcaagtgtagctctttcaaatatagtcaatgctgggaaaaaaaaaaaaaaaaaaaaaaaaaaaaaaaaaaaaa

SEQ ID NO: 289427 - DNA, 1000 bp, Homo Sapiens
ttttgagtgaaagaatgcaggagcctccactcactgcaggaatcccttctacaattcctgctcagtgagcccccagcctcttctggattggcacgggtggaatcagactgaccagagttgaaatctggcttctccgccttgtggaacttgcagcaagccacttacccccacaaacttcagttcccaaatctgtaagatataaataacaacactttccttaaaatgttgtcaacagacacagtgaggtagcatctaaagcacagtgccttggacatagggggtgcttttctgaaagccagtagaggtcatttaatatagtggatcagagctctggctctgaacacagacagccttggttcaaatcccacaacaccacgtgctacgggacctttggcaaaatactcttgcccagattctgagcctcaatttctttatctgtagactggagttgttatgagaattacattagattttgtacgtaaaactcagcatcaagcacacagtaagatttcataagagactgactgctactaatttaatattaggcatatttttgaattatctcactgtctcttgatgcagtccactgcatagtcattcagctctgcaagttacacacttaggtgagttctgcctcctgctagcttcccgcactggtcccagacctgcctcctagagcccacacagagcccatgtgcttgaggaagccgactcggagctcccagtttacttcactgcaagccgaagagtcctcccatcccctcatcttctccactactatccacatgacctagtggcaaatctactcccagtcttggtctcagtggcttaattactttgccagcaggtacgaggcaggagtgaaattccttcactgtcgtggatgtggttattattctagataataatgacattaaccataatagtaaataataaaatatctctataaaattctgcatttcatcaagcaaaaaaaaaaaaaaaaaaaaaaaaaaaaaaa

SEQ ID NO: 289428 - DNA, 1000 bp, Homo Sapiens
aaaaatataaaacaaaatgctcacatagtagaatggtccccaagaggagagcagtatgtagttatcatacagaataaaatagacatctatcagcttgacactgcatccattagtggcaccatcacaaatgaaaagagaatttcctctgttaaatttctttcagagtctgtccttgcagtggctggagatgaagaagttataaggttttttgactgtgattcactagtgtgcctctgcgaatttaaagctcatgaaaacagggtaaaggacatgttcagttttgaaattccagagcatcatgttattgtttcagcatcgagtgatggtttcatcaaaatgtggaagcttaagcaggataagaaagttcccccatctttactctgtgaaataaacactaatgccaggctgacgtgtcttggagtgtggctagacaaagtggcagacatgaaagaaagccttcctccagctgcagagccttctcctgtaagtaaagaacagtccaaaattggcaaaaaggagcctggtgacacagtgcacaaagaagaaaagcggtcaaaacctaacacaaagaaacgcggtttaacaggtgacagtaagaaagcaacaaaagaaagtggcctgatatcaaccaagaagaggaaaatggtagaaatgttggaaaagaagaggaaaaagaagaaaataaaaacaatgcagtgaatcacagatgtctcctgaaagaactcttttagatgaaatcattctactcaaatgtaccttaattttttttttttccctgagtaaaagcaagaaatttcttcctttggaaaaaatatatatattaaaaaaccacttttagatggttttttttaaaaaaaaaaaaaaaactggtaaaattacttttggcagacagtgttttatgaattatgtatcatgttgatatataatatgttaatgtgtcatgtaatttttactttgtacaaagcaaataaagatctttctcaaaaaaaaaaaaaaaaaa

SEQ ID NO: 289429 - DNA, 1000 bp, Homo Sapiens; identical to SEQ ID NO: 222775

SEQ ID NO: 289430 - DNA, 1000 bp, Homo Sapiens
ttctagaaaaacatgaaattcagccctatgaaatcgcactggtacactgggaaaatgaagaacttaactacataaaaatagagggacagtcaaaacttcacaggggggaaatcaagttaaattcagagctggatttagatgatgccattctagagaagtttgctttctccaatgctctatgcctttctgtaaaactggcaatttgggaagcatcactggataaatttattgaatctattcagtcaattcctgaggctttaaaagctgggaagaaagtgaaactatctcatgaagaagttatgcagaaaatcggtgaactctttgctctaaggcaccgtataaacttgagttcagacttcctgattactcctgatttctactgggacagagaaaacctggaaggactttacgataaaacgtgtcaattccttagcattggccgaagagttaaggtcatgaatgaaaaacttcagcactgcatggaactaacagatctaatgcggaatcacctgaatgagaagagggcactccgcttggagtggatgattgtcatcctcattaccatagaggtaatgtttgagctgggacgagtatttttctgatcaagtgataaccaaagtgtcactgcaagagatattcaagttctacaatcaaaaattaaatgttcggcccggcgcggtgcctcatgcctgtaatcccagcactttcggaggccaagaagggtggcttgagatgagatcaggagctcaagacaagcctggccaacatggtgaaaccccatctctactaaaaataccaaaattagccaggtgtgttggcacacgcccgtcatctcagctactcaggaggctgaggcaggagaatctcttgaacttgggaggcggaggttgcagtgagctaagatcacaccactgcactccagccagggcaacagtgagactcagtctcaaaaataaacaataaaataaataaataaatgttcaaaaaaaaaaaaaaaaaa

SEQ ID NO: 289431 - DNA, 1000 bp, Homo Sapiens
acaacctgctggaggcctttggccggcggcagaacaagcccatggagtccctggacttgaaggacaagaccaaggtccttgaatgggcaagagggcacatgaagtacggcgtcctccacattcacggcctctacacggacccctgcggggtggtgctggacccatcggggtataaagacgtcactcaagacgcagaagtcatggaagtcctccagaacttataccgcaccaagtcctttctgtttgtgggctgtggggagacccttcatgatcagatattccaggccctctttctttactccgtgccgaataaggtggatttggagcactacatgcttgtgctgaaggagaatgaagaccatttctttaagcatcaggcagatatgcttctgcacggaatcaaagttgtatcctacggggactgttttgaccactttccaggatatgtgcaagaccttgccactcagatctgcaaacagcaaagcccagatgctgatcgcgtggacagcaccacattattgggtaatgcatgccaggactgtgcaaagaggaagttagaagagaatggaattgaagtttcaaaaaaacgcacacaatcagatactgatgatgctggagggtcttgaaatctttacagtaaaacctgcaacttgaaaactagccttctgtaaccacagtgcccaaacgaagaggaatgtatggagaactccacgtggatctctgattgcgaaaccgtcacatacaccaagagagccacatgggcatgtggccctgaaggctgggtgagagggctcccctgtgtgttgaactatgcaggagggtgacgcggacacatttcaggtggactttgcaaggactgatggatagctacctcagggaccagaatccgtgggaagggatggacctggtgttcccgttcccatctgacaggctctcttttgtcaaggtggtatttttcgtaataaaaggggaagagtaaagacaaaaaaaaaaaaaaaaa

SEQ ID NO: 289432 - DNA, 1000 bp, Homo Sapiens
tgagtcgatgggatgatagccagagatttttgtctgaccatccataccttgtatgtgaagaaactgctaaatatcttattttatggtgttttcacctggaagctgagaagaaaggggctttaatggaacaaatagcacatcaagctgttgtaatgcagtttattatggaaatggccaaaaactgtaatgtggatccaagagggtgttttcgtttatttttccagaaagccaaagcagaggaagaaggttattttgaagcattcaaaaatgaacttgaagctttcaagtcaagagtaagactttattctcaatcacaaagttttcaacctatgacagttcagaatcatgttccccattctggtgttggatctataggtttattagaatccttaccacagaatccagattatcttcagtattctatcagtacagctctctgcagcttaaactcggtggtacataaagaagatgatgaacccaaaatgatggacactgtataatttggttaagactgctgaggccaagtgctattttgttacaagaaaggaagaacttggctattttcttgacacttttatgggtgctgcactttatttttgttcggtttttgatgggagggaaagagtactgaaatgttttgtaaattttttttaatgtgctgctaggttttttgttttgttttgttctgaagagaagagtggtaccatatgttgcaggaagtcaaactggactttttgtggctactaaatttgcttttaatcttattgttctcaattttggaatcaagtatgaaaatctgcacaaatgcaatgtttacaagaactggttgattctgggaggcatctgctacagtctctttttatatggatatgtacatgtcctattctacaaaaatgattaaagataaaaacatacttgtatcccactgctactttagctgtcaaatttggtgtttcatcacattaaaagcaataaatcagtaaaaaaaaaaaaaaaaaaa

SEQ ID NO: 289433 - DNA, 1000 bp, Homo Sapiens
gaagacacaatccatcatcatggaacgtctattcttacactttttaggtctcccacacaggtgaataatttgataaaacccctaagagaacgcatctgtgtgtcaatgcaagagaaaaaaattaagatgaagcaaactttaattagatcccaatttgcttgtacttataaagatgactacatgataagcaaggataattggaataatgttaatttagcatcaaagcctttgtgtgttctttacatggaaaatgacctttctgagggtgtaaatccatctgttggaagatcaacaattggaacgagttttggaaatgttcatctggacagaagtaaaaatgaaaaagtatcaagaaaatcaaccagtcagacaggaaataaaagctcaaaaaggaaacaggtggatttggatggtgaaaatattctctgtgataatagaaatgaaccacctcaacataaaaatgctaaaatacctaagaaatcaaatgattcacagaatagattgtacggcaaactagctaaagtagcaaaaagtaataaatgtactgccaaggacaagttgatttctggccaggcaaagttaactcagttttttagactataaatttgtgtcttatatgctttaggtttatgcatctataaaccattcaccaaagacatgcttaatttttaagagatcaaggtgtaaattatgatgatttattattttggtctacagtgtatgtaaggttagtatgttaagcactgtttttgactttttaaaaataccttagatgcaaatttataggagaaaaaacactttcagataagaggtgtttgctgggatggaagaactacctggcatgtaagaaatatcgtcagtcgtcctaatgcatattgtgactgtttgcatatacttctgtttataaaagtatcagttttacttttcagaggatttgtaagaatcatttaaattttcattgaaataaacgacaagtcacattgaaaaaaaaaaaaaaaaa

SEQ ID NO: 289434 - DNA, 1000 bp, Homo Sapiens; identical to SEQ ID NO: 117516

SEQ ID NO: 289435 - DNA, 1000 bp, Homo Sapiens; identical to SEQ ID NO: 222776

SEQ ID NO: 289436 - DNA, 1000 bp, Homo Sapiens; identical to SEQ ID NO: 117517

SEQ ID NO: 289437 - DNA, 1000 bp, Homo Sapiens
gaattacattttctcagagaaaagtggaatttcttgaagattttggttccgatgttaataagcttctgaatgcttatgatgaacatcaaacactcctgaaagaacaggattctttaaaaaggaaagcagaaaatggatcagaagaaccagaggaaaagaaagcacatacagaagatacaacttcatcatctacacagatgattgatggtgatttacaggcaaaccaagctgtatataattatagtgcgtggtatcaatacaattatcagaatccttggaattatggacaatattatcctccccctccaacctgatgggaaaaatgtaaatttcaaatgcagtgtgtgaaaagtatgaaattattattttttttaatgagggatgtaaacagtataagcttgttgtatttgataacctgtcttccttgtttctgtgtaacatgatttgtttagtaatagggggaaaatgtcaattagtagcttaccacagatactgtttcctaccatttataaaatttactttttattgaaaaactattttttgatttttgcattaagtggtctagaattcttttgcaatgcatttgcaacagaattttgtagccttaaggggtaggaagaaaaacctgactgcaaatcatgtcagtgtagtacaaaattctgaaaacacataagggctggttatttacctccttttttttttttttttttaaagaaaaaaggacttttaacctttgctgacaaggttttgtctgtttcagttatacttgtgaattgtgatctaactgcagaaaggatacattattaaaatactttgccttggaatagattataaatgagaaaatggaatgtttgcatccctttaaaaatgaaaatcatatcaaaagtatgttgtttcaggagactttgtatttagaatattcatgtaaaacttgtgaacaagctttcattttgatcaaactgatcttcatttttgtaataaaacggaagactcatccagt

SEQ ID NO: 289438 - DNA, 1000 bp, Homo Sapiens
acaagaaacaagcactttagtagaaaccatcaggcagagtattcagcacaataatgttcttaaacccatcaacctactttcacagcaaatgaagccaggcatgaaaagacaaaggagtttatacagagaaatcctcttcttatcattagtgtctctaggaagagagaatattgatattgaggcatttgacaatgaatatggaattgcatacaatagtctgtcttcagagattcttgaaaggttgcagaaaattgatgctccaccaagtgccagtgtcgagtggtgcaggaagtgttttggagcgcctctcatttaaatagagattcactagaatgttgacacacaaggcttggggattagatttcatctggaaacattcaagttttttttccaaatcgtaagaactggtgaatacggaattgaagtaactcttggggacaatatataatgaattatgattcatattgcattaccttgaaatatgaagtgccatttgaatgtcccagggcttattaatattgaagattttcaacccctgaactgcttttctgcctctgtggaaaactactttgggattcttcagtatttgtagtagtttgatagaaataatgaggaaccatattcattctaggcattgtttatatttgaagttactgagtttgaggaatggcaaattaaatttgcctaacccccaaaacaaatgaaatatctcaattataaaagcaacatggccgggcacggtggctcaggcctgtaatcccagcactttgggaggctgagcaaggtgggtggatcacttgaggccaggagttcgagaccagcctggccaacacggtgagaccctgtctttactaaaaatacaaaaattagccaggcgcaccactgtagtcccagctactcaggctgaggcaggagaatcgcttgaactgaggcagaggctacagtgagtggagatcacgccactgcaactccagcttgggtgacagagtgagaccgtctc

SEQ ID NO: 289439 - DNA, 1000 bp, Homo Sapiens
tgttatgtccttagttttaattttgagtaaagaaaaggctaaaatcatgaattagttacaagcaacagtaccaacttatgtgacccctgaggggtggggctgtgagctcttaatttgtttttgattctgaaaaactctgcttcctggcatccaggagttagagattgagcctttcatcttctttctcaaaactagtttttgatgctttctttcatgggaatagtcacttttttatttagtaaatcgcattgctggaaccaccaaggagtgtggaatgtccttgagtgtattatttatgcaagtcacagtcacgttgccatcatggcagctatgtgaaacactaataaatgtgtttttactttttattcccgttaaaactgatgtaaaacaggataaaggcttgttatagtcacttataagtatctgggtctaagtaatttccttagatgtttctaaagaaacattttcagctttgctcccattatgattccaataaggaacgctttcctagtgcaattttaggagtaaagtttgaagagataaaaatagccaaagataggagacgtctgaattttgaatgataaacagtgatgttttaaaaaagctgttgttcttcaggaggcatttgcctaggatattgctggattataccccattggaggcttttaattttatttgtatgaattttccaggatttcattaaaaattattattgtattttttaccttaatgaaagattttgggttcaaatatctttctatattaaaagctgattgagtctgtacatatgtaaattatgcctagtggaggttctgttgactttcttccccactgtggaagaggccagttttgcctccatttgcacattcatttcagttatttctgatccataaatataacatttacaaaattcttccttgagctggtggaaatgcctcaccagtttcctctttaatgaatcaaataaaatctttaactgatgttaaaaaaaaaaaaaaaa

SEQ ID NO: 289440 - DNA, 1000 bp, Homo Sapiens
ttccagataagcaacaaggtatgagcacctgctatgtattgcccaagggtgatgtgtttaaatatccattgcatattttaaatccttggctggcttaaagctgcaagctttctgtcttcagtggatataatgggggcatacatcccagagcttgcccaacactccaagaaaagaaccctcagctaatgcaaagtgtgtatgtgcccatgaaagctccatgtctacttaacattcagtttttaggattatttatgctgtaataatagatatgaaaatctctgacaggtattttgtttcctttacaaactgtatttgaatttatgggtgatttagagcttgtgtttaaagtcagaattcagaaccccaaagaaaatgacttcattgaaattgaactgaagagacaagaactgagttaccaaaacctactaaacgtgagttgctgtgaactggggattaaaccagaacgagtggagaagatcagaaagctaccaaacacactgctcagaaaggacaaagacattcgaagactgcgggactttcaggaagtggaactcattttaatgaaaaatggaagctccagattgacagaatatgtgccatctctgacagaaaggccctgctatgatagcaaagctgcaaaaatgacttattaaatactcccaggaatggccgcgcatggtggctcaccccctgtaatcccagcactttgggaagccaaggtgggcggatcacctgaggtcaggagttctagaccagcctggccaacatatagtgaaacccagtctctactaaaaaaaatacaaaaattagctaggtgtggtggcgcacacctgtagtagtcccagctacatgggaagctgaggcaggagaatcacctgaacccaggaggcagaggttgcagtgagctgagattgcgccactgcactccagcctggcgacagagcaagactctgtctctcaaaataaataaataaataaataaataaataaataaataatc

SEQ ID NO: 289441 - DNA, 1000 bp, Homo Sapiens; identical to SEQ ID NO: 222779

SEQ ID NO: 289442 - DNA, 1000 bp, Homo Sapiens; identical to SEQ ID NO: 222780

SEQ ID NO: 289443 - DNA, 1000 bp, Homo Sapiens
tgcaattactaatgaccccttccctttccctcctgctgccctgtccaccctctttccccttctaacatccttagagggatgaaatctcagcatatgttgcaggacaccaaaaggaagaaaacaatcaagcaaataaaataaacagtcaaacaaaccaggagtttaaaacaacaaccccaacaacagaagccttggcaaagaggaataagtgatcagcaagtgaacacactctatgtcaactctccttttatccagctgagatttatggtaacttatttaattaatggtcctgtctgatgcatccttgatggcaagcttcaaatctgatttgctatcaccgaggaaaccttgcccccatcactcagcattgcacttagatacagaatgagttagataaacttggcttgtctagagacccatgtcatcttaacctaaagggaaatcttattgcgttatcataaaattgatgatatcttagggtcagaattgccctttttttttattttgaatgggaagttctcactaaaacaatcctgagatttcttaatttcatggttctttaaatattataaacacagagtcaacatagaatgaaattgtatttgttaaaatacacacattggaggacaagagcagatgactacttttcgaagtaatgctgctccttcctaaaagtctgttttcaatcctggtaatattaggggcactgcggcacctaagaagccttaaatgagagctaatccaatctagagagcgatggtgtcagcatttcggtctgcatatctgtgtgtccgtatctgcgtttgtgtgcgtgtacgtgtgcccctgtgtgtgggcccagttttcaggcatgtagaataagcatggagtcatattgaggaggactcacttcttgaagatatgcttgttgctttacaacatatgtaagctattctttagcataaatgcattcattctttaataaaaatatgtttgcattaataaagctgaggagtttcat

SEQ ID NO: 289444 - DNA, 1000 bp, Homo Sapiens
aataccagggaaaacaatactagagaattctgtgaaacattccaaagctttgaatactctttccagtcctggtcaatccagttttagtcatggcactaggaataattctgcaaaagaaaacatggaaaaggaaaagccagtcaaacgtaaaatgaagtcatctgtactcccaaaggcgtccactctttcaaagtcatcagctgtcattgagcaaggagattgtaagaacaacgctcttgtaccaggaaccattcaagtaaatggccatggaggacagccatcaaaacttgtgaagaggggacctggaaggaaacctaaagtagaagttaataccaatagtggtgaaattatacacaagaaaaggggtagaaagcccaaaaagctacagtatgcaaagccagaagatttagagcaaaataatgtgcatcccatcagagatgaagtacttccttcttcaacatgcaattttctttctgaaactaataatgtaaaggaagatttgttacagaaaaagaatcgtggaggtaggaagcccaaaaggaagatgaagacacaaaaattagatgcagatctcctagtccctgcaagtgtcaaagtgttaaggagaagtaaccgaaaaaagatagatgatcctatagatgaggaagaagagtttgaagaactcaaaggctctgaaccccacatgagaactagaaatcaaggtcgaaggacagctttctataatgaggatgactctgaagaggagcaaaggcagctgttgttcgaagacacctctttaacttttggaacttctagtagaggacgagtccgaaagttgactgaaaaagcaaaagctaatttaattggttggtaacttgtaccaaaatattttacttcaaaatctataaagcaggtacagttaaggaataagtagaactaaggcttctgcttccttgctgctgtggtggagtagggaatgttatgatttgatttgcaaaaaaaaaaaaaaaaaaaaaaaaaa

SEQ ID NO: 289445 - DNA, 1000 bp, Homo Sapiens; identical to SEQ ID NO: 117520

SEQ ID NO: 289446 - DNA, 1000 bp, Homo Sapiens
ggaatcactggcagcgtccttgccaaagaagatggtacacttgaaactcttaagaacattgggtgctttctgcttgaagttaccaccaaagatccttcccttgtggtagcaggagaagctttggatgccctctttgatgtttttgcagatggtaaagaagccgaaagagcctcgattcaaattaaattattatctgctctgaaagaattccagccggtctttaaaatgaagatacgtaaagaagggagaggtaactatagcacagatcagctgtgtgttcttgacaatgtgaaaatgaatttgcgaagatttattgcttatcaagaaactgttgagaaaagactgacttcttaaacaatccaaaaaagaaaccagttcttcccccaaagtattcaatgcttagaatactaaaaggttttctttgaatgtatatgtttctgaaagtcattttttaatgattacaggcgtgagccaccgtgcctggccagaaactcttttttaagcgatgagatctgtgtggcatttctagcgctctctaaattatgtctctggcatattttaatcactggaaactcaaagagtggaagagtggaagtgcgaaggaatctcaggtagctcttaactaattcgccagcagtgaagaaacttcaaccaatcatgttttccttgaattttgcaaagaaagaaaatccaaagcattgcttggatgttcttttaaggcattttatatcagttgaaccttaaactgaaatatgaagacaagctttataaactagttttttgatatgaagtatatcaattatgtttgccttttgtgaagaagtaaatgagttgaatttgtatttcacttactagattatactaatgagctaatggggtcattgccatcctccctactcatgactttgatgagttattgctgtaacatcacttcttgatttaatttgatatggaatcagaattgggagaaggtatttttaaataaacaactttttaatgg

SEQ ID NO: 289447 - DNA, 1000 bp, Homo Sapiens; identical to SEQ ID NO: 117521

SEQ ID NO: 289448 - DNA, 1000 bp, Homo Sapiens; identical to SEQ ID NO: 117522

SEQ ID NO: 289449 - DNA, 1000 bp, Homo Sapiens; identical to SEQ ID NO: 117523

SEQ ID NO: 289450 - DNA, 1000 bp, Homo Sapiens
gaggccctagagatagtcattttgcaagtaaagagcaacgggaccctttctaaaaacgttggttgaaggacctaaatacctggccataccatagatttgggatgatgtagtctgtgctaaatattttgctgaagaagcagtttctcagacacaacatctcagaattttaatttttagaaattcatgggaaattggatttttgtaataatcttttgatgttttaaacattggttccctagtcaccatagttaccacttgtattttaagtcatttaaacaagccacggtggggcttttttctcctcagtttgaggagaaaaatcttgatgtcattactcctgaattattacattttggagaataagagggcattttattttattagttactaattcaagctgtgactattgtatatctttccaagagttgaaatgctggcttcagaatcataccagattgtcagtgaagctgatgcctaggaacttttaaagggatcctttcaaaaggatcacttagcaaacacatgttgacttttaactgatgtatgaatattaatactctaaaaatagaaagaccagtaatatataagtcactttacagtgctacttcacacttaaaagtgcatggtatttttcatggtattttgcatgcagccagttaactctcgtagatagagaagtcaggtgatagatgatattaaaaattagcaaacaaaagtgacttgctcagggtcatgcagctgggtgatgatagaagagtgggctttaactggcaggcctgtatgtttacagactaccatactgtaaatatgagctttatggtgtcattctcagaaacttatacatttctgctctcctttctcctaagtttcatgcagatgaatataaggtaatatactattatataattcatttgtgatatccacaataatatgactggcaagaattggtggaaatttgtaattaaaataattattaaacctaaaaaaaaaaaaaaaaaaa

SEQ ID NO: 289451 - DNA, 1000 bp, Homo Sapiens; identical to SEQ ID NO: 222783

SEQ ID NO: 289452 - DNA, 1000 bp, Homo Sapiens; identical to SEQ ID NO: 222784

SEQ ID NO: 289453 - DNA, 1000 bp, Homo Sapiens; identical to SEQ ID NO: 222785

SEQ ID NO: 289454 - DNA, 1000 bp, Homo Sapiens
ggaggaaacgcaaccaagaaaggaaggcaggtgggccccagcaaaggagtagctgccagggctcaacagctacgctctgtgacagcgcagagctcagcgccggcctttccctccctccgccaaggactcacggccaagccagctctcggggccttttttccagtgcccatttggctactctgctgcaccaagcttgggagccagcctgccaacagccacctgggcctggcctccccactggctggccttgaggttggcagagtgggttgtggcgcttcctctctctgtgtgggaccaggacagtggcttaagtctccactccaggaaagaatcaaagtttctagagttgtgagaaaaccagagagtggctgtcctgattcttcactgtgaggggcgttcttcatgttctcccagctgttccaagactgggccgtagaattccatgtttcaggagcctaagaccctcccagagcccaggggcttcaccgcagaccccaagccattgagcacatcacccaaagcagtggccaacatcgcggacccctgtgccttgtcacagatgggtgctggtcctcaggcgttggggacactgctgggtcgatggggtcggattctgccagtttctgctctgcagccaaagatggtcagaagcattgtcacttcagtaacatcaagtgctcaaagacatggcaaccgttcagtggtacttaagtattcaaaatatacaactacagattctctgacagaaaccagcacggggtcttcaccttcattcaccccacaggcgacacgcgagggagaacagcatctcagtggtgatttccaaaccaagcctttgttttcggtgtggggttttgggggtttgctttaatgtttttgaaattgtaaatgttgggctttttattttgatgtaaactgagaataatggcattttagggcctgtgaccaaaaatgaagcttgtaacgaccatggatctgaataaacatgtccttgcttctg

SEQ ID NO: 289455 - DNA, 1000 bp, Homo Sapiens; identical to SEQ ID NO: 222786

SEQ ID NO: 289456 - DNA, 1000 bp, Homo Sapiens
tccataaactgaaaactttttttttcttttttctttctttttttgagatggggtcttggagtgcaagtggtatgagcatagcttcctcaaattcctgggctcgaatggtcctctcactgcagcctcccaacaggctggtaccaccacactcagctaagttttttgttgttttttttttttggtagagacagggttgcgctctttcgcccaggctggtctcaaatttgtggcctcaagcaatccttccacctcagactccaaagcattgggattacaggcatcagccaccacacctggccttgaacattttttatttgttaatttcatgcgtgacgaaacccaaggatcacccatgtcaaccacaaagttggcattccctttagtagaacctcactaaacggaaaggctgtacaacgcaccgtctagccacaggagaactaatcttctatcagttgccctttcttctttggagtttttatgtaacttacccttgtgagacaagttttctacttgagaaactcctagtacaatgtcttatactagaagcctggataaatactattaactactgtttcttatattcacttcagaaaatcagtggctccacattgtttgagccattagtgataacaaatttggatctacttactcaagtcttatgaattctgtgcctttcatcacattcctagcccactctcatcattactgcagaagggtgttgtgatgaccagttttatactgtgttttgatatgtctagcaataacttaaagaaaaaaaaacctgggaaatcttcaacatgttattggaacatatatgtatgtattaatgtatatacatggcttaacttatacgttatggcagctctgtatacagtttgatctcatgtactgaaaaaaaattcttaattttattggagtttataccactgtgaaactgcaatatgactgtaagagagtaaaaagattgttacatctaaaaaaaaaaaaaaaaaaaaaaaaa

SEQ ID NO: 289457 - DNA, 1000 bp, Homo Sapiens; identical to SEQ ID NO: 117525

SEQ ID NO: 289458 - DNA, 1000 bp, Homo Sapiens
aaagacccggaaccccttcctgacaggtctcagcgctccgtcccccaccaacccgttcggcgcgggcgagacgggcaggccgacgctaaaccagatgcgcaccggctcgccggcgctgggcctggcaggcgggcctgtgggggcgcccctgggctccatgacctacagcgcctctctgcccctcccgctcagcagcgtgccagctggcttgaccctccccgcctcggttagcgtcttcccgcaggccggagccttcgcaccgcagccgctgctgcccacgccgagctcagccgggccgcggcccccgcccccgcagaccggcaccaaccccttcctctgagccccgccccgtcccataccggcctgcgcctgcgccggacgctccgcggccccgcctccggacccggggctgggcggggcgccggtgctagtggaacgccgtgccagtggcggctggtatcccgcggcggctctggaagctggacgcggaccacggcccgggagctagaaactgaacgcccgcataataaagactggaacccacgttctcagctctcaccaagtggactttttgcggggtgtggcggccgggtctcgaccacagcgtggatcaccggctgtttaggaaactgcagctgcacaacgtggggtgcaaaactgccccgcttcctttacagctcttctcaaccctcacctccatcccccgtcacccaggcaccttcgcttccagatgctgccaggctgtcactcaattcggtcatttcattcatttatcacacatgggcactggggttgggctaacagcaagagacaataggcctttgttcctatttattgggtactgcttacgtgctaagcagatcagtttatttaatgcttgcaacgactctctgaggtagaaaatattgttaattccgttcaggatcccggctacataatctgtggggctcaatacaaaataaaaatgtaggggctccttgttcaaaaaaaaaaaaaaaaa

SEQ ID NO: 289459 - DNA, 1000 bp, Homo Sapiens; identical to SEQ ID NO: 222787

SEQ ID NO: 289460 - DNA, 1000 bp, Homo Sapiens; identical to SEQ ID NO: 117526

SEQ ID NO: 289461 - DNA, 1000 bp, Homo Sapiens
tgatgtcagacaagcttgtcctatgtcctatttgagtggcagcagcgccagcccagcaagaaggctgggggttgtcaaggttgtccccagaccttgcttgcagtggttggagaacccagggggctgccttgggccctctggccagagggaagcgggcagctctagccctggagattgtggtcacattggggcttgtttaggattggagggccaggtcacctccccagccaccctcccttctctcctctggggtccccactttagggcgactttgcccgaggcccacgcatccatccactcctttagtgccttgaatctcattcacaagcagccccctcccttcccctccccttctcactctgttgatgtaatcctcccacccccagtgtccatcctaagacaggcatcaaaagaggccctaactttacttcccaaatggtgctttttaaaaaacaccatcactacattaggggcaattttttcacacctccctgtcttcagaatgtaaagggtggggattatgtctctgtttaatatgcagccccctgcactgtggggtttggggcatgttcagtaataagaatgaatacaatagacaaagggggtgtgatgagtgttaacttggttgttccagaggtaaaccaggtctcagggaagagcctggagctgctattgcttaggaagttgtacgtgccttgaaatgtccactacctgaggacgcagcatctggtgggcccggggctgctggggccaaggagggaccttgaccttctggtgcctgcccctccccggcctatgtgccatccgcgtgacgctaggtcagcgctgccggttctttaccaaatgtgcttgcttctcctaagttatttataaagagaaatcactaatggactctactggtttgagtgcttctgagctggatgaccgaccgcctgtatgtttgtgtaattaattgccataataaactttgatgagtcacataaaaaaaaaaaaaaaaaaa

SEQ ID NO: 289462 - DNA, 1000 bp, Homo Sapiens; identical to SEQ ID NO: 117527

SEQ ID NO: 289463 - DNA, 1000 bp, Homo Sapiens; identical to SEQ ID NO: 222790

SEQ ID NO: 289464 - DNA, 1000 bp, Homo Sapiens; identical to SEQ ID NO: 222778

SEQ ID NO: 289465 - DNA, 1000 bp, Homo Sapiens
aaatcagcccccacatcaaggtggtgttctctgtgctttctctcgtccttccaaagtcggttctggcctaacgcatgtcccaacaccttgggttcatttgcccggtgaactcactttaagcattggattaacggaaactcccgaactacagacccctccctggtgggttgcatgaatgtgtctcattactgctgaaatgtcctcacatctctttcactgttcttcagagctttctggctctctttcccccacaaaattcgacatatttaaaaatctccgtgtggctttaaaaaatggttttttgtttttttgtttttttgaggtgggagaggatgtgtgaaaatcttttccagggaaatgggttcgctgcagaggtaaggatgtgttcctgtatcgatctgcagacacccagaaggtgggtgcacactgcatgcttgggggtgccaagggattcgagacctccaacatacttgtctgaaggtggtgattctggccatggcccctctgccaagcctgtgtgcgatgcccttggtgctttagtgcaagaagcctaggctcagaagcacagcagcgccatctttccgtttcaggggttgtgatgaaggccaaggaaaaacatttatctttactattttacctacgtataaagttttagttcattgggtgtgcgaaacaccctttttatcacttttaaatttgcactttattttttttcttccatgcttgttctctggacatttggggatgtgagtgttagagctggtgagagaggagtcaggtggccttcccaccgatggtcctggcctccacctgccctctcttccctgcctgatcaccgctttccaatttgcccttcagagaacttaagtcaaggagagttgaaattcacaggccagggcacatcttttatttatttcattatgttggccaacagaacttgattgtaaataataataaagaaatctgttatatacttttcaaaaaaaaaaaaaaaaaaaaa

SEQ ID NO: 289466 - DNA, 1000 bp, Homo Sapiens
gaaatggagagtggaaatatatagaggtcaaaagaagattaagacagtttggcaactgagtgacagctcacccatagaccatctgaattttcacaaacctgatttttcggaattaacactaaacggtagcctggaagaaaggatattctttactaacatggttacctgcagccaggtgcatttcaagtgaagtgtgctgatgaagtcctctataagcacaagccaaaaagagaaagagaaaaaaaggtaattattgtagaacctgaaaacagcaatgtatggaaaccctcaaagcagaaaagggaggaagatcctgaagattctcttatgaagctccaaaattgataatcctgtctcagctctgcctcctcaggaggagcattagtagaacagcagtgatgaggacacagagggagcagacagtgggtaccacgatctccgtaaccatttgcatgtgacttagcaagggctctgaaatgacaaagagaacgagcaccacaaatgagaacaggatcattttagtaaatacagctttatcccaaaagctttagctgtattgggaaaacttaaaaaatagcatcctcaaattttctgattcttatttgccatgaaatagaacttagtaaattaaatgttatttgaaaatgttataagagctttgtaaatatttcagaaaatatgggataaatgcctgaatttggttcttctacaggtgctataataaagtccatctctcaatacttatactttctaaattcatctcagaatattagcagccatattccacagttcctataatttttactgggggggatttgtgataggaaagtccttgggaaacatttccaatctttcaaaatattattgtgtatcttaagaagtataggaacttgtatgttgaaatgttgtatggtagttcttgtatagttaaataataatctttttaagagttaatgataagcatatgttatgtgcattattaataaaatagtggccactt

SEQ ID NO: 289467 - DNA, 1000 bp, Homo Sapiens
ctgctcttgcctggagacagtggcctcatgggtgctgacagcgctcctgtttgtgctcagccattgaaaaggatggtggggatgtcaaagcactctaccggcggagccaagccctagagaagctgggccgcctggaccaggctgtccttgacctgcagagatgtgtgagcttggagcccaagaacaaagttttccaggaggccttgcggaacatcgggggccagattcaggagaaggtgcgatacatgtcctcgacggatgccaaagtggaacagatgtttcagatactgttggacccagaagagaagggcactgagaaaaagcaaaaggcttctcagaacctggtggtgctggccagggaggatgctggagcggagaagatcttccggagtaatggggttcagctcttgcaacgtttactggacatgggagagactgacctcatgctggcggctctgcgtacgctggttggcatttgctctgagcatcagtcacgggtaggtggagtggagaggctggttacagcttcagtccctttgtctgtctgtccatccattcctccatccacccatctgtccatccgcccatctgcccgtccatccatccatccactcttccaccctctaccccttaccttattctaaaaagaacttaggtaggttatggtgcctcacacctgtaatcccagcactttggggggctgaggcaggtggatcacttgaggtcaggagttcaagaccagcctggccaacaaggcgaaaccctgtctctactaaaaataaaaaaattagccgggcatggtagtgcacgcctgtaatcccagctactcaggaggctgaggcacgagacttgcttgaacccaggaggtggaggttgtggtgagctgagatcgcgccactgcactccagcctgggtgacagagcgagactatctcagaaacaaaacaaaacaaaacaacaaaaaaagaaaaggcagagtacaaggagatacatgtaacaag

SEQ ID NO: 289468 - DNA, 1000 bp, Homo Sapiens; identical to SEQ ID NO: 117528

SEQ ID NO: 289469 - DNA, 1000 bp, Homo Sapiens; identical to SEQ ID NO: 117529

SEQ ID NO: 289470 - DNA, 1000 bp, Homo Sapiens
tatggctgctaccaactacctccctacccaggtgtcagacatgatgcatcaggacagggcttttgccactgcacgcttgaacttctccggacagaggaacatctgtaccctctcaacgatccagaagttgccacggctgctagttgcgtcatccagtggacacctttatatgtacaatttggatcctcaggatggaggagagtgtgtcttaatcaaaacccacagcttgcttggctcaggaacaacagaagagaataaagaaaatgacctcagaccttccttacctcagtcttatgcagcgaccgtagccagaccaagtgcatcttcagcctccacggtgccaggttattctgaggacggcggggcgctgcgaggagaagttattcctgaacatgagtttgcgacgggaccagtgtgtcttgatgatgagaatgagtttcctcctataatcttgtgccgtggaaatcagaagggcaaaacgaagcagtcatgatgagaagcacacctcagaaatcaggacatcccccctatcaggtggttttggagaaaacaaggaaggcggaagaatggagtgcaattgtgtgagcagaaaggggggcaggaatcccgggtgctccactgcttaaaccacaggacctggttaactcctcaccaagcttcccacgaccctggttgccaatgggcgcgggagacattgtatacacatcatgctatttaaaatacgttcaaactatagtgtaaatgctaattaaccatattggtatataaccggaattttatattaaaaggggcctcctttttaaatatatgccgtgtaaaaaatgtacttataggaacatctctttgaattgtatttcttgtatattacatacttagagagagactcttttagccaggcaaagtcttttttggctgtggctggaataaatcatttattacttgggagtcccattttggacactaataataaaatcatggcaatgcaaaaaaaaaaaaaaaa

SEQ ID NO: 289471 - DNA, 1000 bp, Homo Sapiens
cttggaaataatttcaaaatctctggaggaagcaagcctccatttgttgttagacacgtggacagtgcaaagccctttggtgagaatatttcagagcatcatttgaggaggtctagaagaaaatctaagttttcagactttccgtttccaacgagaagagcttcttctcttgacagccttgcagctaacgtaaaggttatcaaagagccagatgaacggattgttttaaggagtgactcatcatcatgtttagattcaagtcagtttggaaagtcttcatccagtaaacaaggggatgctgatttccacgggaaagcttcatttgccacctaccagcattccacctctcctggccccttggatcagccccttctcagagaaaggttccatcctggttctcagtccacatggaagaatatccatgagagggtatgcagtcttctgacatcccacagagcacagctgcaccaaaacaaggaagattctacctctgaagtaaattatatcattgaaagaccaagctaccctctgaagaaatactcactgcatgaacagagatatttttaaggggaaattaatgaaagcttaaggagaatcatgaagagctcactcactgagacaattgaagcatccttaaagaaatgaacactttttgttgtctgtgttgagtcactgatgtctaatcccctttaaaccaaaccctgtactcagtcttttgtgcccaggaacggacactcactgaaattggaattttgaactgagataaacatcatacttgttttattgggatgacttccaggaacagaccgtaggcagtggcagagggaagattcttgagcccctgcaaagcaaacactgcagctggcctactgcctgagtataagccaagcacacttcccatggctcttctaagaatcagggtatgctttaataaagggccttgtacccactggactaaaaaaaaaaaaaaaaaaaaaaaaaaaaaaaaaaaaaaaaaaaa

SEQ ID NO: 289472 - DNA, 1000 bp, Homo Sapiens
ccggggtctcctgttgctgttgccatcactaccctctgtaaccacagggggctcagggcctgaacttcaactgggatccccaggagcagaggaggaagagaaggaggaagaagaggctttgccattgcaggagccaccgagccaggcagcaggcaccatccctggcccagaccctgaggtccatcagctgttctcagcccatggtgccttcctgctgggcctgatggccttcaccagtgccgtgaccaatggcgtgctgccttctgtgcagagcttttcctgtttgccctatgggcgcctggcctaccacctggctgtggtgctgggcagtgccgccaacccccttgcctgcttcctggccatgggcgtgctgtgcaggtccctggcagggctggttggtctttctctgctgggcatgctctttggggcctacctgatggcactggcaatcctgagcccctgcccacccctggtgggcaccactgcaggggtggtccttgtggtgctgtcgtgggtgctgtgtctgtgtgtgttctcatatgtgaaggtggctgcaagctccctgctgcatggtgggggtcggccggcattgctggcagctggtgtggccatccaagtgggctccctgcttggtgccggtgccatgttccctcccaccagcatctaccacgtgtttcaaagcagaaaggactgtgtagacccctgtggcccctgagcctgggcaggtggggacccaactccaccccacctgtcttcatcgtgaggctgccacagtgcctgactacttgtggcccaggcaggcttcccccaacacaggaacgctcatggacacctgcacactccacagaagacgttggcatgtgaggccagggtgggcaccaaagaccaggcccagagccaggggacaggttggggctgtgggcttggacccagggcctgagacctttgtgggatttgtgcaataaagtgtttttatttaaaaccaaaaaaaaaaaaaaaa

SEQ ID NO: 289473 - DNA, 1000 bp, Homo Sapiens; identical to SEQ ID NO: 222792

SEQ ID NO: 289474 - DNA, 1000 bp, Homo Sapiens
tttaaaagatctttttgggtgaggtgtcttacttctattttgaaggattatttcagtttcaatcatgggtgagctgatttacatctttatatagttggcttggaggaagtacttctatgggaaagtgaacagttctgtgacaggaaacatctctgtccatgccagcatagtagttgtatggacttctaaccagttgagttttttaaagcattgaggattttttcctcttaccaactcctcttcaggtttttaaagacccagcccttcccaatctcaaagagaaaaaggaaactgagttatcttgaataacataactttttaatcaaatgtttattttggcttgtggatcttggtgttatttaaaaaattgaggtgatggtcattgcaagctcatctattaagtactatatggtacacagtctatgagtcattagtcttcattttaatatgtaaaaaatcttgatgctgtattgatttgtttgcatttaagatgacagtgagaaaatgataagcataaagagaagtatcaggttatttgctttttccaaacttttcagatgaactattgtttagtacagagactgagcaaatactacaaaattcaacttaaccttcatttcattggtttaaatgcgttattaaccatcttaagtgcaaactaatcattgtaaattatattttagcatggtctgcctcaaatagtaatgtatttttctgcattcacttggatatatttagaatcacttttttcctcctgtatcaaggaagaggtatgtgctgatttgtttggatatttgacaaggcactctgatgtgacttccctgactactaccttcatatttcatttcaaattcaaacttctgaggttgcagcatatatgaattgcattttcaaaagaagatttgtaagaattaaactatatttatgagtaaacttttgaggtttctgctgtattgtttcaaatgtaataaactttacttctgtaaaaaaaaaaaaaaaa

SEQ ID NO: 289475 - DNA, 1000 bp, Homo Sapiens
tgaagccagaaaagctctcattcaggaactctgaagagcaaaaagggacaaacactaactgctgagctgggccatttgatctcctttcaccttgcattgctgtcacagcaccttgtatgatggcaggacaggctccagcagagagaactgcacagtgaccactgtatttttcacgctcttccagggatccctgtcccccgacattgaagagatctcattcaggccagagacacagagaccacatagcccagtgattaaaccccggtttcactctggccccaggagtggagcctggccactcctgtttggttctcactgggaggcccactggccttggatcatctcctcatgcacacccggagttttacctgcttgcttgctttcctggactgctgtttgcaagaaagtaactaaaacatgaaaagtaaacctccagcttccacagtatattacctgccgttgcatgcatttgaaagttagcctcctcccttgccaccgtcttggtggcagtagcgatgcaagaatgatgggagctttccgagagcgttcagtgtttcactgaagacaggacccatagccttcatttctggctctgtgtctcctctggcatatggacacatttcctggcatttgcctgagtctacaccactttttgagaacctgaaatagaagggaatcttctgtggcccacagtctccatattggcactagaagactggcctggcggaggaatttgcgttggcttgctttcaggggttagctacaagattcagctttatatctctgttgcttcttggccagtgtagtcaataagggtcttctttaacatctaagatagaggtttggttggccgggcgtggtcgcttactcctgtaatcccagcactttgggaggcccagtgaggtgggagaattgcttgaacccaggaggcagaggttgcagtgagctgagattgcaccactgcactccagcctgggtaacagagtgagactcttgtctc

SEQ ID NO: 289476 - DNA, 1000 bp, Homo Sapiens; identical to SEQ ID NO: 117530

SEQ ID NO: 289477 - DNA, 1000 bp, Homo Sapiens; identical to SEQ ID NO: 222793

SEQ ID NO: 289478 - DNA, 1000 bp, Homo Sapiens
catacttgaagttatatttccaaacctgagaaatgaagaaagattgttctgacattaaatacctacagttactactgaacctcttaataaggatttgtcaaggatagagtacagttgtaggggaagtattttatgtatgcattcttagagcaaaaagttttgtttaaattctagaattgaaggtactgatcttataaaaagaaattctagcagttttagaaataggtgggaaaaactcaaatattcctcctatctgcaccaaaaagtttatttgtggtatataaaatgaatattgttttataataacttgttaataaagtactttctaatacattctattgactctgttagttgaacaaatagctgacttgaacatctatgcaaacttaagatgggcgggattgttgtaaaagctattgttttaaaagagctttctaaatgtaaagtagtgataatttcaatttgggtagcgtgtttgcaaagcttccaatatttgatgttggttaagctctactatgggcaactgaagatggataaagaaaaatgaaaactgaatcggtgcctgcttccccctgttttcccaggattagaggaaaaaatttattgtataatcagcttcttggttttgaattgcttcgaggcatggttttattccttattactttagacctgtagttttcaacactgacagcactttaaaaatctttgcctgggcctcactcttgagagattctcatttaatagttctgaggtgggtcttggatataactatttttttaaacacctgtcctgtttccctccattcctctcatgtgcagacagggttgagaaccagtagactaatggtcgtttttcctgtttaaaggagataactaatttgagctgaagcaatgcttcttaattagctttgtttttgttttgctctgttggtggctttgttacaactgaattattgtgttattactatttcattgttaaagaaataaagtaagcaatttgt

SEQ ID NO: 289479 - DNA, 1000 bp, Homo Sapiens
gagggtgtgctgatgcgggaccccaagttcttgtggtgtgcccagtgctcctttggcttcatatatgagcgtgagcagctggaggcaacttgtccccagtgtcaccagaccttctgtgtgcgctgcaagcgccagtgggaggagcagcaccgaggtcggagctgtgaggacttccagaactggaaacgcatgaacgacccagaataccaggcccagggcctagcaatgtatcttcaggaaaacggcattgactgccccaaatgcaagttctcgtacgccctggcccgaggaggctgcatgcactttcactgtacccagtgccgccaccagttctgcagcggctgctacaatgccttttacgccaagaataaatgtccagagcctaactgcagggtgaaaaagtccctgcacggccaccaccctcgagactgcctcttctacctgcgggactggactgctctccggcttcagaagctgctacaggacaataacgtcatgtttaatacagagcctccagctggggcccgggcagtccctggaggcggctgccgagtgatagagcagaaggaggttcccaatgggctcagggacgaagcttgtggcaaggaaactccagctggctatgccggcctgtgccaggcacactacaaagagtatcttgtgagcctcatcaatgcccactcgctggacccagccaccttgtatgaggtggaagagctggagacggccactgagcgctacctgcacgtacgcccccagcctttggctggagaggatccccctgcttaccaggcccgcttgttacagaagctgacagaagaggtacccttgggacagagtatcccccgcaggcggaagtagctgagggcaagggtcccgatgagggtcccatggcctgctccctcaggaacagctccagcaccaataaagaggcatcttaccaccaaaaaaaaaaaaaaaaaaaaaaaaaaaaaaaaaaaaaaaaaaaaaaaaaaaaaaa

SEQ ID NO: 289480 - DNA, 1000 bp, Homo Sapiens
tcaactatgatatccataccctgcggcaggttcgaagggaagtaagaaacagatggaagtgcatcttagaagatttaggttttcaaaaggaagctgactctttgttgtcagtgactaaactcagcaccatcagtgattctaaaaacacaaggaaagctcgagagatgttgttaaaactggctgaagaaaccagtattttcccaacaagttgggagctctcagagagatatctctttgttgtggaccgtctcattgcacttgatgctgcagaagagttctttaagcttgctcgtcgaacttaccccaagaagcctggggttccatgcctggcagatggccagaaagaactgcacctgtggggggacctctcatgcagacttgcacatatgcagggagtattgcactgaagatctttgctggaccttcttctcttcagaagataattttcaaaagggagcaatgctgtgaatgcagcttgcttctctctacagattgagaagtccagcttcaaaagttacttgccacttaagcaaggaacttgtcaagagatcatggttcatgttactgaaaagactttaaggatttgtaaggttaatccatagattgctgagaacaatggaaatatttttatttttacagattttgcacttctgaattcaggttaaaaactaacttgtatttagtctgcttagaggactgtgacttgaaaatttttatataccaatgagctttttggtagcgtccacaatgtttaaaatatttcataggcgagatccgtgttctccatttattaatgcattgtagaccaatttaactgctgtgtttcaggaaaattcttcctagtttaataagcaagctaaaagttttattttttatatttagtgcttaatctttgcctcatgttatgtaaaattagcctgcagatattttctctcaattctgtagactctcgcaagataaacattcaaacagtgaaacaaacaataaaataaataaacct

SEQ ID NO: 289481 - DNA, 1000 bp, Homo Sapiens; identical to SEQ ID NO: 222794

SEQ ID NO: 289482 - DNA, 1000 bp, Homo Sapiens; identical to SEQ ID NO: 222795

SEQ ID NO: 289483 - DNA, 1000 bp, Homo Sapiens; identical to SEQ ID NO: 117533

SEQ ID NO: 289484 - DNA, 1000 bp, Homo Sapiens
gagggaaagtgcaatcaaatctgaattattttactatttgtttctagacacactacttaacactcctaaagactactttgagtaggcaacataactaaatttttctagtttcttatgatacaggttcataaactacaatatttggatttttttccccaaggcacaaaatgtataatggagaccaaatagtgatctgatccatagtatcctatgcctatacactttaaaatgtatatacattttagacaaaaatgcacactccagtattaatatttgtgctaccatctacttggagaagtttaatgagaaaattttagaagaaaagtattacaaacaatattttgactctattacctgttttgccttatacattttagaaactggaaattttttaaagaaaatgctttagttttcttctgttcttcactgtctacagtgtgcttttgtatatggatcaggactgagcaaagtaattacatgtatcagagatacttatctctatactaattcacagacagctcctgatgtaaggatttagagggccttctgccctctgaatatatggtgaggagaatggggtatctggaaaaggaaaatgatctggataaatctgagacctggggggaagtttgttttatatgttcattattggttgttacatatcaaggctgttttggttatgtatcaatattgtggtttatttgagctggaagtgattttttctgtgtatgtatatgtatacacttcaataggttttaattttgaagtgaatatttgccatgactccattttccccataccacttcagactttagcctgtttagttttaaggactgaaaatggtaggtttgggcagaagaatgaatttgaactttgatggggtttttttgtttttactttctatcttcataaccatttaaagcgatttagcttgaaattaaattttatcaggctaccaacatgttatttatttatttaataaacacatttattgaaaacc

SEQ ID NO: 289485 - DNA, 1000 bp, Homo Sapiens
tcagtgcccaagagtggccaaaccgcttcacatctgcagtgcttccccagggttgacaaggggccgtcctttccacacaggccagaagaggtcttcaggcgaaccgaccttcccccttctggcatttcagattccccttgctctggttaaaaggtctttccctcgtggcctttgcacttgcggcagcaacgtgtactacactgcagaagggttcagtatgcaccttgtgttgagagagaggcaaccctgggggccagttcaggtggtccccaaccataagctaggtctgaaagttacacagccaagtttgagctcttaaaagttgatgaacagcctcatttccccagcttccctgatttcttccagatgggacgttttatttgtgtgctctcccttgactgtcagattgaagtaagagcagttctctccgttgcctctcgaggaggaggtgcgaagtcctggagtattgtttgggtctcggaatgggcgcataacctgcgctgaccagtttaggggcttagcagatgcctgccagctgacctcgttggcaggagggttgggtggagatgtttttagcagagcttccattagtgtagacctgtagccacctgtcagaaggtgggtggcatattggggacctgggaatgtgtgaaggaggagatcaaatttcagtggctttggacagaaaagaaggctctggatttaagcgggtggtcacctgtgagaccaggtctaccttgggactgttatttaactgaatcagttatttccttgaaatttcacagtagtgggtgggcctgttttaaggctctgacagataccacgaaacatgaagcacgtggaactacaagacccccggggtctttctgagtgcaaggctgaaatggacaagggctcctcacgggggtggagggagccggagcctgccttgtgttccttttttgacttgtgacatttttcaaacacataattaaaaggacttatgctctgctgtctcagg

SEQ ID NO: 289486 - DNA, 1000 bp, Homo Sapiens; identical to SEQ ID NO: 222798

SEQ ID NO: 289487 - DNA, 1000 bp, Homo Sapiens
ctgtgatctgggattaccatgttgttttgcttcatgtttcaagtggaggacagaacttcatttatgatctcgatactgtcttgccatttccctgcctctttgacacttatgtagaagatgcctttaagtctgatgatgacattcacccacagtttaggaggaaatttagagtgatccgtgcagattcatatttgaagaactttgcttctgaccgatctcacatgaaagactccagtgggaattggagagagcctccgccgccatatccctgcattgagactggagattccaaaatgaacctgaacgatttcatcagtatggatcccaaggtaggatggggcgccgtctacacactatccgaatttacacatcggtttggcagtaaaaactgctgaacttggtctcaagatgtggaactgtggagaaattctaggacatgaacaagctatcctttcatcgaggacagcaaacattatggtacagttggcttggaattatgtctttctcttttaatttgattgagtggaaatctgagtgaatacaaatataaatgaacaacataaaaacttttgttttgacatgtcaaattgaaacttgataaagtgcgtacttgctaagatattcctgtggctcatgcgttacaacacgaggacttaagccagtaatcgtttttgttcagatagaggtgtggaggtagagccagcccctcatgtctgttttggatgttttgtgtctctccagctacattgtaagttccttgagggcagggccatggcccattgctctgtgaatctcaaatgcccataaaaggtgcccataaaatgttttcttgaacatttgaatgtgctgttgtctggaaaggggtaatattgtgagctgaatcagcaataagtattagtctttttggactatggtattgttaaaaagactgcagccctctcagacttgagcgttaattggcttatttatttatggctttaaataaaatcgatttaacgtt

SEQ ID NO: 289488 - DNA, 1000 bp, Homo Sapiens
gaagattccattagtgaatttttaagtttggctagatcaaaagccgagccacctaaacaacagtccagccccttagtaaacaaagaggaagagcatgcaccagaattatccgcaaatcagaccgtcaacaaagatgtggacgcacaggctgaaggagaagggagccgcccatccatggacttattcagggccatctttgccagttcctcagatgaaaagtcctcatcctccgaggatgagcaaggtgacagtgaagatgatcaggcaggctctggggaggccaacttccaaagctcccaagacactgacttgggggaaacatcatctgtggctcacgctcttgtgccagcaccccaggagccgccaccttccttcccgatacaaaagatgcagatagatgaaagagaagagttcggcccgcggctgcctcccgtcttctgccccaatgctcgtcagacacttgaggttcctcaaaaagagaaacataaaaagaacaaagacaagcacaaggccaagaaagagcacaggcggaagaaagagaagaaaaagaaacacaggaagcacaaacacaaaggcaagcaaaagaataaaaaaccagagaaaagtagtagctccgagagttccgacagcagcgacagccagagtgacgaggaaaccgcagacgtgtcgccccaggagctgctgagacggctgaaaagtcttccactaagaaggcagtaattgaatgctgccctggctcgtcctagaatcatttctcctccatgatggaagcccagtgattgttcagttaacgcattgtacagagtgtatttatatgtaaattcctgctgtaaaataatttttaaaaccttgacatttcaaagactgccttgaaaggtcgcagaaattgatttctatttttaatttcagttagtatcgggggaaaaaaatccagactgaacagtttaattaaagtggaatttttctattttcaaaaaaaaaaaaaaaaaaaaaaaaaaaa

SEQ ID NO: 289489 - DNA, 1000 bp, Homo Sapiens; identical to SEQ ID NO: 117534

SEQ ID NO: 289490 - DNA, 1000 bp, Homo Sapiens
gcaacaggaaaagtcaaaagggaaaaggcagctgatgaggttacatggttacatgttctacatcatgcagagtagcttgaaatctagtctggagaaaactggatcaagattctagcccactggagttgcaaggaatgagaggcaaaaattctaaagatttgggttatattttcaacttgggggacagagagaaatggagagcaggaattacagttccaacaaacatcatgatagtctggtagtcaagacagagattaagtaaaacaggttttactgtttagctgagttcagttaatacaaaatgtacataaaacgttagtcctttgagactgacatgattaatgatcagtgtggtgggaaatgatgtagttattgtacacaagcacttgcaaactctttatccctatttctttaaaacaaaataaggtgaaatacgaagtccttggtctgatataaagcccctattggattcttcggatgcgtaaaagaaattgcctgtttcagccagaagactggtgaaaacacatacatcagactatgttgtgagccaggttgattttttattttattatatgcaggtgagtgttgaaactgttaaaattccaatttgttttcattcagtattagtttagttctaaatatagcaaaccccatccaggtgctatcagatgaccagttactgcttagttaactaggtgtaaagttttacatatacattaatttcaatagtttattacaagttgtgtaaaatggactctagtttaataatgggggaaaaaagattaggttgctcctgaaactgactgtagagcatgtaaaatgattttactggattctgttcaactgtaatcaatgaaaaagatgtacgttgtagacaaagttgcagaattaaaaaaagaaatctgcttttaatttattctttttgtattaagaatttgtatagtatctttacattttgcaaaacagtgttgtcaacacttattaaagcattttcaaaatg

SEQ ID NO: 289491 - DNA, 1000 bp, Homo Sapiens; identical to SEQ ID NO: 117535

SEQ ID NO: 289492 - DNA, 1000 bp, Homo Sapiens
atccactggatgcattggaaccccaacccagcattggggatattaaggacattaaaaaagcagccaagtctatgctagacccagcacataaatctcatttccaccctgtgaccccaagtttagtattcttgtgtttcatatttgatgggttacaccaggcattactgagtgttggtgtgagcaagaggtctaatactgtggttgggaatgagaacgaggaaaggggtactccttatgctagcagattcaaagatatgcctaactttattgcccttgagaagtcatcagttctccgccactgctgtgaccttttgataggcattgcggctggatcaagtgataagatttgcaccagcagtctccaagttcagagacgattcaaggcaatgatggcatctattggaagactttcacatggtgagagtgctgatctgctaatcagctgcaatgcagaatcagccataggttggatcagctcaagaccgtgggttggagaattaatgttcacacttctatttggagactttgaatcccctctacacaagctacgcaagtcaagttagttgccaagaaagcacagatgacaacctattaatgctgtgagaatgtttctagatcagtgcatggatggctccattgctctacgggccattgtgtctgagatcccagtctttgaggagaaaaaaaacaatggttaaaaaggcattggggaaatattttgagtttgggggtgtactttgccaccccattattggggagctgtcaccacgaatgttcccaaacttagcaacagcggcaaactactgggccaagatgagcaaccccacatttttgggatttaaagctcctgatgttataccaggatcaaccatcacactccctttgcttcaaatggcatctaccccgtaagatcttgaggggggagtgttgggtggaatcatagatccatgcactcctaacatgaactaattctcattatttaaaaaaaaaaaaaaaaaaa

SEQ ID NO: 289493 - DNA, 1000 bp, Homo Sapiens; identical to SEQ ID NO: 222799

SEQ ID NO: 289494 - DNA, 1000 bp, Homo Sapiens
caagtaactactctgactccttcggtagctgcaaccaggagtgagcccttctctgtgttcccagggtctgctgagggccgtgtctggtggggatggggctgggctcaccctcaggagtagggctggggagtcgtgaacgggactcaggtgtgggaagaggcgagagggctgtggaggagctcgcacggcgccaggtgatgggctgcacaggcactgtcccctgcctgcgtcctggggcctgtgcactgttgcgtccatgctcagagtggctgagacttgtgtcctgaccaggccctgcttacctctgttttggtttttgtttttgatatttttttttccattgtgtttttacgtagtgtcatgttctgtgcatatagtgttgtattctcctttgcactgtttatgttacagtgaaggctctccttattaaaaatcttcgcaaaggtcactttttaatggctatctaacactccatatgtggtgggcaagtctggttggcctccggggggtttccaggtataggggatgtagggccttgcctggcctggtctgcgggtccatcgtcagtgcctgagcggccagcagaaggggggcagcagcctccactgagcctctggttcccatttcccaggttctccagagagcgggcatccagagaggagtcctgggagagcgggcggagcgagcgagggcccccggactggaggcttgagagctccaacgggaagatggcttcacggaggtcagaagagaaggaggccggcgagatctgaacccgtctcccgggtgctgtaaatagtctgataaacgttcacacagtctaaaattaccctttatatttgctgaatacaactcatcttttgtagtttaaaatttctattgttttggagctagctgtgagtttctagaagtgtacagagttgctcctgtgttcccgggtcatgttgagtaggaataaataaatctgatgctgcctcctgaggctgcggggggtttctgc

SEQ ID NO: 289495 - DNA, 1000 bp, Homo Sapiens; identical to SEQ ID NO: 117537

SEQ ID NO: 289496 - DNA, 1000 bp, Homo Sapiens; identical to SEQ ID NO: 222800

SEQ ID NO: 289497 - DNA, 1000 bp, Homo Sapiens
cttggcctatggctgcccgcagtgggacacggtgccacacccttgtgtgctcttcactcccacgccgatctgcagttagtggcactgctacgcagccccgggctgctgctgtccacagctctaagaagcccagctcaactccatcatccacccctggtccatctgcacagattatccacccgtcaaatggcagacgtggtcgtggtcgccctcctcagaaactgagagctcaggagctgaccctccagactccagccaagaggcccctcttggcgggcacaacatgcacagcttcgggcccagaacctgagcccctacctgaggatggggctttgatggacaagcctgtaccactgagcccagggctccagcatcctgtcaaggcttctgggtgcagctgggcccctgtgccctaagtccacgggctgtctttatatcccactgccctgctgtgtgacagtttgatgaaactggttacatttacatcccaaaactttggttgagtttgcaggactctaggcatgcatgaaagagcccccctggtgatgcccttggatgctgccaagtccatggtagttttcaattttgccatacttttgttcttcctaccggaccctggaatgtctttggatattgctaaaatctatttctgcagctgaggttttatccactggacacatttgtgtgtgagaactaggtcttgttgaggttagcgtaacctggtatatgcaactaccatcctctgggccaactgtggaagctgctgcacttgtgaagaatcctgagctttgattcctcttcagtctacgcatttctctcttcccctccctcaccccctttttcttataaaactaggttctttatacagataaggtcagtagagttccagaataaaagatatgacttttctgagttatttatgtacttaaaatatgttgtcacagtatttgttcccaaatatattaaaggtaaccaaaatgttaaaaaaaaaaaaaaaaaa

SEQ ID NO: 289498 - DNA, 1000 bp, Homo Sapiens
tatgaagaggtgatctctcaaataaatacgtcattacctgctccccacagttggcctcttttggaatggcaacggcagagacatcactgtccagggctatcaggaaggataacgtatactccagaaaacctttgcagaaaactgttcttacaacatgaaggacttaagcaattaatatgtgaagaaatggactctgtcagaaagggctcactgatcttctctaggagctggtctgtggatctgggcttgcaagagaaccacaaagtcctctgtgatgctcttctgatttcccaggacagtcctccagtcctatacaccttccacatggtacaggatgaggagtttaaaggctattctacacaaactgccctaaccttaaagcagaagctggcaaaaattggtggttacactaaaaaagtgtgtgtcatgacaaagatcttctacttgagccctgaaggcatgacaagctgccagtatgatttaaggtcgcaagtaatttaccctgaatcctactattttacaagaaggaaatacttgctgaaagccctttttaaagccttaaagagactcaagtctctgagagaccagttttcctttgcagaaaatctataccagataatcggtatagattgctttcagaagaatgataaaaagatgtttaaatcttgtcgaaggctcacctgatggaaaatggactgggctactgagatatttttcattatatatttgataacattctctaattctgtgaaaatatttctttgaaaactttgcaagttaagcaacttaatgtgatgttggataattgggttttgtctattttcacttctccctaaataatcttcacagatattgtttgagggatattaggaaaattaatttgttaactcgtctgtgcacagtattatttactctgtctgtagttcctgaataaattttcttccatgcttgaaaaaaaaaaaaaaaaaaaaaaaaaaaaaaaaaaaaaaaaaaaaaaaaa

SEQ ID NO: 289499 - DNA, 1000 bp, Homo Sapiens
ggctgagagagaagtgcctcatccctgagccacacagggggcgtgggagcatcccagttatccctggaaagctagaaggggacagaggtgtccctgattaagcaggaaacagcacccttggcgtccccagcaggctccccactgtcagccacacacctgcccccatcacaccaagccgacctcagagttgttcatcttccttatgggacaaaaccggttgaccagaaaatgggcagagagagatgacctcggaagcatttccacagatggtgtcagggtttcaagaagtcttagggcttccaggggtcccctggaagctttagaatatttatgggtttttttttcaaatatcaattatatggtagattgaggattttttttctgtagctcaaaggtggagggagtttattagttaaccaaatatcgttgagaggaatttaaaatactgttactaccaaagatttttattaataaaggcttatattttggtaacacttctctatatttttactcacaggaatgtcactgttggacaattattttaaaagtgtataaaaccaagtctcataaatgatatgagtgatctaaatttgcagcaatgatactaaacaactctctgaaatttctcaagcaccaagagaaacatcattttagcaaaggccaggaggaaaaatagaaataaatttgtcttgaagatctcattgatgtgatgttacattccctttaatctgccaactgtggtcaaagttcataggtgtcgtacatttccattatttgctaaaatcatgcaatctgatgcttctcttttctcttgtacagtaagtagtttgaagtgggttttgtatataaatactgtattaaaaattaggcaattaccaaaaatccttttatggaaaccatttttttaaaaagtgaatgtacacaaatccacagaggactgtggctggacattcatctaaataaatttgaatatacgaaaaaaaaaaaaaaaaaaaaaaaa

SEQ ID NO: 289500 - DNA, 1000 bp, Homo Sapiens; identical to SEQ ID NO: 222803

SEQ ID NO: 289501 - DNA, 1000 bp, Homo Sapiens; identical to SEQ ID NO: 117538

SEQ ID NO: 289502 - DNA, 1000 bp, Homo Sapiens
tcagaggatgggagctcatgctggaaaacacagcagcccctagcaccttgtcaccactctggggctctgtggaagaaagggcacttaaaactcccagtaaatcttggaataaatatatttttccttcccttgtagtttccatggtagctgaatgtgctcagatgtgagcagtcagagactgacagccatgctttcctatacttgttcaaaggatcgatggaccgtaaataagctgccattaacacatctggttactgctgtaacatgactaataaaaccgaacgcctgttccccttacccgtgtgggggacacgcagatgagtgaattggaatgtccagcagagttaccctcccaattatatgttcattttgtatattttttggtcgggggaaaaattgacctgcagtaaaaaaacctttgaccatttttatgtccattggatactttcctttttatcatcttaaaaaaagataactagtactaatcattgtagtggcctaagtgtgatttaactcttgaagtcacaccctccgaaagatgagtagaaaccagcaccagcacagcccagatcttctctttcctctccttttcctcatttattcctaaaggaatctgaccattttacgtctctacggcccaaaaaaagacaaaaataaaaattcctttttattcctgtcaactggatggaaacacaaatttcatggagctgtgtaccatcgaagaaacctggtgtctggcatgaaattactgtaaagaacttcctgtaaaacacgttctttaacaaactgaaatgaaaagcattggagcgtctgaatgaaagacgtgacctcctgctgggactctgatggtcttcagcattcaccttcgtgtgtcttcagtgtctcattgtcatccctgcttctgtttggtcttagagtgtttggatataactgaattgtagatggtaaaggaaatttgatgtgttttttgtttttaaataattaaaacgggtcaattttt

SEQ ID NO: 289503 - DNA, 1000 bp, Homo Sapiens
cttctactttcggacagacgaggccgagcccgtcggagccctgctgctggagcgctgcagagtcgtccgggaagagcccggcaccttctccatcagcttcattgaggaccctgagaggaagtatcactttgagtgcagcagcgaggagcagtgtcaggagtggatggaggctctgcgtcgggccagctacgagttcatgcggagaagcctcatcttctacaggaacgaaatccggaaggtgacgggcaaggaccccctggaacagttcggcatatccgaggaggccaggttccagctgagtggcttgcaggcgtgagcgcagggcacggtggtcagcgtgcagcgggacgggactggccctgcccagccatgaatcgcttggccatgcctggatctgttttgttttggtttttggtttttgggtcagggcttcactgtgttgcccaggctagagtgcagtggtgccacagctcactgtgaccttgaccttctggactcaagtgatcctcctgcctcagcttcccaagtagcggggatcacaggcatgagccgccacacccggccatcacacctggattttcagtgggaggtttttggtttggagacatccaaagcctgaagccaggtgggtgtgggcaggggctgcattttatgaaactgcccagcaagctgcgctccctggggccccaggatccacctaactggcctggcacctggtgccacgtgctgctgccgccaggatatgcgccttcccacaggtgccctgcctgagttgtgtgcatccaggggcctggtgagcccccaggctggtggcatggcccccctgccccgtgctgaatgaatgtacagagccagacaaagctgtgaatggcctaggggctgagtcccacaccagctgtgaattctcctgcagacaggagggccctggctgtgcacctggggaagtggttgccctggggccagggtgcttgttctgttcaaataaaggtacctcttttcc

SEQ ID NO: 289504 - DNA, 1000 bp, Homo Sapiens
agtcttccactatgaataaaactgcttcctgggaaggtagggaggccagtccaggcagttcctcccagggcagtgttccagaaaatcagtacggccttccatttgaaaaatggcttcttatcgggtccctgctctttggtgtcctgttcctggtgataggcctcgtcctcctgggtagaatcctctcggaatcactccgcaggaaacgttactcaagactggattatttgatcaatgggatctatgtggacatctaaggatggaactcggtgtctcttaattcatttagtaaccagaagcccaaatgcaatgagtttctgctgacttgctagtcttagcaggaggttgtattttgaagacaggaaaatgcccccttctgctttccttttttttttttggagacagagtcttgctttgttgcccaggctggagtgcagtagcacgatctcggctctcaccgcaacctccgtctcctgggttcaagcgattctcctgcctcagcctcctaagtatctgggattacaggcatgtgccaccacacctgggtgatttttgtatttttagtagagacggggtttcaccatgttggtcaggctggtctcaaactcctgacctagtgatccaccctcctcggcctcccaaagtgctgggattacaggcatgagccaccacagctggcccccttctgttttatgtttggtttttgagaaggaatgaagtgggaaccaaattaggtaattttgggtaatctgtctctaaaatattagctaaaaacaaagctctatgtaaagtaataaagtataattgccatataaatttcaaaattcaactggcttttatgcaaagaaacaggttaggacatctaggttccaattcattcacattcttggttccagataaaatcaactgtttatatcaatttctaatggatttgcttttctttttatatggattcctttaaaacttattccagatgtagttccttccaattaaatatttg

SEQ ID NO: 289505 - DNA, 1000 bp, Homo Sapiens; identical to SEQ ID NO: 117539

SEQ ID NO: 289506 - DNA, 1000 bp, Homo Sapiens; identical to SEQ ID NO: 117540

SEQ ID NO: 289507 - DNA, 1000 bp, Homo Sapiens; identical to SEQ ID NO: 222806

SEQ ID NO: 289508 - DNA, 1000 bp, Homo Sapiens
caagtgatctgcccgccttgccctcccaaagtgctgggattacaggcgtgggattaccatgcctggccttgttctgtttcttttcctaggagtcccacaacgtgtgtgttagcactgccgagaatgtctcacagctctggacggtctgcatttctggacctggtgcagatcccaggatcctggactctgatttgatgccttaacggtggaagggggttgagtatattttttatgtgggaggggtgtggactgtggccagaggaaagacagtggcaaggcatttccaaaggtggccaccaacagttcctcccacaaagagaagggggcttatctcttcttccctgcaatattctccggccttctgacttgctccgaacaacaggatgcagcataagtgatattctgggaccttccaagccagactgaagggcctttggtttctattttcatgctcctggaactcagcatccatggaaagaagctcttggcatcaccccaaggaagggaggccccgtggagtcggggaggcccagctagcctctggccgctgaagcacctagctgaggtgcgggactggtgagggctgccactggctgttctggtcttgctgagcttccaggcgaatgcagtcccaccagtgatcccggggacaccacgtggagcagaacgacttcccagccaggccccagacaatctacaacactgtgaaaggagtgtctttgggacccgcatcttgaacctgtaccttgtgctgacctcctgtctcatcccgtgactaagaatgcctgtcctcctgggaatgcagccccgcaggtctcagcctcgtttttacccagcccctatttaagacgcggttgctgtggctcccacgcctctgacctgagtcatgcagtatgtggccttgggtctggattcttttgtgtccggaattggtgggttcttggtctcactgacctcaagaatgaagtcgcggaccctcgcggtgagtgttacagttctt

SEQ ID NO: 289509 - DNA, 1000 bp, Homo Sapiens; identical to SEQ ID NO: 222807

SEQ ID NO: 289510 - DNA, 1000 bp, Homo Sapiens; identical to SEQ ID NO: 117542

SEQ ID NO: 289511 - DNA, 1000 bp, Homo Sapiens; identical to SEQ ID NO: 222808

SEQ ID NO: 289512 - DNA, 1000 bp, Homo Sapiens
agcccggcgcctcagctgcccccggccatggcgtgcggagccactctgaaaaggactctggatttcgacccgctgttgagcccggcgtccccgaagcgcaggcgatgtgcgccattgtcggcgcccacctcggccgctgcctccccgttgtcggcggccgcggccaccgccgcctccttctccgctgcggccgcctcgccgcagaagtatctccgaatggagccatcccccttcggcgacgtctcctcccgcctcaccacagaacaaattctgtacaacataaaacaagagtataaacgaatgcagaagagaagacatttagaaacgagtttccaacagacagatccgtgttgtacttctgatgcacagccacatgcatttctcctcagtggaccagcttcaccagggacttcatctgcagcatcctcaccattaaaaaaagaacagcccttatttactctacggcaggttgggatgatctgtgaacgtttgttgaaagaacgtgaagagaaagttcgagaagaatatgaagaaatattgaacacaaaacttgcagaacaatatgatgcgtttgtgaagtttacgcatgatcaaataatgcgacgatatggagaacagcctgctagctatgtttcatgaatcacgtatcctgcatttgtgggctgccttgttccttgttgagttgttgcaagaggtcccaattatgacatgcagcaatgccaataccccttctgtgaatacaggttatttcaagctttcgtcagtggcaaccactcttaggcagcagcaactggttttggaaatttccctgatgtcagtaccacctggatgtggacctttgctacctgtattaataccagtggcctcattttgctgtatcattacaatttggcttcttatattaatgtttgaaaaggattaaagctggtattctagaacatgcccttcactggttgtgtaaataaaactgtagaatgacaaaaaaaaaaaaaaaaaaaaa

SEQ ID NO: 289513 - DNA, 1000 bp, Homo Sapiens; identical to SEQ ID NO: 117543

SEQ ID NO: 289514 - DNA, 1000 bp, Homo Sapiens; identical to SEQ ID NO: 222809

SEQ ID NO: 289515 - DNA, 1000 bp, Homo Sapiens; identical to SEQ ID NO: 222810

SEQ ID NO: 289516 - DNA, 1000 bp, Homo Sapiens
tggaaaaacggaaaattgtatcattgactgtctagtagccatggttgtcaaactttccgaggtcacattcaggcccctgttcttcaagctgtttgattgggctaaaacagaagatgccccaaaggacaggttgttgacattttacaacttggcagattgcattgctgaaaagctgaaagggctttttactctgtttgccggccacttagtgaagccttttgctgacaccttgaaccaggtgaacatctccaaaacagatgaagcattttttgactctgaaaatgaccctgaaaagtgctgcttgctgttgcagtttattttgaactgtttatacaaaatcttcctttttgatacccagcattttataagtaaagagagagcagaagccttgatgatgcctctggtggatcagctggaaaacaggcttgggggagaagagaaattccaggaacgggtgacaaagcacctgataccatgcatcgcacagttttcggtggccatggcggatgactctctttggaaaccactgaactaccagattctgctaaagacgagagactcctcgcctaaggttcgatttgctgctttgattactgtgttagcactggctgaaaaactaaaggagaattatattgtcttgctaccagaatccattcctttcttagcagagttgatggaagatgaatgtgaagaagtagaacatcagtgccaaaagactattcagcaactggaaactgtcctgggagagccactccagagctatttctaagactttctgtggtgtttcatactctactcagagttcacactcatatttcatatttttatttttgggtgttgggtgccatgttacttttggtgccttaatacacctacttggattacttacaaatgttttatcacttctttacaaaatccccacctggcttgtgctgccacataagcctctcctgcctatcgtatagagctgcagaaagagtaaatgatacacggtattttt

SEQ ID NO: 289517 - DNA, 1000 bp, Homo Sapiens
ctggagaaccggaccaaggactccaagctggagatggaggtgctggagaacctccaggagctgaaagacctgaaccagcggcaggcgcacgtggacttcgaggctatgctgaggcagcaccgcctgtcggaggaggagcggcggaggcagcagcaggaggaggacgagcaggagaccgcggccctgttggaggaagccagaaagcgaagactgctggaggactccgactcagaggatgaggctgctccctcgcccctgcagccagcccttcggcccaaccccaccgccatcctggatgaggccccaaagcccaagaggaaggtggaggtctgggagcagagcgttggcagcctgggcagccggcccccgctgtcgaggctggtcgtggtgaagaaggcaaaggccgacccggactgcagcaacgggcagcctcaggcggcccccaccccaggagccccgcagaacaggaaggaggccaaccctacacccctgacgcctggcgcgtcctccctgagccaactgggtgcatacctggacagtgacgacagcaacggcagcaactgagccctcccaggaccccctcacggggtcaaagtcacacgtccagcttcagccacattgaggccagcattgctggtggtcagggcaggaggccttggcgtgactggaggccggacagacaagcgccagcgtgctccaacacatagggccaccaggggcctcagccccaggaggtcccttctctgtgccctcaccagcctctcaacacctcggggacccctgctgctcctgcccccacctgtcactgtgcttagggctgcaacatccctggagcagcttccaacactacttcagggtggcagtgtttggggcactgggcgagcctgccggcctctagatggcctcatctcttccttccacaaactgtctagaaccaataaaaggaaacctgccaaaaaaaaaaaaaaaaaaaaaaaaaaaaaaaaaaaaaaaaaaaaaa

SEQ ID NO: 289518 - DNA, 1000 bp, Homo Sapiens
aacctgaaagtatgatgataattgatcgcttagatggagttcgtttgttgtggtccctgctgaaaaatcctcacccagacgtgaaggccagcgcagcatgggcactctgtccatgcatcaaaaatgcaaaggatgctggggaaatggttcgttcctttgttggtggtttggaacttattgtcaatttactgaaatcagataacaaagaagttctggcaagtgtatgtgctgccattaccaacatagcaaaagatcaagaaaatttagctgttatcacagatcatggagttgttcctttattgtccaaactggcaaatacaaataacaataaattgagacatcatctagcagaagctatttcacgttgctgtatgtggggcaggaatagagtggccttcggtgagcacaaagcagtggctccactagtgcgttatctgaaatcaaatgacaccaacgtgcatcgggcgacagctcaggccttgtaccaactctcagaagacgccgataactgcatcaccatgcatgagaatggtgcagtaaagcttctactggatatggttgggtcccctgaccaggatctccaggaagctgcagctggttgtatatccaatatccgcaggctggctcttgctacagagaaggcaagatacacttgaaatttaaatggacattacaagctatcaaattctacatgacacaggacatgtcactcccatggccagaaagcctaaattgggaaacagttgttagcaaaccctttcaaccatctaaatgaaaacacacaaattgaaaatgcacagaatgtttttcatctgaaaattgcatggagacttttgtttctatttaatgttttcgagatatgacatgtgataagatggaaagccaataaacctgtgataagtttctaagaatatgagaatatacgtatatgatgtatttttagttcagtgatgcttttgtatttgtggcgattttaataaaaaggatatggccttcccaa

SEQ ID NO: 289519 - DNA, 1000 bp, Homo Sapiens; identical to SEQ ID NO: 222811

SEQ ID NO: 289520 - DNA, 1000 bp, Homo Sapiens
ttatttggggaaaatcttctggtgtttaattgtgataataagaaagaagaaaaagaaagaaaagtggtagcattttttctaacaagataaattctaaaaatgttttccctgatttcacaaacaaggatagtcttggtgaccttttatagagatcttctagtaatgtattttgatctcagatttctttttcaaagccatggttttacaaaaacagcattccttaaatatatttaaaaaacaatacaaggaatgcctaacatttcagctcatacttcttaaagaagatatagtatgttgtattctcttcttagagctttcttaaagaatccacaatccaattaccccactgtcaattcatatttgaacttaccaaaacaaaggaggattacgtatatgttttttaaattcaaaaaagaatatgaaattatacctttagtatccctttgagacatatagtttaaagaaaactttttttaaaacaaaagtaggaatatatagtaagattgtagttacaatgagtatatgcacttttgatgctaggttttgcttttctccccccagtcatatctcatgatttccacagttgttgtattggtgtggagttttctgaattggctataagctgattacatattagaggtttatttttatgattctatataaacgtgcacgagtaatttaaaacctgcattgggattgattggaatattgtcctaaattaattaaatcttgcactgttttgaatgcatctgctatttatacatctgcaagtgggtatgtcataaggagtcagattatctttaatttaaaatgaatacttagttttacctttttgtttattttttgtttaattttgtttttataaatgttttcaagagttatagcaaattgatttctaatttttattgctattacaactgatgtaaatggtagtttcagtttttgtgagatttaaaaaaataaagcacttattctgaaaaaaaaaaaaaaaaaaaaaaaa

SEQ ID NO: 289521 - DNA, 1000 bp, Homo Sapiens; identical to SEQ ID NO: 222812

SEQ ID NO: 289522 - DNA, 1000 bp, Homo Sapiens; identical to SEQ ID NO: 117544

SEQ ID NO: 289523 - DNA, 1000 bp, Homo Sapiens; identical to SEQ ID NO: 222813

SEQ ID NO: 289524 - DNA, 1000 bp, Homo Sapiens; identical to SEQ ID NO: 117545

SEQ ID NO: 289525 - DNA, 1000 bp, Homo Sapiens
aaagccaactggaaacgaatcggagccattttcattttcctaaccggggcctgacatgctttaaattatctggctgtattctaaatcaacacctaacccctcaaggaaactgaagaatcaatatacagggtaatagctttggctcagagctccaataatgtgcttcagatctgtccatgtggaaatgctttcatccaaatttttaaattggtggttaccaaagagttcacaaaacaggtttgtatgtagcacctttcatgcaaggcatgcaaaaagcctattttaaaatcactgtgcatattatagagttgtagccacctcacaatgaagtactacagcctgtgctgtcttaatggtttatgtcaggaaatgaaaaagatactgtaccaaatctggaattacaatggggagtaataatgtatactaaatgacttttgtattttaagttactttttgtgagtggtgaatttttgtgtttttcttttcagctacacttagtcctgagatgtattttttctttaagtcttgaatgaatacaaaaggagcccattttataatataaaccttgatgtacatgttgagatatttggacaatgaaaatgccttaaaaggaatgcatatggataaagttgcacttataacacccttcaacaaaatctaattttaaattgtctttttcttttctattaagggttttctttttcagtgtctaccattgtacttataactgttattaaataccaaatcaaataataagctgtaacatttcctttaaaactaatgctaataagggatttagagttgaatggcaaaatgtttattacttggcaatacctgatgtcagtcacaggcatccaactcatgacaagagataccactgtttgttttttaaaaaacatttttcattttgtttctccttcaaaaattaagttggactaacattcacgtatcaaactaatataaaaagaaataaaaccaagaggtgatttttgtaacaaaa

SEQ ID NO: 289526 - DNA, 1000 bp, Homo Sapiens; identical to SEQ ID NO: 117546

SEQ ID NO: 289527 - DNA, 1000 bp, Homo Sapiens
ttaagtgaaaatgttcttaaaaggtacactggttaattgaaagctacttattcagtttgtgttagtgtctagacctgtcagccacaagacctgtttaggaccctgaaagtcacagtacctaaaaactatgactgcctttttattgcataggtggtagtggtggtgatggtggtggtagtttgcaagttatctcttaaaactgctgggaatggtgtcattctattcactaatctagcttatagacttgccgtgctgtttgatagaatgcagaggatagcaaccaaaacaaatacacaaataaataaaaacaaaaaccaaccaacaaaccaacttacatacacatatatatatccacaaagaacctctccatctcctccccttctttttgactccactcttgtcagtgcaattttgcttctcattttgaaatctgggctgtagtgctcctgctttatttctacctcagttttgttacatttctcttggaaagtaaagtagaaaattggaagtggacacacacactgcaatgtagcttgccaaacatgttactttgttttcttccatctttcaccgtaaatctagtttccaaagacatcagcatttgtgcttacttccacctcagtctaccagccccacccctacccatggcataagtggcatttttcttaatttcctatttttctcctgctctctgtcaagttgttctttgtatcctttaatgctttatgtgcaacctttcattgatagtgggctgatgtttggcaatgcttctgaactgtcacagagcaggctgtagctttccacagccactgcccatgcataagcagaacagcctggccttttgaatgtattttcctgggttttttccccttttctttttttagtttagagatgcagtaacaaaactgttgcaaagcactggcattttatgtattcaataaataagtgatgtacatttttaaaaaaatttaaataaatgcaatgagaagccccaagaaag

SEQ ID NO: 289528 - DNA, 1000 bp, Homo Sapiens
tttcttcaaaattatctacacctgatgttgtgagcccatttgggaccccatttggctctagtgtaatgaatcggatggctggaatttttgatgtaaacacctgctatgggtcaccgcaaagtcctcagctaataagaagggggccaagattgtggacatcagcttctgatcagcaaatgactgaattttctaatccttctccatctacctctattagtgctgagggtaagacaatgagacaacccagtgtgatttattcatggattcagaataaacgtgaacagattaagaatttcttgtcaaaacgggtgctgataatgtattttttcagtaagcacccagaggcctccattcaggctgttttttcagatgcccaaatgcatatttgggcattagaaggtctgtcgcacttagtagcagcatcatttacagaggatagatttggagttgtccagacgacactaccagctatccttaatactttgttgacactgcaagaggcagtcgacaagtactttaagcttcctcatgcttccagtaaaccaccccggatttcaggaagccttgtggacacttcatataaaacattaagatttgcattcagagcatcactgaaaactgccatctatcgaataactactacatttggtgaacatctgaatgctgtgcaagcatctgcagaacatcagaaaagacttcaacagttcttggagttcaaagaatagttaagtaatataaactgtgttcattacactgctgatacaactacagatgggacagtaaatgttcagcattcttggatcagaagaaaacggactaattagatgcttcctttgtcgtggtggttgctttgaaaactatactttaatgggagaaatcatggaaagaaattctcaacagaataactgaaaactgccttttctgtaccgattgctttttgtgtgtgtggtataataaaatctttattcaattttacagaaaaaaaaaaaaaaaaaaaaaa

SEQ ID NO: 289529 - DNA, 1000 bp, Homo Sapiens
agaaaagctccaggatccctgtccccatctgtcctcttgatgtgagagagactctgagacttcttccatcgcaatgacctgtattaaacacaagccccccaagcaaaagaagaggttgagtttgctgccaggattcagatcagcccttcccagggtctgcaggtgtcacatgatcacagttcagcgggaggctttccgtacccacactggctgtagccacttcagtccatctgccctccagaggaggggtttcttcctgatttttagcaggtttagaggctgcagcttgagctacaatcaggagggaaattggaaggattagcagcttttaaaaatgtttaaatattttgctttgctaatgtgctgatccgcactaactcatctttgcaaaaggaactgctccctcggcgtgccccagctggggcctctgaagggattcctcactgtgggcagctgccctgagcttcaggcagcagtgttcatctctggccagttgtctggtttccatgtattctaggccaggtaggcaacacagagccaaggcgggtgctggaagccagacggaacagtgttggggcaggaaggtggatgctgttgtcatggagctgtgggagttggcactctgtctgctggtggccctctcggctcacatgttcacagtgcagctcctggcagacttgggttttctctttggtggtttctaaagtgccttatctgcaaacaacttcttttctccttcaggaactgtgaatggctagaagaaggagctcagtaaactagaagtccagggttgcttggtttactggtttataagaaatctgaaagcacctctgacattccttttattaactcacctctcagttgaaagatttcttctttgaaaggtcaagaccgtgaactgaaaaaagtgttggcctttttgcgggaccagatttttaagataaaataaatatttttacttctgtcaaaaaaaaaaaaaaaaaaaaaaaaaaaaaaaaaa

SEQ ID NO: 289530 - DNA, 1000 bp, Homo Sapiens; identical to SEQ ID NO: 117547

SEQ ID NO: 289531 - DNA, 1000 bp, Homo Sapiens
ttttctcagttatactagaaaatttcataatcctgggatatatgtaccattgtcagctatgactaaaaatttgaaaaagataaaaatttctagcaagcctttgaagtttaccaagtatagtcacattcagtgacagcccattcattccagtaaagaatcatttcattcactttgggagaggcctataattacatttatttgcaatgtttctcttcgctagattgttacatagctcccattctgttggttttgcttacagcatatggtaaccaaggttagatgccagttaaaattccttagaaattggatgagccttgagattgcttcttaactgggacatgacatttttctagctcttatcaagaataacaacttccacttttttttaaactgcacttttgactttttttatggtataaaaacaataatttataaacataaaagctcattgtgttttttagacttttgatattatttgatactgtacaaactttattaaatcaagatgaaagacctacaggacagattcctttcagtgttcacatcagtggctttgtatgcaaatatgctgtgttggacctggacgctataacttattgtaaagaccttggaaatgtggacataagctctttctttccttttgttactgtatttagtttgtgataaatttttcactgtgtgatatttatgctctaaatcactacacaaatcccatattaaaatatacattgtacctgaccctttaatcatgttatttatgccaccaaggttgtggatcttaaggtatgtatggaaaggaactcatttatcaaattgtaagtaatacagacatgccatttaaaagaggtaaattcttgttttctatattttgttagtaaattctcaatgaaataagttgaagtttcactggatttcattaacttttaaatattacatatatgtgttttctcagattagtgaaaattgtgaccttaaatttaatacacatatactgcctcag

SEQ ID NO: 289532 - DNA, 1000 bp, Homo Sapiens; identical to SEQ ID NO: 117549

SEQ ID NO: 289533 - DNA, 1000 bp, Homo Sapiens
ctgtcattcaaaggccaataatttaagttgctatcagctgatattagtagctttgcaaccctgatagagtaaataaattttatgggcgggtgccaaatactgctgtgaatctatttgtatagtatccatgaatgaatttatggaaatagatatttgtgcagctcaatttatgcagagattaaatgacatcataatactggatgaaaacttgcatagaattctgattaaatagtgggtctgtttcacatgtgcagtttgaagtatttaaataaccactcctttcacagtttattttcttctcaagcgttttcaagatctagcatgtggattttaaaagatttgccctcattaacaagaataacatttaaaggagattgtttcaaaatatttttgcaaattgagataaggacagaaagattgagaaacattgtatattttgcaaaaacaagatgtttgtagctgtttcagagagagtacggtatatttatggtaattttatccactagcaaatcttgatttagtttgatagtgtgtggaattttattttgaaggataagaccatgggaaaattgtggtaaagactgtttgtacccttcatgaaataattctgaagttgccatcagttttactaatcttctgtgaaatgcatagatatgcgcatgttcaactttttattgtggtcttataattaaatgtaaaattgaaaattcatttgctgtttcaaagtgtgatatctttcacaatagcctttttatagtcagtaattcagaataatcaagttcatatggataaatgcatttttatttcctatttctttagggagtgctacaaatgtttgtcacttaaatttcaagtttctgttttaatagttaactgactatagattgttttctatgccatgtatgtgccacttctgagagtagtaaatgactctttgctacattttaaaagcaattgtattagtaagaactttgtaaataaatacctaaaacccaagtgt

SEQ ID NO: 289534 - DNA, 1000 bp, Homo Sapiens
tggcaacctttgaaaaaatcccatttgagagacctttcaggaggccaaatgctaattttaccagcaacagcttcacatcacagtactggaatgcggtcagccaccgggcccctgccattatctatgactgctatctgcggctcactggaaggaagcccaggatgacaaagctcatgaatcggcttttaagaactgtttccatgttggagtatttcatcaaccggagttgggaatggagcacgtacaatacagaaatgctgatgtctgagctgagtcctgaagaccagagagtattcaactttgacgtgcgccagttgaactggttggaatacattgaaaattatgttttgggagttaaaaaatacttattgaaagaggatatggctgggatcccaaaagcaaagcaacgcttaaaaaggctccgaaatattcactacctctttaatactgccctcttccttatcgcctggcgccttctcattgcaagatctcagatggctcggaatgtctggttcttcattgtaagcttctgttataaattcctctcctactttagagcatccagcacgctcaaagtttaagagcatttagccatcgccttttatctggaacctctcagatacctctaaaacagcaaactgtgattctcaagattagaaagtaacaaggaatatgcccaaactgtcaaatgtcacctgttatgtattcgtccctattccttaactatgtatttttatttcagtgagagaaggaaagttgtaaactagcccatagtcacctatattttagggaaaaaaatccaaattgtttcctaacattctattttatgcccttgcgtattaaacgtgaaagtactcccaaaaaaaaaaaaaaaaaaaaaaaaaaaaaaaaaaaaaaaaaaaaaaaaaaaaaaaaaaaaaaaaaaaaaaaaaaaaaaaaaaaaaaaaaaaaaaaaaaaaaaaaaaaaaaaaaaaaaaaaaaaaaaaaaaaaaaaaaaaaa

SEQ ID NO: 289535 - DNA, 1000 bp, Homo Sapiens
ctcactatccttgggagaactttcttcatttatgattgtgatccatttactcgacggtattacaaagagaagtttggaatcactgatttaccacgtattgatgtgagcaagcgggaaccacctccagtaaaacaggagttgcctccttataacggttttggactagtggaagattctgctcagaattgttttactctcattccaaaagctccaaaaaaagacgttattaaaatgctggtgaatgataacaaggtgcttcgttatttggctgtactggaatcccccatcccagaagacaaagaccgcagatttgtcttctcttactttctagctaccgacatgatcagtatctttgagcctcctgttcgcaattctggtatcattgggggcaagtaccttggcaggactaaagttgttaaaccatactctacagtggacaaccctgtctactatggccccagtgacttcttcattggtgctgtgattgaagtgtttggtcaccggttcatcatccttgatacagacgagtatgttttgaaatacatggagagcaacgctgcccagtattcaccagaagcactcgcgtcaattcagaaccatgtccgaaagcgagaagcgcctgctccagaagcagaaagcaagcaaactgaaaaggatccaggcgtgcaggaattggaagcattaatagacacaattcagaagcaactgaaagatcactcatgcaaagacaacattcgtgaggcatttcaaatttatgacaaggaagcttcaggatatgtggacagagacatgttctttaaaatctgtgaatcgcttaacgtcccagtggatgactccttggttaaggagttaatcaggatgtgctctcatggagaaggcaaaattaactactataactttgttcgtgctttctcaaactgacctgctgatgagaaaatgcaagacaatttttgatactggaactatgctttgaaatacaccttacactcttcatagtggc

SEQ ID NO: 289536 - DNA, 1000 bp, Homo Sapiens; identical to SEQ ID NO: 222817

SEQ ID NO: 289537 - DNA, 1000 bp, Homo Sapiens
ccacatgctattttcagcctctctaatttacaggaactggatttaaagtccaataacattcgcacaattgaggaaatcatcagtttccagcatttaaaacgactgacttgtttaaaattatggcataacaaaattgttactattcctccctctattacccatgtcaaaaacttggagtcactttatttctctaacaacaagctcgaatccttaccagtggcagtatttagtttacagaaactcagatgcttagatgtgagctacaacaacatttcaatgattccaatagaaataggattgcttcagaacctgcagcatttgcatatcactgggaacaaagtggacattctgccaaaacaattgtttaaatgcataaagttgaggactttgaatctgggacagaactgcatcacctcactcccagagaaagttggtcagctctcccagctcactcagctggagctgaaggggaactgcttggaccgcctgccagcccagctgggccagtgtcggatgctcaagaaaagcgggcttgttgtggaagatcacctttttgataccctgccactcgaagtcaaagaggcattgaatcaagacataaatattccctttgcaaatgggatttaaactaagataatatatgcacagtgatgtgcaggaacaacttcctagattgcaagtgctcacgtacaagttattacaagataatgcattttaggagtagatacatcttttaaaataaaacagagaggatgcatagaaggctgatagaagacataactgaatgttcaatgtttgtagggttttaagtcattcatttccaaatcatttttttttttcttttggggaaagggaaggaaaaattataatcactaatcttggttctttttaaattgtttgtaacttggatgctgccgctactgaatgtttacaaattgcttgcctgctaaagtaaatgattaaattgacattttcttactataaaaaaaaaaaaaaaaaa

SEQ ID NO: 289538 - DNA, 1000 bp, Homo Sapiens
taccccccagaccatgtaaatcagtggcacagtatactgcctccttgtgcctctggatcctgccacttcacatctactcttccatggccccatttctccattttgtggaccaagccatcctgagggcatggacattgtctctgaggaaattggggccacccttaagataccaagaaaagctcctgcccatggtcccactggaaatggactctgctgagcaaagccaccagttgaagagaacagaatccacacctgcattgaatacctgtttctccatgtgtatcgtctctgagattaccttcttgccctttccaacaccttagtgattcctcaatttctcccccattgggaaggccatagggcattaactgaaggaactgacctctctccttttcctgtacctttaacctttagtctgtcaaggaaaacccttaggacctctgaatcaagaggactgagtttgtgggtgaaccttgaaggtgctctttctgctacaagggccctgggagatagcatggacgtgcattgagaagccagcctcagaccttagcttgaagcagcttgaggccagacctactgtagcctcagcatcttgctaggaggcatggaagtgatctatcctgccaggaggcctcagagtgatctgtcctgccaggaggtgtgagagtgatctgtcctgtgaggcatttaggggctttcaggaatttagtaaaaggtggagtatgcctttccagtatcttccatcttcctttgtatacttgtccttcctcccatttcctccctttggcccgaggtaggaggatggagggaggctgctactctaccacttcctgtgtgcctctactgtggcctcaaccctggcaattatagctactcccatcccttacctgggcatgtgtgagcccttctcactggattttatacccttgtgtctgtgtacataaatatatatacatatatatatacataaaaactttgtacaaaaaaaaaaaaaaaaaaa

SEQ ID NO: 289539 - DNA, 1000 bp, Homo Sapiens
acatttgaggggaagtcctttcagttgatatgagatctctttaacacccctcagtctatgtaggaaatgccttgtgatacatagagaaccctcagcttctctctgcctctggaggaccaaggtctttcctgacagtcggagacacaccttgatgtatgttaataaaagcatttcaggctgtggggccaccatgtatattaatactccttatgtgtccagcatctgtgtattcattcgagtgcccaatccctggatgagatgaactaggccttataaaaagtcaaagcctcaaagaaatggcacaaccatgttcttcggcactcaggctcctaattgcagatcctcacgaagggtggtatgtggagctggaaggtcttgtggccacaggacatgctggtgagccctgagctggccttgtgcagagggctccgttcaaaggctcggggtgtctttgaggttgtttatcaagctggggaactcttccaagtctgacaatgtttcgaaccctttttgcaaggttgcactattagtataccatcatgtccggaaaacttttaatcttctcaaatatctgatgtaactaccagaaagtcccttacttcctatgaccaatcaggaccaagtcttggaggtgatgtgttacattacgtgcagcacaatagtaccgatcagttaactcagcgctgaagggcttgttttatgaaaggtactattccttctttcacattaactggaaacctctttttttacctgttgttcacaactagttttcttattgactgtattggactgtctcttcttgtagagactgattttggccaacatattaatgcatgttttatgcaaaacacaaatatgatattagttgcttttaaggagttctggcattgtatgtgcatttttgtagaaattgttactggacttataattacatacttaactctgatcaggtttctgtaaaatttaaataaaaccaatacaaaataaaaaaaaaaaaaaa

SEQ ID NO: 289540 - DNA, 1000 bp, Homo Sapiens
aacaggaagatacagatcgaccttccatatcaagtaatcggccctgggggctggtatccctattgctaccatctgctccaaacagaaagtcctttaccaagaagaaaagcaataagtttgcaattgaaacagccaaaaacttgctagaatctttaaaaggtaacagaacagaaaatttcacaaaaaccagtgggaagagaacaattagtactcagacatgatggctgctacattgtgtaaagaactgggcttagcctatcaaatggtctgtggacttacttggaaaaactgatttgaaactttcacagatctcagctttcatctgatgtcacttttcatgatcttctcattggcccccttaacctggtctgaagttctgggatgttttcagtttgatcagtctgatactcagtggcactttattaaaacatcagctgtggagtgtggcggtgcacacctgtagtcccagctgctcaggaggctgaggcaggaggatctcttgagcccaggattttgaatccatcgtggacaacatagcaagattccatctctaaaaaaaatgaaaataaacataagccacaaggaatgggtgaaagattattgtaatgtgctttaactaaataggtaaatatactaaacaaatgctaaaactcagttttaggatgaaaccattgttgatatccacatcagtccctgtttagaaaacatttaaaatgacttttagttatgtacagtacgttggcaatgaatacattaagcttcaaaatttggtagtgctctcgaatatgtatatttgtatttttcaagcgaagttctcttattcacatataaattaaagtgggttggtactgatatcaaaaaatgtttatgtttttagaacagacatttcagtcactgcattcttaggtattccaaaccaaatatgatgacatcaatagattgcattttaaaaatattgtttgatttttctattttcaaaaataaaattctgtttctaact

SEQ ID NO: 289541 - DNA, 1000 bp, Homo Sapiens; identical to SEQ ID NO: 117550

SEQ ID NO: 289542 - DNA, 1000 bp, Homo Sapiens; identical to SEQ ID NO: 222820

SEQ ID NO: 289543 - DNA, 1000 bp, Homo Sapiens; identical to SEQ ID NO: 117551

SEQ ID NO: 289544 - DNA, 1000 bp, Homo Sapiens; identical to SEQ ID NO: 222821

SEQ ID NO: 289545 - DNA, 1000 bp, Homo Sapiens; identical to SEQ ID NO: 117552

SEQ ID NO: 289546 - DNA, 1000 bp, Homo Sapiens; identical to SEQ ID NO: 222822

SEQ ID NO: 289547 - DNA, 1000 bp, Homo Sapiens
gcggatcaaggaggagcccgtgagcgaggagggcgaggaggacgaggagcaggaggcggaggaggagcccatggacacttcccccagcggcctccacagcaagctggccaacgggctgcctctcgggcgggctgcgggcacagacagcttcaacgggcacccgccccagggctgcgccagcacccctgtggctcgggaactgaaggccttcgtggaggccacctttcagagacagtttgtgctcacgctgagcgaactcaagcgcctcttcaatctgcacttggccagcctgccccccggccacacactcttcagcggcatctcggaccgcatgctacaggacacggtgctggccgccggttgcaagcagatactggtgccttttcccccccagactgctgcttccccggatgagcagaaggtgtttgccctctgggagtctggagacatgagtgatcagcatcgacaggttttgcttgaaattttttccaaaaattaccgggtacgccgaaacatgatccagtctcggttgactcaagagtgtggagaagatctcagtaaacaggaggtggataaagtactaaaggactgctgtgtaagctatggtggcatgtggtaccttaaagggacagtacagtcttgacaatagtagcaaactactaacccagcaaatctaagcccaaggaagaagggcggaaccagaagtagggcctcgacttgcttcagacgacacagagcaagaggaactgaccatctcatgacctgtggcattgcacggtgcagtggacagaagggattatcctcagccagtcgcagggtcagcttaagttagttagatcactcccagaagagaccagctgggaccttctttgcagtacaatttgaaattcctgatgtattttgcttattatttggtttcattctcataataaagagagtgtatactgacatgggcaggatgataaaaaaaaaaaaaaaaaaaaaaaaaaaaaaaaaaaaa

SEQ ID NO: 289548 - DNA, 1000 bp, Homo Sapiens; identical to SEQ ID NO: 222823

SEQ ID NO: 289549 - DNA, 1000 bp, Homo Sapiens; identical to SEQ ID NO: 117553

SEQ ID NO: 289550 - DNA, 1000 bp, Homo Sapiens; identical to SEQ ID NO: 222825

SEQ ID NO: 289551 - DNA, 1000 bp, Homo Sapiens
ctgtggccttcctggctgtggctaccagcatcctggcccctgacatcctgcggagtgaccaggaggaggctgaggggccccgggctgaggaggacaagccagacgggcaggcacacgagcccatgcccgatagccacgtgggccgagagctgacccgcaagaagggcatcctcttgcagtaccgcctgcgctccaccgcacacctcccgggcccgctgctctccatgcgggagccggcgcctgctgatggcgcagctttggagcacagcgaggaggacggctccatttacgagatggccgacgaccccgacatctgggtgcgcagccggccctgcgcccgcgacgcccaccgcaaggagatttgctctgtggccatcatctccggcgggcagggctaccgcaactttggcagcgctctgggcagcagtgggaggcaggccccgtgtggggagacggacagcaccctcctcatctggcaggtgcccttgatgctatagcgcctcccctctcccctcagagggcacagctgcaggcctgaccaaggccacgcccggctctcgtgctctaggacctgcacgggacttgtggatgggcctggactctccagaaactacttgggcagagcaaaggaaaacctcttgttttaaaaaaatttttttcagagtgttttggggaggagttttagggcttggggagagggaggacacatctggaggaaatggccttctttttaaaagcaaaaaacacaaaacctcacaactgcctggcaagcccagtatcacttgtttgggccctagcgggactccaaggcagccacacgcccctcctggaagggtgtgtgcgtgtgagtgtgtgcgagtgtgtgggctggtgtgtgaatatctataaataagtatatatggtgtatattatatgtgtataaataaagtctgtacatattggagctctgggagatgctggaataaaagacaagagttacatctggacttggaaaaaaaaa

SEQ ID NO: 289552 - DNA, 1000 bp, Homo Sapiens
ccttgagtattttttaaaaggctcaactgtaagcctcttagccagttggataaatatttggggtcacctagccattgaaagcagaaagcagtagtgacacagctttcccttcaaagagccattgagaaacatttctcaaacaggaaatccttcttttactaatgtggacatatagattattcgtattatagtttgtagaactacctagttcagaatcttgactgccagttttcttggtttcttaggcttgaattttcatagacaattgcaacagtttagatgccttttgaaaggaatgtaatgaagattcagcatctgactatatgtgtgtctatcctgaaataataatggagagtatactgtagattacatgtttacccatcaaatctgacttaaaaggttaaatggaaggttttataggtaaggtaattgattgggaatggggtagggggaggagttgtgggggaataatgtgcatttcagtctcaacgcatagataaatttaggggaattggatgcattattcaactttgatttgggttgtaaaatgtgttaaatcctgttcattgaactcccatcaactcttatgaaattcatgctgatcttcattaccgttgcatgattggaaatgtttaaaacattgtacagttttagtatagagaaatgtaatggtttttgtgaccagtttctgtctgcatgtaatttggatttctcaaatacattcattagtaatttatcagtaacattagttttatttttgttcatctccttatctataaaaaggggatattcttaggataaatacatgaaaaattatacttgatagcttaactataatcagctatttttgtatttttgtaatatttgtccactaagctggagaagcagcctcatacagttgattttgtgtatgtggctagtcttattgtcactatgtaagtaatccaatggttttagaaactaaactttctagagcaataaaatgactataatgttaagt

SEQ ID NO: 289553 - DNA, 1000 bp, Homo Sapiens; identical to SEQ ID NO: 117554

SEQ ID NO: 289554 - DNA, 1000 bp, Homo Sapiens; identical to SEQ ID NO: 222827

SEQ ID NO: 289555 - DNA, 1000 bp, Homo Sapiens; identical to SEQ ID NO: 117555

SEQ ID NO: 289556 - DNA, 1000 bp, Homo Sapiens
agcatcgcgatctgcttgtccatgtggaatactgttcaaagtagcaaaataagtatttgttttgatattaaaagattcaatactgtattttctgttagcttgtgggcattttgaattatatatttcacattttgcataaaactgcctatctacctttgacactccagcatgctagtgaatcatgtatcttttaggctgctgtgcatttctcttggcagtgatacctccctgacatggttcatcatcaggctgcaatgacagaatgtggtgagcagcgtctactgagactactaacattttgcactgtcaaaatacttggtgaggaaaagatagctcaggttattgctaatgggttaatgcaccagcaagcaaaatattttatgttttgggggtttgaaaaatcaaagataattaaccaaggatcttaactgtgttcgcattttttatccaagcacttagaaaacctacaatcctaattttgatgtccattgttaagaggtggtgatagatactattttttttttcatattgtatagcggttattagaaaagttggggattttcttgatctttattgctgcttaccattgaaacttaacccagctgtgttccccaactctgttctgcgcacgaaacagtatctgtttgaggcataatcttaagtggccacacacaatgttttctcttatgttatctggcagtaactgtaacttgaattacattagcacattctgcttagctaaaattgttaaaataaactttaataaacccatgtagccctctcatttgattgacagtattttagttatttttggcattcttaaagctgggcaatgtaatgatcagatctttgtttgtctgaacaggtatttttatacatgctttttgtaaaccaaaaacttttaaatttcttcaggttttctaacatgcttaccactgggctactgtaaatgagaaaagaataaaattatttaatgttttaaaaaaaaaaaaaaaaaaaa

SEQ ID NO: 289557 - DNA, 1000 bp, Homo Sapiens
ccacacttcagaaagaaattttggcgctaattccaaaccagaatgctcttctaaaggacttggatattcttcataattcatcacagatgaagagcatgtcaaccttcattgaagaagcctataagaaactggatgcatcttaaagagtgttttttttttagattgttccatattaatttaatgttcgtgaatttgtaaaactgttaacctatgattatatgtacagaggctaaggcttctgcaggatttattatctcctgatatgcactttaaaattagtctttgtagttctatcattagcatctaatgtagttctgaagactgtttttagcagttgccaaatctaggaaactaacatttatattgctgtatctataagtatttgcctaaaaccataaaataggaattgccttaaggatctaatagtttataatgcctgaatggaactcatttattggttaacagctcatatcaggagctgtgataagtaagtgtttacatacactgtctagtgcataaaaaccttagtgtttgctatcattcattctgtagccaatggcttacagtttctgtctggtcatctggaacttgaaaaatcctcaaatgccttcactcttttacctaactccctagtctttttgggaagtagttaagatatgcctgctatctttaactttggaggtagtatcaaaattttacttctttggttgtttagtgaattaatgttgaatattttctactgtcatcaaaacatattcccaaaaagtattaaaaaggaaccttagcacatttattttattaaaacaagaaaacccaaaatatataaaccttttcttattatgataataagcttatatatgtgaataagttataacctagtgtataaaaaattatttctaacaaactacagtatactgtcttgggtttttttttttttttttagtctgtaaaataaaatgactgcaattactttttaaaaaaaaaaaaaaaaaaaaaaaaa

SEQ ID NO: 289558 - DNA, 1000 bp, Homo Sapiens; identical to SEQ ID NO: 222829

SEQ ID NO: 289559 - DNA, 1000 bp, Homo Sapiens; identical to SEQ ID NO: 222831

SEQ ID NO: 289560 - DNA, 1000 bp, Homo Sapiens
gaagaaaatgttaatgagtttcttgaagaggtcctgagctctccattcaaacagtctatgtccttgaccccaccattaattgaagttcttcaagttactgataataagattcaaattaatgcaaagttgcaagaatgtagtaactctgatcagctacaaggaaaggaggaaagagtaaatgaagaaagtcatctaactgaaaaggaatatatagaacattgtaacacccctacaactgattctgattcatctatagcagttaaagcactacaaatagatagctttggtttagttacatgctttcaacaagagtctcttgatgtttctcaaatgatacttggaaaatctcagcaacctgagtcaaaaatgcaatctgaatttataaaagaaaaaagtgctacttgttcaaatgaggaaaaagataacttaaacgagtcagtaataactgaagagaaagaaacagatggagatcacctatcttcattactgaacaaaactacggttcacaatatacctggattcgacagcataaaagaaaccaatatgcaggatggtagtgtgcaggtcattaaagatcatgtgaccaattgtgcattcagttttcagaattctttgctatatgatttggattaattctatataattttggacttttaaatattaaggttaaaaaatacctgtatctaaaattgattctgttaactgttgtcttaaaactaaaggtattaaagtataaaattaaaatttgcaatttttttaaaaaaattgcaattttgattctcatgggggaaattggagataattttttttttttttgcctctggagtttaaagtttccttatggagataagttttgtgattcctgtaatagatgtgtatgttttctatttgagagttaaaacatttgagagttaaaacatttagttttaatacaacctatgtatatatacttctgtgttaaattttgctttgtcattaataaaatttaaaaatattcact

SEQ ID NO: 289561 - DNA, 1000 bp, Homo Sapiens
catcttgtcatctgttgaagaattcacagcagctcaggacagctctgcgatggtgggtgaagatgtcggctccctggctctggagagtaagtccctgcaaagccgccttgctgagcagcagcagcagcacgcccgggagatgagcgaggtgacggcggagctgcaccacacacacaaggagctggatgatttgagacaacatttagataaatctttggaagagaacagtaggttaaaatcgcttttgttgagtatgaaaaaggaagtgaagagtgcagacactgcagccacgttaaatttgcagatcgctggacttcaaacaagtgtgaagaggctgtgtggcgagattgtggaactgaagcagcacctggagcactacgacaagatccaggagctcacgcagatgctgcaggagagccacagctccctggtcagcaccaatgaacacctgctgcaggagctgagccaggtgcgggcgcagcacagagccgaggtggagcagatgcactggagctaccaggagctcaagaagaccatggccctgtttccacacagcagcgccagccatggaggctgccaggcctgctgactcctgccgagaagctgggccaccccttaagcttcctggtaaagttacattgtctgcacctttgtacttctttattgagtgtactggctggcaagagttctctcttctgttggtaattatttaggatttttggaatgtattcaggacctgtagcttggttttctaaagcacctcgtaaaatgatatgattactccaagccctctgcatgttttcagacagaacacattgacatattttgagacaaactgactattaatcttgtatccagtatcctgagatgaagtaaatgcagtgttctactgcctgatgtgaaagagagctatgtatgataattaaagaaaataattttctgtgtaacaagcaatctttatttaataaacaaatacattgttctgaaaaaaaaaaaaaaa

SEQ ID NO: 289562 - DNA, 1000 bp, Homo Sapiens
acaagaaagcattcttttggactaacagaagtcaaagggaagctctatagcattggaggacatggcaactttagtcctggttttaaagatgtgactgtttataatcctgagcttgataaatggcacaacttggaatcggcaccaaagattcttcgagatgtcaaagcactagccattgaagaccggtttgtatacattgccgcccgcactcctgtagaccgggacactgaagatggattaaaggctgtaattacttgctatgatacagagactcgacagtggcaagatgtggaatctttgccgcttattgacaattactgctttttccaaatgtctgtggtcaattcaaacttttatcagacagcatcatgttgtcccaagagttattgtttagaaaacgaagaggcagtaagaaaaattgccagccaagtgtctgatgagatccttgaaagcttgcctccagaagtcctaagcatcgaaggagcagccatttgctattacaaagatgatgtcttcattataggaggctggaaaaacagtgatgatattgataaacagtatcggaaagaagcctaccgatattgtgcggagaggaagaggtggatgcttcttcctcctatgccacaacctcgttgtagagccactgcttgtcacgtgaggatcccataccggtacttgcatggcacacagagataccctatgcctcaaaacctgatgtggcagaaggaccgcatcagacagatgcaagagatacatcgtcacgccctgaacatgaggcgagtgccaagctctcagattgaatgctaggttctctcaagcgtgccgattaaaactgttacacccgtttcgtgaagctgaagatacccaggctgttatttaaaaaagtatgtcgataacttattttctacatgaactgattattaccccatataaaggaaatagagttaaaaactaaagaatgggagactcagttcaatacatggtcattttgttagcttgc

SEQ ID NO: 289563 - DNA, 1000 bp, Homo Sapiens
tcggcccgttaccgaggacagtacagcagctaccccatcaaactcttctacacctccaacatccccatcatcctccagtcggccctggtgtccaacctgtatgttatttcccagatgctgtctgttcgatttagtggcaactttttagtaaatttactaggacagtgggccgatgtcagtgggggaggacccgcacgttcttacccagttggaggcctttgttactatctttctcctcctgagtccatgggcgccatctttgaggatcctgtccatgtcgttgtttatatcatcttcatgttggggtcatgtgcattcttctctaagacatggattgaagtgtctggttcctcagccaaagatgtagctaaacagctgaaagaacagcagatggtaatgaggggccaccgagatacctctatggttcatgagcttaataggtacatccccaccgcagctgcgtttggcggtttgtgcattggcgccctgtcagtgctggctgacttcctgggggccattggatctggcactggaattctgctagcagtcactattatttaccagtattttgaaatatttgttaaagaacaggccgaagttggtgggatgggtgctttgtttttctaaatgttcaaatatttcattttgtgcgtgtgaaagggaaaacactttgacggatcgtttttgtcagatgacactggtggctccccttttctcccctcacagtttcttgtttcgagtgctgactgacccgtttctgaaatgggcaccgagctaagtctgtgtgcagcattagtacccgctgccttaaaactcaagtttacattattcattaaaaaaagtacatctagtgttgcctgtaatgctggaaaccagtgtatctaccttgctgtgttaaatcatgacagtgagacggtgagatggattcgttttgcacacaacattcaaaacacttcatattgcccccacttgttgaaaaataaatgtagttcaaattgcc

SEQ ID NO: 289564 - DNA, 1000 bp, Homo Sapiens
ttgctctccagccagaaaaccccatggctcactttcttcttggcaggtggtgctatcaggtctctcacctgagctggctagaaaaaaaaactgctacagccttgcttgaaagccctctcagtgccactgtggaagatgccctccagagcttcctaaaggctgaagaactacagccaggattttccaaagcaggaagggtatatatttccaagtgctacagagaactagggaaaaactctgaagctagatggtggatgaagttggccctggagctgccagatgtcacgaaggaggatttggctatccagaaggacctggaagaactggaagtcattttacgagactaaccacgtttcactggccttcatgacttgatgccactatttaaggtgggggggcggggaggcttttttccttagaccttgctgagatcaggaaaccacacaaatctgtctcctgggtctgactgctacccactaccactccccattagttaatttattctaacctctaacctaatctagaattggggcagtactcatggcttccgtttctgttgttctctcccttgagtaatctcttaaaaaaatcaagattcacacctgccccaggattacacatgggtagagcctgcaagacctgagaccttccaattgctggtgaggtggatgaacttcaaagctataggaacaaagcacataacttgtcactttaatctttttcactgactaataggactcagtacatatagtcttaagatcataccttacctaccaaggtaaaaagagggatcagagtggcccacagacattgctttcttatcacctatcatgtgaattctacctgtattccagggctggaccacttgataacttccagtgtcctggcagcttttggaatgacagcagtggtatggggtttatgatgctataaaacaatgtctgaaaagttgcctagaatatattttgttacaaacttgaaataaaccaaatttgatgtt

SEQ ID NO: 289565 - DNA, 1000 bp, Homo Sapiens
aagtgttactcaccaaaggctgtgtggatgcctgggagcccaaagtgctccgggcgggtatgggcgcacatttccggatgcccattatcaataatctggaatgggaaaccgtgcccaattacctgccccctgacactcgggtctatgtggctgacaactgtggcctttatgcccaggctgagatgtctaataaagctagtgaccatggctgggtgtgtgatcaacgagtgatgaagtttcacaagtatgaggaagaggaagatgtagaaaccggagccagtcaagattggctgcctcatgttgaggttcagagttacgactcggactggacagaggcgccggcagctgtggtgattggcggggagacctacggcgtgagcctggagtccctgcagctggccgagagcactggtggcaagaggctgctgatccccgttgtgcctggtgtggacagcctcaactcggccatggcggcaagcatcctgcttttcgaagggaaaagacagctgcgggggagggcggaggacttgagcagggacaggagttaccactgaggacgcagaagtgacttctgcttgaggacgtctgcagctcctcctacaccagcacactggtgggaggctggcggagtcagtgactatggcccccacgttcaggaggaaggtgtgatgccgtcatacagttacaggaaaaataagaacttcctcagaaagaacaggtccgaattcttcctgtcgcgtcactgattttgaggttcttttttctcttggtgacaataggtgacccacgtggctctgtgtgtttttaaaaattgtccaccaagaagcactttgtgcccagaaagttcctgaagcatcatcctggcagggaggcgcctgctccaccagctggtgggtgtttgtaatcgccaagcaccagctataggtcacagccacatcactcacagctgatcactggttggtggaaaataaactatgagcagcagaaaaaaaaaaaaaaa

SEQ ID NO: 289566 - DNA, 1000 bp, Homo Sapiens; identical to SEQ ID NO: 117558

SEQ ID NO: 289567 - DNA, 1000 bp, Homo Sapiens; identical to SEQ ID NO: 117559

SEQ ID NO: 289568 - DNA, 1000 bp, Homo Sapiens
ggcacagattagtgctcttgctcttcagctggattcagaagatcttcataattattcaggaagccaactatttgaaatgcacgagaaactaagttgtatggcaaactctgtaataaaaaatctacagtcacgttggagatcaccatcccatgaaaattctatttagtattttcagagaaaattgaaggtttttttaaacatcactggatttcttgattgaggaaacaagttctgaaataatagcacaatttcaaagaagagactctttgcaaagttgataacatttcaaaccctgaaggacagtgacttattatgtaagttcaattttgtaagttcattatgtaagatccttttttttttcataatatgtattcttggctgctatgcgtggtttttcaggaaatttaattatcttactgagatgtgaaagcaaaactagtaacagaacttacattttatttcatgctttcttaaacccgtgcatattctggtgaaacatgtaaaatactttaagtaaaattgaacatttttatttgaatttttgctgaactgataaaggtgtttatatttttgtttgtttgtttgtttaattcatgtttgttgggactgaggtttaggaagtttgttactggttaaaaacctcaaatgaaatgcgaaagaatttgaatttttcctgcatatgtcaactttggacagctttcaagaaaaatgagaaaagtttcaacttctggcggttaaaatattaatgcagaatttactaagattttattcatttgcattagcaaatattcatgcagcagcagttgactgaaaatttattcttatgagacgtatagtattcatttttaaatgcatgattgtacattatgtatagacgacaatgtttttaatttataaatttcattctttgttaattgcatgggtttttctgcagcttattgtgaataccttggttctgttcaatagaaacattttgtatatattaaatactgaaatatca

SEQ ID NO: 289569 - DNA, 1000 bp, Homo Sapiens; identical to SEQ ID NO: 222834

SEQ ID NO: 289570 - DNA, 1000 bp, Homo Sapiens; identical to SEQ ID NO: 117560

SEQ ID NO: 289571 - DNA, 1000 bp, Homo Sapiens
cagactctatctttgcttgttcaagaagaaggttatgggtctctttatcgtggtctgacaactcatctagtgagacagattccaaacacagccattatgatggccacctatgaattggtggtttacctactcaatggatagcagcacgaggactgctgtactgcaaaaaaagaagaccaaaagattacagtggaccatgggatacagaagccagcatggcagacagaagaaaaatagtttgggaacatgtaactattctaagtggaagttttgttgtaggaattatagtaatcacaccacattacttggcctttcggtaatgtgaaaaaaaaaaaaaaacctcagagcctccaaggaaatgcctttagaagcactcctctctcaaaattgccattttctctaccatgtcccccagacacagttgggttttgttgatttatggcagtcttctaaacaaagccatccttaattttacatactgtattgtaactatccaaagatagtattggcagtcataaatttataacttctggcctttgtttaattccagtaaaataacagcaatgacaatgagatcgtcagtattattttcacatttccctgagaggacctggcacaatattttaaatttaattatttggcagtagtcactgtttttgacaaccaatgaaatagcgtctaaatatcttgtatattttttagcatcaaaatgttttggtttccactgctgacaggtgcttgttgtttagcctaatgtggatatttaaattgttaacataccaaacacacatggtaatagtttgggacaaaataactagtaaaatgttgatttctcggctatttcactgactgcggcatgtcctcgtgtcttctctgattttgtggtacatgaatgaatgcatttatctttttagtgacttactagttacgaacttgaattatcacctctttgtcatacttaagtatcatttacataaagtgtaaaagattttttcacttt

SEQ ID NO: 289572 - DNA, 1000 bp, Homo Sapiens; identical to SEQ ID NO: 117561

SEQ ID NO: 289573 - DNA, 1000 bp, Homo Sapiens; identical to SEQ ID NO: 222836

SEQ ID NO: 289574 - DNA, 1000 bp, Homo Sapiens; identical to SEQ ID NO: 117562

SEQ ID NO: 289575 - DNA, 1000 bp, Homo Sapiens; identical to SEQ ID NO: 117563

SEQ ID NO: 289576 - DNA, 1000 bp, Homo Sapiens; identical to SEQ ID NO: 222838

SEQ ID NO: 289577 - DNA, 993 bp, Homo Sapiens; identical to SEQ ID NO: 30353

SEQ ID NO: 289578 - DNA, 1000 bp, Homo Sapiens; identical to SEQ ID NO: 222839

SEQ ID NO: 289579 - DNA, 1000 bp, Homo Sapiens; identical to SEQ ID NO: 222841

SEQ ID NO: 289580 - DNA, 1000 bp, Homo Sapiens
ttgtctcaagaggaggaaacagaagttgccagtcttcttaaaagctagtcatagaactgactttgcatcacttccaccatgttctgttggttaaagtcatagaccagcttggagttaatgcagaagaggactacacaagggcatgagtgccaaagtgtggtcctttggggttcatctttgacatttgccacctcaccatgtttttaaaaagaaaattagattacataaaacaaatagatgggctggatgtggtggctcacacctgtaatcccagcactttgggaggccgaggtgggcagatcacttgaggtcaggagttcaagaccagcctggccaacatggtgagacaccgtctctactaaaatacaaaaattagccagacatggtggcattcgtctgtaatcccagctacttgatgcgaaggctgaggcaaaagaattgcttgaacccaggagatagaggttgcaatgagccaagatcactccactgcactccagcctgggcgacagaatgagactctgtctcaaaattaaaaaacaaaaaaccaaaaacaaatagatgaaaaagtagactggagacaaataaaagtgagtttctaaaggaaattcacagtaatgctgcattaaacactaagctcacttaggtcactttctagtgagctaaccgtaacagagagcctacaggatacacgtgagataatgtcacgtgtagaagatcgttgtgaattaaagttcaaaattaagacttcttagattatgatgtagattttagagctccttaaaacataaagcgaatcttataaatgttcaattctaaagttattccacttggaaaaattagcttttgggacaatttttaagaacttttgtgtaaatgcagctccatgtttagcataatctaaaaataatttcaagcaatccagaatcttccaagaatttattaaagctttaaaacaaagcaaaacaaaaagacccttttgtgccttatatgggaagactcc

SEQ ID NO: 289581 - DNA, 1000 bp, Homo Sapiens; identical to SEQ ID NO: 222842

SEQ ID NO: 289582 - DNA, 1000 bp, Homo Sapiens; identical to SEQ ID NO: 117564

SEQ ID NO: 289583 - DNA, 1000 bp, Homo Sapiens
cacttggttcctcacaaagccaagccggctgcagctgccacatccctgggtttatgatgcagcaggtgcttttttcaagacaggaatcaaagtgttaggaacatggcagaaaggtgacacctggagaccaaatgcagggtaaggagtactgcagaggtcacagggaagtcacagaacagtaatacgctagcaggggcatggggcgtgaagaacagaagacaggaagcgtttcagagactccaaagaagaaatcagggccaaccacagcttcccgagtcattcaccaggtggcaccactgccttcatttcagcttccggccactgggaggcgctgctcgaaagggtttgccctgagacaccaagaagaagctgcgggaaggacagcaggggccctggggttttagcctctggcccaggagttatgtgtccataaccaaagggagcacagtctgcacccagctctcatcccatcagagctgctgcgactcccgcaggttcttccagaactggtttagcttgcctgcaggatcaggaaagtttgagaaaagcatctgcaaaatactaaagagcagagcttacttcattgtctgtccccaccccatcccaggtcaccacctggctgaacccaggtccccgacccaaaaacaacccctcccaagtccctaactccctcacttggacttgagacccttcacaacccagcagcgctccgcctccaacttgacatcatgctttctggaaacttccccgtgtgtcccactttcccacacttggtgcgctggagcaccttccggcctctacatgctgtacgttcccctgtgagcaccctcctctcagcctctggccaacacagtcccacccatctgtgggtaacaagggggtgtgggtgttcttttcagccttgctaaactgtctgaatcaaggatcacaaactacagcctgcaggccaaatccagcccacagcctgtgtttgtaaataaagctttattggaacaaagcc

SEQ ID NO: 289584 - DNA, 1000 bp, Homo Sapiens; identical to SEQ ID NO: 117565

SEQ ID NO: 289585 - DNA, 1000 bp, Homo Sapiens; identical to SEQ ID NO: 222844

SEQ ID NO: 289586 - DNA, 1000 bp, Homo Sapiens; identical to SEQ ID NO: 117566

SEQ ID NO: 289587 - DNA, 1000 bp, Homo Sapiens; identical to SEQ ID NO: 222846

SEQ ID NO: 289588 - DNA, 1000 bp, Homo Sapiens; identical to SEQ ID NO: 117567

SEQ ID NO: 289589 - DNA, 1000 bp, Homo Sapiens; identical to SEQ ID NO: 222848

SEQ ID NO: 289590 - DNA, 1000 bp, Homo Sapiens
atattgatcccacagccactgcacttgcccttgccacacttgatctcaagggcatcttggaagtatttgaccatttcttgagatatggggggaaaaagtctttgtattggcatcttggttccagactcccctttccaaacctagaaaaatacagtgacctttgagcatacccaagatccctttctcactgttgcctgtcccctaactcacctccccacagcccctatcctttccccctcaacaaaaacaaaatctaccttacttgaggaattaggtaggtaaggaatgatcacattggagtttgggattaaaaacaccaaaaaaaaaaaaatgcatttggttctctctacactggctaagaatattgctctacactgtaagttttaaacgttacgtttctgtatgaatgtagtgtgggtttgagtagcattgtgtgtgagtggccccacaggtagattcaccctctagtgcagcccctcagtttaatgaaggaaaaaaaaaacaaacacaaagccttaagctctttgagtacttcctttaccaaatgagcatggttctaacacctggagctgggcctacattggaaacaagcccctcctgccctctgtccattcttagagcataccttcatccactccatgctcagcacgtctcatcccaagcgacaattagttggctagaaacacttttctgtaattttaaacttagactgttttgttacaaatttttgcaccattctgttaaagatgcagaattgggcttttttattttttacagatgaaataagcccttacctttcctcttgtctctggggaatgtcagctgatggttcttatttaaggttttgcattttgttcactatccactactgttcgttagccagaaattctctagtgatctgaagcaatgtgactgaagaccagttttaagttatgtgttggcaagttgccttatatttaaaaggaaaaagaaaaaaaaaaaagcctgattgtgttatgcc

SEQ ID NO: 289591 - DNA, 1000 bp, Homo Sapiens; identical to SEQ ID NO: 222849

SEQ ID NO: 289592 - DNA, 1000 bp, Homo Sapiens
gttcgactgggccatcaatgaccgcatcaatgagatggtccacttcgacctgccagggcaggaggaacgggagcgcctggtgagaatgtattttgacaagtatgttcttaagccggccacagaaggaaagcagcgcctgaagctggcccagtttgactacgggaggaagtgctcggaggtcgctcggctgacggagggcatgtcgggccgggagatcgctcagctggccgtgtcctggcaggccacggcgtatgcctccgaggacggggtcctgaccgaggccatgatggacacccgcgtgcaagatgctgtccagcagcaccagcagaagatgtgctggctgaaggcggaagggcctgggcgtggggacgagccctccccatcctgagtccacagggagatccacagctcacggagcctggccgcggacccctcccacccctgccttgccggcccctgcacatttaggatatgctcctggatggggactgggctgtgcccagggcctctgtcccccaggatgtcttgtggtggcggtcggtcgttctgccccccagggcaccccctgttgtaggcactggctagggaggggcaggcctccttcctgcccctcgagacactcttgggagatgcattttccgtctggctcacagggggagggtgaggctttgcaccccagcccctgcccaggccactgtgagggtgggtgctggctgagcccccggggcagcaggagccaggcaggtgatgtctttgttctcggctcccacagcagagccaggtgagggggcgcctgccagggccagacccaggtggggcagcctgaaccctgcttccccctgtggccggcatgccccgatctttcacacactggtgaccctgagagaggagggaggagggaacctggcgggggtgtctgaggccgcactgtcagctggccggtccaagcctgtggctggagctggggtctgtttacctaataaagtcccacaggtgcctc

SEQ ID NO: 289593 - DNA, 1000 bp, Homo Sapiens
atggacttgagtaaaatggtagttggctcttgtgctcaattttctcttcctctgaacactgactactttaggagctgcttcattccaattgcaatttcataaaacgtaaagtattttaaggcaaagaaaggctgttaattccctccctcccccaaacacatgatttttaatattctaaacaatatttttcaaagttctcttaataacctgagatttctatggtttgactccaggatcaaaacacaagggactttgtattatttcacttataattgttttgtatatttctggagtttaaaatgtttaaggttgcttcccgctcataaatacataatatattgaatttaaaatgtgtttattaaccgattctccataaataaaaataagatgtgtatgtaaaataattcatctgttgtatttagagaaccatattcattgcatgcaaattttattgttagtgttcttaactcaagtaggagtaaaccaaaaagtgtgatttttcttttgtatgactcgtttgttctttattagttggtggtatgggttggatcatttgtttttaaaactacttaggtatgattcacatacaaaaagctgcacatatttaatgtatcctattgtgtaattaatttttaatttttttgtgtacttcctaaacttatagtcctgcgagtctgggaacagatctgtttttcacttatcctgatttaatgacagtttccaacattgttttgttattacaagtaggggatctttttttttgcccgtttaatgaagatactaaaaataatgcactggaaggagtggaagagttggaaaatttgtaaccatcataatacaggtgtaataggtttgggaaagaatcctcaaaaatgttaaagcaagggaggaaagtttgttgagaagcaagatgttcttctctcctgcccgcccccgccgttggttgttggtggtcagaattattgtgtaataaataatagacattttttcttataaaaaa

SEQ ID NO: 289594 - DNA, 1000 bp, Homo Sapiens
cagagccatggtataaattaacaggttaatgtcagtcatcagatcttccttctcttcctaaggatgcttgtgttgcctcaatctatcaatctatctttcttgttttgggttgttttctctctctctctctctctctcttcttagagacatggtctaaccatgttgtctaggatatagggcagtggctattcacagatgtgatgatagcacactggagcctcaaactcttaggctcaggcgatccttcaagcctcccggggagctgggaccacaggcacgtgccaccacacccagctctctttcttggtttttcatcatttcatgtatctatcaaagcccagttcacctcctcccccaaacacacacacacacacacacacacacacacacaattaagttgctgcagattcaaaagcttagagagaataagcttcttggtggtgaaactacaactctcacgtgtgctccagttctaaaattaacctgtgcctggtctctgaagccctttcttgctctgtgcctttcagccacatccttaggtgctaacggccatgagctccgactctccaaagtgagctccactttgggtctgaggagcccctggcagagtccacgctgcctcaggtatcatgggcgtaatgatcacccaggctccgggagatctcatggatgattactgtatgagacagaggggacttcagtctttccagggccttggtggaatttttggctctggtgttttcgccagacaataaacttacactggaagctttgatccaccctccacagtactccagaaaggactgtcctataagttgtacactttaaaaggtcatgtagaggttgtagtagaatggcttttcaccctggtgactttggaagaaactcttgaatactgcctgcatccgggcaccatggccaggttgcctaggagtggggtccactgatgaaaagaggtgttttgtacttacataagaaaaataaatttctgattgatttt

SEQ ID NO: 289595 - DNA, 1000 bp, Homo Sapiens; identical to SEQ ID NO: 117569

SEQ ID NO: 289596 - DNA, 1000 bp, Homo Sapiens
tagataatctacatgtttgtagaattattttgaatatgtttgaggaaaatgtttaaaatctaaatatactcacataacttgattattcactcctctgaaaagatgctggataggctaccaaagttcccaagtggtagataattcagaagacttgtttgaatttggatttttttttttttttttggagtggggaagggtataaaggaggcttaaaatttgaatccataatatatctaattacaggagaatttacaacatctcaagtacgtaaattaagttgtcattgagtgaaaggttcacttggacctagtgctgcctcctgtttattacatagcatggcccttatgtcttgagttgaggttatcatctcaatgaggcttaagctcctagagtacaggaccattttgttgattgtctttcttcatagcttctctgcttggcaaagagatgggagggggccagatactgactacctggggtaggcacattgtgtgttaaagcaagacagaggccagagaggggcaggtagacctgcatagcagcagcctcagcagctgtcttggtaaaggagagagagagacatggggccagtaattccggggtgctcagaagttttaggagggaatgagcctcagggaggagtgagcacctaaatgaacgcagtaaaccttcatggaccaacagtgattgaggatttgtgggcagccagagggagtctgactgaagtttacttggaaagaaagggcttgctaagaaaaaagggagtaaaaatgatgatagggaagtgtctaatgtatgtgcacatataagtaatacaaaagttttgagctcttccaagtataccatttatatacaaacaaataggtttattcattcattaaactactttggaagcgtcagtggatatatttgaaagtggtaatcctgaatctcttttaaactattatatgattcataatggttctcaggaattaataaatgattactgtgtttagctctg

SEQ ID NO: 289597 - DNA, 1000 bp, Homo Sapiens; identical to SEQ ID NO: 222852

SEQ ID NO: 289598 - DNA, 1000 bp, Homo Sapiens; identical to SEQ ID NO: 117570

SEQ ID NO: 289599 - DNA, 1000 bp, Homo Sapiens
ctgcttgaatctggagcagattgcgggtttataaaactgctttttatctgagaacaaacgggtttggaaattagtcgtcttttttccccactcccagagctgctcaaatcattccaccggccccctcggcttgggacagggtagtgtaactcccgatcccagggcctagccctgacacaggtggcttcccgtatcccggtgggaaaacgccctgccaccagcgggcttgagctggcctgtgtccctccactgcctgcaccacccacctccagagtgcagtgctgggcaagggcagctcaagaggacaggaccaggcgcttggcaagacatcagacacacccaacccaaaggcgtggaccccaggcccggcccgtggtacccagcaggtggcactgcagctccccgctcctgcaggtccagcgtcctcacaggaacaccagggcctgtgctccggagccttccttcagacccttcctccacgtgcccacttgggatgcagaatgcagcggagctaggaccccctccacggcctggacctcggctgcagtaaagttacgtgaggcctgtctctcggggcctggaagtggcagccatcagttgctcttgctgacccctcggagcaagcgccgcacaggtggtggctgagacagctggcgtggggggccccaagctgcgccggcctccagcccacccacagctgttgctgaagtcaggcctccctccccagcactggtatctgagtaacggctaagaacctccttcctctggttttgaaaagcagttcgggttgtccaattctgtaacattcatctccattttttaaaaaggtttctctgacggccccacggcccgagccgcggtgagcgtcgtgttgcatgagcctgggccccgggcttcccgtgcgcctctgccgcaggtgcttctgggcacccatcctctgcgtttcatttgcagtcgactgtacagaaggcactcaccacaataaacctttcctgaaagc

SEQ ID NO: 289600 - DNA, 1000 bp, Homo Sapiens; identical to SEQ ID NO: 117572

SEQ ID NO: 289601 - DNA, 1000 bp, Homo Sapiens; identical to SEQ ID NO: 222855

SEQ ID NO: 289602 - DNA, 1000 bp, Homo Sapiens; identical to SEQ ID NO: 117573

SEQ ID NO: 289603 - DNA, 1000 bp, Homo Sapiens
ttcgaatactaagacacaggaggtttagcctgctttcttaccaaattcatgttacccagacttgtgttctcttgcgtcccttggactgcctgttgattgatggaaagtgtctgcactgacacttttcgtcagtagtctgtagtttcgtggcctcttttgattataactggggtcaccaagaaggtttacttaattaaataccgcatttctaagagaagatactttgtgtaagaaaagatgccacatttagtggtttaacttttgtaacttcacttgatagtttttaagcaattagaatggagttagggaaagaacatatcatactgaacaaatgtcattctagtttagatagcatttctaagataactgatactaatacttgttttcttccctataacataaaaaacttcactgttaagtcatgtcccttgaaacatgatagttacatacacagttttctctccacacataaataacaccactaaagttgttttgtaaggttccaaactaatatggcatatatcaactctacagtttcaaataaatgactttttaattgtaaaagattagttgaaaaactgtatgaatgtgaagatcacatgcttagtcatttctatgttcattccactttgtatatcttttctatttattgacttctcatgttctagagagtaggacttttattccgtgtacctgatatatatacaattaaaatatctgtataattatgttttaatgaggtttatttcaacagatattttatgaaatgcagtttaaccacagtgaatgaattttagctttgcttttgaaatacattgtaagatttgacttgaggtttttgacacttaagtacatgcttaatgatatattttcaaaagtcatcagtctacttacataaactttacctaatttttttcactttaacaaaaacataactatgcccttgttttttcatactttgacccaaaatatgccattttgaaataaaatttaagctttg

SEQ ID NO: 289604 - DNA, 1000 bp, Homo Sapiens
gaaaatgatgcggtaacaattcaggttttaaaccagcttatccaaaagattcgagaagacctcccgaatcttgaatccagtgaagaaacagagcagattaacaaacattttcataacacactggagcatttgcgcttgcggcgggaatcaccagaatccgaggggccaatttatgaaggtctcatcctttaaaaaggaaatagctcaccatactcctttccatgtacatccagtgagggttttattacgctaggtttcccttccatagattgtgcctttcagaaatgctgaggtaggtttcccatttcttacctgtgatgtgttttacccagcacctccggacactcaccttcaggaccttaataaaattattcacttggtaagtgttcaagtctttctgatcaccccaagtagcatgactgatctgcaatttaaaattcctgtgatctgtaaaaaaaaaaaaaaaaaaaaaaacaaaacccacaagcacttatcttggctactaatgaagctctccttttttttgtttgtttgtttgcttcattgttgattgtgtattttcttcattcctggggagtactaacccaaaagcgtctgtctcttgttttctagtccagtttgagattaatttagaagaaaggaatactgtatgtgaaattcatcttgggctttcccctaaattgcaagataaggccatgtgtaagattttccctaaaactagaatatattaatgcatgtttgagaattttaaagcaccatggtcaaaaccagaagctatattttgcatatttggactcagccatccattaagaacccatgttgtcctctggacatatttatcaatataattgggttttaaatagtataaaagaaaacttgtgatctatataatttatgtatcaccttcattgtaaatttagcaggaaatgcatcacaattatgatttttttttttgcaccagtgaaacaataaagatgctattaacaaaaaaaaaaaaaaa

SEQ ID NO: 289605 - DNA, 1000 bp, Homo Sapiens
ggactggatgatgtgctgccacgtgtgactcgtctcccttgtctgccctgtgtgaccctcagtcttggccagccatgcatgcgcccgaagctcgtgcagtttgtacgtgaggtgctctcctccctgccaccatgctcatcactctggccttggccatgctccctggtcaccccacttcccggtcgccgtctgcagcactcctggagcagcctgggcccttcagcccctgtgctcgtcccaccctagggactcagccacttgcagaacaggatgggaccgagatttcagcgagccctcctggcgcccggtcctccctgtgggcaccagccctcttggtagctggtgtggagggccggtgtccttggctgccacggagggatttgatcaccgaagcagccacctgctgtagttggacctgaggtcagaggcggggcatcagaggctcaaggtgctgagaagccaccgggaaagcagccagcacaaagggcccaggaagccagcccccgagagctgagcgtgggggtctttgagtgtctttctccaagctgagacgtgggcggccgcgtggtatctcccgagggctgcttggaccctggtgggctgagtgctccgaggaggggtggactccaccttggacagtgggatgtggtgttccacatgtgcctgtttccacgccagcaccttgacttggcagcatggagccaaggtctgtccccgcccaggagggtgccttcctcgggggtagggggacggcccactctgccccagggagtcccttttgatgggaagtgcagtcagcagcgtggaggtgtctgggccaccttcagaaggtggatgtggtggccgagaccccgtccacggagggtgatggcctttcccttctgcaggtgcgggcaggtgggcctgggaccggtgctggggcctctccttgctgtgtgtgagggcccaggtggaaggcgcggacctgacagcattccaataaagcatacgggaacatgca

SEQ ID NO: 289606 - DNA, 1000 bp, Homo Sapiens
cactgactgggtccatcagagggctgcttcgttctccagctcatcttcttttaaagtggtgactagcttggtggtatctggctgctggtgtttggcttattgacatactccagggtaatcaatgatgactttgtttggaaacccttttggaggcaccatgggaacagaaggaaacatgagtgacgctgacccttgagtgtgtgggtggggagctctgagacgcctcctgtcccacgctctccggtgtccgtgtctacacaggggtccccatgatacccaccggccccagcagggcagaccggaccggggacgggcacggtgaagggctgcagcctggggtctgacgtggcccctagtgctgtctcaggagaaggctctggaggacttgaggcatgctgggcctggtgcagtgatggcgctaaggagacccggggaaagacagtatcgtggtcacgtatgcttaggaagcagcacagccgtgtccttagggatgttcgcgtccagtaaagacactggtaactgcggtttcagccaacactcttcatggcagtgtcgacctcgggttagcttctgttgtctttgtggatggttttcctggagcggcctgacgttgacgtgttctctggtcccatgtcttagcggggcatggtacggtttcgtgcctgacgcgtgcattagggtgttctcttatactttcagtagcatctttccacagcaagggccaaaccctcctggttcccttcagagtctttttggcctgatgatgactcttgagtgataccctgtgatgcagacatgccccagatggattctactttctttaaaactagggactttcaagattaaaaaaaagattgtcactactaatttgacgcctaacttcagaagcttcactgcctacatgtgaacttttccagaaaaactgtgccatggacatttttcctctggggaattaacatctaaattctggtaactattaaaagacagatctggttaattt

SEQ ID NO: 289607 - DNA, 1000 bp, Homo Sapiens
gagtcttaaggagtcacagtatttataaccattttgagctaataagctatacctcactctctgctttctctctctctctttttgatagtgtgttagggtgaaaaatcagttatttaacccaatttacttgtgaaagaagttttatctttatggactatgatgacttttgacatcaccatttcttgaagaccttggtattaaatgcatgagaaaccttttgccatctagaaatttctaagtttgtttatgttataagactgtaattaattgatagggaatttgggatctcaatccggggctttttgaaatcagatcattaaatatctcgtcactttggggacttgttatttttaactatgatgtggatatcctgttttaattatgaagtctagaattggtacatatgttgtatgctttgtaaagaatttcacttggtctaatttattgcatatactagcttctgttggaaaatgactgacagctagaaagtttaaggtaatttctaagtatactacctataagtaactgataagaattaggcatcattcagtgatatagcagatgactaatgggtttttcaggccctgcacttctctttcccattttcctgttgcattcagcctcttcaatgcttagtcacacctccactatagtacaaacaaacaaacaaacagaagaaaggaaagatggtgaattttgcaacagagctgcaaaaagtcagtcaaagcaggaagaggttgaaggaactaaaacaaacaaacaaaggtgtctggactacagcacagtggacatgccatccatactggcctgtgccccgttatcaatcactgggcacaacagtgaagaagtgcaaatcaagtggtgtttgtttgtttgtttgtagtaaggaccgtaacccaccccttcctccccccaaaactatactgttatttttctatgtaagcaaattgtttgaaatgctttgaaaatgaaatcttaatattaaaaggcatatgcatgt

SEQ ID NO: 289608 - DNA, 1000 bp, Homo Sapiens
acatacgacctttgtttttgtcttatgttggggtaaaggaaagcaggaaggggaatttttatcctcctcccttccgtaaagtgctgggatattttgaatcccccaagttcccttggacctactgatgagagatagttttatgtatggggaaaaatggatactttttaaaccttttttggcagctcagatggtgtaaattttaaaattttgtataggtatttcataacaaaaatatgtatttcttttttgttattttatcttgaaaacggtacatattttagtatttgtgcagaaaaacaagtcctaaagtatttgtttttatttgtaccatccacttgtgccttactgtatcctgtgtcatgtccaatcagttgtaaacaatggcatctttgaacagtgtgatgagaataggaatgtggtgttttaaagcagtgttgcattttaatcagtaatctacctggtggatttgtttttaaccaaaaagatgaattatcaatgatttgtaattatatcggttgattttttttgaaaagatgaaccaaaggatttgactgctaatattttattccttacactttttttctgaataagtctctcataatgagtgcagtgtcagactgtgcctactctgatggtatgtgccatttgtaaaataaaatagagcagaaaaacacaaaaagagaacactggttcagacattcagtgggcaagtaaattatggactgcaaaataatgatttttattcaagaaagctttaaaagttttatatccagatatacaaccacaataaagcaaaataacctactatcaaaatagaaatgttgctatctttataagtgcaatttaatttgtaaatagagtttgaatcaaagtatcacaaaatactgcttcaagatttaattttaaatctgctaatttaagggatattgggaaaagttttggtgtgtttctgttgatttcttttttgtatgctgtgataaaagagaaatgaaaagtgaaa

SEQ ID NO: 289609 - DNA, 1000 bp, Homo Sapiens; identical to SEQ ID NO: 222857

SEQ ID NO: 289610 - DNA, 1000 bp, Homo Sapiens
tgtgtgtatcagaagtaattttttaatgtcttctaaggatggtcttccaggcttttaaactgaaaagcttaattcagatagtagcttttggctgagaaaaggaatccaaaatattaataaatttagatctcaaaaccactatttttattatttcattatttttcagaggccttaaaattctggataagagaatggaggaaaatactcagagtacttgattattttatttccttttattaaaaaattacttctatgtttttattgtctcttgagccttagttaagagtagtgtagaaatgcatgaacttcatcctaataaggataaaacttaaggaaaaccacaataaaccatgaaggtgtacacatcctataacacagataaagttttggtgtgctacctattcttgagagagtgagtgagtgtatgtgtttaaaggaaacaaaatgggagaaataagttttaaaaaaatcctcattttgttaatattcaaaagatggactgagcttccacttgggttttatcttgttttaattgtttttgtatcaaaacttgaaattcctctatttctattgggatataaaagccttccccttcagtgaagaaaacatttattttttatttgattcctaggatttagtaaactctagctgtctatttaaaatgtactgaggcacaacaagtattatactggaagacttgccaaactggcaaagctttaagttcatcagcattctatgtggttcagagctgtgatttttgcaaagtattttaccaacctcctcgatggctttgataaaggttagatttgatgttttttttttagatttatttttcttactccactaaactataaagaaaataattacttagaaactccattttaaataatcatttcctagaaattcttaaatatatacagaattttaaagaaaacatttcatctgatttagttagcatccacatatcattgaggaattaaagtgtgggacagtcattatt

SEQ ID NO: 289611 - DNA, 1000 bp, Homo Sapiens; identical to SEQ ID NO: 117576

SEQ ID NO: 289612 - DNA, 1000 bp, Homo Sapiens; identical to SEQ ID NO: 117577

SEQ ID NO: 289613 - DNA, 1000 bp, Homo Sapiens; identical to SEQ ID NO: 117578

SEQ ID NO: 289614 - DNA, 1000 bp, Homo Sapiens
tttctccagatggtcagtatttggtcactgggtctgttgatggattcattgaagtatggaactttactactggaaaaatcagaaaggatcttaagtaccaggcccaagataactttatgatgatggatgatgctgtcctctgcatgtgtttcagcagagatacagaaatgttagcaactggggcccaagatggaaaaatcaaggtgtggaagattcagagtggacaatgtttaaggagatttgagagggcacacagtaagggtgtcacctgtctaagcttttctaaggatagcagtcagatccttagtgcttcttttgaccagacaattagaattcatggtttaaaatctgggaaaaccctgaaggaatttcgtggccattcctcctttgttaacgaagcaacatttacacaagatggacattacattattagtgcatcctctgatggcactgtaaagatctggaatatgaagaccacagaatgttcaaatacctttaaatccctgggcagcaccgcagggacagatattaccgtcaacagtgtgattctacttcctaaaaaccctgagcactttgtggtgtgcaacagatcaaacacggtggtcatcatgaacatgcaggggcagattgtcagaagcttcagttctggtaaaagagaaggtggggactttgtttgctgtgccctctctccccgtggtgaatggatctactgtgtaggggaggactttgtgctctactgtttcagtacagtcactggcaaactggagagaactttgacagtgcacgagaaggatgtgattggtattgcacatcaccctcatcagaacccgattgctacctacagtgaagatggactcctaaagctctggaaaccataattcaacttttctttttaaatcagctcgaaagcatgtacttaaatgaagcatattcatgtaatgtgcttttttttttttttgccagcttttctaagcaaatagattgtctgaattagtcacag

SEQ ID NO: 289615 - DNA, 1000 bp, Homo Sapiens; identical to SEQ ID NO: 117579

SEQ ID NO: 289616 - DNA, 1000 bp, Homo Sapiens
ccctaagtccaagggtatatttgtgttattttctggctccaggacagagaatgccagaaatcagccatctggtctcccgtaggaaactgtgggaccagagatatcctctttcgttgtttgctggtcatatttttactgttatgatttagtttttggttttgatttgagtgggttggttggcccccttgctggagttggaagccgtatgtatgtcagggggtttagaggggggttggttagctagagctgctttcagcttttcctggagacaaaaggagtgttatagcatgatcatcggtcccactgggcagaacgttatcttcagtttcttttgggggttggcatcctctttactcagttgtttcccaaaggaacattaggctcgaatatgggggccaggtgtggtggcttatgcctgtaatcctagcgctttgggaggccaaggcaggaggatcacttgaggctaggagttagagaccaccctgggcaatgtagtgagacctcatctcttagaaaaaaaaaaagaaagaaaatcaaatgtagagctgatcagcagcttgtgcctggcatccccaagggagaaggtgccaggtcagcaggagcagcagcagggatgtatagaaagaaccacagctggcctctaaaggatggcactgaggcaccggagatcttgaggcactggagatcactgaggggctggcctgtcccctgcaaggagtgtgggaccaggtggggcaaggctgggagatgcaggctctgtttgcagattatggcccagagtctctgcttgtgggtgcttgatccacctgctgggaccctgcagtcctcggccagcctggctgtcagttggggattccacctttctgctgagcgccttctcggagctggaggcccatcttcagtgagagatcacaaagcggccaggcaggtgggagactgaatttgccttgttcgagagtaacgtttgaaaaccaaagaaataaagtgatgcagtgcccac

SEQ ID NO: 289617 - DNA, 1000 bp, Homo Sapiens; identical to SEQ ID NO: 117580

SEQ ID NO: 289618 - DNA, 1000 bp, Homo Sapiens
actgcaccacaactcattggtctatatatctgtgaagaaaatagaagagctaatgaatatgatttcaagaaagctttggacttgttggaatatattgatgaggaagaagatataaatataaatgatctaaaactggaaatcctttgcaaagctcttcagagagataactggtccagttctgatggcaaagatgatccaattgaagtatctaaagacagtatatttgtgaagatcttacagaaacttttaaaagatggcattcagctcagtgagtacttaccggaggtgaaagacctgctacaagcggatcagcttggaagcttaaagtccaatccttacttcgagtttgttttgaaagcaaattatgaatattatgttcagggacaaatataactttttctaaaaatggccattgtttatgaaatctgtataagtgtgtccttatacaaattttaggccataaacaagtgtaagtttgtacaatttcataacatgtatagctgagtttttatactttatatgtaggaagctaatataaaatagttatgtaactgtgattttggttttcagttatgtgacttgttttttccacctgaaatgtgtcagttgttgttcctgtactcggtgccctttctttttactctcacgtggtcccaggttctggagttcttgtcctggttctagctgctcacatgtacaaatcacttctaggcctcagtttctgcgactatgaaaattactagattgcactagcttgtctctaaaattgctgtgactccagatactttgcactgaagagaatctagggtgtttgatatctgtttcagttagggctaatgggaaatgtctagtaagataaatgtcaacttttgctgacttattatgagatgaaaaaccaaaggagagtgggcctaactcatgtgagcttgataactgatgaactcattgggagcattttaaacttttctacataaataataaatgagcactaatgaaagta

SEQ ID NO: 289619 - DNA, 1000 bp, Homo Sapiens
cccttttccaacttgcccagggaagtggaggtttcctctttcctttccctcttgtcaggtcatccatgactttagagaacagacacaagtgtatccagctgtccacgggtggagctacccgttgggcttatgagtgacctggagtgacagctgagtcaccctgggtaagttctcagagtggtcaggatggcttgacctgcagaagatacccaaggtccaaaagcacaaggtctgcggaaagttctggttgtcggctgggcaccacggctcacacctataatcgagcactttgggaggccaagacaggaggatcacttgaggccaggagtctgagacaagcctaggcaacaaaacaagactctgtctctacaaaaagtttaagaaatgagccagacatggtggtgtatgcctgtagtcccagccactcagaaggctgaggcaggaggatcgcttgagaccaagagtttgagcctgcggtgagctgtgaatgcaccacggcactcaagcctgggcaatgtagcaagatcctgtctctacaagaaattttttaaaaatgagccaagtgtggtggtgcatgcctgtagttccagctactcaggacactgacgtaggagggttgcttgagactgagagttggaggctgcgatgagccatgaatgccccactgcactccagcctgggcgacagaacgagaccccatctcaaaaaaaataagttctggttgtcattgaattgggataaacagagagcttgatgctttctgccttctgtctcaggtgatgcattgcacatttgggatatttggaaaggaaatgaggaaagaaattagggcctcctctgatctctcgctatctgcgggtcctgtccttttctcaagaccttcaccattactggtgttttcctgtcttctctttagtatgatccctcaaaacctcactaactggaaggatgattttgtctcagtttgtactcctaaataaaaagtaaacatgacacctct

SEQ ID NO: 289620 - DNA, 1000 bp, Homo Sapiens; identical to SEQ ID NO: 117581

SEQ ID NO: 289621 - DNA, 1000 bp, Homo Sapiens; identical to SEQ ID NO: 117582

SEQ ID NO: 289622 - DNA, 1000 bp, Homo Sapiens
aatgatggaaaatgtcaacacaaaaatagctgaaagccaggtacaactactgcatttatatatgtaagttttgtatatcaaaaataattggtctaaatttcctagacttagacttgatttcttaacattagggtatcgcatactcaaatggtagacaatgaccccaactaaatcttcctgatgttacactgctttatcaagaggatggactttttttttttgagacagacagagtcttgctctgtcacccaggctggagtgcagtggcgcaatctcgggtcactgcaagctctgcctcccaagttcatgccattctcctgcctcagcctcccaagtagctgggactacaggcacctgccaccatgcccagctaattttttttttttcagtagagacagggtctcaccatgttagccaggatggtcttgatctgacctcgtgatccgccgacctcggcctcccaaagtgctggaattacaggcgtgagccactgcgcctggccaagaatggacattttttaaaaaaacatcagtacttcctaccactgctgcatgagtataatgctccggaattatcagaaagcataatgcagaaatacgaattagtggaacttaatcatgtgccatataagcttacctaacaaacagttatatccctattcctcaactgaatgtctttcaataaataagaatttatcatttattttctgcaacttttttatgtctcattctttaaacattaaaaacccttaatattttaacaaaaatttcttgattagaggcacagtgaaaaagaagtcaaaaaaaaaagttctacttttcatcagtgctattaaaggtggcagcaaatgtaaatcttggctgaatggtcttaattactcattaaaccacagtcagaaagacatataggtgctatttgggaaaactttttattacctaggatggggtttctctaattgctaatcacaaccccactgggtcatgtttgacattttataatg

SEQ ID NO: 289623 - DNA, 1000 bp, Homo Sapiens; identical to SEQ ID NO: 117583

SEQ ID NO: 289624 - DNA, 1000 bp, Homo Sapiens; identical to SEQ ID NO: 117584

SEQ ID NO: 289625 - DNA, 1000 bp, Homo Sapiens
gcttccagcgggtgattcctgaagatggggccgcagcacgggcccctgagcaggtgcagcggctcatcttctgcacgggaaaggtgtactatgacctggtgaaggagcggagcagccaggacctggaggagaaagtggccatcacgcgcctggagcagatctctccattccccttcgacctgatcaagcaggaggcagagaagtacccaggtgcggagctggcctggtgtcaggaggagcacaagaacatgggctactatgactacatcagcccacgcttcatgaccatcctgaggcgcgcacggcccatatggtatgttggccgggacccagcggctgcaccagccacaggaaacaggaacactcacctggtgtcactgaagaagtttctggatactgccttcaatctccaggcctttgagggcaagacattttagagctgggcaaaacctgtgtaggtctcgctgtgggtttgctggggaccaagggggtgatgaaaaggggaggggcggagctcctgcccaagagaggggctgtggggccccaggataaaacagacacagtgacagggccaagagccagcactgctggccttggtgtcatgccagaatctaccaggactgagggagccagaggagtcctgtaggcaggctactgtgctggagcatcccccagctgctcccatcttgctggaatttcttgggcggcttctccacctgtatctcaagacagacacccgggggcctgtgtctgtggccgctcccatcccggcagccctggctgctgctcgccccaccctcgcttatctgtagattcaaagcgatgttctcttctgtgctcttagaagtagggagttcagcagtaacagccaggtgaagcgaacctgctgggtgatttgtttgcgctctgttttatggggcattcctgcgagatgtgtcagcttctgtatgagatgcagccacagctcatgtgtaccaaagtagaaaaccaaatcacagag

SEQ ID NO: 289626 - DNA, 1000 bp, Homo Sapiens
taagtagaagacattgaaggatgcattaattttcaggaactattttgaattatgaaaagattcccaattgaaaaaattattcaacaagtaaaagctaagaaatttcattgaaatcataaggcagtttaagcataaattgataaaaatagctgtgtactactaattaatagaaaatcattcaaccaagagaagagtcaagtgaatatcgtttgtttatttgctagtgagtttctttgtaacgttgattttattaaatgataatatttggttagtatgtcctatgttaataaaaatgaacaaaattaattttgctatgttcaggtgtcttgataaaataacaatgctccagtgttgttgcttacatttagcactaaattttaacacagggtcagtgagtccaggttttaacttcttcatgcctggatgggataaaatgtaattcattgttaaattaattcatatttgtatttattaatcactgtgacaacattaaccatttgttcttaccaggaagtggtcagattatcatctgagttacagttagactggctaagtttggtattagatcaaggggaatgtccagtaaacagagaggtaagcatgatggaaataatgaagtggggtacacaggaaaaacctgactagtgaggaggagcagctgagagatagggtcagtgaatgcggttcagcctgctacctctcctgtcttcatagaaccattgccttagaattattgtatgacacgttttttgttggttaagctgtaaggttttgttctttgtgaacatgggtattttgaggggagggtggagggagtagggaagtggtccttttacaagaattttgatgcataagtgtctattgtagggtttggatgatctagtaaagtgttttagaacccctttttatcccatgcaccattcagtaaacataaaaatcacaattctgctaatgtcatttggaacttcaaaataaatatcttgtctaaaaacaaaaaaaa

SEQ ID NO: 289627 - DNA, 1000 bp, Homo Sapiens; identical to SEQ ID NO: 222863

SEQ ID NO: 289628 - DNA, 1000 bp, Homo Sapiens
cctcatgatcgactgccagccccccgccatgtcctatcggcgggctgaggttctcgccctgcccttcaaacgtcggtacgagaagatcgagatcatgccagagctcgcagattcactggtgcccatggagatcaagcctggcatctccttggcaactgtctcggccgtgctgcacaccaaagataacaagcacttgcttcagccccctcctcggcccgcccagcccacgagcgggaagaagagaaagcgggtgagcgatgacgtaccagactgcaaagtcctgaagcctttgttgagcggttccatccctgtggagcagttcgtgcagaccctggagaagcatggcttcagtgatattaaggtggaggacacagccaagggccatatcgtcctgctccaggaggctgagacgctcatccagattgaagaagactcgacccatatcatctgcgacaatgacgagatgctcagagtgcgactgcgggaccttgtcctcaaattcttacagaagttctgagtgggccatctgagctacttccctgaaatcctgcagtccctcactggctgccctcacaagccacctgaggagtggcatgagaggccattaactgtgtctttgtggtgtcctctggcttaaggagtgaagaggtggctcttgagggaaatggtctggacttattcccagcactgtttcaggcaagaactttccctttcaacttcaggctcattttcttctcaactctggctctctcaaggagctggagggtgacagaagtgggacaggagaagttttccaagaggttcatgggaggcggaggtgactggctggctgtcttgcatcagtcccaggcctcggccaggggagccagcctttggtttcgtttacttgcctacagtgctgtacgcaataagatgatgatcccaaaatatggtaaagtgaacccatctgtctgcattttctactctgagcccatttgttaataaacacttatttttatat

SEQ ID NO: 289629 - DNA, 1000 bp, Homo Sapiens
cctgtgcccaaggtaatgatgccctcccctgcctcttccatgtttcgaaagccatatgtgagacggagaccctcaaaaagaaggggagccagggcctttcgctgtatcaaacctgcccctgttatccaccctgcatctgttatcttcactgttcctgctaccactgtgaagattgtgagccttggcggtggctgtaacatgatccagcctgtcaatgcggctgtggcccagagtccccagactattcccatcgccaccctcttggttaaccctacttccttcccctgtccattgaaccagccccttgtggcctcctctgtctcacccttaattgtttctggcaattctgtgaatcttcctataccatccacccctgaagataaggcccacatgaatgtggacattgcttgtgctgtggctgatggggaaaatgcctttcagggcctagaacccaaattagagccccaggaactatctcctctctctgctactgttttccccaaagtggaacatagcccagggcctccaccagtcgataaacagtgccaagaaggattgtcagagaacagtgcctatcgctggaccgttgtgaaaacagaggagggaaggcaagctctggagccgctccctcagggcatccaggagtctctaaacaactcttcccctggggatttagaggaagttgtcaagatggaacctgaagatgctacagaggaaatcagtggatttctttgagctaggagaataagagtctggagactgggagccttcacttcggcctccgattggtggcgcatagggtgtaaccaataggaaacccctaaagggtacttaaaccccagattttgcaactggggctcttgagcagcttgctttagcctgctcccactctgtggaatatacttttgcttcaataaatctgtgcttttattgctaaaaaaaaaaaaaaaaaaaaaaaaaaaaaaaaaaaaaaaaaaaaaaaaaaaaaaaaaaaaaaaaa

SEQ ID NO: 289630 - DNA, 1000 bp, Homo Sapiens
tcacaaaatagtcaacatctaaggccctaatttatgttttgaaagatcatgtgttcccaaagtattccctattgttggctccacagccttaaagtgctatagatttaaattcattgattagttttaatttttaattttagactgtgtatttccataaataccctacgtactggcatatttgaaactctttttccaggttaggtccttttctttctcattgaatcatcttaaatagttcttggccctgaatttagctgatttaaaattcttaatattcaagaatttatacttattttttccttaaaagccacaggggacagttaaatatcttaaaatatctaaaacattttttaaagcacttagattgtcttacgtatgtgcatactatacctttacagcgtttattgtcttgtctcttgtcagtagaccttcagtacacagtatgtgggatatgtcagtcaagttggtcagcaccagcatctgtccagctgttcagtatattgtgattcattaaaaaatctcttctatcccagacatgggccaaggtgctgtatctgagggatgtgctgtaatttgatttacatgcattagagcacacagtagaaaaacgttagcttcattagtaatatgacacatgtatatagtgagatgtctttattgtgtgctttgcatattttgtaaatattttgcacgtcattatttttcttttttgtttaagcagtgtttggcctggaagagtgatatgcttgctgcttaatcaaaggattaaagatttaaagatgtctatgtcttctatttttatataatttcatgttctatgaggaatttagtacctcttcactgtgaaattcgaaataatgatttttataaaagcaaaactagaaatcttttaatgacaattttcattaatttcagggttatcatttttgagaaatctacaccaaagtggttttttaaaattacataactaaaaataaaccacactgtggatacatcttat

SEQ ID NO: 289631 - DNA, 1000 bp, Homo Sapiens; identical to SEQ ID NO: 117586

SEQ ID NO: 289632 - DNA, 1000 bp, Homo Sapiens
agcttagcttgagctctggttattttggatcttttctgctttttttaagtaactgagtcatttttaccacacagtccagtttgcatgtatagctaggaaacatgtattgctctagattgggcagtttaagtcattttaaagaaagttagttcatagttgttgccttttaactcatagtcaagcttcagtctttcaaagagaaatgtgtgattttcatttacttgctgatattttgtagtttggagatccttgtgggcattattctaactgatacgtagacacttacttggaaatttttggacattatattaaatgagtgctatctgtgaaattggttatattaggtggcttgactaatgttttttctataattgtatatggactgcatttttaaaaaaaccgcatttgcctttatgctagattgtaaaaaattatattagaatgcataagacatgtttttccttcatatgctagacttttcctagcatttcgtatttctgtgttgtcagtgtgtgatttttaaaccggaatttggtttaaaaaaaatctggtggtaatatatgtgagaaatactttggtgtttaccttatgaaaataaaggattgtaagtaaagtttcctgcgcaccttataccagaattcagtataatacactactttctgttttcaaacagataaatcataatatagtctgtattatctgtaagatctgtcttgtaaaccacattcttgacaactatttgcttttgagtagtttgtattttaatatgtgacttttgtcttgaaaagtagtaaagccatagacttgtgcaaaacaagtttcaagtttatagatattaagtttgtaatgtgagcatcaaatgtgtatgtaaaaatactttttaccagtctggaacttgggaaaatccagggaatttgaaacatagattttaatgagctggtaaacacaaatcatgtcaataaaggtagtcaggatattttatccttagcattgcttctgc

SEQ ID NO: 289633 - DNA, 1000 bp, Homo Sapiens; identical to SEQ ID NO: 117587

SEQ ID NO: 289634 - DNA, 1000 bp, Homo Sapiens; identical to SEQ ID NO: 224472

SEQ ID NO: 289635 - DNA, 1000 bp, Homo Sapiens; identical to SEQ ID NO: 222864

SEQ ID NO: 289636 - DNA, 1000 bp, Homo Sapiens; identical to SEQ ID NO: 117589

SEQ ID NO: 289637 - DNA, 1000 bp, Homo Sapiens; identical to SEQ ID NO: 222865

SEQ ID NO: 289638 - DNA, 1000 bp, Homo Sapiens; identical to SEQ ID NO: 117590

SEQ ID NO: 289639 - DNA, 1000 bp, Homo Sapiens
cgaggcactgtggtcgctgagggggttggctgggtctgagtgccacccccaggccacagtgataccatcccagtgccatgagcccacactgcccgccctcaggctctcaggtgaacgtggccgtcagcggggaaacgtgtgtgtcagttggaccatgtgggaccctgatggacctgaaagaccaggatcggtccagctcagatattgagggctctgaagcctagttctgtcttctctggagcagctgtggcttccccgtggctgcttggtgacatggattagcgctacgtgggctgcagcatttgggatccaggctacctagaggggcatcgggccagggaaaacctcggattagcaagcaataaaaacatgacctcactcttcctcaaaggagcccctggtcttccctgtgtgactcagttctttccatctgtttgtcccgctgcaagcctctttctgcgctgactgtgacattggaacgtggccttcctgtcaccccctccgtgccacgcactgaaggccacccccacccacctgggaaactaagaactggatattttgcctcattcacttgtactgtaacaatgtatataatttggttggtatttcactatttaatttttaagaagcctattttactagtgttttatatgaacaaagtactgcagaagttaaacctgtgttgtattttttctgagatgttttgctttaagagatactttttgctcagtttttatatgccagatacagagaatttgtagcggttatttttgtatgatctagtaacttgcaaacagaccaaatggatgagaggcggggaccgtgcagctgtcggctgatgaggaggcggccgccccagtgctgatggagatgccactttcgtgtgactgcgaacattaaagcacaaaaaaaatccaaaaaaaaaaaaaaaaaaaaaaaaaaaaaaaaaaaaaaaaaaaaaaaaaaaaaaaaaaaaaaaaaaaaaaaaaaaaaaaaaaaa

SEQ ID NO: 289640 - DNA, 1000 bp, Homo Sapiens; identical to SEQ ID NO: 117592

SEQ ID NO: 289641 - DNA, 1000 bp, Homo Sapiens; identical to SEQ ID NO: 117593

SEQ ID NO: 289642 - DNA, 1000 bp, Homo Sapiens
gcatctgcaggccctgacccccagcatgggattgtacccacccccgggtttccccaaactagacccagtggctccgatcacttccgagcccccgcaagccacgcccagcagtaacatctcctgagtagaacctacctccctgcccagtcagcaggctaggaactaagccccgcctccttcacgacaggctgtcaattacggttattatacttttcactccaacttccaataactgacaggtgattatttttgctgcactgtgtgcttaagcaaagcagccaatcaaagcagctagcagttgttaagtcttccccgccccttcgatgaacagccaatcaaagcgatttagctctgcttctgttctatttcttagtcccaccctcaccataaatatccaagtgtggtttggctgaggagctgagggtgtctgccaatcacagctgctcagctctggcttctgtaaaccgccaggtagaagagttaaagctgcgccctcccgagactatatatcattgtcgttttcagcccgctccgggcaaactgcccatcatgtgcaccaaggccgttagccctgcctcctggcaaacgtccagtgacagctgctgggttccatcaactttgggcagccggttgtcgctgcagggaaggaaccaataagaatttctaaaggaaacctgatcttgctatcaattgctgctgcttaaatggcaggccaactggtcagctgctgatcagggtgtctaggctgaaggagttggagaccttgtgctaggtaggtgaaccagaaaccaccctcgccaccaagactcgctcccaacctggctcccggcaacctcaggtgccttcctcgcccaggtctttcaccctttctacagaaactacctcggtctggatctccccaccaccagcagcctgtgcaatatttattggtctatcaatttctcccgtctcctgtcccaaagtaataaatcatgtttaataagtaaaaaaaaaaaaaaaa

SEQ ID NO: 289643 - DNA, 1000 bp, Homo Sapiens; identical to SEQ ID NO: 117594

SEQ ID NO: 289644 - DNA, 1000 bp, Homo Sapiens
attatcttcaatttaatatgtggaatgtgttttctagctttctttgaattatgtatggcaacctggtttagcactggcatcctgaacagttaagagtcactgggaaattattgtatttctttataaatttactgtcatatcaattgctggaaaatgctatgatttttctattattaccttctaagttgtattctctcttacactgtagcctcaactaaggcaattctgctatgtttgttcttcactatgatttactgtgtgccaaaggagttttgacagggtacagagtattttactaaaagtatttttaaatgtttctcatgtgatttctgtaccttcttcctcctgccccttttgcttttttaaagaaactggggaaggatttatgaatacaccaccaccagagtggataatgcttagaattctttattggtggccctactatggtgatgatctagaactgacttacttcaggacagaagaaaaaacaatcacacccttaacctttaagccagttagatcagggggttgcaacaattgggttaaactttgggtatacattggaagcaccagggcatgtttgctttttttgtttatgtgtttgttttttgagacagagtctcacactgtggcccaggctggactccagcacagtggcatgatctcagctccgcctcctgggttcacgtgattctcatgcctcagcctcccgggtggctgggatcacaggcgtgcaccatcacgcccggctaatttttgtattttcagtcgagaccggcctggccaacgtggtgaaacaccgtctctactaaaaatacaaaaaattaggtgtggtggtgcgtgcctgtattcccggccactcgggaggctgaggcaggagaatcgctggaacctgggatgtggaggttgcagtgagccaagattgcaccactgtactccagcctgggcaacagagggagactccatctagactccatctcaaaaaaaaaaaaaaaaaaaa

SEQ ID NO: 289645 - DNA, 1000 bp, Homo Sapiens
acaggcctgtgcacagagctctgcggagaccacgccgacatcgccgcacacccaccctcctgctcatgggacagaccattcacacctgcttcaccaccagccacaggcttgtcggaaggagcagactcttctccacggacaagccactgcccctttgagggcctcagcttccttaccctatgagatgaggaaacagatcttcacttgccacaggacttggggggatgaaaaggtaacctccgtaaagctgcccctggtgtggggaagccaccccatagatgacattgcccgccctccccctaggcccagagctctacagagtcctcaagctggtgtccctccaggctaaaacacttccaccccctgggcagtgcactacagggtggtggggaaggggccatctgtggaagaaacacagggcctggcctggggtcctgggcaagacctctgtgacctcagtttccccagatccctccaggtgtgaccttgtagatggcctctattctggattcacagctgctgaggaggaggaagaggacactgaaggcattccttcagtcccctggggaggttcagatgctcagactccctgataccacctttcctgggcagaataaagtccccaagatgtccaagccctaatccctggagcctgggaaagtgttacctcccagaccaaagggactttgtaggtgtgtgattgagttgaagatctgcagtgagagggtagcctggattagccacgtgtgcccaaaagcagagactccttcccagccgtggtcagagacagaacaaggggacgctgctggctttaaagacggaagaagggacgaggagccaaggagtgcaagtgccgccagaggccagaaaaggcaagggatggatttttcccctggagttccaggaggaaccagccctgccaacacctggattttagttctgggaccccacctcagacatctgacccccttgactgtaaggtaataaatgtgcgttgctt

SEQ ID NO: 289646 - DNA, 1000 bp, Homo Sapiens; identical to SEQ ID NO: 117595

SEQ ID NO: 289647 - DNA, 1000 bp, Homo Sapiens; identical to SEQ ID NO: 117596

SEQ ID NO: 289648 - DNA, 1000 bp, Homo Sapiens; identical to SEQ ID NO: 117597

SEQ ID NO: 289649 - DNA, 1000 bp, Homo Sapiens; identical to SEQ ID NO: 117598

SEQ ID NO: 289650 - DNA, 1000 bp, Homo Sapiens; identical to SEQ ID NO: 222870

SEQ ID NO: 289651 - DNA, 1000 bp, Homo Sapiens
aagattcatgacttgatagaacaatactttcagttatgttgcaaaggctcttgggcattttaaacaaaatgaagtatatccattttgaaacctgtgtatttctttttcggggtttctgcatgcagtggcagtcttaagtgccaaaattcattataaccccaaaataaccccttggtgaaggcttgctgtcttttactgtgttacacagcatccttactggatatcttagttgcttgtttgggcagcacactaatattacttaaaacactgtgatatactggagttttagttagcggaagtcagttcagggcattttagggctgtcttgctatactgaattgtagctaacaatcctaattatatctagtaccatactgagttattggtatgaccctgtggaaacacacattattttatgtaaatataggctaaagacttaatgtcctttagcttgtgtatataattgtgttgtatagtctcagagtacattctaaccctacatttctaatcattgttattggtaatcttttctgtgaatattaggtttcctccagaaatagtccgttatttgggaaagttaactgtgtgcacttttagatattaactacatttacaggcaaatcactgtaatgagaatggtactggaaaaatactgaatagacttgctaaatggcacatgcactacaagaggaaccttttgggttatttaatatgtacagaaaacattagaaaaaatttattacagaattctaattccagtatgaatagtggaaacccatctgtaaattagatggatgttggatggaaaatgacattgctaaatttgagaatttctttttacctactaatgtagattgctttgtataataaaacacagggtttggaaggttttgttacagggagcatggtctgttgaagatttttaaaatgtatttttctagattaacttctgtacatgaaatgtctaataaaactctaagaggtttagagatttttccat

SEQ ID NO: 289652 - DNA, 1000 bp, Homo Sapiens
tctgccataatgttcattaaagagtttacagtaaaaataagattagggataaacttctcaaaaattgtacatctgtgtaactaaagcactaacaaaaacatgaatagtccttctagaggtaacttggatagcctaggcaggcaacttatcatgtggtgaaggccgcctcaggggttgttaaaaatgcacagaaacaattgagtgcgattattggcttctgagcgctgagcagagcaggtggaagaggaactttgagcacaggaggaaatgcaaccagtcagggcccagaatcatgcaaatctcaggggtatgcctctctggggaggagctccacttgcagggactccttttatttccctaagaaagagctgaaatgactgagaactttcctttcctccttagagttacaattttacttctgctattccggagcccatgcctagaagccagaacaactccatgttacactgagttcatgctcctatttactgatcacaaatgagctcattaatgtcatcgaaacatttattgtaacctaacagaccatcacagattggaaacttggtagatagcagagcatggtattagtgaaaaaggttcaaaatacacaagtaacatacactctgaaaaacatgcagataatttgctgatgaagcagaagaggggatgcgcatggcaagaacttgccttaccccagattctctatatctcatggtttccttttcctcttgactgtctttacgagtgttttttatttgggaccctcgagcccagagatattaatggatatctgtattcaatatttgacaaaatctaatggaaaccatccatttactcatgataaggcttcatcactggatttctgtgtcttcactagaacaccattgtcatctcatattgatcaggtattttaatctagcacttacatattgttgataaatgaaagctgaattgttacttaataaattcactttgtttagcaaaaaaaaaaaaaaaaaaa

SEQ ID NO: 289653 - DNA, 1000 bp, Homo Sapiens; identical to SEQ ID NO: 117600

SEQ ID NO: 289654 - DNA, 1000 bp, Homo Sapiens
gtggatattctgagatcagatgtagtatgtttgaagactgttattttgagctaattgagacctataattcaccaataactgtttatatttttaaaagcaatatttaatgtctttgcaactttatgctgggattgtttttaaaaaaactttaatgaggaaagctattggattattattatttcttgtttattttgccatggctttagaatgtattctgtatgcctctcttttgctctgatactgttgctcctgctattctgattgtgcagactgtgtaattagtggaaaacaatccttggtctgactgtgactttggacaactcagtaaccctggcttggaccactctcaggagtccatccttgagagagtgggtgtagttatcatttatacagtaatcattgcattttaaaatcttctcttgaaaggaagaataagagtgcaccagaataagagcgcaccagaataagagcgcaccagctaacaatgtgatacggccatatgtcacttaaggatggagatatgttctgagaaatgtgtcattaggcgattttgtcattaaacatcatagcatgtacttccacaaacctagatggtatagcctactacacacctaggctatttggtatagcctgttggtcctggggtacaaatctgtacaacatgttactgtattgaatacagtaggcaattgtaacacaatggtaagtatctaaacatagaaaagggacagtaaaaatatggttttataatcttctgggaccaccattgtatatgcggtacatcattgaccaaaacatcgttatccagcatatgactgtatttggttatgaaagccaactgttacttgattctgcttttagttcttaagaggatcaggcttttaaatactcatttacaagttttctatcctccttcagtgttaaagtagaaagtaaaaagagtatcttatacatgcatgaaattaaagcatataccaaatgcaaaaaaaaaaaaaaaaaa

SEQ ID NO: 289655 - DNA, 1000 bp, Homo Sapiens
tggagagaaaccttacaaatgtgatgaatgtggcaaagtcttcagtcaaaattcataccttgcatatcattggagaattcatactggagaaaaagcttataaatgtaatgaatgtgggaaggtcttcggtctaaactcacccctagcacatcatcggaaaattcacactggagagaaacctttcaaatgtaatgaatgtggcaaagcttttagtatgcgttcaagcctcactaatcatcatgcgatccacactggagagaaacatttcaaatgtaatgaatgtggcaaactcttccgcgacaattcatatcttgtacgtcatcagagatttcatgccggaaagaaatctaacacatgtaattaatgtggcagagtgttcagttagcattaaagccctgtaagacatacaataatttatactggagaaaaactttgcaagtataatgaatgtagcagagcctttagtttttgttcaaggcttaataaccgttagctagaccatagaggacagaaactttactaatgtactgaatgtggcaaggtcttaaggtaaaatctgagaccaggatttttcaaagaattcttgctggtgagaaacctaacaaatgtaatgaatgtggcaaggtcttctggcacaattctcacattgtacaatattgcaaaaattcatgcttgagagaaacaaaaacactgagagtgggaaaccattatgacttcaaacattcatcaacatcagagaatccatactaaagagcatttataataattatatgtgatagagattttccacaggccaaagtctcactaggcatcaaaaacttttttgatgaaaccatacaaatgtaacgtgcatgcttaagcttttacccaggcatcaaaaccggaacatcacagggtttatactggagagtaactacacaaagataatgtaataagcctttcagtgtaatattcatgattttgtcgtgagagatccactcaataaaaaccaggcaaatgt

SEQ ID NO: 289656 - DNA, 1000 bp, Homo Sapiens; identical to SEQ ID NO: 117603

SEQ ID NO: 289657 - DNA, 1000 bp, Homo Sapiens; identical to SEQ ID NO: 222874

SEQ ID NO: 289658 - DNA, 1000 bp, Homo Sapiens; identical to SEQ ID NO: 117604

SEQ ID NO: 289659 - DNA, 1000 bp, Homo Sapiens; identical to SEQ ID NO: 117605

SEQ ID NO: 289660 - DNA, 1000 bp, Homo Sapiens
gagctgtcctgaccaagaggaccagactttgttaatgaagtttcgtctgttgtatggaaccaagctggtgtttcaggagcgggcctggtatttagaacataaatacttgactcccatggccagcacgaggatcaggaatcaggagagatgctgaaacacaaacaggtataagactcagtctccacatgaagggagctcatatccaaggacacaaaaccactttaaaaacataaatactggccaggtgcagtggctcatgcctgtaatcccagcactatgggaggctgaggtgggcagatctcctgagctcaggagttcgacaccatcttgggcaacatggtgaaaccctgtctactaaaatacaaaaaaattagctgggcgtggtggcatgtggctgtagtcccagctactcgggaggctgaggcacgagaatcgcttgagccctggagttggaggttgcagtgagcagagattgcgccactgtactccagtttggactacagagtgagactccatctcaaaacaaaacaaaacaacaacagcaaaaaacaacaaaacaaaacacaaatactctcacggggcatggaggttttcgaacgaacttggccataagaataaattcagagttgacagaacagacgtcttaggaataaatgccattcttatgctagaccttgaagagtagaaaattaagagatggtggcccaattgagaggggaaaatgcagttgaaacttcagacagggttgataaagtgaggacgatcatagacatggagtacttagacatattaataaacaataaagactttacctgtctaatggaaaacctggagaagtcgtcaggaaccagactacagtggaccctggagaaccttgaagaacatttttccttttcaggaaaacggaggttacagagaaaagtatatgtaatgatgctacagtaatgtatttctgtataacaaatgactccaaacttacgacttaaaacaaccaccactt

SEQ ID NO: 289661 - DNA, 1000 bp, Homo Sapiens
aacggtctgtggtgaagcacatcggtgaccttctccagcaccgccagtcactggtccgctctgcctttcgggatgggacagcagaagtggagacccgagagaaggagccaccggggtggggacaggggcaaggagaaggggaggtgggaaataattccttaggtttaccccaggggaagcggccggccagtcctgcccttctcttgccaccctgcatgttgaagtccccgaagcggatctgccctgtaccccctgtctccactgtcactggagatgagaacatttctgatagtgaaatagaacagtatttgcgtacccctcaggaagttagggactttcagagagcccaggctgctagacaggctgccacgagtgtccctaaccctccctgatggatatccactgggagcacttcatcctgttctgacagcttgataacattcctgttataaccaaggatggaagtgtacaccagtccgtaggtattgcttttcttgtttgaaggaaccaagaggggctctgccattagttggaccctgggtcctggagtaaagtcaggagtgcagggatgactataggtaggagagattcccatcccttggtgtgggagagcaagttgcctatgtccatgttctgtgagatggctttcctcatagatggatgggaaaatgtcaggctctttgctgctggtttgaattggacacactgctgcggctcctcctgcaggcctgagggggcttccctctgcttgtggagtggttggcattcccagcagtatcaaccctcagaggagcgggaactggggaattctggccctacgtgcattcacaggcaatgatgggtttgtgtgtatggtgtcatgagatcctctacctcataacaaaaggacagtgggtagactaaggcagtagctcaaagggctttgcaaaattttaatatattaaaacaagaggcatctgctagaaaacattctattgtataaaacccgagttcttaaaaa

SEQ ID NO: 289662 - DNA, 1000 bp, Homo Sapiens; identical to SEQ ID NO: 222875

SEQ ID NO: 289663 - DNA, 1000 bp, Homo Sapiens
aaatcgagtgatcggaattggatgtaatctggattcacagagattacagtatattattacaaatgttttgaaggcacagacttcaggcaaagaagtatgggttattggcgagcaaggagaagacaaagtgctcacatggagtggccaagaagaagtagtgagtcttacctctcaagtgcagctgtccaacagggatattatgatataaatagtgaagtgtttttaagtttgccttgcatccttggaaccaatggagtatctgaagttatcaaaaccacactgaaagaagatacagttactgagaaactccaaagcagtgcatcctcaatccacagtctccaacaacagttaaaactttgattctcaaatgcaatttgagaggctggacttctacctaaagggaaaagtcatttaattttacctatatataggtttgaggatttctgtatcctgctacttacttttacaaactgcttggttaaagtagagggtttcttgattagctttgtgatgtaaatccttaaggagttatacaaggaggggaaaaattaattttatttggggttcttgagatatctatgctgttctttaaatctacagcaggggtaaacattcatctgcagtgtgcatcaatttaaatcatatatcctaaactaaaagcacaattcatacttcgggaatattttataagtaatatatctttaaaagaaaattaccctttgacttttataatcaacataagttccaggcccagtatggatttacaaaatctgtgtcagttgtacattcacaggatccacagcttaagttactaatgtttcttgtgtaaaatcctgttggtagtaatagtaaagcattgtatttcccttcttcaaattaattacctaccaaaaaatggaaaagaattttacatgcactttaaaatagtaaaatggaaagtgaatttttaaaatatatgcattaaaagtttactttaatttccaaaaaaaaaaaaaaaaaa

SEQ ID NO: 289664 - DNA, 1000 bp, Homo Sapiens; identical to SEQ ID NO: 222876

SEQ ID NO: 289665 - DNA, 1000 bp, Homo Sapiens; identical to SEQ ID NO: 222877

SEQ ID NO: 289666 - DNA, 1000 bp, Homo Sapiens; identical to SEQ ID NO: 117607

SEQ ID NO: 289667 - DNA, 1000 bp, Homo Sapiens; identical to SEQ ID NO: 224599

SEQ ID NO: 289668 - DNA, 1000 bp, Homo Sapiens
atggatcgtaaggataagctatttgtgattaacgaggtttgtgaaatgaagaactgtaataaatgcatctattttgaagctaagaaaaaacaggatctctatatgtggctttcaaattcacctcacggaccatctgctaaattccttgttcaaaatattcataccctcgctgaactgaagatgactggaaactgtttgaaaggttctcggccccttttgtcttttgaccctgcttttgatgaattaccacattatgctttgttaaaagaactcttaattcagatctttagtacaccacggtatcatcccaaaagccaaccatttgtggaccacgtgtttactttcaccattttggataataggatatggtttcggaactttcagatcatagaagaagatgctgctcttgtagaaataggacctcgttttgtcttaaatctcataaagattttccagggaagttttggaggaccaactttatatgaaaatcctcactaccagtcaccaaacatgcatcggcgtgtcataagatccatcacagctgcaaaatacagagagaaacagcaagtgaaagatgtgcaaaaactgagaaagaaagagccgaagactcttcttccacatgatcccactgcagatgtttttgtaacaccagctgaggagaaaccaatagaaatacagtgggtaaaaccagagccaaaagttgatttgaaagcaagaaagaaacggatttacaaaaggcaaagaaaaatgaaacagaggatggacagtgggaaaacaaaataagtcaatggaaacctgatttgtttttcagttactttatatttattttgtattcaatgtgtaaatacttttattatctaatactatcttacgtctaattagtgtagcatttacaagaaagaaaaattaagatcttaaaatcagtgattatctttttctaaataaaatatcaccagaattcatcagttaaaaaaaaaaaaaaaaaaaaaaaaaaaaaaaa

SEQ ID NO: 289669 - DNA, 1000 bp, Homo Sapiens; identical to SEQ ID NO: 117608

SEQ ID NO: 289670 - DNA, 1000 bp, Homo Sapiens; identical to SEQ ID NO: 117609

SEQ ID NO: 289671 - DNA, 1000 bp, Homo Sapiens
aaattgtattttatgttttagtaattgttgccaactttttaaattaattttcattatttttgagccaaattgaaatgtgcacctcctgtgccttttttctccttagaaaatctaattacttggaacaagttcagatttcactggtcagtcattttcatcttgttttcttcttgctaagtcttaccatgtacctgctttggcaatcattgcaactctgagattataaaatgccttagagaatatactaactaataagatctttttttcagaaacagaaaatagttccttgagtacttccttcttgcatttctgcctatgtttttgaagttgttgctgtttgcctgcaataggctataaggaatagcaggagaaattttactgaagtgctgttttcctaggtgctactttggcagagctaagttatcttttgttttcttaatgcgtttggaccattttgctggctataaaataactgattaatataattctaacacaatgttgacattgtagttacacaaacacaaataaatattttatttaaaattctggaagtaatataaaagggaaaatatatttataagaaagggataaaggtaatagagcccttctgccccccacccaccaaatttacacaacaaaatgacatgttcgaatgtgaaaggtcataatagctttcccatcatgaatcagaaagatgtggacagcttgatgttttagacaaccactgaactagatgactgttgtactgtagctcagtcatttaaaaaatatataaatactaccttgtagtgtcccatactgtgttttttacatggtagattcttatttaagtgctaactggttattttctttggctggtttattgtactgttatacagaatgtaagttgtacagtgaaataagttattaaagcatgtgtaaacattgttatatatcttttctcctaaatggagaattttgaataaaatatatttgaaattttaaaaaaaaaaaaaaaaaa

SEQ ID NO: 289672 - DNA, 1000 bp, Homo Sapiens; identical to SEQ ID NO: 117610

SEQ ID NO: 289673 - DNA, 1000 bp, Homo Sapiens; identical to SEQ ID NO: 222878

SEQ ID NO: 289674 - DNA, 1000 bp, Homo Sapiens
tcgtagtcccatagtcagtgttaattacacacattgttaactattggatgaaaaatacatgctattgattgtgtccaaagcctcccgaggacctccgtggggatgctctggtagcctgaatacagaactgaggtgaaagtccaaaccttgaattttacagtagtaagttggtaaaccatgtgctctgtgctatgagttaattatgttttcccaaatactaatgtggcacaagtaccatattttatcagagttcttatgtacagtatggtgaagataagtgacaagcacacatttttcttgcttcactgctgttctatattacacaggtttgttgttgttttttttaaaaaagaaattaagcagtagttagtctctaaaaatacaatgtttcaggctaccacagtgaataaatagaaatgtaatcagggattaaaaaaaaaacttatgcagcttttcaaagttgattgtttcaaaattggtgtttatttaaaataagtggtaatgtacttgaatgcactttttatgacaatgattcagtaatggtaattttactattaaagaaagtgaaaggtttagttttgttagcatggctcagcatgtagctgtcaggtgtttttcacctaagggcaaaagaaaatgatagtaataattgcagtagttgtattgtattgtatttttgcacgtgtggtaagcataggcttgaagaggtgggtaggcaggtacatgtacttcctaaattttgagataattatctttctgtaagttcgttatgcttgactgtttccatgttctcccaataatgattttatagttacttatcactttactcatggagaattaaaacgtaatgtttttcaactgtatctttctttaactggataatactgctatatgatatgcttactacagactgcattaattcacgaaacgaattctgttatgctgtaatttgaactctcctcaccacaacttattaaaaaggcaccaatagtttcccatt

SEQ ID NO: 289675 - DNA, 1000 bp, Homo Sapiens; identical to SEQ ID NO: 117611

SEQ ID NO: 289676 - DNA, 1000 bp, Homo Sapiens
gttaaatggacagcctttgtcaagactgaaaattctcatgctgcgcaaagtgctcgaataccatctgatgtcaaggtatataatcttactcatctgaatccatcaactgagtataaaatttgtattgatattcccaccatctatcagaaaaacagaaaaaaatgtgtaaatgtcaccaccaaaggtttgcaccctgatcaaaaagagtatgaaaagaataataccacaacacttatggcctgtcttggaggccttctggggattattggtgtgatatgtcttatcagctgcctctctccagaaatgaactgtgatggtggacacagctatgtgaggaattacttacagaaaccaacctttgcattaggtgagctttatcctcctctgataaatctctgggaagcaggaaaagaaaaaagtacatcactgaaagtaaaagcaactgttataggtttaccaacaaatatgtcctaaaaaccaccaaggaaacctactccaaaaatgaacaaaaaaaaaaaaagcgaaagactgcagttgtgctaaaaacaaaacaaaacaaacaaacaaacaaaaaagtaaaaaaagattactttcgagagagaagtttaagcttcaccaatgctgctcctgaccaatggaaatatgtacaacttcagcattttaagtaactggcttcaaggggtactgtggcaaccaaataaaataactccattttctaaaactttcatgtaacttttatgtctggactacagttcaagtggacaaaaacatttctgtattttttttaagtaaataagagtagttgaactgagcaatacctcctcctgtgttgtattacacatattagccacgagtttttgcagtgaccagataaacttgaattgacacgtggtgtaataaaatggacaaattctgtagagtagacacagtgagtatgtggacctcttttataaggaaaaatacattttggattaaaatcaaaaaaaaaaaaaaaaaaaaa

SEQ ID NO: 289677 - DNA, 1000 bp, Homo Sapiens; identical to SEQ ID NO: 222881

SEQ ID NO: 289678 - DNA, 1000 bp, Homo Sapiens; identical to SEQ ID NO: 117613

SEQ ID NO: 289679 - DNA, 1000 bp, Homo Sapiens
tttgacagagatgttaaatgcattaaagatttctttatgaaacgtttcagctacgaaagtgagctttttccaacttttaaggatatcaggagagaagacactcttgatgtggaggtttctgccagtggctacacaaaggaaatgcaggcagatgatgaactgcttcatccattaggtccagatgataaaaatattgaaacaaaagagggatctgaattctcattttcagatggagaagtggcagaaaaagcagaggtttacaggtcagaaaatgaaagtgaacggaactgtctagaagaatcagagggctgctattgcagatcatctggagaccctgaacaaataaaggaagacagtttatcagaagagagtgctgatgcacggagttttgaaatgactgaattcaatcaagctttagaagaaataaaagggcaggttgttgaaaacaactctgtaactgaattttctgaggagaaaaacagaactgaaaattacaacaggcaagatggtcagagagttcaaggaggagtccctgctggctctgacgagtatgaagatgaatgccctcatctaattgccttgtcgtcattaaatagagaattcaggcctttcagagatgaagaaaatgtgggagctatgaatcagtatagaacaagaactctgagtatcacttcttcaggcagtgctgtaagctgttcaacaattcctccagaactggtgaaacagaaggtgaaacgtcagttgacaaaacagcaaaaatcagctgtcagacgtcgattgcagaaaggagaagcaaatatatttaccaagcaacgtagggaaaacatgcaaaatatcaaatcaagtttggaagcagctagcttttggggagaataatatatttaggatcttggatatgtttaatatattttttaaagttactgtaattcctttttgagccctcatttgtcttttttgagccaaggctatcatatattaataaataaaccctctttcatct

SEQ ID NO: 289680 - DNA, 1000 bp, Homo Sapiens; identical to SEQ ID NO: 117614

SEQ ID NO: 289681 - DNA, 1000 bp, Homo Sapiens; identical to SEQ ID NO: 222883

SEQ ID NO: 289682 - DNA, 1000 bp, Homo Sapiens
taccgtctacaaaaacctcaaccctgaatggaacaaagtttttacatttcccattaaagatatccatgatgttttggaagtgacagtgtttgatgaagatggagataaacccccagattttcttggaaaagttgccattcccttgctgtccattagagatggacaaccgaattgttatgtactaaagaataaagatttagaacaagcttttaaaggagttatttacttagagatggaccttatatataatccggtgaaagcaagtattaggacttttactccccgggaaaagcgctttgttgaagacagccgcaagctgtccaaaaagatcttatcaagagatgtggaccgtgtgaaaagaatcactatggcaatatggaatacaatgcagttccttaaaagctgcttccagtgggaatccacattaagaagtacaatagcattcgcggtatttttgatcactgtctggaattttgaactatatatgatccccttggcattgttgctgatctttgtctacaatttcatcagacctgtgaaaggcaaggtcagcagcatccaggacagccaggagagcacagacatagatgacgaggaggatgaagatgacaaggaatctgagaaaaaggggttgattgaaagaatctatatggtacaggatattgtttcaactgttcaaaacgtcttggaggaaatagcttcttttggagaaaggattaagaacacatttaactggacggtccccttcctttcatctctggcctgtttgattctggcagcagccaccatcattttgtatttcattccactgcggtacatcattttaatctggggcataaataaatttactaagaagcttcgaaatccctattccatcgacaataatgagctactagacttcctctctagggtaccgtctgatgttcaaaaggtgcagtatgcagaattgaaactctgcagcagccacagccccctgcggaagaagcgcagcgctctctag

SEQ ID NO: 289683 - DNA, 1000 bp, Homo Sapiens
aataatttgagagcttcaaattatattcattgattatggtacctaattgtcaagatacaaaaatttgatactgacattctcttatatgatgagagtttcatttgcgtttcaaaaatggtgttatgatacttattttaaaatgaagattgcttttcatttccattaagttgctaaaatagatagatgtgatctgcagaagttgtttagtcttcatctgaatttcaggctgggagggagcaatataactaaggacaaaaaatgttttgtttttcttgtgtatttatgatcacctaatttcacgttttgtgaaatggacagtaacctgtttcctgaaagattcctgtgggtactttttgagctgtgataatagcaaaattgtttttcggtaataatatcacactaatgcttcctttaaacattaaacctattttccttttttacagaataagggaaaatgtgataagaagtttgtatacatttctggattatagattattatttatcttttgaaccagagctaaatggtaaaagaaaaaaaatcagtgatgattgttatgttgatctcccacaattaatttatcttttgacaaaggggataaagagtttcagtttagctccttttgattgtatattattttttgcttttttattgtgaaaagaggtaggttttatttgtggagagagagttgaagattagggaaccagtgattttaattatgctactttttcttctaagagataaattgatatatcattcagtgtcatgaaaaacatgaatgttgtacaattttcttcctcaaaaaactttttaaatgtaagtatccttattttttttttaaaagagcacaatgtaggtgtatttgagtattttcaagaaaagaataaaaacattaatgcagtattaggttaactggatatcagctaagccttgttaacagttaaagtattataactttttttacttctgaaaattaaaaataaaatttatttctgcaatttc

SEQ ID NO: 289684 - DNA, 1000 bp, Homo Sapiens; identical to SEQ ID NO: 222884

SEQ ID NO: 289685 - DNA, 1000 bp, Homo Sapiens; identical to SEQ ID NO: 222886

SEQ ID NO: 289686 - DNA, 1000 bp, Homo Sapiens; identical to SEQ ID NO: 117616

SEQ ID NO: 289687 - DNA, 1000 bp, Homo Sapiens
ttccctgatgggtttgagaagttctcgccgccaattctgcagctagatgaggtggatttctactacgatccgaagcacgtcatcttcagtcgcctctctgtgtctgctgatctcgagtctcgcatctgtgtggttggagagaatggggctgggaagtctaccatgctgaagctgcttttgggggacctggcacctgttcggggcatcagacacgctcacaggaatctgaagattggctatttcagccagcaccatgtggagcagctggacctaaacgtcagtgctgtggaactgctggcacgcaagtttcctgggcggcctgaggaggagtaccgtcaccagctgggtcggtatggcatctccggagaactggccatgcgtcctcttgccagcctgtctgggggccagaagagccgagtggcctttgctcagatgactatgccctgccccaacttctacattctggatgaacccacaaaccacctggacatggagaccattgaggctctgggccgtgccctcaacaatttcaggggtggtgtgattctggtgtcccacgatgagcgctttatcaggctggtgtgccgggagttgtgggtgtgcgaaggaggcggcgtcacccgtgtggaaggaggatttgaccagtaccgcgccctcctccaggaacagttccgccgcgaaggcttcctctagggccaccaggctgaggactcgcccaggacatggactggtctctcagacccctgggccaccatgtaggccaccactccaggccgtggacttcccccaacttggggacagccttattcccaaatgtctctatccttttgactggagcatcttctgcacaaccttgggagcccatccaagggttggtgaggactggtctcccgggggtgggggtctggggggtaccctctggggttatagattcccccactgccccagctctgactggaccccaagtggctgctatgtaaattaaatctctccccgcgtc

SEQ ID NO: 289688 - DNA, 1000 bp, Homo Sapiens
aagcgacagaatcgaggcacaaatacgaacaaatgaaacagcaggaagtacaactaaaacagcagctttctctttatatggataagtttgaagaattccagactaccatggcaaaaagcaatgaactgtttacaaccttcagacaggaaatggaaaagatgacaaagaaaattaaaaaactggaaaaagaaacaataatttggcgtaccaaatgggaaaacaataataaagcacttctgcaaatggctgaagagaaaacagtccgtgataaagagtacaaggcccttcaaataaaactggaacggttagagaagctgtgcagggctcttcaaacagaaaggaatgagctcaatgagaaggtggaagtcctgaaagagcaggtatccatcaaagcggccatcaaagcggcgaacagggatttagcaacacctgtgatgcagccctgtactgccctggattctcacaaggagctgaacacttcctcgaaaagagccctgggagcgcacctggaggctgagcccaagagtcagagaagcgctgtgcaaaagcccccgtccacaggctctgctccggccatcgagtcggttgactaagatgaggtgtgatcactgtattgagagatatattttgtgtataactttctctgttagtagttaactattggttttgtggtgaaaattttcttactttttctaccatatctgtattttcttagaactactggacttatgtggtacaggaggctgcttagcagttttgaatagtttaatctataaattttcctcagctgtgttgcacatcagcctcgttctccctccactggaatgcatgtgttcactgccttgtcctttctctccctgctccttgcacattatcatcctaatgaaaatttcactgacagggccgaccattacaagggaactttgttctgacgatggttccttgatgtgaaaacaatattaatttaaacgtcttagcccccccccccataatattattc

SEQ ID NO: 289689 - DNA, 1000 bp, Homo Sapiens
gattcaaattttttttttgttttttgtttttgtttttttttgagacagagtcttgctctgttgcccaggctggcgtgcagtggtgtgatctcggctcacttcagcctccgccacctcaaggcagttcaagcaattctcctgcctcagcctcccgagtagctaggactacaggcgtgtgccacctctcccggctaattttttggtatttttagtagagacggggtttcaccgtgttagccaggatgatctcgatctcctgacctcgtgattcacccccctcggcctcccaaagtgctggaattactggcgtgagccaccatgcccagcctcaaatatgtttttaaaaaatatcattgtcctcctcctcttaagatttttttaagttattttgctcaagtacttaagtagtctggctcaagtactttgtttacaattaaaatggatattatagcatttaatagaagaaatggttatggcttatccaaaaagaatgtcagcatgacctggtgtagacttaaaaaactacatgtttgtgaatattttataatgtggaatgatcattgaaatatcaaggattctagtaattgtatttcctgaataaatgtatgtttatgaattttctaacttacattttgttgtgtcctctgccaacaatctggttttataattgttgtctaaagtttgctagtagtgtttcttcaaaggttattccaggtatggttaagtagtgagaaaaatcacttattaattttcaagaactttgagactaatttgtattgactcggttttttaaaataactggcaaatgctatgcttctacttttaaaatttgtggtaatacccagaatggatgtaaaataacatttttcaatagattacttcatttatcaatttaattctgattttaaggcttatttaaaataaatttgtatgagttaaaaaaaaaaaaaaaaaaaaaaaaaaaaaaaaaaaaaaaaaaaaaaaaaaaaaaaaaaaaaaa

SEQ ID NO: 289690 - DNA, 1000 bp, Homo Sapiens
aacagaagataaatgttggcaaggatgtggagatattggattcccttgtgcagtgccggtgggaatgtaaaatgatgtagctactatggaaaatgatacggcaatttctttagaaatgaaatatagaattgccgtatgatctgcagttccacatctggatatctatccaaaagaagtgaaagtagggacttgaacgaacatttgtacaccaatgttcacagcggctttattcacaacagccaaaaggtggaagcaacccagtgtccatggatagatgaatagataaataaaatgtggtataaacatacaatgggctattgtttagccttaaaagggaaggaaattctgacatgctgcaatatggatgaagcttaaagtcattatgcaaagtggaataagcctatcacaaaaaataatattacataattctacttatatgaggaatctagagcagtcagtttcacagagacagaaaatagaatggtggttgccaagggctgggagaagagggcaatggagagtgagtgtttagtgggtcagagttttagtttgggaaggtaaaaagttctggagatggatgatggttatgggtgctcaacagtgtgaatgtacttaatgccacagaactgcacatttaaatgtggttaaaatcatcacttttatgttatgtatatttaccacaataaataaagaagttgatatttcttatacttacaaagaggagaagggcatttgcaaatcaacaagaagtgtgaggcccctctctctagcagaaaaatagactaaatctatttctttatcttttaacatcctgtttaagggaaatgccaaaacaaatgggaaaaaatacacacacacaaatatatatgaacatgttttgcctcatgagtaatcaaaatgtgtacatatgtatgtttatgtatgtgtgtttatatttaaaatcgtgttctgccttatgagtaaacaaaaagtatacaaattaaaaactataatgaaacgt

SEQ ID NO: 289691 - DNA, 1000 bp, Homo Sapiens; identical to SEQ ID NO: 222889

SEQ ID NO: 289692 - DNA, 1000 bp, Homo Sapiens; identical to SEQ ID NO: 222890

SEQ ID NO: 289693 - DNA, 1000 bp, Homo Sapiens
tttctctcttcttgtcaaatttagataaagctcttcattcagctggaatagattctggtttcataatttttggagctaacctgagtaatccactgaatatgcttttgcctttactacaaacagttttccctcttgattatattcttataacaattattattatgtactttatttttacttcaatggcaggaattcgaaatattggcatatggttcttttgggttagattatataaaatcagaagaggtagaaccaggccccaagcactcctttttctctgcatgatacttctgcttattgtccttcacactagctacatgatttatagtcttgctccccaatatgttatgtatggaagccaaaattacttaatagagactaatataacttctgataatcataaaggcaattcaaccctttctgtgccaaagagatgtgatgcagatgctcctgaagatcagtgtactgttacccggacatacctattccttcacaagttctggttcttcagtgctgcttactattttggtaactgggcctttcttggggtatttttgattggattaattgtatcctgttgtaaagggaagaaatcggttattgaaggagtagatgaagattcagacataagtgatgatgagccctctgtctattctgcttgacagccttctgtcttaaaggttttataatgctgactgaatatctgttatgcatttttaaagtattaaactaacattaggatttgctaactagctttcatcaaaaatgggagcatggctataagacaactatattttattatatgttttctgaagtaacattgtatcatagattaacattttaaattaccataatcatgctatgtaaatataagactactggctttgtgagggaatgtttgtgcaaaattttttcctctaatgtataatagtgttaaattgattaaaaatcttccagaattaaaaaaaaaaaaaaaaaaaaaataaaaaaaaaaaaaaaa

SEQ ID NO: 289694 - DNA, 1000 bp, Homo Sapiens; identical to SEQ ID NO: 117620

SEQ ID NO: 289695 - DNA, 1000 bp, Homo Sapiens
tgtgtctctgagagtgcagcacaggttacaggtgcagaatggacctataggacatcgaggtgaaggggacccaagtggtattcccatatttatggtgctggtgccagtgtttgccctcaccatggtagcagcctgggctttcatgagataccggcaacaactttgaaaaacttgctctctttcaatactcccaatgaagatacatttcactcaccctccacccctgctattctgccatgtctttccctctctctgcatagccagatttgaagtgactgatacccaccccaaaccttgctgttcacagtctccaattcttcatattctaatgggaaagtaaaggtattgtttgaaggaaaactgaagaaaagacttggcttagaacaaatgaggagttatatattttactaggacttttgatagaaattcagctacaacccaaagagagaaagattgagtcttcctgtcaccataggcaataccttttttcttagctggcatgccataaaggccagctatgtgatattagaggaagaaaggatttttctttttaatgatcttccttgggaaattattgtggcctttatttaatttctaactacgtacctgggtgcctatatcgacaaagagtgagaagagcatttttacctttttaaaaaagcaaatacatatatacacatacgtatgcaaatattatagtataatagtgatccctatggagaattaaaggtgagaaagctactttgtggtgtctaggtttctgataaaagggatgatcttaactgaagaatttaaagagatacttaaacagagcaaatgtagtaggaacaagggagtgagccttataagaggacgttcagtctcatttattaaaataataactgagactgggagaggtggctcatgcctgtaaatcccagcactttggtagcctgaagtgggagattgcttgagtccaggagaccagcctgggcaacatagcaaaacctcatctctattt

SEQ ID NO: 289696 - DNA, 1000 bp, Homo Sapiens; identical to SEQ ID NO: 222894

SEQ ID NO: 289697 - DNA, 1000 bp, Homo Sapiens; identical to SEQ ID NO: 117622

SEQ ID NO: 289698 - DNA, 1000 bp, Homo Sapiens
tctgattcctgcatcattttcaccattgaaatagttttctactgaaatacaaaacatttcattaactgctctaagatgtgtctgctaatggtgcttaaattctcccaagaggttctcgcttttatttgaaggaggtggtaagttaattagttaatttgctgtgcttcttgcatttttgaaagttacatattctccactgctttaagaaataattcagttcactttcaccttggcatttcagtatctgttacacattagaagtagttgtcactatttcatcatcttggtttttcatttgttttagaatacctcttctgtattttgataactcattgctttatagcattttcttttactcaaataaggattttacatttccttgcctgacagtatttttgaattatttatataaaatatctatcttttcatcatgtctatagttcctgagattttaaaaaaatttgcttagtaaaggttattttgtgatataaaatgggatttataaaaatattagattgtttatttctttactgtggaaaagtagaatgtcatctgtattaattattgcttttacattcattgattattagtcattctaacttggaaaataatgcaattgggtcacagtgttaaaaatctagaaaagacttgttggtttatatgctgaaattgttcatttataattaattttactaatttctccttagtttggatcactaacagagatcttgggacatttatttgttttaaagaaatatttatggttatggaaacgcttgccctaataaaaatcctgcatattcattgtttttttaaattcacattttatacttatatgatctctaaagctcttgctatgttgctataagacagtaatatagtgataatttaccaactttattgaaaatgttgttacatcaataaaatagcatgctgggaacctgagaaggaaggtttctttagtactgccaaaaaaaaaaaaaaaaaaaaaaaaaaaaaa

SEQ ID NO: 289699 - DNA, 1000 bp, Homo Sapiens
tggcccagcagcttcagcaagaggagtatcaacagcagcaggcagcgcagccagtgcggatgcggacgcgggtcctgtcactgcaggggagaggagccacatctggacgcccagccggggagcgtcggcagaggccgaagcacgagtcagactgcattctgctgtagctctgccccagtgccaggctggcctgccccttcttccagaggctatggctagttggcttgctcccccgcctccacccctgagatgtgctggataacttatttatggactgttggggatgagagcaggcaacaaatgccaaggtcagacttggtaatgtccttgacctcacgtgctgctgccttctctgcctcccacccagggcaacactaggattggtgggtttctggttctcaactcccggtccctgaatagtcacacgtatgtacagactgaggctctggggtgaggtccctatccagaatgcatctcttctgcttcccatccctgctgcctggatgctcctgatcacctaggcaggcctgtctccagttgtttcagagcttaatttgggtttctatctcttatttgtaatgccttcctggggtttggaaataaaacttctggccgggcacggtggctcactcctgtaatctcaacaatttgagaggccaaggtgggcggatcacctgaggttaggagttcgagaccagcctgcccaaaaaggtgaaaccccgtctctactgaaaatacaagaaattagctgggactacaggcatgcgccactgcgcccagctgatttttgtatttttagtagagacggtttcgccactttggtcaggctggtcttgaattcctgacctcaggtgatccgcctgccttggcctcccgaagtgctggaattacaggcgtgagccactgcgcccagctacctgtcatttctaatatagcctgcagggggaaccaaaaaaaaaaaaaaaaaaaaaaaaaaaaaaaaaaaaaaaaaaaaaaaaaa

SEQ ID NO: 289700 - DNA, 1000 bp, Homo Sapiens
aggcccagctgacttggaagaccccttcaatcccaaagctcagttagtgctggtaggagccacatttcccgaaggtgtaggccagttgctgaataaagtcgccagcccagatgctgtcaccaccatcaccagctccaagctccactgtatcatgcctcatgtgaaacagacatttctgagactgaagggagcagataaggtggccgagctggtgcacatcctcaagcatcgtgacagagcagaaaggactggtccctcaggaactgttctggtgttctgtaatagctccagcactgtgaactggctgggatatattctggatgaccacaaaatccaacacctaaggttgcaggggcaaatgccagccttgatgagggtaggaatcttccagtccttccagaagagctcccgagacatacttctctgcacagacatagcctctcggggcctggacagcactggtgtggagctggttgtcaattatgatttccccccaacgctgcaagattacatccacagagcagggagagtgggccgtgtggggagcgaggtgccaggcaccgtcatcagttttgtgacccatccctgggatgtgagcctggttcagaagattgagctggcggctcgccgaaggagaagtcttccaggactagcatcctcggtgaaagagcctttgccccaagcaacctgattttgacaaatctgattaaaatgtgatgctagaacagggatctttcccagtatcttgagtgggtgaccacacttgtcagtgggaggctctgggctgccctgtcggctccttgagggcgggatgaactgctttgtgacttggaaaggtacgctgctggccagcattggagaagaagctgctgagcatggctttctgtagtctttagcaagacacaagtggattttgactttgtatcatgtcatgatttctaacaataaatgatgtttttatgtgcctcccctaagaataattagcaccggggcggaattc

SEQ ID NO: 289701 - DNA, 1000 bp, Homo Sapiens
aaggaggaggaggaggaagaggaggaggtggaggacgaggagggcgggcccagggagtgacccctgccaggtgcagatacaaaccagacacggtctgtggctactttgtgttattataagatatgagctcaaaccgagatatgaatgaccttggggagccatctgaggccaagatattgacgggggggattcctgggtcccattttcagcgcccagggtcacagatccacagtgggaagttctgtgggacacattggcactgagccacaaagaaggtgtggccagaacaacttgggctcctgctgaccaatgtcctctagggcctaggggacagaggaacacagagtcacagcttcaggggccgaatgagcatggcggccttcctgagagaatatgccccaccacgaaactcagcccagtagacaccatcctggtagcggcttcggtagtggccgccgtggtgccacacaccgttgaggttggagtgggcacaggcatggtaccaccagcctccccgctggtacagggcacagttacctgaggggagagagagagtccatgtcctctcaccagaataaaagcctctacctgcacctcacagtgcaaggcttttgccaggcatcccctggcccctcccattcttattgaatacaagccctgatcttccatctcctcagcaaaaaaataggagccctggccccccaactttcttcagagtaatagccttaattccttccctatctccttaccaaagtacaagtcacatctttcccaccttttctgcaaactaggagtctaccgttcattcctttatcaaagaaaagtatctacttcctttctagaataagagtactagctctcaccctctgccctttacttgaacaggagtcttgattctttttttgcctcatcagagaaggaatctggactccccatccccccaccaggataaaagtcctgacctttgttctcttgacggaataaaagcttgcttatcctt

SEQ ID NO: 289702 - DNA, 1000 bp, Homo Sapiens; identical to SEQ ID NO: 117623

SEQ ID NO: 289703 - DNA, 1000 bp, Homo Sapiens; identical to SEQ ID NO: 117624

SEQ ID NO: 289704 - DNA, 1000 bp, Homo Sapiens; identical to SEQ ID NO: 117625

SEQ ID NO: 289705 - DNA, 1000 bp, Homo Sapiens; identical to SEQ ID NO: 117626

SEQ ID NO: 289706 - DNA, 1000 bp, Homo Sapiens; identical to SEQ ID NO: 117627

SEQ ID NO: 289707 - DNA, 1000 bp, Homo Sapiens; identical to SEQ ID NO: 117628

SEQ ID NO: 289708 - DNA, 1000 bp, Homo Sapiens; identical to SEQ ID NO: 222898

SEQ ID NO: 289709 - DNA, 1000 bp, Homo Sapiens; identical to SEQ ID NO: 222900

SEQ ID NO: 289710 - DNA, 1000 bp, Homo Sapiens
tatttaaatggggaatttcatctaaagcaatgatgtagtatttttaatattctgattggtaaaattaaagaggaaattaatctttatatattatttcttgcagaaacattcattattttattaatattgccctaagtacaactaggcaagtgattgccacctaaatcagaagacgttctaaagtcagtaagaaagtgtgaaatgctagtataaaggttattttttttctttcctaaataactaaagtgaggtgtagattgagccttgatattatttagttaatgttttttattaattaattttggctggactttatttagcttgattaggttattatctgtcaaaccttttaagttgacaacatgactcatatatatacatgtgtataagatgagcatgtgtcaaagacttattcgactcattaatgaggaaaccagcagatagtaaacctggttcaaagtacaattcaagaaactgagtatttatgggcattgaagaaaaaatgttgagataaaattgctgtgcagaaaaaagtgttaatgaagccgacctgactacttaaccttagagacctgctttacaaggttggcccttgattggcatctgggaacttggagttcagggggcttccaccattcccagaactgatcaaagtagcttactatatctaaactgtaaaacaatatagtttctcctgaacacctgctttccttctgggagtctggaattttggtatgtgccaggcagagactacctttgtgaccagctcccagtaaaaaccccaggcactcagtctctaacaagcttttctggttgacagtgtttcacaagtgctgttacaactggttgctgggagaattaagctcatcctctgtgattccactggcggaggattcttggaagcttgcacttagtttcccctgacttcaccccatgtgtcttttttcctttgctgattttgttttgtatcctttcactgtaataaatcatggccgtgagc

SEQ ID NO: 289711 - DNA, 1000 bp, Homo Sapiens; identical to SEQ ID NO: 222901

SEQ ID NO: 289712 - DNA, 1000 bp, Homo Sapiens
ctgtggtggtggtggatgagtttcaattgacagcattctctaccccacagcatggtacaacacgctgcccctcctctcggctgttcccttccattcagcatgggccaaggccatgggagtcaatctacttgctgcaaatacccacaacaccagcatgcacatgacagggagtggaatctacgccccagaagcagtcaaggtgtaccactatgacatggaaacagagagtggtcagctgttgctatcagaactgaagtctcggccccgccgtgagcccacctaccctgcagctgttgactggcatgcgtatgccagcagtgtcaagccattttcctctgaacagtcagattttctggggatgatttattttgatgagtttaccttcaccaagcttaagagaaatacaggaaattacacagcttgccagaaagatctgtgttgtcacttaacttacaagatgtctgagaagcgaacagacgagatctatgccctaggtgcttttgatggactgcacacagtagaaggccaatattacttacagatatgtgcattactgaagtgtcaaaccactgacctggaaacgtgtggagaacctgtggggtcagcttttaccaagtttgaagacttctccctcagtggcacatttggaacgcgttatgttttcccacagatcattctaagtgggagtcagcttgcccctgaaagacattatgagatttcaagagatggacgcttgaggagccgaagtggagcccctttgcctgtcttagttatggccctgtatggaagagtgtttgagaaggaccctccacgcttagggcagggatctgggaaattccagtgatctcctttagcagagcccttttaggattagcctggctaagaaaggaagaaaaaaaagagatccgttagtgtctgtttagaaaagatgttataaacttacagaaacaaatataataaactgaagcagatttgaaaagcaaaaaaaaaaaaaaaaaaa

SEQ ID NO: 289713 - DNA, 1000 bp, Homo Sapiens
tacttcgcctatgaatgcataattttcagatttttttcccctagattttgagggagcagagaaactggaaaaaactttagtcaatatctcgtgtttcattttaattaagtgacaggtccaagtgtgacatccttcagcacccagggacaagagaggggaaagatgctttatggaatgtaagaagatgaaggtgactgggattcagcgagagagaggtccctcagacctgggacctccctttatagggaaagaccatattccataggtttagggctttaccttaaaagctcatttttttcattcttccatccctaggaaagtacttaaaaccagacttttaaatttttatttatttattattatttttttgagacagattctcactctgtctcccaggctagagtgcagtggtgcaatctcagctcactgcagcctcaactgccccaggtttaagcaatcctcccacctcagcccccaggtaactgggactacaggcatgcaccaccatgcctggctaatttttgtattttatgtagagacaggggtcttgccatgtcgcccaggctgatcttgaactcctgggctcaagcaatctgccagcctcagcctctcaaagtgctgggattacaggcctgagcaactgtgcctggcccaaaaccagaccgttaacacattaaagagtctgattttgttgaagaaaatatttgcaataaattcaagactcttcttattggtaattttccacacaatccctctgaaataagggagaggatatagacctttttaactttatagttagaaaaattggcctcagtgtgaaatttttccagtcccatagctcatggatgccaccagcttgcggtagtagcaagatgcttactaccacaccgttttcctcggtggcccaatagctcgtgtatctaagttgaacccggcagtatgcatgattgcctttttctcttctttttaaaaaaacccaactcaaaaaaaaaaaaaaaaa

SEQ ID NO: 289714 - DNA, 1000 bp, Homo Sapiens
aatcggtattggtggagcggctccctatttatacaataggaagcatgggtgcttagaaagtttatttcaggaggaaaatgggttcacacaaaaagcaaactacattctgatctgctcagggagaagcttgcctttgaactggaagatgttgggatgagcagggaaagcttagactttggagtcaggtttgtgttcagaatccagccctgctggctactaactaactgggagaccttaggcaaagcatgcaatcgctctgaatggcagtttcctcatttttaaacagggataataaaactaatattgcaggggagttacagggttaaataagatcctgtgtgtaaccccaagcattggatgactcatagaatggccttttttgtcagcataatcgtcatcattatttagatactttcttccttcactcacccagcaggtcagttttctgtgcaaacaaacctgtttaggattcttccaaatgttcttcctggggtctttgatatttgtttgttacatcctgctgaagttcgactgtgtttttattttttcatccaacttccatttttcactttttacatgattactcaatccttggggctgtccatgtcatctcttagatttcttaaaagacattttaatgtatggttaggttttatatttttattttttaaaaaagaaatagtcagtgttttcctcctttcaaccgagactatttctggattgtgtgctcctcgtcagttgacttgttttgcacacttttctttacttcatgtccccatcaacaaccgtcctgctccccacctcccccaggaaataaggggcctgctcctctccctactgtgaccctggaggctcttaagatgatgatggttttttttattgggctgagttcacgaattaggggcaggagctggaagtcgccctaggaacaccagatttcctggttctgttcaagttggcatttcttgtttggaataaactatttcttggacattccttc

SEQ ID NO: 289715 - DNA, 1000 bp, Homo Sapiens
aagtggcatcttgtaaaaaaaaaaaaaaagtttaatctgaatctaaccatgaggaaataatcagacaaatccacattaggggcattctgctaaacatctgacccagactcttcamaaatgaagagtgaaagataaagtagtcaatggccgggcgcagtgagattgcgccattgcattccagcctgggtgacagagcgagactccgtatcagaaagaaaaagaggaactgaatgaaatctcagatggctgaaatgttagagaaacagagcaccaagtcccctgctctgtgactcgttgttcctttcctctgtcttcaagcaccacgcagaaatacactggatgttctctctttgcttcaatggagacccaaggagctgggaggtctcttaagagactctctgattctccgtggctgggtgtgatggctcatgcccataatcccagccctttgggaagctgaggcaggaggattgagaccaggagttcgagaagagcctgggcaacatagtgagaccccatctctacaaagaaaaaaaaattagctggacatggtaatgaatgcctgtagtcccagctactccggacactgatgtgagaggatcacttgagccagggaggtcatggctacagtgacccctcattgcaccactttacttagcctgggtgacagagtgagaccctatctcaaaaaaaaaaaaaatctatgcattgtatgggactttcctttggatcccccaatcaaaggataagcaatgcgtaagcctgtgtccttcctgaagcttctcgactgcccagatagggaggtgagtcctctctatctcctctggctctggaagcaccttgaaaatgtgcattttcaaggacacttgctgggttgtgcattaagggccagtttacttgtctgcctctttgaccacctgtgaactctgttgggtgtactctgctaagttctggggatgaggaaattaataaaggtacagtcttgccttcaaaaaaaaaa

SEQ ID NO: 289716 - DNA, 861 bp, Homo Sapiens; identical to SEQ ID NO: 117630

SEQ ID NO: 289717 - DNA, 1000 bp, Homo Sapiens
aatgatagcatagaattatgcctaaaatagacatttcccataattgtattgtgataagttcttcaggcttgacaacttcacattgcctctcttccttgaatgtattttatctggtcttttctatatagtcttttgaaggataatttttatcaatagccaactttgggtatttttttaagtgtcaaatatcatcatggtttgaaaaaaggataaaaaagctataactaaaaaaatcttaaggataacatttggtttactaatttttaatcatttatctttcagaacttgtttcttatcaagaagttagcaggtatgatatgtatatcatacgtatataaactggcataggttacatcctagggcatgaggggagtatctttcagggattcaaatggaatttttacctgttacttgtttaattgttttgttttcaatattcttggggattagacaggggaaggtattttattactgcataatagatggtgaaacccaggaaaattaagtacttgtgcatggccccactatcaataacacaaagtctgtactctggatctcccctaatgtccctgtggtctaaacggcttgataatacaaccgagcccctgaagtagctgccctcctctttccgctcccccatctcggccctgcccatactccaagggtcagctcccatctctcctccctaatgcctcacttcaagcactaatttggctctttctgctcactaaaaatcatatattttacagatttattttgtttctggagaaggcagcaaacttttacttccctgcagaagtagttaagtacatagtgttttctctaaaaaggcatttgataaatatttgaacagcctgtagagtttcaacctctttgagatataagtatcttaaatatcatagagcactgtgattcatttttatattttattgctttgaatgctcaaactatgggaaatctttggtaaaaataaagacaataaaatcttcacaataacttt

SEQ ID NO: 289718 - DNA, 1000 bp, Homo Sapiens
ccttccagcaaagcaaaagcaaaaagtttaagtgaggcttttgaaaacctaggcaaaagatctctggaagcaggtaggtgcctgcccaagagcgattcatcttcatcacttccaaagaccaaccccacacacagcgcaactcgcccgcagcagacatctgaccttcacgttcagggaaatagttctggaatatttagaaagtcagtgtcacccagcaaaactctttcagtcccagataaagaagtgccaggccacggaaggaatcgttacgatgaaattaaagaagaatttgacaagcttcatcaaaagtattgcctcaaatctcctgggcagatgacagtgcctttatgtattggagtgtctacagataaagcaagtatggaagttcgatatcaaacagaaggcttcttaggaaaattaaatccagaccctcacttccagggtttccagaagttgccatcatcacccctggggtgcagaaaaagtctactgggctcaactgcaattgaggctccttcatctacatgtgttgctcgtgccatcacgagggatggcacgagggaccatcagttccctgcaaaaagacccaggctatcagaaccccagggctccggacgccagggcaattccctgggtgcctcagatggggtggacaacaccgtcagaccgggagaccagggcagctcttcacagcccaactcagaagagagaggagagaacacgtcttacaggatggaagagaaaagtgatttcatgctagaaaaattggaaactaaaagtgtgtagctaggttatttcggagtgttatttatcttcccacttgctctctgtttgtatttttgttttgtttttgattcttgagactgtgaggacttggttgacttctctgcccttaaagtaaatattagtgaaattggttccatcagagataacctcgagttcttggtgtagaaattatgtgaataaagttgctcaattagaaaaaaaaaaaaaaaaaaaa

SEQ ID NO: 289719 - DNA, 1000 bp, Homo Sapiens
tccccactcctccgagacccaggagacaaacagcccttccttggggaaacttgggaatcattctggcttaaacaacacctcctcctgctgctcactcccgctgagcccactctactgccccagctccgtttctaccaccgcatcctcactgggctcactgcaggcatgctgaacaaggggcctccaaccttctgccctcctgccaaaagatctggggagtgtgaggagagggtggcatcaggagctgctcaggcttggcggagggagcggcatgggcgatgtcactcagccccttcccggtccgcccgcttccctccttcatgatttccattaaagtctgttgttttgtgactgctgccagtgtggttggccctgcccctgcaggccacatggtccagggagggagggggacatggaaatctgccttagagacaaatggagtagggcagcccggagctggggcccaagggacaggacaccactgcctgctcttcgtctggggcctggggccttgcctcccactgaggagactttgggtggggtggggggctgtcccccaaagatgctcctgagtgcaagagcaggcaaggcagagtcctggggcacagccacgaggtgacctccctgtgcagagactcccgagccctactccacccagcaagctccagtccgccccatctctcccgtctaccctgacctggagatccagaagtatggcccagaagagcccttgccccgcctgtctgcccttggtggcagtggccatggccgacgccaggcccagccaccctgggactgagcctgactgcttcagacagccgacccctccttgtccccgctccacgcccgcagcctcctggtggcgctccgccctctcccgcttcctttgtgtatctcagccctacaaagaaaaacactcccactcttgtcatacctaattgttcctgctgtggtttggggaattttttttattaaataaagttttttattataagggtaa

SEQ ID NO: 289720 - DNA, 1000 bp, Homo Sapiens; identical to SEQ ID NO: 222903

SEQ ID NO: 289721 - DNA, 1000 bp, Homo Sapiens
gaagcggctcatgatggtcctgaccgggcgggggaagtacagcgaccccatggagatcccggccaacgaggcacacgtctccgccaacctgaagaccctgaaccagtacagcatcccagaaatcaaccaccgcttgaaaagctacatgaagttcctgtttgtccgggagcccttcgagaggctagtgtccgcctaccgcaacaagttcacccagaagtacaacatctccttccacaagcggtacggcaccaagatcatcaaacgccagcggaagaacgccacccaggaggccctgcgcaaaggggacgatgtcaaattcgaggagtttgtggcctatctcatcgacccacacacccagcgggaggagcctttcaacgaacactggcaaaccgtctactcactctgccatccctgccacatccactatgacctcgtgggcaagtacgagacactggaagaggattctaattacgtcctgcagctggcaggagtgggcagctacctgaagttccccacctatgcaaagtctacgagaactactgatgaaatgaccacagaattcttccagaacatcagctcagagcaccaaacgcagctgtacgaagtctacaaactcgattttttaatgttcaattactcagtgccaagctacctgaaattggaataaagggggtggggagagggagagaatcatgctttttaatttaagatttttatttgtcaaaagaattatatggatattgggttattttgtaaattaatatttctttggggatgatgctgcgagcagcatagtgagaattatttaaaatccttcgtagggaaggacagctgtctttgcaggggaaataggatgggtcgttcttgtctgtagaagtgaatactgcaacactgtctcaaaggtttcttgtgttctggtgaattccatgaattgtgcattccataaattctaattaatattatttatagcaaaaaaaaaaaaaaaaaaaaaaaaaaaaaa

SEQ ID NO: 289722 - DNA, 1000 bp, Homo Sapiens
aatcagacggtgatgtcaaaaaaccttttctggttcaggcacagaccccaggaagcttttcgggaagccctgcacatggacaggtacctgttgctgcacccagactttctccgatacatgaagaacaggtttctgaggtctaagaccctggatggtgcccactggaggatataccgccccaccactggggccctcctgctgctcactgcccttcagctctgtgaccaggtgagtgcttatggcttcatcactgagggccatgagcgcttttctgatcactactatgatacatcatggaagcggctgatcttttacataaaccatgacttcaagctggagagagaagtctggaagcggctacacgatgaagggataatccggctgtaccagcgtcctggtcccggaactgccaaagccaagaactgaccggggccagggctgccatggtctccttgcctgctccaaggcacaggatacagtgggaatcttgagactctttggccatttcccatggctcagactaagctccaagcccttcaggagttccaagggaacacttgaaccatggacaagactctctcaagatggcaaatggctaattgaggttctgaagttcttcagtacattgctgtaggtcctgaggccagggatttttaattaaatggggtgatgggtggccaataccacaattcctgctgaaaaacactcttccagtccaaaagcttcttgatacagaaaaaagagcctggatttacagaaacatatagatctggtttgaattccaggatcgagtttacagttgtgaaatcttgaaggtattacttaacttcactacagattgtctagaagacctttctaggagttatctgattctagaagggtctatacttgtccttgtctttaagctatttgacaactctacgtgttgtagaamactgataataatacaaatgattgttgtccatggaaaggcaaataaattttctacagtgaaaaaaaa

SEQ ID NO: 289723 - DNA, 1000 bp, Homo Sapiens
gagttcattgaagaagtccagtgaggctgaagtaaaggggcaagatagggcagttaactaaagagcactttatttctttgaagcctttctaagaaagaaatgggggtgcgagtggcttgaatctcccatgatgttggagggcacttagtggggttgaagtatgacataatatttcccattggggaaaggagaatttctcttagagggtggcaaaatgcctttgcccagtgtccctattttaggcatcttttccttccttattccttccagtcagggtgtgtcctatacaaaacttcccatcagttctcctcaatattccccatttgtaaatgatcacttctcttttctaaacccttttcctgttcagatccatacaggatttgcaagggtaggatcatacatgcaaatgccccttgttcatctgtgtcttctgcaaactagtctcatgaagaattctggcgtgcagccagggtagctgaagtttgggtctgggactggagattggccattaggcctcctgagattccagctcccttccaccaagcccagtcttgctacgtggcacagggcaaacctgactccctttgggcctcagtttcccctccccttcatgaaatgaaaagaatactactttttcttgttggtctagcattgctggacacaaagtgtagtcattattgttgtattgggtgatgtgtgcaaaactgcagaagctcactgcctataagaggaaataagagagaaagtggaggagagggacaaaaggagtaattatttggtatagatccacccatcccaacctttctctcctcagtccctgctcctcatgtttctggtttggtgagtcctttgtgccaccacccataatgctttgcattgctgcatcctgggaagggggtatatggtctcacaagttgttgtcattgtttttttgcatgctttcttaataaaaaaaaaaaaagaatgtttacagttttatcttaaaaaaaaaaaaaaaaaa

SEQ ID NO: 289724 - DNA, 1000 bp, Homo Sapiens; identical to SEQ ID NO: 222905

SEQ ID NO: 289725 - DNA, 1000 bp, Homo Sapiens; identical to SEQ ID NO: 117632

SEQ ID NO: 289726 - DNA, 1000 bp, Homo Sapiens; identical to SEQ ID NO: 222907

SEQ ID NO: 289727 - DNA, 1000 bp, Homo Sapiens
gtcatcaccatcgtcatctgtctctgccacgtctgctttggacacttcaaatacctcagtgcccacaactacaagattgagcacacggagacagatactgtggaccccagaagcaatggacggccccccactgctgctgctgtccccaaatctgcgaaatacatcgctcaggtgctgcaggactcagaggtggacggggatggggatggggctcctgggagctcaggggatgagcccccatcatcctcatcccaagatgaggagttgctgatgccacccgacgccctcacggacacagacttccagtcttgcgaggacagcctcatagagaatgagattcaccagtaaggggagggaggggccctggaggccacatcctgccccaccccacccccactcccacggacactaaaacgctaataatttattagatctaaagccccttcctccccagcccctgctttcattaaggtatttaaacttgggggtttcactgctctcccccatgatggagggagggagccccccaacctcagtgaggagagccccgagccggccccggggcaaagaggggtgcagagggagttcccccagatcagtaccccccacccctccccagctagtagcatgaccaggagagggttaatgagagccaagaggagtacctggtgcacctggtgccggtggctggagacctggggggcaggtggatctggggctgttcccccccctccgttttttccaccccacagttcctcctgggatctggccctccagggaagtggagcctccagcccctaggggatgcatgaggggggagggggtgctgagtgggaggaagagtcaggctcacagctggggtggcctgggggtgggggtgggcaaggctgacactggaaaatgggtttttgcactgttttttttttggtttttttgttcttttttgtttttttcctttaaaataaaaacaaagaaaagctctgaaaaaaaaaaaaaaaaa

SEQ ID NO: 289728 - DNA, 1000 bp, Homo Sapiens; identical to SEQ ID NO: 117635

SEQ ID NO: 289729 - DNA, 1000 bp, Homo Sapiens; identical to SEQ ID NO: 117636

SEQ ID NO: 289730 - DNA, 1000 bp, Homo Sapiens
tcttaaaaaggtatcagaagagcaaggtcaagaaaacccagcagaccacgatcctattcatgatcaaagctggtatttagaccgatcattaagaaaacgtcttcatcaagagtatggagttcaaggctgggctattgtacagtttcttggggatgtggtgtttatcccggcaggagctccacatcaggttcataacttatatagctgcatcaaagtggctgaagattttgtttctccagagcatgttaaacactgcttctggcttactcaggaattccgatatctgtcacagactcataccaatcacgaagataaattacaggtgaagaatgttatctaccatgcagtgaaagatgcagttgctatgctgaaagccagtgaatccagttttggcaaaccttaatctccctgcacattggaaatgaattacaggcagctgttcaaactcttcaggcaggattcctgtggactttgagattcatgttacctcatcttcttttttaaactgtacccaacttgtgagggtactctgtctaatgtatatttctagtgtttacagacagtaaatgtgtatatgtagtaactatttacagaacatgcatccttaaactgtgacttctcacctagtgcagaacttttaccaggctgtaaaagcaaaacctcgtatcagctctggaacaatacctgcagttattcttcagctgtttggacaacttagattgggtttataactattaggaatcactgcacagtttatttgggttgtgttttgtgtctgagtcccctccctcatcccttagggtccagaagagcaatggaggaagtgacagctaatgttgcagttcttattgtatggcataggactggcattatatagcagaaatcaactactgtacaatttcttggggttaaccatctttagttaaatggaattttaatttaaatgacgctttgctaattttaagtgttaagcattttgcattaaaatattcatataata

SEQ ID NO: 289731 - DNA, 1000 bp, Homo Sapiens
tcacatcctacgaaatgtgcctcaagtcccagctggtggaccttgtagccgagggctactgggaggagctactagacacattccggccggacatcgtggttaaggactggtttgctgccagagccgactgtggctgcacctaccaactcaaagtgcagctggcctcggctgactacttcgtgttggcctccttcgagcccccacctgtgaccatccaacagtggaacaatgccacatggacagaggtctcctacaccttctcagactacccccggggtgtccgctacatcctcttccagcatgggggcagggacacccagtactgggcaggctggtatgggccccgagtcaccaacagcagcattgtcgtcagccccaagatgaccaggaaccaggcctcctccgaggctcagcctgggcagaagcatggacaggaggaggctgcccaatcgccctaccgagctgttgtccagattttctgacagctgtccatcctgtgtctgggtcagccagaggttcctccaggcaggagctgagcatggggtgggcagtgaggtccctgtaccagcgactcctgccccggttcaaccctaccagcttgtggtaacttactgtcacatagctctgacgttttgttgtaataaatgttttcaggccgggcactgtggctcacgcctgtaatcccagcactttgggagaccgaggcaggtggatcacgaggtcaggagacagagaccatcctggccaacacggtgaaaccctgtctctactaaaaatacaaaaaattagccgggcgtggtggcgggcgcctgtagtcccagctactcgggaggctgatgcagaagaatggcgtgaacccggaaggcagagcttgcagtgagccgagatcacgccactgcactccagcctgggtgacagagcgagactctggctcataaaataataataataataaataaataaaaaataaatggttttcagtaaaaaaaaaaaaaaaaaa

SEQ ID NO: 289732 - DNA, 1000 bp, Homo Sapiens
acagaattattaactatattttactaactaaaaaactctagtattctttacctaaagtcaattggctggtaagagggagagatgcaaaattctccagctctgaacttggagctacttcacactctactcttaatggaaacttgaactaatgatagatagtatttttttcctctatttaaaatttttgtcttgattaggagatttttcagttctccatataataattttctacaatcagatctatgctgtggcatattttgctttatttaaaaatttttttttagagatgagttcttgctctgtcacctaggctggagtgcagtggcatgatcatggctcactgcagccttgaccttccagcctgccaagtagctgggattacagacaggcatgtgctattacacctggctaatttttaaagttttttttgtaaagatagggtctttctatgttgcccaggctcgtcttgagctcctggcctcaatcgatcttcctgccaaggttttggaattacaggtgtgagccaccatgcctggcctgctttgacatattttatagtgtgttaattacaaatagtcttcatatgccagaatataagagcaagtgttatctactttttagatgggaattgcagaagctgcatcaaaagtatgctttgaggtatatatagtgaaacagagcctttctgaagagaattatatcaaactaattacaaccaagaaataatagtatgaagcggatgctgtttggaggacaggaaaatttatcgggaaaattacataatccctctgattccactatccagagatagccattattattaatatttggtatgtacatccttatattattttttttttatgcatgattttgtatatatggttatttttctttccataaaaatggtattaaactgtatatactgttttgtagcctacatatttcatatagaagtatattgttaacattttccatgtcaataaatattctatggctttct

SEQ ID NO: 289733 - DNA, 1000 bp, Homo Sapiens; identical to SEQ ID NO: 117638

SEQ ID NO: 289734 - DNA, 1000 bp, Homo Sapiens; identical to SEQ ID NO: 222911

SEQ ID NO: 289735 - DNA, 1000 bp, Homo Sapiens; identical to SEQ ID NO: 117639

SEQ ID NO: 289736 - DNA, 1000 bp, Homo Sapiens; identical to SEQ ID NO: 284476

SEQ ID NO: 289737 - DNA, 1000 bp, Homo Sapiens; identical to SEQ ID NO: 117640

SEQ ID NO: 289738 - DNA, 1000 bp, Homo Sapiens
ctttcccagtccttgcatcaacgggatgccacatttcataactgtttttaatggtaaaaaaaaaaaaaaaaaatacaaaaaaaaattctgaaggacaaaaaaggtgactgctgaactgtgtgtggtttattgttgtacattcacaatcttgcaggagccaagaagttcgcagttgtgaacagaccctgttcactggagaggcctgtgcagtagagtgtagaccctttcatgtactgtactgtacacctgatactgtaaacatactgtaataataatgtctcacatggaaacagaaaacgctgggtcagcagcaagctgtagtttttaaaaatgtttttagttaaacgttgaggagaaaaaaaaaaaaggcttttcccccaaagtatcatgtgtgaacctacaacaccctgacctctttctctcctccttgattgtatgaataaccctgagatcacctcttagaactggttttaacctttagctgcagcggctacgctgccacgtgtgtatatatatgacgttgtacattgcacatacccttggatccccacagtttggtcctcctcccagctacccctttatagtatgacgagttaacaagttggtgacctgcacaaagcgagacacagctatttaatctcttgccagatatcgcccctcttggtgcgatgctgtacaggtctctgtaaaaagtccttgctgtctcagcagccaatcaacttatagtttatttttttctgggtttttgttttgttttgttttctttctaatcgaggtgtgaaaaagttctaggttcagttgaagttctgatgaagaaacacaattgagattttttcagtgataaaatctgcatatttgtatttcaacaatgtagctaaaacttgatgtaaattcctcctttttttccttttttggcttaatgaatatcatttattcagtatgaaatctttatactatatgttccacgtgttaagaataaatgtacattaaatcttggtaa

SEQ ID NO: 289739 - DNA, 1000 bp, Homo Sapiens
gagagcagcctcgaggtggagaagaaggacaagcttgcgaacacatctgttcgatttcaaaacagtcagatttcttcaggaacccaggtagaaaaatacaagaaaaattatcttccaatgcaaggcaatccacctcgaagatccaagtctgcacctcctcgtgatttaggcaatttggataagggacaagctgcctctcccagggagccacttgaaccactgaacttcccagatcctgaatataaagaggaggaggaagaccaagacatacagggagaaatcagtcatcctgatggaaaggtggaaaaggtttataagaatgggtgccgtgttatactgtttcccaatggaactcgaaaggaagtgagtgcagatgggaagaccatcactgtcactttctttaatggtgacgtgaagcaggtcatgccagaccaaagagtgatttactactatgcagctgcccagaccactcacacgacatacccggagggactggaagttttacatttttcaagtggacaaatagaaaaacattacccagatggaaggaaagaaatcacgtttcctgaccagactgttaaaaacttatttcctgatggacaagaagaaagcattttcccagatggtacaattgtcagagtacaacgtgatggcaacaaactcatagagtttaataatggccaaagagaactacatactgcccagttcaagagacgggaatacccagatggcactgttaaaaccgtatatgcaaacggtcatcaagaaacgaagtacagatccggtcggataagagttaaggacaaggagggtaatgtgtcaatggacacggagctgtgacgatcctcatgtgatcatgaagtaacagtaactgactttttatgttaaaaaatgtacatttactgtggattctgtttaatttattgtgtatgtgtggggaaaagattggattttaaaataaaagtttaccctgtggcattttcaaaaaaaaaaaaaaaaa

SEQ ID NO: 289740 - DNA, 1000 bp, Homo Sapiens
aaacttacaaacaaccccatctccagacaaaggaagagcaacggaagaaacgcgagcaagaacgaaaggagaagaaagcaaaggttttgggaatgcgaaggggcctcattttggctgaagattaataattttttaacatcttgtaaatattcctgtattctcaacttttttccttttgtaaattttttttttttgctgtcatccccactttagtcacgagatctttttctgctaactgttcatagtctgtgtagtgtccatgggttcttcatgtgctatgatctctgaaaagacgttatcaccttaaagctcaaattctttgggatggtttttacttaagtccattaacaattcaggtttctaacgagacccatcctaaaattctgtttctagatttttaatgtcaagttcccaagttccccctgctggttctaatattaacagaactgcagtcttctgctagccaatagcatttacctgatggcagctagttatgcaagcttcaggagaatttgaacaataacaagaatagggtaagctgggatagaaaggccacctcttcactctctatagaatatagtaacctttatgaaacggggccatatagtttggttatgacatcaatattttacctaggtgaaattgtttaggcttatgtaccttcgttcaaatatcctcatgtaattgccatctgtcactcactatattcacaaaaataaaactctacaactcattctaacattgcttacttaaaagctacatagccctatcgaaatgcgaggattaatgctttaatgcttttagagacagggtctcactgtgttgcccaggctggtctcaaactccaccaaatgtacttcttattcattttatggaaaagactaggctttgcttagtatcatgtccatgtttccttcacctcagtggagcttctgagttttatactgctcaagatcgtcataaataaaattttttctcattgtcataaaaaaaaaaaaaa

SEQ ID NO: 289741 - DNA, 1000 bp, Homo Sapiens
aatccaaagatcctctagcactgaattgctaagtcactatgacagtgatataaaagaacagaaaccagagcacagaaaatctttaatgttcagactgcatcacagtgcttccgatacaagcgacaaaaatcgagttaaaagcagattaaagaagtttattacccgaagaccttccctgaaaactctgcaagaaaaaggacttattaaagatcaaatttttggctctcatctgcacaaagtgtgtgaacgtgaaaattccacagttccgtggtttgtaaagcaatgcattgaagctgttgagaaaagaggtctagatgtggatgcaatatatcgagttagtggcaatctgcaaacaatacagaagttaagatttattgtcaaccaagaagagaagctgaatttggacgacagccagtgggaggacatccacgttgtcaccggagcactgaagatgtttttccgggagctgcctgagccgctcttcccttacagtttctttgagcagtttgtggaagcgatcaaaaagcaagacaacaacacaagaattgaagctgtaaaatctcttgtacaaaaactccctccgccaaatcgtgacaccatgaaagtcctctttggacatctaactaagatagtggccaaagcctccaagaacctcatgtccacgcaaagcttggggattgtatttggacctacccttctgcgagctgaaaatgaaacaggaaacatggcgatccacatggtctaccagaaccagatagctgagctcatgctgagtgagtacagtaagatcttcggctcagaggaagactgacagacaagacaagctactgaatacgttcacatctgtcttgatgcctaatatttttacatttctgtaaacatatttctgaaatattttttgcctttcaagcgacagatgcctcattttgtgaaaacttaatgatgattttgtgtttaagttccaaacatttgaataaaataattgacaataaaaaaaaaa

SEQ ID NO: 289742 - DNA, 1000 bp, Homo Sapiens; identical to SEQ ID NO: 284128

SEQ ID NO: 289743 - DNA, 925 bp, Homo Sapiens
gcgcggtagcatcgcggagtcggtgctttagtacgccgctggcacctttactctcgccggccgcgcgaacccgtttgagctcggtatcctagtgcacacgccttgcaagcgacggcgccatgagtctgacttccagttccagcgtacgagttgaatggatcgcagcagttaccattgctgctgggacagctgcaattggttatctagcttacaaaagattttatgttaaagatcatcgaaataaagctatgataaaccttcacatccagaaagacaaccccaagatagtacatgcttttgacatggaggatttgggagataaagctgtgtactgccgttgttggaggtccaaaaagttcccattctgtgatggggctcacacaaaacataacgaagagactggagacaatgtgggccctctgatcatcaagaaaaaagaaacttaaatggacacttttgatgctgcaaatcagcttgtcgtgaagttacctgattgtttaattagaatgactaccacctctgtctgattcaccttcgctggattctaaatgtggtatattgcaaactgcagctttcacatttatggcatttgtcttgttgaaacatcgtggtgcacatttgtttaaacaaaaaaaaaaaaaaaaaaggaaaaaccaacctcatggcctgtgggttattttggtcttgtaaggatccatttctttaaaatactgacatatagagttgtaccttatatagaatatagttgtatcttgaagtcaacatattaaattattctcaaaattatgtatttgcagattgtacttgtaagtttcaaagaaaaattaccatcttttcatattgacctggaaactaaataggatgtgattcagctacattaatttcttaatacaatctaaaaaaaaaaaaaaaaaaaaaaaaaaaa

SEQ ID NO: 289744 - DNA, 927 bp, Homo Sapiens
ggcagcgggcgaaaggagccggggcctggaggtttgcgtaccggtcgcctggtcccggcaccagcgccgcccagtgtggtttcccataaggaagctcttcttcctgcttggcttccacctttaacccttccacctgggagcgtcctctaacacattcagactacaagtccagacccaggagagcaaggcccagaaagaggtcaaaatggggtttatattttcaaaatctatgaatgaaagcatgaaaaatcaaaaggagttcatgcttatgaatgctcgacttcagctggaaaggcagctcatcatgcagagtgaaatgagggaaagacaaatggccatgcggattgcgtggtctcgggaattcctcaaatattttggaactttttttggccttgcagccatctctttaacagctggagcgattaaaaaaaagaagccagccttcctggtcccgattgttccattaagctttatcctcacctaccagtatgacttgggctatggaacccttttagaaagaatgaaaggtgaagctgaggacatactggaaacagaaaagagtaaattgcagctgccaagaggaatgatcacttttgaaagcattgaaaaagccagaaaggaacagagtagattcttcatagacaaatgaaatcatgcttaccaatcaaatctcaaagcacagaattattgacttgaatcatggtttttacagttttttaaatgctcaagattttgatattatagattttattttaaaatattaaaatgcaagatagttttgagctattttaaaataaaatttataacattcaacacaaaatcatggaggtgctctaaataacttttagatttcctctctctgtgtgcattaccaatatctaagtgtaaaattaataaattgttttgaattcctggaaaaaaaaaaaa

SEQ ID NO: 289745 - DNA, 1000 bp, Homo Sapiens; identical to SEQ ID NO: 117644

SEQ ID NO: 289746 - DNA, 1000 bp, Homo Sapiens
gcatttgggaagcaagtagccatagtacacacacaacacgctatcagcttgggtaaggacagtgggatttatgtgaacatcaggcaaagccatgagatcaaaccatcccaagcctttcaccaatgaggtacaaccacctgggggctagctaatcttgaatgttttcctgagacaggagcgtatgtgaaaacatcaaacactgcacatgacaggatgggtcctctcatacagatgggatggggttagaaagccagagccagtttttccatctggcgtttcctgtgtcctccaggtttatatgggaatcgaaacagtttgttaatctgattgggagagttccatgggcagatttcccttcctgaaggccaaaacggagaactgctctctttaattatttcaagagtcaagaccaaaagtttgctcagcatcacactacatctcaaaattaatgttgccaacttaattttgtgcatttgtgtcagaatgtttagtttacaaggttgggggctctctttgcttcgagaagtaaacctaataccatttttttattgtttaaagctgcattcaacgtcaaaattaccttgggtaacttttgataacttacatgtgtggacaaagctaatagtggttttttaaacagcaccttgcctgaacatgactttaaagaaattaatatattgaaaacatgtttgaacccttattttaattgcaccattaaaacatttgacttaaattgtttgaccattccagttggtgtactgttctgatttttcgttgtgtaggccgatctgcctgtcagagtccacgtgtcctggtcactggtctttataattgttgtgcaataactaaaggctaaggactagatgcactatcgtgtaaagagattacacatgactgtaccatgttgcacttaatcaaatagtatgtggggatttaaaatcgcttgcattgtttcacaaaataaatatctcaatgtcaaatactaaaaaaaaaaaaaaaa

SEQ ID NO: 289747 - DNA, 1000 bp, Homo Sapiens
tgatgaggaagcagatgatacccgctacacccagggaacaggtggtgatgaggttgatgattcagtgagtgtaaatgacatagatttaagcctgtacatcccaagagatgtagatgaaacaggtattactgtagccagtcttgaaagattcagcacatatacttcagataaagatgaaaacaaattaagtgaagcttctggaggtagggctgaaaatggtgaaagaagtgacttggaagaggacaacgagagggagggaaccggaaaatggagccattgatgctgttcctgttgatgaaaatcttttccactggagaggatttggatgaactagaagaagaattaaataccttgatttagaagaatgccccaaccctcgctgaaaaaattaagtcagccagcacgagttgaaattgactacattaatttcctttccacctagaatcaacaggatgtttatttcctatgctgattctggaggagttacctcctgcaaaaaaggcatcttgtccctacatcttctcttctgactttggctacatctcatagtaagttcagagtagttcatgataaattgaaaatataatggtcattgcagaaaatgattgatgttgtactgtccacccaagtaagaagtgtatctgcctttccatcttttggttttcatttgggcatgtgctattaccagaaacaacaaacttatatttaaaatacccttcatttgacacagtttttaatgagtgatttaatttcctctgtatttgtatgtttagaagactgcctaaaacatgagcactgtacttcataaaggaaactgcgtatgcagattcagtattgtgtatctttggacaattagatggacatttaaaatggaacttcttttatctgacaggatcagctacaatgccctgtgttaaattgtttaaaagtttcccttttcttttttgccaataaagttgtaaataaagaccatcatacattaaaaaaaaaaaaaaaaaaa

SEQ ID NO: 289748 - DNA, 1000 bp, Homo Sapiens
ctgccctggtgtggcaccgacaggactggaccatccttcactcttacgtgcacctcaacgccgatgagctggaagccctgcagatgtgcacaggttacgtcgctggatttgtagacttggaggtgagcaacagaccagacctctatgatgtgtttgtgaatctggcagagagtgagattaccattgctccccttgcaaaagaggccatggcaatgggcaaactgcacaaagaaatgggtcagctaattgttcagtctgcagaagatccagagaaatcagagagccacgttatacaggatattgctctaaaaacaagagaaatctttaccaacctagcaccattttcagaagtttcggctgatggagaaaagagagtccttaatttggaggcgctaaagcaaaaacgatttccaccagcaacagaaaacttcctttatcatctagcagcagccgaacaaaatgctgaaaatctgactgtgtgacagaaccgtatcactgatgactgatagaaagccctctttactctgattacccactcactacatgaagtcctgaaaataacagagaaactgttatatctttttaatgatttatttgcaagtattgagatttgacctgaaaaacaatgaaacacatgaacacacttccgattttctcctcgctgattagcttcctgcctgctgtcagtgctggacgaagtgctataactactttatgtaacattacagaacagctagaggtcctggggtaagagaaaaaaagcacatcacaacaaatgtgaaagccttcattattacacgttccagtttgtctcgctgtgtaggcataagctaatggtttattttcagaaagctgcctgaaacgttgctttgtattcttctaggaagaactttaattcctcctgaggaactctactttctgagccaaactgctaattttctgcggaactgtctagaagatcattcaagagaccctgcagttgcactttctcgtaaaagtt

SEQ ID NO: 289749 - DNA, 1000 bp, Homo Sapiens; identical to SEQ ID NO: 222914

SEQ ID NO: 289750 - DNA, 1000 bp, Homo Sapiens
aagctcttacattaacattcttagcagaatggggtgatcgctctcaactaactacaattgtattggcagctagagaggacccctatggtgtagccgtgggtggaactgtggggcactgcctgtgcacgggattggcagtaattggaggaagaatgatagcacagaaaatctctgtcagaactgtgacaatcataggaggcatcgtttttttggcgtttgcattttctgcactatttataagccctgattctggtttttaacaagctgtttgttcatctatatttagtttaaaataggtagtattatctttctgtacatagtgtacattacaactaaaagtgatggaaaaatactgtattttgtagcactgattttgtgagtttgacccattattatgtctgagatataatcattgattctatttgtaacaaggagttttaaaagaaacctgacttctaagtgtgggtttttcttctctccaacataattatgttaatatggtcctcatttttcttttggtgcagaaccgttgtgcagtggggtctaccatgcaattttctttcagcactgacccctttttaaggaatacaaattttctccttcatcacttaggtgttttaagatgtttaccttaaagtttttcttggggaaagaatgaattaatttctatttcttaaaacatttccctgagccagtaaacagtagtttaatcattggtcttttcaaaactaggtgtttaaaaaagagacatatatgatattgctgttatatcaataacatggcacaacaagaactgtctgccaggtcattcttcctcttttttttttaattgggtaggacacccaatataaaaacagtcaatatttgacaatgtggaattaccaaattaaaagagaatactatgaatgtattcatattttttctatattgaataaacaatgtaacatagataacaatataaataaaagtggtatgaccagtgaaaaaaaaaaaaaaaaaa

SEQ ID NO: 289751 - DNA, 1000 bp, Homo Sapiens; identical to SEQ ID NO: 222915

SEQ ID NO: 289752 - DNA, 1000 bp, Homo Sapiens
ttgctatacaaactttgaatagccacctaataaataaaccttgcatgacaaacctgcaaaatattttatcagctgttattggaaagtgattttaagcaattgcttcctcagtgtcagggcacatgtgaatttccacaccaaacagagcatgaggaaccagttgacatgctgggttgtgactggcagctttagcagcctcggtactgaagccacaccagtgtccggatggaagtctgcatctgaggttgctcagtgtcccggtcattcatttacacattttaacttgcattaaagagctgttcttttctgtggcctagactcttttcactgatctcaaaataaactggtttttttcaaaaaaaaaaaaaaaacaaaaacaaaaaaaaaacacaaaagctgcatgtctaaaattacatggagttagtgtctattctttttccccttttgcagcaacttacacagcatttttaacaccttttttttctagtttttttgttcggttttgttttccatcaggaatttgagttctctctaacccagcttactgtgggacataggaaaactcagtagaaatacctttggtgatcttgttgagtttaagtctgatcttgatcttaaactcagtaagccactatctgcaattttgtacattatatagtattttgaagatatggaaccttatgaaaaaaaaatagcaaattagttctttttcccccagaggggaaagttatgttctgcaaatagtgtgtgtcttattttactgttgaacagcaattgctatttatttttttattgcctagaacttcaacatgttgtataggaatcctgtagtgccactagttaaatgccgaattctcatctggatgttaccatcaaacatcagtacacttgtcatttcacatgtgtttaatgtgacagtttttcagtactgtatgtgttaatttctactttttttaatatttaaaattgcttttaaataaacatattctcagttgatccc

SEQ ID NO: 289753 - DNA, 1000 bp, Homo Sapiens; identical to SEQ ID NO: 222916

SEQ ID NO: 289754 - DNA, 1000 bp, Homo Sapiens
catacaagatgaaaaatattaccagatctgtgaaagtgtactaaaggaagtataccaagcctttaatcccaaagcagtggtcttacagctgggagctgacacaatagctggggatcccatgtgctcctttaacatgactccagtgggaattggcaagtgtcttaagtacatccttcaatggcagttggcaacactcattttgggaggaggaggctataaccttgccaacacggctcgatgctggacatacttgaccggggtcatcctagggaaaacactatcctctgagatcccagatcatgagtttttcacagcatatggtcctgattatgtgctggaaatcacgccaagctgccggccagaccgcaatgagccccaccgaatccaacaaatcctcaactacatcaaagggaatctgaagcatgtggtctagttgacagaaagagatcaggtttccagagctgaggagtggtgcctataatgaagacagcgtgtttatgcaagcagtttgtggaatttgtgactgcagggaaaatttgaaagaaattacttcctgaaaatttccaaggggcatcaagtggcagctggcttcctggggtgaagaggcaggcaccccagagtcctcaactggacctaggggaagaaggagatatcccacatttaaagttcttatttaaaaaaacacacacacacaaatgaaatttttaatctttgaaaattatttttaagcgaattggggaggggagtattttaatcatcttaaatgaaacagatcagaagctggatgagagcagtcaccagtttgtagggcaggaggcagctgagaggcagggtttgggcctcaggaccatccaggtggagccctgggagagagggtactgatcagcagactgggaggtggggagaagtccgctggtgttgttttagtgttatatatctttggtttttttaataaaatctttgaaaacctaaaaaaaaaaaaaaaaaaaaaaaaaaaaaa

SEQ ID NO: 289755 - DNA, 1000 bp, Homo Sapiens; identical to SEQ ID NO: 222917

SEQ ID NO: 289756 - DNA, 1000 bp, Homo Sapiens
tggattatatagaaagtaaactgtggtcaatacttgcatttaattagacgaaacggggagtaattatgacacgaagtacttatgtttatttcttagtgagctggattatcttgaacctgtgctattaaatggaaatttccatacatcttccccatactattttttataaaagagcctattcaatagctcagaggttgaactctggttaaacaagataatatgttattaataaaaatagaagaagaaagaataaagcttagtcctgtgtctttaaaaattaaaaattttacttgattcccatctatgggctttagacctattactgggtggagtcttaaagttataattgttcaatatgttttttgaacagtgtgctaaatcaatagcaaacccactgccatattagttattctgaatatactaaaaaaatccagctagattgcagtttaataattaaactgtacatactgtgcatataatgaatttttatcttatgtaaattatttttagaacacaagttgggaaatgtggcttctgttcatttcgtttaattaaagctacctcctaaactatagtggctgccagtagcagactgttaaattgtggtttatatactttttgcattgtaaatagtctttgttgtacattgtcagtgtaataaaaacagaatctttgtatatcaaaatcatgtagtttgtataaaatgtgggaaggatttatttacagtgtgttgtaattttgtaaggccaactatttacaagttttaaaaattgctatcatgtatatttacacatctgataaatattaaatcataacttggtaagaaactcctaattaaaaggttttttccaaaattcaggttattgaaaatttttcattttattcatttaaaaactagaataacagatatataaaagtgttaatctttgtgctatatggtatgaaatacaatattgtactcagtgttttgaattattaaagtttctagaaagcaaaaaaa

SEQ ID NO: 289757 - DNA, 1000 bp, Homo Sapiens
agctgcacagctcgactgcgtgaatgaagctgagagcaagccaacagcaggcctaaaggaagtgtccatttcacatcccagctctgcctctgacaatcagatcgctctggcggcctcatcatctcaggatgagctctttgtggccaggatattacaaagcccagatccaggtggacccagaaatggaaccagtgaccatctggagactgaccagaggcaggatcccaccccacttgaagagaataaatctaaattacaggatgtaataactcagccgctgctagatcagtatgtgtccatgactgacccagctcgagcccagactgtcgatactgacatagccaaacactgtgcctacagcctcccaggggtggcactgaccctgggcaggcaaaattggcactgcctgaaagatacatatgaaacactggcttctgatgtacagtggaaggtacggcgagccctagccttctccattcacgagctggctgtgattcttggggatcagttaacagcagctgacctggtgcctatcttcaatggatttttaaaggatctggatgaagtgcgaataggagttcttagacacctgtatgattttctaaagttgcttcatgaagacaagaggagagactatctttatcagcttcaagaatttgtagtgactgataacagcaggaattggaggtttcgatatgaactagcagagtaagtaaaaacatatttggggatatgagaaagcaaactagatggaataaatcttaattttcttaccatataattgatttctaaagcagcagcaatagtgttcttttagataaagagattatgtttttattaaggtataaacagaattccaaaaaccctgagttacaaataccacagtctccggggagacattcattttcagatgaagacagggcttgagtcactttcgaattagagtgttctgctgttctagaaggcaatttatttgaaccaaataaaagatgaatcaccc

SEQ ID NO: 289758 - DNA, 1000 bp, Homo Sapiens
atcctctgctcattggccatggggctctgtctactctggggttgctgctgttggacttggctggggctgtccagaaaagcgaggatgcaggactggagctgctggcatgccccgtgcttcgatgtctaagcaacctgctaactgaggcagcagtggagactgtgggagggcaaatgcagctcagagatgagcgtgttgtggcagccttatttatccttctgcagttctttttccagaaacagcccagtctgctccctgagggcctttggctcctcaacaacctcactgcaaacagtcctagtttctgtacctccttgctctccctggatctgattgagcctctcttacagctgttgccagtatctaacgtggtgagcgtaatggtgctcacagttctgtgcaatgttgcagaaaagggtcctgcttactgccagcggctgtggccagggcccctgcttcccgccttgctgcacacactagccttttctgacactgaagtagtaggccagagtttggagctgctgcatctgctgttcctgtatcagccagaggctgttcaggtcttcctgcagcagtcagggctgcaagccctggaaaggcatcaggaagaggcccagctccaggatcgtgtgtatgctctccagcagacagctcttcaagggtgatcttgtttctcaatgtcactcattcccctctctcttaacatcaagcttgtttgtccagtagagcctttggagatttaggaccataatgaggtctcatgttctctgctcccacacctaagccaagacctttgggtcccagctcctccccttccactcagcactatccaggcaggaggaccaaaagggactcagtgtggtctacttactctggggccctagaatccctgcccccccgccacccttcatgtttgcttcagcagctggtagcttttgatgagacagaataaagttttatttttatattaaaaaaaaaaaaaaaaaaaaaaaaaaaaaaa

SEQ ID NO: 289759 - DNA, 1000 bp, Homo Sapiens; identical to SEQ ID NO: 222918

SEQ ID NO: 289760 - DNA, 1000 bp, Homo Sapiens; identical to SEQ ID NO: 117648

SEQ ID NO: 289761 - DNA, 1000 bp, Homo Sapiens; identical to SEQ ID NO: 222921

SEQ ID NO: 289762 - DNA, 1000 bp, Homo Sapiens
taataggtcctgcattgccacctggtttcattaaatctacacagaaaagtgacaagggcagagatgatccaggacaacaggaaacagacagcagtgaagatgaggatattattggaccaatgcctgcaaaaggaccagttaactataatgtaacgacagagtttgaaaaaagggcccagagaatgaaagaaaaactgaccaaaggagatgatgattcatctaaacccattgtaagagagtcatggatgactgaacttcctccagaaatgaaagactttggtcttgggccaaggacttttaagagaagagctgatgacacatctggagatcgatcaatctggacagatactccagctgatagggaaaggaaagctaaggaaacacaagaagcaaggaagtcatccagtaagaaagatgaagaacatatattatcaggaagagataagagactggctgagcaggtatcttcatacaatgaatcaaaaagatcagaatctcttatggacatacatcataaaaagttaaagagtaaggctgctgaagacaaaaataagcctcaagagagaataccatttgaccgtgataaagatctcaaggttaatcggtttgatgaagctcagaaaaaagccctaataaaaaaatctagagaactaaacaccagattttcacacggcaaaggcaatatgtttttataagtaagtatatttcagtgaggtatattttaatactgatcaatgtgaacttttctaaatactctattgtctttaataattgtgctgaaatctatttccttttataatagattaaaaattttatatttttataagtaaacagtgatttttgaaaagtcagccttgtgggatgaaaaatatgtcttactggaaaaatccctcataataacctaatagggcattgctattaaaaatgctaaaataaaaattcagcttatgagaaatggcaaaaaaaaaaaaaaaaaaaaaaaaaaaaaaaaaaaaaaaaa

SEQ ID NO: 289763 - DNA, 1000 bp, Homo Sapiens
tagagggaaattacatacatcaaaaatccagtggaaagaattgtgaaaattgggttgggcgccgtggctcacacctgtaatcctagcgctttgggaggccgcggtgggtggatcacctgaggtcaggagttcgagaccagcctggccaacatggttaaaccccgtctctactaaaatagtacaaaaattagccgggcgtggtggtgggcactggtaatcccaggtactcaagaggctgaggcaggagaatcgcttgaacctgggaggcagaggttgcagtgagccaagattatgccactgcacttcagcctgggtgacagagcaagactcttatctcaaaaaaaataaaaagaattatgaaagttggattcaaattttgggtatattactaagtaacaacatatggttgttctaagaattaaaaggaactgacatgtaaaagtgcttagaacaggacctaggccctgtgcaatggctcacacctgtaattccaacactttgggaggcagaggcgggaggattgcttgaggccgagggttcaagactagcctgggcaacatagcgagactgcatctctacaaaaaatttaaaaattatccaggtgtaatggtgtgcacctgtgatcctagctacttgggaggctgaggtgggagaattgctcaagcccaggagtttgaagttgcaatgagctatgatttcaccactgcattctagcctgggcaacagagtgagatcctgactcaaataaataaataagaagagcagttgcctaccacatagtacttattcagtcagtgttagaggatattgtagtattatcaaaagtattggttattgataatattactgttttgtggtaatgctacttctgcacaccccagtttccttcttggttatgcagaaacagtagaacctgtgtaacctcaaggagatattgtatgaatctcactagccgcagcttataataaagccgagaacatttaaaaaaaaaaaaaaaaaa

SEQ ID NO: 289764 - DNA, 1000 bp, Homo Sapiens; identical to SEQ ID NO: 222922

SEQ ID NO: 289765 - DNA, 1000 bp, Homo Sapiens; identical to SEQ ID NO: 117649

SEQ ID NO: 289766 - DNA, 1000 bp, Homo Sapiens; identical to SEQ ID NO: 117650

SEQ ID NO: 289767 - DNA, 860 bp, Homo Sapiens; identical to SEQ ID NO: 222924

SEQ ID NO: 289768 - DNA, 1000 bp, Homo Sapiens; identical to SEQ ID NO: 222926

SEQ ID NO: 289769 - DNA, 1000 bp, Homo Sapiens
taatgattttctgttgacaacttttgcaatgctttcccaccaaagtgcttacttgtaaagaaaactaaatccttctgtgtccccggcagcctcagtgcagcaacagaagccaagggagaatgctgctggtttggcccatggcacagccagcttctctgaccagtaatccggggtgacttgagggtctgcaaaggcatagaactccccactgttttccacctcattctcccagattgagctcccttccaaaggatcgttcctctcattgcacagccatattacaaagggtttcctgctcaagtgatgttttggtaagaacttcgctgagttccactgtggattacagtttgtatggactactactgtaaattatagcttgtttggagggatattagtcattattttattcatgacaggtagactacaattcgaacttagggttacctcagtctttagccattactgcttatttcttttccccaagtcacaaaaaacttgtaagctgctgggttaaagcagaggccacctgtcagatctaccctacccttatttggttacatggcacctgagagtttcactcagaccagggatcttccttaggagggtcaaagtgcagatcagaccatgcaggtaaggtgaaccagctgcacggaccaggttcccgcaaaacattgccagctagtgaggcataatttgctcaaagtatagaaacagcccacctgtgcccactttgaccattggtgaggatagatataaaatcacttcttccaacgaagcctaggtgaaaatctatttataaatggaccacaactctggggtgtcgtttttgtgctgtgacttcctaattattgctaaagaactactgtttagttggtaatggtgtaaaattacattcagctccttcttgtcatataaaaggaatttggagggtgtcgcttaaaattttattccacctgtacatttgtcactttaaaattaaaattgagccggtatgagagat

SEQ ID NO: 289770 - DNA, 1000 bp, Homo Sapiens
aggcagcagttacttcaaggatatgatatgttaatgaatccaaagaagatgggagagagatttaacttttttgccttgctacctcatcagagacttcaaggtggaagatatcagaggaatgcacgtcagtcaaaaccctttgcatccgttgtagctgggtttagtgaacttgcttggcagtgatatttcagcttggacattttacccttcagtcggcccaagaaatcaaaataaaggaaacacatttcatatactgcaggtaacaaaagtcaaagtattttatcttttcacagcaagaacagtccatgttgtatataatacaaccaacattatagaacttttagggttgtgactggctttggtgcaaatgtgtgctcaagctaataagttattgtgaaactgagtttcctttaacttacaaagctagttgccatatttctattttattttaaaaagtaaacatgcggctgggcgtggtggctcatgcctgtaatcccagcactttgggaggctgaggtgggcatatcacctgaggtcagcagttaaagaccagcctgaccaaaatggagaaaccccatctctactaaaaatacaaaactagccgggtatggtggtacatgcctgtaatcccagctactcaggaggctgagacaggagaatcacttgaacctgggaggtggaggttgcggtgagctgagatcgtgccactgcactccagcctgggcaacaagagcaaaaatccctctcaaaaaaaaaagtaaacatgggcactgattgttttaataaaaatgggaaacagactaaatggctattcacaggaaactgataagatatatgttatttttttaaatgagctagggcaatatgttttgacagaaaactctctaagatttagtaagtgaaaaaaagtaggatgcaagagtttttatagttgattccatttttgttgaaggagaaaaactaaataaatacgagtaatttcatagaaacgaaaaaaaaa

SEQ ID NO: 289771 - DNA, 1000 bp, Homo Sapiens; identical to SEQ ID NO: 117651

SEQ ID NO: 289772 - DNA, 1000 bp, Homo Sapiens
ctgcaggacagttttcctggagccatttggtatgaggtattaatttagcttaactaaattacaggggactcagaggccgtgctcctgaccgatccagacactattactggctttttttttttttttttaacaatggtgtgcatgtgcaggaaatgacaaatttgtatgtcagattatacaaggatgtattcttaaaccgcatgactattcagatggctactgagttatcagtggccatttattagcatcatatttatttgtattttctcaacagatgttaaggtacaactgtgtttttctcgattatctaaaaaccatagtacttaaattgaacagttgcaaagatgtcttaattgtgtaaagaattggtgtagtcatgactttagctgatactcttatgtacgagatctgtctctgctgtttaacttcattggattaatcagctggtttcaactctactgcgaaacaaaaatagctccttaaaagtactgttctccttcagtggcatgtagttatctaatcaagacacctcattcaaacaaaacctgccttaggaaaatttaatatattttaaattattttaaaagaaatacaacatcttattctttagctttcttaatcggtgctttatggaggccagtgtaacgttacatgactcgttgagaaagttgaggaatttcctctaccacctttgttgcttgaagaaaaacatgtcttttcaaaatgagaggctttcattgaagaaaagaaaaaaacaacagttaaaagcttttggctctctgtttcatttttttccattaagaaaaaaaaaagtccccttttaaaacaagcagggctgggtgtgacggcacatgcctgtaatcccagcactttgggaggctgaggtgggaggactgcttgagcccaggagttcaagatcagcctgggcaacagagtgagataagacccaatctttatttaaaaaataaataaataaatagccaaaaaaaaaaaaaaaaaa

SEQ ID NO: 289773 - DNA, 1000 bp, Homo Sapiens; identical to SEQ ID NO: 115223

SEQ ID NO: 289774 - DNA, 1000 bp, Homo Sapiens; identical to SEQ ID NO: 117652

SEQ ID NO: 289775 - DNA, 1000 bp, Homo Sapiens
gcgcgagcagctgcaggcggaagcgagcgagcgcttcgctgccggctacatccagtgcatgcacgaggtgcacacgttcgtgtccacgtgccaggccatcgacgctaccgtcgctgccgagctcctgaaccatctgctcgagtccatgccgctgcgtgagggcagcagcttccaggatctgctgggggacgccctggcggggccacctagagcccctggacggagtggctggcctgcggggggcgctccgggatccccaatacccagccccccgggtcctggggacgacctgtgctccgacctggaggaggcccctgaggctgaactgagtcaggctcctgctgaggggcccgacttggtgcccgcagccctgggcagcctgaccacagcccaaattgcccggagtgtctggaggccttggtgaccaatgccagccagagtcctgcgggggtgggcccggccctccctggatctcctccctcctcccaggggttcagatgtggtggggtagggccctggaagtctcccaggtcttccctccctcctctgatggatggcttgcagggcagcccctggtaaccagcccagtcaggccccagccccgtttcttaagaaacttttagggaccctgcagctctggagtgggtggagggagggagctacgggcaggaggaagaattttgtagagctgccagcgctctcccaggttcacccacccagccttcaccagccctgtgcgggctctgggggcagaggtggcaggaatggtgctgggcactagtgttccaggcagccctgggctaaacaaaagcttgaacttgccacttcagcggggagatgagaggcaggtgcactcagctgcactgcccagagctgtgatgctctgtacatcttgtttgtagcacacttgagtttgtgtattccattgacatcaaatgtgacaattttactaaataaagaattttggagttagttacccttgaaaaaaaaaaaaaaaaaa

SEQ ID NO: 289776 - DNA, 1000 bp, Homo Sapiens
tgctcatgctcaacctcctcattgccatgatgggcgacactcactggcgagtggcccatgagcgggatgagctgtggagggcccagattgtggccaccacggtgatgctggagcggaagctgcctcgctgcctgtggcctcgctccgggatctgcggacgggagtatggcctgggagaccgctggttcctgcgggtggaagacaggcaagatctcaaccggcagcggatccaacgctacgcacaggccttccacacccggggctctgaggatttggacaaagactcagtggaaaaactagagctgggctgtcccttcagcccccacctgtcccttcctatgccctcagtgtctcgaagtacctcccgcagcagtgccaattgggaaaggcttcggcaagggaccctgaggagagacctgcgtgggataatcaacaggggtctggaggacggggagagctgggaatatcagatctgactgcgtgttctcacttcgcttcctggaacttgctctcattttcctgggtgcatcaaacaaaacaaaaaccaaacacccagaggtctcatctcccaggccccaggggagaaagaggagtagcatgaacgccaaggaatgtacgttgagaatcactgctccaggcctgcattactccttcagctctggggcagaggaagcccagcccaagcacggggctggcagggcgtgaggaactctcctgtggcctgctcatcacccttccgacaggagcactgcatgtcagagcactttaaaaacaggccagcctgcttgggcgctcggtctccaccccagggtcataagtggggagagagcccttcccagggcacccaggcaggtgcagggaagtgcagagcttgtggaaagcgtgtgagtgagggagacaggaacggctctgggggtgggaagtggggctaggtcttgccaactccatcttcaataaagtcgttttcggatccctgaaaaaaaaaaaaaaaaaaaaaaaa

SEQ ID NO: 289777 - DNA, 1000 bp, Homo Sapiens; identical to SEQ ID NO: 117654

SEQ ID NO: 289778 - DNA, 1000 bp, Homo Sapiens
ctgtagcaacaaaatttaaaagaaaaaaaacatactttatctggctattataacataaactgtcacgtaggtttgctgccttcagaataccgcaatttaattgcgggaatataataatattgggactgtttcacagcacaaactcatctttacagtgttgatcaatgcatcagttaagaaataatgccacctcaggaattaactggcattgggaacatttgcctcattctcctgctatcctcttcattcacccctgccactgtaatatctataagtacttaagagacttgtgagcaaaacatactatttataacagtatatgattgatttatgcttatgtggttgttcagtttgttcccatgtaactcgtttgttttaaatattttgccagatttcttgtatttattccacatcattatgcctataatgtgccgctttgtgattgggcatttgcctacttttctttcataattagtgatatatgcgatgtaaaaccactagtaaaggtacattttaatacttgttattttatactgaattagccttggaggttgactgtgcaatgttatttactgttgtaattactgtaataccaacatatgggccccatctgcacactcctgaaaaacagaaagtgtattcaaattttatcagtttaaagaaaataaagctgtgataaatactgtaattccaacctacattagaaggtctaagtgtaggtgatgtgccattccataatggcttccagactagggtgaattttatgttctgtactgtactgtgatgtagctttcttctgtaacagttatgttttaaaattaagtgagttttttttttgccttagcaaagggtggtgtttgaaaaaaaaaatgtgtagcccctttttaacctagtgttcattcaaaaaaaaattgatgcaaatctttattcactttcactggtgcacactgaaattttacttgaacagttctcataataaagcacttgtcttttgctcttt

SEQ ID NO: 289779 - DNA, 1000 bp, Homo Sapiens
agaacagggagataaacatcatcatcttctaagagctgatcaagaaatttaaaacaacaacaacaacaaaaagttacggggttcatctcctacacaattcatttactccatttgaatgctagagccactcacatttatttgtgtttctaatttaccgtttaaatttatttgtaaaaagttaagggagagttggtctttccctgatgttctttctggcatcctttagcatttttatttttaatttgataattgtaggtcattagtatgcatatcgagtttgcccttaggtggtgggaattcaaacacacaaagacccactaatttgcacaaaactattctggctggtttggaacaggctgccatgcttttttaatgttattgcagcatgtatattcattccagaattcagataaaatgtgcttatgttctgctatgacgtttgatcgaatcctaaccacagtgagctcttcattagctcaatatgtggtttgccctcaattgagcactgtttattactttgtaatatgccactgtgagtactgacatttagagttgtttaaaggccaagaactggaaacagccttttccctattttctgtgtattggggatgggagtaataacattttggggagctttttaaatctcacagaagaggaaagtggcctgctctggcaggtgtgtgcaggatagagtgtgtttcatttgttctggtgccaagaatgagcgctgtactatggtagttcccttaggatttgtatgtgctctgggctcatgaagatattgcatcatgagctgcagcagttgtaccctttcttgatgacctaaaaagggattatttctgaggaatgaaaggctcccatcattgactgtggatgtggaaaaccttttctagcttagagcatttatatctacaatacattttaaagtcagagttcatgttacctgttttaatcacatgagtatatgtcccagtacacaaaagggcactggttggcattc

SEQ ID NO: 289780 - DNA, 1000 bp, Homo Sapiens; identical to SEQ ID NO: 222930

SEQ ID NO: 289781 - DNA, 1000 bp, Homo Sapiens; identical to SEQ ID NO: 117655

SEQ ID NO: 289782 - DNA, 1000 bp, Homo Sapiens
ggtatacagggcaggaaagagaggaataaagggagagagcagtgtggaaaccacggtggttttgctttgttcttactaggttttggtgccaccttccctgcctgcgcttgtgccccctctcctccttggcactggcggcctccttgcctcccttccacccgtgctgccatcccgtgcctgtcgtgttggttcttcacacgtgctctgttctcggggttgttccattcatgccttcttggagggtgagggtggcttgggaaccgacccagtgatcatgcctactttcttctttgtatctccctccttcccagcccacccgggcagcagactctgatggaaggaaggtgccgtaggtgggcttttagaaactaacgggactggttttcaaagcagttatcttgggaaactgtttattccagcgatgtgacttttttcagaatatttcttggaatcatattcagagtctggggctgtgtgttgagcagccttaaggatgctagacactcatttagtgcccagggagtccagcgaatgacgtctgtggccaagcgaggtctcaggtgcaaagcaaaaggaccatttaaagtaaaatagcttggattcaatcatgtgacttttaaattggctcagaaagcaattttgtaatttcagagagtgttttgagccatggccacgttgtcattgtgagtctatagcttgactccttggagaacaatattcatttggttgtggagactgatttgctgggagaaatctgtcctgttactttctggtcatcccaggttctgacttttaccaggggcaaaaaaaaaaaaagcaagagggagataaatcccatctgtgagtttgtcttattggcgcctttttcctcagctgtcttccaagtattatttttactgttaaaaaattttttaaaaatgtgaaatgtaatgtttttacagcaacaatatgaaatatattttataaggaataaaatggtaccttgtctgatttaaaaaaa

SEQ ID NO: 289783 - DNA, 1000 bp, Homo Sapiens; identical to SEQ ID NO: 222932

SEQ ID NO: 289784 - DNA, 1000 bp, Homo Sapiens; identical to SEQ ID NO: 222934

SEQ ID NO: 289785 - DNA, 1000 bp, Homo Sapiens; identical to SEQ ID NO: 117657

SEQ ID NO: 289786 - DNA, 1000 bp, Homo Sapiens; identical to SEQ ID NO: 222935

SEQ ID NO: 289787 - DNA, 1000 bp, Homo Sapiens
caagggacaatagtcttcatgttggattctccaacaggctgggtgcatgtatccccctactcctaccctcatctcatccttaaggcccagaggtagcttggacaagccctccttttcataatcatttgggaggcatggctgtaattctttagctttctccacttctgtctcccacatatactaaaattcttaggtactaggctgtgtgtcttgggatcttaagatcaatgaacctttccccaatatctagtctttgcaaattctagtagaagatttccacagtgaaatcagtgagccagaccaactctacatctcctgcctaacctactgcctaagtcattagggctgagggctcggctgtaggggcttccttaggctgagagtgcccccaggctgacatctgtgttggcttttgttcagaaccattactctggcacatgctcaatggtatattgcagggaggagaggagtagatttagatttgagtaaatgccaatcactttacacatgaaggtgggtgggactttccttccattcatcccttgctctcttggatctgaactcttctggagcctcagctcaggatagctgctggccactcctgtcctgtggattgtgcaggtggcctttcctcccaaaagaaaaggcatcaggctccccaagccccacagctttcctttccaccaaagccaggtttcctggtaaggtcactcgaagataagggatggggatgggggctgactgacaaaaaattttagccccaggtctcagtacctggctggggagggggatatttttccttccttaagtagttttacattgccacagtgtgtatgtgttcactatataaaatgttcctctgctctttgaaagtaagagtgttgtgtctgtacaaatccttttaacatgcattcattggagtaaattctgagtatctactgtgtattggataatacaaaagatgtaatgtcatttaaaaaaaaaaaaaaaaaaaaaaaaa

SEQ ID NO: 289788 - DNA, 1000 bp, Homo Sapiens; identical to SEQ ID NO: 222936

SEQ ID NO: 289789 - DNA, 1000 bp, Homo Sapiens
ccgtcactcttggaggactcctgtgacgtggtcagcctcattcatccttgcccttctcagggctagctgctcctctcacaggctggggacagaggtggccctggttcacttgccggccctttgcaatgaatgactcttcctgagcctggcaccaggagccctaggcaggccgccgtctccccactcacagccccagcaggtaagcagtgtagacaaacccttggggcttttttatttggagaaccgtccagcatgcatcctggcccacggcctgagcaagctgcagcccttctgaggccatgggcttcgttggctaagttgggggtcttagccttgcatgcgttgtgggcatcaaatctacctccaaaagacccatcctggggagccctctggcccctcgttgccttttcacttcaaaacctcttttttctgggagaggccctgaaccctgtgcgggagagctggtcctccagccctggcaggccctcagccagcttcccagcaagacaaagggcacccttgtggctttgggacctaagtggttggggttcccgaggtcactgaggactggtacctcgggaacgcaagctgtcagtggaactgtcccacaagaattcacaggtctcaaagcaggaacagtgggtttgtgtctcacctgagtatctggaattttattttttcaagtaaaattttcaatgaaacgtccacatagtattgtgctgtaacttaggcgagcagaggaaaccccttcctgggcctgctgccctccacggagcagcagcaccctccagcaggcagcccagcatgccaggggtgtgtgcgcacctccccggccctggcccaccttctggagcgaactgcaccgtggtccagcagaggcgctgggtgggagggcacgcgggcaagcctaggagagtaggaagagctgtggaggacacactctcagtttgtttttgactttggtttatttaaaaaacaagccaaaaaaaaaaaaaaaaaa

SEQ ID NO: 289790 - DNA, 1000 bp, Homo Sapiens; identical to SEQ ID NO: 117658

SEQ ID NO: 289791 - DNA, 1000 bp, Homo Sapiens; identical to SEQ ID NO: 222939

SEQ ID NO: 289792 - DNA, 1000 bp, Homo Sapiens; identical to SEQ ID NO: 117659

SEQ ID NO: 289793 - DNA, 1000 bp, Homo Sapiens; identical to SEQ ID NO: 117660

SEQ ID NO: 289794 - DNA, 1000 bp, Homo Sapiens; identical to SEQ ID NO: 222940

SEQ ID NO: 289795 - DNA, 1000 bp, Homo Sapiens
accccattttctttacagagacacctgctaatacataacagtgagaggactttcaagtgccatcactgcgatgctacctttaagaggaaggatacattaaatgttcatgtccaggtggttcatgaaagacacaagaagtataggtgtgagctatgtaataaggcctttgttacaccttcagtgcttagaagtcataagaaaacacatacaggagaaaaggagaaaatctgtccatattgtggccagaaatttgccagcagtggtacactcagagttcatatccggagccacacaggtgagcgtccctatcaatgtccttactgtgaaaaaggattcagtaaaaatgatggactgaagatgcacattcgtactcacaccagggagaagccgtacaagtgctcagagtgcagcaaggccttcagccagaagcgaggcctggatgagcacaagaggacgcacactggagaaaagccttttcagtgtgatgtttgtgatttggcttttagcctgaagaaaatgctgattcgacacaagatgactcataatcccaatcgtcccctggcagaatgccagttttgccataagaagtttacaaggaatgactacctcaaagtgcacatggacaatatccatggtgtagctgacagctaataggggctgtaaaggaattaaactattcagaagggctcctaatatgaatcccagatttttatcacctgatcagcataacagaagtagccaaaagtgacttactggtctcatagttcttatttgcctacatttagagtctgtagatgcatatgcaaccaaaaaaaagtcttacttttaacaagaaatggtataaatggaaaaaaaatacaactccatagccttgcaaaatgcaacttgtgctctgtcttataaaaatggagaaaggagtcatggctctctttcttggccatccctctgtaatgaagtttataatatacttccctaataggcctttttaaaaaaaaaaaaa

SEQ ID NO: 289796 - DNA, 1000 bp, Homo Sapiens
actttggtgtcccagaaacacgcgagtgtgcaatgtttggacgagcaacaacacaaattcagaacgtgcctctttccagatcgctggccccagaaccctgtcccccacacccaggggcacacgcaccgttgagttagcgccgactcttcctgtggagtctgagggaggggctccattcaggcaaaggggttttagctgcagccttggaaggaggcaccgacacgacaccaggcaggagtgagcctcaggccccgtccctgcaccccacccctgcgtgcgcctcttggtgatgctggggtctcactagcttgagggggcacatgaagataagccacaaatgaagagaaaagccatgcccaccccagccccagagaaaccaataagaatcctctattattttcactattcgtttaggtttttatactccacctcctttcaaaaaagatttaagatgtacgacattaccgaacacctaaaatagaaccagagaaacgaaagccattcccacaaagtgaaggaacagtttccaaaacccctgcgaggcagagttaagacctgtgacgtggggagcctggaaacacctggcccacgcgtgctgcagatgtggggagcctggaaacacccggcccacgcgtgctgcagatgtggggagcctggaaacacccggcccacgcgtgctgcagatgtggggagcctggaaacacccggcccacgcgtgctgtagatgtggggagcctggaaaaacctggcccacgcgtgctgcagatgtggggagcccggaaacacctggcccatgcctgttcagtccgtcatggcgtttggtttatggtggccgatactaagagccactgaggtctgggttgtgtgagggttagctaccaccctataacctccctaccaggtaataaggagaccaagtctttgatcaaattctgattttttaactaaattttcattagaaagcaagcacaaaataaaatcaaaacaacctttaccttca

SEQ ID NO: 289797 - DNA, 1000 bp, Homo Sapiens; identical to SEQ ID NO: 222942

SEQ ID NO: 289798 - DNA, 1000 bp, Homo Sapiens; identical to SEQ ID NO: 222943

SEQ ID NO: 289799 - DNA, 1000 bp, Homo Sapiens
tgtctggggtttctgatatggggatttcagcccctggttaatcagtcttgtccctacaagtccctgatgcagtatgtttatttgtgatgtttaaagaacatttcttggctgggcgctgcggcttgcgcctgtaatctcagcactttgggaggctgagatgggtggatcacctgaggttgggagttcgagaccagcctgacaaaacatagtgaaaccccgtctctactaaaaatacaaaaattagctgggcgtggtggtgggtgtctgtaatcccagctattcgggaggctgaggcaggagaatcgcttgaacccaggaggtggaggttgcagtgagctgagatcctgccactgcactccagtctgggtgacagagcaagactccatctcaaaaaataaataaatagaaagagagagagaggaaaaaaaaagaaaagaacacttctttatttgagggactttcccaacaccaggtgcttggggatttcttagagatcaccaaccgactccctcactgtgaaattaaaccaagtactggaaacgtaactaaacagcgaaccatgtagcttcacctgactcagtgctgggggcctctaccatctactgtgcttgtgtcatgatgctttttctctgaagtggtgtgggaagtaccaggggactggcagaagcccaggccctctctacttttaccagcaactgatcatgtctttcagaatccatgtacatataggctgttctagccacagtggtagatttatgattcacatccgaaagtgtgccttagttatcaatttaacatttctctagtattcatatcccttttcttaccatatacctcagtgtatccttcctgtgtcaagccttataaatcatgtaatttagtgccactcatgtaaatcagtaaaatcacaaaggtctatttaatgaaaacgatttaccaatgttgtttttttttaacaagaaaaaaaataaaagcacattgtcattttttttcctcaaaa

SEQ ID NO: 289800 - DNA, 1000 bp, Homo Sapiens
caagcagtgaggattttgtggtgcctgagatggccgagggcacagggagtgagctgtatgtgtgaggaatttggtgagcgagataaaagtccacggtgtcaacccctaaaacatgggtgaccgtacatttttatacatctccactctacggccttttacaggctttccgattttacaggcctttccaagtttccattctccttagagagagaactgtgcttccaaacagaaatcaggagtgaccacaaagcctgaaaacactttgccacccagcaaagaactggcacaattggtttgggtctgcattgccatagtgcccgagttaaaactgcaggccactctgccttgcaaacctcacgtggcctctgatttcattgtgggtgcatccacaggtggcccgagctgttctttcagctgctccaaggattgagacccaagtcatcatgaaaaaggcccaagtacagtcttaatgcgataaatccactagctaagacgtcgagtgccaagaccagccttccagccgaggtttggacaaagtctcaggttcccgtgactcagggtaaggtgctggggctgccagaggacctgccccagcaagatttttgtcaagagcgagactccatcagcccaggcagacgggagcaggttcttggccagcgtagacagcagcaaacagcagcagggaagccattctcactgcatcctccctgcagtagccacggccaggcccttaggaggagcagtgaccgggggtgtccagaaatatcctgtccctggatggaaactaggtctcgtttggattttttttttttttttttttgccgtgttaggaaattatttattaatttacaagacaggttttaactcagccgaggtgggaaatggtgtccctgtccctcccaaagcacagagcacagaaatgaggccgtttacatggcgagtctccgtgctggtgtttaagtcattaaaaagatactcaaagaaaaaaaaaaaaaaaaaa

SEQ ID NO: 289801 - DNA, 1000 bp, Homo Sapiens; identical to SEQ ID NO: 222944

SEQ ID NO: 289802 - DNA, 1000 bp, Homo Sapiens
cccgtctctactaaaaataacaaaaattagctgggcgtggtggtgggtgcctgtaatcccagctactcgggaggctgaggcaggagaatcgcttgaacccgggaggtggaggttgcagtgagccgagatcataccactgcactccagcctggcgacagagcaagactccatctcaaaaataattaaataaataaataaataaataaataaataaataaataaaatagtacagacagacacatgataagccaaactgttcctgcaaacatagctatgcttcatgaggcttacaagaagtaactttaggtaggagctgtttttgtttgaagtactgcagaattatattgtaacttcccctcaccccagttgcaattgtgtcatagtcatctgtatatcaaactattttattcccataacttcattggcttggatgcctaagtgtatgatgcttgaagcctcagaaaagaaataagcatatttcaaaagctgcaaaaggtttttcactgcctgcctcttgcggaactgggttacaccctggcactgttctgatccaagcatatttgcttggggaactaagtgctgactagtttgttttctatgtcaaggggcaatattaaaaaacaatttgcaagaaaatgtgtttcaagagagcaacctaagctaagtcactctgcgatatttcttgaaaataacgaccttgtcttgtatcagtggaagaagtaagttgcttagaaagggaaaagtcaaattgttccagaactgctaaaaatcattttaaaaaccatgatttagtttggaattatgattgtagtctgttgaatagtatttaccatggcatttcatacccatggtattttataccttctgactatcaattttagtattattagatgtttgtgtaaccacttgcttatttaaatgaattttgagtactgcctaattgtcagttatatgaataaattacatgtcattctactgtaacgtaaaaaaaaaaaaaaaa

SEQ ID NO: 289803 - DNA, 1000 bp, Homo Sapiens; identical to SEQ ID NO: 117661

SEQ ID NO: 289804 - DNA, 1000 bp, Homo Sapiens
ggactagaacttaagtgtgagacttgggtggatgggaaagttaaatattggtctcttcaagttttttttttcttttgctttgttaccacttgtcactgtctccatgttaaaatgccaaaaatgatgtagttgttgttgcttttttccctattttccaccccagtcgctccttaccgtgactcctgcccttggagggcatgtagcagtgtctgtcctgccagtcccaaggccctgtgggaggagactggcctgcatctctctaagacttagtctgacgccacgcgcatctcttgttctgtgttcaatcagtagtccaggggagaagcttctgctacttcagagctttgctaaactaacctaatttgtccaaatcaccccaaaaccaccatctctgacgtaagcttccatgcgacagcctgatccgtttccctggacaggtctctttcctggaatgcagcccaggcacctgtgctcctggcacccttgaggtctctcctttgagccgtggtcaccgagagggttgaggacgcagcacccgaggtcccagcctttgcaggagcctccctgggcttagctggacttagatcttcggtggcctcatgtaaacgtggcagccagcctcttctagaaccctagcccagggactggagcaggaaagggaccttcaaagtgaagactgccttgtcccgcagctccttctggcttagattgaaacatgggcttcctaatgggttaaatcctttaaaacaaggagttgtgggggaagggtgtcgtgcactcctagagaaaggtacacagttgcccggttgggaatgtgcttggcgctgaccctgcgggcatctgactggtcttccagctcaggaaaaagaatttgaaagaggcttagcgtgaaggggaatcaaagaggaggttgtgatttggtcgaaggtgcctggtttagtgctgtaattgtcttattattttttttatatatatatttcttggagtaaacattttaaat

SEQ ID NO: 289805 - DNA, 1000 bp, Homo Sapiens; identical to SEQ ID NO: 222945

SEQ ID NO: 289806 - DNA, 1000 bp, Homo Sapiens
aaaaaaaaaaaaaaaaaaaaaaaaaaatgcaccacagtatttctagcatgggggctgtgtttgtatgagaaataaacgtaataaatatctcatagagacatatggaaaaataactttcagattcagcccagttctgttttagagtgtgtttattcttctctacttgatttccaaagtgcaacattttccgatgctttagaaatcaaacaaaccagggacattgttcagatgtcaagccatgcccaattttccacaagattcaagaatcttgtataaaattcagccaacgtacacatagctttaatgaggagcctgtcatgtttccccataaatttattgcctgagaacttagttcagcctttgctaatgccaaaatgctctggctttgtattttctttacagcatagatagaaaaatgcacatttttccacactcagctttcccctagcatggacaagattttcagccatttttgccacatatacatttttaaggaaaaaagatttttctctgtaagaaagttctggttatgctgttttaaaggtgacttgtcaggagttgagacttccctgccggattctattttgaaagtaaatggtcttccctccttgttccgattctgcgttcccatcgtcagacaactttggagtattagaaaccactgtatatatgtggaaagccaggtcagccagacctgttagaattggtgtgcactcacctgagagatctggcaggttggatatatttatgtgtatttctccacagtgcttgctttgccctgttggtaaggattttaaataaccatgctcaaaagagctgttctaatctgcgttttgcatgttaagtgttaatatcaaacattctttacgtgctcgaggtattgcttttaacattctactttgccagtttcttcattagattaattgacatgtattatttaaatgaccagtgatgctttgtgcaattatgaatgttgaagattaaagtacatagttactaa

SEQ ID NO: 289807 - DNA, 1000 bp, Homo Sapiens
cgtttaacctgctcttggtcattggaaatttacactgaacaaagtgcaattaactgtagaacagttttatttttattaaaacttgactgaacaaaaggggaccatcaacattgtagacactggaggccttacagagtgctagcctcttccttcaggactcacctggggcctgctgcttttatattttgaaagagtttaagggctaataatttaatttgttgtttgttaaaaattaaaatctccgttctttccggctgcattgcttttgcatgttcacatatgatgtacttttatgatgtacttttttttttttgagatggagtcttgttctgttgcccaggagggagtgcagtggtgcaacctcggctcactgcaacctttgcctcctaggttcaagtgattctcctacctcctgagtaactgggattacagtcgtgtgccaccacgctcagccctgagttagtttctagtatttttttctgactttcactctaaggatagcgttgaaaaaagaatgcacgtgtgagttactaaaaagtcagaataatgtgcatgggaacagtgcagcaacatgctagaaaatcctcactgcactccagcagaggctagaggaatgccagtgttaccttacgcttctagaagcagagccactccagccagaacccattttgcagtcttctcttcgctcttcagcctgaaggtccagatgtagctggggcctctcagtttggttctatacacagggcactcgtaggtctgtttggtttcttgtctgtccacgggggtggcttttgcaaagatgaccggcatagggcatgccagctccttgagacgggcttcaacaatggttcctgcttgggtgtcccagcgggcgcctatggcaaaaacacagcggttgcaattgtgtggcagcttgctactaatgataatgatcaagttgtttgatgcaataaacattcaacattctggttttgtcaaaaaaaaaaaaaaaaaaaaaaaa

SEQ ID NO: 289808 - DNA, 1000 bp, Homo Sapiens
atcacacaatttgttacttcactgaatttcttcaaaaccattgcagaagtgaggtcatccttgaaaagtggcagaaaaagaaaatagcagagatgggtccagtgcagtggcttgccactcaaaagaaggcagcagacaaagtcgtcttccttctttccaatgacgtcaacagtgtgtgcgatggtacctgtggcaagagcgagggcagtcccagtgagaactctcaagacctcttcccccttgcctttaaccttttctgcagtgatctaagaagccagattcatctgcacaaatacgtggtggtctactttagagagattgatacaaaagacgattacaatgctctcagtgtctgccccaagtaccacctcatgaaggatgccactgctttctgtgcagaacttctccatgtcaagcagcaggtgtcagcaggaaaaagatcacaagcctgccacgatggctgctgctccttgtagcccacccatgagaagcaagagaccttaaaggcttcctatcccaccaattacagggaaaaaacgtgtgatgatcctgaagcttactatgcagcctacaaacagccttagtaattaaaacattttataccaataaaattttcaaatattgctaactaatgtagcattaactaacgattggaaactacatttacaacttcaaagctgttttatacatagaaatcaattacagttttaattgaaaactataaccattttgataatgcaacaataaagcatcttcagccaaacatctagtcttccatagaccatgcattgcagtgtacccagaactgtttagctaatattctatgtttaattaatgaatactaactctaagaacccctcactgattcactcaatagcatcttaagtgaaaaaccttctattacatgcaaaaaatcattgtttttaagataacaaaagtagggaataaacaagctgaacccacttttaaaaaaaaaaaaaaaaaaaaaaaaaaaaaaaaa

SEQ ID NO: 289809 - DNA, 1000 bp, Homo Sapiens
ggagtctcgctctatcgccaggctggagtgtagtggcatgatctcggcttattgcaacctccgcttcctgggttcaaacaattctcctgcctcagcctcctgagtagctgggactacaggcacctgccaccacgcccagctaatttttgtatttttagtggagacaggtttcaccatgttggccaggatggcctcgatctcttgacctcgtgatccgcccacctcagcctcccaaagtgctaggattacaggcgtgtgccaccgcgcctggctgacccttttaatttttaagagtgttcaatccgagatgaatcatttgaagtatttttatatgtatatctatttaaaactaatatattattaaagcttaattgccatgccgtttatcttctctgaaagaacttcaaatcttacctgccaacatattcaccataatttttttattttttaatacctttcatacaataacttttttaaaacaacctcagattgaaaaagcaacctaaattactttcgctctctaatcagcatttcaatgtatttatttttaaattttctcaaaaagtaactaaaaaattgtgtcggaccctacttttgagaaatttacgtttcccaagttttatgggaactggctattccttgtcccggcacaccttctcattccttcctttcagagcctaaaacctcatttgataagcactcctagtctctggcctgtggatccagtgctattctgtcaccaacctaagaatcccaattgcaccttctgtttctgacagtcacaggtgacagctgtgattctataatacagactggtgtcttagaggtaggaataatacatgattatgaagcatcaccctgctaatacataataatgtctttttatattataagtgattgagtttagttcatttcaatacattgtacatgaaaaaatgaaaagtagaactttgtaatactttaatcaataaaattaattaccaaaaaaaaaaaaaaaaaa

SEQ ID NO: 289810 - DNA, 1000 bp, Homo Sapiens
ctcctttgcatatcccaatcgccctgacaggcctgtgctcaaggggctgacgtttaccctacgtcctggtgaggtgacggcgctggtgggacccaatgggtctgggaagagcacagtggctgccctgctgcagaatctgtaccagcccacagggggacaggtgctgctggatgaaaagcccatctcacagtatgaacactgctacctgcacagccaggtggtttcagttgggcaggagcctgtgctgttctccggttctgtgaggaacaacattgcttatgggctgcagagctgcgaagatgataaggtgatggcggctgcccaggctgcccacgcagatgacttcatccaggaaatggagcatggaatatacacagatgtaggggagaagggaagccagctggctgcgggacagaaacaacgtctggccattgcccgggcccttgtacgagacccgcgggtcctcatcctggatgaggctactagtgccctagatgtgcagtgcgagcaggccaaaaccctttggaagttcatgatattttgaatttcaatggatatttcctgggaataatgagttcaaatgaacgaatatgtggaacaaagcatcaccaacatttattttttcaggatgaggtgatggacaaaaccatcacagggaaattgaggcaaatagtacatgtaaaacaatacttcgggtgagtccacctatcccaaagtcgtatcaaagaagtggctgcagattggagcccaaagcctttggttcctcagtttccaaatggattctcactaggtgggatcatgagtttgctttggacaccccaaattctaactatttcttttgtttcttacatcctttccctcttccccagccccttcccctcatgttacacctcttgctggtttgagacgtcaatcaccactgagaaagaattaaaccagtattttgagctggcaaaattcttagcctagtacaattccttcaattaaactgtagctcaac

SEQ ID NO: 289811 - DNA, 1000 bp, Homo Sapiens
gtggtcatttgaagaccagttgcgaggagcagataagaagaaagccagatcagtgggcacagtaccacactcagaaagcacctcttgtctcttcaactcttcctgtggcaacacagtcaccaacaccaccttctcctctgttcagtgtagactttcgtgcggatttctcagagagtgtgagtggtacaaaatttgaagaagatcatctttcccattattctccctggtcttgtggcaccataggctcctgtataaatgccattgattcagagcccaaagatgtcattgctaattcaaatgctgtgttaatggacctggacagtggtgatgttaagagaagagtacatttatttgaaacccagagaaggacaaaagaagaagatccaataattccctttagtgatggacccatcatctcaaaatggggtgcgatttccagatcttcccgtacaggttaccataccacagatcctgtccaggccactgcttcccaaggaagtgcgactaagcccatcagtgtatcagattatgtcccttatgtcaatgctgttgattcaaggtggagttcatatggcaacgaggccacatcatcagcacactatgttgaaagggacagattcattgttactgatttatctggtcatagaaagcattccagtactggggaccttttgagccttgaacttcagcaggccaagagcaactcattacttcttcagagagaggccaatgctttggccatgcaacagaagtggaattccctggatgaaggccgtcaccttaccttaaaccttttaagcaaggaaattgaactaagaaatggagaggtaaagaaactgaacctttcggcttcatgcttaatgtatttgttttctgctgctgcatcttggttataccattactgagtgcattttggtgtgcctatctctgatggatgattgattgcttttaaaacttataacagaaataaaattgtaatcccaaaaaaaaaaaaaaaaaa

SEQ ID NO: 289812 - DNA, 1000 bp, Homo Sapiens
gaaaggaaccagaggcagagagacgaggatacccagcgaaagggacgggaggaagcatccgaaacctaggattcgtcctacgattctgaacctgtgccaataataccattatgtgccatgtactgacccgaaaggctcggccacagagccggggcccagcgaatcacgcagagaaatcttacagaaaacaggggtgggaatctcttccgatagagtcgctatttctggttaatatacatatataaatatataaatacaaacacacacacacactttttttgtactgtagcaatttttgaagatcttaaatgttcctttttaaaaaaaagaattgtgttataggttacaaaatctgatttatttaacatgcttagtatgagcagaataaaccagtgttttctactttggcaactcacgtcacacacatattacacacatgtgcgcatacacacacacaatacacatatatgcatatagacgcatctattggaaatgcagttccacaggtgagcatgttctttctggtgacctggtattccatcaccattcaccccaggggacagcctcgaccgagacaaggaggcccttaaatgacagcctgcatttgctagacggttggtgagtggcatcaaatgtgtgacttactatcttgggccagaactaagaatgccaaggttttatatatgtgtgtatatatatatatatatatatatatatatgtttgtgtgtgtatatatatatatatatatatatgtttgtgtgtgtatatatatgtttgtgtatatatatacacatatgcatacatatgattttttttttttcatttaagtgttggaagatgctacctaacagccacgttcacatttacgtagctggttgcttacaaacgggcctgagcccctggttgggtgggtggtggattcttggacgtgtgtgtcatacaagcatagactggattaaagaagttttccagttccaaaaattaaaggaatatatcctt

SEQ ID NO: 289813 - DNA, 1000 bp, Homo Sapiens
ccagtcccttgatcgatatgtttaataacccagccacggctgccccgaattcacaaagggtaaataattcaacaggtacttccgaagatcccagtttacagcgatcagtttcggttgcaacgggactgaacatgatgaagaagcagaaagtgaagaccatcttcccgcacactgcgggctccaacaagaccttactcagctttgcacagggagatgtcatcacgctgctcatccccgaggagaaggatggctggctctatggagaacacgacgtgtccaaggcgaggggttggttcccgtcgtcgtacacgaagttgctggaagaaaatgagacagaagcagtgaccgtgcccacgccaagccccacaccagtgagaagcatcagcaccgtgaacttgtctgagaatagcagtgttgtcatccccccacccgactacttggaatgcttgtccatgggggcagctgccgacaggagagcagattcggccaggacgacatccacctttaaggccccagcgtccaagcccgagaccgcggctcctaacgatgccaacgggactgcaaagccgccttttctcagcggagaaaacccctttgccactgtgaaactccgcccgactgtgacgaatgatcgctcggcacccatcattcgatgagaggacagccaaggactctcccgggcctctccggttctcccttgcggaatgatgggcgcatcctgtctgccacgtgctgacggtcgggaagcttcagtggagaggcctaactctaatgtcgcctgcttaagcaaatcatgcttctctgtttcacgtagttgggttgacaagtttctgcctttaagataaatgagtaatagtctaatgaccagctcagccatttaaaatattttcttcctattctgttcaagaaacagtaaacttggtttcaatctttaaaaaaaaaaaaaaaaaaaaaaaaaaaaaaaaaaaaaaaaaaaaaaaaaaaaaaaaaaaaaaaaaaa

SEQ ID NO: 289814 - DNA, 1000 bp, Homo Sapiens; identical to SEQ ID NO: 284345

SEQ ID NO: 289815 - DNA, 1000 bp, Homo Sapiens
catatctgcattactgccctcggaagcgtgttgtgctcctacagactgcaaccctgctaggggtccttctcctgggttatggctacttttggctcctggtacccaaccctgaggcccggcttcagcagttgggcctcttctgcagtgtcttcaccatcagcatgtacctctcaccactggctgacttggctaaggtgattcaaactaaatcaacccaatgtctctcctacccactcaccattgctacccttctcacctctgcctcctggtgcctctatgggtttcgactcagagatccctatatcatggtgtccaactttccaggaatcgtcaccagctttatccgcttctggcttttctggaagtacccccaggagcaagacaggaactactggctcctgcaaacctgaggctgctcatctgaccactgggcaccttagtgccaacctgaaccaaagagacctccttgtttcagctgggcctgctgtccagcttcccaggtgcagtgggttgtgggaacaagagatgactttgaggataaaaggaccaaagaaaaagctttacttagatgattgattggggcctaggagatgaaatcactttttattttttagagatttttttttttaattttggaggttggggtgcaatctttagaatatgccttaaaaggccgggcgcggtggctcacgcctgtaatcccagcactttgggaggccaaggtgggcggatcgcctgaggtcaggagttcaagaccaacctgactaacatggtgaaaccccatctctactaaaaatacaaaattagccaggcatgatggcacatgcctgtaatcccagatacttgggaggctgaggcaggagaattgcttgaacccaggaggtggaggttgcagtgagctgagatcgtgccattgtgatatgaatatgccttatatgctgatatgaatatgccttaaaataaagtgttccccacccctgaaaaaaaaaaaaaaaaaaaa

SEQ ID NO: 289816 - DNA, 1000 bp, Homo Sapiens
tgagtggacttcagactcatcagagactctaaaatatagccaccagtgctttgttccaggagtttggtgacaaagttttggtttggtgttttggtaaagaaagtttcaagtgaaatgaggttcctataaaatagatgtttcttttatatggatttccttaattcaaagatcatattttagctggccacaaaaccaagaacatatctagcaagaaaacttgaaaaagtataagcatttgttaaaaatgtgaatttcttgaatgaatttcacatttgtaactatgattttggcagaatagaagattggctcatcagtgaagcgcagtatcttagctctagattctattttcatgcatcacagaagtgctatacggttaggtctgtttgtgctcagtcaagaactaagaaatagtatgaattgtaagtcaagatgggcaactcagatggagcagcttagtctcacagtttgcttgtctatttattttatttagtgccaaatgtattccattttaaaagtaagccagagtgagtcaaggcatatacacactttctcacaaaacttcctaaacagatttgggggtttaatatgtccaactcctcatgaaatatattcaatccacttaaatatattccatctttttaacataaaatgtaaagcttagcacccatcattaatttatgtctctgttttatccagtggttaaaaaaggattctgcctctttagtcctcactgttaaataaaacccaatcatagtaagtgattaactagcaaaaagtaaagctatttatagcaaatttctagatcattagaaaagcactggtagttgtacaatatcagtgttgactttgaacttctttaacgagatcatgaattcttttcccttagccaaaacatgaaatatttaacctagttgtctctaaaagttttgtaatcatgagttagatatatgtcatctcctattcattgcttttatgtgatcaataaatcttttacaaaccc

SEQ ID NO: 289817 - DNA, 1000 bp, Homo Sapiens; identical to SEQ ID NO: 117662

SEQ ID NO: 289818 - DNA, 1000 bp, Homo Sapiens; identical to SEQ ID NO: 222950

SEQ ID NO: 289819 - DNA, 1000 bp, Homo Sapiens
ggtgggggcatggacaaagcttgacacatcaagttatcaaggccttggaggaggctctgtatgtcctcaggggactgacaacatcctccagattccagccataaaccaataactaggctggacccttcccactacataatagggctcagcccaggcagccagctttgggctgagctaacaggaccaatggattaaactggcatttcagtccaaggaagctcgaagcaggtttaggaccaggtccccttgagaggtcagaggggcctctgtgggtgctgggtactccagaggtgccactggtggaagggtcagcggagccccagcaggaagggtgggccagccaggccattcttagtccctgggttggggaggcagggagctagggcagggaccaaatgaacagaaagtctcagcccaggatggggcttcttcaacagggcccctgccctcctgaagcctcagtccttcaccttgccaggtgccgtttctcttccgtgaaggccactgcccaggtccccagtgcgccccctagtggccatagcctggttaaagttccccagtgcctccttgtgcatagaccttcttctcccacccccttctgcccctgggtccccggccatccagcggggctgccagagaaccccagacctgcccttacagtagtgtagcgccccctccctctttcggctggtgtagaatagccagtagtgtagtgcggtgtgcttttacgtgatggcgggtgggcagcgggcggcgggctccgcgcagccgtctgtccttgatctgcccgcggcggcccgtgttgtgttttgtgctgtgtccacgcgctaaggcgaccccctcccccgtactgacttctcctataagcgcttctcttcgcatagtcacgtagctcccaccccaccctcttcctgtgtctcacgcaagttttatactctaatatttatatggctttttttcttcgacaaaaaaataataaaacgtttcttctgaaaagctg

SEQ ID NO: 289820 - DNA, 1000 bp, Homo Sapiens; identical to SEQ ID NO: 289819

SEQ ID NO: 289821 - DNA, 1000 bp, Homo Sapiens; identical to SEQ ID NO: 289819

SEQ ID NO: 289822 - DNA, 1000 bp, Homo Sapiens; identical to SEQ ID NO: 289819

SEQ ID NO: 289823 - DNA, 1000 bp, Homo Sapiens
gaacgcctggctgtcgtaccagctgctcaaggccacggagcccgggctgttcggcgtgtgggcgcacaatggcgaggtgcgcaccgccaggctgctgagcgagcgcgacgcggccaagcacaggctggtggtgctggtcaaggacaatggcgagcctcctcgctcggccaccgccacgctgcacgtgctcctggtggacggcttctcccagccctacctgccgctccctgaggcggccccggcccaggcccaggccgactccctcaccgtctacctggtggtggcattggcctcggtgtcgtcgctcttcctcttctcggtgctcctgttcgtggcggtgcggctgtgcaggaggagcagggcggcctcggtgggtcgctgctcggtgcccgagggtccctttccagggcatctggtggacgtgagcggcaccgggaccctgtcccagagctaccaatacgaggtgtgtctgacaggaggttccgggacaaatgagttcaaatttctgaagccgattatccccaattttcaagttcatgacactggtaggaatatgggggaaatcgagaactttcgaaatagctttggacttaacattcaataaaacaatttattttaaatgtctaatttttggttattcttggcaagctgatggtactttttgcataatcttttgtggattcttggttgtactgtagttgcatgcatgattatagctcttgtttttctcacagtttctttaaaaatctttattagtggctataatgacgtggaaatgtaatctgtgttttctggtttttcatttatttggccaaaatgttatattaatggagttattgctatttttgctgtgataatggtattatgcaagaccatattctcaattatttggatatgcaaactaaagtattaagagctaatgtcattatatatgtaacttaaatctagacaccatcaaagcataaaataaaaataaaaagcgttgctgaaaaaaaaaaaa

SEQ ID NO: 289824 - DNA, 1000 bp, Homo Sapiens; identical to SEQ ID NO: 117665

SEQ ID NO: 289825 - DNA, 1000 bp, Homo Sapiens; identical to SEQ ID NO: 222954

SEQ ID NO: 289826 - DNA, 1000 bp, Homo Sapiens; identical to SEQ ID NO: 222955

SEQ ID NO: 289827 - DNA, 1000 bp, Homo Sapiens; identical to SEQ ID NO: 222956

SEQ ID NO: 289828 - DNA, 1000 bp, Homo Sapiens; identical to SEQ ID NO: 117666

SEQ ID NO: 289829 - DNA, 1000 bp, Homo Sapiens; identical to SEQ ID NO: 117668

SEQ ID NO: 289830 - DNA, 1000 bp, Homo Sapiens
tccgaggatggagccgcgggagccgtgggtggagcaagaggggccgcagtattgggagtggaccacagggtacgccaaggccaacgcacagactgaccgagtggccctgaggaacctgctccgccgctacaaccagagcgaggctgggtctcacaccctccagggaatgaatggctgcgacatggggcccgacggacgcctcctccgcgggtatcaccagcacgcgtacgacggcaaggattacatctccctgaacgaggacctgcgctcctggaccgcggcggacaccgtggctcagatcacccagcgcttctatgaggcagaggaatatgcagaggagttcaggacctacctggagggcgagtgcctggagttgctccgcagatacttggagaatgggaaggagacgctacagcgcgcagatcctccaaaggcacacgttgcccaccaccccatctctgaccatgaggccaccctgaggtgctgggccctgggcttctaccctgcggagatcacgctgacctggcagcgggatggggaggaacagacccaggacacagagcttgtggagaccaggcctgcaggggatggaaccttccagaagtgggccgctgtggtggtgccttctggagaggaacagagatacacatgccatgtgcagcacgaggggctgccccagcccctcatcctgagatgggagcagtctccccagcccaccatccccatcgtgggcatcgttgctggccttgttgtccttggagctgtggtcactggagctgtggtcgctgctgtgatgtggaggaagaagagctcagatagaaacagagggagctactctcaggctgcagtcactgacagtgcccagggctctggggtgtctctcacagctaataaagtgtgagacagcttccttgtgtgggactgagaagcaagatatcaatgtagcagaattgcacttgtgcctcacgaacatacataaattttaaaaataaagaataaa

SEQ ID NO: 289831 - DNA, 1000 bp, Homo Sapiens
tcccattgttggcgctgaggtgtctggcctgaggtcaatggtgcaaaggagccgccaccgggcatgtctgcctggagtgctgtgctgtgtttaatcaggggatacaggcccctgggtttcttttttctttcttcctttcttccttggccaagagaagggcttacaggcatggacatgcaggttggcaaacgggcttgactttggctgatttaaaaagtgagaaagaaagtaaaaaaggttaatttttccttcctctgtaagatatcccagctttaaaaagaaaaaaaaagaattaccaagagaaggggacttctcttccagtttctgtaaggtcttacattgcctgactaaaatgtttcatttacctctaaatttccatatccttctggctgtagataaataatgtagttttgtttatgcatttggaattagtggatttttttgtcattaaaattgttaccactggtaacatgtgacaagcacaccacaattctccctatcttgtgaagttgtttttttaaatcgccttgaacaaaaagtttttttttttgtttgtttttgctttctgaaattcacagaagcctaggaggactggggtaagcggaataaactagagaagggagacattgtttggatttcctttatactgtgaagttacatgcataaaagggtcaaacctgtagatgcagaaaaagaaaaaaacctataaatacaaatctgtataaatgtctattattatgaagaattgccaatcttgttttaagcaaatgcattctatcgttattataaatgttagttctagctctatttacttctaatcttaaatcagaataaattaatattgtattgctgctgtgcgtggaaaaagacgatgtttatgttcttatagaataaaagctgtggaatgaagctttttaattttaaaaaaaaaaaaaaaaaaaaaaaaaaaaaaaaaaaaaaaaaaaaaaaaaaaaaaaaaaaaaaaaaaaaaaaaaaaaaa

SEQ ID NO: 289832 - DNA, 1000 bp, Homo Sapiens
tcactcgccgcaggcgcatagagatcgccaacaacttgtgtctcaatgagagacagatcaagatctggttccagaaccgcaggatgaagtggaagaaagattccaaaatgaaaagcaaagaggctctttagaggcagcgggggaggcccgcagagcgcgcccctagccggttcctgtccctgcgcctttccttttcgcctttcctctctatatttcgggtcgggggcaggtgctggagcactgggctcccgggccccacagacaaaagcgcttttccttggcattccgcatccctaccgacccagggttcccgcggggctgtcggcgctgccccatctcccctcagctcggctcagctcggtacccggggcccagggcaagctccgcaggacttccccggagggctgcggcgtacaggctggcgcagaacgaaccttggcctgggccgtatctccggctcccagcctcagcgcggccctcccgagttaaggtgggcccggcccgcgccacaggaccctcgccggaccctctaacctcgccctctcctttgttcccggctggacgggttagacagccaaaggctggcgagagtctggccctagactcggggtgcttccttgtagcgactaaactagattttcacttatgaatgatttgcatatgaaaggagagcatcggcctagggcccccacagttgctctatgctttccaaaccttatctccacaacctcttccccccaaaacccgggaacctccccagcctgcgcctgctgcatgccctctcaggccggcagccccagcctgctagctagctcaactagtggggtttcctggcactggaccccagcaagtggtcctagaggccctttgctgtcccatagtccctgccacgaatttctgtgccctcctgacccattgctgttgtccaactatttattgactctgggtccttcctgaaactatattttgtcatatcaaataaagagagaacaggactaaa

SEQ ID NO: 289833 - DNA, 1000 bp, Homo Sapiens
ccggctccggctccggctccagctccagctccggccccagccttggcttcagcagctaccaaggaaaggacagagtctgaggtgcctcccagaccagcctcccccaaggtcaccaggagtcccccggagacagctgccccagtggaggacatggctcggaggaccaagcgcccggcgccagcccggcccaccatgccgcccccccaggtctccggctcccgctcctcccctccagccccgcccttgccccctggctctggcagccctgggaccccccaagccctgccccgacgtctggttggcagcagcctccgagcccccacagtgccacccccgttaccccccacaccccctcagcctgcccggcgccaaagccggcgttcaccagcctcccccagcccggcctccccaggtccagcctcccccagcccagtctctttgagtaaccctgcacaggtggacctgggggctgccacagcagagggaggagcccctgaggctatcagtggggtccccactcccccagctatcccccctcagccccgccccaggagccttgcctcagagaccaactgagtggctggtttctccctaagcagccctcagcaccccctccctccccacctggccctcccaggacagctctcgccccccacaaaggggcatgggcctccagcctttgcccacaagtgcctcagtgcccactgggtcggcccccatggccaggagggctcaggacaatcctctatttcctgaccttttcctcgtccaccctgggcttggggacccccccaccggactctccactctccggcaggtcctaggggagccaccggaaggaaggagaggtttgcctgctcctacgggactgattcttctcttgccgacatgttttttgtaaggctggtaaataaattattttggacaaaaaaaaaaaaaaaaaaaaaaaaaaaaaaaaaaaaaaaaaaaaaaaaaaaaaaaaaaaaaaaaaaaactcggg

SEQ ID NO: 289834 - DNA, 1000 bp, Homo Sapiens; identical to SEQ ID NO: 220425

SEQ ID NO: 289835 - DNA, 1000 bp, Homo Sapiens; identical to SEQ ID NO: 117670

SEQ ID NO: 289836 - DNA, 1000 bp, Homo Sapiens
aaatatcaccagcaatcagtaaaaaattcagcaataatcttaaggccagagagaacaggttcaccattgcatagacaagaaaacagatatgggttaagagttggggactgaggagtcaagagcaacggccacgtgaagctgcctgactccacctagctatttggaataaccgattcccacagttttggtaagaaaccagccccagtaatcagtaagtcaggctgaactgcagtgacttttatttaagcctactcctgactaacttggcatttgcaggtcaagcaggaagcagttgacaagacacatcctcagtgaatcaatgccatttgtaactcaactggtaacagtagtaatcatacaaaataaaaacctgcttcagtgtcttaatgaccaaatcacattatctattttagcactcattccaaaattcagtatttaatgtaattaatctttaatccataaaaatacatccccactgtagcggggcagggggtgtccaacttccctgtgagactgattatcaataataatgtgtctccctcttggactgagcacacatctgagctgaacggcctttaaattgtttttcataatagtggtgatatgtttgcttggatacgtctgtactatttcatctggttcattttgcatgtaatagatttatctgtgagatgcctggctgaagctaggcattcagtctgtgactgtggaatcctatgcaggtattaaccaaggcagaaagaggtgagtaacttgcccatttctccacagagaccccatttaaataacacaaaattgaccatagtgattagatgaaaaaattatttgtagataggataatctattgactgaattatcttttgcagatatcagctggttggatttctcaccaggattgtctatagaagttaactgatttatgattgttaacacataaatatggccacttatccatttgcctcaacttcaaaaaaaaaaaaaaagaaaaaaaaaaaaaaaa

SEQ ID NO: 289837 - DNA, 1000 bp, Homo Sapiens
cattctgtaccattggacgcattccttcagctctcaaaaggtgcgcttggtaattgctgaaaaggcattgaagtgcgagggacatgatgtaagtctgcccttgagtgagcacaatgagccttggtttatgcgtttgaactcaactggagaagtgcctgtccttatccacggggaaaacataatttgtgaggccactcagatcattgattatcttgaacagactttcctggatgaaagaacacccaggttaatgcctgataaagaaagcatgtattacccacgggtacaacattaccgagagctgcttgactccttgccaatggatgcctatacacatggctgcattttacatcctgagttaactgtggactccatgatcccggcttatgcaactacaaggattcgtagccaaattggaaacacagagtctgagctgaagaaacttgctgaagaaaacccagatttacaagaagcatacattgcaaaacagaaacgacttaaatcaaagctgcttgatcatgacaatgtcaagtatttgaagaaaattcttgatgagttggagaaagtcttggatcaggttgaaactgaattgcaaagaagaaatgaagaaaccccagaagagggccagcaaccttggctctgcggtgaatccttcaccctggcagacgtctcactcgctgtcacattgcatcgactgaagttcctggggtttgcaaggagaaactggggaaacggaaagcgaccaaacttggaaacctattacgagcgtgtcttgaagagaaaaacatttaacaaggttttaggacatgtcaacaatatattaatctctgcagtgctgccaacagcattccgggtggccaagaaaagggccccaaaagttcttggcacgacccttgtggttggtttgcttgcaggagtgggatattttgcttttatgcttttcagaaagagacttggcagcatgatattagcacttagacccagaccaaattatttctag

SEQ ID NO: 289838 - DNA, 1000 bp, Homo Sapiens
aggtctcgcagtacacgggcagggctgtgctgtacgtgctgggcgcggtgacccacgtgtcctgcatgattgccctactgctgtggagacctcgtgctgaccatctggcagtgttcttcgtattctctggcctgtggggcgtggcagatgccgtctggcagacacaaaacaatgctctctacggcgttctgtttgagaagagcaaggaagctgccttcgccaattaccgcctgtgggaggccctgggcttcgtcattgccttcgggtacagcatgtttttgtgcgtgcacgtcaagctctacattctgctgggggtcctgagcctgaccatggtggcgtatgggcttgtggagtgcgtggagtccaagaacccgatcagaccccacgctccaggacaggtcaaccaggcagaggatgaagaaatacaaacaaaaatgtgagagcagtgaggtccgaggaggatgaactcagaaagcaccagccagagaattttcttagaagatgcctcaggacatagagcggctcctcatcaccatctcagcacaatttggccattctgaagagatcatgttatttcactcttcatgtatttttttctattctaacaaatttttcgtccaccatcttaacagagatcaagtgtatacatgaaggtatcagttcatttaattttagatgcaaaagaaaaaggtctaacgtacaatcagccaattagaatttgcctgaaatcatagactcaccctagttttattgctgtagttgtttttaagaattggaagcctgcttaaaaaatgtagttgagccccataattttacaaatgggcgaacttttaaacttctaactctacttggatcaaaacctcatacattttacaaaggggtcctgacaagtcagctgactcaacctcacagagtcagggggtgacaaagccagactggggctcaggattcctgaaacgtgtggggtctgcgtttctaaataaagacggttatttaatgg

SEQ ID NO: 289839 - DNA, 1000 bp, Homo Sapiens
tacagacttttttttttttttgtatgggagaagatactgtggcaaccaggaaggaatggaaaaaaaattcttttctctacagcaaattaatgtgaggaagctcctccaatcctctggctatttaaggttcaaaatcaagtgcctagggaaaattccaatggatgattttctgggagctatcttgtctaccttgaggttcctgaacaatgaattcccattaatgagcagtcttcagtattaaaaccactgtcttgtcacctcattttgcattactgtcttccgtggatgtttcagttacaactgtaatgttatttatagaacaacattaatccattaaagctaacctatttttcaatatttatgataatctatgtacatatattgtctgtccatatgtatttgtaaataggttgtatataatgtcaggtttgggtcttgggttcaagtgtatatattcctgtaagtttcttaactgcattttgatgaattcacattatgtaactataagaattgtcccaaaagtacctgtacagaaaattgaatattgaaaaattgacaaattgtgtacaaacactaaaaaaaacttgtttaaattgtatttgcaataaacaacatcaaattttttcatgaaatcttggtacaaattcagatctcttatttaaaatttaaataaggaatacattttcaaaatgcagtaatcaaaatgtgatctagtgtaatgaaataaaatgtgatctagtgtaatggaagacctttgagaacctgggtgtattaactttgtgtatatagtgtaaatatccccactgtactgttagaggccaacaattctagtatggcttgttggcaaagagtgctacaccgtttcaatgaaacaatgtatgtttgttttaactgaactaaaataaatacatgcttaatcctgaaaaaaaaaaaaaaaaaaaaaaaaaaaaaaaaaaaaaaaaaaaaaaaaaaaaaaaaaaaaaaaaaaaaaaaaaaaaaa

SEQ ID NO: 289840 - DNA, 1000 bp, Homo Sapiens
cgcacgcacccacaccctacagcagatccacctgcacaaacatagacagatgtggacatgcacccgcatgtacaaaaacacaaatacggaagtaaacctgaacaaaccctttaaatggggacgcagatgagtcctcggtaaaccgaggacccatgaaacagcagctgaagccagctccctgaatctgaccacagacactcctggggggcctgaaagcaacagctggacacccccttggtgctcgccttcggcctctcttggaactgcaccaccgaccaactccagacttgggagctttaaagagcaggatagctcttcctccccaggacttggtcttttttctgggtcttgttttgttgatttttcttttttaattttggaacaaatgcttttccaacccatgagtgctaagagcctctggaagggagggcttcaggcccgaaggtctctctggctctaggacccccagtgctcacacaatcagaccaaggaacaagacccccaggaaggaaacagatttaagcaagaccatggggtggaaggagaaaggggctagcactggatggagctggagggtcgtaggggagagatctccaactctctctgtgtccgtgtggagggctgcagagcctgcagggtgacctgcttccccaaaggccaacagcattggcctggccagaccaggtgaccttagatttggtgaacaacgtactatggaagccacatcactattgggcccccaggtctgatctgggttttgcctctgcccttggggaaatgctatcagaaattcgccccattttctttacagtcttttgtgtctgtcatttctctttcaaaaaggcggtgttttttgttgttgttggtttttttttttttttaaagaaaagttcttaaaacactaacggaaacccatggagtttgtcctttgtaaaaattttaaacacagtgtcttgatataaaaataaaaaatccagttagcactcccaaaaaaaaaaaa

SEQ ID NO: 289841 - DNA, 1000 bp, Homo Sapiens
tagtaattcatttaactcctcttacatgagtagcgacaatgagtcagatatcgaagatgaagacttaaagttagagctgcgacgactacgagataaacatctcaaagagattcaggacctgcagagtcgccagaagcatgaaattgaatctttgtataccaaactgggcaaggtgccccctgctgttattattcccccagctgctcccctttcagggagaagacgacgacccactaaaagcaaaggcagcaaatctagtcgaagcagttccttggggaataaaagcccccagctttcaggtaacctgtctggtcagagtgcagcttcagtcttgcacccccagcagaccctccaccctcctggcaacatcccagagtccgggcagaatcagctgttacagccccttaagccatctccctccagtgacaacctctattcagccttcaccagtgatggtgccatttcagtaccaagcctttctgctccaggtcaaggaaccagcagcacaaacactgttggggcaacagtgaacagccaagccgcccaagctcagcctcctgccatgacgtccagcaggaagggcacattcacagatgacttgcacaagttggtagacaattgggcccgagatgccatgaatctctcaggcaggagaggaagcaaagggcacatgaattacgagggccctggaatggcaaggaagttctctgcacctgggcaactgtgcatctccatgacctcgaacctgggtggctctgcccccatctctgcagcatcagctacctctctaggtcacttcaccaagtctatgtgccccccacagcagtatggctttccagctaccccatttggcgctcaatggagtgggacgggtggcccagcaccacagccacttggccagttccaacctgtgggaactgcctccttgcagaatttcaacatcagcaatttgcagaaatccatcagcaaccccccaggctccaacctgcggaccacttag

SEQ ID NO: 289842 - DNA, 1000 bp, Homo Sapiens; identical to SEQ ID NO: 117671

SEQ ID NO: 289843 - DNA, 1000 bp, Homo Sapiens
gggtttcctcatgtggagaaacagcaaagttatgaacatcgtctcctattcatttctggagattgtgtgtgtctatggatattccctcttcatttatatccccaccgcaatactgtggattatcccccagaaagctgttcgttggattctagtcatgattgccctgggcatctcaggatctctcttggcaatgacattttggccagctgttcgtgaggataaccgacgcgttgcattggccacaattgtgacaattgtgttgctccatatgctgctttctgtgggctgcttggcatacttttttgatgcaccagagatggaccatctcccaacaactacagctactccaaaccaaacagttgctgcagccaagtccagctaatgaggaaattctcttttgttttttggagcatggttctttgggaagtggcatccactgcaggaaagcagaatgagcagagccagcagaactgatggagtggcacaaattcccagtgtctggatggtgccacactggcgcctaatcacccgtttaacaagcagaaattaaatgttgctcagcacatgtgtctttcagctcttccttttcacccatggatgatcattgcgagcatgcgctgattggactgaaatgccggggaataggttaggcatgctcagtgccgtccctttgccaccacagtcaaatgacatgcttcactgtggtaccttaatacctgaaatagaaccatggaaaattctgatgtcctctctctgaattatgtacagactacctgggggatcctcttctctccaaatgttagccatcctgaagtagccgaacagtagaaactttggtggggattaactgggagcttgaaaatttgtctttggtaacctgatactggacagctgaactgaatggctgcaaaataaatacctcacatgaaaaaaaaaaaaaaaaaaaaaaaaaaaaaaaaaaaaaaaaaaaaaaaaaaaaaaaaaaaaaaaaaaaaaaaaa

SEQ ID NO: 289844 - DNA, 1000 bp, Homo Sapiens
ggccagaggggcacgtggcgccgggaggagaaagaatgtcttttcgaggcggaggtcgtggaggctttaatcgaggtggtggaggtggcggcttcaaccgaggcggcagcagcaaccacttccgaggtggaggcggcggtggaggcggcggcaatttcagaggcggcggcaggggaggatttggacgagggggtggccgcggaggctttaacaaaggccaagaccaaggacctccagaacgtgtagtcttattaggagagttcctgcatccctgtgaagatgacatagtttgtaaatgtaccacagatgaaaataaggtgccttatttcaatgctcctgtttacttagaaaacaaagaacaaattggaaaagtggatgaaatatttggacaactcagagatttttatttttcagttaagttgtcagaaaacatgaaggcttcatcctttaaaaaactacagaagttttatatagacccatataagctgctgccactgcagaggtttttacctcgacctccaggtgagaaaggacctccaagaggtggtggcaggggaggccgaggaggaggaagaggaggaggtggcagaggtggtggcagaggcggtggttttagaggtggaagaggaggtggaggtgggggcttcagaggaggaagaggtggtggtttcagagggagaggacattaagtgaaacagttgacagacatcaccagttgacttctgcattaacctgcatgatctgtttctactatggattggaaacttgtttcttgaacaagtcttgaagatcttggtcattttatgacaatggatctaaaatgtcagcatcatgcaaagtgcaacggaatagtgaattttgctctaaaagagcatgaacaagtctttctaatgttttgtacagtgcctggcactctgggtgctcaataaatggataggagttttcatttgaaggatatttgaatttttaaaataaagtgttttattcccttaaaaaaaaa

SEQ ID NO: 289845 - DNA, 1000 bp, Homo Sapiens; identical to SEQ ID NO: 222959

SEQ ID NO: 289846 - DNA, 1000 bp, Homo Sapiens
ggattttcattgacctccagaagaaagagaaggaggcgcatgcctggctgcaagcagggaagatctattacatcttgcggcagagcgagctggtggacctctacatccaggtggcacagaacgtggccctgtacacaggcgaccccaacctggggctggagctgtttgaggcggctggagacatcttcttcgacggggcctgggagcgggagaaagctgtgtccttctaccgggaccgggccctgcccctggcagtgactacgggcaaccgcaaggcggagctgcggctgtgcaacaagctggtggcactgctggccacgctggaggagccccaggagggcttggagtttgcccacatggccctagcactcagcatcaccctgggggaccggctgaacgagcgcgtggcctaccaccggctggccgccctgcaacaccgactgggccatggcgagctggcagagcacttctacctcaaggccctgtcgctctgcaactcgccgctggagtttgacgaggagaccctctactacgtgaaggtgtacctggtgctcggtgacatcatcttctacgacctgaaggacccgtttgatgcagccgggtactaccagctggcgctggcggccgccgtggacctgggcaacaagaaggcacagctgaagatctacacgcggctggccaccatctaccacaacttcctcctggaccgtgagaagtcgctcttcttctaccagaaggccaggaccttcgccacagagctcaacgtccgcagggtcaacctgcctcctctgccactctgcgggtgggccccctggttggcccccagccaccctcgctgaggacagcatccaagggagtgggttttgtgcaagggctgggggtctcctgcctctcctggtgtcgccggtggctcattttctggcaaatggaggcacgaacgcaggggccaaatagcaataaatgggttttgttttttttttgcaataaaaaaaaaaaaaaa

SEQ ID NO: 289847 - DNA, 1000 bp, Homo Sapiens; identical to SEQ ID NO: 222960

SEQ ID NO: 289848 - DNA, 1000 bp, Homo Sapiens; identical to SEQ ID NO: 117672

SEQ ID NO: 289849 - DNA, 1000 bp, Homo Sapiens
tttttgtaactttaaaatattctataattatgcatgtgattttaacatttaatattcaaaaataaatctcttgctggatttgagagtattgcatttttaaagtctctcttctgtaactggatgttttggcaactttgtggggagagactgctggatttcttaaagcaacgtattcctgacactggccacagaatgcctttggaaatcggatgtactgttctcttgttcacgtttagtggtgttttgctgttttgttttttaaacaaatgatgctgagaataaggagagaaatgaatgtagagagaggtagagagagaaatatgaactctaacaaaggactgaggagtgcagtctgctggttcaggctcttcaaaagatgtagaaaaagagatagaaggaaccacctatgcttaaaatactgtaaatatgcagtgaggtttggcaaaatctattccatgtgtgatttgcttgtagaaacaattttgaaagccccttgaggaaaataaaaatcaagaagaacacttttctcccttttccatacaaattaaaacttaacagcatcaaattattgggaccagaaaccaagtaatgtataatgtggcttttgttgagttaaataagatgctatataatggagaagaatttgaaaatgcacaaaaaaatcaatctacattatcagaacctgcagtgaaattaaacttatgttaaataaaaccagtttgcaggtgcacaaactatgagggtcttgtatccacgtaacacaggtagttacaaaaacatgttattgtactgtgtaaagatgcatagtcatctcatttggttggctttgtaccttgtaccttttttagccttggcttttgttgaactagaaccctcagcacatactgtgttgtacttttgtaaatgattttttaaatggaattttgcacataatacattgtaatactgtatgataatcatgtgtgaaaataatttttgaaatatcaaaaaaaaaaaaaaa

SEQ ID NO: 289850 - DNA, 1000 bp, Homo Sapiens
tgcccatccctcgcccagggcctgcccaaggagatggacattccttacctcccattgctcgccgcctgggccaccaccctccacagtccctaaatgttggcaaacccctataccagagtatgaactgcaagcccatgcagatgtacgtgctggacattaaagacaccaaggagaaggggcgggtcaaatggaaagtatttaatagcagttctgtggttggacctcctgaaaccagcctgcataccgtggtacaaggcaggggtgaactcatcatatttggaggactcatggacaagaaacagaatgtgaagtactatccaaaaacaaacgccttgtactttgtacgagcaaagagataatgtgttctaaacccctttccttttctgtggcttttaatttggaattttccagtgtgtaagcatttggactgagaattgggaaaacaaaattactcccagaagccaaaactctttaattcccaaccgaagtcactccaggctgggatcaaatctccattaagaaaaaaaattatatataaatatatatatatatattatatagccaactctgttgacaaaaaaagggagagatttccatcctggttcagataaagttgttgctgtgttttaacaggggctgggctgcctttttctaccttgctggtaactagaccaagaagttagagaatagactaacatcagtaacttcccaaaagaaactgaagagccccctgtaaatctttatgtggccttcttggagttaaaaaatgaaagggcatatgtaagttgcaaaggtggagggttttagactctcatgcttcaggtgctgtcggggtaaaagtaactgtttttccccttctcttaaaaccacagaggacctgtgacagctctgcagaaatgccagtgcctggccccctcttgccttttatggctgaggaaagttacccaacaaaggattttattccaaaaaaaaaaaaaaaaaaaaaaaaaaaaaaaaaaaa

SEQ ID NO: 289851 - DNA, 939 bp, Homo Sapiens
gcttccggtagtgagaacccttccggtgggctaggtactgagcgcgcgaggtgaggagttgtgcagggtttggggaaaggaaggctggcttggcgagagggcaggtttgcgggctttcgcccccttttccaaagaccaacaaagagtccttccccaactcccaactcaaccccttttggaactatgtgtggtggttgggaccctgtggcgcatccttgtcgctcgtgtccttctcatgcccggcgacgcgtctttgtggtaacgccctgctgccatctcttttcttctctatgcgaggatttggactggcagtgagaataagagacaacgattcacgtctactttctaggatgacttccatgtgctccatctcgcgcgtccctgagcatgttgaatttccaaatcctaaataagccgcgcggtgtagtttgtattatgttgcgtttctctttctgctttcctcgccctttctccatcatcctttaggctctacagagtgaaggtttaaatccaaggtcatggcaaaacatctgaagttcatcgccaggactgtgatggtacaggaagggaacgtggaaagcgcatacaggaccctaaacagaatcctcactatggatgggctcattgaggacattaagcatcggcggtattatgagaagccatgccgccggcgacagagggaaagctatgaaaggtgccggcggatctacaacatggaaatggctcgcaagatcaacttcttgatgcgaaagaatcgggcagatccgtggcagggctgctgaggcctgtgggtgggacacccagtgcgaaaccctcatccagttttctctccatctcttttctttgtacaatcccatttcctattaccattctctgcaataaactcaaatcacatgtctgcaagaaggcctccaaatatagaaacaatcccattagtca

SEQ ID NO: 289852 - DNA, 1000 bp, Homo Sapiens
gacaacaggtacctgtacgtgaacagccgcgcctggcccaacggtgcggtggtggccgaccccatgcagccgccaccaatcgcggaggagattgacctgctggtgttcgacctcaagaccatgcgggaggtgaggcgggctctgcgtgcgcaccgcgcctacacgcccaacgacgagtgcttcttcatcttcctggacgtcagcagggacttcgtggccagcggggcggaggaccggcacggctacatctgggaccgccactacaacatctgtctggccaggctgcggcacgaggatgtggtcaactcagtggtcttcagtccccaggagcaggagctgctgctcacggccagcgacgacgccaccatcaaagcctggcgctccccacgcaccatgcgcgtcctccaggcacctcgcccacggcctcgcaccttcttctcctggcttgccagccagaggcgctgaggtgtgctgggtgcactggagccaccgggaccccttgaggacatcgccaggctctgtggctttttcccgagcgggagaggtggagatgcttatagcagttacgccttaggaaggggacaaccaggccccgccacacgctcacacacaaacctgctcacgcagctgtgatgcttggcacggggtggccagtgcagatggagcccaaggccccctcggcctcctgggcaacttggggtacacaggatactgggggtgccgctcctcactcaaccccaggctaggggtacacctgacccagctggcctcggcccggggcaccttcggctggtcctgtggggccctggacggtggcccagtggtggcaggggctgctcctggctgtggttgtgcgcccggggcttgggagcggccggtcacgctgctgtgggcccgagtgtgttgcatgtccacgcaccacccgttcagggccctgaataaacagttggcaacagcaaaaaaaaaaaaaaaaaaaaaaaaaaaaaaaaaaaaaaaaaaa

SEQ ID NO: 289853 - DNA, 1000 bp, Homo Sapiens; identical to SEQ ID NO: 117673

SEQ ID NO: 289854 - DNA, 1000 bp, Homo Sapiens
agcagttgtgtatcacatagacaatggttatgatgtaaacagattcagttgttttgttgttcattcgtcatatgtttgtgatagggatgttgggagcacagctctattctgcctgctcagacttaagttagacccttatcttttatattatgtcatgaaaaaagtctcctaaaattgtgaaactagttcttgatgagtgatgtgatcatcagcaataaagatataataactctgttttcttagcctgtatagaggagaggaacttgcttggctttaaaatatatttatttgccatttaagtataaatatggaatctgtttcttattgggaagatagaatatatatattttcctttaaactttttaaggtcacttttaaataaccaaatttgatttatggtttttaacaaaggactaaagagctgaaaccaacctagttttgtttttgtgatataaactttaagtgtcgagggaccatgccagcaactaccaaaaatctcttaaatcttcaggtacagctggcattttggcagatgcatagagacatctgagaccctcagaaaggaaggataatccaagaatataggaaatctgtgttctcttcctttcattttatcccttatatttctaaagactaattataagtaatctgacattttaatgtagctactcttatttattttttctttctgaggtattaaaatatctggactgagttttgccaaatgttaaagggagaagagttactgaagactttgaacacttgctttttgtgattgcttatgtcattagtgcctcatgactgtgtttgatgtcctttattgatacaaagtgagcctgtgccttcattatcttgcccattttaatacaaatggaaacctggtgtttgaaaatctctgaactgtgtgggttttggaggaatatacctgaattttattcaataacagtttctggacaggaagaaaaatacagttacatatttataaaaaaaaaaaaaaaaa

SEQ ID NO: 289855 - DNA, 1000 bp, Homo Sapiens; identical to SEQ ID NO: 117674

SEQ ID NO: 289856 - DNA, 1000 bp, Homo Sapiens; identical to SEQ ID NO: 222963

SEQ ID NO: 289857 - DNA, 1000 bp, Homo Sapiens
tttgcatttctgacaagtgaaacaggatcttacgatggagttttgtatgaaaacaaagttgcagtacgtgacagagtggcatttgcttgtaaattccttagtgatactcagttaaatagatacatcgaaaagttgaccaatgaaatgaaagaggctggaaatttggaaggaattttgcttacaggccttactaaagatggagtggacttaatggagagttatgttgatagaactggagatgttcaaacagcaagttactgtatgttacagggttcacctttagatgttcttaaagatgaaagggttcagtactggattgagaattatagaaatttattagatgcctggaggttttggcataaacgagctgaatttgatattcacaggagtaagttggatcccagttccaagcctttagcacaagtttttgtgagttgcaatttctgtggcaagtcaatctcctacagctgttcagctgtgcctcatcagggcagaggttttagtcagtatggtgtgagtggctcaccaacgaaatctaaagtcacaagttgtcctggctgtcgaaaaccacttcctcgatgtgcgctttatctcattaatatgggaacaccagtttctagctgtcctggaggaaccaaatcagatgaaaaagtggacttgagcaaggacaaaaaaattagcccaatttaacaactggtttacatggtgtcataattgcaggcacggtggacatgctggacatatgcttagttggttcagggaccatgcagagtgccctgtgtctgcatgcacgtgtaaatgtatgcagttggatacaacggggaatctggtacctgcagagactgtccagccataaaatgttaccaccttaagagaacccttcaagtgtggagctttctagtaggtgtccttcatagctcagaaacatacctcagaacaagccattcatgacttacctgtaatgggaaaataaatcattctatcaaaaaaaaaaaaaaaa

SEQ ID NO: 289858 - DNA, 1000 bp, Homo Sapiens; identical to SEQ ID NO: 117677

SEQ ID NO: 289859 - DNA, 1000 bp, Homo Sapiens; identical to SEQ ID NO: 117678

SEQ ID NO: 289860 - DNA, 1000 bp, Homo Sapiens
caatggcagtgaaaagtctgtccccatctcctgagtcctcggcatcgccagttccatccactcagccgcagctcacagaaggatcacatttcatgtgtgtgtagtcttagaagaactatactgacttctgttgaaaccattcaaagctaaagacatggaccttcagcagtgtaagaagatattgtacagtatattttaaatctatgaaattcatagttctgatgcttttggtcacagagcatcattttatcacttctggaaaatgtttattccaaaacagctttaatggcccatatgtacacttcgtaatctcaaggttattattctgacaccagcttgctgctatgatttcagagcacataagtaaaggtgctttttaatgtgcagtctatttccagagcttacttagttgctgatttccagatttcgatgtttcttaagtctaggtgaatttatatatatatttttttgcttttcattttctaaagttagttattatttccattgaagcttgttttctttttttcttcccattttagctactgcagtgcttttgtttcacacttgatttgtaaaaattttatatatatgtatttaaaatgtgccattttattgctaagtgaagtatgtcctgttttctgctataattctttctcggtcagattgcaatgtcagcagttactgccacactcctgtcagcttaaacacaaatgttactgcttatcttttcttaaaaaaaaaaaaaacaaagtgtaggtattttgaagtactgggcttatatttcattggaatacatgtgtacagcaataagcaggtttccaaatccggtacttagtttgtgtacaaatgtaattatgttcattgtgtatatattatacaatgagcacatgtaatgtattaaaggctacttactattgtttaaatgcaaatgttcatatctcatttctttttttatcatgttaaataaatgttgatgttcttaaaaaaaaaaaaaaaaaaa

SEQ ID NO: 289861 - DNA, 1000 bp, Homo Sapiens
agccgcccctgcccactcagccgcagacccctgggagaaggagcatcaccgcctctctgtccggatgggctcacatgcccacccattacggcgatcaaggcgggaggctgccttccggagcccctactcctcaacagagcccctctgctctcccagcgagtctgacagtgacctagagcctgtgggggcgggaattcagcatctccagaagctgtcccaagagctagatgaagccattatggcggaagagagtggtgacatcgtctctctcattcatgactgaggaagtgcctgcaggaaacaagccctgtctgaccgccaaggcttcatactcaaggatgtctatgcttccccgtgtgcttcctggaaaaaacccccgggagtcgtcagtacccctgggccactgctaacaagcacctaacaaggggcccagagccccctgctccagccacatctggacccatcagtgactgcctgccatagcctgagagtgtcttggggagaccttgcagagggggagaattgttccttctgctttcctaggggactcttgagcttagaaactcatcgtacacttgaccttgagccttctatttgcctcatctataacatgaagtgctagcatcagatatttgagagctcttagctctgtacccgggtgcctggtttttggggagtcatccgcagagtcactcacccactgtgtttctggtgccaaggctcttgagggccccactctcatccctcctttccctaccagggactcggaggaaggcataggagatatttccaggcttacgaccctgggctcacgggtacctatttatatgctcagtgcagagcactgtggatgtgccaggaggggtagccctgttcaagagcaatttctgccctttgtaaattatttaagaaacctgctttgtcattttattagaaagaaaccagcatgtgactttcctagataacactgctttctcataataaagactatttgcatttg

SEQ ID NO: 289862 - DNA, 1000 bp, Homo Sapiens; identical to SEQ ID NO: 117679

SEQ ID NO: 289863 - DNA, 1000 bp, Homo Sapiens; identical to SEQ ID NO: 222966

SEQ ID NO: 289864 - DNA, 1000 bp, Homo Sapiens
tgaatcacctgaattctgtaggcgacacatgtggactagagcagattgatatgtttatacttggatactcccttgaagtaaagataaaagtgttcagactgttcaagtttaactccagagactttgaagtctgctacccagaggagcctctcagggactggccggagatctccctgctgaccgagaacgaccgccactaccacattccagtcttttaagtccgctgggggccgaacagcagtgctcaccagtgacggtggtcacagttgcaataaagtctctctctgaaaccaaagctagcatttcagcatggaaggaattaggaccttttcttcaggattacaggtacactggatgcagccatgcatggatggtttttctttatttttcagtgatttcctctgaagcagctgcactgatacatttgggagttggtggcttgactttgtccataaggggcgtggccacttcacatgatggcgggcctttaagagcacaaagaagtttaatatggacaacaacaggaaaaagcaagaagaaaacaagtagggaaaaacagctaacctggagagaaagaatttctttaacctttatgttcttcattaaaaatcttatcttggactgatttgagggatttttagaaacatggccttattttatataagcattaccttcccaggaatctttgttgtatattaatttttgataaccatttgattaactttaaaattaagtatatgtgtgtatatatacatatgtatgtttatatacacacatgtatctgtatagttttatatatacatatatacacatagacatacagagaaccactactttgtaatagtgtacagtttgttttatatctctttactttttttgttactattttatctggccagcgtaatagttttatttagattttttaaaattctgtagattaaagcaaatgacagttattgaactatcacaaaactattaaactgtggtacatttaatgtgt

SEQ ID NO: 289865 - DNA, 1000 bp, Homo Sapiens
cccggctcggagagctgtccctacgggggcacggtggagatgccttcccccaagtccctgagggaaggcaagaagggcccaaagacgccgcaggacggcttcggcttccgcagataggtcgggcccccgacaccggacaggggttgaggggacctcctcagaggccctgggcacgggagggggtggggctgggcgtgaaggggacaggggacgatagaaacctaaggaaaatgcttttgggcaacatgagaggaaccttttcatattaatgacaaaattagagtctggaagtgacagaagtcagatctacagccacccagaggaaagtcagctcctgaaacgctgcagtggaacgcgcagccaccgcacctgagacgcaggctggctgggctctcctgctggctgccctggaggatttcaacatgtcccaggatttgctccaccctcgagggcagccagacagcgtcgccaggcaatgaggaaagcagagacaggagaggaaggcctcactcacccactgcgtcgagggctgcagaacacagcggggtcctgtccaggcccagggacatctttgcaagccagacacacttcctcttgagacctcgttctctcggagtgagccaaacacacttcccaaaacgtccccagccacagctgggatgccgatggaaaggcatctgccataaaagaaaagcaaaagataaaaagcccaaccgatgtggggatagagaggcggaagagcagtcaggcttgaggagctggcgcttgtaatgtttatccgtttaaacatttcgtcctcctggtacacgaagggaactgtctgcccaggagcctgagcctcaggctgttggagaagcatctgatgcctttttctttgctgggggtcttctacgtgaggttccttggcgttgtttaaggtcaactccaccaaatacagcaaccagctggggcttgaaaaaaaaaaaaaaaaaaaaaaaaaaaaaaaaaaaaaaaaaaaaaa

SEQ ID NO: 289866 - DNA, 1000 bp, Homo Sapiens
ccgttgaacccgatctcctaagaagtgtgctgcaacagcgtttgattgcattaggaggtgttatcgcagctcgaatttcagtttaaacgaacacctttcctctggccctcacttagcttgtgaacaggcctttttaaaatcctttcttggtgtagcagcaatcgtgttgttttatttttagatggatgtattttcatttaatacgtgggagttatatgaatatgtcctagcactaagggaagtgtaacagttgattgatttaggtggttttatgcagccagaacgattggaacaggaaaggtgtggaagggatattcttaggtcgtcacaaagctgagctgatgggagcaccctccccagaggtcaacaatccattcgttaactcagacacttaacctttacctttacttctgttggcgaaaaagaagtgctcctttttattacactgatttatccttccatcttttccttggcatttaccatcttccatctcccccttcacttttttcagatatgtctacaaacagactccaatctcagtcgcactaaaaataagaacaaaacctaaaccttacagttctttcaaattattaaatcaatttattattcctttctttggcaaaggttccaaatttttactttatatttgtaattttactatttgcattcagtcccagcgcattaatctgaatctgctgtcctaaaatacactggtgaaaacattacttgtacaatctcctatcagaaaactgttcatctactcactgtagtgccctccttgaaatgtgtgtttgttcattcaactaacaatatttggggatccctgtagtaaacactgtatgaattttacacagtctggccatcaagaaagatcacggagtatattctagatggggaggctactaagtgaataggaatcaccacgctgggctgtttattaggtacagtaataaacataagtactggttgcagtgaaaaaaaaaaaaaaaaaaaaaaaaaa

SEQ ID NO: 289867 - DNA, 1000 bp, Homo Sapiens; identical to SEQ ID NO: 117680

SEQ ID NO: 289868 - DNA, 1000 bp, Homo Sapiens; identical to SEQ ID NO: 222968

SEQ ID NO: 289869 - DNA, 1000 bp, Homo Sapiens; identical to SEQ ID NO: 117681

SEQ ID NO: 289870 - DNA, 1000 bp, Homo Sapiens; identical to SEQ ID NO: 117682

SEQ ID NO: 289871 - DNA, 1000 bp, Homo Sapiens
aaaatcagctttggccatggcggattcagaccacctgacgatctacaatgcatatctaggatggaagaaagcacgacaagaaggaggttatcgttctgaaatcacatactgccggaggaactttcttaatagaacatcactgttaaccctagaggatgtaaagcaggagttaataaagttggttaaggcagcaggattttcatcttccacaacttctaccagctgggaaggaaacagagcctcacagaccctctcattccaagaaattgcccttcttaaagctgtactggtggctggactgtatgacaatgtggggaagataatctatacaaagtcagtggatgttacagaaaaattggcttgcattgtggagacggcccaaggcaaagcacaagtacacccatcctcagtaaatcgagatttgcaaactcatggatggctcttataccaggagaagataaggtatgccagagtgtatttgagagaaactaccctaataaccccttttccagttttactttttggtggtgatatagaagttcagcaccgagaacgtcttctttctattgatggctggatctattttcaggcccctgtaaagatagctgtcattttcaagcagctgagagttctcattgattcagttttaagaaaaaagcttgaaaatccaaagatgtcccttgaaaatgacaagattctgcagatcattacggaattgataaaaacagagaataactgaaactgaaattcatggtcaactgctttaaaaattaagatgaagatacagtcatgaaattatctgaaaatgggtcatcacattaagtatttcattacttaaaatgttggtactagccattaacttaaaggtggtgggaaaaaagcacatactttaaacatgtataattttctagttcctttttaatgatgattattctgaatgtatttgccactacatttacaataaattctttggtattatgcaaaaaaaaaaaaaaaaaaa

SEQ ID NO: 289872 - DNA, 1000 bp, Homo Sapiens; identical to SEQ ID NO: 222970

SEQ ID NO: 289873 - DNA, 1000 bp, Homo Sapiens; identical to SEQ ID NO: 222971

SEQ ID NO: 289874 - DNA, 1000 bp, Homo Sapiens
aaaaccaagatcagatcatgataaaaagtatgaagagaaacaatgggaaataaggtttgaggaattgctttcggctgaaacagacactcctcttttaccaccatatttgtcttcatctctgccttccccaggagaactctatgctgttcaagttaagcacgttgtctcacctaatgaagtgtatatttgccttgattctatagaaacttctaaccagtctaaccagcatagtgacacagatgatagtggagtcagcggggaatcagaatccgagagccttgatgaagcactgcagagggttaataagaaggtagaggcgcttcctcctctgacggattttagaacagaaatgccttgccttgcagaatatgatgatggcttatggtatagagcgaagattgttgccattaaagaatttaatcctttatctatcttagtacaatttgttgattatggatcaactgcaaagctgacattaaacagactgtgccaaattccttctcatcttatgcggtatccagctcgagccataaaggttctcttggcagggtttaaacctcccttaagggatctaggggagacaagaataccatattgtcccaaatggagcatggaggcactgtgggctatgatagactgtcttcaaggaaaacaactctatgctgtgtccatggctccagcaccagaacagatagtgacattatatgacgatgaacagcatccagttcatatgccgttggtagaaatggggcttgcagataaagatgaataagtgcctaagtgtatacagtgagagcatctatagaagcctagaagaattctgttatgtttagactatgtcttatctttagactatttcaggcttaattttcctaacttgttcagcactagtgctttacctctcatttttaattgaactgttaggaattgtgtggggaaaaaaagtaaataaatgttcgcttccaaaaaaaaaaaaaaaaaaaaaaaaaaaaaaaaaaaa

SEQ ID NO: 289875 - DNA, 1000 bp, Homo Sapiens; identical to SEQ ID NO: 222972

SEQ ID NO: 289876 - DNA, 1000 bp, Homo Sapiens; identical to SEQ ID NO: 117684

SEQ ID NO: 289877 - DNA, 1000 bp, Homo Sapiens; identical to SEQ ID NO: 222974

SEQ ID NO: 289878 - DNA, 1000 bp, Homo Sapiens
ttccaagaggaggcaataaagtgcatgagttgctgggagcctgagcacctttcgtttttcggctcagagaaagccaagtgcaacttgcttcagtcatcctgaacctgagttcaaccaaccgcagccacctacgtttgaccccagcgagatcaaagttgtatatctgaggtgtaccagtggtgaagtcagtgccacatctgcactggcccccaaggtcagctccctgggtctgtctccaaaaatggttgctgatgacatcaccaaccattgactggaagagtctgaggatgatagtgaaactgaccagccacagcagacaggcccagattgaggtggtgccttctgcctctgccctgatcgtcacaaccctcaggaaccaccgacagaaagaaagaaacacaaaaacatgaaacacagtggtagcaccacttctgatgagattgtcaacattgcctaacagatgcagcagcagtctttagccagagaactctctggaaccattaaagaattcctgggggccggttgcggtggctcatgcctgtaatcccagcactttgggaggccgaggcgggaggatcatgaggtcaggagatcgagaccatcctggctaacgtggtgaaaccccgtctcttactaaaaatacaaaaaaattagccaggcatggtggtgggcgcctgtagtcccagctactcaggaggctgaggcaggagaatgctgtgaaccctggaggcagagcttgcagtgagccgaatatgcgccactgcactccagcctgggcaacagagcaagactccgtctccaaaaaaaaaagaattcctggggcctgcccagtctgtgagctgccatgttgatagtatcacagatgataccaacagtgaagctgtggaatgcccagctagttaaagaatgcaaaggaaaatattttcacaaagggttatctgataaccaaaaaataaaaagacatttcatctaagccacttaaaaaaaaaaaaaaaaaaaa

SEQ ID NO: 289879 - DNA, 1000 bp, Homo Sapiens
gatgaaccaattgatcttcttaatgtagctttcatagctgaagaaaagaccatgccaactacctttaacagagaagggaataaacagaaaaataaatgtgaaataccttcagaagaattctctaaagatgttgctgctgctgctgctgacagtcctaataaacatgtcagtgtaccagatcgaatcacaggaagggcgggactaaaggaactacaagctgttagcccttcccgaatttggaattttgttgaaattaatgtttctatggaagaactgcagaaattaagaagaactcgaatatgtcacttaattcggccattggatacagttttggatgatagcattggctgtgcagtctggtttgcttctagaggaattggttggttagtggcccaggaaggagtgaaatcctatcagagcaatgcaaaggtagttctcactggaattggtgcagatgagcaacttgcaggttattctcgtcatcgtgtccgctttcagtcgcatgggctggaaggattgaataaggaaataatgatggaactgggtcgaatttcttctagaaatcttggtcgtgatgacagagttattggtgatcatggaaaagaagcaagatttcctttcctggatgaaaatgttgtctcctttctaaattctctgccgatttgggaaaaagcaaacttgactttaccccgaggaattggtgaaaaattacttttacgccttgcagctgtggaacttggtcttacagcctctgctcttctgcccaaacgggccatgcagtttggatcaagaattgcaaaaatggaaaaaattaatgaaaaggcatctgataaatgtggacggctccaaatcatgtccttagaaaatctttctattgaaaaggagactaaattgtaatgtgattcacaatgtaacaatataaaaataagtttttatataattatataaaagtaaggtactctgctgctttactattgtataatatagtagttttaaagtt

SEQ ID NO: 289880 - DNA, 1000 bp, Homo Sapiens
ctcccttcagagccaacatcacttagaaggctttagaaaagaactcaggaatttggaagcaggctataaatctcatgaattccacccagaatcacatttacaaataaaaaatcatttgataaaaagatcacatgtacatgaagacaatggaaagttatttccttcatccagtctacaaatacccaaggaccataatgcaagagaacatatccaccagtcagatgaacagaaacttgaaaaaccgaatgaatgcaaattttctgagtggcttaatatagaaaattctgagagaacaggtttgccttttcacgttgataactctgcttctgggaagagagtgaacagtaatgaaccatcttcattatggtcttcacacctaagaactgttgggttaaagccagaaactgctcctctcatccagcaacaaaatatcatggatcaatgttactttgagaactctctatccacagaatgtataattcggtcagccagcagatctgatgggtgtcagatgccaaaacttttttgccagaatctaccaccccctttgccaccaaagaaatatgctataaccagtgtgccacagtcagagaaaagcgaatctacacctgatgtcaaacttacagaggtgtttaaagctacctctcatcttccgaagcacagtttaagtacagcttcagaaccaagtttagaagtgagtacacatatgaatgatgaaagacataaagaaacatttcaagtgagagaatgttttggcaacacaccaaactgtccatccagctcctcaactaacgattttcaggcaaactcaggtgccattgatgcattttgccaaccagaactagactctatttctacctgtccaaatgagacagtttcattaactacctatttttcagttgatagctgcatgacggatacatatagattgaaataccatcagaggcccaagctctcttttccagagagcagtggcttttgtaataattcactatcttag

SEQ ID NO: 289881 - DNA, 1000 bp, Homo Sapiens; identical to SEQ ID NO: 222976

SEQ ID NO: 289882 - DNA, 1000 bp, Homo Sapiens
ctgcctcaacagagtgatagttccttcctcagagatcacctatgggatggtcgtggcagacctgttccactccttgttggcagtcagcgcagaaccttgtgtattaaagattcagagcctttttgtgttagatgaaaacagctatccattacaacaagatttctccctcctggatttttatcctgacattgtaaagcatggagccaatgcccgtctctgaggccagaggaagaaattgcaggcatttcaaggaagaagtactgaaatgatttgtcttttgaaataaatgaatgacagggcttttgctttggattttttatgaaatatattttataaagagaattgcactagatatataaattaaaacttttttctaagaaaatcctgtgaggtttaaaaagattgtttttgtcttttggtttcttcctttctcctggagaaatgatctaccagtcaaggcaatatgtagcagatccctgggaattaaaggtttgcccatttgttcactgtatttagtccctgctacattccaggcattgtactaagtatggggaaccacagagaagacattccctcagaaactgctgcagtgctttcgcttatccctacctaaaaaaccgtcaatgtgaaatcatttccttgattataactataatgataatggattagtttatataaacctatgtttagacaagttcaagacaagcgtgtctttctataaaaagtattgaaaatgaaggaaatgagatcatgtttcaatttattaaagcagggaagagcgttctgtggttagttcgtgtctaggatttgagtgccttactgaatgcatttaccagcaaacatgtagcaatctgttctctcattgtgattgtggaagaagctcatgtaaaatgatagtcattaatgaggaagtatggcgtggtacttattctgtaagttcagagtatgctgagtgttaatagattatcatattgcctgaaaataaattcatgatgacatg

SEQ ID NO: 289883 - DNA, 1000 bp, Homo Sapiens
gcaggagctgcctgagcctgtgtcctcaggtgggaagccacagaagggcaagaggcagggcagtcaggccaagaagagcgaggcaagcccagccccccggcccccagccagcctagaggttcccagtgccaagggccaggtcgctggccccaagcagccaggcagggtcctagagcttcccaaagtaggcagctgtgctgaggctggagaggggagccgggggagccggccaggaccaggttgggctggcagtcccaaaactgagaaggagaagggcagctcctggcgaaactggccaggcgaggccaaggcacggcctcaggagcaggagtctgtgcagcccccaggcccagcaaggccacagagcttgccccagggcaagggccgcagccgccggagccgcaacaagcaggagaagccagcctcctccttggacgatgtgttcctgcccaaggacatggacggggtggagatggatgagactgaccgagaggtggagtactttaagaggttctgtttggattctgcaaagcagactcgtcagaaagttgctgtgaactggaccaacttcagcctcaagaaaaccactcctagcacagctcagtgaggccctgcccaggctgagctgcttcagggcatcctgaggccctgactgccagctgaaggcgtataatttttccctccgtgtgccccacctacccgtccaagaccctctgtgctccccaccatcctggaccaaccaaaagctgaacggatgccacactgtgctggggccccttgacctcagcagagccgcttcctggtgctacgcagcctccacactcagagcccgtggactgggctggcctaagggccagggctgatggtactgctggcccaacactgctctctttgtgtttggtttttttgtttttgtttttattttgtttttttccaattctttacttttgatactgtgaagatctttcgtgccgaaagataaagcaacatttggacacag

SEQ ID NO: 289884 - DNA, 1000 bp, Homo Sapiens
gactctggcccaagatccaggggctgtttagctccgccaactctcccttcctccctggcttcagccagtccctgacgctgagcactggcttccgagtcatcaagaagaagctgtacagctcggaacagctgctcattgaggagtgttgaacttcaacctgagggggccgacagtgccctccaagacagagacgactgaacttttggggtggagactagaggcaggagctgagggactgattcctgtggttggaaaactgaggcagccacctaaggtggaggtgggggaatagtgtttcccaggaagctcattgagttgtgtgcgggtggctgtgcattggggacacatacccctcagtactgtagcatgaaacaaaggcttaggggccaacaaggcttccagctggatgtgtgtgtagcatgtaccttattatttttgttactgacagttaacagtggtgtgacatccagagagcagctgggctgctcccgccccagcccggcccagggtgaaggaagaggcacgtgctcctcagagcagccggagggaggggggaggtcggaggtcgtggaggtggtttgtgtatcttactggtctgaagggaccaagtgtgtttgttgtttgttttgtatcttgtttttctgatcggagcatcactactgacctgttgtaggcagctatcttacagacgcatgaatgtaagagtaggaaggggtgggtgtcagggatcacttgggatctttgacacttgaaaaattacacctggcagctgcgtttaagccttcccccatcgtgtactgcagagttgagctggcaggggaggggctgagagggtgggggctggaacccctccccgggaggagtgccatctgggtcttccatctagaactgtttacatgaagataagatactcactgttcatgaatacacttgatgttcaagtattaagacctatgcaatattttttacttttctaataaacatgtttgttaaaacagtt

SEQ ID NO: 289885 - DNA, 1000 bp, Homo Sapiens; identical to SEQ ID NO: 117687

SEQ ID NO: 289886 - DNA, 1000 bp, Homo Sapiens; identical to SEQ ID NO: 117688

SEQ ID NO: 289887 - DNA, 1000 bp, Homo Sapiens
gtgttggtgactaatcgactgatctcacttcccttccgctccaagcaccagttccggtggtacgggggaataccagtgaaatagtttggttctccctgaagcatctgcatattgaaagaacgctttccccactgtgtgtcttctccccctcctcgggtgatccgctcgcttcggcctcccggggtgctgggattataggcgtgagccactgtgcccagcctcacagctgcatcttaaccttacctttgcctctgcctctcaagctggtacctcctaatttacatcctaagagtggaaccatgtgacaaggactggagtgccattggctgtggactgttcaggcagggaagtacgagaccactcttgtattcaggggcaaccaaaggagagaattacgtacttgttgagtacaaactgcaccaagccctggagacccattaccaccgttaaccctcaatacagctctgctagtaagggattcgtctccccaaatgaaaaaaaaaagtaatctcagaatgttggccgggcatggtggctcacacctgtggtctcagcctcccgagtagctgggattatgggcgcccgccaccacgcccagctaatttttgtatttttggtagagatggggtttcactgttttggccaggctggtctcgaactcctgacctcatgatcctcctgcctcggcctcccaaagtgctgggattataggcatgaaccaccgtgtccggccatatattttcgtcttttgaagactgttatatacatgaaattatatggtatgtagcattttgagagcgacttcttttgctatgagtaatacatttgagattcatccatatttctcagtatattaatagttcttatttctgagtcactccattgtgtggatttactactgtttgttccccagttgaaggatgtttaggatctttgcagttttggacaattacaagtaaagctgctataaacatttgtatgcaaaaaaaaaaaaaaaaaa

SEQ ID NO: 289888 - DNA, 1000 bp, Homo Sapiens; identical to SEQ ID NO: 222979

SEQ ID NO: 289889 - DNA, 1000 bp, Homo Sapiens; identical to SEQ ID NO: 222980

SEQ ID NO: 289890 - DNA, 1000 bp, Homo Sapiens
gaaacagaagaaaacttgagaagtagtgtgattaatagcatcagagagataaaagaggagattggaaatttgaaaagttcccattcaggtgtcttggaaattgaaaattcagtagatgatctgagtagcagaatggacatacttgaagaaagaatagacagtctagaagatcaaattgaagaattctctaaggatacaatgcaaatgaccaaacagataattagtaaagaaaggcaaagagatatagaggagagatctagaagttgcaacattcgtttgataggaattccagaaaaggagagttatgagaatagggcagaggacataattaaggaaataattgatgaaaactttgcagaactaaagaaaggttcaagtcttgagattgtcagtgcttgtcgagtacctagtaaaattgatgaaaagagactgactcctagacacatcttggtgaaattttggaattctagtgataaagagaaaataataagggcttctagagagagaagagaaattacctaccaaggaacaagaatcaggttgacagcagacttatcactggacacactggatgctagaagtaaatggagcaatgtcttcaaagttctgctggaaaaaggctttaatcctagaatcctatatccagccaaaatggcatttgattttaggggtaaaacaaaggtatttcttagtattgaagaatttagagattatgttttgcatatgcccaccttgagagaattactggggaataatataccttagcactctagggtgactacaaacaatatgctttcctcccccagcatgcatccaaaaatcaacaagtaaaacgaaagtacacttctacccagaaggatggacagctaatagcgtacttggggatgaggagcaaggaatattacagatattacctagatgttaataaagggtatgtttaaaaaaaaaaaaaaaaaaaaaaaaaaaaaaaaaaaaaaaaaaaaaaaaaaaaaaaaaaaaa

SEQ ID NO: 289891 - DNA, 1000 bp, Homo Sapiens; identical to SEQ ID NO: 117691

SEQ ID NO: 289892 - DNA, 1000 bp, Homo Sapiens; identical to SEQ ID NO: 117692

SEQ ID NO: 289893 - DNA, 1000 bp, Homo Sapiens; identical to SEQ ID NO: 222982

SEQ ID NO: 289894 - DNA, 1000 bp, Homo Sapiens; identical to SEQ ID NO: 222983

SEQ ID NO: 289895 - DNA, 1000 bp, Homo Sapiens
agaagacaggccagtctgaagaagaggatggtccatggttgtcttgctctgaaagcttggagagctacattgaagacgagctcttcattcagctttgactccacctgcacccctggcgggggcttgcactaacaatgtttgggtctcagcaaaaaacaaaaccaagcacacacatctttccttccatgtattgaaaaacattggtttgatttgctctaagttttcccaatgatgtttaaaagctttgagaaggaaagctgctttggtgtctgaggtgccacttctgctgtgaatcctggctttatccaggttgatctactgtgatagatgctgatttagagggaacagaggtcagggaagcactgggtcttggtgccttttgccgctttttttttttttttttttttttttttttgagacggagtctccctctattgcccaggctggagtgcaatggcacgatcttggctcaccacaacttctgcctcccaggttcaagcgattctcctgcctcagccacggcaccttgcaaatatcagctccttggaacaggtgaagttccaggtaccaatgccaatcagaggaaggcagtttggttcaggctttggagttagaaacacctgaagttgaatctgggctctgttgcttccttctttcatgggctagagcacgactctttacctctctcttggcctcaatttcctcacctgtaaaatagatgaggaagctgctcacttattattgtctcgttctgaaagcttggaaagctacatcgaagatgagctcttcattcagctttgatttgacctgtacccctggtgggggattgcactggcaacatttgggtctcagcaaaaaaaccaagcacacacatctttccttccatttattgaaaaacatctttgtaagatccattcattgaaaaacataatccatttattgaaaaatatctttgtaagatcacctgctaaatatgaaaatctgaaaaaaaaaaaaaaaa

SEQ ID NO: 289896 - DNA, 1000 bp, Homo Sapiens
atgtaacataggtatctttttctaaaaacttcaagtgtttgattaaaatagagaaaataatttttaaaataatagataaaaattttaaaaacagccagaaaaagtataatttatactggttagggtttaagatggcatggatttgacaaagataacaaagacagaatcatctatatattcattcattacgtgttactgtagtttattggaatctgttaatgccttcctctagtagttaaaggtttatcagtatttctattataaacctctattttcaggggtttcaatgtgcccttaaaattgtgctggggctgcagcaaataaataatattgggactcatattcagtctttggaactagttttttttccatttaatttaaatgacaaaattgcatagggataaatgtacagttttactaaggtttagcacctttgatcttttctaaatcaggaaaaaaatctatgcatattgaggttcacagatgaaatattctttggcatactttgtagactttgaccacttaaaatactaagtggccaaatgataaaaaaaactgctccctgcacatgagtgtaaaaacatgtttgtaattttaagtaaaatggactgatacccaaataccacagactcacactatattacagaatgatgtaatacctggtaattctccagaagatagacttcagacccttaatgccatttaaatatagtttttgtggtttaatcttatgagtagattgtaatgaaatcattacctttgaaacatcaaacacttctttaagctttttttttttaatgtcatgaatcaggaaggatacatagtgattcgtatacaattttgtctgcagcattcttgaatatttttaacactgtgtaatccctgagcagcacaaaacttttattccgatgaccagttacacaattcctgtttttattttgtcctgttgtgctcatcttctatgaaaaataaatgattattaggcaaaaaaaaaaaaaaa

SEQ ID NO: 289897 - DNA, 1000 bp, Homo Sapiens; identical to SEQ ID NO: 222984

SEQ ID NO: 289898 - DNA, 1000 bp, Homo Sapiens; identical to SEQ ID NO: 117694

SEQ ID NO: 289899 - DNA, 1000 bp, Homo Sapiens; identical to SEQ ID NO: 222985

SEQ ID NO: 289900 - DNA, 929 bp, Homo Sapiens; identical to SEQ ID NO: 117698

SEQ ID NO: 289901 - DNA, 1000 bp, Homo Sapiens; identical to SEQ ID NO: 222987

SEQ ID NO: 289902 - DNA, 1000 bp, Homo Sapiens
acatggcggcgcccagcggagggtggaacggcgtcggcgcgagcttgtgggccgcgctgctcctaggggccgtggcgctgaggccggcggaggcggtgtccgagcccacgacggtggcgtttgacgtgcggcccggcggcgtcgtgcattccttctcccataacgtgggcccgggggacaaatatacgtgtatgttcacttacgcctctcaaggagggaccaatgagcaatggcagatgagtctggggaccagcgaagaccaccagcacttcacctgcaccatctggaggccccaggggaagtcctatctgtacttcacacagttcaaggcagaggtgcggggcgctgagattgagtacgccatggcctactctaaagccgcatttgaaagggaaagtgatgtccctctgaaaactgaggaatttgaagtgaccaaaacagcagtggctcacaggcccggggcattcaaagctgagctgtccaagctggtgattgtggccaaggcatcgcgcactgagctgtgaccagcagccctgttgcgggtggcaccttctcatctccggtgaagctgaaggggcctgtgtccctgaaagggccagcacatcactggttttctaggagggactcttaagttttctacctgggctgacgttgccttgtccggaggggcttgcagggtggctgaagccctggggcagagaacagagggtccagggccctcctggctcccaacagcttctcagttcccacttcctgctgagctcttctggactcaggatcgcagatccggggcacaaagagggtggggaacatgggggctatgctggggaaagcagccatgctccccccgacctccagccgagcatccttcatgagcctgcagaactgctttcctatgtttacccaggggacctcctttcagatgaactgggaagagatgaaatgttttttcatatttaaataaataagaacattaaaaagcaaaaaaaaaaaaaaaaaa

SEQ ID NO: 289903 - DNA, 1000 bp, Homo Sapiens; identical to SEQ ID NO: 222988

SEQ ID NO: 289904 - DNA, 1000 bp, Homo Sapiens
ctcatatatttgtatcagaactgtatttttatgttatattgtatagtttgctctcctgcccctctccttaaaactgaatggtgccaataatttgatactaatgactacaaaaaaaggtaatgcctcatttactagtattgttgtaaaatgaggaatgtatgtgaatattcagataaccgaggattaaccctttaagtgctgaatctttaaaattttaatatatttttttttgagggaaatctttctaaaatgtattacgcacttccctgccttagtaaacagagtatactggagagtatttaaccttttcttgatgagtcatggtcatgattataaacatcagccccttttataccttggtacggtgcagtgatatcattaagagctatcaatatgtgtagggcttggcttggccttttataggatattatgctgttctcactgatggttttttactgctctctgctctgtcagtggagctatccggggcaattgtagcgtttgggtccttttacccctatgtcccccggctatacttttaaaacagctttagctgttctttatcttgtgcacatgatacaaaatatgttcccgtacaatatggggctgtcacttcttgccaacccagcaccctcttcctcttctaacctgctttctgaggcttctgctcttcacctcctgctcgctgatggaaacctccagggcaaagctgaaggtttcttggggaagccaggaaagccagtatttcctatgtgtcagatctgcttggcttccaagaagggatgcatgggctttttggccagtgtttccaggaggctctgggcttcctgcttcttccccgcttcccccagagttcacagatgttgaagtttctgaaggttgacgtcactggaagtctgaccacaaacaagttggctgttactgtatttgaaacccagtacctttggcagctcacctctaaccagtaaaataagaggattccatggtttctttttttttt

SEQ ID NO: 289905 - DNA, 1000 bp, Homo Sapiens
aggaggagtaagagcaggccctttctgacatgctttagcagagataacttatcagggctagtttaaacaaatgtgtataggaaaggatgttatttatatattcttacaagagtgtaagggctcacacatttactgtactcagatctgaaagacaatgttgcttcttgatttttttctataatcactatgaccgtgttcacgattccctactctgcaactctcagcatgcatcatgatgattctctaacactgtctgtcaccttcctgtatttccacagagcatgcaagaacttctacaaaacttctataccacacagaagctgaaagagactctggggcactaaattcagatcctttctccacacagcaatgacatttatcaatctgactcaggtgtggctgttgcccctttttgatatggagggaacactgaaagacagtttccttctggagttccaaatgcaatatagaaaaaaaaaccctgtgactctggattttattttaagttctctaacaagactcctaccttgagatcttagtctaggtaaagaaaaaaaaaaaaaggtcatgaaacacaaatgtcctcaactgtcatcattctatgtttactttctcccaatcacatcacctgaggtagaagagatttttcagttgctatttctcttcgtaatgaattttctttacatcctgtccacactgctggagatactaagtcccaacctaaatgatggaaggagcatctcccctcttgtctgtggaagatatcacatgaactacctaattttcaagcatggatctccatatttcaaaggaaagtttttaaaatgtttttaaaacttcaaatatctcaccacagtgaattatgggtaaggtgataatatgtttaattagcttgatttaatcatcccacactgtatacatatgccaaaatatcattttgtatgccataatatatatgatttatgaattatagtaatattaataaaagtgttaaagcttt

SEQ ID NO: 289906 - DNA, 1000 bp, Homo Sapiens
gagtgtcttcatcatctgctacttccagggcccccgctgtctccttccttcggtggggagctccatatactcctataactcctaaagaggggaggcagcactgggtgatgcccaggctgaagagccctcagcattcctgccctggaccttcatgctagcccctttccctcccctgaacctggttctgcattccccaccacctcccaggatggcaaggaagtgagaggtgggcctttggtcccacccccatcccctctatatcccacccctgaagtcttatcgctttaagcactgccctttccaggtgcttcttttcatgtgatgaggccctgtgaagaagggacaggatatacagacgggggcagctggagacagttatgatgagtgccggctttgtgtctgagcattctgctcccatggacatccccaacaacagcagggaccaacctatgtcactgtcaaagggcagctgagaagggcctgagccccagggacccctcacctgatgggaatgagagtgtggggagcttgcttcttggctgaatggtctgctggggtctggcatagaaagcagatggcttaattcggtctggttcctttggagagggctgggttacctgggccctgtggccttgggcctagagaagggacactgggcttggaccctgattgctggccattcttacctttcctactccccagttcaggcttcagagagcccctgacgcctgcaggaacatggcagaggagacaccgtctgtcttcacaaagtacgtcctccctccttgctgcctcttcccaccagcctgacttatccagggacagagcagtagatgcctggcactcctcgatgcccagtgaaaccagactgtgcttccccacccccaccaccatgccccatgctcactggctcatttcttgggagggcttagagctggataatataagttcccttgggaaaaaaaaaaaaaaaaaaaaaaaaaaaaaaaaaaaaaaaaaa

SEQ ID NO: 289907 - DNA, 1000 bp, Homo Sapiens
cctatttgaaatataatgtttctcttgtaagtgatatgataaataaacccctaattagccttagaagaaaaaccactgcaagatattaagcgtgtgtaaatgggctttagtctggaaaccaaaaaaaaaaaaaaaatttagtcattctataggatcatgtgaaaatatttaatttgctccttttaattctgtataaacaaatcagaggttcctgaggttcctgttaaatttttaatggctaatagcccagtgccatccagttgaaaaaacaacagcaatcacaaagtagaggtttatattgtgcggcttttatattcagctattagagtgttattggtagtgtctagccttttcctccacgacattccttgacttaatccatttgggcctattatagacaaaatagagcttctttctagatataaggtctttgaggcagggctcagtggctcattcctgtaatcccagcactttgggaggccaaggcgggcagatcaccttaggtcacgagtttgagaccagcctgaccaacgttaagtaaccccgtctttactaaaaatacaaaattagccaggcatggtggcacatgcttgtaatcccagctactcgggaggctgaggcaggagaatcgcttgaacccaggaggtggaagttgctttgagccgagattgcaccattgtactccagcctgggcaataagagcaaaactccatcaaaataaaataaaataaaatataaaataacttaaaaagaactttgaataaaattctatgaaaaaagacactagaatgctgttcttaattttaatagtgttaagataggtgttagtgtggtctgttctttacctccctttatttggtgcagagaagttagatcctgctaaatttcaattaagaggggaccttaaaataaggatcaatctcttatttaaccctgtaagttactttaaagctaatacaagaaaaacaaagacaagtgaaagtaaggaaacagaaattgc

SEQ ID NO: 289908 - DNA, 1000 bp, Homo Sapiens; identical to SEQ ID NO: 117702

SEQ ID NO: 289909 - DNA, 1000 bp, Homo Sapiens; identical to SEQ ID NO: 117703

SEQ ID NO: 289910 - DNA, 1000 bp, Homo Sapiens; identical to SEQ ID NO: 222990

SEQ ID NO: 289911 - DNA, 1000 bp, Homo Sapiens
ggccggggccaggagtacttccaccccggcgggggcagcccggccgctgcctaccaggccgccccccctcctcctccgcatcctccgcctccgccgccacctcccccctgcggcgggattgcctgtcacggggagcccgcgaagttttacggatacgataacttacagagacagccgatttttacgacccagcaagaggccgagctggtacaatatcctgactgtaaatcgtccagtggtaatattggcgaggacccagaccacttaaatcagagctcgtctccttctcaaatgtttccgtggatgagaccacaagcagctcctggtagacgaagaggaagacaaacctacagtcgcttccaaactctagagttggaaaaggaatttctttttaacccctatctgaccaggaaaagaagaatcgaggtttcccacgccctagccctcaccgagagacaggtaaaaatctggttccagaacaggagaatgaaatggaaaaaggaaaacaacaaggacaaatttcccgtttcccggcaggaggtgaaggacggggaaacgaaaaaggaagcccaagagctggaggaagacagagccgaaggcctgacaaattaacttctacctttaaaatttaccacagactattaaaactaataatcaccatatgctgtggacaccacctattttctttgttggaaaggaccttacctgtgtttcaagctaccttcatgtcactgctcttgaggttttctgtgctttgagagggatttgggtgtttaaaaaagtttctagtatcacatagaagctgtccttgagctgtcctatggaagggtaatttgatactgaccttgtagctatatttttataatggtttttaatgtctgagctagtgatttgcctcaacaacgtaaacttcctaatgattagcacttaataattgcatataaaatgctttattaattaaacaagtgcacttgaacattttaatatttgtggtgagtaa

SEQ ID NO: 289912 - DNA, 1000 bp, Homo Sapiens; identical to SEQ ID NO: 117704

SEQ ID NO: 289913 - DNA, 1000 bp, Homo Sapiens
aggagagagaccaaccatatttgggatgagtgtaaaagctttcagaaataagttacaaatctttgtagatgaaaataatggaaggaatgtggagcaataaatgtatcaaatgttgtagtatcatcatgaagattcagagaatttacactaggaacaccttataagttgaataaattaaggaagcattttcccattgaaagtgtgttccatggaaagtcacattccagatttgaagctgtgtttttgtaaaataaaatcttggtatgaacagttgacttcatggtggagtataaagttgtttttttaaaaatatgtaaataatgttcaggaaaaacgcagggaacagagtcttaaagttaatggatatttaatgtgactttcctgagttaacactgaatagtatttctaaaattttttgtactttattttttaatgtaacttgttctatctatctatatatatatttgatagtttgtggaataatatcccccagtattttccatattaaatgctaattatcttttgatttctttttcataagcagatctggcatttattacagggctgccgcttaagagaactcattataatgaacgtttattatattttgcagttccatgcctgttgtccattgattgacatgagcacccctgttttctctggagaaatacctcccctctctggggtgcttcctgtggtagtgtctttcaggtatccgttccactagctacaggtgagcattttacccattgttggataatggtaatctctttttcagaattttgagtctgtaattcatttgtacatgaaccagaaaatgtgggaactcattcattcttgtcccagaattctgttgagaacatccattcattctggctaattgattacaagaataactgtggatacgatccctttagaacctgcttctctgatctgtgtgtttcctcacttctcaataaaaatgtcttttgcttttaaaaaaaaaaaaaaaaaaaaaaaa

SEQ ID NO: 289914 - DNA, 1000 bp, Homo Sapiens
aatgctgcttttggtgccaatgattttcatcgcatctacattggttgatctaagtcaagagaagaagaggagctggctagtcaggaacttattcattaaccaccaaacctctacctcttctctccttgactgtcacctgtaggacagtttatcagtcaactacctttcctccagactttacttccaggctctcctcttcagtagctggatgactttagcagaaaggactggtaaatacaagccttgggtttcagaatgaattagaaacaaataactcttactgtcttccctcccagctttgtttattttgtgcttttagacttttcagtgttttctttttccagcccactgtataaacttggattgtccattcctcctgaagaaatcaagttggtatttttgatgtggaaaagggaacaaaagtggaaacatggctacttttggggagtgatattttaaaaaataagttgtctatgggcacaaagttttcttcatttgtgtagcaaacttcttgtgaatgtggattacaaaatggtataattgtgctactctcccctgggtggtttgcagccctaatgaaattatgtctaggatgattcagtctatttcccatttactagcagagtaacttgttaagatcagctggctttcttgttaaagttatttaagttttgaatgctctactacttcaagtctttaaatttcttgagactagaataattttaaataatatgaccctttgtcttctaatgaaataaagattgaagaggttgagtcaggactgagctggtgaagaaatcttgtgggtattctggaaatttgatacggagagaacttggtgagctatgaattactctcagtctcctttttacagggttgttgtgatccctcttttccagaaaattctgtggaatgtttctgtaggactttgttctccacaagcttgaattaaagcaggattcagtttgcaaaaaaaaaaaaaaaaaaaaaaaaaaaaaaa

SEQ ID NO: 289915 - DNA, 1000 bp, Homo Sapiens; identical to SEQ ID NO: 117705

SEQ ID NO: 289916 - DNA, 1000 bp, Homo Sapiens; identical to SEQ ID NO: 222992

SEQ ID NO: 289917 - DNA, 1000 bp, Homo Sapiens
ttaaggatctctaccaagacgtgctgtgtctcaccctgtttgacagagaccagttttcaccagatgatttcctgggtcgtactgaaattccagtggcaaaaattcgaacagaacaggaaagcaaaggccctatgacccgccgactgctgctgcatgaggtccccaccggggaggtctgggtccgttttgacctgcagctttttgagcaaaaaactctcctgtaggggttctaaaggacagcaccagcgggacagcccacaaggctggggctggagaatgagagactgcgctctcttggggctgagggagcaccatgcagcttcacccctcacaaagccatgcacgctgggggctctgttttcctgcacactaaatagctagcaatctatgcaaacacctttcccataaagaaaccaaaccccatagtacagtgccttgtcctagtgttcacatgttcagctctgtttgtttagatgccaaggtttccattttcagggctataaaaagtattacttggaaatgaggcatcagaccaccagatgttaccgctcggttgaatgtgtccaccgtggagtggtttggtgacgctgtaaccattccacgccagtgacctctgctgggtcacagccactcaggaggggaagggtcaggatgagaggctgcagcctcgacacttggcgcggcctgatactgaaatagcgtctactcgtgcactgaataaaaacagaaacttgatcattttattcctgattagattttatcactctctgctaagacaatatagtctggagtataagtgggaaagcttgatttaaatactgtgaactctaataatgtggaaaatatttttcaactttaattttctgaagtataaattatttatgtaaattcattgtttttgcatatttcttaggacatgcatctttaagctttatcattgcccatatgtacagaaagagaataaagacatatgtttatggatgaaaaaaaaaaaaaaaaa

SEQ ID NO: 289918 - DNA, 1000 bp, Homo Sapiens
cattcaggctaattagcatgagcccatgtcagtgtttaaattaggccaaaacaaagaccaaagtatgaattttaatagaaaaatgtgacctcattactgacattgtactgcagataatgttaaagtgaaagaaaaaataaggaaaaggggaaaaaggaggaaaaaggaaagcaagaaaagacaagtgaaaagattagtaatatattcattgtcattagttactgaaaatataacaaattgaattttaataatttttattaataaagtataaaattaaatgatgatagaaagtatatgcctcctataaatatcttccatttggtagcttttaatagtttcaaagccctttcacatatgttttaagtaagtcttttgagaaatacttgtgagttaatgggacttaaaccaacagaaaaggaaagctaatttagttataaatcaagcctgaggtttcagatttctggactaaaaatatggttcagtttgtgctgctgtgggatgaagaatgggcagagaaaatccacagtgcaggcatggggataaatggcatttggcacttagctgcagggtttgggggacaacagggagtggtgggatggtggttaagtaagggtgcatgccccacctgaagctctacagtggctcagctccaactgagtgttgccatgggaaaatctgatggggccagatctgatccttcagagaatgaggaattccaggttgttatgtgaattctcacaatttgtaaatgtcggcttgccattcagcttttttgtttgtttgttttaaataatatcatgtgggtcaaacaaactatgttaatggtagccatctggcctggggctagtagcttattgcctctggccagtggtgtgctaacaaaagtttaaccagcagctctccaacaaaaaagggaggtgggctgctctgcctatgcagtagccatgcttttattcctttactttgttaataaacttgctttcactttaaaaaaaaaaaa

SEQ ID NO: 289919 - DNA, 1000 bp, Homo Sapiens; identical to SEQ ID NO: 117707

SEQ ID NO: 289920 - DNA, 1000 bp, Homo Sapiens; identical to SEQ ID NO: 117708

SEQ ID NO: 289921 - DNA, 1000 bp, Homo Sapiens
tcagagcaggaggattctacgaagccttggggatcagggtcagtgtgagcagctaacatcctacctcaaatggaacaggattttttgatgctttgctctaatggaactgttttaaaaatttttttttctttttaatattttcttctggtcacaaaataaagaaatttgggatgcaaagtacctaaagatctctgatcctaagaagttacttctggccaggcgcggtggctcatgcctgtaatcctagcactttgggaggctgaggtaggcagatcacttgaggtcaggagttggagaccagcctggccaacatagtgaaaccccgtctctactaaaaatgcaaaaattagccaggcgtagtggtgcgcacctgtagtctcagatacttgggaggctgagggtggagaatcgcttgaacctgggaggtggagattgcagtgagtcaagatctcaccactgcactccagcctgggcgacagagggagactctgtctcaaaaaaaaagaagttacttccaagacagacttttaacatgtaaccagcacaaagcaatgtcagggaggagtgatacatgacaataaatgagtcagatgagcaagaaggccccagaacccatgccccaaggcacaaagaggagctcagggtaggcccaaagattcgaattccttagattactaaatcacatgagcggaccttgtctgtcagataagatttttacctggaaattccatgaccaatacatgtgcaaaagaaaatgatgggttgaatttactgattattgacctaatggatggctttttaaaatgttttaataaaaagcagaatagatgtttgtttttctagtggttataccaagttatacttcctgttttcacgtgtgaaagtaacatgggacatgcctttcttttccgatcagtttatttaagctatacagcaaactttggcatttatgtggagcatttctcattgttggaatctgaataaaccaattacaaaataa

SEQ ID NO: 289922 - DNA, 1000 bp, Homo Sapiens; identical to SEQ ID NO: 222995

SEQ ID NO: 289923 - DNA, 1000 bp, Homo Sapiens
atgactcatccccgggagtgttgagtaagtgaaattttgctgtattcatgtttttgtgacttataaaataggatgataaggagagaacatgaactctggagtcagacctgttacctcggacatgatactcttagctttgtcatttagtatttgagtaattttgggcaagctaacatctctggtcgttctcatctgtaaaatgagaataaatgaaacccactaaccagaattggtatgaaaatgaaatgtggcagaaaaaaaatgaaagtgaatagtatcaccactgacacacaagcactaaaggcccttcctgtctccatcaggtatggatttggggcaacatttggccagatcttgtttatctttctgttcatctattctgtctaattcagtgctttgtttacaacgaatgtcttacaaatgctgactgaacactagcatacctgcatgaacaacaggtaaataaattttagatgtgttttaatgtttattaatctatcctgtcagagaagaactgccagttatagataaatatgatgccaggtcagggctgaagagttgggcaggttgttatctgcatggggtcactaggttccagtggagaggtgggggctaagctctcacccgctctgcagccacctggcacccggtttcagtttcctgaaagggagccttctacttgctgacgactgcctcatctcttctgaggtttcctctgataaacaattttctctgctttttttttttaattatgaaatacttaaaatgtaaaggagataatgtgacacacatttacccataattgagattgccataattgctataactttttcaaaattttgacttaatttcagacttttagaaaaattggccaggtgtgatggctcatgcctgtaatcccagcactttgggaggccaaggtgggtaaattacttgaacccagcagttcgagacttgcctgggcggcatagtgagaccttgtctctactgaaaacaaact

SEQ ID NO: 289924 - DNA, 1000 bp, Homo Sapiens
ccactgtgggaagcacaggacgatgggaaggtgccccacatcgtccccaaccatcacctgccattgcccacttactacaccctgcccaatgccaccgtggctcctgaaacgcgggcagtaatcaagtggatgaagcggatcccctttgtgctaagtgccaacctccacgggggtgagctcgtggtgtcctacccattcgacatgactcgcaccccgtgggctgcccgcgagctcacgcccacaccagatgatgctgtgtttcgctggctcagcactgtctatgctggcagtaatctggccatgcaggacaccagccgccgaccctgccacagccaggacttctccgtgcacggcaacatcatcaacggggctgactggcacacggtccccgggagcatgaatgacttcagctacctacacaccaactgctttgaggtcactgtggagctgtcctgtgacaagttccctcacgagaatgaattgccccaggagtgggagaacaacaaagacgccctcctcacctacctggagcaggtgcgcatgggcattgcaggagtggtgagggacaaggacacggagcttgggattgctgacgctgtcattgccgtggatgggattaaccatgacgtgaccacggcgtggggcggggattattggcgtctgctgaccccaggggactacatggtgactgccagtgccgagggctaccattcagtgacacggaactgtcgggtcacctttgaagagggccccttcccctgcaatttcgtgctcaccaagactcccaaacagaggctgcgcgagctgctggcagctggggccaaggtgcccccggaccttcgcaggcgcctggagcggctaaggggacagaaggattgatacctgcggtttaagagccctagggcaggctggacctgtcaagacgggaaggggaagagtagagagggagggacaaagtgaggaaaaggtgctcattaaagctaccgggcaccttagctca

SEQ ID NO: 289925 - DNA, 1000 bp, Homo Sapiens
aggtagtcaggaggttctcgtggtcctttacacagattttacagctttgggtttcattttgtttagctaaagtcatggggacaactcttcaatttagaacttaagatgaattataaaaatgatggatataagtggtagctctatctggtgaagtgtcttgtcagtaagtgaaacatttttttgtggtggcttatccacaaacagtttagttgtagaataaaacttatgagtgacatctggaaagtaacaaccatgctaagatggcaaacacactggaaacaattgggccacttggctttcttttgctgtattgttttataagcctgctttacctccccgtcttggaaacaagttttagtttattgctttggagactagagccaatagtgtaatgttctcaaaggaaacagacttgagttgttggattagaggaactaactcaacttctaattttttttgttgtaattatggcactgtcatgttttaacatttgcaactagggatagtaagtacaacatttttaactctcatttggcagactactactaatcacagaccacaagggtaatgaccaaatttatgtggttgttacacttccatagttgtcttagccgaatccttccatattcttatgattacttgggttaaagcttctgtgaggaccttttggctcttaagatatcctaaatatttaaaatatttagatatcctaaatataggatatagagtttgtaccaaatatgaatgaatattgttcaaagcaaggagtatgttaaaatgaccagacacctgtttgataaatagtttactgaactagcagacgtgtggaaaaagaatcagatcttgattcttctgggtttatactggttgtaaaacagaatgatattagaaaatgttttccttgtttaagtggtagttgaacatagaacttgggtattatagatcacttttcactttttggaatgttttgtattgaaacttaatacaactttaacatggc

SEQ ID NO: 289926 - DNA, 1000 bp, Homo Sapiens; identical to SEQ ID NO: 117710

SEQ ID NO: 289927 - DNA, 1000 bp, Homo Sapiens
aagccaaggctgcgtcgaactgtcctggcaccaaatcccatatattcttctgcagttaatggggtagaggagggcatgggagggagggagaggtggggagggagacagagacagaaacagagagagacagagacagagagagactgagggagagactctgaggacatggagagagactcaaagagactccaagattcaaagagactaatagagacacagagatggaatagaaaagatgagaggcagaggcagacaggcgctggacagaggggcaggggagtgccaaggttgtcctggaggcagacagcccagctgagcctccttacctcccttcagccaagccccacctgcacgtgatctgctggccctcaggctgctgctctgccttcattgctggagacagtagaggcatgaacacacatggatgcacacacacacacgccaatgcacacacacagagatatgcacacacacggatgcacacacagatggtcacacagagatacgcaaacacaccgatgcacacgcacatagagatatgcacacacagatgcacacacagatatacacatggatgcacgcacatgccaatgcacgcacacatcagtgcacacggatgcacagagatatgcacacaccgatgtgcgcacacacagatatgcacacacatggatgagcacacacacaccaagtgcgcacacacaccgatgtacacacacagatgcacacacagatgcacacacaccgatgctgactccatgtgtgctgtcctctgaaggcggttgtttagctctcacttttctggttcttatccattatcatcttcacttcagacaattcagaagcatcaccatgcatggtggcgaatgcccccaaactctcccccaaatgtatttctcccttcgctgggtgccgggctgcacagactattccccacctgcttcccagcttcacaataaacggctgcgtctcctccgcacacctgtggtgcctgccaccc

SEQ ID NO: 289928 - DNA, 758 bp, Homo Sapiens
catgcttgcctactcctctgtccactgctttcgtgaagacaagatgaagttcacaattgtctttgctggacttcttggagtctttctagctcctgccctagctaactataatatcaacgtcaatgatgacaacaacaatgctggaagtgggcagcagtcagtgagtgtcaacaatgaacacaatgtggccaatgttgacaataacaacggatgggactcctggaattccatctgggattatggaaatggctttgctgcaaccagactctttcaaaagaagacatgcattgtgcacaaaatgaacaaggaagtcatgccctccattcaatcccttgatgcactggtcaaggaaaagaagcttcagggtaagggaccaggaggaccacctcccaagggcctgatgtactcagtcaacccaaacaaagtcgatgacctgagcaagttcggaaaaaacattgcaaacatgtgtcgtgggattccaacatacatggctgaggagatgcaagaggcaagcctgtttttttactcaggaacgtgctacacgaccagtgtactatggattgtggacatttccttctgtggagacacggtggagaactaaacaattttttaaagccactatggatttagtcatctgaatatgctgtgcagaaaaaatatgggctccagtggtttttaccatgtcattctgaaatttttctctactagttatgtttgatttctttaagtttcaataaaatcatttagcattgaattca

SEQ ID NO: 289929 - DNA, 1000 bp, Homo Sapiens; identical to SEQ ID NO: 222997

SEQ ID NO: 289930 - DNA, 1000 bp, Homo Sapiens
cggcgctgctggggctgcctggcaacggcttcgtggtgtggagcttggcgggctggcggcctgcacgggggcgaccgctggcggccacgcttgtgctgcacctggcgctggccgacggcgcggtgctgctgctcacgccgctctttgtggccttcctgacccggcaggcctggccgctgggccaggcgggctgcaaggcggtgtactacgtgtgcgcgctcagcatgtacgccagcgtgctgctcaccggcctgctcagcctgcagcgctgcctcgcagtcacccgccccttcctggcgcctcggctgcgcagcccggccctggcccgccgcctgctgctggcggtctggctggccgccctgttgctcgccgtcccggccgccgtctaccgccacctgtggagggaccgcgtatgccagctgtgccacccgtcgccggtccacgccgccgcccacctgagcctggagactctgaccgctttcgtgcttcctttcgggctgatgctcggctgctacagcgtgacgctggcacggctgcggggcgcccgctggggctccgggcggcacggggcgcgggtgggccggctggtgagcgccatcgtgcttgccttcggcttgctctgggccccctaccacgcagtcaaccttctgcaggcggtcgcagcgctggctccaccggaaggggccttggcgaagctgggcggagccggccaggcggcgcgagcgggaactacggccttggccttcttcagttctagcgtcaacccggtgctctacgtcttcaccgctggagatctgctgccccgggcaggtccccgtttcctcacgcggctcttcgaaggctctggggaggcccgagggggcggccgctctagggaagggaccatggagctccgaactacccctcagctgaaagtggtggggcagggccgcggcaatggagacccggggggtgggatggagaaggacggtccggaatgggacctttgacagcagaccct

SEQ ID NO: 289931 - DNA, 1000 bp, Homo Sapiens
caccagcttcacccagggttggtacagaggatgctggcccagggagtacatccacagcatcttccaagtttgctccaaactggtgtgcttcctcctgggatggacttgagtcatttacagggaatatctggccccatcctgggtcagcccttttaccctttacctgctgctagtcaccctctcttaaaccctcgtcctggaacacctctgcatctggcaatggtgcaacagcagctacagcgctcagttctgcatcctccaggctctggttcccatgcagcagctgtcagcgttcagacaacccctcagaacgtgcccagccggtcaggcctgccccacatgcactcccagctggagcatcgccccagccagaggagcagctcccctgtgggccttgccaaatggtttggctcagatgtgctacagcaacccctgccctccatgcccgccaaagttatcagtgtagatgaattggaataccgacagtgagcagggcaggcagactcaactaagcccggacctgtggtggcacactgggcaggaccctgcttcatctcgggttggtttatgggcttttactttggagcactctgtgtgaagctgtttggtggaacccatgcatctggtgtggtccgcattatgatggaaggatcttaaccagtcgagtggagtgtacattgtctgaatacaggatgcacaatgttgtcaatcctggaaatggtctttcttttttgtaagatatgtgaatgaagtgttggtgtcctcaccaagaggtggcacctaagggttctgaggaaataaatgtatagacccttatgtacagacctgtgtataaacaacttttgtatatacatataggatagcttttttgaactatacagctgtacataaaagtagctgatattagttaggcctgtgtcaacagtttggatttttttcacttgtacatttgggattttcttttggttgattaaaattgcatatgctaagtgtgtgaatg

SEQ ID NO: 289932 - DNA, 1000 bp, Homo Sapiens
ttcatctatgttgcaattcaagtcataaactctttgttctctgcaacaggaggtaccacatttatcttgttgactgtgaagattgttcaacctgaattgaaagcacttgcaatgggtttccagtcaatggttataagaacactaggaggaattctagctccaatatattttggggctctgattgataaaacatgtatgaagtggtccaccaacagctgtggagcacaaggagcttgtaggatatataattccgtattttttggaagggtctacttgggcttatctatagctttaagattcccagcacttgttttatatattgttttcatttttgctatgaagaaaaaatttcaaggaaaagataccaaggcatcggacaatgaaagaaaagtaatggatgaagcaaacttagaattcttaaataatggtgaacattttgtaccttctgctggaacagatagtaaaacatgtaatttggacatgcaagacaatgctgctgccaactaacattgcattgattcattaagatgttatttttgaggtgttcctggtctttcactgacaattccaacattctttacttacagtggaccaatggataagtctatgcatctataataaactataaaaaatgggagtacccatggttaggatatagctatgcctttatggttaagattagaatatatgatccataaaatttaaagtgagaggcatggttagtgtgtgatacaataaaaagtaattgtttggtagttgtaactgctaataaaaccagtgactagaatataagggaggtaaaaaggacaagatagattaatagcctaaataaagagaaaagcctgatgcctttaaaaaatgaaacactttggatgtattacttaggccaaaatctggcctggatttatgctataatatatattttcatgttaagttgtatatttttcagaaattataaatattattaatttaaaattcgaaaaaaaaaaaaaaaaaaaaa

SEQ ID NO: 289933 - DNA, 1000 bp, Homo Sapiens
gccacaggaagaaacaccatggcaagaggaacagtaacagggcacatcaggggaaacacgaaacatacggccataaaactccttattagagagtctacagataaatctacagagacaattcctcaagtggacttggccatgattggttagtctcactctatcacacaggctggagggcagtggcaggatctcagttcaccccaacctttgcctcacgggttcaagggattctcgtgcctcagccttccaagtagctgggattacaggtgtgcgccagtacgcctggctagttttagtattttttgttacagacggggtttcaccatgttggctgggctggtctcaaacttctgatctcaagtgatccatctgccttggcctcccaaagtgctgggattacaggcatgagccactgcacctggcctacgtattaggctttatgtaagatgtacatagtactccatactcctttccttttcctcctattgaaactgttcctataaactttataaaattaatcagagaagaagagagggtgagaaacataaataatccaagcttgcaccacattcagcattaatcactaggtcactttgcttgctgaccccttcctcatagttgtttggctattgcttcagaattatgtggagtctgttacaagattatagttccccttaactgctctatagataacagcttgaacattatgaaatgctaagttttcccttcgagacattctttcaggtcctgcatactgatgaaactactgatgtcagctggtctgaaggaccctaccagaagctaaatcatcaaagaatgcaatttccatatcctaatgattcaatctcccttaccctgaccaatcagtggcccaaattttccagccccttgcctcccagaaccccagcccagaactcttcagagatttaagaatctcctcctacctcctgactcagcaccatgtaatcattaaactctctgctgcaaaaaaaaaaaaaaa

SEQ ID NO: 289934 - DNA, 1000 bp, Homo Sapiens; identical to SEQ ID NO: 222998

SEQ ID NO: 289935 - DNA, 1000 bp, Homo Sapiens; identical to SEQ ID NO: 222999

SEQ ID NO: 289936 - DNA, 1000 bp, Homo Sapiens
taaccgggccttaactttttgcgctcgttttgctataatttttctctatccacctccatcccacccccacaacactctttactgggggggtcttttgtgttccggatctccccctccatggctcccttagccgaagtcgggggctttctgggcggcctggagggcttgggccagcaggtgggttcgcatttcctgttgcctcctgccggggagcggccgccgctgctgggcgagcgcaggagcgcggcggagcggagcgcccgcggcgggccgggggctgcgcagctggcgcacctgcacggcatcctgcgccgccggcagctctattgccgcaccggcttccacctgcagatcctgcccgacggcagcgtgcagggcacccggcaggaccacagcctcttcggtatcttggaattcatcagtgtggcagtgggactggtcagtattagaggtgtggacagtggtctctatcttggaatgaatgacaaaggagaactctatggatcagagaaacttacttccgaatgcatctttagggagcagtttgaagagaactggtataacacctattcatctaacatatataaacatggagacactggccgcaggtattttgtggcacttaacaaagacggaactccaagagatggcgccaggtccaagaggcatcagaaatttacacatttcttacctagaccagtggatccagaaagagttccagaattgtacaaggacctactgatgtacacttgaagtgcgatagtgacattatggaagagtcaaaccacaaccattctttcttgtcatagttcccatcataaaataatgacccaagcagacgttcaaaatattaaagtctattttctactgagagactggatttggaaagaatattgagaaaaaaaaccaaaaaaaatcttgactagaaatagatcatgatcactctttatatgtggattaagttcccttagatacattggattagtccttaccagtagac

SEQ ID NO: 289937 - DNA, 1000 bp, Homo Sapiens
cgaccctgtcgcaagctgcacttcagacgaattatcaataaacacactgatgagtctttaggtgactgctctttccttaatacatgtttccacatggatacctgcaagtatgttcactatgaaattgatgcttgcatggattctgaggcccctggcagcaaagaccacacgccaagccaggagcttgctcttacacagagtgtcggaggtgattccagtgcagaccgactcttcccacctcagtggatctgttgtgatatccgctacctggacgtcagtatcttgggcaagtttgcagttgtgatggctgacccaccctgggatattcacatggaactgccctatgggaccctgacagatgatgagatgcgcaggctcaacatacccgtactacaggatgatggctttctcttcctctgggtcacaggcagggccatggagttggggagagaatgtctaaatctctgggggtatgaacgggtagatgaaattatttgggtgaagacaaatcaactgcaacgcatcattcggacaggccgtacaggtcactggttgaaccatgggaaggaacactgcttggttggtgtcaaaggaaatccccaaggcttcaaccagggtctggattgtgatgtgatcgtagctgaggttcgttccaccagtcataaaccagatgaaatctatggcatgattgaaagactatctcctggcactcgcaagattgagttatttggacgaccacacaatgtgcaacccaactggatcacccttggaaaccaactggatgggatccacctactagacccagatgtggttgcacggttcaagcaaaggtacccagatggtatcatctctaaacctaagaatttatagaagcacttccttacagagctaagaatccatagccatggctctgtaagctaaacctgaagagtgatatttgtacaatagctttcttctttatttaaataaacatttgtattgtaaaaaaaaaaaaaaaaaa

SEQ ID NO: 289938 - DNA, 1000 bp, Homo Sapiens; identical to SEQ ID NO: 117712

SEQ ID NO: 289939 - DNA, 1000 bp, Homo Sapiens
gtgggatgccttctgtgaggatttttatcgcagtgaagctcaagtggtacccaactgcgttgtaattaacatgattattggcatgtttttgactctcattttctacaaggctgcagtgggcccacccatgggctggcccataactgtatgttatgtggaagaagtgtgggaatgatgggttttccatgaaatgtgatgcttctggagatggggcataaacatgttcattcttgttgagctgcattgtgttaaaccaaattgtgtgaagcgaggtcacctggaccactcttgggaaatgcttcagaacaccagtctgttccttctagagaatttgtttttgtgttctatgtatcttaaatcaaatgtgtgcctaagcaattctgtcctctgattcccacccctacccaccaaaaaatggtagacatgaaaggcaggtgaggaaacagaaaaggtctctttgcagatatatattttttaaatggcactatgtagtaattaagagctaaggagacagaaagacagtagatgagaatagaagagtacctgtacctacaaggggaaaaatgaatgcaattctttatttgataagagtgaactgaaagagaatattattttcctacaataaagcaagctgtcctctcacaggataaagtggaattctgacatggattatggacttcttctaactcccattgacattgcttcttaccagacatggggaaaagctacctttcctgaaaggggaggagggcactgtcctttcagacaaagcttgtacaaattcctgaaccgcaaatttgctgaagtgaccgtatatattatattcataatttaaatgattatttatggtcagatacatattgttaaacttgaaaatgttttattacattacatcaaataaagtttatttgtagctgaaataaagcaacgtaagtaacaatttttaattaaaaaaaaaaaaaaaaaaaaaaaaaaaaaaaaaaaaaaaaaaaaaaaaaaa

SEQ ID NO: 289940 - DNA, 1000 bp, Homo Sapiens; identical to SEQ ID NO: 223001

SEQ ID NO: 289941 - DNA, 1000 bp, Homo Sapiens; identical to SEQ ID NO: 223002

SEQ ID NO: 289942 - DNA, 1000 bp, Homo Sapiens
gaaaaggagaactagggaacaaatgttgctcagggctggtgtcagtgagaaaaatttatcaatgctttttaatgtgtttttacccttgcctcactgtgtgtgtgtcactttctataatataaagaaatactataatatttctagaatctggaactgtcaccatgatgaatggccctttcaatgcatagttacagaaattcctgaagattccccaggacttcaatttcattggtttttatttgcagtttttagttgctgtaattgttgctgtttccagtctaaaggacctcctttggtaaaggtgaacaagacctctcccctatgctacccagccagattttgtgtgtgtaatgggctggcccaagagtgttcttttacttagaactccttttgattttgcttttctctgcccctagaaattttagggacaaagacattttggaaattgtcagttacttttagaaagaaaacactgcagaaatatttaacagattacttcttgataaaatttaaatgggattatatgaatttataatgccaattgaaaatattatatacacaaaatttgctattttcacttaaagtaagcatttttaaaggatttattttagaatacaatctatgcaatcctcgaactcagtgtgcttttccctgacaggatatataaaaaggtagattaggtcaaccctcctttaagcttactctcccctcaccttttcttttcactgtatataaacggtactttctgtgattcataccaacagaggactttctgtgattcataccaacagtcctaaactgtcattttctaaatctgggatttaaaatctttagacaatatttaaaatcttgattttttttaaatgtcagcagatacaatttggaagattgcatctgtgtagaagtaatgcaggtacaagatctagagtttttccttagactctttagtcttttctgaattaaagaataagtgctcttaaatccaaaaaaaaaaaaaaaa

SEQ ID NO: 289943 - DNA, 1000 bp, Homo Sapiens; identical to SEQ ID NO: 223004

SEQ ID NO: 289944 - DNA, 1000 bp, Homo Sapiens; identical to SEQ ID NO: 223005

SEQ ID NO: 289945 - DNA, 1000 bp, Homo Sapiens
tggtttactttaagcgatgccatctttcaaataaactaatctaggtctagacagaaagaaatggatagagacttgacacaaatttatgaaagaaaattgggagtaggaatgtgaccgaaaacaagttgtgctaatgtctgttagacttttcagtaaaactaaagtaactgtatctgttcaactaaaaactctatattagtttctttgggaaacctctcatcgtcaaaactttatgttcactttgctgttgtagatagccagtcaaccagcagtattagtgctgttttcaaagatttaagctctataaaattgggaaattatctaagatcattttccctaagcattgacacatagcttcatctgaggtgagatatggcagctgtttgtatctgcactgtgtctgtctacaaaaagtgaaaaatacagtgtttacttgaaattttaactttgtaactgcaagaattccagttcagccgggcgaggattagtattatttttaactctccgtaagattttcagtaccaccaaattgttttggattttttttctttcctcttcacataccagggttattaaaagtgtgctttctttttacattatattacagttacaaggtaaaattcctcaactgctatttatttattccagcccagtactataaagaacgtttcaccataatgaccctccagagctgggaaacctaccacaagatctaaagttctggctgtccattaacctccaactatggtctttatttcttgtggtaatatgatgtgcctttccttgcctaaatcccttcctggtgtgtatcaacattatttaatgtcttctaattcagtcatttttttataagtatgtctataaacattgaactttaaaaaacttatttatttattccactactgtagcaattgacagattaaaaaaatgtaacttcataatttcttaccataacctcaatgtcttttttaaaaaataaaattaaaaatgaaaagagaaa

SEQ ID NO: 289946 - DNA, 1000 bp, Homo Sapiens
tattcaaagcagcagccaccgccatccggtcccctgcctggaactggctgtgaagacccaggagagacagagatgcgaaccacccaaaacacgcacaccctgcccctggtgccctgagacagacacacagcctcacgcccccaggaatgcaagtggtttcctggtgcttcccacggaggagttttggcagccagacttctggaggaattggttgtatagaagatcctagtgaccaaattcagcctactgcctcggatctctccagccgaagtctgtggactgcaagtctttgagatgcttctggctcccatcacctctaacatccttgtctgggtctaccaggaacgcttcatttccttggggctgcagttttgtggttgaggggcctggagaaaatcattttctccccttggcagtgtcccagggccctggatggtcctcttaccaacatctggtcttccaggcactcaaaagctgggaaccagcatctcagcgccagctctaccagttctcgttttgggccagaggcagcctctgcactcccacgcctgtcctcctggaagggacctggttggactaacggctaacctggacctggaactgtagggccaggggattgtctcagggccgacgttccacctggggcttccctccccacccaccccgactccaggctttcccttttttcttttgttcaacattgtaagaacaatcaatgctgttattactgatcccaccatgattgatgtggggtaaatattaaggagatggcctcatgggaatttgaccttgactagaaatagagactgagagtgagcaaccagctggaaggtactatgccagtcctagcagaaaaatgtgttaggggcctggcccaaagcagtgttggttgcttacagtgttgattgattttgttcttttttcttaccacctcttttctttccctctcatggtacctgctcatggttatgaagctttcaaagtaaagaacacgaaatac

SEQ ID NO: 289947 - DNA, 1000 bp, Homo Sapiens; identical to SEQ ID NO: 117713

SEQ ID NO: 289948 - DNA, 1000 bp, Homo Sapiens; identical to SEQ ID NO: 117714

SEQ ID NO: 289949 - DNA, 1000 bp, Homo Sapiens
tcccctcttgtctctgagaaccattctcccaccccaagttccaccttctatgtttctactccctccctggtctctgaatgccttcgcctgtataaagagttggactctctcccctggtgtctgtactgtgtacacacatccctctgagaagcacaaggagacgacacgcgcattgtaacctttgcactgtctcagtggcgacaaaggaagctgtgaatcacaagctctgcctctttctggcctcaccctctcccccaacccgggcaccctcggccctccctgcagccttaacattctcttcccctgctcctcctatcccattgccctctgcccagctgacagtggcatccccagggaaggggttgctgtagagatagcccccacccaggggatggaggtctaccctggacactaagccaagtgtgtcagagacagaagggagctggggattggcgactcctgaagttggggcagtgggatgctgacaggcagaagctgaggtcctcagtcagtggcctttcctccttctgggtgcccagccccctttcctcacctgatacccaagcccaccacttttattttctggtgaggtgggtttgggaggaaagagaggcctagaggaggagttgaaagctctgctgttgtctcaccctatcttaatgagagacaagtgaggtggagggcctgccccccctccctccaccagacactccttccaggcctgagccccaacccctcttcaggccttccttccctagctgtgtcttggtcttcaatcccagaacaggacctgtgagcagctgcattggcctggagctggagagtaaggctgtaggatctttggaatctcttggttcctaagagtttcctcagagatcatacctccccagagggaagcaggaatgaggccaaaaagtgtgcattggataggggaacagcaggcagggctctgggtgacgcatgcctctggtctaataaactgggtttcaaccaaaaaaaa

SEQ ID NO: 289950 - DNA, 1000 bp, Homo Sapiens; identical to SEQ ID NO: 117715

SEQ ID NO: 289951 - DNA, 1000 bp, Homo Sapiens; identical to SEQ ID NO: 117716

SEQ ID NO: 289952 - DNA, 1000 bp, Homo Sapiens
taaaaaaatcaatttaatgccctaactctcttattaaggagaaatagaaaagaagaaatttataatgaaaagaagatgaatttcattatgtaaacgctcaggcatgactacgctgtttgaaacagacagatgtttactcttccttgtaatgagtaggtttggatttaagagccgattagaggctacttcctgtaaacaagtacaggaaaatgaaactagacgggtgggggacactagaatgaaaaccagtgttagggtaaagacaaaacagactatgtacataatctgtatatgggaaaagaaagagcgaaattaccttacttaaggataataggacaagacaaattacagattgtctcagagaaaacaaatgagttactctctcggacaagctgtaggtcctacctaaatgtccagcaggacattagacagtcgtacagggtacagaataattcttcgttgtgtggcactaacccacacactgcaggacatcgttctccctggctgcatccactcagtgctgggagtagtccccagttattatgaaaccaccaataacccactgaccacagtgagaaccactgattttttccactgacctactgaatatctagcatccttagattggctcaactgttactttcctaaggagtccttctacagaataggtcagatcttggcctcccaaaccccttatttttaaaatactttgcgccttgctttgataatttgtattatgtatccaaactgaaattatctgctttctgcattagaatgtaagccccctgagggttgagtcagtctgtcttgtttgctgtgccacgcctgatgcccagcccagcagcatgctttgtacactgatatattgggtaaattttgttgaataaattaagctcaactatttgtatttcaatagttgagttgtattgcttcctgttcttcaagcttaatttgaactgtctaataaaaagaagtaattaaaaaaaaaaaaaaaaaaaaa

SEQ ID NO: 289953 - DNA, 1000 bp, Homo Sapiens
ccagtgaaattctggttgctaaaaaattatctctcaccgacatttaaagaagtaattcctcacatggctaaagagtatggattccgatatgaactagttcaatataggtggccccgttggcttcgtcaacagactgaaagacagaggattatttggggttacaaaattcttttccttgatgttcttttcccactagcagtggacaaaatcatttttgttgatgctgaccagattgtgagacatgatctaaaagaacttcgagatttcgatctggatggagctccttatgggtatactccattttgtgatagccgcagggaaatggatggatatcgtttctggaaaacaggatactgggcatcacatcttttaagacggaaataccatatcagtgctttatatgtagtggatctcaagaagttcaggagaattggagcaggtgacaggctcaggagccagtatcaagctctcagtcaagatccaaacagtctttcaaacctagatcaggatctccccaataatatgatttaccaagtcgccattaagtctcttcctcaagactggctgtggtgtgaaacctggtgtgatgatgaatccaaacaaagagccaaaacaattgatctgtgcaataatcccaaaacaaaagaatccaaactaaaagctgctgccagaattgtcccagaatgggtggagtatgatgctgagataagacaactattagatcatcttgaaaacaagaagcaagatacaattttgacacatgatgaactctagcactggtgtatatgagaaggaaggcgaaagcatgacaggaaacctgccgcctgctggggaagtctggagcccctgctgagacgatttggaagtctcgttaagatcagtgacatattctttaattttaaaaaattgtaattatttaaaacagttatttaatgtattgaatgagtttaagttatataataaatgaccattgagtatttaaaaaaaaaaaaaaaaaaaa

SEQ ID NO: 289954 - DNA, 1000 bp, Homo Sapiens; identical to SEQ ID NO: 117717

SEQ ID NO: 289955 - DNA, 1000 bp, Homo Sapiens; identical to SEQ ID NO: 223008

SEQ ID NO: 289956 - DNA, 1000 bp, Homo Sapiens; identical to SEQ ID NO: 117718

SEQ ID NO: 289957 - DNA, 1000 bp, Homo Sapiens; identical to SEQ ID NO: 223009

SEQ ID NO: 289958 - DNA, 1000 bp, Homo Sapiens; identical to SEQ ID NO: 117719

SEQ ID NO: 289959 - DNA, 1000 bp, Homo Sapiens; identical to SEQ ID NO: 117721

SEQ ID NO: 289960 - DNA, 1000 bp, Homo Sapiens; identical to SEQ ID NO: 220795

SEQ ID NO: 289961 - DNA, 1000 bp, Homo Sapiens
catctcctccttcagctaccgggagatcttgcgggaaaaggagagctcggctgttccagccaggtccttatccagcagccctcaagcccagccccctcggccagcagagctgtcagatgaggaagtggctgagctctttcagcggctggcagagacacagcaggagaaatggatgctggaggagaaggtgaagcacctggaagtgagcagtgcttccatggcagaggacctctgccggaagagcgccatcattgagacctacgtcatggacagccggatcgatgtgtctgtggcagcaggccacacagaccgcagcgggctgggcagcgtcctgagagacctagtgaagccaggcgacgagaaccttcgggagatgaacaagaagctgcagaacatgctggaggagcagctcaccaagaatatgcacttgcacaaggatatggaagttctgtcccaggaaattgtgcggctcagcaaggagtgcgtggggcctcctgacccagacctagagccaggagaaaccagctaaagacctgcaggctgcacccacctcctccccttcctaccccctaggatgctattcccttgggctgtggtggaaaaatgagggctggagccaaaatcaaatagcttgggagactggacattaaaggggctagaggcctgatggttagtgttaatgatcctgtcttagggcagaggccaccagggagtggggatcctgagggaaggggcagggatttctccttcttcttggtcctggctcccaagggcttctgtcttcatctctgcatgagctctccttcccagagaccaactcttttttattttattttattttattttttaatttatgtctggagcctggctactctgcatttgggattggggatgctgggtgggtgtgtggtccatgttcagcgttctagcaacacgtgtgtgtgtgtgtgtgtaaaggctatgcagccaaaataccatctggccagacgggcccacccac

SEQ ID NO: 289962 - DNA, 1000 bp, Homo Sapiens
tcagcctcaaaacgatattgttgacctgttatgttatgaaaaataatccagtgtttatacttaacggatgccatcccttattatttactattttcttagtctaactaaacaatctttattaaaataagcaatgatatttgacatgggcctaagaaatatatagttagctaacaatattgtcagttagagggatttcttttctaaattaagtacagatttcttcaccaaactccaggataacagaaaagaggacataaaatttggacatagtttctggataaataaatgtaaatttaaatataaattatgtaacaggaaacaaacgaaattaaagaaaataaatttttcaagaaaagtaaatttatggatgttaattctgtaacattgtcagggcaaagttttttgtttttattttaatttaagggttttatgtttgttttttacttgttgcaacctcaaatgaccaaatggtatgatgcacactgagatactcaataaatgtgcagtgattcttagccttttttcctagaactttaatattaacatggaaaattctgaaatggacaacaaaaagataacactttgtgtatggggaagaatatcatgcagttgatgacggtacattaaaattcacacaaaaggacattttgactagcattcagaaagagtccattgattataagattatctatgaggttttggaccgggcactacactaccgaattatggctaactttggtttgtgatctagaccaagtcacccaatctatcttggattttagttttctggtttatgaaattaaggagttaagctaaatgacttgggtttcttttcgtgtatcataatcaaaatgctgtaacttctctagtgaattcatagaacactgactcttacaagtatgtcatgaaatactttatgctgtgagcaggtatacatgtataatatatgtatagctatgaacaaataaattttaaataaatgcaaaaaaaaaaaaaaaaa

SEQ ID NO: 289963 - DNA, 1000 bp, Homo Sapiens; identical to SEQ ID NO: 117723

SEQ ID NO: 289964 - DNA, 1000 bp, Homo Sapiens
cagtcttggggcccgcttctaccggcagatcaaaagacatccggggatcatcccgatgatcggcttaatctgcctgggcatgggcagcgctgcgctttacttgctgcgactcgcccttcgcagccccgacgtctgctgggacagaaagaacaacccggagccctggaaccgcctgagccccaatgaccaatacaagttccttgcagtttccactgactataagaagctgaagaaggaccggccagacttctaagccaggctgggctgccagtgccatgcaagccacagccagccagcccatccacttcttccactcctccccgcaggccccaaggcatcactccggccaccctgtcccgctactgcttacacaggccgggttcccacgcagaggggaggctgctccacccctactctcctcccttgctcccagcagcggaagcgcctctgacccttggcttgagtcccacgtgggggaggaggaggcaggcagcaccagcaggggtccaccaagagcccagaccagcccctctgccctcctacccgggcctcgaagggtgtggcacaggctacgtgttgagcgtggcctacgtgagccaacaagaagcaggggcctctgagtgccaagcgacgtggcgggctccacgttagcccaggctctgagagccagcccaggggcggcgctgctcagcttgggctggtccagggcctgcccaggctggggcacctttgcctcctgaggcgcagcgcactcctcccctgcccaagcctactgcctcccgctgccgccagtaccccctccagccccacacctgggcctccccctgccactcccctcccttgctcccctctgtccccagggatcaaacagaagcagccgtgggcaaaatacaatttcatttaacaaattgaaaaaaaaaaaaaaaaaaaaaaaaaaaaaaaaaaaaaaaaaaaaaaaaaaaaaaaaaaaaaaaaaaaaaaaaaaaaaaaaaaaaaaaaa

SEQ ID NO: 289965 - DNA, 1000 bp, Homo Sapiens; identical to SEQ ID NO: 223012

SEQ ID NO: 289966 - DNA, 1000 bp, Homo Sapiens
aatgtaatgtctatgagatatgtttctgatcttggatgaccatttgatcactgcatatgagaagttttgttcattccacagaatacctccttataggaaagttaatttccaattgcacacataagcaaaaaggcattttcttcaagaattttaaacacttttatttttaaacgatttatcaaaattcatctctaaattttacatgtagaaacataaaaaagtaatttctagcaagcacttgacatcttactggctttctgctcttttagtctacaaaagatcagcaatactttaagttaaaaaaaatctcataattaagcagtagagcatctatgattaggaaatgtgaggggcaacagatgtgaatgaatgaaagttgagtctttcttaatctagacagcaaacttaacaggctttccaattagccttgctttaacccctcccgtccctcctctaactctgcacttttcatgttaaactgcaattacttaaactcttttcctgtcctgcattaattttccaaagttggaatatagtcatgtccttttatgctgtagagacttttctttcaccattactttctgatatctagtacacagtatttctttttctcacatctttgccgtttcaccacaataataaatcgggtgaagtgtgcacaatatctgtattttgaatggctatggcgttaggttgaaatggccaggcacaaatttagtctggtcattttgtttacacattgggaaaaaaattagtttattaaacattacctgtaactgtgtctgttttaccaagctggaaccttgggactttttatttctaatttttattacctgaatgtcagaccattttttcatgtgatgtacctagtgagtggagtttgctttgttttatggtatctgtactcctggtatattcaagcactgttttgaaaacagatgacttatttctccattaaaaatgcaataaaaataaatggcaaacaaaaaaaaaaaaaaaa

SEQ ID NO: 289967 - DNA, 1000 bp, Homo Sapiens; identical to SEQ ID NO: 117724

SEQ ID NO: 289968 - DNA, 1000 bp, Homo Sapiens; identical to SEQ ID NO: 223013

SEQ ID NO: 289969 - DNA, 1000 bp, Homo Sapiens; identical to SEQ ID NO: 117725

SEQ ID NO: 289970 - DNA, 1000 bp, Homo Sapiens
ttcctttggaggcagcatcacttattggcagtaaagactcagtataaaagcaccagcatccctacttgggtgatggggattaattttatagcattccattttcctagtgccacatgtgaaattggattttgatgatcttaatctatattctacccttataataaaagatcaaaagatatatctcctatgaacagattggagataggagatgaaaagttgggaggatgtctttattctaatgtgagggtagggaaaatgtggataacattactggggtgaaggaggcattgttctttagttggagttctcatttttattctccagtactgacttgtggggaaagcatactttttcactgccaggtactgaatgcagaggctcagtgaagtatatatgtgggaagtgcatgcatttcgtttattagcaaacatagctggattaagacaaagttgttggtttggaaaggggttaaagccttaagtgaacaaatctagctaacagtgaatgaactaggtaatataacttgcatatttttaatttcctttggttaaaggtcccccatacttctctgttcggagacatgagaagtatgattacttcagtgttagttttcttaattttttttttcccctatttgtcccttgtcactttgttgcaagctagaaatctgtgggttatacatagggcagctctttgtgaaagtggtttattccactggagaaaggggattgaaaatcagttagaaccaatgtatttcttgccccacggaacactattcctataagatagctgaaagaagctgctgtgaggagctcagctccaaacacaggatcagcaccttgtataggaattcccatgaattatgacttctcattctgttttatcagagtgcatatatgtcctacttcaggaaaagtaaaacagtcatttacgaaagaaagtcaatctgtatcctaagcattttaataaaaagttaaaacaaaaaaaaaaaaaaaaaaaa

SEQ ID NO: 289971 - DNA, 1000 bp, Homo Sapiens; identical to SEQ ID NO: 117726

SEQ ID NO: 289972 - DNA, 1000 bp, Homo Sapiens; identical to SEQ ID NO: 223017

SEQ ID NO: 289973 - DNA, 1000 bp, Homo Sapiens; identical to SEQ ID NO: 117727

SEQ ID NO: 289974 - DNA, 1000 bp, Homo Sapiens
ccatgactggccaatttttatatttttagtagagatgaggtttcaccatgttggccaggctggtctcaaactcttgacttcaagtgatccgcccgcctcagcctcccaaagtgctgggattacaggtgtgagccaccaggcccagcctatatctaggagtctcttgatgagcattggtcgacagaaagaagtctcttctaaaaattgttaatgcttttatagactactcatagtctgagtcataaaacatcatttgcctttcaatttataccttccaagtgaatatgattattgaggattatctaattattatctacttttctctctagatataaaaaacaccatagatcctatacacacaaaaatggtttttctatcagaaatggactcactcgcctggcaaaaggacacagattagattattctaatctcaaggccccttaggcttatgaattcaaaaaaaaaaatagaagaaatgaacaaaaacataaatcacagtttgttattaagtaatatctgaaatgaattagaaagaaaccataagccttaacaatactccaatcacagttaaattaatttagacagaaaagcaaatagcaattgacttgaaaataagaagtggagccgaaggtggatacaagaaatccaggagggctaagatatatcccaaatccaatgttcatcaatgcctacacattcagtacaacctgatggcattaattctgtggttggggaaatgtgaaagtgaaatcgataataccacagttctaaatgtgcactgttggctgaacttatggtgtggtggggggtggtaaaaattaggcttctaagaaaggatgggactctgccctccaggcaaggagtaaatggccccagcagatggaaaactaaagcaaatgtaatcacctgcattttgaaaataggtgtgtttctgagaatttgtttgaattagttctttgtaaataaaacaggattttgaatgcaaaaaaaaaaaaaaaaa

SEQ ID NO: 289975 - DNA, 1000 bp, Homo Sapiens
cccctggtcagagggggtgggggtgggggaggggagaggggtacctagaacccagagaacattggcttatgccagataccacaccacatctgggcttacattcttgtatcttttttggtgtgtgggcggggggggtggggggcagttcagtgaagtctagaagacctgctggacaaattctaaaagagctagagctgtaacacttattcttgcatcttattaattttctatgatattttttccttcttcgtagggacttgggacaatctggctttgctgctttctactgctaggcacctctctctaaccctcattgtcagagggaattggaggatatccacagtctgttcctgttctgatattctgagcagagaaaaggcactaacggttcctcttagctatttaattatcagaagcaagtaatctttccccagataatattttgccctagaagaagccgtgatttagctcttttattgtgcttacttggtccaaatacatctgtggggtgttttgtcatttcttaatgaatgaatcatagttataaccaggggccaagctgcccaagaggctcttcagagatcatggatgctctctttctggaagctgtggcctgatggagcagccccattccagggtcccatctgtccggagttgtgtatgtcaagtccggctcagtctttatttccaacactagccgtggtcctgtgcagtcaagctctcagctagtgtttagggctgtctgtcagaaatggttatacgtgggcaaaagaagatctgacagctcctatataccttatcttactgaattcttaaactttgaaccagttcttccacttactgacttgttaccactgctgactttctgaaaagttttccagtttttgttttttgttttttgttttccagtaggggattagaatgtttagtcctacttagtaagaaaaatattgtatttttaatcattcatagtgctggtaaaaaaaaaaaaaaaaaaaaa

SEQ ID NO: 289976 - DNA, 1000 bp, Homo Sapiens
gccaccaccatgcctgtgttacagcagctccatgatggttgttgcccgaggttaatgtagttgtttgttagacctgtgtcttacacatttctcagagtaggatattagtattataatttaaagctacgacagtcacaaagtcacaataacttagaaacattgcgcatattcttctgaaatagcacttaaaaatgattagtgtcagtattttttcacttgggtcaatcaaatctgtaacactgaatccaagctattaaacaaaaagtatgcaatgaatgaattttgtaaatgaatagagagtatcagtttacaataatgttcttaaaacagtatcctctggatagttgagtatgggttagaaatcattgaaatggattggtcagaaattgctatctgtgtaaaatgtctaccagtagccagatgcttccagagttcttaatgcctctctggcatttcagagccagcatcccccaactcccacccctctgccatcacccagcccaaacacatcagctttcaaatgagatgatagtaaatgcggcaatgttaagacaagaaatttatgatttgccagattcaacatttatgacctccccttccaaagactgtctccgttgaccttgtctttttggtatgccttggggtttctgataatgtgtggagtctcattatggctgagagtttagtgttttcacagtgaagtgcagacatttgatttctttatgagttccctgtgttagaaatggctatagaaaaatttgtcataataatttcatttgcatgaaatcctgaggggtgcattaaggaaactaaaagcaccacttaccaaatctatcggcagaactgatgtgaggtaagtgagcatgtcaaacaaaataggagctcacatggatatatttatgtcactgagttgtcagaaattatgtcaaaatgaaaactgtttgtttcatgacaaattatatagtctataaattaaactggaagtaattattaaaaaaaa

SEQ ID NO: 289977 - DNA, 1000 bp, Homo Sapiens
acattgacttcttactcaacctgtctggccacccagagtttgaagctgggaacgtgcacactgatttcatccctcaacaccacaaacagttgttgctcagtcggaaggctgcagccaaagagtctttatgccaggcagccctgggtctcatcctcaaggagaaagccatgaccgacactttcactcttcaggcacatgatcaattctctccattttcgtctagcagtggaagaagactgaatatctcgtataccagaaacatgactcttaaagatggtaaaaacaatgtagccatagctgtaacgtataaccatgatgggtcttatagcatgcagattgaagataaaactttccaagtccttggtaatctttacagcgagggagactgcacttacctgaaatgttctgttaatggagttgctagtaaagcgaagctgattatcctggaaaacactatttacctattttccaaggaaggaagtattgagattgacattccagtccccaaatacttatcttctgtgagctcacaagaaactcagggcggccccttagctcctatgactggaaccattgaaaaggtgtttgtcaaagctggagacaaagtgaaagcgggagattccctcatggttatgatcgccatgaagatggagcataccataaagtctccaaaggatggcacagtaaagaaagtgttctacagagaaggtgctcaggccaacagacacactcctttagtcgagtttgaggaggaagaatcagacaaaagggaatcggaataaactccagcaaggaaatggccagttaagtagtgtcttctctctccaccaaaaagaggaagtgcctccagcttttctgggggtctcataaagagcagttttactaaatgattgtatgcttatgctgaacacctttcatattggagaatcatgcatttgggtcactaattatctcaaaatatttcatactaataaagttgaattattttttattggaagcc

SEQ ID NO: 289978 - DNA, 1000 bp, Homo Sapiens
tgtgttcaacctcgtccatgtggtgtcaggtgtcttcttctacctgagctcagctgtcaaccccattatctataacctactgtctcgccgcttccaggcagcattccagaatgtgatctcttctttccacaaacagtggcactcccagcatgacccacagttgccacctgcccagcggaacatcttcctgacagaatgccactttgtggagctgaccgaagatataggtccccaattcccatgtcagtcatccatgcacaactctcacctcccaacagccctctctagtgaacagatgtcaagaacaaactatcaaagcttccactttaacaaaacctgaattctttcagagctgactctcctctatgcctcaaaacttcagagaggaacatcccataatgtatgccttctcatatgatattagagaggtagaatggctcttacaactcatgtacccattgctagtttttttttttttaataaacgtgaaaactgagagttagatctggtttcaaaacccaagactgcctgatttttagttatctttccactatcctaactgcctcatgccccttcactagttcatgccaagaacgtgactggaaaggcatggcacctataccttgattaatttccattaatggaaatggttcgtcctgagtcatctacgttccgagtcaggctgtcactcctactaccaatggccactgtgagccacagaaggaagacatgtacgtgctgttctactttatatgatgtgagaagccaacatcagtgtcccttggcagcagtctacaggcataacttgttttattgtgctgaattttattgtgcttctcaaatattgcacttttaaaaaaattgaaagtttgtggcaatgctgttgagcaaatctgctggcatctttcttcccaaaggcatgtgctcacttcatgtctctgtatcaattgtcataattttcgcaataaacttgattattattaaaaaaaaaaaaaaaaaa

SEQ ID NO: 289979 - DNA, 1000 bp, Homo Sapiens; identical to SEQ ID NO: 223021

SEQ ID NO: 289980 - DNA, 1000 bp, Homo Sapiens
atccaggctttgccacggccagttggtcctccctggggaactgggtgcgggtggagtactgggaggcaggaggtggcccggggaggccttgtggctcctcccctcgctcctcgccctgggcctcagcttcctcatcaatagaaaggatgtgttcggggtgggggcgtcaggtgagaacgtttgctgggaaggagaggacttggggcatggcctctggggccacccttcctggaactcagagaggaaggtccgggccctcgggaagccttggacagaaccctccaccccgcagaccaggcgtcgtgtgtgtgtgggagagaaggaggcccgtgttgagctcagggagaccccggtgtgtccgttctttagcaatataacctacccagtgcgtgccgagcaggcttggtggggaagggacttgagctgggcaagtcctggcctggcacccgcagccgtctcccttccgtggcccagggaggtgtttgctgtccgaaggacctgggccggcccatgggagcctggggttctgtccagataggaccagggggtctcactttggccaccagttcttcggccagcacctctgccctccagaacctgcagcctggaggggtgaggggacaaccacccctctttcctccaggttggcaggggaccctcttctcccgtctgccctgcgggttgcccgcctcctccagagacttgcccaagggcccatcaccactggcctctgggcacttgtgctgagactctgggacccaggcagctgccaccttgtcaccatgagagaatttggggagtgcttgcatgctagccagcaggctcctgtctgggtgccacggggccagcattttggagggagcttccttccttccttcctggacaggtcgtcatgatggatgcactgactgaccgtctggggctcaggctggtgtgggatgcagccggccgatgagaaaataaagccatattgaatgatcgccaaaaaaaaaaaaaaaaa

SEQ ID NO: 289981 - DNA, 1000 bp, Homo Sapiens; identical to SEQ ID NO: 117729

SEQ ID NO: 289982 - DNA, 1000 bp, Homo Sapiens
gatcccggggcttttccagcccacgggcgcctgacgcaggctggggcaagtggtgcgtggggcctggtccccaaggggcggctgagaggccgccactgagcatctctatctgtcattcctttagctatttagggaccaaaggaccaaactttttattgcagatgtgtagctctatgtcaaatagagggggaatggaggaccccctccttcctgcctcatggctgttcttgaaacagcttagagcgattctatgaaaaaatgtaataaaaaattaaaaaaaaaacaaaaaacaaaaaaaacaacaaaaaaaggaaaaataacgcttcaatgcttttaaaacagcaagataatagttctttgatactttgagaggcgctttgatgaccctcatccaagtctatgacactttcctatggttttctgtattctatgtctggatggagctgttaaaagatgaacaaattggtggatatttggggaaagcaacacaaatcttaaaactcacccgtgaagtgtgagaaaacaaggaggggaacaaatgggacttaccaagcaaggtcattgttgtgaaaagtctgtaaatgcttctaactcttccccctcttaaaatcataatagttgtacagaattttaaaaaggaaaagtttaaaatacctatataatagaagaaaaattagaggaaagcaaaaaataaaaaaaaaaaataaaaaaggaaaaaaaaaacctatagaagttagcattactgctaaaatcccagatgttgtaggactgtacttttgtagagtttagacagagcatcaatcccttctccccgcgagtgcagtcggatgccgttgtccccaagggccaggccgaactcgccccacacctgcgggcgcctggctgccgacgccggtggaggccacgccgtcggtcgggaacggtcgcgtcgcccgggtcgccgccgccgccgccgccgtcatcctcgcctctcgcttccctctgggagctgcgcgcgctt

SEQ ID NO: 289983 - DNA, 1000 bp, Homo Sapiens; identical to SEQ ID NO: 223022

SEQ ID NO: 289984 - DNA, 1000 bp, Homo Sapiens
ggctgaatcaggccctgctgcaaaactccaggcttcccagggttggggaggctgtgggaccaaggtccatgttggtccttccactgggtgcagcaggagctgggtcccgagagcctggcaggtgaaactctgcaggccttccgcctgattattatttattcactcctttcctcaccccaagtgccctgctctccaggtgcctagagtatcctaactcttaggaccagggattgtcttgcaccaagtatgcctacccctggccagtctgaggtctcctagccatagaactgactcctggaagcctggagagaaggtggtgacacccatgggttctcaactgtaaggaaaaaagacaccagacttttgttccctagtgggggaaagcccttagtcttgtacaggagcagcttgctcccaagtccttttggaagctggcagagctatattcctgacagccctgactgccaggtagagcaaaagacattggtgggggtatgtgaagcaaaaggggcaggtgcacacacctccacagtgacctctgtgcacacggttaccaccaactggctggccctcctcctcttccctggcccattgatcatcccttctcacagagggtcatcattatttccaaatattgtttgtctgatgacttcctcttcccagtgcaatttttcccttcctatttcaacctctggttcctgggatgagccataccctggaactggcccacccactgtgtcttccacgtaagggagacctttgcaaagggcatccaaatgggtaggcaggtgacagccgccgtatttattttgcataatattttaatttgtatatttttgtgatttattttggcgttatgagtttgactctcggggagttttgttgttatgactcttgtgtcttttgtcacaaaacaatgatatttgctaaacgatatatggaatttatttttgattggtaataaaaaatcaaatatgtataaaaaaaaaaaaaaaaaaaa

SEQ ID NO: 289985 - DNA, 586 bp, Homo Sapiens
gtaacggtcctcagcgcaagggtcatttcgtcgctgggaagggacggccctcgcccgcggtgatggtggttagcaagatgaacaaagatgcgcagatgagagcagcgattaaccaaaagttgatagaaactggagaaagagaacgcctcaaagagttgctgagagctaaattaattgaatgtggctggaaggatcagttgaaggcacactgtaaagaggtaattaaagaaaaaggactagaacacgttactgttgatgacttggtggctgaaatcactccaaaaggcagagccctggtacctgacagtgtaaagaaggagctcctacaaagaataagaacattccttgctcagcatgccagcctttaagattgaattagattgtgttgttgtggttttatttctgaaagtaaaacttgccataaattagaaaacaatttcccaaaataaaatccttttttgtatgatggtatacagttttcagtaatgatgtatacattgtattgatttttttccctaaatgtgttattttaataaatatctcatgaatgagtttgaagtttgcttggaaaaaaaaaaaaaaaaaa

SEQ ID NO: 289986 - DNA, 901 bp, Homo Sapiens
gcctcggtgatgtcgtgggttcaagcagcctccttgatccagggccctggagacaaaggggacgtgtttgacgaagaagcagacgagtcgctcctggcgcagcgggaatggcagagtaacatgcaaagacgagtcaaagaaggttatagagatggaatagatgctggcaaagcagttactcttcaacagggcttcaatcaaggttataagaaaggtgcagaagtcattttaaactatggacgactccgaggaacattgagtgctttgctctcctggtgtcaccttcataataataattcaactttgatcaataaaataaacaatcttctggatgcagttggccagtgtgaagagtatgtgctcaaacatctgaaatcaatcactccaccgtcccatgttgtagatttattggactccattgaggatatggacctttgtcatgtagttccagctgagaaaaagattgatgaagctaaagatgaaagactctgtgaaaataatgctgagtttaacaaaaactgtagcaagagccatagtgggatagattgttcatatgtagaatgttgtagaacacaggagcatgcacattcagaaaacccaagccccacatggattttggaacagacagccagtttagttaaacagctgggcctatcagtagatgtattacaacacctcaaacaactataaaattaccttcccttttctaatgaaaataatgttcagaacatttggtttcctaacaatcgaaatttgtactggtttctgcatcaaacacctcaactgtagggttaccctttatggaagtttgaaattaacactattgtcttcaaaattaacactattaaatgtaatataagcctttaaaaaaaaaaaaaaaaaaaaaaaaaaaaaaaaaaaa

SEQ ID NO: 289987 - DNA, 1000 bp, Homo Sapiens; identical to SEQ ID NO: 117730

SEQ ID NO: 289988 - DNA, 1000 bp, Homo Sapiens
gtgggtctgctgccgccacttctaatcctcatcatgacaacgtcaggtatggcatttcaaatatagatacaaccattgaaggaacgtcagatgacctgactgttgtagatgcagcttcactaagacgacagataatcaaactaaatagacgtctacaacttctggaagaggagaacaaagaacgtgctaaaagagaaatggtcatgtattcaattactgtagctttctggctgcttaatagctggctctggtttcgccgctagaggtaacatcagccctcaaaaatactgtctcaacagctggaaatataaaagatttgcaaacttctttgtttctgtctctgcattgtatgccattttatagtccacaccctgaaaatgtatttcttccagaaagtctggaggaaggacctatatttgtagaagtaaaggtatattctgtcactcagctgtattcacgtctgagcagttctgcagtaacacctgcttaaaattctccctttgcatgttttgtaaataggctccagttttgttttttaaaaggaatttattttttgcctcatcagtccacccaactgattctgaatgggagagagtctgtagagaattgattcagaaaagtgtctgtgaaagaaaaacaattattttgtcctgtttctcaaacagtgttaagcagttttgttaatagacatttttgcatcgacacttcaacattaacactttgaaagtcatggtctggtgccagatttaagaaactcgaaccacctaatatttcataaccttcttcattaggtacttgtacagattaatttctaacattgcagcagtttcatatgtgtgcaatatgtgcattctttcattttagttttgcacttggttttctataaagtacgtttttactcagttcatgcgtgaacaatttaaaaaacgacagaataaggtacaaatgtagtgtatttaataaactgtcaaccaaagaaaaaaaaaaaaaaaaaaaaaaa

SEQ ID NO: 289989 - DNA, 1000 bp, Homo Sapiens
agagctgtacaggaaatcaagccgggagaggaggtttttaccagctatattgatctcctgtacccaacggaagatagaaatgaccggttaagagattcttatttctttacctgtgagtgccaggagtgtaccaccaaggacaaggataaggccaaggtggaaatccggaagctcagcgatcccccaaaggcagaagccatccgagacatggtcagatatgcacgcaacgtcattgaagagttccggagggccaagcactataaatcccctagtgagctgctggagatctgcgagctcagccaggagaagatgagctctgtgtttgaggacagtaacgtgtacatgttgcacatgatgtaccaggccatgggtgtctgcttgtacatgcaggactgggaaggagccctgcaatatggacagaaaatcattaagccctacagtaagcactatcctttgtactccctcaacgtggcctccatgtggttgaagctagggagactctacatgggcctggaacacaaagccgcaggggagaaagccctgaagaaggccattgcaatcatggaagtagctcacggcaaagatcatccatatatttctgagatcaaacaggaaattgaaagccactgaaactatgcagcatttcagttttcatttaaacacttagttcagaaaccttaaaggatttgaatatttcaaattgcacacgtcactccagcatctctgtaaaataattggaatgaaaatacttcttgcacttaaacactgcacatgccgtactttgaggttagtctgaatcttgaactttaataccaaattaattttgaatgcttttgtttcctaagagataatggcatggtttcatatgttatactttggacagagttttaaaaatggaattattttttctttcatgcctcttgtaatgttctgaacaaacttgaatgatgaaagtattaaagagatatcagtaaaaaaaaaaaaaaaaaaaaaaaaaaaa

SEQ ID NO: 289990 - DNA, 1000 bp, Homo Sapiens
caaatactattttttatccacattttttttttgttccccaaactgtaatgtacaaggatatgtgtgataatgctttggatttgagtaatatttttttttcttccaagaaaactgctttggatatttttagataatttaaacataatttaggataatgatattgctcaatctgaccacaattttaggtaaaacattaaatgtgtcaagaaatcttggcaacagagactctgcagcttgcagtggacatagataaaatgttacagagatactatttttttggttggaattactatattaaatttagaagcagaaactggtaaaatgttaaatacatgtacaattgcttttagttagcaattgattgtagcatgggttcctccaaggtttcaagcaatgggcagagtttaaaattatatcagattcgtttacttcgtttattattttacagtaaatttgaataaatcttaggggtcattatcacttaaataatactgtacctaggtctttcaaattaaaattatacctgaatgaagttgtttgtatacataaaggatatttgtgtacaattaccttttttcccccacacttgttttctttgtttttgttttttatggcaactggaaagtatttactatgggattcatttatgtctgtctttctatcataaagaattgatcaatatgtaaatatgtgatttgaaccatggttgacttacaagtgtcactacagctttttagaaaacatagccctaatatatgttaagcaggacccgggtgagccagtgggcttgcgctttatgtagagctggaagaaggccgtccatcctgtctcttgggcggacagtgtactttcctaatagggaagggaagcacaatggaaatacccctgaaccgttttattgcagtaatttttttcatatctgaaactattatttaatattttgaataagattttaaaaaataaatggcaaagatataaatctaaaaaaaaaaaaaaaaaa

SEQ ID NO: 289991 - DNA, 1000 bp, Homo Sapiens
ttaaacactccgccttgtgactcagcaatgctatctaccttcacactcctgagctccgccttcctttgttttgatacagtcattatatttgattagtattcccaggaatacccccacctagttactcaaatatttttcacttaactttttatactcttattttggtaataagcttacaatattaagaagctggggacttttttttaactgaagacttgagtcccctataccgggaatgcagctattaatagattcccatattttaaaaggagggaaaggacaatttaatataaatttctgtttgtgcatttctgacaggccattattatctgctttgacaaagcctttctgaaacgcagtgtacaatgaatcttaatgatgttatgaaacgagctttgctcggggctcttgattggagcttccggtatgtgatgacggtatgtcatgtatgcatggatgtactcaactgtgtttaatactctgaattttaattagaaaaaaatacaatagcagcaaggccctggtttctaagctgtatccttttattcatgtgggacatgagcaaatggcagaattaggggcgagtgctttcaatgctcgaaactaagcaagtataaatttttcctcttatttgcatgaaaggacaagacactgttatgccctgtcctaaatgtgaagacagaggttgaattttttaaaaaatatctttaaaagactgatcacaaaatccaaggtgctacaggaaacaagcacactcaagaaagtttttttctgaataacatttttttccaatttctccgttttataagacatttcctaatttatggggattttaattgaaaataaacttgagtcccaatagagctgtttttttctcacttcctacaaaatgcaaatgcaaaataaataactaagcagcttttgtttggttctgaaccgtatgtggcgtattgttattaggttctagcttcctttaaactaataaagaataagaagactt

SEQ ID NO: 289992 - DNA, 1000 bp, Homo Sapiens
actttggccctgactttctggagcagattgtgctgaccagagacaagaccgtggtctctgctgaccttctcatagacgaccggccggacatcacaggggccgagccaacccccagctgggagcatgtcctcttcaccgcctgccacaaccagcacctgcagctgcagcccccccgccgcaggctgcactcgtgggcggacgactggaaggccattctggacagcaagcggccctgctgagctggactgtgcttcgggctcctctgtggggctctgacctcagggctcccagctcggggcctgtggggccagtatgctggtctgggagtccctcctagactcctgggccccatgacctcctgctgcatgtcccttcccttccccagccctgccaggccttaacctgatcacggggcagggctgggccctctgggcgcttggacatagacacgtggtcccaggccgttcagcctgacctcaggcagcaggcaccaagctgccagaagcccaggggctcaggacagggaggagttgaggccactgttcagggggctggtggccgtctccactccctaggcaagttctctgaggcagaagggggttccctgttcccagagtctgcagccatcagcaaggaggaccaggaacccggcgactgaggtgcttccaggtggggacaagcccctcttggtctcagccacagcaccccttattccagctgccctgcccaacctgctcaccccacatgaccttctgtgtattcagcaaacactcactaggtgacagcggccaccaggctctgtgctgggggacgatactggccctggcctcgaccagcttagaggtttctcacacctctgttcccagggccccgctcagggcccagcagagagtccgtaggcttgaacatgtgttgagtgcatgaaaaataaatgctgttcatgtgtgtagctcaaaaaaaaaaaaaaaaaaaaaaaaaaaaaaaaaaaaaaaaaaaaaaa

SEQ ID NO: 289993 - DNA, 1000 bp, Homo Sapiens
aagctttgcttcgctctcctaatggctcataggctgaatcatgtctgcccctcaaatcaggtgtataccaatgtgttttttactagcacttgggaaagttattaagtattttctttttccctgggcatcatgttctattattattttagaaaaaagtcataattggtactgaatatatggtatatataatattaaaatggtaattttgcaacagctcaaaattaaaaggttaatgttatacactttactatatgagctgtgattactaccattagccacagataccagtgcctcaactttttatgtacctattgtgatttaatgtaaataaaggtttgtatagtacttttgtagttcttaagtatgaagaaatgggtaaactttttattttgttagaaactgttatattttgagtgtaatatttatggtttatagcaaaatgaatgtgcttattgttgaatgcatgtatttagaagcctttactcagcccctgtgttctgtgctaggagcttgagctctacaggtaaggcagagctaccggtgaatgaaaggaaatcatgtcagtgaaaaatcatggtggaaagcccctggcatcacatgtgcatgctgtaggcaggacctgagctgcctccgctgcaggttcagatgcaccgctgcagctgtccttcagttagttcacagggctgcaagaggaggacacatccctccagaaaacagcctgagccgggaactggctgtgctaaagagcactgctatcaagttgaggagagagggcttccgtgtactcaggatgtagagtcattgctcagaagtgaacaaaaaatcaaaaacaaaagtcttctcaagggactgatcggccaagtatgcttttctttagagcaatgttttgccctagagaattgtaaaatttatgtcatgactcagtacatatgtgttcgtacatatatgattggaataaaatgtttatgaaatatttaaaaaaaaaaaaaaaaaaaaaaaa

SEQ ID NO: 289994 - DNA, 1000 bp, Homo Sapiens; identical to SEQ ID NO: 223026

SEQ ID NO: 289995 - DNA, 1000 bp, Homo Sapiens; identical to SEQ ID NO: 117732

SEQ ID NO: 289996 - DNA, 1000 bp, Homo Sapiens; identical to SEQ ID NO: 117733

SEQ ID NO: 289997 - DNA, 1000 bp, Homo Sapiens
aaaaagagagtggatatcattccaggttttgagtttgatcgatggctgaatacccccggctggcccccgtacctccctgatctctcccctggggactcactcatgaagcctgctgaagagctagcccaactgtgggcagccgaggagctggacatgaaggccattgaagccgtggccatctctccctggaagacctaccagctggtctacttcctggataagatcctccagaaatcccctctccctcctgggaatgtgaaaaaacttggagacacatacccaagtatctcaaatgcccggaatgcagagctccggctgcgatggggccaaatcgtccttaagaacgaccaccaggaagatttctggaaagtgaaggagttcctgcataaccaggggaagcagaagtatacacttccgctgtaccacgcaatgatgggtggcagtgaggtggcccagaccctcgccaaggagacttttgcatccaccgcctcccagctccacagcaatgttgtcaactatgtccagcagatcgtggcacccaagggcagttagaggctcgtgtgcatggcccctgcctcttcaggctctccaggctttcagaataattgtttgttcccaaattcctgttccctgatcaacttcctggagtttatatcccctcaggataatctattctctagcttaggtatctgtgactcttgggcctctgctctggtgggaacttacttctctatagcccactgagccccgagacagagaacctgcccacagctctccccgctacaggctgcaggcactgcagggcagcgggtattctcctccccacctaagtctctgggaagaagtggagaggactgatgctcttcttttttctctttctgtcctttttcttgctgattttatgcaaagggctggcattctgattgttcttttttcaggtttaatccttattttaataaagttttcaagcaaaaattaagttaaaaaaaaaaaaaaaaaa

SEQ ID NO: 289998 - DNA, 1000 bp, Homo Sapiens; identical to SEQ ID NO: 223028

SEQ ID NO: 289999 - DNA, 1000 bp, Homo Sapiens; identical to SEQ ID NO: 223029

SEQ ID NO: 290000 - DNA, 1000 bp, Homo Sapiens; identical to SEQ ID NO: 223030

SEQ ID NO: 290001 - DNA, 1000 bp, Homo Sapiens
ctggacttccgccactatagcatcaaagttgttcctgtgggcgcgagtcgcgggatgaagaagctgctccaggagaagttccccaacatgagccgcctgcaggacatcagcgagctgctggccacgggcgcggggctgtcggagagcgaggcagagcctgacggcgaccacaacatcacagagctgcctcaggctgtcgctggccgtggcaacatgcgggcccagcagagtgcagtgcggctcaccgagatcggcccgcggatgacactgcagctcatcaaggtccaggagggcgtcggggagggcaaagtgatgttccacagttttgtgagcaagacggaggaggagctgcaggccatcctggaagccaaggagaagaagctgcggctgaaggcgcagaggcaggcccagcaggcccagaatgtgcagcgcaagcaggagcagcgggaggcccacagaaagaagagcctggagggcatgaagaaggcacgggtcgggggtagtgatgaagaggcctctgggatcccttcaaggacggcgagcctggagttgggtgaggacgatgatgaacaggaagatgatgacatcgagtatttctgccaggcggtgggcgaggcgcccagtgaggacctgttccccgaggccaagcagaaacggcttgccaagtctccagggcggaagcggaagcggtgggaaatggatcgaggcaggggtcgcctttgtgaccagaagtttcccaagaccaaggacaagtcccagggagcccaggccaggcgggggcccagaggggcttcccgggatggtgggcgaggccggggccggggccgcccagggaagagagtggcctgagcccaagccgcaccggagcagcggctggattgaacgccccagattggggcccgagatgtggccctcggtttcctttcataaaggagttgtgtccccagcccttccactccagtaaagaactgaattggccagggaaaaaaaaaaaaaaaaa

SEQ ID NO: 290002 - DNA, 1000 bp, Homo Sapiens
tatccacagctgaagccatgggttcactatatcccagtcaaaacagatctctccaatgtccaagagctgttacaatttgtaaaagcaaatgatgatgtagctcaagagattgctgaaaggggaagccagtttattaggaaccatttgcagatggatgacatcacctgttactgggagaacctcttgagtgaatactctaaattcctgtcttataatgtaacgagaaggaaaggttatgatcaaattattcccaaaatgttgaaaactgaactatagtagtcatcgtaggaccatagtcctctttgtggcaacagatctcagatatcctacggtgagaagcttaccataagcttggcacctataccttgaatatctgctatcaagccaaatacctggttttccttatcatgctgcacccagagcaactcttgagaaagatttaaaatgtgtctaatacactgatatgaagcagttcaactttttggatgaataaggaccagaaatcgtgagatgtggattttgaacccaactctacctttcattttcttaagaccaatcacagcttgtgcctcagatcatccacctgtgtgagtccatcactgtgaaattgactgtgtccatgtgatgatgccctttgtcccattatttggagcagaaaattcgtcatttggaagtagtacaactcattgctggaattgtgaaattattcaaggcgtgatctctgtcactttattttaatgtaggaaaccctatggggtttatgaaaaatacttggggatcattctctgaatggtctaaggaagcggtagccatgccatgcaatgatgtaggagttctcttttgtaaaaccataaactgtgttactcaggaggtttctataatgccacatagaaagaggccaattgcatgagtaattattgcaattggatttcaggttccctttttgtgccttcatgccctacttcttaatgcctctctaaagccaaaaaaaaaaaaaaaa

SEQ ID NO: 290003 - DNA, 1000 bp, Homo Sapiens
gtataatgcatccaaaaagtccctagaacttgttatggacatgttcaagaggcttaaagttccagttcatcatacatggggaaaccatgaattctataacttcagtagagagtatttaacacactctaaacttaacactaagtttctagaagatcagattgtacatcatcctgagaccatgccttcagaagattattatgcttatcattttgtaccattccctaaattccggttcattttacttgatgcatatgacttgagtgtcttgggcgtggatcagtcttctccaaaatacgagcagtgtatgaagatattgagggagcacaatccaaatacggaactgaatagtcctcaaggtgaattattcctttgagctgagaatctaatagattgtctttaaattcttcagctaccttttattcagcaggaagatggacaattaaggactttctgagccccagtttgtccagtttaatggaggattcagccaagaacagctaaactggttgaatgaagtgctaacattctctgacacaaaccaagaaaaggtggtgattgccatcttcccatttacccggacgcctctgacaatgtgtgcctggcctggaactacagagatgccctggcagtcatttggtctcatgagtgtgtggtgtgtttctttgctggtcacacccatgatggtggctactctgaggatccttttggtgtataccacgtcaacctagaaggagttattgaaacagctccagacagccaagcctttggcacagttcatgtctatcctgacaaaatgatgttgaaagggagaggcagagttccagatagaattatgaattacaagaaaggaagagccttccattgttagtctaatttattttaacttgatagaaaatgagctttgtgtttgtccctcctaaacaaaaaaataaaaatcctctgtctcatcaaaaaaaaaaaaaaaaaaaaaaaaaaaaaaaaaaaaaaaaaaaaaaaaaaa

SEQ ID NO: 290004 - DNA, 1000 bp, Homo Sapiens
gtcccaagaaaaaagaagaagactggaaatgtgtcctcagaaccgactaaaaccagcaaaggaagtggggataaatggtcaaacaagcaactcttcttggatgccattcaccctacagaagccatattttcagaagacagaaacaccatggagcctgttcataaggttaaaaatatcccatccattttcaacactccagagccaacaacaacgcaagaacctttggtgggcagccaaaagagaaaagcaaggaaaaccaagattacacaccttgtcaggacagcagatggccgggtatcaccagcaggaggtactttggatgacaaaccaaaggaacaactgcagaggagtctccctaaagcaactgagacagactgcaatgacaaatgctcacacaacaccgaggtcggggagacgcggagcagtactccagaaatgcctgccgtgtctgcgttctttagcctcgctgcgctggctgaagtggcagccatggaaaatgtgcacagaggtcagaggtcaactccgctcacccatgatggacagccaaaagaaatgccgcaggctcctgtacttatttcctgcgctgaccagtgaagcgccctttcattgtaaaacattgtgctttacctactaccctagccttgtctttaccgagggatgctagtgagtccaagtggtggaaaatatagactgcaaacaagtgcttgttgccccacacggcccagattcacttgaagcagaagttagcatcctgggccagtttgttctctcagaacccagaatctttgagggtaaggttatctgtctgatactgagcagaaacagaatgatcctggagctttgctttctattgaaggcttttgacggtaataggtggtaacttggtaaaaggctgcctttactgtagctcacccagcatctcttttaccaaccagagagtgtgaaactagtttcatatattacctagttattctttcaaaacaaaacaaaaaaaacaaaa

SEQ ID NO: 290005 - DNA, 1000 bp, Homo Sapiens
caattctttaattcagtgtattgcttggtgtttgcatgttgctatgattggaacaaggttccccctcctccattcttgccctctggagaagtggttcctgcagtgtagagatatgaacagggtatggtaggattggggaaaggggagagagaagcagtagatacactccttatcctccccaaattttaagctctatttttgtgccctagtcctagacacacattagactcagggagttttgtctgaagaccaggtcccactgccccctggctgaagagtctgctttaaatgggaaaacaacgtaggagcaggggtttttaggcactttcagttttctcaggtgttcttcgttctggcccttccagggtaattaggaaggcagaacaagacagatgagctcctgcctgctctgagacaagaagggtggggtctcattagctttgcaacaggaaacatcctgttttattatggtagtggggtcaggaatgtaggaactggtatccattctgccaattcccacccattcagtttgcttatccctacagaacagtgactgaggttcctttttttttttttttttttttttttttcaaatttccatgtattttctgccatttttcagggtctaagattggtcatacattcccaatttactctcagttccagtcaagctggttgctctgaaagtaacccagcttgttgctctaaaatacctcagtagcctgagtgttatactagagatctaaagggttaacaggatagggtggaaaggttagagactcctagaaatctctggtcaccgtgatcttcggcctcattctaatacctgttctttggacagtctttttcctttggtgctctcttgcctttagctaccttctctaatatgtatgctaccatcactaataaagtgatgggaatgggtttgagagtcgtaatttatattaaaaagttgttggacttttaaatacattttttcaaataaaaaattaagcaaaat

SEQ ID NO: 290006 - DNA, 255 bp, Homo Sapiens
atgagtgaattctggttgtgtttcaactgctgtattgcagaacagcctcagcctaaaaggcgacggcggattgacagaagtatgattggagagcccacaaactttgtgcatacagctcatgttggatcaggagacctgttcagtggaatgaattcagttagctccattcagaaccaaatgcagtccaagggaggttatggaggtggaatgcctgccaatgtccagatgcagctcgtggatacgaaggcgggatag

SEQ ID NO: 290007 - DNA, 1000 bp, Homo Sapiens; identical to SEQ ID NO: 223032

SEQ ID NO: 290008 - DNA, 1000 bp, Homo Sapiens
cctaacacagggctctcaggaggaatgccaggggctctaccctcacttcctggaaagatctagattgttattgctgtttgagctgtctcagtgggataagtttgaaattcaagtgtttgaactgctgataatttggatttttttttttttttaactttggcacattgatctatctaaacctggtggggagaattatccccacattgtctcatggaaagactcaacttgcaactgtgccctccacactatccttacttctgtctccactctgataccagagtgcagccatgcagatggttattccagctctggtcacccgactcctttcaccaaattgctcctaactggaagatctcactttccccttgtggggtaggaaccgatgccagtgggagggatgtgcccctgaccattaacgactgttttttttttttttttttaaagaatggagttgttggggcaggacatgcacacaatgtgaaacagacaaaatgcattacacctgtagtgtaaagtggccactatgaatccctatgtatgagaggagggaggcaggctgcagcttcagccacagaatggggactatggaagacagcaggagctcatttcctctgcacattttggctgttagacctgtgtgtgtgtttaaaaaaagagaagtcagtgctcactttttgtatttaaatattaaaaatgattccaactgaaagtgtcatcctaagtaccttgaaatgagaccacgtcagagacatgtactgcccctcacattttctcacctaaaccagcagcacctccatcttaacagccataggcccaaattgtttccaagtgaaaattcatttttagccaagtacttcatagcaatctttgccctgaatttaggcagtcactttgagatccatcagcctaaaacaaaggattgggtctatgtacttctttagtctataatgacactgtgtaattataaagtatttgtagggaaaaaaaaaaaaaaaaaaaa

SEQ ID NO: 290009 - DNA, 1000 bp, Homo Sapiens; identical to SEQ ID NO: 117735

SEQ ID NO: 290010 - DNA, 953 bp, Homo Sapiens
agtccctgcattgcgcgcgacccggcggcgggacaggcttgctgcttcctcctcctcggcctcaccattccagaccaaaattgaaaaaatggttgacctcacccaggtaatggatgatgaagtattcatggcttttgcatcctatgcaacaattattctttcaaaaatgatgcttatgagtactgcaactgcattctatagattgacaagaaaggtttttgccaatccagaagactgtgtagcatttggcaaaggagaaaatgccaagaagtatcttcgaacagatgacagagtagaacgtgtacgcagagcccacctgaatgaccttgaaaatattattccatttcttggaattggcctcctgtattccttgagtggtcccgacccctctacagccatcctgcacttcagactatttgtcggagcacggatctaccacaccattgcatatttgacaccccttccccagccaaatagagctttgagtttttttgttggatatggagttactctttccatggcttacaggttgctgaaaagtaaattgtacctgtaaagaaaatcatacaactcagcatccagttggctttttaagaattctgtacttccaatttataatgaatactttcttagattttaggtaggaggggagcagaggaattatgaactggggtaaacccattttgaatattagcattgccaatatcctgtattcttgttttacatttggattagaaatttaacatagtaattcttaagtcttttgtctgatttttaaagtactttcttataaatttggatcatgttatgatttgtaacattcacacaacacctcacttttgaatctataaaagaattgcacgtatgagaaacctatatttcaatactgctgaaacagacatgaaataaagaatttaaagaatcaaaaaaaaaaaaaaaaaaaaaaaaaaaaa

SEQ ID NO: 290011 - DNA, 1000 bp, Homo Sapiens
ccaagagaagtaaaagctgaagagaaatcaccaatctccattaatgtgaagacagtcaaaaaagaacctgaggatagacaacaggcttccaaaagcccttacaatggtgtaagaaaagacagcaagagaagtagaaatagcagaagtgcaagtcgatcgaggtcaagaacacgatcacgttctagatcacatactccaagaagacactataataataggcggagtcgatctggaacatacagctcgagatcaagaagcaggtcccgcagtcacagtgaaagccctcgaagacatcataatcatggttctcctcaccttaaggccaagcataccagagatgatttaaaaagttcaaacagacatggtcataaaaggaaaaaatctcgttctcgatctcagagcaagtctcgggatcactcagatgcagccaagaaacacaggcatgaaaggggacatcatagggacaggcgtgaacgatctcgctcctttgagaggtcccataaaagcaagcaccatggtggcagtcgctcaggacatggcaggcacaggcgctgactttctcttcctttgagcctgcatcagttcttggttttgcctatctacagtgtgatgtatggactcaatcaaaaacattaaacgcaaactgattaggatttgatttcttgaaaccctctaggtctctagaacactgaggacagtttcttttgaaaagaactatgttaatttttttgcacattaaaatgccctagcagtatctaattaaaaaccatggtcaggttcaattgtactttattatagttgtgtattgtttattgctataagaactggagcgtgaattctgtaaaaatgtatcttatttttatacagataaaattgcagacactgttctatttaagtggttatttgtttaaatgatggtgaatactttcttaacactggtttgtctgcatgtgtaaagatttttacaaggaaataaaatacaaatcttgttttttctaaa

SEQ ID NO: 290012 - DNA, 1000 bp, Homo Sapiens
tggtgcactgctgcgtcaaccctgtcctctacagcttcatcaatcgcaactacaggtacgagctgatgaaggccttcatcttcaagtactcggccaaaacagggctcaccaagctcatcgatgcctccagagtctcagagacggagtactctgccttggagcagagcaccaaatgatctgccctggagaggctctgggacgggtttacttgtttttgaacagggtgatgggccctatggttttctagagcaaagcaaagtagcttcgggtcttgatgcttgagtagagtgaagaggggagcacgtgccccctgcatccattctctctttctcttgatgacgcagctgtcatttggctgtgcgtgctgacagttttgcaacaggcagagctgtgtcgcacagcagtgctgtgcgtcagagccagctgaggacaggcttgcctggacttctgtaagataggattttctgtgtttcctgaattttttatatggtgatttgtatttaaattttaagactttattttctcactattggtgtaccttataaatgtatttgaaagttaaatatattttaaatattgtttgggaggcatagtgctgacatatattcagagtgttgtagttttaaggttagcgtgacttcagttttgactaaggatgacactaattgttagctgttttgaaattatatatatataaatatatataaatatataaatatatgccagtcttggctgaaatgttttatttaccatagttttatatctgtgtggtgttttgtaccggcacgggatatggaacgaaaactgctttgtaatgcagtttgtgacattaatagtattgtaaagttacattttaaaataaacaaaaaactgttctggactgcaaatctgcacacacaacgaacagttgcatttcagagagttctctcaatttgtaagttatttttttttaataaagatttttgtttccaaaaaaaaaaaaaaaaaaaaaaaaaaaaaa

SEQ ID NO: 290013 - DNA, 1000 bp, Homo Sapiens; identical to SEQ ID NO: 117736

SEQ ID NO: 290014 - DNA, 1000 bp, Homo Sapiens; identical to SEQ ID NO: 117737

SEQ ID NO: 290015 - DNA, 1000 bp, Homo Sapiens; identical to SEQ ID NO: 117738

SEQ ID NO: 290016 - DNA, 1000 bp, Homo Sapiens
gtccagttctgcaccggggtggggctgggacccggggaaggtttgagggcccttgcaaccccctcccagcagtggctgggcactctttgctgccccagaagctggtcccctatggattcatcttggcctgacccagccaggtggccttatttcttccctgtcacctcccctccttgaaatctgggccctggtgcctgctgaagattccctctatccctgagtacttagtcttctcccccttccctggggcttctagagctctctctgcccctcaggtcctggcccttgggtccttgtcaaccagaggtctagggaaccacaacccttattgtcctgggtggaccaatccaaaggctaagtgatagtgactcatcaatgttgggtcctgtggggtaccagtttaggttcctaagtaatagtgaccctttcacgtcctggagcccgagtggaccaatcggaagcctaagtgacgatgaccctcgcatgtcctaggtccctgggtggacccatcaggaccccaagtgatagtgacccagtggtcttttagatcctcagtagaacagtccagaagcctgagagacagtggccccttgataatctgggtctcacgggaccagctaggggtccaggtttcagtcagtaaataagagtggtccacgtcctaaagacacctctcctttacaaagacttgtgatgctctggggcttctgtggccaagccccaccctttcctggtcatggtacccgtacagcgttgatggccacagctcgaaggggggctttcgtgtccccctgtgcggtcagtgttttcagtaccacctctctcccgtgcccacttggctatttacttatttatttattgtgtgccagtgatggtgggtgggggctgggccttccccgccacctccacccctgttgtgacctgtccttccgtacttaataaagtgcgcgtgggagtgttaaaaaaaaaaaaaaaaaaaaaaaaaaaaaaaaaaaaaaaa

SEQ ID NO: 290017 - DNA, 1000 bp, Homo Sapiens
gtggtgtgtgagccaccccctcctgtgtttgaaggcatgtatgaatgtaccaatggcttcagcctggacagccagtgtgtgctcaactgtaaccaggaacgtgaaaagcttcccatcctctgcactaaagagggcctgtggacccaggagtttaagttgtgtgagaatctgcaaggagaatgcccaccacccccctcagagctgaattctgtggagtacaaatgtgaacaaggatatgggattggtgcagtgtgttccccattgtgtgtaatcccccccagtgaccccgtgatgctacctgagaatatcactgctgacactctggagcactggatggaacctgtcaaagtccagagcattgtgtgcactggccggcgtcaatggcacccagaccccgtcttagtccactgcatccagtcatgtgagcccttccaagcagatggttggtgtgacactatcaacaaccgagcctactgccactatgacgggggagactgctgctcttccacactctcctccaagaaggtcattccatttgctgctgactgtgacctggatgagtgcacctgccgggaccccaaggcagaagaaaatcagtaactgtgggaacaagcccctccctccactgcctcagaggcagtaagaaagagaggccgacccaggaggaaacaaagggtgaatgaagaagaacaatcatgaaatggaagaaggaggaagagcatgaaggatcttataagaaatgcaagaggatattgataggtgtgaactagttcatcaagtagcccaagtaggagagaatcataggcaaaagtttctttaaagtggcagttgattaacatggaaggggaaatatgatagatatataaggaccctcctccctcacttatattctattaaatcctatcctcaactcttgccctgctctccgctccaccccctgccaactactcagtcccacccaacttgtaaaccaataccaaaaaaaaaaaaaaaaaaaaaa

SEQ ID NO: 290018 - DNA, 1000 bp, Homo Sapiens
cagggccacaggtgtctgaggagtaaaagccagagcaagtgccagtgtggatggtcctcaccctgcaagaagctggaaaactcctaggaatgcattgtcctcaccttgttatacctgcgtggcaccatggcaggattccacatttcatagaatacaggttttcaagcaaacccctgttgaccatgccctaatttcctattgatttctgttctataattgaatggatattcctatggaaaattttttgtttcaaaatacaggaaaaacattcctattacctttctgaggctggctttccagcaattgtttcaaaggaaaatagatccccttaaagaaaaaatacaggctttagggaacaaagggacaagcagaacaggtgtggaagagagattttcaggaagggaaaaatttatagctacagagggtagttagaaaaatcataacttatatgtgaataaaatacatataagcagcatttacggtagtggcattctacttattaagatgcaatgaaatgaagaaaggctttatgttcaaggacctttgccatagttcagctaattgtagttttatatagaaatgatcctgaacactctgaacttgacgtagtcctgcggtgatattctatctgcagtatttgtacctccagaatggcagatccctcagcaggaacaaaggcatattgacggttctctcagcgtatgcattaaaaaaggtacttcctgaaacttttgattcaataatgactaaacatactatgtacacaattactgtaaggctaattcacgtgccatactccacctgaaagcctgagttatcttgctataagcttttcatggagcacttcctttccagaaactgatttgtaactcatttagagaatgtcctggcgtcggtttttagcatatgtggtatttaaacagagctagaatgtgatgtctgaagataatgctgcatttctgggtttcttgtgtggattttaaaataaattgtgcctaca

SEQ ID NO: 290019 - DNA, 1000 bp, Homo Sapiens
gcagagatataccagacggtcatgctgcgccatgaaaacatccttggatttattgctgctgacaataaagataatggcacctggacacagctgtggcttgtttctgactatcatgagcacgggtccctgtttgattatctgaaccggtacacagtgacaattgaggggatgattaagctggccttgtctgctgctagtgggctggcacacctgcacatggagatcgtgggcacccaagggaagcctggaattgctcatcgagacttaaagtcaaagaacattctggtgaagaaaaatggcatgtgtgccatagcagacctgggcctggctgtccgtcatgatgcagtcactgacaccattgacattgccccgaatcagagggtggggaccaaacgatacatggcccctgaagtacttgatgaaaccattaatatgaaacactttgactcctttaaatgtgctgatatttatgccctcgggcttgtatattgggagattgctcgaagatgcaattctggaggagtccatgaagaatatcagctgccatattacgacttagtgccctctgacccttccattgaggaaatgcgaaaggttgtatgtgatcagaagctgcgtcccaacatccccaactggtggcagagttatgaggtaagaagctggcctcctgctgctttcccatcagcctgatttctccaccttagaaaagggtttcttgacaatggggtcaggccccagaggagccccctgagagtgtcagttattatttactattacgtgctattttacatatcccaagccctttagggctacagtctcttgtcctggaccctgtagggtgccatttggagttcacagcctagaagaagaaaaggctttgggcctggtgtggtggcataggcctgtaatcgtagcgctttgagaggctgaggcaggaagatagcttgagctcaggagttcgagacaaacctgggcaatgtggggagaccccatctctaca

SEQ ID NO: 290020 - DNA, 1000 bp, Homo Sapiens; identical to SEQ ID NO: 117741

SEQ ID NO: 290021 - DNA, 1000 bp, Homo Sapiens; identical to SEQ ID NO: 117742

SEQ ID NO: 290022 - DNA, 1000 bp, Homo Sapiens
aagatggacagggagccagcaggcaggcgggaagggccaagtacaggcaatcacccccatcttcttggtttgaagctttatccatgtatcatgttccgtgtagccattttattttttaagaaactgctaatactttctccctaatggaagccctgatcccccagagagctacaggtctgctcccgacgggcctcgggcctgacccgtccacacagggccgtgtcaacagcagcgactcaagggacgtgtgtacatatgtaaatgagaaatagagacgtgtcaacagatgcattcatttctcttggaatgtgtattgtttttattttgcgaaacaaaacaaaacaaaaaaaaaagcttggaactccatcacgtggaaaaactagatcctgttggttatagcatttgtgagttctccacgtctgtctctctcgctcatgtaatatactctgaccctgagtggaaaggggtttttgttctgtttttattttacctacatgtactatttagcttcagtgtactagtcctgccacctgtgtatttttagggtgctatggaaataatgaaaagaaacggggatttcagaagaaaattgtaaccaaattcatactttgtataatttttgatatcatgatcacaggtgattcacacgtacacacataaacacacccaccagtgcagcctgaagtaactcccacagaaaccatcatcgtctttgtacatcgtatgtacaatgcaatcatttcatactttaaactggtcaaaaaactaattgtgatttctagtcttgcaaagctgtatgtagttagatgatgtgacaacctctaatatttatctaataaatatgtattcagatgaaacctgtatattaggtgttcatgtggttattttgtatttaaagatcaaattatttgactattgctagacatttctatactctgttgtaacactgaggtatctcatttgcccatgttaatttttttctaaataaattgacaaaaac

SEQ ID NO: 290023 - DNA, 1000 bp, Homo Sapiens
attatcctaatgattgaaaactcctcaatcaagcttacttacacacattctacagagttatttaaggcatacattataatctcccagccccattcataatgaataagtcaccctttaaatataagacacaaattctacagtattgaaataaggatttaaaggggtatttgtaaactttgccctccttgagaaatatggaactaccttagaggttaagaggaaggcagtgttctgacttctttaggtgatctgaaaaaaacacccttatcatccagtgtaccatctagagatcaccacagaatccatttttttcccagttccacaaaacactctgtttgccttcagtttttactcactagacaataattcaagtttagaaacaggtaatcagctatttgatcttaaaaggcaatgaattgttgggatatcagtgaactatgttgtatacttttgaatttttacattttataaatggaattgaaagttggataactgctttttttaaattttccaacagaagtaacaccacagttgctttgtttctttttatagcttacctgaggttcagttcttctttgtgaacctgtgagtactccacagtttactgggggaaaaggcttcagtaaagcagaggctagaattacagtatttatacatagcaacttttcataaagtagaaaaattcaaaggaagctgtctcaatttgagaataccagctgggcacggtggctcacgcctgtaatcccagcacttactttgggaggccaaggtgggcagataacctgcggtcaggagtttgagaccaggctggacaacatggtgaaacctcgtctctactaaaaatacaaaaattagccaggtgtggtaggatgcacctgtaatcccagctacttaggaggccgagacaggagaatcgctcgaacccaggaggcggacgttgcagtgagccaagattgcaccattgcactccagactgggtgacaagagtgaaactccatct

SEQ ID NO: 290024 - DNA, 1000 bp, Homo Sapiens
tgaaaaattatttctgacttactccatggcctccttataataagtagaagttttatatataattaattttcagcattgggcactgaattaggacagtcctcatctcattgcttggcccttcaagcaacctagctaaaaggtgctgatattttatttagtactgccaacttcaagtgatttagatatctatctatctagatttctgaaccaagatatatttatagttcacttttgggtttttatacccacggtaggattctgcattccagcattaaatctgcttcattttagaacctttataaaagcaatagctggaatatactcccagttttaaaataaatgcctgattgatttaaagcaagtaggttatgctgaagtatataaagaagttttatattctctcaaaaatggtattatctttctttatttgctagattcttacaaatcttttaagagggctgtaacagttgctgctagtattagggttccacatcattctaatgtatagtttcaagtcttaatagacaatctgaattccactacatttcttttggctccaacattccttttagcttgaccagtctaatttaaaatgtgtttgttggaggtcattaacgttacttgtacaatgctgtcactgtgtgacatccatatgaattttggtatatatcaatcaatcaatcaatcacattgcattcaatcaatcagctgtgattgattgattatgcttagaaatactatagtaactagatgcagtgtgaattttttccattaacaaacaaacaaacaagtcagtggcttaaatgtgattatggtcctgcaaggtgattcttgctaaaatatctaaacttttgttttgttttaactgaatcattttttaacttaaaaagctggaaaatatcaaatgctgtttttttttttcattgtcaacagtggtgtgtcattttatgtatgttcctaatgcttatggaactcctccaaaataaagttactcaaagag

SEQ ID NO: 290025 - DNA, 1000 bp, Homo Sapiens; identical to SEQ ID NO: 223034

SEQ ID NO: 290026 - DNA, 1000 bp, Homo Sapiens; identical to SEQ ID NO: 223035

SEQ ID NO: 290027 - DNA, 1000 bp, Homo Sapiens
tcaccccagggggtccatagttggacttcagagggtctatgaaacccctaaaactgtcagtatttaatgtatttattcttgtatgttttttccagagcattaaagctttcataaggttctcaaaggtctcagacctacaaagagttaaaacaaacagacaaacaaaaaaaaacactactattttaaatagtggaactttcagcccagcgtttctgcaatgcagagtgaagtggatactgggcagttcgagacaggtttttaatcataagtggtcttttcaaatgtccatcaattgatggggaaggctggcacccaccaagaagtggaagtcctcagaaattctcggcacaccctagagtattgtacaaccaacacccccacataactttgtcccctcttccccaacaacccagagcaggtgttgcagacaggagggccacagcgtgtggaagtaaagactttggagctagagatgccttttccagcaatgattattgacttcaccacaccccttgcctggcctggcctgaggctcagcagtgcatgacttctcgtagataacttcacagtcatccagtcccaacacctgctcttgcctggtaggaacaggcgaagtgtcagccctcaatgttgggtacttagacccaaaccaataaatggtgagttttgaacaagaactaccatcatgcaggcttcttgcccagctgaccactggccccggggtgcctgcctggctggtcttcatcacctgaggccaccaggctcaagccactgctgttgcattacacccatccctttgcaaaatccctatggagcctgtcaccactcccctccctatatacccccaccccacaaagattttcttcaggttaaaaaaaaagtttaaaaaaaagattttaaaataaagcatttatgaaggcttaataaattgtaaataatttttaaataaaatgaaaatgcctttcctggaaaaaaaaaaaaaaaaaaaaaaaaaaaaaaa

SEQ ID NO: 290028 - DNA, 1000 bp, Homo Sapiens
gacaacctggggctgcattgtattctcaggctcctatgcctgggccaacttcaccatcctggccttgggcgtgtgggctgtggctcagcgggactccatcgacgccataagcatgtttctgggtggcttgctggccaccatcttcctggacatcgtgcacatcagcatcttctacccgcgggtcagcctcacggacacgggccgctttggcgtgggcatggccatcctcagcttgctgctcaagccgctctcctgctgcttcgtctaccacatgtaccgggagcgcgggggtgagctcctggtccacactggtttccttgggtcttctcaggaccgtagtgcctaccagacgattgactcagcagaggcgcccgcagatccctttgcagtcccagagggcaggagtcaagatgcccgagggtcctgaagccagccacgctgcgcccggccctgccccgggccttcctcgtgcctgggaggtcgttctagggatgctcctgacctccgtctcttggacctaagatggaatgtgtccccagctcagggattgcctgaaccaagaggccaggagcccccatgggccgcccagtaccatgcacactcctgtcccgaactccctgaggcctcccctcccttcagggcacccactggttcccaggctggaaccagggtctctctttacctcctaccccatggtggcaccacagaggccctcagccgagtccagcctgagtgttgcaagctcaggcctttaaggactgctgatgccccctcaggcctcccccaagtttgctgggctttggtggaagccctgagagcttcaggtcctgctcagcccgaggagcagtctggcatgggagtgaggccccgtccttctcactgcctggtcacatggtgcctagggatgcagggctggaggccagaggtgtcagcaacactgtgacccaccacaacctccagcctcccttttcagagcacagcattaaagtttggggaattc

SEQ ID NO: 290029 - DNA, 1000 bp, Homo Sapiens
aagcgacaaattccaccgctgcttaatactgctttgcttctttttattgacatgatagatacatatgtatctacacagagtaataataataaaacacagtaaacattctatttctctatggtctacagcatgccagtaaataatatgtaggaccaataataaattatcaattacacatttttgtgttaactaattaaaagcatagtgtataagtgagtacactctaattaacttgcttctgttgcactttagttttctacctgcatatggactgcatttttttttttaacacagtcagtatgtagaatgggatgtattcttctgctgctgcttattaaataaagaaagcctgagtgttcttagatggggttattctgagatgagggtcttagcctacagttctttttgaaatgaaaggtgctttgttttttaattatattcatcttttcagggtaaatttgtttttctgagtttctcgtaatgctcatttttacatgctgctactagcttttttttttaaaaaaagtaaaagttgctgctttctaaaatattaattgccttatatttgaaagtgccattgcaatcgtaagtagactatgtatttcctataatgatgtctgatatttaaataggaaatcagacaaacaatattcagaaagtttaagcatataaactttttatttttaacttgcctagatccctgtattccaaaacctgctgcatcataataaatatatctatatatatttagcataagacgtgatatttttaatttcttttttaaaaaattatatttgtctcttagagttaaaattttctttatataatattgtcatatgtcatagttttaatacaattcacatgatttctatgtttcttaatgatattttgttgtgtaaaattgatcggattgattaaaaaacaaattctctggaatttgtgcgttcatgctttttcgtattctttatggcttttaaataaatatacaatggttaatagt

SEQ ID NO: 290030 - DNA, 1000 bp, Homo Sapiens; identical to SEQ ID NO: 223038

SEQ ID NO: 290031 - DNA, 1000 bp, Homo Sapiens
tattttgaatgtgcttctcttgttttttgtttattagctagttcctgtaagcatttccaccagaacttgaggcaaatcgtaaggaagctgtttcttttaaaacacaaaccaccaccaaaaatttaaatgtacatattgcttaagtatttggctgtttttattttttaaaaggtataaacaccaaaaaaaaaattaacattgtatgaagatggaaaataagaagatgcactttctgtaactttgtctaaggatttaaattactaacttatgaactccaatttgaattgaacttaactatcggctttcttactggtaaaattatatggtttattttaaatgcgtacatattgaccaatggcctctgaaaaagcacattttagatactgaaattgaaggaaagaaaatgcatcttcaaacattttttggaatctcaccacatatactttgttagatttgtgtattgtagggtgtttgttttgtatttttgtattgtatatgaactttttttaaatgtgacagttaaacacatctttaaaagcatagtcacagacaaaagcatacagtataaaaatttccttgaaaactcctacaatattatatttggaggcagcttcagactgttttattggtggtagctgcttgctgaggtcttttagttggtaataactccagagaagcagcctgtgtatattcctaacactttgttcactagcatttaagtttagaataagcccaagtaagacaatggaaatgtatatagaactcttagttcttacatgatttaattatatcgatacatgaatttaacttactttaatgtaggcaaactatcaattttttgtccattttcctgtttgttaaaataacatacctctcctacgtattattttcttgacccaaatgaaatattaacctaaggtcaagctgggagagagaaatgactgagatgaatgtctttactaaagtaccaataaatttgtcaaactcaaaaaaaaaaaaa

SEQ ID NO: 290032 - DNA, 1000 bp, Homo Sapiens
atttctatatcatgcctgtgtttaacgtcgatggataccattttagttggaccaatgatcgattttggagaaaaacaaggtcaaggaactcaaggtttcgctgccgtggagtggatgccaatagaaactggaaagtgaagtggtgtgatgaaggagcttctatgcacccttgtgatgacacatactgtggcccttttccagaatctgagccggaagtgaaggctgtagctaacttccttcgaaaacacagaaagcacattagggcttatctctcctttcatgcatatgctcagatgttactgtatccctattcttacaaatatgcaacaattcccaattttagatgtgtggaatctgcagcttataaagctgtgaatgcacttcagtcagtatacggggtacgatacagatatggaccagcctccacaacgttgtatgtgagctctggtagctcaatggattgggcctacaaaaatggaataccttatgcatttgctttcgaactacgtgacactggatattttggatttttactcccagagatgctcatcaaacccacctgtacagaaactatgctggctgtgaaaaatatcacaatgcacctgctaaagaaatgtccctgagacagcccaaggctcaggtcaactgccataggattctgagcaaggcctacttggccctggatagaaattgttttcaaagagaagggcagctgcttagagtgaacatgtctatggactttaaaaagaccccacgcaatttgactttgtggcaatagaaaacagtaaaaaacagggcatagcctagtttgttataagaaaaagcatccattttctatccttttagagtcttatttgattatggtgggagggaatgttttcaaatttcccatttctcaagaaatgttcatattaattgaggatttcccttcaataaatctcatgtcctcaattataaaaaaaaaaaaaaaaaaaaaaaaaaaaaaaaaaaaaaaaaaaaa

SEQ ID NO: 290033 - DNA, 1000 bp, Homo Sapiens
atattggcctgagaggagagtggactgagcttcgccgacacgaggtgaccatctgcaattacgaagcatctgccaacccagcagaccatagggtccatcaggttaccccacagacacactttatttcctaagggctggccaaggctcccatagaggcgctgtgtcagtgaagatgtacgactacctgttgggaaggacaaagggatgaggctccagagagagttggctgccacagcctctgccaagctttgtctttggggcttgctgcagaaacctggcctacggaagatacgacaccactgggagggttgtgtaggtgccaggggaccatcgtggttctctagggcgctgtggaaattgggtcttgggctgggtggcatctggcagtcatggataacacttgcttttccagttaatgtggccatgtgattccaagtgtcatgttgctttgtggcaagattgttgtgtgacttgtttttttgtttttgtttttgtttttttaaaggaaactatttgtgggctataggaaactttctgatgcctccggattgtgttagtagtagccatcaggagggtctccaactaaaacacttgttcctgcttgctcctttcccctctcattgttcagcattcttgtcaagttgcccagcttggagttgtctgtcacgcacatgtgtcctgtggttatagctagaaggacaggagtctcctgctgatgcgtgatagcttaagcttggggagaaggtcttttccactgcctagctaagcagtctggggagagcatggggatcatttctatgtgtgtgggtaatctggtcagtaagattgagacttagttaagattccccttggaaattccttaatgtttattagcttctaactagtgttgtaagtccgatgccagaatttggagatttgagttcttcttttcatggcttttattcactgtgactaataagcttcctaataaatccttgccagacttaaaaaaaaaaaaaaa

SEQ ID NO: 290034 - DNA, 1000 bp, Homo Sapiens; identical to SEQ ID NO: 117743

SEQ ID NO: 290035 - DNA, 1000 bp, Homo Sapiens; identical to SEQ ID NO: 223040

SEQ ID NO: 290036 - DNA, 1000 bp, Homo Sapiens; identical to SEQ ID NO: 223043

SEQ ID NO: 290037 - DNA, 1000 bp, Homo Sapiens; identical to SEQ ID NO: 117744

SEQ ID NO: 290038 - DNA, 1000 bp, Homo Sapiens
gccatgggccccgaacccttatgagttttcgaaacagtactggtttattctgtctgcccgtctggcttttgtcataatcttccagaacctcgtgatgttcctgagcgtcctcgtggactggatgattccagacatccccacggacatcagcgaccagatcaagaaagagaagagcttattagtggatttcttcctgaaagaggagcatgagaagctcaagctgatggatgagccggctctgaggagcccaggaggtggggatcgaagcaggagccgggcagccagctcagcaccttcaggccaaagccagctgggcagcatgatgtcgtcaggctctcagcacaccaatgtgtgagcagttcagcctgcagcagaggagggcacggcagcagagacacgcacatgcacgtaagcatgttcctacacccacatggcgtgctgtctgtctgcaggggcctggcttgatggggtcttgaagagggggcagtgtgtaaaaagaaagagcctgacagaatgagtgtaggaaggaagagaaatgatgctacatctcagaaacttcaagcttaagtttcttttaggtccccttttaagctgcatccttttgagggattggaaccccactggggtctctccaccccagagtctcaggcaccgcgagcattcccatgtaccctggggcaccctcttgtacttcaccatcatttctgactttgaccagctgtaagagaaatgcagtcaggagcacagcatcccctacttactatcactacaagaaaactgagtcacttgcagtggggctgccacagtctcagcagatgcaaattaagttacaaggctgaatggtgcagccgctggacctgatagtaaggtgcaaaggtccaaacctgggcttgtctccacttcacgtcacaaaaacgtttggagctaaatgcagataaccatcattttatgaaagttcagatttaaaataataaaataaatggacacattctttataaag

SEQ ID NO: 290039 - DNA, 1000 bp, Homo Sapiens; identical to SEQ ID NO: 117745

SEQ ID NO: 290040 - DNA, 1000 bp, Homo Sapiens; identical to SEQ ID NO: 117746

SEQ ID NO: 290041 - DNA, 1000 bp, Homo Sapiens
gctacatgtacctgtggcgacagacccacaaccccatctacagggagtggggctgggaggtggtgctggccttggagaaatactgtcggacagaagccggtttctctgggatccaagacgtgtacagtagcacccccaaccacgacaacaagcagcagagcttctttctagcggagacactaaagtatctctatcttctgttctctgaagatgacttgctctccctggaagactgggtgttcaacaccgaggcccacccactcccggtgaaccactcagacagctccggcagagcctggggcagacactgaccccatctcctgccgccgccctggggccgccgcagggatgccttgccttttcaggatttgagactgttctcaaagggattgggaacgaaggccccatctcgggcagacccccagcagatgtgtcggacaagcaacttcttttcctctgtgaggagacaagacttggagactcagcgatgtcaggccagggccatggccacactggcccacacattcctttctacagagaatttctatgaagcccactcacttgccattccagggccaaaggaccggaggtttgcatatccgccccttgtatttgatttgcttccttttggtttcttggtttttgtttttgcttgattttgtcttttctctacagtttagttttgtcacaattacacatatagttttcaaaatcatgcactttctaaaatggtgtcatcctgaaaaacaaaacccagtgtttgcacacacacaaaatcttgaccccgttatctatattttaaatgctttttgcccaacactgaccctatgttcaactttgtgtcatttaccttataatttgaggaggggtttccctttgggcctcagtgttacaaattactagtgctattttcattattattgtaatggaaaaatctgtggactagaataaaagagtttattgaataagaaaaaaaaaaaaaaaaaaaaaaaaaaaaaaa

SEQ ID NO: 290042 - DNA, 1000 bp, Homo Sapiens; identical to SEQ ID NO: 223045

SEQ ID NO: 290043 - DNA, 1000 bp, Homo Sapiens
tagatgtgggcagggagagggttgcttacctgccctgctggggcagggtttcctgaaactgggttaattctttatagaaatgtgaacactgaatttattttaaaaaataataataaaaatttaaaaaaattaaaaataaaaaaaaccacagaaaacaactttacatgtatataggtcttgaagtgagtgaagtggctgcttttttttttttttttttttgcttttttttgctttttgtagaagagattgagaatggtactctaatcaaaaataaagttttgtagtgggaccagaaattacttacctgacatccacccccattccccctcatcctgctggggttgaaagttccagacctgctgtcgaggccttgtgtttgtcagacacccagtgtcctcctgcaaggacgcaactgtgagctgaggtgtgagcctaggagcccaggacccctgaccccggccgctgctgccagcctcagaaaggcacccaggtgtgcaggggagcacacagggcccggcagcccccaggaatcaaggatagggctaaggttttcaccttaactgtgaaggcaggaggaataggtgactgcttcctcccgcccttcacagaactgattctcacacactgtcccttcagtccagggggccggggctcaggagccatgacctggtgtctcctgcccaccctggtcccaggtaaatgtgaatggagacaggtatgagaggctgtcctcgtctttgattcccccccaaccccacctcgggcctcacgacggtgctacctaagaaagtcttccctcccaccccccgctagcctggtcagtggtcagcaaattggaagaggatccgatgggagtgtaaatgtgagacacaatgtcttgattatacctgtttgtggtttagctttgtatttaaacaaggaaataaacttgaaaattatttgtcatcataaaaatgaaacaaattaaaatatttattgccaggcaaaaaaaaaaaaaaaa

SEQ ID NO: 290044 - DNA, 1000 bp, Homo Sapiens; identical to SEQ ID NO: 117747

SEQ ID NO: 290045 - DNA, 1000 bp, Homo Sapiens
gaacagtaaaccagtttttctagggatggcccttggctgggggatgacagtgtgggagctgtggggtactgaggaagacaccattccttgacggtgtctaagaagccaggtggatgtgtgtggtggctccagtgggtgtttctactctgccagtgagaggcagccccctagaaactcttcaggcgtaatggaaaatcagctcaaatgagatcaggcccccccagggtccacccacagagcactacagagcctctgaaagaccatagcaccaagcgagccccttcagattcccccactgtccatcggaagatgctccagagtggctagagggcatctaagggctccagcatggcatatccatgcccacggtgctgtgtccatgatctgagtgatagctgcactgctgcctgggattgcagctgaggtgggagtggagaatggttcccaggaagacagttccacctctaaggtccgaaaatgttccctttaccctggagtgggagtgaggggtcatacaccaaaggtattttccctcaccagtctaggcatgactggcttctgaaaaattccagcacacctcctcgaacctcattgtcagcagagagggcccatctgttgtctgtaacatgcctttcacatgtccaccttcttgccatgttccagctgctctcccaacctggaaggccgtctccccttagccaagtcctcctcaggcttggagaacttcctcagcgtcacctccttcattgagccttctctgatcactccatccctctcctacccctccctcccccaaccctcaatgtataaattgcttcttgatgcttagcattcacaatttttgattgatcgttatttgtgtgtgtgtgtccgatctcacaagtatattgtaaacccttcggtgggtgggggccatatcctagacctctctgtatcccccagactatctgtaacagtgccaggcacacagtaggtgatcaataaacacttgttgattgag

SEQ ID NO: 290046 - DNA, 1000 bp, Homo Sapiens
gatccctccctaggccctgcctaaccttgagttggccccaatccctcttggctgcagaagtccctttcacccccaatgagaggaggggcaggaccagatcttttgagagctgagggttgagggcattgagcaacacacagatttgtcgcctctgtccccgaagacacctgcaccctccatgcggagccaagatggggaatggaactgaggaagattataactttgtcttcaaggtggtgctgatcggcgaatcaggtgtggggaagaccaatctactctcccgattcacgcgcaatgagttcagccacgacagccgcaccaccatcggggttgagttctccacccgcactgtgatgttgggcaccgctgctgtcaaggctcagatctgggacacagctggcctggagcggtaccgagccatcacctcggcgtactatcgtggtgcagtgggggccctcctggtgtttgacctaaccaagcaccagacctatgctgtggtggagcgatggctgaaggagctctatgaccatgctgaagccacgatcgtcgtcatgctcgtgggtaacaaaagtgacctcagccaggcccgggaagtgcccactgaggaggcccgaatgttcgctgaaaacaatggactgctcttcctggagacctcagccctggactctaccaatgttgagctagcctttgagactgtcctgaaagaaatctttgcgaaggtgtccaagcagagacagaacagcatccggaccaatgccatcactctgggcagtgccaggctggacaggagcctggcctggggagaagagggcctgttgcatcagcctctgaccttggccagcaccacctgcccccactggctttttgtgccccttgtccccacttcagccccaggacctttccttgccctttggttccagatatcagactgttccctgttcacagcaccctcagggtcttaaggtcttcatgccctatcacaaatacctcttttatctgt

SEQ ID NO: 290047 - DNA, 1000 bp, Homo Sapiens
aaattttttctctgaattgggtatatggcatcattatttgattttagcagggaacatttggatttagcttatgaaacacagatgttctatgggaacatggcttgaagccaatatgtaatttaatgtttttccattaaacaaacatctgaacaccaacttagctaccaagtgaggtcaagtgcctgaaaagtactgtatacatctaataagcatgttttccttatgtaaaagatgcactttatggcaatgcataccaggctttcacctgctagaaacatacttgttgccaactttgccatctaccactattctcctccttagaacaggtagaaacctattttacaaaaaaaaaaaaaaaaaaaaaaagacaggttattgtatttatatgaagtccctaaaactgtttcttggtattgatagacttaagtttatcttagttcaagattgcactttttaaaaaactctggactattttcagcaatgaccgaacagcttgtcacacatcatagttgtgatcttttttgaggagttatttattgtggttaatatctactataaataagcattcttgtgcttgttacaaagcataatgcaaattactagttctatactagtataatgaaaatgactagttctatactgttatgtacttttgtcttcctccccaaaaaggaaacagtttagcattgtctaaattcagtggcacttttttagtaatacatttttttttcttagatacaggagaactattgcttttacctgcagaaactcaaatgttttcgctaaaactttaaaattctaaaatacgtagtatgggtattactaattgtacattttacatttcaaaaatagttaaaattcaaatgttaagtctttgacttaaaaaacctttaaatatagataataccttaacaattataactttgtgatattattaaaatatatttgtctgttaacttcatcagttgtattaaataaaaatagttaacagcttgcacta

SEQ ID NO: 290048 - DNA, 1000 bp, Homo Sapiens
catagacaggctcaagtcatgcgacattggttataacttcctggtgggccaggatggcgccatttatgaaggggtgggctggaatgtccaaggctcctccacccctggctacgatgacattgccctgggcattaccttcatgggcaccttcacaggtataccacccaatgctgcagcactagaggcagcccaagacctgatccagtgtgccatggtcaaagggtacctgactcccaactacctgctggtgggccacagtgatgtggcccgaaccttgtctcctgggcaggctttgtacaacatcatcagcacctggcctcatttcaaacactgagagaagccccaggtccttctgagactgctttccctcccctgtcaggtctctcctgtcctaaccatccagcttggctcaacaccttttgccctcctcccctgccacacagtcctgtgcctcctttttcaggttgggatgatcatgccctctcctgccaacatcctccaagggcctccaaacctcatagctggacattcacagccctctgagtctgagtccagatttcttctctccttaccttcctctcccttggaaacccaactcctcagccaggtgagacaatgggctggttcttgtttcatttctctctctctctccattcccctctgcctggtgagccttcccctggtgtctgcctggcagcccccacctcccacctatcacccctcacccataactcaggtcaacgtgaccaaccttccttgcttacacataaacttgtatatatttggatgtagcccttatttaatggctgtcattatttatagatatgtctatccttgctacttggttgtgagtttctccaggggaggaactgtgttttattcatctctatgtcctctgtttctcagcagtgtctgaaatttaatgggttctactgatgtttattagagaaatggatgaataaatgaatgaagagatccaaaaaaaaaaaaaaaaaaaaaa

SEQ ID NO: 290049 - DNA, 880 bp, Homo Sapiens; identical to SEQ ID NO: 223046

SEQ ID NO: 290050 - DNA, 887 bp, Homo Sapiens
cgggccaagaaaaccagcgaaggcccggccccccagcagaggccggaccatggttgaccagttgcgggagcgcaccaccatggccgacccgctgcgggagcgcaccgagctgttgctggccgactacctggggtactgcgcccgggaacccggcacccccgagccggcgccatccacgcccgaggccgccgtgctgcgctccgcggccgccaggttacggcagattcaccggtcctttttctccgcctacctcggctaccccgggaaccgcttcgagctggtggcgctgatggcggattccgtgctctccgacagccccggccccacctggggcagagtggtgacgctcgtgaccttcgcagggacgctgctggagagagggccgctggtgaccgcccggtggaagaagtggggcttccagccgcggctaaaggagcaggagggcgacgtcgcccgggactgccagcgcctggtggccttgctgagctcgcggctcatggggcagcaccgcgcctggctgcaggctcagggcggctgggatggcttttgtcacttcttcaggaccccctttccactggctttttggagaaaacagctggtccaggcttttctgtcatgcttgttaacaacagccttcatttatctctggacacgattattatgagttttaaaacttttaacccgcttctacctgcccaactgtgaccaactaaatgacagatgtgtgagaacaagaactgagggaaagcaccttcccccaccccagacgtttttatctgaatgcatacaaggagtcctgaggtggtgatttggccagtgttttaacttgtgacaagtactcaggtgtgaggacaagaatgcaaatggctcttccttgagtgaaagaa

SEQ ID NO: 290051 - DNA, 1000 bp, Homo Sapiens; identical to SEQ ID NO: 223048

SEQ ID NO: 290052 - DNA, 1000 bp, Homo Sapiens
ccagcgcagagggcagaagcactgaaacaaggcaatgcaattatgagaaaattcttggcatcaaaaaagcacgaagctgcaaaagaagtatttgtgaaaattcctcaggattctatagcagaaatctataatcagtgcgaggaacaaggaatggaaagtccacttcctgctgaagatgataatgctatccgagaacatttgtgcatcagagcttatttggaagcccatgaaacctttaatgagtggtttaagcatatgaattcagttccacaaaaacctgctttgatacctcaaccaacttttactgagaaagtggctcatgaacacaaagaaaagaaatatgaaatggattttggtatttggaaagggcatttggatgccctaactgctgatgtgaaggagaaaatgtataacgtcttgttgtttgttgatggagggtggatggtggatgttagagaggatgccaaagaagaccatgaaagaacacatcaaatggtcttactgagaaagctttgtctgccaatgttgtgttttctgcttcatacgatattgcacagtactggtcagtatcaggaatgcctacagttagcagatatggtatcctctgagcgccacaaactgtacctggtattttctaaggaagagctaaggaagttgctgcagaagctcagagagtcctctctaatgctcctagaccagggacttgacccattagggtatgaaattcagttatagtttaatctttgtaatctcactaattttcatgataaatgaagtttttaataaaatatacttgttattagtaattttttcttttgcattaccatgtaaaatttagacatttgaattttgtacttttcagaatattatcgtgacactttcaacatgtagggatatcagcgtttctctgtgtgcttgttaataaaactatataaaaattaaaattttctgtttttacaaattccaaaaaaaaaaaaaaaaaaaaaaaaaaaaaaaaaaa

SEQ ID NO: 290053 - DNA, 1000 bp, Homo Sapiens
catcgggaagtactacatggccactatgaccatggtcacattctcaacagcactcaccatccttatcatgaacctgcattactgtggtcccagtgtccgcccagtgccagcctgggctagggccctcctgctgggacacctggcacggggcctgtgcgtgcgggaaagaggggagccctgtgggcagtccaggccacctgagttatctcctagcccccagtcgcctgaaggaggggctggccccccagcgggcccttgccacgagccacgatgtctgtgccgccaggaagccctactgcaccacgtagccaccattgccaataccttccgcagccaccgagctgcccagcgctgccatgaggactggaagcgcctggcccgtgtgatggaccgcttcttcctggccatcttcttctccatggccctggtcatgagcctcctggtgctggtgcaggccctgtgagggctgggactaagtcacagggatctgctgcagccacagctcctccagaaagggacagccacggccaagtggttgctggtctttgggccagccagtctctccccactgctcctaagatcctgagacacttgacttcacaatccacaagggagcactcattgtctacacaccctaactaaaggaagtccagagcctgccactcccctaattccaaaaaaaagaggaactctacaaaggccaagatcacagagtacagtcttggagggacagaattgtttgtgctgggtattggagctctcagtggggagcacatgggttataatgagaaactgaactgtactgctgcatttcctgtcttccttcctaggtggctgctttgcagggctttggctgttacctttccctgctgaggggctcagggaaaagggtcggggattctcagtcgagtttccagagcaggaggccctacagacatttcgccccaaatccctgactcaataaagtaagcgtgtacctagcaaaaaaaaaaaaaaaaaa

SEQ ID NO: 290054 - DNA, 1000 bp, Homo Sapiens; identical to SEQ ID NO: 223049

SEQ ID NO: 290055 - DNA, 1000 bp, Homo Sapiens; identical to SEQ ID NO: 117750

SEQ ID NO: 290056 - DNA, 1000 bp, Homo Sapiens
gcccattgtgaaactgggggatgccagcatcgcagcacccttcacctccaagctctcatccatccagtgcatctgccacgtgatcaagcagggccgctgcacgctggtgaccacgctacagatgttcaagatcctggcgctcaatgccctcatcctggcctacagccagagcgtcctctacctggagggagtcaagttcagtgacttccaggccaccctacaggggctgctgctggccggctgcttcctcttcatctcccgttccaagcccctcaagaccctctcccgagaacggcccctgcccaacatcttcaacctgtacaccatcctcaccgtcatgctccagttctttgtgcacttcctgagccttgtctacctgtaccgtgaggcccaggcccggagccccgagaagcaggagcagttcgtggacttgtacaaggagtttgagccaagcctggtcaacagcaccgtctacatcatggccatggccatgcagatggccaccttcgccatcaattacaaaggcccgcccttcatggagagcctgcccgagaacaagcccctggtgtggagtctggcagtttcactcctggccatcattggcctgctcctcggctcctcgcccgacttcaacagccagtttggcctcgtggacatccctgtggagttcaagctggtcattgcccaggtcctgctcctggacttctgcctggcgctcctggccgaccgcgtcctgcagttcttcctggggaccccgaagctgaaagtgccttcctgagatggcagtgctggtacccactgcccaccctggctgccgctgggcgggaaccccaacagggccccgggagggaaccctgcccccaaccccccacagcaaggctgtacagtctcgcccttggaagactgagctgggacccccacagccatccgctggcttggccagcagaaccagccccaagccagcacctttggtaaataaagcagcatctgagattttaaa

SEQ ID NO: 290057 - DNA, 1000 bp, Homo Sapiens
gtgcgcgagtcgatgcagtggctgccagggtccagacggcggtgacgatgggcaaggtgaccaagtcgatggctggtgtggttaagtcgatggatgcgacattgaagaccatgaatctggagaagatttctgctttgatggacaaattcgagcaccagtttgagactctggacgtccagacgcagcaaatggaagacacgatgagcagcacgacgacgctcaccactccccagaaccaagtggatatgctgctccaggaaatggcagatgaggcgggcctcgacctcaacatggagctgccgcagggccagaccggctccgtgggcacgagcgtggcttcggcggagcaggatgaactgtctcagagactggcccgccttcgggatcaagtgtgacggcagaacccgctctgaggtttcctggccatagccaccctttgaaatgctctctgtgtgttagagagatactataccctagaaactctgaacacgccagaatgctgaaatgcccttctacctttgggtttacagccccctccacataaattaagaaattcagtatttctgcactcttagctggattctaaagttctgtatagctcgtaatgatggtatttttatagcagccttttaacagaactagttaatttcgtgtatatgaatctttctcgaagatctggtcaaaactgtattcagtttcctgcccagaatgatcagattgaaggtggttggtttttattattatttagtgtgattgatagtatctagaatggcaggtggtgcataaaagttaaagagaggggaaagattacttagtttggttatacagttataaacaccatgcagtgtattcggtggactgtgctatttctgtttatcctttgggttttggtttttgttttttttttttgccttcacagtgagactgcaaatgattgttctcataacgtatattattaataaatgtggtcctataatttaaaaaaaaaaaaaaaaaaaaa

SEQ ID NO: 290058 - DNA, 1000 bp, Homo Sapiens
gaggcatcagccaagctcccgtcactgccactgaggacttagagattcgcaacaacgcggccaactacctcccccagatcagccatctcctcaaccacgtgccgcgccagatgctgctcatcttgaagaccaacgacctgctgcgtggcattgaggccgccctgggcacccgcgccagcgccagctcctttctcaacatgtcacgttgctgcatcagagcgctagctgagcacaagaagaagaatacctgttcattcttcagaaggacccagatctctttcagcgaggccttcaacttatggcagatcaacctccatgagctcatcctgcgtgtgaaggggttgaagctggctgaccgggtcttggccctaatatgctggctgttccctgctccactctgagtggaattgctctccctgccccattctggtgtctttccactcctcagcccctcatcttgcctccacccagctgctccatttttgccacatcgtggcccgcagccccagagtcactgtccatgtcaccatcctcctcctcctttggaatcctctccgcacactgtggcccttgtctcagggcccacaagctgaactgtggcatagctctctcttcttctccaagaagactcagcagcctacattcccattcctggtatgtgccattgggttggatgtccccactacttccgttaacccttcccattgtcaagatgtgccacgggtgccactgggggcacactgaacttgtagggagtgtgattttgttggaggtgcacatggtctctgaatttgacagagaacaccttccctttccttgccatgtcaccctccagaggaagtcacacctcagcgaggtggtttggcatctggggccaactccattacagctatgagctcactgctgtcagtgacgtttggtgttttctgtactgtgtttcaataaaaactccttcaaggttaaaaaaaaaaaaaaaaaaaaaaaaaaaaaaaaaaaaaaa

SEQ ID NO: 290059 - DNA, 1000 bp, Homo Sapiens; identical to SEQ ID NO: 117752

SEQ ID NO: 290060 - DNA, 1000 bp, Homo Sapiens
acaaaggggggatgacgcagaccaaatcgagccgccaaaagtgtcatcacaagaaaggccccttaaggttccatcagaacttggtttaggagaggaattcaccattcaagtaaaaaagaagccagtaaaagatcctgagatggattggtttgctgatatgatcccagaaattaagccttctgctgcttttcttatattacctgaactgaggacagaaatggtcccaaaaaaggatgatgtctccccagtgatgcagttttcctcaaaatttgctgcagcagaaattactgagggagaggctgaaggctgggaagaagaaggggagctgaactgggaagataataactggtgacaatagatgtgagttaaactttaggaaaaaggtttccctttttttaaaaaaaatcaatacctcaaaagcaggctttgggacaagaaaaccccaaagtggcctgcttttcccatcccaggagctcattatccagtctgtgccaactgaagtaggagactgactgtgagtgctggctaaaagccctgggtggtgaggctcacagtactggtttccaggaggaagagcctttgtgcatttgactgaggccagtttctatgaagagcaagtagctgaggagaggtcgaatttactgctttttccaggacaattccggaagtaaagaaaatgtaattcaagctggttagcttaattttgtgccattcttttctttaacataagagtaagctctattatgaaatacaactttaaaaaattttagctataaattatataaatgattttaaattgctgaggtttccttaggcagcttatttatttgtttacagttagactatctgagtaaatggttctttgtggacctaggcagttcctgactgttccacatgtagtacattgtaccaaagttcttaataagaatattccccacaatcctgttctctaaatgtcaaataaagattattttcactagaaaaaaaaaaaaaaaaaaaa

SEQ ID NO: 290061 - DNA, 1000 bp, Homo Sapiens; identical to SEQ ID NO: 223050

SEQ ID NO: 290062 - DNA, 1000 bp, Homo Sapiens; identical to SEQ ID NO: 117754

SEQ ID NO: 290063 - DNA, 1000 bp, Homo Sapiens; identical to SEQ ID NO: 223051

SEQ ID NO: 290064 - DNA, 1000 bp, Homo Sapiens; identical to SEQ ID NO: 223052

SEQ ID NO: 290065 - DNA, 1000 bp, Homo Sapiens
atatttttaccatattttaagaactttaagacgattaattgtaaataatttatttgattggtgcagttctaatccctaaatcataatcttaaaatcaggaatgtgtggagaacagagccatgtcatatcactttgctcttaccattccttttgatcagcctcaattcagcctcattgtgtagtatgttttttctttctatgaaaaacaacagaaagcatttcattttatttgcctatgttcaaatatgtttaataatgaccaaagtgcattctgagttttttcaaggaatgtaatactggagctttaagaacatacttagtttctcatgtgaaaacttaggctttgtctgatgtttttccttcctctattgtctaatgttgaggttgtttttaggaattatgttttataaactttttcaatataaggtacatgcctatacagaacttaacattttgcacagaatatatcaaatatattttgagaaaaaaagtacggcatgagttctgttaggaataaaagatgaaactattgtatctcacaaaaaatcttatttcagaatggaaatatttttgagaaaagtagctgagcatactggtttaagaaaatgcttgttttagattgaggttaacttagagttgggagttgatttattaagtacagtatacctctcaacagtttataaataatatgttgaattatgtcagtgtgggcagcagtagaatactaaaaggaaaatgtcatgttaagcaatttcagaacattaactgaactattttcaaagcagaaaaattgacattgctgcctttaagaataccatgaatgtaagaaattgaaagaaattgtaaaatatcacataatatagaaatggcagttcaaagagaattgtggcagatgttgtgtgtgaactgttgtttctttgccacatgtgttgtatttgaaagttttacagtaagtttaaaataaaacattctgtgaccaaaaaaaaaaaaaaaaaaaaaa

SEQ ID NO: 290066 - DNA, 1000 bp, Homo Sapiens
cagcggctggggaccgcgaccgggacagttcgccgtgcgtcggcctccctgcggcctcccgggggccccccagagcaggcgcccccgcgtcccggacgggcagtgctacctctgcgggcactgtcggggagcagggccggcccggcacccacgagcggccaggagccaagcccagggctggctccgagaagggcagtgccagcagcagggacgggaagaccaccgtgtggatctgagggcgctggcttgcgagctgggccagggaggaggagggttggggggctccggtggaaacctgcgaccccttctcctcagccttctccttagccggtggcctcaggcagactctgcccagaggggcagccaggctgctcagggaaggggctgaaagcggcagaggagtgccctggcttggtcaccactggggccaaggtggggtggagagaggcctaggagccagaaagggccctctgctgtggtctgaaccccagggggagtggggcattgactccacccctgtcctgagctggaataggtcctctgggatgccagctctcccctttgtgcttccctgcagcaacccatggagggcccagggtgcctggtatgggcatcagttggtgggggtgcgggggtgcgtgtccccattccctgcaacagcaaatggggctccttcttcagccctccccttcccagccccaaactgagacagactgggagctgggagcctggggtggacaggaccataccctctttgagcttctgcgatgccggccttccgttcctctgggaggcttgaagttctgcaaagatgttgatatgccttgcagcttggacccaatgggtggtggtcagggcctgggggcttggccatgctgggggaatggggctctgggttcctgcctgtggcctgtctgtcctcctccctaattcagacccagcctcaagaggaaagggagtaaaataaaactaacttgtttataaaaaaaaaaaaaaaaaa

SEQ ID NO: 290067 - DNA, 1000 bp, Homo Sapiens; identical to SEQ ID NO: 117756

SEQ ID NO: 290068 - DNA, 1000 bp, Homo Sapiens; identical to SEQ ID NO: 223054

SEQ ID NO: 290069 - DNA, 1000 bp, Homo Sapiens; identical to SEQ ID NO: 117757

SEQ ID NO: 290070 - DNA, 1000 bp, Homo Sapiens; identical to SEQ ID NO: 117758

SEQ ID NO: 290071 - DNA, 1000 bp, Homo Sapiens
gtggaggtccaggtggtcacgcatcacatgcagcgctacgccgtgtggttcggaggctccatgctggcctcgactcccgagttctttcaggtctgccacaccaagaaggactatgaagagtacgggcccagcatctgccgccacaaccccgtctttggagtcatgtcctagtgtctgcctgaacgcgtcgttcgatggtgtcacgttggggaacaagtgtccttcagaacccagagaaggccgccgttctgtaaatagcgacgtcggtgttgctgcccagcagcgtgcttgcattgccggtgcatgaggcgcggcgcgggcccttcagtaaaagccatttatccgtgtgccgaccgctgtctgccagcctcctccttctcccgccctcctcaccctcgctctccctcctcctcctcctccgagctgctagctgacaaatacaattctgaaggaatccaaatgtgactttgaaaattgttagagaaaacaacattagaaaatggcgcaaaatcgttaggtcccaggagagaatgtgggggcgcaaacccttttcctcccagcctatttttgtaaataaaatgtttaaacttgaaatacaaatcgatgtttatatttcctatcattttgtattttatggtatttggtacaactggctgatactaagcacgaatagatattgatgttatggagtgctgtaatccaaagtttttaattgtgaggcatgttctgatatgtttataggcaaacaaataaaacagcaaacttttttgccacatgtttgctagaaaatgattatactttattggagtgacatgaagtttgaacactaaacagtaatgtatgagaattactacagatacatgtatcttttagttttttttgtttgaactttctggagctgttttatagaagatgatggtttgttgtcggtgagtgttggatgaaatacttccttgcaccattgtaataaaagctgttagaatatttgtaaatatcaaaa

SEQ ID NO: 290072 - DNA, 1000 bp, Homo Sapiens
gtttgcccttccctagttagagaaaaactgctctgacatgttcatatttatttatttgtatttccttggtctgggtgagtttcttcacccagtctttgagctaaagattaggtcgaaggtactggggctggccccagaagcctgcagtttttattattaccagcagagggagctacagggagcagtccggtgccttcctattgtttactttttaaacttttgagaagtagcaatggactcgtgagagtgggtatacagctgtgtgggctttgtcctagactgaggcttacagacaggaagggtaagagagacctaagccagctcctagacccttgcctgaggaaatcagtccaccagtgtagagggcctcccttcactccagcatggaccattctattgccagattcttctggtcacagcatgggccttactggatactcaggattgggctttaagcagacctctgggtgtgacacagcctctttcagcccccagcccaaacagcagaaataggcataatttctgctgtgacaccccctacccacaaattggagagtatatcttgctatactctataccaagcctctttctagaatttttccaacaggttttgttttgttttttggcttaactcagaaccatggtgagcgttctgctttgttttgttggagacagggtctctgtcacccaggctggagtgcagtggtgtaatcacagctcactgcagcctcaacctcccaggcccaagcagtcctcccacatggtgagctttgaatgggcatagacagggttcccagcccaatagtcgggattggggtataggttctacatgggaaagtatccagtctcttgctttactcagtgtcctgtgaccaccagaggcatgagagggacaacacactcttttcgctctaccacaaggggtgactagaagatgagcaagtctaataaaaagatacggccttaaaaaaaaaaaaaaaaaaaaaaaaaaaaaaaaaaa

SEQ ID NO: 290073 - DNA, 1000 bp, Homo Sapiens; identical to SEQ ID NO: 223057

SEQ ID NO: 290074 - DNA, 1000 bp, Homo Sapiens; identical to SEQ ID NO: 223058

SEQ ID NO: 290075 - DNA, 1000 bp, Homo Sapiens; identical to SEQ ID NO: 117759

SEQ ID NO: 290076 - DNA, 1000 bp, Homo Sapiens; identical to SEQ ID NO: 117760

SEQ ID NO: 290077 - DNA, 1000 bp, Homo Sapiens; identical to SEQ ID NO: 223060

SEQ ID NO: 290078 - DNA, 1000 bp, Homo Sapiens; identical to SEQ ID NO: 223061

SEQ ID NO: 290079 - DNA, 1000 bp, Homo Sapiens; identical to SEQ ID NO: 117761

SEQ ID NO: 290080 - DNA, 1000 bp, Homo Sapiens
gttgaggtgggagtcattagtgaatagatgatgttggaagtcatgggtcctcagagtgggggctccttaagcctccaggccagcagcatcagcatcacctgggagattgttaggaatgcagattctcaggcccccctaagacccaccgactctgtgctagaacaagcgcccctcagagattctgatgccactgaagtttgaggagcattggtttaagcaagattacctacggagaggctgtagatccgtgttctaaacctggggtccacagacacccccaagaagagcggattgaatgcaagagatctatgaagttggatgggggaaaaattgacatctttatttttgctaaactcgatctaaagtttagcatttccatctgcgatgaatgtaggccacaaaccacagtagtattagcagtgcctgggacctcctcaacaacagaaattgccggtatttatagcacgttacagttgttgcagataatttccagagactgtttatatgcaccactgttttaaaattacggtgattggccaggtgcagtggctcacacctgtaatcccagcactttgggaggccaaagtgggtggatcacttgaggagttcaagaccagcctggtcaacatgtcaaaaccctgtatctacaaaaaaatacaaaagttaaccaagcctatgcttgtagtcacagctactcgggaggccgaggtgggagggtcttctgagcccagggaggtagaggcttcagtgagctgagatcgcaccaccacactccagcctgggtgacagagtgaaacccttaatcaatcagtcaataaaaattacagtaattattagacccaccactaggtcatcttatttgatgcatcagtaaagcagcatattcaaatgtggatttttaaatattttaattactatttaaatatctctttactttgtaatcctatgcattttacgcattaaaacattttaagcatttaaaaaaaaaaaaaaaaaaaaa

SEQ ID NO: 290081 - DNA, 1000 bp, Homo Sapiens
ggtagttgaagggaagtacaccccgtattcagcacatgttgagttttctacaccaggaattttcaatatgtatattgatgaaaacaagctcaattcaaactggacagttttaagataatgttaaaatcagcacttttagagacaacgaaggccaagaatcagtacagtagtattccaaaatgattttctctagaaatttgaaagtagatcgaacagaatgttgtcaaccgcctaccagtacaatcttttgtggaagatactttgaaatcactttctactttgttagtaaagttctgtctttccagagctgcaagttttaaagtgttacttatacagaccaaccaagaatagtgctgaattaagtggcatttagtatctagaagccattttgatccaagaagctacttaagtgtcaaagtcagcatgcagcacatgtagcttttctgtaaacaagggtgtgatatgaaagctgcttttttaagaagagtaaaagcacattccatatacgtaagtgaattttaaaaataaattgaggcaaacagttaagttttatttttagagcaacaagttaactgtaaatattttaatgttagtttgctcatctatgatctgagatcatgccgaagtgagaaaaatctccccaaaatacaatttaatgcattgggaaaaaaaaactttaacagtaattccagccacaatccttagatcacccttgtaatgtgttacgggtccatttttcctggaatcgtttaatctaaagcagtttcccctgttttggagattttgtagttaattttaattttggctattgtttggaaaagatgagctgtctgtgtagatatgaagtatagttttttccataaaacagatgtttattttgtattaaaaaataccactgtacttgttttacaccatttgtatacatgtggtgatattaatgctaaactgtaaaattcaggaattaaaatgtgaccctgtaattccaaaaaaaaaaaaaaaa

SEQ ID NO: 290082 - DNA, 902 bp, Homo Sapiens; identical to SEQ ID NO: 117762

SEQ ID NO: 290083 - DNA, 1000 bp, Homo Sapiens
gagagaaagcaaaatcagaattattttatggaggtgatgactgtagaaggagtctatgattacctgatgtatgtaggacgggtagttttccaggttcctgactggcttcatcatctcttaatgggaactcgaatcctctttaaaaacaccctggaaatgtatactgattactatcttcagtgtaaactagaacagctatttcaggagcaccgtttggtctcactcataacacttctcagagatgctatattctgtgaaaacactgaacctcgctctctccaagataagcaaaaaggagcaaaacagacttttgaagaaatgatgaattacattccagatctgttagtcaagtgtattggtgaagaaaccaagtatgaaagcatcagacttctgtttgatggcttacagcaaccagtactcaacaagcagctgacttatgttttattggacattgtgatacaggaactgtttccagagctcaataaggtacaaaaggaagttacctctgtgacatcttggatgtaaacacttggatttggtatagaataacccattgaaatttctgctgtgcgagggtggtagaaatttacttttttgggtatattcttatatatattatgtacatcgctgtctgaaattttagttattttttgtttttaataaagactaacacaaacttaatgattaaaagtgattgagtctcatagtctttcatttgctagctgtgatccaaattttattagaacataagtcacttgttattgccatttttaaaagagaaaattcataatgatgttatggcaaacagataagactgataaacttcgtattgtatagctttgaaaataattatgcctagtatggagaaacaggaataagatctgattttcttagagttaatatattttagtagattggttttccttttttttattttgtacatagttaactgtgtatctataaataaagcatcctatatgagtttttaataataaaaaaa

SEQ ID NO: 290084 - DNA, 1000 bp, Homo Sapiens; identical to SEQ ID NO: 285602

SEQ ID NO: 290085 - DNA, 1000 bp, Homo Sapiens
atttgggtatttggagataatacatttgagggttttttggaaaacctttttcactccatactcaaatatgcttcattgtcaaatgcatatttaaattaaattattgaattgtaatgtttatctgctgctttttttaaataaaatttgactgaaaatgtttaattggcattttttaatgacttacccaagaaaagtgcagctattattccatattaataggcttgcatttcttttcctaaatcttatttaggctaaatcagttttattgtcctctgattttttttaataccacagaaatcacctgagtgtcaattgaaaagttgtcaattaaaaggtaaccttttaactctcgtaggaggaatctcattaagacatttttcctgatatgtagagcagtctgttggcaaaaatgcatatattttctttcatatttgtaaaattatatttaatggaattcttttctttgattatcaaggactttcactgcaggcagtgctatttcttgtgcctaagaatgtttccaaaagtcgcatcgctaatgatatttgccaagttgagtgtacacaaagtttctcatatcctgttcaagttaatcaacatcaaacacatggggatgctttagggtgagtctataatacaaaatgcataaaccatgtccccaggaaatttgaaaggaagcaagtgctgaatggaatttttttccttttccatgagctgtgttaattctatctccagtaggcctaatgcttgaaataagcaagatgtctaatcaataaattattttcatgctcagaatttcaggtttttgtactccagcatagcttggtcttatttcttactgtatgaaagcttaacagcaatgtgatttaaggttttgttttaaatgggagatgtaagtgatttaattcatgggtacttttagaacctgatagataatcccattgcctttatttttctaattaaagaatcctaaatactttgaaaatacaaaatattcctg

SEQ ID NO: 290086 - DNA, 1000 bp, Homo Sapiens; identical to SEQ ID NO: 223062

SEQ ID NO: 290087 - DNA, 1000 bp, Homo Sapiens
cagctgcgcccatcagctcccactgcaggcttgacaagtccaacttccagcagccctatatcaccaaccgcaccttcatgctggctaaggaggctagcttggctgataacaacacagacgttcgtctcattggggagaaactgttccacggagtcagtatgagtgagcgctgctatctgatgaagcaggtgctgaacttcacccttgaagaagtgctgttccctcaatctgataggttccagccttatatgcaggaggtggtgcccttcctggccaggctcagcaacaggctaagcacatgtcatattgaaggtgatgacctgcatatccagaggaatgtgcaaaagctgaaggacacagtgaaaaagcttggagagagtggagagatcaaagcaattggagaactggatttgctgtttatgtctctgagaaatgcctgcatttgaccagagcaaagctgaaaaatgaataactaaccccctttccctgctagaaataacaattagatgccccaaagcgattttttttaaccaaaaggaagatgggaagccaaactccatcatgatgggtggattccaaatgaacccctgcgttagttacaaaggaaaccaatgccacttttgtttataagaccagaaggtagactttctaagcatagatatttattgataacatttcattgtaactggtgttctatacacagaaaacaatttattttttaaataattgtctttttccataaaaaagattactttccattcctttaggggaaaaaacccctaaatagcttcatgtttccataatcagtactttatatttataaatgtatttattattattataagactgcattttatttatatcattttattaatatggatttatttatagaaacatcattcgatattgctacttgagtgtaaggctaatattgatatttatgacaataattatagagctataacatgtttatttgacctcaataaacacttggatatcc

SEQ ID NO: 290088 - DNA, 1000 bp, Homo Sapiens
cagcagcctcctctagcctctgatgccttccctccacggcccaggtctcctcactcaaagtcccttcgccaacctttcaatgcccagccctgacacctgccctttgtcccccaggcctaggatcagggaccagaggatcctatcttctcagcacccagcccaccccttcctgtagcatatggggagactaaggcctggagagaggggtgatgccccgtcccaggttgcactgcaaccaagtgtcagagtcggggctccggcctcctgccaaggctcttgtccccatacaccatcccacaagggcgctgggggtggaagtgccctggaagcccctcccctctcacactgacctccccccttacggcccaccagggtatgtaaatatctcttttctaccatgtcagaatattttttcctcactcctgacaatgcaaaaatggtcttcaaagcacataaaaagcacccagggtgagaaagccccatcccgggggccgttggcaggcagggaagcaggaaccccaccgtgtgccccctgccagccccagagggagtggcgagcccagctgcccagccctgccccccctccccatagccagcacagctatcccgcggggacaccagcactgagccccctctccctcctgcaataattcggggagtctcagccccatccaggtgccgcggccagctctctacacctctatatattatattactatatagccgagctgttcttccttcctatggaagtcggaaacatggtcagaacacgatctgggggggggatcctgtcttcctccccaccccaccccactcttacccaatttctgggctctggatcctcacagtcatggaggcaccgtgggcctggcacttgcaaaagtgtggcccctcactctagtgtgtggtccctctcagggtcctggggatctgcctctctgtggtctccatcctgactcttgaacttacccacaataagaataaattctgcctcatcttt

SEQ ID NO: 290089 - DNA, 1000 bp, Homo Sapiens
cgccagcccaccggccagcactcatgagctcaccattcccaatgatctaataggctgcataattggacgccaagggaccaaaatcaatgaaattcgacagatgtctggagctcagatcaaaatcgccaacgccacggaagggtcctcagagcgtcagatcaccatcacggggaccccggccaacatcagccttgcccagtatctcatcaacgccaggctgacgtccgaggtcaccgggatgggcacgctgtaatcctacccagcacccttcccccgcgtcacccacctgccagagcctaaggcccccggctctcgcactctgtacagcccaccttccctgcctcacagataccaatagagaggttttcttaattaacaaaaggacgtatgccatggagaaacacacccgcgcacacagctgctctctacagaggctgcaggctccgccgagtcccccctcagtgttattttatttatgacttacgctcccgtctgcccatgcaccggcatgcagtggtaattattttagaaatattgttccttggtgtcagcgtagctgtctgtcttaggagctgggtcggcgttccgacagcacttcctgtccgcccttctcctctgccatccagaaccgtccagaactgttgcctgagacccctcctctctcacacagccctgccatgctgactcggtttcccctcagagccattgttgtctgggctcgagtttctgccccaggttgtgtgctggaatcggggggtggctctcctgccacccatggggagcgccaggagaggagggtcatggaggatgttggggctctgaccccaggagtggggtggagggcggagcctgctggaggccctgccttcacagagatgccgcgtgctgggaaggctcttggggtcccctgagcgtcttccagggtggctggagagcacagacgcgccagggagccccctctgtgctcctcagagttcaataaatgtcgtggcccctcctc

SEQ ID NO: 290090 - DNA, 1000 bp, Homo Sapiens
ctctgtgtgtacctggtcccttctaggtgtggtcccataggagcagccttagcatcccctgtgaacttatcaaaaatgcaaattctcaggccccaacctgaaggaggaccctgaatttgagatccccggggctggggcccagcacaactgctgtttagtgaacaggttctccaggtgattctgatccctgatcaagcttcagacctccctccctccccagtgtttttgcaggtgaggaaacaggggcagagtaattcaggcacatgtgttcagagttccacagttgattagcagttgaggccaggctagaatggaaaactgcctgttccttgaatctgaaagagcattattcctggtcaaagctccttaaagttctgggcagctaaaagcatccctgtgagcaaaaatgccaggcagaaaactggcagtgcacctctcatcagcccaggtcccagtgccattggcttcaagaaaaaaaaaaaatctctccccaatgctctccttaacctttaagtcttacaggaagcctctcatagaaattgcctccagtccagtttcccaaaaaccccagtgttttacatatctgtttaggagtgtctaagttttgtcatcaatccaggatgttattcttccttcccaactcactgtgctcctaaaggcagcaaccattcatctttcctttgctctggatacaccgaatgaccaggtaacatcatcaggccgggtgcagtggctcctataatcccaatattttgggaggccgaggagagaggatcacttaagcccaggagtctgagaccagcctgggcaacatagcaagacccccatctctgcaaaaaaataagaaaattagcttggcatggtggcacgtgcctgtagtcccagctacatgggaggctgaggtgggaggatcacttgagcccaggaagtccagaacgtagtgagccttgattataccactgcactccagcctgggtgacagagcgagactctgtctcag

SEQ ID NO: 290091 - DNA, 1000 bp, Homo Sapiens
ccttctccttcttggagttacaacagaagctggggaggtgagagtgctagaaaggacgtggatgaagcagagaggcacgtgcctgtctcattcgcctctggatctgctgcatccaggactgtgccagcacaaagtgggagcccgataaatatttattgaagaaatgaaaggtgacaaaaggcagaaggagggagaccccaaaaagagttacactggaagaagagcccctccttccttcaagccaagtcatccccttgggctctcaccacttcagtttataccttgcctgtagtccagtctctccagcatcaattccatcagcacaaagacataatttaattccttctaccttaaaaaaaaaaaaaaaaaaaaaacagctctccctctcttagggtgagatgaagtggttggcaacaggccaatgctactttcagaggcgtttgaatcagagtgactccattttgaataggggttgagtaaaataaggctgagacctactgggctgcattcccatgagcttaggcattctaagtcacaggatgagacaggaggtcagcacaagatacacgtcacaaagaccttgctgataaaacagattgtgataagaaaagccagtcaaaacccaccaaaaccaagatggcgacaaaagtgatctctggttgtcctcactgctgattattcactaattataaaattaacatgataaaagacactcccaccagcaccgtgacagtttacaaatgacatggacacatcaggaagttaccctatatgtctaaaaggggaggagccctccattccaattgtccacccctttcctggaaaactcatgaataatccaccccttgtttagcatataatcaagaaataaccatgaaaatagccaaccagcagccctcagggctgctttgcctatggagtagccattctatattcctttactttcttaataaacttgctttcactttaaaaaaaaggaaaaaaaaaaaaaaaaaaaaaa

SEQ ID NO: 290092 - DNA, 1000 bp, Homo Sapiens
acacttccatatgtcattgctaatcctcgcaaccttgaggaaactgaggtgcaaaggggttgaggaatgtgttcaccatcccaaagccaacgaagtgccagaacccaaatccaagcttggctgtctcatccccaaggacgtactctttatgccgttccttatgacttttcatgcagcaggtgcaaggcagcaagaatttggctcttctgacatttatcaggcacctggtatgtgccaggcctactgtaaaccccaagatgacatggtccatgtctatccattcagcatcagagagactgttatcaggacttgaggcctgagacacagccctgaatcagatgcaggcctctggtgtttgcaaaggatgcgtgagtatgtgtatgtgtatgcgtgcattgtgtgtaggggtgtgtgtatgttgggggttgggggcagaaaatgctccctgaactgttggtattaaggcagatctttgatggagggactggggtgtggagacttgaaccctagtttcaaagtggggacctcgaacactagtatggccagcagacaggctggagttgctgaattgtcagctaggtctttaatccactccccttctctaaatcagggtggaattggactcagggctggttcagggctgaggtttccgggggatgaatgattccagacagtgggaaggggtgatggatgatgaacctggcaagtcacaggactatggacttggctgtatgttgcatgtatgtgtaagatctgagttgagacctttgatttttgcccagaaagtccagctaacatactatataagccagtgagaccagccagtgtctgttcattgcctctgccttgcccctatgcctgcccgcctcctatagcaggtccctatagcataatgaaaatgcgaacaaccttttctctggacactggggaatctagtctggtggataaagatggatggctgttaaacgatcgaaaaaaaaaaaaaaaaaaaaaaaaaaaa

SEQ ID NO: 290093 - DNA, 1000 bp, Homo Sapiens
caacctcctgggctcaagagatcctcccacttcagcctcccaagcagctaagactacagacatgtccttaaccttggcacaacaaatctctaaatcgattgagacctgtctcagatacttcttggtttacaagatggaggctgaaattaaagagaaagatcctcactcaactcacagaggagcagaatgggaagaggacttagtgagaattccctgaacacaggagaaaaccgaagcccagagagtggatggccaagtccaaggtcacacagccaagtgcatccgagcagcgcaggatccaggtttcctgccccagtgctctttctgcagcccatgccacctgttttcatgctatctcagttcaccttccagctacacacctgcaatcagaaacagaaagtctgagagtgtgtgtggagccaaagaggggacagcagtggttagaagcaaggcacaagtcatacctacattcaaggagaggggaccatgcaaaggataaactgcagagagacaacagatttacatcccagacacattcacactgggccaagagcagctgccattgcagattcgagtcacgtccttttttccttccttctccttcttggagttacaacagaagctggggaggtgagagtgcagaaaggacgtggatgaagcagagaggcacgtgcctgtctcattcgcctctggatctgctgcatccaggactgtgccagcacaaagtgggagcccgataaatatttattgaagaaatgaaaggtgacaaaaggcagaaggagggagaccccaaaaagagcagcacaggaagctgccccctcaaacactaaaggctcctggagctattcacagtgctggggaacaaccagaggaggaggaggacagagggagagaatactttttttaaaaatcccaaacaaaaccaaattctatacatgtatatctcgagtgagtaaatgtgtaacactcaccaaaaaaaaaaaaaaaaaaaaaaaaaaaa

SEQ ID NO: 290094 - DNA, 1000 bp, Homo Sapiens; identical to SEQ ID NO: 223065

SEQ ID NO: 290095 - DNA, 1000 bp, Homo Sapiens
gaagttatgaaaagacaaccacatggtcaggctcttgtctgtggtctctagggctctgcagcagcagtggctcttcgattagttaaaactctcctaggctgacacatctgggtctcaatccccttggaaattcttggtgcattaaatgaagccttaccccattactgcggttcttcctgtaagggggctccattttcctccctctctttaaatgaccacctaaaggacagtatattaacaagcaaagtcgattcaacaacagcttcttcccagtcacttttttttttctcactgccatcacatactaaccttatactttgatctattctttttggttatgagagaaatgttgggcaactgtttttacctgatggttttaagctgaacttgaaggactggttcctattctgaaacagtaaaactatgtataatagtatatagccatgcatggcaaatattttaatatttctgttttcatttcctgttggaaatattatcctgcataatagctattggaggctcctcagtgaaagatcccaaaaggattttggtggaaaactagttgtaatctcacaaactcaacactaccatcaggggttttctttatggcaaagccaaaatagctcctacaatttcttatatccctcgtcatgtggcagtatttatttatttatttggaagtttgcctatccttctatatttatagatatttataaaaatgtaacccctttttcctttcttctgtttaaaataaaaataaaatttatctcagcttctgttagcttatcctctttgtagtactacttaaaagcatgtcggaatataagaataaaaaggattatgggaggggaacattagggaaatccagagaaggcaaaattgaaaaaaagattttagaattttaaaattttcaaagatttcttccattcataaggagactcaatgattttaattgatctagacagaattatttaagttttatcaatattggatttctggt

SEQ ID NO: 290096 - DNA, 1000 bp, Homo Sapiens; identical to SEQ ID NO: 223066

SEQ ID NO: 290097 - DNA, 1000 bp, Homo Sapiens
aagggtttcttgctttcttaaacatttccgtaaggcaggctagaaatgtaatacttcaaatgtttgatgattatggtcttttgataggaatagattctgcttgggatatatatccaggcactctctaaggtctagggttgatattaacaaaggaatgtacttagaatagcagtacattttatgcaaatatggaaattattttaagaaacaatgacatatcaaaactgctttttacatgattttgaaatagactagaaagctttccctatagacatattaatattccaatcataactttaattcaagaatgcagttttaccaaaagaaaaatttgaaaatttctattcaggctactggaattggttattaaaagaaaaaggaaaaagaagaatcttgctgctttcagtatttcctgatttttttgtaaatataaagaggaacttcaattatgaaaaatttttaaaagatatatatatctatatatctatatatatgtactgttttgtttcctgtcttgaagattttgagttatggttattggtttcagattgattaattcacatatgctgtgttttgaaatgagatcccattagcttttttttttttttttttttttcaatataaagtgttttctttaaaagtcatattggttcgtggcctagtgccttggattttacatatttttctttttaaatgcaaaaccttttcaacaaaatagtgtttgtcatcaggttggtactaaacatttataattactgtgtaattataaacaaaaatacataaagctttgaatataattatgtagcataaaagttaaggttgttcactatgatggcatcttagaattaaacaaaacttttactagggctgaaaagagaagactgatttaatgtggtgtgattattctgaagataaatgtctggctacagggaatattttgtactaaaaaatgattacacaaaaaaaaaaaaaaaaaaaaaaaaaaaaaaaaaaaaaaaaa

SEQ ID NO: 290098 - DNA, 1000 bp, Homo Sapiens
tcagaacaatggctgaattcatggactatacttcaagtcagtgtgggaaatattattcatctgtgccagaggaaggaggggcaacccatgtctatcgttatcacagaggcgagtcgaagctgcacatgtgcttggacatagggaatggtcagagaaaagacagaaaaaagacatcccttggtcctggaggcagctatcaaatatcagagcatgctccagaggcatcccagcctgctgagaacatctctaaggacctctacatagaagtatatccagggacctattctgtcactgtgggctcaaatgacttaaccaagaagactcatgtggtagcagttgattctggacaaagcgtggacctggtcttccctgtgtgatgttgaccatcactgccatcacatcacctttttttaagtagtaagaataaagccactgtatgattctcttaatagctatacattaatcctgtttttagtgctgactgggtcagccttccgggaactggagtctgtctctttcagtgcttttttgtttgtttggttggtttttttttgagacagtctcactctgttgcccaggctggagtgcagtggcgtgatctcggctcactgcaagttccgcctcccgggttcacaccattctcctgcctcagcctcccgagtagctggcactacaggcacccgccaccatgcccggctattttttttgtatttttagtagagacggggtttaaccatgttggccaggatggtctcgatctcttgacctcgtgatccacccaccttggcctcccaaagtgttgggattacaggcgtgagccaccgcgcccggcctcagtgccttttttaacttgagggtgtagaggtcctccacgcttgtttgcctgaaagtaatataatgatgctgtctgaacaggttttactgcttgctttccaagtaaaggttaattatgataataaagagatttggaaatgaaaaaaaaaaaaaaaaaaaaaaaaaa

SEQ ID NO: 290099 - DNA, 1000 bp, Homo Sapiens; identical to SEQ ID NO: 117765

SEQ ID NO: 290100 - DNA, 1000 bp, Homo Sapiens
aagaaacaggcagacaactggaaagaactgactgggttttgctgggtttcattttaataccttgttgatttcaccaactgttgctggaagattcaaaactggaagcaaaaacttgcttgatttttttttcttgttaacgtaataatagagacatttttaaaagcacacagctcaaagtcagccaataagtcttttcctatttgtgacttttactaataaaaataaatctgcctgtaaattatcttgaagtcctttacctggaacaagcactctctttttcaccacatagttttaacttgactttcaagataattttcagggtttttgttgttgttgttttttgtttgtttgttttggtgggagaggggagggatgcctgggaagtggttaacaacttttttcaagtcactttactaaacaaacttttgtaaatagaccttaccttctattttcgagtttcatttatattttgcagtgtagccagcctcatcaaagagctgacttactcatttgacttttgcactgactgtattatctgggtatctgctgtgtctgcacttcatggtaaacgggatctaaaatgcctggtggcttttcacaaaaagcagattttcttcatgtactgtgatgtctgatgcaatgcatcctagaacaaactggccatttgctagtttactctaaagactaaacatagtcttggtgtgtgtggtcttactcatcttctagtacctttaaggacaaatcctaaggacttggacacttgcaataaagaaattttattttaaacccaagcctccctggattgataatatatacacatttgtcagcatttccggtcgtggtgagaggcagctgtttgagctccaatgtgtgcagctttgaactagggctggggttgtgggtgcctcttctgaaaggtctaaccattattggataactggcttttttcttcctctgtcctctttggaatgtaacaataaaaataatttttgaaacatcc

SEQ ID NO: 290101 - DNA, 1000 bp, Homo Sapiens
tcccacaagcatgaaggagaaaagctttctctaccccggcatctcaaagtagtgggccagattgagcacctagtgatcacactgggctccctccgcctggactgcccagcagctgtggttgatgacaatgagaaaaacttgtcccttggtctacagactctccgatctctgaagtgcatcataaacttggataagcaccggctgatcatggggaagacagacaaggaagaaatcccttttgtggagacagtctctttgaatgaagacaacacttcagaagcataactacagcctgcagcatgtctgcacgtgtgcatgcatacacaccgggttgacagattgagaaaactgggtttgaaccaaatgccgtagtgacttgctgtggaccaagtccttccatctaatagaagctccaggggctccttcccattcagacctctctagactatagtctatgcttagagatcttgtctggttatggccattgttttttactactttgatcacttaacttatagaccttttttgacactgccagtctcacttgtggcctatttctctgcttcttccaggaatttgcttttattagtcaagtataggggctgccaggttctgtgtctccatagatatatgtgcttcttttcctatagctaaatgtataataaacaggaacctgacctttacctcctttcagctgtttcaaacaggtgccaggatacctatgtcttagaattagagtttcttcaaattgattcattgatttctcaagtatggattatgtgaaagagcccagggacattatccattacagtctaactctttcatttaaaggtccagagaggcaagtgaattgtctaagttcatatattaggtcagtgactgaagggaccaagaacgcagacctgatttccaagccaagactcccatgctgcctcatttgtattcaagcctttaacaggagggcaaagaggtgagaatgtgttaaaaaaaaaaaaaaaaa

SEQ ID NO: 290102 - DNA, 1000 bp, Homo Sapiens; identical to SEQ ID NO: 223067

SEQ ID NO: 290103 - DNA, 1000 bp, Homo Sapiens
ttaaaactgcatttatcattttttaggtcttcattaaattttaaaatgtaatatctgtttcccaccccctacattaggaggataatttcttaaaccacattgttttaattgatttttcttatcttgatttctttcattagaaactatccctaaatgtaaagatcttttgccttcaaatttggcttattttttctgatttatgagggtttgaaagaaagaattcacctaaaagattccatttccagttttataatgtatttcaggttctgaataacaatatttttccaaattgaaagtaaatattcaagaagttgatagcctggttaaaagttagatcctctattaccattctaagcacattcacttctatattgaagttttggtaaaaattcttttttcttttttaataaaaaattaggttattactttttttataaccagatttttaaagcactaggttttaaatcagtgggtatcataaaagccatatataaaagatcctttcttatagtaagacttgtgcttgttagcaggtttttctgttagtttttcccccataacatttaattattactaaaattgtatttacaatagtggtgccaaatcaaatggtaatttaaataaaatctattctgtgtttatgtagggtggtataaaaaagaggtcttcatttagacatgtgatttctaaaattccagaaagcaaaattgataagatgttagaaatttggaccgttatttataatcagggtagcattaaaatggagaaaagaaagttttctgaaaaaatgcagtaaatataagccacatttctaaagtttatttttatgaaagcttcttttaagattttgaaatctattctgcattcccaagagtttatgtttattgtattttatatgatctacaacatataaaattgtgtatttttctttggttgtccctattaacaaaaaagtattttaataaaaaattgaaatgaaaaaaaaaaaaaaaaaaaaaaa

SEQ ID NO: 290104 - DNA, 1000 bp, Homo Sapiens
tacgcgcccggtgaagaatttcatgacgtggaggatgcagagacctacaaaaagatgctggctcgggacgagcggcgtttccgggtggccgaccaggatggggactcgatggccactcgagaggagctgacagccttcctgcaccccgaggagttccctcacatgcgggacatcgtgattgctgaaaccctggaggacctggacagaaacaaagatggctatgtccaggtggaggagtacatcgcggatctgtactcagccgagcctggggaggaggagccggcgtgggtgcagacggagaggcagcagttccgggacttccgggatctgaacaaggatgggcacctggatgggagtgaggtgggccactgggtgctgccccctgcccaggaccagcccctggtggaagccaaccacctgctgcacgagagcgacacggacaaggatgggcggctgagcaaagcggaaatcctgggtaattggaacatgtttgtgggcagtcaggccaccaactatggcgaggacctgacccggcaccacgatgagctgtgagcaccgcgcacctgccacagcctcagaggcccgcacaatgaccggaggaggggccgctgtggtctggccccctccctgtccaggccccgcaggaggcagatgcagtcccaggcatcctcctgcccctgggctctcagggaccccctgggtcggcttctgtccctgtcacacccccaaccccagggaggggctgtcatagtcccagaggataagcaatacctatttctgactgagtctcccagcccagacccagggacccttggccccaagctcagctctaagaaccgccccaacccctccagctccaaatctgagcctccaccacatagactgaaactcccctggccccagccctctcctgcctggcctggcctgggacacctcctctctgccaggaggcaataaaagccagcgccgggaaaaaaaaaaaaaaaaaaaaaaaaaaaaa

SEQ ID NO: 290105 - DNA, 1000 bp, Homo Sapiens
agtttattttttggatataaactgtggttcatctgttcactgtttctagaaaaaaatcattgccataagaaaaagtataaattagcaagaaaggagagtgacttgatttgcttttggaaaaagaaatgcttaattaattattctgtatttggccttattcgggcattaggaaatctagagatctaaagggttgaatgacaatagtgcccccgtttttagcagaccagccttaactctgggtttgaatcctaaggagattgccacagtgagacttaaggaaatgtttggttggcagatgagcaccaatgactgcagcgtggagtgacgcactgcatggtctgtttattctctaattccaatatgtcttttgcttccagaagcaagaaaagtttcttctctcccctccttcccacccttttttcaaaggcaccacaagtatagacagttgcactacatcaaatctttttttgacacttgtagaaaccagtacacttttagattagacagtatcttcttttaatattttgatttgttttcctttagtttgaaaagttgtataatacttaactgactgtagcaaagttttatatgtggtagcatacctttaatttatcctattacaaaactgttctgaattttcttttggtttttaaaaaacaaaacttgttgcttagaagccatgaattattttattttacttcaactgtcgaaacttccttgttttaaaaaatgatcatttgggttcactcaggaaatgcatgtcaggaaacttgtattataagtttattagttgtgatgtatcagtaactgctgttacccctttttcaaagaaatgtaattgattttgaagttttctagattgtcacatgctttgtgactaatgcaagaaagcaagtcctgtgttgtatttgttctagtcatttttattcaggctatatattgtagcttaatttttatttgcaattaatttatttaaactaagtaaatacttttcaaaata

SEQ ID NO: 290106 - DNA, 1000 bp, Homo Sapiens; identical to SEQ ID NO: 117766

SEQ ID NO: 290107 - DNA, 1000 bp, Homo Sapiens
cagggtggcccaccccagtgggcagtagcctggcctttttctgtgtgagatctgtgctgcacacctgagggagggggagggatcggccacctcctccctgtgagacggatgcaggtccttccctcttctcggcactgcccccggccttccatgagaagccgactccccacaccgagttttaaagcaaagcccttttcttctgctgcccactcactgtgggtcccattcggctgtttcccccaccagaccccagggaagccggggcccactccgatccgcctgggctcagctaagcacggaagccaagggggctgtgccgtggagctgggctcgcgccggggctctgggtgtgtgcgcttggcgtgcagggtggacgcgtggggttccgtgtccccagcagtgagggccctagaggacgccttctcccatggttactgatctccacgggttttcacatctctgtactgtgcctgcctcaacttcccctaacagatatgcatattccttccagatgcctcagtgctacaccacagtgggcctggtcccaggacaggaatgcggttcaaacccagtggcttgaaacttcctgagaaactgtagcatatccagccccctaaaatgtacaatgtaacttgttcagtccaacaaaaacaggttccttatgtttctgccttctccaccagggtcgctccatcacccaaacaaaagaacaaggtttgccaggatgtccgagtgccccctggccctggctctcgtgtgcatggacgtgcctgaggggtccgggcacggccatacgcaggacccctgtgcccggggaggcgctgcagggattccccatccggtcgtcttggggccagcccgtcttatggactctgccttgctttgcttatgtttagctgtttctctgctacctttcgagcagacttctttactacactgcactggattgctatatttttaaccagaaataaactaaagattagagcatgttccagttaaa

SEQ ID NO: 290108 - DNA, 1000 bp, Homo Sapiens
tctcaaaaaaaaaaaaaaaaaaaagaaagagagagggccgggcgtggtggctcacgcctgtaatcccagcactttgggaggccgagccgggcggatcacctgtggtcaggagtttgagaccagcctggccaacatggcaaaaccccgtctgtactcaaaatgcaaaaattagccaggcgtggtagcaggcacctgtaatcccagctacttgggaggctgaggcaggagaatcgcttgaacccaggaggtggaggttgcagtaagctgagatcgtgccgttgcactccagcctgggcgacaagagcaagactctgtctcagaaaaaaaaaaaaaaaagagagagagagagaaagagaacaatatttgggagagaaggatggggaagcattgcaaggaaattgtgctttatccaacaaaatgtaaggagccaataagggatccctatttgtctcttttggtgtctatttgtccctaacaactgtctttgacagtgagaaaaatattcagaataaccatatccctgtgccgttattacctagcaacccttgcaatgaagatgagcagatccacaggaaaacttgaatgcacaactgtcttattttaatcttattgtacataagtttgtaaaagagttaaaaattgttacttcatgtattcatttatattttatattattttgcgtctaatgattttttattaacatgatttccttttctgatatattgaaatggagtctcaaagcttcataaatttataactttagaaatgattctaataacaacgtatgtaattgtaacattgcagtaatggtgctacgaagccatttctcttgatttttagtaaacttttatgacagcaaatttgcttctggctcactttcaatcagttaaataaatgataaataattttggaagctgtgaagataaaataccaaataaaataatataaaagtgatttatatgaagttaaaataaaaaatcagtatgatggaataaacttg

SEQ ID NO: 290109 - DNA, 1000 bp, Homo Sapiens
cgattggctgacgatctctccaatgcagctcgtgagcttagggtgctgattgatgattcacaaagtattattttcattaatctggacagccaccgaaacgtgatgatgaggttgaatctacagctgaccatgggaaccttctctctttcgctctttggactaatgggagttgcttttggaatgaatttggaatcttcccttgaagaggaccatagaattttttggctgattacaggaattatgttcatgggaagtggcctcatctggaggcgcctgctttcattccttggacgacagctagaagctccattgcctcctatgatggcttctttacctaaaaagactcttctggcagatagaagcatggaattgaaaaatagcctcagactggatggacttggatcaggaaggagcatcctaacaaaccgttaggaacagccccgtggatactgaagttttttttatggtagttacaggaaacttctgatactctttttattattttcttgtatagagtcagacacttgaaaaaaactaatgtttgaagacaaaaatattttggcagtcacaataccagaactggattgcatttccagaattytgagttaaagaaacaaagtatttgctttgtaaaaggccaaaattytatttcctacaaactttaaatgctgtttttatagatgtgatatgaggcaacacaagcacagacagttgcatagattttaatttatacatatcaagaaaagtgcaatttcatgctgaatgaagcgtaggaacttgacaagcccataggtagctatagttctttgtcagtatagggaattatgttcatgtgaatttcctgattctcaggtgactaaaaagctagcattytatgtattaaccttacaacagactctgtaagtttgagctttaaaaaccaaactttgacataaccttatttcttgtatttgcccccttttttttataaaaggtgaataaaaagaaataatttaatatc

SEQ ID NO: 290110 - DNA, 1000 bp, Homo Sapiens
ctcacttacgagcatggtgtgaagctcgcaaaagcgatcggagcacagtgctacttggaatgttcagctctgactcagaaaggtctcaaagcggtttttgatgaagcaatcctcaccattttccaccccaagaaaaagaagaaacgctgttctgagggtcacagctgctgttcaattatctgaggttgtctgggacctgcctccaccccatccagggatgagaatggcagccaatctctgtggccaagctccagccaaaaaggagggcacgaccagaaaggaactccctttgcacggaggcttgccccatcaccctctgagccctcccaacacagcacactagtcagcccactgccacgacctccctgccagccagaagcatccgtactgcacgctgtctgagaatgctgggcctggattgcagacagtgccgctgctgatcgcatcaaaaacaaagtcaaaggccatctcacattttacaaatccccagctcatgaacgtgaagctgataggaaatcaccccagggaacccgaaaaagaaacttgattcctctattgctggccttacttgatgtcttttataaaacttgggactacaatactaacctttttttctgaatctgctgttctacccatgtgtctcacattcatttgtattatttcaagaaatgtactaatttccagttcactcaggccttactaatccataccaaattagcctaaagacaaggcattttatattcatttctattttcagcatgtttctaccaaagctattagaaccaacacgtacctctgaatgcccgattataagaagacatgagaagactttaaaagttttggaaatttacagagccatgatttttgaacctaattgaaagaaaaccatctgaattgttgcaggtccacatttttgccaaagatacactctatagatgcttagtagtggcctgatttttttccatgtattgccacgacaaactaaaaatgaactgtgttt

SEQ ID NO: 290111 - DNA, 1000 bp, Homo Sapiens; identical to SEQ ID NO: 223071

SEQ ID NO: 290112 - DNA, 1000 bp, Homo Sapiens
ttctttctaaatgaccaaactctggaatttttaaaaatcccttccacacttgcaccacccatggacccatctgtgcccatctggattattatatttggtgtgatattttgcatcatcatagttgcaattgcactactgattttatcagggatctggcaacgtagaagaaagaacaaagaaccatctgaagtggatgacgctgaagataagtgtgaaaacatgatcacaattgaaaatggcatcccctctgatcccctggacatgaagggagggcatattaatgatgccttcatgacagaggatgagaggctcacccctctctgaagggctgttgttctgcttcctcaagaaattaaacatttgtttctgtgtgactgctgagcatcctgaaataccaagagcagatcatatattttgtttcaccattcttcttttgtaataaattttgaatgtgcttgaaagtgaaaagcaatcaattatacccaccaacaccactgaaatcataagctattcacgactcaaaatattctaaaatatttttctgacagtatagtgtataaatgtggtcatgtggtatttgtagttattgatttaagcatttttagaaataagatcaggcatatgtatatattttcacacttcaaagacctaaggaaaaataaattttccagtggagaatacatataatatggtgtagaaatcattgaaaatggatcctttttgacgatcacttatatcactctgtatatgactaagtaaacaaaagtgagaagtaattattgtaaatggatggataaaaatggaattactcatatacagggtggaattttatcctgttatcacaccaacagttgattatatattttctgaatatcagcccctaataggacaattctatttgttgaccatttctacaatttgtaaaagtccaatctgtgctaacttaataaagtaataatcatctcttaagtaaaaaaaaaaaaaaaaaaaaaaaaaaaaa

SEQ ID NO: 290113 - DNA, 1000 bp, Homo Sapiens
acaacagaactctcaccaaaggaccagacacagtgagcaccatgggacagtgtcggtcagccaacgcagaggatgctcaggaattcagtgatgtggagagggccattgagaccctcatcaagaactttcaccagtactccgtggagggtgggaaggagacgctgaccccttctgagctacgggacctggtcacccagcagctgccccatctcatgccgagcaactgtggcctggaagagaaaattgccaacctgggcagctgcaatgactctaaactggagttcaggagtttctgggagctgattggagaagcggccaagagtgtgaagctggagaggcctgtccgggggcactgagaactccctctggaattcttggggggtgttggggagagactgtgggcctggagataaaacttgtctcctctaccaccaccctgtaccctagcctgcacctgtcctcatctctgcaaagttcagcttccttccccaggtctctgtgcactctgtcttggatgctctggggagctcatgggtggaggagtctccaccagagggaggctcaggggactggttgggccagggatgaatatttgagggataaaaattgtgtaagagccaaagaattggtagtagggggagaacagagaggagctgggctatgggaaatgatttgaataatggagctgggaatatggctggatatctggtactaaaaaagggtctttaagaacctacttcctaatctcttccccaatccaaaccatagctgtctgtccagtgctctcttcctgcctccagctctgccccaggctcctcctagactctgtccctgggctagggcaggggaggagggagagcagggttgggggagaggctgaggagagtgtgacatgtggggagaggaccagctgggtgcttgggcattgacagaatgatggttgttttgtatcatttgattaataaaaaaaaatgaaaaaagtgaaaaaaaaaaaaaaaaa

SEQ ID NO: 290114 - DNA, 1000 bp, Homo Sapiens; identical to SEQ ID NO: 117767

SEQ ID NO: 290115 - DNA, 1000 bp, Homo Sapiens
tattttcattgactccttagtacaagggaaccttaatgaccaacagatcctagaagacagtatgatattttctctggccagttgcataataactgcaaaattgtgtacctgggcaatctgttttttaaccacctctgaagaagttcaaaaaaaattatatgaagagataaaccaagtttttggaaatggtcctgttactccagagaaaattgagcagctcagatattgtcagcatgtgctttgtgaaactgttcgaactgccaaactgactccagtttctgcccagcttcaagatattgaaggaaaaattgaccgatttattattcctagagagaccctcgtcctttatgcccttggtgtggtacttcaggatcctaatacttggccatctccacacaagtttgatccagatcggtttgatgatgaattagtaatgaaaactttttcctcacttggattctcaggcacacaggagtgtccagagttgaggtttgcatatatggtgaccacagtacttcttagtgtattggtgaagagactgcacctactttctgtggagggacaggttattgaaacaaagtatgaactggtaacatcatcaagggaagaagcttggatcactgtctcaaagagatattaaaattttatacatttaaaatcattgttaaattgattgaggaaaacaaccatttaaaaaaaatctatgttgaatccttttataaaccagtatcactttgtaatataaacacctatttgtacttaattttgtaaatttggatttttatatatcatattttcttaattcattgtacacatttgacttactgcacagtatattgatcattttaatgggaaactttagctttctactttttatttttgttttttcactttctatgccattatttttgtattctttttcttagtgtgagctctaaaatcaatgttcttgaaaaagaaattattttgaaaaaaaaaaaaaaaaaaaaaaaaaaaaaaa

SEQ ID NO: 290116 - DNA, 1000 bp, Homo Sapiens
tgttaaaattgattgctgaagtaaaaggcaaaaagcaggaattggaagtactgactgcaaatatccaggatcttaaggaagaatattctaggaagaaggaaactatttctactgctaataaagcgaatgcagagaggttgaaaaggctgcagaaatctgcagacttgtataaagatcgacttggactagaaattcgaaaaatttatggtgagaaattgcagtttattttcactaatattgaccctaagaatcctgagagcccatttatgttttccttacatctcaatgaagcaagggactatgaagtgtcagatagtgcccctcatcttgagggcctagcagaatttcaagagaatgtaaggaagaccaacaatttttcagcttttcttgccaatgttcggaaagcttttactgccacggtttataattaacatacaaatagtgtatataaaaacggtttatttttcttctctattacatatctctttttttcttgtttttattattattatactttaagttttagggtacatgtgcacaatgtgcaggtttgttacatatgtatacatgtgccatattggtgtgctgcacccattaactcgtcatttcattaggtatatctcctaatgctatccctcccccctcccccaacccacaacagtccccgttgtgtgatgttccccttcctgtgtccatgtgttctcattgttcaattcccacctaggagtgagaatatgtggtgtttggttttttgtcctttcgatagtttgctgagaatgatggtttccagcttcatccatgttcctacaaaggacatgaactcatccttttttatggctgcatagtattccatggtgtatatgtgccacattttcttaatccagtctatcattgttggacatttgggttggttccaagtctttgctattgtgaatagtgccgaaataaacatacgtgtgcatgtgtctttaaaaaaaaaaaaaaaaaaaaaaaaaaaaaa

SEQ ID NO: 290117 - DNA, 1000 bp, Homo Sapiens; identical to SEQ ID NO: 223072

SEQ ID NO: 290118 - DNA, 1000 bp, Homo Sapiens
ttttcggaggcacaggtgcccagggtggctccgtggcccgcacactcctggaagatgggacattcaaggttcgagtggtgacccgaaaccctaggaagaaggcagcaaaggagctgaggctgcaaggtgcagaagtagtgcagggagaccaagatgaccaggtcatcatggagctggccctgaatggggcttacgccaccttcatcgtgaccaattactgggagagctgcagccaggagcaggaggtcaagcaggggaagctgctcgctgatctggccaggcgcctgggcctccactatgtggtctacagcggcctggagaacatcaagaagctgacggcagggagattggccgccgcgcactttgacggcaaaggggaggtggaggaatatttccgggacattggcgttcccatgaccagtgtgcggctgccctgctattttgagaacctcctctcccacttcttgccccagaaagccccagacggaaagagctacttgctgagcttgcccacaggtgacgttcccatggatggcatgtccgtgtctgacctgggtcctgtggtgctcagccttttgaagatgccagaaaaatacgtcggccagaacatcgggctgagcacttgcaggcacacggccgaggagtacgctgccctgctcaccaagcacacccgcaaggtcgtgcacgatgccaagatgactcctgaggactacgaaaagcttggctttcccggtgcccgggacctggccaacatgttccgtttctatgccctgagacccgaccgtgacatcgagctgaccctgagactcaaccccaaggccctgacgctggaccagtggctggaacagcacaaaggggacttcaacctgctgtgacctgcccgcctcgcggccccttgtggggatcgggggcaccagaggggcagaggcaccaacatctgaataaagccattgttctcccaaaaaaaaaaaaaaaaaaaaaaaaaaaaaaaaaaaaaaaa

SEQ ID NO: 290119 - DNA, 1000 bp, Homo Sapiens; identical to SEQ ID NO: 117768

SEQ ID NO: 290120 - DNA, 1000 bp, Homo Sapiens
tgaaagtttgcttccttccagtcatgtggctcttcattctactctccttggctctcatttcagatgccatggtcatggatgaaaaggtcaagagaagctttgtgctggacacggcttctgccatctgcaactacaatgcccactacaagaatcaccccaaatactggtgccgaggctatttccgtgactactgcaacatcatcgccttctcccctaacagcaccaatcatgtggccctgagggacacagggaaccagctcattgtcactatgtcctgcctgaccaaagaggacacgggctggtactggtgtggcatccagcgggactttgccagggatgacatggattttacagagctgattgtaactgacgacaaaggaaccctggccaatgacttttggtctgggaaagacctatcaggcaacaaaaccagaagctgcaaggctcccaaagttgtccgcaaggctgaccgctccaggacgtccattctcatcatttgcatactgatcacgggtttgggaatcatctctgtaatcagtcatttgaccaaaaggaggagaagtcaaaggaatagaagggtaggcaacactttgaagcccttctcgcgtgtcctgactccaaaggaaatggctcctactgaacagatgtgactgaagatttttttaatttagttcataaagtgatgctacaacagaataatcaccatgacaactggcccacacctcagagactgattctgatctcccaggaattctgaaggaccctctatccttgacaacaatcatttgcagccaggtagcaacggcggtagtcagaggagctatgatagaccacacccaagcaaggctgccctcaaataacatctcaagatcttagttcttatgcattccatcagtcagaagtgaagaagaggtggagaatctggattggggaccaggaaatcacttgtattttgttagccaataaattcctagccagtgttgaatgaaaaaaaaaaaaa

SEQ ID NO: 290121 - DNA, 1000 bp, Homo Sapiens
ggcagcatcccaaggttcaataaggccttatttaacaagcaagcaaaatgcaaaccaaaccattattcatttattggcttaagtatgctttctcctgaaaactttagcattgggtgcaaatattcagtatggttctcggagtccaaagggttttaagccagggcacaaccagaaaagtggctctctttggtagggagaggggctccaatatttcgttctctccccatggggcactgacagagaaatgaaatagttttatctggaaaattccagagctattatttactccttaccaagggaagttacttcttgtaaaaacttttaagccatttatcaacaagttcttgttgactcagggcataatgagttcctgagacatgctcttttgggggctggggctttaggtagaagaatttcaaggaaaagaattctcagcagagctcaagattgtagaaactcagcagaagctggtaaaaacatggggagcccggaggacaggctgctgtccagggcagaggccatgaagaagtgcttccgtggccgacagtctggaaatgaatccatcatacattagtgccatagagtttagtaaccgtccagcaagtgtcatcacttttacagaaaacaaggtccagtaatagcaagtcttagtacatcctcacttttattataaatgggtgttttttcataatttttactgacgctcagtaaccatgcaaaattgtgtatagcattaatgtatctacatacctacacctatctatatataagctcatggtagaaaaccatagctaagtagcatcgcagacttaagcgtacaaagtgatcttgttcacaagtaatctgttgacagtgccaataaatgataaaaaaaaaattaacatgtcacaatgtaacggatgaccatatgcacaattccatgaattaaatctgtttcctgtgttagtcagtattcttaaataaaatttataattgaaacatgaaaaaaaaaaaaaaaaaa

SEQ ID NO: 290122 - DNA, 1000 bp, Homo Sapiens
gtcagaggccttctttcgaaaggcagatggacgtgagccctgccccgtggtcccaccccgtgaggcctccatccggaacctggctcgaacctaccacacccaggctcgccacctgaccctggaccctgccagcaagtccttgggccttccccacccaggggcccccgctgccgcctccacagccaccttacctcagaggactctggccatgccagcccccccagccggcacagcccccccagcccccggccccacccctgctgagccacccaccgcccccagcgctgcccctccggcccccagcaccgagcctccacgagccgggggcccacacaccaaaatggggggctccagggactcgcttctcgagatgagcacatcgggggtagggaggtctcagaagcagggggccggggcctactccaaatcctacaccctggtgtagggccggcaggaagagcagccacgcctgggccgcgccgcgccgcagccccacacgccagctcggctgtttttctgcattatttatattcaactgacagacaaaaaccaaccaacgacaaaacaaaaacccccaatcatgaacgcctgtacatagaactcttttgtacaaatgaaactattttcttcttctccatgaagccagggcacaaagaatttgacagtacaagtcaaatcccccaccccacaaaatatgtgtggagatatatatacatatatagacagacaggaacgcgtccacgagctatatatctatatatttctctcaccctattttgagacagaggcacaaagactcagcaatttttttccctcctcctcaccttccccccagtctaggtggttttgacaaagaccaaaatcccaactcagagacactgcatgcgattttactgttccaagaaaaccaggagttgcttcaatttgcagatgcttatgtgttaatacctttttctatgaaaaaagacccagcgccgtgtgcaataaaggttatgtttct

SEQ ID NO: 290123 - DNA, 1000 bp, Homo Sapiens
ctgtgctcttcccccaccgcctgggcctcccctacaagcggtccctgcggaacctcatggccgactacctcagacagatcatccaggacaatgtggatgggcacagctccagcgaggacgccggcgcctgcatgcacctggtgatctggaaggttcgagaagacgccaagaccaagcgatgacgcctgcccgcctcccacccgcctctcctgccgtcccgctggtccttagccccatgcctcttccaaaacagtgcaataaatctccggtaacccgtccacctggccgaggcagcccagagcagcgggatgagctggcggccagagaacgcccagcccagcccacccccgctcacgtcctgccgcacccctccgccggtccccaccctctgccccccagccctctggcgtctctagaaactgctgctgatggagaccaggacagagcccgcccccacccggcccgcagcccctcctgcccctcctgccaggccctccctcccgggtggtggccggcacctctgctcctcacgtgggtcgcggggcgggcttgtcccaggtttgtttgagacagtctttttttattttgtattgttatttttattatttttaatttaaacctgatgacttgcacagcatctttcccaccgggaagagcgggcctgctgccttccctcctgcggggtgggggtgggacagaccccagtgggggccagggccacactcagcgcagtgtgggctggacccgcctctgtgctccaggggctggccggtcttcgggggcgccggcttccaccactcgccgccccacccctgcactccgtgacctctgagaacccagctggcccctcgttagccccagggtctgccgtctagagggagcccaccggcctccggacactgtcttcccgctagagccccgtcctcctctgcggggctctccggacccccttccccctcacctccaggcagggacagaataaatgtttgtatggatttta

SEQ ID NO: 290124 - DNA, 1000 bp, Homo Sapiens
gcaaggatatgatgagattttgctcacagtcatgtgaaaacaaaatctcagctctttatccattgctttcacttagttttagtaccaaaacaaagagaatgcaaagttaagcagacttgaccaatgcaagtctctaagttgtttttataaatgatctgtagttccgtggcttgcatgggtgcaccaatcatctttagaacgatgtacactgatgttcatctcataaatgtcactctttagagaatgttacttagttaaacatgcagtgaagatcgaatttttttcccaagaacagatgtgttagggagaggggcttcagctaaatagtccaaaccctagggtgcttaaagccaagttagtgcaggctgagccccttggttcacagtcaagcctccttgtttcctagggtgactgtagagaaatgtatttccggatgaggtttctgatctaggccatttgaccaaactttgctgtgtctaagatattagcatgtttttgaaatatttattttttaagatgtttaggagtaaggtcgtgttgtcttcctcaactaaaaagaagtttactgttgtatcgtctccctgaggtgaacgttgttgggttgctagcaagggcagtagcttaaatacttttgttgcctactctgaaagctcatcaaatgagagcccttttatttccaagcagaatttagtcagataattttgcttctaggatatagtatgttgtatatgatgctgtgattgccctggagttcctgccatgacatggaaacctggtggtatggaagcatgtactcaaaatatagacgtgcacgatggtggtgtggcttacccaggatggaaacactgcagtttttacttgcattcccactgcctttcatggggggtgactgggtagaggccaggagaaaggaaagagttgtaaaataaaaaactgctagttcataaaaaaaaaaaaaaaaaaaaaaaaaaaaaaaaaaaaaaaaaaaaaaaaaaaaaaa

SEQ ID NO: 290125 - DNA, 1000 bp, Homo Sapiens
acttacactcctaaatcaagctggggcctgggtgggcccctcttggtatctgtgaatctttccaagcaccacttcggacacaccagggattgagtgctgctgttagtttagagaaggagagatgtctaacccttgaggtgaagggctctgggagggtccaagaagacgtaggcttcattttcacaccagcccacaccattccagtgctcagcctagcaaatgtgctttaatgcacacttctcagagctgtgatccgtgtatcttctccccagtgacagaagtagagaagagaatggaaagcagcacactccgtcccctctagtctggagctgttaacagaatctgctagaaactagctttattctaacataccgtaggatctaaatcctcctacctggatcatgaattcctttgaaataattcatattttcattgactctcactaaatgtcaaataaccttgttttcacttggataggctcaacctacctggcatatttattttgcagtcttgttgaaagttcatgaaactttgtactttttaataagatgatacactcgaaggaaacttttaatctctgcagtttattctctcttaaggaataaacactcccactgtttgttctcttcaatgtgtaaggagattaaatgacattttagaaatattacaattaaaaatagtgatgtagctgtaacatatgctggaattggatatttaatttatgtttgtgtcaactataatcctttccccacccctttcatttatggtaaacatcttgggcaaacccaaagatggaaagtgcttgttgggtgggtaagcaccacctggtctctcagcaaacactcctgagtggttgaagatgctggacattggattctagcactgggtttatctggtgacatagtctcctgtgggtcttgagttggttatttcaagctcaaactctgaatatgattaaaccagaacaccccacccccaactgccaaaaaaaaaaaaaaaa

SEQ ID NO: 290126 - DNA, 1000 bp, Homo Sapiens; identical to SEQ ID NO: 223075

SEQ ID NO: 290127 - DNA, 1000 bp, Homo Sapiens
ggaaagcagagagagaggctcggctggcaagaggagaaaaggaagaggaggaggaagaggaggaagagatcaacatctatgcagtcaccgaggaggagtcggacgaggaaggcagccaggagaaaggaggggacgacagccagcagaagttcattgctcacgtccctgttccctcgcagcaagagattgaggaggcactggtgcgaaggaagaaaatggaactcctccagaagtatgcaagcgagaccctgcaggcccaaagtgaagaagccagaaggctcctggggtattaggacccagctggggctctccttggagttcttccatcccccagtggtacctcaggacccagggctgcagacacaggctggtgctgcaagggctcctgccccattctcagccttccttccctctccttgtctcatgttgaccggagggtaggggtctgtccctggtcttcctggtaggttttgtacacatattttgctactgtgtggatccatttatttttattgtggagtgtatacaacaggttgcgaactggctgcctgtgtcttattttgacttgcactgccattttgaggggagaagaatcaattagtggcaaacatttaaaaatgcaattttttgcagaccaaagtataattttaaaaaatgcaaattttctaaaagacacatctcttgaaaaatgagatgatgtggccaggcgcagtggctcacgcctgtaaccccagcactttgggaggccgaggcgggcgggtcacgaggtcaagagatggagaccatcctggccaacatggtgaaaccccatgtctactaaaaatacaaaaaaattagctgggcgtactggcatgcacctgtagtcccagctgcttgggaggctgaggcaggagaatcacttgaacccgagaggtggaggttgaagtgagccaagatcgtgccattgcactccagcctggcgacagagtgagactctgtcccacaaaaaaaaaaaaaaaaa

SEQ ID NO: 290128 - DNA, 1000 bp, Homo Sapiens; identical to SEQ ID NO: 223076

SEQ ID NO: 290129 - DNA, 1000 bp, Homo Sapiens; identical to SEQ ID NO: 223077

SEQ ID NO: 290130 - DNA, 1000 bp, Homo Sapiens
atgccgccccgtcccatgccaccgcacatgatgcacagaggcccaccgccaggaccagggggctttgcgatgcctccacctcatggaatgaaaggtcccttcccaccgcatggcccctttgttaggcctggtggaatgccagggctcgggggcccagggccaggcccagggggtcctgaagacagagacggaaggcaacagccgccgcagcagccacagcagcagccacagccgcaggcgccccagcaaccacagcagcagcagcagcagcagccaccaccatcacaacagcctccaccaacacagcagcagccacagcagtttagaaatgataacaggcagcagttcaattcaggtagagaccaagaaaggtttggaagaagatcttttggaaatagggtggaaaatgaccgggaacggtatgggaaccgtaatgatgatagagataatagtaaccgtgacaggagagagtggggaaggaggagccctgaccgggacaggcacagagacttggaagagagaaatagacgctctagtgggcatcgagacagagagagagattctagagatagagagtctcgtagagagaaggaagaagcccgaggaaaggaaaagcctgaggtgacagacagggcaggtggtaacaaaaccgttgaacctcccattagccaagtgggaaatgtagacactgcttcagaacttgagaagggggtgtctgaggctgcagtcctaaagccttctgaagagttacctgctgaggctacctcatccgttgaacccgaaaaggattctggctcagcagcagaggctcctcgttagagactggaatttgtgaaaatgtgacagtgacacttcctggagtgtagagcttgaggtgtacagatgctgtattatatccgctcccgctgtactgcagccccgcgccagctggtggggaactgtaagcaatttgattgcttcccttctatttaaaaatagccacaaaaaaaaaaaaaaaaaa

SEQ ID NO: 290131 - DNA, 1000 bp, Homo Sapiens; identical to SEQ ID NO: 117771

SEQ ID NO: 290132 - DNA, 1000 bp, Homo Sapiens; identical to SEQ ID NO: 223079

SEQ ID NO: 290133 - DNA, 1000 bp, Homo Sapiens; identical to SEQ ID NO: 223080

SEQ ID NO: 290134 - DNA, 1000 bp, Homo Sapiens
ccctcaattcagaccttctgattgagtgcagaggagactagacagtctcctctagacaggttgtagacacaccctcccctaacaaaaacaaaacgaaagagttcatactctgattttccaacatctaggaaactgagttttatttcctagctctaaggcagccttactatatgtcagtaaagtgctgaaaactgtatatttagcagtagcacccaaaaccaagcctttaaccccaacaatgtgtgtatcttttgcacagcaaaaactgcgaggccagaactagtttatctgaacacctcagctgctgtaagcttctcctctctcaccccgtaaactgacaagcatgatgaaaaaagaagcacatccaagtttctgcctcttttaaatgtacttgactttgcaaggcaagtagttttacagccatttctgttcacacttttcaccccacaacttggggatctagctgagacatttctacctcgaacaagtcacatgtaccacaggttcctgaataattcctgcagggctggtgacagacataacagctctggttttataatatcttgggtatctctaaggccaataaggataacattatctacccagagagtttagaagaaaagtaggagtccaaaggaagagtaaacaagaatggagctgtgttcacactgaatttggggtcaatctatttcccccaccctctctcctccccaacccttcaggaaccctttagtttattaatcttatacagaagaaactaacttagaaacaaaggattcaatatttgcttatttattctttgttaacatgagagtcccatgtctgaaaaccaaagtccaatttctgtctggccttttgtctcatccttcttggcaaaagtagcttttgaactgatataaaaaaaaatgctgagtaacagaaaagtattaatgtgcttgacaccatgactgaaatactatgatcttgtttgtcaataaaaagcagctatctgtgaaccagg

SEQ ID NO: 290135 - DNA, 1000 bp, Homo Sapiens
aagctttgcaggggaaagcacagagggaggaattacactgaaaaaaatgcaagcaaaggttgagtacccccaggtgccccttaggaaggaaccaggtttaaataggctctacccttacctttcccagcagcaagttcaggggaagaggcctactcttagccctggctagtgtgaccctcttcctgtcctaagactttggtcctaccacctcttgtttcatctttcctttacattgctgggggttaccgcaggtgcctaccccagggcttcaccatatgggccattaatagctctactaaaactgacttctagatgtaggtttcattattgggggagggggttcttattgttatattttaaatggccttttgattttatttatttttatgttttgattatttttttcttttttaactaataaggcgagaagagggaagttggagagggaaaagttagcccagaaggaaagcattttctgcagatcagcctgaatccaccgtggctaggcatattcttgctcttctcgtgttgctcacaactacctgcctggatgaatttaggaaagttgcaggatacaaggttaaaacacaagatcaaatgaacaatccgaaaatgttattaagaaaacagttccggccgggcatggtggctcacgcctgaaatcccagcactttgggaggccgaggcaggtggatcacgaggtcaggagatcaagaccatcctggctaacacggtgaaaccctatctctactaaaaatacaaaaaattagccaggtgtggtggcacgcaccagtagtcccagctactcgggaggctgaggcaggagaattgcttgaacctggaaggcagagattgcagtgagctgagaccacaccactgcactccatcctgggcaacagagtgagactttgtctcaaaaagaaagaaagaaagaaagaaagaaagaaagaaaagaaagaaagaaagaaagaaagaaaacagttccatttacaatagcatc

SEQ ID NO: 290136 - DNA, 1000 bp, Homo Sapiens
cctttaccaatttcctatttgatggtttgtaagtagacagtaaggcaaggcagatgattattaccctcagaaaggttgcatctccctaggagtccaatgcttcctgtaatgaaatccactctctatgtgtgggaaaagaggcagggaggaatgaagagagctctgaatcgagaatcctagatgaaccacacgctttactaagcctcggcttcttcatctataatgtgaagggtttaataacatgagtccccaagctcctctggctgtgggaccacagatgagtctttcagaggcaggatccatttttgcagatagctatgacttgtggcaatcaggcttcgtagcttggggaggtagagttacttgacatgtatcatgtaataacagcctttgagacttggcacaactatggtgctgagaatgaaaatctaaatgattgaagttttaagtccaagtaggagttggtttgttttgccttgtttaaaaattgctgttagtcacagagtttgcaatctctggataccttcaaatcctagctctcactgtgggattcttgatctcagaggtgtttatttttcacagtcagcataggcttgcgccactgactcctccttcagtcggctttgcccaaaacaaattttagtattactggtattaagtttagtccagtggaattagaaggataattcaatagcaacagaaatataaattatattccattcccagagagagaatgcgctttggattgtttagtcctctgattaacgagtattttctcttcctgccaagaactaggtgaatcaggaattgattgcatatgcaagccctggccacagctgcacttacaggatgcctcatagacgatgaggggtctgaaaggccaacccgaggctggcagatctgaccccaaggaggtcctgctgcaaaccccctgagcctttgccattcactacttaccaaagtttgtttctggaggattttcctgtagctttgatagttt

SEQ ID NO: 290137 - DNA, 1000 bp, Homo Sapiens; identical to SEQ ID NO: 223081

SEQ ID NO: 290138 - DNA, 1000 bp, Homo Sapiens
ggatgcacctacaaggccaactctctgatcagggtgagggagagatggaagaattaacagatctaaagttggcctttgttgtctcaaattgggtttgtacacacatgcatgcatgtgtgtatacaactgtaatctggaacttcaggaagtaaaattatttgaagtttcttagtaaaaagtaattaggtataattccaaatagatttctgtataaattgtatctaactggattacaagtcagtttgacaatttacgatgtctcagtgatgtttctgcaataattgtgaaatgcattattgatttaaataatgctgacacgtactctttaaaagtgttctttaacactgactactaaactttaagttttaaaaaataggttttcatttatggctttttgtggttttagcactttaagaagtttaattttttgtaatttttaatatgctctttcagtgtatctcagcgggtactccagcttgtggcattcccatgtgactggggagaagacaaaattggtgtttagattctggaggagaaaaaatgagttacaatgtcaggtgtttttaaaaattccttttagagacagtcttttgggaaccaaagtattttactgtaaatctttaaaataacagaattcagtgctctttcatttgttaatgctgtccagatttttcacacagttatactcagttaatactagttttcagaacattagtccaaggctatttcaagttttccattgaatatatgcttatggttaaaagaaaaacgaatggttttataattctgtgtattttgtcatatgccttagcagagtaagtcatttttccattttacttaggaataagctttttcgaactgaaaattcatggtaaaataggatttctatctaatgttaatccattgcttatttgtattcaattccattgtctacagtttgcttaaatgttgactaagaatgattggagtcaataaatttgtactgtattttgcttcgaaa

SEQ ID NO: 290139 - DNA, 1000 bp, Homo Sapiens; identical to SEQ ID NO: 117772

SEQ ID NO: 290140 - DNA, 1000 bp, Homo Sapiens
tggaaaaaattcatgtgaagaaattcttagaaaagttcactcaattgaatatgaaaatgaaactctgaatcttgagaatacaaaattaaagactacacttgctgctttgaaggatgaagttgtatctgttgaaaatgaactctcagaattgcaagaagtagaaaaaaaacagaaaacccttattgaaatgtataaaactcaggtacaaaagttgcaagaagcagctgaaatagtaaaaagcagatgtgaaaatttgctacataaaaataaccaaataacaaaaaccaaaaataaaaatgtagagaagatgagaggccagatggagtctcatctgaaggagttagagcgtgtctgcgattccttgacggcggcggaacggaggcttcacgagtgtcaggagagtctgcagtgctgcaaggggaagtgtgcagaccaggaacacaccattagggagcttcagggccaggttgatggaaatcacaatcttctgacaaagctttctctggaagaggaaaactgtcttattcagctgaagtgtgaaaaccttcaacaaaaattagaacagatggacgcagaaaataaagagcttgagaagaagctggcaaaccaagaagaatgtcttaagcacagcaatcttaagtttaaagagaaatctgcagagtatacagcattggccagacaactggaagctgctttagaagaaggaagacaaaaggttgctgaagaaatagagaaaatgtcatctagagagagtgctttacaaattaaaatattagatctggaaactgagcttagaaagaaaaatgaagaacaaaatcaacttgtttgcaaaatgaacagtaaagcacaacatcaggaagtgtgtttgaaagaagtacaaaatagtcttgagaagtcggaaaatcaaaatgagagtattaagaattatttacagtttcttaaaacttcttatgtaacaatgtttgaataaattgtcaaatttaaaaaaaaaaaaaaaaaa

SEQ ID NO: 290141 - DNA, 1000 bp, Homo Sapiens; identical to SEQ ID NO: 223083

SEQ ID NO: 290142 - DNA, 1000 bp, Homo Sapiens; identical to SEQ ID NO: 223084

SEQ ID NO: 290143 - DNA, 1000 bp, Homo Sapiens; identical to SEQ ID NO: 117773

SEQ ID NO: 290144 - DNA, 1000 bp, Homo Sapiens; identical to SEQ ID NO: 223085

SEQ ID NO: 290145 - DNA, 1000 bp, Homo Sapiens; identical to SEQ ID NO: 117774

SEQ ID NO: 290146 - DNA, 1000 bp, Homo Sapiens; identical to SEQ ID NO: 117775

SEQ ID NO: 290147 - DNA, 1000 bp, Homo Sapiens; identical to SEQ ID NO: 117776

SEQ ID NO: 290148 - DNA, 1000 bp, Homo Sapiens
tgctttcttttaatatgagtaggcatacttagtagcttttctgaacctagcctatgtctctgtccccaaaatagctgcccttaaagagttgttagcagagagaaaaataacagtgaatgtgctcctggtgtatatggcagtgaatctcctttctgttctactttagcatactatatatatttgactgtgtacattcttatgcaattttaagtatacactcagcaataattagaaaaaaaggagagagaaaagtgatttaaacagggtggattccactctgtgggagccttcgatggaactcaaggtggagctcagcctttccaatgagctctaagcatgtagatagcctgagctgtgtctaagcctggtgtttaaagatgggtatttgtcatacaatatgggtcctaaatccaaccaactacacattttatctggtgttcaaaccaaagaaacaatgatctactcaaacattggagaaaaaaactgccagaggaggagttgccaattggcagtgtgtcttatctccatgttgtaactggactctgactttagaccattacctattaggaagattaaaaatgactgtatttttaaaggaataaatcccagtgtgcctgatttgacattcttgtcggcaaaaaaaaacttaatttctagtaaatctataaaaatgggtaagtccctaaattacaaatgagaaaattgaagcacaaggaaaaaaataactagtttgaaatattttgaaaagtaataacataaaactagtatttgtagaagattatgtgttgtatataacaaattagtatttatagaatatgacctatttatctgaagtttataattgtttatacctaatacagttctttttggagtaagaatgattatataatcgttatccatttgggtataaatctgtatttttagttttttccctttgattagtatgtgttacatataaagacagaaaataaagtataaatcaagaaaaaaaaaaaaaaaa

SEQ ID NO: 290149 - DNA, 1000 bp, Homo Sapiens
actgccaattctgacctgaacccaggcaccacccagatgaaggacaactttgacattggggaggtgtgtccttgggaggtttatgacctgacccctggtcctgtgccttcagaatcaaaagttcaaaagcacgtatctattgtggcttctgaaatggagaaaaaccccactttttccttaaaggagaaatctcaccacaagcctaaggcagctgaggtttgtcagcaatccaatcagaagcgcatagataaggctgaagtatgcctttgggagagccaaggccagtccattttggaagatgagaagcttttgatttccaagactccagttctcccagagagggcaaaagaggagaacggaggtcagcctcgtgcagccaatgtgtgtgctgggcagagcgaagaactgccccccaaagctgtagcatcaaaaacagagaatgaaaatctcaaccaaataggacaccaggaaaaaaagacatcttcttctgaggagaatgtgcgtggctcctataactcaagtaataacttccagcaacctttaacatcacgagcagaggtttgtccttgggagtttgagaccccagctcaaccaaatgctggaagaagtgtagctttacctgcctcttctgctctaagtgcaaataagatagcagggcctaggaaagaagagrtctgggatagttttaaagtgtagcatctccaggaagaagaggaaaaggagggaaccccggattggatatgagacagaagatataagaatcaaatattcccaaggaggatttgtcaatcaaggaaaacatgacagatggtgaggtaaagtcaaaggcatgggtagaagaggaccaggggggcaagagcaacaacgtcataatggagaagtcagactttggtcaagaaagtccttcccttggtaacactaggaaaatctttccatttcagcatgtttaaggaaaatagcccacaatgtctgccctgatcaatatgtatccatgggactt

SEQ ID NO: 290150 - DNA, 1000 bp, Homo Sapiens; identical to SEQ ID NO: 117777

SEQ ID NO: 290151 - DNA, 1000 bp, Homo Sapiens
tgggttagaaggaagtgtttgaaagtcactttgaaagttagttttgggccagcacggtagctcacccttgtaatcccagcactttgggaggctgaggtgggtagattacttgagcccaggaattcaagaccagcctgggcaacatggtgaaaccctgtttctataaaaaataatctgggctttgtagcatatgcctgtggtcccagctactgaggaggctgaggtgggaggattgcttgagcccaggaggcagaggttgcagtgagccaaggtcacgtcactgcactctagcctgggcaacagagtaagacaaaaaaatatatatatattgaaaatcaaaggaggcaaaattttgacagggaaggaagtaactgcaaaacactaggctttagtaggtacttatataaaatctagtccagttctctcatttaaaaaaatgaagacactgaagtacagacttaaatagctcagatagctaattaggaaatttcaagttggccaataatagcattctctctgacatttaaaaataatttctattcaaaatacatgcataattgattttacacctcattactggtggataatttatgtgatgtggattgctggtgtccagcatgacccataaacaggtcagaagaatgatggaatgttttagaataaactcctgcttatagtatactacacagttcaaaagatgtttaaaatgcttttgtatttactgccatgtaattgaaatatatagattattgtaacctttcaacctgaaaatcaagcagtatgagagtttagttatttgtatgtgtcactagtgtctaatgaagcttttaaaatctacaatttcttctttaaaaatatttattaatgtgaatggaatataacaattcagcttaattccccaaccttattctgtgtgtagacattgtattccacaattttgaatggctgtgttttacctctaaataaatgaattcagagaaagtgaaaaaaaaaaaaaaaa

SEQ ID NO: 290152 - DNA, 1000 bp, Homo Sapiens; identical to SEQ ID NO: 223089

SEQ ID NO: 290153 - DNA, 1000 bp, Homo Sapiens; identical to SEQ ID NO: 223090

SEQ ID NO: 290154 - DNA, 1000 bp, Homo Sapiens; identical to SEQ ID NO: 117779

SEQ ID NO: 290155 - DNA, 1000 bp, Homo Sapiens
agggacaggggaccaaggtcagggcccccctgccccaccgcacccccagaatataagctatcaagagtattaatttattgggaatgagctgaggcggatttccccagagaaacaaaaaggtataactttaacaaatatatatttaaagaaagaaatattattgattctatagaaaaccatttaccaactgaaaggacacgaagtctagctccggacaaaagctgttagaggcccaggctgtctgcctgcggtccttcctccggccagagtggaggccccaggctgctagcacaggtggaaggctggggcccgggggcgggtgctctgccgggggctcctccgtgcttctctcctaagttctctgcgccccaagaactcgaggttgtgccttgctctcggcggccgtgtcctcctcctggcgtggctgcgtcccagggcgcgggtgggtttggtgaatgtgggtgtgtcagcgtggcagccacgtggaagcagggcatgtagcaggccaggccacgggcttgcagctcctctgagggtgtgcctggccccctctccaggggctgtgcaggcagcccatccaccccagtggagttcccacggacgcttctgctcatggtccaaggctgtgttgtgtggtcattctcgccctcccttttcctctctcctcctgccccctccaagaagtactgactggtctcctctatcgtgtttgctgatccacagtgttgggcacaactttgacgtttcttaaaaaaaaaatttaaaaaatgccgaaaaccagcgattgtggtgtggggcgggtggaggcggctggcggaggtggcgtcccggcgtgcagggccccttcctgctgtctcaccccgtgtttccctgcgagtggacgtgcccagctgtccccccaggcctctcctcagagggcggcacaggctgggctccagcaggtgggcaggggaggtctgggcaaggcgctgccgtcggctgtcaataaacagcaggaaac

SEQ ID NO: 290156 - DNA, 1000 bp, Homo Sapiens; identical to SEQ ID NO: 117780

SEQ ID NO: 290157 - DNA, 1000 bp, Homo Sapiens
tgttcctctgacccctgacctgtcatgagttttctctgctctgacattccttatacatccagtgaacaaagctggaatagaaaacctgtttaaaaccatcacaacagcaatatttttattctgggccacctctcgactggcactcatcccatggtaaaatattcaagtaactaagacaacagcatggcatttatttgtgtgagtgtttatatagaaatgaacatagacctggccagtaaaaggctctgaggaggcttaaagtacctagtttgagtggagttatcaagtgaggtccaggtagcctgcaacactggaaatgagttctgggtaagtgagttataagagtacatgctctagtaactctggtagtcactgtgactcgggcatgtttccctgaagttaaaatagtttttagaactttttgtttaattctgaagaaaacaatatatatggtttacttctcgaacattggttatgacaagggccataaattgctaatataaagaagttagtagtattgagtggatacaatgaatggggaatcacatgtgtagagccccaacttagattgccttctgggaaatcccgcgatactaaaatccagtgagctttgggagatcattccctaaaggtatgtgggttgtctgaagtcagaaacatatttacaaagtccttctacccactatcaaaaatgaactgatctgcattcagcaggaaatggggaagacaggaatgtaaaactactagatcatatggtattgtgattttctttcccctgctaggaaaaaattgcactgaaatgctgacaaaaaataatgaaatgaagtggcttccaaaatatgcactgatgttatcctttgtatttataggcacagttatcttactgaaaatgcatgcatggtgaattaaaataaaagggggaacaatgcacaaattaaaaaaaaaaaaaaaaaaaaaaaaaaaaaaaaaaaaaaaaaaaaaaaaaaaaaaaaaaaaaaaa

SEQ ID NO: 290158 - DNA, 1000 bp, Homo Sapiens; identical to SEQ ID NO: 117781

SEQ ID NO: 290159 - DNA, 1000 bp, Homo Sapiens
agtggccagttttccatatgtatatattatggtctcaatgtttttcttacgcctcattttaatttataatgaaggtaaaattaaaatgtattttaccacgtttcttttcattacttttatctgtgagctctgacacatctgaaaaagtaatctgatgtgcaaattataatttaaatatgttaatttttttgcttcttaaatttgcttttcatcattaaaatgtcaagttcaagtgatatgtgcctaatatcacttggatgttggtgggtttttgaatttttgggtggttaatcagttttattttgaaaagacgtacttgaatagttacagcatatgtttgaacaggaagtaggaacatgcatacacgaagaaatgctaacggaaggatttgttatgtttaggatcttcccttggaaactaaaaatagaatattaatgacattactgtttgtagaatgacatatgcagattttctcataagcagtcattgtgtttgccagtaatgtttgagagacatgtaagttgaaagttttgctaaattataaagctcctttaattcgttggttttgattctcttattctcttgtcttttctaaatgttaacaaaatatatcttaacagattacatgaaatttaggaattatttaaaagttaccattagctctaaaattaagattcggatgctttatttatagtaactgaagctaataatgttttatgttttgattttttgaaatttaattgtagaagtcactgccttctgagttttcaaatagataaccacctttaatattacactgcttataatactaatgtttacagatatgtttctgtttataaccatataatacattggctttgtcatattagttttttttgcaagtagttatgtaaaagagatagataataaaatattaaataactgagaaaaaaaaaaaaaaaaaaaaaaaaaaaaaaaaaaaaaaaaaaaaaaaaaaaaaaaaagaaaaaaaaaaaaaaaa

SEQ ID NO: 290160 - DNA, 1000 bp, Homo Sapiens; identical to SEQ ID NO: 223095

SEQ ID NO: 290161 - DNA, 1000 bp, Homo Sapiens; identical to SEQ ID NO: 117783

SEQ ID NO: 290162 - DNA, 1000 bp, Homo Sapiens; identical to SEQ ID NO: 223096

SEQ ID NO: 290163 - DNA, 1000 bp, Homo Sapiens
ctggtgtgagggttgtgtcagcagctgtagccagagagaggtgttgactctgagagaccttgcactccatactgaaaggaggtggggtcacagtgaatttcacatcccctctcaaccaggagtggagggctaggtcccttccccatggggagtacacttgggtgttctaggagggatgcagtctatccatgcacttgggtggaggggagtctctgtgcctgggaattaggacccctgctccaaccatcgctcttgatcctggggccccagctctgggtcctcatgtatgggctcccaaggacccagcagcctggatccttccagagcatccctcctggaggcctgggatggggtaggtctgcagctagcctactccctttggaatgcaataaaggcagcattgtgtgccctgcttgccctcatctggtgtggttggaggtctgtggagtcaaggtccccctctcccaggcaggctctctgagggcattctgtagtcccaggcccactggaaaaatgaatctatattttggttcctggaccgaagttcagtcgcagccttctgtggccacagaaagacagcttgtgctgcttgcacaactgagctgctggtgtgtaccccttagcagggtgtctggggacttacgcctttggaattgctcttcattcagaagaggaacacaaaggaagccacccaggaaggaagcacagagctgggggctctggaaacgccctgtgtctctggctacagcaagaccagcccaggagcccaccagcacctgcctctcagctacttgctgaccatttcctgcttctcaagctgcagagaagcttttcattcccacccccacccggaacctccccttgcctaacatttcccctctatggtaacatctctgacttctctacctcctctgtgctcaggtgactccacatcttctgccccagtgtgtccccacctctcccagcctgtatacccagattactttggtgaactgaaaaa

SEQ ID NO: 290164 - DNA, 1000 bp, Homo Sapiens; identical to SEQ ID NO: 117784

SEQ ID NO: 290165 - DNA, 1000 bp, Homo Sapiens; identical to SEQ ID NO: 223098

SEQ ID NO: 290166 - DNA, 1000 bp, Homo Sapiens
caaggctgagtaaccttgtgttaaaagtaacctgtggcagactaggtttccagaatttcctggttctgctcacgtatcatgtttgaaaaaattttggctattaaagatatgtattagatggtcttatcctgattattacctggatacaacttgatcttttctaatattttcagaaagtgatgggataaccctagaagaggactcagaatgatatttatattttaagtgagtcttaaaacctcctcttatttctacaagttatatggctaaatttcagattgaacagggattcagcattctgccatctcctcatggaaagagaggctccctcatctgaagcgtctctgaaatctacccttgcaagcttcagacaaatcagttgatctccctgagccacacggcctcattctgtgagggagggaaagattagccaaagagttaattttcattccaaatcacttagctgttagactgatctgtttgtagcagttgtttgtctcatttttgctctgtgcattttttgagacatttgttgagaatattctatttggtgctctactgtatttttctttttaatatctacttgatatcttgttctttaaattttcttcacatatggtttgcctgatacaactgatttttataactgaaatttaaggaatctaacagctaaaactcagtaagtgcatctatttccttataacatagacccgttgctactctcagcaccctctcctcaattttttttcctgtagcatgtgatgcctgattaaactcattttcatttgcttttatttctaatatgggaacaatgagagtgaactctaaatataggttgtagtaataaaacatcattagcctaattattagaaaatgctaattaagtaccagcacatagaaacatgaaattgcttagtcattgtacctttgtcagcaattttgacagtcattaatgtttgtcataattttaaataaagtgtctgggtttcagaataccttc

SEQ ID NO: 290167 - DNA, 1000 bp, Homo Sapiens
aatttagcggattgtggacttaagattcaacctctatctggagaggtgaaaacacaaaggcttaaggacaacagtttctaaccaagtttctctgaatcctttcctgagaggtggtgggcaggagggaggagtgagacttatcagatgggacgcttgccccaagactgtgggataaaccaccattgctagtcctcaggaattagaccatatttagtataggagttggggcaaaaataaaagtgtaatttgtaatggtttctgtgggctgtagactctttgtatttacttggaaattcagttatgtggatccattttggagatgaatttcatctcatgagttgctgtggcatttaaacaacaggaaatgtgtccctaaatggaaacaaatataatcccacaaaaccaacaattttatttgcctctactacgtcaggcagaattcttcaattaagttgaactacatttgttgatcccttttctcatcttacccctttatgccacctactgaaaagaaaaacaaatagctaggtttggtttcctgttttttgtctatgtcccagctgacattcagtcaaatgttgggatacttctaatttggtggtgtttctttgtacatttttcagtgcaactgtttagtcatgtgttttcatctaagaaattatcttttgaatatttaagccttgatccttttattctgaaaccattaatattccttcttggctgggtgcagtggtttacgcctgtaatcccagcactgtgggaggccgaggcggatggatcacctgaggtcgggaattcgagaccagcctgaccaacatggagaaactccatctctactaaaaatacaaaattagccaggtgtggtggtgcatgcctgtaatcccagctactcgggaggctgaggcaggaaaatcacttgaacccgggaggcggaggttgcggtgagccaagatcgcaccattgcactccagcctgggcaacaagagtgaaactctgtctc

SEQ ID NO: 290168 - DNA, 1000 bp, Homo Sapiens
ttttattttttacacttaagtctttaatccctctggactggatggttcttcataggagagcaactgtaggtgatcattatcctgtgaaaatattttgaacctaaaaagcactcagggaaatgcaaattgaaatgctcagtgagatgaaacttccccttcatggatctggcaaaaattaagagatcttttgctagctattggggtttgggaaaccatgtactattacttaaaggttgtgtaacatacttccaccagcagtccaacaatatatgtttaaaaatttaaaacatatatactcttagacccagcagtctcacttttggaatctgtccgttagaaataaaagcagcatcaatgcataagaatgtaaataaacatgtttgttgaagtactgtttgtagaggggggcaaagccccaactgcaaacaaagtgaatgcccattaatagggaactggttagataaattgtgacatacccatattatggaacagtgtgagagtaattttaaaaacgacttatatctatgctagctgatttcaatgtatttccacaatgtattgataaataattgctttataacaaatgtatatatacaatatatcatttttgttaaaataatcacacccatttattttgtgtttatgtgtgtgtgtgtggttagatgcacatggagacaggtatggaagaatatacaccaggctgttaatattgattaccttgaggggagtgagaaaaggagaagtagagataagggaaggggagactgtaaaaacagaaaaatgtaaatgctgcctttatggtataaaactgtaaatgtaatattatgtaattatgtgaacttttgagagagatgaaaggatggtctccaaaaaattaatgatggttatttctgttttagtggttcatcaattttttgttttttactttcttttctgtgtttttaagttaattttttccttgcaatgaacctgtaatatttacattaaaaggaaaaatatt

SEQ ID NO: 290169 - DNA, 1000 bp, Homo Sapiens; identical to SEQ ID NO: 223099

SEQ ID NO: 290170 - DNA, 1000 bp, Homo Sapiens; identical to SEQ ID NO: 117785

SEQ ID NO: 290171 - DNA, 1000 bp, Homo Sapiens; identical to SEQ ID NO: 117786

SEQ ID NO: 290172 - DNA, 1000 bp, Homo Sapiens
tgttgtttttttaaacagtatatttggtggtctctttgtctgcttttatttccagttcgatcttctgggtttagttttgtctttaaaaagaattcaaaaaaagactgacaatgacagttttgagttggatagtgaaaaagtggagcctccataatcagtgtggttgccttcagacctgagtacttagctgagggtgggtgagagccctttgttccaaaagtccattagttttgctgttgtttaggagtaggtggttgttgttgtttttactttttttttttttggcttttgtaatggaatccatgttcacatcctgtgaactctgtctcctgaaaccctgaagtatttcctagaacctgaaatattgttttcttccttgaattttctctagaaatgcagaaattaggaaggtgatgggtctgtatccccctgcccccttctttcccatgcttgactcccgagagtactggcagtgcagcacccatcattgacgtaagcggctgtcttgtccagtgtttgtaggcatcactgcctcagctgttaaggagacctgtgtcaaaacttacatccacattcctacacccccacaacccatcacttctggtgttaaccctaaaatacccacatgtattgagctggtcttctgcatttaagtatttctccccagtttttttccccactgtgtgtggggggagggtccataaacccgagtgtgcctttgctttccacccttgctagacactggtagatgcaacaaactcagatttatatttgttgtaaagttgtaaaaatattgtgatgtcaccaattttccttccatctccacatcccctaacatctgattcacgacttaatgtatgttgtaagaaaagaaaaaagaaaagaaaaaaagggaaaaaagaaaagcaaggaaaaggctctttattacttaaaagtaataaaacctgactgttctatattaaaaaaaaaaaaaaaaaaaaaaaaaaaaaaaaaaaaaaaa

SEQ ID NO: 290173 - DNA, 1000 bp, Homo Sapiens
tcagcaaacctcagggctgtcagagcagattgatgggagcgctttgtcctgcttttccacacaccagaacaattccttgctgaatgtatttgcagatcaacctaataaaagtgatgcaaccaattatgctagccactctcctcctgtaaacagggccttaacaccagctgctactctaagtgctgttcagaatttagtggttgaaggactgcgatgtgtagttttgccagaagatctttgccacaaatttctgcaactggcagaatctaatacagtgagaggaatagaaacctgtggaatactctgtggaaaactgacacataatgaatttactattacccatgtaattgtgccaaagcagtctgcgggaccagactattgtgacatggagaatgtagaggaattattcaatgttcaggatcaacatgatctcctcactctaggatggatccatacacatcccactcaaactgcatttttatccagcgttgatcttcacactcactgttcctatcaactcatgttgccagaggccattgccattgtttgctcaccaaagcataaagacactggcatcttcaggctcaccaatgctggcatgcttgaggtttctgcttgtaaaaaaaagggctttcatccacacaccaaggagcccaggctgttcagtatatgcaaacatgtgttggtaaaagacataaaaataattgtgttggatctgaggtgatatgttctgaatgtaagcaccgtcaacatcagacacctactcatggacatgtggttgccggattttcttaagatgtttccagaaatgactgatattttatatttatacattttagatgacaaagcttgatatttattgctgttgcacattttaaagttttctttttgggttgctctgtgtcaagagaggttacatggtgttaaatcggtacctgataatgtacccaaatactatggccagataataaattgtgctgcaaacaaaaaaaaaaaaaaa

SEQ ID NO: 290174 - DNA, 1000 bp, Homo Sapiens
gctataatacatacaatggaatattatttagctttaaaaaggaatgaaattctgataaatactacctcaggataaaccttgaaaacactatgctaagtgaaataagccagacacaaaaggccaaatatgatgccacttttatgaggtaccagcataggcaagttcacagaaacagaaaggagaatagtggttgccagggactgcagggaggaggaaatggggggtggggttattgtttaacgagtacatagtttctgtttgggatgaacaaattctggaaatggatagcgatgatggttgctcaacattttgaatgttaatgccactaaattgtacccataaaaatggttaaaatggtaaattttgttatgtatattttatcataatttaaaaaatatatctagaatgggcaagaaggattctcctcattcctctcttgacttgagaatgatcagtcaataggccctgaagtctgaatttgtgaaaatttccttgggtgacaaacttgtttgattactctatttagtgtatcccaaagttattaccacataatcttttaaacaataaaacaaataccccttagaaagtcttctgcaaacccatttctgaaaatggtacattatagggtgggtatagatgcatagatatgggattatgtatgatatatatatatatacacacacacacaaagggatagagagattacctctcttaacccccattttaattactatgtctaggttttttaaataaaaatcttttctttttaacatgtttcttttcttttccggaatattggaatattctgttcttgatccagatgaaatctgattgagcagtgtacttacaagttgtactgtgtatgtgtttcctatattgttatatttcaataagaagcttaaaatgtttaaaaataaatggttaaaaggttttatgttatgtatattttaccacaataaatgcaaaaaataaaaagtcaaaaaaaaaaaaaaaaaaaaaa

SEQ ID NO: 290175 - DNA, 1000 bp, Homo Sapiens; identical to SEQ ID NO: 117787

SEQ ID NO: 290176 - DNA, 1000 bp, Homo Sapiens; identical to SEQ ID NO: 117788

SEQ ID NO: 290177 - DNA, 1000 bp, Homo Sapiens; identical to SEQ ID NO: 117789

SEQ ID NO: 290178 - DNA, 1000 bp, Homo Sapiens
agaacttacaagagccacaggagccaattatagcacctgacagaatacttctcctcttcctcaccttcgggtgcctctagacacttgacttacgatcgttattcccccaattcatcatattttgtttgttatcaccagagatgcctgaactcagttaagcgagcaattgctagttgtcttgaggagcatgaggaattcaggagcagaaggtcaggatagcatgagatagtctcaatgtggccaaccaaaaggacaaaactgacaggaatgcacattcgattttcaagccctccagagcttgaacaacaactttaggagtaaataaaagcctaaaatatattttaaccatccagagatggtgttgaatccttcaacaaatgtgtcattcaaaacagtaattagggaaatcccacagatgaaaaatgccttagtgataagctttcatggcagagcacgtcaagataaatgggtatactggaatccgatgccgtttctacagtaaagtgcaatcttcgttgtttttgtatttatttgtatgttcagatccaaaggatccgttgtaaaaatatatatatataaatatatgtatatccagtgcaatcaactgtcatttctttttccttaaaacatatgagtatatagaaagaaaagttacagtactctgtgggaaaatctcagctgacatcatgaatagaatgaggtctgcttcagaaccttttgttgtcaactgtcactgtttcttccaaaagtcacaatttgtacaagaacctttgctttccttagacttgttctgcattttattttttatttctcaccaaaataaaagcatttatgagaattataagtaaagctttctgtatttcagagagacataagttactagaaagtgaaaagtgaataaataagtcacagagaatgtaaattttgtacagtattagaatgtgtaaatgaagcttgcttggaaggggaaaactttaaataaaaactttatgtactaatt

SEQ ID NO: 290179 - DNA, 1000 bp, Homo Sapiens
aaggcagggattgtcagcccacctgaggctgggaggaagcaggaccaggcctaggatctccccagcagatgcaaacaagtgtcctcccctgaattgtgtgaaccaaagcgtcaggggcttggggcacagccccagtcagctcaacccagtcctgcttcagagccaagactaggccagggtggggacccccccagtaccctccctacatcaatgtggctgctggcctggaccccaggggtctggtacagccaagatgttctggacaacatccagctacttcaaaggccagagtgtcctttgggtcctcctagagtccccctaggtctctggctgcccatgaggctcatgaagcagagggtatcccagtcatagggagcagaaagagcaagtgggttaaggaagcctgtgggggacctggtggatggagttgaccaacatcgctgggtggctacggccctccttaggaagcccagaaggacctttattattaaaataatcattttgaaccctgctctatcccctgccctcttccagccccacccctccctggtcttgaaagaagactaatcagtgggcacaccaagggccctgaggggcagggagatgccaccatgcttctctgtcaccgtaagaaggctgaccagccacgcccacctcctctgtctgactgagttccttcctgtggccacagggaggggctggtccttccccttggtgctggctctctgtcacaatgcctcaaaagacatggaacccaggcctacaaccgtcccaactgctaattcttttcctttcattttgctttctgaaagcagtttgttatactattcataacattgtagagtttaatttcatgtcattttggatcttatataaaaatgtgaggatttggatttttaaaaagaatgactccattttaggtagccacttttgatgttaatatatagtgagtccaatgtatgctttagaagtaaagacattgaccgtcacagaccactgc

SEQ ID NO: 290180 - DNA, 1000 bp, Homo Sapiens
ctttctcggtaaccacggcagagagcagcgccgatgtgaagatgaatgaatgtaactcctggtgtgaagatgaatgtaaaccctggcgacagttgagacctttttcttttagactctgctaaaacagtgctctggcttgggcttacctcaagagggaagatagttgagttttatttcctgtatatcaggtgacctggtagagatgtaaagcaatttaccatagtttgggctttagtattgtaaaataaacatgagaacaaataatcagacatatactttaatgttaaaggtgctctatttttttggatgtacagtagttttatttccacagccacattaccatagcaataagaaaggaggcatagtacatagttggaaaagctttgtggggggattaaaaaaaaaaaaaagcactgttgtgtttaacactagttcagatgcagttaccttagagacttatttatttgcaggaacaaatggtgcctgaatattaacagtgttctgattaaaaacaaaaaaaagatacatatgccttgtaaatggctcaccgagtggtcagtagtcacttcaactcttagttcacttttgtatagttgctctgctggaaagaaatgagagtgaatctgcttactcactagaacttccctgtgtgctgtgagccagcggaaccacttgtacaatgccagatttgtttatctttgtacagaagctttgatgaagtgtcttgtatttaacacccttatttaagcttatttaaccttaaattgttaattttataaaatttggtttggcctgcactacgatgagggatggaggtagctgcaggctcagaagagactgagcttgcacagatcagaccgagaagcagggtgagagattctaacgactggatgctgctagtaacacattgtttgtattgctttaccatttttaactgttagatttgagatgaacatacattttgcttttttaataaatgtttaaaagaagtccacataag

SEQ ID NO: 290181 - DNA, 1000 bp, Homo Sapiens
ctgaaggggatgctaaaggagataaagccaaggtgaaggatgaatcacagagaagatctgcgaggttgtctgctaaacctgctcctccaaagccagagcccaagcctaaaaaggcccctgcaaagaagggagagaaggtacccaaagggaaaaagagaaaagctgatgctggcaaggagcgggaaggtgctggagatcccaagtgaagtgtgtgcattttttataactgtacttctggtgactgtacagtttgaaatattctttatcaagttttataaaaatgcagaattttgttttactttttttaagctatgttgttagcacacagaacacttcattgttgtttttgggggaaggggtatgtgtcactaatagaatatctctgaagctggattgatacggggaaaacatctttcccttctagttttgagagacttcctcttggctcccaggaggagggatttcctgactttgacacacatggccaccttggcacaaaagccttgtggtatggaaaaacaaattcgtttttatgtcttcttttccctttccatctttcagcatagacttaatccccttaagcccagacatctgttgggacctgacccccggtcattggttaccagtgtgtctggcaatctggactttccagtgatgccactgagatggcacctgtcaaaagagcagtggttccatttctagattatggatcttcggataaattctgccattttcatttcacttcctgaaagtcagggttggcttgtgaaaagttgttaaacaacatgctaaatgtgaaatgttaaccctctaaactttccctgttcagagcatcagatgaggacttcattgggttttatagcggctgatttttggtagtccattgaagaagagagtttgaaagttgtatactgttaatgactgtctgcccatgtcctgcctgaaataccatgattgtttatggaaagtatctttaataaagctggatacagtttgaaag

SEQ ID NO: 290182 - DNA, 1000 bp, Homo Sapiens; identical to SEQ ID NO: 223104

SEQ ID NO: 290183 - DNA, 1000 bp, Homo Sapiens; identical to SEQ ID NO: 223105

SEQ ID NO: 290184 - DNA, 1000 bp, Homo Sapiens
catcttattgttatcctgattggatttccagagcaatcaaagacctccgtgctgcacatgtgctccctcttccacgcgttcatctttgctcagctgtggacagtttattgcgagcaaagtgccgtcgctacaaatctccaaaatcagaatgaattcagcttcacggcgatactgacagcactagaattttggagtagggtgacacccagcatccttcagctaatggcccataacaaagtgatggtagaaatggtgtgtctccatgtgattagtttaatggaggcattgcaggaatgcaattcgaccatttttgtcaagctgatacctatgtggttgccaatgattcagtcaaatatcaagcacttatctgcgggactccagcttcgcctccaggctattcagaaccacgtgaaccaccacagcctaaggacgctgccgggctcgggccagagcagtgctggcctggcagccctccgaaagtggttgcagtgcactcagttcaaaatggcccaggtggagatccagtcctcggaagcagcctctcaattttatcctctatgagtggactcctcggcgctcagtgtcaacactctggtttagcaataatgggtttaaaaacaaacaatttgatccaagcaggttggggaacatattggtactgtacattctctttctagtttagtaaaagatgtgcaaaggccagagagggccgaaaatgaagctttcttgctacacatatttctgatgactccttgggctatctgattaagtgtttccttacattattttttaaaaaccaaatcatttttctttaactaacttctattttttttaagaaaaaaaaatagactggtgggtactcacagaaaagttgtataagtccccctgttgctatttttgatgatagagaataaatagggtttttgaaacctttgtagtgttttttcttaaaatccactcttggcaatgcaataaaaaaaaccgtcaccataagccagtg

SEQ ID NO: 290185 - DNA, 1000 bp, Homo Sapiens; identical to SEQ ID NO: 117792

SEQ ID NO: 290186 - DNA, 1000 bp, Homo Sapiens; identical to SEQ ID NO: 117793

SEQ ID NO: 290187 - DNA, 1000 bp, Homo Sapiens
gagacacagctctgagccagccctgcacggagctcaggccaccaagcccggggtcctcaggaaggacgtggaggagcgtgtgaggacacggtggcactagcgtgaccctggggatggcacactctactcaccatggctcctgggactccaccctggaaaggagcccctcatgcggggggagggccagctcacccctgggcacctgcaggctagtgaggagagttttttaacctatttttacacgtcgatgcagtccacttctctttacacagatgtaccgcaactcgtgaccagggctggctgggagggcaacgcagggactggacgccctacagggccgagcccaggctgtgctggagggtggggctggggtgcatggggaggggagcagaacccagaacccaggagccccgcgtgggccacacccaactcagagccggcctgagcgttcacggccaggcagcctcgcttccttgcagccaagggctgggggccagggctgctgttctgcactctggggtgggtgagggggaccctgggctgtttgctgtcccaagccccttctggaagttagaagcagcaaagggcccggggaagccgggcatgtgagaggggtgcgtccccaggtcccccagagggccctgtcgccgaggacctttctgaaggaagcagaagacgccatttcctctacttcacactgaactgtcccagccactgcatctagggggcattgggcggaagatggtgcatttccatggaccattttacacttaccttttaaagcaaagcctcattttctaaacccctgacttgtgaagcacaattcagcctccgggctgggccacgtggagagagaggatcttctcagcaaggcgagatcccgggcggcggctgacatcaggagcgccaccctgcgtcctttgctgctggttccttactggtttgtacggtcagcgctggaaacttctattaaatggatgcattctggaggcatgaagtt

SEQ ID NO: 290188 - DNA, 1000 bp, Homo Sapiens; identical to SEQ ID NO: 117794

SEQ ID NO: 290189 - DNA, 1000 bp, Homo Sapiens
tgccgcacctccaggttctgggcatgagaggccgtggcctcatttctggtggataacctttttagtttaatagcatctttaattagatcacagcattgaattcaaaatttcttctgcaaagaaagttgtggggcataagacaccgggaatgagggaggaggaagacagttgtgttttctctttaaaccttgagctctagccgatgcatttgtcaggaaatacagcactttgtcttaagaaaacaaggaaggaggccgggcgcagtggctcacgcctgtaatcccagcactttgggaggccgaggcgggcggatcacctgaggtggggagtatgagaccaccctgactaacatggagagaccctgtctctactaaaagtacagaattagccgggcgtggtggcgcatgcccataatcccagctactgaggagacttgaggtaggagaatcacttgaacctcagcggcggaggttgcagtgagtcgagatcgcgccagtgcactccagcctgggcaagaagagcgaaactgggtctcaagttaaaaaaagaaagcaaggaaagagtaatttacaacgaaggaaaaaaacccacagcacacccttcgcggctgtcagcgctctcctgatgtcacagtggctgcgtgtccttggggtgggtgaggtgtggggagcccagcccctggccctgcctcccgcgccccgctccccttctctctcttactcggttaagccatagcgaggcctccgctcgtttcagatatgaatttgttttatagattataaatatgcatatacagtgtatgtataaagcagaatgcctgcctttcctggttattttttgtaccatattgtaaattatattatttattctttaccaattttgggaataaaaggtgttttggttatttaatataataagagctgttaaacttctgtttaaatttccagttcaacttgtaaatgtttttattgtgcataaatacatactaatgttgatctaa

SEQ ID NO: 290190 - DNA, 1000 bp, Homo Sapiens; identical to SEQ ID NO: 117795

SEQ ID NO: 290191 - DNA, 1000 bp, Homo Sapiens
tgaatgtaaggtgatgtgaccttgttggtgagaaaattaaactttacatttgacttgatttgttttagaaagtctagggaccatgaatgaataggccagctgggacaaatgaatttaaaaaatcagaaaaatgcaagatttatatgcatgaagttaaaacaactgacgttactcaagaattagaaaactttgcaagatttgacttgtttaaaaatcacatttataagtgaaccgtattaaaacttttaaggaaccattcattgtgaggtaaactgatccagaataggggtcagcaaactatgactcatggccacagtctcactgactgtttttgtatggtccatgatctagaatttaaaaaaattttaaagggttgaaaaaagtgaaaagaatattttcaacatgaaaattatatgaaatttaagttttggtgtctgtaaataaagttttgttggcttcagccacacagtgatttacaccttgattgtgctgcttccaggctgtagcagcagagttgagcagttgtgacaggagaccatgtggcctgcagagcccaaatatctactgtctgatcctacacagaaaatgtgtgtgatccctgctatggagcagaggttatcaaactaaagcccatggaccaaatcctatctgctgcttgtttttgtaaatagagttttatcaaaccacagccatgcttacttgtttagctattgactatggctgctttagacaactgtgacagactatatggctcgcaaaactgcaaatatttcctatcctttaacagaaagtttgccaacctctgctctagagtagagaaaaatgtataaaagattttaattttatgagggcaatacaactgtcacatcagaaacaagaaaacaaatgataaaggaactcatttatcaatagaggtgaaaggaaattattaaactatattgaaaaataaagatgtcaataaaaggagaaatgatatttttctaaaaaaaaaaaaaaaaaa

SEQ ID NO: 290192 - DNA, 1000 bp, Homo Sapiens
tccacaaagatttcctgtggccacttccaatcatcccagcctcttctatcagttctcctttcaaaaatggaaaataccgaactgtgggagagcagctgttaaagtctcaatcagctgacccatttttgaaccttgagatggatgctggcatctccaacatccagcgaagtcagagctggctcagcaacattggccccacccatcatgagatagacacagcttcatcccatggaccacaaatgcaagatgccttcttgtcacctttatctaataaaggtgatgaatgcagtattggttcagccacagacttgactgaaagtagctccatggtggatggcgactggacaatggtggatgaaaatttctctacactcagtttaactcagtcagagctggagcacatttccatggagttggccagtaaagggcctcataaatcccaggtccagcttcggtatttgctacacattttcatggaggcagggtgcctagactggtgcatcgttataggcctgattcttagagaatcctcaataatcaatcagattttggttattacacagtcttcagaggtagatggagagatgttacagaacataaagacagggctccatgcagtggaccgatgggcctctacagactgtcctggatataagccatttttaaacatcattaagccacaactgcagaagctcagtgagataacagaagagcaggtccagccagatgccttccaaccaataactatgggtaagactccagaacagactagcccccgggcagaggagagcaggggctcctccagccatggaagcatcccccagggtgaagttggaagcagcaatatggtcagccggaaagaggaggacacagcccaagcagaggaggaagaaccttttcaggatgggacttacgactgttctgtgtcctaacctaacagtgaggttccatcacaaaggggcagtattaattagcagcagcgtgcagctcagtacgttgt

SEQ ID NO: 290193 - DNA, 1000 bp, Homo Sapiens; identical to SEQ ID NO: 117796

SEQ ID NO: 290194 - DNA, 1000 bp, Homo Sapiens; identical to SEQ ID NO: 117798

SEQ ID NO: 290195 - DNA, 1000 bp, Homo Sapiens
tgcccggctattttcagttcttatgctgtgaccactttgccttgtagctttttctatctttccaaaatcctcactctgttcattgtttgtctcagggaaaatcttcccccaccgagcttgtaaaaaactttaataattgggtggagaataatttagaatggatatttattggaggtggtaattagggaagatgtccttttaaacagtagaattgtgttacaaaggggtgaaagagagggaatagtttctccttgttgaagggcagtgaaggtaggtttcaggtttggttttacaaacctgttaactacctcctgtccagcttgacagagactaatttttcatctttttgctgtcaatttgtttccagaaaagagacttttccctctcttgataggatctgtcttagggacagagggaccatcgtctttaagtgaattaattattgatgttttagaatggttttcatcagttgggatcagctatatggcaaataggtatcatcaatgagttaaccatctaaaaataaaagagtggaagccctaaaatgctagaataataataaaaaggccaaaaataaaattgtttctctctcaaccactttgccactcctatggtttagggattaatggaaccaaatccattaacattctaactcagcatacttttaacttattgtttggaggggcaggacttattgaggtaaattaaaagaacaaaaactgtaaaaaggaagtagttcagcatctatcgccagccaggttgtttctcagccatcaaatgataatgactaaaatttctgaggcttcaggagtaacagagatacaacagtcttggaggtaactccatttgctacaggacaggcccttgcctaaaagagaaggtatctagaaatgcctttaaaataaattcagagtaccagaaagggtatggggatcctagttcagatacaagatcattcccaagacctaatttatttctggcagatgcctgctattttctg

SEQ ID NO: 290196 - DNA, 1000 bp, Homo Sapiens
aggcctccccggaaatgcatcctgccgcccgcctcagcccccagcaggcctttccgcggactggtggctcggggctgagccgcaaggacagcctcaccaaggcccagctctacggaaccttgctcaactgagcgcctgcgtgcaggcctggccgtggttcgctccccgccagcccacgtgccccagaagggccggcctcacctctccccagcccccgctgttcccctgccccggccaacaacgaggagtctgttcctccccgcacctcctctcctccccagccctgtaggcctgaggggagggtcccccacaccacggtgtccacccggccccgccccgtggaactccacttagagcgtttttcacgcgtccttcccccatgtgagaggagcatccccccttttataaagcgaaactatttttatagagaaaaagggtctttcttaacgcacttggcctccagctccctggacggctgccttggcgttttcaacacaaagctcctttattttttgggcgagggtgcgtggggcctgccccttggaagggaagggaaggacggtgtcctgtggagaccagactctgcaagtggggagaccacccccgcaagccagtgacaagggagccctgaagttgtgtccacgaagagggagctgaaacaaattcggggctatgaagtgttttaaaaatccattcttcgcagtgtggccaccacaccgccctgagccctcccacggcccatcgtcccgggtgggccgggatgatgccccagtgcggccggtgctcatctccgcccccgggtccgccccctgacaccgtcttactctacctcagacatgaggaggccctccattcctggtttctgtagcttgcattcttgttgtctctgatgcatgccctgccagttagtactgtattttgcattcattaataaaagacaccggtggaaaaaaaaaaaaaaaaaaaaaaaaaaaaaaaaaaaaaaaaaaaaaaaaaaaaa

SEQ ID NO: 290197 - DNA, 1000 bp, Homo Sapiens; identical to SEQ ID NO: 117799

SEQ ID NO: 290198 - DNA, 1000 bp, Homo Sapiens; identical to SEQ ID NO: 117800

SEQ ID NO: 290199 - DNA, 1000 bp, Homo Sapiens
gagtcccactatctgaaatagaagggagagtttgggggtttattggaggagtcttaaaaacttggttggcagctgggtacggtgactcacacctgtactcccagcacttcaggaagctgaggtgggtggatcagctgaggtcaggagtttgggaccagcctgaccaacatggtgaaaccccgtctttattaaatacaaaaaattagccaggttggtggcgcatgcctgtggtcccagctacttgggaggctgaggcaggagaatcgcttgaacctgggaggcggaggttgcagtgagccgagattgtgccattgcactccaacctgggcaacaagagtgaaactccatctccaacaaaacaaaactttgctggcttcctgatgcctcactgtctatttgaggaattccacagaatcttcaaaggatttgggggaaagcgcattaacatggacaaaggatggaatcaaaataatgttatagtgagaatcattcaagcacctatttaaattttttccaattgccagtatagtgatgatatgacaccagcatatcaaagtaactaacaaactagctacacaaacgtcttggagtttggtttcgttctcttttctcatcatagatctccgtgcagaatagtgctaattcttatttctcgtttgcctttctatttccttccaaattctacatgccagtaattcctctgtcttttaagtgaccatcaattcaataggcaaaaatttggagtaatccagagaaaaaaccatccaaatataaaccagctaggaacatgaatgcccctgattattaatggccaaaaaaaaaagcactggtggattttaaattaaattaatacatatatacgagtttggaggagaacagaagttctaactcagtacttgaacttggtgggggagggcacaggttaaatatgagctgtgagcccccagttttggaggaaggaggaaatgggaaccaaccaccagacaagcagctgcagtct

SEQ ID NO: 290200 - DNA, 1000 bp, Homo Sapiens
ttacgtcactcctggcagtgtcataaacaatctttcaattaatactgtgcgggaagttgaccacctcagggacaggaacagtgggtcatcctcatccttgaacaccacgctgccttcaactagtgcctggtcatccattcgtgcctccaactacaacgttcccctcagcagtacagcacaaagcacttcagccagaaatagtgattccaaattgacatggtctcctggttcagttacaaacacctctctggctcatgagctgtggaaggtccctttgccacctaaaaacatcactgctccgtcccgcccacctccgggactgactggtcagaagccacccttgtctacgtgggataattctccccttcgtataggtggaggatggggaaattctgacgccagatataccccaggttccagctggggtgagagcagctcagggagaataacaaattggcttgttctaaaaaaccttacacctcagatcgatggctcaactctgcgcactctgtgcatgcagcacggcccgctgatcacattccacctgaacctccctcacggaaatgctctggtccgctacagttcaaaagaagaggtagtgaaggcacaaaagtctctgcacatgtgtgtactggggaacactactattcttgctgagtttgccagtgaagaggagatcagtcgtttctttgcacaaagccagtctctgaccccttctcccggctggcagtctctcgggtccagccagagccggctgggctccctcgactgttcccactcattctccagccggaccgatctcaatcactggaatggtgctgggctgtcgggaactaactgtggagaccttcacggcacttcactctgggggaccccgcattattccacaagcctgtggggtcccccaagcagcagcgacccccgaggaattagcagcccatctcccattaacgcttttctttctgttgaccacctgggtgggggtggagagtccatgtaa

SEQ ID NO: 290201 - DNA, 1000 bp, Homo Sapiens
cagctgtgtgctgcatggggttgggtgtctgcctggctcgcacttggtacccatggccacctccccattttctgtgccttatctcactgtttcagctgagtccaagttgtttactctgttcctctccagaggggctctctgtcccagttgggcagctcacctttgggacataagcctttgccccacaagctgtggagagggccaaaaccaagctgcttgagcccactctcttgctgagagtccaggcctgcctgcctgccagccagaggtgccccttatgcacatccagtcctaccagcctgcttccaggagcctagagtgggaaaggcacctgggggagccctggtgaagggctggacctgacccatggaggcaggaggaagacctggctttcttggtttgtccggccctggggagcagccttccctactcactttccccttgcggcaccaaatggtcactccttccagagcaaaaactggcactcatagcaagccagaacccccatccccatcctcatgggtctgtggctgggtgcaggccatcaaaatggacaccacgagacagaagtggggactgcctggccacctagcgccttcccactccttaagcaagcacaaagaagatgaggcagagaattgtcagagctgaaagttcctttggttgctcacaactcaggtatgcacccatgtggcagccaggcagcggagccctactagactgccagtctcatgcacccagacctgtggccagattgtggcctctggctgcctcaggcattttcctctttgcattgggttttcctgcattagtaactacagctgcaacagacatcctccacattgtgcacactggttttgcctttgtcctcaagagttgatacttggcattagcatgaaacttgtgggtgtgggaggatggagagagaactctaacacaaaacatcttattaaaattgtacttgagagacaaaaaaaaaactctgttgtattttgacaga

SEQ ID NO: 290202 - DNA, 1000 bp, Homo Sapiens
ctcctccctttcaatccctactcccagaagccgggattcgtggcaacccctagtttttagttccaaagcctcctgccggcagggaaccaaatccttctgtcctcccacccccaccccacttctggccagttggagtccagcccggtgcctggggcgcctttcagctccgcgctcagattttcctgttttcgttgttttcaaagacagcgacatttcgggtctggtgctaacacccccttcccagcctctgggaaaatcgagtgtgtgtgtcggggggtagggagggaatgcgttttctgtcgtctctctcctaacttaaagcgccgcaggaccgcgcgccccttggcggctgagcctgtggacttggtcgcgggccaatttcgttgtccgtgtgttgggctttccggaggtctgtgcgcccaacagcgccgctcccgcggctccacccgacccagaccctagctggaaagcgccggaggcggaggaagctgactgtggcctcccgggccgcggctctctggagggctcgcgccctagttcgcacaaagcctgctcgtgactgtgcgactgtgcgacgggatccggatggagccgagcccctccgtcctcgcgtctcggtcctcgcgtcgccccgccccacccgcccctgcttcggcgggaatcgtgtttgcccggcgtgtagtccctgacaagcgtgccctgtaggagaaaagtctgtgtcctgtgaagtgtgaccgtgtagtgtaggggggcgggcgggggggcggatgggcggggagggagggaaggggaggggcgcggcgcggcgactcggggcggggttcttttttccattttgaaagaaagcgtcggggttggggtggggggagtttcagtcctcgggatcagccctctccgcgaagcgcagcacaagcgcgggcctgggacggagtagccccccggagcccgtgcccttttctaaacgcgtctgtatgcagtcaataaaacaatcgatttgaaa

SEQ ID NO: 290203 - DNA, 1000 bp, Homo Sapiens
tgaaggcaaattttgtttcaacagtttggaagtcatctgtgggtccagcttgactttggaggaataagaagatacttctagagtatgggaatgattccagataatttctgggatttgaatctacttgagtttaagggcctgggacctaatttggtttagtatagaatttgaagaattaatttataggcagctgaatacccaaaacttgggtggtggtcctgtggtttggctgagctgtccgggcataacctggttctctgttatgttaaggctttctgggaagccagccactctgcgcaggagtgaaacatgaagttgttttctgaggacctgttttggtgggattgtttgggcagaggactgtgtttatgcagggcaaatcccagaaagataagaggaagctagagaaacttaatgtacctgaattcttcatggtgtatttgcaaactaacttaacatagattcttttgactatggtaagtttgaatctctccttgccaaacaacattataagtttagttttcttcttcctcttgcagccggtacagaaaggtgtaagtggtggctgaaaattgaggaagcttcatctgaccaatgtgggtgctggtttcttgtgaaatgtgtccctaagcctccttctccttgcaggcagccacccacccaggtgtctaagataggacatgctcctttctttctctaatcccatcctgaggttgccggcaaagccaatatgaccactactgagaaatagtaatgacttctacaaatgcaagggtcttaccctcctctttcccttaaacaccctcccttttccttagaccccgtttttgccatcccccaaatgtgtggtatggtgaaactaatcccctgaatgtgaattgctatccttattgccctattaaagaagagccagctggtatattgtcaggaagcactatttaaaatgtgaactgttatagagtaaataaataaatactctacaggaaaaaaaaaaaaaaaa

SEQ ID NO: 290204 - DNA, 1000 bp, Homo Sapiens; identical to SEQ ID NO: 117801

SEQ ID NO: 290205 - DNA, 1000 bp, Homo Sapiens; identical to SEQ ID NO: 117802

SEQ ID NO: 290206 - DNA, 1000 bp, Homo Sapiens; identical to SEQ ID NO: 223111

SEQ ID NO: 290207 - DNA, 1000 bp, Homo Sapiens
acataatccgacctcatagcagcattacattctttgccgtgataaacattccactcctgctttcctaaggatgaaacagtgataatgtgaactcaaatgaggtttcctgggtaatgtgacacctgcagaaactatagagcgtcatttatacgtagtttggcagaaaccacttacggctgatgatgcgcaaccctgctgactgtttcagttaatatgctgcacaccacacacttgtttagtgaaccaaatctagaaagtaccaaggcagaggtatgctcctgctgtaatcaggcaaatgagttcaactggatttcttttgacaatactgttggtacctattacttgggggaggacatgttgcagaagaccagatcatttttatacagaatgtgaaatactgatacagttattcttttttttaaagaacattgttttataaagaacgtgatttccagtgatctctggaagcgctaaagctaaaatttctgttcttgaaacacttcagctttgcaactaaaatattacagattaataataaattaaaccaaccaatgataaacactactcagtccaccaacaacaaacgtgtttgaattcaccttaccaatattaatcccagcgtgtgtaaaacagaacagtaactctatgtgaccccagataacattttgtaacattgtgcttccttgtagtttgtaatgtgagttcaatcagtatttatgttgaaatttctaacattaaatctagtctctatcctgttaatttaatttttaaatgctttatccatttgtgcaaaggtaaacgcagattgtatcttttttaatggtacggcataaaaagtaaccctcaagtgaagtgtctctatactgttttatagagtactttaacatgaatagataccttgtaaacttgtattgtggatgtgtaaataatatgtactttgggtttttaacaccgcatgtaaagtcaaaataaaatatacaaatcattataaaaaaaaaaa

SEQ ID NO: 290208 - DNA, 1000 bp, Homo Sapiens; identical to SEQ ID NO: 223112

SEQ ID NO: 290209 - DNA, 1000 bp, Homo Sapiens; identical to SEQ ID NO: 117803

SEQ ID NO: 290210 - DNA, 1000 bp, Homo Sapiens
tatgcaaaatctagaaagtgtggggaaactttaaacccaagaaaacgttcttagtattcatcctccaggtgtcttacttcagaatgcatcctttgagattatgtccacttaagagaaatcatcagttaagaaatctactttaacaaaacaaaaaggagaaaaagtaataatgtgatggcaatcttaatttttgggtacaacatgacaagctgtgagtttgtgtgtttgtaagagaaaaatgtgtgggtacttgctaataaacaggtgaattaatgcacatccttatctcattgctggcttctttccaagttgagcaacaacaaaatgctgtatttgagtttctgacaaatttgttttaaaaatcaaatttgaatgtactattctataaattgcctttctgaatagaacatgacatgccattttctagcagctgccagtgataatttgttttacactaacttttaaatcagtgtgtgtactgcagggaaaaggatataggaatactcatcttacaggggaatttgtgaccagaagatgtagtaacttcaatgactgaaagtcaatgctgatagtttactggcaacattaattgaagcatcaaaaataaatggcaaagagaaatcaggacaaaaaatctaattgctgtttgggaaaaaacttgattttgatgtttattctccaggtttttggttgtttttttttctttcttctttcttaatgcctgaaattttctccattggcccgaaagcagtaaaaattgttcattaatcttccgttaggccaataaaagaagggcctcacaagacaaaacaggagccagaagtaaggactgaaggagaaggggagaatagctaatagctatagtatatgtatatgttaaaaactgaatatcccatcatcctatttcatgtatagttgagttctcaaatttgtaagtttttatacatcctttcattgaataaacgtttaattaaatgagtaaaaaaaaaaaaaaaaaaaa

SEQ ID NO: 290211 - DNA, 1000 bp, Homo Sapiens
ctcggtggttgccatggcaccagggacggtgactgtggttaagcaggtcaccgaggaggagcccagctccaaccacacggtcatgatccaggagacggtccagcaagcgtccgtggagcttgccgagcagcaccacctggtggtgtcctccgacgacgtggagggcattgagacggtgactgtctacacgcagggcggggaggcctcggagttcatcgtctacgtgcaggaggccatgcagcctgtggaggagcaggctgtggagcagccggcccaggaactctagaggacatgtggcatcggatggccacagggcggggctgccaggctctgcaggcacccagggtggggaggccacccttcctgccctacccgcagaatggtgctctcctttgccctccctgcccagcagcctgataggactctcctagtccaacttggggtgggcaaggcagtcagcatcaccagcaataccacaggaccctcaccccagcatagacacacaccccctgacccttaccatctgcttcctgaaagacttcagtgtcagctcccctacacacaccccacaccttcaccccttgcttcaagattcaaacagagactcccagtccccctcagcatcttccctgaatcacagccccagctccttgacccccatctaggtgccaaatgttcatctgcaaccgctatgcagtctggtgagagggagacagccatcacatagaaagtgaccgtacgggtttttaatcactgctgggtggggtgggggtagggggattgtcctggctttgtcgacaaagtcccacttccccgagtattaagggcccttggtatcaagtgaggtaaattcacccatcacagggtctcgccctaccatcctggaattatttcacttttaagataaatgcactatttcactgttcgcctcccattctaaggaggtgaggtggttggaataaaaacagttcctgtctgaaaaaaaaaaaaaaaaaaaaaa

SEQ ID NO: 290212 - DNA, 1000 bp, Homo Sapiens
gttacctactgatgttgaaagagttagtagatcaaacagaatagtaggaaacaagaaaacattaaacttatacaggaaaaatgtctggccatatgttagttagttcgggaatggttattggtaatttgttttgtattatagcatacaataactagagttaccaaaggcttgttttttcttgagcagttgaaaggagagaccaatatttgtgacatggatagtttcatgaccacaactcattcaatcattttatagtctatggcaatatccaagagattgccaagagtagaagacagaatatttcatctgacagtatctgattggtttactgtttttctaatcatatgtggtcataacgggaagcagaattatgctttattcaaacaaacctgcttctgcctcattttcctaagctatgagaacaattagagaaacagattcatgcttgtatcttgcattcagaaaacaaactgtcctactaatcaaagctgcatatctcatcagagataatggttgaattttattgcaaccatattggcaatctgaaactggcaaacacaaaggattgttttcactaggcttaccattttgctttgcttttttaacacactgagccaaagatgcagtgtaattattgggcttttgccttatgttgagttcagtgtaagcatggaagctagtgattctgaatgatatatatatccattgcatgttgaactcctttagaattttgttcttaaacaaacttagaatttcaaaagaaaacatatgatccattaagttggagtgtttatgattattgctagaaagaaggcagacttcatattctcatcgcccatttttcaaacttgttacattgatctgtacattattttaagccacatgtttgtaattgtttaaaacaaagtggaaacattacacaatgtccttaataaataggcccatgtaaattttaattacaattaataaatgatcaaaaaatttgcatttaaaaaaaaaa

SEQ ID NO: 290213 - DNA, 1000 bp, Homo Sapiens; identical to SEQ ID NO: 223114

SEQ ID NO: 290214 - DNA, 1000 bp, Homo Sapiens
ttttaaatatttgacctcattagttgttaattttttagttggataaaaaaaaaactcgctgacataatctccctagtgaaaacttgggtaatatatgtaagaaatggcaaataaataccttagttaatgactttttatgtagaaatttgacagcattacaaattaagtgaccattaaaaacacagcaatcattcatactgctttcataggtgttatgatagtctctgattaatcaatctagtatgaattattttacaagtgttgtcctgtttcatatctttgaagtagtagtgaaattgtaggccattttcttataacatttcagttacttttcagttaattattcctttaaaaagaaaatacagcagaacctcactgtagcattctttactgcagagcaaaattcaatttaagatgggcttctctgaggtccacatcatggcagttcatttactcttgtgccaaatggcaacaccacgtctaaagcagtttcacagcatggtcccctacaatgttataccaaggctctgatgtatttcttttagtagtttctaagtgtaaaatttattctaaatgtttttatggctattatctatttcatcagttattgaattaagaatgattttcattacttgagtgggatttgtgatttaatgacagttgaataatcaaaaatattttattaggcccccaaaatttaatagatatctatttctgttacattttattactgtatggcacaagaaagaagtgacattgggtatgttagaaatgaaataaggagtaaaaatgcattaccatttgtttaataattatctttacagaatgctagtttaatgacttttttaactgaattttttgaataaatcagaaatgtttgtattggtcacagatctatcataattgcttttctgatgcatttaaaaataaatggaacacttaaatgtatattaccgatgcaaactgtggataaagttgaaagaaaaaaaaaaaaaaaaaa

SEQ ID NO: 290215 - DNA, 1000 bp, Homo Sapiens
gatccctgaaatgatcgactatgaggggactcaaaaactgctagctctcgacccctcccccctcaatgtggtccttctgcaggagatccagagatacaacacactgatgcagaccatcctgttctcactgacagacctagagaaaggcatccagggtctcatcgtcatgtctacaagcctggaagagattttcaattgcatctttgatgcccatgttcctccgctctggggaaaggcatacccctcacaaaagccattggctgcctggacccgggacttggccatgcgtgtggagcagtttgagctgtgggccagccgggcccggcctcctgtgatcttctggttgtctggtttcacctttcccactggcttcctcactgctgtgctgcagtcttcagctcgccaaaacaacgtttcagtggacagcctctcctgggagtttatcgtttccactgtggatgacagcaacctagtgtatccccccaaggatggtgtctgggtccggggcctgtacctggaaggtgctggctgggaccggaagaactcctgcttggtggaggcagagcccatgcagcttgtctgcctcatgcccacgatccacttccggcctgcagagagccgcaagaagagcgccaagggcatgtactcctgcccctgctattactatcccaaccgggcaggcagctcagaccgagcctcctttgtcatcggcattgacctgcggtctggggccatgacacctgatcattggatcaagaggggcactgctctactcatgagcctggacagctgagacctcctcctcttctccgcttgagagagagggtcagggactccaggagctaagacagatgttgcacctaggactgaggccggacctcactcagactttgaccttggccgaatttgtgtgatgtggccctggagatacctagttgtgttagccataaaagtgaaagagttgtattggagctcagtgctgtaaaacacccgcgacaac

SEQ ID NO: 290216 - DNA, 1000 bp, Homo Sapiens
tattgcccaattaatagagaaagaagaacagagaaaagaagtacagaatcagctagtagacagagaacataagctagcaaatttgcatcaaaaaacaaaagtacaagaagaaaagattaaaaccttacaaaaggaaagggaagataaggaagaaaccattgatatccttagaaaagaattaagcagaacagaacagataagaaaagagttgagcattaaggcttcctccctagaggttcaaaaggcacaattagaaggtcgtttggaagagaaagagtccttggtgaaacttcagcaagaggaattgaacaaacactcccacatgatagcaatgatccacagtttaagtggtggaaaaataaatccagaaactgtgaatctcagtatatagacattatggcattttggaatttgtaatctcatgatatttttgatgtatttatctattggagggggggtgggtaggggagttaatttgtgacttcgtaacaataagaagttattatctaatttagtaaagaccctgatctgttgcatgttttttatttgatagtttgaatagaaatttaattttctaagttttactttttgtttctggcttttatggcttaaggttttctttggttcttacattagaaaatcatttttaacctccattatcatttttctaaggttctttcctttttcttagttgctttctattctgttttgcctgtcttatttattctcatttgtgattatttagatcttaagaccaaactttcttggtataacagtcctaaagattacaaaataaaaatatagagagagtaaaagtaaaaagtaaagtaaaaagagagaaggtatgattttactgctagagaagtttgtctctgaagaagcacaaaagaaaatattagtgaatttaaaataatttttatactgctgtagcataatttctaaatttgaaaaaaatgcaatggtaataaaatgtataaaaattaaaaaaaaaaaaaaaaaa

SEQ ID NO: 290217 - DNA, 1000 bp, Homo Sapiens; identical to SEQ ID NO: 117805

SEQ ID NO: 290218 - DNA, 1000 bp, Homo Sapiens
ccactgccatcactgccaagtaactagatgtctctgtttccctgccaatgatcctgcaggttctgcccggtctggttatcttcctgttcctgtagcatagccaggcactgccagtcacctgtgcccccattgctgtcagcagatgtcttgggtcctgagtgtgggtatccacttttacccgctcactgccacctgtggacactctgtgtctaccctctgagtgggaacatacttctaagttccctgcagtctctgtcctgtggtagaccatctttttgtaaactgcgagcttcctcttccctgtaccctctgccccagtcgtgaccccctaaaagttaaggggtagttggcacctccttattaatatgccagcctagatcccccccggtggaggggcaaatggctgaatccttgtgtgatatttttttcttcgcttgtttatttattcatttatttaattgtatttattcatttactaactttatgtgttaccaattaattttgtttacccattcctttatccatccctcccctccttttcaggtaaggagacaggaggagtaggaggaggcagggcctctccatgccagcctctgtggtccttgcccaaacccatcagcgcaatacttgaaccttctcccaggtaggggcaggaggagccacatgagagagggagaaggaccgcgtttacctttagagttttgttttgttttttccttctgagtttgctgttggtgcaggaataagggaaaggcccaaggtatccaagcctggggaagggcaggccagccagcacctctgccttctcagggacaagagtagtcctttaccaccctcactctgcctgtcccctctcctactctacagcattaaagactgtgggaccaggaccctaagtctcctttccttctgggtggggagttctggggttcttggtgtgtgggagaagttttataattgcttccaaacagctgggtttaaatataaaatagacacactc

SEQ ID NO: 290219 - DNA, 1000 bp, Homo Sapiens; identical to SEQ ID NO: 117806

SEQ ID NO: 290220 - DNA, 1000 bp, Homo Sapiens; identical to SEQ ID NO: 117807

SEQ ID NO: 290221 - DNA, 1000 bp, Homo Sapiens; identical to SEQ ID NO: 117808

SEQ ID NO: 290222 - DNA, 1000 bp, Homo Sapiens
cacctccaggtgttaggaagctggatgcccaggaacatacagaagagaccctcaatcagtctacagaattaagacttcaaaaggctgacctgaatcaccttggggcactgggttctgacaacccaggaaacaaaaacattttagatgcagagaacacaagaggtgaagccaaggaactaacaagaaacgtgaagatgggggatcctctccaggcctacagactcatcagtgttgtcagccatatcgggagctccccaaattcaggccattacatcagcgatgtgtatgactttcagaagcaggcctggttcacatacaacgatctatgtgtatcagaaatctcagagaccaaaatgcaggaggcgaggcttcactctgggtatatcttcttttacatgcacaatgggatttttgaggagctgttaagaaaagcagagaactctcggctacctagcacacaggcaggggtgatccctcagggggaatacgaaggtgactctttgtacagacctgcttgacagactcactcggcctcacttcatccttgcaaagagaatcctgtacttcatccttgcaaagagaatcctgtacttcactcagaatgaaggaacaagtatctcaggatgaaatctcaatgaaaaacacttattttgggggaatatctattttaactgcttcagacacctagatcccagaactcaggcgcatatgcatattttccctgcaagattagaatggtgctcttcacgttttgacggtggttttcaaaatgttgttcttcaaccagcaacagcaacagctagggactgattagaaatgcaaattcttgggtcactctctagaccaactgatgcagaaacaggaggtgtgagccagcaatcagatggagattctagtgctcatgaaagtttgaagaacactggtaatgtgtggagtatcttggtgtattttgctactgttgatatggattgcttatgttatataaacgattttcattaaa

SEQ ID NO: 290223 - DNA, 1000 bp, Homo Sapiens; identical to SEQ ID NO: 223120

SEQ ID NO: 290224 - DNA, 1000 bp, Homo Sapiens
cacagctgtgttcctgcggagtcccctttacaaagccgctgacccctgatgtgaaactttgtagagcagcagagtggctgcgtgaaacgggaggctggcaggtcctcagataggttctgcagtgttacctgtcacttggaggcagccaacacttctggacattgcatccttattcacacatgtggcagctgaacgaggtgctgttgtgggtgtctcagctctgagggtctttgtgagctcccactgttgtgggtgtctcagctctgagggtctttgtgagctcccactgttgtgggtgtctcagctctgagggtctttgtgagttcccaccaacttttaattattcatgcccttgaccatgtggttgcttggagacctggggtcttctgcagactgaagaagacacatttctagattatttgtcctttttatcctctcaaaaatttaaacactgtacctcttcagtggtcagaagaaagttggaaacttttcctacatattaggcgttagtatgaggacatttgtttgaattatagaaatttgccctgagctgaactgggttgtgttaacacattggtagagctatgattccttcccagttctaagagatacgatctgtaagtccctatgtcaccacattgcttgagatgatcattcagttacttgtcaggatttctcctcttcagagagatttttttttatagcacagattcctttgccccttttatctccttatctggatatgataagtggttatgagggtctcactaactattttgtgtttaccttttatatgtgtaaaactttgcagtagcatttaaagtgtaatttatttttctatcaagtgcactattcatttagtgtgttccagttttatatgacttgtattagaaacactgcactgagttgtttgtacactgaaatgagaactctagatgtaactctattcaaataaaccttcgtgagacattcaaaaaaaaaaaaaaaaaaaaaaaaaaaa

SEQ ID NO: 290225 - DNA, 1000 bp, Homo Sapiens; identical to SEQ ID NO: 117809

SEQ ID NO: 290226 - DNA, 1000 bp, Homo Sapiens; identical to SEQ ID NO: 117810

SEQ ID NO: 290227 - DNA, 1000 bp, Homo Sapiens
ggatggggaaaagcatttcccatggcactccatgtaatatgagtgctctgtgagatgttcatcagtgttttatagaaatggtgttgctgggaaaccaagtttgcacctggaaacttacaatgcactttagcgcagtaagggcttggcatccggtagtgaaaaactgtctaacccagcattgcccaaactattttgacaccaggacctttttctcctttgggatacttatgaacctctcactaatgtcctgtggagaacattttgggaaacactatgttagatagttctttaaggagacaaaacggtaatgaacagatagcactggggcagaatatgcatgcattttgtaacgtccagtgtggcgttgaatagatgtgtatttcctcccctgcagaaaataagcacagaaaattataatgtaggtgatcggagctctttcctttgatagagagaacagccccaatgatcctggctttttcactgaacgtatcagaatacatggatgaattggggtaaataaggttttaattcagatctagaagaaagtattgtacgtttgaatgcagatttttatccacagatagttgtagtgtttagacatgacaggacctatcgttgaggtttctaagacttactatgggctgtaaacctgttttttaaaactattttagaaacctgagacttgccgtctggcattttagtttaatacaaactaatgattgcatttgaaagagattcttgaccttatttctaaacgtctagagctctgaaatgtcttgatggaaggtattaaactatttgcctgttgtacaaagaaatgttaagactcgtgaaaagaattactataaggtactgtgaaataactgcgattttgtgagcaaaacatacttggaaatgctgattgatttttatgcttgttagtgtattgcaagaaacacagaaaatgtagttttgttttaataaaccaaaaattgaacatacaaaaaaaaaaaaaaaaaaa

SEQ ID NO: 290228 - DNA, 1000 bp, Homo Sapiens; identical to SEQ ID NO: 223123

SEQ ID NO: 290229 - DNA, 1000 bp, Homo Sapiens
ctttttagaagcctgcacttaagcttagatttgtgaagggagagtagaaggggagaagtagaaccacagtgttttatttatttttctaaaactcttactaaatccagattttttaaactgttttaaatgtgaattcttcccagaaatttcaatgcattgcatatttagccttcggcatatttttcatgaatagatcatgaagtcataggcttccaaggcataggaagagatcttgcaggtctagtattttaataatgcactattacccagggcagatattatgagaaactgtttcttctctaagggtttatggcagactttgcttttttaacatgtgagaaatgaattttttattttgtgatttatgtgatttcttttgctgagtgaaggaaaggagaaattgttgctattgtcagcatcttaaaggtatttccagtcaaggcaaggctaagtgctttgtgatagtattaagcaagtcatgttttgaatggattacctgtagtgactcattggaatgatataattatacaagtaatgccaaaaaccaagtcaaagcctaattaaccaaagcactcatttaaaaatcatcatgtttggacctatctggacctctcagcactgtaaaatagttttggttttgtggcatatgaatagctgtttaacaaatcaaagttagctttttgcttctcagcttttttgggcaatacaagttaagttcttaatggggagacattatcatggcatgacttaagggaacattggtttgtgaaggaaaaacagattatctaaagccatctctatgtttctgttcagataaagattaatgagttctgtgtttatatcagctttgtatatttcatcttagccattctatcctagaaagattttaatgtgagcttaagatgtaaataaataattttgcaaacatgccttttgttttctatataccctgaccttttaataaagtttcagtgtatttatcaaaaaaaaaaaaaaaaaa

SEQ ID NO: 290230 - DNA, 1000 bp, Homo Sapiens
ccgtcatcacagcagtaggatgaagccttgttttgggtgagacagagggaaagggaaaaaacagaattgtaacagttccttgattctgcagatactgctgctgttttacgatttcagtaataattcaaagcagctgtctccttgtttctcacatgcatactacattggttttgagcatctgagaggcattggtttgtcttgcattcttttgcaaggcatatattgcagctgatatgaatctcgtttggggggaatccttgtattcctaacaagggggattaaagctacacctcaatccattcttctgaagtgaaatttacttgacacagtaggtttcgagacttacatatgaaacactggctttacagggttctcagagatgtggggtatacactgtcctgcagtgagatagtagaccctagaaggatactatttaagttgtccttagctctttttaattacaatttttagttgttagaatttctttttagtatctatagtatcttagatgattttagatcttaaatgagtttggcagcctctttagaatctgagagagatcactgtcaagttgcactttactgggttttatccagttttaggaggaggggaggcaatgtcaaaatgtacacctttggtttttaagaaggttaactataataatgttaaaggctagtcacagggttacctaatgctcagtctgtgaaacctaaatagaattcttaaaatgttatttaccaactaagtattcatgttcaaattacttaccttccactctgaagactttaaggtcatttctaatacacatttacctaattaggagttctgtctactagtaaacattccaaattgctacccaacattactgttaacagattttcctccgtattcttctaaaaattataccccatgggcttgccaggtaatgacgaaaacttaatgggtgtacttttttttttttttgcacagtctactttgtgacattaagtacctcttttcc

SEQ ID NO: 290231 - DNA, 1000 bp, Homo Sapiens
tacgccaaccatttaaaaatgcacaaactctttatgtgtctactctgcggcaagactttcactcagaaaggcaaccttcatcgacacatgcgtgtgcatgccggaattaaacctttccagtgtaaaatctgtgggaaaaccttttctcagaagtgttccttacaggatcatcttaaccttcacagtggagataagccccataaatgtaactattgtgatatggtttttgcacataaaccagttttgaggaaacaccttaaacagctgcatggcaaaaacagctttgataatgccaatgagagaaatgtacaagacctcacagtggattttgattcttttgcatgtacaacagtcacagactctaaagggtgtcagccacaacccgatgcaacacaggtcctggatgcaggtaaactggcccaagctgtcctgaacttaagaaatgatagtacttgtgtgaattgagtaggggcttcatgctcacaactcgaactgactgacaatgtggcaatagtcttagtctttttaggagtgattttgctagtttgacttctccaaagcctctgtgtaggtggtagggagtgagtcaaagcactaatagaccaggcaacttaccacttggagtggatttgccttacttttgccctctcccattttctgttttgagttatttatcttgtaaagtctgttttcctttcccaaggaataattccttttgtctacctaacattgacttatgtcttagactgacactgttttaggcttttcactaggcacattccgaaggtaccaacaagttaataacatcacctactctccactaatagatgctatgctaagagaagtgaataatctttctttggtagaaaataggctgagatataaggtgatattgctattgacctgaaaatgtgatagaacttctggttgcctattgattattcctccatgtctgataaatgaatctgcttcctaaaaaaaaaaaaaaaaaaaaaaaaaa

SEQ ID NO: 290232 - DNA, 1000 bp, Homo Sapiens
atctcagaatttctaagtaaaggattatttttctactatttattgaactttcaaacattctcaaactttggggaaaaggaaaggaaacacaggagaagttttcagcagttgccccgagctgttttgtgtgtaatgaagtggttctttgattaaggagctctatttcttatttaactgatatcccactgccccactccacaaaataggaaaatgaagaaatctttctctctgacttgtttacatcatttcacggaaacacatctttgtttgtaatgcagtattctttctctgtgtttgacagagatggggaggggcagaggaatttaagaggttttaaaagaaatgttatgtttcttatgacttgtttccactcctcgtacaatgctattcttaggtttctacgaaacctaatgttagaaccgcatcctttcagctaagggagggttggatttattttccttgttttagagactacaaatttttaaatatcccattttgactgagaatattgacatataagggaagaagttttctaaattgtgaaagtctggttcttaattaaagaattttttttttaatatcacggttaaaagctgctgccagttagccaagacattatccaccaaattgctttgtgatttatacagggattaatcaaatctggctactataacatggggcattgtaactttaaagtagtgttttaattacagtgatgtattttagactcacattttgtgattcaaatatgttataaaggcattcttgcaccatggtaaagaatgtgtgtggtaaatctccgtttatatgtagttggaaaaaattcactgaataatgttttaatgatagggtattatgatacaatgtaaaaaacaattggttcttcagcagtacagaaagtaaactatatatgtgctatcaggaaaccccttcatactgtgtataaaattgcaatctagtgaaataaactgtatgcaatggaaaaaaaaaaaaaaaaaca

SEQ ID NO: 290233 - DNA, 1000 bp, Homo Sapiens
gtactggaaagtatgaatctcaaattgaagatttgatcaagtcagataagtttaaagatattccatttaataaaaacaataaatttaatgctcttcctaggagtatattactagacaatataattcagcacatgaacctacgccttttatctgacagaaaccatgaagatatttttaattactttgatttgctggaaccttccacatggccttatgaagaaataacttcaccatggatagctggtgaaaaaacattatttcatttgtgtaaaattttaaaatatgaagttgatttgaatgattttcgggaatttgtaaataataatataaaatcaaacaatgtttcaattcctacaactatatacaaagctaaaaagatagttagcaccattgcaatcaatagtgctgaagctgaaaggggtttcaatttaatgaacataatttgtacaagggtgagaaatagtttaacaatagatcatgtatcagatttaatgacaataaatttactggggaaagaattagcagattgggatgcaacaccgtttgtaaaatcttggtcaaattgcaaccacaggttggctacagatacaagagttcggcaaaagtcaacaaaagtcttccatgagaatcaattggctatatggaacttaaaatagaatattgtatacgttttttgtcatctgtaaattatgtactacacatcctttatatacataaaggtcttttttttttggaaagccagttaaacttttatcagcatgttgctgtttaaaaggcgttctttaagaagataatcttgaagattggttttagaagctatagttttttagagattggcccatgtttgctagagtgggtcataatacatattccatgaagttctgtacagaacaaacaccgtttataattttgtactgttttactttaagtaaggatgcaaaaaatagcaggactcagctaagttctaagccctggaggttatattaaaaaaaaaaaaaaa

SEQ ID NO: 290234 - DNA, 1000 bp, Homo Sapiens; identical to SEQ ID NO: 223125

SEQ ID NO: 290235 - DNA, 1000 bp, Homo Sapiens; identical to SEQ ID NO: 223126

SEQ ID NO: 290236 - DNA, 1000 bp, Homo Sapiens; identical to SEQ ID NO: 223127

SEQ ID NO: 290237 - DNA, 1000 bp, Homo Sapiens
ctcatcagaaggctgaggagatctatagatatattcactatgtatttgacatacaaatgttaccaaatgatcttaaccaagatagactgaaatctgatatataatcaagctgctcaagatggggttttcaaagacctctcacaatattaaatgcacttcaataatcattgctgttttatgtttatttgtaaataagagaatattttatttaaatattttatattgtatacatttttatttatagattatagaaattattaaaaaagaaaaatctgatgttcagtgatcattttgactagattataaaactaatttttcttattaaataaaacaaggtttattaaaagtgttactaaggatagtttaagaaagtaaaagctaagctagagatatactttggaatgtttcccaaaattaaagttgtactgttgtgataaatagtaaagttgacatgtctatgactacagccaacttgtcgattttccctatgtgtagatagtatacttttaagtgtactgattctaaatacatgtacttggtaaggtgtgggtgatgggtgggttgtgagataaatgacccagtaactaggaaagtagaaaacttaactgaatgtttatctgaccaaaggtgtgtcccagttaagtactgtcaaatctattaatatgaactctgatatggtttggctgtgtccccaaccaaaatctcatcttgacttgtaatctgaattataatcccaatatattggggagggacctcctggaacgtgattagctcatgggggcggttcccccatgctgttctagtgatagttctcagaggatctgatggttttataagcttttcctctgttcactctgcagttctcttgcctactgccatgtggaaaaggaaacgtttgcttcccctccaccatgattgtaagttcccgaggcctccccagccatgcaggactgtgagtcaattaaacatcttttccttataaaaaaaaaaaaaaaaaaaa

SEQ ID NO: 290238 - DNA, 1000 bp, Homo Sapiens
gctgcttctgaaaatataatttttctaagttgttgtaatgactttaatttgtaatcagctaaggcttaagatttcatttgtttctaagtttctgtttttcatcccttcttttttcttttatatttagttcagacctagagccagtagaagctctcacagtgagttcaatttgttagtgaaacattgtactgcatcaccagtttttcttaccttctgttgacagctgaatatttctgttactcagtacttgcaaaaacagtaactaaaatgcactatgctgagtggaaagcaccgtcataacaattgattgccatagcaagttccaaagtgaatttcagccttgcttcacatttgtatcaataaatatgcacattttttaaaactttctaacaatatagtctttggatttgtttttagttatgagccgcattctttacttgatagaactcagatttgtcttagcctattgccatatagtactcaccttataactatgtaactttctcgtaatgtatctgtttgtgcaatatggaagctgtgagtggattcatagctttttggtttaattgtacattattgtgtgtgtatatatgtatatatgtatatatataaggaccaaaattcttagctcgcttacactgttgctagtgtaaacattgttacacttaattttacagggcacaaattatggaattacttcataaattcatggtaatgttttcataaattattgcattaacatacaattgccatttaattatgaagtccatcagtattgacagaagacgttacagtgaagtgctaaaaccacactatatggtaattatattttgggttatgtagtaaatcaaatatgcatgtcattgtgacactttatgtgttaaaacatggtagataatcacattttctgggccctgtaaaatagtgttactgtaatactctgttttgcctcctgccttgtttacattaaacaggatatttggtaaaaaaaaaaaaaaaa

SEQ ID NO: 290239 - DNA, 1000 bp, Homo Sapiens
ctccccatcctcttcctcttcagcgtcctcctcttcagagtctgactcatccgactctgattctgacagcagtgatagcagttcagagtcttccagtgaagagagcgactcttcatccatcagtagtcatagctctgcctcagctaatgatgtaagaaagaagggacatgggaagaccagaagtaaagaggtagataaattgatcagaaaccagcaaacaaatgataggaaacaaaaagaaagaagacaagaacacgggcaccaggaaacaaggactgagagagaaagaaggtcagaaaaacacagagatcaaaattcaagtggttcaaattggagagatcctataacaaagtacacatcagacaaagatgttccttctgaacgaaataactacagtagagttgcgaatgacagagaccaagaaatgcatatagatttggaaaataagcatggtgatcccaaaaagaagagaggagagagaagaaattctttttctgaaaatgagaagcatacacaccgaattaaagacagtgaaaatttcagaagaaaagatagatcaaagtcaaaggaaatgaatagaaagcactcaggctcaagaagtgatgaagatagatatcaaaatggtgccgagagacgatgggaaaaatctagcagatactctgaacaatccagagaatcaaagaaaaatcaggaccggcgaagagaaaagtctccagcaaaacaaaaataattctacaaaatgacataaactggacatgccttatattcagttgaaacaaattattttttactttgacgaactttatagagaattcttgtataaagtattggtttgtatttgtaaatttaaaaaatgttttcattttaacatgttttataattgatacatctcaaggccctacccataaaattatttgaaaactttcaccagaaagggatgtaagtctcgcttatattttgtgaataaaatgatcaaaagctcaaaaaaaaaaaaaaaaaa

SEQ ID NO: 290240 - DNA, 1000 bp, Homo Sapiens; identical to SEQ ID NO: 117812

SEQ ID NO: 290241 - DNA, 1000 bp, Homo Sapiens
tttaaatacattctcaggcatgtttgcaaaaatatggcacatgtatacattttaggaaatgttacttttgttaatctttaaaaaatacacctaatgaaagacattccactattatgcgtaatgctcagctttttgtaaagaaatatttaattgtattttgtgtttatacaggtatttcacacaataatttgttcttaatgcagccactataacttgataagtcattgcactatttaaaaagttttagtaatatcatgaatttaatttgcttaagatttagtacatttcagaacttttgaacttttgacaaattgcattgggaaaagaagtctgttaatagtgatttagtctccccgcctcattcccacccccaacaaagcactatcattttcatttggaatgggtatttttctgtttcatgatgtattttcaaatagagttcaggatctgcaattcagttcaacacaagtttgttgagctttaaaatgtatttgaagtaatatttaaataggcatttaaaatttcaaattagatgttaaatttatgcatagtaattttgcactgtaaaataattcccttctcccattccttgtctgccattctgaatatgcttattaaaatatttttttaaacatatttgcctacataatactgtgtgaatattttcattagattaattcactaagattttattagagattgtttgaatgatgcatgttattgacaaggcaaatatatatatatacacagtctgtttcttctattcctagacatattgcactactttttcagtggttcttggtcccctttaccacatcttgggtgatgtatttttgtcttcttcccctttgccacaagagatcctttcagtccctagacctccattcactctgtttctcttctgctggattatataatttaaaaataatgtgttcccgtattttgtagtggagttcatatcacattatgttttgcaaaataaaacttgttttgtcacaat

SEQ ID NO: 290242 - DNA, 1000 bp, Homo Sapiens; identical to SEQ ID NO: 117813

SEQ ID NO: 290243 - DNA, 1000 bp, Homo Sapiens; identical to SEQ ID NO: 117814

SEQ ID NO: 290244 - DNA, 1000 bp, Homo Sapiens
ttacttctcagtttcctagaacttcaagtattaaaataacctgttgcatgtattaggcatatttcctatgttacatttcttttgtctattttcctttcaaaattggtatttttgttgggctcaattttcattataatacttttcttaaagtttctttctttcttttcttttctttctttttttttttttcctttttgagacagggtcttactcttgtcacccaggctggagtgcagtggcacaatcttggctcactgcaacctctgcctcctgggctcaacggatccttccacctcagcctcccaagtagcttggactataggtgcatgccaccatgcctggctaatcttttgcagcgatgagattttgccaagttgcccaggctgatcttgaactcctgggctcaagccatcctccctcctcagcctcccaaaattctgggattacaggcataagccaatgtgcccatccaaagttttatttatttatttttttgagatggagtctcgtaaagttacctttaaaaaaaaagttctattttccctgtattggtatctccttaaataaaataaaatattcctattgtaagtgatatgagaaatctttaaccagccttatctaaaaataaaaagagaagccattgtaagacattcagtatgtgtaaatgtgtttgtgtttgtagacaaaaggcaaaggtattatgtaaaaatatttaataatttattctttctattactgaattaaaaaatcagaggtccctgttatatttttaatggctaacaactcaatctcattaagttggaaaaaaaacttatcaaagagacatttacatggtttggcttttatattcatcatagtatacattggcggtatctagccctttctctgtaaaatatccctatgtttaatctgtatttcttgcttattatatgtaaagttgagcttctttctagatattaggcctttgaataaaattctatgtgagtcagaaaaaaaaaaa

SEQ ID NO: 290245 - DNA, 1000 bp, Homo Sapiens
ggcactgtccaaggaaactgttaacttattcatagtcctattggacagcaggagcagctcctacagtgaactattggcaccaccgacagtgacaccagggcacatggctggagcacagtgccgcggaaacctgattttgtactctcttttatggaaacgatctgtggctgtttagaggcagctggatcctctttcaggcgggaatgggagggcgggcacagggaggaggagaggaagagaaaaggaagaattcatttttaatttaggtttctttttttcttcttcatttcggagctctaaggtgtatgcagttgtgaccccatgtgtggggaagtgtagcaaggacggctggtggagggggaaggagggtgcgaggtgtctgtctgatgctttaggaaatgtctactgaggaccctgggacttaagaagaagggcggggagagtgccattgcctgtttgggagacaaaaatgaacgaaaacaggtgactttggaaagcaaagtcaaaacccagtttaggatgtagcacctgccccaggattcctgccctcggctttgccccagacccttattccagatgctgagagtgaccaggacagcagctcctgaggcccagtggtcttctttccaacaggaaaagaaggctgtgatgtcgctgtcaggatcatgccctgtggcacagcacaggtggtgggaggtggttttctgactgagatgttgcctgatggatggaaagaaatgtatttttaagttcaaaaagcattatcctgtggcgttgcctggacatccactccctgacagcccagagcagcactgtctggcttcccttcatgcttgtggctttgttgtgtttgatcagaattttgggggaaatggaaagttttcctcaaggagcagctgggggcagaataggtagtatttaagcaaatacttaagtccaagcaaatcatccccattaaaaagcttttcctgtaggctagtaggaaaaaaaaaaaaaaaaa

SEQ ID NO: 290246 - DNA, 1000 bp, Homo Sapiens; identical to SEQ ID NO: 223133

SEQ ID NO: 290247 - DNA, 1000 bp, Homo Sapiens
cctaaaagtgtctgcgggcctttctattcctactgacagccagaagcatcttgatgcagttccaaaatgccaagcttttactcatcagatggttcaattcctcagcaccctggaacaaaatggaaaaatcaccttagcagtcctagaacaggagatgtctaagctcttagacgatatcattgtctttaacccgcccgacatggacagccagacccgccacatggccctcagcagcctctttatggaagtcctgatgatgatgaacaacgcgactattccaacagcagagttccttcggggcagtatccggacctcgattggccaaaaaatgcatgggctggtggtgctgccccttttaacagcagcctgccagagcctggcgtccgtccgccacatggctgagactacagaagcctgcatcactgcctacttcaaagaaagccctctcaatcagaattcaggatggggacccattctggtatcccttcaggttcccgagctcaccatggaagagttcctgcaggagtgcctcaccttgggcagttacttgactctttacgtctacttgcttcagtgtttaaacagcgaacagactttaaggaatgaaatgaaagtgctgctcatcttaagcaagtggctggaacaggtgtacccaagctccgtggaggaagaggcaaagctgtttttgtggtggcaccaagtccttcagctctccctcattcagacagagcagaatgactccgtcctgacagaatctgtcattcgaattctgctcttggttcagagcaggcagaacctcgtggctgaggagagactcagctctgggatcctgggggcaattgggtttggccggaagtcgcctttgtctaacaggtaaggaagcgcctttctaacactgttgttctaaataggcctcagacatctgtacctacttacaggttgtgatatacttcagtaggtttttcgacttaggatctaggttctccagaaagattaatgg

SEQ ID NO: 290248 - DNA, 1000 bp, Homo Sapiens; identical to SEQ ID NO: 223134

SEQ ID NO: 290249 - DNA, 1000 bp, Homo Sapiens
ggcccagctagccaagtttggaatggcatttgtcatgtcagtagccaccacctttgttcattgtgaacctaccaaggctttccagcttcatacacattgaccagagctcaagctcctgcctgcaactcctgcctagagttgaagaaaagcaaactggccttggcaggcacagtgtcatcataccctcaccccatatgtttggggtctgcttgaggattcataaatcagccactctggattgttgaggaatggccatggcagccacagaaaaaagaatttttctctctgagccaaggttgttttttgtttttttctcttttcttttttgttttcatttcattggaagatctccaatggactgaacagctccagtcagcagcagttaccacaaactgtgaatctgggccccaccactcttccctgttaaccagttctgtcagcatccccctctccagcagcacttccatgaagttggttctgagactctggccgtgaacacccgtttcttcagtgatttgttttgggcttttggctcaaaaccccaggctcttgtttttgtctagactcttattctgtttcctgagcagcaggaggtagggaccactttgatgtcagacttctggtagctggacatgttctcgagatgggtggctgttcgcgacttttgtaccagagtgaaattgttagaaggagggtttctggctgtggttctaaatggagccccaggaagctgccctctccccagggtttgtgctcagtagagccctgtggatcacagtcttgaggtcctctagcaggggtgagggagagcagcgacttcagctgagtccctgccagtggttaagcaaacaatggtttcaaaattcaaggtccccaaatggcagcattttatgttctgacctgtttgtgttatatagtggttttttttttcctctttggaactcttgtgttgttaataaaatgaaatgattactttttaattaaaatgaaaaaagtaaaa

SEQ ID NO: 290250 - DNA, 1000 bp, Homo Sapiens
cactccccactgctcatgacagggaacccctggattggcccccacagcacgaattctccatcctgattgctgattgcagtaaacagttgctgtattctccaggggtggtggaactctgaggagacaaacaaaagacccttggctacaaccactactaatgtcccttcctcttctgcctcaaagttaggaaagaaatataaacactgagattgccccagagctgcagtgggcagcctaggagtgccaagccatgacctacagccagcactcaagggggagagaagcacattttcagatcattgagagggaacatggctgcaactgtaaggaaacataggggagccacatgaccaagcaagagtctaccaactgaccagtaagcccaagtgccacctactggatcacatcccaaagcttcagcatcaaaaataccctactaatatactcccctctgaaaccagaaatgagaagtcagcttcaaataaagaccctgcacaaagcctcagcctggtgaaaacatccgaaaataagtctacggactgtactcaatctacactgcaattaaaggaaaacccataggtggaaatgagaagaaaccaatgcaagaactccagtaactcaaatggcctctgtgtcatatgtccttctaacaaccacaccagttctccaacaagagttcttaacctggatgaactgtctggaattacataaatataattcagaatatggataggaaaaaaaatcatcaagactcaggagaatggcaaaacccaatccaaggaaaataagaataacagtaaagtgttacaggagctgaaggataaagtagctggtataataaaaaagaacctaaccgatctgaaagcgccgaagaacacaatacaagaattccacaatgcaatcacaagtattaacagcagaaaaaaaaacctgaggaacgaatctcagaacttgaagattggttctctaaaataagatggacaaaaaaaaaaaaaaaaaa

SEQ ID NO: 290251 - DNA, 1000 bp, Homo Sapiens; identical to SEQ ID NO: 223135

SEQ ID NO: 290252 - DNA, 1000 bp, Homo Sapiens
cgaacgccccatcgccttcacctccaggtcaaagaagctgtggattcagttcaagtccaatgaagggaacagcgctagagggttccaggtcccatacgtgacatatgatgaggactaccaggaactcattgaagacatagttcgagatggcaggctctatgcatctgagaaccatcaggaaatacttaaggataagaaacttatcaaggctctgtttgatgtcctggcccatccccagaactatttcaagtacacagcccaggagtcccgagagatgtttccaagatcgttcatccgattgctacgttccaaagtgtccaggtttttgagaccttacaaatgactcagcccacgtgccactcaatacaaatgttctgctatagggttggtgggacagagctgtcttccttctgcatgtcagcacagtcgggtattgctgcctcccgtatcagtgactcattagagttcaatttttatagataatacagatattttggtaaattgaacttggtttttctttcccagcatcgtggatgtagactgagaatggctttgagtggcatcagcttctcactgctgtgggcggatgtcttggatagatcacgggctggctgagctggactttggtcagcctaggtgagactcacctgtccttctggggtcttactcctcctcaaggagtctgtagtggaaaggaggccacagaataagctgcttattctgaaacttcagcttcctctagcccggccctctctaagggagccctctgcactcgtgtgcaggctctgaccaggcagaacaggcaagaggggagggaaggagacccctgcaggctccctccacccaccttgagacctgggaggactcagtttctccacagccttctccagcctgtgtgatacaagtttgatcccaggaacttgagttctaagcagtgctcgtgaaaaaaaaaagcagaaagaattagaaataaataaaaactaagcacttctggagacat

SEQ ID NO: 290253 - DNA, 1000 bp, Homo Sapiens
ggttaagcattcctttctcttcagtgcccagcagcacccagtgttggtctgtgtccatcagtgaccaccaacattctgtgttcacatgtgtgggtccaacacttactacctggtgtatgaaattggacctgaactgttggatttttctagttgccgccaaacaaggcaaaaaaatttaaacatgaagcacacacacaaaaaaggcagtaggaaaaatgctggccctgatgacctgtccttattcagaatgagagactgcggggggggcctgggggtagtgtcaatgcccctccagggctggaggggaagaggggccccgaggatgggcctgggctcagcattcgagatcttgagaatgatttttttttaatcatgcaacctttccttaggaagacatttggttttcatcatgattaagatgattcctagatttagcacaatggagagattccatgccatctttactatgtggatggtggtatcagggaagagggctcacaagacacatttgtcccccgggcccaccacatcatcctcacgtgttcggtactgagcagccactacccctgatgagaacagtatgaagaaagggggctgttggagtcccagaattgctgacagcagaggctttgctgctgtgaatcccacctgccaccagcctgcagcacaccccacagccaagtagaggcgaaagcagtggctcatcctacctgttaggagcaggtagggcttgtactcactttaatttgaatcttatcaacttactcataaagggacaggctagctagctgtgttagaagtagcaatgacaatgaccaaggactgctacacctctgattacaattctgatgtgaaaaagatggtgtttggctcttatagagcctgtgtgaaaggcccatggatcagctcttcctgtgtttgtaatttaatgctgctacaaggtgtttctgtttcttagattctgaccatgactcataagcttcttgtcattcttcattgc

SEQ ID NO: 290254 - DNA, 1000 bp, Homo Sapiens; identical to SEQ ID NO: 117815

SEQ ID NO: 290255 - DNA, 1000 bp, Homo Sapiens; identical to SEQ ID NO: 117816

SEQ ID NO: 290256 - DNA, 1000 bp, Homo Sapiens; identical to SEQ ID NO: 223138

SEQ ID NO: 290257 - DNA, 1000 bp, Homo Sapiens; identical to SEQ ID NO: 115533

SEQ ID NO: 290258 - DNA, 1000 bp, Homo Sapiens
caagaggaatgttattgaagccgtttacaatagactgaatccttacaaaaatgacgacactgactctacatcaacagatgatatgtggtaaaactgctcatctagccatggagtttaccttcacctccaaaggagagtacagctcaactttgttgaaacttttaacatccatcctcaactttaaggaaggggatatgacatgggtgagaatgattacatcagagaacttcagcagtacaacagctagcccagaactgatttttttttttttttttgtaaatttgagacttatgtaagcgtgatttcaaaccataattcgtgttgtaaatcagactccagcaatttttgttgtatgattttgtttttttgtaaagtgtaattgtccttgtacaaaatgctcatatttaattatgaactgctttaaatcactatcaaagttacaagaaatgtttggcttattgtgtgatgcaacagatatatagccctttcaagtcatgttgtgtttggacttggggttggaacagggagagcagcagccatgtcagctacacgctcaaatgtgcagatgattatggaaaataacctcaaaatcttacaaagctgaacatccaaggagttattgaaaactatcttaaatgttcttggtaggggagttggcattgttgataaagccagtcccttcatttaactgtctttcaggatgttccttcgttgtttccatgagtattgcaggtaataatacagtgtattcataagaatctcaatcttggggctaaatgccttgtttctttgcacctcttttcaagtccttacatttaattactaattgataagcagcagcttcctacatatagtaggaaactgccacatttttgctatcatgattggctgggcctgctgctgttcctagtaagatattctgaattccattttatcaataaagcttgatttaacaaacaagaaaaaaaaaaaaaaaaaaaaaaaaaaaaaaaaaaaaaaa

SEQ ID NO: 290259 - DNA, 1000 bp, Homo Sapiens; identical to SEQ ID NO: 117819

SEQ ID NO: 290260 - DNA, 804 bp, Homo Sapiens
gaaggacgcaggcagcaaagagtagtcagtcccttcttggctctgctgacactcgagcccacattccatcacctgctcccaatcatgcaggtctccactgctgcccttgccgtcctcctctgcaccatggctctctgcaaccaggtcctctctgcaccacttgctgctgacacgccgaccgcctgctgcttcagctacacctcccgacagattccacagaatttcatagctgactactttgagacgagcagccagtgctccaagcccagtgtcatcttcctaaccaagagaggccggcaggtctgtgctgaccccagtgaggagtgggtccagaaatacgtcagtgacctggagctgagtgcctgaggggtccagaagcttcgaggcccagcgacctcagtgggcccagtggggaggagcaggagcctgagccttgggaacatgcgtgtgacctctacagctacctcttctatggactggttattgccaaacagccacactgtgggactcttcttaacttaaattttaatttatttatactatttagtttttataatttatttttgatttcacagtgtgtttgtgattgtttgctctgagagttccccctgtcccctccaccttccctcacagtgtgtctggtgacaaccgagtggctgtcatcggcctgtgtaggcagtcatggcaccaaagccaccagactgacaaatgtgtatcagatgcttttgttcagggctgtgatcggcctggggaaataataaagatgttcttttaaacggtaaaaaaaaaaaaaaaaaaaaaaaa

SEQ ID NO: 290261 - DNA, 1000 bp, Homo Sapiens
gaaccatgaggaggaggttaacaccctgcgctcccagcttggagaccgcctcaacgtggaggtggacactgcccccactgtggacctgaaccaggtcctgaacgagaccaggagtcagtatgaggctctggtggaaattaaccgcagggaagtggagcaatggttcgccacgcagaccgaggagctgaacaagcaggtggtatccagctcagagcagctgcagtcctgccaggcggagatcatcgagctgagacgcacagtcaacgccctggagatcgagctgcaggcccagcacaacctgcgagactctctggaaaacacgctgacggagagcgaggcccactacagctcccagctgtcccaggtgcagagcctgatcaccaacgtggagtctcagctggcagagatccgctgtgacctggagcggcagaaccaggagtaccaggtgctgctggacgtgcgtgcccggctggagtgtgagatcaacacgtaccggagcctcctggagagtgaggactgcaagctcccctgcaacccatgcgccaccaccaatgctagtggcaactcctgtggaccctgtggcacctctcaaaagggttgctgtaattgaaaagcttgtatcctctttgaagacatctacaaagccatttagatcaaccacaggaaggatcctcaagtcctgacttttctggagctcagctgacatcaagaaacctcatcttgcctctatgttatttctagaatgctgaaaagctttcctgacccaagcaaagacacacatcatcaacttccaatgtctggacaactccttcctgttgagggtcgagcctgtttgtttctaaagatgttcagctccctgtaatctgagctccagttactacttaaggtgtttcctgaacgtactactgcatttcctgttttccttttttctttggcattctctggaatgcaaggaggagacttcatttacttcccaataaacttcatttctctggcataa

SEQ ID NO: 290262 - DNA, 1000 bp, Homo Sapiens
ccaaggtggcagatgtcttccctgggctgccaccagcccccgccccagagtggcccaccgtggcactagaatgcaagtatcctgcgaccttgcaacctcaccttcctgtgggtgttctttcctgccctgtccaaaagcgccctcactattcttggaccatgccagattctgcctctctggaaagaggctctggacagcagaagcctccaagcacagagcctggccccaggccccagacagggtgggcttcctgcccttccctctgggcacgcctgctggccgacccactgacccactcggatggaccaacctgctctgtccccaaaggacgcctgcaggagagagcagcactccgcatcacctcaccaaggatcggactctgcccctggacctgggaacgactggactgtcacggggttccctcctagctctcccagtgaactcctgccaggcacacacagcccctatagcactgagctcacatgggactgggatatgggggcatctcttccccagagaggcactcagtgagcctcctgtgcctggccccagtctgggccatctcttaggtgagacagttgcccgaaactaagccaggcctggctggaggagcagcagcttggggagagggatttccctgcagacctcaagccatcatgcggtgggtgctgccatgacagaggctgcacccctgggccagcggggctgctcacccacctcttgtgcaaggtggcctttgtgctgcgcctgcaggcagagctggagcccccagcagaggcaggctgggacggaccagcatctggaagatgtacatagttatttttctctttgtggtttcttgtttggtttggtttgcttttgacagcttcattttatttttgacgtcactttttggccatgtaaactatttgtggcaattttatgtttttatttatgaataaagaatgccatttctcacgccctctaaaaaaaaaaaaaaaaaaaaaaaaaaaaaaaaaaa

SEQ ID NO: 290263 - DNA, 1000 bp, Homo Sapiens
tgtagtgagcagcgcaccagatgtagcgtgctacagtcagctttagctctcaagagtcgtatgtaactgtcccagactcctctgtcagtttcagcaactacaagggataccctgcgaaagtaccatgagaaatatcagagtaaaactttctagaacagtacaaggttaaagaggtgaggtgacgggaaatacacagcatagctttgaaataatgacaaccaaggacatgaccattagaacagcatgtgcagatcttaatcatcccagttcctaggcaacttgttcaccaggtacgcaagggccgaatagttgagaaatggacatttttacctactcctcctagccccctatccccagtaacagtgatcccttttcttattgtgatttatttcctaattcttgctgagttgactttcccttgtaggaaaagaaaaatatttcaaatagaaacccaccttttatttaagtatgaagcagctgttactttttaaaaaatgaattatctttcaatggtgtagaatgattccaaagtgtctccattagcatatactgagcaggaattaaataaagcatcagatactgatctgagctgtaagctggtagaatctgagccaaagtagactgcttaaattgataagctttgctaaagagttgtatgcacaaaggatgattaattctgggactatactcacaccaaggtctgctgtcttatagccaagaattacagctttatttatagagagtgaattatgggtattttttcagaaaatattgtcatctgatatacacataaaacaactcacattgttggagttaactaattatccccatttcatggttttcagtggcaacttactgacccttgtttttgcctgtgcttgtatgcatgcattttcaagcaagtaataaagcagcctcatttaattctggataatgctgggttttacatatagactgaatgctataatcaaatctattgacagtatctgcagttctttca

SEQ ID NO: 290264 - DNA, 1000 bp, Homo Sapiens; identical to SEQ ID NO: 223141

SEQ ID NO: 290265 - DNA, 1000 bp, Homo Sapiens; identical to SEQ ID NO: 286268

SEQ ID NO: 290266 - DNA, 1000 bp, Homo Sapiens; identical to SEQ ID NO: 223142

SEQ ID NO: 290267 - DNA, 1000 bp, Homo Sapiens
caagactctgtctcaaaaaaaaaaaaatcattctttttagtcttagcacctacttaaggatccacttttagggctcacccacatttgtttctagatttacccctgcgctagagtaagcactttatctccagaactgagagcaaagttaacaaatctcaccccttctctcctgcaaattagtggacagactccctggaacatgtttggggcttccacctagggccacctagtggtatctctgggtctttacttggtcagatgtttattctacattgttccccaggaacagagtatgagctcattgatgcagaccgattctaattgccaggccctaatttgcagactaactctcataataaacagaggcccatagttgtttatgaactgcttatcccttaaaggagcacaagaacccctccctgccctccttgggcaccctgcctccaggagatggaggcacgtgataagacaaaagactgcaccaactcaccctgacacagttacatagtcactgagagtggggaagatgggacagcccacatgctgcataagatgggccttatgcagcaggcccaggtcgtcattaaggagtgacccctttcctgtaacctgcactttgggatggtagaagtttctttacctgctgacaggtttggtggcactgctggttacccctgggccctgaatggagctaaaatcacatttggtaccagcagcacctatcccaagtgtgatccttcatcccaacactccctcttggagctgttccctgggtagagctagcatgccagcagcttctgcaggctccaaacccaggccagaagccagacccaggcctgctgcctgcatctgcattccctccttccagtgttccttagaacagacatttaggtatctcaggtcctttctaagtgtccctttcctatgtatgcatttcctttttttgtctttactatgcactttagcttataaagccaattaaaaacaatgattgagaaaa

SEQ ID NO: 290268 - DNA, 1000 bp, Homo Sapiens
aaacgcttgtagggtttcaccagggctggtgaattaccagatctccgtcaagtgcagtaaccagttcaagttggaagtatgtcttttgaatgcagaaaacaaagtcgtggacaaccaggctgggacccagggccagctgaaggtgctggtgccaacctctggtggccgtacctgatgcacgaacaccccgcctacctgtactcgtgggaggatggtgattgctcacaccaaagccttggacccctcccagcctgtgacctttgggaccaactccacctacgcagcagacaagggggctctgtatgtggatgtgatccgtgtgaacagctactactcttggtatcgcaactacgggcacctggagttgattcggctgcaggccctgcagctggccgcccagtttgtgaattggtgtaagacatcacaatcccattattcagagcgcgtatggagtggaaacgcttgtagggtttcaccagtctttcccagggaactccgatgaagtgttccaacaaaatgagcgagtgaaccaagaagaggatgacattagatccaggagatacaacagaggagataatctccaggatgcctgtgaagaaagatccctggatcccaggatgattataggacaagttgttcataatccagcaggccagaagacttccagggaaactcatttcaagatgaaaatggaccagccgcagtggctcacgcctgtaataccagcactttgggaggctgaggcgggcggatcacttgaggtcaagagtttgaaactagcctggccaacgtggcaaaactccatctctattaaagatacaaaaattagccaggcatagtggtgcatgcctgtagtcccagctacttgggatgctgaggcaggaagaattgcttgaacctgggaggcagagtctgcggtgaccgagatcatgccactgcactccagcctgggtgacagagccagactccgtctctactaaaaaaaaaaaaaaaaaaaaaa

SEQ ID NO: 290269 - DNA, 1000 bp, Homo Sapiens; identical to SEQ ID NO: 117822

SEQ ID NO: 290270 - DNA, 1000 bp, Homo Sapiens
gcattgacgtgaaggaagcggaccccaccagcaacacctacacccttgtcacctgcctgggactcctatgatggcctggtggttgataataatcagatcatgcccaagacgggcctcctgataatcgtcttgggcatgattgcaatggagggcaaatgcgtccctgaggagaaaatctgggaggagctgagtgtgatgaaggtgtatgttgggagggagcacagtgtctgtggggagcccaggaagctgctcacccaagatttggtgcaggaaaactacctggagtaccggcaggtgcccagcagtgatcccatatgctatgagttactgtggggtccaagggcactcgctgcttgaaagtactggagcacgtggtcagggtcaatgcaagagttctcatttcctacccatccctgcatgaagcagctttgagagaggaggaagagggagtctgagcatgagctgcagccagggccactgcgaggggggctgggccagtgcaccttccagggctccgtccactagtttcccctgccttaatgtgacatgaggcccattcttctctctttgaagagagcagtcaacattcttagtagtgggtttctgttctattggatgactttgagatttgtctttgtttccttttggaattgttcaaatgttccttttaatgggtggttgaatgaacttcagcattcaaatttatgaatgacagtagtcacacatagtgctgtttatatagtttaggagtaagagtcttgttttttattcagattgggaaatccattccattttgtgaattgggacatagttacagcagtggaataagtattcatttagaaatgtgaatgagcagtaaaactgatgacataaagaaattaaaagatatttaattcttgccttatactcagtctactcggtaaaattttttttaaaaaatgtgcatacctggatttccttggcttctttgagaatgtaagacaaattaaatctgaataaa

SEQ ID NO: 290271 - DNA, 1000 bp, Homo Sapiens
tctttggcgacgagtcaaacaagccaatcctgctgcccaatgagtcacagtcctttgagcggtcggtgcagctcctcgaccagatcccatcatacgacacccacaagatcgccgtcctgtatgttggagaaggccagagcaacagcgagctcgccatcctgtccaatgagcatggctcctacaggtacacggagttcctgacgggcctgggccggctcatcgagctgaaggactgccagccggacaaggtgtacctgggaggcctggacgtgtgtggtgaggacggccagttcacctactgctggcacgatgacatcatgcaagccgtcttccacatcgccaccctgatgcccaccaaggacgtggacaagcaccgctgcgacaagaagcgccacctgggcaacgactttgtgtccattgtctacaatgactccggtgaggacttcaagcttggcaccatcaagggccagttcaactttgtccacgtgatcgtcaccccgctggactacgagtgcaacctggtgtccctgcagtgcaggaaagacatggagggccttgtggacaccagcgtggccaagatcgtgtctgaccgcaacctgcccttcgtggcccgccagatggccctgcacgcaaatatggcctcacaggtgcatcatagccgctccaaccccaccgatatctacccctccaagtggattgcccggctccgccacatcaagcggctccgccagcggatctgcgaggaagccgcctactccaaccccagcctacctctggtgcaccctccgtcccatagcaaagcccctgcacagactccagccgagcccacacctggctatgaggtgggccagcggaagcgcctcatctcctcggtggaggacttcaccgagtttgtgtgaggccggggccctccctcctgcactggccttggacggtattgcctgtcagtgaaataaataaagtcctgaccccagtgcacagacatagaggcacagattgc

SEQ ID NO: 290272 - DNA, 1000 bp, Homo Sapiens
gcaccagaggatccacaccggggagaagccctacacgtgcagcgagtgtgggaaggccttcagcgaccgctcagtcctcattcagcaccacaacgtgcacaccggggagaagccctatgagtgcagtgagtgtgggaagaccttcagccaccgctccacactgatgaatcacgagcggatccacaccgaggaaaagccctatgcatgctacgaatgtgggaaggccttcgttcagcactcacacctgatccagcaccagagagtccacactggggagaagccctatgtgtgtggtgaatgtgggcacgccttcagtgcacgccggtctctgatccagcatgagagaatccacacaggtgaaaagcccttccagtgcacagaatgtggcaaagccttcagcctgaaagcaactctgattgtgcacctgaggacccacacgggcgagaagccatatgagtgcaatagctgcgggaaggccttcagccagtactcagtgctcatccagcaccagcggatccacacaggcgagaagccctatgagtgcggggagtgtgggcgtgccttcaaccagcatggccacctaatccagcaccagaaagtgcacagaaagttgtgacccatggctgacacaagaatccattctcacagaaactgcatgtggaaccacaagcagccttcagcccaagagaagtctctgttaactctataggaagcttttctttggcgattcagtgtcacaaaataactccagaaagaagcacttagcgtgctgttcctgtggaaaaacttcagagactacctgttttattttcctcaacatcttgaagttatgttggagagtaatcatacaattgtagagaattttggtaaaaaacagccataattctttaacattagtttatttgaactaagggaatttaaggcataagaaccattatcccaataaaatcttacattccaaataaagttctttttctaagaacaaaaaaaaaaaaaaaaa

SEQ ID NO: 290273 - DNA, 1000 bp, Homo Sapiens
aaatgtctgcctcacagataggagggaaaatatatagaggattataatatggttcaacaaatgttgatgagtattagaaatgtacattagaaatattagaaatgtttatgactattagaaaagtacagggtattgggcgttcctgacacaaactgaggcctcctagcaagactggcagttttctgtaaaggagggttatttactacggtagtgcaaataacttttggtgttgtagctaaataaggaatactcatgccaagattgcacaattgtgcctcctccctctgttcactgaactctgatgtaattttttttttttttttgagacggagtctcgctctgtcgcccaggctggagtgcagtggcgctatctcggctcactgcaagctccgcctcccgggttcacgccattctcctgcctcagcctcctgagtagctggggctacaggcgtctgccaccatgcccagctacttttttgtatttttagtagatacggggtttcaccgtgttagccaggatggtcttgatgtcctgacctcgtgatccaccggcctcggcctcccaaagtgctgggattaccggcgtaagccaccacgcccggcccactctgaagtaatcttaagaagacgttaactcatttttcttgtgtattgtagacacttttggctgtctggtaacatggaaaatctcagaatgatgttttaagtatataaaatgccaaacaaagttaaattacagttatcaaagtatttttaaaacttcatagtgataaatgagactatatagttatattgttaatatagttaacacattacatgatttggtgagcctaattgctgttactaattagaggagtaaaaatgtttcacgataactcagcaattgtaatgagaaatgaaacatctaatgtcttttgggttacaaagtaacaggtactgagatttgtggcctaaattcataataaagtgaaatgttcaagttcaaaaaaaaaaaaaaaaa

SEQ ID NO: 290274 - DNA, 1000 bp, Homo Sapiens
tggctaagaagtataatttgctaactattaaggactttctttttttaatgttgtacactattcttcctactcttttttggttttggttttgttttgtagagactgtctcactatgttgcccaagctggtctcaaactcctggcctcaagcagtcctcccaccttagcttctcaaagtgttgagatcacaggcgtgagccactgcacccggcccctactcctttttctaataagctgtatctgtaatcacagcattcctacagttgttacagtgtgttttttaaatgaaagtaaacatggttacatttgaatctcttaaataagcagtcacttggctggacaggaagaaggtagatcctgtgtgtcttgttttctggtcatgtgtattgtacaagctagagagctgaatttctgagatacacattttcaaatcacatgcaagtgaagatgatggtctgtagaaattttcagtatatataatgtttaatgacatactaatttatcatctggctatttgggaaggaaggacacacatggattttgcacatttccaccatggtggctggtgtggcttgtggctatggggtgatcaccagtatcaccactttggaaggggacagtgaaattggggctagagaaggaactttgtacagttttccctgagattcagattgactgaaaagtcacatgaagagttgattgtcttttaatggtatgttttaaacagctgacattttaaattttgatgaaatccagtttattcgtttgttcttttatgctttgggtgttgcatccgagaaatcttttcccatcccaagatcacaattttttttcctttttacttctagaagtgttataattttaagctttatactttggtctatgacccgtttttttttttgttttgttttgttttttcgtttgtttctttgttttgagatggagcctgggtgatagagtgagacactgtcttgccaaaaaaaaaaaaaaaaaaaaaaaaa

SEQ ID NO: 290275 - DNA, 1000 bp, Homo Sapiens; identical to SEQ ID NO: 221351

SEQ ID NO: 290276 - DNA, 1000 bp, Homo Sapiens; identical to SEQ ID NO: 223145

SEQ ID NO: 290277 - DNA, 1000 bp, Homo Sapiens
atgcaagaagattcttctcccaactactgtacctcctgcaacgatgagaatctggctccttggaggcctgctgccattcctgctgctcctctctggcctgcagagacccacagagggttctgaggttgcaattaaaatcgacttcgacttcgcaccaggttcttttgatgatcagtaccaaggctgtagcaaacaggttatggagaaactaactcaaggggattatttcacaaaagacatagaagcccagaagaattattttaggatgtggcaaaaagcccacttagcctggcttaaccaaggaaaagttctaccccagaacatgactaccacacacgctgtggctattttgttttatacattgaacagcaatgttcattctgactttactagagccatggcctctgttgccaggactccacagcagtatgaacgttcattccacttcaaatatttacactactacctcacctcagcaatccagctgctgaggaaagacagcatcatggagaatggcactctgtgctatgaggtgcattataggacgaaggatgtccactttaatgcctacacaggggccaccattcgatttggccaattcctctccacatccctcctgaaagaagaggcacaggagtttgggaaccagacactatttaccatattcacctgcctgggtgcacctgtacagtacttctccctcaagaaggaagtcttgatccctccctatgagctgtttaaagttataaatatgagctaccacccaagaggagactggttgcagttgaggtcaactgggaacctgagcacatataactgtcagctgctaaaagcttccagcaagaaatgcatccctgatcctatagctattgcatctctctcctttttgaccagtgtcatcatcttttccaaaagcagagtataaagaaatcttgtggctccttttatttaaaaaaaatatttaaataaaatcttttttattggcaaaaaaaaaaaaaaa

SEQ ID NO: 290278 - DNA, 1000 bp, Homo Sapiens
agagacaaggatttttctcaccagcgaaggcattacaaagaatttcgatttgatcttacccaaattcctcatggagaggcagtgacagcagctgaattccggatatacaaggaccggagcaacaaccgatttgaaaatgaaacaattaagattagcatatatcaaatcatcaaggaatacacaaatagggatgcagatctgttcttgttagacacaagaaaggcccaagctttagatgtgggttggcttgtctttgatatcactgtgaccagcaatcattgggtgattaatccccagaataatttgggcttacagctctgtgcagaaacaggggatggacgcagtatcaacgtaaaatctgctggtcttgtgggaagacagggacctcagtcaaaacaaccattcatggtggccttcttcaaggcgagtgaggtacttcttcgatccgtgagagcagccaacaaacgaaaaaatcaaaaccgcaataaatccagctctcatcaggactcctccagaatgtccagtgttggagattataacacaagtgagcaaaaacaagcctgtaagaagcacgaactctatgtgagcttccgggatctgggatggcaggactggattatagcaccagaaggatacgctgcattttattgtgatggagaatgttcttttccacttaacgcccatatgaatgccaccaaccacgctatagttcagactctggttcatctgatgtttcctgaccacgtaccaaagccttgttgtgctccaaccaaattaaatgccatctctgttctgtactttgatgacagctccaatgtcattttgaaaaaatatagaaatatggtagtacgctcatgtggctgccactaatattaaataatattgataataacaaaaagatctgtattaaggtttatggctgcaataaaaagcatactttcagacaaacggggaatttcctaaaaaaaaaaaaaaaaaaaaaaaaaaaaaaaaaaaaaaa

SEQ ID NO: 290279 - DNA, 1000 bp, Homo Sapiens
ccacctgaagggtggacaggcaatcgtggaagatcagataccaccaagcaatttggagacagttcctgttgagaataaccacggtttccatgaaaagacagcagcgctgaagcttgaggccgagggcgaggccatggaagatgcagccgcgccaggggacgaccgaggcggcacacaggagccagccccagtgcctgctgagccgtttgacaacactacctacaagaacctgcagcatcatgactacagcacgtacaccttcttagacctcaacctcgaactctcaaaattcaggatgcctcagccctcctcaggccgggagtcacctcgacactgagggccctcggtgtgaagatgaaccttccaccgtcttcactgcatcctggagtgcaaaaataaaatccactcaagagtcacaaggcccgctgtgcataatcggtttcacttttacctttttttttttttttttttttttgagacagggtctcactctgtcacccaggctggagtgcagtggcacattctcggctcactgcaacttccgcctcctgggttcaagtgattctcccacctcagcctcccaagtaggtgggattacaggtactcaccaccaggtccagctaacttttgtatttttagtagagacagggtttcaccatgttggccaggctggtctcgaactcctgacctcagatggtctgcccacctccgcctcccaaagtgctgggattacaggcgtgagccactgcgcccggccactttcacactttttacagtgagtggtgaattagcaacagtaacactgattatccaacatatattttggaatatctactatgtgcaaggaatttttcttaaactctaaggttatgaatcactgggcaaatccatataattagagaattttaagtgctttagagcggtgtgattctactgtgctcagcctagtcaatttcgcattaaactgattatcagctgaaaaaaaaaaaaaaaaaaaaaa

SEQ ID NO: 290280 - DNA, 1000 bp, Homo Sapiens
ccaaagttgaagccaagaaggaagaggctgaagataagaaaaaagtccccaccccagagaaggaggctcctgccaaggtggaggtgaaggaagacgctaaacccaaagaaaagacagaggtagccaagaaggaaccagatgatgccaaggccaaggaacccagcaaaccagcagagaagaaggaggcagcaccggagaaaaaagacaccaaggaggagaaggccaagaagcctgaggagaaacccaagacagaggccaaagccaaggaagatgacaagaccctctcaaaagagcctagcaagcctaaggcagaaaaggctgaaaaatcctccagcacagaccaaaaagacagcaagcctccagagaaggccacagaagacaaggccgccaaggggaagtaaggcagggagaaaggaacatccggaacagccaaagaaactcagaagagtcccggagctcaaggatcagagtaacacaattttcactttttctgtctttatgtaagaagaaactgcttagatgacggggcctccttcttcaaacaggaatttctgttagcaatatgttagcaagagagggcactcccaggcccctgcccccaggccctccccaggcgatggacaattatgatagcttatgtagctgaatgtgatacatgccgaatgccacacgtaaacacttgactataaaaactgcccccctcctttccaaataagtgcatttattgcctctatgtgcaactgacagatgaccgcaataatgaatgagcagttagaaatacattatgcttgagatgtcttaacctattcccaaatgccttctgttttccaaaggagtggtcaagcccttgcccagagctctctattctggaagagcggtccaggtggggccggggactggccactgaattatgccagggcgcactttccactggagttcactttcaattgcttctgtgcaataaaaccaagtgcttataaaatgaaaaaaaaaaaaaaaa

SEQ ID NO: 290281 - DNA, 1000 bp, Homo Sapiens
cccagatccgcaaggtctacccggggctcagctgcttcaaggagggcgtgaggcagatccctgtggagagcgttcctggcattcgagagacaggctggaagccattggggaaggagaaggggaaggagctgaaggaccccgaccagctctacacaaccctcaaaaacctgctggcccaaatcaagtctcaccccagtgcctggcccttcatggagcctgtgaagaagtcggaggcccctgactactacgaggtcatccgcttccccattgacctgaagaccatgactgagcggctgcgaagccgctactacgtgacccggaagctctttgtggccgacctgcagcgggtcatcgccaactgtcgcgagtacaaccccccggacagcgagtactgccgctgtgccagcgccctggagaagttcttctacttcaagctcaaggagggaggcctcattgacaagtaggcccatctttgggccgcagccctgacctggaatgtctccacctcggattctgatctgatccttagggggtgccctggccccacggacccgactcagcttgagacactccagccaagggtcctccggacccgatcctgcagctctttctggaccttcaggcacccccaagcgtgcagctctgtcccagccttcactgtgtgtgagaggtctcctgggttggggcccagcccctctagagtagctggtggccagggatgaaccttgcccagccgtggtggcccccaggcctggtccccaagagctttggaggcttggattcctgggcctggcccaggtggctgtttccctgaggaccagaactgctcattttagcttgagtgatggcttcaggggttggaagttcagcccaaactgaagggggccatgccttgtccagcactgttctgtcagtctcccccaggggtggggggtatggggaccattcattccctggcattaatcccttagagggaataataaagctttttatttctctg

SEQ ID NO: 290282 - DNA, 1000 bp, Homo Sapiens; identical to SEQ ID NO: 117825

SEQ ID NO: 290283 - DNA, 1000 bp, Homo Sapiens; identical to SEQ ID NO: 223146

SEQ ID NO: 290284 - DNA, 1000 bp, Homo Sapiens; identical to SEQ ID NO: 117827

SEQ ID NO: 290285 - DNA, 1000 bp, Homo Sapiens
gtatttgctggcattcctgcacctatatattttggcgctttaatggattccacatgtttacactggggaactttgaaatgtggtgagtcaggggcatgcaggatatatgattccaccaccttcagatacatctacctcggattgccggcagcactaagaggatcaagctttgttccagccttaatcatcttaattcttttgaggaagtgtcatctacctggtgaaaatgcctcttcaggaacagagcttatagagacaaaagtcaaagggaaggaaaatgagtgcaaagatatataccaaaagtccacggttttgaaagatgatgaattgaaaactaaattgtaattgtcctattatattacttttttcagaattagagaacatgctgtacaacttaattgttttaaaaatcagtagagatataatagataactttttcttgtctttaagaacctaaaaaacctcttaactcaaaataataaaatgttcactaatgatatttctaaggtatcagtgacacttgagttttcctaggagggacatcaataacagccccctaaagaagattcttagagccagctttatttttatgttgaaacagcaatttcccttaattcatcgaagtaagggtgtacttcctacatctccttctactaatacttctaaaaattttctgttatgaaaacctatttaattccactaaatttgttctttgatattggaattattcagatgcctaaattctcattctgttatgtgaagatttaaatattttattcaagtttatcgcttccatgtgagagaagcctacatcttcttattctatttaggaatcgttctttaactcttcttattcattctaggcatgactcctatataatagattactcataaatataccctcctactttcaattttttcttttctttattactcatacatttgctcaatttgtacagaatactgacaaacttaagcaggttattaaacatcatgaggc

SEQ ID NO: 290286 - DNA, 1000 bp, Homo Sapiens
tcgacactggcctgtttcctgagaagccgaggaatggtgtgctgggggacagcagagacaaggaggccatggccctggatggcacagcctatcaggggagcagctccacctgcatcctccaggagacctccctgtgatgttgactcaggaccccgcctctgtcctcactgtgccaggccatagccagaggccaccctgtagtacagggatgagtcttggtgtgttctgcagggacaggcctggatgatctagctcataccaaaggaccttgttctgagaggttcttgcctgcaggagaagctgtcacatctcaagcatgtgaggcaccgtttttctcgtcgcttgccaatctgttttttaaaggatcaggctcgtagggagcaggatcatgccagaaatagggatggaagtgcatcctctgggaaaaagataatggcttctgattcaacatagccatagtcctttgaagtaagtggctagaaacagcactctggttataattgccccagggcctgattcaggactgactctccaccataaaactggaagctgcttcccctgtagtccccatttcagtaccagttctgccagccacagtgagcccctattattactttcagattgtctgtgacactcaagcccctctcatttttatctgtctacctccattctgaagagggaggttttggtgtccctggtcctctgggaatagaagatccatttgtctttgtgtagagcaagcacgttttccacctcactgtctccatcctccacctctgagatggacacttaagagacggggcaaatgtggatccaagaaaccagggccatgaccaggtccactgtggagcagccatctatctacctgactcctgagccaggctgccgtggtgtcatttctgtcatccgtgctctgtttccttttggagtttcttctccacattatctttgttcctggggaataaaaactaccattggacctaaaaaaaaaaaaaaaaaa

SEQ ID NO: 290287 - DNA, 1000 bp, Homo Sapiens
ggtagccacagtgtgaccccagaatccagagcttcctcttcaggggccatagtgcccctggaacccccagaatcagagcctcccatgcccgtcggtgaccccccagagaagaggcgggggctgtacctcacagtcccccagtgtcctctggagaaaccagggtccccctcagccacccctgccccagggggtggtgcagatgaccccgtgtagctcggggcttggtgccgcccacggctttggccctggggtctgggggccccgctggggtggaggcccaggcagaaccctgcatggaccctgacttgggtcccgtcgtgagcagaaaggcccggggaggatgacggcccaggccctggttctctgcccagcgaagcaggagtagctgccgggccccacgagcctccgtccgttctggttcgggtttctccgagttttgctaccagccgaggctgtgcgggcaactgggtcagcctcccgtcaggagagaagccgcgtctgtgggacgaagaccgggcacccgccagagaggggaaggtaccaggttgcgtcctttcaggccccgcgttgttacaggacactcgctgggggccctgtgcccttgccggcggcaggttgcagccaccgcggcccaatgtcaccttcactcacagtctgagttcttgtccgcctgtcacgccctcaccaccctccccttccagccaccaccctttccgttccgctcgggccttcccagaagcgtcctgtgactctgggagaggtgacacctcactaaggggccgaccccatggagtaacgcgcccggccccgatgcgaatcaggcctcccctacatctgggggcgttggccgcgagattcccattgacacctttgtttcgtgtgcttttaaattcaggttaaatgttgcaataatctgatgcagaagactcagcttctcaagggagagggagggggcggagcggaataaatagtaacttatttaagaaatgcaaaaaaaaaa

SEQ ID NO: 290288 - DNA, 1000 bp, Homo Sapiens; identical to SEQ ID NO: 117828

SEQ ID NO: 290289 - DNA, 482 bp, Homo Sapiens
gcgggcgccgctcttttgtttcttgctgcagcaacgcgagtgggagcaccaggatctcgggctcggaacgagactgcacggattgttttaagaaaatggcagacaaaccagacatgggggaaatcgccagcttcgataaggccaagctgaagaaaacggagacgcaggagaagaacaccctgccgaccaaagagaccattgagcaggagaagcggagtgaaatttcctaagatcctggaggatttcctacccccgtcctcttcgagaccccagtcgtgatgtggaggaagagccacctgcaagatggacacgagccacaagctgcactgtgaacctgggcactccgcgccgatgccaccggcctgtgggtctctgaagggacccccccccaatcggactgccaaattctccggtttgccccgggatattatagaaaattatttgtatgaataatgaaaataaaacacacctcgtggcatggc

SEQ ID NO: 290290 - DNA, 1000 bp, Homo Sapiens
tgataactttggaatccagttccctttagaccttgatgttaaaatgaaagctgtaatgattggtgcctgtttcctcattgacttcatgttttttgaaagcactggcagccaggaacaaaaatcaggagtgtggtagtggattagtgaaagtctcctcaggaaatctgaagtctgtatattgattgagactatctaaactcatacctgtatgaattaagctgtaaggcctgtagctctggttgtatacttttgcttttcaaattatagtttatcttctgtataactgatttataaaggtttttgtacattttttaatactcattgtcaatttgagaaaaaggacatatgagtttttgcatttattaatgaaacttcctttgaaaaactgctttgaattatgatctctgattcattgtccattttactaccaaatattaactaaggccttattaatttttatataaattatatcttgtcctattaaatctagttacaatttatttcatgcataagagctaatgttattttgcaaatgccatatattcaaaaaagctcaaagataattttctttactattatgttcaaataatattcaatatgcatattatctttaaaaagttaaatgtttttttaatcttcaagaaatcatgctacacttaacttctcctagaagctaatctataccataatattttcatattcacaagatattaaattaccaattttcaaattattgttagtaaagaacaaaatgattctctcccaaagaaagacacattttaaatactccttcactctaaaactctggtattataacttttgaaagttaatatttctacatgaaatgtttagctcttacactctatccttcctagaaaatggtaattgagattactcagatattaattaaatacaatatcatatatatattcacagagtataaacctaaataatgatctattagattcaaatatttgaaataaaaacttgatttttttgt

SEQ ID NO: 290291 - DNA, 656 bp, Homo Sapiens
acaactcggtggtggccactgcgcagaccagacttcgctcgtactcgtgcgcctcgcttcgcttttcctccgcaaccatgtctgacaaacccgatatggctgagatcgagaaattcgataagtcgaaactgaagaagacagagacgcaagagaaaaatccactgccttccaaagaaacgattgaacaggagaagcaagcaggcgaatcgtaatgaggcgtgcgccgccaatatgcactgtacattccacaagcattgccttcttattttacttcttttagctgtttaactttgtaagatgcaaagaggttggatcaagtttaaatgactgtgctgcccctttcacatcaaagaactactgacaacgaaggccgcgcctgcctttcccatctgtctatctatctggctggcagggaaggaaagaacttgcatgttggtgaaggaagaagtggggtggaagaagtggggtgggacgacagtgaaatctagagtaaaaccaagctggcccaaggtgtcctgcaggctgtaatgcagtttaatcagagtgccatttttttttttgttcaaatgattttaattattggaatgcacaatttttttaatatgcaaataaaaagtttaaaaacttaaaaaaaaaaaaaaaaaaaaaaaaaaaaa

SEQ ID NO: 290292 - DNA, 1000 bp, Homo Sapiens
ctctcctggaccaagaggcccaccaggtcatctgggggttcctggaccccaaggtccttctggccagcctggatattgtgacccctcatcatgttctgcctatggtgtgagagctccccatccagatcagccagagttcacccctgtccaagatgagctggaagccatggaactgtggggccctggagtctgatagcctcaggagaaatttgaagaccaactgcaagaactcttaaggaatcttgtttgagaaaatgttgttatgtggtttgtatgctacttttggggggcagggctcatttcagcagcctaaatctcctccttggataatgttaatattattattattattaacaaaaaatatatatttttaaaaagttcccttaatctatgacatggtagcaatgatttccctttggtgtcttaatggcatgtcagataatttgtttttccagagaagagagctcaaagaggaattgggaaaaataaattgaactctggaatcttctctctcaagtcctaaaatgaacaaacagatatgattgtgtttgagggaaatatgtccctagcaggaaaagaattcaaagaggttcaaagaatatgtcacttactcctacttgctgtaggaataaccttgctgataagaaaaaaagggacaatattggagaaactacctcttgtttaattgatctgtccaactctgagatcacttggtaactggtttcatgtgtatccaaaaatcagcatttggatttaagctttctgaatttggtagtttaagaaacagatttagtttttcaatggttttaactcatgtgaaataatgattttccaccagctctgatgcaaagagatataattttaatgaacgatttatccagcagtgtgttccaggggttgcctctccttatctacggggattactttgtacatgcagataagttttcgcaaacctatttccattttcttttgtaagcaaataaaactttaaaacaaaaaa

SEQ ID NO: 290293 - DNA, 1000 bp, Homo Sapiens; identical to SEQ ID NO: 223149

SEQ ID NO: 290294 - DNA, 594 bp, Homo Sapiens; identical to SEQ ID NO: 223150

SEQ ID NO: 290295 - DNA, 1000 bp, Homo Sapiens; identical to SEQ ID NO: 223151

SEQ ID NO: 290296 - DNA, 1000 bp, Homo Sapiens; identical to SEQ ID NO: 117830

SEQ ID NO: 290297 - DNA, 1000 bp, Homo Sapiens
aaattcactatgcaaggcctgtgatcatcctgggcccaatgaaggaccgagtcaatgatgacctgatctccgaatttccacataaatttggatcctgtgtgccacatactacccggcctcgacgtgataatgaggtggatggacaagactaccactttgtggtgtcccgagaacaaatggagaaagatattcaggacaacaagttcatcgaggcgggccaatttaatgataacctctatgggaccagcatccagtcagtgcgggcagttgcagagaggggcaagcactgcatcttagatgtttccggcaatgctatcaagagactgcagcaagcacaactttaccccattgccattttcatcaagcccaagtccattgaagcccttatggaaatgaaccgaaggcagacatatgaacaagcaaataagatctatgacaaagccatgaaactggagcaggaatttggagagtactttacagccattgtacagggtgactcactggaagagatttataacaaaatcaaacaaatcattgaggaccagtctgggcactacatttgggtcccatcccctgaaaaactctgaagaatcccctccaaccattctcttgtgaacagaagaaatcaagtccctcttccctcctccctcttcattcctgtccccatggggagaacaaatgctactgttcttgtccccttttttagatatgtcaaaaaaaattaagttttctagtcctgttcttttttttttttaagtttttgtttgtttcagtttattttttgggatgatgccatctcattcatcatgtgactgtgcccattcctgcatggacctttcccaagcgctagcataggtgcaaaatccatcagagccattgttttcataaaaaccaagcagaagtgaagagaaaagaggaggactgatggaaagacagactctggacagctgcacggcttgtgaagtgagctaaatgcaccacatgatgagatgctcctggg

SEQ ID NO: 290298 - DNA, 1000 bp, Homo Sapiens
ctacacaacgtaaaatcatttgtttcttttgactcaaattgtattgcttctgttcagatgatctttcattcaatgtgttcctgttgggcgttactagaaactatggaaaactggaaaataactttgaaaaaattggataaagtataggagggttacttggggccagtaaatcagtagactgaacattcaatataataaaagaacatggggattttgtataaccagggataataaaaagaaaaagaagttaatttttaattgatgtttttgaaacttagtagaacaaatattcagaagtaacttgataagatatgaatgtttctaaagagtttctaaaggttcgaaatgctccttgtcacattagtgtgcatcctacaaaaagtgatctcttaatgtaaattaagaatattttcataattggaatatacttttcttaaaaaaaaggaacagttagttctcatctagaatgaaagttccatatatgcattggtgaatatatatgtatacacatacttacatacttatatgggtatctgtatagataatttgtattagagtattatatagcttcttagtagggtctcaagtaagttcattttttttatctgggctatatacagtcctcaaataaataatgtcttgattttatttcagcaggaataattttatttattttgcctatttataattaaagtatttttctttagtttgaaatgtgtattaaagttacatttttgagttacaagagtcttataactacttgaatttttagttaaaatgtcttaatgtaggttgtagtcactttagatggaaaattacctcacatctgttttcttcagtattacttaagattgtttatttagtggtagagagattttttttttcagcctagaggcagctattttaccatctggtatttatggtctaatttgtatttaaacatatgcacacatataaaagttgatactgtggcagtaaactattaaaagttttcactgtt

SEQ ID NO: 290299 - DNA, 927 bp, Homo Sapiens; identical to SEQ ID NO: 117831

SEQ ID NO: 290300 - DNA, 1000 bp, Homo Sapiens; identical to SEQ ID NO: 117832

SEQ ID NO: 290301 - DNA, 1000 bp, Homo Sapiens; identical to SEQ ID NO: 117833

SEQ ID NO: 290302 - DNA, 1000 bp, Homo Sapiens
ttctttttccatgaaatgtctttaaaggatgaattagcatggtcttaaaatacatttctgaggttactagctgtattttgaattgtgagcaaaatgccgagaaacccagttggcatttatacaaaatgttgacctcaggtctatagttcttaaatgtggctaattctgtaacatagtcttggtattttttaattatgaatgcatatcctatttccaggcaggctctcttacttgaacacaaatccaaaaactaatttagagtcttttttgcccagatcttttaagacttacaccccagagatttaagaagaaaacctctaaatttcaaaattatgaagaattacagaattactcatttaaggtactttaaaagaagtttgtacattgtcaaagtaaattttaattcaaatcatgtctgtaaaacttgacgtattttgtgtatgcatgttttcattttgcaaatatttaatatatagacctatgatgtacaggtacgacatgtataggttacctagatgttatgagaaattttagtttattgtgagtactcaagttgcttagagagccaccagggtgatttgctgctggctttctatcatttttatgttttaatgcaaaggaaattttaaaatgttctggaagtgtttttgattaagcaatgcagcctagaagcaatggttctgttcaatcattcagatgttagtggaagcataaaagtcaagactgcatgttgaaacctttcttttgatagttactgaactgcttggttaaactaaatggaaccatgtgctaatttttcacaattattgacctgtattgattgccactgtagtttggtatttccctttactttggtggcctgcttccctcatgccctggaatacaactcagagctccaggcagcggaaccatctattgttttgtttgccagaaagtgcaccctgtatggtctcctgtctaagttggaaatattatgcatgtgcaggactattcgagtatt

SEQ ID NO: 290303 - DNA, 1000 bp, Homo Sapiens
tgccaaacctgccttgcacaggacagcccctgcaacaaagaattatccagacaaaaatatcaatggtgctgaggttgagaaaacctgacttaaggggctgggatgcttttgaactagcttaaggcccaggactgtggagtgtgtggaccaccccacagaggagggactcagatttatttactcttgctggatctgtagtgatggagttccttctggtgtcagccccacaggaggctcccaggcctccctcacttcccatacccagtctaggagctccttctggctcccaagcacccagagctttcctccgccttttagttttggttcctccactggaatgtaggctcctcacgggcgatggctgtcttttcttgactttgtatcttcactgccaagcaaaaagtctgccaagtgggaatgtttaataaatattcattgaataatgaatgaaccatcttcgtacatgaataataatactgtcttacgtttttctggtgctttataatgtatacattacatctgagtattttattttatttaattttcaaaacaatcctttaaggtcaacattgttatccctattttgctgatgaggaaactaaggttagaaacattttgatttcctctaggacgtatagctaggaagtgttactatcttgatttgaacaaattttctggtgctaagtctgatgttctttccatgaatcattgtggtggttgagatggagctttgtaatgggaataaaacagtaccttaggttctttctgaaaaggaggtatctagcaatggataaatagataccactgaatgaaattaaatgttgattaggaacaaatttaaggcttaaaaaatactttatgagcagcaagattgctttaacttttaaaatgaagctttggttctctgatttgtaatgagcacctggacatgtcaattaaaatgcccatttgtgaagcttactcaataaaactttaaattgtcaaaaaaaaaaaaaaaaaa

SEQ ID NO: 290304 - DNA, 1000 bp, Homo Sapiens
agcaagtgactgctttcaagcagcagtcgacatgtaaatgaaggtgttcttagaattcgcattttgccagctcagcgcacctccacaacgaatgaaatgctccgtatgatttgcacaaatgacatagacctccccaaaagttaactggctctccttcctcacacagttcatcataacccaaccccccacccccgggtcatgaaaatcacagaacttataaacacattgaaccctagatctcaggcttcctgacctaccgccagtggccccttgctggccaccctatagggtcctccttccctggcagccccccatgtgggagaaatacctgattctcccaatctgcagtgggagagctttgctgaattccatcccaaagtcaaacatgggcaagaggtgaggatttcacttttaccctcaagtccgatttgtctgtgattttaaactaactgtgtatgtattgatgtttggaagattgtttgaattttaaagtgataatagtacttaatgttatccagtattgttcattaaatggtgttatcctaaagctgcacttgggatttttacctaacgctttactgattctctcaagcacatggcaaagtttgatttgcactccgttcatttctgacacgttttgctgcctcctacctttctaagcgtcatgcaaattcgagaatggagaaggacgctgccggtccctgagcggtgtggagagggcggaaggtggactccagcgcagcttgaggggctgaggacggaggctgcagcatctgtgtcgttctactgagcacgcttctctgcctcgctcctgactcagcactttgttcactggctcagcagttatgtttacacatcatttttatgttcctgctttgtaattcatgtttgagatgggtggccactgtacagatatttattacgctttccagactttctgaatagatttttttgaataaacatggttttatgaagtgtaatctttttctagcctaacaat

SEQ ID NO: 290305 - DNA, 1000 bp, Homo Sapiens
gtacccactttctgctctttggagagaacacaggttatcaagttcatctctcttgactactcttatgatagctgatgccacagagcctatgggcaaatgccagacccagggttagacacaaggacctgaagtgacatgacggcgggacaggggaaatgtgactttctaattaggcattttatgttagtcacagtcttgaatgtataaacagcactaagactctcaggtcaggtaccttggtgatcagctactagttcttccagccctcattgaggtaacaagataaagacaaatccacttctttggccaaattcaggctttggctttatgactttcccacagagactggaatgcgtcagcctgagaccactggcctattttctcagctgccctcttgaggtcctttaacactcaaattcccagctccccactgaggtgttgtgatgcttgccttttgacctccccatcccctttagtccctgcttactactttgacattcacatcctcagtgtctcagtcttttttgccgagaaagcacagtagtctgggactgggcatttatcttctctgactgaaaatctctccttggtcttaaggaaaatactaacattgaactcactgacatgatcttagcttctttaatcagactttgtgacttaaaagtttgggggttttctttgaaagtttccagccctattcagaaagcaactcttggctgtgtgcatttttcaactccaagcagcccaggggtaagtaaacaaagtatggatgaaggtcagattttcttgtcagtttctgagaaacctggcagcctgctgttaacaacacaggccagtattgggttttattgaatttggtatgtgaccaaggtcggcctaaaggatggcgcaggtcctgggcaggaaagaatttttcctttatcacataactgtaatatttggttgctcagcataagtgatggaagcaaacactaatttctaataaaattgtgttaaactc

SEQ ID NO: 290306 - DNA, 1000 bp, Homo Sapiens
gaagggcccgaatgacgccctgctgcggtggcccttcaaccagaaggtgaccttaatgctgctcgaccagaataaccgggagcacgtgattgacgccttcaggcccgacgtgacttcatcctcttttcagaggccagtcaacgacatgaacatcgcaagcggctgccccctcttctgccccgtctccaagatggaggcaaagaattcctacgtgcgggacgatgccatcttcatcaaggccattgtggacctgacagggctctaactgccccctactggtgtctgggggttgggggcagccaggcacagccggctcacggaggggccaccacgctgggccagggtctcactgtacaagtgggcaggggccgcgcttgggcgcttgggagggtgtcggcctgcagccaagttcactgtcacgggggaaggagccaccagccagtcctcagatttcagagactgcggaggggcttggcagacggtcttagccaagggctgtggtggcattggccgagggtcttcgggtgcttcccagcacaagctgcccttgctgtcctgtgcagtgaagggagaggccctgggtgggggacactcagagtgggagcacatcccagcagtgcccatgtagcaggagcacagtggatggccttgtgtccctcgggcatgacaggcagaaacgagggctgctccaggagaagggcctcctgctggccagagcaaggaaggctgagcagcttggttctcccctctggcccctggagagaagggagcattcctagacccctgggtgcttgtctgcacagagctctggtctgtgccaccttggccaggctggctgtgggagagggtctggtcccacgccgcctctgctcagaccactgtgtgggaggtgcacagcacagcctgcgggtaaagtgtgagagcttgccatccagctcacgaagacagagttattaaaccattcaaatctctgtggtcaaaaaaaaaaaaaaaaaaaaaa

SEQ ID NO: 290307 - DNA, 1000 bp, Homo Sapiens
ctgtacaagtggataccccagaatgatcttcttggtcacccaaaaaccagagcttttataactcatggtggagccaatggcatctataaggcaatctctcctagaatccctatggtgggcgttccattgtttgcagatcaacctgataacattgcacacatgaaggccaagggagcagctgttagtttggacttccacacaatgtcgagtacagacttactcaatgcactgaagacagtaattaatgatcctttatataaagagaatgctatgaaattatcaagaattcatcatgatcaaccagtgaagccccttgatcgagcagtcttctggattgaatttgtcatgcgccataaaggagccaagcaccttcgggttgcagcccacgacctcacctggttccagtaccactctttggatgtgactgggttcctgctggcctgtgtggcaactgtgatattcatcatcacaaaatgtctgttttgtgtctggaagtttgttagaacaggaaagaaggggaaaagagattaattacgtctgaggctggaagctgggaaacccaataaatgaactcctttagtttattacaacaagaagacgttgtgatacaagagattcctttcttcttgtgacaaaacatctttcaaaacttaccttgtcaagtcaaaatttgttttagtacctgtttaaccattagaaatatttcatgtcaaggaggaaaacattagggaaaacaaaaatgatataaagccatatgaggttatattgaaatgtattgagcttatattgaaatttattgttccaattcacaggttacatgaaaaaaaatttactaagcttaactacatgtcacacattgtacatggaaacaagaacattaagaagtccgactgacagtatcagtactgttttgcaaatactcagcatactttggatccatttcatgcaggattgtgttgttttaactgttgttgaggaagctaataaataattaaattgt

SEQ ID NO: 290308 - DNA, 1000 bp, Homo Sapiens
aaagctgatgagctgtacttcagaaaaaaataataatttccatgttttgtatatatctgacaaaactggcaacatcttacagactactgacttgaagacaacctcttttatatttctctatttctgggctgatgaatttgttttcatctgtcttttcccccttcagaattttccttggaaaaaaaatactagcctagctggtcatttctttgtaaggtagttagcaattttaagtctttctttggtcaacttttttttaatgtgaaaagttaggtaagacacttttttactgcttttatgtttttctgtcttgttttgagaccatgatggttacacttttggttcctaaataaaatttaaaaaattaacagccaagtcacaaaggtaatggattgcacatagactaaggaataaacttcagatttgtgatttttgtttctaatcttgatgtaaatttacactattataatacatatttattgcttgaaaatatttgtgaatggaatgctgttattttttccagatttacctgccattgaaattttaaggagttctgtaatttcaaacactactcctattacattttctatgtgtaaataaaactgcttagcattgtacagaaacttttattaaaattgtttaatgtttaaagagtttctattgtttgagtttaaaaaagactttatgtacagtgcccagttttgttcattttgaaatctgataaatatatttatatatacttatgtatgtatatataatatatatagaaatctggatatatatgtataaatctttagaacttaaatttttctcgtttagttcacatctatggtagatttttgaggtgtctactgtaaagtattgcttacaaaaagtatgattatttttaaagaaatatatatggtatgtatcctcaagacctaaaatgtcagactggtttattgttaagttgcaattactgcaatgacagaccaataaacaattgctgccaaaaaaaaaa

SEQ ID NO: 290309 - DNA, 1000 bp, Homo Sapiens; identical to SEQ ID NO: 117835

SEQ ID NO: 290310 - DNA, 1000 bp, Homo Sapiens; identical to SEQ ID NO: 117836

SEQ ID NO: 290311 - DNA, 1000 bp, Homo Sapiens; identical to SEQ ID NO: 223152

SEQ ID NO: 290312 - DNA, 1000 bp, Homo Sapiens
gcaaggtcctgcctgccatcagatccgaggtgcctcctgcagtgaccccttttcctggcatttctcttccacgcgacgaggtctgcctagtgagatctgcatgacctcacgttgctttccagagcccgggcctattttgccatctcagttttcctggaccctgcttcctgtgtaccactgaggggcagctgggccaggagctgtgcccggtgcctgcagccttcataagcacacacgtccattccctactaaggcccagacctcctggtatctgccccgggctccctcatcccacctccatccggagttgcctaagatgcatgtccagcataggcaggattgctcggtggtgagaaggttaggtccggctcagactgaataagaagagataaaatttgccttaaaacttacctggcagtggctttgctgcacggtctgaaaccacctgttcccaccctcttgaccgaaatttccttgtgacacagagaagggcaaaggtctgagcccagagttgacggagggagtatttcagggttcacttcaggggctcccaaagcgacaagatcgttagggagagaggcccagggtggggactgggaatttaaggagagctgggaacggatcccttaggttcaggaagcttctgtgtaagctgcgaggatggcttgggccgaagggttgctctgcccgccgcgctagctgtgagctgagcaaagccctgggctcacagcaccccaaaagcctgtggcttcagtcctgcgtctgcaccacacattcaaaaggatcgttttgttttgtttttaaagaaaggtgagattggcttggttcttcatgagcacatttgatatagctctttttctgtttttccttgctcatttcgttttggggaagaaatctgtactgtattgggattgtaaagaacatctctgcactcagacagtttacagaaataaatgttttttttgtttttcagaaaaaaaaaaaaaaaaaaaaaaaaaaa

SEQ ID NO: 290313 - DNA, 1000 bp, Homo Sapiens
atatttttaagctcctctgatgcagcagcaatgcaaattatgacatagtgaatatagaactatgcagtatttaagcctcaacaatccaaatctacaaactttaacaatgcaagtcttactctaatttttaagtatttttgttggtacttacatgggttataaatcctctctctggacatcaatgtagagtccatctttcaagcactttaatttttttagctgccaaagggtatgaattacattattgtatgctaatttccctgaaatcaatgccttctatgttcaccacagggatacaagcctgttatgtttgatgggaaagaccactacaatctaatggtgatctaaaataacttttttgggctgggtgcagtggctcatgcctataatcttagcactttgggaggccaaggtaggaggattgcttgaagctaggagtttgagaccagcctgggcaacagggtaaggtcctgtctctacaagatcaaaaacttagccgggtatggtggtgcatgtgtgcctgtagtccaagctacttgaaggctgagacaggaggatcggttgagcccaggaggttgtggctgcagtgagctgtgatgtgcccttatgctatagcctgggcaagagcgtgagaccctgtctcaaagaagaaaaaaagagaaaaataactcttttgaacaaacagacaaattagctagtagtatggagatgtataccctctattacacacataaaaccgtaacaaaattcattgtggtgtattataattagttttgtgaatagaaaaataaagcacttatgtttaaatttgttacagtgacttttaaaggattaatgttgaatcacattgtcagaattttttcctcctcgctgttcaattttgtagtttttactctcaaaaaatgaaattctcaaaattatatagctttttgttttgtttgaataaatgattcattcctgttaaaaaaaaaaaaaaaaaaaaaaaaaaaaaaaaaaaaaa

SEQ ID NO: 290314 - DNA, 1000 bp, Homo Sapiens
atcaggatatagaaaaacaaacgtagtgttgggatctgtttggagactgggatgggaacaagttcatttacttaggggtcagagagtctcgaccagaggaggccattcccagtcctaatcagcaccttccagagacaaggctgcaggccctgtgaaatgaaagccaagcaggagccttggctcctgagcatccccaaagtgtaacgtagaagccttgcatccttttcttgtgtaaagtatttatttttgtcaaattgcaggaaacatcaggcaccacagtgcatgaaaaatctttcacagctagaaattgaaagggccttgggtatagagagcagctcagaagtcatcccagccctctgaatctcctgtgctatgttttatttcttacctttaatttttccagcatttccaccatgggcattcaggctctccacactcttcactattatctcttggtcagaggactccaataacagccaggtttacatgaactgtgtttgttcattctgacctaaggggtttagataatcagtaaccataacccctgaagctgtgactgccaaacatctcaaatgaaatgttgtggccatcagagactcaaaaggaagtaaggattttacaagacagattaaaaaaaaattgttttgtccaaaatatagttgttgttgatttttttttaagttttctaagcaatatttttcaagccagaagtcctctaagtcttgccagtacaaggtagtcttgtgaagaaaagttgaatactgttttgttttcatctcaaggggttccctgggtcttgaactactttaataataactaaaaaaccacttctgattttccttcagtgatgtgcttttggtgaaagaattaatgaactccagtacctgaaagtgaaagatttgattttgtttccatcttctgtaatcttccaaagaattatatctttgtaaatctctcaatactcaatctactgtaagtacccagggaggctaatttcttt

SEQ ID NO: 290315 - DNA, 1000 bp, Homo Sapiens
gggagtcaaacagactgctgtctgcccttatacgacacagtaaatcaaaagatgtaattaaaaccattgtgcagagtggtggcatcaagcatctagttaccatggcaactagtgaacatgtaataatgcagaatgaagctcttgttgctttggcattaatagcagctttagaattgggcactgctgagaaagatctagaaagtgctaaacttgtacagattttacatagactgctagcagatgagagaagtgctcctgaaatcaaatataattccatggtcctgatatgtgctcttatgggatctgaatgtctacacaaggaagtacaggatttggcttttctagatgtcgtatccaaacttcgcagtcatgagaacaaaagtgttgcccagcaggcctctctcacagagcagagacttactgtggaaagctgagaactgcccgatacacggcatcatcccatctctaatttcccctctgtcctccatccagcggcttcttccgcttcattctctaccataccacttgtgcatgcatgtgatgttctaataccaattgaagaaccgctgtaggtacctccctaataagatttctaaacctatagttagtgtgatcatgactttgtcaaaggcaagtctccacccataaccgttctcttgtattcctgttgcttgagctacattaagtagaatgtgcatgttgtagtcctatgatgatgtaaacttggtactacataatgacttgctccacacatgcagtaaactacataatgatgtactggtaaactagaaacaaagaatgcagcaggatctgtctagcttattaaagatgaaactgaattggaaaaatagctccattttttggtgcttgggaagcacagtgaccaaaaaagttgtatggctgcttattcattagtctttcctactgatgtcaaatccatggtacctagagttaaataaaattccaatgctcttactctttaaaaaaaaaaaaaaaaaaa

SEQ ID NO: 290316 - DNA, 1000 bp, Homo Sapiens
aatcatccaggctttgctggaagcacgggggtgccattcccgcagaatgaggctaatgccatggatgtggtggtccagtttgccatccaccgcctgggcttccagccccaggacatcatcatctacgcctggtccatcggcggcttcactgccacgtgggcagccatgtcctacccagatgttagtgccatgatcctggatgcctcctttgatgacctggtgcccttggccttgaaggtcatgccagacagctggaggggcctggtgaccaggaccgtgaggcagcatctcaatctaaacaacgcggagcagctgtgcagataccagggtcctgtactgctgatccggagaaccaaggatgagatcatcaccaccacggttcctgaggacatcatgtccaaccgaggcaatgacctcctgctgaagctcctgcagcatcggtatccccgggtgatggcagaggagggtcttcgagtggtgaggcagtggttggaggcctcctcacagctggaggaagcctcaatttatagccgatgggaggtggaagaggactggtgtctgtctgtcctccgctcctaccaggcagaacacgggcccgacttcccctggagcgtgggggaggacatgagtgcagatggacggcggcagctggctttgtttctggctcggaagcatctgcacaactttgaggccactcactgcaccccactcccagcccagaacttccagatgccctggcacctctagggaccaactgggactcattatggaagaatggggtgagaggagacatgaggaaagaccctcttatttgtgattctctgtgttcatgttgctgtttatagtttgtggaaagtgggggaccatcccccttctcaccactgttcctcttgcacgtttcccctcattcatgtggctgtacttaaccttctccaacatacatcctgcattacatgaatggattattcctaataattaataaaaaggtattttttctact

SEQ ID NO: 290317 - DNA, 1000 bp, Homo Sapiens; identical to SEQ ID NO: 223154

SEQ ID NO: 290318 - DNA, 1000 bp, Homo Sapiens
aggccacgtgcggtggctcatgcctgtaatcccggcactttgggaggcctgagtggatggatcacttgaggtcaggagttcaggaccagcctggccaacatgatgaaaccctgtctctactaaatatacaaaaattagttgggtgttacggtgcatgcctgtaatcccagctactcgggaggctgaggcaggagaattgcttgaactcgggaggtggagattgcagtaagccgagatcgtgccactgcactccagcctgggtgatagagcaagactgtctcaaaaaaagaaaaaaaagaaaaaattttaatttaatccttctgtagcaaacaggcattcagaaccattccattgatcttaataaagctgctctttactgtttctagtcaaaaatgagacttcgatcaaaccataagattttatactgcagatagtcagcttcaccaaagccgcagaggaaacatgtcgagatcaggcttcctgcttgatagtctcttgactaccattaaaacgaatattgggaggtcatgaaagtcattggtaggccattagcattgatatctttaaaacatctaccctaaaccatctgctatggacccataataagaggcctgttgtatatgaaattgtctagaattcaggtgcaggtctttgccggttaagtaagggagcaacacgtaaaatgggagaggagtggggtgtactcacttgcctcctcttttgtcctgatttaaccagcatttttcaaccctgggaaaatttgcagaatctaagttgattgtaatgattttgagctgcagcagctttaactcttaccctttttccacatagttatggtgtttgagttggaaagaaacaactataggtagctacacgtacataattatctctttattcacaaagggtatagtaaaattgattgtaaataactttctaagtgccaatattcaaaacttttggattaaaatgtatttttcaccgtgcaaaaaaaaaaaaaaaa

SEQ ID NO: 290319 - DNA, 1000 bp, Homo Sapiens
aaatccctccccacgtggggatgagaaccttcctgctgtgatgtgacaccttcggggacattgaccactcaaaactcagatcatctcgcccaccctggagagtgcagagctatctgtagacttaggaatacttgatgggcagcggtgcagaccccgggcacctgcgtgcagcctcctgttctcggcagcttctgtcgctggccctggggtccccacagctgcagctctcctgtgaggttgcacggcatcagaaccatcctgaccttcttagggacgtgcctggaaccacctcgtccacgtccacgtccacctgggggcctcgggaggctaggcccctcctcaaaggcccaccagcccggcgctcatgctgagccccaggcacgcagggccggccacctctctcctgaagccattggccgctcctccacccagtgcttctgcccatgcctgccccagcagcccctctgcacggtcaccatcgcctgggcctgcccacagcactggtgctcacctctacctcctgtcctcaggccgtgcggcacgacatggccagcacgcagaaggagccctcccgggacccaggaccccccgtggtggactccgcggcacatgcttcccaaggtggtcccacggagggtgttactgggcaccagtggactcgccccatggcccgttcctgggagatgagggccgtggcctgcatgaactaccagatgagtaagggaaccccaggcaggcggccctgccacagcccccaaagacactggcctcctgctccagcttccctgtcctggccccacctgtcctgttgctgccagcagggcccttgtttggggttatgaacaaacctcacagactttgaggacctggatggtcctgcattcacggcatcaacactacccgcgctgctgttagacactccgccattcctggttctctccgaaccgttctttgtacagtaaatgtaattcagctgtggtccccaaaaaaaaaaaaaaaa

SEQ ID NO: 290320 - DNA, 1000 bp, Homo Sapiens
cacttttctaaattttatgtccaatgttggagaccccaggaatatctttttcatttattttccactttgttttcaatttaatcagacagttggaaccaagatgatatgggtagcagtcattggggattggttaaatcttatatttaaatggatattatttggtcatcgaccttactggtgggtccaagaaactcagatttacccaaatcactcaagtccatgccttgaacagttccctactacatgtgaaacaggtccaggaagtccatctggccatgcaatgggcgcatcctgtgtctggtatgtcatggtaaccgctgccctgagccacactgtctgtgggatggataagttctctatcactctgcacagactgacctggtcatttctttggagtgttttttggttgattcaaatcagtgtctgcatctccagagtattcatagcaacacattttcctcatcaagttattcttggagtaattggtggcatgctggtggcagaggcctttgaacacactccaggcatccaaacggccagtctgggcacatacctgaagaccaacctctttctcttcctgtttgcagttggcttttacctgcttcttagggtgctcaacattgacctgctgtggtccgtgcccatagccaaaaagtggtgtgctaaccccgactggatccacattgacaccacgccttttgctggactcgtgagaaaccttggggtcctctttggcttgggctttgcaatcaactcagagatgttcctcctgagctgccgagggggaaataactacacactgagcttccggttgctctgtgccttgacctcattgacaatactgcagctctaccatttcctccagatcccgactcacgaagagcatttattttatgtgctgtctttttgtaaaagtgcatccattcccctaactgtggttgctttcattccctactctgttcatatgttaatgaaacaaagcggaaagaagagtcagtag

SEQ ID NO: 290321 - DNA, 1000 bp, Homo Sapiens; identical to SEQ ID NO: 223157

SEQ ID NO: 290322 - DNA, 1000 bp, Homo Sapiens
caattttaaatttatattgtgtgtgatgttcaaataaagtggtatctacattcatgtgatttatgggtcagcatgaccattaattactgagtagaaattgactaaactttgatttcctttttttaaatcgtgttgcatttgattcctgagcaaattccctcaaagtgaactcttgttcttaaattttgaattttatggtgagattgtaaagatagaggcaattgaaacattgttccttatttatgaactgcttgaagtgaatacttaatttaagtttgcactttaataccaaacttaaaaccaaacactcatttaaaagtaggttaagtgatcatggatcattgttattagctttgtggctttgtgaaattctaaaggaatcaaataattcatcatgatttaaattttctagagattttgatttttttataatgtttctttcctgtagattgtgttcttgtttctctctctctctctctctctctctctctctctctctctctctctctctctctctcaaaattacagtgttcattgtcattgacctcagcagcaaatttgacttgaattcacttaggatcgcaggaatcaggggaaagtgattttaaaggtggtttctccagcacattttaagaaaagggaccaaaagttattttagcttcctcaatagattgcatgttgcttattaggataataaattaatattaaatgcaatatatgtcttgtctttattatggcatctatttaggagttgttcaaatcactgcagtagggctctgcaaataaaataatgtaacctattatcatggatctaatgtactgtaactttatcagtgaaaggtaaaatctcaaataacaagtacaaacattgaacaattacctataaagatttgtaaaagtaaaatttttccaatagatttcattcttgtcattttgtaagacgaccctgcagtccacctgtttgtaacttttttaataaaatagacatctgtattactga

SEQ ID NO: 290323 - DNA, 1000 bp, Homo Sapiens
ctggctacatggcctactgtccttcctggctgccctgcatgggctccatgctgttctgagcctacttactgcccaccctttgcacttcgcctgcctctttggtctcctgcaggccttggtgctggctgtcagcctccgggagcccaatggggatgaggcggccactgactgggagagtgaggggttggagagggaaggtgaggagcagaggggagacccgggaaaggggctgtgaccgtggggtgggggcaaagggtgaagagagtgtgggctttaggagaaaagtgtgaggcatgacccaaattgtaagcatagggacctcagggatggggaagaaacccgagtacgagggtgcagggccccccttcatacacaggagagaacagaactatttagggtgtttgtgtttatggacagtgagggcactgctcttggattcaccagctgttatttttgcttttacttttctcccaccttcagttttttttttttttccacctccactttttaaaagcaaaaaaaaaaaaaagtatgatggtggtgaataaagaccaaagggtcctctctacctttgaaaactctcctggggtggaggagaccagggcaggatagacagacctctgcagtaagagagtggttgggaaacccagggtgttccttggatctcaggatctgagccatcgagggaagagtggggctgctaggcaagtggattagggggtctggatagggccccacaggtgacagggagcctgcagggcggatctggtgatcatgggagccagagggagtggggacagtgcaggcagtattggcaggagggccagtgcagaagggctggtagctcaggcagtgtgggggaagcactgaagcctgtagtccccacttgggggctaggggtttgctcactcagcaataaataactgtgtcacatcaaatcctaaatataccactacaaagtgagagttactgccactctgttcttactgacaccgtccag

SEQ ID NO: 290324 - DNA, 1000 bp, Homo Sapiens; identical to SEQ ID NO: 117839

SEQ ID NO: 290325 - DNA, 1000 bp, Homo Sapiens; identical to SEQ ID NO: 117840

SEQ ID NO: 290326 - DNA, 1000 bp, Homo Sapiens
tgctccccagcccacccacccccctgtacagaatgtctgctttgggtgcggttttgtactcggtttggaatggggagggaggagggcggggggaggggagggttgccctcagccctttccgtggcttctctgcatttgggttattattatttttgtaacaatcccaaagcaaatctgtctccaggctggagaggcaggagccctggggtgagaaaagcaaaaaacaaacaaaaaacaaaaccctggagtgttaggaggagagtgaagtagaggggtgaggaagggtaaggggcagggctggtttcagctgggggctctcaccagccctcctttcagcctctacaacagagcagcttcccagacttctccaggaacccagaaacgggatggttgtcggcaaaggttgggagtggcttttcctctggtagccacacacctgagcactacggacagggaggcaggtgccaccttgacacctctcttccatagcaatgggaaagtgatgagtgcgggagtcctgaggagatgtggcctgcagacaacatgcagccatgcagggacccaggactgtaacctggggaggacgcgggtccctgcaaggaagagtagatttggagaggaaggatggaggtggactctcaccccattccccccggaaatgaacaaagccgggccctttccataggaactgcccttggagatagcagagtgtggctgcccctccttgctccagcagcagtgggagaggcactgctctggggcctgaactgcctctgcttccccccctgaggggcccctcactcttacccaagactctggaattgttgcacggcaaccactcctcccatggcattgctcagcaactacttctcccttcccggccaccctgtgcccccttcctggtcccaacgccagcccttcatccttcctccctcagcagccaggcagacataacaacaaactactaaaaggagcttcactgcaaaaaaaaaaaaaaaaa

SEQ ID NO: 290327 - DNA, 1000 bp, Homo Sapiens; identical to SEQ ID NO: 117841

SEQ ID NO: 290328 - DNA, 1000 bp, Homo Sapiens; identical to SEQ ID NO: 223158

SEQ ID NO: 290329 - DNA, 1000 bp, Homo Sapiens
gccttggagggaggggaggtctgttaccactggggaaggcagcaggagtctgtccttcaggccccacagtgcagcttctccagggccgacagctgagggctgctccctgcatcatccaagcaatgacctcagacttctgccttaaccagccccggggcttggctcccccagctctgagcgtgggggcataggcaggaccccccttgtggtgccatataaatatgtacatgtgtatatagatttttaggggaaggagagagggaagggtcagggtagagacacccctcccttgcccctttcctgggcccagaagttggggggagggagggaaaggatttttacattttttaaactgctattttctgaatggaacaagctgggccaaggggcccaggccctgtcctctgtccctcacacccctttgctccgttcattcattcaaaaaaacatttcttgagcaccttctgtgcccagcatatgctaggcccaccagctaagtgtgtgtggggggtctctacgccagctcatcagtgcctccttgcccatccttcaccggtgcctttgggggatctgtaggaggtgggaccttctgtggggtttggggatctccaggaagcccgaccaagctgtccccttcccctgtgccaacccatctcctacagccccctgcctgatcccctgctggctgggggcagctcccaggatatcctgccttccaactgtttctgaagcccctcctcctaacatggcgattccggaggtcaaggccttgggctctccccagggtctaacggttaaggggacccacataccagtgccaagggggatgtcaagtggtgatgtcgttgtgctcccctcccccagagcgggtgggcggggggtgaatatggttggcctgcatcaggtggccttcccatttaagtgccttctctgtgactgagagccctagtgtgatgagaactaaagagaaagccagacccctaaaaaaaaaaaaaaaaaa

SEQ ID NO: 290330 - DNA, 1000 bp, Homo Sapiens
tcagaagatcatgtacttatcagaagcctacttcaggaagacagggaagcgatccaaggccaatatcattttcaacacttctcttggagccattttcggggttaagaagtatgcagatgccctgcaggagatcatccaggagcggaacctcactgttaactacaagaaaaacctcattgaagtccgagccgataaacaagaggctgtatttgagaacctggacaaaccaggagagacccaagtgatttcatatgaaatgcttcatgtcacacctccaatgagcccaccagatgtcctcaagaccagtcctgtggctgatgctgctggttgggtggatgtggataaagaaactctgcaacacaggaggtacccaaatgtgtttgggattggggactgcaccaaccttcctacgtcaaagaccgctgctgcagtagctgcccagtcaggaatacttgataggacaatttctgtaattatgaagaatcaaacaccaacaaagaagtatgatggctacacatcatgtccactggtgaccggctacaaccgtgtgattcttgctgagtttgactacaaagcagagccgctagaaaccttcccctttgatcaaagcaaagagcgcctttccatgtatctcatgaaagctgacctgatgcctttcctgtattggaatatgatgctaaggggttactggggaggaccagcgtttctgcgcaagttgtttcatctaggtatgagttaaggatggctcagcacttgctcatcttggatggcttctgggccaaaactgcagtcactgaatgaccaagagcagcacgaaggacttggaacctatccttgtaaagagttccttgatgggtaatggtgaccaaatgcctcccttttcagtacctttgaacagcaaccatgtgggctactcatgatgggcttgattctttgggaataataaaatgaaataatacttttattttctgaataaaagtttgtcactgaaaaaaaaaaa

SEQ ID NO: 290331 - DNA, 1000 bp, Homo Sapiens; identical to SEQ ID NO: 117842

SEQ ID NO: 290332 - DNA, 1000 bp, Homo Sapiens; identical to SEQ ID NO: 117843

SEQ ID NO: 290333 - DNA, 1000 bp, Homo Sapiens; identical to SEQ ID NO: 117844

SEQ ID NO: 290334 - DNA, 1000 bp, Homo Sapiens; identical to SEQ ID NO: 223161

SEQ ID NO: 290335 - DNA, 773 bp, Homo Sapiens
gtgggatatgaagcatgagacggaatgaggtcaccaagagagtgaatgtatataaagcaaagagggtgtccaagggctgagttctgagatacttcaatagcagaagatgatgctgagaagcagaagccagctaaagagactgagaaagtgctggtggtgaagcaccaggaaaatcaacagatcatgctctgtgttagtggattcacaagcaacctgtactcctcaaagaaagatgataagatgaaggagatctctagaaccagcaactggggctcttccttcagtgaaaaaagtgggtgtatgcagactcatccatccatgaatctagattgcagggatgtgacctatgtaatgaacttgctacttattgcctcatcatcatcttcttcaatgacaaaaaagaaaatagtaacaatgaatacgtctcttgggcaaaataaataatgagattgttacagcaacctgatttttgaaaagaaaaaaggaacttcctcgaactaaagcagttaagacctcgacatttgctcacagaaaaagtcgctgagtcgtttctagttgtgaaggtgcaaaagatgcagttatcccttatggaaaattccaagaacttgtgcctaatttgagtcatgcaaacctgagttctgcatgactgagctctgtcactcaatggttgggaaatttgtgatcatctctacgccttgctttctgcatctgtaaagtggaaatgataatatctaccttgtgtgattcctggaagaattaaatacattatattc

SEQ ID NO: 290336 - DNA, 1000 bp, Homo Sapiens; identical to SEQ ID NO: 117845

SEQ ID NO: 290337 - DNA, 832 bp, Homo Sapiens
ccacgcgtccgggtgagtccgtgggtggggtccccacctggttggaaggctgtgggtccgggaacccgagcccaaggagtgggggcggccccggagcgaggctcacactccctgccctgcagatgactgtccacaacctgtacctgtttgaccggaatggagtgtgtctgcactacagcgaatggcaccgcaagaagcaagcagggattcccaaggaggaggagtataagctgatgtacgggatgctcttctctatccgctcgtttgtcagcaagatgtccccgctagacatgaaggatggcttcctggccttccaaactagccgttacaaactccattactacgagacgcccactgggatcaaagttgtcatgaatactgacttgggcgtgggacccatccgagatgtgctgcaccacatctacagtgcgctgtatgtggagctggtggtgaagaatcccctgtgcccgctgggccaaactgtgcaaagtgagctctttcgctcccgactggactcctatgttcgctctctgcccttcttctccgcccgggctggctgaagcaacctacctcaagtctcaggagaattcatgtctgcctggggcccttccgaacctgtgccaactaagggcccccactgtaagcccccgcacccccaccccctgcccagagcaacagcctaaaggcctgccctgatgctctcctcctaccagagtgaagcccacagagtccctccacctccacaccaggccctctctccagttttatcccctgcctaatgctgcgagaagcacagaataaactttttgtcactctcaaaaaaaaaaaaaaa

SEQ ID NO: 290338 - DNA, 1000 bp, Homo Sapiens
ctctaaaaaatgtgctagaccaggcagtacaaatcatcaattatattaaagctcgaccacatcaatccagactattaaaaattttatgtgaggaaatgggtgctcagcacacagcacttcttctaaatacagaggtgaggtggctttctcgaggtaaagttcttgtaagactttttgaacttcgtcgtgaacttttggttttcatggattctgcttttcgactatctgattgtttaacaaattcatcttggctgctaagacttgcatatcttgcagatatttttactaaattaaatgaagttaatttgtcaatgcaaggaaaaaatgtgaccgtttttacagtatttgataaaatgtcgtcattgttaagaaaattggaattttgggcctcatctgtagaagaagaaaactttgattgttttcctacactcagtgattttttgactgaaattaattctacagttgataaagatatttgcagtgccattgtgcagcacctaaggggtttgcgcgctactctgttaaaatactttcctgtaacaaatgacaataatgcttgggttagaaatccatttacagttactgttaaaccagcttcattagtagcacgggactatgagagcctgattgatttaacatctgattctcaagtgaagcaaaattttagtgaactttcactaaatgatttttggagtagcctaattcaggaatacccaagcattgcaaggcgtgcagtgcgtgtacttcttccttttgctacaatgcacctgtgtgaaacggggttttcatattacgctgcaacaaaaacaaaatataggaaaagacttgatgctgcacctcatatgcgaatccgacttagcaatattacacctaatattaagcggatatgtgataaaaagacacaaaaacactgttctcattaaaattggaggagtttgcatgtctcatgataaccaaatgtaagatgaaaataaaagatgatttacttcaaaaaaaaaaa

SEQ ID NO: 290339 - DNA, 1000 bp, Homo Sapiens; identical to SEQ ID NO: 117846

SEQ ID NO: 290340 - DNA, 1000 bp, Homo Sapiens; identical to SEQ ID NO: 223163

SEQ ID NO: 290341 - DNA, 1000 bp, Homo Sapiens; identical to SEQ ID NO: 223164

SEQ ID NO: 290342 - DNA, 1000 bp, Homo Sapiens
cagattagagtggaagaaactgggtcggagtgtctcctttgtctactatcaacagactcttcaaggtgattttaaaaatcgagctgagatgatagatttcaatatccggatcaaaaatgtgacaagaagtgatgcggggaaatatcgttgtgaagttagtgccccatctgagcaaggccaaaacctggaagaggatacagtcactctggaagtattagtggctccagcagttccatcatgtgaagtaccctcttctgctctgagtggaactgtggtagagctacgatgtcaagacaaagaagggaatccagctcctgaatacacatggtttaaggatggcatccgtttgctagaaaatcccagacttggctcccaaagcaccaacagctcatacacaatgaatacaaaaactggaactctgcaatttaatactgtttccaaactggacactggagaatattcctgtgaagcccgcaattctgttggatatcgcaggtgtcctgggaaacgaatgcaagtagatgatctcaacataagtggcatcatagcagccgtagtagttgtggccttagtgatttccgtttgtggccttggtgtatgctatgctcagaggaaaggctacttttcaaaagaaacctccttccagaagagtaattcttcatctaaagccacgacaatgagtgaaaatgatttcaagcacacaaaatcctttataatttaaagactccactttagagatacaccaaagccaccgttgttacacaagttattaaactattataaaactctgctttgtccgacatttgcaaagaggtacacgaggaaatggaattggtatttcattttaattttcatgactactaactcacctgaacttgctattttaaacaaatagttctgtcgacacctaaaatataatctggcttcttgtgtctggactaagttaaaagaattaaaatactttgtaatgtcaaaaaaaaaaaaaaaaaaaaaaaaaaaa

SEQ ID NO: 290343 - DNA, 774 bp, Homo Sapiens
atgaaggtccatatgcttgtaggtgtgctggtcatggtgggcttcacagtaggaaaggttcctgttcccgacatccggacgtgccacttctgcctcgtagaagacccttctgtaggatgcatttcaggctcagagaagtgtaccatcagcagctcatccctgtgcatggtgatcaccatctattatgatgtcaaggttcgcttcatcgttcgaggctgtggacagtacatttcctaccgctgccaagaaaaacgcaacacctactttgcagagtactggtatcaggcccagtgctgtcagtacgattattgcaactcctggtcaagcccccaactccagagctctctgccggagccccatgacaggcccctggccctgcctctgtctgactcccagattcagtggttctaccaggccctgaacctctccctgcccctccccaatttccatgctgggacggagcctgatggcctggaccccatggtcacactgtccctgaacctgggcttgtcttttgctgagctgcgccgcatgtacttgttcctcaatagttcaggacttttggttcttccccaggctggactcttgacacctcacccttcctgaattccacagtgcaaatatctttctgtaacaccctcagcatcctgcactgccctctctgaaaacacccacattctttggtcactgtgatttcttaggcctccgtctgttgtaccactagcatctatatgacttttgtgtaattttctctcttgaactctggtgctgttt

SEQ ID NO: 290344 - DNA, 1000 bp, Homo Sapiens; identical to SEQ ID NO: 117849

SEQ ID NO: 290345 - DNA, 619 bp, Homo Sapiens
tctgcagagagaatggccagcaggaaggcggggacccggggcaaggtggcagccaccaagcaggcccaacgtggttcttccaacgtcttttccatgtttgaacaagcccagatacaggagttcaaagaagccttcagctgtatcgaccagaatcgtgatggcatcatctgcaaggcagacctgagggagacctactcccagctggggaaggtgagtgtcccagaggaggagctggacgccatgctgcaagagggcaagggccccatcaacttcaccgtcttcctcacgctctttggggagaagctcaatgggacagaccccgaggaagccatcctgagtgccttccgcatgtttgaccccagcggcaaaggggtggtgaacaaggatgagttcaagcagcttctcctgacccaggcagacaagttctctccagctgaggtggagcagatgttcgccctgacacccatggacctggcggggaacatcgactacaagtcactgtgctacatcatcacccatggagacgagaaagaggaatgaggggcagggccaggcccacgggggggcacctcaataaactctgttgcaaaattggaaaaaaaaaaaaaaaaaaaaaaaa

SEQ ID NO: 290346 - DNA, 1000 bp, Homo Sapiens; identical to SEQ ID NO: 223165

SEQ ID NO: 290347 - DNA, 947 bp, Homo Sapiens
aattgagtatctggcaagagtaagattaagcagtaatttgttccaaagaagaatcttctaccaaggagcaactttaaagaatgaaattaactttcttcttgggcctgttggctcttatttcatgtttcacacccagtgagagtcaaagattctccagaagaccatatctacctggccagctgccaccacctccactctacaggccaagatgggttccaccaagtcccccacctccctatgactcaagacttaattcaccactttctcttccctttgtcccagggcgagttccaccatcttctttctctcgatttagccaagcagtcattctatctcaactctttccattggaatctattagacaacctcgactctttccgggttatccaaacctacatttcccactaagaccttactatgtaggacctattaggatattaaaacccccatttcctcctattcctttttttcttgctatttaccttcctatctctaaccctgagccccaaataaacatcaccaccgcagatacaacaatcaccacaaatccccccaccactgcaacagcaaccaccaggcacttccacaaaacccacaatgacgatcagctcctcaacagtacctatctcttcaacaccagagcctgccacctccatatcagcagcaacccccgcagcatctactgaaaatactactcaaattctcgccaaccgtcctcacacagtattgctcaatgccactgtccaagttacgacttccaaccaaactatattaagcagcccagcctttaaaagtttttggcaaaaactctttgccatttttggttgaacatgcaataaatgatattttccaaactgctctgatatcttagaagaaataaactgcaatgattttgatggaaccaaccctgatctaaccagcacactaaataaagtatttgagcaata

SEQ ID NO: 290348 - DNA, 1000 bp, Homo Sapiens
caatgtgcccgcgccgggcctggtccccggcatacccagcgtggccagtatggcgtggtccggggcctcgtccagcgagtcgtcggtggggggctcactcagcagctgcacggcctgccgcgccagcgactcgtctgcccgcagttccctgcacaccgactgggccctggagccctccccgctccccagcagcagcgaggaccccaagtccctggacctggaccacagcatggacgaggcgggcgcgggtgccagcaacagcgagcccagcgagccggacagccccacccgggaacacgcgcgccgctccgaggccttacaggggctggtcactgagctcagggccgagctgtgccgccagcggactgagtacgagaggagtgtgaaaagaatcgaagaagggagtgctgacctgagaaaacgaatgtcccggttagaagaagaactggaccaggaaaagaaaaaatacatcatgctggaaataaagctgcggaactctgaacgggcgcgggaggatgcggagaggaggaaccagctgttgcagagggaaatggaggagtttttttcgaccctaggaagcttgactgttggggcaaaaggtgccagggccccaaagtaaaaggaatggcagagctcacttctgtaccacgtctgctggtctccagccttgtatggagttagaagcgtctgtatctctggagcagccaggcgctctggagccagctggagagagagagatcctgatacctctgtggggactgtggggacttttgggaccccacacactccaggtgggatcagatgctgctccaaccatgcagttcctggtgagggtcagaaggggacggtaccaagagtagcgcttagcccttacccaggaaatatccttcatggccacagaaatggagggcgcccaggatccaggcagccaccgggaacagtcagctttctttattaaatgtgctcacaaagcaaaaaaaaaaaaaaaaaaaaaaaaaaa

SEQ ID NO: 290349 - DNA, 1000 bp, Homo Sapiens; identical to SEQ ID NO: 117850

SEQ ID NO: 290350 - DNA, 1000 bp, Homo Sapiens
agcatgacatttagcagtaatccattaagggcagtacctctaacaaggacgccttccagcttcagctatgttacttacgtttgatgctacttaaagtaatgaatgacgttttaaggaatccctaaccctactatcagaaaaggtgtttgttaaagagccttctcttgtgtgttacgcatgaactttggtctgtaggtgttaaatggaacctctccatgtgtatatagtatttccttgtataaagcactttactacctaccacttgtgttgtgaacgtttggtgactgctgttgaaagaaggaaaagggtgtgtgagaaagcctactgaagcagctgcacggccactacatgtggacaaaagtgaacatataaaagaagttgtgctatttaactctgaatacttggagaaactaggtgaagatgcaaccagaaaggagaatatgtatgcgtgaagtctcagctttgagckggaggctagaaagagcagccagagaactttttaaaaactaaccagaagagctttaaaataagagaaagaaatcataaatgtagacatatgcttggctaaaggggaaatggactttaaattttaaagagctcatttgcaatgcacttgtatacacttcaaaaattattgtagacacagaatttgttatatttttgtgcttagtatttaaacctgaacattgaaacagttttcctccttgtctttcttaacagtaatagtcattatatttacctgttttttaacacaatgtatgtgatagtcaaaaaatcacagtttttcattattattcatcttctgtacccacgcataaccactatacatagtttcttttgtacttgaatatacaaaacatgaacacagtgccatatgaataatttcacatacagaacctttttttctctgaagtcctgtggacttgcaaatatatatatatattgctttgttaatttgtttttatatttcatatatgtaataaaggaatatgatctgaaa

SEQ ID NO: 290351 - DNA, 1000 bp, Homo Sapiens; identical to SEQ ID NO: 117851

SEQ ID NO: 290352 - DNA, 1000 bp, Homo Sapiens
tataatcgacttttgtttgtgttacatgacttctgtgacttcattgaaaatctgcacaattcagtttcagctctggattacttcagttgacctttgtgaaggtttttatctgtgtagaatgggtgtttgacttgttttagcctattaaatttttattttctttcactctgtattaaaagtaaaacttactaaaagaaaagaggtttgtgttcacattaaatggttttggtttggcttcttttagtcaggctttctgaacattgagatatcctgaacttagagctcttcaatcctaagattttcatgaaaagcctctcacttgaacccaaaccagagtactcttactgcctcttttctaaatgttcaggaaaagcattgccagttcagtcttttcaaaatgagggagaaacatttgcctgccttgtaataacaagactcagtgcttattttttaaactgcattttaaaaattggatagtataataacaataaggagtaagccaccttttataggcaccctgtagttttatagttcttaatctaaacattttatatttccttcttttggaaaaaacctacatgctacaagccaccatatgcacagactatacagtgagttgagttggctctcccacagtctttgaggtgaattacaaaagtccagccattatcatcctcctgagttatttgaaatgattttttttgtacattttggctgcagtattggtggtagaatatactataatatggatcatctctacttctgtatttatttatttattactagacctcaaccacagtcttctttttccccttccacctctctttgcctgtaggatgtactgtatgtagtcatgcactttgtattaatatattagaaatctacagatctgttttgtactttttatactgttggatacttataatcaaaacttttactagggtattgaataaatctagtcttactagaaaaaaaaaaaaaagaaaaaaaaaaaaaaaaa

SEQ ID NO: 290353 - DNA, 1000 bp, Homo Sapiens
atccattcctactgtatttctgtatgaatgtgtttgtgaatgtatgtgtaaaagtctttcttttccctaatttgctttggtggggtccttaaaacatttcccaactaaagaatagaattgtaaaggaaaagtggtactgttccaacctgaaatgtctgttataattaggttattagtttcccagagcatggtgttctcgtgtcgtgagcaatgtggtttgctaactggatggggttttcttattaataagatggctgcttcagcttctcttttaaaggaatgtggatcatagtgatttttccttttaattttattgctcagaaatgaggcatatcctaaaaatcctggagagctgtatttaatgcatttttgcactaattggtccttagtttaattctattgtatctgtttatttaacaaaaaattcatcataccaaaaagtgtaagtgaaaaccccctttaaaacaaaacaaaaaaatgaaataaaattaggcaaattgacagacagtgagagttttacaaacatgataggtattctgctcggcaatttgtaagtttacatgttatttaaggataaaggtaaatcattcaaggcagttaccaaccactaactatttgttttcatttttgtcttgtagaaggtttatatcttgttttaccttggctcattagtgtttaaaaatgtactgatgatgtgcttagagaaattcctggggctttcttcgttgtagatcagaatttcaccagggagtaaaattacctgaaaacgcaagaagttttaaacagcttttcacacaaattagatgcaactgttcccatgtctgagtacttatttaaaagaaaggtaaagattggcctgttagaaaaagcataatgtgagctttggattactggatttttttttttttaaacacacctggagaggacatttgaaaacactgttcttaccctcgaaccctgatgtggttccattatgtaaataaaaaaaaaaaaaaaaaaa

SEQ ID NO: 290354 - DNA, 1000 bp, Homo Sapiens
ccctttttgcccaatgatgtcaccctgtggaacaccatgacgctgcagcagcagtatcagctgaggtcccagtatgtcagtcctttccccagtaactctaccagcgtcttcagaagctcgcccgtccttcctgcccgcgccacggaagaccctcggatttccatccctgatgatgggtgtccatttgtgtcaaagcagtccatttacaccgaggacgactatgacgagaggtctgactcctcagactctagaacactcaacacatcatcttaaagtggtgctggatgggtggtggccaggtgacattttctgtgcgttttgaccctgaggcatctgaggagaggccacatcttgtgtatgccctttccttctgtttgacaaagtgactgtgcttgattctatacattagcaataaaaacataacttatttaacttcttgcacttcactggaaaatgccaaatagctctgttctgtggctttagtgctgaatgtttattgtaaaagagagtctaatgttaagaatagtcttgggaaggctgggtccgtggaagatttatttggggatgtaaagctgaaggtcagccttgcacctaaacccaacctggaatgttaaatgaaataatatacttgaatgcaattttgtaaaagtggattcctcaggatatgtgaaacctaaaggaagtggttctgttgcaaatggactataaacagggacattatattcttacactaaaaatccttgcattttaaagagagatgcacttaagaatagagtgaactgctcatatgcttatttaagcttggacagttttcagagacaaaccccattaagaattactcttttcacatggctgaatcgaaacatgtgtaatgtcaatgtaaaaccaatcacagctgtgaactgcatgaaatgtattgtgaaacgaacacaagattaagctttgtcaggttaatgtagcatgttaaggactctagaaaaaaataaactaaggagacgag

SEQ ID NO: 290355 - DNA, 1000 bp, Homo Sapiens
acaagcaggagatcggcttcggcaattggggccactgaggcgtggcgcccgtggctgcccagcaccttcttcgacccatctcaccctctctcattcctcaaagcttttttttttttcctggctggggggcgggaagggcagactgcaaactggggggctgcgtacgtgcaggaggcgcggtggggctgcgtggaggagggggccacgtgtgagagagaagaaaatggtggccggagatgggagggcccaaggaacctcctgggagggggcctgcattctatgttggtgggaatgggactgggctgacgccctgcattcagcctgtgcctttcctggggtttcttttctgttcttttcggaggagagggcccgagaaggggccataccagggcgcggcgctgggttgccacacttgggaaagcagcccggagctgggtgctggggaaggcggggcgcgtagcctcccgccgccctgcggttgggccggtggaggcccaggcgttgctaggattgcatcagttttcctgtttgcactatttctttttgtaacattggccctgtgtgaagtatttcgaatctcctccttgctctgaaacttcagcgattccattgtgataagcgcacaaacagcactgtctgtcggtaatcggtactactttattaatgattttctgttacactgtatagtagtcctatggcacccccaccccatccctttcgtgccactcccgtccccacccccaccccagtgtgtataagctggcatttcgccagcttgtacgtagcttgccactcagtgaaaataataacattattatgagaaagtggacttaaccgaaatggaaccaactgacattctatcgtgttgtacatagaatgatgaagggttccactgttgttgtatgtcttaaatttatttaaaactttttttaatccagatgtagactatattctaaaaaataaaaaagcaaatgtgtcaactaaaaaaaaaaaaaaaaaa

SEQ ID NO: 290356 - DNA, 1000 bp, Homo Sapiens
tattgtagatttttttcattcatgtgttatttaatttacactgatctctgctattttaaccccccaaataagttatttgtcctttaaggttggttactataatacccctcagtaagattccagtattaatttctgggcagtttgttctctgtatacaattgcaaatgataagcatttttgtgagtgaccacctttgcaatatgtttgttaatttacttcatgttgggttctttctgaaatgtacatctttacatataaaaacctcacattctacttgatttacacttcctagtctacattacatgtggttgaaggttttatacattctatatgcttttactaaatatacaagatttactactagaaatttggagaaagaacactaacacatgtacttgtgatttgttcatgttatattaaaacttgagatttgtgtatttatgtagagtctgtattgacaagactgttgttttttgctccttgagctatataataatctgtgtattggattgttgtcttgatttggtctaaatttgaatatatatgagttacttgaatataacaaaaatgaattttgtttgatagatttatattgtaacctttttctagttcttgaataaatatagcctgctttccctagatgcatttgtgtaggaagtatatacatttccctattactctcatcagctgaagaatatgtactattgtgttactcaaattatgtggctttcattttgttgttttgttgcaagcttagtgttttgtagtggaggttttgtaaatgaaacagttgtaatatctaaggtcaggcacctagtaacagggttttgttaattcttttcagaatcattgaagcagtcttaaagggtcttttgcagatggtacaaattagaacaattagaatatagtattttgagttctagtagtactgagattgacccaaacaaataaaaaactattcaatttctgagtaatagttaaaaaaaaaaaaaaaaaaaaa

SEQ ID NO: 290357 - DNA, 1000 bp, Homo Sapiens
ccacgcagccggggccttctcaacgcctcagtacctcggcgggaccgccatggttctgctgcacgtgaagcggggcgacgagagccagttcctgctgcaggcgcctgggagtaccgagctggaggagctcacggtgcaggtggcccgggtctataatgggcggctcaaggtgcagcgcctctgctcagaaatggaagaattagccgaacatggcatatttctccctcctaatatgcaaggactgaccgatgatcagattgaagaattgaaattgaaggatgaatggggtgaaaaatgcgtacccagcggaggtgcagtgtttaaaaaggatgatattggacgaaggaatgggcaagctccaaatgagaagatgaagcaagtgttaaagaagactatagaagaagccaaagcaataatatctaagaaacaagtggaagccggtgtctgtgttaccatggagatggtgaaagatgccttggaccagcttcgaggcgcggtgatgattgtttaccccatggggttgccaccgtatgatcccatccgcatggagtttgaaaataaggaagacttgtcgggaacacaggcagggctcaacgtcattaaagaggcagaggcgcagctgtggtgggcagccaaggagctgagaagaacgaagaagctttcagactacgtggggaagaatgaaaaaaccaaaattatcgccaagattcagcaaaggggacagggagctccagcccgagagcctattattagcagtgaggagcagaagcagctgatgctgtactatcacagaagacaagaggagctcaagagattggaagaaaatgatgatgatgcctatttaaactcaccatgggcggataacactgctttgaaaagacattttcatggagtgaaagacataaagtggagaccaagatgaagttcaccagctgatgacacttccaaagagattagctcacctttctcctaggcaattataatttaaaaaaaaaaaaaa

SEQ ID NO: 290358 - DNA, 1000 bp, Homo Sapiens
ctggcataaacatgattgtagtagaatttattttccagtaccaatagggaaattattttaagttattacatttactgtattgggaaacttgaggagaactctttagttcataaagcttcaatgtctttttttttttttttcatggaaaaactcaaacctctgttatttgggagctcagtattgtgtggacacttacgagagttttctgcttaattgaagtgtaatataggttgtagaattgttacctgcagttctatggttttgtttcacttcttttcttttttaaagccattctgttctttggatgtgcttgaaagggtgtgtgattacaccattgttaatgctgggtaaaaactatcttcttgcagccttgcctcataacagtggaatttctgatagacaaaccacaggactttgattttaagccaaatccatctccatccctttactgtcaatcttctgtcccagtagtttagcctttgtggcttaggttatgatgcgcctccttctgtgcgaccaatgagacgacttcagcatctttttaaaataatctaagcatcattgaagcagtaacacaaaaaaaaggttcagtattttctttttagtataacttacatcctttcaaataagtctttgccctcatgaagaatccctagaggaagataaggaaaataagtattttccagttttgcttgacagtttctaaacaaacaaaaataaactcaatgaaaggaaagatgtttctttttagctgagatgacagattgcttctctgtattaaatagtctagaagttaaggggatggtcacatttaccatgtattgtgttattagcagttaaattttatgaatatgtttgtaaaattgttgttttatatttcatgtcaaattgaaaagtttatttcttcactattgtacctgtggaaatacaagccattttacaggaaaaaatcttcaaaaactattaaatggatatcagcctgaaaaaaaaaaaaaaaaag

SEQ ID NO: 290359 - DNA, 1000 bp, Homo Sapiens
cacatccttggctgtcaatcccatgcctgcccacgccacacactctgcgatctggcctcagacgggtgcccttgagagaagcagagggagtggcatgcagggcccctgccatgggtgcgctcctcaccggagcaaagcagcatgataaggactgcagcgggggagctctggggagcagcttgtgtagacaagcgcgtgctcgctgagccctgcaaggcagaaatgacagtgcaaggaggaaatgcagggaaactcccgaggtccagagccccacctcctaacaccatggattcaaagtgctcagggaatttgcctctccttgccccattcctggccagtttcacaatctagctcgacagagcatgaggcccctgcctcttctgtcattgttcaaaggtgggaagagagcctggaaaagaaccaggcctggaaaagaaccagaaggaggctgggcagaaccagaacaacctgcacttctgccaaggccagggccagcaggacggcaggactctagggaggggtgtggcctgcagctcattcccagccagggcaactgcctgacgttgcacgatttcagcttcattcctctgatagaacaaagcgaaatgcaggtccaccagggagggagacacacaagccttttctgcaggcaggagtttcagaccctatcctgagaatggggtttgaaaggaaggtgagggctgtggcccctggacgggtacaataacacactgtactgatgtcacaactttgcaagctctgccttgggttcagcccatctgggctcaaattccagcctcaccactcacaagctgtgtgacttcaaacaaatgaaatcagtgcccagaacctcggtttcctcatctgtaatgtggggatcataacacctacctcatggagttgtggtgaagatgaaatgaagtcatgtctttaaagtgcttaatagtgcctggtacatgggcagtgcccaataaacggtagctatttaaaaaaaaaaaaa

SEQ ID NO: 290360 - DNA, 1000 bp, Homo Sapiens; identical to SEQ ID NO: 118880

SEQ ID NO: 290361 - DNA, 1000 bp, Homo Sapiens
tgggacgctgaggcaggaaaatccgttgaacccaggaggcagaggttgtagtgagccgggattgcaccactgcactccagccgggtgacagagtgagactccatctcaaaaacaaacaaactaaggtatggatgcttcagacattacactatatcaaagtgctgactgttaaaaatgatcccaaactaacggtagataaatttatttgtacataactttaaaaggagtagaagattttttggaagtttgtaattacattcaaagtatactttttttgtttgtttgttttccttgagacagagtctctctctgtcgtccaggctggagtgcagtggcacagtctcggctcgctgcagcctctgcctcctgggttcaagcaattctcctgcctcagcctactgagtggctgagattacaggtgcacaccaccacgtccggctgacttttgtatttttagtggggacggggtttcaccatgttggtcagggtagtcttgaactcctgacctcatgctctgcccagcttggcttcccaaggtgctgtgattacaggcttaagccacagcgcccgacccaaagtgttcttttttccttgaaaagaagtacagattttttaaaaagctaatattgctgtgattcaactctcaagttacttgatgctatttcttcatttctattgtattcacatgtgaaagcatgtgatcagttgtcacggcatcaaagataggagagtttctttttttttaggtgggcattatttatgaccttttctttggaagagtaaggatattaaaatgtaacatgcatgatgaaaatctaagtggagatgatatttgtggttaattatgatattgagtggtgcatgaggtaggtgtttagagtaatattcttttgcattatagtaagaacatttaagttttgttaaaattaaaaaattagtagtacgttattttactatttgtacttttatgtaataaaatgcagtacatttttaaattttc

SEQ ID NO: 290362 - DNA, 1000 bp, Homo Sapiens
atgtaaagtaccttatgtattgcactttaaatttctctcctgatgggtactttaatttgaaatgcactttatgcacagttatgtcttataacttgattgaaaatgacaactttttgcacccatgtcacagaatacttgttacgcattgttcaaactgaaggaaatttctaataatcccgaataatgaacgtagaaatctatctccataaattgagagaagaagaaggtgataagtgttgaaaattaaatgtgataacctttgaaccttgaattttggagatgtattcccaacagcagaatgcaactgtgggcatttcttgtcttatttctttccagagaacgtggttttcatttatttttccctcaaaagagagtcaaatactgacagattcgttctaaatatattgtttctgtcataaaattattgtgatttcctgatgagtcatattactgtgattttcataataatgaagacaccatgaatatactttttttctatatagttcagcaatggcctgaatagaagcaaccaggcaccatctcagcaatgttttctcttgtttgtaattatttgctcctttgaaaattaaatcactattaattacattaaaaatcaaattggataaaacaatgttttctttctggtagcgcataataacagagcacaagcatcttttagatttgagcatttgaagattcaaagttgcgaaagagcacaaaccatattaggtaaaatattggccactcgatccttgaaaagaactgtgtggagcctggaaaaaaaaattaggaccacatgtgagatgtttacaagacacccagaacagtggtaaagtgtgcatactagaaaaagcagcaaaataactctttgtggtaacaggtatcaaaacacgggagccgagatgatatagctctgtttcaagaaatatgtgaatacccacctaccaggtgctcagtggaatcaaagatgaatccaagttcacaaatagacttctacttc

SEQ ID NO: 290363 - DNA, 776 bp, Homo Sapiens
atcttcacccaggctggcccctttggtgaaactacaactcccaggggtctgtgcgcgagaaggcaggcgggtttttctaccggaagtccgctctagctctgggccctacaactgcaccctgagccggagctgcccagtcgccgcgggaccggggccgctggggtctggacgggggtcgccatgatccgctttatcctcatccagaaccgggcaggcaagacgcgcctggccaagtggtacatgcagtttgatgatgatgagaaacagaagctgatcgaggaggtgcatgccgtggtcaccgtccgagacgccaaacacaccaactttgtggaggtcttaaacgaatatttccacaatgtctgtgaactggacctggtgttcaacttctacaaggtttacacggtcgtggacgagatgttcctggctggcgaaatccgagagaccagccagacgaaggtgctgaaacagctgctgatgctacagtccctggagtgagggcaggcgagccccaccccggccccggcccctcctggactcgcctgctcgcttccccttcccaggcccgtggccaacccagcagtccttccctcagctgcctaggaggaagggacccagctgggtctgggccacaagggaggagactgcaccccactgcctctgggccctggctgtgggcagaggccaccgtgtgtgtcccgagtaaccgtgccgttgtcgtgtgatgccataagcgtctgtgcgtggagtccccaataaacctgtggtcctgcctggcc

SEQ ID NO: 290364 - DNA, 1000 bp, Homo Sapiens
aataacttttctctccattggttatggtgacatggtacctaacacatactgtggaaaaggagtctgcttacttactggaattatgggtgctggttgcacagccctggtggtagctgtagtggcaaggaagctagaacttaccaaagcagaaaaacacgtgcacaatttcatgatggatactcagctgactaaaagagtaaaaaatgcagctgccaatgtactcagggaaacatggctaatttacaaaaatacaaagctagtgaaaaagatagatcatgcaaaagtaagaaaacatcaacgaaaattcctgcaagctattcatcaattaagaagtgtaaaaatggagcagaggaaactgaatgaccaagcaaacactttggtggacttggcaaagacccagaacatcatgtatgatatgatttctgacttaaacgaaaggagtgaagacttcgagaagaggattgttaccctggaaacaaaactagagactttgattggtagcatccacgccctccctgggctcataagccagaccatcaggcagcagcagagagatttcattgaggctcagatggagagctacgacaagcacgtcacttacaatgctgagcggtcccggtcctcgtccaggaggcggcggtcctcttccacagcaccaccaacttcatcagagagtagctagaagagaataagttaaccacaaaataagactttttgccatcatatggtcaatattttagcttttattgtaaagcccctatggttctaatcagcgttatccgggttctgatgtcagaatcctgggaacctgaacactaagttttaggccaaaatgagtgaaaactctttttttttctttcagatgcacagggaatgcacctattattgctatatagattgttcctcctgtaatttcactaactttttattcatgcacttcaaacaaactttactactacattatatgatatataataaaaaaagttaatttctgcacata

SEQ ID NO: 290365 - DNA, 1000 bp, Homo Sapiens
agctcattttaggttccttccaggtttagaagcttcaaccaaatgaaacttgaatctgtccctcgtgacaattataggaggaaggtatttaaaaccccagatttatgaatgtgtactacatggcttagagaatgtctttgttcttgttcaggtggttataacaaaataccttaagagtggattacaggcatgagccactgtacctggcgaaaaacagtttgttaacacaggcagccaacatcactcaggataagcctcaatgaaaagtaacaaagtgatggcttggaacactgtcttacacagcatttttaaaaaatacaataaatttgtagagataggatgaccaaggacaacagttttaggcttccaaaggtggtaaactatgggatggtaaatatccgagaggaagctgatgcaacaggatttgtctgcagcagcctctggtaccacctctgagtcaagggttgtgtccagtgatggagagtttatatcgtgcctttaggcagaaaaggggagggaaacctgaacttttcctgcactttctgcttcttaattgccttcagctgaaaatcattttttatgtgaaaaaggcatagtctgagctgacgcctctgctttcctccacctgaagagaacctgcgtgctgctcctttgcttcggacctccgcctctgcccgggagaaagcccaggccagcctgctggacaagcagagaccatgagaaggagagttcaggggtcccaatccaggccatcctagaccagccagctccagctgatccgcacgcagccacttcggctaccttctactggccaaagggagtcccagggctcacccagattcagaggtggggaaactgagtccaccacttgagaagagtagctataaagacatatgagcgaggccagctgagcccagcactgcggccaagtcgaagactttaggagcaataaaagtgcttattgtgtttcagaaaaaaaaaaaaaaaaaaaaaaaaaaaa

SEQ ID NO: 290366 - DNA, 1000 bp, Homo Sapiens
tgggtggcaggagagcggacttagagcccccgagggcccctcagcagaggaaggggagtcccctcctccgccaccgagagtcctgtgcttcggaatgaagggagggcgacctccttgtccgggtgtggtcgggcgcgggggttgtgggggcgccatctcctcttccggcccctgggactggtgtcctgaagtgtcgggagtccttacgcaaccttgacatgtgcgggctactggggtccatcggcagcgggaagagacccggagagatgcatcttctgggcccttctctcctttaggccagcttacccccaaacctggctcctggggacggatgaggaaggagctctttgcagtgcaccaggcacgttgagagtggaggcacaatggaaatcctctgtgggaccccgagcaagaccctgcacctctttgggcctcagtttccccatctgtaaaatgaaggagttggaccaatgccccctccccttcagctgtgacatcgtgcctgggaaggcgaaatatacccccagccccttccaacacacacactccagcgagaggagggcaagactggaaccgctgcccgagaggttaaggtggcttctgtggccacgaagcgcttccgagctgtgcccagtcccgggaattccgcccagtctgcccacacttccctcggtccctgcccgtttcctcaaattcgggccgtgcgcgccctctggtgtcgcctctcacactttgcagtcatttaccaggattcccgtagggcgttttgtaaaataaactataatattaatgaaaagtataaaatgtatagagttttcaagaaactgcgttctacttccagaagatggtcactttaaccttgtaaatatttatctaaaatgatatttacaaaactgtaatatattattatttgattgtatatgtacaactgtaaatacatttgtacctctcttgtattctaaaataaaaattacttggaacatttatcatttagcatctg

SEQ ID NO: 290367 - DNA, 1000 bp, Homo Sapiens
catgatcagggatcactgcaacctctgcctcctgggttcaagcgattcttgtgcctaagccacctgagcagctgggattgcaggtgcatgccaccatgcctggctaattttggtatttttagtagagatgaggttttgccattttggtcaggctggaattttttttttttttaattttgataagacagggtattgccgtgttggccagactggtctcaaactcctgggctgaaacaatcctcccgccttggcctcccaaagtgctgggattataggcacaagacaccacaataattattgcctgtatgtcaattattattttaaaatattgttgtatttacttaatgtctttaatgcatttgcccaatattttacattgttactgctcagaggtattcctttattatgtggttagcataggttatactttgctgacgattcacattttattagtttggttatgttttgtccttttaaaacattttcttttgagatgggggtcttgctctgttgcccacgcaggagtgcagtggcatgctctcagctcactgcagccctgactgcctaggctccagcaatcttcttacgtcagcctccagagtagctgggaccgcaggcacttgccaccacgccccactaaaaattttttaaattgttgcctttcttgaagtgttctctgcctgtctttgtcacaaaatttcatttttctcatagttaatttcatctctccggtaagattttattggtgtttcttttataactttgcagttcttacaccgtttggtgattttcatgtttcttagaaactttaaacctttaacttcaaacattaaaatacaagtcttttaagtacatgagtgcttagaaatgtacataatgtttatatacacttatgccttacattaaagtccaatatgagaaatacatgtttaacattcaataataattttaaaaatttgagaaataaactctcataaatgcaaaaaaaaaaaaaaaaaaa

SEQ ID NO: 290368 - DNA, 1000 bp, Homo Sapiens
gggccaggtctccaaggagagcaagcacatctggaagctgcagtgggccaccaccatcctggacattgagcgctccttccccgtattcctgaggaaggccttccgctctggggagatggtcaccgtgggcaagagctcggacggcactcctgaccgcaggtggtgcttcagggtggatgaggtgaactggtctcactggaaccagaacttgggcatcatcaacgaggacccgggcaagaatgagacctaccagtattatggcttctcgcataccgtgggccgcctccgcagggatcgctggtcctcggtggtaccccgcgtggtggaactgaacaagaactcgaacccggacgaggtggtggtgcctctggacagcatggggaacccccgctgcgatggccaccagcagggttacccccgcaagtggaggactgatgacgccccgctctagggactgcagcccagccccagcttctctgcccactcatttctagtccagccgcatttcagcagtgccttctggggtgtccccccacaccctgctttggccccagaggcgagggaccagtggaggtgccagggaggccccaggaccctgtggtcccctggctctgcctccccaccctggggtgggggctcccggccacctgtcttgctcctatggagtcacataagccaacgccagagcccctccacctcaggccccagcccctgcctctccattatttatttgctctgctctcaggaagcgacgtgacccctgccccagctggaacctggcagaggccttaggaccccgttccaagtgcactgcccggccaagccccagcctcagcctgcgcctgagctgcatgcgccaccatttttggcagcgtggcagctttgcaaggggctggggccctcggcgtggggccatgccttctgtgtgttctgtagtgtctgggatttgccggtgctcaataaatgtttattcattgacggtgaaaaaaaaaaaaaaaaa

SEQ ID NO: 290369 - DNA, 1000 bp, Homo Sapiens
gtcagcgccacgtgagacacctacaacgagatgccttaagccagctcatgaatggccccatcagaaagaagctcaaaattattcctgaggatcaatcctggggaggccaggctaccaacgtctttgtgaacatggaggaggacttcatgaagccagtcattagcattgtggacgagttgctggaggcagggatcaacgtgacggtgtataatggacagctggatctcatcgtagataccatgggtcaggaggcctgggtgcggaaactgaagtggccagaactgcctaaattcagtcagctgaagtggaaggccctgtacagtgaccctaaatctttggaaacatctgcttttgtcaagtcctacaagaaccttgctttctactggattctgaaagctggtcatatggttccttctgaccaaggggacatggctctgaagatgatgagactggtgactcagcaagaataggatggatggggctggagatgagctggtttggccttggggcacagagctgagctgaggccgctgaagctgtaggaagcgccattcttccctgtatctaactggggctgtgatcaagaaggttctgaccagcttctgcagaggataaaatcattgtctctggaggcaatttggaaattatttctgcttcttaaaaaaacctaagattttttaaaaaattgatttgttttgatcaaaataaaggatgataatagatattattttttcttatgacagaagcaaatgatgtgatttatagaaaaactgggaaatacaggtacccaaagagtaaatcaacatctgtatacccccttcccaggggtaagcactgttaccaatttagcatatgtccttgcagaatttttttttctatatatacatatatattttttaccaaaatgaatcattactctatgttgttttactatttgtttgacatatcagtatatctgaaacaccttttcatgtcaataaatgttcttctctaacattaa

SEQ ID NO: 290370 - DNA, 1000 bp, Homo Sapiens; identical to SEQ ID NO: 117854

SEQ ID NO: 290371 - DNA, 1000 bp, Homo Sapiens
ctgaagacttacctagacaccctccctgaagtgaacatcagctgtaacaacctcctcctcttctggttggttagccaagaacccaaggaccagaggcccctgggcacctacccagatgagcacttcacagaggaggccccgaggcggagcatcgccgccttccagagccgcctggcccagatctcaagggacatccaggagcggaaccagggtctggcactgccctacacctacctggaccctcccctcattgagaacagcgtctccatctaaccacccccaaataccaccaaagaagaaagaaaggtccaagcatgaggaggaccagttcctcaggtcctccagacccttccatcctccctgttctcagttcacctgaaccttctcttctgcacatggagacttttgcagccaagatggctctggcatcatacaaactgggccctgagctgtgagagaccagcacagcagcgtccaggttaaaagccgctgaccaaagtccaatgcacaatagcccctccgaaaggaaggaaccgcttcacttcttgccccacttggggcagcctcttgttccagcctcttggaatgcccagcttgggtttctgagcttttctccctcatcctccccaatccccaaactccttctcctaccatgcctttctacgttctctttcttccaagcctagagccaccagcccagcttccttctctggaaaagcctggaaactgggcacagaaggactgtgtgcctgggtctaacatgtggtcccctttgtccctagcacctttaaggggaggggaagaattggagggcagcttgcctggacccctaacggctgttctcaggaacaggttcccaggcctggggtgtttgtggagatctgtctttctccaaagatttcatccaactcccctttcatcccactccctttcatcccatttttttctttctgtccttgagcccagtgagttcaataaaaaccaaaatatttggctctca

SEQ ID NO: 290372 - DNA, 1000 bp, Homo Sapiens
ggtttatttcatgtttgcatactataaaatctgaattgatgtgaaatatctgtgcctttaaatttcttaaacctttaagctttttgttctgttttgcaacattttgtagtatttcttcccttccttagcacaaaatactggtttctaagtggttttgcttcaaaggatgtctagatgtaagtgattccacttaaagccaaaataaaaattcctaaagcagttcttaaaggagttagagagctatattaaacagtttttctgtggtataataatgtgtctcttactagaagtcccccacgaccaagttaaagatacttttcctgttggattctcttttacaaataagtctaaatgactgataatagaagattgttagtcttgcttgatggtaaagtcttggattattctgatatatagacgtgcattgttttgtaacttagttacttttcagataggtctgtgttaacttttgaacatgtgtaacttaacctaaatactcccaaactttacctctaaatttttgtttttatgttgtgaatgtgctaatatgtgcatcaactgtaaagatgtatcagttttattaaaatcagttgacaattagaataataaagtggataaaggcaaattaagatataggaccaaaacagaatattgtagatggcagttatgaatgtatatttatattttgattaagatttctattaactttttggctgggcagagtggcttacacctataatcccagcaatttgggaggccaaggtgggcagatcacttgaggtcaggagttcgcgaccagcctacccaacatggtgaaaccccatctcttctaaaaatacaaacattagccgggcgtggtggcacattcctgtaatcccagctactcgggaggctgaggcaggagattcgcctgaacccgggaggcagaggttgcagtgagccgagattgtgccactgcactccagcctaggcgacagagtgagactccatctcaaattgg

SEQ ID NO: 290373 - DNA, 1000 bp, Homo Sapiens
aattatattagtctgtttgcaaagtagaaaaagattctcatcactcaaccttatgagcaggaagagggaaggctgtttgagaaccatttacttagcagaaccacatattttagacacttccctgcattaactgcacaaacaatatgtttgcaaacttgttrgatcaacctccaacaacgacacattcaggagttaaatatttttcatcaaacattggatttttccttaacgctagagattgctacaaatcttctgaagggtctcaatggcttcaggctaagaagagatttctccctgttataagcagcaagacaaattagccatttcactctcaaacttcactaatgatcacattctttccaaaaggaactctagaagaccaaatgccccgagttaagaacatcaaaactaaccatctgaagaaacttcccaagtgtaagactctgccattaaaacattaccgagaggggactcaaacagtctttcttcctttgtcgtgtttcttgctcccagaccaaggcactgacgacagtactgatacataatttaaaagcacactcccttccactttggtaataccagaactctaattggaccaccctgaagcttaggactaccagccatacaaatagtaaactctgtccacgattcactcatctgtgtattttctatagatgtttactaggcgtttgttatataaaaataccccggccaggcacggtggctcacgcctgtaatcccagcactttgggaggtgggtggatcacctgaggtcgggagttcgagaccagcctgaccagcatggtggaacccccatctctactaaaaacacaaaaaattagccgggcgtggtggcacatgcctgtaatcccagctactcaggaggctgaggcggagaattgcttgaacccggaaggtggaggttgttgcggtgagctgagattgcactattgcactccagcctgggcaacaggagtaaaactcccccccacccaaaaaa

SEQ ID NO: 290374 - DNA, 1000 bp, Homo Sapiens; identical to SEQ ID NO: 223169

SEQ ID NO: 290375 - DNA, 1000 bp, Homo Sapiens
gcagtgaaacatcagatgacgatgcctggaagtaggcatataaatgctcacagttaaatctgacccagtaaactctgtgtgtttagggagtatacaaaagaaatcgttcttttccttttcttatgttgttgaatacttcattcacaagggaaataatcatatcccaaagagagagcaattggcttgttttgcttttgttattgttcttccctgttatctgctttatagagagaagtttgtgtggtgggacagattttttaaacacactcatacacacacacacatacacacccagtatatatggggcgatgcacaggtaggagctggcagtgcagggaagaggagacactggtctgcagcaacagcttctactaccagcccttggggcactcacccctgtgatcaagcaatcattgtcaatgacaaagtgactattgaagttataattgtattaaattaatgctaataatttggatattttattttatttttggctgctcgggtaactttagcccttaaccaagcatatgtgggtttttttggttgtttttttgtttttgtttttttttctttttcctttttgggtacagctgtaaaatatttggatataggaaatgttgtgttattcttgcagccttgatattcagggtggattgtaaaatataaatttttgtgagatttcaaagattaagattattttgataacattatttacagatttaaaagatgtggttatcacaagtctcgagggggaaactactgcataaaataactaacttggaataaatattttgcatcagtttggattgtcttgtgtaagaagtatattttctttaaaattagatgagtggattcttttttaggggaaatatttttagaagttggggggaaatgtgaattcagacacaactttctctattttagcagatacttttttgatgcagaaaaacctgtgcaataaattaccagtaataaagtcagaaaaaaaaaaaaaaaaaaa

SEQ ID NO: 290376 - DNA, 1000 bp, Homo Sapiens
cactggcatgcgcactgcttcgcctcctgccggagtaccgggatgcagagattgtgcggacccgggatcccgaaaaactcgcttcctgtgacatcgtggtggacgtggggggcgagtacgaccctcggagacaccgatatgaccatcaccagaggtctttcacagagaccatgagctccctgtcccctgggaagccgtggcagaccaagctgagcagtgcgggactcatctatctgcacttcgggcacaagctgctggcccagttgctgggcactagtgaagaggacagcatggtgggcaccctctatgacaagatgtatgagaactttgtggaggaggtggatgctgtggacaatgggatctcccagtgggcagagggggagcctcgatatgcactgaccactaccctgagtgcacgagttgctcgacttaatcctacctggaaccaccccgaccaagacactgaggcagggttcaagcgtgcaatggatctggttcaagaggagtttctgcagagattagatttctaccaacacagctggctgccagcccgggccttggtggaagaggcccttgcccagcgattccaggtggacccaagtggagagattgtggaactggcgaaaggtgcatgtccctggaaggagcatctctaccacctggaatctgggctgtcccctccagtggccatcttctttgttatctacactgaccaggctggacagtggcgaatacagtgtgtgcccaaggagccccactcattccaaagccggctgcccctgccagagccatggcggggtcttcgggacgaggccctggaccaggtcagtgggatccctggctgcatcttcgtccatgcaagcggcttcattggcggtcaccgcacccgagagggtgccttgagcatggcccgtgccaccttggcccagcgctcatacctcccacaaatctcctagtctaataaaaccttccatctcatactgacaaaaaaaaaaaaaaa

SEQ ID NO: 290377 - DNA, 1000 bp, Homo Sapiens
attagaaactagtgaaacaaagcaggttgtcccacatgtataaaatacagggcagctatttagttttctttacagagaatgatccttttaaggcttgtaaggccctctggtttggacaaaaaccctcagtagagacaagcgggaaggataattagctgaaagctatgatgatataaataaaaacagctctctatcccaatacgcacctttgtattttcaagaactcttctatttattaaggaaaatgtcacattgtgatgtattaagccagtacttcaattacgggttgacttgggatgacatattacatgctgtagttaacatttataattctttttccttgtttgagtatttctgtctctgaaataaccttttacttggcttttctagatagctttatttgatttcgagtggcaaaatgttttttattacggcttttctattgctgtatgatacagaactcttttggcataaatatttgtgttcccagtacctcacttgttcggatttgactgcctgtatatgttttgtgaaatggtcctgtttttgggtaggtgacacgtggactctagtatgtaaatgttacttgaatctgtgcttcataatagtgtgtggcatgtatgtgcagactcttggatgctttatgcctgcgcaccaggagccctgtcctcacgttcccaggagggcggcttcacccttcgtaaccaggagacaaggcggccatggatttgcccttgattctattttgctaatggaagatagaaaggagagaaggtttttttttttttttaacattctgaagatggtgctgtgtcaagaaggaccttttttttcccctctcccctattttttaagtaccttggaggaggagaggttggtgacatgcatggtggggatctatggcctctggtgctttgtcctgtatttggtttaatgtttttgtcctaatctcttcaatcaataaaattgtgcgtatttaactaaaaaaaaaaaaaaaaaa

SEQ ID NO: 290378 - DNA, 1000 bp, Homo Sapiens; identical to SEQ ID NO: 287831

SEQ ID NO: 290379 - DNA, 1000 bp, Homo Sapiens
agtctcctctcagtcattcatcaatgtggccagcttatctactcccaattatgttgttgatacatctccaagccatctgtcatcagatcaaaaagcagcaaacagagggtcagtcacaggatgttctgacacaccattgtaactttttgttagagatgatcccatttagaaaaagactggtagaaattggagtgaaaggaaccctacagattagcccagttctctcttattttcagctttacagacaagaacaatttaaatctaaagaatttagtagattccttcagtgtcacaaagctgtttcatgaaagaatcaagattataacctggatattctgactcctggcccagtgctttttcttactttgtagctacactttgaagtaagattcaaactgttatccactcaattgccttattcctgaggatgtagtcaaggaagaaaaagttttctggaattccgtaaattatattttaagcttatttcttcaaaattattttcatatatcacagatatatcattggaagatataatttgcatatatgttcattatcagtgttcctaatttggtattacatgtattctatttttttctgaatgatagcatgaaaagtgtcaaagtggtttgtccgctagcgtctgtctgcagaactttcaggatgactattaattcctctcagatgtcatttttgagtggtccaagcctgctgttttgaacccacagcagtggagatttgtattcttatttacagttgtgtactataaagtgtgtgttacataggttttgtgtaataattatttgtaaatattatttagatttgtatttagacatgatttatatctaatatagatacaaagtctgtgtctaaatattatttaaagaagtgatttttcattctcttggattctttccagtgtggtgccttttatatgcctcacatagtctccttgttctcctactaatattcccaagctccatatgccaattaaagaagaaac

SEQ ID NO: 290380 - DNA, 1000 bp, Homo Sapiens; identical to SEQ ID NO: 223172

SEQ ID NO: 290381 - DNA, 1000 bp, Homo Sapiens; identical to SEQ ID NO: 117857

SEQ ID NO: 290382 - DNA, 1000 bp, Homo Sapiens; identical to SEQ ID NO: 223173

SEQ ID NO: 290383 - DNA, 1000 bp, Homo Sapiens
cgtgggaggatggtgattgctcacaccaaagccttggacccctcccagcctgtgacctttgtgaccaactccacctacgcagcagacaagggggctctgtatgtggatgtgatccgtgtgaacggctactactcttggtatcgcaactacgggcacctggagttgattcagctgcagctggccgcccagtttgagaattggtgtaagacatcacaatcccattattcagagcgcgtatggagtggaaacgcttgtagggtttcaccaggtaagcggtgttgaactttctgcttgtgtattctctctgggcagagatgccacttgcctcccccaccatgccatctctgaagaatattacagaccattttggagcatggtgaataagaaattttcaccttaggagttcagttgaatagtcatttttatatttgtgactgcaagtcactcttaggggctgtacttccttagtactggtagcattattatccaatggacttttatagctttcattaggttttcttttgtttttgttctttaaagaacgttttacttatcttagtatttcatttttcatctatattatgaggcagtaagagtcttctgtttttccaaagttgagactgctttatatttatttcgtattgtctacagctgtagtgttcaatacattagccactagccacatgtggttatttaaataagataaaataaaaattggccgggcgtggtgggtcacgccggtaatcccagcactttgggaggccgaggcgggcagatcattaggtcaggagatcgagaccatccttactaagacggtgaacccccatctctattaaaaatacaaaaaattagccgggcgtggtggcgggcgcctgcagtcccagctactcaggaggctgaggcaggagaatggcgtgaacctgggaggcagagtttgcagtgagccgagatggcgccactgcactccagcctggggacagagcgagactccatctcaaaa

SEQ ID NO: 290384 - DNA, 1000 bp, Homo Sapiens; identical to SEQ ID NO: 223175

SEQ ID NO: 290385 - DNA, 1000 bp, Homo Sapiens; identical to SEQ ID NO: 117859

SEQ ID NO: 290386 - DNA, 1000 bp, Homo Sapiens; identical to SEQ ID NO: 117860

SEQ ID NO: 290387 - DNA, 1000 bp, Homo Sapiens; identical to SEQ ID NO: 285853

SEQ ID NO: 290388 - DNA, 1000 bp, Homo Sapiens
aaggttgccatgtggctggcagtggttcaagcccacatttgacactgctgctctagaggaaagataatgatggtaacacagtaataataataataataacaaaaatatgataaagtgaaagagtaagacttcttcagtgtgcttgctcatggcatgaatgctatgtggacagcccaagccatacccagaatcaccttaattccaactttttgaggttcagcaattggaggtggcaattggctttgcattttaaagtatttcgggtaaaggtgaagtgaaggattttcgtctttataatttctgtttggccatggcaaataccatagttgagtatttgcttcaggagagttctttttacagttttacttttcaatgctgaggcatatttctttgagcactgtgcttttatgtgtctttctacaaaggggttattggtcagtggaagaacaaagtacacttgataaaaacattttcaacatacattgagcctaaacagcagttaagttgtctctaaatgaactagcaaaaaaaaaaaatgtagtttttgtttgtaaggaaggggaggtatttcctgagaatgaatttttttttttttggattactgtttttctctccatataccttgacttggattttgacaggagggagcctgggaaaataattttttcctccaagattctcagatccaggttaggaaaggattcagcactacagcatacccctctacaacatacagccctgtcacattgagatcataatccctcctgtcccactcctctctaccaaccccaccctactagctaggtcttcagtgttttacattgaatattggtacattttaattattttttctcataaatgggttatttatagaaattttgttaactcttgagccatatgcatgtgtagatactggcagggctatgtttgtttatgatgctctgcaaacatttcatattggccaataaacagaaatatatccaaaaaaaaaaaaaaaaaa

SEQ ID NO: 290389 - DNA, 1000 bp, Homo Sapiens
aatgatggcacctcctgtggagaaggccgggtatgttttaaaaaaaattgcgtcaatagctcagtcctgcagtttgactgtttgcctgagaaatgcaatacccggggtgtttgcaacaacagaaaaaactgccactgcatgtatgggtgggcacctccattctgtgaggaagtggggtatggaggaagcattgacagtgggcctccaggactgctcagaggggcgattccctcgtcaatttgggttgtgtccatcataatgtttcgccttattttattaatcctttcagtggtttttgtgtttttccggcaagtgataggaaaccacttaaaacccaaacaggaaaaaatgccactatccaaagcaaaaactgaacaggaagaatctaaaacaaaaactgtacaggaagaatctaaaacaaaaactggacaggaagaatctgaagcaaaaactggacaggaagaatctaaagcaaaaactggacaggaagaatctaaagcaaacattgaaagtaaacgacccaaagcaaagagtgtcaagaaacaaaaaaagtaaccgggcaatccatactcattcagtaacacaggctcatttatttaaccagctaatcatttatccaaaggctttccattcttctcccaatatttttttactttaatttttcccacaagttttgatcagcaaataaacagcattcttgttttggaaacaaaccagtgcattctacttctcgagtgttcacttgcccctcagtttgtgaccaagttgtgggtattctgagaatcatgctctaatggcttttccatacactaaagctctgaaagtagtgagtttcctagaattaccatgctattcaaggtatagtcttgtttctcagaatcccagggaacaaagcaattgtctgcctctccctctgcctccctcaacttgatccatgtgaacatccgcacctgcacccatgctgatcaataaatgccgacaacacaaaaaaaaaaaaaaa

SEQ ID NO: 290390 - DNA, 1000 bp, Homo Sapiens; identical to SEQ ID NO: 223176

SEQ ID NO: 290391 - DNA, 1000 bp, Homo Sapiens; identical to SEQ ID NO: 223177

SEQ ID NO: 290392 - DNA, 998 bp, Homo Sapiens
gacaaatgagggtttggcatgcagctcgtcatcttaagagttactatcttcttgccctggtgtttcgccgttccagtgccccctgctgcagaccataaaggatgggactttgttgagggctatttccatcaatttttcctgaccaagaaggagtcgccactccttacccaggagacacaaacacagctcctgcaacaattccatcggaatgggacagacctacttgacatgcagatgcatgctctgctacaccagccccactgtggggtgcctgatgggtccgacacctccatctcgccaggaagatgcaagtggaataagcacactctaacttacaggattatcaattacccacatgatatgaagccatccgcagtgaaagacagtatatataatgcagtttccatctggagcaatgtgacccctttgatattccagcaagtgcagaatggagatgcagacatcaaggtttctttctggcagtgggcccatgaagatggttggccctttgatgggccaggtggtatcttaggccatgcctttttaccaaattctggaaatcctggagttgtccattttgacaagaatgaacactggtcagcttcagacactggatataatctgttcctggttgcaactcatgagattgggcattctttgggcctgcagcactctgggaatcagagctccataatgtaccccacttactggtatcacgaccctagaaccttccagctcagtgccgatgatatccaaaggatccagcatttgtatggagaaaaatgttcatctgacataccttaatgttagcacagaggacttattcaacctgtcctttcagggagtttattggaggatcaaagaactgaaagcactagagcagccttggggactgctaggatgaagccctaaagaatgcaacctagtcaggttagctgaaccgacactcaaaacgctactgagtcacaataaagattgttttaaagagtaaaaaaaaa

SEQ ID NO: 290393 - DNA, 1000 bp, Homo Sapiens
ggaagaagaaaaataaagcaagaagtggagaaaatccttatgcctccatcgatattagcaaaggagaaaataatccaggattccaaaacactgatgatgttcagacctccttttagaaaaatctatgtttttcctcttgaggtgattttgttgtatgtaaatgttaatttcatggtatagaaaatataagatgataaagatatcattaaatgtcaaaactatgactctgttcagaaaaaaaattgtccaaagacaacatggccaaggagagagcatcttcattgacattgctttcagtatttatttctgtctctggatttgacttctgttctgtttcttaataaggattttgtattagagtatattagggaaagtgtgtatttggtctcacaggctgttcagggataatctaaatgtaaatgtctgttgaatttctgaagttgaaaacaaggatatatcattggagcaagtgttggatcttgtatggaatatggatggatcacttgtaaggacagtgcctgggaactggtgtagctgcaaggattgagaatggcatgcattagctcactttcatttaatccattgtcaaggatgacatgctttcttcacagtaactcagttcaagtactatggtgatttgcctacagtgatgtttggaatcgatcatgctttcttcaaggtgacaggtctaaagagagaagaatccagggaacaggtagaggacattgctttttcacttccaaggtgcttgatcaacatctccctgacaacacaaaactagagccaggggcctccgtgaactcccagagcatgcctgatagaaactcatttctactgttctctaactgtggagtgaatggaaattccaactgtatgttcaccctctgaagtgggtacccagtctcttaaatcttttgtatttgctcacagtgtttgagcagtgctgagcacaaagcagacactcaataaatgctagatttacacactcaaaaaaaaaaaa

SEQ ID NO: 290394 - DNA, 1000 bp, Homo Sapiens; identical to SEQ ID NO: 117863

SEQ ID NO: 290395 - DNA, 1000 bp, Homo Sapiens; identical to SEQ ID NO: 223178

SEQ ID NO: 290396 - DNA, 1000 bp, Homo Sapiens
agtactaaatgattatcaagggtcaacttctgtatctgtatcagctgcaacacactgtctttaatacccccagcccaggagctcgtgccttacatgctgggcccacattctgccccaagcagaagctgcagggacctcagtgtccacccttcctgcctcatgtctcaaggcagcagctcctctctggtaacctgatggtgatgtggccagggtgccgagatgggacagcaaagatgatgggctctgcacaccaactccaggaaactcattctgggccagctctatgcaaagggaaaagcatgttgcattcacctaggccaagaaacagtgttgtaggttaagggcatggactgcttgagttcagtgccagctatgccacttaccagctgtgggaccttgggcaagttgcctttgtgcctatgcttccactttccttttccctccaccatgaagatgggttaagagtctcaaggttgtggtgactgtagatatatgagtgtgcatttgctatgctttacctgtctggcatctagcaaacattcttcacatgtttgctgttatcaagattgttgtatatgtgaatgaaatgatacgatgtctcagatttgctttaaaataatagggaggttggggaagtgggttggggtacagacgaaacaggagtaggtgtgagttgataattgttgaagttaagtgatcagtacgtgggtttattacactattcttttcacatttgctttgaaactgttcataaaaatttccataataaaagttctatatatatatataaatatatacatacatatgagaaaatgatgtttatagcagagcttcactagacatggtatgtagcatgtagtgcacaagctgattttaagtgatattcagatggccttttaaatttaattattatgtatttaaaatttaattaattatagcaagtgatatgaactgtgataatgcagaaggtttccttttaaaataaagttcagtcaaaaaa

SEQ ID NO: 290397 - DNA, 1000 bp, Homo Sapiens; identical to SEQ ID NO: 117864

SEQ ID NO: 290398 - DNA, 1000 bp, Homo Sapiens; identical to SEQ ID NO: 117865

SEQ ID NO: 290399 - DNA, 1000 bp, Homo Sapiens; identical to SEQ ID NO: 220426

SEQ ID NO: 290400 - DNA, 1000 bp, Homo Sapiens
tcatcaacggcatcgaggacgagagcgtggcgctgaccttgagcttggagggtgtggtgtttccgtaccaacccagccggggccggtaccagttcaattactacgaggcgaagcaggcgtgcgaggagcaggacggacgcctggccacctactcccagctctaccaggcttggaccgagggtctggactggtgtaacgcgggctggctgctcgagggctccgtgcgctaccctgtgctcaccgcacgcgccccgtgcggcggccgaggccggcccgggatccgcagctacggaccccgcgaccggatgcgcgaccgctacgacgccttctgcttcacctccgcgctggcgggccaagtgttcttcgtgcccgggcggctgacgctgtctgaagcccacgcggcgtgccggcgacgcggcgccgtggtggccaaggttgggcacctctacgccgcctggaagttttcggggctagaccagtgcgacggcggctggctggctgacggcagtgtgcgcttcccaatcaccacgccgaggccgcgctgcggggggctcccggatcccggagtgcgcagtttcggcttccccaggccccaacaggcagcctatgggacctactgctacgccgagaattaggcgcccaccgtgtcccctccagcgcgcgcgaagaagcttgggagtcgtggcgggggtctctcgccacccctttccggagagcctcccctccctccagacccggagcggcctctccagacctgccttcccagccgggggctgcgggcctcggaccccggctggcccggcggcggggaggggaggcgggggcgcctccggcggcgagatgcagaggtgaccctcggacccgctgccgttcgcgaaccctagcagaggactcagccaccgccggggggagggtgaggcggccgggggcattaactgacctctgagtacagcaataaaataacctggggatctttaaaaaaaaaaaaaaaaaaaaaaaa

SEQ ID NO: 290401 - DNA, 1000 bp, Homo Sapiens
tgatgtcctggtttcagatgcatctaaaccttcctggaggaagggcacatattttgatgcaatcattactgatcctccatatggtatcagagaatctacaagaagaacaggttcacagaaggagataccaaaggggatagaaaaatgggaaaaatgtccagaaagccatgttcctgtttccttgagttatcatctgagtgatatgtttcttgacctgttaaacttcgcagctgagaccctcgttttaggtggaagactagtctattggttaccggtgtatacgccagaatacactgaagagatggtgccttggcaccttgcctggaactcgttagcaactgcgagcagaagctttccagtcacacatcaaggcgcttgatcacaatggaaaaggtgaagaaatttgagaatcgggaccagtattcacatctgctaagtgatcattttctgccataccaaggtcataattccttccgtgagaaatattttagtggggtaacaaaaagaattgccaaggaagaaaaatccacccaggaatgaaaattaagattttgacaatgaagaaagaataagaatttgatttaaaaagacatctggatgtgaactttcatgtatgatccagaaaataggtacggttttaaaatattttatatagaaaagctacaaagtaaattgagcaatgcttttaaagttatctttgttttatagacttttttgttgtatgtattacagtctttataatcttatttaatgtatatttgtactttcaagtactgatggagatagactcaaaacagttatttttttacaattaatctacaaagggaattaatattgttgacttttaaaacatctgctggatatattatatgcaattaatagtagttaagaatttattcatttggtagatatgtttatttggtttttggttgtcatcgatttacattgccactaataaaccatattgagaatttctaaaaaaaaaaaaaaaaaaaaaaaa

SEQ ID NO: 290402 - DNA, 1000 bp, Homo Sapiens; identical to SEQ ID NO: 117867

SEQ ID NO: 290403 - DNA, 1000 bp, Homo Sapiens; identical to SEQ ID NO: 117868

SEQ ID NO: 290404 - DNA, 1000 bp, Homo Sapiens; identical to SEQ ID NO: 117869

SEQ ID NO: 290405 - DNA, 1000 bp, Homo Sapiens
gtggaccagaattttaacccattaccagactactggctctctctcctctacaagcgcctgatcggccccaaagtcttggctgtgcatgtggctgggctccagcggaagccacggcctggccgagtgatccgggacaaactaaggatttatgctcactgcacaaaccaccacaaccacaactacgttcgtgggtccattacactttttatcatcaacttgcatcgatcaagaaagaaaatcaagctggctgggactctcagagacaagctggttcaccagtacctgctgcagccctatgggcaggagggcctaaagtccaagtcagtgcaactgaatggccagcccttagtgatggtggacgacgggaccctcccagaattgaagccccgcccccttcgggccggccggacattggtcatccctccagtcaccatgggcttttttgtggtcaagaatgtcaatgctttggcctgccgctaccgataagctatcctcacactcatggctaccagtgggcctgctgggctgcttccactcctccactccagtagtatcctctgttttcagacatcctagcaaccagcccctgctgccccatcctgctggaatcaacacagacttgctctccaaagagactaaatgtcatagcgtgatcttagcctaggtaggccacatccatcccaaaggaaaatgtagacatcacctgtacctatataaggataaaggcatgtgtatagagcagaatgtttcccttcatgtgcactatgaaaacgagctgacagcacactcccaggagaaatgtttccagacaactccccatgatcctgtcacacagcattataaccacaaatccaaaccttagcctgctgctgctgctgccctcagaggaagatgaggaaggaaaaaaactgggtggacctaaaaaaacccatcctctcccaaaaaaaaaaaaaaagggcggccgctctagaggatccaagcttacgtacgcgtgcatgcg

SEQ ID NO: 290406 - DNA, 1000 bp, Homo Sapiens; identical to SEQ ID NO: 117871

SEQ ID NO: 290407 - DNA, 1000 bp, Homo Sapiens
gtgaaatcgatgggtctggaaatggatggactgtgtttcagaagagacttgatggcagtgtagatttcaagaaaaactggattcaatataaagaaggatttggacatctgtctcctactggcacaacagaattttggctgggaaatgagaagattcatttgataagcacacagtctgccatcccatatgcattaagagtggaactggaagactggaatggcagaaccagtactgcagactatgccatgttcaaggtgggacctgaagctgacaagtaccgcctaacatatgcctacttcgctggtggggatgctggagatgcctttgatggctttgattttggcgatgatcctagtgacaagtttttcacatcccataatggcatgcagttcagtacctgggacaatgacaatgataagtttgaaggcaactgtgctgaacaggatggatctggttggtggatgaacaagtgtcacgctggccatctcaatggagtttattaccaaggtggcacttactcaaaagcatctactcctaatggttatgataatggcattatttgggccacttggaaaacccggtggtattccatgaagaaaaccactatgaagataatcccattcaacagactcacaattggagaaggacagcaacaccacctggggggagccaaacaggtcagaccagagcaccctgcggaaacagaatatgactcactttaccctgaggatgatttgtagaaaattaactgctaacttctattgacccacaaagtttcagaaattctctgaaagtttcttccttttttctcttactatatttattgatttcaagtcttctattaaggacatttagccttcaatggaaattaaaactcatttaggactgtatttccaaattactgatatcagagttatttaaaaattgtttatttgaggagataacatttcaactttgttcctaaatatataataataaaatgattgactttatttgcaaa

SEQ ID NO: 290408 - DNA, 1000 bp, Homo Sapiens
caggaaacgtgactcgtcctcccactgacttgagctttaactttgatgccaacaaacaacaaagacagcttattgcagaactggaaaacaaaaacagagagatcctgcaggagattcagcgtctccgcctggaacacgagcaggcctcccagcccacccctgagaaggcacagcagaaccccacgctgctggcagagctgcggctgctgaggcaaaggaaggatgaactggagcagaggatgtcggccctgcaggagagcaggcgggagctgatggtccagctggaagagctgatgaagttgctgaaggaggaagagcaaaagcaggcagctcaggccacagggtcaccacatacatcgcccacccatggaggcggccggccaatgcccatgccagtgcgctccacgtctgccggctccacccccacccactgtccgcaggactcgctgagcggagtcgggggagacgtgcaggaggccttcgcacaaggtacgaggagaaacctccgcaatgacctgctggtggcagctgactccatcaccaacaccatgtcatccctggtgaaggagctccattcagcagaggaaggtgcagaggaagaagaagagaagatgcagaatgggaaagacagaggttagcagaggagccggacacagaggaagctcaggcacagaggacgaggagcaagctggcgccgacatggcgaaggcaaggtcttcccccagaggcacattcctctccatctttccaccgcacacctggaccaggcttgcaggctgccagacgtcactccacccgccagggagaggggagccagagccggtgggaagcggggaggggctgcgtggcacagctagtgggcctccccctgcacagccctgcatgtactagcaccttcatcactcccctcagggcatggtctcatctccgcatcaggaattcacctggaggttgaaaagagaaaagaaaaagcaccaaaaaaaaaaaaaaaaaaaaaaaa

SEQ ID NO: 290409 - DNA, 1000 bp, Homo Sapiens
gaactcatcacccctcttcccccaccaccaaaactgctcctcctcctgtattcctgacctccgccatccaccccgttgctcaagccggaaactcggcagcccttccaaactcttccctctctcactccccacatcccatcgtctcggccttcacaatctgtcagttctaacctcctaagcaactaggccttcagtaaatgtgattcacctcttctttccctccttttcccaaagcatccctcttagtctaggtccttgttgtttcttgcctgaactcctgccatagtcttaactggtctccttgcttcctgtcttatcctccaccgtctttcttttatactgacacaagaatggtctttctgaattgcacatgtgagcatgtcacttccctgcttaaatttctccagtggattcccagggacttcaggatcaagtcctagttgttcagcatggcatccaagactctttatgatctggcccttgcttacctctcagccttagctctcccaactcttgcacagtcactgctcttcagccatagtggatcactcaccattcccagatgtaccaggctctcgcacacctctgcacctttgcacgtgctgtttgctgtgcgtggaatgcccttcactgtcaccaccctgctcatccactctactaatgcctcttcattcttttatactcagctttctttaaagttcttctaagctgagttaggtgtctgtcctttatgatcccgcagtattccatgaatacgtatattctcacatttattgtactgtattataattgttgaaaacttgtctgtcccatttagaatgtgagctccttgagagcagaacggtgtcttcattatctctgtatccccaaggctttgcacagtgccttgctcatagtaggttttcaataaatgattattaaataaataaaaaaaaaaaaaaaaaaaaaaaaaaaaaaaaaaaaaaaaaaaaaaaaaaaaaaaaaaaaaaaaaaaaaaaaa

SEQ ID NO: 290410 - DNA, 1000 bp, Homo Sapiens; identical to SEQ ID NO: 223183

SEQ ID NO: 290411 - DNA, 1000 bp, Homo Sapiens; identical to SEQ ID NO: 223184

SEQ ID NO: 290412 - DNA, 1000 bp, Homo Sapiens
caggtggagatgacccctgagaagttcagtgtcttaatggagaagctctgtaaaaaggggctggcagccaccacctccatggcctatgccaagctcatgctgacagtgatgaccaagtatcaggctaacatcactgagacccagaggctgggcctggctatggccctagaacctaacaccaccttcctgaggaagtccctgaaggccgccttgaaacatttgggcccctgaccatccaccaagggaccaccctcttggtgctccatcaccagcttcctgaagggcatttctttcttcaccaccttgtcttgagccctagcctgaggataaaggctgagcctggccatcccagattgcaactgcctccctgttacaggctgcatagggaatattggcttcccagccagcagggaggctcctgggctaagggagctcagctatattttctttttcatttcttttgtttttgagagaaggtattgctctgtcatccaggctggagtgcagtgatgcgattgatcatggctcactgtaacctctgcctcccaggctcgatcctcccatgtcagcctcccaagtagctgggactacatgcacatgacactatgcccagctaattttttattttgtagataatatgctggtcagggctggtcttgaactcctgagctcaagtgatcttcctgccttggcacccaaagtgttgagatttacaggtgtgagccaccacaccaggccagagctatatttccaaaggctgctggccccaggcacactcctcatcaattctcaggctgcagggacaaactttccgatagggctcagtaggatcaagccgacccagagtgggcatgggatgctccaggaggtctggggtaccagtgggctcagatgaagctcttgtgctcatgtatattatgaccttctgtgtttttgtttctgacttgaataatttatcaatggtgttgaataaaagcaagttcaataatgaaaaaaaaaa

SEQ ID NO: 290413 - DNA, 1000 bp, Homo Sapiens; identical to SEQ ID NO: 223185

SEQ ID NO: 290414 - DNA, 1000 bp, Homo Sapiens
tgatcaaaatagagttatgcttaaatatctctttcctttgaatgaaattgtggtagatttttatgactctttgaaatccctatcttctggatatgctagttttgattacgaagatgcaggctaccagactgcagaacttgtaaaaatggatattctactgaatggaaatactgtagaggagctagtaactgttgtacacaaagacaaagctcattcaattggcaaagccatatgtgaacggctgaaggattctcttcctaggcaactgtttgagatagcaattcaagctgctattggaagtaaaatcattgcgagagaaacagtgaaagcctataggaaaaacgttttggcaaaatgttgtggtggtgatattacccgaaaaatgaagcttttgaagagacaagcagaagggaaaaaaaagctgaggaaaattggcaacgttgaagttccaaaagatgctttcataaaagttctgaaaacacaatcttctaaataattggtgggaaaacaaagaattttcattgcaatttgtaatatgctgacaacagaaagaaaattataaaatttgcttgttactttcagggtattcaggttcaaataacctactagtctttcgttgaaagggagtagttagtgggtaggcaagagcttagattttgaagccatgttgcctgttctcaaatatctgttccaaccactcactagtaaggtgaccgtggccagattaacctttgtttcctcttcagtaaaatcgagattatactactacctacataagttgttgttgtgaagattaaatgaggtaatacgttaaatattcagaggtgcaagacacatagtaagcactcaattgtaactacagttaagtccttaaatgccatcgaaaggttcttagaaactgactttaagcaaaatgacacgtagcacaatgttcttgaatgatgtcatttccttaagtggtttgtaacatcgatgaggaaaaaaaattggtttatgcgtc

SEQ ID NO: 290415 - DNA, 1000 bp, Homo Sapiens
actttgtgcatgggcaggcatccttctgtgctgcagcgggcagagtgggagttggctcactcagcacgctcactaacccagcatgccacttccagcaggcatgcagtcctggcccagctctatgggaaacaaggaggaaagttagccactgaaggccaaaacaccatgtggggtggacagagggtttgctgggctggctttgctttccctgctggggccacagctgtgttaaccaatgaggtctgctgccaggtgtgaacaagcatgtctctacgaatgaacgaaacattggggatctctgccgaaaccaccaaagggcatgtctgatgggcacagggtctcccaaacccagtggcttctgtctgtcctcagcccttgtccctgtttatctgcagccaggagacttgcaagggattggtgattgacagagaggactcgtgcgctgttttgtgttagcagaggatttgtgtttcacaggtaggcttagcgtcctctcagagtgtagtgccaggtcctggtgccacgctagctgagcactcaggagagttcatcagctcagatcccacagggcctcctctttagcaggaattcacaacagtttggatgccctaaacttctgtagctcaggaacatcactggtgtatttgtttttttgtttgtttgcttgggttcttgcaagagcgcgtggggacagttcttccagcaggcactggttttgttgccccagggctgctttgctgtgatgatgattgcatttcaacacatgccagatgcagattttttcccccttactgtttcaatgacctttattttaaaaacacatagcttgaaaatttatttttatactgatattagtttggatgtgccacttttggcaccaaacgtgtatgtcatttttatttccattttataaacatgtaaataatagtgataacttgttaataatagtaaacctttatacctaaagtaaatgtcttccctcccaaaaaaaaaaaaaaaa

SEQ ID NO: 290416 - DNA, 1000 bp, Homo Sapiens
actttgacgacggagactgctgcgacccccaggtggctgatgtgcgcaagacctgctttgaccctgactcacccaagagggcatacatgagtgtgaaggagctgaaggaggccctgcagctgaacagtactcacttcctcaacatctactttgccagctcagtgcgggaagaccttgcaggtgctgccacctggccttgggacaaggacgctgtcactcacctgggtggcattgtcctcagcccagcatattatgggatgcctggccacaccgacaccatgatccatgaagtgggacatgttctgggactctaccatgtctttaaaggagtcagtgaaagagaatcctgcaatgacccctgcaaggagacagtgccatccatggaaacgggagacctctgtgccgacaccgcccctactcccaagagtgagctgtgccgggaaccagagcccactagtgacacctgtggcttcactcgcttcccaggggctccgttcaccaactacatgagctacacgggtatcaccactgtcttgttttgttttctgttaagaatacatgggggcctttgagagctgggagggtggaggtgtgggagctgatgggagaatgattaagtggtcatttgtgtcggagagttgaagtgtatttattataaggtattattattttttcatgtctttgaagaacttgaagaaatactgacatattaaggtactttgttcactgaattctctcctacagatattttaaaatatacttctatcctcgatagtaaaaaaggcacagagccaaaagccctcttgtgatccccttgacttctagaatgtggttattcttatttttggccgcattcttagacatttactctgagagagtccatggaataaaggaaagagttatgggccaggggccatgtactgttttgaagtggcaacaaggggctggtaattaggccacatgtttactgatgtacgaaaaaaaaaaaaaaaaaaaaaaa

SEQ ID NO: 290417 - DNA, 1000 bp, Homo Sapiens
ccacagagggccattgtcctcggcagcagtgggccctggtggagtttgagaagcccgtcacctgccctcggctgtgcctggtgattggctccaggctagatgcggacattcacaccaacacgtgccggctagccttccatggcatcctgctccacgggctagaggacaggaactacgccgacagcttcctgcccaggctgaaggtgtacaagctgaagcacaagcatggccttgtggagcgggcgatggatgactacagtgtgatcggccgctccctgttcaaaaaggaaaccaacatccagctcttcgtggggctcaaggtgcacttgtccactggggaactgggcatcatcgacagtgccttcggccagagcggcaagttcaagatccacatcccaggtggcctcagccccgagtccaagaagatcctgacacccgccctcaagaagcgggcccgggctggccgtggggaggccaccaggcaggaggagagcgccgagcggagcgagccctcacagcatgtggtgctcagcctgactttcaagcgttatgtcttcgacacccacaagcgcatggttcagtctccctgagtgtccggtgacctcccccagggcctccttgcccagcccagtccaggctgctgtgccaaatcccaaccagccacgcctcagcctctcccagtctctccctgcagtcctgcagcagcagcccccacccccaagcttggtgctgagccctggtgaggagctgagggggatgggttgctggggccaggagggtctctcctccagcccctgcacactcccacccaggacagcccccagcccaactaggaaagggccatgggcagagggctggtagccagtatcttccactgccccatctgttggccacctgcaggccagtctcaaccctcccccaggtgggcaggcacttgatggctacaaataaatgtcccgtggccccagcccactctaaaaaaaaaaaaaaaaaaaaaaaa

SEQ ID NO: 290418 - DNA, 1000 bp, Homo Sapiens; identical to SEQ ID NO: 117875

SEQ ID NO: 290419 - DNA, 1000 bp, Homo Sapiens
aggtttatgacagtaattgtgtttacattttatggtgcctagtattgacaaaatgttatttccctacattaaacatgactccatagaccttttcatttgtgggtttttatttcctatgatgtatactgccactaaccttccaaaaattacttagtattgcaaagtcaggaatcatcaggaacgtttagctgacaaaatacttgtctgttttaaaaacctgttcaagtctaccaacctgttcaagtctaccaattataagggcaaattggagaaaaagaaaaaatatatactcaagagtggtatcttgcagtatcggcactgtacaaaaaaatcttccaatttagttgttgtagagaaaacatgcagaacaaatgaagacaaaacatacattttgtaccaaccatccaattagcttatggtaactgacaagctccatttaaacagatgtccatcagatgacaagaaaggctgctgtactgaagtaaaacaaacaatacctgaatgctctgtagcctaaactccaaacatcctcttccatatggatccactggctggacaaactgcaccagttgctgcttcaatttatacctcaattttcactgtgtccaggtggtactttggctcgttggctagattaaccttctctgtccgagtgtgccacacgagaacctgaaggggaaggaaatagcttgggtagcgcactcttcatggtgacactcgaggtcgggcagcacaagtgtaatgaataccttagtgcagttatttgctttcggttccagttcttcgactgttgttatctgtttgagaaagtcagattcttgcatccctggctgggatccacgacgcttaaatacagcttttggattggacaaaatgacttgaagacttacagcaaatcctttgtgaaaaataaaaaaaaaaaaagagactttaaaaaaaaaaaaaaaaaaaaaaaaaaaaaaaaaaaaaaaaaaaaaaaaaaaaaaaaaaaaaaaaaaaa

SEQ ID NO: 290420 - DNA, 1000 bp, Homo Sapiens; identical to SEQ ID NO: 223188

SEQ ID NO: 290421 - DNA, 1000 bp, Homo Sapiens; identical to SEQ ID NO: 117876

SEQ ID NO: 290422 - DNA, 1000 bp, Homo Sapiens
aatgtgcataaccacatcaccaatgacaagagattcaatgggtctgaaagcatcaagtcctcttggaatatttcagtagtgaagtttcttctggaaaagctcaagcaagagctggtgaccagtccccacaattacactgataaggagctaaaaggagcctgtgtggcctacttccttactaagaggcgtgagtaccgcaactccctgaacccctttaaaggcctgaaggaaaaagaggagaagaaacttcgaagtcgccgatatcggctttttgccaaccgatccagtatcatgaggcattttggacctgaggaccaacgtctgtggaatgatgtgacagaggaactgatgtcagatgaagaggacagtcttaacgagccaagtgtgtgggtggcccgccctccccgtttccgggcccagcgcctcacagagctctgctaccacctggatgctaactctaagcatggcaccaaagccaaccgtgtgtatgggcctccctcagacagactgccttctgctgaagcccagctccttccaccagaactttacaatcctaatttccaagaagaggaagatgagggaggggatgagaatgcacctggctccccatcttttgaccaaccccacaaaacctgctgtcctgacttgaactcattcattgaaatcaaggtggaaaaggatgaataaaatctacagccaagaataactctggcttccgccatgccccatgtctcagaaataggtggccatggggcttcacaaaataatgagatgctctgtgcagtctgagaaagcaaatttgcctcttttcttaacacagtctctactggggaagcagaacactggtgggataaaaacttatctagaaggggagaaactccctccactgtgaacagtaagccagaatatgcttattcctcagcataaacagtatctcggagaagcctgggatgagaaaatgaggaggatgggtccaagaaacatgaggccttcttgacat

SEQ ID NO: 290423 - DNA, 1000 bp, Homo Sapiens; identical to SEQ ID NO: 223189

SEQ ID NO: 290424 - DNA, 1000 bp, Homo Sapiens; identical to SEQ ID NO: 117877

SEQ ID NO: 290425 - DNA, 1000 bp, Homo Sapiens
taggtccacacagtgatgccatgggggacccttgccttccacacttgcaggtgtcacgttttgcagggaggtgtttgggcctggggctcagccactgggagacagttgggacctgagggacagaggatcggaatggaaaccaccaacgtgcactggcaccctcagaaggcttgtctcacctccaccggcatccacacaaaaccaaacaggagcaggcgtcatccccactattcccatgaatgccatgtcacccctgagcagaagcagtcaaatcttgggcaaaagaatttcggttagaaaagaaaatcccactttaaaatgccagctgcagataactcaaagccatcccttttttctaaagggcacattgagaatgtcacccatttgtaaactgttccctgatgtccttgtttaaacgataataagaaaaagggcaactccatttgttgagggtctttgtgttcttcaatgagaaatcaaatttgagacgttgaaattggagctgcgtgctgctgcactcaccggcttcttctcactctctgtcgtagacacaccgataggaccaatggccaatagatattaaaagcaaaccctcactgctgctgtataaagttgcctaatgtaaatgtctattgtttagtccctaggtcacctttgtgctgtgctgtggagttcagaaacggggtaccatgacctggaatcttttgctcttgtttttgcagtcttcaaggctgggggccctgtctcattgggaagcccctctttataaagcattatattacttggaatggcttggtcaactgtgttcagttcataaatatgttttacatttttatctgcctgttataaagatgaacaaaaaaacttaatgagaaagatcacagatacgtaataatttaaagtctgtagttgaatttcctaacttaaagaatagaccaaaatttctgtgtataaaaaaaaatgaaaggctccttacatcctgaaaaaaaaaaaaaaaaaa

SEQ ID NO: 290426 - DNA, 1000 bp, Homo Sapiens
agctgccctacttttcaattcagatatactagtaccttacctagaaataatgttaacctagggtgaagtcactataatctgtagtctattatttgggcatttgctacatgatgagtgctgccagattgtggcaggtaaagagacaatgtaatttgcactccctatgatatttctacatttttagcgaccactagtggaagacattccccaaaattagaaaaaaaggagatagaagatttctgtctatgtaaagttctcaaaatttgttctaaattaataaaactatctttgtgttcttttctgcaacagatgattccaacatgggtgtttgtctattcttctttactcttgaaacattagaccatgggaggctcttacagccttgagttgatatttatacaacccaaatctaggtttgaacggtgaggtgtcaggtcatcaaatattcatgtctatatagtcttacacaggttctcaaaaaaaatgttcatgggataggtcattgataatggattccttattctgagaactccagacgactgaaatatatgagagaaggaaaaggacatagtaggagcaggcctgagaaaaaaatgaaagtcagaaatctttaaaaaaatacaagatcttatttctatcttattttttctcctcttctgaaatatatatgaggattcctctccaaacccatggtttctctaagaattttgagtcatttgtatgacctcaaataattagttttagctgacctcacataactccttataataggagacatctttaatgtctgctattaaagaaggatgaaaattcctatgaccttctccccgattatccctttggcaatatagagtcaaataataacattgaccaatagtaaacatgctttgccaagaagtagaagatatattctctagccttagtttttcctcccaatttgcatttttgtaaaaataatgttgtatccacaaaggaaataaactttaaaaacccaagtgca

SEQ ID NO: 290427 - DNA, 1000 bp, Homo Sapiens
aggcctggagaaaaggtttgagattcagaagtacgtgaccaagccggaccgaaagcagctggcggcgatgctgggcctcacggacgcacaggtgaaggtgtggttccagaaccggcggatgaagtggcggcactccaaggaggcccaggcccaaaaggacaaggacaaggaggctggcgagaagccatcaggtggagccccggctgcggatggcgagcaggacgagaggagccccagccgttctgaaggcgaggctgagagcgagagcagcgactccgagtccctggacatggcccccagcgacacggagcggactgaggggagtgagcgttctctgcaccaaacaacagttattaaggccccggtcactggcgccctcattaccgccagcagtgctgggagtggtgggagcagcggcggcggcggcaatagtttcagcttcagcagcgccagcagtcttagtagcagcagcaccagtgcgggttgcgccagcagccttggcggcggcggcgcctcggagcttctccctgcaacacagcccacagccagcagcgctcccaaaagccccgagccagcccaaggcgcgcttggctgcttatagactgtactagggcggaggggatccgggccttgcgtgcagcctcccaaccatgggctgggttttgtgcttactgtatgttggcgacttggtagggcaggagacgcagcgtggagcctacctcccgacattcacgcttcgccccacgctgctccgactggctgcagcggacactgcccaaagcagaggggagtctcagtgtcctgctagccagccgaacacttctctccggaagcaggctggttcgactgtgaggtgtttgactaaactgtttctctgactcgccccagaggtcgtggctcaaaggcacttaggacgccttaaatttgtaaataaaatgtttactacggttaaaaaaaaaaaaaaaaaaaaaaaaaaaaaaaaaaaaaaaaaaaaaaaaaa

SEQ ID NO: 290428 - DNA, 1000 bp, Homo Sapiens
aaaccagtctctgattttttttcattagttattttctatcattagtttcactgtgtaaattagatatcaactgcacttctttaaaaaaaaatacatctccctattacctccttgaaagatttacttctgtaggcctttttcaataggctcatgactgcagacaaggaaaaaaaaagtaaaaacaaaaacagtatgtgcctgaaaatgacaaaaaaaaaatttgtaacatttaaaaaagaaacctgaatagcctttaattctttaataatacacttaaattttatgtaaatcggttttcgccacgtgtgtttgttcacattctaaatgacttaatgggattctcacggtctgtgtctttgtgtcacgtgtataaaatgggcttgtgatgtaagcgtttcatctggtcagtggttcctttgatattgtactgctgctgggagtgggctgtggaacctgccttcgggtaactgggttcctcttgggtagattggagagatgggggtgggcgtgggcaaattctcacacatgttttcttaacctatttgcagaaactttcaaaaggcatttgattaaacctcttggcagtacagtattcttgtatttgttaacgtctgtgtttaggtactggtacctttttgttttaaaatgttctaagtgttggctttaaagtgaatttatctttagtatgatagttatatgaaaattataggatttgtgtgcagagaatttttttataaagtgctttgtaaaaaaaaaaaaatgtattctagcttttgcggtacatatgtgtgataactttaatacccatgacagttaagtgcaattatttcatcactctaaaaatgctatttttgtgtcagttcctgcaggtgttttcatgtctttgcaaagtgacacattttgatgccttcttgataaagtggtagacattttgtagctttctagaaactttgtattcatacggtatcaatgaaaaataaagaaaatgaaagtgtgggtc

SEQ ID NO: 290429 - DNA, 1000 bp, Homo Sapiens; identical to SEQ ID NO: 223192

SEQ ID NO: 290430 - DNA, 1000 bp, Homo Sapiens
ccaagatcagtattatttttctcaggtgatgcactggaatctcagcaggagggggtagttagagaagttaatgatgcaatttatgacaaaattatttatgataattggatggctgcaattgaggaagttaaagcttgttgcaaaaaccttgaggcattagtagaagacattgatcgttagagcagagtatacatggccctgaaattaactgccctagatatagttactcaaggtataagaagccttgtgttctgtatttttcttgtagtgttagttaaaacatatgtttcaaaaatataagaaaagttcaaaaactaattaatttgaccttgagttttagtagtagaatgttttcaagaaatgtacactgtggtaaatgatttaaaacactagtatagtgttgtgtagcttaatccttctgaagtctttttgtcatgtagctattaatctgtggctatgaaatgatcagaaatgctaagtgagatcaatatttgtttggaaaaaaaatcttgggaaacaacccaagggttttcgctgttgttgtttttctttttctatttttgtttacttagtcctttagctagtggatttaattttgttgtgcctgcttcattttgcaataacaatgcagtagaatttaaaacttggatgcttaagaggcctgcatatagataagaatttcaggcaaaactacatttattgttaataacagcttgttcataggctcttgtattttatgtaactgtgataaataatgaaacttagttatattgaggttattgtttgtcggtgaagtgttagtcacagtattttcaaaagtttgcacatattgttctgtgtaattgtgtaagccataattacagtgtttaattctcttttcctattacatcattcattgaaagtgatcactttaccattttgaaaagatatttcgtgttctttcactgcaaaataaaaagaataaaaatttcaaaaaaaaaaaaaaaaaaaaaaaaaaaaa

SEQ ID NO: 290431 - DNA, 1000 bp, Homo Sapiens
gccgccgccgccgccagccgctgcagccacgaggagaacccctacttccatggctggctcattggccacccggagatgtcgccccccgactacagcatggccctgtcctacagccccgagtatgccagcggcgccgccggcctggaccactcccattacgggggggtgccgccgggcgccgggcccccgggcctgggggggccgcgcccggtgaagcgccgaggcaccgccaaccgcaaggagcggcgcaggactcagagcatcaacagcgccttcgccgaactgcgcgagtgcatccccaacgtacccgccgacaccaaactctccaaaatcaagaccctgcgcctggccaccagctacatcgcctacctcatggacctgctggccaaggacgaccagaacggcgaggcggaggccttcaaggcagagatcaagaagaccgacgtgaaagaggagaagaggaagaaggagctgaacgaaatcttgaaaagcacagtgagcagcaacgacaagaaaaccaaaggccggacgggctggccgcagcacgtctgggccctggagctcaagcagtgaggaggaggagaaggaggaggaggagagcgcgagtgagcaggggccaaggcgccagatgcgacccaggactccggaaaagccgtccgcgctccgctctgaggactccttgcatttggaatcatccggtttatttatgtgcaatttccttcccctctctttgaccccctttgaggcatctgctccccgtctccccctccaaaaaaaaagtggatatttgaagaaaagcattccatattttaatacgaagaggacactcccgtgtgcaggccgaatcagacccggcgtgggcgaattcagaagtgcccaggtagagacaagctagaggctctgcggacttctgcgggcggtgacaaccgcgagggcgaggggagaaagtcatcaggtcctagacgtgggagaaggagcctaccaaagtgttggagtaaac

SEQ ID NO: 290432 - DNA, 1000 bp, Homo Sapiens; identical to SEQ ID NO: 223195

SEQ ID NO: 290433 - DNA, 1000 bp, Homo Sapiens
caccttcgactatgacatcgcgctgctggagctggagaaaccggcagagtacagctccatggtgcggcccatctgcctgccggacgcctcccatgtcttccctgccggcaaggccatctgggtcacgggctggggacacacccagtatggaggcactggcgcgctgatcctgcaaaagggtgagatccgcgtcatcaaccagaccacctgcgagaacctcctgccgcagcagatcacgccgcgcatgatgtgcgtgggcttcctcagcggcggcgtggactcctgccagggtgattccgggggacccctgtccagcgtggaggcggatgggcggatcttccaggccggtgtggtgagctggggagacggctgcgctcagaggaacaagccaggcgtgtacacaaggctccctctgtttcgggactggatcaaagagaacactggggtataggggccggggccacccaaatgtgtacacctgcggggccacccatcgtccaccccagtgtgcacgcctgcaggctggagactggaccgctgactgcaccagcgcccccagaacatacactgtgaactcaatctccagggctccaaatctgcctagaaaacctctcgcttcctcagcctccaaagtggagctgggaggtagaaggggaggacactggtggttctactgacccaactgggggcaaaggtttgaagacacagcctcccccgccagccccaagctgggccgaggcgcgtttgtgtatatctgcctcccctgtctgtaaggagcagcgggaacggagcttcggagcctcctcagtgaaggtggtggggctgccggatctgggctgtggggcccttgggccacgctcttgaggaagcccaggctcggaggaccctggaaaacagacgggtctgagactgaaattgttttaccagctcccagggtggacttcagtgtgtgtatttgtgtaaatgagtaaaacattttatttctttttaaaaaaaaaaa

SEQ ID NO: 290434 - DNA, 1000 bp, Homo Sapiens; identical to SEQ ID NO: 117884

SEQ ID NO: 290435 - DNA, 1000 bp, Homo Sapiens
gaaaaagcttgacaatttgcagtgcttgtactgtgagaagaccttcagggacaaaaatacacttaaagatcacatgaggaaaaaacagcatcgtaagattaatcctaagaacagagaatatgacagattttatgtcatcaattatttggaacttggaaaatcgtgggaagaagttcagttggaagatgatcgggagttgctggaccatcaggaagatgactggtctgattgggaagaacaccctgcctctgcagtctgcttattttgtgaaaagcaagcagaaacaattgagaagttgtatgtccacatggaggatgcacacgaatttgatcttctcaaaataaagtcagaacttggattaaatttctatcagcaagtgaaactggtcaattttattcggaggcaagttcaccaatgcagatgttatggctgccatgtgaagttcaaatccaaagcagacttaagaactcacatggaagaaactaaacacacttcgctgctccccgatagaaagacgtgggatcaactggagtattattttccaacctatgaaaatgacactctcctgtgtacactatctgacagtgaaagtgacctgacagctcaggaacaaaatgaaaatgttcccatcatcagtgaagatacatctaaactgtatgctttgaaacaaagcagtattttgaaccagttgctactataagagtacttgaaaacctagaagaaactaccacagaagcaatttttcatgtttttctcctatgagacagatatgaaagaacaatttaaatttgaacatcaacaaaagattggtccttggtgaaataaacttttcaaaaatgaatgttcttttcaaaaaataaagtagaaaaatgcacttactaagaacatgaaaaaaaatgaagtaggaaaataagatgaagactttgtattttggctgtaaagttttattgtgtgatcatcttaaattatctcacttcattaaactcataattatatatag

SEQ ID NO: 290436 - DNA, 1000 bp, Homo Sapiens
tacaaactgcaacgcagagaaactattaaaggtattcagaaacgtgaagccagcaattgtttcgcaattcggcattttgaaaacaaatttgccgtggaaactttaatttgttcttgaacagtcaagaaaaacattattgaggaaaattaatatcacagcataaccccaccctttacattttgtgcagtgattattttttaaagtcttctttcatgtaagtagcaaacagggctttactatcttttcatctcattaattcaattaaaaccattaccttaaaatttttttctttcgaagtgtggtgtcttttatatttgaattagtaactgtatgaagtcatagataatagtacatgtcaccttaggtagtaggaagaattacaatttctttaaatcatttatctggatttttatgttttattagcattttcaagaagacggattatctagagaataatcatatatatgcatacgtaaaaagggaccacagtgacttatttgtagttgttagttgcccctgctaccctagtttgttaggtgcatttgagcacacattttaattttcctctaattaaaatgtgcagtattttcagtgtcaaatatatttaactatttagagaatgatttccacctttatgttttaatatcctaggcatctgctgtaataatattttagaaaatgtttggaatttaagaaataacttgtgttactaatttgtataacccatatctgtgcaatggaatataaatatcacaaagttgtttaactagactgcgtgttgtttttcccgtataataaaaccaaagaatagtttggttcttcaaatcttaagagaatccacataaaagaagaaactattttttaaaaattcacttctatatatacaatgagtaaaatcacagattttttctttaaataaaaataagtcattttaataactaaaccagattctttgtggatactattaaagtaacatttaagcctcaaaaaaaaaaaaaaa

SEQ ID NO: 290437 - DNA, 1000 bp, Homo Sapiens
agatcccactaaagtgtcaaggtgtggaagggaccaagcgaccaaggataggccatctggggtctatgcccacatacccacgtttgttcgcttcctgagtcttttcattgctacctctaatagtcctgtctcccacttcccactcgttcccctcctcttccgagctgctttgtgggctccaggcctgtactcatcggcaggtgcatgagtatctgtgggagtcctctagagagatgagaagccaggaggcctgcaccaaatgtcagaagcttggcatgacctcattccggccacatcattctgtgtctctgcatccatttgaacacattattaagcaccgataataggtagcctgctgtggggtatacagcattgactcagatatagatcctgagctcacagagtttatagttaaaaaaacaaacagaaacacaaacaatttggatcaaaaggagaaatgataagtgacaaaagcagcacaaggaatttccctgtgtggatgctgagctgtgatggcgggcactgggtacccaagtgaaggttcccgaggacatgagtctgtaggagcaagggcacaaactgcagctgtgagtgcgtgtgtgtgatttggtgtaggtaggtctgtttgccacttgatggggcctgggtttgttcctggggctggaatgctgggtatgctctgtgacaaggctacgctgacaatcagttaaacacaccggagaagaaccatttacatgcaccttatatttctgtgtacacatctattctcaaagctaaagggtatgaaagtgcctgccttgtttatagccacttgtgagtaaaaatttttttgcattttcacaaattatactttatataaggcattccacacctaagaactagttttgggaaatgtagccctgggtttaatgtcaaatcaaggcaaaaggaattaaataatgtacttttggctaaaaaaaaaaaaaaaaaaaaaaaaaaaaaaaaaaaaaaaaaaaaaaaa

SEQ ID NO: 290438 - DNA, 1000 bp, Homo Sapiens; identical to SEQ ID NO: 117885

SEQ ID NO: 290439 - DNA, 1000 bp, Homo Sapiens
tctgtccctcttaatggatgtggtacaatcagaaaggtagaagatcagtcaattacttacaccaatataatcaccttttctgcatcctcaacttctgaagtgatcacccgtcagaaacaactccagattattgtgaagtgtgaaatgggacataattctacagtggagataatatacataacagaagatgatgtaatacaaagtcaaaatgcactgggcaaatataacaccagcatggctctttttgaatccaattcatttgaaaagactatacttgaatcaccatattatgtggatttgaaccaaactctttttgttcaagttagtctgcacacctcagatccaaatttggtggtgtttcttgatacctgtagagcctctcccacctctgactttgcatctccaacctacgacctaatcaagagtggatgtagtcgagatgaaacttgtaaggtgtatcccttatttggacactatgggagattccagtttaatgcctttaaattcttgagaagtatgagctctgtgtatctgcagtgtaaagttttgatatgtgatagcagtgaccaccagtctcgctgcaatcaaggttgtgtctccagaagcaaacgagacatttcttcatataaatggaaaacagattccatcataggacccattcgtctgaaaagggatcgaagtgcaagtggcaattcaggatttcagcatgaaacacatgcggaagaaactccaaaccagcctttcaacagtgtgcatctgttttccttcatggttctagctctgaatgtggtgactgtagcgacaatcacagtgaggcattttgtaaatcaacgggcagactacaaataccagaagctgcagaactattaactaacaggtccaaccctaagtgagacatgtttctccaggatgccaaaggaaatgctacctcgtggctacacatattatgaataaatgaggaagggcctgaaagtgacacacaggcctgcatgtaaaaaaa

SEQ ID NO: 290440 - DNA, 1000 bp, Homo Sapiens; identical to SEQ ID NO: 117886

SEQ ID NO: 290441 - DNA, 1000 bp, Homo Sapiens
gcaggacccaaacactcagaaatcaagaacctctgcctccgagacaggctggcccacagtgctggctgggccccaatgcaccgtccctcagctcaggagggatgggcctgacctgacgctcagggttgacatcttatttgaacaagggtcccccgccatcatgcagcctccaaggtgccaagaggactccctatgcccaggcctgcccggtgcccaccctgctggtaggagccagcggctctggccaagtgcacgagggtctctgtgtttccagaaggccccacacacccaagtgcccctcacacctcgtgcctccccctcacagggtggccacctgcaccagcgtcagggcccagggtgctgtgaccgatgagacctcagctcagccctcaggtgcagtggccctacccagcctggccagcagacacacacagggatgctcacgggtgcaccaggagccaggtgcggcgcagccaaccctgagcctgcagggagacctgcaggaagcccaccgtgccccatgcaggggctccctccagcacacagccctcaccccagcacagccagcaaggacacgctctccccaacagggtgcttcggcgggaggtgggggaacaaggggtcttccgagcagcccccagccctcccctcccatctgtgcctctgtaaggggctctgggacgcccagaccctgcccgccgcccacctggtggtgacaagctccagcagccagtgggtccggacctgcttgatgccgcggtgagggacggcgcccacataggcgaggttgagctgctggtcccagctgaggacgtactggtcagcctggctgtgtggcagcggggggctggggacaacaaaggggcggctcagtcccgagcctcagcatggctggcagcgcggctgacacacacgttcaagcccaggactgcccgggcgcaggatccaggcgctgcccgtgcgttcagtgactaataaaatgacccttagggccaggaaa

SEQ ID NO: 290442 - DNA, 876 bp, Homo Sapiens
agcgggcgctgtcagaaccggattgggccgcggcggggacggaagcggcccctgggcccgaggggctggagccgggccggggcgatgtggagcgcgggccgcggcggggctgcctggccggtgctgttggggctgctgctggcgctgttagtgccgggcggtggtgccgccaagaccggtgcggagctcgtgacctgcgggtcggtgctgaagctgctcaatacgcaccaccgcgtgcggctgcactcgcacgacatcaaatacggatccggcagcggccagcaatcggtgaccggcgtagaggcgtcggacgacgccaatagctactggcggatccgcggcggctcggagggcgggtgcccgcgcgggtccccggtgcgctgcgggcaggcggtgaggctcacgcatgtgcttacgggcaagaacctgcacacgcaccacttcccgtcgccgctgtccaacaaccaggaggtgagtgcctttggggaagacggcgagggcgacgacctggacctatggacagtgcgctgctctggacagcactgggagcgtgaggctgctgtgcgcttccagcatgtgggcacctctgtgttcctgtcagtcacgggtgagcagtatggaagccccatccgtgggcagcatgaggtccacggcatgcccagtgccaacacgcacaatacgtggaaggccatggaaggcatcttcatcaagcctagtgtggagccctctgcaggtcacgatgaactctgagtgtgtggatggatgggtggatggagggtggcaggtggggcgtctgcagggccactcttggcagagactttgggtttgtaggggtcctcaagtgcctttgtgattaaagaatgttggtctatgaaa

SEQ ID NO: 290443 - DNA, 1000 bp, Homo Sapiens; identical to SEQ ID NO: 223200

SEQ ID NO: 290444 - DNA, 1000 bp, Homo Sapiens; identical to SEQ ID NO: 223201

SEQ ID NO: 290445 - DNA, 1000 bp, Homo Sapiens; identical to SEQ ID NO: 117887

SEQ ID NO: 290446 - DNA, 1000 bp, Homo Sapiens
tacactaatttgaactcttaaagattgctgcttttttttgatattgtcaataatgaaacccaattgtaaaacagtcaccatttactaccagtaacttttagttaatgtcttacaaggaaaaagacacaataagaagagtttaattttttttttttttttgagcctgggcgacagagtgagactccgtctcaaaaaaaaaaaaaaaaagaaatgtttcattttggtttttcaccaaccttcctttgataggacaaagcagatactaagagggggaggaaaggctgttctgtgtctgaacccagttgggctagtccccaagaggagctgagagccatgtactctaatgcctcccttttcttcccccagccctgcctgatgtggctctgggaattcctgcagagaagagcaggggtggccaggagatagtgagcagctcccaggaggcatggagggatccagaacctggactgaagaaccacctagaaataactcagcagaattctgaaaatgaggtcacgctgggtaagaatgcctttttttttttttcatagtcaaagttagctatggagtttctgtagtattcactactccagacctttttcaagttgaattttttttctttttccctatgtctgttcttacgtattttttttaaacttttatttcagtagtgtttggggaacaagtagtgtttggttgcatggaaaagttcttcagtggtgatttctgagattttggtgcacccatcacccaagggtagtcttttttatccatcaagtctgtacccaatgtgtagtctttgtttttttctttttttttttttttgagactgagtctcattctatcacccaggctggagtggagtggtatgatcttgactcactgcaacatctgcctcccgggttcaagtgattctcctgcctcagcctcctgagtcgctgggattactgagattgtgccactgcactccagcctgggcgacagagtgagactccgtctc

SEQ ID NO: 290447 - DNA, 1000 bp, Homo Sapiens; identical to SEQ ID NO: 117888

SEQ ID NO: 290448 - DNA, 1000 bp, Homo Sapiens
agaatggaagcttgtgaggagacggactctatgttgcccaggctgttatggaactcctgagtcaagtgatcctcccaccttggcctctgaaggtgcgaggattataggcgtcacctaccacatccagcctacacgtatttgttaatatctaacataggactaaccagccactgccctctcttaggcccctcatttaaaaacggttatactataaaatctgcttttcacactgggtgataataacttggacaaattctatgtgtattttgttttgttttgctttgctttgttttgagacggagtctcgctctgtcatccaggctggagtgcagtggcatgatctcggctcactgcaacccccatctcccaggttcaagcgattctcctgcctcctcctaagtagctgggactacaggtgctcaccaccacacccggctaattttttgtatttttagtagagacggggtttcaccatgttgaccaggctggtctcgaactcctgacctggtgatctgcccacccaggcctcccaaagtgctgggattaaaggtgtgagccaccatgcctggccctatgtgtgttttttaactactaaaaattatttttgtaatgattgagtcttctttatggaaacaactggcctcagcccttgcgcccttactgtgattcctggcttcattttttgctgatggttccccctcgtcccaaatctctctcccagtacaccagttgttcctcccccacctcagccctctcctgcatcctcctgtacccgcaacgaaggcctgggctttcccaccctccctccttagcaggtgccgtgctgggacaccatacgggttggtttcacctcctcagtcccttgcctaccccagtgagagtctgatcttgtttttattgttattgcttttattattattgcttttattatcattaaaactctagttcttgttttgtctctcaaaaaaaaaaaaaaaaaaaaaaaaaaaaaaaaaaaaac

SEQ ID NO: 290449 - DNA, 1000 bp, Homo Sapiens; identical to SEQ ID NO: 223204

SEQ ID NO: 290450 - DNA, 1000 bp, Homo Sapiens
ccctgggctaggaaccatatggaggtgactttgaggccacagctgtccctaggtgatcacagaacttagctcctttaacaacaggacaatggttttttaccctagatgttcccaccttcagtgctccacgccctccatagaccttcagagaaggtgaaaccaggttatctgggaatctttccagcccgcaggtcgccacggccatccctttgctcccagcctggctccatcagcctccagcttcctttcttcattctgtccttcagggaaggcagaagaaacattggaaagcatctagtccagtgggaagccaggggttggagaaggtgctacatccctcttcccatcaatatcctaaatgtgggggagggcccagagaatggcacccaagagcctgcggggatgcccatcccacacaccccacccagctgttctaaccctgctatccacagccctggaggaactggggctcctggaaggaggaagaggctctccactgtccaccctaacacataccctcccacccaccttccagacccccttggttggcaccctctcctccggttccctctcaccccatggctgtgaatgacaggacaggtcacacgtgtgttttccattgggtttaatttaatggacgtgcagtttcatttgtaaattgtgcattagccacctccttcagtggcaggatgtgagtggctacctggctcaactggaggggaccccttgggccctctggggcttcccctcccccacctggttggggtagagcaaaaggatggtcactcttccgaggtctccctgaaatgaatgtatttctcccccaaaagagctgatatttaatgttttaataaggatttttgagaaacaaataaccttatttataatctgggtgatccaatcattttttactcccttttgatgccatacatagaggaaagtctagcttttttggcgtgagacttttgcaatgtgcagtgggataaaatgcatttccttt

SEQ ID NO: 290451 - DNA, 1000 bp, Homo Sapiens; identical to SEQ ID NO: 117890

SEQ ID NO: 290452 - DNA, 1000 bp, Homo Sapiens
gtggacagccggcagctcaaggtatgtgccacctgctttgacctctcggtcagcctgctgcgtgtcttggagatgactatcacactggtgcctgagatattccttgactggacccggcctacctctgagatgctgctgcggcgtcttgcacagctgctaaaccaggtgctgaaccgggtgacagctgagaggaacctgtttgatcgtgtggtcaccctacggctgcctggcctagagagcgtggaccactatcccattctggtggcagtgacgggcatcctggtgcagctcctggtgcgtggcccagcctcagagagagagcaagccacatcagtgctcctggcagatccctgcttccagctacgctcaatatgctatctcctgggacagccagagcccccagcacctggcactgctctgccagcccctgaccggaagcgcttctccctgcagagctatgcggattatatcagtgccgatgagctggcccaagtggaacagatgctggcgcacctgacctctgcatctgcccaggcagcagctgcctccctgcccaccagtgaggaggacctctgccccatctgctatgcccaccccatctctgctgtgttccagccctgtggccacaagtcctgcaaagcctgtatcaaccagcacctgatgaacaacaaggactgcttcttctgcaaaaccaccatcgtgtctgtagaggactgggagaagggagccaatacgagtactacctcctcagctgcctagccctcacagcctgtgccatcctggaacctccacctttgaacccagagccaggctgggccctatttatgagctccctttgcccttctcctgtatcccacaccaccacatccaacctccttgcctgcctgtatcctcattggtgggagcccagccatggccctaattgtgcctgagcttgactttcagtcagggccacagtgagcattaaattattattccatacaaaaaaaaaaaaaaaaaa

SEQ ID NO: 290453 - DNA, 1000 bp, Homo Sapiens; identical to SEQ ID NO: 117891

SEQ ID NO: 290454 - DNA, 1000 bp, Homo Sapiens; identical to SEQ ID NO: 223207

SEQ ID NO: 290455 - DNA, 1000 bp, Homo Sapiens
tgctgcttctcttctcccagtgttggctctggaattaagggatggggagaaggttctggatctctgtgctgctcctggagggaaatcaatagctctgctgcagtgtgcttgtccaggttatcttcattgtaatgaatatgatagtctgagattgaggtggctaaggcagacgttggaatctttcatcccacagcctttgataaatgtaattaaagtgtctgaattggatggcagaaaaatgggagatgcccagcctgaaatgtttgacaaggtgttagtggatgctccgtgttcaaatgatcgaagctggttgttttcttctgactctcagaaggcatcctgtaggataagtcaaaggaggaatttgcctcttctacagatagagctgttaaggtctgcaattaaggccttacgtcctggagggatacttgtatactctacatgcacgctttccaaggcagaaaatcaagatgtgatcagtgaaattttaaactcccacggtaacatcatgcctatggacattaaaggaatagcaaggacttgctcccacgacttcacatttgctcccactggccaggaatgtgggctcttagtgattccagataagggcaaagcctggggcccaatgtatgtagccaaattgaagaaatcatggagcacaggaaaatggtgacatgaatttgtaaactgtgtttatgtgttattatatttatatttctgaactcagtacatgttaatatttaaataattatgcagtaactttctctgggtctgtttggaatcctatttagttaatactttagcatcttagaatctaggcttgagaattgttcaggtgtatttttttcctagaaatatatctgtaacaatgatttaaggtggtgcagatggtgtttgttctatattataaatctgctgtctttgcttggcattttatagttaaattaattagaatatgtggttttatgctaaaaaaaaaaaaaaaaaaaaaaaaaaaaaa

SEQ ID NO: 290456 - DNA, 1000 bp, Homo Sapiens
cccagaagctaaaaaactagacattagttgttttggttgctttgttggaatggaatttaaatttaaatgaaaggaaaaatatatccctggtagttttgtgttaaccactgataactgtggaaagagctaggtctactgatatacaataaacatgtgtgcatcttgaacaatttgagaggggaggtggagttggaaatgtgggtgttcctgttttttttttttttttttttttagttttcctttttaatgagctcaccctttaacacaaaaaaagcagggtgatgtattttaaaaaaggaagtggaaataaaaaaatctcaaagctatttgagttctcgtctgtccctagcagtctttcttcagctcacttggctctctagatccactgtggttggcagtatgaccagaatcatggaatttgctagaactgtggaagcttctactcctgcagtaagcacagatcgcactgcctcaataacttggtattgagcacgtattttgcaaaagctacttttcctagttttcagtattactttcatgttttaaaaatccctttaatttcttgcttgaaaatcccatgaacattaaagagccagaaatattttcctttgttatgtacggatatatatatatatagtcttccaagatagaagtttactttttcctcttctggttttggaaaatttccagataagacatgtcaccattaattctcaacgactgctctattttgttgtacggtaatagttatcaccttctaaattactatgtaatttactcacttattatgtttattgtcttgtatcctttctctggagtgtaagcacaatgaagacaggaattttgtatatttttaaccaatgcaacatactctcagcacctaaaatagtgccgggaacatagtaagggctcagtaaatacttgttgaataaactcagtctcctacattagcattctaaaaaaaaaaaaaaaaaaaaaaaaaaaaaaaaaaaaaaaaaag

SEQ ID NO: 290457 - DNA, 1000 bp, Homo Sapiens; identical to SEQ ID NO: 117893

SEQ ID NO: 290458 - DNA, 1000 bp, Homo Sapiens
actatgacagagatggtggagacaaggatgcccgagactctgtccaaatgcgtctagaacagagactccgagatggacaggaagatggctctgtgatcgaacgccaggtgggcacctttgagcgccacaccaagggcattgggcggaaggtgatggagcggcagggctgggctgagggccagggcctgggctgcaggtgctcaggggtgcctgaggccctggatagtgatggccaacaccccagatgcaagcgtggattggggtaccatggagagaagctacagccatttgggcaactgaagaggccccgtagaaatggcttggggctcatctccaccatctatgatgagcctctaccccaagaccagacggagtcactgctccgccgccagccacccaccagcatgaagtttcggacagacatggcctttgtgaggggttccagttgtgcttcagacagcccctcattgcctgactgaccgggttgggggcttcctttcatagctacatgatgaaaaccctctgccctggcctcatctaccactgaagcagaaaggagtctgggagcagcagtcttcgtggctggttcagggtgttttgttccgagcctgcctgcctgccggttctatacctcaggggcatttttacaaaaagccccctcccgtcccctccccttggatattaggggtaacgaccgcttgtctttggtctctaaccctaatctctgggcttgccctttgcctcctgcagaactttgaaaagctgggttgagtgaggctatcagcacagccttccttggggactctgaaggtgtccccacgaaggccagaaagggggaaagggacctgggcgaggagaggatttgtggtgcttggaagagccggccttgggtgggccctccaccgcctctaccctcactgggtgggactgccagcggagagtccgcgggaggtggcttgggtgtgcgacgtcacggaagaataaagacgtttactactgg

SEQ ID NO: 290459 - DNA, 1000 bp, Homo Sapiens; identical to SEQ ID NO: 223209

SEQ ID NO: 290460 - DNA, 1000 bp, Homo Sapiens; identical to SEQ ID NO: 117894

SEQ ID NO: 290461 - DNA, 1000 bp, Homo Sapiens
caaaccactgtggagcctgaagctccttaagaagagtccacaacagctggtgggagggtggggtgggcctgggtccagaccaggctcgctgctctctgggcctcagtttccccacctgccagcgggctcggccctgtcctcctcacaggctggtgtggccgtcagggtgggtggggttattgttagtaggcgcagcctcattcccaccacgatctgttccgcgtggttcccgccaaacctccctcggtcgccgtgttctccgcaagcctcctgcagcgcccgcctgccaatgtgaggctggcaccaggctgcagcctccccaatcccagcccactttgctgtgtctctggcgggctgtcctccttggtgggagctgtcctgcacactgtaggatgcttaaaggtatccctggcctccacccacccctagccagcagctcccagtcagacaacagccagaaatgtctccagactctgcccagcctccccaggtagccaccctcgagacacgacctcagagtctctgtgtctcctagaagcctgacagagacccccagggcagtgggtgggtggcgggctagagacccttgcctgtgtccgggaccctggcgccgctctcccctcctgtggatccctccgcactaacagtgttctcagtgggcagacgcctgggcaccccttgggccctgcccagcatggccatggcgcaggctctcgaacccgcatggctttcccaggcctggtgattctgctctccagggacggttggcaccttcctcgggggcgggccccacgcaccccagaacacacagacccacctttctggcgttctttctacctcccttttcgttgcctgaggagctggtggtttcatgagttaatgatacatcttgcaaggtgtacacatagagaaaaaaacctaaaaatgtggaaaagcacgccaaagccttatttaaataataactattaaactattcaaaaagaaaaaaaaaaaaaaaaaa

SEQ ID NO: 290462 - DNA, 1000 bp, Homo Sapiens
tgatgccataactttatgtgtcgatacttgtcaaatcagttactgttcaggggatccttctgtttctcacggggtgaaacatgtctttagttcctcatgttaacacgaagccagagcccacatgaactgttggatgtcttccttagaaagggtaggcatggaaaattccacgaggctcattctcagtatctcattaactcattgaaagattccagttgtatttgtcacctggggtgacaagaccagacaggctttcccaggcctgggtatccagggaggctctgcagccctgctgaagggccctaactagagttctagagtttctgattctgtttctcagtagtccttttagaggcttgctatacttggtctgcttcaaggaggtcgaccttctaatgtatgaagaatgggatgcatttgatctcaagaccaaagacagatgtcagtgggctgctctggccctggtgtgcacggctgtggcagctgttgatgccagtgtcctctaactcatgctgtccttgtgattaaacacctctatctcccttgggaataagcacatacaggcttaagctctaagatagataggtgtttgtccttttaccatcgagctacttcccataataaccactttgcatccaacactcttcacccacctcccatacgcaaggggatgtggatacttggcccaaagtaactggtggtaggaatcttagaaacaagaccacttatactgtctgtctgaggcagaagataacagcagcatctcgaccagcctctgccttaaaggaaatctttattaatcacgtatggttcacagataattctttttttaaaaaaacccaacctcctagagaagcacaactgtcaagagtcttgtacacacaacttcagctttgcatcacgagtcttgtattccaagaaaatcaaagtggtacaatttgtttgtttacactatgatactttctaaataaactctttttttttaaaaaaaaaaaaaaaa

SEQ ID NO: 290463 - DNA, 1000 bp, Homo Sapiens
tcaggatgacttccagtccccgccaattgtggagctgagggagaagatccagcccgagatccttgagctgatcaagcagcagcgcctgaaccggctctgtgagggcagcagcttccgaaagattgggaaccgccgaaggcaagaacggttctggtactgccggttggcactgaaccacaaggtccttcactatggtgacttggatgacaacccacaaggggaggtgacatttgaatccctgcaggagaaaattcctgttgcagacattaaggccattgtcactgggaaagattgtccccacatgaaagagaaaagtgctctgaaacagaacaaggaggtgttggaattggccttctccatcctgtatgaccctgatgagaccttaaacttcatcgcacctaataaatatgagtactgcatctggattgatggcctcagtgcccttctggggaaggacatgtccagtgagctgaccaagagtgacctggacaccctgctgagcatggagatgaagctgcggctcctggacctggagaacatccagattcccgaagccccaccccccatccccaaggagcccagcagctatgactttgtctatcactatggctgagcctggagccagaaacgacggtacccaggagaagggattttgggcccaggagaaacacttacattctggtgccttgtcttttgcttgtacagaatctgtagtgattttggtggccagtaaatgccagccatttctcaaacccacctcggaccacccagagtttcctcttggtccctgtctactaagagtcatgaaggcagggtgctctgcccactccatcaccatgaagcctgggattgggccacgaggaacaaacagcagatgcccttgccttccagtccaagaaactgcttcttgaaatggatttaacaacagccaggagcttcctgtcagtaaccatgttttcaataaatactctttcatgtacaaaaaaaaaaaaaaaaaaaa

SEQ ID NO: 290464 - DNA, 1000 bp, Homo Sapiens; identical to SEQ ID NO: 117895

SEQ ID NO: 290465 - DNA, 1000 bp, Homo Sapiens; identical to SEQ ID NO: 223212

SEQ ID NO: 290466 - DNA, 1000 bp, Homo Sapiens
acatggctctgtacagcctgacccagttcatctccgtcctgatcctctacacgatcaacaccaacctgggtgacctgcagttcctggccatcgacctggtcatcaccaccacagtggcagtgctcatgagccgcacggggccagcgctggtcctgggacgggtgcggccaccgggggcgctgctcagcgtgcccgtgctcagcagcctgctgctgcagatggtcctggtgaccggcgtgcagctagggggctacttcctgaccctggcccagccatggttcgtgcctctgaacaggacagtggccgcaccagacaacctgcccaactacgagaacaccgtggtcttctctctgtccagcttccagtacctcatcctggctgcagccgtgtccaagggggcgcccttccgccggccgctctacaccaatgtgcccttcctggtggccctggcgctcctgagctccgtcctggtgggccttgtcctggtccccggcctcctgcaggggccgctggcgctgaggaacatcactgacaccggcttcaagctgctgctgctgggtctggtcaccctcaacttcgtgggggccttcatgctggagagcgtgctagaccagtgcctccccgcctgcctgcgccgcctccggcccaagcgggcctccaagaagcgcttcaagcagctggaacgagagctggccgagcagccctggccgccgctgcccgccggccccctgaggtagtgcaggcccacgggcaccccagacactggaactccctgcctctgagccaccaactggacccctctccagcaacaccaccgccaccacctcccacatccctgaggttggcgactgtctacactcctcccccgagaccacccccaccctggggaagcgttgactactgtcccctaccttggaccatcccgcgtaggggtggcagcccccagctcccctcagtgctgctgtcagtgtagcaaataaagtcatgatattttcctggc

SEQ ID NO: 290467 - DNA, 1000 bp, Homo Sapiens; identical to SEQ ID NO: 223213

SEQ ID NO: 290468 - DNA, 1000 bp, Homo Sapiens
cgtaacgggcacctcaagttccacatccagcggctgcacagtcctgatgggaggaagtcaggaacccctacagcccgggcccctacccagaccccaacccagaccatcatcctgaacagtgatgacgaaacactggccaccctgcacactgcactccagtccagtcacggggtcctgggcccagagcggctacagcaggcactgagccaggaacacatcatcgttgcccaggaacagacagtgaccaatcaggaggaagccgcctacatccaagagatcaccacggcagatggccagaccgtacagcacctggtgacctccgacaaccaggtgcagtatatcatctcccaggatggtgtccagcacctgctcccccaggaatatgttgtggtccctgaaggccatcacatccaggtacaggagggccagatcacacacatccagtatgaacaaggagccccgttccttcaggagtcccagatccagtatgtgcctgtgtccccaggccagcagcttgtcacacaggctcaacttgaggctgcagcacactcagctgtcacagcagtggctgatgctgccatggcccaagcccagggcctgtttggtacagacgagacagtgcccgaacacattcaacagctgcagcaccagggcatcgagtacgacgtcatcaccctggccgatgactgagccccgagggcccaacacagatcatggatttgcggccagctctcctgggggtagggggccaccaggactcacctccctcttcatttaggatctccagatactggatagccagcatcctctcattcccagggagccagacctgtgctgttggggttaggggcagccatgggccccagccaggacatgctgggtgccccagcctgcaggcaggctttgggagagaaatttatttttgtttgggtggacccactggcctgtcagtctcaataaagggaccggagtccagtcctgaacagcttaaaaaaaaaaa

SEQ ID NO: 290469 - DNA, 1000 bp, Homo Sapiens
catatgggagtgatgggagacagtgacagatcatcaggcattagattctcataaggagtgcacaatctagatcctttggtgtgcagttcacagtaggatttgggctcctatgataatctaatgccactgctgatctgacaggaggcagagctcaggcggtaatgcaagcaatggggagtggctgtaaatatagatgaagcttcagctcgcctgccgctcaccttgtgctgtgcagcccggttcctaacagaccacagaccccacaccaggtctatctcatttggtctcagagctgtgaatcagccagcaatattttagttgcaaatcactgaaaacccaactcaaagtgacttaagtcagaaagaaattttatgaattcaggtaattaaaaagtccagaagtatctgcctttaggcacagctggatccaagggcacaaatgatgtcatcaggctccagttattctccatctcccagctcagctttttctgtctgtaagcctgattttcaggaaggctctttcctagtgatggagatgaccaccatcagctccaggcttctatcctgctaacccagtaacccagtgggaagagatttacttattccaataattccaagtggagagtgtcattgacccgtttggggtctcatctctacttctaggggaatgaaacactttgagtggccaggcctgtgtcatgtgctaattcctagagccagggaaataaggtctgaggattcaggatggggtgaaaggtggttgcttaaaggaaaatgaaatacaattagcagaataaggggaaacgagtggtctgctctgctcgggcaaaacaagagatgcccattactgtgagggacccttgaagtctggactcttaaatgggtttttgctgatttcctgggtgcatgctaggatgatggggcttgatgcagtagggaagagacgatgtaaaaataataaacaatatataccttcaaaaaaaaaaaaaaaaaaaaaaaaa

SEQ ID NO: 290470 - DNA, 1000 bp, Homo Sapiens
gcctatgcaaaaattcatctttcggtgattgtgggcggccaatacataccttctgtaactcctccctacctattctagatcctgcatatctactggagccatatgagccctcaggggcactggtgtcctgcagtcttactagtcagccacagtccaggttccagcaacactagctacctaccaaacaaaacacttctgagcttttcttgccatttggttgcctgggacctggaaagtgtttagattcttgataaagatggaaatggaagagaaagaaaattatatatgtatatactaaagatccagacatcagggctgggcacagcggttccgcctgtaatcccagcactttgggaggtccaggcaggtggatctcttgagaccaggaggtcaagaccagcctggccaacgtggtgaaacactgtctctactaaaaatacaaaaatgagctgggtgtgatgatacatgcctgtaatcctggctacttgggaggctgaggcatgagaattgcttgaacctgggaggtggaggttgcagtgagctgagctcatgcgactgcactccagcctgggtgactgagcaagactctgcctcaaaaaaacaaataaataaataaaatcctgacatcctgccatcttttctcttcaatttaaagttgatttcttaatgatgacttcaaaaattaataaaaagaaaagaaaaaaatgatttctggccgggcgtggtggctcaagcctgtaatcccagcactttgggaggccgaggtgggcggatcacgaggtcaggagattgagacctcctggctaacacggtgaaaccccgtctttactaaaaatacaaaaaaaattagctgggcgtggtggcggatgcctgtagtcccagctactcaggaggctgaggcaggagaatggcgtgaacccagaaggcagagcttgcagtgagccaagatcgcgccactgcactccagcctgggtgacagagcgagactccgtctcaaaaa

SEQ ID NO: 290471 - DNA, 1000 bp, Homo Sapiens
gggtttcaccatgttggccaggctggtctcaaactgctgacctcaagtgatccacccaccttggcctcctaaagtgctgggattacaggcgtgaaccactgtgtccagttgccaaacctaattatgtttaaacatgaactctttttttaattaaaattttttaaaattttatttacattaaaatggagatgggatcactatgttgcccatgctggttctgaactcctgggctcaaagatcctcccgccttggtctcccagagtgttaggattacaggcgtgagccaccacacccagccagtgaactcttcttaataaaactttaaaatttggcaaaagtttagtttgagtttttaaaaactaggaagacagacgagaaaaaagaaaacagagtcagagctaaacaatgttaacattttgggtttgctactcaacaagcagaaatcattgtgtctgcattggtcaagatcctggaggccaacatggacatcgtctacaaagatatggtcaccaagatgcagcaggaaatcacttttcagcaagtaatgtctcagattgcgaatgtgaaaaaggatatgattattttggagaagagtgaattttcagccctcagagcagaaaatgagaaaataaaactcgaactacatcagttaaaacaacaagtaatggatgaagtgatcaaagtccgaacagataccaaattagacttcaacctagaaaagagcagagtaaaagaattgtattcattgaacgaaaagaagctgctggaattgagaacagaaatagtggcattgcatgcccagcaagatcgggcccttacccagacagacaggaagatcgaaactgaggttgctggcctcaaaaccatgcttgagtcacacaagcttgataatattaaatatttagcagggtctatatttacgtgcctaacagtagctctgggattttatcgcctgtggatctaataaagtgtctatttaaagtgaaaaaaaaaaaaaaaa

SEQ ID NO: 290472 - DNA, 1000 bp, Homo Sapiens; identical to SEQ ID NO: 223215

SEQ ID NO: 290473 - DNA, 1000 bp, Homo Sapiens; identical to SEQ ID NO: 223216

SEQ ID NO: 290474 - DNA, 1000 bp, Homo Sapiens
ttgtgagagcagcacgccgtcgtgggcgagcgatcacaattacaatgcagtaaagccagaaaagactgctgctccctcgccgtcactgttgtataaatgtatgtatcacctaggggttggcctcctggacccctcccgttctttctggatagccatcccctgggcctgtccaggactgggagttgcagctttgtgttaagctgatcacagacaccggctgcaccatcagcgggaagcagagcccatgtccaggatgcctcctgctgccctgtgtccatccctagtctgtcaggacttcctgtcactgttttccaaagctgtaaacctcactggtgaacgttcaccttaatgattgattctttaatctctgttttcactctcaggctctggtaagtattcgtattctcttcatcccagtctgattgcatagccacactgcccggcacgccacatccacccctgtctgcacatgagttgttctgacaacagcgctgtatacgcttcagtttttccacattgtccacggccagcacatgaaagcatcacttcttttttatgttgtgggaatctttgcaagttagtgttgcatctgattttcaggtgtacatttatttttgactgggcagataggggatttttttttttccatgtccgattcacacgctacacacccacatgaacacattcgaacttcgaaggccacacactcctgcttcataggccccacggtaagtgagttcacacctagaacactgtcctgaccgcaggacgcgtgccttggacttggtattctacatgtgactggctttcttgccctcgtctcttgaatgtttagactcttaagatcatatcctgccccaaatttcaaattaatgaaatgaagatatttcaaacagatctttgaaacctcagattctgtggtgcaattttaatgttttcttgtttctcagttttctgctataaaactattttcaattcagtcaaaaaaaaaaaaaaaaaa

SEQ ID NO: 290475 - DNA, 1000 bp, Homo Sapiens
taaaaaacaatgtgcaagggttatattttaaggtcttttaaaatctgattttgatcataccaaatgacataatattttttatggtagccttttactttcaagacttaattttcagacttgtacaagttccttcttacattctttccctctcacaccatcctactggagaaagcatacttttatgctaagatcttactttaagctttttatgtgaacaaaagatgtacatatagtaagtattacttccgtagtcctcaaatttactataacttttgtacttagtatatgttttatatttggaaaacagcactacgcttagttttcctgtagttcctgagtgatgtctgtgtgttccttgcctgcccttttttgtgagcacagattagtctgttatccatggctggcacttcacttatgatcctttctctgctagatttttatgcagctctctatgaagtttcatggcccatagatattcaaaagcaagatattctatacatatgtgtatatgtatatatactccttatgttaatactaaagtgtttatgctgagttgctgcctttccccgtcatgtatccatgtgcatgctcttagagaccttgaatggttgagggtaaagtgatttattagtaattctacttgccttgtgtatgtctgagctgaaaacaatcgtgattaagaaatttagaggtggctgggcgtggtggctcacgcctgtaatcccagcactttgggaggccgaggcaggcggatcacctgaggtcgggagttcaagaccagcctgaccaacatggagaaaccctgtctccactaaaaatacaaaattagccgggtgtggtggtgcatgcctgtaatcccagctactcggaagtttgagacgagaatctcttgaacccgggaggcggaggttgtggtgagccaagatcgtgccattgcactccagcctgggcaacaagagggaaactccgtttcaaaaaaaaaaaaaaaaaaaaaaaaaaa

SEQ ID NO: 290476 - DNA, 1000 bp, Homo Sapiens; identical to SEQ ID NO: 117897

SEQ ID NO: 290477 - DNA, 1000 bp, Homo Sapiens
gattcagttattcagattaggcagcagccccgagaccctcctaccgaaacgcttgagctggaagtaagcccagatccagccagccaaattctagagcatactcaaggagctgaaaaactggttgctgaacttgaaggagactctcataagtctcatggatcaaccagtcagatgccagaggcccttcaagcttctgatctctggtactgccccgatgggagctttgtcaagaagatcgtaatccgtggccatggcttggacaaacccaaactaggctcctgctgccgggtactggctttggggtttcctttcggatcagggccgccagagggctggacagagctaactatgggcgtagggccatggagggaggaaacttggggggagctcatagagaaatgcttggagtccatgtgtcaaggtgaggaagcagagcttcagctgcctgggcactctggacctcctgtcaggctcacactggcatccttcactcaaggccgagactcctgggagctggagactagcgagaaggaagccctggccagggaagaacgtgcaaggggcacagaactatttcgagctgggaaccctgaaggagctgcccgatgctatggacgggctcttcggctgctcctgactttacccccacctggccctccagaacgaactgtccttcatgccaatctggctgcctgtcagttgttgctagggcagcctcagttggcagcccagagctgtgaccgggtgttggagcgggagcctggccatttaaaggccttataccgaaggggggttgcccaggctgcccttgggaacctggaaaaagcaactgctgacctcaagaaggtgctggcgatagatcccaaaaaccgggcagcccaggaggaactggggaaggtggtcattcaggggaagaaccaggatgcagggctggctcagggtctgcgcaagatgtttggctgattaaaagttaaaccttaaaagagaaaaaaaaaaaaaa

SEQ ID NO: 290478 - DNA, 1000 bp, Homo Sapiens; identical to SEQ ID NO: 223217

SEQ ID NO: 290479 - DNA, 1000 bp, Homo Sapiens
tggatgtattttatttaatttctcaaattaaaataaaaggtaacggtacacttaagagtggtcactacagccaagctaattgacacccactgaactttctggaatgggccataggatgctggacaataggacagatttggaatgagcagtcttccattccaactttagtttctgcaaagctgttgagagcatggagccaggctgcggggtctgggttcaaatcctgactctaccacttaggagctgtgtgtacatgggcaggacaactggcctgcctgagtctcagtgtaggtgtctgtaaaatggaatgataatagcttccatctcacagattcactgtgtgggtaaaatgatagatatgaaatgctaagaacagcacctgtacgtagtatgtcctacatatcttactgttatcattagcatattttgtttattccaagatacattttttttggcccatttgatatctatgaaatctaaagattttttttcctgtcttgggagatagaataatgatgtgccttacaatggattgtgttttagattcactgaaattcattattgttgtttttatccctggtctgtaacatgatatttggtaaataacaaggactccatacgttttgcaaagagtaaattctctccctccctactgaggccttggtctaggtctctccaggcctttccttcctggagccacagtgcttagagacaggccactggggtcagcatttgagctcagctatgatcagaaaaaagcaccgttgaggttgcagtgagccgagatcacgccactgcactccagcctgggcgacagagagagactccatctcaaaacaaaaacaaacaaacaaacagaaagcaccgtcgagaaatggctccagcgctgactagcggccacctcatttccccccttgaccactgggccagttgggtggctaggttgcctcattttgcatccttctgtatccccaaatctgaaataaaagctggaaaaaaa

SEQ ID NO: 290480 - DNA, 1000 bp, Homo Sapiens; identical to SEQ ID NO: 223218

SEQ ID NO: 290481 - DNA, 1000 bp, Homo Sapiens; identical to SEQ ID NO: 117898

SEQ ID NO: 290482 - DNA, 1000 bp, Homo Sapiens
ttgacatagtgtatgttaatgtaagttttgctttccagtgattacctgatacgtaagcctatttgaacaaagtgagaatgaacttttgtttctaagaagtctttatcttgaagctatataacatgaaaagtgagctcaaattttttttagttgaagattacatataaagttgtgtctgattaatattcatcttttattgaagaaagtgccttctgatggccacataattcttaatgtcagctagtataatggtttacatttggacaaagtattgcttagtgttatttaagtagatttaagatctcaaagctaaagtgccaatttttactttcttcagccaatttgttacctcttttatggtttttaatttttatcaggactaacattttcagaaatagcaaggtgtgatctagtattagattcacagaactgaaaggttaattaagaatgttggttattttcacgggagcgtgtgatatttaacattaatattttatttgacactacagcctgtaatactgctctctttcaaaagcaagttttcagatttttataacagacccattttgttttatgaaacatgttcattacagaaacatgagaaaatagagataagtaaaaagaataaaagtcactattatcctaccactttgcgggacacactattaatatttaagcatagattcttccagatgttttgttttatacagcagtaggattgtgtaatgtattctctcttgtagcctattcttcaaagcgtatcttcactttccatgttaacataaatgtccttttatgattgtctaggattccatggatggatggaatataattgagtcatctggtagagcgcatataggacaggacgctaggttgtttatcttttgtttattgtaaaggaactatgtgggatgcatttggtgatctttttaaaaaatgtataaatttcttgagtaattcctggattaaagaatatgcactttttaaaaaaaaaaaaaaa

SEQ ID NO: 290483 - DNA, 1000 bp, Homo Sapiens; identical to SEQ ID NO: 117899

SEQ ID NO: 290484 - DNA, 1000 bp, Homo Sapiens; identical to SEQ ID NO: 223221

SEQ ID NO: 290485 - DNA, 1000 bp, Homo Sapiens; identical to SEQ ID NO: 117902

SEQ ID NO: 290486 - DNA, 1000 bp, Homo Sapiens
tgctcggcttggagcaatgacgtccatggtgtgtaaggttggcaaagattcttttggcaatgattatatagaaaacttaaaacagaatgatatttctacagaatttacatatcagactaaagatgctgctacaggaactgcttctataattgtcaataatgaaggccagaatatcattgtcatagtggctggagcaaatttacttttgaatacggaggatctgagggcagcagccaatgtcattagcagagccaaagtcatggtctgccagctcgaaataactccagcaacttctttggaagccctaacaatggcccgcaggagtggagtgaaaaccttgttcaatccagcccctgccattgctgacctggatccccagttctacaccctctcagatgtgttctgctgcaatgaaagtgaggctgagattttaactggcctcacggtgggcagcgctgcagatgctggggaggctgcattagtgctcttgaaaaggggctgccaggtggtaatcattaccttaggggctgaaggatgtgtggtgctgtcacagacagaacctgagccaaagcacattcccacagagaaagtcaaggctgtggataccacgggtgctggtgacagctttgtgggagctctggccttctacctggcttactatccaaatctgtccttggaagacatgctcaacagatccaatttcattgcagcagtcagtgtccaggctgcaggaacacagtcatcttacccttacaaaaaagaccttccgcttactctgttttgattgctattagtcccaaaataaatatacctgggaataaaatgtacttgggggtggctgctcctggctaatgcttattagaaaatgtcctcgtcccctttctttgcaaatattagttcttttacgaagtcatcctcaagcttcaatttatttataacgatgattcttttgctttccatgcatttgcacaaaacaaccagaattaaagattccacaacc

SEQ ID NO: 290487 - DNA, 1000 bp, Homo Sapiens
gtgtatttgaaatgtaagtaaccagctacaaagaataatgtcacttcatttgattatgactaccaatcaagagaaggaggaatacatttctgaggagtgatactaaaccatttgagcttaaatgagtacctgattttgcagccattaaaatgagtcaataactatgtggaaatatagaaaaatattttataatataatactaagaaagaggacagtaggccataaagtgttagcagtgttatgctatgtctatataaataagcatgggccattaaaaatagcaaactgaaaacagttcatgtgtggggggcaagtttagaagtaattttaatgtatctaagaagtgatttcctttattgttgtactcaggtacgaagactaaaaatcaggatgaatccagaaaattaacacaaaaaagtatgtattaggctacttcctgtcatagtgaaattaaacactcaaagtaatgtaatctcagctgggcgtggcggctcatgcctgtaatcccagcactttggcaggacaaggcaggaggatcacttgaacctaggagttcgagaccagcctgggcaacacagcgagaacttgtctctattaaaaaaaaaaaaaggaatgtaatttcaatctttttcttgatatatggcttgagaatgataatgtaaaaggaattcttctcttacttcaataaaatgggttttaacataactttaaattcagttaaatatacaatattgaatacctatagttgactttgggatggggactttttcaagtcattaagagtgtttgtttaaggtgatctcattgatggtagttctcagccgtctcaaaaactgcaagctaatcagtcagacattctttaatgaccccaattttttcactttaattgttaccatgttttctatttttactgatttttgctaaagcatgtaagagtgaatttattatagcagtaatcttgtgtttctcctgatgtgcaataaatcaataattcaccagc

SEQ ID NO: 290488 - DNA, 1000 bp, Homo Sapiens
acacattctctctctctctctctctctgtctatctagttccccagcttggagagcctttccccttgcttctttctgaggccatataagcttataagaaaagtcccaaaccaagaataggtccttggccacaagcagggtctgatcccccatcagagctatctgagcctgcctgtctgggcacctgctgcaaccatgcagctaccctgccaggggcactcagcaaacagaaccacagggcccaggaggcattccacacaggcactgccccaggacaacacaacaaggacagtcacaacaaggacaacaaggacacaacacaacacacaacaaggacagtcacaacaagcctagagccagaaagcagatggaaatgctaatgaggtcaaacgtaggcttcatggtgggtggagtgggggtggctgggctcccccaggacagaggggaccctgaggttggcaaggctctcaccactcagccttatggtcccttatctcctatcttccctcttgagaaaatacacgctttctgcatgtattagaaacgcacgagctccaccaagtctacaatgaaagtttgaaatttaactgcaaggaattagaagcatatttgcaatcattgcagcttcttctttcttctgctcataaaaggaggaacactttagatagagggcaaatatatctgaaaacctaatttctttctttttttgataaggaaatcttttccatctccatcctaacatgcacaacctgtgaagagaattgtttctatagtaactggtctgtgatcttttgtggccaagagaatagcaggcaagaattagggccttgacagaatttccacgaagctctgagaacatgtttgtttcgaatgtctgattcctctttgtcatcaatgtgtatgctctgtccccatccttcactcctcctcaagctcacaccaattggtttggcacaggcacagagctggtccctagttaagtggcatttatgttaaaaaaaa

SEQ ID NO: 290489 - DNA, 1000 bp, Homo Sapiens
agagagtatgaagctgaaggaattgccaaggatggtgccaagatggtggccgctgtggcctgtgcccaagtgcctaagataaccctcatcattgggggctcctatggagccggaaactatgggatgtgtggcagagcgtatagcccaagatttctctacatttggccaaatgctcgtatctcagtgatgggaggagagcaggcagccaatgtgttggccacgataacaaaggaccaaagagcccgggaaggaaagcagttctccagtgctgatgaagcggctttaaaagagcccatcattaagaagtttgaagaggaaggaaacccttactattccagcgcaagggtatgggatgatgggatcattgatccagcagacaccagactggtcttgggtctcagttttagtgcagccctcaacgcaccaatagagaagactgacttcggtatcttcaggatgtaactggaataaaggatgttttctgttggacatgtactgaaaattaacacatgtagtagccttaaaattttagacttctcgaacatgaggctgttacagtaatttttttaacactgtgcattgtacttttctaccttaaaaaaatcagtgaggatatttatttaatgaacatcaattccttttaaattttcttagagaaatttctctgtggctcagttttaccacccataaagcggagacagtaatttatggttatcctttctgacccacaaagtatgaaaagttctgtaatctgtaaactcagttctgtaatctgtattattgagatgattaatataaagttgtattttcactgaaatgattgttttgctggttatgcttggtgatattttagcgggcttatttttgaaaggcatctgttacttcagttgcataaagtgccctcacactgctgtgcagccattaccaccattcatctccagaatttgttctcagtcccaaactgaaactataccattcaaacaacagcgctccccatttc

SEQ ID NO: 290490 - DNA, 1000 bp, Homo Sapiens; identical to SEQ ID NO: 223223

SEQ ID NO: 290491 - DNA, 1000 bp, Homo Sapiens
aagatttaaaagatataaaagagagtcacctcattgaattaaatattgaaaacccagatgacagaagaaggttactatcagctgctgaaaacttccttgaagaagaaattattcaagagcaagaaaatgaacctgagcccctatccttgagctcagacatctccttaaataagtcacagttagatgactgcccaagggactctggttgctatatctcatcaggaaattcagataatggcaaagaggatctggagtctgaaaatctgtctgacatggtacataagattattatcacagagccaagtgactgaacacgcattcccaactatatatctacagatgcattccattttaactcttcttgagctaaaacgtcaaataggagaggaagataagataaatatttgtaaataaaacctaaagtttaaatgttttaatctgaataattgtacataaaattttgtatctctaacattccaaattactgtcaataaaatatatatttattattttaaatgctatgtgttaatatttcacttgcttgtattagaaaggcaaaatgtaagactttggtatgtgtgacatatgctttatttggctttattttacaagtacagtatctgcaaaaaacaaagtaaccttttttcatacctgccagttttgaatttatatatgttattgaacaaatagtaatagaggattcgctgttgaaacaagttgtccaagcaatgttatattcatttttatacttattgggaaagtgtgagttaatattggacacattttatcctgatccacagtggagttttagtaattatattttgttgatttcttcattttgttttctggtataaaagtagagataatgtgtagtcacttctgatttagtgaaaccaattgtaataattgtggaaatgttttgtctttaagtgtaaatattttaaaatttgacataccctaatgttaataataaaaagaactatttgcatattgcaaaaaa

SEQ ID NO: 290492 - DNA, 1000 bp, Homo Sapiens
tatccagttaagtgcaggtagttcccctggaggaaataatattttcaaactgtcgttggtgtgatactttggctcaaaggatctttgcttttccattttaagcttctgttttgagttttgccctggggcttgaatgagtcccagagagtcgttccgatggtgggaggctgcctaggaggcagtaaatccagtcacagtgcctgggaggggcccatccttccaaaatgtaaatccagtcgcggtgtgaccgagctggctaacaggcttgtctgcctggttttcctcctacacatggacattattctcctgatcctcctacctggtccaccccagggctaccggaaggtaaaatcttcacctgaaccaattatgagcagtctccttactgaaggtacagccggatacgtggtgcccccggggctggtgttggcagccggggggaggtgcctgagggtccccacggttcctttctgcttttctgaatgcatcaagggtacgagaacttgccaatgggaaattcatccgagtggcactggcagagaaggataggagtggaatgcccacacagtgaccaacagaactggtctgcgtgcataaccagctgccaccctcaggcctgggccccagagctcagggcacccagtgtcttaaggaaccatttggaggacagtctgagagcaggaacttcaagctgtgattctatctcggctcagacttttggttggaaaaagatcttcatggccccaaatcccctgagacatgccttgtagaatgattttgtgatgttgtgatgcttgtggagcatcgcgtaaggcttcttgcttatttaaactgtgcaaggtaaaaatcaagcctttggagccacagaaccagctcaagtacatgccaatgttgtttaagaaacagttatgatcctaaactttttggataatcttttatatttctgacctttgaatttaatcattgttcttagattaaaataaaatatgctattgaaact

SEQ ID NO: 290493 - DNA, 1000 bp, Homo Sapiens; identical to SEQ ID NO: 117903

SEQ ID NO: 290494 - DNA, 1000 bp, Homo Sapiens
tacaccacctattccagaggctggcggcgctcaagctggaagcagaggacatcgccctgacagccacaagccagaagcacaagctcacagtggtgctggaggccgtgaaccggagtctgcagctggaggagtggcaggccaagtggagcgtggagagcatcttcaacaaggacctgttgtctaccctgcacctccttgtggccctggccaagcgcttccagcccgacctctccctcccaaccaacgtccaggtggaggtcatcactatcgagagcaccaaaagtggtctgaagtcagagaagttggtggaacagctcactgaatacagcacagacaaggacgagcctccaaaggacgtctttgatgaattatttaagctggctccggagaaagtgaacgcagtgaaagaggccatcgtgaactttgtcaaccagaagctggaccgcctgggcctgtctgtgcagaatctggacacccagtttgcagatggggtcatcttactcttgctgattggacaacttgaaggcttcttcctgcacttaaaggaattctacctcactcccaactctcctgcagaaatgctgcacaacgtcaccctggcgctggagctgctgaaggacgagggcctgctcagctgccctgtcagccctgaagatatcgtgaacaaggatgccaagagcacactgagggtgctctatggtctgttctgcaagcacacgcagaaggcacacagggacaggacgccccatggagccccgaattgaccctcactgcctccaaagcccagagcctgcctgtcagcccagctggagggcccgaggctgcagggtgtcctcccacagtcccgctgtttcctgtgcattcgtgacccgcttccctcccaccctgtctcctgtctccatcgttggattatctttgaacccccttgtgtggatcattttgagccgcctggccttgctcagtttattttaataaaagtatttctgggagggaaaaaaaa

SEQ ID NO: 290495 - DNA, 1000 bp, Homo Sapiens; identical to SEQ ID NO: 117905

SEQ ID NO: 290496 - DNA, 1000 bp, Homo Sapiens
actctaattgtcctgttttgggggagcaagcacttctggccggaggtacccaaaaaagcctatgacatggagcacactttctacagcagtggagagaagaagaagatttacatggaaattgatcctgtgaccagaactgaaatattcagaagcggaaatggcactgatgaaacattggaagtacacgactttaaaaacggatacactggcatctacttcgtgggtcttcaaaaatgttttatcaaaactcagattaaagtgattcctgaattttctgaaccagaagaggaaatagatgagaatgaagaaattaccacaactttctttgaacagtcagtgatttgggtcccagcagaaaagcctattgaaaaccgagattttcttaaaaattccaaaattctggagatttgtgataacgtgaccatgtattggatcaatcccactctaatatcagtttctgagttacaagactttgaggaggagggagaagatcttcactttcctgccaacgaaaaaaaagggattgaacaaaatgaacagtgggtggtccctcaagtgaaagtagagaagacccgtcacgccagacaagcaagtgaggaagaacttccaataaatgactatactgaaaatggaatagaatttgatcccatgctggatgagagaggttattgttgtatttactgccgtcgaggcaaccgctattgccgccgcgtctgtgaacctttactaggctactacccatatccatactgctaccaaggaggacgagtcatctgtcgtgtcatcatgccttgtaactggtgggtggcccgcatgctggggagggtctaataggaggtttgagctcaaatgcttaaactgctggcaacatataataaatgcatgctattcaatgaatttctgcctatgaggcatctggcccctggtagccagctctccagaattacttgtaggtaattcctctcttcatgttctaataaacttctacattatcaaaaaa

SEQ ID NO: 290497 - DNA, 1000 bp, Homo Sapiens; identical to SEQ ID NO: 223226

SEQ ID NO: 290498 - DNA, 1000 bp, Homo Sapiens
atctcctgacattcacagtttaatagagacttcctgcctttattccctcccagggagaggctgaaggaatggaattgaaagcaccatttggagggttttgctgacacagcggggactgctcagcactccctaaaaacacaccatggaggccactggtgactgctggtgggcaggctggccctgcctgggggagtccgtggcgatgggcgctggggtggaggtgcaggagccccaggacctgcttttcaaaagacttctgcctgaccagagctcccactacatgcagtggcccagggcagaggggctgatacatggcctttttcagggggtgctcctcgcggggtggacttgggagtgtgcagtgggacagggggctgcaggggtcctgccaccaccgagcaccaacttggcccctggggtcctgcctcatgaatgaggccttccccagggctggcctgactgtgctgggggctgggttaacgttttctcagggaaccacaatgcacgaaagaggaactggggttgctaaccaggatgctgggaacaaaggcctcttgaagcccagccacagcccagctgagcatgaggcccagcccatagacggcacaggccacctggcccattccctgggcattccctgctttgcattgctgcttctcttcaccccatggaggctatgtcaccctaactatcctggaatgtgttgagagggattctgaatgatcaatatagcttggtgagacagtgccgagatagatagccatgtctgccttgggcacgggagagggaagtggcagcatgcatgctgtttcttggccttttctgttagaatacttggtgctttccaacacactttcacatgtgttgtaacttgtttgatccacccccttccctgaaaatcctgggaggttttattgctgccatttaacacagagggcaatagaggttctgaaaggtctgtgtcttgtcaaaacaagtaaacggtggaactacgactaaa

SEQ ID NO: 290499 - DNA, 1000 bp, Homo Sapiens
cgtcatgagcgcagagggcaacctgcacaaccccgccctgttcgagggccggagccctgccgtgtgggagctggccgaggagtatctggacatcgtgcgggagcacccctgccccctgtcctacgtccgggcccacctcttcaagctgtggcaccacacgctgcaggtgcaccaggagctgcgagaggagctggccaaggtgaagaccctggagggcatcgctgctgtgagccaggagctgaagctgcggtgtcaggaggagatatccaggcaggagggagcgaagcccaccggcgacttgcccttccactggatctgccagccctacatccggccggggcccagggaggggagcaaggagaaggcaggtgcgcgcagcaagcgggccctggaggaagaggagggtggcacggaggtcctgtccaagaacaagcaaaagaagcagctgaggaacccccacaagaccttcgacccctctctgaagccaaaatatgcaaagtgtgaccagtgtggaaacccaaagggcaacagatgtgtgttcagcctgtgccgcggctgctgcaagaagcgagcctccaaagagactgcagactgcccaggtcacggattgctttttaaaaccaaattggagaagtctctggcctggaaagaggcccagcctgagctgcaggagcctcagccagcagcacctggaacaccaggtggcttctccgaagtcatgggcagtgccctggcctgaaggcccacaacccccacccccaggactgctgctggagcctggacacgtcctacttaagaaaatgccttttactcagggaatctcctgctacttaatgtggaaagacacgcccatgtcccccttcggcccactctgggggcctggaaatgctgcagtggggagcaggccccaggctggacctgccctgtcctcagcacgcgtgtgcaaaagtgaacaataaatcatttcaaagatgcgagaaaaaaaaaaaaaaaaaaaaaa

SEQ ID NO: 290500 - DNA, 1000 bp, Homo Sapiens
ccgctctctgggcagccctgtcctaggcctggacacctgcagagcctgggaccacgtggatgggcagatcctgggccagctgcggcccctgacagaggaggaagaggaggagggcgccggggccaccttgtccagggggcctgccttccccggcatgggctctgaggagttgcgtctggcctccttctatgactggccgctgactgctgaggtgccacccgagctgctggctgctgccggcttcttccacacaggccatcaggacaaggtgaggtgcttcttctgctatgggggcctgcagagctggaagcgcggggacgacccctggacggagcatgccaagtggttccccagctgtcagttcctgctccggtcaaaaggaagagactttgtccacagtgtgcaggagactcactcccagctgctgggctcctgggacccgtgggaagaaccggaagacgcagcccctgtggccccctccgtccctgcctctgggtaccctgagctgcccacacccaggagagaggtccagtctgaaagtgcccaggagccaggagccagggatgtggaggcgcagctgcggcggctgcaggaggagaggacgtgcaaggtgtgcctggaccgcgccgtgtccatcgtctttgtgccgtgcggccacctggtctgtgctgagtgtgcccccggcctgcagctgtgccccatctgcagagcccccgtccgcagccgcgtgcgcaccttcctgtcctaggccaggtgccatggccggccaggtgggctgcagagtgggctccctgcccctctctgcctgttctggactgtgttctgggcctgctgaggatggcagagctggtgtccatccagcactgaccagccctgattccccgaccaccgcccagggtggagaaggaggcccttgcttggcgtgggggatggcttaactgtacctgtttggatgcttctgaatagaaataaagtgggttttccctggaggtacccagca

SEQ ID NO: 290501 - DNA, 1000 bp, Homo Sapiens
cggcgcccgtaaggcggacgctgttaggggtggcggggggttggcggcggttcgagaggctctgggccggcagtctaagctctcgcagcctggctcttgcagccgcaccctcaagcaacggatccccatggcgcttgttgggcgcgttgtgcctgcagcggccacctgtagtctccaagccgttgaccccattgcaggaagagatggcgtctctactgcagcagattgagatagagagaagcctgtattcagaccacgagcttcgtgctctggatgaaaaccagcgactggcaaagaagaaagctgaccttcatgatgaagaagatgaacaggatatattgctggcgcaagatttggaagatatgtgggagcagaaatttctacagttcaaacttggagctcgcataacagaagctgatgaaaagaatgaccgaacatccctgaacaggaagctagacaggaaccttgtcctgttagtcagagagaagtttggagaccaggatgtttggatactgccccaggcagagtggcagcctggggagacccttcgaggaacagctgaacgaaccctggccacactctcagaaaacaacatggaagccaagttcctaggaaatgcaccctgtgggcactacacattcaagttcccccaggcaatgcggacagagagtaacctcggagccaaggtgttcttcttcaaagcactgctattaactggagacttttcccaggctgggaataagggccatcatgtgtgggtcactaaggatgagctgggtgactatttgaaaccaaaatacctggcccaagttaggaggtttgtttcagacctctgatgggccgagctgcctgtggacggtgctcagacaagtctgggattagagcctcaaggacattgtgtgattgcctcacatttgcaggtaatatcaagcagcaaactaaattctgagaaataaacgagtctattactaaaaaaaaaaaaaaaaaaaaaaaaaaaaaa

SEQ ID NO: 290502 - DNA, 1000 bp, Homo Sapiens; identical to SEQ ID NO: 223229

SEQ ID NO: 290503 - DNA, 1000 bp, Homo Sapiens; identical to SEQ ID NO: 117910

SEQ ID NO: 290504 - DNA, 1000 bp, Homo Sapiens; identical to SEQ ID NO: 117912

SEQ ID NO: 290505 - DNA, 1000 bp, Homo Sapiens
gatggatgtttgtcaaaaagtggatcttcttggagcgagcagatgcaatctcttgtctcacatgctagcaacataccagaccactctgcttcatttttgggagaaaacttctcacactatggcagccatccatgagagtttcaaaggttatcaaccatatgaatttactactttaaagagcttacaagaccctatgaaaaaattagttgagaaagaagagaagaagaaaatcaaccagcaggaaagtacagatgcagccgtgcaggagccgagccaattaatttcattagaggaagaaaaccagcgcaaggaatcctctagttttaagactgaagatggaaaaagtattttatctgccttagacaaaggctctacacatactgcatgctcaggacccatagatgaactattagacatgaaatctgaggaaggtgcttgcctgggaccagtggcagggaccccggaacctgaaggtgctgacaaagatgacctgctgctgttgagtgagatcttcaatgcttcctccttggaagagggcgagttcagcaaagagtgggccgctgtgtttggagacggccaagtgaaggagccagtgcccactatggccctgggagagccagaccccaaggcccagacaggctcaggtttccttccttcgcagcttttagaccaaaatatgaaagacttacaggcctcgctacaagaacctgctaaggctgcctcagacctgactgcctggttcagcctcttcgctgacctcgacccactctcaaatcctgatgctgttgggaaaaccgataaagaacacgaattgctcaatgcatgaatctgtacccttcgggagggcactcacatgccgcccccagcagctcccctgggggctagcagaagtataaagtgatcagtatgctgttttaataattatgtgccattttaataaaatgaaagggtcaacggccctgtttatattggtataaaaaaaaaaaaaaaaaaaaaaaaa

SEQ ID NO: 290506 - DNA, 1000 bp, Homo Sapiens
gtactatccctgtaactgccaagagctcaggagccaggctagtgatcacaccaggggttagagttcactgctgaactccctgatggcaggtctgtgtttattactacattaaaacaaagtctctgacttataaagcgaggtcgtaaaaattacaagttgcatgactgaaaaaatgctttagggggaaaatcagtcatatctttaacaccaacaagcaatttcccaccaacgaatgtagtacatactgtgagaggatcataatgaggtcctgaatatttaatatcatcatttactgtgtctgtttgctgctgtttttcgaacctatttggtttaccctgcaagctaaatactccacggcagagcttaattatccttttaattcctctttgaaatcctgtggtgcccccttccccctgccttgtgatgatgatgagtgagtctccccttaattagactgcaaatgtcacttgtgatgagtgtgccattccaggataacagcttgcaccctcctcagaatgttttcagcgaaagagtggggtggctgttctctgctcctggtgctttggcctcatttcacactattagaattctggggctgtaaggccagccagtgtcagctcatgttccattggctctccacctgccatttttagggagctattccttatatagttacaaattcccttgtcatttacttatttggaaacatgggatttactctgacaagctttagcctatgttatgggattcagaacaatgagatcataataattctcactgaccaaagctgggactccatcctgccatttttgtgtggagatattcataattctgcaatactttaaaacatttagaaaacaccccagggtaggtctgtggcccttagacagtgaagtcttaattgtcaatattatttttgtctaattctgtatatatataacttattatattttataatctcaataaacacattaataaaaaaaaaaaaaaaaaaaaaaaa

SEQ ID NO: 290507 - DNA, 1000 bp, Homo Sapiens
ggttttgttggccaacaaatgtgaccaggggaaggatgtgctcatgaacaatggcctcaagatggaccagttctgcaaggagcacggtttcgtaggatggtttgaaacatcagcaaaggaaaatataaacattgatgaagcctccagatgcctggtgaaacacatacttgcaaatgagtgtgacctaatggagtctattgagccggacgtcgtgaagccccatctcacatcaaccaaggttgccagctgctctggctgtgccaaatcctagtaggcacctttgctggtgtctggtaggaatgacctcattgttccacaaattgtgcctctatttttaccattttgggtaaacgtcaggatagatataccacatgtggcaagccaaagatctatgcctctgttttttcaatgagagagaaatagcaaatgttctttctatgctttcctcaccatcatcacagtgtttacaaacttttgaaaatatttagtctgttacaaacttctgtcatgtagctgaccaaaatcctgcagggccacagtcggcactgttatttgcttcttttaatcagcaaaggcctcaagtcttaaaataaaaggggagaagaacaaactagctgtcaagtcaaggactggctttcaccttgccctggtgtctttttccagatttcaatatattctctgatggcctgacaggcctattaagtagatgtgatattttcttccaagatgacctccattctcggcagacctaagagttgcctctgagttagctctttggaatcgtgaacacaggtgtgctatattgtccttgtcctaactgtcacttgccatggcctgaatgttggcttaactgaatattgtatgaaaagacatgcctccatatgtgcctttctgttagctctctttgactcaagctgtggggctcctctatacatgctatacatgtaatatatattatatatatttttgcaagtgaacaataaaacattaaaagataaaa

SEQ ID NO: 290508 - DNA, 1000 bp, Homo Sapiens; identical to SEQ ID NO: 223231

SEQ ID NO: 290509 - DNA, 1000 bp, Homo Sapiens
acgggtggatcacctgaggtcaggaatttgagactagcatggccaacatggtgaaaccccgtgtctactaaaaatacaaaaattagctgggcgtggtggcagacgcctgtaatcccagctactcagggaggctgaggcacgagaatcgcttgaacctgggaggcggaggttgcagtgagccaagattgcgccactgcactccaacctgggtgacaagagcaagactccgtctcacaaaaaacaaacaaaactgactgattgaatatactaaaccaaactaaaatcatattcttttgattaagtttatccatggctgtattcttctatgaattcttccatttaattcttccacgattatcttctcctgtaaatacatcacaggagttagaattctctacccatcagctgtaccatgtcgcagaattcatgcaggcacaaagttggagttacagagatgggttgacagcaggcaaacttggcctatgtattataaccacaacttcaagttcttacctcatgtgaatattcaccctttctttagtcttccaaggcaaacagccccgtctcatcaccagatgagcaaggtcttgatatggcatagcagatctccctagacacagatcatgagaaaagatggaagagacttagggattcaggcatcagatgaagttggcttttcccttttatgccttgtttgtatttaccctgtctaatacactaaggatacttactcattgtacttgcagctcaatatgtctttgctgttcagatactaaaatgtacctctgagtcattgtgagctgtgtggtaggttggacattggcatagttggtgatgggactcaaaatgaaaaggtggtctctttaccaggtcacagactgtagcagattgtgcttgttatctgacaatgactgtcactttgagggtcgttgatttgcatgcactactctggggccttgtattggagccttttttaaaaaaaataaaatctgagatagag

SEQ ID NO: 290510 - DNA, 1000 bp, Homo Sapiens; identical to SEQ ID NO: 223232

SEQ ID NO: 290511 - DNA, 1000 bp, Homo Sapiens; identical to SEQ ID NO: 223233

SEQ ID NO: 290512 - DNA, 1000 bp, Homo Sapiens; identical to SEQ ID NO: 117913

SEQ ID NO: 290513 - DNA, 1000 bp, Homo Sapiens; identical to SEQ ID NO: 117914

SEQ ID NO: 290514 - DNA, 1000 bp, Homo Sapiens
taagcctgggagtgggcttatcatttagcttacagctggtaggacagttaaaaaagccattcattcccattcatcatatggaggctcatgcacttactattaggttgaccaataaagtagaatttccttttttagttcttttgatttctggaggtcactgtctgttggcattagttcaaggagtttcagattttctgcttcttggaaagtctttggacatagcaccaggtgacatgcttgacaaggtggcaagaagactttctttaataaaacatccagagtgctccaccatgagtggtgggaaagccatagagcatttggccaaacaaggaaatagatttcattttgacatcaaacctcccttgcatcatgctaaaaattgtgatttttcttttactggacttcaacacgttactgataaaataataatgaaaaaggaaaaagaggaaggtatatttctaattagtaaagttgaacagataaatattcctggattgtgcctaaaaatagctgctcatttctgcaggtatgagaaggggcaaatcctgtcttcagcagcagacattgctgccacagtacagcacacaatggcatgtcatcttgtgaaaagaacacatcgggctattctgttttgtaagcagagagacttgttacctcaaaataatgcagtactggttgcatctggtggtgtcgcaagtaacttctatatccgcagagctctggaaattttaacaaacgcaacacagtgcactttgttgtgtcctcctcccagactatgcactgataatggcattatgattgcatggaatggtattgaaagactacgtggtggcttgggcattttacatgacatagaaggcatccgctatgaaccaaaatgtcctcttggagtagacatatcaaaagaagttggagaagcttccataaaagtaccacaattaaaaatggagatatgatttctgctgttcaaaaaagtccctaaaggtagtattaaggttaa

SEQ ID NO: 290515 - DNA, 1000 bp, Homo Sapiens; identical to SEQ ID NO: 117915

SEQ ID NO: 290516 - DNA, 1000 bp, Homo Sapiens
ggccgccagtggaagttccccggctccttctacttcgccatcaccgtcatcactaccatcgggtacggccacgccgcgccgggtacggactccggcaaggtcttctgcatgttctacgcgctcctgggcatcccgctgacgctggtcactttccagagcctgggcgaacggctgaacgcggtggtgcggcgcctcctgttggcggccaagtgctgcctgggcctgcggtggacgtgcgtgtccacggagaacctggtggtggccgggctgctggcgtgtgccgccaccctggccctcggggccgtcgccttctcgcacttcgagggctggaccttcttccacgcctactactactgcttcatcaccctcaccaccatcggcttcggcgacttcgtggcactgcagagcggcgaggcgctgcagaggaagctcccctacgtggccttcagcttcctctacatcctcctggggctcacggtcattggcgccttcctcaacctggtggtcctgcgcttcctcgttgccagcgccgactggcccgagcgcgctgcccgcccccccagcccgcgccccccgggggcgcccgagagccgtggcctctggctgccccgccgcccggcccgctccgtgggctccgcctctgtcttctgccacgtgcacaagctggagaggtgcgcccgcgacaacctgggcttttcgcccccctcgagcccgggggtcgtgcgtggcgggcaggctcccaggcctggggcccggtggaagtccatctgacaaccccacccaggccagggtcgaatctggaatgggagggtctggcttcagctatcagggcaccctccccagggattggaaacggatgacgggcctctaggcggtcttctgccacgagcagtttctcattactgtctgtggctaagtcccctccctcctttccaaaaatatattacagtcacaccataaaaaaaaaaaaaaaaaaaaaaaaaaaaaaaaaaaaaaaaaa

SEQ ID NO: 290517 - DNA, 1000 bp, Homo Sapiens
agacatattccttgagagcatttgagaaaccccctcaggtacagacccaggctcttcgagactttgagaagcacctcaatgacctgaagaaggagaacttcagcctcaagctgcgcatctacttcctggaggagcgcatgcaacagaagtatgaggccagccgggaggacatctacaagcggaacattgagctgaaggttgaagtggagagcttgaaacgagaactccaggacaagaaacagcatctggataaaacatgggctgatgtggagaatctcaacagtcagaatgaagctgagctccgacgccagtttgaggagcgacagcaggagacggagcatgtttatgagctcttggagaataagatccagcttctgcaggaggaatccaggctagcaaagaatgaagctgcgcggatggcagctctggtggaagcagagaaggagtgtaacctggagctctcagagaaactgaagggagtcaccaaaaactgggaagatgtaccaggagaccaggtcaagcccgaccaatacactgaggccctggcccagagggacaagtaggtgccttcggtgctctttttgtcgcttgtcttttgcccattctcaaggcatacagcagctgtcctgttccctttcaaggactgacagtaggagcttcactatttctaagactttatgggcccacaaccgaagacattcttttcagggttgaattttcagtggtatccattatgaaaactcacttcatggattcagtgggcaaatagcggcaagcaagagacatggattcacttattcagcaaacatttactgggcatgccacatgccagataccgggctaagtatctggcatgtgttacagaaacaaaagacctaaatcttgtcaccaagaaacatgttacatgattttaataagttccctgatagaagagcatggggtgctctggggaaatattggagggtcatccattccacattaaaagagcaagttgtctgca

SEQ ID NO: 290518 - DNA, 1000 bp, Homo Sapiens; identical to SEQ ID NO: 223236

SEQ ID NO: 290519 - DNA, 1000 bp, Homo Sapiens
cctgagtgacccagaattaggtccagcagcagctgatggcttctctctgctcatgtctgactgcactgatgtgctgactcgtgctggccatgccgaagtgcggatcatgttccgccagcggttcttcacagataatgtgcctgctttggtccagggcttccatgctgctccccaagatgtgaagccaaactacttgaagggtctttctcatgtacttaacaggctgcccaagcctgtactcttgccagagctgcccacgcttctttccttgctgctggaggccctgtcctgccctgactgtgtggtgcagctctccaccctcagctgccttcagcctcttctactggaagcaccccaagtcatgagtcttcacgtggacaccctcgtcaccaagtttctgaacctcagctctagcccttccatggctgtccggatcgccgcactgcagtgcatgcatgctctcactcgcctgcccacccctgtgctgctgccgtacaaaccacaggtgattcgggccttagccaaacccctggatgacaagaagagactggtgcgcaaggaagcagtgtcagccagaggggagtggtttctgttggggagccctggcagctgagccctcagtcctggcctagactgttctgacaatctaacctgggattactaactgttgagccatcttccccaaagcagggaaaccactggtctctgactgcctttcccacagacacagcacaaatgctaggcctctgttgcatggctgtacaaagaacataagagtccatatttctagtggatttgtaaaataagtgtgtgtgagacacttgcgtttgaagaaagatctagggtcctgggtctcttgcatttatatgtcagaaaaggggcgatatgctgctgaggggtgagtgcatatgagtgtggccctgaggaccagggctggcagatgttgtctacctgctgaagaataaagatttcttttggtaaaaaaaaaaaaaaaaaaaaa

SEQ ID NO: 290520 - DNA, 1000 bp, Homo Sapiens
gaaaaggaagatgcactgactagaactgaacttgaaacacttcaaaaacagaagaaagttaaaaaaccaaaacctgaatttcctgtatacacacctttagaaactacatatattcagtcttatgatcatggaacttccatagaagaaattgaggaacaaatggatgattggttggaaaacaggaaccgaacacagaaaaaacaggcacctgaatggacagaagaggacctcagccaactgacaagaagtatggttaagttcccaggagggactccaggtcgatgggaaaagattgcccacgaattgggtcgatctgtgacagatgtgacaaccaaagccaagcaactgaaggattcagtgacctgctccccaggaatggttagactctccgaactcaaatcgacagttcagaattccaggcccatcaaaacggccaccaccttgcccgatgacatgatcacccagcgagaggacgcagagggggtggcagcggaggaggagcaggagggagactccggtgagcaggagaccggggccactgatgcccggcctcggaggcggaagccagccaggctgctggaggctacagcgaagccggagccagaggagaagtccagagccaagcggcagaaggactttgacatagcagaacaaaacgagtccagcgacgaggagagcctgagaaaagagagagctcggtctgcagaggagccgtggactcaaaatcaacagaaacttctggaactggcgttgcagcagtacccaaggggatcctctgaccgctgggacaaaatagccagatgtgtcccgtccaagagcaaggaagactgtatcgctaggtacaagttgctggttgaactggtccaaaagaaaaaacaagctaaaagctgaatattctgggagatgatgttcaccttcattttccaaaatgaatatcttaaaaatcttatgcagaaatttgcattttgtacctcaatatttctacgtcatgtgccttagt

SEQ ID NO: 290521 - DNA, 1000 bp, Homo Sapiens; identical to SEQ ID NO: 117916

SEQ ID NO: 290522 - DNA, 1000 bp, Homo Sapiens; identical to SEQ ID NO: 223237

SEQ ID NO: 290523 - DNA, 1000 bp, Homo Sapiens; identical to SEQ ID NO: 117917

SEQ ID NO: 290524 - DNA, 1000 bp, Homo Sapiens; identical to SEQ ID NO: 223238

SEQ ID NO: 290525 - DNA, 1000 bp, Homo Sapiens
atcaccgcctacaaaccgccccacagcgtgattttggagcctccggtcttaaagggcaggaaatacactttgcgctgccacgtgacgcaggtgttcccggtgggctacttggtggtgaccctgaggcatggaagccgggtcatctattccgaaagcctggagcgcttcaccggcctggatctggccaacgtgaccttgacctacgagtttgctgctggaccccgcgacttctggcagcccgtgatctgccacgcgcgcctcaatctcgacggcctggtggtccgcaacagctcggcacccattacactgatgctcggtgaggcacccctgtaaccctggggactaggaggaagggggcagagagagttatgaccccgagagggcgcacagaccaagcgtgagctccacgcgggtcgacagacctccctgtgttccgttcctaattctcgccttctgctcccagcttggagccccgcgcccacagctttggcctccggttccatcgctgcccttgtagggatcctcctcactgtgggcgctgcgtacctatgcaagtgcctagctatgaagtcccaggcgtaaagggggatgttctatgccggctgagcgagaaaaagaggaatatgaaacaatctggggaaatggccatacatggtggctgacgcctgtaatcccagcactttgggaggccgaggcaggagaatcgcttgagcccaggagttcgagaccagcctggacaacatagtgagaccccgtctatgcaaaaaatacacaaattagcctggtgtggtggcccgcacctgtggtcccagctacccgggaggctgagttgggaggatcctttgagccctgaaagtcgaggttgcagtgagccttgatcgtgccactgcactccagcctgggggacagagcacgaccctgtctccaaaaataaaataaaaataaaaataaatattggcgggggaaccctctggaatcaataaaggcttccttaaccagc

SEQ ID NO: 290526 - DNA, 1000 bp, Homo Sapiens
gatttaatcttatctaccccgtggattcaatcttcttatcagaaggttcttttatgtcaaaaaacctgctgtcaaggcttgaagagccggcacactcaatggcaaacacagcaccgagtctgctctgaatcctggaggatctggccctcctctcaacccccactcacagtcaccgtcttacaactcagggccacctgggatcagtcatcagtcagggtgcgtaagccttgaataccaggtagcctcaggagtgaaaagataaatgtcctagatcattaccttattcagtgtccccaccttgcagcgcattccaaccacctgggagcatttaaaactccagatgcccacaccacaccctggggccacccatcagaccttctggaagcaagacctgggcctccatggccccaaaaactccctaggtgatccgatgtgcagccaaatctgagaggccccatttaaaaaagaaagaacatgggtggtacattgaggagtatttacattttataaaatgacttaaaaatttgaaggcatttttgagcatttccaattatatggaagagttacttctacggaatagtttttgctcatggaactcaaacagatgaagcaccactgttacagaataatgtgctccagatgaaaatgtctcgtttctgtgaatttcatgaagagcagaacatttctcaagaatcctcttgagccagtaatcaatcctgtctcaaaaaatgttctttgccatttcctagatactgcacaaaagtggccatgtcgacatttgtccacccaccctccaataagctggagcgacaaagggacattccatccctgtacccttagtggtagccatgacacgatggccagatcatggactccggaaagctttctgtttttactggaaacatagcaaaccttgatttagctccaagaaattgagtagggaaatatttgttttttagcaattgtcatagtaaataaaactctaagcaagtgtgtgtac

SEQ ID NO: 290527 - DNA, 1000 bp, Homo Sapiens
tggctctgctgtccattgcgggggtgcttgttggatctggattcctcagaaacatacaagaaatgcccattccttttaaaatcatcagttattttacattccaaaaatattgcagtgagattcttgtagtcaatgagttctacggactgaatttcacttgtggcagctcaaatgtttctgtgacaactaatccaatgtgtgccttcactcaaggaattcaattcattgagaaaacctgcccaggtgcaacatctagattcacaatgaactttctgattttgtattcatttattccagctcttgtcatcctaggaatagttgttttcaaaataagggatcatctcattagcaggtagtgaaagccatggctgggaaaatggaagtgaagctgccgactgtgcatgactgctctgaacgtctgaaatgagagtgccatgtatttctttcttgacaggacatctcaagtcttttaaccattaagactccatttgtgcctcttggatccaagcaggccttgaatgcaatggaagtggtttatagtcccttgctcttacaacttgcagggacatgtggttatttggaaattgtgactgagcggacccaagaatgtaaataatattcataaacctatgggagactcgtgtgactattttttttccttgttctaggcacagaaaaaaataggtcagcttaaaaatatgtttacattggataaaggattaggcaaaaataaaatgtttcaaggattcctgaccataagtgacagagaaagagagttgtgggtttagatgaagcaaggttatcatgcagaattgggtaagaatgcttctgttcctggaagacccagagttaaatgcagatgtccacacgaggggtcggagttacctgatcacatcgagagagtgctgggcagatggatggtgagcaccactgctacagagcacccagtgattttactgaggattaaaataaaaaaccgtaggaatgggctcaacagtga

SEQ ID NO: 290528 - DNA, 1000 bp, Homo Sapiens
aggaaaaaagaataagaatgaaaactgctgacgtattacaaaacagaaaaataaatgatttaaaatcaaatcaaaaagaaaaaactaaacatttaaacaaaaatgggataagaatagtcttctagaagtgaggatgcgaaaaagaatgagtttccaattaccctgatgtgacaattacacattgtagacaggtagcaaaatatcacatacacccccaaaatatgtacaaatattatatatcaataaataaatttttaaagagtaagtgctattggcattccaaaattcagctaaaggaaaaatgatcaaaaacaaagtaaggtgcacagttagcaaaagatgcagatgttatatcacagcaattctcatgctaaaaatacaacaaaagacaaagcaaaaaataaacctttgcttttttttttttttttttttttttgagacggagtctcgctctgtcgcccaggctggagtgcagtggcgggatctcggctcactgcaagctccgcctcccaggttcacgccattctcctgcctcagccaaacctttgctatttttaatcttcgttggcactttccagctgttactgaccttgtcattttttattcaaataagattatttacaaacttattcttgaaactaaatatagtaaagagggtttttaaaataatatttaacatacgaattattaattggccatgttcattatttatctatgtttattaatgggccaatgcaaaaaatcattttttcaaagaaaaatttgtccatgtaaagcttaaattataatattgctgctttgtataactcttctatgtttattctattcatttgttcctttccctaccatattttacacatgtatttataatctgtagtatttattacatttctgcttttttctagtcattcaatttatcactgctgaattgcatcagatcatggatgcatttttattatgaaaaaataaaatgacttttcaaattaaaaaaaaaaaaaaa

SEQ ID NO: 290529 - DNA, 1000 bp, Homo Sapiens
actatggtgttctcttaatagaattttttgaattatatggacgacacttcaattatttaaagactggcatccggataaaggatggtggttcatatgtggccaaagatgaagtacagaaaaatatgctagatggctacaggccatcaatgctttatatcgaagatcctttacaaccaggtaacgatgttggaaggagttcatatggggccatgcaagtgaagcaggcctttgattatgcctacgttgttttgagtcatgctgtatcaccaatagcaaagtactatcccaacaatgaaacagaaagcatactaggtagaataattagagtaacagatgaagttgccacatatagagattggatatcaaagcagtggggcttgaagaatagacctgagccttcatgcaatggaaatgaaactcttcatcaggtccagtgtcgtcctcttctgccacacagtccagctctagtgacgtagattccgatgcaacaccatgcaaaaccctgaaacagctgctttgccgtccgtccactgggaaccgagtagggtcgcaagatgtatccttggagtcctctcaggcagttgggaaaatgcaaagcacccaaaccactaacacatccaacagcaccaacaaatctcagcatggatcagcaaggctctttcgttcttccagcaaaggcttccaaggtacaactcaaacaagccatggttccttgatgacaaacaaacaacatcaaggcaaatccaataatcagtattaccatggcaaaaagaggaaacacaagagggacgcgcccctctcagacctctgtagatagtcagcgctgcgcggtggactgtcttctctgtgcaatgatctcatgctcaggacagttgcgcagggactcctgggagatattcaggagcctcacactgttcagacgttgacttagcaactgcgttttttcccagctcgccacagaatggatcatgaagactgacaactgcaaaaaaaacaaaac

SEQ ID NO: 290530 - DNA, 1000 bp, Homo Sapiens; identical to SEQ ID NO: 223239

SEQ ID NO: 290531 - DNA, 1000 bp, Homo Sapiens
aacatcactacactagtagaggaatgaagtcagtggactttcttgtatatttgtgtgtgcagatgtacataaagatgagttgttaacttaggatcttttctttttatacaaggaaagcttcctaagaatgtctaggaagaagaggaagaatgaccctttgcatggcacagggttctgcccctattctgaatatgtcattccatcaaggagatcaaaagcctttttttctccccagtatttggaaattactttcttgatgatgctgccttttaaaagcttcacgtacattatagttttttaaaaaaatctttggactggatcttactgaagtgcagttgctatattaaaattagggcatagagcacagaaaaatcaagaccatgagaagacattttaccatttagctactttttataactaaatactctttaaatatttttatttcaatactgtggatggaaatgagaagcattctaaatttgagttaatatatttttatgaagatatttgagaaaagaaaaaaatagcttgtattcaggttcattggcttttgctggatgatccacctaaagaagttacctaatttggccttttaaaaaaggtgttagtgtttattatagctactttcaaggaaagtttgaatatgattctagtctctaaagttcttcacgttttctgacattccctggagggtgactggggaagaattgctccagggtagaagaaccaggcccaagactttaccattctgatctagagacaaaggatactcaatgaggagcttttttcccctcttggaacaggtaaaatgctttttcttattaatataattataaaacagtattttatgtaacagctattcccatattctaggagtggcctaagaaatgcgtgtttcagtgactagattataaatattctctattgtgaatagttgaataaaacagctgtttttttctgcaaaaaaaaaaaaaaaaaaaaaaaaaaaaaaaaaaaaaaa

SEQ ID NO: 290532 - DNA, 1000 bp, Homo Sapiens
aagcatcacatggagtgtagggtcactgggagagcagaggtcacagcctctagagaagggagaggggcgtgtgcatgggagtgtggctcatctcgggggccatggggcctcctgaggtacacctttgcccctgtaagggcctctaggccctgggcctgcctccccaagggctcactaagccagaggccaaagtgccccctcccgttcacctaccacccaagtcctcatgccctccgagggctgggggaggaggggctcaaggaaggggggttccatgtacatatttatcacccctttcacatagccccaagaccttttgtacatttttacaggggtgcccctcccaacagttcccttcctggttaattaaaccctcagactggtgctgtgttcctagcctctggcctctctgtggggaaaggggactgcagggggaagagccgggaagggacagtcaggcttctccctgggaaggtggggccagcaggagatgaccaacagggggcaggacctggggacctgggctggagggaagggcagaagcttcctacttggctgacagccccggttcccccaacatgttcccgttcactctgcccccacccccaaaggctcagcctctaaatctcagactccaccacctcttaatggctcagtccccttcaccccatttccaagtgcccccaggactcctgggccctgcttccctgaaccctgttctccaaaaccctgccccaggctaagggtggccagagaaggtcaccatgtaccacacaccaaagaagggggtcggcccaggggtgggcgacacaggcagcttcttcggcagcctcacggcagcaaccccagccttcccaaagcagcaggcgcctccaggctggggcccaacctagaaggcaggggtcaatctaacaaaaccctaacgttgacttttttccctggtggggcttcttctgtaacatgacttgcgaatatttatataaaaacgagtgttacaatg

SEQ ID NO: 290533 - DNA, 1000 bp, Homo Sapiens
actgccttgctcggtacatccagcacatggagcaagagctgaaggcacaaggacaggagcaggaacaggaacggcagcatgctacaaccaaacagaaggcagtcggtgtgcagtgtccagtgtgcagagagcccctcgtgtatgatcttgcctcactgaaagcagcccctgaaccccaacagcccatggagctgtaccagcccagtgcagagagcttgcgccagcaagaagaacgcaagcggctctaccagaggcagcaggagcgggggggaatcattgaccttgaggctgagcgaaaccgatacttcatcagccttcagcagcctcctgcccctgcggaacctgagtcagctgtagatgtctccaaaggatcccaaccacccagcacccttgcagcagaactatccacctcaccagccgtccaatccactttgccacctcctctgcctgtggcgacccagcacatatgtgagaagattccagggaccaggtcaaatcagcaaaggttgggcgaaacccagaaagctatgctagatccccccaagcccagtcgaggtccctggcgacagcccgaacggaggcacccaaagggaggggagtgccacgcccctaaaggtacccgtgacacccaggaactgccacctcctgaggggcccctcaaggagcccatggacctaaagccagaaccccatagccaaggagttgaaggtcctccacaagagaaggggcctggcagctggcaggggcccccaccccgcaggactcgggactgtgttcgctgggagcgctctaaaggccggacacccggttcttcctaccctcgcctgcctcggggccagggagcataccggcctggtactcggagggagtccctgggcctggaatctaaggatggttcctagcaggacttggtggggggaacagggaattggggatgggagggaggcaataaagatatttggccttctttggctttctttgcttagcagcgcctaaaaaa

SEQ ID NO: 290534 - DNA, 1000 bp, Homo Sapiens
acccgttgcccacgcccgacacgtccccgctggacggcgtggaccccgacccggctttcttcgccgccccgatgcccggggactgcccggcggccggcacctacagctacgcgcaggtctcggactacgctggccccccggagcctcccgccggtcccatgcacccccgactcggcccagagcccgcgggtccctcgattccgggcctcctggcgccacccagcgcccttcacgtgtactacggcgcgatgggctcgcccggggcgggcggcgggcgcggcttccagatgcagccgcaacaccagcaccagcaccagcaccagcaccaccccccgggccccggacagccgtcgccccctccggaggcactgccctgccgggacggcacggaccccagtcagcccgccgagctcctcggggaggtggaccgcacggaatttgaacagtatctgcacttcgtgtgcaagcctgagatgggcctcccctaccaggggcatgactccggtgtgaatctccccgacagccacggggccatttcctcggtggtgtccgacgccagctccgcggtatattactgcaactatcctgacgtgtgacaggtccctgatccgccccagcctgcaggccagaagcagtgttacacacttcctggaggagctaaggaaatcctcagactcctgggtttttgttgttgctgttgttgttttttaaaaggtgtgttggcatataatttatggtaatttattttgtctgccacttgaacagtttgggggggtgaggtttcatttaaaatttgttcagagatttgtttcccatagttggattgtcaaaaccctatttccaagttcaagttaactagctttgaatgtgtcccaaaacagcttcctccatttcctgaaagtttattgatcaaagaaatgttgtcctgggtgtgttttttcaatcttctaaaaaataaaatctggaatcctgaaaaaaaaaaaaaaaaaaaaaaaaaaaa

SEQ ID NO: 290535 - DNA, 1000 bp, Homo Sapiens; identical to SEQ ID NO: 223240

SEQ ID NO: 290536 - DNA, 1000 bp, Homo Sapiens
tgttggagtgttgactttaatttgatggatcctaaactcttggcttcaggttctgatgatgcaaaagtgaagctgtggtctaccaatctagacaactcagtggcaagcattgaggcaaaggctaatgtgtgctgtgttaaattcagcccctcttccagataccatttggctttcggctgtgcagatcactgtgtccactactatgatcttcgtaacactaaacagccaatcatggtattcaaaggacaccgtaaagcagtctcttatgcaaagtttgtgagtggtgaggaaattgtctctgcctcaacagacagtcagctaaaactgtggaatgtagggaaaccatactgcctacgttccttcaagggtcatatcaatgaaaaaaactttgtaggcctggcttccaatggagattatatagcttgtggaagtgaaaataactctctctacctgtactataaaggactttctaagactttgctaacttttaagtttgatacagtcaaaagtgttctcgacaaagaccgaaaagaagatgatacaaatgaatttgttagtgctgtgtgctggagggcactaccagatggggagtccaatgtgctgattgctgctaacagtcagggtacaattaaggtgctagaattggtatgaagggttaactcaagtcaaattgtacttgatcctgctgaaatacatctgcagctgacaatgagagaagaaacagaaaatgtcatgtgatgtctctccccaaagtcatcatgggttttggatttgttttgaatatttttttctttttttcttttccctcctttatgacctttgggacattgggaatacccagccaactctccaccatcaatgtaactccatggacattgctgctcttggtggtgttatctaatttttgtgatagggaaacaaattcttttgaataaaaataaataacaaaacaataaaagtttattgagccacaaaaaaaaaaaaaaaaaaaaaaaaaaaa

SEQ ID NO: 290537 - DNA, 1000 bp, Homo Sapiens
tggctatggctgatcttttttaaatttaactttctgatggaccctgtagtttccagttaagtgcagattccttacagacatatagaacagcgcattcttctgtagacatttgctcatgttggtaaatacaatcacccatatgaaaaaattgttttcacctgatatgaaaatgttagaaaaggcaaactccgggacttctaaagatttacttaaatcccattatgtactttattcagaatgtagaagctgacttgaaaggcatccttggtactaagtgaagcttattcagaaaatgcatttttcaaatgcaatggcaactgcttgtagatatcatttttgcagtgtatgttggagctgtaatggttgcaattatgtttcttatttccttaaaagcaaaaagcgtagtttctgatttatgttatagaatgatactgattagactttgagccaaggggaaaatactaaattcttttaaacctggagccttagagagccacaggaatatcttctgttgtacagtctaataagctgtggtaggaagtatcatgtaatcacagtttaatgacagtttatgtatatatataattcagtattccctctgataacatagttgccagtgtttaatacacttgtaacttggatttttaccttataggctatatgtatactcagttttttaaagcatttttttcagagatcacttaattccccatgcttctgcaatgcatataaaaactataaatgccgagtggtagaaactcctctttcttcatagtcctcaggctttggttacatttgcatatgccatttgaagcctccagcttttaccagtttaacatccaaagttcacagcatcagcattcatggtgtaagaacagttttgcagtataacacgatctgataatcattcagttattaaattgtaaataattattgggatggtttcttggctttaagtccactgaataaaaactatgaaattgcaaaaaaaaaaaaaaaa

SEQ ID NO: 290538 - DNA, 1000 bp, Homo Sapiens
aagcatattttcatttagatataaaatatatgaagtatgctttgttgattatagtgagaacccatgacatagttaaccaaagaatatgtttggttcaaataaaaatagaagcttaatactgggcattcatactttttaaagagaatgaatgaagaaatcggtttcctgctgtagttctctatgggtaagtcttagtaaagacgagaatgctgaagtcggccgtggcgattccctcctaggaactgggaggtgtggcttgcccattacccgcttgaagctcacatctttaccctcctctcccactgtggtttgatcttcacctattcccaggccctcccagcaattggagaggtgtctttttttttggttttggttttttttctccccgtctgcattcttaggcctcttagctattaggaactgtcagatacatactagtagctaattttcctagcctgaaattatatactgcatctgcactatgtacctactagggatctgacctcaagtgttttctgagcccaggcttcctggtgtggtgtcttttaccacataaaattattacaaattgcaaatgttggtattgtgatttgattatctgtacaaagaaagaagctctatgcagtgagtttgtggtttaatggtcacaaaaatgttagcactgctaccactcagcacgtgtaaaattttttaaatttataaatattaaaattttaaacttacactaagacttttcagttttatttaaagacccagggatgagtgtactgtttaaatatttacctctattaacataactaatgaaggtataaaattgcatttagtttttcagaagatgctgcaatatgattttaggaaataaggctatgtattgagccagttataggctgaatatcaggttgataaaattttatttgtatttttaaaattcataaatgggagttaaaatgtgtcttttcactaaatatttttattacaaaaaaaaaaaaaaaaaaaaaaa

SEQ ID NO: 290539 - DNA, 1000 bp, Homo Sapiens; identical to SEQ ID NO: 117922

SEQ ID NO: 290540 - DNA, 1000 bp, Homo Sapiens; identical to SEQ ID NO: 117923

SEQ ID NO: 290541 - DNA, 1000 bp, Homo Sapiens; identical to SEQ ID NO: 223244

SEQ ID NO: 290542 - DNA, 1000 bp, Homo Sapiens
tgcattgaactggatgttatttctgccatatttcaaaatggtagaataaattacagaatttattactactcatttcagtgtttagtacagaaattgccttaaaaattgctattaattgaaatatcatttagttcacattccttaagttgaatcggtagtttcatttcaactgataatagtaaagctatttcagtttagtaaaaattttcttttttccacaagaggaaatgtaaaacagttaagacttgaaattgaaaattcttttaatatttaaaataacttgtttattcaatgtctaaacacatgtcagttttccactggatttttattttcacaggtaaatacactagagtgctagatgcctttttcccctgtcagtttgactttcatttaaatccttcattctgatatcattactgttaggtgaggtggataactataatgagaatctcttattcttcctattcctttgatgacaaaagagataaagtgaagtcatccttattattaaaatgcagcctccaaacaaatttctcaagattccttttccttccttctatccattttctgcccataatttccaagaaaaggtgggtatggaaacacatgagagaatgtgatagtgaagtcatatttacaaaactgagaacatgtccaaaatggattcttgtctcctcttcagaattagccatttaaaatattttctgtgacttcaaattgtaattcttatttgcagttttaccagtcttcatgtacagtgacgaaactgtgtagaaactaaatcatcgctttagtaagaaaggataaaaaggtgtggaaatgaatataaaatgcatctaaacatgacatttaatttgtttataaaaataagacttactaaatatagagtaattcattttgaataggaggctattgtttttatattgtgtaataactcacgtactctgaagagagcttggtcaaacaataaaatacattgttacgaaaaaaaaaaaaaaaa

SEQ ID NO: 290543 - DNA, 1000 bp, Homo Sapiens
tgtaattattttataggtatactattaaattatagaacaaataaagataatctaggattatatgtgatcccggtgtgacgtgccataaaagtggaatttttgacttgttgcagtgagctgtgaagcagcactatgcgttcagagagtttttgttcaaccatggtgagttcaacctctagcttatgtcacatgatctcctttggggtctggaatcttctaagagaaatagaatcaggcatccaaggagcagaagtgatggaggtggccctcaatcctggtctttggaagcttccaagcctcttccacatcccctgccagctgaagacagagtattctcactgtgctggctgaaggagaaacactaaacaaggaaaccttgagaaactgcagcaatggaagtccactgttagtctctccgttagcaccagggacacacttgttctgagttttgttcattttcacatttactcctcatgagttccaacatttcttaatttaaatatttcttagtttatagcatctccatttttctattaattgacttaatctgccatttaagaaaactccgtaatcaataaaaaataaaatccacaatcaaactgcacatggttgatccactgtgtaggcttcaaaggaattaaactcaacttcctaggaaataattcatcttagtttattaaatgggacagaatatttcactgctaacgtattctaactcacttgtttttgaaattggccagatgatttttaagttataaagtcaatgaaaatgacttttgctattgtgtgaacaacttagaatgtatatattcccagaaggcttatttaatgattgacctatcaccactgattattaatgtctgcatgaatgataacaataagaccaagtcatcaataatgcaatgaaaattttttaagtgaaagcaagtttattaagaaagtaaaggaataaagaatgcctacttcataggcagagcagcctaaaaaaaaaaaaaaaaaa

SEQ ID NO: 290544 - DNA, 1000 bp, Homo Sapiens
agcatcagcagaaaatgactgtaggtaaatctcacatttatctgcaacaaaatatagatttaatttttagcttaaactttgtttctaccttatgttagtggacctcagttatctatctgtaaatttatttttatttggctaaaataatctaaaagaataatttggatggccaattagcaatgctcttttgagctggggcatttaaagctttcctttaatatttttacctgctcattatgattcctccttttagtctaatatctttccagttcatacttgtttttaatcattaaatactttcttcctggtttggagactaagctgagaaactttttttaaacttaagcattgtcatatgctatttttttaaaatttggctttcctaggattttaagaacaatgaaagttagcttcacaccttcaaatgatcttgaatgagtgaaaaatcagtttgattccagggatatttcttgtcttacatggtcttttctttgacagtctgtacacctttattattagtttttgagttatttatgtaccagatattatacttttaaacattttaatattctctgatctttacaattatttatgttcaaattttagttgggagttttgtttcctacttaagctcaggacttgataccctctgagttgagtggctttgagtgacatgctaacagcaatttcatagtaaatgtaaataaggtcagaggatctaacatagaagctgatgacgcattaatgtaaaaatggaacttatttttgtcaaaaataagatgtacacttgtcatgttttatatacgttgaccttttgtgtttattgctgttttgaatagagccatgttcattttctttccagttagagtaagtacttctgtggttaatgtatatttttattctggcttttaaaatgggaataatttgtatgtatctgtgcaaataataaatgcgcatttggaaaaaaaaaaaaaaaaaaaaaataaaaaaaaaaaaaaaa

SEQ ID NO: 290545 - DNA, 1000 bp, Homo Sapiens
agtcattacttactactgcactcctgcttttgtgggaaaaattttcttcttccccagaagagttaacagttgagtgttcagctcctgacttacctttaatttagaggcaatattattactgtttaagtgattatttgcttaacacaggttttattttgtctttttgctggtagattatacaagggacaactttagtgatgaggcatgtggatgatttggtgggagtaggtatatacttagtggaatggtttattttatggaagagaattcattggaggtgagattgaagtatattgtgaagtgggatttgaacagcacatatgctctggtttgctcaaataactgcagtttatgcttacatctaaattttgtttctgttacctaaacgggagcttctagaattacgaaggccatacctgccacatttataaaataatggttttatccctgcccccaaatcatcaggttcctcgggtttaagagaagtggtctaatagacaggaatagaagttgtggtggaggtgatttgggatagactaggtttccttatgcaagtggatatgagctcctcatagaaaccagacctactgtattagacagtaacctctaacctcacctccaagcccaagtatatggccctgctgggttacctggtgactacatttcccagattcactctaaattcaaggtagtgacccaaataaattgggaaaggagggggtcaaggaggaaaagctgttgaaaatctttctcctatttaagagaaatatatgccctagagctgctccagcacccttggtttctgatttttttaatattgaatatggattagaagaatgaaatcagatgacacctgactgcaaaaatgtttataagcaaatagccttcttacattttggtataaagctgtgaacttcgtaactttgtaaagcaagatataaagcaaatacaagaggaaaataaagtacttttactaattgaaaaaaaaaaaaaaaaaaaa

SEQ ID NO: 290546 - DNA, 1000 bp, Homo Sapiens; identical to SEQ ID NO: 223247

SEQ ID NO: 290547 - DNA, 1000 bp, Homo Sapiens
agtccaggctgggagggggacttctgcagaactgcaaaatgtgagccagcatgtcgtcatggaggtgtctgtgttagaccgaacaagtgcctctgtaaaaaaggatatcttggtcctcaatgtgaacaagtggacagaaacatccgcagagtgaccagggcaggtattcttgatcagatcattgacatgacatcttacttgctggatctaacaagttacattgtatagtttctgggactgtttgaatattctattccaatgggcatttattttttatcctgtcattaaaaaaaaaagactgttatcctgctacacactcctgtgatttcattctcttttattaatttaaaaataatttccagaaatgtgcagatcctctgtgtgtatgtcagcatgtttgttcacatatgcacatacacatactcataacccctatatgcgttgttgcataacagatgattttttaaaatatatacttccttatgcaaagtaatttacacagaaattccattgtaaattgataatggattttttatgttactagaagagattatttgacttcccaggaattttctgtctgtaatcactaaagtcaactttaatagagttttgaaacagtactgtgcaatccgatggatctaattaaaaaaaaggcaatatttttatattaaagtactatactaggagagaatgtttcagaactccctgatgaatttctaagtgagcaacttgatataaaattgtaatcttcatttttgtcagtgtatccagttacagaatgctacacacttacctttttattggctgagaaatctggttatttcatcttaatctcaagattgttttcaagtgttttataattaaatcataatagcatattttaaaatcaatcttcctaaaaggtctgcttttattgtatattttatttaacaataggcactgggtttgtgttacatatttatatattttattttatttttataatatagacatcacctag

SEQ ID NO: 290548 - DNA, 1000 bp, Homo Sapiens
gaatgtggtttaattactggactctcttagcacaggaaggtggaaacaaaatgccaggcctctgctctgaagagcaaaactgctgtcgctgcagtatctgataccagacatccacatatccacaagaagtgcctcttaggtctgtgacagagagtgtgtctccattcctcagttcccagaaaggggagaggtttggcctaaaaagcatgtagatgggggagaaatgggtggggggagaggaacagccattaacacagtatcatgtttaacaagtatagccttgatttcagtagatgtaatggaagccaaattaaattgatacagaacccatttctcagagtctttttttttttttgagacagagtctcgctgttacccaggctggagtgcaatggcgcaaacttggctcactgcaacctctgccccctgggttcaagcgattctcctgcctcagcctcccgagtagctgagactacaggcacctgccaccatacccagctaagttatgtatttttagtagagatggagtttcaccatgttggccaggctggtctcaaactcctgacctcaggtgatccacctgcctcagcctcccaaagtgctgggattacaggcatgagtcattgctcccagccattagaaagattgttaatcctatgaactcccttttgtaggagagaaagggccaatctgtaggggtagccctgtccaggtaaagttgttttcagcctcatgtctactgttaggtgagggagtcacagccagacagagagtattgctggagggtgagagaattgtggagaccaactaccacatagcaagagcccagctcttgggagcattgagatgtaagctcagggttacacagttccaaatcttgggaaggggcttttcagacagactgtttgctttctgctgagataaggaatgcatcactctgccagagtatgactttttacagattattaaataaagctgcatatgtctcattgttacctga

SEQ ID NO: 290549 - DNA, 1000 bp, Homo Sapiens
gtgtacgaggagccagtgtatgaggaagtaggggccttccctgagttgatccaggacacttctacctccttctccaccacacgggagtggacagtgaagccagagaaccccctcaccagccagaagtcattggatcaaccctttctctccaagtcaagcacccttggccaggaggagaggccacctgagccccctccaggccccccttcaaagagcagtccccaggcacgggggtccctagaggaacagctgctccaggagctcagcagcctcatcctgaggaaaggagagaccactgcaggcctgggaagtccttcccagccatccagcccccaatcccccagccccactggccttccaacacagacacctggcttccccacccaacccccatgcacttccagtccaccctccagccagcccctcacatgaccctaggaccagcagtctgagagggtaggtaccagaagacccagaaactcttatcgtggcactgttgcagcttcctctgccctggctggaaagactccagaatccagtgtggtgctgtggaaggagcactggactaaaggcttcagtggctgcgtgtcccaggacaggtcatggcccctctctgggcccagcccatttatctataccatgaggtaactgaagtaaggagagcagtgaatgtcaaactgtgtttcttagagccataagccccacatattatccctgaacaagggcagctcctgctttatatatttgatacgtaggggttccatgagagattttgggttttaaaggaatggttttactgcattaaagaaaaaaaatgctttggaaaccagaggcctgggtgatgttaaagtctatcctgtcccacttcctacattctgggactaccgtgaagcctggagtagggagagcgagtttgggagctgggactcggggagtcaaaaatagatgagtaattgtcaataaacctgggaaccaaaagacaaaaaaaaaaaaaaaaaaa

SEQ ID NO: 290550 - DNA, 1000 bp, Homo Sapiens; identical to SEQ ID NO: 117924

SEQ ID NO: 290551 - DNA, 1000 bp, Homo Sapiens; identical to SEQ ID NO: 223248

SEQ ID NO: 290552 - DNA, 1000 bp, Homo Sapiens
gctgatgggctcatccacacgtccctgaagcccactgagatcctctacctcactgtggcctatgactggttcctcttcgggcacatgttggtagatcggctcagcaaaggggaggagattttcttcttctgcttcaattttttgaagcatattacctccgaggagttctctgctctgaagacccagaggaggaagagtttgccagcccgggatggaggcttcaccctggaagacatctgcatgctgagacgaaaggaccgtggcagcaccaccagccttggcagcgacttctccctggtcatggagagttccccaggagccactgggagcttcacctatgaggccgtggagctggtcccagcaggagcgccaactcaggcagcttggcttgcagccctgagtgatcgagagactcggctgcaggaggtgcgctcagccttcttggctgcgtacagcagcacagtggggcttcgggcagtagcccccagtccttccggtgccatcgggggcctgctggagcaatttgcccgtggtgttggactccggagcatcagcagcaatgccttgtgaagaagccagcccatgacattttcctgctcctctctcagctgagcccttagcagagaatcaaagccatgcctggccgaaggggtacttccaggtcaggggaaatttcagtcccccatctccatcatgaacatggcagccccaaagctgagcaaggccaaagacagggttttccaacccccagcctcttgactggtgaccaccaccccttcttgtcactgtctcccacccaccccatctttgctgggattcccatcaactctcagaactgtgtggggtttccctggggccttgtggaagccatgacttcacaaagaccctacctgtcagttcttgtttctggggaggagggatcacctgcactgagaatgaggcagtttgacacagatcacaaaataaaatcaaagtctttttgaaaaaaaaaaaaaaaaaa

SEQ ID NO: 290553 - DNA, 1000 bp, Homo Sapiens; identical to SEQ ID NO: 223249

SEQ ID NO: 290554 - DNA, 1000 bp, Homo Sapiens
ttcttcccagtcaacacacataacagaacaaggaagtcaaggctgggacagccaatctgatactgttttgttatcttcccaagagagaaacagtggggatattacttccttggacaaagctgactacagaccaacaatcaaagagaatattcctgcctctctcatggaacaaaatgtaatttgcccaaaggatacttactctgatttgaaaagcagagataaagatgtgacaatagttcctagtactggagaaccaactactctaagcagtgagacacatatacccgaggaaaaaagtttgctaaatcttagcacaaatgcagattcccagagctcttctgattttgaagttccctcaactccagaagctgagttacctaaacgagagcatttacaatatttatatgagaagctggcaactggtgagagtatagcagtcaaaaaaagaaaatgctcactcttagatacctaagaattcaaagcgtttcaacctagagcaaccactaaaaaacctgcacagagatgacagtcaatattacaatagagaaaatacagtacttaaaaatgttcaaataacctggttgggtgtggtggctcacacttgtaatcccagcactttgaggtgggcaatggcttgagcccaggagttcgacaccagcctggccaacacagtgaaatgtgtctctacttacaaaaaaaaaaaaaaaaaaaaagccaggcatggtggtgggctactctggaggcccttgaggaccacttgagcccaggagattgaggctgcagtgagccatgactgtgccactgcacctctagtctgggtgacagagcaagaccctgtttaaaaaagaaaaaggccaggcacggtggctcatgcctgtaatcccagctacgcaggaggccaaggcaggagaatcacttgaacctgggaggtggtggttgcagtgagctgagattgtgtcattgcactccagcctgggcaacaagagcaaaactctgtctc

SEQ ID NO: 290555 - DNA, 1000 bp, Homo Sapiens; identical to SEQ ID NO: 223250

SEQ ID NO: 290556 - DNA, 1000 bp, Homo Sapiens
ggcgtacggcttccgcaacatccagaacctggtgcagaggctcaaacgagggcgctgcccctaccactacgtggaggtcatggcctgcccctcaggctgcctgaacggcgggggccagctccaggccccagacaggcccagcagagagctcctccagcacgtggagagactgtacggcatggtccgggctgaggcgcccgaggacgcgcctggggttcaggagctgtacacacactggctgcagggcacggactcggagtgtgcaggtcgcttgctgcatacgcagtaccacgccgtggagaaggccagcactggcctgggcatccggtggtaggggctgcaggaccaggactcccagggggccgtgtccatgtgtgacagcagaaccacatgccccaagaccccagggcttcccccaaaattctgagtgagctgcagggtgtgctgggacccgagtaggagctaggactagccaggacccgcagccgcctcgtcacctccagttgggtgcctctgggttcccactggctctgcccaggtggggtggggtggcccaggcagcagaaggttccctgaggtcccagagcctgttccgttggccctgggccgaggcccacaggtgctgcccttgctgctgctggtcgggcacccaagtgcgtgaggggcttcagcctgtcccggggttgcctgaggcagagcaagacgggttctcacccctgacttctggaggcttcccttgaagctctgtgcaaaaggtgggaaacagagctggacctgcaggggtggtcccgccacaaccctgcgtgtggaccctggcaggggggggtgccaggcccctggaaagcaggggttaccgttacgaggctgtggtccggggcaagccaagtacgaagcagcagccatcgcgggctgcatcatcccccagccaggtccccaccaggcctgtctcccagcgtttgtctaataaacgcacccctcctaaaaaaaaaaaaaaaaaaaa

SEQ ID NO: 290557 - DNA, 1000 bp, Homo Sapiens
agaactgattaagtaccttgaagaatatgaacgtgactggtacattggtttggtatctgatgaaaagtggaaggaagcaattttacaagaaaagccatacttgttttctctggggtatgattctaatatgggaatttacactgggagagtgcttagccttcaagaattattgatccaagtgggaaagttaaatcctgaagctgttagaggtcagtgggccaatctttcatgggaattactttatgccacaaacgatgatgaagaacgttatagtatacaagctcatccactacttttaagaaatcttacggtacaagcagcagaacctcccctgggatatccgatttattcttcaaaacctctccacatacatttgtattagagctcattttgactgtaatgtcatcaaatgcaatgtttttattttttcatcctaaaaaagtaactgtgattcttgtaacttgaggacttctccacacccccattcagatgcctgagaacagctaagctccgtaaagttggttctcttagccatcttaatggttctaaaaaaacagcaaaaacatctttatgtctaagataaaagaactatttggccaatatttgtgccctctggactttagtaggctttggtaaatgtgagaaaacttttgtagaattattatataatgaattttgtaatgctttcttaaatgtgttataggtgaattgccatacaaagttaacagctatgtaatttttacatacttaaaagataaacatatcagtgttctaagtagtgataatggatcctgttgaaggttaacataatgtgtatatatttgtttgaaatataatttatagtattttcaaatgtgctgatttattttgacatctaatatctgaatgtttttgtatcaagtagtttgttttcatagacttcaattcataaactttaaaaaacttttaataaaatattttccttccttttcaaaaaaaagaaaaaaaaaaaaaaaaaaca

SEQ ID NO: 290558 - DNA, 1000 bp, Homo Sapiens
attaaaaagggcttttgtaagccaagggaagagatggtgttgagtggaaaatacaaatctggggaacaaattcttcgtttggccaatgagagatttgctgttccggaaatactctttaatccttctgatataggcattcaagaaatgggaattccagaagctattgtctattcaattcaaaatctacctgaagaaatgcagccgcatttttttaagaacattgtcttgacaggaggaaattcccttttcccaggatttagggatcgggtttactcagaagttcgatgtcttactccaacagattatgatgtttctgttgtgctgcctgaaaaccctattacttatgcctgggaaggtggaaaattgatatcagagaatgatgattttgaagatatggtggtaacaagagaagattacgaagaaaatggacatagcgtctgtgaagagaaatttgatatttaagcaacatttttgaatgaaagttgtgaccataaggtttaatttcaaagttccttttaaaagaggttaaggaactgtgttaccttttgtcctaagaaaaaggcttgaatttatgtaaatactttgatcgattgctaattttcaaaggcttcttaggtaggttactacagtaaactgtaactcagtccacattttcatttaggagctagactaccataacaatgcttatgctgtttccaagggtaggttatttttcattaaaagaagaatgaatgcattttaagtttaattcttcatagctgaaagcacaaatttaacggcttcactggacagttttccttagaaggtagttttgtgtgactgtgactaaactattttattttaaaatgtcattcttatttatacattctaaagttggaaagactgatcttatatgtgtataatgtttattttgtacctagagtacatttaaaagggtggagactaagctaataaagtttttttggccactgaaaaaaaaaaaaaaaaaaaaaaaaaaaaa

SEQ ID NO: 290559 - DNA, 1000 bp, Homo Sapiens
gggtggatgtaaagactgtcctgccagggtttcccactaaaggtattaataagtccagtggaccacagagggcccaatccctcttggccgctaaggctaaggtaggagccagagagctgtagagacaggaccaccaggatgcttcatgtccataacacaagagagcgctgcattgtttgggggccaggcattactactatcatgaagaaaaatgaagagcaggatgcatgttagtctttaattcacttttaatagtataaacctcatttaggtagtagtattaagccacaacaataatgccacattgaaacagcatttaataaaatgcataaagctaattcatgcactgcaatactctatatacaaacacaacaatgcaaattcttcttcaagactgaagacattgattagatataaaattcagtttaaaaagaacatgctattttttaaatgccatcacataaacaaagtgatttcacagggagaagaaagctgtataaagctgcagctttcaacaggttttaaacctggcattaaaatgtaatggcaaaaccaatattttctatattgtgaagggcaaaggttacagaaacggtcccaagaaaatctaacacccaaattttcctttgatagatagatgcctttaaaagggctggtaatgcagttacattctaacagagaagtccaaactacaggtaaaaactacggcttgtactgtgaaaaatgtgcagcttttcagttataaaactagttgaacactggtttacaagataatccgtagaacagagagactgtagaaaaatattccagcacttgagttgtgtgtggcagcagcatttgagtccatgaatgctatggtcattaaaataattgattatactttcctaaagaaaagccattttttaatgcaaagtctactacttccaaatgttattccaaacattaaattttaacagtctatcaatcaataaatgttgaacattttttttctaaaaaaaaa

SEQ ID NO: 290560 - DNA, 1000 bp, Homo Sapiens; identical to SEQ ID NO: 223251

SEQ ID NO: 290561 - DNA, 1000 bp, Homo Sapiens; identical to SEQ ID NO: 117927

SEQ ID NO: 290562 - DNA, 1000 bp, Homo Sapiens
gaccaaacagcctaaatccgaagctggggataccagcctctaagacggttggaatggccagcttatgaaggcaaatttccactcgcattatttaatgatggaagattctgggggagagttgtggatttcataaagccaaacatttaaagctagagacgggggaggcttaccactttccccaaacaacataaaagacaatgtcccttcttcaaaagtgccaaaaggaatgtaaaatgcaaaaattaaaacaatcttaaaccacataaccaagcattgtgaactgctatccaactatttagtggtagaactaggatttgaactgcagtctgtttggcctcagaactccatgtttgtttctctctatccccacagaagtctacagggcaacttcctgggagctaaggctactaaaaggtagaagccacagtactcatctgcagagggcttacagcctcagcaaggaccttgtggctttgtaacaacaatcagccataacaagtttacttgtggaaaagaaaaggtgtagcactttcagaagaggctatcaaagaaaagagatgaacttggaagcaagagatacgcagctcagcatgacagagactccattccaggtggaaaaagcacatggctctttcttctccgagatcccaggactatcttattttcctcagaggggcaggttacaagaacttcacatctctcaggctacatgttgcaaaggttaaattccaggttgtacgatttttcacttccaccatcaagttatgagtgtgattgtttccctgcagttttgccaatagagtgattttagactatttacatcgtgggttacaaccaatgtcagttattctggggaaacccaactgccatgttgtgaggacactcaagcagccctatggaggagcccacatggtgagtgaataactacaagctgactctaattttaaaaaataaaaattttatctctcaccaattttaaaatgacaaaaaaaaaaaaaaa

SEQ ID NO: 290563 - DNA, 1000 bp, Homo Sapiens
gttcacggtgttgctgcacctgaagaacgagctgaaccgaggagattttttcatgacccttcggaatcagcccatggccctcagtttgtaccgacagttctgtaagcatcaggagctagagacgctgaaggacctttacaatcaggatgacaatcaccaggaattgggcagcttccacatccgagccagctatgctgcagaagagcgtattgaggggcgagtagcagctctgcagacagccgccgatgccttctacaaggccaagaatgagtttgcagccaaggctacagaggatcaaatgcggctcctacggctgcagcggcgcctagaagacgagctggggggccagttcctagacctgtctctacatgacacagttaccaccctcattcttggcggtcacaacaagcgtgcagagcagctggcacgtgacttccgcatccctgacaagaggctctggtggctgaagctgactgccctggcagatttggaagattgggaagagctagagaagttttccaagagcaagaaatcacccattggctacctgccttttgtggagatctgcatgaaacaacataacaaatacgaagccaagaagtatgcttcccgcgtgggtcccgagcagaaggtcaaggctttgcttcttgttggcgatgtggctcaggctgcagatgtggccatcgaacaccggaatgaggctgagctgagcctcgtattgtcccactgcacgggagccacagatggggccacagctgacaagattcaacgggccagggcacaagcccagaagaagtgaggagtccatcctgtacatctcaagcaaggggttcctcccctagcacctgggcttggcagaagggccatagttcatccagctcctcccctagagcaatgctgaggagcgggggcatggtagcagggctgtctggttttaaataaagttggaacacttcaaaaaaaaaaaaaaaaaaaaaaaaaaaaaaaaaaaaaaaaaaaa

SEQ ID NO: 290564 - DNA, 1000 bp, Homo Sapiens
agattcaaaggaacgagtcagcagaaagatgagcattcaagaatatgaactaatccataaagagaaagaggatgaaaactgccttcgtaaataccgtagacagtgtatgcaggatatgcaccagaagctgagttttgggcctagatatgggtttgtgtatgagctggaaactggaaagcaattcctagaaacaattgaaaaggaactgaagatcaccacaattgttgttcacatttatgaagatggtattaagggttgtgatgctctaaacagtagtttaacatgccttgcagcagaataccctatagttaagttttgtaaaataaaagcttcgaatacaggtgctggggaccgcttttccttagatgtacttcctacactgctcatctataaaggtggggaactcataagcaattttattagtgttgctgaacagtttgctgaagaattttttgctggggatgtggagtctttcctaaatgaatatgggttactacctgaaagagaggtacatgtcctagagcataccaaaatagaagaagaagatgttgaatgaagattcactatgtcaatatctcatgtttatcctttaggtattggatgatggttttggtagtatctatattgctttagtgaacacagagtatgggcacggctatgctaacttgacaaaaatgactgatgcaacaatcgagttattagcatttcttagtattagttactcaaattgatacaatgcttgactacaaaacagagctgtcttcagcaacattattagtagacaaagaggatgtggataatattatgacatttttcaaaaatccctttcaagttatgttttgtcttttttactccattttccctcatcactgttattatttggacttttcaaattacattattcattataattttctttgtgtaataaaaatgaaatctcatgagaaaataaaaaaaaaaaaaaaaaaaaaaaaaaaaaaaaaaaaaaaaaaaaaaaaaa

SEQ ID NO: 290565 - DNA, 1000 bp, Homo Sapiens; identical to SEQ ID NO: 223254

SEQ ID NO: 290566 - DNA, 1000 bp, Homo Sapiens; identical to SEQ ID NO: 223255

SEQ ID NO: 290567 - DNA, 1000 bp, Homo Sapiens
ggggttttatatgttaaactccgggcgggtcagctctcctacaaagaagatccaatgggatggcaaagtttgttggctcagactgttgctaacaggaactctgaagcccgggctttcaagccagaaacaatctcagcattcacttctgatccagcacttctgtcatttgctgaatatttctgcaagccaactgtgaacatgggtcagaaacaggaaattctggatctcttttcttcagtactctatgaatgtgttacccaggagaccccagagatgttgcctgcatacatagcaatggatcaggctataagaagacttgggagaagagaaatgtctgagacttctgaactttggcagataaagttggtgttagagtttttcagctcccgaagccatcaggagcggctgcagaaccaccctaagcgggggctctttatgaactcggaattcctccctgttgtgaagtgcaccattgataataccctggaccagtggctacaagtcgggggtgatatgtgtgtgcacgcctacctcagcgggcagcccttggaggaatcacagctgagcatgctggcctgcttcctcgtctaccactctgtgccagctccacagcacctgccacctataggactagaagggagcacaagctttgctgaactgctcttcaaatttaagcagctaaaaatgccagtgcgagctttgctgagattggctcctttgcttcttggaaatccacagccaatggtgatgtgaccgtgtctggcggtgaacctaccctgaaacgtgacttctgcacaacaaacgtgaccaaacatcaaagctaaagcaatgtttataaagttttatggtataactagggggaaatgagctgcacaaacctcaatgtattttaaatctgttgctgtcatcattaacggtatatgacatataaaagcaagttaaaatttacttttgtaaataaagtttttggtttgtttccaaaaaaaaaaaaaaaaaaaaa

SEQ ID NO: 290568 - DNA, 967 bp, Homo Sapiens
ggcgaatctgctgctaccaatgtaaaggtcaggccgaggccggcgcggagaatctgctgtcgcctgcagctgctcgcctgtctccgtcggaagggagcccaagctttgcagagaacatgaacgattggatgcccatcgccaaggagtatgatccactcaaagcgggcagcattgatggcaccgatgaagacccacacgaccgcgcggtctggagggcaatgctggcacgatatgtccccaacaaaggtgtcataggagatcccctcctcaccctgtttgtggccagactaaacttgcagaccaaggaggacaaattaaaggaagtcttttcccgctatggtgacatccggcggcttcggctggtcagggacttggtcacaggtttttcaaagggctacgccttcatcgaatacaaggaggagcgtgccgtgatcaaagcttaccgagatgctgatggcctggttattgaccagcatgagatatttgtggactacgagctggaaaggactctcaaagggtggatccctcggcgacttggaggcggtcttgggggaaaaaaggagtctgggcaactgagatttgggggacgggaccggccttttcgaaaacctattaacttgccagttgttaaaaacgacctctatagagagggaaaacgggaaaggcgggagcgatctcgatcccgagaaagacactgggactcgaggacaagggatcgagaccatgacaggggccgggagaagagatggcaagaaagagagccgaccagggtgtggcccgacaatgactgggagagagagagggacttcagagatgacaggatcaaggggagggagaagaaggaaagaggcaagtagaggcccaacagcagaaccccaaagtgaagttacagtggaaatgagtggagggggattgtctttcaacgcagcgtgagtctaatggttgaataaaacttactgatgatcaa

SEQ ID NO: 290569 - DNA, 1000 bp, Homo Sapiens
gtgtccctgacgaggagcagctgtttaagaagccccggcaggtggtacataagaacacgcgcttccttagggaccccttcagccaagccctgagcaggtgccagctccagcaggcagccgccctcaatgcccagcacaaacagggcaaggtgggccccgatggcaaggagctgatcccccaggagtcccctcgagtgggtggatttggatttgttgccactccttcccctgcccctggtgtgaacgagtccccgatgatgacctggggggaggttgagaacacacccttgagagttgaagggtcggaaacgccctacgtggacaggacacccggcccagcttttaagatcctggagccaggccgcagggagcggctgggtctgaagatggccaacgaggccgctgccaagaaccgggccaagaagcaggaagccttgcggagagtgacggagaatctggccagcctcacccccaaaggcctgagcccagccatgtcgccagccctacagcgccttgtgagcaggacggccagcaagtacacagaccgggccctgcgggccagctacacaccatccccagcacgctccacccacctcaagaccccggccagtgggctgcagacccccacaagcacaccggcgcctggctctgccacacgcacccctctcacacaggacccggcctccatcacggacaacctgctgcagctccctgcccggcgcaaagcttcggacttcttttagagccaggcctgggctgggctcatagacgcttcacagagcctgcagggcagctgtacacccagcagaggactccagccttctcggggcccaggcctgggccagaagctgttgaccataccaggagtcactggagaaaggggctgtgctggggccagactggcacaaggcactcgtgcccacaccacaccccagggccttgccaagctgtttgctgtttaattggccccttgaactgtcattaaagaacacctaggtac

SEQ ID NO: 290570 - DNA, 1000 bp, Homo Sapiens; identical to SEQ ID NO: 223256

SEQ ID NO: 290571 - DNA, 1000 bp, Homo Sapiens; identical to SEQ ID NO: 223257

SEQ ID NO: 290572 - DNA, 1000 bp, Homo Sapiens; identical to SEQ ID NO: 117928

SEQ ID NO: 290573 - DNA, 1000 bp, Homo Sapiens; identical to SEQ ID NO: 117929

SEQ ID NO: 290574 - DNA, 1000 bp, Homo Sapiens; identical to SEQ ID NO: 117930

SEQ ID NO: 290575 - DNA, 1000 bp, Homo Sapiens; identical to SEQ ID NO: 117931

SEQ ID NO: 290576 - DNA, 1000 bp, Homo Sapiens
gcaataccaggctagcatggatgagcaggggcggcttctggtagtgcaggagcagctggaggggcagctgcagtgctgccaggaggagctccgccagctcagggagaagaggccttctgttgtcaaagaagcccgggggaagaatgctaataagaacatgaacaagaatgccaatggggttaaaatgaaaaaggtgaccaagccatgctcggatacttctgagagcgaccttgagaccagaaagagtctggaggtagtgctgtactacaaggccagccagaggaaattagatggactagcaaaagaggaggaaaagaaagaggagatggaggaggaaaaaaaggaagtgaaagaggaagcaaaggagcagtgtggggatgagctagttgctgagccagcagatcctgaggaagctaaatccacagaagatcaggaggaaaatgaagaggacaaagaggaagaggagaaggaagaagacagtgaagaggaggaggatgacgccgactcttcccttgaaagtcccgaagaaaataaccccctcagactttccgagagcaaaaagtcatcccctacccccaatccccccatcttctccttgcctcttgtaggcctggtggtcatctcggctttgctctggtgctggtgggctgagacgtcgtcctaatgcagaacatgtttgggttgtggaagcctatggtattcttggctattgcagctgtggctctgtatgtgttacccaacatgcgacagcaggagtcagagttctgcctcatggagtgatggcagaccttggccagcgcgagggcagatccccagtggccaccaccctcagctttgggcaggacacactgtgccagaaccctccccatatgttccatgtgtccccatctcctcagcctcagtcacccaggctgaaaaggcttgtggggagcggctgacttccatctcctgccttgtgtaagaacctgagttccttgtaattaaatatcaactgaattac

SEQ ID NO: 290577 - DNA, 1000 bp, Homo Sapiens
tcctggaatattagatgccttttaaaaatgttctcaaaaatgacaacacttgaagcatggtgtttcagaactgagacctctacattttctttaaatttgtgattttcacatttttcgtcttttggacttctggtgtctcaatgcttcaatgtcccagtgcaaaaagtaaagaaatatagtctcaataacttagtaggacttcagtaagtcacttaaatgacaagacaggattctgaaaactccccgtttaactgattatggaatagttctttctcctgcttctccgtttatctaccaagagcgcagacttgcatcctgtcactaccactcgttagagaaagagaagaagagaaagaggaagagtgggtgggctggaagaatgtcctagaatgtgttattgcccctgttcatgaggtacgcaatgaaaattaaattgcaccccaaatatggctggaatgccacttcccttttcttctcaagccccgggctagcttttgaaatggcataaagactgaggtgaccttcaggaagcactgcagatattaattttccatagatctggatctggccctgctgcttctcagacagcattggatttcctaaaggtgctcaggaggatggttgtgtagtcatggaggacccctggatccttgccattcccctcagctaatgacggagtgctccttctccagttcggggtgaaaaagttctgaattctgtggaggagaagaaaagtgattcagtgatttcagatagactactgaaaacctttaaagggggaaaaggaaagcatatgtcagttgtttaaaacccaatatctattttttaactgattgtataactctaagatctgatgaagtatattttttattgccattttgtcctttgattatattgggaagttgactaaacttgaaaaatgtttttaaaactgtgaataaatggaagctactttgaaaaaaaaaaaaaaaaaaaaaaaaaaaaaaaaaaaaaaaaaaaa

SEQ ID NO: 290578 - DNA, 1000 bp, Homo Sapiens
gaccctgatgtctttagcagaggcctctagcatctcggtttttcatccactgcaggaatgtggccacagggagcagaggtttgtactttccccaagaggtcctcatcctgagacggtctctacccatgtttaacccaaagagtgcaggccaggttccttatccttctgatgaaggatgagagagctcatttagaagtcagagcaaactagggtctcagtattgagaaacgcagcctgccagggaatcacagagacatcggggtgcccgcgatggccctcatgaagccatgcctcgacggcattcaggaagccctgcaaacgtgctttttgaactcattggccaggtgtgatttttacacaaggtaaacgtggtcaagggcatcggggaatttgctccaagcagatagctccctctgaggaaccaaaggaagcaagtttccacgatttctgaagagctggtataggaagtttctttcttccttttgtgttacatgtgcattaaacagaacaagctgtgtgtcatcacagattgtactgtgggctcagaaaccgtgagagagcccccaccgtggacaccggctctagggccacaggaaaaggaacgtttccaggcattttgtctccagggctcccgctggacaggcacgtactgccctggggagtaaatgcggagagttcacgaactgtgcccaacgcatgttatagccagggtcctactaactactcagtaaaagaacgtattgttgtattcctccagtgttaagctatagccatgttaaaagtcactgtgcatttattctcagcatcaaataccttgtaacgtcttctctgccttgttagtgcatatttttacttttctgatactgtaaagaatatatccagtatgtaaatgaatgttctataaatcttttgtatagtcattttctctgctccttaaatatcatctctattcagagtataataaaattatgaacttggtaaaaaaaaaaaaaaaaaaaaa

SEQ ID NO: 290579 - DNA, 1000 bp, Homo Sapiens; identical to SEQ ID NO: 223261

SEQ ID NO: 290580 - DNA, 1000 bp, Homo Sapiens; identical to SEQ ID NO: 117934

SEQ ID NO: 290581 - DNA, 1000 bp, Homo Sapiens; identical to SEQ ID NO: 117935

SEQ ID NO: 290582 - DNA, 1000 bp, Homo Sapiens
ttccttgaacatttgttttaaattctggggccaaaatgcaaaggagaagttctattcaaaggcagtagttgaaatctattattttagttagcctacttggcatttactacatcggtcacttctccaggctgccctaaattaggttgatggagtgagacatgccaaacatccacctttgggaccatagcatagttaaaattaaatgtagttggaatagctagcattgcagctacagtagggaactgtagtctagttccctacagaaaacccaaggagtgaagggacaggattttgcctaggcaaaaatctaagactcgtgccctcctggtacatggggttttaagactgaatgtgtaataggagcactgcctttgccaaatcaaatgagtgacaggttaactagaaaatgtgacaatcacatttcctcttagctcaaataattctgtttttccaaagctttagcagcttaattaaatctgttggactgggggaggagagagctgttctctagtggttaacatggtattctttaagaagaaaaaacaaagccaaagaaaactcattatctggcatgttcgccttaaagatggtactgggtagaatctggagttttcatctcttttcaaagctgcatatctcttatatttggtattggcctctaagtctaatattgcagttggaattcttgctgtattattttttaagcaagtgttaggtgcatttaactgctttcttcatccatgacgacattcccaccatgggggtcttgacaaagcagagtaaaaatatgctgtttacattgtttacttacaagtaaggagcctgaaataacctgtagtttcgaatgcaggccctgatttactggcgttgtcagtttcaattatgaaactgaagtttggtgcctcctctttatcatgttttttcccttgtagcagttgtgtttaatgtcattaaaaagaaataaaagttctttgtcagtgaaaaaaaaaaaaaaaaaaaa

SEQ ID NO: 290583 - DNA, 1000 bp, Homo Sapiens; identical to SEQ ID NO: 117937

SEQ ID NO: 290584 - DNA, 1000 bp, Homo Sapiens
ggaaggtgggctgggctccctaggtccttcagggctgcaagagttattgcctagcacagggcccagacagggctggactagacacgatgaaaacagcctgtatttgagggagaagagaaaacagatggagacccccactctgtctggtcttggctcccaccagcccgggctgtgaggagcccctgagccgcgggtgccactgctgtggatgcgtttctggcccgtcttggaaactgctgctgctgcgtagtcatgacggccctgactggtttgagacaacacgcgttcacagatcttaacaatgctaaatgggcgactgatgaggtcacggttcttaaggcacatccgggacgatcgatatagcacttaggctatgcaggggggtctttctttcataaaggacctcattccttgcgtcccagcccaggaacagtgctgtctttgctgtcttaggccattcttgttattaagctgacagcttcactttcttgtggaagaccaagaacagcatgaggacttgctgagactgcctcacggtgccaccatgcggaccggggggaggcagggagtgagggtgtggctcccctgggctactaaggacagtttaaagatgaggcgccataggcatccgtctccagagcccccaggaggcaggaaccaggataagggtggcttctcccagctgagtaatgtggccaccatgtccaaggtggactcggtgtgaggctgcagtgggtgggggatggatcctccccacacatctgaggacacacaaccacttggtacattttctcagatgttaagcttatttttataaaccgcattgtacgtgtcacttttatttggcattttatacttaactagctgtatttatttttcatgtcatgagagtttccatataatgtgccataactgcatagacagcacgtcttcagggtgtggtttctaagcagaaaatagcaaatgtttatattgaataaaattgcatgttcctccacgc

SEQ ID NO: 290585 - DNA, 1000 bp, Homo Sapiens
tcatgcagttgccaatattcataactgaaaataatctggtttatcataagtaaaatgggaaacttgcctctgttttttgcaaggggaggtaaagagtgtttagtaattacctatcttaaatctttctgagttggtagtagattcatgttcaaggaacaggaaaaatggaaaaacataagtttaaatcagttctttttaaataactttttattcttttgtataaataaaatttcacaggcttcaaattctcatgctttacttttaaacccgagattgttttttcacttatttattcatatcatgccttatggaaatttctttttctgtattttctctctttgctggtattcacctgattaaatattgctctaaaaatcaccatggcatatggaaagtctcaaaattataccaaaagtgataacttatgtcgttcttaagtggagtgaaaggatagcatcagtgagagccagtgttgcccaccaggtctccctttcttggagggcttgttggggctgaggaatctgctagtaatcgttacctgcctctagtgctgtggtgaacttgcgacagggtctggctgcacattggaatcacctgagaagttttaaaatactcatgcctggatcccatccctagagactggggtacagcctagttattgggaatttctttaaaagagttcctgggattctgataagaagccaggttgagaaccactacattagaagactgaatggtttaatttacatcctatgttatgattggtctaagggataagatttggggtctaacctttcctttcactctagttagtcatagtccttgacttatgcctatatctttgtaagaaatagtatgtttcatttgtgatagtattggtagggctgaatatggatggcatctactgtaaaacaagtctaccttgtcagatgtgcaaaagctttcactcttgttctcaaataaacttttgtgggtttttttaaaaaaaaaaaaaaaaaaa

SEQ ID NO: 290586 - DNA, 1000 bp, Homo Sapiens; identical to SEQ ID NO: 117938

SEQ ID NO: 290587 - DNA, 1000 bp, Homo Sapiens; identical to SEQ ID NO: 223264

SEQ ID NO: 290588 - DNA, 1000 bp, Homo Sapiens
gcaggtgttttggggagaggtattttttaagcaatgaaaattcaactgagtacaaagccccctcttggggggttggggaagtctcttttttgaaacacttcagaactgctgctataaagaaattctctaattggttgaattttttttttaagtaaatagtactttaggccaaaatttatatgaatatttgatcttcttgagattttcatactatcatttaaccaccaggaagctgaagtgtgtgaagtacaaagctgacagcactttattttattgctctccattatttggtattcattatattccttcagtcagaaaattattactctctatggcactgttttttatcacaaatatgtatatgtgatattgatatataactatatatattgccatcacacacgaacaataaaataaagtgttctattaacctgatctctttgcccttttgctatgtgaggagtgaatgagtggccttctgatgctctgactcttctctgtatgtcaaactcatccctggcacaagaaattccagtcatgtgaagcaaactgccctttgtcctcaaagaaattgttgaaaaagaaaactttttaaagagattttttgcatattctctgccttgttcttatcaacttgaaatgttggcattttctaaccttgttttgttggctacaataattcagtattcatgtcaaaattgagaagtgccctaattgaatgtgtttgaatgttatccttgcacaattctttaaattgaaagataaaatgttttacctcactgttggacatacattccaagcttttcaactctaggagaaaaagaaaatcatgttttcctgtattgtaaattttagactatttcatatacattgtattaaaactgccatatcaattttaatgtatagattttgcaaatattatgctatatgtaatacctaactgtatctgtagtgtatatgtaatatatttatgcccaataaatgttttaattctttctga

SEQ ID NO: 290589 - DNA, 1000 bp, Homo Sapiens; identical to SEQ ID NO: 117941

SEQ ID NO: 290590 - DNA, 1000 bp, Homo Sapiens; identical to SEQ ID NO: 117942

SEQ ID NO: 290591 - DNA, 1000 bp, Homo Sapiens; identical to SEQ ID NO: 223266

SEQ ID NO: 290592 - DNA, 1000 bp, Homo Sapiens
cagcagacagctgtcttcaaccagcccactggccccatatcctacctcccagatggtgtcctcagaccgaagccaactttcctttctgcccacagaagctcaagcccaggtgtcgccgccacccccttaccctgcaccccaggagctcacccagcccctcctgcagcagccccgcgcccctgaggcccctgcccagcagccccaggcagcctcctcactgccacagtcagactttcagcttctcccggcccagggctcatctttgaccaacttcttcccagatgtgggttttgaccagcagtccatgaggccaggccctgcctttcctcaacaggtgcctctggtgcaacaaggttcccgagaactgcaggactcttttcatttgagaccaagcccgtattccaactgcgggagtctcccgaacaccatcctgccagaagactccagcaccagcctgttcaaagacctcaacagtgcgctggcaggcctgcctgaggtcagcctgaacgtggacactccatttccactggaagaggagctgcagattgaacccctgagcctggatggactcaacatgttaagtgactccagcatgggcctgctggacccctctgttgaagagacgtttcgagctgacagactgtgaacagaaggcagtggaacagaagaatgtttttctgcaacagccaaaatagaatggaatagaatgaagccagctgataccacgggctttcgttatcttgacatagaaggaagcagtgccacggctccagggtttcagatgagatcccatctcagacactgtggcttcctccagatcacacagctttgtactgcctctcccgcctgtggccaaagtcgtgttgcagcaggcaggctgcttggagcttcccatgaactggaaagctcacctccactgcatctttttactggccatccagtcagccgatgtgtaagagtaggaaatactgtgtcactggaggccctccgtagcattggg

SEQ ID NO: 290593 - DNA, 1000 bp, Homo Sapiens
ctcatggttgtacagaggatagcaccccaccatgccagcctgacttggagatatctcctgctgcctgcctgcagggagttaccccagtttccaaaaacagtcgcccagataaaggaggaaaagggaaaggcagacgaatggcatggcttttactaaagaaaagatgttggcctcatactctatactcagggcttaatgaactggaatctgcataactcagcagtcaacccagaagggaaatggttaaactgagcttgttattgcctcggagagcctaagagcacccgcacacttaattctactccctgtctagaaaagctgtcagggagtcgtttggaattgcaatgtagttattaagggctgttaaccagcctgcattacatctggaagtcaggacttgggtgctgactatgaagggccctgttttcaaaatctaacattgcaagtgtaaatgggcaagaagcctccgttgtgctttttttttcctcttcagtaacttttgcaacattattgcatagaagatccctgaccatttactaggaacctggttaagcaagcactaatctcttttcctggagatcaaggatgcaacctcaggttgagaaagaaacagggttccctgggcccattagactgtttgcagggcatcactgcttccccctgacacctcacaactagcaaaaattgtctttgtctttggaaattatagagggatttgggtatccagattgtgcagatgcaaacttaggctgtcttgatgcaaacttagaaccacagaaatgcttttaaaatgcctgttttaagatggaattgttgtttttataatttgattttagtgctaaataaatgattggctttgtacatgaatatgttctgtacaagtgctctttcactagtactacagataatcaaagctatcagaattgtgtctttgatcatatttgacggtaatacacaaataaatccatgttttagcaaaaaaaaaaaaaaaaaaaaaaaa

SEQ ID NO: 290594 - DNA, 1000 bp, Homo Sapiens; identical to SEQ ID NO: 117943

SEQ ID NO: 290595 - DNA, 1000 bp, Homo Sapiens; identical to SEQ ID NO: 223268

SEQ ID NO: 290596 - DNA, 1000 bp, Homo Sapiens
ccatcctggccaacgtggtgaaaccccatctctactaaaaatagaaaaatcagctgggtgtggtgccgcgtgcctgtaatcccagctacttgggaggctgaggcataagaattgtttgagcctgggaggcagaggttgcagtgagccaagattgcgccactgtactccagcttgggcaacagagcaagactccatctcaaaaaaaaaagagttctagcccaggagcggtggctcacacttgtaatcccagcactttgggatgctgaggcgggcggatcacttgaggccaggagttcaagaccagcctggccaacatggcaaaatcccatctctactaaaaatacagaaattcacagggtgtgttggcacacgcctgtaataccagctactcaggtggctgaggcataagaattgcttgagcctgggaggcagagattgcactgagccgagatcgcgccactatactccagcctgggcaacagacatcctgtctcaaataaattacattaaatgtttaagaagaagtctaaataagtttcatatgctgccctccctcagataatgagggaacctggggtacttaaaatgccaaatgaacgtatacttgatccttattcatagattttgtatttgagaatttgcctactcactaaaatatgtttgtaacccccaaatcaatactgtggcactttctcagttattcgcagacacacagagacaaaaaatttgaagtgcctggctgggcgtggtggctcacgcctgtaatcccagcactttgggaggccgaggcaggcggatcacaaggtccagagatcgagaccatcctggccaacatggtgaaaccccgtctctactaaaaatacaaaaattagctgggcatggtggggcatgcctgtagtcccagctactcagaagggtgaggcagaattgcctgaacccgcgaggcggagactgcagtgagccgagatcgcaccactgcactccagcctggtgacagagc

SEQ ID NO: 290597 - DNA, 1000 bp, Homo Sapiens
aagaaagctctgcagtccttcatccaagcctacgccacctaccccagggagctgaagcacatcttccacgtccgatccctccaccttgggcatgtggcgaagagcttcggactaagagatgcccccaggaatcttagtgccttgactagaaagaagaggaaagcacacgtgaaaaggcctgaccttcataagaagacccagagtaaacacagcctcgctgaaatcctacgttcggaatactcaagcggcatggaggccgacatcgccaaggtcaaaaagcaaaacgcacctggagagcctggtggccggcccctgcagcacagtctgcagccgacaccctgctttggccgtgggaaaacattaaaatggagaaaaacccaaaaaggtgtacagcgggacagcaagacttcccagaaagtttaaaatctctctgggtcttcgagtggaacctggaagccccgggtggcagtggattgatgtccagttcttgtcagaggaggcttgtgaaaaataactgcgcctttgcctgaataccacgtccccaagaatcagaggggccacagcccttctcctccatgggaggccctggagcctgatagaaatcagtggtgtggggcactgtagagactagccagctcccgacggaaggggtctgtgtcttgtattgatcccatcagtgcccggcactcccttcacccaggtgctgacgtgccggggttgagctggcaccccgggatgtgatgtaagaacgccctgcgcgtcagcctggaacgggcttgattgctgcccttaactgtgttctgaagtttcacagcttggcttcagcctatcagcgcatacattggcatgaattttgtgaattagggtgttaaaaactggaattgaatttgtacaaaaagagaatatatttatcactaattattttcttaatgtaggaatgtaccgttaaaaaggaccaaaagtttttggtctgggtcaaaaaatacgaatgtgttctcag

SEQ ID NO: 290598 - DNA, 1000 bp, Homo Sapiens
ttaaatccttaaagttagaagctagcaaattttctgtagtgcagaacgtttattgctgtttttgtgtttgaatagtataatgtttgatgcctctcttctgcaaagcgtatcatctcattgactgtgaatctgtatattattctgatggatacagataatgatcttttctcttgtgaggtatcttcatttatgcactgtccaaaaatagccatgtgtaagagtctttctgtatgacgaactacatggaaaagacttctgtggacataattctgaccgaaacccatgaagttacttcagtataagaagaacgttacacggaaatcaccaaatattttgcaactttatttcttctgacatggagtgaacatcaataggaatactttcaaagaaaatgaaaacacagaagcaaagagaaatgtggcacttcacattttaaactacagatggacttggtttgagggagggggaatcacagatttggtgctaagttaattagaaactggcagcgttttacagtagtacaccagcctggatgttttttctaaaatgtttacctgggagagctggggtttgtttgtgaggagaaagagtactgtggaaaacctctgcttgagtaccatgtggccaggcctatgtggatggctactccgtgctgtgcggcttcaccagcggttgggattggcccagcttggagtgcttgtgtggtccaacctcagtctggccccatagtgacttttgccccatgattctgcttcactgttggaatcctctttgaagttccccctctctttgctaaagcagtgaaggaagagaacagagacaaactctttggactgtgaaagagaaggtagagaattccaggcaacagtctgaccaagggtgtaaaccagtttattatatatatatttttcctttgaattaaaacctatgagtgactacaaaaaggattagactgagccgaataaaaaaaaaaaaaaaaaaaaaaaaaaaaaaaaaaaaa

SEQ ID NO: 290599 - DNA, 1000 bp, Homo Sapiens
aacttgtccccaggatttagtcatctgcttagcaaaaatgagagcagtccaattcgatttgatatacttttggatgatttagatactgttcctgtgtctacattacaacgtaccaatccaagaaagcaactccagtttcttcctctagatgactcggaagaaaaaacttattctgagaaagccaccgataaccatgttaatcatagctcttgccctgaaccggtgccaaatggagtgaagaaagtatctgtgagaacagcctgggagaagaataaatcagttagctacgaacagtgtaagccggtttcagtcactccacaggggaatgattttgaatatacagcaaaaattcggaccctagctgaaacagaacgattttttgatgaacttacaaaagaaaaggaccagattgaggcagcactaagcaggatgccttctcctggaggacgaatcactttacagacaagattaaatcaggaagccttggaagatcgtttggaaaggattaatcgagaactgggttcagttcgcatgacgctaaagaaattccatgttttgcgcacctctgcaaatctttgagatttgtagccattaaattttgagacatttttgtttgcactaatgtataattatgcagtcagaaaaggcaaactattttgtactgtttataagccttcaaacagtagttttacaatcatgctattcttacacttgctattttatacttcaaatggccacatattttcaagatatttttgttatgctcaggaatctcttgtatattttactatttaaaaagcattatttttaaatagtatctgtctccaatttatatcaagaataaggaaatataaacagaggaagcagcttgtttctaaacaaatagtgttatccttttacaattaactgcacatcaattttatagacttgttctacattgtaaatacaattcagtttttaaaaaataaagcttaatagcttccataaaaaaaaaaaaaaa

SEQ ID NO: 290600 - DNA, 1000 bp, Homo Sapiens
gaccccagtggccctgcagccgcagcaggaatgaaggtctgtcagtttgtcgtctctgtcaacgggctcaatgtcctgcatgtagactaccggaccgtgagcaatctgattctgacgggcccacggacgattgtcatggaagtcatggaggagttagagtgctgagctcctgggcctcccagccctccagtggcctgtgggtgagggaagccagaatgacacaaagcaatgcaaagacaagattgccatgcaaatggatggttttggacatacgagtcttctccgcacatacatgtctaaagttgagttttatacactgaatgtggaagaaccgggtatcatatcttttttaaaaaatgtcagtgtagaaaacatttgggaaaccattttcctacatgatagaactgccttactagatttctatttgtagctctcattcattgttttttatcttagtttgcagaaaggtgttgaaatgcttctctagcccaaacagcgacatgctaaagtccccttcttcagagtcaatagagtagttgttaaaggttttaaattgtactttctccaaaattagcatgcagctatttaatagggaatctagatttcaccaagattcaaatcaaagcaacatttaaaggaataagacctgttcactagcattttcaagggggttctaaagcattcaagtgcttaaaagccataaaaaatgacttcttaattcctgcctttagtgtcaacttttaagttaatacaggtttcaattgtggcattaggaaaaaaaaaaaaaccttgtgatgctatggttgggggtagttagggagagactacatgaaattgtgtgcccctattttctttctgatcctaaatcattttgttttataaatcagctatagcatctttctagaattaatcctgaatatgttgaatgttaaaatagagaagtttgtatatacacataattaaaaatcaacccttctggcaaaaaaaaaaaaaaaaaaaa

SEQ ID NO: 290601 - DNA, 1000 bp, Homo Sapiens; identical to SEQ ID NO: 223270

SEQ ID NO: 290602 - DNA, 1000 bp, Homo Sapiens
tagggccatttgtaatcgccgcgtccaaatcctgacggacgaacagtttgacagactctggaacgagatgccagtcaatgccaaggggaggctgaaatacccggacttcctgagcaggttcagttccgagacagcagccacaccaatggccactggtgactcggccgtggcccagagagggagcagtgtccctgacgtctcggaaggcaccagatctgccctctcattgcccactcaggagctgagaccagggtcaaagtcgcagagccacccctgtactccagcgagcaccaccgtgatcccgggcactccacccttgcagaactgtgatcccatagagagcaggctccggaagagaatccagggctgctggcgccagctcctgaaagaatgcaaggagaaggacgtggccagacagggggacatcaacgcctccgatttcctggctcttgtggagaaattcaacctggacataagcaaagaggagtgtcagcagctcattataaaatacgacttaaagagcaacgggaaatttgcatactgtgacttcattcagagctgtgtcctcctgctaaaagcaaaggaaagctcactgatgcacaggatgaagatccagaatgcacacaagatgaaagaagccggcgcggagacgccatctttttactctgctctgctgcgtattcagcccaaaattgtgcactgctggaggccaatgcggcgcacgttcaaaagctatgatgaggctggaacagggctgctaagcgtcgcagatttcaggacggtcctgagacagtacagcatcaacctctctgaggaagagttcttccatattctggagtattacgataagacgctgtcttcaaaaatctcctacaacgacttcctccgggcattcctccagtagacacccctgctgtgtgcccagcgggacgacagccacagggcctgtttcaaggctaataaaatcctataatttgggggttaaaaaaaaaaaaaaaaa

SEQ ID NO: 290603 - DNA, 1000 bp, Homo Sapiens
atagaatgtttgcgattgctgctttagaacaaactgcctattttattggcatttttaccttcctgtgggtagaacggcccatgacggcaaaaaaaaagcccaacttcattttgctgctgaaagcattattattatctagctacggaaaactcttgctgattccagctgtcatttgggaacatgactacacatctgtgtgcctcaaactcattaaagtatttgttcttacatcaaattttcaggcaattagagtgaccctaaacatcaaccgtaagctctccttcttggccgtgttgagtggcttactgctggaaagcatcatggtctacttcttccagagtatggaatgggatgttggaagtgattatgccatctttaaatctcaggacttctgaagagttttattcttcttcactatctgtggcatgaccagctgtatctgaaagagaaaagacatgaaatataaaccaacctcctcatttctgttgagtaaaatgaagcaaagattggaaacactttctgaaaaagaaagcaatgataatagcggtggatacccacccccacaaatgcacccaagagacaagccatttacatacagatattcacagtcacacatagaaacacccacatggacacaaggaatgttgctgcagagactgaatgacatgcaacaggtgaaggtttatacgttatacacaaggccaggtaagcgctcataattcacacataataaaacatctaggtttcattcctttgacatgtttatatctttttaatttaaatgttgttactggcttaaaatattttgtgttcttacaatagaaacgcttttaataaagtctttcagaataaaccaagtttttgtaaattttcaattcaataattaaggtaatctttaaaattggatgatccaaaaataagtgataatgaaaaccactgagttatatactttgcaagggtaaattacatctgaataaagctgtaattaaaaacaaaaaaa

SEQ ID NO: 290604 - DNA, 1000 bp, Homo Sapiens
gccgagccatcacaggtcgcatcccagaaagcttaagaaattgtgtgaacaaggaattctttgtcacatcagcgccttggtcagtaatagaccagcaagcaattcatcctgagctcaatggtgccacatacagatatccgccaggcatcgtgggtgtggctccaggaggacttcctgcagccatggaagggatcatccctggaggcatcccagtgactcacaacctcccgacagtggcacatccttcccaagcgccctctcccaaccagcccacaaaacacggggacaatcgagagcaccccaacgagcaatagcagagaatgccagaaggtaatcactcagatacacttgggaccaagagacagtgaaaaatagatgaactaagagaaaaagaatcggatggtctttgtaactgattctggacatatgcatcattgatgttgcagtgttgaaactacaagagctagaaaactgaagatgtcgtctgcttacggaagcgctgaaagactaggatgtgatttattaacgaccaacttctgttattgtgtgttaagtttttcatctgtgcatcaaatcacaaaaagaataaatagagctttttcctttatcagtcccttgggcacagcaggtcctgaacaccctgctctacaatgttgcatcaagagttcaaacaacaaaataaaaaatattaagaggaaatccccatcctgtgacttgagtcccttaagtctacaggggctgggtgacctctttttgctaataggaaaatcacattactacaaaatggggaaaaaactgtttgcctgtggtagacacctgcacgcataggattgaagacagtacaggctgctgtacagagaagcgcctctcacatctgaactgcatactgagcgggcaagtcggttgtaagttcagtaaaaccctctgatgatgcaaaaaaaaaaaaaaagtattaagtttcacaagctgtttgtactcaaatatattttctcagtttcag

SEQ ID NO: 290605 - DNA, 1000 bp, Homo Sapiens
catctactctttgaagcttctgcccagcttgcattgtttctaggagaacctgcgtcatacctttatctatagccttcccctaggtcttcagaagcatcaagttttaactgtggacattggatttggtggaacagcaatcatgactgttggcaagagtagcaagatgctgcagcacattgactatagaatgagatgtatcctgcaagatggccgaatcttcattggcacctttaaggcttttgacaagcatatgaatttgatcctctgtgattgtgatgagttcagaaagatcaagccaaagaatgcgaagcaaccagagcgtgaagaaaagcgggttttgggtctggtgttgctgcgtggggagaacttggtatccatgactgtggaggggccaccccccaaagatactggcattgctcgggtaccacttgctggagctgctggaggccctggggttggtagggcagctggtagaggagtaccagctggtgtgccaattccccaggcccctgctggattggcaggccctgtccgaggagttgggggaccatcccagcaggtaatgactccacagggaagaggcactgtagcagctgctgctgttgctgcgactgccagtattgctggagccccaacacagtacccaccaggacggggcactccgcccccacccgtcggcagagcaaccccacctccaggcattatggctcctccacctggtatgagaccacccatgggcccaccaattgggcttccccctgctcgagggacgccaataggcatgccgcctccgggaatgagaccccctccaccaggcattagaggtccacctcccccaggaatgcgtccaccaagaccttagcatactgttgatccatctcagtcactttttcccctgcaatgcgtcttgtgaaattgtgtagagtgtttgtgagctttttgttccctcattctgcattaataatagctaataataaatgcatagagcaattaaactgtg

SEQ ID NO: 290606 - DNA, 1000 bp, Homo Sapiens
ttagatggagtttctttttgcccaggctggagtgcagtggcgccatcttggctcactgcaacctctgcctcccaggttcaagcgattctcctgcctcagcctcctgagtagctgggaccacaggcgactgccaccacacccagctaattttttgtatttttagtagagacagggtttcaccatgttggccaggctggtctcgaactcctgacctcaagcgatccacccacctcggcctcccaaagtgctgggattacaggcgtgagccaccacgcccaactgggaccagggttttctgttttttgatggaggtgaaatctctttgtaatccactaggttttcatcgtaaaaccatcttatgcctgactattaaacctattcttcataaacacaagaacactttaatttttcgttaatttacaaagtaacatcagctgcctatgcctatgataaggtagcagtctgcattcttatggccattagatgttacaaactccttgcctctaaagtcagatcatgaagggataggtgttcatctaaggttacagttatgttaccgaaacacaaaactgccaaaatcttactctgctgttatgaatgtttaccatcagcattattttatcatttaatatgtgctcactgattgttaactgtagcttcagcgcgtgccaagcagttgacttaataggatcatcttgtgaatttgtttacgtgatgccaagcatcaagtcatgttttctttagtgtgtgtgcttacacaggtgttaaacagtttttctctattttaaactgagccttctttttaatatattcccgaagagatatgtaaataagctctcagagtttctgtgatgatttgttgagccttgctggacaagtggtttgtttgtgtgcaaaccaaactttctttacccagtgcaatagatttgtttgactgcttgtgtctttttatgacctgtttgccttttagaaaattggtaaataaagcaagtatattttt

SEQ ID NO: 290607 - DNA, 1000 bp, Homo Sapiens
ccttgacatggtggtgaatgaaacgctcagattattcccagttgttagtagagttacgagagtctgcaagaaagatattgaaatcaatggagtgttcattcccaaagggttagcagtgatggttccaatctatgctcttcaccatgacccaaagtactggacagagcctgagaagttctgccctgaaagtaggttcagtaagaagaacaaggacagcatagatctttacagatacataccttttggagctggaccccgaaactgcattggcatgaggtttgctctcacaaacataaaacttgctgtcattagagcactgcagaacttctccttcaaaccttgtaaagagactcagatcccactgaaattagacaatctaccaattcttcaaccagaaaaacctattgttctaaaagtgcacttaagagatgggattacaagtggaccctgactttccctaaggacttccactttgttcaagaaagctgtatcccagaacactagacacttcaaattgttttgtgaataaaactcagaaatgaagatgagcttaattaacctagtatactgggtgaataattagaaattctctacattcattgagctctcattgtctgggtagagtattacacgttgcatactacaaagcaggtgacaaatcaatgccaaataagtacagtcatcttctctagttctcataagactatctccccgccacctatagttagtaccctcaagtcctcctgagctgtgatcagagaataaacatttctcaacaattttaccaacaatttttaatgaaaaggaaaattatacttgtgattctcgtagtgacatttatattacatgttccatttgtgatattctataataagtattatattgagaaagtcaacaagcacctctttacaaaactgttatctgatgtcttcctgcatattaaggatgaatctacagaattagatcaataaggatcaacaaataaatatttttggtcatt

SEQ ID NO: 290608 - DNA, 1000 bp, Homo Sapiens; identical to SEQ ID NO: 223271

SEQ ID NO: 290609 - DNA, 1000 bp, Homo Sapiens
tttaggtgagtgggaaagtattacccttgttttaaatatctaagcaatgcctatcaacccttttttgtgttatgattactgtagtcatatttatgaaaaaaggtttgtgttttactcttgctagtgagaaaagtgggacaaaatatacttttgaaataaaatgctatatggcacctaattattttttcttttaaaatgccttaagttgcagtctcattttgataatcatttgcttccagtgtttaaaaattaaaaaaagaatggggagaaggttatgagaagagcattattaagtttccaaatttaatttgaattccaaattcacctagcaataaaatctaatttttaaaaagtatataaatataaaatgtataaatgatggatagatttttgtattgatttgcaaaatgcagattatatttgataggctatagtatgtagatattccttttaggaatattacagctgtaaattatatgagacttgccagtcaaatgctatttggtttaaaaaaattattgcaatctcaagttaatggaatatttttaaatcccacattcagagtttaaaacactggttttcaatgtgttttttagtgttgtcacttgtttatagataaatatataaataacctgtttggatcctggtcctttttaactgttccttggtaattctgagcatttatttgatgacttaatatttttcactacctttggagaacagatgaacattattcaccatgaatggatctatactgtgtggtcatgagttgtgtatacttccataacactgtatttttcttctgtcagtacccttaggatacactttaaaacaccttaaggtctgatgttatggcaacaaactactttttcaaacctaaataggaaccatgtaatttctcaaaagtgattgaacagtttgcccacacttagtttgttggtcttatgtaaaacattggctcaaaataaagtacacactgatttaaaaaaaaaaaaaaaaa

SEQ ID NO: 290610 - DNA, 1000 bp, Homo Sapiens; identical to SEQ ID NO: 117948

SEQ ID NO: 290611 - DNA, 1000 bp, Homo Sapiens; identical to SEQ ID NO: 223275

SEQ ID NO: 290612 - DNA, 1000 bp, Homo Sapiens; identical to SEQ ID NO: 117949

SEQ ID NO: 290613 - DNA, 1000 bp, Homo Sapiens
tgacttaacgtcaagctttgggttgatgtgggtagggtagtgtcaaactgctttgagaggaatgggaccagttctgctgcctaagaaggtctgtctggatgtttataggcagcacctctgaagtggcctaaattcaccctgatctgatagttttcctgcttagaaagtgtgccttggccagatcagtatcccacatgggagtgttccctaggttgtagctgtgattgtttccagatgaccagattgtttttctgaaaatgagcatatttttagtcatgtcgattagctgttcttctacatcacattgttactctttctgatgatgattctagggttaacattggaaccatctcaaaataattacaaagttttagatgggtttacaatgtcttctaaacaatgtaatctaaaaataattgagtcagatgctaacgagatactgcaggcataactgctgtttttctgacaactgattgtgaaaccttaaaacctgcatacctcttcttacagtgaggagtatgcaaaatctggaaagatattctattttttttatataggtagataggatcgccatttatttcctatttagatatactgacattcatccatatgaaaatatgcaggtcattagcttactataatttacttttgacttaatggggcataaataaaactttcatagtacacatgaggtggatatttgatacacagaacatttgcggtgggctttctgtgggttagatgtaaagcccacatattttaatattcactattttaaatgagcaatgcatgaggggaatgcagtgtcagtacctggcctatttttaaactagtgtaatcaccctagtcataccattcagtatgtttgctttttaaaataagtaaccacaattaagttgttgtagcccttgcacttcaagagatctagtctttactttcagttgtctgttaggtccattctgtttactagacggatgttaataaaaactatgcgagcctg

SEQ ID NO: 290614 - DNA, 1000 bp, Homo Sapiens; identical to SEQ ID NO: 223277

SEQ ID NO: 290615 - DNA, 1000 bp, Homo Sapiens; identical to SEQ ID NO: 117950

SEQ ID NO: 290616 - DNA, 1000 bp, Homo Sapiens; identical to SEQ ID NO: 117951

SEQ ID NO: 290617 - DNA, 1000 bp, Homo Sapiens
taaaattgaattcatatagtaacatgcagtctgaagtcctagttacttaataggtactcagcctggagtgaaaatcctgggtactgactttgagaggagtgagtgtgcatgttgtcaaagtttctgaacacagttcacatagccttattagcaaaagttttaagaaatggctctatcaaagaagcaattgcagctttattcagaaatataaaagtggaatttatgtacatgtcataagtggtacccacttcccctttttactgtagggtggataactcttaggatttaactctttgaatattatctcttgaataaagcatgtgttaatgttaacaaacctacgtaatttttgccctttcaatgacttacagtggagagccagtacatcttaactactgttgtagtgatggtatcaacctcatggttacttagctctgcatttgttgctttgttttttttccacttcaaatcacaaaataagtagattttgttttctgaaaactccatagcatttgaatacaaaaagttgtgccagattgtttgccctaattcactgtgtttaacaaatatttcagtacacactatgtattaggcactgtgtggaaagtgttaaggggtagacaagataccgaataatctccacaagtttatttgtggtctatagtacttttgtaactggggttacaaaaattatagaaatttttttcctttgttcatatgcatattcatgattataatttggctttgtttgtgattaatgttttcttaagattttcacattatagaatacctcaaaagaagttgtctaaggactgggatagagagtatgtttcataaaattgtagatgtttagaatttttaaaaaccctacaaattagtatatgattgttttatataagtaagataggagcaacactttaaattatttgtgggagaatacagcattaaaggtgattttaaaagaaaaaaaaaaaaaaaaaaaaaaaaaaaaaaaaaaaaa

SEQ ID NO: 290618 - DNA, 1000 bp, Homo Sapiens
tggtcaataatcccaatgttaaagaacaccctggagctttaagtatggtggatgacagctctgagtcttccgaagaaccaaaatcaggggagtcatatatacatcaagtttgtaaaggcataatctcttgccccttgaactcccctgtgcagctggctggactgaaattactagggcacttgagtataaaatttgaagatcactatgtgattaccagttatattccagatttcctcaccttgttaaacaagggaagtgtcaaaaccaagttttatgttttaaaagtgttttcgtgtttgtctaaaaatcacgccaatacaagagaattgatcagtgccaaagtactgtcatcattggttgcaccctttaacaagaatgagtcaaaggccaatattcttaatattattgaaatatttgagaatataaattttcagttcaaaacaaaggcaaagctatttaccaaggaaaagttcactaaatctgagcttatttcaatattccaggaagcaaaacagtttggtcagaaactccaagacttagcagagcacagtgatcccgaagtgagagataaagtcatacgattaatactaaaactctgaatacccctctgttctcataaagcctcaaacagttttttggagttgcaatatgaaaccaatgcatattgtaattataaattcaatacttatgttttccatgttgattgagggaggcaattttatggataccaattaatcttgagatcctgaacatgtgctgatttttattgtgctatatagtatataaattgagatatttttggtatttctgcaacgtgacctgataatgaatctattcatcctgagtaagctatacttctgtgctttatattgatatgtgtattcttttgagattttatttacatgttgttaataaagttgcatgctaaaactggtgaaaaaaaaaaaaaaaaaaaaaaaaaaaaaaaaaaaaaaaaaaaaaaaaaaaaaaaaaaaaaaaa

SEQ ID NO: 290619 - DNA, 1000 bp, Homo Sapiens
ggctcacttgggaagagccttgtgctctccactttgccacagtaccactgccaccatgctgctcacttatgtcatccacttggcccttgtatgacctgaatttgcaacctctggtatactgttatgttctggagaaaatattcaaagatctgccaaatactgcattagtatactgagtttatacagcatttttgtagggttttaaattgcattcaaggtcactttccaagcactttctggttttgcttgtttttctagaagaaaatgaaaagctattccttataataaacatggcagcaagtaaacagtgtgattgtgaaaaaaatattatttatagattttctacaaataaatatttgtctaccaagtaaaatattttgactgaaatgattctttgaaatgcatattgatttattatgtattgactttttaaaaattgaggtataattttcacaaaattctccaattttcagtgtcaaattcagtgaattttgaaaacatatatacagttgtctgtctgccacagtgatcatgatacagaacactttctttaccctgaaaacttctcatttttccttttgcagtcaatcccctgctcctatccttggcccctggcaaacactggtttgctttctatcattagttctgctgtttgagaatttcatataaatggaatcatgcaatgtgtaatctattgtgcctggcttctttcacgtagcattttgagaaaagcatttatactatttacagattgttgacaaatatttatccactaagtaaaatgttagactgaaatgattctttgacaagcttgccaatttactgattttgtcaaagaaaaatatgttatttttgaagtttgttcatcctttgagtgtgtgagtatagtatcagaggcttaattttgtatttatggagctattctaacttgttatttaaaaggaaaaaggtattaaacttgaagcaaacttctcatgaaaaaaaaaaaaaaaaaaaaaaa

SEQ ID NO: 290620 - DNA, 1000 bp, Homo Sapiens
tctcaatccagacatcatgacactcattttggtcgtttgactcctgtctctcctgtgcagcatcaaggtgccactgtaaataacaccaacaaacaggagggttttgcagtccctgcccctcttgataataaaggaactaattcatctgccagcagcaacttcagatgccggagtgtgagccctgctgttcatcgccaacgtaatcttagtggaagcaccctctatccagtatctaatatcccacaatctaatgtgaccccctttggaagtccagttaccccagaagttcatgttttcacaaatgttcacacagacgcatgtgccaacaacatagctcaaagaagccaatcagttccattgacagtcatgatgcagacagccttcccaaacgctcttcagaagcaagcaaacagtaaaaaaataaccaatgttttgttgagtaaacttgattccgacaatgatgatgcagtgagaggtttgggaatgaacaacctgccctctaattatacagcccggatgaatctcactcagattttggaaccttccactgtttttcctagtgccaacccacaaaatatgatcgattccagcacttctgtttatgagttccaaacaccatcttacctcaccaaaagtaatagcaccggtcagatcaatttttctcctggagataatcaagcacaatcagaaattggagagcaacaattagatttcaatagcactgttaaagacctgttgagtggagacagcttgcaaaccaaccagcagctgtgttcttgtccttcctctctgctggctggaatgcaaatgtgatggctagaactcaagcagccctcctggacttcatgttaaagacacatgctgaggatgattgagcaacaagatacaaggagcccagggcatgatgactttggaagggaagatgcccaactagtcctgactgcttacctctggatgtgttttacatgagagaaataaatgtctttctggtttaactcac

SEQ ID NO: 290621 - DNA, 1000 bp, Homo Sapiens; identical to SEQ ID NO: 223281

SEQ ID NO: 290622 - DNA, 1000 bp, Homo Sapiens
agtttgaaagagaaggcattaaaaagaagtgcgattcctttttagcaaggataaaatcattgccttgtgttacagattcagcctgctgaagagtattccactttctgtgtactcgaattgctttctgtttgctttaccactgcacttgttattattacaagggaaatagatatatacatacatatatatattcttcattacaggaaatgtaactagatattgtgcccaagaaaaacagccagaagcaaagaaatgcttcaatctttagttgcttcataggcattcatgacattttagtgctttcacaacttgttggtcgtactttatacttgggttatatattagacttttataggcttgaaatcatccatcacataagaaaatagaaatcatattaaaagtgaattcttctagaggcttgtgtacactactggttgttttagttgggccttttatatgaaagttatactgtacttatctttttgttgttgtttaggtttgttgactaccatttctggcttcctttctttggttttggattaaatccaacagtttatttgtaagccctgcagcagatttctttgataatttagcttttactgaatctcttgcaatgaagaaagctatttcatcagtgatttatcactttcaattcattgtgtgagctggaaatattattttatatgagagctatagcaaaataatctgtataaacaaggaatgtgttagcttaaactggatcattttactttttggcatcatgcatctgtactgtaccaaaagtgtttatatgtctgcaaattaaaggtatatattttcataatttctttctcacttttagcattttatatttgaacatgggcttgttatttcactgaagtgcctgtcatttgtttgtttttagggttaaatgtgggtaacctgtagtattctgctatactaaagtttatattaaatgaattcattactcaattaaacattgggtaaattattaaaaaaa

SEQ ID NO: 290623 - DNA, 1000 bp, Homo Sapiens; identical to SEQ ID NO: 223282

SEQ ID NO: 290624 - DNA, 1000 bp, Homo Sapiens; identical to SEQ ID NO: 115660

SEQ ID NO: 290625 - DNA, 841 bp, Homo Sapiens
gaaccgtttactcgctgctgtgcccatctatcagcaggctccgggctgaagattgcttctcttctctcctccaaggtctagtgacggagcccgcgcgcggcgccaccatgcggcagaaggcggtatcgcttttcttgtgctacctgctgctcttcacttgcagtggggtggaggcaggtgagaatgcgggtaaggatgcaggtaagaaaaagtgctcggagagctcggacagcggctccgggttctggaaggccctgaccttcatggccgtcggaggaggactcgcagtcgccgggctgcccgcgctgggcttcaccggcgccggcatcgcggccaactcggtggctgcctcgctgatgagctggtctgcgatcctgaatgggggcggcgtgcccgccggggggctagtggccacgctgcagagcctcggggctggtggcagcagcgtcgtcataggtaatattggtgccctgatgggctacgccacccacaagtatctcgatagtgaggaggatgaggagtagccagcagctcccagaacctcttcttccttcttggcctaactcttccagttaggatctagaactttgcctttttttttttttttttttttttttgagatgggttctcactatattgtccaggctagagtgcagtggctattcacagatgcgaacatagtacactgcagcctccaactcctagcctcaagtgatcctcctgtctcaacctcccaagtaggattacaagcatgcgccgacgatgcccagaatccagaactttgtctatcactctccccaacaacctagatgtgaaaacagaataaacttcacccagaaaa

SEQ ID NO: 290626 - DNA, 1000 bp, Homo Sapiens
cctgtgttgtggtttacactggatatggaaatagagaggagcaaaatctgtccgatctactttccccaatctgtgaagtagctaataatatagaacagaatgctcaagagaatgaaaatgaaagccaagtttcaacagatgaaagtgagaactccaggtctcctggaaataaatcagataacatcaagcccaaatctgctccatggaactcttttctccctccaccaccccccatgccagggccaagactgggaccaggaaagataattcccccaccacctcccatatgtccagattctcttgatgatgctgatgctttgggaagtatgttaatttcatggtacatgagtggctatcatactggctattatatgggttttagacaaaatcaaaaagaaggaaggtgctcacattccttaaattaaggagaaatgctggcatagagcagcactaaatgacaccactaaagaaacgatcagacagatctggaatgtgaagcgttatagaagataactggcctcatttcttcaaaatatcaagtgttgggaaagaaaaaaggaagtggaatgggtaactcttcttgattaaaagttatgtaataaccaaatgcaatgtgaaatattttactggactcttttgaaaaaccatctgtaaaagactgaggtgggggtgggaggccagcacggtggtgaggcagttgagaaaatttgaatgtggattagattttgaatgatattggataattattggtaattttatggcctgtgagaagggtgttgtagtttataaaagactgtcttaatttgcatacttaagcatttaggaatgaagtgttagagtgtcttaaaatgtttcaaatggtttaacaaaatgtatgtgaggcgtatgtggcaaaatgttacagaatctaactggtggacatggctgttcattgtactgtttttttctatcttctatatgtttaaaagtatataataaaaatatttaatttttttttaaa

SEQ ID NO: 290627 - DNA, 1000 bp, Homo Sapiens; identical to SEQ ID NO: 117953

SEQ ID NO: 290628 - DNA, 1000 bp, Homo Sapiens; identical to SEQ ID NO: 223285

SEQ ID NO: 290629 - DNA, 1000 bp, Homo Sapiens; identical to SEQ ID NO: 117954

SEQ ID NO: 290630 - DNA, 1000 bp, Homo Sapiens; identical to SEQ ID NO: 117955

SEQ ID NO: 290631 - DNA, 1000 bp, Homo Sapiens; identical to SEQ ID NO: 223286

SEQ ID NO: 290632 - DNA, 1000 bp, Homo Sapiens
taaagatggaaggctgggcagactggcttttgttacctgacatgccgtagggtgagcttagaggaagaaagaaaacaatttttatttggccaaaacagaacaaatgctgaaaaggaaatcttgtttttttcctaaagccaaatagaaatgatttgggtataatttaagagtccttgtgttgtacagatatggtgactgatgtagttattaatactaccaacttagtcatcaagcctcaattttcctttacctgaaggattaagtgaaagcttttggagttcatgatgttcagtatgatcagttaaccttaacctctgagcatcctgaagcaaaatctaaataatgcagctattaccactggtggtccaggctctggtgaagccctctgagcccaggaggaagagaaagcattgtccagaggtaggaacacagtctgggagcccagagctctgggaggagtgggaaaatgctgcttcctgctgcttgcttctaggcacctgcttccgccatctcacttaccatggctagagatgggggtgagactggggaaggacaaaagcagggaacagataagggatggaaatcagaagggaatatagaaagaactctggatgtggagaaatgccggtacctgagcattttgtatcaatgggagtaccctctgtaactgctcagtaggttacaaatgaagagtccaccagtattagaaacaatttaaacttgccagtaccaactgggatgtgtgccttcaatttgaaaattgtatgttttattttttaaatttgttaacagcattaatttatagagtattgatgtcatttatgtttctgaggtgtttcaacacaattttggatcagctgcctgtttgcaaaaacataatatatttctgttaaacagttcttcacctaacagcatattgctcttataactggtagagctgtttcaaaggaagttggtttctggtccaagttttgacctaaaccatgtccatcttctatta

SEQ ID NO: 290633 - DNA, 1000 bp, Homo Sapiens; identical to SEQ ID NO: 117956

SEQ ID NO: 290634 - DNA, 1000 bp, Homo Sapiens
acaaggacgtgacggacgccatccgagacgtgcatgtgaagggcctcatgtaccagtggatcgagcaggacatggagaagtacatcctgagaggggatgagacgtttgctgtcctgagccgcctggtggcccatgggaaacagctgttcctcatcaccaacagtcctttcagcttcgtagacaaggggatgcggcacatggtgggtcccgattggcgccagctcttcgatgtggtcattgtccaggcagacaagcccagcttcttcactgaccggcgcaagcctttcagaaaactcgatgagaagggctcacttcagtgggaccggatcacccgcttggaaaagggcaagatctatcggcagggaaacctgtttgacttcttacgcttgacggaatggcgtggcccccgcgtgctctacttcggggaccacctctatagtgatctggcggatctcatgctgcggcacggctggcgcacaggcgccatcatccccgagctggagcgtgagatccgcatcatcaacacggagcagtacatgcactcgctgacgtggcagcaggcgctcacggggctgctggagcgcatgcagacctatcaggacgcggagtcgaggcaggtgctggctgcctggatgaaagagcggcaggagctgaggtgcatcaccaaggccctgttcaatgcgcagttcggcagcatcttccgcaccttccacaaccccacctacttctcaaggcgcctcgtgcgcttctctgacctctacatggcctccctcagctgcctgctcaactaccgcgtggacttcaccttctacccacgccgtacgccgctgcagcacgaggcacccctctggatggaccagctctgcaccggctgcatgaagacccccttccttggtgacatggcccacatccgctgagggcacctttattgtctgggacaggccctcagcccctcctgccccatccacccagacaagcaataaaagtggtctcctccctg

SEQ ID NO: 290635 - DNA, 1000 bp, Homo Sapiens; identical to SEQ ID NO: 117958

SEQ ID NO: 290636 - DNA, 1000 bp, Homo Sapiens; identical to SEQ ID NO: 117959

SEQ ID NO: 290637 - DNA, 1000 bp, Homo Sapiens
cttgaggagcacctttcagagtccacctcgtccaatgcaggcctatcactgtcccagcttctggatgaaatgcgggaggaccaggagcatcagggggcactcgtgtgcctggctgaaagctgcctgacactggagggcccttgcacagcaccccctgtcacccactgggctgcctcacgatgcaaggccacgggagaagctgtgtacactgtccccagctcaatgctgtgcatctctgagaatgaccagctaattctgagctctctaggcccctgtcagaggacacagggccctgagctgcccccaccagacccggctctgcaggacctatctctgaccctcatagcctctcctccttcctcacccagttcctcaggaaccccggccttacccggccacatgtcatccgaggaaagtggtaccagcatcagccttctgcctgccctgtccttggctgctccagacccagggcagagaagcagctcccagccctcaccagccatctgctcagcccctgccaccctgacccccaggtccccacacgccagccgtacccccagctccccactccagagctgcactcccagtctctcaccccgtagccatgtccccagtccacaccaggctcttgtgaccaggccccagaaacctagcctggagttcaaggagtttgtagggttgccctgcaagaatcggccgccttttcccaggaccggagctaccaggggagcccaggagccctgctctgtctgggaacccccaaagaggcatcgtgatggttctgccttccagtatgagtatgagccaccctgcacgtccctctgtgctcgggtccaagctgtcaggcttcctccccagctcatggcctgggccttgcactttctgatggatgcacagccagggtctgagccaactccgatgtgagacgtcacgcaggacagataccgctccacactctgcttcctttgagttttttaataaaataatctcatgcggcagg

SEQ ID NO: 290638 - DNA, 1000 bp, Homo Sapiens; identical to SEQ ID NO: 223287

SEQ ID NO: 290639 - DNA, 1000 bp, Homo Sapiens
ataaagagctgaagtggtctacagttaatgtgacatgtagggatgatgatatttttaaaatacattttgttgctaaaaagtttttaggcaagtgcaaattatgcagtagaacttgtgttgcaaaaggaattataacccatactttaaaaatgcttaatccctcatattcaatttcatcaagccttgtatacttctgcttaaatgtaattcaatccttggttgttatggcaaacagaaacgcaacaaaaagacagactctggtactatggtaacagagccactttatcatttggtcaaaatttggcattatgattagctttgtagaactgacctgtttatttggcaatgctgttaaaggatcatttcggtttcagacttcaaagttgattaataaatttaatcttaactttttattcattggaatcaaaacgatggttggtactgtgtttactgtttaaaatgaagtactaaagccctgagaactgcacctcattttctttatccagaaattgtgcttatatattttcctgtcaggtttaaaaagatgttttaattcataaattattgttttcattgacattaaaagactgtgatattgaaagatgaattacgaaatttgctgagattgtttagtaaaattttgctggtcaaaaaggtgtatttctacaatttaccttttcatttttataaattgcagtcatttttttaaattttatgtaaaatgtaaaatgaaatagctatcatgaagcagaatacaatgatgaatgtataggttgagtgaataaccaatttgcagtggtggattgagaagtccagtttgatttcattgggacagactgcaaagtgtagttgtttgagcaaacacaaagaaactttgtgtttttgaagacaatcagaatgattacctttctacctctaactaatcaggtattgattgacaactttttggcattataaataaagtaaaatagatctctgcattccaaaaaaaaaaaaaaaa

SEQ ID NO: 290640 - DNA, 1000 bp, Homo Sapiens; identical to SEQ ID NO: 223288

SEQ ID NO: 290641 - DNA, 1000 bp, Homo Sapiens; identical to SEQ ID NO: 223289

SEQ ID NO: 290642 - DNA, 1000 bp, Homo Sapiens; identical to SEQ ID NO: 117960

SEQ ID NO: 290643 - DNA, 1000 bp, Homo Sapiens
gagtctcgcactgttgcccaggctggactgcagtggcgtgatctctgctcactgcaacctccgcctcccgggttcaagcgattctccagcctcagcttcctgagtagatgggattacaggcgcctgccaccacgcccagctaattttttgtattcttagtagagatggggtttcaccatgttggccaggctggtctccatctcctgacctcgtgattcacccgcctcggcctcccaaagtgctgggattacaggcgtgagtcacagcccccggccataatttagcactttaaaaaataatagccatgttgggccaggcgtggtggctcatgcctgtaatctgagcactttgggagaccaaggcgggtagatcccttgtgcccaggagttcaagaccagcctgggcaacatggcgaaaccccatttctactaaaaatacaaaaattagctggggcgaggggataggccgagttccgggtgtaagggggccattagggagagcagagcgaggcagctgatcttccggattgggggccttgcccggaagctggacctcacggagatgaaacggaagatgcacgaggatatgatctccatacagaactttctcatctacgtggccctgctgcgagtcactccatttatcttaaagaaattggacagcatatgaagattggacatcacatgtgaatgcatgatatgaagagcctggttacagtttctactgttctctgcaagtaaataggcccagaaaggtataagagactctttgaatggacataaaaattctgcttgttaagaacaagttgagctctggtaactgatcttaatagctaaaatataaaaatatttgggaagtctgaaatgaggtctcctggccctggtgtgcccttaatgcctgtgacagttggcctctgtgaatattggtataattgtaaataatgtcaaactccattttctagcaagtattaataattaagggaagtatgtctgaaatggca

SEQ ID NO: 290644 - DNA, 1000 bp, Homo Sapiens; identical to SEQ ID NO: 223290

SEQ ID NO: 290645 - DNA, 1000 bp, Homo Sapiens; identical to SEQ ID NO: 117961

SEQ ID NO: 290646 - DNA, 1000 bp, Homo Sapiens; identical to SEQ ID NO: 223291

SEQ ID NO: 290647 - DNA, 1000 bp, Homo Sapiens; identical to SEQ ID NO: 117962

SEQ ID NO: 290648 - DNA, 1000 bp, Homo Sapiens
cacactgggtgctgtctgcggcccactgccaaagccgcttcatgagagtgcgcctgggagagcacaacctgcgcaagcgcgatggcccagagcaactacggaccacgtctcgggtcattccacacccgcgctacgaagcgcgcagccaccgcaacgacatcatgttgctgcgcctagtccagcccgcacgcctgaacccccagtgagtctcccagatacgttgcattgtgccaacatcagcattatctcggacacatcttgtgacaagagctacccagggcgcctgacaaacaccatggtgtgtgcaggcgcggagggcagaggcgcagaatcctgtgagggtgactctgggggacccctggtctgtgggggcatcctgcagggcattgtgtcctggggtgacgtcccttgtgacaacaccaccaagcctggtgtctataccaaagtctgccactacttggagtggatcagggaaaccatgaagaggaactgactattctagcctatctcctgtgcccctgactgagcagaagcccccacagctggccagcagccccgcctgacatggaacagaacggagccatcccccaagaccctgtccaaggcccagatgttagccaaggacttgtcccacctgaggacaaagctggcgctcaaggtcacctgtttaatgccaagataacaaagcgctgatccaagttgctctgtaggaatttctgtgacttttttctggggtcaaagagaaaccccgagacactgtacactgttccttttcacccaccaccccgatccctaggtgaggagaagcggcttgaagcagggctccattcattcaacacacatgaccacccgtgtgatcttgaacaagaggcccaatctcacttcgccttggtttccttatctgtaaaatgagaccatcttattgctgacttcaaagggctgttgtgaggattaaatgagatgattcgtctgaactgattaaaatcgtgtctggcactga

SEQ ID NO: 290649 - DNA, 1000 bp, Homo Sapiens; identical to SEQ ID NO: 117963

SEQ ID NO: 290650 - DNA, 1000 bp, Homo Sapiens
ccacagaggaagagcaggagcagggggagatcggtgcctgcagcgacgagggcactgctcaggaagggaaggccgcagccacccctgagagccaggaaccccaggccaagggggcagaggctagtgcagcctcagaagaagaggcagggccccaggctacagagccatccactccctcggggccggagagtggccctacaccagccagcgctgagcagaatgagtagctaggtaggggcaggtgggtgatctctaagctgcaaaaactgtgctgtccttgtgaggtcactgcctggacctggtgccctggctgccttcctgtgcccagaaaggaaggggctattgcctcctcccagccacgttccctttcctcctctccctcctgtggattctcccatcagccatctggttctcctcttaaggccagttgaagatggtcccttacagcttcccaagttaggttagtgatgtgaaatgctcctgtccctggccctacctccttccctgtccccacccctgcataaggcagttgttggttttcttccccaattcttttccaagtaggttttgtttaccctactccccaaatccctgagccagaagtggggtgcttatactcccaaaccttgagtgtccagccttcccctgttgtttttagtctcttgtgctgtgcctagtggcacctgggctggggaggacactgccccgtctaggtttttataaatgtcttactcaagttcaaacctccagcctgtgaatcaactgtgtctcttttttgacttggtaagcaagtattaggctttggggtggggggaggtctgtaatgtgaaacaacttcttgtcttttttttctcccactgttgtaaataacttttaatggccaaaccccagatttgtacttttttttttttctaactgctaaaaccattctcttccacctggttttactgtaacatttggaaaaggaataaatgtcgtccctttaaaaaaaaaaaaaaaa

SEQ ID NO: 290651 - DNA, 1000 bp, Homo Sapiens; identical to SEQ ID NO: 223293

SEQ ID NO: 290652 - DNA, 1000 bp, Homo Sapiens; identical to SEQ ID NO: 117964

SEQ ID NO: 290653 - DNA, 1000 bp, Homo Sapiens
aagaatgccacacagccccccaatgccgaagaagagtcgggctccagcagtgcttcagaagaggaagacacgaaaccgaagcctaccaagcggaaacgaaaagggtcctctgcagtgggctctgacagtgactgaggccctgcattccccatcccacccccggctggactgccctctccttcttggtgattcaaaggttaatagaggctgaggagattgcaggggaaacacccttgctgcatccccaagctcccccggtggaaggaggagctttctcctctggctgagtttgagaagctgccatgcagcccctagccccttccctcctcctggggcctccagcccctcacactgctgttcccagtgatatttgggatctgactgaagccagaggctctgtaaaatcagaccatagtggaagtcctcagccccctggccccttccgcaatctcctcccccagtctcccaaagagccatttcaacagagaagggaaatgacaaaggggcagctggccagataagctaggatgagagcagagactcagtgtgtgggtgtcccttcctgcttccccttcaggtcttggtttgttctgaagggacgttttatagtcactatccacatgccagtgtgaaatgggcatctatgacgtggtcagggtgtccattcctaatcatggggcagatgccacaagcattcagaaaggagtctgaaagggtggccacagccccacgtggtgtgccctggaggcttaggttggtctgaggttggcacctcaatctacaccagagcccagggagtcccagaggcaagtttcacagaattgtcaaatgatcccatttccttgagtctgtttttttttttgtttttttttgttttttttttggcagagataatcgtgtcttaaaagttgtttttaaatgacaataaaacaagccagaatgtcaaaaaaaaaaaaaaaaaaaaaaaaaaaaaaaaaaaaaaaaaaaaaaaaaaaaaaaa

SEQ ID NO: 290654 - DNA, 1000 bp, Homo Sapiens; identical to SEQ ID NO: 223294

SEQ ID NO: 290655 - DNA, 1000 bp, Homo Sapiens
gctgatgtacatactttctcgtacacacttttgtgaagatttcaaggggaagggagttgtctgccattcaatgtttacatttatgttctgcaagacgctgtcctcagggaccattaggggaccattctgttcagtgcgatcctgatggtccgggagatgagggtttccggggctagtgatcgtgatcccttttatttgcaactgtaatgagaatttttcacactaacacagcgagggactcaacacgctgattctcctcctgcctctcccgtgagtctccagcctgcccagcaccagcagctgtggagcacgtggatgctgcctaccccggcgcccgcgtcttccacgggcacaggtgtgtggaggccgtggtcggaccctggtgtcctggttactgctgcccgggtgtcttttttttgagtaactgctctctgagttttgcacacgaagttgccctcatctgctggagatcgataaggaaggcacaagacgttctcctctgcccgtgaggagcttcccgcagccgcctggcccagcctgggcacgttctccgaggcatgtgtctccctgctcaccctcgtctgggcacctcagcatctgtggacttgagcgtccaaaaaccctgagtgtgattctgggcagccggcctggcttgaagtccgccatgaccctgggcacaggggaagcccagccgtgggcttaggagagagggaccagcgcccagcgttagggctggaagacggcagtgttcagaattccagccgctcatctgaacacagaaggtgtgaactgacctctaaagcagcgtgagatgggaatgatctagaaaactttggatttttgaagtaaattttaatgtttcatattaatttcttgaaaatgtattaaatgtcattgaaagccttattacgcttttcagatcctttcaataaacaagacttgtagaaaataaaaaaaaaaaaaaaaaaaaaaaaaaaaaaaaaaaaaaaaaaaaaaaaaa

SEQ ID NO: 290656 - DNA, 1000 bp, Homo Sapiens; identical to SEQ ID NO: 117965

SEQ ID NO: 290657 - DNA, 1000 bp, Homo Sapiens
tttgctaaatgctgttcttacacataatttcttaattttcaccgagcagaggtggaaaaatacttttgctttcagggaaaatggtataacgttaatttattaataaattggtaatatacaaaacaattaatcatttatagttttttttgtaatttaagtggcatttctatgcaggcagcacagcagactagttaatctattgcttggacttaactagttatcagatcctttgaaaagagaatatttacaatatatgactaatttggggaaaatgaagttttgatttatttgtgtttaaatgctgctgtcagacgattgttcttagacctcctaaatgccccatattaaaagaactcattcataggaaggtgtttcattttggtgtgcaaccctgtcattacgtcaacgcaacgtctaactggacttcccaagataaatggtaccagcgtcctcttaaaagatgccttaatccattccttgaggacagaccttagttgaaatgatagcagaatgtgcttctctctggcagctggccttctgcttctgagttgcacattaatcagattagcctgattctcttcagtgaattttgataatggcttccagactctttgcgttggagacgcctgttaggatcttcaagtcccatcatagaaaattgaaacacagagttgttctgctgatagttttggggatacgtccatctttttaagggattgctttcatctaattctggcaggacctcaccaaaagatccagcctcatacctacatcagacaaaatatcgccgttgttccttctgtactaaagtattgtgttttgctttggaaacacccactcactttgcaatagccgtgcaagatgaatgcagattacactgatcttatgtgttacaaaattggagaaagtatttaataaaacctgttaatttttatactgacaataaaaatgtttctacagatattaatgttaacaagacaaaataaatgtcacgcaactt

SEQ ID NO: 290658 - DNA, 1000 bp, Homo Sapiens; identical to SEQ ID NO: 223296

SEQ ID NO: 290659 - DNA, 1000 bp, Homo Sapiens; identical to SEQ ID NO: 117966

SEQ ID NO: 290660 - DNA, 1000 bp, Homo Sapiens; identical to SEQ ID NO: 117968

SEQ ID NO: 290661 - DNA, 1000 bp, Homo Sapiens
tggccttctctcacaggtcggtgcgctcgctctccgcgttccccgcccgactgccgtgcagtccatggctagacgcgccggacaggactgatggcgggaccgcgctgcccgagaaagggacggaccaatacgtgtgtttgctccgcgaaccctcttgaagctgttcagaagccgcttgccgcggggcccactaggcggggcgggggttgggacccagcgggagccggggcagcctggctccacggcctgtactcggtttacaccgcgggcgggcgcggagggaggctgcgtttcctccgctatcagtcccgtcgcttcgggcacctccgggccccggcggctggctaatgttttgtttgaaagatcggtggaactttttaagagagtatttaaaaaaaaaaaaaggaaaaaaaattcaccgggcaaccggggaagtattgtggccttggagtttgctaaatccaaatatgaaaatcaaaagctttagtattcctcatcttctcttctggaagatttgcgttagagtttttgttgggccttcaaaaagctgtgttcagagttaggagaatatatccaataaaagatggtttcgtctaccaattggggaagtttcaccctctccctatctgaagaaaaaaatcaaaaacaaatgtccccggatctttcgatgcaagtcctggaggcagggagatcactgcctgcctggcccacgctgctgggacggctcgtcctccctgctttttgtttttcaaacctcctgcttctcccaccttgggaaggagaaatgtgaaacccggcagcggccgacctaggcggtcttgtggcccggagccggcccggcccgaaaaccatagacctggttgtactgtagcttgttgtttgggggaccaaattttctagagagaactagagcacttttgttgtgtttttttgttttgtttttgttttttgccttgtcgattcccgaataaattttgtgttccttcttttaaaaaaaaaa

SEQ ID NO: 290662 - DNA, 1000 bp, Homo Sapiens
ggccctatctcatgatggcaaggtgctggccacgagcagcggggtccacagcttggcatcagggacaggccatgtccaggtggcccgaaacgccctacggctgcaggtgcaagatgtgcctgcaggtgatgacacctatgtttgcacagcccaaaacttgctgggctcaatcagcaccatcgggcggttgcaggtagaaggtgcacgcgtggtggcagagcctggcctggacgtgcctgagggcgctgccctgaacctcagctgccgcctcctgggtggccctgggcctgtgggcaactccacctttgcatggttctggaatgaccggcggctgcacgcggagcctgtgcccactctcgccttcacccacgtggctcgtgctcaagctgggatgtaccactgcctggctgagctccccactggggctgctgcctctgctccagtcatgctccgtgtgctctaccctcccaagacgcccaccatgatggtcttcgtggagcctgagggtggcctccggggcatcctggattgccgagtggacagcgagccgctcgccagcctgactctccaccttggcagtcgactggtggcctccagtcagccccagggtgctcctgcagagccacacatccatgtcctggcttcccccaatgccctgagggtggacatcgaggcgctgaggcccagcgaccaaggggaatacatctgttctgcctcaaatgtcctgggctctgcctctacctccacctactttggggtcagagccctgcaccgcctgcatcagttccagcagctgctctgggtcctgggactgctggtgggcctcctgctcctgctgttgggcctgggggcctgctacacctggagaaggaggcgtgtttgtaagcagagcatgggcgagaattcggtggagatggcttttcagaaagagaccacgcagctcattgatcctgatgcagccacatgtgagacctcaacctgtgccccacccctgggctga

SEQ ID NO: 290663 - DNA, 1000 bp, Homo Sapiens
acctctcagactgaagccgtgaactcttgagagaaaatccagttggcctctctcctctatccacacaattcaacttgataactggactttaggaaacttacagttagatgtaataacaaaaagaagtttatgcgtatcactttttgtgccattctaagtatttttggttcttgtctccttatttcctctttaccatttttggaggggaagctattttttttccttgatctttcccagtgatatggattgaatctggttggtcatttccaccaggaatcagaggcagctgttaccaggtttcggccttccagttgatccctccactgtccaggctgtctcaggaggaggtgaatcagagctagtctgtcacctttccaatctaagccgaagccacaggtgcctgacaggttcccttctaacaactatttgaccaagagaggcaatcagggggttgtatactgcactggattcgccagagaagggaaaatttaattagtgaagaggaaagaacactaggaaacatttgagaacctgcctctatcccagaacgtgctggagatttgacactcaaatcagtgtttagtcttctgcttggcaccatagcttaacctgcagtttcttcaaaatgcccaatgccttgtttcctattaccttagattgcaaaccagtctagggaagtctatgagaaagtagcatttaattaaagtttaaaaaaaaaaaggttgggcgttgtggctcatgcctgtaatcccagcactttgggaggctgaggcgggtggatcactaggtcaggagttcaagaccagcctggccaacatggtgaaaccctgtctgtactaaaaatacaaaagttagctgagcatggtggcgtgtgcctgtaatctcagctactcaggaggctgaggcaggagaatcgcttgaacccaggaggcggaggctgcagtgagctgagattgtgccactgcactccagcctgggagacagagcaagactcagtctc

SEQ ID NO: 290664 - DNA, 1000 bp, Homo Sapiens; identical to SEQ ID NO: 223298

SEQ ID NO: 290665 - DNA, 1000 bp, Homo Sapiens; identical to SEQ ID NO: 223299

SEQ ID NO: 290666 - DNA, 1000 bp, Homo Sapiens; identical to SEQ ID NO: 223300

SEQ ID NO: 290667 - DNA, 1000 bp, Homo Sapiens
atgcaaacccacagaacccgcctgcctgtccctgaggggcctggtgcctccgggatccacgcggcgctgtgatcacagcagtttgtggtcctgacactactgtgactaggccactgggagctggggtctttcaaagcactttgtaaaccgaggaatttagttagaggttataaattgctctaagctgctttctgtttttttttaatatgcgataatatgaagctttatatgtgtactgtgaacttaaatatttcatatcagtttattgtcaattcatagtatgctaaatatattagatttcatattctgaaactagtacttatgaaatgagtgtttatctagtagtaagacctaggatttttacattttccaattaagtgcaaatagtatttataagcagagtgattatggattgagatgtttttaacttgatggaaggagctagttttcctgagcctgtgtgtgcaccaggcactggggctgatgttccagcctcgtggcgtgggagcaggagagctccgtcctgcatttctgtggtccgtggccgctgtttctgtgcgcctgcgcctcggagagcaagtgaaggagcatcatgggttttgttttctcccttaaccctctgaaagacagtttgatactaacaaaaaacgcagcagaggggatccaacgtcagagcttttagaattacttttttaagcagctgtcttctggctgggtgcggtggctcatgcctgtgatcccagcactttgggaggcgggtggatcacctaaggtcaggagttcaagaccagcctggccaacatggtgcaaccccgtcttagtaaaaatacaaaaattggcctggcgtgagagcgggcacctgtagtcccagctactcgggaggctgaggcaggagaatcgcttgaacctgggaggcagaggttgcagtgagccgagatcgcgccaccgcactccagcccgggtgacagagcgagactctggctcaaaaaaaaaaaaaaaa

SEQ ID NO: 290668 - DNA, 1000 bp, Homo Sapiens; identical to SEQ ID NO: 223302

SEQ ID NO: 290669 - DNA, 1000 bp, Homo Sapiens
taaaacacttgattaggctccggttttcctttggcttctgcttttcagtgaatggcatgactgcctatgtgggtggcaagccacccaggtgccgaggaaagagactgagggcacgagctgttccagtataataaaatatataaaataagaagagttatactagatccagatcatagacatgattatatgtgagtatcattaatcattagtttatagcaattactctttattccaatattataataatcctcaccctacaatcataacctaggaaaaaccaggccatacagagataggagccgaggggacatagtgcgaagtggccagaagacaagagtgtgagccttctcttatgcctggacagggccaccagagggcttggtctagcagtaacaccagtgtctgggaagatgcctgttgcaaagtggaccatggtctagcagtagcatcagtgtcaaggaaaaacacccactacttagcagactgggaaaaggagcctccctttccccgggggagtttagagaagactactcctccacctcttgtggagggcctgacatcagtcaggcccgcccgcagttatccagaggcctgtctccctgtgatgctgtgcttcagtggtcacgctcctagtccgctttcatgttccatcctgtatacctggctctgccttttagatagcaggagcaaattagtgaaagtactaaatgtctgatatgcagaaataatggcataagctgtctctctctcttctctctctctctgcctctgctgccaggcagggaagggccccctgtccagtggacacatgacccatgtgaccttacctattattggagatggttcacattccttaccctgcccctttgtcttatatccaataaatatcagtgcagcctggcatttggggccactactggtctccgcgtcttggtggtagtggtcccccaggcccaggtgtcttttcttttaaaaaaaaaaaaaaaaaaaaaaaaaaaaa

SEQ ID NO: 290670 - DNA, 1000 bp, Homo Sapiens; identical to SEQ ID NO: 223305

SEQ ID NO: 290671 - DNA, 1000 bp, Homo Sapiens
ggaggcggccccaggagatttgtgccacaccccggctgtttccagatgacccacgggaagggcaggtgaagcaggggctgctgggggattgctggttcctgtgtgcctgcgccgcgctgcagaagagcaggcacctcctggaccaggtctcttgccctgtgcagcttcctgcagactggacttgcaaagtccagcctgtatggctggagttcccatgcctgccaatctcctgtcgactgcgagtcagctccgatacttcaccagattcagccacctgggggagctggaagtgaatctcatcttagctgagccttctgatgagactgcagccccagctgacacctggattgcagactcatgaaagacctgaaactctaccaacagccacctgggggagctggaagtgaatctcctcgtagctgagccttctgatgagactgcagccccggctgacacctggattgcagactcatgaaagacctgaaactctaccaacagccacctgggggagctggaagtgaatctcctcgtagctgagccttctgatgagactgcagccccggctgacacctggattgcagactcatgaaagaccctgagcagaggacccagtttggcagagcccgaattcctgacccacaggaactgggagataaaactctgtggttttaatcttctcattttagaggtaatttttttgtgtagcaataggtagctgacaatgcacagctaaaataatagataattaaccctaatgctagtttcattcatccatcagggtttgcaaagtagtgatattctacttctgtcttccttcattatttattagcagaaatgtatctataaaaagaagtgttccttcattaactctttggtcatgttgaggtacagtttgcataggaaaggcagggcaaatgcttgattctttcccttcctttcctcatttataaaataatgaactgttttcctggcatctttcaacaatgactaatgagttttt

SEQ ID NO: 290672 - DNA, 1000 bp, Homo Sapiens
agctgggaacagagggctgcagggatgggtggtgctggtctgtaataagctttgagagcaacgtcactggggctttggggtcagctacacaaggaaggcatttggacccctgccttttcattgcccgaaaccagagcctttccaccaagcgtttcccagtcttagccctgtgtcctgagttacgtacgatctttctggcaaatggggtgcatgataagagcatctcttacgaagagttggaaaaacaaatgccatatataaattctaagccatatgaggacgaggagtaatggcattttcttcctttttcctctcactcccagacattcattgtccctgaatgctccattaatccagggaaggtaattgcctaaatctccagtggatctcgcaacaggaaggaaccagaagctgggaaagttgtttacctctttgtcccagagttagacctcatcctcccctagcttagctgtctcagagatatactggccctcccttctcttctctttgctgctggtgctaaaactgctctgtaggtcattggccactgtctccactcacaacccctgctccagtcctggagggagtgggttaaacacaaatagaacattccatttgaagcagtgattctttttttttttttttttttttaatcaaatgctttggacttttgaagtccacttgttctgtacttgtaaaagggaaagaaggccgggcgcagtcgtcacgcctgtaatcccagcactttagatcacttgaggtcaggagtttgagaccagcccggccaacatggtgaaaccccatctctactaaaaatacaaaaattagctgtgcatagtggttggcacctgtagtcccagctactcaggaggctgaggcaagctaactgcttgaacccagaaggcagaggttgcagtgagctgagatcacgccactgcactccagcctgggtgacagagtgagtgagactctgcgttaaaaaaaaaaaaaaaaaaaaaaa

SEQ ID NO: 290673 - DNA, 1000 bp, Homo Sapiens; identical to SEQ ID NO: 223306

SEQ ID NO: 290674 - DNA, 1000 bp, Homo Sapiens
tccaaccagaatccaaattggttagatgaggccaggcgcggtggctcacgcctgtaatcccaaagtggtgggattacaggcatgagccaccgtgcgagccttccttgaagttttttgtttggttttgatttgttttgttttgttttgttttgttttgtttttggagatagggtctcgctctgttacccatgctggagtgcagtggcacaatcttggctcagagcaacctctgcctcccaggctcaagcaatcctcccacttcagtctaagtagctgggactacaggcacgtgccaccaggcccagctaatttttgtgttttgttagagatgaggttttgccatgttgcccaggctcgtcttgaacaccggggctcaaggaatctgcccatcttcgcctcccaaagttctgagatagcaggtgtgagtcatcatgcccagcctccttgaagtttactaacaattgggataactgagggaagagaagtgacaattccactcagtctattagaggtctggatataaggtagccacacaataactctaacttgacttctaaccattctatcttattgatttggaggctgtcttctgccagattttttgtggcttgagatgatattttcgaacccttctttcactacctttcttacccttaatgtgccaagcttgaaacaggatttgatttcctgagctacttgttcgccttctgtgcgtcaccaagtaatctggttcatctttcgtctcattcatgttattttcaagtgaaacaagacattttgggggtcaagtctctttgggtgttttgtttttatgtatataaaaatggattttgtgttccctttccatgtaagtaccaacttatatggaaactcacaatcataatgtaaagaagaaatgaaagcctggtgtattgtacttcaagatgcctccctgatgtatagaatctccttgtaaaataaataattgcattgtaaaaaaaaaaaaaaaaaaaaaaaaaaa

SEQ ID NO: 290675 - DNA, 1000 bp, Homo Sapiens
aaactcaatgtggtcctttcaagaattagccatgagtctcaaaaaggcaataaatggctctaagtggacaggtttgcttcaaacaagtaacatctacattttgtcttttttttttcagttctcctgttatgttctggttgaaatcacctgtgtgtcttaatttctcaattcctttttggcaagaatatcaagcaaggtgaatttaacattatgtttatgttttgttttgttgctgtaactaatagttaattggactgattcttacccagccctggtcaagaatctgtgaggcatgtgactgaagtactaaattaaacttattttgaaaccaaacctaatttttaagccaaaaggtgtaatagtgatttaatacaggatgaaaaacactgaatttttaagactgtaggtggactatgttagtagttttcaagcaggatgtctgtattcagcattcaataatgctaaaatccctttcagcatgaaatttgtatgtttttatcctttgctgactaaaataaaataactggtggtttgctaactatttaccatatgggttggctggtttttattaataattgtttagggtatcataagatctgtaagtacaaaggatattctgtttctatctgcaatgcatttgataatcatttctatgaaatgtattttatttaatcagataagctaataagcgaattggttacatcgtttgtatctgttggcctagtggacagctgtgcctggtgcacctctggcttttaataaatactcattggttgaaacaccctgctaacactgtgttttgtcagttcgtaaattcctttaaccaagacttaactatgctttttaactctttttccacctgccatctactactaccaactcacttatacttccttcctcccaagtaatcatttcaaaactaaaaaaggatttaagttcttgggttacaacggtttaaaggaaagaaaatgaactttgaagtcaaaaaaaaaaaaaaaaa

SEQ ID NO: 290676 - DNA, 1000 bp, Homo Sapiens
gggattctggccttcagagaccaggagggagtgtctgggccgcaggtgtggcactgtggtgagagtgtgtgtctttgcacacacagtgcagtgggaacggtggggctggctggtgctgaagacagacacactcctgagccaaggtcttgtcttcaacctccccgtcccgttgtcccattttgctctgtgaaggtgcaaatccctttcttcccttcccatctcaggctctcctgttttccctcagggtccagtatgcctttgagctttagctgttagaaaggaacccccgtgacttgacacagctttcacagctggctgctaggaccggcgggctgggtgttcacgtgtgtctgtgtcatggatgcaatgcaggccctggaggactgtgcgtcacccgtcaaccagagcgtgcctccgggccagcttccctccaaggaatgagtggatttcatacaggatctctttattgcacagactgaatggctttacatgtttctaatgtgaattaggcatgtgaagcagtgggtgtccacccgtgtccctcatgggtgagccctccagctgtgagcccaggcagtgtggtcaccgagtgaggaccctcctcaccaggaaccgcatccctgtgctgcctccacctgagagttgctagggggttcttgtcgagatcatgtcatcagcacccctaagtcaagtcacgggtttccatagccaggcagttggtatgtacaattcagttcagcgtatgaacttgtatctctaatctgatgtccatttttatattttttgaaactgagcacaatgaaatcctttcttgaatcattttccttttggattataaaaatatgggggaaagtgctatgatgagttttatgcaataaatgtatacatgtgtgcacatgcacccaaaaaaaaaaaaaaaaaaaaaaaaaaaaaaaaaaaaaaaaaaaaaaaaaaaaaaaaaaaaaaaaaaaaaaaaaaaaaaaaaaaaaaaaaaaaaaaa

SEQ ID NO: 290677 - DNA, 1000 bp, Homo Sapiens
aaggcccaggggtacaaggtattctccaagttctacctgacgtaccccaccaaaagaaacgaattccattttaacatttattcattcaccttcacctggtggtgatcctcaggagcagagactgttatgaattctggcgtggcttatgaaattaaaagttgccatcaaagccattttcttttaatttcacaaacatcaggcaatttccagggttggtctagagtcttgccactaaatattgatcactcgtttaaggactttccactccattgcaactgatgccactatatttgcctagcaacttgcagctacttccttttcaaagcctcatgtatctcccagacccttctcttgaagtccaataacaagaccaagtaagaatgtttcaacaatgcgttggcaagagatgtgagatgacaacaggaacatacaagatactgtgaatctagatgttctgacccaaagatgtagtctacatagccccagcttggggtccaatccatctgtccctggcatgtgccttcatgtagtaggtgctttcctgatcccctttgcgagatgctgtgggtgctaacacctcagagctgtcctcttctctagagtgaaggttttcagagtgcatcatcagcattacctgtgaacttgctggaaatacaaatcctcaggccccacctcagacctactgaatcagaatctctgggggttggcacagcattctgatttaccaaaccctccaagtgattttgatgtattctaattttgagaccatctctagaaaagaattgctacctcttgtatggaggtacaaaagactgacctcttacatcaaggaacttcctttcccagagctcctcatggaatcaagctgaagtcagtcttcttctgagagcacattcttactcagtttttttcctctgtcctacgctgcttccctcactccccttctcctaagagcactccatcaataaaccacttgcacgagaaaaaaaaaaaaaaaaaa

SEQ ID NO: 290678 - DNA, 1000 bp, Homo Sapiens; identical to SEQ ID NO: 223308

SEQ ID NO: 290679 - DNA, 1000 bp, Homo Sapiens
cttccatgggcgtgactgcgagcgcaaggctggaccctgtgaacaggcaggctccccatgccgcaatggcgggcagtgccaggacgaccagggctttgctctcaacttcacgtgccgctgcttggtgggctttgtgggtgcccgctgtgaggtaaatgtggatgactgcctgatgcggccttgtgctaacggtgccacctgccttgacggcataaaccgcttctcctgcctctgtcctgagggctttgctggacgcttctgcaccatcaacctggatgactgtgccagccgcccatgccagagaggggcccgctgtcgggaccgtgtccacgacttcgactgcctctgccccagtggctatggtggcaagacctgtgagcttgtcttacctgtcccagaccccccaaccacagtggacacccctctagggcccacctcagctgtagtggtacctgccacggggccagccccccacagcgcaggggctggtctgctgcggatctcagtgaaggaggtggtgcggaggcaagaggctgggctaggtgagcctagcttggtggccctggtggtgtttggggccctcactgctgccctggttctggctactgtgttgctgaccctgagggcctggcgccggggtgtctgcccccctggaccctgttgctaccctgccccacactatgctccagcgtgccaggaccaggagtgtcaggttagcatgctgccagcagggctccccctgccacgtgacttgccccctgagcctggaaagaccacagcactgtgatggaggtgggggctttctggcccccttcctcacctcttccacccctcagactggagtggtccgttctcaccacccttcagcttgggtacacacacagaggagacctcagcctcacaccagaaatattatttttttaatacacagaatgtaagatggaattttatcaaataaaactatgaaaatgcaaaaaaaaaaaaaaaaaaaaaaaaaaaa

SEQ ID NO: 290680 - DNA, 876 bp, Homo Sapiens; identical to SEQ ID NO: 223309

SEQ ID NO: 290681 - DNA, 1000 bp, Homo Sapiens; identical to SEQ ID NO: 117974

SEQ ID NO: 290682 - DNA, 1000 bp, Homo Sapiens
cctgggctcttcccaccaggcatcccagccctggtgtggggtatccgcatggttgcaggcatcccctggccaggcctgggtgctcattctccctctctcttcttgtctcctcccctctccctgctttctctgccctgtcctcctcctttttgctgttttcccccggactcctgccatgcccccagactttctttttcccacggatatgggctcattccaaggaaagggtggcatttggacacaaggccctagatcccacgatggaggactggggggtacctgatgcccctcagaaagaggcctgcagggacagcacatgggaaagccccatggctttgtgatccatctggggatgtgatccatttgggtaaggacttgggtttcagggcatgagttggcttccttgcaggatgcaggtccttaggtgggtggcctctgtctccagctgtagggccctgccaggaagcctctatatgagcctacctccctcctgcaggaccagagaggggttgttatgaacagcccaggggattggttgcactaagcttgtcttgaagctttggctggggagtccaggtgcccatgtctctcacctgctccccatacacatctctgcacacctggctgaggcattcccagacctaacctcagataatgtgcatgtgatgaacactcccaagtggctaggcctcttgcacctgagcaggtggattctgccccagcactggggctttctctgggctgtccatcatgggtatatctctggattccaggattgctagttagcacctcacatttgagggtctgtgctattcagtctagaatcagagttggatgagaaatcaactttgaacaccacctttggggtggctgcattggctcacacctgtaatctcagcactttaggaggctgaggcaggaggatagcttgaggccaggagttcgagactaaccggagcaacatagtaaggccacatctgtacaaaaaaaaaaaaaaaaa

SEQ ID NO: 290683 - DNA, 1000 bp, Homo Sapiens
ttctcctagtgcaggaacgttgaatattggcaatgattcctggttccagaaagggctggagcagaagggccaagagggcctgtggaactgctacagaaaaggaagtgttgttctgagcagggggacaggattgatgaggcttgaaagagcccactgagccactctctgaatatgtgaaatgtactctgtgtcttttcctttagagtggggagggggcataatcgtttcggtttctgcattcaactaccttgtaaatggtggtccgttgcagtttcaccaaatgtattgatgtgatttacagtgggaatgaaagaacagattaagcattgataggctttcttttttcccccttttttcttttttctcttttcttctttcttttcctctttttccccaagaggaagaattgcttttctcttaccagtatgatttgtaactctggaacactattcttacagaatgcctttctaacctgaaggatacccagatttctttctttatgtacaagatggaaaatcccctacccctcaaaaacaggttgagtttatgggccagaatattttgtataccagacattggtaagctctcatggtttacaggaaggctctggttccccctcacaggatgagcatgctcagttgggcgtgtgtggaggagctgtgaacttcacgctcttcaaccccagactttgactgtatagttttttgtttttttaactgttccatcaggaaaaaaatgtgtcagttgattttggtgtgacttgtgtaaatggttcatggcaatgacgttgggttgcttcctaggcctggctgagttgtgcctaagggtggctgaaatactaaaacacttatcttacagcaagtgaacaggggctacctgccacatcccctccacagatgcactttaaaaagccactcatgctttggcttaaactgtaattaatttattttatgtacaataaatcgcatttgaaaaagaaaaaaaaaaaaaaaaaaaaaaa

SEQ ID NO: 290684 - DNA, 1000 bp, Homo Sapiens
cacatacctgccacccacctggccagccacagcacgtgtgtcacctgcagagagccacccagacgtccccaccgagcccagcacggcaagggtgcaggggctgccctagaaatggactcagaggagcctggcccaccctcttgaaactggtcctggaccttggctcagctctgccgcctcaggtagcacgacccccaggccagcctggacacatcagggagcatggtgaggggcaacggcaggacccgtgggccatatcgggacaggcatttccagcgaggggtggggcagaggacatgtggctggcaggctacacccaccctgccatgcagcggtgtccaggctctggggaggccctggggaatttggaggcatcatgagccaaggcctggtggccctcgttcccctgcccctcgtcaccatcctgtccttggctggccgtgaggactcccctcctcaccactgggtcccacagggctgaggtgggcagtagagggcataggtgggtacatgtcccgggcaaggtctctcggggggacagaagtgagtccagggagtgggtgggcctgggcgtccctcactcagaatgccgtggggtgaggacggtgaggacagggtgggcactgggttctggtttagagtcagtaatgttagggcgcagtgggcagggggtcaggacatctccagccggtggtgaggaagcatggtggggtctcctccacaggacgggagctggggagggggtcctgggtcggacccaaggcacccacacttgagaaagcctccgcctggacgtcagggaggcctgcgagctgccacagtgcaggtgcagccgttcccaccgccctgctgctgcttgacacgggcataggagatacaagtggtgtgtgcggcggttcatgcctgtaatcccagtactttggaaagccgtggcgggaggaacgctgggcaacatggtgaaaccccgtctctaccccctaaaaatagaaagattagcaag

SEQ ID NO: 290685 - DNA, 1000 bp, Homo Sapiens
cccgaccgatgaaagatgagaccttcggcgagtacagtgacaacgaggagaaggcctttggcagcagccagccatcgctcaacggggacatcaagcccctgggcagtgacgacagcctggccgattatgggggcagcgtggatgttcagttcaacgaggatggttcgttcattggccagtacagtggcaagaaggagaaggaggcggcagggggcaatgacagctcaggggccacttcccccatcaaccctgccgtggccctagaatagtggagtccaggacaggagatgctgtgcccctggccttgggatccaggcccctccctctccagcaggcccatgggaggctggagttggggcagaggagaacttgctgcctcggatccccttcctaccacccggtccccactttattgccaaaacccagctgcaccccttcctgggcacacgctgctctgccccagcttgggcagatctcccacatgccaggggcctttgggtgctgttttgccagcccatttgggcagagaggctgtggtttgggggagaagaagtaggggtggcccgaaagggtctccgaaatgctgtctttcttgctccctgactgggggcagacatggtggggtctcctcaggaccagggttggcaccttccccctcccccagccactccccagccagcctggctgggactgggaacagaactcggtgtccccaccatctgctgtcttttctttgccatctctgctccaaccgggatgggagccgggcaaactggccgcgggggcaggggaggccatctggagagcccagagtccccccactcccagcatcgcactctggcagcaccgcctcttcccgccgcccagcccaccccatggccggctttcaggagctccatacacacgctgccttcggtacccaccacacaacatccaagtggcctccgtcactacctggctgcggggcgggcacacctcctcccactgcccactggccggc

SEQ ID NO: 290686 - DNA, 1000 bp, Homo Sapiens; identical to SEQ ID NO: 117976

SEQ ID NO: 290687 - DNA, 1000 bp, Homo Sapiens
gccgcaatgtccaatttgggcggctcccccaccttcctcaacggctcagctgccaactccccctatgccatagtgccatccagccccaccatggcctcctccacaagcctcccctccaactgcagcagctcctcgggcatcttctccttctcaccagccaacatggtctcagccgtgaaacagaagagtgctttcgcaccagtcgtcagaccccagacctccccacctcccacctgcaccagcaccaacgggaacagcctgcaagcgatatctggcatgattgttcctcctatgtgaaagaattgccttgaagaattgtattaatgaagaggttggattctgctacagagagtaatctgatacaagtcccagagtggaacttttaactcaggcctttttaagaggaatcacaataactgcagatttttaaacaaacaaaatcaccgaccttgcaaatactgaaattggaagagggatctgcaagtgcagggtgttggttaaagttgtacctcccaagtatttgggggatatatttattctgtattgacaaaagcaaatccactttttctttttcttttttttttttaagcttaattctgcaatcatttgtcttttataaaccgtaaagctctatacaagggacactataaataagactccatgttttaatttatgatgtttttaaagctgtgtaaaggaagaatgaagtggtgatatttacaaaaaagtaaaaaaaaaaaaaaagaaaaaaaggaaaaaaaaaaaaaaaaaaaaaaaaaaataggaatgccagttagattttttagaaaaactaagggtcggcttttgcgccttaaagcatatcaaatggtagttagctcagacagtgcattttcaatatctaacttaacatgccaccccttagcagtgcaagcttatttatctcttttgtattgttgtcttaagcaactgtgtaaataaatgcagcctggaaagttaaaacgcgaaaaaaaaaaaaaaa

SEQ ID NO: 290688 - DNA, 1000 bp, Homo Sapiens; identical to SEQ ID NO: 223311

SEQ ID NO: 290689 - DNA, 1000 bp, Homo Sapiens; identical to SEQ ID NO: 223313

SEQ ID NO: 290690 - DNA, 1000 bp, Homo Sapiens
gcttgagtccagcttgggcaacatagcgagaccctatctaaaataacaataatatatggccaggcgggatggctcacgcctgtaatcccagcactttgggaggctgaggcgggcagatcacttgaggccaggagttcaagaccagcccaaccaacatggtgaaaccctgtctccactgaaaatacataaaattagccgggtgcagtggtgaggcctgtaatcccagctactcaggaggctgaggcaggagaatcgcttgcacccaggaggtggaggctgcagtaagtcgagattgtgtcactgcactctagcctgggcgacagaaaaagaaaatttaggtggggaaaaaaatcagaattgcgtctgtgggaacaggaataaaggagaaaccactattgactgggaagacacacaaagaactttgtcaaagttgtatggctgaggcccacacggtggctcacttctgtaatcccatcactttgggaggcttaggcagaaggatcacctgagatcaggagttccagaccagcctggccaacatggcgaaaccccatctctactaaaaatacaaaaattagccgggcgtggtggcttacgcctgtaatcccagcactttgggaggccaaggtgggcggatcacaaggtcaggagttcgagaccagcctggccaatatggtgaaaccccatctctactaaaaatataaaaatcagcaaaaaaaatttagccaggcttggtcatgcatgcctgtaatcctagctactgggaaggctgaggaaggagaattgcttgaacccaggtggtggaggttgcagtgagctgagatcgtgccactgctctccagcctgcatgacgggagtgagacaccatctcaaaaaatacatataataatataaataaaaatatcttttttgaaaataatttaatataccatgtaatttaccagttgaagatgttcgctttcagaatataataaaaatagtcaaaaaaaaaaaaaaaaaa

SEQ ID NO: 290691 - DNA, 1000 bp, Homo Sapiens; identical to SEQ ID NO: 117977

SEQ ID NO: 290692 - DNA, 1000 bp, Homo Sapiens
tggtgctggcccagaggagggacccctccatccactacagcccccagttccacaaggtgaccgtggcaggcatcagcatctactgctatgcgtggctggtgcccctggccctgtggggcttcctgcggtggcgcaagggtgtccaggagcgcatggggccctacaccttcctggagactgtgtgcatctacggctactccctctttgtcttcatccccatggtggtcctgtggctcatccctgtgccttggctgcagtggctctttggggcgctggccctgggcctgtcagccgccgggctggtattcaccctctggcccgtggtccgtgaggacaccaggctggtggccacagtgctgctgtccgtggtcgtgctgctccacgccctcctggccatgggctgtaagttgtacttcttccagtcgctgcctccggagaacgtggctcctcctccccaaatcacatctctgccctcaaacatcgcgctgtcccctaccttgccgcagtccctggccccctcctaggaaggcccgggtcccacaggcaacacctaagtggaccaacccctctgcctgtcctgccccccagacgatgactgaaggctcctttgacaccttgagatgattctgctactttccagacttttcttacaaagcaaacacttttattttctatgcaaaggtgattcagagaatttatataaaggcgggcgaggggcagccgagcagggagctttgggacagggctggggcccccatatcccccccgggccacctgctttccctcctatggctcccctggaacaggagggagagccaagggggcggcccagcctggacagcgcccgctcctgcctgggtgcacacacggcgggcctgagctccagcatctgagtttgggggtatgagaaacaggggagcagaaggagaagaaaactgcctgtgctgcaaaaaaaaaaaaaaaaaaaaaaaaaaaaaaaaaaaaaaaaaaaaaaaaaaaa

SEQ ID NO: 290693 - DNA, 1000 bp, Homo Sapiens
cactgcgtctgtcagcccccggcccccaatccgccagtggcgaactcaggaccacaataccccagcacttctccctaagccctctctgggccgaagctactcctgccctgatctggggccccctggcccaggtacctgcacctggccacctgctccaccccaaccaagccgaccacggccgcggcggcacactgtgggtggtggggaaatggcccgagccccgccaccccctcggccctgtctccggaaagaggtcttccctctcggaggagtgggagcctccccttctctcaccacatcttgctcgtccacggcatccacttccttctccgaaccagcagaacccaggttgggttcaaccaaagggaaggagccaagagcctcaaaggaccaggtgctttcagaacctgagaccaagaccatgggaaaggtttctcgattcagaatacgcagaacaccagcccgtcctcagctaaaccttacaccaatgggactgcctcgaccaatcaggttgaacaagaaggagttcagcttggaagaaatttacaccaacaagaattaccaatcacccacaaccaggaggacctttgagaccatctttgaggaaccccgggagcgcaatgggactctgattttcaccagctcaaggaagctccggcgggctgtggaatttcgggacagcagccttcctcgatcacgaagaccgtcccgtggggtccgggctgcagggggcaggactgttcctcccaatgtggcccccagccctgatgtgggccccctgctccagcagcggctggaggagctagatgccttgctcctggaggaagaaacagtagatcgggagcagccccactggacctaggtgccccatctgttggtcatccatcctgaagggacaggaaacctcccaggcagttatttttttttctctatatttctagtaaagttttcgatatgtttctgaaaaaaaaaaaaaaaaaaaaaaaaaaaaaaaaaaaaa

SEQ ID NO: 290694 - DNA, 1000 bp, Homo Sapiens; identical to SEQ ID NO: 223316

SEQ ID NO: 290695 - DNA, 1000 bp, Homo Sapiens; identical to SEQ ID NO: 117979

SEQ ID NO: 290696 - DNA, 1000 bp, Homo Sapiens
ctggagtctgagccagccgtgcaggtgacggaggtgaccgccacctcagggctggtgagctggggtcccgggcggccagccgacccagtgtggatgttccaaatccagtacaacagcagcgaagatgagaccctcatctaccggattgtcccagcctccagccaccacttcctgctgaagcacctcgtccccggcgctgactatgacctctgcctgctggccttgtcaccggccgctgggccctctgacctcacggccaccaggctgctgggctgtgcccatttctccacgctgccggcctcgcccctgtgccacgccctgcaggcccacgtgctgggcgggaccctgaccgtggccgtggggggtgtgctggtggctgccttactggtcttcactgtggccttgctggttcggggccggggggccggaaatggccgcctccccctcaagctcagccacgtccagtcccagaccaatggaggccccagccccacacccaaggcccacccgccgcggagccccccgccccggccgcagcgcagctgctctctggacctgggagatgccgggtgctacggttatgccaggcgcctgggaggagcttgggcccgacggagccactctgtgcatggggggctgctcggggcagggtgccggggggtaggaggcagcgccgagcggctggaagagagtgtggtgtgatggacgggcagcttcctgtgtgctccaagggatgagcctcgtggggcagagggcccggggccgccgcctggcctgggagtccctccctggtttttattctcagtacctcaggctcccctgtgtacttggaggggcagggagccctttcctcggttctggcctccagaccagggtaagggcaggcccctccaacaggtgctcacagccaccgaggcaggggctgcagccacccactgggagtcttgtttttatttataataaaattgttggggacacctcaaaaaaaaaaaaaaaaaaa

SEQ ID NO: 290697 - DNA, 1000 bp, Homo Sapiens
acaccaattctaaatgtttgaagctttgtttctaaaagtaccttgaaatgatagagatgtaggaaaatatagttgtgggtggagagaggagtgagtttgtttaggtgggaaggtggcatgggatgaagttgtcattactgagcatcttctctgtgtaaataaagggcagtaccattgttaagacagtgggattggcatcatggctttccctcaggaaggtggtggctggtaaattccctgaatgagtctatgatgaacactgaggcagcacagtgggtatttatctctatgaaagtgccttttactcagcctgcacagagccatctctttgcccttccagatgtctgactgggaccttgcttatggatgtgtttttttttttttttttttgagatggagtctcgctctgtcgccaggctggagtgcagtggtgcgacctcagctcactgcaccctctgtgtcccggattcaagcgattctcctgcctcagcctcccgaatagcagggactacaggcatgcgccaccacgcccagctaattttttttggatttttagtagagacgaggtttcaccatattagccaggatggtctccatctcctgacctcctgatccgcccacctcagcctcccaaagtgctgagattacaggcataagccaccgcgcccagccagatgtgtgagcttttaatctctggctgatcttaacccacatcagcctaagcttgggatgattactcttgacccttttttttcagtgattagcaaatctccccacaacccaggtgtggagagaagagaggtagaatggtgctagtttcctattttatttttgtggtaactgtacagcactttaaagttatatactctatgtttaaatatctcccttaaaaagcctgagctgtacaacaatctggatgtgactctgttacccttttcccacaagataggagggaatcccctttgtaaaactatgaatccaaataaatgtttacaaagtg

SEQ ID NO: 290698 - DNA, 1000 bp, Homo Sapiens
cgacctcagtggcttggatgaggtcatcttctcctatgtgcttggggtcctggaggacctgggcccctcgggcccatcagaggagaacttcgatatggaggctttcactgagatgatggaggcctatgtgcctggcttcgcccacatccccaggggcacaataggggacatgatgcagaagctctcagggcagctgagcgatgccaggaacaaagagaacctgcaaccgcagagctctggtgtccaaggtcaggtgcccatctccccagagcccctgcagcggcccgaaatgctcaaagaagagactaggtcttcggctgctgctgctgcagacacccaagatgaggcaactggcgctgaggaggagcttctgccaggggtggatgtactcctggaggtgttccctacctgttcggtggagcaggcccagtgggtgctggccaaagctcggggggacttggaagaagctgtgcagatgctggtagagggaaaggaagaggggcctgcagcctgggagggccccaaccaggacctgcccagacgcctcagaggcccccaaaaggatgagctgaagtccttcatcctgcagaagtacatgatggtggatagcgcatagtatcagaagattcaccggcccatggctcccaaggaggcccccaagaagctgatccgatacatcgacaaccaggtagtgagcaccaaaggggagcgattcaaagatgtgcggaaccctgaggccgaggagatgaaggccacatacatcaacctcaagccagccagaaagtaccgcttccattgaggcactcgccggactctgcccgagccttctaggctcagatcccagagggatgcaggagccctatacccctacacaggggccccctaactcctgtcccccttctctactcctttgctccatagtgttaacctactctcggagctgcctccatgggcacagtaaaggtggcccaaggaaaaaaaaaaaaaaaaaaaaaaaaaa

SEQ ID NO: 290699 - DNA, 1000 bp, Homo Sapiens; identical to SEQ ID NO: 223318

SEQ ID NO: 290700 - DNA, 1000 bp, Homo Sapiens; identical to SEQ ID NO: 223319

SEQ ID NO: 290701 - DNA, 1000 bp, Homo Sapiens; identical to SEQ ID NO: 117981

SEQ ID NO: 290702 - DNA, 1000 bp, Homo Sapiens
gtttttatcaaccaagagaaagaggtcaactaagatatgtggaacaaaaagcaggaattacttttaaacgtgtaggtgttccttctacaatggatttagttaaatctaaaagcatggatgccatcaggtctctggcttccgtttcttatgctgctgttgattttttccgaccatcagctcagagactgatagaagagaaaggtgcagtggatgcattggctgcagctttagcccacatttctggtgcatcaagctttgaaccacgatctttgatcacctctgataaggggtttgtgaccatgactctggaaagcctagaggaaatacaggatgtcagctgtgcttggaaagaacttaacagaaagctgagtagtaatgcagtgtctcagattaccagaatgtgcctcctgaaaggaaatatgggtgtttgctttgatgttcctacaactgagtcagaaaggttacaggcagagtggcatgattccgactggatactctcagtgccagccaaattacctgaaattgaagaatattatgatggaaacacatcttctaattccagacagaggagtggctggtcaagtggtcgatcaggccggtcaggccggtcaggtggtcgatctggcggccggtcaggtagacagagtcgacaaggaagtcgctcaggaagtcgacaagatggtagaagacgaagtgggaatagaaatcgatcaagaagtgggggccacaaacggagttttgactgagtatttgatagttaatctaccagtgtgagcttgcctatttctgcctaatcatgtacattatccaccaaaaattaggtcatcatagttgaggtatgtgtctgctatttgcaaagaagttggtcgtatttttttaaaaagtatttcacaagaatggaacaaatctacttatccagttatacctttgaataaaaaaacctccttttattgtctcttttcaaaaaaaaaaaaaaaaaaaaaaaaaaaaaaaaaaaaaa

SEQ ID NO: 290703 - DNA, 1000 bp, Homo Sapiens
gagagaaagagcaagaatggcctgtatgagattgaaaatggaagaccgagaaatcctgcaggacggactggactggtgggccgggggcttttggggcgatggggcccaaatcacgctgcagatcccattataaccagatggaaaagggatagcagtggaaataaaatcatgcatcctgtttctgggaagcatatcttacaatttgttgcaataaaaaggaaagactgtggagaatgggcaatcccaggggggatggtggatccaggagagaagattagtgccacactgaaaagagaatttggtgaggaagctctcaactccttacagaaaaccagtgctgagaagagagaaatagaggaaaagttgcacaaactcttcagccaagaccacctagtgatatataagggatatgttgatgatcctcgaaacactgataatgcatggatggagacagaagctgtgaactaccatgacgaaacaggtgagataatggataatcttatgctagaagctggagatgatgctggaaaagtgaaatgggtggacatcaatgataaactgaagctttatgccagtcactctcaattcatcaaacttgtggctgagaaacgagatgcacactggagcgaggactctgaagctgactgccatgcgttgtagctgatggtctccgtgtaagccaaaggcccacagaggagcatatactgaaaagaaggcagtatcacagaatttatactataaaaagggcagggtaggccacttggcctatttactttcaaaacaatttgcatttagagtgtttcgcatcagaataacatgagtaagatgaactggaacacaaaattttcagctctttggtcaaaaggaatataagtaatcatattttgtatgtattcgatttaagcatggcttaaattaaatttaaacaactaatgctctttgaagaatcataatcagaataaagataaattcttgatcagctataaaaaaaaaaaaaaaa

SEQ ID NO: 290704 - DNA, 1000 bp, Homo Sapiens; identical to SEQ ID NO: 117982

SEQ ID NO: 290705 - DNA, 1000 bp, Homo Sapiens
ggcggcggccgaggcggcgacggaggaaacagaagatggcagattttttgaaaggactgcctgtctacaacaaaagcaattttagtcgatttcacgcggactccgtgtgcaaagcctcgaaccgacggccctcagtctacctgcctacccgcgagtacccgtctgaacagatcatcgtgacagaaaagacaaacatcctcctgcgctacctgcatcagcaatgggacaaaaagaacgctgccaagaagagagaccaggagcaagtggagctggaaggcgagagctccgcacctccccgcaaggtggcgcggaccgacagcccagacatgcacgaggacacttaagactctcaactccacaggcgcctcctgccaggtctgctcctcggtcgcccacccgcctgcccgccatgtgtaagcaccccgcccgcccgcctccctgccggcccatccacaccctgcgtccacaccacttccaacctcataggagccgatgtatttattttccttgagtttttatttatgctgtaacctgtatcaagcgttggttaaaggggacatcagacccagtagtgtgatgttggtagatgctttttaaaaaaaacaacattgtccccccgacccccgccttccatcgggccagttccccgattcctgcccccagttctccagagaaccagagtgtgtctgtgagagtctctagcgggggctttactgtggccgggtgacaggggcgggcccggggtggcctgacctaccaggacagccgagtggccttctcccccccaacaccggtccaggccattgagactcggtcttgtcccacgcttcgcccggaactttcccatgcccagacctcactcagcgtgcacgcacgttggggagaagtcggcccttgggatctttctcttgagtcattttatttttatcatggactagtgcgtgctccgtgtccacccccaataaaagggtctttcctaaaaaaaaaaaaaaaaaaaaaa

SEQ ID NO: 290706 - DNA, 1000 bp, Homo Sapiens
tgcctacggcagcaacctgctgacagagaggatccacctccgaaacccctcggcggcgttcttctgtgtggcccgcctgcaggattttaagcttgactttggcaattcccaaggcaaaacaagtcaaacttggcatggagggatagccaccatttttcagagtcctggcgatgaagtgtggggagtagtatggaaaatgaacaaaagcaatttaaattctctggatgagcaagaaggggttaaaagtggaatgtatgttgtaatagaagttaaagttgcaactcaagaaggaaaagaaataacctgtcgaagttatctgatgacaaattacgaaagtgctcccccatccccacagtataaaaagattatttgcatgggtgcaaaagaaaatggtttgccgctggagtatcaagagaagttaaaagcaatagaaccaaatgactatacaggaaaggtctcagaagaaattgaagacatcatcaaaaagggggaaacacaaactctttagaacataacagaatatatctaagggtattctatgtgctaatataaaatatttttaacacttgagaacagggatctgggggatctccacgtttgatccgttttcagcagtgctctgaaggagtatcttacttgggtgattccttgtttttagactataaaaagaaactgggataggagttagacaatttaaaaggggtgtatgagggcctgaaatatgtgacaaatgaatgtgagtaccccttctgtgaacactgaaagctattctcttgaattgatcttaagtgtctccttgctctggtaaaagatagatttgtagctcacttgatgatggtgctggtgaattgctctgctctgtctgagatttttaaaaatcagcttaatgagagtaatctgcagacaattgataataacattttgaaaattggaaagatggtatactgtttttagaggaataaacgtatttgtggtttaaaaaaaaaaaaaaaaaaaaaaa

SEQ ID NO: 290707 - DNA, 1000 bp, Homo Sapiens; identical to SEQ ID NO: 223321

SEQ ID NO: 290708 - DNA, 1000 bp, Homo Sapiens; identical to SEQ ID NO: 223322

SEQ ID NO: 290709 - DNA, 1000 bp, Homo Sapiens; identical to SEQ ID NO: 117983

SEQ ID NO: 290710 - DNA, 1000 bp, Homo Sapiens
gcccggaacggggctcgtcgccgccagtagccgcagcaccgcagccttgggcctcgcgccggctatggccgtgccctggggctgagccctcaggttgtgaccgagattcccgacgagagagactgaggggaagagaggaaggaggggcgggctcctggcaaggcattcgctcctgagcggaatcctgcaaagatggagaaggaggagacaacccgggagctgctgctgcccaactggcagggtagtggctcccacgggctgaccatcgcccagagggacgacggcgtctttgtgcaggaggtgacgcagaactcccctgcggcccgcactggggtggtcaaggagggggaccagattgtgggtgccaccatctactttgacaacctgcagtcgggtgaggtgacccagctgctgaacaccatggggcaccacacggtgggcctgaagctgcaccgcaagggggaccgctctcccgagcctggccagacctggacccgtgaagtcttcagctcctgcagctctgaagtggttctgaacacaccacagccatcagcactggaatgcaaagaccagaacaaacagaaggaagccagcagccaagccggggcagtttcagtctccaccccaaatgcaggactgtagaagcggccaggaagaaaaccaccccctcttaaggttgtttttgtgaccgttctttggagcattgttctaaaaatgggaaattacatattgctgtgccaagggcaacaaacacctgcagttaaaggaataccttccgcgaggcggcttttcggagcatgcatgtttatagctccagccaggccagaccgagggctgctgcataagccctgcttggtgcatttctttacttgcaaggggacagagtgtgggcttaggtttgggactagagggggctttggcaactatggtgctcaggtgattatccttcgctcgtttatccaataaacatttatcaagcatcaaaaaaaaaaaaaaaaaa

SEQ ID NO: 290711 - DNA, 1000 bp, Homo Sapiens
accatggagattgagtctacctttcacatgtatgtccagcctgtagtccatccacagcttaccccattctgtacagagctcaccgggattattcaagccatggtggatggtcagccaagcctgcagcaagtgctggagagggtcgatgaatggatggcgaaggaaggcctcttagatccaaacgtcaagtcaatttttgtcacctgtggagactgggacttaaaagtcatgctcccaggccagtgccagtacttgggcttgccagtggcggattacttcaagcagtggattaatctgaaaaaggcttacagcttcgccatgggctgctggcccaagaatggacttctagacatgaacaagggcctcagcctgcaacacataggccggccccacagcggcattgacgactgcaagaacattgccaacatcatgaagacactcgcctatcgaggcttcatcttcaagcagacatcgaagccgttctgattggccgaggacaggatggggcaggacagggtagctgtttggcccagcccagaatcctcctctccctcaccagaggggaagagggagagtggcatagctctgtgtccagagtgtccccagctgccctgtgggctcatgcccttggcgtgggcttgtgcccttgcaagggcttggccacttggcccttctggagcagacactttgtgccccccatccccacccctcaatctcagcccagtatcagcccctcccattgcgggcctgggctagggggacccaggcactcaccgcctcctccctggtacacaggcttctgtggggccaccaagcccctcctgtgccccctcccatccatagtgcatggtgtgtggtgcccccagggctccaggacagatcaggccccaccttgtgtctacccccatccccgctgtgaacgtgccactgaataaagtcggggaaacgaggcactgggtgtgtgtgcaaagccaaaaaaaaaaaaaaaaaaaaaaaaaaa

SEQ ID NO: 290712 - DNA, 1000 bp, Homo Sapiens; identical to SEQ ID NO: 223324

SEQ ID NO: 290713 - DNA, 1000 bp, Homo Sapiens
attatccggctcaccaaagggtacgcttcagttttcaaaggttgtctgacactatatactggccgtgggggtgatctgcagaagattggagaattctgtatggtttattctgaggttcctaacttcagtgagccaaacccagagtacagcacccagcaggcacccaacaaggcggtgcagaacgacagcaacccttcagcttcccagcctaccactggaccctctgctgcctctccagcctctgagaaccagaatgggaatggactgagtgccccaccaggtcccggtggtggcccacatccccctcatactccctcccacccacccagcacccgaatcactcgaagccagcccaaccacacacctgcaggcccgcctggcccttccagcaaccctgttagtaacggcaaagaaacccggaggagcagcaagagatagcatgacattctttcttcctgccaccaaccacatcccaagtgtcccctggagagcaagatagccttccactgattggctggtgtagcagtattttagccactgaacttcagtggagggtggtgagcagtgtccttatccaccctaatctcatactccctcattgtccagctgaactacctgtcccctgggagtcaggaccctctgcctgctctctttcctctttagaaatggcagttactggctgggcgcagtggctcacgcttgtaatcccagcactttgggaagccgaggtgggcggatcacctgaggtcgggagttcaagaccagcctgaccaacatggagaaaccccgtgtctactaaaaatacagaattagccaggcatggtggcgtatgcctgtaatcccagctacttaggaggctgaggcaggagaatctcttgaaaccgggaggcggaggttgaggtgagccgaaattgcaccattgcactccagcctgggcaataagagcgaaactccatctcaaaaaaaaaaaaaaaaaaaaaaaaaaaaaaaaaaaaaaaaa

SEQ ID NO: 290714 - DNA, 1000 bp, Homo Sapiens; identical to SEQ ID NO: 117985

SEQ ID NO: 290715 - DNA, 1000 bp, Homo Sapiens; identical to SEQ ID NO: 117986

SEQ ID NO: 290716 - DNA, 1000 bp, Homo Sapiens; identical to SEQ ID NO: 117987

SEQ ID NO: 290717 - DNA, 1000 bp, Homo Sapiens; identical to SEQ ID NO: 117988

SEQ ID NO: 290718 - DNA, 1000 bp, Homo Sapiens; identical to SEQ ID NO: 223326

SEQ ID NO: 290719 - DNA, 1000 bp, Homo Sapiens; identical to SEQ ID NO: 223327

SEQ ID NO: 290720 - DNA, 1000 bp, Homo Sapiens
tgggaggccaggagttcgagaccagcctggccaacatggtgaaacccggtctctactaaaaattcaaaaattacctaggcgtcatggggcatgcctgtagtcccacctacttgggaggctgaagcaggagaattgctcgaacctgggaggcagaggttgcagtaagctgagatcacgccactgcattccagcctgggcgacagagcaagactccatctcaaaaataaaataaaaaaagaaagaaagaaaagaagaagaaaagagaagaaggagaaggagatgaaggaggaggaggaggagaaggagaagaagaagaagaagaagaccacaaaagacatgactatccaactttttatgacaaactgcaaggaataaaggaagaataagtccatgtactgtaccacagaagttctgtctgcatcttggacctgaacttgatcattatcagcttgataagagactttttgactctatatccttgcagttaagaagaaagcacttttttgtaatgtttgttttaatggttcaaaaaaaatctttcttataaagagcataggtagaattagtgaactctttggatcctttgtacagataaaggttatagatttcttgtgttgaatattaaaaaagcaaggatgtctaaccattaagattatccaaagtcaggctgggcgcagtggctcacgcctgtaatcccagcactttgggagggataggtgggcggatcacctgaggtcaggagtttgagaccagcctggccaacatggcaaaaccccgtctctacaaaaatacaaaagaaattagccagacatgatggcgggtgcctctaatcccagctactggggaggctgaggtgggagaatcgcttgaactcgggaggtggaggttgtagtgaggcgagattgtgccattgcactccaacctgggcgacagagtgagactccatctcaaaaaaaaaaaaaaaaaaaaaaaaaaaaaaaaaaaaaaaaaaaaaaaaaaa

SEQ ID NO: 290721 - DNA, 1000 bp, Homo Sapiens; identical to SEQ ID NO: 117990

SEQ ID NO: 290722 - DNA, 1000 bp, Homo Sapiens; identical to SEQ ID NO: 223328

SEQ ID NO: 290723 - DNA, 1000 bp, Homo Sapiens; identical to SEQ ID NO: 223329

SEQ ID NO: 290724 - DNA, 1000 bp, Homo Sapiens
ctttatttagaaagctggaaaacgtgctattcactcatttcaattattttccacccaaatcattattgaaacttcttcattcatgttcacttaatgaatgccatccagtcaactttctggcaaaaatattcaagcctcttttccttcaacggctgcaaggtaaagaatctcatttggacacattgagtcgggcacaactgacccaacttttcttagcctcagtcctggaatgccctttctataagggtccaaaactccttcctaaatatcaagtgaagtcatttcttaccccatgctgttccctggagacccctgtggattctcagctttatagatatgtgaagattgggctgactaaccttttaggagcaagattatattttgctccaaaagtgttgacaccctattgttatacaatagatgttgaaattaaattagatgaagaaggatttgtattgccatccacagctaatgaagatatccataaaaggatagcactgtgtattgatggtccaaaaaggttttgctccaatagcaaacacttactggggaaagaagctattaaacaaagacacctacagttactcggttatcaagttgttcagatcccctatcatgagattgggatgctaaaatcaagacgtgaattggtggaatatttacaaagaaaactgttttctcaaaacactgttcattggttgcaagaatgaatactgacttcagaactcaaacaatggaagaacttgcatttttatggaactcagtattaaaagaaaaatataatgtgaattagccactttgcagaatatgttctagactggtgatctgaaagcatctgtagttttccttatactatgtatacatttattgtggtaaaatttaaaattaattttaatttaatactagtgtcatagatactttttgtacatcaaacaattgatcatgtgctgtaaaggaattcaatgaataaatgttatttttaagtaaaaaaaaaaaaaaa

SEQ ID NO: 290725 - DNA, 1000 bp, Homo Sapiens
atctgcgccagcaaacatcactgccgttggtctctcatgacttaactggcttccctctgctgctgccttggcttcctcctaatgctcgtgctctcctgtccttctgaagttgctccttggccaaatctccagctcccttcttgttttcctcatcctcctaccctgtactcccaccaaaccatggtcctttaaggcacgctcctgtcctcctcattgcccagcagtagggaggggcaggggtaaggggacctgaggataaagggtggggaaacagggtcccctgaggcctgtgggggctgcaggggaggaggatgtaccttgtgtctctttcaagtgccttaatccgagccagcagggccttctgcttgcctgctgccatactgtatgtaggaaagtgttctgtggctgctttgtgtcaaaagagcagtcactctcagaatcttgattccccatcagccaaagcaaaagatggctgctgctttgtaggcatgtgcctgcaagtgggaccttgctgggcattatatgccctgtgggggtttcagagaccctgaaagaggagggaggacccgcctccttgtctgcacaactgcatgcacttctctccccatcgctccacaacctgaaaccgagaaggagttgctgaccagtgcccaccccggcagcccgggaggaacacaggcagctcctttcccttcacgtggtctgcagagagcagggtgagctgccagctgcccctctccaccagggtaccctgtcttggtggttaggggccacttttcctttgaggctctagtggaggtggatgtccttctctgccaggcttggcacatgatgtgaagaataaatgcccaattcttactgttcaggtttgatgtggaatcacagctgcagtgatatatattttttatcagtgcttggttggttttaaataaagtgcacgctattttattatcttgttctgaataaaatgtatttactccaaaaaaaaaaaaaaaaaaaa

SEQ ID NO: 290726 - DNA, 1000 bp, Homo Sapiens
agaatcgcttgaacctgtgaggcagaggttgcagtgagccaagatcgcgccattgcactccagcctggacaacaagagcaaaactgtctcaaaaaaaaaaaaaaaaaaaaaaaaccattttaattgatctgtgaaaaaacttaagaaaatcacaatttcagctaacagcaattgtgtcccaaagatgaagatactataacctcaaatggtgcagatccagaactgggctggatgacatccctactgtgccatgtcctggggcatttggaagggactggacctctttcccctcatcaaaggaaacagcagtctttgcctctttctgttggttgtgcccaagggctacagtagctctgaaataacaagagctctgtaataacagtaataaatagctctgaaataacagtcctaagaactcctaaagtcctgagaacttttcttgtaatgcagctttttctcttcctgagaaacagtgtgttctaatgggattcccaggcagttcctacacctacggtgtgtgttccagcagggaggagttatgggctgggctgccttttcccatgggtcttcattcccaatggaaagttcactctgcttagtttggaattatttttctttcagttgttctggaacctttgctttttattgatttatacaatacaattggtgggagggtggacttgggatgggagtgggaaaagcatgtaagagctccttttgtgatggtccatctacccaaaagagatctgctttagtgaacgatactctttcatttttctaaattagatcaagttgttattgattttagatgacttgtatgcaaatttgaaaaacttttttttttaaagctgattgggaactacaaacaatgaatggaatctactgacacagctaattggaaaacagatgtcttcttctgtcctattgatgctggtgtttaaaaaacatcacttaaaaaaaaagaataaatagttctaaaagcaaaaaaaaaaaaaaaaaa

SEQ ID NO: 290727 - DNA, 1000 bp, Homo Sapiens
cttcagcccggagcccacgctcgaggacatccgccgcctccatgctgagtttgctgcggaacgagactgggaacagttccatcagcctcggaatctcctcctggccttggttggggaagtgggggagctggcagaactctttcagtggaaaaccgatggggaacctggcccccaaggctggtcccccagggaacgggcagcccttcaagaggagcttagtgacgtcctcatctacctggtggcattagcagcccgctgccgtgtggatctgccgctagcagtgctctccaaaatggacatcaaccggcgacgctacccagcccatctggcccgcagctcttcccgcaagtatacagaattgccccatggggccatctctgaagaccaggctgtggggcctgcggacattccctgtgactccacaggccagacctcaacctagaaagatggccacaggacttgcaactcagggtggtgtctgaagagcagagagtggcctggccctggagcctttttctagtcttttcagaatagatcatgggcctgaggcctccacttcttgaggtctgaggcccagcagcctctagaaggtagcctcctggtgtttgttctcccagtaaaatggttttgggcgataacttctagattattcctggatggccagggaggctctctgtctcagcaggtgatgacgggggtaccaggggtgcctctgagacccattctcgtgtttccctgttgtaccttttgcctgcagggcagagagatctggtttctagcaaattcccagtaggatgtcatgtaagttccttccccctcttagagattgaaggctgtaagagtccagatggtggagccaggctgtctgggttcaaatgccatctttgacacttgcaagctaaatgacattactcaaattaatcgttctgcacttcagcttccttgtctatcaaataaaaagaatagtacctgcccaaaaaaaaaaaaaaaaaaaaaaaaa

SEQ ID NO: 290728 - DNA, 1000 bp, Homo Sapiens; identical to SEQ ID NO: 117991

SEQ ID NO: 290729 - DNA, 1000 bp, Homo Sapiens; identical to SEQ ID NO: 117995

SEQ ID NO: 290730 - DNA, 1000 bp, Homo Sapiens; identical to SEQ ID NO: 223332

SEQ ID NO: 290731 - DNA, 1000 bp, Homo Sapiens; identical to SEQ ID NO: 223333

SEQ ID NO: 290732 - DNA, 1000 bp, Homo Sapiens; identical to SEQ ID NO: 223334

SEQ ID NO: 290733 - DNA, 1000 bp, Homo Sapiens; identical to SEQ ID NO: 223335

SEQ ID NO: 290734 - DNA, 1000 bp, Homo Sapiens; identical to SEQ ID NO: 223336

SEQ ID NO: 290735 - DNA, 1000 bp, Homo Sapiens
tgtggccaccccacagaaccctggttacctgggccctgcgcctgaagaggccattgccacgcagatcctggcctgccggggcttctccggccacaaccttgaatacttgctgcgtctggcagacttcatgcagctctgtgggcctcaggcgcaggacgagcacctggcagccatcgtggacgctgtgggcaccatgttgccctgcttctgccccaccgagcaggctctggcgctggtgtgaggggctgagcccctgcggggagtgctcatgtggacatcagggccagacacccactccagtgcacaagacagacttgcgaccgcttgagcccactgagcagatatggtgggtggctggaggcttctctttctcagtccctgcctgtctgccagcctgcagctctcctgcttgacactgacttactacttgaaactttatttattgcaccatgttggtgtggtgggcaggtggagggcctgccctggacacaggggccctgctgagcagtggccccatcctggaacttgaccagattccccccagtgctgctgctaaccccacaccacccaggcctccacctccccagggagtctccaagagcctcgatcctctgctcactcagcccagccatccatagccctgggaattccacctgccaaggatcccagcaggctggatgagggatagtagggcatgaggagaaggagccctgtaaggactgaggccccggccagcccttctcctccaccagttccccagagcagagctggagctgatgcctggacacagctgctgagcctggcctgggcctcttacccacttggttgttttcttgtccctctgtctgtctgtctatctacttgtctgtctgggccactcctgcctgtgtgttggtctattcctgggaagctcatcactacaggccctggcaaccttcccagtctgtcccatactgttacccataaaactatctctttaaaaaaaaaaaaaaaaaaaaaa

SEQ ID NO: 290736 - DNA, 632 bp, Homo Sapiens; identical to SEQ ID NO: 117997

SEQ ID NO: 290737 - DNA, 1000 bp, Homo Sapiens
aacaggcagattggaaaagctatggttcgatttctcagaagaaatgtttaggtcttagtcaatagttttaactatgccatttgtttaaatgagtgcatttgcttcgagggtagtgtcttactaaaagttaggaacagagacctagtggtgtgtccaaggccgtgtcactttccccttcagcacaccccagcttctgacctcagagcccaggagctgcgtggacagtgtggggtgccaggaggaggggcggtggctggtcctcaggcacgctgcactcccagccagacatggtctttccgtttcttaagtagcaagtgtaggtttcagctggcagttccacctgcatgttctctgcttcgctgccttggaaggggccacattccccattcctcttctccttacagcgcctgcctcctttttcaagcaggcggaaagctgctgtttctcacgtttcagggagaggggtgagcggagggagacctgtgtccgtgccgtccggctccctgggtgggaacaggcaagggatcagatgcccctgacaccacgcctctggccacaccagatgcctctgcagtcctcgacagcctcttcagtgtccctcctgcggtgatgtccttactgtccccagccagggccggggaccggtgtttcactgaggacctgcattagaaacattttttaaattgttgtacaggaagagatgtgtctaaaacagcatcttaaagctgagtgtatttctttgcacaaggggtcatgctgatgaattcttctttcattctgatctttgttcagccaacaggagcgtccttttctaatgtcttccattcctaccccccacccaaaaacaaaagaaatatttgtagcttgctatctgtatttgaatttttagcaattttatatttagatactttgaaaaatgtaaatgactaatttggtcattaaatcttgtgacatattcgatattaaaatgatattaaaataaaagtcatataaatacaca

SEQ ID NO: 290738 - DNA, 1000 bp, Homo Sapiens
ccatggtccaggccaggggccgtgcctgggccgatcagagtgtatacgcgtttgtagcaactgaaggtagccgggagctgaagcgggagctgatcaacgaggcgctggagacgctaatggagcaggcagtggctgctgtgcagaaaatggaccaggccgagtaccaggccaagatccgggatctgcagcaggcagccttgaccaagcgggcggcccaggcagcccagcgggagaaccagcggcagcagttcccagtggagcacgtgcagctactctgcatcaactgcatggtggctgtgggccatggcagcgacctgcggaaggtggagggcacccaccatgtcaatgtgaaccccaacttctcgaactactataatgtctccagggatcctgtggtcatcaacaaagtcttcaaggactggaagcctgggggtgtcatcagctgcaggaactgtggggaggtctggggtctgcagatgatctacaagtcagtgaagctgccagtgctcaaagtccgcagcatgctgctggagacccctcaggggcggatccaggccaaaaagtggtcccgcgtgcccttctccgtgcctgactttgacttcctgcagcattgtgccgagaacttgtcggacctctccctggactgaccacctcattgctgcagtgcccggtttgggctgtagggggcgggagagtctgcagcagactccaggcccctccttcctgaatcatcagctgtgggcatcaggcccaccagccacacaggagtcctgggcaccctggcttaggctcccgcaatgggaaaacaaccggagggccagagcttagtccagacctaccttgtacgcacatagacattttcatatgcactggatggagttagggaaactgaggcaaaagaatttgccatactgtactcagaatcacgacattccttccctaccaaggccacttctattttttgaggctcctcataaaaataaatgaaaaaatgggatag

SEQ ID NO: 290739 - DNA, 1000 bp, Homo Sapiens
ggattttctccacacatttctcctttcactgctgtcaatgacctgggacatctgcttgggagagctggctttaatactctgactgtggacactgatgaaattcaagttaactatcctggaatgtttgaattgatggaagatttacaaggtatgggtgagagtaactgtgcttggaatagaaaagccctgctgcatcgagacacaatgctggcagctgcggcagtgtacagagaaatgtacagaaatgaagatggttcagtacctgctacataccagatctattacatgataggatggaaatatcatgagtcacaggcaagaccagctgaaagaggttccgcaactgtgtcatttggagagctaggaaaaataaacaaccttatgccaccggggaaaaaatcacaataaatatttattcagtgttaatgtcgtccagaattttcatcagaaatggatagctttaacatctaaaattattatattttgaagcaagaagcactctaagctatttactaataggcttttcatataattaggaaaacctaatatcacatctatagtaaccatttcagtttcatattgtttctgttctcataaggatactgctgagtgtctttgcagattcagcctaaaagcaaagaaaatatttccctaaaatatttgcaaataatgttcacatatgtaaatgccttggaaaatattactcatgctgaccttttacacctttttcatttgtcatactgttttctttgccttgaagaggaacagatgaatatgcaccttctccagagttatgtggttttagaatttagaagagcatgtatctttattaaatccctcctcaactctttttttttaaagcatctgaatttaaccttatttcttttttatctccatggtgtgggtgggaccaccatggttttacaccccaccctaccttagggaagaagaaaacattttaaagaataccagaagtagaatcacatgtaacagtctctgc

SEQ ID NO: 290740 - DNA, 1000 bp, Homo Sapiens; identical to SEQ ID NO: 223337

SEQ ID NO: 290741 - DNA, 1000 bp, Homo Sapiens
ccagcttcccttcagggcagggccctgggggaggggtctcacgtcccctggggaagcgccggaggccggagccagagcccctgaggaggaggcagaaggggaaagtggaggagctggggccaccctcagcagtgcgcaatcagcccgagccccaggagcagagggagcgggctcatctgcagagggcactgcaggcctcagtgtctccaccatcccccagccctaaccagagttaccagggcagcagcggctacaacttccggcccacagatgcccgctgcctgcccagcagccccatccggatgtttgcttccttccacccttctgccagcaccgcagggacctctggggacagtggacccccagacaggtcacccctggaacttcacattggtttccccacagacatccctaaaagtgccccccactcgatgactgcctcatcttcctcagtttcatccccatccccaggtcttcctagacgctcagcacccccttctcccctgtgccgtagtttgtctcctgggactgggggaggagtccgaggtggggttggttacctgtcccgaggggaccctgtccgggtccttgctcggagagtacggcctgatggctctgtgcagtacctggttgagtggggaggagggggcatcttctgaacagcctgcctctgcccagctccccattcacacacaccggcactttcataccctgacctctgacctcacctacagctgggatgtacctggagagatagggggtagttctccctactgcccaggctggaatccaagagtggggagtggggaagaggccctcttctctaccctccttcatgattcctgacccctcccatccttcccatttcctttgatgttattttgttacagctttttaaatattttttaaaattatttaacccctgggggcagagactgaggagggaggatgataagggatcccggactctgtatgattgaaataaagagaaataaacaaa

SEQ ID NO: 290742 - DNA, 537 bp, Homo Sapiens
gctcgggtgaggagctggtggcgtcggcaggttcgaggcgattcgaggtgagggggtcaagcggagaggctcggagtcggagaaagctgtcgcgacccagccacccagggtctggggtcggtgggagctccagctaggatgatcgaggttgtttgcaacgaccgtctggggaagaaggtccgcgttaaatgcaacacggatgataccatcggggaccttaagaagctgattgcagcccaaactggtacccgttggaacaagattgtcctgaagaagtggtacacgatttttaaggaccacgtgtctctgggggactatgaaatccacgatgggatgaacctggagctttattatcaatagatgagaatcctcatcttcctgccccgctttcctctcccatcctcatcccccacactgggatagatgcttgtttgtaaagactcaccttaataaagacttagatgttgaaaaaaaaaaaaaaaaaaaaaaaaaaaaaaaaaaaaaataaaaaaaaaaaaaaaaaaaaaaaaaaaaaaa

SEQ ID NO: 290743 - DNA, 1000 bp, Homo Sapiens; identical to SEQ ID NO: 118000

SEQ ID NO: 290744 - DNA, 1000 bp, Homo Sapiens
gtaagcacatctaagggaataacatgatttaaggttgaaatggctttagaatcatttgggtttgagggtgtgttattttgagtcatgaatgtacaagctctgtgaatcagaccagcttaaatacccacacctttttttcgtaggtgggcttttcctatcagagcttggctcataaccaaataaagttttttgaaggccatggcttttcacacagttattttattttatgacgttatctgaaagcagactgttaggagcagtattgagtggctgtcacactttgaggcaactaaaaaggcttcaaacgttttgatcagtttcttttcaggaaacattgtgctctaacagtatgactattctttcccccactcttaaacagtgtgatgtgtgttatcctaggaaatgagagttggcaaacaacttctcattttgaatagagtttgtgtgtacttctccatatttaatttatatgataaaataggtggggagagtctgaaccttaactgtcatgttttgttgttcatctgtggccacaataaagtttacttgtaaaattttagaggccattactccaattatgttgcacgtacactcattgtacaggcgtggagactcattgtatgtataagaatatttctgacagtgagtgacccggagtctctggtgtaccctcttaccagtcagctgcctgcgagcagtcattttttcctaaaggtttacaagtatttagaacttttcagttcagggcaaaatgttcatgaagttattcctcttaaacatggttaggaagctgatgacgttattgattttgtctggattatgtttctggaataattttaccaaaacaagctatttgagttttgacttgacaaggcaaaacatgacagtggattctctttacaaatggaaaaaaaaaatccttattttgtataaaggacttccctttttgtaaactaatcctttttattggtaaaaattgtaaattaaaatgtgcaacttg

SEQ ID NO: 290745 - DNA, 1000 bp, Homo Sapiens; identical to SEQ ID NO: 223338

SEQ ID NO: 290746 - DNA, 1000 bp, Homo Sapiens; identical to SEQ ID NO: 118001

SEQ ID NO: 290747 - DNA, 794 bp, Homo Sapiens; identical to SEQ ID NO: 25295

SEQ ID NO: 290748 - DNA, 1000 bp, Homo Sapiens; identical to SEQ ID NO: 115375

SEQ ID NO: 290749 - DNA, 1000 bp, Homo Sapiens; identical to SEQ ID NO: 223340

SEQ ID NO: 290750 - DNA, 1000 bp, Homo Sapiens; identical to SEQ ID NO: 223341

SEQ ID NO: 290751 - DNA, 1000 bp, Homo Sapiens
gtccatgaaggagcggaatgtggacgatgggcacatcattaacatcaatagcatgtctggccaccgagtgttacccctgtctgtgacccacttctatagtgccaccaagtatgccgtcactgcgctgacagagggactgaggcaagagcttcgggaggcccagacccacatccgagccacgtgcatctctccaggtgtggtggagacacaattcgccttcaaactccacgacaaggaccctgagaaggcagctgccacctatgagcaaatgaagtgtctcaaacccgaggatgtggccgaggctgttatctacgtcctcagcacccccgcacacatccagattggagacatccagatgaggcccacggagcaggtgacctagtgactgtgggagctcctccttccctccccacccttcatggcttgcctcctgcctctggattttaggtgttgatttctggatcacgggataccacttcctgtccacaccccgaccaggggctagaaaatttgtttgagatttttatatcatcttgtcaaattgcttcagttgtaaatgtgaaaaatgggctggggaaaggaggtggtgtccctaattgttttacttgttaacttgttcttgtgcccctgggcacttggcctttgtctgctctcagtgtcttccctttgacatgggaaaggagttgtggccaaaatccccatcttcttgcacctcaacgtctgtggctcagggctggggtggcagagggaggccttcaccttatatctgtgttgttatccagggctccagacttcctcctctgcctgccccactgcaccctctcccccttatctatctccttctcggctccccagcccagtcttggcttcttgtcccctcctggggtcatccctccactctgactctgactatggcagcagaacaccagggcctggcccagtggatttcatggtgatcattaaaaaagaaaaatcgcaaccaaaaaaaaaaaaaaaaaaa

SEQ ID NO: 290752 - DNA, 1000 bp, Homo Sapiens
attctcgcttacaaggatgacttcatgtcagaaagggccgatcgggaacgggctcaaagtaggattcaagaactggaggaaaaggtcgcctctttgctgcaccaggtgtcctggagacaggattctcgagagccagacgccggccggattcacgctgggagcaaaactgccaagtatttggccgccgacgcattagagcttatggtgcctggtggctggaggcctgggactgggtcccagcagccagaaccccctgcagagggcgggcatcctggcgcggtccagagaggccagggggaccttcagtgccctcactgcctgcagtgcttcagtgacgagcaaggggaagagctcctcaggcatgtggccgagtgctgccagtgaccgagactcacccgtgcccttgcggcctcctggcccggtgcagctgccctcagggacagggtgggtgctctcagatgccatgggttgagctctactgagagccaaggcccctagaatagttgcggggcactctgatcgttcactttggtccctttggctatggaacaggctgggtcacagggaactgccagtgaggctggaggctggaggtggagatggggtcaggaacatctggcagagggaggtcccagtctgtgtctccatcaggcttaagccagagctatctggtgctggtgtgccagcccctcccccagcctgcctagaaaggggtggctgcctgagggagtcacttgtatggtccccagggtgggagccccatcctgttctatggaataaagcgtcgcctctctgcctcgaaccagtcaaatggagtattgcggctgcacgtcacactagggtggccacccccgccattgcgagccacatgtctgcactgagaaactgcatttcagtagcatttgtcatccagccggaagttaaagcacacttactttattcacctatttttataataaacgttcttgctgctgtgactgcaaaaaaaaaaaaaaaaaaa

SEQ ID NO: 290753 - DNA, 1000 bp, Homo Sapiens
aactggccgcccagcagcggcaggaggaggcggaggagcagggcgcggggtccccaaggcagccagcccacctggcccggcccatctgcggagcgtccagtggagatgacgatgactccgacgaggacaaggagggcagcagggacggggactggcccagcagcgtggagttctacgcctcgggggtggcctggtctgctttccacagctgaccccgggcctgcagaacatctgtccccaagccagctccactgcccaggcccccaagagggcagctccagaagctgcccagggctccgggaccccatcccatggtggcaggtgcagcggtggggagtggctctttctggactcccagtgcctttttgctggacactgtgtccttatggcttcactgcaggtaatgcctttcccttcaggaagccccagaacacccacaggtcttggtaacaaacgccaccttacactctgcaggctgcagcggcagctccagatggcctcctgagctggacgaccccaggtctccagacatctagggaccagagcaggtttgggaacacagagggaagacaggatgggagtgtagccacagaacccacctgcaccctgacaggcacaccccactgaagagcctgagtcccaggaggcctcctggaagcccaggactgcccacccaccacgctggtgcccaccgccttggccagccaagccctgccgatcagacatgtgggctccccgaagcccagccagagactgccgtgctgtgggtgccaccaggcccagggactgcagcctgagctccccgaggcccagggcagccgggtgaggactctgtcctgtgtcacctctctccaggtgtccagctgtctcatgcctttttgtcctgtcctcagctctccgtgtggtcagcgaaaccattgttttctgttaggactcagttgcaagaacagaaaccctgcccccccttaataataaaaaagaaagtttattggaaaaaaaa

SEQ ID NO: 290754 - DNA, 1000 bp, Homo Sapiens; identical to SEQ ID NO: 118004

SEQ ID NO: 290755 - DNA, 921 bp, Homo Sapiens; identical to SEQ ID NO: 223343

SEQ ID NO: 290756 - DNA, 1000 bp, Homo Sapiens; identical to SEQ ID NO: 223344

SEQ ID NO: 290757 - DNA, 1000 bp, Homo Sapiens
acctgccctgggaagacgtgctgctcccacacgtcctgaaccgggtcccgctgcgccagctgctacggctgcagcgcgttagccgggccttccggtcgctggtgcagcttcacctggccgggctgcgtcgcttcgatgccgcgcaggtgggtccgcagatcccgcgggccgcattggcccggctgctgcgggatgccgaggggctgcaggagctggcactggcgccgtgtcacgaatggctgtcagacgaggacctggtgccggtgctggcgcggaatccgcagctgcggagtgtggcgttgggcggctgcgggcaactgagtcgccgggcgcttggggctttggccgagggctgcccacgcctgcagcgcctgtcgctcgcgcactgtgactgggtggacgggctggcgctgcgcggcctcgctgatcactgcccggccctggaggagctggatctcaccgcctgccgccagctcaaggacgaggccatcgtgtacctggcgcagaggcgcggcgctggtctccgcagcctctctctggccgtcaacgccaacgtgggggacgccgcggttcaagagttggctcggaactgcccagaactccaccaccttgacctcaccggctgcctccgcgtcggaagcgacggtgtcaggacattggccgagtactgccccgtgctgcgttcgctgcgggtgcggcactgccaccatgtggcggagtccagcctgagccgcttgcggaagcgcggcgtggacatcgacgtggagccgccgctgcaccaggccctggtgctgctgcaggatatggcgggcttcgcaccttttgtcaacctgcaggtctgaccgcctgccaatcggagcacagctggactgtgtggctggggcctgacactgagctgtagggaaactgaactgtgaggacctctggtgagaggccagtgccctgccccaccctggagcttcaaataaagagctttttacccccaaaaaaaaaaaaaaaa

SEQ ID NO: 290758 - DNA, 1000 bp, Homo Sapiens
aagacctttgggcaggctgtttctctgaggcggcaccgccagatgcatgaggtccgtgcccctcctggcaccttcgcctgcacagagtgcggtcaggactttgctcaggaagcagggctgcatcaacactacattcggcatgcccggggggagctctgagtgcagcttaagcctctccacggtgacgggtggctctgtggctggtaggactcacccatgatatggggtgcaggaactctgggggccctgaaggatttgcttccctcccctgggaaggcagagggctcttaataaagaggacccagaagattcttatttagagcttcagtctttggagcacacagggccttcgtgagacagtgaaatcagataataatgagatcttttgttaaaaaaaaaaaaaatgggaagggagtgcgggagagaaatggtttgtgtctcccttattcccagttaaatacctagctgcagattgtgccatcacccttcattcttcccagatggatgccatgggctatgggagcaaattgccctggacctttgcctgaatgggggcaggaaaggtgaggtgttgctggcctgtaatgccaccaggtgagttccagatgtggagcaacttgggcttttggggatggggcagcaaagttgggagctggaccccaattgagtgggggtagcaattggagtccttgtgtctcttttccaccccctgccatcctcacttagaggggccatggcactagatggcactagtcccccgataatttatgtctcgttgaaataattttgtatatcattctagtcctgaaatatttttttcatatgtgtaggtgaaatggtatgaataagctaacaggaatagtatctaaaaacagaaaacatccatattaaaatgtctaaacagggaaaaaaaaaaaaaaaaaaaaaaaaaaaaaaaaaaaaaaaaaaaaaaaaaaaaaaaaaaaaaaaaaaaaaaaaaaaaaaaaaaaaaaaaaaaaaa

SEQ ID NO: 290759 - DNA, 1000 bp, Homo Sapiens; identical to SEQ ID NO: 118007

SEQ ID NO: 290760 - DNA, 1000 bp, Homo Sapiens; identical to SEQ ID NO: 223346

SEQ ID NO: 290761 - DNA, 1000 bp, Homo Sapiens
agaggcacaaggagaatttaagggtccatggattcagtcttgctccttgtaattaaactgcaggatggaggaacagcctgagatatgagcatgagcccattttggggtaagcctttggttactttaattactccatggaagacatggaaaatgtccccactgattcttaaacatttggaatcccagtctgcaactattaatctggaggctatatctattttgttttgctttttggttggggggtggtgatctggttcttacacatcttggaagcaagaacaatcaggaccaaagtcactttgatcccacttttccaggagaaaaaccacctgtttggccagtgagaactacttgtatgaaataatttggccaaaccttcagtgtgaccaaatgtgagactgggagtttgtgtttttcacaggaaccctaagtatagacctctgctgctcatcaggaaacttactggagatgaaggccccagctgttgtcaccgggtttggaaagcaccttaactgaatcatgtaagcatcaggacataagcagcactttgtggtcaaatgtggaagccggagacttcaaagcacctctgggacccactggttgaagtttgcaatagaaacttaagttttcccaaatccataaagccttagccctggttctcaatagaatcagggacctagcaggaaatgattttactcaacctaaaatgctggatcccaggcccgtgtagctataagaattctggcctggatcccaggtgtacaactatggacaagatatgggcctctactttctcctctataaaatgaggctggatgaaatgtcagctagggccattttggctgctgaggctctgggatttggtttagttactgaatgttagattttctgcctagaaagataactatctagatacaagtggttggatcctgtttttgtttgtggtacatgtgtctttccaagagagatgtgtcaccaattaaaaaaaaaaaaaaaaaaa

SEQ ID NO: 290762 - DNA, 1000 bp, Homo Sapiens; identical to SEQ ID NO: 223347

SEQ ID NO: 290763 - DNA, 1000 bp, Homo Sapiens; identical to SEQ ID NO: 118008

SEQ ID NO: 290764 - DNA, 1000 bp, Homo Sapiens
agggcttagaggaccggccactaccggtcctgagtctggctccagcgccaccaccagtggccgtggcctcgccgtctctgccgtcgccccccgtgagcctggacccctgcgctcccgcaccagcccccgcctccgccctgcagaagcccaagatctggtccctcgcggagactgccacaagcccggacaacccgcgccgctcgcctcccggcgcgggggggtctccaccgggggcagcggtcgcgccttccgccctgcagctctctccggccgccgccgccgccgccgctcacagactggtctcagcgccgctgggcaagttcccggcttggaccaaccggccgtttccaggcccaccgcccggcccccgcctgcacccgctctccctgctgggctctgcccctccgcacctgctgggacttcccggagccgcgggccacccggctgccgccgccgccttcgctcggccagcggagcccgaaggcggaacagatcgctgtagtgccttggaagtggagaaaaagttactcaagacagctttccagcccgtgcccaggcggccccagaaccatctggacgccgccctggtcttatcggctctctcctcatcctagttctttaaaaaaaacaaaaaaacaaaaaaaactttttttaatcgttgtaataattgtataaaaaaaatcgctctgtatagttacaacttgtaagcatgtccgtgtataaatacctaaaagcaaaactaaacaaagaaagtaagaaaaagaaataaaaccagtcctcctcagccctccccaagtcgcttctgtggcaccccgcattcgctgtgaggtttgtttgtccggttgattttggggggtggagtttcagtgagaataaacgtgtctgcctttgtgtgtgtgtatatatacagagaaatgtacatatgtgtgaaccaaattgtacgagaaagtatctatttttggctaaataaatgagctgctgccactttgactataacccg

SEQ ID NO: 290765 - DNA, 1000 bp, Homo Sapiens
ttcacccaggaggagtgggcattgctggaccctgcccaaaggacactgtacagggacgtgatgctggagaactgcaggaacctggcctcactggggaaccaagttgataaacctaggctgatctcccagctggagcaagaagataaagtgatgacagaagagagaggaattctctcaggtacctgtccagatgtggagaatccatttaaagccaaagggttaactcctaagctgcatgtttttcgaaaagaacaatctagaaatatgaaaatggagaggaatcatcttggagcaacactcaacgaatgtaatcagtgttttaaagtcttcagcacaaaatcttcccttacacggcacaggaagattcatactggagaaagaccctatggctgcagtgaatgtgggaaatcctacagcagtagatcttaccttgctgttcataagagaatccacaatggggagaaaccctatgaatgcaatgactgtgggaaaaccttcagcagcagatcttaccttactgttcataagagaatccacaatggggagaaaccctacgaatgcagtgactgtgggaaaaccttcagcaattcctcatacctcagaccgcacttgagaattcacactggagaaaaaccgtacaaatgtaaccagtgttttcgtgagttccgcactcagtcaatcttcacaaggcacaagagagttcatacgggggagggtcattatgtatgtaatcagtgtggaaaggctttcggcacgaggtcatctctttcttcgcactatagcattcatacaggggagtacccttacgaatgccacgattgtgggagaaccttcaggaggaggtcgaatctgacacagcacataagaactcatactggagaaaaaccctacacatgtaatgagtgtgggaaatcctttaccaatagcttttctcttacaattcacaggagaatacataatggagagaaatcctaaaaaaaaaaaaaaaaaaaaaaaaaaa

SEQ ID NO: 290766 - DNA, 1000 bp, Homo Sapiens
gtataatatctggccatagagtgataagaacaatatgacttagattttctgtatttcatctgccagattatttgaatcacacaggatgatgtgttaacagtattagggtggaagaggaatcaagagtaaagaggtaggggtttactcatttttcttccctgagccaggtgtgacaagccaactctgtcaccattcgtgaggggagagttgcagtcctcttcaagctgttatcataagtacagtagtcagctacttggatatcaagactaagtgctgatatgaagacttgcctttgtgttttgttatgaaacacgcaagcataaagcaggactcaagcacaaggctgactgttctactttgaataacagcttccttgcagtctcctccacatgggtggtactgtgtttagaagggattaccaaaggctggagcgatttaagctatgcactagccttgccctcttaggttgcattctctttaggccactggttctcaaacattagggtgcactgtaaccattacagagcttgtgaaaagtgcagaaacctgagcctcaccttatgagattctgattcagccagggggaggacaggaatctgtatttttcatagcaacctcaagtaatctttattctgagggtctcgggattgcaggttgaaaaacacaaccttaatcagcagtaaattcttctctactcggccaggcgcagtggctcatgcctgtaatcccagcactttgggaggccgaggtgggtggatcacaaggtcaggagttcgagaccagcctgaccaacatggtgaaacgccatctctactaaaaatacaaaaattagccgggcgtggtggtgctcacctgtaatcccagctacccaggaggctgaggcaagagaatcacttgaacccgggaggcagagggtgcagtaagccgagattgcaccactgcactccagcctaggcgacagagcgagactctgtctcaaaaaaaaaaaaaaaaaaaaaaa

SEQ ID NO: 290767 - DNA, 787 bp, Homo Sapiens; identical to SEQ ID NO: 118010

SEQ ID NO: 290768 - DNA, 1000 bp, Homo Sapiens
cttatgtgaggtggggaagggaaaggtatgagggaaagagagtctgagaattaaaatattttagtataagcaattggctgtgatgctcaaatccattgcatcctcttattgaatttgccaatttgtaatttttgcataataaagaaccaaaggtgtaatgttttgttgagaggtggtttagggattttggccctaaccaatacattgaatgtatgatgactatttgggaggacacatttatgtacccagaggcccccactaataagtggtactatggttacttccttgtgtacatttctcttaaaagtgatattatatctgtttgtatgagaaacccagtaaccaataaaatgaccgcatattcctgactaaacgtagtaaggaaaatgcacactttgtttttacttttccgtttcattctaaaggtagttaagatgaaatttatatgaaagcatttttatcacaaaataaaaaaggtttgccaagctcagtggtgttgtattttttattttccaatactgcatccatggcctggcagtgttacctcatgatgtcataatttgctgagagagcaaattttcttttctttctgaatcccacaaagcctagcaccaaacttctttttttcttcctttaattagatcataaataaatgatcctggggaaaaagcatctgtcaaataggaaacatcacaaaactgagcactcttctgtgcactagccatagctggtgacaaacagatggttgctcagggacaaggtgccttccaatggaaatgcgaagtagttgctatagcaagaattgggaactgggatataagtcataatattaattatgctgttatgtaaatgattggtttgtaacattccttaagtgaaatttgtgtagaacttaatatacaggattataaaataatattttgtgtataaatttgttataagttcacattcatacatttatttataaagtcagtgagatatttgaacatgaaaaaaaaaa

SEQ ID NO: 290769 - DNA, 1000 bp, Homo Sapiens; identical to SEQ ID NO: 118013

SEQ ID NO: 290770 - DNA, 1000 bp, Homo Sapiens
tgccatgcttttattagaagcagtgctctgtgttaacaacaagaatggtgtaattagaattgggatgtggatatttactgtatgacaacacatttacagttctgtaatgcaaggatgcagtttaaaaatgtgaagtagtgatggtttttgaaataagctttaaaatatagggatcttgaaggctccctggggtaactattttataacttagataaaatggctagtcatatctgtgtgtttgtaaagttatttttttaatattttaagattacaattttaacaaatgtagaaatgagccaaactatttaaattttaaaacagtaaaacaaaatgaaacttaatagctcacaaaattccagtccatgtttcatgacttattttagtcaatgaattttctatttatactaaacatatggacattttaaatgtgtttctaatatttttgattatctataatgtgcctgtcttcaattcacaagattgggttataacaattatttgccagattaacactagggaattatttgataaccagcttatcttatcagtagttttattgctgatcaggcaaaaatagttttccaaagttatttttaataaagtatatacaaaattcttatatattactagtcatgataaagtaaattaagcagtttttaaaacttagtgtgagtttgttcatcacaggtctgatatgagtttaagggatttcgcactccctgaatcagagaagtaagaccccttccttagattcctgttatacattttttaaaatgtagagtttgttttggagacattttcagtgcattgttattgccatatttatataatatgactattctaaaggctgtgaggccatggggtattggttaagttgcttgcttttgctttgtccattttcatcattttaaaatgggggataataacagaacttgtttcctagggccattgtaagtcacttgaataaaaaatagttttgaagcaaaaaaaaaaaaaaaaa

SEQ ID NO: 290771 - DNA, 1000 bp, Homo Sapiens
gactacaggcgcccaccaccacgcccggctaattttttgtatttttaatagagacggggtttcactgtgttagccaggatggtctcgatctcctgacctcgtgatccgcctgcctcggcctcccaaagtgctgggattacaggcatgacccaccgctcccggccttgttttccgtttaaagtcgtcttcttttaatgtaatcattttgaacatgtgtgaaagttgatcatacgaattggatcaatcttgaaatactcaaccaaaagacagtcgagaagccagggggagaaagaactcagggcacaaaatattggtctgagaatggaattctctgtaagcctagttgctgaaatttcctgctgtaaccagaagccagttttatctaacggctactgaaacacccactgtgttttgctcactcccactcaccgatcaaaacctgctacctccccaagactttactagtgccgataaactttctcaaagagcaaccagtatcacttccctgtttataaaacctctaaccatctctttgttctttgaacatgctgaaaaccacctggtctgcatgtatgcccgaatttgtaattcttttctctcaaatgaaaatttaattttagggattcatttctatattttcacatatgtagtattattatttccttatatgtgtaaggtgaaatttatggtatttgagtgtgcaagaaaatatatttttaaagctttcatttttcccccagtgaatgatttagaattttttatgtaaatatacagaatgttttttcttacttttataaggaagcagctgtctaaaatgcagtggggtttgttttgcaatgttttaaacagagttttagtattgctattaaaagaagttactttgcttttaaagaaacttggctgcttaaaataagcaaaaattggatgcataaagtaatatttacagatgtggggagatgtaataaaacaatattaacttggaaaaaaaaaaaaaaaaaaa

SEQ ID NO: 290772 - DNA, 1000 bp, Homo Sapiens
cctcaagataattttagagttataaaaccagtcctcaattttgggtcttcacagagaatctttcccttgctagaccccagaattttaaatgcatccgtcttacactttcacaaatatttgggttttcctttttcactcacaaacagcagggaggtcatgtactttttgtacaacacctgtgcactatgagaaaatggtaccttttagttattgacaagttaaaatagcactctcagtttttcagtattacagagagcaaatagtttcctctcctgctctgtgcagtagcttttccagaactatggacaaattgatcagaagaagattgattatttcctcatctttttttcttttttttgagacagagtctctctctgtcccccaggctgaagtgcagcggcatgatctcagctcactgcaacctctgcctcccgggttcaagtgattctcctgcctcagcctcctgagtagctgggattacaggcacccaccaccacacctggctaattttttgtatttttagtagagacagggttttaccatgttggtcaggctggtctcaaactcctgacctcaggtgatccacctgcctcggcctcccaaagtgctgggattacaggcgtgagccactgcgcccggcctatttccccacctttcgtgtaaggtgctactgaacatgacagcttcttgtcatgacaggaaacttgcatcagttggatatccttttgagaaactgaattttgcaaagggccaaatttccccaaactgaacgggctcaggaaatgttcctttacactcagaacattctattttaagtatattatttattgttggcagttcctcagggatttcccttttctctgtattggtcagtgtagttgatgtaaaaccgttttgtggatggaaaatatttttattttattgctcttttagtttggtaggttaaataaaggttcttggtaatttgggaaaaaaaaaaaaaaaaaaaaaaaaaaaaaaa

SEQ ID NO: 290773 - DNA, 1000 bp, Homo Sapiens; identical to SEQ ID NO: 223350

SEQ ID NO: 290774 - DNA, 1000 bp, Homo Sapiens
ctaggcttggagaaatgaacaatgctgtgagaaacctccaagaactcttagaattagatagttcatcctcattgtgtgtgctagtaagcactgttggaaaactctgtaggctgattaatgaagatgtgaatgagcaggttatgcaggtattaggacctgaagacctccagagcattatctacaaattggaagaacacgaggaatttttcccagcatttcaggcatttactaatgatctacttgaaatcttagaaattgatgacttggatgccattgtacctgcagtaaagaaattaaaagtactttcatactgaaaacaaatcaaatcatttttactgtgtaaattgtattcttaacattttgtattttgtaggattgatcttattttgagacaagggttgtaaaatgtatttgctctcagaattcatccccttcttagtattaggtcattcttcatctgtataatttttattaactttgagattcttatacagaaaatagttgcaagggtaaggtaattaactttagatcccttcatttctaaagcaattattgagtgcttaaaatttaaggttgttttagagtggagtttgtgagtaaaagaggagcccagggagacagattgcaagtagtaggttgcaatcttttagattcagcttgtaataatctttgagccacaccaaaaggaatgccaagggctctctaaatttagccagtaggaagctactgctctcctggcaaggattaattggcacattctgttaagatatccctcatgacagttgccctttcaaagcaggaggaagaaaaggaagaaagaaaaactgtttcatcatttctgttagggtaggaaatgaatcatagggtaaaatggatgagtagatagaagtctctcatttaaaaagtgtcttttgcaatcttgatgtaatgcactttttataaggacttgagatctcaaataaaatttctgtaaagaatttccaaaaaaaaaaaaaaaaaa

SEQ ID NO: 290775 - DNA, 1000 bp, Homo Sapiens; identical to SEQ ID NO: 223351

SEQ ID NO: 290776 - DNA, 1000 bp, Homo Sapiens
gcccggcgcatcgagatagccaactgcttgcacctgaatgacacgcaagtcaaaatctggttccagaaccgcaggatgaaacagaagaaaagggaacgagaagggcttctggccacggccattcctgtggctcccctccaacttcccctctctggaacaacccccactaagtttatcaagaaccccggcagcccttctcagtcccaagagccttcgtgaggccggtacttggggccgaaaaactgtggcctgcagaagtcccaggcgacccccatccctatctagacttaggagctcagtttgggatggaggtgggagaacaaaaatgaatagggatttcacttgggaaatgaagtactttagttggcttccgagttccagactatatgtccagatattaattgactgtcttgtaagccacttgtttggttatgatttgtgtcttatcagggaaaaggtgcccagctgccagcccagctccgctgctatctttgcctcacttagtcatgtgcaattcgcgttgcagagtggcagaccattagttgctgagttctgtcagcactctgatgtgctcagaagagcacctgcccaaagtttttctggttttaatttaaaggacaaggctacatatattcagctttttgagatgaccaaagctagttagggtctccttgatgtagctaagctgcttcagtgatcttcacatttgcactccagtttttttttctttaaaaaagcggtttctacctctctatgtgcctgagtgatgatacaatcgctgtttagttactagatgaacaaatccacagaatgggtaaagagtagaatctgaactatatcttgacaaatattattcaaacttgaatgtaaatatatacagtatgtatattttttaaaaagatttgcttgcaatgaccttataagtgacatttaatgtcatagcatgtaaagggttttttttgtaataaaaattatagaatctgcaaaaaaaaaaaaaaaa

SEQ ID NO: 290777 - DNA, 1000 bp, Homo Sapiens
cctgggtcagtggcttctccgggggtggcagcgacctgacaggggcccgggaggcccaggagcgaggccgctggagtcccactgagagctcgtcagcctccgtgtcgcctgtggctaaggtctccaaattcacactctcctcagagctggagggcagggactaccccaaggagagggagaggaccggcggaggcccgggcaggcctcctgactggacaccccatgggaccggggcacctgcagagcccacacccacgcacagcccctgcaccccacccgacaccttgccccggccgccccagggacgccgggcagcgcagtcctggagcccccgcttggagtccccgcgtgcaccggccaaccccgagccttctgccaccccgccgctggaccgcagcagctctgtgggctgcctggcagaggcctctgcccgcttcccagcccggacgaggaacctctccggggaatccaggaccaggcaggactcccccaagccctcaggaagtggggagcccagggcacatccacatcagcctgaggacagggttccccccaacgcttagcctctctccaactgcttcagcatctggcttccagtgtccagcaacagacgtttccagccactttcctcgaatcatcccacttcctcagccccatctgtccctccatccaggagctctcacggccccatctgttgtaccttcccatgtatgcagttacctgtgcctttttctacaccttttgttgcttaaaaagaaacaaaacaaatcacatacatacatttaaaaaaaaaacaacaacccacgaggagtctgaggctgtgaatagtttatggttttggggaaaggctgatggtgaagcctcctgaccctccccgctgtggttggcagccacccaccccagaggctggcagagggaaaggggtacactgagggagaaaggaaaaggaaacttcaaacaatatagaattaaatgtaaaaggcagcactcctgtgtacag

SEQ ID NO: 290778 - DNA, 1000 bp, Homo Sapiens
tgctgtgcagtgtcaagggcatatattttatgagagctgcaaagagatccatcagaaccaagagctccttgtgtggtatggagactgctatgagaaatttctggatattcctgtgagccttcaggtcacagagccggggaagcagccatctgggccctctgaagagtctgcagaaggctacagatgtgaaagatgtgggaaggtatttacctacaaatattacagagataagcacctcaagtacaccccctgtgtggacaagggcgataggaaatttccctgttctctctgcaaacgatcctttgagaagcgggaccggcttcggatccacattcttcatgttcatgagaagcaccggcctcacaagtgttctacatgtgggaaatgtttctctcaatcttccagcctaaacaaacacatgcgagtccactctggagacagaccataccagtgtgtgtattgtactaagaggttcacagcctccagcatactccgcacacacatcaggcagcactccggggagaagcccttcaaatgcaagtactgtggtaaatcttttgcatcccatgctgcccatgacagccatgtccggcgttcacacaaggaggatgatggctgctcatgcagcatctgtgggaaaatcttctcagatcaagaaacattctactcccacatgaagtttcatgaagactactagccctgccaggcacaatgactcacgcctgtaatcccagcactttgggaggcagaggtgggtggatcactcaagtccaggagttcgagaccagcctgggcaacatggtgaaatcctgtctctaccaaaaaaatacaaaaatcagctgggggtggtggcacatgcctgtggttccagccactcaggaggtcgaggtggcaggatggtttgagcacaggagacggaggttgctgtgagctgagatcgccccactgcttttcaacctgggtgacagaaccagaccctgtctcaaaaaaaaaaaaaaaa

SEQ ID NO: 290779 - DNA, 1000 bp, Homo Sapiens; identical to SEQ ID NO: 223352

SEQ ID NO: 290780 - DNA, 1000 bp, Homo Sapiens; identical to SEQ ID NO: 223353

SEQ ID NO: 290781 - DNA, 1000 bp, Homo Sapiens; identical to SEQ ID NO: 118014

SEQ ID NO: 290782 - DNA, 1000 bp, Homo Sapiens; identical to SEQ ID NO: 223354

SEQ ID NO: 290783 - DNA, 1000 bp, Homo Sapiens; identical to SEQ ID NO: 118015

SEQ ID NO: 290784 - DNA, 1000 bp, Homo Sapiens
gtcgcctgcatgggtcgtacctggatggtgtgtccaccatcgacacggaggggctggatttgtttctcaggcaatcctgtattttaattttagatgtatttcctgaagcatatttttcatagaatgtagcgtgtaaatagctttttaaataacttcttttttataagagtaaaagtatctttaggaatttctttctatagagttcttcattaacatttatacgagttttttgctgagtcagatggacagttgggttctgatgctttttccttctcctttccttttattattattatttttttcttttaagaactaaggtattgcctgaaaaacaagtgatgtctgtgcagccttacactctgtctttacagaagcaaatagtacacaaaagatctatttcagacacattttgaagatgaatcttcaactttaataccagctctttgttttccttgtatgatgaggggattgggggatacagttattttactagcaccttgtgaagtgtttccgtgttttgtgatgctgtaatttattaatgtttgtagctttttatatttgtacatttcttatgagctttgtttatatacccattacctggatgtttttgtccactgggagaggcagcttggtggaggccttatccactcccacttgtcctgtttggagggacgcagtccctagggcccgagactgggtgggagagggggagtctcacggggccccaggcttattcagaactggtgtttttaaagtttcctttaccctgcccttgttgaacatttatataatctaacctggacatcaagctgttctctctctctcttttttttaattttattattattattttggcaacatgtacatttctaacaaagtttatcgtggctattaaagtgttttatttcccaattcatattactcttgtatcgagtccatgaggtctaaggcaacttagatcaaagttttaaaaaagtaaaaatatttcaggttttgtaca

SEQ ID NO: 290785 - DNA, 735 bp, Homo Sapiens
atggcagcggccgccagccccgcgatccttccgcgcctcgcgattcttccgtacctgctattcgactggtccgggacggggcgggccgacgctcactctctctggtataacttcaccatcattcatttgcccagacatgggcaacagtggtgtgaggtccagagccaggtggatcagaagaattttctctcctatgactgtggcagtgacaaggtcttatctatgggtcacctagaagagcagctgtatgccacagatgcctggggaaaacaactggaaatgctgagagaggtggggcagaggctcagactggaactggctgacactgagctggaggatttcacacccagtggacccctcacgctgcaggtcaggatgtcttgtgagtgtgaagccgatggatacatccgtggatcttggcagttcagcttcgatggacggaagttcctcctctttgactcaaacaacagaaagtggacagtggttcacgctggagccaggcggatgaaagagaagtgggagaaggatagcggactgaccaccttcttcaagatggtctcaatgagagactgcaagagctggcttagggacttcctgatgcacaggaagaagaggctggaacccacagcaccacccaccatggccccaggcttagctcaacccaaagccatagccaccaccctcagtccctggagcttcctcatcatcctctgcttcatcctccctggcatctga

SEQ ID NO: 290786 - DNA, 1000 bp, Homo Sapiens
ccctgcgccagccaggcttggctgaggctgtgtgtgtgaagttcctggaggatgccctggggcagaagctgcccagaaggccccagccagggcctggagagcagctcacagtcttccagttctggagttttgtggaaaccttggacagccccaccatggaggcctacgtgactgagaccgctgaggaggtgctactggtgcggaatctgaactcggatgatcaggctgttgtgctgaaggccctgagattggcgcccgaggggcgtctgcgaagggacgggctgcgggccctcagctccctgctcgtccatggcaacaacaaggtcatggctgctgtcagcacccagctccggagcctgtcactgggccctaccttccgggagagggccctcctgtgcttcctggaccagctggaggatgaggacgtgcagactcgagtggctggctgcctggccctaggctgcatcaaggctcccgagggcattgagcccctggtgtacctctgccaaactgacacagaagctgtgagggaagctgcccggcaaagcctacagcagtgtggagaagagggacagtctgcccatcgacggctggaggagtccctggacgccctgccccgcatctttgggcctggcagcatggccagcacagcattctaaactattcacccatgggttcctggtgcccctttccccccactttcagggctcaccaggcactggcagggagggtaagggctggctccagatacccctcccccacagattcctagcaatgaaaatctaatatattcttctgttgcccctggggttggagagtcagtgcctgcagtcaagtgcctcccagcctcggctcagcacatcccttgccacaaatcagtgtctggggcttggccaccctgccgctgcccagccacatcccttggttttgtattttatttacagagttttacagaaaataaaaaagcaaaatgtctttcctaaaaaaaaaaaaaaaaaaa

SEQ ID NO: 290787 - DNA, 1000 bp, Homo Sapiens
ctttctccaaagaatcctgaaccagattctgatgaacatacaccagtggaggatgaagagccaaagaaaagcactacttcagcttctacttcagaagaagaaaaaaagaagaagtctagccgttcaaaagaaaggtccaagaaaaggagaaagaaaaaatcatcgaaaagaaaacataagaagtattctgaagatagcgacagtgactctgattctgaaacagactccagtgatgaagataacaaaaggagagcaaagaaagccaagaaaaaggaaaagaagaagaaacacagatcgaagaaatataagaaaaagaggtctaagaagagcagaaaagagtccagtgattcaagctctaaagaatcccaagaagagtttctggaaaatccctggaaggatcgaacaaaggctgaagaaccatcagatttaattggcccagaggctccaaaaacacttacctctcaagatgataaacctttgaactatggccatgctctgttacctggtgaaggtgcagctatggctgaatatgtaaaagctggaaaacgtatcccacgaagaggtgaaattggcttgacaagtgaagaaattgcatcatttgaatgctcaggttatgtaatgagtggtagcaggcatcgccgaatggaggctgtgcgactgcgaaaagagaaccagatctacagtgctgatgagaagagagcccttgcatcctttaaccaagaagagagacgaaagagagagaacaagattctggccagttttcgagaaatggtttacagaaagaccaaagggaaggatgacaaataaagattttctgattgtccagaagacatttttaacaacaaaaaagaaagtctgggttccacacatacatagaaaaagattattatgttctgagaaagctttacagtgctactgtgccttctatttaattctttcagtccttcaataaaaagctgcttattgaaaaaaaaaaaaaaaaaaaaaaaaaaaaaaaaaa

SEQ ID NO: 290788 - DNA, 1000 bp, Homo Sapiens; identical to SEQ ID NO: 223357

SEQ ID NO: 290789 - DNA, 1000 bp, Homo Sapiens; identical to SEQ ID NO: 118017

SEQ ID NO: 290790 - DNA, 1000 bp, Homo Sapiens
ttcgaggacctggcgcgggagccgctggcagagatccgcgcactctacgccttcaccggcctgaccctcacgccacagctcgaggcctggatccacaacatcacccacgggtcggggatcggcaagccaatcgaggccttccatacttcgtctaggaatgcgcgcaacgtctcccaggcctggcgccacgcgttgcccttcactaagatcctgcgcgtgcaggaggtgtgcgccggcgcgctgcagctgctgggctaccggcctgtgtactctgcggaccagcagcgtgacctcaccctggatctggtgctgccacgaggcccagaccacttcagctgggcatcgcctgactgagaactctgggccttagagcaggccccgaactgtggtcgccaggcccaggaggcgactgcatggtggagagggagctggggcgcatggggaagcaggtccctactatcaaccgggagtttggggtcctcccctgaagtaggcaaggactgcacgtttctttctctcctgattctcggttttcctttgagtcttctggagctgccttctcatcaggtgcactcttcatggaaagcaactcttgcccctacctcttctgggcgcagggagtaagttactgctaaattaaattaaatgtgtgccaggccgggtgcggtggctcatgcctgtaatcccagcattttgagaggctgaggcgggtggatcacctgaggtcaggagttcgaaaccagcctggccaacatagtgaaaccccctctctactaaaaatgcaaaaattagtccggcgtggtggcacactcctgtaatcccagctacttaggaggctgaggtgggagaatcacttggactccagaggtggaggttgcagtaagctgagatcatgccactgcaccctagcttgggtggcagagcaagactctatcaaaaaaataagtaataaatttgttcaaaagtccgaaaaaaaaaaaaaaaaaaaaaaaaaaaaaaa

SEQ ID NO: 290791 - DNA, 1000 bp, Homo Sapiens; identical to SEQ ID NO: 223358

SEQ ID NO: 290792 - DNA, 1000 bp, Homo Sapiens
accactgcgcctcatggatctactctccaagaagcacccgctggacacactgttcctgctggccgggccagacacggtgctcacgcctgacttcctgaaccgctgccgcatgcatgccatctccggctggcaggccttctttcccatgcatttccaagccttccacccagctgtggccccaccacaagggcctgggcccccagagctgggccgtgacactggccgctttgatcgccaggcagccagcgaggcctgcttctacaactccgactacgtggcagcccgtgggcgcctggcggcagcctcagaacaagaagaggagctgctggagagcctggatgtgtacgagctgttcctccacttctccagtctgcatgtgctgcgggcggtggagccggcgctgctgcagcgctaccgggcccagacgtgcagcgcgaggctcagtgaggacctgtaccaccgctgcctccagagcgtgcttgagggcctcggctcccgaacccagctggccatgctactctttgaacaggagcagggcaacagcacctgaccccaccctgtccccgtgggccgtggcatggccacaccccaccccacttctcccccaaaaccagagccacctgccagcctcgctgggcagggctggccgtagccagaccccaagctggcccactggtcccctctctggctctgtgggtccctgggctctggacaagcactgggggacgtgcccccagagccacccacttctcatcccaaacccagtttccctgccccctgacgctgctgattcgggctgtggcctccacgtatttatgcagtacagtctgcctgacgccagccctgcctctgggccctgggggctgggctgtagaagagttgttggggaaggagggagctgaggagggggcatctcccaacttctcccttttggaccctgccgaagctccctgcctttaataaactggccaagtgtgaaaaaaaaaaaaaaaaaaaaaaa

SEQ ID NO: 290793 - DNA, 1000 bp, Homo Sapiens; identical to SEQ ID NO: 118018

SEQ ID NO: 290794 - DNA, 1000 bp, Homo Sapiens
tcaccgccttttgaattttagttttggcaccaggagtaccgttagctttccccttcttctggcccatttgactcatcagcacaatagggtcaccaccttaacttttaatttctaatctgctttactgtctttagggtgtgtatgaaataaacattgacaggctttctggagccctcaaggtgcctactttgctggttccctttccagcagctcccccacctcccttagccccccctcctctggcagcctctcctgcctctgctgagctcccctccacgtgttccacccccttaccctgctgttgtttacatccaacctgcctgagaatttcctctggggaggaatctattcctgtcatggtctagtgcctgggagggagagaacttcctgggggtagggtgccctccatctgaaacaggccaggtgagcatcatgcataaggcctccattctgtccgctcagattctgggtggggccacaggcaaatctcctgacttatggggagttggcttgtggttcctcccttggatagcctccatggaaccactataggctttcccaacagctgcctctgaaatagctgctgcttcgagatcctccctttttaaagcactttctaaagccctcaggatggcgggagcaaacagcactggtatattctaggagtaagtgcaggaattcagcagtgagagcatgtctgggaccacctggactgccatccatttaacctcaaatctctttgggatactcgccctccctgggaaccagagttctggctctaacattgagcagctatgcactagttccagagaagccactaacaggctgccatgtgtagatgtaggttcttaagagatcacaggctgggtcatctgatcactggatggatagctcagcctggggcatttagtgttttccctggtgataaatccccaaggcagctggatttggagctggtggcaagttgaaattattaaaaattgatttgtgtgggactgtc

SEQ ID NO: 290795 - DNA, 1000 bp, Homo Sapiens
cgtggcgtctcctcccaggagccagatcagtgcgagtgtgactgaaaatgcctcatcacttaagcaccaaagccagtgatcagcagctcttctgttcctgtgtcttctgtttttttctggtgaatcgttgcttgctgtggacttggtggaggactcagaggggaggaaaggctgggccccgagtacaacggatgccttgggtgctgcctccgaagagactctgccgcagcttttcttctttttcctcatgccccgggaaacagtctttcttcagaattgtcaggctgggcaggtcaacttgtgttcctttcccctcacctgcttgcctccttaacgcctgcacgtgtgtgtagaggacaaaagaaagtgaagtcagcacatccgcttctgcccagatggtcggggccccgggcaacagattgaagagagatcatgtgaagggcagttggtcaggcaggcctcctggtttcgccactggccctgatttgaactcctgccacttgggagagctcggggtggtccctggttttccctcctggagaatgaggcgcagaggcctcgcctcctgaaggacgcagtgtggatgccactggcctagtgtcctggcctcacagcttccttgcaaggctgtcacaaggaaaagcagccggctggcaccctgagcatatgccctcttggggctccctcatccagcccgtcgcagctttgacatcttggtgtactcatgtcgcttctccttgtgttaccccctcccagtattaccatttgcccctcacctgcccttggtgagccttttagtgcaagacagatggggctgttttcccccacctctgagtagttggaggtcacatacacagctctttttttattgcccttttctgcctctgaatgttcatctctcgtcctcctttgtgcaggcgaggaaggggtgccctcaggggccgacactagtatgatgcagtgtccagtgtgaacagcaggaattaaacatgttgcaacc

SEQ ID NO: 290796 - DNA, 1000 bp, Homo Sapiens; identical to SEQ ID NO: 223360

SEQ ID NO: 290797 - DNA, 1000 bp, Homo Sapiens; identical to SEQ ID NO: 118019

SEQ ID NO: 290798 - DNA, 1000 bp, Homo Sapiens
atttttgtgccaacatgttgtcagaaattaatgtatgttcatctcctctgttcctgcttatttttacttatatatttcagcagaaggtccgtggccattcacttcaattttgacctctgtcccatagtgaagaacatttaaagtaatactactggtcgaatatgaatgactttttaggaactactttttgtctaacctgaaaaagttccacatttggaagacaatttaatgatggtgaagaaataataaacctcactttacttgttaaaagggatatatatatatatatatatgtctgcaacttcagggagaaataagattgtgtttgaatattgtaggtagatgcatttgtaattaaggataatatcgtttaacaacatgtatttggtttccctcaacttacagacatacagctatttaaaactatggcaatacttaagcatctctaaatttaggtgctaaatatctattattctgttgtagtcattaggtgcccttctctgaagttatgtaaaataaaagcatctgatccttcaaggataaagttgaggatcacatggtacgtggcatttgttgttattgttttttaaagagatggaggctggctctgttggtgcggtgccatgatcatagttcactataacctcgaactcctggctcaagtgatctcccacttcagcctcccgagtatctgggattataagcaagagccactgctcccagctcatggtatttgttgatagtcataacatttttcctgtatggtaagacgtatttttctcagtttataaatacgtagcactcaggttgagacgacttggattttattcttagaaatccagaatcccttgaaaaggaaatattttctgtttcttataaataaaagagtaatcttactttcagaaggattttccttagtgaaacatgtgtaacattgaatgcatgttaaataaaaatggaatttctaactttaaaaaaaaaaaaaaaaaaaaaaaaaaaa

SEQ ID NO: 290799 - DNA, 1000 bp, Homo Sapiens
cttgaggtaaagtacagcctcacatacacagatgcaggtgaagtcaccaaagctgatctctcattcgttctggggacagttagcagcgtagtggtcccactgcagcaaaagtttgaaattcattttcttcaggaaaatacccagccagtccctctcagtggaaaccctggttatgtcgtggggctcccattagctgctggattccagcctcataaggggtctgggattattcagaccacaaatagatatggacagcttactattcttcatagcacaactgagcaagactgcttagcactggagggggtccggaccccagtattatttggttacactatgcaatctggctgtaaactaagactgactggagctctcccgtgtcagctcgtagcacagaaggtgaagagcctgctgtggggccagggcttcccagattacgtggccccttttggaaattcccaggcccaggacatgctggactgggtgcccatccacttcatcacccagtcattcaacaggaaggattcctgccagctcccaggggctttggttatagaagtgaagtggactaaatacggatccctgctgaatccacaggccaaaatagtcaatgtaactgcaaatctaatttcatcctcctttcctgaggccaactcaggaaatgaaaggacgattcttatttccactgcggttacttttgtggatgtgtctgcacctgcagaggcaggcttcagagctccaccagccatcaatgccaggctgccctttaacttcttcttcccgtttgtttgacaatgctcagatgcatcagttccttaatatacacgtgaaatttgaaaactgtacattcggtgagattaaattttatatacaactaaaaaaaaaaaaaaaaaaaaaaaaaaaaaaaaaaaaaaaaaaaaaaaaaaaaaaaaaaaaaaaaaaaaaaaaaaaaaaaaaaaaaaaaaaaaaaaaaaaaaaaaaaaaaaaaaaaaaaaaaaaa

SEQ ID NO: 290800 - DNA, 1000 bp, Homo Sapiens
ctgagcatggggactggcgtcctcagtaggtgtttgggaatatgggaagggtctcctatttattcaatagagttttctcagttattttcctcccttgcccttgcaatctccagcaaaaggtgggatctaggaagaaagaatccagtgtagaagttgagaagaacttgaacgttttggttctggataaggtcactgtcctaggtgctaggtggaccgagcaaaagactcagtggatgaactggtgcagtgcctgacagaataaagaacagtattaatccctttgagaaagcatagtccagcaggacagtggccatttggacagaagcccacttagtttcttgggagcaacagcacgtatcagaagccagacttgctcttcggtcatgcactttgggatacagcgtataggtgcagccctgtcacaacaccaacagaagtagcagcctctgggtgcagtcacccacaccccaaagctggaaggatctggttcaacatagcacaaacccttaggaaaaatgaaattaacatcactgatgtgtaatccagtaaaatctccctttttcgggtgtgtatgtgggcatgtgcccatttctatgtgtgtgtctacgtgcagctcactaccaacagcctcatgtgcacttgacctgacagtgctcgctgagaactctcaccaggttggcgcctgaatgccttactctcagcagtcagaggcttgcttgctctgtgcagatttttaattttcttttttggccctaggctggttgggacctctacagcttcattctttcaccattaaatagtggcctttttcagtattttccctcttcccctttataaattatgctaaagccacaaagcacatttttggggatcatagaaggttggggttccagaaaggcatctgtgtgatggttccattgatgtgggatttccctacttgctgtattctcagtttctaataaaaagaaccaaatgaaatatgaaaaaaaaaaaaaaaaaa

SEQ ID NO: 290801 - DNA, 1000 bp, Homo Sapiens
gtgctgggacaggtacccaaaccagactctgaagccatccctgtactggtggtacctcttggagctgggtttctacctctcactgctaatcaggctgccctttgatgtcaagcgcaaggatttcaaggagcaggtgatacaccacttcgtggcggtcatcctgatgaccttctcctacagtgccaacctgctgcgcattggctctctggtgctgctgttacatgattcctctgactacctgctggaggcctgtaagatggtcaactacatgcagtatcagcaagtgtgcgacgctctcttcctcatcttctcctttgtcttcttctacacccgactggtcctctttcccacccagatcctctacaccacatactacgagtccatcagcaacaggggccccttcttcggctactacttcttcaacgggcttctgatgttgctgcagctgctgcacgtgttctggtcttgcctcattctgcgcatgctctatagcttcatgaagaagggccagatggagaaggacattcgtagtgatgtagaagaatcagactccagtgaggaggtggcggcggcccaggaacctctgcagctaaagaacggggcagctggagggcccaggccagcccccactgatggccctcagagccgggtggccgggcgtctgaccaacaggcacacaacagccacatagccgggtggggctggctgtaaggggttgcccccccgccagtgccttggatatttctggggtggctagactggcgcccctgggccacctttctggagacagggagggccccacccggggtgggtgggaaggctgatgatctgtctccagccccttccttctgcccacccgcccttcttccctctgggcaactggacagatctgggagccagcagctggatgctgtggctggccagagacacctccaggccgtagcctgggggctggggggagccccaggctgaaaagggtccaattaaaacaaatggagcc

SEQ ID NO: 290802 - DNA, 1000 bp, Homo Sapiens; identical to SEQ ID NO: 223362

SEQ ID NO: 290803 - DNA, 1000 bp, Homo Sapiens; identical to SEQ ID NO: 223363

SEQ ID NO: 290804 - DNA, 1000 bp, Homo Sapiens; identical to SEQ ID NO: 223364

SEQ ID NO: 290805 - DNA, 1000 bp, Homo Sapiens
catattcacggagtctacaccaaccctagtggcattgtccttcatccggctggatatcagaacgtgctcaggaacactgaagtcatgagagaaattcagaaactctacgaaaacaagtcatttcttttcctgggctgtggctggactgtggatgacaccactttccaggcccttttcttggaggctgtcaagcataaatctgacctagaacatttcatgctggttcggagaggagacgtagatgagttcaaaaagcttcgagaaaacatgctggacaaggggattaaagtcatctcctatggagatgactatgccgatcttccagaatatttcaagcgactgacatgtgagatctccacaaggggtacatcagcagggatggtgagagaaggtcagctaaatggctcatctgcagcacacagtgaaataagaggctgtagtacatgagcgagctagagaaatcaccaccgtttagaccaagctgtaaggccctactacagacagtgtttaacaagtaaacttacaagaacccaacacaattcccagaaagtaacaatagccagaggttgaagggcggggtagaagaggggggaatgttgcagcgtaatccttcataccacctggttcttgatattctgccgcctgttcaagttcaagaataaaagcgacagcaggacccaaatgcagctcccaacccactccccaggctagacatgcttgtgtccacacagcacaccaatgtgatacttccactgaccggctgcagctctgcatgaaggactcggggtctggatgccatggaatcactgtggctcttgttgcagttttgtactctatacttggtttttcaattaagcttaatggcttttttaaaacatgacttgaagctctagttttctagatcttttacagtgtacagtattttacataactaagctgtattaaaagcttgttcatttaaaaaaaaaaaaaaaaaaaaaaaaaaaaaaaaaaaaaaaaa

SEQ ID NO: 290806 - DNA, 1000 bp, Homo Sapiens; identical to SEQ ID NO: 118020

SEQ ID NO: 290807 - DNA, 1000 bp, Homo Sapiens
catgtgaatacagcatgggaagattgtgttcacagatttttttttccggcacgtccttagagatccgatgtatagatgatgaccaccaggggctgtctgcaatacgaaaaattcctgcttgcctgcctgcctgccaatggccctgaatccagcttaggttacttagttcagcatcaagttcttcttaaatgttgggaatcagttattcaaataaaaattggtattgaggcgaggctgaaatctgccaaaaacagccaacatgatttgactggaccttttacaggaagctagagataaatttctgaagagaactatctgctattatataataatgttttaaattcaaactagtaaattttagtttgtcttcagagtttaaaaggttttcattttgtacataattatacaatatttatcatttgtattttccacttcatttcttttaaaatatctttaatactgaaatgttcttttaattttaaaaagaactgagatattgtcttgtatacttatattggccaaagttttcttttcctccaccatacatgtctatgtgatttaatcagtaaattgtactgtaatgagttgctaagaagacaaatcagaagattggaggaacaaaagatatctttacagatttttcatttgagcatggagtgagaatagaaagaccagtttcaggcttatgcacttacgtggctcatgcactttatgtatatgttccaggaaaatctggcttaaaaatactggtattgtttacatgaagcagtgaaaggtttttgaataactacaaatgtagttctatatgtatataccaaatgaatttctgttctgtgtctctctgttttatgttatgaagccattcgctcatatacaataatctgtcaaggactttaatcatacttgttccaaagagtagtaaccggatggaattctggtatttacaggcattggtgctagatggtacattttatgtgttaaaataaacattgtttttgag

SEQ ID NO: 290808 - DNA, 1000 bp, Homo Sapiens
gcaagatcccccgatcagctttatctgccattgtcaatggcaagccatacaagataacttctacaattgaagaccccagcatttttggccacgtagaagaaatgctgaagcaagcataatgagtttgtcttattcctattttgagttgatttaatttcttaattgaaattaaattatttgagttgtttctcagaaataaatatttcagtagaaattacttgcaaaatgaaatgtgaattgtaaaacttggcctaaacaaatctaatgaaaacatgtgaaagacctgtgccttttttttggtttgaccctgttagcattgttattagttatctataacatggcttattgaatgtcatctactgctttaggaaaaacgtatctagtgtattatttttaaaattgtacctcccaagaagaacactttaattgaaagcaacactaatatagagccacttcctgaaaccaagaatctgtagttttgatccaaaatctaaaacttaaagtcagaaaataattaaaatttttcttgtagaaattttagatattttctagtattctttagatgctcacattgttttaaataaaatagatgaaatgggaagtttaggtaatcatctagacagatgaaattattatctaggtaggagggcttttctatacattttctgagggaaagcagaacaccggggttatagctataccttcaggtcttttgttacttaggcaaggaaaaccacatgtctgacctggttcagcatgtaatccgagcactttgggaggctgaggcaggcggatcacttgaggtcagcagtttgagacgagcctggccaacatggtgaaaccctgtagctactgaaaatacaaaaataagccaggcgtggtggcgggaggctgaggcaaggagaatcacttgaatacaagaggcagaggttgcagtgagccaagttcccccactgtactccagcctgggtgacagagtaagactccatctcaaaacaac

SEQ ID NO: 290809 - DNA, 1000 bp, Homo Sapiens
cacctgtaatcccagcactttgggaggcccagactggcggatcacctgaggtcaggagatcgagatcagcctggccaacatggtgaaaccccttctctactgaaaatacaaaaattagccagacgtgatggcacatacctgtaatccaagctgcccaggagctgaggccggagaatcgcttgaacctgggaggtggaggttgcagtgagccgagatcatgccactgcactccagcctgggcaacagagcaagactccatctcgaaaaaaaggaattcctcttggcagatattgaagtttatttgaaaatttaattcgtccttttttcattgtaatatttcatggtttactatttccttttagtattcatgaaaatggtattttctggttgaataagggtactctagttttatgtagatgatttcagaatgtgaaggctggtttgcctgtcagtcatggaaattcactggtaaaattgttgaatatttctctctcccagtcttaaaagcccacaggcaagaattaatgctttcttaactaagttactttgagtattaacaagtagcttatactgaggtgtgcttcaagggagcattatagggcagaaaacaaattaaaatgaaatgttgttgttatagccatgcattgaccattaaatgcattttaatatctcggcaaaatgagatttgaaactcattagtttaactcttaaaacatagtgttgttaaacagtattttttgggggcgggtggatagctttttgttctatcttgtacagaaaacagtaatggaatcactcatgttcagaaccttgtaaatatgtctgtaatattaatgcttccctttattaagacaaatatacattcaaaaagggagattttatttagacacacattttcttttcaccctaatctatttagattcatacttattgagacgggaaaaactcgctgtaaaataatgccaacctagataatgctataataaattattttgtacac

SEQ ID NO: 290810 - DNA, 1000 bp, Homo Sapiens
ttctaaaccagctgatgctgtcagtgttcaagttttaagtgacttcaaacacaatggaagtgtttcaatgggagccagatctcatgagtaaaaatccattttataatagctctgtgatatatcagtgggagatgattcataggggagagatttgaacaagcagaattaagtgttagcaaaaatgctgcattgctttgattcatgtttaaagacctaaatttctatgcacaaggaataaagggcctacttaccaagtgtaaatcacaacataggctaccaaaatatttcttatttgctaggagaacaaagctgtcacggtgcatgatagctggacagagatggctaaaaaagaggcaaattcagatttggaaacagggtggcctcttcattatttattgccaagatctgaaaatcttcaacatcttataagacaacaatgaagtagcccctgaacagcatggagttgctgtgagtttgttcgttgcagacctttgtgttgggtcctgggaatctaagctttgttccctgtgcatggtggataattgaaaccaagaggacatgggatagaccttgtgacagaccaattctgtgacccctgtcttctgggtcacattattcattgttgatttaaatacaggactaccaaacagtacaaatctatcatgagtctggtagaaaagtaaaagtaaaagctgcacacgttacatactgtttattgttctaatgtacaactaactatttgcatataatgtgatttaatttattgctgttttgtgtagaaaaggagaactaatgactgtggatataacccatgttttgtataatatattttatttcttgtgcgaactggtcatttaaaatatctacttcatttgatgtttggatataaatgtgtatgtgtccttgtaaatgtttctatcaagcaagaatgccacgtactcagagtataacaatgtgttctcattaaaaaatacatcccgaaaaaaaaaaaaaaaaaaaa

SEQ ID NO: 290811 - DNA, 1000 bp, Homo Sapiens; identical to SEQ ID NO: 118022

SEQ ID NO: 290812 - DNA, 1000 bp, Homo Sapiens; identical to SEQ ID NO: 223365

SEQ ID NO: 290813 - DNA, 1000 bp, Homo Sapiens
tggtcccctttgacttgatttaggagctctcagttgcatagaaagatctggtgagcaccttttcatccccagaaaaggagcacgtgaattgagtcgcctggcggctctgtacgcgctcagggaagcttagcttcttggtgcccatctacgtgcactggatgatttttcttttgaacattttgccccactacactgttttggggatagctgggttaagcaagttaaagatatttacatttatattggaattttagcaactttttttcaggttaaatatataatttcaagtgcttttaatgaacttatttttaattggctagggagcaaaaaataagtgagttctgcttttagttagttaaccttgttcttttcttaaatagtacactgcatggtatttaatattccaggaagcatgggattttattttgcttgattttgggcacatgaaataatagctctaggaaaatgcgcatcttaatgactctttgtaaagagaggcatttcttacaactgtgatgtttgcttacataaaagttacctcataagttaattctaacttttattcttgaattttatttcatttcaatagcttgtttcatttgcacgcctttgtattttgattgacctgtagaatggatgttaggaaactcaaaattgaacacagtgaaacaaatggtatttgaagaaatgtaatatcttttatattctatttatgatatccataatcaaatgagattattttaccacataaatgttttaaatatcagatttttagtttgcagttttaggaaaatgctttagatagaaaaggttcttatgcattgaatttggagtactaccaacaatgaatgaatttattttttatattcttacacattttattggtcattgtcacagatagtaaatactaaaaatttcaggtcagtttgttttgaaactgaaattggaaataaatctggaaatgttttgttgcactaaaataataaaatgaattgtactg

SEQ ID NO: 290814 - DNA, 1000 bp, Homo Sapiens
gttcctcggccaccgtggcttggctaggcactcaggaaaggaacaagttttgcatctacaaaaaagaagtggatgataactacaatgaagaccagaagaaaagagagcaaaaccaatgtctaggaccagatataaggaagaagtcagaaaaggtcctctgtaaatatttccacagtcaaaacctgcagaaagcagtgaccacagaaacaattaaaggtcttcagcctggcaaatcttacctgctggatgtttatgtcataggacatggggggcactctgtaaagtatcagagtaaggttgtgaaaactagaaagttctgttagttaccttcttatagagatatattatgtagaactccaggagggacattaaatcactttaagtataaactgactactcccacagttgagagaagttgtgacctgtacttgtactatggaaggaaggatatcaacgtgtgtatattgatgtttatataagtaactcttgaaggagacttgttctagcgtgccccatggtacctagtgtgtgtctgatgccggttggtgtcaaagatagagggcttcttgaaggaacttgccattccttgctttgaccactgcatgaactgcttctaaattattttattacctaaaaatttaaaatatgccattcattgcacacacccacaaatgcaaatcattcctctctatagatgctaggatatatataaattattttataaattcttgttttaaatgtcagtgtttctatgattgtaaactattaaattcttttcctattaaagtacagatctaatctaagtattattaagttgatagccctctagtcagttatattgctattgtaaattcttgtttgttgagtaaaatgtttaaatactatatgtatctcatgtacaaagttgacatacattatattcatgtacataaaattaaagagattagattatatactgttaaaaaaaaaaaaaaaaaaaaaaaaaaaaaaaaaaaaaaaa

SEQ ID NO: 290815 - DNA, 1000 bp, Homo Sapiens; identical to SEQ ID NO: 223366

SEQ ID NO: 290816 - DNA, 1000 bp, Homo Sapiens
ataaaatgatgctagaattttttggaataaaactgactgataaaactggaaatgttgctcgggctgttaactggcaggaaagatttcagcatctgaatgagtcccagcacaactatttaagaatcactcgtattcttaaaagccttggtgagcttggatatgaaagttttaaatctcctcttgtaaaatttattcttcatgaagctcttgtggagaatactattcccaatattaagcagagtgctctagagtattttgtttatacaattagagacagaagagaaaggagaaagctcctgcggttcgcccagaaacactacacgccttcagagaactttatctggggaccgcctcgaaaagaacagtcggagggaagcaaagcccagaaaatgtcttcccctctcgcctccagtcataacagtcaaacttctatgcacaaaaaagccaaggactccaaaaattcctcctcagctgttcatttaaatagcaaaacagctgaagacaaaaaagtggcaccaaaagagcctgtggaagagacagacaggcccagcccagagcccagcaatgaagctgccaagccaagaaatacagagaaggacagtaatgctgagaacatgaattctcaacctgagaaaacagttactactcccacagaaaaaaaggagagtgtatctcctgagaataacgaagaaggtggaaatgataaccaagacaatgaaaatcctggaaatacaaattgccatgatgttgtactagtacagtgaattatcagaaaacccagaagccagtttaggctagagaggaaaaaactactgtatcatttatcctaaagaacagagatgaggtcaatttcaaattttagccatctgtttgtgatttctgtcataagcattttgttgtttgtttttttattttggatgacaatgaattgaatatctaataaggagatttaagataagacccaataaatgaatgtattctgtaaaaaaaaaaaaaaaaa

SEQ ID NO: 290817 - DNA, 1000 bp, Homo Sapiens
ctggctggccctggctcagcaactcagggaccgggagatggaagggaggctgctggagtccctggggcagctttatcggaacctaaataccgccaggtccctcaggaggtcactcacatgcatcaaggagagcctgcgtatcttcattgacctgggggagacagacaaggctgctgaggcctggcttggggcggggcgactccactacctcatgcaggaagacgagctggtggagctgtgcctgcaggcagccatccagacagccctgaagtcagaggagcctttgctggctctcaaactttatgaagaagcaggtgatgtgttcttcaatgggacccgccacaggcatcatgcagtggagtactaccgagctggagctgttcctttagcaaggaggttgaaggcggtgagaactgagctccggattttcaataagctgacagagctgcagattagcctcgaaggctatgagaaggctttggaatttgccaccctggccgccaggctcagcacagtcacaggagatcagaggcaagagctggtggcctttcaccgcctggctacagtgtactactccctgcacatgtatgagatggctgaggactgctacctgaagaccctgtccctctgtccaccatggctgcagagtcccaaggaggccctgtactatgccaaggtgtattatcgcctgggcagactcaccttctgccagctgaaggatgcccatgatgccactgagtacttccttctggccctggcagcagcggtcctgctgggtgatgaggagcttcaggacaccattaggagcaggctggacaacatctgccagagccccctgtggcacagcaggccctccgggtgctcctcagagagggcgcggtggctgagtggtggtggcctggccctctgaggaaagctgtcctgtctctggacatttggcatggccagactctgaccccactgccctaggctcttaaatactcattgggagggtccgagt

SEQ ID NO: 290818 - DNA, 1000 bp, Homo Sapiens; identical to SEQ ID NO: 118024

SEQ ID NO: 290819 - DNA, 1000 bp, Homo Sapiens
ctggaatttaaggggaaagaaattctcagaatacgaagtgaatctaaccaacagataaggttgcatgaacaagatttaaacaagagacttgaaaaagagttggatgtcatgacagcagaccacctcagagagaaaaatatcatgcgggcagattttaataagactaacgagctactcaaggaaataaatgccgctttacaagtgtcattagaagaaatggaagaaaaatatctaatgagagaatcaaaaccagaagatatacagatgattacagaattaaaagccatgcttacagaaagagaccagatcataaagaaactaattgaggataataagttttatcagctggaattagtcaatcgagaaactaacttcaacaaagtgtttaactcaagtcctactgttggtgttattaatccattggctaagcaaaagaagaagaatgataaatcaccaacaaacaggtttgtgagtgttcccaatctaagtgctctggaatctggtggagtgggcaatggacatcctaaccgcctggatcccattcctaattctccagtccacgatattgagttcaacagcagcaaaccacttccacagccagtgccacctaaagggcccaagacatttttgagtcctgctcagagtgaagcttctccagtggcttctccagatccccagcgccaggagtggtttgcccggtacttcacattctgaaagaattgtgttggcacagctctgtatagactgttactaagagcatgactttatacagattgttatgtaaataggctttcctatgtcaaacactgtgaatgagaaagtatttgtctctccaacttgaaaatgcactgtatttcctgtgatatttattggaatcattctataaggtactatattatgtgtgtaattataactgttatttttatttgagatggaagagtctttaacctttgtaattactgcataataaattttgttagaatcaaaaaaaaaaaaaaaa

SEQ ID NO: 290820 - DNA, 1000 bp, Homo Sapiens
ttcaatccagaggcacagtcccctaggctttgcaaggcaatcccccatgcccttaggagcaagcagtttgacttaccagccttcatatggtcaaggtttgagaaccagctccctaagccactcagcatgcccaactcccaaccctctgtctcgacacagtccagcccctttctccaaatcttctacgttctatagaaacagcccagcaagggaattgcatcttcctataagggatggtaatactttggaaatgcatggtgacacctgccaacctggcattttcaactatgccacaaggctgggaaggagaagcaagagtcctcaggccatggcatcacatggttctagaccagggagtcgcctaaagcagccgattgggcagattccactggaatcttctcctccagtcggactttctattgaagaagtggagaggctcaacacacctcgccctagaaacccaagtatctgcagtgcagaccatgggaggtcttcttcagaggaggactgcagaaggccactgtctagaacaaggaatccagcggatggcattccagctccagaatcctcttctgatagtgactcccatgaatctttcacttgctcagaaatggaatatgacagggagaagccaatggtatatacttccagaatgcccaaattatctcaagtcaatgaatctgatgcagatgatgaagataattatggagccagactgaagcctcgaaggtaccacggtcgcagggccgagggaggacctgtgggcacccaggcagcagcaccaggcactgctgacaacacactgcccatgaagctagggcagcaagcagggactttcaactgggacaaccttttgaactggggccctggctttggccattatgtagatgtttttaaagatttggcatctcttccagaaaaagcagcagcaaatgaagaaggcaaagctgggacaactaaaccagtccccaaagatggggaagcagaacagtatgtgtga

SEQ ID NO: 290821 - DNA, 1000 bp, Homo Sapiens
gtatcttgactattaaactacgtatagtgttgctgaaatagaaagaaaacagcattggaattggattcatgtatcgtgggatacaggtgttatttcaggtgatgtacttgcattattttctttagccatagtaactttttgtcacaataactaagtattcaattatatataaagagtgaaacattaaaatgacgcatggatttatatttattataattatgtagtaccctcaaatcattttgtcagttacatcaagaaagcagatttttctttagtcatgaaaaatatctcaagtggtaagttgtttgtgctttaggcaaacattaaccagctctaacaagaaaaatgtctagatttacacattgtcaatacagtatattagttctgcaaatgcacttttgttaaactcaaacatgctctttgtcaagacttggctaaccagtgagcttgtagctctgattatctagcatttttagggtcattctccttaataggcttttatgttaataagatatatttttagaagagcttgtttgggagattagagaataagataaaagaaccaaaaccttaggatatactgtttctgggtctgaaatctctctcattgtttacttctgttcactcagtgaaaacagaaacaagaatgaggtagtggcaatgaaatagaattattagtatattatgaacattataacattttgaacactataatgcattatatattatgaacttttatgaactttatacatgagtaatagcttcctaaagtttataaaacattgtttaggttacataaagattaccaagtaagactcaaaattgcaaatataaacaaaagaaaaatccaactgaaaataacactaagtatttttgagttcctagaatgtccattttggtatttggttacattatcatatttactagtcactatcagcacaattaggttaataaagaagtgggtcattataaaaaaaaaaaaaaaaaaaaaaaaaaaaaa

SEQ ID NO: 290822 - DNA, 1000 bp, Homo Sapiens
aggtgccaccaccaccagactcaggccctggtgtaagaagcggccaagtgcctggacccagaggctttgcaggacagtgttctcaggagctgggcctgaggcttaggagagctgccttcgctgcaggaaatcagggattatcccttaacagaagtgtctggagtagttttcaggtataggaatgagatgcctcgtggtgaaaggatctcaccctgggaagatgtggtgccccctccagggctctggaggatggatgcctcccccaggggctctccaagctgggcatttgggcctggtggatgccaacctggataacctgtggcccagcattgactgtccacccagccttgctgttaggcaccatgactccaagatgaagatgtggtccctgcccttgagtgacagcccagggacttaatgtggccatcgggcatcaagcacaaggccatgcaggtgatgatacgtcggaatagaggcaccagccctggtaactgcatcttctccccttgccaccccatggccccggctgaaagcttcggccctcctctgctgtcactcaatgatggggagccctaccccagaagtgtatcccacgagggcatcagggacgcagtgagtgttgctcaagggagtcaggaagagacggcaacgtaaaggatgtggctccatgtccatggtgccccctggtcaacataaggagcgtgggatccgatggaaaggtggagctcagggaaaatgggggtccttgcctctcgtgtaccccctcaaggctgaccccttagatggcccaggaatggcaggtgctacaaaaatggtacccacgtgggcatggaaatggggcagattaggggaccactggactcagaggggagggaagggctcatcagcacccgctcagggagcctgtccctttatgttcccaaataaagggtcctagaagactagaaagccaaggtcttttattaaaggtcccgactggtaaaaaaaaaaaaaaaaaaaa

SEQ ID NO: 290823 - DNA, 1000 bp, Homo Sapiens
cctcttccacacccacttctatgacaggctacaggacgcgggctctcgctggcccgagctctacctctactcgagggctgacgaagtagtcctggccagagacatagaacgcatggtggaggcacgcctggcacgccgggtcctggcgcgttctgtggatttcgtgtcatctgcacacgtcagccacctccgtgactaccctacttactacacaagcctctgtgtcgacttcatgcgcaactgcgtccgctgctgaggccattgctccatctcacctctgctccagaaataaatgcctgacacctccccacaacctgcaatctgtcgggcactcttctcgttcaactccctgtagccctttgggactttgcggtcccctaagtagaaaattcctatgggcctgtctcctgggggcctctgtctgctggtggtctgcttaccacagaatcctaaggggcaggagtgcctgggcatgtgtctgtgggagccttgcagtcagttgtgtttggacaagtgcaacagtcaggctgctgattcctgtggcatgcaggctgtagaggttgacaaatggaggggggtgttgagggtgagccctagttgattttttaaaatttaaactctggtaagaacatttaatatgagacctactctctttttttctttacttatttatttatctatttatttcaagacagggtctcactctgtcacctaggctggggtgcaatggtgcaatcatggctcactgcagcctcaacctcccaggctcaagtgatcctcccacctcagcctcccaaagtgctaggattacaggcatgagtcaccgcgcctggccaagatcacctaacaaaattgtaagtgtgtacgatacttaaaatttaagagattatgtgcacggcagacctctagaactgaatagtcttgcatcttgcataattcagaacttcatcatcttgcataactgaaactttgtgcctgttaccagaaaaaaaaaaaaaaa

SEQ ID NO: 290824 - DNA, 1000 bp, Homo Sapiens; identical to SEQ ID NO: 118026

SEQ ID NO: 290825 - DNA, 1000 bp, Homo Sapiens; identical to SEQ ID NO: 223367

SEQ ID NO: 290826 - DNA, 1000 bp, Homo Sapiens; identical to SEQ ID NO: 118027

SEQ ID NO: 290827 - DNA, 1000 bp, Homo Sapiens
gtttgaggagccagaaatagaggtgcagttagaggacggtcactttttccaacaaaacccactccatagccatgtggatttttatccaaaggctcaacaaccagagggaatggtgagacctgataactaaaatactgttattggcaagggtttgaaatgtgtaagaacctaggagggaaaggaagattgagcaacataggaaaaggggaagagaggctgagtgtcaccaaggtccaaactccatttataaaaatactgcaaaaccaggagttgatggtagaaatgcatatgatccatggcaggagtaaatctctccacctcctctaactctctgaaaactctagagttggagcaagtcttccatttgcttcttatccccttaaaagaatgccttccacttcccaacagcccccatcaagggaccccaagaggccaccatgctcttatctcgcactttctttcctattccccttgcctgaatctggagtggggttgagccctctgccttcaaccttaagatttaggaagttctttccccaactgtctaacttggaaaggtagatgagtctgaattttgaagtaacgaatgcaaattccactcagcagaggcaatgttatttatgtacatagggatagtggaatgagttttaatagattctgtccaaaaggggtttgttcctcttatttcctctatgtaggaagttgtgtcttaggcaactttatcagtatcaatggaaaaatgataggcactacaatgaaatggcaggatgccaatatgagatatttcaggaataataagaaatacagtttgtttgtataaaataaactatctcaagaaagttttcaacgacagtgatagtgttcatttgtaagagagagttctagaacttcgatgtccagtgcagtagccactacccatatgtagctgttgagcatttgaaatatggttagtccaaattgagatgtgctctaaaggacaataaaaggttaaatatctcct

SEQ ID NO: 290828 - DNA, 1000 bp, Homo Sapiens
agcagcagtttagcaaaatatgccttcagtggcattcaacaaatggagtttccccaagcacagttctgtaagaagtgcgtgtgagagtgtgtgtatatgtgtgtatgtgtattttaagttattatttgtattgtgcaaaaattttttttttgatcttggggattctggctgtgaatttggtgcacgacaattatggtaaaaaaacatttgcttggtctaaagaagatcattaatgttttgtgaccatacaagttgtaacagtggattgtttttatgtgtaggtattgttaaatacagggactgtttccaggcacagaatatgaatcgtaagttaggatggacattagatgtgattatgatgataaagcgaaggtctgcggtcctgtatctacagacacgtggtgagaaattagaacaaactggagacgggccattgacacatggactctgcctgggcatgttaggttaattctttgactccaagccttaaaatactcacatggagtcagcgctcacctcattcacacaattatcatagagctccctggacactgaacctctaaagggaaaaggtctaccctggagccaggagcatcagggttggcttgggagcatgagaggtgagcccagggctaggcctgggccaggccccggcagcactgctacttgggaggagccacttcacctttgtattagttattaaaaaatataatttgggctgggcgcagtggctcacgcctgtaatcccagcactttgggagtccgaggcatgcggatcacttgaggtcaggagttcgagaccaccctggccaatatggtgaaaccccatctctactaaaaatacaacaaagttagccgggcgtggtggcaggcgtctgtaatcccagctgcttgggaggctgaggcagtagaatcacttgaaccctggaggtggcggttgcagtgagcacagatcatgccactgcactccagcctgggcaacaaaacgagacttcgtctc

SEQ ID NO: 290829 - DNA, 1000 bp, Homo Sapiens
ttacccggaggatacagtggaagtgttaaaaatagaccaacaaggcatgatgttttagatgactcatgtgacggctttaaggacctcatcaaacctcatgaggaattgaagaaaagtgggagaggcaaaaagccaacaagaacattagtcatgacaagcatgccatctgaaaagcagaatgtcgtcatccaggttgtggataaattgaaaggcttttcaattgcaccagacgtctgtgagaccacgactcacgtgctttccgggaagccacttcgcaccctgaatgtgctgctgggaattgcgcgtggctgctgggttctctcttatgattgggtgctatggtctttagaattgggtcactggatttctgaggagccgttcgaactgtctcaccacttccctgcagctcccctgtgccgaagtgagtgccacttgtctgcagggccgtaccgcggaaccctctttgccgaccagccagtgatgtttgtctcgcctgccagcagccccccagtggccaagctctgtgaactagtccacctgtgcggaggccgggtcagccaagtcccccgccaggccagcatcgtcatcgggccctacagcggaaagaagaaagcaacagtcaagtatctgtctgagaaatgggtcttagattccatcacccagcacaaggtctgtgcccctgaaaactacctattgtcacaatgacagtgacctcactggcctgtggtgactgcacacagctcgcaaaactgtctttggatgttcaaatgagaaacaaaactgtgaagagaaggaactggcgtatacaagatgacttctgatatcatgtttgccatgtgttgtggttcttaagaactcataggtgactttctgatgactgaatgtctgtttcagagacgcttcgggcctttttatttttattttattttttattttttgagacggagtccagcctgggcaacagagtaactctccttctcaaataaataaataaataaat

SEQ ID NO: 290830 - DNA, 1000 bp, Homo Sapiens
cttcctctcctctctcttcccttcctgtctctcttcccctcctctctctcttcctgtcctctatctcttcccctcctctatctcttcctctcctctctctcttcctctcctctctctctcttgctttcttctctctctcctgtctcggctgttgtgggttgcaggttgggtgctgctgttgtggtccttcccagaaactgccagtagagggcagcctgggcatcctaatgcttactctggttgttacacaaagaaaatattggggtcactggcgagcccacccacactcaccagaatctccactgtagtccccctaacaaacagcccttcacttcctctcccacttcagcaatttgtattttgatgccattggcctcagatcagagtgttttaaatcatcacgccctggcttatccctggtcgagccaggacacggggtgcttcagtgggtctgtcaccctctctccttgaagcatgttgcttttatttatttacttttactctcaccctgctcctgtaccagcaggggccacttcaaagccaaggtacagggtgataacttgtggtccagcatcagttttctccacttctttctcccactcacccccagcaaggtgcctggggagacttgagcagatgtttcattttggcctggccagtggctgaaagccaggcctccaatgcactgtgacctctggcttccccagcagctttcccagagaggcagaggggccttccacagcccgggttctcctgctgcctcctgcctgctgcagctgcaggcattctgaggggcaacgtggaggaagggccagggatgcatgggattttaattgtttcatcacaccttccccgtggcaaagaaacagtcagtcctcttcaggtgtcttctggatttctggtgatggacagagaaatctttttacagtttcaaattatgttcaacaaataaaaattgcattttttattttggaaaaaaaaaaaaaaaaaaaaaaaaaaa

SEQ ID NO: 290831 - DNA, 1000 bp, Homo Sapiens; identical to SEQ ID NO: 118028

SEQ ID NO: 290832 - DNA, 1000 bp, Homo Sapiens; identical to SEQ ID NO: 223370

SEQ ID NO: 290833 - DNA, 1000 bp, Homo Sapiens
caaagacaaaatgtggtaaaacccattgataatccaccgcatcctggatcaactaaaccactcaagaaggttattattgaagaaactggtaatttgatacagactattgatgtgccagatagcactactgctgctgctccagagaataatcctattaatctagcaaatgtaatagcagccacaggcaccacaagtaagaagaattcaagccaagatgtcctttttcccacaagtgatactccaagagcaaaagtattgaaaatagaagaagtcagtgatacttcatccctgcaacctcaagccagtttgaagcaggatgtatgtcagtcttacagcgagaaaatgcccatagagatagaacaaaaacctgctcagtttgccacaactgttcttcctccaattcctgcaaactcgttccagctcgaatctgatttcagacaattgaaaagttctccagatatgttgtatcagtatttaaagcaaattgaaccatctttgtatcctaagttgtttcagaaaaatctggatccagatgtattcaaccagatcgttaaaattctgcatgacttttacattgagaaagaaaagccattactcatctttgaaatcttacaaagactttctgaactaaaaaggtttgatatggcagtgatgtttatgtcagaaacagagaaaaagattgcacgtgcattatttaatcacatagacaagtcaggattgaaggatagttctgtcgaagaactcaagaaaagatacggtggttgatttccatttttgctgaaataattgtttttgactttcatatgtaaattttttctactgaaagtgttttgctttttaagaaaatgaaattatatagcaggaaaggactatctttgaacataagttaattaactataaggtgaattgtgatttaactagtgagaattgtattcaagtgaactctgtttttctgaaaataaaaatataaacaatgagaaaaaaaaaaaaaaaaaaaaaa

SEQ ID NO: 290834 - DNA, 1000 bp, Homo Sapiens
tctccaaccacaacaagctccaactcagctgtgacacctctttcacccgggtcgtcccctttccccttttctcctcctgctactgtagcggacaagccacctgaaagcatccgcagtcggaaggctcgagccgtgtatccgtgtgaagcagaacacagctcggaattatcttttgaaataggagcaatttttgaggatgtacaaacctccagggaacctggctggctagaagggactctgaacggcaagagggggctgattccacagaactacgtcaagctgctgtagctcctggcctcagagcccctgctgaccctggcacccagggacctgcctgggggcagagagctgtcttcctcctccgaggctctgggctgcacccacaggtacctccacacttgggagttaccatcatcacagtcagccctgggggtggggggtggtgggcagggatgggacgcaccacacagaactgtgattgtggatcaggaggggaatgtcaggattcgcaaaatggacttttcatttgtcaagtattgggacttgtgatttttaattatccagcatatagaatgagagggagggcagccttctgccacctgtgtcgcctccactggcagtcacgccaccagagccaccctggctccctctcctccctgagcacctgctgctgcgattttaaagggaactgtactactcgcagtgataggtttgcagagtgtgtgcttggctgtggcagcctagcttggagaagctgctgttggtgcaagggagatggtctcaagtcagagggaagcagagacgcgcgtctcaagcctgcccttcctagacggccacctgcaggaccccacactcactgcactggcagcgtgcactggcgtatttgtaacaggcttctcggtgctcctcacccgtgtgctgttttccaaacaccacctttttgcctcaaggtctctgtaaatgaaataaactgtaatttactaaaaaaaaaaaaaaaaaa

SEQ ID NO: 290835 - DNA, 1000 bp, Homo Sapiens
agtgagccgagatcacgtcactgcatttcagcctgagcgacagagtgaaactgtctcaaaaaagagagacttccgggacagtcattatcagataggccccaaacctgtgatttttcttgggcaagattggtgtttacttaggggtgttttaaaaatatatttttacaagtatacttgtaggaagttggttttttattttctatttttgtttgtttttggagtttggttaaacgactcttttattttctgttttgccttatcttactaaagtgaagttttcctaaggcaagcaagaagaggagtggaagcacagttgcctggatttggaggcagagttgtcaggcttttcaagctaagagtcttgtgcttggattttccagattaatttgaaaagacctcccatttgtggctttgtacataaccaacaggcagatactgagtgccttggctcctagagttttgtggttgggttaggttgtttttgttgttgttttgttttggttttgttttcatttctgaagtttaagatgccttgactttttaaatgctcttaaggctattcgatgtaattcttactcctaaaactggctgttcttagcctgaaatctaatgctttgttttttgtacctctcccaggtgggtaacactctaggatgacatgatgttataattttaggggaaatcacatttttaccttatgctgttactgggcagaaccacgttttatgtaaacataccagacatcgggtaacagacagtactttaaatgttataaatttggtgatcagaactattaatagcataaatcgaactcaaatggaagcaaaactgatttcatgcaggtcctgaattttactttgccttaagaagtgccctccccacaatgcaggagaggcacagagtgcactgtcattgacatgttacccgactaaggatcactctgttcataagaaaaaggcctgaagtgactctgtttaataaagtcagtttaattttatct

SEQ ID NO: 290836 - DNA, 1000 bp, Homo Sapiens; identical to SEQ ID NO: 118030

SEQ ID NO: 290837 - DNA, 1000 bp, Homo Sapiens
aatgcagttgtcaaagaaaagatttggttgccatagtcataagcaatgatacatgaaaccaatgaaagacagtacatgtaataatattttcctcagtacaattttgctggccttaactggtatcaaacgctgtcattgagatgttttcaaagaacattgagttgtatttaatcagcgtgtactccatttgcattgaagcattaaaaattatttttcttaaaatctctttaaggccttcttgttgctgttagaatagtgctatatatcaggtatgtgaccatttatttcagaaggctgaacataagaggtttctactcagcaatacttagatgtctaactgtttaattgctacagagctttatagatatttagagaaaagacttaatcaattagtaaataaaattgcctatggcaggattctttcttgaattaatattaatccttaaattgatttttctgggattatacaaattcctttttatataaaagtatattgtttaaaacagtagctatagccattaaccaaaggacagatgatatatatatatatgatatatatatatatataagttcttttttagctgtacctacgtacttatatcagcaccatgtatgtaggtgtgatagtactttcaaacagcgcctccacctggcctactctgttatttccacctgtttgggtagggccatttaacttccattatgccaaacttgggatgggattttcgaagcagacaacactatttcatcgtgtttcaaattggaaccttgaggctagttagtatcacactcaggccacactcagcacttgcccactcttgtttactgccttgtattctagttatttgtgtatttgtctccctcactagattatacgctccttgtgggcagggactgtgtcttttttcatctttgtatctttcatgcacctagcatagtgctttgcacatagtagtcactcagtgtttgttaaataaagctattagtgtcattaaaattc

SEQ ID NO: 290838 - DNA, 1000 bp, Homo Sapiens
aaaacccttgaaaataaacagtctcttttttacaaagcctgtgttagagcacagatttacctaggcttgaagatttggaagaaataatatgtaagaatggcctcaaggcagaccactttaagtttggctagacttcatatcgtggaagtattgtctatttcagtgtgaaactatcttgaatttgcaaatatagtgttatattttataaagttttgtaaaatcccaaacaatatttctatttttgtaaaacaattgtatgtataatctgtatttgaaatcattttgcaatctatggaaatagagtagcaattgctatttctaaattgtgaactttaagtcaatctagatttattttgagaagtaattgttcactctttacttttgaggcagccattaggttgaaagtatatatttatcatataaaacttgatgcgttttgcactactctttccatttatatgctgcaaacaactacagtctttgaaatatggaaaatcagcagtctaaagtttgttttaaattctaaatttaaaaaatcttcaaatctgaatataccgcaaatgtcatgagaagtttgattcagtaacttgtgatggaggattctttggtatcttactgtttggttaaggcactaattttacttacctattagattttgaaagtatctgagatatacaaatctccctgtaggaaatgtgaaagaaaagcacaacaaaactagggttttttgttcatttgcttgcttttatgattttttttggtttgttttaatatcaggtggatttttgtttctaagcaatatatacataaaatcaaccaacatatctgaaaaggatcatgaaacctgagaaatgctaatggagatttgctggtacataggaatctagcaaattcaggaaccaaggggaaatgttgtgagataacatttacattgtcaacctttattgactttgtttttacaataaaaaatattttacaactcaaaaaaaaaaaaaaaaag

SEQ ID NO: 290839 - DNA, 1000 bp, Homo Sapiens; identical to SEQ ID NO: 118031

SEQ ID NO: 290840 - DNA, 1000 bp, Homo Sapiens
acctctaagccaggctgtgaagaaaaggaaggcactttagaagacctcagcagtgtggttctgtgtctacttccatgacctgtacctgagtatcttagccagccagccttaggaacaccaccaaggttactttgaaatctatgtatatagctagttacagacgggagctatgtgtttcttcattattttgcagctcctcgttgttcctgtgattcctgaacacctttttggaaatatgggtctctgtgagttttgagcacactactatcactttggatagtcactccatttatatttttataaacttccattagagaatcattaaggctgtttaatatctgctctggatattacgcattggctttttgttgcctagtgctacaaaccttcctgtgggactcagtgtcttcaggcaatgattgtgtatcctgttacagatggttgtgatacaagaagaaccactcttctttgaaaataaactcttggaagcttttgccagctatctggggggtaggaggaatattagcaactgtattggttgtctacagatacagaattgcctgttgtgagggaactgattgttttgttgggaaaagaaatttaccaggagaaagagttttgtgctgtattgtgagagatctcgcctctcagttaaatgagccctgggttaaagtcagtgtgaagggcagctgtgtgcgggcacgagccagagtgtctgcctcagactagatttgacttgagttctttatgacccaggactctggataatgtgaatttgctttcctatttaactagaagatacatgtactatagatcattgtctcattttagtgattgttccttaaactagtgaaactagtggatttctcttcttcctctttattttttgcatgttaaatgtgaaccttagtgtatttgtattttgtagaaaataatgaaaaatttaaatggagaatgatttaaaaacatttacaatacattaaaaaaaaaaaaaaaaaaa

SEQ ID NO: 290841 - DNA, 1000 bp, Homo Sapiens
taaatatatgactcagggaaaagcctcagcgaagaggacccagcaggaatcatgagggaaggaaaatgcagcactctaaatggccactcaggcgttcctattcactcggaaaattaggttcatttcacaggacacagcagtgtagatcaggcttcaacttaacatttaagggaaatgtcagatttttttttaatttaatgaaattgttaatgaggaaaaatttttaatatagtcttatctaccacacatccccatagatttaaggattttaatagaaagacatgatgtatgtatttaagccacgttaaaagaaaaaatataactatggaccggtattcagtgaatacagtttcatggtttttaattctttcaaagcacattaaaaatggtgtgctgataaaccccaagtaaattaaccctttttccgtataaatccattttttgttttgaagaggggaaattatatttattgttgtttactgaatcctggtgtgaaagcatatcagatatgtatgaactgctactgctgtacttccgatttacggacatcattttattgctatttgtagacgtgataacatgaacatgagtacctatttatgtgggccttcagtggatgggcagtgccactcaggtctctggggtttccctctctaattttaagtaaattgacatataactactatgcttataaaaatgaagtaaggaaaacaagtagtcctgtttgccactaaaaacattttcaaaggaaaaataaaatgaaagtactttttactttttatgatactcagaaattaggatgaagaacttttaaaattgctgaagatcaaagaggttatctctgccagtcacaagtgtggctggtgtcattctgggtctgactggagccctcctggactgtttctttaatttcaaaagccctgcagacatagtacctggtcagaactatgcctcggtttatttatcattttgaaataaaatcagaatttcaacctgtaaa

SEQ ID NO: 290842 - DNA, 1000 bp, Homo Sapiens
cgtggcgtacaacggtgctggtgacacagcggccctggccctggccagagctgcccgggagcacccttccctggaactgctacacctctacttcaatgagctgagctcagagggccgccaggtcttgcgagacttggggggtgctgctgaaggtggtgcccgggtggtggtgtcactgacagaggggacggcggtgtcagaatactggtcagtgatcctcagtgaagtccagcggaacctcaatagctgggatcgggcccgggttcagcgacaccttgagctcctactgcgggatctggaagatagccggggtgccacccttaatccttggcgcaaggcccagctgctgcgagtggagggcgaggtcagggccctcctggagcagctgggaagctctggaagctgagacactggcggcaggcacctagctatgtgaccactggccctaaaccttttccctctgtggcctcctggcttgcactgctccctctagaaagattccttcaggtctggaggcagaggaatgggcatagctgagccagttgccctcctagggcatgtttgaccaggactgagtctggaatctccaagttaaagatggtgaatcaatgcttcgggcttggagatggaacatgcctcctctccattcagctagaaggaccaaagcatgtggcatttggatggccagagtgccctgaagcaccactaccaaccttgcctccccctcctctcaaagagcctctgactgtgtcaccaaggggctcacatcttatgtctgccatgccaggggtgtcgccatccagatgtgttggaagcttcccctcctgccttatgctcacctgtggacaccgaggatgccctcacattggtgctttctcctcatcctcatgccccctttgccacaatggtatgatggcttggtagcccctcgaggcagatgcacctgacttgctgctattaaaaagccgtgtgccttctaccaaaaaaaaaaaaaaaaaaa

SEQ ID NO: 290843 - DNA, 1000 bp, Homo Sapiens; identical to SEQ ID NO: 118032

SEQ ID NO: 290844 - DNA, 1000 bp, Homo Sapiens; identical to SEQ ID NO: 223374

SEQ ID NO: 290845 - DNA, 1000 bp, Homo Sapiens; identical to SEQ ID NO: 223375

SEQ ID NO: 290846 - DNA, 1000 bp, Homo Sapiens
tcttcacagggggcgccctgtattttgggggcctcttccaggcacccacagccctgacggagcccctggaggtggagcacgtggtgggccagggtgtcctccaccgtggcggccagctgcatggagcccggcccttgggcactggtgagcgttggaaccttgtcgtctggctccgagcctctgctgtgcgcaacagcctctgtcccatgtgctgccgtgagcccgacctggtggacgatgagggcttcggtgatggcttcacccgagaggagcccgccacggtggatgtatgtgcgctcacctgagcttgcttgggcccagtgtgggggtggcaggcaggtgagggctccgttgccttggtctgggggcagaaataaaatccccgcagcctactgcacttcttggctcaacggtgtgccagcttctgggtcattctatgggcaaagatgctgccttagttcaggtttgtcagaagcagggtctggaatggggcttcagcgagggagtcagggaagcaggggaggggagggagcagctgggcaaggaagtggcttcagaggacgtccagcctcagctggccccacggagagctccaggcagagcccacagtaccacagtgtgcccacaccaccggttactggctcctggatgagggggccagagaggagtgaataacttcccagacacttacctccagggcagggtgccttccagtagccaagggaagcctccagagagcacagatgtgaaccctcagcagcaggcatcaccccccagtggactcgggtgggccaccagtagcatcttctagatggcaggggggtgaatggcagggccaggaaccaggctgcccgggttcccattctgcttctgccacttccagctgtgtggctttaggtgagccttcaccttttggtgccttcgtttcctcatttagcacctacctcctagagctgttttgggagtcaaatgcgctgacgtatataaagtgctttgcaag

SEQ ID NO: 290847 - DNA, 1000 bp, Homo Sapiens; identical to SEQ ID NO: 118033

SEQ ID NO: 290848 - DNA, 1000 bp, Homo Sapiens; identical to SEQ ID NO: 223376

SEQ ID NO: 290849 - DNA, 1000 bp, Homo Sapiens
cggagtcacctacagctgctaaactcaaaggcttctctgtgtgtctcttctttctttgccatcagctgggcacttctgcctctcagcccttacctgatgctaaaataatgtgcctcggccacaaaaaagcatgcaaagtcattgttacaacagggatctacagaactatttcaccaccagatatgacctagttttatatttctgggaggaaatgaattcatatctagaagtctggagtgagcaaacaagagcaagaaacaaaaagaagccaaaagcagaaggctccaatatgaacaagataaatctatcttcaaagacatattagaagttgggaaaataattcatgtgaactagagtcaactgtgtcagggctaagaaaccctggttttgagtagaaaagggcctggaaagaggggagccaacaaatctgtctgcttcctcacattagtcattggcaaataagcattctgtctctttggctgctgcctcagcacagagagccagaactctatcgggcaccaggataacatctctcagtgaacagagttgacaaggcctatgggaaatgcctgatgggattatcttcagcttgttgagcttctaagtttctttcccttcattctaccctgcaagccaagttctgtaagagaaatgcctgagttctagctcaggttttcttactctgaatttagatctccagaccctgcctggccacaattcaaattaaggcaacaaacatataccttccatgaagcacacacagacttttgaaagcaaggacaatgactgcttgaattgaggccttgaggaatgaagctttgaaggaaaagaatactttgtttccagcccccttcccacactcttcatgtgttaaccactgccttcctggaccttggagccacggtgactgtattacatgttgttatagaaaactgattttagagttctgatcgttcaagagaatgattaaatatacatttcctaaaaaaaaaaaaaaaaa

SEQ ID NO: 290850 - DNA, 1000 bp, Homo Sapiens; identical to SEQ ID NO: 118034

SEQ ID NO: 290851 - DNA, 1000 bp, Homo Sapiens; identical to SEQ ID NO: 223378

SEQ ID NO: 290852 - DNA, 1000 bp, Homo Sapiens; identical to SEQ ID NO: 118035

SEQ ID NO: 290853 - DNA, 1000 bp, Homo Sapiens
atgaggcgccctcgccccccaggctactggcggcgggcagccccctggcgcacagccgcaccatgcacgtgctgggcctggccagccaggactccctgcatgaggactctgtgcgcggcctggtgaagctcagctccgtgtgacccacatggccccaggccgggggacaccagaggctcctccatgggcagcaggagtgagcggaggggtgtgtcccacagcgactttcccagccaatgccacggtggagatgacagccccaggtctggggtacagagaccacttaggatggcacagggtggctggccccggatgctgagagcttggtttcatttgaattttcttccccaacctgagtgctttgacaacaatggaaatagagaagtggctgctttcttttggtgaccctccaggggtggaatcggagtgtgtctgcccgcccttgtgacagacacacggaaggcttctgacgcttgtggccagactgcaattgcacttatgtgttatgctactaatatttgaaacagacctgccattccatttgttaattaaaaaaaaaaaaaatcctaaagggaaaaaaccgaccaggtgtggatctgcatgccacgctgccgtctgtgttacagtggtgttgctatttccaaggaagtgctgctttctttttctttttttaattttgtgaattttcaagtgctgttttgttggaagacagtgcaacgaactgagactaatggacagtgtcatcactcagcttactgggctgaggcgtctgtggagaggtggcaccggggctgcagagggcggctggggttccgtcgtgtcgggtgtcacttcaccttctgtttggccgctcgatgaggtctcgtgttgagatattgtgtgccacaacccccacagtcttcacctccgtgtgtgatgaaacttcccgtggacagccaataaaatgacgtcctctgttattttggaaaaaaaaaaaaaaaaaaaaaaaaaaaaaaaaaaa

SEQ ID NO: 290854 - DNA, 1000 bp, Homo Sapiens; identical to SEQ ID NO: 223379

SEQ ID NO: 290855 - DNA, 1000 bp, Homo Sapiens; identical to SEQ ID NO: 118036

SEQ ID NO: 290856 - DNA, 1000 bp, Homo Sapiens
agtccgaaagaccagagccctcattccaaagccccccacccagatggattttttcgtttcatttgtcatccgtcccatgggagggccccatgtctcctcagaacccatcctggaggcagcaggtcgggtagagtgagtttggcctgctcatgacctccacccctgagattgtgaacaaggatgtctggggcgatgctgagaatgtttttgaagctgctcccagatgacgctgatgatcacaccagattgagtgctgcgatcgccttgagtccagcctctgcataaacgaggttctcataaacaagttcactctaccctaagctaagtctatgtgagcaaacccacttcatcctttgtacctggagacctggttacactaacctgatactgacctgttcatgtagctggaatggtgtgtttcatgcagtgtggaccaagcaatggcatggggtgtgtgtgtgtgtgtgtgtgtgtctgtgtgtgtgtgtttgtgtatgcgttcacacttgtgtgtgtatatgtgcatgtagatgctgcataaatgatttttgatgtcaaagacaaacacattccattgttttaaatattctattatgtaaacaatacgcagagggaccatatctactcttgtcatattatttgtgatggtaaaacatgcatttgcaataaattaagctttctgggaaggcaagcagtattggagccaaacgactgtctcggaacatgtgtgtgttatctcggttcatatcaagtccaaagctaatggagccttccccgccatccagggaggaacaccaggaccccggagtttcttcttagtgctatattttaaagttgcattgacgttttcctccccttccttttgtgcaagttggaagtagcagtgttctaaaagatggtttgacgtttttgctgttgttttatgtttttaaaaatgtatctgctttgtgtttggaaataaaaatctctattttggtctatgaaaaaaaaaaaaaaaaaa

SEQ ID NO: 290857 - DNA, 1000 bp, Homo Sapiens
aattggaactctacagtatgcacgagtactattacatatattggtatctctctgaattcctttacgcatggttgatgtcaacattgagtcgtgccgatggctctcaaatggcagaggaaaggataatggaagagcagcagaaaggccgtagtagtaaaaaaacaaagaaaaaaaagaaagttcgcccattgagccgagagatcacaatgagccaagcatatcagaacatgtgtgctggaatgtttaaaaccatggtagcatttgacatggacggcaaagtacgtaaaccgaagtttgagcttgatagtgaacaagttcggtatgaacacaggtttgctccattcaacagtgtgatgaccccgccgccagtgcactacttacagttcaaggaaatgtctgacctcaataaatatagccctcctcctcagtctcctgaactgtatgtggcagctagtaagcactttcaacaggcaaaaatgatattggaaaatattcctaacccggaccatgaggttaatagaattttaaaggttgccaaacccaactttgtggttatgaagttattggcaggaggacacaaaaaggaatctaaagttcctcctgaatttgatttctctgctcataaatattttcctgttgtgaaacttgtttgagagagactggggaggtggccataaaggggcagagtcttctttcagacccaactcttagagggcacatcaccaggctccacatcacgggaagtgagatggatttcttgggtaacaactcattataaggaatacttttagtttgacagccttatatgacatgaatgaaaactgctgttttaaagtggtttattatgttccatggaagaaactggtcttattgaatgcattgatgaacgttatatggttttattacagatttaatcacaaatcattttttatgaatgattgagtgaaaatagtgtttataaaggttaataaatttcttgacaaaaaaaaaaaaaaaaaaa

SEQ ID NO: 290858 - DNA, 1000 bp, Homo Sapiens; identical to SEQ ID NO: 223381

SEQ ID NO: 290859 - DNA, 1000 bp, Homo Sapiens; identical to SEQ ID NO: 223382

SEQ ID NO: 290860 - DNA, 1000 bp, Homo Sapiens
ggcccaagacctggtgctggatactatgtgtctgtccactgacgactgtcaaggcctcatttgcagaggccaccggagctagggcactagcctgacttttaaggcagtgtgtctttctgagcactgtagaccaagcccttggagctgctggtttagccttgcacctggggaaaggatgtatttatttgtattttcatatatcagccaaaagctgaatggaaaagttaagaacattcctaggtggccttattctaataagtttcttctgtctgttttgtttttcaattgaaaagtaattaaataacagatttagaatctagtgagagcctcctctctggtgggtggtggcatttaaggttcaaaccagccagaagtgctggtgctgtttaaaaagtctcaggtggctgcgtgtggtggctcatgcctgtaatcccaacattctgggaggcccaggcgggagaactgcttgagcccaggagttcagaatcagcctgggcaacatagcaatactccgtctcataaaaattaataaataaaaagtctcaggtgaccaaaggctcctgaagctagaaccaggtttggataaagattgaagagccacaggccactcttccctctgagccattgggcctagtggtgtcatgtattgtaattgctcgcagggagagcagtctttttggtgtaatagtgggatgtctgcttagttggcaggggttcagtccaaatggaagaatattgggaaataaacctccactatcctttatagccagggacttttttcttatttattcataaaataaattatagttaattatacccataacacctttatttaaatccagtgttctccgcagccttttgtctatttatatgtgtaccaagtgttaaacataattattattgggcatttgaactttgtttttctttaaagaaatgctgctattaaacatatttgtaaatggtttaaaaaaaaaaaaaaaaaaaaaaaaaaaaaaaaaaa

SEQ ID NO: 290861 - DNA, 1000 bp, Homo Sapiens
cacagcatacttcatctctgagctttgttgtgattcctcaacacattaccctaaccagccagcagtaacagatttcagagtaagataaagcagattctgtcttcattgcaaaaagttattctcaatggaagaatggcatctgatctcataattactagtttatattaatatagtttttttctccctttttaataaaataattacagtcatccctcagtgtctgtgggggattggttccagttacccctatagataccaaaatctgcagatgctcaagtccctgatataaactggcatagtagttgcatataatctatgcacatcctcctgtatacattaagtcatctctagattatttataacacttaatacaatgtaaatgctatgtagttgttataccatactggttagtgaataattacatgaaaaaaaagagtctgtacatcttcagagtttcagtcggcaatttcttggccatggatgtagaacctacagataaggtgagccaactgcattaggaaataactctaataattctgttaattcttagagaggaaaactttcaaaatcttcctcaggtatttattacaactgcctttaccattttagttgtaacacagtttaaattgttatgataacaagtaaataagagcaaagaatttatttcttaattcaaaactatacgtttgaattcaatatggtataacttaaagtggtataatacatacaatgcatgaatcataatggattcttttataagttattaatttttatggtttaatcagtctaattgttttgactgttatagaaaccaaatattttactgtttcttttaaggactaatattgtcaaaaactgctgttattaacttcacttgagttgtttaacttccttctgttttaagattgtaattaaaaattactattttgttatatggaatggttaatttttacctaataaaaacatagatgaaatacattgaaaaaaaaaaaaaaaaaaa

SEQ ID NO: 290862 - DNA, 1000 bp, Homo Sapiens
aatccagaggctcaaaagggaaaggctggtagcaagcaataataaaattcgagacccagtctcagagccatcggtggagaaattctccccgccttcagaaacaccagtcggtgctttgcagggatctgccagaaattccagcctgtccatggcaccagactcctcaggttccagcggctccattgaagagccacagctgggtgagtgcagccactgtgggcgcaaattcctctcgttcaggctggagagacactccaacatctgcagcaggatgcggggttccaagaggaaagtgtttgactcctccagggcccgggctaagggcacagaactagagcagtacttgaactggaaggggccagcttcagccaaggctgaacctcctcagaagagcaactggagatagaagcatgaatcttttatccatacgttccgccaggctcgagaggtccagcaggtaactgccaaaggtggaaactgttcacacttgcctcccatcctgcctgcagaaaacccagactgcattcagtgtcctcagtgtagccaccactttgctcccaaggtggctgagcaacacattcccaagtgtaagaccatcaagaactgtcatccacctctaaggaagcattatagttgagcagacaacaatggaaacttttggatagttcagaaagctctgcttctcttcagcagtaaatgggagtagaatttgatgcaaagcagaaagaaatcaaacagctcccagatctgcctgcagagctaaaatctgtgaggagagagccactgctaagcagcaggaggcagaaggaagccccagcttcccactaaattacaaccttgggctggtatgctttatgttattgccctcagaattgatgggtgaagacactgaagagtcatgagcaggctccattaaagctcttttcttgcaaaaaaaaaaaaaaaaaaaaaaaaaaaaaaaaaaaaaaaaaaaaaaaaaaaaaaaaaaaaaaaaaaaaaa

SEQ ID NO: 290863 - DNA, 1000 bp, Homo Sapiens; identical to SEQ ID NO: 118039

SEQ ID NO: 290864 - DNA, 1000 bp, Homo Sapiens
ctcccaaagtgctgtgattacaggtgtgagccactgcacccggcctgaaatttttttaaggtgaaaatgttttgacaagttcctttttcagaataggtttttgagcagaactctttcagcttgttagacccaactttgcttttgtttagcttcacagcatagctgaaagttgccaaactggacattgtgcaataaagtagaattctatattgataagcaaactatttccaaactaaaaatgtgatagataaaagtgtgattaatcaaatgatatgatcagagtaaagaattttgccattttgatccttttactttgttttagccacctatagtgttaccaaccatctttatccttgtctgcagggataataatgaactaatgtagtgttttaagataatttaatgatactatctttccaaactttgttagattttaaatgtattattgacctgagaccttaatgacaaatcactgctattagacaattgaagtgttcatttactttgtaattccaataatcatagttatggaattatggtaaggttttgcttttctgtcctaataaatatatatattttttgagatggagttttgctcttgttgctgaggcaggagaattgctcaaacccgggaggcagaggttgcagtgacccaagatcgtgccacttcactccagcctgggcaaaagagcaaaacgccatctcaaaaaatatacatatataaggagataaagtttcccattttccaatacagtttcacatttgaacagccctaattgatacaactttatggcagggttttagtgtgtgagtgggatccaaaacactcaatcctgtaaaagggtacagtcctattgtatgttaacacactgatgatgtgagcctgtgagatgagccaatcaccagttgttatgttcgaatctgctttgtgttgggacgctttaatgtcagggtttcactaaataaatgaattttcatatactgaaaaaaaaaaaaaaaa

SEQ ID NO: 290865 - DNA, 1000 bp, Homo Sapiens
gctttgtgctcaccgcactcctgctctggagcagcttgggggccgacgacggggtcgcagaggtcctggcccgccgtggcgaggtcgtggcagggagattcatcgaggtgccctgctctgaggactacgacagtcaccgcaggttcgaaggctgcactccccgaaagtgcggcagaggtgtcaccgatgtcgtcatcaccagggaggaagcggagcggattcgcagcgtagctgaaaaggggctctccctgggaggatctgacggaggggcatccattctggacttgcactcaggggccctgtctgtcgggaagcactttgtgaacctgtacagatacttcggggataaaatacagaacatcttctcagaggaggacttccggttataccgggaggtgcggcagaaggtccagctcaccattgctgaggcttttggcatcagcgcatcctcgctgcatctgaccaagcccaccttcttctcccgcataaacagcacggaagcgcggacggcgcacgacgagtactggcatgcgcacgtggacaaggtgacctacggctccttcgactacacctcgctgctgtacctctccaactacctggaggacttcggcggagggcggttcatgttcatggaggagggtgccaacaagacggtggagccgagagctggtcgcgtctccttcttcacctcggggtccgagaacctacaccgcgtggagaaggtccactggggcacccgttacgccatcaccatcgccttcagctgcaaccccgaccatggcatcgaggacccagcgttcccgtagccagcagccgggccaaggtaacttcaggagggcccgtgtggaggcagccgcgccagtcgtgcacccacccccacgtccacccgctcctgttgcacagagtgccttaggaattctctgattttgatttgctgacgtgttaatcttttcatctgtgagtaaatgaagggaaccagcaaaaaaaaaaaaaaaaaaaa

SEQ ID NO: 290866 - DNA, 1000 bp, Homo Sapiens; identical to SEQ ID NO: 118040

SEQ ID NO: 290867 - DNA, 1000 bp, Homo Sapiens
atacccaatttggatctcaatttggatagagatttggtgcttccagatgtgagttatcaggtggaatccagtgaggaggatcagtctcagactatggatcctcaaggacaaactctgctgctttttctctttgtggatttccacagtgcatttccagtccagcaaatggaaatctggggagtctatactttgctcacaactcatctcaatgccatccttgtggagagccacagtgtagtgcaaggttccatccaattcactgtggacaaggtcttggagcaacatcaccaggctgccaaggctcagcagaaactacaggcctcactctcagtggctgtgaactccatcatgagtattctgactggaagcactaggagcagcttccgaaagatgtgtctccagacccttcaagcagctgacacacaagagttcaggaccaaactgcacaaagtatttcgtgagatcacccaacaccaatttcttcaccactgctcatgtgaggtgaagcagcagctaaccctagaaaaaaaggactcagcccagggcactgaggacgcacctgataacagcagcctggagctcctagcagataccagcgggcaagcagaaaacaagaggctcaagaggggcagcccccgcatagaggagatgcgagctctgcgctctgccagggccccgagcccgtcagaggccgccccgcgccgcccggaagccaccgcggcccccctcactcctagaggaagggagcaccgcgaggctcacggcagggccctggcgccgggcagggcgagcctcggaagccgcctggaggacgtgctgtggctgcaggaggtctccaacctgtcagagtggctgagtcccagccctgggccctgagccgggtccccttccgcaagcgcccaccgatccggaggctgcgggcagccgttatcccgtggtttaataaagctgccgcgcgctcaccaagtccaaaaaaaaaaaaaaaaaaaaaaaaaaaaaa

SEQ ID NO: 290868 - DNA, 1000 bp, Homo Sapiens
ggctgggagcggcctcctctggcctcccccatcagtttgcaggagcaggggtgcaggatcctgttctgagctgggtcaaacaaagcagggccgggccttcctgccatccccaggtctcagatggaattacactagaggccctccgctgggaagcacttgaggtagggcaggaggggggctgtgacccctgccctttccccgccagagacctcgggctctcagcacattccacaggctcctgagtccccgaggcctgggccagcttgggcaagccaagatcagatgtctctgtgttcgggaaggtctccgtgtgggaaagcccttgggggatcccgggtgaggagtgttgccccatccagagaatgaatgagttcctttaagtgccaccgccagcaagcccagaggcacacagtccgagtgcacccgcttagcctttacattcctctccaccgacaaaaggaaggggaaactcaatcagcaggacttcagaaagggccttgtgtttatagctttgtcaagtaaatttggacgcagctggagcacaggccctgtttgtttgcacataataatcttgtttatcactttaaaaaattcagtaatatctcagcagtcaggcttctggttgtgaaatcacattgtatgggatttataccaaattatgtatttgctaaacattcactgcacacgtgtacagcggagtacgaaaaggaacgttgtccacaggggatttatggatacaacagcaaacattttataaactatgcacatgcattacacacatgcacacacatatgcacacacatgtgcaaacatagccacttttttgtcaagagttaccctttggggctccttaaaccagaatgggagtttgaaagagagatcatactccagctgaagtttgttgacccttttctaaaattaaaaagatcaaatttagtatttgctggatatgcagggagatgagactcttttaatctcaaaataaacagattctttcaag

SEQ ID NO: 290869 - DNA, 1000 bp, Homo Sapiens
ccttggccacccaaagtgctagggttacaggcatgagccactgtgcccagcccaggctctgggaatattgagataaataagatgcttctatccatttattcaagcacatattggtcacctactgtgtgcctggcactcatgtcacaaagataagttcctgattcggtacacttactgagcacctgctgtgtgcagggagctgagctatgggatgggaatgggagtaaacaaggtacttttcacttttttctttttttcctcactgctagacggtgtgggaacttctcactcattggcttctttcccacacacctgaagagcactgactgtgtgccgggcactagtgatacaaaagagtgtgacagttgttcagtctgcattttcgatcatgggctacatgccgagtgctggggcacagagatgaacaagatcggttccttcacttcttcatgccacaagtgtttattgagcacctgtgtgccaggcctcacagactcccagttgggttgaagaatggttgactgagtttgattcttcctgtaccctcggtcgtctgagctgtgtgcggacaacatccccccaccacccaagagggagggtagctcttccgccaccaggggcaagcacaggtcctggtggccccacgccacatgttagcccccctggagggggcgccagttggagacgggggctgggtgtccctggcccactcccagtcccctgtgctttacctccttgcccttgtgtctcaggtgtggtccctgcctgcttgatgaagttgctctgttcaagcctttggtgggatcatgtgtttgggggcttttaggggacccagctgcactggggcactgcccgtggcctgggtaggacatttcccagcaagggctggaggagttgccgtgccttcagcctgaatcgaatgtcagaaccagccagcggtgcttcaccctcttggggataacttgcttagttttttaataaatgttcctggttggttttc

SEQ ID NO: 290870 - DNA, 1000 bp, Homo Sapiens
gaggaaaagcaagagttaaaagagaaactgaaggaaacagagacacacctggaaatgctgcagaaggctcaggtctcctaccggaccccagagggagatgacctagaaagggctttggcaaagcttacgcggctacgtatccacgtcagctatctccttacttctgtcctccctcacttggagcttcgtgagatcgggtatgactcagaacaagtggatgggatcctgtacacggtgctggaggcaaatcacatactggattgagcaccagactgtatacccttctcttctcttatcttctgtctgttctcttttctctccctccctcacgtctctctctctctctctctctctctctctctctctcaccctcacctttatgccttatatagagaatctctgtgtaaatcctggctcataatcagtctcctttttatcagttttggtgtggagaaagaggccagtttaaataggctttcaagagtctagggtcagaaaagcaatagtcactaagctaggtgacctgaaagctttaattttcatgacctggatatgtggtctattgtatatctttttctgaaatggtttgtattcatttaggttagatcaatcagcagatattgggtccggtataccaggtattattttggggtaagctaacaagtacaactcatgtttgcagccttcgaagatgtaacaatctcgttggaaacataagacatacatcacattatacacaaaagtgtatgatatgtacaactgagtggtacagatatgacatggaagatctgggggaggaagttcaaggaaggcaccacaccagaaatgggacctaaattaaggcttaaagaatgagcatggccacactgtcagtgagtgttctttaggtggtaggactatggttgatatttttcttcttcctatcttcctgcctttttcagattttcaatattaaacttgttattcttacattggaaaaaaataaattgtttttaaaaag

SEQ ID NO: 290871 - DNA, 1000 bp, Homo Sapiens
gaatacgacgccatgttgctggagcacgctggagaggccatccctgccctggcagccgcggctgggggagactcctttgccccattctttgccggtttcctgccattattggtgtgcaagacaaaacagggctgcacagtggcagagaagtcctttgcagtggggaccttggcagagactattcagggcctgggtgctgcctcagcccagtttgtgtctcggctgctccctgtgctgttgagcaccgcccaagaggcagaccccgaggtgcgaagcaatgccatcttcgggatgggcgtgctggcagagcatgggggccaccctgcccaggaacacttccccaagctgctggggctcctttttcccctcctggcgcgggagcgacatgatcgtgtccgtgacaacatctgtggggcacttgcccgcctgttgatggccagtcccaccaggaaaccagagccccaggtgctggctgccctactgcatgccctgccactgaaggaggacttggaggagtgggtcaccattgggcgcctcttcagcttcctgtaccagagcagccctgaccaggttatagatgtggctcccgagcttctgcgtatctgcagcctcattctggctgacaacaagatcccaccagacaccaaggccgcactgttgctgctcctgacgttcctggccaaacagcacaccgacagctttcaagcagctctgggctcactgcctgttgacaaggctcaggagctccaggctgtactgggcctctcctagactgcaggctgcagccagtccagagagaatagagcctgcccaggccttaagaccacctctcagcccagttcagttctgccttaccaaagattctgagactcatacccatttggagccagccccacttgctgccttacagggctgtccctgaggctggatctgttacaaatgagtcatgacatcatactgtaataaaagcagcttgttttctgcttgaacaataaaaaaa

SEQ ID NO: 290872 - DNA, 1000 bp, Homo Sapiens
gaagaggcttcgcacagcctatctgcgtgcagaagactctgagcgagagaagttctccctcttctctgcagctgtgcgggaaagtcatgagaaggagcgcacaagggctgagaggaccaagaactggtccctcattggctcagtcctgggggccctgattggtgtggctggctccacctatgtgaaccgtgtgcgactacaggagctgaaggctttactcctggaggcgcagaaggggcctgtgagtctccaagaggccattcgagaacaggcgtctagctactcccgccagcagagggacctccacaatctcatggtggacttgaggggcctggtacatgctgctgggccagggcaggactctgggtcacaggcaggtagtcccccgaccagagacagagatgtagatgtcctttcagctgccttgaaagagcagcttagtcattccaggcaagtccattcatgtctagaaggcttacgagagcagcttgatggcctagaaaagacttgtagccaaatggctggggtggttcagcttgtaaagtctgcagcacacccaggcctggtggaaccagcagacggggctatgcccagcttcttgctggagcaggggagcatgatcttggcactgtcagacacggagcagagactagaagcccaagtcaacaggaacaccatctatagcaccctggtcacctgtgtgacatttgtggccacactgcctgtgctctacatgctattcaaagccagctaacccctggcccctcctccagagggtctgaggcaatagctgtgaatgtggatttaagtagagaatcgtagcaatgaagcgagcctttgggggcatgtacaacctcaatctgaaggagcagtatctgtgtggctcaccagcaggcatgcttcgctttgtagacaaggttcatttacattaattatcaaaactttgtgctaatgtccaattaaaatatcctgagttttattatttaaaaaaaaaaaaaaa

SEQ ID NO: 290873 - DNA, 1000 bp, Homo Sapiens; identical to SEQ ID NO: 118043

SEQ ID NO: 290874 - DNA, 1000 bp, Homo Sapiens
cagggcattgccacagggaagtaccacgccgcggtgctcaccaacagcgctgagtgggaggccgcctgtgtgaaggcgggcaggaagtgtggggacctggtgcacccgctggtctactgccccgagctgcacttcagcgagttcacctcagctgtggcggacatgaagaactcagtggcggaccgagacaacagccccagctcctgtgctggcctcttcatcgcctcacacatcggcttcgactggcccggagtctgggtccacctggacattgctgcaccggtgcatgctggtgagcgagccacaggcttcggtgtggccctcctgctggcgctcttcggccgtgcctctgaggaccctctgctgaacctggtgtccccactgggctgtgaggtggatgtcgaggagggggacctggggagggactccaagagacgcaggcttgtgtgagcctcctgcctcggccctgacaaacggggatcttttacctcactttgcactgattaattttaagcaattgaaagattgcccttcatatgggttttggtttgtctttctggtcgtcagcgtggtggtggaaacagctgaagttttaggagacagcttagggtttggtgcgggccacggggaggggaccgggaagcgctggggcttgtttctgtttgttacttacaggactgagacatcttctgtaaactgctacccctggggccttctgcaccccggggtgaggcctcctgcctgcctggtgccctgtcccagccccaggtcctgtgcagggcacctgcgtggctgacagccaggctcttactccagccggggctgccagcgcatccagccagcccagccctgtgaaagatggagctgacttgctgcaggggacctgatttatagggcaagagaagtcacactccggcctctcagaattcacttgaggttcaattaaatacagtcacaccgccccctcaaaaaaaaaaaaaaaaaaaaaaaaaaaaaaaaa

SEQ ID NO: 290875 - DNA, 1000 bp, Homo Sapiens
ataactcttaatttcctaatagatactagattgtattgaattctgttttaattattctctaggtaagtatgttttaggattaaataccttttacagatactgaaagtgcctccttttgtggtgtaaaaaacaaattatggtgcaaaaagtaatcactagattgaaatacatgaaggttttttgctttttgacatacgaaaatgtcaagagaaaggccaaagatttgtactttttcacttacaaagcactcctttttcccttaaacttctttctgtcaaattagatttaatgagagagtactatttttaaggagctatctgtttatgtagaatgattttgttaagagtaatgtaaactattattgagtagaggcctaaagaggactgtgcatttttgctatttaaaggaatcacaaatgatcatacttaagtgagcaaaaatgacaagttttactagctaagtagagaaataaatctcaaatgcagcgctacaattttcattatcttaagcacattgtacatttctacagaacctgtgattattctcgcatgataaggatggtacttgcatatggtgaattactactgttgacagtttccgcagaaatcctatttcagtggaccaacattgtggcatggcagcaaatgccaacattttgtggaatagcagcaaatctacaagagaccctggttggtttttcgttttgttttctttgttttttcccccttctcctgaatcagcagggatggaaggagggtagggaagttatgaattactccttccagtagtagctctgaagtgtcacatttaatatcagttttttttaaacatgattctagttaaatgtagaagagagaagaaagaggaagtgttcacttttttaatacactgatttagaaatttgatgtcttatatcagtagttctgaggtattgatagcttgctttatttctgcctttacgttgacagtgttgaagcagggtgaataactagggcatata

SEQ ID NO: 290876 - DNA, 1000 bp, Homo Sapiens; identical to SEQ ID NO: 118044

SEQ ID NO: 290877 - DNA, 1000 bp, Homo Sapiens; identical to SEQ ID NO: 118045

SEQ ID NO: 290878 - DNA, 1000 bp, Homo Sapiens; identical to SEQ ID NO: 118046

SEQ ID NO: 290879 - DNA, 1000 bp, Homo Sapiens; identical to SEQ ID NO: 223386

SEQ ID NO: 290880 - DNA, 1000 bp, Homo Sapiens
gtactactgaagtctggaaatataaaagctgtgcttggcctgacaaagaggaggctagttagtagcagtgggaccctttctgatcaacaagtagaagtcatgacgtttgcagaagatggaggaggcaaagaaaaccaatttttgatgccccctgaggagactatactaacttttgctgaggtccaagggatgcaagaagctctgcttggtactactattatgaacaacattgttatttggaatttaaaaactggtcaactcctgaaaaagatgcacattgatgattcttaccaagcttcagtctgtcacaaagcctattctgaaatggggcttctctttattgtcctgagtcatccctgtgccaaagagagtgagtcgttgcgaagccctgtgtttcagctcattgtgattaaccctaagacgactctcagcgtgggtgtgatgctgtactgtcttcctccagggcaggctggcaggttcctggaaggtgacgtgaaagatcactgtgcagcagcaatcttgacttctggaacaattgccatttgggacttacttctcggtcagtgtactgccctcctcccacctgtctctgaccaacattggtcttttgtgaaatggtcgggtacagactctcatttgctggctggacaaaaagatggaaatatatttgtataccactattcataagttagggtaaagtgaaaacacaattttctggatatattgggcctcttagtattttttggagttttaaatataaaggagaatatctgaatgacacttaaaatgattgcttgtttatgtccagacagacttattttttattctaatgatggtagcaccactgatcttggatgtacatttatgtatactttgagaaaaagggttttaggttgatttttgtaatttcccacatttgtacatgtgcttttaaaggtgtacataaagcttcaaatggcaataaatatttatttttatacattcaaaaaaaaaaaaaaaa

SEQ ID NO: 290881 - DNA, 1000 bp, Homo Sapiens
tctgaagattctacatctctacacaagatattcattcttttggtcacctagggatcttctaagtgtgatattactttcagagaattcagacaagtgagaaacaataatgtaggagtcagcaaagcagaattcagagacttcagccaatcactgctgctctgagaggatccagttagagactcagtatcagcggtcagaacttatctcactcctgtgaactttcaggctggacttaaagctgccaagtttcccctgcagggaaggaaacactgcctcccttcagcaggtagctcattagaaagccaaacaggcaaacgatcctggcctctcccgccagctgaccgctcttcagcatccatgcggttgtagtcgtgactttctcagtcacgatcaagggtgattttttcttaaatatcaagctgttctttgaacagggaatgaacatgagtttttgtaacgtgactgaagttgagtttaagtaggaagcgcaggaagttcccaagtgccaggtgtgtgtagctcagagttccttttacagtgaggtgtctctcactgggggagcttccaggatcctgagcagactggacacaatcatctctcccttcctctatgtcaagcactgttacaaaagactgtgagcaaatttccatctaaatattaataattctgaagaagaggcaaaactgttgaatgcaagcgatacctattgttgaagaaacccacaaattatttctgattctaagatcaggggatacaacaaaatctacaagtcatttcaaatagcacacaggaatcaaactttggtaaatcatttctgaggcacaattaaatatattgtagcactatgttaattaattatattaaatgtcgattcatcttgaatgtattctcaattgcctaccaaaaattggtatgattatcatttctgggtctactgatttttcatcatggcaacagaaattgtcattaaatagaattaagatacaaaaaaaaaaaaaaa

SEQ ID NO: 290882 - DNA, 1000 bp, Homo Sapiens
agattagaacatatgctaaaaaacaactttttaatcatttcttatactgaagcagtggagatcttaaagcaagcatcccagaacttcacctttaccccagagtggggtgctgacctacggactgaacatgaaaagtacctggtgaagcactgtggcaacatacctgtcttcgttattaattatccattaacactcaagcctttctacatgagggataatgaagatggccctcagcacacggttgctgctgttgatcttctggttcctggagttggggaactctttggaggaggcctcagagaagaacgataccatttcttagaggagcgcttagccagatcgggacttacagaagtctaccaatggtatctggaccttcgtcgatttggatctgtgccacatggaggttttgggatgggatttgaacgctacctgcagtgcatcttgggtgttgacaatatcaaagatgttatccctttcccaaggtttcctcattcatgccttttatagctggaagattggttaaggaaaagcaccccccatggcagagacactgcacatgattgtgcatacagcagaatgcatgtttggattttagaaatgcagatttcaatatgtaattgttgtgccataagatatcatagaaaaaatataagtggttgtgattttcttagaaagttgagggtatttcacgtaaggatgagctcccgcaagaagaggtacttatagcaaggggactctcaaatccattacctcaattaagaaatgaagaaattgaattagtctcaaagtttcttttaaactctaaaacagaatgagataatgtattttacgttgtctataatcattaaatcactccctgtgtaatttgtgagaaccatctagtagctcgaaataaaataatgttgcatcttttctcccttgccatatactttgtgataaatccttatctcattttcagtacttcattaaacattgcagaaaaaaaaaaaaaaaaaaa

SEQ ID NO: 290883 - DNA, 1000 bp, Homo Sapiens; identical to SEQ ID NO: 223388

SEQ ID NO: 290884 - DNA, 1000 bp, Homo Sapiens; identical to SEQ ID NO: 223389

SEQ ID NO: 290885 - DNA, 1000 bp, Homo Sapiens; identical to SEQ ID NO: 118048

SEQ ID NO: 290886 - DNA, 1000 bp, Homo Sapiens
agttgcacctccagattcctacctgctagagctccttgtgtagtttaatcttctggtcccaaaaggaatgtaataaaatagtaaagatgggttctcttctggtacttgttactcacttattcctattatgttttccatcacctttgatttttaaaaattcaacctttagttagttcaagaaatgccttatgcatcgaaggcagatactgagaaaatcaatggtatttcattctaaatgttatagaacattatcactcttttatttataaagcttatttttcaaaatgccatcacattgtctcatttgagttttcaaaaccttgcgaaatggtcaggaattatcaccttaatggtcaggaattaccaccttgattatacatatgaaatctgtggttcagtcaagcatctgatgtgattagtcagttgcagaggtgattgattcttgctagttattctaaccgtatgctctatcccagaaaatgtttgaaggtttagtaaaacagttttaagttgtctaaccttaaagccaatacatattttagaaattatgaagtccactgtacagatcaagaaactggtacttaggaggactaaacagcttagcttagctgttgttgtggcataaccatgaccagaaccagactgctcataaaatggctttttcagttatttcaaaattgtcagtatagtataaattaactaattataatatttttaaatagaagtgggacagagaggggaccaaacataaaatgtaatgaattatttctgttcctttattttgtctttttttaaaaagatttcctcgatcatttcaaagatgcctaaagcagatttctatgttctggaaaaaacaggactttccattcagaactcatctctgtttccaatactgttacattttcatatcatggaagccatgctgtatgccctattaaataaaacttttgctcaggatgggcagcatcagcaaaaaaaaaaaaaaaaaaaaaaaaaaaaa

SEQ ID NO: 290887 - DNA, 1000 bp, Homo Sapiens
aagatatcattgataactggaagtatcataaaaccaaagtggcttcatattggctcataaaattggactctgtaaaacaacgaaaagttttggacatagtgaaaacaagtattcgtacagttcttccacgcatctggaaggtgcctgatgttgaagaagtaaatttatatcggattttcaaccgggtttttaatcgcttactctggagtcgtggccaagggctgtggaactgtttctgtgattcaggttacgtgtaaaatcttagaaaaatataatccaagtgtttgattatatccaagaatccaaggccttgattcttgcctttgcctgtcaacattcccaataataaaacaaactttttaaaatcaaattagatcctcttgggagagtatattcaataaaagcccggaggtggtgactcctttgcagctccagtgttgccagcgcctagtggagctttgtaaacagtgcctgctagtggtttacaaatatgcaactgacaaaagaggatcactttcaggcattggtcctgactggggtaattccagggactgaacaaggacagcaatcacgaacctaaaggtgataaaacatacttggaaatgaagttgtttgacttatataccttcactttcaaaagtccagagcaagagcatccaaaaatgtggtatttactaccagggagcacccaattcttcttgagaacaccaacctacaacttgaagtacaattcacctggaatgactcgctccaatgttttgtttacatccagatatggccatctgtgaaacagaagggaagatcgccattggttatacataacagcaattcatttttttcctctgaagttgaacatgcaaagaacatgaccattaagtgctgttttatgtatataagacatatatatgtgtgaaaatatatgcacatatgcaccctaataacatatatttattatattaaatgatatatgaaagaagaattagcagaaaaaaaaaaaaaa

SEQ ID NO: 290888 - DNA, 1000 bp, Homo Sapiens
gaatcaaaaactacaaagtcatcactgttgttacaagaaatagcctgcagaagtaagcctataacaaaacaatatcaaggacttgagagattctttatttttgatacaaatgaaagactcaacttacttccttctcatcgtttagaatgcaacaattccagtactaggattacacttgcagaagacagagaatggattccagaccatagcttaagtgaatatgctgataatgcaattgtcttgggtgttctgcagggtgctcagagtccatcatcaagtagaaaacagcaaaagatgggtcagaaatcacagagaccttcaacagcaaattttccactttccaactctgttaaagaaagctccagttgcctttcatcctctcatcctcgatcaagaagtgcagctgctcaatcatcatctagagctgcttctgaaatttcagaaattgaatatattgatattactgaccagaatgagctttccttagatgacactactgatcaacatactttagacaatttggaaaaagaattacaagtgctgagatctcttgcagatacttcagaaaagctttacagcttaacctcagaagagttcccagatttcagcagccaatcactgaatataagtcagatttccacagatttccttaagacctcacatgtgaggggtccctgtggagttgaggaattgagctgttctggaagagataccaaaattcagtctttgctgtcactttctgagagcagtacagatgaggaggaggaagattttctcaacaagcaacatgtcatcacactaccgtggtcaaagagtacttaaagattatttgttcattactgtttccattttgtacccagagtaaagcaaacaactgagaaaagtaaccaagtgattacctatccaagtgctggagattttgattactaatgtctttgatgtttcaaggctacaaactaataaaagtaaaattataagttcaaaaaaaaaaaaaaaaaaa

SEQ ID NO: 290889 - DNA, 1000 bp, Homo Sapiens; identical to SEQ ID NO: 223391

SEQ ID NO: 290890 - DNA, 1000 bp, Homo Sapiens
cccaatgctcaagcctcatgcaacatcaaaaagttcacactggagaaaagccttttaagtgcaatgaatgtgggagattctttagagagaattccaccctagttagacatcagagggttcacactggagcaaagccttatgagtgcagggaatgtgggaaattttttagccaaagctcaaccctcatgcaacatcgaaaagttcacattggagaaaagccttttaagtgcaatgaatgtgggagattgtttagagagaattccagccttgttaaacatcagagggttcacactggagcaaagccttatgagtgcagggaatgtgggaagttttttcgccacaactccagtctttttaaacatcgaaggattcacactggagaaatgcagtgattgtgtgaaatcctttagccagcgtttcaacctcattcaacaccagaaagttcacagtggaaaaaatcttgaaggtaacagatggaaatccgttagccacacctccagtctcattcaacactggacagtttacaatgtggacaatgtagtgaatatggaaaaaggtttcagccaaaggcctaaccctattcaacaccagaaagtttagaatggagaaaggccttagggtgacaggttatgtactgtctctgaatcaatatgacctcacttaaaacagaaactctgaggatggcctttatgagggagctggcaattgaacatcattcatctaaatatgcacactggaggcaagatgagaattcctgacagattgtccttcctgagaagacagccctctgccttggagctccagagagagggagccctgtattcttggctgtacccgtcgaatggagttttgatctcgctgagtttggagttgggggaggaaaggagtggtcttggttcaaatgtgactcacttttgctgttcttgtgaatgttagatcttctttaataaatatttatttcccatacacccttatgaccattaaaaaaaaaaaaaaaaaa

SEQ ID NO: 290891 - DNA, 1000 bp, Homo Sapiens; identical to SEQ ID NO: 223392

SEQ ID NO: 290892 - DNA, 1000 bp, Homo Sapiens; identical to SEQ ID NO: 118050

SEQ ID NO: 290893 - DNA, 1000 bp, Homo Sapiens
cgctcttgtcgccttggcaggacttgactctgcctccctggccagccttgcaagaggactggggtctcctgccctctctgttgagccaggaatcccaagtgaggggttgccctgaggtctgactcttggggcaagcccgccacccactgtgggactttctggtgggctcctcagctcccaccccaggctggggcccagattgtgaggtctgtgtgcatgtgtgtgtgtatgtgtgtgtgcatgcgtgtgtgtgttgtggggatctggcctggcccttggggatggggctgctggggactgccccccttcccgccgtggccaggcgctctgtgtgctgtgtgtgccccaggctctgttgaccccgtccaggaactaacttacccagcttggtctctcctgagtcctccaccctggcctgggattggccagggagcagggcgggcattgggaccagtgtggagcctgagggtgcctgccctgctctggagggagggccaggagctgccacacccccaagtcctctcagggcccaccctcctttttcagcctctgcataaggcccctgggtacactgcagaagccccatccttcccgcctccgggcataaggcccctgaccacacttcagaagccccatcccccctgccaccgggcgatccctgctgtgagccgaagctctccctgccccgccctggccatgtgatcgtgttggtgacagaccctgatgtgctggtgctgtgtccccaaaaccggggccctccacagaggccccttcccagcgacactacctggggctcaggcctggacccccccagttcacggttgctcctgggagctgcccctcccgtcacatcagaaccttggaagctgctgctgctgcttacagaattatatttttttcttttgaagagttttaagaagttgtaactttttgtgtcttgtcatgtcagagaataaataaatattctaagtagaaaaaaaaaaaaaaaaaaaaaaaaaaa

SEQ ID NO: 290894 - DNA, 1000 bp, Homo Sapiens; identical to SEQ ID NO: 118051

SEQ ID NO: 290895 - DNA, 1000 bp, Homo Sapiens; identical to SEQ ID NO: 118052

SEQ ID NO: 290896 - DNA, 1000 bp, Homo Sapiens; identical to SEQ ID NO: 223394

SEQ ID NO: 290897 - DNA, 1000 bp, Homo Sapiens
tgagtttggggatgggatgctctgcctgctgatgtggccctgacaggcagccgttaccgttccattgcggttgaacgtggccttttcccacagtgcttccttctcactgcgcagcaaagttcgtcccctgtggcaagatagatgtggttgggccatcgtgggttccctgagcccagccagcctgggacctcccaaagtgggtggcttaccagaccacccttaaatgactttcatctggtttcctctttcaccaaaatatactcgtattttttatatttcttccatgtggctggctatattccaagaaaagcattttaaattatttcattgtatttttttctttttttccctcatttgaatcagaacttttatataaaacccaaacactgatgtttacacagaatttcatattctgcaaaagggattttttgatccaatcatgactgtagtcttccatgcttgacaaattggatgtagacaacattacttaaaacttctataaatccctacaattaggatatttatttaaccttgaatattcaagaacattctcccaaatctaaatggctactgtgcattcttgagctttttctgctaagcacaaaatgaacgcaaagctaaatgcatatttttaagtattattcacattttttgttacagaatctattggatctttggctggaaaactagaatttatagcagtttattaatgataccttaaattactcaggacttaatgtagcattgcacttctgtgtacagtaaaactgctttgttttactaaagagaaaaatgtgagtggaaaaaatatgtatgtggtatatactcaaatgtatataattctatctatagatttatatatgtatacattctgtacagtagttccatcaaaatatgtaataattcacaccaattttattaaatgtatttgctttttcaaaatttaaattgagctgctatcaatattaaatgaagttatggcatctaaaaaaaaaaaaaa

SEQ ID NO: 290898 - DNA, 1000 bp, Homo Sapiens; identical to SEQ ID NO: 118053

SEQ ID NO: 290899 - DNA, 1000 bp, Homo Sapiens
agtgcgggcgagccttcgccgagcgtgccagcctcacgaagcatagccgggtgcactcgggggagcgccccttccactgtaacgcatgtgggaaatcctttgtggtgtcgtcgagcctgaggaagcacgagcggacccatcgaagcagtgaggccgcgggtgtgccccctgcacaggagctggtggtggggttggcgctgcctgtgggcgtggcaggtgagagttcagccgccccggcagcaggggcggggctgggggaccctccagcagggctgctagggctgcccccggagtcaggtggtgtgatggccacacagtggcaggtggtgggcatgacggtggagcatgtggaatgccaagatgctggtgtccgggaggctcctggtcccttggaaggggcaggcgaggcggggggtgaggaggctgacgagaagcccccccagtttgtgtgccgagagtgcaaggagaccttctccacaatgacgctgctgcgtcggcacgagcgctcacacccggagctccggcccttcccctgcacccagtgcggcaagagcttctctgaccgggctgggctgcgcaaacacagccgcactcacagctcagtgcgcccctacacctgcccccattgtcccaaggccttcttgagtgccagcgacttgcgcaagcatgaacgcacccaccctgtgcccatggggacccccacacccctggagcccctggtggctttgctaggaatgcctgaagaggggccggcctgaagcccatgaccccccagcaccacactccgggagcccagcccccatcgggggcttcctgtacctccttttgcctggctctgctctttagactccagatccctacccctcagcaactagctcccctgtcggccagctaagagagctgggacagtggaggctggcagaagctgagacgtgactgtctaggagtaacactcattaaagctttcattttggcaaaaaaaaaaaaaaaaaaaaaaaaa

SEQ ID NO: 290900 - DNA, 1000 bp, Homo Sapiens; identical to SEQ ID NO: 223395

SEQ ID NO: 290901 - DNA, 1000 bp, Homo Sapiens; identical to SEQ ID NO: 223396

SEQ ID NO: 290902 - DNA, 1000 bp, Homo Sapiens
catgttcttcggccaagaccagagcttccacgagctcttctgtgtgggcatccagctgttgaataagacctggaaggagatgcgggctacacaggaggacttcgacaaggtcatgcaggtggtgcgggagcagctggcccgcactctggccctgaagcccacttccctggagctcttccgaaccaaggtgaatgcgctcacttatggggaggtgctgcggctgcggcagactgaacggctgcaccaggagggcacactggctccccctatactggagctgcgggagaagctgaagccagagctcatgggcctgatccgccagcagcgcttgctccgcctctgtgaggggacgctcttccgcaagatcagcagccggcggcgccaggataagctgtggttctgctgcctgtcccccaaccacaagctgctgcagtacggagacatggaggagggcgccagcccgcctaccctggagagtctgcccgagcaactccctgtggccgacatgagggcactcctgacaggcaaggactgcccccatgtccgggagaagggctccgggaagcagaacaaggacctctatgagttggccttctcaatcagctatgaccgtggggaggaggaagcgtacctcaacttcattgccccctccaagcgggagttctacctgtggacagatgggctcagtgccttgctgggcagtcccatgggcagcgagcagacacggctggacctggagcagctgctgaccatggagaccaagctgcgtctgctggagctggagaacgtgcccatccccgagcggccaccccctgtgcccccaccccccaccaacttcaacttctgctatgactgcagcatcgctgaaccttgacagtgtggctggccatgggccacagctgcggccactgcagcagccatgaagggcagtgggtagaggagtgcaggcaccctgaccagcagagattgctgcagaaataaagtctgcttggctcttggg

SEQ ID NO: 290903 - DNA, 1000 bp, Homo Sapiens
tgaaacactctctgcaccatttttaaaacttgagaatagttttagtatctctgatattttttgccagaatcatcatgtcatgtatgaatgtgttatccctatctaaggaaaaaggtgaatatgtttttgtatgaatgtttaactggaaatgtccatggacttggctaatttatatttactttttattgtacatagatttctaatatttttcattcctgtatcatttaaacttccttcatttgagtaaattcactaaatatttctatttttttgcttttttaaattctgattttatatgaattctaattctttttcactacatatgttttaaagagttacatacagtgatttagaatggtttacagttaatgctgatcttgtattttaaattccaacactttgtgtcactacctcctctaatggttagtatgatatgctagcagactgtatgaggtctttttttaaaataccacttttagtgtcagtgaaccaaattctggaatgtcttaacagctctaaatcttacttgtcttgaaaatgattggggtttaataccactgctggtggttcacacatcatcccatccttaatatgcctgacaggcatctgagcaaaggtttttagtaattgaatttctctgcagtagtccttcaagcacttgaatgtaaacctttagcatttattcgtttaatgactactgatacgaatctcaagcagatttcttgctcttaaaagttatgtttcactgagttctggttttgtgtagctatattttatatagctagatattcctcacagtgaacatgaattgtaataattggttatttccttaagtctttagattataataatttcagattattgcacgtctgtgatttgagaggtgagttatttaagaggccagttttcaggacatgggaatttgaattgtaaacctgttatctctgtgaaacttttaacatgataaaatataacctttctttgtgcttaaaaaaaaaaa

SEQ ID NO: 290904 - DNA, 1000 bp, Homo Sapiens; identical to SEQ ID NO: 118054

SEQ ID NO: 290905 - DNA, 1000 bp, Homo Sapiens
actgtttgtttaacgaaggctcgaagattatcttccgggtggccctgaccttaattaagcagcaccaggagttgattttggaagccaccagcgttccagacatttgcgataagtttaagcagataaccaaagggagcttcgtgatggagtgtcacacgtttatgcaggtgtgtggggctgcacgtggctcagtcccctcccagggggccccgcctcacctgcagcccgggggctgctctgaccacccggagggtgcacaggacgggcaccagtgggcatagggcacaggatgagcctccagctctgtcctgcatctgccccctgcgcctggcctccgagggctttcctgtctatggcggccctgtcttcttggccctggcactgcggacgctgctcctggtcctaatggctgtactcatctgctgtgtgtggtgccagaagtgtggcttcccgaggcccggcctccccactgggtcctggacctggcgcaggccgtatagactcaggtcctgatgagggcgttgtgggagctgtacctgacaggccttctgaggaagccaagacgccaggagaggctcaggcctgggagtcagtagtttcctaagagggagtggaggctcggggccactctgggtgcagcatggcaaacgtgggcggtatttcagcagctgggccttcatcaaagagaagaccatgttggccgggcgcggtggctcacgcctgcagtcccagcactttgggaggccaaggcgtgtggatcacctgaggtcaggagttcaagaccagcctggccaacacggtgaaaccccgtctctactaaaaaatacaaaaattagccaggtgtggtggctcacgcttatgtagtcccagttactcgggaggctgaggcacgagaatcacttgaacctgggaggcggaggttgcagtgagccgagatcgcgccactgcactccagcctgggcaacagagtgagactctgtctcaaaaaaaaaaaaaaaaa

SEQ ID NO: 290906 - DNA, 1000 bp, Homo Sapiens; identical to SEQ ID NO: 223398

SEQ ID NO: 290907 - DNA, 1000 bp, Homo Sapiens; identical to SEQ ID NO: 118056

SEQ ID NO: 290908 - DNA, 1000 bp, Homo Sapiens; identical to SEQ ID NO: 118057

SEQ ID NO: 290909 - DNA, 1000 bp, Homo Sapiens
agctaatcgagctggatattagccttcgaccatcaaattttcgagattgtggacaatggtttagacacttgttatatgctgtgaccaagcttcctcagatcactgagataggaatgaaaagatggattctcccagcttcacaggaggaagaactagaatgctttgaccaagaaaaaaaaaagaagcattcactttgaccatggtgggtttcagtaaactgatttcccatgtcctactaagctacaaaccattctccaaaggaaaagaacatgaacgaattccagagtcatgaactgaatttcaacttctgggccatttaatgggacttatattacaagagctttgtaaatatatatatatattacatatatatatgtaatatacatatatacacatatatataatatacatatataatacacatatatatgtaaatatatatataatatctaatatgagcatgccattattctctgtctatgaaacaaaaatggcatttttcaatggatttgttttggatatataattagttcatttgctgtttagaagccttgccaaaagtgtttagattttggtactgcaactgctttcctcttgcccagaaatgttttgcctcttcttttcctacaagttaaatgttctaaatataaaggggtatgtgtgtgtgtgtgtaattctaatgtgaaaggcactagctgtctaatagtttcatgtatcattactattactatatgtatcttaatgtagtctatgtaggtttttatcagaaagtgtacctttctatggtttattattttatattctggtgccttttatctcagatataaaccatgaacagtaatgatagtcactgacatataaatcttagtaaaaagtgattaaaaatctaaaactcagtatgaaaaacatatcttgttagaataaattaaaaccttttattgtttaaaaaattgttaaaaaaaaaaaaaaaaaaaaaaaaaaaaaaaaaaaaaaaaaaaaa

SEQ ID NO: 290910 - DNA, 1000 bp, Homo Sapiens; identical to SEQ ID NO: 223403

SEQ ID NO: 290911 - DNA, 1000 bp, Homo Sapiens; identical to SEQ ID NO: 118058

SEQ ID NO: 290912 - DNA, 1000 bp, Homo Sapiens
atcagagaattcattcttgagacaattcttacaaatacggtgactgtggcaaactcctgatgagtttaagcattaacagacatcagagttcaaatcctgtgaatatactatgtatgacagaagctttatccaggtctcagagctcaataggcatcaaaagatgcatctttgatgaagtcacacaaacgtaacatgcatgctgagactgttactcctggaccacaactgtaggtgaggattcataggaagagtagaactcagtctctagtttcctcataaccctctgatattatatacttcagcataatcagaagtccaaatgtgttaaaactcattacatgatacatatcaaaggttgtaggatgtttggaaatggccaattactttcagcttataaaatgttttgttgaagtatttaagatttattgaaaaggctactatttataacttccaaccagaactttgcaatgtgctgattttatacatgattatatgcctaacatggtgttgttcgggaaagaatcaaaggatggaagggctcactcacttcattaggtgaggattatttctctccaagctcctgaagaagaaagactctgccttttaaaattaaatatagtctgaattagagagcacttggaaagggcagaggatgatgaactatgatgtcacttatcatccttattgcactgcaggtgcccttcttctgacagaagagcactgtgggtatgggaagaaattctctactggccgggcacagtggctcacgcctgtaatgccagcaccttggcctgccaaagtgctgggattacgggctggagccaccgtgcccggccggccgagcataagaagtttaatcaaagtaaccagaatcccatgtttgttactaggatttacattaactgctggaatcacattttgctactatttaagaatgcatcatagatttaatgttttaactaataaaatttgatgtattttataaaaaaaaaaaaaaaaa

SEQ ID NO: 290913 - DNA, 1000 bp, Homo Sapiens; identical to SEQ ID NO: 223406

SEQ ID NO: 290914 - DNA, 1000 bp, Homo Sapiens; identical to SEQ ID NO: 223407

SEQ ID NO: 290915 - DNA, 1000 bp, Homo Sapiens; identical to SEQ ID NO: 223408

SEQ ID NO: 290916 - DNA, 1000 bp, Homo Sapiens; identical to SEQ ID NO: 118059

SEQ ID NO: 290917 - DNA, 1000 bp, Homo Sapiens
atacctgctgcagagatttcatgttcagaatttaggccacccgtattggcttaccttggctccaatgtatatttggtttataattttcttcatccagcctcacaaagaggagagatttcttttccctgtgtatccacttatatgtctctgtggcgctgtggctctctctgcacttcagcacagttttctgtacttccagaaatgttaccactttgtgtttcaacgatatcgcctggagcactatactgtgacatcgaattggctggcattaggaactgtcttcctgtttgggctcttgtcattttctcgctctgtggcactgttcagaggatatcacgggccccttgatttgtatccagaattttaccgaattgctacagacccaaccatccacactgtcccagaaggcagacctgtgaatgtctgtgtgggaaaagagtggtatcgatttcccagcagcttccttcttcctgacaattggcagcttcagttcattccatcagagttcagaggtcagttaccaaaaccttttgcagaaggacctctggccacccggattgttcctactgacatgaatgaccagaatctagaagagccatccagatatattgatatcagtaaatgccattatttagtggatttggacaccatgagagaaacaccccgggagccaaaatattcatccaataaagaagaatggatcagcttggcctatagaccattccttgatgcttctagatcttcaaagctgctgcgggcattctatgtccccttcctgtcagatcagtatacagtgtacgtaaactacaccatcctcaaaccccggaaagcaaagcaaatcaggaagaaaagtggaggttagcaacacacctgtggccccaaaggacaaccatcttgttaactattgattccagtgacctgactccctgcaagtcatcgcctgtaacatttgtaataaaggtcttctgacatgaaaaaaaaaaaaaaaaaaaaaaaaaaa

SEQ ID NO: 290918 - DNA, 1000 bp, Homo Sapiens
tggggtgcggcccttcccctgtccacaatgcgacaaggcctatggcacccagcgagacctcaaagagcaccaggtggtacattcaggtgcccggccctttgcttgtgaccagtgtggcaaggcctttgcccgccggccctccctgcggctgcatcgcaagacccaccaggtgccagctgcccctgccccttgcccatgccctgtgtgtgggcggcccctggccaaccagggctccctgcggaaccatatgaggctccatacaggagaaaagcctttcctgtgcccgcactgtggccgggcgtttcgtcagcggggcaacctgcgtgggcatttgcggctccacaccggggagcgtccttaccgctgcccacactgtgccgatgccttcccccagctgcctgaactgcggcgccatctcatctcacacaccggggaggcccacttgtgcccggtgtgtggcaaggccctccgagacccacacacgctccgagctcacgagcgtctgcactccggagagaggccctttccctgtccccagtgtggccgtgcttacacgctggccaccaagctgcggcgccacctcaaatctcacttggaggacaagccctaccgctgccccacctgtggcatgggctacaccctcccgcagagcctcaggcggcatcagctcagtcaccggcctgaggcaccctgcagcccaccctctgtgccttctgctgcttctgagcccactgtggtgctcctgcaggctgagccacaactgctggacacacacagagaggaggaagtctcccccgccagggatgttgttgaggtcaccatttcagaaagccaggagaagtgctttgtggtgccagaggagccagatgccgcccccagcctggtgctaatccataaggacatgggcctcggcgcctgggcagaggtggtggaggtggagatgggcacctgacagctttgccttttgctgacacagctccataaagactcgtgctttctc

SEQ ID NO: 290919 - DNA, 1000 bp, Homo Sapiens; identical to SEQ ID NO: 118060

SEQ ID NO: 290920 - DNA, 1000 bp, Homo Sapiens
taaaattcacaaaattcagtaaaccacacaaatcaggtaagtgttctatgagattagctggctatgagaaacataatgatgtttctttttcaatttaaataagcctttctacatagccagcatcagtgatctcagaaaataaattgctaataatgatgacatggcattatgcttagaaaagtttgctgtatttccatagacctcatctagatgtcatggcctacatttctgccatcactcaaccaatacttttttctgttttcttgatgataaaaagacctttctcatgattgccatcaaataacaaaagaaactattttttttctcacatagagaacatgtcagtaagatattcaaggtgaacagatatttttgggattagtaactatttgaaatatgtggtgataattactgagtttataaaatttatttgatagtacacttaaagaagatttatatgtttattctttaaaaatgatgaatactcataattcttatctctataatcaaaagtataatttactgtagaaaaataaagagatgcttgttctgaaagtaagatcagtgaactgcttttcagtctcaatctttgagaattgtaaattcatcaaataattgcttacatagtaaaaatttaaggtattagaaaacctgcataacaaatagtattatatattaaatattttgatatgtaaagctctacacaaagctaaatatagtgtaataatgtttacactagtaagcaaatatgttaatcttctcatttttttactgtcatataatcttagtgatatgcctattaatagttttaaataaataaattggcttatctggctttttgaaaattttgaaattcttacagatgttgattaggtatatctacaaattaatttcaattttaaaatgatgatataaaaataaatataagtatttttcttgtgtatgtatacaataaatataaataaaattgtttactgttttgaaagtttcttaagtttta

SEQ ID NO: 290921 - DNA, 1000 bp, Homo Sapiens; identical to SEQ ID NO: 223410

SEQ ID NO: 290922 - DNA, 1000 bp, Homo Sapiens; identical to SEQ ID NO: 118061

SEQ ID NO: 290923 - DNA, 1000 bp, Homo Sapiens
ttctgccaatctatgcttatggccatgcagtggggaagtcagtcactggaggttatgtctatcgtggttgtgaatccccaaatctcaatggcctgtatatctttggagacttcatgagtggtcgacttatggctttgcaggaagatagaaaaaacaagaaatggaagaagcaggatctttgcctgggcagcaccacgtcctgtgccttcccagggctgatcagcacccatagcaagttcatcatctcctttgctgaagatgaagcaggggagctgtatttcctggcgacctcttacccaagtgcctatgcaccacgtggatctatttacaagtttgttgacccctcaaggcgagcacccccaggcaagtgcaaatacaagccagtgcccgtgagaaccaagagtaagcggatcccgttcagaccactcgccaagacagtcttggacttgctaaaggaacaatcagagaaagctgctagaaaatcttccagtgcaaccttagcttctggcccagcccagggtttgtctgagaaaggctcctccaagaagctggcttctcctacaagcagcaagaatacattgcgagggcctggtacaaagaagaaagccagagtggggccccacgtccgccagggcaagaggaggaagagcctgaaaagccacagtggcaggatgaggccatcagcagagcagaagcgagctggcagaagtctcccttgacctattggtcaaggtggccgacagggtgacgtgagagaggagagccacctcatcaaatgaaagtcactgctgaataaagaccttagaagtctgggaagccagggtagaggtggggcagggcggttttcctctccctgggaaatcttgctgtctactgaataaataaatgcaccttctctgtatgcagtgcttctgtgggagaccatatcccagattgctggtgcacctgggttatggtaagcactagtccatgagcctgcttggaatcacaaaaaaaaaaa

SEQ ID NO: 290924 - DNA, 1000 bp, Homo Sapiens; identical to SEQ ID NO: 118062

SEQ ID NO: 290925 - DNA, 1000 bp, Homo Sapiens; identical to SEQ ID NO: 223412

SEQ ID NO: 290926 - DNA, 1000 bp, Homo Sapiens
tggatctgaggggcctgcttctagtgagttattacctttcctaagaagccaggtatcgcacttcagcagacagtgtgctgacacttggtcttctcctgaaattcccaaattcactgaatggtaccatgccgatctctgagaagttatgttgcaccactgtgaaggtctagatgcaagcttggctccctcagaaaggcgcttcccttttgcatggctgaggatccttgaaggaacctggtcagtctccggttcagcttccgacaccagagtggaacccagtaagcaccatcaggaatgaatttcactacaagtgtggataactctgattttcaaaggagtagttacttgcaaattacatccttgctgaattcaggaggttaaggaaacgatccatgcaagagaggcccaatctcaactgtagactgtgtcccagtaagagagtcacagcttcaggtgtttgctgaatccaggtctgagatcacaatcccacctgaggacaggatccgcatatgagagtcgcacattggtataattgatttgtggtagagctgagattagaatccagattcctagtctagtatccttcccactgtaccacattatctcttttcagaggggaaaaaggagcagctcttaagaaacagaatactaagggcccccattactgtgtggccctgggcatcctcagtttcctcatttggtaaatggggataatggtaccgacctcttaggcttggtgtgaggatgaaatgagatagggaatataaagcaagcagatagtggctggcacatagtacatgcaatatgtttgaaactagttaaggaattataaaaacaaatgagttcttccttctgctcaaaaatattgaatttcttgtccttgtgctctgtgaaacattgaacagccccatttagagaaacaaattctctgccctcatagaatcctaattgtttctgtatgtgtctggtgttttgcacatgcaaaaaaaaaaaaaaaaaa

SEQ ID NO: 290927 - DNA, 1000 bp, Homo Sapiens; identical to SEQ ID NO: 118064

SEQ ID NO: 290928 - DNA, 1000 bp, Homo Sapiens
catctgcaacagtcttatattgattttggaaatattcctgacacaaccccagagagaaaggcttggagggaaacaaatgttggacaaaatacaaccagattcacatagcttatcctatggaactttgcctgatggaagtgactcaacaaagagccaaagtggagagaagaaagaggtctaaatgctgagaaggatggctgttggcctgttattcgataccacctttttaaaaaattgcacatgttcaatttgtgtcagcagctcttttataagctaacatgtgctagcattcatttcagtcctttcccccacctcagcgtctatggacaatcggggacttcctaagctctgacagtctaatatttccatggaatgtgatttggagtgttccccacaccctggacctctccctagtgattatctagccagctacaccttactcagagcccggctgctctagcaggaatgttgcacagaaacatacatttgcggtttggccacaggtcgcataggtggcttctcccacgggtagtgtcagttgcttcactttaaaaagtcacttcagccccacaacctcactcccaaaagaaaggtttgagagcgctcattttttttctaagacaccttttataagcctccctataaaaatctcacctttcaagtactaagttagaattgcaagtcatcttttctgaaaactaatgctatcaaagtcctcctttgaaaattaagggtctctttaaaattagaatttataaatggcattcagtgatagtgtacaccaaaattaaaagaccttgactggtgggctttttacgtgtaaggaagaggaagtttaagaagtaggactctgcttgtttcagtagcccatgtactaaaataggaacaatgcagagattagcacagcccctgcacaaggctgacacataaattcatgaagcgttagagacaaaaagtaggactaatgtttgtttattttttaataaaaatctagaatggt

SEQ ID NO: 290929 - DNA, 1000 bp, Homo Sapiens
gcggcacgtgttcacctgtggcagaagaggcatcaaggtgtggagcctgactggacaggtggctgaggacaggttccctgagagccacctgcctatacagacccctggggccttcctgcgcacctgcctgctgtcctcaaacagcaggagcctgctcaccggtggctacaacctggccagcgtgagcgtgtgggacctggcggcgccctccctgcatgtgaaggagcagttgccctgtgcaggtctcaactgccaggccctggatgccaacctggatgccaacctggccttcgccagcttcaccagtggtgtggtcaggatctgggacctgcgggatcagagtgtggtcagggacctcaagggttatcctgatggagtcaagagtatcgtggtcaagggctacaacatctggactgggggtccggatgcctgtctgcggtgctgggaccagaggaccatcatgaaacctctggagtaccaattcaagtctcagataatgagcctgtcccacagcccccaggaggactgggtgctgctgggcatggccaatggccagcagtggctgcaaagcaccagcgggagccagcggcacatggtggggcaaaaagacagcgtcatcctgagcgtcaagttctccccctttggccagtggtgggcaagcgttggaatggacgacttccttggcgtctacagcatgccggcggggacaaaagtgttcgaggtgcctgagatgtctccagtcacgtgctgtgacgtctcttccaacaaccgcctcgttgtcacaggctccggggagcacgcctccgtgtaccagatcacctactgaggggcctcgctgctgtcatcccactccggctcctcttttcatccccccccttccccccccccaacaagggggacatggtggagggaagcgggaaggctcttctgtggcatcgcacgatctagtctgtggtgtagactggtcgccatcacgtgtaataaagcacccgggaaaggc

SEQ ID NO: 290930 - DNA, 1000 bp, Homo Sapiens
tatggctgtgaccagcagtgaacatgaaaagaacttatttcatgccttctccaaactatattgtttctttgctaagtccagacctgctttttctacatttataggttttctattttaatcgccatgcaaaattctttatcatactcaatcattttggtttatcttcctgacttcttacctttaacatccctgttaaagattacactgttgttgtttcaaaaaaaaaaaaaaaaaaaccttaattggcaaaacattaagggacttgaatagaattacacttatctttttgtgctgatttatgtcaatccatcattctggttattgatggaagcaaattgcttcctatgttctctaaaccttatgtcccttccatactccatgagtaccacactgggagaaaacaaaagcaaaaagattgtgggaaaagtatagccattatctttgaggaaatgtgtaccaaggcacaatcattaaaaggagttggaggcatcatttggttgacactgttgtcattcttgttctgatcattttggaccttgaagaaattggtgattctctcctagaattagacaaacaaagtgtgtttggaaataatgattgttttcctgccttaaaaaatatattaacagaaagcttttataacaggctgtttccctctggacaggtattaattctgagtaagaattttcagtgactacataaggatttgtgtaacttatgaaggaagagtccatttctaatcaaataattcacctgttttactagcttatagtgatctgatttcagaattttcctgtatcttttttacatacatcagaaaaagaaatgtttactatatttttggttccatttatgattgtattaagcatttgactataaggaaaactaacaattaaatcaattagaaaagcaacataaaattaaatgatatttaggaaatcagttatatgtgagcttgggtattcaaatgtcacaaataaaaagcatataaccattaaaa

SEQ ID NO: 290931 - DNA, 1000 bp, Homo Sapiens; identical to SEQ ID NO: 223414

SEQ ID NO: 290932 - DNA, 1000 bp, Homo Sapiens
tacatgtacattcttatacaatgtctaaatgggttagaaaattattatacctatagaagcgaaacttggaaattaatagaatcacttaaaccaaaatctttataagacacaattctattgattttaaagcttctgctttccaggctctgttttccagagtttataattacgtagtttttagtagatgaaaataatggattcttgtacctaacattttatcctcttagatctaagagccgaagctatagaactttgttagactatttggcaagcaaaatatatgacagtaaatatcagaattttatggtttgaccagcgcttatcacattcccaattcagtgagaaaaattcatctgggacacaacagggtactcttctctgtttgcccagaatcagctctggattttaagcccagacttcagtggacccagatagaaaatataaagtctctgatctataggccacatcaggatgttattttatgaagagttctagagcaaggttgcggaaatcggggtggagatggggagcagtgactcctccaaatattcattgctaacaggccattctatgcagtttgttttaacaaatcctgggttaaactgaggccacaggacatgatgggctgttctataaagcattctaagtggagaggagacgatagggcatatgaaattcactaaactctctggaaaaaaaatatgtatatattaaaaaccaagactggaatcagtgcaacagtgggaactaccttttacaagtatccattgcttcataaactccatttgtttggaccaatcccttaaacaaaagcaaggcaaattttacatggatttagagcctaggtcaggttattaggattataaattttccactggtatgtcattgtgattatctttgtttttgtctttctgaaagattggattttctataacaccttgtgtaagaaaataaaaaacttgatctaactgaaaaaaaaaaaaaaaaaaaaaaaaaaaaa

SEQ ID NO: 290933 - DNA, 1000 bp, Homo Sapiens; identical to SEQ ID NO: 223415

SEQ ID NO: 290934 - DNA, 1000 bp, Homo Sapiens
gatgtcaaagaagttctgttaactgatgggaatgaaaaggccatcagaaatgtgcaagacatcatcacaaggaatcagaaggctggtgtgtttaagacccagaaaatatcaagctgcgttttacgatgggataatgagacagatgtctctcaactggaaggacattttgacattgttatgtgtgctgactgcctgtttctggaccagtacagagccagccttgttgatgcaataaagagattactccagcccagggggaaagcgatggtatttgccccacgccgagggaatactttaaaccagttttgcaatctagctgaaaaagctggtttctgtatccaaagacatgaaaattatgatgaacacatttcaaacttccactccaagttgaaaaaggaaaacccggacatatatgaagaaaaccttcattacccgcttctgcttattttgaccaaacatggatagaagattaagcttctcaaagacgaagaaacgtatcaagtgcatagggaatatttttacaaaaacggaaatctgtaaggggtataatcgcctgcctgcgccctttgcagcatttcacgtgtgggctatggactccacctgtcctcacccacgttattccccagctgccctctccagctccctccccgcctctttttacactctgcttgttgctcgtcctgccctaaacctttgtttgtctttaaatgtgtataagctgcctgtctgtgacttgaatttgactggtgaacaaactaaatatttttccctgtaattgagacagaatttcttttgatgatacccatccctccttcattttttttttttttttggtctttgttctgttttggtggtggtagtttttaatcagtaaacccagcaaatatcatgattctttcctggttagaaaaataaataaagtgtatctttttatctccctcccaaaaaaaaaaaaaaaaaaaaaaaaaaaaaaaaaaaaaaaaaaaaaaaaaaaaaaaaa

SEQ ID NO: 290935 - DNA, 1000 bp, Homo Sapiens; identical to SEQ ID NO: 223416

SEQ ID NO: 290936 - DNA, 1000 bp, Homo Sapiens
gatgccctgcaccaagccttggctgcctgccagctgttgcggagacagccctcggcaccagcctctgcagcagctgcgctcaccaaccccctcctcgtctcctgctgaggttactggcccaccctgtgggcaccctgctcagcctgactgcctttggaccagcctccatgatcagcccaaccactgacagctggtctgaccaccgtcacatcatcagaacttgagtctctgctggctccttccaaggttaagcccgagcccagagcctcccattgcagcacctggcagccaccccttcctcgggctcctccacattacctcgcagcccctgcattcctgccaccagagtccacattaaagccctgcagttgctggatcagcctgcacctgatgccgtatctttcccctgccctcagggcagagatgcccactttctgactgagtctgaccccaaatctcttccccagagtttcaggatctcctcccctcccagcactgtctccttcctcccactggcatgcctgctgcaacggagactgggcccaacctttgggatacctggtctgtaggaaagcactccacaccccaggaaatgttgatgactaggaaaggctgagggaattccaaggaaggaacaatcactgtaggctccctggtagaagctggccttgaaccagctctagaggacaggtaggatttagacaggtaaagaaaggagggaagggcatagaatctaaggtaatggcaagagcaaaggtgtggaaccagaggggggccccaggaatgcagtgcttggagcccctgctcctgaacacgcattaactcctgaactgcgagcccctcctcctgaactgcgtcatggggttgcaggaaggagtaggccaagatacccagtctcacctaacttagactgtcattagagagaaagatccattgccaaacagtgccatgggggtgaaaccagtgctaaatggaggtaaaataaagtttgtaagagccc

SEQ ID NO: 290937 - DNA, 1000 bp, Homo Sapiens; identical to SEQ ID NO: 223417

SEQ ID NO: 290938 - DNA, 1000 bp, Homo Sapiens
tcaaggcaaattccagaaaccattgcaccagactcagaatagctccaatatggtatctacactcctttcacaagactgaactttgtaacatgttaaggtacaaagccagaggactgtgctattcaaggactactgtaagtctattgtttctcaaaagacaatgagaaaaaaagaagagaatttgtatttcctgccgttttgtcataggtgagctcctttgtgcattttaagcacatgtaagtggttcagcacagtatgcctttttctgtgctttgaaaacttgatatgctcaagcttgtttgaatttattacatctaaccattttgcttgttccttgatttttataagcattcaattaagttagtattatgtcaagtaattttgagaaaatgtaacttgacattttttgcaagtaaaaaaaattgtttatttgtttaggcttagtaaaccagttcccaaacacagtcagactcttcccattgtcatctgattgcagagagaaagcacaccttatttccagggaaagctacaacaagcccaaggtcaaagtgtattattttttgtcttgttgttgtctattttctcccaatttttttttgaaattcagaggctcatatctgaaatagaattttagttcctctttcctttcctaaaattggggaagtacagcccatgctgacattattttcaggctattcttagatatacaagttgttaggccaggtgcaatggctcgcacctgtaatcccagcactttggggggctgaggcaggcagatcgcttgagctcaggagttcaagaccagcctggacaacatggcaaaaccctgtctctcccaagaatacaaaaattagccaggcatggtggcacacacctgtggtcccagctactcaggagactgaggtgggaggatcgcttgagcctcggaggcggaggttgcagtgagctgagattgtaccactgcgctccaaactgggtgacatggtgagaccttgtctcc

SEQ ID NO: 290939 - DNA, 1000 bp, Homo Sapiens; identical to SEQ ID NO: 118065

SEQ ID NO: 290940 - DNA, 1000 bp, Homo Sapiens; identical to SEQ ID NO: 118066

SEQ ID NO: 290941 - DNA, 1000 bp, Homo Sapiens; identical to SEQ ID NO: 223419

SEQ ID NO: 290942 - DNA, 1000 bp, Homo Sapiens; identical to SEQ ID NO: 223420

SEQ ID NO: 290943 - DNA, 1000 bp, Homo Sapiens
ggtctctgtcatagattgagtaatctcttcccttacctcaattccatctccacccatctctacatctgggcacagcaacccagagatggccaaaagcattcaagcctgggggaagatgtttgactattgctgctcttcaccagaacctcacacctctcctgggactggaacccttcagtgggtgtgtggccagttttggaggctggaatgatgggccagggtgtaggattcattctccatgtaaagtttcctttcatcctgcctagccatccccaaggtttatttccagaagaaaggaatatctctacttggatcaattctggtcatttcaagaggatggaggcctcaagtgtgggaacttcccctactccctggatgtgtgtacctagcacacttccttctcccacccctttttccagttggatttgtttttctgttctcttctgtcctgtcttatactgcaactgtgtctcctaggggacagatggccttctttgtcatcttcactctccacccccagagaggagtcagagccataactcaatcactcagcccctccaaagatagttgatgtgtgataatctcataatgttgagaaccctgatgagatacattgtcttcctctccctacaatgcctctggggccaaggcacccattcttcttgctatcctccatcccccttgaggcttccactttttttttttttagacataaagctgggcatcagcaactggcctgtggtgatgcaaagctgctttgctctgtatctggctggactgatctgtctcacaagaagccatgaggccatagggagaagctccctctccccttcatcttctgctccaaaggtggtagcaagaggagtacccagttaggggttggagcccccatataacatcttcctgtcagaagactgatggatctttttcattccaaccatctccctttcccccgatgaatgcaataaaactctgtgacaccagcaaaaaaaaaaaaaaa

SEQ ID NO: 290944 - DNA, 1000 bp, Homo Sapiens
tatcagtaaaattgtttttattaactagaaatattaatgaaaaaaacgtagacaatacacaaattaatgggcttcttcacttcttctaatttttgcctaacagatactgcatattctcaaaaagacaatttaaatgtcatttaaaaacaactttaattctaagatgtgtaaatattttgaaagtcaaaaagggctttcagaatactttttacataaaatctgaaagagttataatatcggtaagaaaaagtaagttgaaaaccatacaagacgctgggtcattaataagaaaaccattgactttaagtataaagtactggtttgtttaaataattggtaaacttttatgtacgtgttgtctatgtggtggggatggcaggttgtattaacaaaaatgaatcattctagaggtgtaacaatacatttcttatataattttataagtcatttctaatctttgtataaaacagaagtgagcaagatgaatcagaaaaaaggtgttttgtattttaaaggtaacagataaccaggtgattgaatctaagacaggctgtaagcatcgctgagaaactaaaaggacttttgacttttatctggatagacatttctacagtaaaatcatggaaaggcatcagcattgcaaagtagcatctaggtagaaatcaggccaaaattaagctgtggtttccctctgagtagtgggaatagagaaaattaggaaattgtggttatgtgaatatttctttaaaacttttatgtacattatagtttattgcttcatatttaagtttagtttttaaggtaaaatgttattttgaacaaaaagacacttataattttccatacctattttcaactgaaggcaacttgtaagatttaactcagtcaataacatactggttttactcatctccccctccattgattagccaaaaaaaaatgaaatcttactaattcattattgaataaagaccacttttatcagagtcaaaaaaaaaaa

SEQ ID NO: 290945 - DNA, 1000 bp, Homo Sapiens
gattcaggagctcaggtgcccctgtgatccaggtcttctaccctgaaaccccaccctccatcaaggtcctgcctgtagagtctaccttgcaaagcctcctgctcctacccatgctacaggccaggaaccagagcccatcatctcagaggcccctggatgtccttcgaaggaaccaggaccctcagagcccagcatccatctctgtcatcatcttcatcacacccaaagaagagccagccttgcaggagggtttacatctccaggaagatgggctgccagcaactgcagaggatgcagccacctgcttaactgtgctgtccagccagccagccagctgcagggcctcttgctgcttaagagctgatgggccgggcatgttggctcacacctgtgagcacagtactgggaaatgggagcacagtactaggaaatgggagcacagtactgggaaatgggagcacagtactgggaaatgggggctcacagcactgcaaaatgggagcacagtattgggaaatgggagcacagtactgggaagtgggagcacagtactgagaagtgggagcacagtactgagaaatgggagtacactactgagaaatgggagcacagtactgggaaatgggcatacagtactgggaaatgggcatacagtactgagaaatgggagcacagtactgggaaatgggagcacagtactgggaaatgggagcccacagtactgggaaaggggagttcacagtactcggaaatgggagcatagtactgggaaatgggagcacagtactgggaaatgggagcatagtactgggaaaccccagacctggattctgagtttttcagcctagcccagacttcttatcttagtagacaaaaagagtcaataccagagaaccagaggcatcctctgtattttaatgaactctgcattttaatctgtttagtagtcattttttaaaagataatcagttttccaaatatatctataagttactacgtg

SEQ ID NO: 290946 - DNA, 1000 bp, Homo Sapiens
gagtgctgccgctacaccgagacctggagaagacctcttgcctcatggatgtctggtccctctgcacagctccaaccaacaggactgtagggtgatgacgatcactttcccagtgatgagaagggtggtctaggactgggcttctaccctcagtgcaagaccagtgccagatgtgcccccacttcctgcctcctgaagccttcttccctgctactccatgctggtggcctcacccatcaagaccactgtctcctggtactggactatctacctgccttgtccctgttctgggggaaggtgtccaccccgatcaagaacatggagaaagtcctctttcaaggctcccattaggaggatgagctgccttgacccagaagggatgagacgggctcttacctctctacaaccttccctccccttcccactccttccggagtaaggttagaagggaaggaaggaaagatcaaggaaccaagcgcctccacgggaggcgagggaggctctgtatgaaacagaagagcagggacataaaggaaaatgtcagtgtttacatgggacctatggaaacaaaggctggcgggcgccagctgactccagagtaagagagggcccttcccctgccaggacccacggtgctatccattcagtctcttcctcagttaatctcggagcttcctattccatgttgaggtttgtgggcccctctagaggagggctagttctatacttaaattgattcccaggggccttttttttttttttttttttttttttgatcaaaaggggtgtggggatgggggtgtctacggttaagcaacagatacctccttccctttgtaaatagtatttttatacttcatcctcgcctctcaggctttagatacgaaatctccagaatggaagggggtggggattttctgttcctccctggagtgggtgagggtgggagaaagttacatatttaaagaaaaataaatttaataacaagtttctctaacct

SEQ ID NO: 290947 - DNA, 1000 bp, Homo Sapiens; identical to SEQ ID NO: 118068

SEQ ID NO: 290948 - DNA, 1000 bp, Homo Sapiens
tctcccaggtgactccaggaggctcagctgcccgggctgggctgcaagtgggagacgtgattctggaagtgaacgggtatcctgttgggggacagaatgacctggagaggcttcagcagctgcctgaggctgagccacccctctgcctgaagctggcagccaggtctctgcggggcttggaagcctggattccccctggggctgcagaggactgggctctggcctcggatctactgtagagcacccctgcttggtacagacatactcaggggctaccgtgtcttcactctccagcctgaggtggtgaaggcaggatgctctctctaagccagaccagagggactcagacaccaccgatcacaggctggcccaggtgctccctcccttcctgcaggcccacctgccagcagagggtgtggttggaggcctcagacaggtccctgaaggagtctgaggctccagaggatgtcatatgggagttttagagagctgtgtcccaaggatgaaggtgtggctgtgggtctggctaggattgaagccatctggaccttttctagatatgactccaggacccttgagtgtaatgcaaaaatttggagaccagctatgcctgccctctgtgggtgccttagcattgcgggagggtggtgcttggtcaccgttgcatttgttatagaaatggccattcgccataaatctgactgcctgtgtttgtgttggtgggggtaaggggcagtggtgtgaagggaccaaaagggcctcaggctcaaggggtgggatgcggctcctgcaggagagaggttgagacctggtcaaatttatttcctatcaatcactgaatctcagggataatgggtcaacccagaactgagatgtctgtatgacagccactcctaaaaataaacaacaacaaaaacaaaaaaagaagaaaactaaataaaaataaaaataaaaataaaaaaaaaaaaaaaaaaaaaaaaaaaaaaaaaaaaaaaaaaaa

SEQ ID NO: 290949 - DNA, 1000 bp, Homo Sapiens
ctgggaggtggaagcatggggtgggatcggtggaccagggtggtaagtgtctgcacatctgcctgtccctgtatcagcggctacccaccttccaaaccactcaggacagtacccgtggcactgggcccgcagaagcaagggatgacttggttcttggaagtaatgtcgtcttgtgacattggcctgggacaatcattgtgggtaggtagttattgatcgtttactagataacccattggttctttgcctcatcctctcatccatgggtcagagttgaattcttatgtctatagacttccaatcagaagtctcactggtggggctgggggtgggggcaggcaggaggcatggatgggaacctgagtaggtagtgtggccaagagatcagcacaacctttgcaggctgacttgctaagtctgacagtgacaaacttgtgagcttactgcagtcagtcacagaggctgttctttttcacacaccccttcatgcccggctttccccatatccacatgcagagggcgagctcataaaactacagggaagcgtgaaatgatggctttggtagctgtttactgggtaaccccactgtgacactgtccttttcatgtgatgtggaaacctacttctgtcctccaaaccatgaaatgtgtcatctagactgcagagtacttgagtgctttgcctcccgatatgccagagcttgtggtccaaagcccattcctgtgtgtccgtcctgccatttagccacagaaggctgcggagtgaggcggcagctagcctggccagtggctgtcccgtggaccgacacctgcgcccccttctgcaagcaggattttctggtgccaacactcattcatcattcccgatcaactaggatgaatttaagactgtgctaccatgtgttctcaagtggtagtttaaaaagtggatttttaaagtgcctttcaattgtctgtgaacgtctaaaggactgatttgtctcaaaaaaaaaaaaaaaaa

SEQ ID NO: 290950 - DNA, 1000 bp, Homo Sapiens; identical to SEQ ID NO: 223424

SEQ ID NO: 290951 - DNA, 1000 bp, Homo Sapiens
gcgcctaaaggacaggacctttttattgtatttctttaaagaataaatacataacctgaatgcaatcaagtctttagatctaattctcagcttgcagggaacactaggacaaatccaaaaagtgggtcagcgggcacagaatggcccaattttcaacaggaaaatgttataaaagaaaaatatttttgagggaactgttatagattaagagaatagaggcatgtttcagctaaacacatgtaaactttgtcagagataattgggaggagtatgtagaagaatcggattattgttaattttggtaggtctgataatggttttatagtataaaggctgagtaccccttatccaaaatgattaagatcagaagtgttttggctttcacatttttttggattttggaattttgcctataataatgagacatcttggggatgggatgcaagtctaaccacaaaattcatttatgtctcatacacactttgaacacctggcctgaaggtaatttcacacaatattttaaataactttgtgcatgaaacacaattttgactgcattttgactgcaactcatcacatgaggtcaggtatggaattttccacttgtggtgttacgttactggctcaaaaagttttggatctcggagcattctggattttgaatttttggattagtgatgctcaacctgtatacagaaatgtcctcatttttaaaaaaagaaatgcatatttatatgttttaaaattacttcaaccaaaagcaacggggagatgtttactgttatatttaggtgacaggtacatggcaattcattataccctcctattttcctatgtttacattattcattaattaaaaaacaatacctagaaaaacccaagactttcaaaagctattttctatatgtgccaatctttaaaaaacaggataacaagggtatttatcacattaaaatgttgtaaaacagcaaagctaaaatctaaaaaaaaaaaaaaaaaa

SEQ ID NO: 290952 - DNA, 1000 bp, Homo Sapiens
gaaggaggggagggaggctctggcagttgtgcagccttcctggctgggctctgagggggctggaagaatttagaaccttggaggcatggaggtacagggtttattctggacaggagcactgggctgcatctgtgggttgggtccttttgggaaagggatggacacatggagctcctgccctggggtctgtgttgaatccccggtgaggattgcccagtagtagcccttgcttccacaactcaccatgccctctagaactttgccaaacaccacatgcttgccatctagccaggctgtcttgactgtcgtgatgaagaactgggagccgttggtgtctttgcctgcgttggccatgctcacccagccaggcccgtagtgcttcagtttgaagttctcatcggggaagcgctcaccgtagatgctctttcctgggaaaaaagacagagcaggtcaggggcgctggattgcgccaaaccaagcagacattcggggccaggactgagggggcttaacctgtcctctgtgccaggctaggctggagtggactacaaggacataaaagcagcgtccttcctatcttctggcctcagagccaagccatgctgactgaggccaagtggggcatcaggccaggctgatgtggtgaacagctcacagaaggattactttgagaagatagttttgtggcttttaaataaggcgcatgttatcagctccccttagctatggcccaggcctgccacggagggactttggtggagggaagtgccgtgcaggatgcaggggagtcaacagggtcggaactctccagaaaaggaggactgctgtggctgaccagcctgttttcctatgagcacaaaagacacaggcatagctgcagaggagaaagcagccagagatgtgtggggaggggcagaaaagaggggctgccccttggattctggagagtcaaagcctcttaacaaggaatgaacaggaataaaagacagctgtgagtgtg

SEQ ID NO: 290953 - DNA, 1000 bp, Homo Sapiens
tgaagacatgtccccaggaccaccaattttcaacagtgtgatggccaggaccaagatgaaacgcatgagggaatcagccatgcagaagctggggacagaagtatttgaagaggtctataattacctcaagagagcaaggcatcagaatgctagcgaagcagagatccgcgagtgtttggaaaaagtggtgcctcaagccagcgactgttttgaagtggaccagctcctgtactttgaagagcagttgctgatcacgatgggaaaagaacctactctccagaaccatctctaggcaactatcaaaaagaagcagaagttcaagtggacaaatttatgtgaaaattcatttaacatataagctgaactctattatggggaatggatacaaaagcagagctcccatcttgactttcaattcctcatcagaagtactggcttctttagagagtagtaagcatggctgcctatgcttggagtcataagtgttatttggactataccctgagataagcttatagatcaagtttggctcccttgaaaagcatttctctcatgtgcgccctcagggcttccagcaggattgagtcaccctgacgatgaccggggagaagccgtgtgctcttcattattttcagctggaggacagagctcagtgcctgactgcctagggtctcatggactgtaggcagcctgccagtgaaggtcactggactctagcctacaacatgctgagctacagcccagaagccagacatgcctgtcttagctgacctgtttttggtccacttttgcccttccatgactaataaggaagatatgtgtgtatttcatacacacacaaggacctggattaaaaatccaaaaagtgattctcttctatgatttatttcaaactcatccatagataattcaagatttgtattcaaaataaacatagttttcacagttacaaaataaatcacctattttatctttagaaaaaaaaaaaaaaaaaaaaaaa

SEQ ID NO: 290954 - DNA, 1000 bp, Homo Sapiens
attgaattccagaccaacctggtaccttatccgagaatacatttccccatgacagccttcgcccccatcgtctctgctgacaaagcctaccatgagcagttctctgtgtcagacatcaccactgcttgctttgagtcctccaaccagctggtcaagtgtgatcctcggcttgggaagtacatggcctgctgcctactctatagaggggatgtggtccccaaggaagtgaatgcagcaatcgcagccacgaagtcgaggcactctgttcagtttgtagattggtgtccaactggtttcaaggtgggcatcaacaatcggccgcccacggtgatgccgggtggggacctggccaaagtccaccggtccatctgcatgctgagcaacaccacggcgattgtggaggcctgggcccgcctggaccacaagtttgacctcatgtacgccaagagagcatttctgcactggtacctcagagaaggcatggaagaagcagagttcttggaggccagggaagatctggcagccctggagagggactatgaggaagtggcgcaaagtttctgaggcatgtatgatgggtgcaaatgaatgtcaagttaaaatggcatgttttcttttcaagccgttatatgcctagtgggtagttcccctgatgagcagaaaaatgaactcaaatcaggcaagactctaggttccacactaaattaagtgggtcagtaccaacaatgaacacattatttcctggtctactggtacaagtcagctctgctacctgggagcctttggaagcttagagtcctttgaactgctgagtcacttctaggtgggatttttttgttttaccaagagacaatgaaatcctaaagtttatgcttttcctttctggtaccggaagtagaaaacagcacatgttgattacgaatgttttttcccccatgtctacattttttacactgattaaatcataaatattttcagtatgaaaaaaaaaaaaaaaaaa

SEQ ID NO: 290955 - DNA, 1000 bp, Homo Sapiens
attttctcaattcagttgaaagacatcagagaactcacacaggagaaaaaccctataaatgtaaacaatgtggtaaagcattcactgtttccggttcttgtctaatacatgaacgaactcacactggagagaaaccctacgaatgtaaggaatgtgggaaaacattcagattttcttgttcttttaagacgcatgaaaggactcacactggagaaagaccctataaatgtaccaaatgtgataaagccttcagctgttccacttcccttcgttaccatggaagcattcatactggagagagaccctatgagtgtaaacaatgtggcaaagcctttagtcgtttgagttccctttgtaaccatagaagtactcataccggagagaaaccctatgaatgtaaacaatgtgatcaagccttcagtcgcctcagttcccttcacctccacgaaagaattcatactggagaaaaaccctatgaatgtaagaaatgcggtaaagcctacactcgttccagtcaccttactcgccatgaaagaagtcatgatatagaggctgggtgtagtgactcagcctataatcccagcactttgggaggccaaggcgtgtggattgcttgagcccaggagttcataaccagcctggattaaaacaatgtgaaacaacctgggcaacatggtgaaaccctgtctttacaaaaaataaaataatgccgggcacggtggcttacgcctgtaatcccagcactttgggaggccgaggcgggtggatcacgaggtcaggagatcgagaccatcctggccaacacggtgaaaccccgtctctactaaaaatacaaaaaattagctgggcgtggtggcgggcgcctgtggtcccagttactcggggggctgaggcaggagaatggcatgaacccgggaggcggaacttgcggtgagccgagatcgcaccactgcacttcagcctgggtgacagagtgagactctgtctcaaaaaataagat

SEQ ID NO: 290956 - DNA, 1000 bp, Homo Sapiens
ggccctgaacggcctcctctataaggcactgacagacctgctgtgtacccctgaagtgagtcaggagctgtatgaccttaacgtggagctctccaaggtttccctgactccagacttctcagcctgccgagcgtactggaagacaacgctctctgctgagcagaacgcacacatggaggctgtcctgcagagaagtgccgcgcacatgaggcaccttttgatgtcccagcagaccctgaggaatgtgccaccgatagtgtttgttcaagacaagggaaatgcagctctagctgagcttgatcagttactggcagtcgcagactttggaccccgggatgaaagagacaactttgtacaaaatgatttcagggaccctgatgccccacaaccctgcggcaccacagagccgaccacaagctccagtctgtgtgggatcgatcatgaggcgctcaacaagcagattatggagtacaaaaggaggaaagataaagggctcgggggcctggtgtggcaggggcaggtggctgagctgacaacgcagatgcaaaagggaaggaagagggccaagccccgcctggagcaggacagctccctcaagagttacctgtcaggcgaggaggttgaagatgacctggacctggttggtgccccggagtacgaatgctatgccccggacacagaggagttggaggcagagagaggaggtggcagaacagaggatggccacagctgcggagcaagcagggagtagatggagaggctctgcccatcccacatttgcagggaaaagcattggcacgcaacgcagcatgtggcttcattgaggcagttgatggagttaaaccatctgctcttctgctacttcaacattttctagcttttccgtgtatctaaacacaatttgctacacaagtcactgtttttttttccatgcactgtgtgtaatttaaaaattaaatggccatcttatcacagattctcacaaaaaaaaaaaaaaaaa

SEQ ID NO: 290957 - DNA, 1000 bp, Homo Sapiens
tggaaattccattcttcttctgacagccagacggttagagcttctccagattcatggctcacccagataatggagcagcatcagcaagccttggtgcagctgaccgacgtgcagcccagtgaaggggccttatccagcgtcacgcttccacctatactgtcaagggtagaaagtgaatcccaactcagttcagagagaagccaaagaaaccaagtgaaaattagccgtagcaattctgaaggctatctgtttcaactggaaaagggaaaaaagcataagaaaagaagcagcagtaagaacaccaagctgaaaggttatcagaaaagagacgtgaagcttggaggcctcggacctgactttgagtccatcagagacaaaacgcaaaaattaatacagcaaaaggaatatgcaaaacaagtcaaggagtacaacatgaagacactatccattctatcaaaaccacaaacagaaaaaactcaaaagaaatctgctatccctcggcagaaggctttggaatacgctaagaccatccccaaacccaaaccatcaaatctgactcatcaagcatcaaaggaacaaaaaaatccaacctatgctgggaaagaagaaagtttacctgaaatctcactgctggaaatactgcagaacagacacgaaagggaaaaacaggctgtggctgctttcaaagtccttcacatcgtatagacaacatttgataggaaggagaccaaaaatggtccaggaatgaacgtggagaaaagaaacgccaaccaccttctctgcgttgagagtaatggcctattattatcatctatctgccgtccatgtttgctttctgcaggatttaaaatatgaggcccaattggattatggtgccatattttactttctaggaagaaaattttttaaattatttattttcaaatcagttagaattggagctgaataataactagagaataaagcttttgttttatattgaaaaaaaaaaaaaaaaaaa

SEQ ID NO: 290958 - DNA, 1000 bp, Homo Sapiens
gggtggagcaaccctactcctacccctcaggatagagagagaagacacacttgggacacagtgaagacagtaacttggaactgaccacggcctggaggactggcccaggcagggggacagggaaaatggagcccaagtagcctctggccagggacccaatgtcccgaggaatctgcctcccacccactgactcagggctcagactcagcctctattgtccagagcactggcttggcgtccagcaatgaaggctggagaatgcagcctggattcccctacacacacacacacacacacacacacacacacacacacacacacacacacacacaggtgtctactgacctggagtgactggaatagcacctggggataaatgtgacaactgtgcattgaaccctgggtcagggacgttccaatggccaagagagtgacacagccaggaccctggtggacagccagaggggccacttcaggatggatgtggggagagtggaagaggcagggagtaatcctgggggacagcagggaggaggcacttcttccctatgtccaggagagggcaatagagggaagactgaggctgaagaattgacggctctggacccaggacagacagacagacagacagacagacacgcacacacacccatctctgtctagcaagcagcctcctaagatagctgttctccctatcatgacggtgtagccaccatcctgttgtatactaggagagaacttaacccacctgggggaaaatagctccccaagagctggcaccagtaccactgatggccctgcttcctctgagtgagatgcccaggaggaggagccctagggaagaagtcagggacagggaccaggataccactctgtcactgtgtgaccctcagcaagtcactaacccttggcctcatttttcctgtcttgtgaaagaggacaataattcctacttctcaagattgttttcaagataaagtaacattagcattgtacaatg

SEQ ID NO: 290959 - DNA, 1000 bp, Homo Sapiens
tacctgtgagcacaaggccgaccttctccctatcagtgcatccgtccagtttattaaaattcctgcacagttaccccaccccctgacaagattccagatcaattatacagagtatgactgcaacagaaatgaggtgtgttggccgcagcttctatatccatggactcagtattatcaaggggagctgcattctcagtgtgttgctaagggcttactgttgctgttgttcctcacattggccttgttcctcagcaacccctggaccagaatatgcaaagcctatagttagacaaccacctggcttttatttttttgagatggagttttgctcttgttgcccaggctgaagtgatctcggctcaccacaacctcctcctcttgggttcaagcgattctcctgcctcagcctccggagaactgggattacaggcatgcaccaccacgcccggctaattttgtatttttagtagagacagggttccaccgtattggccaggctgctctcgaactcctgacctcatgatccgcccatcttggcctcccaaagtgctgagattacaggcatgagccaccgcacccggccttttttttttttttttttttttgaggcggggtctctgtcacccaggctggagtgcagtgcacaatctcggctcactgcaatctctgcctcccaagcaatcctcccacctcagcctctggtgtagctgggaccacagatgctccaccatgcctggctgtatttttggtaaagacggggtttcgccttgttgcccagggtggtctgtaactcctgagctcagatgatctgcccacctcggcctcccaaagtgctgggatcacagacgtgagccactgcgtccggtccatctgacttctcaaagactttagaccttgacttcagtgatttgttgtagtcttgtatgcttctctataaaattttaataaatgaaatgtcttatttttgtagaaaattaaaaaaaaaaaaaaaaaaaaaaaa

SEQ ID NO: 290960 - DNA, 1000 bp, Homo Sapiens; identical to SEQ ID NO: 118069

SEQ ID NO: 290961 - DNA, 1000 bp, Homo Sapiens
actgcagaggatgacctccccagatagaggagaatcattactccaacaagaataaccaagtctttgtatccctagtacaagacatagtatttttattcgaaaatgaatgtttaagtattaaattgaaacttgaatgaatattcaagaaaatataatgatctctactttttctggatgatttccagccatcatatcagtttgccaaaaaaattgagaaagttatgattttgacctcccaacctaaactctaaattctaaagatcagtaagcaattaggtcaataaatacatacaatttaagatgaagccctttggaagtctagtccaaaacaggaaaatctcagaactttctggactcaaggaaatgctttaaatggaatctgtagtttgtttgcaggagagacaatttctagaatttagattgcttttcaaaatgtttatcaggtaggcaagttagcagttgaggcggaacacagacaacttggggagctttactggaaggccaagaaaatactcttggacactggaggaaatgacagctactaaagcccaatcatggaaaaggaccagaaagcagcccactggaatggggagcttagtgggcaaggaggtagggatataatttctcttcttggctccaccagtaattagctctgtggcccagtcacctaaactttctggacttcagttcaggttgtatggcagtaggccatagaattggctactgccatacaatctctatgggaaaggactgcaaaaactaaattttatctctgtatgggcaaaggctactgtcatcctgttgttggtctggggccactctgacaattttttttaacctcatttgattgtgtaagggtctaaccacaacaaaaaatcatagtgtaatagaattaatcaagttcagcaaggtcacaggctagatcaatatacagaaaatcaattgtatttttctgttcagaaaactccaaaaatgaaataaagaaaattgtgttcacaat

SEQ ID NO: 290962 - DNA, 1000 bp, Homo Sapiens
gaggccgatgcggagtccctgcaggctgcctggtacccacggacctccctgcccactccgctgcgagcccatgacatcctgcacctggttgaactagccgcccagtatcgccagcaagccaggcaccctctcattctgccccaagagctaccctgtgatctggtctgccagcggctcgtggctacctttaccagcgcccagacagtgtgggtgttagtgggcacagtggggatgcctcacttgcctgtcactgcctgtggcctcgaccctgtggagcagaggggtggcatgaagatggccgtcctgcggctgctgcaggagtgtctgaccctgcaccacttggtggtggagatcaaggggttgcttggactgcagcacctgggccgagatcacagtgatggcatctgtttgaatgtgctggtgaccgtggcttttcggagcccagggatccaggatgaacccccaaaagttcggggtgagaacttctcttggtggaaggtgatggaggaagacctgcaaagccagctcctccagcggcttcagggatcctctgttgtcccagtgaacagatagagaggtggaggaggtgacagggagctaggcagccgtgctccctccagtgcggacttgtctccctctgagggaggcaagaggctggcgatcagggatcttgttgcattgggagcaggggcggctctcctggtccccaggagagatgctttgaggagcattcctctagattgcacaagggacagtgcctttaaccaagcgaggagtccaaagctcaggacctgactaccctgagggcacgctgacgcctctccccagggggatggggagctttctgcacccccagtggcatctcctcatcacgttctgtgccgtccttgggaaaggcctgcattctgatccttccaggcccttcgagcatggaggggcactggggaaggtcccccgagggaggagcacgttgctgagtaaagaggtgttactcaccttg

SEQ ID NO: 290963 - DNA, 1000 bp, Homo Sapiens
tgtgctgcacgcggcaagaggcgagggcccggctgcaggcccaggagcacggggccgagcgcctgcggatcgagatcgtgacgctgcgggaggctctggaggaggagacagtggccagggccagcctggaggggcagctgagggtgcagcgggaggagacagaggtgctggaggcctccctgtgcagcctgaggacagagatggagcgggtgcagcaggaacagagcaaggcccagctcccagacctcctctcagaacagagggccaaggtgctgcggctgcaggcagagctggagaccagtgagcagtgcagagggatttcgtgcgactgtcccaggccctgcaggtgcgcctagagcggatccgccaggctgagaccctggagcaagtgcgcagcatcatggatgaggcgccactcacggacgtcagggacatcaaggacacctgaggggtcaggatatccccacccccaccctgggaaagacgcctttccccactcctgaaccatgaggcctcgctctggggtcttggatggcttttccaccgtccctgagactggggttgaggggactgacgggggccaccaccgccccgccctccagcgcctcctcccagggtggctgggcctcctgttctcaggggtcacacctgggtgaggggcccaagcccctcccggaaccaaaggtgcaggctcaggcctgcggctttctggctgctgtgctgcctcctgggctccagccctcccctgcccccagcccgtcccctgcccagggcacagcggagccatgggggctgggagtccccatcagaggcagtgaggtgggccccggccctgggacaggcagctgccttctggtctgcatgacactaagacgcttgtccacagcggcgacccagacctccaagcttgcacagaggcaaggccagacttttccgtcgtttattttcaataaataagcagctcagcgcaaaaaaaaaaaaaaaaaaaaaaaaaaaaaaa

SEQ ID NO: 290964 - DNA, 1000 bp, Homo Sapiens; identical to SEQ ID NO: 223428

SEQ ID NO: 290965 - DNA, 1000 bp, Homo Sapiens; identical to SEQ ID NO: 118071

SEQ ID NO: 290966 - DNA, 1000 bp, Homo Sapiens
cgacatccaccagcagtacaagatccttgatgtcatgctcaaggggctctttaaggtgctggaggactcccggacagtgctcaccgctgctgatgtgctcccagatgggcccttcccccaggacgagaagctgaaggatgctttctcccacgtggtggagaacacggccttcttcggcgatgtggtgctgcgcttcccgaggattgtgcactattactttgaccacaactccaactggaacctcctcatccgctggggtatcagtttctgcaaccagacaggcgtcttcaaccaggggccccactcgcccatcctcagcctgatggcccaggagctggggatcagtgagaaagactccaacttccagaacccatttaaaatcgaccgcacagagttcattcccagcactgaccctttccagaaggccctgagagaagaagagaaacgccgaaagaaagaggagaagcggaaggagatccgaaaaggcccaaggatctccagatcccagtctgagttatagccctggagcagctcagggctcagggggccacaaggaggcaggtcgggaggaagaagaggtggaggtgtggttgtggtggagagcaccagctagccccttccagaaggggaggccacatttgcccggccccctggagctgggtctgagccccagctgaagggactgagcctcagatggctggattttctctcaggggcctcctgctgaaggggccttcagaggattttatgctggaaatatgaccctgtgcagactgctgggggaggcaggaggatgcctgcctggaccctgttggtggctgaagacctctggccagctggcttccgcccttggtggggaagcagcagaactaggttctgagccacgggtcagggtgccaccctgctgctggccccactgtgtcacagagctgcctggcacaggtcccagcccctctgcagagacacaataaaagccagcagaccctttggaccgacaaaa

SEQ ID NO: 290967 - DNA, 1000 bp, Homo Sapiens; identical to SEQ ID NO: 223430

SEQ ID NO: 290968 - DNA, 1000 bp, Homo Sapiens
gataccattggatgcattattctaggttttttctttaataaaaatggaacaagttttcatttacattccaagctgtcaggaaatgaagaatattttattatctaggattttatctgatgtagttgcttaaagatctgatgtgctataattccatgaatcagaaataataaaatgctatcattctggatctgaagacttttgatactttttcaaaagcaaaattaatttcaggaacctttgataagttgttgttataattaatctaattttgtatagtttttgtaaataaattaccatccttccacaattagggatgcttttatccccccatcactaattgcagttgtttgataccaaaataaatttacgtagagatccttaacttaaaataaattaattttttcaaaaaacataaatctggaactgttgtttctatatttgataacaaatacagtatattttatttataagccatggtctactgatactgtatgaggactttccttatatataaaagttgcagggattgtgttttattagctgctttaattatgttaattttagagagtttttaaatggaaatagaggacatttatgaaacgctggaattgcagttacaaattctttttgttgttgttgttcctgaacatgccttggaataattctaccattttttccccctccataaatctttctaataaagcatagaaaaagcctatatgattttaaatgcttctcttaagctggtaaacagatttgagttatgagttcattgttattgcttcaagatgaaaagacagtgatataatttttctatttcaacttaaaagtaatagttaatatgctaaagtagtacagaataaactttattgctgcttactaactacaaaatactgtagatggcatctgtatgattaaacatataaagtaaaacaggtctgagggctttgtagatgattaaagtctccaccttcatgaaaaaaaaaaaaaaaaaaaaaaa

SEQ ID NO: 290969 - DNA, 1000 bp, Homo Sapiens; identical to SEQ ID NO: 223433

SEQ ID NO: 290970 - DNA, 1000 bp, Homo Sapiens
tggatggggtattttggtgtcacctgaagtccctctgacatcaccttgtttcatcattttttatgacagaattagaaacccatccttcaagcacaataatcatcacagacttgagtttgcttcctaaagcaaaggctccgggtttgtttggaaaatttttttgatttctgaaatgaattgatttttatatttggggcatctctatagaaagtgaccaccaaggccagtaagtacgggaaaaaatgtttactaacttcctcagagattcgtgatacgcgtttctccactgacagacatttaaaaacaaccttcagctccgtttcaatcaatcacctcgacttgttttttagcatggacactgccagcaggacagacagggatggagtaaaccgaagtcaatttcagggctcttggcgtgttggacacagaagaaatcctagtgcagcctttggtagctaacagtcactgattttataattggagaatgcgtaaagattcatttttcaaggagaagagcctgcaaatggccaatgaaggaggtaaataaactaagatattccgagggaagggacccaggccacctcccttccgcaggtctgcagatgaagggttttttgaatgaaatgccactgtgcattttcagaaaaaaaaatctctgataaacagactttgaatggatgtttgttcctcctgattctcttttctcttcgtggcgacttagagttggcggatattcggaactgtgaatgtacatagcgttgagttaaaccccttgtgtgtgagacaggacgcagcgggcccctggtggcctgggggccagacccgtgggcaggtggggcatgggccctggcctgcggggacctgctggggtgtgagggcagagggagggttgccatgaaggaacttgggattttcaatggaataagtaaaacataaagtctatacttgggaaaaaaaaaaaaaaaaaaaaaaaaaaaaaaaaaaaaaaaaaaaaaaaaaa

SEQ ID NO: 290971 - DNA, 1000 bp, Homo Sapiens
agagacctttgacattagaacaatgatgtctcctgatggctttgaaattttcagactttctaagaagatcactaataatattgtttattttcttccaagaaatgctgatattgaccaggtggcatccttagctgggcctggagggcaagtggaaatagaacagaacttccttaacaacaaattgaagacaatcactgcatattttggtgacctaattcgaagaccagcctctgaaacctaactatgcagcagtgcgaggacaaaagatcatggagtggtcaaaatattcagatgagacatttggcatgtcttcctttattcactgatattttctacccatggtcttatatcaccgtatgaaatggaaacttacaggacttaaatatcagtgaaatattttgagatctttgaataattcctttagaggaattatacaaaattaatatatatgagtcctttgtaatttatttttttttgagacaggatctcacttttaccgcccaggctggagtgcagtgccatgatcacagctcactgcaggttcagccttctgagttcaagcaatccttctgtctcagtctcctcagtagctggggctttaggtgggcactgccacaccgtactaatttttgtattttttgtagagacgaggtcccaccatgttgcccaggctggtgtcaaactcctgggctcagtcagtccccccatctcaccctccccaagtgctggaattacaggcgtgagctactgtgcccagccttacggacatccttttgaattatctttttcactcatagaatatgaatacatttatttagactttttctagaactttcctgttttcatgtctttgcttcatctggaattggcttaacacccttttataaagtttgtgtttgtaaaatttccattgtgacatcaatacgcaatatattttgtaatataggagtttctatttttttattaaaatggcaatgaaagcaaaaaaaaaaaaaaaaaa

SEQ ID NO: 290972 - DNA, 1000 bp, Homo Sapiens
tgagtgtagcagatgtggtaaagctttcagctgcatctccaaactcattcagcaccagaaagttcactctggagaaaagccttatgagtgcagcaagtgcgggaaagccttcactcaaagacccaacctcatcaggcactggaaagtccacactggggaaaggccttatgtgtgtagtgagtgcgggagagaattcatccggaaacagacacttgttctgcaccagagggttcatgctggagaaaagctttaagagtgtagcaaatgtgggggaaagtcttaggccaatgcccccgacttactatatggtggggaactagcagtagttaatgagtgcagcagatgcaggaaagccttcccctggaggctgaaccttacccgccattgggaatttcacaccggacacaggccttagcagtctaagcaatgtgctgtctctgttcagcccaacagctcaccctagagtggaactctgggagcagccattgggagggaaccatcagtaagaagtgaaacttcatagatatggacattcccactggggagattccctgtgagtgccaagtatgtgagatgctttcagcagctgtgttgcactttttaaatggctattggcctttgctggggcaggagccatctgctcctaccatctggcagaatcatactgcgtttaccatttaccccagcatgcttgtgacgggcagacctctcttctctccccagtccctaaaaggtgttgtgagtggtctcacagcccactaggggtcttaatttcctctcttttgatgtaaatggcatggaaataatcagctttgttcaagaggacacagaaggattctgcaaatagcctgcggagacttacctgtgttgattgatttcatatgatgctcgttatggatatatccaatatccaagtcacccagctctggaactgcctgcttcacattgctcatgataataaaggcctgttcctttaagcaaccaaaaaaaaaaaaaaaaa

SEQ ID NO: 290973 - DNA, 1000 bp, Homo Sapiens
atcagttggttccaagtatgttagatcagctaacatctgctactccagtaacagcctcgtacaactgcaggtaggttttctccagaccaattagttttaatagagcaaactaacaacagactgtagtagcatggttatggcaaccagaatcttcagaaaggttaggacattactttttaagctgtcagtggtatcaaataacttacctagttggaggcagataaaggatcccttacgttttttcctataaggcctaaattgaaattgttaaccaaggaaacagggtcagccttgaaaaatcaaggaattcattgtacctaataactgaagtaaaaataactagttgttcaacttttcctaaactcaaatctatttttataaacaaatgtaaataatgtttatattagagttgaactggttttcatttttataactggtagactagaccttccttaaacttttagaaataaaatgaaggcttcactggatttgtgaggataaaatacattttctttaattgtcctagagcaaagtacattagtcaccatgtgttttttgtgccaatgtaacttgtaatttaccaaagaaaaatacatacattgcttggtcttgcagaaaagttcccttgaaagaacctttccaataaataaaacgtcccaaattagcagtaccttgggctgtttttcatgagtaagaagattcaccatcccatgtgatctgtgtggaaaaagaccatgtcctcttggtggaagacatgagagagctgaactgaagtggaggaggtggtgcaagagggaccttcctgctcaaggcccgcccaggcagcggaatagagtgcagtgcttggctgcagaaaccctttgtccctcacctatatatacacggacagtcaagtttgttgctctaacgtaaggcacagcgttaatcctgtatggccaggaaactgagtagactcctgtgtaaccctgtttggaactttgccttcttaaaatgatttttc

SEQ ID NO: 290974 - DNA, 1000 bp, Homo Sapiens
atgttgggcaaattctgaagagaacgacacaaaaggaaaaaataaaaagaagaagaagaaaagcaagatactgaaatgtgatgaacatatccagaagcttggaagctgtattacagatccaggtaatcgagagacctcaggaaataccatgcacacagtgtttcaccgtgacaagaccaaagatacacatcctgaaagctgttgcagctctgaaaagggtgggcagccattgccttggtttgagcataggaaaaatgtaccacagtttgcagaacctacagaaacgttgtttggtcccgattccggaaaaggtgccaagagcttagttgaactccttgatgagtctgaatgtacttcagatgaggaaatctttatctcacaagatgaaatacagtcatttatggctaataaccagtctttctacagcaatagagaacaataccgacagcatctgaaggagaaatttaataaatactgccggttaaatgatcacaagaggcccatttgtagtggctggttgacaacggctggagcaaattaaataaataaaatagctctgtctttcaatgaaacactcacgatgactactgcgccttctctttcgaaaaactcttaatttagtgacttatggcaaaattttatcttaaatcaatgtgattctttcttgttttgggagacggtggaggtatcctcattagttctttcttcaggcttgtgtctttagttgcgtggctgcgcaggcctgccatatgatttaagccatctcttttcattaaatgtttctcttcctgtgagacttactaaagcaacttagtggcaaaaagtaatgttgtacttataattctgtacagaaatgacaatgagctgaatatatggttttacaaagtagacatccacttgcaaaatgtttggatgtaatgttaaagcgcaatgtgcaaaatttaaaataaagaatatttattaatacgcacagtaaaaaaaaaaaaaaaaaaaaaaaaaa

SEQ ID NO: 290975 - DNA, 1000 bp, Homo Sapiens; identical to SEQ ID NO: 118073

SEQ ID NO: 290976 - DNA, 1000 bp, Homo Sapiens
aaaactcaggtttagattgtttaaaattagttgcttttgatactcagctgtcatgtttataattcaaacatgtagtaaacatatgtaggtaaggttgtttttttggagatgttgcagctcaaatttcagtccacatatgaatcatcagtgtattttccataaagtgattcgggcatatttgtgtgaaaacctcagttctgtcacttcttacctctataaacttggacgataatgtgccttctctgagactcagtttcttcctctgtaaaatgaggacatactacctacctcatgtggttggttgatgattgtctgtcaaagcacaaactctgaaattattaaaaacataattatttcataaacagatgagttaagttccagttaactcaacatcagtataacagagcaattggaagagaatatgaaaaaactggaatctaaatagtcagtgaggaaggctttgataaaatgaaattgccagaaagatataaaactggttagggtcctacagggaaataaaattataaccgtggaggtacatttctctaccagaaagcaaaaataaagcatcatgtcttaatggttttctacaaatcaacttctaattctacagagtccttaatctggtccctattaaattcttggtcagacaaagttacatttcccaagagagtcaggtgacacttgagtgagtttgatggataatgagctaatgtgatatctataggtcacaattttttaaaaccaaaattttcaagtctgggataatctttcctaaatgggatcaaatgaaataatatgtgtaaaagagtcaaatgcagtcctttaccatagtaactgcctatggacgttgtctttcccttacatgcctgcctacacttaaccagatgttggttttcaatgtctaatttgtcattagtttcaccacatttgctcactttttgtaacatttttgcaagatttgaaaactttcagtaaatgttttggcactattggtaaa

SEQ ID NO: 290977 - DNA, 1000 bp, Homo Sapiens; identical to SEQ ID NO: 223434

SEQ ID NO: 290978 - DNA, 1000 bp, Homo Sapiens; identical to SEQ ID NO: 118074

SEQ ID NO: 290979 - DNA, 1000 bp, Homo Sapiens
atctagaaaacctttgtttgagactcttatttaatgggcttttgattctaatgataattgtacctttatctttcaaaagctgatatttcctacctaagcatctcccgagaaaaatatctcattaaaaagcccataaataataggggagaagaaagccttaggtatcaattccaaaacagtgattgaaatttcccaaaataattatggcttctgtcatctccagagataatctggcttggtttaccccataatctaatttcagaaaagaaagctttattttaacactcatctgaatcaacattaaagccttttctctcaaagcgtttattgagaaactcaaatgaatatactttttgaattactgtcatcaaaagtgtacggcttcctgtgctgcttgtgtcaaatggaacctgccctctaaagcactttctttcctttacttgcgtggtttcatgtaagctgtgctgtttagaaacaacatctcagactttacaaagaaatgacaaagaaggcaattgcactttttaagggatatcgacaagcagtttctgttttctaaaggacaaaatacagagtgtgtgtcatttttaattagattctttcccctgctgagttggaaattccagtgcagcactgattgaccacagttgccaatctaaaagcacaaagacagaagtaaagctttatgctaattttatttcaatatgatagaaaatttatcttggtatgtccttttttagataactccagcaggaaactgtaactgctatgtctttaggaaaacgtagaagaaagaacattattattctttaattcctacaaggtacttgaaaaccttaagtgaaaaagatttctatctttttatcttggcgcatttatggaaaaaatattaactgtcctgaatattttataattttgtaggaaaaatatgcatctattttttcttgacttcttttatatagtaataaaagttattttggaaaaaaaaaaaaaaaaaaaa

SEQ ID NO: 290980 - DNA, 1000 bp, Homo Sapiens
ctgaagctcagcctgttaatcagaccagcccatgagtgtataacaaacagaattggaggctggtttcttaaacacacacgtccacattttttagggttgttttcctgtgcttacaatttttaatgcatgtgcctttatttcacaaaacatgtggctgggcgcagcggctcacgcctgttatcccaacactttgggaggccgaggcaggcggagcacctaagttggggagttcaagacctgcctgaccaacgtggagaaactccgtctccactaaaatacaaaattagctgggtgtggtggcacatgcctgtaatatcagctactcaggaggctgaggcaggagaattgcttgaacccaggaggtggagtttgcagtgagctgagatcacaccattgcactccagcctgggcaaaaagagcaaaactctccctaaaaaaaaaatgtagaatatctcttaagatttccgttatggtaaaaaccatatgcaataaatacctcattgtaagcttacccaaaattgatagatgtcaaccttttaacagaagaacagaagtttaagttattgtttaatgtaatcagttttcattttaatatctttgaaatctttttcaaaggactgtagttttgtaatggacttttcaagccttccttccattgtttttcttccgttcactggctccacacgtttcctggggagtagcctggaatttaaagttgggtgcaggttttagaaagctgttgctgttaacaataattctcccggccatctccactccactactcaaaaatgcctgaatccttgctcagaggagcaaaggtatcttctcgtccctttcttacagccattttcttgcttttccacaaagatattatttaaagtggaatatttttgtaactgggataccaatgagcttttcggtcttttcctgacttggtaaggtttatgggtttctaaatctaataactacagtcataccaccccgaaaaaaaaaaaaaaaa

SEQ ID NO: 290981 - DNA, 1000 bp, Homo Sapiens; identical to SEQ ID NO: 118076

SEQ ID NO: 290982 - DNA, 1000 bp, Homo Sapiens
tttactgcagatgaacttcagctgctaacttaccagctctgccacacttacgtacgctgtacacgatctgtttctatacctgcaccagcgtattatgctcacctggtagcatttagagccagatatcatcttgtggacaaagaacatgacagtgctgaaggaagtcacgtttcaggacaaagcaatgggcgagatccacaagctcttgccaaggctgtacagattcaccaagataccttacgcacaatgtacttcgcttaaatagtccaagtatattctctgagaggaagtactgaaagatgaattgacatacaacgtatgtttccagtgaagtcaattgagtaaggacacctccagccatacagaaaccaacactgtgtgggggccaaggtctgatccttatgttaatacaaggaagattgtttacttcatcaaggaacacagcatcattatgcaatatgaaaccagccaactgctttttgtgcggtctcctataggaagtatcgcaattgttttgttttcatttcttgtagtctaacccttttaatgcctttacctcaagttgcttggcagcacaactatctttgcaaaaaaaagtaaagaaaaagtaaatgatggtttaaaaaatacacaccttcatgaataatcaaagtgatttttcagaattatgtgtgcaaaaaattaatgtgcattcatatattcttgtaaaaggtgtctgtgtatttttaaaatatatacatccatacttcatatgcatatatatctagatctggattgataatagatatatatgtgtctgttatatattttagagttcattccattggggaattttctttcccttttattctacccccactaccgcctttatttctctatttcccttgccttcatcacctacatttttttcccagtcctaccagtgacattcaaatgttgatgtatctggttcgtttgaatataaaatatggcaaactaaaaaaaaaaaaaaaaaaaaaaa

SEQ ID NO: 290983 - DNA, 1000 bp, Homo Sapiens; identical to SEQ ID NO: 118077

SEQ ID NO: 290984 - DNA, 1000 bp, Homo Sapiens
gcatgaatgattttgatcccttgttttcagaggaaacacctggagtggagaagccggtcaccactgttcagcccgtgtttaacttggcagcatatcatcagctatttgttgggacagaaagaattcgagctccagagattattttccagccatctctcataggagaagaacaggctgggattgcagagactctccagtacattctggacaggtacccaaaggacgttcaggaaatgctggttcagaacgttttcctcactggcggcaacacaatgtatcctggcatgaaagccagaatggagaaggaactgttggagatgagacccttccggtcttcttttcaggttcaacttgcctcgaaccctgtgctggatgcctggtacggtgctcgtgactgggccttgaaccacctagatgataatgaagtttggatcaccaggaaagagtatgaagaaaagggaggagagtacctcaaggagcactgtgcttccaacatctatgtccccatccgcctgccgaagcaggcctcccgctcctcagatgcccaggcatccagcaagggctccgctgctggtggaggtggtgctggtgagcaggcatagcagaggccctccagagagactgccctgcacgccatgccttgggccacgttggcagtgtgacaggactgtgattgtgctagatgtacctgcccaagtctgctggtcacatttggcagcaaaatggatttctcctggggagaacaaagttaagggacactgagacctgcccttcagaattcggttcacttgggggcttctgtggtagagactaactggccttctgatgtctttgttcaactgtggccagctgtggcatcagcttcctggagcagtaaatgaagacagagtggaggacacaaatgtacaaaatgcacaagactgatttcttaccacattttagtctttcttgttttaaaaaaaattctttaaaatttaaaaaaaaaaaaaaaaaaaaaaaa

SEQ ID NO: 290985 - DNA, 1000 bp, Homo Sapiens; identical to SEQ ID NO: 223437

SEQ ID NO: 290986 - DNA, 1000 bp, Homo Sapiens; identical to SEQ ID NO: 223438

SEQ ID NO: 290987 - DNA, 1000 bp, Homo Sapiens
accaaagcccagcagggctggctcgtggccggcacggtgggctgcccaagcacagaggatccccagtcctccgagatccccatcatgagttgcttggagttcctctgggaacggcctactctccttgtgctggggaatgagggctcaggtctatcccaggaggtgcaggcctcctgccagcttctcctcaccatcctgccccggcgccagctgcctcctggacttgagtccttgaacgtctctgtggctgcaggaattcttcttcactccatttgcagccagaggaagggtttccccacagagggggagagaaggcagcttctccaagacccccaagaaccctcagccaggtctgaagggctcagcatggctcagcacccagggctgtcttcaggcccagagaaagagaggcaaaatgagggctgacgtggactgtccacagtgttcatgtgctggagtcagggacggccgcacctgcctccgccggctccagtgtgcggggagcctctgcctgagtgtgcaccaggcccatgtttattgaccacagtctgagggggggggaaggggactgcggtggacaccagaggaagctgtttcctgttgtgatgttggacctgtagtaggacatggtgatttgttaatttccatgggaagccatgatggcctagcatggagggaatctgttcccaggccctgcctggaagttgagggaaagtttagacatctgcagagaggcaggcagcccagcccaggggacccgttcctcttgaaccagtcattgcctgtggcaaatgtgtgtatgagaatgtggggggtggagggcggggccctgatgtggagtagacagtgcgcacctcaggcccacacacggccccgccctggggccttgagcgcaggcctcatctttctgtgccgcgggactctgcacctacctcacagggttgttgtgaggctcaaataaaacatcactcagcacgtgggaaaaaaaaaaaaaaaaaaa

SEQ ID NO: 290988 - DNA, 1000 bp, Homo Sapiens
tgcaacctgaagacgtgtgaagatgagtgaaactgatattactcaatttcagtctggacactggctgaatccttcctctcccctcctcccatccctcataggatttttcttgtttggaaaccacgtgttctggtttccatgatgcctatccagtcaatctcatggagggtggagtatggttggagcctaatcagcgaggtttctttttttttttttcctattggatcttcctggagaaaatacttttttttttttttttgagacggagtcttgctctgtcgcccaggctggagtgcagtggcgcggtcttggctcactgcaagctccgcctcccgggttcacgccattctcctgcctcagcctcccgagcagctgggactacaggcgcccgccacctcgcccggctaatattttgtatttttagtagagacagggtttcactgtgttagccaggatggtctcgatctcctgaccttgtgatccgcccgcctcggcctccctaacagctgggattacaggcgtgagccaccgcgccctgcctagaaaagacattttaataaccttggctgctaaggacaacattgatagaagccgtctctggctatagataagtagatctaatactagtttggatatctttagggtttagaatctaacctcaagaataagaaatacaagtacgaattggtgatgaagatgtattcgtattgtttgggattgggaggctttgcttatttttttaaaactattgaggtaaagggttaagctgtaacatacttaattgatttcttaccgtttttggctctgttttgctatatcccctaatttgttggttgtgctaatctttgtagaaagaggtcttgtatttgctgcatcgtaatgacatgagtactactttagttggtttaagttcaaatgaatgaaacaaatatttttcctttagttgattttaccctgatttcaccgagtgtttcgatgagtaaatatacagcttaaacat

SEQ ID NO: 290989 - DNA, 1000 bp, Homo Sapiens
gctttcggggcgatggccgtagcctcctcccaggcacctgtctgcatccctctggccagtgcatgctgagcacgtgacctacccgtgttgggacacgtgaggatacagccttgacccccaggggctgacattctagggggagatagaaggagacaaacgtagaaggtagaataagtgggtggtggagtggcagggagtgctgagtgccacaggaagtcagacaaggaaggagagtgtggggcaggtgccgtttaaatggggggcgctggggtctcctcacagttgcttctcagctcagctgtgccaggatcttgttgagtcaggtcagctgcccacagccctcttgcctgacccctgaagcccagaactctgatcttcacagccctaggtatggccccagcaccccactgccctctctcctgccccagccgactgctgttcccagacttccctggccacgctccaagacgccagctctgccgcgggcactttgttctcacggtgtcctccatgcctgcagggcccatgcatgggaagttgcgttggcggcctgggtgttggcggttccgtgcctgctccaactctccgtgaggcccctctcccagagcctgacacactctgtggccgaactctaggcaggtgcccctgagtcctttcctcgacgaggcctgaccccatccccatcctcgctgggcccgccgaccccggtgttagcaagaatcctctaaatcagtttatggagaattacccaccctcgatatctgatcccattcctcatctcccacccttgatctcatcaccctgccggcctcctgcaagatcctcattgagccactccagtgagaatccccctaccctcgaaggccgccctaacaacttcccatccgctgacccctccaacgccatcaatctccagctgtggttgttgaactcggaggtgagctcctctcaccactctcttgaataaagcttttctcaccattttaaaaaaaaaaaaaaa

SEQ ID NO: 290990 - DNA, 1000 bp, Homo Sapiens; identical to SEQ ID NO: 118080

SEQ ID NO: 290991 - DNA, 1000 bp, Homo Sapiens
aagcagaaggaagtcggcaagctctgaaagtttacttctacattgatagttatcattttgaacaacttcctcaacggctgaaaaatggaggagggtttaaaattcatcctgttctttttgcacaagcactagagagcatggaaggatattattacagagacaatgtttctgtggaagaatttcaagctcagataaatgcagcctcactggaaaaggtcaaacagtacaaccagaagctcagggcattctacttggacaagtcaaattcaccaccaaactccacatccaaagctgcctatgtagataagctaatgaggcctctcaacgctttggatgaactttaccgactggtagcctcgtttatcagatccaagcgcacagctgcctgtgcaaacacagcttgcagtgcttctggggttggactgctgtcagtttcctcggagctgtgcaacaggctgggcgcctgccacatcatcatgtgcagcagcggtgtgcatcggtgcaccctgagcgtgacgctggagcaagccatcattctggccagaagccacggactgccacctcgttacatcatgcaggctacagatgtgatgcggaagcagggagcaagagttcagaacacagcgaagaatttgggagtcagagaccggactccacagtctgcaccaaggctgtacaagctgtgcgagccacctcccccagctggagaagaatgaaaagaactcccaagaaaccaggcaggcagaagctcctgaatgctggactagacaaactacatgctggctaaacattctccactgaagatacatcaatgcttttttttttttttttttctgtaaatctttcttcccattgcaaacaagtagtgatcagtttatactttgatatttatgctggaaatggatagaagttcaatcagacagttcagcttcacgaactgatgtctctctgtattgacattaagtattcacttttagagtaaaatccatccctgggacat

SEQ ID NO: 290992 - DNA, 1000 bp, Homo Sapiens; identical to SEQ ID NO: 118082

SEQ ID NO: 290993 - DNA, 1000 bp, Homo Sapiens; identical to SEQ ID NO: 223440

SEQ ID NO: 290994 - DNA, 1000 bp, Homo Sapiens; identical to SEQ ID NO: 224652

SEQ ID NO: 290995 - DNA, 1000 bp, Homo Sapiens; identical to SEQ ID NO: 118084

SEQ ID NO: 290996 - DNA, 1000 bp, Homo Sapiens; identical to SEQ ID NO: 118085

SEQ ID NO: 290997 - DNA, 1000 bp, Homo Sapiens; identical to SEQ ID NO: 220428

SEQ ID NO: 290998 - DNA, 1000 bp, Homo Sapiens
tccaagcagctcatcagcgagtggaagcagaagagcctggagggccgcggcctggggctgcccgacgacgccagccccgggcacctgcgcgcgcccgccgaacccatggcggaggaggaggaagaggaggaggacgaagaggaagaggaggaggaggaagaggaggaggacgagggcccggccccgccctcgctctaccccaccgtgcaggcgcggccggggctggggcctcgggtcatcctcccaccgcgcgcggggccgccgccgctggtgcacatcccggaggagggcgcgcagacgggggccggcctgtcccccaaaagcggcgccggggtgcgcgccaagtggctcatgatggccgagaagagcggggcggcagtggccaaccctccgcggctgctgcaggtcatcgccatgtccaaggctccgggcgcgccgggccccaaggcggccgagacggcgtcgtcgtccagcgccagctccgactcctcgcagtaccggtcgccgtcggaccgcgactccgccagcatcgtgaccatcgacgcgcacgcgccgcaccaccccgtggtgcacctgtcggccggcggcgcgccctgggagtggaaggcggcgggcggcggggccaaggcggaggccgacggcggctacgagctgggggacctggcgcgcggcttccgcggcggggccaagcccccgggcgtgtcccccggctcgtcggtcagcgacgtggaccaggaggagccgcggttcggggccgtggccaccgtcaacctggccacgggcgaggggctgcccccgctgggcgcggccgatggggcgctgggcccgggcagccgggagtccacgctgcggcgccacgcgggcggcctggggctggcggagcgcgaggcggaggcggaggccgagggctacttccgcaagatgcaggcgcgccgcttccccgactagcgcggcggggccgggggcgggcggggggcgggccgagggcgcgggcggccgc

SEQ ID NO: 290999 - DNA, 1000 bp, Homo Sapiens; identical to SEQ ID NO: 118087

SEQ ID NO: 291000 - DNA, 1000 bp, Homo Sapiens
ggatgggagaaaaaggattatcaagcaaagttattccttagaaaggacttggggttgtctctgattcttgtaaggggacccaaggtggatgaagggtcagagcgttgccccttccccattagtactggggcaagaacggagttgcttctataaacattattcggcccccttcagcaaaaaggaaagttgcccaaggaagggaagttgagttcaggttcagccagtggcgttgcgcatttgttttccattggatgcagaaggggggagttcgaattgtagaggggggaggatggcatgggggatgctaggaggaggaagagcagctgctaggggctgaagcgaaggggggtagggggttgctgctctggagtgctcttgattgaaacagaaagggaaagataacaaccagccgtttcctgcgtgctctgccgttggtgcacacaaaatatcctgggcaaaccccttgtcccctattgtgccccgcacccctttagatttacggaaagatcctgggaagaaggggagggaggagatcccaaggaccctggcccctcctttcaaggagctggcattttttagttgttagtcttcctgcctcctttttttttaatcgtttctaaggcagcctgatcaggagactgacaacaacccgccttctgacagagcaaggaggacatgatgggggcgtgttccttgctatgtagctagctgcagcgtcccctttccctgcctctttctgctctatctccacctccttttcccagccttcagaaggcagctgcagtcagcagggttgtttgagactatttattggttgctgtagattattatttttttttgaaaggccaattctgtattttttaagctaacaacacagatcccatgtagttggagaaccaaaggccacatacatgacaaaaagactgaaccgttcaggttacttgcatggagttggtgcttaaatgtgagttgattttgcttttttaaaagatacagcagc

SEQ ID NO: 291001 - DNA, 1000 bp, Homo Sapiens; identical to SEQ ID NO: 223444

SEQ ID NO: 291002 - DNA, 1000 bp, Homo Sapiens
gtggaggtgctgaagggccaaacgcacatcatgctgaccatcaaggagaccggccggtatcctgcctacaaggagatggtttctgagtactgctggctggaccgactgagcaacggggtgctgcagcagctgtccccggcctctgagagcagctccagcgtctcttcgtgcgcctccagcgccccctacagctcgggctccctgccgtcggaccgcatggacatctgcctcgggcaggaggagcccggcagccgcggcccaggctgggggcgggcggacacagccatgcagacggagcccgatgcgggaggccgggtggagacctggtgcagcgtgcggcccacagtcatcctcagggacaccgccatccgctcggacggcccccatcccggccgccgccttgactctgcgctctctgagtctcccaagacggctttgctgctggccctcagccgaccccggccccccatcacgcgctcccagagctatctgaccttgtgggaggagaagcagcagcggaagaaggagaagtcggggtcccctggggagaagggtgccctgcagcgctccaagacgctgatgaacctcttcttcaagggagggcggcaggggaggctagcgcgggacgggcgcagagaggcctggacactggacagcgggagcctggccaaaacttaccctcgcctggacatagagaaagagatgggggtttcaccctgttgcccaggctagtctcaaattcctggactgaagctatctatccgccttagtctcccaaagtgctaggattacagcgtgatctaccacacctggccaatcccaactactctggaagctgaagcagcaagatcacttgagcccaggagtttaagaccagcctgggcaacatagcaagaccctgtctctaaagaaaaaaaaaaagtaaaagaaaaataaagcacgtcttggctcagctgctgatttaagctgggtctaaacatctgaaaaaaaaaaaaaaaaa

SEQ ID NO: 291003 - DNA, 1000 bp, Homo Sapiens
gatggggctgcaaccagagctgaataacatgttaggctcacacatgcatcagcactgcacactggaatcattgctcttcctggactttgtagaaatcagtctcaagtgcttcaagagtctggctcctgctacttttatctgtcaggtagcacataaggtttgcagggtttatattttgtatagaatcacagttgtggagaaaaagtaataatttctcaatgaattttaaaaatgggcctattttctatccccgtggttcatctgatataattagtgttccctgtgaattccccccctctatgggaaggatgcctttactctttatcagtaataaattatgactgttttcatattgccttagggttatttccctgtgtaaaccattgtcttttgttttggttttctttagcattatgaagctttggtattgtacaaggtcagtagtaagatgctcactagtctcagggcttgtgtaatattctgggaggtcatttaaatgccagaaatggtcaagcaattatacacagtatttatgactctgttaagcataccgtttgtctgtcacattagtagattctgagattaaaaaaaatttttaaagagtgatcatttaaataatttctaaaagggtcttttcaagctctaacaaagtcactaacaaatgcattattttctacagaattagatgttagtagtacagtactgcatattcagggaaaaagtgtgaggaattgatttcaaaatagttcgttcttgtgtttgacctaagaatgattgtcgcatgaagtgtttgtttttacagtttagcatatataaacaaacatgataggattccttaagatgttaccacccagggggccacaagccagcctgctgtctcaggaagctgtagaaggagtgtttgtcaatttcttgtcactggtttgctgacttactgaggattaattgttgccttacaatgttactgaaataaactgtttaatataaaaaaaaaaaaaaa

SEQ ID NO: 291004 - DNA, 1000 bp, Homo Sapiens
gaagaatttcaagatgccataagaagggctgtacctgatggtcacacatttaaagggttcccaatacattttgtgtatagaaatgcaagacgtgcatttgccacatgtcttcgatctcctttctgtgaagaaataatctgttgccgtggagaccaagtgcgactggcagttcgtgtccgagtatttacttaccctgaatctgcatgtgctgtttggatcatgtttgcttgtaaatatcgctcggtattatagggccaatatttatataagatttatacctgtgtttaattggaattttacacattgtacattacttagctatttagaggtttgttattttaaaatcacaatctggcttgaatggcatacttcaattttgtatatacttgactggtaatgtttaaaaaaaatcatgcattcctttaaaaattaaggctgaaaaacttgtataaatctccctggaatttagtataaattaagtgtatattctattttaataaatgctactttgtttacagttatcagtagtttaaatattaatataaaatgcattcagttttctttacacaaacaggtaatcaaagagatgtttgtctaagggtttgagccctagacaaatcagtatgatcattacttttcacaggttaatggaattattttatacagattaggagaaattaacctcatgacagatttatttattgcattggtgaaaataaatgttaatgaattaccacttttgtggtttattcgtggtccttgggatatttgagactgtccagaaatttatggttggaccttgaagcaagagtaggaaaaaactaataccagaaaagcataaatattaataacctcatatgaaagtacatgaatcatttagaaatatttatcactgtgatttgttgtaaaaatgaattgggtattttagaaaaactttattatacctctttgttatgatactgataaattgtgatcttgcagtcgaaaaaaaaaaaaaaaa

SEQ ID NO: 291005 - DNA, 1000 bp, Homo Sapiens
gctgccgagcctcagctgctggcatttccttctgctgtttgctgcttttgtgcctcccccactttccatcacctctggagtcccgtctggacgtcccttcctgctacaggaataatgaggcgtgggctgcctcccgctagggcctcctgctccctgtaggtagtttctggctgaggcttgctaattggggatgcttcttagagcatcttccacatcaactcccctggctgctggctaccgattaaattcattagtgtgaaagaggtgggagtgaggttttctggcctgaagcagtctgcactgaaaggtacccaagtggcctgaaacagtgtagggaaagacctgggaaacactggaccaaaaaagcctgatctcatggagacctgcatggccctgttagagatggcgtagaagtgaaagtcttaaagggagcattagagatccttttaatacacgactgagtgccagcttatttgtgatgccccttcccagaccaggttaggattcctgggaaggccgcggattccggccctggaagaggcaggatcctggagcagttttgtgaggcttttgtgctcccatacgccccctggtggtgagtgtaaagaagactttgcctctcacaactacatgtatgtgtggcatttttgttagagatgagaaaaggattgagaaggataaactggaatcctggtaagaagcctttatgccagcccgacacctgctgtaattggggtgcatgagctatggagtcagatagttgttgggagggggaggacaagaagtctattgtttggactgtgtttgtctcacaatcaccacaaaataaaagtgtagaaaatgcttgtggtgtactaactcttttctgtacttaagttactcagattaacatgcacttctaattctaaacattttttttggagtcatcactgtcgctgtttaagtagaacaatgccaacgatgtatgagaaacagggaataaatcaggatttgtgtgtgt

SEQ ID NO: 291006 - DNA, 1000 bp, Homo Sapiens
tccctgttgtccctgagagccttctggccaccgtctgctgccccacccccttcatggttggagtacaaatgcgcttccagcaggaggtcatggacagccctatggaagaggtcctgctggtcaatctttgtgaaggaaccttcttaatgtcggttggtgatgaaaaagacatcctgccaccgaagcttcaggatgacatcttagactctcttggtcaggggatcaatgagttaaagactgcagaacaaatcaacgagcatgtttcaggcccctttgtgcagttctttgtcaagattgtgggccattatgcttcctatatcaagcgggaggcaaatgggcaaggccacttccaagaaagatccttctgtaaggctctgacctccaagaccaaccgccgatttgtgaagaagtttgtgaagacacagctcttctcacttttcatccaggaagccgagaagagcaagaatcctcctgcaggctatttccaacagaaaatacttgaatatgaggaacagaagaaacagaagaaaccaagggaaaaaactgtgaaataagagctgtggtgaataagaatgactagagctacacaccatttctggacttcagcccctgccagtgtggcaggatcagcaaaactgtcagctcccaaaatccatatcctcactctgagtcttggtatccaggtattgcttcaaactggtgtctgagatttggatccctggtattgatttctcaggactttggagggctctgacaccatgctcacagaactgggctcagagctccattttttgcagaggtgacacaggtaggaaacagtagtacatgtgttgtagacacttggttagaagctgctgcaactgccctctcccatcattataacatcttcaacacagaacacactttgtggtcgaaaggctcagcctctctacatgaagtctgtggacatgtaaggacgagagtaaagaggaaaatcttataaaaaaaaaaaaaaaaaaaa

SEQ ID NO: 291007 - DNA, 1000 bp, Homo Sapiens
atactgcccattagcgtggccgccagcattacagctcagaggcatcgccgctacaaagctttggtggcatcagagccgctcagtgtgcggctctatcgtctgggcttggcttaccttgctttcacaggcccactggcatacagtgccctctgcaacacagctgccaccctcagctatgtggcagaaacctttggctccttcttgaattggttcagcttcttcccccttcttggccgcctcatggagtttgtcctccttctgccttaccggatctggaggctactgatgggggagactggcttcaacagcagctgctttcaggagtgggcgaagctctatgagtttgttcacagttttcaggatgagaagcgtcagctggcttaccaggttttgggcctctcagaaggggcaacaaatgaagaaatacatcggagttaccaggagctagtgaaggtctggcacccagaccacaacctggaccagacagaggaggcacagaggcacttcctggagatccaggctgcgtatgaagtcctgagtcaacccaggaagccctggggatcccggaggtgaaaagaaacttccccctgaggactgactcttcctagcagagctgggcaacttgtcccaaatctagctttgcccacgaatggcatcccaacagagttaaagaaactgcttgcaggggctgggcgtggtggctcatgcctgtaatcccggcactttgggaggccgaggcgggcagatcacgaggtcaggagttcgagaccagcagcctggccaatatggtgaaacttcgtctctactaaaaatacaaaaaattggccaggagtggtggcaggcacctgtagtcccagctacttgggaggctgaggcaggagaatcacctgaacctgagaggcggaggttgcagtgagccgagatcacgccactgcactccagcctgggcaacaagagtgaaactccgtctcaaaaaaaaaaaaaaaaaaaaaaaaaaaaa

SEQ ID NO: 291008 - DNA, 1000 bp, Homo Sapiens
tagtcccagctactcaggaggcttgggtgggaggattgcctgagaccaggaggttgaggctgcagtgagccgtgatttcaccaccactccagcctgggtgagaaagcaagaccctatatcaatgaaaaaaaaaaaaaaaaagaccagctttgcagccagaagccagaggatacccagggacagtagggctcccaggtggctggttctcagcacaccttccatgaatctgcttgctgctgcttcagtgtggtggccatcatgctgtgtgacaaaccaggctgttcacagcttcctcagccccccagaaggggagtgtcaggaagagacatttagttcatttgcctgcaaattttcttctcctgcaaggatctcggtggactcagtcacaaaacaaaggctaaaccaggatttataagagagggcttataaatccctctgccgacgcagggagcagagacttgccggcatgttttgggggtaatgatcgtgggcagggagcagaggtccgctgaggcagtctgtccttgagactaacaaagtcatctgctgtttggggaaatctctggtgttgggaacaggcccccaaatctggccataaactggccccaaaactggccataaacaaaatatctgcagcactgtgacatgtttgtgatggccatgacccccaccctgaaggttgtgggtttactggaacgagggcgaggaacacctggcccacccagggcggaaaaccgcttaaaggggttcctgaaccacaaaccatagcataagtgatctgtgccttaacgacatgttcctgctgcagataactagccagacccatccctttatttcagcccatccctttatttcctgtaagaaatgtttttagttaatctataatctatagaaataatgcttatcactggcttgctgtcaataaatatgtgggtaaatctctgttcaaggctctcagctctgaaggccgtgagacccctgatttcccactccacaccct

SEQ ID NO: 291009 - DNA, 1000 bp, Homo Sapiens
cctatttttcacctcttactggtaacagagtggtgaccacatgtgctgattgtaatctgagaatttttgacagcagctgtatatcttctaagattccgctcctcaccaccatcaggcacaacactttcactgggcgatggctgaccaggttccaagccatgtgggatcctaaacaagaagactgtgtcatagttggcagcatggcccatccacgacgggtagaaatcttccatgagacaggaaagagggtgcattcgtttggtggagaataccttgtctctgtgtgttccatcaatgccatgcacccaactcggtatattttggctggaggtaattccagcgggaagatacatgtttttatgaatgaaaaaagctgctgagtttttggtttaggaacatcaatttgttcaaattgaccactgtctaaggagcctagtaatcggcgtgccttagtgtgtttatgtggtaatgtgttacatttagcaattataacattgttttattaataagactataagaagagtgtacttttagtaagggagaagtcttggagggttgcttctgcaggacggggagggaatttgaggggaggctgaggtgccgtcaggactttttttttttttttttttttgagatggagttttgctcttgttgcccaggctggagtgcaatagcgcgatcttggctcaccgcaacctccgcctcccaggttcaagcgattctcctgcctcagactcctaagtagctgggattacaggcacctgccaccacgcctggctatttttttgtatttttagtagagatggggtttcatcatgttggccaggctggtctcgagctcctgacctcaggtgatctgcccgcctcggcctccaaaagtgctggaattacaggcgtgagccaccatgcctggccatcagaacttgtaatcaagacagtatgttgagaaattctaacattataaattacaaagctttgactattaaagtttttgtgatct

SEQ ID NO: 291010 - DNA, 1000 bp, Homo Sapiens; identical to SEQ ID NO: 118089

SEQ ID NO: 291011 - DNA, 1000 bp, Homo Sapiens
aaatttctccttgggtttcaagactgagagggtcaatttctaggtttattcaagaaaaaccataaacatcagttctatgggacaattgggcccatttcaaggctctgaggataagggttaatgaggggacagagtcgcctggagaagttcactggggcctacaagaaactagagaggcttcctggcaaagctctatgctgtctatcctctcttctctccttgcaggaagattccagtataatagacccgaggtgaaaaggcttttgttcaataagtagaaaactgaaggggggtgggaggcacatggatttgaaccagagaccgcttggcctgcaggcaaatgctgtaccttcagttgcacccctcacttgttacagctgtttctgataagcacttgtgcagccccatcagcacctcgatttcttcttggtgagtccatgggaacagccccactgcaaacaacccattcctgctctcctctttcctctaaacctcaacctcctcctacctggcagtccacaggcctacagcttctcctcagtgggaaagacatcagcttggaaaaccacttggaaagccaacgttatcctagaaaagctttttaaatgacccagcaggacaagtctccggatggccttggccaacccggtgcttccctcttttcttggttgtagttctcagaataactagagaatgtactgggagtgttgtcctgagataaggaggaactgtcctaaacctggactctgttcccatcacacctagaacaggatgtcctgcaacgctttagcccaatgatccaagttgcccttggggtataaaacttgacagcagagggcgttcagggtccctcagctgcagtgtgaagtgggacacacaggtgagactccatctgccctgggcaggttcctgagccttgggggaccagttcaccctacatcccaggcttctgttgtcccttgcctgcctgtaaggaataaagttgctttgcttaacttgc

SEQ ID NO: 291012 - DNA, 1000 bp, Homo Sapiens
tggagaagaccagtccaatggcgatctgggtgtccatagtggggaagaactccagctcaccaccactatcacccatgtggacggacccactgagatctacaagttgacccgcaaggaggcccaggagtaggaggctgcagcgcccggctgggacggtctctccataccccagcccctctaactagagtggggagcatgccagagagagctcaatgtacaaatgaatgcctcatggctcttagctgtggtttcttggaccagcggcatggacatttgtcagtttgccttctgacggtagcttttggaggaagattcctgcagccactaatgcattgtgtatgataacaaaaactctggtatgacacattttctgtgatcattgttaattagtgacatagtaacatctgtagcagctggttagtaaacctcatgtgggggtggggtgggggtgtattccttgggggatggtttgggccgaatggggagtggaatatttgacatttttcctgttttaaattctaggatagattttaacatcctttgcggtcccagtccaaggtaggctggtgtcatagtcttctcactcctaatccatgaccactgtttttttcctatttatatcaccaggtagcccactgagttaatatttaagttgtcaatagataagtgtccctgttttgtggcataatataactgaatttcatgagaagatttattccaccaggggtatttcagctttgaaaccaaatctgtgtatctaatactaaccaatctgttggatgtgggttttaaaaaatgtttgctaaactacccaagtaagatttactgtattaaatggccttcgggtctgaaaagcttttttaacttcttgcttaaaatgcgttttattttgataagatacttcaaatagcctccaaaagtgtagatccaatcatttaaataaacctgtatgtatatgcatatgtgtacatgcatatcccctcctgctaaaactcataaa

SEQ ID NO: 291013 - DNA, 1000 bp, Homo Sapiens
atcttgtgtttgccattacagccctatgtaacttaaaattacaattatattttatgtaaatattttgcaaaggactatgcattctgaaatgcataggtgctttttcccaccaagcatttgcatatgtccacaaatagtattatgttactagtatctatattttgattttcctgagcaactgtatcaaatccaaatttagattagacaaaaaattattattttaattaaactgtggcatacatataatacatacctaattatagtagtgagaactatttcttttatctctttaggttcaaaatggtgaatttctttattatatgaatgctttgttgtgagataacatcacactgttacaatggattttagaggtttgtcttttttgggtggggtgggaagctgagagggttaattcaatacatggctgaaattaccaaatgtataaatacctcattttcactaccatacaagaaaaaaacacctattttgattgatcagttcttttgtatgaatatccacctcctttaaatactctatttttatatatatttttatatgaagataaacatgaatttatatttaactgtcttaaattatatttacataaatgcaaatatcacttgatataaacaatacaaatctgcatcttacagatgataatttttttagaagaatgatacagaattaactttaaaaataaaacttttctaatatacacttaaatgcaaacatcatttttaaattttcagtgatttttttaatgacataaaacgttaccaatgtgtgcagcctctccatcatgttttaacatactgtatactctatagcagtattacagtcagtatttcatataattttctttagacctaactgttaccatctgactgaggttactctggtatttatctcttcgctgctgaaataataatggattttagaaacaattgtaataatatcattaataaatgtcttactagtaataaaaaaaaaaaaaaaaaaa

SEQ ID NO: 291014 - DNA, 1000 bp, Homo Sapiens
aagtttcagaaactttcaggtttggcatattgctacattgcagaccctgggagcattacagtggaaaccaatctttggtttgtgaataggaagaatctattaggcctctggtctgaggcagattttttttttgagatggggtctcactcttgcccaggctggagtgtcgtggcgtgatctcagctcgctgcaacctccgcctcccgggttcaggtgattctcgtgcctcagcttccccagtagctaggattaaaggtgcgtgccaccatgcccggctaatttttgtatttttggtagagacagggtttcaccatgttggccaggctggtctcaaactcctgacctcaagtgatccacccgcctcggcctctcaaagtgctgggattataggcgtgagccaccacaccccgccgcggctgacttaaccttagatttcagattccctttcaatcatgcccgtttgcttgggtttgaccactccccactcctggatctggactgtttcttcctgttgctgtcagccttggttctagtttatagtcttgtctcctccgtttctgcttatggtgtggacaaatgaccttttttaagcagctggtaataattttacattgactggagcctgtgcatttgctcagagatgctacaatttttagatatttctaagacttctggattcttgaggtagttaaggattaaaaccagaaacagtcgaggttttttaaaagcagggtaagccatgaagtgaatacagggtgactgagtgatcatcagatgagattaattcttttgggttttcttggttttaaggcatctcgaatgccccttgaaaatgtagttttccctggtggtgggcacctgtaatcccagctgctcgggaggctgaggcaggataattgcttgagcctgggaggtggaggttgcagtgagctgagattgtgccactgcgctccagcctgggtgacagagtgggacaccatctcaaaaaaaaaaaaaaaaa

SEQ ID NO: 291015 - DNA, 1000 bp, Homo Sapiens; identical to SEQ ID NO: 223447

SEQ ID NO: 291016 - DNA, 1000 bp, Homo Sapiens; identical to SEQ ID NO: 118090

SEQ ID NO: 291017 - DNA, 1000 bp, Homo Sapiens; identical to SEQ ID NO: 223448

SEQ ID NO: 291018 - DNA, 1000 bp, Homo Sapiens
tttttccccctgtgaaaacttactttgcccctagtctggctgctgctaggacttctgaggagcaatgggacatgagtgtccctgtatctgcgccactgccgcaagggaagcctcaggaaccagcacctggaggccaggatagccaagccctgggtgagcgagaggctggagaacacaggagctcacccagggctgctgcccaaccatgggccactgtgaacagacttcagtcctctgtttttgtttcataagccgttgagacatctgatggacttggcttaggccctgctgggacatcccacgtgtgatccctttcactccatcaggacaccaggactgtccttaggaaaatgtccttgagatggcagcaggagtcatattttctgtgtgtgtgtttcggaaagccgctgtgtcctgcctcagcacaaagacccagtgtcatttgctcctcctgttcctgtgccactccagaacctcagcagatctgagccaccgcctgccagtgtgagaggcggccactttcatggcagctcatcaggcgcagggccccagacagcttcccagcaggccctagagcccggcctgggccaatgatggagggcggccgccagcccagggcctgcccatccagaagggactccccagggcctgggggaggagacccttggaaaagtcctctcttcccagctcctgattctggatctgagattctcagatcacaggcccctgtgctccaggccgaggctgggctaccctcagggagatccagagactcatgcccatggccatccatgcgtggacgctgtgtggagagtccaggatgacgggatcccgcacaagctcccttcagtccttcagggctgggccatgtggttgatttttctaaagctggagaaaggaagaattgtgccttgcatattacttgagcttaaactgacaacctggatgtaaataggagcctttctactggtttatttaataaagttctatgtgatttttt

SEQ ID NO: 291019 - DNA, 1000 bp, Homo Sapiens
atttttcagacttcgttcataccttgcagtttatcagcgaactcatactggagagaaaccttacaaatgtgatgattgtggcaaggtcttcagtcaagcttcatcttatgcaaaacacaggtgaattcatacaagaaagaaacctcacaagggtgatgattgtgtcaaagcctttatttcaggttcatgcctcattacacatcagagaatccatactagacagagatcttacaaaagtcatatgtgtggcaagatctttagtctgaggtcactccttgcaggacatcaggaaattcatttttgaggtaataatttcaaatgcaatgagtatagcaaaccatcaagcacaattgatgttagattcaaatcagcattgagttcagtttgagttgacttaacattgagttcaagtatttgttgagattaaagtgtttatgttaagaggattaggccaggtgcggtggctcacacctgtaatcccagcactttgggaggccaagacaggtagatcacttgagatcaggagtttgagagcagcctggccaacagaggtgagcacctttcccagtctgttttttgtttcttcaacaaaaactgatagagatttttatgggtattgtgttgaatcaaaatcacattgggttatgtaatcatttaacagtattaatttttccaaaacatcaatatgggttatatctttatatatgtttttaatcattttgatcaatgtttgtagatttcaatgtatgaatttctcacttctttccatttattcctatttcttactttaagttctctagcaaatggaagtgtttttaaattttcatttaaaattgtttattgttaatgtatgaaaattcaacgaatttttggtgctgatattgtattgtgcaaatctactgatgtgtttattagtcacagtagtattttggttgactctttgtgattttctacacagaagatcatgtcatctacaaaaaatataattttactttttctg

SEQ ID NO: 291020 - DNA, 1000 bp, Homo Sapiens
tcttccagttggtgggaggatcagctagtgaatgtgatacaataccagggaggcagtgcatggcttcctgtttcttcctgcttaagcaatttgatgatgttttgatttacctcaactcatttaagagttacttctataatgatgacatctttaactttaattatgcccaagccaaagctgcaacaggcaataccagtgagggcgaagaggcgttcctcttgatccaaagtgagaagatgaaaaatgattacatttacctcagctggttagctcggtgctatattatgaataagaaaccaagactagcctgggaactttatcttaagatggaaacctccggcgagtccttcagtctcttacagctcattgctaatgtctgctacaagatgggccagttttactattctgccaaagcttttgatgtccttgagaggctggatcctaaccctgaatattgggaaggcaaacggggtgcctgtgtgggcattttccagatgatcatagctgggagagaacccaaagagacccttcgagaagtgctccatttactgagaagcacaggtaacacccaagtagaatacatgatccggatcatgaagaaatgggccaaagaaaacagagtgtccatctaaaatagcgccagcgtcctaggaaccagcttctactttgacataaaactggaaatcattttcactccagtttaatctgtgatacagggctctgttttattgacattttccttccttgctctttaagcctcaaggtcagagactgacttgctgagacttagtctcctggctgaacagagtgccatagtctgtgaccctgtatgatcctagtagcaataagattttggacttatctggtgcctttcttccaaaaatgctcagagtacttttatgcaatttactgactttaaggaaaacagtataacttttttttgttagcattttatggcattgtctcctggctgcaataacaaacatctttgatgttcaag

SEQ ID NO: 291021 - DNA, 1000 bp, Homo Sapiens
ctgagtctgtatcagctgctcctagtgcagcaagagagctcagcttaacctcacaacttaagaagctacaagagaccattgagcagaaaacaaagatagagatcggggacacgatccgagtcagaggcagtatccgcacatacagagaagagcgagagattcatgccaccgcttactataaagtggacgacccagtgtggaacattcaaattgcaaggatgcttgagctgcccactatctacaggaaagtttatgaccagccttttcacagctcagccctagagaaagaagaggcactaagcaatccaggcgccctggacctccccagtctcacgagtttgctgagtgaaaaagccaaagaattcctcatggagaacagagtgcagagcttttaccagcaggagctggaaatggtggagtctttgctgtcccttgccaatcagcctgtgattcacagtgcctgctccgaccaagtgaattttaagaaggacaccacttccaaggcaattcatagtatatttaagaatgctatacaactgctgcaggaaaaaggacttgttttccagaaagatgatggttttgataacctatactatgtaaccagagaagacaaagacctgcacagaaagatccaccggatcattcagcaggactgccagaaaccaaatcacatggagaagggctgtcacttcctgcacatcttggcctgtgctcgcctgagcatccgcccgggcctgagcgaggctgtgctgcagcaagttctggagctcctggaggaccagagtgacattgtcagcacaatggagcactactacacagcgttctgagcagagacacgcagaccagctgaggaggacaaagataaggtggcattcacccccaggctctgactttcagcatcatgcaggggcttatctgtctggaggcagttacctcataataaactataaaatatagtcatcttgggaaaaaaaaaaaaaaaaaaaaaaaaaaaaaaaaa

SEQ ID NO: 291022 - DNA, 1000 bp, Homo Sapiens; identical to SEQ ID NO: 223450

SEQ ID NO: 291023 - DNA, 1000 bp, Homo Sapiens
agtggaccttggcccggcagcaccacgctgactatagcaaccagctggacccggcctctggcacccgaaacttccacccccgacggctcctgctgacagggcccccacaggtgggaaagacgggctcctatttacagttcctcaggatcctcttccgcatgctcatcaggctcctggaggtggacgtgtatgatgaggaggagatcaacaccgatcacaatgaaagcagtgaagtgagccagtcagagggagagccctggcctgacatcgagagcttcagtaaaatgccttttgatgtcagtgtgcatgaccccaagtacagtttgatgagcctggtgtatactgagaagctggcaggggtcaaacaagaagtgataaaggaatccaaagttgaagagcccaggaaacgggaaactgtatccataatgctgaccaaatatgcagcctataacacctttcaccactgtgaacagtgccgccagtacatggacttcacctctgcctcccagatgtctgactccacccttcatgccttcacattctcttcttctatgctgggagaagaggttcagctctatttcatcattcccaaatccaaagagagtcattttgtcttcagcaagcagggcaagcacctggagagcatgcggctgcccctggtttcagacaagaatttgaatgcagtcaagagccctattttcactccttccagtggtcgacatgagcacggactcctaaaccttttccacgccatggagggcatcagccaccttcacctcctggtggtcaaagagtatgagatgcctctgtaccgcaagtactggcccaaccacatcatgctggtgcttcccggcatgttcaataatgcaggcgtgggtaaggggcccccctgggatggggagaagggcttcgaagataaactgagctccattcccctggcatgaaactttcagattcccctgcctctagaaattgtcctgccctcctcaccactcttcgg

SEQ ID NO: 291024 - DNA, 1000 bp, Homo Sapiens
ccttcaggcttgaattttaaaggggaggactttctgccaacttttcttgtatgccttgggaaagccagttgccctgaacccagcagacaccatggaatgtcctttgcacgcattaaatggtacagaactgaagcctcggaagcaatttggaactcgatcttctcttccttaaatgaaaagttattgaccaaatggactttttaaaagacacaggacccttaactttgccccaaagtgaggggctccacaccaaccccaggcggaggaacactcagacagattaaggatactgttgacctgtcactgtttattatttcagcactaaaactgaggagcctcaactgctggctcttcttccctttgtatttgtgtaaggagcactgcactcccataaaaggttttaaaatacaaaatgtacaagaacacacaattccaagtgctgtaaacataactgagaaccagttcctttactaaacatccattttataaaacacaaggtttcaatttgagcccatctgagccttaaagatccattctgaataccaaaaacagggcttcacagccaggcccagaagaggtctggtgataatggctggccctgggtggggatagtttacacccgggcagcagcaccacacatgaacccaaagacatgttctttttaaagctgttttcagccatgtttctctgtgcatctccagtaagcagaaggctacccattccattcctcaacccaagagctagcacagttagagtaggagggggtgcgtactagcacgtgcccagttgctcagtgctgctagtagaaattgatttgcatagtccaatggatgtgtgctttaacaccactatgttgcacaaaaatttaagtctttatctacaaagccaaaaaatattgactcttaacaccaaagcttttacaaagctgatataaaactgcttacatagtatacaaagctctattttaaaatttaatgtttattttaaataggaaagcatt

SEQ ID NO: 291025 - DNA, 1000 bp, Homo Sapiens; identical to SEQ ID NO: 223451

SEQ ID NO: 291026 - DNA, 1000 bp, Homo Sapiens; identical to SEQ ID NO: 118091

SEQ ID NO: 291027 - DNA, 1000 bp, Homo Sapiens; identical to SEQ ID NO: 223453

SEQ ID NO: 291028 - DNA, 1000 bp, Homo Sapiens; identical to SEQ ID NO: 223454

SEQ ID NO: 291029 - DNA, 1000 bp, Homo Sapiens
agggtattgctctgttgcccaggctagagtgcagtggcatgatcataggttattgcatcaacctcttgagctcaagcgatcctcctgccttagcctcttgagttgctgggactataggcatgtaccaccatgcccagctaatttataattactattattgttttgtagggacagagttttgctatgttgcccagattggtctcaaactcctggcctctcactcctgccgtcatggcctccaaagtttaatttttttaaaagtaactgttagatggaggaatatggtgacccactattgttgagaaatttgttttccacttgtcacgtcacataagatgattgctaaaatattgtactggtgttcggtggtgagtcatatttttgaaagttaataattataaataggtaatttccttctaatatgttggtactgtctatggccataccaccctgaacatgcctgagcttgtcataatatgttgagtacccaaaagatttgtttatattgttaatcttagggaaaaaaaattaaaatccagtagatcagaacatcaggctttcagatacaaattgatttactggtttttattttgctgattataatatttggtatatttaaggtaatctagttaactagatgctatttcatagattatattgaatgatttaaaactttattttcaaggatagtttattttaaatggcatattgaaaacatcattattaagatccagtaggtaggacatttattggattaaaatgaagcatttatctatgtctttaggtgtcattgttccctttctgaattagctgtacatataagccttcctttggttttaagtactgatttttttttaaaaaaagagggactgtttaccattcttccactgtgctgttataaagttgtatttgaaaggtaatgttgtttttattaatcttttgtcttaaaataatttaaagtgctttgaattttaaaacattaaacaaatccttaaataac

SEQ ID NO: 291030 - DNA, 1000 bp, Homo Sapiens; identical to SEQ ID NO: 118092

SEQ ID NO: 291031 - DNA, 1000 bp, Homo Sapiens
tgaagagacattagaagaaatggacagtgagttgctcaagtgtgaattctgtgggaaaatgggatatgctaatgaatttttgcggtcaaaacgattctgcactatgtcatgtgccaaaaggtacaatgttagctgttctaaaaaatttgcacttagtcgttggaatcgtaagcctgataatcaaagtcttgggcatcgtggccgtcgtccaagtggccctgatggggcagcgagagaacatatccttaggcagcttccaattacttatccatctgcagaagaagacttggcttctcatgaagattctgtgccatctgctatgacaactcgtctgcgcaggcagagcgagcgggaaagagaacgtgagcttcgggatgtgagaattcggaaaatgcctgagaacagtgacttgctaccagttgcacaaacagagccatctatatggacagttgatgatgtctgggccttcatccattctttgcctggttgccaggatatcgcagatgaattcagagcacaggagattgatggacaggcccttctcttgctgaaagaagaccatctcatgagtgcaatgaatatcaagctaggcccagccctgaagatctgtgcacgcatcaactctctgaaggaatcttaacaggaacatgaagccttgataaaacagcagttttacttttctcacaaaaacttgtaaggtaaaggcctaacttggtctagaatatgacacttattgtggtggatagccaagcacattgggatctccacatcaaatactgacatttcttctacaggtataataattcatcatgcattttcataattaataaacattggtaaaattaattttacaggttacatgaaacattgaaagacttgttacagagggccatgatatttttcaaagaaatgtgttatactagataatttttttaaaggtgatgtttatcattaatataaagaatccttttaaaagtaatttaatgatttacatttctcc

SEQ ID NO: 291032 - DNA, 1000 bp, Homo Sapiens
caatggattgaagcagtcaaattataatgaaaaggtcatgtacgtagaagggactgcagttgtgatgggttttgaagatcccatgctacagacagatgacactcctattaaacgctgtctgcaaaccaaatggccatacattgagttactctggaccacagatcgctctccttcactaaattaatttgtctaagtatttataaggaagatcttaataacagatgttgaaagaaggagtcaagactggcaattggctggattaagctaaacactggtatcactgattaactgtaaataacaattaaaaacacattttcagtgtttatgatatgtttaaattatttgtcctaaagctttatgttaaagattatcctattttaccccttcgtgtgaaatttactagcaaaattaagctttcatcaaagttcatcacttttgcattcagatacttggtcatttacttaccaaattacaaacgcaatactacagcatttgtatattaagtatcacagttactattgataaactacttttgggttttatttcattgaggcactttttttattgtttgaatgattccggcttgtaatatatcagcctctacaatgaaatgcagaagagttcatttttctaagatctgtttttcattagaaatattgacaaataacacattgtcaacctggatcctttgacaatttacttaactctggcatgttcacaaaaagtagaaactctaagagaccattaccatttattcacagatgtataggggatgtattctaaaaactgacagaaaagagaatctgatagtcaacactgttaacttttactgtgtaattgccaaatacacttttccaaatttgtcccaacagccctgtaagccagctttcttctatatttataaacacgataaatgcatgagaagatctgttattacattagtatattacgttatttattatgatcctagttgatggcctaaataaacacctttttcttt

SEQ ID NO: 291033 - DNA, 1000 bp, Homo Sapiens; identical to SEQ ID NO: 223455

SEQ ID NO: 291034 - DNA, 1000 bp, Homo Sapiens; identical to SEQ ID NO: 118093

SEQ ID NO: 291035 - DNA, 1000 bp, Homo Sapiens
atgctctttgaaaaagtctatcgactgaccatgatcaatctagcatatgtatgttcagtgggctagccttggtcctcagggacagtgtgtgactctagtggtcttcctaaccagtctcttgcctaaagatatctgggacctctactggctttaatgacaaataatgttatgttgaggttatgcttcctttgttatttgctgattttcctactaaatgtagcatttcaattagatccagctttcacattttgagataattgtaaaaagaatgaaattatgcagaaatggccaatatctcttatcaatctgttcttttggaaaccctcatgtactataaattgtgtacagttaaaaaaatatatatatatatatattcttacatgagtaaaaagcaccctctcccagcaatcgtatgccattggtatttgaagagaattcccaaataacccattgctgctgctgctgtttttgatttgtatgggtttttttgttttgtttgtttttgtgtggtaaactgatatttaaaaaaggaaaggagaaaaatcacgactactgtttacagactgaaaaattattgctttttatactactgagatcctaagttaagactctccaaagcaaacatttggtttaaatcatttatctgatgtagataaaaggtagagaaacttgtagtgttctccacataatggaaaatgtacaaatgcctagttgtgttgcccatcaattttgtatattttcataattttaattgttgaaaattgcattatattttgcaatcactatgttcaatctggatttgtctttcattttaacttttaatataaaaaggggtttcaatgtatctacaggcttgttattgaaacttcctacttatttgatgtgatttattaatataggaagtatatattcttccttaagtaagtgaagcatagcaaatctactttaaactggatgggttaatttatataaacattttcattttaagttggcaaaaaaa

SEQ ID NO: 291036 - DNA, 1000 bp, Homo Sapiens; identical to SEQ ID NO: 223456

SEQ ID NO: 291037 - DNA, 1000 bp, Homo Sapiens; identical to SEQ ID NO: 223457

SEQ ID NO: 291038 - DNA, 1000 bp, Homo Sapiens; identical to SEQ ID NO: 118094

SEQ ID NO: 291039 - DNA, 1000 bp, Homo Sapiens; identical to SEQ ID NO: 118095

SEQ ID NO: 291040 - DNA, 1000 bp, Homo Sapiens
agccttcagtcgcccttcctacctacagacgcatgagaaaactcacagtggagagaaaccctatgcctgtcaatcttgcgggaagacatttcttcgttcccactctctcactgaacatgtaaggactcacactggagagaaaccctacgaatgtgggcagtgtgggaaaggcttcagttgtcccaaatcctttcgcgcacatgtgatgatgcacgccggagggagaccgtatgagtgcaagcactgtgggaaagccttcaggtgtcagaaatcctttcgagtccatatgatcatgcacgccggagggagaccgtatgagtgcaagcagtgtgggaaagcctactgctgggcaacatcctttcaacgacacgtgagaattcacaacggggagaaaccctataagtgtggaaaatgcgggaaagcattcggttggccctcatccttacacaaacacgcgagaacgcatgctaaaaagaaacctgtgagtgggggcagcgtgggaaagtcttccgcgaggcctcgcccctccacagatgtcaaatcacaaactagagagaaagtctataaatgtgaaacgtgtgggaaaacgtatggttggtcctcatctttacacaaacatgagagaaagcacactggggagaaacctgtaaatgcagccagtgtgggaaaaccttcaggcgggctttgctcttccaaaaatgtaagaacgcagattggacagaagcccagtaaatgcgaaaaatgtgggaaagctttcagttgtcccaaagcctttcaaggtcatgtgagaagtcacacaggaaagaaatcctgtacatctaagtaatgggggaaaacctgtgcaaattaattcacatacatggttcagaaaattcacagcaggagggccgggcgcggtggctcacgcctgtaatcccagcactttgggaggccgaggcaggcggatcacgaggtcaggagatcaagaccatcctggctatggtgaaaccccgtctctact

SEQ ID NO: 291041 - DNA, 1000 bp, Homo Sapiens
tgaagagtgcatcaaatcacccgtggttgagacagtccctgtttagtagcttaaattattctaggaccaactcttctcttatttaaggcactgtatttaattggatttcctgggctcatcattggttaaactgaagaccaagaaaacttggacggtggttaatcttccagactgtattttgttttttcctttctagccacatgactgtggcattgcacaaatacagtctctgtagggattttaaaagatttcagactgttttgatagaaaaagctaaattttaaaatgcatatctcacagttgcctacctgtcaaactgtgtgaaacctgccaatctgtgtagatcagagctccaaattttggattatcgggcctgtgcaagattgttaactaaggctgggaaataataagatttagagtcctaattttcaatatatctgaagataatgatgactttttaatgtaaaagtaattattgtaagaaaaagatttaattgttccatgtgtattttatttatggtagtttagaagacatgttttgatgaaaatgaacagccgcatgttcattcaagctgaagatgcatagctagttccacagagcatgcccacatggattgcatctggaatccattcacatttttatgatcatgactgatcagatttgcaaattcttaagggtgaaataggcctatttttgctattttggacaaataaatgattctatatgtgcaggtccttacacacttttctctaaagttaagagttaggacaatcctctggggagagtctagttcactgccctccctcagctgactccagagatggaggtagaaggaattgcctttcttttttaaacagcatcatcttgattcttagcttggacagcacctttaagctctaccccctacatcaaaatgcactttagtgccccttcacggtacctcgtgtggggtggggactgagaactctttgagatgaaaaaatttaaaaaaaaaaaaaa

SEQ ID NO: 291042 - DNA, 1000 bp, Homo Sapiens
gggccgaggggacagcctgtccatgaggagactgtccagaacatcggctttccaaagctttgaaagcaagcacacctaaaccttcttaatatccgccacagaaggctcaagaatccagccctaaaattctctccaactccagtttttcccctttccttgaatcatacctgctttattcttagctgagcaaaacaagcaatgctttgggaggtgttaactcaaaggtgacttctgggccacagatcaagaaagcatttgatctgacccagtgccagacacaggggatttaaggcatgttcacacttgctgggcagggagggggaagagagggagaaggaagggttagagatgaatgtgtatccgcagtcacagcagaaagccatgagagcaggggaaacaaggggcttcgagcacgctccatgccaggaggcatctgttgatttctgaccattatcaagagttgtaggatgcagggctaaattgcaaaataaaataaaatagccagcgtacacaatgagatattctaaacttccattctgttttcttttcacattggctccatcactggtgactgatgaagagcatcctctttattcagtataagccggcagcaagcagttctacctaacgtcccacatccttctcatgccaacacttctgtaattgatcattataaagaaaaaacaaggtaacagtcatagttcacctgtctcttatctattcacttctggtgccacaactgtttatccttttttgaagaaaataagggaacagaaatgcctttttgtattgcaatcgaaatgaaagaagagttgatgttaaaaaaacaaaagtcaagtgatttattatatacagtgggcgttcaagtctagtcgagcaagctcaggagaatgtaattaaataattttatattttttaatttattttgtatctcacctgtcatggatgaattcattcactgaatatgtaatattgaacttaaaaaaaaaaaaaaaaaaaa

SEQ ID NO: 291043 - DNA, 1000 bp, Homo Sapiens
cctgttgcacacttatctactctcttgcttcccactggtcaggaagtctggcaaacttaaaaggcctctttttgttgctctcttctgtatggatctctcatcatagaggtgtgtgcatttctgactttgtgatttcaatactaaggaagctgtcggcagattatcaaggaaaacggggatcgctgctccccaacgtacacattctggtgtgccccagtaaaattctatattcagcctccaaactagctgggaaaaatgtggcaaatcatctacttgctccaattcaatggtgtttagaagtaggaagtcactgtgagcaatgccaccaagtggtggagagactccatgcagaatcgccaccttcagccagagaggctgggaggccgaagacctctctcaatgcacagggccattcagaaactagaaacaaaatgcttgctcatctccctaggccactccttccgaggctttttgagacggggtctcactgtcacccaggccggagtgcagtggcacaatcaaggctcactgcagcctcaaccttctgggttcaagcgatcctcccacttcagcctttcaagtggctgggatgactacaggcatgggccaccacagccagctgattttttttttctttttagtagaaatgaggtctcgccatgttgctcagactggtcttgaaccaacacatctttagctttttaaaagacagccttggccagccatggcagctcacacttgtaatcactgcactttcggaagctgaggtgggcagatagcttgagccgaggagttcgagaccagcctgggcaacgtggtgaaaccccatctctacaaaaaatacaaaaattagctgggtgtgatggtgcacatctgtggtcccagctgctggggaggctgaggtgggaggattgcttgggcctgggaggtcgaggctgcagtgagctgtgattacctcactgcattccagcctgggcaacagagaaccctgtctctattt

SEQ ID NO: 291044 - DNA, 1000 bp, Homo Sapiens; identical to SEQ ID NO: 223459

SEQ ID NO: 291045 - DNA, 1000 bp, Homo Sapiens; identical to SEQ ID NO: 223460

SEQ ID NO: 291046 - DNA, 1000 bp, Homo Sapiens
ccttcctttccttcctttctcttccttctttttttgtttgtttgtttgttttttaattactgggatatagatccgatttcaaaggtttttatgcactggctatttgtgtttaatcagaatgaaacttcaattccatgctttggctttgtccctggtaactaaaatcaggtcacaattttgtggatgatttagcaataataaaatggcagtcataacagggactgtttgtcagtattgctgtcatccccaaaagaaatgatatgtattcttgttaaacttattaaaaaataagtgatacaaatatttataaataaaaggagagaggtttgagttctgggtatcctccctttctgtaacagcctcaaataaaggtgtaccttccatgttatattatttttgtttttataagaataaatttggacccggtttctgattatttaatttaaaagatcacttacaggatcatgttagtgagcagacaaatagtcacaaatttcaaacttgtcaataagtaatgctggatgtaaattgttcctttcttggtaatgttgatcattatgtgcaaagactgactactaaggccttgttgctggaagaaactagtgaagagaggttaaattctggcaatataatgttttagtatctgattttagatgatcactctttcaaaagacagttttaatgagtaattaaagatgttgccctttctaatgctagttaacagttggaaaatataattgctctttgatagcatatactccaatttttccatagtcctaactacaaatgctaatgaaaatgttttcagacaaagcactgaatttgaaataatctctaactcagtacaatttggactattgaactgttcttcaaagaattcattttcttcttttttgtgtatcattgaaaataagagaagtaatcctagataataaattcctaaaaggaaactgtataagcaattgcccttaaaaattaaaaagaataaaagattttctat

SEQ ID NO: 291047 - DNA, 1000 bp, Homo Sapiens
gcccaggaagcgggctcttctttcttcaaaagaagcccttcttgttcatattcaggagcttctgttatattcaaaggtaattctatgtctatctcaactctattgattggttttatagttcattgaaaatcctcaaataaaatataattattactgaaatatgtttaatatttaaggggaaaagagactaatttcagttatacttttaagcttagaatgtatgttcatttccaaattttgtatcataagagttttcaacatagagaaaagctgaaaaaatgcaaagaataaccacatactttccatctaccttcctttgttaacgggttgtttatcatataataatttgttttgtcatatttgctttcactgtctattatctgtttaagtctcataactctatttttagtttgctgaagacttgaaagtgaatcgcatatatcatgacacttcttggagtgtcattaatgggcaggcttttctgttgaagagtggattccgtatgttcttcatagagagtgtttttcagattcttcattgggatattaaaatattagccaaatttctctctgttttatatatgtctgtttatttcagtttgtggtttctgcaaatttgtaactgcctctgttttaggagtataagtattacttccttgtggtctattgtgaagtaaaaagtagacccttgcatatactattcttgtttgtgttcatcttaatgtttttgtacagctaaatcaaatgtaatttatagagttagtttcatcaacctaatgaatgctagttaaatttgaattccttggaatttatcgtatattgtattcactgagattatgaagggacaaatgttaatcttttgtttccagaaaaagttgggctttcccaagcagttctattacccggttcagaattgcttcatccaaaaatcatctgatggtatagatggatcctagtccttttcattacctgatggtagaaataaaataattgattttaaa

SEQ ID NO: 291048 - DNA, 1000 bp, Homo Sapiens
atccctggagtgcacctctactaagattttatgaaaagatgacatgttgggctgcatgataaaagttaattataaaaattaaaagatttttttttttgagatggaatattgctctgttgcccaggctggagtacagtggtcactgcaacctccatctccctggttcaagcaattctcctatgtcagcctcccaagtagctgggactatagtcacttgccaccatgcccggctaatttatttttagtagagatgaggtttcaccttgttggtcaggctggtctcaaactcctgacctcaggggatccacccgcctcggcctcccgaagtgctgggattataggcgtaagccaccatgcctggccaaaaattaaaagattttatgaaacgaaatggcttcccattctttctattcagcttctaagtgggctattcatttgtgctctcctcttttttgttttgttttgcactttgtcaatcatttggggaaatagcctggaggtctttcctgaatctgtttgtagacataataaaatttgtgtgctgtgtacacaaaaacataatgtatcttatgaaagcattacccaacctgtttgagttgagaatgcatttgtccacctttgatttgaggctttagtttgctgatttcctaaatgctaccctttgatcatttcctggccaccatcacaatactaaggggctcagatgtgtcttgtgcccacctcttcctgagaagagatggaagtggagctgtgactagtacaagcagcccaagaaactctgaacggggcccaatggaggcaaacttgagcaaataattgggatgataagaaacaaaaataatcccaactgtttgaaagttcgaaagaggggcattcttttctggtacatggtgagagttcaggctccagagactcaaaacggaatggttttccttggcattttgtaaatgctctcacatctgtagcaataaagctgttattttctgcaaaaaaaaaaaaa

SEQ ID NO: 291049 - DNA, 1000 bp, Homo Sapiens; identical to SEQ ID NO: 223461

SEQ ID NO: 291050 - DNA, 1000 bp, Homo Sapiens
gctttatcctttctaattagcatccctgtgacctgctctgcgccctgcagatattttgctcagccagccagaaggagggaggccagacaccagcccccacagacctgcggctgcgaccccctgcctggggacgatggggtcggggtccagtagctgccccagaaacaagtggggctgcaggaggctgatggtgagcttggaggttggcagaattctaaatctgggcactgcagggtccccacaggtcacgaccctactctgctccacccaggctccggaggacctgagcaggaacctctgcagggggggcccggggctccctgtcctctcagcagccggcagtgctccctgacagcccgggcctctccctccagtagttcggtagtttgctgtcaccaacatggctgggcctgggacaggctcctcctctccctccagaagccaggcagtccctcctgcctcagtttctcagactaggccgcctctcccatcgcgagacactgaagaccctcagctgtttccatctgcccagtctgactgctggatcgccctctgtgtgcgttggtttgctgtgttcttgctactcgcccttggataagatttcttctctactcatgaagctgcgtgtcctggagggcagggccgcacctcacatgcatgttgcccacatagctcagcaacagatgctctcacgcttgttaaaagtaaaaccgggccaggcgcagtggctcacgcctgtaatcccagcactttgggaggccgaggtgggtggatcacctgaagtcaggagtttgagactagcctgaccaacatggagaaatcccgtctctactaaaaatacaaaaaattagctgggcgtggtggcacatgcctgtaatcccagctactcggaggcaggagaattgcttgaacccaggaggcggaggttgcggtgagccaagatcacgccatagcaattgcactccggcctgggcaacaagagcaaaactctgtcaaaaag

SEQ ID NO: 291051 - DNA, 1000 bp, Homo Sapiens
aggctgcggtgagccaagatcatgccattgcactccagcctgggtgacagagtaacactctgtctcagaaaaaaaaaaaaagaaaaatatatggggtaaatacagtaaaacgttttgttaaattccaatatacattcagtgataccactctttttcttctaagcctgtgtgttataatttaccagttccccaaaatgccatttttaacgccgaactgtgtaatatacatggaaaacagctttttacaattaattttcaaagttgtaattttaaagaatttgggtgtatacctatgttaatgaaacaacagaagtacaaaaaagaatatcagatacaaaaatcaatcgtgaagaaaatctgttcttaatatatttcattatgattgaaaaacataaaaactaacataggaaagtgaatgatcagttacttatgatatattttgtttcctcttgtggtttaataaagtgaagtgtgtgtgtgtgtgtgtgtgtgtatacctgggggtgggcagtgctctttttctaaaactaatatggcttatatatctgaattatgccctttttagtgtgtattaggatgtgggctggtttgcttttctaccacctttgtaattttatgtatcccatctcctttgtgtgaattcatatattatagcaaaatacaagagacatgggactgtttgcaataccatatggaaatcttttaataaatatatgtaaataaaataaaaaatatttgtctccaccttttccccaaaagcaacagcaagacatattttgttagatattttatttttaatgttttctataatttaaaaatgtatagcctgccaaatgttgttttcataaccatgatattgttttgaaaaaattttatcttaaaatactgaatgttctgaccttttatagatgtttttgattttgttttaaataattttaaattatggagcttgacctagatttgccaataaactttctagcctaaaaaaaaaaaaaaaaaa

SEQ ID NO: 291052 - DNA, 1000 bp, Homo Sapiens
acaacttaggagctaggcctctgctacaagcacttgaaaatgatatttttatttttaacgtctcaacaatctgatatcggatgtcgtttaacctgggctcgtggtagggctccagcatttctccctccttcctggtttgcctgtaggggtagactcggaaggtgggtggggtgtgcatttcctgttaggagtgtatcagtgcttgtcttattataagcccctttcttttgtgaatttgaagtagcaccaacaagcctggattgtgaaggtattaagaatcggtctgtgggctactgagtgggtccttaggatactggcccagattttgccactgggtatggcagatcattttctaccatggcctgctgctcttgtagtggacttcctgagtccaatcccacctcctggtgtagaatttacactgctgcacctgaggtcgatgtttcaaagtaagatcaagccagtgttttgatctgggctctgagcacaagtcaggaaacaccaacatattcacactctcccagtaggttcctcagtccgatggtgaatggctattcgtaaatggctggtctggctctttggtgttggagcctttccaatagccccatgaaaagaagcatcacccaaggatattgtaaaaaggatgtaacaaggagatagggtagacattgtactcagtgggccttggggcctagcccagctctgagcagaggactgtggcattcactgtccttgagtgtttcaccttcttggataacacacgggccttctcttctggatttcatcagagattacagccagatgggggctgaagaccatcctcttgaccacagaggtgtgactgtgggaattcctcccaatttatggtttcccagaaaatcttagttccttttatttatagaatgcatgtcttttgtgttaagaaaccaaagagaaataaagagaacgctcctaataaaaaaaaaaaaaaaaaaaaaaaaaaaaaaaaaaaaaaaaaaaa

SEQ ID NO: 291053 - DNA, 1000 bp, Homo Sapiens
cggccagggatgatatggatagaggaaagcctgacaaaggcttgagcagtgggggcaaaggctctgagaagcaggagtccaaaaacccgaaacaagaacttcggggtcgtggtcgtggcattctgattttgcctgcccataccaccctatctgtcaattcagcaggttctccagagtccgcgcctttgggacctcggcctcccaaagtgctgggattacaggtgtgagccaccgcgcccggccgaagatcacattctttaacaaggacctgtccaacatgccctgcccacttctccagactttcttacagaatcaatcatctagccatgccagtctacaatgtaccacttttgagaacatcatatatgttgttccctttgcttaagacacaccaggacgtgactccctctcctctccaaaaccaactgtttcttcaaccctcacttttcaactcaaaggtcttttcctctgagaggatatctctggtgctgcttctgtatatttccacagcatcctagccttccccagtcatggcacttcataattgtctgtgttacccatagagcaaggattatctctgccttgttcacagcttgtgcactgtgctttgtacataaaatgtgcccagtaggtttttgttgaatgaataaatgtatgggtccatgtgtgaggaagtcttcaccatccctcttacgctgtgtcaacctgttgatttataagatgggtttgatggctgagcacggtatctcacgcctgtagtcccagcactttgggagcccgaggtgggcagatcactaggtcaggagatcgagactatcctggctaacacggtgaaaccctgcctctactaaatatacaaaaaattagccaggcatggtggcgggtgcctgtggtcccagctgctcggaaggctgaagcaggggaatggcgtgaacccaggaggcagagcttgcagtgagccaagatcgcgccactgcactccagcctgggcaacaggctc

SEQ ID NO: 291054 - DNA, 1000 bp, Homo Sapiens; identical to SEQ ID NO: 223462

SEQ ID NO: 291055 - DNA, 1000 bp, Homo Sapiens; identical to SEQ ID NO: 223463

SEQ ID NO: 291056 - DNA, 1000 bp, Homo Sapiens
tctgcactaacttggagaagttagtgtcagaattgaattatagaacacccagttgttcagaattgaattgtagaacacccaattggtgtgggagaattagagaatttatttgtgtcagaaaatactccagaacaaccaccccatattatgattagctcttttcctttctttggctctgagcttaattgtacattaagcaaacttaagtagaaaagaaactgaatatgttaaatatattaacaacatatttggacttgcttaactaagattatagagatgatcagtttataaaaccaccttcaacttaaataaatttgaactcgaaattgcaaaagcagtctagaggctttgctagtatccttcaaccaatttctagtaaaaatatcctatataaccataattatcaaaaccagaaaaacaacattggtaggatactataaagtactaatcttattttggatttgacgaatttttacatgtttttttcttttttagtttgtactctaagaagttgtattacatgtacagattcgtgtaaccactgcaaccacataaaactaatgaacacaaagtccctcatgctacctttttatgcttacactccatccaaacctaactctgccaaccacttttctcctatcagtataatttcatcatttcatgaatatgataaaaataaaattgtttttgtaaatggtttttataaattttatataaataagttatatgaatttttattgatagagagtatgtaagcttttggcatttttgtcactcagcaaattactcctaaggtttatatgagttgatgaatagttgttttattatttttttttaccaccatgtatctaaccagatgaaagttgtttatatttgagagtagtatacatatttgatgtagtagtttatccattcacctatgagatatatttgcactgttttcctggttttaagtgctataaataaagatgctgtgaaatctaaaaaaaaaaaaaaaaaa

SEQ ID NO: 291057 - DNA, 1000 bp, Homo Sapiens
tgatgtgtataaggacaggtggtgacaaacacatggtccctacccttcaaggacatataatccagagctaagacaagaccttaacacagggcaaagtactatgctctgagttcatttgatgagcgatgggagaacgggcttgatcctagccatgcgggagagactggaattcaagagagtcaaatgtgctgggaaagactttctgggcaaaaggaataagcaaaggtgtgcaaaggtaaggaagcaggaaacctttgcacatcttgagaactcgccggccagaggcctgtgaaggagcgcagtggtcaggcaggagaggcagtcggatgcaggctgagaccatcctggagggtcttgaggctggcttaccccaggctgtgagtagtgggctcagcctagtcccggctcctgggttagtgctcacgtgtctctctgccccctcagggcctggaggaatggccttagagcccccaccaaccacgctcaggaaggcattcctagctcagagtaccctcctggagtctacactggaaggggctcctgagtgggccgcgccacaccccgaggagcagaggcgcagtcctcccgcgtgctcccagcacactccacccctacccagcacacccacggggcccccaccttgctcacctggggggaaccacccactctgcgccctctcagggagaggtggtggccgctgctctatcccctccctctcttcctcttccaccttctctctcttctcatctgggtgctggaacccaagggtgaaactgagagtcagaaagtctcagtctcaaggcagagcggggcaactaatttaaaacggcttctactccggcccccagtgtgactaatctccttctcttcgctccacaggtctataaatgggccacagtaggcacccctttttaaatctgtaaaatccccaaatccattaaaagtgacttcagaggtcccagatagggaccaacatttgtttaaaaaaaaaaaaaaaaaa

SEQ ID NO: 291058 - DNA, 1000 bp, Homo Sapiens; identical to SEQ ID NO: 118098

SEQ ID NO: 291059 - DNA, 1000 bp, Homo Sapiens; identical to SEQ ID NO: 223464

SEQ ID NO: 291060 - DNA, 1000 bp, Homo Sapiens
aatacagttttgtcttcatttttcaacagtaatttcaattggttcatacttaaaatactacacagattttgagttttatggttctcaaagcaaggtttccatcttaagatttttataaacacaaagcctttgcaaaattggattaaattccacctatcttaatgtgaattaaaaaccaccatttataataataatagcgccatattctaagttgagtaaatgcatcctaccattcaaggttatcatataatttaacaaaattgtacaaccttaaggctcttcacagtataaattaatttttcaaaccagagctgttcacatgaaaatattccttagtagaatgtatatttaagaaataaaacaacaaaggggaactatatcacccatgtaagttatagagttaattacaagttctaccattcttgataattctttgagatgctaagtgtttcagttcatatttaatgatacttaaatcgtgggaattttaatgtttgttccaaaatagcagaaattgtaaaaattatgaattattggagaaaatgccattacttgtatatctgacatttaattttttaattatggagactacatgcttttgtagtataatattaatgattattctcttgtaaaagaaaaggaaaaattagtaaagaaaaaagttttagttgatgttacctgcttgtgagtatcaattacttagtttttaaatttttaaggtattgcctacttttctttagaatgcagaaatctcgtcctgagcccttattatgcctgtggtagagcaatgcaagactgaaaaggttgccagtattttcaggcttatttgactaagaattagtgccaagaactggaaagtctactttttggagggaaatgatacttagaatttgtaaacataagcagtaatagtgtaaatatttagaaaaatagcaagtgctttaactgctcaataaaatagtatagatgttatttcacccttaaaaaaaaaaaaaaaaaa

SEQ ID NO: 291061 - DNA, 1000 bp, Homo Sapiens; identical to SEQ ID NO: 223465

SEQ ID NO: 291062 - DNA, 1000 bp, Homo Sapiens; identical to SEQ ID NO: 223466

SEQ ID NO: 291063 - DNA, 1000 bp, Homo Sapiens
cccgtctcagttcgtgcctggcctggatcctagcaagtccggcctcgtgggaggccagctgtctgggggcctgggcctgccgccgggcaagccccccagctccagcccgctcaccggggcctccccgccctccttcctgcagggattatgccgcgacccctattgcttgggaggttaccacggcgcctcgcacctcggcggctccagctgctccacctgcagcgcgcacgaccctgccgggcccagcctgaaggcggggggctacccgctggtgtaccccgggcacccgctgcagcccgccgcgctctcgtccagcgccgcccaggccgcgctccccggccacccgctctacacctacggcttcatgctgcagaacgaaccgctgccgcacagctgcaactgggtggcagccagtgggccgtgcgacaagcgcttcgccacctcggaggagctgctcagccacctacggacccacacggccctgccgggagccgagaaacttctggccgcctaccccggggcctcgggcctgggcagcgccgccgccgccgccgccgccgccgcctcctgccatctgcacctccccccgcccgccgcccccggcagccccgggtcgctgtccttgcggaatccacacactttgggcctaagccggtaccacccctatggcaagagccacttatccacagcggggggcctggccgtgccgtccctccccacagccggaccctactattcgccatacgcgctgtatggacagagactagcttcagcctcggcgctgggataccagtaactacagctcttcctccaccccagccccctcaccctcctccctctccctcctcctccctccccacctgccgtcgccgctgcaacctccactactgcttgaccctgccgggattccccacccaacccttccccaccggactgtgtatttatttactataatgttagcttacaagctgggaatataagtgcattaacggcccacatg

SEQ ID NO: 291064 - DNA, 1000 bp, Homo Sapiens
ctctggtgctaagaattggcactttatagcctggtgcctttacttttaatttgagagaacctactgctagtcccaggaaacacacttggaaataagtcagctattttttttgcccagtgatgctatagttgtcatattgtccaaagttcatattgttcaaagctgaggagcttgtcctgtgtatgtgaatgcacacatgtgcacttagttcaaatactaaaagtagcttttattaaatataatcagccaaaaacacacacaaaataaaaaaaacaaatataagtagtcagtttttcaatgttatcctactagttctacattctattttaatttttatacaatttccattttatagttaagaaccatcacttacttggattggatgtctttcattcctagcactaatagttggctttctttttttttgtttacatagaagcagggtttttttttatcttttttctttttttttgtttaagctatataaaaaggtgaggaagcagttttgttacctaatgaaaattattacactcataatgctgtgtaggcaacattgagattcaaatgcccagtggtcaactgggttcactcatcaactcattcccgtcccagtttactcacatttcaaatttataaatttcttcatgttatactattctatttagatttgcccagaattagttgaaataatgctaaacctgtcaatattttccagtaacattaagcaccatactgcatgggagagacacagtactaaaaagagttgttagtgctttatgtgagtgatatttctttcgtaatgctataaagaactacagttaaaataacaaaatattttaaagatgtcctaaaagcatctgatcccagtaataactaatggatgtcatctagagcagtgggtgttaatgaataggtatatgtcatttaagaatttttcaaatttctgtttgatatcctgcatagaatttgacaaaaaaaacaaaaaaaaaaaaaaaaaaaa

SEQ ID NO: 291065 - DNA, 1000 bp, Homo Sapiens; identical to SEQ ID NO: 118099

SEQ ID NO: 291066 - DNA, 1000 bp, Homo Sapiens
tcagttaattaaaaaccttgttggtagcggaagtgaaattcagtttctctccgaagcccaggatgacccacagaaaagaaaaccagacatcaaaaaagcaaagctgatgctggggtgggagcccgtggtcccgctggaggaaggtttaaacaaagcaattcactacttccgtaaagaactcgagtaccaggcaaataatcagtacatccccaaaccaaagcctgccagaataaagaaaggacggactcgccacagctgaactcctcacttttaggacacaagactaccattgtacacttgatgggatgtatttttggcttttttttgttgtcgtttaaagaaagactttaacaggtgtcatgaagaacaaactggaatttcattctgaagcttgctttaatgaaatggatgtgcctaaaagctcccctcaaaaaactgcagattttgccttgcactttttgaatctctctttttatgtaaaatagcgtagatgcatctctgcgtattttcaagtttttttatcttgctgtgagagcatatgttgtgactgtcgttgacagttttatttactggtttctttgtgaagctgaaaaggaacattaagcgggacaaaaaatgccgattttatttataaaagtgggtacttaataaatgagtcgttatactatgcataaagaaaaatcctagcagtattgtcaggtggtggtgcgccggcattgattttagggcagataaaagaattctgtgtgagagctttatgtttctcttttaattcagagtttttccaaggtctacttttgagttgcaaacttgactttgaaatattcctgttggtcatgatcaaggatatttgaaatcactactgtgttttgctgcgtatctggggcgggggcaggttggggggcacaaagttaacatattcttggttaaccatggttaaatatgctattttaataaawtattgaaactcaccagtcatggaaaaaaaaaaaaaaaaaaa

SEQ ID NO: 291067 - DNA, 1000 bp, Homo Sapiens; identical to SEQ ID NO: 223467

SEQ ID NO: 291068 - DNA, 1000 bp, Homo Sapiens; identical to SEQ ID NO: 118100

SEQ ID NO: 291069 - DNA, 1000 bp, Homo Sapiens; identical to SEQ ID NO: 118101

SEQ ID NO: 291070 - DNA, 1000 bp, Homo Sapiens
caggtttggatatgacaatgaagggtggtctagtctagaaagatcagctcacctgctcaatgaaacaggtgcagatttcataacaattttggagagtgatgcttctaagccctatatggggaacaatgacttaaccatgtggctaggggaaaagttgggtttctatacagactttggtccaagcacaaggtatcacacttgggggattatggctttgtcaagatacccaattgtgaaatctgagcatcaccttcttccgtcaccagagggcgagatcgcaccagccatcacattgaccgttaacatttcgggcaagctggtggattttgtcgtgacacactttgggaaccacgaagatgacctcgacaggaaactgcaggctattgctgtttcaaaactactgaaaagtagctctaatcaagtgatatttctgggatatatcacttcagcacctggctccagagattatctacagctcactgaacatggcaatgtgaaggatatcgacagcactgatcatgacagatggtgtgaatacattatgtatcgagggctgatcaggttgggttatgcaagaatctcccatgctgaactgagtgattcagaaattcagatggcaaaatttaggatccctgatgaccccactaattatagagacaaccagaaagtggtcatagaccacagagaagtttctgagaaaattcattttaatcccagatttggatcctacaaagaaggacacaattatgaaaacaaccataattttcatatgaatactcccaaatactttttatgaaacatttaaaacaagaagttattggctgggaaaatctaagaaaaaaagtatgtaagataaaaagaagagattaatgaaagtgggaaaatacacatgaagaacctcaacttaaaaaacacatggtatctatgcagtgggaaattacctccatttgtaaactatgttgcttaataaaaacatttctctaaaaaaaaaaaaaaaaaa

SEQ ID NO: 291071 - DNA, 1000 bp, Homo Sapiens; identical to SEQ ID NO: 118102

SEQ ID NO: 291072 - DNA, 948 bp, Homo Sapiens; identical to SEQ ID NO: 118103

SEQ ID NO: 291073 - DNA, 1000 bp, Homo Sapiens; identical to SEQ ID NO: 118104

SEQ ID NO: 291074 - DNA, 1000 bp, Homo Sapiens; identical to SEQ ID NO: 223469

SEQ ID NO: 291075 - DNA, 1000 bp, Homo Sapiens
agagttcgcgcccttgtttatgccgtgggagcgcaggctgcagacacttgctgtcctacagtttgtcttctccttcttggcactggccgagatctgcactgtgggcttcatagccctcctgtttacaagattctggctcctcactgtcctgtatgcggcctggtggtatctggaccgagacaagccacggcaggggggccggcacatccaggccatcaggtgctggactatatggaagtacatgaaggactatttccccatctcgctggtcaagactgctgagctggacccctctcggaactacattgcgggcttccacccccatggagtcctggcagtcggagcctttgccaacctgtgcactgagagcacaggcttctcttcgatcttccccggtatccgcccccatctgatgatgctgaccttgtggttccgggcccccttcttcagagattacatcatgtctgcagggttggtcacatcagaaaaggagagtgctgctcacattctgaacaggaagggtggcggaaacttgctgggcatcattgtagggggtgcccaggaggccctggatgccaggcctggatccttcacgctgttactgcggaaccgaaagggcttcgtcaggctcgccctgacacacggggcacccctggtgccaatcttctccttcggggagaatgacctatttgaccagattcccaactcttctggctcctggttacgctatatccagaatcggttgcagaagatcatgggcatctccctcccactctttcatggccgtggtgtcttccagtacagctttggtttaataccctaccgccggcccatcaccactgtggtggggaagcccatcgaggtacagaagacgctgcatccctcggaggaggaggtgaaccagctgcaccagcgttatatcaaagagctgtgcaacctcttcgaggcccacaaacttaagttcaacatccctgctgaccagcacttggagttctgctga

SEQ ID NO: 291076 - DNA, 1000 bp, Homo Sapiens; identical to SEQ ID NO: 118105

SEQ ID NO: 291077 - DNA, 1000 bp, Homo Sapiens; identical to SEQ ID NO: 118106

SEQ ID NO: 291078 - DNA, 1000 bp, Homo Sapiens; identical to SEQ ID NO: 118107

SEQ ID NO: 291079 - DNA, 1000 bp, Homo Sapiens
ggtttttctttctgtttttcttctctttcttctatttcttgtggatattatggctaataacacaacaagtttagggagtccatggccagaaaacttttgggaggaccttatcatgtccttcactgtatccatggcaatcgggctggtacttggaggatttatttgggctgtgttcatttgtctgtctcgaagaagaagagccagtgctcccatctcacagtggagttcaagcaggagatctaggtcttcttacacccacggcctcaacagaactggattttaccgccacagtggctgtgaacgtcgaagcaacctcagcctggccagtctcaccttccagcgacgagcttccctggaacaagcaaattcctttccaagaaaatcaagtttcagagcttctactttccatccctttctgcaatgtccaccacttcctgtggaaactgagagtcagctggtgactctcccttcttccaatatctctcccaccatcagcacttcccacagtctgagccgtcctgactactggtccagtaacagtcttcgagtgggcctttcaacaccgcccccacctgcctatgagtccatcatcaaggcattcccagattcctgagtagggtggcttttggtttttgtttctttcttgtcttgtcttttattgaaaggaaatcaaaaataggctaaacagaattttgagggcatggcccaaataactcatgagttccaagttgaaacatggttgtgcaagttggacattacaatgtaaaacacattttcttcaaacacgttttcccttttgtttcaaaaaatgtaatattttcccccaagcgttttatatttatgtattttgtattcaatgtgaggcttattaaaaatagtgattctaatgtaagaatcagctaagatgcattatatatattttaattaaaattaaaacttcagatatttgtggattacaatcctcatttacttccaatgtgactaaaaaaaaaaaaaaaaa

SEQ ID NO: 291080 - DNA, 1000 bp, Homo Sapiens
accttgtggtggcagcccagaattttttctgtgccggctgtggaactccagtagagcctaagtttgtgaagcggctccggtactgcgaatacctagggaagtatttctgtgactgctgccactcatatgcagagtcgtgcatccctgcccgaatcctgatgatgtgggacttcaagaagtactacgtcagcaatttctccaaacagctgctcgacagcatatggcaccagcccattttcaatttgctgagcatcggccaaagcctgtatgcgaaagccaaggagctggacagagtgaaggaaattcaggagcagctcttccatatcaagaagctgttgaagacctgtaggtttgctaacagctgtgtcaaggaaagggctttatttgtgaattttgccagaatacgactgtcatcttcccatttcagacagcaacatgtagaagatgttcagcgtgcagggcttgctttcacaaacagtgcttccagtcctccgagtgcccccggtgtgcgaggatcacagcgaggagaaaacttctggaaagtgtggcctctgcagcaacatgatgcccctgagtactgtgaaaaagactgttcaacatgccttatgataacaccgatttgtgtctattattggtgacattgttttagatattgggtattgtatattaaggaaaaagatggtctatattctctttattgcatatacttaatgtttcaaaagaatgcagattctgtgtttaagcacagggctgatagttgtggttttgtttacaaatgttctgttttggctgctattggttttttaaagaggttttttatacttttgtatttgaatagttatgtttcactgatgctgagccagtttgtatgtgtgtgcatatatgtgaactgtaactgacaagatgaattactcagtttctctttctctaaagcttgtttgatgaaactggttggtcctttcagtgaacaaaaatatgaccccaaaaaaaaaaaaaaaaa

SEQ ID NO: 291081 - DNA, 1000 bp, Homo Sapiens; identical to SEQ ID NO: 223473

SEQ ID NO: 291082 - DNA, 1000 bp, Homo Sapiens; identical to SEQ ID NO: 223474

SEQ ID NO: 291083 - DNA, 1000 bp, Homo Sapiens
gaagcgctgtggtctggagcgccgggtatacctggtggaagagcatggttccgtccacaacctcagccttcctgagagcacactgctgcaggctgtcaccaacactcaggtcattgatggcttttttgtgaagcgcacagcagacattaaggagtcagccgcctacctggccctcttgactcggggcctgcagagactctaccagggccacaccctacgcagccgcccctggggaacccctgggaaccctgaatcaggggccatgacctctccaaaccctctctgctcactcctcaccttcagtgacttcaacgcaggagccatcaagaataaggcccagtcggtgcgagaagtgtttgcccggcagctgatgcaggtgcgcggagtgagtggggagaaggcagcagccctggtggatcgatacagcacccctgccagcctcctggccgcctatgatgcctgtgccacccccaaggaacaagagacactgctgagcaccattaagtgtgggcgtctacagaggaatctggggcctgctctgagcaggaccttatcccagctctactgcagctacggccccttgacctgagcttatgccgtgaaacagcccccagcccccgtctgtcccccaacccaggctagccagccttttaacaacatcttttggggtacaattagaatctaagtgtttgcagccatatgtgtcatgtagaagatgcctagccctggggaccttgtgaaatacgcaggaaccagggataccatctggtccagtggtttttaaacaaagctgcttagcacctggaattccctggtcagggagatggagtcagtggggcattgcagcttggaatctattttatgtcaccagttggtcctcatcaaataaaatttccttaggagtgcagagggctcattgggaaaataaaaataataaaaataaataaaacttcctaaaagaaaagattgaaacccaaaaaaaaaaaaaaaaaaaaaaaaa

SEQ ID NO: 291084 - DNA, 1000 bp, Homo Sapiens; identical to SEQ ID NO: 118111

SEQ ID NO: 291085 - DNA, 1000 bp, Homo Sapiens
ctgaggatcactgtgggtgtggacggcaccctgtacaagctgcaccctcacttttctagaatattgcaggaaactgtgaaggaactagcccctcgatgtgatgtgacattcatgctgtcagaagatggcagtggaaaaggggcagcactgatcactgctgtggccaagaggttacagcaggcacagaaggagaaataggaacccctgggattggacctgatgcatcttggatactgaacagcttttcctctggcagatcagttggtcagagaccaatgggcaccctcctggctgacctcaccttctggatggccgaaagagaaccccaggttctcgggtactcttagtatcttgtactggatttgcagtgacattacatgacatctctatttggtatatttgggccaaaatgggccaacttatgaaatcaaagtgtctgtcctgagagatcccctttcaacacattgttcaggtgaggcttgagctgtcaattctctatggctttcagtcttgtggctgcgggacttggaaatatatagaatctgcccatgtggctggcaggctgtttccccattgggatgcttaagccatctcttataggggattggaccctgtacttgtggatgaacattggagagcaagaggaactcacgttatgaactagggggatctcatctaacttgtccttaacttgccatgttgacttcaaacctgttaagagaacaaagactttgaagtatccagccccagggtgcagagaggttgattgccagggagcactgcaggaatcattgcatgcttaaagcgagttatgtcagcaccctgtaggattttgttccttattaagtgtgtgccatgtggtggggtgctgtctggggcatctgtttttcattttgcctgtggtttgtgttgcaggtgttgatagttgttttaaggattgttaggtataggaaatccagtaaattaataaaaaaattttgattttccaataaaaaaaaag

SEQ ID NO: 291086 - DNA, 1000 bp, Homo Sapiens; identical to SEQ ID NO: 223476

SEQ ID NO: 291087 - DNA, 1000 bp, Homo Sapiens; identical to SEQ ID NO: 118112

SEQ ID NO: 291088 - DNA, 1000 bp, Homo Sapiens; identical to SEQ ID NO: 118113

SEQ ID NO: 291089 - DNA, 1000 bp, Homo Sapiens
gaaacgggccaaccacagagagagaaataagaccagagggaagatgatcaccgattctggcaagttctccggcagttctccggcgcccccaagccagccgcagggtctgagctatgcggaggacgcggctgagcacgagaacatgaaggctgtgctgaaaacctcgtccccctccgtggaggacgccacccccgcgctgggcgtccgcacacgcagccgagcaagccgaggatccactagttcctggactatgggaactgatgactcgcccaatgtcacagatgatgcagctgatgagatcatggaccgcatcgtcaagtcagccacccaagtgcccagtcagcgagtggtgccgagggagaggaaacgatcccgggccaaccggaaatctttgcgaagaaccctgaagagcggcctgaccccagaagaagccagagccctgggcttggttggcacctcggagttgcagctgtgacactcataggttactcccaggagtgtgctgagcagaaggcaagctcttgctggatgaaacccctccaggtggggttggggagacttgatattcacatccaacagtttgaaaagggagagctcaattcccagcgtcaccccatggcttgtgttgcctgctacgcattgacttggatctccaggagtcccctgcacataccttctccatcgtgtcagctgtgtttctcttgattccgtgacacccggtttattagttcaaaagtgtgacaccttttctgggcaaggaacagcccctttaaggagcaaatcacttctgtcacagttattatggtaatatgaggcaatctgattagcttcacagactgagtctccacaacaccaaaatatccagatgtaaaccccaaacttgtacacaaaagaaagcacagattgtttacctgttgtggattttagatgtaacaaatgtttatacaaatacatacatgtacaccatgtttcaaatactaaataaatagagtttaatgcc

SEQ ID NO: 291090 - DNA, 1000 bp, Homo Sapiens
ccaagaaataggagcttgctggatggaacctgaatttggacatggcctatgtacctaacgtggccttcttcccgcaccacccttgcctgcgctggcccagtggaaaccaccaggatcttgatgcaacttggcatttggttacccctgctgataagagcagccattacctgccactgggaccagcaggtgaagcgttgcaacatagccccctccatcatccttcacctcctatcccccactccaaaccaggacgacctgcaaggtcccagccagcaggacaccgtgggcactctggcaaatgaaaaaatggaacctggtcttgagctgaatcaatgtgttattgttacccccacccccggtttacctgatcagtgttaacctttactgggacactcatctgttacactggaacaccttcttctttttgtcaatcggcacagaccactgtaaggaaatgcagtgtgttgcagtggccttttctccccctcaccttctaaggtcagctctagctgagcatcagtgctctcttaaggaggaaaaaaacggtgcggctgggagcggtggctcacgcctgtaatcctagcaccttgggaggccgaggcgggcggatcacttgaggtcaggagttccagaccagcctggccaacatggtgaaactccgtctctactaaaaatacaaaaattagccgggtgtggtggggtgcgcttgtaatcccagctactcgggaggctgaggcaggagaattgcttgaacccatgaggtggaggttgcggtgagccaagatggcaccattgcaccctagcctgggcaacagagcaagacaccgtcttaaaaccaaaagttaaccgggcgtggtggtgggtgcctgtaatcctagctacttgggaggctgaggcaggagaattgcttgaacttgggaggtggaggccaagattgtaccactgtattccagcccgggtgacagagcaagactgtgtctcaaaaaaaaaaaaaaaaaaa

SEQ ID NO: 291091 - DNA, 1000 bp, Homo Sapiens; identical to SEQ ID NO: 118114

SEQ ID NO: 291092 - DNA, 1000 bp, Homo Sapiens; identical to SEQ ID NO: 118115

SEQ ID NO: 291093 - DNA, 1000 bp, Homo Sapiens
aagactataaggagcagaaggggctctggcaccacttcactgatgtggagcggcagatgaccgcacagcactatgtgacagaatttaacaagagactctatgaacaaaacattcccacccagatattctacatcccatccacaatactactgattttagaggacaagacaataaagggatgtatcagtgtggagccttacatactgggagaatttgtaaaattgtcaaataacacgaaagtggtgaaaacagaatacaaagccacagaatatggcttggcctatggccatttttcttatgagttttctaatcatagagatgttgtggtcgatttacaaggttgggtaaccggtaatggaaaaggactcatctacctcacagatccccagattcactccgttgatcagaaagttttcactaccaattttggaaagagaggaattttttacttctttaataaccagcatgtggaatgtaatgaaatctgccatcgtctttctttgactagaccttcaatggagaaaccatgcacatagaatacggcacagtctggtcctttggggcttgggcagggccgtgacacaggttctggccaatgatttgcaagaggaattgatcagtatcactttaagtcctgcatttaattggcagcacaagatcctgcagagcctctttccctctgccacagttatcaagaatgggtcaggagaccgctgcttctgggcataagtcctgcaaggaaagcaacatggaaaacagccccaactcacccatgagggatgaaaagcactcttgagaaaggcatgtgttgtttaagccattgagattttagagctttttgtcactatctgtcaagactgatactactggggcttttcctattgatttgggagttctttacatattaaaaaaatgtgagcctttgtgatacgaattcaatttgttttcctgtcttttgacatttgactttgcataaaagtttatctgtgcataattttaa

SEQ ID NO: 291094 - DNA, 1000 bp, Homo Sapiens
gagtgttccatgaactcatcctattacaggaagagaaagtgagattccagttgaatttgacaatccaaattcttcttaaacaaggacaagtagaactggaaaatttccagctagtactggagtattctgatgcaattctcatcaacaagaacataattgaagacttgaattctgtgattcggactcaaggacaaaagaaagttgctagcatgatggaaagtaaagatgtacacaaaagaatacttcagattgagtgggaacataagaaaatggagatggaaagggaagatctaaatcagaaggcttgggatattcagatgctatttttttcaagagatcgtcaaaagtacctaaatgaaccaaactatgaggctctgattagtattcagattggaataatggaacaaaccattgctgttttagataagatgcacaaaaagaatgtggaaaactgcaagaaactactcaaaaaacttggaaagttcagcaatcaaaaagatatagcaaattatgccctaagctgcaatctacgagaagagttggtagctgtctcagagagaaaagacatctgtaatgcaatggggtctaaactgacttgtgaaaagattgtcaaagaacggtatgaaaacatgatgcaacagcagaagttaacaaatatttcaaaacaacaagctgaacagatttcaatactacagactgaagttgaaagattaagaatgaaaacatttcctgctcttgttcaaatgtaaaaacgctggcaggaaaacacaaggccaaatcaatcatttaaaaaatcatttcatttgggtaaaatgatttccttttctttcttactgggaaattgaagtagcatgtcctctgagttgcatgttttagataaaaaattgtttaattttagccttaattgtatacaaatttttgtcctgcatgaataaatgtgtaaaataccatgaattgctgtttttattcaagaataaacaagacttgaagtcagaaagta

SEQ ID NO: 291095 - DNA, 1000 bp, Homo Sapiens; identical to SEQ ID NO: 118116

SEQ ID NO: 291096 - DNA, 1000 bp, Homo Sapiens; identical to SEQ ID NO: 223479

SEQ ID NO: 291097 - DNA, 1000 bp, Homo Sapiens; identical to SEQ ID NO: 223480

SEQ ID NO: 291098 - DNA, 1000 bp, Homo Sapiens
ttctgtacaacagatcagctggaagcagagatccaaagctgtcttgatttcctccgttccgtctatgccgttcttggcttctccttccgcctggcactgtccacccggccatctggcttcctgggggacccttgcctttgggaccaggccgaacaggtccttaaacaggccctgaaggaatttggagaaccctgggacctcaactctggagatggtgccttctatggacctaagattgacgtgcacctccacgatgccctgggccggccacatcagtgtgggacaattcagcttgacttccaactgcccctgagatttgacctccagtataaggggcaggcgggtgccctggagcgtccagtcctcattcaccgagcagtgctcggttctgtggaaagactgttgggagtgctggcagaaagctgcggggggaaatggccactgtggctgtccccgttccaggtggtggtcatccctgtggggagtgagcaagaggaatacgccaaagaggcacagcagagcctgcgggctgcaggactggtcagtgacctggatgcagactctggactgaccctcagccggagaatccgccgggcccagcttgcccactacaattttcagtttgtggttggccagaaagagcaaagtaagagaacagtgaacattcggactcgagataatcgtcgccttggggagtgggacttgcctgaggctgtgcagcgactggtggagctacagaacacgagggtcccaaatgccgaagaaattttctgagcctttgtacatagatgaggcaaaaacctgcgagtgccatcagcctccctcacatgggagaccccaacccagctgacaatgtggagcccccagaacttcagaactgtgtggaggcacatgtctgctctcctgaaaagagacttggtttggggaccccacaaaaggagggaagctgtagctgtttggatgtgaggagaatgaaactacaaaaaaaaaaaaaaaaaaa

SEQ ID NO: 291099 - DNA, 1000 bp, Homo Sapiens
cagcgagccaagatcgtgccactgcactccagcctgggcaagagtttttttaagactcttaaaaaaagagcctgggcaatttttttaagactctgtcttaaaaaaaactaaaaagaaaaaaagaagccccttcactctacaggggacaggagaccatggattggaccccaaagggattgaactgcatctgcatgtctgtcctttgaacactttctctccctgcccaaaaggaaacccaaattatttgtgggatactggggaaattgtagtgaagggcttaatgtagttaataaaagttaaaagtcagtagaaaacaggtgcctcagccttcaaatggttgctttttttccattttccctcatgaatagactcaccagcattttacccccttgttataaaactgtgcagagcaagaagatgatacttatttttgaatttgtatttttaaaactagatttatagactttttttttttttaactagggcacttgcttccttcttagctaaaagcaccagctgagatttttcaggtaattttgttgttactcacttaagactggaattagaatgtttctggtatttctcatttttttccctggctatgatagaatctcatctaatcttgacatctctcctaggggaagaatatcacaggctaatagcgtggttgggggtgaagatgatagcagttattaaatcaggaatctcttttatgtatgtccttgttacattgaggttaagagacaaaatcattggcagtgcaatctctttccaggatttcgtttgctgtggcattggttatatcagagcactttaatctgaaggatgatactgtaacttgatttatctaattagcttttaattatctacagctattttattttatttaattctctcctacagtactgggaccactgtaaacttctcagatgacttgtatttttgtagtgctatgaaatttatttacatacttataaagaaaactgtatgttcacttgaa

SEQ ID NO: 291100 - DNA, 1000 bp, Homo Sapiens; identical to SEQ ID NO: 223481

SEQ ID NO: 291101 - DNA, 1000 bp, Homo Sapiens
cttctgaggaaggtttccagtcaggactcgctgtaccaatatccatggaggaatatgggagcgtttcgctctccttgtaggctgaagtcagtctgacttgaaggggcctggtttggatctaagcaaacacccagatggggttctctggtctcagcaaggcttttcctgttgggagtcacagtaaacagaaacccaaaaatctcatcttgggtgttttcagggcttgttttgagttttgctgaatagggagcgcaagacgccctgagcctccctctcactggtggtgataagaggagccgtctggtgtgtcagggtcacgaacccgttacatttcaggacgatcctttttccttcagcagcatttcttactggctgtggctggaatctgccttttatcacagctgtcaccattctcacgtgattcttgtgagactctttttggttataattactatttaatatttagactattttactgagcagactttataaatgagatatctacaaggcacttaaagtgttacagatgttttaccttaagaattatttaagttgtgttgggttaagacagttttcagtgtaccgtaaatgttgtgttttcagaaaaagacaaaacgatggtgctgactggttttctgtatattgcacaacagtcctcaaatacactgatgtatgaaactattcatacatcaagcagcatttttttcactctccttagaattggaactatgcagttaaggcagataaaatgtacagatgtttcatatattacaggttacatatataaatcaaaatttcctatataaaactgatttgggatttggggtggaaatattttgaatattaatttatttttaaagatgcaagataggactttgtgcaatgtatttttgtaaatgcttttcaaaatatctgtctttggtagtgcttctgctgctgccaccaaattgataagatgctattaagaggtttaaataaagagttttaatttttaaaaggg

SEQ ID NO: 291102 - DNA, 1000 bp, Homo Sapiens
aaaaacctatccagcggtactcatcctattggagaataacaagcatcaaagagaaaagcagcttgcaaatgcagaatcctatttctaatgcagtgctgaatgagtacctggagcagaaggttgtggagttatataaacagtacattatggacaccgtgtttcatgacagttctcctacccagattctggcgtctgaactcatcatgacaagtgtagaccaaatcagtcttcaagtgtctagagagaagaatctggagacctcaaaagccagagatatagtctttagccgcctattgcaattgatgtcaactgaaattactgaaattagcactcctagtctccatatttctcagtatagcaatgtaaatccatagagaggatgcttccattactgtctcgcatttacttaaacatgaagcaacactttatccatttattctgagaatgtgcaggaggggttagtgaaggggaattaagggctagagaagtaaagatcagctggaagtcatgtgtgaatcatggagaaatctcataatattacacttgatgaaggaatatggtaagaggagccataaggaatgatttcaaagagaggtgtgtacagcaaggaagcaaaaataaaaatgatcaaaaaagaaacggttaattcatttgaagaaacataggaattaaaaaagaagacagtcaaatgagatgaaacaaaaaggccaaaaggtagccgggtgtagtggctcacgcctgtaatcccagcatttgggaggctgatgtgggtggattacctgacgtcaggaattcgagaccggcctggccaatatggtgaaaccccatctctactaaaaatacaaaaaattagctggacatggtggtgggtacctgtaatcccagctactagggaggctgaggcaggagaatctcttgaacctgagaggcagaggttgcagtgagccgaggtcgctccattgcactccagcctgggcaacaagagtgagactcccgtctc

SEQ ID NO: 291103 - DNA, 1000 bp, Homo Sapiens; identical to SEQ ID NO: 118119

SEQ ID NO: 291104 - DNA, 1000 bp, Homo Sapiens; identical to SEQ ID NO: 118120

SEQ ID NO: 291105 - DNA, 1000 bp, Homo Sapiens
caccaccaggcgtgccgtggagaagtgcagcttccccttcaagaatgaaacacttttatttccccatctgaccctggaggatccaccagccctgtcctccttgctgagtggggcttggagggaccacctcagtcttcacattgtggagctgggggaagaaacctgacaatatgacagagcacccactgcccaagactcagccatagaagatgccgccccaccttctacttgggtagctgggctgggacgctgggacaggaccccgtcctccttcatgactcccactgctgcctctcctgggcatggctgttagctgttctgccttctgggtgagctggcactcttctccctgagaccaaagatttgacctgtcggtcttgatgtcaaggtccccaaagaccaggttaagtgacgacacctgtctgttcctgccctgttgcttccagccactgtgatgtttgaaatatgtgatagtacctggttgtgaaaaaagacaatgaactgctagtgacattcctcaatgacctctcccaaacctcccatgatgccttacccttgctgtcatgacaaccctctggcttcctaagacccatctgcctatcgaaatatgtgcaagtcagtgagacgaagtatagagaacaggtggcccagatccaggggacccaacttctggccccttggtctgtcacctcctcgctgtgtgatcttgagaaagctccttccactcacccaccccacttcccagtctgttgggatcagaggaactttgaggtgtctgccggctaacattgtgtcattcctggagtccacagtacacgtcccctgcctcaacaggcacagctctcacaaagctcttcaagcatggaagtgggagttgtgttgtacttcatggcactctgatgcctgctgtctcagtgtttggttattatgcaaacaagtaatgtttgaaatatataatagcactggagattttctccctaaaaaaaaaaaaaaaaaaaaa

SEQ ID NO: 291106 - DNA, 1000 bp, Homo Sapiens; identical to SEQ ID NO: 118121

SEQ ID NO: 291107 - DNA, 1000 bp, Homo Sapiens
tggctgtggtggaggatttccagagacacctcagtggatcagaggaggtttcagccccagcacagaaacaggaaatgcattttgaggagacaacagctctgggtacaacaaaggaatctcctcctacctcacccctcagtgggggctcagcccctggagcccacctggagcctccttatgacccagggacacaccacctccccagtggggacttcgctcaatgtacttctccagttcctacccttcctcaagtggggaactcaggagaccaagcaggggcaactgtacttcggatggtcaggccccaggatactgtggcatatgaggacctatctgtagactacactcagaagaaatggaaaagtctcacactcagtcagagagccctgcagtggaacatgatgccagaaaatcaccatagcatggcctccttgggctggagtacaatggcgtgatcttggctcacttcaatctccagctcccgagttcaagcgattctcctgcctcagactcctgagtagctgggattacaggcgcctgccaccatgcccagctaatttttgtaatatttagtagagacggggtttcaccatgttggccaggctggtttcgaactcctgacctcaggtgatccacccgcctcagcctcccaaagtggtgggattacaggcgtgagccaccacacccagcctattctttttaagtttcttgatgtagtggcagtagtcttgtgctcttcaggagagtgtcccgagttctacgtcccacatcaactgagggtgtgaacttgtggaggacttttgtctgaatctctttttcaatctctatacaatgtggcggagttgtgccacctacatgagccaatggagaagaaagctcctggtatactttaagtactcaacaatattaaatactgaatatttgtcaattgacgaagtacttcaaaaaaaaaaaaaaaaaaaaaaaaaaaaaaaaaaaaaaaaaaaaaaaaaaaaaaaaa

SEQ ID NO: 291108 - DNA, 1000 bp, Homo Sapiens
aagagttcttgtgagcacaaagccaagagagacagtgaaaattccagattcagctgatggacttggcttccagatccggggatttggcccttctgttgtgcatgctgtaggaagaggaactgtggctgcagcagctggtcttcaccctggacagtgcattatcaaggtgaatggaatcaatgtcagcaaagagacacatgccagtgtcattgcacacgttacagcctgcaggaagtacaggcggccaacgaagcaagattccatacaatgggtttataatagcattgagagtgctcaagaagaccttcaaaaatctcactccaagccccctggagatgaagcaggggatgcttttgactgtaaagtagaagaggttattgacaaattcaacactatggccatcattgatgggaagaaggagcatgtgagtctgacagtggacaatgtccacctggaatatggtgtcgtgtatgagtacgacagcacagctggcatcaagtgcaatgtggtggaaaagatgattgagcccaaaggtttcttcagcttaactgccaagattcttgaagccctggctaaaagtgatgagcattttgtacaaaactgtaccagcctaaattctctaaatgaagtgattcctactgaccttcagagtaaattcagtgccctttgcagtgaaagaattgaacacctatgtcagagaatatccagttataaaaaggttcaagcttcagaaaggttttacaatttcacagcacggcatgctgtctgggagcacagttttgatcttcacagtgtaagcagcacatttccagtacctgtgactatggagttcctcctgctgcctcctcctctcttaggaatatcccaggatggaagacagcactgcattcctgaggaccttccttctcaagaaatgctcttagcagagagggcccctgtctgattcttaccctttggaacagttcaggcacccttagacacagtacacagcccttcctag

SEQ ID NO: 291109 - DNA, 1000 bp, Homo Sapiens; identical to SEQ ID NO: 223482

SEQ ID NO: 291110 - DNA, 1000 bp, Homo Sapiens; identical to SEQ ID NO: 118122

SEQ ID NO: 291111 - DNA, 1000 bp, Homo Sapiens
gatgcaaaaggcagaagacaaagcagtagagcataaggagattttggatcagctggagtcactcaaattagaaaatcgtcatctttctgaaatggtgatgaaattggaattgggtttacatgaggcaaaagagatttcactagcagacctccaggagaattatattgaggcattaaataaattagtgtctgaaaatcaacaactacagaaagatttgatgaataccaaatctcagctggagatttctactcagatgtgcaaaaaacaaaatgacaggatctttaaaccaacacacagcagaacaactgagttcaagaatacagagttcaagccaacccatggccagcacagacatgatggaataaagactgagcactacaaaacagatcttcattctccaagaggacaagcgtcggatagtataaaccccatgtctagggtgctaagccccctgagtcctcaaatcagcccttgcagctccaccaggtctttgacttcctactctctatgtaaaactcattctttgccttcagcgctagatacaaatgaagccaatttttctgacactatgtctgagagtatgaatgaccaagaagagtttatatcttcgtgttccttgcctgtatctccccttggttcaatagctaccagatttttggaagaggaggaactgaggtctcatcacattctagagcgcttggatgcccatattgaagaactaaaaagagagagtgaaaagacagtgagacaattcacagccttaaagtagcctcttaaaaaaatcacaatcttggaaataaaaataaacaccaaagagttactgtcatctgaagtagcagctctttaaaaacatgaagagataaaattataaaaatgatacatctaaagcagtggtgaagaaagctgaaaaactgatacttttgataggcattttctctgcactggtttgtttaaaggacttcttccagcaataagttgaaagaataaaccactttgctag

SEQ ID NO: 291112 - DNA, 1000 bp, Homo Sapiens
cagaagaatatttgcttttatatgcagaaaacatcgaattcagagagttccagaagacagcgaacagtgtgagagtctcatttctatgcacagtgtttctcaggaggatggagctagttagctgtctgttgtctgtagcccagcttgataatggaactatacagcgaagagacaatctctggcaagtttttgtagaaaaaatgtttcagtgcctagtctgaaaaataacagtttgagttctttgaaactctaaaatatatttttctcatacctgttttcttcattttcataatgaagcactttgctatgtagctgtgtacatatcactacagttataggaagtttcagtctacagtccatccaaaggaccaacctgccttacacatctcaaggaattcagctgttgaaatcatttgaactaatcaaggaataaatcctaatgttctgggactttattttcacatgttaaatgctggaatatattatgaaaatgttttcaagaaatcacttaagtgttcatagaccagtatttctgacaggtaaaatgctaaaataagctacctgtaataagtgtggattatatttttgggttttgtagaatattgcaaattaaccacacaaaaaatgtttaatttatgcaacaagcatgtttgtgcaaatttcatgggactttaaaaagaataagtatttgagaaaatatctggttcacttacactacatttactgtattattcttttatagcattaggtgccttgtattttaaatctgtgacaaaccatggcaaatttttaaaggggaagtattattataaaatgaagaaatatgtatttctaaaggctatattgctgtaaacttaattgataaagctctgtttaatttagagttttgaagaaatagtctcccttcaattaagaaattttcataatggaatgatttaaattgaagtgacaaagagtattattaaaatacaatgtttatacgtgtaaaaaaaaaaaaaaa

SEQ ID NO: 291113 - DNA, 1000 bp, Homo Sapiens; identical to SEQ ID NO: 223483

SEQ ID NO: 291114 - DNA, 1000 bp, Homo Sapiens; identical to SEQ ID NO: 223484

SEQ ID NO: 291115 - DNA, 1000 bp, Homo Sapiens; identical to SEQ ID NO: 223485

SEQ ID NO: 291116 - DNA, 1000 bp, Homo Sapiens
aaatacctagaatgtgataaagcctttagccagtcttcaactcttactaaacataaggtaattcatactggagagaaaccctacaactgtgaagaatacggcaaagctttcaaccagtcctcaaaccttattgaacaaagtaattcatactggagagaaaccctacaaatgtgaagattgtggcaaagcctctaacccgtcctgaattcttactaaacataagaacattcatactgaagaggaaccctatgagtgtgaagaatatggcaaagccttcaacaagtcctcaattcttaccagacataagataattctggctgggtgcggtggctcacacctgtaatcccagcactttgggaggctgagacgggtgaattacatgaggttgggagttcgagaccagcctgaccaacatggtgaaatcctgtctctactaaaaatacaaaattagccatgcgtagtggtgcatgcctgtaatcccagctactcgggaggctgaggcaggagaattgcttgaacccgggaggcagaggttgaagtgagctgagatcgcgccattgcactccagcctgggcaacaagagtggcactccatctcagaaaaaaaaaaaaaagataattcatactgaaaagaaactctacaaacttgaaagatgtgacagtgcttttgacaacacctaaaacttttaaacataaaaaatcatactggtgagaaatcctagaaatgtaaagaatgtgacaaggcctttaaatggttgtcacacttcattataggtaagatagttcatactgaagaaaacttctacaagtgtgaacagtgtggcaaaacttttaatgaatgctcacaccttattgcacaggagagcatttatacttgaaaaaaaatgtacaaatataaagaccatgaaaaagccattaatatctattcacatcttaccactggagagttcatacttaataaaaggaatataagtgcaattactgtcaaaagatctttcaga

SEQ ID NO: 291117 - DNA, 1000 bp, Homo Sapiens; identical to SEQ ID NO: 223486

SEQ ID NO: 291118 - DNA, 1000 bp, Homo Sapiens; identical to SEQ ID NO: 223487

SEQ ID NO: 291119 - DNA, 1000 bp, Homo Sapiens
gttcacatgtcacagggtatggtgtgacagggtgcctgtggacacatgaatcacttctaacctgcctccctgtcagcctccaggctgccagctggctgaggccagggactgggtcaggctcatctgtggcgcctcagagggtcagcatcattggtgaacagatgcaggcgctgctggaccatctggggagagtgacagtccatgtcttcaccagggagccatttgagtgctgagcgacaagaggctcagagggcatgaccccatgggactggatgcggcctgagggctgataccgctgggcggtatcctgccctgctgtggccctgtgggatcctccgtgttcctcggcggactctgctgacctcctgcagacccaaaccacagccacatcccagcttctgtgccagcactgtgacagtacctcgctcctctgtgcaccagatccggcctcaggacttacacctcctgcctgacccccaggcttctctctcctttctcccagcaaactgcagtggcagaaaggaggttcagaggctgggaaagtgggcctccccttgcaactcagagctgctgcactcaggagggccccatccaatcccgggcccctgcagggaaaagcgctgggtgtgtgtcagaggcgcagggtgggtggggctgccagccaggaccctggcctgcagcctgatccaaaccaaagactgtagaaccctggggtgtggctaacggcccctccagcacccatagccaggtcttcctggcccttgaggctgggctggcggacaggcacctacctcttccttaagctgaagctcccacactgtcttccagggctgaggagatgctctccttttctactgaccatcttgatacttatttatacgagaggcagttgctggacggggtagtactgggaagcaggaggcagaatggctctgctgagcctcctacccatgacaacaccccaataaacagaacattcagagccaaaaaaaaaaaaaaa

SEQ ID NO: 291120 - DNA, 1000 bp, Homo Sapiens
gagtgaattttggatagtcttgtgattctcagactaacttccagaattatactttaacccctcccagatatggtccgcctttggcattgtgtgtacatctgcagttttgcatggtgggttgttaatatttcaaatgtgtggtttatgaatacgtctgtataatcggcttctggagtgaaacagcaaaccccaaatcttcaaagttggaaggaactttaaaaatcatccggtccaatctctttcctctttctgccacctcccaaggcagaaatcccctcttcagcttcttttgtaggtgggaatccagcctctgttagatatgtccagagatggaaactcactcccctacaaaagatggagcttaatggagaaattgcaactttcattaaaaaacaaattcagatgaaatatcagtaactgtcttggacagtgctgaaatcaggtggttaaacgggtaaacaaaatatactgtattttgagaaatggcacaaaaacaggcagtcatctttaagggctatgcctaggcaaactactaacatgcattgtgagaatgccgtgtatacctcacgtactgtgtactttgtacatatattttaccttttatacctatgttcgattttgttttgttttgttttgttctggctttgaggcttgttttgttgtctgtgtctgtctgaataacctgcgtgtctaaaaccacgtgaaatgtgaatgattattggcaatattaccttgacagaatcatgggactttgagaagagggaggacagaggcctctgtcgcactaacgctctcgtggttgctcgactgttgtatctgtgatacattatccgactaaggactctgggctggcagggccttctgccgggaaagctagaaacactaggttcttcctgtacatacgtgtatatatgtgaacagtgagatggccgtttctgacttgtagagaaattttaataaacctggtttcgtaaaaaaaaaaaaaaaaaaaaaaaaaaaa

SEQ ID NO: 291121 - DNA, 1000 bp, Homo Sapiens; identical to SEQ ID NO: 118123

SEQ ID NO: 291122 - DNA, 1000 bp, Homo Sapiens
tctcccagcctctcccccacattgtccctgactctaggggcacatccagtctccatcgtgctgcagcagctggactgagggcagagcctgtaggtgcagaggccctggctcccgaggtccagccactctccctggggcctctggggtgagagcagcttccgataggacctgcccagatttctgcatgtgcacttttgtttactgaaagagagaaaggggggggtcacagcaacatgccctggcctttctgccctgttccccaaccccactgaggcctgctgcacaggtcaatgccttcgttatcgttattgtactgtcactttgttcttgaggtagtagtcaaggatcaggaggggcagatgtcttctctgggctgcgtggggccggagcagaggtgagcagcaatgcactggttcgggagcccccatcagcctccttgtgcaaactgggcccccatgccacagtctggctttccctccatctgccccaggacaagagcaagaaggacatcagttgcccagtcatgtgatcccctgccatcttgccttaggaacagccttcccccaccagcagccatggctggctggggcgttagccaagccacctactgccaggaattggagcctcagttccctcctgtgtcaagtagctaactgcagcagctggactgagggcagagtctgtgggtgcagagaccctgcatgtaggtcacaggttgaggcccagccactctccctggggcctggtgggtaggcaagtagctctggggccacctcaagtgaccaaatgctattaatttccatcctttagcaggctgggccctaggcaggaagctggcttctgggagaggagtgagaacgtgcagggcctgcctagcttgcgtgcttgaggaaggtggcattccgtgcttgcctccttgaggagggtggcattctgtgtcttctgcttatgaagcgcctttcttaaagtttggcaataaaatccatttttatggaaaaaa

SEQ ID NO: 291123 - DNA, 1000 bp, Homo Sapiens; identical to SEQ ID NO: 223488

SEQ ID NO: 291124 - DNA, 1000 bp, Homo Sapiens; identical to SEQ ID NO: 118126

SEQ ID NO: 291125 - DNA, 1000 bp, Homo Sapiens; identical to SEQ ID NO: 118127

SEQ ID NO: 291126 - DNA, 1000 bp, Homo Sapiens
atttattatttatgactttatgtcacattgaagaatttcttcatgatacattttcaggcacacttgtaggaaaattaggatcatgagtcctgctttaagtatttgcagtgtagtaagagaatccatcttttactaggagaccagattccttttatacctcattcatcatgctggattgtaataaatttcagattttggaatgggcttatttaactgacctaacaatcttgatgatttccattagaataacttattctaaggtcaaaagtggaaagacactgttggtttttattttgatttcactatactcatttttgaacatggaaatacagtggtgaaaccacctatgcaaaaatgataacagtgaggaaattatgacagtgaaagagatctgacctaactatctatcttgcctcgaaactgcccttggtcgttcctgagtgtgggccaagctaactttgggagaaatttactttataggttaaattataatagcccttcccaaaactaaacgattctcctgcctcagcctcccgagtagctgtctttataataccatcagccttatcatttattcgtcatgtatggattgtttcctatatccactatcataaaattatcatttgaaatatttttttatgaaaaaaaaaacacttctcagtgaaaaaacaagattacaagggggaataatatttattcagctaaaatagtacttcacaggaaatataggaaaagaaacactagttcagttttattccaaataatgtacttctaattatactcttgaatttattggataagaaggtctgaggtgggtctgaaattcatacatgaagtcaggaaaagaaaagaaacttagttctaccttgattacatatgttgttacaaattatcattataaaatgtttaaacaattagtatagtatatcttttgaataattgcttataatatgccttaccataaagaaaattgatgctaaaaaaaaaaaaaaaaaaaaaa

SEQ ID NO: 291127 - DNA, 1000 bp, Homo Sapiens
cgcaacggcggccagctggagccgggcccagcgggggcaccctcgccggctccgggcgctcccgggccgcgccgacgggccagccccgccgacctggtctacttcgaaaagtctcccgacttctgcgagcgcgagccgcgcctggactcggcgggcaccgtgggccgcctgtgcaacaagagcagcgccggctcggatggctgcggcagcatgtgctgcggccgcggccacaacatcctgcgccagacgcgcagcgagcgctgccactgccgcttccactggtgctgtttcgtggtctgcgaagagtgccgcatcaccgagtgggtcagcgtctgcaagtgagcggcccggggtcccctgggccctgatcgaggtcccctcctggagcctggccctctgaggcttacggtcttggcaaggcagcatcgccttggctcttgggaagaggagattggaccacatgatcttataggaacccctcagctctgaggtctgtgatcgccggacagtccaggcctgtctgaaccccaccactcacttctgtgggctctaggactgactgggttcttcctccctccccgaagcccagacagttcagttgggctgggggttgctccacaccctaaaacaagcctcagccaggcaacccgtcagtctgtctccatcctttcaccccttccctggagatgggaggtggggaatgaatggaagctgacgggcagagagaggaggattaaaaaaaagaaatagacataactgagctgaagtaattccataaagggcccagacagcctcctccaccattcccttcatcattcatttaacaaatatttattttgcactctctttgcggcactctgggggcggtggggtgcgtgggggtggcaatgcaaggcactgaggccacagatgtgagtaagcgagacacaacacttgtcctcttggaggttacattcttgctggggggaggcatgggcaataaacaagtaaatatacaaac

SEQ ID NO: 291128 - DNA, 1000 bp, Homo Sapiens
tggtggacatacttacagagcaactgcgtgacattcagctggagaattacacacccaaggaacccctcaccctgcaggccaggatgtcttgtgagcagaaagctgaaggacacagcagtggatcttggcagttcagtttcgatgggcagatcttcctcctctttgactcagagaagagaatgtggacaacggttcatcctggagccagaaagatgaaagaaaagtgggagaatgacaaggttgtggccatgtccttccattacttctcaatgggagactgtataggatggcttgaggacttcttgatgggcatggacagcaccctggagccaagtgcaggagcaccactcgccatgtcctcaggcacaacccaactcagggccacagccaccaccctcatcctttgctgcctcctcatcatcctcccctgcttcatcctccctggcatctgaggagagtcctttagagtgacaggttaaagctgataccaaaaggctcctgtgagcacggtcttgatcaaactcgcccttctgtctggccagctgcccacgacctacggtgtatgtccagtggcctccagcagatcatgatgacatcatggacccaatagctcattcactgccttgattccttttgccaacaattttaccagcagttatacctaacatattatgcaattttctcttggtgctacctgatggaattcctgcacttaaagttctggctgactaaacaagatatatcattttctttcttctctttttgtttggaaaatcaagtacttctttgaatgatgatctctttcttgcaaatgatattgtcagtaaaataatcacgttagacttcagacctctggggattctttccgtgtcctgaaagagaatttttaaattatttaataagaaaaaatttatattaatgattgtttcctttagtaatttattgttctgtactgatatttaaataaagagttctatttcccaaaaaaaaaaaaaaaaaa

SEQ ID NO: 291129 - DNA, 1000 bp, Homo Sapiens; identical to SEQ ID NO: 223491

SEQ ID NO: 291130 - DNA, 1000 bp, Homo Sapiens
ctggtatgtctgcttgcttgctgcttttccttgctttctcttggaagaggaaaggactctggtcaggcccaggctgagtgagatgagctgcagctggctcatggccttcttagagcagagagaggagtatgtcattttactaagttcctaaacaaacatttatgcaggcaacactccttgcagatccagaaactgaggcacaatagggttatgacttgctcaagaatatgtaggtgctagggggtaaatcaaggcatcacaatttctgttcagcgggcaggaataggctgtgaattgctagcactttttttttttaagcaattactttttgacttgttcctctgaaagtgcaagaggcgtacacctttcccaaatgtagactagaatctgcaggatgccacccactgtatagttctgctttcccagagaggaagaacttttagaaaccaaatgatcttaattgttattgcccacccctggcttttccgggtagaaaattcacagtaggaatgattgttaagagagagtgcttggaaccatgggttaacaggaaaggctacctaacttcacatatctgcaaccagagcagccaccaagcattacttagcagcaggaaaatgattgtatttgagttcctgtgtgtccaaaactgaggcaccatgttctttgaaaacatgccacctcaaggctgggcgcggtggctcacacctgtaatcccagcactttgggaggccgaggcgggcggatcaccggaggtcgggagtttgagaccagcctgaccaacatggagaaaccccatctctactaaaaatacaaaattagccgggcgtggtggcatgcgcctataatctcagctacttgggaggctgaggcaggagaattgcttgaacccaggaggcggaggttgcggtgagttgagatcgtgccattgcactccggcctgggcaacaacagcaaaactccgtctcaaaaaaaaaaaaaaaaaaaaaaaaaaaaaaaa

SEQ ID NO: 291131 - DNA, 1000 bp, Homo Sapiens; identical to SEQ ID NO: 118129

SEQ ID NO: 291132 - DNA, 1000 bp, Homo Sapiens
taactctaatacatcagcatgcgttaattcagctggttgggaaatgacaccaggaagcccagtgcagagggtcccttactgactgtttcgtggccctattaatggtcagactgttccagcatgaggttcttagaatgacaggtgtttggatgggtgggggccttgtgatggggggtaggctggcccatgtgtgatcttgtggggtggagggaagagaatagcatgatcccacttccccatgctgtgggaaggggtgcagttcgtccccaagaacgacactgcctgtcaggtggtctgcaaagatgataaccttgactactaaaaacgtctccatggcgggggtaacaagatgataatctacttaattttagaacacctttttcacctaactaaaataatgtttaaagagttttgtataaaaatgtaaggaagcgttgttacctgttgaattttgtattatgtgaatcagtgagatgttagtagaataagccttaaaaaaaaaaaaatcggttgggtgcagtggcacacggctgtaatcccagcactttgggaggccaaggttggcagatcacctgaggtcaggagttcaagaccagtctggccaacatagcaaaaccctgtctctactaaaaatacaaaaattatctgggcatggtggtgcatgcctgtaatcccagctattcggaaggctgaggcaggagaatcacttgaacccaggaggcggaggttgcggtgagctgagattgcaccatttcattccagcctgggcaacatgagtgaaagtctgactcaaaaaaaaaaaatttaaaaaacaaaataatctagtgtgcagggcattcacctcagccccccaggcaggagccaagcacagcaggagcttccgcctcctctccactggagcacacaacttgaacctggcttattttctgcagggaccagccccacatggtcagtgagtttctccccatgtgtggcgatgagagagtgtagaaataaagac

SEQ ID NO: 291133 - DNA, 1000 bp, Homo Sapiens; identical to SEQ ID NO: 223492

SEQ ID NO: 291134 - DNA, 1000 bp, Homo Sapiens; identical to SEQ ID NO: 118130

SEQ ID NO: 291135 - DNA, 1000 bp, Homo Sapiens
agctctgccgtcagtggctgaggccagaatgccacaccaaggagcagattttagacctgctggtgctagaacagttcctgagcattcttcctaaagacctgcaagcatgggtgcgtgcacaccatccagagactggagaggaggcagtgacggtactggaggatctggagagagagcttgatgaacctggaaagcaggtcccaggcaattcagaaagacgggacatactcatggacaagttggcccccttgggaaggccatatgaatcactgactgtccagctccatcccaaaaagacccagctggagcaggaagctgggaaaccacaaaggaatggtgataaaactaggactaagaatgaagagttgttccagaaggaagatatgcccaaagacaaggaattccttggggagataaatgacagactgaacaaagatactcctcagcatcctaagtccaaagatattattgaaaatgagggcagatcagaatggcaacagagggaaagaagacgatataaatgtgatgaatgtgggaaaagtttcagtcatagctcagaccttagtaaacacaggagaactcacacgggagagaagccctataaatgtgatgagtgtggaaaagccttcattcagcgctcacatctcattggacatcatagagtacacacgggagtaaaaccctataaatgtaaagaatgtgggaaagacttcagtgggcgcacaggtcttattcagcatcagagaatccacacaggtgaaaaaccctatgaatgtgatgagtgtggaaggcctttccgagtaagttcagctcttattagacatcaaagaattcataccgcaaataaactctactaatatagcagtaatatcaaaagttctttggacactcaggcctaactagttatcaaagaatctattttagaaaccttgagtttcctcaatgtggtcaaagcttcagtcatcattaaacttctctggaccaaaaaaaaaaaaaaaaa

SEQ ID NO: 291136 - DNA, 1000 bp, Homo Sapiens; identical to SEQ ID NO: 118131

SEQ ID NO: 291137 - DNA, 1000 bp, Homo Sapiens
atgttggggaacctgcttcggcctccatatgaaaggccagagctccccacatgtctctatgtaattgggctgactggcatcagtggctctgggaagagctcaatagctcagcgactgaagggcctgggggcgtttgtcattgacagtgaccacctgggtcatcgggcctatgccccaggtggccctgcctaccagcctgtggtggaggcctttggaacagatattctccataaagatggcatcatcaacaggaaggtcctaggcagccgggtgtttgggaataagaagcagctgaagatactcacggacattatgtggccaattatcgcaaagctggcccgagaggagatggatcgggctgtggctgagggaaagcgtgtgtgtgtgattgatgccgctgtgttgcttgaagccggctggcagaacctggtccatgaggtgtggactgctgtcatcccagagactgaggctgtaagacgcattgtggagagggatggcctcagtgaagccgcggctcaaagccggctgcagagccagatgagcgggcagcagcttgtggaacagagccacgtggtgctcagcaccttgtgggagccgcatatcacccaacgccaggtggagaaagcctgggccctcttgcagaagcgcattcccaagactcatcaggccctcgactgaaaagttctcagtggggccagactggctcctggagctgacaagcgaccccgtggtgaggagaaatgggggccttgatgctcaccctggttcaggcccagaggtccaagctatactgtgcaggacatggccaggcctggtggacacaggaagcctacccaacacgctggtatttggccaacactgaggatgtggttcatgggggagcagtcccctccccactcttgcccatgggtgactcttacccacagctgactagggccagcgcaaatactggaacctgtaacagaattaaaggtgaatgttctgaaaaaaaaaaaaaaaa

SEQ ID NO: 291138 - DNA, 1000 bp, Homo Sapiens; identical to SEQ ID NO: 118132

SEQ ID NO: 291139 - DNA, 1000 bp, Homo Sapiens; identical to SEQ ID NO: 118133

SEQ ID NO: 291140 - DNA, 1000 bp, Homo Sapiens
ccacatacctcaagtccaagtgagggacgaaggacagtaccaatgcataatcatctatggggtcgcctgggactacaagtacctgactctgaaagtcaaagcttcctacaggaaaataaacactcacatcctaaaggttccagaaacagatgaggtagagctcacctgccaggctacaggttatcctctggcagaagtatcctggccaaacgtcagcgttcctgccaacaccagccactccaggacccctgaaggcctctaccaggtcaccagtgttctgcgcctaaagccaccccctggcagaaacttcagctgtgtgttctggaatactcacgtgagggaacttactttggccagcattgaccttcaaagtcagatggaacccaggacccatccaacttggctgcttcacattttcatcccctcctgcatcattgctttcattttcatagccacagtgatagccctaagaaaacaactctgtcaaaagctgtattcttcaaaagacacaacaaaaagacctgtcaccacaacaaagagggaagtgaacagtgctatctgaacctgtggtcttgggagccagggtgacctgatatgacatctaaagaagcttctggactctgaacaagaattcggtggcctgcagagcttgccatttgcacttttcaaatgcctttggatgacccagcactttaatctgaaacctgcaacaagactagccaacacctggccatgaaacttgccccttcactgatctggactcacctctggagcctatggctttaagcaagcactactgcactttacagaattaccccactggatcctggacccacagaattccttcaggatccttcttgctgccagactgaaagcaaaaggaattatttcccctcaagttttctaagtgatttccaaaagcagaggtgtgtggaaatttccagtaacagaaacagatgggttgcaatagagttattttttatctatagcttcctctggg

SEQ ID NO: 291141 - DNA, 1000 bp, Homo Sapiens
gatgggttgagcacaggagtcagaggctggagtgcaatggcgtgatcttggctcactgcagacttcacctcctgagttcaagccattctcctacctcagcctcccaggtagctgggactatgggtgcacaccaccacgcctggctaatttttgtatttttagtggagatggggtttcacaatgttggccaggctggtctcaaactcctgacttcaggtgatctgtctgcctcggcctcccaaagagctgagattacaggcgtgagccaccatgcctggccaaaacacctgatttttaaatggtagcaattgtgctaaataaaatgtgtaaaaattttaaagagttgttaacattttttgatgaattctgctgaaaattatctgaacatacctgtttttcgaaacttcaagaaacttcaataagggatgcattgagcagtctgacagtgagaataaagaatgctgagtcaagatttatattaaggctggaagctgtggctcacacctgtaatcccagcattttgggaggctgaagtgagaggttaatttgagggtaggggtatgagaccatcttggccaatatagcaagaccctgtgtctaaaacaaacaaaaaaatttttaattggattttgatatggtttggatctgtgtccccaccaaatctcacgttgaagtgtaatccccaatgttagaggtggggccggctgggaggcgactggatcatgggtgtgaagccttcatgaatggtttggcaccgtcccctcagtgctggtctcatgacagtgagttatcgtgagatctggtagtttaaaagtgtgtagcacctccccactctctctttctcctgctttggccacgtgaagatgcctgctcccactttgccttctgccatgagtaaaaattccctgaggactccctagaagcagatgttgccacgcttcctatatagcctgtgagctaattaaaccccttttcttacaaactaaaaaaaaaaaaaaaa

SEQ ID NO: 291142 - DNA, 1000 bp, Homo Sapiens
tgtgtgttactatcaggaggccccctttggacccagtggatacagattacgactcttcttttatggtgtatgcaatgtcatttctatcacttgtgcttatacatcattttcaatagttcctcccagcaatgggaccactatgtggagagccacaactacagtcttcagtgccattttggcttttttactcgtagatgagaaaatggcttatgttgacatggctacagttgtttgcagcatcttaggtgtttgtcttgtcatgatcccaaacattgttgatgaagacaattctttgttaaatgcctggaaagaagcctttgggtacaccatgactgtgatggctggactgaccactgctctctcaatgatagtatacagatccatcaaggagaagatcagcatgtggactgcgctgtttacttttggttggactgggacaatttggggaatatctactatgtttattcttcaagaacccatcatcccattagatggagaaacctggagttatctcattgctatatgtgtctgttctactgcagcattcttaggagtttattatgccttggacaaattccatccagctttggttagcacagtacaacatttggagattgtggtagctatggtcttgcagcttctcgtgctgcacatatttcctagcatctatgatgtttttggaggggtaatcattatgattagtgtttttgtccttgctggctataaactttactggaggaatttaagaaggcaggactaccaggaaatactagactctcccattaaatgaatacctgattattattgtctcattaatgttcagttattaatatgtatactgccattttaatgtttacctatgaatgtcttttgtgttatataactgacagagtgctataaaatatataatatatacaaatgcagaaaatttattctagtctaatatattcaaatacaaatattaaatatatgaaatacgttaaaaaaaaaaaaaaaaaaa

SEQ ID NO: 291143 - DNA, 1000 bp, Homo Sapiens; identical to SEQ ID NO: 223493

SEQ ID NO: 291144 - DNA, 1000 bp, Homo Sapiens; identical to SEQ ID NO: 118135

SEQ ID NO: 291145 - DNA, 1000 bp, Homo Sapiens
gcctcgccctccgctggccgcgggtcagctccgagaaagtgccttctgtgtcctggagccgagcgacgctgcctccttggggccgggctgcctccctgtggctcctgcgcgccctggcctgggccttgcccagccgccccggtctctccttccctttctcctgtcctcgtcctggcctgcagctcttcccagccccgagagagcttcccgacctgtccccgcctcctctccctccctcggcccgtggtccccagctggtgactgctcaggagtttgggggctccaggacagtgggcccggggcctggcaggctctcggtgggtggggtgggggcccccaaaccaaagtcctctggggtagggagcagggctgggcaggcattctgggggcagggtgggggaggggcgagagtatttttttcttcgtgtaactgtaaatccagaatctatcctgcatcgcagcccaccgtgtatagagatataaatagagggaaagatataagaactaaatttgctaatgacatagttttaacctaaatgctatttatctctgagccgtccccgtcctccgtgcagagcaagttgaggtcattccttcttttcttctccgatcttttttcttggcttctgaccaaaaaccaagctctaccccatccccatcccagacctgcaggagacgagcgagcgggaaggcgccgggcccgggactgtccgttctcggggccagagctgctgggggaccgagtttgtacattttccattttggaattttgagttccaattgttgtaaaacttaatttctccccagtttttatatatatattttttagagttccgtttttatttattaaaaacaaaagccccagccctgccgaggcctgggcggcgtcctcagtcgggtggtcccggggcctttgcggtcccgcccggctgagacgctcgccccgacgcatggacccgagaggcgacgacacgagtgaataaagtgcacatggaccctg

SEQ ID NO: 291146 - DNA, 1000 bp, Homo Sapiens
taattggacaagagatagccaaaacaagcttatatttatggagcgtatagaaaaatatgcacttttcaaaaacccacagaattatcttttggggaaaaaagaaacagctgagatggcagatagaaacaaagaagtcctcttggaggaatgtttttgtggaagttctgtaactgtaccagaaattgaaggagtcctttggttgaaggatgatggcaagaagtcctggaaaaagcgttattttctcttgcgagcatctggtatctactatgttcccaaaggaaaagcaaaggtctctcgggatctggtgtgctttctccagctggatcatgtcaacgtttattatggccaggactatcggaacaaatacaaagcacctacagactattgtctggtgctgaagcatccacaaatccagaagaaatctcaatatatcaaatacctttgttgtgatgatgtgaggacactgcatcagtgggtcaatgggatccgcattgcaaagtatgggaagcagctctatatgaactaccaagaagccttgaagaggacagagtcagcctatgattggacttccttatccagctccagcattaaatcgggatccagttcttccagcatcccagagtctcagtcaaaccactccaatcagtctgatagcggagtttctgacacccagccagcaggacacgtccgttcccagagcattgtgagctccgtattctctgaagcctggaaacgaggcactcagttggaagagtccagcaaggtaacagcttcgttttaatttacattgaaaattctgtggtattcttttgggtttaaattgttgctctcttatgtctttatcggggatcttatttggccttatttcagtctcctttattaattttcaatcttcctaattgtagtgggtaaagacagttcagagagacctgttgatttgacttccccttggaaatgagtattttacaaattggctctaatgacttaaaatctcaaaaaa

SEQ ID NO: 291147 - DNA, 1000 bp, Homo Sapiens
ttgcttcctttcagttgcctcctggatcttctttcccgtcatcaaatgactgctgaacaggaaacctctttggtgctgtttcttgtgcatctgtccacctgttccccagtattgccctcaattcctgagagccctggagcggtttcctaccattcccttcttttagctgcttgttttaagtcctttttatgtgacattccctacccccaatgttgtcagctgcttgtgaaactcagccaggttgtctaacctggggtcaagtttgggtgactggtgcagagttacttcctaaaaggccactctccctgcctttggatttcatagtttctctgtcagtagcatgatccccaccgctatggtctatctatgatcaccgtgctttgtgaaactgtgcatccccttgtagcctttctcagtgtccgtggcatttttgtgacttcccagcactagaataagttttcctgccaaaatgagtgaggcgcttggtgccctctggactttcccacttcccaacatgggagaattgtgaactttccatcagactgcctccctggccctccccattcttctcctgttggttattctgagtctgacacagacccatgacatgtcttataaagcctccaatggctttatcctacctagatcccttccagcccattttaattagactatgtcattgtgaggccaccagtccattcatttgaattctgtgaatctccaccttgcctatctttgggtagaagctggacagtactgttgccctcttccaatcctcttcccctacatccctggcactggttgttttctgtgaaaacagcagtgaacaggttcagttttgaactggccctgaggaaatgggtcaggagttgtattggcaagagggaggggtgagagctgttggagaactgagaatgaggttttttttttttttttctttttaactttttttatattagtaataaatgcagtggaaaccagcattttatttaaaaaaaaa

SEQ ID NO: 291148 - DNA, 1000 bp, Homo Sapiens
agatgtgtattatgtaggtgctgatgtcagcgactcacagttactaggtacttgggacaatctgaaagctgcaggccttgaggataaaattgaattacttaaaatctctgttatagaattgccattgccttcagaaagtgttgatattattatttctgacattccatttgggaaaaagtttaagttaggaaaagacatcaaaagcattctacaagaaatggaaagagtgcttcatgttggcggaaccattgtattgttgcttagtgaagatcaccacaggcgccttacagattgtaaagagagcaacatccctttcaattccaaggacagtcacacagatgaacctggaattaaaaagtgcttgaatcctgaagaaaaaactggtgcattcaagacagcgtcaacttcattcgaagccagtaaccacaaattcttagacagaatgtcaccatttggctccttggtaccagtggaatgctacaaagttagccttggaaagacagatgcgttcatatgtaaatataagaagtcgcactcttctggactgtagcaggcttgctgccatcagccgggttcaggcccttgtaagttagctgtacagcagaagtttgctgtctctaggattcatatagcacccacagagctccaagtaaccaaattcccccaaagacaggaggtgtggctgatgggtacacatgcttggtaagagtttctgctttatattctaaagtacttaatgtttttgagaaaaaagttaccgaatattttttagacttaagttttatcttctgtcagaatgtgaaaagttctgcccagtttctgagcaaaaacttcaatttcaaaataaaggttttcaggggttcacttaagtgtatcacaatcaacaccagacgggatattttaactatcagattttcggaaatgtaaaaacctttatgtgtaacttcttttgatattaaacttgatttttgagcctgtaacaaaaaaaaaaaaaaaaaaa

SEQ ID NO: 291149 - DNA, 1000 bp, Homo Sapiens
tcagcccacgttcagaaccacctacatggcctaccattactttcgaagcaagggctgggtgcccaaagtgggactcaagtacgggacagatttactgctatatcggaaaggccctccattttaccatgcaagttattctgtcattatcgagctagttgatgaccattttgaaggctctctccgcaggcctctcagttggaagtccctggctgccttgagcagagtttccgttaatgtctctaaggaacttatgctgtgctatttgattaaaccctctactatgactgacaaggaaatggagtcaccagaatgtatgaaaaggattaaagttcaggaggtgattctgagtcgatgggtttcttcacgagagaggagtgaccaagacgatctttaacaattcaacctcaaatttctaatttcaccaacaactatttattgagggctaggtaaaaagttctttttgttgtaatcgtccattaattcataagttttaaagggcatggtgctcccagcaccagaaaactatcagtgtttttaaagataaattacacaagggaggagaaagatccctgtgctaggacaacagattctatacttgcgttggcctctaactcccccatccagagcctcctgcctctggcgtcagttttttccctcatccactcactggggagattggactagaggagtcctgagaggacacttccaacaagagacatttattctctgattttacctgaaaatggtagtagtttacatttatacagtacagtttatgaagcactttcatacgcaggcatctcttgttacctacatctaagctgttcccgaaagagtgttacagaacacaacagtattgtacaatattcgataagcatatcttcactgcacttgttataaaaatgagtggtgaaataatgtttggagacataatgaaagcgattaacatttggcaaaatataataaagcctttttgtaattggtgaaaaaaaaaaaaaaa

SEQ ID NO: 291150 - DNA, 1000 bp, Homo Sapiens
gttgctgaccatctatttaagctgaagacaacatcatgggagttagggagatttcggagtgcgattgagctggacaccccctctatgactgcagagcaagtagctgccattgagcagagcgtcaatgaaaaaatcagagatcggctgcctgtgaatgtccgagaactgagcctggatgatcctgaggtggagcaggtgagtggccggggtttgcctgatgatcatgctgggcccattcgggttgttaacatcgagggcgttgattccaacatgtgctgtgggacccatgtgagcaatctcagtgaccttcaggtcattaagattctgggcactgagaaggggaaaaagaacagaaccaacctgatatttctgtctgggaaccgggtgctgaagtggatggagagaagtcatggaactgaaaaagcactgactgctctgcttaagtgtggagcagaggatcatgtggaagcagtgaaaaagctccagaactccaccaagatcctgcagaagaataacctgaatctgctcagagacctggctgtgcacattgcccatagcctcaggaacagtccagactggggaggtgtggtcatattacacaggaaggagggtgattcagagttcatgaatatcattgccaatgagattgggtcagaggagaccctcctgttcttaactgtgggcgatgagaaaggtggtggactcttcttactggcagggccacctgcgtctgtggagaccctggggcccagggtggctgaggtcctggaaggcaaaggagcagggaagaaaggccgttttcagggcaaggccaccaagatgagccggcggatggaggcgcaggcgcttctccaggactacatcagcacgcagagtgctaaggagtgagggcttagggcactcacctcctgtttccacaggaatcttttggtcaataaaatagattgactcagaaaaaaaaaaaaaaaaaaaaaaaaaaaaaaaaaaaaaaaaaaaaaaa

SEQ ID NO: 291151 - DNA, 1000 bp, Homo Sapiens
aggcctggagaacctcgggagctgccaggtcatgcggtcccagccaccacagccacaggcctgtcaggacagcatccagccccagcccttgccctcaccaggggtcaaccaggtgtccagcactgtggactcccagctcctggaggccccccagattgacttcgatgccatcatggatgatggcgatcactcgagtttgttctcgggtgctctgagccccagcctcctccacagcctctcccagaactcctcccgcctcaccaccccccgaaactccttgaccctgccctccatccccgcaggcatcagcaacatggctgtcggggacatgagctccatgctcaccagcctcgccgaggagagcaagttcctgaacatgatgacctagaggcccgagcgcctggtgctgagtgcacccggaggggtcatcgctgcccagagcctggggattccagctgtcttgtctttttccaaaaaagtgttaaataggcttgaggggttgttgcgcaatggccgcttcagatgacagatgttgtaagagaaggtttatgggcatcctctctggtcttttggattattcctcagaacaatgaaaaaagtctccataggacaggaaggaatgcaaaactcatttacacagtgctttccagcctttggtgcttacaggaccgcgctgttccggcttcttcacggctgacattcggctaacgagggattactttggccaaaacctttcaaaggatatgcagaaagatggtagggagcatttgggtttgaatctgaatgctatactggatactctgctccggaaagatgagctttttattctactacttggaaggaaaaggaattcctctatgaagcctaactcttgaggtctctaacataccttgtcatagaggaaaagcacagattatacctggatgattcaggagagtgtatatgaatgaataaggcatccaagtatatatgaatgaataaagtatgtaagtatcaccag

SEQ ID NO: 291152 - DNA, 1000 bp, Homo Sapiens
gcacctacacgttcctcacgtgcttcgccggcttctggctcatctggggtctcatcgtcctgctctgctgcttctgcagcttcctgcgccgccgcctcaaacggcgccaggaggagcgactgcgcgagcagaacctgcgcgccctagagctggagcccctcgaactcgagggcagtctggccgggagtcccccgggcctggcgccgccgcagccaccaccacaccgtagccgcctggaggcgccggctcacgcgcactcgcatccgcacgtgcacgtgcacccgctgctgcaccacgggcccgcgcagccgcacgcgcacgcgcacccacacccgcaccaccacgcgctcccgcacccgccgcctacgcacctgtcggtgccgccacggccctggagctacccgcgccaagcggaatcggacatgtccaaaccaccgtgttacgaagaggcggtgctgatggcagagccgccgccgccctatagcgaggtgctcacggacacgcgcggcctctaccgcaagatcgtcacgcccttcctgagtcgccgcgacagcgcggagaagcaggagcagccgcctcccagctacaagccgctcttcctggaccggggctacacctcggcgctgcacctgcccagcgcccctcggcccgcgccgccctgcccagccctctgcctgcaggccgaccgtggccgccgggtcttccccagctggaccgactcagagctcagcagccgcgagcccctggagcacggagcttggcgtctgccggtctccatccccttgttcgggaggactacagccgtatagaggggcgcccggcgccccgggccccaccggcggactcctggcctgactgcggggctttttaaatgcttccctggactgcggggaggggcggggggagggagggatttcttatcccgtttgttacattttgaggataataaaggtgtgtgatctggtttggtgaaaaaaaaaaaaaaaaaaaaaaaaaaaaa

SEQ ID NO: 291153 - DNA, 1000 bp, Homo Sapiens
aggactccaagtgtcacgctcgaggtctgaagatgctagagcgtgtccgaagccagcccctgaccaatgatgacctggtcacctccgttagcctgccaccgtacaccggagactgatctcccctgggaagaggggatgagaggagaagtcttggcttcgcttttgatggagtcttactctgtcgcccaggctggagtacaatggtgcgaactcagccacctgctacctctgccttctgggttcaagcaattctctgcctcagcctcctgagtaactggaattgcaggtcagagcagagcatggccatgggaacaagtgccctcagcaagaagccgtggtagaccctgcctgaaaactttcatgatccaatggtgtttcacatggaagaggaccaggaggagctcatctttggtgagtggcctttgcccacatcccctccttcatccttgtcttctccattttcaatttttcccttctttcctaccttcatcagtcacacatcggttcccccaaggctacctccccactccccaagggctggtgcttgatagaccctcctctcgcctcttatgctcacagggcatggtgacacataccttcactgcattgaggtgcacagcccctgaccaaccatgatctggtcgcctccattagtgtgccaccgtacaccagagacctgtctttggcctccaggataagtggaaccgtctgtcttagcgtacctcagcctttcccttaccaagtgattggtcgttaggtattctatttgagttcactctattcgtaattaaggacagatctcccctgggaagtggggatgagaggagaagtcttggcttcacttttggtgagaaagacatgaaagacactgaagaaagtttgaacttgtggcggggacctgtccctctcaggccttctaggcacgtgcctgagggaagtctcctgagtgtaagaagtgttattggcaaagcaatccaataaaataagctacctgtgatgc

SEQ ID NO: 291154 - DNA, 1000 bp, Homo Sapiens
attctaaaggtgttgtcactgtataaaacagaaagcactaggatacaaatgaagcttaattactaaaatgtaattcttgacactctttctataattagcgttcttcacccccacccccacccccaccccccttattttccttttgtctcctggtgattaggccaaagtctgggagtaaggagaggattaggtacttaggagcaaagaaagaagtagcttggaacttttgagatgatccctaacatactgtactacttgcttttacaatgtgttagcagaaaccagtgggttataatgtagaatgatgtgctttctgcccaagtggtaattcatcttggtttgctatgttaaaactgtaaatacaacagaacattaataaatatctcttgtgtagcaccttttactgtagattagtgcttaatttcttggcttgcatttgttgattgctaaggcaattttttctaatcttagggaatcattcagtagatgcgattaaaaaactaatgttgggtcaatttttttcttcattttcagcacaagaagtcctcttatatcctactaaatacattcctaaaaatgtatttgaacattggttctgtaaaagataatggactaaaaaagtagagaggagttgtagagatcttaaatcattctggaattcctaattatgcttcaatttttagacataattttagataatttatttccagtgttttctgcatgttctcatttgttctttttctcagttgaatgcaccaactggtttgagtcctgtgagcattcagtcagttgaaattaaagattcctcatttctcctgatttctattcttgtctcaatcttaaatttagagaccagttgtttttatgatatcagccatttgatttttttcattttctatttaagaaatatgaagaaaaaatacaccaagatggtcaaattactacacaaatcagcaccagcacagtctgatagctgcaaatgtccattcatctgctgtgt

SEQ ID NO: 291155 - DNA, 1000 bp, Homo Sapiens; identical to SEQ ID NO: 223496

SEQ ID NO: 291156 - DNA, 1000 bp, Homo Sapiens
caagactccctgctggggctgtggtgggcatccctgccagtttcttgggagacctagtgatcaacactaaccatcccgtggtcatacatgggcatacagtggactggcggagcccagcaggcgcccggctgagagcttccctgaccttgtcccgtgaagcccagaagttcgccttggccagggaagtggtgtacctggaaagcagtaccactgccgtgcacgccctgctggccccagcttgcctggcagggacctgggcactgggcgtgggtgccaagtacaccctggggctccatgcaggccccatgaatttacgggctgccttcagcttggtggcagcagtggcaggctttgtggcctacgccttctcccaggattctctcactcatgccgtggagtcctggctggaccgccgcacggcctccctctctgcagcctatgcctgtggtggagtggagttctatgagaagcttctgtcgggcaacctggccctgcgcagtctcttgggcaaagagggggagaagctgtatacacccagcgggaacatcgtccccagacacttgttccgaatcaaacatttaccctacaccacccgccgggactctgtgctgcagatgtggagggggatgctcaatccgggccgctcctgatgggctcatcacaaggacacttccagcttgtgcagacaccaccctgccattgagtctggagggccctgttggagcctttggacctatagctcaaggccagaaaaatcactggctttggaattaaatagcttagattgtactataaccactacttatgaactcagggactatgagggactattcaggggctatgaatctgagcctttgtttcttgaactgtaaagtggagatgatgtaaaccgccttgcaagattgtagagttgggtaaggtcatgaacataagggcctggcacaaagggtgcactgtaaataaacagacatccctccttaaaaaaaaaaaaaaaaaaaaa

SEQ ID NO: 291157 - DNA, 1000 bp, Homo Sapiens; identical to SEQ ID NO: 118139

SEQ ID NO: 291158 - DNA, 1000 bp, Homo Sapiens; identical to SEQ ID NO: 118140

SEQ ID NO: 291159 - DNA, 1000 bp, Homo Sapiens
agccgtgctcgccccagcaggtgctgacttcatctcccacctagcagcaccgttctgtgcacaaaacccagacctgttagcagacaggccccgtgaggcaatgggagctgaggccacactcagcacaaggccatctgggctcctccagggtgtgtgctcgccctgcggtagatgggagggaggctcaggtccctggggctagggggagccccttctgctcagctctgggccattctccacagcaaccccaggctgaagcaggttcccaagctcagaggcgcactgtgacccccagctccggcctgtcctccaacaccaagcacagcagcctggggctggcctcccaaatgagccatgagatgatacatccaaagcagacagctccaccctggccgagtccaagctgggagattcaagggacccatgagttggggtctggcagcctcccatccagggcccccatctcatgcccctggctgggacgtggctcagccagcacttgtccagctgagcgccaggatggaacacggccacatcaaagaggctgaggctggcacaggacatgcggtagccagcacacagggcagtgagggagggctgtcatctgtgcactgcccatggacaggctggctccagatgcagggcagtcattggctgtctcctaggaaacccatatccttaccctccttgggactgaaggggaaccccggggtgcccacaggccgccctgcgggtgaacaaagcagccacgaggtgcaacaaggtcctctgtcagtcacagccacccctgagatccggcaacatcaacccgagtcattcgttctgtggagggacaagtggactcagggcagcgccaggctgaccacagcacagccaacacgcacctgcctcaggactgcgacgaaaccggtggggctggttctgtaattgtgtgtgatgtgaagccaattcagacaggcaaataaaagtgaccttttacactgaaaaaaaaaaaaaaaaa

SEQ ID NO: 291160 - DNA, 1000 bp, Homo Sapiens; identical to SEQ ID NO: 221143

SEQ ID NO: 291161 - DNA, 1000 bp, Homo Sapiens; identical to SEQ ID NO: 223497

SEQ ID NO: 291162 - DNA, 1000 bp, Homo Sapiens
tttcagataaaatctgcttgtgtcttgaataatatgaaatacaaactttcactttattttattgtaaattataaagagattattgtcttaaataatatattgagttagcttcaagcttcctaaaatatgaagagattgttgtctaaagtcacatattgacattgagctcagtggcctgtttcatcacgtatgtgctgctacctgtacagcagacatgcctctccagtgacatttataatgacagaagcagggtaatggtcttgtgtttgacatgatcagttaggatcatagactttccctgactcgtagatattagccttgaattgggggaaaagaagactttgacacattttagttattttaataacagagatttactcttttgaaaaataaaggtatctaatgtctccctaataagtcttctttccttccaactaaatgacctacacggacttttattttcttgatcaaagaggtgtttattaaggacttctggataactatacttttactctatttttaaagatcacaaagtaattttaaatgtgaacaggttcccataccatgaatgctggcctcaccttctctatcatccacattttgaaatgcaaagaaagctcccttgtaagccatacttccttccccactcccatcctaggatacttgcccagtgctcattaggcatttcttattcagatagtccaaatttaggttattatgcttaatttgacacattaactaaatgcccagttttaaaatatatccatcaattcacgctgaaatgtgcttctttgtgctatcaaatggaatagaatacacttattttttaaacaatcccagaatactgtgtgtagacttttgttgtgctcaaataaatgtttacttatcttacaaagctcaaatactggattgtaaccatgtgatgaagttatctatgttgtacctaacattgcaaattaatcaataaatctctgttgttaaaaaaaaaaaaaaaaaaaca

SEQ ID NO: 291163 - DNA, 1000 bp, Homo Sapiens; identical to SEQ ID NO: 223499

SEQ ID NO: 291164 - DNA, 1000 bp, Homo Sapiens; identical to SEQ ID NO: 118143

SEQ ID NO: 291165 - DNA, 1000 bp, Homo Sapiens
caaccagttcctggagagatcaagtacagaacctgttttaaaacaatggcaacagtctatcaggaagaagggattttagctttgtacaaaggcctgcttcccaagattatgagacttggaccaggtggtgcagtgatgctgctggtttatgaatacacctattcatggcttcaagagaactggtgattgcctatgaagtgtttttcccccttgagataatggatatttgctatgcagcaccatgaagaagagagactatcgatcggccaggtgtataattatgaaggagaaaactgttcaagaacaaaatctattttaatactttaaaaaatgtctataggcaacttgagattatagttttggctgtataaataaaactgtgagaagaaaaaaataatatgaaacaatgaggtatttaaagtgaatatagaaaaatagcatagaaatcatatatttatttcataaaataaatagaaactttgtctcctgtgttcctcttcaatgcttcacaatgaaaattcattgtattgatcagcatttttcctaagaggtctagaaatgcttaaactattgaaaataaatcaaattattcaaagactggattaaaaaaaagttaagccaaaatttaagcagtttttataatgaattaaattattccataaataatatttaaagagcacaagaaaaattttttaaagtgcactaaaatgaccttttaagaatgtttaattttatgaatactatgttaaaatgtaaatctgttggttttttttagtaactatgcacatatcagctctattttcctacatctactttatatctcatattgctgtaagataataaataggtattttaaaacattgtttaaaacagaatgttaaaacactgttgtttaagcatgtttaaatcaaggtattccaaatctcttctaacacaagtaggaaacatgaaataaaatttactttcctccataaaaaaaaaaaaaaaaaaaaaaaaaaaa

SEQ ID NO: 291166 - DNA, 1000 bp, Homo Sapiens
tgtatttttgtagagacagggtttcaccatgttgcccagtctgttctcaaactcgtgagctaaagctactcgcccacctggatgtcccaaagtgctagattccatggaattttcctgcatggagtgctacatcctcttgttccagtctcagctggctgctccgtgggcatacttcatacctttcatcacagagctttgcttggcctctctcctgtgtgtaatctctgtttcttggatcctgtgcttaccttttcctgctgtactctgatgtttcagtgaagctcatccacgaagtccagaattctgcctggaaaccagcttcctcctcagctccagctcttttaatgggcatatcaaaactgatgactttttccttcctgctacatgggtaacacttagttgtttgtctaatttctattttccagaaatttctcaaaatgtctgctgatagcccctcactcatatttttcatgtgggtttatagctttcatatttctttattattgtaaatgggggctgtggaaggtgagaaaacacatgctttcttaaaacagaagctctctccttcattaatttaaatatttttatcggctctagaaaatgcataaggttagtacaagatcagtagagagaaagtcaaagattacagaagtgctgaagcagaccattcttcctttcttcccaatgtctattaagatcacacataggtaaactgttacaaatccagaatggtgaaagagtccaacaatggctgagggaagtagaggttaagatatagctcaacagtgaaagtagcagggaaagagctgggcaaggccaagaccatcttttgtaccgttggtacagtaggctaaaggtacggtgttccatattaaatacagcaatatgaagaaaaataaattaagtcccttatacctaaaaaaaaaaaaaaaaaaaaaaaaaaaaaaaaaaaaaaaaaaaaaaaaaaaaaaaaaaaaaaaaaaaggaaaaaaaaaaaaaa

SEQ ID NO: 291167 - DNA, 1000 bp, Homo Sapiens
gtgagtcatgtgacagaagtacagacataactccaatgtgagaaatgtccttttttcattatggaaaataatttaaacactagtgctttagtgtgcactctcctgtaaggtctgtctttgtacagagctaagcacttgtttgtatgtgtttgtcaattgtggaagataatgaccagacaaataggtcgattgtcctattctcagaatgaattatcttctatggtaatgaagaactctttggcttagtcagaaggaattaacgaacctcggtaggaatgtatttccatcctcccaccctacagatataagaggttaaaataacagttcgcccaatttaagcccagtagtgtcagttttcctaatctcagtccaggtaggaattaagaaatatctcaagtgttgatgctatccaagcatgttggggtggaagggaattggtgcccagaaaatgggactggagtgaggaatatcttttcttttgagagtacccccagtttatttctactgtgctttattgctactgttctttattgtgaatgttgtaacattttaaaaatgttttgccatagctttttaggacttggtgttaaaggagccagtggtctctctgggtgggtactataatgagttattgtgacccacagctgtgtgggaccacatcacttgttaataacacaacctttaaagtaacccatcttccaggggggttccttcatgttgccactcctttttaaggacaaactcaggcaaggagcatgtttttttgttatttacaaaatctagcagactgtgggtatccatattttaattgtcgggtgacacatgttcttggtaactaaactcaaatatgtcttttctcatatatgttgctgatggttttaataaatgtcaaagttctcctgttaaaaaaaaaaaaaaaaaaaaaaaaaaaaaaaaaaaaaaaaaaaaaaaaaaaaaaaaaaaaaaaaaaaaaaaaaaaaaaaaaaaaaaaaaaaaaaag

SEQ ID NO: 291168 - DNA, 1000 bp, Homo Sapiens
cctagattattccagtatcccatggaagctgaggacttattccgctttccacaccgaacactaaatgtggaccagtatcaagaaccctcctgtccccacgcagtgtaaacccagtggcttctctgacctggagctgatgggccgtgaagggggcctatttttctccaaaggccatccttttggggccacctggctccaagaagcatcgctggtcttggggacgggaagggaaccctcttccaggagctctaagggtacttgggaatcaattgtgtccattctgaggtctctccagtgggagggcggcagctcctgtccctgggttcaggctgtgcttctggaagcatcgaaatgggatgtctgagccttgaggaaaagcagcagggttagcattaaagtcaagaggggcagctcaggatgctaccagggagcacatcgtttctggtgcctcatctaaaggtgaaacctcccctacattcaccagccggatgtcccaaatccctttagccagattgctttttgcaaccaaagctgtggacagaaaagcctccttaagtgagctgaggggacaggaaatccaatcagatgacctttgtgttcgtaatcgggcttgagccagaggctggggagctgagtcccagccaaacctcactggcccttttgcttttcacgcccagggctcagtggcccaggaagtgtgctgggcagcctgttcttactccagctcaacccattgggtgttggctgtttttggttttagttgttgttttgtattttgttgttttaattaataggctttatttgtaagagcagttttatgtttacagaaaaattaggcacaaagggattcccatatccctcctcttctttgcatatttccccctctaattagcatgttgcattagcatggcactttgttacaactgatgaacttgtattcattattagctacagtgttcatagtttatattaaagttcactctttgtgttgtgcatccta

SEQ ID NO: 291169 - DNA, 1000 bp, Homo Sapiens
accaccgtagggacacagacccttccacatagcagttctggcttcctcgattctgcattggagttggatcacaggattgattttgaactcagagaaggccttgtggagagccgctattggtcagctgtcacgtcgcatactgcctattggtcatccttggatgttgccctttttcttttaaccttcatgtataaacatgagcacgatgatgatgcaaaacccaatttagatccaatctgaactctcttgaaggacatgaatggcctaaaactgattttttttttttccgttaaaatgtgtgtgtcaagatacggagatttcagggttaaagtatatttcagttttctttagggcaacatatatttgaatttaaaagcactttatttaaaaaaaaaagaagttttcagttctgaagaagtcatttacagtttgcatcattttaattatgagtctgacaaaaccttctccagagaatcaagcaagacctggatgtgaagaaggtttgggtaaactgcatgtaaaggctacaaatcacaatctgattcctcccaaatataaaggcatatggaacataatgtattaaccaaagtatgttataaatcaaaaatggtcaaggttcagcatattctatatgaagatcacaaggtggtatcgttttagatttctatgaaggctttcatttgtacatccctttgaaaaaatataacagatttaaaatgttttgaatttaacttgtttagaaaaactaatgcttaaaacaatatttgaactactgtatttataatttattacctctaattgctttatttcagtgtatgagacattactgttttaatgtttgctttgaacataatttaagaaccagatttattttctatagtgataaacccttttttctcagaactccatctttgtactcttcagatgaatatatagacactgtggcatacattttttttcattaaaaacttatggcttcatacaaaaaaaaaaaaaaaaa

SEQ ID NO: 291170 - DNA, 1000 bp, Homo Sapiens
attcccacagcaggaaggtggcatagctgttttgtctgacaccagaacccatctcaccacactgctttacagtcttcctgaaggacattttgaggtgggggggccttcaaagctcagagactggtttgaatggtttaattttgcaatggatcatgtccatgccaggtgttacaattcttaacttcctccaaattcgtgtgtccattagacatttggctacatctggctggaggtcaggagaaaattctgaggtaaatagatggattttatctggcagtgtcgaaaatagtaggagcctaaaactttgttcaatgagtaagatgtagatttggagtcatcagcaggggaaacttgttagatgtcctttgtatctttttctatccatttgtattttttctttcccaaagagctgaaatcattttataccctgaatttaaaaggtaattgcttttttcctccttgcgaaatcataccttaatttttttttttttttttttaccatttatgatttattctcctatgtgtcatatgaaaggccaaggggctttatcttttactagtaggcaagcctgggcatttctgcatttgtgccagctaacactacaaaatagacttaattagagaaatttagacccagaattgcagcttcaacaacacaaaacaggaaagctagaagaggttgctgtgtcaacctacaagatagtgattcttggaagttggtatggaccagaaagcattcccaggacatttaggctatggctgagttctctaagactcagggtgggaattataatccctggtctaagctgatatgaaagtttctatgtgtgaaaatatggagttatatgctttgagattttctgccagttaaactaaaacaagatcatactgtaaatgtttgtaacttgcttccccccactgtatactgtaaacatctttgcatgtcaataaatatgcctctacaacataaaaaaaaaaaaaaataaaaaaaaaaaaaaaa

SEQ ID NO: 291171 - DNA, 1000 bp, Homo Sapiens; identical to SEQ ID NO: 118144

SEQ ID NO: 291172 - DNA, 1000 bp, Homo Sapiens
accatggttgtatatgcagttgaccgaaacattgttattggacacataactatagttgaaagaataagcaaaaagtctatctaggtgtgctgtcttgagcaacttttaattattctcctgtcctgcaatatgagttaatcttctctgatcgatgtagattccaggaaggggtgtccaggacaattaccttccttctggagaaacttcccttaatcaaataagagaacttcaaagaaaatccctccctgtgctttggaagggaagggaggtgggcagcagtgggtcagagatagacctttgttctcttatttctgaggcccttcagtctcctttattcaaagcactcagcatgccaaagcaccctattttagggtatctttttctgagccctaaacactgtgttggggatgtcaactgtgacaggaaaatatcttggggccccagaatcactaaggaaaactcaagcttagggaaacttcttagggcaaacccacctcccactctattcaaagttatctctctgctcactgagatagatacatatctgattgcctcctttggaaaggctaatcagaaactcaaaagaatgcaactgtttgtgtctcacctatctgtgacctggaagctccctccccactgaaccaatgttcttcttacatatattgattaatgtcttatgtctccctaaaatgtataaaaccaaggtatgccccaaccatcttggccacatgtcatcaggacttcctgagtctgtgtcacagtgtgtcctcaaccttggcaaaataaactttctaaattaactgagacctgtctcggattttctgggttcacattttggaaaccatgaatggattctgggtggagatgcccctgacccttgacaaatctatcggtgcttggtaccagcatgagctaactttatggctcaaaccaataggacaatttgctgaggtctgagaggactccctccagaaaatccctgatctcttaaaatttggta

SEQ ID NO: 291173 - DNA, 1000 bp, Homo Sapiens
tgtgtgatgtctcccctggacacctagctttaaaatttctctcttttgtactctgtgcctttatttctcaaaccggccaacacttagggaaaatagaaaagaacctacgtgaccatcggggcaggttccccgatacccaatgaccccagagcagtgcagccaccagggaaggtgagccagacacaggccgggacaaaacgcagacattttttaggggaataaagagggcgaggtaaagtttatggaactcagtgttaggaactttggcatctgtagctgagcacagcaggggaggggttactcaagatggcaagtgcgccaaggagaaggcagaaatgctggggcctggaataagggaggagaggggactggagagtgtggggaatggaaagaagcagtttactctagactaaagagtatattgggggaggaagagagggaggcacgtaggaacaagcaatgagaagaccaggaaaagaaagagctgaaaatggagaaagccacagttagaactgttggatacaggagaagaaacagcggctccactaaagacccgccccccggttggatgtccttccaagaatggaatccttccctggtgatggtctctcaccctgtcttaccagcatccactctcccttgtcctcccgggggtgtatctgagtcagccagtggcttcttgatgatggtggtggtggttgtagtgtgacaggtcccctttaggttatttaagggtgcatgtcccctgcttgaaccctgaaggccgggtaatgagccatttccatggtgcccagctgaggaccaggtgtctctgagaatccaaacatcctggagagtatctgagaaccaaccaagtaaaagtctcgttgctcatatatagtagacaaagagccagaaaattaactgaaaagcagtttagacattgggggaggctggatctctcgagctgtcttgctgagtgccctgtgtgtaagtcctaataaacttagctactcgccaa

SEQ ID NO: 291174 - DNA, 1000 bp, Homo Sapiens; identical to SEQ ID NO: 118145

SEQ ID NO: 291175 - DNA, 1000 bp, Homo Sapiens; identical to SEQ ID NO: 118146

SEQ ID NO: 291176 - DNA, 1000 bp, Homo Sapiens; identical to SEQ ID NO: 223505

SEQ ID NO: 291177 - DNA, 1000 bp, Homo Sapiens; identical to SEQ ID NO: 224305

SEQ ID NO: 291178 - DNA, 784 bp, Homo Sapiens
agaaggctttggcttctgatagtcatggactcactaggctgctgaggaagatcaataatacctactggaatcagtcatgagaagtcaagcatggaaattgtgaattgtgtgtgtggccagaccagtacctccaagtgttcagaagatgtgtgaccagacaaaacacagtaaatgctgcccagcaaaaggcaatcaatgctgcccaccacagcagaaccagtgctgccagtcaaaaggcaatcaatgctgcccaccaaaacagaaccagtgctgccagccaaaaggcagtcaatgctgcccaccaaaacacaatcactgctgccagccaaaacccccatgctgcattcaggccaggtgctgtggtttggagaccaagcctgaagtctcaccccttaacatggagtctgagcccaactcaccgcaaactcaggacaagggctgtcaaacccagcagcagccccatagcccacaaaatgagtccaggccaagcaaatgagagcagaagaagtcaaacaaagaagaagtccctggggccatgcctttcactttgtagggtgggggattactgagagtcaggctagacctgtgtttagagaagcagttttcacagtgactaccatttccacccaatgagaggctcctatttcccatcatagctccctaccctagggaggcctccatctggaaatgggaggatgaagaggctagaatcatctttcctagtgatcctgacatttagacagcacagaaataaagagcaataaaaagaaaaaaaaaaaaaaaa

SEQ ID NO: 291179 - DNA, 1000 bp, Homo Sapiens; identical to SEQ ID NO: 223506

SEQ ID NO: 291180 - DNA, 1000 bp, Homo Sapiens; identical to SEQ ID NO: 223507

SEQ ID NO: 291181 - DNA, 1000 bp, Homo Sapiens; identical to SEQ ID NO: 223507

SEQ ID NO: 291182 - DNA, 1000 bp, Homo Sapiens
tgagatcaatttagggattgtgaaatttttttttcaaatttcatacaatcatatttcccagtacttttcacaatcattttttacccatctaactctatgttttgtggcttcccggtctcttagaactttgaaaacatgatatacaataatgtttatttattatacatccagattctgaaataattttcctactgatgttcagctcacactatctgtacctttttagaagagaaaagaatcttgaattgtatatatttattttgctttacagaaaaaaatggtttcgtaaataatttgcctattttgggtaacatagcacatggagataatcatctgaaagttatagggcactgccactgctgaatcagagcatgcccaatatttgaggtggctctgatttcctggcagctgaactcgggtagtccagtggcctagctggtaccacatctattcccatccagagacattctctggcaagtgttctcagctgaaaagtggttggggatgattcttaccttggtaattaaatgaagctacacatttgggtaatctagcaaatgaagtattttttccctcttggcaacttgtgtcagagttactctggtctgagtcaactttcgctggggaaaacctatggaacctactgcaaaaagattgtccaaaatgcctaagaaaatactcctctgatgcatttagccttcaaccctacctgtcttgctgaagggagaaaaatgttttagtacattataggcccagcagcttttattcatgtccaccagctagttgcacagagaatcatgtgtacctaactaaggatgatctaggataagtaactcctgttttatattgagtattttagggaagtctttaaaagacttgttttatatctataaatctaggttattacaaatacaagaattttgtaccttaaataagcctcatttctatttcttcttcattaattctccatctagtcttgtgaaaaaaaaaaaaaaaaaaa

SEQ ID NO: 291183 - DNA, 1000 bp, Homo Sapiens; identical to SEQ ID NO: 118147

SEQ ID NO: 291184 - DNA, 1000 bp, Homo Sapiens; identical to SEQ ID NO: 118148

SEQ ID NO: 291185 - DNA, 1000 bp, Homo Sapiens; identical to SEQ ID NO: 223508

SEQ ID NO: 291186 - DNA, 1000 bp, Homo Sapiens; identical to SEQ ID NO: 118149

SEQ ID NO: 291187 - DNA, 1000 bp, Homo Sapiens; identical to SEQ ID NO: 223510

SEQ ID NO: 291188 - DNA, 1000 bp, Homo Sapiens; identical to SEQ ID NO: 118150

SEQ ID NO: 291189 - DNA, 1000 bp, Homo Sapiens; identical to SEQ ID NO: 223511

SEQ ID NO: 291190 - DNA, 1000 bp, Homo Sapiens; identical to SEQ ID NO: 223512

SEQ ID NO: 291191 - DNA, 1000 bp, Homo Sapiens
aggctttgatgggccacttccaggatgggctgtcctactctgttttcaagaccatcacagaccaggtcctaatgggtgtggaccccaggggagaatcagaggtcaaagctcagggctttaaggctgcccttgtaatagacgtcacggccaagctcacagctattgacaaccacccgatgaacagggtcctgggctttggcaccaagtacctgaaagagaacttctcgccatggatccagcagcacggtggatgggaaaaaatacttgggatatcacatgaagaagtagactgaaatatcagatttgtcatcaggaatactctttgtctactgtggtcctgtgcacgttggcctcagatggactacaggagattacaacgtacaaggcagatggagcattgacgttttcaaaaccattattcctgtgactggagaggcatcaggagaggtctcgttcgtctccagctcataaaatgtagcagcatcatccttgacagtgatgtttttcaggccctccattgagaacctgaggaaatctgtaaagataagtggtgatgttgtttcaaacgttcagaacagataccatcatcctgcctttgttagctgctgtagggaaagtgcgttacagatgtctgctgacctcacaagagtgaaaagataaactgtgcatgtgtttccacttccgtttctagtactatttatttttaaactacacttggggtggcctaatacctaggaagatgttgctattcacgttagtaaacagcctaaagaaactcttaggtttactgctacatccatttgtttggagaggtaactgttgtctgtgcctttttgaaaaacttccatttggtacaaaatttttactccaacaccccctcaacccttttctcagggaccacacctcttcttcccaaggtccctgggacttcctcattctttgtggtagtacaatgattggtagcaggtaaaataaatacatagaaagactactgtcaaaa

SEQ ID NO: 291192 - DNA, 1000 bp, Homo Sapiens
aagggctgaaattcagtgatacagatctcttagacttcgggcaatgtgttgatcagaatcgccagcaacagtttgctttcctttttggggtggatgagcaactgttgagtgctctggtgatgggagcaactggagcagtgggcagtacctataactacctgggaaaaaagacaaaccagatgttggaggcttttgaacaaaaggacttctctttagccctgaactatcagttttgtatccagagatttatcaactttgttgtcaaactaggttttggagtgtcacagaccaaagccatcatgactctggtctctgggattccaatgggcccaccccggcttccactgcagaaagcctccagggagtttactgatagtgctgaagctaaactgaagagcctggatttcctttctttcactgatttaaaggatggaaacttggaagctggtagctagtgcctctctatcaaatcagggtttgcaccttgagacataatctaccttaaatagtgcatttttttctcagggaattttagatgaacttgaataaactctcctagcaaatgaaatctcacaataagcattgaggtaccttttgtgagccttaaaaagtcttattttgtgaaggggcaaaaactctaggagtcacaactctcagtcattcatttcacagatttttttgtggagaaatttctgtttatatggatgaaatggaatcaagaggaaaattgtaattgattaattccatctgtctttaggagctctcattatctcggtctctggttcctaatcctattttaaagttgtctaattttaaaccactataatatgtcttcattttaataaatattcatttggaatctaggaaaactctgagctactgcatttaggcaggcactttaataccaaactgtaacatgtctcaactgtatacaactcaaaatacaccagctcatttggctgctcagtctaactctagaatggatgcttttgaattcatt

SEQ ID NO: 291193 - DNA, 1000 bp, Homo Sapiens
actcagctctgcaacagctcttgcgtgtacagcggagccctcaccccccgcatgctttgcgctggctacctggacggaagggctgatgcatgccagggagatagcgggggccccctagtgtgcccagatggggacacatggcgcctagtgggggtggtcagctgggggcgtgcgtgcgcagagcccaatcacccaggtgtctacgccaaggtagctgagtttctggactggatccatgacactgctcaggactccctcctctgagtcctgctgtttcctccagtctcactgcacaccactgcctcatgcttcctggggcctccagcagctccactaatggaggagaggcagtagcctccgacacagaacgcatggacctcctactactgtgtgtgaggaacagtcactacccactggccagccacccagccaacaggtctctcctcttgggccctgatttcagagtcctctttctcactagagactcaatgacagaagagaggctgggacttggttgggcatgctgtggttgctgagggatgagggggaggagagaggtaggagctggagatgaagagactgctagaagcagcaggaagcctgcccttctgccctctcccctccctgcccctgtgtgagtcttttagggagggtgactgggaggtgccccccgtcccacctttttcctgtgctctaggtgggctaagtgcctccctagaggactccatggctgagaggctcctgggcagatggggtcaaggctgggccagtcccagatgaagcctatgggagtcaggaccctctccactctccctctccactccccttcctgttctcacctggctgtggctggccctgtgtggggtgggtacactggaaaacaagaaggttggagttggtctaggacattggttttaaatgacagttctgtgaactggtccaaggaggttctgttattaaagtgatatatggtcttgaaaaaaaaaaaaaaaaaaaaaaa

SEQ ID NO: 291194 - DNA, 1000 bp, Homo Sapiens; identical to SEQ ID NO: 118151

SEQ ID NO: 291195 - DNA, 1000 bp, Homo Sapiens
aacaaagacactcataaaatatttggaaaagaacttaatggtaaccagttaatggaaaaaagagaaactgaaggcaaagacagcaaaaggaactactactctagaggtcaccgttctattccaggtgttgctatagatggagagaacaacatgaggcagtcaccccaaacagttttctccttgccagctaactgcgattggaaaccgcggtggcttagagctacatggggttcctctacagaacatgaaaaccgggggtcacctcctaaaggtaacctcaagggccagttcagaaagggcacagtcagaacccttcctccttcacaaggagattctcaatcacttgacattccaaacactgctgattctttgggagggctgtcctttgagccagggttggtcagaacctgtaataatcctgtttgtcctccaaatcacgtagtgtccctaacgaacaatctcattggtaggcgggttcccacagatcttcagatctaaacagcggttggcttttagacattatatatattatcagagaagtagcctagtggtcgtggggcacagaaaaaatagataggggcagctctaaagaccagctgttaagacagacaactgcaaactcatttaagcaagagaaaaacagctctaattcgagattgtgaagcaacacttctaaattcaaagacatagagttgtcaaatcaggattttttttttttaaaatgatatcctttcgaatgtaactgattttgggaaaatcacatgttcagaattgaggctaaatggtttgatcaggttttctctttgaagagaccacagccttaggaaatggttcttgatctatacaattccaccttggacactgggttaattctgtttgcccctggaacacaatcacgtaagtttccttctagactggcatcctgatgtgtcttgagtataatcacatgttgctacctagtaaataaaatcttaagaagatcaaaaaaaaaaaaaaaaaa

SEQ ID NO: 291196 - DNA, 1000 bp, Homo Sapiens
ctgcagcctctctgctctttgagaaagggcacaccatgcgctcggcaaccattcaaatgcaggaattaagcagcaatggctgcagtgtccttctcagttatggaggacatcgtctcattagggaacttttacagttcaaattaatttgcagaagttgccataaatgtttgcataatgacatagctttaagcactacatgattttaatctgctcacattataacaggaccaaatacacaagagcgtaatcaaatcatctgtaacttcttaattacagtttacctatttctgacatgcagcactgccatctcttccagcaccatcagggttttaatggccctctagaattaccactgagatacactatttgatccatggataaccggtaatgggaaaatgctccgaccctcaatgcagtaaatatttacttgcaggcaactgggttctcatctcttgatttgcttttgtaatcagcaataataaaatagcaggtagatggatgacagttgctcattctgagaaacttcactcttttcacttatgcatcacgaggaaataactaaaatacataccaagagaaaaataccttgccatcggatcatcaacaagtcttctatttacaaacttcaaaaaacacaaaacaacattcatgttttaaatgctttctacttgtggttcaagaagcactagatttagtaagaaactctacctatatacttagtttgaagttagtaacttcctgagatgctaaagacttacagcctgcgattatacaaggatttacacatgcttcctctggtgctttacttcccaaacctaaaaaagcaatgaaatagatgtaaggaaggagggatttaaaccttttaaaaaacttttgctgacttatattactgtaaagatttgtttgctcaatagtaatcattaaactacaaagtaattcaattttaaatggcaaaattgctttatttcagactaaataaattccttttcttgaagcctaa

SEQ ID NO: 291197 - DNA, 1000 bp, Homo Sapiens
gagctggttgctacattttcaggatttttacaagttggtaaacacagccattataaaaaattaaatgatttaaatttataattaagtaaattacattaaaacaaaaaaattatactcaaaattcattacttaattttactacctgttactattatctgtgcttttgaggctatttctacatagtaactcttatggagacctaggggagacaccgcgcatctcttcctgattccccactcaatgacatcatgttagtctttggttgcttaactggctgtggggagtgtttttgtatcacaaagattagagaggactacacatcagggcttgatttattgtttgttgattttctagacttcagaacatgctggataaaatgtcagtaatgcaaattaaactttaaagtatgtcttgtttgtagccaatacatggtgtatagcaccaaaaaatggagggattattcttccagtagttgaacactgtcatccgtttcagctgacagctgctcaaatcatttaagaaggagttctgacattcattttcattgttttacttttgtcttcctcactagtgtaaacaaaaatttcaaccagcattcatgccgaacctatacccattcttcagtgcctagctgtacagttatcagggatttttatttgtagtctaattttgtcaaatcatggccaaatcgcagtgatagttgactttggatacaaggtttggcaaaaaaaaaaatattaacaaaatattctgtaagaatcaattgtctatatggaatttaggataaagaatatttacaataaagaatatttacaataaagagtttattattatttgtaagttgtgtgcaacaaacataccctttatctctgtaaaatttatacacacaaaaattaacaaaagattctgtaagaattaattggctatatggaatttaggatagaatatttacaataaagagtatttacaataaagagtttgttattatttgtaaaaaaaa

SEQ ID NO: 291198 - DNA, 1000 bp, Homo Sapiens; identical to SEQ ID NO: 223514

SEQ ID NO: 291199 - DNA, 1000 bp, Homo Sapiens
cacatcttgttttcataaacactagagaggaacagcaatggataaaaaaacagatggtagggagagagagccactggatcggcctcacagactcagagcgtgaaaatgaatggaagtggctggatgggacatctccagactacaaaaattggaaagctggacagccggataactggggtcatggccatgggccaggagaagactgtgctgggttgatttatgctgggcagtggaacgatttccaatgtgaagacgtcaataacttcatttgcgaaaaagacagggagacagtactgtcatctgcattataacggactgtgatgggatcacatgagcaaattttcagctctcaaaggcaaaggacactcctttctaattgcatcaccttctcatcagattgaaaaaaaaaaagcactgaaaaccaattactgaaaaaaaattgacagctagtgttttttaccatccgtcattacccaaagacttgggaactaaaatgttccccagggtgatatgctgattttcattgtgcacatggactgaatcacatagattctcctccgtcagtaaccgtgcgattatacaaattatgtcttccaaagtatggaacactccaatcagaaaaaggttatcattggtcgttgagttatgggaagaacttaagcatatactgtgtaaacagtgccatacatttctaaaatcccaagtgtaggaaaaatatgcagacatacagatatataggccaactattagtaataatatgaaatatacttaaagagcttttaaaactttgtatttttgtacaaaatatttgtcttttacaatttttttcctttttttttttttgtcattttaccgacataatacatggagccaaagaaaacaataatggtactaataaaaactcctagggtttcctgtcagatttaattctacccagtggcaaagaattttttcaattgtggctttaaaaaaataattaaatatacatgtatatatatat

SEQ ID NO: 291200 - DNA, 1000 bp, Homo Sapiens
ttggagaggcctgatgcccgaatttcagtttggcacttacagcgaatctgagaggaaaaccgaggagtacgatactcaggccatgaagtacttgtcatacctgctgtaccctctctgtgtcgggggtgctgtctattcactcctgaatatcaaatataagagctggtactcctggttaatcaacagcttcgtcaacggggtctatgcctttggtttcctcttcatgctgccccagctctttgtgaactacaagttgaagtcagtggcacatctgccctggaaggccttcacctacaaggctttcaacaccttcattgatgacgtctttgccttcatcatcaccatgcccacgtctcaccggctggcctgcttccgggacgacgtggtgtttctggtctacctgtaccagcggtggctttatcctgtggataaacgcagagtgaacgagtttggggagtcctacgaggagaaggccacgcgggcgccccacacggactgaaggccgcccgggctgccgccagccaagtgcaacttgaattgtcaatgagtatttttggaagcatttggaggaattcctagacattgcgttttctgtgttgccaaaatcccttcggacatttctcagacatctcccaagttcccatcacgtcagatttggagctggtagcgcttacgatgcccccacgtgtgaacatctgtcttggtcacagagctgggtgctgccggtcaccttgagctgtggtggctcccggcacacgagtgtccggggttcggccatgtcctcacgcgggcaggggtgggagccctcacaggcaagggggctgttggatttccatttcaggtggttttctaagtgctccttatgtgaatttcaaacacgtatggaattcattccgcatggactctgggatcaaaggctctttcctcttttgtttgagagttggttgttttaaagcttaatgtatgtttctattttaaaataaaaaaaaaaaaaaaaaaa

SEQ ID NO: 291201 - DNA, 1000 bp, Homo Sapiens
gtgtgtttgggtacacaaccaatccaggctaccaggcttatgtgattttgatttctctcatttctttcttcatacccttcctggtaatactgtactcatttatgggcatactcaacacccttcggcacaatgccttgaggatccatagctaccctgaaggtatatgcctcagccaggccagcaaactgggtctcatgagtctgcagagacctttccagatgagcattgacatgggctttaaaacacgtgccttcaccactattttgattctctttgctgtcttcattgtctgctgggccccattcaccacttacagccttgtggcaacattcagtaagcacttttactatcagcacaacttttttgagattagcacctggctactgtggctctgctacctcaagtctgcattgaatccgctgatctactactggaggattaagaaattccatgatgcttgcctggacatgatgcctaagtccttcaagtttttgccgcagctccctggtcacacaaagcgacggatacgtcctagtgctgtctatgtgtgtggggaacatcggacggtggtgtgaatattggaactggctgacattttgggtgatgcttgttctttattgacattgaattctctttctcatagcctctccactttatttttttttatagggtttgtgtatgtatgtgtgtgagcagtgtaaagaaagaatggtaattatagttctgttaccaagaataaataataggaaagtgattacaaatattacctccagggttcaatagaaatcctcaatttagggtgaggagacttttttttggttttggggtttttccttgattgattttgttttcatagtgggaatcaggattgtgctttattgagcctgcagttacattgaattgtaggtgtttcgtgtgctgctaaggtatgcttatttgagtttatcaagacttttttttttctggaagacactgctgcttttaccatcacattggagcc

SEQ ID NO: 291202 - DNA, 1000 bp, Homo Sapiens
ttacaaagtctactttttgttcaaggatatgctgacccatatagtttactcttaaaattgtgtcaaggtatttctcactatactctaaaacaactagacttgaaaagaaaccatttgagatttgaatctaatggttaacgctattcagattttcccaaagatcttacctcatgaaagtagttctgggtcagaatgatctactcagttaaaaaacaacaacaacaaaaaactaagcgattgggaaaaaacaggaattttatctggttattgcatctggtgatagaggccttcaaagcctattatttctaacctaagtaaaggccccagtgaaaaacatactggggaaataaaacctctgagaaaaggttcaagcaccttttccaaatttaaatcttgccttaaattctctctaccacactgcctttgacactcttggaagtccatgtagttctctacagacagacttcaaagaaacgttaccttatcaaagactaatctgtgccacctctgattcagtgttttatgtctttcactttccctgggaaggagtaaagttcttttctacagctctgggactattacatttaattctgctcttgatagtcaaagaccatggacaacaactgtcatctgaaggactcttctagaagccagagactggtgtttgatggatgttttatactaaataaaacccatcagcatggggttatgtagaaaagcaatttattccattttaagcacttacacagttagtcatggagagtaacaggcctgctggtgaaacaggtcacccaaaatggagatggcatcaaactagtggtcaaggactaactcctaaaaaaaaaaagcaactcttatcaaggattaatttaatttttaaaacaaatacaagttattgattcactcttcccaacttgacagtctacctgtggtataactgtcaggtaaaaacatacatctttacaacttggtggtcccaagttaaaaaaaaaaaaaaaaa

SEQ ID NO: 291203 - DNA, 1000 bp, Homo Sapiens
atatattcttcaaacatccatctacgctaaaagtagccattatgtagccaattctgtagttacttcttttattctttcaggtgttgtttaactcagttttatttagaactctggatttttagagctttagaaatttgtaagctgagagaacaatgtttcacttaataggagggtgtcttagtccatattacattgttataacagagtatcacagactggataacttctaaccaatagtttatttgtttcataaatctaaaagctgagaagtccaagatggtggggctgcctctggtgagggtcttctcgaagcatcataatatgctggaaggcatcacaacatggtggaagggatcacgtggcaaaagagcatgtacatgggagtgagagaaaaagagagagagagacagagtggcgggggccggggaggagcgcaaactcatcctttataaagacaccactcctgagataacaatccaatcccatgataatgacattaatccattcaagaagatagagctctcgtgacttaatcaccttctaaagatctcacctgacaacactgttgcattggcagttaagtttccacgtaaactttcggggacacattcaaaccacaggagaaactcaaattgttcctgggcaaatcacaacatggggaattttattcataaatgtccacagaaacagtaaatgttctcgcttcagaacttaattcatctaatccctcctgtttgtctcaaattataggataactttgaaactttctgaattaacgttatttaaaaggaaatgtagatgttattttagtctctatcttcaggttattatcacttaaaaacctgcgaaagctgtcaacttttgtggttgtagcaagtattaataaatatttataaatcctctaatgtaagtctagctacctatccaatactaaataccccttaaagtattaaatgcactatctgctgtaaacggaaaaaaaaaaaaaaaaaaaaaaaaa

SEQ ID NO: 291204 - DNA, 1000 bp, Homo Sapiens
cttctttgacatttacgaagatggaatcttggacattgtagtgctaagtaaaggatatacaaagaatgattttgccattcatacactaaaaaataactttgaagcagatgcttattttgttaaagttattgttcttagtggtctgtgttctaatgactgtcctcgtaagataacaccctttggagtgaatcaacctggaccttatatcatgtatacaactgtagatgcaaatgggtatctgaaaaatggatcagctggccaactcagccaatccgcacatttagctctccaactaccatacaacgtgcttggtttaggtcggagcgcaaattttcttgaccatctctacgttggtattccccgtccatctggagaaaaatctatacgaaaacaagagtggactgcaatcattccaaattcccagctaattgtcattccataccctcacaatgtccctcgaagttggagtgccaaactgtatcttacaccaagtaatattgttctgcttactgctatagctctcatcggtgtctgtgttttcatcttggcaataattggcattttacattggcaggaaaagaaagcagatgatagagaaaaacgacaagaagcccaccggtttcattttgatgctatgtgacttgcctttaatattacataatggaatggctgttcacttgattagttgaaacacaaattctggcttgaaaaaataggggagattaaatattatttataaatgatgtatcccatggtaattattggaaagtattcaaataaatatggtttgaatatgtcacaaggtctttttttttaaagcactttgtatataaaaatttgggttctctattctgtagtgctgtacatttttgttcctttgtggaatgtgttgcatgtactccagtgtttgtgtatttataatcttatttgcatcatgatgatggaaaaagttgtgtaaataaaaataattaaaaaaaaaaaaaaaaaaaaaaaaaaaaaa

SEQ ID NO: 291205 - DNA, 1000 bp, Homo Sapiens; identical to SEQ ID NO: 223515

SEQ ID NO: 291206 - DNA, 1000 bp, Homo Sapiens
caccgccacccctgtgggcccccgagggggtggcagccacaccaagaccctcatagagcggagtgggcgttagctgaagacatgtctgtcccacctgtacctgacacagaagctggggagcctaggagagctggtggaagtgtgtctgaactcggagtgctctgggagcgggctccacagcctccttgtgggctccagccccttgtcagccgcagcctctcttgagggggactccctgtctcctgaggcccagctgggccaggactccatcctttcagatgcccctgcaggcctggggctccttctgggaagtatggggcctagggcttggtccccctcttctgaggccctctcctgtatcccgacctggaagctttgatgggtcatgggccatgccataccccctgtggcaatggagtgtgtggatgctcacctgtgccatctgtcctcctgtctgtgccaggaggcacctgagttctctgctgttatcctgccccaagggcctgggccgagcctctacctgaagcaactctgctcttcctgtcagtctcaaagcacaaggaggttcagcccaggaggaagccagctgcaatgtggagacacgtcctcctccccaacccacctcatgccaccgccaaccccctgccccaggagcgggcctgagccacgtcccctaggagcagctggagatggccaaaagagtgagctcaggactactggatcccatgcccaggtgtccagcagacctcaaggcagaagggtcacctaacccaggagtccacagactgatgtgacctcaggttcccacatcagtggccacagggcagggcccacctggtagaagtgttctggatatggccagggtgggtgtgtggctaagtgggcctgaacagagggaacctagggcccttggcaatgtgatttaaagctgccatcttgcggaaaaaaaaaaaaaaaaaaaaaaaaaaaaaaaaaaaaaaaaaaaaaaaaaaaaaaaaaa

SEQ ID NO: 291207 - DNA, 1000 bp, Homo Sapiens
ccgccgcatagttatagtgttgatgtgtgaacgctgacctgtcctgtgtgctaagagctatgcagcttagctgaggcgcctagattactagatgtgctgtatcacggggaatgaggtgggggtgcttattttttaatgaactaatcagagcctcttgagaaattgttactcattgaactggagcatcaagacatctcatggaagtggatacggagtgatttggtgtccatgcttttcactctgaggacatttaatcggagaacctcctggggaattctgtgggagacacttgggaacaaaacagacaccctgggaatgcagttgcaagcacagatgctgccaccagtgtctctgaccaccctggtgtgactgctgactgccagcgtggtacctcccatgctgcaggcctccatctaaatgagacaacaaagcacaatgttcactgtttacaaccaagacaactgcgtgggtccaaacactcctcttcctccaggtcatttgttttgcatttttaatgtctttattttttgtaatgaaaaagcacactaagctgcccctggaatcgggtgcagctgaataggcacccaaaagtccgtgactaaatttcgtttgtctttttgatagcaaattatgttaagagacagtgatggctagggctcaacaattttgtattcccatgtttgtgtgagacagagtttgttttcccttgaacttggttagaattgtgctactgtgaacgctgatcctgcatatggaagtcccacttcggtgacatttcctggccattcttgtttccattgtgtggatggtgggttgtgcccacttcctggagtgagacagctcctggtgtgtagaattcccggagcgtccgtggttcagagtaaacttgaagcagatctgtgcatgcttttcctctgcaacaattggctcgtttctcttttttgttctcttttgataggatcctgtttcctatgtgtgcaaaataaaaataaatttgggc

SEQ ID NO: 291208 - DNA, 1000 bp, Homo Sapiens; identical to SEQ ID NO: 223517

SEQ ID NO: 291209 - DNA, 1000 bp, Homo Sapiens
gaatgtgactgtctggatcaaacccagcggcctgcagacagatgtacagaagattttaagaaatgcaaggaaactacctgaaaaaacacagacattctataaggagctgaaccgtttgcgaaaggccgctctagcctttggtttcctggacctgctgaaaggggtggctgacatgctggaaagggaatgcacactgctgcctgagacagcccaccctgatgctgcattccagctgacccatgctgcccagcagctcaagctggccagtaccggcacctctgagtatgccgcttatgaccagaacatcacacctttgcacacggacttctctgggagcagcactgaaagaatttgaaactgacttttggagctttccttcttttttcatttcaactgaaaatgctttaggtaaaaacctttccagtatgttcacctctagaatagccacccaaagaccttcctgaggctgcctcagaagcaccacttgctgttttgaatgactctactagtatgagaaggatgtgaaggtggttggctggttgggctttaacttcctgggattcataatttttaagcttggaagatagctgctgttcccatgatgggcacatttcctgagaagcttgaatgactgatgagcatagagcacccctgccttcctcaggaaacctgaccggcaggggctctctggcttcctgaaagcttcacctcttccctcgtttatatctcaactgtaagggcattttcaagcttctgttcatggaatgagcaactcagactgtctggagcttgctgagtacaaacacaccaccactaagtttcagaactttccttaggacttgggcaaaatgtggtggtaactcttaagtgcttttggtatctcttgagattctaacttttaaagagcaaccattaatgtgtaaaatgattcctattattcaaggtttttttttaatgaaaataaaatatttgattttctagaaaaaaaaaaaaaaaaaaa

SEQ ID NO: 291210 - DNA, 1000 bp, Homo Sapiens
tgactcagaaggcccttctacttcagttttgaatccacaaagaattaaaaactggtaacaccacaggctttctgaccatccattcgttgggttttgcatttgacccaaccctctgcctacctgaggagctttctttggaaaccaggatggaaacttcttccctgccttaccttcctttcactccattcattgtcctctctgtgtgcaacctgagctgggaaaggcatttggatgcctctctgttggggcctggggctgcagaacacacctgcgtttcgctggccttcattaggtggccctagggagatggctttctgctttggatcactgttccctagcatgggtcttgggtctattggcatgtccatggccttcccaatcaagtctcttcaggccctcagtgaagtttggctaaaggttggtgtaaaaatcaagagaagcctggaagacaccatggatgccatggattagctgtgcaactgaccagctccaggtttgatcaaaccaaaagcaacatttgtcatgtggtctgaccatgtggagatgtttctggacttgctagagcctgcttagctgcatgttttgtagttacgatttttggaatccctctttgagtgctgaaagtgtaaggaagctttcttcttacaccttgggcttggatattgcccagagaagaaatttggcttttttttcttaatggacaagggacagttgctgttctcatgttccaagtctgagagcaacagaccctcatcatctgtgcctggaagagttcactgtcattgagcagcacagcctgagtgctggcctctgtcaacccttattccactgccttatttgacaaggggttacatgctgctcaccttactgccctgggattaaatcagttacaggccagagtctccttggagggcctggaactctgagtcctcctatgaacctctgtagcctaaatgaaattcttaaaatcaccgatggaaccaaaaaaaaaaaaaaaaaa

SEQ ID NO: 291211 - DNA, 1000 bp, Homo Sapiens; identical to SEQ ID NO: 118155

SEQ ID NO: 291212 - DNA, 1000 bp, Homo Sapiens; identical to SEQ ID NO: 223522

SEQ ID NO: 291213 - DNA, 1000 bp, Homo Sapiens
tgggcgcggggaccccgtgcaggccccgggcccctctggtgctgccagcgcgcggccgcaagacccgccacgacccgctggccaaatccaagatcgagcgagtgaacatgccgcccgcggtggaccctgcggagttcttcgtgctgatggagcgttaccagcactaccgccagaccgtgcgcgccctcaggatggagttcgtgtccgaggtgcagaggaaggtgcacgaggcccgagccggggttctggcggagcgcaaggccctgaaggacgccgccgagcaccgcgagctgatggcctggaaccaggcggagaaccggcggctgcacgagctgcggatagcgaggctgcggcaggaggagcgggagcaggagcagcggcaggcgttggagcaggcccgcaaggccgaagaggtgcaggcctgggcgcagcgcaaggagcgggaagtgctgcagctgcaggaagaggtgaaaaacttcatcacccgagagaacctggaggcacgggtggaagcagcattggactcccggaagaactacaactgggccatcaccagagaggggctggtggtcaggccacaacgcagggactcctaggggcccagtaaggacagtgcccgccagggaccatgtatgtatcatggcggaagagttggccctgacctggaataaagcagttggtgttgcttatgaggaaggttcagccttatccagcacagccttcacgttttgccctctgctgtcaccacttggtcagaaacttccaaacgcagtgccctgttctgccggtgtgtacagcctcagcgcaccaggagaccctagagtggtttccatctcacagagaatcagacagggccacagccccctcaggcagccaggtcatctgagtatcattaagagtagtgatgggaagattacagtctgagggccaaacgtgcctgcttcctgtttttgtaaataaagttttgttggaacacaaaaaaaaaaaaaaaaaaaaaaaa

SEQ ID NO: 291214 - DNA, 1000 bp, Homo Sapiens; identical to SEQ ID NO: 223523

SEQ ID NO: 291215 - DNA, 1000 bp, Homo Sapiens; identical to SEQ ID NO: 223524

SEQ ID NO: 291216 - DNA, 1000 bp, Homo Sapiens; identical to SEQ ID NO: 223525

SEQ ID NO: 291217 - DNA, 1000 bp, Homo Sapiens
aaactgggcacttttggaagcagcaacagtaacagcagcagcaaacttttcctctcatattttgggtgtatcaaaagttctagacttttgaagttatgatttcagtggcccactttatttctaaggaagagtgtctactttggaacgatactttgcacatagtaggaactcaagaaatacatttgaataattataattaactgtttagctatcttaatgagaatttgttgacaacaaaagatcatccatcgccttatgtgtgagtaagattggagcctctatcaagatttagtcaagttcagttagattgattctagaaacaaatatttatttctttcttttacggggatgtgaataaggcttttccttaaggccttcattctttaaacaaacaggttgaaatggtatgttgtaaaagagaagacgggagagaggtatttagatgataagtgtacttcacaaaaatgccaaagtttgaaaaataggtatgtttgttctaaatgtttaagtgcttctctgttaggttctggggcttgcaatcatttgaattgttctgtttcacaataaaggagattcactgggttctgcattttcaggattcaatagaactgctccattaaaaaaataatccttagcaagcattcgaatcctaactgctttgatgcacttgccctcgggcacctgtcatttccaatatggtaggtgtcaaagtcaaaagtatttactgggagaaaaaagagaggagtggttgtagaagtctccctaaatcagacatgtcaagcaatcagccaacgtggtgtatttctcattcaatattttagtgtgaattgagacactgagataaagacatcgtgcagagataaatggggatacagttaaatgtagcaactcttgagttcattttttcccactgtagcaaaattaatgctttctctttattgaaataaattgctcattcctccaaaaaaaaaaaaaaaaaaaaaaaaaaaaaaaaaaaagg

SEQ ID NO: 291218 - DNA, 1000 bp, Homo Sapiens
ctgcctgagcaggggccccaggatgtcccgctgctgtacctgaagggcatggtctacatggtgcaggccttgcgccagtccttccaggggcagggcgaccgccgcacctgggaccgcacccctgtctccatggccgcctccttcgaggatgggctgtacatgcagagcgtggtggatgccatcaagaggtcgagccgatccggggagtgggaggctgtggaggtgctgacggaggagcccgacaccaaccagaacctgtgtgaggcacttcagcggaacaacctatgagcctgcacctgggctccttgccacagggcagagggaccagggaggggaacaggagccagacatgacagggacttggccctagcagagacagtgtctttcatttgatgagtctgggtgaagccagaggtggctctgggacttcgccccctccagtggctcacctgctcctcagacttgcagggtggcaaatgttcctgttgccaggttaccacggtgtgcacagggcagagctgccgccaggcctcctcatggtgatgccagtgagtcggaccaggaaaggctcaccctggggagcccttcagcctgatccgcagtcctaacagggtgagaaagcacaagaggggccagctcggctgaggcctgaggagaaatgatgagaagttttgtttcgttcttgggctggggcatctcaggaacagtgagggcaacaagctgtccctcagggaccctcacctgccctcccatgtgaccaggcccttcccaggtggggactggggcttgctttattaagtgagctcttgggcttttgaagtaggacagagggccctggtttggcagagaggaggcaagggagggctttagaacatctgagaaatgttaataaataattcagaaaataaaaaaaaaaaaaaaaaaaaaaaaaaaaaaaaaaaaaaaaaaaaaaaaaaaaaaaaaaaaaaaaaaaaaaaaaaaaaaaaaaaaaaaaaaaaaa

SEQ ID NO: 291219 - DNA, 1000 bp, Homo Sapiens
tgaaaagaaacttaagtacctcggtgtttttattttttttttcttatggaaaaaaatataaaagatcacatatactgattttaaaggctcctcagtcatttggagcccttggattagcagcattaattaaatctcaagggtttcttgtaaagtccatttatgttaatcaaagttgaatataaaaatccaccattgcctgttagccagtcagttttagtcactgtgaaatatttcacattcagcctccatgcagtagagatttgagtttaatttcatgtccatgtgactttcatgtttcctatctcatagctcatgctactacataagccaaaacatgtatctcatcattggaagtaagatcagggctgatattcacctgggatagacagtattggtgaactactcatttactacagtgtctcagccttgataaagggcagtggattgcctgttgttcggtgttgtgaatagcacctctgaataagattagagtgtttcttaattcatttcaaactctaaaattagattaatggtggtgctaagaaagagtattaattactttgggaatggtcaaaattaacattaaaaacattttagacaaaaagtttcattgtacattcaaagaaaatgtaagtttggaagtactaaaagactattttatacttgttgattaatcggaatgtttgttgtatgccttcattttccatttcacttatatgtgcatgtccatatatgttaattttcattgtagcaaagctaatggaaataaagctaatgctctagttgaaagaaaaggaaaactcctgaaatcctagaatgtcttgttatttttagctgactgtaaaatattatgaacagtctttgtgtattgtgcttaatgcttttgtaagaaacagaatttgaaatatttcatccttgtcatgctcaaaattttgttacatgcttgttattcagagtataataaagttttgtacaggcctgaaaaaaaaaaaaaaaaaaa

SEQ ID NO: 291220 - DNA, 1000 bp, Homo Sapiens
gctccaggacaatgatgaaaacagggaattgcttggggagctggatggaatcgatgtgcttcttcagcagttatccgtgtttaaaagacacaatcccagcacggctgaggagcaggagatgatggagaatctgtttgattccctctgctcctgtctaatgcttagttccaatcgtgagcgcttcctgaagggcgagggtcttcagctgatgaatctcatgctcagggaaaagaagatctcccggagcagtgccctgaaagtgctggaccatgccatgattggccccgaaggcacagacaactgccataagtttgttgacattcttggcttacgaaccatctttcccctctttatgaaatctcccaggaagatcaagaaagtgggaaccactgagaaggaacatgaagagcatgtctgttcgatcctggcttccctcctgcggaacctgagagggcagcagcggacccggcttctgaataaattcactgaaaatgacagtgagaaggttgacagactaatggagttgcattttaaatatctgggtgcaatgcaggtggcggacaagaagattgaaggggaaaaacacgacatggtccggcgaggagagatcatcgacaatgacaccgaggaggagttctacctccggcgcctggatgcggggctctttgttctccagcacatctgctacatcatggccgagatctgcaatgccaatgtcccccagattcgccagagggttcaccagatcctaaacatgcgaggaagctccatcaaaattgtcaggcatatcatcaaggagtatgcagagaacatcggggacggccggagcccggagttccgggagaacgagcaaaagcgcatcctgggcttgctggagaacttctagaggcaccttggccctgcgcatcatggactctctcagcttccctcccaggatcagtttctacacaactctgtgtggcttttggacaaattaaagctagttttggtaaaaaaaaaa

SEQ ID NO: 291221 - DNA, 1000 bp, Homo Sapiens; identical to SEQ ID NO: 116611

SEQ ID NO: 291222 - DNA, 1000 bp, Homo Sapiens; identical to SEQ ID NO: 118159

SEQ ID NO: 291223 - DNA, 1000 bp, Homo Sapiens
caccctttaggatatagctgaagaatataatgaggaatagctggattctagaactgactcctcaccagtggtatattccacaacagtgtcacagtcgtctggcccctttggtttccgtgtcatcctttttggtgtgtaggacaaggagccagggaattggcacgtttggcttttacttcttttttatatgtaaataataagccatctaagtgtaaaagtggctcatatcttctccagccaaatcagctaggccatggccttgccttgcttctcatgagtgtgcttgacagtcatcaccgtcactctatcttcatttctggttcttaccgtgttagcttagttcattcaagctactatcacaagctacacataaattgggtggtttataaataacaaacatttctttcttacagttctggaggctggaaactccaagattaaggcagatttcatgcctattgagggcctgctttctgattatagaaggtgacttcttgctgtgcccacacatggtgaaagggactaccaactctctggagtctcttttatgagggcactaattccaattatgaagcctcttccctcatgacctaatcactgcccaaaggccccatgttctaatgccatcatcttggtggtttaggatttcaacatatgaattttggaaggacataagcattcaaccccctgcacatgtcttctttcctacttcctcaaggttctttctgtccagttgctccttcttctattgacccttttttgccttctctttctccttcactgcctcaagttacagccagaggaaaggaggaactaaaacttagcaaatctataatcacatgcaaatacacagaatggattgttacaaccaaaatgcaggctctattgttttcaatttagcagcctttcaaatgtatatggttctggccacattaaagttgcaaataacactttttttgagactgaaataaaggtgaaatattggaaaaaaaaaaaaaaa

SEQ ID NO: 291224 - DNA, 1000 bp, Homo Sapiens; identical to SEQ ID NO: 118160

SEQ ID NO: 291225 - DNA, 1000 bp, Homo Sapiens
ttgtttacttacaaagtgcattgtaggtaaacatgagccttgttccagtgttcgaagtacattggaacgtaagccctgtttccagagcaaagtaacagagaccaggtttttctagagagctaagtgggatgtgtagctcaaacaaactgtcctacccttttttattctcaaatgtttgttttgagtaaccgtagtgccaaaatttcagttcagtaatggggtgaacaatatggagagagacctgggaaaagtccagggtagcttgcccaggggaagacagcagccacatacctgggggcccgcctgcttcctgcccctctgggtgtgcctgatgcgggaggccctgccccagggcgatctcagctcactgcaacctttgcctcccaggctcaatcacttctgctgcctcagcctccctagtagctggaattacaggcatgagccaccacgcctggctaatttttgtatttttagtagagaccgggtttcaccatgttggccaggctggtctcgaactgttggcctcaagtgatccgcccgcctcagcctcccaaagtgctgggattacaggcgtcagccaccgcgcccggccctgtgccttgctttttctactcactaagatataaaacagctctttttccaaggcccggagtactggggattgatgtttcaaggccaatcaatgggatgcttcgttttctccagcaacaggaactctctcttttcacctttgctgccaggaatctcagagataatttagtgctcaatttactaaccttacttcacattcaggttagatgttacctccacctatatgatagtaattcctaattttattttttattgtcctttttatgagtgtttatattttaaagtactttgggtatttttggggggggtgtaaatgagtgatcagtgtacattgtgtgtggactgaagtgtaggtatgtagagatgcttcgccaaacagatgcttaaaaatgaaaaaaaaaaaaaaaaa

SEQ ID NO: 291226 - DNA, 972 bp, Homo Sapiens; identical to SEQ ID NO: 118161

SEQ ID NO: 291227 - DNA, 1000 bp, Homo Sapiens
cgagcgctgcccgcgggaggcgattcccagaggcggggaggtctcaggggtctgtcccgggccggccgcccgcctctgagactccccgcctcccacggtcagctgctgcggggcagtggccggtgattgaatcggtcattcctccgcaaccaggcctccatcaaaaccctgcatgagatgagggcctcgggcttcgggttggtgaaggcggggtgggggggcagttaggaagggggcgcccagacagggcatggaagcctcgcgtcctcccccgtaccttgcgggtcggtggttcatccatgtatttcaacgccttttcacagccggttcatatggtcccgacttctgtgtgcttagaaaattatggaacttggccgggtgcggtggctcccgcctgtaatcctagcactttgggaggccgaggcgggcggatcacacggtcaagagatcaagaccatcctggccaacatggcaaaacccccatctcgactaaaaatacaaaaaattaattgggcgtggtggcgtgcgcctgtaatctcagctacttgggagcctggggcaggagaatcacttgaacctgggaggcggaggttgcagtgagcggagatctgggcactgtactttagcctgggcgacagagagacccatctcaaaaaaaaaaattggaacctgagaagggggtcgtggggtccccggggcccaccgtctgcacttggcatctgaagtcggggtggtcttgtgggactgaccccttaccctgtgggttctgcactagctccgggcaattggtgacagaatcgagttaaattgtaggacatcgcgttggtgtctgagagggagttggagagctggttggtgtggagggaaaggcttacacacatgtgatttcagaagcgttctgtgggtagaggaatcgttttctctttgagactgttatgagtatgtacaaatgttatttcctgtaaaatattttcattttttaaaatgttattttctagat

SEQ ID NO: 291228 - DNA, 1000 bp, Homo Sapiens
ggggttgctgggtggccttcttattccctagcctttggtccatttcttatgatttcctttaaaggcaccaaatcttatctggaaataaattgttatggaggggctgtttttgagcaatactgcatattgaacaattctaaaagaccagtatctatgtatacttttaaaaaaaagatttgctaagatcaaaggatattcagaggtgcatctttttctgtaagagtgacattttaaacaaatgtaaggttttggggaataagaatcgtccacattcccacaggaaatcattgctatggtctcccctaggaatgtgatagatagcttctataattatgcagcattatccatagtatgaaacctgtagttttaatggtttagaaatctatgtctcatttcatatctaactcatgtttttgatacgaatcaatatatatgttgatatcatgagttaatatgagtttgacatgaatcatcaacatagtatatacatatcaacataactatgttgatgattcatatcaaattctcaatgcaggtcattactgtaagttttccatttttgttacaaataataagtaagatgatactttaaaatctctgttcttcacaaggtacctctttaattcatagccttttatgtcagcattattcttcttttgggggttggtcagcaactttgagtgccattgcaagcagcatcatttaagtagttttataaagaaaagaagtctgatatcttgggcagcttgctgcttactggggagaccagcatgcttagacacttattgccagggttaaacatatgctctggcaccaagttcaaatctttcctccccatttgtgagctgtgggactttaggcaagttatctaaatgctgctatgctatagtctccccacctgtaaaacagaggatgataccaataccttcctcatagggtacataagattaaataaatacaaacttgtaccaaaaaaaaaaaaaaaaaaaaaaaaaaaaaa

SEQ ID NO: 291229 - DNA, 1000 bp, Homo Sapiens; identical to SEQ ID NO: 118162

SEQ ID NO: 291230 - DNA, 1000 bp, Homo Sapiens
gaaactagctttcctagaattccattaataaatgctgctcccccatatagtcttcccttctgtataattaacataggttgtctcatggctttgatcttcaaaaggaagagccttttaaaaacatttgccaacctcaagaataaatactgaaagtcttgaaagtatggtcatttcagctattccagattgctgtctgtgatttctcacatttttatttgctgagaaacattcagaaaattattccaaaaatgaaggtacattttctgttctctcctaggttagagaggggtggcctggggtgcttcatgagaaatgtcttcctggatctgcggtggtcaggtttgcctctgcttttgttccctgcctttccgccacatcacacggcctcactgggcttcctaccagtttctcagaattacacgcacgaccatccaaacattggctccatgccagggctgtgactgcagcctgtgtaggaccatggggagttcagagtcatcatacaaggcagccaagaactgccataaacactacacagatggagggcatgggataggacaggagaggaggtgatgtacacttagaggtaactaaggctagtttgaaaaccgtgaattaagatattcttatcagtataaaaacactgagattgcttacctcccaaattgctttattgtattaactctcatgcttcagctcttggatttgttgtttctaactaacatgtcatgtacaccaaacattttataaatcaatcagtaaatattttgtaagacccaaaatcctggcatattgccaggtctgtggatttgcctgttgggtgttgggatgggatatcagaggaagaagcatacaagtgggaaaaactgtgattagaaagggaaaaataggcatttccacagtactattaagagaggcatgataatgccattttttttcttctgtacaactggtcagatttcaataaataatcattgatggtaaaaaaaaaaaaaaaaaa

SEQ ID NO: 291231 - DNA, 1000 bp, Homo Sapiens
aacactacgtgacgagctaacgccacgcaggcggcggggcgctggggaatcttcctccccagcccccgggctcgggagttatgcatccagagacctgcccttctaccttcctcgcctcccctcttcctcattccattgccccaggtcttttccttttggattttgttttggttttggctttgtttttgatttttttttattatgaatctcctggacgcagaggtgacagtgggagctggcctgggccaggacggcaggtggccctggagatgggaaagtgtctgtgtcgaggcgctgagctctctctctgtttctccttttttcctctactccttccccttcacacccccgtggctggaaggaacctcggcttccctgaaagcttgggggtcccacccttcttaccccacccgggaggaacgcccagggccccgggcttgtttctcctcttgttttccttttgggcagtttgatcactgatcgagtaaggaatgacctttagattgtgcgacttttgtttttgtttttttaaatttttttaaaccaagaatgatttctcctgcttccttctcctcaccatcttcccagacggagttcaaaggccacttctcaagcagcttttggcaccttcagcctcagagtggaatcttttaaagacaggacccctatgtccaggaaaggggaaaaggaactttgccaatgatagtgaccacagcaaaagcaaataataataatattaataataataaagagaaataaaataataaaataaaaaacaatagcacagcccttgttgaggtcagcagggaggaggggctgcccggagttgggtccttgcctggattttgacacagcaacttcctgtagtgagcactttgtatgaatcgtggacttcctgttctcaaggcgcaggtatttattctgtatctgtctagcgcacacaccaaaatccaaccttctaataaacatgatggcgcagtcccaaaaaaaaaaaaaaaaa

SEQ ID NO: 291232 - DNA, 1000 bp, Homo Sapiens; identical to SEQ ID NO: 223528

SEQ ID NO: 291233 - DNA, 1000 bp, Homo Sapiens; identical to SEQ ID NO: 118163

SEQ ID NO: 291234 - DNA, 1000 bp, Homo Sapiens
acgggcaatggcatctacatcaatgggcggggacacctggtctgacccaggcctgcctcccttccctaggcctggctccttctgttgacatgggagattttagctcatcttgggggcctccttaaacacccccatttcttgcggaagatgctccccatcccactgactgcttgacctttacctccaacccttctgttcatcgggagggctccaccaattgagtctctcccaccatgcatgcaggtcactgtgtgtgtgcatgtgtgcctgtgtgagtgttgactgactgtgtgtgtgtggaggggtgactgtccgtggaggggtgactgtgtccgtggtgtgtattatgctgtcatatcagagtcaagtgaactgtggtgtatgtgccacgggatttgagtggttgcgtgggcaacactgtcagggtttggcgtgtgtgtcatgtggctgtgtgtgacctctgcctgaaaaagcaggtattttctcagaccccagagcagtattaatgatgcagaggttggaggagagaggtggagactgtggctcagacccaggtgtgcgggcatagctggagctggaatctgcctccggtgtgagggaacctgtctcctaccacttcggagccatgggggcaagtgtgaagcagccagtccctgggtcagccagaggcttgaactgttacagaagccctctgccctctggtggcctctgggcctgctgcatgtacatattttctgtaaatatacatgcgccgggagcttcttgcaggaatactgctccgaatcacttttaatttttttcttttttttttcttgccctttccattagttgtattttttatttatttttatttttatttttttttagagatggagtctcactatgttgctcaggctggccttgaactcctgggctcaagcaatcctcctgcctcagcctccctagtagctgggactttaagtgtacaccactgtgcctgctttgaatcctttacgaagag

SEQ ID NO: 291235 - DNA, 1000 bp, Homo Sapiens
atacaggtcctttctgaaagatctgctactgaagtagacaacaattttagcaaaccacctccgtttttccctccaggagctcctcccactcaccttccacctcctccatttcttccacctcctccgactgtcagcactgctccacctctgattccaccaccgggttttcctcctccaccaggcgctccacctccatctcttataccaacaatagaaagtggacattcctctggttatgatagtcgttctgcacgtgcatttccatatggcaatgttgcctttccccatcttcctggttctgctccttcgtggcctagtcttgtggacaccagcaagcagtgggactattatgccagaagagagaaagaccgagatagagagagagacagagacagagagcgagaccgtgatcgggacagagaaagagaacgcaccagagagagagagagggagcgtgatcacagtcctacaccaagtgttttcaacagcgatgaagaacgatacagatacagggaatatgcagaaagaggttatgagcgtcacagagcaagtcgagaaaaagaagaacgacatagagaaagacgacacagggagaaagaggaaaccagacataagtcttctcgaagtaatagtagacgtcgccatgaaagtgaagaaggagatagtcacaggagacacaaacacaaaaaatctaaaagaagcaaagaaggaaaagaagcgggcagtgagcctgcccctgaacaggagagcaccgaagctacacctgcagaataggcatggttttggccttttgtgtatattagtaccagaagtagatactataaatcttgttatttttctggataatgtttaagaaatttaccttaaatcttgttctgtttgttagtatgaaaagttaactttttttccaaaataaaagagtgaatttttcatgttaagttaaaaatctttgtcttgtactatttcaaaaataaaaagacagcaatgactttatatccaa

SEQ ID NO: 291236 - DNA, 1000 bp, Homo Sapiens
agggcagctcctaggcctggactgagctctcaggggggaattagataaatattccaacatcctcatgcctggcccatttagtttcatcctttagttacccaggccagtagctttgggttatcccttcctgtagctccaaacccagcacttggagcagcaaaatagggcactgacaggagatgaaactctctcctatctcagaatttgccaacttctgggctgggctcctaggaggtagttttcttgaaggggactgcatcctagttgacctgaattttccagaccaggagggactgctgtgctctcccttctcgccatcatactgtttggctagattcattcagcagtagaagctgtttgatctgttgaccccagcatactgctgtttcttcaccagcttcattgtgtcacagtagcttcctttgggaggatgatgtgatagaacactcagagagagggagggagaagagagatagtgggtatgcttctctagctccccatcttccaggtccacctcttgacttcctgttcccctaaacctgagcacatcacgccaggcctctttgctgccaggacagcatcagctcactcctcagcaataatctagggtatgtgggaaggtcagggctgtggtaaggaatagaatcaaagaggggagtgatacggggtgggggcacttggccgcctgctaaacttggacattaattttatatcatgacccccttttaagccagtgagctgggcttcagtttttcccaggccatgcacatttaatttatttcagagaaactctaattgtattttcactgcagtatcttgtattttttatttgtgatttaagaaatgtgaagagaaaatacacagacacaataatggctaacattgtttctttcattccttgttctagagctaaccactctaaaattgtttggtaatgtcacttagtgtaattaattgtaacatattcttttaaataaattgatttattgatcaaacactt

SEQ ID NO: 291237 - DNA, 1000 bp, Homo Sapiens
aatatgtatgaagttcttaataataatgaagaaagcttaacctgtggaatcgaacaacacactggtgaaaatgtctcccgaagaaatggaaatctgacagctttttaagaaaggtgtaattaaaggttaatctgtgattgttatgaagtgaatttgaatatcatcagaatgtgtctgaaaaaacattgtcctcaaataatgttctttaaaggcaatctttttaaagatttcactaatttggaccaagaaattacttttcttgtatttaaacaaacaatggtagctcactaaaatgacctcagcacatgacgatttctattaacattttattgttgtagaagtattttacattttcatcccttctccaaaagccgaatgcactaatgacagttttaagtctatgaaaatgctttattttttcattggtgatgaaagtctgaaatgtgcatttgtcatccccactccatcaatccctgaccatgtaaggcttttttattttaaaaaaacagagttatcccaatacattatcctgtgatttaccttacctacaaaagtggctcctgtttgtttgatgatgattggttttatttttgaaatatttattaagggaaaactaagttactgaatgaaggaacctctttcttacaaaacaaaaaaaagggcagaaatcaccccaaggaacgatttctcaggttgagatgatcaccgtgaatccggcttcctctgagcattcgatggccttagcacctcatcaagccagcacatcctgcctgctgttgcagcctggctgggtttattcttcagttaccctaatcccatgatgcctggaaccttgattaccgttttacatcagctcttgtacttttcagtatattttcataatgagttatattgtcatttagactttgaacagctctgggaaatagaagactagggttgtttcttaaatttagctcatgttataataaaaagttgaaatgaaaaaaaaaaaaaaaaaaaa

SEQ ID NO: 291238 - DNA, 1000 bp, Homo Sapiens
ccccggcccctgtcacagtcagtcgtctcatttgtccagtttgtacagtgtgtcatttcagaaagtcatcattcttgggaagactttggaggtgcctattttttctgctgtaattgttctgggtagatggagtataaacatttgaatggaaaaaaattaacctagaataatatattcattttagtcaagtctgtgattatttatgtgaaatgagaaccattgtatcagatgttgataaaagcaattttaacttgcagatgtgagcccctgggcacaatgagccgctaaatgggagctcaattgacaggcatcaccaagtcttcaaggaggactgagttctcaggggagaactgggaatggggccagggtgcaaaaatgctttgcccatctgtaggtagacacacagatcgctcagggcactgagagatcccagaaggtaacgttaatgttttcagtcattgtgtgtcctttgttgctgccaatgtctttggactgtaatcagtgcatccacacctcccaggatccagtgctccctctcagctcagtctcccctctctccctgtcctgcattccatcccagctcctcagcatggcctcagtgggcgcacccatgcctcccgcagtccaggtgagcaggggagcaactgagcaggaagaggatggatcaacaagggtcacggggaataggggacccacggggtgtgacctgcttgctagagaactgtgaacatgtggctctggatagagtgactgctgctccatattagcttccagagggtgagtgagggacagaatatttccttcataatggtcatgggtgaatgctttctgctgtaagtgtcttttagagtaggaatcagcatagtgggatgcccagcaggcacaaaccatgggtccagggagtctcagcggggaacttctatcagtatcaataaccattggaaggagaaatgattcatgtgtgaaaaaattctcagatccatcaataaatttttttcag

SEQ ID NO: 291239 - DNA, 1000 bp, Homo Sapiens; identical to SEQ ID NO: 118166

SEQ ID NO: 291240 - DNA, 1000 bp, Homo Sapiens; identical to SEQ ID NO: 223530

SEQ ID NO: 291241 - DNA, 1000 bp, Homo Sapiens; identical to SEQ ID NO: 223531

SEQ ID NO: 291242 - DNA, 1000 bp, Homo Sapiens
tctgagggtggaagcggaggctgggggctcaggggccaggacccctccactgtcccggaggaaagctgtagacatgcggctgcggatggagttgggtgctccagaagagatggggcaggtgcccccacttgactctcgccccagctccccggccctctacttcacccacgatgccagcctggttcacaaatctccagaccccttcggagcagtagcagctcagaagttcagcctggcccactccatgttggccatcagtggtcacctagacagcgacgatgatagtggctccggaagcctggttggcattgacaacaaaatcgagcaagccatggacttggtgaagtcccacctcatgtttgcggtccgggaggaggtggaggtgctgaaggagcagatccgggaactggcggagcggaacgctgcgctggagcaggagaatgggctgctgcgcgccctggccagcccggagcagctggctcagctgccctcctcgggggtcccacggcttgggccccctgcgcccaatgggccctccgtctgagcctcccttcccttacaatgtgcctttggggctgcccggccttgcgtcagccgcctgccccctcttcctatgcagctttaatgtccccgtgtccccggggtgggagttcaaggctcagtaatggcctggtcccccggcccctgccccatctcctcatcatccccagccttgatggaggagggagggcttcaggacggggcgtcagagggagccccctctgggagggaaccaacccccaccctccctcctgggaccccccagcagtagacggcttgggggagtcggaggctccccggcagacaccccacccccatcttgttcccttgaggtgcctcctctcctctgcccaggggagggagtgtggacagtatctggaagttctgggattcaggttgttattaaaataataataataattaaaaactctgaagaaacttgaaaaaaaaaaaaaaaaaa

SEQ ID NO: 291243 - DNA, 1000 bp, Homo Sapiens; identical to SEQ ID NO: 118168

SEQ ID NO: 291244 - DNA, 1000 bp, Homo Sapiens; identical to SEQ ID NO: 223532

SEQ ID NO: 291245 - DNA, 1000 bp, Homo Sapiens
gaggccactaggcattcttcactgagtgctgctgacttcaacgttcactttatgcaccaaagtgaaagaattcagtgtatccgttattttaatgcactacaccacagaaatgttaagttggtcaagggcttaatttatggaatttctattatttcattggttgggatgctttgccaggtcatgtgcttattgtctcattttgtagtcttttaaagttgtatgaacccttaatttgaagaactaacttgatttctagagaaatatccacactatctcagtggtattttgcattggaaaaaggaagcactgtgtagcagtgaattgtctgctttccaccgagtactgtgtttattctctctccaggaaagcagatcaaaagaaagttagcagatcgagtgtcttcttccttagaaataggttctggtagcttctgtgcctgggtagtatcagaccagtgggagtaaaccgagtgttaagtgtcaaggtgagaaagcctcacattctctcaagacagttgctctaggagctgagttgctggtttggaagtgtggagattgcatttctggcttctctcaatggcttgtgttgaggactctgggtgctcctggccctaattgtgcaccctgatccccgtgcttggagctaggcctggtggcgtgctctagccctctcagttaccagctctttggagaaggatcaaaattcagatggaatgtgggatgggtaataggtgagagtagaaacccttccctccaggaggcccccgctgactcccacagaaacccacctaccataagatgtcttcaggtggccttgtccaaggatgggggtcaggcattttatatcaagggtgctctgaacatattttattttttaaaaaaactatgtttgtgaattttgcgtatactggcaagcttttgaaaatgtatttaattttgtattgtttaccaatgatttatttacaagatatttactcaaataaatggagctgcttacaaaa

SEQ ID NO: 291246 - DNA, 1000 bp, Homo Sapiens; identical to SEQ ID NO: 220430

SEQ ID NO: 291247 - DNA, 1000 bp, Homo Sapiens; identical to SEQ ID NO: 223533

SEQ ID NO: 291248 - DNA, 1000 bp, Homo Sapiens
ttctagatgatttctttgtcatctttttattgcttatctacatctctattatgtatcgagaagtgataacccaaaggctaactagatgaaaaagaaaacaaaactgagtttactaggatatctgagctaatgtagaacatcaaacagaaggacccatggcagtataaagcaatgaagcaatggagtattatctcacaaatataaaaccactataagacaaacatttgattatcatttgacaaatacctaggtataactggaattttcatgtttgaagttctaatattaagtttagaattataatgatctacagttgtatcttgattctatgttgtctggaaaaaatatggaattatataaaaagggatgcttttatatatttttcttttccccagaattacttagattaattagatgtatagtaaaatattgttaaatgtcagtttatccatcttatccttctcagcaggtacctatatgataatatatagctgtgaaactcatctaaatatttttgttccaataaaatattatatactattggggaaaattcagtatttcttttagtgctagctaagttttgtgcatttggagcagttctgccttttcattctggtataattaattatttgctatcagctgaaactgaaagaagaaacttgaacttcatacttcgatatcatattctagtttacagaacacattttaatcaatagaagaattaagatgaaaaacatggccgggcggggtggctcacgcctgtaatcctagcactttgggaggctgaggcgggtagatcacaaggtcaggagatcaggaccatcctggctaacatggtgaaaccccgtctctactaaaaatacaaaaaattagccaggcgtggtggcaggcgcctgtagtcccagctactcgggaggctgaggcagaagaatggcgtaaacccaggaggtggattgcgccactgcactccagcctgggcaacagagtgagactccctctc

SEQ ID NO: 291249 - DNA, 1000 bp, Homo Sapiens; identical to SEQ ID NO: 223534

SEQ ID NO: 291250 - DNA, 1000 bp, Homo Sapiens
ttgcgaacacttgcatacattcctactccaatctactttggagcagtcattgacaccacctgcatgctctggcaacaggaatgtggtgtgcagggttcttgctgggagtacaacgtgacgtcgtttcgttttgtgtattttggtttggctgccggcctcaaattcgttgggtttatttttatttttctggcctggtactccataaaatacaaggaggatggactgcagaggcggaggcagagagaatttcccctgagcaccgtgagtgagagagtgggacaccccgacaatgcccggactagatcttgcccagctttcagcacccagggagaattccacgaagagactggcctgcaaaaagggatccagtgcgcagcacagacctacccggggcccttcccagaagcaataagttcctctgcggacccggggctggaagagagccccgctgccttggagccgccctcctgaagcttgaaaatggaagaatttagttttgttggttgaattgaaaatggcgacttgagaaacaactgtgccttcttttctttctttcttttttttaacctctacagacacaatcctcaaaccaacaaaactcagtatacacagccgctattcattgagggctggatacctcaacaagactgagagcctttccccgcttctctccaagaaggagacgttcagctagatttgttcccatttccgttgtgttaattcaaagctcatgctcccctacggtacaggctgaggtacacggttagcaaaaccatgggaaggggaatggcggtgcatatcattaactaacactccaaacaaaggtgagcttgcccaggacttggcatttccaaatcaaagtttttagatatgaacacctactgtgagttctgctacaaagcacaaatgaatttgtctcaactatgcaatttgattggaaaaatgtatgtgcagcatgttacatttactttcacggaataaagcagatatgtttctgaaa

SEQ ID NO: 291251 - DNA, 1000 bp, Homo Sapiens; identical to SEQ ID NO: 118172

SEQ ID NO: 291252 - DNA, 1000 bp, Homo Sapiens; identical to SEQ ID NO: 118173

SEQ ID NO: 291253 - DNA, 1000 bp, Homo Sapiens
gacaacacagctgaaaggagtcataggggagaaggagaagaagatcatgaatcaccatcttcaggcagggtaccagcaccagacacctccattgaagaaactgaatcagatgccagtagtgatagtgaggatgtatctgcagttgttgcacagcactccttgacccaacagagacttttggtttctaatgcaaaccagacagtacccgatcgatcagatcgatcgggaactgatcgatcagtagcagggggtggaacagtgagtgtcagtgtcagatctagaaggcctgatggacagtgcacagtaactgaagtttaaataaaaatgtcttcagctccatgctcaaggttgaaagggttacctgtaaatttctgcccacataacattatactcatccctagtagtgcattttgggagttggggtgggaaggggtatgggaaggatagactcataattaaaatgtctaacatgtctctgttgagaaatttatttaatgtaaggaacttgggtgttaatagttgagagctgtttagtaataacccagttttcttgaggtctgtttactttatactttttaaaaacttctgtagttcttttggccagtgtgtttgtattatctgtgcattaatggtcctcatctgactcctgcattgtgtcttatttttctgcatggattggcataagaccattactaaaatttggcacctgtgagatgtttgatattatgaacaggaaacataatttaatgtatgaatagatgtgaatttgggatttcaaaatagatgaataacaactattttatagtaaagttattgaaatggaaatgaaaacagccagtaacttatgtttcagaatgtttgtaacacacttcatggtgttcccataggctttgctgtctagtcttatagtttgaggtttttttggtctgcatttttctttttgattacaaaatttataatttaataaatactagagtttatcaaaaaaaaaaaaaaaaag

SEQ ID NO: 291254 - DNA, 1000 bp, Homo Sapiens; identical to SEQ ID NO: 118174

SEQ ID NO: 291255 - DNA, 1000 bp, Homo Sapiens; identical to SEQ ID NO: 223536

SEQ ID NO: 291256 - DNA, 1000 bp, Homo Sapiens
tcgggccgcgagcggagccggctgagcgggcgccgagctcccgccatggcccggaacacgctgtcctcgcgcttccgccgggtggacatcgacgaatttgacgagaacaaatttgtggacgagcaggaggaggcggcggcggcggcggcggagccaggcccggacccgagcgaggtggacgggctcctgcggcaaggggacatgcttcgggcattccatgcagccttgcggaactctcccgtcaacaccaagaatcaagctgtgaaggagcgagcccagggcgtggtgctgaaagtgctcacaaacttcaagagcagtgagattgagcaggctgtgcagtcactggacagaaacggcgttgacttgttaatgaagtacatttataaaggctttgagaagcccacagaaaatagcagcgcagtgttactccagtggcacgaaaaggccttagcagtaggaggactaggctccattataagagttcttacagcaagaaagactgtttaaaaaaaataaaaagactcatgttaccttgagaagaattctggatgcccaggctggtgaagaagggattgacaatggaccatcttcctaggaactcccaagtaaactatttcaggacatgtatctgctgaaatgtattttattttcaaggtggaggggaaaatcgtctgtttcctaaatcctgtttaggatctgatagtctatgcctttgtctccgagtactgcagaactgacattttgacggtctaccagcgtggcggctggtgttggtcagatgcacctgtgtgcactgggggagggatggtttgggcaggtgcagatccaagggctgtggtaaacgggagagcttgtgtttttgaagtggaaaaaaacccaagagtttgtacagacatcctgtcttcccagagaaggtggacactcttgggctcattgtaaagtgcctgctgcatcaataaagctcttggcttattagtctatacaaaaaaaaaaaaaaaaa

SEQ ID NO: 291257 - DNA, 1000 bp, Homo Sapiens
tccacaacgacttcaaagcccttcagtactttcaccccaaatccctcacccgtgacacctcccatatcccccccctcaaccggaaggctgactgcccggagaatgccaccatgtctctgaagcatctcaccaagaagctgctaaaccgggatatccaggttgggaagagcggacattcctctgtggaagatgcccaggccaccatggagctatataagttggttgaagtcgagtgggaagagcacctagcccggaatccccctacagactagtggcaatggggacgctggtgatatgaggaggcagaggcagcacccaggagaaacagggcagtggaccaatggacagctccaccagctccacatctttggaagctagatttggggagagagaagctctaccccagacttaatacccattgaaatttcacctcaggtgttgtgtcctgtgtctggttaagtgtcccatggaaggggaaagccttcacgtcagaacccaaccctataccttttacttcttaaatggtgctaaccacaggtgtcccagggtgctctgtgccagttaagatttttaactttcaaggggcagggcatactgggaaatgtagtttcccaaactgccttatcacttgggtggacatatgtctccttttatgccttttggtcttgagtaattaacagcatcctcttccacgctcagaagtgttctggttggggccaggcatggtggctcacgcctgtagtcccaacacttagggaggccgaggcgggcggatcacctgagatcaggagttcaagaccagcctggccaacatggcgaattcccgttctctactaaaaatacaaaaaatgtgtggggtgtggtggcaggagcctgtaatcctagctactcaggaggctgaggcaggagaatcgcttgagcccaggaggcggagattgcagtgagccgagatcgtgtcactgcactccagcctgggtgacaagagtgagactccgtctcc

SEQ ID NO: 291258 - DNA, 1000 bp, Homo Sapiens
tggaaaccagggcagtggctatggcgggagtggcagctatgacagctataacaacggaggcggaggcggctttggcggtggtagtggaagcaattttggaggtggtggaagctacaatgattttgggaattacaacaatcagtcttcaaattttggacccatgaagggaggaaattttggaggcagaagctctggcccctatggcggtggaggccaatactttgcaaaaccacgaaaccaaggtggctatggcggttccagcagcagcagtagctatggcagtggcagaagattttaattaggaaacaaagcttagcaggagaggagagccagagaagtgacagggaagctacaggttacaacagatttgtgaactcagccaagcacagtggtggcagggcctagctgctacaaagaagacatgttttagacaaatactcatgtgtatgggcaaaaaactcgaggactgtatttgtgactaattgtataacaggttattttagtttctgttctgtggaaagtgtaaagcattccaacaaagggttttaatgtagatttttttttttgcaccccatgctgttgattgctaaatgtaacagtctgatcgtgacgctgaataaatgtcttttttttaatgtgctgtgtaaagttagtctactcttaagccatcttggtaaatttccccaacagtgtgaagttagaattccttcagggtgatgccaggttctatttggaatttatatacaacctgcttgggtggagaagccattgtcttcggaaaccttggtgtagttgaactgatagttactgttgtgacctgaagttcaccattaaaagggattacccaagcaaaatcatggaatggttataaaagtgattgttggcacatcctatgcaatatatctaaattgaataatggtaccagataaaattatagatgggaatgaagcttgtgtatccattatcatgtgtaatcaataaacgatttaattctcttgaa

SEQ ID NO: 291259 - DNA, 999 bp, Homo Sapiens
tttttttggcggtataaaagtgcttctttatttggtcatacagctttcaaatgttgcttaacgaacagatagcatttttataatcagaggaaagactcagtattaaagtgcgcgtcccatcattgcaaccgggccctcgggcagccagctctctcttgcttcgcgtccggctctcaggccctggagctcggcctccctaccttctccaggcgcgggtcctgctccttttccggccgcccttcctcagcccccggctcggacactctgcaggagaccaagagaagggggaaatggggctgggggccgtccccgggagacaggcggccttccgagagggactggagcaggccgtgcggtatgccaaagccctgggctgtcccaggatccacctgatggctggccgagtaccccagggagctgatcgaatagcagtcaaggctgagatggaggccgtttttctggagaacctgaggcatgcagctggggttttggctcaggaggacctcgtgggactgctggagcccatcaacacccgcatcactgacccccagtacttcctggacacgccccagcaggcggcagccatcttacagaaggtaggaagacccaacctccaattacaaatggacatattccactggcagatcatggatgggaacctgacaggaaacatccgggagttcctgcccattgttgggcatgtgcaggtggcacaggtcccaggccgaggggagcccagcagccccggagagctgaatttcccctatctgtttcaactgctggaagatgaaggctacaaaggcttcgtgggctgtgagtatcagcctcgaggagacacagtagagggcttgagttggctacgttcatactgggataggcggggccacccagaggctggccagtgagggcccgcacaccacccacgtgcctccagacagcgagtgacatcccatctcctcctctgcattaaagatgacctgctgaaaaaaaaaaaaaaaa

SEQ ID NO: 291260 - DNA, 399 bp, Homo Sapiens
gaaggtgctttagtctgaagatggcggcctcagcagcgcgaggtgctgcggcgctgcgtagaagtatcaatcagccggttgcttttgtgagaagaattccttggactgcggcgtcgagtcagctgaaagaacactttgcacagttcggccatgtcagaaggtgcattttaccttttgacaaggagactggctttcacagaggtttgggttgggttcagttttcttcagaagaaggacttcggaatgcactacaacaggaaaatcatattatagatggagtaaaggtccaggttcacactagaaggccaaaacttccgcaaacatctgatgatgaaaagaaagatttttgagactgcagcctattaataaagttaacataactgagaaaaaaaaaaaaaa

SEQ ID NO: 291261 - DNA, 1000 bp, Homo Sapiens
ctcggcagcttggatcctagcatgactatacattgtgacatggtcattacatatggattagaccaactggagaattgccagacttgtggtaccaattatatcatctcagtcttgaatttactcacgctgattgttgaacagataaatacgaaactgccatcatcatttgtagaaaaactgtttataccatcatctaaactactattcttgcgttatcataaagaaaaagaggttgttgctgtagcccatgctgtttatcaagcaatgctcagcttgaagaatattcctgttttggagactgcctataagttaatattgggagaaatgacttgtgccctaaacaacctcctgcacagtctgcaacttcctgaggcctgttctgaaataaaacatgaggcttttaagaatcatgtgttcaatgtagacaatgcaaaatttgtagttaaatttgacctcagtgccctgactacaactggaaatgccaaaaactcgagtctttaattgtaatgactttgttttatccacagttaagccttttctcattacatatttatgtatttcactgtcatgtcaacatgtctgcagaatcactgtatgtaacaaacagccatatttaagacatgcctggataaataaaattggtaggaatgttttcttgccattatatttaacgtttcttctttttccttgacaaatcttgataagtttttttatattagttttattttctagaaaacgtcttatgaatttctcccatttgctctagcatgcttatagaaaatgtcagtgtttcttacagctcaaatttgtatagttgttttaaaatgcggtctctttcttcccctggtacttttttctttctgtctactgaagttagttcttatacatggtcttatattttggctgtctttttttccctaggaacattcatacaggttgaatattccttatctgaaatacttgggactggaagtgtttttgattttggagtttggaatac

SEQ ID NO: 291262 - DNA, 1000 bp, Homo Sapiens
cccgctgtagtgtagcacagccactccccttcactgggggacctcagtgagttggtcagctctcttggccttacatgtggcagttgttttcttgtttgcaggtgcggccgggtgtgtggcaacattacttcatgatgcagccatgaaccctgcggaagtggtcaagcagaggatgcagatgtacaactcaccataccaccgggtgacagactgtgtacgggcagtgtggcaaaatgaaggggccggggccttttaccgcagctacaccacccagctgaccatgaacgttcctttccaagccattcacttcatgacctatgaattcctgcaggagcactttaacccccagagacggtacaacccaagctcccacgtcctctctggagcttgcgcaggagctgtagctgccgcagccacaaccccactggacgtttgcaaaacactgctcaacacccaggagtccttggctttgaactcacacattacaggacatatcacaggcatggctagtgccttcaggacggtatatcaagtaggtggggtgaccgcctatttccgaggggtgcaggccagagtaatttaccagatcccctccacagccatcgcatggtctgtgtatgagttcttcaaatacctaatcactaaaaggcaagaagagtggagggctggcaagtgaagtagcactgaacgaagccaggggttcagatgacactgctgcatcctggtcacattctctgtctcctggaatgctcccacctcaagtggagttagaaggaaggtagaggggctctcccccaggattttggtgttttgactaacaccagttcctgccaacctctgttgccaccacctttccttccaggccctaagcacgtgcagcaaagcacaccacagcacctttgataacctctctccatcctgggcctgatgacctgctctagactgttatagagggataagcagctcattcccctggttcctaataaaaagcctttaaatt

SEQ ID NO: 291263 - DNA, 1000 bp, Homo Sapiens
actggtgcttccgcagaaaggagatgccaattctgctatcacagaactccaccagcaactccacccgaccccagcagtggtgcaggacagctgccagcacccacctggccctcctccttttccacagccactcactggggccaccaaaacccagagatggcaggtgtgtgggacagactggaggatgaggacaaaccaaagcctttgttctttcttattgtggagcgtccccttccatcaagcagcctgccctcaagccaaggatcatcccctggaacccagtatgcacccagaggggactcagcttcaaagctgctccaccatgctgggtcccaggcagctttcctctgaaaagcaacctctcctgccacccagatcccatctcaagagctcgcccatgttacgagcatgtaaaggactgacttcctagtaactgttgcagtttacaacctgccctccagggacacgtctccatggtttttcctacacatgaatgcgagaaatggctgataagcacagtaatttaagattgcgtattcatgtagtgagatttagtcattaaccaacccggtctttgtgatgtgtgaagccttcccttcagttatgtcccatttttatgatgccaaaagctgccactgtgtggtattcgaggattattgcaacaaagccagtagttaaaccaaactacagtctcagcctgtcattctctagaacacatccaggtgtcggagctaaggtgttcagctcggctgtgactatacagaaccaggcctggcgttgcttccgcaccggtagcagttgtggatgtcagtgtgcataagcaagtatcagacctcagaatgtttgagttattttgtcttagatatctgtttttaaatggataatgtatttgtcctttaaacctcagttttgcaataaaaaaaaaaaaaaaaaaaaaaaaaaaaaaaaaaaaaaaaaaaaaaaaaaaaaaaaaaaaaaaaaaaaaaaaaaaaaaaaaaaa

SEQ ID NO: 291264 - DNA, 1000 bp, Homo Sapiens
tggactctacatttactatatgtgaagacatcaagagctcgaagtgtaaattacccgaacaagaatcactaccaaatgataacaaagacattttacaacggcttgatccttcttcattctcaactaagcattctatgcctgtaccaagcatggtgccatcctacatggcaatgactactgctgccaaaaggaaacggaaattaacaagttctacatcaaacagttcgttaactgcagacgtaaattctggatttgccaaacgtgttcgacaagataattcaagtgagaagcacttacaagaaaacaaaccaacaatggaacataaaagaaacatctgtaaaataaatccaagcatggttagaaaatttggaagaaatatttcaaaaggaaatctaagataaatcacttcaaaaccaagcaaaatgaagttgatcaaatctgcttttcaaagtttatccaataccctttcaaaaatatatttaaaatctttgaaagaagacccatcttaaagctaagtttacccaagtactttcagcaagcagaaaaatgaaactctttgttttcttcttttgtgttctaaaaaaataaaatttcaaaagaaaaggttgtcttttaagttttttaaatatttgttgccttttaaaatccctgagtgtaagttaccatggtggcagcttagttttactatgccacaacaagttgactaggacattttagtaaatggtagtgagttaaattatctttattattttttaaaaataagaatttagaagtggtaaaattatggcccaagatgtatttggttctctattatgttttgatacattattttaatcatatatatgactttccttttcaaaaatactttaatgtacaagtgtaaatatatgtgcccataaaatcattgtaaatattatttagtcatcacaaataaaatattgtcccttgctacttgatatattaaagatgtagattttaaagtgaaaaaaaaaaaaaaaaa

SEQ ID NO: 291265 - DNA, 1000 bp, Homo Sapiens
catactggagagaaaccatacaagtgtaataaatgtggcaaagcctttattgcatcctcaacccttagtagacatgagttcattcatatgggaaagaaacattacaaatgtgaagaatgtggcaaagccttcatttggtcctcagtcctaactagacataagagagttcatactggagagaagccctacaaatgtgaagaatgtggcaaagcctttaagtactcctctacccttagttcacataagagaagtcatactggagagaaaccctacaaatgtgaagaatgtggcaaagcctttgttgcatcctcaacccttagtaaacatgagatcattcatactggaaagaaaccctacaagtgtgaagaatgtggcaaagcttttaaccagtcctcatcccttactaaacataagaaaattcatactggagagaaaccctacaaatgtgaagaatgtggcaaagcttttaaccagtcctcttcccttactaaacataagaaaattcatactggagagaaaccctacaaatgtgaagaatgtggcaaagcttttaaccagtcctcaacccttattaaacataagaaaattcatactagagagaaaccctacaaatgtgaagaatgtggcaaagcttttcacctatccacacaccttactacacataagatacttcatactggagagaaaccttatagatgtagagaatgtggcaaagcttttaaccattctgcaaccctttcttcacataagaaaatccattctggagagaaaccatacgagtgtgataaatgtggcaaagcctttatttcaccctcaagccttagtagacatgagataattcatactggggagaaaccctagaagtgtgaagaatgtggcaaagccttcaagtggtcctcacaccttactatacactgagagttctgaacttactctgtaaccatcccaaactcctcccaggcacagtctggcagaggtcctgccatttcggagacctgga

SEQ ID NO: 291266 - DNA, 1000 bp, Homo Sapiens
gcacaccggctgcagatacgactgctgacgtgggatgtgaaggacacgctgctcaggctccgccaccccttaggggaggcctatgccaccaaggcccgggcccatgggctggaggtggagccctcagccctggaacaaggcttcaggcaggcatacagggctcagagccacagcttccccaactacggcctgagccacggcctaacctcccgccagtggtggctggatgtggtcctgcagaccttccacctggcgggtgtccaggatgctcaggctgtagcccccatcgctgaacagctttataaagacttcagccacccctgcacctggcaggtgttggatggggctgaggacaccctgagggagtgccgcacacggggtctgagactggcagtgatctccaactttgaccgacggctagagggcatcctggggggccttggcctgcgtgaacacttcgactttgtgctgacctccgaggctgctggctggcccaagccggacccccgcattttccaggaggccttgcggcttgctcatatggaaccagtagtggcagcccatgttggggataattacctctgcgattaccaggggcctcgggctgtgggcatgcacagcttcctggtggttggcccacaggcactggaccccgtggtcagggattctgtacctaaagaacacatcctcccctctctggcccatctcctgcctgcccttgactgcctagagggctcaactccagggctttgaggccagtgagggaagtggctgggccctaggccatggagaaaaccttaaacaaaccctggagacagggagccccttctttctccacagctctggacctttccccctctccctgcggcctttgtcacctactgtgataataaagcagtgagtgctgagctctcacccttcccccactaaccagaaaaaaaaaaaaaaaaaaaaaaaaaaaaaaaaaaaaaaaaaaaaaaaaaaaaaaaaaaaaaaaaaa

SEQ ID NO: 291267 - DNA, 1000 bp, Homo Sapiens; identical to SEQ ID NO: 118178

SEQ ID NO: 291268 - DNA, 1000 bp, Homo Sapiens
atcactgctcaagtcaagcctcctaaaaccacagacctgtttcagctgctacttcagccaaaattcttcagcttcatattgtcttgaaaacctatgattgtctctaacaaacaggctacttgctagttagaaattcttatcaatttggcaagctacttatcaaccagactgaccacaagaactgtcatctcatcaatgaaggagtaactgatcaatgaagccagcaatgcttttttcttggcatcatcaaagctgacatttagaagagatgctggtgatagtcatctcatcctactcaatttttcaaaggcagaaaccaaccctggagcaattgagaggactgtttaaacacagagcttaacaatggcagaattgtatatctcgtgcttaacagattttggttgaactttaccctaggtcaggggtcagcaaactactgcctgtgggccaaatttgcccaccacctgtatctgtaaataaggtttcattggaacacagctgtggccatatgtttgtatattgtgtgtggctgcttttgcattaggatgacagaggtgaatagttgcaacagagactggctggtctgcaaagcctaaaatatgtcctgtgtggccctttacagaaaaagttttctaacccctgctctaggttacggagaaaaaaaaatggaataatgttctctgctacttttaacctgattttctttgtacctaaataggcagctagaatgctgcctatattttaataaggatttggatctcacaagacaccttaggcctacacaagttgttcagattctttgccccagttctaatctagtgacaaaggcatagaattctcctcccacaggaatgtatttctattttcaaggtgttaattagttccagttttggttttgtcgttttccccatgtccgatgcttatattggatgatttctgataaacctgactattccaataaaccctaggcatttttgaatttaaaaaaaaaaaaaaaaaa

SEQ ID NO: 291269 - DNA, 1000 bp, Homo Sapiens
ccagagcctgtatcgtggcaccgtggcgcgtggcgctggagcgggcgttgtggtcaaggatgcagctgccccttctcagcctctgaggatccaggctcaggacccggagttctcggacctcaactcggccatcacatatcgaattaccaaccactcacacttccggatggagggagaggttgtgctgaccaccaccacactggcacaggcgggagccttctacgcagaggttgaggcccacaacacggtgacctctggcaccgcaaccacagtcattgagatacaagtttccgaacaggagcccccctccacaggtggcggcccctcggaggacaagcgcttctcggtggtggatatggcggccctgggcggggtgctgggtgcgctgctgctgctggctctccttggcctcgccgtccttgtccacaagcactatggcccccggctcaagtgctgctctggcaaagctccggagccccagccccaaggctttgacaaccaggcgttcctccctgaccacaaggccaactgggcgcccgtccccagccccacgcacgaccccaagcccgcggaggcaccgatgcccgcagagcccgcaccccccggccctgcctccccaggcggtgcccctgagccccccgcagcggcccgagctggcggaagccccacggcggtgaggtccatcctgaccaaggagcggcggccagagggcgggtacaaggctgtctggtttggcgaggacatcgggacggaggcagacgtggtcgttctcaacgcgcccaccctggacgtggatggcgccagtgactccggcagcggcgatgagggcgagggcgcggggaggggtgggggtccctacgatgcgcccggtggtgatgactcctacatctaagtggcccctccaccctctcccccagccgcacgggcactggaggtctcgctcccccagcctccgacccgaggcagaataaagcaaggctcccgaaaaaaaaaaaaaaaa

SEQ ID NO: 291270 - DNA, 1000 bp, Homo Sapiens
cagatattcagtctttggataactacagtactgcttcatctcattctggtggtccacctcagccttctgccttttctgagtcatttcccagttcagtagctggatatggagacatttacctcaatgctggtcccatgttgtttagtggagacaaggaccatagatttgaatatagccatggtcctattgcagtcctggcaaacagcagtgacccttccacggggccagagagtactcatcctttgccagcaaagatgcacaactataactatggtggtaacttacaggaaaatccgagtggccccagcctcatgcatggacagacctggacttctcctgcccaaggacctggatattcacaaggatacaggggacatattagcacatcaactggcagaggcagaggcagagggttaccatactgagtatctgtttttcctcaggcacatcatttttatctggaaagacttttctagctgcaatttaaggcagcaatccaagagacttgaataataataattcaacaacagctttatttttatgtggagaagggtcttgcatacaatagtttaaaaaagacaaaaaaaacctttgcttaaattcatgctgttctaaaaactagatcgattgtacatcttcacaaattctagttaacaattttattttgtattcttgcagttttaagtggatgctaattttaggggcataagccttttatggccctcttgcagatcttctgaactatgcacatttgtgctttttttgtaagtttggaccaacttttatgtaacaaacagcccctccccacctccagttttacaacaatcagaaagggcactgatttatttggtatttttctttttacaaagctacctttagtcaaaggtcactgtcagtctttgcacctgctttcagtgttattgtgaaaggtgtactttgtgctcatttcagaaaataaaacacaacctttctcttgatgcaacagttttataaaaaaaaa

SEQ ID NO: 291271 - DNA, 1000 bp, Homo Sapiens; identical to SEQ ID NO: 118180

SEQ ID NO: 291272 - DNA, 1000 bp, Homo Sapiens
ttctgcaaaagtaaaaactctcttagtaataatcatcatagggcaacaggatatagtatgtaactgcagtcttgagctgtctcttttcatgtattacctttcttgctcaacagctattcctgttttctgtaagatcctagtcagacagagccctcacaactggatagacctttctcaagggttagccctaaaatgtgacaagagaattggtttggctgaatcacaacaaataactagcaaagcttcagtgcttttgcaaactttttatgtaagcaaactttttgtgttatctggcacaggcctttgaaaagactataattctactttgtttaatgtagagtaactaatttttcaatttagaaagacagtgagaatccccaggataagcctctttatactcacttaaaccaactgggatggaattcagaatacctaagctgcttctttaacatagagatctttaaaaagggaaggtcaagcaaagaactgtaaccgaaagaagtaagagatttgaaaagacgatagagttaaaacaatatttaaaaaacatttctatttggtccatgcagttttatttgaaaatagtctgtcaaaatcagaactcctgaacaactttgaaagcagtaatattaactggtattcaaaaatgaataacagccaaaaatgaataacagccatttgatttatgtttccctcagtcatttggtttatgtttggttatggcaagatgttacagcatttatagttaatactactactaatatgtaaaccaaaagttaaatattctagttaaggattgtttctttaaacaactttcagattctgttgacattgtctttgtggtatttttatttcatgggttttaatttctcttaaagacttacctaaatattcagttacatttttaaaaaatctgtacgtgacagaatattaaaacatggaatatttttgcttcaaaaaaaaaaaaaaaaaaaaaaaaaaaaaaaaaaaaaaaaaaaaa

SEQ ID NO: 291273 - DNA, 1000 bp, Homo Sapiens
ccatcctggaggacagcgaggtgcccagcgaggtcaaagaggcctgcacctggggcagcctggccttgggtgtgcgctttgcccacaggcaggggcagttacaaaaccgcagggtgcagtggctgcaaggctttgccaaactgcacagatcagctgcgctggtcttggcctcaaacctgacggaactcaaggaacagcaggagatggaatgcaatgaggcgaccttccagttgcagctaaccgagaccagccttgcggaggtgcagagagagcgggacatgctgagatggaagctcttccatgccgagctggcacctccccagggacagggccaggctacagtgtttccaggcctggccactgccggaggggattggacagaaggagcaggtgagcaggaaaaggaggcggtggctgctgctggtgctgctggaggaaaaggagaggagaggtatgcagaggcagggcctgcccccgcagaggtcttgcaggggctgggaggaggcttcaggcagcccctcggagctattgtagcaggcaaattacacctttgcggggcagagggagaaagatctcaggtcagtacaaacagccatgtctgtcttctctgggcttgggtccacagtctcactggagcctcttcctgtccagctccctacctcattcacatactcatacccatgccctttgtccgccttctcagccatacccaatatacccccttcaccagcaaaggtcacagaacgggttccaactcagatgcctttcaactggggggcctctgatgctagcctgtggtcagatgtggaggcccagggaatagaccctcaagagcccccaagagacaggagagactccgaactccatcagcagagaagacctccagtatatcgcaggccagggaactgggactgcccgtggtgtaaagctgtgaatttttcatggagggaaaattgcttcctctggggaggcgaatacggctgcaaaagcctcagtaaat

SEQ ID NO: 291274 - DNA, 1000 bp, Homo Sapiens
gcacggcttcgccaaactgcacaaatcagccgcacaggccttggcatcagacctgaagaagctcagggagcagcaggagacggaacgcaaggaggcggcctcccggctaagaatggcccagaccagcctcgtggaggtgcagaaagagagagacaaggagctggtgtctccccatgagtgggagcagggggcagggtggccaggcctggccactgccggaggggtttgcacagaaggagcagctgaggaggaagaagaggcggcggtggctgctgctggtgctgctggaggaaaaggagcagaagaagagcagagggatgtggaggttgtggctgcccctgtggaggccatggctccccctgtggaggctggggctgcccccatggagacccagttcccccacgtggaggccagggctgcctccatggagaccacagagaagctggagagaatcctcctgcagctccttggagatgctgatcaggaaaagtacacctattgggggcagaaggagggagatctccggtcggtcgaaacagccacatcttatttctctggaaccacgaacccctggtccagagcctcatcagaacctcttcctgtccagctccctgcctcatactcatactcatactcaagccctttttcctccttctcagacatacccactatatcccctccacaagcaacagtcacagcaccagttccgcctcagctgccttccgactgggaggcctttgatactagcctgtggtctgatggggggccccacagaatagaccatcaggagcacccaagagacaggagatactccgaacctcatcagcaaagacctccagtatatcgcaggccaggggactgggactgcccttggtgtaacgctgtgaatttttcacggagggatacttgcttcgactgtgggaagggaatctggctgcaaaaacctcattgagtgcagaaatgcaaaatagaaccgaagcatgtataaaaaaaaaaaaaa

SEQ ID NO: 291275 - DNA, 1000 bp, Homo Sapiens
ctgttggtttggctgtcctggatataattgaaaatgaagaccttcaaggaaatgccaagagagtagggaattatctcactgagttactgaaaaaacagaaggctaaacacactttgataggagatattaggggcattggcctttttattggaattgatttagtgaaggaccatctgaaaaggacccctgccacagctgaagctcagcacatcatctacaagatgaaagaaaaacgagtgcttctcagtgccgatggacctcatagaaatgtacttaaaataaaaccacctatgtgcttcactgaagaagatgcaaagttcatggtggaccaacttgataggattctaacagttttagaagaagctatgggaaccaaaaccgaaagtgtgacctctgagaatactccatgcaaaacaaagatgctgaaagaagcccacatagaactgcttagggacagcaccactgactccaaagaaaatcccagcagaaagagaaatggaatgtgcacggatacacattcactgctcagtaagaggctcaagacatgactgatttgcattttaaagcaagatgcgatgtccagagttacagagaatgagtagatgtgtctcatcggttaatagctctattatacctctaaaggtggaattgtcagtttagattcataaatgaaaaggtaaatgagtaatcagaataaaccaagtgataatcaaaccatgtcaagattattagttcagactctagcctgttaattttcttagttgatttctgaagctacctgatttattctattaaattgtaagcttgcaaactcaaaataaattggcagatttacctctcatgttttaatgtgtcaaattagagagcaaagtataacaggtgccttcacttttgagacttagtgccttaaaatatgtattctataatgatttcatatataaaagtatatttattgactgtaataaaataaaatatgatgtaaacaaaaaaaaaaaaaaaa

SEQ ID NO: 291276 - DNA, 1000 bp, Homo Sapiens
ataaactctgcctttaaaaaaagataaatatttcctacgtctgttcactgaaataattaccaaccccttagcaataagcactccttgcagagaggttttattctctaaataccattcccttctcaaaggaaataaggttgcttttcttgtaggaactgtgtctttgagttactaattagtttatatgagaataattcttgcaataaatgaagaaggaataaaagaaataggaagccacaaatttgtatggatatttcatgatacacctactggttaaataattgacaaaaaccagcagccaaatattagaggtctcctgatggaagtgtacaataccacctacaaattatccatgccccaagtgttaaaactgaatccattcaagtctttctaactgaatacttgttttatagaaaatgcatggagaaaaggaatttgtttaaataacattatgggattgcaaccagcaaaacataaactgagaaaaagttctatagggcaaatcacctggcttctataacaaataaatgggaaaaaaatgaaataaaaagaagagagggaggaagaaagggagagagaagaaaagaaaaatgaagaaaagtaattagaatattttcaacataaagaaaagacgaatatttaaggtgacagatatcccaactacgctgatttgatctttacaaattatatgagtgtatgaatttgtcacatgtatcacccccaaaaaaagagaaaaagaaaaatagaagacatataaattaaatgagacgagacatgtcgaccaaaaggaatgtgtgggtcttgtttggatcctgactcaaattaagaaaaaataaaactacctacgaaatactaagaaaaatttgtatactaatattaagaaattgttgtgtgttttggatataagtgatagtttattgtagtgatgtttttataaaagcaaaaggatattcactttcagcgcttatactgaagtattagattaaagcttattaacgta

SEQ ID NO: 291277 - DNA, 1000 bp, Homo Sapiens
accaggccctcccggtgctacaggcccagcctctttccctggtcaccaagtctgcccactaagctccccccgacccctgcaggctgtcacatgactcattgagtagtaatgattcagaagaaaaagaaaaaggagactttattggtcaatatttgaccactctggactgttctgtaaagtggctggtaacaacagcactttacagtttgtagatgtaaccagtagctgatcttaaggcttttttaaaaaacaaaacaaaacaacaaaaaaaaatctttataagaaagagaactgaaaagtagcgtgctattcgtcctgtaggtgctgtggtggatggacctgggcagagggcacttctctctcttacctctcttgcactttctgtctcctgtctcttctcgcccctgccgcctgccccagcttccccgactccatctgcagctctgccattgtgacatttcctgttacccagcccaagttttcatcgtctgctcaataccgtgggttcttcttcgtcctctgtcctctgcccagtgtgaggccatcaccatgtgagaagacatcttggcctgatttgctgccaccagcgtcccctccctcagtgggcccgaactcgccagccccagctttcagtggagaaagcggtcctctgaaatggtttcctcccaacccccgcatttaaagggactcaaggtgcctgccacttcctcagcgaagaagtctgtgttcctccccgtccttgccagtggcgatcatcccttcacaatcccagagtggcaggcgggaccagccccatggtctggctcctgtcacctgggtccgtgccagcacaatctgccaaagttctagagaccctgttcccttccccatcacctcacatgcttcttctgtgtgtatttctttttgtttttatggtttttggagcaatttaaactcccagttgtttattttcacaaaagaaaataaaattgcagttgcaagaaaaaaaaaaaaaaaaaaa

SEQ ID NO: 291278 - DNA, 1000 bp, Homo Sapiens
ctattcggaagtacaccctcactattaggaagattcttaggggtaatttttctgaggaaggagaactagccaacttaagaattacaggaagaaagtggtttggaagacagccaaagaaataaaagcagattaaactgtatcaggtacattccagcctgttggcaactccataaaaacatttcagattttaatccgaatttagctaatgagactggatttttgttttttatgttgtgtgtcacagagctaaaaactcagttcccaaatccccagtttatgcagcgccatcaggtattttaagctaaacttcttcacccctgagagcatgtcagctggagaaaagcagttcttccttgcccacttgagaagtgcacgcccactcacccaacatcctggtctctaggaaagcctcatgtgaggttcctctttctttcagctcagtgcccatgggcaaggatcatgatttccattccgtgttacaatgacaatatttaatgagcataaccttctcagtctcctgctctcaaatttaggacagagccgctaaggacaaaacaatccctcccgtgctttatgatggcagcaggggctggggagcctctgagggactctttcattctgcagttgtctggaagcctgggtggcgtcatgagctgaaggatcatgctttcctgtcctggctccataggttataggctggctggtgaaaggttcacgtggcccaggctgaacttcattgcctagctttggatgtgctttctgccataaagactgatttttgttcgttctgagccttcaaggaatttgttttttacaactggaatatgctcctgtgtgtgttaacagatcatggatgttttatgttttcactgatcatttaaagagtttgacctcagagctccaggatcatcagtaaatttgtcatgttatatatttatttttttataaatcaagacttctgtgtgctcttaaatatattaaaaacaatttacatttcagg

SEQ ID NO: 291279 - DNA, 1000 bp, Homo Sapiens
tgacaaataataggattatctccacattttctgttgctggaggaacaaaacattgtgcccatttgaaaattttaatttttgttggtttaactatcccacattataaatcatccttcaccattttatatcagttaaatatgggtgtgttggggaggaatgactggcatgtagacatgtattgatttaggaagatctgagcatttctttcattgttggtaagatataatgatgaaatttaaaaagcagtatggagcattatatatcagtaatgtgatatatatacttaagccagtttaaccattttgggaaatgttagcattaggaaataaaatccaaaagaaggaagagaagctatatgcaatgcaaaatttgcttattgcaatattttcatatacagacactaaaaacagttttcaaagtccagcattacgtaactaaagtaagtaaaatgatgtgtatcaacttgatggtaaaatatgtagttatttaaaaaagcaatgaacaatttagtttcatgagaaaatgttgccccctaaaagtagaacacatatgttacaactgcaataatactctgaattcatctttcacaaataagagacatgttagcatagtgattaaaagcacagatattggagacaaactaacccagtttgaaccctggcactgccacgtatagcactgcagccttgggaaagttatttaaactcatgggcttcagtttcaacatctgtaaaatgggcatgttaacattgcctacctcataggattactgtgagaattttctaagttaatatatgtaaagcaactttaaaaagtgcctggcacttagttattgttaagtaagtgtctgcagatgcaagtttggaagagaaaagcaaataaatgaaaatcccttcctgttaagatgatggggtatttggatttttttttaatactaaaaagttttttttgttatatgttttggcaataaataattctcaatacaaaaaaaaaaaaaaaa

SEQ ID NO: 291280 - DNA, 1000 bp, Homo Sapiens
ttttgagtatggcctgaaacagcaggagaagcggaaaacagagcttgacaccttcagtgaatgtgtccgtgaggccatccaggaaaaccaggagcagggcaaacgcaagattgccaaattcgaggagaagcacttgtcgagtttaagtgccattcgagaggagttggaactgcccaacattgagaagatgatcctagaatgcagtgctgacatcagtgagttgttcgatgcgctcatgacgctggagatgcagctggtggagcagctggaggagactataaacatgtttgaaaggaacattgttgacatggtaggactgtttatcgaaaatgtccaaagcctgatggctcagtgccgggacctggagaatcaccaccacgagaagctcctggagatctctatcagcaccctggagaagattgtcgagggcgacctggacgaggacctgcctaacgacctgcgcgcgctttttgtcgataaagatacgattgttaatgctgtcggggcatcgcacgacatccacctcctgaagattgacaatcgagaagatgagctggtgaccagaatcaactcttggtgtacacgtttaatagacaggattcacaaggatgagatcatgaggaaccgcaagcgcgtgaaggagatcaatcagtacatcgaccacatgcagagcgaactggacaacctggaatgtggcgacatcctagactagatgaatgtcagccacaggagcttcttcaaaacatagcaccagccccagccaggagaaggaagtgcacacgcctcacccgcacctctagagagttgctgggcatctctcaaccgcgatccccaacaccattcttcccccacccctggaaaaacttccaaaagtagagaaaataaaggactcatttcacaaaaaaaaaaaaaaaaaaaaaaaaaaaaaaaaaaaaaaaaaaaaaaaaaaaaaaaaaaaaaaaaaaaaaaaaaaaaaaaaaaaaaaaaaaaaaaaaaaaaa

SEQ ID NO: 291281 - DNA, 1000 bp, Homo Sapiens
tgtaatctaatctagtttaagatttttgtttaatcatcatggtggtcctacctggataatttaactataaagacaaagtaattctattaaatgaactaactgaaaataataattataggaagtgattattccattttaagtattagagctcaaattggctttatttgcatttagggagatcatgttttcttaatcatgctggaatttaaaaattgttttacttgtatcgaaattaaccttgatttataactatttttgtaataaaacaatgacagctgtagtaactatgatgggtgtaacaacatttttttaaagaagggaatctgtttatcgcttttcaaaatattttctaaagtgggggaagaaagtttatagactttccaagcacatttatggttttttattactattattatggttttaaaaagagtaactttatttctttttgtaaggaattaagtaatatcctttacagttctgtgaaaggacttattttttaactgtaatatttattagttttaaaatatttgtatctcatttgtaacaatttgttttaattttttatatatatgtttttatttttaaaaaacataccagttgaatggggttaaagctttcaatatcttaaaatatttataaaacatttcactgttgcaaaatcacttccaaaatgatagctatctaacaactaattactaatttttaaagaacaaatcacacatttaaaaaatctgtagaatttattttaactatgacctttaattgaaaataaataattaaaatatcagacatgttttggaaaagtcttaatttgagaacaccaaaggaaactaccccagaatctaatgtagttcgctattaataacaatgcattattgaaagtatattgcaaatacatgtttcctcatgaaatctaagtaattttgttgtggaatagtgtcactgttacatttcccccaagaagttcaataaaccagcttagccacaaagaaaaaaaaaa

SEQ ID NO: 291282 - DNA, 692 bp, Homo Sapiens
cccgagacctcccggcagtcttccgagcaagatggcgccgcgggcatttcttccactgcccgtctgagggaacgctaagtagtgtgtccggcgccgtgttccagctccgcgttgttccgcgagaaagcgagaggccgagcccgggctggtgcgatggccgcggtggtggccaagcgggaagggccgccgttcatcagcgaggcggccgtgcggggcaacgccgccgtcctggattattgccggacctcggtgtcagcgctgtcgggggccacggccggcatcctcggcctcaccggcctctacggcttcatcttctacctgctcgcctccgtcctgctctccctgctcctcattctcaaggcgggaaggaggtggaacaaatatttcaaatcacggagacctctctttacaggaggcctcatcgggggcctcttcacctacgtcctgttctggacgttcctctacggcatggtgcacgtctactgaaatgggggcccgggggacttttttaaaaaaccagatcgggaggactgtggccagcaattaacaccatgtagacttccttagttcttaagtggttgaattcgctgcttgttctgtaacgttataaataatttatatctgaagacggagagcctgtaatattcttcagattaaatgaagcgtgagacacttaaaaaaaaaaaaaaaaa

SEQ ID NO: 291283 - DNA, 1000 bp, Homo Sapiens
gtggccactgaatgtaaaacaaccttctttaacatttctgcatccaccattgtcagcaaatggagaggggattcagaaaaactcgttcgggtgttatttgagcttgcccgctaccacgccccatccacgatcttcctggacgagctggagtcggtgatgagtcagagaggcacagcttctgggggagaacatgaaggaagcctgcggatgaagacagagttactggtgcagatggatgggctggcacgctcagaagatctcgtatttgtcttagcagcttctaacctgccgtgggagctggactgtgccatgttacgccgcctggagaagaggattctggtcgatctccccagccgggaggccaggcaggccatgatctaccactggctgcctcctgtgagcaagagcagggccttggagctgcacacagagctggagtacagtgtgctgagccaggagactgagggctactcaggctcagatattaagctcgtctgcagggaagcagccatgcggcccgtgaggaagatctttgatgcacttgaaaatcaccagtcagaaagcagcgacttacccaggatccagttggatatagtaaccactgccgactttctggatgtgctaactcacaccaagccctccgcaaagaatctggctcagagatactcagactggcaaagagagttcgagtctgtctgaaaccacatttaccctgacctggccacaaaggcaaccacaaagacctcctagtttattaatgtccgtgggagaacaaaatgattggaatggaaaagagaaaattatttttgaagactggattaacttgagccactgtattgttttggatagctgagatatatttattaacttaccattatcgatgtcagcaaaatattgagagtttcagttacatacatatatgtgctattgggtcatacaatggagatttttctgacaattagactccataaaattttaatgaacaaaaaaaaaaaaaaaa

SEQ ID NO: 291284 - DNA, 1000 bp, Homo Sapiens
ctcttccgccacgaggtcggctacgtcctgggacagctgcagcacgaggcggcggtgccccagctggcggccgccctggcccgatgcaccgagaaccccatggtgcggcacgagtgcgcggaggccctgggcgccattgcccggcccgcctgcctggccgcgctgcaggctcacgcggacgacccagagcgcgtggtgcgtgagagctgcgaggtggctctggacatgtatgagcacgagaccgggcgggccttccagtacgcggacggcctggagcagctgcgcggggccccctcctagggccccaccctcacccggagctcccggaggactcttgagggccgctcctcccccgcagagctttggcgtctaaaccgggtgtgtgtaaatcggtgtcatcgcttgtgtcttgctgggcgcacggttgctgtccccctcctccgtctgggaccgaggagctgccgttgtgctgtgactccctgagtcccctgactgctcctcggggcctggcgcagggctgtagcgtggaagtttccaggcttggggtgggactctgcgggaggctctgggatgcccggctcaggacaggggaggattgcgagggaagccaggggaggatcgcgagggaagccaggggaggatcgcgagggaagccaggggaggatcgcgagggaagccaggggaggatcgcgagggaagccaagggaggatcgcgaggggagccaggggaggatcgcgagggaagccaggggcagagctggggctctgggaagaggctgacgttatggtggcttcagcttcactaggaatgggacacagggtctgggggcctctgactcccccaccccgaggcctgggtagggacagggtggtggtccctgggtgggtcaggtagggcacaggggccagggagggacaagcagacctcagagcgctgcccagatggaatattaaattatttttgccaaaacaaaaaaaaaaaaaaaaaaaaaaaaaaaaa

SEQ ID NO: 291285 - DNA, 1000 bp, Homo Sapiens
agaataccagcagtgaaatggtattactgtttccctctgagtgaaactgctagagtatatgtcacgtagtgacatttttttctcactcaggctattgccatctgggattctctccctactacagctggcaaagttggtttgcagcaagaagatagtgggagggggccaggctgcaggagaaggagaaaagtttagaagaaacaaaccattttgcttctaattttgacagtatcactttcctgttaaaacatacaataattttaaaaggtgaatgcctaaagttccaattttagcaaatatgggaacctcagcaatgctaattttctagaaaaacccagggctctttggagctagagttttgggagaacagttcttcacaataaggcaatggttttgagaggccaggcaaataatctttctcaccgtagaacaaaaagttacaaaaggcataatcggaaatagagactacatacttgagtttatggggtttgtgttgtttgaaggttcaatgcttgcatgtgtttatttattttcaagagggaaagtggtctgtactgctttcatccttgccactgtcttgcttttattttttactctcccactgagcaagcgtctgtggtcctatggtatcaaccagtatctttatagcaataatttctttaattcccttttctctctctttccaattatttaaccagttacttccacctggacatacgataggaaattcaaactcaaaatatgaaaattgatcttaataactctcccttcatatcttttcacctatttccagtccttatcatagttgataaaaacctcagactcatccagaaagctatatgatgcactagtaaaaaaaacaaagatatttaaactgcttgggttcaaatggtatacaatttgccagctgttactgaaccttctatgcataactttttttttcctctgtgcaattggaataataaaaatactactcccataaaaaaaaaaaaaaaaaaac

SEQ ID NO: 291286 - DNA, 1000 bp, Homo Sapiens
ctttatgtaagacccaagcttcctttatgtaaaaataggatactcactaggctttggggctgacaatggtttttaaatcttgctaatcttccctggaatgaaaccagcatgactcaaagagaaaaagagagtctataatattttctaatccctgagttcttttctttatatattaaaaaggattattaggctgggtgtggtggctcacgcctgtaatcccagcactttgggaggccgaggggagtggatcacctgagttcgagaccagcctaaccaacatggagaaaccctgtctctactaaaaatacaaaattagccaggcgtggtggcgcatgcctgtaatcccagctactcaggaggctacagcaggagaattgcttgaactcgggaggcagagccaagatcgcaccactgcactccagcctgggcaacaagagtgaaactctgtctcaaaataatattaatgataataataataataataatagggattacttgcataattgttcttttaaaattattggcagtattgctgaatgtatttagattttttcaccaagtgacaacaactgaattcataaagattcatcaacaagacctgataaaaaaaaatgtaagcatattatagtggatacttccaagactcttggtctaacatgtattagaaagcagaaggagcccaggcacaggggctcccgccggtaatcccaaagctttgggaagccaaggcaggtggatcgcttgagctcaggagttagagaccagcctgggcaacatggtgaaatcccgtcaccacaaaaaaatgcaaaaattaactgggcgtggtggcatgcacctgtagtcccagctactctggaggctgaggtgaggggaatcacctgagccgggggaatcacctgagcccagggaagttgaggctgctgtgagccatggtcatgacactgccctccagcctggacaacagattgagaccctgtctcaaaaaaaaaaaaaaaaaaaa

SEQ ID NO: 291287 - DNA, 1000 bp, Homo Sapiens
ggggagatggcaagaacctttccagttatgtcagtttgaagtgactggccaggcattcctttatcatcaagtccgatgtatgatggctatcctctttctgattggccaaggaatggagaagccagagattattgatgagctgctgaatatagagaaaaatccccaaaagcctcaatatagtatggctgtagaatttcctctagtcttatatgactgtaagtttgaaaatgtcaagtggatctatgaccaggaggctcaggagttcaatattacccacctacaacaactgtgggctaatcatgctgtcaaaactcacatgttgtatagtatgctacaaggactggacactgttccagtaccctgtggaataggaccaaagatggatggaatgacagaatggggaaatgttaagccctctgtcataaagcagaccagtgcctttgtagaaggagtgaagatgcgcacatataagcccctcatggaccgtcctaaatgccaaggactggaatcccggatccagcattttgtacgtaggggacgaattgagcacccacatttattccatgaggaagaaacaaaagccaaaagggactgtaatgacacactagaggaagacaatactaatttggagacaccaacgaagagggtctgtgttgacacagaaattaaaagcatcatttaaccatagacaatttgccaggatctaggaaccacctaatggtaggtggacagaaaaggaaaaaaaaaaaaatttacttgcaagtactaggaattcagatgatcagctcttaaaaaaaaaaaaaaagcaaaaagactaaagccctattaaggaagttattgctttaataagaaatttcaaatattctcttatcccggtccaaaaggattaagcgattaaagaacgtaaaatggagatgtatttacatacacctggaaacctgtgccttgtattcaaattcattaaagcctaatcctgcaagtaaaaaaaaaaaaaaaaaaa

SEQ ID NO: 291288 - DNA, 1000 bp, Homo Sapiens
tatcccctcgccctacccaccccataggcccctagatcagggacgctgcgcggggccggccgcgcagactttctccccacccctccccgacccccacggcagagcccggcggctgtaatggttccatgggcgggggtggggtggttgcccccaagacccctccttcaggcattaatcattcactgaccgttcattgagcacctactatgtgccaggccaattgctgagtccgccaggagcgcagccacctgctgggaggtgtgtttgcaggacaggggtccaaccggcttgggtgggccagggaagaacggcagatgcagagagaccaggtccctaggttcacatgccccctacactcctccccacctcaaccagtccctgctgggcacaactgggctctacctttgagttaggccttttgactccagctgagggggacagatccagggctcctgggcccccacacaggtggccacttctctgatcctctggccaacacacatctgccatgtccagccaggggcagagccatggctggagaagaaggtgccagctgtagcctatggtgtggccagcctcacccccagcagcaagcgtggctgcccccacaaggatgacccaccgctctgcacagcagtgcccacatccaaacaccctacacaaccaggtgtggtgcctgcacagctcccaagctggggcctgcccacctgtgccgcatgcacacgcacacacaggcgcccccacctcaccccaccccatactcctgtctacctacctaaggagaaagctggagggctgtgggcccgtcagggtctcctgcttccccctacaccccgccgccgtggaaagccatgggccccctcccgcccccataactaagcagcacaataaccgacttagcgaattcaggtagaaggaacgtttaggtagcacctattttgtactgattctacaagtagggcccgaggtgcgggggccctcgggtgggggctgcggccgc

SEQ ID NO: 291289 - DNA, 1000 bp, Homo Sapiens
gcacgtcatggccttcgccgcctgcctggagccctacaccgcctgcgacctggcgccccccgccggcaccaccgacgccgcgcacccggggccgtccgtggtccccgcgttgcttcctctgctggcagggaccttgctgctgctggggacggccactgctccctgagtgtcccgtccctgggggctcctgcttccccatcccggagttcccctgctccccacctccagttctgcctgccggacctccacctggagctgtcacccccggagtcgccacacagactgtcctgccatggaaccttccctcccggtgcaccctggggaccgagcccttgacaccacgccctttgctttatcttgctcttaaattttggccccaactccagggactggggatttgtgcctggcagctgcctgcatttcaggaaaagaggaggctcagaccatccagccccccgcccatatcctgaggtggatcaggcaggctctctccccggggacatgaggcacccatacctaggaccccctgcgccttttttagcttcagtcatggcagcacctgagggacacaaggacttgggtgcatcaggacgccttggagaagcgtggcttcctgccaccctgcaacccaccctcccagccaaggaggctgctgtggtggggatccccaggggctttgacacagtcctctgctgtccctccactgggctaattctacacccctgtcgcctcctaggggcccatgagtcagagaggcttgccccaagtcacagccactcagatgttcgacgccccctaaggtccattccagcacccacctgagttccgaggagcacctgggaagctctgggtgcaggatagcagtccagagtccatggccccgcctaggccatctgggtgctgggcatggatttctcagcaaggaagactcattaccttccctccctgggcctccattcttctgggaaacacaaagcaataataaaaggaagtgttagac

SEQ ID NO: 291290 - DNA, 1000 bp, Homo Sapiens
ccattaagaaggagctgacccagataaaacaaaaagtggattctctcctggaaaacctggaaaaaatggaaaaggaacagagcaaacaagcagtagagatgaagaatgataagtcagaagaggagcagagcagcagctccgtgaagaaagatgagactaatgtgaagatggagtctgaggggggtgcagatgactctgctgaggagggggacctactggatgatgatgataatgaagatcggggggatgaccagctggagttgatcaaggatgatgaaaaagaggctgaggaaggagaggatgacagagacagcgccaatggaggatgactcttaagcacatagtggggtttagaaatcttatcccattatttctttacctaggcgcttgtctaagatcaaatttttcaccagatcctctcccctagtatcttcagcacatgctcactgttctccccatccttgtccttcccatgttcattaattcatattgccccgcgcctagtcccattttcacttcctttgacgctcctagtagttttgttaagtcttaccctgtaatttttgcttttaattttgatacctctttatgacttaacaataaaaaggatgtatggtttttatcaactgtctccaaaataatctcttgttatgcagggagtacagttcttttcattcatacataagttcagtagttgcttccctaactgcaaaggcaatctcatttagttgagtagctcttgaaagcagctttgagttagaagtatgtgtgttacaccctcacattagtgtgctgtgtggggcagttcaacacaaatgtaacaattatttttgtgaatgagagttggcatgtcaaatgcatcctctagaaaaataattagtgttatagtcttaagatttgttttctaaagttgatactgtgggatttttgtgaacagcctgatgtttgggaccttttttcctcaaaataaacaagtccttattaaaccaggaatttggag

SEQ ID NO: 291291 - DNA, 1000 bp, Homo Sapiens; identical to SEQ ID NO: 118182

SEQ ID NO: 291292 - DNA, 1000 bp, Homo Sapiens; identical to SEQ ID NO: 118183

SEQ ID NO: 291293 - DNA, 1000 bp, Homo Sapiens
ggctttcttagaaggcttctatgagatcattccaaagcgcctcatttccatcttcactgagcaggagttagagctgcttatatcaggactgcccaccattgacatcgatgatctgaaatccaacactgaataccacaagtaccagtccaactctattcagatccagtggttctggagagcattgcgttctttcgatcaagctgaccgtgccaagttcctccagtttgtcacgggtacttccaaggtacccctgcaaggctttgctgccctcgaaggcatgaatggcattcagaagtttcagatccatcgagatgacaggtccacagatcgcctgccttcagctcacacatgttttaatcagctggatctgcctgcctatgagagctttgagaagctccgccacatgctactgttggctatccaggagtgctctgaaggctttgggctggcctaataaggccctgcccaactccgtggggttttttttaccattgttggacctggggaggggggagttaaaaaaagaaccagaaagaaattgtcaaaaaccaataaatgaaatccaccaactcaccgtgtgtgtcccagctgccccatcttccccagcgcatacctgttcctcttctcattctctccccgccgcctgtttcctcaccttctctcccctttccatgccgtccatgatccccaccccatgtgttttaaaaaggcagtagcctttgcagggacctgtctgtcccaactgtttgaacagtgtgctcctcagattctgtgttcagaaggatttgctgcattgagacttgaaacctttggataggggaaaaaattatatatatatatatttttttgttctgtttgcatttcttaatttgtgcttggaatgtgttgatgtgcacagctaatgattcaatgcgagacaagattggcgtctgtgttgtggaggtttcaaataaagagcactcttcataactcaaaaaaaaaaaaaaaaaaaaaaaaaaaa

SEQ ID NO: 291294 - DNA, 1000 bp, Homo Sapiens
cagtttcatagatgggtcaggaggtggacaagttggggccagagatgatggcagtccagcagcaactccctgtgctcccttctctttgggcagagattctatttttgacatttgcacaagacaggtagggaaaggggacttgtggtagtggaccatacctggggaccaaaagagacccactgtaattgatgcattgtggcccctgatcttccctgtctcacacttcttttctcccatcccggttgcaatctcactcagacatcacagtaccaccccaggggtggcagtagacaacaacccagaaatttagacagggatctcttacctttggaaaataggggttaggcatgaaggtggttgtgattaagaagatggttttgttattaaatagcattaaactggaattgacaagagtgttgagcatccctgtctaacctgctctttctctttggtgccccttatctcaccccttccttggaatttaataagtctcaggcatttccaattgtagactaaaaccactcttagcatctcctctagtattttccatgtatcaggacagaggtgtcttatgtagggagggggcaagtatgaagtaaggtaattatatactactctcattcaggattcttgctcccatgctgctgtcccttcaggctcacatgcacaggaatgctacatgatggccagctgcttccctccttggttatcatccactgcagctgctagttagaaaggtttggagggatgacttttagtaaatcatggggattttattgatttattttcacttttgggattttgtggggtgggagtggggagcaggaattgcactcagacatgacatttcaattcatctctgctaatgaaaagggttctttctcttgggggaaatgtgtgtgtcagttctgtcagctgcaagttcttgtataatgaagtcaatgccatcaggccaaggaaataaaataattgcttaccttaaaaaaaaaaaaaaaaaaaa

SEQ ID NO: 291295 - DNA, 1000 bp, Homo Sapiens; identical to SEQ ID NO: 118184

SEQ ID NO: 291296 - DNA, 1000 bp, Homo Sapiens
tcagattccagagaggttctcatgctccccccccctccttatttgtagcaatcgtagcaactaattccactaagtacaagggagttttttacactcctccatttttatagcatctgcattttttttttttgttaggtacatgtatacacctgcctgagtataaatactctctctacctaataataacatcaaccaacatcttttccaaattagggccacagaacagcaacatttgtctgacagtagtataaagaataatgatagctctatccttaagaagtatttcctttcctttttatatagtcccgttagggtttaaaaccatattgatcaactagaaagaaaaatatgaaaagagaaaaatattttaatttaaaaattgtaatacattgatttataaaatgccttctctgatacttttgaaacagatgtgaaaaacagaaaaagaaaaaattgtctgaaatgtttattttgcaaaacagtgcaatagaatctagttatgccttcatcactgttgacagtaaatactgacagccccttgcagtgtgttagttttagatcactctgttttagttgagagaaatgttttatatcatggtttttatatgaatacaaattatttctcaaagatttatagcacacactattctcaggaattctgtattacatgaatgctgcttatatattttcatattctaacttgtcttttcaagcaaataactaatatatatgtgcatgcagtctgccttgacaagttgttccaagctgaagagctttcactgtacaatgtgtggaaaatcaccatagatcatggctgaaatagtttgtaattgtctgagtctgtgcacgtacttttagataaaatgctgctgagtgactgcatgatgagatacaacttctgaatgctgcacattcttccaaaatgatccttagcacaatctattgtatgatggaatgaatagaaaactttttcactcaataaattattatttgatatggt

SEQ ID NO: 291297 - DNA, 1000 bp, Homo Sapiens; identical to SEQ ID NO: 118185

SEQ ID NO: 291298 - DNA, 1000 bp, Homo Sapiens
gtcaagttcaaagagtttatccactacttgctggattcccaccgtccagtaggaatggacattcactgggaaaaggtcagcaaactctgctatccgtgtttgatcaactatgattttgtagggaaatttgagactttggaagaagatgccaattactttttacagatgatcggtgctccaaaggagctgaaatttcccaactttaaggataggcactcttccgatgaaagaaccaatgctcaagtcgtgagacagtatttaaaggatctgactagaactgagagacaattaatctatgacttttattacttggactatttaatgtttaattatacaactccatttttgtagtttgcattcattttctaaaaccctgtatatacttaatgatgataagttcaaatcagctgtaatttttctataattctctgtatgacagaaatttaaccaagtgcagttgtcttgatttaatgtagatttttaccaaatagtatgacaccaattggcacaaagttataggaaaatcacctacaggagatgtaaacaacttgagttgctctaaaatgtttggaaaagagctgcttttgcattatgaattatattgttgaagcaataacctagccagctgttgcattagctaaagcagcctcttgcaatggtaggaaaaaaggatctcaaatagcatgagtgtatgtctatatcctgaaatttattgtctaaaatgcatgaatatatttttagcagtctgtggcatattaatcaaactgttgaattgttttcttacaccctggaaatctttctatcaactataatgataaatccattttgaagtgatattttggacttaggcattttactttagattggaaggcattatgtgatttacaatatgagaatatagcagaaaaaccagatgaggctgtggctttttatattcaacagccaataaaaaatgcacaacatgctaagatcaaagcaaaaaaaaaaaaaaaaaaaaaaa

SEQ ID NO: 291299 - DNA, 1000 bp, Homo Sapiens
tgagcgagcgcttttctagggcagccgctgatctcgagcgcttttttaacttctgcggcctggacccggaggaggcgagagggttgggtgtggcccacctggcacgggccagctcggatatcgtgtccctggcagggcccagtgctgggccgggcagctctgaagggggctgctcccgccgcagctcggtgactgttgaggagcgggcccgggagcgcgttccctatggcgtgtcggtggtggagcgcaatgcccgcgtgatcaagtggttgtatgggctaaggcaggctcgggagagcccagcagctgaaggctaggcgccactgggcctggaattcgccacaggacggatcttacagaggcaagtggtccctggacctctcttgcatccattctctagacggccgtgtcagaggctccaccctgttgtgaacttggtatggaggcaaaggcttagaggctggaccagcattgttgggcaaggactgactctcgaagggttttgttcttggctttggacacctgagaaccccctcctcccctcccccaatacaaggtttttgacatgagtgtactcctgcttagttcctcttgtggggctgcatttgcggtgctttgccctccccactgtgagtgaggggccaagggatctcctcaatcctgtctccccagcggctctgtttcctccttccttccttggcctctgtcctttgctgacttcctcttccttacccagcagaactcaccctggggtcggggcagtggggaggggcctatccactgctcttcctagtccttggcagctggcctaggtgggcagactataggagggactggttaggagtctgcattgctttgacttccctctccttggttaataaacacaaatgcttgtttctcaaggaaaaaaaaaaaaaaaaaaaaaaaaaaaaaaaaaaaaaaaaaaaaaaaaaaaaaaaaaaaaaaaaaaaaaaaaaaaaaaaaaaaaaaaaaaaaaaaa

SEQ ID NO: 291300 - DNA, 1000 bp, Homo Sapiens; identical to SEQ ID NO: 284098

SEQ ID NO: 291301 - DNA, 1000 bp, Homo Sapiens; identical to SEQ ID NO: 118186

SEQ ID NO: 291302 - DNA, 1000 bp, Homo Sapiens
tattcattcagctggctgtgctgtgctgtggaccagctgtgtggatctctagcccagctacagcagaatacattttaccagcaaacctaaggatgacaaacactatccacatctgaaaactaccacaccatatcagggatcataaattatgcatatctatgaattttccaacaaattcctacttcctgattggattggttttgccgctgatgttaaggcagccagcttcttagttcaaaaagaattctgagtttttcaaacactagtctagaggtggacattgtcaggggttctggaatgggaccaggggaccttttggtgcagtgggtgcctgtaactcattagacgtactgaggcagcacttctgcagggtgcataccctgattgttgtcatttgtaacaggtcacttccttttcactcagtttaaattggtgatggacgttgcttgattgagcttattactctctattttgagaaggtagaaggtaagagggcccatattcattctttgccatgaaatgaatgaattaggaagattgtatttacttaactgttttttaaatacatgtttaatgaaataaactgtaaaatatccagttttgtgtattatatgtacatttgatttttaatagcctttccaaagaaatgagggcatgattattgtacagtaagtacgtgactgatttaatttgatttacagagcggagtgtgttcttataaaaatatttaatgacattggttcttgtcttttgatcttttatttctgaaacactcaaacaccttacaaagtgctgagtaggtaatagtgacccaacttgtttgctaaatgattatttgtttaaatctgtacagttttaagtgttcacttatacaaagagtgtatatactttcaaataatttaaaatgctttatattatttggctagaaattgctgtttttaataaatgtgaattttttaaaaataaagatttttgcttcctaaaaaaaaaaaaaaaaaaa

SEQ ID NO: 291303 - DNA, 1000 bp, Homo Sapiens
caagtaatatttataatacaatatgataaatgctacaaaagaaatagctgtaaagtcctttggtaaatgctgttgaattggaattcagtaagaactataaactgtagacctttttataatcaaatgcttttgtcttgaaacaaaacagattcctccttatattgacttagcaaaggaggtacaaggacattggcatttgacctgaattatggtgttttattgaatgagctataagacaacatttttaccctttaaaatgaacactgaacaaatgtgttaatggtatctttgttaaaaggaaaacatagctataaataaaatactacatcgaaatccagcactggagttcatttgaaatttgatattttgtgtaaagtaacaaacctattaacacagatttttaaaataactcagaatcgtataaagcactttggtacttatttgttctcttttcccttacattctgtgtggtaggtggtattatctctgatttacacatgaagacatccttgttaatgcaatttatttattcattcgggcatttactgtgtgccaacttgcaaaaggaatagaaatgtctgtgatctagatagttctagattgaacatagattttctgccaacaaatcctctctgctgttcacattatcctttgtttaacgtatgaaccaggttactaaaataggataaatcatgtgtcttagaatatgaaaatagtaaggtctttgaggtcacttgatcttctctaagtagactttataatattgtgttttatctcatttctcaatattagaatacgggtagattttaattttgctataatataggaaatggttcatctttgtaccaaaatattgcattcttctgatatttagacagttggaaactttctaaaattgaggattttgtagtgtatactaaataattgcatattcaaaaaaatgtattctgagtatggtgatattaaacatttttccccaaaaaaaaaaaaaaaaaaaaaa

SEQ ID NO: 291304 - DNA, 1000 bp, Homo Sapiens
gtgcctgagttttgactccaatcagtgataccagaccacattgacagggaggatcaaattcctgacttacatttgcactggcttcttgtttaggctgaatcctaaaataaattagtcaaaaaattccaacaagtagccaggactgcagagacactccagtgcagagggagaaggacttgtaattttcaaagcagggctggttttccaacccagcctctgagaaaccatttctttgctatcctctgccttcccaagtccctcttgggtcggttcaagcccaagcttgttcgtgtagcttcagaagttccctctctgacccaggctgagtccatactgcccctgatcccagaaggaatgctgacccctcgtcgtatgaactgtgcatagtctccagagcttcaaaggcaacacaagctcgcaactctaagatttttttaaaccacaaaaaccctggttagccatctcatgctcagccttatcacttccctccctttagaaactctctccctgctgtatattaaagggagcaggtggagagtcattttccttcgtcctgcatgtctctaacattaatagaaggcatggctcctgctgcaaccgctgtgaatgctgctgagaacctccctctatggggatggctattttatttttgagaaggaaaaaaaaagtcatgtatatatacacataaaggcatatagctatatataaagagataagggtgtttatgaaatgagaaaattattggacaattcagactttactaaagcacagttagacccaaggcctatgctgaggtctaaacctctgaaaaaagtatagtatcgagtacccgttccctcccagaggtgggagtaactgctggtagtgccttctttggttgtgttgctcagtgtgtaagtgtttgtttccaggatattttctttttaaatgtctttcttatatgggttttaaaaaaaagtaataaaagcctgttgcaaaaatgaaaaaaaaaaaaaaaaaa

SEQ ID NO: 291305 - DNA, 1000 bp, Homo Sapiens
ctgaatcagtaagattctagagaaagcaaaacatagtagttcacaattttgcaacatagaaagtcacattttgaaaggctattttgaaattgatttaatagctattatagtttatgaatatcaaaatttgtataatttgcatctttactaatgtatgctagagctacaagagaccttaaggataatatatgaaattagctttccttattttatagataaggaaaaagaaattgtgaaaggtgaatttacctaattagtgaaagttacataactaattacaacagtctgtactatataatgcagaggacgattctccctgtaaaaggaactagaagctattactaaaaatatatatagacaaaattaaaagaaggaatgataagaataaatttaatttaccaaatattgttaattaaaattttagatacttaacatttatttaacttaaataaaagataactgtcagataaaactttattttactaatgagcagtgattttcttaggaattgatgaaggcttattggtatcaagaatttaaaccaaattaaaactgacagaggacatttagatacataataaaattcgagctacataagtatatggaaaataatgtaccttgattattatgaaatagagcatcttgaaattcagttttactctaaatgtacttttaatacttgcagattctaagattacattgtaaaattccaggttttcataatgttaaaataggaaagtagaatataaagtatcaacaagtgtagttatacattttgttttggatatttaatccttacttgggaaaaaatcagcatctaggtaaattattattttaataacaactcttaaattgccaacctctgagaggtgaaaagctatgtaaatagaaggaatggccagttcaaaagaatagtagatgtgatagtgccgtgaatgtattctactggaaatgaatgtaataatacattaaatttttaaaatctaaaaaaaaaaaaaaa

SEQ ID NO: 291306 - DNA, 1000 bp, Homo Sapiens; identical to SEQ ID NO: 118189

SEQ ID NO: 291307 - DNA, 1000 bp, Homo Sapiens
agtatccgtcctgaacggggcctagtcaggaagcggtctagaagtgtacggtcacggtcgcctcatgaaagtgtgtagcaggtggctctcaggaaaaataccaagtctggatcatccatgtggcagctttgcatagggagaggatagctccgaactggaactgaactgccttctctgcacgcttgaccaaagcagtgatgagggcggccagtacctgcggtgtgcgtggtaggtttaaagaaaagggaatgttttctgctgagtgtttcctttgtccttgggctgctcgagctggacagtaggtaaccactgttttcaaggaccagcccaatttctctggcttggttcggagttcgtttcatccctagctgtgagtgccttttggtctggaaagttggcttgtctcataatacccacagctaggacattctctctgtaattatgaattgtccttgttttacattaaaagagaatgtctttgatcactagagtctgtcggtgttggattatttccactgtgagattcttaaaacttttttgcttcataataataaaacaactcatgttagagaccctttcaacatgaaaggtttgtagttgagacattacatatattttattgtttataataaaaatcatctatacaaaagaagtcctgggtgttaatattttgcacaagatctgttttccatgatgtgttgacatctacaatttcactaactgttgacgttattttctattgagattctggagcctagggagctatgtgttctttttgttcatttcgttcttacttccctgaagcaagagactatatggccttcagtgcaaagacttcagaccaattctttgtattacacttggttgcctcttggctatataacttctgagtgcaaatcattgaacactttaacgaagtattgtagagaataaatcataatggataaaaaaaaaaaaaaaaaaaaaaaaaaaaaaaaaaaaaaaaaaaaaaaaaaaaaaa

SEQ ID NO: 291308 - DNA, 1000 bp, Homo Sapiens; identical to SEQ ID NO: 118191

SEQ ID NO: 291309 - DNA, 1000 bp, Homo Sapiens
gaagaagccatgggaacccctcgtatccagcatttgctgatcctcctggtcctaggagcctccctcctgacctcgggcctagagctgtattgtcaaaagggtctgtccatgactgtggaagcagatccagccaatatgtttaactggaccacagaggaagtggagacttgtgacaaaggggcactttgccaggaaaccatactaataattaaagcagggactgagacagccattttggccacgaagggctgcatcccggaaggggaggaggccataacaattgtccagcactcttcacctcccggcctgatcgtgacctcctacagtaactactgtgaggattccttctgtaatgacaaagacagcctgtctcagttttgggagttcagtgagaccacagcttccactgtgtcaacaaccctccattgtccaacctgtgtggctttggggacctgtttcagtgctccttctcttccctatcccaatggtacaactcgatgctatcaaggaaaacttgagatcactggaggtggcattgagtcgtctgtggaggtcaaaggctgtacagccatgattggctgcaggctgatgtctggaatcttagcagtaggacccatgtttgtgagggaagcgtgcccacatcagctgctcactcaacctcgaaagactgaaaatggggccacctgtcttcccattcctgtttgggggttacagctactgctgccattgctgctgccatcatttattcacttttcctaagaaggcacttctgggcctgggtctgaggacatcttttttgactgggagccttcttactgttgaggttcaacaagctgaggagtagatgggaatttgagggagaatacagagatactatgaacgtatttgacatttttaatacaatttctgctataatttttgtatgcagtaggcgttactaataaacatttctgctgtgaaaaaaaaaaaaaaaaaaaaaaaaaaaaaaaaaaaaaaaaaa

SEQ ID NO: 291310 - DNA, 1000 bp, Homo Sapiens; identical to SEQ ID NO: 118193

SEQ ID NO: 291311 - DNA, 1000 bp, Homo Sapiens; identical to SEQ ID NO: 118195

SEQ ID NO: 291312 - DNA, 1000 bp, Homo Sapiens; identical to SEQ ID NO: 118196

SEQ ID NO: 291313 - DNA, 1000 bp, Homo Sapiens
gaagatagacaatgaggtccttatggctgcctttcaaagaaagaagaaaatgatggaagaaaaactgcacaggcaacctgtgagccataggctgtttcagcaagtcccataccagttctgcaatgtggtatgcagagttggctttcaaagaatgtactcgacaccttgcgatccaaaatacggagctggcatatacttcaccaagaacctcaaaaacctggcagagaaggccaagaaaatctctgctgcagataagctgatctatgtgtttgaggctgaagtactcacaggcttcttctgccagggacatccgttaaatattgttcccccaccactgagtcctggagctatagatggtcatgacagtgtggttgacaatgtctccagccctgaaacctttgttatttttagtggcatgcaggctatacctcagtatttgtggacatgcacccaggaatatgtacagtcacaagattactcatcaggaccaatgagaccctttgcacagcatccttggaggggattcgcaagtggcagccctgttgattaatctctacatcattttaacagctggtatggccttaccttgggtgaactaaccaaataatgaccatcgatggctcaaagagtggcttgaatatatcccatgggttatctgtatggactgactgggttattgaaaggactagccacatactagcatcttagtgcctttatctgtctttatgtcttggggttggggtaggtagataccaaatgaaacactttcaggaccttccttcctcttgcagttgttctttaatctcctttactagaggagataaatattttgcatataatgaagaaatttttctagtatataacgcaggccttttattttctaaaatgatgatagtataaaaatgttaggataacagaatgattttagattttccagagaatattataaagtgctttaggtatgaaaataaatcatctttgtctgattaaaaaaaaaaaa

SEQ ID NO: 291314 - DNA, 1000 bp, Homo Sapiens
tctgaagaggagggagtattagattataaatcctctttattttggtcctttatgcttgaggttccaacctggagccacagtgtgtgagaggaggaggagagggagaattctgttctcccagagctgcacctgcctcgcagaggccagcaccccactctcctgcctccagtggccctgccgcagatgtctcccaaaaagttgagcctttctagatggcttaggtggcaccatggctcagcaggaggggcgggaggcaccagggttcttgtttggaccctgcccctgggccatggccaggtgaccatggctacattgccaaacctctgactgccacagctgcagactgagagggtgggtctgagtccccacaatgtctgaagctgcccctgggattctcaggccaacctgccaacagcaagcggattttcttgcaagatcagggaccccatttctgcagccagtgtctcctgggtgccttctgaggactcccacccccatcccagtatctcatctgtcccctctcctggggcttaagtgggttgcttccaggcagaagcagccaaggaccgattccaggcactttctgtagcaaatgactgtgaattacgacttctcttgcccttcttctagcagtctgtgcctcctctctgaccagtttggagggcactgaagaaaggcaagggccgtgctgctgctgggcggggcaggagaggagcctggccagtgtgccacattaaatacccgtgcaggcgcggagaagcaaccggcacccccttccggcctgaaagccctccctgcaagaaggtgtgcaggagagaagaggccccggcatggggatctgggttctagagggcatgtgatgactgtaaatgttcactgggtgggtagggagtggtatccagtgttcaagtgcagaaatctttggctttgctaccagttccatatgatgagaaataaacgttcgctgaggttttgtttcataaaaaaaaaaaaaaaaaaa

SEQ ID NO: 291315 - DNA, 1000 bp, Homo Sapiens; identical to SEQ ID NO: 223554

SEQ ID NO: 291316 - DNA, 1000 bp, Homo Sapiens
ttcaggaagttagtaagggtggggtggcttgcaggattggcctgtttccagggcctcccacactcattggccagattgtgaactttgtcaggcttgtccctccctgataccaagtatgtcgagaaccgatggccccaccctctggctggtgctgggccggaggtggctatggaggattttggcatgcgtggcctgtcgccacctggacagcgtgacctcaggggttgtccactttacctttatggtgaggcctgtcggatggctaagtccttgaaaccctagagctgtgacgtagaatatgtgctgtctgtgagaccgtgttcccaggagcactgactgcagttgagagagacccattttgctctcccttaccgccccccgccccgggtgctttctgcacaaagcctagagcctggcactcaagcccaccggtggcagctcctagtgactggacatgcctggaagacccctcagccttctgtttgcagaacgttcatttcaggagcttctccttcccacagacatcttacacttgctcgacactgccacctgcagaagcctggcgggctctggtcaccatgtgtctatctgaaggttgcactggccagcatgggcctgtcccaagcgagaggggagacacagtggactgaaaggactggttgaaagtggccaatctctatcagcttaatttggcagagaaaatttgtaacaactctgagcacatgctgggtgaagtcacagctcaaggaaagataaagctgggcggaaggaggtgtgcgtggcttctggggtgggacccagaggggaggctctgggacaggggctggggttcagtgccagggccctgaggaagaaatggggactgatctcaaaattccagaattccctgtacatctgttcacgtgcttgtgtccaggtgtgacttgtaaactgtctagtgtttgcattaaataaaatggcaccgagcagaaaaaaaaaaaaaaaaaaaaaaaaaaaaaaa

SEQ ID NO: 291317 - DNA, 1000 bp, Homo Sapiens; identical to SEQ ID NO: 118197

SEQ ID NO: 291318 - DNA, 1000 bp, Homo Sapiens
tagggcccttcgccctcactgtggtccccttccaggaccaccagaacggcgtgcacaactacgacctgcacgacaccgtctccttcgtgggctccagcaccttctacctcgacgcggtgcagccgtccggccagtcggcctgcctcggggccctcctcttcctctacacgggagacttcttcctccacatccggttccacgaggacagcaccagcaaggagctgccaccctcttggttctgcctgcccagtgtgcacgtgtgtgccctggaggcgcaggcctgagcccgcctacttccgtccctctttctgcagggccagaggtgaccctgcctggcctcccacaccccctgcaatgagcaaggccttcactgcagccccatctcctcctcctcccccagacccctcccagccctctcctcctgttcctcctgtagcatctttgctgggctacgcagaagccccggacatggcagccccaccccatgccacgccccttcctacactgttccctggaccatacacaggctgaagcagaggaaatcccaaagcgggtgcccatccagcccaggtcccaggatccctgcacccatttctgtgacctggggccccagccgtgctgtgctgctcatcccagcagagggacctccctcgtccagcgacttccctttggccatagaaagaaatggtgagcatgagactgggcacagcctgagggcgtgggcagcttcccaccctccctgggccttggaatcccccaaggctggttttcttcctggagacccccatgggcaacttggcaggagagatggtgccgtaggaggtcgtggatggttgatgccaagagaggccctccacccgtggtgggcaaatgtccaggcctgggctggcagcccagggctgtttctgggtgctccctggccccagggtggcgtctggttaccatggctgtgtgtgtccatgtctgcaagcagttcttcaataaatggcctgcctccccc

SEQ ID NO: 291319 - DNA, 1000 bp, Homo Sapiens; identical to SEQ ID NO: 118199

SEQ ID NO: 291320 - DNA, 1000 bp, Homo Sapiens
gaggttttaagctgacttgcctgacaccccattgctagtaagtagtagaaccaggagttggatttagcagtctggctgtagagtcatcaatagtttgcacatgacagaaagctggaagaaatagtcaacctgaaacacatgatggaattataattcagaatcatcttggtagataggggcactgtgcttaaacaaaatgccattaatgggattataataaatataatgtggtagaattcaagttttgtttgccaattcaacacatcatctgttactaacgcagctttaaaaaatgcataaacgattatactacattaatttttttaaaaagtatcctgtttatggtctgattatgcctggagtattattttatatttttgacttcatgttttaagagacaatcatgccagagtcccacatgagggtgactaaaatggacaaaaagtctggaaactttcatatcaataattgattatgtattaactgaaacaaaagactagagaaagacacagtgggaattgattatgtattaactgaggaataaaagactgaagaaagacataataaatagttaaaggattatggaaaagatggtgttcagaaaaaaattaacatgcaggcctgagactgctatccctagaaaggtctgcttgcaaagttggcccttggctggcatctgggggaacttggttcttggatggattcctgccattcactgataagaatggctcaccttgcctaaagtatatgaagagtgtgctttatgtcgagctcctgcttgcttgcctctttctttgtctttctttcttttccttcctcccttccttccttccttccttccttccttccttccttccttccttccttccttccttccttcctctctctctctctttctttctttcttctttctggaattttggtacaggctaggcagaatgtgcctagatgatcagctcctagtaaaaaccttgagaactaaaaaaaaaaaaaaaaaaaa

SEQ ID NO: 291321 - DNA, 1000 bp, Homo Sapiens
gtgggctcgcttccaaagcatcccactcaagggagacttgaaacttccagtgtgagttgaccccatcatttaaaaataaagtccccgggttccttaatgcctccttcactgggccttcctagcaggatagaaagtccttgcccagagcaggacctggctgtctttttttttttttttttcccgagaccaagtttcactctgttgcccaaggtagagtgcagtggcgtgatctctgctcattgcaactgccgcctcccgggttcaagcaattctcatgcatcagcctcccaagtacctgggactacaggcgtgagctaccatgcccggctaatttttgtatttttagtagagatggggtttcattatgttggccaggctggtctcgaactccttacctcaggtgatccacccaccttggcctcccgaagtgctgggattacaggcatgagccactgcgcccggccatggacctggctgtctttatcatccccacaaacattttgaaactggaatatttgtcttcagaaaatggaaacaagactataaatgataagccctgtccctagcaccacctctcctgtgtgtggaatagaggcccctcgtgctaccaacacttaccctgtgtttaaaaagatcttgtaccaagccaacggcgttcctggctctcctgcccacaggatgaacattttcggcttccttaggagttttgccctaccgtattccaaagcgtgtgctggtttctcatattgtctgtaggctcactcagcccgcagtttatgtgtgtgcttttttctatgaaaaatgatgtattttgctacttcctgtgtacaaagttttattgtaaatgttttttgtgctttgcatgaacaggggccacgttgttgcaattgtttcagtagaactggtttgatttctaaaatgttcctgtaacatatcttttatgaacaaatctgaacaatttgtgaaataaaacattgaaaaccaaaaaaaaaaaaaaaaa

SEQ ID NO: 291322 - DNA, 1000 bp, Homo Sapiens; identical to SEQ ID NO: 223559

SEQ ID NO: 291323 - DNA, 1000 bp, Homo Sapiens
gcttattccaggttggctgatgtgttgggagatgggtaaagcgtttcttctaaaggggtctacccagaaagcatgatttcctgccctaagtcctgtgagaagatgtcagggactagggagggagggagggaaggcagagaaaaattacttagcctctcccaagatgagaaagtcctcaagtgaggggaggaggaagcagatagatggtccagcaggcttgaagcagggtaagcaggctggcccagggtaagggctgttgaggtaccttaagggaaggtcaagagggagatgggcaaggcgctgagggaggatgcttaggggacccccagaaacaggagtcaggaaaatgaggcactaagcctaagaagttccctggtttttcccaggggacaggacccactgggagacaagcatttatactttctttcttcttttttatttttttgagatcgagtctcgctctgtcaccaggctggagtgcagtgacacgatcttggctcactgcaacctccgtctcctgggttcaagtgattcttctgcctcagcctcccgagcagctgggattacaggcgcccactaatttttgtattcttagtagaaacgaggtttcaacatgttggccaggatggtctcaatctcttgacctcttgatccacccgacttggcctcccgaagtgatgagattataggcgtgagccaccgcgcctggcttatactttcttaataaaaaggagaaagaaaatcaacaaatgtgagtcataaagaagggttagggtgatggtccagagcaacagttcttcaagtgtactctgtaggcttctgggaggtcccttttcaggggtgtccacaaagtcaaagctattttcataataatactaacatgttatttgccttttgaattctcattatcttaaaattgtattgtggagttttccagaggccgtgtgacatgtgattacatcatctttctgacatcattgttaaaaaaaaaaaaaaaaaa

SEQ ID NO: 291324 - DNA, 1000 bp, Homo Sapiens; identical to SEQ ID NO: 118201

SEQ ID NO: 291325 - DNA, 1000 bp, Homo Sapiens
tgtcaactatatcacatcatggctgagcattgtagggccagttgttgggctgaatctacctctgagttatgccaaagcaacgtctcaggatgaacgaaatgtcccttaacaagattcttctattgagtttaggaattgcggcacgaagaatgccaagagtttacctggccagccctggctttaataggactgataccatggaatatttcatctcaccaagatgtgacatggattatttttcccttggacacaaatgtctacagcaactggtgtttgataggctgaatgtttagaagaaacacttcaaagggatacatcatggccaggcatggtggctcacacctgtaatccaagcactttgggaggccaaggtgggagcatcacttgatcctgggagttcgagaccagcctgggcaacatggtgaaaccctgtcggtacaaaaaaatacaaaaatttgcctgtttatggtggtgtgttcctgtagtcccagctccccaggaggctgaggtgggaggttggctttaacccaggaggcagaggttgcagtgagctgagactgtgccactgcagtccagcctgggtgacagagccagacactgtctcgggaaaaaaaaaaaaaaagacacatcactataaatagcaaaaaaacaaatctaacttattaatactaggaataccaacattattagggcacttgcaggttattcttttctaggccaagtacttcacttccatttgtctgacatggagattgagggagaaatgtatttgtgtgttcattttaatgtaagatatataaaaattaaattactggatttacctgtccctgaaactggtgttataaacatgacctatcttaagtgattttcccacaatcaaactcaggaacaatagattatttctgttttactccaaaagagagagagagagtgagtgtgagtgtgtgtgtgtgtgtgtgtgtatgtgtgggtgtttgtgtagatagttgtaaaaaaaaaa

SEQ ID NO: 291326 - DNA, 1000 bp, Homo Sapiens; identical to SEQ ID NO: 118203

SEQ ID NO: 291327 - DNA, 1000 bp, Homo Sapiens; identical to SEQ ID NO: 223563

SEQ ID NO: 291328 - DNA, 972 bp, Homo Sapiens
attcggagctggctggaatctctcagcctcacctgccagacaacaccccctccttcctcaccctgtctcctgcattctcctgaaaccttcatccacacaatgcctcccaacctcactggctactaccgctttgtctcgcagaagaacatggaggactacctgcaagccctaaacatcagcttggctgtgcggaagatcgcgctgctgctgaagccggacaaggagatcgaacaccagggcaaccacatgacggtgaggacgctcagcaccttccgaaactacactgtgcagtttgatgtgggagtggagtttgaggaggacctcaggagcgtggacggacgaaaatgccagaccatagtaacctgggaggaggagcacctggtgtgtgtgcagaaaggggaggtccccaaccggggctggagacactggctggagggagagatgctgtatctggaactgactgcaagggatgcagtgtgcgagcaggtcttcaggaaggtcagatagccggagaggagccaagatccctccagacagcaccagctcacagacgctcttgttgtgcccccttcaagcccagattgtgccaggtcagctgtcccttcctctggccacctttcctccctctgggtccctcctcacccctccccgtgttaatctgtaacttgcagcccccaggccaaagtcctttctcacactccactgcccaatagtgacctcacttccaggtcaaggtctggcgtcccaaatgaaagaagcaggcaaagggaaggagcccctgagaacaaccaatctccgctctctcctgtccatttgacctcttcttttccttctaagaaagaactaagctttgggcatttggcgattagtgaaaattctatcctgatggacttctggaaaactgtgactggggttcaagagtttaaacaggggctactggcagaaaaaaaaaaaaaaaaaaaaaaaaaaaaa

SEQ ID NO: 291329 - DNA, 1000 bp, Homo Sapiens; identical to SEQ ID NO: 118205

SEQ ID NO: 291330 - DNA, 1000 bp, Homo Sapiens; identical to SEQ ID NO: 287763

SEQ ID NO: 291331 - DNA, 1000 bp, Homo Sapiens
gcccgagtatacggtgttcgtgaaggagaacaacccgccgggctgccacatcttcactgtgtcggcgggggacgcggacgcgcagaagaacgcgctggtgtcctactcgctggtggagctgcgggtgggcgagcgcgcgctgtcgagctacgtgtcagtgcacgcggagagcggcaaggtgtacgcgctgcagccgttggaccacgaggagctggagctgttgcagttccaggtgagcgcgcgcgatgcgggcgtgccgcctctgggcagcaacgtgacgctgcaggtgttcgtgctggacgagaacgacaacgcgccggcactgctggcgcctcgggtgggtggcactggtggcgcagtgagagagcttgtgccgcggtctgtgggcgcgggccatgtggtggcgaaggtacgtgcagttgacgctgactcaggctacaacgcgtggctttcgtatgagttgcaaccggtggcggccggtgcgagcatcccgttccgcgtggggctgtacactggtgagatcagcacgacacgagccctagatgagacggacgcaccgcgccaccgccttctggtgcttgtgaaggaccacggggagccctcgctgacagccacagccaccgtgctggtgtcgctggtggaaagcggccaggcaccaaaggcgtcgtcgcgggcatcgttgggcattgcaggcccagagaccgagctggtggatgtcaacgtgtacctgatcatcgccatctgcgcggtgtccagtctgttggtgcttaccctgctgctgtacacggcgttgcggtgctcagcgccgtcctctgagggcgcatgtagtttggtaaagcccactctggtgtgctccagcgcggtggggagctggtcattctcccagcagaggcggcagagggtgtgctctggggagggcccacccaagacagacctcatggccttcagtcccagccttcctcagggtccatcctctacagacaatgtgagtcataaataa

SEQ ID NO: 291332 - DNA, 1000 bp, Homo Sapiens; identical to SEQ ID NO: 222951

SEQ ID NO: 291333 - DNA, 1000 bp, Homo Sapiens; identical to SEQ ID NO: 223565

SEQ ID NO: 291334 - DNA, 1000 bp, Homo Sapiens; identical to SEQ ID NO: 118206

SEQ ID NO: 291335 - DNA, 1000 bp, Homo Sapiens; identical to SEQ ID NO: 118207

SEQ ID NO: 291336 - DNA, 1000 bp, Homo Sapiens
gtatttttagtagaggcaaggtttcaccatcttggtcaagttggtctggaactcctgacctcgtgatccacctgcctcggcttcccaaagtgctgggattacaggcgtgcaccactgagtccagcctatattcttgtttatcagttcaaaaatgttctgctctgtttttgactctttaaaaataacttagattcaaatttatagtagaaagaaaaaaaaatctttcagataagaggtgttctccagaatggaggaactacttggcatgtaagaaatagcgtcagtgtcctaatgcatattgtgactgtttgcatatacttctgtttgtaaaaatatcagttttacttttcagaggatttgtaagaaacatttaaattttcattgaaataaatgacaagtcatactgccacttaaaaaaaaaaagacctttgtcaaggagagtgcagtcaaccagtaaattgcagattctcagaatgtttattgacgtactgattattcattctgttatactctaacatctgtatatttttaccagtattctcagaccacttctaccaaaacataaatctgtgattgtgatctctgaaagtcagtccttttatctactcaataactgatctgataatgtcaacttttgaaaacagatagttatgactcaaggctttgagaatgtaaagagaccaccttcacttgttgagaaatggtacgatttcacgttatcagtgcagttccgttctcgggggaaagcccatccgtactaccaggagactggatccgcaaagtagacacttggtctcatgaagccactgctgggctccagagagaagggaaaactaagaggttttaaaacccctaccctccttggtttacctccatcattaaaaaacaacaatgacaacgacaacaaaaaacaaaactaaaacgacttattatttattaattatgttgtggcagacaatatgctgaacattagacataattaaatctttttaaaaattga

SEQ ID NO: 291337 - DNA, 1000 bp, Homo Sapiens
acacagttcagttagagagacgtatttaaggagaagggaaggcaggatacccagaactagcagcctagggaaaaggcttaggaagatggagaatgaggaactgaagaaactgccgctctgagactgcacatccaggaaaaaagactaggacttgccacacactgccaattcataatccgcaggatctgtagaagacattttgggaaacactgtcttaaataaaaactcaatgtttagttgtttttttttttttttactagttcagcataagggattctaccagtatgtgctactactaacattcttcatgtccatgcagaattacttacagacactctttcttggtatcttgaataaattgtgtaaattattttgaaaagtggatatttctatatgccttgcttataatacatcagggattattattcttattaataacatgttggcctattatctggatgtcccttgcctagagcaggaaaaaagtctcagaattacctaaaaacatactttataactttaagagatttcttaggatacatcttcaggggcagatttcataacaacatctcaaaaatttggggaaacacaacgttgaaaacttcctaagaaaaggaatcttgcccttgaatcttctgaagtacctagcacagtgtcttcaacatagaaggtacccaataaatatatatcaattcattttttaatgactttcaacactcccatgaaaacaccgtagtctgcttttcctgaaaggtgactgtctaggatgctgaatgagccaccactccgtagctttatatattcagcaacatttccatcatagaatttcagcgttagaagggatcttagaggtagattatccaggccatcccctactgcttacattcccctccccctggccagttttatattttaatcacacattgaaaaattcattaacttattctgtataaaactgtcttttaagaattatcctttcaaaataaaaatgttattgttt

SEQ ID NO: 291338 - DNA, 1000 bp, Homo Sapiens
tcacacttaattggtatttttttctgccttcttcccctgcccccactgactcctctcctctccctttgattgtactcaaggttctggggcctgggccctgggtgggtaccaacagctgctcgctgttcccatgtcctctctccagctttgctgtgtttctctgctacctaatctcagtgactgtgaaaggacattgtgtctgagccatggccagccgctggctggccccctgatctgccccccttctattgtttggatggccatctcctgctgggcctccctgactgtaaaatctctgtactgtttgttaggtttttggtgggaggctgtgataagttccaatgagctgccacttccctggatatgtcaagaagctgatggcaacttggccaattctggcagatatcaggcccccagttcagccccagtcaccctcttttacacatgtgggtcaaccactgtgtgctcagagggtcagtcccttcctctgctgtgtttttcttgagtccttgcactcacttcccctgccccagtcacgatgacccctaaagcttcctttgcccttgctttctagggcatccctagtgaaggggcaaacctgagatttctccgtggacctgacagccaaggcagggcactgtctcctgaggccagtgccagcacgtgcatggttcacagaaaaggatcctgggctcagaatctcgagaaccgcctgctcctaacaattcagcaagtcaggggcttcctctctgttagtccccaaatccttacttattttaaaaagactagaccctctctaaagactgttccattttaacatgtcctgattctgcatccgtgggttttgtgaaagagagctagctggcggttagagcctggaagaaggagggaagtggcacctcactagcatttatcacttttttccttctctttttaaaaataaaaccagactctgttctgaaaataaaaaacttgagacttgaaaaaaaaaaaaaaaaaa

SEQ ID NO: 291339 - DNA, 1000 bp, Homo Sapiens; identical to SEQ ID NO: 118208

SEQ ID NO: 291340 - DNA, 1000 bp, Homo Sapiens
tcccaaacttaaacagtgatctcttctaaatatacaaggcatctacccagccccaatagtgaataaaagtcacaaatttaagttcaacaccctaagcaatttctcaaagccagtctacctgactaggtctatccacgcacggttcccaaccccaagggggaattaggggattagattaagagtaggtaaagacccttttgttctttcctgttgtaggggaggaagctgttctccccaccccaggtgcctttggaggttaaggctaggttaggccctgcactccacctggggacggcccctcatcacctgaagtcctctgctgtgttgactggaccctcagttcccacactgctaattactatgaaagctgctctggcctcgtcttctagcttgtgcctagttgaaagtctcacctttacaggatcatttgtaatgctggtgtacatgcagggaactcacaagctgtgtcaggtatgcaggacaaggaatgtctgctctggggggcacaggccaactatatggagggagggtcccaaattagcaaacccttcatttaaagcaaacccttgtcaagcctaccagagcagctgatacgtgtgcataacagtgaggcattgtgtcctggatcgtctgggagcccagtgtcaagtctgctggaatgcaggaagtagaacagaatcgccacaggactgttctggggccagcttcccttaactctgtagcctggcagtctgacccaaagttgccctcacccaaaggttctggctcttccctccctcacttttactttcccttcccccataagttggaggataaaatgggtatcaatgctaatatttccagggagaacatgaaaccagaggtttctttctttctctgtaatctgctatgaaagaaaataacaaatgaaaataaatgtgtactacactttgaaatattttaactaaagcctttattctatacaactgtgaaatacagatttttacccttttggcattgc

SEQ ID NO: 291341 - DNA, 1000 bp, Homo Sapiens; identical to SEQ ID NO: 223568

SEQ ID NO: 291342 - DNA, 1000 bp, Homo Sapiens
atttctttctattttgctatttgcaaatgcttgttatcttccctacatgaagtggcagtaacctttttcacatttaagctacccttctaccttttgaagtgatttgcagttactcatctgagacagcatcagtatttgactaaatcattgtttcacaactgaatagtcttgttcttttagtagcaatgaaatcctaagctcttgaggccattcacctgccaacctgaccatactgctttcaaaagtcttttctcatcagtagaatctattttggtcacttctagtcaatgaaaaatgtaaacttttaggagagaatgtttcctaggactcacccactccattcaatgttacatataaaatagtgtgatcaatcacaatgtccatctttagacagttggttaaataaattatctggtctttgaaaagaccgtgctgggcgcggtggctcttgcctgtaatcccagcactttgggaggctgaggcgggcagatcacctgagatcgggagtttgagaccaagcctgaccaatatggagaaaccctgtctctactaagaatacaaaattagctgggcatggtggtgcatgcctgtaatcccagctacttgggaggccgaggcaggagaattgcttgaacccgggaggcagaggttgcagtgaggtgagatagcgccattgcactccagcctgggcaacaagagcaaaactctgtctcaaaaaaaaaaaaaaatgatggagctccgaatgtgcttaagtggaaagatatctatgaaatatggtggttttttaaaacacaaaaattatagaatatgggatcccgtgtgtgtgtgtgtgtgtttgaatgaaaaatgcttatgtattgacagaacacttctagaatgatacccaaactcctggagtgggagtggggaatgccttctacgtacacactgttctactgtttgaattttttaatatgagcccaaattgtataatctttttttaataaaggggagaaaaatc

SEQ ID NO: 291343 - DNA, 1000 bp, Homo Sapiens
tggaaacatcagtgtatcatggcctgcaacaaaggaatccaaagatatcctggctccacacattggatcagataaggagtctgaacaaaaaaaaggccagacagtctttaaaggggcaagcagaagacagcagcaaaagtaccttggaaaaaattctaaaccaaatgagctagaatctgtatactcaggagatcgagcattcattgaaaaagaaccgttagctcacttaatgacgtatctggaagatacctcactttgtcagttccacaaagctggaggtaaacctgccagcagcccaggcacacctctctcaaaagttgactttcaaacagtgcccgaaaatccaaaacgaaagaaatatgtgaaaaccagtaagtttgtagcttttgataggattatcaatcctactaaagatttgtatgaagataaaaatatcagaattccagaaagattccaaaaagtgtctgaacagactcagcagtgtgacggtatgagaatctgtgaacaagcccctcagcaggcactgcctcaaagctttccaaagccaggcacccaggggcacacaaagaacctcctaagacctacaaaattaaatctacagaagtctaacaggaattccctacttgcactgggttccaataagaatccaagaaacaaagacattttagataagataaaatctaaagccaaggaaacaaaaagaaatgatgataagggagatcatacctaccggctcattagtgttgtcagccatcttgggaagactctaaagtcaggccattatatctgtgatgcctatgactttgagaaacagatctggttcacttacgatgatatgcgggtgttaggtatccaggaggcccagatgcaggaggataggcgttgcactgggtacatcttcttttacatgcataatgagatctttgaagagatgttgaaaagagaagagaatgcccagcttaatagcaaggaggtagaggagacccttcagaaggaataa

SEQ ID NO: 291344 - DNA, 1000 bp, Homo Sapiens; identical to SEQ ID NO: 223569

SEQ ID NO: 291345 - DNA, 1000 bp, Homo Sapiens
acccagagctcatgggggcctgtgttctgggtgttcaggtgctgctggtcctccattacccactgctccccaaggctggtgggacggggtcccggtggcaggggcaggtatctccttcccgttcctcatccacctgcccagtgctcatcgttacagcaaaccccagggggccttggccaggtcaagggttctgtgaggagaggacccaggagtgtgggggcatttggggggtgaagtggcccccgaagaatggaacccacacccatagctctccccacagctgatacggcatcctgcgagaagacctgccctcctcactgggatccccttcctgcctcctcccagggctctgccagggccttgctcagtcccttccaccaaagtcatctgaacttccgtttccccagggcctccagctgccctcagacactgatgtctgtccccaggtgctctctgcccctcatgcccctctcaccggcccagtgccccgactctccaggctttatcaaggtgctaaggcccgggtgggcagctcctcgtctcagagccctcctccggcctggtgctgcctttacaaacacctgcaggagaagggccacggaagccccaggctttagagccctcagcaggtctggggagctagagcaaaggagggacctcaggccttccgtttcttcttccagggtggggtggcctggtgttcccctagccttccaaacccaggtggcctgcccttctccccagagggaggcggcctccgcccattggtgctcatgcagactctggggctgaggtgccccggggggtgatctctggtgctcacagccgaggagccgtggctccatggccagatgacggaaacagggtctgaccaagtgccaggaagacctgtgctataaaccaccctgcctgatcctgcccctgcctgaccccgccacgccctgccgtccagcatgattaaagaatgctgtctcctcttggcaaaaaaaaaaaaaaaaaa

SEQ ID NO: 291346 - DNA, 1000 bp, Homo Sapiens
ggctggaaataagggcaaaatgctgtgaaagaagaggaaatgtttacttccaaattaggatgtgacagagaagggatagggaaatcctctctgctcattgggccttacatgatgggtgacacttggagtggcacaagttgggggaaagcgcacttgagacagaggtaatgatggggacgaagtgagaacagagacccagaaggagaatcaatggaccatatttgtaagagctttgaaagccagcctgagaattggaggatttattcataagaaagtgtagagaccctgtgtatttcagagctggatactgccattaccacagatgaaagttgcaatgatctagcagttgtgtgcaaaggcaaggcttgcttttcctgtctttcaaccctatcttgcttttcctgtctttcaaccctatcttgctttcattgtcttcatcttcctgccatactttgtgcacttattgctctccttctgagtcaggacatgtgtacaggagaccaagaacaatgagtattagaaaaaaaggagacagcaaaggtggtttgaggtagtcacctgcttacagataacagccaaagatagaattccaagttataaagcataaaaaagagccaacagaagtaactaatccgggaaaagtgaacatatgggccctttaaagactacaagatttgctagataaactggaaatggagaagttattgcagacagtcatgaaccacaaatcactgtgattaaaattttcttctgatcgtaatccacgaatgcattcattttttggacattgcttacttatcttttaaatgtttcttttattacaaagcctattttgagtagcttttaaaactgaatttcctttaattggtttgaagcctagagatgaatttcgttttcaaatatctggtgggatggtaatggggattagagaactgacatgagaaaagaggagctgttttggtattaaacgaataaaatcttaagcaaaaaaaaaaaaaaa

SEQ ID NO: 291347 - DNA, 1000 bp, Homo Sapiens
tcttcctattcattaacatggtatatctcttcactttaagtcttttgtatgtttctcagaactatttttgtggttttcagtaaagtgttcttgcacatccttcaatagatttattcttagacgttttatatttgtttatggctagtatatacagattctgttgctacaaaactatgttgaccttgttatccagtgagaggctttgtgacattcatttaaattgtaataatttgcagattatttttgtataatcatgtcctctgtgaatgacagttttatttcttcctttcttaatctttatgccttatttagctcttgccaaactgcagtggctgagcaattggacaagataaagaaataaaagtgatccagatcataaagaaagaagtaaaactatatctgcacatgacataatcttgtctatggaaaatcctaaggaatccacacacaaaaaaactactagagctaataagtttggcaaggttgcaagatataaaattggtatacaaattgcagtggctaggacctccagcagaatgctgactataagtagtgatagtgggtattcttgtctcatcctcaatctcaggggtggtgggtgtggcatgtggagagttgtcaatattcaccatgaagtttgatggttgttataggatttttaatgtactcattaacatatattctcaagctgttaaaaagatttttttaattacaaataaggttaaatttctctcaaatacttactctgcaccttttgaaataattttatttttctcctttattctttggatgtgatgacttatactaattgactgttgaatgtcaaaccaaacttaacattcttgtaatagaaaccagcagggtgtgtacacttttgtgtgtgtgcgcaggtttatacacataaacacaacaatacttggacttatttatttaaaatttagatttattagagggagcatggccataaaataaaataaaataaaatttagatttaagtcga

SEQ ID NO: 291348 - DNA, 1000 bp, Homo Sapiens
gctggctcccagcatgtcctcgctcaactccttggcctcttcttgctttgacctggcagatatcagcctcaacattgagtatgcacctctctgcttaatcttttctaaaatcgcctgtatgaaaaatacctcgctggatggaaaagtagatatgaacttacatttctgtgcaagttgttttttcacaaaatatcttcctaagaggcagcatggtgtggtagaaagaacacaggacaagggagagagagccaaacaggctgtttatggctctagctgcgtactgactataaaatagatgctggactctggttgaggtggggacctcaggcgacggcagctgggtgagattcagctcacagtgcgctatgtgtgtctgcggcgctgcctcagcgtgctaatcaatggctgcagaaacctaacaccatgtaccagcagtggagctgatccctacgtccgtgtctacttgttgccagaaaggaagtgggcatgtcgtaagaagacttcagtgaagcggaagaccttggaacccctgtttgatgagacatttgaattttttgttcccatggaagaagtaaagaagaggtcactagatgttgcagtgaaaaatagtaggccacttggctcacacagaagaaaggagttaggaaaagtactgattgacttatcaaaagaagatctgattaagggcttttcacaatggtatgagctgactccaaatggacagcccagaagctgatgatgagaattcttatcactcacctttatattaaaatgtatatatatgtatatattttttcctttggatcacttacatccaatatatgtatattttgtcatttaaatcagaacaaccacttgaaattatatacatacaattcttgtgtggaatttaactccatgactgaatagcataaggaagaggttatttaaaagcaagaactaaaaaaaaaaaaaaaaaaaaaaaaaaaaaaaaaaaaaaaaaaagaaaaaaaaaaaaaaa

SEQ ID NO: 291349 - DNA, 1000 bp, Homo Sapiens
cggcgcgccgcgaggccgcctcacccgggaccccggggccacccccgccgccccccgccgcttctggcccgggccccggcgccgccgcggcgccccacctgctggccgccagcatcctggccgacctgcgcggcggacccggagccgccccggggggcgcctcgcccgcctcctcctcctcagccgcctcgtccccgtcctcgggccgcgcccccggcgccgcgccctccgccgccgccaagagccaccgctgtcccttcccggactgcgccaaagcctactacaagtcctcgcacctaaagtcgcacctgcggacgcacacaggggaacgcccttttgcttgtgactggcagggctgcgacaagaagttcgcccgctccgacgagctggcccgccaccaccggacgcacacgggcgagaagcgcttctcctgccctctgtgctccaagcgcttcacccgcagtgaccacctggccaagcacgcccgccgccaccccggcttccacccggacctgctccggcgccctggtgcccgcagtacctcccccagcgactcgctgccctgcagcctggccgggagccctgcgcccagccccgcgcccagcccagcccccgcaggcctgtagggccctcgtgcagcccaccctgaccgccaggatgcttctgccatccaggggtgtagtgaggacccacggggagcctgggccccttccagccgtgggcaaaccctgaagacacccctgcccccctccagagagtgaggagggggcctgagactggacctgggtctgcctgacctcagagtgtccaggggcttggagagacctgcgcccacccctccactctcccaggagtcgctgatcactgggacctggttccagccgtttgcaggggaggcggctccgagaggcgtgtgctttccgtgggtggcgcccctcccccgccctgcctggcctcatccttgtatttaattaattaaacaagcccctttttaaaccct

SEQ ID NO: 291350 - DNA, 1000 bp, Homo Sapiens; identical to SEQ ID NO: 118209

SEQ ID NO: 291351 - DNA, 1000 bp, Homo Sapiens; identical to SEQ ID NO: 118210

SEQ ID NO: 291352 - DNA, 1000 bp, Homo Sapiens; identical to SEQ ID NO: 223572

SEQ ID NO: 291353 - DNA, 1000 bp, Homo Sapiens; identical to SEQ ID NO: 118211

SEQ ID NO: 291354 - DNA, 1000 bp, Homo Sapiens; identical to SEQ ID NO: 223573

SEQ ID NO: 291355 - DNA, 1000 bp, Homo Sapiens
ctgcagttccttcaggggactggctgtccttctgagtcctgggtttcccgacccctacccagccccaagcaggagccacctgctgttgactttcgaatcccaggccagatagctgaggagacctctgagttcctggagcagcaactcaccagcgacatcatcatgtcagacagctacctccgtcctgccgcctcaccccggctggagtcatgatgggccgctggacactcggagggatatggggctggggccagttatgattgcaaggaccaccttgtgggatcaccttttcccagctggctagggctgaggctggggtctctgcacacagcttttgcttagtgtttcctgggtcaggaacagagccaacaggatgaacgtgtgcaaaagccttggacttggctgtgatctttgactgctaggggagggaacctgggtatggtgagacggtgacgagagaaaagggtcacaaaggactggcctccctgatctctctcctcatggcagcgacccacctccagtcccctggacaatcgggtacaagagacttaaggttgggcatgggaagggtggggtttccatgatccattaaatgccttcctactcccattcatcgctctcaaaattagcttcagtgacaaagacttaaatctctctcctatctgcagcactgggttggagagagggcacgggagttggtcttggctgttcattgattgagactgtaggaactgtgttggttggtattggtggtggtattttcaacaaacagggaataactgcaaactggacaggacacccatctgggaccacctgtccatcctacttccctcaattgaatcaggtaacactaacggatcaaggcagggccagagggtggtgtggtctctatttgaacaaattcctggctcactgagcatcaaaaggggaaatgggctggtgggagtgggatagtctcccatttaagcagctaataaataatttttatgataaaaggtta

SEQ ID NO: 291356 - DNA, 1000 bp, Homo Sapiens; identical to SEQ ID NO: 118212

SEQ ID NO: 291357 - DNA, 1000 bp, Homo Sapiens
gcaatcaaaggcaaaaataatacatggaattgtatgattttatctaaagtaaaattctagactgctttcacttatttcatttcctccccatacaaatttgatgagcaggtacacactttctttaaaacattccaagtgtatatagattcagtgcttatttctcagctttttctttcttaagttcatctctgtcacctagcttttatttttaatactcaatttctgaggcttaggagaatacttgttaccttaagcgtttttttgttttttttttgttgttgttttgtttttttttagtgtatttgctattgatactttgctattgatacctttacttgccaagatttatttaaagttggccaagataccaagaaggtggcttgcaggggcatctttggcttctcataattttaaacagtcattgctttcaagatcatcctaaacaagaattaatagagagaaaaaaatctataaagcatgtgttgaaaatcctcaggctcatgataacttacgggataacaatagtaggtaacaccgagtgcttacaattcagtgggcacggtcaaagtgctttttgtaagttctatttaatacttgcgacaaccctgagatagtaagtattattattgttctcattttatagatgagaaagctaacacatagggaaattaggtaactttccccaggtaactcagtaaacagtggagctggaattcaaacatgtacggtctgacttcttgagcccatactcaataatcatgccatcctgcctttccatggaataactgatggatggttagaaatgttaaaaacaaagcaaatgcaaacatctctgcttctgctcctctactaagcccagttaacttttgattttatatgtactaagtatacatttttattaatttatgtgagctgagtgtttttattaattactttttggctattaatgtcaattattttggtgatcaatcctagttatccaaggagtcacatcactcgt

SEQ ID NO: 291358 - DNA, 1000 bp, Homo Sapiens; identical to SEQ ID NO: 118213

SEQ ID NO: 291359 - DNA, 1000 bp, Homo Sapiens
tcagaccgtggcaaagctccagatccccaagcaggcaactttgttcttgtttttcctttcaatgaagcaactctcggagcttccaggaatggattaaatgtcaaaagaataatccaagagctccagaaactaatgaataagcaacattcctaagtggtaaaaaatcaaatcaagaaaaagtgacatggatttttaaaaaccaaggatcctgtcctagagaaagcaatagttcaagtccctacctgtgccaccagcatgttaactatgacattgggactgaagatgtggccatatgtataaatataacagctctgacaaagcacaatatgttcaagtggtgattaaactacattacatcccatgtttatttgctcaggtgtcttgaaagaattctacaaataccacacagcctcccaccgagtcttgctctgtcgccaggctggagtgcagtggcgccatctcggctcactgcaacttccgcctcataggttcaagtcattctcctgcctcagcctcctgagtagctgggactacagcaaaaatctgcaattggcatttcccatgtgatgctgcgtgttgagggctcatctgcttctcgtccaggacgacatttccagcttcatctttgatcttaaccctcccggaggcatacttggtttcctgacagccgctgcaatacacagtcttgacggtgccatccgggtactccctcctcttgaaccgggctgtgtggatttctttctgcccgttgctgagcacaatggttttgtcgccgttcctgagaggagaaacacatggaaataaggtctcttcctgtccatccttgagatgttccaccgtcccgtcgggaaacacgatttctttggagccattggggtagaatttttctgcagaatgcagtttttcagtatatgttacattgaatctgtttagaaacatgttctatgcaaataatctataaaatattcatgagatttaaaaaagaaaaaaaaaaaaaaaa

SEQ ID NO: 291360 - DNA, 1000 bp, Homo Sapiens; identical to SEQ ID NO: 118214

SEQ ID NO: 291361 - DNA, 1000 bp, Homo Sapiens
tttttagtagagatggggtttcaccatgttggccaggctggtcttgaactcctgaccctgtgatccgaccaccttggcctcccaaagtgctgggattacaggtgtgagtcaccacacctggctgcatagtgttttaaatgtttgtgtgaagaatgagtttgtggaacaatttgatttgctgtggcctctatgcctaatgagctagtgtttctggcagctctctctacccaactttgcacttgtagttttgagtctttgtctctctggaatatgaacaggtttataaaacattccatggtgaacaattctgtcggctgcattatagccatgagtgaatagacagcattggctggtccaagctctgttattgagtatacaaggaactgatttttcttatgttagcactaagggcaaaaaccaatatttataatgtaagcactatccaggtaaaacactggcccaagatttggtaaagagatttcattgcaatgtaataactacagttttttacaaattggaacagctttggtgtgtcgtaatcaagggttttttttgtttgtttgtttcaaataagccatctgattgtggtgactggggcccatgtccaagacaattcctggcatattctgtcaccctcccgtggggcgatcactgtgtggggaccccattccccagttaaagtgtgtctctgtaccttacaacagcgattcaggacccaagtgtgaacaacactcagcccgccctctggagcgtgtgctgtctttagggccctacccaaagtcactgtaacagttaagtgtgtcattaacctttctgtctctttgcgccataaaaaaatgctcaaagttttagatgtagccactgtatgttgtacaaacgttggcgacatgtaaaataaaagtcataaaatgctaaaaaaaaaaaaaaaaaaaaaaaaaaaaaaaaaaaaaaaaaaaaaaaaaaaaaaaaaaaaaaaaaaaaaaaaaaaaaaaaaaaaaaa

SEQ ID NO: 291362 - DNA, 1000 bp, Homo Sapiens
gaccggcctgatttttttaaagacgaccagctcttcattgtgctggaatttgagtttggagggattgacttagagcaaatgcgaaccaagttgtcttccttggctactgcaaagagcattctacaccagctcacagcctccctcgcagtggcagaggcatcactgcgctttgagcaccgagacttacactgggggaacgtgctcttaaagaaaaccagcctcaaaaaactccactacaccctcaatgggaagagcagcactatccccagctgtgggttgcaagtgagcatcattgactacaccctgtcgcgcttggaacgggatgggattgtggttttctgtgacgtttccatggatgaggacctgtttaccggtgacggtgactaccagtttgacatctacaggctcatgaagaaggagaataacaaccgctggggtgaatatcacccttatagtaatgtgctctggttacattacctgacagacaagatgctgaaacaaatgaccttcaagactaaatgtaacactcctgccatgaagcaaattaagagaaaaatccaggagttccacaggacaatgctgaacttcagctctgccactgacttgctctgccagcacagtctgtttaagtaagctaaatgtatcttactgccccgaaatgagaggagactggtcttgaagcctctggtgctgtttcaacctccatccccacaggagggtggaactcccattctcacaggtttccagtcagcttttcaaacaagaattttgtttccaaatggaaactgaaatatttgttgaaatgtttaaatttgctgataacaaatgttctgaaagaagtaaactagccgggcacagtggcgtgcgcctgtagtcccagctactcgggaggctgaggcaggaggatcgcttgagcccaagagttcatatctagcctggtcaacatagcaagacccctgtctctatttttttaaataaataaactacatgtgaaaacaaa

SEQ ID NO: 291363 - DNA, 1000 bp, Homo Sapiens
gcatctaagattggagaggttgatgtcgagcaacatactttggccaaatacctgatggaactaactatgttggactatgacatggtgcactttcctccttctcaaattgcagcaggagctttttgcttagcactgaaaattctggataatggtgaatggacaccaactctacaacattacctgtcatatactgaagaatctcttcttccagttatgcagcacctggctaagaatgtagtcatggtaaatcaaggacttacaaagcacatgactgtcaagaacaagtatgccacatcgaagcatgctaagatcagcactctaccacagctgaattctgcactagttcaagatttagccaaggctgtggcaaaggtgtaacttgtaaacttgagttggagtactatatttacaaataaaattggcaccatgtgccatctgtacatattactgttgcatttacttttaataaagcttgtggccccttttacttttttatagcttaactaatttgaatgtggttacttcctactgtagggtagcggaaaagttgtcttaaaaggtatggtggggatatttttaaaaactccttttggtttacctggggatccaattgatgtatatgtttatatactgggttcttgttttatatacctggcttttactttattaatatgagttactgaaggtgatggaggtatttgaaaattttacttccataggacatactgcatgtaagccaagtcatggagaatctgctgcatagctctattttaaagtaaaagtctaccaccgaatccctagtccccctgttttctgtttcttcttgtgattgctgccataattctaagttatttacttttaccactatttaagttatcaactttagctagtatcttcaaactttcactttgaaaaatgagaattttatattctaagccagttttcattttggttttgtgttttggttaataaaacaatactcaaatacaaaaaaaaaaaa

SEQ ID NO: 291364 - DNA, 1000 bp, Homo Sapiens
agaagattttccacgtcattgtggccccttgttatgacaagaagctggaggctcttcaggaaagccttccccctgctttgcatggctcccggggcgctgactgcgtgttaacatcagaaattagccaggcgtggtggtgcacacctgtgatcacagctactcgggaggctgcggcaagagaatcacttgaacccgggaggcagaggttacagcgagacaagattgcaccactggactccagcctgggcggcggaggtgaaattgctcaaataatggagcaaggtgacctctcagtgagagatgctgccgtcgacactctgtttggagacttgaaggaggacaaagtgacgcgtcatgatggagccagctcagacgggcacctggcacacatcttcagacatgcggccaaggagctgttcaacgaggatgtggaggaggtcacttaccgagccctgagaaacaaagacttccaagaggtcacccttgagaagaacggagaggtggtgttacgctttgctgcagcctatggctttcgaaacatccagaacatgatcctgaagcttaagaagggcaagttcccattccactttgtggaggtcctcgcctgtgctggaggatgcttaaatggcagaggccaagcccagactccagacggacatgcggataaggccctgctgcggcagatggaaggcatttacgctgacatccctgtgcggcgtccggagtccagtgcacacgtgcaggagctgtaccaggagtggctggaggggatcaactcccccaaggcccgagaggtgctgcataccacgtaccagagccaggagcgtggcacacacagcctggacatcaagtggtgaagtcaggccagggccttccagctgctcttggggccagagccaagagcctctcagtagagggaggggctgccctgagtggagtattaaagacacttaagaaaaccgctcaaaaaaaaaaaaaaaaaaaaaaaaaaaaaaaaaaa

SEQ ID NO: 291365 - DNA, 1000 bp, Homo Sapiens; identical to SEQ ID NO: 285665

SEQ ID NO: 291366 - DNA, 1000 bp, Homo Sapiens
aaaggactacagggtcctttgagaaacatggcccttgatcaagtttacaactctttgagaagacatccctaatggaaatactgaatggcagatctattactgtggtaccatgtagtgtgtaataaatcttgaagtccagaaagcaagtatatttgctgtttagagctatacttaaggtatagagattcttttccacctgtggtgtgtaaaatcagtattgtgtttaattttgcaggtttttcaaggatcaactaatgtgcaaatacagtggtgatatattgatattacattttaataatgcttttgtatggcactttatagttttcagacaccttttgtaacagccctgtgagacagacaatattatccttattgtacagatgggggggctctggaggctctgaaaagtttttggtgatattcccctaagtttataccacaaaatgatggagccagaatttagttgcagaacttctgactccaagtccagagttctttactagacatctggtttcttactagctttttgctagctttttattttacagtgaaaagtatggaagcaaatcctgataattttggcttattatcaaatatcatttattttttattgcagagacccagcagatgtaactctcattgtagccatcccaaagaaaacccttctttgccctttgcagtgccacttatttaggtaactgaagtgtatttccagtacaatttgattttgaactaagatttgatatagagttgtaattgcttacataactctttgaaaatgtatcatccctgggttctcaggtgaaagaggcaattcaaaagtaaaaaagaatattcgaatacaataaataccctctgttctcacacaaatgctgtttcttagctaacttgctttgacaacctactgatgtaacttctttattaatgtgaaatatttatattttgaaataaaattactagtgttgaatgaatcatgtggtaaaaaaaaaaaaaaaaaaaa

SEQ ID NO: 291367 - DNA, 1000 bp, Homo Sapiens
cctgcactgaaatcctgatgcgccaccccgtctaccaccgcaattgcccgctctgccgccggggcatcctgcagaccctcaatgtctacctctgaagcctccttccctgcctgcccacccctccatgctccacgcaggcactcacgctaggacagcattaacacctcatctccgggtcctggtctgaatcccctcctacccctgtggccatcctgccatacatccaggacattgagttggaagactatgatctgggtgggggcaggataacatggcttctctttacccagtgggtcccttcgatgctgagggtggtgagtatgtcactatgcaagggccctgagactatttgctgtgggctctcctccagcctgcccagggcccacccagatgcctctggggttacccctgtctgcttctggtttttctgttggagatctataggtccttttcctgcctccttcacatttcctccccagcttttgcggccacaacacatcagtgtcatttgggtgttttggcaactcaggggccttcggatgatcttaaacctttgtgttcagccagagcccctgtgccctggtaggcgttggggttagtatctctcgggtgccctcagagccacctctgcctgtgatcgtctgatgaggctccctcccaacctgatccaaaagccagtctcaggagtttacccctgggatgggggatgcatctgcacctgactttggggccacgtgccctgtggcaccccagctcactgggagtctcaggagggataaccggatttctgctctttcccctgtcactcccacatcacacagaaaaatggcattcctctctgtctctccctggcatggagagggcagactgtgcacatttcactagggtccaaatacagaagggcccagggcccaggggcttgcagcttcgtgaggggtctctggcccagtttccaatgaataaagttctcttgacagctctgaaaaaaaaaaaaaaaaaa

SEQ ID NO: 291368 - DNA, 1000 bp, Homo Sapiens; identical to SEQ ID NO: 223578

SEQ ID NO: 291369 - DNA, 1000 bp, Homo Sapiens; identical to SEQ ID NO: 118215

SEQ ID NO: 291370 - DNA, 1000 bp, Homo Sapiens; identical to SEQ ID NO: 223579

SEQ ID NO: 291371 - DNA, 1000 bp, Homo Sapiens; identical to SEQ ID NO: 223580

SEQ ID NO: 291372 - DNA, 1000 bp, Homo Sapiens; identical to SEQ ID NO: 118217

SEQ ID NO: 291373 - DNA, 1000 bp, Homo Sapiens; identical to SEQ ID NO: 118218

SEQ ID NO: 291374 - DNA, 1000 bp, Homo Sapiens; identical to SEQ ID NO: 118220

SEQ ID NO: 291375 - DNA, 1000 bp, Homo Sapiens; identical to SEQ ID NO: 118221

SEQ ID NO: 291376 - DNA, 1000 bp, Homo Sapiens
ataatcagagggaagaggctgcagataatcagagggcaggggccccagctgaggagggggcagaggctgcagataaccagagggaagaggctgcagataatcagagggcagaggccccagctgaccagaggtcacagggcacagataaccacagggaagaggctgcagataatcagagggcggaggccccagctgaccaggggtcagaggttacagataatcaaagggaagaggccgtacatgaccagagggaaagggccccagctgtccagggtgcagataatcagagggcacaggcccgggctggccagagggcagaggctgcacataatcagagggcaggggccccaggtatccaggaagctgaagtctcagctgcccaagggaccacaggaacagctccaggagccagggcccggaaacaggtcaagacagtgaggttccagacccctggacgcttttcgtggttttgcaagcgccggagagccttctggcacactccccggttgccaaccctgcccaagagagtccccagggcaggagaggtcaggaacctcagggtgctgagggccgaggccagagcagaagctgagcagggagagcaagaagaccagctgtgaggtgagggctagagacagcccacgggccctccctccaagtgtgggagggagagatgctctgcctctgaacttcaaagtggaggtggagtgctggccacgtctccacctaacaaccctctttattctcttgttaaagttttgttcatgctttgatttttttttaaattttttagagacagggtctcactctgttgcccaggctggagtgcagtggcatgatcataactcactgcagcctcaaacttctggcctcaagtgatcctcctgcctcggcctcccaaaatgctgggattacagatgtgagccaccacacacaccatctgattaaaaaaaaaaaatactgattccctgtagcaacccaaaaaaaaaaaaaaaaaaaa

SEQ ID NO: 291377 - DNA, 1000 bp, Homo Sapiens; identical to SEQ ID NO: 223581

SEQ ID NO: 291378 - DNA, 1000 bp, Homo Sapiens; identical to SEQ ID NO: 223582

SEQ ID NO: 291379 - DNA, 1000 bp, Homo Sapiens; identical to SEQ ID NO: 223583

SEQ ID NO: 291380 - DNA, 1000 bp, Homo Sapiens
gagcagcagagcgggacctcgtctctaagaatagaaagaaagaaagagaaacggtgtcctccgcacagccggtcagaactgtgtgactcacttgaggcaggaccgagagtgacatccagttgcacctttctcacctactttgggacctttgggggtgagttcccctttgtcctctcgtggaaacagcacacagcaagcaaccacaaaaccagagcggaaggagggacttcccaccggcatccggccccagtgccatgttttatcatctggaacggttgtgaagctttgtgtgacttgctcaggatcagcagtcaccatggtctaatcccaagagggactcgtcacccagagacctcaaaaggccccaggcctactgtggttttttctgagaggctcccagaaccaagtggcacgttggtttcctgtgcgtctgtgtctttgtgcctgtatctcgctgggggacttcacaggaagcaggatttgggcattcctgaagctcccagctggacaccactcctgagcgccacatcccatgatcacttcaaccacaggcctttgactttgccacatggcaaggcacccagcagaagatgaggatgacgggtgatgctagatggatgtgtacctggtggatggcccacgcacgaagactcaagaccctcaggactggccatataatctgcaaggtccagtatgaaataagaataagcagcccacacaactgggcatagtggttcatgcctgtaatcccagcactttgggaggctgaggagggtggatcacttgaggccaggaattcgagaccagcctggccaacatggcgaaaacccatctctactaaaaatacaaaaattagttgggcatggtggcacacacctgtaatcccagctactcggaggctgaggcacaagaattgcttgaacctgggaggcggaggttgcagtgagctgagataacgccactgcactccagtgtaggcaacagagtgagaccctgtctc

SEQ ID NO: 291381 - DNA, 1000 bp, Homo Sapiens
agctgctggggcgggttttattttattttatttttatatttaagaaatgaaaatacgggtatttttaaagattctccaaaaagtccagaagccttgagagctggcatcaatcagcccaagacccccaggggattcatgggaaatgtcgtattttagagtcctacagaatatttctggcctcaaggaactggatgaagagactggacaaagtccccaggatgggcatcccccaagtcactacagcatctggagcccctaggagatactcagggaagcaaatccttgtttgggctggcaagcaaatccgacacgacgaggtccacaaactgtttctgcatcccagggctctgacgaaggcgttaagaaacagatgctgttcccgcgtaggctcccaggggccccagggaggtccaggtggactgcctctctcattcccaggagctgtcctgggactttgggatttcttctcagctttctccacctttcagtttctcagttgtttcagaaacatagcaatgacataaaaactgctatggagagaaagctaacatggtcccatgccttccaggcagccctgctgaaggatctaagttggccctgttcctgcaaatcatcaacgtgcctggactcgccagctaaaagcctgggccttccccagccttttttctggggcacctattcctctgccagtcctgctcccctcaccttccttgggcccgtcagagtcttttgtggtgctgtgcttctcagaggcaggatccaagcagatcagcccagcctagcccagctcaggcaggccatggccgctcaagggaaagactgccccagaagagcaagctggagaggctgggcaggggctgatggggctgggtacactggggaatgttagcaagactgggaaggaggccacattcctgtctgcagcagcccccagcgatggtcttcagcaataaaagttgtgtgacctaaaaaaaaaaaaaaaaaaaaaaaaaaaaaaaaa

SEQ ID NO: 291382 - DNA, 1000 bp, Homo Sapiens
gtgatgtcggaaacacgcaaaacaaaacgaaaaaagatttctcagtatacacaactgaatgatgatacttacaatttttagcaggtagctttttaatgtttacagaaattttaatttttttctattttgaaatttgaggcttgtttacattgcttagataatttagaatttttaactaatgtcaaaactacagtgtcaaacattctaggttgtagttactttcagagtagatacagggttttagatcattacagtttaagttttctgaccaattaaaaaaacatagagaacaaaagcatatttgaccaagcaacaagcttataattaatttttattagttgattgattaatgatgtattgccttttgcccatatataccctgtgtatctatacttggaagtgtttaaggttgccattggttgaaaacataagtgtctctggccatcaaagtgatcttgtttacagcagtgcttttgtgaaacaattatttatttgctgaaagagctcttctgaactgtgtccttttaatttttgcttagaatagaatggaacaagtttaaatttcaaggaaatatgaaggcacttcctttttttctaagaaggaagttgctagatgattccttcatcacacttacttaaagtactgagaagagtatctgtaaataaaagggttccaaccttttaaaaaagaaggaaaaaactttttggtgctccagtgtagggctatctttttaaaaaatgtcaacaaagggaaaataaactatcagcttggatggtcacttgaatagaagatggttatacacagtgttattgttaaaatttttttaccttttggttggtttgcatcttttttccatattgttaattttataccaaaatgttaaatatttgtattacttgaattttgctcttgtatggcaaaataattagtgagtttaaaaaaaatctatagtttccaataaacaactgaaaaattatcatgaaaaaaaaaaaaaaaaaa

SEQ ID NO: 291383 - DNA, 1000 bp, Homo Sapiens; identical to SEQ ID NO: 223585

SEQ ID NO: 291384 - DNA, 1000 bp, Homo Sapiens
tgccgcccctggaacctcttcctagcgacctgccatcatgggactttgcccagcctgctttgtggaggtcgtcccattcggttcctgacaccgccttttccctttctctaaaaaaatcattcccagcccttgaaaacctgggcccagcacactccagcaacactctcttctgcccagccccgccgggatatctgaggcagggctggaccaccccagagggcagcagggcctttacccagtggcctgttggctagcctgggcctccctggagagggttgacagtggaagggaacaggaggggcatttggcctgagacccctgcttttgggagaggctagcagggtggttcctgcccagcatgcccagctcctccctgggtgactcggagtctttcccatgtcagagcccccaaatgggggtagcaaggagcacctttctggaaccccctatagcatccaagtttctttctgggctctcttgccttttcccccctttcacagatggcacccctgggcatctgtccttgcctaggtgattttggaggttggtgccttcctgggaactagccaccagcttatctgcttcccttcccctggcatcacttcccataggcctggggtttctagactggggcctggccacccctttccccactccacgagtgagtcggcctccagagaagactggcacaattccaactagagtcaacccatgctgccctctgcccttcccactcagatctagatcctgctttcatttctggctagtgaagtagacttttgtgtttttgaggtttattagcaggtctgctcaggaaccaaactaatgagtagctttatattgggccaccccaatatatggctttgggggctgaaaaagcagatgtagaccccctccctcggatccttattggtgtgccctttagcactccgcagactctgcggggtgaacaggagtgatgataaaatttttcattctaaaaaaaaaaaaaaaaaaaaaa

SEQ ID NO: 291385 - DNA, 1000 bp, Homo Sapiens; identical to SEQ ID NO: 118222

SEQ ID NO: 291386 - DNA, 1000 bp, Homo Sapiens
gattcttacggtgaccgggcttcagcaagagcccgtcgggaggcccgggaggcccgcctagccaccctgaccagccgtgtagaagaagacagcaacagagattataaaaaactctatgagagtgctctgactgaaaaccaaaaactgaaaacaaaacttcaggaagcccagctagagctagcagatataaagtccaagcttgagaaggtggcccagcagaaacaagaaaagacctctgaccgatcatcagtgctggagatggagaaacgggagaggcgagccttggagcgcaaaatgtcagaaatggaggaagaaatgaaggtgttaacagaactgaaatccgacaaccagaggctgaaagatgaaaatggtgccctcatcagagtcatcagcaaactgtccaagtaggctaggctccagatttatgaggaaagaaagggacagcatttgctgcccccacccctcttttccagtccttgccttccaaccaaaagaaatggatgttttggtggaaggacacttctttctatcaccctcttcagtcacctctatacactctacattttctctgcactttcaatgccctgttcttccaaacccctatcccaagttttatgacagttttaattgaagcatgattgtggtaattcgagccatctggagaatgctctggggagtacaccaggctcagctgtggacccctcaacttcctgctgctcagctactttgtccacattggatttggtccaaacatgtaagacttctaccctaatcagtatccttcagctttttacattaacccagtgtcctctgatataggtgagtcttgtggtagccactccaggatcctgattggggtgccaagagaaacagcaggatgttgaattgatcatcagatgccctctggaatggttagcatccaaggtgacagtgactgcattgaggcgctctattcttcttcacctctcaggaactgacttttattttttctatcaacacc

SEQ ID NO: 291387 - DNA, 1000 bp, Homo Sapiens; identical to SEQ ID NO: 221163

SEQ ID NO: 291388 - DNA, 1000 bp, Homo Sapiens
caagtcccccccgcgacccacccgcggagtggggggccccctccgccacaaggaagcacaaccagctcgccctccccctacccggggccgcaggacgctgagacggtttgggggtgggtgggcgggaggactttgctatggatttgaggttgaccttatgcgcgtaggttttggttttttttgcagttttggtttcttttgcggttttctaaccaattgcacaactccgttctcggggtggcggcaggcaggggaggcttggacgccggtggggaatggggggccacagctgcagacctaagccctcccccacccctggaaaggtccctccccaacccaggcccctggcgtgtgtgggtgtgcgtgcgtgtgcgtgccgtgttcgtgtgcaaggggccggggaggtgggcgtgtgtgtgcgtgccagcgaaggctgctgtgggcgtgtgtgtcaagtgggccacgcgtgcagggtgtgtgtccacgagcgacgatcgtggtggccccagcggcctgggcgttggctgagccgacgctggggcttccagaaggcccgggggtctccgaggtgccggttaggagtttgaaccccccccactctgcagagggaagcggggacaatgccggggtttcaggcaggagacacgaggagggcctgcccggaagtcacatcggcagcagctgtctaaagggcttgggggcctggggggcggcgaaggtgggtggggcccctctgtaaatacggccccagggtggtgagagagtcccatgccacccgtccccttgtgacctcccccctctgacctccagctgaccatgcatgccacgtggctggctgggtcctctgccctctctggagtttgcctcccccagccccctccccatcaataaaactctgtttacaaccaccggcaaaaaaaaaaaaaaaaaaaaaaaaaaaaaaaaaaaaaaaaaaaaaaaaaaaaaaaaaaaaaaaaaaaaaaaaaaaaaaaaaaaaaaa

SEQ ID NO: 291389 - DNA, 791 bp, Homo Sapiens; identical to SEQ ID NO: 118223

SEQ ID NO: 291390 - DNA, 1000 bp, Homo Sapiens
cctgggtgaaaggtgtgaaccccaaaggcaactctaccaaccccagcaactgggactttggcagcagtttcttctttgcaggcacagttgtcactaccataggatatgggaacctggcacccagcacagaggcaggtcaggtcttctgtgtcttctatgccctgttgggcatcccgcttaacgtgatcttcctcaaccacctgggcacagggctgcgtgcccatctggccgccattgaaagatgggaggaccgtcccaggcgctcccaggtactgcaagtcctgggcctggctctgttcctgaccctggggacgctggtcattctcatcttcccacccatggtcttcagccatgtggagggctggagcttcagcgagggcttctactttgctttcatcactctcagcaccattggctttggggactatgttgttggcacagaccccagcaagcattatatctcagtgtatcggagcctggcagccatctggatcctcctgggcctggcgtggctggcgctgatcctcccactgggccccctgcttctgcacagatgctgccagctctggctgctcagtctgaggcaaggctgtggagccaaggcggctccaggcaggagacccaggagaggctctacagcagcaagaggagtccaagtcacaccccaggacttccccatatccaagaaaggactgggaagctgaggacccacggactcttcacacagcctagacgcttcctccactccaggtagagggatttcgggggccttctcagaagcaaggagtggacaagcctcttggttaaggctcctcttacctcccaagctcatggacaagtggcaatcagctggggtccctcttttggggtacaaaggaaaggacagaggtgtgggagacccaaggtggtcttgagattgacagacagcaagtccttggagatagcccccgagtccaagaacttaggcaggggccccaagacaataaagttggtctctact

SEQ ID NO: 291391 - DNA, 941 bp, Homo Sapiens
agtcggcgccaaaatcaaacgcgtcctggcctgtcccgcccctctccccaagcgcgggcccggccagcggaagcccctgcgcccgcgccatgtcaaagaaaaaaggactgagtgcagaagaaaagagaactcgcatgatggaaatattttctgaaacaaaagatgtatttcaattaaaagacttggagaagattgctcccaaagagaaaggcattactgctatgtcagtaaaagaagtccttcaaagcttagttgatgatggtatggttgactgtgagaggatcggaacttctaattattattgggcttttccaagtaaagctcttcatgcaaggaaacataagttggaggttctggaatctcagttgtctgagggaagtcaaaagcatgcaagcctacagaaaagcattgagaaagctaaaattggccgatgtgaaacggaagagcgaaccaggctagcaaaagagctttcttcacttcgagaccaaagggaacagctaaaggcagaagtagaaaaatacaaagactgtgatccgcaagttgtggaagaaatacgccaagcaaataaagtagccaaagaagctgctaacagatggactgataacatattcgcaataaaatcttgggccaaaagaaaatttgggtttgaagaaaataaaattgatagaacttttggaattccagaagactttgactacatagactaaaatattccatggtggtgaaggatgtacaagcttgtgaatatgtaaattttaaactattatctaactaagtgtactgaattgtcgtttgcctgtaactgtgtttatcattttattaatgttaaataaagtgtaaaatgcagatgttcttcaccccttttggtagaacaaaagcaggatgataaccatatccccccagtgctcatcaaagtaggacaataaaaatccatccatctc

SEQ ID NO: 291392 - DNA, 1000 bp, Homo Sapiens
cccagcgccagctccacgctaaggagggtgctggagtgagtcccccacttatcactcaggtccactggtgtgtcctccccttccgagtgctgctggtactcacctcacatcgaggaatacagatgtacgagtccaatggctacaccatggtctactggcatgcactggactctggagatgcctccccagtacaggctgtgtttgcccggggaattgctgccagtggccacttcatctgtgtgggaacgtggtcaggccgggtgctggtgtttgacatcccagcaaagggtcccaacattgtactgagcgaggagctggctgggcaccagatgccaatcacagacattgccaccgagcctgcccagggacaggattgtgtggctgacatggtgacggcagatgactcaggcttgctgtgtgtctggcggtcagggccagaattcacattattgacccgcattccaggatttggagttccgtgcccctctgtgcagctgtggcaggggatcatagcagcaggctatgggaacggacaagtgcatctatatgaggccactacaggaaatctacatgtccagatcaatgcccatgcccgggccatctgcgccctggacctggcttctgaggtgggcaagctactctctgcaggtgaggacacctttgtgcatatctggaagctgagcagaaacccagagagtggctacattgaggtggaacactgtcatggtgagtgtgtcgccgacacccagctgtgtggtgctcgattttgtgattcctcaggcaactcctttgctgtgactggctatgaccttgcggagatccggagattcagcagtgtgtgagaagagcagccttcctttgtccctgtggtattcataaagtacccgctccacccaaaaaaaaaaaaaaaaaaaaaaaaaaaaaaaaaaaaaaaaaaaaaaaaaaaaaaaaaaaaaaaaaaaaaaaaaaaaaaaaaaaaaaaaaaaaaaaaaaaaaaaaa

SEQ ID NO: 291393 - DNA, 1000 bp, Homo Sapiens
taaccacaatgactctttgcggaaaacacagataaactctttgaaaaactcagtggcctgccctggtgcacaaaaggctattacgtcttcagaggcagttgacagatttatgcctaggacaacacaactgcaggagcgcaaaagaagaagagaagatgatcgtaaacttggaacttttcttcaaacaaacccaactggtaatgagattatgattggacctctgttaccagacatctctaaagtggatatgcacgatgactcattgaatacaacggcgaatttaattcggcataaacttaaagaggtatttcatctgtgccaaagcctccagaggacaagccagaagatgtacatacaagtcatccattaaaacaaagaagaagaatatagagtgccagcagcaacttagtattttctaaaaagaacatttattatttatttttagcctgtcattttaattcttcaagagattttactgctggtattttttgatgcactcctctttgtaatttcattcaagccatttgtctaaagtcatttctttgttttttgggagatggagtcttgctctgttgcccaggctggaatgcagtggcgtgatctcggctcactgcaacctccacctcccgggttcaagcgattctcctgcctcagcctcctgagtatctgggattacaggcgtgcaccaccatgcctggctaagttttgtgttttttttagtagagatgggttttcaccatattggtcaggctggtctcgaactcctgaccttgtgatacacctgcctcagcctcccaaagggatgagccaccgcgcctggcccatttcttctttttttgacccatacttaatgttgcagaaactattcttgtcataacattatctctcatgtacagtaattatatgtaaattaattgaagcaaatatggaaactttacaatagaaataaagataggcagccagcgtctgtttccaattataaaaaaaaaaaaaaaaaaaa

SEQ ID NO: 291394 - DNA, 1000 bp, Homo Sapiens; identical to SEQ ID NO: 118225

SEQ ID NO: 291395 - DNA, 1000 bp, Homo Sapiens; identical to SEQ ID NO: 223586

SEQ ID NO: 291396 - DNA, 1000 bp, Homo Sapiens; identical to SEQ ID NO: 223587

SEQ ID NO: 291397 - DNA, 1000 bp, Homo Sapiens; identical to SEQ ID NO: 223588

SEQ ID NO: 291398 - DNA, 1000 bp, Homo Sapiens
tgccccttgaggaggaggaggcctacgagagcttcacctgtccccctgagccccctggccccttcctcagcagccctttgcggactctcaaccagctgccaagccagcccttcactggccccttcatggctgtgctctttgccaaactcgagaacatgctgcagaactccgtctatgtcaacttcctgctgacggggctggtggcccagctggcctgtcacccccagcccctgctccgctctttcctgctcaacaccaacatggtcttccagcccagtgtcaagtccctgctgcaggtgctgggctctgtgaagaataagattgagaactttgcggcttcccaggaggacttcccagcactgctgtccaaagccaagaagtacctcattgcccgtggcaagttggactgggctgagggccctgcagcaggacctgccccacgccgttctgatcccctagtgaagagccggaggccatccttgggggagttactcctgcggcatgcacacagtccaaccagggcccggcaggcggcacaattggtccttcagcctgggcgagacggagcaggacttggcctaagtgggggctcccctggggcttcaactccagttctactcacccggggcggggcccctgaacgccaaggtgaggctcttcgagtcaagaatgctgtctactgtgcagtcattttccctgaatttctcaaggagttggctgccatctcccaggctcatgccgtcacctcgcctttcttgttggagacttcagaggaaggatctggccctctcatctcaggctgtgggcccctcaatccttaactttcttccatggacaatcagggccatgggtggcccgggctggggctagggcacaggctcctttttatgtttggaggcagtgacaaaaggactttttaatttatttcagatgaatgttttatggagaacttgttgcaatatgtataaaagggaaatctccaaaaaaaaaaaaaaaaaaa

SEQ ID NO: 291399 - DNA, 1000 bp, Homo Sapiens; identical to SEQ ID NO: 118226

SEQ ID NO: 291400 - DNA, 1000 bp, Homo Sapiens; identical to SEQ ID NO: 223589

SEQ ID NO: 291401 - DNA, 1000 bp, Homo Sapiens
gttgcttctcatcacttctacaaccccacaatggaaaaagaaccgagtgacagtgtatgagtatgatactagggaagatcagtggattaatataggtaccatgttaggccttttgcagtttgactctggctttatttgcctttgtgctcgtgtttatccttcctgccttgaacctggtcagagttttattactgaggaagatgatgcacggagtgagtctagtactgaatgggacttagatggattcagtgagctggactctgagtcaggaagttcaagttctttttcagatgatgaagtctgggtgcaagtagcacctcagcgaaatgcacaggatcagcagggttctttgtaaatagtattttgagacactaagatgtttctactgctacggaatgtattttaaacacatatcgtttctttttcttggaaaaaaagttgattaggaccacagatttggtttagaaagggtaatattttgaaatactacaaggtttagacagtccatgaaatcgacctgtttaataatttaccatcctgaaagtccagaattaaaatatggaagcaagaactatataattgattaggatgcttggtaggtttttttcattgttcaaatattcattgcacagtggattgttttgattagttagtatgctttttttttaattaattcagtcttctgttaatttttaagttttggttagtgccacaaggaatttaactttttgatttgtataatagaaaactgaactaggaattgttagcggggttttgaaggatgtgtactttccttcaaaataaagtggtagattttcaaaattttacactagtcagttctttatattctaagttaaatgtagtttgtaaaattattttggttttcttctacaaaggaaaaaattggatttatatatataaggttactgcataatgatttcattttgataatgtgcagaatggcctcataagctcacagaaagcaaaaaaaaaaaaaaaa

SEQ ID NO: 291402 - DNA, 1000 bp, Homo Sapiens
ttgaaacagacaaaaattccagtagcatccagatccttaagccagaggtgcatgcttctttttaagtatgagggtttgttggtcacagtgggagaggtttcaccaccgcattctgacctcctcctcccaaaaggtgctaaacctctctgacctgtgtacattcacaaaccacagctagaattcctccacctaggattaagctggagagaagtaagtaatttaggtttcatggtactgtagaggccaggctgaaatgtcatatctgaaggaagaaagcagcagctggacaatgtttctttgcaaagcaacactcgaaccaaaagatgcctcaatcccattttgatattcattttagtgaaaggatgcatcagacctgttccacatcatgcacatgggaaagggtggttatcattttccttctaacaagtaggtacagatattcggttactacacgtgcacctgtagcagtatttctagaaacatccctttttgttgagaacctcccttgaatgtctgtcacactcacacctgacgggatggttactggattagagagtagatttggcacatcttttcttagtcttttgattcaaattcaaaacttaacagcacaaaccaggtcagagttactttcggttagaatttattgccatttattcctttttataaatttctatagattatactgttatttttatgttattggcctagagctacacgtatatgggtttgtcctgagtccgttttcaaatgaccttgtgatagggaaatggttttgtccatgttcttggaaatacttgtgtatgtacagaaggaagggagggattatttttctacaaagtaatttatgatttctaattttctaatgtgccttggatatgtgccaaatgatggaaaagaaacagtaaactttatgattcttaaaaaaaaaaaaaaaaaaaaaaaaaaaaaaaaaaaaaaaaaaaaaaaaaaaaaaaaaaaaaaaaaaaaaaaaaaaagg

SEQ ID NO: 291403 - DNA, 1000 bp, Homo Sapiens; identical to SEQ ID NO: 223590

SEQ ID NO: 291404 - DNA, 1000 bp, Homo Sapiens; identical to SEQ ID NO: 223591

SEQ ID NO: 291405 - DNA, 1000 bp, Homo Sapiens
atgttttgtgccttgggctagataatagtggcaaaacgacgatcattaacaaacttaaaccttcaaatgctcaatctcaaaatatccttccaacaataggattcagcatagagaaattcaaatcatccagtttgtcatttacagtgtttgacatgtcaggtcaaggaagatacagaaatctctgggaacactattataaagaaggccaagctattatttttgtcattgatagtagtgatagattaagaatggttgtggccaaagaagaactcgatactcttctgaatcatccagatattaaacaccgtcgaattccaatcttattctttgcaaataaaatggatcttagagatgcagtgacatctgtaaaagtgtctcagttgctgtgtttagagaacatcaaagataaaccctggcatatttgtgctagtgatgccataaaaggagaaggcttgcaagaaggtgtagactggcttcaagatcagatccagactgtgaagacatgaaaagataatagttggaaacctcagcaattttcaattcaaggaatctatctaagacaaatagaatacattttgtaaaagatgtttatgcatcaaaaaatataattttctgcttgcatttatggactctgacctttttaagaacataggacttcaggtatgctaatttggccattaattatttaaaaactaaatattccctcaaaagggctccctagaattatcaagttcttagtgaaggtctacatttgattgtacgtagaatgtttaaaagtcagttataagccatctcatcccatcataatttatgatatgtttaatatattttattttttaattgtctttttaaaaaatttagtttatgactttgcagtatgaattgtgcttgtgaaaaagaactttaaatatttataagggaccatgggtaattaatatatattcaatttttactatgtgtcactgtcaataaaatgtaaaatataaaaaaaaaaaaaaaa

SEQ ID NO: 291406 - DNA, 1000 bp, Homo Sapiens
actcaaagcgtagaaggttttcctccaaaccagttgtactcacagaagcccagaaacaacttatgatatgccacctacctcaggttctcagactgcacctcaaacgattcaggtggtcaggacgtaataaccgagagaagattggtgttcatgttggctttgaggaaatcttaaacatggagccctattgctgcagggagaccctgaaatccctcagaccagaatgctttatctatgacttgtccgcggtggtgatgcaccatgggaaaggatttggctcagggcactacactgcctactgctataattctgaaggagggttctgggtacactgcaatgattccaaactaagcatgtgcactatggatgaagtatgcaaggctcaagcttatatcttgttttatacccaacgagttactgagaatggacattctaaacttttgcctccagagctcctgttggggagccaacatcccaatgaagacgctgatacctcgtctaatgaaatccttagctgatccaaagacaatggggttttcttcctgtgatttatatatatactttttaaaagactgatgtaccattttaaacttcattttttcttgtgaatcagtgtatactacatttatacattttatatctaacaattttttttttttacaaagtataaatgtatatatcaactgaaggtaactacttttttcatatttggagttttaaacttttggtgtttacctcagactgatgttacctcttttatatttttatgtcttaattggctcggatgatgaacttgtgcaatcttctaccaacaaagttcaagtggcatcattttatatacatgtatctttttcaggtattttctatacaaattcttaatagatggaaaattagactctaaaaaaaaaaaaaaaaaaaaaaaaaaaaaaaaaaaaaaaaaaaaaaaaaaaaggggcggccgctctaaaaaaaaaaaaaaaaaaaaaaaaaaaaaaaaagg

SEQ ID NO: 291407 - DNA, 1000 bp, Homo Sapiens
gataaaccaacccagttacttatattaataatattcagaaaaaaaaaaaaagaaaaggaaaaagaaaaatatatattctatatttttttaacttatgagaatgtgttcatttcatttgtaacatataatgggaaacagtaatacgtactctgagaaaaattgcaaagcacagataaatggaaataaacaggaaaaagaatcacctataacctcaccatccatagacagacactgttaaaattttggcatatttcctgctgattttttctactgctgatttttgcacaggtgagataattttgaacagagaattttgtatctttggtttttgtgttttgctgcacacaaaaacaaaagatataaaaatggatcataaacatttttctaaatcctgaaaaatgcatagacatattttagtgcctgtatttcacaagatggacataccataatttacttacacagtcctttttgttagatgtttaagttgttttcaagcttctcagtgctggaaaaaatactgagatagacatgtttagttgaagttatttcatttcaggttatattatcttgggtcagagaatgaatggttctcaggcttttcaaaagagctggtcagtttttatgcctctggcagtttttgagagtgctcaatcatactacactgttgccagcattagatcttatcacatttaagtcattgctaattttataaacaaaaacaatggttttactttgcatctccctgattggtattgctgtagaacatatttggagaagtttgtttgtctttggtgtttatttcatgaatagattgtgtgcccattttctcttggggtattcagttttttattactgatgtgagcatgtgtatgggtgattatttgatgattatcagttttgcttagtagactggcaatatttagtcttgctgtcactgtgttcccagtgcctactagattgcttgatatgtagttgccactcaataaagatttgttgagtc

SEQ ID NO: 291408 - DNA, 1000 bp, Homo Sapiens; identical to SEQ ID NO: 223593

SEQ ID NO: 291409 - DNA, 1000 bp, Homo Sapiens; identical to SEQ ID NO: 223594

SEQ ID NO: 291410 - DNA, 1000 bp, Homo Sapiens; identical to SEQ ID NO: 223595

SEQ ID NO: 291411 - DNA, 1000 bp, Homo Sapiens; identical to SEQ ID NO: 223596

SEQ ID NO: 291412 - DNA, 1000 bp, Homo Sapiens
ggtgtttcccaggattaccctctggctaacatgtatgctataacccgagttttgcgtttagcagatggacctgacgaagttcatctttcagcaatcgcaacaatggagctgcgggaccaagccaaaagactgacagccaagatataaggagggtggcactgccacatcccactggcagaaactctcctttatacaaacttcattggctccaacatttgaatctcatatttttgtagcagtttgagcacagggttaattattcatttgtggtaaagattatagcatctattttgatcagtgggttttattatttcaagggtcacacagggttaagttcagtaagaaatgctgtagctgttgtcattcaatctagtgcctccttgaggccaggagttcaggaccagcctgggcaacatagcgagacccccattgctacaaaaaatttaaaaatgaaacaagtgtggtggcacatgcttgtagtcctagctacttgggaggctgaggcaggaggattgcttgagtctaggagtttgaggttacagtaagctgtgatcgtgacatggcctccagcctgggtgaccgagtgagactgtttctaaaaataaaaacaaaaaataaatttcttcttgaggtggggtggaggtggggagcaagaatttgacctggctctgatccctggtgtgttgtgtgggcctctttaacgtttgccactgagccttaacctcactgtacttcactgtacttcacacgcattggtgttaacattttaatcttagaagaccctgacccactgagggtttgttgtgagaattgctgaagccacgtagaagcaccttgaaatctgtaaaaccacaagaaagtactttataaaaggtatccttatttgaagtggataaatcttgtaactcgaaaagttgtgatttagaagacaggattgtttttgaacattaggaattaaaggctatatctggtccttaaaaaaaaaaaaaaaaaaaaaaaa

SEQ ID NO: 291413 - DNA, 1000 bp, Homo Sapiens
gtatttcggaaccccaatgcagagcagtttgctttgaaaaatagttgtttttaaaagtttaatgtaaataattattttttagaagttttttttttttttttaaagacagggtctcgctttatcgcccaggctggagtacagtgatgcaatctcagtccactgcaacctctgccctcccgggtttaagcagttctcctgcctcagcctcctgagtagctgggattacaggtgtgccccaccacgcctggctaatttttgtagttttagtagagacggggtttcaccttaccgggctggtctaaaactcctgacctcaagtgatctacctgcctctgcctcccgaagtgcttggattacaggtgtgagccactgtgtccagcctgtaactattatttttttataaagagagattcttattttcttggctttttgatgtatctgttcctgatagataatcattggctagtaactcctagtacactggtttcacagttgctacctctcctgcttttctctaattattacgccaactcaagtagttaaaaatcagtaagaaaaatgtcttgagctagaagaacccatagaggaagattttgtaatgcgaatctcctctcataattttagttctgtaaattcagggtttttttttgtttttttgttttttttaagccgaaaaaatgcttaatatgttccagtaagggtattaagtaaaaattaaataaacgtattaagtttaacatattaaattaatttaacatttagactaacattaacatttaaattaatatgttaagtgaatatacttaatatattctagtacaggtatgcttggaaatagggcgtttccttttcatgaattgatttcgtacagcacagtggcttataaggaaccagcagtgtttttccctgagtaattatgaacttagtcaagatcagaagctgggttttggggttgagaagagttcatttatttaaataaagtttctatttaaaaaccttt

SEQ ID NO: 291414 - DNA, 1000 bp, Homo Sapiens
gacctgatagcccgagtagtgaggattattggtaacaaaaaggcaattgaacttctgatggaaaccgctgaagttgaacaaaatggtggtctctttataatgaatggtagtcgaagaagaacaccaggtggagtttttctgaatctcttgaaaaacactcctagtatcagcgaggaacaaattaaggacattttctacattgaaaaccaaaaggaatatgaaaataaaaaagctgctaggaagaggagaacacaagtgttggggaaaaagatgaaacaagctattaaaagtctaaattttcaagaagatgatgatacatcacgagaaacttttgcaagtgacacgaatgaggccttggcctctcttgatgagtcacaggaaggacatgcagaagccaagttggaggcagaggaagccattgaagttgatcattctcatgatttggacatcttttaagtacattttcaacagtttgaggactaagcctttctaaaataacattgtaataaaccatttttactgagattgcaacgttttgcactgataaacatgagaatctggaggaaagacaattgttttcttgtttaaaatatgtgtggaaaggaatgcaattgatagaacatttaaagatatatctgacaaaatacttaagagtatatagcacaggatttaatttctcaatctgttgcatgtgctaattatgagtattactagttgataatcagttttgtctaggtcataacataccatttgtaagtttgtttgctttttcaggtttatctttgcagtgaattatgctttgctttaaaacattccgctaaaatcataatgggacatataaattattaagctgttagaaatgcattcaaatttgttttttctgtgttctaagaactcaggcaattttaaggataaaaactaacattggccaggcacggtggctcacgcctgtaatcccaacactttaggagaccaaggcgggcagatcacttgaggtcag

SEQ ID NO: 291415 - DNA, 1000 bp, Homo Sapiens
gcgagcgcatcatcagggagatctggatgaatggccagcctgaggtgcccgggaccaggagcctgaatcgctactattagggagcagcaggaccccggaaaccactggaggccgcctggaaaggagagcgtctgcagggacagtgggcacaaggaactgaacccagctctgctaatattgtgatttcagagaaaaagcaggacatgccccttttctagccaggaggattgctcctttttggccaaatgtatggagaagtagaaaaatcaaagcagttcatcaccctttccaggtctcggaatggtgctgaaaaatcctctccaacactgtggatggagatcggagaaacgcgactgtggtttctcttgatttctgaggatctcagaagtttcagcagacttccttgctctgtgttattcctttgcaaaaggaaagatcattatagcatgagggctgggaatagcagggtgaacttaacccaataaatgcaatttcctaaatgacttcatgctatggaggtgattctgattcaaatagcatgatccatgcttattatttaaggctgatttttaaaatcttgtgttgcaagggcaacctcgtccattttaactggcacctcagggattaaaatcctactttttagtgtagttcccacctcattcatgaaaatgaatagaactattgtattatgggagatgtgtcagtgaactagaaaatgtcaataacctcaaaggatgaagggtttttattttaaatagtttataaaatatatattgacatgcatatttgaaaatgctgcataaaaataaaagtggtgtgttttccccctctttggagacaagaaaattttattatgactctagataattgtgattttaaacactttgtttttttttttttttttttaattggatttcaaagaaaagaatggaaatgagaggtaaggattaaagccaaagttaggatgggaattaaaaaaataaacattacataaaatctt

SEQ ID NO: 291416 - DNA, 1000 bp, Homo Sapiens; identical to SEQ ID NO: 118227

SEQ ID NO: 291417 - DNA, 1000 bp, Homo Sapiens; identical to SEQ ID NO: 118228

SEQ ID NO: 291418 - DNA, 1000 bp, Homo Sapiens; identical to SEQ ID NO: 118229

SEQ ID NO: 291419 - DNA, 1000 bp, Homo Sapiens; identical to SEQ ID NO: 223599

SEQ ID NO: 291420 - DNA, 1000 bp, Homo Sapiens; identical to SEQ ID NO: 118230

SEQ ID NO: 291421 - DNA, 1000 bp, Homo Sapiens; identical to SEQ ID NO: 118231

SEQ ID NO: 291422 - DNA, 1000 bp, Homo Sapiens; identical to SEQ ID NO: 118233

SEQ ID NO: 291423 - DNA, 1000 bp, Homo Sapiens; identical to SEQ ID NO: 118234

SEQ ID NO: 291424 - DNA, 1000 bp, Homo Sapiens
tggagcgggagtaggaacgggagcaggagcgcgaccttgaccttgagtacgagcctgaagacttggaggatcttgagttggagcgggaggaagaacgccctcgactcttggatctgctccgagacctcgagggtccgctgtggggagaggcctgatgatcaggtgccccagtggatgggctgcacccagcccaccctggccctcaggttcctagaccaccccagatgcaggggctctggctgtggatgtggcgccatagccacagcaacggtaccaagttcctaaatagtgtggccgagcctgctgctgtgtgaattcaggccttgtggaaaacaccgccccataggcacaggctgtgtgagggtggacgtgatgagtgtatctggggtctgctcccacccatcacaagctgtggaccctggccccccggccactgcagacatctgcgcttttacctgttcctcttctcctggcctttcctccgccgggcccgcatttttgctcggaagaactcatagaggccgttctgctcccagccttcactgtaagacacggcattccgtgtgtgaccacgtgacacccacccacaaggaagtcgtgaaaaagtcatcaggagttaatccacagaaccttggagagtacatggccctgtggctgtgggctccgagcatgggcgcagtagagcttggttcagtgttcccacagggctgtcctcctgcagcccagtggctcctctggtgcccacgcccttgccaccctgctgttccgctgaggtggtggggacccatggtctgtggaactgggaaacaggaacactgactcatgggtggacaggcctgcagcccagcacaggaaggaggggtgaccactgggaagggtgggctgagggccctgtggcagccggctgcttgagacgtgccgccgtgccacaccttccctaacttcttctgatgtgtctccattaaaacgcccttcattgaaaaaaaaaaaaaaaaaaaaa

SEQ ID NO: 291425 - DNA, 1000 bp, Homo Sapiens
ccgtgttattgtccttttgaactgttttttttttattaaagccaaatttgtgttgtatatattcgtattccatgtgttagatggaagcatttcctatccagtgtgaataaaaagaacagttgtagtaaattattataaagccgatgatatttcatggcaggttattctaccaagctgtgcttgttggtttttcccatgactgtattgcttttataaatgtacaaatagttactgaaatgacgagacccttgtttgcacagcattaataagaaccttgataagaaccatattctgttgacagccagctcacagtttcttgcctgaagcttggtgcaccctccagtgagacacaagatctctcttttaccaaagttgagaacagagctggtggattaattaatagtcttcgatatctggccatgggtaacctcattgtaactatcatcagaatgggcagagatgatcttgaagtgtcacatacactaaagtccaaacactatgtcagatgggggtaaaatccattaaagaacaggaaaaaataattataagatgataagcaaatgtttcagcccaatgtcaacccagttaaaaaaaaaattaatgctgtgtaaaatggttgaattagtttgcaaactatataaagacatatgcagtaaaaagtctgttaatgcacatcctgtgggaatggagtgttctaaccaattgccttttcttgttatctgagctctcctatattatcatactcagataaccaaattaaaagaattagaatatgatttttaatacacttaacattaaactcttctaactttcttctttctgtgataattcagaagatagttatggatcttcaatgcctctgagtcattgttataaaaaatcagttatcactataccatgctataggagactgggcaaaacctgtacaatgacaaccctggaagttgctttttttaaaaaaataataaatttcttaaatcaaaaaaaaaaaaaaaaaaaa

SEQ ID NO: 291426 - DNA, 1000 bp, Homo Sapiens; identical to SEQ ID NO: 118235

SEQ ID NO: 291427 - DNA, 1000 bp, Homo Sapiens
cagagttggaagtattggccaagaagagcccactgcggctgctcaagaccctggagctgtacttggccagggtgtcaaagggacaggcctccttgttgggagcacagaagtgctatgggccagaagcccctcccttcaaggatctcaccttcacaggtgagagtgacctgcagtctcactcatccgaaggcgtatggctgatctgacctccgagatgaatggaggcttaaaggctgagctgcaggggctttcagggggtcatgtcaggagcctggccaggccacaccccttgctgtctcagcagatgggatataggaagctcctgggcttagctgtgggaagccaagtaccctcaccggcatgggacatgaggggcagctagacttcacccccttcccgcagacctgcctccagagcaaggagaattctgccttaatctgttgggctccagtctccgggttgaattccagtgtatcccactgggagtgaatggatcatgaggtgggatggccccatctggatgttctgcagatccccacatgggaggagattcccaagtagaggcagccagaattctgactccctggcagcagcagggctttcaggcaccagtgtctgtgttgttagaactcagaggaagaggcaggggcagcagccgacagggggcagcatgacccaagcaaggggcctgaggcctcagtgggggtagggcaaggaggtacctcacaggtgggtgtgaggccccctctggagtttctggccattcacttacccactctcttctccccctgacccccgctccattgtttatgatggaaaaacggacatttggctaggtgtctctcacggctgctccatcctagcccccacaagctggggcttcctcctgtagatgctgtgcatgccccatgatgagtttctggcctaattgagggaaggaggaaattcataccagcagttttcaaataaaagaattgttctaaaaaaaaaaaaaaaaaaa

SEQ ID NO: 291428 - DNA, 1000 bp, Homo Sapiens
tctccattaatttctccattctgtttatatcttacagttggacccaaattccaaattatcagttaatcgaaactacattgcaagtcaacattattttctcttcttcctcagcttctccatgtttaggaactgagaaagaacctgcctaagcagcacttccccatgtcctttcaccttcatgttaacgtcccttctgatggtctcactcttcacaggtagttcacactctgagacttgaagtaagctcatggttcagtactctgggggcgcagggctgcgcaggacccttggaaatgttgcaagtgttactagtaccagtttcactttttgttgtcacaatttactgtattttttactttttctgttacagttttgctaatttatcagaaggtccaaaagtctgacataactatttcattttgcattatttatttatgatgcttttttcattgtcttttatacatttgggattataaattatgtaaatgttaaaatgagcatctcaaagaagtctgttaaatcatgactgaaaaaaatcaatcagatgtatcttcaaaaagtggagtcccagttttatgaatcagagatataaaccagaaattctataactgatcatagaagaagaatccagtaattgaacaaatcctatttaatgacatccttgtagcatagatggtctataatgctgaccacagatttcttagaaatgctgctctctctatttaactaacattttgttcagttttgcctccagtggaagcagaaagggttttttcagctgttaaatcctaaaaatcaatataatttatttatgtaagaaaaataactcaatcaatatatttttgaaccttttaagtactaattttctttttatcaagtagaaaaaaaaatgtatttgccctaaatccttaaaatacaaatgctataaaaattcctgtatcttgaaagccttactgcaaatgagtattatagacatccagcagagtctggttttctttgt

SEQ ID NO: 291429 - DNA, 1000 bp, Homo Sapiens; identical to SEQ ID NO: 118236

SEQ ID NO: 291430 - DNA, 1000 bp, Homo Sapiens
gggcagggcagtgccctgggggtaagctaggtggctcagggagtggcagaagggccatttttccctctgccaaaaagacttccttggatttgtagatgttgacccagagtcctctgtcccctcctgaagaggattttcttactggtttctactgaaggggaggtaggggaggaggaaaaaaggaccatgtgtgatgctgttagacaagacactgacgctgattatggagggtctcctgcaggcccttgtgggctccttggcaaggccccaggctgggaaggagctccccccactgcccatcctgcccgctttgtggcgggtagagtcagtgacagggaggcagccctccttttgtgtatatagagtgagctgatttgggctcaggaaaacctagtcgcttgttgctctcgtctgtgacatttttgtacactggtttgctactcatggcaagaaacagacaaagccccatgaaaaataaaacaaaacaaaagtcatttcaaacaaagctgttgttttgaaaactcttgctttcttttggtgtccattttgtgttctattttaaagaatctttcatttatattggtgttattgtagtgaagagaatgtgataggctgatctgtaatggtttctgtcaggagcttagcaaatgcctctgcccctcttcccctacccctgtccttcctcagttcccagctgggattgctatgcactgggcagacccgtcactgtctcccctgaacccccacacagtggcttcccttagaaccagtctttgtactctccctaaacagcagcaggcttaggatttttgtcaggctggttcttgcgtgctctgtgcccccaccagtttgctcacctcttggggcattttgtaatgtgttttctctgtcttgtaaaaccttttgattgtaccgaaatggtatctgcagtcgcctttggaaataaatggtcattaatttgtgtacttagcattctgaaaaaaaaaaaaaaaaaaaaaaa

SEQ ID NO: 291431 - DNA, 1000 bp, Homo Sapiens; identical to SEQ ID NO: 118237

SEQ ID NO: 291432 - DNA, 1000 bp, Homo Sapiens
aatccttgcatgtaaatcattcaaggattatagtaatatttcatatactgaaaagtgtctcataggagtcctcttgcacatctaaaaaggctgaacatttaagtatcccgaattttcttgaattgctttccctatagattaattacaattggatttcatcatttaaaaaccatacttgtatatgtagttataatatgtaaggaatacattgtttataaccagtatgtacttcaaaaatgtgtattgtcaaacatacctaactttcttgcaataaatgcaaaagaaactggaacttgacaattataaatagtaatagtgaagaaaaaatagaaaggttgcaattatataggccatgggtggctcaaaactttgaacatttgagcttaaacaaatgccactctcatgcattctaaattaaaaagttaaaatgattaatagttcaggtggaagaaataagcatactttttgggttttctacacattttgtgtagacaattttaatgtcagtgctgctgtgaactaaagtatgtcatttatgctcaaagtttaattcttcttcttgggatattttaaaaatgctactgagattctgctgtaaatatgactagagaatatattgggtttgctttatttcataggcttaattctttgtaaatctgaatgaccataatagaaatacatttcttgtggcaagtaattcacagttgtaaagtaaataggaaaaattattttatttttattgatgtacattgatagatgccataaatcagtagcaaaaggcacttctaaaggtaagtggtttaagttgcctcaagagagggacaatgtagctttattttacaagaaggcatagttagatttctatgaaatatttattctgtacagttttatatagttttggttcacaaaagtaattattcttgggtgcctttcaagaaaattaaaaatactactcactacaataaaactaaaatgaaaactcaaaaaaaaaaaaaaaaaa

SEQ ID NO: 291433 - DNA, 1000 bp, Homo Sapiens
aagacgccaaaggatcttcttcagacagcactgctggagttaaggagtagctcgaggtgaagctggatgggggatccagtggagcaggagttgacggacagtccgttcacatcgctgtgtttccttgttaacatttttctttctgcagagaggaagatatgtttttgctgctttatataaaaatggtttttttaagttattttaaaaatctagcttccctttttgattaagattgccatcttgcttttaggcaaaacaaaccaattaacaaacaaccacaagaaagggagaagaggtgcctgtgggagattttgcagacctattgtgggtataggtattttcttcctggggaagaattcagttcccgtctcagctgtacttttgtgggcctgtcatcttgatgaccagaatgaaagcttgctctgcctcctgccagccagaattggtggcgggacttggggatacagcgtgaaggtggggaagttgcacagcagaaaacagaattgaagttgggaaactctagagtctgggcaaaatgtttggttttttctcttaaaaaaaataacaccccattaccaaaagaaaaggtaaggtggcaaccttatttttaatagtttgaaatgatgataatcctaattatataaaaatatatatataaacacacatatatatagtgatttctaaagatttgtttacttttgtgttttgttttactgtactaagaacttgtcctttctccttgaatcaaagtaggacatgcatcatcctcctaattttaaatgttggctctgattttaaagtggtgcatttgattccagccttggtaatggagagtttgcaaacacacagcggcccacagcttcacgtggtggtgtgcagtgtgaggcagctccttggctttcctggttttcacaacaagctagagattttcaaagctacacttttgagtaaaaacccttattaaaagaaaaacatgattaataaaaaaaaaaaaaaaaaa

SEQ ID NO: 291434 - DNA, 1000 bp, Homo Sapiens; identical to SEQ ID NO: 223601

SEQ ID NO: 291435 - DNA, 1000 bp, Homo Sapiens; identical to SEQ ID NO: 118240

SEQ ID NO: 291436 - DNA, 1000 bp, Homo Sapiens; identical to SEQ ID NO: 223604

SEQ ID NO: 291437 - DNA, 1000 bp, Homo Sapiens
aagtaggaaaaaatgaacagtaataattatgatgaagatgatagtagtgctatgggatgtgtggactgtttagtgtgttcccctttgtgggtgggttcctatgatacttattatagaacacagtggatcctttttgaatgttcgtggaagggccaggagttcctgtgaaaccaggatactgcagctttattaaagttaaagaaactgtaacatatctcttatatattaaaaacgtttaaaagttttagagagaaattgcattaatacagattgaagtattttattcttttttgacttgaaaaattatatttcatattgcaaagatgtttacaagtattttaatttaagttcagtgaacttttttgtagctgggttaaatctttttattttagtatggccttatggcaaagaacactgtattattttaataatcacacaattgtgacggaattacaaccataaaatgtgtaatgttttgaacagtattctgttgggatggagattttataggttcagacaaatcttctagatctgcttcacccagcatattttctattcagtgatataaagcatattttattctatattattacaaaaacggaaatgtataaacatgtcaaaaagaactgttgatgctttctaacatttgtataaatagaattcagtgcaagttacaaaaattctgttgcaccactctagttttagtatttctattttaatacatttgtttaccacttgtttatgtatatgtaggtgatgttacttgagcttaaatgtactttactgagcaaagtttaaaaaacaaagtatattttattttatgataaagggcctttaacctcatggtcaaatactaatattatatttgctgagacaagatttgaaattgtatcaagagttttatttttctgacatttaaagttctacataataaaggtaaaacttaagtaatggtgctacttcattttttaagtatttctatataaataaaatattgaag

SEQ ID NO: 291438 - DNA, 1000 bp, Homo Sapiens
aggagtagtaagtatcaaggaagataaatattttcaaacttctagaaagacaatttaaacatttggttctggatacatgttgaacttagttgaatataaaaatctagattaaaagtgtgtttaccatactgtataattccatttacatgaagcatccagaaaagataaatgtatagggacaaaaagtagattcatgtttgcaaggggctggggctggaagctggtagtgactgctaatgggcatgaggaatcttacagtgatggaaatgctctaaagttggattgtagagatggctgcacaactcagtaaatgtactaaaaatcttttaactttaagttaaaacagatacattctatagtatgtaaattatatttcaacaaagctgttttaataaaaaaaggaaaaatgtgtttactatatcggcttagaaacatgcctcatttctaggaaataaaagatagaggtgagagatgatttactttgagaaaagacattgtgtcacctatgaaattttattaggcacagagtcatattttaaggtagatagttctgtattgctgaaatagtaattttaatgtctttatgttgccacatgttaagaccataatgtagttataaatggaaatgtttacacctgaagtgagtattttcaaattaaaatttaattaagtgattttcttcgacacttaattctagattccccagatgaattgaagtgtattgctgtgtcttgtaataccttgctttaactagctttttatgtattttagttggtatagctttgttattattcatattaacaaatctgaaaatatgtcaaattacatgtttttatgaccatgtaatgttttaaaggcacctacttgttataaaatcataatttaggataaatgtggtaaaacttagcaaaactatatttggtttagttttcccattggtatttatagtttactttgaatatttatattaataattagctcataatttttaaaaaaaaaa

SEQ ID NO: 291439 - DNA, 1000 bp, Homo Sapiens
gccccggaccaagaagggcagctggctggcagacaaggtgaagaggctgatgcggccccggcgggaggggggcccccctggggggctgcgcctgggggccgatggggctggcagcaccgagagcctggggggccccccggagacggagcttcctgagggcagggaggcagatgggacagggtccccttccccggcacccatgcgccgggcccagagctccctctgcctgcgggatgagaccttggcaggcgggcagcggcggaaactcagctcaaggttcccggtggggcgaagctctgagtcattcagccctggggacacccctaggcaacgattccgacagcgccatccaggccccctgggggcgcccgtctcccacagcaaaggacctggtgtgggatgggagaactccgctgagaccctgcaggaacacgaaacagatgccaaccgagagggccctgaggtacaggaaccggagaaacgtcccctcaccccatccctcagccagtgacaccgtgggaacagcaggcttgggagtgcagccttctcggcactggagtgtcagcggaggccccaggcagcccaagagctcagggagccagggaccccaaggggagtccttggacaaggaggcctgggccctgagatcctccacggtcagcgccggggcccggagatggagctgggacgagtgtgtggacaggggggatggctggcccccacgagcagctccaggctggagttctggttcttccaggtggctcccgctgaggcagcggtctctgggggatcccccagctgaaggaggctggcaggagttggcaagagaaccccctgccctgtccaggtgggaagctgagtcccagtgctgggggactgtggcctgggctgatcttgagccttaactggacatgaggggcatgagaataaagctgaactgcagcctcctgaaaaaaaaaaaaaaaaaaaaaaaaaaaaaaaaaaaaaaaaaaaaaaaaaa

SEQ ID NO: 291440 - DNA, 1000 bp, Homo Sapiens
gttaggtaaaaatatgaacaatgccacaacggtgctcaacatgctttttctaggattcattgttttctatttgtattataatacacgtgcctactgtatactcaacagtcctctagagattgcttttcacaattgcacaagctattactgactttacagcatagtggaagattagctgatgacccatgtatctgatgttcaaccatagtggtgccttgagacattaaactgtttttaactgtaccagaaatgaagtgtggaacagttacctaacctatttcacatgggcgttttgtatacaactattttgatctacacttgatgtctgagcagaaaacagaaatagctaaatgtgactcaggaagtatctcttggtttcttattcagcagcagagttggtgactttgacaactggactgcagagaaacatggtgatcaccttttaatttttattggctgtctgccaaatataaatacagatgcaaaattcagtaataggagatccataacccaacatgggtcactactcgtgaaatgtgactttctcccaccagtaattgaaatgaggtgatgatacctaattatgttttcctaattaaagataaattgctacttgattaaaaatcctgcccttcacctttgggaacaaaggttaagagacacagttgggcgaactctcaaatttattggcatttacacaaagtcccagacaaccaaggaactgaagttttcatcatatgagagcagcacatcccaccatttacaatattcgtatatctttctgcaaatatggctctggatagtgaaaattgaaaaacatatgccaaccctgagcaagggaactcctcaaaaaatcatgcagcggaaccttgtcaggtagagaagccgtgcatgaaagaatttgtttaatgtcttgttttgcgtatgtgttttttgtttttgttttttaagaactaaatattgcacattaataaataagaattatacagcaaaaaaaaaa

SEQ ID NO: 291441 - DNA, 1000 bp, Homo Sapiens; identical to SEQ ID NO: 118241

SEQ ID NO: 291442 - DNA, 1000 bp, Homo Sapiens; identical to SEQ ID NO: 118243

SEQ ID NO: 291443 - DNA, 1000 bp, Homo Sapiens; identical to SEQ ID NO: 118244

SEQ ID NO: 291444 - DNA, 1000 bp, Homo Sapiens; identical to SEQ ID NO: 223609

SEQ ID NO: 291445 - DNA, 1000 bp, Homo Sapiens; identical to SEQ ID NO: 223610

SEQ ID NO: 291446 - DNA, 1000 bp, Homo Sapiens
gcgctctctttcctgaaggaaaacctcaaggtcttgagcgtcaagtttgatgacatgagggaactccccccctggatgtatgggctccgaaatctggaagagctgtacctagttggctctctaagtcatgatatttccagaaatgtcacccttgagtctctgcgggatctcaaaagccttaaaattctctctatcaaaagcaacgtttccaaaatccctcaggcagtggttgatgtttccagccatctccagaagatgtgcatacataatgatggcaccaagctggtgatgctcaacaacttaaagaagatgaccaatctgacagagctggagctggtccactgtgacctggagcgtattcctcatgctgtgttcagcctactcagcctccaggaattggacctgaaggaaaacaatctgaaatctatagaagaaatcgttagctttcagcacttaagaaagttgacagtgctaaaactgtggcataacagcatcacctacatcccagagcatataaagaaactcaccagcctggaacgcctgtcctttagtcacaataaaatagaggtgctgccttcccacctcttcctatgcaacaagatccgatacttggacttatcgtacaatgacattcgatttatcccccctgaaattggagttctacaaagtttacagtatttttccatcacatgtaacaaagtggaaagccttccagatgaactctacttctgcaagaaacttaaaactctgaagattggaaaaaacagcctatctgtactttcaccgaaaattggaaatttgctatttctttcctacttagatgtaaaaggtaatcactttgaaatcctccctcctgaactgggtgactgtcgggctctgaagcgagctggtttagttgtagaagatgctctgtttgaaactctgccttctgacgtccgggagcaaatgaaaacagaataacttatttttcgttaaagtttgactgaaacacgcttctacc

SEQ ID NO: 291447 - DNA, 1000 bp, Homo Sapiens; identical to SEQ ID NO: 118245

SEQ ID NO: 291448 - DNA, 773 bp, Homo Sapiens
cccaggtaatttgagcaaaggccacagtgaactccggcgtggctgaggaaggaggaggcacccacaggctgctgggaggagagcataaggctcaaaatggaaaatcataaatccaataataaggaaaacataacaattgttgatatatccagaaaaattaaccagcttccagaagcagaaaggaatctacttgaaaatggatcggtttatgttggattaaatgctgctctttgtggcctcatagcaaacagtctttttcgacgcatcttgaatgtgacaaaggctcgcatagctgctggcttaccaatggcagggataccttttcttacaacagacttaacttacagatgttttgtaagttttcctttgaatacaggtgatttggattgtgaaacctgtaccataacacggagtggactgactggtcttgttattggtggtctataccctgttttcttggctatacctgtaaatggtggtctagcagccaggtatcaatcagctctgttaccacacaaagggaacatcttaagttactggattagaacttctaagcctgtctttagaaagatgttatttcctattttgctccagactatgttttcagcataccttgggtctgaacaatataaactacttataaaggcccttcagttatctgaacctggcaaagaaattcactgattttaaacaaatatgtaaacaaaaataaaatggtaaaaacagaaaaaaaaaaaaaaaaaaaaaaaaaaaaaaaaaaaaaaaaaaaaaaa

SEQ ID NO: 291449 - DNA, 1000 bp, Homo Sapiens
tgcctggagtgccccgtgtttgacttggcagcgggtgtggagccatccccgcgtcctcctggcgcattgccactgtggctgtccaggaacaggatgtggctgccttggccgaatgttgtcctactctccccaaccccggcgcctcagctcctcagctcctcgggcccctgcgtctggctggtgtttgcagggctttcgctctgctctggtattgctctgcctttatagaaagtcttattgaagaagtgtaagaaagacctaaggtggggaagactcctacacacaccattagtatcagtgacaccagcaatgtaggttcccagccccttcccagtggcagcttgtgtgtccaggagataggacatcatttaacgcatcagcaaagtagcagcagatgccacatacagagtagagcgaaggcatttggtggatcggtcactagagatctatcttgcagaaagtatgtttttcctcataaaagtgcctcttaattggccattgtaccagccacttgtcctagccaaatgtccaaaacacgcccttgggccccgccacgttacaatccacagattgtctgtctgagtcgtttaaggcatttcctggtgcttgtgttccatgaataaaaggacaaagtcagaagatcactgatgtcttactgtcaacagagatattttaaaagagagaagcaggaaaagatcttccttttttgatctacaacttatatagttttctgattatgcacataatagatatgccttccagatgcataaggcaaacatctggaaagaaatatacccaaatcttagcaggggttatctttgggagtggagtacatgggattttgctttcttcatttttataactttatattactgtcttggaagatgtgtttatgtgtgtgtgttacttttacaatcaggaaaacatattcaataacatatagtcaagaaaacagacttaaaaataaatgctatgtgtccattgaaaaaaaaaaaaaaaa

SEQ ID NO: 291450 - DNA, 1000 bp, Homo Sapiens; identical to SEQ ID NO: 118246

SEQ ID NO: 291451 - DNA, 1000 bp, Homo Sapiens
caagttaaaggaacgacaatgttctctttgtttctttaagttttgccgagacatggttatgcctaatttatttataaaaggggaagtggaatcattaaagtaataataattattaataacagtaatggtagccgagtggcacgcgggggcgtgtgctctgcgggacagtccccacggccagcgacgtccaggtcaccaatgggattctttttgctcttgtcttgagaattttttcagtcctatttagctggtgaaatccctagcttgttcttgatacacgaacctatttattctcgtggttttaagtcctccctgccctctctcctctcccctgcagcagggcagggacccctctcccctgctgtctcttggggctctctcccctccgccctctgcattcgggaacacgcacgtccgcgtgggaagcttgcagcagggcgtccgagcaataagggctgggtttgtcccccaccctggggggggccaggctccagagagggggcacctccccacacaccccccccccaccgaggcctaggcccctgccacccccaagactgggaggggacttctttttctaaaacacaaaactcagcccagccaggccccctccctggaggccagcccctccccgcagggggccaggccggggctcccaggcgagggggacttggggcttccacgtccctggggggcaggggccaggccaggggggagggggctcagcccctccacccctcccttcatcctgttatttattcggaaggtttcaaatcacgacagagtccatgttggaggtgataaaaaactgtaaaaaaaaaaaaaaaaaaaaagacaaaacaaaagacaaaaaaaaaaaaaaaacccaacaagaacacttcgcgttgcgtttagactatttattaccgggatcacaggcctggccgcggtaacagacttttacatggaattgtttaattatttgtacttttcatgccagaaaataaaagttcagaatctt

SEQ ID NO: 291452 - DNA, 1000 bp, Homo Sapiens; identical to SEQ ID NO: 118247

SEQ ID NO: 291453 - DNA, 1000 bp, Homo Sapiens
aaatagaattgaaggcattctaaaatggctaaccgtacagtgaaggatgcgcacagcatccatggcaccaaccctcaatatctggtggagaagatcattcgaacgcgaatctatgagtccaagtactggaaagaggagtgctttggacttacagctgaacttgtagtcgataaagccatggagttaagaaacgctatgtattagaggaagctgagcaactggagcctcgagttagtgctctggaagaggacatggatgatgtggagtccagtgaagaggaagaagaggaggatgagaagttggaaagagtgccatcacctgatcaccgccggagaagctaccgagacttggacaagccccgtcgctctcccacactgcgctacaggaggagtaggagccggtctcccagaaggcggagtcgatctcccaaaaggagaagcccctcccctcgccgagaaaggcatcggagcaagagtccaagacgtcaccgcagcaggtcccgagatcggcggcacagatcccgttccaagtccccaggtcatcaccgtagtcacagacacaggagccactcaaagtctcccgaaaggtctaagaagagccacaagaagagccggagagggaatgagtaatggactcagtttggttttagtccacatggcctcctgtggatatgaggatatctgtatgtggaaggattaagatctcccccaggcagctataagaatattttagtttttttcttatcaagtttctcaacctttatttttaatgaaggaggtgctgagttttgtatctttttaatcataatcaacatcagtttttgacccaactaaccttgactgtattcaaacttatgagagtataaaggatctggaggttggggatatgactgacaaggaaaggctgtggccacctgatgaccctttccctttttattaaaccggacacacctgtttcccataaaaaaaaaaaaaaaaaaaaaaaaaaaaaaaaaaaaaaa

SEQ ID NO: 291454 - DNA, 1000 bp, Homo Sapiens; identical to SEQ ID NO: 118248

SEQ ID NO: 291455 - DNA, 1000 bp, Homo Sapiens
ggtctctgagctccagaggtggcctcttggacagatctactgctataggaataaaagacactctgtctcgcaaatggctgcttgtcaacaagcccaaagatgcttgtcggaggacggttatggaagcccttaattcttggttgtgggaaaaggtggaatgacaagttattgattgtttttctgtcgctatttctttcatttgtctagtgaatcagaaaggcttagccaaggccacatctgggaagagtggagaaatttgccacttgacgatcacggattagctagcacctttaagccctgcatttctccaactgacaagtgggtgggggtgatggcacattcagtgtggctatgaagagcgaatcctctctattgtttaaatagattactgtagtttggccaggaatttggcgtcagtggtaacacacttagttaataaaataagccaggcttgcaactaagtatctaactttacaggcccactcacatttgaggcaaggggctattgagtatgtggagagatgtagtgatttaaattcagattatttaagttggatcagctgaagtgtgttttagacccaaaccatctggccccttcgttttgctcagaggaagtaaatgttcacttaaatgaaattgaaaacgccatgtggcaccacaaaagagctctctgtactttccccatgctgcctcaaaagttctgtgagtttcggggtcagtgtcccacccttcacttcccgagggcgggtgagtggagagcagagccaggagctctggcagctgtggacagatgtgcttcctgagcatgggttgtgcctcccatcagtaaaaaaatgtttagttcacttccttaattgtataattatttatttgtaaattatatacatgtactactgtactaaaatattatgtacattataaaacatacacaaaaatagaaatttaaaaaagatgagatgaaaataaatctaagtcaaagttccaaaaaaaaaaaaaaaaa

SEQ ID NO: 291456 - DNA, 1000 bp, Homo Sapiens
gagactgagaattttagggaaaaaaaagtccactgtttagatccagaaggagagttttaatcattgtttatatcatttgagaatgaaaaaataagcttcataaatgaaattctattcacattactgtgtaataaatttccttttggatgattaggattcattgtataaaactgtaaatctttgccattcttggagaagcaaaaggagagttatcaaaaatgtatgtcgtttcatcgttgcaaggtataataaaaactgtaattattcaatctggccctgccatatgaacatttagaaagacaaacttcttcgggagtctcagttgtaaaaccttccctcattaatatctgaaaatgttagtcttcctttaagtcatagaacttatttaaacataaaccaatttctattacaggttatgctattaaatagctgtaattattaagttattatttttataattagttgttaaatttcattttacacccactcaaatttaacaaagaatctttagcccctttaaattttagaattaaattaaatttttaaagttttacttctaaaatgagattgtgactggcaattgtttatagtgaaactttttaaattaatctttgtactcctctatcagtgcttgctaccaagagaatgtccaaaatgatttgttttaccatgggaaaattcttactattcaacaaactctcagttggccccctacagcagtctggtgttgaagtttctttgaacgaactaaatatactcattttatgtaaaggtatccaatttgattttgaaaccaaaatagaaaatgcaaaattctaaattccatgaaacatggaatttatgacaccaaaatcaatggagagtaagcagcagcaaactgagaattatccagcatatgaatataacaatgtgtttttaagtaatcaattcatttaaaaaattgaatattaatacaaagcatattaaaaacatgtaaatattaaaaaaaaaaaaaaaaaaa

SEQ ID NO: 291457 - DNA, 1000 bp, Homo Sapiens; identical to SEQ ID NO: 118249

SEQ ID NO: 291458 - DNA, 1000 bp, Homo Sapiens
tgcagtcgtgccgcagctgcagctggtggcctccaggtcggatatatacttcacagcaactgcagctgtgaatgaggtctcatctggaggcagctccaagggggccagtgcccgaaattctcctcagacacccccgggccgagatactccagtatttccttcttccctgggggaaggtgaaattcaatcaaaaaatctgtacaagattccacttagaaacctcgtgggcagaagcatcgaacgacctctgaagtcacccttagtctccaaggtcatcaccccacccactcccatcagtgtgggccttgctgccattccagtcacgcactccttgtccctgtctcgcatggagatcaaagaaatagcaagcaggacccgcagggaactactgggcctctcggatgaaggtggacccaagtcagaaggagcgccaaaggccaaatcaaaaccccggaagcggttagaagaaagccaaggaggccccaagccaggggcagtgaggtcatctagcagtgacaggatcccatcaggctccttggaaagtgcttctacttccgaagccaaccctgaggggcactcagccagctctgaccaggaccctgtggcagacagagagggcagcccggtctccggcagcagccccttccagctcacggctttctccgatgaagacattatagacttgaagtaacagagttgaatctcatttgccatctttagttttcttatggaggtttatactctttaaacagttctgatgtaatttctcaacaaaatgtggcttttagcctgtcagtgatctattggaccaaaccttctgcacactcggccagttccctctccaatgtccggtgccatctttcctgacctttgtttctttctgttcaggaaccatcagtccccttgtaataaaggtggtagatttcattgaggttttagattgaaactttgaataaatcaaaaatactcattcttatttactgcaaaaaaaaaaaaaaaa

SEQ ID NO: 291459 - DNA, 1000 bp, Homo Sapiens; identical to SEQ ID NO: 223612

SEQ ID NO: 291460 - DNA, 1000 bp, Homo Sapiens
gggagctcaacttctcactctgctacctccccacggccgggcgcctcaccgtgaccatcatcaaagcctctaacctcaaagcgatggacctcactggcttctcagacccctacgtgaaggcctccctgatcagcgaggggcggcgtctgaagaagcggaaaacctccatcaagaagaacacgctgaaccccacctataatgaggcgctggtgttcgacgtggcccccgagagcgtggagaacgtggggctcagcatcgccgtggtggactacgactgcatcgggcacaacgaggtgatcggcgtgtgccgtgtgggccccgacgctgccgacccgcacggccgcgagcactgggcagagatgctggccaatccccgcaagcccgtggagcactggcatcagctagtggaggaaaagactgtgaccagcttcacaaaaggcagcaaaggactatcagagaaagagaactccgagtgaggggtctggcctaggcccgggatcggaccaggctccctcaggaccccatcctttcctgcccggaccgtgaattcatctccttgaagccataacgtccgagctgctggtgcggggcagccctggccctaggcttcctaaccctggaagcgagaggatgagaggaggccggcccagctccttctttcagggtgggggtcattcagcctccactgtgtctgtcttttcttccctggggctccccctcgaggcgaggggccatgcatgtctgggggacccctgccccccaaaaccctctgtctgtctctgtctctttgctgtttgtccaagactcagtgtcccgacccttgttctcgccgtgaatgtcaatgggccaatcctctctgtcctttcagacacacacacacctgtgtccaccccttctgttcgccacaccctgcgtctggccggtccccccactgctgctgctatcaacgccagaataaacacactctgtgggtctcactccaaaaaaaaaaaaaaaaaaa

SEQ ID NO: 291461 - DNA, 1000 bp, Homo Sapiens
aggtcttggtgcagttgatttcagagtttattaatttagtggtcccaaaagtattacatcttttatattctggaagaaaagaactgtgaacaaattagaaccccggaacactctgacgtccatggacgcattccagaaaagtggcaagagatgagtctttcctcctccaggaagcattttggtagaatttccatagagcattgtctgtgagtgactgatcccaacatgtatgttactaagccccaaaacgaacttcaaactgggtgtggtggcacgtgcctttagtcccagctacccgggaggctgcggcaagaggattgcttgagcccaggagttcgagtccaacctgggcaaaagagtgagaccccatctctaaaaccaaaaaggtaccttagaaggtcacctggttggctaaccttttaaaggcaggggcgtgacacgtaggacacattgggaatgtcttggctactacatgtagccttctgggatatatgtgcccagagggagaagcactgagcctgaagaaactagatgagtctcagaaccacagaccggccagaaatctctcccaccattatatcagcgtgatacaggtctacattcatttctacaaacaggaacaagttccttgcagcaataatattattttatgacttgtatttttactatacccttcctctgaggtttagttttcatcacattatgttcaagattccatatctccgtaaattacagctaattacagggcattgttccatggttattaaaaatcagagtttattaaaaatcctgagtcttaagggctgtcttacctttcacttccactgtcctgtagaaacagatcaagctgcaaaccacgtccttcatctgttgttcattttcttgcaactctttgactctgatcccctgagcagcacgttcatcacgcatgctctctgttgcgttccccatttcagatgtccagtaatggtgaaataaaatcctgcttcggaaaaaaaaa

SEQ ID NO: 291462 - DNA, 1000 bp, Homo Sapiens
gacagcacagtgaagctctgggacatggcagcggatgggcagcagttcggcgagataaaggccagctcagccgtgctgtgcctctcctacctgcctgacatcctggtgactggcacctatgacaagaaggtgaccatctacgaccccagagccggcccagccctgttgaagcaccagcaactacactccagacccgtgctgaccctgctggcggatgaccggcacatcatctcaggcagcgaggaccacaccctggtggtggtggaccgccgagccaacagcgtcctgcagcgtctgcagctggactcctacctgctctgcatgtcctaccaggaaccccagctctgggctggtgacaaccagggcctgctgcacgtcttcgccaaccgcaacggctgcttccagcttatccggtcctttgatgtgggccacagctttcccatcactgggatccagtactccgtgggagccttgtacaccacatccactgacaagaccatccgggtgcacgtgcccacagacccaccaaggaccatttgcacccgaaggcatgacaatgggctcaatagggtctgtgctgagggcaacctggtggtggccggctctggagacctgtcgctagaggtctggaggctgcaggcctgagcaggtgggcgtggatgtggatactgcctgccggaggctgggcttcctcctctgttcttgggggaccatccccaatgttggtgctgcctccgccccgtgggcctagggcacaaggagtcccagccacattcgggtgagcgtcctggcctgggccctatgcccgggggaagggtgaaattggggttcaggcccacccagggggccgcttcccactcttgggccctggttttgttatgatttggatgccccgctctcagttgagagcgaaggagaaataaacctgacatgttggtgcttggaaaaaaaaaaaaaaaaaaaaaaaaaaaaaaaaaaaaaaaaaaaaaaaaaaaaaaaa

SEQ ID NO: 291463 - DNA, 1000 bp, Homo Sapiens
ctatgttggccaggctggtctcgaattcctggcctcaacgatcgtcctgtctcggcctcccaaagtgccgggatgacaggcatgagccaccgcgcctggccccttcttttgaatgggcctccttgcgtttccgtttcaatgccccgtgctacttttttgggagccccaaggctgtactgtttgattgactcctttttttcccctttctttttaacctaaattaaagctgccactgcagagccccgccatggaagacacgccgttggtgatatcgaagcagaagacggaggtggtgtgcggggtccccacccaggtggtgtgtacggccttcagcagtcacatcctggtggtggtgacccagtttgggaagatgggcaccctggtctccctggagcccagcagcgtggccagtgacgtcagcaagcctgtgctcaccacaaaagtccttctggggcaggatgagcctctcatccatgtctttgcaaagaacctggtagcgtttgtgtctcaagaagctggaaacagagcagtcctcctcgccgtggccgtgaaggacaaaagcatggaggggctgaaggcgctgagggaggtgatccgggtgtgccaggtgtggtgacctggaggcagccgccccgcgctgcttagcaggacacgtgaacacccagacacccactcagggactcaagtctcacctccctccccggtggagggaggaactttggcactagcccttggagccaggaaaaaagactcgtgtctcaggcagactcttactctggttactaagatcatctgtgcatgacggggagggtggaacaggtcccggaggagtcgtgaatggttctcaccaggacctgaatcgttgcttgtgtttgagaattggaggaatgagtcagcaggcgtggctcatggcccccccgtgtgcaggatcaattgtaggaggaaatttcttttttattaaaagcgaatgtgtatcccaaaaaaaaaaaaaaaaaaaaaa

SEQ ID NO: 291464 - DNA, 1000 bp, Homo Sapiens; identical to SEQ ID NO: 223614

SEQ ID NO: 291465 - DNA, 1000 bp, Homo Sapiens
tctctgaccgctgtgctgaccacccaccatcactgggaccacgcgcggggaaacccggagctggcgcggcttcgtcccgggctggcggtgctgggcgcggacgagcgcatcttctcgctgacgcgcaggctggcgcacggcgaggagctgcggttcggggccatccacgtgcgttgcctcctgacgcccggccacaccgccggccacatgagctacttcctgtgggaggacgattgcccggacccacccgccctgttctcgggcgacgcgctgtcggtggccggctgcggctcgtgcctggagggcagcgcccagcagatgtaccagagcctggccgagctgggtaccctgccccccgagacgaaggtgttctgcggccacgagcacacgcttagcaacctggagtttgcccagaaagtggagccctgcaacgaccacgtgagagccaagctgtcctgggctaagaagagggatgaggatgacgtgcccactgtgccgtcgactctgggcgaggagcgcctctacaaccccttcctgcgggtggcagaggagccggtgcgcaagttcacgggcaaggcggtccccgccgacgtcctggaggcgctatgcaaggagcgggcgcgcttcgaacaggcgggcgagccgcggcagccacaggcgcgggccctccttgcgctgcagtgggggctcctgagtgcagccccacacgactgagccacccagaccctcacagggctggggcctgcgtccctcctcgtgacctcggccagctggacccacatgagggccacctctggaaccttcttcgaggccctggccagccatctgcccagcctcggagggtgggcaacctggtgcttcccgggtggacacacaggaccactcagtggggcctgtgtgggcgccgagacctgggtgtctgggaagtggggcacacggggcctccgaactatgaataaagctttgaaaggccaaaaaaaaaaaaaaaaaaaaaaaaaaa

SEQ ID NO: 291466 - DNA, 1000 bp, Homo Sapiens; identical to SEQ ID NO: 118252

SEQ ID NO: 291467 - DNA, 1000 bp, Homo Sapiens; identical to SEQ ID NO: 223615

SEQ ID NO: 291468 - DNA, 1000 bp, Homo Sapiens
cccagccacgagtatgccacagggggctttcaaaaccaggcagggccaagccttggccccactggaggtagagcaccttctgtggctcccgggtgcctttaggcccgtccaggagttggagcagaggagaagacccagactgtgcatagttccctgaggagggctagcctcaggtgccacagcctggttcggcctggcggccccaggacgcagcagcaaccttgggcttcctgcggggtgactaccttgccctccggccctgcccgttgactaactatgctctgtggttttgtttccagagaactcagattgcacagagctagactcgggcagccagagcggcgagctgagtaacaggggtaacacctccctgctgcccctccctctctctccctctctctccctctctctttaccctccccagggctccatctccgcctcaggggcttctccaccccaagtctggctccattcctggccttctgttggtgacagacccccccctaaggtgctcgtttgggggctcttcaggcagcacctcagcctggcacccccactcccctgcacagcccccaggcctcaggaccccacccctctgaggcccaggggagccctgttcacgctggtttctccccaggacccatgagcttcctggctggcctgggccttgctgtgggactggccctgctcctgtactgctatccgccagaccccaagggcctgccagggacccggcgcgtcctcggtttctcgcctgtcatcatcgacagacatgtcagccgctacctgctggccttcctggcagatgacctaggggggctctgacagaccctggacccagggcctcacctgccactcaaccaaagagtcctcgagccggcccgccaaggggactgctgcttctttttctaaatgcatatttttcattatttataatttgtgtaaaaaacacaccttcaccttacaaggtgctgaccatattaaatgttcaagttctctc

SEQ ID NO: 291469 - DNA, 1000 bp, Homo Sapiens; identical to SEQ ID NO: 118254

SEQ ID NO: 291470 - DNA, 1000 bp, Homo Sapiens
aactcaagctgaagaagatcttagtgagcaagaacaaaatcagcttaatgtcctcaaaaagcatggttatgtcgtaggaagagttggaaggacattcttgtattcagaagaacagaaggataacattccctttgagtttgatgctgattcacttgcctttgacatggaaaatgaccctgttatgggtacacacaaatccaccaaacaagtagaattgactgcacaagatgtgaaagatgcccactggttttatgacacccctggaattacaaaagaaaattgtattttaaatcttctaacagaaaaagaagtaaatattgttttgccaacacagtccattgttccaagaacttttgtgcttaaaccaggaatggttctgtttttgggtgctataggccgcatagatttcctgcagggaaatcagtcagcttggtttacagtcgtggcttccaacatcctccctgtgcatatcacctccttggacagggcagacgctctgtatcagaagcatgcaggtcatacgttactccagattccaatgggtggaaaagaacgaatggcaggatttcctcctcttgttgctgaagacattatgttaaaagaaggactgggggcatctgaagcagtggccgacatcaagttttcctctgcaggttgggtttcagtaacacctaattttaaggacagactgcatctccgaggctatacacctgaaggaacagttttgaccgtccggccccctctcttgccatatattgttaacatcaaaggacagcgcatcaagaaaagtgtggcctataaaaccaagaagcctccttcccttatgtacaacgtgaggaagaagaaaggaaagataaatgtatgagaccgaccttgttcactccagatattaactgtattgaacacaacaaaatacattgaatttgtattaaacatataacgcataaataaagctcccattcttaaaaaaaaaaaaaaaaaaaaaaaaaaaaaaaaaaaa

SEQ ID NO: 291471 - DNA, 1000 bp, Homo Sapiens
atttggttggagttgcaccatcaagggctgtatactttgcatgttactccaaagccaaagagcaatttaatggcattttcgtgcctaacagcaatattgtgcatattttctcagctggctctgcagcttttatcacaaattccttaatgaatcctatatggatggttaaaacccgaatgcagctagaacagaaagtgaggggctctaagcagatgaatacactccagtgtgctcgttacgtttaccagaccgaaggcattcgtggcttctatagaggattaactgcctcgtatgctggaatttccgaaactataatctgctttgctatttatgaaagtttaaagaagtatctgaaagaagctccattagcctcttctgcaaatgggactgagaaaaattccacaagtttttttggacttatggcagctgctgctctttctaagggctgtgcctcctgcattgcttatccacacgaagtcataaggacgaggctccgggaagagggcaccaagtacaagtcttttgtccagacggcgcgcctggtgttccgggaagaaggctaccttgccttttatagaggactgtttgcccagcttatccggcagatcccaaatactgccattgtgttgtctacttatgagttaattgtgtacctgttagaagaccgtactcagtaacaggccggaaaattgtgctctagaagaataaaactgaaaaactctagagaattttttttccccattgatgtttagaaagtttgagactgaaacaggaaaggccataaaatatctggttcatatcacctgttggacatttccttttggattcatgctttctggaaggtttaaattcattaacgttaatagttaattataacttttttttaacttaagaggattcagggttaagcaccaactaaattaaatcatgctatttaatttaagtataaaaaaaaaaaaaaaaaaaaaaaaaaaaaaaaaaaaaaaaaaaaaaaaaaacc

SEQ ID NO: 291472 - DNA, 1000 bp, Homo Sapiens; identical to SEQ ID NO: 118256

SEQ ID NO: 291473 - DNA, 1000 bp, Homo Sapiens; identical to SEQ ID NO: 118257

SEQ ID NO: 291474 - DNA, 1000 bp, Homo Sapiens
gatgatgtggttgattgggatgaagaatatccaccacagatgggagaagaatattcacaaattatttatagcacaaaattatatagatttttcaagtatattgaaaacagagatgtggccaagtcagttttgaaggagaggggtcttaagaagattagattgggaatagaaggttatcctacctacaaagaaaaagtaaagaaaaggcctggaggccgcccagaagtgatctacaactatgtccaaagaccctttattcgaatgtcctgggagaaggaagaaggaaagagtcggcatgtagactttcagtgtgtaaagagtaaatctatcaccaatcttgcagcagctgcagcagacattccccaggaccagctggtagtcatgcatccaactccacaagtggatgagctggatattctccctatccaccccccttctggcaacagtgacctcgatcctgatgcacagaatccaatgctgtgatgctgatcttccttgaaaccatagcatgctactcttcacagtgacgttgtactctcctcattctgcactgcaaggccactcttcttcattgtgagatgcacataacaatgtttaggatattgcagtgtaggcttttttaaagaccaaaggtagctgaatggtttttttttaaatgagtacaactctagcattttgaagttccagttgtaaatgtatttgtttaccagtaggtttgtgaaattggttctttgtatgggggatggtcctttttcacacagctaggtcttttcagaagtggtggaaattggcagctggggtactttcagtttggactgatattcatcacacctcagataaaatgcagagtaatatatagttgcactttataaatggtggttaaatggaaatgttcaagccattttatagttgtgatgcacaatataatttaagtgcttctgtcaaagtattcctccagtacaatttgtatagtttgctgcccttgatgagcaaaaagtat

SEQ ID NO: 291475 - DNA, 926 bp, Homo Sapiens; identical to SEQ ID NO: 118258

SEQ ID NO: 291476 - DNA, 1000 bp, Homo Sapiens; identical to SEQ ID NO: 118259

SEQ ID NO: 291477 - DNA, 1000 bp, Homo Sapiens; identical to SEQ ID NO: 118262

SEQ ID NO: 291478 - DNA, 1000 bp, Homo Sapiens
ggtagggcgcctccggagttaccggagcggaactgcgggtaccgcgaagtcgagtactgggatcagcgctaccaaggcgcagccgattctgccccctacgattggttcggggacttctcctccttccgtgccctcctagagccggagctgcggcccgaggaccgtatccttgtgctaggttgcgggaacagtgccctgagctacgagctgttcctcggaggcttccctaatgtgaccagtgtggactactcatcagtcgtggtggctgccatgcaggctcgctatgcccatgtgccgcagctgcgctgggagaccatggatgtgcggaagctggacttccccagtgcttcttttgatgtggtgctcgagaagggcacgctggatgccctgctggctggggaacgagatccctggaccgtgtcctctgaaggtgtccacactgtggaccaggtgttgagtgaggtgagccgcgtgcttgtccctggaggccggtttatctcaatgacttctgctgccccccactttcggaccagacactatgcccaagcctattatggctggtccctgaggcatgctacctatggcagcggtttccacttccatctctacctcatgcacaagggcgggaagctcagtgtggcccagctggctctgggggcccaaatcctctcaccccccagacctcccacctcaccttgcttccttcaggactcagatcatgaggacttccttagtgccattcagctctgaggccagagcatggtcctccacccttcctgccattctgccctgggctcctcaggtagttggaattcctgacttaggacttggggttgggtccaaggtgcttacatcccaggggcctcatgcctaagatagagggtgggagcgaacccacatgaaccaatacagcccagctccaactagatccagaaaaaaaaaaaaaaaaaaaaaaaaaaaaaaaaaaaaaaaaaaaaaaaaaaaaaaaaaaaaaaaaaaa

SEQ ID NO: 291479 - DNA, 1000 bp, Homo Sapiens; identical to SEQ ID NO: 223622

SEQ ID NO: 291480 - DNA, 998 bp, Homo Sapiens
gcttcatttccgggtgaaactggcattgagggtactggggcgtgcgtgaggcgtttactgatgcttcctggtccggtggcctcggtcccggtaagccaggcatgaagatcacaaggcagaaacatgccaagaagcatcttggcttcttccgcaacaacttcggagtccgcgagccgtaccagatcctgctggacggcaccttctgtcaggcggcgctgcggggccgcatccagctgcgggagcagctgccccgctacctcatgggggagacgcagctgtgcaccacaagatgtgtgttaaaagagctagaaacattgggaaaggacttatatggggcaaaactgattgcacaaaaatgccaagttcgaaattgtcctcatttcaagaatgcagtgagtggatcagaatgtctgctttccatggttgaagagggaaatcctcatcattattttgtggcaacacaggatcagaatttgtctgtgaaagtaaaaaagaagcctggagttcctctcatgtttattattcagaacactatggttttggacaaaccttctcccaaaacaattgcctttgtaaaagcagtggagtcaggtcagcttgtctcagtgcatgagaaagaaagtatcaaacatctcaaagaggaacagggtttagtgaaaaacactgaacagagtagaagaaaaaagcgcaagaaaataagtggtcccaatcctcttagttgtttgaagaaaaagaaaaaggcaccggacacacaatcatctgcttctgaaaagagaagaaaaagaaaaagaattcggaacagatctaacccaaaagtactttctgagaagcagaatgcagaaggagaatgaatcctttggatactttcaaggacattcaaatgtgaaaatgaattttttacaactagaagtatttataataaaagaccaaacttatttttgtaaatgaacccatatgctttagctaaaaaaaaaaaaaaaaaaaaaaaaaaaaaaaaa

SEQ ID NO: 291481 - DNA, 781 bp, Homo Sapiens
gtcacacccggaagcaggggcccgagcggagccggccgcgatgagcggggagccggggcagacgtccgtagcgccccctcccgaggaggtcgagccgggcagtggggtccgcatcgtggtggagtactgtgaaccctgcggcttcgaggcgacctacctggagctggccagtgctgtgaaggagcagtatccgggcatcgagatcgagtcgcgcctcgggggcacaggtgcctttgagatagagataaatggacagctggtgttctccaagctggagaatgggggctttccctatgagaaagatctcattgaggccatccgaagagccagtaatggagaaaccctagaaaagatcaccaacagccgtcctccctgcgtcatcctgtgactgcacaggactctgggttcctgctctgttctggggtccaaaccttggtctccctttggtcctgctgggagctccccctgcctctttcccctacttagctccttagcaaagagaccctggcctccactttgccctttgggtacaaagaaggaatagaagattccgtggccttgggggcaggagagagacactctccatgaacacttctccagccacctcatacccccttcccagggtaagtgcccacgaaagcccagtccactcttcgcctcggtaatacctgtctgatgccacagattttatttattctcccctaacccagggcaatgtcagctattggcagtaaagtggcgctacaaacactaaaaaaaaaaaaaaaaaaaaaaaaaaaaa

SEQ ID NO: 291482 - DNA, 1000 bp, Homo Sapiens
gtgtgtcagcgctgcgggcagccgctcgctctggtcgtgcaggtgtattgcccgctggaaggctccccgtttcaccgtctgctgcacgtgttcgcgtgcgcctgccccggctgtagcaccggcggtgcgcgcagctggaaggtgttccgctcccagtgcctgcaggtgccagagagagaggcgcaggacgctcagaaacagggaaacagccttgcagctgaggactggtgtgaaggtgctgatgactggggaagtgatactgaggaggggccttcaccacagtttaccttggattttgggaatgatgccagcagtgccaaagacgtagactggactgctcggctccaagacctccgcctgcaggatgctgtcctgggtgctgcccatcctgtgcctcctgggctgccgctcttcctgccctactacatctgtgttgcagatgaggatgattacagggactttgtcaacctggatcatgcccacagccttctgagggactatcagcagagagaaggcattgccatggatcagttgctttcccaaagccttcctaatgatggtgatgaaaaatatgagaagaccataattaaaagtggagatcagacgttttacaaattcatgaagcgaattgctgcttgtcaggagcagattttgaggtattcctggagtggagagccactctttttgacctgccctacatcagaagtcaccgagctcccagcctgcagccagtgtggaggccaaaggatatttgagtttcagcttatgccagcactggtcagcatgctcaagagtgctaatttaggtctttctgtggaatttggaacaattctagtttacacatgtgagaagagttgctggcccccaaatcatcagactcccatggaagaattttgtattatacaagaagacccagatgaattattgtttaagtagagcatttccttttattaatataaattaaaacaaatgtttacatccaaaaaaaaaaaaaaaaaaa

SEQ ID NO: 291483 - DNA, 1000 bp, Homo Sapiens
tgcctgaggagctgcagatctgggttcagcaacataatccagaaagcggcgaggaagctgtgaccctgttggaggatttagagagggagtttgatgacccagggcagcaggtcccagctagtccacagggaccagcagtgccatggaaggatttaacatgtctcagagcatcccaagagtcaacagacatccacctccagcccttaaagacacagctgaaatcctggaaaccatgcctttcccctaaaagtgattgtgagaacagtgaaacagcaacaaaagagggcatctcagaagaaaaatcacagggactccctcaggaaccttcatttcgaggaattaagttgtccagacctcccaaagcttcttcagctatccgttgggaatgtgtttctccaggaagttttcccggcgatatcatagctgctgaggctacacattcaacaatttcttgctttgccatcaacactttgccagccaccatcctgccatctaaaaatgtgaatagaaagtatttttcctgaagaacacatcgtcaataaatcacctgcacccaaatctccatctcaggcgctacttctggcaaggcatatcatgaggctagtgaagcacctacaagaaacttataactcaaggttgtaaaaatggcatggtgactcttacaatcatatcacagtgggcctctccaacaatttaaacctcatgacctaggtgaaagctgtgaaaggatccacattaattcttcagaggcagggctaagactttcaagactgaaaagagactagcataaggagacttaacaggaacccagtcaaggccattcatggccatgggaccacgcataaatggagaacgagtaaattttgctaagtccaaggacattggagagatagagtcactattactgatatggtgactgagtcaacaacatactgccactatgaagtaataagaaaataaaaagttaaaaaatgtaacagaaaaaaaaaaaaaaaaaaaa

SEQ ID NO: 291484 - DNA, 1000 bp, Homo Sapiens; identical to SEQ ID NO: 118265

SEQ ID NO: 291485 - DNA, 1000 bp, Homo Sapiens
agaaagaggagaggcagcgtctgcgggaggcaggccttgtggcccagcacccgcctgccaggcgctcgggggccgaactggccctggactacctctgcagatgggcccaaaagcacaagaactggaggtttcagaagacgaggcagacgtggctcctgctgcacatgtatgacagtgacaaggttcccgatgagcacttctccaccctgctggcctacctggaggggctgcagggccgggcccgagagctgacggtgcagaaggcggaagccctgatgcgggagctggatgaggagggctctgatccccccctgccggggagggcccagcgcatccgacaggtgctgcagctgctctcctagtgggttcagcgcggggcggggccgctgcccagtgcagggctgcctcagaccacacagggtgcagctcctccggcggtgggggccgggttcaccagcagggcagcggctgagcaagggctttcagctcctccggtggtgggggccgggatcaccagcaccagagcctcgcaagggccccttccctcctccagaccctccttggccggtgacggctgtgacagtgatggcaggttcagtgccttcagcgcagagcgtggatgctctggaatcacccggacccctggccttggagggaccctccagccccaggaatctgctttggagggaaatgtctatttttctaccgggaatattttagagattggggcatgctggctcctcccgccagctgcaaacctgcaccttccgcctgattcccgatccccctgcgtgggctgcattcctggtcccctgcctgcgtccatcgaggggcctggctgtggcctgttttcctttgaccccacacagcgtcattgcgggtcatggggagcccctggtgggagcttgtggagtcggatcacgtacctgtgcagaaaccgcctctgtggctgcatttgaaataaaacccgacccagcagcaaaaaaaaaaaaaaaaaaaa

SEQ ID NO: 291486 - DNA, 1000 bp, Homo Sapiens; identical to SEQ ID NO: 118266

SEQ ID NO: 291487 - DNA, 1000 bp, Homo Sapiens
aactgatggccataccttacaatcttgttttacccaaaattaagctattggggttgaaagctaaaaggagcacttttgtagaatagcaacttttcttttcctctttcttgattgtatggtggggtggtgacctatttttacaaattatacctaatgagtaaaattagtgtaaagtgataacatgcttctacctgtatttctagtgaccctttagcggcaggtatttatacctggtatttatgatgcagtatataagtggtgaacaataactgacagtattgtgcttgctgtacatgtctggtcttttgaaacagattttagtaagcattttccagaggtaaaactgtgtccttattctaattttattcctagggcaaagtagacagggattatttccttgaatctatttccaaattaatatttttttctttggtatttctacactttaaggccatttggtgcaatttagaaagtgttggcctcccttccgctagccacattcaaaattaacttccaaaacctcaggaacagtacaaagaattgaaaccctcaatatggcagcacagccggctgtagtgtatatttagggtacaccaaatcaggtattcctggtggtcttgtgcactttaatttctgttacaatgagttaagaggatgaggaagaaatctacttattaacacttactgcagaaatgtctgcattattccgtttgttttcttattattttacctctccaaacatcttcctgtgcagatcactacttcatagttgccaaattttaaaacacttaactgctgaaattcagtgtcagcaaagtgatattacgttgttctgtttctaattaaccttagcaaatgtacataatgtcaaaacccaatagtatttgacagtacttatgtatacaatgtttgataagcatttttaataagatttgtatttttaaatttagtatataataaaaagatgtgtttcagtgtgaaaaaaaaaaaaaaaaaaaaa

SEQ ID NO: 291488 - DNA, 1000 bp, Homo Sapiens
ctgaaaaagaaacccttctgattaccttcatgacgggaacctaaggacgaagcctacaggggcaagggccgcttcgtattcctggaagaaggaaggcataggcttcggttttcccctcggaaactgcttctgctggaggatatgtgttggaataattacgtcttgagtctgggattatccgcattgtatttagtgctttgtaataaaatatgttttgtagtaacattaagacttatatacagttttaggggacaattgagatggctgaactactgaataaaaaaaaaacaacgctgttttctagtcctgcagaccgtaagatacttggtatcgcttctattttggttactacggtaggtgcctggcggaagggagtgggcggagatatgtaaatagaaagtgcgtacagttagaacgtccggcacgtaactgatcggagcattctgggaagaagtaatttattccttttcggcagccgaatgaaaaaaaaatttaaaaaaatgtgcgagctaatatggcaaaacaactggaaggacgctaaataataggattgctcataccagcgcgttatgaactcaccctagcttgtaacggaatctttttcactgagtgcagaatgtcggctgtttgtctgtatcgtcaggtgggataatccttacctgttcctcctccggagggcagattagaacatgatgattggagatgcatgaaacgtgattaacgtctctgcgtaatcaggacttgcaacaccctgattgctcctgtctgattctttctgacgatcacttacatttgtgttatgctgattagcagatatccacaaacatagctatgaagttctgactgggataaccttgctgtttgtctattttgcagtcttgctattgctgtttgtctattttgcagtcttgctaaatttgtttgttcttgaaaattgtgatttggtttttgttgctttctggaatttaggcagtgaaataataaaaaaaaaaaaaaaaaa

SEQ ID NO: 291489 - DNA, 1000 bp, Homo Sapiens; identical to SEQ ID NO: 118268

SEQ ID NO: 291490 - DNA, 1000 bp, Homo Sapiens
ttaattcagtggcctgggctacatgggatatttaggacagactatctctctgagacagaaaaacaagggaggaggcagtatgaaagaatgtattctcgctaaattccagtttctaaaggatgtgtaagaaaccagaggtaaaggtctcgcgatatcttaagacatccggcgtagtacgcttcagtgagccacagcgctagagaagtaggagaagctcgcgagatctgtgccgttgccgaggagactaggagggggaggagaggggatctcgcgaaaggaaagaggtcgggagcgctcgcgagatctcggaccacccaacctgaaaggtgcttaggaagttgaaaggcccagaggaggcctccgggcaaatggccggagctggaccgaccatgctgctacgagaagagaatggctgttgcagtcggcgtcagagcagctccagtgctggggttagcacgggctctggttctgggactgaggggcagtcaagcagcaagatggagggggtggggaactgcagctcccggcagcctctgggctttgtgtgagtgccccgcgggctgccgggagctgtggttccgcgggcgggcagcctgggctgcgcggtctgagcgcttgttacaccccgcgcaggattcggacggagagcgcgaggactcggcggctgagcgcgcccgacagcagctagaggcgctgctcaacaagactatgcgcattcgcatgacagatggacggacactggtcggctgcttcctctgcactgaccgtgactgcaatgtcatcctgggctcggcgcaggagttcctcaagccgtcggattccttctctgccggggagccccgtgtgctgggcctggccatggtacccggacaccacatcgtttccattgaggtgcagagggagagtctgaccgggcctccgtatctctgaccacgatggcgcttacctttcagacttcattaaacttatgaccgaaaaaaaaaaaaaaaaaaaaaaaaaa

SEQ ID NO: 291491 - DNA, 1000 bp, Homo Sapiens
acaaaacgctatgaggcattggagcgtcgacgtatcctggaagtagaaggctttaagacagatattaaagttctccgacagaaactgaaagacttggagcaaatgttgtataaggcaacagttaatgcccgggcaaaccaggatcttgcccttctgtgtgaggtccgtgacagcaatagacgggcacataagatacaaggagaactgaagaatcttaagtcgaaagtgtttggtctggagaatgaacttagactctgttaatgtctacttttggaaatggcccccatttagaagaggtgtgcttcttgaaacctgaggacaaggtcatctgctgccagaaaatgtaaacctgagttgactagagtggtggtattcattattgtaaagacagcttgaagaatcggggaccactaggaaagcttttcttgcatactcagcttgctttatcatttttgctgtccttttaacatttgcgaggagtaggggcctggtcctgaatgacttggaggctttcattatttatcctgtctgtattgaccggtttttgttttttcagaaggcagtgatgatgaaaacttaggaagaaggtattttgcaataagcttggctgagtgtccatgggaagaatactttccctaaagagagagaagcactcacagaggctgcctttctcctgagctcggggagaaggcagcacatcacaacctgtcacattgaaataggcgctcattctgctatttcaccttccgtcctgagcagagcctgaattacgtttttgggcaatttcatggtgtttcaccagagggcgctagagactcaaacgaaatgtccatctggaaagattcgggagacactttgccgaggggatgaagctgagatgatgcttgtatggaaagtttgatatttttatcagtcacatggcttttgaaaaatgatgtatatattttaaattaactattttcaataaaatatttcactcaaaaaaaaaaaaaaaaaaaaa

SEQ ID NO: 291492 - DNA, 1000 bp, Homo Sapiens
agaaggagacacagaagtgatgcagcaggagacagttccagttcctgtaccttcagagaaaaccaaacagcctaaagaatgttttttgatacaaccaaaggaaagaaaagagaataccaccaagaccaggaaaagaagaaagaagaaaattactgatgttcttgcaaaatcagaaccaaaaccagggttacctgaagacctacagaagctgatgaaggactattatagcagcagacgcttggtgattgaattagaagaactgaacctgccagactcctgtttcctcaaggccaatgatttgactcacagtctttcctcatacctaaaaggaatttgtcctaagtgggtaaaacttaggaagaaccacagtgagaagaaatcggtcctgatgctgatcatctgcagctcggccgtccgagccctggagctcattaggtcgatgacagcattcagaggagacggcaaagttataaaattatttgcaaagcacataaaggtccaggcgcaggtaaagttgctggagaagcgtgtggtgcacctgggtgtaggaactccggggagaattaaagaacttgttaaacaaggtggccttaatttgagccccttaaaatttctggtttttgactggaactggagagatcagaagttgaggagaatgatggacattcccgagataagaaaggaggtattcgaacttctggaaatgggagtgctcagtctgtgcaagtcagaatccttgaaactgggccttttctaagtctgtgtcctaatgaagattccagttttcacagtagaagttgcatcttatttaatgactctgatacattgcaagcactcagtaaatatcagcaaatagtttatgttaattgtgtcaacagatggatcactggaatgtggggattctgaaacagaaatgaaactgtccttttgacaactctcttatataataaagtatcaccggcttgtgtatgaaaaaaaaaaaaaaaaaaaaaaaaaaaaa

SEQ ID NO: 291493 - DNA, 1000 bp, Homo Sapiens
attcctgcccgcgggggccatcaccggcgacagcggtggagagctgagctcaggggacgactccggggaggtggagttcccccatagccctgagatcgaggagaccagttgcctggccgagctgtttgagaaggctgccgcgcacctgcaaggcctgattcaggtggccagcagggagcagctcttgtacctgtatgccaggtacaaacaggtcaaagttggaaattgtaatactcctaaaccaagcttctttgattttgaaggaaagcaaaaatgggaagcttggaaagcacttggtgattcaagccccagccaagcaatgcaggaatatatcgcagtagttaaaaaactagatccaggttggaatcctcagataccagagaagaaaggaaaagaagcaaatacaggttttggtgggccagttattagttctctatatcatgaagaaaccatcagggaagaagacaaaaatatatttgattactgcagggaaaacaacattgaccatataaccaaagccatcaaatcgaaaaatgtggatgtgaatgtgaaagatgaagagggtagggctctacttcactgggcctgtgatcgaggacataaggaactagtcacagtgttgctgcaacatagagctgacattaactgtcaggacaatgaaggccaaacagctctacattatgcctctgcctgtgagtttctggatattgtagagctgctgctccagtctggtgctgaccccactctccgagaccaggatggctgcctgccagaggaggtgacaggctgcaaaacagtttctttggtgctgcagcggcacacaactggcaaggcttaatcaaaagactggaaaactgcagtctgtaatagcataaggcttccattatgaaagaaaactacaaaaataatacttcttttccacccgtctttggtatgtattggctaataaaatcagttctgtggaactgggaaaaaaaaaaaaaaaaaaaaaaaaaaaaaa

SEQ ID NO: 291494 - DNA, 1000 bp, Homo Sapiens
ccaagacacaccgttccaaagcagaagagcagttcaagttcgaggtcaacgaaatctcctggaacaatgacaataatatgttcttcctgacaaatggcaatggttgtatcaacatcctcagctacccagaactgaagcctgtgcagtccatcaacgcccatccttccaactgcatctgtatcaagtttgaccccatggggaagtactttgccacaggaagtgcagatgctttggtcagcctctgggatgtggatgagttagtgtgtgttcggtgcttttccaggctggattggcctgtaagaaccctcagtttcagccatgatgggaaaatgctggcgtcagcatcggaagatcattttattgacattgctgaagtggagacaggggacaaactatgggaggtacagtgtgagtctccgaccttcacagtggcgtggcaccccaaaaggcctctgctggcatttgcctgtgatgacaaagacggcaaatatgacagcagccgggaagccggaactgtgaagctgtttgggcttcctaatgattcttgagaggaggttgtagggagaggaggccccggcagaggtcttccttcatgtggttagtttggtctgttctctcggagttggtgggcaccctaaatatttgtaagttggtataaattgtaaacgtctctggtcaggctgcgcatttcgttcttttgctttgtctgtgtattagctctttccattctttgcccccagcatgagttaactcgcgtggactctgcagtgcgagtagtgaccccagcataccttgtcctctggacctcctgtcttctctgcttctgggtgcatggtagactttgtggcatttgatacaacttggacaatacctagtttggagggaggggaatggaagggcatggaagtttttttaaataattaaaaatatatacatataattttgagaattgagcatttaataaactgacttttgttattatggaaaaaaaaaaaaaaaa

SEQ ID NO: 291495 - DNA, 1000 bp, Homo Sapiens
aatcaatgtcagggagtcaaaagggctgtagcacaggatggagtttgatttatccttcctcccccaacacctaggaactgaatctttttctttttattttttgagatggagtcttgctctgttgcccagctggagtgcagtggtgtgatctcagcttactgcaacctctgtctcccgggttcaagcaattctcccatctcagcctcctgagtagctgggattacaggcacacaccaccacacctggcccagctaattcttttttgtatttttagtagagacggggtttcaccatgttgcccaggctggtctcgaactcctgagctcaggtgatccacccgtcttggcctcccaaagtgctggattacaggcataagccactgtgcccggcctgaatcttgtcttttgacaataccaaagaaatagggggtagctagagtaaagaacctagggcctggacctgggctggacagtgtatccctttaggtgtgggaactgggtatttccctggggtctgtatgcctttgtcttgtcatttgcttttagggcagatgacactttttcccacccttttaaagctacaagtctatcttctttcttgacccatttcaggagggagccctctcctttatcctgatataatatttaaaagacagaacaagaaagcatgtagccctaatgataggagattatcgcatagagttcagagactggaaactgaattttccctcgactttcactttgtgggtaaatcacccaattttaggctcttttctgcaaggatggccaaaattaatcatttttaaaaagtagattcatgcccactgcccttgggtgagggggaagaatacgggggttcccagaagcccccatgtgatccaagggtttgtattttttttttaagtttgttcatatttgtatgtacatgactatttaaagccaggggattatctttctataaatgtataactggcaacctgtatcttccctctttgttgccc

SEQ ID NO: 291496 - DNA, 1000 bp, Homo Sapiens; identical to SEQ ID NO: 118270

SEQ ID NO: 291497 - DNA, 1000 bp, Homo Sapiens; identical to SEQ ID NO: 223625

SEQ ID NO: 291498 - DNA, 1000 bp, Homo Sapiens
gctgtgccagctgcagccccttcctcctccatgtcggaggagccaggccctgagcaggcagccacaccgccagtgtgggaacgtggaggggctggagggatgcggcagggctcctccccagccccagacagctgccagcctggccccggacccagccctggcctgaccagcatagtctccgggaccagcgaggacctgcggcctcccagacgacgcccacctccagggaagcaaatcccttgctccagccctggctgctgcctcagttttcccagcgtccgtgacctggcacagcatctgcgaacccactgcccgcccacacagtccctggaaggcaagctcttccgctgctcagccctgagctgcaccgagaccttccccagcatgcaggagctggtggctcacagcaaactgcactacaaacccaatcgctacttcaagtgtgagaactgcctcctgcgcttccgcacgcaccgctcgctcttcaagcacctgcatgtttgcgcggagcatgcgcagagcccagccccgccgccacccccggccctggaccgagagccgcccgcgccggagcgccccccggaggttgaccccgcatcagcgccgggcctgccgttcccgctgctggaacccttcacgacccccgcccctgcccccaccggaccgttcctgccctacttgaaccctgcgccctttggcctaagccccccgcgcctgcgccccttcctggccgctgcacccgggccgccggcttccagcgccgccgtctggaaaaagagccaaggtgctggcagcagcccccgaagaccccagggcggctccgacgcgccctcaggtgcgtgcaggtgaccaccagggaggggtggaggggctttctttcctgcgccctgcggggtccggtggataccaggaggcagcagtgctcatccccttcccagggggcacaaatgccaccgtcccgaaatacaggatttttgccttaaaaaaaaaaaaaaaaaaa

SEQ ID NO: 291499 - DNA, 766 bp, Homo Sapiens
gcgagccccggcgcaggggccggatctggccgggggccggcggcggtgtgggagcggcgcgtcatgtacaccatcaccaaggggcccagcaagctggtcgcgcagcgccgcacaggtcccacgcagcagcaggtggagggccggctcggcgagctcctgaaatgccggcagcccgcgccgccgacctcgcagcccccgcgggcgcagccctttgcgcagccgccgggaccctggcccctgtcgagcctggcagcaggtgcaacagcagctggatggtggcccagccggtgagggcgggccaaggcctgtgcagtacgtggagaggacccccaatccccggctgcagaactttgtgcccattgacctagacgagtggtgggcgcagcagttcctggcgagaatcaccagctgttcctagtggctgctgggagggggcgctgctacacggccgacctgtcgccaggagagaagcatggcgccctgcccacccactgcgcctggctgggtgccggccacacctgaagtgccagcatttggacttttgcacctttttttcccttggcccggctgtcccaaccaagctgccatggccaagggccgaacccgtctgacctcagccctgctcactgtgcccagggaccagcgaccagcccctggggctggcagggaggagctccaggctaataaagtggagaaactgtcaaaaaaaaaaaaaaaaaaaaaacaaaaaaaaaaaaaaaaaaaaaaaaaaaaaaaaaaaaaaaaa

SEQ ID NO: 291500 - DNA, 1000 bp, Homo Sapiens
ttatggcaatactttaactttgttttgttacattgtttttgttcttggaatggctcacaagcagaatttaaaaggcagattttcattaactataaatggctgaaaaaactgaatttactatctagctacagaaattatttttctatggtgtgaaactgttcccagacatccctaagaacttttacaaattattataaatttgtcacacctaggtcagcgattaaaatagtgttttgcaaatggaattttaattaactcaaaatgaattaagagtgcattttaaaaatcacaagtgagactttgatgttttggccccccagccaaaacttaatggtcataaatgaattttatctacaaaatctctttaaatttggctggttgccttgtcatatgtatttcactattttccaaggaaatatataggaagcaattatgaaactgagaatagttttatatagaattcttttatttactgataatgcattaacatttttattgaaatgcaatggaatatgtgccaaaacacgtgaaaagcttacataaagaaaggcatcagttgtcgtttggagaaaggtacacatttttttgatggtcctaagtgatatggtattactactagaatcacagatttcttcaactgacttattttggtatattcaactacagctttctaaggataggactactttcatgtctagtaatacactgtattccccgttaattatcccttaagtcagattgtagaatttgcaagaaactaggtatagaaaaaatgtacaggcaacttttgtggttagctttataaatttagggtgcttataaaatgataaaatgaattctttaaataacctataggaatcatctgaatctgtaacatcagagactaaaactaaaagttttctttaatctgttgtttcttaagcaataaactgaaagaccttactccataaaaaaaaaaaaaaaaaaaaaaaaaaaaaaaaaaaaaaaaaaaaaaaaaaaa

SEQ ID NO: 291501 - DNA, 1000 bp, Homo Sapiens
atggtgactcatacctgtaatcccaacaatttgggaggccaaggcaagcaaatcacttgagctcaggagttcgaaccagtttgggcaacatggcgaaaccctgcctctacaaaacatgcaaaaattagctgggcatggtagcatgcgcctgtagtcccagctactcgggaggctgagcttcgaggattgattgagccagtgaggtccaggctgcactaagccaagatcctaccactaggcaacagagccagaccctgtctcaaataaaaatttaaaaaaataataaaaaaggccgggcgcactggctcacgcctgtaatctcagcactttgggtggccaaggtgggcggatcacctgaggtcagttcaagaccagcctggccaaacatggtgaaaccctgtctacaaaaattagccaggcatgatggagggtgcctttagtcccagctctttgggaagctgaggcgggagaatagcatgaaccagggaggtggagggtgcctgtaatcccagctccttgggaggctaaggcaggagaatagcatgaacccggtaggtggaggttgcagtgagccgagatcgcgccactgcactccagcctgggcgacagagcaatactcccgtctcaaaaaaaaaaaaaaattaaatgattgtgatatgtgttacttttggtcacaaataaattgtaattaagattattctggccaggtgcggtggctcacgcctataatcccagcactttgggaggccgaggtgggcagatcatgaggtcaggagatcgagaccatcctgcccaacatggtgaaaccccgtttctactaaaaatgcaaaaattagctgggtgtggtggcgtgtgcctgtaatgccagctactcgggaggctgaggcacgagaatcacttgaacccagcaggcagaggttgcagtgagccaagattgcgccactgcactccagcctgacgacaaagcgagactccgtctcaaaaaaaaaaaaaaaaaaaa

SEQ ID NO: 291502 - DNA, 1000 bp, Homo Sapiens; identical to SEQ ID NO: 118271

SEQ ID NO: 291503 - DNA, 1000 bp, Homo Sapiens; identical to SEQ ID NO: 118273

SEQ ID NO: 291504 - DNA, 1000 bp, Homo Sapiens
acacccgagacccctaattagcctatctgaatgaggaccaaaggttagagccctctttctccccgaagaaagagcccggaaaaacatggcagagcaaagagcaaaatcctttctcccccgaatgctttaccagtttctcagcaacatttattcaagatgatttttaccaggaaccttatcaaaggcaaaaccacagcagcttgggttgaagtccccatcctggcctcctctcagccgccagacatggccaggaaccctgtggttcccaagaacaatttaaagatcactctttgatttgaaagaccaccattatcattttactaaattcttatatatacttgtgccttttccaactttcagttctcttaagaaaaacatccactgtagctttataaaataccttagtatcagctaggtccaagtctccaggcaggactatcaaaatggactccttcttcctatcagctctagaaccccagaggacttgcccagtaggccagctgagcatttaccaggcagcatctccctggccttccacagtctcgcctgtctgtctctggccttggtggacctggctccctccctaggaggcttttgccctcagcttgaatacagttcctggtgcatcaaagctgtaagttctcagctgctggcctgcgctcatcacctcttcctacaaataaacatttggaaaaaagtccatcttcaatatgcttaaagagaagggtaggagataaggagaaagaacagatacggtttttttcccctttaaggcctttagattttgaggtactgtaaggggcctagaaggacaaaaggctttcattccctcttccttttggcaggcaggttatcagtccttggcagaagggcccagccctatccttttctgtatcaaacaaaatccttgaggttggtatacaagttaaggctgaaaaaaggccttaaattcccagtaaagaatgtgaaagcaagcatgtaaaataaactggtcttcatg

SEQ ID NO: 291505 - DNA, 1000 bp, Homo Sapiens; identical to SEQ ID NO: 223626

SEQ ID NO: 291506 - DNA, 1000 bp, Homo Sapiens; identical to SEQ ID NO: 118274

SEQ ID NO: 291507 - DNA, 1000 bp, Homo Sapiens; identical to SEQ ID NO: 223627

SEQ ID NO: 291508 - DNA, 1000 bp, Homo Sapiens
cattgggatcattgcattgatattagcactggccattggtctgggcatccacttcgactgctcagggaagtacagatgtcgctcatcctttaagtgtatcgagctgatagctcgatgtgacggagtctcggattgcaaagacggggaggacgagtaccgctgtgtccgggtgggtggtcagaatgccgtgctccaggtgttcacagctgcttcgtggaagaccatgtgctccgatgactggaagggtcactacgcaaatgttgcctgtgcccaactgggtttcccaagctatgtgagttcagataacctcagagtgagctcgctggaggggcagttccgggaggagtttgtgtccatcgatcacctcttgccagatgacaaggtgactgcattacaccactcagtatatgtgagggagggatgtgcctctggccacgtggttaccttgcagtgcacagcctgtggtcatagaaggggctacagctcacgcatcgtgggtggaaacatgtccttgctctcgcagtggccctggcaggccagccttcagttccagggctaccacctgtgcgggggctctgtcatcacgcccctgtggatcatcactgctgcacactgtgtttatgacttgtacctccccaagtcatggaccatccaggtgggtctagtttccctgttggacaatccagccccatcccacttggtggagaagattgtctaccacagcaagtacaagccaaagaggctgggcaatgacatcgcccttatgaagctggccgggccactcacgttcaatggtacatctgggtctctatgtggttctgcagctcttcctttgtttcaagaggatttgcaattgctcattgaagcattcttatgatggctgctttataatccttgtcagatattaataattccaactcctgattcatgttggtgttggcatcagttgattatcttttctcattaaaattgtgatgctcctaaaaaaaaaaaaaaaaaa

SEQ ID NO: 291509 - DNA, 1000 bp, Homo Sapiens
acataccagtcaagctcttaggggagcagaagaaaagcaggaagaatttaaatgtttaattttttttttaaattgacttttctagttattaaaagttgcttgtttcagcagtgatattgtataaagaacatcttgtaagatactcctgacatcttgctttagcacatgtacagtacagtttctatgataatgtgtttgctctaacttccctggcttctccttcagcccatccactctcctctagagcagttgggttggaggctcattgaggcaagcagcaacattggagggggagcagggcagtgctgtgtctgctgcctcccatgcccgttctgacctcagccttggaactcctcaagaacctgaagattccagtggtcagtgtcggtggggggtgggaggagagagcggcagagaagctctgagagccccttcccccacaacaaatctagctctagttgttatatttaggcaaaactttgtagtcttctttcccttttatgatggattttgataaaagtacaaaacagggtttttcttttttatcacctttgaatttggaaattttgagcacccaagctcttctgtacctatttaaagtccaccaaggggactgcagctcctagaacatgagaatcaagcctcttaattttaaactgcggaatgtggcctctgcttcctccgtcctcctgcccaaggacgacgaggattgctccagggctgctgggtagtttaccgtcccttctataggcatggagttggcactgacatcacagcttcataaccccaccaccgccagcttcccctgcctcctacatccagtctgttcttgttcatagtgagaatcctgtgttcccacttcagtgacacctgaattgtttgttgttgttttttttttttattgtcttcaaagaggaagggccccattaaagggtgaacttgtaataaattggaatttcaaataaacctcatgtacttgtgtttataaagaagaaaccaa

SEQ ID NO: 291510 - DNA, 1000 bp, Homo Sapiens; identical to SEQ ID NO: 118278

SEQ ID NO: 291511 - DNA, 1000 bp, Homo Sapiens; identical to SEQ ID NO: 223629

SEQ ID NO: 291512 - DNA, 1000 bp, Homo Sapiens
gatccggccaggcaccccacccgcacacgatgcccccggcgcctccgtgctgcagaacgagcactcattccaggcacagctgcgcgccgccgccttcacgctgttcctgttcacggccacgtgggccttcggggcgctggcggtgtcacagggccacttcctggacatggtcttcagctgcctgtacggcgccttctgcgtgaccctgggactcttcgtgctcatccaccactgcgccaagcgtgaggacgtgtggcagtgctggtgggcatgctgcccgccccgcaaggacgcccaccccgcacttgacgccaacggggccgcgctgggccgcgccgcctgcctgcactcgccgggactgggccagccacggggcttcgcgcacccaccgggcccctgcaagatgaccaacctgcaggccgcgcagggccacgccagttgcctgtcaccggccaccccgtgctgcgccaagatgcactgcgagccactgacggcggacgaggcgcacgtgcacctgcaggaggagggcgccttcgggcacgacccccacctgcacgggtgccttcagggcagaactaagccgccctactttagccggcacccagcagaggagcccgagtacgcctaccacatcccatccagcctggatggcagcccccgcagctcgcgcacagacagcccccccagctctctggatggcccggcggggacacacacgctggcctgctgcacccagggcgaccccttccccatggtcacccagcccgagggcagtgatgggagccctgccctctacagctgccccacgcagccgggcagggaggcagcgctcgggcccggccacttggagatgctgcggaggacacagtccctgccctttggtggccccagccagaacgggctgcccaagggtaaattgctagaaggcctgccgtttggcaccgacgggaccggcaacatccgaacgggaccctggaaaaacgaaactactgtgtggtag

SEQ ID NO: 291513 - DNA, 1000 bp, Homo Sapiens; identical to SEQ ID NO: 223630

SEQ ID NO: 291514 - DNA, 1000 bp, Homo Sapiens
ataggtattttattcccatgtttccatctataaatagccttctcagattcagaaaacaatacagagaacatcagaaattttctaaaatgggtcactttgaaaagaattctttttctcactattaatgctttagaagcaagacgcaattttaaagctttagttccttttctttcagtcattgtcttagtttgggtacaaaaatgtcatttcagtaatgtactgaaatcttataagtgaatagttgaagctagtaaaaatgataccagtataaaaatggtacttgtagtccatgagcttgaacccaatgactgattgtttgacttttaaaataagtaatagcagccatttgggagtagggggtaggtggggaagatgtactccgtatcaaataataatgatgttgaaataatgatagtaggtatgtattatggattggagaagcacttattacactatctaacctaatatgtagaacaattcttgagagttgtatctgtcgttatttctgaatgtgaagctcagagaagtgacacagagtaaatggctgatcttctatattgtagtatattttgtccttccctcttccctgaggaacaaagcacgtatctttagtctctttgatatttattctgagaccaagggcttgcttgacctgatgattttccttcagctctctgaaggtgctttttccacaatccaagtgattctgatacacactaaagttgagaatcactgcactagatcactttgtgttttctgattttcaaggttgatacgtagctttaatacagctcttctgttgacagttattactttaattttgcatttgttccttgtaagaatggctggaaactgtgtgttgacatttgaggatgggtatgcaaggaaaaaatatacttctgtttacttactctgactttgaaatagtgttatttttctatatctgaaataaatgcttctaccatagaaataaatttgcctatactatctgaaaaaaaaa

SEQ ID NO: 291515 - DNA, 1000 bp, Homo Sapiens
tctcagacccaatcagctaagcacacagattttgcctaatttgaatcagtcaggaacagggttgaatcagtcgaggacgggcatcaaccagccaccatccctgacgcccagcaattttccttcacccaaccaaagttccagggcttttcaaggaactgaccacagcagtgacttagcttttgacttcctcagccaacaaaatgataacatgggccctgccctaaacagtgatgctgatttcattgattctttattgaagacagagcctggtaatgatgactggatgaaagacatcaatcttgatgaaatcttggggaacaattcctaaagaagaaagggaagacaatttacaaactccaagcactaaaaggcagtatattacagaaactctgtagaggctgaactgttgatgttcaggtggactacatgaagataacatgcttaaaaatggaaagcagaaagtaactgcagtgatgaacattttggtccaaattcttgttttaaatcttacacctgaaagtaaaatattgggatcacttttccctgtctaaactccaggatacagtatccaatttatccaaacagaactgtggtgtcaatgtgtaattaattgtgtaaaatagccttcccaagtttctttttccctggaaaataaaaaaggtaatagaacttgtagtttatttaaaccccatgtcatgaggaggtactagttccaagcaacaaactccttaatttgctctaatagataggtatggtttaatctttccattgtgtcttttcatttaattttcctgaagcttgcaggatagattgaaatgttataggtttgtttggagtaaccaaacagtatgcaaattaagaaaaagccagagaacctagaaaacatccagtggattacagaatttcttccccatattcactcctcacttttacaattttcccacaatcctctacttcagtgggatgctgtgtctagtgattaaacaaaaatatagagctg

SEQ ID NO: 291516 - DNA, 1000 bp, Homo Sapiens; identical to SEQ ID NO: 118279

SEQ ID NO: 291517 - DNA, 1000 bp, Homo Sapiens; identical to SEQ ID NO: 223631

SEQ ID NO: 291518 - DNA, 1000 bp, Homo Sapiens; identical to SEQ ID NO: 118280

SEQ ID NO: 291519 - DNA, 1000 bp, Homo Sapiens
cgttctcatttatgcctttgtccatttgcacacaacagaaattgtaatgagcttcactatttttgtttctttccttccttttttttcttttttcctttctttcctttttcttgtcttgtttcttgtttttttctcttgtagtttcttttcttaattgtcatttttgcaacaaaaagccaagaaagagctttagtttcttggcaagaataatgtgatattagtaagtaaaggttcttaaaagtctgatgactggaatagatataaagtcctgtttaaactacctaaccttggctgtgggccgataatgcatatgtccagttctcacttaaattatgcaatgatatttctctctgaggaaattatacggaatgtaacttataaaagctttactgaatataagttataagcattttattcattagaactccaaaatagatgttcaaagttcagtccttgccatttgactgagaccacatggtgtgccccttgagtgaggctaatctttaggtttttcctatagaaaacgttcttcctccatcagtagccctttatttgatattcagaagtggaaagctttttcattctccagtagaacttttaaaaattgttacagatacctagctcttcacagatatcatgtattgtaaacagtcatgtgtcttaattttattttctctatttgagtgcataattatcctaataatcccaaagacactgacaactcaaggaacagcagtacagtactattagaagttaagtatgttgttgttatttcacatttcatttaattgtggataaatgttagacatctgttgaaataagctcatatggtggaaacgacaactatattatgaattattttcagaaatggatctttgaatagcagatcaggatttaaataataaaattatctatgaatcacttttatggtcatacatatatgatacaaatccagagttattggtgcagaaatggctacccgagagcttggtaaatttgc

SEQ ID NO: 291520 - DNA, 1000 bp, Homo Sapiens
gcttatcagatagcatagttggatcagtagatgacatgtatggtgtaccgtgtttcactgtctcagttgtgttactaagaatgagcatttgatcatttttttctggtctctgtctatgtgactatcttgtaagtcaataaatttctgtatagtccagatggattaaacttctcatttcttttaaatatgtatgaataataatacaaggaagtaggcattccatttaataatcaagagcaagttgtactcaaagcattcagttaaagtgtatctgtgtgtggaactaatttcagacaatagaaaatattagttgaaatgtttaagaattaggcatgaaaaataaatttgagaaattttgtttccttacatgtatttttaaatcataagagttattttctatctgatgtaaaattagtttataaatcttaatcagcttctagatgtttattagcttttatgtcatgaaatgttggagtctcagggttgctgattttctgctaatgggaaaaattgactaagtctttaaaatagtttgcagccttctcccacaggagacaagtgaaagataagtgtgattttagatctttcttgtccatagttgttttcagtggagtcttccattctgtatcttaccctaagatctggttcttccctccccatccccaccccccacccaccgcctgccagctcacactaatagatgattcttaattgccaaatgtgttagagtttgtatatcctactcctgggccttacatgtcgcctgttggggcttaagaccaggttgataagtaggaactgaaagtcttccagattcacagtagaaaattttatagacatttctgttaaagaaatatatcgattttatgtttttcaattatgttactgtaaataccttgtacctgttcatggattattttattctaaaatattttgtcaaatgtgtatcaaccaaattaaaaagaaaggttttcatgtcaaaaaaaaaaaaaaaaaaaaa

SEQ ID NO: 291521 - DNA, 1000 bp, Homo Sapiens
aattccttccacaactggctgtaagctgaggaaaaaaataaaaccagtaacagatgaagcccaacttgtatatagagatgaaacaggggaattattccttacaaaggaatttaagtctactttatcagatatatttgaagtaattgatttagatggaaatggtcttcttagccttgaagaatataatttttttgaattgagaacaagtggtgagaaatgtgatgaagatgcttgggctgtctgcagagagaattttgatacaaagaggaatgaactaacaagacaaggatttatggatttgaatctaatggaagctaatgatcgagaaggagatccttgtgacctttgggtaactctacactctatgggctacaataaagctctggagttgacagaggcatgtccatttgtcattgatatctatgcagaaaaatgcaagccaaaaattaaagctgtccatatggaggcatgtagtggacaacttgagaaggccatttgtaaatctgttcttagcaacggtgatgccaaagtaatggatggctatgaaaatataatcgtgcatacttacagttgtgacacctggataacgtcagttattgaaaacaagtcagatgagaaagtgattattcacatcagcaatgagctaagtaaaaactgcataaacaacagaggactcaacatatttgcagtagaagtgggacccaaatctacaatggtttgtcaacatgtaatgcctttgaatgaacgacaagaatggatatattattgtatatattctcttatttcttaaataattatacttagaacttaccaaactaagaattatttcagatttagtctgttatttattaaacaactaaatgctacttaactgatgtacctaaataataatctattcaatttatatgcattttcattttatgtccatggtatgtactttattattaaaatataaataatgctttcaaaaaaaaaaaaaaaaaaaaaaaaaaaaaaaaaa

SEQ ID NO: 291522 - DNA, 1000 bp, Homo Sapiens; identical to SEQ ID NO: 223634

SEQ ID NO: 291523 - DNA, 1000 bp, Homo Sapiens; identical to SEQ ID NO: 118283

SEQ ID NO: 291524 - DNA, 1000 bp, Homo Sapiens; identical to SEQ ID NO: 223635

SEQ ID NO: 291525 - DNA, 1000 bp, Homo Sapiens
cctctgggctctgctttctagggtggcatttggagcatgtcacccactggatttacagactccagccccttcctctgtccgtgctcacagtgtgtctccctttttggttttctttttttttttctttttgagacagtcgtgctgtgtcacctaggctggagtgcagtggcacaatctcggctcactgcaacctccgcctcccgggttcaagcaattctcctgcctcagcctcccagatagctgggactacaggcacacgctgccacgcccagctgattttttatattttagtagaaacggggtttcaccatgttgctcaggctggtcacaaactccagagctcaggcaatccgcctgctgcggcctcccaaagtgctgggatcacaggcgccagccactgcgcccggcccagtgtgtctcccttaacccaagagggccctcagctgtcccagggggcagtgggccatcaccagctggccagggcatggcctattctgccacatttgccaccctctgagcccaccagtcctgggcacagctgccctacatgtctgtcctgagatggacgtcaggtccagcctgccccggcagcccgggcccgtcctcctcagcactcaggccaaccccagccaccgccagcctgagaccaggtgtcctgaggctccctgcactgccacagcccagatgcagttctcctgacccagccgtgctacccggacacttgtcattgttaccagcagtctccaaactggacagtgcacaagggcccagaacaactctgatgccaccacaaaacaaacatgttcactagcggattccattctttgggttaaagctgcctccagcctcaggagcagtgtggaggaagatgagggccaggaaagaaggaaaccttggtttctccatccttgtgaatgtcctcgtctgtttcaaatacagtgcagtcagttttatatgatgtgcaataaaccaaaaaggctttattaaaaaaaaaaaaaaa

SEQ ID NO: 291526 - DNA, 1000 bp, Homo Sapiens
tactgttagaggaaaatatgtaatacttacatgaatgttgcatgtgtgcatgggagcaactgagtagcaatagtaaatttactttccaaaaaagccttattaaaatataaatattagaaaattactttggagacccaagtaaatatttctcatacatatgtagaaagaaatataggtaagcagcttacctcagtatttcagggcagcaagtgtttgtgaagcaaggatgagcagcatgaagatgtcagatcagcaaggagaaacttcaactcaatcccaggttttctcttcttcccttatcctgcatgtacaataactgctgcctggcaaactgcaaacaagcagcatcactcaagtttgaagtttcgccgcttttgtcaactatcctctgggcaaaggtattcagcaagaggtggaatggctagacactgaatcaagagatttcagtgttactctggtcaagttagtcgccctctctgggctccctttttttctatgcataaaaaggggagaagcagagagtgggaagacagctctactaacccttcagctctagcagtccatgactttttaaggaaatgtaatacaagtcaaaccaggcaatacagaggagaagggaaaggcagagggtgtgattatggtgacaatagctgccttcccctatcgaacagttatcagtaaaagacatttcaatcttacaaagcaactgttagaaacttctgtctaacaccatcacaaataggttcatggtcagcctaaacatgtatactgtgcattttatgggtgactttgaaagatctgttcaattatttttcagaaactaaattttcaaaaaattaatatgtgtacaattaaaatgaatgaaagaaaaaccattattgtacagaggtattaatgagactatgaaacggcaatacttttttaaatcacagatttgtaatatatgttcactgtgcagagggattgtaccttgtacaaaataaaacaaatttctcaaact

SEQ ID NO: 291527 - DNA, 1000 bp, Homo Sapiens; identical to SEQ ID NO: 223636

SEQ ID NO: 291528 - DNA, 1000 bp, Homo Sapiens
ctccggcctgggcttcagccccggaccccaggacaccccggacaaagaggagctgctctcgtctgaagcctgctacgaatgcaagatcaatggcctctcccctcgggaccggccacgacgcagtgcccacagggaccaccaggtgaacctggccacccttgactccgaggccctgctgaccttgggcctgaacctctcacacctgggccgggccgagcgcatcctggagctccggccggccctggagggtctagagggccggatccgctacgtcatcgtccgcggaaacgagcaaggtttctttcgcatgcatcacctccgtggcgtcagctccctgcagctggggcggaggcggccggggcctggaacctaccggctggaggtggtgagccacatggcaggaccctggggtgtccagccagaggggcagccagggccatggggccaggccttgaggctgaaggtgcagctgcagttgctttagttgggaggagcctcagtgggccccagctgtccagagaagggggattctggaactgggaaggactgatccccagaagcgatggctgaccagattgaaccccgaaactcaggaagagtgaaatgctacacgacaacctcaggcaagcccggcctctgcctgggcctctgtgccagccccgggggccccccagttactcagtctttcctggagacagcaagaagctgcaatgtgcaatccccctgcccccacagccaaggtcaggaagaggccctgtggtcaccgtgtctggccaatctcaggctttcacttctgtactgcactgtggcttgccctggcggggggcagggggttggcaggacatggcaatgggcaactggggtgggcacagggcttattcctcggagtagaagggtgtacagggggcccagactccacagtgacttgccacatttgccccccatttggagaatgcttttatatcaaaagtggagacgataataaagttattttgggtta

SEQ ID NO: 291529 - DNA, 1000 bp, Homo Sapiens
agctttgtgctgcctcttgatctacctctttgtccaggtggacacgctttgcctggaggatttgcatgcgtttattgcgcaggccttgtgcctccaaggaaaatccacctcgcagcttgtaaatctacagcctgattacatcaaccccagagccgtgcagctgggctcccttctcgtccgcggcctcaccactctggttttagtcaacagcgcatgtggcttcccctggaagacgagtgatttcatgccctggaatgtatttgacgggaagctttttcatcagaagtacttgcaatctgaaaagggttatgctgtggaggttcttttagaacaaaatagatctcggctcaccaaattccacaacctgaaggcagtcgtctgcaaggcctgcatgaaggagaacagacgcatcactggccgagcccactggggctcacaccacgcagggaggtggggaagacagggctccagctaccacaggacgggctctgggtatagccgttccagtcagggacagccgtggagagaccagggaccaggaagcagacagtatgagcatgaccagtggagaaggtactagtcaacctccagaaagagtatggagagaaaaagaggcacacctggacgcagagccctgccagcgccctcctctgctgttgcagctgcaaggagaccatgcctgtgggagccaggcctcgcttgcatgaagaaggaacgatgcctttttcaatggtgtctccctcccattgtgcagaagagcttttgttggcttctctcccgagcttgtgcctgattctgtggcccaaaacaatcattgttaacatcttcatgtgtttcattctgatctttcattcatatatatgatgcctagctaatttcattttaaaataaatgggaatctgttgtattctgattttttattagcaacactagattatgaggggttatctcctgttattaaaaagtcagaaaacactaaaaaaaaaaaaaaaaaaaaaaa

SEQ ID NO: 291530 - DNA, 1000 bp, Homo Sapiens
tatcagaagtgagctaccaaaacttccacagatgtgagatttaacacttaattgcagtcacgtgtatgcaacacagcaataatctagaatgaaaaggagggtgattagccttcataagatgacctatagagcaaagaaaggtgactggaagggttcctaacccaacctactccccttagggtgtgtatccaacccagtgcttcctaagagggttacggaccactgtggttatcctctaaagttccagccagctctaggagtttctaaattcaggcctctgttggaaatggcctatttcgatagatagaaagttttctatagctctaaaggtttctcctttgcaacccattcaatttcagtctgctgctttgctctttcaaaacagaacctccaggctgacgaggcaagacaaagcctcccaccagacttggagattgaagttcttaaaaggcctttgttgtagccaaaggcatgcatgcgtcactggtagtaggaggagcctgtcccagcttcatcttgtcctgagatttatccacatacaggaaacaggcgggacacagtggctcacgcctgtaatcccaccactttggaaagctgaggcaggtggatcacctgaggtcaggaattcgagaccagcctggccaacatggtgaaaccccgtctccactaaaaacaaaaacaattagctgggcatggtggccggcgcctgtaatcccagctactagggaggctgagacacacgaatcccttgagcccaggaagcagaggttgcagtgagcctcgattgtaccactgcactccagcctgggcgacagagcaagactctgtctcaaaacaaacacaaatacagtatccaaacattggagattagtgactcacctgcagttgggagccagctacaacccaaatcattttaaaattttcaattctttgatctcatgcaatgcacactttcttctgaattagcaaactgaataaactacagaaattttttagaatc

SEQ ID NO: 291531 - DNA, 1000 bp, Homo Sapiens; identical to SEQ ID NO: 223637

SEQ ID NO: 291532 - DNA, 1000 bp, Homo Sapiens
ccaattccatccttccctgaaggagagaagggaagtgaaaagtagagtaactccccagcatttccctctttttctcctcatcggccagcccctcctccagccccctctggtggcatgccatgccaagagcaacgtgtaaaggaacagagaatatccaatgcagtcaagtccaccctgcccagactttgccactgacttctcccacccttctgtctcccccataatagtttatttggttggtctggactcacttgtggcctttgattaaattcctaaggggcctgaagaagacatttctactgcagagggttagaggcacttgagcaaggcccccacatcccaactctgggagttgtggtgggaggaggcacttctgggggataggaccagacaagataacaggagctcacatggaagcagaagctgtgacaagtttagtagtcccaaaatgggttatatcccttccccctttacatcagaatcttgtgaaatgggaaaacaacagaaggaggggatcaaagatagctgatctcacatgcttcccaggcagggcagaggtgggagtcaaacccgggtgacaggtgggtggagagcactgtttgaggttgtggctgatccctctctggtattagtttttcccctgggagcaggaagccctaggaagaggggactgcagggtccccaggggatctttcctccctcccctgcatgaggcagaggcaagctgcctgccaaccccctccctcaaggaatggccttgcccaggaatgcccaccacacataccctcttctttttttctagtcaaactcttgtttattccttggcttgcctccctccttcctcccctctcaacctttacttctgatttctatttcatggaatttgggattgaagttaaactacaacagtgccaccaacaccaagtcttgcaggaaaaaaatacaaagaaatttaacaaaaaaaatatattaataaaaaagttcaaaaaaaaaaaaaaaa

SEQ ID NO: 291533 - DNA, 1000 bp, Homo Sapiens; identical to SEQ ID NO: 118284

SEQ ID NO: 291534 - DNA, 1000 bp, Homo Sapiens
aaactaggaatctatgatgctgatggtgatggagattttgatgtggatgatgccaaagttttattagaaggacccagtggggtagccaagagaaaaactaaggctaaagttaaagaactcactaaagaagagctcaagaaggagaaagagaaacctgagtcaaggaaggaaagtaagaatgaagagagaaaaaaggggaagaaagaggatgtccgaaaggataagaaaattgctgatgcagacctatccaggaaggagtctcctaagggtaaaaaggacagagaaaaagagaaagtggacctagaaaaaagtgctaaaaccaaggaaaataggaaaaaatcaacaaatatgaaggatgtttctagtaaaatggcatcccgagacaaagatgacagaaaggaaagtagaagttctaccagatatgcacacttaacaaagggaaatacccagaaaagaaacggctaaagctctggcatcatcatcccagaacatggtcatgttccagattgcagtttgttacaaaaaagcatggaaaatgtaatattgctctgattggtgagggtgtgtaaattagccattgaatgtatcattggtgcttagcaagtaaattacctgaaatttaaatataccgtctcatacttctaaatgtaaaaacattttaaaaatgtcacagaatatgatgtaataacttctatttattgatcatttattgatcatgtattcagataaatgtatatgtatcatgaatttttatggattaatatattgaatactttcattgacgttaaataagaatattaagattttaaatgttaccctgtgcataatgccttgtaactttttcaagtatgctaaatactcagggagatggatttgctcgttgttttcttccctccttccccttcctgcttccctgttttctctttcgtggacacctccccaggctcatgtgccaccaccttccctcctctccagccctcccagccctcccgcagccttt

SEQ ID NO: 291535 - DNA, 1000 bp, Homo Sapiens; identical to SEQ ID NO: 223639

SEQ ID NO: 291536 - DNA, 1000 bp, Homo Sapiens; identical to SEQ ID NO: 223640

SEQ ID NO: 291537 - DNA, 1000 bp, Homo Sapiens
cccgctggatgccgtgcgggccgagtgggagaggacctgtggcccctaccacaagcagcgtctggctgagtattacggcctctaccgagacctgttccacggtgccacctttgtgccccgagtccccctgcacgtggcctacgctgtgggtgaggatgacctgatgcctgtgtactgtggcaatgaggtgactccaaccgaggctgcccaagcgccagaggtgacctatgaggcagaagagggctccttgtggacgttgctactcactagcttggatgggcacctgctggagccagatgctgagtacctccactggctgctaaccaacatcccgggtaaccgggtggctgaaggacaggtgacgtgtccctacctcccccccttccctgcccgaggctccggcatccaccgtcttgccttcctgctcttcaagcaggaccagccgattgacttctctgaggacgcacgcccctcaccctgctatcagctggcccagcggaccttccgcacttttgatttctacaagaaacaccaagaaaccatgactccagccggcttgtccttcttccagtgccgctgggatgactccgtcacctacatcttccaccagcttctggacatgcgggagccggtgtttgagttcgtgcggccgcccccttaccaccccaagcagaagcgcttcccccaccggcagcccctgcgctacctggaccggtacagggacagtcatgagcccacctatggcatctactaaggagccagagtgtgcgcatttcagagcatgggattgatcggcagcaagagtaaagacacagctccagaggcccacactgtggggtctgggccctgccttaggcagcccccctctttggccccctcccgtcaggcccagggcttggagtgaaagtgactctcaggtggtggggtggggaatgtgaataaacatgatttcttgccgggcaaaaaaaaaaaaaaaaaaaaaaaaaaaaaaaaaaaaaaa

SEQ ID NO: 291538 - DNA, 1000 bp, Homo Sapiens; identical to SEQ ID NO: 118286

SEQ ID NO: 291539 - DNA, 1000 bp, Homo Sapiens; identical to SEQ ID NO: 118287

SEQ ID NO: 291540 - DNA, 1000 bp, Homo Sapiens; identical to SEQ ID NO: 223643

SEQ ID NO: 291541 - DNA, 538 bp, Homo Sapiens; identical to SEQ ID NO: 223644

SEQ ID NO: 291542 - DNA, 1000 bp, Homo Sapiens
ggatggtaaacctaaagagaagcagcagcatttgagtcaggcattcatcaaccaacatacagtggaacgcaagggaaaacaaatttgtaaatattttcttgaaaggaaatgtattaagggagaccagtgtaaatttgatcatgatgcagagatagaaaagaaaaaggaaatgtgtaagttttatgtccaaggattttgttccagaggtgaaaactgtctgtatttgcataatgaatatccttgtaagttttaccatacaggaacaaaatgttatcagggagaatactgccagttttctcatgctccactgactcctgaaacacaagaattgttggctaaagttttggatactgaaaagaagtcatgtaaataaaatagacataaaaaggtagcaatgtacagataaagagtactttaacgcccatgcgtgttcaagactgttcaagactggtgatttggagtagtttacaagattcctcattcagagtgccctcttgtgtgactggggtgatgtgcagcttccataatggatgggacagagagctgggatctaatgtacaagtgaagggcttggtcttccctgagacattccagccattggaataggagaggagcatatatggcagaggtgatggctggtgggtaaatgtgatagtaaattgtagaaacctcttctgattgattggatttccttaataaaatcggaagcaaggttaggctgagtgagggtgagtaaagaggtagaggaggtttgaggagagagaactgctcggaagacattggtagatggaccataaaaacagagttagttctctttatgacattaaatagttttacaacatatttttaatggttcacaatttcattttagggcttaaaataaattatggttctatgatttttttaaaccagtttcctattgttagacatttgtttccagtttcttactattataaataaagtgaaacaatatctcttactataccatttctaaaaaaaa

SEQ ID NO: 291543 - DNA, 1000 bp, Homo Sapiens; identical to SEQ ID NO: 118289

SEQ ID NO: 291544 - DNA, 1000 bp, Homo Sapiens
gcaagccttcagtatctcatcaggccttacagtacacatgagaactcacactggtgaacggccctttgaatgtcaggaatgtgggaaagcctttactcggtccacatatcttattcgacatctaagaagtcatagtgtggagaaaccatataaggaatgtgggcaaacctttagtaattcctcatgccttactgaatgtgtgtgaattggggctgatacttggaaagaatgtggtaaagccactacttcctcacacttactgaacatgtactcattcatagtggcaatgtacacagtcataaggaatgtgggaagccttccttggtgtctcagatcttaacaattccaatagaagagaagacatatgaatgtaaggaatgtgggaaaatcttggctccttccataggccttactattcatgtgtctgtgcatcctaggaaacaaactgaacgtaggaaacctgtcgatgcttacatcttactgagtctgtttgaactcatgctggagagaaatgctatgaatgtgaggaaggtggaaaagctttcattattttcctcgggccttactgagcttgtgagcacattggatataaatgcacgtcctctggctgtaaggaatgtgttgaaacctttcactctgccttataccttaatattcagctgtgatctcacaagtgtgaaaaatcttatgaatgtaaaatgtgtggagattcttctttgtttttagcttccactttgggaacatgtcaaagcacacattgagaagtcccatgagtgaaagagatgttggaaagcccttgaacttggtcgttaggaaacatccacactgaagaggaacctgactgtatggaaggtcaaaaaggctgtattaatttacatgcaaaaagtcacactagaggaatgccatatcagaatgcttttggtaaatatacatgttttaaagaggttatatatcattaataaaaatatctagctggtctgaaaaaaaaaaaaaaaaaaaa

SEQ ID NO: 291545 - DNA, 1000 bp, Homo Sapiens
tgaagaggtcaaagaggaggaagaggatgcacagcctgagcctgagcaaggcacagcagcaggagaaaagttaaagtcggcaggagcccaaggcggagaagaaaaagatggcggcggagaagaaaaagatggcggcggcgccggagttcctggccacctatgggaaggagacctcgagggcaccagcggcagcgatggcaacgttgaggacagcgaccagagcgagaaggaacctgggcagcagtattcgcgcccacagggcgccgtcggggggctggagcctggcaacgcgcagcagcccaacgtccacgccttcaccccattgcagctgcaggagctggagcgcattttccaacgcgagcagttccccagtgagttcctgcgaaggaggctggcaagaagcatgaatgtgactgaactcgcagtgcagatttggtttgagaatagaagagccaaatggaggagacatcagagggcattaatggcaagaaacatgctgcccttcatggcagtgggccagcctgtcatggtaaccgcagctgaggccataacggcacccttgttcatcagcgggatgagagatgattacttctgggaccacagccattccagcagcctgtgtttccccatgccaccctttcctcctccgtccttgccccttccactcatgcttcttccacctatgccacccgctggccaggctgaatttggcccattcccttttgttatcgtgccttctttcacattccccaatgtctaagggatagcctctgtgccactttttgccagagtgtctttgagccagattcatattttgcatagcaccccatcaaaagtagttcatcaaatgtctattaaacgttttaaagaaaagtacatcattgacccatttttagggcacttgtaaaaatgtttctataaatatgtgaagggtatgtacatttgttttgtgtgtcacatggggtcagtaagttctcaataaaaattgttaagaaatgcc

SEQ ID NO: 291546 - DNA, 1000 bp, Homo Sapiens
gaggagagtttatttttaaacatggctagttgtcagtatgtacgtgagctagtatttttatgagtcgagttttttaaaggcacattctgtatactgcttagtatatgcattttataccatgtaattataaaacactcgagtaagttcagcattagaaatgtttagctttgtatgaactgagtgtgccagaaataaacctggagcaatttttaaataagcaaaataaaggagatttttctatttgttcactttaatttattcacttttgtgtacttttatgtactgcaaatcagatttcagtctaaagcgaaacatcagtaagttaataataaacctatctttcgggaagttgaatattaatctgtacccaaaacgtatttagtaaaatatttgcccccgccaccctgccatgctgacataacaacttttataatgttgaatagatgatatgggaaatactaataacaacaatgtaatttttgcagacagctttaacttatatacattgcttgatttttttcaaaagactaaatatgtcatttatactttgtttattttctaccaaagaaggtttgtaaaaatatgcctgctgcttttccttttgaaggacacaaacctggtcccaacatgtgtggattttaactctgagtggggtgcattaaatcaaaagagagaggcagaagatgaaatgctaaagaagggtcaggcaaacttctgtttcagtataaaattcatcatgcaggcttctgagtgaaatagaatgatttgaaaccactactgtattgcctggatacacacacacacacacacacactttatacaaaaatgttaaaagcaggtttcctggcatgttctaaactgttttttctttaggaataaattacatttatctgcacagatgttgaaaatcctgttaaacccttgtcaaggatttgtttattttacattaaacaaatttattatgatgaacgtgaacaaataaattaaaaaataaaaaagg

SEQ ID NO: 291547 - DNA, 1000 bp, Homo Sapiens; identical to SEQ ID NO: 223645

SEQ ID NO: 291548 - DNA, 1000 bp, Homo Sapiens
ctgtgtattttagaaatcattctttacagttttgcattgctgaggagagagaaaaaacaatttttttgcaagagatgttcatgtaatttatttttgaaagctttgttgaataagatttcctgccgctttttgacaatcttgtgtatttagaaaaatgtattacttgaaaacatgacatagaacattgagttagcaatttacatgggctgtatgttatataagagaatgacatactgtggctaattcaacagtagatttattcttttagcctgcacaacagttgatcttttggctatgacaatttgtatggagggtacgatctaagttaagtgtgtcaaaagcaaggcttaggatttgttatgggagtagaatatatattgaattttgtatgaagaactatttgtttaaattatatagctgggatattttgccactgttaaaatggattcagaagaggtcctagaaaagtaagattagtgacatgtgtgggtttatatttagatatttaaggtgcattttcatagtgtggtaagaccttaagtaaaaggcacaatgggtactacagaattaaaatgtaggtctaacataatgccagttccactttaactttgtttttgcatttgaagaatgtatgtagcactttcctatatatttgtcacacattgaaaactggactgggtataactatgttataggaaagtagaaattgtattctttattttccatctttgttttctgttctacaaagttgatgcttaagcatcaagctgattttattggtcatgagaacaaatggatgtgatcatgaaggaatcagattccctatgtaaagcagtttaaaatggaattcaatgttcagtgctcaggtatgtagtaagtactgtagtcctgtgggggcaaatgtgtagatatttttaaacattttgccataattgcacaattttttgcatttttacctgatgtcattgtttcttataataaaaccttttctgattgaaaa

SEQ ID NO: 291549 - DNA, 1000 bp, Homo Sapiens
gtgtggtacaaccacacagggttatctggtttggtttgaaccctatcaagaagaatcaactatgaaggtagatgaggatcctgatcttgggttaggtggaaatctagtgatgaacttcgctgatgttcttttagagagaggtcagtatccctatcacctgtgttttgatagcttctttacaagtgtcaaattgttgtcagccttgaaaaagaagggggtgagggcaacaggaacaattcgtgagaacaggaccgaaaaatgtccccttatgaatgtagaacatatgaaaaaaatgaagagagggtattttgatttccgaatagaagaaaacaatgagataattttgtgtcgttggtatggggatggcattatcagtctgtgctccaatgctgtgggcatagaaccagtcaatgaggtaagctgttgtgatgctgataacgaagaaatccctcagataagtcaaccatccatagtaaaagtgtatgatgaatgcaaggaaggtgtagctaaaatggatcaaattatttcgaaatacagggtgaggataagaagcaagaaatggtactcaattttggtgagctacatgattgatgtagccatgaacaatgcatggcaactacacagagcctgtaacccaggtgcttctctagaccccttggattttcggagatttgttgcacatttctacttggaacacaatgctcatctgtcagattagggtacataaaatggacatagtgcagacattaataagacatagaaaaataataattatacatgctgttgtaccctcccaaagtaaatctgatatatgtaatgaagttattaaataatacttttaaaaatcagacatttatatagagtttcaaagactattgtaacaagtaatgttaaaaattgtctgtgagaatgttgaactgtagtacctttctctatgtcaagttttgtgtcagacatgggaaatcatgtatttgttcaattgaaaaaaaaaaaaaaaaaa

SEQ ID NO: 291550 - DNA, 1000 bp, Homo Sapiens; identical to SEQ ID NO: 118290

SEQ ID NO: 291551 - DNA, 1000 bp, Homo Sapiens
tcacttttaactataagaagtcacgtggaacttagtgatttttaacaaatactaaattcatcctcactttatgttgatcttccagcaacgtttatatatttagtaattttaaaaattcctatttgatacaattaaattttatataatgtgttttgcttgaataaaatgttacatttatactttgagaactctgaccaaatctttcatacagatacaggtaaagaaatatttttctaggttgtcggagctgcgtacctcccgctgcttctccttgtggtccagcaccacctgctggtcagtggcagaactgtcctgacttcgtgaacatggaactgctaagagggaaaactgcatctcagcattttcattttttctgaatattaagtgaaaagcaagttctatttgtaagaaatagcttttgctgaggagttgtgaattcctgcacctgtgtttgatgttatttgtatgcaatggattgctggccctttgttcctaagcaagagaagaccaaagatgcttccccatgacctctccggtgaggatccgcaccccccggacttgctctctgatgaagggcatgtcgttcagtgccccagcagtcagaagcagtttttgtggaactaaaactaataatgttaccctcacaaaggaaatgttcttttactaagtaagttattgctgattcttgaatgtctgttatataactgggtcggctatcaagaaggaaggttatatttcttatcacattttaagttgttaagcaaatgtgagtttttttttaagaaatgaggctttcactgagatttgtgtgctattcataattttaggaattactgcttagaacagctgcttgggtgtatttttctacacaggtctgtacttctgccactttctccttttaaaaaaacaaaactatgcatattatgtattaaagttttcttggttttatatatcagagaataaaaacttttttgacttttgagtaaaaaaaaaaaaaaaa

SEQ ID NO: 291552 - DNA, 1000 bp, Homo Sapiens
gacgcttttcttccttctgcccaagtaaagtgaccatgccagtggccagcactgggggcacacctgtgatgggcaccccttcagctgtgcgtgtgcattccccatcccccatgctcttgcgtgtgcttgcacgtgcacgcacacacacacccagtgctctctccacccgacccgtgtacttgcagacagggaagctgagctgaaaggagcacaagagagtgtccggcttcgctgctgagcgcggcctctccccgccgctgcgcactgcagttatttgtagacaaaggcacccctgatttttgtggtttttctccctttctgtgcttgccaatagttgttttgttttgtggacctgccctgggggctggcagctccttcaggcagcctggcagaagtggaactcccctctccactgatggctgggaagggagttggggaggaagagtgggagggagggctggggatggatgggagggaaggggagggaaaggtgggaggaatgggaagcagctgttctggtggcttccactctgaggtgtgggaacggggagcctctggggggcacctgtttccccagtgactcagagagagcaagactgcaggaacggaggggtcctgcagggtgtccaccaagaagtcacagagcccgttctgcgccccacaccatctggagcaggggcttctcttctgagtgaactgaggaaggtgcttagatggtgagggctctagaaaccaagccccatgagcagcagtggaagacctcgggccatgcggcctggggaggacttggtggcgatccgcaacctggaccccagtgagaggcggtgggctgactgggaaggagaggcccccaacctcctcaggatttgcacgtgtgaactacgctgcctgtggggtgccccttaggcttggagagccccagattggaggcagacagactgcaccaccccttccccccctgcatctcaagaataaagcaagctgcctttgtacttggttg

SEQ ID NO: 291553 - DNA, 1000 bp, Homo Sapiens; identical to SEQ ID NO: 223649

SEQ ID NO: 291554 - DNA, 1000 bp, Homo Sapiens; identical to SEQ ID NO: 223650

SEQ ID NO: 291555 - DNA, 1000 bp, Homo Sapiens
tatgaagtacataagttccctatggcttatggagagttatttattaattaactttatggtagggctagtatgaatacctttttaacaattgtgtgctattacaacaatgaagattcaaatgactccgctttgaaggatgttttctctatatggtaaaatatatatgaagaagtcttgattacgtgaagatcacttgactcagaatacttcaatgtattttgttcacattaccactaagcatattatcagtaaactattaactgactgcacattatgtaatacgttgtactttttgttgaattcaccgaagttcttccatttatatactatttttaatggcattccggctttaacattctgtgagtcttataaatttgactcttgaatggcaaaataatgttagtatgtagaaggttaactttcatttataatataagtggtgcaggggttcaacattttaagtaaaaatatttttacacactacctctctttttttttttttaaagttttaacatcagaacttttgggggaaaaactacttcagggcttgactttttgtacaaattttaactgtaaaatacagatttatcttgtacgcattcatggaaatggaaatcaaagctgctattgctttttattttaattatcctgttaagggtatctatcaatggtattttcaagtagatctctgtttcttaaattattggtgaaataattgattactagatatattgtaaaaccaatagatcctggttatacgataaaatatcagctcattggtaggctgaatcaattatttcaagtgcaccttattaacaaaagtatcagtggatccaacataaaattttatagtactaaatgtcaagcctaactgtgaattttgttctgtatcttaagtaaatttatgataatgttctcgagctatcaacaaaatatatgtacttttgtgagctatgaattttctaattaaattttacatgctataaaaaaaaaaaaaaaa

SEQ ID NO: 291556 - DNA, 1000 bp, Homo Sapiens
ctgccgtcccagctactgccagaccacctgctgcaggaccacctgctgccgccccagctgctgtgtgtccagctgctgcagaccccagtgctgccagaccacctgctgcaggaccacctgctgccaccccagctgctgtgtgtccagctgctgcagaccccagtgctgccagtctgtgtgctgccagcccacctgctgcagaccccaatgctgccagactacctgctgtaggaccacctgctgccgccccagctgctgcaggccccagtgctgccagtctgtgtgctgccagcccacctgctgctgccccagctactgtgtgtccagctgctgcagaccccagtgctgccagaccacctgctgcagaaccacctgctgccgccccagctgctgtgtgtccaggtgctacaggccccattgtggccagtctctatgctgctagcccatctgctggcaaaccacctgctacaggaccacctgctgccaccccagctattgcatttccagctgctgccagccttcctgcagtatctctagcagcagtagctcctcctgctgtggcttcagctgctgcaggctctcctgctgcatctccagttgctgccgccccaactgctgccagaccatgtgctgccgcccaacctgctctagtgcttcttgctgctgaggctgtcatctggactcaccagattctcatcaaccagcattcttgatgtagctcatctatgagctgagttatgggaagctagttggaaaacttcagttccaaccaattcttagattgaatctggcctccaaatatatgctccccccacattttacctctctaccaaatgaacataagttgtaatttgctctgaaatctgtcaactatcttaattgaaatatttgctctctgccataatttctcatatggagctattccattttaaacaaatatttatctaaataaatcttaaataaattttcaggcatagaaaaaaaaaaaaaaaaaaaaaaa

SEQ ID NO: 291557 - DNA, 1000 bp, Homo Sapiens
ctctggaaggggaacgtctcttccaaaatgctgaacccgcgcctgcagaaggcgatgaaggattacctgaccgccaacaagcacggggtgcgcttccgcgggaagcgggaggccgggctgagcagggcacagctgctgtgccagctgcggagccgcgcgcgcgtgcggacgctggacggcaccgaggcgcccttttctgcgctgggctggcggcgcctggtgcccgccgtgcccctgagccagctgcacccccgcggcctgcgcagctgcgctgtcgtcatgtctgcaggcgcaatcctcaactcttccttgggcgaggaaatagattctcatgatgcggttttgagatttaactctgctcctacacgtggttatgagaaagatgttgggaataaaaccaccatacgcatcattaattcgcagattctgaccaaccccagccatcacttcattgacagttcactgtataaagacgtcattttggtggcctgggaccctgccccatattccgcaaatcttaacctgtggtacaaaaaaccggattacaacctgttcactccatatattcagcatcgtcagagaaacccaaatcagccattttacattcttcatcctaaatttatatggcagctctgggatattatccaggagaacactaaagagaagattcaaccaaacccaccatcttctggtttcattggaatcctcatcatgatgtccatgtgcagagaggtgcacgtgtatgaatatatcccatccgtgcggcagacggagctgtgccactaccacgagctgtactacgacgcagcctgcaccctcggggcgtaccacccactactctatgagaagctcctggtgcagcgcctgaacatgggcacgcagggggatttgcatcgcaagggcaaggtggttcttcctggcttccaggcggtgcactgccctgcaccaagtccagtcattccacactcttaaaaagggtttcttgggaatcaatgtgcaa

SEQ ID NO: 291558 - DNA, 1000 bp, Homo Sapiens
aaagttcgtgggagttgttctttgtaattcactgaggtataaaatctacctcagtgacaacctgaaagatacattctacagcattggagacagctggggaagaggtgaagaccattgccaatttgtggattcacaccttgatggaagaacagggcctcagtcctatgtagaagccctccctactattcaaggctactatcgccagtatcgtcaggagcctgtcaggtttgggaacatcggcttcggaaccccctactactatgtgggctggtacgagtgtggggtctccatccctggaaagtggtaatcacaggaccgtcatgctgcaagcttgccctgcccagccccaccaactaagtcgcactaggggctgtgagcaaagacagccagcgtgctcagccccgctgccctaggtgccaggaaggtcatagatggacactggccattctggtcatctcagtctggaactcagtcccacttcttggcctggacaatgaacaggattcagttttgctgttaactttgcttctctacttttttttgtttgtttgtaatagcacatcccagagacatcagaaaccagcaactgattcagtgtgatttccagactttttaggcatgaaattcggacacttcagtatttccaggaatagcatatgcacgctgttcttgcttcatggaatgctacatgctttctgtttttctcattttggatttctccaaaactaactgaatttaagcttcaggtccctttgtatgcagtagaaaggaattattaaaaacaccaccaaagaaaataaatatatcctacttgaaatttactctatggacttacccactgctagaataaatgtatcaaatcttatttgtaaattctcaattttgatatatatatgtatatatgcatatacatatccacacttgtctgcaagaatattgattaaaattgctaaatttgtacttgttcaccagaaaaaaaaaaaaaaaaaaaaaaaaaaaa

SEQ ID NO: 291559 - DNA, 1000 bp, Homo Sapiens
tactggaggcagaagggacccacgaggcctaaaccaaagatcctgcgtggccagggagagagctgcagggctggtgacctgcaaggactctccagagggaccgctcgccgggcacgtccgctgcctccagacgctcccccggcagaacctcctgggctccactgcagctcttcccagcagctgctgtcctctacacccagctgccatgctgcgccgcctgcacaccccctcctcgcacataccgggggccaccagagcccccttccccctttagtgcctgctgccttacccctgcagggagcctctcctcctgcagccagtgcagatgcagacgtgccgacctcaggagtggcaccagacgggatcccagagcggcccaaggagccgagcagcctgctgggaggagtgcagagggccctccaggaagaactgtggggtggggagcacagggacccgagatggggggcgcattgatggcattcctcttctccacatctgctcgttcttgccgagggtgcagtggtggcgtggaagccctgtcaccccaccccaggccaccctctcccagaggacgccatctcccttactgttgctgggagcctcgccctttgtcccaactgggtagagcccccaggtgctgtttgctcaggaggctgctgtgggggtgccttcctcagcctctggccctcttggctcagattcaatcaaatgttgcttccctctcctgtctttcccactggagccgcccaagcttgtaggtgggtggtgtgcataggccacgtgtgccccacatatgcagggggtgccccacacagctagagcggccaggagagcgcctcctaaccaccagccgttcctgatctcaggagccttgaagggctgggctcttgccttcctggagtaaatattggcacagatttcatttgagagaactcagccccctggtctaagctggacttacctctgtggattctgaaattaaagaagtgagttgctaagg

SEQ ID NO: 291560 - DNA, 1000 bp, Homo Sapiens; identical to SEQ ID NO: 118291

SEQ ID NO: 291561 - DNA, 1000 bp, Homo Sapiens; identical to SEQ ID NO: 118293

SEQ ID NO: 291562 - DNA, 1000 bp, Homo Sapiens
acgccccgcctggcgctggctgtcagcctcagcatctgggtaggctctgcggcggtgtctgcgccggtgctcgccctgcaccgcctgtcacccgggccgcgcgcctactgcagtgaggccttccccagccgcgccctggagcgcgccttcgcactgtacaacctgctggcgctgtacctgctgccgctgctcgccacctgcgcctgctatgcggccatgctgcgccacctgggccgggtcgccgtgcgccccgcgcccgccgatagcgccctgcaggggcaggtgctggcagagcgcgcaggcgccgtgcgggccaaggtctcgcggctggtggcggccgtggtcctgctcttcgccgcctgctggggccccatccagctgttcctggtgctgcaggcgctgggccccgcgggctcctggcacccacgcagctacgccgcctacgcgcttaagacctgggctcactgcatgtcctacagcaactccgcgctgaacccgctgctctacgccttcctgggctcgcacttccgacaggccttccgccgcgtctgcccctgcgcgccgcgccgcccccgccgcccccgccggcccggaccctcggaccccgcagccccacacgcggagctgctccgcctggggtcccacccggcccccgccagggcgcagaagccagggagcagtgggctggccgcgcgcgggctgtgcgtcctgggggaggacaacgcccctctctgagcggacccggtgggaatccgagcggctccctcgggagcggggactgctggaacagcggctattcttctgttattagtatttttcttactgtccaagatcaactgtggaaatattttggtctcttgtgacgttcggtgcagtttcgttgtgaagtttgctattgatattgaaattatgacttctgtgtttcctgaaattaaacatgtgtcaacacaggactttctggatcattccagaaagtgtcagacgttttctcattgtcttg

SEQ ID NO: 291563 - DNA, 1000 bp, Homo Sapiens; identical to SEQ ID NO: 118294

SEQ ID NO: 291564 - DNA, 1000 bp, Homo Sapiens
tctctcctccccatcagtgaggaccagacaccactgattgcaggaatgtgttccctccccatggcaagatactacataattaaatatgcagaccagaaggctctatacacaagagatggccagctgctggtgggagatcctgttgcagacaactgctgtgcagagaagatctgcatacttcctaacagaggcttggcccgcaccaaggtccccattttcctggggatccagggagggagccgctgcctggcatgtgtggagacagaagaggggccttccctacagctggaggatgtgaacattgaggaactgtacaaaggtggtgaagaggccacacgcttcaccttcttccagagcagctcaggctccgccttcaggcttgaggctgctgcctggcctggctggttcctgtgtggcccggcagagccccagcagccagtacagctcaccaaggagagtgagccctcagcccgtaccaagttttactttgaacagagctggtagggagacaggaaactgcgttttagccttgtgcccccaaaccaagctcatcctgctcagggtctatggtaggcagaataatgtcccccgaaatatgtccacatcctaatcccaagatctgtgcatatgttaccatacatgtccaaagaggttttgcaaatgtgattatgttaaggatcttgaaatgaggagacaatcctgggttatccttgtgggctcagtttaatcacaagaaggaggcaggaagggagagtcagagagagaatggaagataccatgcttctaattttgaagatggagtgaggggccttgagccaacaaatgcaggtgtttttagaaggtggaaaagccaagggaacggattctcctctagagtctccggaaggaacacagctcttgacacatggatttcagctcagtgacacccatttcagacttctgacctccacaactataaaataataaacttgtgttattgtaaacctctaaaaaaaaaaaa

SEQ ID NO: 291565 - DNA, 1000 bp, Homo Sapiens
ctgttaaaatgtcagactataacaaatatctatcttttatttttcattagacccttatacttcaagagaacacactcagtgcttgtttttattttcttgacacatttattaacaaaatgcatcatggaaaaaaaatctacctcttaaaattccatttgcttttatggttagacatgcttgaccaaaaatgttcagaagaaaatatgtacctggtccctaattaagctgcgttaaatttggtagaagcatttaaatggtctatcttcagttttactgaacaaaaaatgtaatttatttagcattctttataaaagaattgatgctagaggtaaaaaaaaatacttgtttttaaaaaatcctttacgtcttgtgtaattaccccattattaaattcaagtccttgaaaatcaactagagattataaagtctctaaagaaggcaataacaaaatttatcaagatatagtacttttcagtttttgtttagtgtcttcagcatcactgtgtctgtatttcaagtacaaatgtttttaaaaaggattctttatacatatgtgctgaattgattttaagaaagttgcatgatcctgtaggagcaacatttttacctaaaaaatgctaactttatagtatttctaattgttcaaggattttaaaattctatttcagggagtatatcttctgtggttttgaaggaggtgagttctgtatgtgccttgcagtactgtaattcaaaaataggaatctttggctgcaaaattttaatgaaatgttaggaagtaattttcgtgctaacattaaaattataactttttgaaaggtaatagattttccagaagtaaaatctgatggttctaaatcaatcaatgtgatagttcatttttaactcttagaagaattcagaggaaattaacccagctaagtaaaaaatctgtcttgattttgttacttattcctcagaatattaaacattgatcacataaaaaaaaaaaaaaaaaaaa

SEQ ID NO: 291566 - DNA, 1000 bp, Homo Sapiens; identical to SEQ ID NO: 118295

SEQ ID NO: 291567 - DNA, 1000 bp, Homo Sapiens; identical to SEQ ID NO: 223654

SEQ ID NO: 291568 - DNA, 1000 bp, Homo Sapiens; identical to SEQ ID NO: 223655

SEQ ID NO: 291569 - DNA, 1000 bp, Homo Sapiens; identical to SEQ ID NO: 118296

SEQ ID NO: 291570 - DNA, 1000 bp, Homo Sapiens; identical to SEQ ID NO: 118297

SEQ ID NO: 291571 - DNA, 1000 bp, Homo Sapiens
gtggccgccacctgccagacccccaaaatagcctgcaagaatggcgataaaaactgccaccagagccacgggcccgtgtccctgaccatgtgtaagctcacctcagggaagtatccgaactgcaggtacaaagagaagcgacagaacaagtcttacgtagtggcctgtaagcctccccagaaaaaggactctcagcaattccacctggttcctgtacacttggacagagtcctttaggtttccagactggcttgctctttggctgaccttcaattccctctccaggactccgcaccactcccctacacccagagcattctcttcccctcatctcttggggctgttcctggttcagcctctgctgggaggctgaagctgacactctggtgagctgagctctagaaggatggcttttcatctttttgttgctgttttcccagatgcttatccccaagaaacagcaagctcaggtctgtgggttccctggtcatgccattgcacatgtctcccctgccccctggcattagggcagcatgacaaggagaggaaataaatggaaaggaggcatatgggatttgtggacacagctgtttctgttcctgaactagaggtcttccccagctctgacgtggcagtgaggtgacctgaaggaaagaaaaatataaataaataccacttcatatttgtatagaatcctctaatcccttgtgacatagacttgacagggattgtatgccttctttatggatgaggaaattaaggttttagaaagcttaatgaattaaagagcttgtctaattagttagtagcagaacctggacttgaacctaggtctccttgctctaaatacagtgtaccttctactctaccagttgcgcaagaaagaagtcactgtcacagaggcaagcggtgaactaggtaagagttcactcatgaagaaacgagtgctctgaagagccagttaccctgtgttggctgcaataaaggtcattacctctct

SEQ ID NO: 291572 - DNA, 1000 bp, Homo Sapiens
tcagaatgtatctgttttctagttattaaaagaagcaacagaatcgaggcacaaatatgaagaaatgaaacaagaagaagcacaactgaaagagcagcttttcctttatatggataagtttgaagaattccagactaccatggcaaaaaccaatgaactttttacagccttcaagcaggaaacggaaaagctgacaaagaaaattaaaaaactggaaaaagagatggtaatatggtataccaaatgggaaaataataatacaacacttctgcaaatggctgaagagaaaactattcgtgataaaaattataaggtctttcaaataaaattggagcggttagagaagctgtacaaggctcttcaaatagaaaggaatgaactcagtgagaaactgggaattctgaaagggcaggtctctgtgaaagtagcagatgtagatttagcagtgcctgtgacgcattcctgtgctgacctggattcttccaatatgctgaacacttcctctaaaagagccccaggagtccatctggaggctgaccccaaaggaatgaatgaagtaaaatgctactcaaaagccctctccacaggatctcctctaggcattgattaagattaagtgtgatcattgtactgatggatatattttgtgtacatgtttctcttttagttgtaactattgattttataatgaaaatttcctctcctttttctaccatatctctgtttttttagaactactcaactgtgtggtaacagaaagcttcttaccaatttccccaactatgttgcacatcagcctcattttccccctttattggaatgcatgttttcattgccttctcctttcaaagtgtacgtttgtgtgttcatcaccttaaattatcttaatttgagacttttttataatggtttcgtaatgtgaaatcaaatactaatttaaactctggagcccataatatctacataaaagaaaatataaactgacaaaaaaaaaaaaaaa

SEQ ID NO: 291573 - DNA, 1000 bp, Homo Sapiens
catccactgctttgggaaaaaactagcatgctcccctgctccctgttgtgttagggatgtttaggtcatactaggagcaattaggagccatatgcctgggctgagaagagctaggcagtagtgaccttaggatatgactaactcaccaaacaatgccaaggagaaaggcggacaggtcaccatcacctttcatcgattacatgtatagcagtagttttggtgaattcaccaaatcagcttccacttagcattaggaggtcatgccatacaactcacgtatgcgggcaaacacttttgatttgcatatcctgggtgtactgagccacataataaggtgtcaaaatgtgcttgagattccaaaaacttgctgaaacacttgatattgcacagtgcacttattttgtggccaaagcatggccttaccagcttgtctgcactattttcttttgggtggtgactgtttttttctgactttgcatatccctagacactagaactaaaggattggtaataaaccaatcagaaagaaatcctctgtggggtcactttaaaaactactagcttcaactaccacttacaaaatgtgcaagagtcatcatttgcccataaaatacacctcatgggctcctacccctttccccaaaagtctgaaagtgtaggaggaaggaagagatacaaacaaggagaggaaatgatgggagagtgttgtttttgtcacttgccccagcagagcaggggttttggaaggagaggtctttaatagctttgaaatgctttgagatcattggtcaaattgcattttctatgtagagaatattctgctaggtggaaaagttgggagaaaggggaatatgcatctttactctaatcaccaattcaaaccctgcctcttaaggaatttttagacttaagttcactgtgatatccctagtacctagaagagtacctagcacaaagtagacattcaataaatatttgctggttgaatgaaaaaaaaaaa

SEQ ID NO: 291574 - DNA, 1000 bp, Homo Sapiens; identical to SEQ ID NO: 223656

SEQ ID NO: 291575 - DNA, 1000 bp, Homo Sapiens
tcacgtttcacaattagtggttgttcttttctgtgtttgtcttgcactttaaaaaagagagaacacatgcaaatgaacttgcttgtgtgtatttgatggctctaagggctataaattacaaacaaaacacatcccagacattaggagttcataagtgtatttaatgaaattggtggttttaggaagtcaactttagttttgctttgtttgcatgtccactaatttttttattttgatatttgtcttttttttaaattttacagtagtcatcgaaagttatgtttctttgcttacttcatttttttctctaatcaagactggaacaaaagtataaatattatttatttcaggtagcatttttttcgtgtagttttttaatatatacttgaaggaaatgtttcaccttatttttggtctttgtttattcatttagaccctgcaagttgattctcattaattgtcagattccactaccctttcttcctcatagatagtaattaccaatgtaactaagtatttgtgttctgatatctgaggccagtaactattaatatctagttctcagagcatttggaaaggttatcttaaatggctacctaaattgaaatccttttcagaaaaaatataattgcaagtaggtaggactggcctaaattgtctaatgtaataaagtcagacaaaatgcatactttatagtttcaagattttcagtatataaaatctgtccattcccattaaaaagtggaagattttaaataatttctttacagatgttttatttaagcaggtagctcaatctactaatgttgtttgatctgtgtttgttatactggttgtaattaatttttttaattcatgaactagcagaaaatttattaaattaactattaactacattcaccttgtaaattactgtataaaacttgttgacaatgcactgactttagaaagatgttaatgtacataaatagagtgtaaataaaatagtgttgatgtaccg

SEQ ID NO: 291576 - DNA, 1000 bp, Homo Sapiens
catactggtgggaaaccttacaaatgtaacgtgtggaaagttctaaagtcagagttcaaaccttgcaagccatcacagaattcatagtggagagaaaccttacaaatgaaggtggtaacttttgcagttagaattcattcctttgacaacgtcagagaatttatgcctgagagattccttgaaaatgcaatgactggctgggtgcagtggctcatgcctgtaatcccaacactttgggagtccgaggcaggtggatcacctgaggtcaggagttcaagaccagcctgaccaacatggcgaaaccccatttctactaaaagtacacaattagctaggcctggtggcgtgcgcctgtaatcccagctatataggaggctgaggcaggagaatcacttgaacccaggaggcggaggttgcagtgagccaagatcgtgccaatgcactccatcctgggcaaaaagagcaaaactccatcttaaaggaaaaaaaaaaaatgcaatgactgtggcaaactcctcatgagttcaagtattaatagacatccaagagtccataataatgagaaatcacataaatgtactgtgtgtgacagaggctttattcaggcctcacagctttgcaggcattaaaatctacgtatttgatggaaccacacaaatgtaatgtgtaagagcatcctgaagctcttactctaagactgtaactgtaggtgaggattcatacaaagagtgactcagtctctagttctttgattcacttttaaaatgataaactgcacaataattacacgttccaatatggtaaaacttaagacattatatatttcaaaggtcaaaggacatttggaaatggctacttaccttcaggttataaaatcttttattccattgtttgaggtttctcaaaaaggctactgtttgtgactttcaacctgaactatggatctgtggctattttgcatccttaagcacctttcgtggtgcctatctgggaaagaacc

SEQ ID NO: 291577 - DNA, 1000 bp, Homo Sapiens; identical to SEQ ID NO: 223657

SEQ ID NO: 291578 - DNA, 1000 bp, Homo Sapiens
accctctgggtgatgtatactcccctgaagagctacaggagtacctggtatttgccaagaggcacaggctgcatgtgattgtggatgaggtctacatgctgtccgtgtttgagaagtctgttgggtaccgcagtgtcctaagcctggaaaggctccctgacccccagaggacccatgtgatgtgggcaaccagcaaggacttcgggatgtctgggctccgctttggcacgctgtacacagaaaaccaggatgtggccactgccgtggcttccctctgccgctaccacggcctcagtggcttggtccagtaccagatggcacagctgctccgggaccgtgactggatcaaccaggtgtacctgccggaaaaccatgcccggctcaaggctgcccacacctatgtctcagaagagcttagggcattggggatccccttcttgagtcgtggggctggcttcttcatctgggttgacttgagaaagtacctgcccaagggcacctttgaggaggaaatgctgctctggcgccgctttttggacaacaaggtgctgctgtcctttggcaaggccttcgagtgtaaagagcctggttggtttcgctttgtcttctcagaccaggtccaccggctttgcctggggatgcagagggtccagcaggtgcttgcaggcaaatcccaagtggcagaagacccccgtccctctcagagccaggagccaagtgaccaacgcaggtaagctggtcattgtctcgtggccagagggcccagcagccactgtggacctggggcgttctggggctgcagaagactgactgtggatgtgccatttgccaggaaggtatctaacttggctttgtgcctgaagaactgtttcttgtctttcgctgtagcagtgggaaactccttaagctgtggttcagcctgggccctccctctctcctattaaacaaaactaggagagtcagaaaaaaaaaaaaaaaaaaaaaaaaaaaaaaaaaaaaa

SEQ ID NO: 291579 - DNA, 652 bp, Homo Sapiens; identical to SEQ ID NO: 118298

SEQ ID NO: 291580 - DNA, 1000 bp, Homo Sapiens
cagaaggacaatctaaagatagacaagttaaagaccagcagactgataaggagcaaaactcaaagaagcaaacccaggatcagcaaactgaagaccagccggcccaagagaagaaatccccgaaaggacaattccaaaatgttcaagccgaaggacagcaagctcaggtggagaaagtgccaaaactgttatgccaagattcagaatcccaaatacagcaataccaattctggcaattccacaaaggcaatctccaggctggacaacccaggactgtcaatcttttggccaagaatcccctgactggataactcagggctggagaaacaaagattataaagcacgagaatggcaatttgaaatgaagcactggcaaacacaggatctattagagaaagaagccctaaagcagaaagctctataccaagaagtccaaacccagcacgcaacagcccaacataacctagaatgtcaagacactcaagataaagaccaacaagaccttcaatccagagttacacaaaaaggagatatgtacactagagacatcaaaccaggggacatgaaatgtatagggcaaacctcaggggacctgcaatcagaagacgtgaaggcagattttcattcttcttctggccaaagctcagtacaagacacatgtttagcctatttgtccaatctagattcagaacaagatgtgcaaccagacacttcagcttcctcaaattcatataaagaagatgtgaatttaacttctacttcatgtgatccaaaagatcaacagcaatctgaagactctgactaacatgcagaatctacccaataccacactgcccccattaatggaattaaattgggaaaaacaatattgcctcctccaatctgtgttctcaactgtggttgccacctcattaacttacaaaaaaatgaagggcatgctgagcactcaaacaatttgttcttacttaaaataaaatgacaacaaaccaaaaaaaaaaaa

SEQ ID NO: 291581 - DNA, 1000 bp, Homo Sapiens; identical to SEQ ID NO: 223660

SEQ ID NO: 291582 - DNA, 1000 bp, Homo Sapiens
atagagcacaatgtagttattctaatgcccagttgtatttgttcttttattctgctttttaactgtaatcctttttaccagcatacgattgttattgagcaatatgaaagggaaatgttctttattaaaatcaatacattatcttattaaacaaagatcctaaaagtatattgttgcatatatgaatccaaggaatagttcagtaattattgcctaaaatgtgaaagcatattttgtatcctaaaatgaatgtatgatattctaaacatctgttttagtataacaaacaattgaaacatttccttctaaatatatgttatttaatagttacatgtattataatcattctttctaaattctttgctagtcatttcttcctgggaatacagagaaaagagacaactttatgagttgttttcaacttcataattttaaattttctatgttaatataacataaattagaaaaaataagtgattcaaaatgaaaatatttactttgtagaatatgactttagacatatcactgtatccatctatacttggcagcaacatgagaagtgtgatacatgtgaacccaacaaattcaaagttgcacttttcaagatgtgagaaggtactaaaacttaatactaaaacatgagagggaaaatatgtgtaaacctctagtgctattttcactggctaaattctttatttcttgatttttttaaaaattaggttattaaaattaaaacaatatgctagaagacattttggcagaaataagtctataacactatttttgtcacatatctttttcttggaaaaatttatccaactatagacatcttaaaccctacaaattgttcttgttaaaaatgactaatactgggggtgctcaatatgcatatagtgtttttcattgataatttttatttagttcttaagaaacctgttcttaatgttggcatgtcacatttttctgttactataatcagaaaatgtatagtctgttatac

SEQ ID NO: 291583 - DNA, 1000 bp, Homo Sapiens
tggacttcgatgacttcctcccagctatccggaagccccagacacctacctccttggctggatcagccaaaggtgggcaagacggttcacagcgttcaagcatccactttgaaacggaagaggctaaccgttcctttctctcggggatcaagaccattttgaagaagagcccggagcccaaggaggatcccgctcacctgtctgactcgtcctcatcctccggctccatcgtgtccttcaaaagtgctgacagcatcaaaagtcgaccaggaatcccacgacttgcgggtgacggtggcgagcgaacgtcccccgagcggagagagccagggacggggaggaaagacgacgatgttgcgagcataatgaagaaatacctccagaagtaggaaccagttcagcctccttgaagctgcccttgaagacttcccgactctacaataacttggagacagagagactggccaggcctccccggtggccagagccagccagcatggccaccctcaagaggcgagatgagcccacagaggcatatcctgcggggatgctgggctcccagtgtggttggcctgaacaaaataaagtgttgactcctgggcatctgtgccttctctatggccttgctacctgggattccagagagttgatggggtgcagataggggtaggactgttagaatagaaccaacccaaactgtgtgtagtttggggtgtatacttctatttctcttcctacatgtctacatgccatgaccttcctcctcctcttcacttggccagtttcagctcacttcctccaggaagtctttcctgatatatcaaactgaaacaaatgctcctcctccatgctcccttaatccccatgcttgtcgattatattcctttgccaattcatttctctatcctgtgtatgtataagtgtgtacaagcattcaagaaactgatgaatgatgaatgaatgaatgagccaaagaacaaataaatgagcccacacaccc

SEQ ID NO: 291584 - DNA, 684 bp, Homo Sapiens
caggtccctccgcagcgggttctcagttgctcgctgggcagacccaggtcgcgctcccactgccgagcccgcgagatgctccccagagctgcctggagcttggtgctgaggaaaggtggaggtggaagacgagggatgcacagctcagaaggcaccacccgtggtggggggaagatgtccccctacaccaactgctatgcccagcgctactaccccatgccagaagagcccttctgcacagaactcaacgctgaggagcaggccctgaaggagaaggagaagggaagctggacccagctgacccacgccgaaaaggtggccttgtaccggctccagttcaatgagacctttgcggagatgaaccgtcgctccaatgagtggaagacagtgatgggttgtgtcttcttcttcattggattcgcagctctggtgatttggtggcagcgggtctacgtatttcctccaaagccgatcaccttgacggacgagcggaaagcccagcagctgcagcgcatgctggacatgaaggtgaatcctgtgcagggcctggcctcccgctgggactatgagaagaagcagtggaagaagtgacttgcatccccagctgtctccctgaggctccgccctggctgggagcctctggcggcccctcccctcccctgcccttaaccccagtaaagctcc

SEQ ID NO: 291585 - DNA, 1000 bp, Homo Sapiens; identical to SEQ ID NO: 223661

SEQ ID NO: 291586 - DNA, 1000 bp, Homo Sapiens
agctgcgtggagacccaggagcctcgggggatctggaaacagtttaggccaattgggattctcattcgcctgggaaagaacttgattctcaaatagtgaagcaacacagctgagaggtagtgagatccctgcagggactccctggagattcaggccctggaatggggctgaatggaggtcccgttcgacccttgatgctggggcatccgggttgggatggagataggaggatctcagtatatttgtttcgtagttttttatttattttgcaaataccaaaggaatgtaaaaaaaactcaggtgatctagaagtgtttattttcttcccttcccttcccttccctttccttttccctttccctttccccttccccttccccttccccttccccttcccctacccttccctcctctgtctattgcccaggctggagtgcagtggtgcgaccttggctcactgcaacctccatctccggggctcaagcgcttctcctgcctcagcctcctgagtagctgggattacaggcatgtgccagcatgcccggctaatttttttctttttttgagacagagtctcgctctgtcacccaggctggagttcagtggtgcgacctcggcttactgcaacctccacctcccgggttcaagtgattctcctgcctcagcctcttgagtagctgggactacaggcgcacaccaccacgccaggctaatttttgtatttttagtagagacaaggtttcaccatgttgaccaggctggtcttgaactccttgacctcaggtaatctgcctaccttggcctcccaaagtgctgggatcacaggcgtgagctatcacacctggccccagaagtgtttcaacatggaaattttccttagcccttctgtggttgtcatggcttaatgtgtgtctttccagaactttgaatgtttgcatacttgtggatgtacctttcaaatatgtttgtcttgtgtatcatatataaatggtattgtgtt

SEQ ID NO: 291587 - DNA, 1000 bp, Homo Sapiens; identical to SEQ ID NO: 118299

SEQ ID NO: 291588 - DNA, 996 bp, Homo Sapiens
gcaaatgcgtttccggtggggtgggcggggcttcgcgtctccttctacggatatctgtggaccttatggaagcaaagactcttggaactgtaacgcccagaaaacctgtcttatctgtcagtgcaagaaaaattaaggacaatgcggctgattggcacaatttaatcctgaagtgggaaaccctcaatgatgcaggttttaccactgcaaataatattgccaacttgaaaatcagtttattgaataaagacaagatagaactagacagcagcagcccagcctcgaaggaaaatgaagaaaaggtgtgtctggaatataacgaggaactggagaagctgtgtgaggaactgcaggccaccttggatgggttgaccaaaatacaggtgaaaatggaaaagctgtcttcaactaccaagggaatttgtgaactagaaaactaccattatggggaggagagtaaacgaccccctctgttccacacgtggcctacaacccatttctatgaggtttcgcataagctcttggagatgtacaggaaggagctgctcctgaagcgcacggtggccaaggagcttgcccacaccggggatcccgacctcaccctgagctacctgtccatgtggctgcaccagccctatgtggagagcgacagcaggctgcatctggagagcatgctgctggagacaggccaccgagctctctgacgtcctgagacggctgcggacactggctccttccacgtctcaccaggcagacagtctgcctaggacccagtgccgcaggcctggatcagaccccaggatcagaccttggggtcttctggccagagcttgtcaccagccccatggcctctccaggcgtgctcatgcccacaacccgcggccagccccacgtggtgctgctcagccttctctgcccctcctgggaatctgtcattcgtgggtgcttcagagtaaaatcaatgagtttctgagcagaaaaaaaaaaaaaaaaaaa

SEQ ID NO: 291589 - DNA, 1000 bp, Homo Sapiens
cagtcctcaagcacagagcccgccaggaaacctggccagaaggagaagagagtgcggcccgaggagaagcaacaagccaagcccgtgaaggtggagcggacccggaagcggtccgagggcttctcgatggacaggaaggtagagaagaagaaagagccctccgtggaggagaagctgcagaagctgcacagtgagatcaagtttgccctaaaggtcgacagcccggacgtgaagaggtgcctgaatgccctagaggagctgggaaccctgcaggtgacctctcagatcctccagaagaacacagacgtggtggccaccttgaagaagattcgccgttacaaagcgaacaaggacgtaatggagaaggcagcagaagtctatacccggctcaagtcgcgggtcctcggcccaaagatcgaggcggtgcagaaagtgaacaaggctgggatggagaaggagaaggccgaggagaagctggccggggaggagctggccggggaggaggccccccaggagaaggcggaggacaagcccagcaccgatctctcagccccagtgaatggcgaggccacatcacagaagggggagagcgcagaggacaaggagcacgaggagggtcgggactcggaggaggggccaaggtgtggctcctctgaagacctgcacgacgtacgggagggtcccgacctggacaggcctgggagcgaccggcaggagcgcgagagggcacggggggactcggaggccctggacgaggagagctgagccgcgggcagccaggcccagcccccgcccgagctcaggctgcccctctccttccccggctcgcaggagagcagagcagagaactgtggggaacgctgtgctgtttgtatttgttcccttgggtttttttttcctgcctaatttctgtgatttccaaccaacatgaaatgactataaatggttttttaatgaaaaaagaaaaaaaaaaaaaaaaaaaaaaaaaaaaaaaaaaaaa

SEQ ID NO: 291590 - DNA, 869 bp, Homo Sapiens; identical to SEQ ID NO: 118301

SEQ ID NO: 291591 - DNA, 1000 bp, Homo Sapiens
catgggactcccttccggatgagctgctcttgggaatcttttcctgtctgtgcctccctgagctgctaaaggtctctggtgtttgtaagaggtggtatcgcctagcgtctgatgagtctctatggcagaccttagacctcacaggtaaaaatctgcacccggatgtgactggtcggttgctgtctcaaggggtgattgccttccgctgcccacgatcatttatggaccaaccattggctgaacatttcagcccttttcgtgtacagcacatggacctatcgaactcagttatagaagtgtccaccctccacggcatactgtctcagtgttccaagttgcagaatctaagcctggaaggcctgcggctttcggatcccattgtcaatactctcgcaaaaaactcaaatttagtgcgacttaacctttctgggtgttctggattctctgaatttgccctgcagactttgctaagcagctgttccagactggatgagctgaacctctcctggtgttttgatttcactgaaaagcatgtacaggtggctgttgcgcatgtgtcagagaccatcacccagctgaatcttagcggctacagaaagaatctccagaaatcagatctctctactttagttagaagatgccccaatcttgtccatctagacttaagtgatagtgtcatgctaaagaatgactgctttcaggaatttttccagctcaactacctccaacacctatcactcagtcggtgctatgatataatacctgaaactttactattagtgacaagagctggggttaggatccggttggactctgacatcggatgccctcaaacatacagaacttccaaactcaagtccagccataagctattttgccaacatgtcagagtaatctgtatttttgtatgtgatttctacttttatagacttgttttaaaacaataaaacacatttttataaaaatgagtgcttaaactaaaaaaaaaaaaaaaaaaaaa

SEQ ID NO: 291592 - DNA, 1000 bp, Homo Sapiens; identical to SEQ ID NO: 223664

SEQ ID NO: 291593 - DNA, 1000 bp, Homo Sapiens; identical to SEQ ID NO: 223665

SEQ ID NO: 291594 - DNA, 1000 bp, Homo Sapiens; identical to SEQ ID NO: 223666

SEQ ID NO: 291595 - DNA, 1000 bp, Homo Sapiens; identical to SEQ ID NO: 118302

SEQ ID NO: 291596 - DNA, 959 bp, Homo Sapiens
cacacacccatctgctcactcaccctggcacattcagcccccctaacccaccttgaacattgaccaccacacactccctggcacgctcttctcaccctcaacttctgccacctctccctgggcaatactgccagcctttccctaatctcagagctgcagccctgccctgtcactcacctcaaacctgccatgtccctggggctactgaaattccaggcagtgggtgaagaggacgaggaggatgaggagggggagagcctggactctgtgaaggcactgacagccaagctgcagctgcagactcggcggccctcatatctggagtggacagcccaggtccagagccaggcctggcgcagggcccaagccaaacctggaccagggggacctggggacatctgtggtttcgactcaatggactccgcccttgagtggctccgacgggagctgcgggagatgcaggcgcaggacaggcagctggcagggcagctgctgcggctgcgggcccagctgcaccgactgaagatggaccaagcctgtcacctgcaccaggagctgctggatgaggccgagctggagctggagctggagcccggggccggcctagccctggccccgctgctgcggcacctgggcctcacgcgcatgaacatcagcgcccggcgcttcaccctctgctgaggaacacctgtgccccccgactccccgccccctctcccaatgccgcttcccctgcctgcctgggaagaggaaagggaggggtgccccagaggcaccagctcctggcgggggaggaggaacattcaggtttctgagagctgaattccaagagtgcaaaaccccagcatcctgtttcctctgctgacccagctgggagggggaggaggaggagctcacaccctcaaactcctcaataaacgctttctctggttcccaaaaaaaaaaaaaaaaaaaaaaaa

SEQ ID NO: 291597 - DNA, 1000 bp, Homo Sapiens
tgtccactgaccagaaacctggctgcagggccgaggactggtttggggactggagggctggcagcagcctgtcaccgtgcgaccgtgaccacctggcatgggcttcgtggcctgctctcaggaagtgggtcaagccctgggaaccctcatccatgagagctcgatcccgtatgaagggtgctgccgcccgtgccatctggcccgggggtgactttttgaactgtttattatatggtggatgatgatttcatctcacgtgctggacgctgttctgttcagtgtgctctttggactacattagtcccctgtggagcagcagggctggagatctctgcagtcccttccccgcccgccctgccagaaggccgaggaggcacgtggagggcctccttcctgcaattcttccctctccagagtcagggagggctgcccagccctggcctcacagccgtcccagatgttaggtgagccactgagctctgtgttgaccttgaggggcctggctgggggcccccaggctccatgccttcttgggagggtggccgccaacgcctttcctgtgttatggcaacagggagtgggcatctcatctgcctgtggtcagctctcagacggcagggagcggagctgacgttggctgtgcttggtcaccgctgccatgccgcagaggatgcgcctagctgggctggggccacacgactattatgttggccttgaacggggactgcagagccctcagtttgtctcccttgttcctctgtggctgaggtgggagggggagggtggggtaggtcccccagcaagaaagagggacaggagcaccccaggcaggaccaaggagtcgggaggcccctgccttctgtcctccatggtgagggcacagatgtctccccagagcccagcgctggcagaatggattctgctcctggctttgcttctgcggcttcggtggagacagttatggaataaaatgttccttgcacccaaaaaaaaaaaaaaa

SEQ ID NO: 291598 - DNA, 1000 bp, Homo Sapiens
atgagcacgtgcagttcaatgagttcctgatgatggacatttacaagtaccacctccttggacataaacctagtcaacacaaccctaaactgaacaagaacccagggcctacactggagctgcaggatgggccgggagcccccacaccagttctgaatcagccaggggcccccaaaacacagatttttatgaatggcgcctgctccccatctttattgccaacgctgtcagcgccgatgcccttccctctcccagttgttcccgactacagctcctccacatacctcttccggctgatggcagttgtcgtccaccatggagacatgcactctggacactttgtcacttaccgacggtccccaccttctgccaggaaccctctctcaactagcaatcagtggctgtgggtctccgatgacactgtccgcaaggccagcctgcaggaggtcctgtcctccagcgcctacctgctgttctacgagcgcgtcctttccaggatgcagcaccagagccaggagtgcaagtctgaagaatgactgtgccctcctgcaaggctagagctgatggcactgtctgcactgtccaggaaaaaagtaaaactgtactgttgcgtgtgcaagcggccccactagagccttccagccttctggtgtgttctaagagcaggctccacctgggagccagccccagttcacaccaaaccaggctccctgaacagtcctgttcatgtgtgtaggtggttctgttgtgttaagaaagcattcattatgtccggagtgtctttttactcatctgatacaggtaattaaaagaactcagattcttgaagccaccgttttcatattgtaatgttaggtgttctcagaggggaggtacctttgtctaatcaacgtttccacttagatcttttatttttaataagcaggcccataaaaattgttgacaagaattaatgaaattattaaaggcaacaatttagaagaaaaaaaaaaaaaaaaaa

SEQ ID NO: 291599 - DNA, 1000 bp, Homo Sapiens; identical to SEQ ID NO: 223669

SEQ ID NO: 291600 - DNA, 1000 bp, Homo Sapiens
tgttaccttagagcttgagctgccagagtcccctgtgaatcaagatttgggcatgttcttggtcaccatttcctgctacaccagaggtggccgaatcatctccacttcttcgcgttcggtgatgctgcattaccgctcagacctgctccagatgctggacacactggtcttctctagcctcctgctatttggctttgcagagcagaagcagctgctggaggtggaactctacgcagactatagagagaactcgtacgtgccgaccactggagcgatcattgagatccacagcaagcgcatccagctgtatggagcctacctccgcatccacgcgcacttcactgggctcagatacctgctatacaacttcccgatgacctgcgccttcataggtgttgccagcaacttcaccttcctcagcgtcatcgtgctcttcagctacatgcagtgggtgtgggggggcatctggccccgacaccgcttctctttgcaggttaacatccgaaaaagagacaattcccggaaggaagtccaacgaaggatctctgctcatcagccagggcctgaaggccaggaggagtcaactccgcaatcagatgttacagaggatggtgagagccctgaagatccctcagggacagagggtcagctgtccgaggaggagaaaccagatcagcagcccctgagcggagaagaggagctagagcctgaggccagtgatggttcaggctcctgggaagatgcagctttgctgacggaggccaacctgcctgctcctgctcctgcttctgcttctgcccctgtcctagagactctgggcagctctgaacctgctgggggtgctctccgacagcgccccacctgctctagttcctgaagaaaaggggcagactcctcacattccagcactttcccacctgactcctctcccctcgtttttccttcaataaactattttgtgtcagcttcaaaaaaaaaaaaaaaaaaaaaaaaaaaaaaa

SEQ ID NO: 291601 - DNA, 1000 bp, Homo Sapiens
attgtgatggtgcttttagcgctaaattgtgcctcgtgtgccaaagaaacatagacaactgtagaggcaatggatatggaaaacatttttcgtaaaatatgggagaatttatagaaaagaaaaactcttgaaagtaagaaatgatggcaactcaccaaattaactcatgtatcatacttttatgtcttgagagtcttggagggacgtgtttaatgaaatcttgaaccccaggaatagtattatgtaatgaaaacctatgaatataacaaatatggaagtaaaattgtgttagtttcttatgagtgttgcaccaaactaacacaaatttaatggcttaaaacaacacaaaatcattatcttacagttctggaggactgaagtccaaatgcatctcacggggctacatcaagctgttgacagggctgcttttctttttggaggctctaggggagcgtctttctttgcccttccagcttctagaagctgcccaaattctgtggtttggggcctcctttcaaaaccagcaatggccaatcagtcttacatcactcaaacacttgagtgttctgtctccctcttccatgtttgaggacccttgtgattacactgtgaaaacccagataagccaggataatctccctatcttattatgaggcaagtatgttaagattttattctataatcagagaatcttatgctatgattgttatatgtgagcattatagatgctcttgaaatgttaaaatcacatcagcactggaaaataactcctaaatgtccaaaaagaacatgagatttatggtgcttgaaatgttgctaaacgtaaatttgtatctattctgaaattatataaattaacctacctggccaggcacagtggctcacacctgtaatctcagcactttgggaggccaaggcaggaagatcacttgagcccgcaagtttgagaccaccctgggcaacatagcgagactacctctacaaaaaaaaaaaaaaaaaa

SEQ ID NO: 291602 - DNA, 1000 bp, Homo Sapiens
agtgagaaggagcagtttctcctgaaggacacagagaggtttcaagcccgcagtcaagagctggagcagaaactgttatgtaaggagcaggagctggagcagctcacccagaagcagaaaaggctggaaggtcagtgcacagccctgcatcatgacaagcatgagaccaaggctgagaataccaagctgaaactcactaaccaggagctggcccgggagctggagcggacttcctgggagctccaggatgctcagcagcagttggaaagcctccagcaagaggcctgcaaactccaccaagagaaggagatggaagtgtaccgtgtgacggagagtctacagcgtgagaaggccgggctcctcaagcagctggatttcctaaggtgcgtcggtgggcactggcctgtgctgagagcacctcccagaagcctggggtcggaaggaccagtctgagggtcatccttgcctacgtgctggaaaaacgtgcctgctgagagagtgccctcaattcccttggtccccagtgcagtgtttggaccaccaagtagccactctattatgtttggtccgtttacacatgcgcccacatccagtttattcctcctggtggggaggctctgccccactcctctgagtccctcacaggactgtgcttggtacttgatctcatgcgagcagagctgggtttaatgagcatttaatctatgctagaaatattatctcgttcattgtcagcaaaactgttaggtgagtagggcagttcattcacaggaatttactgatgggaagttgatattagaggaaagaagtaatttaccacaggcgacacagctactctctgatggggccagaatggaaatccgtaactcggctgtgttctgttcatgtttgttgaatgagtaaatgaatcacaaacagagcaccaagaaaaagctttctcagccttcaaagacccccagcaataaactcaaagtttactggtaaaaaaaaaaaaaaaaaa

SEQ ID NO: 291603 - DNA, 1000 bp, Homo Sapiens
tagctagacatgagtaaagataacagcatgagaaactgttagtacgcatacctcagttcaaacctttagggaatgattaaaatttaaaaaaaaaacatttcactcagttgcacttagtcgtatgtcttgcatgcttagtctaaagactgtagcaaaaaaaaaaaaaaaagaaaaattagattttacatatctttgcaggtatcacagccttgcagaagaaccaactgaaaaaaaaattctcaggctttacagcaagcaaacttcactatgatttttacaattctgattctgtatcccctgggggttatcccagttgcttctttaggatggggtttattacgttgtacatatatcccgatgtgtctgtgtgaatctttgtcttttttgggggagggcagagggcggttctttttttagatattgttcctaaaaaggaataaatgcatacacctgtttgtcaaaacacctttgctttttgtgcaactgctttatattaacgatactaaaaaaaaatagctttggaaaaaaaactactgtatgtaacggaattgcagaatatgctgcacatgtattttatttagttatccttgctttaagaatattggatgacatttcctgacatgtgggagggagaaactccctaactttttttttctgcttttaaactgtaacatagttgaagatttcttttttctgttctcattgattggagcattttgtacaggttttgtgtgtgtgtgtgtgtgtgtgtgcgcgcgtgcgtgtgtgttaatctgttttttgatacattcctatcccttgtgtttatcctaccactgccttcctggctatcttaaacaagttcatacatttgaaaagaaaaaaaaatgttgtttaaaaaatgttttctcctgctgcagtaaatattttgcatgatgaaattccagggtcacacttttccaagtttatcagtgaagtagtgattaacaatggggagtgtcaaaactattgaacttttgta

SEQ ID NO: 291604 - DNA, 1000 bp, Homo Sapiens; identical to SEQ ID NO: 118304

SEQ ID NO: 291605 - DNA, 1000 bp, Homo Sapiens
gcaagtttggcctggccttagctgttgcaggaggcatggtgaactctgccttatgtaatgtggatgctgggcacagagctgccatctttgaccaattccgtggagtacagaacattgtggtaggggaagggactcactttctcatcccatgtgtacaaaaaccaattatctttgactgctgttctcaaccacgtagtgcgccagtcatcactggtagcaaagatttacagaatgtcaacatcacactgtgcatcctcttccggcccatcactagccagcttcctcgcatcttcaccagcattggagaggactacgatgagtgtgtgctgccgttcattaccacggagatcctcaagtcactggtggctcgctttgatgctggagaactaatcacccagagggagctggtctccagccaggtgagcaacaaccttatggagtgagcagccacctttgggctcattctggacgacgtgtctttgacacatctgaccttcttgaaggagttaacagacaggtggccccccaggaagcagagagcgccagatttgtggtggaaaaggcggccatcatctctgctgagggtgactccaaggcagctgagctgatcgccaactcactggccactgcaggggacggccagagcgagctgtgcaagctggaagctgcagaagacattgcataccagctctcatgctctcggaacatcacctgcctgccggcagggcagtccgtgctcctccagctgccctagtgaggccccagcctacctgcacctccgtgaggcaactgggccacagccccgatgattcgtaacaccacctttcgccctcaccccagaaatcactgaaatttcatgattggcttaaagtgaaggaagtaaaggtaaaatcacttcagatctctaaaaaacaaagaattacatgagttagtacatgaaaaaattatgggaagctacatgaaatatactgttacgttcaataaacattagcttctgtat

SEQ ID NO: 291606 - DNA, 1000 bp, Homo Sapiens; identical to SEQ ID NO: 223671

SEQ ID NO: 291607 - DNA, 1000 bp, Homo Sapiens; identical to SEQ ID NO: 118305

SEQ ID NO: 291608 - DNA, 1000 bp, Homo Sapiens
ttagcaaatacattatgccatagttaaggtacaagcagaacaataccaatagattaattttaagagttgtcttagaatgatttctttcgcattaagtctggatgcaaactgtgcagcccttaggttcctgctgtagttttgtacgacctggcagacttaaagtaaattgagtttaaattcaaagccagttgatgcggaaggaacttttttggcatgtgttaaattgtgctttaaaagacatataaagaattgggaaacatttcaggagacgatcatagcctgtataaataccagattagaacatacggatttaccatgaagttctgtcttcaacatccattctaaagggctactgtcccaaatcctgtgtgtccttttgacttgtctgatcacccaatggaagtggatacttgtaaagtctacaccactgtacttggcgttaaatcttgctgaattcgtggtaagctgttaccatgtctacattttgtagaatgattttggtctgcagcaaaattcgatttcacttctcatacccctttccttccacttgaaatgcaatttagacagaggccctgtggtgaaagttgcaatattaagtttacctttagaagatcccttctcaaactcagaaccctagcagtgttaccttaaacaaaaatgagctcgagaaaaaagtagctcagttacagagaagcaaatcgagttatttcccacataaaaagtttcccagattctaagaattgcagtatcctgtaccctaaaatttttcaaggtgactcctgttgtcgtctgttgataactttaataaaggtcatttaaggacataagtttttaaagactcccaaagtgaaacttaaacattttcgggattatcgattgcatatatcagtttatgctgtgtgctgaattactatgccatgtgctattttagtgtttggggaaaatgaaaaataaaatttgttctttagcttaaaaaaaaaaaaaaaaaaaaaaaaaaaaa

SEQ ID NO: 291609 - DNA, 1000 bp, Homo Sapiens
tgagaagcaaaatggtgctgtccaacacatcaccgcagatcaccttcctgaagctgacgccacaggagtggcttcctgaggagttcctggagagaatctctcagctggacacccggtcgcctgtcaccaagatcaatgtggccgtagacaggctgcccagcttcctggcggcccccaatgctcccaggggccagccgctgccccatcaccaatgctccatccacctgaactgtgaagacaccctcctccttcatcaggcctttgaagatgccatggatggcctgtcttcccacaggcctgtgattgagctctgcatcccttcctcgctggaccccaccctggctccccctggctgccatgtagtctccctcttcactcagtacacgccctatacgctggctggaggcaaggcctgggacgagcaggagagagacgcttatgcagacagagtgtttgattgcatcgaggtctatgcccctggcttcaaggactctgtggttggcagagacatcctcacaccaccagatttggagagaatcttcgggcttcctggagggaacatattccactgcgccatgtccctggaccagctctacttcgcccgccccgtgcccctgcattctggctaccgctgccctctccagggcctgtatctctgtggaagtggggctcatcctggaggaggtgtgatgggagctgctgggcgaaatgcagcacatgtggcctttagggacctcaagagcatgtgaccctgaaccagctctgacccaggaagaagactccacccctgaattccaagtgctccattggatcagcttcccaggaagttcagcttcgggttagtacataaggccaccacaatgctcaagaaattattttagaaaaaacgtacgagttacatttagtgcaagttgaccttatgcccatgcctccatacatggactggttctgttttattaaaactaatatttcatacagataaaaaaaaaaaaaaaaaaaa

SEQ ID NO: 291610 - DNA, 1000 bp, Homo Sapiens; identical to SEQ ID NO: 118306

SEQ ID NO: 291611 - DNA, 1000 bp, Homo Sapiens
tacgtggtcaccctgcttagcgtgatcaacgccgtcatcttgggccccgaggacctgcgcgcgcgcacccagctgcggaacgagtttatcgggctgcagctgctggacgtcctggctcgcctgcggtgagtccccactgtagcggtcctgccggctccccctcctgctcccaaggccaggcccacctgccctttggctcccagccacctcacctaagcagcacctccagatggcagggaggtggctccctcggagtaaccccaggggtccagccagaagccaggtctcaggctagaatccagctcactgtccctggcagctgcccacagaaactagggttgcagcagccatagaaaggacagaatgagctcatatcctttgcacaccgtggatggagctggaggccgtgatcctaagtgaaccaacccagaaacagaaaatgaaatgccaataagagggaactacagggtggttcacgtggacgcaagatggagacagggacacgggctccagggcgagagttgaaaaactacctacagggtacagtgttcgtcgctacttggtgtcaggcccactagaacaagggtccccaaccgccaggctgcggaccggtacctggcctattggaaccgggccacgcagcaggaagtgagcggtgggcgggcattcctgcctgagctgcacctcatgtcagatcagcactgcattagattctccagcgcacgcacgcgcgcaagggatccaggctgcgcgctcctcatgacaatctaatgcctgatgatcgggggtggaacagttttatccctaaaccattcccgtcaccccagtctatggaaaaattgtcttccacaaaaccagtccctggtgccaaaaaggctggggaccactgccctagaaggcaaatcgcctacgttacacagtgtaccatgtggcaaacacgcacatgtacccccgagtctaaaataaaaattttttaaaaaagaaaaaaaaaaaaaaaaaa

SEQ ID NO: 291612 - DNA, 1000 bp, Homo Sapiens
ctacagaatgattgtctctacctctttatgccagaggcagaacctacaggtgccctttttggcttttgttgttgttgtaacattagccccatggattgtaaggtggtttactgagttaaaacagattctgcttttgtaaaatgatggcatcactgtggactgaatgaaatatttgtatagaaaaaagtgcttgaaaagtgtgtttggaactcatcgatagggtaattctccaaaaatgcccaaactctttttctgtaattagccttgccactttcttcagtcacttaaatggtgagattacacatcagtgcaagatgaccattatggttatggtctactgcaaggttgaaaggaaaaatggaggattgtatttaggaaaagggacaactttgtggccacctgctctgaaagtcaaaaggaaatgtaaattagtgtcattagtgtgttggaagagaaatactattcagtaagcttcgccaaagaaaagtgagtcaaagttaatgtgtgtgcgcatttatatgtaggcagctcgtagaccacattttaaccagcaactggtaacaaagagcttagttttccttgtttgaatgctgtagatctgtacctagtacccctcccatctactgatttgtttgtttttgtaaccaaacacattttcagatagaaggagccttaaaaaaaaaaaatcacattgagtaacttcagtatgaatgaatgagagtgtgtggagctacccctcaccctccacccctttgtgctttttattcccgaattttcccagtctcttaaacagaaaaatgactgatataattatcttttggaaactgagccttaattttttttagagggggaaataagttttccccaactcacacagcataagcaatgtttgacagcaatataatgccgttgtaaactactgagagtattgtatctgttctggtaaccatgtacagaatgtgaaactgtcttatgaatataaataaattctatatttcta

SEQ ID NO: 291613 - DNA, 1000 bp, Homo Sapiens
agcaaagcttttccaaggtgagcatattcagcgtttacctggaagtctcttcttcccacctgggctaatcaggttacaattttcaagggtaaacaaactaccagctacaggatagggaagtggtggtggaataaaagaacatgatacctggaggaagggaagaaaccacaagcattttcctactgaaaaatagggtgacatgtcagtcaaattctgatcaactggaacttgagtttccagttaaattccatacactaggagggagttttctatcaaaatcctgcagattgaagaagctggtttattagaaccagcctgtcgcttttcaaagctggttaaaaataagatactgacctcacccctagagatgattcagtgggcctgggtggggccaagaaatccgtggtgttttgtaagcactgctggcgatttctcatggcagtaaagaccacactgagactgcactgattttgattaaagtacataggcttggctgtttttacacagctaactaaatttggactcttaaaattgtgtttgtaatcacagtgtgttacacctttcccagctctcagcagttgtactgcatgatggagcagcgggcccctgggacctgttccctgtgctccctgcctctgagagcccagcttgctctgaagttggactaaaccacttagatgctggggttgccacagcctgctcctggaagcctgcattccagtcaggttgcatccttctggtgctgacagaacccagtggtgaagccaaagcacaggaatgctttaaaaatgaacagtttatgcagaataagggtcaggagtcatgccagaccagaacttgatgctactgcgtcttgtgttaagaatcatttcctggccaggctcggtggctcaggcctgtaatcccagcactttgggaggctgaggcaggtgaatcacttggtcaggagatggagaccatcctggctaacatggtgaaaccccgtctctactaaaaatac

SEQ ID NO: 291614 - DNA, 1000 bp, Homo Sapiens; identical to SEQ ID NO: 118307

SEQ ID NO: 291615 - DNA, 1000 bp, Homo Sapiens; identical to SEQ ID NO: 118308

SEQ ID NO: 291616 - DNA, 1000 bp, Homo Sapiens; identical to SEQ ID NO: 223674

SEQ ID NO: 291617 - DNA, 1000 bp, Homo Sapiens
ctgccagtgtaaatcctatagacgttaatatgagaagtggttatggagctacagctttaaatatgaagcgtgatcctttacacgtgaaaatcaaaggagaagaatttcctctgactctgggtcgggatgtctctggcgtggtgatggaatgtgggcttgatgtgaaatacttcaagcctggagatgaggtctgggctgcagttcctccttggaaacaaggcactctttcagagtttgttgtagtcagtgggaatgaggtctctcacaaacccaaatcactcactcatactcaagctgcctctttgccatatgtggctctcacagcctggtctgctataaacaaagttggtggcctgaatgacaagaattgcacaggaaaacgtgttctaatcttaggcgcttcaggcggagttggtacttttgctatacaggtaatgaaagcatgggatgctcatgtgacagcagtttgctcccaagatgccagtgaacttgtaaggaagcttggtgcagacgatgtaattgattacaaatctggaagtgtggaagagcagttgaaatccttaaaaccatttgattttatccttgataatgttggcggatccactgaaacatgggctccagattttctcaagaaatggtcaggagccacctatgtgactttggtgactcctttcctcctgaacatggaccgattgggcatagcagatggcatgttgcagacaggagtcactgtaggttcaaaggcattaaagcatttctggaaaggagtccattatcgctgggcatttttcatggccagtggcccatgtttagatgacattgcagaactggtggatgcgggaaagatccggccagttattgaacaaacctttcctttttctaaagttccagaagccttcctgaaggtggaaagaggacacgcacgaggaaagactgtaattaatgttgtttaaataaaaatgcagtttagtgaaaaaaaaaaaaaaaaaaaaaaaaaaaa

SEQ ID NO: 291618 - DNA, 1000 bp, Homo Sapiens
ctatgccaggggtgtgatggggcctgaggagagcatggcatggagacagacacgtgcagggaaccaagtggtgggaggacaagcccactcagagtgttgccgaactgtagcaaatcagtaactataattagcatagcctcagcaatgacaataatgatcatattctgaaaaaaatattggtctctgcttaaaatggcttgaagtcctgatgagggtgacattccatttcataacaaatacttttggaatggacttgaccaacaacctagagattttctttcagttgaccaactttgatttccaaaggtggagttacttttgtgaacccccaaaatctgagacaggtctcagttaatttagaaagtttattttgccagggttgaggatgtgcacccgtgacacagcctcaggtggtcctgatgacatgtgcccaaagcggtcagaacagtttggttttatgcattgtaggaagacatgagacatcgatcaacatatgtaagataaacattggttcagtctggaaaagccagagatgactcaaagtggggagggggcttccgggtcataggtaggtaagagacaaatggttgcattcttctgggtttctgattagtctctccaaaggaggcaatcagatatgcatttatctcagtgaacggagcaatgactttaatagaatgggaggcatgtatgccgtaagcagttcccaacttgacttttccctttagcttagtgattttggggacccaagatattttcctttcacactttggataagtaagatgtgtgaccctgcaaggaataacaaaaattattctgcttatatattcttagaggatacattaatgtctcagtgattgtcattcatctttcacagcgcccagcaaaatactcaataaatttgtgctaaaaacaaaaaaaaaaaaaaaaaaaaaaaaaaaaaaaaaaaaaaaaaaaaaaaaaaaaaaaaaaaaaaaaaaaaaaaaaaaaaaacctcggg

SEQ ID NO: 291619 - DNA, 1000 bp, Homo Sapiens
tatggggagtctgcagtggtctcagccacatcctatgtattttggctctggaggagcaaagctgtatcctggagttggtctgtgatttgccgacagccttgcaggctgggctcagggacaaagtcccccccaaaacccgcaggtcctcatgtccagacgctgcccagtcctgtcctgaaaacagcacgccccaggcccacagaaccccccaccctacatttgccttgggtggagctgggggtggtcctaggactgcgggtgcccttagctgaagggggtggggagaagcgtggactgggcagcctgtgggtaattggaggttcattgagaattgagtctttggaaacactaagaaaatcaaatttttaaaagttatttatggcctgggaaacaatttgcatttgtccccaaatacgcttagctgtgtgccgcttagaacgatgcgaaaccatccctctgtgtaagcccgtgccgtgtgactcgaagcctagcgccctccctgcgaagcatcagacgccacccagccctggggggaggcccacgcctgctggaccaacgcgggttctggggtgcacagcgccaggttaacgctgaagcctgccccgctgagcccaggagccgggaggcctgcgggctgacccagaatccgatcatgcacctgtcctcatgccagcggctttggctggggttggtctgaagcctgcacgcggcagttctttgttaaagatctgagggactcctcagtcctggggcgtcgccgcctgcagcctcttccaagccctgcgtccagcgagcgtcacagcacaacctgcaaaaacggagctgggctgcagctggggctggcatggactttcatttcagagattcggtttttaagaagatgcatgcctaatgtgttcttttttttttccaatgatttgtaatatacattttatgactggaaacttttttgtacaacactccaataaacattttgattttaaaaaaaaaaaaaaaaaaa

SEQ ID NO: 291620 - DNA, 1000 bp, Homo Sapiens
ggctactgctgaatagaagtaaacagttcatccatgatctcacttaaccaccccaataaatctgattctttattttctcttcctgtcctgcacatatgcataagtacttttacaagttgtcccagtgttttgttagaataatgtagttaggtgagtgtaaataaatttatataaagtgagaattagagtttagctataattgtgtattctctcttaacacaacagaattctgctgtctagatcaggaatttctatctgttatatcgaccagaatgttgtgatttaaagagaactaatggaagtggattgaatacagcagtctcaactgggggcaattttgccccccagaggacattgggcaatgtttggagacattttggtcattatacttggggggttgggggatggtgggatgtgtgtgctactggcatccagtaaatagaagccaggggtgccgctaaacatcctataatgcacagggcagtaccccacaacgaaaaataatctggcccaaaatgtcagttgtactgagtttgagaaaccccagcctaatgaaaccctaggtgttgggctctggaatgggactttgtcccttctaattattatctctttccagcctcattcagctattcttactgacataccagtctttagctggtgctatggtctgttctttagttctagtttgtatcccctcaaaagccattatgttgaaatcctaatccccaaggtgatggcattaagaagtgggcctttgggaagtgattagatcaggagtgcagagccctcatgattaggattagtgcccttatttaaaaaggccccagagagctaactcacccttccaccatatgaggacgtggcaagaagatgacatgtatgagaaccaaaaaacagctgtcgccaaacaccgactctgtcgttgccttgatcttgaacttccagcctccagaactatgagaaataaaattctgttgtttgtaagctaaaaaaaaaaaaa

SEQ ID NO: 291621 - DNA, 1000 bp, Homo Sapiens; identical to SEQ ID NO: 223675

SEQ ID NO: 291622 - DNA, 1000 bp, Homo Sapiens
acgggtacctgggtgtatcctgtgtttgccaaactcagcctcttgggtctagcagctttcttctctctcagctacgtcttcatcgccagcatctacctacttggagagaagctcaaccactggaaatggggtgacatgaggcagccacggaagaagaggaagtaattgcacaccattttccaagaaccaagaaagaagaaaacacaagagatttttctcatcttttttttttttttttctggtggagggaggtggtggaggaacatagcaaagtaggagggacagagagtgatacttaaatttaataagaggttcgtgaaggtagcttaacttgagaactcttggttttttgaaaggttgactgcacatgccaaaaacaactcctgctatctcagaattaattatctttgaccttcgtggaggatggtctctggttaaaatctgaccaaagaaactcacataaacttggtgttagagaacatctagagagagagagaggaacttagagtcatttaaactcttcagtttacagagaaggatgctgaggacctagatgagaagttacctgcaaaaggcaaaagggttacttagtgtcagaaccaaggcaatgacttctctctcccagatctcctagctactggtcctgggccatttttttttttttaaataatcccaacttttctttaaaagacaagcatttcagtaagctagttattttcatgggttgctcatccatttttttcagtgatctaaaaatgtagggagatggctactactgaagttgtctgtctacttgggataatagcaaattaattgaagacaatgggaaagtaagttataaaaaatactgggaaatctgtttctcttctgagcaagcattcagggcaggtataaacatcaaacatagtgacattgtcaaaacctcttccatttgaacattgattaattcatcaaataaatggtatagtaacaaaaaaaaaaaaaaaaaaaaaaaaaaaaa

SEQ ID NO: 291623 - DNA, 1000 bp, Homo Sapiens
cattctatagagagggaaaccggggcttaggcaggaagccaggtccccaaagtcgcacggccaggagtggatggagctgcctttcagacccatcaccggtcctaccgtccggggcacagcgacaggttctggagagagggtgggtcccgggccaggtgctggtgggcctccaggtggaggcgggctgatgctgggtgtgtcgtcatcgtcagaccgttcctcacgtccccacagaccccaggccctgtgcatgtccccagtggaggcatggccagcatctgctctgtccaacccagtcgcatcgcccaagagctctgagcaaggaggctgtcgcggggccgagaacccgctgggactggcaagcacggctggcccagtgcagcaggagggggccctgaggcatgggatgggacagtctgggccagcgccacctcccgggacagaagtgcggcaccagggcaggagctgcagtagctaccctccccgtctccagcctgggctccccagatcactcccagatcaccaggtcaccccatctctaggcggcacctcacacaccagtcctgtggtccaacgccccgccatcacccaatgtcaccgcacaccaggcagtggggacacggcagtaagcacaagaaagatttttttttttttaaagctaaaccaggccaggtgcggtggctcatgcctgtaatcccagtgctttgggaggctgaggtgggaggattgcttgagaccagcctgggtgacacagcaagaccccatctccacaaacgtttttaaaatgtgccgggtgtactggtgcacacctgtcatcccagctacccaagaagctgaggcaagaggatcacttgagcccagaaggtcgaggctgcagggagctgtgatcacactgctgcactccagcctgtgcaacagagccagaccctgactcaatacaaataaaaaccaaatctaaaccaaaaaaaaaaaaaaaaaaaaaaaaaaaaaaaaaaaaaaa

SEQ ID NO: 291624 - DNA, 1000 bp, Homo Sapiens
atgattccatttatatagctatttctattgcataaccaggacagttttattgttttgaggtcaatgttcttttaaaatttgattttctgtaagaagaggctttttggcccagaaagccttacttattttacatcttccagtttgtccatcccatgagttagagttcgtcttgactctgcaagctagaatcaaagaattatgaaagtaagatcatttagatttgaccaagggcaccattaaatggtgtcaggttttaggaagcagacgggtgtataaaaagaaaatgaacaaagatttcacttattggggatcaggcataactggatgcctggattgtcctgccacccagctgccaccaataaaatcattcatcactctgcaagagggaccagatgcttccatcatcagtactccttgtttttctgttatctcctttgaggtagctaaaaatggcagccaaaaaaaaatgttgaggcttttctcaagtatatactcatgttattttgcagaagatagggtcaacttcttcagttgagttatctgaaagtgttgggcagtgacaccatgccaaacactgttaaattcatgccattaaaaacagtggagtgttctgcaaagcccgattctctgcagctttaagactggacagtattgaaatattcacaggaatcttccaagccgtgaaagcttaatattaaacagcccttttaattgcaaaggagaaaaaaatggagacacttgtgaaaccttgcattctgagtgctgccacaaataaattaaggaattccagaatttcttcatctacttctgcagtcttaactctgaattaatgactgtatatatcaaacttcagatcttaaaaaacatcagctcgcaagaggctgaggcaggagaatgacatgaacctgggaggcggagcttgcagtaagccgagactgagccactgcactccagcctgggcaatagagcaagactccatctcaaaaaaaaaaaaaaaaaa

SEQ ID NO: 291625 - DNA, 1000 bp, Homo Sapiens; identical to SEQ ID NO: 118311

SEQ ID NO: 291626 - DNA, 1000 bp, Homo Sapiens
cgggggcagcaacaacgatgccggatacaggagggacgtgcaccaggtggcctgctacagctgcacgtctggacagtggtcatctgtctgcccactccctgctgggcacggtgagcctggcattgctgtgctggacaacaggatctatgtgttaggtggccgctcacacaaccgcggcagccgcacaggctacgtgcacatttacgatgtggagaaggactgctgggaggaagggccccagctggacaactccatctcaggcctggcggcctgtgtgctcaccctgccccgctccctgctccttgagccgccccgcgggacccctgaccgcagccaggccgacccggactttgcctctgaggtgatgagtgtgtctgactgggaggagtttgacaactccagtgaggactaggctccctgtgcctggcatcagagggaagggaggctggggctgcagggcagtgaaacccacgcagcctaggccagagcactttactccaggcagggcccctgcccctgttggccacagcttatgggccctgccctctttcttcacaccagccccttggccagcctgccgcaggcatctcagggccatgcagatcccaggctgtggattacgtcactgcaggaactgcttctgaaaggctttggccttcctcagtgagccctggaggggttggccttctctcctccctgcctagatcagtccttctccaaaaggacctgggagctggcagcctgggcaggggggctgaggcacgtggtagccctctttctgtgaatggggtggggctgtgggggcagctggggttggaggatgagagctcctgaggggcagaggagcagagatgcatcagctcgcctgggactggctctgtgataaaaagacccctcccgctgggttttcagaccccatgttgttggtcaatgaaataaagcatcttacagaaggtgttaactgttaaaaaaaaaaaaaaaaaaaaaaaaaaaaaaaaaa

SEQ ID NO: 291627 - DNA, 1000 bp, Homo Sapiens
agactccccccttactctgcgggagatggggcagagctgtcaacaccaggtggaaagttaccgaggctggacagtgtagtgagactgcagtttaaagaccacattgtcctcacagtactgccggatcaagatcaatctgatgaagctcaagaaaagatggtgtacatctatcattccttaaagaatagtagagagacacacatgatgggaaatgaggaggaaacagagtttcatggacttcgcttccctttgtcacatttggatgcactgaagcaaatttggaatagtccagctatttctgtcaaggacctgaaacttactacagatgaggaaaaggaaagcctggtattatccctctggacagaatgtttaattcaagtagtctagtgcctttgcagaatcaaatgcctactattttatatgcatatattaaaagaaaagcaaagacctgagccgaggagaggatgaattcaagtttccttacctgcgtatctactaacaaacatgagacctccctgttacaggtggtcagttggccaaatgtactaacgggcacatgaaagaaagaacagcaaattaccaagtgtctcagaaaatgacaaaaccatattttgacaagtttatttaatccagtgtggtagaaaaggcacaattccaatgtatcatttagaattgaatgtcattaacctggctttgttctttggaagaaacaacttctttaaagagcttctttggctctagaaaaatttcaaacaattaaaataagaaaaaattttaaactggttttttataatgaaaatatacatacctttgtgtatagacaagcccatgcccattaaaataaagttatcctgtaccatacatttattaaataatacttccccacagatgagaggcacgcaacactatggacaaaagggagttacgaggctgttaaagatgggcaaagctggatgaggggaaaaaccagtatttaagtctataaaatactcaatgtggc

SEQ ID NO: 291628 - DNA, 1000 bp, Homo Sapiens
gttgccacctcaagcccaggcccctgcccttggtcaggctctgacggccatcgtgggtgcctggcttgaccacattcttacccatgggattcggttcagcctgcagggagcgctgcagctcaaacaagactttggagtggtcagggagttgctggaagaggagcagtggagcctgtcccctgatctccgccagaccctgctcatgctcagcatcttccagcagctggatggggccctactgtgtctgttgcagcagcccctgcccaagtctcaagtccacaggaggcccccctgttgctgtgcttgtcaggaggtccagaccacgaaattgcccagcagctgcctcaatagcctggagagcttggagcccccgctccagcctggaacatctccagcccagacaggtcagctgcaaagcacactaggaggaaggggacctagcccggagggctacctggtgggaaatcagcaggcctggcttgccctcaggcaacaccagcgaccccgttggcacctgccgtttttttcctgcctgggaaccagtcctgaatcctaaggagcctgggaccaggagccagaaagttaagagctccccatctctagctggaaaatccagacatttggaattgcatattaaggaagcccagaactggaagcttggaggaaagcatactggagaataagctacaaagagcctgggcttaagaatccaagattaggggctgggcgaggtggctcacgcctgtaatccagcactttgggagaccgaggcaggcggatcatgaggtcaggagatcaagaccatcctggctaacacggtgaaaccctgtttccactaaaaatacaaaaaattagccgggcgtggtggcgggtgcctgtagtcccagctactcgggaggctgaggcaggagaatggtgtgaacctgggaggcggagcttgcagtgagctgagatccagccacagcactccagcctgggtgacagagcaagactctgtctc

SEQ ID NO: 291629 - DNA, 1000 bp, Homo Sapiens; identical to SEQ ID NO: 118312

SEQ ID NO: 291630 - DNA, 1000 bp, Homo Sapiens; identical to SEQ ID NO: 118313

SEQ ID NO: 291631 - DNA, 1000 bp, Homo Sapiens
tgtaaggtaggggagcttattcagacatagtagatagtttctctaatgctgtctcaattgctggcctttggctacctgtacttccccattatggcagcccattcagtcttgagttttcttctctggacaccttatgctctgaaatcatgagcgaggctgattcaattggtgatttgggtagaaagcagtatgttttgctgacattaagatgtaggttatagataggtttagcctttaagtgtatgtttttatactttaaaataagaaatataaccttttaagctattccacctcctcccccagcctatctcaaactggtggaatatatggagagatcttgaaagaggtaaaataaaccttcactgctccactccaggtgaatccgcccactcccactgacctagtagaatttgtaatttaatacttaccttctatttctgaaatcagttgtgaactgttgccttatgttcagaggtttaagaacctcagtgaattcattttttaaaatctgctattctgagaagcattgaatgaattcttaacaagaagactcatctgtagctgtttgctgactcctatgagcccataagggttctgtgcttagcattaacaaaataaggtttataggtaaagccaatgtattaatttttttttgcatggagggctttaaaatttgtgctctttttcatattttattcatattcaatttatggtttgtaactgctttttagggagataattatatgttataaattagttttggggggaataattgtgcaaagaggataatttaatttacgtgcttctgttattcagaataaagagagaagactacgctgcatattcaagagttgtaccttaacattggtgaaacattttttctaagattttcaaaaggaatatgtgtaaattgagaaatcataaccactgtcctaacttggtaaacaaactgttcttaaataaagtatttaatgattttaaaaaaaaaaaaaaaaaaaaa

SEQ ID NO: 291632 - DNA, 1000 bp, Homo Sapiens; identical to SEQ ID NO: 118314

SEQ ID NO: 291633 - DNA, 1000 bp, Homo Sapiens; identical to SEQ ID NO: 118315

SEQ ID NO: 291634 - DNA, 1000 bp, Homo Sapiens
ctggacgctgaccacgactacccaccggggctgctcatcgccttcagtgcctgcaccacagtgctggtggctgtgcacctgtttgcgctcatgatcagcacctgcatcctgcccaacatcgaggcggtgagcaacgtgcacaatctcaactcggtcaaggagtccccccatgagcgcatgcaccgccacatcgagctggcctgggccttctccaccgtcatcggcacgctgctcttcctagctgaggtggtgctgctctgctgggtcaagttcttgcccctcaagaagcagccaggccagccaaggcccaccagcaagccccccgccagtggcgcagcagccaacgtcagcaccagcggcatcaccccgggccaggcagctgccatcgcctcgaccaccatcatggtgcccttcggcctgatctttatcgtcttcgccgtccacttctaccgctcactggttagccataagactgaccgacagttccaggagctcaacgagctggcggagtttgcccgcttacaggaccagctggaccacagaggggaccaccccctgacgcccggcagccactatgcctaggcccatgtggtctgggcccttccagtgctttggccttacgcccttccccttgaccttgtcctgccccagcctcacggacagcctgcgcagggggctgggcttcagcaaggggcagagcatggagggaagaggatttttataagagaaatttctgcactttgaaactgtcctctaagagaataagcatttcctgttcttccagctccaggtccacctcctgttgggaggcggtggggggccaaagtggggccacacactcgctgtgtcccctctcctcccctgtgccagtgccacctgggtgcctcctcctgtcctgtccgtctcaacctccctcccgtccagcattgagtgtgtacatgtgtgtgtgacacataaatatactcataaggaaaaaaaaaaaaaaaaaaaaaaaaaaaaa

SEQ ID NO: 291635 - DNA, 1000 bp, Homo Sapiens; identical to SEQ ID NO: 118316

SEQ ID NO: 291636 - DNA, 1000 bp, Homo Sapiens
tattgaccacaagctcagaggagtgcagaaccctgtagcccgctgcatcatgtgctgtttcaagtgctgcctctggtgtctggaaaaatttatcaagttcctaaaccgcaatgcatacatcatgatcgccatctacgggaagaatttctgtgtctcagccaaaaatgcgttcatgctactcatgcgaaacattgtcagggtggtcgtcctggacaaagtcacagacctgctgctgttctttgggaagctgctggtggtcggaggcgtgggggtcctgtccttcttttttttctccggtcgcatcccggggctgggtaaagactttaagagcccccacctcaactattactggctgcccatcatgacctccatcctgggggcctatgtcatcgccagcggcttcttcagcgttttcggcatgtgtgtggacacgctcttcctctgcttcctggaagacctggagcggaacaacggctccctggaccggccctactacatgtccaagagccttctaaagattctgggcaagaagaacgaggcgcccccggacaacaagaagaggaagaagtgacagctccggccctgatccaggactgcaccccacccccaccgtccagccatccaacctcacttcgccttacaggtctccattttgtggtaaaaaagggttttaggccaggcgccgtggctcacgcctgtaatccaacactttgagaggctgaggcgggcggatcacctgagtcaggagttcgagaccagcctggccaacatggtgaaacctccgtctctattaaaaatacaaaaattagccgagagtggtggcatgcacctgtcatcccagctactcgggaggctgaggcaggagaatcgcttgaacccgggaggcagaggttgcagtgagccgagatcgcgccactgcactccaacctgggtgacagactctgtctccaaaacaaaacaaacaaacaaaaagattttattaaagatattttgttaactc

SEQ ID NO: 291637 - DNA, 1000 bp, Homo Sapiens
ggattccaggcgtgagccactgcggccagcacatttccacttttagatcctactccataccacaggtttcatttaagaagaaagagctagataaatgtgctcttctggttaccccaccctgacagagtgcatttttacacggctagcaggggttgagactgcagcctggcctgccagccattggaggtgtttaaggaagggcagataatgtgactctttgcggggtgccatctgcttacccattagcgagcagagggggtttctgcgggtgacccccagcatatttctaggttacttatgggcagatttgtaagtgacaaaactccagctgatgctgggaatggggagagggcccttgagggactttgtggttttgtgcttctggtttcctggccaaccccagggtcacttgtctggaggcccagctgggcactaatgtctgccaccgactatgttacagtgtataaatgattcctctatttgggagagatcttccaatccagaggagcccctcttggactgcctgggttaaatctgcatagcagaagtggttgatgagttcatctgaagaaattcaggccccacctccccaccctgcccctccctgctcccttttgatggtggcctctgggtactcgggcagagtccttgggacaccagcctctctggggttctcaggccatcccgttggggctgtcgcccaggcctaagtgagtcgtgtgcctctattggaggatggctgttcccctggtggttgcatccaagtatctgtctttctttatggaccacgaagggaagcccaccttcctggaggcaggaccttcggcctaagaaacacaggccctggtgctatctgacctggggtccagcgaggtgggaatcccagtgtgtgagcgacaggccttcttctattgacttacaatattctagaaggacctacgtgtggggacacagttttccaaactgaggaaaatgttgcaataaaagaatatgttgtaag

SEQ ID NO: 291638 - DNA, 1000 bp, Homo Sapiens
cagggatcctcagaatcagcggccacctgcctccaccttctgcctggagggcatggggctgttgtagaacctatggtagcaaatgtatatgtatgagtttgtattctgtagtgttggtgtagcacagaagaaagacctgtgtcctagagagtaggccaaggtgatctgcctcttctattgggagaaattctaatttctttcccactttctcaacaagcccaatattccctccaagttcttcttggtgctgagggctgtaggaattattgaaagcttctgcctcacttagtatcgtctggggcccagcacccagcaataactctaataatgtttcttaatggtatagcctcctgagattaaatgtaaaatcaaaaattaggaaatcttggagggagtcctcaagttgtattgctttgctgtgcttttggaagaagggacgacctggaggacacaggctcctgtgtgggtcttcatcctgcctgaccggcagatcttcctctacaccttgggcaaagtctatgcgaagatggtttcttagctctccatttgccatgattttcctcccattcatcatgagggagtttctcaaaccaggagtttatatttattttttagaaaatacacacttttcaggagaaacctgagcatgattttggattctccacctccccccagtctctgcacctgggattcagctcaaggattcagtgtcttcatttttacaaaagttcccccaagaaatcagcaaccagcctctgtttcatctgggagcccctcccttggccccctgggtttgggggtgctgccctactgggaacagcgggggtctgtcacccgtctgagccgcacccccctgtgtggatttcaggaagagcctccctttctttgcgtctccctttctttaattaacattttcaaaagtaataaattcttactgacgacttgtaacttagtcatattttatacttgtagcctttaataaagccatttaaaaaatgct

SEQ ID NO: 291639 - DNA, 1000 bp, Homo Sapiens; identical to SEQ ID NO: 223681

SEQ ID NO: 291640 - DNA, 1000 bp, Homo Sapiens
catagccaccgtggtctctggcattattgcagcattcatggcattcctcttcaaactcactgatcttgtggacctcatgtcaattgggaccctgcttgcttactccctggtgtcgatttgtgttctcatcctcaggtatcaacctgatcaggagacaaagactggggaagaagtggagttgcaggaggaggcaataactactgaatcagagaagttgaccctatggggactatttttcccactcaactccatccccactccactctctggccaaattgtctatgtttgttcctcattgcttgctgtcctgctgactgctctttgcctggtgctggcccagtggtcagttccattgctttctggagacctggtgtggactgcagtggttgtgctgctcctgctgctcattattgggatcattgtggtcatctggagacagccacagagctccactccccttcactttaaggtgcctgctttgcctctcctcccactaatgagcatctttgtgaatatttaccttatgatgcagatgacagctggtacctgggcccgatttggggtctggatgctgattggctttgctatctacttcggctatgggatccagcacagcctggaagagattaagagtaaccaaccctcacgcaagtctagagccaaaactgtagaccttgatcccggcactctctatgtccactcagtttgacatcgtcacacctaaatgctgtctggtcccctgcacaataatggagagtactcctgaccccagtgacagctagccctcccctgtgatggtggtggtggatactaatacagttctgtacgatgtgaaggatgtgtctttgctatttcttgtctattttaacccgtctgcttctaaatgatgtctagctgcttaccaactttaaaaaatgatattaaaagaaagtagaaaaataaaaaaaaaaaaaaaaaaaaaaaaaaaaaaaaaaaaaaaaaaaaaaaaaaaaaaaaaaaa

SEQ ID NO: 291641 - DNA, 1000 bp, Homo Sapiens; identical to SEQ ID NO: 223682

SEQ ID NO: 291642 - DNA, 1000 bp, Homo Sapiens; identical to SEQ ID NO: 223683

SEQ ID NO: 291643 - DNA, 1000 bp, Homo Sapiens; identical to SEQ ID NO: 223684

SEQ ID NO: 291644 - DNA, 1000 bp, Homo Sapiens
ttcaaccttttttaagttgagtgtttttatttctgcagttattagttggatcctccacatcttgcatatatacatgggctcaattattatgtttgtcaggataatcaaatgaaaatactagttcagtgatcagcattgaatggttgttaggcagccatgtgctcaacactgatttcacctcttgagtataaactttttaaatttaaattggtttacatgaaagtggattaaaaggcctttcaaaagaatgggtttgaaaaacctcagtaccctttaatacatgtacatttctttccttttttcatttaatgtaacatgtctgttgtaactatgtttcttaaatattattttaaggttatgtgttctttaattatggtcaaatataatttggtcaccaaaaatgaaataatagtttaaaacaagtagctgttactaagtgtgctaaaaatactcattttataattaattttagttttcttagtatattattataaattgtgccctaagtcaggtacaaatgtacacatcaaaatgcccatattgtatctatctgtagtcgtttaatgtgaattatatgtgaatttttttcaaaattttactaaccagaattctgttataggcacctaaccacgcagcatgaggaaaacggcacaacacaatcttgaggtgccttctgaatcatcagattaaattatgcttcatatgtttttgcttttactgtatttctttaaaaactctaaatctttattcatgtgtcactggattaatttatctgataatgtgtctcacaagaatctgttagatcgtttattcttcagttgtactttgaatggtggggtggaagtttcaggtgaacaatggataacaaaaagcaagttatggaagattgtgaagaggatggaaaaactgaatacaagataccaaaaatgaaaaaaagtgtcccatttttaataactatattctattattttataaatgtgtaataaaggggtccctcttt

SEQ ID NO: 291645 - DNA, 1000 bp, Homo Sapiens
gtttactctatcacctaacacctcaacactacctgtgggatgccttagttacccagcagcaggttaccaagggctgtctggaaagggagggacaaaaggacccagaagtagaagaatggggatggagtggtgagaattgaatggttaatgcactgccattcataattgccaattgaggacaacacaaatgggattggtactttatagtaataaatctgaccagcagagggagggatcaggcagcagtgtttagagcacaccacactggccactgtaaactgagaagctaagttaactggtattttatgattttgagtatagtctttttataagttgtatacactttacaatgtaaaagaaacaaactttgtataatagcaaatcgggaaggggactgcttaaaatgttaatgcagtgtttttctttttttctctgcataaatggcttgagcatactggcatttacacagaaatgatatatgctgcttttatcatataacaaatattttcccactattacagcctgagtaatacccgtattaaaagagcctcattttagaaagacatttaaaatttttggaacataccacatgtagaaaggttgaactggtttttcagctataatgcatatacaactatagtgtgtacgtataccacatatacatatacttgtatgaagatatgtgtaaaatgtttttactaaggatcatggatttaagaaacttgaaaagctgggcacggtggctcacgcctgtaatcccagcactttgggaggctgaggcgggtggatcaagaggtcaggagatcgagaccatcctggctaagtcggtctctaataaaaatacaaaaaattagccaggcgtggtggcacgcgcctgtagtcccagctactcgggaggctgaggcaggaagaatcgcttgaacccgggaggcagaggttgcagtgagccgagaccgcgccactgcactccagcctgggcaacagagcaaaactccaactc

SEQ ID NO: 291646 - DNA, 1000 bp, Homo Sapiens; identical to SEQ ID NO: 223685

SEQ ID NO: 291647 - DNA, 1000 bp, Homo Sapiens
gtatgtggttacatttaaccatttaaaagtcttagacatgttattttactgatttttttctatgaaaacaaagacatgcaaaaagattatagcaccagcaatatactcttgaatgcgtgatatgatttttcattgaaattgtattttttcagacaactcaaatgtaattctaaaattccaaaaatgtcttttttaattaaacagaaaaagagaaaaaattatcttgagcaacttttagtagaattgagcttacatttgggatctgagccttgtcgtgtatggactagcactattaaacttcaattatgaccaagaaaggatacactggcccctacaatttgtataaatattgaacatgtctatatattagcatttttatttaatgacaaagcaaattaagtttttttatctcttttttttaaaacaacatactgtgaactttgtaaggaaatatttatttgtatttttatgttttgaatagggcaaataatcgaatgaggaatggaagttttaacatagtatatctatatgcttttccccataggaagaaattgactcttgcagtttttggatgctctgacttgtgcaatttcaatacacaggagattatgtaatgtaatatttttcataagcggttactatcaattgaaagttcaagccatgctttaggcaagagcaggcagcctcacatctttatttttgttacatccaaggtgaagagggcaacacatctgtgtaagctgctttttagtgtgtttatctgaaggccgttttccattttgcttaatgtaactacagacattatccagaaaatgcaaaattttctatcaaatggagccacattcggggaattcgtggtatttttaagaattgagttgttcctgctgttttttatttgatccaaacaatgttttgttttgttcttctctgtatgctgttgacctaatgatttatgcaatctctgtaatttcttatgcagtaaaattactacacaaactag

SEQ ID NO: 291648 - DNA, 1000 bp, Homo Sapiens; identical to SEQ ID NO: 223686

SEQ ID NO: 291649 - DNA, 1000 bp, Homo Sapiens; identical to SEQ ID NO: 223687

SEQ ID NO: 291650 - DNA, 1000 bp, Homo Sapiens
gacacaggggctgggctggtgcccgaggctgtccccggcaagccgcccttcgcagagccggacgcggtgctgtccatcgttgtgggtggtgcggtgggcgcggaaactgagctggtggtacctggacacgctgaggggctgggctccaacctggctctggcggagctgcaggctggggccgagggcccatgtgccatgctcgctgtgcccgtctacatccaggcctccgagtgacggacctgaggtgtctgtttcctgggcaggcctgatgctcctgtttgggtccagggcccctgggggcagaccggtgatccttaccagtggaagcgagccatcgagccattggcagaaatcctgctgaatgtcattcagaaacctcagcccatggtcgccctcctgtgcccctctcctgccggaaagccctgcaacattctagggttgggggcagggccatccacggtttctgggcagagccatggtggcaggagagagatggctgaagcctgagcagcccagagtcccgctggtctaggctggtggtcggggcccctgggagaggagacagggcattcctccccactctgtctccaggctgcctctgggtagcctctagtctgctgttcttcaggaggcctgccataaactcttcggagtttacgtgttgcaccttttcacagacggttccccacagcatcctcagacagctctgtgatgtagcttttaggaggcactcaggtgtcacggctagactgcagctatgagacagatctggcttcaaatccaagagttgccatgcacttgctgtgtgaccttgggcaagtcacttcacttctctgagccccgtgttcctcatctgtacaatggggcttacgatactactacctcatagggttgtcctggggatccagtatgatgaagtgcgccaggggcttggcatggtgcccggcacgcagaaagtgctcaataaatgtttttgtcataacgtgaaaaaaaaaaaaaa

SEQ ID NO: 291651 - DNA, 1000 bp, Homo Sapiens
cagactcttcttactacacaggtactaacaggctggcaggttagagttggtggagtctgaggagagatattttctctttgttgccaacatcctgtttaccaaaagtgtcaccccaccatcttccataagctgtgaaacaaaatcaatgaggtcactaacttagaagggaaagaaagttttctgggtctttgttttcttgatttggggtaatttatacaagggcatacaagttgattttaagatgtggaactgggaggtagactagtttggataagaactttgaaatgttccttgtggatccccatttctggtcatcaagatgtggatgtacatttcttaaaattattacatgctgcatctttcagcctggagactgtgcagaaacatgagaggtgatgacacactaattatgggaagcagaattactggctgatggcccctgaggctgtgtgtaacaaaatgacaggacaatcttgcagtaacactttccccttgaagagaagggggttttgattgtgatatatactagtatctaggaatgaacagtaaaagaggagcagttggctacttgattacaacagagtaaatgaagtactggatttgggaaaacctggttttattagaacatatggaatgaaagcctacacctagcattgcctacttagccccctgaattaacagagcccaattgagacaaacccctggcaacaggaaattcaagggagaaaaagtaagcaacttgggctaggatgagctgactcccttagagcaaaggagagacagcccccattaccaaataccatttttgcctggggcttgtgcagctggcagtgttcctgccccagcatggcaccttattgttttgatagcaacttcgttgaattttcaccaacttattacttgaaattataatatagcctgtccgtttgctgtttccaggctgtgatatattttcctagtggtttgactttaaaaataaataaggtttaattttctcccc

SEQ ID NO: 291652 - DNA, 1000 bp, Homo Sapiens; identical to SEQ ID NO: 118319

SEQ ID NO: 291653 - DNA, 1000 bp, Homo Sapiens
gctcttccagtgttagtggattcagatgaggaaatcatgaccagatctgaaatggctgaaaaaatgttctcttcagaaaagataatgtgattggaacccgtataagaaatgtagttaagcctgaaggactatccttcatcaagactgaaagtgagctttgatttgatattgcctaaaaatttttattgtgttatcttggaagtctgtgtatcaaaatgaagaattcagatggtaggaggttctatagtccttttaaagctgactcttgagtgtcagttgaatatccattaagttggatttggaaataacctgaggaaagtattatgataaagatctgcacagatgcctcttagctgataggtggcaggcctgtgggttcgggttctccctcttttctctggaacatatgacaattccagattaaagaaaaatgttttttaataaatacccttggtctttcttctagtcacctttgaggtagatattgtgattttctggagtatagtatatccgtgtctctgtgtcttaggtttactagatgcaataatacttctctttgacatttgtactgaagtgatttgatattaagtaaaacagttaatgtttgaatataggcatatttataggttttttccgctcccccccaacccaccctttttaaaaaatctatacaaagcccttgtttgagtctcatcatgcacatcaaatcatggagttaggtcttctctgagctcaggggaacacaagtgcacagagagagatgtcttgagggtcactaccaaagaattaccctcattgtccctcactcaggccatgtgtacatgcgatgctgctgagtgtgctggggtgggtggtggccacgtggctcccccagagcacttcctaactggcaagctgggagacccattactggtgaactttgtggaaattagaactgtatcttttacataatcttggcatattacatttcataataaaaacatacatttagttgcatgct

SEQ ID NO: 291654 - DNA, 1000 bp, Homo Sapiens; identical to SEQ ID NO: 223690

SEQ ID NO: 291655 - DNA, 1000 bp, Homo Sapiens
cctggccaggccggagaagacatgttcacgggcatctatcagatgcccccttgaggaggctgagttatttgagggctgctgcaaagtacgctaggctcaaattctcttttcccagccagagccctggccacacggactcagaggggccaccggggtggggaaaggacccctccccgacccccgcagccactggcctccagctctcggccacagaatggcctctaaggctgactcagccgctcccttgggctgtggcagcaggaggcgggggctctggctcaggccccggagcctgtgcagcttgcccatggccctaggcagcgaggggacagcctgggggacttcctgcctaggcaaggtcattggccgggcctggcctgtggatagtggggccaggggccggcccaggccaaatgagtgccctccttgttatgacaccaagtgactacaagggaggcaagacccctccaggcctcccagccgacactgggtcccaccacacacagtgactgtgccgtgcagtgcaggttctggccttttccttgaaggcatctggtaaacccgaagccacgctctcgggccgcacatgcacgccgcagcaccagctgccctgagctgcttgtacaaccaaacacctttcccctcttctccagctgtaacctggagagtcagccatgccttgtcttttgttctcatgaatagtcactggggccgggcgcagtgactcacgcctgtaatcccagcactttgggaggcctaggtgggcggatcacttgaggtcaggagttcgagaccagcctggccaacatggtgaaaccctgtctctactaaaaaaatacagaaaattagctgggcgtggtggcgggcgcctgtagccccagctacttgggaggctgaggcgggagaatggcaatggcgtgaacccgggaggcagagcttgcagtgagctgagatggcgccactgcactccagcctgggcgacagagccagactcaatctc

SEQ ID NO: 291656 - DNA, 1000 bp, Homo Sapiens
agctaggagaacgtttaatacttcattacatcaaatcaacactgctccatggtgagagcacagcaactcatttatatatatatatataggctttgttgatgaaaaacgacaattgaagagaggacgttgagtggattcctgggtacagcttttgtaaaaatgtcaccatggctttcatccaatggaatgagtcgatgttttttaatgctataaaatgttagaatgtgccatcagctaatgccaggcttacgtatttctagaccataaagcagtttttcacaaattcatctttacagaaaaccagcatctagcttagcatctttccccttttaatttgtaggcttttaaaggcaaatcattcccaccatcacttaacgccgggattatacacattctagaaatgattctgagaggagtgtatagtatggtgcctatctacactcacatgatattcttattcacgttttttttaaccataagtggcaaatattttaaaatatttgaaaaacactccagaatctagtacgctttatttttagactgaacctaaagtaggttgttcttttaacaaagggtttaattcgggtggggaatataacatatcaaaatacatgaacaaatggaaagttacttctagaaaagcaaagaaattgggtatcatttttgtttcttgggaagctaattttgttgaatgtttagaattgagcaaagatgtaaatttttgaagggcagtttagaaaaattaactttgtgaatgaacttaagatgtctgtactctatatgtgatgctgtgcagtttgtttttatatggaaagatgtcaactatagccataaccaataaaataaatactgatgaggcatgcagctttcagcacatcttttatacatgaagaaattaattttgtgttgctatggtgttgaaatatccaagatgttctgtatctatgtaaacatgattcctttaataaattgtattttattattaaaaaaaaaaaaaaaa

SEQ ID NO: 291657 - DNA, 1000 bp, Homo Sapiens
accacgcccggctaattttttgtgtctttttagtagagacggggtttcgctatgttggccagactggtcttgaactgctgacctcgtgatccgcccgcctcggcctctcaaagtgctgggattctgtgtgttttgtgcacctccactttaggtaatcatagggagcacatttacaggatggtctaataacatgaaaacaggctagtttcaagcaacagcaatgtcggttggaaagcaggcgtcatttgccttgaaaaaagccttttgacaacatacaggcattcttttaaaaccaggctgaaacattttatttccgagacttaacgttgtgtttcctgtttcttaaacctagcacctctgtgtatttgaaaataatgagacatctttcattggattttggaaaattgttccccatgggattctaacctcactaccaaatgagtgaaagcttgattaagagttcttccatatactagcctccttggaagaagtgatcagaaggtgataagaaggacagaaaggactattttaaagttggactgaaggagaaaaaagcaaaattcttgtttcatcccaattctagttagaacaaagttaaacccccgtaatcttaaagagaaaatctttggaggttttaattaaacattttatacatttaaagtcttgttaatggtgctttaagtgtcaatgtagcatgtaaaaggctttgtacagacaggtaaaagttccatttctgagtgatgaaatgtaacacttcttcatctttaacttgaaatcaaaactatcagattttatttttgtataatttaaggaaggtaaagttaggggactagaagactctaaattggcttctacagatcaataatttaaatgtaactagttgggattttatagttaaaattatatttgtgtatataacataactaatctgtaaattgtaataaatatatttgcaattaaaaaaaaaaaaaaaaaaaaaaaaaaaaaaaaaaaaaaaaaa

SEQ ID NO: 291658 - DNA, 1000 bp, Homo Sapiens; identical to SEQ ID NO: 223691

SEQ ID NO: 291659 - DNA, 1000 bp, Homo Sapiens; identical to SEQ ID NO: 118321

SEQ ID NO: 291660 - DNA, 1000 bp, Homo Sapiens; identical to SEQ ID NO: 118322

SEQ ID NO: 291661 - DNA, 1000 bp, Homo Sapiens
ttttttttttttttaatgtttccccagcattctgcaagttaggccaaagcccacattcaaagaaatgagattaactcttaagtaatgtattaagtttatgtatattttaaaatattattaaaggaggtttgaaagtattgacatttaaaaagtcaacacttagattaaatttagctggtagttttaatttgggttttagttaagagtgtgaggacatcaggaaaactgtttactactttggttttagcagctcagttttactattccataatgtgttatttttaaagttctctttttaagatcacagtgatatcctatcttcaaattttttaaatatgttcaaaatatctggagggtgagaagttaccaagtttgtatgttttgtttgactcaccatctttattttctgtatatgtagtagctggcaattgcatatattttcttgattaacatattagagactgcttccatcatcttatgtaaacctggaaacagctgaaactagtcttttctgaagaaccgtgtatcagtgttagatgtgcatcccgttttgtcattccctcagactttgaatacagtcattactctctggaagagaaatgtaagtatattttttgttatctgcagtatggtttaacatgtattaataatacacatatgcagactcactaaagtatccccagtaattagtaaattccaaatttaagtcagtacagttctgtatttgtaaattctgtctttcaaaaagttgttcgtgtttttaaaagttgatgtccaaaggaaaggagcttcttttaagtacttttggtgtatgttgaatatttatttgctatgatattctagaagaaaatatcaaacatgttaaatataagaacatgttaaaatttaaatttgctatttcaaaagttactgaagatgtcttggaataacaattgtcatgctgttaaactagttgcatatacttcattaaaagcaccatggagaaacattttaacaatgc

SEQ ID NO: 291662 - DNA, 1000 bp, Homo Sapiens
acatgacttctttagatgcaatggatatttcgcgtgcctacagtggttcatatcccatggctataacccctactcaaaaaagaagatcctgtatgccacatcagaccccaaatcagatcaagtcgggaactccataccgaactccgaagagtgtgagaagaggggtggcccccgttgatgatgggcgaattctaggaaccccagactaccttgcacctgagctgttactaggcagggcccatggtcctgcggtagactggtgggcacttggagtttgcttgtttgaatttctaacaggaattccccctttcaatgatgaaacaccacaacaagtattccagaatattctgaaaagagatatcccttggccagaaggtgaagaaaagttatctgataatgctcaaagtgcagtagaaatacttttaaccattgatgatacaaagagagctggaatgaaagagctaaaacgtcatcctctcttcagtgatgtggactgggaaaatctgcagcatcagactatgcctttcatcccccagccagatgatgaaacagatacctcctattttgaaaccaggaatactgctcagcacctgaccgtatctggatttagtctgtagcacaaaaattttccttttagtctagcctcgtgttatagaatgaacttgcataattatatactccttaatactagattgatctaagggggaaagatcattatttaacctagttcaatgtgcttttaatgtacgttacagctttcacagagttaaaaggctgaaaggaatatagtcagtaatttatcttaacctcaaaactgtatataaatcttcaaagcttttttcatctatttattttgtttattgcactttatgaaaactgaagcatcaataaaattagaggacactattgagagtgagccactagcttgattttctttctcctctgatttcagttcactgttcagtttagcattaaaataataaaataatcatacagttcc

SEQ ID NO: 291663 - DNA, 1000 bp, Homo Sapiens
atctctgacccccaagaggcctgtgaggcagtgggggcagcgcctggcccagccaccatcctctaggcagggtgctgccgtgggaagagagcactgtggtgaggtggtgagaccgcgtgccccgggtcaccctgaccggtccaattgcctgtcactcaccagaggcccaatcttgggcaagtgactcagcctcttggtgtgcgaaatggcccccatgaggcctcctcagcctggggggctccatggcagaagggttccaagaaggcaggagctggagctgttcttgccgctgctgggaggtcctgtccaccctctagcctccctctccctgatcccccaccactgcccattcccagtaaggcacctattctctttgccaccctgacaccaagtcactgttcagcttgtgggcaacagagccggaagcatggaaaaatctcatgctgctcccaaagccaagggagggctcaaagaaggctggtggaaaaaggcccagagctgtggccggacagagtaggccccgaacaaccacagagccgccttgacagaagccagggcacggtcctgagatgagcctcatccctggagggcagcaatggaccatacacgtgtctaagcccccatcaccagccggggacccagtgactcagagcctgctcttcctgaacccactcggcaggaagaaaactgaaggcccaagagccccagccacactgtgacctggaggtgacctggagggagacagggtgacagcaccaagctcagcctttcctccgaggcttcgcaggactgaatgaaggcaaacttcccaacaccccaagccatgggattgtccttcctggggccctgactgagctgtgacgggctgtgtggccctgggtgagttacttgccttccctgaggctcatctcagcacatataatagaaaatggagacaaaaggatgccctttgcatgggttttgggaaagattaagtcacatgtttataaaagtgcctggc

SEQ ID NO: 291664 - DNA, 1000 bp, Homo Sapiens
ggacatgtggccacttattattacctaaagaaaacatttgttccctgttcattttattttaggggccagatctaacattgtagtgtctttcaccagatagacttctactgtttcatcaaactcccttcttaactagacctagactttctactccaatcaggctaatctacttactgaatgtgacatatttattcctagttccatacctttgcacatgccctactctccactaattatacttaaaagtccaaaaattttttctttagtaacagacttaggtactgctaagcagttattaacacaatattccttagttttcatatgttggttattcatatgtctatttatatgtatatttatttttatgtatgttactatgtaaatatggtttgcagttgtttttgtgtggaatcttgtctttccgtataagttgtaagctccttgagagcaggatccatgtcattcctttatttttataaattattccccctatcattcctttacagtgcctagtgctgctcattatgtgttcattgaatttgactgacatagttaaaaacttaaggtttattttagactttcaaggaaacaaaagactttagagtcctctctctgtaattctgccccactcatttgtttaccctgggttttatacatttctcttccttctcccctcccacctttccctggctttttgcctccattccatgaggcatacagtaaggctgcctgctagtaagcagtcacataagtgggtacctatccagccattctcttttcagagcatataatactatcttagccaaacttgcctttgcttcactcatcatgcagccttctgggttggttgctatatatatcttttttccttgatgtcccattctcttccacagccctgaggtcttacgaatttttctactttctttttgctgttgatgaattgtttcattattaaatatatgcatgtaccaaaaaaaaaaaaaaaaaaaaaaaaaaaaaa

SEQ ID NO: 291665 - DNA, 1000 bp, Homo Sapiens
tcagccacaccccgtcttactgtgatgagtcgctgtttggctcccgatctgaaggcgccagcttcggggccccgcggatggcgaagggggatgccgcaaagctccgtgctctcttgtggacgccaccacctacccccaggggtagccactcgccccgccccagggaggcaccactgcgagccattcacccagctggtccctccaagacagagccggggccagcggcagactcccagaagttatctatgggtgggttacactcttcacgccccctgaagcggggactttcccattccctcacccacctgaatgtccccagcactggtcatccagccaccagtgccccccacacaaatgggcctcaggatctcaggccttccacgtcaggggtgaccttccggagccccctggtgacttccagggctcgctcagttagcatttcagtgccatctaccccacgacgaggtggggccacccagaaaccaaagcccccttggaaatgatactctttcatcagggttgcctatggggccacggcgacaggtatggccccttgccagggtaggaggacattcatcacccagggaaccccaggtattaaagaagcccctgtgggggcagacagacatagcaggggtgggcagtgcctccctttatcctgacaatctctagtcgattcttgcctttttctcccgattgcggatttgggggccacctctaagatgcctctctccagccctgtctcaaccatactccaaattagtgccaacccaggggcctggcacctcccacatcatccattgtcttgctgccaagtgcgaataaacggcgtgattgccaacctggagggtcccctcttatcccttcaagccaagcttcctgctcaggattagtttccagctaagtctgcaagccctagaggagtttttccaggctgtctgtgaagcctggggaacacaacggcaactgggagatttgtgagtgaacactgtttcatctt

SEQ ID NO: 291666 - DNA, 1000 bp, Homo Sapiens
aatctccggctcctccatggcttctatggaggactcctctcttctgcttctgtggatgtgatgccctggcaggcccagggcagctgattcccctaaaacttatgattaccaggatggaaaggccttggtcccatggcactgggtggggctgggggatattctctactttgaacacttctccaaagaggcagaagggccacagagttctgccaccctgaacatttttctcagttccctgggagtttttgtggcagcctttgtgggagtggtctgactggctgttgacctagcatgcttcataaatcagggtttggccctctgcttggagcatccaaccccttgaactcaaacctgtcgagcaaggggttaagagttctgttctcttgccaacctggctgggcaaaagcctgtgccatctttcactgggaggcaaatatgtttttcatcctgccatatgacacctatgagaaacgttcacagtgaggagtagccaggttgctaggacagtaaccctgccacacactgcctgaaatcggaactcccttggcctccctcttaactaagtgacccatgtagaaggaagccaggagatatggtaccgaacaatgacaggggaagggtattggacacggcagcgtcctccttattgaaaacacattatgtcagttgggaattttaaataagcttttagcaaacctaacactaaaagcaaaatagaagaaagctataccattaccataatacatttttcatctcatggctacaatggaattcttgaaaaggaaaaaaaatcctatctacatataaaaacctgcatgaatgaatcactacatatgcttataatgaggaagagttatgggtcctgagtgtaattttttatcctttcttaaaaagtttctgtattatgcattttgataacactactgatgatccttccacttatatttgaaatgttatgtaccacatttgcacaattaaaacttttcttagcgttcaacct

SEQ ID NO: 291667 - DNA, 1000 bp, Homo Sapiens; identical to SEQ ID NO: 223692

SEQ ID NO: 291668 - DNA, 1000 bp, Homo Sapiens
ctgagggacggctatgtgccccccaagcaccgcgagctccgggtcacgaagcgcaacatcctggacgtgcgcccgccctccggcccccgccgcagccagtcggccagcgacgcccccttgtcgcagcacaccctggagacgctgctggaagagatcaaggccctccgcgagcgggtgcaggcccaggagcagcgcatcacggctctggagaacatgctgtgcgagctggtggacggcacggactagccccgcgcgccaggcaggcggagcggggcggggcgcacaagctcggccccgccccggcttttagtcccgaactccggaccccgccttcttgggctgggcccgggggcgggactggggagggaactccgcccctcgcgggagaccagaactcttggagcttaggggagacccacgtcgctccagcggaggctggactgcgagcctcgtctgggactcggctggagctggcctagggaggcctggggtaacctggggggctcagcaatggtgctgcacggcgaggtggtgtccccctttgtcctccgcccagggcagggaaagtgcttagtattagcgtgatgcttggggttattggagcctgagcttgacctcaaacgggtggcgatttgatgggtacccccaggctggggaaaatgacagcgcttctcctaatcagctcactggattccatcaccctgagcggtaaaccagatgggcgtcaccccagttctgcagacacatacacaacccgtttgctgcagagccggacccagtggctacacccacagcggtctgtggtagagaactctcttccttctttccaccgacaggggcgagggctgcttcctcgcggcagcccccgcgaagaaatctcgagagaactggcatgaggagttaggttcatcacaaatacacacacactgcccccaaccctctgccgttgcctctctcagaaaaacaagacgtactgaatgaaatattttactaagcgttc

SEQ ID NO: 291669 - DNA, 1000 bp, Homo Sapiens; identical to SEQ ID NO: 223693

SEQ ID NO: 291670 - DNA, 1000 bp, Homo Sapiens; identical to SEQ ID NO: 118323

SEQ ID NO: 291671 - DNA, 1000 bp, Homo Sapiens
ttcgatgacttcctcagtcatgaggagaaatgaacagctgaccctacatgatgagaggtttgagaagttttatgagcaatatgatgatgatgaaattggagctctggataatgcagaattggaaggttctattcaagtggacagcaatcgcttacaggaagttttgaatgactactataaagagaaggcagagaattgtgtaaaattgaatacccttgaacccttggaggatcaagacctgccaatgaatgagcttgatgagtctgaggaggaagaaatgattactgtagtccttgaagaagccaaagagaagtgggattgtgaatctatttgtagtacatactcaaatttatataaccatccacagcttatcaagtatcaaccaaagcccaaacaaattcgaatatcttctaaaacaggaatacctctcaatgtcttaccaaagaaaggactcacagcaaagcaaactgaaagaatacagatgattaatggcagtgatcttcctaaagtatcaactcagccacgttctaaaaatgaaagcaaagaagataaaagagcaagaaagcaagctataaaagaagagcgcaaggaacgaagagtggagaagaaagctaacaaattagcatttaaactggagaaaagaaggcaagaaaaagagctgctgaacttgaagaagaatgttgagggtctaaagctatagacagtggagcatacagggcaaggcactttattaggggctcctcatctttggttattgactagaaacttcagaaagacaaaactgtttgccatttttactggcagataagaggaaaatacaatatttgtattatttttatactagtaagtgtcccctgccaaccatcttgtaaatattgtaatactttaatttttaatattataagcttacatttgctctgaagtaaatgacttcatgaatgtgaaatgtttgataaattaaaggaaaatatcttcataaaaaaaaaaaaaaaaaaaaaaa

SEQ ID NO: 291672 - DNA, 1000 bp, Homo Sapiens; identical to SEQ ID NO: 118324

SEQ ID NO: 291673 - DNA, 1000 bp, Homo Sapiens
gcagcattgagcgctgctggctgctgggcctgcgggctgccttcgagccccggcccggcgaggacagtgctgggcagccggcccaggccgaggaagccgccgagcacagcagggtgctcagcgacctcacccacctggcggctctggcctacaagtgcctggctccggaggaggttgcggagtggctgcacctggacgatgatgggggtccgcccgagggctgcagggaggaggtgggcccagccctgccccctgcagcgcctccggccccagccagtctgccctctgccattgggggcggagaggacgaggaggaggccaccgactatggagggacctcagtgccgactgccggggaggccgtgcgggggctagaaacagctctgcggtggctggagaaccaggaccccagagaggtggggccactgaggctggtgcagttgcgctcactcatcagcatggcccggaggctggggggcatcgggcataccccagcaggcccctatgacggtgtgtgaccaggccagcccagtgacctttctcctgctgcacttggagggaggggacatacacacagtctcccatctctcctcccctccccctggggtggcccaccgcatgggtacagggggttccaggaatccaaatccagcatggcttggaggagctctgttggtgagaggtcgccctgcctcactggcaccctgggggcacagctggaagagaggcctggcccatgctcctctcagggcaggcacatgtacggggcatacaaggcacagcgcctgttggaacaggtggctgtgttcctgctctggcccccgtggggctgggcctccgcccctgcaccagtcacatgcactggacgagggccgaaactcctgtctgctatcgagccctggtgctatgtggccccggagccacagcacaatcatctcagtggcgaagcacaccacttgattctatttttttttaacacattaaatctgtttttaaagat

SEQ ID NO: 291674 - DNA, 1000 bp, Homo Sapiens; identical to SEQ ID NO: 223697

SEQ ID NO: 291675 - DNA, 1000 bp, Homo Sapiens; identical to SEQ ID NO: 223698

SEQ ID NO: 291676 - DNA, 1000 bp, Homo Sapiens
ttttgcaggaatggtttaagctggttctggagaagaataaattaatgcgatatgagtcggagctcctaatcatggcccaggaactggaattagaagatcatcaaagcagactggagcagaaactgagagagaaaatgctcaaggaggagagccagaaagatgagaaggatctaaacgaagagcaagaagtattcaccgagctgatgcaagtgattgagcaaagggacaaactcgtcgattccttagaggaacaacgcatcagagaaaaagccgaggaccagcactttgaaagcttcgtattctccagaggctgtcagctgagcaggacttgaggaggcccgtagtccctctccctggctgcacgttgggaccggatcaggccaagtgcaccacacaccctcatgggtctttctgcaggatttatcatccctggaacttaagttataccttactgcattttttaaaattaaaattctcttgcacgcatggcagcttcccaaggttcttccagagattcaaatgaagaaaacccaaagactctttggcaattggcagtcaacttcagccaggctctcagactggaggtgttgttggcagatgaccagcattgttttccctagaaagtgacacaaagacttgactttcctgctacttttatcattttccttcccaattcattgagttacatactttaagatttttgagaagctgccttttcattaatatatccatatttgcctttttttgtatggatgaccagtttccaaatgtcagaaagaagcagccgcagtttaaagattaggttaatatttaaattgtgtttccagagaaagaggagaaaccttgagattactgattacataaagcaaataactcatatagcaggtgttaattcaatccagggtgaatttaatttaccaggtgcatttataagccttaatataatatacataagcaatgagagcttaatagaacatttgagccttaattttattttaag

SEQ ID NO: 291677 - DNA, 1000 bp, Homo Sapiens; identical to SEQ ID NO: 118325

SEQ ID NO: 291678 - DNA, 1000 bp, Homo Sapiens
tacttcttctcggtcttcttctcctaaaaggaaaaagagacacagtaggagtagatctccaacaatcaaagctagacgtagcaggagtagaagctattctcgcagaattaaaatagagagcaatagggctagggtaaagattagagatagaaggagatctaatagaaatagcattgaaagagaaagacgacgaaatcggagtccttcccgagagagacgtagaagtagaagtcgctcaagggatagacgaaccaatcgtgccagtcgcagtaggagtcgagataggcgtaaaattgatgatcaacgtggaaatcttagtgggaacagtcataagcataaaggtgaggctaaagaacaagagaggaaaaaggagaggagtcgaagtatagataaagataggaaaaagaaagacaaagaaagggaacgtgaacaggataaaagaaaagagaaacaaaaaagggaagaaaaagattttaagttcagtagtcaggatgatagattaaaaaggaaacgagaaagtgaaagaacattttctaggagtggttctatatctgttaaaatcataagacatgattctagacaggatagtaagaaaagtactaccaaagatagtaaaaaacattcaggctctgattctagtggaaggagcagttctgagtctccaggaagtagcaaagaaaagaaggctaagaagcctaaacatagtcgatcgcgatccgcggagaaatctcaaaggtctggtaagaaggcaagccgcaaacacaagtctaagtcccgatcaaggtagtatactttttaaagtattttgtctgatttttaaaaaaaattgactgaatttattcaaagttgaaagtgtcctttctctctctctttaataaactcagtttggtacttgataaataatcatagtcttaaatgttagaaatcctatataatattatttatttaaaattgcagatttttaatttaaaatacatttttatttttaaattttgtcttt

SEQ ID NO: 291679 - DNA, 1000 bp, Homo Sapiens; identical to SEQ ID NO: 118326

SEQ ID NO: 291680 - DNA, 1000 bp, Homo Sapiens; identical to SEQ ID NO: 223700

SEQ ID NO: 291681 - DNA, 1000 bp, Homo Sapiens
atggaggactgtgaggagcggcgggtgcagctgaaggccctggtgaagcagctggagctggaggaggccgtgctcaagttccgccagaagcctagctccatcaggtgccccgggcttccggggctgcgggccacccaccccagtctcacaaaggccccgggctgcagccaggctgggagctgggagtatacccactgccaacaagcctgtgtgtcccacagaggggccaggggactccacttgcacacacctgagcttctgagtccctgattctggcacagcacccaactcaggactgggctcctgggtggcccaccatggctctcgggcctgtgcccctcactgctgtgtccctattgccttctgcagcttcaagtccgttgagaagaaaatgacagacatgctaaaagaggaagaagagaggctccagctggcgcacagcaacatgaccaagggccaggagctgctgctgaccatccagatgggcatcgacaacctctatgtccggctgatgggcattaccttgcctgcgacccaggtaccgggagtgaggctgagctgccacacaccaggtccctgggcagggccagaggggagatgagaccctcctcccggcctacagagagaagtggtgctctccaacaccctcgatttgaacagcaagctggcgtactgcgaggggaagctcacgtacctggctgacagagtgcagatggtgtccaggaccgaggagggcgacacaaaggtgagggacaccctggagtcctcgactctgatggagaagtacaacaccaggatcagctttgagaaccgggaggaggatatgatcgacaccttccagttccccgacatggaccacagctacgtcccttcgcgcgccgagatcaagaggcaggcgcagcggctaatcgaggggaagctcaaggcggccaaaaaaaagaagaagtagccccgccgccccgctccctgctttgctacacaaataaacattttttccagg

SEQ ID NO: 291682 - DNA, 1000 bp, Homo Sapiens; identical to SEQ ID NO: 118328

SEQ ID NO: 291683 - DNA, 1000 bp, Homo Sapiens; identical to SEQ ID NO: 118329

SEQ ID NO: 291684 - DNA, 869 bp, Homo Sapiens
ggacagagcggcccggtcgccggcatggtttctccgtcctgctgcagccggcgggaggcagccagtccaggcgcccgctagcttcggcggcgacccagacggggaaagcggaaggaatgtcgcgtgcaagcaggcagctggtgtggaagaatggcggtgagccattcagtgaaggagcggaccatctctgagaacagcctgatcatcctactgcagggcctccagggccgggtaaccactgtggacctgcgggatgagagcgtggcccacggacgcatagacaatgtcgatgctttcatgaacatccgcctggccaaagtcacctacacggaccgttgggggcatcaggtcaagctggatgacctctttgtgacaggccgcaatgtccgctacgtccacatcccagatgacgtgaacatcacctcgaccattgagcagcagctgcagattatccatcgggtgcgaaactttggtggcaagggccaaggccggtgggaatttcccccaaaaaactgtaagtgaggccctcagcaagccctggccccaactcggagtcctccagtgatctccagagctagttccctgccctcacaccctgtctggtacccgagaagaaagcagggccaggccagaagctggtgtccaacagacaccacctgtcaaagctgcctttcacagggttccacctcccagactcactctgggacccagaatcctatatgtggccttggggtaggtgacaatccccctttttgatgatctgaatctctgacttattgattatggaacctgtcaagtagttttcaactctcccagtgaggataattaaacatgctcagcctgagccaccaaaaaaaaaaaaaaaaaaa

SEQ ID NO: 291685 - DNA, 1000 bp, Homo Sapiens; identical to SEQ ID NO: 118330

SEQ ID NO: 291686 - DNA, 1000 bp, Homo Sapiens; identical to SEQ ID NO: 118331

SEQ ID NO: 291687 - DNA, 1000 bp, Homo Sapiens; identical to SEQ ID NO: 223703

SEQ ID NO: 291688 - DNA, 1000 bp, Homo Sapiens; identical to SEQ ID NO: 118332

SEQ ID NO: 291689 - DNA, 1000 bp, Homo Sapiens; identical to SEQ ID NO: 223705

SEQ ID NO: 291690 - DNA, 1000 bp, Homo Sapiens
gaggagaaggaatctgaagccagcaccccaactgctacagaggtggaggcccttgggggagagctgagggccctgtgtcaggggcacagcgggcccgaggaggaacaggtgaataagtttgttctaagtgtcctccgtttgctccttgtgaccatgggactcctctttgttttgctcctcctcctgatcatccttaccgagtctgaccttgacattgcctttttccgtgatatccgccagacccccgagttcgaacaattccactatcaatacttttgtcccctcaggcgatggtttgcctgcaaaatccgctcagtggtgagcctgctcattgacacctgagaaggcatgactcctcccaaaaactagccaggtggaccaaggaacccggctacccattcccagcaatgggacccatcgcggaaccatcggcacatataccaagtcctcctctcatgactcaaagtccactgcagcctaggagggtgtttcccagaagaagaaagggataggctcatgccctgtctaaacaaactgggaaaactcattttcttcagaagttatttcaagaaaggctcagcgactctgtttctcatctttccaatttgcaggataatttttggttttgaattttgatttttcatagatgtatattattttgaagtatcaaataaaaataatttattttactattactgattattgcagtagtatcacctagcagaggggacactagttgaaaactagagagctgctgtcctctgtattctgcaggagcttttcctgctggtgccactgggttccagtagactcatcactgcagcctcagcagggcaggccagggatctggacaatggggactgtttagttttttgtttgttttttttgccagccagaacttttaaaaaagtaaacatccatgtagaatgattaaatggaaagttgcttcttaaaaaaaaaaaaaaaaaaaaaaaaaaaaaaaaaaaaaaaaaaaaaaaaa

SEQ ID NO: 291691 - DNA, 1000 bp, Homo Sapiens
cagcctccagctattatcttaatctatgagagtgaaatcaaggggaaaattcgccagcgcattatgccagttcgaaacttttcaaagttttcagattgcaccagagctgctgaacaattaaagaataatccgcgacacaagagttacctagaacaagtatccctgaggcagctagagaagctattcagttttttacgaggttacttgtcggggcagagtctggcagaaacaatggaacaaattcaacgggaaacaaccattgatcctgaggaagacctgaacaaactagatgacaaggagcttgccaaaagaaagagcatcatggatgaactttttgagaaaaatcagaagaagaaggatgatccaaattttgtttatgacattgaggttgaatttccacaggacgatcaactgcagtcctgtggctgggacacagagtcagctgatgagttctgataccaaacactcaaaacatgcattgggctagcagaatatccatgtttattaccagactggttctggaagaagctgtaaagaatactaaatatgttgggttataggggattgaccatgttacttttcaaaaccaggacatttaaagcatctactatgtaggtgcatgaggagtatgggaaaaacagaataaaggaatctgcctttaaggagcttacaatcatgccgggtgcggtggctcacgcctgtaatcccagcactttgggaggctgaggcgggtggatcacctaaggtcaggagttcgagaccagcctagccaacatggtgaaacctcgcctctactaaaaatacaaaaattagccaggcgtggtggcgggtgcctgtaatcccggctactcaggaggctgaggcaggagattcgcttgaacctgggaggctgaagttgcagtgagccgagatcgcgccattgtactccagcctgggcgatgagcaaaactccatctcaaaaaaaaaaaaaaaaaaaaaaaaaaaaaaaaaaaaaaaaaaa

SEQ ID NO: 291692 - DNA, 1000 bp, Homo Sapiens
ttgggaaatgggctagtggagggctgttgactgcagtgacacctgggtgctccggaggtatctgttctgttgacctgtaaggaagcagtcgatcctagagtgtcagaacagagccattctctcctcctgagtaggaacgtttctgttcagtttccctcacagcagcctgtgttagcatgcagttgaaaatactgccgtctaggagaacctgtggtcactgggaacgtgccccacagtgactggccatgcaaccaggtgatttttaggaatagatgtctctagactctgtctcctttcctacaaggcctcacacagatgcttgaggctaatggcccccattctgaggtcatttttgtgtagaactcctttccccaggagagagccttatctctgccctcctttaccctgaaggcttcaaacggaagacaggacctagatctaaacctagatactagcattttgtgggattgtctagaatttggggaagatttgggttcctaagatgcacaagcgttttacaccagtggtgattaactcaactaaaacccactgtaggaagttagcttccccagacagctaatgccgagatcttctaccagcgtagagttgacagaagcaggccagcgaggaggtgtgggacataatagcctgagtgcttgggttaccatggagactggagtgtgtgaggccacagcctgtgctaaagagccatggagccctcccctggccatgtctggggacagatagaacctgttgggggaaatattccctcaccccagggttctttctgcagagcaagggttgcctttgtcctatccctgagcttgctcaacaagagaaacaaggtttcttaagtgttttggttaaagttttcattcttatttgactatgtatatgtaattgtaaagaaacgatcctatgcattgtctttcttttatattcttgtaatattctgaaattaaaattgttttgtttcatatccagaaaaaaaaaaaaaaaa

SEQ ID NO: 291693 - DNA, 1000 bp, Homo Sapiens
gcacggggccgacctgaacgcaaagtccctgatggacgagacgccccttgatgtgtgcggggacgaggaggtgcgggccaagctgctggagctgaagcacaagcacgacgccctcctgcgcgcccagagccgccagcgctccttgctgcgccgccgcacctccagcgccggcagccgcgggaaggtggtgaggcgggtgagcctaacccagcgcaccgacctgtaccgcaagcagcacgcccaggaggccatcgtgtggcaacagccgccgcccaccagcccggagccgcccgaggacaacgatgaccgccagacaggcgcagagctcaggccgccgcccccggaggaggacaaccccgaagtggtcaggccgcacaatggccgagtagggggctccccagtgcggcatctatactccaagcgactagaccggagtgtctcctaccagctgagccccctggacagcaccaccccccacaccctggtccacgacaaggcccaccacaccctggctgacctgaagcgccagcgagctgctgccaagctgcagcgacccccacctgaggggcccgagagccctgagacagctgagcctggcctgcctggtgacacggtgaccccccagcctgactgtggcttcagggcaggcggggacccacccctgctcaagctcacagccccggcggtggaggctcccgtggagaggaggccgtgctgcctgctcatgtgaggctgttgctcagcatgcaggggccctgtcgcgggcacagcccaaggctgcctccccacggtgcgtgccctggtgctgcgggtgcagcacggaaaccccggcttctactgtacaggacactggcccctctcaggtcagaagacatgcctggagggatgtctggctgcaaagactatttttatcctgcaactcttgataaagggctgttttgccatggaaaaaaaaaaaaaaaaaaaaaaaaaaaaaaaaaaaaaaaaaaaaaaaaaaaaa

SEQ ID NO: 291694 - DNA, 1000 bp, Homo Sapiens; identical to SEQ ID NO: 118335

SEQ ID NO: 291695 - DNA, 1000 bp, Homo Sapiens; identical to SEQ ID NO: 118336

SEQ ID NO: 291696 - DNA, 838 bp, Homo Sapiens
aggggcggggcgatagggatccagagtcttggggatccagagtcttggggctccatgtgagtttgctgtaccggttgtcccggtcacggcatggggcgagcggacactccacgacaccccccgcccccggctgcagggtttggggtccaccggggcgcatttctgatcccagtggctcttcgggtgctcttggccggaagaactcccagacctttcactcctggcctggccgatccacgaagactcgggccccggcgcgtccaagcagcacaatgagtagttcttgacccgaggtcgccctgaaggtgtcgcatgaagagcttgcttcacacacaacaggattcgatactttgccaattcaaggccctggtggctggccgggaaggtggattcgccttggctaggtgccaggcaggtccgcctgtgcgggtgcccctgacttcgacccctagcttatgtcacagcccgaaccagatcgactggtctggtagcagcctgtcactccagactgtcctccaccccagacttccgcaaactgatgggctctttgcgccgtgcagggtgggaggagaagaccaaacgaagtaacgtctgtaaaaccccttcctggacagcgtaaggcctccacatctaagttcctgtcattaaaatggagacagcaaagccgaccctatccagtccttgggactgttatgaacagaaaatgatgcaatgtatgaaaaactgctttgaggagaaaaacaacacagtgtgtttttggaagatgtgattgatttgtaaaccgcattaaatgctctgaaataaaatgaaagtaaaaataaaaaaaaaaaaaaaaaaa

SEQ ID NO: 291697 - DNA, 1000 bp, Homo Sapiens; identical to SEQ ID NO: 223708

SEQ ID NO: 291698 - DNA, 1000 bp, Homo Sapiens
ccctcccctgttggagaaggttcttgtgggctctgggcccatcccacatcccacagtgggcaggaggccaccaagaggtgcaagaccatgccctctgtttcgataggaagctgggcctcagaggggcctggggcctgtgtctgagacccggccaagtgctggacgtctccccttcctcatggctgttatggctgaattacgtccccccaaattctcatgttgcagccttaaccccagcacctcagtgtgggactgggtttggagatggagcccctacagaggtcagcaggttaaaagaggccatcagggctctgggtgggccctgatccaagctgcttggtgtccttgtaagaagaagagatgaggacacagacacacacagagggacagccccatgaggaaacagggaggcaatgccgtctgcaagcccagggcagaggcctcaggaaccagccctggtgacacctggaccttggacccccgtgcccaggacagtaggagaattggagccgcctggctgcagtccttcccgatggcaccctgtattagtccgttctcacactgctaattgttgggaaaagggcttgtggaatgcctgtataaactggccatgaaaatatgggacaataagttgtggaaagccacaagaggcctctgaggaggaaagcctcctaattgccatcatgttcgcatgctcagggcgagacctgctgtcttatctgtaaacactgtgttcaaggagaaagacattccttcgaagcactggactgtggacagacacacgagctcctggttaagcccgctcccaccagctcctgtccgataagttaaagatacgctgtttgagcacaaaggagattcattgaaaccgctattgctgtagattacgcctgtgacgcactgcctccctttcactgtttcgccctgaatatctgcttctcagatctaagtgactgtactcaataaatagcgtggagaccagaaaaaaaaaaaaaaaaaa

SEQ ID NO: 291699 - DNA, 1000 bp, Homo Sapiens; identical to SEQ ID NO: 118338

SEQ ID NO: 291700 - DNA, 1000 bp, Homo Sapiens; identical to SEQ ID NO: 118340

SEQ ID NO: 291701 - DNA, 1000 bp, Homo Sapiens; identical to SEQ ID NO: 118341

SEQ ID NO: 291702 - DNA, 1000 bp, Homo Sapiens
gaattcatgcaggtgcttaccatgccaatttggagccagaagataagaccacagttcatagaaaatggtcagccaatgaaattcaggtagtagtggcaactgttgcatttggtatgggaattgataagccagatgtgaggtttgttatccatcattcaatgagtaaatccatggaaaattattaccaagagagtggacgtgcaggtcgagatgacatgaaagcagactgtattttgtactacggctttggagatatattcagaataagttcaatggtggtgatggaaaatgtgggacagcagaagctttatgagatggtatcatactgtcaaaacataagcaaatgtcgtcgtgtgttgatggctcaacattttgatgaagtatggaactcagaagcatgtaacaaaatgtgcgataactgctgtaaagacagtgcatttgaaagaaagaacataacagagtactgcagagatctaatcaagatcctgaagcaggcagaggaactgaatgaaaaactcactccattgaaactgattgattcttggatgggaaagggtgcagcaaaactgagagtagcaggtgttgtggctcccacacttcctcgtgaagatctggagaagattattgcacactttctaatacagcagtatcttaaagaagactacagttttacagcttatgctaccatttcgtatttgaaaataggacctaaagctaaccttctgaacaatgaggcacatgctattactatgcaagtgacaaagtccacgcagaactctttcagggctgaatcgtctcaaacttgtcattctgaacaaggtgataaaaagatggaggaaaaaaattcaggcaacttccagaagaaggctgcaaacatgcttcagcagtctggttctaagaatacaggagctaagaaaagaaaaatcgatgatgcctgatatgaatgttactaaattttctaattaaagatggtttatgcaaaaaaaaaaaaaaaaaaaaa

SEQ ID NO: 291703 - DNA, 1000 bp, Homo Sapiens; identical to SEQ ID NO: 223709

SEQ ID NO: 291704 - DNA, 1000 bp, Homo Sapiens; identical to SEQ ID NO: 223710

SEQ ID NO: 291705 - DNA, 1000 bp, Homo Sapiens
gacatccctgctcctgccaacttctcccagaggggctactatctcacactgagggccaaccgggtgctgtaccagaccagaggccagctccatgtcctccgcgtcggcaatgatacccactgccaaccaacaaaaattggctgcaaccatcccctaccaggacccggcccctacagggtgaagttcctggtgatgaatgacgaaggacccgtggctgaaaccaagtggtccagcgacactcgcctgcagcaagcccaggcacttcgggctgtccccggcccccagagcccgggcaccgtggtcatcatcgccatcctgtctatcctcctggccgtcctcctcacggtcctcctggctgtgctcatatacacctgcttcaacagctgcaggagcacttccctatcaggcccagaggaggcagggagtgtgagaagatacaccacgcacctcgcgttcagcactcctgccgagggggcttcctgaggggttccagaggggcccacgtgtccctccacctcctccctggcccaggctgcagagcctgagctgggacacgccctgaagcttctggaccctgagagagattgtttcttttctttactatttttttttttttttttgagacggagtctcactctgtcgccaggctggcgcgatcttggctcactgcaacctctgcctcacgggttcaagcgattttcctgcttcagcctcctgagtagctgggactacaggcacacgccaccatgcccagctcatttttgtatttttagtagagatggggtttcaccatgttggccaggatggcctccatctcttgaccttgtgatccgcccgactcggcctcccaaaatgctgggattacaggcgtgagccatcaagtctggcgagagagattgtttctagatgagggtgggggcgggtgtccttagcccaaagcttgtgccagtctctatcagaaataaatgcccccaaaacctcaaaaaaaaaaaaaaaaaaa

SEQ ID NO: 291706 - DNA, 1000 bp, Homo Sapiens; identical to SEQ ID NO: 223711

SEQ ID NO: 291707 - DNA, 1000 bp, Homo Sapiens
tgtgtgcacacgtgtgtatgagtgcgcagatctgtgcctgggatcgtgcatttgaggggccaggggcaggcagggctgcagagggagacggccctgctggggcttaggaaccttctcccttcttgggtctgccctgcccatactgagcctgccaaagtgcctgggaagcccacccagattctgaaacaggccctctgtggcctgtctctattagctgggttccgggaggcagagaggagtgaccgggcactggcactgcgatcaggaagactggacccccagcccccagggcccccctccccccacttagtgctggtcctaggtcctctgaggcactcatctactgaatgacctctctacttccccttcttgccattattaacccatttttgtttattttccttaaatttttagccatttctccatgggccaccgcccagctcatgtaggtgagcctgggcagcttctgttggcagagcttttgcatttcctgtgtttgtcctgggttctggggcatcagccagctaccccttgtgggcaaaggcagggccacttttgaagtcttccctcagatttccattgtgtggcctggtgggtcagggggagtctttgcaccaaagatgtcctgactttgcccccttgcccatcagccatttgccatcaccccaaacaactcagcttcggggccggtgaggggaggggcctcccccagcacagatgaggagcagctggggtaggctgtctgtgccatggccccccactcccccttcccttggagggagaggtggcaggaatacttcacctttcctctccctcaggggcaggtggtggaggggcgcccagggtcgtctttgtgtatgggggaaggcgctgggtgcctgcagcgcctcccttgtctcagatggtgtgtccagcactcgattgttgtaaactgttgttttgtatgagcgaaattgtctttactaaacagatttaatagttaaaaaaaaaaaaaaaaaaa

SEQ ID NO: 291708 - DNA, 1000 bp, Homo Sapiens; identical to SEQ ID NO: 118344

SEQ ID NO: 291709 - DNA, 1000 bp, Homo Sapiens
ttcaaaattaggctaagatcattaattttgtaatctagatttcccattataaaagcaagcaaaaatcatcttaaaaatgatgtcctagtgaaccttgtgctttctttagctgtaatctggcaatggaaatttaaaatttatggaagagacagtgcagcacaataacagagtactctcatgctgtttctctgtttgctctgaatcaacagccatgatgtaatataaggctgtcttggtgtatacacttatggttaatatatcagtcatgaaacatgcaattacttgccctgtctgattgttgaataattaaaacattatctccaggagtttggaagtgagctgaactagccaaactactctctgaaaggtatccagggcaagagacatttttaagaccccaaacaaacaaaaaacaaaaccaaaacactctggttcagtgttttgaaaatattcactaacataatattgctgagaaaatcatttttattacccaccactctgcttaaaagttgagtgggccgggcgcggtggctcacgcctgtaatcccagcactttgggaggccgaggcgggtggatcacgaggtcaggagattgagaccatcctggctaacacggtgaaaccccatctccactaaaaatacaaaaaattagcctggcgtggtggcgggcgcctgtagtcccagctactcgggaggctgaggcaggagaatagcgtgaacccgggaggcggagcttgcagtgagccgagatggcgccactgcactccagcctgggtgacagagcaagactctgtctcaaaaagaaaaaaatgttcaatgatagaaaataattttactaggtttttatgttgattgtactcatgctgttccactccttttaattattaaaaagttatttttggctgggtgtggtggctcacacctgtaatcccagcactttgggaggccgaggtgggtggatcacctgaggtcaggagttcaagaccagtctggccaacat

SEQ ID NO: 291710 - DNA, 1000 bp, Homo Sapiens
ttcccaaactaatatttatcacacatggtcattaaatgggaaaaaaatagactaaacaaatcacaaattgttcagttcttaaaatgtaattatgtcacacacacaaaaaatccttttcaatcctgagaaaattaaaggcgttttactcacatggctatttcaacattagttttttttgtttgtttctttttcatggtattactgaaggtgtgtatactccctaatacacatttatgaaaatctacttgtttaggcttttatttatactcttctgatttatattttttattataattattatttcttatctttcttcttttatattttttggaaaccaaatttatagttagtttaggtaaactttttattatgaccattagaaactattttgaatgcttccaactggctcaattggccgggaaaacatgggagcaagagaagctgaaatatatttctgcaagaacctttctatattatgtgccaattaccacaccagatcaattttatgcagaggccttaaaatattctttcacagtagctttcttacactaaccgtcatgtgcttttagtaaatatgatttttaaaagcagttcaagttgacaacagcagaaacagtaacaaaaaaatctgctcagaaaaatgtatgtgcacaaataaaaaaaattaatggcaattgtttagtgattgtaagtgatactttttaaagagtaaactgtgtgaaatttatactatccctgcttaaaatattaagatttttatgaaatatgtatttatgtttgtattgtgggaagattcctcctctgtgatatcatacagcatctgaaagtgaacagtatcccaaagcagttccaaccatgctttggaagtaagaaggttgactattgtatggccaaggatggcagtatgtaatccagaagcaaacttgtattaattgttctatttcaggttctgtattgcatgttttcttattaatatatattaataaaagttatgagaaat

SEQ ID NO: 291711 - DNA, 1000 bp, Homo Sapiens
ttcaaaattaggctaagatcattaattttgtaatctagatttcccattataaaagcaagcaaaaatcatcttaaaaatgatgtcctagtgaaccttgtgctttctttagctgtaatctggcaatggaaatttaaaatttatggaagagacagtgcagcgcaataacagagtactctcatgctgtttctctgtttgctctgaatcaacagccatgatgtaatataaggctgtcttggtgtatacacttatggttaatatatcagtcatgaaacatgcaattacttgccctgtctgattgttgaataattaaaacattatctccaggagtttggaagtgagctgaactagccaaactactctctgaaaggtatccagggcaagagacatttttaagaccccaaacaaacaaaaaacaaaaccaaaacactctggttcagtgttttgaaaatattgactaacataatattgctgagaaaatcatttttattacccaccactctgcttaaaagttgagtgggccgggcgcggtggctcacgcctgtaattccagcactttgggaggccgaggcgggtggatcacgaggtcaggatattgagaccatcctggctaacatggtgaaaccccatctccactaaaaatacaaaaaattagctgggcgtggtggcgggcgcctgtagtcccagctactcgggaggctgaggcaggagaatggcgtgaacccgggaggcggagcttgcagtgagccgagatggcgccactgcactccagcctgggtgacagagcaagactctgtctcaaaaagaaaaaaatgttcagtgatagaaaataattttactaggtttttatgttgattgtactcatgctgttccactccttttaattattaaaaagttatttttggctgggtgtggtggctcatacctgtaatcccagcactttgggaggccgaggcgggtggatcacctgaggtcaggagttcaagaccagtctggccaacat

SEQ ID NO: 291712 - DNA, 1000 bp, Homo Sapiens
atcacacatggtcattaaatgggaaaaaaatagactaaacaaatcacaaattgttcagttcttaaaatgtaattatgtcacacacacaaaaaaatccttttcaatcctgagaaaattaaaggtgttttactcacatggatatttcaacattagttttttttgtttgtttctttttcatggtattactgaaggtgtgtatactccctaatacacatttatgaaaatctacttgtttagacttttatttatactcttctgatttatattttttattataattattatttcttatcttcttttatattttttggaaaccaaatttatagttagtttaggtaaactttttattatgaccattagaaactattttgaatgtttccaactggctcaattggctgggaaaacatgggaacaagagaagctgaaatatatttctgcaagaacctttctatattatgtgccaattaccacaccagatcaattttatgcagaggccttaaaatattctttcacagtagctttcttacactaaccgtcatgtgcttttagtaaatatgatttttaaaagcagttcaagttgacaacagcagaaacagtaacaaaaaaatctgctcagaaaaatgtatgtgcacaaataaaaaaaattaatggcaattgtttagtgactgtaagtgatactttttaaagagtaaactgtgtgaaatttatactatccctgcttaaaatattaagatttttatgaaatatgtatttatgtttgtattgtgggaagattcctcctctgtgatatcatacagcatctgaaagtgaacagtatcccaaagcagttccaagcatgctttggaagtaagaaggttgactattgtatggccaaggatggcagtatgtaatccagaagcaaacttgtattaattgttctatttcaggttctgtattgcatgttttcttattaatatatattaataaaagttatgagaaataaaaaaaaaaaaaaaaaaaa

SEQ ID NO: 291713 - DNA, 1000 bp, Homo Sapiens; identical to SEQ ID NO: 223713

SEQ ID NO: 291714 - DNA, 1000 bp, Homo Sapiens; identical to SEQ ID NO: 223714

SEQ ID NO: 291715 - DNA, 1000 bp, Homo Sapiens
gtctcgaactcctggcctcaagccatcttcccgcctcagcctctcaaatagctgggcttacaggcatgagccaccacacctggccaggatttggttgtttaaatataaatctgatcacccccctgcttagaacccttctgctttctattacccctcatttaaaatgtaaactcttcaccttggtttatgagaactggttcttgccttccccttgaacctcattaaatggtgatttcttgctaagctccagcccgagtggtctcctctcagcttctaattttgtgctctttcctgcccttttcctgggccttctcagctctccacccccaccactcttgactcaggtggtgtccttcttcctcaagtcttgacaattcccgggcccttcagtccctgagcagtctacttctgtgtctgtcaccacatcttgtcttttcccctcattgcatttattgcagtttatatatatgctacttttacttgttcatttctgtctcccctaccaggctgtaaatgagggcagaaaccttgtttgttttattcaccatcatgtaccaagtgcttggcacatagtgggccttcattaaatgtttgttgaataaaagagggaagaaggcaagccaaccttagctacaatcctaccttttgataaaatgttccttttgacaatatacacggattattatttgtactttgtttttccatgtgttttgcttttatccactggcatttttagctccttgaagacatatcatgtgtgagataacttccttcacatctcccatggtccctagcaaaatgctaggcctgtagtagtcaaggtgctcaataaatatttgtttgggtggtttgtgagccttgctgccaagtcctgcctttgggtcgacatagtatggaagtatttgagagagagaacctttccactcccactgccaggattttgtattgccatcgggtgccaaataaatgctcatatttattaaaaaaaaaaaaaaaaaaa

SEQ ID NO: 291716 - DNA, 1000 bp, Homo Sapiens; identical to SEQ ID NO: 118347

SEQ ID NO: 291717 - DNA, 1000 bp, Homo Sapiens
agcagagtgactgtgggtctggaatggctggtgtacttgggaatgtactatcaggattttacagcaatgctgggaaatgacagggaaaatgacaggaatgaatctcaccagattttttatgtactcagcagagccttgagttacggtgtttattttccaatcaagtgaagatatctcctacttctcctactggaacatctcagcttctgcagtgaagaaaaattcctgtgatagttcagttctttagtttttctatttgaaaaaaaaaaatcatttaaatgatcctttgttcacggctctccttaatgactgagtgaacagttcctatctgtatatttgactaaaccttttcctaagctatctctcatggttcctatgtttttttatcataattaaaagcaaaaccatctggatcacctaacagtcagaggtcagtatctcagcgtgtgaattatagaggaaatacagagagaacctcttccacttttacttttcgtccaaataaaatgcatggtgtaccagaagttgaagatcgggttgaggattggggctagctcgatgacactaaggccccaacatcgcgggacctgctgtggcgcggattcttaggaacgctgttctagccggccccctctccaggggtcgcgtggccggcattatttcctagttcttcttgtaaccctgaggtgccagcgcggggagtgaggaggggtcagggggctaaggatgcaacctctgacgttctgcgccttcctaggagagtcttacatgtgttgagatttcacaagcaatgcgagttgtaaaataccagctctacaagaagctaggctctgtgacggcatagttttcagtagctttatcacaatattcacaatggagaattatatgacatggtagcagaaataggcccttttatgtgttgcttctattttacctcaaattgtagatatagggtaatcaataaaatccatccatgcctttcacacactaaaaagtcgga

SEQ ID NO: 291718 - DNA, 1000 bp, Homo Sapiens
cagtaaaatattttctttatctaaatattaacattctaagtctaccaaaaaaagttttaaactcaagcaggccaaaaccaatatgcttataagaaataatgaaaagttcatccatttctgataaagttctctatggcaaagtctttcaaatacgagataactgcaaaatattttccttttatactacagaaatgagaatctcatcaataaattagttcaagcataagatgaaaacagaatattctgtggtgccagtgcacactaccttcccacccatacacatccatgttcactgtaacaaactgaatattcacaataaagcttctgagtaacactttctgattactcatgataaactgacatggctaactgcaagaattaaatcttctatctgagagtaataatttatgatgactcagtggtgccagagtaaagtttctaaaataacattcctctcacttgtaccccactaaaagtattagtctacacattacattgaagttaaacacaaaattatcagtgttttagaaacatgagtccggactgtgtaagtaaaagtacaaacattatttccaccataaagtatgtattgaaatcaagttgtctctgtgtacagaatacatacttattcccatttttaagcatttgcttctgttttccctacctagaatgtcagatgtttttcagttatctccccatttgtcaaagttgacctcaagataacatttttcattaaagcatctgagatctaagaacacaattattattctaacaatgattattagctcattcacttattttgataactaatgatcacagctattatactactttctcgttattttgtgtgcatgcctcatttccctgacttaaacctcactgagagcgcaaaatgcagctttatactttttactttcaattgcctagcacaatagtgagtacatttgaattgaatatataataaatattgcaaaataaaatccaaaaaaaaaaaaaaaaa

SEQ ID NO: 291719 - DNA, 1000 bp, Homo Sapiens
cttggtagttgccggtggacagcatggccgtgccagcctcccacactgaggccaggtctaccccccatcataccagcccccaggaccactaccccacggccagccaggggtccagagctagcccaggctggggatctcgactcagacaagatggtgacaatgccttgagtctgaggcatcctctgcctgctttcctgcctgccccacctgcctcatattgtgtgggcctttttttgtttgtttcattcattgtttttttttttttaattattttaaatgagatttttgttttttttaaatgcaatatctctgtatacagactggctgggccccaccccctgcgtgtggccctcccacagtattttgtgcaatgaagccctgctcccagcctttcagagacagggacacagcccctatttggaaccctgatcatcaccagaccctgggattggctatgggaaagcatgccacagccactcgccttcctacccccgcccgccatccccagttgcagggggatctggggactaccagagactctgggaaatggacaaggtggggggccccactctttctctcctgcagtcccgtagctggggcctccttccttctcagggtctccccagcccagtccccttgctcccatcccactcggtgctgttgggtaggggccctgccaggaactgaccagctcagcgaggagccataatgtgcatatgtgcacaagcagggttgggggaggggggtgtgaggggttgtgcccaggtgttgccccctatctcctggggagggtgaggcagggcagggacagtctccagggtcagtccctggatgggtggttacctccccttcctccaccctaagccctggggccctgaaatggggtgggagggcaggggtgggagccctcctagtgggtttggggggttgggttcctgaatgcaccataatcgctgtatgaaatattaaaaagtctaaagtgaaaaaaaaaaaaaaaaaa

SEQ ID NO: 291720 - DNA, 1000 bp, Homo Sapiens; identical to SEQ ID NO: 223717

SEQ ID NO: 291721 - DNA, 1000 bp, Homo Sapiens; identical to SEQ ID NO: 118349

SEQ ID NO: 291722 - DNA, 1000 bp, Homo Sapiens; identical to SEQ ID NO: 118350

SEQ ID NO: 291723 - DNA, 1000 bp, Homo Sapiens
taagatagttcgtcacactgtgtatctcctggtaacgcctcgtgttgttgaggaagcacgaaaacattttgattgtccagttctagagggaatggaacttgaaaatcaaggtggtgtgggcactgagctcaaccattgggaaaaaaggttattagagaatgaagcgatgactggttctcacactcagaatcgagtactctctcgaatcactctggcattaatggaggacactgggagacagatgctgagcccttactgtgacacgctcagaagtaacccactgcagctaacttgcagacaggaccagagagcagttgccgtgtgtaatttgcagaagttccctaagcctttaccacaggaatatcagtactttgatgaactcagtggaatacctgcagaagatttgccttattatggtggctccgtggaaattgctgactactgccctttcagtcaggaattcagttggcatttaagtggtgaatatcagcgcagctcagattgtagaatattggaaaatcaaccagaaatttttaagaactatggcgctgaaaagtatggacctcattccgtttgtctaattcagaaatcagcattcgttatggagaagtgtgagaagaagctgagttacccagactggggaagcggatgctatcaggtttcttgttctcctcaaggtctgaaagtttgggtccaagatacttcatatttgtgtagtcgggctgggcaggtcctccctgtcagtatccagatgaatggctggattcacgatggaaacctgctctgcccatcatgttgggacttctgtgagctctgtcctccagaaacagatcctccagccactaacctgacccgagctctgccacttgatctttgttcctgttcctcgagcctggtggtcaccctctggcttctgctaggcaatctgtttcctctgctggctggatttcttctgtgtatatggcactaggaatggaaaagtggatcttcaagatattct

SEQ ID NO: 291724 - DNA, 1000 bp, Homo Sapiens
aatcttcagttacatgaaagagagagaggaacagtttatacttacagattacatgaacaggcagattgaaatcaccagtgacatgagggccattcttgtggactggttggtggaggtgcaggtgtcctttgagatgacccatgagaccctgtacttggcagtgaagctggtggatctctacctaatgaaggcagtatgcaagaaggataagttacaactccttggtgccactgcctttatgattgcagcaaaatttgaggagcacaactcacctcgtgtggatgactttgtgtacatctgtgatgataattatcagcgatctgaggtactcagcatggaaatcaacatcctgaacgtcctcaaatgtgacattaacattcccatcgcctaccattttctgcgcagatatgctaggtgtatccacaccaacatgaagacactgaccttgtcccgctacatctgcgagatgaccctgcaggaataccactatgtccaggagaaggcttccaagctagctgctgcctccttactcctggccctctacatgaagaagctcggatactgggttcccttcctggagcattacagtggctacagtatctctgagcttcaccccttggtcagacagctgaacaaactgctgactttcagttcttacgatagtctcaaggctgtgtattacaagtattctcacccggtcttctttgaagtcgccaaaatccctgccttggatatgttgaagctggaggagattttgaactgtgattgtgaggctcagggcctggtactctagcagcagccacagggctaagcatgcatgttaacagggtatatttattctatgttcgaatttgtcttttgatcgcttttattcatttttcctttctttgtcttttcccaaactgataatgttataaatatttatgttgcttgtttttatgaaagaaaaaatattgtcatatttgactacaaatttaataaaaaattaatggttattgtt

SEQ ID NO: 291725 - DNA, 1000 bp, Homo Sapiens
agagcccctgccccatggccctggatgtcacactcccaccagggctgaagacaaggatgttccaaaaccccacctccctttattgactccacattcccctccagtgttccctccttgagagctgagctgcccctaggacccctcctttgcctcatgagtcaccttccactcacctgtgtgcagaccctcagctaggcccagatggtggggacagacggcagagaaagagcatgcattgctcttaaccgcagaatggcaataacccccaaaaggtcaaatgggcacaccacagttctgctctgtggatcatcccatggaagtttcctcacaaagtcagctcctctcccaccacaggctcacactgcccttactttaggctctcatgcccctaagaaaagtgaatttcctttaacaccgcctgaaacatgcacactgcaaatatcaaaaggagacacccccaaatcccactctaaattccaaagccaagtgccacgatttcaggatcagtcaggacctgccaatgtcctctcagcacagagaatcaagaggtggcctttgggcagtagatttactttctcaggtatgttgaacccaaactgtgagaataaatctttctcctgagctcacattggcaggtgatgtcaggccaatgcctagaacaaagggcaaagggatatggaatgtttactggacagttggaaaaccaaaaacagataccattttctcaatggaatcagttccccctccacccatccccttctgtacatagccgccccttcctgttccccaaccctttagctccttttgctttgagtctgatatgacagtgatgtggggctgccccagctgacttggaggccctggctcaggagctcatagatggaggaggtgtgggctgactacctcccagaagcccctcatgccaagcctgtcccactggggctccagggcctctgccctgaacatctgggcttctgttcaaaataaacctactctgttc

SEQ ID NO: 291726 - DNA, 1000 bp, Homo Sapiens; identical to SEQ ID NO: 118351

SEQ ID NO: 291727 - DNA, 1000 bp, Homo Sapiens
cctaattcccctgggagacatacgcatcaactgtggaggtccgaggggatgagaagggatacccaccatctttcaagggtcacaagctcactctctgacaagtcagaatagggacactgcttctatccctccaatggagagattctggcaacctttgaacagcccagagcttgcaacctagcctcacccaagaagactggaaagagacatatctctcagctttttcaggaggcgtgcctgggaatccaggaactttttgatgctaattagaaggcctggactaaaaatgtccactatggggtgcactctacagtttttgaaatgctaggaggcagaaggggcagagagtaaaaaacatgacctggtagaaggaagagaggcaaaggaaactgggtggggaggatcaattagagaggaggcacctgggatccaccttcttccttaggtcccctcctccatcagcaaaggagcacttctctaatcatgccctcccgaagactggctgggagaaggtttaaaaacaaaaaatccaggagtaagagccttaggtcagtttgaaattggagacaaactgtctggcaaagggtgcgagagggagcttgtgctcaggagtccagccgtccagcctcggggtgtaggtttctgaggtgtgccattggggcctcagccttctctggtgacagaggctcagctgtggccaccaacacacaaccacacacacacaaccacacacacaaatgggggcaaccacatccagtacaagcttttacaaatgttattagtgtccttttttatttctaatgccttgtcctcttaaaagttattttatttgttattattatttgttcttgactgttaattgtgaatggtaatgcaataaagtgcctttgttagatggtgaaaaaaaaaaaaaaaaaaaaaaaaaaaaaaaaaaaaaaaaaaaaaaaaaaaaaaaaaaaaaaaaaaaaaaaaaaaaaaaaaaaaaaaaaaaaaaaaaaaa

SEQ ID NO: 291728 - DNA, 1000 bp, Homo Sapiens
tccaattagcatcgtggcctataaacaagtcccattgtcaccatatggagacatcatagagaaatgaagatgcttacctgcaggaactgaaaacatcagccatggccaggcccccagaagacaaaagaagggaccagggaactggtgacctaagcaacccactgcttaagaaacctgcgttccagccagagttggcctcagaatgacctgctctggctcagggatccctggtggatggggaaaagcactttcctggtgatggaaaaacgttctcagctttaagacacccccattaggcagacactgggttctgtgacagcagagcatgaccttaagggttacaggcaggctgcacacagcagtcccaggccctgtgaggggcttcagactccagctacagcgagcctgccccttttcttcaagggactgtcttgagggctccaaagtatagctaactagtcacctgggtgctgtgctgaaagtcccatgggagaactcaaagcgtgcattatcacagcctgaggggaatgtggaagggatgttttgtaagaactaccaacagttttgcacgaacaatgtcttttaaattaaaataaaaccttgaaaaaagtcagctttctttcctgagtcttccttacctacaaacactcaggagggggatggagctcaggcccttgtcttctgggtagttttgttactactgttgcttttaagaagcaaatgtcacaaggctttcttcaatgggatgttcaattgagtacttccagtcaacagtgcttcccaaagtgggtggtgtgaaggaagaggaggtacattaagagctattttatttgaggtagtcatttttataaccttgtttacttggatttataaaagcagactcacctaataaaatcaacattcattgtaaaaaaaaaaaaaaaaaaaaaaaaaaaaaaaaaaaaaaaaaaaaaaaaaaaaaaaaaaaaaaaaaaaaaaaaaaaaaaaaaaaaaaaaaaaa

SEQ ID NO: 291729 - DNA, 1000 bp, Homo Sapiens
agttcctccaaagaatcaaagtcctatggttccagcaaaagttaaggatcaaggctctgtggtaccagagtctctaaaggatcaaggtcctaggattcctgagcctgtgaagaatcaagctcctatggtcccagcacctgtcaaggatgaaggtcccatggtctcagcatctgtcaaggatcaaggtcccatggtctcagcacctgtcaaggatcaaggtcccatagtcccagcacctgtcaagggtgaaggtcccatagtcccagcacctgtcaaggatgaaggtcccatggtctcagcacctatcaaggatcaagatcccatggtcccagagcatccgaaggatgaaagtgccatggccacagcacccataaagaatcaaggttccatggtctctgagcctgtaaagaatcaaggtttagtggtctcagggccagtcaaggatcaagatgttgtagtcccagagcatgcaaaggttcacgattctgcagttgtggcacctgtaaagaatcaaggtcctgtggtccccgagtccgtgaagaatcaagaccccattctcccagtactagttaaggatcaaggccccacagtcctacagcctccaaagaatcaaggtcgtatagtccctgaacctctgaagaatcaagttcctatagtcccagtgcctctgaaggatcaagatcctctggtgccagtaccagcaaaggaccaaggtcctgcagtccctgaacctctgaagactcaaggtcccagggaccctcagctacctactgtctcacctctaccccgagtcatgatcccaactgccccccatacggaatacattgagagctccccttgacactcaccccttgacacaccaatgaaggagctgacagtgagagtgctcccctcccaggggcagtgaagacacatatttaatctgcatgaaacatgtacagtagtcttgctggaatctaataaaaatggtccctctggctcaaaaaaaaaaaaaaaaaaa

SEQ ID NO: 291730 - DNA, 1000 bp, Homo Sapiens; identical to SEQ ID NO: 223720

SEQ ID NO: 291731 - DNA, 1000 bp, Homo Sapiens
ggtgccccttacgaggaggtggtgaggtaccagcgacgcccttcagacaagtaccgcctcatagtgctcatgggaccctctggtgttggagtaaatgagctcagaagacaacttattgaatttaatcccagccattttcaaagtgctgtgccacacactactcgtactaaaaagagttacgaaatgaatgggcgtgagtatcactatgtgtccaaggaaacatttgaaaacctcatatatagtcacaggatgctggagtatggtgagtacaaaggccacctgtatggcactagtgtggatgctgttcaaacagtccttgtcgaaggaaagatctgtgtcatggacctagagcctcaggatattcaaggggttcgaacccatgaactgaagccctatgtcatatttataaagccatcgaatatgaggtgtatgaaacaatctcggaaaaatgccaaggttattactgactactatgtggacatgaagttcaaggatgaagacctacaagagatggaaaatttagcccaaagaatggaaactcagtttggccaattttttgatcatgtgattgtgaatgacagcttgcacgatgcatgtgcccagttgttgtctgccatacagaaggctcaggaggagcctcagtgggtaccagcaacatggatttcctcagatactgagtctcaatgagacttcttgtttaatgctggagttttaacactgtacccttgatacagcgatccatagttgcaatctaaaacaacagtatttgacccattttaatgtgtacaactttaaaagtgcagcaatttattaattaatcttatttgaaaaaaatttttattgtatggttatgtggttacctattttaacttaattttttttcctttacctcatatgcagctgtggtagaaatatgaataatgttaagtcactgagtatgagaacctttcgcagatttcacatgatctttttaagatttaaataaagagctttcctaaat

SEQ ID NO: 291732 - DNA, 1000 bp, Homo Sapiens
ccgccaggctacctctctgcgctccacttcctccccccgccaccgccaccaccacctccatcatctttctcactgaccgtcctgtttgatactgacaaggagaacactgatgaccaggatgcagaggtactgtcgggtgagcccagccagccatcgtctcaggagcagtccgactaggccccaggcccgccctcctggccagcagagtggggcactggggggcaacagcaacagttttcctgtcttcattcagtgatatgtagggaggaaggaggttgatagcatagatggcaactgattcccagtttaagataggaggaaggagagcaatttctaagtttcaatcctgcgctgtacagttgaagaagagtgtggaggaagctattaccaggggagggccagggctctgaggagtgggcgctgggagaagctcccatttaggaatgaatttaactgtccttgggttacactaccatttattggaacaagccccagaggcagtatttgatttcctcaggccccactctaggacaggaggcaccatctatttcagccttctgctgcctttgcctggtcctccaggttgctgggggcaccacagacatcaagattccagttcatccaggtggctggagccagcagccaggaccagggtcgttgacagcaggttctgcagcatcctgccttgctgctctgtcccccacatcttcctggccacagccccttgcccctcctctaaggggttttactagcaagcatcctggctgctggggctacttcattccccctccataaagtttcagccattatgggcactggttttaaaaaatttattagtttgactatttgatggttttatagtgattgccaactttaaaaagtaggctgttcataagcactgatgcagtccctagggaatagaatggtgcttctgatcacctgtgacatgaacagtttcttctgtgaggacagttggctattgaaataaaatgagcaatgg

SEQ ID NO: 291733 - DNA, 1000 bp, Homo Sapiens; identical to SEQ ID NO: 118352

SEQ ID NO: 291734 - DNA, 923 bp, Homo Sapiens
agtggagtgaggggtaacaagatggcgaccgagacggtggagctccataagctaaagcttgccgaactaaagcaagaatgtcttgctcgtggtttggagaccaagggaataaagcaagatcttatccacagactccaggcatatcttgaagaacatgctgaagaggaggcaaatgaagaagatgtactgggagatgaaacagaggaagaagaaacaaagcccattgagctccctgtcaaagaggaagaaccccctgaaaaaactgttgatgtggcagcagagaagaaagtggtgaaaattacatctgaaataccacagactgagagaatgcagaagagggctgaacgattcaatgtacctgtgagcttggagagtaagaaagctgctcgggcagctaggtttgggatttcttcagttccaacaaaaggtctgtcatctgataacaaacctatggttaacttggataagctgaaggaaagagctcaaagatttggtttgaatgtctcttcaatctccagaaagtctgaagatgatgagaaactgaaaaagaggaaggagcgatttgggattgtcacaagttcagctggaactggaaccacagaggatacagaggcaaagaagaggaaaagagcagagcgctttgggattgcctgatgaagagttcctgatactttctgttctccagtgttttccatttctctccttcttcttggtcacatatatgcctaaatgcacagtcatgtgcctacgtcctgcctcgcaatgagggagcatgtaccccaggtacatccatgaactgcggcagcagtttgacttattgctgtttcagctttaaggttgttgtgtttttgtttttgattatgttgcttgttaataaaaaaaaatagaaaagtaaaaaaaaaaaaaaaaaaaaaaaaaaaaaa

SEQ ID NO: 291735 - DNA, 1000 bp, Homo Sapiens
gagtttgagaccagcctgggcaacatggcgagaccctgtttctacaaaaagaaaaagggaaaaaaaaagcagggactgtcattctcatctcctccctggggtatccacaggaatggacattcaaatggttgtagcctggtggggtagaaggcagagaagactacccagccagtgaagtgcagaggatagacataggaaaacattccaggcatttggagacagctgaaagtatccatgctgactttcatgatttagaagtctttaactgaattattaaaattgccttttttttgtgctgtacaatgtctactgtactgtgggtcatttagatgagatgaaaaacttaattaaatctgaagtgtcagaggcgcttagtaagccttagtaaagttgtgattgaagaaacttaatacaaatgaactagaggtttgtaatcatgccactcactaacgattttatttctgtagcagaatcattttttctatgtaaggtgttaatgtgtgtgtatgtgctttggttgtaggaaaacttgaaaattccaaaatccttattttcctatttgagaggctggttcagcagggtgtgtgtgtgtgtgtgtgtgtgtgtgtatgaatggtatatttattacattattttgaaagagaattagtgtgttatgtggataatgttatatacagccaaagtggatgtttctatttggcaaggaaggtaggatttctgaaactcaggccttaaccaataggttggaagacaagaccaattgaagagttaggaaatgtgagtttttgttacttctgttattccagtcttggtttcattgtctcattctttatttttaaaatcttgtgcctaaaagtttttttgcttaattatgaagtagacatgcatgtttacatttatgtaaaatatttgctgtgtaaagtattttttgtttattctcttaaaagatcactatatttaaataaaagtgaaggtcagcaacacaaaaaaaaaaaaaaaa

SEQ ID NO: 291736 - DNA, 1000 bp, Homo Sapiens; identical to SEQ ID NO: 118353

SEQ ID NO: 291737 - DNA, 1000 bp, Homo Sapiens; identical to SEQ ID NO: 118354

SEQ ID NO: 291738 - DNA, 1000 bp, Homo Sapiens
gatgcccggccttgggacttccaggcagaggagtgtgcccttcgtgccaacattgaacgcttcaacgcccggcgctatgaccgggcccacagcaaccctgacttcctgccagtggacaactgcctgcagagtgtcctgggccaacgggtggacctccctgaggactttcagatgaactatgacctctggttagaaagggaggtcttctccaagcccatttcctgggaagagctgctgcagtgaggctgttggttaggggactgaaatggagagaaaagatgatctgaaggtacctgtgggactgtcctagttcattgctgcagtgctcccatcccccaccaggtggcagcacagccccactgtgtcttccgcagtctgtcctgggcttgggtgagcccagcttgacctccccttggttcccagggtcctgctccgaagcagtcatctctgcctgagatccattcttcctttacttcccccaccctcctctcttggatatggttggttttggctcatttcacaatcagcccaaggctgggaaagctggaatgggatgggaacccctccgccgtgcatctgaatttcaggggtcatgctgatgcctctcgagacatacaaatccttgctttgtcagcttgcaaaggaggagagtttaggattagggccagggccagaaagtcggtatcttggttgtgctctggggtgggggtggggtgtttctgatgttattccagcctcctgctacattatatccagaagtaattgcggaggctccttcagctgcctcagcactttgattttggacagggacaaggtaggaagagaagcttcccttaaccagaggggccatttttccttttggctttcgagggcctgtaaatatctatatataattctgtgtgtattctgtgtcatgttggggtttttaatgtgattgtgtattctgtttacattaaaaagaagcaaaaataaaaaaaaaaaaaaaaaaaaaaaaaaaaaa

SEQ ID NO: 291739 - DNA, 1000 bp, Homo Sapiens; identical to SEQ ID NO: 118355

SEQ ID NO: 291740 - DNA, 1000 bp, Homo Sapiens; identical to SEQ ID NO: 118348

SEQ ID NO: 291741 - DNA, 1000 bp, Homo Sapiens
gcagctctggagatgctgaggcagaagcagcaggaagctgaagagttggaagctgacatcagagaagagaaagcttcctggaagactcaaatacagtatgacaaaaccaacgtcttggcagattttgagcaactgagagacatcctggactgggaggagagcaatgagctgcaaaacctggagaaggaggaggaagacattctgaaaagccttacgaactctgaaactgagatggtgcagcagacccagtccctgagagagctcatctcagatctggagcatcggctgcaggggtcagtgatggagctgcttcagggtgtggatggcgtcataaaaaggacggagaacgtgaccttgaagaagccagaaacttttccaaaaaatcaaaggagagtgtttcgagctcctgatctgaaaggaatgctagaagtgtttagagagctgacagatgtccgacgctactggggtaaggagaagtcacattatcataagccaccctgcggcttatcattattattatctttatcttttagaattttatgttctctattaggctcatgttttaagatttatgattctccttccaagacacacataacttacccctccttataacttctaaacaaggttcctcccagttttctctcaagtctttatcaagatttctctcatatcacaaataaagttacattatatcccttagctgacctgttaatttttctacagttgatgtgacagtggctccaaacaacatttcatgtgctgtcatttctgaagataagagacaagtgagctctccgaaaccacagataatatatggggcacgagggacaagataccagacatttgtgaatttcaattattgtactggcatcctgggctctcaaagtatcacatcagggaaacattactgggaggtagacgtgtccaagaaaactgcttggatcctgggggtatgtgctggcttccaacctgatgcaatgtgtaatattgaaaaaaa

SEQ ID NO: 291742 - DNA, 1000 bp, Homo Sapiens
tatgacaaaaccaacgtcttggcagattttgagcaactgagagacatcctggactgggaggagagcaatgagctgcaaaacctggagaaggaggaggaagacattctgaaaagccttacgaactctgaaactgagatggtgcagcagacccagtccctgagagagctcatctcagatctggagcatcggctgcaggggtcagtgatggagctgcttcagggtgtggatggcgtcataaaaaggacggagaacgtgaccttgaagaagccagaaacttttccaaaaaatcaaaggagagtgtttcgagctcctgatctgaaaggaatgctagaagtgtttagagagctgacagatgtccgacgctactggggctggagtgcaatggcacgatctcggttcactgcaacctccacctctcagattcaagcaattctcctgcctcagcctcccaagtagctgggattacaggtgcccaccaccacccctggctaaatttgtattttcagtagagacggggtttccccatgttggttaggctcgtctagaacctctgacctcaggtgatccacccgcctcggcctcccaaagtgctgggattacaggcgtgagccacggcgcccagcctgtgcttattttcttaaaataatttttgtattaaaaacttcacattaaataagtgctaatgttttattgcatagtagggtgactagagttaacaataacctattgcatatattttgaaatagctagaagagaggattttgaaagttctcaacacaaagaaatgacacatatttgaggtgatggatatgctaattaccctggttcggttattacgcaatgtatacatgtatcaaaacatcacactgtaccacataaatatgtatatttattatttgtcaattaaaagcaaaataaaacaaaaaaccttcatctaatactttggatcattgtgaaaaaataaattcctgaagtataaagaaaaaaaaaaaaaaaaaaa

SEQ ID NO: 291743 - DNA, 1000 bp, Homo Sapiens
ctgagcaaataagtactttccagcctgtgtttcaggagaggactgtgctggatcatgcttgccctccacagggaatacagcatccttacagcttgcatgcaatcaacctcttttgtaaatggaaaataaagtctgttacccaaaggccatgctgatcccctgctccctgctttcatttatgtttgctgacctgtggagaccagtctttctgacacacagtgaagctcaacttgcctcctggctgcttcagcaggtggatccattcttcgacccccagatgtgactctaaagaaggctgaaaatttttgtccaaattgccatgcagatatcttgaacagcaggacatttgcaggccttgtctactggacttttctcccaaacaggacaagcccaggcagggctgcatggagaggaatggaacctggagctagaattaattgcccactctcccaccctaccagtgcagcccggcaagggcaggaattgggaggcctagggtgggcatgaaagcttgggaagcactgtcgtctctcagacaggcgtcctaaagacctctaggctggaagcttgggcttgcaagtggatccgggaccgagggtggtctcttggacaaccccaggaacttggaccaaggcagagccaatcttgcaaactggccatggatggggaagtgcccggtagccagcatgagccacactaggaaagaggaggagggtgcagccaaacttaaggcaccggcaagtgttgtcagcactggaggagaccccgccagtggggtgaggccagccaagtccctgtgttacgaatggtgggccaaggggctgtctgctaggtcccagtaggacaggcagagctccaggctggcaccatggtaggcctccagggaaagagctgggaggcaggaatggcacactgggcaggcttgcccattcctggccctgagaatggagctgtagcctcatggacaataaatggatgtgacaccaaaaaaaaaaaaaaa

SEQ ID NO: 291744 - DNA, 1000 bp, Homo Sapiens
aagaggctccagcttcctcatcctctttctcttcgggaatgaggaagtgaaggtgagtgtgaatggacagcactttctccacttccgctaccggctcccactgtctcatgtggacacgctgggtatatttggtgacatcctggtagaggctgttggattcctgaacatcaatccatttgtggagggcagcagagagtacccagctggacatcctttcctgctgatgagccccaggctggaggtgccctgctcacatgctcttccccagggtctctcgcctgggcaggtcatcatagtacggggactggtcttgcaagagccgaagcattttactgtgagcctgagggaccaggctgcccatgctcctgtgacactcagggcctccttcgcagacagaactctggcctggatctcccgctgggggcagaagaaactgatctcagcccccttcctcttttacccccagagattctttgaggtgctgctcctgttccaggagggagggctgaagctggcgctcaatgggcaggggctgggggccaccagcatgaaccagcaggccctggagcagctgcgggagctccggatcagtggaagtgtccagctctactgtgtccactcctgaggatggttccaggggaaataccgccagaaaacaagaaggtcagcccactcccagggccccactctcctcccctcattaaaccatccacctgacaccagcacatcaggcctggttcacctctggggtcacgagactgagtctacaggagctttgggcctgagggaaggcacaagagtgcaaaggttcctcgaactctgcaccttcctccaccaggagcctgggatatggctccatctgccttcagggcctggactgcactcacagaggcaagtgttgtagactaacaaagatactccaaaatacaatggcttaaagaatgtggtcatttattctttattatttatttatttgtggtcaaataaataaataaggtta

SEQ ID NO: 291745 - DNA, 1000 bp, Homo Sapiens; identical to SEQ ID NO: 223725

SEQ ID NO: 291746 - DNA, 1000 bp, Homo Sapiens
ggtcagaggactgtaatgatagaattaaattagtgtcactaaaaactgtcccaaagtgctgcttcctaataggaattcattaacctaaaacaagatgttactattatatcgatagactatgaatgctatttctagaaaaagtctagtgccaaatttgtcttattaaataaaaacaatgtaggagcagcttttcttctagtttgatgtcatttaagaattactaacacagtggcagtgttagatgaagatgctgtctacaaggtagataatatactgtttgatactcaaaacatttttcattttgtttaaagtagaagttacataattctatattttaagtcttgggtaaaaaagtagttttacattttataaagtaaagatgtaaatgattcaggtttaaagctctatttgacttcctttttttgtttgagatagcgtcttgctgtgttgcccaggctggagtgcagtggtgtgatctcagctcagtgcaacctccgccccctgggatcaagcgattctcctacctcagcctcccaaatagctgggactacaaggtgccctccagcatgcctggctgatttttgtatttttagttgaggtgaggtttcaccatgttggccaggcgggtttcgaaatcctgacctcaaatgatccacccacctcagcctcccaaagtgctgggattacaggcatgagccaccacaaccgtcccactattttactttttaaaatgacattcctactgattgatttttatcttgctataagttcgatgacaccgtgaatctaataaggttcactgttgacacagtacaagttacatagctaaaatacatagcattgaagactaattttaaggattgacaagagtttattttctattgtgcaatatcttaaaggaagcaaccacctttgggaaagtgtatctgctgctcctagggccatgcttgtatacatatttaaataaacatattcatttacccgaaaaaaaaaaaaaaaa

SEQ ID NO: 291747 - DNA, 1000 bp, Homo Sapiens
ggatgtcagagatgaattctctggcattgtgagcaaaggagacaaccagattctccagcaccatgtcttgacacggatccacatcctgagtttcctgtctgggctcgcagagtgccgcctgggcctcaatgacatcctcgtcaaagggaatgaaatagttttgaggcaggacatcatgcccaccaccaccacaaagtggatcaagctccatgagtgccgtttccatgggtgtgtggatgaggatgttttccacaactcacgggtcattctgttcaaccctttggatgcgtgccggtttgagctaatgcggttcaggacagtgtttgctgagaagaccttgcctttcacactcaggacggccacaagtgtcaatggggcagaggtggaggtgcagagctggctgaggatgtcaactggcttctccgccaatcgtgaccccctcactcaggttccctgtgagaatgtgatgatccgttaccctgtgcccagtgagtgggtgaaaaacttccgcagggaaagtgtcctgggggaaaagtctttgaaagccaaagtgaaccggggggcaagttttggctccactagtgtttctggctctgagcctgtcatgagagtaactctgggaactgccaagtacgagcatgccttcaactccattgtgtggaggataaaccgactgccggacaaaaactcagcttccggtcacccacactgtttcttttgccaccttgaactcggctctgaccgggaagtgccttccagatttgccaatcacgtgaatgtcgagttcagcatgcccacaacttctgcctccaaagccagcgtgagatctatctctgtagaagacaagactgacgtcaggaagtgggtcaattattctgcacactacagctaccaggtagccttgggaagcatctggctaatgcttccaactccatttgttcaccccactaccctccccctcttattccttttagccatgcttactatgttcgcctggtaa

SEQ ID NO: 291748 - DNA, 1000 bp, Homo Sapiens; identical to SEQ ID NO: 223726

SEQ ID NO: 291749 - DNA, 1000 bp, Homo Sapiens; identical to SEQ ID NO: 118356

SEQ ID NO: 291750 - DNA, 1000 bp, Homo Sapiens
aacaaaaacttatgacctttgatcatcatccattgtggttttaccttgatattatcaaagctacccctttaaatattgatggacagcgttattctcattgcctgtcatttaacagactaaggtgctctgcatctttatacaaaaattatattccttcttttgtgctacataatttatctagtatttggaagccatcttttacaaacaagaaactgtttttgactttcgaatctcagacaagagtaggtaataaactaaatgatgcagggtttatttctccagaaattttacatagtcatcctgatacttcgtgctctttgggagtcacttctgattttcactttttaaatgaaaggtttgatagaaagctgaaaagatgggaagaacctaaggaattaccagctgaggacagccaagacttaacaagcactgactaccgttcccttgagctaccattatcacaagggtttgcctttcaattagtaaagctttttggatctccaggcgttccaatggaatccttgttgcctgatgactatgtggttccccttgactggaagacactaaagatgatctacttgcaatggaagatgtcagtggagaaaagacagaagaagattggttgaaaaatgaaaattccttgaactttgagttctgctgtcttcatggtactgctgaagatcatgatcacggagaaaagtcagagtgctcagtgccaacccaagggattctttccagagacgtacccgttggataccaaaattagtttggataatctgttcaaccattatatagcctcgatgatgagagagttacaaagaacaaaactccagacacaaacctccaaatttttcagcagaagcactctgcgtcgctgagctgaggtcggctctgcgatccatacgtggccgcacccacacagcacgtgctgtgacgatggctgaacggaaagtgtacactgttcctgaatattgaaataaaacaataaacttttaatggt

SEQ ID NO: 291751 - DNA, 1000 bp, Homo Sapiens
cgggagtggtctggctgccaggccctgggggtctaggggtgcagggagcggccagcgctggggccagcgggacagggcagagcctcatcgttctgcagaatgtggggggtggggaggcagggccacaggaaatgagtggggtgcagctccagcccctccgaccagccccagaagtaaccacggtccagctccagccagcgcaggaggtgaccacagtccagctccagccagcacaggaagtaaccacggtccagctccagccagcacaggaggtgaccacggtccagctccagcccgtggccggccagctctccaattccagtgggggagctgtggctactgaggcacccaacctgctggttgttcagagcggggcagctgaggagttgctcactggcccaggccccggggaggcgggggatggcgaggccagcactggtgtggtccaggatgtcctctttgagacactccagacggacgagggcttgcagagcgtgctggtgctgagcggggccgatggcgaacagactcgactctgcgtacaggaggtagaaacacttcctcctgggctgacggagccgcctgccaccggcccacccggacagaaactcctcatcatccgcagcgccccagccactgagctgctggacagcagcaacactggaggaggcaccgccacgctgcagctcctggccccaccgccgtcaggcccagcctcgggccccgcggggctccccggggctccagcctcccagatggtgcaagtggtccccgcaggagctgggcctggtgttatgacccctcagggcctgccctccatccagattgtccagactctacccgcagtccagctggtgcacacgttttgaggagaggcagtgattcccctcccgccccgcacagagaccccgactcactgccagccggggcggggcagggtgccgcaggctgggcttgctaataaagacccgagtctcccaaaaaaaaaaaaaaaaaaaaa

SEQ ID NO: 291752 - DNA, 1000 bp, Homo Sapiens
gcaccttatttctctgctgagtgtccagatcctccaaagacagatctgtcaagagaatccatcccattaaatgacctgaagtcagaagtatcaccacggatttcagcagaggacctgattgacttgtgtgagctcacagtgacaggccacttcaaaacacccagcaagaaaacaaagtccagtaaaccaaagctcctggtggttgacatccggaatagtgaagactttattcgtggtcacatttcaggaagcatcaacattccattcagtgctgccttcactgcagaaggggagcttacccagggcccttacactgctatgctccagaacttcaaagggaaggtcattgtcatcgtggggcatgtggcaaaacacacagctgagtttgcagctcaccttgtgaagatgaaatatccaagaatctgtattctagatggtggcattaataaaataaagccaacaggcctcctcaccatcccatctcctcaaatatgaagaaccaagagtgtgactgccaaaacttagtgtggcatcagcaccaacagcacagttcttcatatccacgccactctcagacaaaactagatgtccagattgttgcatttccgtaaagtttgtcacgagacattttttaaaatctcataacccacatgttcagttatccatgcaagaaacttgactctacatgtattgctgaaagaattttcttaacagtgaaatctgatcatatatttttaccacactgccacataaagcccaagaaattcagctgacaagacagatttagcattatcaagaaatcccatttgccctgaaaaagctgtcctccattgtactgaacagacagtcctgtcgattgtgttatttagaaacatacactgaatgtgggctgaaatcatcatctttccataatgaaaactgagaaactattcacaatgcattccttataaataaatgctacatttagtaactcatttcacccaaaaaaaaaaaaaaaaaa

SEQ ID NO: 291753 - DNA, 1000 bp, Homo Sapiens
aggccacgagtatttcatagacattgatggaagcagaaaccaaaactcttcccctggagaatgcatccatcctttcagagggctctctgcaggaaggacaccgattatggattggcaacctggaccccaaaattaccgaataccacctcctcaagctcctccagaagtttggcaaggtaaagcagtttgacttcctcttccacaagtcaggtgctttggagggacagcctcgaggctactgttttgttaactttgaaactaagcaggaagcagagcaagccatccagtgtctcaatggcaagttggccctgtccaagaagctggtggtgcgatgggcacatgctcaagtaaagagatatgatcataacaagaatgataagattcttccaatcagtctcgagccatcctcaagcactgagcctactcagtctaacctaagtgtcactgcaaagataaaagccattgaagcaaaactgaaaatgatggcggaaaatcctgatgcagagtatccagcagcgcctgtttattcctactttaagccaccagataaaaaaaggactactccatattctagaacagcatggaaatctcgaagatgatggttgtgaattactgtagcagcaaaagcaaattggtctccacacctaaaatcgtctgcctgtgtactttgtagatgtgaatggtactattcaacggagcacaatcacatgttagcatttggtaacataatgtttttggatgttcttatggatgtttcttccctaaactatgtatggaattgagcatcatccagaataaatagcgttgtatcccaaattgtgatttgaaccctgggatgctctaattggctggttggtttggatttgtaactccagaaacattctatagtgtgccagagcaaaaggcaaatacacaaaatattatttaaatcaggaaactaaaaatattaacatctattaaaaaattgagcatttttctaaaaaaaaaaaaaaaaaaaaaa

SEQ ID NO: 291754 - DNA, 1000 bp, Homo Sapiens
aaatacctcatgaagaggcgctggaagaaaaacttcattgctgtcagcgctgccaaccgcttcaagaagatcagcagctcgggggcactgatggctctgggggtctgagccctgggcgcagctgaagcctggacgcagccacacagtggccggggctgaagccacacagcccagaaggccagaaaaggcagccagatccccagggcagcctcgttaggacaaggctgtgccaggctgggaggctcggggctccccacgcccccatgcagtgaccgcttccccgatgtgagccgcctcggagtgtggcctggatccatcctgctagcacctccccagacagggctccagcctgtcggccacaccccagactccaggcccccgttgaagccgctcccggttccctccccagctcctcgtctttgaactgccgccgccgtggtgacccctgctttgccccactgggagagtccttagcctgggcctcctcctagctggagtgccatggctggggggtctcagcatgtagggcttctgtggttgtggatgggaggctcctggtggggcagaaaggctgcaacgctgattcctaaggcccagctgccagggaagacagagcaggctttgtgagagaggacctccatgcccccgccacctccccactccagcagataaggccgagcccacaccatctggcccaggctggcccccacccaccttccttgcgaccaccaacacacaggaactctgtgtgagagagagggcgcccagcccaggcctggtggagggggaggggagaagccaagggacacaggagaccacccccgagcttgcctcagggccaagccggcccaacccaaccactcggggcccccatcttgggggtcacccatggcctcagatgatggggtcagcaggcccaggagaattaggaaggccatggggcagcctccagtctgctctcagcttgtgccttgtaaataaatgtacaggttggatgtgg

SEQ ID NO: 291755 - DNA, 1000 bp, Homo Sapiens
caccaccattaccaccacttctaccagacatagagcccctccccagggccccaccctgccatatgaaggaccccacccccgacaccacaaggcattattattctattaattattgttattatgatgattattgttattaataattattgttactccactaatatttagctagcctacatgtagaagatctatggaaacacagaactaaacttttatttatatgttgtggggactgcataactagcccaggaaatgactctggttttgagtggcctgtaatgggcagaggctccctcggggctcgggatctgcagcatctatgtggatcagcccacacccttcccagagccagggagcccttagcctcaactctgccccaccccagcctcttccaggagagcacccttacttggcccggcttccagagaccctcgaaatctccgagaagataaacagctgctacctcttagtattattctgattttattttgcccttaactgattgttatatgctacaagggatttcagtggactgcagagtgcgaacgtcttgctgttgtgtttttatgtcccaacctagaaaccttagctgtcttttctggagttgtctttcatgcttttccagtgggatcaagcccttttccccaagagtcccatctcttctgccatgcacgacatgaaaatccacttctcttccttctccttcttctctctctactttacagtgatacacacacgtatttaaggactatccctgagaccatccctctcattttggaaactgctagggagggaaccaaccacttaaacaagcgtggttttccaagatccaggcaattgtgtgctgttggttgtggtggaggatgtggcacatatatacgtacctacacggttctctaacagagctttctgtatctatagatagatgccatctgtccatttctatgtatctttctataaatatacactctcaggtatctttaaaaaaaaaaaaaaaaaa

SEQ ID NO: 291756 - DNA, 1000 bp, Homo Sapiens; identical to SEQ ID NO: 118358

SEQ ID NO: 291757 - DNA, 1000 bp, Homo Sapiens
agttaaaaataagaaaataggaaccttaaaggaaacccatgaaagaaaaggttctgataagcgtggagacaatcaagacaaggaaacaggggtaaaaaagttacctggagtaatgcttttcaagaaaaagaagaccaggaagctaaaaattgctctggccttatctgatcttgtcatttatacgaaagctgagaaattcaaaagctttcaacattcaagattatatcagcaatttaatgaaaataattctattggggagacacaagcccgaaaactttcaaaattgcgagtccatgagtttatttttcacaccaggaagttcattaccagaatatatcccaaagcaacaagagcagactcttctaattttaatccccaagaattttggaatataggttgtcaaatggtggctttaaatttccagacccctggtctgcccatggatctgcaaaatgggaaatttttggataatggtggttctggatatattttgaaaccacatttcttaagagagagtaaatcatactttaacccaagtaacataaaagagggtatgccaattacacttacaataaggctcatcagtggtatccagttgcctcttactcattcatcatctaacaaaggtgattcattagtaattatagaagtttttggtgttccaaatgatcaaatgaagcagcagactcgtgtaattaaaaaaaatgcttttagtccaagatggaatgaaacattcacatttattattcatgtcccagaattggcattgatacgttttgttgttgaaggtcaaggtttaatagcaggaaatgaatttcttgggcaatatactttgccacttctatgcatgaacaaaggttatcgtcgtattcctctgttttccagaatgggtgagagccttgagcctgcttcactgtttgtttatgtttggtacgtcagataacagctaatgataaatgacatatcattagctatgcatcgcaataaaacagccaaaatg

SEQ ID NO: 291758 - DNA, 1000 bp, Homo Sapiens
atgaatttagaagagaagcactttctaagactgcacctggagaacagagtagaagatctgtggagaaagttccaggatgtactcaagaattacactgatgccacagaggatcgaaagactgcctttgagaccctgcaggtgaaggatgagaagagctccaaagagattgaagtacagatgaaaaaaatacagaaactacaggatgccataactatttcaaaaggcaagatcatgatacacagccgtgagagtgaagatgagaaccggtatatccgtaatgacaaggaattggtccttgtacaactgcgaaaacttaaggcccaaagaactcaggcccgggcagcatcccagaagaacttagtcagactcaccctggaaagtaatgccaccctcaaggccctgagaaagattgttgataagggtgaaaagatccttaaacttgctgaaatatgtaggaaatttgaaaccgaagaagaaaaagtgctgcctttttattcatcagtattgactcctaaggagcaggaggggattcagaagaataatctagaagagcttactgaggagctcaccaaggtgatggtggactacataggaatggagaatttctggaaaaggtacaacaaagtgaaactggagcaactgagcctccaacatagacgagcccagctgctagatatcaatgggaagctgcgggagatgctgaagcagtacttggatggcatctcagtgagtgacgaagtgctgagccagctcaacccactctttatagtcaactatcaaagcaacttactccagcccttgtccatacgtatagcccatccaggtgataaacaacatccaaccacttaaaatataattgaagcagcccagatgatcttccacaacctgtgatctaaggaaaaaaatctttcaactcctagagatttttttttttttttgagaaatgtagggatgttgctattaaaaatttccatggagtttgggaaaaaaaaaaaaaaaa

SEQ ID NO: 291759 - DNA, 1000 bp, Homo Sapiens
ctctgccggatgttagtgccttctccaggggcagaggtgggggtgaaggccgaggatccgcatccagcgggggagcagctgcgggcgctggggttggaggcttgtctggaccagagagtgtttcctttgagctctgctccaaccctggtgttcttcttcctccacctgccttaaaaggggctgttcctctttacaacccatctcaggtgcctcagctgcccacggccactagcctgaatcggccaaatcgcctagctcagcgtcgctatcccacccagccatgctgagaataaacacacgtcccaggctcatctcccaggactgaaactttcttgctctctttttctcaatctcccagcccctctctaccatattgggacccttcaagaggtttgtgctagcccgatgcctccaccgggcacttagaaggcaagaggacaggatctctcaagacacagcacaattcagtctcttaagattaacttcacaatgatggaaattatttcatcaggtggaaagtctgggtctaatagcagactgcacatgagcagagtgacatggtggtggcacttatggtggtggcttgagagccttggggaaattagggccctaacagctagaatcaaagatgataccgcagggccctgtagcaagaaatgggaagcagggggaggggcaggggctcagaacaatattctagagcaactttgactacttcctgtcttagtaatagaccaatacatggctctatttagcaaagtttttatactgaaacttgattattgctgccctttataatttcctcttcaatgatatttcagcagtttccctcttggtcctagttttgtgcacatttttttgaatgtggttcagattaattatatttctctcactttcttagctggtcctattttttcacattctggcatgtggctatcaagttagattgctgtaggcatcatattgtcatggtaactactgaacctaatgatgcagatgg

SEQ ID NO: 291760 - DNA, 1000 bp, Homo Sapiens; identical to SEQ ID NO: 223728

SEQ ID NO: 291761 - DNA, 1000 bp, Homo Sapiens
atcaaagaagaaccagaaaaagcagtatcagttgcccagtttcccagaacccaaatcatccactcaagccccagaatcccaggagagccaagaggagctccattatgccacgctcaacttcccaggcgtcagacccaggcctgaggcccggatgcccaagggcacccaggcggattatgcagaagtcaagttccaatgagggtctcttaggctttaggactgggacttcggctagggaggaaggtagagtaagaggttgaagataacagagtgcaaagtttccttctctccctctctctctctctttctctctctctctctctttctctctcttttaaaaaaacatctggccagggcacagtggctcacgcctgtaatcccagcactttgggaggttgaggtgggcagatcgcctgaggtcgggagttcgagaccagcctggccaacttggtgaaaccccatctctacaaaaaatacaaaacatagctgggcttggtggtgtgtgcctgtagtcccagctgtcagacatttaaaccagagcaactccatctggaataggagctgaataaaatgaggctgagacctactgggctgcattctcagacagtggaggcattctaagtcacaggatgagacaggaggtccgtacaagatacaggtcataaagactttgctgataaaacagattgcagtaaagaagccaaccaaatcccaccaaaaccaagttggccacgagagtgacctctggtcgtcctcactgctacactcctgacagcaccatgacagtttacaaatgccatggcaacatcaggaagttacccgatatgtcccaaaagggggaggaatgaataatccaccccttgtttagcaaataagcaagaaataaccataaaagtgggcaaccagcagctctaggcgctgctcttgtctatggagtagccattcttttgttcctttactttcttaataaacttgctttcaccttaaaaaaaaaaaaaaa

SEQ ID NO: 291762 - DNA, 1000 bp, Homo Sapiens; identical to SEQ ID NO: 118359

SEQ ID NO: 291763 - DNA, 1000 bp, Homo Sapiens; identical to SEQ ID NO: 223731

SEQ ID NO: 291764 - DNA, 1000 bp, Homo Sapiens; identical to SEQ ID NO: 118360

SEQ ID NO: 291765 - DNA, 1000 bp, Homo Sapiens
gggcatcgtgggaaggacgggctctgggaagtcctccttgggcatggctctcttccgcctggtggagcccatggcaggccggattctcattgacggcgtggacatttgcagcatcggcctggaggacttgcggtccaagctctcagtgatccctcaagatccagtgctgctctcaggaaccatcagattcaacctagatccctttgaccgtcacactgaccagcagatctgggatgccttggagaggacattcctgaccaaggccatctcaaagttccccaaaaagctgcatacagatgtggtggaaaacggtggaaacttctctgtgggggagaggcagctgctctgcattgccagggctgtgcttcgcaactccaagatcatccttatcgatgaagccacagcctccattgacatggagacagacaccctgatccagcgcacaatccgtgaagccttccagggctgcaccgtgctcgtcattgcccaccgtgtcaccactgtgctgaactgtgaccacatcctggttatgggcaatgggaaggtggtagaatttgatcggccggaggtactgcggaagaagcctgggtcattgttcgcagccctcatggccacagccacttcttcactgagataaggagatgtggagacttcatggaggctggcagctgagctcagaggttcacacaggtgcagcttcgaggcccacagtctgcgaccttcttgtttggagatgagaacttctcctggaagcaggggtaaatgtagggggggtggggattgctggatggaaaccctggaataggctacttgatggctctcaagaccttagaaccccagaaccatctaagacatgggattcagtgatcatgtggttctccttttaacttacatgctgaataattttataataaggtaaaagcttatagttttctgatctgtgttagaagtgttgcaaatgctgtactgactttgtaaaatataaaactaaggaaaactc

SEQ ID NO: 291766 - DNA, 1000 bp, Homo Sapiens
tggacaagggagatcccttgaggctgaggataagatgactcaccggatactgagggcagcccaggagggggacctgccagaacttaggagactgctggaaccgcatgaggcaggaggagctggggggaatatcaacgcccgggatgccttctggtggaccccactgatgtgtgctgctcgagcgggccagggggcagctgtgagctatctcctgggccgtggggctgcctgggtgggggtctgtgagctgagtggcagggatgcggctcagctcgctgaagaagctggcttccctgaggtagcccgcatggtcagggagagccatggagagacaaggagcccggaaaaccggtctcctactccctccctccagtactgcgagaactgtgacacccacttccaagattccaaccaccgcacatccactgctcacctgctgtcactgtcgcagggtcctcagcctcccaaccttccacttggggtgcccatctccagcccgggcttcaaactgctgctgagggggggctgggagccaggaatggggctgggaccccggggtgagggccgtgccaatcccatccccactgtcctcaagagggaccaggaaggactaggctacagatcagcaccccagccccgagtgacacatttcccagcttgggatacccgagctgtggctgggagggagagaccccctcgggtggccacactgagctggagggaggagagaaggagggaggagaaagacagggcttgggagcgggatctaaggacttacatgaacctcgagttctgactttggtaaagtctgaccctagtctgctgctgaagtctgaacttgggcctctgacctgggccctttgacttccccttcctgggatctgctcagatgcagatcctgaagtttttggtcaataggctctgtcttcgtgagagacgggctgagagtcagaaataaatcaaccatttgtggtttaaaaaaaaaaaaaaaaaaaaaaaa

SEQ ID NO: 291767 - DNA, 1000 bp, Homo Sapiens
tctgagagatgctgtagacatctgtcctacacttgagatgatttccaagcctctctggcactttgagttaagtctatctggtattaaatgccaaggaccttttgctgcctaaatccactctgcaggaaataggcccaaccaccagatgagaattaggccctggatgagtagcgctatagttactgtcctgttgattaatttctgccatttcatgtccataaaagagaccacccatatcatgcacacaattagatttctcacactctaactgtatatttgtatgatattttaaaatctcctaaatgctgggcaatggctattaacaattaattgtcttgcactggccttctgatgaaatgttaacaatgcctattgtaatatagaaaaaaacattctatctactgatttgggctgaatgtatgtaaataggtttctaaaaagtcagatgtttgagcagtggcctacaaatcagtaattttcggatgggagagtttctttacattgccgtggcatcttaaaagctatcttcatgtaaattgactgtactaggcctactggggatcagagttcccaagaaaggaaaccttttcttgtatctggattcaaatttatttccaatgtttcaagcgggaaacatgactctttattgtctgtaaatctaacattattacttttcctcttagaagaatattgtattgttagatgtttgttgagctggtaacatcgttgcaaccactgcaatatcttcgttagtaatctgtataatactttgtatacaagtactggtaagattgttattaaatgtagcttcagtcattaaattactatagcaaagtagtacttcttctgtaatatttacaatgtattaagcccacagtatattttatttcaatgtaattaaactgttaacttattcaaagagaaaacatctcatcatgtctattgtccaaagttacctggaatcaaataaaaattctagattaccatgaagaacataaaa

SEQ ID NO: 291768 - DNA, 1000 bp, Homo Sapiens
gtagcttggaagttgagtgcatttcccaaaaaccgtattattggaagcggctgtaatctggatactgctcgttttcgtttcttgattggacaaaagcttggtatccattctgaaagctgccatggatggatcctcggagagcatggagactcaagtgttcctgtgtggagtggagtgaacatagctggtgtccctttgaaggatctgaactctgatataggaactgataaagatcctgagcaatggaaaaatgtccacaaagaagtgactgcaactgcctatgagattattaaaatgaaaggttatacttcttgggccattggcctatctgtggccgatttaacagaaagtattttgaagaatcttaggagaatacatccagtttccaccataattaagggcctctatggaatagatgaagaagtattcctcagtattccttgtatcctgggagagaacggtattaccaaccttataaagataaagctgacccctgaagaagaggcccatctgaaaaaaagtgcaaaaacactctgggaaattcagaataagcttaagctttaaagttgcctaaaactaccattccgaaattattgaagagatcatagatacaggattatataacgaaattttgaataaacttgaattcctaaaagatggaaacaggaaagtaggtagagtgattttcctatttatttagtcctccagctcttttattgagcatccacgtgctggacgatacttatttacaattcctaagtatttttggtacctctgatgtagcagcacttgccatgttatatatatgtagttggcatttggttcccaaaaagtaggatgtaggtatttattgtgttctagaaattccgactcttttcattagatatatgctatttctttcattcttgctggtttatacctatgttcatttatatgctgtaaaaaagtagtagcttcttctacaatgtaaaaataaatgtacatacaaaaaaaaaaaaaa

SEQ ID NO: 291769 - DNA, 1000 bp, Homo Sapiens
ctgcccaatctagtgaaaaaccagctgtgtcccgtgatcgaggcttccttcaatggcatgtatgcagacctcctgcagctggtgaaggtgcccatttccctcagcattgaccgtctggagtttgaccttctgtatcctgccatcaagggtgacaccattcagctctacctgggggccaagttgttggactcacagggaaaggtgaccaagtggttcaataactctgcagcttccctgacaatgcccaccctggacaacatcccgttcagcctcatcgtgagtcaggacgtggtgaaagctgcagtggctgctgtgctctctccagaagaattcatggtcctgttggactctgtgcttcctgagagtgcccatcggctgaagtcaagcatcgggctgatcaatgaaaaggctgcagataagctgggatctacccagatcgtgaagatcctaactcaggacactcccgagttttttatagaccaaggccatgccaaggtggcccaactgatcgtgctggaagtgtttccctccagtgaagccctccgccctttgttcaccctgggcatcgaagccagctcggaagctcagttttacaccaaaggtgaccaacttatactcaacttgaataacatcagctctgatcggatccagctgatgaactctgggattggctggttccaacctgatgttctgaaaaacatcatcactgagatcatccactccatcctgctgccgaaccagaatggcaaattaagatctggggtcccagtgtcattggtgaaggccttgggattcgaggcagctgagtcctcactgaccaaggatgcccttgtgcttactccagcctccttgtggaaacccagctctcctgtctcccagtgaagacttggatggcagccatcagggaaggctgggtcccagctgggagtatgggtgtgagctctatagaccatccctctctgcaatcaataaacacttgcctgtgatgcctgcaaaaaaa

SEQ ID NO: 291770 - DNA, 1000 bp, Homo Sapiens
aggagtctgtctcactgtttatccaaacaccaggaaaggtcctccctcaaaaaagcatatctccacttctctctagctgtatctaacccaccgtgtgaatgaactgggagaggggcatgctccccagctgtgtgtagtcgtgacttctcaacaatctagcaccatgtcggacacgttccccatccaccctcctagctctgctctcagagctaggcacatgggcacaggtcccctcccgtctgtcctctcccagcaactgtgccctggagggctccacatggcccccgtgtctctcgggcaccacccatatagcagtcccagagggcccatctgtaaagatcgagcttgtgtgtggtgtcgtggtcacatctcccgcttccccccatcctgtgtctgggcacagttcacatcaggacagcgtccattgtgctctcagtctgcctcaggtgtgtgcctggagggggcctggactggcatggatccagtgtgcagaagagccagcagggaaccggaagctctgatgtcaaggccagagcagttgagaatgggacccagagtagatgctgacctgggcactccaccattccggggcaccacagagatgccagcaggatgccactttgccagcccgacacacggacctttgtaaagaacagcaacaggcaggagaggcagcgtgtgaccagattgtgtcccgtcattgggtggcatatgttaactagctgccaaacaacttcaacccgtgtaattcatgtacatttgcaacagccagcccggtacagcctgtgtgacttctctgtatgtgtgtgtgtgtcgtgaccagcctaagtagttagcataactcaagatgctgatgtgcagtcacccatcagagaaaataaaaatggaaaccacgttcacagcattttaaaagtttttactttttttcttgattatggaagtaatccatgtacatagtaaatcattttaaaagtacaaaaagtatgaagaagtttgtctt

SEQ ID NO: 291771 - DNA, 1000 bp, Homo Sapiens
ttgaagatgcagagcctattttctcatgcagtgcaggctcctggaagagacctaatgtaacaaaacgataatatttcacatcaatggtgacatgtctttatcttacgaaatgcggggaacaagcagagttctcttgtggagtgtcttatcacctcttatcctcatgcaaatttctgccatagagattttctcccaaactttgagaaggtcacctctgtcaggcctctgagcccaagctaagccatcctatcccctgtgacctgcacgtacacatccagatggcctgaagcaactgaagattcacaaaagaagtgaaaatagccttaactgatgacattccaccactgtgacttgttcccgccccactaactgataccatatattctgccccgcccaagaaggtactttgtaatattcctcgcccccttaccccccaccgccctgcccccgctcgcccgccttaagaaggtactttgtaatattctcccccacaactttagaaggtactttgtaatattctcccccacaactttagaaggtactttgtaatattctcccccacaactttagaaggtactttgtaatattctcccctccccttaagaaggtactttgtaatattctcccccacaactttagaaggtactttgtaatattctcccctccccttaagaaggtacttcgaggctgggtgcggtggctcatgtctgtaatcccagcactctggggggccgaggtgggtggatcacgaggtcaggagatcgagaccatcctggctaatgtggtgaaaccccgtctctactaaaaaaatacaaaacaattggctgggcatggtggcgggtgcctgtggtcccagccacttgggagtctgaggcaggagaatggcgtgaacccaggaggcagagcttgcagtgagctgaggtcgcgccactgcactccagcctgggcgatagagcaagactctgtctcaaaaaaaaaaaaaaaaaaaaaaaaaaaaaaa

SEQ ID NO: 291772 - DNA, 1000 bp, Homo Sapiens; identical to SEQ ID NO: 223735

SEQ ID NO: 291773 - DNA, 1000 bp, Homo Sapiens; identical to SEQ ID NO: 223736

SEQ ID NO: 291774 - DNA, 1000 bp, Homo Sapiens; identical to SEQ ID NO: 223738

SEQ ID NO: 291775 - DNA, 1000 bp, Homo Sapiens; identical to SEQ ID NO: 118364

SEQ ID NO: 291776 - DNA, 1000 bp, Homo Sapiens; identical to SEQ ID NO: 223739

SEQ ID NO: 291777 - DNA, 1000 bp, Homo Sapiens; identical to SEQ ID NO: 223740

SEQ ID NO: 291778 - DNA, 1000 bp, Homo Sapiens
cttctatacaagtactcactccctttttatcaaaagttaattttaatctcacagtctacattgtgctacattatccagcttctttggaacaatgtgtgctctgtatggttttttttggtatgacaactaattaagcaactgacattgaactgagaattctacaaactataaaacattaatttttgaaggtaatttagttttgtggctgggcattcagtgaagtcttaggacttctttgcagacaactgactgggtatatataggaatgaatctggctttagggttaaatcatttaaggtccttttataggcaggcactagtaactaaaactgaaaactaagtaagtttatttttgaggaatgttgttaaaaatgtctttaggaagtcactaaaacttaattggaagaaaaaatcatgatgcttatacaataaatatgaataaatgttatataaggaaactcacctatttgaaatcatggctatattgtttttattttctagattccaaaaatacaaacactagttgttccagcattgtactttgataagtctgtacattgacgtgtatggactaaatccagggtaaaatcaatgttacaaaatttaagggtatgttaactaaaggatagcatttctaagatattttgaatattagggtcatttggcacttctcagcaagtaggatacttctcatgtttttgaaattatatgaatatggaaaaaaatggcttaagaccagcgtctctgtatgacattgtgtggttgaccctctgagataactgttttcatctacagaattgcatttttgcttttaaagaggtcttataatggaactaggaatcaccgttttgagagaacctgcatatataccagtcattatctgtttggtccttatacagttttaacttacttagatttattctagttaagccataagttcaacgtgtaaacttgttttcattaaagaatttttctatcaaaaaaaaaaaaaaaaaaaaaa

SEQ ID NO: 291779 - DNA, 1000 bp, Homo Sapiens
tgggcctccatccagatgtttttccaagatcatttttaaaattcatttgtcttctgtttccagataacatactttccgttctataggaatcttcactgccaatcatagtatctaccagtggctttcttagactattcactccaaagctgggactgatgtcctgccagtagagaatctacagaaataatttgaatgaattaaaaccaaatcttgatagcaggagacagcttcctgatctagatgtacaattagagtttaggttggaaattactttaaaatgtgttttttggggatgtcttcaatctctgtgtaaatacccacatgcttatgcattgtaaaccaagtgtgtattcctgtgtatgaatttgtagaactgatttctgcttcaagagaagctgcacctttaattttataaggtcccctccacctgtaaccctataaatgtctgtaaataaaacactaaaatttgtagtgataggatcaatttgggaatatctgctgagagaccaaaaagttcatttttttaagtaccttggttaaagagtaaagattattcctcttattttttaaagaagaatgcactttaacaaacatagagctgcatgggcaattcaaacaaatctgtgaagtgcagtacccattcagaaatcacacttcctgaaaaccgttcaaaagcagagtccagacgggctgttgatctcactgcctgtaggttgaagctcagattctgatcaattttgagaggagcagggctgcttcaaaagagcaatgtgaatacagtcagaagcttcagactggtctgtaaaaatggcgggtcccgtatttaccactaactagcaaaactgacagaaaaactcacagagaaaaaatgtaagaatccttcctgctggtgtgcactccttacaatagacttttgcaaatggagttttacagtctatatttaaaaaaaattgtatgtttgtaacaaataaagtatgcagaaaagtgaatgacaaaaaaa

SEQ ID NO: 291780 - DNA, 1000 bp, Homo Sapiens; identical to SEQ ID NO: 224078

SEQ ID NO: 291781 - DNA, 1000 bp, Homo Sapiens
aacgtggaaactgtagaatataaaaatctaaaattcactatttgggatgtaggtggaaaacacaaattaagaccattgtggaaacattattacctcaatactcaagctgttgtgtttgttgtagatagcagtcatagagacagaattagtgaagcacacagcgaacttgcaaagttgttaacggaaaaagaactccgagatgctctgctcctgatttttgctaacaaacaggatgttgctggagcactgtcagtagaagaaatcactgaactactcagtctccataaattatgctgtggccgtagctgtttttcagataatatgtgaccaatatactgggaaagaggtagtcacagagaaagggtaaaaggtcatgctgttacaggtgtagtttgtgtgcataaataatacttccgaattaaattatttaatatttgactgatttcaataactgtgaaaaataaaaaaggtgttgtattgcttgtgagaacttgaactgtttactagttaattgaagaaaaagtgtaacactaaggtgaacttgcttcccttttcactaattttgctaaactttgtaatgcacattcttagcatataactgaacacagttgaaaaattgtgcctgattataatgtatgtataatggtaggtgtttgtgtgtgattcatttttaaagaaatatttttctcaagctcctattactatttgtggttgtattatttcactaatcattagttaagactgtgctagtcttccctgggaaactaagaagagagcttttttatatacagtatattagaattttcctagtagctgaatttctgtattaggtctaaatattactgtatgttatataaagcaggtatgtcaagtgtatagccgtagtctataattcaggaatgctttataaccatcagaagccattatttgcactacatatatgataagtatagacagcaataaaatgttaagatcatttttaagaaaaaaaaaaaaaaaa

SEQ ID NO: 291782 - DNA, 1000 bp, Homo Sapiens
gccatttctcctgaccttgtcaagaagatccgtgatttccacaggaaaatactcaccctcccagagatgatgaggatgttctcagaaaacttggcgcatcatctggaaatagattcaggggtcatcactctggaccctcagaccgccagccggagcctggttctctcggaagacaggaagtcagtgaggtacacccggcagaagaagagcctgccagacagccccctgcgcttcgacggcctcccggcggttctgggcttcccgggcttctcctccgggcgccaccgctggcaggttgacctgcagctgggcgacggcggcggctgcacggtgggggtggccggggagggggtgaggaggaagggagagatgggactcagcgccgaggacggcgtctgggccgtgatcatctcgcaccagcagtgctgggccagcacctccccgggcaccgacctgccgctgagcgagatcccgcgcggcgtgagagtcgccctggactacgaggcggggcaggtgaccctccacaacgcccagacccaggagcccatcttcaccttcactgcctctttctccggcaaagtcttccctttctttgccgtctggaaaaaaggttcctgccttacgctgaaaggctgaagtggggcgcgcgaagggcggcgaagcggagacggcggctctccgggatccagctccgcccctggccagtgtgcggcccgggggctccctgtgcccgcgtgaggcgagagaacaggggacttgagtctcgaacagcggttgtttttactttatttatcttaggccctcagctccctgacgtcctgagcctccctgtgacgctctggccttctctgcacctcagagtgcagaaccacagacggcttcggctgtgcctagggcaacagccaacctaggagccagcgggctttcggggaaaaaaaagaaaaagacatctaaaataaaatgtttaaactgtttcaaaataaaaaaaaaaaaaaaaaaa

SEQ ID NO: 291783 - DNA, 1000 bp, Homo Sapiens; identical to SEQ ID NO: 118366

SEQ ID NO: 291784 - DNA, 1000 bp, Homo Sapiens
gccattttaagtgattttgtttgccctcttctataatattcctacttcccataataatgactgatttatttgtaattcaggtatttatttttcgtgaaatggaattatgtttatttttatgggatttgggtaaattttaaattgtctagaaaactgaaatttcagttgtcagttgtggaattcagtttttcaattgtggaaatttcctgccaccccaacagtatttttgtgtgttaattaattttgcaaaatgagaatcatggtgtgacactcatctaatttatcttgttgtgatgttatggtcataataaggagaaagagggtttaatttttcttgtatttggtttcctggtggtatcatagtgtaattttagtatttgaaaatcagtgtgattccttaatggccaactgaagattgaattgccgctaacaaccatatcgtgttagtgaattttcaatatggaccaggaaggcatatgtattttgaacttgagtgaaaaggttgaagttacagacttttgcatagatggtttgtcaatttaaaattccagaatttattattgccatattttcacatgctgcttatacaagattattattgagtagtaactgcttccctgtctatgtagaagtgcctgtggttttatttattgttcagatcaaagaccaaaacattttcttaaatatattttatgtaatattttatttgtatacagtgttgttgatgaaatatttaactagagcatgatattttaaatgttaaggtgtaacatatgttaaataaaactgttatttttgaattttaaaatttgttttttgggggtatgaactactagagtttaaaattctgccaaactattacttatatgtactattgtgtaacatactttcttgaaatatttttgtttatagaattgaaggttcttatcagatgggatactggggactataaacaatggaaataaagccactgtatttttaaaaaaaaaaaaaaaaaaaa

SEQ ID NO: 291785 - DNA, 1000 bp, Homo Sapiens
gaactccaaaaaatgaaggcaattcagagagagaagagcaataaactggaggagaaaaaaagacttcaagaaaaccttagaagagaagcatttagagagcatcagcaatacaaaaccgctgagttcttgagcaaactgaacacagaatcgccagacagaagtgcctgtcaaagtgctgtttgtggcccacaatcctcaacatgggccagaagctgggcttacagagattctctaaaggcagaagaaaacagaaaattgcaaaagatgaaggatgaacaacatcaaaagagtgaattactggaactgaaacggcagcagcaagagcaagaaagagccaaaatccaccagactgaacacaggagggtaaataatgcttttctggaccgactccaaggcaaaagtcaaccaggtggcctcgagcaatctggaggctgttggaatatgaatagcggtaacagctggggtatatgagaaaatattgactcctatctggccttcatcaactgacctcgaaaagcctcatgagatgctttttcttaatgtgattttgttcagcctcactgtttttaccttaatttcaactgcccacacacttgaccgtgcagtcaggagtgactggcttctccttgtcctcatttatgcatgtttggaggagctgattcctgaactcatatttaatctctactgccagggaaatgctacattatttttctaattggaagtataattagagtgatgttggtagggtagaaaaagagggagtcacttgatgctttcaggttaatcagagctatgggtgctacaggcttgtctttctaagtgacatattcttatctaattctcagatcaggttttgaaagctttgggggtctttttagattttaatccctactttctttatggtacaaatatgtacaaaagaaaaaggtcttatattcttttacacaaatttataaataaattttgaactccttctgtaaaaaaaaaaaaaaaaaaaaaa

SEQ ID NO: 291786 - DNA, 1000 bp, Homo Sapiens
tgaccggatagacgacgtgctgaaggggatgggggagaagccgccgtccggagtgtagacgcgccggctcgggcggcgggctccgggcccagcctcgcagcggccaggagcgcgggccggcgatgcggctgccggcgcccccccgccccggcccaggcgcccgcgggcgggggctgcagggccgtgccgccgccgccgccaggcactccggagctgtccgcttcagcaccacggcggccgcggtagcggcggcgcggacccgcccggaacccgccgccgcgctcatgcactttaaaacctcgggccgcagccccaccccgcacaccggaacggacacggagacccgcggcccccagcccccggcccgccccctcccgcacggctcccctgccccgcccccctccggccagtctggtctgcagaccgggcggccgccggtgtcggaccgcgcgcggccagggatgtttggctgcgtacttgcatgagctttccacccacttgagcccagtcctccgggccgttcctcgcccccacccctgtctggcgtgaccccagcctcagcctctttctaagggacttcctcagcacatttgtatttttatatccgactctttgtttactggctctgctcatggttcctgccctcccctcagtctcggccacgctcttctgcgcctggcagataggatgggtgttgaggctgggatgagacaagcccccgacacggttaccaaccacatggccagtctgcccaggcctgaccccaggaggctttctggcagaccccttctccccaaggtatcatcaccttccaagggcccagatccgattttaccttggacccctgcgtcttgcccctgggaacccaaatggggactgctctgaacctttggatgacatctgtggccccggagatgttctcaacccaggggtgcccttcgtaaatgttcctccatcctcactgtaccaggagtgtgtgaataaacacagaccccctctg

SEQ ID NO: 291787 - DNA, 1000 bp, Homo Sapiens; identical to SEQ ID NO: 118369

SEQ ID NO: 291788 - DNA, 1000 bp, Homo Sapiens; identical to SEQ ID NO: 223742

SEQ ID NO: 291789 - DNA, 1000 bp, Homo Sapiens; identical to SEQ ID NO: 118371

SEQ ID NO: 291790 - DNA, 1000 bp, Homo Sapiens; identical to SEQ ID NO: 118372

SEQ ID NO: 291791 - DNA, 1000 bp, Homo Sapiens; identical to SEQ ID NO: 287342

SEQ ID NO: 291792 - DNA, 794 bp, Homo Sapiens; identical to SEQ ID NO: 118373

SEQ ID NO: 291793 - DNA, 1000 bp, Homo Sapiens
gccttctatcttggatggtttcactgccatcagccatgctgatatattagaaatggcatccctatctacttactttaatgcttaaaattatacataaaatgctttatttagaaaacctacatgatacagtggtgtcagccttgccatgtatcagtttcacttgaaatttgagaccaattaaatttcaactgtttagggtggagaaagaggtactggaaaacatgcagatgaggatatcttttatgtgcaacagtatcctttgcatgggaggagagttactcttgaaaggcaggcagcttaagtggacaatgttttgtatatagttgagaattttacgacacttttaaaaattgtgtaattgttaaatgtccagttttgctctgttttgcctgaagttttagtatttgttttctaggtggacctctgaaaaccaaaccagtacctggggaggttagatgtgtgtttcaggcttggagtgtatgagtggttttgcttgtattttcctccagagattttgaactttaataattgcgtgtgtgttttttttttttttaagtggctttgtttttttttctcaagtaaaattgtgaacatatttcctttataggggcagggcatgagttagggagactgaagagtattgtagactgtacatgtgccttcttaatgtgtttctcgacacattttttttcagtaacttgaaaattcaaaagggacatttggttaggttactgtacatcaatctatgcataaatggcagcttgttttcttgagccacggtctaaattttgtttttatagaaattttttatactgattggttcatagatggtcagttttgtacacagactgaacaatacagcactttgccaaaaatgagtgtagcattgtttaaacattgtgtgttaacacctgttctttgtaattgggttgtggtgcattttgcactacctggagttacagttttcaatctgtcagtaaataaagtgtcctttaacttc

SEQ ID NO: 291794 - DNA, 1000 bp, Homo Sapiens; identical to SEQ ID NO: 223744

SEQ ID NO: 291795 - DNA, 1000 bp, Homo Sapiens
aacggcgttggattcccaggcatgatgctgctttgcgagggcctgcggcatccccagtgcaggctgcagatgattcagttgaggaagtgtcagctggagtccggggcttgtcaggagatggcttctgtgctcggcaccaacccacatctggttgagttggacctgacaggaaatgcactggaggatttgggcctgaggttactatgccagggactgaggcacccagtctgcagactacggactttgtggctgaagatctgccgcctcactgctgctgcctgtgacgagctggcctcaactctcagtgtgaaccagagcctgagagagctggacctgagcctgaatgagctgggggacctcggggtgctgctgctgtgtgagggcctcaggcatcccacgtgcaagctccagaccctgcggctggatagctgtggcctcacagccaaggcttgtgagaatctttacttcaccctggggatcaaccagaccttgaccgacctttacctgaccaacaacgccctaggggacacaggtgtccgactgctttgcaagcggctgagccatcctggctgcaaactccgagtcctctggttatttgggatggacctgaataaaatgacccacagtaggttggcagcgcttcgagtaacaaaaccttatttggacattggctgctgaatggtcctatctgctggctctcccctgagatctggacagaggaagatgggagggtgctcatcacccccccagcataatgatcagcctccttcctagagacagactcatgcagattgagatcaaaagtccctctgcttgggatcaaattaatgtttgacagagctggccaggcgtggtggctcatgtatgtaatcctagcacttcgagaggccgaggcaggtggatcacgaggtcaggagtttgagattagcctggccaagatggtgaaaccctgtctctactaaaaataaaaaaaaattagccaggaaaaaaaaaaaaaaaa

SEQ ID NO: 291796 - DNA, 1000 bp, Homo Sapiens
ctcccccatttagattatttattaacatattttaaaaatcagatgagttctataaataatttagagaagtgagagtatttatttttggcatgtttggcccaccacacagactctgtgtgtgtatgtgtgtgtttatatgtgtatgtgtgtgacagaaaaatctgtagagaagaggcacatctatggctactgttcaaatacataaagataaatttattttcacacagtccacaaggggtatatcttgtagttttcagaaaagcctttggaaatctggatcagaaaatagataccatggtttgtgcaattatgtagtaaaaaaggcaaatcttttcacctctggctattcctgagaccccaggaagtcaggaaaagcctttcagctcacccatggctgctgtgactcctaccagggctttcttggctttggcgaaggtcagtgtacagacattccatggtaccagagtgctcagaaactcaagataggatatgcctcaccctcagctactccttgttttaaagttcagctctttgagtaacttcttcaatttctttcaggacacttgggttgaattcagtaagtttcctctgaagcaccctgaagggtgccatccttacagagctaagtggagacgtttccagatcagcccaagtttactatagagactggcccaggcactgaatgtctaggacatgctgtggatgaagataaagatggtggaataggttttatcacatctcttatttctcttttccccttactctctaccatttcctttatgtggggaaacattttaaggtaataaataggttacttaccatcatatgttcatatagatgaaactaatttttggcttaagtcagaacaactggccaaaattgaagtcatatttgaggggggaaatggcatacgcaatattatattatattggatatttatgttcacacaggaatttggtttactgctttgtaaataaaaggaaaaactccgggtatatgt

SEQ ID NO: 291797 - DNA, 1000 bp, Homo Sapiens
tagtcatgcccattgggtctttcttccctgatttcaagccctctgaaacagtttttaaaatagtattttggctcggatatctaaacagctgcatcaaccccatcatatacccatgctccagccaagagttcaaaaaggcctttcagaatgtcttgagaatccagtgtctccgcagaaagcagtcttccaaacatgccctgggctacaccctgcacccgcccagccaggccgtggaagggcaacacaaggacatggtgcgcatccccgtgggatcaagagagaccttctacaggatctccaagacggatggcgtttgtgaatggaaatttttctcttccatgccccgtggatctgccaggattacagtgtccaaagaccaatcctcctgtaccacagcccggacgaagtctcgctctgtcaccaggctggagtgcagtggcatgatcttggctcactgcaacctccgcctcccgggttcaagagattctcctgcctcagcctcccaagcagctgggactacagggatgtgccaccaggccgacgccaccaggcccagctaatttttgtatttttagtagagacggggtttcaccatgttggccaggatgatctcgatctcttgacctcatgatctgcctgcctcagcctcccaaagtgctgggattacaggcgtgagccaccgtgcccggcccaactattttttttttttatcttttttaacagtgcaatcctttctgtggatgaaatcttgctcagaagctcaatatgcaaaagaaagaaaaacagcagggctggacggatgttgggagtggggtaagaccccaaccactcagaaccacccccccaacacacacacacattctctccatggtgactggtgaggggcctctagagggtacatagtacaccatggagcacggtttaagcaccactggactacacattcttctgtggcagttatcttaccttcccatagacacccagcccatagccattggtt

SEQ ID NO: 291798 - DNA, 1000 bp, Homo Sapiens
cgctgggctccttctacctgcctctggccatcatcctggtcatgtactgccgcgtctacgtggtggccaagagggagagccggggcctcaagtctggcctcaagaccgacaagtcggactcggagcaagtgacgctccgcatccatcggaaaaacgccccggcaggaggcagcgggatggccagcgccaagaccaagacgcacttctcagtgaggctcctcaagttctcccgggagaagaaagcggccaaaacgctgggcatcgtggtcggctgcttcgtcctctgctggctgccttttttcttagtcatgcccattgggtctttcttccctgatttcaagccctctgaaacagtttttaaaatagtattttggctcggatatctaaacagctgcatcaaccccatcatatacccatgctccagccaagagttcaaaaaggcctttcagaatgtcttgagaatccagtgtctctgcagaaagcagtcttccaaacatgccctgggctacaccctgcacccgcccagccaggccgtggaagggcaacacaaggacatggtgcgcatccccgtgggatcaagagagaccttctacaggatctccaagacggatggcgtttgtgaatggaaatttttctcttccatgccccgtggatctgccaggattacagtgtccaaagaccaatcctcctgtaccacagcccggaggggaatggattgtagatatttcaccaagaattgcagagagcatatcaagcatgtgaattttatgatgccaccgtggagaaagggtctagaatgctgatctccaggtagctggagacctaggcagtctgcaaatgaggagtcagctggaagctatggctatgtattatgtgacatcgcttgttcctaagtgaaaactggatatcccaaccttctggaccagtaggtttcatggttacgacctggtagtgagaacattttaggaactatttggttgggcaggcaatttttcactct

SEQ ID NO: 291799 - DNA, 1000 bp, Homo Sapiens; identical to SEQ ID NO: 223747

SEQ ID NO: 291800 - DNA, 1000 bp, Homo Sapiens; identical to SEQ ID NO: 118376

SEQ ID NO: 291801 - DNA, 1000 bp, Homo Sapiens; identical to SEQ ID NO: 118377

SEQ ID NO: 291802 - DNA, 1000 bp, Homo Sapiens
ttgagcgagccaaggctgggtggtagatgaccatctcttgtccaacaggtcccagagcagtggatatgtctggtcctcctagtagcacagaggtgtgttctggtgtggtggcagggacttagggaatcctaccactctgctggatttggaaccccctaggctgacgcggacgtatgcagaggctctcaaggccaggccccacagggaggtggaggggctccggccgccacagcctgaattcatgaacctggcaggcactttgccatagctcatctgaaaacagatattatgcttcccacaacctctcctgggcccaggtgtggctgagcaccagggatggagccacacataagggacaaatgagtgcacggtcctacctagtctttcctcacctcctgaactcacacaacaatgccagtctcccactggaggctgtatcccctcagaggagccaaggaatgtcttcccctgagatgccaccactattaatttccccatatgcttcaaccacccccttgctcaaaaaaccaatacccacacttaccttaatacaaacatcccagcaacagcacatggcaggccattgctgagggcacaggtgctttattggagaggggatgtgggcaggggataaggaaggttcccccattccaggaggatgggaacagtcctggctgcccctgacagtggggatatgcaaggggctctggccaggccacagtccaaatgggaagacaccagtcagtcacaaaagtcgggagcgccacacaaacctggctataaggcccaggaaccatataggagcctgagacaggtcccctgcacattcatcattaaactatacaggatgaggctgtacatgagttaattacaaaagagtcatatttacaaaaatctgtacacacatttgaaaaactcacaaaattgtcatctatgtatcacaagttgctagaccaaaatattaaaaatgggataaaattataaaaaaaaaaaaaaaaaa

SEQ ID NO: 291803 - DNA, 1000 bp, Homo Sapiens; identical to SEQ ID NO: 223749

SEQ ID NO: 291804 - DNA, 1000 bp, Homo Sapiens
gtggtggcagcagcagtggcagcagcagtggcggcagcagtggcggcagcagtggtggcagcagtggcaacagtggtggcagcagaggtgacagcggcagtgagtcctcctggggatccagcaccggctcctcctccggcaaccacggtgggagcggcggaggaaatggacataaacccgggtgtgaaaagccagggaatgaagcccgcgggagcggggaatctgggattcagaactctgagacgtctcctgggatgtttaactttgacactttctggaagaattttaaatccaagctgggtttcatcaactgggatgccataaacaagaaccaggtcccgccccccagcacccgagccctcctctacttcagccgactctgggaggatttcaaacagaacactcctttcctcaactggaaagcaattattgagggtgcggacgcgtcatcactgcagaaacgtgcaggcagagccgatcagaactacaattacaaccagcatgcgtatcccactgcctatggtgggaagtactcagtcaagacccctgcaaaggggggagtctcaccttcttcctcggcttcccgggtgcaacctggcctgctgcagtgggtgaagttttggtaggcaatttcttgcaaccaccaccgaggccccgaaaagcactggtcgtcagggagctcctccccttggcccccagcctgtgccagccctggcccggctgccacacctctgtttcctaggctggggacccagcttgtctctccttgtttcttcccactgcactgtggtgcttcagtggccaccagcctcgtcacatacaccagcatctttctgtacctcctccctttggtgacctgaagtcactgtgacagttctccaggaaggaggagcttcctacttttgagtttctctgtggaaataaaacatgaatcttgtttccctaaaaaaaaaaaaaaaaaaaaaaaaaaaaaaaaaaaaaaaaaaaaaaaaaaaaaaaa

SEQ ID NO: 291805 - DNA, 1000 bp, Homo Sapiens; identical to SEQ ID NO: 223750

SEQ ID NO: 291806 - DNA, 1000 bp, Homo Sapiens
gtggctcatggaatgttttcttatcctttgaacactcctcatttcagaagctttgcttctgttgcaaccaaacatgacacttagcgtgctgagcaggaaggacaaggaaagagtaattcgcagactgttattacaggcccctccaggggaatttgtaaatgcctttgatgatctctgtctgcttatccgtgatgaaaaacttatgcaccaccaaggtgagtgtgcaggccaccaacactgccaaaaatattctgtaccactctgcatcgatggaaatccagtactcttgtctcaccacaatgtaatgggcgactaccgattttttgaccatcaaagcaaactttctttcaaatatgacctgcttcaaaatcagctgaaagacatccaaagtcatggtatcattcagaatgaggcagaatacctgagagttgttcttctgtgcgccttaaaactgtatgtgaatgaccactatccaaaaggaaattgcaacatgctgagaaaaactgtcaaaagtaaggagtacttgatagcttgcattgaagatcacaactatgaaacaggagagtgctggaacggactttggaaatctaaatggattttccaagttaacccatttctaacccaagtaacgggaagaatatttgtgcaagctcacttcttcaggtgtgtcaaccttcatattgaaatatccaaggacctgaaagaaagcttggaaatagttaaccaagctcaactggctctaagttttgcaaggcttgtggaagagcaagagaacaaatttcaagctgcagtcttggaagaattacaggagttatccaatgaagccctgagaaaaattctacgaagggatcttccagtgacccgcactcttattgactggcacaggatactctctgacttgaatctggtgatgtatcctaaattaggatatgtcatttattcaagaagtgtgttgtgcaactggataatataaagaattgctcctggtaactaaaaaaaa

SEQ ID NO: 291807 - DNA, 1000 bp, Homo Sapiens
ccgactcaacatatcctatcctcctcagaacttgaccatgactgtcttccaaggagatggcacagcatccacaaccttgaggaatggctcggccctttcagtcctggagggccagtccctgcaccttgtctgtgctgtcgacagcaatccccctgccaggctgagctggacctgggggagcctgaccctgagcccctcacagtcctcgaaccttggggtgctggagctgcctcgagtgcatgtgaaggatgaaggggaattcacctgccgagctcagaaccctctaggctcccagcacatttccctgagcctctccctgcaaaacgagtacacaggcaaaatgaggcctatatcaggagtgacgctaggggcattcgggggagctggagccacagccctggtcttcctgtacttctgcatcatcttcgttgtagtgaggtcctgcaggaagaaatcggcaaggccagcagtgggcgtgggggatacaggcatggaggacgcaaacgctgtcaggggctcagcctctcagggacccctgattgaatccccggcagatgacagccccccacaccatgctccgccagccctggccaccccctccccagaggaaggagagatccagtatgcatccctcagcttccacaaagcgaggcctcagtacccacaggaacaggaggccatcggctatgagtactccgagatcaacatccccaagtgagaaactgcagagactcaggcctgtttgagggctcacgacccctgcagcaaagaagcccgagactgattcctttagaattaacagccctccatgctgtgcaacaggacatcagaacttattcctcttgtcaaactgaaaatgcgtgcctgatgaccaaactctccctttctccatccaatcggtccacactccccgcccccggcctctggtacccaccattctcttctctacttctctgaggtcgactattttaggttccaaatatagtgagatcgtagagtg

SEQ ID NO: 291808 - DNA, 1000 bp, Homo Sapiens
aataagatttgggtgggaggaggaacattccttttgctattttgagctgagacaatataaatattcaaactgtgccatgcataaagcattgaattctcagggcacctcttcttccccttaccccttttaaggccatcccctccattaataataatccaggtagttgtgaaaatcgtgcttctatctgatcccttcttagtttggcttttcatcccatcagaacaagtaaacgtaggcgccacagctcttgtgagtactgtctccctcacggtgaatgagcctcctggtgtttcgtccaagaaaagaaagggtgtcactggaaccacagccctttttcattttataaactgcctcttcatgttgcctgctcaagtttccacctagaattgctatcactgtggctctttctaaaaatctttctatttaactggttcactgaaattagtcatagaaaacttgtgatttggtgaagaggcattccttgtaataaccaaatgacttgggatggtgtgcatagcaagggcagtgttacacttatgaggactgtctctagcatccaggaagtctctgggtctgagggatggaaagttcttcctgctatgaatgagagtggactcttcccctcacccccaactgaaaccacaaacaaccagaatcttctggaattctgacttagagtcgttgttatagaagaccttgttgctatggaacatgaaactgtgtgtcagatggagagatccccttaacctaagagccttaaatagccctgaaagtacactgggacggtttgcgatggaattaaaattggaagtgaatatttttaggtgctcttgaagctttctggggactcaaaattatcaaaagtcagggacagtccggaggaagagcgtctgcaaaactgggttcctagaagtatagacggacttagctttttgtagaatttggtgaggagcagcgcctcgtgagagcagaatggcctggcgtggccagtgcttcccgg

SEQ ID NO: 291809 - DNA, 1000 bp, Homo Sapiens
agattccatctcaagcgagcatatgaactgtgtgacaacaggcagacagtacctctgtgtctatgagaaagcggggagagcaacaccccagcttctagcagctctacagctgcctggacctgcaggccctcctaggcccacttcctccccagcacagtgtgtgttcccgggcgtgtgtggctctgggtccagctctgttcagggtgggactccaggtgaattactgaacctctgaggtgtacccccaaccccaaactttcaccaaaagcaataaagaggaactctagaactggagccaggactaagtgagaaaaactgcttataagtgcttaataaatactagttatttacaacttttgctcaagccgagggcagaggcctttgtacgcagctgccgaactctgactctagttctgcggaagaaaaggatgcggtatttgcttttgccatgatccctttccatttgattggcaggttaaataacatggtttttgaagtcacatacttaatattcttcctaaaaaccacccaaacactagatgtgtgtgtgcacacacacagaaaccacgaggtagtttaaatcaccattaaaaatcaacgctttctctgattctgtgtcacagagtggtggccagtggctacacaatagcgatttttaaatgattggttaagtgaaaaccagaactcaaaatattccaggagagaagataacatttacaagtaaacagtaagtgcaattgtattttaatttcttggtctccgaaaactcagctgtgactgctttccattaacagttccagctctatgtgtttcctctaacgctaaaggcacagcccccgggaatctactgcttcctaagagtctccatggagtctattttacaacctcctttccctccatgcttccgcggaggagtctatactatctctatatacacattttaaacattattcttcatttgaaattccttcaataaaaacacagtcaccattaaaaaaaa

SEQ ID NO: 291810 - DNA, 1000 bp, Homo Sapiens; identical to SEQ ID NO: 284961

SEQ ID NO: 291811 - DNA, 1000 bp, Homo Sapiens; identical to SEQ ID NO: 223752

SEQ ID NO: 291812 - DNA, 1000 bp, Homo Sapiens
caaaactgttgtcaccattgcacaattttgtcctaatatatacatagaaactttgtggggcatgttaagttacagtttgcacaagttcatctcatttgtattccattgattttttttttcttctaaacattttttcttcaaacagtatataactttttttaggggatttttttttagacagcaaaaactatctgaagatttccatttgtcaaaaagtaatgatttcttgataattgtgtagtaatgttttttagaacccagcagttaccttaaagctgaatttatatttagtaacttctgtgttaatactggatagcatgaattctgcattgagaaactgaatagctgtcataaaatgaaactttctttctaaagaaagatactcacatgagttcttgaagaatagtcataactagattaagatctgtgttttagtttaatagtttgaagtgcctgtttgggataatgataggtaatttagatgaatttaggggaaaaaaaagttatctgcagatatgttgagggcccatctctccccccacacccccacagagctaactgggttacagtgttttatccgaaagtttccaattccactgtcttgtgttttcatgttgaaaatacttttgcatttttcctttgagtgccaatttcttactagtactatttcttaatgtaacatgtttacctggaatgtattttaactatttttgtatagtgtaaactgaaacatgcacattttgtacattgtgctttcttttgtgggacatatgcagtgtgatccagttgttttccatcatttggttgcgctgacctaggaatgttggtcatatcaaacattaaaaatgaccactcttttaattgaaattaacttttaaatgtttataggagtatgtgctgtgaagtgatctaaaatttgtaatatttttgtcatgaactgtactactcctaattattgtaatgtaataaaaatagttacagtgacaaaaaaaaaaaaaaa

SEQ ID NO: 291813 - DNA, 1000 bp, Homo Sapiens; identical to SEQ ID NO: 118379

SEQ ID NO: 291814 - DNA, 948 bp, Homo Sapiens
ccattgactaactatggaagattataccaaaatagagaaaattggagaaggtacctatggagttgtgtataagggtagacacaaaactacaggtcaagtggtagccatgaaaaaaatcagactagaaagtgaagaggaaggggttcctagtactgcaattcgggaaatttctctattaaaggaacttcgtcatccaaatatagtcagtcttcaggatgtgcttatgcaggattccaggttatatctcatctttgagtttctttccatggatctgaagaaatacttggattctatccctcctggtcagtacatggattcttcacttgttaaggtagtaacactctggtacagatctccagaagtattgctggggtcagctcgttactcaactccagttgacatttggagtataggcaccatatttgctgaactagcaactaagaaaccacttttccatggggattcagaaattgatcaactcttcaggattttcagagctttgggcactcccaataatgaagtgtggccagaagtggaatctttacaggactataagaatacatttcccaaatggaaaccaggaagcctagcatcccatgtcaaaaacttggatgaaaatggcttggatttgctctcgaaaatgttaatctatgatccagccaaacgaatttctggcaaaatggcactgaatcatccatattttaatgatttggacaatcagattaagaagatgtagctttctgacaaaaagtttccatatgttatgtcaacagatagttgtgtttttattgttaactcttgtctatttttgtcttatatatatttctttgttatcaaacttcagctgtacttcgtcttctaatttcaaaaatataacttaaaaatgtaaatattctatatgaatttaaatataattctgtaaatgtgaaaaaaaaaaaaaaaaaaaaa

SEQ ID NO: 291815 - DNA, 1000 bp, Homo Sapiens
ctcagcaatgcgccagagcaaagtctctattatttttctactaaagaaataaggaagtgaatttactttttgggtccagaatgactttctccaagaattataagatgaaaattatatattttgcccagttactaaaatggtacattaaaaattcaattaagagaagagtcacattgagtaaaataaaagactgcagtttgtgggaagaattatttttcacggtgctactaatcctgctgtatcccgggtttttaatataaaggtgttaagcttattttgctttgtaagtaaagaatgtgtatattgtgaacagccttttagctcaaaatgttgagtcatttacatatgacatagcatgaatcactctttacagaaaatgtaggaaaccctagaatacagacagcaatattttatattcatgtttatcaaagtgagaggacttatattcctacatcaagttactactgagagtaaatttattttgagttttatcccgtaagttctgttttgattttttttaaaaaacaaacccttttagtcactttaatcagaattttaaatgttcatgttacataccaaattataatatctaatggagcaatttgtcttttgctatattctccaagattatctcttaagaccatatgccccctgttttaatgtttcttacatcttgtttttactcatttctgactggacaaagttcttccaaacaattctgagaaacaaaaacacacacgcagaattaacaattcttttccctgtgcttcttatgtaagaatcctcctgtggcctctgcttgtacagaactgggaaacaacacttggttagtctcttttaagttacaaaaagccaattgatgtttcttattctttttaaattttaaatattttgttataaatactcacaggataccttatttccctagctatcatctcctgacttaatgttttttaaacccaccaatataaatttaattaaagatatatgttgtaaggat

SEQ ID NO: 291816 - DNA, 1000 bp, Homo Sapiens
agaccctggagggagctggtggcagcatcaccagtgtggactttgacccctcgggctaccaggttttagcagcaacttacaaccaggctgcccagctctggaaggtgggggaggcacagtccaaggagacactgtctggacacaaggataaggtgacagctgccaaattcaagctaacgaggcaccaggcagtgactgggagccgcgaccggacagtgaaggagtgggacctcggccgtgcctattgctccaggaccatcaatgtcctttcctactgtaatgacgtggtgtgtggggaccatatcatcattagtggccacaatgaccagaagatccggttctgggacagcagggggccccactgcacccaggtcatccctgtgcagggccgggtcacctccctgagcctcagccacgaccaactgcacctgctcagctgttcccgagacaacacactcaaggtcatcgacctgcgtgtcagcaacatccgccaggtgttcagggccgatggcttcaagtgtggttctgactggaccaaagctgtgttcagcccggacagaagctatgcactggcaggctcctgtgatggggccctttacatctgggatgtggacaccgggaaactggagagcagactacagggaccccattgcgctgccgtcaacgccgtggcctggtgctactccgggagccacatggtgagcgtggaccagggcaggaaggttgtgctctggcagtagggccacgacctgcctgcctgggctggagctcttgcccgaagcctgaagcttccttcggcgccatgcaggggttggggttgggactggagctggccttgggatttaatggggaagaaggcctggcaggacctggcctgtttgtttaaaaatgaagtatgggttgggggattacgctagtttttctttgtatttttatctctatctcctcactttttctcccaaagtagaaaaaaatgatatctgaaaaaaaaaaaaaaaaa

SEQ ID NO: 291817 - DNA, 1000 bp, Homo Sapiens; identical to SEQ ID NO: 118380

SEQ ID NO: 291818 - DNA, 1000 bp, Homo Sapiens; identical to SEQ ID NO: 223755

SEQ ID NO: 291819 - DNA, 1000 bp, Homo Sapiens; identical to SEQ ID NO: 223756

SEQ ID NO: 291820 - DNA, 1000 bp, Homo Sapiens; identical to SEQ ID NO: 118382

SEQ ID NO: 291821 - DNA, 1000 bp, Homo Sapiens; identical to SEQ ID NO: 223758

SEQ ID NO: 291822 - DNA, 1000 bp, Homo Sapiens; identical to SEQ ID NO: 118383

SEQ ID NO: 291823 - DNA, 1000 bp, Homo Sapiens; identical to SEQ ID NO: 118384

SEQ ID NO: 291824 - DNA, 1000 bp, Homo Sapiens
agtggaagctgcagagggccgaaacaaaaatgaagttttctaccaatgtccagaccaaatggctcgaaatccagctgctattgacatgtttattataggtgctacttttactgactggtttacctcttatgtcaaaaatgttgtatcaggtggcttccccatcatcagagaccaaattttcagatatgttcacgatccagaatgtgtagcaacaactggggatattactgtgtcagtttccacatcgtttctgccagaacttagctctgtacatccaccccactatttcttcacataccgaatcaggattgaaatgtcaaaagatgcacttcctgagaaggcctgtcagttggacagtcgctattggagaataacaaatgctaagggtgacgtggaagaagttcaaggacctggagtagttggtgaatttccaatcatcagcccaggtcgggtatatgaatacacaagctgtaccacattctctacaacatcaggatacatggaaggatattataccttccattttctttactttaaagacaagatctttaatgttgccattccccgattccatatggcatgtccaacattcagggtgtctatagcccgattggtaagttaaattttcctctagtgctgatttacatgactttgtagggttaacactgcagataagccaggcaaatagttagtttataaatagtgttccagagaaccctagagattttgagaaagtatcttgggggtcatgtgaatttgttgagagaaatggacaagtaaatgaggctccatagtctctaaccagagaatttctgctgttttaaagattcaacttgtttttcactgttcagtggcctaaatgtagattatgagaaataccacattagaccagtagaatcagctttaagactgggaaaacaacttcttacagtgtttttgctcaaacttccaatttaatgtcaaataaacaaatattccataaagatcattataaagaaaa

SEQ ID NO: 291825 - DNA, 1000 bp, Homo Sapiens
ccaggtttttctgtctgaaatacctagtgacccaaagctcttcagacatcataataaactgcgactctgctttaaagattttactaaaaggtgtgaagatgccttaagaaaaaataagagcttaattgggccggatcaaaaggagtatcaaagggaactggagagaaactatcatcgccttaaagaggccctacagccactgatcaacagaaagatccctcagttatacaaggcagtattgcctgtcacctgccacagagattccttcagtcgaatgagccttcgcaaaatggatctctaaactgaatgcacttgttttattcatctgcaaagagccatgtattcaacatcgagtgtgaaaagatctattggaaaacaacatggaatggaattctggaaattattattcattgaagaatgcagtggccaagaaaatatcaaatgtagattgttaacgcttgagaatcatggctatggtttctaatgttctggtaacaagctgttatcttttaagacattttaatgactcaaaggtacactatacatttaccattatttataccatagctaaggttaaaaatttattcactttaagttcgtattttttaatttatattaccatttatagattcattttggaaccattttaaatgtagtaatgcttattttaaaggtactattaaatatgtgaatgtttacactaattttaccgagtgggacttcaaaatttttattattgacaatggcagagaacaattaaagggttgactcaagaactagttccaaacctagcagaataaaaatcatagatagccccaaattaatgagtttggtaactgtttcaaagttattttccatttacatacccaaaacaggaatttagaattgcagaactttacttagtaaaacctttgtgtaaaataatttaaatacggggataactaataccagtgacaacaccttaacttgattaaatcttattacaccaaaaaaaaaaaaa

SEQ ID NO: 291826 - DNA, 1000 bp, Homo Sapiens
gcggacttctgcaatctgcactgtccagcctaggcaggccgccgaccccgcccccatcgctcacggacggaactggggtccagagaggccaggtcacagagcaaggggcaggaacagagagacagagcctgagtaattgaatcatgaacgcaagtgcccactggggactgtggggaagatggcacctggaaatgcaaggtgcggctctatccccaactctgtgtcacactacctgtgacgaccagctcagatctcctttgctttgactctcaagagaggactgatttgcagcatctagctggaggcaggcccaagggtgttagaagggaaacagctgggacagccggctgtcccttcaggctgtgtgaccttgggaaagtcatttggcttctctgtgcctgtttcttcatgcatgcagtggggattccagtaagtaccaactacctcacaggcatggcacggaggcaaaaggaaaaagcagcccgcatcaagcaagccctcctgggccacctgctgatctgacagtccatcgtagtaacaagagtggcagtctgcacaacctagaagtggccagaagggttgagacacgcccctgccctctctcctttgcccctcagtctcacagaggggcttctacaagacaagcagataacgatagaatcttgggcatcttggctttcggattctcagtgtggagggacgtagtaccccacacaccccttcctgtcatccttcctggcccataaagcccactagttggagagtaagtaccctcctggaagcagggagagatgatttgctggtggggctggggaaggcccatccctgagcctctgaaagtgaactccccgaccaggttggggaccagacatgcagagcccctggaagtattctctcaaatggaggcaacagaggtgattgttattttgttttagtttctgtttttcatttttttaaataaaggcattccctgcttttaaaaaaaaaaaaaaaaaaaaaa

SEQ ID NO: 291827 - DNA, 1000 bp, Homo Sapiens; identical to SEQ ID NO: 223760

SEQ ID NO: 291828 - DNA, 1000 bp, Homo Sapiens; identical to SEQ ID NO: 223761

SEQ ID NO: 291829 - DNA, 1000 bp, Homo Sapiens; identical to SEQ ID NO: 118387

SEQ ID NO: 291830 - DNA, 1000 bp, Homo Sapiens
gaggcgcagcgctcagcccaggagaggaaggagcggctgcggcgcgcgctggaagaaaaccgcctgattcccactgagttacgccgagaggctctggccttacaggggtccctggagtttgatgatgctggaggtgaaggtgtgaccagccacgtggatgatgaataccgatgggcaggagtcgaggatcccaaggttatgatcactacctcccgagaccccagttcccgcctcaagatgtttgcaaaggagctgaagctggtgttcccgggcgcccagcgaatgaaccgaggtcgacatgaagtgggggcactggtgcgagcctgcaaagccaacggcgtcaccgatctgctggtcgttcacgagcatcggggcacacctgtggggctcatcgtcagccacctgccctttggtcctactgcctacttcacgctgtgcaatgtggtcatgcggcatgacatcccagacctgggcaccatgtcggaggccaagccccacctcatcacacacggcttctcctcccgcctgggcaagcgggtctctgacatcctccgatacctatttcccgtgcccaaagatgacagccaccgggtcatcaccttcgcaaaccaggacgactacatatcattccggcaccatgtgtataagaagacagaccaccgcaacgtggagctcactgaggtcgggccccgctttgagctgaagctgtacatgatccgtctgggcacgctggagcaggaggccacagcagacgtggagtggcgctggcacccttacaccaataccgcacgcaagagagtcttcctgagcaccgagtgagcacactcaccactcagtcaggacatggacttggaactcaggatggggctgtcatagacagacccaccagtaggaactgtcacagaatggcctgctgaactgggatgtggaactgtggcgggtggagaggtctgaataaaccgtctgtgtcatggcaaaaaaaaaaaaaaaaaaaaaaaaa

SEQ ID NO: 291831 - DNA, 1000 bp, Homo Sapiens; identical to SEQ ID NO: 115376

SEQ ID NO: 291832 - DNA, 1000 bp, Homo Sapiens
tcaggatcacttgtgggaacataagtcaatggaaaatgcagctccctctcaagacacagacagtccactcagtgcagccagcagttcaaggaacttggagccacatggaaaacagccctccttgagagctgccaaagagcatgctatgcctaaagatttaaagaagatgttagaaaataaagtcatagaaacattaccaggtttccagcatgttaagttatcagtagtgaaaaccatcttgttgaaagagaacttccctggagaaaacatagtttcaaaaagcttttcttctcactctgatctgattacaggtgtttatgagggaggcttaaaaatctgggaatgtacctttgacctcctggcttatttcacaaaggccaaagtgaaatttgctgggaaaaaagtcttggatcttggttgtggatcaggtttactaggtataactgcattcaagggagggtccaaagaaattcactttcaagattataacagtatggtgattgatgaagtaaccttacctaatgtagtagctaactccactttggaagatgaagaaaatgatgtaaatgagccagatgtgaaaagatgcaggaaaccaaaagtaacacaactatataaatgccgatttttttctggtgagtggtctgagttttgtaagcttgtactaagtagtgaaaaactttttgtaaaatatgatctcattctcacctcagaaaccatttacaacccagattattatagtaatttgcaccagactttccttagactgttaagtaaaaatggacgtgtacttttggccagcaaagcacattattttggtgtaggtggaggtgttcatctctttcagaagtttgtagaagaaagagatgtttttaagaccagaatactcaaaataattgatgaaggattgaagaggttcataattgaaataacttttaagtttcctggttaattaacattcactgagtatccaaaatgaaataaacagaaggaccaaaaa

SEQ ID NO: 291833 - DNA, 1000 bp, Homo Sapiens
caggaaccccagttgacagtttaaaagcactttcacacctctcctcgcttcctcaaaaagatcacagagggaggagctctgagaacagtctccttcaacagttcggccaagcagaactgctgtacctctgaccacttgtgttaggaaaactatcggctccctgtataataaatcaagccaggtcctccaagtggtaattcatgaaaaatatccccactaccaccaccaaggggaagaaaggactcagaagagaggacttgaggccatgaggtctggcctcttccctccccatctggagactctttctcccttgctggctttgggcccaagtttgatgtttatgaggatgattgctggtttcccttacacatagcagagctcactcagttctcacagtagccaaatgaagcagttatgtgttgtccagttttccagaccaggactgaaatccagagagggtcaggaatttggccccatgatgaagccaaatctgaacccatgtcctcacttcaaggttatcaatcttggattgtgatgctattggtacttgagaataccccttatctgagtataaagaatccttgagttttgtccttggtttatcaagcaaagcttttcttcatttgaaatgtactcccttggaaaggaggtcagggttctgaagctagacattgatgaacgagtcttgtttctctcccctgcaaggaaggtccaagcaggcccttagggaccactgaatgccccgatcccaatcaggttaatcagaatcacttagagaacttaaaaatacagtttcctggaccttatccaagacctactgagtgagaatcttgagggtggaatcagaatctattttgaaaaggcatccccaaatggcagtctgatggactgcgggtttggataccactgctgtaatgtaaccctctttgtttagatgaggaaactgaggttcagatggaagatatgatttgcctattgtaatacaaagaatctgaactgg

SEQ ID NO: 291834 - DNA, 1000 bp, Homo Sapiens; identical to SEQ ID NO: 223764

SEQ ID NO: 291835 - DNA, 1000 bp, Homo Sapiens
ctgtgcaccatgctaggaagcttcctttttggcagaatatgtttggcagcaaagctatagagacaggtgcattcagaacatcctgggcaccagtcatgagtcttactgtgtcaaaaatctgaaaacacttgctgagaaccaaatttattccattggaaaaaccctctgtggagctataagcctcttggactcttcttcctagattaaggcttgcatttccctccctgtttcagtaaaagatgatgaaagccactatcaatcctcactgctgagtggcagggagaagcagcaccactctcagctcttttctaatcttgtaacttagtgctagaagtctctccaggctattaccatgggcatttgttctctgttggagctgtaagcagatgaacccaagtagagaagatagatcttggaaggagagatccattgagtccagaagccagatcagcaaatggaggaacctcggaggtgaccagaaagatctccatcggttgcccaaggctgtaagtagtgatggttttagcgatgaataacgtaattggctatgaagtactgtggcagagctgctgttttctgaaggtgagaagccatttttagctcagagcaacccttaagagaacttttggcagattttgttggcattattgaaatatatatagaaaagttgctgattgcaatggttatgggaatggaatttaatgacatttgtaatttattacactcattggtttttattgattatagtattgtctgactttttattttctactatggttcctttagcagaaaagtaacttttgtgcatatattgaagtggtttttcagctatgaattctttagggtagaaatttatttagcaaatgtgaattcttttgagaaagtatgaagttttgcagaaattgactgtgaaatgtcagagaaaaataaaagtcacttacttgaaacctaaaaaaaaaaaaaaaaaaaaaaaaaaaaaaaaaaaaaaaaaaaaaaaaaa

SEQ ID NO: 291836 - DNA, 1000 bp, Homo Sapiens
tgtatttgtttggaatgacatgttgagcaggtagtacctttacggctgttgctttttgcagcattatgtggaagtgcctaagtctatttagcctcacagatgactttagaatcttgtattttctacatcagagttcatagcggggatggtgctacatatatctatgcaactgaaaaagaaaacatttcaaacctaaagtacgcaacaagatattatttatatgaaatccatagctcagttatgctatgttcatgaatagagaagttttaagttggaagggaccatggatgacccaaagcagatacatatggtcattcatatacctaaaatacctacaaagacaagttgttccctggtttaaaaggcagtctgttctattgatggactgctttagtccctgaacattttctttggttaaaccaaaaacacataaacctaacttggtcttggcttgatctactgggtaaataataactcttaaatatatatacagttgacccttggacaacacaggagttaagagcgctgaacatttgctcagtggagaatctgcatataacctgactcctcaaaaacttaattagtagttagtttacaattgactggaagccttattgataacataaagcagttgattaacacattttttgtgttgtatgtattatattccgtattcttacaagaaggtaagctagagaaaaaaaaaatgttattaaggaagtaatatattcactattcgttaggtagaagtgaatcatcctaaaggtcttcatcctcatcttcacgctgagtagtctgaggagcaagaggagttggtctttctgtcccagtggcagaggtggaagaaaatccacagatacgtggacctgcgcagttcaaacctgtgttgtttgggtcaactgtattgtaatagcattttaatgtttttctcagacttttacgagtatgaatctgagctttttctgaataaacctgcctgctcaccattaataatgccaaa

SEQ ID NO: 291837 - DNA, 1000 bp, Homo Sapiens; identical to SEQ ID NO: 223765

SEQ ID NO: 291838 - DNA, 1000 bp, Homo Sapiens; identical to SEQ ID NO: 118389

SEQ ID NO: 291839 - DNA, 1000 bp, Homo Sapiens
ggagactctggagatggtgtggatccgaggaagtggttgcggtccttcaggagtccatcagcctccccctggaaataccaccagatgaagaggttgagaacatcatctggtcctctcacaaaagtcttgccactgtggtgccagggaaagagggacatccagctaccatcatggtgaccaatccacactaccagggccaagtgagcttcctggaccccagctattccctgcatatcagcaatctgagctgggaggattcagggctttaccaagctcaagtcaacctgagaacatcccagatctctaccatgcagcagtacaatctatgtgtctaccgatggctgtcagagccccagatcactgtgaactttgagagttctggggaaggtgcctgcagtatgtccctggtgtgctctgtggagaaggcaggcatggatatgacctacagctggctctcccggggggatagcacttatacattccatgaaggccctgtcctcagcacatcctggaggccgggggacagtgccctctcctacacctgcagagccaacaaccccatcagcaacgtcagttcttgccccatccctgatgggcccttctatgcagatcctaactatgcttctgagaagccttcaacagccttctgcctcctggccaagggattgctcatcttcttgctcttggtaattctggccatgggactctgggtcatccgagtccagaaaagacacaaaatgccaaggatgaagaaactcatgagaaacagaatgaaattgaggaaggaggcaaagcctggctccagccctgcctgactgctccttgggaaccccagtcctgagcttggtttcttcccagcacccagagaatccttcctcagctctcttctttccaggggaaggaggtgctcaggggtgggtatccagagagccatacttctgagggaagactggctggcaataaagtcaaattaagtgaccaccaaaaaaaaaaaaaaaaa

SEQ ID NO: 291840 - DNA, 1000 bp, Homo Sapiens; identical to SEQ ID NO: 223766

SEQ ID NO: 291841 - DNA, 979 bp, Homo Sapiens
cttacagaactcccacggacacaccatgataaggacgctgctgctgtccactttggtggctggagccctcagttgtggggaccccacttacccaccttatgtgactagggtggttggcggtgaagaagcgaggcccaacagctggccctggcaggtctccctgcagtacagctccaatggcaagtggtaccacacctgcggagggtccctgatagccaacagctgggtcctgacggctgcccactgcatcagctcctccaggacctaccgcgtggggctgggccggcacaacctctacgttgcggagtccggctcgctggcagtcagtgtctctaagattgtggtgcacaaggactggaactccaaccaaatctccaaagggaacgacattgccctgctcaaactggctaaccccgtctccctcaccgacaagatccagctggcctgcctccctcctgccggcaccattctacccaacaactacccctgctacgtcacgggctggggaaggctgcagaccaacggggctgttcctgatgtcctgcagcagggccggttgctggttgtggactatgccacctgctccagctctgcctggtggggcagcagcgtgaaaaccagtatgatctgtgctgggggtgatggcgtgatctccagctgcaacggagactctggcgggccactgaactgtcaggcgtctgacggccggtggcaggtgcacggcatcgtcagcttcgggtctcgcctcggctgcaactactaccacaagccctccgtcttcacgcgggtctccaattacatcgactggatcaattcggtgattgcaaataactaaccaaaagaagtccctgggactgtttcagacttggaaaggtcacagaaggaaaataatataataaagtgacaactatgcaaaaaaaaaaaaaaaaaaaaaaaaaaaaaaaaaaataaaaaaaaaaaaaaaaaaaaaaaaaaaaaa

SEQ ID NO: 291842 - DNA, 1000 bp, Homo Sapiens
acaaaggtgataaggagcaggtgctttgctgcagtctcccttgcaaatgtataattaaggcctttcttcccaccccaagtccaagaacaaatgccagccacgtcctccgccacttggagagatgagaacccagtggggtcacgtaaaggaattgcaggtcggtgagaggacaagagggactcccatgttctaagcacctgttcctggccaggctctaggccaggctctctaagcacatttctcctttcattccccctaaaaacagagtgacctggaagtagatgttctttgctccttgtcagagttgaagaggctgacttggcccactgctaagcggcagaggcagggccagccatcctgtcgcaagcccgtgctggggctgccctttctgtttccagtccagttacggacttcccggccgccactgggccctgccggtcaccaggccactgtgcagtgggcgcagagcatggtcaggagtggcctgcccgtactcctccacccagatgagggccctccagagcctgcaggcatctgtggggaatcccagcctgcaggttcttggagaagcaggtgaacctaaggatgaaagcaaaggagggccttgaggaagcagcccccaggcctggcagccacgcagcggctgagctcatgaacttggttcgcagcctgccttgcccctggaggccacgccaggcgctcacccctgagcccacagcccctgcttgggctgcctggcaccctcagggtggcccggcctcctcctgccactctgagcacatgtccgggggttgccaccagagacggctttgttctcccagctaaggccgtggagctgctgtgtgactgtgtcaggcctggacaaggaagacccttagggatgacgtccccgctgcatatttattcaaggtgactcttgtacttggcaagggaagtccactgtgtgattgtctgtattcttaatataatttgttaaataaacgtttgttttaacctcttt

SEQ ID NO: 291843 - DNA, 1000 bp, Homo Sapiens
tcagaagtgtctggtttgcttggctgcccatttgcctcttgagtgggcagccctgggcttgggcccctccctccggccctcagtgttggctctgcagaagctctggggttcccttcaagtgcacgaggggttaggctgctgtccctgagtcctccattctgtactggggggctggctaggacctggggctgtggcctctcagggggcagcctctccatggcaggcatccctgccttgggctgccctcccccagacccctgaccaccccctgggtcctgtcccccaccagagccccagctcctgtctgtgggggagccatcacggtgttcgtgcagtccatagcgcttctcaatgtgtgtcacccggaacctgggaggggagggaacactggggtttaggaccacaactcagaggctgcttggccctcccctctgaccagggacatcctgagtttggtggctacttccctctggcctaaggtaggggaggccttctcagattgtggggcacattgtgtagcctgacttctgccggagctcccagtccaggaggaaagagccaaggcccacttttgggatcaggtgcctgatcactgggccccctacctcagccccgctttccctggagcacctgccccacctgcccacagagaacacagtggtctcccctgtccgggggcggctttttccttccttggagcgtccctgacggacaagtggaggcctcttgctgcggctgcaatggaggcaaggtgctgcagagcccaggtgcactgtgtgatgatgggagggggctccgtcctgcaggctggaggtggcatccacactggacagcagggaggaggggagtgagggtaacatttccatttcccttcatgttttgtttcttacgttctttcagcatgctccttaaaaccccagaagccccaatttccccaagccccattttttcttgtctttatctaataaactcaatattaagatgttaaaaaaaaaaaaaa

SEQ ID NO: 291844 - DNA, 1000 bp, Homo Sapiens; identical to SEQ ID NO: 118392

SEQ ID NO: 291845 - DNA, 1000 bp, Homo Sapiens
aaaaaaaataattcctcatttcatcattggtctttatatgtagccacaaacactgacctcatgtaggcaccttaccaatatatgacattaagtgagagtgaatcccttaggactggaacacttcaagctcaaccaactgactcagttgtcattcttcacaaaagaatagtagaggatcatgtaaacctgagcctaactcttgttccagtatgaaagttgggggagagcaccagccacctaggaaaactgtatgttacctttttactcaaaggagtcccccctgcccagtaacagtcctattagtgtttaatttcagagtttgtgtctggtagacctctacctgattcagatttggttttgttgtttcaaccatagttagagacaaattctcatgtactttcagaaatcaatatctgcagccactgttacttttaattgacattaagagacacttcataggttcccacaattcagtatgggataggctttttaaaaagcacatacagaccaggcgtggtggctcatgcctataatcccagcactttgggaggctaagacaggcagatcacctgagctcaggagtccaagaccagcctgggcaacatggcaaaacaccgtctctacaaaaaaaaaaaaaaaaaaaattagccaagtacagtggggcacacctatagtcgcagctacttgggaggctggggcaggagaattgcctgagcctgggaagtggaagttgcagtgagccaagatcgtgccattccactccagcctgagcaacacagtgagaccctatctcaaaaaaataatgatgatagtacacgttatgttaaaggtgaaatgtgcatacagaaggaagagagttggccaggtgtggtgactcacacctataatcccaatactttgggaggccaaggcaggaggattgcttgaggtcaggagttttagaccagcctggacaacatagcaagacctcatctcttctaaaaattaaaaaaaaaaaaaa

SEQ ID NO: 291846 - DNA, 1000 bp, Homo Sapiens
ttcaacattctaatcttatattcaactaccagaaaggaaagagatagagcaagggaagagcatacaagtgcagttaacaagatgttcagtcgacacaatgaaggtgatgatcaacaaggaagccggtacagtgtgattccacagattcaaaaagtgtgtgaagttgtagatgggttcatctatgttgcaaatgctgaagctcataaaagtaagtactcatatgtacatttttaagcacattgttcttttcaaagcaaatggaaaatacctttttagactttactgtggcttcttaagaatatgatggcttattttatcaatgtgattttctgacccttactattaatagtgtgttctcacacttttgtgtgtattaggatcacctgggaagcttgttaaacatgttaacaagctgattcctaccctggtggattttattcctagatttgggttgtgtgaatcagatttgggcatctgttttttccaagcacccagggaattctgatgcattccaaagtttggtactagagctatacaatatttttttgctttatgcttctgcatctttttgatactgacattttgtctgcttctggctttattcaaataatctatgcaaataactatgaaaaattttatctttgttttatccaaatagtaaagagatgtgatggtagggtgttaagtagattagttgagaacactattcatatattctgaataattgccattcagaatgctatttttgtgtgaaatcaaaatatcattgggccatgagctagtattataatatctttcccaaatcctttgtgaacaaggtagaatataaatacataatatattgtatatatattatagttctctaatacactggtttgaatttctattcaatttattttcccctgtgatctgttaggcatgaaagcagttgcaattactttctgttattacagggctatctataaaaagaaaacttagaagcaaaaaaaaaaaaaaaaaa

SEQ ID NO: 291847 - DNA, 1000 bp, Homo Sapiens
agaaggagaaggagggcttcccgatcacgtcgctgagggagatcaacaccatcctcaaggcccagcatcccaacatcgtcaccgttagagagattgtggtgggcagcaacatggacaagatctacatcgtgatgaactatgtggagcacgacctcaagagcctgatggagaccatgaaacagcccttcctgccaggggaggtgaagaccctgatgatccagctgctgcgtggggtgaaacacctgcacgacaactggatcctgcaccgtgacctcaagacgtccaacctgctgctgagccacgccggcatcctcaaggtgggtgacttcgggctggcgcgggagtacggatcccctctgaaggcctacaccccggtcgtggtgaccctgtggtaccgcgccccagagctgctgcttggtgccaaggaatactccacggccgtggacatgtggtcagtgggttgcatcttcggggagctgctgactcagaagcctctgttccccgggaagtcagaaatcgatcagatcaacaaggtgttcaaggatctggggacccctagtgagaaaatctggcccggctacagcgagctcccagcagtcaagaagatgaccttcagcgagcacccctacaacaacctccgcaagcgcttcggggctctgctctcagaccagggcttcgacctcatgaacaagttcctgacctacttccccgggaggaggatcagcgctgaggacggcctcaagcatgagtatttccgcgagacccccctccccatcgacccctccatgttccccacgtggcccgccaagagcgagcagcagcgtgtgaagcggggcaccagcccgaggccccctgagggaggcctgggctacagccagctgggtgacgacgacctgaaggagacgggcttccaccttaccaccacgaaccagggggcctctgccgcgggccccggcttcagcctcaagttctgaaggtcagagtggaccccgtcatgggg

SEQ ID NO: 291848 - DNA, 1000 bp, Homo Sapiens; identical to SEQ ID NO: 223767

SEQ ID NO: 291849 - DNA, 1000 bp, Homo Sapiens; identical to SEQ ID NO: 220693

SEQ ID NO: 291850 - DNA, 1000 bp, Homo Sapiens
tcctgttgcagttggctttctgtagtgttctgaaacaagaggacgattccattccttctcaggaacctagaaacaacaccgcttgagcaactggaatatgtttgctgcaagcagaatattttggggagaggaagagtagtttaattcaagtagtttaattgaacatattagtcattggtctgtctgggacgtgcagtgttcatagtagcaatgtatgtaccatttattttatctggttgtgtgtgatgtgtgtgtatgcctatttaatatgtacacatatattcactacatatgtatgtatgatatattcatatatacatgcagtctgcttgattatcagcaaaatggtcagcctttatcagatagtttcttcatgtggagttcatctgcatgtggcccttactctgaagcctcttcctgatctggagccacagtctgtctgtcttccagttcatctcagtcctcgagaaaggccctttaaatatgtcactttcccattttcctttaaccatgggttgtgtgagccagaaagagctttgagaaagatggctgcttccaccagggtggaggcttctaggtctgcatgatgatggggcccgtttctggccagagggtggctctgggagcagttgtgctgcgggcttgctgggggagaactctaactgttgcagaaacagagcttcatggcttgcttaaattacttagctggaatattttaaagtgtcagataatgtgatgtacaaagagagtatgccgatgcatttcattgtttttgcattatctgtatcagtgtttcccattgctagcccgaataatcaagaccagactgtttcttgtcactggattctggaagccttgccctttcaactggatttatgtttgtttctgctgctgtgaaaccccaaagtaatgcagtaggttttaattgaaaattgtttaattctattattgataattatttattgtaataaaagtaaaagagtaatttttaaatcctttt

SEQ ID NO: 291851 - DNA, 1000 bp, Homo Sapiens
tgttcccaaagttttgtccaatcttatcattagtagattttataagccacagagacaaaccagaaacggaataatgttactttggatgctttatttttttgttctaggtgtggctttgtacatgcagaagaatgctatatgctgcacattttgcctttaaagtcttacgactttccccattttagtctaatgggaagatacagatgtgcaagtctgcttttttgttttttgttattatttttttttttttgctctgtgttatggacattttcagacatgcacagaagtggagaggatggtccttggaccccatgtgtccatcacctagctgcatcacttatcagctatggtcaacctggtttcatctgtatctctctcttttcacctgtattgtttattgaaaatccaagacactatgccaatgcaaccgtgactactttgggagattggtagtctcttttgatggtgatagtgatggggtgcactatcataatcacatcaggtctgctttttgcttttaatgttaactaatgaagttccagagatgggccttagaaatgtgttttaagaattaacaaggagtctcaaaaagaaatgagagggatgcttcctttcccttgcatctacaaaacaagagagagactgttctgttgtaaaactctttcaaaaattctgatatggtaaggtacttgagacccttcaccagaatgtcaatctttttttctgtgtaacatggaaacttgtgtgaccattagcattgttatcagcttgtactggtctcataactctggttttggaagaataatttggaaattgttgctgtgttctgtgaaaataacctccccaaaataattagtaactggttgttctacttggtaatttgacaccctgttaataacgcaattatttctgtgttcttaaacagtataaatagttgtaagtttgcatgcatgatggaaaaataaaaacctgtatctctgttataaaaaaaaaaaaaaaa

SEQ ID NO: 291852 - DNA, 1000 bp, Homo Sapiens
ggcgcccagccctgcggaggaggccggggctcccaggaagcggacgcccggtccccacacagcgccgcggccgcccctccacccccgcgggagcccctgccccacgctaataaaatgtgttgcgaggctgacgctggtgtgtatgcgagcgcccgcctcccagccccggtgcccgcagaagacgcttttccccagcaggtcacccacggccccggaaccgcggcggctggaggctggattcgaggccggaaacgccgggacccctggacccggcctggtgggagcagcggagggggacgccccacggggccctgcggagcctgaagccggagagcaggcggctcttctggaacgcagggcccgggccctccagccccgcccggcccaggtatcctccctgagcctcagtctccccagatgtcaaatgaagaggccagctgggcagatggtagtgacattggtgagacaacagccctaacacttcccaggaactgaagtgcctcatgtgattgattcccaggcccaggcagcggaggttacaccctcagcaagggctcagctgggatctgcgcccggcctgctccagaacgcacagggcctcccactcgccaccggtggggagggtcgtccggtatcccccagtgcccaccaccaccaaccagaatcacttctcagactgcaagagcgaatccagccgggcgtggtggctcacgcctgtgaccccagcactttgggaggctggggcggcggatcacttgaggtcaggagttcaggatcagcctggccaacgtggtgaaaccctgtctctactaaaaatacgaaaaaaaaaaaaagctgggctgtggtggcaggcgcctgtgatcccagctactcgggaggctggggcaggagaataacttgaacccgggaggcagaggtggcagtgagccgagattgagccactgcactccaatctgtgcgacagagtgagaccctgtctcaaaaacaaaacaacaacaac

SEQ ID NO: 291853 - DNA, 1000 bp, Homo Sapiens; identical to SEQ ID NO: 223768

SEQ ID NO: 291854 - DNA, 712 bp, Homo Sapiens
atcaaaccaccccagcaaatgtctcggaaagaaaaagttcatcacagaaaagatgaaaagagaaaagaaaaatgtaggcatcatagccattcagcagaaggggggaagcatgctagagtgaaagaaagagagcacgaacgtcggaaacgacatcgagaagaacaggataaagctcgccgggaatgggaaagacagaagagaagggaaatggcaagggagcattccaggagagaaagggaccgcttggagcagttagaaaggaagcgggagcgggagcgcaagatgcgggagcagcagaaggagcagcagtcaagaagatgaccttcagcgagcacccctacaacaacctccgcaagcgcttcggggctctgctctcagaccagggcttcgacctcatgaacaagttcctgacctacttccccgggaggaggatcagcgctgaggacggcctcaagcatgagtatttccgcgagacccccctccccatcgacccctccatgttccccacgtggcccgccaagagcgagcagcagcgtgtgaagcggggcaccagcccgaggccccctgagggaggcctgggctacagccagctgggtgacgacgacctgaaggagacgggcttccaccttaccaccacgaaccagggggcctctgccgcgggccccggcttcagcctcaagttctgaaggtcagagtggaccccgtcatgggg

SEQ ID NO: 291855 - DNA, 1000 bp, Homo Sapiens; identical to SEQ ID NO: 118393

SEQ ID NO: 291856 - DNA, 1000 bp, Homo Sapiens
tgctttcgtttgaattttaccattcttgtatgcagccttatacgacatagttgtgtttgcttttgagtgttagataaatggaatcctgtgtatgtgcttttgtgtcgtttttgtcactcagcattgtataatccatccttgttgggtcctggagttcatttttaatgctatatggtgttctgttgtatgaataatacctcaagtgatacagccttgttgatggtcatttttattgtttctgattttggtcattccacataattctttgtgcagtcttctgcacatgtgcacaagttcctttgcagaacattgagttgaattgctaagtcaggagatacctttaattttactagataactgttgcccccagcagggtggggtctactgtggctaaaatgtcaggtagatgcacactggttttaattggcatttccctggatactgatgaggttgagtagcttttcatttgttttggatggctgggcatggtggctcacacctgtagtcccagcactttgggaggctaagcagggagattgcttgaggcgaagagttcatatgtttattggccacttggagtttttctgttgtcaagtgcctgttcaagttttctggccttttaaaatgttctgtattttccttagtgatttttcttttggatatttcagatacaagtcttttgagagttagtattcagagtatcttctgctacaatgtagtttgtttcagtctctcttggtattaccaattttaatacttaggtgatgcttactccatgccaggtaaggctcaaagtgctttacaagtatcaacttattttgataaaataagcttatcagtagttttctttatagttaaattctatttgtgcatgtgtgtgtctgtggtttagcaaatgtttcccacccatggggtcttttttattgtggtaaaatatactgaacataaaatttatgttcaataaaaaacaaaaattgtttttaaccattttaaaaaaaaa

SEQ ID NO: 291857 - DNA, 1000 bp, Homo Sapiens
taatttccacacatttgtaaatgttccaatttttcttttgttattgccagcttcattccattgtgttcagagatgatacagtcagtgcctgttcttatgaagcaaacattctataatagtaggaccagtaccctgtctgtttcattcaccacagtcagcatgccccaagtgcccagcatggggcggatggccaggaatgagtgaaaacttcccttcctgggtagttgtgactagtagagaggaaaaataatataattgcctgcttactgcatgccaggcattgggctgggaatttttatattggatctaaaataactcttaagttaggcattatccccattttatagatggagaaactggccccaaaaggtgggaacttgtccaagacgtcacaggtagcaagaggtacttttacctggctccaaatctgtgttctttccactgacaaatgagatatgggatatggtgcatctttacagtactataataagtattggcgtataacattattttcaaggaactccaagggccacaggagctgacaggtttttcaattaatattcccaacatgaatgagatgcctcattcctcagtttcctcacgtgtactataaggctagtacctgctttgttggggtatggttggctcgtgtgcattaagtcaacaaatccctagttgatagggtttggctgtgtccccatccaaatctcatcttgaattgttcccgtaatccccacgtgacatgggagggacccagtgggaggtaatttaatcctcggggcggctacctccgtgctgttctcgtgatagcgagtgagttctcacgagatctgatggttttataaggggcttttccctcttgttcggcacttcctgctgccacgtggagaagggtgtgtttgtttccccatctgccatgattataagttttctgaggcatccccagccatgctgaactgtgagttattaaacttttcctttataaattaaaaaaaaaaaa

SEQ ID NO: 291858 - DNA, 1000 bp, Homo Sapiens; identical to SEQ ID NO: 118395

SEQ ID NO: 291859 - DNA, 1000 bp, Homo Sapiens; identical to SEQ ID NO: 118396

SEQ ID NO: 291860 - DNA, 869 bp, Homo Sapiens
ccgaggagctgaggaagcctagagctctcagaagcagtcctttgagctggtgtaggggcactcagaatggtccagcgtttgacataccgacgtaggctttcctacaatacagcctctaacaaaactaggctgtcccgaacccctggtaatagaattgtttacctttataccaagaaggttgggaaagcaccaaaatctgcatgtggtgtgtgcccaggcagacttcgaggggttcgtgctgtaagacctaaagttcttatgagattgtccaaaacaaagaaacatgtcagcagggcctatggtggttccatgtgtgctaaatgtgttcgtgacaggatcaagcgtgctttccttatcgaggagcagaaaatcgttgtgaaagtgttgaaggcacaagcacagagtcagaaagctaaataaaaaaatgaaacttttttgagtaataaaaatgaaaagacgctgtccaatagaaaaagttggtgtgctggagctacctcacctcagcttgagagagccagttgtgtgcatctctttccagttttgcatccagtgacgtctgcttggcatcttgagattgttatggtgagagtatttacacctcagcaaatgctgcaaaatcctgttttcccccagagagctggaggttaaatactaccagcacatccctagatactactcaagttacagtatatgatcactaatatagtatgctcttggtaccaggagctctgatatatatctggtacatgtttgataatgacttgattgttattataagtacttattaatacttcgattctgtaaagagtttagggtttgattttataaaatccaaaatgagccttttattgaaaaaaaaaaaaaaaaaa

SEQ ID NO: 291861 - DNA, 1000 bp, Homo Sapiens; identical to SEQ ID NO: 118397

SEQ ID NO: 291862 - DNA, 1000 bp, Homo Sapiens; identical to SEQ ID NO: 220805

SEQ ID NO: 291863 - DNA, 1000 bp, Homo Sapiens; identical to SEQ ID NO: 223772

SEQ ID NO: 291864 - DNA, 1000 bp, Homo Sapiens
tgcagtgctgtcacctggctgaagacctgcagcctcggagcctctgggaggtccctttctccctcggtgaaacacagtcctccacatcaatttccaaacaatgaattaggtatggccattcatcactgttcagtagtttccccgtccaaaggctctcttccaaaactgcagtttgatctgtgttaataattgtggggttttagatgagaaaatggctataaagctgtggccctactttattttttaaaaatgacagaacttttgttcagatgtaaaagacaaaattgcactttaatgttttttgttacttgaaaacatatctgggatccctttttttggtcctctgctgatatttataaaacaagaaatgcttcttggactaccttcactggcatttccatagtcctggaatccagagccaagtggcctatctaaaattcacagcccttttattctcctgtgtgatggttaatacaacacagttgaagcctggaaacactaccattatttttggtgtattgctttttctaattgactgtttttaatgattttgatacattttaatgttgaaattaatattgaatgttagctatgaaattttagtattgaattttataatggaacagaacattggtaggtaacaagatgcaagaggatgtcaatacaagattgtctgcctgtttttctttgtaatttgtaattacagtttttgtaacttgtgattatgtttttaactaaatttaccaccagatacaaacaatacttcttacacagagttatcctttatttatatcattaagacgtgaatgaaacatcatcctaacttacttccccaagatattgagaggtcatatctgtttttctttatcattcatttctttttctaaaagttgttactgatatgcttttgatttcctatgactctattatgttgtacagaacatcttttcaatttattaaaaaaatagcttaactgaaaaaaaaaaaaaaaaaaaaaaaa

SEQ ID NO: 291865 - DNA, 1000 bp, Homo Sapiens; identical to SEQ ID NO: 223773

SEQ ID NO: 291866 - DNA, 1000 bp, Homo Sapiens; identical to SEQ ID NO: 118398

SEQ ID NO: 291867 - DNA, 1000 bp, Homo Sapiens
tggctgtgagtcctgatgaccgcttcatcctcactgccgaccgggacgagaagatccgagtcagctgggccgcggcgccccatagcatcgagtccttctgcttggggcacacagagtttgtgagccgtatctccgtggtgccaactcagcccgggctgcttctgtcctcctctggggacggcaccctgaggctctgggagtacaggagcggccgccagctgcactgctgtcacctggccagtctgcaggagctggtggacccccaggccccccagaagtttgccgcgtccaggattgcattctggtgccaggagaactgcgtggcgctcctgtgcgacggcactcctgtggtctacatcttccagctggacgcccgcagacagcagttggtgtacaggcagcagctggcgttccagcaccaagtgtgggacgtggctttcgaggagacccaggggctgtgggtgctccaggactgccaggaagcccccctggtgctctacaggcctgtgggcgaccagtggcagtctgttcctgagagcaccgtgttaaagaaagtctctggtgttcttcgtgggaactgggccatgctggaaggctctgccggcgcagacgccagcttcagcagtctctacaaggccacgttcgacaacgtgacctcctacctgaagaagaaagaggagagactgcagcagcagctagagaagaagcagcggcgccggagtcccccgcctgggcccgacgggcatgccaagaagatgagaccgggggaggcgacgctaagttgctgatcgtggcggtctgtttctgtcgactgtggaccacttatgtgcgatccgtggaccacttgcgtgcgatctgtcggccgacgatgagcttgttcggatgtagctccatcgtaagtcgaggagcatctgtgatttgtcctctgcttatgggatatgtttttccgctactgagtctgtgtagtaaatttttgactaggaaaaaaaaaaaaaaaaaa

SEQ ID NO: 291868 - DNA, 1000 bp, Homo Sapiens
atggtgctgttggtaaaacatgtctcctgatatcctacacaacaaacaaatttccatcggaatatgtaccgactgtttttgacaactatgcagtcacagttatgattggtggagaaccatatactcttggactttttgatactgcagggcaagaggattatgacagattacgaccgctgagttatccacaaacagatgtatttctagtctgtttttcagtggtctctccatcttcatttgaaaacgtgaaagaaaagtgggtgcctgagataactcaccactgtccaaagactcctttcttgcttgttgggactcaaattgatctcagagatgacccctctactattgagaaacttgccaagaacaaacagaagcctatcactccagagactgctgaaaagctggcccgtgacctgaaggctgtcaagtatgtggagtgttctgcacttacacagagaggtctgaagaatgtgtttgatgaggctatcctagctgccctcgagcctccggaaactcaacccaaaaggaagtgctgtatattctaaactgttttctccttcccttctttgctgctgcttcctgtcccactactgtagaaagatcgtttaaaaacaaaggaataaaaccatcctgtttgaaagcctctgcgtctttttactcaccaccttagagcaacctctgtattagtttttgatcaagaattgcaatatcatataaattttttgtgatcagtagtcaagttggacttgttttaacgttctgctgcttgagttgcctgatgctcagagctttttggtttggattactattgcaaagggaacttggtctggcttagatgtcctcttggagaaaataacaagagttttaacacttctagatcttagttcagatggagaaagtaacacaaacatcattttactcttatgatcaattgttaattgtaattgcatgacaaaccttatggaaaaggggtgacctagtagagtgtaatggggaaggg

SEQ ID NO: 291869 - DNA, 1000 bp, Homo Sapiens; identical to SEQ ID NO: 287606

SEQ ID NO: 291870 - DNA, 1000 bp, Homo Sapiens; identical to SEQ ID NO: 118400

SEQ ID NO: 291871 - DNA, 1000 bp, Homo Sapiens
tgtcccttaggcctggctctgagctgctgagaccccacccactgcctgcagagagacctatcttcaattccatggccccagcctcaccccggctcttgaatcagacagaaaagctggctgcagaagatggctggaggtcttcctccctgttggaggagaagatgccaaggtgggcagcagaacacaggctggaggagaagaaaacctggctgacaaatggctttgacgttttcgaatgccccccaccaaagacagagaatgagttgctgcagatgttctaccggcaacaggaggagatccgaaggctccgggagctgttgacccagcgagaggtccaggccaaacagttggaactggagatcaaaaacttgcggatgggctcagagcagctctgagcagagacctctgccctcctcaccctcagggacaccactcggctccatggggaggtttagaaccaaaccacaagtcccctcaaggacaaccactatttctatattttttaccagaaaacaaaactctccatcgctgaaagagattccagtgggacatggtgccgtttttctgtttgccttcttgcaacaacagtttctgaattgactttgttttcagatgatgccttctgttgaattctgttattaagggcccatgatgagctgtaacttctcaagaggaaagaacacagtagaaaactagagctggaaggatctaggttgacctgtctgtgattttcaaactgtggtccagagaataggggaagactgggccagacgcagtggctcatgcctgtaatcccagcactctgggaggctgaggtgggcggattgcttgaggtcgggagtttgaaaccagtctcaccaggcgcagtggctcacgcctgtaattccagcatgttgggaggccgaggctggtggatcacgaggtcagcagttcgagaccagcctgaccaacatggtgaaaccccatctctactaaaaaaaaaaaaaaaaaaaaaaaaaaa

SEQ ID NO: 291872 - DNA, 1000 bp, Homo Sapiens
cagaaactgctaggtaaaagaattccagaaggaggccagggcataagttggatgacctatgaactttagtctaaagaattgagactaccgtaattgagactactgtagtgacatctgagaaatgggatggaagagtgaccatgttttattttcttgttcttgtcactattgtattttattttgcataatcatgcccttcactgacagtctccttaacatcatctgtttactctgctcagtgtaaactacaatgctctgtcatctccctactgggtctcctgggaggaggggagccatccagggtgcaaactcaaaggcagagggcacagcgtgcttaggcccaagcttagaattcaattgagaagttctgttgttcatccttacctcagcaggtagaaaagaggtggagatcagaagccagggattagagattgaattgctttccctgggagtgtgcagtatctcattaaaatgttgtatattcaaaaaaatacagacacacacaagtgcctatataatgataaaacatatccaaagcacccaaacctgtgattccagaaaagtagatcctatttttgtttatttttattggctttagctgtgtcttttgaaaggactattatcctctaaaatgtatgtgtatgaagatcctggcttgcagctcgggagctttacacaccttgtgtcactttatcttggtaacgagccaagatcatgcaaccagttcatccatgtctgacccaagagctcttaactgctatgctgcactgcctcattcagagatagatgcctgcatgggtcctggcgattattttaatgctggctacacccccacaggtgacttggattcagaaatacaatttatatttcttctttttaaattgttttattttatttttcttttaatagttatatgtcagtgagaacaatttatatgtcttacactgagaaataaaactgctcataagtgaaaaaaaaaaaaaaaaaaaaaaaaaaaaaa

SEQ ID NO: 291873 - DNA, 1000 bp, Homo Sapiens; identical to SEQ ID NO: 118401

SEQ ID NO: 291874 - DNA, 1000 bp, Homo Sapiens; identical to SEQ ID NO: 223776

SEQ ID NO: 291875 - DNA, 1000 bp, Homo Sapiens
gcgagagctgcagcatgctgccctggggggcacagctactcgacagaacaattggccccctctaccttctttttgtccagttcagccctgctttttccaggacatctccatggagatcccccaagaatttcagaagactgtatccaccatgtactacctctggatgtgcagcacgctggctcttctcctgaacttcctcgcctgcctggccagcttctgtgtggaaaccaacaatggcgcaggctttgggctttctatcctctgggtcctccttttcactccctgctcctttgtctgctggtaccgccccatgtataaggctttccggagtgacagttcattcaatttcttcgttttcttcttcattttcttcgtccaggatgtgctctttgtcctccaggccattggtatcccaggttggggattcagtggctggatctctgctctggtggtgccgaagggcaacacagcagtatccgtgctcatgctgctggtcgccctgctcttcactggcattgctgtgctaggaattgtcatgctgaaacggatccactccttataccgccgcacaggtgccagctttcagaaggcccagcaagaatttgctgctggtgtcttctccaaccctgcggtgcgaaccgcagctgccaatgcagccgctggggctgctgaaaatgccttccgggccccgtgacccctgactgggatgccctggccctgctacttgagggagctgacttagctcccgtccctaaggtctctgggacttggagagacatcactaactgatggctcctccgtagtgctcccaatcctatggccatgactgctgaacctgacaggcgtgtggggagttcactgtgacctagtccccccatcaggccacactgctgccacctctcacacgccccaacccagcttccctctgctgtgccacggctgttgcttcggttatttaaataaaaagaaagtggaactggaactgaaaaaaaaaaaaaaa

SEQ ID NO: 291876 - DNA, 1000 bp, Homo Sapiens; identical to SEQ ID NO: 223777

SEQ ID NO: 291877 - DNA, 1000 bp, Homo Sapiens
ctctgcctgtgtcgtgtggcctggccagcctcccggtggacaccagccctgcgtggacgtggcctgtgcttcgcccgcactgcgcgcatccccaacctctgtccgcatgcctggggccttcgcccccacgtgctcgacaggggaacccgcccggacggcatcgccaggcactggctggggtggggaaaggtggcccagtggagccggtggccaggaaggctgaagcccgcttcccatgctcctgcatcaggtgcccagccgtgggtgggggccctgaggtgaagagtttatttttttagtccgtttcgtcctggccccgggctgtggcgagacagcccaactcccccagcccagctcccccagcccagagccagggaagaggaaggtggggccagtcccaccagtggggtggccacgcccatggggtcacatgctcaggggtcaccccctgcagggacctgatgccctcgggtgggagggaccgaggtccaccctcgggtcaaaggtcaacgtgcactttctccttgtcgcctgacagacattttattttactaagactgctgtaccgaacaagcatatttatcatcaggagacaggatgggtttaaagcaggatggtgtgtgtgtgaacgggcatgagcagaggtgagcgtgagcgagcgggtgtgtatgtacgagtgtgcacgtgtgtgcgtgtgcacagagggtgtggtgccagcttgagtgggagtgtgtgagtgtgagcaggcgggcgagtgcgtgagtgcacgccagcgcgtggcccatgtatgaggagtgaaggggcccaacgcaataaccacgtcccccacccgggccccccgccgcggctgaggccacatggcttcctgtgggagccccggccggcacccggctggtcccaccccaaatacctcagccatggagaccatgtcatgcagaattaacaaggtagcaccgagcatatcaataaatattattctgataaaaaaaaaaaaaaaaaa

SEQ ID NO: 291878 - DNA, 1000 bp, Homo Sapiens
acccacaatccacaatccccaaactcagagtgcatcccagaagaggccccaggcagagctcaggttggccctggcctttgccatcccgggaggccccctagccagcaagagtgggattgcctttcctgtggaaccactgcttccccaggcgggaagaaagagggagttctggccacctgagcctttcccttgccaatccaggtagacagaggccctgcctttggctgagctgagacacctcctgtttcccttccccttgaaccagtcccagtgtccccttgctccaggctaccttctgtctcttagtctaagtttgcccacctgtaaagtagattcaggatatctgtagagggctgtgacaacagacttggaaggtttgctactgtatatactgccattgagaaggggaaatttttcaatatgtagaagcttcagaattagaggtccctctttaccccagacctgggagggaagtagatgttttgccaaaatacttcttcattcctttaaaaactacatctttcctatgcaagagtgtctcacatgtgcttaaccgaggtgcttctagttggtgagcagtgttgagcttagaagtggtgtgtgctctgtctgtctgtctttgtctgtctgttgtatacagtgggtgccatataaagctgatcaatggtggtgcttcctgcctgcttctgtgagatgggcaaaagattcagcttagaacaccatgactcaccttgccttggtcagcctttcctgggcctgtagggccttgcacatatttttcccaggaggatttcccctccaccccacaggcatggatcagcttggtctgaggccccagctgtgtggggtccctctaatccccagatgttgctgaggctgaaggcctctgatctgataacatgtcagatagtaaaagatgtgggggtgggggtggagggctcctccttcataacagtttctaagaaaacttgttcccacctgtaaaaaaaaaaaaaaaaaa

SEQ ID NO: 291879 - DNA, 1000 bp, Homo Sapiens
ggatgaagtccttggggagaaaaggagcaggccaagggcgatggtggagtagagctgcctctcagaggcagcatgagctgagagggtgataggaaggcggcgctagacagcatggaggactttctgctctccaatgggtaccagctgggcaagaccattggggaagggacctactcaaaagtcaaagaagcattttccaaaaaacaccaaagaaaagtggcaattaaagttatagacaagatgggagggccagaagagtttatccagagattcctccctcgggagctccaaatcgtccgtaccctggaccacaagaacatcatccaggtgtatgagatgctggagtctgccgacgggaaaatctgcctggtgatggagctcgctgagggaggggatgtctttgactgcgtgctgaatggggggccactgcctgaaagccgggccaaggccctcttccgtcagatggttgaggccatccgctactgccatggctgtggtgtggcccaccgggacctcaaatgtgagaacgccttgttgcagggcttcaacctgaagctgactgactttggctttgccaaggtgttgcccaagtcacaccgggagctgagccagaccttctgcggcagtacagcctatgctgcccccgaggtgctgcagggcattccccacgatagcaaaaaaggtgatgtctggagcatgggtgtggtcctgtatgtcatgctctgtgccagcctaccttttgacgacacagacatccccaagatgctgtggcagcagcagaagggggtgtccttccccactcatctgagcatctcggccgattgccaggacctgctcaagaggctcctggaacccgatatgatcctccggccttcaattgaagaagttagttggcatccatggctagcaagcacttgataaaagcaatggcaagtgctctccaataaagtagggggagaaagcaaacccaaaaacccgcttctaaaaaaaaaaaaaaaaa

SEQ ID NO: 291880 - DNA, 1000 bp, Homo Sapiens
tgctgacactggctgacctggaagattacgtgcctggggaaggggagaccttccactgtggtggccctgggcctggcgcccctgatgaccctccctgcgaggtctcggtgatccagagagagatcggggagcccacggtggggcagcctgtgctgctcagcgtggggcatgcactgggtccccgaggccctctcggcctctttaggcctgagccccgtggggcgtcaccaccgggaccccaggtccgtagccttgagggcacctccttcctcttgcgggaggccccggctcggcctgtgggcagtgctccctggacgcagtctttctgcacccgcatccggcgttctgcggacagtggccagagcagcttcaccacagagctttccacccagaccgtcaacttcgggacagtgggggagacggtcacccttcacatctgcccagacagggatggggatgaggcggcacagccctgatgctgctgccatggtggcttggggcagcggggagaaaggagtgtccttgaggcctaggacgctgcccggcctcagcagcagccctgggagcctcctgagggccctccctgtccctggccacgggcccttcttacctcactcaacttcagccaggaggactgggtggtgcttgcaatgttggaatgaccggctcaaagacctcagctctgggctgtttcctgtcagcctggcaggagcctcaggactgtggacgaaggatgtggccttgggcatttgtcctgttcccacatgggcctggtccctccctcctggccccagccacagctgccaggcctgacatggccttgcctctcctgcagtcttggtgactgagacccttgggtggcgcttcccagctctgcaggccctcctggccttttctgcagggtggacacagggtctgtgtgtgggcagcagcccctgtctctcagcaagaataaagcagcttcctgtgcaaaaaaaaaaaaaaaaaaaaaaaaaaaaaa

SEQ ID NO: 291881 - DNA, 1000 bp, Homo Sapiens
cctgagcatggctggcaggggcagctgctgtggcaaactggccttgatcagtgtccgtatgtaaggccttgagaggaccctgcaggcagtcagcaccagcctcagcaactgtgcagagacctacaggcccacagccagtggcctgtccgcattgccctgtgcccacaagcaacagtccacagcccttggtggcttctgttccttgtcccctcggcttctcttcgcagccatcaggactaggtttgtgcaggaaggtgatgcccactggaactctcctcacacctggcagcttcatggatgttgtatctgaactaaggaccagaggctgccagatgtttctggctcctcacgtgtccttcaggacagaacagaagcacaaagactcagccaagagttctctttattccctttgatcctcccccaaggtgagggcttaggcagctgtagaaccccaggaaagaacggaatccaggcaatctgtttagagaccccccactccaaatttatccttttcctttccttcccctaagatgtttccagggccctctggtgcccacactgtcctcttccttccacttgggggtggggaaatccttcctgcgaggtcagggcatttctctacaaagtggcctgaatgaggccaggccctgagaaggagccaccagctggaggaaaggggctccaagccttgcttttaacacccctgcaaaacccccaccctcccaagatgttcacaaaaggtgagaaattcaggtacgaaaccatcaatggacaacttgaaaatgcatgttcctcaggcctatgcagttcccagagactcttgacaccggtctctgctgaggctcccagcctcagtttcccccacagcagcacgggccccactgtgctgctcttcaggtccccacagccctgcctttggttcctggacatttggtattctgccctccactctggtactatcagagtagggcaggctctggattaaagcttttagccggtc

SEQ ID NO: 291882 - DNA, 1000 bp, Homo Sapiens; identical to SEQ ID NO: 118405

SEQ ID NO: 291883 - DNA, 1000 bp, Homo Sapiens
cagcacagaggaggtccagtatctgattcctccagagtcacaggttgagaagccagtggccgaggacgagccagcagccggggacaagccagcagcagcagaacagtaaattacacacacacacacacacacacacacacacacacacacacacacacacacacacacacacacgccgagcagctgtctcgggtccagagcgagcagcgtggagctcagtgacagcagcagggagaaatccactgaaggaaaaaacccaaatttccactccacaaagaaaacagctgcaagcccccagggacttacctggggctggcatgtgtgactgtctcggatgaagtgactgacccagtgcacactggatcaaaatgctgctttcctctgtgtctcacagcttggctgagctctgtctctgcaggttagaagtctgctaaagatcaaatgtgaaagtacttggagaaactgaggcctcttatgtgtaatgtgtaagttaagtgagccatatattttcttgcctcttccggacattcatgcttgtgtcccaagcattcccttggtgaattgtcacgtgagtggggccagtaagagtgaagtctgctccttgaatccaagccccatctggggcttctctaacaaatctgtagtaagtatacggactccagggagagaggctgggcttctttctctcatttgttccttgtggaacaaatgggcaaaagaagtgtgaaaatgtgggtgtttatgtctgtgtatatgtattttttacttcatgcatggcttctcctccaacttcctcctgcacttaaaaagggccaggttccaaattagacttgtaaatatggtgttagtgtttgacactactcctggatagttccaaacatcttccttgtggcaggtttcctggctgagcccgagcttccctccctgtttattgtgttcatgatcagtatgtgtttccatataaaacttttctcaacggaaaaaaaaaaaaaaaaaaaaa

SEQ ID NO: 291884 - DNA, 744 bp, Homo Sapiens
ctgtgaggaccccgcacagccaagatggcggcgtccgtgcgacaggcacgcagcctactaggtgtggcggcgaccctggccccgggttcccgtggctaccgggcgcggccgcccccgcgccgcaggccgggaccccggtggccagaccccgaggacctcctgaccccgcggtggcagctgggaccgcgctacgcggctaagcagttcgcgcgttacggcgccgcctccggggtggtccccggttcgttatggccgtcgccggagcagctgcgggagctggaggccgaagaacgcgaatggtacccgagcctggcgaccatgcaggagtcgctgcgggtgaagcagctggccgaagagcagaagcgtcgggagagggagcagcacatcgcagagtgcatggccaagatgccacagatgattgtgaactggcagcagcagcagcgggagaactgggagaaggcccaggctgacaaggagaggagggcccgactgcaggctgaggcccaggagctcctgggctaccaggtggacccaaggagtgcccgcttccaggagctgctccaggacctagagaagaaggagcgcaagcgcctcaaggaggaaaaacagaaacggaagaaggaggcgcgagctgctgcattggctgcagctgtggctcaagacccagcagcctctggggcacccagctcctgaggctttgtcccttcccaataaagcctgctacctggcagtacccctgaagaa

SEQ ID NO: 291885 - DNA, 1000 bp, Homo Sapiens
gattttctttggtcatccataatagagattgataagatttagcaactggtgttggagaaaaaaagaaaagcaaatgagtgttttcaggtttttttgcattatatgcatttatgtaatgtttctgttatcagcaatgtgcaattattttattgagaggaataaaaaagctttctatgagtttggtatggtgcgaggaaaatcttacagtttgaattatgacctagaaatttttcattcccatgtctacctaagaaggaagcagtaaatccataatttaccttttgggcaatgctttgtgagcaaaacaaagtcacttctgccataacatcttgaatgtaaccatatatgccagattactttatatgcatcaacaagatcaccagtgaagtttaatctagctaaacactggtcctgctcctgagatgggatcctatgtgtttggaaaacgtgataggcacacgaggatgagtggctttgtatcgcccagagaggtgcttgtccagatttcacatgcacatgaattgcctggggatcttgtgaaactgcagactctgctccaagtaatctgggctgggcctgagattctgcatttctaaggagtctcagggatgcctatgctgctggcctaaaaccacactcagaaacgaggacctagaagatccctaaaacagaataagaacaaatgtgattgtatttctgattctccctctcttcgaattatctgacttttttgtttttgtgcacatagtaatcatatcaccgctgcataacaacacagtgcatctttttaaaacaaggaaaagggaaaaaaaggagaaaaaacgatgcatcaagcttgtttgtcaaataccacagtattttattcattgttatcttgccaatggaaataaagtatgatattgcatttaaatattatatttatacctcatgtatatttttacctcaattgttgatatcaatcatcaattgtaaataaataattgccaaggcaaataaattt

SEQ ID NO: 291886 - DNA, 1000 bp, Homo Sapiens
aaacgtatgaagagagtgtgcctgtgtccagttaccagcaggcaggaattcccgtggacttgaaaaggaagattgcacggctggggatcaacatgctcctgaagatgatatttgtggataactttgtccatgcagaccttcaccctggaaacatcctggttcagggtgccaacggcctgtcctcgagtcaggaggcgcagctgcagcaggcggacatctgtgacactctggtggtggccgtgccatcttccctctgcccgctgcgactggtgctgctggatgctggcattgtggcggagctgcaggcccctgacctgaggaatttccgggcagttttcatggctgtggtgatggggcagggccagagagtggctgagctgatcctgcatcatgcccgggccagcgagtgcagggacgtggaggggttcaaaaccgagatggccatgctggtgacccaggccaggaagaacaccatcaccctggagaagcttcatgtgtccagccttctctctagtgtctttaagttgctgatgactcacaaggtaaagcttgagagcaactttgcctccattgtgtttgccatcatggtgttggaggggcttggccgctcactggaccccaaactggacatcctggaggcagcgaggcccttcctcctcacgggcccagtgtgccccccgtgatggggcagtggcctctgtgggcccttgtcaagagctggaggccactcccaagagcctctcctatggcagctgggacgttttaaaattgggacaccaatttcaaatgtaaccctccagtggtggaaggcacaccatggcttcctctgcttggtttgagggtctgttcaaaagctttgggccaattagggagtaaaaggagggaaggggcctatccattccattgtggaagctgggccaggtgccagggacactctccttcagggaaaatgttatgtggaggaggacgaataaatttattttgttttaaaaaaaaaaaa

SEQ ID NO: 291887 - DNA, 1000 bp, Homo Sapiens; identical to SEQ ID NO: 223778

SEQ ID NO: 291888 - DNA, 1000 bp, Homo Sapiens; identical to SEQ ID NO: 118407

SEQ ID NO: 291889 - DNA, 1000 bp, Homo Sapiens
tgccactgcatgagacacctgtgaccattcgaagtctgaaatgcggggggggagtttcatttttaagtgaagaccaaaagccctttaaaaataatagttttttatcattttatagtaatcagcattttctcttttactaatatactcattccttttgcgtatgattggcctttggagctacatgctccaacaaactatatcttaattgttaactgttaataattatctggcccagaaaaagagatgcagtgattttacccttcacaggaatattgaacttcttctgtaaaagagagagagaaacctctctctttcatgcaccacatggaaacagagtgtggccctgaagttgtggctttctttgtgtcaaaactgtggtctgagtttttagagaaggaaaaatgctactcagtgagaaatccaagaaatgaaaccaggaaggttttcagatcacatttcccagagtgagttcgggagaatcttggctgtcgtgatcacactgttccccgccgccccaggtcagcacatacttgacccagagtgggctctcaggatttgttgattgaagggtgggtgaaagctggctggagactcctggcctggccacctgcaagaggcggactttgaagaaaactgtgatccagttgagccactttgtccctgaggggaatgctgctttgcagctttctgtaacttctcacatgggaattgcactggtgacagataaggtttaacagatgtacttttttatcctcagaataagacaaggcaaactctatatggctagtattactgagtcaggtccctcccgttgacccattaattccagcattgatcaatacaaccaaattccagccccaggacaagagtggcaggcatgggggcctggtactccaggctacagtgtgagcccaggtgttctgcaccttgcagcctgcacactgcaggtgaaatcatgagcagtgttttggaaaaaaaaaaaaaaaaaaaaaaaaaaaaa

SEQ ID NO: 291890 - DNA, 1000 bp, Homo Sapiens; identical to SEQ ID NO: 118408

SEQ ID NO: 291891 - DNA, 1000 bp, Homo Sapiens; identical to SEQ ID NO: 223780

SEQ ID NO: 291892 - DNA, 1000 bp, Homo Sapiens
gggcacttatgtatttctgttcattttatgtcatcattgcctacatcatgctaaatctgcttgtagccataattgtggagaatttctccttgttttattccactgaggaggaccagcttttaagttacaatgatcttcgccactttcaaataatatggaacatggtggatgataaaagagagggggtgatccccacgttccgcgtcaagttcctgctgcggctactgcgtgggaggctggaggtggacctggacaaggacaagctcctgtttaagcacatgtgctacgaaatggagaggctccacaatggcggcgacgtcaccttccatgatgtcctgagcatgctttcataccggtccgtggacatccggaagagcttgcagctggaggaactcctggcgagggagcagctggagtacaccatagaggaggaggtggccaagcagaccatccgcatgtggctcaagaagtgcctgaagcgcatcagagctaaacagcagcagtcgtgcagtatcatccacagcctgagagagagtcagcagcaagagctgagccggtttctgaacccgcccagcatcgagaccacccagcccagtgaggacacgaatgccaacagtcaggacaacagcatgcaacctgagacaagcagccagcagcagctcctgagccccacgctgtcggatcgaggaggaagtcggcaagatgcagccgacgcagggaaaccccagaggaaatttgggcagtggcgtctgccctcagccccaaaaccaataagccattcagtgtcctcagtcaacttacggtttggaggaaggacaaccatgaaatctgtcgtgtgcaaaatgaaccccatgactgacgcggcttcctgcggttctgaagttaagaagtggtggacccggcagctgactgtggagagcgacgaaagtggggatgaccttctggatatttaggtggatgtcaatgtagatgaatttctagtggtggaaaccgttttcta

SEQ ID NO: 291893 - DNA, 1000 bp, Homo Sapiens; identical to SEQ ID NO: 118410

SEQ ID NO: 291894 - DNA, 1000 bp, Homo Sapiens
atggccatgctcgtagagagccagggagagatgattgaccgcatcgagtacaacgtggaacattctgtggactacgtggagcgagctgtgtctgacaccaagaaagcagtgaaatatcagagcaaggcccggaggaagaaaatcatgatcatcatttgctgtgtggtgctgggggtggtcttggcgtcatccattggggggacgctgggcttgtaggccccccccacccttctctctcccagacccttcccccaccacatcgggagcaatacccccaccacccctttcactccatcccctgctccaggctcactcccaaaacagacccaggcagccccacccctcctccacccccacggcagaccctggtgtccctggacctcaccgggccatggacccccccccgtccccgcacgtagatcgcagcaggcgtgattacacatgcacaccaacatgcatgccgccggcacatgctcgagacgtgtggacaccccagcgtgcgtgtgcgtgtgatgtgtgtgatgcaccagagcaccccctccacccccaccttgggtgtgtgtgcgtggtctgagcttcccccttcaccggggctgttgtgtagactgcagccaagtgtaacacagcagtccatcacgccctctctgtcctctgtgaacagtgtgtgtgcgtgcgtgagaccacagatctgtggacacaccatttgtgtacgtggaattttgtgtttcagtgtttgaacctaatgcaacagcaacaaagccactgatacctgagccctttgtgtctgctacaaaccaggcaggtggtgtgtgtggactcacactcacattctcagaggatccagggaggcccaggtacacacaggccatggcagacaccccatgtctttgttaccccaggggctgtggcatgtcccaggagggtgtgcatgtgtgtgtgtgtgtgtgtgtgtgtgtccaggatgtgcctgaagtattgataggtcttctcagatagagcc

SEQ ID NO: 291895 - DNA, 1000 bp, Homo Sapiens; identical to SEQ ID NO: 223783

SEQ ID NO: 291896 - DNA, 1000 bp, Homo Sapiens
agaaaatcagcaaagaggagcgagaatcagagagtggaggtctccggccgaacaagcagacctttaaccctacagacactaatgccttggtggcagctgttgcctttgggaaaggactatctaattggagaccttcaggcagcagtggtcctggccaggcaggccagccaggagctgggacgatccttgcaggaacctcaggattacagcaggtgcagatggcaggagctccaagccagcagcagccaatgctcagtggggtacaaatggctcaggcaggtcaaccagggaaaatgccaagtggaataaaaaccaacatcaagtcggcttccatgcatccctaccagcggccctcctgcctgggtttcattctggctatccctctaaggcgcaaggtgaagaagcttctgggccaggaaggaaaaaaaaatgcccacctgcagctctggtgaagcttgggcctgctctcctttccatcctctaaggagccaacttggcttttacctgtcaaatagtcataaagtcccctatcctttaccccaccttatacacacgaggctttctcaggaagtggctctgccaggcaggactatgtgggaaagggtttttccttagcacacgaaaaagccccttcccctggattcatgtttcttattttggagggagaagggaattgcacttcacactgccatcagggtttagttgacctcataatggtgcccactttctcgactttggccaggatttccttcaaagaaaacgactttccttcatttccctaagcctgtggcccaaatggtggaccagaatgatggtgggagggggcaacccccagtagctttgcctgcttttataaagttgaacaaattgaatttagacattcaggctaacctgcctttcttagtactcctttgttggcatgggcaggggttgagtcagcagaagtggaccaaaggattcctctgaataaagttatttaaattgaaaaaaaaaaaaaaaa

SEQ ID NO: 291897 - DNA, 1000 bp, Homo Sapiens
agtgaagaggtctccatggcaacaggacaccagcaagtgtgtgggagtcgcactggtgtgacggccagaactggactcagatttcagccccatccccaatgaagagcttgagtttgaagattatactttttttgagacagggtctgactctgtcctccaggccggagtccagtggtgcaatctcggctcactgtagcctcaacctgccaggttgaagtgagcctcccatttcagcctcccaagtggctgggactacaattgtgagccaccatgccaggctcattgttgtatttttggtagagacagggttttgccatgtttccctggctggtctcggactcctgggctcaagcaatctgcccgcctctgcctcccaaggtgctgggattgcagacgtgagccaccacagctggctgaagattatactttcaattcagagcgagtttgaagatgacactttgaggcatcgtgtctatggttcattactacagaagcttctctggatgtgtaaagcacaggaaaccaggcagaggaggcacagggtgctctccagaacgagaagccagctcctggagttgtttgctgcaactgccattccccgttgatgaccatgctcttccttcagaagagggagagtgagaggaccaagtccaagtggttcccatttgaacatttaaaaaaaaaaaaaaggctgggcatggtggctcacgcctgtggtctcagcactttgggaggctgaagtgggtggatcacaagtcaggagttcgagaccagcctgggcaagatggtgaaaccccatctctactggaaatgcaaaggttagccgggcatggtggcgggcgcctaaaatcccagctactcgggagactaggcagagaattggttgaacccgggaggtggaggttgcagtgagccgagatcgtcccactgcactccagcctgggcaacagagtgagactctgtttctaaataaataaacgaaaaaaaaaaaaaaaaaaaa

SEQ ID NO: 291898 - DNA, 1000 bp, Homo Sapiens
ctaaaatgaatattgtacccagtgacttcagtggtatccttttttcctaagaccatttataattattagtggcaacagagtcagtgctaatctagccaaattacatatgtataatatatttataaaggattctgggagatggtccaagggtgttctgtgtcaaaagatggcctattggccctcagttttcctacagagtagtggcttatctctgatcagctgttacaaactaaattccatgtaagctttcatcaacaaattccaaagtgcctcctacaagggcacagctgtccgtatctcctttggattccatatttttgtttctctccaattcagatattgggagttcttcagatactgactctgcacactatcttttgaacattatgaaaatataatctgtcgggttgttttcatacttcctttttttgcatcagtgataaggcatacatttgcgcagatgagctaggaagttttgagaagtaccttttatgttcagaaagtaacagattaaaggtttttatgggttccaaattggttagtcacttaggtatgcaattataaatgcaaaatagtgccagatctttaactgtatatcagggtcagtttttgttcatgcccaaatcactacaccttcctcattggccttggagtcctactattttgtgccttcatttgtgttacatacatagctgcaagcaaaccatttttcccctttcttttattcaaacaataatttttgaaacaaaaaagaggaaggaaatcagtggcagaaataatcctgctgttattggtgtttgtttaataaaaataatgggacttttttcttaactttttattagctcttcctaagggaaatgtcacatattattatttaattgtacttgtctttttttactttaagagcataaactcgtttttattttgcacacttttctcattttcctgagaatttaccagaaaaaaaaagatacatagatttgtctctgtgtttttctta

SEQ ID NO: 291899 - DNA, 1000 bp, Homo Sapiens
agaaattggaggtggtaggaagtggtactgatcaatgatggccagcaggactcatctcctgcctaactggacaggaagcctggcacccacttctgtcttcccctggaactgggcactggcgtacactggtatccctcctaaagaagtgactcacctgactgatcagcaagaagcctagattgcaggcctcaccatggatggtcttcctagttgcctggggaaaccctggaatgggcatcaggagaaagcaacaagaatccagtccttcacactcacactactctgttcctcttcccagagacatcgattcaccccaaagtgctgggattacaggcgtgaagcaccacgcccagcctgaaataatattttaccttttactttgtgctttttgtgttttactcaggaagtcctcccctacatctgttttcttctgtatttcttttcatatttaggtctttaatccacctggattttttgtttgggtttttgttgttctttagtcaaagatccaattcttttttctatttaaataaccatcattgactgactagtccatccttaccccacccctactgattatgatgtcactgctgtcacatattgtcatacgtggggggctgttactgggttctccagtctcctccctttactttatctgtttgtgtatccctgtgctggtgccacactgcctcgttcactgatgtttttaataagcctgcaccatttgtatgtcaattcttcctgctcttcttatccatcaaaaatcactttaacttttcttgttcctttactcttccatataaattgtttattcaaccatcaggttccaggaaaaagcctgttagtattttcattggacttacatggaatttgtagattttgaaaaaacagatatttttatgagtcttcctattcataaaaatagtatgtctccatttacttatgtctttaagtgtatttcagtaaagctttctatcttttcaaaaaaaaaaaaaaaaaa

SEQ ID NO: 291900 - DNA, 758 bp, Homo Sapiens
acacaagaagggtaggagagaaaagccatggccgacaaggtcctgaaggagaagagaaagctgtttatccattccatgggtgaaggtacaataaatggcttactggatgaattattacagacaagggtgctgaaccaggaagagatggagaaagtaaaacgtgaaaatgctacagttatggataagacccgagctttgattgactccgttattccgaaaggggcacaggcatgccaaatttgcatcacatacatttgtgaagaagacagttacctggcagagacgctgggactctcagcaggtccgatacctggaaattagcttagtacacaagactcccaattactattttcttccttcccagctcttcaggcagtgcaggacaacccagctatgcccacatgctcaagcccagaaggcagaatcaagctttgctttctagaagacgctcaaaggatatggaaacaaaagttgcagaggtgccatgttcagaatacaataataaagtggagtgaaagatatacttcaggcagttttgaaatgcagtggctttttcttagaaccaattttattgagcggttctggaggaacatacttctgctccccttgcataaaggatctctatatcctagaatcccaggtttaggtaaagagttgcaaactggaactcataaattatcatagtcttcacccagtctgtctcttagaatttatttcccactgacacaaacaagccattttgtctgcttgtataaccc

SEQ ID NO: 291901 - DNA, 1000 bp, Homo Sapiens; identical to SEQ ID NO: 223785

SEQ ID NO: 291902 - DNA, 1000 bp, Homo Sapiens
gaggaggaaactggccccatagcagccatacctggagctggatctgaccctgattggggagagctgagtgctgagccttgggagcccctgccagccacctgcacctgtggacagtgggtgggggcactactccccactcagagcacaaatgcaactccttcccctacaatcccatcctgagccattgcagggggcagggaagttcacccccccccaccacccccccgcccccccgaagccatgtcactgaaaaggcctgggggggatggtatatggccctttccccaccaggcgctaaggggaacacccccttccccaggtcttttatttgtttaagttatttttgcacaaatgactcttttatatttaattcgatttcattgcctcccttcttaaagccaacaggctcagtttacaaacctgtgagctactgttggctgctgccctccttcccagtgaaaggtacaaagcaataagcatcatgcatcctccccttacccctccaacacccctctgcctctggctcaggttgctcaaagcacagatcctctcttaccccgtccccaggtttgaaacacatagcctcatttcaaggtgtagccaggttcccccgactttcctctgggatataaaaaagggggtaagggggcaaagagagccctctgggcctctcctcccatacacactacactgccccttctccccccatcaaaacgctcagagacgttgtgatgatgcgactgaggattatgcaacgtggtccaaccggagcggccagcatgaccagctgtccaggggctgcctcctgccttttcttttgtaaagacaagacccttgggagttttaattctgttttgtacttgccctgtggggcctccactgcttttctatgggagacactcttaatttaacagatgagaatattttgaaactctgaaaaaaaaaaaaaaaaaaaaaaaaaaaaaaaaaaaaaaaaaaaaaaaaaaaaaaaaaaaaaaaa

SEQ ID NO: 291903 - DNA, 1000 bp, Homo Sapiens; identical to SEQ ID NO: 118413

SEQ ID NO: 291904 - DNA, 1000 bp, Homo Sapiens; identical to SEQ ID NO: 118414

SEQ ID NO: 291905 - DNA, 1000 bp, Homo Sapiens
gtcttatattcggataaatttaagcaaaaaatgaacaattttctaaaatacgttattgaaaactcgtcacccttctcagtgtatgtcaacattcaatatgtatgacttttattgtggtatagcttagtgccaatttaaggtatattgtgttccatgggtctttagagcattctttgtacactttttctaatcagcactgtcttaagacaacacaacactgttagtaaggcaatttattggacacaatggcatcgatgatcttaaaaaaatatatattctgtacttaatccctttattatttaaagccgggcttgtaatttttctttttaaaatttaacattatgcagccctgctcagtagagactcactcagcattatgacatcataaatttttaaatgccatattttattcaaggtgatacgaataataatagacatacactggaacagcagttgttgaaatacccagatttttcaccttggttactctgaccttgggtcagaacctaactttacagtgcttcagttttcccaccttttaaggaggataattactgatttccacgttaatttaaaagaacattatgaggattaggcgaacactttgtaatactttgcccaagaaaaagaaaaatgttgttactgaaattataaggtattttattgtctttagaaccttgtaattgaacagggagattatttttgaagtttaaaaattactagatagaatttggaaacatgttgtggaataaatgattctaaaaagcatgtgaaagagacacacaatgaggaaatagggagtttctcaaaatctaaacttgtacaggtatctaaacttgcctcaagtaactctcagatgtcttatttaaaatcatttagtgaaaaatgacatttaaagctaaaaaataatttagttgtactaattatggtaccataaagtgctttgacataaatttgaacctagaattggcagttctaataaaagtttttccactttgtt

SEQ ID NO: 291906 - DNA, 1000 bp, Homo Sapiens
gatttgcggtggaagagacaggggagggaaacggttggggttagatcccttcctgagctacattaaggctctttctctaatcgccttacttagctttttaccctttaagtagctcctcttccctcgcccccaccctctaccccacccccaccttcgctcagactttaccggctttccccagtccataaaggtcttgccccaacactcaccccttctttttttcccctctccaaatgcagcagtgaatccctttattaatactggaaatccctctctgctgcttttgttggtgctgcccacactgcagatatattaaggatgttaggagagatttgatttaattgactctgcctagataggtctcattaaacagagtggagatttcattggtcagcactcctcaatgaaagacagacctaatgactggcatttgagatgctgctggcattttgaattcaacatctgctgaaaacggtaaaactaattagtgcccacccaccctccccgccccagcaactgcatattgaaatttgttaaagcactcatctttatggaaattaatcattatcctaaagaagtgtttctctcccatcatccggatttctggttgtggcccagcaattaacaaaaacagcttcaactgttcgaattttatgaaccaatgtaactctggcctcaatcatattcctctgggatttctaaacagcagttaagctacaaaaagcaaacaaaaccacacatattgatggagtctgcattccaccacatatccacccttgagaagtatgtcaaaagactgcagactatagatttttttttaatataggattataaatcagctagtgaaagacctcagagcagttgtaagtagatctgccatctagaactcatattctaaagggaagtgatttctcagaacagtgatgttctggaatatgtattatttattttaacacttttttaataaaatctttattataaaccaaaaaaaaaaaaaaaa

SEQ ID NO: 291907 - DNA, 1000 bp, Homo Sapiens
accacacatgattttatttttctcttcctttgaaagcatgatctcttttattaatatgaatgcaaaatgcttgcatccaaattaaagcttattttctttacttttaagttctttgattgccctattcataaaatgaaatgtccagtatggaaaacatagggtaccaaagtgtggaccaggagtacaaattcagtcccaatactcaatacgtattatagatgactatgagtgcaaaccttaggatgtgattttctgaataattgttctttgtaggatttggttacattatttaaaatgaaaaagatctagttttagtgtgagctcagtaatgttaattggttaagttcattgtgaatcttgagttttagataagtagttatttttttcaatatcacttctgtttttagtgatattatatcaagaaacaacgtattcaagagccatggctgacagtgccagatatacttagggataaacatcaaaatgcaattatagttgctataacgttagatactcggaatcaaaatttatttgcaagctgacttgataaactaaatgaaccaataaaatttgtagaaatgctatcctgaaataattatatacatgaagacaatgttgactaatgaattaagatacattatatactagttaatgctaactagtctcagtacctgtttttagccatctgttactgtccaatagcacctcattcccacattctattttcccccggtattctttagatcctagtatttggaaaacaatcggctaaccttgacatttctttttaccttcatatgccactatctcggtagttcaaaaaaatttagttcttgataaattgccttgaagtttaccttgtgctggagagccttatgataactccaaagactttcttacggtataatacatgttgtttaggattgtgtttcttagtcactgaagataataaatattaaaatggatgttttcatcagaaaaaaaaaaaaaaaaaaaaaaa

SEQ ID NO: 291908 - DNA, 1000 bp, Homo Sapiens
catactgcacggacgtagcgtttccctctacaagcactaggagcacctttctcaaggacaagaaatggtagcaaccaaaaggttggttgaaggaaacaatccttccttctggtggcagagccagtcttctgggcctcacatgcctgtgcggttaagaaggagctcttggccgggcgcggtggctcacgcctgtaatctcagcactttgggaggccgaggcgggtggatcatgagatcaggagatcgagaccatcctggctaacacggcgaaaccccgtctctactaaaaatacaaaaaattagctgggcatggttgcaggcgcctgtagtcccagctacttgggaggctgaggcaggagaatggcctgaacccgggaggcggagcttgcagtgagccgagatcgcgccaatgcactccagcctgggcgacagagaaaaaaaaaaaaaaaagaaggagcccttgaatctgagaatcccccagttaagatgatttcccttaaggagcatttctcctgatcaggtgcattcagggaggcctgcaactccatcctaaggtgacatttcaagaaacacatgtgttgaccacctctgtgtgccaagcactgggtgaggagtggtcgtatattaccataattcatcctcactcaattgggaggtggcattcttgtccctgttgcccccatctctacccccttttgttaatggttgagagaaatgtggaccagtgattctcagtttggtgcccaggtccccaaaggaagtgatggagagccttgagctaagttcaggcagcagcatgtggccagcagcagtgtgctgggagcagaggttggaatcagggctcagggccttcacttcaagggccctccccagctactcgggaggctgaggcaggagaatcgcttgaactcaggaggtggaggttgcggtgagccaagatcgtgccactgcactccagcctgggctacaagattgaaaagatcgaaactctgtctcaaac

SEQ ID NO: 291909 - DNA, 1000 bp, Homo Sapiens; identical to SEQ ID NO: 118417

SEQ ID NO: 291910 - DNA, 1000 bp, Homo Sapiens
gcggggtggagctgggatgttctcaccactggggtctgggcttaagcttgggcgactgcctcggggcacggcagggagggagcttccgtgcatgggtgtggccggggcggggcctcaggggggcagagccacccatctctcccctccctatgccttgcaggtcgcccaagtccagccccaggatgcccagaccccaccatgtccctagcccggcctgggtggcggggcccagctcttgggcttcctcttgccaggtccgcccttggggaagcgtgccccgtaccctccaggctagaggcttcccctgatcccttcagcccctaccccgccaagtgcgctcatgccccacgcggggtctccaagtgagtaggggctgaatgcagccaaagaggctgctggacgggcgtggccgggaaggaaatgggactggagtccagagcatcagacctggccgcctccatccaaggcattgggaccatgggtgccggagccacgtgtggctgagggctggcggagcctgctccccagggagcactgattcctggaggtggtcgtttttgagggggctgtggggcttgtcttacctgcccccttctgtccagcacttgcatggcacttccctctattttcactcttggcgggtgcccacacgttgcatttctcttcctttcttcttctcgctgtcctccatcctccattccgtccaactcctatcccagcccctggggagcctacctcaggtctgagagtctgggtgtgtggatttccttcagctacccggatgtccccacaggcaatctgattttttctccacatctggacccctccccctctatccctaaccctgtctaaactaatggcgcagtggtagctgcaagggcagggatgggagtggctgaagcctacttcactcccaaagatttctaaggaaaatggttctactgcatcctttggctgggccttgttgacccgtgaccctcttccaagaacattcactctg

SEQ ID NO: 291911 - DNA, 1000 bp, Homo Sapiens; identical to SEQ ID NO: 223790

SEQ ID NO: 291912 - DNA, 1000 bp, Homo Sapiens; identical to SEQ ID NO: 223791

SEQ ID NO: 291913 - DNA, 1000 bp, Homo Sapiens
gcctggggcctgcctctgccagaaggagccagggctgctgaggaagagctgtggggcagaagtgaagccccgcaggggaggccacagggtccagcctgtctttaggatcatctacactgcatgaggggagccccaggaaggcagcattcataagcccctgcaccagtgaggaagagaaagaggaggagaattaagaagaggatgatcgggaggaggaagaggagaataaggaggagcaggaggaagagggggaggagaaggaggaagagggggaggaggaagaggggaaggaggaggaagaagtgtaagaagagaagagaggatgtgttgggggtgggtagttgtttttggtttgcgtcatcatcaggcccgggctctgctcactgctgttccgtgtcaagaactccacctctgctttgccggtgtagatctcggccagtggctgcttgttctcttggggatgtgtgtgtttttatctgagcagctcctttccagagtaccccagcgcagttccaggagacggtgggaaggaggcatggcagacgctcaccttgtgactgtgacctcgactgcaggaggaccaaccagacacgggaaggagcagggctgcctgaggctccccaggaagctttgtgctttggcgttccacccctgctgttactcgtgactcagtttcctcaacttggtggggtgttccctgctatgttttccagcatcctgtgactgtcctgtgcagtctatagggcagggccctgccccagcgggtgggctcaggagggggttccctgaagcgagtacacattgccagagcccaccatcctggcaagaggtggatcctggggccctatggaaggagggatgtggtggggggggccacactgagggaggggccggggacttgtgacctgtagtggctgtttgcagtttctctctgtgttagattcccttttcttcagcagtttcagttcatgtttctcttcagtaaattttgttcagtgtt

SEQ ID NO: 291914 - DNA, 1000 bp, Homo Sapiens; identical to SEQ ID NO: 223792

SEQ ID NO: 291915 - DNA, 1000 bp, Homo Sapiens; identical to SEQ ID NO: 223793

SEQ ID NO: 291916 - DNA, 1000 bp, Homo Sapiens
agcttcatgttaaaagtaacacagtatgaccaggataagacgttactgattatgaccaacaacccacctccctgctcaatcacccagcaagacaaggagagtgcatcaaaatatttttccaaggagttactgctcaaggtcatggaaagtcatcatcagcacaaacccactgagaacctctggctgccccgcatgcctcagaaaaaaaagttaagatctaagctgaaaccaatcttccctttgatactgtcggatgatcccacatccaagcgagaacaatggtttaggttttccactgacaatgatttcaagagcgaagggaagtattcaaaagtctacgctttgaggacacagaagaaaatgtaccctcagctcacctttgctccagtccatgagagagatatgaggaaagatgcttccaagaagtcagcgagtgaaaggccaatttccaaagtgattcgggaaccactgacactcgcatcgctcttggaagacatgcccaccagaaccgcgcccggggagagcgccttccgcaacgggagggccccgcagtggattatcaaaaaggccacggtcatcgggtgaacacagacccctcagtcctcccgcctcgctctcttgagactgaggggtccgcagaagtcgccacccaaataaaaccacattcctgctgctgcgggcgtgggctcccgggtcgcaagccgggagggtcgagccgaagtctccggcgggccgcaagaggagaagggggcgtggctgcgtcccgggggccgagggcggccggggagggcgggccttggccccgagtgaaggcgcggcggcccaaccggcgtgagagcgcggggccggccttcctgcagcctcttccgctcgccggctgcggcgcctgggacggttgcggtgggtctgggcgctgggaagtcgtccaagatgattaaaaaattcgacaagaaaaaaaaaaaaaaaaaaaaaaaaaaaaaaaaaaaaaaaaaaaaaaaaa

SEQ ID NO: 291917 - DNA, 1000 bp, Homo Sapiens
tgtgtaagtgttttgtaaaatttcagtggaaatgcacagaaaatcttctggcctctcatcactgcttttctcaagcttcttcagcttaacaaccccttccctaacaggttgggctggcccagcctaggaaaacatccccatttctaacttcagccagacctgcgttgtgtgtctgtgtgttgagtgagctggtcagctaacaagtcttcttagagttaaaggagggggtgctggccaagagccaacacattcttggcccaggagcattgcttttctgtgaattcattatgccatctggctgccaatggaactcaaaacttggaaggcgaaggacaatgttatctgggattcaccgtgcccagcacccgaagtgccaaattccaggaggacaagagccttagccaatgacaactcactctcccctactccacctccttccaagtccagctcaggcccaggaggtgggagaaggtcacagagcctcaggaatttccaagtcagagtcccctttgaaccaagtatctagatcccctgaggacttgatgaagtgatccttaacccccaagtaatcattaacccccagaccagcctcagaactgaaggagattgttgacccagtgacctggagttgaggctcagggagagatctgccacatgtctgagggttgcagagcccgctgtggaggtaagattggaaacacatgaggcagagggaagacattgaagaaaacatctctgctggaatatttggaaaagaacactcttctggacctggttgaagcaggaaagatggaggcaaagtagtgaaataatccagaatttcaatgcttttgaatgttcttagtgatactgacctgtgataatataattcccagggaggactgggaaccttatctcttgagatatttgcataatttatttaatttaagcctcattctccttttgttcattttggtaataaactggatttgaattgtgaacaaaaaaaaaaaaaaaaaaa

SEQ ID NO: 291918 - DNA, 1000 bp, Homo Sapiens; identical to SEQ ID NO: 118419

SEQ ID NO: 291919 - DNA, 1000 bp, Homo Sapiens
tgtttacaagaggaaacaagatggaataaaagaaattgggatcttgggttggagggacagtgaagcttagagcacatgaactcaaggttagtgactctgcaggacttcacagagagagctgtgcccatcattcagtccaagtgctttctctgcccagacagcacagaactccagccccgctacttacatggatcatcgagtttccacctaaaatatgattctatttattttgagtcactgttaccaaattagaactaaaacaaagttacataaaaagttattgtgactccacttaattttagtgacgtatttttgtatatataggccaacctataccacatccaaaattatgtatctattacagcccctagaagctttataaatacagtgtgtcttcttttattcacaaaatttttgaaatcgtggtaatatggtttgaaacctgtatcttaattattttttttttaaattgagacagggtctcactctgtcactcaatctggaatgcagtggcacaatcttgcctcactgcaacgcctgcctctcaggctcaagcaaacctctcacctcagcctgctgagtagctgggactacaggcacatgccaccaaacttggccattttttgtcttacgtagagacaagatttcaccgttttgcccaggctggtctcaaactcctgggctcaagcaatgtattgaattttaaaataaccaggcactcactcttatgaattaataaacatttggaggtatataaagtaaaaagttaaagtctttcctgtaagttaacacaaatgttaactattgttaaaaactttacaggtagctctctagatatttttctatttttgtatgtatacttatgcatacatgtaagtatataaacatttagaagtgtacctatctaacaaactattatgaaatactttcaaatctgtaaatagatctattatactattttaaaaaaaaaaaaaaaaaaaaaaaaaaaaaaaaaaaaaaa

SEQ ID NO: 291920 - DNA, 1000 bp, Homo Sapiens; identical to SEQ ID NO: 223794

SEQ ID NO: 291921 - DNA, 1000 bp, Homo Sapiens
tgacccccgtgcaacctctcctggctcacgcctatcccacctggctgccttgtaactgactcagaccctggccagaagggaagggactgggcctcacggggtggggtggggcctccaagagtgtgtggaggacatgaccagaggcgcagaatgtgccaggaggcccagcactgcagggttgggcctttgattgaacagaccagactttcccgagcacgaggcccctgtgggcttaatgccagcctggggctctcagcaggaggaccctttggttattgcatcacacttttggaccagcatgccggtggggtgcaggcgccatttgtcttggaagtcaatttccttcaggagacaaagcaagtttggggtggtagccttaatgcccagcaccttggattgattcccatggtctaagagggtctttttgactaaggccagcctgtggtgatcccagcagctttggagggcctgcagcccacacactgactgatacatggtatgttacagggacttgtcactttggatcaggctgggccactacagggcctgatgggccaacttgggtaatcactgggaggagggaaactgaggcccgaggcagatacctgggtttggggagggctgggtttagcccggttctctgaactacatacccccagctgtgaagccttcctcttgaggggttgaggtgggcagtatacaggagccaagcagcccagggtgggtcgcagcccaggccccttccagggtgccactcctttcccccttgtgttgcaaggagccctcctgcctgggagcttgttctttggaaggtgctgagcctgaatttgccacagtcaagtcaacgttcccaccccactggcttggttacagggctctcacatggggtaggggagccatactcccacccccttgcgtattcccctgggtttgttgatattttgcactcttaacacctgccaataaagacggtctacactgaaaaaaaaaaaaaaaaaaa

SEQ ID NO: 291922 - DNA, 1000 bp, Homo Sapiens
ctcatgtcctccctcacctccatctttaacagtgccagcaccatcttcaccatggacctctggaatcacctccggcctcgggcatctgagaaggagctcatgattgtgggcagggtgtttgtgctgctgctggtcctggtctccatcctctggatccctgtggtccaggccagccagggcggccagctcttcatctatatccagtccatcagctcctacctgcagccgcctgtggcggtggtcttcatcatgggatgtttctggaagaggaccaatgaaaagggtgccttctggggcctgatctcgggcctgctcctgggcttggttaggctggtcctggactttatttacgtgcagcctcgatgcgaccagccagatgagcgcccggtcctggtgaagagcattcactacctctacttctccatgatcctgtccacggtcaccctcatcactgtctccaccgtgagctggttcacagagccaccctccaaggagatggtcagccacctgacctggtttactcgtcacgaccccgtggtccagaaggaacaagcaccaccagcagctcccttgtctcttaccctctctcagaacgggatgccagaggccagcagcagcagcagcgtccagttcgagatggttcaagaaaacacgtctaaaacccacagctgtgacatgaccccaaagcagtccaaagtggtgaaggccatcctgtggctctgtggaatacaggagaagggcaaggaagagctcccggccagagcagaagccatcatagtttccctggaagaaaaccccttggtgaagaccctcctggacgtcaacctcattttctgcgtgagctgcgccatctttatctggggctattttgcttagtgtggggtgaacccaggggtccaaactctgtttctcttcagtgctccatttttttaatgaaagaaaaaataataaagcttttgtttaccaaaaaaaaaaaaaaaaaaaaaaaaaaaaaaaaaaa

SEQ ID NO: 291923 - DNA, 1000 bp, Homo Sapiens
ctatgagatcggggcaagtgaggggtccccctattctggccccacccgctcctggagtccctttcgctccatgccccccgacaggctcaatgcctcctacggcatgcttggccaatcacccccactccacaggtcccccgacttcctgctcagctacccgccagccccctcctgctttccccctgaccaccttggctactcagccccccagcaccctgctcggcgccctacaccgcctgagcccctctacgtcaacctagctctagggcccaggggtccctcacctgcctcttcctcctcctcttcccctcctgcccacccccgaagccgttcagatcccggtcccccagtcccccgccttccccagaaacaacgggcaccctggggaccccgtacccctcatagggtgccgggtccctggggccctcctgagcctctcctgctctacagggcagccccgccagcctacggaagggggggcgagctccaccgagggtccttgtacagaaatggagggcaaagaggggagggggctggtcccccacccccttaccccactcccagctggtccctccactctgagggccagacccgaagctactgctgagcaccagctgggaggggccgtccttccttcccttcaccctcactggatcttggcccaaccaaatcccttgttttgtattttcttgaaccccgaccactaccccaggtttctaactttgtaacttgcttctgatgtgggtccctaacctataatctcagcttccctaccctggactgaagggtctgcccatccccccaccaccctccatcctgggggccctcgcacaaatctggggtgggaggggctaggctgaccccatcctcctctccctccaggagcccccagcatgtcctgacctgtgcacggggatggggggacaactcctacccttctttccccacatgccccactaaaccatctgacaacattaatgaataaaatggtgaaaatgtg

SEQ ID NO: 291924 - DNA, 1000 bp, Homo Sapiens
actgtcttcaacaagtacatgaagttcttccagaaggcagcactgaacgtgcgagacaatgttggggaggaggtggacgcagagcagctgatccaggaagcctgtcggagctgcctggagcaggctaaactgctcttttcagatggagaaaaagtaatacccagattgacccatgagcttccaggaataaagcgtggccgtcaggcagaagaagaatgtgcccatcgaggaagcccccttcctaaaaagaggaaaggacggcctcctggacacatcctgtcaagcgaccgggcagccgccggcatggtatggaaaccaaaatcctgtgaaccaattcgccgggaaggccccaagtgggacccagctcgcctgaatgaatctaccacctttgtgttgggatctcgagccaacaaagccctggggatggggggcaccagaggaagaatctacatcaagcacccacacctctttaagtatgcagctgacccccaggataagcactggctggctgagcagcatcacatgcgggcaacagggggcaagatggcctacctcctcatcgaggaggacatccgggaccttgcggccagtgatgattacagaggatgcctggatctgaagctagaggaattgaaatcctttgtcctaccctcctggatggtggagaagatgagaaagtatatggagacactacggacagagaatgagcatcgtgctgttgaagcacctccacagacctgaggccgggtcccctggccacacttggcagccctcctccaaagccctcttcctcacgtggctgaggccaccgctgggactgctcctagatggatctcagcggcattaagctgtgcctgagcgagtttgtagtgactcactgcacagcacccccagactagcatgtggttctatatttgtaaagttattgggataagaaacaattaaacagtttgtagtaaacacagatggtgaaaaaaaaaaaaaaaaaaaaaaaaaaaaa

SEQ ID NO: 291925 - DNA, 1000 bp, Homo Sapiens
ctcagacacatgcttttataaaccaataacaaaggatcaactttcttctaggtctgaattgaatactgtgaggctaaagtgtcttaactcattgagggggtggaaaatattaaaccaactaagccttacctaattacaatgccctgctgctgctcatctccctttattcgtttgtactcatactcaaaagaggttgtgtttttttcccttcattcaataacgattttccttgattcttagataagtccattccataatgtactccttaactgttctgaatttctttcagagaaaaactggaaaagacattaaatcatgttgaaatatttgactgactttcatctaggaaaaaatataaagttaaatctctacactaaaatataaacaaaataaaaagaaatttcagtaagaccaaaacatttacttttaaaaacctatatcatgttatatgtataactgaggaatgtaatcataattttgatttgtagaactgaagacaatatcaagtaaccctcaaaatgtaaattcaagaaacaaggtagttacgttagcctgcattaaaataaaaatatctgtgtgacaatatatgctgtagagcaaattaaaaaacaagtgaaaaggttgggtaaatatttgcaatacatattgatacggtttggatttgtgtccctgcccaaatcttatggcaaattggaggaggggcctggtgggaggtgattggatcataggagcggatttcccccttgctgttctcatgatagtgagtgagttctcacaatatctgatggattaaaagtgtgtgcacctcccctcttgcactttctctccagtcaccatgtgaagttccttgcttccccttctgccatgattgtaagtttcctgaggcctcccagtcatgcttcttattaagcctgtggaattgtgagtcaattaagcctttttattcataaattatccagtctcaggtagatctttatagagtgtgaaaacagactaatgc

SEQ ID NO: 291926 - DNA, 1000 bp, Homo Sapiens
gggggtttaaatgtcacctgtagcaatgcaaatctcaaggaaatacctagagatcttcctcctgaaacagtcttactgtatctggactccaatcagatcacatctattcccaatgaaatttttaaggacctccatcaactgagagttctcaacctgtccaaaaatggcattgagtttatcgatgagcatgccttcaaaggagtagctgaaaccttgcagactctggacttgtccgacaatcggattcaaagtgtgcacaaaaatgccttcaataacctgaaggccagggccagaattgccaacaacccctggcactgcgactgtactctacagcaagttctgaggagcatggcgtccaatcatgagacagcccacaacgtgatctgtaaaacgtccgtgttggatgaacatgctggcagaccattcctcaatgctgccaacgacgctgacctttgtaacctccctaaaaaaactaccgattatgccatgctggtcaccatgtttggctggttcactatggtgatctcatatgtggtatattatgtgaggcaaaatcaggaggatgcccggagacacctcgaatacttgaaatccctgccaagcaggcagaagaaagcagatgaacctgatgatattagcactgtggtatagtgtccaaactgactgtcattgagaaagaaagaaagtagtttgcgattgcagtagaaataagtggtttacttctcccatccattgtaaacatttgaaactttgtatttcagtttcttttgaattatgccactgctgaacttttaacaaacactacaacataaataatttgagtttaggtgatccaccccttaattgtacccccgatggtatatttttgagtaagctactatttgaacattagttagatccatctcactatttaataatgaaatttatttttttaatttaaaagcgaataaaaggttaactttgaaccatggaaaaaaaaaaaaaaaaaaaaaaaaaaaaa

SEQ ID NO: 291927 - DNA, 1000 bp, Homo Sapiens
tgaacattggaaatagatgattagatttttgtgtcattttacaattaaatctaaaatgcttaatccaatatcatcatcaaaattcagtgaaatcccaaaacagtgccaagaattttgctgaatgaaacaatcaaacaaagcattttaaggtgtaagttatagtacctgtacttgcagataagaagcttactatatcattattataagtagcatatattactttcaaatacctatattagaaagatattgatctgactgaaatataacctacctgccagtaaggtccaaaggctgaatttgttttgaatgagttccttgatctttaagcactgatgattttcttatatatgaggatgcaaagcattcaagagtttcagcctgttctggtgaggggctccctgacttacataaagttttcagtgcaattttaatagtacatatgctttaatttatttttcttctgcgtgtggtcagacccaattacactgtggctaagactctcaaagtgccagggtttctgtgatgattctgagaatgctgaatacaaatataccttatattctttaaggaaaacggaaaggaaagatcagcagaaatagggttttctcatcttcaccatcaataaacatttattgcgtacctcctatattctgcaaattttccccaaatagaagccagttcagtccacaccatctcttctttgagttgtttatggcctcccttaaggcattttacaaacccataagcctacaatagatgagtatttttactatttgtattaagtgtcataatagcatcaatgtgcacattaccagtatagactgttggagttcactgattgttttcatagatgatgcttcttggggaaaaatagtataggatgtgaaagttttgaattacggttatttaaaaactaacatttgctatggccaaagtgtttacaataagcaataaagtgaaagaacctattataacacagattataaaaaaaaaaaaaaaa

SEQ ID NO: 291928 - DNA, 1000 bp, Homo Sapiens; identical to SEQ ID NO: 118420

SEQ ID NO: 291929 - DNA, 1000 bp, Homo Sapiens
agtctcgggaaatgaagacgagacagcgggcggtggccctgtatttcatcgataagctggcactgagagcaggaaatgagaaggaggacggtgaggcggccgacaccgtgggctgctgttccctccgcgtggagcacgtccagctgcacccggaggccgatggctgccaacacgtggtggaatttgacttcctggggaaggactgcatccgctactacaacagagtgccggtggagaagccggtgtacaagaacttacagctctttatggagaacaaggacccccgggacgacctcttcgacaggctgaccacgaccagcctgaacaagcacctccaggagctgatggacgggctgacggccaaggtgttccggacctacaacgcctccatcactctgcaggagcagctgcgggccctgacgcgcgccgaggacagcatagcagctaagatcttatcctacaaccgagccaaccgagtcgtggccattctctgcaaccatcagcgagcaacccccagtacgttcgagaagtcgatgcagaatctccagacgaagatccaggcaaagaaggagcaggtggctgaggccagggcagagctgaggagggcgagggctgagcacaaagcccaaggggatggcaagtccaggagtgtcctggagaagaagaggcggctcctggagaagctgcaggagcagctggcgcagctgagtgtgcaggccacggacaaggaggagaacaagcaggtggccctgggcacgtccaagctcaactacctggaccccaggatcagcattgcctggtgcaagcggttcagggtgccagtggagaagatctacagcaaaacacagcgggagaggttcgcctgggctctcgccatggcaggagaagactttgaattctaacgacgagccgtgttgaaacttcttttgtatgtgtgtgtgtttttttcactattaaagcagtactggggaattttgtacaataaaaaaaaaaaaaaaaa

SEQ ID NO: 291930 - DNA, 1000 bp, Homo Sapiens
ctcagctctccccagtgccttttggccactgcagctaccgtagaatggcattttatatgtaccttgtcacccacttctgtttactttttcctctccagtaaaaagtaaaagatttctttcaattggtcttcccattgcagttactgttatttctcttttttggttaactttaaatcaaaactcaaaatatgttcatccagagtgtgtcttaagtaacttacgtgtcttaagtaacagggaccagagacatgttacctacaagagttctgggctatccttttcattcttatcacatatcatagcttgaatattacaacagtgtgggagagaatcaaccgtaaaaatgtcttcattaattagacccagttattccacttttgttaatgtctctcaaattgtacaaagtataaaaaattatatgcacaaagatgttccaagtgacattacttttagtagcccaaattataaaccactttaaagtttggggtaaagattggcaaactttttctataaagggccagaaagtaactattttaggtttttaaacctactgtctctgtcataacttgtcaacactgctgtatgaagcacaaaagcagccatagacaatacataaacaatacgggcgtggctttgttccagtaaaactttgtttacaaatgtggtgccatagtttgtcatccctgggtctaggaaatagtcaataaacagatatatacaaatgatacataatgtacttattaaaaattagtaatgaatattattaaaaacatgaaaatattaccttaagtaaaaattgcaagacggaaaagtgtataagtgggtgtaatcatggctgaaataacagaccaagcatatgataaaaagataacaaagtaaatcaaattactaactggttatagtgggataggaggcagaaaatggatgactttgtcttttctcaatgtttttatttgtattttataataaaaatgttttaaaattaaaaaaaaaaaaaaaa

SEQ ID NO: 291931 - DNA, 1000 bp, Homo Sapiens
gcagtgaactatgattttaccactgcactccagcttgggcgacggagtgagaccctgtctcaaaaaaaaaaaaagttttctagaataagcaggatgattgtttaatttgaagatggaacaggaaactagagtgcatttaaaatactctgtcttcattttaacatgttgaatggaataactgcatatcaccatgagtttgttttgcttttcatacagacttgtatgtgtcatttgagtggtttccagattggagcgaggttattctgatctaaatgaacagcatttttttccttagcctctgtttgccactctgggtatcgtctcctatggcaaagccattagaaatgcataaaacctcgagacatggtttttggcaaaaactccatgactttaaactagctcttttactactgacctttcacagagaaaaaatatttcccttgaaaaaaactgggcttgtcattttttcccttgtagctttaagcagagacataagtgccttgcattacacatagtaaactttctttaaaaaaaaaaaaaaaagattttggagactaccagggtaagattccaacttgtccaaaagctttctggccttacatattttattataaaaattctcaagtctggtaatcttctatgtcagagctagtgatttcaaaaggtttcacaattccccaagacaaaagtgattttcgttcattataataaggttaagtgatatgtgattcataacaattttgatgtgaagaagggaaggacatcattgacttaataatagtatcagtcggtgcaacagttggcaacatgtgccttcacactttaccataaagagacgggtttgagggtttgccttctaaagtctgcaacttcaagaaaaaaaatcgacactgtggattgactttcccggtcactatataaagcaaataaacttaaaacactttgtaaccatgtatttactctgccaggtgcctatattccaataaaatgttcatccttg

SEQ ID NO: 291932 - DNA, 1000 bp, Homo Sapiens
gcagatagctgccttcactcgcgccatcgaccaggagactgaggaggtccagcagcagctggcgccacctccaccaggccacagtgccttcgccccagagtttcaacaaacagacagtggcaaggttctgagcaagctgcaggcccgtctggatgacctgtgggaagacatcactcacagccttcatgaccagggccacagccatctgggggacccctgaggatctacctgcccaggcccattcccagctccttgtctggggagccttggctctgagcctctagcatggttcagtccttgaaagtggcctgttgggtggagggtggaaggtcctgtgcaggacagggaggccaccaaaggggctgctgtctcctgcatatccagcctcctgcgactccccaatctggatgcattacattcaccaggctttgcaaacccagcctcccagtgctcatttgggaatgctcatgagttactccattcaagggtgagggagtagggagggagaggcaccatgcatgtgggtgattatctgcaagcctgtttgccgtgatgctggaagcctgtgccactacatcctggagtttggctctagtcacttctggctgcctggtggccactgctacagctggtccacagagaggagcacttgtctccccagggctgccatggcagctatcaggggaatagaagggagaaagagaatatcatggggagaacatgtgatggtgtgtgaatatccctgctggctctgatgctggtgggtacgaaaggtgtgggctgtgataggagagggcagagcccatgtttcctgacatagctctacacctaaataagggactgaaccctcccaactgtgggagctccttaaaccctctggggagcatactgtgtgctctccccatctccagcccctccctctgggttcccaagttgaagcctagacttctggctcaaatgaaatagatgtttatgataaaaaaaaaaaaaaaaaaaaaaa

SEQ ID NO: 291933 - DNA, 735 bp, Homo Sapiens
cggcggttgaattgctgcgcccagcgaggcaaccgcctccgaacgccaggtgggggcgaggcgtctcggagtctcagagacaccaaggcccctgcgacaaggtggctgcagctaggccgggggcgtcaggacgacggagcgggttcgggtcggtgacacgcagacctgagggagctgggcccgccttttccgcccgcgccccaggcccttgcagatcgagatttgcgtcctagagtgggaaaaaagcagaggccagggcgccgattttatttggagagaagcaagcatctttgcctctttggagtaggaaattcagacttgaaaaagtggtgtgtggttgactctgtttctcgccatgtcttctcacaagactttcaccattaagcgattcctggccaagaaacaaaagcaaaatcgtcccatcccccagtggattcagatgaaacctggtagtaaaatcaggtacaactccaaaaggaggcattggagaagaaccaagctgggtctataaggaattgcacatgagatggcacacatatttatgctgtatcaagttcacgatcatcttacgatatcaagctgaaaatgtcaccactacctggacagttgcacatgttttactgggaatatttttttctgtttttctgtatgctctgtgctagtagggtggattcagtaataaatatgtgaaagcttttgtttccaaaaaaaaaaaaaaaaaaaaaaaaaaaaaaa

SEQ ID NO: 291934 - DNA, 1000 bp, Homo Sapiens; identical to SEQ ID NO: 223800

SEQ ID NO: 291935 - DNA, 1000 bp, Homo Sapiens; identical to SEQ ID NO: 223801

SEQ ID NO: 291936 - DNA, 1000 bp, Homo Sapiens
ttgggaaccaccacgcagaccaccagcatcgacatgtgggctgtgggctgcatactggccgagctgctggcgcacaggcctcttctccccggcacttccgagatccaccagatcgacttgatcgtgcagctgctgggcacgcccagtgagaacatctggccgggcttttccaagctgccactggtcggccagtacagcctccggaagcagccctacaacaacctgaagcacaagttcccatggctgtcggaggccgggctgcgcctgctgcacttcctgttcatgtacgaccctaagaaaagggcgacggccggggactgcctggagagctcctatttcaaggagaagcccctacgtcttccgatcagtggtgtctgtgaagggtgccgcgagccaggctgaccaggcgcccgggatccagctcatccccttggctgggaacatcctccactgacttcctcccactgtctgccctgaacccactgctgcccccagaaaaaggccgggtgacaccggggggctcccagcccgtgcaccctggaagggcaggtctggcggctccatccgtggctgcaggggtctcatgtggtcctcctcgctatgttggaaatgtgcaaccactgcttcttgggaggagtggtgggtgcagtccccccgctgtctttgagttgtggtggacgctggcctgggatgagagggcccagaagaccttcgtatcccctctcagtcgcccggggctgtcccgtgcatgggttggctgtggggaccccaggtgggcctggcaggactccagatgaggacaagagggacaaggtatggggtgggagccacaattgaggataccccgagactaccaggagagccctgggctggaggctgagctgcatccctgctccccacatggaggacccaacaggaggccgtggctctgatgctgagcgaagctataggctcttgttggataaaagcttttttaacagaaaaaaaaaaaaaaaaaaaa

SEQ ID NO: 291937 - DNA, 1000 bp, Homo Sapiens; identical to SEQ ID NO: 118422

SEQ ID NO: 291938 - DNA, 1000 bp, Homo Sapiens
cagtgagcatccacgtcaatgtcattctcttctctgccatccttattgtgttaaccatggtggggacagccttcttcatgtacaatgcttttggaaaaccttttgaaactctgcatggtcccctagggctgtaccttttgagcttcatttcaggctcctgtggctgtcttgtcatgatattgtttgcctctgaagtgaaaatccatcacctctcagaaaaaattgcaaattataaagaagggacttatgtctacaaaacgcaaagtgaaaaatataccacctcattctggctgactaaaggccacagctgagcctggaactgacccttccttcatcctcaacctgctgtcctccagaaagcaccaaggaaaaagcagagaatgacagcaaacagatcactaggcctctgaccacaggtgctgagtactcagcagccctcatataataggtttgaaagtactccttaaaataaaacactgtttccctttggaactatttacaaggatgaaacaaccgtatacctgagaaataacttgctctggtgtcaattcgctattcgccagcagacatcagaacacaccgagtttccagatgctggtttttccccttaaatcaggaaatacacctggacaatttctagaagactacaattcagtctagccacaaaggggattttttttttttggtaacaggctagagcccggttctgtaagtctttagctgaaatggtccagtacaaaagcactggaaatgagtgggctaggaggacaaggaccgtctcctgcgtgaggagttggttggaggtccccaaggccaggtaccccctgcactcttattggattcctctctgtcttcttggagttttgaaaaactccttcgaacaccaggcttttttctttagaaaacaagtctccaatcgttctctgttccgtagaaagagaaagaaaacctggagcagctgctgaaaaatctaatgaggaactaagaggcaaacccacca

SEQ ID NO: 291939 - DNA, 1000 bp, Homo Sapiens
aatgctcacttctaaattgaaggaaaaacaagacaaagaaatactagaggcagaaattgaatcacaccatcctagactggcttctgctgtacaagaccatgatcaaattgtgacatcaagaaaaagtcaagaacctgctttccacattgcaggagatgcttgtttgcaaagaaaaatgaatgttgatgtgagtagtacgatatataacaatgaggtgctccatcaaccactttctgaagctcaaaggaaatccaaaagcctaaaaattaatctcaattatgcaggagatgctctaagagaaaatacattggtttcagaacatgcacaaagagaccaacgtgaaacacagtgtcaaatgaaggaagctgaacacatgtatcaaaacgaacaagataatgtgaacaaacacactgaacagcaggagtctctagatcagaaattatttcaactacaaagcaaaaatatgtggcttcaacagcaattagttcatgcacataagaaagctgacaacaaaagcaagataacaattgatattcattttcttgagaggaaaatgcaacatcatctcctaaaagagaaaaatgaggagatatttaattacaataaccatttaaaaaaccgtatatatcaatatgaaaaagagaaagcagaaacagaaaactcatgagagacaagcagtaagaaacttcttttggagaaacaacagaccagatctttactcacaactcatgctaggaggccagtcctagcatcaccttatgttgaaaatcttaccaatagtctgtgtcaacagaatacttattttagaagaaaaattcatgatttcttcctgaagcctacagacataaaataacagtgtgaagaattacttgttcacgaattgcataaagctgcacaggattcccatctaccctgatgatgcagcagacatcattcaatccaaccagaatctcgctctgcactccagcctaggtgacagagtgagactccacctcggaaa

SEQ ID NO: 291940 - DNA, 1000 bp, Homo Sapiens; identical to SEQ ID NO: 118423

SEQ ID NO: 291941 - DNA, 1000 bp, Homo Sapiens; identical to SEQ ID NO: 118424

SEQ ID NO: 291942 - DNA, 1000 bp, Homo Sapiens; identical to SEQ ID NO: 118425

SEQ ID NO: 291943 - DNA, 1000 bp, Homo Sapiens
cagctctgaacgtgtggtaaagatttttgtgtttgaatataggagaaatcagtttgctgaaaagttagtcttaattatctattggccacgatgaaacagatttcaactgataaagagctggagaactccatgtactttggaatctcctccaagatagccagagtttaatacatcttcattctcaacactctccaaagaacttgacctaccttatgggttccatatttttcttcttaaatgtgcatcaatcatgccttgcccccaacctttaaatatattcttagacctggtaaatgcactcagacttgcgtctttaggaatttttaactttctttcactacattggcacttaaattttttctttataaagctttttgaaggtcataaacaaagaccataattgatgatagacctaatacatttcctctgtgtgtgtgtgtaacattccaaatactttttttttcttttccactgtttgtaaggtgcaacaatttaatatttttaagggactttttaagagttccttaagaaccaatttaaaattacttcagtgcaatcctacacagtatcaacattagaattttgatattagtcttatgttatcttccattctatttttatctgctttttgctgctagtttcaaactgccagtatttttccttttgcttttaaaatagttacaatatttttcatgatagccacagtattgccacagtttattataataaagggtttttatttgatttagcgcattcaaagcttttttctatcacttttgtgttcagaatataacctttgtgtgcgtgtatgttgtgtgtgtgcatgtgtggcgtatatgtgtgttacaggttaatgccttcttggaattgtgttaatgttctcttggtttattatgccatcagaatggtaaatgagaacactacaactgtagtcagctcacaatttttaaataaaggataccacagtgcatgctgtttgttcaaaaaaaaaaaaaaaaaa

SEQ ID NO: 291944 - DNA, 1000 bp, Homo Sapiens; identical to SEQ ID NO: 223803

SEQ ID NO: 291945 - DNA, 1000 bp, Homo Sapiens; identical to SEQ ID NO: 223804

SEQ ID NO: 291946 - DNA, 1000 bp, Homo Sapiens
cgtccccgctcttcattctcctgcagctgctcatgatccgcgcctgtcgggtcaactagcctcaccgaggtgccggagagggagcgctggacaactagaatgttgacctcgagccgaggccctacttgcagcgcaccggaggagaggctctctagtctgaaggcaccgccggcttgcgccgagctgagtgccgggtttccctattccaatcctgtttgaaatggtttcttcagcagggcttaaaagagcagccttcatcctgaaaatgtatttccttttgtttaatgctttgagtagataatcctgaattgaggtcatgaggaggccccccaggccagacagtcctgaacccctctgacacttggaaactgaatataagtaaaatgtccaggtggactctgagtatttcctgtggatcctgggaaagtactgttgcacaaaggctgcaaagctggactcaggaatgtcctccaaccagcagcgctgacctaagagctccctgtgccgtctatccagaccagacttcggtagatgcctttgttagatctatcacatgtaaacgagcttgtatctccttccctgtgccacgagagagattggctttttattccagtctaggcagagacagaagaatgttgaataagagcacgattagagtcctgtctggttatctgttgcccaagaaaagaactctgctgtccaggcactgcttggcttactatcccagcaaagactgcagttttgtggacttttgaccaccttgggctggcactcttagcacacctgagacagatttaagcctccctaagagactgaagagaggaacaggtgtcagatactcataggcactgagatctacaaatgggaagcttgtgagtggcccatctttgttggcctacgaactttggtttgatgccagtcaggtgccacatgagaacctttgctgagatgcaaataaagtaagagaatgttttcctgaaaaaaaaaaaaaaaaaaaaaa

SEQ ID NO: 291947 - DNA, 1000 bp, Homo Sapiens
gcagctatgtcatcaacgggcgcaccaaggccatggtggcgtgttacccaggcaacgggctcgggtacgtaaggcacgttgacaatccccacggcgatgggcgctgcatcacctgtatctattacctgaatcagaactgggacgttaaggtgcatggcggcctgctgcagatcttccctgagggccggcccgtggtagccaacatcgagccactctttgaccggttgctcattttctggtctgaccggcggaacccccacgaggtgaagccagcctatgccaccaggtacgccatcactgtctggtattttgatgccaaggagcgggcagcagccaaagacaagtatcagctagcatcaggacagaaaggtgtccaagtacctgtatcacagccgcctacgcccacctagtggccagtcccagagccgcatggcagacagcttaaatgacttcaggagagccctgggcctgtgctggctgctccttccctgccaccgctgctgcttctgactttgcctctgtcctgcctggtgtggagggctctgtctgttgctgaggaccaaggaggagaagagacctttgctgccccatcatgggggctggggttgtcacctggacagggggcagccgtggaggccaccgttaccaactgaagctgggggcctgggtcctaccctgtctggtcatgaccccattaggtatggagagctgggaggaggcattgtcacttcccaccaggatgcaggacttggggttgaggtgagtcatggcctcttgctggcaatggggtgggaggagtacccccaagtcctctcactcctccagcctggaatgtgaagtgactccccaacccctttggccatggcaggcaccttttggactgggctgccactgcttgggcagagtaaaaggtgccaggaggagcatgggtgtggaagtcctgtcagccaagaaataaaagtttacctcagagctgcaaaaaaaaaaaaaaaaaaaaaaa

SEQ ID NO: 291948 - DNA, 632 bp, Homo Sapiens
ctaggaagcccagagctgcggttcgcaggcctgctaagcagccggcggccggaagtctatcccgcagaagcgcagccattcacggcctcacgcaatgcgacacttccgcctgcacgagttcttccggggcggaggtcaccatggcagctgccttggctcggcttggtctgcggcctgtcaaacaggttcgggttcagttctgtcccttcgagaaaaacgtggaatcgacgaggaccttcctgcagacggtgagcagtgagaaggtccgctccactaatctcaactgctcagtgattgcggacgtgaggcatgacggctccgagccctgcgtggacgtgctgttcggagacgggcatcgcctgattatgcgcggcgctcatctcaccgctctggaaatgctcaccgccttcgcctcccacatccgggccagggacgcggcgggcagcggggacaagccgggcgctgatactggtcgctgacagcgccaaagagaccaacaagatgattttagcgtggactaggacacttaacctaagaagagtttcacttaatcattcaaatcactatctgaagggtcacggagcgcaaaataaagtttaaaaccctgctaccacaaaaaaaaaaaaaaaaaa

SEQ ID NO: 291949 - DNA, 1000 bp, Homo Sapiens; identical to SEQ ID NO: 118426

SEQ ID NO: 291950 - DNA, 1000 bp, Homo Sapiens
gccaagatgccagaggttatccccattttagaagtgcagttcagcaagaagatggagctgttagaagatgcattggtgctcagaagcgcaagaacctcttcccccgcagagaagagctgctcagtctggcatgcagcatctgggctgatgggccgtaccctgcaccgtgagccacccgcaggagaccaggagggcacagcactgcacctgcagacaagcctgccagccctttctgaggcagatacccaggaactaacccagatcctgaggaggatgaaggggctggccctggaggccgagagtgagctggagagacaagacgaagccctggatggcgttgcagcagctgtggacagggcaaccttgaccatcgacaagcacaacaggcggatgaagaggctgacctaggggcagaacgtccctgcattcctgtctcaccctgcacatcccgctgagatggagggctgggcggcagtgccagggctgcagaggcctgtggccctccggagtggtcttcctctggatggggctgctactgtggggctgcttctgcaccaggggcctccccaggtgtgcaccatgcctgcctcccacttggctgtccctgctgctgggcaggacccggccacatgttctgcggatgctgcagaagtgtggaccatggcgggaccccaaggacacttggcacaggcctggaagaggccgccctcgtcttgtctcggctccctttcatggacagactggccttcttagctgtactataaatttgtgagtgaagttagagcccagctcacttagccagctcactttgagggcatcctataaacacccaactgttcttttatcgtctcggttttagccaaaagtgaaattagcatgactgcatctttcaaacaaaaatattgatttctgcttttagggccccgtttccatccagacataaagggaaatgctggcttcaaaaaaaaaaaaaaaaaaaaaaaaaaaaaaaaaaaaaaaa

SEQ ID NO: 291951 - DNA, 1000 bp, Homo Sapiens
gtgtatatataacctttcctatggaaatgtgacattgagtacattttgtgttgctgttgtgaagccattaatataaatctttggtaatgacccatatctctatatgtatgtgttcccagttgtgggagcaggcactaatgaaatcctgtgcctggaatggagatatttaggtacctgaggcttagtgtcctgtggtctgcatgtaagatagatgacatcctagaacaaagaagctgttttaacttaatccccctgatcagcaggatatctgtgtgttcagtgacatcatacattctgtatctagaagtctaaaatttctgcctttctcctaaagaatgtgttcttgcattttggttgaaataacctacacagtgttaaaaatcagatacctcctttagtgaccagttcaaattttaatagcgataggtagcccctgagaaatttatcactataactccacaggaaatatgacttggaagtgctctgtgtactaaacaaaataaagcccctctttgcatttaaaaccaaagtcaaaacaaaactcttgtaatgcaattaattaactttatgtcttcccatgactcaagttttgttaaatatgcccaaaaactttgattggcagtttcttcggttaattattcctatagaatgtattttaagaaatctatacaaattggatatatgcttggtaattctccagtttctaggaggtacctatttctaccgtttcaagtgatgaagtgaaaataatttacattcgatagtgttactgataacaaacctacttaagagatatgttgctttttacttaagggatagtgttgatagataaattagaatgtatagataggtttgtgaaagtctaaataatggttgtatagatatgtatatatggttcacatatctggatctgctggatctgtgtatttgattttgtactttaaatgtgacaaataaaccttttgggagaaaaaaaaaaaaaaaaaaaaaaaaaaaaaaa

SEQ ID NO: 291952 - DNA, 1000 bp, Homo Sapiens; identical to SEQ ID NO: 118427

SEQ ID NO: 291953 - DNA, 1000 bp, Homo Sapiens; identical to SEQ ID NO: 118428

SEQ ID NO: 291954 - DNA, 1000 bp, Homo Sapiens
ccaaatttggtgcctggagtaggagctagtatgttcaacacaccaggaatgcagagcttgttgcaacaaataactgaaaacccacaactgatgcaaaacatgttgtctgccccctacatgagaagcatgatgcagtcactaagccagaatcctgaccttgctgcacagatgcagaatcctgatacactatcagcaatgtcaaaccctagagcaatgcaggccttgttacagattcagcagggtttacagacattagcaacggaagccccgggcctcatcccagggtttactcctggcttgggggcattaggaagcactggaggctcttcgggaactaatggatctaacgccacacctagtgaaaacacaagtcccacagcaggaaccactgaacctggacatcagcagtttattcagcagatgctgcaggctcttgctggagtaaatcctcagctacagaatccagaagtcagatttcagcaacaactggaacaactcagtgcaatgggatttttgaaccgtgaagcaaacttgcaagctctaatagcaacaggaggtgatatcaatgcagctattgaaaggttactgggctcccagccatcatagcagcatttctgtatcttgaaaaaatgtaatttatttttgataacggctcttaaactttaaaatacctgctttatttcattttgactcttggaattctgtgctgttataaacaaacccaatatgatgcattttaaggtggagtacagtaagatgtgtgggtttttctgtatttttcttttctggaacagtgggaattaaggctactgcatgcatcacttctgcatttattgtaattttttaaaaacatcaccttttatagttgggtgaccagattttgtcctgcatctgtccagtttatttgctttttaaacattagcctatggtagtaatttatgtagaataaaagcattaaaaaaaaaaaaaaaaaaaaaaaaaaaaaaaaaaaaaaaaaaaa

SEQ ID NO: 291955 - DNA, 1000 bp, Homo Sapiens; identical to SEQ ID NO: 118429

SEQ ID NO: 291956 - DNA, 1000 bp, Homo Sapiens
ctgtctttgctccctcccctctcttagagactgtgccttcagcaggactcttaatatctgctgcaacttggagaacctccctgccctgaaatgtgaaccaagcacactttggttccttctccgggcggctctctctgagacccaaggctgcagtccctcagtgctggtggtatcgtgtggggatagcaatacttctctgcccttcattgtctcatctagacatcaagcagggaaaatccagggagattaaattcatggtgacaagtcctgggcagttctggtaaacggtccagttagggagggagtagaaactattgactcaaaagagtttctggctgatctgtggctttgcctccaccatccctaaccaacctctcatcacagctttgtgtgtgggctgagtgctggccttaaccctaggcgtggaagagaaaatgtgaggttgtttagatactcatcaggacctcacaggagctgagacttatcagccagaatgtgttcttcggacagtcgtacacatcttacagaaaaccctccttgtagagttggttgtggtatgtgtttgatgctataaagctcatttttaatgtgtacacctgctctagggacgattcgtttgaaagagagtaagatgcattaacagaaactatcctgggattaggtgaaaaatgtctagcaaaagaaacaaagtctttaatagagtggcctctttcgctcttcgattatgactgctgcagttttaccccagcagtcagctgtctttgtcaaccatacgtttttggagattgggtctagcacatgtcacccttgtccacgttgtttcacatctggttagggggcagattttaaaatgtagttttgtaatgttacatttaagcatgataaatgattagactaccagatgttactagtgctaactttgtattcttagacattaaaatgattgacataaactctttgtgccttgaaaatgaaacaaattataaaaatgtttaaatgg

SEQ ID NO: 291957 - DNA, 1000 bp, Homo Sapiens
aagaatggaagaggtaccagttcaaattccaataatgaagtcacccttggacaagatacagctgactcctgggcaggcattgcccgctggattccctggaccattcatttttgctgatagtctgtcctccgtggagactctgttgaccaacattcagggtctgctgaaagttgctttggataatgctcgcatccaggagaagcagattcaacaagaaaagaaggagctgcgactggagctctatagagagagagaaattagagaaaaccttgaaagacaacttgcagttgagcttcaaagcagaactactatgcaaaagcgcctgaagaaggagaaaaaaaccaagagaaaattgcaggaagccttggaatttgaatcaaagcgccgggagcaagtggagcaggcacttaagcaagccaccactagtgacagtggcctgaggatgttaaaagatactggaattccagatattgaaatagaaaacaatgggactcctcatgatagtgctgctatgcaaggaggtaactattactgtttagaaatggcacaacagttgtattcagcctgaaaggtcctcgctggctttacataaatgaagatgcttgtgattccagtttatctctgaaactattcaacatggagttatttcagttttgtttatcagcaaagctttgtttactgaaggagctatttaatctatgttacattaaaaaagaaacgcgtgtacattttaaaagcaatgatgtaaactttgttcttgcattagactgaccagtttaaaaatatgaactaaaacctaatggctaaagtaacttgaccatatttgatgcttttctatgctcatttcaacttggctttttgtcttttaaatttttaaaaaatgcagtagtgtgttagagactagaaagttatatgtatggtttccctgttctactatacataacgttaaagtacaccttctttgttaaaaatgtacttgctaaacttcagcgtaaataaa

SEQ ID NO: 291958 - DNA, 1000 bp, Homo Sapiens; identical to SEQ ID NO: 223809

SEQ ID NO: 291959 - DNA, 1000 bp, Homo Sapiens
aatattgcttagttttcttactgctgttaagtaagtaaattgtttcaaagtaggttttgtgtgtgtgtgcctagtgtaaaagaactgaaattttgatgcttacagcacttggctcgtgcatttgtatcaaaatttgcctgcctctttatgagggaggcctgcttttcacacctcagtttatttaatacgaggcaagttgtaagacaacactcattctaggtgattctgtggtgccatgaaatttaaggtaatttggggaaaaggattagtcagttttaagcaagagtcacatcttttgagctttcgattatcagtgtagtacctgactaaaaatgaagtaatacccttaaaccatttataatttctagtatttctctgaaagatcgttttggggacaaaagtgacttgacatgtccaatttcatttcagaataaaaagctagcatctttaaaaatctcagattgcttgcttacagatacaagtacgaattatggacaaacgattccttttagaggattacttttttcaatttcggttttagtaatctaggctttgcctgtaaagaatacaacgatggattttaaatactgtttgtggaatgtgtttaaaggattgattctagaacctttgtatatttgatagtatttctaactttcatttctttactgtttgcagttaatgttcatgttctgctatgcaatcgtttatatgcacgtttctttaatttttttagattttcctggatgtatagtttaaacaacaaaaagtctatttaaaactgtagcagtagtttacagttctagcaaagaggaaagttgtggggttaaactttgtattttctttcttatagaggcttctaaaaaggtatttttatatgttctttttaacaaatattgtgtacaacctttaaaacatcaatgtttggatcaaaacaagacccagcttattttctgcttgctgtaaattaagcaaacatgctataataaaaacaaaatgaagg

SEQ ID NO: 291960 - DNA, 1000 bp, Homo Sapiens; identical to SEQ ID NO: 118430

SEQ ID NO: 291961 - DNA, 1000 bp, Homo Sapiens; identical to SEQ ID NO: 223813

SEQ ID NO: 291962 - DNA, 1000 bp, Homo Sapiens
ctgagcgccatcagcaccgagcgctgcctgtccatcctgtggcccatctggtaccactgccgccgccccagatacctgtcatcggtcatgtgtgtcctgctctgggccctgtccctgctgcggagtatcctggagtggatgttctgtgacttcctgtttagtggtgctgattctgtttggtgtgaaacgtcagatttcattacaatcgcgtggctggtttttttatgtgtggttctctgtgggtccagcctggtcctgctggtcaggattctctgtggatcccggaagatgccgctgaccaggctgtacgtgaccatcctcctcacagtgctggtcttcctcctctgtggcctgccctttggcattcagtgggccctgttttccaggatccacctggattggaaagtcttattttgtcatgtgcatctagtttccattttcctgtccgctcttaacagcagtgccaaccccatcatttacttcttcgtgggctcctttaggcagcgtcaaaataggcagaacctgaagctggttctccagagggctctgcaggacacgcctgaggtggatgaaggtggagggcagcttcctcaggaaaccctggagctgtcgggaagcagattggagcagtgaggaagaacctctgccctgtcagacaggactttgagagcaatgctgccctgccacccttgacaattatatgcatttttcttagccttctgcctcagaaatgtctcagtggtccctcaaggtcttcgaatagatgtttatctaacctgacagttgcagttttcacccatggaaagcattagtctgacagtacaatgtttggattctccttgatattaccaacacattttccctgttatcttgcactgaatctttcctactgaacactttttctgcacttttcattgtaataaaaggagttgctgtccacaaaaaaaaaaaaaaaaaaaaaaaaaaaaaaaaaaaaaaaaaaaaaaaaaaaaaaaaaaaa

SEQ ID NO: 291963 - DNA, 972 bp, Homo Sapiens; identical to SEQ ID NO: 25299

SEQ ID NO: 291964 - DNA, 1000 bp, Homo Sapiens; identical to SEQ ID NO: 223814

SEQ ID NO: 291965 - DNA, 714 bp, Homo Sapiens; identical to SEQ ID NO: 118432

SEQ ID NO: 291966 - DNA, 1000 bp, Homo Sapiens; identical to SEQ ID NO: 118433

SEQ ID NO: 291967 - DNA, 1000 bp, Homo Sapiens; identical to SEQ ID NO: 223815

SEQ ID NO: 291968 - DNA, 1000 bp, Homo Sapiens
ggggcgccggagccactcggcctttggctacaatggggagctgtacatctttggtggttataatgcaaggctgaaccggcacttccatgacctctggaagtttaatcctgtgtcctttacctggaaaaagattgaaccgaaggggaaggggccatgtccccgccggcgccagtgctgctgtattgttggtgacaagattgtcctctttgggggtaccagtccatctcctgaggaaggcctgggagatgaatttgaccttatagatcattctgacttacacattttggactttagccctagtctgaagactctgtgcaaactggccgtgattcagtataacctagaccagtcctgtttgcctcatgatatcaggtgggagctgaatgccatgaccaccaacagcaatatcagtcgccccatcgtctcctcccatgggtaggaggaagtttctgccacctcccctcctgagcctgctgtcatcttcactgcccctgcccatctgtcacccacctgctcctttgacccctggacttggtatacctccatgtggagttgttgggcgagaggtgttctctgtgctgtgaattcagtggggagctgtagcggggtgggggctaggttcctccccccttgggccgagggccccttccccttggtgctctgtccccatccacctcctttcagctgctcctgggcctcagctctgcccagggccagccaggttctgctgggaagggaagggaatggggagaagggagaagcaagcagtgtctgagcctcaggagcttccccctccccctttgcctatcccctcccctctgcttgagccttgagccttgactgggagctgaaaggagttgcagctgttggcatgagacctccttctccccgtcttggggaggtggggaccagcagataaatcccacccttccttgagctgtcgctgtactctgaagttcagccagctcagattttataaaaattaattaaaatctccaaa

SEQ ID NO: 291969 - DNA, 1000 bp, Homo Sapiens; identical to SEQ ID NO: 223817

SEQ ID NO: 291970 - DNA, 1000 bp, Homo Sapiens
ctgattgaacagttgtgctacaatcaacttttcatagtacatgacctgcattccacatctcagtctaacagtttagtagtgatgtaaagagaagtacaaaccgaactccagtgctttgttatgttttattaactggccctgtctcaggaacatcttaacagatggcaaaaaaacaaaaactttttttcaactcctatgagtggcaactgaagttcttattgttgggaaagaacactagtcctacctctgccactaatgaggtgtttggaggaggtaccagccatataatagggggtgtatgtgtgaattttgtttaaactctactgtatattgaaatgaaattcatttatttgtcttgacaatgttcaaatgatgtagattgtcttagaatgaatattcataagtactcagaactcttaagatgcagatgccacccgtgaggagctaaattcctaatgtgtattgtattccaacccaattttactggaactattgaataaatcttttattttctttcaggtttacttgatagtggatacattggtgtcagaggaccttgactgggttcattttatgtccagacatcacccctgaaacactgtactgtactatcttgctctgagtagtatcaactggatcgtctcatatttgcctcattcatcctattaatttcaaatgatactgtgggggaaaaacagggttagaaaaacaagtggaaaaaatggagtgatgttgtaatctaaacaagtgccttatgtttattgctaagaactggtgttaccaacccttttgagaagaaagggtctcttgacctgtattaacataggaaagtaaagttctttttgtttttctttatattcagctactcttgtcatttctcgttgaaaaactaaaatctgactaggttagtttactcagctttaattagatagttgagtcatatattttcaacatttttctgtatcgtatttattatgcacaaaaataaagtgtgatctct

SEQ ID NO: 291971 - DNA, 1000 bp, Homo Sapiens
aggccttcgcggcgctgcgcaagatcatccccacgctgccctctgacaagctgagcaagatccagacgctcaagctggccgccaggtacatagacttcctctaccaggtcctgcagagcgacgagatggacaataagatgaccagctgcagctacgtggcccacgagcgcctcagctacgccttctccgtgtggcgcatggagggcgcgtggtccatgtccgcctcccactagcgccgcgccacccacctccggaccggcgcgccagggctgtccgtcgcgtcggcggcgcaagtggaattgggatgcattcgagtctgtaacttctgaaacctgaacaacctcaggaggcccccacctctgccctccaccagcgtcgagagaagggacagcagtgacatcggacagaagacccgggctcccgtcctcccccaggacggtccccacataggaagggcactcccagccctcttgctggtgacattgtcatggtcatcttgtttctgtttggatttttcttctgggtcttatgtttggggggaggtttattctttctgaaaatgtctagattcaggaacacatttatgaggatttggattttgaatttgtatttccctctaagtgccttttttaatgtctatttttttaataaaacagaaatgcattcttgtacaattctgttgaaactggaccaaggctctcagaagaggacccccgagttccttcccctcccccgagcctctgcatgattgtttcaagtcagcctggaattcttactttcacgccgctattcttttcctttctccgtgattgcttggctagccattttaaaaaaaatattctctgttcagtgtatatgttgcttgtttgttttatttattgagatatttttacaagctaagtgactgcagtgtggctgtgtatcctgctccccacccaggaaaaataaagacgtccgcgcagccatggacaaaaaaaaaaaaaaaaaaaaaaaaaaaaaa

SEQ ID NO: 291972 - DNA, 1000 bp, Homo Sapiens
tcctacactcttgactagtgcaatttggttcttgaaaattaaatttaaacttgtttacaaaggtttagttttgtaataaggtgactaatttatctatagctgctatagcaagctattataaaacttgaatttctacaaatggtgaaatttaatgttttttaaactagtttatttgccttgccataacacattttttaactaataaggcttagatgaacatggtgttcaacctgtgctctaaacagtgggagtaccaaagaaattataaacaagataaatgctgtggctccttcctaactggggctttcttgacatgtaggttgcttggtaataacctttttgtatatcacaatttgggtgaaaaacttaagtaccctttcaaactatttatatgaggaagtcactttactactctaagatatccctaaggaatttttttttttaatttagtgtgactaaggctttatttatgtttgtgaaactgttaaggtcctttctaaattcctccattgtgagataaggacagtgtcaaagtgataaagcttaacacttgacctaaacttctattttcttaaggaagaagagtattaaatatatactgactcctagaaatctatttattaaaaaaagacatgaaaacttgctgtacataggctagctatttctaaatattttaaattagcttttctaaaaaaaaaatccagcctcataaagtagattagaaaactagattgctagtttattttgttatcagatatgtgaatctcttctccctttgaagaaactatacatttattgttacggtatgaagtcttctgtatagtttgtttttaaactaatatttgtttcagtattttgtctgaaaagaaaacaccactaattgtgtacatatgtattatataaacttaaccttttaatactgtttatttttagcccattgtttaaaaaataaaagttaaaaaaatttaactgcttaaaagtaaaaaaaaaaaaaaaaaaa

SEQ ID NO: 291973 - DNA, 1000 bp, Homo Sapiens; identical to SEQ ID NO: 118435

SEQ ID NO: 291974 - DNA, 1000 bp, Homo Sapiens
agaaaatgcaaggtcacagccactgcacttaagacagctagagagactgatgaggatgaagatgatgtggacagtgtggaagagatggaggtcacagctacgaatgatggggctgctacagatggggtctgcccccagcctgaaccctctgatccagacgctcagactattaaggaagaggatatagtggaagatggctggaccattgtccggagaaaaaaatgagtggggatgattggaaatggctttgggcccttatttgctgttctaagagttgtctgtaggggttttttttttgaggattgcagacctgtggactggttaccccatctccaccctctcccctgttcctctgtctggctccctccagggcaaggaaaacctagggtccttggtcttgggggtggggggaccttttccagcatattcccctgggcctttagttaacatccgagtgacgaagccgggttccccagtacagtgtcttttgggtgcggtcattgtgaggaaggggatgagtgagtgtgggtgtggctggaggaggagctagatgccggtggacagtgggcaggtggatttggggaggagaggatcagcagcagcagcagtactcagtgatagggggctggctgggtcaggaatggtgagatgaacatgcaagtggaagagagaatagttgaaaatgtgaatgaaagtagctctggagcctctcccttaccccaccccacacacacgcaacagctctgtacccctgcccagaacttggaacctcccaggaatgctgccttccttcagcccagcctccagtcctgggttccctcaggaattcgaagaccttggctaggtggtgagcttggaagagctgggctttgttttctgtctcctctaacctctttccttactccttatcccatcccatttgagttcaggggtgaggcttaagatcttaataaataataccttactgcttaaaaaaaaaaaaaaaaaaaaaaaaaaaaaa

SEQ ID NO: 291975 - DNA, 1000 bp, Homo Sapiens
gtataaaatgaaaactcgtattctacctatgtcttttctgtaaattattgagacaattgtgtatcatttttgttctgttaatgtggcttagtacattgatttacttcaatttgttaccacaacttgctgaaatacaccattattatttgttgtatgcaatactggatttattttgataacgtattgtttagattttgttctcatctatgttaatgaaagaaattggcctgtatttttacattcttgtaatatctttgccaggttctataaaatgcaataataagcaaataaattactttgtttttgtataagtatgtataggattgagctctaaaaccaaaccattataatgataatttgggtagcttcaaactcaaattgaagagagtcttcactacaatcttcactacaacctttggccttcctctctacatttaagagtagcaatagaacaataaaaaaaaatacgtctttcaaattaattgcagtaaaaacaaaagagtagtggggagagaaaaacaatccaatacatatttttctctcagaatagaaagaaaacacaaagagaaaatatgaacaatataaagcacttaaaggaagaggatgatttcttccagcttttccacactctctttatgcgcaggaacaaacagctgttgagtgagctgctatgactttggtagagaggtgcaatatgttttttgaaccagctataaaagaaattaagaggtacatgtgagggtagaaacaaatatcaaggatgagaatggcactggctgtcccatatggtatccaggagccaccaatgtctgttgagtacttcatacatgcctagtctgaattgagatgtgctcaatgtataaaatatataccagatttcaaatacctacttcaaaaaataatgtaaaatatctcactaataacttttcctttgtgtattgcaatgataatatgttggctctattggattaaataaagtatgttattcattttacctgtt

SEQ ID NO: 291976 - DNA, 1000 bp, Homo Sapiens
cctagaagtttgttttgcttttaatttaaaggaagcagtaaccacaaagcttccgctcagggttttttctttcttcaagtctccaagggctcttcagcgtcacaagccagcaactctctttgcattaaaatttcaaagtttaattaatataattaaaagcaacagcaagcagcagcctgtgaagattttgctcatcttttttatgccttttgacattgaatgacctattactgtatgcgcattacttggattttgaggggcactctaccttggttatgattcagtagaggaaaaagaccacctttcttcaatttacaaattaaatcttctggagggtcgctatcacaaaacattgacgatgtatgtattataattttttagaaaaaccaccatcgtgtcacgtcgacgatgccaaattatgttagcgtgagcagaaacaccgtgggggaggaaggcagcagctgaagaaaaaagctcaaatgatctagtcactttcgatactgtacttcagatgcgaaatggatattcgagtggaaacctgacaaagtgcgcctgctttgatgtgaactggtatagacaatgaccagtggctgggtcagtgggatgtctctctgtgagcacaaaggcttatcaaatgacactaaaaataagttcaacaaccatcacattggaagggagaaggcgaacatttcatgtttggcgggcatgtgagtgcacaagatggaaagagcgattggagcatcctggtataattacccccattgtgctcttaatggaaatttcaaaggacgggagtattctgttggttggtgtccaggtttgtggcactgttccaagaggccttacacacacacacaaatatataattttctatacatatatatcctctagcttgaaacttttgctcaagtttatttatgtcactggctggctggatccaaagtcatgtgtccacacattcataaataaaaattttacctatgaaaaaaaaaaaaaaaaa

SEQ ID NO: 291977 - DNA, 1000 bp, Homo Sapiens
caaggaggaaccagtggacagtgatgaagatgctcagatccaggaaatggaatctggggagcaggctgcttttatgcaacagcctttcctggaacccacgcacacacgtgcgctctctgtgcgccaagctccgctggctgcggttggcatggatggattagagaaacaccgtctcgtctccaggactcactcttcccctgctgcctctgttttacctcacccagcaatggaccgccccctccagcctggctctgcaactggaattgcctatgaccccttgatgctgaaacaccagtgcgtttgtggcaattccaccacccaccctgagcatgctggacgaatacagagtatctggtcacgactgcaagaaactgggctgctaaataaatgtgagcgaattcaaggtcgaaaagccagcctggaggaaatacagcttgttcattctgaacatcactcactgttgtatggcaccaaccccctggacggacagaagctggaccccaggatactcctaggtgatgactctcaaaagtttttttcctcattaccttgtggtggacttggggtggacagtgacaccatttggaatgagctacactcgtccggtgctgcacgcatggctgttggctgtgtcatcgagctggcttccaaagtggcctcaggagagctgaagaatgggtttgctgttgtgaggccccctggccatcacgctgaagaatccacagccatggggttctgcttttttaattcagttgcaattaccgccaaatacttgagagaccaactaaatataagcaagatattgattgtagatctggatgttcaccatggaaacggtacccagcaggccttttatgctgaccccagcatcctgtacatttcactccatcgctatgatgaagggaactttttccctggcagtggagccccaaatgaggttcggtttatttctttagagccccacttttatttgtatctttcaggtaattgcattgcatga

SEQ ID NO: 291978 - DNA, 1000 bp, Homo Sapiens
aaggctgcctgccgtgcaccaccaccaccaccaccaccatgctgtgtggccacctggggctgccactgtcctccagcccgcccccagcctgtggacgcctggcccaccctgagtgtgagtcacagagaccctggccggggcaccctccacccccaggcttcctcagggctgtgggctgtggcgggactatggaagggagcagggagagaccctgccaccacccggagtggctacgcgagtgtggactgcaggctcctcctggggaagctgggcaggctcgctttctggtcacggggccattccagggggcatcccttgctccgggtcccctgcagtgaggggcctgtgaaccccaccagggcaacagcccctcccagggacccctcctttcctgtagggcggcgccggcccacctgggagcctcagatccccctcttccatcacggaggtaaagttgaggccgtggacgccaccagcctgatgaaataaagatttcatccagaaagagtttaagaaaatctcagctcaggagccagaacagaaaagatcaatagctttagccacatggaagtgtgaacatcctgatggggaaaataccacaaagtctaatttaataactagggacacctgtgtgccacagctgtggcacagactcccactaaagaagtaggggtgcatggctcatgcctgtaatcccagcactttaagaggctgaggcaggaggatcacttgagctcaggaattcgagaccagcctgggtcacatagcaagaccccgtctctacaaaaaataaatttaaaaaactagccaggtgtggtgatatgcgcctgttatctcagcagctctgggggctgaggtgggaggattgcttgagcccaggagttagaagctgcagtgagctctgatggaaccactgcactatagcctggaccacagagcaggcccctgtctcaaaaaataaaataaaaaagtgaaagaagaaaaaaaaaaaaaaaaaaaa

SEQ ID NO: 291979 - DNA, 1000 bp, Homo Sapiens
gcggaggtggcagaagcaagtacgccaaaatctgctttgaggataacctacttatgggagaacagctgggaaatgttgccagaggaataaacattgccattgtcaactatgtaactgggaatgtgacagcaacacgatgttttgatatgtatgaaggtgataactctggaccgatgacaaagtttattcagagtgctgctccaaaatccctgctcttcatggtgacctatgacgacggaagcacaagactgaataacgatgccaagaatgccatagaagcacttggaagtaaagaaatcaggaacatgaaattcaggtctagctgggtatttattgcagcaaaaggcttggaactcccttccgaaattcagagagaaaagatcaaccactctgatgctaagaacaacagatattctggctggcctgcagagatccagatagaaggctgcatacccaaagaacgaagctgacactgcagggtcctgagtaaatgtgttctgtataaacaaatgcagctggaatcgctcaagaatcttatttttctaaatccaacagcccatatttgatgagtattttgggtttgttgtaaaccaatgaacatttgctagttgtatcaaatcttggtacgcagtatttttataccagtattttatgtagtgaagatgtcaattagcaggaaactaaaatgaatggaaattcttaaagggaatgatgtgattcaagctggaaagagggttgggagaaacagcttgtccaggtggagctatgttatgatcagatcgaagtgtgacccctgtgtggtccagacagccctgcagagagaaaacctttattccattatcaccaagcacctcctagtttccgacagtcatctccttctgctgggagaattagcagcagttcagggggcttatgttatgtccttgttcaactcaacttgagctcttgaactcctcctgtgggcctgtgaatgtattcattcattccacaactctgggtg

SEQ ID NO: 291980 - DNA, 1000 bp, Homo Sapiens
ggaatataaagaagatcttgaaaaatcgaagattaagacagaactcaactcatcagctgaaagtgaacaacctttggacaaaacaggacatgttaaggatacaaatcaagaagatggagttatcatcagtgaacatggtgaagatgaaatggatatggaaagtgaaaaagaggaagaaaagccaaagactggtggagctttttcaaatgctttatcttcattgaatgttcttcgtccaggagaaattccagatgcagcttttatacatgctgcaaggaaaaagcgccaaatggcccgagaattgggagatttcactcctcatgataatgagcctggtaaaggccgccttgttagagaagatgagaatgatgccagtgatgatgaagatgacgatgagaaacgccggatagttttttctgtgaaagaaaagtcacaaagacaaaaaattgctgaggaaataggaattgaggggagtgatgatgatgctttagtaactggagaacaggatgaagagctcagccgatgggaacaggagcagataaggaaaggaattaatatccctcaggttcaagccagtcaacccgcagaagtgaatatgtactaccagaacacttaccagacaatgccttacggctcatcctatggcattccttatagttatacggcctatggatcatcagatgccaaatctcaaaaaacagataatacagtccctttcaaaactcccagtaatgagatgactcccgttactattgatttggtaaagaaacagcttaaagacaggttggactccatgaaagaattgcacaaaacaaatcgacagcagcatgagaaacatctgcaaagccgagtggactctaccagggctattgaaagattagaagggtcttctgggggtattggtgaacggtataaatttttgcaagaaatgcgagggtatgtccaagacttgcttgagtgtttcagtgaaaagtctgttcagttcaggaagctgctataa

SEQ ID NO: 291981 - DNA, 1000 bp, Homo Sapiens
cagctgagagccgtggggctggggcagggggtgtcagctgcacagcgggactctagggagatgggcgagcgagcgtctgctcactggctctggggcctcgaggtgccaggcagcatcaggcccactgggttgccccggccaggcctgcgaggaagggctgaggtggggccggcagggggcgccaggcagccgtgatcacaggtgacgaccgcaccgcggccgtgggactgatgcgggatcccgagggccttcctgcccacatgccccgggagaaaccgaggcccctccctcctcctggaacagcttccggctctcaagcgtcaccccaggggcgtcagttttacggactcaaggtcacctcaggaagaggcagggccaggttttgggataggctttgcctccaggatgggctgctcctgggcctggtgagctactgcccccaacctaccctctagaggggctgggaagggccgttctgggctcacctggcctgggagacccatctggtccctgcgtcctctgcccctcactgctctgtgcagatcctgtcgccctcagctgcctcctcccgagacctaatggtccctgctgggctcgagtctgcaggcccggctgcgtgtgccttggcctcactgtaccagtggttccctctctgcccggattctgagctcagtgtggtgtttggtgcacaggggttggtcaggggccatggccaaggccctgccacgcacgcccatccctcagatccactgtgagcaccaacctgctgcagtctcttgggcccctgctggcagctctgccacgtcaccgcctgcctggctcccacacagccatgcattgtcactctgcctccgggaccccagcttgggagctgtgggtctgccaggtcccacctcctctgtcccccatgccacaacctgggctcctggctacagcagggctccagggactccaaataaatgttcagtgactggctccaaggaaaaaaaaaaaaaaaaaa

SEQ ID NO: 291982 - DNA, 1000 bp, Homo Sapiens
atgaggacaagcagacccgggagcagctgcatagcatcagcgactctgtgttgtttctgcaggaatttggtgcattgatgagcaattactctctccccccacccctgcccacctatcatgtcctgctggagggggagggcctgggacagtcactaggcaacttcaaggacgacctgctcaatgtatgcatgcgccacgttgagaagatgtgcaaggcggacctgagccgtaacttcattgagaggaaccacatggagaacggtggtgaccatcgctatgtgaacaactacacgaacagcttcgggggtgagtggagtgcaccggacaccatgaagagatactccatgtacctgacacccaaaggtggggtccggacatcataccagccctcgtctcctggccgcttcaccaaggagaccacccagaagaatttcaacaatctctatggcaccaaaggtaactacacctcccgggtctgggagtactcctccagcattcagaactctgacaatgacctgcccgtcgtccaaggcagctcctccttctccctgaaaggctatccctccctcatgcggagccaaagccccaaggcccagccccagacttggaaatctggcaagcagactatgctggtggtttaagcaaggtctgagcatccctcaagtcctgctgtggaccacacaaaggcaaggagctgaccaggaggtgtcagttccctgagagacagggccaaaggcagtgtacccttgagtctcactaccggccattctacgtcaacaaaggcaacgggattgggtccaacgaagccccatgagctcctggcggaagggtgctcaaggattggagaggagacaaaaccaggagcagcacagtggggacatctcccgtctcaacagccccaggcctatgggggctctggaaggatgggccagcttgcaggggttggggagggagacatccagcttgggctttcccctttggaataaaccattggtctgtc

SEQ ID NO: 291983 - DNA, 444 bp, Homo Sapiens
catatttgtgctccttcacgggagggcagggaggttcaacggaccttaaaacatgaaggtcttttttctgtttgctgttctcttttgtttggtccaaacaaactcaggggatgttccaccgggaattagaaataccatctgccgtatgcagcaagggatctgcagactttttttctgccattctggtgagaaaaagcgtgacatttgctctgatccctggaataggtgttgcgtatcaaatacagatgaagaaggaaaagagaaaccagagatggatggcagatctgggatctaaaatataagctcccggaaggcagggatgttgaagtatcccaagggcttaaaggaatgtgtggcttatagtaggtgttcaataaatatttgttgaatgaatttagcaccaaaggtgaagagctgataaaagacatttttttaacttcctta

SEQ ID NO: 291984 - DNA, 1000 bp, Homo Sapiens
ctgcggggttccagactgctgaggaactcctagaggtgaaaccctccgagcttagcaaagaagttgggatatctaaagcagaagccttagaaactctgcaaattatcagaagagaatgtctcacaaataaaccaagatatgctggtacatctgagtcacacaagaagtgtacagcactggaacttcttgagcaggagcatacccagggcttcataatcaccttctgttcagcactagatgatattcttgggggtggagtgcccttaatgaaaacaacagaaatttgtggtgcaccaggtgttggaaaaacacaattatgaacaccgaaaagctttggaggatttcactcttgataatattctttctcatatttattattttcgctgtcgtgactacacagagttactggcacaagtttatcttcttccagatttcctttcagaacactcaaaggttcgactagtgatagtggatggtattgcttttccatttcgtcatgacctagatgacctgtctcttcgtactcggttattaaatggcctagcccagcaaatgatcagccttgcaaataatcacagattagctgtaattttaaccaatcagatgacaacaaagattgatagaaatcaggccttgcttgttcctgcattaggggaaagttggggacatgctgctacaatacggctaatctttcattgggaccgaaagcaaaggttggcaacattgtacaagtcacccagccagaaggaatgcacagtactgtttcaaatcaaacctcagggatttagagatactgttgttacttctgcatgttcattgcaaacagaaggttccttgagcacccggaaacggtcacgagacccagaggaagaattataacccagaaacaaatctcaaagtgtacaaatttattgatgttgtgaaatcaatgtgtacaagtggacttgttaccttaaagtataaataaacacactatggcatgaaaaaaaaaaaaaaaaaa

SEQ ID NO: 291985 - DNA, 1000 bp, Homo Sapiens; identical to SEQ ID NO: 118438

SEQ ID NO: 291986 - DNA, 1000 bp, Homo Sapiens
ctcaagaaaatccccataaatacaatccaggcaggaaggcatccagttacagcacttccctttctggaagtcagaaaattcatctcagaaagaagtcctacttatgtaatgaatgtggcaacacctttaagtctagctcatcccttcgttatcatcagagaattcacactggagagaagccttttaaatgtagtgaatgtgggagagccttcagccagagtgcctctcttattcaacatgaaagaattcacaccggagaaaagccctatagatgcaatgaatgtgggaaaggctttacttctatttcacgacttaatagacaccgaataattcatactggagagaaattgtataattgtaatgaatgtggtaaagccttaagctcccactcaacacttattattcatgagcgaattcatactggagaaaaaccatgtaaatgtaaagtatgtggaaaagccttcagacagagttccgctctcattcaacatcagagaatgcatactggagaaagaccctataagtgtaacgaatgtgacaaaacattcaggtgtaactcatcgcttagtaatcaccagagaattcatactggagagaaaccatatcgatgtttagaatgtgggatgtcttttggccaaagtgcagctcttatacaacatcagaggattcatacaggagaaaaaccctttaaatgtaatacatgtggaaaaacttttagacaaagctcatcacttattgcacatcaaagaattcatactggagagaaaccctatgaatgtaatgcatgtgggaaactctttagccagaggtcatcccttactaatcattataaaattcacattgaagaggactccttaaaagccgatttgcatgtgtgaaagccttaaaccaaaactcatcagagaatacatgcttgagagtgatttattaaatataatgaatatgagaaaactcttagttctcatcagatactaagttttaagaaaaactttagctatgt

SEQ ID NO: 291987 - DNA, 1000 bp, Homo Sapiens; identical to SEQ ID NO: 223823

SEQ ID NO: 291988 - DNA, 1000 bp, Homo Sapiens
gccattgctgatgctgagcagcgtggggagatggccctcaaggatgccaagaacaagctggaagggctggaggatgccctgcagaaggccaagcaggacctggcccggctgctgaaggagtaccaggagctgatgaatgtcaagctggccctggacgtggagatcgccacctaccgcaagctgctggagggtgaggagtgcaggctgaatggcgaaggcgttggacaagtcaacatctctgtggtgcagtccaccgtctccagtggctatggcggtgccagtggtgtcggcagtggcttaggcctgggtggaggaagcagctactcctatggcagtggtcttggcgttggaggtggcttcagttccagcagtggcagagccattgggggtggcctcagctctgttggaggcggcagttccaccatcaagtacaccaccacctcctcctccagcaggaagagctataagcactaagtgcgtctgctagctctcggtcccacagtcctcaggcccctctctggctgcagagccctctcctcaggttgcctgtcctctcctggcctccagtctcccctgctgtcccaggtagagctggggatgaatgcttagtgccctcacttcttctctctctctctataccatctgagcacccattgctcaccatcagatcaacctctgattttacatcatgatgtaatcaccactggagcttcactgttactaaattattaatttcttgcctccagtgttctatctctgaggctgagcattataagaaaatgacctctgctccttttcattgcagaaaattgccaggggcttatttcagaacaacttccacttactttccactggctctcaaactctctaacttataagtgttgtgaacccccacccaggcagtatccatgaaagcacaagtgactagtcctatgatgtacaaagcctgtatctctgtgatgatttctgtgctcttcactctttgcaattgctaaataaa

SEQ ID NO: 291989 - DNA, 1000 bp, Homo Sapiens
aactgagtaacattcatgaaatgaggctttctgtggcggcgtagtgtttggaattagaaggtaattcagtagagtgtaacttagagaatattgcaagtgacacattgaatcctgcccgtcagggcaccttttcctcagagcaatccggccacacgaatagaaggctgtcgtgaatcacatcagatgtaaaatcattccttctgtttactcttttaattttcatcctttgcaggtagtgcaaattcaacttcaaatatggtgtaggttttgctagattccatatttttttcttggatttttgctaattatttttagcaaaaaatttttgctcagtggcactctccctagtgtccatgggttagggccatgctggggaaaacgggccggtatttacacacgcgcaaaacacccagagacggcacaaggaggttgaactcatgtttcagttcgcgaacattgactccttacgaaagtcacttcattctaactagatgcgcccacttccggtcattatttcgtttgcatgatgtattgcttcttcacgttttgtttttattgagcacggagtagaattccagggctgccttgacttcttccctgcatgctccctcccagtgactttccttccctttcacatgaggatctgccgttcatgttgctttctcctttgtcctcttggacttgagggcattgtgaaaagctttgctgtgatttaaaaatgccagcaattttaatctagcagtgttgaagctgggaattttttggcgcaatccatgtagcagtgacccaggcttgggagccagaaacaagtgtgacctgggattttatttaacacaactgttgccaaagagttggctttgtttatttggttttggcggggagaggagtggtatttgatgctttctgtggacaatgtaaccctaaacacatcatgtattttaaatgccacctacataaataaaacataagcatattgaatacaaaaaaaaaaaaaaaaaaa

SEQ ID NO: 291990 - DNA, 1000 bp, Homo Sapiens; identical to SEQ ID NO: 223825

SEQ ID NO: 291991 - DNA, 1000 bp, Homo Sapiens
cttcctgaaacagattacgagtgtaccaactccaccagctgcatgacggtgtcctgtcctcggcagcgctaccctgccaactgcacggtgcgggaccacgtccactgcttgggtaaccgtacttttcccaaaatgctatattgcaattggactggaggctataagtggtctacggctctggctctaagcatcaccctcggtgggtttggagcagaccgtttctacctgggccagtggcgggaaggcctcggcaagctcttcagcttcggtggcctgggaatatggacgctgatagacgtcctgctcattggagttggctatgttggaccagcagatggctctttgtacatttagctgtggtgtgtgcttcagaaaggagcagggcttagaaaaagcccttttgtccgtaggagttgatgtggtgtgagtgatatatttctatgtttttaatgtacagcatctgtactttgtttgccttgataaaggtaagataaatgaaacgctgaactatgctaatctggaatttgtttttatttgcctgaaatatatttttttctgtgaaaaaattaaaacgtacttaagccaggagaatgaattatacagtgattgaaaatccatttaattcctatgacttttgttttgtattgcccaagtcaaactacatcacttgtatctccagcccaaatgtagtctgccttgaaaagtctttcagctgtgactgcaggaagtgggagtgtttttattgttagctaattgctgtgactgcaggaagtgggagtgtttctgttgttggctaattgaagttattaggctcagcttcagtcatgtgtaagttttgcagtgtaatacatatgtagtctggtctgtatatatgaaaatttgaattaaactgcagaatgtttatgtctagttatggtttaaattttcttagtagtatataaaaggtaagagtactgaaaaattaataaaattgcaagttaagaaaaaaaaaaaaaaaaaa

SEQ ID NO: 291992 - DNA, 1000 bp, Homo Sapiens; identical to SEQ ID NO: 118441

SEQ ID NO: 291993 - DNA, 1000 bp, Homo Sapiens; identical to SEQ ID NO: 285204

SEQ ID NO: 291994 - DNA, 1000 bp, Homo Sapiens; identical to SEQ ID NO: 223827

SEQ ID NO: 291995 - DNA, 1000 bp, Homo Sapiens; identical to SEQ ID NO: 118443

SEQ ID NO: 291996 - DNA, 1000 bp, Homo Sapiens
ccagtccttctgtcagtctccgatgccatcatgcagcctggttaggagcaaaggaaaggggaaaaagaaaaacgactaattcatcttttcctgatcgtcaggaccctaaagaatggccgagccttgggggaacgagttggcgtccgcagctgccaggggggacctagagcaacttactagtttgttgcaaaataatgtaaacgtcaatgcacaaaatggatttggaaggactgcgctgcaggttatgaaacttggaaatcccgagattgccaggagactgctacttagaggtgctaatcccgatttgaaagaccgaactggtttcgctgtcattcatgatgcggccagagcaggtttcctggacactttacagactttgctggagtttcaagctgatgttaacatcgaggataatgaagggaacctgcccttgcacttggctgccaaagaaggccacctccgggtggtggagttcctggtgaagcacacggccagcaatgtggggcatcggaaccataagggggacaccgcctgtgatttggccaggctctatgggaggaatgaggttgttagcctgatgcaggcaaacggggctgggggagccacaaatcttcaataaacgtggggagggctcccccacgttgcctctactttatcaattaactgagtagctctcctgacttttaatgtcatttgttaaaatacagttctgtcatatgttaagcagctaaattttctgaaactgcataagtgaaaatcttacaacaggtttatgaatatatttaagcaacatctttttaacctgcaaaatctgttctaacatgtaattgcagataactttgactttcttctgaatattttatctttccttggcttttcccttgcttccccttttgccaatctcaacacccaagttgaagactttgtttttaaaatggtttgtcctgatgcttttgtctaattaaaacactttcaaaacaggaaaaaaaaaaaaaaaaaa

SEQ ID NO: 291997 - DNA, 1000 bp, Homo Sapiens
tcccaaaagtcatcccagtgccattctgtgttcaggtgcccatttccttgtgtacatcctgtccctgccacatccataagctcctgagagaaaggtctgacttgttgattgtgtcaccccatcacagctcagtgttggtggcatagttccaggtgcgtgaaagtatttgctgattctttgaagattgggaaggctcagaagggcagagttgaagaaggcatacctttaagagaagccctttgaataatcaagtgctaaaacaaaatcaggtgcttttttaaaacagcttgattgagatataatccacataccttaaaattcacacatttaaagtttttagtgtctccagacacagtggttcatgcctgtgagactggggcaggaggatcacttgaggccaggagttcaagatcagcctgggcaatatagtgaaaccccatctcttaaagaaaaagttagccaggtgtgatgatgtgcacctatagtcccagctacttgggaggctgcagctgtggctgtggctgaagctggcggatcgcttgaggcccagagtctaagactgcagtgagctctcattgggccactgcagtcgagcctgggcgacacaaagagaccaccctgtctgatagataactaacaaaatagttttagttgggcaaaattaaagagttgggcaaccatcactgaaatcagtttcagacattttcaccactccaaaaaagaaaccccacatcgactagcagttactcatttgcttctccctatgtcccctgacaaccactaatctatttgtctctatagatttgccagtttggggcatttcatataaatggaatcatctgtatgtaagtggttaataaggattggttgattgaagattgaaaagggtcagctgggaaaatttttaaaaagactgtttttaaaaaggtgctacaaaataaagtgctatctttttctgttaaaaaaaaaaaaaaaaaaaaaaaaaaaaaaaaaaaaaaaa

SEQ ID NO: 291998 - DNA, 1000 bp, Homo Sapiens
accaccatcctcttccaagaatcattttgacaggttcttttggaggaactccttctctttttaacccacccttttaaaaaaaaaaatggcaccaaagaaagacgtgaagaaacctgtggctgcggctgcggctgccccagccccggcaccggcacctgcacctgcccctgccccagccaaacccaaagaagaaaaaattgacctctctgccattaagatcgagttctctaaggaacagcaggatgaattcaaggaggcatttctcctgtttgacagaacaggtgattccaagatcaccttaagccaggtcggtgatgtccttcgagctctgggcacaaatcccaccaatgcagaggtcaggaaagttctgggaaaccccagcaatgaagagctgaatgccaagaaaattgagtttgaacaatttctgcctatgatgcaagccatttccaacaacaaggaccaggccacctatgaagactttgttgagggtctgcgtgtctttgacaaggaaggcaatggcacagtcatgggtgctgaactccgccatgttctagccaccctgggtgaaaagatgaaagaggaagaagtggaagccctgatggcaggtcaagaagactccaatggctgcatcaactacgaagcttttgtcaagcacatcatgtctatctgaatggagctctcaagaacaagcattgtttaggaagactggctggaaacttattttaatcacacccatgacaaactctccagatctgtttaccatcattcaggaaaacaaagcaatctggacggttcaagactgagcaactccctgaatttttatacatcttcagtttttctctgaattgaattcataccacacaaacaaagtgtctgctgctctagatgagaagaataaaatattgacaatctcaaatccaagcaccattctttattatctaccatgaatcaacgaaacattcttaaaacaataaatcaataaacaattttggtcagtctg

SEQ ID NO: 291999 - DNA, 651 bp, Homo Sapiens
ggaaaaggtcccggagagctgagcagtcaagatgtgtgacttcaccgaagaccagaccgcagagttcaaggaggccttccagctgtttgaccgaacaggtgatggcaagatcctgtacagccagtgtggggatgtgatgagggccctgggccagaaccctaccaacgccgaggtgctcaaggtcctggggaaccccaagagtgatgagatgaatgtgaaggtgctggactttgagcactttctgcccatgctgcagacagtggccaagaacaaggaccagggcacctatgaggattatgtcgaaggacttcgggtgtttgacaaggaaggaaatggcaccgtcatgggtgctgaaatccggcatgttcttgtcacactgggtgagaagatgacagaggaagaagtagagatgctggtggcagggcatgaggacagcaatggttgtatcaactatgaagagctcgtccgcatggtgctgaatggctgaggaccttcccagtctccccagagtccgtgcctttccctgtgtgaattttgtatctagcctaaagtttccctaggctttcttgtctcagcaactttcccatcttgtctctcttggatgatgtttgccgtcagcattcaccaaataaacttgctctctgggaaaaa

SEQ ID NO: 292000 - DNA, 1000 bp, Homo Sapiens; identical to SEQ ID NO: 118445

SEQ ID NO: 292001 - DNA, 1000 bp, Homo Sapiens; identical to SEQ ID NO: 118446

SEQ ID NO: 292002 - DNA, 1000 bp, Homo Sapiens
agaggcgatgaaacagaccttcaacctggaggaatacagcctctctcaggctaccttggagcaggtattcttagaactctgtaaagagcaggagctgggaaatgttgatgataaaattgatacaacagttgaatggaaacttctcccacaggaagacccttaaaatgaagaacctcctaacattcaattttaggtcctactacattgttagtttccataattctacaagaatgtttccttttacttcagttaacaaaagaaaacatttaataaacattcaataatgattacagttttcatttttaaaaatttaggatgaaggaaacaaggaaatatagggaaaagtagtagacaaaattaacaaaatcagacatgttattcatccccaacatgggtctattttgtgcttaaaaataatttaaaaatcatacaatattaggttggttatcggttattatcaataaagctaacactgagaacattttacaaataaaaatatgaggtttttagcctgaacttcaaatgtatcagctatttttaaacattatttactcggattctaatttaatgtgacattgactataagaaggtctgataaactgatgaaatggcacagcataacatttaattataatgacattctgattataaaataaatgcatgtgaattttagtacatattgaagttatatggaagaagatagccataatctgtaagaaagtaccgcagttaatattttctttagccaacttatattcaatgtattttttatggatcctttttcaaaggtagtatcagtaggcatagtcattttctgtatcttttcacctcacagttcatgaacatttcccatgtcattatagcacttttgtgttatataattgctgcattaatgttatagctgtattgatgtaataccagagttgttacgttcgggttatatgcaagtttatttcttagaaataaaactttgatggactttcaaaaaaaaaaaaaaaaa

SEQ ID NO: 292003 - DNA, 1000 bp, Homo Sapiens
tggagcattccgatattgtctcaaaaattcagattggcaacagctttgaaaaccagtccattcttgtcctgaagttcagcactggaggttctcggcacccagccatctggattgacactggaattcactcccgggagtggatcacccatgccaccggcatctggactgccaataagattgtcagtgattatggcaaagaccgtgtcctgacagacatactgaatgccatggacatcttcatagagctcgtcacaaaccctgatgggtttgcttttacccacagcatgaaccgcttatggcggaagaacaagtccatcagacctggaatcttctgcatcggcgtggatctcaacaggaactggaagtcgggttttggaggaaatggttctaacagcaacccctgctcagaaacttatcacgggccctcccctcagtcggagccggaggtggctgccatagtgaacttcatcacagcccatggcaacttcaaggctctgatctccatccacagctactctcagatgcttatgtacccttacggccgatcgctggatcccgtttcaaatcagagggagttgtacgatcttgccaaggatgcggtggaggccttgtataaggtccatgggatcgagtacatttttggcagcatcagcaccaccctctatgtggccagtgggatcaccgtcgactgggcctacgacagtggcatcaagtacgccttcagctttgagctccgggacactgggcagtatggcttcctgctgccggccacacagatcatccccacggcccaggagacgtggatggcgcttcggaccatcatggagcacaccctgaatcacccctactagcagcacgactgagggcaggaggctccatccttctccccaaggtctgtggctcctcccgaaacccaagttatgcatccccatccccatgccctcatcccgacctcttagaaaataaatacaagtttgaacaggcaaaaaaaaaaaaaaaa

SEQ ID NO: 292004 - DNA, 1000 bp, Homo Sapiens; identical to SEQ ID NO: 118447

SEQ ID NO: 292005 - DNA, 1000 bp, Homo Sapiens
actttcattatactacctggccagattttggagtccctgaatcaccagcttcatttctcaatttcttgtttaaagtgagagaatctggctccttgaaccctgaccatgggcctgcggtgatccactgtagtgcaggcattgggcgctctggcaccttctctctggtagacacttgtcttgttttgatggaaaaaggagatgatattaacataaaacaagtgttactgaacatgagaaaataccgaatgggtcttattcagaccccagatcaactgagattctcatacatggctataatagaaggagcaaaatgtataaagggagattctagtatacagaaacgatggaaagaactttctaaggaagacttatctcctgcctttgatcattcaccaaacaaaataatgactgaaaaatacaatgggaacagaataggtctagaagaagaaaaactgacaggtgaccgatgtacaggactttcctctaaaatgcaagatacaatggaggagaacagtgagagtgctctacggaaacgtattcgagaggacagaaaggccaccacagctcagaaggtgcagcagatgaaacagaggctaaatgagaatgaacgaaaaagaaaaaggccaagattgacagacacctaatattcatgacttgagaatattctgcagctataaattttgaaccattgatgtgcaaagcaagacctgaagcccactccggaaactaaagtgaggctcgctaaccctctagattgcctcacagttgtttgtttacaaagtaaactttacatccaggggatgaagagcacccaccagcagaagactttgcagaacctttaattggatgtgttaagtgtttttaatgagtgtatgaaatgtagaaagatgtacaagaaataaattaggagagattactttgtattgtactgccattcctactgtatttttatactttttggcagcattaaatatttttgttaaataaaaaaaaaaaaaaa

SEQ ID NO: 292006 - DNA, 1000 bp, Homo Sapiens; identical to SEQ ID NO: 223831

SEQ ID NO: 292007 - DNA, 1000 bp, Homo Sapiens
gggccaccgttggcacagccacttaccagctgttggtggctctgcaccaccctgagggcccagagccagctcaggatctggtgtctgctcaacacaaagcctcagagttggaaactcctgcctcagctcagatgctggagtgtaagctatgattaggacaaccctcacttcactcatggaccctggagccagccactgaccccgcctgggaacaacagtcattcttcctctttgttaatgtgccagaacctgggaggcttctctgtttatctgtttggcatcccttcctcctaaactaagaaggatcctggacagggagaagtggaggaggataaggtaccaggactcaggcttctcatcccctcctcccgcaaagcggttttctgaccctcagggcctctcggaatgtagttgctcgaggtaaccgctagagggtgcgcacctggatgctggatggggacggctgcgggcatctgcagggtggagggggccaccatccagtgtagggcacaaccctggggactgccctccatagcctgtcccgactgccgactcctagctctcatcgcctcggcgcctcccaccttcaccctctcggggatgcctccccaagagggtagttaggggtggggaagccgcctccacccagggggcgtggtgggggcggagggaaggagggcggcggggcacagagacagagagcaaggctgtgaaactgaggcaccgttcctagacatctcggtgctgtgtcgttcattcaaggagagttgagatacagtgaaatgagccagggcgaggagggagggtgaaggaacggagggcgggcggctccgaggagcgagagtcgggctgagggcaacctggcgccagggaaaattctggttattcaccacttctacagctctcctgccgctccctgcagaggatgctcgttttgcagagaaggcagtgttcctctattcccttcttccgaattaaaaataccccctcagagcgaaaa

SEQ ID NO: 292008 - DNA, 1000 bp, Homo Sapiens
ggcctgatcacagggtgggatgacgtggagagactctggaagcacctctttgagtgggagctaggcgtgaaacccagcgaccagcccctgcttgcaacggagccctccctgaaccccagggagaaccgtgagaagatggcagaagtcatgttcgagaacttcggcgtgcccgctttctacctgtcggaccaggcggtgctggctctctacgcctctgcctgtgtcacgggcctggtggtggacagcggggatgcggtcacctgcactgtccccatctttgagggttactccctgccccacgcagtcaccaagctccacgtggcgggcagggacatcacggagctcctcatgcagctgctcctggccagcggccacaccttcccctgccagctggacaagggtctcgtggacgacatcaaaaagaagctgtgctacgtggccttggagcccgagaaggagctttcccggaggccggaggaggtcctgagggagtacaagctgcccgacgggaacatcatcagcctcggggacccgctgcaccaggcgcccgaggccctgttcgtgccccagcagctgggcagccagagccccgggctctcgaatatggtctccagcagcatcaccaagtgtgataccgacatccagaagatcctctttggggagattgtgctgtcggggggcactaccctgttccacgggctggatgaccggcttctcaaggagctggagcagctggcctccaaggacacccccatcaagatcacggctccccccgaccggtggttctccacctggattggagcctccatcgtcacctctctgagtagcttcaagcagatgtgggtcaccgccgcagacttcaaggagtttgggacctccgtggtgcagagaagatgcttctgaaggccgcttctcgttgggtaccgtggggggtgaaccctagccccagctttgggaggatgttcaataaaggaccaatgccggaaaaaaaaaaaaaaaa

SEQ ID NO: 292009 - DNA, 1000 bp, Homo Sapiens
ggaaaacagtcaacctcccagtgtaaaaccaagattcccagtgaagcacctgaggccaagcaggggagaggaatgaggggagcagctggacatgggcctcctgaggcctcggggctgtccttcattgcccacatggatagacggagctgtggtgcagagaacttttcccgcaacaggtgcaggactgccagggatcggagtgcgggccgcgcacggtgccaggattccgccgaggggaagccgctcacattgcagtcatcacagacttacgcacttgtttggacagtttttccagaggggatgggaaagggccttgttctagctgaatctgtgtatcatgaccatttctgacaggcagaatgaattgtctggtagccctgtcctgacccatccaagcgctgttggggctggtggtgacgtggtcacatgtcctggcatatctggggccacgcagtttagtctcttgtcccaggagaattgttagtgacccctctttctcttgcaagccccctccacactgggttggatgataccttaatgagtgacgctggcgagaggcaccctacccgacgcagctgtgaatggccggtgatgtatgtcaggaggccacagggagcggaggagcggggcaggcagccacaggggccctgcggggagcacatcctcgcctccgtccggctgctgcccttcaacaacaagccctgatttttccagcaatgccagaaacctggattttaagtcttccaatttgattcaaaaatatttttaacattgtgagccagctagacccccagtgcaccaccccatattgaaaaacagttgtctggcatcagcttcaggagcgggtccggtcattctgaaactgtccctccagaggttcttccagccccacttctatgcgatgtcatcttttctaaaagagacaaatgaagccacagggaaagtgaaataaagccttgaacctcaaaaaaaaaaaaaaaaaaaaaaaaaaaaaaaaaaa

SEQ ID NO: 292010 - DNA, 1000 bp, Homo Sapiens; identical to SEQ ID NO: 118448

SEQ ID NO: 292011 - DNA, 1000 bp, Homo Sapiens; identical to SEQ ID NO: 223832

SEQ ID NO: 292012 - DNA, 1000 bp, Homo Sapiens
tcccacatgtccctgccagccactcgaggatatgccctcacagccctcatgaagctcagcactcgcctctgtggggacaacaaccgcatccgccaggtggtgtccatctacgggagctgcttggacgtggagctgcagcagcgggctgtggagtatgacacactcttccggaaatacgaccacatgagggctgccatcctggaaaaaatgcctcttgtggagcgagatggccctcaggctgatgaggaagcaaaggaaagcaaagaagcagcccagctttcagaagcagccccagtgcccacagagccccaggcctcacagctcctggatctgctagatctcctggatggggcttctggggatgtccagcatcctccccatctggacccctccccaggaggtgccctggtacacctgcttgaccttccctgtgtacctccacccccagctcccatcccagatctcaaagtgtttgagcgtgagggagtacagctgaatctgtctttcattcgaccccctgaaaaccctgctttgctgttaatcaccatcactgccaccaacttctcagagggtgatgtcacccatttcatctgccaggctgctgtgcccaagagtctccagctgcagctgcaggcccccagtgggaacacagttccagctcggggtggccttcctatcacccagctcttcagaatcctcaatcctaacaaggcccccctgcggctaaagctgcgcctcacctacgaccactttcaccagtcggtgcaggagatctttgaggtgaacaacttgcctgtggaatcgtggcagtaactgtctccactcacagcctgaaattctcctgtgtcccaaaccccagggggccccagcagcttcgaacctacacctgagggctaccagcaggtggcgctctggctttgcactgcaaaaactggggaccagcccccttctcccacaaataaagcccaataaagcctgagaagtgaggaaagccaaaaaa

SEQ ID NO: 292013 - DNA, 1000 bp, Homo Sapiens
aggctctgtacaaaaaaaaaaaaaaaaaagcctcagcattttatcattccatggaaggagaatcttttgaaagaaagcattgcctcctaccagaactagacagtgaattagatcggtattatggaaatgcatacaagtaatgtcactagggcttaataagcagccgtttgctaatgtgcttcctttcaaagggttggacctttaaattgctgcaaaaggtaaattgtatttttttttaagtattggtgttctttactctagctaggctaaaatttgctaaatgccttggtttcttttaaaagttcatgtaatatttctgatttttcagaatatttgcaataagagtctggattttaaaaaacacatgcatacacacaattaagagctcatgtcttagcaagatctgggaaaccaacattgcgagagtagctattttgaaagaataattctccagaagttaacatctaatatctagtatcaccaaacagtatcgctgttctcttttattcatttgaaatgaatataattatataactaacaattgtccaaatagatgagagagcaaatcatgtgagaaaattcagaataccatctgtttcatagccgcacagattttggactttcacaaacattgggaactaaatttagaattggcaaaagtctagaagatgggtatcaaaacagaagacattccaggagctagcaattttaagaggtgtccctccaaagtgacctgatggaagtcctgaacttggaaattaggttctactcacttggacatccctgcatcatggactgttgctgctccctgttccatatgctcgcaatctcagctatttggaagctaccaggaatgctttctaattatcatttgcaactagaactgtaatcagaaagaaattttgtatttttgtataacttgattgtgtgccattttatataacaggtcctgttttacaaataaattttgttttactaaaaaaaaaaaaaaaaaaaaaaa

SEQ ID NO: 292014 - DNA, 1000 bp, Homo Sapiens; identical to SEQ ID NO: 115885

SEQ ID NO: 292015 - DNA, 1000 bp, Homo Sapiens
ggacggggcccccgtcatccccacggccagtctgcaggacttcaggtaaaattgtcccacccaaactgcacgtggcaccagaagcttgctcacttatctctacttaagattttctgaaatacggaccacggctttcttgatctaaggaagaacttgctgctgcagtattgaaactgtgaagaactgacatttgaagaaaaatagattaccgttgcgggactagaatgggcgactgcttggagccagtgcttgtttttatctaggacacttactgtcctgtgaagtagaatacatttatctgcatttagtttgttaatgtctgaaatgaataaaaagaggaaattgcgattaaactgatgttctgctttttatggagaagattctgcccatctcccctggacagtagcaggcaggtgagggcagattttacccacttggttgtcacaactgaaccagttctctactccttcccttcacttctgtccactctcaagactttttcccaaaacatgcctgggcactctgcagccgtgaagaatgctcattttgacagaggcccaaatcctgtgtattaggataatatccttccccccgggagccttcgctgcaaacctgttctgccgcatgcaaagactgtgaccatggagttttctcagacaagatttggaaaggcagtggaatgaaatctctttgcagtggcctctctccaaatttccaaagatgactgcatagggaccaacactgcctgactttgcagtatctgtgagaaaaacctgaaaattaattcagggtgaaaatgtggagctctcggcctagtgtaaagtatcaagatgtatatttatgggatagatacatgacttagaagaagtagaagaaaattgtccagaaacagtactgaattttagatagaaaaggctcatgcttcctggagtagggaattgtctttgccatttaatgtgaatgcataaaattaggggaaaaaccaaaaaaaaaaaaaaaa

SEQ ID NO: 292016 - DNA, 1000 bp, Homo Sapiens
aagggctggatgaccccaatcaaaagaaagaacaaggactctggttacccttgcctccacccatgtgtcataagagtaggctacagaggtgaccaggcctggcagttgaaatctctggaagagggaacatgtggggactactcagaggcaaagaggagctgctcctgcctccatggttgctggccactcccaccaactactcttagggaggctaagcagtctctgttttgcttccatggctcaaataataccctgggtatgcaggacccactataccttgcatttgctgagtacacctagagagcttggctgtttccaaaaacaatcagggtcataaccatccatgcagacatggaggctcggctgaaccaggactcctcactgtctacctgagagaatgagcacccctcatccatctcagcatcaacacaatttccaggggacctcaggtctacctcaggactgaacgccacacctcaggattcctcctccttgaatctgagactggctgcccattctgagatggggatgaaggtaagatgccgcatcaccaggcacgccgcccctgacagctgccttgataccagctctctgtggaaacccccgaggagttggatctggagaacagctgggcctcctcactcaggacttctctcctgaagaacacgcagtgctaaaactgaggatgatttccctaatgcttctgcttggccttatggaggagctgctccttccttacagccttggggatggacttgcccacacctccacctcccctgagccctgtgagaggcacgactgtctatgccaatgaggctcggtggggggctctcaagtgcctgatcctgccctgggctcagagccagcccagagggaagcaactgcacagccccacaggccctccctggcactgtccccccaaccccatctcagagctcagagggtacaagctccagaacagtaaccaagtgggaaaataaagacttcttggatgactgac

SEQ ID NO: 292017 - DNA, 1000 bp, Homo Sapiens; identical to SEQ ID NO: 223833

SEQ ID NO: 292018 - DNA, 1000 bp, Homo Sapiens
atggttcacttgactactgagcagttacaccaaggagagcgtgaaggagatgattgagccagagaagaaacgggttgtgatggtaatggtgtgggggaaatgaacttgagctttaaacttgatttgagtttcagtgtctctgaattgaacatcccacgttggaagaagatacatttgggggctccaggactacagtagaaaagtatagagcaagcaggaaaatcttctagtaaaacttacatgcaggacaacaaaatgatgaaagatatccaaataccagataatccaccaggaaggcttttgtttaggaatttgtttcaagaggaacaagggatgagggagaaaaatccgttttatccatcagagtcagtgctataaaattgcctattaaggtaaaagaaaaatgtggagactattttactatacagagagcattaattcagatggcttagaaaagtgataccagcccaagaacagggatctaggtgagcccattgtaagtatcattgaaaacaaaacatgcccgtcaacatgtcacagaaaacgaacgaaggacaacaagaagtggatgagaatattttgttgaccttcatgggtttacagcctctgtctctaaacaaagtatggaaacaagtagagcttttattttgcttttgtttttgttttgtttttttttttgttttcccccactaaatagaaatgagggtccttagtctgtttctgacaatctgttaatttcttaggacagctgtctttggtttgctttccagcaggcgtagtatatttagtcggagagcacatctgtatgcgacaacttgattacatctttttttctagctattttgcattttttcttttaccatgtttcagtttctgcatgtagatttaaataaaaaacaaaacttgtaaagttgtaacatttcacatggaaatgctgcccaatcttcaccagcttcagaaatctgacctttgccgatgctgcaataaagtgttgtaattt

SEQ ID NO: 292019 - DNA, 1000 bp, Homo Sapiens; identical to SEQ ID NO: 118450

SEQ ID NO: 292020 - DNA, 1000 bp, Homo Sapiens; identical to SEQ ID NO: 223834

SEQ ID NO: 292021 - DNA, 1000 bp, Homo Sapiens; identical to SEQ ID NO: 118451

SEQ ID NO: 292022 - DNA, 1000 bp, Homo Sapiens
caccagattggagatagaaaagaatagctgaaattatgtcagtggtgaaatgtcactccattgacccaccgaaaaaagaaaagaaatctgtttctaccaaacatttccagaaacgtatttatagcatgaagaaacacacatgggtagtgtgacctgtttggatgtgattacttaaaaatggaatgctctgaataggcactctctacattaaaggtatggaaggcgataggggtcagaattttaaaaatttaattttgaaaaaggtgactcacccctcatttccagagtgtaggcaattatgtcctgctttgataaaactgctagaggatggctatgcaaaagcataacgattcaaggaaacaaagtacaggtagtttttgagctgacagcagcaaaggcaccataagtcaaaatattggttttggtggagatgatcgatgtgtgtgtgtgagagagagctatgtttctaaccaagggcctaatgtttgttacagaaatgatcccagagacctacaagatgtgggaatcagcataacagggcaatgcagcaattaaccccacatcgttttctgtagttcctttttgtttcattttcttctgtctcacctcgttagaaaattcctcccagtcaggggtcgtccagtgcaggacgggggacccaagggtctcaagcctgcaagtccagaaggtgacaaacccaggagcactgggagttaagctttccttggggagggaagagccttgatgtccagcacacagcctggctataaagacacgaagcgacctacccactgtacagtccacttcacaggatcagctgaatcatgacctttaaaagttccgagttgaaactgaaggctctcctcagacctggctttttcctcagtccctgttcataccatctctgcacccacaatcacactgatttttcaaattcattttgtttttgctgtttcatttctggcattaataaaagtcttataaggaaaaaaaaaaaaaa

SEQ ID NO: 292023 - DNA, 1000 bp, Homo Sapiens
tttcagtatatttggattgggactctaagcagataatacctatgcttaaatgtaacagtcaaaagctgtctgcaagacttattctgaatttcatttcctgggattactgaattagttacagatgtggaattttatttgtttagttttaaaagactggcaaccaggtctaaggattagaaaactctaaagttctgacttcaatcaacggttagtgtgatactgccaaagaactgtatactgtgttaatatattgattatatttgtttttattcctttggaattagtttgtttggttcttgtaaaaaacttggattttttttttcagtaactggtattatgttttctcttaaaataaggtaatgaatggcttgcccacaaatttaccttgactacgatatcatcgacatgacttctctcaaaaaaaaagaatgcttcatagttgtattttaattgtatatgtgaaagagtcatattttccaagttatattttctaagaagaagaatagatcataaatctgacaaggaaaaagttgcttacccaaaatctaagtgctcaatccctgagcctcagcaaaacagctcccctccgagggaaatcttatactttattgctcaactttaattaaaatgattgataataaccactttattaaaaacctaaggttttttttttttccgtagacatgaccactttattaactggtggtgggatgctgttgtttctaattatacctatttttcaaggcttctgttgtatttgaagtatcatctggttttgccttaactctttaaattgtatatatttatctgtttagctaatattaaattcaaatatcccatatctaaatttagtgcaatatcttgtcttttgtataggtcatatgaattcataaaattatttatgtctgttatagaataaagattaatatatgttaaaaaaaaaaaaaaaaaaaaaaaaaaaaaaaaaaaaaaaaaaaaaaaaagaaaaaaaaaaaaaaaa

SEQ ID NO: 292024 - DNA, 1000 bp, Homo Sapiens; identical to SEQ ID NO: 223836

SEQ ID NO: 292025 - DNA, 1000 bp, Homo Sapiens; identical to SEQ ID NO: 223838

SEQ ID NO: 292026 - DNA, 1000 bp, Homo Sapiens; identical to SEQ ID NO: 118454

SEQ ID NO: 292027 - DNA, 1000 bp, Homo Sapiens
caaattctgcttcgtgaaggctgcaagaagattctcgtagctgactctttgtccttactgaagaaaatgcaccgaactcaaatgaaaggtgttcttgttgatgaggagaacatctgtgagtcgtgcctttcccctattcttccatcagatgcagctaagcccttcagcgtggtggtcttccattgccggcacatgttccacaaggagtgcctgcccatgcccagcatgaactctgctgcacagttctgcaacatctgcagtgctaagaaccgtggaccaggaagtgcaattttggagatgaaaaaatagctcatttctccttgtcagtctccttgtcaccactctttttgagactgtttttgcaacaacaaaagcatttgttgacactcgtgctgttaagagatttgtttatgtttatattatactcaaaaacaatttcttcatctattcctgtactaatggtttctctttgcagttcacagagaatttggggctctcttcatgccttgaaattttggggtccatagtgaatattttgttatttatttgtttggctcattctttatatagtaatggaaacataagtctaggagttagaaatgaattttttagaccttagtaaaaccatttaaccataaaatggacaactgagaattctcccagctgcctgaaagcgtcgccaactgtggttatcctgcaagctgctacctgcaacttggacgttgtttccacgtgctctgctggctacgattcttgcattctgggtttggcttttttctgtgtcatcaactatggttatcctctaaataggcatttaatgaaacattgtacaaattgtcactcatttgatgacacctgggaataacattagcaggctgatgtcctgcaccattatgtttactaatcacatgttctgtgtgctgtgacgactgtcaaagagtatctggccatggcggacactcagcatttgttgattgaataaatgttagctcttctcatt

SEQ ID NO: 292028 - DNA, 1000 bp, Homo Sapiens; identical to SEQ ID NO: 118455

SEQ ID NO: 292029 - DNA, 1000 bp, Homo Sapiens
atctataaaccccatttctgtagcatttctttttttatcacactagtttcttttcctccttctctctttcttgctccaatccctaccaataatgtcatgatgcagaggcatttgaaaatgaagatgaaaagatggtcactttatttagccagtcaagcttattctactgggtgtcgccaaagcgatttatcatttttattttaaatatattcatggttgaagtgtttcaacgttattggacaattaggaagaatgtccttaactcttacaagttattttataactgatttttaaaatgctgtttttcagtattaactatgttgaccttagaaaacttttacaaaaaatagactttatgttttagaacagttttaggttcacagcaaaaatggagcagaaaatgcagagatttcccatataccctctacctccacacattcacagcctcccctaccgtcaatgtcttataatagagtggtacatttgttacaactgatgaacctacattgacacattattatcacccaaagtccatagtttacgtgagggttcactcttggtgttgtacataatatgggttttgacaaatgtgtaatgacatttgtcaaccgttatagtattatacagaataatttcactgccttaaaaaatcctctgtgttttacttattcatccctccctctcctttaacccttagcaactgatcttttcactgtgtacatagttttgcttttaccagaatgtaatgtagttgaaatcatacagtatatagcttttcatgcagtatatagcttttcagattggcttctttcatgtattaatatgcatttaggtttctctgtatcttgtcatgtatatgtagctcattttttttttagtgtagaataaaattttattgtctggttctaccacatttcatttgtccatgcacctattgaagaacatctcagttgcttccatgttttggcgattatgaataaagcgactataaacatccatg

SEQ ID NO: 292030 - DNA, 1000 bp, Homo Sapiens
agtgatgcgcgaactattgcccttaagcagcgtacctggcaggcgctggcccacgaatacaactctcagcccagcgtgtccctgcgggatttcaaacagctgaagaagtgctgggagaacatcaaggctcggaccaaaaaaattatggcccatgaaaggagagagaaagtgaaacggagcgtcagccctctcctgagtacccacgtcctagggaaggagaagatcgccagcatgctgccggagcagctctacttcctgcagagccccccggaggaggagcccgaataccaccccgacgcctcagcccaagaatcatttgctgtttcaaatagagaactgtgcgatgatgagaaagagttcatacattttccagtatgtgaggggacctctcaacctgaaccctcgtgttcagctgtcagaataacagccaataaaaactacaggagcaaaacctctcaggaaggtgctttaaaaaagatgcatgaggaagaacaccatcaacaaatgtccatcttacaactgcaactgatacaaatgaatgaggtgcatgtggccaaaatccagcagatagagcgagagtgtgagatggcagaggaggaacacaggataaaaatggaagttctcaataaaaagaagatgtattgggaaagaaaactacaaacttttaccaaggaatggcctgtttcctcatttaaccggccctttcccaattcgccctaagactttgggggtggctctcttgtaattaatctgtgttggcaaagaatgtctggaacatggacttggcggtcagtaacctgtaacagagctacaactaggaaaattagagtggtagtagtcacttatttaagaattcattcaggtaaacagctgcaccctctgtaccccttaagtggcaaagaagctgttatagtcttctgaaaattatcactatgagtgctataattctgaatataatgtctcttaattagaattcatacaagaaaaaaaaaaaaaaaaa

SEQ ID NO: 292031 - DNA, 1000 bp, Homo Sapiens
tggccgcctggaccagctgctctccctctccatggtctgggccaaccatctcttcctaggctgcagttacaataaagaccttttagacaaggtgatggaaatggccgatgggattgaagtggaagacctgccacaatttactaccagaagtgaattaatgaaaaagcatcaaagctaagccagaagatttatcacattttcatcatcagctacaggattagaaaggaggctgggatgaatgtgacatagaccacagcagctctcttaagactcctggtattaccaacataaagaggcaggtggaatgagaaggactctgtctagattggcttttttaacattctcattttcccaggagttatcactgtaaaagtatgcatggatatttatgtatttataaatcatgcactctaagatgagttcatcaacattgtaaaagccctcttttctgttttcaggtttttttttttcttatcgacaaggtctcactctgtcgcccaggcagaagcacaaaggtgcagtattggctcattgcagcctcgaactcctgggctcatattttcagggttttttgttttttgttttgtttttttgagacagagtcttgctctgttgcccaggcagtagtgcagtggcgcgatatattttcagtttttaaacgtcagaatttttgtttaaaatgcctttttgggctgggcacagtggcttatgcccataataatcccagcactttgggaggccgaggtgagcagatcacctgaggttaggagtttgagaccagcctggccaacacgatgaaaccccgtctctactaaaaatacaaacaaaattagctgggcatggtggcggacatctgtaatcccagctactcaggaggctgaagcagaagaactgcttgaacctgggaggtggaggttgcagtaagccaagatcgtgccattgcactccagcctaggcaataagagcaaaactccgtctcaaaaaaaaaaaaaaaaaaaaa

SEQ ID NO: 292032 - DNA, 1000 bp, Homo Sapiens; identical to SEQ ID NO: 223841

SEQ ID NO: 292033 - DNA, 1000 bp, Homo Sapiens
gcctgtgctggccaacccggcagccacatccggctgccgccgctacgtggaccatgacctcaaccgcaccttcaccagcagcttcctcaattccaggcccaccccggacgacccatatgaggtgacaagagcccgagagctgaaccagctgctggggcccaaggcctcgggccaggcctttgactttgtccttgacctgcacaacaccacggccaacatgggcacctgcttaatcgcgaagtcctcccacgaagtctttgccatgcacctgtgccgccatctgcagctgcagtaccccgagctgtcctgccaggtcttcctgtaccagcggtctggggaggagagctacaacctggactctgtggccaaaaatggactgggtctggagctgggcccccagccacagggtgtgctgcgggctgacattttctcaaggatgaggaccctggtggccacagttctggacttcatcgaactcttcaaccagggtacggcctttcctgcctttgagatggaagcctatagacccgtgggcgtcgtggacttcccccgcaccgaggccgggcacctggcaggcactgtgcatcctcagctgcaggaccgagacttccagccactgcagcctggtgctcccatcttccagatgttcagtggggaggacctgctctatgagggagagtccacggtgtaccccgtgttcattaacgaggctgcctactatgagaagggcgttgcctttgtccagactgagaagttcacattcaccgtgcctgccatgcccgcgctgacccctgccccgagcccagcttcctaacccaagacacacctccccaacctcagtcttcccatctgaacgatgggtcctgaggcacagctctgagcacagaggtcccttctgccacctaccatgcaccatgttccttgccaggcctccccaacccctggcctcaatttccctttctataaaatggaagatgtccagaaaaaaaaaaaaaaaaaa

SEQ ID NO: 292034 - DNA, 1000 bp, Homo Sapiens
aaggccttgagaagcaaggagtgcacgcagctggagctgcagaagctggtcctctggcttctgtccctgctcagtcggccaagaagccctgcccagtgtcttgcgagaagtaaagaagatggaaaaggagaaaatgtccttttggaagaatacatttgggcatgggtggttggggatggggtgggacattgaacaggcaaagagaggctaaaattgagtgcagatggggctagtccagggcaagtgctgaagatggcagctgctatctgcagctcctaggtgctttcctcaggctgggtagatggagctctgctgacttctgtggtccaccattgtttttctatcaatttatattgtggcaatcctagagtactttgcactcatttttttttttcacttaatattgtctcataagcatctttctatatttgttcacatcgtacataatcatgtttttgcacagatacattaatattatcatagtttgtttaactacttggctttttctaacagtttttttttttgagatggtcttgctctgttgcccaggctggagtgcagtgacgtgatctcggctcactgcagccttgacttcctgggctcaagtgatcatcccacctcagcctcctgagtagctgggactacaggtatgcaccacgaccagctaattttttgtattttttttttgtagagagggtattttgccatgttgcccaggctagtcttgaactcctgggctcaagcgatctgcctgcttcagcctcccagagtgctaggattacaggcatgagccactgcacccagcctcttaacaaattttgaatataactcctgtcttaaaatctgcagaatattgaatttttccagctattttttacttttgcttagcttatagatgctaaaggatactgtcatttgcatttttaaaaatatatgtatgagtgaatagttaaaaaaaaaaaaaaaaaaaaaaaaaaaaaaaaaaaaaaaaaaaaaaaaa

SEQ ID NO: 292035 - DNA, 1000 bp, Homo Sapiens; identical to SEQ ID NO: 223842

SEQ ID NO: 292036 - DNA, 1000 bp, Homo Sapiens
ggggacacgtctgttggtggtgtccacccaactcagccactgcaggaccatcttgcgactctttgatgacctggccatgtttgtctacactaagcaatatggcctgggggcacaggaggaggacgcctttgtccgctgtgtctccgtcctagggaacctggctgaccagctctactacccctgtgagcacgtggcctgggcggctgatgcccgggtcctccacgtggactcttctcggtggtggacgctgagtacaaccctgtgggccctctctctgctcctgggggttgccaggtccctgtggatgctgctgaaactgagacagaggctgcggagccccacggcgcccttcaccagcccgctgccccggggcaagcggagggccatggaggcgcagatgcagtcggaggcgctgtcacttctcagcaacctggccgacctggccaacgccgtgcactggctgccccggggcgtgctgtgggccggccgcttcccgccgtggctagtgggcctcatgggcaccatctcctcaatcctcagcatgtaccaggcggcccgggccggcggccaggccgaggccactaccccctgacactgccggaagagcacagggacacagccagagcccacggagggcccttcccgcaaagcagaagccgccagggcaggggccggggctctcatggagctgcctgtggtgaaacccatgggcagggtgggtggagggactgatgcgaggtcccccaggcctcagcctggagctcctgagccgtgacagttttcaggggccgtgcagggcttcagcagcacctcctgcctgccagctggcgtcttgtatccaaatcaagatgaggaagagggggcctgtcgtgccttgagaaagctggaacgggaatcaattaaacattgtggtgctggcaaaaaaaaaaaaaaaaaaaaaaaaaaaaaaaaaaaaaaaaaaaaaaaaaaaaaaaaaaaaaaaaaaaaaaaaaaaaaaaaa

SEQ ID NO: 292037 - DNA, 1000 bp, Homo Sapiens
actgggacttgggggtttgcctggagtatgagtgtaaaagaaaacagctgttaaaacctgtgtttttaaattcttggattgatctcagagcaacttacaagcttttctataggagaaaaccaaaaggactaagtggtgccttgcaggaagtaggaatagaattctcaggacgagaacattctgggttggacgattctcggaatactgcccttcttgcttggaaaatgatcagagatggttgtgtaatgaaaattacaaggtcgttgaacaagggtcccttcctcttgccttcgtggacctggaacagtgatctggcctcaggggaccagcatgcttttcttaagcaagaatttggctgtggaacctacagaaccttacttcagaagcccaatatgagtaaacaggaaaaggggaatattctctggttgacaatggtgtggctgtcactggcatgtctgcaaaggaaaaactacaatgactgcatgttaaacacagcatcacagactgttaccactgaaaaattttgagaagctctccacttgaacctcttcatgtcatgaatcaggtgccagtggcttagcttgaattacagggtaaaagccatcactttctctatccttttaggtgctttctagaatcaaaactaaactttgtcatcaaaggcccatttataatagctgctttcctagctttttattctatgataaagaaggattgaagcatttttaaaacttgagatttttatcatacctccagcagagtaaggagtctgtgtgatcttgcaatcatggataaggaagaattttccccttccctcccctatggatgctttaaaatgtgattttttaaaaatgagtatgttaatacaatacatgttagtaaaagccatgggtactgatgggccaacacactacagcctactggcaaaatctgacttgcctcttgtttctgtaaataaaatgttattgcccattcaaaaaaaaaaaaaaaaaaaaaaaaa

SEQ ID NO: 292038 - DNA, 1000 bp, Homo Sapiens
tgtgctgaagctagggttgtagtggaacatggcacttatgggaacaggcaggtgttaaagctggacaccaacggaccattcacacacttaattgagttttgaaaatgaaaaactagtttctatagctgttttctggtatgaaatgatctaaagtataattagattttcttccccttaatcttgaatatactaatcttcagcatttttagacaggaaaatcttgggtttcatatataactctgcacctgctaattggatgactttgccaagtcacctaaactctggatctcagtcaccttttgtcctacattcctctacccttctacttgaaaatttgaaatatgctgtctattcacttcatagtcattaaggaaatgttcttaattgtttttttgtttttgttttttttttgagatggagtcttgctctgtcgccagactggagtgcagtggcgcaatctcggctcactgcaacctccacctcctggattcaagcgattctcctgcctcagcctcccaagtagctgggactacaggcatgagccaccgtgcccggcctcttagttgttttttaaaaattatgtacattttaagtattttgcaataaagaaattcatgcaaacaagaaaaacacatttcttataccaaaatttgtgtagcatgtaataaaaataactatttgtattaaaattaggtaaacttcagcactttgggaggccgaggtgggaggatcacttgagcccaggagtttgcgaccagcctgggcagaatagcaagacccagtctctaacatatacatatacatatagatatatatgtaatatagaagggttattgtgtgttatattactttccagggacattcaaatgttttacattactttaagaatctttacttgatataagaacaaagtataagggtttaaaagttgtttttattaaacatactatataaatgggttaaaaaaaaaaaaaaaaaaaaaaaaaaaaaaaaaaaaaaa

SEQ ID NO: 292039 - DNA, 1000 bp, Homo Sapiens
actcgggagactgaggtgggaggatcacttgagcccaggggatttaggctgcagtggagcggtgatcaggccattccactccagcctgggtgacagagtgaggccctgtctcaaaaaaaaaaaaaaacaaaaacaaaaacaaaccacacctgcatctgctgtgctgggcccccggttctcttttccctctgggatctaagatgccgctggggatccaaggcagaggcctgggagcccccatttccgagggggagggctagcgtggaaggccccgccccggcagctgcggagggatttggtggggtccaggccgcccttgccacgcaggggtgcgcggatgacctgaaaaaagccagaaagaggaaaggtgccgccgaggctggtcgctctcagctggggctcatcgcatcctctaccaagagcgctcccaccacacaggtcccgcccctcccagcaaagcttctggcgccgccctgtctgaacctggagcggctgggaggatccccctcccaggagaagccgaggaccccaggatgctgcagaatcagtgagaggtccctctggcctgcatgccaggagtcggtcaccgccctgtgcttcctccaagagacagtggagaggctggggattccaaggacacacagaccaggatcagccaaaagggccgccgtctgcagcccccggggactccctcggccccaccccagagaaggccccggaaacagctgaacccctgccggggcaccgagagagtggaccctgggttcgagggggtgactctgaagtttcagataaagccggactccagcctgcagatcatccccacgtacagcctgccctgcagtagccgttctcaggaatcccctgcagatgctgttgggggccctgcagcccacccaggaggcaccgaggcccactcagcaggcagcgaggccctggagccccggcgctgtgcttcctgtcggacccagaggaccccgctctggtgaggccctgtctc

SEQ ID NO: 292040 - DNA, 1000 bp, Homo Sapiens; identical to SEQ ID NO: 223843

SEQ ID NO: 292041 - DNA, 1000 bp, Homo Sapiens
gcctgtgttccccttgtttttgatgatgaagaagaaagcaaattgacctatacagagattcatcaggaatacaaagaactagttgaaaagctgttagaaggttacctcaaagaaattggaattaatgaagatcaatttcaagaagcatgcacttctcctcttgcaaagacccatacatcacaggccattttgcaacctgtgttggcagcagaagattttactatctttaaagcaatgatggtccagaaaaacattgaaatgcagctgcaagccattcgaataattcaagagagaaatggtgtattacctgactgcttaaccgatggctctgatgtggtcagtgaccttgaacacgaagagatgaaaatcctgagggaagttcttagaaaatcaaaagaggaatatgaccaggaagaagaaaggaagaggaaaaaacagttatcagaggctaaaacagaagagcccacagtgcattccagtgaagctgcaataatgaataattcccaaggggatggtgaacattttgcacacccaccctcagaagttaaaatgcattttgctaatcagtcaatagaacctttgggaagaaaagtggaaaggtctgaaacttcctccctcccacaaaaaggcctgaagattcctggcttagagcatgcgagcattgaaggaccaatagcaaacttatcagtacttggaacagaagaacttcggcaacgagaacactatctcaagcagaagagagataagttgatgtccatgagaaaggatatgaggactaaacagatacaaaatatggagcagaaaggaaaacccactggggaggtagaggaaatgacagagaaaccagaaatgacagcagaggagaagcaaacattactaaagaggagattgcttgcagagaaactcaaagaagaagttattaataagtaataattaagaacaatttaacaaaatggaagttcaaattgtcttaaaaataaattatttagtccttacactg

SEQ ID NO: 292042 - DNA, 1000 bp, Homo Sapiens; identical to SEQ ID NO: 118457

SEQ ID NO: 292043 - DNA, 1000 bp, Homo Sapiens; identical to SEQ ID NO: 118458

SEQ ID NO: 292044 - DNA, 1000 bp, Homo Sapiens
ttctggttgtcatgtccttctacggcattttcttgatcggaatcatgctgggctacatgaaatccaagaggcgggagaagaagtccagcctcctgctgctgtacaaagacgaggagcggctctggggggaggccatgaagccgctgcccgtggtgtcgggcctgaggtcggtgcaggtgcccctgatgctgaacatgctgcaggagagcgtggcgcccgcgctgtcctgcaccctctgttccatggaaggggacagcgtgagctccgagtcctcctccccggacgtgcacctcaccattcaggaggagggggcagacgaggagctggaggagacctcggagacgcccctcaacgagagcagcgaagggtcctcggagaacatccatcagaattcctagcacccccgggacccctgcgggtggctccatcagccagcaaccttagagagaggaaagacagttttcaagtgtctggtttcactttcacagtgcggctgccactttgaagagacccttggtaaacccctgattcggggtggggtgggggactaggctcagccggaaccagcacctccaaggagtccgggaggtgcctgtggtttgcacccaccactgaaaaagccgcggagatgcgcagcgcgtacactgactttggggcctgggtgttggggttctgatcagaatttggcgggatgatatgcttgccattttctcactggatgccctgggtagctcctgcagggtctgcctgttcccagggctgccgaatgcttaggacacgctgagagactagttgtgatttgctattttgcctagagctttgtccttctagatctgattggctgtaagtatctctactgtgtacctgtggcattccttcacagtgggttacaagcttcttttggattagagggggatttttgatgggagaaagctggagatctgaacccagcccatttgcacactaaaaaaaaaaaaaaaaaaaaaaaaaaaaaaaaaaa

SEQ ID NO: 292045 - DNA, 735 bp, Homo Sapiens; identical to SEQ ID NO: 223846

SEQ ID NO: 292046 - DNA, 1000 bp, Homo Sapiens
catggtgcctcccaaagtgaaatgcctgaccaagatctggcaccccaacatcacagagacaggggaaatatgtctgagtttattgagagaacattcaattgatggcactggctgggctcccacaagaacattaaaggatgtcgtttggggattaaactctttgtttactgatcttttgaattttgatgatccactgaatattgaagctgcagaacatcatttgcgggacaaggaggacttccggaataaagtggatgactacatcaaacgttatgccagatgataaaaggggacgattgcaggcccatggactgtgttacagtttgtctctaacatgaaacagcaagaggtagccccctctcccgtcctcatgctccctctcagtcccctggattgccccagtcctgtgaccatgttgccctgaagaagaccatcttcatgactgctcattgtagatggagaattcaacataaatacagcaagaaaatgtgtttgggcttctgaagagttgtctgcttaccttaacatgtttacttttttgaacttgtactgtataggctgttggtgaaattcttaagaagttgtaatgaactcaaaattgaggccagagcttgctttcccttttcccaaacaaaattggttttctgcacaagcgatgctaatgatgtgttcagtgtaactcgcagattggcaataagatacccgctacaaactgtgattggatgcaaaatctcttagcttctttcacgaatgttggccctgcctagatgttgtgaagcctcccagaatgcatagagtcattcactgtagatctcttattgaaatgcgtattttatttaatgtaagtatattttggaacagatttgtaatttgtacaattcaatgctttaattattttttctattctcatttagtttgtattttcattgtatagagcagacagaaagatgttgggtcaagcaactattgaagagaaatacaaagaaaaaaaaaaaaaaaa

SEQ ID NO: 292047 - DNA, 1000 bp, Homo Sapiens
cctgtctgcttcatgggataggaccgtctctgtctgatcctgtccattcggtaccaggcccacctggaatcccacaacatcagctctgtgccacctcccaagagggctcctcactatctagggagccctgggccagggctggagagccctcagtcggggcaggccaggggaggggtgaagtggttgcctggacaccccacgggaggagtggcatctgggctcttggccctcccacctggagcctgttacccgttagagagctgagagcccttatttaaaactcacctcccaatcaccccaaacaaatggaagagaagagaaaggacatggcgtattttgtatttaaaagtaattgtattaattatttaaagtgtggaaagcaaaataacaaaaaagagaaacgccaacaaaaaatcagcagatgttgaagacaggggtctcgggggtgggctccggcacccacatctgagtcaggactttcctcagtgactgtgtgtaggggggttcagggctgaacccacctccctcccaccttcctcccacctcacctgtcgcacccactgtgaaagttggaatatgtggtctccctggcctcagggctctgactctgccagggtggggctctctaacccacaggtgttggctgcctggcccatgtgcccactgtctcttccacttggtctgggtttggcaggcactgctgctacttgagggccaggatgctcccccagggaagaaacggaatagtgtggggtgtgtgcagggctgcatccgcagatggctggaatattaaaattcttctatattggctggtaaattgccatggccctgagccactgagtatgttcattgccacccctgtcctcccctgggcacccctcactttccctgatcctgcaattaaagggttaatgtgtggcatatggaagggactcccaggaccctgtgcccagcttccatgctgactgatggttaaataatgtgattgtctcctcccagg

SEQ ID NO: 292048 - DNA, 1000 bp, Homo Sapiens; identical to SEQ ID NO: 286498

SEQ ID NO: 292049 - DNA, 1000 bp, Homo Sapiens; identical to SEQ ID NO: 223847

SEQ ID NO: 292050 - DNA, 539 bp, Homo Sapiens
cgcccagcatgccgaggaggaggagacgccgagggtcctccggtgctggcggccgggggcggacctgctctcgcaccgtccgagcggagctttcgttttcagtgagccaggtggagcgcagtctacgggagggccactacgctcagcgcctgagtcgcacggcgccggtctacctcgctgcggttattgagtacctgacggccaaggtcctggagctggcgggcaacgaggcccagaacagcggagagcggaacatcactcccctgctgctggacatggtggttcacaacgacaggctactgagcacccttttcaacacgaccaccatctctcaagtggcccctggcgaggactagcttctgacacccggcccctgggacctgacaggtccactcgtccacccacccggccccaaatcccccggcctgaacccccggccttaaacaccctccccccacaacccaggccccaaagtcttgggccttcattaattctgtcaataaaatgtttcaaggaaaaaaaaaaaaaaaaaaaaaaaa

SEQ ID NO: 292051 - DNA, 1000 bp, Homo Sapiens
tggaattctctgattttgagccgaacatgagtttttagactgtatcttgacatgaggttcctgacattggatacaaagttatcagcattcacaaatctttttgttttctccattttttttccctttgagatgaagtgctgttcttttgcctaggttggagtacagcggtgaaatcatagcgcactgcagccttgaactcctgggctcaagcgatcctcccacctcagcctcccaagtagctgggactacaggcacctgccaccacccccagttaatattttttttaattttttttagaggcaggatcttgctgtccaattttttttaaaaagctaaaattgccaactttagaatcttgaccaaaaaaaattaattttaggagcatctatttatgcagtgttcaaaagtactgaattagaaaccaggaagttttagttccttctactacctgtgtgatcttggggaaattatttaacctctcagtcctaattttccccttctgtataatgggagttctggatcacaatatgtctgggctctcattacccaaacatctgagattccatttttgccatgtgtcatcgagtcgctccccaacagatgtttgtgatgtttttgtggctgtcaccatggtgggattctttcagaatgagactcctggaaattcactgagtcagcagccttcacaccatctacccttaaatatccaaccccagcaatttatacaacgctgtcatatttttaaaaaaacaaaagtaagccatcctcaaataaggaaccccttggtagatattaaccttaaaaagggttttcattctcaaacaagatgctttgttctccaacaagatgttcgtctcatcacttgcacttttgttttaatgtatggattcagattagactgagaaaaatggatggtattttcttaaaattgtgccaccttaaagcccccccccttttttttttcttccttcactggataaataaaatatgtgaacaagtg

SEQ ID NO: 292052 - DNA, 1000 bp, Homo Sapiens; identical to SEQ ID NO: 118459

SEQ ID NO: 292053 - DNA, 1000 bp, Homo Sapiens; identical to SEQ ID NO: 118460

SEQ ID NO: 292054 - DNA, 1000 bp, Homo Sapiens
tagtttttaagcagtttccaccttgctttggtctaatgcttttctttgaaatgctaacagaattcccaagctttttccagttctagatatctttactagacctttgggggactcttataatggagctgcttttgaaaagcactttaattagataatgtattttgactaaatcacgaggatgcccagtgagagcttctagctgatctcagaggaccagagtgactgagggtaaagtgtctcacagcccatgctgaattttctgcattttaaactgatactgcagtcattggagagagagctcctcatttctcgaatgaaagatgagatatattcatcctcatgtaccacatctgtcttagtgtttgcgtctggggtgtgttatcaaacagagcatggtctacatcccactgtgtcaaccagaagagccaagtgttatctcaattggcccagtgtttctccaggctggggactgttaagggctctaagggaatgtagacagagtctccctgttattctgacttcctgcttgatgagctttcagttcctgtttttgctattgtttcctaaatttgacctacatattacatgggtgtagtgtgttgaggcttttcaaagaagggtctagtgagctaagtttcatcttctggtactcattgatcaaactgacctttctattctcataagcgtttctacccaaagttgtgtgtggaaggagtgtatagcagagaggaaatccctttcaacagagtcagctgctaactgatttcctataagcacactggattaagggcagccacagtggtttctactgtatgtatgaaccgaatggaggaatgttttcaaagattgatttggtgtggattgcaattgtaatggaaggcataacttgggatcccgggctgtaacttgctcttttgtttcccacccccctgacatgtatgtgtgctttaataaagctttctcacttgtcaaaaaaaaaaaaaaaaaaaaaaaaaaaaaa

SEQ ID NO: 292055 - DNA, 1000 bp, Homo Sapiens
gtgggcttcccagcccccgcccccaacaggccacgggatgacagttggtcagtgggccccgggagtcccctccagcctccactcctcggtcctggagtccacgaacccccagaggaggctgctgtagacccccgtggaggccaggtgcctggtgggcccttcagccgtctgcagcctcggggggatggccccaggcagcctggccccaggcctggggtcagtggggatgtggggtcctggaccctggcactccccatgccctttgctgccccgccccagagccccacgtggctgctgtactcccacccagtggggcgcagggctcggctacacatgggtatccgcctgagccagtccccgctggacccgcgcagctggacagagccctgggtgatctacgagggccccagcggctactccgacctggcgtccatcgggccggctcctgaggggggcctggtttttgcctgcctgtacgagagcggggccaggacctcctatgatgagatttccttttgtacattctccctgcgtgaggtcctggagaacgtgcccgccagccccaagccgcccaaccttggggacaagcctcgggggtgctgctggccctcctgacaggccttctggccgtgcccatgccccttgggtgcctggggcagaggggtggaatacgttggggtgccccacgatagctgtggggggggctcttagtgcaagatcctgtggattagaaacaagttgctcctcagagctctcaagcagggactgctctttaggaaggggagcagcggctgggagtgagcagggcagggtgggggcagggtgggggcacgaagtgggccctgggtgacccccacagctcccttccgaggctgcagggccaggcgcgggaccgcaggtagcccagggtgttgtgggtggcagcacttgtttactggctgctttctggctcgaaataaaggaatcgtgcttgtgaaaaaaaaaaaaaaaaaaaaaaaaa

SEQ ID NO: 292056 - DNA, 1000 bp, Homo Sapiens
ccgaggggtgggggtcgcgccgggggccggcggagctcctgtggtggtagcagcggtagcgggagacggagcgagtccagcggccgcgggcagacccggagggaacggaggaagcggtcatgtctcgctacacgaggccccccaacacctccctgttcatcaggaacgtcgcggacgccaccaggcctgaggacttgcgccgtgagtttggtcgatatggccctatagtagacgtttacattccacttgacttctacactcgccgcccaagaggatttgcttatgttcaatttgaagatgttcgaggtgctgaagatgctctttataacctcaatagaaagtgggtatgtggccgtcagattgaaatacagtttgcacaaggtgatcgcaaaacaccaggccaaatgaaatcaaaagaacgtcatccttgttctccaagtgatcacaggagatcaagaagccccagccaaagaagaactcgaagtagaagttcttcatggggaagaaataggaggcggtcagacagccttaaagagtctcgacacaggcgattttcttatagcaagtctaaatctcgttccaaatcattaccaaggcggtctacctcagcaaggcagtcaagaactccaagaaggaattttggctctagaggacggtcaaggtccaagtccttacaaaagaggtccaagtcaataggaaaatcacagtcaagttcacctcaaaagcagactagctcaggaacaaaatcaagatcacatggaagacattctgactcaatagcaagatccccgtgtaaatctcccaaagggtataccaattctgaaactaaagtacaaacagcaaagcattctcattttcggtcacattccagatctcgaagttatcgtcataaaaacagttggtgaacagcaacagaaagagcaccacgccgtctttaatataagttattaaactctcattatgttaaataaaaattctttaaggcaaaaaaaaaaaaaaa

SEQ ID NO: 292057 - DNA, 1000 bp, Homo Sapiens
gagctctacctagggcaacggtggggcactgtctgtgatgatgcttgggacctgcgggcagccggtgtcctgtgccgccagctgggctgtggccaggccctcgcagcccctggcgaggctcactttggcccaggccgaggccccattctcctggacaatgtcaagtgccgtggggaagaaagtgctctgctgctctgctctcatatccgctgggatgcccacaactgtgaccacagcgaggatgccagtgtcctgtgccagccttcatgacccagcccgctctgcagaccacctcttcttctgggagctgtgacctcccttcctcctccaggaagccctcctcttgtgatgactacagttcactttgcccctccttcccttgcctgggagagagcctacctagacagtgcagtcctgcttgggggagcctggctgtacccccgtccacttactgcgtgacctcagcctgtcatcgactgttgtgagcccaattcagtgaaagctcctgtggttttgctcagccaaaaccaaaacgaggggaagaggatgattcctaactcttctgtttggtggggctctttttatagcaccagactctgccttccttgacctagatccaggaggctcaggggctctttaaatggggtatctcctcttcccccaacccatcttgggatccccaagaagagggaaggcaggaggggcctacagctcctaccttgggccctcaggggctgcagaggaacctgggtccctgtcctgccctgctccgcgagggcctggactaactcagatggtgctcggctggacaaggggactgggggaggggccaaagcagggacagtggcccctccctgcagctggaaccagcatctctgatttatgccgtctccaccacagagcctccactttgcaggagtgaagaaccctgggggcctgtagccaccagttcataggtgccaagtcaataaagcattgtcccccgtctcttataactgca

SEQ ID NO: 292058 - DNA, 838 bp, Homo Sapiens
ggacgaggggcaacgtatataaatgcgcgcaggcgtagttaagagagcgcattttgacttcgaggcaccgccgacgttactgtgtcgccatggggcgccgtccagctcgctgttaccggtattgtaagaacaagccgtacccaaaatctcgtttctgccgaggggttcctgatgccaagatccgcatctttgacctgggtagaaagaaggcaaaagtggatgagttcccactcggtggccacatggtgtctgatgaatatgagcagctgtcttctgaagccctggaggccgcccgtatttgtgccaacaaatacatggtgaaaagttgtggcagagatggctttcacatgcgagtgcggctccatcccttccatgtcatccgcatcaacaagatgttgtcctgtgctggggctgacaggctccagacaggtatgcgaggtgcctttggaaaaccccagggtactgtagcccgggtccacattggtcaagtcatcatgtccatccgcaccaagcttcagaacgaggagcatgtgattgaagccttgcgcagggccaagttcaagttccctggacgccagaagattcatatctccaagaagtggggcttcacgaagtttaatgctgacgaatttgaagacatggtggccaagaagtgcctcatccctgatggttgtggagtcaagtacgttcccagtcatggccccttggacaagtggcgggttctgcactcatgaaggttttggcagtactgtctccttgggccatgctggtctgacttatgcttactaataaattctgtttactggcaaaaaaaaaaaaaaaaaaaaaaaaaaaaaaa

SEQ ID NO: 292059 - DNA, 1000 bp, Homo Sapiens
caaggccgaggctgagaccctgtaccagaccaagatccaggagctgcaggtcacagcaggccagcatggggatgacctcaagctcaccaaggctgaaatctctgagctcaaccgcctgatccagaggatccgctcagagatagggaatgtgaagaagcagtgtgccgatctggagacggccatcgccgacgctgaacagcggggggactgcgccctgaaagatgcccgggccaagctggatgagctggagggcgccctgcaccaggccaaggaggagctggcacggatgctgcgtgagtaccaggagctcgtgagcctgaagctggccctggatatggagatcgccacctaccgcaagctgctggagagcgaggagtgcaggatgtctggcgaatatccaaattctgtgagcatctccgtcatcagcagcaccaatgctggggcaggaggggctggcttcagcatgggctttggcgcctcaagcagttatagctacaaaactgcagctgcagacgtcaagaccaaaggcagctgtggcagtgagctcaaggatccccttgccaaaacctcggggagcagctgtgccaccaaaaaggcctccagatgatggacaagtggttggctctgtgagcagaaggcttcccaactcacccgtctcctccctctccttccctgggctccctttccaagtcaagaaatgctttgtctgtcactacagtcccaaccccatttcctctccctgttgtcctcaaggtgtgatgcttcgatgcaaggagtccagtcaggagctctctcagtggcctccttcttggtcccgtttcgttgggtcattgcctgaaatgcaaagacaacacttacccaggatgtttccccaaggccagctacaagcccctctgcccccatgcctttcttgggccttcactaccaagggactctcttcatcttctgattgggattgtgtccagtcctctgcttcttctgcaataaatgattaaatctg

SEQ ID NO: 292060 - DNA, 1000 bp, Homo Sapiens
tgctgcctccgagcccgtggattcgggtgcactctggggactcgagcgcccggagccccctcccacccgcttccatcgggtgcacggtgccaacatccgcgtggacccctctgggacgcgggccacacgcgtggagagcttcgcccacggcgtgtgcttcagccgcgagccgctggccccgggccaggtcttcctggtcgagatcgaggagaaagagctgggctggtgcggacatctgcgtctcggtctgaccgcgctggaccccgccagtctggcccccgttcccgagttttctctgcccgatctggtcaacctgggccacacctgggtcttcgccatcacgcgccaccacaaccgcgtgccccgggagggccgcccggaggcggaggcagcggcccccagccgacctccaaccctcctcgtggaaccatatctgcgcattgagcagtttcgcattccccgggaccgcctggtgggccgcagccggccagggctctacagccatctcttggaccagctctatgagctgaacgtgctgcctccgaccgcgcgccgtagccgcctgggtgtcctcttttgcccgcgccccgatggcacggccgacatgcacatcatcatcaacggcgaggacatgggcccgagcgcccggggactgccagctgcgcagcccctctacgcggtggtggacgtgtttgcttccacaaagagcgtgcgccttgtccagctcgagtatggcttgccatccctgcagactctgtgccgcctagtgatacaaaggagcatggtgcaccggctggccattgatgggctccacctgcccaaagaacttaaggatttctgcaagtatgagtgaagacccacagtgcaccagagcacagctgcatcctggagccccagacctgtggctggctggtccgaagttggccacattgctgccagccaagaccagaaataaacagccgatgctgacatcttgatcactgaaaaaaaaaaaaaaaaa

SEQ ID NO: 292061 - DNA, 1000 bp, Homo Sapiens; identical to SEQ ID NO: 223851

SEQ ID NO: 292062 - DNA, 1000 bp, Homo Sapiens
tcatctttttaataccataaaaaggttatatgtacagttcctattttagcttgcttacaaagggagcattatttttatttaaagtattgctagtaaatgatttgtagaaacttggttttctaagcatagttcttccataaccaccttttgttgtttgagcacaagggattcttttcctagttctatgtgtttgtttccctatatgcagtctttaaaggattacaacacttaaaattgaatggacttgtgtcaagctttttgcatcatacattttttgaaagatttttaaaaaagcctacaacttacatatgtagtagaatcagccattgctctgctcctggcatagagtcacctgtttgttatgtggattaaatagttttaaaatacatatttgaagacctttgagaatgctttagtgtttgatttgaaataaaaggaaattttagcaaggattaaagaaaaaagctatcagctgtatgttaagagagactcttactaacatgttgtaaatattacaattcatgaaatgttattgtaagtctgtaacttaattttttccctgttttagttatacaggttggtttggaaatttgtgttttggcataaacaagtaaaatgtgcccattttatggtttccatgcttttgtaatcctaaaaatattaatgtctagttgttctatattataaccacatttgcgctctatgcaagcccttggaacagaacatactcatcttcatgtaggacctatgaaaattgtctatttttatctatatatttaaagttttctaaaaatgataaaaggttattacgaattttgttgtacaaaatctgtacaaaaatctgtttttacatcataatgcaagaattggaaatttttctatggtagcctagttatttgagcctggtttcaatgtgagaaccacgtttactgttattgtatttaattttcttttccttttcaacaatctcctaataaaactgtctgaaatctcaaaaaaa

SEQ ID NO: 292063 - DNA, 1000 bp, Homo Sapiens
tctttagttgaagaaagggtatgtgtgtgcaagtgggtgtgtgtgtgccagtttttcttgtctcaggtagatactcccactgtgtataaatagatctacagacttttcatacttacctcccgtattctgtttctgtggtaaaaatatgaagtgttttagttgtatgttgagtgattggttggtattatcaacactgttgtttgcagtttcattaaagcatgctcttaaggagtacatatggtcattaattgccaactgtagattccagtgatctggcccctgcctacctccttcctctctttttcattctctgtcatgcttctccactgttttccccaatgacgcactattttgacacactggccttgctattccttaagcaaatcacattcttcccaatccaaagactttgcacatgctgttgtctttcttagaatgcccttcccctaggcctgcatggcttgctacctcacttaattgtttgacacttcctttggttcattgagcttcaaggctcttaaaatgccactgacaatgagatctccctttaaaaaaaaaaaaaaacttctacttttcctcttaaaggcactttactctctccccactcttttcttcctcttcaaagtatttaaatttcctaggttttcatgaaaaagctggaaagcgatcagcatcaagggctttgcttctgtcttagaattgagctagcttgagtcaatttctgtgcctgcaaccaaatgaaaattaatatagtgagttctttcaggagctttctctgtttttctattgatacctctatatatttttaaggcaatgtcactttgttttgtttacaaatatattgaatatgtcaagattactattttgttattgccctttgtgaatttccttgtctattttgctcgcttgttctttcaggtgaaatttattattttattaatgttgccaaaaattataagtaaaatatcaattatagtaataaaatgttttgtgaaaaaaa

SEQ ID NO: 292064 - DNA, 1000 bp, Homo Sapiens
cggagggggtccgccagcagctggagctgggccgcttcctgaggagccgctacgaggccttcctgagtccggagtaccggcgggaggaggtgtacatccgcagcacggactttgaccgcacgctggagagtgcccaggccaaccttgccgggctgtttcccgaggctgctccagggagccccgaggcccgctggaggccgatcccggtgcacacggtgcccgtggctgaggataagctgctgaggttccccatgcgcagctgtccccgataccacgagctgctgcgggaggccaccgaggccgccgagtaccaggaggccctggagggctggacgggcttcctgagtcgcctggagaacttcacgggactgtcgctggttggagagccactgcgcagggcatggaaggttctggacaccctcatgtgccagggatcctgctgaatgctatccttgcaaacttctcccgggtccagcgcctggggctgcccctcaagatggtcatgtactcagctcatgacagcaccctgctggccctccagggggccctgggcctctatgatggacacaccccgccatatgctgcctgcctcggctttgagttccggaagcacctggggaatcccgccaaagatggagggaatgtcaccgtctccctcttctaccgcaatgactccgcccacctgcccctgcctctcagcctccccgggtgcccggccccctgtccactaggccgcttctaccagctgactgccccggcccggcctcccgcccatggggtctcctgccatggcccctatgaggctgccatccccccagctccagtggtgcccctgctggccggagctgtagctgtgctggtggcactcagcttggggctgggcctgctggcctggagaccagggtgcctgcgggccttggggggccccgtgtgagccagaaaccagggcttccctacccccagctgacactggaccccaacatgtatgctcagtagctgc

SEQ ID NO: 292065 - DNA, 1000 bp, Homo Sapiens
gaagatagaagttaagcatgttgggaaaactgaccccggtactgtcttcgtgatgaataaaaacatttcaactccctacagttgtgccatgcatttaagcgagtggtattgcaggaagtccattctggctctggtggatggacagccttgggacatgtataagcctttaacaaagtcctgtgaaattaaatttcttactttcaaagattgtgatccaggagaagtgaataaggcatattggcgttcctgtgctatgatgatgggctgtgtgatagagagggcattcaaagatgaatatatggtcaatttggtcagagctccagaagttcctgtaatttctggtgccttctgttatgacgtagttttggatagcaaacttgatgagtggatgccaacaaaagagaacttacgttccttcacaaaggatgctcatgctttaatttataaagatcttccatttgaaactctggaagttgaagcaaaagtggcattggaaatatttcaacacagcaagtacaaagtagatttcatagaagagaaggcatctcagaaccctgagagaatagtcaagctacacagaataggtgacttcattgatgtgagtgagggccctcttattccaagaacaagtatttgtttccagtatgaagtgtcagcagttcacaatcttcaacccacccagccaagtctcatacgaagattccagggtgtgtctttacctgttcacttaagagcacattttacaatatgggataagctattggaaagatctcggaaaatgactccatttcccattctccttctatttactacgcagtcattcttcactacctcgcctgagtcgtacctcctccatggaacagtctcagagtaactgaagatcaaagtaaagcaacagaggaatgtacatctacctaataactttctaaaatttaaatatgtataataaaataaatgttttaaatataaaaaaaaaaaaaaaaaaaaaaaaaaaaaaaaa

SEQ ID NO: 292066 - DNA, 1000 bp, Homo Sapiens; identical to SEQ ID NO: 223852

SEQ ID NO: 292067 - DNA, 1000 bp, Homo Sapiens; identical to SEQ ID NO: 118462

SEQ ID NO: 292068 - DNA, 1000 bp, Homo Sapiens
ggcccgtttgcagagcagcctggctggaggaacttaggaggggagagccccagcctgccacagggctccctgttccacagcggcacagcctcgagtagccagaacggccacgaggaaggggcaaccggggacagagaggacgggcctggcgtggccctcgaggggcctctgcaggaggtcctggagttgctgaggcccacggactccacccagccccagctccgggagctggagtaccaggtcctcggcttccgggaccggctgaagccctgcagagcacggcaggagctcacctcggccgagagcctgatagagtgcatcctggagagcttcgccttcctcaatgccgacttcgccccggatgagctgtccctgtttgggggctcccagggtctccggtgagtgcacctccttccagcagtgacccagtggccaccactcccaccgggtgacccgagctccacgtttcctgccagcctccccgtctgtttctcccactgtccttggctcagctcttgtcactctatcgtgcacccttccccatgccatccccgcacatcccccacttgcctcagagccggtcctcagagaccacgaagtgggtgagatcaccccagcctgcccctgagccttctgctccaaggaaccagcttttagtattattttttaaaccttaaaaataatcaccaagtatatagtagaagttctttgaggccaggcacagtggctcacgcctgtaatcccaacactttgggaggccgaggcaggcggattacctgaggtcaggagttcaagaccagcctggccaacatgatgaaaccccgtctctactaaaaatacaaaaattagctgggcatggtggcaagagcctgtaatctcagctactcaggaggctgaggcaggagaatcactcggacccgggaggcggaggttgcagtgagccaagatggcaccactacatttcagcctgggcgaaagtaagactctgtctcaaaaaaag

SEQ ID NO: 292069 - DNA, 1000 bp, Homo Sapiens; identical to SEQ ID NO: 223853

SEQ ID NO: 292070 - DNA, 1000 bp, Homo Sapiens; identical to SEQ ID NO: 223854

SEQ ID NO: 292071 - DNA, 1000 bp, Homo Sapiens
ccttgcctggttccatatggctccttccagccctgcccaccaagtgcagctcccactttccatcctgcccatacgcccctcttcccccgacatctgggggcgctggtggcacttactctaggttggtctcagactatccctccccttggctggttttccctcctaggcctgtctggcagcccccagacagacgtagctcctgggagtctcggccctggcaaccttggaagagccaagctgacattgtttagctcttcaggccactgggttttggaggcagaagtccagagatactggctctgccaagctgtcgtactgggctgtggcacagccttcgagacaacacgggtgtatctctgatcctgccctacctaggcttcaaggggcttctgtctggagaaatgccctcaaagggtaaccagtaggtgtggcattgaattggccagtgttagcatctacagccatcaccgagatgagtccactgccgttgcctgcccgagggccccctaaggttatagacggtatcagcagggaggccgtcccgctggttttctaggagagcccacaggaggaagggagcctcttcaggggcactggaatcttttgtgccaggggcttcttttcatcagagccggggagtacattgcagtgacttcttaaacatttgtgtgggacagacgagcgtgagggaggttttaagccaggcacaaagttagtttccaatactagttaataaatctatttttcttcatttcctttttttgcacagaagctggtaatctaggacctacgtgtgaacaactttatatgaatattttttgtacttggtttacttgggttggtatgatacattatatttaagttccttgaacactgtggatcccctaatgtgtatgaatgactgaggctttgtaaattaagggacgtttgtgtgaataaagttatttgatggggtcaaagaagccatatgtgatttgaaaaaaaaaaaaaaaaaaaaaaa

SEQ ID NO: 292072 - DNA, 1000 bp, Homo Sapiens
agtgggcaaatgacctgcggcacggccatggcgtatactactacatcaataatgacacctacactggagagtggtttgctcatcaaaggcatgggcaaggcacctatttatacgcggagacgggcagtaagtatgttggcacctgggtgaacggacagcaggagggcacggccgagctcattcacctgaaccacaggtaccagggcaagttcttgaacaaaaatcctgttggccctggaaagtatgtatttgatgttgggtgtgaacaacatggtgaatatcgtttaacagatatggaaagaggagaagaggaagaggaggaagaattagtaactgttgttccaaaatggaaagctacccaaatcactgaattggccctgtggacaccaactctccccaaaaagccgacctctacggatggacctggccaagacgctccaggagctgagagtgcaggagaacccggggaggaggcccaggctctgctggagggcttcgagggtgagatggacatgaggcctggagatgaagatgcagacgtcctccgggaagagagccgggagtatgaccaggaggagttccgctatgacatggatgagggaaacattaattctgaagaagaagaaactagacagtcagacctccaggactaagatgaagtgagccgagaggagatcgtatcataagaatgcttctgtcgttagccgggtgcagtgctgtgtgtatctagttccagctacttgagaggctgaggcaggaggattgcttgagtccagaaagtggcagttgcagtgagtggagatcgcgccactgctctccagcctgggtggcagagcgagaccctgtctcaaaaaataaacaaaaacaaaatgcttctgtcagttaacaatctttattagagggtttttagtctttctttctcagctgtatgttaagttgattgacaaatgcaaataaacgtctttattatcctttctttctgaaaaaaaaaaaaaaaaaa

SEQ ID NO: 292073 - DNA, 774 bp, Homo Sapiens
aagcacctgcctggcaacatggggtccagcagcttcttggtcctcatggtgtctctcgttcttgtgaccctggtggctgtggaaggagttaaagagggtatagagaaagcaggggtttgcccagctgacaacgtacgctgcttcaagtccgatcctccccagtgtcacacagaccaggactgtctgggggaaaggaagtgttgttacctgcactgtggcttcaagtgtgtgattcctgtgaaggaactggaagaaggaggaaacaaggatgaagatgtgtcaaggccataccctgagccaggatgggaggccaagtgtccaggctcctcctctaccaggtgtcctcagaaatgatgctgggtcctttctacctctgggggtcactctcacttggcacctgcccctgagggtcctgagacttggaatatggaagaagcaatacccaaccccaccaaagaaaacctgagcttgaagtccttttccccaaaaagagggaagagtcacaaaaagtccagaccccagggacggtactttccctctctacctggtgctcctccctaatgctcatgaatggacccctcatgaatgaaaccagtgcccttataagagaccccaaagagctgccttgcccttctgcaatgtgtgatcacagctagaaggcactgtcagagaagagaaactggtcctcaccagatgctgaatctgctggtgccttgatcttggacttcccagcctctagaactgtaagaaataaatatttgctgtttataatcc

SEQ ID NO: 292074 - DNA, 1000 bp, Homo Sapiens
actcaaattgtggagtttttaaagagtgggtgccacttaacacattggagaccttaaaaaatgtatatagagaacttaatcgcactgtttctaattctttttacacaaaacaagggcttagagtatactgtatttgcaagtaatagcaagagagtattgtataaaagaagatattactaagctagtcctctgcaagggtaaatactatgtttattctcttcagctttaactatacttgagtgcaataaaaaacttaataaaattttatgcctgttttgtaattcagggcctattatgattttagaaataagataatcaacgtacaactctttgtaaaacaaaagcaactttgggtgagttttatagatttattaaattttgataaagtaaatattttgaccactattttcaacaacccagggcttattttcttctgacttcttggctaacttccagactatgggaaaataaattatgattgtatgtgacccccagatcactaagcttgcattttggcagaaagaaaaaaaatcagttgtgatttaaaacgtttgttgagattttcaaacatagaaataaagctgtagcatattcactaaacaatgttttatatgaggatagggacctttaaatatgtgttttatagaatatctcacacatttgtaatggataacgtgcattaaaatggagttcttattatagaataacctggttaaacagatattaaagctgcttttgggtaaaacaggtttccaccagtattttccctgagctagaggagaagtcttagattttaagagtaatacaacccatctatcttattagtcttgtgccaataagagaagtaaatatcaaacattaaaatggtcactttacaatttcagtatgtctgtaccttgtatcttagcttgagtatgattgtcttatcaaagtagtgttctaactttaatgtattgtatgtttgttattatattaaagtgtgattattattcattggaat

SEQ ID NO: 292075 - DNA, 1000 bp, Homo Sapiens; identical to SEQ ID NO: 118463

SEQ ID NO: 292076 - DNA, 1000 bp, Homo Sapiens; identical to SEQ ID NO: 118464

SEQ ID NO: 292077 - DNA, 1000 bp, Homo Sapiens
tgcgggcacggagctcacggacctggccgtgggctgcatcctgctggccggctccctgctggtgctctgcggctgcctggtcctcatagtcaagctgctcaactctgtgctgcgcggccgcgtggcccaggtcgtgaggacagtcatcaatgcggacttccccttcccgctgggctggctcggcggctacctggccgtcctcgcgggcgccggcctgaccttcgcactgcagagcagcagcgtcttcacggcggccgtcgtgcccctcatgggggtcggggtgatcagtctggaccgggcgtaccccctcttactgggctccaacatcggcaccactaccacagccctgctggctgccctggccagccccgcagacaggatgctcagcgccctgcaggtcgccctcatccacttcttcttcaacctggccggcatcctgctgtggtacctggtgcctgcactgcggctgcccatcccgctggccaggcacttcggggtggtgaccgcccgttaccgctgggtggctggggtctacctgctgctcggattcctgctgctgcccctggcggccttcgggctctccctggcagggggcatggtgctggccgctgtcgggggtcccctggtggggctggtgctcctcgtcatcctggttactgtcctgcagcggcgccggccggcctggctgcctgtccgcctgcgctcctgggcctggctccccgtctggctccattctctggagccctgggaccgcctggtgacccgctgctgcccctgcaacgtctgcagccccccgaaggccaccaccaaagaggcctactgctacgagaaccctgagatcttggcctcccagcagttgtgacgggcagttgctgcgcagaccgccccaccctccccggctgggagggctctggagggccctggagggggggtccccgcggcagctgacctccggtcacctgcttccccttctgtgcaaataaaccaggctgttatctgg

SEQ ID NO: 292078 - DNA, 1000 bp, Homo Sapiens; identical to SEQ ID NO: 223856

SEQ ID NO: 292079 - DNA, 1000 bp, Homo Sapiens; identical to SEQ ID NO: 118465

SEQ ID NO: 292080 - DNA, 1000 bp, Homo Sapiens
ctgcccttgggtcctggggagccacggaaggttgtgggtgccagagggttgtggtcagagccacagtcaggggccttctgagacctgtgccccctccccaccctccctccccacctccctaggccagctctggggtctcggcaggtggtccgcgacatgacctccgagttcttctctgcccagctccgggcccagatctctgacgacaccactcacccgatctcctactacaagcccgagttctacatgccggatgacgggggcactgctcacctgtctgtggtcgcagaggacggcagtgctgtgtccgccaccagcaccatcaacctctactttggctccaaggtgcgctccccagtcagcgggatcctgctcaataatgaaatggatgacttcagctctaccagcatcaccaacgagtttggggtacccccctcacctgccaatttcatccagccagggaagcagccgctctcgtccatgtgcccgacgatcatggtgggccaggacggccaggtccggatggtggtgggagctgccgggggcacgcagatcaccatggccactgcactggccatcatctacaacctctggttcggctatgacgtgaagtgggccgtggaggagccccggctgcacaaccagcttctgcccaacgtcacgacagtggagagaaacattgaccaggaagtgactgcagccctggagacccggcaccatcacacccagatcacgtccaccttcattgctgtggtgcaagccatcgtccgcatggctggtggctgggcagctgcctcggactccaggaaaggtggggaacctgctggctactgattgctccaggcggacaaggctgacaagcaatccaggaacaaaatactcaccaggacgaggaagaggactttgggggacaggcttctcctgtgagcagcagagcagcacaataaatgaggccactgtgccaggctccaggtggcctccctggcctgtctccccactc

SEQ ID NO: 292081 - DNA, 1000 bp, Homo Sapiens
aactccaaacctcctgttagctgttatttctatttttgtagaagtaggaagtgaaaataggtatacagtggattaattaaatgcagcgaaccaatatttgtagaagggttatattttactactgtggaaaaatatttaagatagttttgccagaacagtttgtacagacgtatgcttattttaaaattttatctcttattcagtaaaaaacaacttctttgtaatcgttatgtgtgtatatgtatgtgtgtatgggtgtgtgtttgtgtgagagacagagaaagagagagaattctttcaagtgaatctaaaagcttttgcttttcctttgtttttatgaagaaaaaatacattttatattagaagtgttaacttagcttgaaggatctgtttttaaaaatcataaactgtgtgcagactcaataaaatcatgtacatttctgaaatgacctcaagatgtcctccttgttctactcatatatatctatcttatatacttactattttacttctagagatagtacataaaggtggtatgtgtgtgtatgctactacaaaaaagttgttaactaaattaacattgggaaatcttatattccatatattagcatttagtccaatgtctttttaagcttatttaattaaaaaatttccagtgagcttatcatgctgtctttacatggggttttcaattttgcatgctcgattattccctgtacaatatttaaaatttattgcttgatacttttgacaacaaattaggttttgtacaattgaacttaaataaatgtcattaaaataaataaatgcaatatgtattaatattcattgtataaaaatagaagaatacaaacatatttgttaaatatttacatatgaaatttaatatagctatttttatggaatttttcattgatatgaaaaatatgatattgcatatgcatagttcccatgttaaatcccattcataactttcattaaagcatttactttgaatttc

SEQ ID NO: 292082 - DNA, 1000 bp, Homo Sapiens; identical to SEQ ID NO: 118466

SEQ ID NO: 292083 - DNA, 1000 bp, Homo Sapiens
cactgtgacgtgttagaacatctaatccacaaaggtggtgatgtgcttgctttggcggatgatggggcgtcggtgctgtttgaggcagcaggaggtggcaatcccgactgcatttccctcctgctggaatatggaggaagcggaaatgtacctaaccgagcaggacatcttcctatacaccgagctgcctatgaggggcattatcttgcactgaaatatcttatcccagtaacatctaaaaatgcaattcggaaaagtgggctaacaccaattcactcagcagcagatggacaaaatgcacagtgtctagaactgctcattgaaaatggttttgatgtcaacactctacttgctgaccacatttcccagagctatgacgatgagaggaagactgcgctgtattttggcgtttctaataatgacgttcattgcacagaagtccttctggctgcaggtgcagacccaaacttagatcccctcaactgtctacttgttgcagtgagggccaataattatgaaattgtcaggctgcttctctcccatggagctaatgtcaattgttattttatgcatgtgaatgacactcgtttccccagtgtcattcaatatgctctaaacgacgaggtaatgctgaggctattgctgaataatggctatcaagtggagatgtgctttgactgcatgcatggtgacatctttggaaattcatttgtgtgctaaactgaagtctgcactagaagtacagagagaatggccagaaatccgccaaatactagagaatccttgttcattgaagcatttgtgtcggttaaaaattcgaaggcttatgggtctccagaaactctgccagccagcctcagtggagaagcttcctctaccaccagctattcaaagatacatattatttaaagagtatgatctctatggacaagagctaaaattgacataacttaatattttaaaatgtgatttaaaaaaaatgttgaaatgtgattccctc

SEQ ID NO: 292084 - DNA, 1000 bp, Homo Sapiens; identical to SEQ ID NO: 118467

SEQ ID NO: 292085 - DNA, 1000 bp, Homo Sapiens; identical to SEQ ID NO: 223857

SEQ ID NO: 292086 - DNA, 1000 bp, Homo Sapiens; identical to SEQ ID NO: 291199

SEQ ID NO: 292087 - DNA, 1000 bp, Homo Sapiens
acagaggagaagcaggctctcaatcaagcagtgtatgacaacgactcctatactttggaccagcttttgcgccaggagcgttacaaacgtttcatcaacagcaggagtggctggggtgttcctgggacacccttgcgcttggctgcttcttatggccacttgagctgtttgcaagtcctcttagcccatggtgctgatgttgacagcttggatgtcaaggcacagacgccacttttcactgctgtcagtcatggccatctggactgtgtacgtgtgcttttggaagctggtgcctctcctggtggtagcatctacaacaactgttctcccgtgctcacagctgcccgtgatggtgctgttgctatcctgcaggagctcctagaccatggtgcagaggccaacgtcaaagctaaactaccagtctgggcatcaaacatagcttcatgttctggccccctctatttggccgcagtctacgggcacctggactgtttccgcctgcttttgctccacggggcagaccctgactacaactgcactgaccagggcctattggctcgtgtcccaagaccccgcaccctccttgaaatctgcctccatcataattgtgagccagagtatatccagctgttaatcgattttggtgctaatatctaccttccatctctctcccttgacctgacctcacaagatgataaaggcattgcattgctgctacaggcccgagccactccacggtcacttctatcacaggtccgtttagtcgtccgcagagccttgtgccaggctggccagccacaagccatcaaccagctggatattcctcccatgttgattagctacctaaaacaccaactgtaatcttgcagtctccccaggaacttatgatgcctccgaaaaccacctggggactcacgtagctggagagcattacagcctcatccacttacctggagctgctctcctgtattatcctccacaataaaattctccagaaaat

SEQ ID NO: 292088 - DNA, 1000 bp, Homo Sapiens; identical to SEQ ID NO: 223860

SEQ ID NO: 292089 - DNA, 1000 bp, Homo Sapiens; identical to SEQ ID NO: 287138

SEQ ID NO: 292090 - DNA, 1000 bp, Homo Sapiens; identical to SEQ ID NO: 223862

SEQ ID NO: 292091 - DNA, 1000 bp, Homo Sapiens; identical to SEQ ID NO: 223863

SEQ ID NO: 292092 - DNA, 1000 bp, Homo Sapiens
gcaaaagaagtagctggaagccatgggactggcgggagcctgtttgggggatctggatggttgactcctaggagtcaagttcagcatcttcaccgtggctgcagagctgcctgatgggcactagagggcatgccagccccacactccctgggtctggcttcctcccgcaacctcactctagtagagcctgtgcctgcctactagcgctctggggttcggagagtttgggaatttctcagagccaactggctcaggcttgggaaggctggctgctgccctcagctccgcctcatcagctatgtgaaggggtgtgtgtggagtgatcctgccgccccctccctgggctcgtccagagatctcaaactccgatgcccctggggccacgtatgttgtataaatggatgaaacaggcccttgagttgggagcctgcttcactttgactttcccactgttgctggagacaaagacatcgtgatgagagaaagttcgcacaatctagtcggtaacagccactttccttgagaccaagagagtgcggtggggatgggggggagagcacgggtccccgtctgacagtggccgctgccatattcaggtgtagctaattgctctggtgtgggaatgcaggcctaatgacagaaatctggagaagccagaaatacagatttgtatgtgagatgtcctgattttttaagttgttggcagaaattaattcagaaatcaaatctgcaggccaaacaaggtgcaggacccagctttggccccatgcccctgtaggtccctctgggacagtcaccgctggggtcctggctgctctgtcattgagggatgctgggcactgctgccgggtggccagggtatggggcatgtgcccagcaatgtggctccttggccccgctggccagtgtcctgggcccctgacaggcgctggctgtgagtggtttgtacatgctacaataaatgcagctggcagcattgtgcaaaaaaaaaaaaaaaaaa

SEQ ID NO: 292093 - DNA, 1000 bp, Homo Sapiens; identical to SEQ ID NO: 223864

SEQ ID NO: 292094 - DNA, 1000 bp, Homo Sapiens
ccgatttccagctcgccaggcctggtaccggccagccagccccgaaagcctgcattaccacttgtgcagtgccccccgggccctgctgcaggatgtgctgcctaagtatatcctggacttctccctctttgcctacccactgcctaatgtcaccaaggaggcgtgtcagcagtgaccatgggtgtggggccagcagctggtggggactggtttcaacgccagctttctgtgcttctgcctgtcattcggagaaactctggctctggggcttggggcttctcaggatcctggatggcagagactgccctcagaagttccttgtccagggtgggcacccacagtgactcagaggacagggctaggcaggagacctgctgctcctcattggggggatctcttggggggcagacaccagtttgccaatgaagcaacacatctgatctaaagactggctccagaccccgggctgccaggattatgcagtccacttggtctaccttaatttaacctgtggccaaactcagagatggtaccagccaggggcaagcatgaccagagccagggaccctgtggctctgatcccccatttatccaccccatgtgcctcaggactagagtgagcaatcataccttataaatgacttttgtgcctttctgctccagtctcaaaatttcctacacctgccagttctttacatttttccaaggaaaggaaaacggaagcagggttcttgcctggtagctccaggacccagctctgcaggcacccaaagaccctctgtgcccagcctcttccttgagttctcggaacctcctccctaattctcccttccttccccacaaggcctttgaggttgtgactgtggctggtatatctggctgccatttttctgatgcatttatttaaaatttgtactttttgatagaacccttgtaagggctttgttttcctaatagctgactttttaataaagcagttttatataaaaaaaaaaaaaaa

SEQ ID NO: 292095 - DNA, 1000 bp, Homo Sapiens; identical to SEQ ID NO: 223865

SEQ ID NO: 292096 - DNA, 1000 bp, Homo Sapiens
acaagacaccaatggcccacgaaatctgctactccgtattatgtctcttctcgtacgtggctgcagttcatagcagtgaggaagatctcagaaccccgccccggcctgtctctagctgatggagaggggctacgcagctgccccagcccagggcacgcccctggccccttgctgttcccaagtgcacgatgctgctgtgactgaggagtggatgatgctcgtgtgtcctctgcaagccccctgctgtggcttggttggttaccggttatgtgtccctctgagtgtgtcttgagcgtgtccaccttctccctctccactcccagaagaccaaactgccttcccctcagggctcaagaatgtgtacagtctgtggggccggtgtgaacccactattttgtgtccttgagacatttgtgttgtggttccttgtccttgtccctggcgttataactgtccactgcaagagtctggctctcccttctctgtgacccggcatgactgggcgcctggagcagtttcactctgtgaggagtgagggaaccctggggctcaccctctcagaggaagggcacagagaggaagggaagaattggggggcagccggagtgagtggcagcctccctgcttccttctgcattcccaagccggcagctactgcccagggcccgcagtgttggctgctgcctgccacagcctctgtgactgcagtggagcggcgaattccctgtggcctgccacgccttcggcatcagaggatggagtggtcgaggctagtggagtcccagggaccgctggctgctctgcctgagcatcagggagggggcaggaaagaccaagctgggtttgcacatctgtctgcaggctgtctctccaggcacggggtgtcaggagggagagacagcctgggtatgggcaagaaatgactgtaaatatttcagccccacattatttatagaaaatgtacagttgtgtgaatgtgaaataaatgtcctcaactcca

SEQ ID NO: 292097 - DNA, 1000 bp, Homo Sapiens
ccgggacccgcgtgtgcgtgggctcctgcgggggccgcaccttccagcacaccgtgcagctccttgtgtacgccttcccggaccagctgaccgtctccccagcagccctggtgcctggtgacccggaggtggcctgtacggcccacaaagtcacgcccgtggaccccaacgcgctctccttctccctgctcgtcgggggccaggaactggagggggcgcaagccctgggcccggaggtgcaggaggaggaggaggagccccagggggacgaggacgtgctgttcagggtgacagagcgctggcggctgccgcccctggggacccctgtcccgcccgccctctactgccaggccacgatgaggctgcctggcttggagctcagccaccgccaggccatccccgcgtccaaacctgcgggtgaccagctgcccgcggctctgtggaccagcagtgcggtgctgggactgctgctcctggccttgcccacgtatcacctctggaaacgctgccggcacctggctgaggacgacacccacccaccagcttctctgaggcttctgccccaggtgtcggcctgggctgggttaagggggaccggccaggtcgggatcagcccctcctgagtggccagcctttccccctgtgaaagcaaaatagcttggaccccttcaagttgagaactggtcagggcaaacctgcctcccattctactcaaagtcatccctctgttcacagagatggatgcatgttctgattgcctctttggagaagctcatcagaaactcaaaagaaggccactgtttgtctcacctacccatgacctgaagcccctccctgagtggtccccacctttctggacggaaccacgtactttttacatacattgattcatgtctcacgtctccctaaaaatgcgtaagaccaagctgtgccctgaccaccctgggcccctgtcgtcaggacctcctgaggctttggcaaataaacctcctaaaatgat

SEQ ID NO: 292098 - DNA, 493 bp, Homo Sapiens
aagcattcagaaggcacacatacttacacttgccctgagacttagttcgaaatgtgaaatatgatttggcgaggaagatcaacatataggcctaggccgaggagaagtgtaccacctcctgagctgattgggcctatgctggagcccggtgatgaggagcctcagcaagaggaaccaccaactgaaagtcgggatcctgcacctggtcaggagagagaagaagatcagggtgcagctgagactcaagtgcctgacctggaagctgatctccaggagctgtctcagtcaaagactgggggtgaatgtggaaatggtcctgatgaccaggggaagattctgccaaaatcagaacaatttaaaatgccagaaggaggtgacaggcaaccacaggtttaaatgaagacaagctgaaacaacacaaaactgtttttatctaagatatttgacttaaaaatatcgaaataaacttttgcagctttctccaaaaaaaaaa

SEQ ID NO: 292099 - DNA, 1000 bp, Homo Sapiens; identical to SEQ ID NO: 118470

SEQ ID NO: 292100 - DNA, 1000 bp, Homo Sapiens
ataagattgtagagttaagtaaaagttaagcttttgcaaagttgtcaaaagttcaaacaaaagtctagttgggattttttaccaaagcagcataatatgtgttatataaacataataatactcagatatccaaatgttcagatagcatttttcataatgaatgttctcttttttttggtaatagtgtagaagtgatctggttcttacaatgggagatgaagaacatttattattgggttactactaaccctgtcccaagaatagtaatatcacctctagttataagccagcaacaggaacttttgtgaagacacattcatctctacagaacttcagattaaatataatctagattaatgactgagaataagatccacatttgaactcattcctaagtgaacatggacgtacccagttatacaaagtacttctgttggtcacagaaacatgaccagattttgcatatctccaggtagggaactaagtagactaccttatcaccggctaagaaaacttgctactaaactattaggccatcaatggcttgaataaaaaccagagaaggtttttcccaggacgtctcatgtttggccctttagaattggggtagaaatcagaaatgagatgaggggaagaagcaaggagtctaaggccctagcgatttgggcatctgccacattggttcatattcagaaagtgttatctcattgattatattcttgttaagcaaatctccttaagtaattattattcaaataagattatactcatacatctatatgtcactgttttaaagagatatttaatttttaatgtgtgttacatggtctgtaaatatttgtatttaaaaatgccatgcattaggctttggaaatttaatgttagttgaaatgtaaaatgtgaaaactttagatcatttgtagtaataaatatttttaacttcattcatacagttaagtttatctgacaataaaagctctgactgaaaaaaaaaaaaaaa

SEQ ID NO: 292101 - DNA, 1000 bp, Homo Sapiens; identical to SEQ ID NO: 223868

SEQ ID NO: 292102 - DNA, 1000 bp, Homo Sapiens
aggaagcacaccatgttgcaggagtgcaaggagagaatttctgccctgaacttgcagattgaagaagagaagaacaaacagagacagctgaggttggcattcgaggaacagctggaagatctgatgggccagcacaaggacctctgggacttccacatgccagagcggctggcaaaggagatttgtgccctggacagcagcaaggagcagctgctcaaggaagagaagctggtcaaggcgacactggaagacgtgaagcatcagctgtgctccctgtgtggggctgagggcccctccacccttgatgagggactctttctccgcagccaggaggctgcagccacagtgcagctgtttcaggaagagcacaggaaggctgaggagctcctagcagctgctgcccagcgccaccagcagctgcagcagaagtgccaacaacagcagcagaagcggcagaggctgaaggaagagctggaaaagcatggaatgcaagtccctgcccaagcccagagcacacaagaggaagaggctggcccaggagatgtggctcccagaccaggtagaccagtgacatggtggagttgaagagagaggctcactgcagagcactgtttccatggaaaaatggaacatggcaaagtgcagaaattcttcagtcagtccaggacagacgagttctctaagatgcagttaatcatacctgtcttaaacaaactggcaatatactatcaaacatgacttttaaatcaagtggaagttagaaaatatattgaactgagtggcaatgaagacaccacattttaaaactgtaattcagttaagcccacaattagaaggaactttagcttttattggttcaccacaattttttaagaaatcaaccaatgattgttcagttaatgaataaaaggcctttgacacagttcacctattcatgtgaaaaaaaaagactaataaatagtcagcttcccttaaaaaaaaaaaaaaaaaaaaaaaaaaa

SEQ ID NO: 292103 - DNA, 1000 bp, Homo Sapiens
acatactcacctctacctcgaccacatcaaccccatcaccaagaggaggttcagggaagctgcattttgtggtcttgtcctcccagtccagggtggtagtgctgggctgttcccagcctcccacagcagagctggacgctgtggaaatggctggattcctctgtgttctttcccattatccctcagctctgagtcctcttgtgccatctgacatctgatgccttcccaaccactgccgagtttctgcctggagcagggcctcaaggccctggcacacagaagatgcgtatcagtattatcaaccaatagttgatgaattgtgtttttcaacgaatttgctagtgatctggtttactgccttagtaatatctagttcctaatatgcctatgccttttaatgtctgcacagtctgtgatgatgtcacttctctcaagcctgatgtgtcctctctctctttcttgctagtggtttatcaatttttaaaaccttttcttgtttatttgtttttgagacagaattttgctcttgttgcccaggctggagtgcaatggcgtgatcttggctcacagcaacctctacctcctgggttcaagtgattctcgtgcctcagcctcctgagtagctgggctgacaggcacccaccaccacacccagctaatttttatgtttttagtagagatggggtttcaccttgttgggtggccaggctggtctccaactcctgagctcaggtgatccacccgcctcagcctcccaaagtgctgggattacaggggtgagccaccacgcccagccccagcttagttttttaaaaagtttattttagccattctaataggtatgtagacatatctaatagtggttttccttgcgtttccttaatgtctgatgatgttaagcattttttccccaagtgcttagttgccatctatatagcatctttgatgaaatgtctgtttatatattttgcacactttaaaatattgggttgttttcttt

SEQ ID NO: 292104 - DNA, 1000 bp, Homo Sapiens
cggagtcaagtcagagttccgacagaacctgggccgcatgtatctcttctatggcaacaagacctcggtgcagttccagaatttctcacccactgtggttcacccgggagacctccagactcagctggctgtgcagaccaagcgcgtggcggcgcaggtggacggcggcgcgcaggtgcagcaggtgctcaatatcgagtgcctgcgggacttcctgacgcccccgctgctgtccgtgcgcttccggtacggtggcgccccccaggccctcaccctgaagctcccagtgaccatcaacaagttcttccagcccaccgagatggcggcccaggatttcttccagcgctggaagcagctgagcctccctcaacaggaggcgcagaaaatcttcaaagccaaccaccccatggacgcagaagttactaaggccaagcttctggggtttggctctgctctcctggacaatgtggaccccaaccctgagaacttcgtgggggcggggatcatccagactaaagccctgcaggtgggctgtctgcttcggctggagcccaatgcccaggcccagatgtaccggctgaccctgcgcaccagcaaggagcccgtctcccgtcacctgtgtgagctgctggcacagcagttctgagccctggactctgccccgggggatgtggccggcactgggcagccccttggactgaggcagttttggtggatgggggacctccactggtgacagagaagacaccagggtttgggggatgcctgggactttcctccggccttttgtatttttatttttgttcatctgctgctgtttacattctggggggttagggggagtccccctccctccctttcccccccaagcacagaggggagaggggccagggaagtggatgtctcctcccctcccaccccaccctgttgtagcccctcctaccccctccccatccaggggctgtgtattattgtgagcgaataaacagagagacgctaa

SEQ ID NO: 292105 - DNA, 1000 bp, Homo Sapiens
ccgctgcatgccctcaccagaagctcagagcgaagagacggcccggaccctgtgggcgctcagcgagaggctgatccaagaacggcttggcagccagtccggctaagtggagctcagagcggatgggcacacacacccgccctgtgtgtgtcccctcacgcaagtgccagggctgggccccttccaaatgtccctccaacacagatccgcaagagtaaaggaaataagagcagtcacaacagagtgaaaaatcttaagtaccaatgggaagcagggaattcctggggtaaagtatcacttttctggggctgggctaggcataggtctctttgctttctggtggtggcctgtttgaaagtaaaaacctgcttggtgtgtaggttccgtatctccctggagaagcaccagcaattctctttcttttactgttatagaatagcctgaggtcccctcgtcccatccagctaccaccacggccaccactgcagccgggggctggccttctcctacttagggaagaaaaagcaagtgttcactgctccttgctgcattgatccaggagataattgtttcattcatcctgaccaagactgagccagcttagcaactgctggggagacaaatctcagaaccttgtcccagccagtgaggatgacagtgacacccagagggagtagaatacgcagaactaccaggtggcaaagtacttgtcatagactcctttgctaatgctatgcaaaaaattctttagagattataacaaatttttcaaatcattccttagataccttgaaaggcaggaagggaagcgtatatacttaagaatacacaggatattttggggggcagagaataaaacgttagttaatccctttgtctgtcaatcacagtctcagttctcttgctttcacattgtacttaaacctcctgctgtgcctcgcatcctatgcttaataaaagaacatgcttgaatatcaaaaaaaaaaaaaaaaaaaaaaaa

SEQ ID NO: 292106 - DNA, 1000 bp, Homo Sapiens
ccgctgcatgccctcaccagaagctcagagcgaagagacggcccggaccctgtgggcgctcagcgagaggctgatccaagaacggcttggcagccagtccggctaagtggagctcagagcggatgggcacacacacccgccctgtgtgtgtcccctcacgcaagtgccagggctgggccccttccaaatgtccctccaacacagatccgcaagagtaaaggaaataagagcattcacaacagagtgaaaaatcttaagtaccaatgggaagcagggaattcctggggtaaagtatcacttttctggggctgggctaggcataggtctctttgctttctggtggtggcccgtttgaaagtaaaaacctgcttggtgtgtaggttccgtatctccctggagaagcaccagcaattctctttcttttactgttatagaatagcctgaggtcccctcgtcccatccagctaccaccacggccaccactgcagccgggggctggccttctcctacttagggaagaaaaagcaagtgttcactgctccttgctgcattgatccaggagataattgtttcattcatcctgaccaagactgagccagcttagcaactgctggggagacaaatctcagaaccttgtcccagccagtgaggatgacagtgacacccagagggagtagaatacgcagaactaccaggtggcaaagtacttgtcatagactcctttgctaatgctatgcaaaaaattctttagagattataacaaatttttcaaatcattccttagataccttgaaaggcaggaagggaagcgtatatacttaagaatacacaggatattttggggggcagagaataaaacgttagttaatccctttgtctgtcaatcacagtctcagttctcttgctttcacattgtacttaaacctcctgctgtgcctcgcatcctatgcttaataaaagaacatgcttgaatatcaaaaaaaaaaaaaaaaaaaaaaaa

SEQ ID NO: 292107 - DNA, 1000 bp, Homo Sapiens; identical to SEQ ID NO: 286141

SEQ ID NO: 292108 - DNA, 1000 bp, Homo Sapiens
agtgagaagatgaagggcatgaaggagctgctggtggccaccaagatcaactcgagcgccatcaagctgcaactcacggcacagtcgcaagtgcagatgaagaagcagaaagtgtccacccctagtgactacactctgtctttcctcaagcggcagcgcaaaggcctctgaactactggggacttcggaccgcttgtggggacccaggctccgccttagtcccccaactctgagcccatgttctgcccccagcccaaaggggacaggcctcacctctacccaaaccctaggttcccggtcccgagtacagtctgtatcaaacccacgattttctccagctcagaacccagggctctgccccagtcgttagaatataggtctcttctcccagaatcccagccggccaatggaaacctcacgctgggtcctaattaccagtctttaaaggcccagcccctagaaacccaagctcctcctcggaaccgctcacctagagccagaccaacgttactcagggctcctcccagcttgtaggagctgaggtttcacccttaacccaagggagcacaggtcccacctccagcccggggagcctaggaccactcagcccctaggagtatatttccgcacttcagaattccatatcttgcgaatccaagctccctgccccaaataacttcagtcctgcttccagaatttggaaatcctagtttcctctccttcgtatcccgagtctgggacacaaaactccgcccccagcctatgagcatcctgagccccgccctcttcctgacgaaactggccccggatcagagcaggacctcccttccgaccctctgggaacctcccagaggtccagcccatctcggagcatcccggaggaaatctgcagaggggttaggagtgggtgacaagagcctgatctcttcctgttttgtacatagatttatttttcagttccaagaaagatgaatacattttgttaaaaaaaaaaaaaaaa

SEQ ID NO: 292109 - DNA, 1000 bp, Homo Sapiens; identical to SEQ ID NO: 118471

SEQ ID NO: 292110 - DNA, 1000 bp, Homo Sapiens; identical to SEQ ID NO: 223869

SEQ ID NO: 292111 - DNA, 1000 bp, Homo Sapiens; identical to SEQ ID NO: 223870

SEQ ID NO: 292112 - DNA, 1000 bp, Homo Sapiens
ttagctgatctcatcctaagcatgctttatttttccttgaaagctaggtatttatcaactgcagatgttattgaaagaaaataaaattcagtctcaagagtaaaccctgtgtcttgtgtctgtagttcaaaagtcagaaatgattctaatttaaacaaaaagatattaaatatacagaagttaaattcgaactagccacagaatcatttgtttttatgtcagaatttgcaaagagtggagtggacaaagctctgtatggaagactgaacaactgtaaatagatgatatccaaacttaatttggctaggacttcaattttaaaaatcagtgtacctaggcagtgcacagcacgaaataagtggcccttgcagcttccccgtttaacccactgtgctatagttgcgggtggaacagtcaacctttctagtagtttatgatattgccctctttgtattcccattttccacagttttttccgcagacttctttctgcaaattattcagcctccaaatgcaaatgaatgatataaaaataagtagggaacatggcagagagtggtgcttcccagcctcacaatgtgggaatttgacataggatgagagtcagagtataggtttaaaagataaaatctttagttaataattttgtatttatttattctagatgtatgtatctgaggaaagaaatctggtatttttgctttccaataaaggggatcaaagtaatggtttttctctcagttctctaagctggtctatgttatagctctagcagtatggaaatgtgctttaaaatatgcttaccttttgaatgatcatggctatatgttgttgagatatttgaaacttaccttgttttcacttgtgcactgtgaatgaactttgtattatttttttaaaaccttcacattacgtgtagatattattgcaacttatattttgcctgtgcttgatcaaaggtcatttgtgtagatgagtaattaaaaaatatttaaatcac

SEQ ID NO: 292113 - DNA, 1000 bp, Homo Sapiens; identical to SEQ ID NO: 223871

SEQ ID NO: 292114 - DNA, 1000 bp, Homo Sapiens
tgcggctgggcgacgccatcctgtcggtgaacggcaccgacctgcgccaggccacccacgaccaggccgtgcaggcgctgaagcgcgcgggcaaggaggtgctgctggaggtcaagttcatccgagaagtaacaccatatatcaagaagccatcattagtatcagatctgccgtgggaaggtgcagccccccagtcaccaagctttagtggcagtgaggactctggttcgccaaaacaccagaacagcaccaaggacaggaagatcatccctctcaaaatgtgctttgctgctagaaacctaagcatgccggatctggaaaacaggcaaaactagatggtggaagacagcaatggagacctgtcctcatggctgtgactgagaaggatttgctgctctatgactgtatgccgtggacaagagatgcctgggcgtcaccatgccacagctacccacttgttgccaccaggttggttcattctggctccggatgtcgatccccctcccttggatctgaccttacatttgctaccaggacaggctctcgacagggcattgagatgcatctcttcagggtggagacacatcgggatctgtcatcctggaccaggatacttgttcagggttgccatgctgctgctgagctgatcaaggaagtctctctaggctgcatgttaaatggccaagaggtgaggcttactattcactatgaaaatgggttcaccatctcaagggaaaatggaggctccagcagcatattgtaccgctacccctttgaaaggctgaagatgtctgctgatgatggcatccgaaatctatacttggattttggtggtcccgagggagaactgaccatggacctgcactcttgtccgaagccgattgtatttgtgttgcacacgtttttatcggccaaagtcactcgtatgggactgcttgtatgagcaacaaaaaatcagaaaagagccttgactgtcacaagaaatatttccacctcaaaa

SEQ ID NO: 292115 - DNA, 1000 bp, Homo Sapiens; identical to SEQ ID NO: 223872

SEQ ID NO: 292116 - DNA, 1000 bp, Homo Sapiens
gggtgcatgtcacagagagacagttctcagtcagcacttcctgtcccctgcagaggctcataggggacagcccctgccaaggagaccctggaggggctctgaggatagcaatcagaggttgggctggctggactgagcccaggcctgttgcccaccaagtctccataggttctagtctgacccctctctccacccctgggctatgcaggccagcccgtgcagaccacccccgacgcgtccacttgcaacacccgcctcactgtgccaacactccatccacacaggaaaggactgagaacgtgatgcttaacccaaaggagtgagtttcataggatgggtggctttaacagtttcacagcaggacactgagggaatatttccctatcccttcaaatggacggtcactacagaaacgtgtagagcaagactttgtcaaggggctgtttccaggtctcccggtgtctaaatagcagagctggaatgggaactgagaaccgattctttccacaaccgcccactgagcagcaaggctgcagccagcaaagaggtgcggaggcaagcaagctccatgtggtggggacagcgcattgcgacctccaccacccctgcagtgggctgccagctgggccacctgtcttccactgtatctactgtacgaacttctccagctctgctctgttttctcttcctcagcatccaccccgtgacacgtagtggtggctgatgtcgccacagtaccatgaggttaacaggtcctccctccagcttccctcatggtggcagcctaacctgcattgcagccgttcaccggacaccgcaccagaccctcaaaacccatccaagactgtgggaggagtaaacaacccagcccagttaagaggagatgccgaatttaatgaaccctatttgaattgcagggctgtgattcctcttacctttaacgtgaactcacaggcggattaaagtgaaataaaacctaccatttgagttaaaaaaaaaa

SEQ ID NO: 292117 - DNA, 1000 bp, Homo Sapiens
ctgagcctggcagtgggtgcactcactggggacgctgtcctgcatctgacgcccaaggtgctggggctgcatacacacagcgaagagggcctcagcccacagcccacctggcgcctcctggctatgctggccgggctctacgccttcttcctgtttgagaacctcttcaatctcctgctgcccagggacccggaggacctggaggacgggccctgcggccacagcagccatagccacgggggccacagccacggtgtgtccctgcagctggcacccagcgagctccggcagcccaagcccccccacgagggctcccgcgcagacctggtggcggaggagagcccggagctgctgaaccctgagcccaggagactgagcccagagttgaggctactgccctatatgatcactctgggcgacgccgtgcacaacttcgccgacgggctggccgtgggcgccgccttcgcgtcctcctggaagaccgggctggccacctcgctggccgtgttctgccacgagttgccacacgagctgggggacttcgccgccttgctgcacgcggggctgtccgtgcgccaagcactgctgctgaacctggcctccgcgctcacggccttcgctggtctctacgtggcactcgcggttggagtcagcgaggagagcgaggcctggatcctggcagtggccaccggcctgttcctctacgtagcactctgcgacatgctcccggcgatgttgaaagtacgggacccgcggccctggctcctcttcctgctgcacaacgtgggcctgctgggcggctggaccgtcctgctgctgctgtccctgtacgaggatgacatcaccttctgataccctgccctagtcccccacctttgacttaagatcccacacctcacaaacctacagcccagaaaccagaagcccctatagaggccccagtcccaactccagtaaagacactcttgtccttggaaaaaaaaaaaaaaaaaaaaaaaaa

SEQ ID NO: 292118 - DNA, 1000 bp, Homo Sapiens; identical to SEQ ID NO: 223873

SEQ ID NO: 292119 - DNA, 1000 bp, Homo Sapiens; identical to SEQ ID NO: 118474

SEQ ID NO: 292120 - DNA, 1000 bp, Homo Sapiens
aaccaacgtgttctgctcacaaatgctttgtgctgaatccattgtttcttatctgagtcaaaattttataacctgggcttgggatctgacaaaggactccaacagagcaagatttctcactatgtgcaatagacactttggcagtgttgtggcacaaaccattcggactcaaaaaacggatcagtttccgcttttcctgattattatgggaaagcgatcatctaatgaagtgttgaatgtgatacaagggaacacaacagtagatgagttaatgatgagactcatggctgcaatggagatcttcacagcccaacaacaggaagatataaaggacgaggatgaacgtgaagccagagaaaatgtgaagagagagcaagatgaggcctatcgcctttcacttgaggctgacagagcaaagagggaagctcacgagagagagatggcagaacagtttcgtttggagcagattcgcaaagaacaagaagaggaacgtgaggccatccggctgtccttagagcaagccctgcctcctgagccaaaggaagaaaatgctgagcctgtgagcaaactgcggatccggacccccagtggcgagttcttggagcggcgtttcctggccagcaacaagctccagattgtctttgattttgtagcttccaaaggatttccatgggatgagtacaagttactgagcacctttcctaggagagacgtaactcaactggacccaaataaatcattattggaggtaaagttgttccctcaagaaacccttttccttgaagcaaaagagtaaacacggcccagcggtggaaccagccattccttgacaagccagcagcctgcgtcaggagaagggctcctcgccaacccacccacacgctcgtctcactcaattcaatgtcacacttctgcctcttgcaaaattgctggaaaaagtaataataaatatagctacttaagatttcccatcaaaaaaaaaaaaaaaaaaaaaaaaaaa

SEQ ID NO: 292121 - DNA, 1000 bp, Homo Sapiens
ctggtgacagaggagctgccgcggccgtcgctggtggcgctgcccgggccggtggtgggtcctggcgccaacgtgagcctgcgctgcgcgggccgcctgcggaacatgagcttcgtgctgtaccgcgagggcgtggcggccccgctgcagtaccgccactccgcgcagccctgggccgacttcacgctgctgggcgcccgcgcccccggcacctacagctgctactatcacacgccctccgcgccctacgtgctgtcgcagcgcagcgaggtgctggtcatcagctgggaagactctggctcctccgactacacccgggggaacctagtccgcctggggctggccgggctggtcctcatctccctgggcgcgctggtcacttttgactggcgcagtcagaaccgcgctcctgctggtatccgcccctgagccccaggagcactgcagcccgagacttccaacctgagtggcggagaagctgggaccctgggctggactgtcctttcctgcagccccacagtcctgctggctgagctccgcggaacggtccttagaccccgctgtgccctgtgctgtagcttctttccaggcctttcccaaggagtagctgaaaggaagacgcgattagtggttaagacttccaagccagaagacagagggttcgaatcccagcactgccgtctactcactgtagtagtagcagctacagaaaggtagtagtgagacgtgaagccagctggacttcctgggttgaatggggacctggagaacttttctgtcttacaagaggattgtaaaatggaccaatcagcactctgtaagatggaccaatcagcgctctgtaaaatggaccaatcagcaggacatgggcggggacaataagggaataaaagctggcgagcgcggcaccccaccagagtctgcttccacgctgtgggagctttgttctcttgctctacacaataaatcttgctgctgctaaaaaaaaaaaaaaaaaaaa

SEQ ID NO: 292122 - DNA, 1000 bp, Homo Sapiens; identical to SEQ ID NO: 117477

SEQ ID NO: 292123 - DNA, 1000 bp, Homo Sapiens; identical to SEQ ID NO: 118476

SEQ ID NO: 292124 - DNA, 1000 bp, Homo Sapiens; identical to SEQ ID NO: 223876

SEQ ID NO: 292125 - DNA, 1000 bp, Homo Sapiens
tggactcctacctatctgtgcattttaccggcacctcaggaaaggagggtgaccaggttgtcttagcttgtactgcttggtgatctctgaggaccttctaattcagttgtaccccagtgttccatgtatagaaaaacttcattagaacaaactttacttgatatgaaactcctattaacagtctttttttgaaataaaaagtagcttgagctttcttttaaaatcatgtatcttgattgttgatttaatgaaggatttccttttaatgctgcttttgagcttcaaggtaataggacagcaggaacctaaaatatctgccatcatctgccataggaaagatacccagagacccatcatgttctctttttgttgttacactgttgggtgggtataacaattggaaaatgaacaaactgattgattgtgcaaactactttttatgacaagcctaaaccctcataatgcggcagcttaaagtgtatacatatgcactaactttgatcaattatattctcatatctgttagctacacagtctcctattatctcaattgcttatgtgcatatggaatatgttacttaaaacgtgtgcattcttactgaaaatgttttcaaaggaaggtatcagctgtgggctaattgccaccaatttcagcctgccacgattcttggaaatatgtcttccaagtgccatccatcatcagtaggacaagtgtcgggagtttgtttatttttttccagtagcaacgatgggttacatggagccatgaaacctccttctggcctcccttgtgattaatggcatgtgtttgtaaaatggatagctggggttggcagatggctagagaagaatcgcctttggtttaaaatgtatgtggtcccctaatgattgtgaccccattctgtaatcaactgagctagttccaataaagttaagcaggtttaaatccactttgtgcctatcttttcactgacaataaagttagctattttaaaatgca

SEQ ID NO: 292126 - DNA, 1000 bp, Homo Sapiens
ctgtgataattccagcagggtaaagcgggagggtgggcggggtggtgcgagccaacccccctcccccaccctgccctgctcagggtgggaagggtaagtgggttccctgcattccccagccaccaccaggcctggagtatgagctcagcagatgtacttccaagggtggttgggtcaggtctcgaaatgaaataatgtactgtgtgttgcagaaaactgccttcctttcttcttaatgtcacaattattcctattgaccctgttgcaggcaaaggtacacttgaccttgagacaaggtcacacttgaccctttgagacagtccctttgtgagataattcagcattgcctttactgtgtcaattctggtagaagctaaggcccttgccctgtgagagttgtggaggcaaccctgggactctggtctgcccagcccaccccaggggcactgtcctgtgtgttctggaaatgcctctgggctgctgtgcaaaagcgcagcgtgcttgtgagtctcaggtggataactgtaggcagtcactaggcagtaagtggccgtggaggtggtgtctgctgtgcttaaagctccccctgcaccagcaaactcagggaaagctgcgtatttgtcttgcggttactggttaataacaactgatttcctcctgtcagacagcagaatctttctatcaggttagtgaaccttacggtttggaatctgtaatctgaatgtaacccagtttactttataaggtgtattcttaaattagtactccttgggaacagaattgccagacagccaactcagagtgactggtcaatggagaacactttgaacgagccatctttgcaatgccaaaatgtcctcccacaaggagtatgttaaatttggaatacccttatcgaatggaagttttcattggaataaattattgtagtttgtcctaggactttttttcatttcaagtaatttattttgctacctctttgaaaacctgcatgctccca

SEQ ID NO: 292127 - DNA, 1000 bp, Homo Sapiens
gtcctgtgattcccttggatggatctgtgaaaatccagtgccaggccattcgtgaagcttacctgacccagctgatgatcataaaaaactccacgtaccgagagataggcagaagactgaagttttggaatgagactgatcctgagttcgtcattgaccacatggacgcaaacaaggcagggcgctatcagtgccaatataggatagggcactacaggttccggtacagtgacaccctggagctggtagtgacaggcttgtatggcaaacccttcctctctgcagatcggggtctggtgttgatgccaggagagaatatttccctcacgtgcagctcagcacacatcccatttgatagattttcactggccaaggagggagaactttctctgccacagcaccaaagtggggaacacccggccaacttctctttgggtcctgtggacctcaatgtctcagggatctacaggtgctacggttggtacaacaggagcccctacctgtggtccttccccagtaatgccttggagcttgtggtcacaggtaggtaccgcccagtccagccctgtgtctgggttggctgtccagggccttgccaccgggcaggaatatgaagacgtgcactgagagtgaagtgaagagaggcaaaggctctcactccaggacagtggagagagaaaggcttccccaccacactttccgctttcacttcctcgctagagttctccagacagggttcattgaaaacttagtctgtggagaacagaagggctaactcagtttgtttcattttatttatttcattttattttccgggatagagtcttgctctttcgccaaggctggagtgcagtggcacgatctcgactcactgcaaccttcgcctcccaggagaatcacttgaacccaggaggcagctgttgcagtgagccaagatcacgccattgcactccagcctgggtgacagaacgagactccacctcaagaaaaaaaaaaaaaa

SEQ ID NO: 292128 - DNA, 1000 bp, Homo Sapiens; identical to SEQ ID NO: 223878

SEQ ID NO: 292129 - DNA, 1000 bp, Homo Sapiens; identical to SEQ ID NO: 223877

SEQ ID NO: 292130 - DNA, 1000 bp, Homo Sapiens; identical to SEQ ID NO: 223878

SEQ ID NO: 292131 - DNA, 1000 bp, Homo Sapiens; identical to SEQ ID NO: 118478

SEQ ID NO: 292132 - DNA, 1000 bp, Homo Sapiens
atcaccagagaaatgcaggttggacatgattccggacctcaaagccatgaacccccttaaagccaagacagcctccctctttgagcagaagtccatgaaaggatggtggccatgctacgcagagaaagatggcgcccgcgtaatggctgggaaagtggagatgacattggaaatcctcaacgagaaggaggccgacgagaggccagccgggaaggggcgggacgaacccaacatgaaccccaagctggacttaccaaatcgaccagaaacctccttcctctggttcaccaacccatgcaagaccatgaagttcatcgtgtggcgccgctttaagtgggtcatcatcggcttgctgttcctgcttatcctgctgctcttcgtggccgtgctcctctactctttgccgaactatttgtcaatgaagattgtaaagccaaatgtgtaacaaaggcaaaggcttcatttcaagagtcatccagcaatgagagaatcctgcctctgtagaccaacatccagtgtgattttgtgtctgagaccacaccccagtagcaggttacgccatgtcaccgagccccattgattcccagagggtcttagtcctggaaagtcaggccaacaagcaacgtttgcatcatgttatctcttaagtattaaaagttttattttctaaagtttaaatcatgtttttcaaaatatttttcaaggtggctggttccatttaaaaatcatctttttatatgtgtcttcggttctagacttcagcttttggaaattgctaaatagaattcaaaaatctctgcatcctgaggtgatatacttcatatttgtaatcaactgaaagagctgtgcattataaaatcagttagaatagttagaacaattcttatttatgcccacaaccattgctatattttgtatggatgtcataaaagtctatttaacctctgtaatgaaactaaataaaaatgtttcacctttaaaaaaaaaaaaaaaaaaaaaa

SEQ ID NO: 292133 - DNA, 1000 bp, Homo Sapiens
cgacccttgcacaaacctcagtggtttctaataaataaaaagtatcgggaaaattgcctggcagcaaaagcactttttcctgacttctgcctaccagctttatgcctccaaactcagctattgccataccttgctctactaaccattccaatgagaaatcaagctcagatttcttttatccaagatattggaaggctccctctgaagcgacactttggaagattgaaaatggaagccctgactgacagggaacatggaatgatagaccctgacagcggagatgaagcccagcttaatggaggacattctgcagaggaatctctgggtgaacccactcaagccactgtgccggaaacctggtctcttcctttgagtcagaatagtgccagtgaactgcctgctagccagccccagcccttttcagcccaaggagacatggaagaaaacataataatagaagactacgagagtgatgggacatagaagccagcctgctaatcagattgctacttcacagcttcatttttgtttcattcagtggtacttcagcagagttaatatgcttttctgatgaattacacaacagtttgttaattcttcattcttgtagtatttcatcacaagaaacctactcttctgtcatcttgaagtaaatagaagatcaagccttcaaatctcttaattttttcggtatttattaaatctgtgagtggtttaaggagcggtcagtgtgtataaagtgtgtttgaacattatgccaaatatcaagatgtgaaggactaattcaggatgcaaaaacgttattggggggttgtaaatatcaactattcaacagtttaggatgcaattacgagtgtaaactgtgtgccttatttacactttattgtctcccgcttctcagatagttttgatgtgttgtacagtggaatatcttagatactttttggaaagtatttacataagttatatcacaattaaaatgttgaatttaaaaaaaaaa

SEQ ID NO: 292134 - DNA, 1000 bp, Homo Sapiens; identical to SEQ ID NO: 223879

SEQ ID NO: 292135 - DNA, 1000 bp, Homo Sapiens
tgaccggcttgtcacattggagtcctgggctaatgatcctgattatctgaaacgtcaagttggtttctgtgcccagtggagcttagacaatctctttttaaaagaaggtagacagctgacctatgagaaagtgaacttgagtagcattagggccatgctgaatagcaatgatgtcagcgagtacctgaagatctcacctcatggcttagaggctcgctgtgatgcctcctcttttgaaagtgtgcgttgcaccttttgtgtggatgccggggtatggtactatgaagtaacagtggtcacttctggcgtcatgcagattggctgggccactcgagacagcaaattcctcaatcatgaaggctacggcattggggatgatgaatactcctgtgcgtatgatggctgccggcagctgatttggtacaatgccagaagtaagcctcacatacacccatgctggaaagaaggagatacagtaggatttctgttagacttgaatgaaaagcaaatgatcttctttttaaatggcaaccagctgcctcctgaaaagcaagtcttttcatctactgtatctggattttttgctgcagctagtttcatgtcatatcaacaatgtgagttcaattttggagcaaaaccattcaaatacccaccatctatgaaatttagcacttttaatgactacgccttcctaacagctgaagaaaaaatcattttgccaaggcacaggcgtcttgctctgttgaagcaagtcagtatccgagaaaactgctgttccctttgttgtgatgaggtagcagacacacaattgaagccatgtggacacagtgacctgtgcatggattgtgccttgcagctggagacctgcccattgtgtcgtaaagaaatagtatctagaatcagacagatttctcatatttcatgacacatgtgaagaggcatcgtggacttttttctactcaattccagccaatgttgaaaagaaaaaaaaaaaaaaaaa

SEQ ID NO: 292136 - DNA, 1000 bp, Homo Sapiens; identical to SEQ ID NO: 118479

SEQ ID NO: 292137 - DNA, 1000 bp, Homo Sapiens; identical to SEQ ID NO: 118480

SEQ ID NO: 292138 - DNA, 1000 bp, Homo Sapiens
ccagcgctcctgagggcccacctcactcgccttggggttctgcgagtgccagtccacatcccctgcagagccctctcctcctctggagtcaggtggtgggagtaccagccccccagcccacccacttggcccactcagcccattcaccaggcgctggtctcacctgggtgctgagggctgcctgggcccctcctgaagaacagaaaggtgttcatgtgacttcagtgagctccaaccctggggccctgagatggccccagctcctcttgtcctcagcccacccctcattgtgacttatgaggagcaagcctgttgctgccaggagacttggggagcaggacacttgtgggccctcagttcccctctgtcctcccgtgggccatcccagcctccttcccccagaggagcgcagtcactccacttggccccgaccccgagcttagcccctaagccctcctttaccccaggccttcctggactcctccctccagctccggaacctgagctccccttcccttctcaaagcaagaagggagcgctgaggcatgaagccctggggaaactggcagtaggttttggtttttattttttgagacagggtctcgctccgtcgcccaggctggagtgcaatgttgcaatcatggctcactgcagctttgaactcccaggctcaagcgatcctcccatctcagcctcctgagtagctgggactacaggcacaggccaccacacctggctaatgtttaaattttatgtagagatggcggggggggcgggggtctccctatgttgcccaggctggtctcgagctcctgacctcaagtgatcctcctgccccagcattccaaagtgctgggattacaggtgtgagccactgcctggcctggccgtaggtttgtaactgtttcatagaagagccctggagaagacagtagaatgagcctatctagtttaaaaaataaagaagcacgttgatttcaaaaaaaaaaaaaaaaaaaaa

SEQ ID NO: 292139 - DNA, 1000 bp, Homo Sapiens
ttcgctgctcagcctgtgccttgaactcggtggtgcagagcgtgctgagcaagcggacactgcaggcccgcagcatgcacgaggtcgtcgagctgctcaacgtgtgcgaggacctggcgggctccacgggcctggccaaggagaccttcgggtcgctggaggagacgtctccaccaccctgctggaactcggtgacggactcactgttgctggtgcatgagcgctatgagcagatctgcgagttctacagccgggccaagaagatgaacctcatccagagcctcaacaagcacctgctcagcaacctggcggccatcctgacgccggtgaagcaggcagtcatcgagctgagcaacgagagccagcccaccctgcagctggtgctgcccacctacgtcaggctggagaagctgttcacggccaaggccaacgacgcaggcactgtcagcaagctctgccacctcttcctggaggcgctcaaggagaacttcaaggtgcacccggcccacaaggtggccatgatcctggacccgcagcagaagctgcggcctgtgccaccctaccagcacgaggagatcatcggcaaggtctgtgagctcatcaacgaggtgaaggagtcctgggccgaggaggccgacttcgagcccgctgccaagaagccccgctctgctgccgtcgagaaccccgcagctcaggaagatgatcggctaggcaaaaatgaagtgtacgattacctgcaggagcccctcttccaggctacccctgatctcttccagtactggtcgtgcgttacccaaaagcacacaaaactcgccaagctcgccttctggctcctggcggttccggccgtgggcgccagaagcgggtgtgtaaatatgtgtgaacaagcgcttctaatcaaacggaggcggctgctcagtccagaagatatgaataaactcatgtttctgaaatccaacatgctttaagacttgacttcgggggaaaaaaaaaaaaaaaa

SEQ ID NO: 292140 - DNA, 1000 bp, Homo Sapiens
caacgatttcaaaacaaaattacctctactacaacagatggggaatctgttacgttccatttgtttgaccatgtaaccgtaagaatatccatacaggcctcacgttgccattctgatacaatcagacttgaaataattagtaacaaaccatacaagataccaaatacagaacttattcatcagagttcccccttgctgaagagtgagttagtgaaagaagtaactaaatctgtggaagaagctcagcttgcccaagaagtcaaagtaaacatcattcaggaggaatatcaagaatatcgccaaacaaagggaaggagcctatacacacttctagaggagatacgggacctagctctcctggatgtttcaaacaattatggaatatgagaggctcttacttcactaagagctgtcatatgtgaatgttttacagtcttttcaaacttaacatttaatgtgtgtcactcagtgctctagtcgatcaggactgggtagctatttcgcatatatgtaaaatgttctcagccgggcacggtggctcacgcctgtaaccccagcactttgggaggctgaggcgggcggatcacgaggtcaggagattgagaccatcctggctaacacggtgaaacccagtctctactaaaaatacaaaaattagcccggcgtggtggcatgcgcctgtagtcccagctacttgggaggctgaagcaggagaattgcctgaacccaggaagaggaggttgcagtgagccgagatcgcaccactgcattccagcctgggcaacagagcgagactccatctcaaaaaaaaaaaaaaaaaaaaaaaaagttctctcattcattaaagttgcattaaataaagtataattaggtcactatggaaacagttttcagtaatgagtggacagtaagtggtggctctgcagatggcccctttctaataagtttaataaacccgaaattactggttaaaaaaaaaaaaaaaaaaaaaaaaaaaaaa

SEQ ID NO: 292141 - DNA, 1000 bp, Homo Sapiens
accaatgttattaataaaattattctgcagtcagaggggctccgtgaagcattttctgaattggatatgacgagtgaagtcctacaaattaccatgtctcctgacaagccttatttcaggttatctacttttggaaatgcaggaagttcccaccttgactatcccaaagattctgatttgatggaagcatttcattgtaatcagacccaagtcaacagatacaagatttccttactgaaaccctctacaaaggcattagtcctatcttgtaaggtatctattcggacagataacagaggcttcctttcattacagtatatgattagaaatgaagatggacaaatatgttttgtggaatattactgctgccctgatgaagaagttcctgaatctgagtcttgagtatgacaattcactgatatttatgtgtacatttatgatagatgaagttcttattctgagtacagtactctttgtcatttcatattggattttctatagagaagaagcacaatggggaagataggagcaaggtcatgtaccctaatagttactatgttttgtaaatccattttgtagagggcatgtaaataaatgttttcctgtagtcatagattattcaggactgtcctttagttctgtcttttgaactcatgggaataattgtgagtcagcgtaacatttcaagagtctaaaggtggccgggtgtggtggctttaatcccagcactttgggaacccgaggtgggcggatcacctgaggtcaggagttcgaaaccagcctgaccaacgtggagaaaccccatctctactaaaaatacaaaaaattagccggacgtggtggcacatgcctgtaatgccagctactcgggaggctgaggcaggaaaattgcttgaacccgggaggcggaggttgtggtgagctgaaatgacgccattgcactccagcctaggcaataagagcaaaactctgcctcaaaaaaaaaaaaaaaaaaaaaaaa

SEQ ID NO: 292142 - DNA, 1000 bp, Homo Sapiens; identical to SEQ ID NO: 118481

SEQ ID NO: 292143 - DNA, 1000 bp, Homo Sapiens
tcaagggagggagaagacaaagaactaaaaattgatttagaagtatttgaaatgcctcctcgctttataatgcctatttgtgattttaaaattccagaaaattcagatgctgtattcaaatgttcagtcatagggatcccgactcccgaagttaagtggtataaagaatatatgtgtattgagccagataatattaaatacgtgattagcgaggagaagggaagtcacactcttaaaattcgaaatgtctgtctttctgatagtgcaacatacaggtgcagagctgtgaattgtgtaggagaggctatctgtcggggattcctcaccatgggagattctgaaatatttgctgtgatagcaaagaaaagcaaagtgactttaagcagtttaatggaagaattggtcttaaagagcaactacacagacagtttttttgaatttcaggtggtggaagggcctcccaggtttatcaaaggtatttctgactgttatgcaccaataggtacagcagcatattttcagtgcttagttcgtggctctccaagacccacggtttactggtacaaagatggaaaattagtccaaggaagaaggttcactgttgaggaaagtggcacagggttccataacctgtttataacaagcttagtaaagagtgatgaaggagagtataggtgtgtagctacaaacaaatcaggaatggctgagagctttgcagcactcaccttaacttaaaatgtaatgttttagtgcctcagtaattattagcattgatctgagtgctttcatattttccaaattatgtggatctaataaacttccaaacaggtccaccatatttgaattcattaccttggagacccctaaagaaataatctctatgtagaaatctcatctttgtaatacatgtaaatattttgttatctgaactgtggaatcatcacttgtgtcaatcatgctgtgtaatatcaaacacaattaaatctctccttggctacct

SEQ ID NO: 292144 - DNA, 1000 bp, Homo Sapiens
taataagctgactaataaagttgttcagactttacgatccctgtatgccgccaaggatgggacttccagctaatgaatttgtacatgcagccaaatttacaggaatttttttaaaaggcagaaaaacttgaaataccaacattctggcaaaaaaaaatcagttttatgaagagtaagtggaacctgggatgcaggaacaaaagaaggaaatgttgggcaaacatttttgtgggagctcccttcgctgttgtgcagcagaaacagattctcagttcatttttactcccactgtattatagtttaacaaaaattgtttatatcttggaaaaaaaactttctgtttaaaaaaaataaacaagtgaatgttggaaattagtctgttaatgttcttaataaagtgttcttggagtttaacctagcagcggatggctttctttagcttagcccagtttccagggaagcattgttttttccaggctgtaaaatggcagaatctcctggatatataatttattctgttgaaaaaaaaaaaagcatgcagtatctatgacctatctgcagaaggagtttttgtaaatgtagattttgatgtattaggtcaccctgaaaacaatacaagaaaagggatccccaggtaatctggtggagcgaatactgcaataaatttttttacttctctttgttacttgtctgtttccatttgaatttcttattgtaaaaatctgtttaaatccatttatattattttacagtcttttatgtaaaatttattatatcactggttttcaaagcaaaacataaaatattgtttatacagtttgtataggctgacttctgaataattggtatctattattttcattcccataagagggtgtaaacaattaactccagggttttattgtatcctgcaatatttagtattaactatatatgatttagcactgtgccaaacacattttcaagagtacattttgatataaaaagaaactatagttta

SEQ ID NO: 292145 - DNA, 1000 bp, Homo Sapiens; identical to SEQ ID NO: 118481

SEQ ID NO: 292146 - DNA, 1000 bp, Homo Sapiens; identical to SEQ ID NO: 223882

SEQ ID NO: 292147 - DNA, 1000 bp, Homo Sapiens
cctccatggtgggagatcaggagttaaggacttcctagagaaggtagtccctgaaggaaaagtaggaatctggcagtgaaagaggaaaagaacattccaggcagacagcactgcaagagggtgagctcttggtgtatttggagaccatccagttattcatctgactgcctacctgaggcaagcaccacacttaccactgtatgtgtactatgatcccaacaggcttgtgacatagatttcatattatccctgttgtatagatttttaaaactggtggctgggcgtggtggctcacgcctgtaatcccagcactttgggaggccgaggcgggcagatcacgaggtcgggagatcgagaccatcctggctaacacggtgaaaccccgtctctactaaaaatacaaaaaattggccaggagtggtggcgggcgcctgtggtggccagctactcaggaggctgaggcaggagaatggcgtgaacccgggaggcggagcttgcagtgagccgagatcgcgccactgcactccagcctgggcgacagagtgagactccctctcaaaagaaaataaaaataaaaataaactggccaggtgcggtggctcacgcttgcaatcccagtgctttgggagactgaggcaggaggatcacttaaggccaggagttcgagaccagcctgggcaacagcaagacctcatctctacaaaacttaaaagttagccaggcctggtggcacatgcctgtaatccgagtgctttgggaggctgaggcaggaggatcactcgagctcaagaattcaagacctgggcaagagagagagactttgtctctattaaaaataaaaatgattggccgagcatggtggtgcacaccagtattcccagctactctggaggctgaggcggaggcaggattgcttgatatgagggagattgaggctgcagtgagctgtgttcacaccactgcactccagtctgggcaacagtgcaagaccctgtcactt

SEQ ID NO: 292148 - DNA, 1000 bp, Homo Sapiens
agtcccagctgaccagccagagcaaggccatggccctgcagtcgatccaaaacatgcgtgggaacgcccactgtgtggactgtgagacccagaatcctaagtgggccagtttgaacttgggagtcctcatgtgtattgaatgctcaggtatccaccgcagtcttggcacccgcctttcccgtgtgcgatctctggagctggatgactggccagttgagctcaggaaggttatgtcatctattggcaatgacctagccaacagcatctgggaagggagcagccaggggcagacaaaaccctcagaaaagtccacgagggaagagaaggaacggtggatccgttccaaatatgaggagaagctctttctggccccactaccctgcactgagctgtccctgggccagcagctgctgcgggccaccgctgatgaggacctgcagacagccatcctgctgctggcacatggctcccgtgaggaggtgaacgagacctgtggggagggagacggctgcacggcgctccatctggcctgccgcaaggggaatgtggtcctggcgcagctcctgatctggtacggggtggacgtcatggcccgagatgcccacgggaacacagcgctgacctacgcccggcaggcctccagccaggagtgcatcaacgtgcttctgcagtacggctgccccgacgagtgcgtgtagtatctgttttatttgactgcagtctccttggtgcaaaaacaaaatgggaaaaataaggataactcagaatttcaaaaggaaatcacaaattcagctaataatagcattttcagtacttttcgtaaactaagtaaatacacaaaatgttgatttttctgaccataagacgtattttatgtccttttgccaaggtggatttgttagtctcaggccctcctggccacattgcccaagtcacacaggcttctgtattatgtatttagataaaatgtgtgaaaatatatttgaaataaagttcataa

SEQ ID NO: 292149 - DNA, 1000 bp, Homo Sapiens
cgtgcagggcgtgtggagttgggggggttctgggtgtgaaagtggtggatccagcaggaagcccagcctcacacacaccggacagcacagaaaccttcttcatcttggaggtgcgaagggataaggggcatcagtgcatgtggtgaagatgcaggtttgcaagcacttggtcctgcagtcagccccgaaaggttcagcattgcttaagaccagccatgactctggatatccctgaatcccttcacttatgaagcctatgaagatgggggcaaggatacatcagagaattcctgcctcatctcacgctcactccaaggtagagaatggtgtgttgggtgattgccagccagataggatcctgcgaaagatggtcgggggcagcgggtggtgggcagaagaggccgtgctgttgaattgatcttctatttttccctctggtcattttctctctctctctgctcttcagttgtctgttttccagtctctctgtgtgtctgtctctgtatctctctcctcctttgaacctatcttctccctgcttcctctccatctcatctctgtaattttgagtgtgtgtctttactccttcttcctctccatagaattgaattctctttagatcatgtgtgtgtaaatttcaccagtttaccctcccaaccttagccctctcccctgcaactgtggtgctcttgagactgaggtttctgcagccagtaagtcacctgctcctgtccgcaagcttacctaccttgtttggttgggtgattaagctgtcaccccttttcaatgagaatcctttgctttcagtaacgtcctcatatttctttccattcttacctgtgtcatgttctgttgaatactgcagccgctgcccgcttccaaatccatctgcgtgtagaatgtactgtagattgtaagaatgtaatatatatttataaacttactgactgtaaatataaagtttgcattcagtgacaaaaaaaaaaaaaaaaaaaaaaaa

SEQ ID NO: 292150 - DNA, 1000 bp, Homo Sapiens; identical to SEQ ID NO: 223883

SEQ ID NO: 292151 - DNA, 1000 bp, Homo Sapiens; identical to SEQ ID NO: 118482

SEQ ID NO: 292152 - DNA, 1000 bp, Homo Sapiens; identical to SEQ ID NO: 223886

SEQ ID NO: 292153 - DNA, 1000 bp, Homo Sapiens; identical to SEQ ID NO: 118483

SEQ ID NO: 292154 - DNA, 1000 bp, Homo Sapiens
ggaggttgctggcttgggctgacctcactaatgccatcagcagcggtaggtaaattttttctccttgggtattacaagtttttgtctggagccaaccaagcttgccaccaacatattgagagtaatacactattgaaagttatcttggatggggagaaaaaaaaatagtggttttccttgtttgcaaaaacttccttcctattctcattttttcttaattttctttaatttagtccaagttccagttcttttaggccttctctttgatttattttcccctgcatgtgagaagcagttcagaaaaaggtctatatctccacctcctagtgagttagagtgttttctcagagcacctctgggtggcaaagggaagcatgttcctgccaaggtttgctgtggattcagaagcaccaggagcaagagaccagaaggatgatctgctcctttgtaacgttgttgagggccctcttgtttccaatgagcagcttataggttactcacagtccactttctcactggacacacaaagtggctctttatctacctttgcgggagattttcactctcctgcaaatgatcgttctcacactcatattagctcatgttggaatttcccatcctgccatgtcctttcccatttctttttggcttttttgcctccaccttttagcccacatcatttaactccactactgtgaaagcttgcttaaagaaaatccctcttggccgggtgtggtagcccacgcctctaatcccagcactttgggaggctgaggcggggagatcacaaggtcaggagatcgagaccagcctgaccaacatggtgaaaccctgtctctactaaaaatacaaaaattagctgggcgtgttggcacacacctgtaatcccagctactcaggaggctgaggcaggagaattactttaacctgcggggggagcctagattgcgctactgcactccagcctaggcaacagagggagactctgtctcattaaaaa

SEQ ID NO: 292155 - DNA, 1000 bp, Homo Sapiens
ttgccagacatgatgtcggttatctggcaaaagccattttatgtcggccacgaggcaggtgttcactgtgcatcattcattcaccccatgatgttctggaagtaaaccttggttgtctttcgttggccagaggaattgaatgtccgtctgtctgcccaggctggagtggcacgatctcagctcactgcagcctccacctccagggttcaagcgattctcctgcctcagcctcccggggatctcaagggcatttccctttgcccacctcaccttttcatatttggtaaactgtatgcatttgcctccagcccaagattataaatatgaactgattatgatctgcatgttctctctttgggttcaagcatttccttacagaagagccaccgtggaagtcatgggtaaatatgtgttgaattggtaactccctcttggagaatttcttgtgaattacacagcaataggggaactcatttaactggagacataatctcaatttgtaaagtgtggcccattttctaacatttttattttgcataccctcccctctcttctcgattgatgaaactaacaaagaggttaataaaagcccatctcgtcatgtacagggactcatgcctttaattccagtgttttgggagactaaggcaagaacatcctggaggccaggagttcgacactgtataacagatatatctgacagcagtaactcaagcacaccctaagaatgaccctgtggtctaagaagagtgttggttcagcgttccaaacgaagaaatccaggagtggccaacctggaggtttctgaacccctggcctgttccttggaatgaggccctttgttttgagctaggcggagggtgataagtgaaaatactatataaactgcatgcttctttcaaatgatagtggtttttttgtccagcctgccgctcctggactgccctgtatctaagtcctcaataaaccctatgtctcatttaaaaaaaaaaaaaaaaaa

SEQ ID NO: 292156 - DNA, 1000 bp, Homo Sapiens
atcttcacttgaaataccggatgattttggaggtaggtctgaagatccaagagatttttataacagctataaaacccaagcaggtagtagcaaaacagaaaagccatataaatcagaaagacatttttccagtagaagaaattcctcagattccttctgtaggaattcagaggacaagatttatggttataggagatttgaaaaggatatagagggaagaaaagagcactatagaaggtgggaaccaggttctgtgaggcattctacctcaccagcaagctcagaatactcttggaagtcagttgagaaatacaaaaaatacgctcactctggatcacgtgatttcagtagacatgagcaaagataccgtttaaatacaaatcaaggagaatatgaaagagaggacaattatggggaggatatcaaaacagaggttccagaagaagatgcactaagtagcaaagaacactcagaaagcagtgttaagaaaaatttacctcagaatttactgaatatatttaatcagatagctgaatttgaaaaagaaaaaggaaataagtcaaaaaattaatacaccaaggatatcggcaccattacacaaaatgccattaagtgaagtttttggttgtattagtcataacagttgagtgcagaaatctctgcttctaaaattatttgtagagattacaggaaacaaatgcttttaagtaagtttctctcaaattttgtttcagttctaggtcccttgtcacagcttggtttttagactttttatgtatatgtttatgtacagtatattactcttgacagtttgaatttcttcacctaaagataattctctgaaagtactgtttcttcattctattgcggtatatgagaattcctgggtgcatcttattctgctgtttgagagaaaaatttgtgcattgaacacttggatcatttttataaaaattaatttcattttcttttctgttaaattaaaaatcgtcagcttttg

SEQ ID NO: 292157 - DNA, 1000 bp, Homo Sapiens; identical to SEQ ID NO: 220432

SEQ ID NO: 292158 - DNA, 1000 bp, Homo Sapiens
cagctcctccaccaagaaactcaaggagaagctgtgggtgctgagtaaggcaggcatgtcgggcgcgcgttctcgcaacatcgtctacttctccctttctgacgaggaggagatgtggcaggcagggtgtctgggggatgacagccctatcactctcctgtccactgtggtcaagtacaacagccagtacctgaacatgcggacgctgcaggagcatgcggatctgatgtatggtgacatcgagctgctcaaagacccccaaaaccagccctactttgcccggacggacagcgtcaagcgggagagtcggagcggctccaccagagtgtgtcacgggaagatctaccatgagcattcccggggacacaaacagtgcccttactgcctcctctacaagtacatgtacatccaccggccgcccacccaaatggaggccaagtcccccttctacctgactgccaggaaggaggccacagacatgggcagcgtgtggtatgaggagcagaggatggggctgcgctctcttcggggaattgtcccaaacttagccaagaaggtcaagctggaaaactgtgagaacttcacctttgtctcgttcactcaggtctcccggaggcttggctcccacagctgctgccagtgagcccccactggggcccggccactgccctgtcacctgctcgggccagccagggttggagcagctggagctccttggaggcaggggctgaccaggtgtgacctcccggtctggcggctctcccctggtgtggcctgccctccctttgacttggggtttgctttttaaaatgaaactagatgagtctaaatcattcggatggtttatccaaatgtgcgtcaacttcgttagcttttagaatctaacacaatgtataattgttacatacaagagtgaggaaattcattttctctagtgcctttctagcacaggttttctcaaaacaaacaaacaaaaaaggaaactgttaagtagtcgttt

SEQ ID NO: 292159 - DNA, 1000 bp, Homo Sapiens; identical to SEQ ID NO: 223887

SEQ ID NO: 292160 - DNA, 1000 bp, Homo Sapiens; identical to SEQ ID NO: 118484

SEQ ID NO: 292161 - DNA, 1000 bp, Homo Sapiens
tggaaaaacaatttttcaaaaactacagcttagaaatcaacagttatactagaatatattttttccagatgcagtaaaagtaaaatatttaatccataattaagtctatgcaaatatcagagaatttatggtagaaatatataaggtactgacacttcagatatactaaatcagagtgctaagtatagaaaatctgaaactaaagttggtagaaaagttatttgtatagaactttaagaggatcagaaggttttttgcagagttataattacattcaaagtatactttatttcttgaaaaatattacagattttttgaaaattgaataatgtcatcattcaactctgaaattatttcctgttgtttcttcattcctattggattcacatgtgaaagcatggggttaattgttgctacatcaaagagagagattcttttgtttgtttgttcgtttgttttttgagactgagtttcactctttcgcccaggctggagtgcattggcatgatctcggctcactacaacctctgccttctggtttcaagcggctcttctgcctcagcatcccaagtggctgggataacaggtgccagccaccatgcccagctgatttgtgtatttctagtggagatggggtttcaccatgttggccgggctggtcttgaactcctgacctcatgtgatccgcccgcctcagcctcccaaagtgctgggattacaggcttgagccaccacgcccagcctgtagcatattttaataggagaatacaatatataatagtagcagggttaagtaaggcatccatcatctgtagcatttctcctttgttttacaaacaatccaattctacactttaaaaaaaaatttttaaatgtacaattaaatttttatttaccacagtgttatttttatcgtcataataaaaattatatacgagtataaatgaaattcatttctaaattcttaataaatattttctcatgcaaaaaaaaaaaaaaa

SEQ ID NO: 292162 - DNA, 1000 bp, Homo Sapiens; identical to SEQ ID NO: 223889

SEQ ID NO: 292163 - DNA, 1000 bp, Homo Sapiens
agacattaagaaaaagacagtacatggtgggaaagctgcacatttctcacaaggaaaaaaacattctatatttgtagcagaaatcagtggtttgaaaagtcatactttgcagatatgaacctgaaaatcaaagtgccattgttaaatcatcctaaagtgtactgtgggtattcttctccagcatacttgaaaatgaataaagttagattgctcacattgaagctaatggttgagacaagacacccgccagagtgaagtttgattcctatgggtgagaagatgtagatgactattgttctcactaaagttctaaaataatagcaagtgtagagaagagccgttgctttgaaaatacataccacatttgttataaagcatttgtttgttagtagcaatcacataggtagaaagagtttgagttttactgtggattaaaaagccttccctaaaaagagagcatgccagtcatagagacactaatttggcacttttcctccttcttaggtttaaatgttataccaatgcatgtgtttgaaatatctattaagatgatttaaaatttgtcttgtattttgagtttcttaaatgcgtggattcttgttcatttatctctgaatatgtctcttttatattttggcacaattatacacattggaaagggccaacctattagggctcaagtatgtatatgcaaaaaaaaaagttatatcaaacaggcacagttattacaactagagagaaattccagaaatatttgtttttttaagagaaagtaaattttcacattagatttctattcaaagtactaatatctacatggtccacacttttctattttaaaaaattgtgttctcttgttaaatagattaacatttccacttctgtttatcacaaaagactgtatttgaaatatgcatacggaaaattgaaattatattagtaataaatgtaacttgaaaaatcaaaaaaaaaaaaaaaaaagaaaaaaaaaaaaaaaaaa

SEQ ID NO: 292164 - DNA, 1000 bp, Homo Sapiens
gtccttgctgagcttcgcaaacggcaggctgagctgaaggcacttagtgcccacaaccgcaccaagaagcacgacctgctgaggtgagcgttagcaggatgcacagtcccgggggtggccttggaggctgtggccacggctagtcacctttcaggggttttacaacaggctttccaatcctggctggcctctaaatcacctggagagcctcgaaaaaaacagcagtggccagtccaccgggtatgtcccaaacaaattctgattccacagagtggggctcaggcatctgtgactgaccgattgatttgatttgtttttgttttgtttttttttgagagggagtctcgcactgtcacccaggctggagtgcagtggcatgatctcggctcactgcaagctccgcctcccaggttcatgccattctcctgcctcagcctcctgagtagctgatactacaggcacccaccaccacgcccagctaatttttttgtatttttagtagagacggggtttcaccgtgttagccaggatggtctcgatctcctgacctcgtgatccacccgcctcggcctcccaaagtgccgggattacaggcgtgagccactgcgcctggcctagtttggttttttaattatggtaaaggcataatataaaatgtatctccatgggaggctgaggcaggagaatcagttgaacctgggaggcggaggttgcagtgagctgagactgcaccattgcattccagcctgggcaacaagagtgaaactgcatctcaaaaaaaaaaagaaaaaaaatttacgcttcttaaccatttttaagtgtacagtttagtagtgttacccatattcacattgttgtgtgatttattttttgtcttttcatgcttcttttctttttatccccaaagttttgttattaaaaatttgatacacacagaaaatctgaaagaatcatacaataaacatcagtatattctccacctaaaaaaaaaaaaaaaaaa

SEQ ID NO: 292165 - DNA, 1000 bp, Homo Sapiens
caaagtttgacaggaaccttaagtaatcatctaagtcagtacccaccaccttcttctcctacatatcccttccagatggtcatccagactcagagctctctctacagagaggaaattctccactgtgcacacccacctttggaaagctctgaccacttgaggcctgatctgcccatcgtgaagaagcctgtaacactcctctgcgtctatcctgtgtagcatactggcttcaccatcaatcctgattcctctctaagtgggcattgccatgtggaaggcaagccaggctcactcacagagtcaaggcctgctccctgtagggtccaaccagacctggaagaacaggcctctccatttgctcttcagatgccacttctaagaaaagcctaatcacagtttttcctggaattgccagctgacatcttgaatccttccattccacacagaatgcaaccaagtcacacgcttttgaattatgctttgtagagttttgtcattcagagtcagccaggaccataccgggtcttgattcagtcacatggcatggttttgtgccatctgtagctataatgagcatgtttgcctagacagcttttctcaactgggtccagaagagaattaagccctaaggtcctaaggcatctatctgtgctaggttaaatggttggcccccaaagatagacaggtcctgatttctagaacccgtgactgttactttatacagcaaaggaaactttgcagatgtgattaaagctaaggaccttaagacagagtatcctgggggtggtggtggggtgggggggggtcctaaatgtaatcacgagtaagattaagagcaaatcaattctagtcatatattaaacatccacaataaccaagatatttttatcccaagaatgcaagatttcagaaaatgaaaaatctgttgataaatccatcactataataaaaccgaaggtgaaaaaaattctgaaaaaaaaaaaaaaaaaaaaaaaaaaaa

SEQ ID NO: 292166 - DNA, 953 bp, Homo Sapiens
cagaggatcgcctcgctggcctactctctcctcccgtacggcgccggaatcccagctccacttaccaggccgcggctaccccgccgtcccccccgactcccgccaccccgctctctcaggctcttcaggatccaagtccgtaggccctttaaggggtctagttgccgtttgcgaggccctgggactttggtcccagacagcggggatccggatggcttccgtgcggatccgagaggccaaggagggagactgtggagatatcctgaggctgattcgggagctagccgaattcgaaaaactctcggatcaggtgaagatcagtgaagaagccctgagagcagatggctttggagacaatcctttctatcactgtttggtagcagagattcttccagcgcccgggaagctactggggccctgcgtggtgggctatgggatatactatttcatctacagtacatggaagggacgcaccatttatctggaggatatctatgtgatgccggaatatcggggtcaagggattggttccaaaataatcaaaaaggtggctgaggtggccttggataagggctgctcccaattccgcctggccgtcctggactggaaccagagggccatggacttgtacaaggccctaggagcccaagatctgacggaagctgagggctggcacttcttctgctttcaaggagaggcaacgagaaagttggcaggaaagtgacgccatccctaggaggatctctgtcttgagtttctccttccccatcagctgaagcactcttcagagactacgtccacagacactgatgctgaggcctccctggaggaaggagggttaggggtgcctatcctcaagtattggaagagcagaattgagggagagacctttcttccttgttgagggtgaaaaataaataagaattacatgtcaaaaaaaaaaaaaaaaaaaa

SEQ ID NO: 292167 - DNA, 1000 bp, Homo Sapiens; identical to SEQ ID NO: 118486

SEQ ID NO: 292168 - DNA, 1000 bp, Homo Sapiens
agggccacctgttcctcagttccaaccacagaaggccttacgaccggatatgggctataatacattagccaactttcgaatagaaaagaaaattggtcgcggacaatttagtgaagtttatagagcagcctgtctcttggatggagtaccagtagctttaaaaaaagtgcagatatttgatttaatggatgccaaagcacgtgctgattgcatcaaagaaatagatcttcttaagcaactcaaccatccaaatgtaataaaatattatgcatcattcattgaagataatgaactaaacatagttttggaactagcagatgctggcgacctatccagaatgatcaagcattttaagaagcaaaagaggctaattcctgaaagaactgtttggaagtattttgttcagctttgcagtgcattggaacacatgcattctcgaagagtcatgcatagagatataaaaccagctaatgtgttcattacagccactggggtggtaaaacttggagatcttgggcttggccggtttttcagctcaaaaaccacagctgcacattctttagttggtacgccttattacatgtctccagagagaatacatgaaaatggatacaacttcaaatctgacatctggtctcttggctgtctactatatgagatggctgcattacaaagtcctttctatggtgacaaaatgaatttatactcactgtgtaagaagatagaacagtgtgactacccacctcttccttcagatcactattcagaagaactccgacagttagttaatatgtgcatcaacccagatccagagaagcgaccagacgtcacctatgtttatgacgtagcaaagaggatgcatgcatgcactgcaagcagctaaacatgcaagatcatgaagagtgtaaccaaagtaattgaaagtattttgtgcaagtcatacctccccatttatgtctggtgttaagattaatatttcagagctagtgtgctttgaatc

SEQ ID NO: 292169 - DNA, 1000 bp, Homo Sapiens; identical to SEQ ID NO: 118487

SEQ ID NO: 292170 - DNA, 978 bp, Homo Sapiens
ttccattcacagactcttgttgggcagcagccacccgctcacctccatccccaggacttagagggacgcagggcgttgggaacagaggacactccaggcgctgaccctgggaggccaggaccagggccaaagtcccgtgggcaagaggagtcctcagaggtccttcattcagcggttccgggaggtctgggaagcccacggcctggctggggcagggtcaacgccgccaggccgccatggtcctgtgctggctgctgcttctggtgatggctctgcccccaggcacgacgggcgtcaaggactgcgtcttctgtgagctcaccgactccatgcagtgtcctggtacctacatgcactgtggcgatgacgaggactgcttcacaggccacggggtcgccccgggcactggtccggtcatcaacaaaggctgcctgcgagccaccagctgcggccttgaggaacccgtcagctacaggggcgtcacctacagcctcaccaccaactgctgcaccggccgcctgtgtaacagagccccgagcagccagacagtgggggccaccaccagcctggcactggggctgggtatgctgcttcctccacgtttgctgtgaccaacagggaggacagggcctgggactgttctcccagatccgccactccccatgtccccatgtccttcccccactaaatggccagagaggccctggacaacctcttgcggccctggcttcatcccttctaaggctgtccaccaggagcccggtgctaggggaagcatccccaggcctgactgagcggcaggggagcacggcccgtgggtttgattgtattactctgttccactggttctaagacgcagagcttctcacatctcaatcaggatgcttctctccattggtagcactttagagtccatgaaatatggtaaaaaatatatatatatcataataaatgacagctgatgttcatggaaaaaaa

SEQ ID NO: 292171 - DNA, 1000 bp, Homo Sapiens
caatactggctctgcgatgctggagcaaattgccatgtctgacagatacaagctgtgggtggacacgtgctcagagatttttgggggactggacatctgcgcagtggaagcgctacatggcaaggacggaagggatcacatcattgaggtggtgggttcctccatgccgctcattggtgaccaccaggatgaagacaaacagctcatcgtagagctcgtggtcaacaagatggctcaggccctgccccggcagcgacagcgggatgcctcccctggcaggggctcccatggccagactccgtccccaggggccctgcccttgggccgccagacctcccagcagcccgcagggcccccggctcagcagcgacccccaccacagggcggccctccacagccgggtccaggcccccagcgccagggacccccattgcagcagcgcccgcccccgcagggccagcagcacctttcaggccttggacccccagctggcagccccctgccccagcgccttccaagtcccacctcagcgccccagcagcccgcgtcccaggccgcgccgccgacccagggtcaaggccgccaatcccggccagtggcgggaggccccggggcgcctccagcagcccgcccgcccgcctctccgtctccccagcgccaggcgggccccccacaggctacccgtcagacatccgtctctggcccggctccgccaaaggcctctggggccccaccgggcgggcagcagcgccagggcccgccccagaaacccccaggcccagccggccccacacgccaggccagccaggcgggtcccgtgccccgcactgggccacccaccacgcagcagcctcggcccagcggcccgggccccgctggacgtcccaaaccacagctggcccagaaacccagccaggacgtgccgccacccgccaccgccgctgcagggggacctccgcacccccagctcaaagccagccccgcccaggcccagccttag

SEQ ID NO: 292172 - DNA, 1000 bp, Homo Sapiens
cataacaacaatatctctgtagttggatcaagtgacttctgcccacctggacacaacaccaaaaaggcttcttattcgggtgtgagtcttttcagcaacccggtccagtactgggagatacagccatccaccttcagatgtgtctacgtgcgctctgccattcaactcggaaactataagtaattctcaagaaagccctcatttttataacctggcaaaatcttgttaatgtcattgctaaaaaataaataaaagctagatactggaaacctaactgcaatgtggatgttttacccacatgacttattatgcataaagccaaatttccagtttaagtaattgcctacaataaaaagaaattttgcctgccattttcagaatcatcttttgaagctttctgttgatgttaactgagctactagagatattcttatttcactaaatgtaaaatttggagtaaatatatatgtcaatatttagtaaagcttttcttttttaatttccaggaaaaaataaaaagagtatgagtcttctgtaattcattgagcagttagctcatttgagataaagtcaaatgccaaacactagctctgtattaatccccatcattactggtaaagcctcatttgaatgtgtgaattcaatacaggctatgtaaaatttttactaatgtcattattttgaaaaaataaatttaaaaatacattcaaaattactattgtatacaagcttaattgttaatattccctaaacacaattttatgaagggagaagacattggtttgttgacaataacagtacatcttttcaagttctcagctatttcttctacctctccctatcttacatttgagtatggtaacttatgtcatctatgttgaatgtaagcttataaagcacaaagcatacatttcctgactggtctagagaactgatgtttcaatttacccctctgctaaataaatattaaaactatcatgtgaaaaaaaaaaaaaaaaaa

SEQ ID NO: 292173 - DNA, 1000 bp, Homo Sapiens
tccctggcttgctgctgagctaaaggaccagggacgtggaaacaggaggtgaactaaggcaccccgccacccactgtggcagcttgaatttcttgaggctgagacaaactaggatccagtagcctagattttgccccagtttctccactgagtatttactcagtgctcctgagccgatgccttcccctctgcctagatgaaccacagcattttggtaaatgcctcagcatgttaggagcgctggaacgtttattctcttccctcccaattatccactctaatggagcagaacacttacatggaaaatcctaaacatggaagatgatttaaaaatgattcaccctggaatacatgcttccagttgcttctacaggtttaccttgctaaaggcatttcgcttcctttgctgttacaataagcttgcctgccttgaagaaaagaagaccagggccaaagggaaatcagtcaagggagcctgttttgtctgaaataatgcatccatgaacaaatgaattgagtataactgtctttttacatcagtgtttctgtggaattaagagaacatccaaggccactcctagcttgagtagattaaatttgtccttgtgtttggagcaagggttgtgaagtctgtctggcccatcaaatgaccaatggcttttaaggaaggactaagtgacttatgaccagaacaagggagcagcctgagtcagtctccccaatgtctacattgtgttatttatactagcaaaaaaatagacacaactaaatgttcgaccatatggtattggttaaattaacatctatacgatggaatactagatggtcattaaaattatgtgtcagaagaaggcttaatctcatgggaaagtgttcacaccatattattaaagagaaaaaacagattataaagcaatatgcatacaatgtagtagttctgtaagaaaaaagtattatgtgcattttaactggaaaaatatgtataaaaatgttaacagtg

SEQ ID NO: 292174 - DNA, 1000 bp, Homo Sapiens; identical to SEQ ID NO: 223894

SEQ ID NO: 292175 - DNA, 1000 bp, Homo Sapiens
ggataagtagggctaagccagttggatctctggttgtctagtcattgtcataagtaaacctagtaaaaccttgttctatttttcaatcatcaaaaagtaattataaatacgtattacaaacaagtggatgtttttaatgaccaattgagtaagaacatccctgtcttaactggcctaaatttcttctggtagtgtcagttcaactttcagaagtgccacttaaggaagtttgatttttgtttttgtaatgcactgtttttaatctctctctctttttttttttttttttggttttaaaagcacaatcactaaactttatttgtaaaccattgtaactattaaccttttttgtcttattgaaaaaaaaaatgttgagaagcgtttttaacctgttttgttaatgctctatgtttgtatttggaatatttgaataatgacagatggtgaagtaacatgcatactttattgtgggccatgaaccaaatggttcttacttttcctggacttaaagaaaaaaagaggtttaagtttgttgtggccaatgtcgaaacctacaagatttccttaaaatctctaatagaggcattacttgctttcaattgacaaatgatgccctctgactagtagatttctatgatccttttttgtcattttatgaatatcattgattttataattggtgctatttgaagaaaaaaatgtacatttattcatagatagataagtatcaggtctgaccccagtggaaaacaaagccaaacaaaactgaaccacaaaaaaaaaggctggtgttcaccaaaaccaaacttgttcatttagataatttgaaaaagttccatagaaaaggcgtgcagtactaagggaacaatccatgtgattaatgttttcattatgttcatgtaagaagccccttatttttagccataattttgcatactgaaaatccaataatcagaaaagtaattttgtcacattatttattaaaaatgttctcaaatac

SEQ ID NO: 292176 - DNA, 1000 bp, Homo Sapiens; identical to SEQ ID NO: 222433

SEQ ID NO: 292177 - DNA, 1000 bp, Homo Sapiens
gcgagtccctgatgaagctggtgtccgacctcaagcagttcctgatcctcaatgacttcccctccgtgaacgaggccattgaccagcgcaaccagcagctgcgcacactgcaggaggagtgcgaccggaagctcatcacgctgcgagacgagatctccattgacctctacgagctggaggaggagtattactcgtccagctcaagcctttgcgaagctaatgacctgcctctgtgcgaagcttacgggaggctggacctcgacacagactctgctgatggcctctcggcccctctgctggcgtccccggagcccagtgctggccccctacaggtggcagcccctgcccactcccatgctggtggccctggccccactgagcacgcctgagcctccggggccacgcttcgttctcaggaacaaaacctgaggcagccctttggatgccctcacagccttgcttctctcagcctaggttcccatttggggacttcaggaccccagagccactaggacttccttgggaagcccgttagcccagggtgggtcccgccaggacagtagggaaacagttgtttccctagccatttccgaatagcccatcattccgagtcatcatctctgtttgctgccttcctggccagccaggtggaagaaagtttccaagctaggtctggcccgttggggatctcagcagtggggcaggagggtgcctgatttcggggagtcctgacccgagcctgttgtcagagttgggaggggctctgagcagtgttgggcaggccgggtctcccatcccgaggccagcgttcctgtgcagagccccatccactggttcttgccctgagccacatatgtctgtgccatgggctgagtgccacgacaggcccgtgtgacagctgctgcccacgcatgtggaagctaggtgggactcattcctaattctgccgttgtaatgagacttgattaaaacaccgccacttttttgcaaaaaaaaaaaa

SEQ ID NO: 292178 - DNA, 1000 bp, Homo Sapiens; identical to SEQ ID NO: 223900

SEQ ID NO: 292179 - DNA, 1000 bp, Homo Sapiens; identical to SEQ ID NO: 223901

SEQ ID NO: 292180 - DNA, 1000 bp, Homo Sapiens
atccccattaaaaatcaaggaattaggggtcgggggagggtttaggagtgatccagaatgacctcccagaattactgtgcgtacaactttatttttcagagttttcattggaatggtaagagttttatgaaagacagttttaaaacttattctgagttaaatattaatactttaaaaaattattgtactagacttattgcagccttttgaaagtagcagagtttcatcataccacatatataacagagcataaattttctataatcaggcaccttttgctgcttttgagtaagactgttttcctgtttaagtgttaagcatcgccagacataaaaatctattctctcctctcgattgtagcatagcctgacagctctagatacagcatttctatgatgaaaaatgagtatccatcaggaaatctagaagactagccgtgttttctcagactccacctttgtttgcactctgttgcctgtgaggagctttctggcatgtgattatttacttcaaaactagagttccaagcacctacattaattattttatattgtgtgcagaatagtatatcttttaatgtcagatatgatacactgcacatattgcttttgcactcttaaaatttttgtactaaataatagaaaatatttatattctttgagtgtgagctttgaatagatggcattatcactttattgtttttttaacaaaaactttttctcaattattctattgcaatgttattctgagcaagtcctatgccaaatatcttgtataatgtttgtatggaagattaaattttactcttgtgtggtaagactatttcagttactgattttatagttggaatttgatattccagcacaaagtccacagtgtattcagaaatccaagttggtgtcatacatttcattttgatgtgaacttttctttgctttcctttgttctaagactccattttgcaataaacgttttgacagtaaaaaaaaaaaaaaaaaaa

SEQ ID NO: 292181 - DNA, 1000 bp, Homo Sapiens; identical to SEQ ID NO: 222448

SEQ ID NO: 292182 - DNA, 1000 bp, Homo Sapiens
catatgatggtttcgcaagaatatggacagaaaatggtaacctggccagcaccttaggccaacataaaggccccatcttcgctctgaaatggaacaaaaaggggaattatgttttgagtgctggtgtagacaaaacaacaataatttgggatgctcacacaggagaagccaaacagcagtttccttttcattcagcccccgcccttgatgtggactggcagaacaacatgacctttgcctcctgtagcacagacatgtgtatccatgtgtgcaggctcggctgtgaccacccagtcaaaaccttccagggacacacaaacgaggtcaatgccatcaaatgggatccttctggaatgttgctggcgtcctgctcggatgacatgacattgaagatctggagtatgaagcaggatgcatgcgtccacgatcttcaggctcacagcaaagagatctacaccatcaagtggagccccaccgggcctgccaccagcaacccaaactccagcatcatgttggcaagtgcttcatttgattctacagtgcgactgtgggatgtggagcaaggtgtctgcacccacacactcatgaagcatcaagagcctgtctacagtgtagctttcagccccgatggaaagtacttggctagtggatcctttgacaagtatgttcatatctggaatactcagagtggaagtctcgtccacagctaccaaggcactggcggtatcttcgaggtgtgctggaacgcccgaggagataaagtgggcgccagcgcgtctgatggctctgtgtgtgttctggatctgtgaaagtaaacacaaaatatagaaaaaaagaaaagaattctaatgacctgccttgaatgcatggggttgcagctctgttcaaacacaattctatcagctccaaaatgtgtgaacttgacttgtgttagagtatattctgaaaccaacttgtcccaggccacaggagtgtatatgtttcataatctttatcaaga

SEQ ID NO: 292183 - DNA, 1000 bp, Homo Sapiens; identical to SEQ ID NO: 118490

SEQ ID NO: 292184 - DNA, 1000 bp, Homo Sapiens; identical to SEQ ID NO: 223904

SEQ ID NO: 292185 - DNA, 1000 bp, Homo Sapiens
tctgctgtcagcactgttaccaagactgagcggctcgtccactccaatgatggcacacggacggcccgcaccaccacagtggagtcgagtttcgtgaggcgctcggagaatggcagtggcagcaccatgatgcaaaccaagaccttctcctcttcctcctcatccaagaagatgggcagcatcttcgaccgcgaggaccaggccagcccacgggccggcagcctggcggcgctcgagaaacggcaggccgagaagaagaaagagctgatgaaggcgcagagtctgcccaagacctcagcctcccaggcgcgcaaggccatgattgagaagctggagaaggagggcgcggccggcagccctggcggaccccgcgcagccgtgcagcgatccaccagcttcggggtccccaacgccaacagcatcaagcagatgctgctggactggtgtcgagccaagactcgcggctacgagcacgtcgacatccagaacttctcctccagctggagtgatgggatggccttctgtgccctggtgcacaacttcttccctgaggccttcgactatgggcagcttagccctcagaaccgacgccagaacttcgaggtggccttctcatctgcggagacccatgcggactgcccgcagctcctggatacagaggacatggtgcggcttcgagagcctgactggaagatgctggtggactgtgtgcccctggtggaggtggacgacatgatgatcatgggcaagaagcctgaccccaagtgtgtcttcacctatgtgcagtcgctctacaaccacctgcgacgccacgaactgcgcctgcgcggcaagaatgtctagcctgcccgcccgcatggccagccagtggcaagctgccgcccccactctccgggcaccgtctcctgcctgtgcgtccgcccaccactgccctgtctgttgcgacaccctcccccccacatacacacgcagcgttttgataaattattggttttcaacg

SEQ ID NO: 292186 - DNA, 1000 bp, Homo Sapiens
ttccatctgtagtcctaaccaggagcccccccatggaactgcagccccctgtctcccctcagcagtctgagtgcaaccccgttggtgctctgcaggagctggtggtgcagaaaggctggcggttgccggagtacacagtgacccaggagtctgggccagcccaccgcaaagaattcaccatgacctgtcgagtggagcgtttcattgagattgggagtggcacttccaaaaaattggcaaagcggaatgcggcggccaaaatgctgcttcgagtgcacacggtgcctctggatgcccgggatggcaatgaggtggagcctgatgatgaccacttctccattggtgtgggctcccgcctggatggtcttcgaaaccggggcccaggttgcacctgggattctctacgaaattcagtaggagagaagatcctgtccctccgcagttgctccctgggctccctgggtgccctgggccctgcctgctgccgtgtcctcagtgagctctctgaggagcaggcctttcacgtcagctacctggatattgaggagctgagcctgagtggactctgccagtgcctggtggaactgtccacccagccggccactgtgtgtcatggctctgcaaccaccagggaggcagcccgtggtgaggctgcccgccgtgccctgcagtacctcaagatcatggcaggcagcaagtgaagccccagctggactcatggatgtgcaccctttgctccctgctctttctgcctctgggctcatgtatctgcgcagctctggtaccctctgtgggtgccatctctacctctgacacagactgcctgccttgaagctgagaaggcacagggcaaggagccaaggaccacagagcctcagccagcccaggatccgtcctcattttattggtgatgatgaatgggaatgaaatcagggggctgtctactagagcctggaataaatatgctgctttgtggatttttaaaaaaaaaaaaaaaaaa

SEQ ID NO: 292187 - DNA, 1000 bp, Homo Sapiens
tgtcgtctgtgatgaagatgccggaggatgagtccaccccggagaagcgcacagacaagatcttcaggcagatggacaccaacaatgacggcaaactgtccttggaagaattcatcagaggtgccaagagcgacccctccatcgtccgcctgctgcagtgcgaccccagcagtgccagtcagttctgagcgagcggcccctggacagttgcagagaaacacaggcttgtcgtgccgtttaagctttgcttgcaagagtggatgccccgcaatcgttcctgctctcccgggccccgggcctggggcatgcgttgcacctgcccggcccggtggctgcgcctccctcctccacctgaccaacgcgacattcctcccctcacgcctggcccggtcccttccagggcaactcccagggatgtggtgacatgcagggttcaagtgttcttggttccaggcacctcccggctcacggggagctcagaggtccatgccgaggagaccaggcaggacctcccgaggctgcgccccggccggcccatgcgttttgtgatcccaagtgactctgtgggaagggtggggacgaggcgtcgggagggtatacagggagcccctcccgtgcatggctgcccccccgttcattttctccaccacagccgcttgcacgtatagatactgtggtcccctttcttttaatatataaattatgtatggtgaagtggagtgtattgtgtaggtcccgtatttaatgcctctgactgcctttgaagcgcagccctctgtggcccgcagccccctgagcctggctgttgtgtggtatttatgctctctttgtctgcctgtttctaaggaaatgcatgtgtgccctgagccgtgatgatcctcccatccgtgttgtgagcacaggcatttgtgtctggtctgtcctccctgttgattggtctggcatttccggtattaaaatgataaaataaatggcattttctgaaaaaaaaaaaaaaaaa

SEQ ID NO: 292188 - DNA, 1000 bp, Homo Sapiens
ggctgcgtggcttgacaatgtgatgatgcaagcactgaaaccctatgaaggaagacccagttttcctaaagccgccaggcagtttctgctaaaatggtctttctacagctcaatggttattcgggacttaaccttacgcagtgctgctagctttggctccttccacctgatccgtctactctacgacgaatatatgttttacttagtagaacatcgtgttgctcaggcaacaggagagactcctatagcagtcatgggcgagtttggtgatttaaatgccgtgtctcctggaaatctggataaagatgaaggcagtgaagtagaaagtgaaatggatgaagaactggatgactcttcagagcctcaagccaaaagagagaaaacagagctgagccaggcatttccagtgggctgcatgcagcctgttctcgagactggcgtgcaaccaagcctcctgaatccaattcacagcgagcacattgtcacaagtactcagactatcagacagtgcagcgctacaggaaatacctacactgcagtctaaagaatattaaagcgtatttttccagcttacattaaccctgttgatattgggcttaagttgaaaatttaataagcctgaaggtcgactgttgtcaaattctatctgtgctgaacattaactttttggagttgtgaaatggaatgggtgtatgtattttgccagatctttttttttaacgtaaacaaattatttgcttcttaataatgaattttttcccttagtttcaggtgtcaagaaggatttttacaacacttaatgtcaatgttttgttttcttataattaaaaagtaatttacattttttgtagcttaaaatattttattgttgattgttagtcttggtgtatgatttcatgtgtaagttttttaattagatgcacttctgtgaaatatcaaaaaaaaaaaaaaaaaaaaaaaaaaaaaaaaaaaaaaaaaaaaaaaaaaaaaaaaaaaaaaa

SEQ ID NO: 292189 - DNA, 1000 bp, Homo Sapiens; identical to SEQ ID NO: 291316

SEQ ID NO: 292190 - DNA, 1000 bp, Homo Sapiens
aaaaaaacctgatgacatcactattgatgtcaccattaacgaaagtataagtcatagtagaacagaagatgaaacaagaactcagattttgagcatcaagaaagttacctctgaggatctcaagcgcagctatgtctgtcatgctagaagtgccaaaggcgaagttgccaaagcagccaaggtgaagcagaaaggtaatagatgcggtcagtgatgaatctctcagctccaaattaacattgtggtgaataaggacaaaaggagagattgagaacaagagagctccagcacctagcccgacggcatctaacccatagtaatgaatcaaacttaaatgaaaaatatgaaagttttcatctatgtaagatactcaaaatattgtttctgatattgttagtaccgtaatgcccaaatgtagctaaaaaaatcgacgtgagtacagtgagacacaattttgtgtctgtacaattatgaaaaattaaaaacaaagaaaatattcaaagctaccaaagatagaaaaaactggtagagccacatattgttggtgaattattaagacccttttaaaaatcattcatggtagagtttaagagtcataaaaaagattgcatcatctgacctaagactttcggaatttttcctgaacaaataacagaaagggaattatataccttttaatattattagaagcattatctgtagttgtaaaacattattaatagcagccatccaattgtatgcaactaattaaggtattgaatgtttattttccaaaaatgcataattataatattattttaaacactatgtatcaatatttaagcaggtttataatataccagcagccacaattgctaaaatgaaaatcatttaaattatgattttaaatggtataaacatgatttctatgttgatagtactatattattctacaataaatggaaattataaagccttcttgtcagaagtgctgctcctaaaaaaaaaaaaaaaaaaaaaa

SEQ ID NO: 292191 - DNA, 1000 bp, Homo Sapiens
cacgcccctctcccccactttcccatgatgaaatatcactaataaatcctgtatatttagatattatgctagccatgtaatcagatttatttaattgggtggggcaggtgtgtatttactttagaaaaaatgaaaaagacaagatttatgagaaatatttgaaggcagtacactctggccaactgttaccagttggtatttctacaagttcagaatattttaaacctgatttactagacctgggaattttcaacatggtctaattatttactcaaagacatagatgtgaaatttaggcaaccttctaaatcttttcaccatggatgaaactataacttaaagataatacttagaagggttaattggaaatcagagtttgaaataaaacttggaccactttgtatacactcttctcacttgacattttagctatataatatgtactttgagtataacatcaagctttaacaaatatttaaagacaaaaaaatcacgtcagtaaaatactaaaaggctcatttttatatttgttttagatgttttaaatagttgcaatggattaaaaatgatgatttaaaatgttgcttgtaatacagttttgcctgctaaattctccacattttgtaacctgttttatttctttgggtgtaaagcgtttttgcttagtattgtgatattgtatatgttttgtcccagttgtatagtaatgtttcagtccatcatccagctttggctgctgaaatcatacagctgtgaagacttgcctttgtttctgttagactgcttttcagttctgtattgagtatcttaagtactgtagaaaagatgtcacttcttcctttaaggctgttttgtaatatatataaggactggaattgtgtttttaaagaaaagcattcaagtatgacaatatactatctgtgttttcaccattcaaagtgctgtttagtagttgaaacttaaactatttaatgtcatttaataaagtgaccaaaatgtg

SEQ ID NO: 292192 - DNA, 1000 bp, Homo Sapiens; identical to SEQ ID NO: 223906

SEQ ID NO: 292193 - DNA, 982 bp, Homo Sapiens; identical to SEQ ID NO: 220433

SEQ ID NO: 292194 - DNA, 1000 bp, Homo Sapiens; identical to SEQ ID NO: 118491

SEQ ID NO: 292195 - DNA, 1000 bp, Homo Sapiens
taatttggaaaactgagcttctttctttcattgctttttcccttaagagacaagtccttactatattgccctgtctctcaagggaagacatcaagactggacttgaactcctgggctcaagccatcccccaaccttggcctctcgagtagatgggattataggcatgtgccacggtgcctgacttgagtttcttattctagaacacttggagcctgaactctgaccaggcccctcacttgagcctttgctttctgctccttgtaaactgccatattgggtgcacttgccctgccacagtaatgctatatatttctgagcattgtttttctctagataattttatatttttgagtataccccacttccaagtgttttttgttttgttttgctttgtttttgttgttgttgttttgagacagggtctcactgtgtcccccaggctggagtgcagtggcacaatgacgactcactgcagcctcaacctcctggggccaagtgatcctcccacctcagcctctcaagtggctgggaccacagaagtgcaccaccatgcctggcttttttttttttttggtcgagatggggtgtccctgtgttgcccagactggtcttgaactcctggactcaagggatcctcctgtcttgggctcccaaagtgttgggattacaggcgtgagtgaccatgcctagctcacttccaggtttaacagacaaaataaacttactctagtttccatctctatcattttataataaccgtagcccacattgtagtagtttttcagctctttactaagtcccaccaattcatgttttcacccttaaaatctttctcactgatactctctctggacagaaaaaaggtgaaataagcctactataaggaatatatgacatgctaaattttatttttaaacggttcttcaagtcagattaaagtaataatagcaaattatgtgattatccatgtcccagcctctctccaaaaaaaaaaaaaaa

SEQ ID NO: 292196 - DNA, 1000 bp, Homo Sapiens
aactctggaaacatctctttgagcgggagcttggagtaaaacccagccaacagcctgtacttatgaccgagccctctttgaatcctagggaaattcgagaaaagctagcagaaatgatgtttgagaccttcagtgtgcctggtttctacctgtctaatcatgcggtggcagcgctctatgcctctgcctgtgtcacaggcctggtggtggacagtggagatggggtcacttgcactgtccccatctttgagggttactccctgcctcacgcagtcaccaaactctgtatggcagggagggacatcacagagcacctcacccggctcctctttgctagcgggtttaacttcccttgcatactcaacaaggccgtggtaaataacatcaaagagaagttgtgctacatcgccttggagccagagaaagagctacgcaagagccggggagaggtcctgggagcatacagactgccagatggacatgtcatccactttggggatgagctgtaccaagtgcccgaggttctttttgcacctgaccagctgggcatccacagcccaggactctcaaaaatggtctccagcagcatcatgaagtgtgacactgacatccagaataaactttatgcagacattgtactctccgggggcaccactctcctccctgggctggaggaaaggctcatgaaggaagtggaacagctggcttccaaaggtactcccatcaagatcacagcttctcctgatagatgcttctctgcatggattggtgcatccatcatgacctctatgagcagtttcaagcagatgtgggtcacctcggcagacttcaaggagtatgggacatctgtggttcaaagaaggtgcttttaaagatccttgagcagaggagacatcttgaagtgtcagattacaggagtaccagtgggagatggcattttcttctgggcttcagcatgatgttcaataaaagttttgccattccaaaaaaaaaaaaaaaa

SEQ ID NO: 292197 - DNA, 1000 bp, Homo Sapiens
ttaccctggaacagaagggttaccttgaagaactcttacgacttcgagagaaccaactatctgaatctgtctcccagaataaaatactacttcaaaggattgaagattccgatctggctcataaactggagaaggaacaattagaatatataattgtggagcttcaagatcagctgactgtgctaaagaataatgatttaagatcgagacaagagttaactgcccatctcaccaaccagtggccttctccaggagctctggatgtcaatgctgttgccttggatacgttgctttaccgaaaacacaataaacagtggtatgagaaaagttatcaaagtcttgaccagttatcagcagaagttagcctttctcagacttcactagatccaggccagtcacaagaaggagatggaaaacaagacacattaaatgtaatgagtgaaggtaaggaagatactccctcattacttggcctctgtggatctctaacgtcagtggcaagttacaagtctctaacaagcttaaaatctaatgactaccttgcaagtcctacaacagagatgacaagtccaggcctaactccatcctgaaaatttttgtgtaaaagccaaaactttttatgttgtaaatgtttaatttacatgtttgactgctgggaagacctttgaaattttatattgttctggtacatgtctgaaattctattgcttggagagaatcccctccagataagagattttgagtgaaaaacataatgatcctgccatttttcatttttaaaattcttacatttgtcattgagaaagttcaaaatggaataggctttaaaaaaaaaaaaactttcaaagatccgccaaatcattcatagcaaattgtacatattgttcagctgatttttatatatttaaatacaccttagtggccagagactgacttcaaggttttattccagagactccagagacttaagctaagtattttttcattctttcagattttc

SEQ ID NO: 292198 - DNA, 1000 bp, Homo Sapiens; identical to SEQ ID NO: 220475

SEQ ID NO: 292199 - DNA, 1000 bp, Homo Sapiens
ggctgtcctgaaagtctggactttggtggtaccctcctcccccagcccatctgttgcacattatactccgtgtgttcttcaactttcggcgcccttattcccctgccttcctggcttgattgaaggaaagcttgaaaaggcgcagagccctatacctcatttcctccatgataaaaggatccaagtgaggccctgtcacagcctgtgggtaggggatgcggcgggatcctcattgccatggtactcaaaggtagaagagcctggagtttgttgcttctctttgctattctttcatatcctcttgggcctggtgattaattagcaattctcattcctctcagccaaaggcctgcactgggctttatttgtctttttttattttttaagcactgcctgccagagatgggcctggggcctgatgaggaccttagcgctgctcgttctccttttctgttcatgcacacattcctccatggggtggggaaggcaggcatggggtgtggccctcggagaagttaggagtcccccagctcaagatacagtggcaaagacctagtggtcccctacccccacttctctcagttcctggcatgaggagagaagaccctgctctggtggagctgacaacctttgaggctgggaggagagcagcctctgggcatcgttcccagtgtccctcacactaaaacggcgtagatggcaaccccccacccccaccccgctgctcaactcttgtgtttgttgttctgtttgccccatttatctgttgctgtttttgtgttgtcttcccctgctccgcattttgtaaaatggcccctgggggagtgtttttgctggatctgctccctctcgctctctcactccactactttttggaacaaagtgatggcagaatgcggtggtggtgggggtcttttgtactgttggattaataaaatgattttaaaatcccaaaaaaaaaaaaaaaaaaaaaaaaaaaaaaaaaaaaaaaaaaaaaaaa

SEQ ID NO: 292200 - DNA, 1000 bp, Homo Sapiens; identical to SEQ ID NO: 118493

SEQ ID NO: 292201 - DNA, 1000 bp, Homo Sapiens
ttaaaaagggccggcagggcctgggctccattttcgtctgggcatctgggaatggcgggagagagggggactactgctcgtgcgatggctacaccaacagcatctacaccatctccgtcagcagcgccaccgagaatggctacaagccctggtacctggaagagtgtgcctccaccctggccaccacctacagcagtggggccttttatgagcgaaaaatcgtcaccacggatctgcgtcagcgctgtaccgatggccacactgggacctcagtctctgcccccatggtggcgggcatcatcgccttggctctagaagcaaacagccagttaacctggagggacgtccagcacctgctagtgaagacatcccggccggcccacctgaaagcgagcgactggaaagtgaacggcgcgggtcataaaggtgcggcagtggcgttctggtggaccattgggtggccctggaatgtgtaggaaggggtgtcatgaattccttaaaaggactctccaaatagcattagttgttattattaattgtgtgtcacaagaatttaaaacgcatgtgcagctatttaagaaaagtatcccggaagctcacagtgacattacggaagaaccctcaggtcacaagagtctggggtctcctatactctataactttggccacaccgagacaccacctataccaatatttactcatagttctctttaagccaggagcaatgacgtgtgcctatagtcgcagctactagggaagttgaggcaggaggattgcttgagcccaggaatttgagtctagcctggacaacacagcaggactccatctcttaaaaaaaaaattacttcccccactacttttttttgacataaaaaaatgtattttaaaaggaaactgtactacatctagttaatcataggtttgatatgtagttacgtattttttctaatgtgcattaaaacaaatccataattattaaaataaatgttgtttgtgtgcc

SEQ ID NO: 292202 - DNA, 1000 bp, Homo Sapiens
gggagagagggggactactgctcgtgcgatggctacaccaacagcatctacaccatctccgtcagcagcgccaccgagaatggctacaagccctggtacctggaagagtgtgcctccaccctggccaccacctacagcagtggggccttttatgagcgaaaaatcgtcaccacggatctgcgtcagcgctgtaccgatggccacactgggacctcagtctctgcccccatggtggcgggcatcatcgccttggctctagaagcaaacagccagttaacctggagggacgtccagcacctgctagtgaagacatcccggccggcccacctgaaagcgagcgactggaaagtgaacggcgcgggtcataaagttagccatttctatggatttggtttggtggacgcagaagctctcgttgtggaggcaaagaagtggacagcagtgccatcgcagcacatgtgtgtggccgcctcggacaagagacccaggagcatccccttagtgcaggtgctgcggactacggccctgaccagcgcctgcgcggagcactcggaccagcgggtggtctacttggagcacgtggtggttcgcacctccatctcacacccacgccgaggagacctccagatctacctggtttctccctcgggaaccaagtctcaacttctggcaaagaggttgctggatctttccaatgaagggtttacaaactgggaattcatgactgtccactgctggggagaaaaggctgaagggcagtggaccttggaaatccaagatctgccatcccaggtccgcaacccggagaagcaaggtgatcttgagactcctgttgcaaatcaactgaccacagaagagaggttcgtttccacactctcgattctgttccattggtctgtatatctatcttggagtcagtaccatattgttttgatcactgtagctttgtagtaagttttgaaataagaaagtgcgagtcctccaaaaaaaaaaaaaaaaa

SEQ ID NO: 292203 - DNA, 1000 bp, Homo Sapiens
gcgccacttcggctgcatggtttcagagcgtgtgaagcaggaggccctgcggtgggtgcagggacagggacagggctgccccggagtggcaccagaggtgaccgagggggccaaagggctcgaggacaccgaagagccagaggaggaggaggagggagaggagcccaactacccactggagttgctgtactgcctgtacgagacgcaggaggacgcgtttgtgcgccaagccctgtgccggttcccggagctggcgctgcagcgagtgcgcttctgccgcatggacgtggctgttctgagctactgcgtgaggtgctgccctgctggacaggcactgcggctgatcagctgcagattggttgctgcgcaggagaagaagaagaagagcctggggaagcggctccaggccagcctgggtggcggcagcagttctcaaggcaccacaaaacaactgccagcctcccttcttcatccactctttcaggcaatgactgacccactgtgccatctgagcagcctcacgctgtcccactgcaaactccctgacgcggtctgccgagacctttctgaggccctgagggcagcccccgcactgacggagctgggcctcctccacaacaggctcagtgaggcgggactgcgtatgctgagtgagggcctagcctggccgcagtgcagggtgcagacggtcagggtacagctgcctgacccccagcgagggctccagtacctggtgggtatgcttcggcagagccctgccctgaccaccctggatctcagcggctgccaactgcccgcccccatggtgacctacctgtgtgcagtcctgcagcaccagggatgcggcctgcagaccctcagtctggcctctgtggagctgagcgagcagtcactacaggagcttcaggctgtgaagagagcaaagccggatctggtcatcacacacccagcgctggacggccacccacaacctcccaaggaactcatctcgaccttctga

SEQ ID NO: 292204 - DNA, 1000 bp, Homo Sapiens
catacaaatgtgaagaatgtggcaaagcctttaaccagtcctcacaccttactacacataagataattcatacaggagagaaaccctacaaatgtgaagaatgcggcaaagcctctaaccagttctcaaatcttactacacataaaaaaattcatactggagagcaaccctacatatgtgaagaatgtggcaaggcttttacccaatcctcaacccttactacacataagagaattcatactggagaaaaaccctacaaatgtgaagaatgtggaaaagcttttaaccgatcctcaaaacttactgaacataaaaacattcatactggagagcaaccctacaaatgtgaggaatgcggcaaagcttttaaccgatcctcaaatcttacggaacataggaaaattcataccgaagagaaaccctacaaatgtaaagaatgtggcaaagcctttaaacactcctcagcccttactacacataagagaattcacactggagagaaaccctacaaatgtgaagaatgtggcaaagcttttaaccgatcctcaaaacttactgaatataagaaacttcatactggaaagaaaccctacaaatgtgaagaatgtggcaaagcttttatccaatcctcaaaacttactgaacataagaaaattcattctggagagataccctacaagtgtgaagaatgtggcaaagcttttaaacactcctcatcccttactacacataaaagaattcatactggggagaaaccctacaaatgtgaagaatgtagcaaagcttttagccgatcctcaaaacttactgaacataagataattcatactggagagaaaccctatgaatgtgagagatgtgacaaagcttttaaccaatctgcaaaccttactaaacataaaaaaatacatactggagagaaactacagaactggaatgtgtgataatgattttgacaacacctcaaatttttctaaatataaaggaaatcatactggtg

SEQ ID NO: 292205 - DNA, 1000 bp, Homo Sapiens; identical to SEQ ID NO: 118494

SEQ ID NO: 292206 - DNA, 1000 bp, Homo Sapiens; identical to SEQ ID NO: 223910

SEQ ID NO: 292207 - DNA, 1000 bp, Homo Sapiens; identical to SEQ ID NO: 118495

SEQ ID NO: 292208 - DNA, 1000 bp, Homo Sapiens; identical to SEQ ID NO: 118496

SEQ ID NO: 292209 - DNA, 1000 bp, Homo Sapiens
gggaggaatgtcttgctaaggagcagctcccacagaggcagcatccagaagctgcccagcctggccaggtgcccatgaggaaaagacagctgcccgcttccttctgggaagagccaaggcccacccacagctaccatgtggggctggaggggggactgggccccagggagggacctccctatgagggtaagaaaaattgcaagggcttggagcccctgggacctgagactaccctggtgtccatgtctccaagggccctggctgaaaaggagccgctcaagatgcctggggtctccttggtgggccgcgtcaatgcctggagttgctgccccttccagtaccatggacagcccatctatccgggccccctgggggcactgcctcagagtcctgtccccagcctgggcctttggaggaagagcccagcctttcccggggagctggcgcacctctgcaaggatgtggacggcctggggcagaaggtgtgcaggcccgtggtgctgaaacccatccccaccaagccagccgtgcccccacccatcttcaatgtctttggctacctctagccacgcggagagggcctcagcccccacctctggcctgcaggagtgtcgaggtccccgaggcgctctcctgtgaggaggtggctgggccacagtgtggcctcttccgtttgtgtgcgcatgggagtggagggcaggattggggcagggctcctcaggcagtgacccttcagccttgcagccttggaagctgggaggctggacctggttggcccctccccaggcaggccagggcccagcagcttgtcccgctgtccctgtgcagaccataggtactgggatgttgcccttccttgccttgcagtcaccccagaagccagagagacgcatctgtttacctgccacccactctgcgagccaatctcagttgttgttcttgttcttcttgttctttgtaaatattgagaaagttaaaagaataaagacatttcttttgg

SEQ ID NO: 292210 - DNA, 1000 bp, Homo Sapiens; identical to SEQ ID NO: 223912

SEQ ID NO: 292211 - DNA, 1000 bp, Homo Sapiens
aagcctttcagggcctgctccctccgagccaactcccggtagagggaggctgtgccgaagagggtgtgtgcaggccctggctctggcctttgctctgcggagctggcggccccctggcacagaggtgacatctcaagggcccaggcagccctcttctagtggtgccaagaggcggaggctgcgggctgcccttggtccccagcccactcgctcagccctgaggtttccctctgcttccccagggagcttgaaggccaagcagtccatggcgggaatccctggtagggagagtaatgccccatctgtgcccactgtctccctgctgccgggggcgcctggaggcaatgccagctccaggacagaggctcaggtgcccaacgggcaaggcagcccagggggctgtgtctgttcaagtcaggcttccccggcccctcgcgcagcagcgcctccacgggcagcccggggccccaccccacgcactgaagaggccgcctgggctgccatggccctgaccttcctgctggtgctgctcaccctggccacgctctgcacacggctgcacagaaacttccgacgcggggagagcatctactgggggcccacagcggacagccaggacacagtggctgctgtgctgaagcggaggctgctgcagccctcgcgccgggtcaagcgctcgcgccggagacccctcctcccgcccacgccggacagcggcccggaaggcgagagctcggagtgacggcctgggacctgccactgtggcgtgcggctcctccccgcgccgcgaggccgcgacctctgccacgtggaccgcgcgcggggcgctccctggtggcgatggcgcggcactggccgagcactgcgggggctttcctccttgttggttgctgagtgggcggccaaggggagaaaaggagccgcttctgcctcccttgccaaaactccgtttctaattaaattatttttagtagaaaaaaaaaaaaaaaaaaaaaaaaaa

SEQ ID NO: 292212 - DNA, 1000 bp, Homo Sapiens; identical to SEQ ID NO: 118498

SEQ ID NO: 292213 - DNA, 1000 bp, Homo Sapiens; identical to SEQ ID NO: 223913

SEQ ID NO: 292214 - DNA, 1000 bp, Homo Sapiens
ctctggctgcggggccgtggccgcctgcgctacgtcaacctggggctctgctcgctggtgtacgaggcgcccttcgacgcccaggccagcctctaccaggcgcgttgccgctacctgcagccccgctggaccgacttccccggccgggtcctggacgtgggcttcgtgggtcgctggtgggtgctgggggcctggatgcgcgactgcgacatcaacgacgacgaattcctgcacctgccggcgcatttgcgggtggtcgggccccagcagctgcattccgagaccaacgagcggctcttcgatgagaagtacaagcctgtcgtgctcaccgacgatcaggtggaccaggcgctgtgggaggagcaggtcttgcagaaggagaagaaggacaggctcgccctgagccaggcccactcgctggtgcaggcggaggccccgagatgaaaccctgaggcccccgagtcctggcaaactgcttgcctggggtggtgcagttctgagtgtgcctcacctgcagaacagctgagacagatgatgtgcaaagtgttttctcactggatttgcacaagtttggggagcctttctgccccccgtctttgttctttattagctgaagctaattcagagccacctgggtccgggagttggggacagcagaacgacttgacacatgttcatcactggcagagctggtcatgagccttttatataagcctttttcatcgggcctcagaggccctccttaaggaggtaccacattggtcagctgacttgcaaactcttctaaggccacttagattttctttttcaagtttgggttgtggcctggcatggtgatgtctgtaatcccagcagtttgcaaactgaggcaagagaatcgcttgaggccaggagtttgaggccagctagagtgacatagcaagactccgatgctacaaaaaagaataataatagtaattaactaaataaaatttgagctgaaaaaaaaaaaaaaaaaaaa

SEQ ID NO: 292215 - DNA, 1000 bp, Homo Sapiens
tcattccacccagcccaaaaggaataagagaaaccctatctttcaggattctcaagatacagaggtattttcatggagtgataatgaaaggagcagcagccgcattaatatcccagagagagcaagtggaccagaaggcaacttaaaccagattgttactgaacccgatgcaaactttccccagttcttgcatgagggattgtctaaacctgtttatgtcataaactggtttatgtcctttggtcctgaaataaaactcaatacttcacagcagggaaggaaccaagctgtttaaaactacttatctccgctatgaaggagaagtattttcaaggaatatcagaagaaagtagaaagtgagaggaggttccagctgggcttcctgggtcaagtaggggctcagaaagctgtgaaactcactcatttcctgcatgcggacttactttggtcctggatgaataatattgaagatatgtgcttaaaacattcctaacatcagaatttgcgcctgtgttttcttccccaagaaagctataaacagcgaaaattttgttgtaagcttccctgtgtcctctctccctctctcccttccccctctcctgaaactaaaaggaatgttaaaagcccacttttctgtgaccagcagaccttatctatggtcccaattccaattccttgtaaacacaatttgtaaaatcccgtgagatcctgtctcctttgccatcccgctgcaaggttataagtagagaaaacttaagttacaattccagttttcctcaagatctgagacatgttaattgtctttgtttctccctctggtaacatcttcccaccacacatatttcctgccttagagagtttaaaaggtgataaaaaaatctaacactggctaccccgctcgggaccccttccacgctgtgaaagctttgtactgtcactctgcttaataaagcctacagcttttttactctcaaaaaaaaaaaaaaaaaaaaaaaaaaaa

SEQ ID NO: 292216 - DNA, 1000 bp, Homo Sapiens; identical to SEQ ID NO: 118499

SEQ ID NO: 292217 - DNA, 1000 bp, Homo Sapiens; identical to SEQ ID NO: 223916

SEQ ID NO: 292218 - DNA, 1000 bp, Homo Sapiens; identical to SEQ ID NO: 118501

SEQ ID NO: 292219 - DNA, 1000 bp, Homo Sapiens
tgcacagaggccccggagctgggtgaggccagaaagctgctctggggtcagcggggaatgtgcctgctgaatctgtacctgagctacgtcttcacaaatggcctcagacctagagtgcagggagatcccctggcttttctgaagtggtggcaggtggtctcctgggtagcaggatctgggctgcttacttcccttacccagtgagggcccgcggggagctcttaagttgggcatcatggggctgcgtgatgtggctgctgtgcccacatcagagggtttttgtttcttttccaaagtcaagctgcactaatctagaccagggatccccacccctgggctgcagaccggtccccatgggtggcctgttaggaactggaccgcacagcaggaggtgagcagtgggtgagtgcgcgtgaccacctgagctctgccttctgtgagatcagcagcgccactgcatctcagaggaatgccaaccctactgtgaactgtgcatgcgagggatctgggttgcatgctctttatgagatcaaactaatgcctgatgatctcaggtggaacagtttaatcctgaaaccatccccccatctgtggaaaaactgccttccactaaaccagtccctggtgccaaaaacactgggaaccgctaatctagacagttctctgctaaggaagcacgtggttgagaagcatcagaatcgttcccacggaccatgctccggagtctcagcaggctcctgcagtgtgtttatccgtgcatcatgaaggaccctcatacggctgacgtgccttggctgatgcgaataacactgcagcaagcgtggcagtgcagatagctcttggaaatacccatttccttcagacgcatactcagaggtaggattgctggattgtttggtcattttgatttttaaaattaaaaagaattttaattctcatattgttttgagtaaaattaaattataacttgtaaggcaaaaaaaaaaaaaaaaaaaaaaaa

SEQ ID NO: 292220 - DNA, 1000 bp, Homo Sapiens; identical to SEQ ID NO: 118502

SEQ ID NO: 292221 - DNA, 1000 bp, Homo Sapiens; identical to SEQ ID NO: 223921

SEQ ID NO: 292222 - DNA, 1000 bp, Homo Sapiens; identical to SEQ ID NO: 223922

SEQ ID NO: 292223 - DNA, 1000 bp, Homo Sapiens
gatatttggacctgttgcacatccattttatgtgttacggtttaattcttcagatcacattgagagtaaaggtattaaaataaaggagactatgtattttgctccatcaatgaaagatttcactcaatatatattcacagaaaaactaaaacaggataagggatcagatgcatcatggaagaatgatcaggaaccaccaccagaggccttagattttagtgatgatgaaaaagagaaggaagccaaacagaggaaaaaatctcagattcaaggccggaaaaaactcaaatctgaatttaatgagcctggtgaagattttactgaagtacatcagaattggaatgctcatagctctgcttcagagcatgcaaaaggatatcgtaacagagaattcacacgaggattttccagggccagataccctcgatcttgccatggcaggcctccacctcagcatttctataactcagaacatatggtatctcaggagacttcaggatttccttctcagagacaaaataatcccattatgccacaatacccctttcctcttccagtgtttgacatgcataattttcccctccgccctccacccccaccaccacccccacctgtaaacatgggttgggctacaccaaacatggctgctcatccattacttaacttaccatactccctacccccaccccctccccctccaccactgcctcctccaccctcttctggagatagtaattctcattttggaccttactattaggtgactatgcatttccagagaaatgtggacttttcatattatgtggtaaggattttttttttttcaagagtgattatggagctagatttttaaaaacactgtaaaatactaaatgattccttctgttgtaagttgatatatatttgtaacctttgtgaaattgtattcatatgaaaatgtcagctcaaattcttgggagaacattaaattatgtaatatttaattaaaaaaaaaaaaaaa

SEQ ID NO: 292224 - DNA, 1000 bp, Homo Sapiens; identical to SEQ ID NO: 223923

SEQ ID NO: 292225 - DNA, 1000 bp, Homo Sapiens
gggaattcaacttcaagttcaaaaaacagtcccctaggttaaagagcaagtgtacaggaggattgcagcctcccgttcagtacgaagatgttcataccaatccagaccaggactgctgcctactgcaggtcaccaccctcaatttcatctttattccgattgtcatgggaatgatatttactctgtttactatcaatgtgagcacggacatgcggcatcatcgagtgagactggtgttccaagattcccctgtccatggtggtcggaaactgcgcagtgaacagggtgtgcaagtcatcctggacccagtgcacagcgttcggctctttgactggtggcatcctcagtacccattctccctgagagcgtagttactgcttcccatcccttgggggcagcctcgagtgtagtccattagtaatcagattccagtttggacagggtggctggattgtatatctcgttagtaatgtacatgctcttcaggttctagggctcctgttaggggagggagaaatgttgaatcaagagggaaaacaactactatgatttataaacatattttaatgtaaaaatttgcatttaaaaggagtggccctgttttctgtgttaaaaccccatttggtgctattgagtttgttctttattcttttatcccagtgaaaattgttgatcttgctgtagggaaaaattaaactctttgaatctccaaacaaggaagtttcagcattcccttatggatcagaggaaccttagaggcctgaaattgttgcttccagtttagctgcccctcaaattcaagtgaatattttcccttctccctttacccttctccagaaataaagcaggtgacagggttttcagaatcttaaaaaaaaaaaaaaaaaaaaaaaaaaaaaaaaaaaaaaaaaaaaaaaaaaaaaaaaaaaaaaaaaaaaaaaaaaaaaaaaaaaaaaaaaaaaaaaaaaaaaaaaaaaaaaaaaaaaaaaaaaaaaaaaaa

SEQ ID NO: 292226 - DNA, 1000 bp, Homo Sapiens; identical to SEQ ID NO: 223926

SEQ ID NO: 292227 - DNA, 1000 bp, Homo Sapiens; identical to SEQ ID NO: 118503

SEQ ID NO: 292228 - DNA, 1000 bp, Homo Sapiens; identical to SEQ ID NO: 223927

SEQ ID NO: 292229 - DNA, 1000 bp, Homo Sapiens; identical to SEQ ID NO: 223928

SEQ ID NO: 292230 - DNA, 1000 bp, Homo Sapiens; identical to SEQ ID NO: 118504

SEQ ID NO: 292231 - DNA, 1000 bp, Homo Sapiens; identical to SEQ ID NO: 223929

SEQ ID NO: 292232 - DNA, 1000 bp, Homo Sapiens
ctcggtgcccctgtagacaatggccctcgtgtctgccgattcccgcattgcagaacttctcacagagctccatcagctgatcaaacaaacccaggaagagcgttcgcggagcgaacacaacttagtgaacatccagaagacccatgagcggatgcagacagagaacaagatttctccctattaccggacaaagctgcgtggcctctacacaaccgccaaggccgatgcagaggctgagtgcaacatccttcggaaagctctggacaagatcgcggaaatcaagtctctgttggaagagaggcggattgcggccaagattgccggtctctacaatgactcggagccaccccggaagaccatgcgcagaggggtgctgatgaccctgctgcagcagtcggccatgaccctgcccctgtggatcgggaagcctggtgacaagcccccacccctctgtggggccatccctgcctcaggagactacgtggccagacctggagacaaggtggctgcccgggtgaaggccgtggatggggacgagcagtggatcctggccgaggtggtcagttacagccatgccaccaacaagtatgaggtagatgacatcgatgaagaaggcaaagagagacacaccctgagccggcgccgtgtcatcccgctgccccagtggaaggccaacccggagacggaccctgaggccttgttccagaaggagcagctcgtgctggccctgtatccccagactacctgcttctaccgcgccctgatccatgcgcccccacagcggccccaggatgactactcggtcctgtttgaagacacctcctatgcagatggctattcccctcccctcaatgtggctcagagatacgtggtggcttgtaaggaacccaagaaaaagtgatgccgcctggcagactcgccatcccccaacgacacagggcaggacagcagaggacgtgctgggattaaacacattccccctcaaaaaaaaaaaaaaaaa

SEQ ID NO: 292233 - DNA, 1000 bp, Homo Sapiens
gtgcagacactatgccaaaaaataacttcacacttttgtatggcgtttttattgtgagatatttaatgtgaatggttggggggactctggctgacttcctttctgcttctagtagtctctgcttcaaggtacaaatgggaacacctcccctcgggaagcctggccaagctggaagatccggcaggttttttacgagccgggtggagggttggggaggaaagaaagggcggtggcctcgggaggttccggccttcggggaccagacttgctgccaagggcttctgcatccagggtgggcagtggcagcttgtcacccttgcccgattcccacatcccagtcctgagggactcagcacaacaggataagcgtccaggagccacgggctcccaccccgagcatatcacatggtgccgaattgcactgaacacgcgtgtgtgcatcgcacgcggccacgaccacagacacgcatgcacacacgcagaggtgcagagcgaggaggccggcaaatcccgcagctgccacggtccctcctgtcattctcacgactccgggagaaactgtgctgtatgatacagatctattttaatacacttaccactgggtgaacaagatttttatattcttttattgatgaacaaagtgaaccgtgtgaggcacacgtcttctatattggctactctgtgccaagtatgcattaccgcgtggcttgcgatgtccatgtcttcagcttccttttctgttggtttggttttcttcgcggatggattgagttacatgttttaacagtgtaatgggaggatctgaaaggttggacccgggaggggtagctgccgatgtgtcttgagattgttaggttttttttggaccaaggaggaccgtccagtgggtagtgaggatagagaaaaagtgtttgtcttaaatacgccaatgtagttttccttctttacaatgtattaaactcgatcgatgatttcaaaaacaaaaaaaaaaaaaaaaaaa

SEQ ID NO: 292234 - DNA, 1000 bp, Homo Sapiens
caggcagaagtggccagtgtttgggttgaaaggatccaggaacatccagctatttatgatagcatttgcttcattatgtcaagttcaacaaatgttgacttgctggtgaaggtgggggaggttgtggacaagctctttgatttggatgagaaactaatgttagaatgggtcagaaatggggctgctcagcctctggaccaaccccaggaagagtctgaagagcagccagtgtttcggcttgtgccctgtatacttgaagctgccaaacaagtacgttctgaaaatccagaatggcttgatgtttacatgcacattttacaactgcttactacagtggatgatggaattcaagcaattgtacattgtcctgacactggaaaagacatttggaatttactttttgacctggtctgccatgaattctgccagtctgatgatccacccatcattcttcaagaacagaaaacggtgctagcctctgttttttcagtgttgtctgccatctatgcctcacagactgagcaagagtatctaaagatagaaaaagtagatcttcctctaattgacagcctcattcgggtcttacaaaatatggaacagtgtcagaaaaaaccagagaactcggcagagtctaacacagaggaaactaaaaggactgatttaacccaagatgatttccacttgaaaatcttaaaggatattttatgtgaatttctttctaatatttttcaggcattaacaaaggagacggtggctcagggagtaaaggaaggccagttgagcaaacagaagtgttcctctgcatttcaaaaccttcttcctttctatagccctgtggtggaagattttattaaaatcctacgtgaagttgataaggcgcttgctgatgacttggaaaaaaacttcccaagtttgaaggttcagacttaaaacctgaattggaattacttctgtacaagaaataaactttatttttctcactgacaaaaaaaaaaaaaaa

SEQ ID NO: 292235 - DNA, 1000 bp, Homo Sapiens
ctggaccaaatggactgcaaggcctcagggctcagtggagcccgggtggcctgggcccagcggaacctgtacgggatgctacaggagttcatgctagagaatgagaggctcaggaaagaaaagagccagctgcagaatagccgagacctggcccagaatgagcagcgcatcctggcccagcaggtccatgcactagagaggcgtctcctctctgcctgctaccatcaccagcagggtcctggcctgaccccaccgtgtccctgcttgatggccccagctcccccttgccatgcactgccacccctctactcctgcccctgctgccacatctgcccactgtgtcgagtgcccctggcccactgggcctgcctgccaggggagcaccacctgccccaggtgttggaccctgaggcctcaggtggcaggcccccatctgcccggcccccaccctgggcacccccatgcagccctggctctgccaagtgcccaagagagaggagtcacagtgactggactcagacccgagtcctggcagagatgttgacggaggaggaggtggtaccttctgcacctcccctgcctgtgaggcccccgaagacatcaccagggctcagaggtggggccggggttccaaacctggcccagagactggaggccctcagagaccagattggcagctccctgcgacgtggccgcagccagccaccctgcagtgagggcgcacggagcccaggccaagtcctccctccccattgaaggccaagtgggaacccaggagactgctgtgtgacctcagactgggctccacactcttgggcttcagtctgcccatctgctgaatggagacagcagctgctactccacctgcagctgggctaggggcggggactgggggtgctatttaggggaacaaggggattcaggagaaaccaggcagcaggggatgaaatacatgaataaagagaggcatcagctccaaaaaaaaaaaaaaaaaaaaaaa

SEQ ID NO: 292236 - DNA, 574 bp, Homo Sapiens; identical to SEQ ID NO: 118505

SEQ ID NO: 292237 - DNA, 1000 bp, Homo Sapiens
cgttgagcagctctcatcccgggtttcctttacgtctctttctgatgacaccagcacagcgggctccatggaggcctctgtccagcagccatcccagcagcagcagctcctgcaggaactgcagggtgaggaccacatctctgctcagaactatgtgatcatctaaaaagggggagctggcctccaccctgtgttccatggattcggaacaagatttcagacatctgcatgagtgacaaactttctgaacaccaccaccaccaataatacttatcagcatcataaagtatctcttaaacactgatcttggcagggacggaactcctattcagcagtttttgtggaaagcagtaatgcttgcaaaacgtgtgtgtcattcagcattttaagtggagactatgcatttcatagtatatttgacagattagtactgtgtcctgtgttttgttccagattcttcagtataaataagctctatatcaaaaagttgcctgtctaaatagaaaatgtcttgctgtgttttgtcctatggaaaatactgtaattcaggattatgtttacaattgatccaggtgtttgtttctaacttctgtaatacatacaatgcaaaaaaaaaaaaaaaaaatggccacaacagttgcacagtgcccaccctatggcctagcttcaggtacttcagttgaagtctaaactcaggtaacttggaatgtatatcatattgggatattaaatatttcacagctaaaaagctaaagagggaacatcactcttttgcctttccttattttatgcatttccctttcctcattacattccacattcttagaataagaagtgcattcaatcctaggagaatgataatcctggacatgggtgaacatgaggagaaccagcaaaatctgtggtgtttgacatcactttgtcatgtggttacaagtaaaacaactgttgcattcactgtttcaaaaaaaaaaaaaaaaaaagaaaaaaaaaaaaaaaa

SEQ ID NO: 292238 - DNA, 1000 bp, Homo Sapiens
tcatggcaactgtggggctgctgatgctgggggtgactctgccaaacagctactggcgagtgtccactgtgcacgggaacgtcatcaccaccaacaccatcttcgagaacctctggtttagctgtgccaccgactccctgggcgtctacaactgctgggagttcccgtccatgctggccctctctggctccacagactccccagcctcactgtcggggggcactggtctccttgtccggctgatgtctataaagggcccctgtgaagggaggcgtcttgcaagttgcaggttgagcgtccgctgtaaggaggcggtgtgtgtgcagggtatattcaggcctgccgggcactcatgatcaccgccatcctcctgggcttcctcggcctcttgctaggcatagcgggcctgcgctgcaccaacattgggggcctggagctctccaggaaagccaagctggcggccaccgcaggggccctccacattctggccggtaactgggggaaggtgatggggcgggggtccccctcaaccgcagacttcaggctgctttgtcctcatctaatctcctctccaattcccactcctcatgctcacctcccctaccctgctgcatggacacctgctcacccctgcctcatctgtactccccagatctcctggctgcaaatcagcccatcggcagtgtttcttgagctcccagtaggggctggccacggccaggtgtgggagggacttcgaagataagagtgagcggctgcctccgggagcttacatcctagctggggagcagagttagggtgcacgctatggcgcacacacacagtgcacgtccacagtgccataccacggggcatggtggctcatgcctgtaatcccagcactttggtaggctgaggtgggtggattacttgaggtcaggagttcaaaaccagcctggccaacatggtgaaaccctgtctctactaaaaatcccaaaaaaaaaaaaaaaaaaaaaaaaaa

SEQ ID NO: 292239 - DNA, 1000 bp, Homo Sapiens
tgctcctcagggggtaatgcgggcatcgctgctgcctatgctgctaggaagctgggcattcctgccaccatcgtgctccccgagagcacctccctgcaggtggtgcagaggctgcagggggagggggccgaggttcagctgactggaaaggtctgggacgaggccaatctgagggcgcaagagttggccaagagggacggctgggagaatgtccccccgtttgaccaccccctaatatggaaaggccacgccagcctggtgcaggagctgaaagcagtgctgaggaccccaccaggtgccctggtgctggcagttgggggtgggggtctcctggccggggtggtggctggcctgctggaggtgggctggcagcatgtacccatcattgccatggagacccatggggcacactgcttcaatgcggccatcacagccggcaagctggtcacacttccagacatcaccagtgtggccaagagcctgggtgccaagacggtggccgctcgggccctggagtgcatgcaggtgtgcaagattcactctgaagtggtggaggacaccgaggctgtgagcgctgtgcagcagctcctggatgatgagcgtatgctggtggagcctgcctgtggggcagccttagcagccatctactcaggcctcctgcggaggctccaggccgagggctgcctgcccccttccctgacttcagttgtggtaatcgtgtgtggaggcaacaacatcaacagccgagagctgcaggctttgaaaacccacctgggccaggtctgaggggtcccatcctggccccaaagacccctgagaggcccatggacagtcctgtgtctggatgaggaggactcagtgctggcagatggcagtggaagctgccctgtgcaactgtgctggctgcctcctgaaggaagccctcctggactgcttcttttggctctccgacaactccggccaataaacactttctgaattgaaaaaaaaaaaaaaaaaa

SEQ ID NO: 292240 - DNA, 1000 bp, Homo Sapiens
gctggcaggtgggatatgtcctcagcctttgggggcctggataagctattgcagcactttctgaggctttcactgtagggagaaggaaaccccaagggtagaatagccatttccagagggaagtacacacatacccccacacaccagtctttttgggggtttcagagtggccggagaaaccgactgaagggactgaccagctagctaggagagctgagacgccagtcctcaaatggcgttcttaccaatagtctatttccagactactggaaacgttggggtttcttcctccagtgacagcagcctcagtagctttcctgggctccaggcggctggctgcacaccctgcctgccatcacccttgcccctgcttgtcctggaccacttttaaaggggaagtcccttatttggaagagagaaaggatgtgtgtagcacacactcatcatggattgctcagagttcctttagggcagagctgagggcctgggatccaggaaccagtgggattggatgggagaagaaggaagggggtggcccgtcacccccgcaagacttgcatccaggtagcctaaggactcctggtcactgggtagggtggctgctgagatgcaggtcggaagaggcaggggaaggctccaggcctaacttggagcatgtcactggccatgggggtgaggggacagactctgctctcactggctggcagccccaggagcctgttcccttgcctctcctggatgggttgtcagccctgtgtttcactgtgaccaattcattataacatttggatattactgaaaatgtaaggaagcaggaaaaattaactactttcattcagagatagcctctatcaatagtttgacatttttccctcttttacattgagatcataccctaggtactgtttagtatgcaatattttcattttcgcagtataataattgcacctgttaaataaagttttgtaaacatttaaaaaaaaaaaaaaaaaaaaaaaaa

SEQ ID NO: 292241 - DNA, 1000 bp, Homo Sapiens
cggggaggcccatacacccccagccgtccactccaaccacgccccagtcacccaggcccgcgagggcaacctgccgctcctcattgcgcccgccctggccgcggtgctcctggccgcgctggctgcggtgggggcagcctactgtgtgcggcgggggcgggccatggcagcagcggctcaggacaaagggcaggtggggccaggggctgggcccctggaactggagggagtgaaggtccccttggagccaggcccgaaggcaacagagggcggtggagaggccctgcccagcgggtctgagtgtgaggtgccactcatgggcttcccagggcctggcctccagtcacccctccacgcaaagccctacatctaagccagagagagacagggcagctggggccgggctctcagccagtgagatggccagccccctcctgctgccacaccacgtaagttctcagtcccaacctcggggatgtgtgcagacagggctgtgtgaccacagctgggccctgttccctctggacctcggtctcctcatctgtgagatgctgtggcccagctgacgagccctaacgtccccagaaccgagtgcctatgaggacagtgtccgccctgccctccgcaacgtgcagtccctgggcacggcgggccctgccatgtgctggtaacgcatgcctgggtcctgctgggctctcccactccaggcggaccctgggggccagtgaaggaagctcccggaaagagcagagggagagcgggtaggcggctgtgtgactctagtcttggccccaggaagcgaaggaacaaaagaaactggaaaggaagatgctttaggaacatgttttgcttttttaaaatatatatatttataagagatcctttcccatttattctgggaagatgtttttcaaactcagagacaaggactttggtttttgtaagacaaacgatgatatgaaggccttttgtaagaaaaaataaaagatgaagtgtgaaa

SEQ ID NO: 292242 - DNA, 1000 bp, Homo Sapiens; identical to SEQ ID NO: 118506

SEQ ID NO: 292243 - DNA, 1000 bp, Homo Sapiens
ctgcctcagcctcccaaagcacggggattacaaaccctgctgagggatgcccaagaagttccagggtgagaacaccaagtcggcagcggcccgggcacggagggcagaggccaaggcggccgctgatgccaagaagcagaaggagctggaggatgcctactggaaggacgacgacaaacacgtcatgaggaaggagcagcgcaaggaggagaaggagaagcggcgcctcgaccagctggaacgtaagaaggagacgcagcgcctactggaggaggaggactccaagctcaagggcggcaaggcgccgcgggtggccacgtccagcaaggtcacccgggcccagatcgaggacacgctgcgccgagaccatcagctcagggaggccccggacacagccgagaaagccaagagccatctggaggtgccgctggaggagaacgtgaaccgccgcgtgctggaggagggcagcgtggaggcgcgcaccatcgaggacgccattgcagtgctcagcgtggcggaggaggcggccgaccggcacccagaaagacgcatgcgggcagccttcacagcctttgaggaagcccagctgccgcggctcaaacaagagaaccccaacatgcggctgtcgcagctgaaacagctgctcaagaaggagtggctccgctctcctgacaaccccatgaaccagcgggccgtgcccttcaatgcccccaagtgagcccagaacttggggagccagttcacccacggggtggtccaggtcacgactctgcacgcccttaggccaggtcagctgcgagggtcacagagcgttccgggggccaaggcgccgggccccggggccatgctcttatcaccagccacccgtcctcccgccagagggtccctgccccgagtgacaccccatcccctcccatcccccggcgcgtgtgtgtagagcctcagggctgagtgcccaataaaggtggcggcaaggctaaaaaaaaaaaaaaaaaaaaaa

SEQ ID NO: 292244 - DNA, 1000 bp, Homo Sapiens
tttttccttactataaatcatttaaaaactgaattcattttcttagatggcataagtctgtctcttgagaaataagtaaaatactcctattttcagtatctgtagcacctgaaataggtctttgtatagccagaaacaagttatgttgaagttagcttttctttgtcaacagttttggacaataaaaatctgaaagtattaacacttgattttctactggggcccttcaaacttggttggaagaaattcaaccagaatatctacattagagtataatcatgtgtggtaggaagatggactagttaatcaagatttgttgtcacttaaattttttgtgatttttttccaagccagtttttttaaattctaaatgtgttttgaggtatgggtacattaattgtaatgtaaactattatacaactgtttttgcgactttataggcaggtaaattttgctattactattgaatacaaatgacaattcatttatgaccactcaaacagcgttagtaaccatttagtgacaaaggattaaaacatccatctggatgttaattttgaagatgtaaattatatgttgtttaaatttttccaggcatctgaaaaccttatctgctagacaatgtaagattcacacagagttatctgggattctgattttttaaatagtacatatcattaaaccattttctctaaatgtaagaagagcagaaaaaatcttataagattatcagatttttctaatgacacagaaatgtaagaaaaaaatccctttatattgaaaaaagatgcagtcaaagtcttttcagacatgcccaaactttgagaattccttcaaccatctaatgctataaagatttttgttcttcctgttcacaaccagttgtataacagaaatactagctactgttttccttcctgtgtgtgaagtaatgaatcattgattatgtgacttgttatgtattcaattaaacactaaagaataaaacattcactccttt

SEQ ID NO: 292245 - DNA, 1000 bp, Homo Sapiens
agcatccggcttttatttactaactttgagaacagagtaccttgatcaattaaatggtagggagcgctgtggagacagcatcctccccagtccgggaagagaggcctaggatgcctggggcccagcggcctcttccctcctggcgtccccggctgccctcgctcccaggccccgcagtctcatttgccgcttccgacgcgtgaccccggcgcgctagcgtccgggaccggtgacaggcgcggggtgcgccaagcagtcccatgtgtcccctccctctcgcagccgccgcagtcgctgcgccccgagcccctctccggctcctcaacagagggctcgccgccgccatgtctaccgcccagtcactcaaatccgtggactacgaggtgttcggaagagtgcagggtgtttgcttcagaatgtatacagaagatgaagctaggaaaataggagtggttggctgggtgaagaataccagcaaaggcaccgtgacaggccaagtgcaggggccagaagacaaagtcaattccatgaagtcctggctgagcaaggttggaagccctagttctcgcattgaccgcacaaacttttctaatgaaaaaaccatctctaagcttgaatactctaattttagtattagatactaatagaagagaaaaattgtaacacactgaacaatagatactgtatgttcttaagactatgtatactagaataatagtagcagagtagggtgaaaaggaactttctgttctgaaagctaagcgactgtacgtgctactaaaaatgtctgacactgaaataattttactcaactatgttttcaacaagcaaaaatatagtattctaagattaaaatgtcattacaaaatatttagtgtgaacatttaatttaaacttgtctcatggaatctttaatttcaatgaacattacagcatatatatgttatttggcgagacatcaaataaagttaaccatttaaaaattaaaaaaaaaaaaaaa

SEQ ID NO: 292246 - DNA, 1000 bp, Homo Sapiens
agataaggcctcaggcctcatggaaggtgagacagtaaagacattactcccataaaaatgtgaggagagagactcagttcagcaactgtttattctgtttattgagcacttacttggaccaagcactgtggtcttggtgttttacatagactgtctctaattctcacaactctgcaaaatatatatattcccattttataaaactacaaactgaggctcagagaaggtgtgacctcttgttgcttgaggcacagagttataaagtaacatatctggaatttgaaatgagatctgtttagggctaatgctgcatttttctacaacatcatgcctctagaaggtttaagctaggtaggctttcagccagcagacatgatggggagagccttctaataagagggaagagactgcttggaagcatgaagggaggtgtaagaaagataagtaagtcagtgtacttgcaacagaggcttgggatgaagggtgggtgaagttgacatcacgatagaaaacaaaactggaatgggagtttaggtccaatttgggcaaggttgtttgaatttcaataatcaggggtttgggtcaaggaagaaaaatcatgggacttgccatttaggaggataattttgtggtagtgtggaggtgaaataaagagaaaagggaaccttggagctgggaaggcaggaaaccggctagatgaccatcacacagcaaaggagggagtggaagagagatgagaaaattgagagctattattaagaaaaacagttgagagaggaagaatttgaagagggctcaagattttgagtccacatgacagaaggactggaatgccatgaactggagaaggtgagcgctgaagaaccaggatgggacggggctggaacagctgggttcagcttttgcagggtgggtacgtgtttggttatagctgctttcagattgttccattatctgtactcccaacaaccctgccggatatatttgttggctttcactc

SEQ ID NO: 292247 - DNA, 1000 bp, Homo Sapiens
gagagtgaagtgcgaagcctgtttgagcaagtggatcgggaacagcaagggcgtctagatgtgctggtcaacaatgcttatgcaggggtccagacgatcctgaacaccaggaataaggcattctgggaaacccctgcctccatgtgggatgatatcaacaacgtcggactcagaggccactacttttgctcagtgtatggggcacggctgatggtaccagctggccaggggctcatcgtggtcatctcctccccaggaagcctgcagtatatgttcaatgtcccctatggtgtgggcaaagctgcgtgtgacaagctggctgctgactgtgcccacgagctgcggcgccatggggtcagctgtgtgtctctgtggccggggattgtgcagacagaactgctgaaggagcatatggcaaaggaggaggtcctgcaggatcctgtgttgaagcagttcaaatcagccttctcatctgcggaaaccacagaattgagtggcaaatgtgtggtggctttggcaacagatcccaatatcctgagcctgagtggtaaggtgctgccatcctgtgaccttgctcgacgctatggccttcgggatgtggacggccgccccgtccaagactatttgtctttgagctctgttctctcacacgtgtccggcctgggctggctggcctcctacctgccctccttcctccgtgtgcccaagtggattattgccctctacactagcaagttctaaccctcctggtctgacactacgtctctgcttgtcttctcatttggacttggtggttcgtcctgtctcagtgaaacagcagcctttcttgtttacccatacccttgatatgaagagaagccctctgctgtgtgtccgtggtgagttctggggtgcgcctaggtcccttctttgtgccttggttttccttgtccttctttttactttttgccttagtattgaaaaatgctcttggagctaataaaagtctcatttctctttc

SEQ ID NO: 292248 - DNA, 1000 bp, Homo Sapiens
ggtggtggacctgtataatggaatgtgcttacaagggccagcaggagtgcctggtcgagacgggagccctggggccaatggcattccgggtacacctgggatcccaggtcgggatggattcaaaggagaaaagggggaatgtctgagggaaagctttgaggagtcctggacacccaactacaagcagtgttcatggagttcattgaattatggcatagatcttgggaaaattgcggagtgtacatttacaaagatgcgttcaaatagtgctctaagagttttgttcagtggctcacttcggctaaaatgcagaaatgcatgctgtcagcgttggtatttcacattcaatggagctgaatgttcaggacctcttcccattgaagctataatttatttggaccaaggaagccctgaaatgaattcaacaattaatattcatcgcacttcttctgtggaaggactttgtgaaggaattggtgctggattagtggatgttgctatctgggttggcacttgttcagattacccaaaaggagatgcttctactggatggaattcagtttctcgcatcattattgaagaactaccaaaataaatgctttaattttcatttgctacctctttttttattatgccttggaatggttcacttaaatgacattttaaataagtttatgtatacatctgaatgaaaagcaaagctaaatatgtttacagaccaaagtgtgatttcacactgtttttaaatctagcattattcattttgcttcaatcaaaagtggtttcaatattttttttagttggttagaatactttcttcatagtcacattctctcaacctataatttggaatattgttgtggtcttttgttttttctcttagtatagcatttttaaaaaaatataaaagctaccaatctttgtacaatttgtaaatgttaagaattttttttatatctgttaaataaaaattatttccaacaaaaaaaaaaaaaaaaaa

SEQ ID NO: 292249 - DNA, 1000 bp, Homo Sapiens; identical to SEQ ID NO: 223935

SEQ ID NO: 292250 - DNA, 1000 bp, Homo Sapiens; identical to SEQ ID NO: 118508

SEQ ID NO: 292251 - DNA, 1000 bp, Homo Sapiens
taattgtagtcaaaagtatgacttgagagtgttgctctggtattctgggttctgaagtctggtattctggtattctgggttcaaaagtatgacttgagagtgttgctctggtattctgagagttgctctgtattctgggttctgaagattatttgaaaaataactcctactacattgaaatgcagacttaaaaatttaaacattggattaggcagtcaaaaaaaccaagcaagcataaaaggtcaataagttgtaatcttgatagtaaaggtggaaaacttattataaatggaaagaaagttttatttccttttttgtttgatgggcagtatgccatattatacccaaagttcttttaaaaaatatttccatcaaccatttttatttaaaataaacatttgagggaagttaccaaggcagcttttttcctcaaaagtaacctgttcctctttggaatagcacattttaggggcatggttaatacctgagatttttactcagtaaatcctgatggttactgtgtgtaaaatatctttaagtaggattgaaggcctctgtgggggaataaaatattaccaaagtctataaaaataaattttacatgttctcttttatgacagagagcagcactggttctgttatttttaaaatgaataattgatttcttgataggtgtttaatatttcttccctcactgctgattcttagatagaaaccattctttatatttgatagactgctttcagaaaacccttatcaacaagtgtacaatacttatctaaaactatacatttagaatggagcagtttaatactagatctcagaagttttgaaaaatagcaaagaagactggatttggaaagcatggtctacaattggttgttaaattctgaagctatgaagaataaatgtttcaactttggattatgaaaccccatttatgattttttaaatacacttgaaataaaaatgattaaactaaaaaaaaaaaaaaaaaaaa

SEQ ID NO: 292252 - DNA, 975 bp, Homo Sapiens
gacaaccttcaggtccagccctggagctggaggagtggagccccactctgaagacgcagcctttctccaggttctgtctctcccattctgattcttgacaccagatgcaggatggtgtcctctccctgcacgccggcaagctcacggacttgctcccgtatcctgggactgagccttgggactgcagccctgtttgctgctggggccaacgtggcactcctccttcctaactgggatgtcacctacctgttgaggggcctccttggcaggcatgccatgctgggaactgggctctggggaggaggcctcatggtactcactgcagctatcctcatctccttgatgggctggagatacggctgcttcagtaagagtgggctctgtcgaagcgtgcttactgctctgttgtcaggtggcctggctttacttggagccctgatttgctttgtcacttctggagttgctctgaaagatggtcctttttgcatgtttgatgtttcatccttcaatcagacacaagcttggaaatatggttacccattcaaagacctgcatagtaggaattatctgtatgaccgttcgctctggaactccgtctgcctggagccctctgcagctgttgtctggcacgtgtccctcttctccgcccttctgtgcatcagcctgctccagcttctcctggtggtcgttcatgtcatcaacagcctcctgggccttttctgcagcctctgcgagaagtgacaggcagaaccttcacttgcaagcatgggtgttttcatcatcggctgtcttgaatcctttctacaaggagtgggttcaggccctctgtggttaaagactgtatccatgctgtgctcaaggaggaactggcaaatgctgaatattctccagaagaaatgcctcagcttacaaaacatttatcagaaaacattaaagataaattaaaaggtaatcatggtgaaaaaaaaaaaaaaa

SEQ ID NO: 292253 - DNA, 1000 bp, Homo Sapiens; identical to SEQ ID NO: 223938

SEQ ID NO: 292254 - DNA, 1000 bp, Homo Sapiens; identical to SEQ ID NO: 223939

SEQ ID NO: 292255 - DNA, 1000 bp, Homo Sapiens
gcagcaccagccgaggtccgacacttcactgacggcagcttccccgccggcttcgtcttgcagctcttctcccacacccagctcaggggcccagacagcaaggactcacccaaagacagggaagtggcagaaggaggccttccccgggcggagagcccctctccagctccccctccggggctccgcgggacactggatctccaggttatccgcgtgcggatggaggagcccccagcggtcagcctcctgcaagactggtccaggcacccccagggcaccaagcgtgtgggagcaggtgacacctcagactggcccacagttctgtcagaatccagcaccactgtggcagggaagccggaaaaagggaatggagtgtaaattcttgctttcctggggagggagggagggatgaggcagcgtcccccagtggcttataactcagagctgcctggctcacccacctggtggagagagtagaaacaggtgccagggcaggagggggctggggcagcatccactgttatttcggggcactggaaagtgtctgttcctggccaggcctgaggtcggcgagggtggctgaggctgttgtgcagtagggcactgggcctgtggagaacacctaccccagtccttcgctgacccccacctctgtttgtcccccatgacctcctcccaccctccccctgctccccaccattctcccttggcacagtgccttacacaagagtggtcataagggggtttgaactgagtcccactacctcgggggacacctctcctccccacttgttcaggcttctaaaccaggaggcctccattacctcttcctgtcccaaccctgcagaggcctgaagctgggcctgggcaccccattcactcccgttctcatttacatctgttttcctgttgtatatatcacctttgttgacaataaattatttttttttattaagaaaaaaaaaaaaaaaaaaaaaaaaaaaaaaaaaaaaaaaaaaaa

SEQ ID NO: 292256 - DNA, 1000 bp, Homo Sapiens
tctttactctgacttccccaaacccagaaagattttctccacagtgttcatttgaaagaggagtattttgtcccattttccccttcctcattatcaaacagccccagtcttccttgtctctgctaagaaagtagaggcatgatgatctgcctctcaactgccctaagtcctagctaagtatcaggggaaaaaaaaaaaaaaaaagcctaacaaatgggattagactagggctgcaagtagtgaggattttgttgatacctctgctgggatgtgtgctttcccatatcttgccttcaggaattacactgtgccttttccccagggatatgggctctgtctacccagtgctccagtttcccggtaactgctcttgaacattgtggacaagggcaggtcttcatatttttgatcatccctttctcccagtgaaatcccatagcccttacctagagtctagggcacaaagacttcggggaagatacactgagattgacctgaggagacatctacacacaccagtggcagctgccccagggcctgcttccccttcctaagtctgtcatcctctggaagggatgggtggtgctccaatctctggtgcctaaaaacccaagtttatttctctcttaacactggcaataaccagtccacaccactgttgccttttaaaacctcttaataatctcatgctgtgtttgttttgattccaatccaattatcaccagggctgtgtgggtaaatgcttttaaatgctctctcatcttgttcttccccctcaccccccactcttaggtatgtatgatgctaatcttgtccctaagtaagtttcttcctgctccttttgtatcttcctttcttgtctttcctcctaccttttgtctcttggtgttttgggacttttttttttttttttttggccttttgtacaaagattagtttcaatgtagtctgtagcctcctttgtaaaccaattaaaaagttttttaataaaaaaaaaaaa

SEQ ID NO: 292257 - DNA, 1000 bp, Homo Sapiens; identical to SEQ ID NO: 223940

SEQ ID NO: 292258 - DNA, 1000 bp, Homo Sapiens; identical to SEQ ID NO: 220434

SEQ ID NO: 292259 - DNA, 633 bp, Homo Sapiens
ggcgcacatagcgacttggtgggcgcgtccagtgatgactgggggatcccggcaagtaacatgactaaaaagaagcgggagaatctgggcgtcgctctagagatcgatgggttagaggagaagctgtcccagtgtcggagagacctggaggccgtgaactccagactccacagccgggagctgagcccagaggccaggaggtccctggagaaggagaaaaacagcctaatgaacaaagcctccaactacgagaaggaactgaagtttcttcggcaagagaaccggaagaacatgctgctctctgtggccatctttatcctcctgacgctcgtctatgcctactggaccatgtgagcctggcacttccccacaaccagcacaggcttccacttggccccttggtcaggatcaagcaggcacttcaagcctcaataggaccaaggtgctggggtgttcccctcccaacctagtgttcaagcatggcttcctggcgcccagccttgcctccctggcctgctggggggttccgggtctccagaaggacatggtgctggtccctcccttagcccaagggagaggcaataaagaacacaaagctgttcccgtaaaaaaaaaaaaaaaaaaaaaaaaaaa

SEQ ID NO: 292260 - DNA, 1000 bp, Homo Sapiens
tagatatgcagggctgctaatctcaaggagcttccagtgcagagggaataaatgctagactaaaatacagagtcttccaggtgggcatttcaaccaactcagtcaaggaacccatgacaaagaaagtcatttcaactcttacctcatcaagttgaataaagacagagaaaacagaaagagacattgttcttttcctgagtcttttgaatggaaattgtattatgttatagccatcataaaaccattttggtagttttgactgaactgggtgttcactttttcctttttgattgaatacaatttaaattctacttgatgactgcagtcgtcaaggggctcctgatgcaagatgccccttccattttaagtctgtctccttacagaggttaaagtctagtggctaattcctaaggaaacctgattaacacatgctcacaaccatcctggtcattctcgagcatgttctattttttaactaatcacccctgatatatttttatttttatatatccagttttcatttttttacgtcttgcctataagctaatatcataaataaggttgtttaagacgtgcttcaaatatccatattaaccactatttttcaaggaagtatggaaaagtacactctgtcactttgtcactcgatgtcattccaaagttattgcctactaagtaatgactgtcatgaaagcagcattgaaataatttgtttaaagggggcactcttttaaacgggaagaaaatttccgcttcctggtcttatcatggacaatttgggctagaggcaggaaggaagtgggatgacctcaggaggtcaccttttcttgattccagaaacatatgggctgataaacccggggtgacctcatgaaatgagttgcagcagaagtttatttttttcagaacaagtgatgtttgatggacctctgaatctctttagggagacacagatggctgggatccctcccctgtacccttctcactgccaggagaacta

SEQ ID NO: 292261 - DNA, 1000 bp, Homo Sapiens
cagggcatgcctgtgctgagtttgaatatcacctgtcagatgaataagaccatcattggtgtgtcggtcctcagtgtgcttgtagtatctgttgtagcagttctggtctataagttctattttcacctgatgcttcttgctggctgcataaagtatggtagaggtgaaaacatctatgatgcctttgttatctactcaagccaggatgaggactgggtaaggaatgagctagtaaagaatttagaagaaggggtgcctccatttcagctctgccttcactacagagactttattcccggtgtggccattgctgccaacatcatccatgaaggtttccataaaagccgaaaggtgattgttgtggtgtcccagcacttcatccagagccgctggtgtatctttgaatatgagattgctcagacctggcagtttctgagcagtcgtgctggtatcatcttcattgtcctgcagaaggtggagaagaccctgctcaggcagcaggtggagctgtaccgccttctcagcaggaacacttacctggagtgggaggacagtgtcctggggcggcacatcttctggagacgactcagaaaagccctgctggatggtaaatcatggaatccagaaggaacagtgggtacaggatgcaattggcaggaagcaacatctatctgaagaggaaaaataaaaacctcctgaggcatttcttgcccagctgggtccaacacttgttcagttaataagtattaaatgctgccacatgtcaggccttatgctaagggtgagtaattccatggtgcactagatatgcagggctgctaatctcaaggagcttccagtgcagagggaataaatgctagactaaaatacagagtcttccaggtgggcatttcaaccaactcagtcaaggaacccatgacaaagaaagtcatttcaactcttacctcatcaagttgaataaagacagagaaaacagaaaaaaaaaaaaaaaaaaaaaaaa

SEQ ID NO: 292262 - DNA, 1000 bp, Homo Sapiens; identical to SEQ ID NO: 223941

SEQ ID NO: 292263 - DNA, 1000 bp, Homo Sapiens
ctggggaggagaggactgggcctgatggaagttaacccggagctaagtcacccagagcacaggagctgccatgtcagatgggaaatctgcctatgtcataccgtgacagcccgcaggatcaggtgacttctagcagagaccctggtttttttcctgtgcccactccggcttgtcctcatctctacccatcccctgatgcccaggtcaccgggagggctgctgggagcctctcctgtccccgccgggcagtgtcactgagtccttgaaatcctcccctgccccgcgggtctctggattgggacgcacagtgcagttgaggtctgcgtcgggcttggcttttcacaaaggctgatgtcttaactgtcacccatatggtccctgggccaccgggcagcctggggcggtgtgtgtgccatgtcacagcatggcctctcggccttgggaaggaaggcagtgcctgctctgctgtgagccgccaggaaccctcctcctgtcaatgggggtgtagtatttttgccaaaatatcatgttcaatttcagtagtttgatcagttgaaggctagaagtgtgaagtgcagatgagtgtgtgttcttccccaaggtccccccacagctccaggacaccgctgtcctggcatttgtggccactcactttgtaggaaactcatctccttcctgaggagccgggaggctggaccagtcccgtcgtgcagtcaggtgggcggtgtgtctttccagaaggtcacgtggaaatgtctcgggacttgggtcccggagtgcccgtgaagcgtgtttttgctcctgaggtgcattttctcatcatccttgctttaccacaatgagcaatgaggtcgggttttatatgcaacttattgtatctgaattcctgtagcacacctcataggtatgatttttttaaattaaagaattcagaataaacattttttgatccacttgcgtgaaaaaaaaaaaaaaaaaaaaaaaaaaaaaaaaaaaaaaa

SEQ ID NO: 292264 - DNA, 1000 bp, Homo Sapiens; identical to SEQ ID NO: 223942

SEQ ID NO: 292265 - DNA, 1000 bp, Homo Sapiens
ctacaccggcgggcgctggtcgagtacgtgcggcccctgctccgtgggcgcctgcgctgcagctcggcgcggacccgcagccgcgtggccggcaggctccgggaggacgcgtcgcaactgcagaggctgttccggcggctggagtcccaggcctcgtggctggatgccgtggtgccccatttggctgaagtcatgcagctggaagacacgcccagcatccaggtggaggtgggagtgttggtgcgcgactacccagacatcaggcagaagcacgtggcagccctcctcgacatccgtggcctgcgcaacacagccgcccgccaggagatcctggccgtggcccgggacctggaactctctgaggagggagccctgtcaccccctcgggaccgtgccttctttgcagacatccctgtgccccgcccatctttctgtctcagcctccctctcttcctgggccgcctccccctctcccggctggccaggcccagtttggcctgtctgcctcggccccggcctccgtctctagcgcgacctcgggcccagcgctgagggtcacccaaccgccggccttagtgaccccatctatgctgctgacaagccaacctcccgtacggcgcccctcctgactccctgcctgggaccacacacccctgggatagaaagacccttagatgtcttctcacgcaaccccaaactccctgtacagaagggaaacaaacgccaggcacggtggctcatgcctgtaatcccaacactttgggaggctgaggccggaggattgcttgagcccaggagttcaagaccagcctgggcaacatagtgagacctgccccctatctctacaaggaataaaaaattagctgggcacggtggtgtgtgcctgtagtcccagctactggcgaggctgaggctggaggatcactggagttcgaggctgcagtgagctatgactgtgccactgcactccagcctggtcaacaaagcaagaccctttctc

SEQ ID NO: 292266 - DNA, 1000 bp, Homo Sapiens
aagactgaaagtgtctccaaggacaacacattagaaccaccagtggagctctattttcctgcacagctcaggcagcaaactgaagagctctgtgctaccattgataaggtcttacaggattccttgtctatgcattcttctgattctccttcaaggtccccaaagacattgttgggttctgacacagtcaaaactcctacaactcttccaagagcagctggtcgagaaaccaaatatgcaaatctctcctcaccaacttctacagtatctgagagtcagctgactaagcctggagtaattcgcccagtacctgtaaaatccagaatattactgaaaaaagaggaggaagtctatgaacccaaccctttcagtaaatacttggaagataacagcgacctcttttctgaacaggatgtaacagtccctcccaagcctgtctcgctccatcctttatatcagactaaactctatcctcctgctaagtcactgctgcatccacagaccctctcacatgctgactgtcttgccccaggacccttcagtcatctgtccttctccttgagtgatgaacaggagaattctcacaccctcctcagtcacaacgcatgcaacaagctgagtcatccaatggtggctattcctgaacatgaagctcttgattccaaagagcaatgaagttggagcagaggctgaaaacacaggctgctgaagtttttttggaatgctggtgctaaccacttgctagatttaactttttttttttttttccagaatgagtgctccctttatgagctgcagtgcagcagaaccaaaaaaaaagtttgctgcaattatatagcatcacagtgctctgctaacagccagcatagaagagatttacctacagctttttgcaccactgttctagcctttaatgccttctacttaatattaagctgaccgcaatactaacgtgcccctatatttggcagccaaataaagaagaatcgtgggtaaatag

SEQ ID NO: 292267 - DNA, 1000 bp, Homo Sapiens
ggcacagctcgatcgccctgggcaagggattgctgtgcctgtgggcgaggcccaccgccacgagcctcctgttcctcacgacaaggtggtggtagatgaaggccaagaccgagaggtgccagaagagaacaaacctccatccagacacgcgggcggaaaggctccaggggtccagggccagatggcgccgcctctgcccgactcagaaagagagaaacaagagccggagcagggagaggttgggaagaggcctggacaggcccaggccttggaggaggcgggtgatcttcctgaagatccccagaaagttccagaagcagatggtcagccagctgtccagcctgcaaaggaggacctggggccaggagacaggggcctgcatcctcggccccaggcagtgctgtctgagcagcagaacggcctggcggtgggtggaggggaaaaggccaaggggggaccgccgccaggcaacgccgccggggacacagggcagcccgcagaggacagcgaccacggtgggaagcctcccctcccagcggagaagccggctccagggcctgggctgccgcccgagcctcgcgagcagagggacgtggagcgagcgggtggaaaccaggcggccagccagctggagggtaaggcctccgccctacagccgcctgcctcaggcccagggagcggcagccccctcccccagccctggggtgatgcccaggtcatcctcgggagccctgccaggccccccttctctttccagccgcctgctgagcagacccctcggagagctttctgctcccttcccatcagcagcttgctttctgggaaccttttatctgccttactcccctttaaacacctgcggcatcgtcacatggcttgtgattaccgttttatctcccttgctcccctttaaaacacctgcggcattgtcaaaaaaaaaaaaaaaaaaaaaaaaaaaaaaaaaaaaaaaaaaaaaaaaaaaaaaaaaaaaaaaaaaaaa

SEQ ID NO: 292268 - DNA, 1000 bp, Homo Sapiens
tggttgagaacatggtaactgttggaaaaaccattcttgaaagaaataatttcactgacttcacgaatgtgaggatgggttttcatatgccaccattctgttccatttcccacttgcaccttcatgttctggcaccagtggatcagcttggcttcttatccaagttggtttatagagtcaattcctattggtttatcacagctgatcacttgattgaaaaactaagaacatgaaaatgtcaagagtggaagatttttctaatcttggttcagcatgaagtggtatttaggtcccttttaagtctaattgcaattttaagatttgttgggttttatgagaggctgttacttagtggccttaaatcttttctgaatgtctgtttcctaagatctgtgatacagttatgtgaatattttgttactgacttgtttcaatggttacttgtataaggattttatatatatgatactatagataaaatcctatttaagacaaattctgttaatcaacaagggctctgtatttttttaagttaaaatattttcatttctcagtaagtagtcagttataatagtgatttatttatgaagaataaactactatagaaagtactttgtgggaacctttattactgtgaaggagaaaaatagctatttcttgacagttctatagttttacacataaattttcaaaataaagaataccatactacacaatgatctctgattttgctgagggaaggaattatatatgtgccactttttcctcaaatttcagatgccagttttcactttttgaagcattgcatctttttaataaatctatcctgaaagctatataatatatatatttatatcaatgaatttacaataactatcaaattggctatcagaattcactgtaatggaatcttgcctctaataacataaagggggaagaaacataaagtggttctcttaataaaactagcagaaaatgttgcaaaaaaaaaaaaaaaaaa

SEQ ID NO: 292269 - DNA, 1000 bp, Homo Sapiens
tctcgctccgtcacccaggctggagtgcagtggcaagatcttggctcactgcaacctccgcctcctgggttcaagcgattctccagcctcagcctcctgagtagctggaattacaggaggattctggagccgagaaggagaacacctctgtcctgcagcagaacccctccttgtcgggtagccggaatggggaggagaacatcatcgataacccttatctgcggccggtgaagaagcccaagatccgcaggaagaagccagatacattctagagaattgtgagactttgccctaagctgccaagtgctccccaaggagatcggtcaccaggagagcagccacaaaggtcaagaaagacacacacggaagcaaacccaggctctgtgctccttccagcccttgctggtgcagatgctaccccacaagcttgtcagatcgcccaggtgacgggccaggcgcagccatcgggaaggtcattcagccaacccagaggatgtagaccctgtcctcaagaagtgcagggcgagttctgccgtgccctctgaaatactctccctcctctcagagccctccctcgagagcctgagtgcaccatgtcttgtggcctcgcctgaagccttcctctggcttcacagaacgctctggaactctggggtctggtcagggagtgtgtcctcagcttgtctggaggaggcctgcatccctcctgagctcttggaggtgcccaggaaccctgcttctcctcacagggcctggccatatagccagctccaacccaaagccctgcacagtgcctcacccactcccttctcctggtctctcctcaaaagaattttacatgattttaaaataataatagctttcatttacatagtgcttacatttatatagcacttaactatgtgcgatgtactaatttaagtactttatattaactcatataataaatggacacaacacaaaactcaaaaggtacaaaagaataaaacagttaaaaact

SEQ ID NO: 292270 - DNA, 1000 bp, Homo Sapiens; identical to SEQ ID NO: 118511

SEQ ID NO: 292271 - DNA, 1000 bp, Homo Sapiens; identical to SEQ ID NO: 223945

SEQ ID NO: 292272 - DNA, 1000 bp, Homo Sapiens
gctccttatagagaatttgatctgctcagtgtgagcggtttgctgttagccagggctatttatggcaaacacatgcttttgtatcttgtcatagttatccacaaaggcaaaactggacttgattctactggtatgcaaaacaggcatgctagtaagcagtcagtcgtggctcagaacttaaccccatagctcagaggaatgcttttagcagaaaacaggaaagaaaatatcccttaaaaattttttttgaatgtgtggaagtaattttagtataattagattttttccatatttttgaaagatttttcagatgtgaacattaaaaatagggattaaatgtctaggcttccatttaaaattatatgaatggtttgggatctttttgcactgagcaattttatttcaggcttccagctgtccctgtgagttatcctggacatttcgatggtttttggtaaggccaaactctgataagcaaaacagagaatactgacgtatacttaaccatatgtgtaactgatacttggcaccatggaatttttcattgagttatttcctcattcttttaaaaaataagggactataaatcagttatgtagtatcttttgtttttgtagctgattccttaactttcttgtatgcctctagtaatttcagagattaaatattgctttaaactgtgatactttgatttgctagattgacaaaactgatactaatataattaagttcatctttgaaatacatctttgtgcgtagagccaaaaaaagagataaaattaataatagttcacttgttatttgagattaatttggcatttgaaatgatcattttattttacaatcatttataatgaatcaatgttccagttagctttaaaaggtatacggtgctaattagtaaaatattgaaggcaatattttactgctagcttgcaaagttatgagagtttaaaaaataaaatatatgaaaatatgtaaaaaaaaaaaaaaaaaaaaa

SEQ ID NO: 292273 - DNA, 1000 bp, Homo Sapiens
ttattgctggtgctgggacttggagtatggatatccttcatacaccgaattcgacatcagtggcaacgtcctcgctctgatcttcaaccaaggcatgatctggatgggctccttctttgctcccagcctcccaggcatcaatatccttcgactccatacatccatgtacttccagtgctgggccgttatgtgctgcaatgttcctgaggccagggtcttcaaagcttccagatcaaataacttctacctgggcatgctactgctcatcctcttcctgtccacaatgcctgtcttgtacatgatcgtgtccctcccaccatcttttgattgtggtccattcagtggcaaaaatagaatgtttgaagtcattggagagaccctggagcacgatttcccaagctggatggcgaagatcttgagacagctttcaaaccctgggctggtcattgctgtcattttggtgatggttttggccatctattatctcaatgctactgccaagggccagaaggcagcgaatctggatctcaaaaagaagatgaaaatgcaagctttggagaacaaaatgcgaaacaagaaaatggcagctgcacgagcagctgcagctgctggtcgccagtaataagtatcctgagagcccagaaaaggtacactttgccttgctgtttaaaagtaatgcaatatgtgaacgcccagagaacaagcactgtggaactgctattttcctgttctacccttgatggattttcaaggtcatgctggccaattaaggcatcatcagtcctacctgagcaacaagaatctaaactttattccaagtcagaaactgtttctgcagagccactctctcccctgctccatttcgtgactttttttttttttttaacaaattgagtttagaagtgagtgtaatccagcaatacagtttactggtttagttggtgggttaattaaaaaaaatttgctcatatgaactttcattttatatgtttcttttgcc

SEQ ID NO: 292274 - DNA, 1000 bp, Homo Sapiens
gagatgtgcttttttcctgtgttagttcaaagaatctcttcttgcctcccattgctgattttctgtattgatggactcatttctctcaagagattggacaagctaaaattctagagagttcaaaagtgtttgaaagtacattttaagtgttctcaccacaaaaaatgctagtgtgtgaggtgatacatatgttaattagttcaactgatccattccacaatgtatacatatttcaaactatcgagttgtacatgataaatatatacaatttttatttgtcaaataaagaacatctataaatatttatagatttcaaaattgagaaagaagtatatatggagccacggttgttttgaccatttctccatgctttttgtttggggagggggacattttttggggggcagggactgtgttcagggaaagtacctgaccaacagaacttcaagtctcttccagagtgcgagactcagcttatctgatcaaggtgaacttgcccttcaatagacttgcccttgttactgcccagtgaggccaccaaggaccaagaacagttgagctctctcagggccttcccctttcaacaatttagttgaatgactcccttccatctatcagtcttactccaaatatatgaaattactatacattgaaatgcctgcaaactatatgcaaaaatgagtatgaggaaatcaaatgtaaatcatatgcaaatattattcaaccaagcttctataaaattgtacgtgtcaataacagtaaagaattttaattaattctgtcatttaaaattcatgcattccatattttgctttcagaacttatagtctatgccaattttgaaaaaactataagcacaaggaattaaatactattgagtatagaactgttgatttcaacatacactatagcactttgactaattacagatatatttgatagaaaagtcacatttctacaaggtaattttcaaaaagaaataaaacatttctgtaaactt

SEQ ID NO: 292275 - DNA, 1000 bp, Homo Sapiens; identical to SEQ ID NO: 223946

SEQ ID NO: 292276 - DNA, 1000 bp, Homo Sapiens
gcctttcgttttgtctcccctgtttttctgcctgcgttttctccacattagccactcaatttccagtaccatcctggcggatgacttcagcattagatggtcaggtgtatttttttattaataggcgcattcagtttggaaaagacagcttttcattaatgtcccacgtaaaggaatatggcctatacagtacgtacgctgctgcgtggtcatatttgttcctgtgatcttattgtattttcaaagtttggaagtatactcgtgtgctttgctatttttttatgcttcctggaatttggggactcatgagagacttgaggttagagttctgcaagtgagaagacactacatggttgcagctgccacatgaagaacccaagctcctgtcaaagttgtgaatgcgactttggatgagattaagaaggcccagtggacggttggtcttgaagagtggcagtgtgtggatttgaggacctctgcagaccatcagatcaaaggagggagagctgttttgggtgttttgttttttttgtttttatagcattttgctttttcttggaatgtaattttcctatggcatgttaactggtgcacatcgtgtaacctgtctggtgagcaacctacaattgggatgagttctaggtacatgtgtttgctgactttggggtaaacaactttgttataatacagtctctgccacagatgcatgtgacctcttcaggggcccagagtggctgaggaaggaaagcttcaagctggccatgggggtcccaaacagtcattccaggcttagatgatgactagcctaggtcatcagagcccagactccacagagactaaaatcagagctctgtcttgttatgataaatttcatttgcttggaaaaagaaatgctgaaagccagtgtttagaatctttgtgcagatgaccaaagcaattgacttggccaagaaaaggtaaggtaaataaacatttttcaaaatgaaaaaaaaaaaaaaaa

SEQ ID NO: 292277 - DNA, 1000 bp, Homo Sapiens
agctactctaattcttgatatgttctatgggttgtctctgattgaggttgataccagtgagcacatctacctccttgtccagcaaccagaatcagaggaagagcaagtgatgctagagagcctggggagacccactcaagaatatgtaatgccaatcctaggtttgatcttcctgatgggcaaccgtgtcaaagaggccaatgtctggaacttgcttcgaagatttagtgtggatgtagggagaaagcattccatcacccgtaagcttatgagacagcgctatctggaatgcaggccactgtcctactctaatccagttgaatatgagcttctatggggtcctcgagctcaccatgaaaccatcaaaatgaaagtcttggagtacatggccaggctctacagaaagcgaccacagaactggccagaacaatatagggaggctgtggaagatgaggaggccagagccaaatctgaggcaactatcatgtttttccttgaccccacgtgaagtctagggaatatgtatcacttcagctgagtggcataagttaaagatgccttggtaaaataggcattggggctctaaattagaatccaggtagggcttgtgtgggaagtacaaattgtgcttgctgtctgtgttccaattctagtagtatttccttccttttaatatactcttggattaggttaatgaccaatatttataaatggaatttttcatttgccatcccggtcttgtttcagcataaaagttcagacagctctgtaaaatgtattgataatatttacatctttgaaataattagtaaaatggtctggtacaggagttaaataacaatgacacacacacaacaaaacaaacacaaaaccactgatctgtgattgctctccctttgtgtctactgccgtatacatatatacaactatatatacacaaatatatatatacacaaaactgtcatttacctgtatttgcaataaaagcataatgaattag

SEQ ID NO: 292278 - DNA, 1000 bp, Homo Sapiens
ctaccccaccaagaagcatttaattttcggagatccaaagaaactcattactgaggactttgtgcgacagcgttacctggaataccggcggataccccacaccgaccccgtcgactacgaattccagtggggcccgcgaaccaacctggaaaccagcaagatgaaagttcttaagtttgtggccaaggtccataatcaagaccccaaggactggccagcgcagtactgtgaggctttggcagatgaggagaacagggccagacctcagcctagtggcccagctccatcctcttgaaaggtggattcagagggacccccgggacaagggtctgagacccaaaggcacagtttagaggattgggggaagggagaacgaacccagggagcatattgctgtaaacgcttcaatgtgtgtagctttaggatgtgtttgcaaagttttgtttttttaatgttgtgttattttgctccagattttcatctataaacaaaggagcatttgttttgattttactctttttggtataaaaaattttgctagcttagtaaaacgaattggaaaacttgactatgatctggaacagataatgcaagaaggaacacataagtaagttgctttggtgccaagaaaataaaaaagctattatcaggtctcctaactaccccagtttgtaaggaaaaataaaagtttttataaaattaaaaaaaataattgcctatatccttattatgttaacctattttatttttctatatttcgtacatatataagtattattcatggttccaagcaatgagtgtaatgtattttctcccaatagtaattgtttatattcataattattcagctctgctgctaaacacgtagttccacttcgtttttttcttcttgctactgtagttattacaataaatactgtatttttgaagcaaaaaaaaaaaaaaaaaaaaaaaaaaaaaaaaaaaaaaaaaaaaaaaaaaaaaaaaaaaaaaaaaaaaa

SEQ ID NO: 292279 - DNA, 1000 bp, Homo Sapiens
aacatttgtatgactcatacataaagtccttcccgctgaccaaagcaaaggcgagggcgatcttgacaggaaagacaacagacaaatcaccattcgttatctatgacatgaattccttaatgatgggagaagataaaatcaagttcaaacacatcacccccctgcaggagcagagcaaagaggtggccatccgcatctttcagggctgccagtttcgctccgtggaggctgtgcaggagatcacagagtatgccaaaagcattcctggttttgtaaatcttgacttgaacgaccaagtaactctcctcaaatatggagtccacgagatcatttacacaatgctggcctccttgatgaataaagatggggttctcatatccgagggccaaggcttcatgacaagggagtttctaaagagcctgcgaaagccttttggtgactttatggagcccaagtttgagtttgctgtgaagttcaatgcactggaattagatgacagcgacttggcaatatttattgctgtcattattctcagtggagaccgcccaggtttgctgaatgtgaagcccattgaagacattcaagacaacctgctacaagccctggagctccagctgaagctgaaccaccctgagtcctcacagctgtttgccaagctgctccagaaaatgacagacctcagacagattgtcacggaacacgtgcagctactgcaggtgatcaagaagacggagacagacatgagtcttcacccgctcctgcaggagatctacaaggacttgtactagcagagagtcctgagccactgccaacatttcccttcttccagttgcactattctgagggaaaatctgacacctaagaaatttactgtgaaaaagcattttaaaaagaaaaggttttagaatatgatctattttatgcatattgtttataaagacacatttacaatttacttttaatattaaaaattaccatattatgaaaaaaaaaaaaaaaa

SEQ ID NO: 292280 - DNA, 1000 bp, Homo Sapiens; identical to SEQ ID NO: 118513

SEQ ID NO: 292281 - DNA, 1000 bp, Homo Sapiens
tctgttttcaagaccatcacagaccaggtcctaatgggtgtggaccccaggggagaatcagaggtcaaagctcagggctttaaggctgcccttgtaatagacgtcacggccaagctcacagctattgacaaccacccgatgaacagggtcctgggctttggcaccaagtacctgaaagagaacttctcgccatggatccagcagcacggtggatgggaaaaaatacttgggatatcacatgaagaagtagactgaaatatcagatttgtcatcaggaatactctttgtctactgtggtcctgtgcacgttggcctcagatggactacaggagattacaacgtacaaggcagatggagcattgacgttttcaaaaccattattcctgtgactggagaggcatcaggagaggtctcgttcgtctccagctcataaaatgtagcagcatcatccttgacagtgatgtttttcaggccctccattgagaacctgaggaaatctgtaaagataagtggtgatgttgtttcaaacgttcagaacagataccatcatcctgcctttgttagctgctgtagggaaagtgcgttacagatgtctgctgacctcacaagagtgaaaagataaactgtgcatgtgtttccacttccgtttctagtactatttatttttaaactacacttggggtggcctaatacctaggaagatgttgctattcacgttagtaaacagcctaaagaaactcttaggtttactgctacatccatttgtttggagaggtaactgttgtctgtgcctttttgaaaaacttccatttggtacaaaatttttactccaacaccccctcaacccttttctcagggaccacacctcttcttcccaaggtccctgggacttcctcattctttgtggtagtacaatgattggtagcaggtaaaataaatacatagaaagactactgtcaaaaaaaaaaaaaaaaaaaaaaaaaaaaaaaaaaaaaaaaaa

SEQ ID NO: 292282 - DNA, 1000 bp, Homo Sapiens; identical to SEQ ID NO: 223947

SEQ ID NO: 292283 - DNA, 1000 bp, Homo Sapiens; identical to SEQ ID NO: 118515

SEQ ID NO: 292284 - DNA, 1000 bp, Homo Sapiens; identical to SEQ ID NO: 223948

SEQ ID NO: 292285 - DNA, 1000 bp, Homo Sapiens
gccagctgcccctcctgggagggcccgggaggagggtgccaccctctccctgccaggggcctggggaccctctccctggctgcctcaggcttctcttacgaagaggaaacgcaaaaaaagaaaaggaaaaaccccgtgctcgcccccttcctcctgccgtccactgcgcggcctcgtcagtcccggggctgactgtccctctcagctctgcgcctgccaggcagggcacgtgctcacagccctgggttgatttatttttttaagggggtagttttattttggtggggttgggtgggaaggaaggctgggggttttgtaaagtgtccactgctcgtcctgttaattttcctcaatttttcttcttcttccttctgtccctcctgccttccttctcttcccaagccctccaatccccatcccaggcttgctgtgtctcactgtccccaccctccttccctacttctttttttgtgtgtctggtttctcccttcctttcctccctttgggtttccagagtcggtgggagaagggcgggagggtgggcccgagtggcccagtgggtgggtggggtggggtggggcaagtgccccaactcccctcaccaggagaggcacctgcttggtgccgcccagggaaggggctcaggcctgacggaaggcctgttctgtgtgtgccgccgggcgacgtgcattgatggggaagctgctggaggagcaggggtggggggtgggagggaggggaaaggcaaatgcagatatatattacagacaaatactctagattccacgagcagcagcctgtggcacccgctgggcgcgggcagcagggaagagggagcaaggcattgtccacagactgctggggtcacttctttgcccacgggctccctgctcccccagttttttttctctctttgttaacaaatgtgtctgagtcttggaaaacaccccaaccccggaaatgtgtgggaaaaagaaaacaaaaactttccaaattccaa

SEQ ID NO: 292286 - DNA, 1000 bp, Homo Sapiens; identical to SEQ ID NO: 223949

SEQ ID NO: 292287 - DNA, 1000 bp, Homo Sapiens; identical to SEQ ID NO: 286582

SEQ ID NO: 292288 - DNA, 1000 bp, Homo Sapiens
cctctcaccgtcatcaccaaagagactgaaaaagcagtgccccccagagacattgaagaaggcaatgtgaagatgctgggcatgcagatccccataaagaatgttgagatgctggcctctgttttggttgccattagtgtcacccttctgctcgttgttctggctcttggtggagtggtttggtaccaacatcgacagagaaagctacgacgcaataggaggtccatcctggatgacagcttcaagcttctgtctttcaaacagtaacatctggagcctggagatatcctcaggaagcacatctgtagtgcactcccagcaggccatggactagtcactaaccccacactcaaaggggcatgggtggtggagaagcagaaggagcaatcaagcttatctggatatttctttctttatttattttacatggaaataatatgatttcactttttctttagtttctttgctctacgtgggcacctggcactaagggagtaccttattatcctacatcgcaaatttcaacagctacattatatttccttctgacacttggaaggtattgaaatttctagaaatgtatccttctcacaaagtagagaccaagagaaaaactcattgattgggtttctacttctttcaaggactcaggaaatttcactttgaactgaggccaagtgagctgttaagataacccacacttaaactaaaggctaagaatataggcttgatgggaaattgaaggtaggctgagtattgggaatccaaattgaattttgattctccttggcagtgaactactttgaagaagtggtcaatgggttgttgctgccatgagcatgtacaacctctggagctagaagctcctcaggaaagccagttctccaagttcttaacctgtggcactgaaaggaatgttgagttacctcttcatgttttagacagcaaaccctatccattaaagtacttgttagaacactgaaaaaaaaaaaaaaaaaaa

SEQ ID NO: 292289 - DNA, 1000 bp, Homo Sapiens
atgcacccacccccagtgtcaggtgcttctcctctcctcctccaccacctcctcctcctcctcctcatcatcatcctcacttgttgaggacgtcctgtgtgccaagtggtttatatgcccagcctcatttaatcctcagaatgactccatgaggtagctactaaaaccccccacttaacagatgaggaaactgaggcctagagaagctcaacaagttgcctaagttccaagtttcctctcccaactctcctaccctctcctcttccttctcctttctcccattcttccctgcctcttccctaactagacaattttttattgagtgtctcccaggtgcaggcatgagccaggtgctgggaaaatcatgataacccagctccttctggtcattttctcagctggttagaggctgggaggacacgcaagttcagctccagccgactggggcattggtggtagcccctggagacattgtgcaatggggctacgaggctgcatctggctccagggaagcgtgttgcaatccatgagtgatgtctgccatgcgtacaggcatggagagtgaggcgcctgtactgtctttctgtagaccctagactggtggggcctctgaaatgcatccagacactgtgctgggtgtgttgcatggccctcccaaccaattcagtatttttctccccattttccagggagaaatctaaggcgtcagaatgtaaggttcttattggaacccaggctccagggtccctggttttctgtgacatcatgctgcaggaccctgtttctctctttgctttggctgctggggagctcagaagggagctttaggcttgctctcagtcaccacattagctcaggggtttgggcatttttgtcgccgtctcctttgggctctgtctcctccctgctgtgcttcctgaggagcaggccggatgtaagttatcaactataaataaaaccaagacttccgttctggctctcaaaaaaaaaaaaaaaaaaa

SEQ ID NO: 292290 - DNA, 1000 bp, Homo Sapiens; identical to SEQ ID NO: 223950

SEQ ID NO: 292291 - DNA, 1000 bp, Homo Sapiens
ataatctggataatttgctatgaagttatgagggatacaagtgaaatactggggaagaaaatggattggaaagtaaaattggtactaaagcccatactgattatcttgactttgttttttaaggcataggtatatattttggatcaaaatccttccaaatttgaaaactcaataaaaataacacttattaaattctagttagtgtagcactcatgctgaagtaaacatgatcgtaggcagaagcaaaattttattataaaatctaaaacaaaactttatagagttgaatctattccatctgacttcaatatttgccaaacgtttattttacctcctagattgatgttggtatagtatccttaatacagtgtagtatattaatgtccttaatacaatcaggaggtttttacctttaagcaaataaattatgtcattattgaaaaagacttaagggatgattagacttggcaatctgtaagcaggagtataaatgttttaaattgcattgtccctatgtaactatcttaatggctatatatatgtattttataaagccatttatgtatacacatgtaacttggaatttccttcatccctacacattttctacacttacatcaccttattgcataaaacaaagtcacgcgctttctgcttgaacatcaaaatatcaaaaaccaaggtacccaaaagatacaagtcagagacaacatccttgtccatatccaaacccagtgtttcagtgctagcaacttaatttctcatacatttatagagtttggtttgctttgctagttgtgtgaatcattgggctgtttttagagccactgttaagagagaatataaaataatcatgacaattactactgtttccacatttacaaattgtgtacttaaatgaacctcatttcccttttatttctgaatggcttgtctgagaggaaacaaaattaaaattcatctgggaaaaaaaaaaaaaaaaaaaaaaaaaaaaaaaaaa

SEQ ID NO: 292292 - DNA, 1000 bp, Homo Sapiens
atttctcttcaccagcaaaagacacaccatgggtgtgtgcagcatccagagcagccctcatcgggagcacatcctggccacgggaagctatgatgaacacatcctactgtgggacacacgaaacatgaagcagccgttggcagatacgcctgtgcagggtggggtatggagaatcaagtggcaccctttccaccaccacctgctcctggccgcctgcatgcacagtggctttaagatcctcaactgccaaaaggcaatggaggagaggcaggaggcgacggtcctgacatctcacacattgcccgactcgctggtgtatggagccgactggtcctggctgctcttccgttctctgcagcgggccccctcgtggtcctttcctagcaacctaggaaccaagacggcagacctgaagggtgcaagcgagttgccaacaccctgtcatgaatgcagagaggataacgatggggagggccatgccagaccccagagtggaatgaagccactcacagagggcatgaggaagaatggcacctggctgcaggctacagcagccaccacacgtgactgtggcgtgaacccagaagaagcagactcagccttcagcctcctggccacctgctccttctatgaccatgcgctccacctctgggagtgggaggggaactgagcttgaaatcatgaagccccttcccacaaggaaaccaggagggagactgcgagtgagtgcccgggaccacctcatcagagatgcttactgcagccctgcaggtgcctgggcactgatggaatccacagtgtagtcagaaaagctgttgacttctcttaaatcagcttccctgctgggcccctgaaagtggactgggtgattctgtctggcagagagtggggaaaagacgcggtttccagcttgcagatttgttaagtttctcaggcagattttgactttcagcctttcatacttgtttaagcaactatttgtattaaatgaagttttttg

SEQ ID NO: 292293 - DNA, 1000 bp, Homo Sapiens
taaattaaaaataccttttggaaataaattactagatgctgtttgtttggtacctaacaagagcttaacatatggaataattcttacacatggagcatcaggagatatgaatcttcctcatttgatgtcactggcatcccatcttgcatctcatgggtttttctgcctgagatttacctgtaaaggccttaatattgtacatagaattaaggcgtataaatcagttttgaattacctgaagacatcaggagaatacaaacttgcaggtgtttttcttggaggtcgttcaatgggctcaagagcagctgcttctgtaatgtgtcacattgagccagatgatggtgatgattttgttcggggtctcatttgtatttcttacccactgcaccatccaaagcagcagcataaactcagagatgaagacctctttcgtttaaaagagcctgtactgtttgtgtcaggctcagcagatgaaatgtgtgaaaagaacttgttggagaaagtggcacagaaaatgcaagctccccataaaatccactggattgagaaggcaaatcattccatggcagtgaaaggacggtcgacaaatgatgttttcaaagaaataaatacacagattttgttttggatccaagaaattactgaaatggacaagaaatgtcattagttaaaagccatgttatcttgagtacacatacagttaatttgataaagaagagtatgcctctcagcattgtgagatatatttcagactaatttgatgttctttaatgttcccttatttttgaaacacgttttaaatgtgaaattaatgtccttcacaaaatgtcttttgaaagcactgttacagttgtataaagatgatgtaaaaatattgaaggtggtctacatataatttattttcattagtatagttaagttttgaaaaaaattaaacatctgaattttgttaaaaaaaaaaaaaaaaaaaaaaaaaaaaaaaagaaaaaaaaaaaaaaaa

SEQ ID NO: 292294 - DNA, 1000 bp, Homo Sapiens; identical to SEQ ID NO: 220435

SEQ ID NO: 292295 - DNA, 1000 bp, Homo Sapiens
tcaggcaaaaacccctgactccatgttcttggccatgctagctgtagtgtcctgtgcgtctataggatcgggtgaaccaccaaccggcaattgaaagctgcacagcctgaaattacctttattcaattaatgcaaaaacaaaaggggagatgttggaggccgaaggaatgagggtcgtgaccaactcagtataccactggaggctctgtgagcaaacagcaaactgttctcatgaaagcaggatgttggcgaactgacaaactctgtctgccgccagaaggaatgctgggggcagtcatgtcccaggtcccgtgctccttgaggttatccacaggaacatccagaacctgttgaacaaagaaaggaatcatgtgggcctgtgttaaatcaaatagctgaccgacagttatcccttcctccctattcactctacctaataaatatgaagggctgtaaaagctcaggtccctgttccctaatatcaaggagccccctgaccccttctttcaaacagatccttttgtctgtctcatttctgcattcgtcgtccttcgttcggtccagaagcaaccgcgacagtcctgcatgtgttgatgccacctgtatgtgcaggtgtgacctcaggtgtgtgagtatccctcataccccttatcatcactgcctattcgctcttcctccagcctctggcaaccactaatccacgttatatgtctagatttgcctcttctggacacttcatataaatggagtcatacaatatgtggtttcttgtgtctggctttttaccactgaacgttttcagagttcatccatgttgtagcatgtatcagtttttcattcctctttatggctgaataatactgcattgtatggatataccacagtttgtttactcattagttcatagacattggggttgtttccaactctctgatattataaatgctactgctgtgaaaaaaaaaaaaaaaaaaaaaaaaaaaaaaaaaaaaaaaaaaaa

SEQ ID NO: 292296 - DNA, 1000 bp, Homo Sapiens; identical to SEQ ID NO: 118517

SEQ ID NO: 292297 - DNA, 1000 bp, Homo Sapiens
acaggacggcatcagaattaatgtaactacactgaaagatgatggggacatatctaaacagcaggttgttcttaacataacctatgagagtggacaggtgtatgtaaatgacttacctgtaaatagtggtgtaacccgaataagctgtcagactttgatagtgaagaatgaaaatcttgaaaatttggaggaaaaagaatattttggaattgtcagtgtaaggattttagttcatgagtggcctatgacatctggttccagtttgcaactaattgtcattcaagaagaggtagtagagattgatggaaaacaagttcagcaaaaggatgtcactgaaattgatattttagttaagaaccggggagtactcagacattcaaactataccctccctttggaagaaagcatgctctactctatttctcgagacagtgacattttatttacccttcctaacctctccaaaaaagaaagtgttagttcactgcaaaccactagccagtatcttatcaggaatgtggaaaccactgtagatgaagatgttttacctggcaagttacctgaaactcctctcagagcagagccgccatcttcatataaggtaatgtgtcagtggatggaaaagtttagaaaagatctgtgtaggttctggagcaacgttttcccagtattctttcagtttttgaacatcatggtggttggaattacaggagcagctgtggtaataaccatcttaaaggtgtttttcccagtttctgaatacaaaggaattcttcagttggataaagtggacgtcatacctgtgacagctatcaacttatatccagatggtccagagaaaagagctgaaaaccttgaagataaaacatgtatttaaaacgccatctcatatcatggactccgaagtagcctgttgcctccaaatttgccacttgaatataattttctttaaatcgttaagaatcagtttcaaaaaaaaaaaaaaaaaaaaaaaaaaaaa

SEQ ID NO: 292298 - DNA, 1000 bp, Homo Sapiens
aatggaagtggcctcatggatgaatccggggtatgagcccaggagaacgtgctgcttttggtaacttatccctttttctcttaagaaagcaggtactttcttattagaaatatgttagaatgtgtaagcaaacgacagtgcctttagaattacaattctaacttacatattttttgaaagtaaaataattcacaagctttggtattttaaaattattgttaaacatatcataactaatcataccagggtactgcaataccactgtttataagtgacaaaattaggccaaaggtgatttttttttaaatcaggaagctggttactggctctactgagagttggagccctgatgttctgattcttcaaagtcaccctaaaagaagatctgacaggaaagctgtataatgagatagaaaaacgtcaggtatggaaggctttcagttttaatatggctgaaagcaaaggataacgaattcagaattagtaatgtaaaatcttgataccctaatcttgcttctggatctgttctttttttaaaaaaacttccttcaccgcgcctataatcctagcactttgggaggccgaggcaggcagatcacggggtcaggagatcaagaccatcctggctaacatggtgaaaccccgtctctactgaaaatacaaaaaattagccgggtgtggtggcgggcgcctgtagttccagctactcgggaggctgaggcaagagaatggcatgaacccggtaggggagcttgcagtgagcccagatcatgccactgtactccagcctaggtgacagagcaagactctgtctcaaaaacaagcaaacagacttccttcaacaaatatttattaaatatccactttgcaacagcactgaaatggctgtaaggactcctgagatatgtgtccagcaaggagtttacagtcaaacaggagagacatgcctgtagttacatccagtgtgatgggtgctgagaggcaagtacaaaccacgatg

SEQ ID NO: 292299 - DNA, 1000 bp, Homo Sapiens
agtgtagagcccagaccttttgatcctcagtattatgaagatgaatttgaagatgaagaaatgctggatgaagaaggtagaaccaggttaaaattaaaggtagaaaatactataagatggaggatacgccgagatgaagaaggaaatgaaattaaagaaagcaatgctcggatagtcaagtggtcagatggaagcatgtccctgcatttaggcaatgaagtgtttgatgtgtacaaagccccactgcagggcgaccacaatcatctttttataagacaaggtactggtctacagggacaagcagtctttaaaacgaaactcaccttcagacctcactctacggacagtgccacacatagaaagatgactctgtcacttgcagataggtgttcaaagacacagaagattagaatcttgccaatggctggtcgtgatcctgaatgccaacgcacagaaatgattaagaaagaagaagaacgtttgagggcttccatacgtagggaatctcagcagcgccgaatgagagagaaacagcaccagcgggggctgagcgccagttacctggaacctgatcgatacgatgaggaggaggaaggcgaggagtccatcagcttggctgccattaaaaaccgatataaagggggcattcgagaggaacgagccagaatctattcatcagacagtgatgagggatcagaagaagataaagctcaaagattactcaaagcaaagaaacttaccagtgatgaggaaggtgaaccttccggaaagagaaaagcagaagatgatgataaagcaaataaaaagcataagaagtatgtgatcagcgatgaagaggaagaagatgatgattgaagtatgaaatatgaaaacattttatatattttattgtacagttataaatatgtaaacatgagttattttgattgaaatgaatcgatttgcttttgtgtaattttaattgtaataaaacaatttaaaagcaaaaaaaaaaaaaaaa

SEQ ID NO: 292300 - DNA, 1000 bp, Homo Sapiens
tctcacatgtcggcgttcttggccaatggatacaaagataaagaaaatgttgcctttttctaggaactgtcagaaatcctcatgcctttcaagacttctgtgaatgacttgaattttttattccctgcctagggtctgtgaacgaggcctgtctcttccctggggtttctttccatggcctttatttctcctcttccagtgggagttttgcaggctcttctctgtggaaacttcacgagcgttggctgggcctcggcttcgctggagtgtactccagggtgaaggcagagtgggatttgagacccaggttaggcacgacccaggctgagaagggacgtttccatcattcacagtgccctccccacagcactacctcaccccgacccccaccctcactcctaccccaccccgcgatcgtcaggggtgccacggtgggccggagggtgccggctctggctgtccctgtgccggtccctcacaaacctctccccctttgaaactcaagcacagctgcgaggagggcagcgaggagggacccctctctcatggttgtctctttcccccgctatgtcataggtagtggaggaagcgaaggaagtgaacgctgaatgtgacgcatttctgaagagctcagctgtcaccgggcatagcctggaagccccaagtctgttctgactttgcctggctgtctccttgacccgcctcctagatcattgtccttgatgtccaggctgggtcatttaaaatagagatgcaatcaggaaggttgggggacttgggactgtggctgaattgagaccttgctgatgtattcatgtcagcacctgagtcacagcccaggtgcccggaagcagcctcttcgcataggcagtgatttgcgattactttaaagctcaccttttttcttcccttctctgttcgctgctgtcagcataatgattgtgttccttccctatgggatccatctgttttgtaaacaataaagcgtctgagggagtgt

SEQ ID NO: 292301 - DNA, 1000 bp, Homo Sapiens; identical to SEQ ID NO: 118519

SEQ ID NO: 292302 - DNA, 1000 bp, Homo Sapiens
ggcagagatgctctctctccacggcctcagagccactcccagccacagtttccagcatctctgtggacagggaccacagctcccagcttcttccagttctcgcagcaccagaccagcctctgcagctgcacttcagctccgcagacctgcgctatctcagcagacctcacttgccccatggccttcatggcgcgctccaggcctcagacccttctctgtgttccgtcctggccatgggcttgttgcagtcagcaggtgtgggcttaggcgggcaccctgtggccaggggtactgcgtgaggccctcagttggtcctgtgcctctcaccagcacttagacagacacgtcaccagactttcaaggagatactgcagtgagtttctctggttggaaggggagggttggtgagtcccagaccttaaaaatacaaggttaagagggaccccaaagcaaaaaattccaacccttttcctcccagtcattgaaacaccaaaactattataccggagggtgtaatagttttgctgcccagttgtggtaggccagtagtggcctcccaagatgcccatgtcctaatcccaggaacctgtcaaaattaccttgtatggccaaaggggctttgcagatgtaatgaagttaaggatctttcgccaggaagattatcccagcttgttcaggagggcttgatgtcctcacccgggtctgtataacagaagagcaggtgacgggagaggaggttggaggtgtagcgatggagcaggaaactggagttgaggagggcagctcaagccacagagtccaggccacctcagagccaggaaatgcatcctcccacagagccctggaaggccccagccctgctcccacctggactggctcagtgaggctaattttataattctggctgattttagaactctaagggaataaatttgtgttgttttaagtcaaaaaaaaaaaaaaaaaaaaaaaaaaaaaaaaaaaaaaaaaaaaaaaaaaa

SEQ ID NO: 292303 - DNA, 1000 bp, Homo Sapiens; identical to SEQ ID NO: 118522

SEQ ID NO: 292304 - DNA, 1000 bp, Homo Sapiens; identical to SEQ ID NO: 223957

SEQ ID NO: 292305 - DNA, 1000 bp, Homo Sapiens
aaggatatccaggtacctgtgtgccctctctgtaatgtgcctgtgcctgtggccagaggggagccccctgaccgtgctgtgggagagcacattgacagagactgtcgctctgatccagcacagcaaaaacgtaagatcttcaccaataagtgtgaacgcgctggctgccggcagcgagaaatgatgaaactgacctgtgaacgctgtagccgaaacttctgcatcaagcaccggcatccactggaccatgattgctctggggaggggcacccaaccagccgggcaggacttgctgccatctccagagcacaagctgtggcttctacaagcactgtccccagcccaagtcaaaccatgccttcctgtacctctcccagcagagccacaacccgatctccgtcctggacagcccctccagtgattgctttgcagaatggcctgagtgaggatgaagctctgcagcgggccctggaaatgtccctggcagaaaccaaaccccaggttccaagttgtcaggaggaagaagacctagctttagcacaagcactgtcagccagtgaggcagaataccagcggcagcaggcccagagccgcagctcgaagccgtccaactgcagcctgtgctagggccctgggcttggggagggaggttcacctgaggaggactgtggccctcacacctctagggtacacagggagaggaggcccggagcaccctggagggcagagacaagcgggagtgatgtggaggtcgccctgggagcctctggaaggccttgctagtgctccagctgcatggaagagagcggctagcaactgttccctggttgggccctcagtggatgctggccaggccctactcttagccccttcatcatgtcatctcccttatgctggagctgccccgatgtggagtgggcaggaaggggcctggaaaaaataaaggatcttggcagttgataaaacgtaaaaaaaaaaaaggaaaaaaaaaaaaaaaaaa

SEQ ID NO: 292306 - DNA, 1000 bp, Homo Sapiens; identical to SEQ ID NO: 118523

SEQ ID NO: 292307 - DNA, 1000 bp, Homo Sapiens
tcctggccctcatctttgccatagtcacgacatggatgtttattcgaagctacatgagcttcagcatgaaaaccatccgtctgccacgctggctggcagcctcgcccaccaaggagatccaggttaaaaagtacaagtgtggcctcatcaagccctgcccagccaactactttgcgtttaaaatctgcagtggggccgccaacgtcgtgggccctactatgtgctttgaagaccgcatgatcatgagtcctgtgaaaaacaatgtgggcagaggcctaaacatcgccctggtgaatggaaccacgggagctgtgctgggacagaaggcatttgacatgtactctggagatgttatgcacctagtgaaattccttaaagaaattccggggggtgcactggtgctggtggcctcctacgacgatccagggaccaaaatgaacgatgaaagcaggaaactcttctctgacttggggagttcctacgcaaaacaactgggcttccgggacagctgggtcttcataggagccaaagacctcaggggtaaaagcccctttgagcagttcttaaagaacagcccagacacaaacaaatacgagggatggccagagctgctggagatggagggctgcatgcccccgaagccattttagggtggctgtggctcttcctcagccaggggcctgaagaagctcctgcctgacttaggagtcagagcccggcaggggctgaggaggaggagcagggggtgctgcgtggaaggtgctgcaggtccttgcacgctgtgtcgcgcctctcctcctcggaaacagaaccctcccacagcacatcctacccggaagaccagcctcagagggtccttctggaaccagctgtctgtggagagaatggggtgctttcgtcagggactgctgacggctggtcctgaggaaggacaaactgcccagacttgagcccaattaaattttatttttgctggttttgaatgaaaaaaaaaaaaaaa

SEQ ID NO: 292308 - DNA, 1000 bp, Homo Sapiens
ctttataagttgttggactctagtaccaagaaacaacaacaaacgagatacattataattactgtctgattttcttacagttctagaatgaagacttatattgaaattaggttttccaaggttcttagaagacattttaatggattctcattcatacccttgtataattggaatttttgattcttagctgctaccagctagttctctgaagaactgatgttattacaaagaaaatacatgcccatgaccaaatattcaaattgtgcaggacagtaaataatgaaaaccaaatttcctcaagaaataactgaagaaggagcaagtgtgaacagtttcttgtgtatcctttcagaatattttaatgtacatatgacatgtgtatatgcctatggtatatgtgtcaatttatgtgtccccttacatatacatgcacatatctttgtcaaggcaccagtgggaacaatacactgcattactgttctatacatatgaaaacctaataatataagtcttagagatcattttatatcatgacaagtagagctacctcattctttttaatggttatataaaattccattgtatagttatatcattatttaattaaaaacaaccctaatgatggatatttagattcttttaagttttgtttatttcttttaagttttgtttgtggtataaacaataccacatagaatgtttcttgtgcatatatctctttgtttttgagtatatctgtaggataactttcttgagtggaattgtcaggtcaaagggtttgtgcattttactattgatatatatgttaaattgtgtcaaatatatatgtcaaattccctccaacattgtttaaatgtgcctttccctaaatttctattttaataactgtactattcctgcttctacagttgccactttctctttttaatcaaccagattaaatatgatgtgagattataataagaattatactatttaataaaaatggatttatattttt

SEQ ID NO: 292309 - DNA, 1000 bp, Homo Sapiens
gggtgaccttccgcaagatcctgtctcacttccccgaggagctgagtctggctttcgtctacggctccggggtgtaccgccaggcagggccgagttcagaccagaagaatgctatgctggactttgtgttcacagtagatgaccctgtcgcatggcattcaaagaacctgaagaaaaattggagtcactactctttcctaaaagttttagggcccaagattatcacgtccatccagaataactatggcgctggagtttactacaattcattgatcatgtgtaatggtaggcttatcaaatatggagttattagcactaacgttctgattgaagatctcctcaactggaataacttatacattgctggacgactccaaaaaccggtgaaaattatctcagtgaacgaggatgtcactcttagatcagccctcgatagaaatctgaagagtgctgtgaccgctgctttcctcatgctccccgaaagcttttctgaagaagacctcttcatagagattgccggtctctcctattcaggtgactttcggatggtggttggagaagataaaacaaaagtgttgaatattgtgaagcccaatatagcccactttcgagagctctatggcagcatactacaggaaaatcctcaagtggtgtataaaagccagcaaggctggctggagatagataaaagcccagaaggacagttcactcagctgatgacattgcccaaaaccttacagcaacagataaatcatattatggaccctcctggaaaaaacagagatgtggaagaaactttattccaagtggctcatgatcccgactgtggagatgtggtgcgactaggcctgaagaagtcagtgatttatagttcactaaaactgcacaaaatgtggaaagggtggctgaggaaaacatcctgattttgcttgcttttatatatgttatgtgtagatgaataaagtgtttgatcctttttgacaaaaaaaaaaaaaaaaaa

SEQ ID NO: 292310 - DNA, 1000 bp, Homo Sapiens; identical to SEQ ID NO: 223958

SEQ ID NO: 292311 - DNA, 1000 bp, Homo Sapiens; identical to SEQ ID NO: 223959

SEQ ID NO: 292312 - DNA, 1000 bp, Homo Sapiens
tccctcttgccccgtctcatcagggagagaaaggaggacagccacagagacacatgtcttactttcagaatttccacggggggactaggagggcagcattgctggggagaggggctcctgttctgccgtggagctgcccacggagcacctcacagaagattgagaaagtgcctgatgcccgcgtcagagaccagaggagccaactgagatgatggggtgggggtgctccccccagactttctcagtcctgcagcggcccttgggggtgacccccggcatctaccccactcaggaaaccttgacttctgaattcctatcaggtccagagggtggaaggccctggcaggaagcaggaggaggaggagaggggggtccaggtcttttcaggatcccagctgtgggtgcttctgttgggcccagtggcccctgctatccccacagcctcattcctgcagaaggtttgtgacgtagctgtgcctgtacctggggcagagaggatgccagggacaccaggcctctggcctctccacgagtcactgctctccccattggcagcacgggacccatgctgtgcccccggccaggccctgaggaaatgctcagcctcagtggagatggggaggttagagagatggaggcgtgagtgagaacgggaagcaaaggaatacacgtgggaactaaagagaaaaatgaccagcctgggcagcatagcaagaccctgtctctaaaaaaaataataaaaacttagctgggcatggtggtgcatgcctgtggtcctggctacttgggaggctgaggatggaggatcatttgagcccaggaggtcgaggctgcagtgaaccgtgatcacgccactgcaccccagcccaggcaacaaagtgagcccctgtctctaaataaataaagagacaataagccactcaaaaaaaaaaaaaaaaaaaaaaaaaaaaaaaaaaaaaaaaaaaaaaaaaaaaaaaaaaaaaaaaaaaaaaaaaaaaaa

SEQ ID NO: 292313 - DNA, 1000 bp, Homo Sapiens
taacatttcctatctgactgttctgacacccagggaaattctctcttcagatgctgtagctatcacatgggctgatcgagcttttccctcattagcatggattatgccttttgctatttctacctcattatttagcaaccttctgatttctatatttaaatcatcgagaccaatatatcttgcaagccaagagggccagctgcctttgctatttaatacacttaatagtcactcttctccatttacagctgtgctactacttgtcactttgggatcccttgcaattatcttaacaagtctaattgatttgataaactatatttttttcacgggttcattatggtctatattattaatgataggaatactaaggcggagataccaggaacccaatctatctataccttataaggtgtttttgtcatttccattagcaacaatagtcatcgacgtgggcttggttgtgataccattggtaaagtctccaaatgtgcattatgtctacgtgcttctgttagttctcagcggattactattttacatacctttaatacattttaaaataagattggcttggtttgagaagatgacttgctatttacaattactatttaatatttgcctccctgatgtgtctgaggaatagatgtcggaagtgcaaactcttaaaaaattggccttctaaaaaacatatatcagattccaaatcaaggttaaacatatgatagaacattcatggtgaaattcctatggtaaatatttttttctcaaatgaaataagtaatgtatacaaaagtgcctaagacagtacctggcttcagagtcactaagaaattgctaaaagctctgcttcgcatggtaaaaaacttaagtcctggtttgcgtagcttgatagagtgattatacaacttccattctctcactttttttttctgtatcccaccccttttctactgaatttgtggggatcctataataaaagtgaatgactaaaaatttt

SEQ ID NO: 292314 - DNA, 1000 bp, Homo Sapiens; identical to SEQ ID NO: 223960

SEQ ID NO: 292315 - DNA, 1000 bp, Homo Sapiens
cgggagtgcctgttgttctcattacaacccttctggttattccggtggttgtcctgctggccattgccatatttattcggtggaaaaaatcaagggcctttggagattctgaacacaaactcgagacgagttcaggaagagtactgggaagatttagaggaaagggaagtggaggcttaaaccttggtaatttctttgcaagccgtaagggctacagtcgaaaagggtttgaccggcttagcactgagggcagtgaccaagagaaagaggatgatggaagtgaatcagaagaggagtattcagcacctctgcctgcgctcgcaccttcctcctcctgaaaaccaagctttgatttagattgagtaagatttacccagaatgtcagattcctttccctttagcacgtttaaagttctgtgtatttaattgtaaactgtactagtctgtgtgggactgtacacactttatttacttcgttttggttaagttggcttctgtttctagttgaggagtttcctaaaagttcataacagtgccattgtctttatatgaacatagactagagaaaccgtcctctttttccatcataattctaatctaacaatggaagatttgcccatttacacttttgagactttttggtggatgtaaataaccccattctttgcttgaacacagtattttcccaatagcactttcattgccagtgtctttctttggtgcctttcctgttcagcattcttagcctgtggcagtaaagagaaactttgtgctacatgacgacaaagctgctaaatctcctatttttttaaaatcactaacattatattgcaatgaaggaaataaaaaagtctctatttaaattcttttttaaattttcttcagttggtgtgtttttgggatgtcttatttttagatggttacactgttagaacactattttcagaatctgaatgtaatttgtgtaataaagtgttttcagagcaaaaaaaaaaaaaaa

SEQ ID NO: 292316 - DNA, 1000 bp, Homo Sapiens
aaaccacttggatgactgcagttggtctttcagagatggcagcagaagctgcatatcaaactggcgcagatcaggcctctataaccgccaggaatcacattcagctggtgaaactgcaggtggaagaggtgcaccagctctcccggaaagcagaaaccaagctggcagaagcacagatagaagagctccgtcagaaaacacaggaggaaggggaggagcgggctgagtcggagcaggaggcctacctgcgtgaggattgagggcctgagcacactgccctgtctccccactcagtggggaaagcaggggcagatgccaccctgcccagggttggcatgactgtctgtgcaccgagaagaggcggcagatcctgccctggccaatcaggcgagacgcctttgtgagctgtgagtgcctcctgtggtctcaggcttgcgctggacctggttcttagcccttgggcactgcaccctgtttaacatttcaccccactctgtacagctgctcttacccattttttttacctcacacccaaagcattttgcctacctgggtcagagagaggagtcctttttgtcatgcccttaagttcagcaactgtttaacctgttttcagtcttatttacgtcgtcaaaaatgatttagtacttgttccctctgttgggatgccagttgtggcagggggaggggaacctgtccagtttgtacgatttctttgtatgtatttctgatgtgttctctgatctgcccccactgtcctgtgaggacagctgaggccaaggagtgaaaaacctattactactaagagaaggggtgcagagtgtttacctggtgctctcaacaggacttaacatcaacaggacttaacacaggcctcttgttccttcctttctttccgtttctctattgtatccaaaggagaagagtgtaagattttgtttgcatctgaaagagaaaatgcgtctctcctggggtcctaaaaaaaaaaaaaaaaaaaaaa

SEQ ID NO: 292317 - DNA, 1000 bp, Homo Sapiens; identical to SEQ ID NO: 118526

SEQ ID NO: 292318 - DNA, 1000 bp, Homo Sapiens
gaggcacaggtggaaggggcaccatgctgcaaggagagtatacctactctttgggccaagtttatgatcccaccacaacctaccttggagctcctgtcttctatgccccccagacctatgcagcaattcccagtcttcatttcccagccaccaaaggacatctcagcaacagagccattatccgagccccttctgttagaggggctgcgggagtgagaggactgggcggccgtggctatttggcatacacaggcctgggtcgaggataccaggtcaaaggagacaaaagagaagacaaactctatgacattttacctgggatggagctcaccccaatgaatcctgtcacattaaaaccccaaggaattaaactcgctccccagatattagaagagatttgtcagaaaaataactggggacagccagtgtaccagctgcactctgctattggacaagaccaaagacagctattcttgtacaaaataactattcctgctctagccagccagaatcctgcaatccaccctttcacacctccaaagctgagtgcctttgtggatgaagcaaagacgtatgcagccgaatacaccctgcagaccctgggcatccccactgatggaggcgatggcaccatggctactgctgctgctgctgctactgctttcccaggatatgctgtccctaatgcaactgcacccgtgtctgcagcccagctcaagcaagcggtaacccttggacaagacttagcagcatatacaacctatgaggtctacccaacttttgcagtgactgcccgaggggatggatatggcaccttctgaagatgcttttttaaatttaagaataagacacacaaaactctattaaaaaaaaaaaagaaataaacctctaactcggtccccaatgatcataaataatatgtttcctaaagaaatgcctttccagagactgtatagcttataccaattatagaatcatgaagtaaaaaaaaaaaaaaaaa

SEQ ID NO: 292319 - DNA, 1000 bp, Homo Sapiens; identical to SEQ ID NO: 115530

SEQ ID NO: 292320 - DNA, 1000 bp, Homo Sapiens; identical to SEQ ID NO: 223965

SEQ ID NO: 292321 - DNA, 1000 bp, Homo Sapiens; identical to SEQ ID NO: 118530

SEQ ID NO: 292322 - DNA, 1000 bp, Homo Sapiens
ggcagatgactttgaaaattaccataaactgcggaggtcatcttccaaatgcattcatgaccatcactgtggatcacagctgtccagcactaaaggcagccgcagtaacctcagcacaagagatgcttctatcttgacagagatgcccacacagccaggaaaacccctcatcccacccatgaacagaagaaatatccttgtcatgaaacacaactactcgcaagatgctgcagatgcctgtgacatagatgaaatcgaagaggtgccgaccaccagtcacaggctgtccagacacgataaagccgtccagcggttctgcctcattgggtctctaagcaaacatgaatctgaatacaacacaactagggtctagaaagaaaattcaagagaagaactatttatacaaacatggggactgtgaaaagaaaattctatagtgaattgtgaaaagtggacatatttctaaattcattccactgcctttatccaaacttaagaattacagacatttgttattccttcggcaagacatccccgctgcacactgatatgttcatttcgtaatttggttgctggccaccaagtgctccttagtttttaaatacattttgagattaactggaaacttgaagaagaaattagttcccgattaagactatcccaactttatttttattgtcagtttcacttttgtttctatgttgttttatgtctttgttatataattgtacattgtgtgatatgtgaaaaaaaaacacgaatttggatgaaccttgtgttacatgtacattgttttcattatatagacagcttgagaatagtgcgttcctgaatgattttgaacatgctacagtgaaaagtgacagtgtggaccatggaatcaccagctagaggttatggactatacacacctattattatattctgattaaatacaggaaaaagtaacaagtaaaattactagattgcaataaaaaaattcattttttggtctttcctg

SEQ ID NO: 292323 - DNA, 1000 bp, Homo Sapiens
ttttgaacctgtaccacctaatgtagaaaaggcccgcctccagtgcccttctttccaaaacagctacacaaatgcttctgaatgccctggatacgcagaccgagtggcagtctggctaaaggcccatccagcactattgtgcccaagagccttaccgggcattccctgaagccccctcataggcagtgatcctagaccaaactcttaaatagaatcacttttgtttcctagaagagatcaaagagtggttgcttcttactttgaagatgaaattataccaagttaggttttttgctatctattgatccaaaaaatatattcgtgcaattaaagttaagtgttcaacttagtatttcaagttgggattcaggttgaggcattttcctgcagaatgggcaattttatgcatttatattcatcagtgctgccctcactttggatctattgtattcttacagtttaatcaactggcaaagtgctttcatgctttggagattaactataaaagcaagattaagaaaaatatgttaattaccatatccctggaactccttctcaggctggtgggggcagccttgcaagagaaacagcagcctttgtctcttccctcttgtggggagcaaggaggggatgagcggtaccttgggagacccggtaaaagtctaaagaattgagaatttgactatcttgggggtaaaatgctgtcataggggcagcagtctcagggggtgtaaactctggaatccactatggtttaccttgagtggcctgcacgaacatgacagccctgatctgtatttcctttccattcagaaaaccttaaaaaaaaaaaacttgttttatgataatattataacaatcataactaacatttactgtgcccggcagcaaattaagtatttgacaaacattatttcattaaacgagactgtcaatcattactcaaagaatgatgaaggtatttggtgtatgccaaagaataaaggcgttttatttcaaa

SEQ ID NO: 292324 - DNA, 1000 bp, Homo Sapiens; identical to SEQ ID NO: 223967

SEQ ID NO: 292325 - DNA, 735 bp, Homo Sapiens
ggggaaatgggcccgcgagccaggccggcgcttctcctcctgatgcttttgcagaccgcggtcctgcaggggcgcttgctgcgttcacactctctgcactacctcttcatgggtgcctcagagcaggaccttggtctttccttgtttgaagctttgggctacgtggatgaccagctgttcgtgttctatgatcatgagagtcgccgtgtggagccccgaactccatgggtttccagtagaatttcaagccagatgtggctgcagctgagtcagagtctgaaagggtgggatcacatgttcactgttgacttctggactattatggaaaatcacaaccacagcaaggagtcccacaccctgcaggtcatcctgggctgtgaaatgcaagaagacaacagtaccgagggctactggaagtacgggtatgatgggcaggtgcttcaggataccatatacagctcagaagtttcttctttaggcattaaattttagcaaagatatctcatctcttcttttaaaccattttctttttttgtggttagaaaagttatgtagaaaaaagtaaatgtgatttacgctcattgtagaaaagctataaaatgaatacaattaaagctgttatttaattagccagtgaaaaactattaacaacttgtctattacctgttagtattattgttgcattaaaaatgcatatactttaataaatgtatattgtattgtataaaaaaaaaa

SEQ ID NO: 292326 - DNA, 1000 bp, Homo Sapiens
cgagccaggccggcgcttctcctcctgatgcttttgcagaccgcggtcctgcaggggcgcttgctgcgttcacactctctgcactacctcttcatgggtgcctcagagcaggaccttggtctttccttgtttgaagctttgggctacgtggatgaccagctgttcgtgttctatgatcatgagagtcgccgtgtggagccccgaactccatgggtttccagtagaatttcaagccagatgtggctgcagctgagtcagagtctgaaagggtgggatcacatgttcactgttgacttctggactattatggaaaatcacaaccacagcaaggagtcccacaccctgcaggtcatcctgggctgtgaaatgcaagaagacaacagtaccgagggctactggaagtacgggtatgatgggcaggaccaccttgaattctgccctgacacactggattggagagcagcagaacccagggcctggcccaccaagctggagtgggaaaggcacaagattcgggccaggcagaacagggcctacctggagagggactgccctgcacagctgcagcagttgctggagctggggagaggtgttttggaccaacaagtgaccactctacggtgtcgggccttgaactactacccccagaacatcaccatgaagtggctgaaggataagcagccaatggatgccaaggagttcgaacctaaagacgtattgcccaatggggatgggacctaccagggctggataaccttggctgtaccccctggggaagagcagagatatacgtgccaggtggagcacccaggcctggatcagcccctcattgtgatctgggagccctcaccgtctggcaccctagtcattggagtcatcagtggaattgctgtttttgtcgtcatcttgttcattggaattttgttcataatattaaggaagaggcagggttcaagaggagccatggggcactacgtcttagctgaacgtgagtgacacg

SEQ ID NO: 292327 - DNA, 1000 bp, Homo Sapiens; identical to SEQ ID NO: 115571

SEQ ID NO: 292328 - DNA, 1000 bp, Homo Sapiens; identical to SEQ ID NO: 118531

SEQ ID NO: 292329 - DNA, 1000 bp, Homo Sapiens
cggggttgagcctggtgggcctcctgactctgggagccgtgctgagcgctgcagccaccgtgagggaggcccagggcctcatggcagggggcttcctgtgcttctccctggcgttctgcgcacaggtgcaggtggtgttctggagactccacagccccacccaggtggaggacgccatgctggacacctacgacctggtatatgagcaggcgatgaaagtttctgtgctgtgggaagaagtctcctttcagccgtctggggagcacagaggctgacctgtgtcagggagaggaggcggcgagagaggactgccttcagggcatccggagcttcctgaggacacaccagcaggtcgcctccagcctgaccagcatcggcctggccctcacggtgtccgccttgctcttcagctccttcctgtggtttgccatccgctgtggctgcagcttggaccgcaagggcaaatacaccctgaccccacgcatgtggccgccagccccaggagcccagcctcttgagatgctcccagggtggacccacacattgtctccactccgaagcagttgctattggtccaagaggatgctcgggtagtcttcggtggctgcaggagagcgatgctgcgcctctgcccctctcctgccacctggctgcccacagagctctccagggcagaagtcgcggtgggctcagtgggtgccctgagcggggtctctcagactgacgtcaggccttggtgggctgcactctcacctggaggctccggggaagcatctgcctccaggaccattcaggctgttgacaagtcaactcctcatggctgtaggactgaggttcccaagtccttgtccctggtcctgtggtccctccaccttcaaaccagcaatggtgcattgagcaaattgtggtcaaatatacatcacatcaaatttaccatcttaaccattgttaagtgtatggtttgtggcattaaatacattcacattgttgtgcaaccatc

SEQ ID NO: 292330 - DNA, 1000 bp, Homo Sapiens
gtacgaaatgctccccagtttagatttgactggtttatcaagtctaggactgccatggaattccagagacgctgtaacactctgatttcattgattgagaaagaaaatatggaaattgaggaaagagagagagcagaaaagaagaaacgggcaactaaaactccaatggtaaaattttcagcattttcctaacttttagatttaacattgttgggccatttaaaatgtgcatattggagcagaacattaaatctgtttccattttagtcacagaaaagaaaagcagagtcagctactgagagctctggaaagaaggatgtcaagaaggtgaaatcctaaagcctagaaataaagttttaaatgggaaactgctattttcttgttcccatcttcaaatgctaattgccagttccagtgtattcatggtactctaagaaaaatctctttggttttgatttcttgcatattttatatattttacaatgctttctacctgaaatgtgtagctttatattttatggcattctagtatttttgtgtactgtattttgtgcatttcatgtcttcatcaaaatcctctcagtccttgttcttttgaagcttgtgctgaggttttagcttttctatgttttatatgccgctgctttgaaagagaacctagattctatagttgtattattgttgtttcatactttaaatttatatggctgtggaaaaacgaattaaaatgttttgaggagaaagactttttcacttctttgttgctttcttttctattgagtctgggcttgtttgtgttactgcatactgtgattagcataataattgtttctttgaggtcatctaaatatttttttcctaaaggaataaagggtgaggaaagaaaaatattaaaaaagctaatatttgatactgtgcttgctgtcagtatgcattacatttaaattattctctattcaagtgggaaaatataataaagaaatgtctataagaaatttaa

SEQ ID NO: 292331 - DNA, 1000 bp, Homo Sapiens; identical to SEQ ID NO: 115949

SEQ ID NO: 292332 - DNA, 1000 bp, Homo Sapiens; identical to SEQ ID NO: 223972

SEQ ID NO: 292333 - DNA, 1000 bp, Homo Sapiens; identical to SEQ ID NO: 118534

SEQ ID NO: 292334 - DNA, 1000 bp, Homo Sapiens; identical to SEQ ID NO: 223974

SEQ ID NO: 292335 - DNA, 1000 bp, Homo Sapiens; identical to SEQ ID NO: 223976

SEQ ID NO: 292336 - DNA, 1000 bp, Homo Sapiens; identical to SEQ ID NO: 223978

SEQ ID NO: 292337 - DNA, 1000 bp, Homo Sapiens
atcccttatgttccccattaaaggaatttcaaaagacatggagaaagttgggaaggtttgtgctgactgctgggagcagaatagccgtgggaggcccaccaagcccttaaattcccattgtcaactcagaacacatttgggcccatatgccaccctggaacaccagctgacaccatgggcgtccacacctgctgctccagacaagcacaaagcaatctttcagccttgaaatgtattatctgaaaggctacctgaagcccaggcccgaatatggggacttagtcgattacctggaaaaagaaaagacccacactgtgtcctgctgtgcttttgggcaggaaaatggaagaaagagtggggtgggcacattagaagtcacccaaatcctgccaggctgcctggcatccctggggcatgagctgggcggagaatccaccccgcaggatgttcagagggacccactccttcatttttcagagtcaaaggaatcagaggctcacccatggcaggcagtgaaaagagccaggagtcctgggttctagtccctgctctgcccccaactggctgtataacctttgaaaaatcattttctttgtctgagtctctggttctccgtcagcaacaggctggcataaggtcccctgcaggttccttctagctggagcactcagagcttccctgactgctagcagcctctctggccctcacagggctgattgttctccttctccctggagctctctctcctgaaaatctccatcagagcaaggcagccagagaagcccctgagagggaatgattgggaagtgtccactttctcaaccggctcatcaaacacactcctttgtctatgaatggcacatgtaaatgatgttatattttgtatcttttatatcatatgcttcaccattctgtaaagggcctctgcattgttgctcccatcaggggtctcaagtggaaataaaccctcgtggataaccaaaaaaaaaaaaaaaaaaaa

SEQ ID NO: 292338 - DNA, 1000 bp, Homo Sapiens
agataaagaaaaatctaagtatagatgaaagatgaagaggcagaattgagaggctaacatatttactcttgtctaacttaagagtgccaggaaagcagatgcttagattttgtgtcaaagcttgttatttttttcatactaggattatggtctttagattaatactgattatatagagcacggaaagataaagaattgaacattttctttgtatacttttttacactaattttattgttatacataaatggtagtcttcatttttgaagtcttacattttcactctttttttaatgaagtatttcatactacaaaaatacataaacgtatatataaagggataataaatgtaaatatctgtgtactcatcagccagcttaagatacagatgttgtcgacattttagaagttccctaaggccctctccctctcaaataattatttggaattttgtgtttgtcatttgtctattatagttttacaacatacgtatgtatctgtaagtgaaatgttaattttgtatgtttctgaattttatataaatggcaaaatgtttacttctgtgactttctttcatttttattgctatatagtattatataaatatactacaacttattcattcttgatggacatttgagttttgtttatttgtttttgctgttgaaacaatgctgctgtgaacattgtatctagcagttatattgcttgatatattgataaaataatgccaaatttgtgttctgaagtgactgtactagtttatacctctcttggcactgtgagttacctttgtttcatagcatctccaacacttaagttcagacttaaaaatttgccaacctagtggatgttaagtggtatctacctgtgatttccagcaagattactgttatctctgctcttccatgtgtaagatgtcatttttttcctggctgcttttaaggttttctgtcactggttgtaagaagtttgattatgatgtgaaaaaaaaaaaaaa

SEQ ID NO: 292339 - DNA, 1000 bp, Homo Sapiens; identical to SEQ ID NO: 118539

SEQ ID NO: 292340 - DNA, 1000 bp, Homo Sapiens
gaattcatcaaaaatctcttgaatatcattgactttgtggccatcctacctttctacttagaggtgggactcagtgggctgtcatccaaagctgctaaagatgtgcttggcttcctcagggtggtaaggtttgtgaggatcctgagaattttcaagctcacccgccattttgtaggtctgagggtgcttggacatactcttcgagctagtactaatgaatttttgctgctgataattttcctggctctaggagttttgatatttgctaccatgatctactatgccgagagagtgggagctcaacctaacgacccttcagctagtgagcacacacagttcaaaaacattcccattgggttctggtgggctgtagtgaccatgactaccctgggttatggggatatgtacccccaaacatggtcaggcatgctggtgggagccctgtgtgctctggctggagtgctgacaatagccatgccagtgcctgtcattgtcaataattttggaatgtactactccttggcaatggcaaagcagaaacttccaaggaaaagaaagaagcacatccctcctgctcctcaggcaagctcacctactttttgcaagacagaattaaatatggcctgcaatagtacacagagtgacacatgtctgggcaaagacaatcgacttctggaacataacagatcagtgttatcaggtgacgacagtacaggaagtgagccgccactatcacccccagaaaggctccccatcagacgctctagtaccagagacaaaaacagaagaggggaaacatgtttcctactgacgacaggtgattacacgtgtgcttctgatggagggatcaggaaaggatatgaaaaatcccgaagcttaaacaacatagcgggcttggcaggcaatgctctgaggctctctccagtaacatcaccctacaactctccttgtcctctgaggcgctctcgatctcccatcccatctatcttgtaaaccaaac

SEQ ID NO: 292341 - DNA, 1000 bp, Homo Sapiens; identical to SEQ ID NO: 118540

SEQ ID NO: 292342 - DNA, 1000 bp, Homo Sapiens
aggctgtacctaaaattcctcaacctaagaggcagtccaccatggtcaacagcagtaactatctggatcgagggattctcaaggcttatagtgactctcaggaagatgagtggctctcggcagcaattgactgttcagaataccttccagaccaaatggtggtggaaataagcagaagctttcctgagcaaccagaccgaacagacttagtgaaagaacttctgtttgatgccattggcagatattacagtagtagggaacctctgttaaatcacttatctgacgttcataatggaattgcagaactcttagtgaatgggaagacggaaatagctttagaagctacccagctccttctaaagcttttagatttccaaaatagagaagaatttagaagactactgtatttcatggctgttgcagcaaatccttctgagtttaaattacagaaagaaagtgacaaccgaatggttgtgaaaaggatattctcaaaagctattgttgacaataaaaatttatccaaaggcaaaacagatcttctggtactctttttaatggatcatcagaaagatgtttttaagattcctggaactctacataaaattgtaagtgttaagcttatggccatacagaacggaagagatccaaatagagatgcaggatatatttattgccagagaattgatcaacgtgactattccaacaatacagagaagacaaccaaagatgagctgttgaatttactaaaaactcttgatgaggattcaaaactttctgccaaagagaagaaaaaattgctaggtcaattctataagtgtcacccagacatctttattgagcattttggagactgagtttttaatatctgtatataagttgtgtattttaagaataaattatgtatcctaaatatccaatcacatttgtaagcgtggaagctctaaatttgaaactgtacttaataaaaatttttttgtataaaaaaaaaaaaaaaaaaaaa

SEQ ID NO: 292343 - DNA, 1000 bp, Homo Sapiens
acaaatacagtcttagatttacccaagtgcctagatatcattttataatgattagaattgagtattgtgggtcccctaattctgtgggtgccttaagtgagaatttctaaatgattttcacattctaaatgactttgggttttgaactctccatctagtttacttctaaaatgggaacttgaggcaattcaggtatccaggcaaatctttgtatatatttttttgtgtacatgcacacatctcgaaatccatttccgtgtttaatgttagttgtttatgtgttagtattcctgtgtctactgttttgttgttgttaatatgggtaaagtgagccctgaaatacatgctaaacaagacatgaaattcagaaaggtacatagtgtttcaagtgcatggtagtttgatctgtgttttactttattgtgttttcttgagtgtaaagaaagaataaatcaaagttcttcatacccattttgacaaagtggaacagtggagctgttttttgcttttgtttttatttattttttgccactggtgatgatagatttcaaaaaacaaaaggtggcagcagcacaatgttcatggtgaattatctcatagtatctagattgatcaagatctgacagaaggaatgcacaaaggattctatattcttaatgatttattaattaccaggatccttttctaaattgaatgtacttttgaattactaggtttcttctttttttttgttctgcaatagtgaaagaaaactcagtagtttagtttcagtttctcatggaaattggtaaatgttagttttgacttcatctattttttatttgtttttattagcgtagagtaggaagtctcatattctactgttctatctaggatggtgaaattccaaaggtgcctaacttgagtaagggatttgtgacaagatagtacacattactataagggctattatttcctgaactggatgtccctaaaagcaaataaactgcccactatctct

SEQ ID NO: 292344 - DNA, 1000 bp, Homo Sapiens
tggagatggacaaagctcagagaaagcccctgaggtttctcacatcaaaaagaaagaggtgtccaaaacggtggtcagcaagacttacgagagaggaggggacgtgagccacctcagccacaggtacgagagggatgctggtgtgcttgaacctgggcagccagagaatgacattgacagaatcctccacagccacggctccccaacgcggaggagaaaatgtgccaacctggtgtctgagctaaccaagggctggagagtgatggagcaggaggagcccacatggaggagtgacagcgtagacacagaggacagcggctatggaggagaggctgaggagaggcccgagcaggatggagtgcaggtggctgtggtcaggatcaagcgccccttgccctcccaggtaaacagatttacagagaaactcaactgcaaagcccaacagaaatatagcccagtgggcaacttgaaagggagatggcagcagtgggctgatgaacacatacaatcccagaagctcaatcctttcagtgaagagtttgattacgagctggccatgtccacccgcctacacaaaggagatgagggctatggccgccccaaagaaggaaccaaaactgctgaaagggccaagcgtgctgaggagcacatctacagggaaatgatggacatgtgcttcattatctgcacaatggctcgccacagacgagatggcaagatccaggttacttttggagatctctttgacagatacgttcgtatttcagataaagtagtgggcattctcatgcgtgccaggaaacatggactggtagactttgaaggagagatgctatggcaaggccgagatgaccatgttgtgattacgctactcaagtgaaccttcaaaaacaaaagccaaatttggcccactatggtcttaatgctaaatgctcatgtaggtaaaatgaaaatgcaaactctctgtaataagttagtaaatattaaacaatttttacat

SEQ ID NO: 292345 - DNA, 1000 bp, Homo Sapiens; identical to SEQ ID NO: 118542

SEQ ID NO: 292346 - DNA, 1000 bp, Homo Sapiens; identical to SEQ ID NO: 118543

SEQ ID NO: 292347 - DNA, 1000 bp, Homo Sapiens; identical to SEQ ID NO: 118545

SEQ ID NO: 292348 - DNA, 1000 bp, Homo Sapiens
ggccagacctggaagaacaaagagcatcatctctctgacagagagtttgtgttcaaagaacctcagcaggtagtacgtagagctcctgagccacgagtgattgacagagagggtgtgtatgaaatcagcctgtcacccacaggtgtatctagggtctgtttgtatcctggctttgttgacgtgaaagaagctgactggatattggaacagctttgtcaagatgttccctggaaacagaggaccggcatcagagaggatataacttatcagcaaccaagacttacagcatggtatggagaacttccttacacttattcaagaatcactatggaaccaaatcctcactggcaccctgtgctgcgcacactaaagaaccgcattgaagagaacactggccacaccttcaactccttactctgcaatctttatcgcaatgagaaggacagcgtggactggcacagtgatgatgaaccctcactagggaggtgccccattattgcttcactaagttttggtgccacacgcacatttgagatgagaaagaagccaccaccagaagagaatggagactacacatatgtggaaagagtgaagatacccttggatcatgggaccttgttaatcatggaaggagcgacacaagctgactggcagcatcgagtgcccaaagaataccactctagagaaccgagagtgaacctgacctttcggacagtctatccagaccctcgaggggcaccctggtgacgtcagagctttgagagagaagcttcactgaaacggagcaaaccttccactgagaagccacttcaagaggctggtgctgctagatctcatgatgtggctgttgggaagatggtggggtttgtttgccagcttggagtcctattaaatgaaagccagcaactcatgttggtaataggtctactgtgggaacagttatccctaaccacagctcaaaatcgctatcatctttaggcaaattaaaatctatgtggca

SEQ ID NO: 292349 - DNA, 1000 bp, Homo Sapiens
tcccaagtacccccctctctaccctcccggcaggatcatccacctgcaggaggagggcgcctcggggcggtttggctgctgctctgctgctcactatagcgccaagtggtcacacgaagcggaattcagcaaaatactcataggtccgaagatgctcaccgaccacatgccagacatcctgatgcgggccttggacagcgtggtctccgacagagcggcctgcgtctcctgtccagcacaaggggtctccagtgtggacgtggcctgaccagggccactggaaactgtcccaggaacgatggactcacgcttttgtccttaaactgacttaccatccgaggagttcccatgacgccaaaacagcgaatgtccatcaacaggaatcggatgggaacagaattccatggtctcaatgacttaagtttatgggaagtcattgtggccataatggtagcagaagtagtgagcacgctcaggtgataggacgactcctgagacccagcgaccgtggagacagcctcgggaagccctggcccgtggatggatcccttggctgtctgaggactgctccagaagtgcgggaatccagggcccacccagaagaccgtgaacagttccttagcctcccaccccccaaggcagctcttttcatccaactcagtttacaggcgtggtttgtttttcaaactgggcttcctggatgtacaaatggaactgtggtgagggtgcgggctggggttttctcctgggcgtcaccaagggcagccctgggctctggctggggatgaagacgaaacccgatcgggaaagtaagtggagcccccggccccgccgagccacagccccccaactgcctattcccactgcccagttgtttgtccacatcaggagttgctgattgaattcttgctactcttctggctctggggtcggccagtggattcaggagttgaaacaataaagcgcgcgtcaccataaaaaaaaaaaaaaaaaaaaaaaa

SEQ ID NO: 292350 - DNA, 1000 bp, Homo Sapiens
tagtagctgaaaagccactgggagaaaatggaaagccagaggtggcttcagctccctcagttatttgtacagttcagggactactcacagagagtgaagagggggaggctcagcaagaatccaaaggggaggaccagggtgaagtatatgtgtcagagatggaagaccagcccccttcaggcgagtgtgatgatgcctttaacattaaggagactcccttggtggatacacttttcagccatgctacctcctcaaagctgactgatctaagccaggatgaccctgttcaggatcatttgctatttaagaagactctcctgccagtctggaagatgattgccagtcacaggttcagcagtccatttctgaagcctgtgtcagaaaggcaggccccagggtacaaggatgtggtgaaaagacccatggacttaactagcctgaagagaaatctctctaagggtcggattcgcaccatggcccaattcctgcgagacctgatgctgatgttccaaaatgctgtaatgtacaatgactctgatcatcatgtataccatatggctgtggagatgcggcgagaagtcctggagcagattcaggtactgaatatctggttagacaaaagaaaaggctcaagtagtctggaaggagaaccagctaacccagtggatgatggaaaacctgttttctaacctggagctgctatcctgactttttctagagtttgaatctctcccggaactctgacctagagaggatcctggtacttctttgccatgtcctcattttcttttccaacaagaataataccttaactcacaaccaacgagtcaaagatgcatgtggacataatataaagaaaaaaaggggaagctgaggtttggatttatgccataaatgttgcccacatctttgttccatcggcttgatttaaagacaattccattagatcttttctaagccttttactctataaataaatgtatttacacaataaaaaaaa

SEQ ID NO: 292351 - DNA, 1000 bp, Homo Sapiens
cgaagacacagatttggaaaccactgcaagcaaaacaaaccggcagaagagcctagattcagatttatcagatggaccagtcactgtacaggaatttatggaggtcaaaaacgctctagtggcttctgaggccaagatacagcagctaatgaaggtgaataacaacttgagtgacgagctgagaattatgcagaaaaagttgcttggaaaagatgctaattaatgaagaggagcaactactattggtgtatttttcacagattggtgctttctaaataaaaattgaaagtaactcctaacattgaatgggtttgctactgaaaaagtaatgatcttctggtgcaaacagttgcttgtggacttaaaccttggcactggtggggaatttggtcagattttacaatctctgtcaaagagtagacagctgaactcacaccacacccagcttatagaatgtccatggaagatgaaggcgcaccagaagggaaggaccctgcgcagaatggacgtggtgaatggtgtttaaaatgccagatgccaaagagtaacacgattccctgctgaccccttaactctaatccatccagcaccatggagcagcctgcatgtgaggaatggaaggagcattcagggcctccaagtgacagtctctaaaatggggtggtgccaggcagattagcatgttcaaagctgacaccactgaggtcgtgttttttgggtgacaaagccaaaggagagaaaggccaaatattccagccctggccgaaagatgatcactcaccagacggaagcaagcgtgctgcgtggagcatccatgcgaagatgtcaattccatagatcaataggtttccagttttcttcgtgatatgttaatatagcaaacttaccatgatccggttttctcttttttctttttttttttacaaagtgctgaattgtttggaatatcaagagtattatgtaataaaaacttgttgatcataaaaaaaaaaaaaaaaaa

SEQ ID NO: 292352 - DNA, 1000 bp, Homo Sapiens; identical to SEQ ID NO: 118546

SEQ ID NO: 292353 - DNA, 1000 bp, Homo Sapiens
ccctctcctggtggcggctgctgccaaccagcccctgattgtggaggatctgttgaacctgggagcagagcccaatgccgctgaccatcagggacgttcggtcttgcacgtggccgctacctacgggctcccaggagttctcttggctgtgcttaactctggggtccaggttgacctggaagccagagacttcgagggcctcaccccgctccacacggccatcctggcccttaacgttgctatgcgcccttccgacctctgtccccgggtgctgagcacacaggcccgagacaggctggattgtgtccacatgttgctgcaaatgggtgctaatcacaccagccaggagatcaagagcaacaagacagttctgcacttggccgtgcaggctgccaaccccactctggttcagctgctgctggagctgccccggggagacctgcggacctttgtcaacatgaaggcccacgggaacacagccctccacatggcggctgccctgccccctgggccggcccaggaggccatcgtgcggcacctgttggcagctggggcggaccccacactgcgcaacctggagaatgagcagcccgttcacctgctgcggcccgggccgggccctgaggggctccggcagctgttgaagaggagccgtgtggcgccgccaggcctgtcctcttaggactcaaacccagaccctggactgattttccagtccccaccgtcctgcgggacagccagcgtatgctaatgttgcaaacccatgataatgtatgtggaatatcctgccattggggttttacattaaaaccccagaatggctgcagaggggtgaacaggccccaatatttggggtgctgtgatacccctcttctacccacaaggagccctcttgatgatttctgtgaaatcgaggccccttgattgtttctgtgaaacaccctgcacccctagtcctttccccactgagatctttcgggttctctcccctaactcagct

SEQ ID NO: 292354 - DNA, 1000 bp, Homo Sapiens; identical to SEQ ID NO: 118547

SEQ ID NO: 292355 - DNA, 1000 bp, Homo Sapiens; identical to SEQ ID NO: 223985

SEQ ID NO: 292356 - DNA, 1000 bp, Homo Sapiens
aataagtccaacttcagccagaaggaaaaaagttttccatttttattacattctttaggaaagttaacgttaaagggatgttcgtcactgaatactgttctttcctagcacagtcatgcactgttttacctcagtcatgtggctttaactgaggagtgttcacacgcactcgaaatggagtatatggtgtgtgccagttatgagttgaccatttgggaattaaacaggtcacacgtgacagatgaagaaaccaagggggctgctgaggagacctggtgcagggactaatcctggatcattcctgtattaaactttcatatgccaaaagggtttgtgccgttttatctgccatcagtgtttgacctgtttagggcagaggcaataagtcagaagtcttgaagttgaaatagttatatgtgtgtcattggactggattataaacagctgtcttggactttccctctcttaacactgactggtcatcagtatcattagtgaaaaagaaacaaattgtttgttatcatctctttagacagataagctgaatggtgggctttaaataataaaaacatacacatagttgacttgtgtatgagctactcttggattcttgttattatagacttgtatttagttcatattttgtcaaaagcaaaacaagaagatacatcacttttcattgaaaagaaaagtgtagagcatgactgaattgctcatcattctgggagtttccatgtagtggctatgcagtgtggaaagtgagaaaaacctccattgtggtgaggagaatacttcaatgtcccttgtccttgttctcattaattcagctaaaggtggatttgaccaaaataatgctggttaaatttgtagaaatgttgaaattggctgtgttttaaattttgcttgaatttttataaaatgtttaaccaaatgtacctttgcattctttaattaaaattgcttaaaaaaaaactttcattatttcagtaaaaaaaaaaaa

SEQ ID NO: 292357 - DNA, 1000 bp, Homo Sapiens
aacagtagatgaaggaaatgatactgaatgagtcacagtgttccctggcaagtaagctgtttgcattgagaaaggagtgagctggtgaggttaccaccctgaattgagctccagctgccagtttttgtgtttttccttgcccctttccaagtggttttcaagtgtcaggcagtgttctgagaagcagcagcctataactgtatgtgtgttccttgaagccaggtgcagagttcccagctactgcagcttgggatttggtgggaaactactgggataagcttctccttgacaatggaaaggcagcagtcttcaacatttggttgcaaatctccatccacatcagggagctttccccaggcaaatacaaaccgccccgtggcctgcaggcctgcaggggaggcagcaaagggacctggcagttgcaacacagtaagtcaggaattcaagcgtgaacccatattgataagtgggccagaattatttaggggcctggcttgctgctctccatttcctgtatcgctaatttatcatttttccaaccttggtattttatattatttagagaaaatgctgggtcactctctttgcctaaggtgactcaaacagccaaacgaaacttccgttgcctcccagccctctgtatccacctggttttgttctttccctgtgagcatttgtggttatagcttcccatatgccacattcaccggccacctcctcgccgtggaaccctgccctctcccctcctgctgctgtagagttttcccaaagcagtgtccaggagagaatttgagagagtgaagaaattgccttgtagatgtggagggctgcaatctgtcttgatttctccaagcacttaactttctttgactgcactgataattgctaatgatttcccatgagatttgcttacttttgtgtactgtattttccagcattacagaaccttggttattgttttttagccatagaatcttctagtaaaaaatatctgccgcca

SEQ ID NO: 292358 - DNA, 1000 bp, Homo Sapiens; identical to SEQ ID NO: 223986

SEQ ID NO: 292359 - DNA, 1000 bp, Homo Sapiens
gcctctatctgggccccttggactccaggcccggagtgctgaaggagcccaaactgatgggtgctatctccttcttcatcttcttcttcaccctccttgtcctggctcgccagaatgagtactactgccgcctggacttcctgtggaagaagaagctgaggcaggagagggaggagacagagacgatggagaacctgactcggctgctcttggagaacgtgctccctgcacacgtggccccccagttcattggccagaaccggcgcaacgaggatctctaccaccagtcctatgaatgcgtttgtgtcctcttcgcctcagtcccagacttcaaggagttctactctgaatccaacatcaatcatgagggcctagagtgtctgaggctgctcaatgagataattgctgattttgatgagctgctctccaagcccaagttcagtggggtggagaagatcaagaccatcggcagcacctacatggcagccacaggcttaaatgccacctctggacaggatgcacaacaggatgctgaacggagctgcagccaccttggcactatggtggaatttgccgtggccctggggtctaagctggacgtcatcaacaagcattcattcaacaacttccgcctgcgagtggggttgaaccatggacccgtagtagctggagttattggggcccagaagccgcaatatgacatttggggcaacacagtgaacgtggccagccgcatggagagtacaggagtccttggcaaaatccaagtgactgaggagacagcatgggccctacagtccctgggctacacctgctacagccggggtgtcatcaaggtgaaaggcaaagggcagctctgcacctacttcctgaacacagacttgacacgaactggacctccttcagctaccctaggctgagattgcactcgccttctaagaacctcaataaagagactctggggtgtctggaaaaaaaaaaaaaaaaaaaaaaaaaaaaa

SEQ ID NO: 292360 - DNA, 1000 bp, Homo Sapiens; identical to SEQ ID NO: 118548

SEQ ID NO: 292361 - DNA, 1000 bp, Homo Sapiens
ggagagtaagtccactcttccctctcatcatcatggccccaccgggtaccctgagcagctccacactcttcttgaggtgtctagaagcctaccagcttagctcctggagtaggaatgccccaaatccagcatgaccaaaagtaaatgatgtttttttaaagtgtctttcttcaagtttcttcaagaagcctctattgttccccagataatgttccctcaaatagcacagggaagcaactgcctttcaagggtaattgaggctgaatgaatgatcccgaatctgtaaaagctgctttgatgatagagctcagtagaccagaagtttgatttcattttgtatgtattatgctttgtatccgaaagggtctaagtggattaatattaaaactatgtatattaatcattggagaagggggaagaggaaatgaaaatagcacaaaaattaaaattggaacgaagtaagataattaaaacaaaaaacttatagatgttaggaaacctgctgtaattaaacataaaatgtcattcagggtttcctgactgctaatgcagaaaggaaaatcgtaaaggaaacagaaagatgaaataagccattgtgccctccgcctcagaaatgacaaaagactcttcactgagccctgtggcttcatggcagcagatcagagctgtgacattttctacatctagacatgctaccagacatggggaaccattagaggtgcaatctacattgggcatctggtcattcaatctgtttttttaaatgttatttttgcctttcaatgtaatcaattggattaacaatgctgcaatataatttagctataatcgtagtttaaattttttgatatccatgtaggggtatttcccatatttttggaagtagcggtcattagcaaagtaactaagtaaaatacagtgctggtagtcaaaattaaaaaaaaaaaaaaaaaaaaaaaaaaaaaaaaaaaaaaaaaaaaaaaaaaaaaaaaaaaaaaaa

SEQ ID NO: 292362 - DNA, 1000 bp, Homo Sapiens; identical to SEQ ID NO: 223989

SEQ ID NO: 292363 - DNA, 1000 bp, Homo Sapiens; identical to SEQ ID NO: 118550

SEQ ID NO: 292364 - DNA, 1000 bp, Homo Sapiens; identical to SEQ ID NO: 223990

SEQ ID NO: 292365 - DNA, 1000 bp, Homo Sapiens; identical to SEQ ID NO: 223991

SEQ ID NO: 292366 - DNA, 885 bp, Homo Sapiens
ggagcatgatggaagtcgtagtaggaaatggcgtcgtggcattgaggggcatccctcctagaacctccaggaaaagctcgcggaagacgaggttctgcggagagagaggctccaagcagtctgggaagtgtagtccagttggcttagcagtagtttcgttgggggggagccgaggttccgggaaggggctaggccggcttgaaaagagattatgactgtaccttttaactttgtagctggaacacaagaagtgtttgtttaatgaatgacgtacacatttaagatctgtttggacgcggaggataatcctgtgaattgctaatagttcactgggtttggcccttagtgttgacttcagtatgctgagacggaaaccaacacgcctagagctaaagcttgatgacattgaagagtttgagaacattcgaaaggacctggagacccgtaagaaacagaaggaagatgtggaagttgtaggaggcagtgatggagaaggagccattgggcttagcagtgatcccaagagccgggaacaaatgatcaatgatcggattggttataaaccccaacccaagcccaataatcgttcatctcaatttggaagtcttgaattttagagatggattatcttgcatgccagagcgctggaatggaataaaatgatggcagaagtacaaaccagatttagagaattgagtgcttgcagtcaagcagaatgtacctcctgcagagacaaatcttctgcatgagattactgatgcttcacttgcactctaagctggaatccaaactctggtttgtctcttgaaaatttgactctataaaactgatctgattttctgtttttaaaaataaatatatttttggaaaaaaaaaaaaaaaaaa

SEQ ID NO: 292367 - DNA, 1000 bp, Homo Sapiens
gtctggagaaggtgcatagcatcacgggggaccgcaacagccgcctggccgtgcagctgcgggactgggatggcaacgccgagttgctgcagttctccgtgcacctgggtggcgaggacacggcctatagcctgcagctcactgcacccgtggccggccagctgggcgccaccaccgtcccacccagcggcctctccgtacccttctccacttgggaccaggatcacgacctccgcagggacaagaactgcgccaagagcctctctggaggctggtggtttggcacctgcagccattccaacctcaacggccagtacttccgctccatcccacagcagcggcagaagcttaagaagggaatcttctggaagacctggcggggccgctactacccgctgcaggccaccaccatgttgatccagcccatggcagcagaggcagcctcctagcgtcctggctgggcctggtcccaggcccacgaaagacggtgactcttggctctgcccgaggatgtggccgttccctgcctgggcaggggctccaaggaggggccatctggaaacttgtggacagagaagaagaccacgactggagaagccccctttctgagtgcaggggggctgcatgcgttgcctcctgagatcgaggctgcaggatatgctcagactctagaggcgtggaccaaggggcatggagcttcactccttgctggccagggagttggggactcagagggaccacttggggccagccagactggcctcaatggcggactcagtcacattgactgacggggaccagggcttgtgtgggtcgagagcgccctcatggtgctggtgctgttgtgtgtaggtcccctggggacacaagcaggcgccaatggtatctgggcggagctcacagagttcttggaataaaagcaacctcagaacacttaaaaaaaaaaaaaaaaaaaaaaaaaaaaaaaaaaaaaaaaaaaaaaaaaaaaaaaaaaaaaaaa

SEQ ID NO: 292368 - DNA, 1000 bp, Homo Sapiens; identical to SEQ ID NO: 223992

SEQ ID NO: 292369 - DNA, 1000 bp, Homo Sapiens; identical to SEQ ID NO: 223993

SEQ ID NO: 292370 - DNA, 1000 bp, Homo Sapiens
tttagaaatctgatggtcaaaatagctgaaagcagtaaacaagagattggctattaaatttcaactttccataatattaagaatgtagctaaatgatgtcccaaactacttacaaacttttaagacatttaataatttaagaagtaggttcatgtgttttcttaggtaaagttcttctgaaagaattttctatttttaaaaaatgtatctctttagccttttctgctggagattatattaggaagtttcatcagattgtataaaattatgattttgtatcaaaagtattcatgatgactctatttggaatgatattcagggaaatcacaataatatagcagtagttatacagagaaatactacaatgaaaacatttggggcaattagacctacagttactgttgaaaaattcacctttgattgcataaggcaattacatggatacttttagatatatttaaaattttaacattggcatctaaagtgttatttgaaaataaaattattttcctgttcattgattttaaacattttattcctactttcagaagaaaaatataatacggaaaaaattatagatttacttgtagcttattattgtaaagtgttttttttttttttctaatttctcccacatgtatttctggtccccagtgatactagctgagttgtagtgtattttataaatggaataatcttggggaaaaattgcgattcttcattaaataatattctttatgtcactagcatacaatttatgttagtagacatctttaaatctctttaatgagtgaatccatgcaagccccataaaacagttcctagcatgcagaaaatgcccacgtaaatagctgtcatcatcattatcttttaacattttgggggactttccagttgaaaagaaaacatgctatgtcatttttatccattatccctggaacttattgtgaaagttgtgctgttttctaagtaaaataaaaaataaaaaattagcaattta

SEQ ID NO: 292371 - DNA, 1000 bp, Homo Sapiens; identical to SEQ ID NO: 118551

SEQ ID NO: 292372 - DNA, 1000 bp, Homo Sapiens
actggagacacctgggaaataaaaagagcagggcactgctggtgggaagaggcattttaccttccagtgcaaatcctgctcctttgatttaatggggtgtactggggccaggggctgattcacttccttgggagatggtggtgttttcatgaacatctttgatccttccatttcatttattcatccatccattcaacaagtatttgctaaacactaacttaagctaatgctagggtagtgactgagatgtaaaaatagattttagaattaaaacaaaatccaagtcctcacacccctgtcatcccaggagatctttccttgtggtggtttctgtgagaattggccatcctgaggacacagccaggacggcagaggcctcctggcctcagggcatgccctgcctaccttctgaaatgtttaccccattgaccaaacttggctccagccattgcggtggtttctagatagccaggcccaccaagagatattgccccttgatgagagtcaaacaccctgcctacaaggagatgttttgaaatggagaggaaaattggcacctcatcttttaaaggcagtaatggaattgattttcagtaactgaatttgtgcacaaaacattctaaacactagtgaagcctgtttcgttgaactaattctggctctggaaatgtttttgttttatagttatttacgatttcgtttgtttggattcaagcttagtttgttaatatgtataatttagcatctattacactcatgtaaatatggagtaagtattgtaaactatttcattgcggggattgtgggtgttatacatacatttaggactgcaattttttggtattttttgtattgtaaaataacagctaatttaagcaggaacaagagaactaagggaggtctgtgcattttaaacacaaatgtgaagaacttgtatataaacaaaagtaaatactataatacaaacttccttctgaaataaaagtagatctggtaaaaa

SEQ ID NO: 292373 - DNA, 1000 bp, Homo Sapiens
ttcaggttcttcctagctcggggcttttaaattttgaaatctaaacattctttcccaccatcctttttgactgttgaccttggttttctcttctaagtttctgtccctctgcttccttactttttttcctttttgaattctatctttatctgtcttttgttcactttttaatgctatatatgggcaggggtgagagacattactgagcaccttggtgagcaagcctggctttaaagattggagaagagcttctggcaccagaaccctgtcttcctccagttctcaacacggtgttgctcttcagtcataccggaatctgaatcaaaaaagtatttttaaatatccatgatttctccctgtattgaggctagccctgatcatgctttttgtgcctgtcaccaggtctcccaagtgcactcatccaggtcagtgctcagatgtgtttaaggagaccctatattcagggaagttgcgtgaacactgcagtggggagaattgagaatagtcaggcctatcagtctcacagaatcacccctctacctttgatattccacttagctgtagagtccatctgtttgtccatctgctgaaatgagaaaagaaaaatttatgcactgatttaaaacaaaccaaaaaaaaagaaaaaaacaaaaaaaaaaatccctcctttctagctgaacaaaaatgtgcagttaatacttggcgcttgaaaatgcagtagtgaatgtggaaccaagcctgtctgtatatctggtagctcttttcttgctttgttttttcttaccagtattctgcctaacgtttgcttctgtgatggttatattgcctagcaagcacacccgtggttgtgaaaatagtatagcaaaaaagaaaaatccccggttattgatgtactagatttgtgtatgtcttttaaacagttctagtttcaccttacacagaataatcaggaaaagtgtaaaaattcaaaagtgaaataaaaattttatcagttaaaaaa

SEQ ID NO: 292374 - DNA, 1000 bp, Homo Sapiens; identical to SEQ ID NO: 118553

SEQ ID NO: 292375 - DNA, 1000 bp, Homo Sapiens
ggagcacaccaaggacaacctgcagagcgtcacgcggggctgcttcgacctggcacagaagcgcatcttcgggctcatggaaaaggactcgtaccctcgctttctccgttctgacctctacctggaccttattaaccagaagaagatgagtcccccgctttaggggccactggagtcgagctcagcgttcacaccaggcgggctgggtcccctgcccacctgcctccctgccccctgtgacggagggggcaagcaagcccccagaggctgtgtctctggacagacggatagacatacggaagcgaggcctggaccaagagaggcccaggctactggaggagtagaaggatgggccccgtggggtccccactgccccggtacgagggggcccaagaccctggcaggtcaggggccctggccaagccagatctggagctgctgctccctgctgcggagaccgcggaggcttcgcgttgaccaagttccttaaagaactggctgatggggcaggaggtccaggcctgggctctcgggccctcctagagggccattggagcttgcagctcagacccccactttgagttttatttatttaaatagtagttggatgcttggcacgtcgtcctgtaataggaaacccttgcctcatcagttttcctgatttacaagtgcaatattttagccaatgccttgggagaagctgccatgcaaaggtggacaccattctccagcttcaggggatatgctcgtcccgggcaccggtggcaggcagctggccttctggactaaggcagcctggggggacactgcagtctggctacacacagagatctggcaccccctgggtggagtgtccctcgggggctttgggaaagcatggcaccctcagaccacacagtagccaagttctggagcaaataaaaggcctgtgttatttcttgttcttgaaaaaaaaaaaaaaaaaaaaaaaaaaaaaaaaaaaaaaaaaaaaaaaaaaaaa

SEQ ID NO: 292376 - DNA, 1000 bp, Homo Sapiens
agattgaggtgtgggtagaggctttaagcattaagaggacttgtagtcagttgaacaactctgtgctgaatattatctaatttgatgagaaaaaggagtcgtcttaccggtttctgtccttggttctgtcctccttagcattatttattaatgatgtggaatactcatttgtggatgattcaacacaggctgaaaaaagaatctcattaacagaacaaaggttaaaaagaccaaatcaagctgaggttaaaataattatgtttaacatggataaatgcatttaggctcagaaaattaatgattaatatttgaacttaagtggggagcaaacctggcttgatggcattttgtcagaaaaagacctgtgtttccattgaccaaagttgtaatgtgacttaatgtaatgctgcgtggcattaaggttctggcacagagaaaaagcggggctcatccaggattggtggtgtgctcgttgcatatacagtgtccagggtctcacctccagagatgaagatttatgaagtcagtgaagggtcctgagaatctgcatgcttgataagcatcacagatgatttcagtgcaggtgattcagagacctcacttgaaaatatattgatttacaagatatgttgcatctgttgatgacaattgatatctatactgttcttttctgctacagagatcaaggtaggagataaagacttcggcgatttgggctgggcgcggtgattcacgcctgtaatcccagaactctgggaagccaatgggggtgggggtggatcacttgaggtcaggagttcaagaccagcctgggcaacatggtgaaaccccgtctctaccaaaaatacaaaaattagccaggcgtggtggcaggcacctgtaatcccagctacttgggaggctaaggcaggagaattgcttgaacctgggaggcagagattgcagtgagctgagattgtgccactgtactccatcctgggcgacagagacagactccgtc

SEQ ID NO: 292377 - DNA, 1000 bp, Homo Sapiens; identical to SEQ ID NO: 223996

SEQ ID NO: 292378 - DNA, 1000 bp, Homo Sapiens; identical to SEQ ID NO: 117081

SEQ ID NO: 292379 - DNA, 1000 bp, Homo Sapiens
acagcagccagccccagctaggaacgggcaggacttggggcagctgaagctcacggtgactcagcagtgcccaactgaccaatctcccgcagctctcctgcccctgggggcccacgactcacctggtgggcctgggctcagcaaacagccctccctcccagtatttcatcaaggacagggaatatccctcccacacacaggccagctgctcaccctgccacctccatgtgacaagtttgacacctgtctacccagagccagtgactgtccctcccagcagcctccaaagggtccaaagtccaagctagctctggcctgtgtggcccccacataaataaattagtggggagggggcagacctgggggcccttgggtgccagagtgagacacagcaggacccttccccaaatactaggctcagagcaacctccagccttctccagcaggatctgctccctgtgtccttggacagcagatccacacaccacttccccacccacacacagtaccctgggctggttggacaacaggatggtgtgttaaggggttaagggagggtactgttgacaccagctatggccaatagctgggctgtcctgaggggtggctggggacagagtccagctcccttggatcagcccagaggattcaggataggacaaaggccctggctgtgcccaaaagggtctacctcaggtggggttacaagcaaacctgggtgaccctcttgtccctaccagcagcttctcttgccccttccattcagggttccctggcaggggaagctgagagccatggctgaactatcagggacaaaggcccatgtccccacatccctgctccctccttcctcatccagcaccaaatctttgcttatgtccacaggccagggcctgtgctgcagtcggggacaaggagcttccgtctggcaaggccggggcacaatttgcactcccctcagctagacgcacagactcagcaataaacctttgcatcaggc

SEQ ID NO: 292380 - DNA, 1000 bp, Homo Sapiens; identical to SEQ ID NO: 118555

SEQ ID NO: 292381 - DNA, 1000 bp, Homo Sapiens; identical to SEQ ID NO: 223999

SEQ ID NO: 292382 - DNA, 1000 bp, Homo Sapiens; identical to SEQ ID NO: 118557

SEQ ID NO: 292383 - DNA, 1000 bp, Homo Sapiens
actggagagaaaccctatgagtgtaagcaatgtgggaaagccttcagttgtgcctcaaaccttcgaaagcatggtaggactcacactggagagaaaccctatgagtgtaagcaatgtgggaaagccttcagatctgcctcaaaccttcagatgcatgaaaggactcacactggagagaaaccctatgaatgtaaggaatgcgaaaaagcattctgtaaattctcttcttttcaaatacatgaaaggaagcacagaggagagaagccctatgaatgtaagcattgtgggaatggattcacatctgccaagattcttcaaatacatgcaagaacacacattggagagaaacactatgaatgtaaggaatgcggaaaagcattcaattatttttcttccttgcatatacacgcaaggactcatatgggagagaagccatatgaatgtaaggattgtgggaaagcattcagctagcctggttccttttatggacatgaatagactcacactggaaggaagcactatgaatgcaagcaatgtggcaaaactttcacattttccagttcttttcgatatcatgaaaggactcacactggggagaaaccctatcaatgtaagcagtgtgggaaagccttcattccttttacttcttttcaatgtcatgaaaggactcacacgggagagaaaccctatgagtgtattctagttccgtttgatatcatgaaaggacttacactggagtgaaaccctatgaatgtaagcaatgtgggaaagccttcagatgtgcctcgcaccttcaacggcatggaagggttcacacttgggagaaactctatgaatgtaagcagtatgggaaagccttcagatctgccaagattctttgaatacagataattaatgtaaacaattatcataagtatactaacatgttattctttttaaataagaaggtataataaaatatcccattggttttatgtattaaaaaaaaaaaaaaaaaaaa

SEQ ID NO: 292384 - DNA, 1000 bp, Homo Sapiens
taatttttgtatttttagtagagatggaattttgccatgttggccaggctggtcttgaactcctgacctcaggggtgatccacccgcctcgggctcccaaagtgctgtgattacaggcatgagccaccatgcctggcctttggggggattttaattacagtattaattatagttctaggatttcccacattttatagtagtagtttgcaggatattatgtgccctaattagcagatatagacattatcaaattataatgatagtataattatccctttttaatattggggaaagaaaaatgaaaattcattagttaattactgctttgtgttgtgtgaatttattaacaaataacattattacatataggtcattgttaacaaacaaacatccctgaaaacctctgtgaaaatttaattttttatatcctgattaatatattgtgactttaggcccatttttcatgtgcttcactttgatagagttaatccataaaattgctctttactttagcttatcaaatgaagtattattttgtggactggaggccaaaaagtcaatgtgagcttctcacaggtttttaaagctccactaaaaataattatccacttgtctttacttttgttgaccagaatagttggtaactctgccagagcctgtacttacctgccaaaaacaattaaatctggttaatgcctgaaaccaaatctctcagtctcaagtgttatactatccaagttttaaatggaaaggtaaactgtggagtaatgaaattttggttttactgtaccttttgctatcaagataatattcatgtttgaaatcttgtctttatttggaatttagttactgtctgcttttaacctttgctttcctaaagaaagtttgagatccagagagttcaagggattggggaaagagaggcgtcaagtcatttgcactttgtacctgtaagttaggtaataaactattatactcgtaaaaaaaaaaaaaaaaaaaa

SEQ ID NO: 292385 - DNA, 1000 bp, Homo Sapiens
acagagttcacagaccgcactttggcacgttgtcctcactgcaggaaagtgtcatctattgggcgcagatacacacgtaagagatgtatctgctgcttcttgcttggcttgcttttggcagtcactgccactggccttgcctttggcacatggaagcatgcacggcgatatggaggcatctatgcagcctgggcatttgtcatcctgttggctgtgctgtgtttgggccgggctctttattgggcctgtatgaaggtcagccaccctgtccagaacttctcctgagcctgatgacccacagactgtgcctggcccctccctggtggggacagtgacactacgaagggagctggggtagttaaaggctcccggggcttctagaaggaagccaagcagctgccttccttttccctggggagaggtaggaaggaaccaggccctcacttaggtttggaggggcagataagagcactgctgaccatctgctttcctccaagggttctgtgtctagggtgaagtaggcaaaacgttgcccttaaaactgggccctgaagacggttccagccttgtccttcctgtgtgctccctgagagccattcctgtcccttacacattccagggcagggtgggggtgggtagccctgggggttcccctccctcttgtgcaccattaggactttgctgctgctattgcacttcaccagaggttggctctggcctcagtaccctcagtctcctctccccacattgtgtcctgtgggggtggggtcagccgctgctctgtacagaaccacaggaactgatgtgtatataactatttaatgtgggatatgttcccctattcctgtatttcccttaattcctcctcccgaccttttttacccccccagttgcagtatttaactgggctgggtagggttgctcagtctttgggggaggttagggacttatcctgtgcttgtaaataaataaggtcatgactctaaaaaaaaaaaaaaaa

SEQ ID NO: 292386 - DNA, 1000 bp, Homo Sapiens; identical to SEQ ID NO: 224000

SEQ ID NO: 292387 - DNA, 1000 bp, Homo Sapiens
atatggctattgcccatcctgggcattaaactgggaatacaggaaaaagggaattatggaagaaattgttaactgtgacgcagatatcattagtcttcaggaagtggaaacagagcaatacttcactctctttctgccagcattgaaggagcgtggatatgatggatttttttctccaaagtcacgtgccaaaatcatgtctgagcaggagagaaagcatgtagatggttgtgcaatattcttcaaaacagaaaaatttacattggtgcagaagcatacagtggaatttaaccaagtggcgatggctaattcagatggatccgaagctatgctgaacagagtgatgacaaaagataacattggtgtcgctgtggtattagaggtccacaaagaactatttggagcaggtatgaagcctattcatgctgcagacaaacagctgcttatagtggcaaatgcccacatgcattgggacccagagtattctgatgtgaagctcatccagaccatgatgtttgtctcagaggttaaaaacattctggagaaagcctctagtaggcctggaagcccaactgcagatcctaattccatcccgctggtgctatgtgcagatcttaactcattgccagattcaggtgttgtggaatacttaagcaatggaggagtagctgacaaccataaagacttcaaggaactagggtacaatgagtgtcttatgaacttcagctgcaatggaaagaatggaagctcagaagggagaatcacacatggcttccaacttaagagcgcctatgaaaataacttgatgccttacaccaattacacctttgatttcaaagtgagtggcagcctttgggcaggtgtagaaattatttcagatacaagcatgtaacaaaaaaggtgtaaattctttatgattaattgtataatcttcaggaatttttagattcttaaaatgtctaggctaagtatgcacctaaatataagtaggtttattggg

SEQ ID NO: 292388 - DNA, 1000 bp, Homo Sapiens; identical to SEQ ID NO: 224004

SEQ ID NO: 292389 - DNA, 1000 bp, Homo Sapiens
ctgaactaggtgctggcatgtctgggtcgtcttttgaaaagctcacttcaagctcaccctgctcctacctatcataaggtcttattcttgtgcactttatcttgggaccaaaactgcctacccaccccttcccgccctccccctgccagaggcctggtgccctggcccagcctgtggcctcagcatctcataactcatttgctttgtctcccggatgatttccgtcatgctcccaaatgcagcttcaggtgagccaaggggtctgctcctgtggcggtgcagtggcaaaggatccagatagcctagggtgagggtgacagagggacagtgggctatgccactaggccctggtctggctttggaaagacctgtgaggggaaaccttcacccagcacccatgccccactctgctgaggccagaggaagggaggcctgaggggcagattggttcatgcctggggtggaggctaagcctggacacagtcagggcggggctggccagctgtgcgagaacacaagccacgcctgcgatggtgctgcacccctggtgtccctgcctggccctcctctggtcacttcaaacatgccctcaggcttggggatgcccttcttccattcccagacagcagtgtgagggtgcagggaccaagatgtcaagctggccgtggagtcgagctggccgacggacccctttcacctggttatgagccgacttctttggtgttctggcctctggcctgggaaaagggcaggagcctagaggaggaaaaaggctggtggacagacccagggtggtcttcaagcctggcccagtgagagtgaggcccccgcacgcaagcctcagccactcccaggggcctttgcagcgtctttttaacctcagaaaatttctcaatctatgtgatttgtgtaatactaatgagctttgggcaataaatacgggatttaaagccaaaaaaaaaaaaaaaaaaaaaaaaaaaaaaaaaaaaaaaaaaaaaaa

SEQ ID NO: 292390 - DNA, 1000 bp, Homo Sapiens; identical to SEQ ID NO: 224007

SEQ ID NO: 292391 - DNA, 1000 bp, Homo Sapiens
cctccctggctgttcctttcaggcttccgtgcaggcttctccacttgcccatgcacagtagggtctttcagggttctgctgtgggctccctagggaagcccatccatctggatggtttcaaggatggtgaggaatttagagttgacctccagccccaacatccttcctgatcacctgaaccacagttttgctgccctctaggtgcacagacaattcaggtccatggcccagatggtacttgctgtcttctgcaaacctgccccttctgggtacttcccttgaccccgagatcactcaggagccagacaggaaacttattctattcctgttttctctttctgcccaccacatccaatctctcaaaacggtcaggtctaccttaacatctcttgatttgagccactcccactgtcatcagctttcacctggattatcgtgacagcctcctactgcttctctatcatgtggccagagctatcttcctaaaatgcattgcatagttgatcaagtcactctctggcctaaaaccttccttggctccctgctgccctcaggataaagtctggacccctcagcatggcttgtgagactcatggtgtccttgtccctgctcacctctctggtctcatcacttgccttcttgcattctgggtcccagcctcctgtatccagagatgcagtggctctccattgccactctgattcctcctttcttttggtcacagagaaagggtactttctctgtcaaatctcaacttagacttgacttcctccaaggagctttggctatactctctcctcccgacccccaccctggcatactacacagatcactctgggctcacttgcctgcctaatggtcatctccccagtagactgtaagctccttgagggcaaggattgtgttggaatttttgtattaacagtgcctggcttggtgcctggcacctagaaagcactcaataaatgtttgtttaatgaatgaaaaaaaaaaaaaaaa

SEQ ID NO: 292392 - DNA, 1000 bp, Homo Sapiens
caagtactacttcttggttaaaaggccactggtagagtcatctgagtgtagagaatgtcccttcactgctggaaaaatccactggctcccaagaaaagaaaatggtctgaagcctctgttgtggctctcacaactcatctttccctaagtcatcaagctccacatcactgaggtcaatgtcatcctccacgggaagctgggagacgacagaaagccactgttagatctgcagaaggggacaccctggaaggtcaacatctcattttatggaagagcgactctctggagctactcctgctacaatccaggttctcctcagtctgactcctaccctgaccttcgtacctatgattatacggatggaaaagctcagaactcaggtgaaacatttcaacatcacatcactcaccattttaacactggaagccacttgaacgtgtccttttgaggagggtgggacacaacagtacagaaataagtgctaatttcaaagctatcattttctatttttctaagataaagtaaatgaattccaggttaaatgttcactttaaggtaataatcaggaaagcaaccttactactgaaatgtatcttggctgtcaagagtatcaaatgccatgcagcacttaaacttgtgataaggaagatgaagggtcttcagagaagaacctcttaaaaggcccacgggtgcaccagggctgaggtctgatgggaaggacttgactccaggtgcagagatgcacaggctcaagagagtaaaccaggactgctgcccgcacagcttccctcccgggcactcacctcgccatccctgccgtcccaaggctctctctcaacgatggtagggaaagccccgcctcctacaggtgccgtggagccacgcccaaaagagagctcccttagggaaaaatgaccaaaacacacacacacatttacaatggactgctggtgcagaagaataaacaactttaaaaataaaaaaaaaaaaaaaaaaaaaa

SEQ ID NO: 292393 - DNA, 1000 bp, Homo Sapiens
atttgggtacctgtttccatccatgattgtcatcagcacaccaaactctgaattcaatcccctgtttccatcagtgaccttaagagattcagatcataaatttgagtggaccagaatggagtttcagacctgggctttatatgtggcaaatcgctatgattactctgtggagtttactggtgtcggggaaccaccagctggagctgagaatgttggatactgtacccagataggaatcttccggaaaaatggaggaaaggcaacagaatcatgtctttcagagcagcatgatcagcatgtttataaagctgtttttaccacctcatacccaagcttacagcaggaaaggttctttaaacttgtgttggttaatgaggtgtcccaacaagtggaaagcttaagagtgagccacctgccaaggcggaaagaacaggctggggaacggggtgataagcccaaagacattggtggctcaaaggcccctgtcccatgctttggaccagtcttcacagaggttgagaaggccaagatagagaactctcccacacccttctgtgttggagataaatttttcgtacctctgcagagactccttgcgtatcccaagttgaaccgcttatgtgctaatgaagagatgatgagatcagccattgctgactcaattcctctgagcagtgatggttctgcagtggtggctgacctgcgtaattattttgatgaacagtttgagttttgaaccatgtttatttcctgaaatttcagggtctcagcgatagttgtgctcacttagaatttagttttttttgtgtaatcctaattcaagtaatgtttttaaagtttcactgcaaaagtctatgttccaagccattggacagacctgcttgagatatggccagactgcagtgagccctgagaaagatatgagggtttaaaacgggtgctttcctttgattttggacttttttgttttctcaagaataaagaagttggatgtggtaat

SEQ ID NO: 292394 - DNA, 1000 bp, Homo Sapiens
ggctgctgggtgtccatggcccctggctgcccttgctggtgtatgggacggtgccagtgctgagtggcctggccgcactgcttctgcccgagacccagagcttgccgctgcccgacaccatccaagatgtgcagaaccaggcagtaaagaaggcaacacatggcacgctggggaactctgtcctaaaatccacacagttttagcctcctggggaacctgcgatgggacggtcagaggaagagacttcttctgttctctggagaaggcaggaggaaagcaaagacctccatttccagaggcccagaggctgccctctgaggtccccactctcccccagggctgcccctccaggtgagccctgcccctctcacagtccaaggggcccccttcaatactgaaggggaaaaggacagtttgattggcaggaggtgacccagtgcaccatcaccctgccctgccctcgtggcttcggagagcagaggggtcaggcccaggggaacgagctggccttgccaaccctctgcttgactccgcactgccacttgtccccccacacccgtccacctgcccagagctcagagctaaccaccatccatggtcaagacctctcctagctccacacaagcagtagagtctcagctccacagctttacccagaagccctgtaagcctggcccctggcccctccccatgtccctccaggcctcagccacctgcccgccacatcctctgcctgctgtccccttcccaccctcatccctgaccgactccacttaacccccaaacccagccccccttccaggggtccagggccagcctgagatgcccgtgaaactcctacccacagttacagccacaagcctgcctcctcccaccctgccagcctatgagttcccagagggttggggcagtcccatgaccccatgtcccagctccccacacagcgctgggccagagaggcattggtgcgagggattgaataaagaaacaaatgaatggc

SEQ ID NO: 292395 - DNA, 1000 bp, Homo Sapiens; identical to SEQ ID NO: 118558

SEQ ID NO: 292396 - DNA, 1000 bp, Homo Sapiens
taagcctgtgaaggaccagcatgggaatcctatactctgagcccatctgccaagcagcctatcagaatgactttggacaagtgtggcggtgggtgaaagaagacagcagctatgccaacgttcaagatggctttaatggagacacgcccctgatctgtgcttgcaggcgagggcatgtgagaatcgtttccttccttttaagaagaaatgctaatgtcaacctcaaaaaccagaaagagagaacctgcttgcatcatgctgtgaagaaaaaatttaccttcattgattatctactaattatcctcttaatgcctgttctgcttattgggtatttcctcatggtatcaaagacaaagcagaatgaggctcttgtacgaatgctacttgatgctggtgtcgaagttaatgctacagattgttatggctgtaccgcattacattatgcctgtgaaatgaaaaaccagtctcttatccctctgctcttggaagcccgtgcagaccccacaataaagaataagcatggtgagagctcactggatattgcacggagattaaaattttcccagattgaattaatgctaaggaaagcattgtaatccttgtgaccacaccgatggagatacagaaaaagttaacgactggattctatcttcattttagacttttggtctgtgggccatttaacctggatgccaccattttatggggataatgatgcttaccatggttaatgttttggaagagctttttatttatagcattgtttactcagtcaagttcaccatggccgtaatccttctaagggaaacactaaagttgttgtagtctccacttcagtcagaaactgatgtttcagctaggcacagtggtacatgcctgtaatcccagctacttgggaggctgaggtgggaggatcacttgaactcaggagtttgagagcagccagggcaacacagcgagaccctgtcccaaaaaaaaaaaaaaaaaaaaaaaaaaaaaa

SEQ ID NO: 292397 - DNA, 867 bp, Homo Sapiens; identical to SEQ ID NO: 26106

SEQ ID NO: 292398 - DNA, 1000 bp, Homo Sapiens
gggcgggctcctgccatgccgctagtccgctacaggaaggtggtcatcctcggataccgctgtgtagggaagacatctttggcacatcaatttgtggaaggcgagttctcggaaggctacgatcctacagtggagaatacttacagcaagatagtgactcttggcaaagatgagtttcacctacatttggtggacacagcagggcaggatgagtacagcattctgccctattcattcatcattggggtccatggttatgtgcttgtgtattctgtcacctctctgcatagcttccaagtcattgagagtctgtaccaaaagctacatgaaggccatgggaaaacccgggtgccagtggttctagtggggaacaaggcagatctctctccagagagagaggtacaggcagttgaaggaaagaagctggcagagtcctggggtgcgacatttatggagtcatctgctcgagagaatcagctgactcaaggcatcttcaccaaagtcatccaggagattgcccgtgtggagaattcctatgggcaagagcgtcgctgccatctcatgtgagcccttgggtgtggggtaactgccttgcttctgcccccggcacttgccatgttccagtggggggcagatcctcaggacttcacgggtatggttgccagctgtgttcctggcccctggacacacagtgtggcatcctcatgtttgcacactttccccaggctccagtggcctggatgtcaatgtttacaaaggggcaaggacctctcatggacactggcctctagccctctgtttttgtttgatgaattctgttataacctatggggtcaggatatgagtcctgggcattatttatccaggacccatcctcttgggtgggttttgggtgttggctgggtaaggggagccggggacttctgaaatagagctggctccctggggtgacaatgtatatatgcaaataaattgagaaatctttaaaaaaaaaaaaaaa

SEQ ID NO: 292399 - DNA, 1000 bp, Homo Sapiens
tttgtgttttaatatatttactgcattgtttctcaatggaccagtcaccagagactaattattgcacttaaatatttgcctgagatactgcaacattctcaaacccatggttgcagtattgtgacacttagatctaggaagtttttgtagaactgctctgtacctgaatactttttgagagaattaagatgtatcaataatgctttgccatatgagttttttaaagtaacttgttcaatttactcacgtgttctaaacatctttccattacatgttctgtattttaatacattgcatattgacaactaggttctataatgtatgctttgaaatttacttttttatagtttacaggaattttattttttgtgcctatttctttttacacctatgtgaaccactatggaacaacttaaattttgtgccataaaaatatttttgtggtaaggtactatttttttagctctagggatatatcagcaaaaacacatcatgcaatttgagacacataattttgtgttgaatgagcacaacataatttgaagcattgcaaggagataaccagacagcagaattaaatggtcctgtctttttcatttttaatttattgtcatacatgggtttcatatttataacggcatcatgagctcattgcacttaatacctgcaatgtttgctactgtaccacaattgattttcaatactttattacgaaggatgaaactgtaatgttttattaacaatgcttctggaaatgaatgcattttaaagcaaataaatctttttgatagaccttttacaaaatccatttgcactaatgaatgctttcttatggcatataacttaatatttgttactgtgtacactgctgttttggaatgttcagaaataaagactctatttcagcaaaaaaaaaaaaaaaaaaaaaaaaaaaaaaaaaaaaaaaaaaaaaaaaaaaaaaaaaaaaaaaaaaaaaaaaaaaagaaaaaaaaaaaaaaaa

SEQ ID NO: 292400 - DNA, 1000 bp, Homo Sapiens
atgaagaagaggcagctgatgtctggtacaacttgggacatgtagctgtgggaataggagatacaaatttggcccatcagtgcttcaggctggctctggtcaacaacaacaaccacgccgaggcctacaacaacctggctgtgctggagatgcggaagggccacgttgaacaggcaagggcactattacaaactgcatcatcattagcaccccatatgtatgaaccgcattttaattttgcaacaatctctgataagattggagatctgcagagaagctatgttgctgcgcagaagtctgaagcagcatttccagaccatgtggacacacaacatttaattaaacaattaaggcagcattttgctatgctctgattgttccttagaccacatatgttcttatgaagcagcattatgcaaggggaaaaaagcactatgtctgtgtatgtatgtatatagtgtaatacgtatattttaacaaacctgtccttgatattagttaaggtgacacataagggtgacacagaatgtgtaatgcaaatttcatagtaatagtaactttataaaataatattataaaatacaggatttaaacctttctaaatagatcctgaaactgtctctcacattatatagtagatgtttgtttataatgtttacaaaacattttggtgaatttcctcaatgttttataaatgtacattttttaagtccttaagctgactcttagccatcatgtagcttaaggagtctgaaatctgccattaaaactgcacctttaagccaggtgtggtagcatgtgcctatagtcccagctacttgggaggtggaggtgggaggattataaatagagactttccttaagactttaaaaatgtatttaaaactattttttattaaatactttgtgatttcctattaagctttaaaataaatcattgtgtaaaacaccatcaaaaaaaaaaaaaaaaaaaaaaaaaaaaaaaaaaaaaaaaaaaaaa

SEQ ID NO: 292401 - DNA, 1000 bp, Homo Sapiens; identical to SEQ ID NO: 118560

SEQ ID NO: 292402 - DNA, 1000 bp, Homo Sapiens
aggtgagtctcttaacctttctgtgcctcagtttttctacctctaaaggggtgggatggttcttcaaattgtttctaaaacaccggcactttcagcagtgttctggtggcctgagatgagagcaccgtgttcagaagtgcctgggagtggcacagtggaaactccgcttgcacggaccatggagtctgctcaggaccatgctgtaggacacacagcctcatgcgctgagaaagcaaaggaagtgctgggtgtaaagtttgcatgattccatgaagctttagttttcctttttttgttttaaaagaaagggttttatatgttctattgtaaaatatggaaattaaacagggacttcagaaagccgcacagaaagatcaccttccgatggtgtgatgtgctcctgacattcggccgaggtctgtattctgaaaaagatttaatggcctgtgaaacacgtggattctgttgcactggatttgtaataaatgacgctgaacttcctgcttccaagcagctcaaccctgatgctgaactgacaccaggcgaatgtcagggctcccaaaccactagtgccaaagggtcatgttgaaaagttcagaatatttatttgtcagaatataataattgccccccaccttagtatttttgcactttacagaaatttagatactgtttttcagtggcttgagcgttttgccttttcaaaggataactattattttcttgaaaatggaatataatcatgagaggaagaagatgtaaaaaatgtcaaatgttgattggttgtgtaaaagttttgtcatagacatgtattggggagcttccaattagcatacatagacacatgtgtcagtggccaagacctgcttatattttgctttatagatgtagtcatagcatgttgttattgcctcatgtaaataaaaaggctattaagttttccagtaatatttattaatctgtatgtgttttaaaataaaataacttatttctagctgaa

SEQ ID NO: 292403 - DNA, 1000 bp, Homo Sapiens
tgaagtaagcatgaagagacaggctttgggagaaataccagaaagggatttttcaaagatggcattgtttaatctccgtgtggccctcggttgtgcaatcacagatgagccagaagagggccagccccctacttgtttgggctccgaaactcttaccaaacatcaatttttattcttgggatagaaaaatagtatgtgctatctctaatacgctacttcgatatttattaaagaagtatttttaatgtagtgtccacaggctcatttcattgaaaacaactgactatgatgatagacagctcctgattggcaaaagttcgatggtatattcagaattaaattttgcctgcgcacctaaacactgacaacatttagcttaaaggttttccatggagaagagtggtaagagctgtagttagcaaaattggcatcctctttagggtgtcaattctgtgctgctttgcaaattgttgaaacttttgattttctgtttggcaatgctagtcagtgttcacttcttacagattagccaagaatttttatctaaatgcagaaacttattaatgaaatccatttaaactatacttacacaacattttgggaggccctgctggtaaaattatatatggatgcagaagtattgcaagagtccattttccatttttaaatctgcaatatctgattacattgatgaattccgttgtattgtatgtgtgaatataaatatctgaattctcccgggggacttggttttcgtccaaggatgttggcagtggacacttagtttacctcaggaattgcaatcatgtaagactatattcggaaaaaatgctggagtatataattttggatactgatataaaatcatcaagatggaagttaagcagaattgtcacgtgtagtccatagcgcttttatatgcattattctgtaatttgtttgtactgcggcaactttttatactttcaatgtatcatttaataaaaaaaataagcaagtc

SEQ ID NO: 292404 - DNA, 1000 bp, Homo Sapiens
cggagcccgacgatcactggcttcttcgcaccgcaacccctggacctggagcccgcgctgccacccggcagccgggtgatcctgcccaccccagaggagcagcctctttctcgcgctgcgggccgcctctccatccacagtctggaggctcagagcctgcgctgcctgcagcccttctgtacccaggacacgcgggataggccttttcaggcgcaggcccaggagagcctggacgtgctgctgcggcacccctcaggctggtggctggtggagaacgaagaccggcagaccgcctggtttccagcgccctacctggaggaggcggccccgggccaaggccgggagggaggcccgtccctagggagcagcggtccccagttctgtgcttcccgcgcctacgagagcagccgcgcagatgagctgtccgtgcccgcgggggcgcgcgtgcgcgtgttggaaacgtcagaccgcggctggtggctatgcaggtacggcgaccgggcgggcctactccccgcggtgctgctgcggccggaagggctgggcgctctcctgagcgggacggggttccgtggaggagacgacccggcgggtgaggcccggggcttccctgaaccctcccaggccaccgcccctccccccaccgtgcccacccgaccttcgccgggcgccatccagagccgctgctgcaccgtcacacgcagggccctggagcggcgcccacggcgccagggccgccctcgagggtgcgtggactctgtgccgcaccccacgacggagcagtgagcgcgaggatcccgatgaggggatggaccgcgccatcccagggctggggaggagcggggagggcggatctccctggccagcagggatgggagggggccatttgctgttcctctgagtaaagcttgttctgcatgaaaaaaaaaaaaaaaaaaaaaaaaaaaaaaaaaaaaaaaaaaaaaaaaaaaaaaaaaaaaaaaaaaaaaaaaaaaaaaaa

SEQ ID NO: 292405 - DNA, 1000 bp, Homo Sapiens; identical to SEQ ID NO: 118562

SEQ ID NO: 292406 - DNA, 1000 bp, Homo Sapiens
ggtcacttgctgcagggcacccgggatatatcagccatgataaagagacctccattaaatacgtcagccaccagcaccccagccacccccagctcttcagcattgtccgccaggcctgtgtccggagcctgagctgtgaggtctgccctggccgtgaaggccccatcttcttcggagatgagcagcacggctttgtgttcagccacaccttcttcatcaaggacagcctggccaggggcttccagcgctggtacagcatcatcaccatcatgatggaccggatctacctcatcaactcctggcccttcctgctggggaaggtccggggaatcatcgatgagctccagggcaaggcgctcaaggtgtttgaggcagagcagtttggatgcccacagcgtgctcagaggatgaacacagccttcacgccattcctacaccagaggaacggcaacgccgcccgctcgctgacatcgctgacaagtgatgacaacctgtgggcgtgcctgcacacctcctttgcctggctcctgaaggcgtgtggcagccggctgaccgagaagctcctggaaggtgctccgaccgaggataccttggtccagatggagaagctcgctggtgaggcaggggtgctgttgccggggccttggcccggatggccgtggggcggtaccagctgtctgctctcctggcaggaatcgctgagggagggaaacgcggctctgaatcagcccagaacgagccttcgggaagctcaccctccgatctcggtgtgattgttgtgattgttgtgatttcctgtctcgtttgccttgaccgccatgtgaaagaatctgttccccagctaggtggggaaaattcacaggtgggctgtctgtagagagaactggctgattaaaggcttctcgtcccgattttgtgatagccaagtgcttggcctggtcgacggtctttgctcctttacaaataaagtgttctgtttcaaaaaaaaaaaaaaaaaaaa

SEQ ID NO: 292407 - DNA, 1000 bp, Homo Sapiens; identical to SEQ ID NO: 118563

SEQ ID NO: 292408 - DNA, 1000 bp, Homo Sapiens
tggagtcagtattcagctgtaagtgtagtattgttttatggctgaaatagaaagctaatgaagaggcctacctggatccagattttatgttaacatggcagcaaaactaggaaaatgggaagaaattacttgcggggtgttctagatctgattttttttttttttttgaaagtttcagcctgtgggaggaaaagaggtatcttttaaaatagagatagttacatattttcctcatctaggctgtgtcactattgggtgcaaggatatcattgttggctagattcattttgtataatcatgtatcctcttgtgtgctggtagagattttaatcctgatttttccataaaacatgagtattaagaaataattcctggtttggagaaactggagaaatcacccttttaaggaagaaacactggaaatttctgctaacaccaagatatttaagagtgtacatagtaggtgctcaacaaatttattgaatgaatgagtgaatggaaaaactgggagagtcaaaagtgagcagaagctctccatttctacttctgtcacaaaccacattaaattgtaaataaggcccttctccacttgacttcaggcagcagattgtctagaagcctaaggacagcaatttctctgacaagacaaagtagatattttataccaggggttggcaaactactgcccacgggccgaatttggcccagtctgtttttgtatggtgcaaactaaaaatgatttttacatttttaaagagttataaaagaaaaaaatatgtggtctgtgaaatctaaaatatttactacctggcctgttggaggaaaggtttgccaatctctgttttataccattaactatgagattaacaaaaacttttacctttgtgcagaaggttaaaaaaaaaaaaacatggttaaggaaaaggagacatgttacctcttcatacactcctataactgtggcattgcaaaaaataaaaataaccacctttaaaaaaat

SEQ ID NO: 292409 - DNA, 1000 bp, Homo Sapiens
agtgaaggtggtgcccaaggtaaaggtcctacagagggataccgtgaggcagtgcaaagaggaggttagcatccagcgacagatcaaccatccctttgtacacagcttgggggacagctggcagggaaaacggcaccttttcattatgtgtagctactgcagcacagatctgtactccctttggtcggctgttggctgctttcctgaggcttccatccgtctctttgctgccgagttggtgctggtactgtgttatctccatgacttgggcatcatgcatcgagatgtgaagatggagaatattcttctagatgaacgaggccatctgaaactgacagactttggtctgtcccgccacgtgccccagggagctcaagcctacactatctgtggcactcttcagtacatgggtgagagaggttaaagctgatgggatacaggaattagctggtcatgagggcgcacactgtggtcccagctactcgggaggctgagggggaagaattgcttgggcccaggagatggaggttgcggtgagtggggatcgtgccgctgcatccagcctgagcaacagagtgagatcttgtctcaggaaaaaaataaatttaattgctgtggatactgtaaagggtgtttatcgtaacagttcataatattctatttaagaatgcgtgggagaaattttctctggacccagttatgcttttcctgaattgctgtttggtttttaccttaaggacactaaatattcagctgattgtatttttctgtttgtactgatactagaccatttagagcccaatttgtggtctaccttcagcaagtgtttatgtattttgtatgctagtcatgttcttggttctgtcttccttttctacttttattttccttattctcatttttctaagttttaatcgttttatattactataatatctgcatcttgtaagcctttttgtaacaaggttgggatataaataaataaggcaatgtatccttt

SEQ ID NO: 292410 - DNA, 1000 bp, Homo Sapiens
ggagaccagagaagccgctcaacatcctgcaatgcatgggacaggccctgcctagaaacaccagctcagcatggcagcagtgcggaggccaggaaaccctgatcgccagtttctaacgccctcaccatttttatttttatttttattttttttgagacagagtttcgctcctgtcacccaggctggagtacaatgatgcgatctcagctcactgcaacctctgcctcccgggttcaagtgattctcctgcctcagcctcccgagtagctgggattacaggcatgcaccaccacgcccagcttattttgtatttttagtagagacggggtttctccgtgttggtcaggctggtctcaaactcctgacctcaggcaatctgcccacctcagcctcccaaagtgctgggattacaggcgtgagccactgcacccggctcaccactagtttttagccctttttgttgggggtggggtgggggcagaggagaggcggatacagaaacttgtgagaatgtgatgaacgctctgaaccccctataaaaaatgtgcatgtaaatatatactctcaacatttaaaagatttcagaaggttcctggaaattccaatgtccacccatgagtcctcagctgagactccctgctccgctgccctctttgtctaagagctgtggcaacagcacctgaatttcagaaacaaaaggccgggcgcggtggctcacacctgtcatcctagcactttgggaggcagaggcaggaggatcgcttgagctcaggagttcgagactagccttagcaacacagtgagacacaattgctacaaaaagattttaaaattagtttgacggggtggcgtgtgcctatggtcccagctactcaggaggctgaggcaggagaattgcttcaatccaggaggtggaggttgcagtgagccgagatggcgccactgcactccagcctgggccacagaccctgtctcaaaaaaaaaaaaaaaaaaaaaaaaa

SEQ ID NO: 292411 - DNA, 1000 bp, Homo Sapiens
ccgcaccagcgtcggcccaggccccaccgccagccgcagccaagtaggagggggctgggccgcgcccgcaccccgggagcctcctcaggctccctctattaaagccgatctgactccgcccagccagatgtcccgagtgcgccaaggactgtcctctcacccactcctggattctgccctgacctccatcctggacactgccttgataacatagacccttccactgacaccctcgctctcacaccccctccagctttccgaccccacaccgacaactcctcggcttccagaccctaccagcactaccctaaccctcagccgacagtctcagccccaccgacccactttcttggcatatagccccacttaagacccctcctctacttccttctgagtcctctacaaagacatccgggtactacatttccatcccttccctattttgacaccaaattatggtgtagacagccctcccccaaccccaggccagtcaggcacaatccccccaccccccaaacgtcctggactgcacagacctcccactccagaccatccaggcctggttcccaagacccgatccttcccctgcaaccagacagtctacaactgccccctccagcccattttctgccgtgaaaccccagccagccacaccagactctggaaccctttttcgactgccccaactcttggacaccaggccaactagaacacccaacaccaaactgtacagactctcccaccccaacctccccagactctgcacggatgtcctaggccccctccccaactctaaccagaccccatccccctaagtccctttgtcttgacccccaagtcttcaaccagatatcctcggcaacccacctcccaccctcctcctcttctccttcaagacccaactgagcacccgctctgattccccacagcctttctccctgccaccactcccttagtctttcccaggcttactctcccaataaatgtgctagagctctgc

SEQ ID NO: 292412 - DNA, 1000 bp, Homo Sapiens
caccacatcactgagaagaaatttttgattgtctgacagatacttatccattatgtgtctatagttcagatgcttgtgtaagaaactgaaataagctgcgtgtggtggctcacacctgtaatcccaacactttgggacgttgaaatgggagaattgcttgagtccaggagtttgagatgcgcctgggcaacatagaaacctgtgtctacaaaaaatttaaaaattagccaagtatggtgacaggcacctatggttccagctactcaggaggctgaggtgggaggatcgcttgtgccttggaggtcaaaactgcagtgagccatggttgcaccactgctctccaggcttgagtgacagagcaagactgtatctcaaaggaaaaaggaaactaggccaggcgtggtggctcacgcctgtagtcccaacactttgggaggccgaggcgggcggatcacgaggtcagatcaagaacatcctggctaacacggtgaaactccatctctactaaaaatacaaaaaattggccgggcgcagcggctcacgcctgtaatcccagcactttcggaggcagaggcaggcggatcacaaggtcaagagattaagatcatcctggccaacatggtgacaccccgtctctactaaaaatacaaaaattacccaggcatagtggcacacgcctgtagtcccagttacttgggaggctgaggcaggagaattgcttgaacctgggaggtggaggttgcagtgagccaagatcgtgccactgcactccagcctggcgacacagtgagactctgtctcaaaaaaacaaaacaaacaaacaaaaatacaaaaaattagccgggcgtggtggcacctgcctgtaatcccagctacttgggaggctgaggcaggagaatcgcttgaacccgggaggcggaggttgcagtgagctgagatcgcaccattacactccagcctgggcaacagagccagactctgtctcaaaaaaaaaaaaaaa

SEQ ID NO: 292413 - DNA, 1000 bp, Homo Sapiens
cttcttctctgctgaaactgaatcaactacaggaatggcaacttcatagaactggtttgctgaaaattcctgaattcattggaagattccagaacctcattgtgttagatttatctcgaaacacaatttcagagataccaccagggattggactgcttactagacttcaggaactgattctcagctacaacaaaatcaagactgtccccaaggaactaagtaattgtgccagcttggagaaactagaactggctgttaacagagatatatgtgatcttccacaagagctcagcaatctgctaaaacttactcaccttgatctgagtatgaacgattttactacaatccctcttgctgtgttgaacatgcctgcccttgagtggctggacatgggaagcaacaaacttgaacaacttcctgatactatagaaagaatgcaaaatctacatacgttatggctgcaacgaaatgaaataacatgcttgcctcaaacaatcagcaatatgaaaaatctgggtactcttgttctcagcaacaataaactgcaagatattccagtatgcatggaagaaatggcaaatctgaggtttgtcaacttcagagacaacccactgaaattgaaagtatcacttcctcccagtgaaggcacagatgaagaagaggaacgggaattatttggccttcagtttatgcacacatacatacaagagtcacggagaagagcagatcaccaagtcaacggttcaactactttaccaatctccataaatacggatggataatataattcaagatgcccttctaaagaggattactttggtgaattctctaatgtttggatttctgaagtaaaaagaaaagctattaccaaagtttaatgaggccacagcattttttaaagttcatattatttgctatttaaagtatatatttttttgatataaaaatataattaaaaaatttttttggtcaaaaaaaaaaaaaaaaaaaaaaaaaaaaa

SEQ ID NO: 292414 - DNA, 1000 bp, Homo Sapiens; identical to SEQ ID NO: 224012

SEQ ID NO: 292415 - DNA, 1000 bp, Homo Sapiens
acttctctcaactaaaacatctggttaaacagatgttccattcggttattacacaataatctatttcagcttctcatgaatgtacaaagtagactttcttacaattcctggtaaggagactgaatatctcaatcagtattttacccaattagagagagttctcaggaagttacagtcttatttaagctgaaaaataacctctctctctcttttttttctctctctctctcatacacacacacagctaattagtgcaaataaatatctatttcccaaatataataattaatccacattttgtctttaactatagcatgtatatacaaagcaagcccctatgtgttaaaatattttttgaaaaaaatcttttttatgtatctttgcttttaaagggtcatgtcaccaaccctgtactgattcattgcacataaatgttgttgctcctaaaagcctaaaaatgcagacagcaaagcagcatctcttaaaattcaatatgaaaagaacccataatctcaatacataaataccttagtagagagtaagatttaatttttttttattttaaagtccaaatactatgaagaggaaaaatatcaacttcaatttgaaactgaagtcttttacatctgtctagatttgaattctgcttttattttgacttgttaaatcctgaagaatgttgaaacctagaattttcaatctggcaggagtagaaagatgctcatagcacacgcaatatgtatgataacatattttgtttcatcttgcttttctttccccttctaatagaggtggctttgccttgacccagcctttaacaatctttaaaattctacaaaataaaggattttcatttatctatgaaaggcttactttgaaagatggaacctccaagtgaattacaacttattctatcattgatgaattcagcctattatatatttttattaacattgatgttgacattgtaagatcattttaataataaaacatcattttt

SEQ ID NO: 292416 - DNA, 1000 bp, Homo Sapiens; identical to SEQ ID NO: 118565

SEQ ID NO: 292417 - DNA, 886 bp, Homo Sapiens
agtggatgattaatgaagtagcatctgaaaaacccaaggaaccaaatgtaggtggagcaacttccctgcaacacacgtcgaagctgctgcagtggctgttcttcccctccccttggaaaggcaccaaaagccagcctttggaagggctggtggactgtgcccttctttcccttcagagaaccagtgtccctgtgactccacccactcatctggccaccgttgccctgacctgccaggagcctggagaagatgaaggcatccgtggttctctccctccttggctacctggtggttccaagtggtgcttacatcttggggcgttgcacagtggctaagaaactccacgatggaggcctggattattttgagggctatagccttgagaactgggtgtgcctggcctacttcgagagcaagttcaaccccatggccatctacgagaacacacgtgagggctacactggctttggcctctttcagatgcgtggcagtgactggtgtggcgaccatggcaggaaccgctgccatatgtcatgttccgctttactgaatcctaatttagagaagacaattaaatgtgccaagaccattgtaaaaggaaaagaagggatgggagcatggcccacctggtcccggtactgccagtactccgataccctggcacggtggctggatggttgcaagctgtagccgcctgcatggcccctgcagcactcaccagttgcatcttgtgaatgaaggtgcttttctgcttgctgcttcagtcaatccttttgatgatctcaccactttaagagttccagatggaaaaagacaaaagtttgcttcatccggggatgcaggatgcagaataaaccaaactagttactcaaaaaaaaaaaaaaaa

SEQ ID NO: 292418 - DNA, 1000 bp, Homo Sapiens
gcacacacccttcctgcacacccgcactacctgcacttctcgcacatcctcacgtggcccttatggtgccctgtgcagggtgccaccacagcctcattttacagacagccccctgaggcccagagacatgcagctctctgtccacaaccatgccacttgcatgggagccctgaaggctgtcaaagtccatttagggccaagtcccaagcctgcccgggggccctgcggtgaacactggtcaagctctctccggctgggatgatcacaccctctgcttcctggccacctgccagcctccatgcaactctgtctgtctgctgcccatctgctgtctgtgcaagcaacttctggaccctggcaccctgggctgctggcctggaggagttcgggaaggaggatagaccaggaaataaagggtcaacagagctgtgtgctgcactgtgggctggtgggacgggcaggccgggtctgccctaaggataaatgatcacttactggggaagaaatgagagagcaggggcacccccctaggccagcacagcctgaggggtacagcaaaggggaccctttgctggcccctgaggctggagtctggcaccccttccccaatcccatagcccggtaatgactgggtccagagcctcgtgagaggtcaccgggatgggggaagtggcctctgtcagggccagggctcatgaatctcattctcttagctgggcgtgcaacagaccaacagataactcatcctaaacagagaaatgagaaagagtctgtgggtgggcctctgagggccacagaaaaccagacaccccacatgtctgtggattggagaggggcaggccactgccctctccaggaccaagccgggttcttggtccccaccctccctgcactccgcatctcctccccagcagccattctcccctttcccttgtgaacaaaagcctagttttgtgtgggcagcaatatagggtaaataaaaccacctgattctccagcc

SEQ ID NO: 292419 - DNA, 1000 bp, Homo Sapiens; identical to SEQ ID NO: 224018

SEQ ID NO: 292420 - DNA, 1000 bp, Homo Sapiens; identical to SEQ ID NO: 224019

SEQ ID NO: 292421 - DNA, 845 bp, Homo Sapiens
agcggaggcgtgtgcctgcggcgcggccccgaggcgtgtgcgcggccatgtgcgcttagcgcagcgcgctcttacctcagtaccccggccgcgaccctccgagcccctggagcccgggtaaccaggccgccggcgccggctcgcggggacccgccaccctggaagccccgcgcacacagcgcattcctggcgagtcggaggcagggtggggcccaggtaaagtgaacagagttatctgtgacattccatcaggcacctatgtaacgaaatcataccgtaataactcaccatggcgtatggagtgccaagaaagaacacagtgaaaaccattttgcggggcagttgttataatgtacaggaaccttgggatattgcattgcttgcaaagacctggtacacaaacctagccaatatcaagttgcctttcttggaagaaatttcatttggtggttctgtgcagctcacaaaatgtaccaccattaaagatggactgctcccttctgcagaatctatcaaactcgaaagggagtatgaagtgaagcgtctttgtaaactgaagtgtcaagaaaatacatctaaggaaattcagcttctcctgagggaaaggccagccggtttgagaagacctcttccatctaaatgacacctgaagcgcggattgtagatgaagaaactcagcagcgccggcgggaactgcttctcctgggccgcccaggacccgctcccggccccggccgtcgctgcgctgcagccatcctggcccggcccccacctcaggaagcctcccacggcccgcccagagaccgagaaaatctcttaatttcagtggaaaaaaaaaaaaaaaa

SEQ ID NO: 292422 - DNA, 1000 bp, Homo Sapiens
tgcggatcgtggctaagtatctgaagagggctgtcagaaatcccgatgatcttgaagcaaggtctcatatgcacttggcaagtgcttttgctggcatcggctttggaaatgctggtgttcatctgtgccatggaatgtcttacccaatttcaggtttagtgaagatgtataaagcaaaggattacaatgtggatcacccactggtgccccatggcctttctgtggtgctcacgtccccagcggtgttcactttcaccgcccagatgtttccagagcgacacctggagatggcagaaatactgggagccgacacccgcactgccaggatccaagatgcagggctggtgttggcagacacgctccggaaattcttattcgatctggatgttgatgatggcctagcagctgttggttactccaaagctgatatccccgcactagtgaaaggaacgctgccccaggaaagggtcaccaagcttgcaccccgtccccagtcagaagaggatctggctgctctgtttgaagcttcaatgaaactgtattaattgtcattttaactgaaagaattaccgctggccattgtagtgctgagagcaagagctgatctagctagggctttgtcttttcatctttgtgcataacttacctgttaccagtataggtgggatatacatttatcttgcaggaaattccccaaagctcagagtccagttccttccataaaacaggctggacaaatgaccactatgttagacccccaggctcgacttcaggggtcagtgttcctgtcccaaaccccacacagaatactctgcctctgcttcatgtagcaaatgagcaaaaactcagtatctatcaaaagtgtaaattatatttcctatgcctagtaattcacttcatgtctaaaaatttatctgatagaaacactagcaccagtacatacagaagcatggcaaggatgtttctggcagcacttttctaataataaaagatttgaaac

SEQ ID NO: 292423 - DNA, 1000 bp, Homo Sapiens
atatcagcagatttgtttttgaggccccttacactttatcaggcaaaaaacagggctgtatagaagaacagtgcaaacgccgtacaatcttgacaacttcaaactcgtttccttacgtgaagaagaggattcctattaactgtgaacagcagattaatttaaaaccaattgatgttgccactgatgaaataaaagataaaactgcagagctgcaaaagctttgctcctctactgacgtggacatgattcagctccaacttaaattgcagggctgtgtttctgtgcaggtcaatgctggtccattagcatatgcaagagctttcttaaatgacagccaagctagcaagtatccacctaagaaagtgagtgagttgaaagacatgtttaggaaatttatacaagcatgcagcattgcacttgaactaaatgagcggctaattaaagaagatcaagttgagtaccatgaagggctaaagtcaaatttcagagacatggtaaaagaattatctgacattatccatgagcagatattacaagaagacacaatgcattctccctggatgagcaacacattacatgtattttgtgcaattagtggtacatcaagtgaccgaggttatggttccccaagatacgctgaagtgtgaggaaatgcagatgtacgtgacaatgagactgacctttctcaggaatatttggagctgtgcaaatgttaaaatttaaagatttgatatacatggagtgtttcttctcgacaccaaaattttcatgtgttccaacagggtgcttacatatttgtaaataagcaacttgaaagtgcctggaaaattgcaccactgtgcttggtttgtacttttttaggtaaatctatatgctgaaaagtagagctcaaaaacagtagttcaatttgcttaattattgcttaaaataatggtactatgtaaaattgtataatggaatacaataaaaggtaaaacttatttgtaaaaaaaaaaaaaaa

SEQ ID NO: 292424 - DNA, 1000 bp, Homo Sapiens
attctgttcgaagattggacccagaatactggaagactatactgagttgtatatatgtttttatagtatttggatttacatctttcattatggttatagtccatgagcgagtgcctgacatgcagacctatccaccactcccagatatattcttagacagcgttcctagaatcccatgggcctttgccatgacggaagtatgtggcatgattctgtgctatatttggctcctggttcttcttcttcacaagcacaggtcaatacttctgcgaaggctctgtagtctgatgggaactgtattcttgcttcgctgctttaccatgtttgtgacctccctctccgtgccaggacaacacctgcagtgtactggaaagatatatggcagtgtatgggagaaattacatcgagcctttgccatttggagtggctttggtatgaccctgactggcgttcacacatgtggagattacatgtttagtggccacacagtcgtcctaactatgctgaatttctttgtcaccgaatgtaagtatctttttagtgcttctatgcgtattaggtaactagctgcagtgaaggctgtgggaagggtgtcagatcctgtgaagaatggcaaaacagcctgacctgagaaacgtgactgagaagcattggaaggaatgtagctttaaaatgatctttctgtccttttcctagatacaccaagaagctggaatttcttgcacactttatcctgggttctcaacctctttggaatcttcttcatcttggctgcccatgaacattattctattgatgtgtttattgctttttatataacaacaagactctttttgtactaccatactctggccaataccagagcatatcagcagagtaggagagcaaggatttggtttcccatgttctctttttttgaatgcaatgttaatggcacagtacctaatgaatattgttggccattttcaaaaccagcaataatgaaaagactaattggatg

SEQ ID NO: 292425 - DNA, 1000 bp, Homo Sapiens
aaatagaaaaggaaaaggaagaagcagagaagaaaaaatcaaagaaatctgtctaattcttaggatgaccactgggaggtcttaatgttttgttttattgtactgcctgaggttgtttagtgaaattttagaggaaaacagttattttgcagcattacatgcagtacttgtgtgatgttttgagaatgccagatctgtggctgtcttcattctattacatagtcaaacataggtttatgtgaagattttctttgaaaggggatttcagtaattgttgagagcagtcataattccacataagcctgagactctataatttgtccagtgtcttacttaccttcatatatgcaaatataattttaaaaaattttttaattaaaaaaatttaataatttggtgatgtttgaatattgactgtcagttaaggacatagctattccaaataaactaaatataatattgagctgcatttctcaaagaatgacaaaagcatccttatactgatgagttcttaaaattttgtcagagccttcttcattttacaatattttgttatttttattttacctttttcattttacaatatttcgttatttttattttacctttttcattttacaagttgcaatatattgtttcgttcatggaacaaatataggctgaattcaaacatgcaattaaagcatgggaagagcttctaagggcatcttaacaggatgctacatgaaaataaggaaagaaattaatacatatcacttttagtttagatttttattttatctcaagtatgtccagtgtgttcggtttgttacatattccatgaaatatctgagtgtgtattttatgattggtattatggaaggcttattgggggaacaagaaaaatataaaaagtgatctctgcccacggaaaggatttaatccaaatggtccacaagaggaatgtgcttaattcctacagtgagtttatatttttgaaaataaaagctagtaaatattc

SEQ ID NO: 292426 - DNA, 1000 bp, Homo Sapiens
ttataaagtgaataccaaataattctttgtccattttgaaagcataatatagggtaattttcaagtgatacaaaaagattcagttagaatcttgtaaactaaaccagtttatttttatgggatcttcatgtaataattttcttaaatttagtactctcaaccatgatagataatgccttaacatggattttaacgtttgcaggatttgctaaattcataagatagttattacctttctttgaaatttgtaatgttttatattcttgtttcatagccatttgtcagtccacagtggtcattatggttttactttttgatagttcttacaccttgttggagaaactacaaaagaaagttgtcctcgtccttccccttagctaacatcaaaattaaaaagttgaatattaatattagctaacattaaaatggaaggtaattcagttttagtgttagctaacattaacagtctaataatttagctttgtaaattccaaggctaaaaccctttcatgggcttcacagtatttagtcctaattaaatacccttctttattccatgaccttattttataacttaaatttttttgcaattgtataaattagtaattcagtcccagtcctggatctctgtagtgttttgacataataaactgatattctttaaatgtggacctgtaaggagatactatggtgtggtgtattgtgcttttagcctgttttccactattaattagcatttaccagtaagggtcattttgactcaagttatttatgtattaatagcctgtgaatattgcagtcctttttagattatattggtctaaatatgcattctgcagtgaacctgttaagctgttcacatgtatagactattgaaatactgtacttgtacacatctgactgttgacattttgtacttttttctagatccaatatttcacaataaaaaacttgtcaaaggcaaaaaaaaaaaaaaaaaaaagaaaaaaaaaaaaaaaaa

SEQ ID NO: 292427 - DNA, 1000 bp, Homo Sapiens
gtggattctctaagtgagctagaggccttaatggaaaggatgaaaagacttcaagaagaaagggaagatgaagaggcgtctcaagaagaaatgagcactcgttttgaaaaggagaagaaagaaagtctttttgtggtctctggagatacttttcattcatttcctcattcagattttgaggatgacatgattataacatctgatgtctctcgatatattgaagaccctggttttgggtatgaagactttgccagacgaggagaagagcatttgccaacattccgagctcaggactatacctgggaaaatcatgggttctccctggtgaacagactttattctgacattggacatcttcttgatgaaaagtttcggatggtctacaatctcacatataacactatggccacccatgaggatgttgacacaaccatgctgcgcagagctttatttaactatgttcactgtatgtttggaatcaggtatgatgactatgattatggagaagttaatcaattacttgaaagaagcctgaaggtttacattaagacagtgacctgctatcctgagagaactacaaaacgcatgtatgatagttactggcggcagttcaaacactcagaaaaagttcatgtcaatctacttttaatggaagcacgaatgcaagctgaacttctttatgctcttcgtgccataactcggcatttgacctgaagtatcacccaaggaaaatgtcatacatgtgtaaagacctttcacataagataaacattgaagctatttgtgatatagcatcaaaaattattcagttctctagtgtcaaagtttagccgtttgtttttttttttttgttttttgcggctgtaatgtgcaatgatgtgttttattttccttgatgcttaacattactaacaattgcaaaaataatactgaggagcactactttgcattgtttgtagttggagttttggatactgatcataaatcatgaatctggcgt

SEQ ID NO: 292428 - DNA, 1000 bp, Homo Sapiens
ccagcttgcggaaaggcgactgcggcaacgcctagtgcaagtcaaccggaggctggagtcactgcaggatctgctgacccacgtgattcgccaagacgagtccgacgccccgtggtcagtgctggggccgaatgcacggcggcctctggagggcgtcttagagaccgaggctctagaactgagccagttggtgggcacgctacaacgcgaccttgattgcctgttgcagcagctgaagggcgcacccccgtgcccctcccgccgctgtgctgcggtggcccacgctctctggactggccgcctacccttgccttggcgacctcatgcgccggccggtccgcagccgccctggcactggctgcgacagttgtcgcgccgtgggcaactgttggttcgttacttgggcgtgggcgcggacgcgagcagtgatgtaccagagcgcgtcttccacctgtcagcctttcgccacccgcgccgcctgctgctggcattgcgtggggaagctgccctggaccagaatgtgcccagctcgaatttccctggtagccgaggctcggtctccagtcagctccagtataaacgtctggagatgaacagcaaccctctgcacttcagggtggagaatggtccaaatcccacggttccagagagagggctgctgctgatcgggctacaggtcctacatgcggagtgggacccaatagctggagccttgcaggacagtccttccagccaacccagccctctgcctcccgtcagcatcagcacacaggccccgggcaccagtgacctgccagccccagccgacctgactgtgtactcgtgtcctgtgtacatgggagggccccttggcaccgctaagctgcagagcaggaacatcgtgatgcatctgcctttacccaccaagctcacccccaacacctgtgtccaaaggagggtccatgtgtgcagcccacccctgtcttgagcccgtctaccaaaataaagttgtagtgattcc

SEQ ID NO: 292429 - DNA, 1000 bp, Homo Sapiens
tgacttctctgtccgtctggcacgcagcgtggtctcaggttctacgtgcccctcgcaaagggtgctgacacccttctctttcttctttttcttcactagaggcatctcaggtgcctgcccgtggaccacactcttagagggggctgtggcttttataggagaaacatgggcaaagtaatcatcattgtttaaaattgagtattgagtccctggttctttgaccactttcttcttctttttcttctctgggatcccagggcccaggtctactttccggtgggccaaacttccccgcctccacgtgagagccggctccgccgtgacccggaagtccactttcgggttgcacgcgtggcttctcttacacacaaattttcttccacttctgccactcctgagacagcaagactgataccttattttcctcctcctccttggcctactcaacatgaagatgatgaggatgacgacctttacgatgatccacttccatctaatgattgaggcagtgtctcactctgttgtccaggctggagtgcagcgatatggtcatagctcactgcagcctcgaactcctgggctcaagggatcctgccacctcagctaaggcctgcagtagctaagactataatcccttaaatattttagaagagaaggagcaagagaagaagatctcaaaatactttttcaacactggctggttttgagaagctcactttcaaaatttgatatggacattgcatttgacgagacagtagagatgggatttcactgtgttggccaaactggtctcgaactcctgacctcgggatccacccgcctcagcctcccaaagtgctgggattacagccctgagcgaccgcgcccagccgtcacaggatttcatacttattaagatccctctttcttctttaggattcccaagtaacttgtctctgctatttttaatgtatatgaccgaataaattcaaaatgagccttatgaaaataggctaaggtc

SEQ ID NO: 292430 - DNA, 1000 bp, Homo Sapiens
ttcagatcttaccagttgacggcaatccacataagacatctgctattgtttgccacccgaacggggtggccggcatggccgtttcctatgatggctgctacgccttcactgcgggagggcacgatcgctcggtggtgcagtggaaaatcaccttaagtgtcctggaggcagcggtttctcttgggggtgaagacttgaccccattctatggtctgctgtctggtggccgggaaggaaaattctacagggagctagaagactacttctactattctcagctccgcagtcaaggcatcgacacaatggagaccagaaaggtgtcagaacacatttgcctgtcagagcttccttttgtcatgagagcaattggcttttacccatctgaagagaagattgatgatatatttaacgaaatcaaatttggtgaatatgtggacactggaaagctaatcgacaagatcaacttaccagatttcctaaaagtgtaccttaaccacaagccaccttttggtaacaccatgagtggcatccacaagagctttgaggtgctcggttataccaactccaaagggaaaaaggccattcgaagagaggacttcctgagactgctcgttactaaaggtgagcatatgacggaggaggagatgttggattgctttgcttcactgtttggcctgaatcccgagggatggaaatccgagcctgcaacctgctccgtcaaaggttcagaaatttgccttgaagaagaacttccagacgaaatcactgcagaaatattcgcgactgaaattcttggcttaaccatttcagaagattccggccaggatggtcagtgaagttaccaggaatgtttaaagcacaaaggactttgggtgtgtgtgcatgcacatgtgtgtgttttccatgaggcactgctttttatgcatttccctcccccctctcatctttagaacatttagacattaaagcaagtttctggtgagcaaaaaaaaaaaaaaaa

SEQ ID NO: 292431 - DNA, 1000 bp, Homo Sapiens
gccgcgccatcatggtaatggtggcctcgccccatccatgtcatccatgtcacatgaggacgtgcagtcttccttgtcctctcctagtggaatttgcctgggagaacctccactgaatactgaaattgttgcatgcctgtggattccttacgacaatggggaacgcggtgtttcccacctcttgtgggtagaaagcagtctgctttgaggaggcgagaaggcaaagccagggcagggcgttgctgtgggaagcgttcggtgaaagcgggtttcgacgcttaggagggccgagggagaagattccaccagcattgtccttgcttcaagttttaggatgtctgaactttcagctttcatgttttcaaccatcatttttttaatggcacaacctacatcttgtttttaaaagaagtagcctcaaattaaactccttaaactctgatgccctggggatgagaacaactagcttggatctcgtgccgtgtaattcaatgtttcattccgctgcctccatcatgtaatagaatcgctttccagaaaggcagttaactggaagcagcagaggctcccagccgtgagaggactgctcaacaatgccccccatcgccgcccccccacccctcgcaccccttgtgttttccctctgaggggcccaagggttatggctttcatgtctaggtgtggggacagaggagggagaggcagatcctgggccgggagaggatggcctggtctgaatctggagtaattaatgccacccaaagaaaaggccctgccaggtccaatgttgtcttagatctgatgatgctgctatttacaaaacactgatcgtccgaaagcttgaatctgttcctcctcgaatgaccctgtagatgcctgacctccaccgtacctccacatcactattcatgtccttctaggaaaatgtgcacatgcctcacgcactatgtgggaagggcgtgtttttaaattaataaagtgtgtcaccattagccatacg

SEQ ID NO: 292432 - DNA, 1000 bp, Homo Sapiens; identical to SEQ ID NO: 118569

SEQ ID NO: 292433 - DNA, 1000 bp, Homo Sapiens
atgccgtccagccctgtgcccaccccacccccagatgcctcccccattccagcccccggagaccccagcgaggccgaggccagactggcagaaagcaggcggtggagacctgaacggatcccagggggcacggacagcccaaagagaggccccagcagctgtgcgtggagccgcgactccttgtttgctggcatggagctggtggcctgtccccgcctggtgggggctggggctgctgcgggagagtcctgtcctgatgctccccgcgccccccaaacatcgtcccagaggacagcagccaaagagcctcctggctcagagccgtcagctttcgcgttcctgaacgcctgacccgatggcctggccctggagtcttcagcttcagctgctgtctggggcggtctgtgcttcctgagcagcctcaaccgtagctgctacagtctccaggcagcttgacttgagaggacgaccctagggctacctcagtttcccccatctcctctgccagaggctctggctatttggacttgaatccctacgagggatggcaggtggcagggcttcagaaatgtcgatctcagggctctcagggggcagtccctgcctgtcttgccctcagacatgaggtttcttgtatgaatgcggaagcgactaccaggttccttatttcattttgatctcagctccctccttccccaggaggtcatgagcagcaacaagccactgctcccccgtcccatcggggtgggctaggtgctgaggctgggtttggtgcatgtgggttgagggtgtcttgtccgggctgccttgtgctgtctggcctgaggccatttcaagtctcagatccctacgtgatccttccctggctctcacctgctcctttaggctgtaattgcttcctacacacgaagcctctgattggagcctctggtccatctcagaaaaaccttccaagagcgctggggtttatgctttctgaataaacactactgtttacatg

SEQ ID NO: 292434 - DNA, 1000 bp, Homo Sapiens; identical to SEQ ID NO: 224026

SEQ ID NO: 292435 - DNA, 1000 bp, Homo Sapiens; identical to SEQ ID NO: 224027

SEQ ID NO: 292436 - DNA, 1000 bp, Homo Sapiens; identical to SEQ ID NO: 224028

SEQ ID NO: 292437 - DNA, 1000 bp, Homo Sapiens; identical to SEQ ID NO: 224029

SEQ ID NO: 292438 - DNA, 1000 bp, Homo Sapiens
gcaaagcctggccttacaccacttccagcagctctggggctacctcctggagtggcaggccatatttaacaagttcgatgaggacacctctggaaccatgaactcctacgagctgaggctggcactgaatgcagcaggcttccacctgaacaaccagctgacccagaccctcaccagccgctaccgggatagccgtctgcgtgtggacttcgagcggttcgtgtcctgtgtggcccacctcacctgcatcttctgccactgcagccagcacctggatgggggtgagggggtcatctgcctgacccacagacagtggatggaggtggccaccttctcctaggatctccggatgggcgcacctgctgctcagggcagggttgctgagcaagaccacctccctaggccttgcctggcatgggtgccactctctctggcatccacctgtctggggctagtctctggccctcactgctcacggccgggtgaccactctggcctgcgtactcctcactcagaaacaagaacagcgacagcccttctcgagcagatgacacgagctagtccacgttgacagcttaagacagtgctagctctgccctggctctcctagaaggtggaggacagacacaggagaaataaaaaaagatgatgctgcaggaatccttcttaaaaatattacatgttttattatcctgtccccagagggtggtttatccagaaaccaagaaaaaaaatcaatcagaataaactcaaaaaaaaaaggtagggggagcaaaaccatcaaccaccaggcagccaggccatcagcccacctccacctctggagggtccccagagacccacgcccgacgcagacccggaggagcatcagcaaggggcccgggcagagaatcggctatgtcttcattatgagagcaggagagacggcagagatatgttgctaggtgaatatatatttatataataaatccgtaagttaataaagtaaatagtaattctc

SEQ ID NO: 292439 - DNA, 1000 bp, Homo Sapiens; identical to SEQ ID NO: 118572

SEQ ID NO: 292440 - DNA, 1000 bp, Homo Sapiens; identical to SEQ ID NO: 118573

SEQ ID NO: 292441 - DNA, 1000 bp, Homo Sapiens
tgtgtgaacctccgaaagctcagcacacactcccgcaggatcccgccattgttcagtcttccctgggttctgcctccgcctcgcccttccagccgcacgtgccttacagccctttccgagggatggcgccctacggcccgctggcggccagctccctgctcagccagcagtatgccgcctccctgggtctagagaagttggtaagccctccagcctcagccgctgcttccagccctagctcttctccatctccacagcccgtttcagagcttgacttgtcctcagagccacagcagctcactgccaaggggtgccttttctgtttcagatctctgttcacttacacccagtcccacattgtcctgtttagagtccctacaggtcctggaaccttggaaagggaggagatggagagaggagctggttttccatccatcccagtcggcaagagccccatggtggagcaggctgtgcagactggttctgctgacaacctgaatgctaaaaagctgttacctggcaagggcaccacagggacgcagctcaacggtcgtcaggcccagccgagcagcaagacggccagcgatgtagtccagccggcagctgtgcaagctcaggggcaggtgaatgacgagaacagaagacctcagaggaggcgatcaggaaacaggcgaacaaggaatcgctccagagggcaaaaccgtccaactaacgttaaggaaaacacaatcaaatttgagggtgactttgatttcgagagtgcaaatgcccagttcaaccgagaggagcttgacaaagaatttaagaagagacccatactgctacttgtgttttggacttaactgaacttggacatggtctgagttagaaccacttgttttggggaagtattcatgggtaacctctttgaggtctctttatctgtgtttcctttttagttgcgcatagcctaattctaaggttttggtattttgcaaaaaggtttctatagtgaaagctg

SEQ ID NO: 292442 - DNA, 1000 bp, Homo Sapiens; identical to SEQ ID NO: 224031

SEQ ID NO: 292443 - DNA, 1000 bp, Homo Sapiens; identical to SEQ ID NO: 224032

SEQ ID NO: 292444 - DNA, 1000 bp, Homo Sapiens
ctctggaagagaagatgtagatgtgagaacattaggaaatggaaggccctttgcaattgagctggtgaatcctcatagagtacatttcacttcacaagaaattaaggaacttcagcagaaaattaataactcatctaacaaaatccaagtacgtgacttgcagcttgtcacaagagaggcaataggacatatgaaagaaggtgaagaagaaaagacaaagacctacagtgccttaatttggacaaataaagcgatacagaagaaagacattgaattcctaaatgacataaaggacttaaagatcgaccagaaaacacctttgcgcgtccttcaccgaaggcccctggctgtgcgagctcgcgtcattcacttcatggagacacagtacgtggatgagcaccacttccgcctccacttgaaaactcaggctggcacctacattaaagagtttgtacatggagacttcgggagaaccaagccaaacattgggtccctgatgaatgtgactgcagacattctggagctggatgttgagtctgtagatgttgactggccacctgctctggatgactagctttcaaatttggagacaaagagtatggttttcctggcatgatgtggacatccatggagcacatgccgtaaaatggctgtttacccaccataacggtgtcttgaaaactatttggatcatgttgatctatataattgttaatttgttgtaacatctcaggatctatatatgtgtatattttgtgttaaattgttccaaggatgtcttaggatttttctcattccctctttcacccccacaaaccaaactatgaataatgaaataattctccttaattctttcatttagagaggtgcacaaacaggacacattctctgttaacctaagaagctgtaatttcagcaagatttccctccacaagagatataccacctttaaaatcatgttctaatttttgtaaattatctgaataaaagttatatctag

SEQ ID NO: 292445 - DNA, 1000 bp, Homo Sapiens; identical to SEQ ID NO: 118574

SEQ ID NO: 292446 - DNA, 1000 bp, Homo Sapiens; identical to SEQ ID NO: 224033

SEQ ID NO: 292447 - DNA, 1000 bp, Homo Sapiens
ccatcttcatggccttgctgctgccaagatggtttcgggaagccccagtcctgttcagcacaggctggagccccttggatgtattactgcactcactgctgacacagcccatcttcctggctggactctcaggcttcctactggagaacacgattcctggcacacagcttgagcgaggcctaggtcaagggctaccatctcctttcactgcccaagaggctcgaatgcctcagaagcccagggagaaggctcaagtgtacagacttcctttccccatccaaaacctctgtccctgcatcccccagcctctccactgcctctgcccactgcctgaagaccctggggatgaggaaggaggctcctctgagccagaagagatggcagacttgctgcctggctcaggggagccatgccctgaatctagcagagaagggtttaggtcccagaaatgaccagaacgcctacttctgccctggttaatttagccctaactctcatctgctggagagtcagctcccaaactgttctttcttgtaggcagaggatatgtgtgtgtgtattacatgggactgtctagaggttccatttcccaatagggtgggttgcctttccttgtcttaattaggcctaactgttccagagcagaggccatgatttagtggaccatgaatgattgagattttgcctgtgtactatcaatgccacttgaaccccagcattcactttaatacttactgagcatctcccatgtgcaaggtcctggaactacagggataagacagggtccatgccgtctcaaggcatttacggtttaaaaagacctttgtaattactaacgaaaatgcaaagcagaaagcagtctgtaataaagattaaaataatgccgtgggagcaaaaaaaaaaaaaaaaaaaaaaaaaaaaaaaaaaaaaaaaaaaaaaaaaaaaaaaaaaaaaaaaaaaaaaaaaaaaaaaaaaaaaaaaaaaaaaaaaaaaaaaaaaa

SEQ ID NO: 292448 - DNA, 1000 bp, Homo Sapiens
tggttgctttatcccacctcaaagcgaattaacttcaggcctgtttgaagatgaagactttgctgtcttgtttcaagatgaagacagatcttcacctattgaaattcctaaaataaggtatattacagctaatactgacacagaagaacagagttttccagtccctaaggcatttaacacacgtgtagaggaattaaatttagatgtccttcttcagaaggtagatcatttacgtatgagtgagtctggcaagtcggagagttttgaactacttcgtgaccacaaagaaaagtttagagatgaaatagagtttatgtggcgatttgctcgtgcttatggagacatgtatgaactatctacaaacacacaagaaaagaaacattatgctaatattggaaaaactttaagtgaaagagctattaatagagcacccatgaatggacattgtcatctgtggtatgcagttttgtgtggctatgtatctgagtttgagggtttacaaaacaaaatcaactatgggcacctcttcaaggaacatctagatatagcaatcaaacttttaccagaggaaccctttctatattacctcaaagggagatactgctatactgtctcaaaactgagctggattgagaaaaaaatggctgctactctgtttggaaaaataccatcttcaactgtacaagaagctttacacaatttccttaaggctgaagaactatgccctggttattctaatcccaattacatgtacttagcaaagtgttatactgatcttgaggaaaaccagaatgctttgaagttctgtaatttggctttattgcttcctactgttaccaaagaggagctgtagtctggaagataaagagcctttggtaccgcaagccctgtcatctgtgagtgtggcacagtgaaggcctggagagtcatgacctaggccctgtgaagtcaagtatttttaccaagtaaaaagattggcaataaaacatttccacatagt

SEQ ID NO: 292449 - DNA, 1000 bp, Homo Sapiens; identical to SEQ ID NO: 224034

SEQ ID NO: 292450 - DNA, 874 bp, Homo Sapiens; identical to SEQ ID NO: 118576

SEQ ID NO: 292451 - DNA, 1000 bp, Homo Sapiens; identical to SEQ ID NO: 118577

SEQ ID NO: 292452 - DNA, 1000 bp, Homo Sapiens; identical to SEQ ID NO: 118578

SEQ ID NO: 292453 - DNA, 1000 bp, Homo Sapiens; identical to SEQ ID NO: 224036

SEQ ID NO: 292454 - DNA, 1000 bp, Homo Sapiens
aagaaaaggagggctgaggaggacttgacatttgaggaggacgatgagatggcagctgtgatgggcttctctggctttggttccaccaagaagagttactgaggctttctgtgcttggcctgactttggcctatgctggacctaactttgcgtgtgtgtgtgtgtagtagggggtcatttctttttgggtaatgggaaagttcttaagagtgtcaatggggagggatagagggtgggggctcatggtttccctctactttgggagagggcacagattgcagaggtaatgctgtggcatattgcttctgcctcagtgtatcactggagtcacaggaccctgcccacctgagttcccaataaagaaaaacctccccttctgaggctgctttcccaaaactccccctgcatctttatctcttcatctatcccacctcttgtctgaacatcccacctttatcctgtgttctgcctttgttttaattttaactcatgttcatcctgcaacagaagcattctctaggtcccagtttccagttgattgcatatccttgatcagccctttttcccatcctgccctatggttctctagccacctgtgcatgcatgtgtatttctgcctggttctatggtgtgtggatgtgtgtgcatgaatctgtcatatagagggggtccgagctggaatcctagagcattgctgccctggggcctgatgttcttggcttcctcagagcatgtaacaggaaattaaatgggatgagtgtttggtgtggtttgtgtctgatgagttttttaacattcaggtgtagattgtttcagcttctcttgtttcattttcctgaagatttatgtttttgtctaccttgtgagcaggcttttggaagaacctgtttgatgcaaaaaagaaaatgaaaaacaaaacaaaaaatccccaaaaccttattatgggggcccttcggtcttagaagctgtttgacatgtataataaatggcattgactggg

SEQ ID NO: 292455 - DNA, 1000 bp, Homo Sapiens
tagtagagatggggtttcaccgtgttagccaggatgatctcgatctcctgacctcatgatccacccgcctcagcctcccaaagtgttgggattacaggcgtgagtcaccgcgcccagctggtattgcttttctattccctttggacatacatgctacagtcccacaatgtagcatttccttggaaactccctttttttttttttttgagatggagtttcgctcttgttgcccaggctggagtacagtggtatgatcttggctcactgcagcctctgcctcctgggttcaagcgattctcctgcctctgcctcccaagtagctgggattacaggcacccaccaccatgcccagctaattttttgtatttttagtagagacaggatttcactatgttggccaggttggtctcaagctcctgacctcagatgatctaccagcctcggccttctgaagtgctgggattcaggtgtgagccactgtgcccagcagggatgcttcatctttctaagaattatcttggctttggactttattcataaatgttttatttctgttagtatgaacaatagactgccttaacaaagtttttttttaaacaaaatcgttcttgttggattttattcagcagcatctatcatgtagataaattcccaggtgtagcattacagcttctgactaatatagctgccattcagacaattaatgttcaaagagttttctaaagtgataaaaccaaagaaaagcatgtggaaaagcagaagcttagaaagttgtggtcactgaatgcactccctggtttttatttgtcagtgaaatctttatgcattcattgttaatattttaattccatggctttgtaggctgtgctgtgtctgaaggggtaacacctagggaaacatgaggccccttatgggaccccccaaatggaacaacttcactttctcttttatgtattgagccctgtgttaacatttcacttaagaagagcaccagtgcttt

SEQ ID NO: 292456 - DNA, 1000 bp, Homo Sapiens; identical to SEQ ID NO: 222007

SEQ ID NO: 292457 - DNA, 1000 bp, Homo Sapiens; identical to SEQ ID NO: 118579

SEQ ID NO: 292458 - DNA, 1000 bp, Homo Sapiens; identical to SEQ ID NO: 222005

SEQ ID NO: 292459 - DNA, 1000 bp, Homo Sapiens
cactggttaaggcttctgtttatcacacataggcccacacacagactcaccaactttgcaatagaaatactggtgcctgcagagcagcactaacagtggcaggtgctgtactaggctctgtactggccacacttactattgacagtcaccccgtaaggttcacaaaccaccccattgaacagatgaggaactgaggctcaaggaggttaagtaacatttccagggttatataaactagtaaatggcagagctaagagtcaaatccaggtctatgtgatcctcagagattggaggccaggatggagaattggttgagtagccaaggaaggtcagtgtgaaaagcttgctatggcaaatatagcgaaatctctccactgccttctgtccaccaacatttagtgccagcctaggcacaacttgtcctggtccaagtccttattctgcttgccccaacttacctgcagacactccttttgctaccactcaaggaaggaagtcaccagtggccttagtgcaggaaactcagccctggtggccctgcagaacaatgcatctgacatgtgcgatgcatccccatggagagacagcattgctccccagccctccagaaaccttgagcagatccagggatcagtgagaggagtggtgtgtacccctaaatcctcccaccccagcactgcccatctgtaaaatcttgtaaagcccagtttcctgtgtgcatgtcatggaccagtgagctggagatggctgaatcttccaagagaaacaaggttggataagcgcttccttttttttagcccaggagaggtggatgtttgtctgagaaaacaatggcctcaagggaggggccttgggcccaccctcacagggggtctctgtgtgatctcttgggatttctccttgtttttgtgagtacctgggaagtgttgtttgttttcttattttctttttaattaaaaaacaaacaaaaaaaaaaaaaaaaaaaaaaaaaaaaaaaaaa

SEQ ID NO: 292460 - DNA, 1000 bp, Homo Sapiens; identical to SEQ ID NO: 224040

SEQ ID NO: 292461 - DNA, 1000 bp, Homo Sapiens; identical to SEQ ID NO: 118580

SEQ ID NO: 292462 - DNA, 1000 bp, Homo Sapiens; identical to SEQ ID NO: 118581

SEQ ID NO: 292463 - DNA, 1000 bp, Homo Sapiens; identical to SEQ ID NO: 224042

SEQ ID NO: 292464 - DNA, 914 bp, Homo Sapiens; identical to SEQ ID NO: 118582

SEQ ID NO: 292465 - DNA, 1000 bp, Homo Sapiens
ctgtcaagaccgcacgcttgccaatccaggaatacatggtcagaaaccagaatgggaaaaactatcattcagagatactggccatcaatcaagtgtttgatatcctgtccacttacttagagactcacaactggcctgaagcattgaagaaaggagtttcttcaggaaaaggctatattcttcggaactcagtggaattatgggcctaagattgcagctgcgtggccaggtgctcacgccgtaatgccaacactttggtagaccgaagtgggcagatcacctgaggtcaggagttcacgaccagcctggccaacatggtgaaacccttctctactgaaaatacaaaaattagccaggtgtggtggcgcatacctgtagtcccagctacttgggaggctgaggcaggagaatcacttgaactcgggaggcgaaggttgcagtgagccgagatttcaccagtgcactccagcctgggtgacagagcaagactccatctcaaaaaaaaaataaataaaaaaaaatgcagctgcaggagtgaggcgcttggaggtaccttgacccaaagagcagggcagagggtggcagtggcacataggcaagtgtctttgcatgacatcttctcagagcttcacaataatgtcagggaccacatttaatgctttttaatctcccatagtgcctggctcacaggaagtgctcagatatgttaagtaataaaaagttaatgtggtgggtgcagtggctcacgcctgtaatcccagcactttgggaggctgaggtgagtggattacaaggtcaggagttccagaccagcctggctaatatggtgaaacctcgtctctactaaaaatacaaaaattagctgggcatggtggtgcgtgcctgtagtctcagctactcaggaggctgaggcaggagaatcgcctgaacccgggcggtggaggttgtagtgagccaagatccagcctgggcgacagagccagactcttgtctcgagggg

SEQ ID NO: 292466 - DNA, 1000 bp, Homo Sapiens
tgtttatagaaatggaacagacatcatctataattatcatgggatagtttccttgaaactggaggatgacagtttcccaactcacaaaaggaaggccaaagtatccatcattagtcagccacaaaagacaatcaaagtggcagaactgcctcaagcagataaggtggaatccacaactgactcacacttccccagacaggaccagttgccctcatttccaaagaactgcactctggaattaaagggactcttccattttgaagaaggcatccagaagctgtatcagtgcaatgggatcgcctggaaagcctggagtccccaaaccaaggatgtggaagacaaatcctgtccagccgggtggcaccagcactcaggctactgtcacatcttgatcacagagcagaaaggcacctggaatgcggctgcccaagcttgcagggaacaatacctgggcaaccttgtaactgtattctccaggcagcacatgcggtggctctgggacattggtgggagaaagtccttttggataggtttgaacgaccaagtgcatgctggccactgggagtggatcggtggtgaacctgttgccttcaccaatgggagaagagggccctctcaacgctccaagcttggaaagagctgtgttttggttcaaagacaagggaaatggcaaacaaaagactgtaggagagccaaacctcataattatgtgtgttccagaaaactctaaatataacagaccctacagggggccacctggagtttgtcacctatttattcacaggatctgtgaatattgctccatagaaaacaaattgttatgattgagtgggtatacctttgtgattctgtctagtgaaaatgggacatttttaatagtgccagaaagattgataaataaatattttttacaagataagatacaatttttgtatctcaataccttttaaaataaatgccagcagtattaaaaaaaaaaaaaaaaaaaaaaaaaaaaaaa

SEQ ID NO: 292467 - DNA, 1000 bp, Homo Sapiens
ttggcactccattacgtggaggcagcacagtgcagacagacctaatggctctgccacttactagctggtttgggcaaatgaattttcccttctgtgcttcagtttcttcatctttaaaatgagaataataatttataccacatagagtagctactattatgatattgtctgtggccacatccttctcttccattagaagaagcccttcaagggcaaggaccatgtcttatctacttgcactgttcacccttcacatcaaccctgttacagcactctgttctgctggaccacttattgtagttgtagctaattgtgaaagtatttgtttaatatctgtcttctccctaaaatgtcagcctactgaagatgaaccatctctttcatgtctacccatctcccagttgcatagtacagtgtctgacaggtcttaggaacagcaaggagctcagtgtggctggagcagaaaaaaattgtcagtacctttgctcatgccatgccctcagcctggaatgccctttgctcttttagcctgtatacaaaatgtatttcaaggatcacctcttcctggaagccttcctcttttccaccatccaaaaccctcttaataccctgtgtacatccctgccattgctcttgccagattgtggtctatgtttgatctgtgtccccaactagacagggagttctctgaggacaggatttaattcgatggtatcattagaacccagcacatggcccttagactgagattcagagatatgaaatgatttacccaaaatcacacagctcagaagcagcagaactgacattgggacccaggtccattggaggcatcttttagttatgcgcttgagaaatcgttgttgctgcacctagttccttccacatccctacaactcggacactaaccccctcctaaacattcgtacacacacaaacacaaaacttgctgaacaaatggctggatgagtgaaacaggaatggagcaagccagtacagt

SEQ ID NO: 292468 - DNA, 1000 bp, Homo Sapiens
cccgaggactagcagacaaacaaggacctgaggaatgtgatgcagttgctcttttaagtctcatcaactcctgcgatcacttcgtggttgatcgaaagaaagtcacagaggtaattaaatgtcgtaatgagatcatgcactcttcagagatgaaagtatcttctacgtggcttcgagattttcagatgaagatccaaaattttctgaatgaattcaagaacatcccagagattgtggcagtatactccagaatagaacagctgttgacgtctgactgggctgttcacatccccgaggaagatcagcgagatgggtgtgaatgtgaaatgggaacttacctgagtgagagccaagtcaatgaaatagaaatgcagttactaaaggagaaacttcaagagatatatcttcaagcagaagaacaagaggtgttgcctgaagagctctcaaatcgactggaagtggtgaaggaatttctgagaaacaatgaggatcttagaaatggccttacagaagatatgcagaagctagacagcctctgtctacatcaaaaactggattcacaggaacctgggagacaaacacctgacaggaaggcctgaggttgcccgtcaacaaaaatcaggcatgttctgtgaaagtcagcatggcttccatctcagacatccttttctgtgcaaaaggaaaaagttaccagagtattgtacccaaacaaaaaggaatttttgttgttttgtcctggactttcctctaactctttggaactattttaatatttataaacttggggttgtataatctattgcaataaaaaatattagatactctatgccaaaacttgctaccaggccaggtgtgatggctcacacctgtaatccccagcactttgggaggccaaggcgggcggatcacctgaggtcaggagttcgagaccagcctggccaacatggcgaaaccccatctctacttaaaaaaaaaaaaaaaaaaaaaaaaaaaaaaaaaa

SEQ ID NO: 292469 - DNA, 1000 bp, Homo Sapiens
gtcaaaatgaaaggttatacttcttggggcattagcctatctgtagctgatttaacagaaagtattttgaagaatcttaggagagtgcatccagtttctaccctaagtaagggcctctatggaataaatgaagacatattccttagtgtcccatgtatcctgggagagaatggtatcacagacctcataaaagtaaaactgactcttgaagaggaggcctgcttgcaaaagagtgcagaaacactttgggaaattcagaaggagctcaagctttaaagttgcttaaagctaattctgtagattgaagatgaaatagtagttatggaattgtatatgtcaaacttttgaataaatttgaatttctaaaagttggaaaaatagaggaaagagtgacctatttagtatagccttccagcttttttttttttcttttttgggagggtctcattctgtcacccaggctggagtgcagtggcacggtcatggctcactgcaaccttggcctcccgagctcaggtgagcctcccacttcagcctccagagtaggtgggaccacatgcgtgtgcctccatgcctgcctaatttttgtatctttttgtagagatggggttttgccatgtcatccaagctggttttgaactcccaaagtgctgagattacaggggtgagccactgtgcctggccttagctttgatttagtatccagatgatagatgacactttttttttttttttttaaagtgacggcatcaaagatgtttttggtacttctcagtacttgccttgtatgtatacgtaattgccatctggtccacaagaatgtgtttactgtgttacacaaatcctgattcatcaggtgcatagtaattcttctctatggcttaatacctatgttcatttacatgctatctctacaatgtaaaaataaaagtgtatatatatacacacacacacacagagtaatctaaatgttcctaacactagataaaaccttgatttg

SEQ ID NO: 292470 - DNA, 1000 bp, Homo Sapiens
ccgcgaggcggagcttgcagtaagctgagatcgcgccactgccctccagcctgggcaacagagcaagactccatctcaaaaaataaatagataaaaataaaaacccatggaaatggtttaagaaaatggttctgggtacaccagaaatttgtttgcctgaagctaaagtgtgtctacaatggtacagctcttccagggacatgggaagtttatcgtgggagatatccagaacctgttttacactgggctcctactgtgtttggtgatcagaaactatagaggggtccaacccaggatttcatgtttgtatcttcataaggccatgctcctgacaggtctaggcaacctgggggatgacttaggttaatgtgctaggattgacacacctcatccagccttcttactttgtggatgggaacacttaaggaatagagagattaaatcttacacttaccccacagctggttactgacaacacaagctctagaattcatgtttgtttgtttgttttatttcaccaggctgcatgagactgaccttccggcattcttactaatagtctttctattatactattggatctttattcatccacctatacaagtaggaaataaggatgaatattcatttagaagaattaatattcatattaacacattgctctcagattattgggaattaacatcttgtaaaaactgggagcaggccaggtacggtggctaacgcctgtaatcctgacactttgggagtctgaggcgggtggttcatctgaggtcagtcgggagttcaagaccagactggccaacatggtgaaaccccgtctctactaaaaaaaaaaaatagacaaaaattagcgggggggtggtggcagggcctgtaattccagctactcaggaggctgaagcaggagaatcgtttaaacacaggaggtggaggttgcagtgagccgagattgtgccactgcactccaacctgggtgacaagagcgagactccgtctc

SEQ ID NO: 292471 - DNA, 1000 bp, Homo Sapiens; identical to SEQ ID NO: 118584

SEQ ID NO: 292472 - DNA, 1000 bp, Homo Sapiens
ggaacgagcaagacatgttttgaaatgtaagatcacagactgttttttgcaagaccacattatattactttattattttctgctttttcttttaacgacattagtgtttttgatcactatattttaaaatgctttttgtgagccttttggttatgtggaatctgttccttagctctgattttttattcttatggagcgtcttaggttactacatgaaggtaagactgccacagtcccccagggaggcacactgtgttttactgattgatttgaagatgatagagagcctagggggatgagtctattggactcaaaggttacattttgtttttccatttaatttaataatcaacaaaacgacaaagtcagtttaatatctttcttctgctgagtcttcaggatgttagctagtctttcaaaagccattgctacaaaagtgcaaatttctcatttcctgtgggtctctagaaactctctcaatatttaaagccaaacaaatccatcttttctgagagacagaaactaaaaaattcagagttaattcactattaaaaacagcaaggccctgctatttcccaagaataaagaaatttaaaattctcattgtaagaagtatgaacttgaagctagaattggtttatttctggcagctacttacaatattaagaactttactttttaaatttgagacaatttcacaggaaagcaagaaattagtctattgtgaaatgtttttacaactaacttggaatatgctgcaaatcactagtaagtagagacacatttaagataaaatgattaataaaacaattggtaattctgaataaggatctgaataaatccagatcacagactgttcctttaccaatatgtaaaagaatgtgcaaaattcgtaaaaatatacccaaaaatttaccagcaacagagaagcaaagaatggagttcaaccttacactataaacatctaatagatatgtatgaaaaaaaaaaaaaaaaaaaa

SEQ ID NO: 292473 - DNA, 1000 bp, Homo Sapiens
cagagatgcactgagatacaaacctggtgagcccatcactttctgtgaggagagttttgtaaagcaccgctcaagcgtgatgaaacagttcctggaaactgccattaacctccagctttttaagcagtttatcgatggtcgactggcaaaactaaatgcaggaaggggtttctctgatgtatttgaagaagagatcacttcaggtggcttttgtggaggtaaagacaagttacaatatgattatccattttctcaataacaattttcttggtctttgcacttgtgtctgataaaacctatttcataaacaactaatgatttcctcctaaatatgtaatgtcttaaatacatttttcatcttataaaagctatggaattagcttattttgcctgatacctgttactcaaggcattaagttggcctcctgaattggcagctgttggcctcgataatctcttaatattgctggaaattagtaatacagaaatccagtcaactcatatcttcctgtctttccttctgaatagtagtattctctgctagaaaactactagtgatggttattactgagtatgaatttaagaactgaggttatgattggtaatacaatccaaaaagaagggtctgaacaccaaaattctttatacatatttaagtaactgtattattattatacagatgtctttacctttttgactttatagatcactgcagcattaagaaagtttccagtttaccattccataagtacaattaatccttctagtgtaaatgttcaaatactgttataattatctaggcaattaataatttacaaactgatatttttgcacgattgtagtggtgtatagtcttgacttgcagagcattttgcttgagtccttgaaatgtcgtgttcattcattatttgctgagtgcttacaatgtattaggcactgttctaaatattaagtgtactaaataaacaaaaatccttgtattctgaaaaaaaaaaaaaaa

SEQ ID NO: 292474 - DNA, 1000 bp, Homo Sapiens; identical to SEQ ID NO: 224044

SEQ ID NO: 292475 - DNA, 795 bp, Homo Sapiens
gaaaagtgcgccctacgaaaggacggtcgacttcggcggggcccaggtgagaaaggcccacctgtgtcccggttgagggtctccagggttctttggggcccgaggaatttcagacctgaacaatcaggtggacaacttcttgtgactttgggtattctgaaattactgccaatggtggcagagtctacatagaactatgcttcgtggtgttctggggaaaacctttcgacttgttggctatactattcaatatggctgtatagctcattgtgcttttgaatacgttggtggtgttgtcatgtgttctggaccatcaatggagcctacaattcaaaattcagatattgtctttgcagaaaatcttagtcgacatttttatggtatccaaagaggtgacattgtgattgcaaaaagcccaagtgatccaaaatcaaatatttgtaaaagagtaattggtttggaaggagacaaaatcctcaccactagtccatcagatttctttaaaagccatagttatgtgccaatgggtcatgtttggttagaaggtgacaatctacagaattctacagattccaggtgctatggacctattccatatggactaataagaggacgaatcttctttaagatttggcctctgagtgattttggatttttacgtgccagccctaatggccacagattttctgatgattagtaagcatttattcttttgacttgattattgtctccttttcatgtgaatttattactcccgttgaaaccgtgtacttaccaataaactatttgctattc

SEQ ID NO: 292476 - DNA, 1000 bp, Homo Sapiens
tatatttcttttttttttttttctcttagagccattgctgctgagattgttctaaagggacaaagagaggtccaccgtttatatcagagagccttacagaagttacctctttgtgcatcactgtggaaagatcaactcttgtttgaagcatcagaaggaggtaaaactgataacctgagaaaactagtttccaagtgccaagagattggagtcagcctaaatgagctcttaaatttaaacagtaacaaaacagaaagcaagaatcactgaacactgggtgcagtcagttctaagtccttataataattgccaaaattatttgaatgattcttcaagattaggctgatccctggctaaggtctgtgtaaggcagacaagcgttattgatcatatcaagttccctacaatatcctgtcctcaaaaccggaagcaatgaacatgatcctcttcggttggataaatgaacttcctgtttggcctgcttctaggccctgccagattctcataacatcatatacgtaagtatagttcctcaaagtgactgacatttattttaattttgctttgtttttttttattttctcccccattcctttattttgtgttattcctgactcacttgacactctctgatgcctgagagattcctgtttgggatttaatatccagggctgtgtttacagtaaaaaaagcaggcagtcccttttagtttttcctttttaaatttttttgagattcttcatttcaggatttaaaactatagcagtccatcttaaggaaagtgtaactgccatggccacaagtctgctagttgcacttgaatgctctatcagggttgtttattaccctttctacgttctggactccttgccgagactgtttaacttgaagattaaagaaactattgcaaatgccagtgcatcagaacctaagagtggtcaaatattatgtgcaatttttttgtaaagaaattttaatttataataaagtttaacagttt

SEQ ID NO: 292477 - DNA, 711 bp, Homo Sapiens
agcgtggggcttgggtaaaaatggctgaatatttagcttcgatattcgggactgagaaggacaaggttaactgctctttttactttaagatcggggtctgccggcacggggaccggtgctcccggcttcacaacaagccgacattcagccaggaggtgttcacagaactgcaggagaagtatggggagattgaagagatgaatgtgtgcgacaaccttggggaccacgtcgtgggcaacgtctatgtcaagttccggagggaggaggatggagagcgggccgtggctgaactcagtaaccgctggttcaacgggcaggctgtgcacgggaatgtacccgaggtggcttctgcaacttcatgcatctgcggcccatttcccagaacctccagaggcagctctatgggcggggacccaggcgcaggtcacccccgaggttccatactggccacaatccccgagagaggaaccatcggtgttcccctgatcactggcatggccgcttctgaggccctggcccccttacccttcacccccaacagggacagatgttcctggcaggacctctcctcaaagcccccttcactctcctgccccatccttcccaggctcccgggctccataatgtaatctgttcagcatggagaccttcttctaccgcccctgtcttaataaagctgcgtgtttcacttcggcaaaaaaaaaaaaaaaa

SEQ ID NO: 292478 - DNA, 1000 bp, Homo Sapiens
gggcgcaaggccccaggggtcctccctcttaacccatgtaggtgccagagaaaccacccccactccatgagaagaggctcagacagcaggctccggggccacgcagcccagaccacacctgccacggtcttccaggaacggtgctcctgcttctgcaacacaaatcggaacaggagcgatcctcagagagtttacaatgtgctttttccgccaatcagaactgtggacaaaacttcctatttcctacaccgcagctgtctgttcaccttcagctcagagagcactcctgacctttcgtaatgaaatggaagcctccccttgtctggcaaataataaactcagtgtctacttttgccggctttgggaccttcgtgtttttccggggctcaggtctcactccagccatcgctgtggccagtggagagccactcccctctgggggcagtcgccgagagcctccttcccctccgtccagccagcaaggctttcccaagcgtcctgggcaggagggttgggccctgctttccaccaagtcactcagaaggtcccaatcacacatgattggcctcattgggtcagcacctgtgaaaggaagattaaaaactcgacaccccaattcactcaaccaagaagaaaaaagctgaaagctgagtcctgcaggaagctgcctttccctttgccctaagcagacagctgcagatgagagggtcagcatctccactagtggctgctctgtgtgccccttatctcatggaaagtgccaatttactgagcacgagataaacaggtaactgactgttcccacctgctccttttctcctgcagcatggagcaatcagtcatgtgaccacaccctcctccctctgccccctccagccggcttttccccttgactgaagccttcaacatcatcttgggagagaggcacagacctgtctcctgggtgcatccttagccttggcaaaataaacttctccattgatcgagaaaaaaaaaaaaa

SEQ ID NO: 292479 - DNA, 1000 bp, Homo Sapiens
ataaaaatgttggcccaaaattacttttataaataaataattccaaaataatttcttaatttaaaatgatagcacttctcttgcacttaagaatggcatccataagattctgtatttggcatttagactaacttctagatgtatatttttaataatagattcataatgttacatttaattgaaaacaaacctttatatccaatgaaaatagtataaacagaatgatttttataccaccttgttaagattggtgcttttggtaacttgtactgacacaacagacatgtgctagtatctgataacattaagtacattttatgtcgtttaatataattatttactttaaaaattgtacttcagaacatcagattttattcacattttttaactcactgaactttaataatcaggtcacctgtactctagtcagcactgtatatattcttggagtttgtacatgggacttagcaaccacactgagtgaggtaaaagcatttgatttcagatctaaaattcgtaacaacctaaatttgagaggtggctgaaatgtgatgaaaagcaatacgaaaagacaatgtaaactttgaaaaggattttagagggaaaattgcatagctttttgtaacatttacttaattttaaaactaaactcatacttttgctatctttttaatatttatctcgtttgggagtatacgtgtttttaaaatttgtgttttctatctgtttactatagtgtagctactggcttcatttaataaaaataaatgattttgaaattaaatataatatagaattcacattttatatagctctctcaaaaattaatttttattccttaagcattttaaaaacattttaaaaaatgttttgtaaatccaggtgtattttaacaattaaatgcctattttgttatatgttatacttttattcttaattctgaattttgacattttcacacaataaaaataatttatatcaaaaaaaaaaaaaaaaaaaa

SEQ ID NO: 292480 - DNA, 1000 bp, Homo Sapiens; identical to SEQ ID NO: 224046

SEQ ID NO: 292481 - DNA, 1000 bp, Homo Sapiens
caacattacgtatttgaactgttgcttaaatttgtgttatttttcactcattatatttctatatatatttggtgttattccatttgctatttaaagaaaccgagtttccatcccagacaagaaatcatggccccttgcttgattctggtttcttgttttacttctcattaaagctaacagaatcctttcatattaagttgtactgtagatgaacttaagttatttaggcgtagaacaaaattattcatatttatactgatctttttccatccagcagtggagtttagtacttaagagtttgtgcccttaaaccagactccctggattaatgctgtgtacccgtgggcaaggtgcccgaattctctatacacctatttcctcatctgtaaaatggcaataatagtaatagtacctaatgtgtagggttgttataagcattgagtaagataaataatataaagcacttagaacagtgcctggaacataaaaacacttaataatagctcatagctaacatttcctatttacatttcttctagaaatagccagtatttgttgagtgcctacatgttagttcctttactagttgctttacatgtattatcttatattctgttttaaagtttcttcacagttacagattttcatgaaattttacttttaataaaagagaagtaaaagtataaagtattcacttttatgttcacagtcttttcctttaggctcatgatggagtatcagaggcatgagtgtgtttaacctaagagccttaatggcttgaatcagaagcactttagtcctgtatctgttcagtgtcagcctttcatacatcattttaaatcccatttgactttaagtaagtcacttaatctctctacatgtcaatttcttcagctataaaatgatggtatttcaataaataaatacattaattaaatgatattatactgactaattgggctgttttaaggcaaaaaaaaaaaaaaaaaaaaaaaaaaaa

SEQ ID NO: 292482 - DNA, 1000 bp, Homo Sapiens
tcatgttccgctgcccctccaaccaccagatggtggggtctgggctcctcacctgcacctggaaggggagcatcgctgagtggtcttcagggtccccagtgtgcaaactggtgccaccacacgagacctttggcttcaaggtggccgtgatcgcctccattgtgagctgtgccatcatcctgctcatgtccatggccttcctcacctgctgcctcctcaagtgcgtgaagaagagcaagcggcggcgctccaacaggtcagcccagctgtggtcccagctgaaagatgaggacttggagacggtgcaggccgcataccttggcctcaagcacttcaacaaacccgtgagcgggcccagccaggcgcacgacaaccacagcttcaccacagaccatggtgagagcaccagcaagctggccagtgtgacccgcagcgtggacaaggaccctgggatccccagagctctaagcctcagtggctcctccagctcaccccaagcccaggtgatggtgcacatggcaaaccccagacagcccctgcctgcctctgggctggccacaggaatgccacaacagcccgcagcatatgccctagggtgaccacgcagtgaggctggtgcccatgctccacactgggaggccaggctgaccccaccagccagtcagctacaactccacatcaactccacatgcgcccagctcgagactgatgagtggaatcagcttccaggtgtagggaccccttgaggggccaagctgacatccaaggctgaggaccccagtggggagtgttctgttccggcatatcctggccgtaacgatttttatagttatggactacttgaaaccactactgagggtaatttactagctgtggcctcccactaactagcattcctttaaagagactgggaaatgttttaagcaaatctagttttgtataataaaataagaaaatagcaataaacttcttttcagcaactacaaaaaaaaaaaaaaaa

SEQ ID NO: 292483 - DNA, 1000 bp, Homo Sapiens
gtgttagtcttctgctgtctcactgaaaattgctgcagcgcccttggaagagtgcttctgttcagcccaactctaagacaactagacctgtgtgtgaatcgcttaaaaaattacggagtgttgcatgtgacgtttcccttgctgtttccaacctgtcagttagaggagcttcatctgtctggctgtttctttagcagcgatatctgtcaatatattgccatagttattgctactaatgaaaaactgaggagcctggagattgggagcaacaaaatagaagatgcaggaatgcagctgctatgtggtggtttgagacatcccaactgcatgttggtgaatattgggctagaagagtgcatgttaaccagtgcctgctgtcgatctcttgcctctgttcttaccaccaacaaaacactagaaagactcaacttgcttcaaaatcacttgggcaatgatggagttgcaaaacttcttgagagcttgatcagcccagattgtgtacttaaggtagttgggcttccattaactggcctgaacacacaaacccagcagttgctgatgactgtaaaggaaagaaaacccagtttgatctttctgtctgaaacttggtctttaaaggaaggcagagaaattggtgtgacacctgcttctcagccaggttcaataatacctaattctaatttggattacatgtttttcaaatttcccagaatgtctgcagccatgagaacgtcaaatacagcatctaggcaacccctttgatcatgttgtacgtaaacagtatttattataaattactaccgtgactgggatgcaagagaattaggactataattttcctatttgatgtgtgtgtgtgtgtgtgtgtgtgtgtgtgtgtgtgtgtgtgtgtgtgaccttgatccagtcaaccacttcaaattcctacactgtctcaagagtattaaaaggattatatgaagtaataaaggataaaatgcattggaaaaaaaaaaaaaaa

SEQ ID NO: 292484 - DNA, 1000 bp, Homo Sapiens; identical to SEQ ID NO: 224051

SEQ ID NO: 292485 - DNA, 1000 bp, Homo Sapiens; identical to SEQ ID NO: 224052

SEQ ID NO: 292486 - DNA, 1000 bp, Homo Sapiens
cctcgggtagcccagaggagcgagagagtattggctgttcattttaactccatccttggaggattccccaccacaagcctaaggaagtaataaaacctcatgcattattttttgatatctggagagaaacacgtaccctagaaatgctgtggactaattccatggttactttgtcattaaagaaaccaaaatactgagaggtcaccataaacacaaaaaggcagagagagaaggattaaatggtgtttcatgtaaggatctttaaagggagacagaattctagtctgaaaggagcgcaggcagatctggcattttgcttggggagttcaattctttggagaaaatacagagacaaaaagaccattttgatggtatttaaaatatccctctgcccagtgtatctaagtgagtctaaatatattcagcaattttttaaagggcagatattaggcccgattcaaggtatggaatatagattcgaaagggttagtgataggtgagtgcctttcaggtagctttgcatcacagaccaagcccattattgaggactgtacgtatggagcaggcccgtgagcttgtgactgagtttcccaacctgccaggctcccatttgcttaggatgaatatttttctgccctccctggtgagccactgtgggccactcgccactccttacaccccttccctttaatacctcgcttggcttacttgcaaaatccacatgcatcctcctggatctcacagaagatgtatgaaaagtcatggccatgaaaagggcacggaaatcaaattaattaattttgctttttccccacgtttgtttctgtctgtctggtacttttcctttttaagcctgccatctctttgaaagtgagccgcacagtgataatccattttcttcattgtaaccccacagtgtatgtattccacattaaataataaaagggattaataattaaatcaaaatgaaaaaccaaaaaaaaaaaaaaaaaaaaaaaaa

SEQ ID NO: 292487 - DNA, 1000 bp, Homo Sapiens; identical to SEQ ID NO: 224053

SEQ ID NO: 292488 - DNA, 1000 bp, Homo Sapiens
agggttccaccaaacaagaattcatgggataaacagagctttcaaaaaacctgtattttattcagatcttgatggtaactatgaaaaaataaggattttccctgaaaatgacaaacagcaagccagcccaagctgtccaaaaaatataaaaacacctagccagaaaatcagaagccctattgtatctggtatttcacaaccagacgttttcaatcactacccttttgctgagtgccatgaaactgatagtgatgaatgggtccctcctaccacacaaaaaatatttccttcagatatgcttggattccaaggcataggtctagggaaatgccttgctgcctatcatttccctgatcaacaagagttaccaagaaagaaactgaaacatattagacaaggaaccaataaaggtttaattaagaagaaattaaagaatatgcttgcagcagttgttacgaaaaagaaaactcataaatataactgtaaaagttcaggctggatttccaaatgtccagacattcaagtcttagcagcacctcagctgcaccctattcttggacctgattcttgttcagaagtcaaatgttgccttccattttcagaaaaaggcccaccttcagtgtgtgaaactcgaagtgcttggtcacctgaattgttttcataaaaagtcacctgaacccaattcctgaacttttaaatctgtttggaaatgtttgccttcaggggtacggaaagcattctttacattttgaacacttggagagaagcaaattgaaaacaggactctgctgggagctactgtgccttttaaaatataaagccattgttttccccagggttttatctagaatactatgattaggtagttgagcactttatcttatactgtttattgtactttaataatattgttaagattgtttttgaaagtattaatgtttgttaaaatcacatatacatccagaaataaagactttgcaaaccaaaaaaaaaaaaaaaa

SEQ ID NO: 292489 - DNA, 1000 bp, Homo Sapiens
ctggcagagtacatcatgcctccgagaagaaacgtcattccactcctttgccgagcactgctgtaccaagccatacacctggcagcagccagcagtccccgctcaacagtcctcacccggggcccatccggacaggcctgcctcctgggcaccagcaggaatttgccggacgagccaacagcacccccaaccctccctggtctttccagagaagcaagtccttgttttgtttgcccacgggaggcccctccctggcctcctcagctgaaccacagtggttttcaaacacaggtgccccagggcacagggcatcagagtggaggcatggccacctcctctccatcgatgacctagagggggcccaggagacagacgtggacacaggcctgcggctgtcctcatcggacctgtctgtggtctctgcatattctgcacccagtaggttctgcagcacagtggagacacccctcccctccgaaagatgcagcagccactgggcagctcacaaggattccagggagggaccactgcccactgtcagcagggtgaccacagaggcctcctgggcttccctccctttcttcaccaaaaggtcttccagctcctcagcgacagctcgtgctgctcccccagctcccagcacctccaccctcacagactcctccccacagctcccatgcgatacccccaaagtcaagcagactgatggagacatgccaccacccccagggtcggctggccccggggataacgacatggaggaattctacatctgaatgccctctgctcttgttctcgaaacacacaaactcagagacacagactcaggccccactgcccctctggccactgagcacaccacattcttcatgatccatttcccaggagcccgtagcacatttgcctaccacccactcttagctggggggtggtatatctctagagacacagcagaaaaatactggcatttttatgcaaataaattctcaacaaacttgtc

SEQ ID NO: 292490 - DNA, 1000 bp, Homo Sapiens
tgctgaaggaagaggaggcacgccttgtggaaagtaacaacgcacagattaaacatgagaatgaacaggatatgctaaagaaacagaaggcaaagcaggaaactaggaccattttgcaaaaagccctacaagagaggatagaacatattcagcaggaatacagagacgaacaggacttgaacatgaagctcgtgcaaagggcccttcaagacttacaggaagaggcagataaaaagaaacaaaaaagagaagatatgataagagaacagaagatataccataaatatttggcacagagacgtgaggaagaaaaagctcaggagaaagaatttgacagaatattagaggaagacaaggcaaagaagttggctgagaaggacaaggagctgagacttgaaaaggaggcaaggagacagcttgtggatgaggtcatgtgtacaagaaaacttcaagttcaagaaaagttgcaacgagaagctaaagaacaggaagaacgtgctatggaacagaaacacataaatgaaagtcttaaagaacttaactgtgaagagaaggagaattttgcaagacgccaacgtttagcccaggagtacaggaagcaacttcagatgcaaatcgcctaccagcagcagtcccaagaagcagagaaggaagagaaacgccgagagtttgaagcaggtgtagcagcaaacaagatgtgtttggacaaggtccaggaggtcctgtccacccatcaagtgctgcctcaaaacattcatcccatgcgcaaggcatgccccagtaagcttccaccgtagttccgtgagcatcaatatatcttttcttggtcttttaatatttttaactacagtatgcttgtatgcttcttttaactcctggataaacttttcttttttccctgagtttgtgtaattaattgaacataattttcttcctttgaataaacctgtgcctattttggagttcacagacttacaaatccaaaaaaaaaaaaaaaaca

SEQ ID NO: 292491 - DNA, 1000 bp, Homo Sapiens
agatttgaagaactgaagaatcgccttaaacagaggtctaaatcctccgtgaaagtcatgttgtctaaaactatggataaagaaaatcgaccagaagcagtgaaaagttgtgaagctctggcacagaaaattgaagaattcttagaagcccactcaactgatgaatttaaagatgtttctgcaacagaaccacaaactgctcattcaatgactaatcgatttaatgccatgttgaaagtatttgaaaaccaggcaaatatgttggagagagctgtaaatgatcaagttttgttagatgctgaatacaaacagatgcagtgtgattttcagttgttatcagaagagaagttggtgctggaaaatgaactacaaaagttgaaggacaaagagaaaactaagcctacaaataatcgaacaaagaaagctgtgaaaacagtgaagaaaaaagacaaaggaaaatctgaggattcagaaaagaagatgtctccagaaaaagagtttaaaataaaagaagatttggatcaagtacagaaagtagcacgtctggaaattgagaacaaagtccttcaggagcaattgaaacaggctttacaggaagctgaaaaagctaagcatcaacttaactatttcctaaatcaagagaagttacttaaaagtgaggggaaaactgagacaacaatgcaagtgggtaatagtcaaacaaaagttaaaggtgaagattcaaaaaatataccattggagaaagaaacaagaaaatcactggtttcagattcaggtggacaaaggacaagtgataaaatccaagaatatccacagatcactgcccaaagcggaagactgattgaaaagagatgctaatagagtttctgaaatactttggaaaagtctcccaaaccttcagagagtggatgggagcgaagtaaggagaccccacctgagcagatacatggtattgcttacaataaagtacatttttgctctttacaaaaaaaaaaaaaaa

SEQ ID NO: 292492 - DNA, 1000 bp, Homo Sapiens
tgtgaatatcgtgtcattcagactctgccacctattagctttcttggttctactcatcttctgtcccctgggtttcacttctcctggctcactctcactctccccatataatcactcctgtcctaattcttggtgatttcagtattacaaagatgatcctcccaacaccttgacacctccctcagtaatcttgttctccactctcagtaaatgaaattatttttagcttagacaagagtgatagcagtaaaagtggtatgaaacaagcatatttgggatataatttgaagacaaagctgaaagatttgatgagggattggaatgtggaggaattctagaaggggcaatgtggcttgaggattgcctatgcaagaaggaatggcacaagatcatggctaaagacagagcaattcaggccacagaaaggtgttagaagttgttcaaagtgctgttgcattcttttaagcgccggagtatcattttctatttgcttttaactttttcattgtgaaacatgacaaacatacagaaaagtgaagcccactgagttaccgcaaaatgaacccccatgtaaccaccaaccaggtcaaatctggaatgttgccagcacccagacgccctctcatgtttcttctcaataccagtctcctcactctccacacaaaggtaaccactgcccagaattttatggcattcacttccatacttctcctatggttttgccgtggaagcatacatccaaataccataggctagttttgcatggtttttttgaattttatagacctaaacaatttatcttctttgtgcctggcttctttcacttaacattataattatgatatttgtccagactattgaatgtagctgtagtttattcatttttattgttttattgtattctgttgattgacttataccataatgtatttatccacatttgagcactaataaaacttggattgattccagattggagtaaacaaaaaaaaaaaaaaaa

SEQ ID NO: 292493 - DNA, 1000 bp, Homo Sapiens
aagaaatcacccagcggcatatacagcaagtagccctaggaatctcggaaaacatggccgtgcctctgatgccagaccagcaggaggagaagctgcgatcacaactggaggaagaaaagagaaggtataaaacaatgttcactcgcctgaaagccctgaaggtggagatcgagcacttgcagctgctcatggacaaagccaaggtgaagctacagaaagagtttgaagtctggtgggcagaggaggccaccaacctgcaggtaaattctccagcagtgaattcactcgatcacacgaagccatttctccagacatctgacttccagcatgaacggtcccaactcctctctaacaaaagttctggaggctgggaagtccaagatcaaggcactggcagattcgatgtctgtgatgtgaatgccaggaaaatcctgccctcgccttgccccagtccacacagccagaaacagagcagcaccagcaccccactgggagacagcatccccaagaggccagtgtcgtccatccctctcaccggagacagccagacggactcggacatcatcgccttcatcaaggccagacagagcattctgcagaagcaatgtttgggaagcaattgaatttccaggaaatatccatccatgaattatgccagcaagaatgaagcacagatgaaggcagcgcccctcacttgctctggcttcagaagtgaactatgggctgctgggagcaactagtgactttgattcccatggaggggactgtgtttctttaaggatgctgacctggaggccaccgagaggctggggctggggctgaccacaacatccttcctgtggttgctggagctgctggcagggccaggcaaggccagagtgctaggggcagggtgaaggcttcagctcactgttgtagtgacgttttgtgtagatctttataagcttttgagaatgtgaaatagcaccatcaaaatataatgtcagaggatgctcacacc

SEQ ID NO: 292494 - DNA, 880 bp, Homo Sapiens
taataacatctaccaaacagtttacattgtgctaaacaacttatgcacattatttctttgattctttttaacacatggttgtgggctgaatggtgtctcccaagaagtcatatgccgggatcctgtcccatagtgcctcacaacgtgacattgtttggagttagggttgttgaagatgtcattagtcaagatgaggtcatacttgagtgaggtgggtttctaatccaatgtgactggtgtctgtgaaaaggggaaatgtggacacaggtccacatataaggagaacaccatgtgaagatgaaggtagaaattacagtgatgtgtctacaagccaaggaacaccaaagattgacagaaaatcaccagaagcctagagaggcatgaaacattctccctcagagccttcagaagaaagcaatcctgctggcaccttcatcttggactttgagcctctagaactgtgaggcaatacatttctgttgtttaagccacccagtttgtggcattttgttacagcagcactggaatcctaatggatgctgtattagataaatattttaggcttaggaagaagagaactgtagacatgcagcagccatcttgtggatatgagggaagagccaaatagactacaaatcggttaaaacagagaactaaaattgtggagctactgaatgaaccagctatggaattgtctgtgtgtgggcattcagatggacataccggataaaattctggactggtaagagtgtggggaaattgccagtcttaagcagtgctgatggaggtgtgaattggtaaaacaatttgaaaagtaagttgctagtttttataaaatttttaaaaataaatgtattctctgacccagtaaaaaaaaaaa

SEQ ID NO: 292495 - DNA, 1000 bp, Homo Sapiens
attctaaaatatagcaacattgcacaggaagatactcttacttcttagagtaactacagagtgattttttttttttcttgagtgagactctgaagaaccttttcgataatgtttggacttggactaaagcaattagaattatgaagcaatgataacctttagaaaatttttctatcacatgttgaatattttcaaaccttactttaataatctaaagttacgggattatatcttatattaattttgcagttttgagtagtatgataaaagaaataagaattcaaaccattaagtacctacctaaatactacatgtaaggcactgtgcttttatttcattcagctgaggtataagcagctgtactcaaatgttcttaaaaatgagaaccagtggggaaattgtttataatcattggaaatgaagaaattccaattggctatatctttacttcagcttttcttgaacaatttacagcattgattttcaaactgtgtctactggcacccttcccctttgtatcagagcagttctgcttttaactgttttatatgttggggttctctatgagatttcattggaacaaagagtttcactgatattcgagtttgaaaaccattgattaagtgaaaaaacatcttagaagataggaaatatgtttaaaaaatgaatgtattaaatcttatgagtaggaagatgaaatacaggtttattgtatagatacattatttatgaaggataaagatctatacatgaacagcagaatgtataagctagcatttactagcatgtctctgatgcttttgttcatttctgttaatcgtcatttctgtcccctctgcatggaattttatacttgtctagggtaagagtttgtagactctttcagcagaacagattttaataaccaatttatttgttttattttaaaaatttatttttgaataaccaatttaatagtaaattttatatgaacatttggcaaaaaaaaaaaaaaaaaaaa

SEQ ID NO: 292496 - DNA, 1000 bp, Homo Sapiens
ctacaaaatttttctggaaaatagactcctaacagacctaccagaatcatgcttaaagtgctcccttgacacttattctatactgaaggataaattttaaaaaatctttataggctactgtcagaagtatcctatccttgtttacgatgtataaaaagatgtgaataaattatatggaccccctaagtcttattttctagtaaactgatgatactggaaattcttttacttcaaatgcaaaagaataagctggaggcaattatttcctttcatacagagttcatgaattgttttaaatgcttcttaaagtctggctttataaccgtttaaaatcaacaatgttgattttagataaccaagtaagtattataatacaaaataattttaagtgtaagaaactaaagtataatcaaagtaaattcagttattgtatttgtggtgttgccttgccttgcatgatgctgggggaaaaagagaaaagaaatggttttctttttgtactttcattcagtgtagagggaaaaaagcatgtattgggccaccggaagacaagctaataaataggctggaagtaatattctaccagcaggaactcaacagctccagttaaatgctttgatatagtggctcctttgcagagccaaaacaagatttattaaatttccttcaaactgtttatctttaaaacaaatataaggttttaattatactgctgaagcaaatgtgaatgccaaagactacgttttgcagttttgctttcctcccaataaatattaatgtatgtaattctagagggtaaaaatgtaaataggtttggacaatatttgcacccttgtttgtgttatgaaaaaaatttttccaaggcgagctagagagaaagatgtttggcatgccaaattaacttgcatgtttgttaaaaaaacaaacacatgttttgaagagaaaccagatctgaacatgtatttgttgagttttgcaaaataaaattaattttgtaagt

SEQ ID NO: 292497 - DNA, 1000 bp, Homo Sapiens; identical to SEQ ID NO: 118588

SEQ ID NO: 292498 - DNA, 1000 bp, Homo Sapiens; identical to SEQ ID NO: 224056

SEQ ID NO: 292499 - DNA, 1000 bp, Homo Sapiens; identical to SEQ ID NO: 118589

SEQ ID NO: 292500 - DNA, 1000 bp, Homo Sapiens; identical to SEQ ID NO: 224058

SEQ ID NO: 292501 - DNA, 1000 bp, Homo Sapiens
tcagcacaacctggacatcgagtgtcccacgtacaccaacctcagtcgtctgggcagatcgtgtcctccatcacggcctccctgtgatttgatggggccctgaatgtgtacttgacagaattccaaaccaacttggtgccgtacccccacatccacctccccctggccacctacgccctggtcatctcagccaagaaggcctaccatgagcagctgtccgtggccaagatcgccagtgcccgcttcgagccagccaatcagatggtcaagtgtgaccctcaccatggcaagtacatggcctgctgcatgttgtacagaggggatgtggtcctgaaagatgtcagtgcggctgtcgccaccatcaagagcaagcacaccaaccagtttgtggactggtgtccgattggatttaaggtaggactgggtgatgtggagtccttgtgccatcaggaagcaggagacctgcagaataatgctgcccctgaaggcccgcatcctttatggagacaaccccttttcacgtcagctaggttgcaaggataataattttagtaatttatttcctaccgccttatactttaccaaatactttatgttccctcataccttaaccactaccctttaaagttcatggggcaatattaccagtatcttacactttagaaaacagaggctgaggctgggcacggtggctcatgcctgtaatcccagcactttgggaggccaaggcaggcagatcacgaggtcaggagattgagacggtcctggctaacacggtgaaaccccggctctactaaaaaatacaaaaaattagccgggtgtggtggcagacacctgtggtcccagctattcgggaggctgaggcaggaggatggcgtgaacccgggaggcagagcttgcagtgagtcgagattgcaccactgcactccagcctgggcaacagagcgagactacatctcaaaaaaaaaaaaaagaaagaaaaagaaaaaaaaaaaaaaaa

SEQ ID NO: 292502 - DNA, 1000 bp, Homo Sapiens; identical to SEQ ID NO: 118590

SEQ ID NO: 292503 - DNA, 1000 bp, Homo Sapiens
atgccactgactaacaactagccacttgtcagaggaaggagagaacagtgtcttggggatgctgatgggttggagtgcctaatggctcattaaaagccatgaaaaagcaaagaaatcaaagaatacttttgatggagctttaggctatgctaagccttttaatgtaaacaagcacctctaacgctaaaagcacccttgcaagaaaggtaggagttactattcacatcctagagtcaaggaaaaagagaagatgtttgacttgctcaaagtcaagcaggtaatgtcagaattgaatctcaaatctatatctttatagatttgcagttctggtttatataataccaaagtcacatacaggtaatttcccaccattgaaccttcctgttggtgtgagatgccaaatctgtgaaaaccagacacaggtggccaggtgggtgtcgaactcctgacctcaagtgatccgcctgcctcagcctcccaaagtgctgggattacaggtgtgagtcaccacatctggtcggattttaactattctaataggtatgtagtggtattaattgttttaatctgcagttcaccaataatatatgaatttagcatcttttcatatgtttgccatctgtatagctttggtgaggtatctgttagaggttttgcccatttttaattggattgctcattttcttattgttgaattttaagtgttccttgtatattttgtataacagacctttatcagataggtcttttgcaaatattttcctcccaggctgtggcttattttctcaatccttgattccttctctttactttttttttcttttttctttttttaaagaaatggtagcataatatacacagttgtccattttttaaagactaaaccatctcacagattgttctgtatcagtaaataaagatctttcccccacccttaaaaaaaaaaaaaaaaaattattaaaaaaaaaaaaaaaaaaaaaaaaaaaaaaaaaaaaaaaaa

SEQ ID NO: 292504 - DNA, 1000 bp, Homo Sapiens; identical to SEQ ID NO: 224059

SEQ ID NO: 292505 - DNA, 1000 bp, Homo Sapiens; identical to SEQ ID NO: 224060

SEQ ID NO: 292506 - DNA, 1000 bp, Homo Sapiens; identical to SEQ ID NO: 224061

SEQ ID NO: 292507 - DNA, 1000 bp, Homo Sapiens
taatcaaatggaaacacacaatttagggctaagatcttgttgtgttcagccacaaatgatggccagcagtgaggaatctgtgtgttctccacactcttcgctcctgggaagtcaactcacatggaccatgatatcaatatctgctccttcccctaatatctgtttgaccttgggtcagttacttaaacttcctaagccttagtttctttgtctggaaaatagggatagttatacctaccacacaaccactttgtaatgaatatgttggaaattatatgcaaattggcttccgttggtgtttggaacatagtaggtttttaactggaatataatagctaccattatcagtatcatcatattaatttatatttccatcttcagcccttaacccaggatcttcagtaaatgttgaattctcaaatttgttaaattcacttgtctatactaatattttactctaggtttcttagaatattctagataacattattatgtagaatatgttatgtaagcttcatcttatctgtaaatatagttttactttttcctttctaatttttatgtcgattacttctttttcttggcttattgaattggctaggattcccgtacagtgttgaatacgtgcagcaagactgcacatcttgccttgttcctggtcccacagagagaatatccagtacttcacaataagtatgtgttaattgtagattttattagattgaggaagttccctttcctttcaagtcagtctttttattttaaacatgtattgaagttttgtcaaatgtcttcatctattggaataattatacatatctcttttttattctgttaatattacatttcaatcttctgtctacctaaaatccctagaataatctccatttggctatgatgtgttgtgcttttatatattactgaattctatatgccaatattattaaaattttctgtctttatgagaattaaaaaaaaaaaaaaaaaaaaaaaaaaaaaa

SEQ ID NO: 292508 - DNA, 1000 bp, Homo Sapiens
tgtgccaagaaggatatcagggtgtggcacacatcatccaacagggagctgctgcggatcaccgtgcccaacatgacctgccacggcatcgacttcatgagggacggcaaaagcatcatttcagcatggaacgacggtaaaatccgagccttcgccccagagacaggccgactgatgtatgtcattaacaatgctcacaggatcggcgtcactgccatcgccaccaccagtgactgtaaaagggtcatcagtggcggtggggaaggggaggtgagggtatggcagataggctgtcagacccagaagctggaggaggccctgaaggaacacaagtcatcagtgtcctgcattagggtgaagaggaacaacgaggagtgtgtcaccgccagcaccgatgggacttgtatcatttgggaccttgtgcgtctcaggaggaatcagatgatactagccaacaccttattccagtgtgtgtgctatcaccctgaggagttccagatcatcaccagcggaacagacagaaagattgcttactgggaagtatttgatgggacagtaatcagagaattggaaggttccctgtctgggtcgataaatggcatggatatcacacaggaaggggtgcactttgtcacaggtggaaatgaccatctggtcaaagtttgggattataatgagggtgaagtgactcacgttggggtgggacacagtggcaacatcacacgcatccgcataagtccaggaaatcaatatattgttagtgtaagtgccgatggagccattttgcgatggaagtacccatatacctcctgaagctgatgagatgtctctgagccttggcgttgcacgcagtcctgttgaagactgagtttagataactccaacactagtcttcatttctcacagctctgtttttgttcttgagtcaatttttctctttttctttatagaatgcattttatattcttaaattgcatattaaaattgaagtatgttcaag

SEQ ID NO: 292509 - DNA, 1000 bp, Homo Sapiens; identical to SEQ ID NO: 224062

SEQ ID NO: 292510 - DNA, 1000 bp, Homo Sapiens; identical to SEQ ID NO: 118592

SEQ ID NO: 292511 - DNA, 1000 bp, Homo Sapiens
ccaggttcacgccatcctcctgcctcagctactcaggagaattgcttgaacctgggaggtggaggttgcagtgagccgagatcgtgccactgcactccagtctgggcaacagagcgagactccatctcagaaaaaaagaaaaaaagactgggtacagatgtgatattggaagaaaaagatcaagctgatgaggttaggatacccaggccctttggacttaaagatcactagtgtctaaattccatcgatggcatttcagtctataggtaaacttcctggaagctggatttggagacagtttatcatctgattattgggctttcgtataggtccttagggagcagcttacctgaaatgcatttagtgtacaccagtctgtaaacttcaacctgtaatgaaagtgtaataaatgtacattgagttgatgtgataatgtgatataataagaaatatatatttgatcttcctatctagttccttgttcagagctcctaaaacccttgtaatttccaaagtgatggagtacatcttttgttctagtatttggtctttgaccccagttcctgacacaaagctcctaaattcctttaaatttcccagtgataggagaattttttgttctaatgaggtcactcttgatgggcacctggataactcaggatgggggctgctcacaaagaccacatcatgattggaagtttcaaactttcagtctcccacctccagagaggggagaggggctggagatttgtgtcaataatccatcaggcctatgtcaacaagacataatccgttaactatggagttcagggagcttcagggttggcaaacattttgatgtgccaggaaggtgacgcactccagctttatgaagtcagcaagtcctgtgctcaggatgcttctggaccttgccccaggtaccccttcatgtggctgttgttcatctgtatcctttgtagtagccttaaaataaactgttaaacacaaaaaaaaaaaaaaa

SEQ ID NO: 292512 - DNA, 1000 bp, Homo Sapiens
aaaacttccggaattattgaagcacttcataggtattatcagaatgctgccacagatgtgagacgggtgtggctttcttcagtggtggatcactttcattcatctttaggcgacaaaggttggggttgtggttacagaaatttccaaatgctactttcatcattattacaaaatgatgcttacgacgattgcttaaaaggtatgttgattccttgcattccaaaaattcaatctatgattgaagatgcatggaaggaaggttttgatcctcagggggcctctcaacttaataacaggttacagggaacaaaggcctggattggagcatgtgaagtatatatactcctgacctccctaagggtaaagtgtcatattgttgattttcacaaatcaactggtcctttgggtacacaccctcgcttatttgaatggatattgaactattattcttcagagggagaagggagtccaaaggtagtgtgtacatctaaacctcctatctatcttcagcatcaaggtcacagtcgaactgttattggaattgaagagaaaaaaaaccgaacattatgcttactaatacttgatcctggatgtccttctcgagaaatgcagaaattattaaagcaagacatagaggctagcagtctcaagcaacttcggaaatctatgggaaatttaaaacataagcaataccagatattggcagtagagggtgctctttctctagaggagaaacttgccaggagacaagcttctcaagtctttacagccgagaagattccttgaagaatcaagcatttaagcatttcagtgattgagaacaatactttgttttctaaatgtagatattgaactccttaatacaattatgaatctgtgaattctcttaagtcttaacatataatttaatctctaaaatgcctgtgttaattgaattatacctatcatacttcattgtttggtaaattatttcaataaaatgtcttgtttttgcattgtg

SEQ ID NO: 292513 - DNA, 1000 bp, Homo Sapiens
cagtcatgctgatggggccttcagcaccagctctgtcctgggtcgatggaggaaagcccagccccatggccttgcccttcctggggcatcccacatcgtgccgccgacactgtgtgcccctgggggagtgaaggggccaggggcctttgacccccagcttaggctggctatgccctgagcctgccaacccagtttcagacactcatccttcatccttcctgctgccgccctgggttcctctataaacctcgctgctcagctgcccccacaagtcccacatgccccgcatgcgtgcaatgcctccagcccccaagtgagtggtgggtgggtggcaggctgggcctagcacttgctgatagccactatgggctcgactctgtgctaagtggtatctggggacacagaggcaatcagacctggttccccccctggtggagttcacagtctagtggaggacagactgttaacaaatggcaacacggcttcatgcgtgccaggatcagagtacaaatcaggttgtggcaggcctcactggtaatggaaaagtgagggaggcttcacggaggaggtgtcataggagctcagcctcaacggctgctcggaaccctccgagtccacaagatgggaagcaagtccacaagatgggaagcgtgctctatacagaagggagggcctgtgcacaggctcaggtgtcagtaagccagaaatccagggacagagtcaggatggctggagcatggactgcggggggaacagagaagggggtggagcaaaaggttgggaccatgtgaccagggaagatgctggatggaggattctgaacctcatttgtggacggtcaggagtcaacaaagggaggagagaggactcactggtcaagagtgtcggctgtgacacaagggccatcatccctgaatgcccaccatgtgccccgcactgtgctgatgatgataataataactacgtccattgagcactctccaaaaaaaaaaaaaaaaaa

SEQ ID NO: 292514 - DNA, 1000 bp, Homo Sapiens; identical to SEQ ID NO: 118594

SEQ ID NO: 292515 - DNA, 1000 bp, Homo Sapiens; identical to SEQ ID NO: 118595

SEQ ID NO: 292516 - DNA, 1000 bp, Homo Sapiens
tgatagactttgtgaatctgaactgctctactttgagaagatgaccggtttggagtaatcagaatgaaccctcctcctttttaagggttttttttttttcctttttctaaaaagctatgtatcgctcctattgaaagaccagatccttagagaagtttgtggtataaaaaggaagtggggacagattcgcagcacagagtcgctggcatgtttcactcctgcttctctcagccagctgtttaagcctgcggcgccagcctcacggagggccgtgtgacactctcgtggtatgtatgggagatggcagcagtgaagcagcagccaccagggagtggccatttggggttgggacagggagggtgttttgggtggcatagaggttttgtattgagggccagtgatgatgttttgatatttatttcctgctacttaaatttgaatctgagtgaattgtacctatttctgatgatgtcggtcttgcaaagcgacagattcataaagtaatgatgaaatctttctttcttcccgtgtgtatttctaagaaatagagccaactgattttgtatgtaaataccaagagcaatttacctggtactaaacccgcaccccagtgcggacccttcccagccctcatcccacttcctttcctactgtcctggaacctgtctccattgtgtgatccagccctggttctggctgtggtcagcagatgccagtgaagggttttgtgtgtttaggcctcatttctttgtctttttcctactccgttcctggcatttgctgatttctagtgtatactctgtagtctcagttcgtgtttgattccattccatggaaataaaaagtatgttgtacatactgccgaagaattgtcttgcaagttaaggcttccccctttactataagactataaataaaaacttattttatccttaaaaaaaaaaaaaaaaaaaaaaaaaaaaaaaaaaaaaaaaaaaaaaaaaaaaaaaaaaaaaaaaaa

SEQ ID NO: 292517 - DNA, 1000 bp, Homo Sapiens; identical to SEQ ID NO: 224066

SEQ ID NO: 292518 - DNA, 1000 bp, Homo Sapiens; identical to SEQ ID NO: 118596

SEQ ID NO: 292519 - DNA, 1000 bp, Homo Sapiens; identical to SEQ ID NO: 118597

SEQ ID NO: 292520 - DNA, 717 bp, Homo Sapiens; identical to SEQ ID NO: 118599

SEQ ID NO: 292521 - DNA, 1000 bp, Homo Sapiens; identical to SEQ ID NO: 118600

SEQ ID NO: 292522 - DNA, 1000 bp, Homo Sapiens; identical to SEQ ID NO: 224074

SEQ ID NO: 292523 - DNA, 1000 bp, Homo Sapiens
catgcatagcattagaagacaagaatgtatcaagacacacaggttcagactacacaattattcatgaaatggctgttttccaatggaggaacagcatttgatgcattataacttaaaggtactacaaattaaaaattaaagtataaagtattttaagttagaaatagacttagctgggtgcagtggctcacacctgtaatcctagcatcttgggaggcccaggcaggagggttgaagtcagaatttcacgacagtccgggtaacataatgagacctgtcctctatgaaaaaacttttttaaaaatttagctgggtgtggtggtacgtgcctgtaggcctagctacttaggaggctgaggtgggaggattgcttgagcccaggagtttgaggttgtagggagctatgatcttgccattgcactccagctgagagtgtgaccctgtctctaaagaaaaactatagaaaatttaaaaaattaaaaaacgggtaacatggtaaattttatgtagtatattttaccacattttttttaaaggccagtcttatcctgaattcctcagagcagtctgtatggtaggccatcagtgaatcactccagacaggaaattttctatttttgtttagagtttgtacacaaaatctacaaatacattactctaaaatagcacctatagccattttaatttagtcatgttgggagaaaaatagatgggttacaaatacatcagatatcgagcaaatggtttgagttacatctagcagcactaaaacttattcaactttggccaaatacaaatgcgaaattagaaaaaaattataatatctgctatttttaaaagacagctatagtcaagagcttgtgttttgtatcggtatttgatttttagtgggcagatgggagaaggaaaggttatttattctatagaagagactgcggacaattagtattcaaagtttattttcagaaaataaaataataaaagcccagggtattttaaa

SEQ ID NO: 292524 - DNA, 1000 bp, Homo Sapiens
cagtcacaagtgaagcatgccactgtcaaatccgagaatgtaaaccgctgaacagctatggatcaaatggtagccctcaaaagatatgttcatgccctaaccctcagaacctataaatattactttatttggaaaagaatctttgcagatagaattaagaattttgagatgggtcattatggatcatcccagtgaacctaatgccatcacgagggttcttatcagagacaggtagagggagatttgagtacagaagacaagatattcgtgtgatgatgcagacagagactggagtgatgccaccacaagccaagcaatgcctggagccaccaggagctgggacaggcaggaaggattctcccttatacccctcagagcaatcttggcccctctgacgtcttgactttagacttctggtccccagaacggagagagaataaatctttcttgttttaaggctccaacaaattggtagtcacttgttacagcaaccacaggaaatgtatacagcttctgatacttctgaaaacctcacacagccaaagggtacatccttggtatagaggctcactcttactcaccagccaggcaaggaaggctcaatcctttggtgttagagagatagatgttgggttttcaaatttcaacatagagaaatcagtcatttgcaatgcttttgagaaagtactgtgtataccctacgagcctgcactccttatgtgtgagactgatgaccattggttggcttattatccattccactaagtgacaaaatcccactgactattcaaatccaggctcctggcatgcctgtaccttagaatcacaaccagctgcaattccaggatggagttcaaactaattgtgggggcatgtgcttcttacatgactgctagattgttcccagatggggaaggttgccctgataagcaacttaaatgaaaataataaatgtattgtttggcctctttaaaaaaaaaaaaaaaaaaaaaaaaaaaaa

SEQ ID NO: 292525 - DNA, 763 bp, Homo Sapiens; identical to SEQ ID NO: 224077

SEQ ID NO: 292526 - DNA, 1000 bp, Homo Sapiens
gctagacgagcttcaggccgccttcgaggagtttgacactgaccgtgacggctacatcagccaccgggagctgggtgactgcatgcggaccctgggctacatgcccaccgagatggagctcctggaggtctcgcagcacatcaagatgcgcatgggcggccgtgtggactttgaggagtttgtagaactgataggcccaaagctgagggaggagacggcgcacatgctgggggtgcgagagctgcgcatcgccttccgagagtttgacagggacagggatggacgaattacggtggcggagctgcgggaggcggtaccggctctgctcggggagccgctggcgggtcctgagctggacgagatgctccgagaagtggacctcaatggggatggcaccgtagactttgacgagtttgtgatgatgctctcccgccactgaggctccaggagggaatatctgttgcccctgcggccccagacaccagccagacccaggctgcaggcctcccccaggagcctccaggatggagatggagacccagcagcccccagactacttctatccctgaaaacacctggcctcaatgttggcttgttatgttacctgcccaccctcatccttacctcctcctactcaagctgcctggagaagacctgctctcagctgcccaccgttcctcagtgtgagcaagatttgggtctctccagacctctgggaggtagggagttccctggcactggcagcattcagtggggaccccccagtggcatgatgaatggagaggatggctggaccccttccactacttatgtttataattttttttttttttaatgaacttgagccgggtgcagtggctcacacctgtaagcccagctgtcagggggcagaagcgggaggatagcttgagcccaggagtgcaagacctgcctgggcaatatactgagaccccattctccacaaaaaggaaaaataaaagacaaaaaaacaaacaaaaaa

SEQ ID NO: 292527 - DNA, 1000 bp, Homo Sapiens; identical to SEQ ID NO: 118602

SEQ ID NO: 292528 - DNA, 740 bp, Homo Sapiens
ggaccccagacatgaggaggctcctcctggtcaccagcctggtggttgtgctgctgtgggaggcaggtgcagtcccagcacccaaggtccctatcaagatgcaagtcaaacactggccctcagagcaggacccagagaaggcctggggcgcccgtgtggtggagcctccggagaaggacgaccagctggtggtgctgttccctgtccagaagccgaaactcttgaccaccgaggagaagccacgaggtcagggcaggggccccatccttccaggcaccaaggcctggatggagaccgaggacaccctgggccgtgtcctgagtcccgagcccgaccatgacagcctgtaccaccctccgcctgaggaggaccagggcgaggagaggccccggttgtgggtgatgccaaatcaccaggtgctcctgggaccggaggaagaccaagaccacatctaccacccccagtagggctccaggggccatcactgcccccgccctgtcccaaggcccaggctgttgggactgggaccctccctaccctgccccagctagacaaataaaccccagcaggccgggcgcggtggctcacctctgtaatcccagcacttttagaggccgaggcaggcggatcacctgaaatcaggagttccagaccagcctgggcaacatggtgaaaccccgtctctactaaaaatacaaaaattagccgggaaaaaaaaaaaaaaaaaaaaaaaaaaaaaa

SEQ ID NO: 292529 - DNA, 1000 bp, Homo Sapiens; identical to SEQ ID NO: 118604

SEQ ID NO: 292530 - DNA, 1000 bp, Homo Sapiens; identical to SEQ ID NO: 224080

SEQ ID NO: 292531 - DNA, 1000 bp, Homo Sapiens
ctaattttttaaagttttttcatagagacagggactcactatgttgtccaagctggtctcaaactcctgggttcaagccatcctcccacctcagcctcccaaaatgctgggattacaggcatgagccactgtacccagccaaaattgttttcttttttaagtgaattcaacaatttctgtgagtggctctttgcatgaacactgtgcaaggtgttggagaaatccaaagctgaccaaaacatggtccccaccttttggagcttacagtctgttctggggaacagagattcagccaaagtcaagaaacactggatgccagctagattatctgttctgtgctttggtgtctataagtacatatgtggatatgggttcattttatccctaaacttagtaccaaaccagcatttaatatctaattataaatctaatttggcctaaactttattattgcacactgcctgaacaaaacctatttgtctctatgtaaattttttcctcatggaacaagggtgtgaaatgaaaatattttaggatttattcaaaaacagactattctgttttcagcttcagaattgttctttgaatcctaaggaacctctgtcaacagttgaggttgctgttgaaaagaaagaagaaggaggcggaaatctctcagggagaattatttcctttcttttctattttagatacctggaggggtggggagaagtaagaattgtaagggaggttcagtagtggggaattctgtgacagctgattgaagatgatgatgaagaacctctgcattctagttaccctttgcttcccttcacctcttgtaaaatttggcttggcaacaatgacattgtcatgcttattgtcccaatatccatcctgtcgtagatcttaatgtttttgatcgttgcgttaaagtggaagtgccacccacagtgaaaccagatcccattaataaataagcttaaaggcgaaaaaaaaaaaaaaaaaaaaaaaaaaaaaa

SEQ ID NO: 292532 - DNA, 1000 bp, Homo Sapiens
agtgttttggccacttggaggacctgggaggagggagtgtgtcctttgagcaagaggaggaactcctggtgcctttctgagcctgcgtgggagaaccccaattctagcactccaggaaactgtgggagagtgtggggcaggctccgtcctccctgggagacccctccagccaccgggtgccacttaatgccaacagcccttaccaaagctgggagccccattgccccggcagctctggcctgtggttccagaagctgagaaaactccactggggcttgcagaatccagggttcacctaagctgcacagttcctgcagctttgccagccccctgaaagtcttgtgtaccccacctctgaagatgctgggggaggcagctgggatgggagccagccccatgcctgtctgtgaccccacagtgggtgagagcccgtcacagtcctgggtgtggctgctctggaagaattaggaggcagccataataagagtcttcagagagatgatgggaggggccagtgaggacaggaacagagagtagatgtcctataataaaggggcttctgggaggtgcctgggcacagatgtctgttcagcaggtgtgtgggcctagaggagagagcagagcccagaaatgtcttttgcaggcccacgttctgacttgaagctttcgtgggcatgttgccattgggttttgcccttgcaaaggcttcctaggtctccagtggcccctcaggacccagggtcccagctgctgcttggggatgtgcactgctggccgccggccttgcagtctctctaccctggggaggaacagtggcttctcagagcctggggcatacagaagaaggcaggagttgatttttgtgttgggtttggggtttctttgtcctcaaggtactgttctgtttctctttacccctctgctttatttattgtaagcattcccacgttaaataaactttggctgttgtctacaaaaaaaaaaaaaaaaaaaaaaaaaa

SEQ ID NO: 292533 - DNA, 1000 bp, Homo Sapiens; identical to SEQ ID NO: 224082

SEQ ID NO: 292534 - DNA, 1000 bp, Homo Sapiens
gacacaggataatgcacagtggagatggaccctacaaatgtaacttttgtgggaaagccttgatgtgtctcagtttgtatcttatccacaaacgaactcacactggagagaaaccatatgaatgtaaacagtgtggtaaagcctttagtcattctggtagccttcgaatacatgaaagaactcacactggagagaagccttatgaatgcagtgagtgtgggaaagcattccatagttccacatgcctccatgcacataaaataactcacactggggagaagccgtatgaatgtaaacagtgtgggaaagcctttgtttctttcaattccgttcgatatcatgaaagaactcacactggagagaagccctatgaatgtaagcaatgtgggaaagccttcagatctgcctcgcaccttcgaacacatggaaggactcacactggagagaaaccctatgaatgtaaacaatgtggtaaagcctttggatgtgcctcgagcgttaaaatccatgaaaggactcacactggagaaaaaccctgtagctccaacacttcgaaaggccaaggcgagaagattgcttaattcacataagattcctagaagccaccgaatccaatcatggtaaaaatgtgtttccctcaaatcatgggaaccatcgcaaaattattctgaagcttctgcagtcactgtcatttgacagcattcagaaataaatgccagtagcccaggagcaaaaatttttgggagtagtttagctggggcctcactcagatacctaggacacagagttggaaataactcttaagagagacacacctccagtaagaccttaagacagttctgtcataaaaaaaatacgaggtttggccgggtgcagtggctcatgcctgtggtcccagcgctttgggaggccgaggcaggcggaccacgaggtcagtagttcgagaccagcctggtcaatatggtgaaaccccatctctactaaaaaaaaaaaaaaaaaa

SEQ ID NO: 292535 - DNA, 1000 bp, Homo Sapiens
ccactcgtctcagtgtctacaaccagagagcccataagtagtgagcacttgcaccgggctgtcagtgtgaatgatgaagatttgctggtccgaatacttcaaggaggccgtgttaaggttgatgttcccaataagtttggctttaccgctctgatggttgctgcccagaaaggatacaccaggcttgtgaaaatcctagtttctaatggcacagacgtgaatctgaagaatggaagtggcaaggacagtctaatgctggcgtgctatgcgggacacctagatgttgtgaaatatctccgaagacatggcgcttcttggcaggctagagacctgggaggctgtacagctctgcactgggctgcagatggaggccactgcagtgtgattgagtggatgataaaggatggctgtgaggtagacgtcgtggacactggttcaggatggaccccactcatgagagtctctgcggtgtcgggaaatcagagggtggcctctcttctaattgatgctggggccaatgtgaatgtgaaggacagaaatggaaagacgccccttatggtggctgtgttaaataatcatgaagagttagttcagttacttcttgacaaaggggcagatgcaagtgtaaaaaatgagttcggcaaaggtgtcctagaaatggccagagtttttgacagacagagtgtagtctccttattagaagaaaggaaaaaaaagcagaggccaaagaagtcttgtgtctgctgatgagagcaccactcatctgcgaaacgcacgtaaaacaaagtgaaccgtgactgttaaactagggatgggaaattctgcatcttggggggctgtacatttatttatttagttgaagattcactgatcccactttgaaatacatctttttacctaaaaaaaaaaaaaaaaaaaaaaaaaaaaaaaaaaaaaaaaaaaaaaaaaaaaaaaaaaaaaaaaaaaaaaaaaaaaaaaaaaaaaaaaaaaaaaaaaaaaa

SEQ ID NO: 292536 - DNA, 1000 bp, Homo Sapiens
tattgaagatgctgaagaaacagcaaatcaaacttgtggtgggacagattccacggaaggattgtttaatatgggattcgcagaggcatttttggaacatctttggaaaaacttgcaggatccaagtaatcctgccatcatcaggcaggctgctggaaattatattggaagctttttggcaagagctaaatttatttctcttattactgtaaaaccatgcctagatcttttggttaactggctgcacatataccttaataaccaggattcgggaacaaaggcattctgcgatgttgctctccatggaccattttactcagcctgccaagctgtgttctacacctttgtttttagacacaagcagcttttgagcggaaacctgaaagaaggtttgcagtatcctcagagtctgaattttgagcggatagtgatgagccagctaaatcccctgaagatttgcctgccctcagtggttaacttttttgctgcaatcacaaagatgaagacttgtggatatggatggtggtgatggttgcacaacaatatcaatttattttataccactgaaccgtgcacttcaaaatggttaagatggtaagttttatgttgtgtattttaccataataaaaaaaattgtagagggaaaaacagtctgcctccacttttgatatgggactgctaacatcttccaccctccctctccccctctgccccacatctgggcaagctaagaaagcctgctgctctctcctctggcaccagctggaaattcatacccaacaagccctagccctcccaccagacccacatttcatccccatccccatcgcatccccatccccatccccatccctaaccaccataaatgctaagggagtttccttgcctggttttctgaaaccatttttggacctgcttgggaatctgccctgctctctcagaaagcttcattatatgagcaataaaccttttcctaccctcaaaaaaaaaaaaaaaaaaa

SEQ ID NO: 292537 - DNA, 1000 bp, Homo Sapiens
acagttcccacttcagtgctcaccggagaacccatgcaggagggaaggcgtcgtaggggacagtttcctcaacaacaaaggaggactcaatgtatatatcttatatcataagatgtatgctagagagaaactttccaatttttaagcttggtgtgtacccagggaagttatcttggtataaaccaggtaatttggaagtgaattacaaatactaaggatccagatttgaaggcacttttaagtgtaatttgtttttcttctgtaaagacccacacagaatcctgactgtccttgtatttgctatcatgtaagagctgtgtcagtatttgagccaaactggcaacttacgagattagagttaaatcagtggtcctgagcagtgattccaaactctcactgtgccttcacaccatccatgtgtaatccaccccatcagcagtggttctcctactttctcagtgggggcatatcctcaagggagaatgttgtgactctggtgagagaggagttggcctagagcaggccactgtgagctcagcacagagtaggaagaacagtgacatcattacaaaatcatcaatagcagcaatagctggtgtttattgagctgttgctctttggcaagctctgtgctaagaactttgtatacatcatctcatttaatcttcacaacggccccaggagataagtactaactttcttcccatttcctagaggcttgggaaattaagtaactcgcactggtcacacatctgtaagtgggagaggcaggattcaacagatctgtctgtcttgagtctatcgtgctcttattgctatactgaattcccattcatgttaggtaacttaggggccagaatctccatgcactttgtagaccacatttcctgttatgaaatttccacattttgaattttttaaacaaatatggaaactgagaatccctaaggattaaaggacttgggatatccagaaaaaaaaaaaaaaaaaaaaaaaaaaa

SEQ ID NO: 292538 - DNA, 1000 bp, Homo Sapiens; identical to SEQ ID NO: 224084

SEQ ID NO: 292539 - DNA, 1000 bp, Homo Sapiens
aattagttctgagatctagtccctctctgattcacttagtaatctatcctcttttcagtattacatgtgcttaatctcagatgaaccatttcaccatggcagtgttatctcatctctgggcttttctgggaattgaagtatctctccttaaccccaattgtcaagggtagtagctgtatactaccactttgaattattgaaacgggtcaatttacgaagtctgcattggctatggagatatggtttatagtacagcctagagaatgaaactcaccgtccagataaccatgcatgcacccagattttttccaccttggatacctgtcactagggaataataaaggccttattttttgtcttattccaactaagtagatcattatctctttccttttttatgttaatgagagaatttagcctccactcaacaatgttcaattcagcaaggctttcatatccttgctgtgggtcgtggataaggagcttattcaggtttcctgccctagctattagctccacttcacatgctggagaccggcgtagggacagatgtattcatcctggtgttactgaaaaacaggtgtgatcctgttactgatactataagtgacctaaaatgtcactgttcaaattagccagtgttctaacaaactaaactcttcaaatgcttggaaagatactacaaagccaatctttatagaattgggccaagataaatcaatgttgttttgcatgtctattgttaagctccaaaggttcactgtgtttctgccgctgtcctggagttgtcaccactgactgggcaaggcttcttgggcatcgatgtagaactgttgtcctttttccactaacagttatctttgactctcttgcctgttatgcttacaaaatggtgatggcttatggaaggctgttaaattaatattcctgttaaaggaaattaaagtttgtctatttttgacaataaaacattatatatttttaaaaaaaaaaaaaaaaa

SEQ ID NO: 292540 - DNA, 1000 bp, Homo Sapiens; identical to SEQ ID NO: 118606

SEQ ID NO: 292541 - DNA, 1000 bp, Homo Sapiens
ttcagaggacaatgacttttacatcaactacaaggacatcgacctggcttcccagcctgtctactgtaacctgcagtcactgggccaggccccaatggatgaagaggagtacgtgatccccgggcactgagcctaagatgtcctaacctccacccagaaccccttcagtccctgctgggtgactcagggcgtcctaacgcctccatggcctcagtttccccatctgaagaatgggtacaggaaaggattgtccttgaggccccaggaagctctgccgccccctccctgtccctcatgccgctcctcagctccctcagctcctagagggggaagaggagagacccccaacaaggggacaggacggtcactgtgccaatcctgtcatcaccctcctgtggatgtacaggcagtgctcaataaatgcttcgaggctgatgaggctgctggctcagggtgcgtgggttcctcaaggtggggatttctgagttctaagaccaagtctccatctgagactcccaaattgctccccacctcccatccctgtttttttttgttgttgttgtttgtttgtttgtttttgaaactgagtgtcactctgtcacccaggctggagtgcaatgctgcggtctcagctcactgcaacctccgcctcctgggttcaagtgattctcctgcctcagcctcctgagtagctgggattacagcacccgccaccatgccgagctaatttttgtatttataatagagatggggtttcgccatgttggccaggctggtctcgaactcctgacctcaagcgatctgcccgcctcggcctcctgaagtgctgggattacaggcgtggccactgcgcccaggcacattcctcccttctgcccctctcagggccccttcccaggtccctgatctccaggcttggcctccagagcagcccacaccaaccccaaaataaaaaaatgtatatattcctttaaaaaaaaaaaaaaaaaaaaaaaaaaaa

SEQ ID NO: 292542 - DNA, 1000 bp, Homo Sapiens; identical to SEQ ID NO: 118609

SEQ ID NO: 292543 - DNA, 1000 bp, Homo Sapiens
tgaggtgggtgtcccatgtgcttggtctccccttctgctgttctcctgttcttcataatccactactgcagcagtccctgaaccactaaacttgttcctttcatttacaaaagagatacctgacatcctgagacactgagaaatgtcctgaagtcacacagctaatggcagaactggcactaggtccaaatcttgtgataatgaacaccgtaaggttagctagcttcctactttcccttgaatagtgcttttctccctatgtaatatcttttattatgatatttgtggtttagaaggcatattgagttattttgcagaatcataatggacccgcacaaaatctcagaaccatatctgttgacattttttctcatagaaatatcatggttaccccatttgttaatgagcattaatgttttctgaacacttccaaagattaatcaaacataaatattcattgtctgaaaatgtctttaagatacaattcagaggtccctatttcctttgtacatacacacttagaaagaaaagacagaaaaggaagaggaaggaaggaaatattttgagaatatattgagaagaattaagaaaactcttcaatgaagtgttaacaaccaaaccctacagacggtatcagaaacagcaaatagatattcctctaccctttcacagtgagtgagtgagtacagaagaatgctcatgatagttttgccttcattctactttctgtggacacagagtaatgaatatttaatgggacattaaatatgcccttcaaatctataattttactttggtaaacgagatttaacatgatgtcttttatgctcctaaaacatcttttttcaaactccattccttagaacattcttctactgagatgatccaagaccaaaagtgttctttggtacttgcttataaagtgatagtacatgttagcatataatgtattttgaagagtgaagtaaatgctattgataacagaaaaaaaaaaaaaaaa

SEQ ID NO: 292544 - DNA, 1000 bp, Homo Sapiens
cagcttgctttgtggcactgagcaagttacttcacttctctgagccttggttttatcatagggtgaggaggttggatacaattagtgccccccttaaccctgcagactcaatgttcccttttataacaagtattttattctgaatatgaaatgaaaattaaagttaatataatcatctatgtgcatgtataattttaagcagtgaacatagtaccctaactataatataaagcagaaaaaaaggcaacttttaataaaataaaatgtatttcaataaaaaagcttgggtataaccaccctagaagataaaattaagtcattagatggctgaacctgcatgtagagccaccagctacaaatgaaaatcaatgtgtgtattggcaacagaaaatcacggtgttgtcattggatgtgactttctgaagtggtgggcaattcttgttaatgttttaaacaaaaaaaaaaacaccttacagtcttgccctgatttacacagcagtcacattcctggaaaattcaagtgtttattaaaactatgcaacagttactgtgtgttatacgttgaaaggtcttcactaatatctcactaagtaatgagaatgcctacatatcagaattttttttttcaggagccaagcacatatactgatttggaaaaaggcacaggtagctcagtttatttgctttctaccctgcctggccacttgctgtttcttcagtttctaatttgagctgtaactacacaaggaaagctaaatagtctggaaaatttttggaaagaatccacaaagccaaaggagactggcctatactcattttatctggggatgtaccttacccttagagactttgaaaaatgtgaagctcttattttgtaacctgggtaaatgttagtttctagattttcggcttaacatctaataataacatttaaaaagtgcttttgtaactattagttatttgcaataaaatgctttccttctacaaaaaaaaaaaaaaa

SEQ ID NO: 292545 - DNA, 1000 bp, Homo Sapiens
tggtagaagaaaagaagcttctggaacaggaacgggcccaggtgatgcaagaaaaaagacaggtgcagcctttgagaagtgcgtatttgagctgcctgcaaagggaagaaaactggcaaaggagagccaggcttttgctgaaagaatttgaagctgttctcacagaaagacagaatatctactgcagtctgtttcttcctcgcagcaagcggctggagatagagaagagcttactggtgcgagcgtccgtcgaccccgtcgccgctgacctagagatggcagccggtctcaccgacatatttcagcatgatacatactgtggtgatgtctggaacaccaacaaacgccagaatggcagactcatgtggctctatctcaaatactgggaactcgttgtcgaactgaagaagtttaagagagtagaggaagccatactagaaaagtaagacaagagtgaaatcaaactgcttttagtgactcgaggccaggcagtcatgcgccttctgggtctccggcgtcttccgttcccgtgctgcccgtgtcatggccacaccgtcacccttcagcagcgacctccactcccgccaccgtctgagcagaagtgcaccgaagcctcagagacagagggtctcctcccgatgctctgccgctgttggggatatggtttcttgaagcatttttaggctgccagtattgtattaagcagaacagtataacctcgtattttagctccagggtaaaaatggttttttaaaaagtcaaatacaatactggtccttaccacaagtaattttctgtctgtttcatcactccctaaatactttctcctcaaattatttttctctgtcaccagattacattaagaatttgtcagataatgtgtagaactgcataacaggtaataggaagtagtaatattatattatcaagggtttatattttaaagatctctctcactccataaaggggaaataccaagtgttaaaaaaaaaaaaaaaaa

SEQ ID NO: 292546 - DNA, 526 bp, Homo Sapiens
gggctcggggagtcggcgccatgaccccatcgaggcttccctggttgcttagctgggtctcggccacggcgtggagagcggcaagatcaccccttctgtgtcattctctgaggaaaacaagttcttctcaaggaggaaagtctgaacttgtcaaacagtcccttaagaagccgaagttaccagaaggtcgttttgatgcaccagaggattcccatttagagaaagaaccactggaaaaatttccagatgatgttaatccagtgaccaaagaaaaaggtggacccaggggcccagaacctacccgatatggagattgggaacgaaaaggacgctgtattgatttttaagtcgcatattctttaacttcaatattgttttctgaatatgtacatctgaattaacttatttctgattattttctttctttatatcctttatgtcgtgtagtttgtataatgtgtttaaatatatatatatatgatggctttggaagaaaatatgctgctgtaaattaggaaagggagac

SEQ ID NO: 292547 - DNA, 1000 bp, Homo Sapiens
tgtttatggcaccattggaacaccaaagatctatatctgctatgatttttttatttgaaatagcacaagacagatattttgtgccttgagtgtatatattttgtgccttgagtgtatgtattttgtttatgtctgtaatatgaataagaaagctctttgaaaatgtattatttatgttgagaaaccacttaaatgtattcagatgttttgcttatctgactgactgaatgaactaggtgaagttggttggaatagaattgccccatcctctctaggtttgaccctacaagaactgtattgccacacatgtcagctaggggctggtgtggaagaggagctcaagaggctggaataagatctgattcctggagtagggaggagaggcagcatgacccagaaggcagttggcagtgggctacccacggttgtcatccacaaagtgcatggcaaatgttaaaggaaaaattattctgacacttgttaaaatggccaggaggacttcattcaagactctattgcaatagagagtagaaattgagctccactctgaatacaacaaggacaagtggggatttatagccaggagcaggaggaggacatcacaggatgggaaattaccaaagagagacatcaaacataggagtattcctgataaagtgacctaacaggattcatgctaaaggcaggccaaggacttacacatcaaaagtggagaatgaggccaggcgtggtggctcatgcctgtaatcccggcactttgggaggccaaggcaggcggatcacctgaggtcaggaatttgagaccagcctggccaatgtggtgaaaccccacctctactaaaaatacaaaaattagccaggtgtggtggcacatgcctggagtcccagctactcgggaggctgaggcacaagaaaagcttgaacccaggaggtggaggttgcagtgagctgagattgtgccactgcactccagcctgggcaatagagtgagactctgttt

SEQ ID NO: 292548 - DNA, 1000 bp, Homo Sapiens; identical to SEQ ID NO: 118612

SEQ ID NO: 292549 - DNA, 1000 bp, Homo Sapiens
gagggggagctggagcgggcagcccagagtgaccccaggaggaggctgtccctgggaagcaggctggagcttccgaaggcatcccccagcctgacaaggttctgttcccggagcagcctgcccaccggctcctctgtgatgctgtggcctgaggacggggatccaggcggccctgagacccccggccctgagggccccctccccctgcagccacggggcccagtgccaggaagcccggagcatgtgggcgaggacctgacccgagccctcggtgactacgccagggtggagcagcgcctgggacagttggggcccgcggggggcctggccccgagacccctgcgggagcagctgggcaagatccgcctggagctgctcaccattcaccaggcgctggagcaggccgtgaggccgccagacgcacccctcgacctctctgtgaaacgtgcgcccgccaaggggccccaggctcttggagaggcgtgggggcggcccgagctgggtcccgtgttgaccgggggcacccccgagccacccggcatgctgggccctgcagcgccccaacccttctctggccacaccaccaagtgtgaggccgactccagcgtcccacccccagggctccccctcgcagccccagatgaccctgtcattcctggcagtggctggggcacctgtgttgcgacgaggagttcccagacccctgaggctgtctgtggcctgcagagcccccagggcgccgaggtctgacctgcagcgcctgaggtccgactgtctctgcctgcagcatgccggcccctctcctgcagcccctgcccctcacctgcctgggacctgccccgcctccgcatgcatgtggatagacccccacgggccgtggccaacgcttgtccctggggccacacagggacactggaggtcacagttatttattgatcacaattgtggacattaaaacagaaactgttcacaaaaaaaaaaaaaaaaaaaaaaaaaaaaa

SEQ ID NO: 292550 - DNA, 1000 bp, Homo Sapiens
tctgtctgcgacaccaagatccagctggggactcccctgaggcctgcctaagtccaggccttggtcaggtcaggtgcacattgcagggataagcccaggaccggcagagagtggttgcctttccatttgccctccctggccatgccttcttgcctttggaaaaatgatgaagaaaaccttggctccttccttgtctggaaagggttacttgcctatgggttctggtggctagagagaaaagtagaaaaccagagtgcacgtaggtgtctaacacagaggagagtaggaacagggcggatacctgaaggtgactccgagtccagccccctggagaaggggtcgggggtggtggtaaagtagcacaactactattttttttctttttccattattattgttttttaagacagaatctcgtgctgctgcccaggctggagtgcagtggcacgatctgcaaactccgcctcctgggttcaagtgattcttctgcctcagcctcccgagtagctgggattacaggcacgcaccaccacacctggctaatttttgtacttttagtagagatggggtttcaccatgttggccaggctggtcttgaactcctgacctcaaatgagcctcctgcttcagtctcccaaattgccgggattacaggcatgagccactgtgtctggccctatttcctttaaaaagtgaaattaagagttgttcagtatgcaaaacttggaaagatggaggagaaaaagaaaaggaagaaaaaaatgtcacccatagtctcaccagagactatcattatttcgttttgttgtacttccttccactcttttcttcttcacataatttgccggtgttctttttacagagcaattatcttgtatatacaactttgtatcctgccttttccaccttatcgttccatcactttattccagcacttctctgtgttttacagacctttttataaataaaatgttcatcagctgcaaaaaaaaaaaaaaaa

SEQ ID NO: 292551 - DNA, 870 bp, Homo Sapiens
gcgtccgccgcctccggaactaaacggggtgaggtcacattcggttatctctaacgttggaaaacgatggagctaacacccattatggagattaaccacttttcatcaggtttttaacttaagtcgtgaggaatacaacggtgaacacaagattcattttattttcatcaccatgggacgtatcctgttgttgagttctctgggtcagacctctgaagacttctcagatggatcctagtctctgggcttgccctgaaattactcgctgctcagggagagagttgaaatggttggcatcctcccactctgttgctccggctgtgtcccctcgctctgttgttccagctatgtcccctctgttgctccaactgcagctcattctgttagagttcctcattcagctggtcactgtggccagagggtgttggcctgctcccttcctcaagtattcttaaagccatggatttttgtggagcatttttcttcctggctctcccttgagttattttcctttcttcgctatcttgggactcttctttgtgcttgcggacatcggttgagagaaggacgacttcttccttgtctccttggtgttggctcgtggttgctcttcaacaactggactggaggctcttggttttctcttcatcttcaacaagtcagtctctctcaagggtctcacgttgcagcattcttaccagaggccattgggcctggagttccagttccagtgtctggagagtccacctcagctcagcaatctcatgccggttggcaattgtcagcagaagccgatgcctgcccatcagttctttactctgaggtgttagagtggaataaaaatataaatacttaaaaaaaaaaaaaaaa

SEQ ID NO: 292552 - DNA, 1000 bp, Homo Sapiens
ctttcaaaatcatgaaatatctcacactggagagatgctgtatgatataaggaatgtgggaaagtgttcgattttttttttaacaccattgtcaacataaaacaactcacagagcagaaaaactctgtgagtgtaaaatatgtagggaagccttcagtcattttggtaacttaaaagtacatgaggctgggcacagtggctcacgcctgtaatcccagcacttagggtgggcaaattgcttgacctcaggaatttgaggcctgcctgggcaaaatggtgaaaccatgtctctacaaaaaatagaaaaagtagcaggtgtggtggtatgcccctgtagtcccagctacttgggaggctgaggtgggaagatctcttgagccgagggggtgggggttgcagtgagccaagatgcactgcaccccagcctgggcgacagagccagaccctgtctcaaaaaaaaaaaaaaagtacatgaaaggattcactctggagagaagtcatatgaatgtaagaaatgtagaaaatcattgagttctctcaggtccttgcatagacataaaaggactcactggagagatactctataaatgtgtgaaatgtagggaagtattctttaatgttatttcatttcagatagaaataattctcattggagataaacgctatgaatgtaaacacatagtaaagccttaattttaagcctcagtttctttcaaatacagttatcccctaatatttgaggagcgtggttctaccaccccctgggcatacataaatcgacacatgccaagtccttttttaaaaatgacatatttggtacaaaattacccggatgtgatggcacatgcctgtaatcccagctactcaggaggctgaggcaggataatcacttgaatccgggaggcggaggttgcggtgagccaaggtcgcgccactgcactccagcctgggcagcaagagcaaaacaacctctgtcacacacacaaaaaaaaaaaaaaaa

SEQ ID NO: 292553 - DNA, 1000 bp, Homo Sapiens
gtttttgacattggcttttctgagaagagaaattgaaagtgtcacaaaataaaaaaagatgaaatgaagcatatataattgtcaattttttcaattttctagccaacagagaatcgaaggattctgttcaaatattagtaaaaattgaaaataaacttgtgcttatattttgtttgcaacacactagttaatttaacctgtgactagttatctctaccgaaggtggatgtgtagtttctggttttaaaattcaagcaaactggaaaataatccatctaattatgctttctttcccaagaagttttttaatgatatgccagcttcctaatttggagacaaaagccttaattgacaatgcattcattatatatttttttgtatagttacagtatacgagttgagtatcccttagatgagatgcttgggaccagaagtgttttggatttcagatttatttttggattttggaatatttccatacatataatgagagagttggaaaatgggattcaagtctaatcataaaattcacttatgtttgatatacaccttatctgaatagcctgaaggtaattttatacaatattttaaataattttatgcctgaaacagagtttgcgcacattggaccatcagaaagcagaagtgtcactatttcaagtcagtgctcaaaaagtttcagatgttaagctggtgatgcagttcatgccagtgatccgagtactttgggaagccaagacaggtggatctcttgagcccaggagtttgaggccagactgcacaacacagtgagacctcgtttctacaaataattaaaaaattagccaggtgtggtggtgcacacctgtagtcccaggtactcaggaggctgaggtagtaggattgtttgagactgggaggttgaggctgaactgagccaggatcttgccaccacattccagcttgggcaacagagtgagaccctgtctcaaaaaaaaaaaaaaaaaaaaaaaaaaaaaaa

SEQ ID NO: 292554 - DNA, 1000 bp, Homo Sapiens; identical to SEQ ID NO: 224088

SEQ ID NO: 292555 - DNA, 1000 bp, Homo Sapiens; identical to SEQ ID NO: 224090

SEQ ID NO: 292556 - DNA, 1000 bp, Homo Sapiens
aaggaagagtatgtgctttgaaggcactcagagactagtaatagcatatggtttgaagggaaacccattctctttcaattacaagagagcatcacttagcgtgcagtacttctgttacagcatccgatgtgtcctttattttaaattgtaaccataacagccattaatggctttatttcttgtattgctctcatctgggaaaagtctctacttcttcaaacgtaacataaatctattatgaagcttgtcccctagtatgccattataaagaaaaaattcttcgatggtatgcagtgtatctattctgtttgtaaaagatcatgtcaaaatgttctgcctctataatgataatagatggttttgtctttcaggatatttatccacctactgtcttctttgccttaaagggacacttggccatcatttttaggctcgaacttaacactgttaagaaataactgaaatatgatggtatttacattaatttttgaaattcaatggtgggatagaattaggtcaggaaatggaagttgttccaatggtgtgagaactaggagacaagatgattcactttattatttaaaccaagcttcatttttagtttttgttgtttaaatggactggaaagttaagtttttgcagggattgttttgaaataaagagatatgctaactcacagatgaactttgttaagacccctttatttttatataaagtctaatatttgaaaagcgattgttataaagtaaaattctctcttcctattctaatatatatcatatatttcaggcttctatttgaaaacaggtataagagatgatatgatacaaccctatagataatgttttttgcttgattgacttatataatcactgtttcatgattactgcttttggaataataggaagttttgtgaaatgctggccttgtgtatatcttagaatgcaaatttaataaagtgtgtatacatgcataaaatttaaaaaaaaaaaaaaaaaaa

SEQ ID NO: 292557 - DNA, 1000 bp, Homo Sapiens
atcagaaaattcatactggagagaaaccttacaaatgtaaaaaatgtgacaaagcctttaacaagagttcacaccttgctcaacatcagagaatccatactggagagaagcctttcaagtgtaaggaatgtggcaaagcttttaacagaggctcataccttactcaacatcagagaatccatactggagagagagctttcaaatgtgaagaatgtggcaaagcctttaacagggggtcataccttactcaacaccagagaatccataccggagagaaacctttcagatgtaaggaatgtggcaaagcctttaatagaagctcatacgttactcagcatcagagaatgcatactggagagaaacctttcaagtgtaaggaatgtggcaaagcttttaacagagcttcacaccttactcaacatcagagaatccatactggagagaaacacttcaaatgtaaagaatgtggcaaagcctttaacaggggctcacaccttactcgacatcaaagaatccatactggagagaagtctttcaaatgtgaagaatgtggcaaagcttttatctggggctcacaccttactcaacatcagagagtccatactggagagaaattcttcaaatgtaaagaatgtggcaaagcttttaccaggagctcacaccttactcaacatcagagaattcatactggagagaaacctttcaaatgtaaagaatgtggcaaagcttttaacagacgctcaacccttactcaacatcaaataattcataccaggtagaaaccctgcaagtgtaaagaatgtgctaaaaccctaaactggtgctcacaccttactcaacattagaaaatcaatactggatagaaatcccatatgtgtaatgatttttgaaacatcaaaatgaagattaaataaaaattagaagtgtcactttagaaagaactaaggtgctagcacttccgtaaattactccaaaaaaaaaaaaaaaaaaaaaaaaaaaa

SEQ ID NO: 292558 - DNA, 1000 bp, Homo Sapiens
agtttactgaggatggagtttttggttttgttttgcttcgttttctaaaaaaggacggaaacacaccctttccttaggcgtcctgcgtcccccgattcctgctccctggttgccgcgtccttggctggcgtcagaaaaatggctacaaactttctagtaggtgagaagatctggttccacaagttcaaatatggcgatgcagaaaggagattctacgaacagatgaacgggcctgtggccggcgcctccctccaggaggccagcatgatcctccatgatattgccagagccagagagaacatcccgaaatccctggccggaagcttaggcccaggggcgtctagcggccccagcggagaccacagcgagctcgtcgtccggatcgccagtctggaagtggacaaccagagagacctggctgaacgtgctggagaagagcttgcccggccactgggccacagccccgcagacccagcacatgtctcccatgcgccaagtggagcccccggccaagaagctagccacaccagcagaggatgacgaggacgatgacattgacctgtttggcagcgacaatgaggcaacacagctgcggcattaccaatgaggagcggctgcagcagtacgcggagaagaaggccaagaagcccgcgctggtggccaagtcctccatcctgctggacttcaagccttgggacgatgagacggacacggcccacctggaggcctgtgtgcgcttcatccagccggacgggctggtgcggggggcctccaagctggtgcccgtgggctacggtatctggaagctgcagattcagcgtgtggtggaggacaaggtggggacagacttgctggaggaggagatcaccaagtttgaagagtgtatgcagagtgtcgacatcgcagctttcaacaagatctggcctgagtgtgtgtgtgtgcccgcgtgcatgaggccctgccacaattaaaaactgagaccggcaaaaaaaaaaaaaaa

SEQ ID NO: 292559 - DNA, 1000 bp, Homo Sapiens; identical to SEQ ID NO: 118613

SEQ ID NO: 292560 - DNA, 1000 bp, Homo Sapiens; identical to SEQ ID NO: 224092

SEQ ID NO: 292561 - DNA, 1000 bp, Homo Sapiens; identical to SEQ ID NO: 118615

SEQ ID NO: 292562 - DNA, 1000 bp, Homo Sapiens
tcacagtaaagtggctgagacggtctcgccacattgcccagactggtctgaaagtcttgggctcaagagatcctcccgcttccgccttccaaagcgctgggataacaggcgtgagccgctgcccgggccatccctcgagtaagtttcatcaggtagacattaattctttcacgaggatcacggatcgagctctttactggaaacctgcgccccgccttagttctccacctcttcgtgcggctccaggcaactgccaacagatggcgcccgcccgcctatttctctccttgcggctttgggcctggaggggaggtggggagagtcccaatagcagaggaactggtgagcccgggccaaaatttcatctggcatccggaatgcattaaaaacaacccacaaatctgaagctcctcgcaggagagagagagagagagagagaggagagagaggagagaggagagagggagggaagagagtgacggagaaggagagaaagagacgggagagaggagagagaaagagagagagaggagagagagaaagaacgaacgaacagggaacttgtaaaactaaggggaaaagggcagaagagaggcagcagcgtggtccctgcaagcgtccgctttcctggccaagcagcccccagcacgcctgctttgtggggcagggccatgcggccccgaggaaggatgcggtgagccagagggttccagacaaaggaggggatccccaaggctctgggccagccagtccctgttttactggcaccacggtccctcctaggcgaggacgaagagggaaggggtggagacctccaccttctctgcgtgtggctgcgtccctttacagaatgacaggcccttacttccgagggcggggactaatgtgtaaggcttaacagatccaattccagaaattatctgtgtttttttcaatcaccctcttgtgcccccccaccccccattaaatttcatcttttatctttaaaaaaaaaaaaaaa

SEQ ID NO: 292563 - DNA, 1000 bp, Homo Sapiens
cgtcagcctagtttcactcagtttgacctgagactttccaatacaatctgttgttttgttttgtttttagagacagggtcttgctctgtcacccagactggagtacaatgacacaatcatagctcactgcagcctttaactactgggctcaagacatcctcctgcttcagcctccagagagttgggaccataggtgcacaccaccacacctagctaatttttgggggaggtcttgctatgttgcccaggctggtcttgaactcctgggctcatgcaatcctcctgccttggcctcccaaagcgctaggattagaggtgtgagccgctgcaccctgccccagtacaatcttttttgaactcaaatttttgctgacatctgagtgcacacaccacagtgtaaattatgccttatcagaatctaaatgaaaatagcgaacatttaaaagctatcaccattgtagtagaatcatccttcttttttgaaatttgaagcatcccaggcttaaaatcttgtgtttcagaaagacagtttataccatgactgcttaattatccccccaaagaccttctgattgaagtcatgtacagttcagtggcctaaattctctgcctttttaacttgctttgcaagcctactctgaaaataagttatttagtcaagttattctcaaagatgtcccagttgcctagaaaggatcaaatggaacatttgacacacatactcaaaaaaatgtaactgactataaacactttaacctaatcatctgtatcaaactttctaaaaatcaaatctcaggattgttccactttagagattctatgtaaagtttatataactatacttgtcaaatagcacctatctatgcatttaaaaatgcattaatatctaacataaaattgttaatttatacacacacatacacttatacatagagagagattttcggtatgttgcaagtattttttccgattaaatttattttccaaaaaaaaaaaaaaa

SEQ ID NO: 292564 - DNA, 1000 bp, Homo Sapiens
gcccatcagggacccacagcgcctgggaggatggtgcggatcttggccaatggggaaatcgtgcaggatgacgacccccgagtgaggaccactacccagccaccaagaggtagcattcctcgacagagcttcttcaataggggccatggtgctcccccagggggtcctggcccccgccagcagcaggcaggtgccaggctgggtgctgctcagtcccccttcaatgacctcaaccggcagctggtgaacatgggctttccgcagtggcatctcggcaaccatgctgtggagccggtgacctccatcctgctcctcttcctgctcatgatgcttggtgttcgtggcctcctcctggttggccttgtctacctggtgtcccacctgagtcagcggtgacctctgagggctgataggggtgggtttgttgagagggacttgctgggccttggtgtgagagcaggcatatttggaggggatctggtggtgccttgaaggtatgatcagagaggggaccacaggtgtgtgtttcccctttgtgttaagcgtgaggcagagggagacgttagtccagcatttccaaagtgtgggtgggtccgttggttcccgagatacttttaggtggtatggggcctgcattaagtggcacaaaatcagagcaagaaagcgatgcccttcccaattctctcaatccttttatgccgagaagatctcagctggatgccaacatgttccgatgcctgtggaagacatgccgacgtctcctctgcctagggagcaggacttgggcttagggcaggtggaaaaaattccagacttttttagcactgtttttgttttaatggtatatttttattggctactttattgtttaggacaagtggtagtggcattctatttattgtgaccttttcaataaatagatttaagtaaaaaaaaaaaaaaaaaaaaaaaaaaaaaaaaaaaaaaaaaaaaaaaaaaaaaaaaaaaaaaaaaaaaaaaa

SEQ ID NO: 292565 - DNA, 1000 bp, Homo Sapiens; identical to SEQ ID NO: 118616

SEQ ID NO: 292566 - DNA, 1000 bp, Homo Sapiens; identical to SEQ ID NO: 118617

SEQ ID NO: 292567 - DNA, 1000 bp, Homo Sapiens; identical to SEQ ID NO: 118618

SEQ ID NO: 292568 - DNA, 1000 bp, Homo Sapiens
tgatgaagtttggaatttgtcaaatgtacaacagggaaaatatctttagtattccaagtgccttgcaagtattcatttaaacattaaaacagccttttgagatgtaagtactgttatcatccccatttcacaggtgaagaaacagaagcacagagatgttgatacagactcaaggacgcagcaagtggcggagcaagaatcacactcaggcagtctctctcctttctgaacagagatgagccctaagatacctggaagattttgtttttaacctcacattaaggaaagcacacatcaccttgaaaggttgcacacttactcctatgatggtgccattgcacagaaacatttcagaatacttttctaaattaaagagtttgtggagtgttttataaatatcaatgctaggaaatctttatcaaatgaagataggtttgactttttgaaacaaaagtcattcagagataagtctggtgtgattgaagccaaatcattccagttgagtaaaaataataaaaagtttggaatatacaaacaatttcaaaaagaaaggtgcaaacctctttagagtagggtcaacttaagaattccttttatttctaaaatgactggcttagaggcagcagcacttggtaaaagttttaatgtattggataaaaaaaaagttatcattacttgatagagcatatgtgtgtgtctgaagaaagatttacatagccttacacttctctctactgaatatcatacgttacttttcttaaatgtgtctagtcatatatgtgtgatatgtataaaggccagttccctccaggagcaatgacagtctttattcggagctttaaggtagttatgtaggccgggcatggtggcacatgcctgtaatcccagctactcatgaggctgaggcagaagaatcgcttgaacctgggaggcagaggtttcagtgagccaagattgcactactacactccagcctggtgacagagtgagactccatctc

SEQ ID NO: 292569 - DNA, 1000 bp, Homo Sapiens; identical to SEQ ID NO: 224094

SEQ ID NO: 292570 - DNA, 1000 bp, Homo Sapiens
aaggtaagggagggaagcatggagttgtcagttttctgggctgtgactgaaagacacactgagctgtgatgaagaaaaatacatggccgactccagggtggtgacatttagagctagtcttgaaacctatcatctacagaggggagggcagccaacagccctcttcccacctgggtaggcagcgccctaattggaattggaaacagaaaattcgccaggccatactgctggagcccattcagataaaactgcccaaatactgagaggtgttttctacacccagctagaggagcacactccattttcccatgtctgacttcgtggtgtgagccctgggccctactgaccatggcgcaggacagctgtccttcagaaagcacacggtcaatccacgtggaccgtctccctcgcaggaactccgcatccttgtccctctctgcattcccagtttccgcaggagccttgatcaatggggaagcctgggtgaggatgggccaggtcccaattcccaaagctcctggaagagcctgaagacattgggaaaggctgggcctggggaggaggcagccctgggcccgttgcccatgcctctggtcctgggtggagcaggaatagttccactgtattgtcacagtgtgtttgcactttctgaggttctagctagtacagattgtatattgatagtacatattgctttgtttatgtctttgagatgagaaaggcttaaaacttgagaatatatatttggaatacagccttagaacggtttctgtacacatccacgtgcacttcacgggtgatcagttctagtacctacttgaaacagtgtctgtctgctactttattttcccaatttgatacataccctgatttgatgttttggtatttgagatgaactctgagtatgaagctgtaccataatgcagggcgtcagttttggtgtgactggacatacttgcttcaataaaagaatacatcactcccaaaaaaaaaaaaaaaa

SEQ ID NO: 292571 - DNA, 1000 bp, Homo Sapiens; identical to SEQ ID NO: 224095

SEQ ID NO: 292572 - DNA, 1000 bp, Homo Sapiens
ttctacagcggagattctccacagcagaaataaaagattatcaatttcgagtgggttcagtggctcacacctggaatcccagtactttgagaggcagagcttccacactagcatatttacctgtctgtctccagtgccaagctcagcccccagcacctgtagatacacaatagatgtctgctgagaggtgctctggtaaaacaagtataaaatgaatgtcaggatgttctccctcatggtgggcatcttctctgtccttaataccacccagttcttcatctttgacctgaaccagaagacacacatttgctatgaggccaagttcagcatctacgtggactcaaagtcggagctagtcacttggaccctgttccacagggctaatatcagcactggcctctccctcaccaccatcatcatcggctgcttcctcctttattgtatccacaagaatatctacatggggctgctgatctatgccatgtggatcatcacttacgagctcatcaacttctccatagtcctgctcctcaacgggatcatcaaagatcacttcaagacgctgagttatttgcactggatcttccaaatctcacacatgttcctgcactttttctgtctgcccttcatcgtcaagcatgcatacaacctttacaaggaatcccagactgtgggcaggaaacgccgccacaggctctgctccaccattgcagtgaacttatgactacctgtccgtctgggaatgttgtaccggaagttaaactgaaccatgccagatgccaggaaaggtgggagggaatggtgttcctcaacaatggaaccctccctaccctgcctgtcttctgttgatgctgcttggtttgtcagggcttttgagttttacgcactgaggaatgattctcgggagagggcaggttgtgcggatcaattattttacagatgtgttgtgtgacttgttttagcagttaatgatatgtggccttgtgcttacttaaccatc

SEQ ID NO: 292573 - DNA, 1000 bp, Homo Sapiens; identical to SEQ ID NO: 224096

SEQ ID NO: 292574 - DNA, 991 bp, Homo Sapiens; identical to SEQ ID NO: 224097

SEQ ID NO: 292575 - DNA, 1000 bp, Homo Sapiens; identical to SEQ ID NO: 118619

SEQ ID NO: 292576 - DNA, 1000 bp, Homo Sapiens; identical to SEQ ID NO: 118620

SEQ ID NO: 292577 - DNA, 1000 bp, Homo Sapiens
tgttgtgtgaagacaggcagatgctgcacagtgaattgcagatgatattacagaagtgatgtctgtaggtcacattaaatactgacttgagcagtgggtgacacaacacagtgtttgtcttccacagggaagcttaaaacaaaagatatttttaacccactgacagaacaacaaggttaagcttcatctgcttggtgtcccacagaacttgcacaagcagttgttattgggaaagtacagtctcaaaaccagcaacagcagcagtacctacagccctttttttggagagaagtttaaatgctttactgttggggcagtccatttctaatcctgacttggtgacagtatcatgtgtatttataaaacaaggctagccatatttaggacaactgaagaaaagctggaaaaaaaaacaagcaaacttgaacactgaagcaacctcaagcatctctttattttgatgatatatttttgtaaggaaaatattcagatgatcaggaatgtatataactgaaatcaagaaaaagaacagtatgcatttaaaaagacagaattatgaaattatatgagtgcttagaatggggctaagggaagtgctgaaatagagcaaaggatggaagataatatagactaccacccactgtaaatgtttgcaagtggctgtgttttaaatgggattattacagttgatctctatgaatgtcagagccctaactttcaggctttgcattttgtatatgggaagaaatatgacaatcctaggtaattaaaccatagacccaaagcccttacgtttgatgcaatttatttttaaaataggccttgtttttcagcttcatctgcagttctatgtgaagattgataaatcagtttttacttgttttattaataaaacgtaatttggatatcttgagttgatggttttgtgatttagctgggtaaactatctttgtaacagataagttatttataaaaattaaaaaacttatattctaatgtg

SEQ ID NO: 292578 - DNA, 1000 bp, Homo Sapiens
acattggagcctgcaataagggaaaaatgggaactggagagtgtggggaatgggaagaagcagtttactttagactaaagaatatattggggggccgggtgtagtggctcatgcctgtaatccgagcactttgggaggccaaggcgggcggatcacgaggtcaggagatcgagaccatcctggctaacacagtgaaaccccgtctctactaaaaatacaaaaaattagccgggcatggtggcgggcgcctgtagttccagctaactgggcggctgaggcaggagaatggcgtgaacctgggaggtggagcttgcagtgagccgagatatcgccactgcactccagcctgggtgacagagcgagactccatctcaaaaaaaaaaaaaaaaagaatatattgacggaagaatagagaggaggcttgaaggaaccagcaatgagaaggccaggaaaagaaagagctgaaaatggagaaagcccaagagttagaacagttggatacaggagaagaaacagcggctccactacagacccagccccaggttcaatgtcctccgaagaatgaagtctttccctggtgatggtcccctgccctgtctttccagcatccactctcccttgtcctcctgggggcatatctcagtcaggcagcggcttcctgatgatggtcattggggtggttgtcatgtgatgggtcccctccaggttactaaagggtgcatgtcccctgcttgaacactgaagggcaggtggtgggccatggccatggtccccagctgaggagcaggtgtccctgagaacccaaacttcccagagagtatgtgagaaccaaccaatgaaaacagtcccatcgctcttacccggtaagtaaacagtcagaaaattagcatgaaagcagtttagcattgggaggaagctcagatctctagagctgtcttgtcgccgcccaggattgacctgtgtgtaagtcccaataaactcacctactcatcaagctgga

SEQ ID NO: 292579 - DNA, 1000 bp, Homo Sapiens
gtccaggcgcaggagggacccggggccacaaggcgctgcgggcccaggtgtgctgggcccctctcaggggcactggcctctctgcagggccttccgcccagcgctggccttaatgctaaagccaaatgcagcttctgctgtgcgacgcactcctggccatcttgccgtgtcaccccctgtccggcctccacttgccatgggggatggatggatttagggtgggagggcctgtgggggccctggacagtcacaccccagcagcagtgagtgggcaggtttggaggagcagccagggagccccgagtggcccaggagtccccccacacacagatgcataggcctgccttccggagaccctgtccacattgccgggaccaccctggtggggccactggtgggtgccagggacaggttagggccactctggggaaggcattttggttttttattccacgctgtgctgtttggatgggagccccacagaggcaggtcctggaaccaccccacccccacacctggacgctcgctctggtgggggcacacgcaggtggaggtggttgtgggtgcaggtgtgtgcaggggtgtggggggcgcaggggtgtggcttagctggccccgcacccaggccggggaggctcaagttcgccactttactcagaccgatgcacagtcttcccattttacacttttttaataaacataattgcaatattttaggtgggctgcgagctgcagtcagccttcacgtctggcctcagtccccgtgtcagtgccgctctgcgtgtgcgtgtgcgcgtgtgtgagcctctacacatatatatacgtacagagccttaaaccacatcgtggcggtgccgtctgagctgtagcgggtggctttgtttccagtttttgtacccgtgtccttgtctcccctcctcccccatctggggatgtgtctgtgttccacaccttgaaataaacagacacatacgtgttctcttaaaaaaaaaaaaaaaaa

SEQ ID NO: 292580 - DNA, 1000 bp, Homo Sapiens; identical to SEQ ID NO: 288187

SEQ ID NO: 292581 - DNA, 1000 bp, Homo Sapiens
atgagagatcgagaaattgctgccacagccagagacctagaaatgagacagctggaactcgaatcacaaaagagactttatgagaagaatcttactgaaaatcaagaagctcttgcaaaagaaatgcgagcagatgcagatgcctatagacgaaaagtggatcttgaagaacacatgtttcataagctgatagaagcaggtgaaacccagagccagaaaactcagaaggtgattaaagaaaatttggcaaaggctgaacaagcatgcctaaataccgactggcagattcagtctttacataaacaaaaatgtgatgatctacaacgaaacaaatgttaccaggaagtagccaaactccttagggaaaacagaaggaaagaaatagagataataaatgcaatggtggaggaggaagccaagaagtggaaggaagctgaaggaaaagagttccgtttgagatcagcaaagaaagcttctgctctttcagatgcgtctagaaagtggtttttaaagcaagagataaatgcggctgtagaacatgctgaaaatccatgtcataaagaagaacccaggttccaaaatgaacaggactcaagctgtttgcctagaacctcacaattaaatgactcttctgaaatggatccctcaacacagatttctttaaatagaagagcagtagaatgggacaccacgggacagaatcttattaagaaagtgagaaatcttcgccagagactcactgcccgggctcgtcacagatgtcaaacccctcatcttttggctgcatagaatgcatgtcaccttgagacggtcgagagagagacctattttgcaatcagtgacattgatttttagattatttatttaaaattcctataaagatcagccctttgtacagaaaaatgtgtctataaaaattatgtgttatttaattctgatactttttggcttgtaaatggcttcttgaactttttacaataaaaatgttttagaaactgtt

SEQ ID NO: 292582 - DNA, 1000 bp, Homo Sapiens; identical to SEQ ID NO: 118621

SEQ ID NO: 292583 - DNA, 1000 bp, Homo Sapiens
tgtattcagtccgggtcttcccaaatgctgcagtggcccatcctggtttctatgccgtcattaagttttattctgcaagggctgcccacagagcccaaaaggcatgcgaccggaagcagctttttcagaaatctccagtcaaggttcgtcttggcaccagacataaggcagttcaacatcaagcccttgccctgaacagttccaaatgccaagaactggcgaattactactttggtttcaatgggtgttccaaaaggatcatcaagcttcaggagctttctgaccttgaagaaagggaaaatgaagatagcatggtgccacttccgaagcaaagcctgaagttcttctgtgctttagaagtggtgttgccatcctgtgattgcaggagtcctggcattggcttggtggaggagcctatggataaggtggaggaaggaccattatcattccttatgaaaaggaagacagcccagaagcttgctattcagaaggctttgtcagatgcattccagaaactgttgattgttgttctagaaagtggtaaaatagctgtggagtacagacccagtgaagacatcgtaggtgtcagatgcgaagaagaactacacggtttaattcaagtcccttgctctccctggaagcagtatggccaagaggaggaagggtatctctcggatttcagcttggaggaggaagagttcaggctgccagaacttgactagcatttctgaatatcccaaggcgaggtcatgtaacttccttgggaagctctgtcgtgcccctaccccacgccgccccaccactataggctgctggagtcctggaaccacctgggtcggccgcccaaatctttcctggcgaaggggagggaaggggtgttctggtggagtgggaagggaggcttgggtaggattgtgggataagatcgccctggtgacgaggagcggatctcgaacggaacttaataaaggttgcctagataaaaaaaaaaaaaaaaaaa

SEQ ID NO: 292584 - DNA, 1000 bp, Homo Sapiens; identical to SEQ ID NO: 224102

SEQ ID NO: 292585 - DNA, 1000 bp, Homo Sapiens
acaggaggcttcacaccggaaataggaaagaaaaaacacacggaaagtaccccattctggtcgatcaaaccaaacaatgtttccattgttttgcatgcagaggaaccttatattgaaaatgaagagccagagccagagccggagccagctgcaaaacaaactgaggcaccaagaatgttgccagttgttactgaatcatctacaagtccatatgttacctcatacaagtcacctgtcaccactttagataagagcactggcattgggatctctacagaatcagaagatgttcctcagctctcaggtgaaactgcgatagaaaaacccgaagagtttggaaagcacccagagagttggaataatgatgacattttgaaaaaaattttagatattaattcacaagtgcaacaggcacttcttagtgacaccagcaacccagcatatagagaagatattgaagcctctaaagatcacctaaaacgaagccttgctctagcagcagcagcagaacataaattaaaaacaatgtataagtcccagttattgccagtaggacgaacaagtaataaaattgatgacatcgaaactgttattaacatgctgtgtaattctagatctaaactctatgaatatttagatattaaatgtgttccaccagagatgagagaaaaagctgctacagtattcaatacattaaaaaatatgtgtagatcaaggagagtcacagccttattaaaagtttattaaacaataatataaaaattttaaacctacttgatattccataacaaagctgatttaagcaaactgcattttttcacaggagaaataatcatattcgtaatttcaaaagttgtataaaaatattttctattgtagttcaaatgtgccaacatctttatgtgtcatgtgttatgaacaattttcatatgcactaaaaacctaatttaaaataaaattttggttcagtaaaaaaaaaaaaaaaaaaaaaaaaaaaaaa

SEQ ID NO: 292586 - DNA, 1000 bp, Homo Sapiens
cttggctggcggctcagcctgttgctgcttcccttgctcctggttcaagctggtgtctggggattcccaaggcccccagggaggccccagctgagcctgcaggagctgcggagggagttcacagtcagcctgcatctcgccaggaagctgctctccgaggttcggggccaggcccaccgctttgcggaatctcacctgccaggagtgaacctgtacctcctgcccctgggagagcagctccctgatgtttccctgaccttccaggcctggcgccgcctctctgacccggagcgtctctgcttcatctccaccacgcttcagcccttccatgccctgctgggagggctggggacccagggccgctggaccaacatggagaggatgcagctgtgggccatgaggctggacctccgcgatctgcagcggcacctccgcttccaggtgctggctgcaggattcaacctcccggaggaggaggaggaggaagaggaggaggaggaggaggagaggaaggggctgctcccaggggcactgggcagcgccttacagggcccggcccaggtgtcctggccccagctcctctccacctaccgcctgctgcactccttggagctcgtcttatctcgggccgtgcgggagttgctgctgctgtccaaggctgggcactcagtctggcccttggggttcccaacattgagcccccagccctgatcggtggcttcttagccccctgccccccaccctttagaactttaggactggagtcttggcatcagggcagccttcgcatcatcagccttggacaagggagggctcttccagccccctgccccaggctctacccagtaactgaaagcccctctggtcctcgccagctatttatttcttggatatttatttattgtttagggagatgatggtttatttattgtcttggggcccgatggtcctcctcgggccaagcccccatgctgggtgcccaataaagcactctcatcca

SEQ ID NO: 292587 - DNA, 1000 bp, Homo Sapiens; identical to SEQ ID NO: 224103

SEQ ID NO: 292588 - DNA, 1000 bp, Homo Sapiens
tctctacagcttttcatgtaaattagtcttggttctgaaacttctctaaaggaaattgtacattttttgaaatttattccttattccctcttggcagctaatgggctcttaccaagtttaaacacaaaatttatcataacaaaaatactactaatataactactgtttccatgtcccatgatcccctctcttcctccccaccctgaaaaaaatgagttcctattttttctgggagagggggggattgattagaaaaaaatgtagtgtgttccatttaaaattttggcatatggcattttctaacttaggaagccacaatgttcttggcccatcatgacattgggtagcattaactgtaagttttgtgcttccaaatcactttttggtttttaagaatttcttgatactcttatagcctgccttcaattttgatcctttattctttctatttgtcaggtgcacaagattaccttcctgttttagccttctgtcttgtcaccaaccattcttacttggtggccatgtacttggaaaaaggccgcatgatctttctggctccactcagtgtctaaggcaccctgcttcctttgcttgcatcccacagactatttccctcatcctatttactgcagcaaatctctccttagttgatgagactgtgtttatctccctttaaaaccctacctatcctgaatggtctgtcattgtctgcctttaaaatccttcctctttcttcctcctctattctctaaataatgatggggctaagttatacccaaagctcactttacaaaatatttcctcagtactttgcagaaaacaccaaacaaaaatgccattttaaaaaaggtgtattttttcttttagaatgtaagctcctcaagagcagggacaatgttttctgtatgttctattgtgcctagtacactgtaaatgctcaataaatattgatgatgggaggcagtgagtcttgatgataagggtgagaaactgaaatccc

SEQ ID NO: 292589 - DNA, 1000 bp, Homo Sapiens
ggtattaaaaataattaaaaatagtcctgcctgaggttgcagtgagccgagcttgcactactgcactccagcctgggtgacagagtaagactccatgtcaaaaaaaaaaaaaaaaaaaaaaaagtcctgccttaactaactcctctgcgcttgttcactagtaacctaaagaggctatattcattctttatgcaatgagggtatttttgagtgaattttaactgctctgaactaagtataagctcatgggcctgcaaaggttcagacggtttctcctttgcacccaggaggaactttggctgcgagaatggggggatgtatccctcatgcagttggcatccaggcagccctctgcagcagcacaccctgcaggcggagttttcagaggatgcaattttggatcccgaattttgatgtaccttaaacttccacatcactgcaccctgaaacagagcatgctttccagaaagtcacactctcagatctgtgtcaagttcaatgtgagccctggcaaggctggcatattaacacctgccttctggcttctgaaagtgagatttgtatatgggctgcactcacgcatatacgagttggtttatctttgtgtacatgactataacccagtgatgctgaggtcatgtgctggaatgctgtatttggaccacacatttcaaagttgccctatggaaatgaatcctacttagtgacaagtcatcaaatgtttgtcacatgtgatgaagacaaatatgtatacctggcatagagaaaaatatatacctggtacattggagaaaaataattacactttcaaagagaattccctttgcaattttatgtttggatcaccactgtaagcacactttatttgcatttgatctgtatttgtatatgctgatgcaatgataaaaatcactgtaatacttcattgtgttgtactggatgcaaagctagaaaatattgcaataaatgagaccgatgaaagacttctctgaaaaaaaaa

SEQ ID NO: 292590 - DNA, 1000 bp, Homo Sapiens
ggtgcccgagcccccaggcggctgaacttgagacttgtcacgtagtgttggtggaatgcagagcagctggagatcacctgctgcaggtgggtgcgtaactccgcacggccaagccgtttggaaagctgtagcatatgcatgagagtccggaaagttccgagagaaagtgtgtggatgcacccgccaaggacacacccaccgaggccacagctgcgatttcatagtgtgggaccccactggcaaagacacgctggctgctgtggccgtggtttctgtcccagccgtctgtttccatagaaaaagacccgtgcctgtatattccacgctttgcgcacctgctggaattcggggagaagaaccacgaggtgtccatgactgccctgaggctcctacagaggatgaagcgggactggatgcacacaggccggcgcccctcgggcctctgcggagcagcgctcctggttgcagccagaatgcatgacttcaggaggactgtgaaggaggtcatcagtgtggtcaaagtgtgtgagtccacgctgcggaagaggctcacggaatttgaagacacccccaccagtcagttgaccattgatgagttcatgaagatcgacctggaggaggagtgcgacccccccatcgaggagggagggcagacggaggcccgagagcctccccaggcctcttcgtgggaaggccccagtaccactcgtaggaggtctcagctctggcatggctgccccggatgtggccgagggggcttcaccctgtgtccttaggagggggtggccttgaggcagagccgtgcctcactgacccccaggggcctcatcctccccatggaatgggctgtatgtcctgccccaacttggcccgcagcaggccagacccccctacccccgcccagagctcagtagccagcctgggtcctgccagggcttctcgagggcttgggggaagaatagatttagtaaagcaggaagatctgttgttacttaacaga

SEQ ID NO: 292591 - DNA, 1000 bp, Homo Sapiens
acttgatcagatatttgaaacgctggagactaaaaaccccagctgcatggaagagctgttctcagacgtggacagcccctactacgacctggacacagtactgacaggcatgatggggggtgccaggccgggcccctgcgaagggctcgagggcttggctccggccaccccaggccctagctccagctgcaagtccgacctgggcgagctggaccacgtggtggagatcctggtggagacctgagcaggagccctgagtgctcacagccgcctctgacgcattgacactgagcatcactacagtctcagtcaacagtgtgaatgtatcatgttttactttaaatgtgtgtgtgatacttcttcattatgtcctgcgctgcagtgagacctgggtgaaaatcaggaaccgcacacagccacatcttcctagacctaagagtaaattatggaggattttatttatgtctatttatatgtaaatgtcattgaagacaaaggtcaaatatttgtctgtttgtagatcacaggcaccagttggtcttcagggacctcatagcccctcggtggtgccttctcaaggcagtgttcctggaggctcccgtcagggtcagcccatgcacctgccctgggtgaggaagtagcattgctgctggatgagaaacgcctgcgctgctctgttagactggtgctgaaacaaaaggttaaggctaggttgaagtctagaatgaaagaaatctgaatccatgtcattcataaccccttgatctgtagtgtcatgggtgctgccgcaggcagggagtgagctgggggtgcctgcagccttccactcctgccccgcctcaccccacatgctccctgtttctcatgctttctctaacttcctcaccccttaaccaaaaaggtgtgttttcttttgtgcatatagccattcttaaatatcagtgatgtaaacctcactttattaaaaaattatccagcaaacaaaaaaaaaaaaaaaaaa

SEQ ID NO: 292592 - DNA, 1000 bp, Homo Sapiens
ttacagcatggtttactgaatattttaaacccactgttgagacctactgctcagaaaagaagattcctttcaaaatattactgctcattgacaatgcccctagtcatccaagagctctgatggagatatacgaggagattaatgttattttcatgcctgctaacacaacatccattctgcagcccatggatcaaggggtaatttcgaccttcaagtcttattatttgagaaatacatttcataaggctctagctgccatggatagtgatgtctctgatggatctgggcaaagcaaattgaaaaccttctggaaaggattcaccattttagatgccattaaaaacattcgtgattcatgggaggaggtcaaattgtcaacattaacaggagtttggaagaagttgattcccaccctcattgatgactatgaggggttcaagacttcagtggaggaagtaagtgcagatgtggtggaaatagcaaaagaactagaattagaagtagagcctgaagatgtaactgaattgctgcaatctcatgataaaactttaacagatgaggagttgtttcttatggatgcgcaaagaaagtggtttcttgagatggaatctacacctggtgaagatgctgtgaacattgttgaaatgacaacaaaggatttagaatattacataaacttagttgataaagcagcagcagggtttgagaggattgactccaattttgaaagaagctctactgtgggcaaaatgctatcaaacagcatcgcatgctacagagaaatctttcatgaaaggaagagtcaactcatgcgaaaagcttcaccgatgtcttattttaggaaattgccacagccaccccaaccttcagcagccaccaccctgaccagtcagcaaccatcaacctcgaggcaagaccctccaccagcaaaaagagtacgactcaccgaaggctcagattgataatcagcattttttagcaataaagtatttttaaattt

SEQ ID NO: 292593 - DNA, 1000 bp, Homo Sapiens; identical to SEQ ID NO: 224106

SEQ ID NO: 292594 - DNA, 1000 bp, Homo Sapiens
agcaccaccctcagccaggctacaacgacagcactggagggtcttccctctcagattcacctggaggccctcagacccccagggtgcacgtctccccaggtcctgggagtggctaccgcaggtagtttctggagagcacgttttcttcattgataagtggaggagaaatgcagcacagctttcaagatactattttaaaaacaccatgaatcagatagggaaagaaagttgattggaatggcaagtttaaacctttgttgtccatctgccaaatgaactagtgattgtcagactggtatggaggtgactgctttgtaaggttttgtcgtttctaatacagacagagatgtgctgattttgttttagctgtaacaggtaatggtttttggatagatgattgactggtgagaatttggtcaaggtgacagcctcctgtctgatgacaggacagactggtggtgaggagtctaagtgggctcagtttgatgtcagtgtctgggctcatgacttgtaaatggaagctgatgtgaacaggtaattaatattatgacccacttctatttactttgggaaatatcttggatcttaattatcatctgcaagtttcaagaagtattctgccaaaagtatttacaagtatggactcatgagctattgttggttgctaaatgtgaatcacgcgggagtgagtgtgcccttcacactgtgacattgtgacattgtgacaagctccatgtcctttaaaatcagtcactctgcacacaagagaaatcaacttcgtggttggatggggccggaacacaaccagtctttttgtatttattgttactgagacaaaacagtactcactgagtgtttttcagtttcctactggtggttttgatattgtttgtttaagatgtatatttagaatgacatcatctaagaagctgattttgctaaactcctgttccctacaatgggaaatgtcacaagaatgtgcaaaaataaaaatctgagg

SEQ ID NO: 292595 - DNA, 1000 bp, Homo Sapiens
gtgtacttcccgcagatcagcagcgtcaaggaccgcaagaaagccgtcctgtccgacatcggtgtctcggccttctgggctttcctctggttcgtgggattctgctacctggccaaccagtggcaggtctccaagcccaaggacaacccactgaacgaagggacggacgcagcccgggccgccatcgccttctcctttttctccatcttcacctggagcctgaccgcagccctggccgtgcggagattcaaggacctaagcttccaggaggagtacagcacactgttccctgcctcggcacagccgtaggcctccccggcttgcagaggccggcagccctgtatcacccctggcagtgaggtggcaggagcagcctagtgccagaaatgtccaagatgccagggcatgcagggcagtggaaggctggcttgaggaaccaattcaggttctccactgactcattcattccttcaccgcctccttcattgattcttcatgcgttcattcattcagtaaacatttattgagcagctgttttgtgcctagtgatgaattaggtggggtccttggctccaggagcccacaggctggggaggagaaaacaaacacatcaatatctcttccaaatggacagccgtggacagttaccaggtaggtagcggccccatacatgggctgcctagaggcgttcatggtccccattgctgagctgtgggtgcagagcaatagcctctcccttcacagcggtgtgaagagtgacctcactgtccttagggttagcatcctggccgaggatgtcacagggctcctggtctggctctgtcctcatgtgctatgtgaccctgacaaacccgtgcacctctctcagcctcagtccacttacctgaactgaggggtgataatggaccaacctctcaaggctgttgtgccaatgaaacaaaggccagcccagggcttagcacaagcatgctcaataaatgtaagctcttttgttcattca

SEQ ID NO: 292596 - DNA, 1000 bp, Homo Sapiens
agcccctctcagccctcagtaggtgggaggggccagctgcctctttaggccagttgcatcctccatttatccaaaccactcctctcctcccagtggagtggggttctgccagtacagccctactgcatcatctgcgtcagccggtcctagcccatctgcagggtgaaagaactcatcaagagctccttctgcccttgtaagcccatcccagctacttgtaaccatctctaagggcaatggcattgctccctacccattcatctgcatgagctactcttggcttccttaaagggtcaagaaagcaatttttctgcttactagattcattgagatcagctgtgtgagccccaaagtgggacaagggtgtctccttcattacttaaagatattcatgagggtgggtcactacagatgttggggagcaagggctaggatcactttttaaaaaatcaccacttgtggctgtcccagagtgcggttgtacatcctccccacctcataacgcagccactgaggaagagtggttttcctaagaagacattgctggagttgactttcttctgtccaaacaaacaaacaaaaactaaacacacacacaaacccccagaaacccacaatatgtacacgctaaggaaaaactagcacccttctgtccactcagcaataagagggatctcttcccacctaccctacctactcctacccccaacccccttccccattaatgtgagtaatgaattagcctgaccacaggtggtcactgtaggctaatggaaaatacccaagggagggcaaagccccccatcagatgcatgaatgtttgcgaatgttgactgccactgccccacacactgtgtctttatagaattcccctttgcccaccctcttcctgtctccacctggacacaacttgctcaaaggctggtgacttgtgggccattcatctacaaccaagtcctgatggagcaagaggcccacgcctaggggatgcaagaacaac

SEQ ID NO: 292597 - DNA, 1000 bp, Homo Sapiens
gagccaggacggtgacagcgtttaacaaagcttagagaaacctccaggagactgctatcatggcagagaagcccaagctccactacttcaatgcacggggcagaatggagtccacccggtggctcctggctgcagctggagtagagtttgaagagaaatttataaaatctgcagaagatttggacaagttaagaaatgatggatatttgatgttccagcaagtgccaatggttgagattgatgggatgaagctggtgcagaccagagccattctcaactacattgccagcaaatacaacctctatgggaaagacataaaggagagagccctgattgatatgtatatagaaggtatagcagatttgggtgaaatgatcctccttctgcccgtatgtccacctgaggaaaaagatgccaagcttgccttgatcaaagagaaaataaaaaatcgctacttccctgcctttgaaaaagtcttaaagagccatggacaagactaccttgttggcaacaagctgagccgggctgacattcatctggtggaacttctctactacgtcgaggagcttgactccagtcttatctccagcttccctctgctgaaggccctgaaaaccagaatcagcaacctgcccacagtgaagaagtttctacagcctggcagcccaaggaagcctcccatggatgagaaatctttagaagaagcaaggaagattttcaggttttaataacgcagtcatggaggccaagaacttgcaataccaatgttctaaagttttgcaacaataaagtactttacctaagtgttgattgtgcctgttgtgaagctaatgaactctttcaaattatatgctaattaaataatacaactcctattcgctgacttagttaaaattgatttgttttcattaggatctgatgtgaattcagatttccaatcttctcctagccaaccattttcctggaattaaaaattcagtaaaaaaggaaactataaaaa

SEQ ID NO: 292598 - DNA, 1000 bp, Homo Sapiens; identical to SEQ ID NO: 118623

SEQ ID NO: 292599 - DNA, 1000 bp, Homo Sapiens; identical to SEQ ID NO: 224109

SEQ ID NO: 292600 - DNA, 1000 bp, Homo Sapiens
ttacctgcatttaattcagccagattccctgtttaaaaataaaattactgaatcgtacattattaaagttattctgacagtatacaaacaacaaaattatctattttccagagattcttgataaaactctgtaatgttactacaataatacatgtattgtgttttccatggtgctacagttacacaatatggaggcaaacatcagaaatcaaagtccttggaataagggaagagactcatagtaaacttctttgtctggttgggttcctcataaagtataaaacatttcattctcagaaaatccaaccatatcttagagtatctccagaaactggcttagaggagctccaaatatgtggaattaccacactctgcttagttagtatgctgataaatgtaagattagtaggaggagaagtgaatgtaaattttattatagaattttctgatagtgattatgatttgtagctctagtgaataagaattttatattgagttgtgtgtatcttgagtcactaaaaatgtaggatactttttatttggggctcattgtctttgtaattacggagaggaacaaaccatctattgaaacaacaagtgcctcagagatgtatatattgtgaattactgcttaattacggaaagagtttcttaggttctatgtgaataagatggcagaatctaaatcaagtattttgaaggaagcacccatcttcacttggtgctgccatcaactttgtaagattgcattctatttattgtgaataatttgagtgtttccacaggaaagtggtatgaatcatatcgtctaagtatatgatgaatctttaaagggtgtctctgtgtactttgaattattttgcagttatgtaggtatcctaatgagtgaatggtactagtttttataaaaggagaattcattgagctaaccttggttttaaaaattagcattagcacccccattatattaattttcagggatagtaaatactccaaaatg

SEQ ID NO: 292601 - DNA, 1000 bp, Homo Sapiens; identical to SEQ ID NO: 224110

SEQ ID NO: 292602 - DNA, 1000 bp, Homo Sapiens
aaaaagccagacatactttctatcaagctgcgtaaagagaaacatgaagtacaaatggatcacagacctgaatctgttgtgttggtaaaaggaatcaacacctttacattgctcaattttttgattaactctaagagtttagttgctacctcaggtccacaggcaggacttcctccaaccctcttgtcccctgttgctttccgaggtgccacaatgcaaatgcttaaggcacggagtgtgaatgtgaagacacaagctctttctggatacagagaccaatttagtttggagattacaggtcctatcatgcctcattctctgcattcactgaccatgctgctcaaatcttcacagagtggatctttctctgcagtactgtatccacacgagccaactgctgtatttaacatctgcctgcaaatggacaaagtacttgatatggaggttgttcataaggagcttactaactgtggtttgcaccctaacactctggagcaacttagtcaaataccgttacttgggaaatcatctttacggaatgtggtgctgagagactacatttataattggagatcctgaacaccaaagtaagcctaaaaggaatctttgaggaaaaaagccttctagcaaggaaattcaagattcttgaagttgaaggaatatactgaaatgtttataaacataacttttactacagtagcatctaaggttttaaatgtgttttactattttcagattagatttttagatataaagatgaaaaactcagataactcaaatgagatatctatatccctacaacctaattgtatattgagcagaaactgaattaatatgcttccttgcaaatgggaaatcacatagcagttaccccatggcattgtgactaatggcatcagggcaaaaatatgttactttacgatttacctgttagcaggttcttgtttcataaaggtagaaaataaatacagacaacatctaaaaaaaaaaaaaaaaaaaa

SEQ ID NO: 292603 - DNA, 1000 bp, Homo Sapiens
tgtccagcattgtagggcaacagaagttactttgcctaaaagtatacaggatcccaaactctcctctgagctccgttgtaccttccagcagagccttatctattggctccaccctgctttgtcttggctaccactgttccctcgtattggagctgatagaaaaatggctggaaagacaagtccttggtcaaatgatgcaaccctgcagcatgttttaatgagtgactggcacggagtgtgaatgtgaagacacaagctctttctggatacagagaccaatttagtttggagattacaggtcctatcatgcctcattctctgcattcactgaccatgctgctcaaatcttcacagagtggatctttctctgcagtactgtatccacacgagccaactgctgtatttaacatctgcctgcaaatggacaaagtacttgatatggaggttgttcataaggagcttactaactgtggtttgcaccctaacactctggagcaacttagtcaaataccgttacttgggaaatcatctttacggaatgtggtgctgagagactacatttataattggagatcctgaacaccaaagtaagcctaaaaggaatctttgaggaaaaaagccttctagcaaggaaattcaagattcttgaagttgaaggaatatactgaaatgtttataaacataacttttactacagtagcatctaaggttttaaatgtgttttactattttcagattagatttttagatataaagatgaaaaactcagataactcaaatgagatatctatatccctacaacctaattgtatattgagcagaaactgaattaatatgcttccttgcaaatgggaaatcacatagcagttaccccatggcattgtgactaatggcatcagggcaaaaatatgttactttacgatttacctgttagcaggttcttgtttcataaaggtagaaaataaatacagacaacatctaaaaaaaaaaaaaaaaaaaa

SEQ ID NO: 292604 - DNA, 1000 bp, Homo Sapiens
gaaaatagcaatgaagtggccaaattggtgaatacccttaacaccatcccttccctgggccagagtcctgggccagtggtggtgtccaacaacagctctgctcatggctctcaaagaaccagcggacctgagtcttcaatgaaaggtacaataacctgaaagactctgagcagccagtcattcaaaaacattaataaagtgtttgttgtatcagagctttatactcagaaatagaaaaataaaataaaatacagctgctgtagtttgttcttacagaaactttagtaaggagaaagccacttacaaaaagtgtaactgaatcagctccaagaaattatgtgtgtaattgtgctttggagattagtgaaattgattgattaaagatgggtgagataatgaaagataacttcatggaagagatggatttctgagcaaggttttaaagttaggatttggtagagagatcttcaggttgagaatgatgagcatgagggttttcagtggtctagagcaggggtcggcaaatgttttctgtaaagggcctagtagtaaagttgtaggctttgtgcacaatatatagcctctgttgcagctattaactgtgctgttgtggtggggaagcagccacagatacataaacgaatgagcatggctgtgctccactaaaaactatttatggactctgaaatttaagtttcataaaattttcatgtgtcgaaaagttttattcttttatttcaaccatttaaaaataaaaaccgcaaggtatagtggctcacacctcatcccagcattatgggaggccaagacgggaggatcacttgagcctaggagtttgagaccagcctgggcaacatggtgagatcccatctctacaaaaaaaaaaaaaaaaaagattagccaggcgtggtggtgtatgtctgcagtcctcgctactcagaagtctgaggtgagaggatggcttgggcttgaacccagaaggttgagcctgcagtgagcc

SEQ ID NO: 292605 - DNA, 1000 bp, Homo Sapiens; identical to SEQ ID NO: 118625

SEQ ID NO: 292606 - DNA, 1000 bp, Homo Sapiens; identical to SEQ ID NO: 224113

SEQ ID NO: 292607 - DNA, 1000 bp, Homo Sapiens
ctataattatgaagcgattgcttgagaaaataacatataaacatagaatagaatagactgaccaagatggttcacagtttctttttttaactaggttatttataatgtatttctgaaccacttggcagacaaattcacaacacttaatgttcatattttgagtaaaggaagctaaaaccatgtttgctttctggtactacatgcattagcgaaaggttaagtaagttttgttctccactgaagtaatacttaacatctcagaaaaaattttgcatgttctgtagttttgtattaaatcagtcatttcatatgcactatatcaagtacaaacaggtagtttacctgtttatagtagtgtactaacaaagtctcccttgcagcttcagactgttatctataggcttatcgttcaaatacagcacttgaatatcccaagtagttcttctacgcatagctcacctttctaaacccagttaagcatggaagagaggtagtaggtaggtgcagtgtgtggaagctgcaaacaagtaggccttttattcattgatatcttttcccaagtactggattttaaatctgtatgtatctgtttgatttttttttctaatatttcagttgagctgctgttttcttccatgcaatattgtatactcaattgtgtatagaagaagctggtgagagtgccctcctacataaataagcaattgcagtgttttgcatgcaaaatataaaaaatttaaattgtcctgattctattttgtaaatggagaaacaatcatatctttctaagcggtaatggaggaagactagtgctttgtgcattttgatatatttgagttcattttttccacaatgtcatacttttgacgcagttgggtttctcataagtatcctagttcatgtacatccgaatgctaaataatactgtgttttaagttttgtgttgcaagaacaaatggaataaacttgaattgtgctacgaaaaaaaaaaaaaaaaaaa

SEQ ID NO: 292608 - DNA, 1000 bp, Homo Sapiens
tttgtttgcatgtccactaatttttttattttgatattagtcttttttaaaaaattttacagtagtcattgaaagttatgtttctttgtttacttcattttttcctctaaatattcaagactgggacaaaagtataaatattatttatttcaggtagaatttttttggtgtagttttttaatatatacttgaaggaaatgtttcaccttatttttggtctttgtttattcatttagaccctgcaagttgattctcattaattgtcagattccactacactttcttcctcataggtagtaattaccagtgtaactaagcatttgtgttctgatatctgaggccagtaactattaatatctagttctcagagcatttggaaaggttatcttaaatggctacctaaattgaaatccttttcagaaaaaatataattgcaaataggtaggagtggcctaaattatctaatgtaataaagtcagacaaaatgcatactttatagttcaagattttcggtatataaaatctgtcctttcctacctggacatgtcccattaaaaagtggaagattttaaataatttctttacagatgttttatttaagcaggtagcacaatctactaatgttgtttgatctgtgtttgttatactggttgtaattaatttttttaattcatgaactagcggaaaatttattaaattaactattaaccacattcaccttgtaaatgactgtataaaacttgttgacaatgcactgactttagaaagatgttaatgtgcataaatagagtgtaaataaaatagtgttgatgtactgaaatatgaactgtataaaaagtattagtaattgtatatggggtgtacctgtttatctgtaactgttatccaaacaaattaaatactgtggatgcctttaaaaaaaaaaaaaaaaaaaaaaaaaaaaaaaaaaaaaaaaaaaaaaaaaaaaaaaaaaaaaaaaaaaaaaaaaaaaaaaaaaaaa

SEQ ID NO: 292609 - DNA, 1000 bp, Homo Sapiens
ccccatttcacaggtgaagaaacagaagcacagagatgttgatacagactcaaggacgcagcaagtggcggagcaagaatcacactcaggcagtctctctcctttctgaacagagatgagccctaagatacctggaagattttgtttttaacctcacattaaggaaagcacacatcaccttgaaagagctaaacttgacgtcctacagaatttctctaacttaacatgttgagtctctgagagtgcaaaacttgaaacaagagaaagtggcctgcctggcatcctctgcttattgaatggttttatttaattctcctttacattgccaccttaacaatccttccagctacgtatcttaaaggatgtgatggagaagttatcaactggtgttttcagacctcagttggatgaacccattccactgtatgaggcaaaagtttccatggaagctgttcagaaaaatcaaggaagaaaaaagcaagttgttcaattttaattttcttctttctcagacctcagtcggatgaacatattccagtatttgaagccagaattttctttggaaattgttgagaaaaaccaaggaagataaaacaagttgcatttttaagcacgtttctctgctaagacaagatgctcagttgacacatttgaaaagtgtttgaaaaattcttgtgcaaatgatcaagataattctataattaacatcttaagggaatttttctaaaaaccttttcattgtttctatatattttgcccctgctataaaattccttccatgaagaaaactgctgctttcagcaaaagtcacactactcttgataaaagctgttgcaggcctttgctaagctatcaaagtaacgtattaattttgtatcaactccgttctcaacaccttccttaagtctttgctgtcataatttaagcatttgagtatattttgaagtcttaaaagacttagcccataggcacttaaaaaaaaaaaaaaaaaaaaaaaaaa

SEQ ID NO: 292610 - DNA, 1000 bp, Homo Sapiens
tgcccattggagcggaggtttaccacagcctgaagaatgtcatcaaggagaaatatgggaaagatgccaccggtgtgggggatggaggcgcgtttgctcccaacatcctggagaataaagaaggcctggagctgctgaagactgcgattgggaaagctggctacactgataaggtgatcgtcagcatggacgtagaggcctccgagttcttcaggtctggaaagtatgacctggaattcaagtttctcgacgaccccaccaggtacatctcacctgactgtctggctgacctgtacaagtccttcatcaaaaactacccagtggtgtctactgaagatccctttgaccaggatgactggggagcttggcagaagttcacggccagtgcaggaatccaggtagtggaggatgatctcagagtgaccaacccaaagaggacagcctcggccgtgaatgagaagaagtgcaactgcctcctgctcaaagtgaaccagattcgctctgtgactgagtcccttcaggcgtgcaagctggcccaggccaatggttggtgtgtcatggtgcctcatcattctggggagactgaaaataccttcatcactgacctggtggtggggctgtgacctgggcagctcaagactggtgccccttgctgatctgagcgcttggccaagtacaaccagctcctcagaattgaagaggagctgggcagcaaggctaagtttgccggcaggaacttcagaaaccccccagccaagtaagctgtgggcaggcaagcccttcagtcacctggtggctaattagacccctccccttgtgtcaactccggcagctcaagacccccgagcaacatttgtaggggccgctgctagttagctacccttgcccaccgccgtggagttcgcacctcttccttagaacttctacagaagcaggttgcagtgagccgagattgcgccactgcacaccagtctggagacagagtgagagtccgtcccag

SEQ ID NO: 292611 - DNA, 1000 bp, Homo Sapiens; identical to SEQ ID NO: 118626

SEQ ID NO: 292612 - DNA, 1000 bp, Homo Sapiens
aaagaaagggtcatatgcatgacaggaaaatgaaagaaacttcctttacttttctatctctggatttaaaattataatctcatcacattatcctgctgcttgctttccgatctgtgtaacctgggaattccaattctttttctctccttagatctatgactttgcctagtggtagagactagagttctttcctggcctgcggcttgatgcccaacttaaatgcatctaaccctttaacaaatgtgtacatgtttacaagtaatggaaatgcgtctataatactcctgcctgagaatagagacagagtggtggtggggagagtgaagaaagagatagaatacaggtggtacctgttgtggactgaattgcgtcaaattcatatgttggagctctaacccctaatgtgactgtaattggaaataagacctttaaagaagtgattaaggttaaatgaagtcataagaatgcaaccctaatcctgtaggactggtgtcctttttttccctttttttttttttttgagatggagccttgctctgtcactcatgctggagtgcagtggcgtgatctcagctcactgcagcccccgcctcccaggttcgagcacttttcatgcctcagcctcctgagtagctgggattacaggcgtgcaccacaacgcctggctaagtttttgtatttttagtagaggcggggtttcaccatgttggccaggctggtctcaaactcctgacctcaggtgatccacctgcctcggcctcccagagtgctgggattacaggcatgagccactgcacctggcctaggactggtgtcctaagaagaggaagagacacttaggtggaaggcacacagagaggccacgtgaggacacagtgagaaggtggccgtctgcaagccgaggagggggcctcaggagaaaccaaccctgcaatcaccttgatcttgggctttcagcccccaaaggtgtgagaaaataaacttcggttgataaactgct

SEQ ID NO: 292613 - DNA, 1000 bp, Homo Sapiens; identical to SEQ ID NO: 118630

SEQ ID NO: 292614 - DNA, 1000 bp, Homo Sapiens
tcttccagtataataaattattgatatcactgctgacttttatattatgggagggaaaaaataacattaataaaaaggtgataaaaaagcactgtttctatttttttctttttttccaaaaaaagaaagtaataaaaacttaaattctttgtaccagttaaaaaaaatgtataaaatttacatctgtgcagtggagttgttaagttctagaaacagtctatgaagctttagttttagcctagtagaacaactgttagagacagacgtataatttttatggaattacatgataatcatattcggatttatagaagcattttacaagtattgcaatcattgagtagagataatcatggtattttcatcagcttggtactttttgaaacgtgactgcgttgtgtgaacaatctgcaatttttcagtccgtgagatcctgcccttccacctctttcccatacccccaaggattatctcaaaatgatctctttagttctgtctccaaggcccaggacacttgtcagaaggatgcaaaaaaagaaaaaagtacatccaccctcttaatcccaaaagaacaaagtctccccacctttctcggatgcagggccagagtgacacagccgaaaaattgcagtttgtctgtacttctgtttgaactttccacgttgtcctgtttacaagttaacttaagttggggtatccgtcacgggtcttcctgttttgtatttaaataaaaacaacagcagcaggctgtccctgagtagttttgctgccataggttaagtcctcatgtgtacagtgcaggccctgtggcccgcacttcagtaagttatcaactctcaccgctgtgaacctgccaatccgctgtaacaactctgctttaaaacaaaaccaaacaaaactttaaaaaaaaatgtgtgatccagctttctcttgccatcctatgtgcatgccgtaagatcagttggatattaaaccatcaataaagtttcacaagatttga

SEQ ID NO: 292615 - DNA, 1000 bp, Homo Sapiens; identical to SEQ ID NO: 224115

SEQ ID NO: 292616 - DNA, 1000 bp, Homo Sapiens; identical to SEQ ID NO: 118631

SEQ ID NO: 292617 - DNA, 1000 bp, Homo Sapiens; identical to SEQ ID NO: 118632

SEQ ID NO: 292618 - DNA, 1000 bp, Homo Sapiens
aatagctcaaatctcaccaaacacaggagaacacacactggggagaaaccttacgtgtgcaccaagtgtgggaaagctttcagccacagctcaaacctcaccctccactacagaacacacttggtggaccggccctatgactgtaagtgtggaaaagcttttgggcagagctcagaccttcttaaacatcagagaatgcacacagaagaggcgccatatcagtgcaaagattgtggcaaggctttcagcgggaaaggcagcctcattcgtcactatcggatccacactggggagaagccttatcagtgtaacgaatgtgggaagagcttcagtcagcatgcgggcctcagctcccaccagagactccacaccggagagaagccatataagtgtaaggagtgtgggaaagccttcaaccacagctccaacttcaataaacaccacagaatccacaccggggaaaagccctactggtgtcatcactgtggaaagaccttctgtagcaagtccaatctttccaaacatcagcgagtccacactggagagggagaagcaccgtaactttcaagcgctcctgttgttgtcgttgttttaaactttagaatctgaaaaccagaaagaagtcttgtcattgcagcagcatcgattccggtgatagagtttgtatcactcaacatcaggggatgcctgaggagtgcgagctccacagcaacatggcaggcaggaggtcctcagaaggtgtcaggaggttccacactcgccagttcactggagcagagtcccttcgccacacttagggtcccagtaagccatgccagcattaccttttgcgtagttaaacagacgtgtatccagtctagttaaggaagaaacattaagattgtttaatttttaacatatattcaagaattttaatttgtaaagaattgagccacattgaacacaattgaatgagattcagaataaacttataacatcttgtaaaaaaaaaaaaaaaaaa

SEQ ID NO: 292619 - DNA, 1000 bp, Homo Sapiens
gccaggagctgagactggcatcgtacctggcgaggatggccatggtgcccggggccacgcttcgccggctcctgagtgtggtactgcccacagcctcacagcctcagctgctggccctgctggattcggccaccgagagacatgtggaccacgcagctgagagcgatggcggagcggagcaggccgacgtgggcaggcggaggaaacaccagagctggtggcaagccttagatggcaaactgcgaggagatctgataagcagaggattagaaaagatgctgtgggcccgcaagagaaagcagagcatattaaagaagacatgtctccctctcagagagaggatgatattctctggaaaaggaagttggccacacctgtcactggagcccattggcgaactggcccctgtacccattgtaggggcagaaaccattgatctattaaacacaggagagaagctctttatattcagaaatccaaaggagccagagatctcactgcacgttcctcccaggaaaaagaagaactttttgaatgccaaaaaggccatgagggccttgggcatggactagcccaagggaaagacctgcgggagcatctgaagagagaagggatgattttctcctgcccgccggtgtttgtgtgtttataatgcacaactcgcaaatataaattgcacatgcagaaggcacagaccccgtagcgcatgccaacttgcagggactcggtttaatcttgtctcatgaatttccagatggcccactctcttccatatcacaaggacataaacactccttctttcagccccacctccccagggccctggaggagacccccaccctgcaatccacaccccatcctctgctgcagaagctatggtctgtgtggtgacagccagattctctactcttatgttttgtatttgttacatattctatttttataaagggaatttaaaaaaataaatgtgttttgcacaaagctgtttattacaaaaccc

SEQ ID NO: 292620 - DNA, 1000 bp, Homo Sapiens
attttaattaaatatagaatattctactgaattgcaatttattaaatattcttatcctcttaaataaaactgctcaacagttaatcagcagtgaatcatcttgcagctatgcaatttaaaaaaaatacagattaccaatttcaagtgctgccagctaaaataactgttttaacgggtatcttttgtttgttcttttcacttaattattttattgtgctttgcatctccaggcagttctctcacatttgggtaaaatgtttagcaggctgtaaacttaagaaaagggtaaaataaaattttctggagaggaacttggaatttgagggagattttatatacctttaaaaactgtaatttaattgggatgccaggtttatagcaatttgcaactttaattttccagataatctggaggttagcatttgataaatgattttttaaagtagatatgaagattttgttaatttataatttattcatgtgttattactgtaattgaaaatgttatagacacttttaaattcagtttgtgtagaaagaaatgtgttaaacaaaattatgttaataaatattcccacataatacatctgaatggttaaaaatactggaagagttgtcagggctacaatagtgaatgtccttttttttaatatcaaaaatatcgataagtaggttttgtgttttcaacgtagggaaaatgttatcagtgaataggtggtgtactttacttggtataatttaaagttgcacagtaagtactgtttccttattttaatctttctttactcataatgtatttaagaatttgctgttttatttaacgctgctactcttaatcttctctaaatttttccccctactttcttgcttctgtttcacattttttaaaagggcaagtacaggagcaactgctgctacccagaaaaatgtgtgtattataaataattaaagagtttttaattgctttctgtatgaaaaaaaaaaaaaaaaaaaaaaaaaa

SEQ ID NO: 292621 - DNA, 1000 bp, Homo Sapiens; identical to SEQ ID NO: 224120

SEQ ID NO: 292622 - DNA, 1000 bp, Homo Sapiens; identical to SEQ ID NO: 224121

SEQ ID NO: 292623 - DNA, 1000 bp, Homo Sapiens
tgcttataatattcactgatctgcagtttatgagaacacattttcacagttatgtttcttcataggaaaactatatttagtgggcaacaactatttttatgatgggatgggggagtatatacacgtatagaatctgtacgcgttgaacaacttggttcaagatggtgggggcatttttagagcggcaataattgaaaaaaaaggcgaactctgccttggagaggtagatgataagaaataaaaaggtgtttataactattttgtattataaagtgggccttagagataggaagaagaatgatggattccttttggatcaatcagaaaggaaacacgaaagaaaagtcaggaaggtagagagagaaaaagggagggaaggagaaagaatgggaataaaataaggaggtaagagatactatttttgctgagcaaccagtgtgtttcaggatgatacaaagaaaaatatagaatagaaataagtgcaggcttggaatcagctacaaatcctaaagatggggtgtgtgtggatgtgtgtgtgtgtgtgtgtacaccattgtgtgtttgtaaaatgtgtatgttcatgagtaagggtgtgtgtgtgtgtgtattaaaattccagagtgaccgtggcacttgggtgtacaggtaattcctccagagctgtttgctggcttcaggagtggagtgagaatttcttttttatgaaaagggatataaaggcaccgagctgatgcagtatttgtaatattaagttgacctaacaaggtatttgcatgagtcacaattacaaagttttgagcggttttgtaatttgacatttaggagagtctcctatttattctcatactttacattcatgcttagtatactatagaggatgccagctttaatctttctgtcatttaaagcaatatgataagggtattcaataattgggtgccctaaatttctggatgagaaaattttcaattctggccatgagaaaaaaaaaaaaaaaaaa

SEQ ID NO: 292624 - DNA, 1000 bp, Homo Sapiens
caaaaagtgcaaaaaaaaagattctgttataaagtgattttctaagtatttcctaactttatttttcaaaatgatgttatgaacaccaaatttaaagatttttaacatgtcagagagaagagagttaaaatttaaaaatgcatcttgggagagaaatttgtctatgtttctagtgcctttcttgtcttgattgtatggtcagtaggcaatcttaaatgtttttatttaaaataaagtattccttgaaaatataaatatatgtatacactactaaattttgcatttatagctaaattgaatcagaagactgcttatggttttaaaattgcaatgacttaaataatgaggttgttaattagagtcagagcctgttcacatattgtgatcaggtagcaatgacatgtaccacttaaattattttatcgtcgatttggtagttcaattttaactactcaatgaaaacagccatgaatatcttttcttaaagagagttttgaaaatgatcacttacctaaaacttgaaagctatgaattagttatccatactctcatgacaattttgttggtgaacaacaaaaaagagatctatttctttaaaagatatttgtgcagaaactgcatgtaactctaagttttactcctaacatacatatgtttggggaagtattctattctatacttgccaatgtggagaacaaaatagttttttaagaatgaagaagtatatatatccattctgtattttacgtgcagcagaattatcttccgtaggatttttttgtgtattcacaaggtgatatttgtattgtaaaacaataatggtgaaggaaataaaaaggcttttaaaattttgtttgttttaaatctttgtaaagttattattccagagagtatactggtatcttacagcttacctagatcataaattaatcaaaatgcactttttaataaaaactgatacttaaaataaatggctgttatttctaaaaaaaaaaaaaaa

SEQ ID NO: 292625 - DNA, 1000 bp, Homo Sapiens
ctatactcttcgctcctatgctcggggcctccggcttgagctcaccacctacctctttggccaggacccttgaccagccaggcctgaaggaagacctgcggatggacaggagcgggcaggcccgcacatatccacttgctggagcccatgtttacagacagggacatacaccatgcagatcctgagttcctgctgtatgagcagggatatccatgcttatgtatccaaacacagagacccatgggaacaaatgagacacatatagatactgagacctgtgtgtacagtaggaccatgcactcacacccatctggagagggagcccccggtataccaagggagccagttgtgttcagacacacacatcacagcttgactcactaactgaggcctttccatagctccacagcttcccacctcctccccaccaaaccggggttctagagttaaggatgggggagggtattatactgcctcagtctgactcctcaacccagcagcaatttgaggggatgagggggaagaggagctgccttttggaggcccccttcacctgcagctatgatgcccttccccttctcccctgtcctcaccatatgccttatccccattctactcccctgctatgcaagtgcccctgtggcttgtccccaaccccctcagcaacaaagctcagctggggaacgagagtaatttgaagaatgcttgaagtcagcgtcttccattccagaaagacccccattcttcctttgggggtatgatgtggaagctggtttcagcccaggacccaccactgaggagaggatctagacaggtgggcctaattccaaggggcccttcctggcctggagaaggccttttacacacacacaacacatacacacacacacacacacacacatatcacagttttcacacagcccctgctgcattctctgtccatctgtctgtttctattaataaagatttgttgatctgttccaaaaaaaaaaaaaaaaaa

SEQ ID NO: 292626 - DNA, 1000 bp, Homo Sapiens
gactcgggtcctgtccacagccctagctgccagcaatgctgtcctcacagaggcatagtcgcccccagctgggttgtgctccactgtgacggtggcccggggggaggatgccagcagcctgcctatggctccagctgtgctgtggcccagcagcatggcctgcatctggaaggacacaggttgccagagcccctggcacaactctagcatatctgtgagcagctgttccctgtagccactgcccagcacctcctcaggccagcctggtgccacagtcacgtgggggaagacctcagccacagctgtaagcagctctctgccagccacatggccggggaccgaaaaactcccgtgggagattttggccccaacccacacaggccaatgcaagaggccaaggctggagaggcgtgccagcaaggccagggatggccggagggctgcgggctccgctatttgcaaatggatgccccagtgtccgggatgtgtggccagctgctgcaggcaggactccagcgtcaggatgttgccacttggagtatgaacaatgggcacggggttttcagccacagttccctcgaggccagtgttcagcaggatcatgccttctgtgtctggaagaggcggcagaggcaacagtgtttaggatttgggttatcataaggtgttaagagtcccttgttaaaggggcagtgggagttatggggtcatcaaggaccttgcctctctggaatctgtcaacccagttttgggctccaggtggatgggttgctttataaatgtgcctggtgcatgagaaactcttgtttcagctcttggcctttacccatgactcagcctgggggctggtgccggccttgcctgcagcaatgtagctgaggactggtctgaaggccaggagccctgtgctcttgacatcactgtactccctctccctccccgcaaccctgccccaccttgcatccagggtatggtgtaaataaacctgtgttgccatggc

SEQ ID NO: 292627 - DNA, 1000 bp, Homo Sapiens; identical to SEQ ID NO: 224122

SEQ ID NO: 292628 - DNA, 1000 bp, Homo Sapiens; identical to SEQ ID NO: 118634

SEQ ID NO: 292629 - DNA, 1000 bp, Homo Sapiens; identical to SEQ ID NO: 224123

SEQ ID NO: 292630 - DNA, 1000 bp, Homo Sapiens
cctgtggtgatcagggttatgtaatgttcaaagattcagacacacctgggtttggattcagttgcaactgggttgttatcacactcacttctttttagctgtgtgagcatgaataatttacttagcctctctgtgtctttccacctaattaaagaggatccaccccagggttattttgaggattcaaaaaggcatgcaacacacctggagcacaattccactttcattcaactaattcccttcccttcccccttcttccccttctacaagatcaatatgtaaaggagacatgaggcttactggttgcttttgaacacttacttagttcttagctacacccactctaaaattaactggacattagtgtacagcccatgtccaagcccagagagaaaacaatgggaacaatttcaaggtcctcaccactccttcatttgcagaggggacaacagactttctgaccagagaactggagaatttttaaaacaaaatctctcattccagcccaacctatttaactttttgtggaggaattttacatggaggaagtgagcacatgtcatgctagccaagaggacattattgtcattaaagagaggcattatttatacaccctgcaatgtgcacattaaaatatggaaattttaaaattatgaccaagggcttgaaacatattggattacatgctcacatttaacaaagagaggaaatgtgtttcagtttctggagtggctggaatttacaagctaattgttcaataaatctactcaagatagttacctaaggctttgtggcaatgaccttgaactgagagcctgtatctggatttagcacttgaaagatctaactggatatttgggttaaaagaatcacatttattcccaaatcggaatgctttgtttttcctgtcagttaattgccagttgccaacaaatctagttctatacagtttcttgggatgatgataataaacatttattgagcaaaaaaaaaaaaaaaa

SEQ ID NO: 292631 - DNA, 1000 bp, Homo Sapiens; identical to SEQ ID NO: 224124

SEQ ID NO: 292632 - DNA, 1000 bp, Homo Sapiens; identical to SEQ ID NO: 224125

SEQ ID NO: 292633 - DNA, 1000 bp, Homo Sapiens; identical to SEQ ID NO: 118635

SEQ ID NO: 292634 - DNA, 1000 bp, Homo Sapiens; identical to SEQ ID NO: 224126

SEQ ID NO: 292635 - DNA, 1000 bp, Homo Sapiens
catgtcatctggtcctacctaattgcacggattgctttgaaagccttgatcaggggaaaggtatcgaaggatgatcgcagtgatgtggagagcagctcagaggaagaagatgtgaccacctgcacaaaaagtccctgtgacagtagctccagcaatggtgccaatcgggtgaatggtcacatgggaggcagctactgggctgaagagtaaggtggttgctatagggacttcagcacacatggacttgtagggccactggcaacatactcctcttggcccttcccatatctactcttctgtgattgggagactgcaaggcactgaggagtatcaaagaagcaaatattttcactttgaaagaaaactgccattttgtatttaatagcctccaggttctttcagtaatgttatttgctctgtgtgtttttgtgtgtttgttgatgtgcgtttgtgcatatgcgtgagtttcattgccggggttggggcacaattgtggactggggccatgaggccttccctggtccccactgaacccaccttagttccacatttggctgcatcttgaattatgccaactccagacttctccttcttttttgcccttggctcttgacactctaaacccctggaccatctgaatggagcagccaagttcagtcccacatttctgtactgttcctctttcacagctggaatatgtcacatgatgaagttgtatagaaacagaaccatggatggatggccaggattgccgtggtccctagctagatccccttcctatcaatcacctgatagcaacagggacagctgccaataccctgctctttactcaatggtacccagggagggagcatgggaagagggtgagctgagggctggaggagggcaacagccactgggtgagctgttcacggtcttatactattgtttgtttgtgattaaaagtgcttcaacccaaaaaaaaaaaaaaaaaaaaaaaaaaaaaaaaaaaaaaaaaaaa

SEQ ID NO: 292636 - DNA, 1000 bp, Homo Sapiens
tctccttctattcccttccttctgccctgcctgcctccctgcacctgcggcctctctaggaagctgttcctttctatgcccaatagaagcaacaaggccctagctggagactctggggatctggagctgcaggcaggaggtggcactggctcccactcccacccctgcccaggctggcatctagaaggcgtcatgaattactttctcttctctcttctcaattttgaggtcctcattcccaagattgaggaggcagtagttaatctgggaaggcagtagaatggccagcattcctgcctgtaagtcttcccaagacagaggcccggtgacacagttcagccaggactgaccacagggctctagagctctctttggtgagacttccctggatggagagcagcagcaggggaagaggtgctctcagagacagcagggctggtgctcttctcccacaagctgagcctccacgttcagcagatactgtccaaggcaggggtacggctgaccaggaatgaaggttgaactctgctcctgagcacggtgcgtgcaaagcatatagcagcacataggctcaggcttctgtaggcttcctgtcccagagccaattatggaagtaagggcttccctccagctagtcactggaatggaaaagtgtgttcctgttcatagccaggaaacccagctcagcaaactccctttcaaagctgtgtgaccggctgggcatggtggctcacacctgtaatcccagcactttgggaggccaaggcaggcaatcacctgaggtcaggagttcaagaccagcctggctaacatgtgaaactaataataatacaaaaattagctgggcgtggtggcacatgcctgtaatcccagctacttgggaggctgagttgggaggattgctgcaatctgggaggtggaagttgcagtgagccgagatcatgccactgcactccagcctgggcgacggagtgagactccatctcaaaaaaaaaaaaaa

SEQ ID NO: 292637 - DNA, 1000 bp, Homo Sapiens
taaagatgatgttgtaacagtgactggactcatgaatcaagcaagcaaacgtgaaaaatggattaaggctgatgccccaaaaggcactgtaagttttagaaggcaaagttggtttcagtccctgaaactgcaggactaaaactgatttgagttggatttatgatttttaacaatgattcgcagatctgtgactacaaaaatgtaaatcccaccattcatataaaggttgaaaacaacaaattgagaatgaatactggtgaactgttttgggaggctttttcaaaatttgtgctttgctattgtattcattttctactgctctgtaacaaattaccacaaatttagcagcataaaataatactcatttacagctatgtctaggttctccgctcagggaatcacaaggctagaaatcaagattttggccaggctgagttctcatctggagtctctgggaagaaatctacttccaacttcattcagattattgggaaaatccagttccttgtgactggatgactgaggtctccattttcttgctggctgtcagccagcaatcactctaagcttctagaggccacccacatgccttctcatgttgcccctccatcttcaagccagcagtgatgcgctgagttcttctcatgctttgaatatctgacttcttctgcagccagctggaagaatatatacttttaaagggctcacttgattaggtcaggcccacccaggataacctttgttttgccatataatgtaacattcataggagtgatggcccatcacattcagttttcactcccactcaaggaaaggagattatacaaaggcatccatcatgtggggacaattagcttagaattctttataatgtagctctcacatgacaggttttctacttagtaccttttatggcatcaatgtaaatttaagctgtaaataaaaaacaaatatgtgaagcaaaaaaaaaaaaaaaaaaaaaaaaaaaaaaaaaaaaaaa

SEQ ID NO: 292638 - DNA, 1000 bp, Homo Sapiens
agcaagcttatctgatcttctgggatctctactaggatgctggcagcccagccagctggtctggccctggacgtgccttcaggggctgggtatgcttcatgacctgtgttttggtgagtggtaagcagcacctgcttctagcttcactgttgggccagatttcatccccaccgtggctcttcattgcggctgctttctgctccctccatggaccctgcgtggaattgccccatgtttctgtttgggcaccactgaggaaggaagcatgaaggacgcacaggtcaggccattctgttgcccacctcgtgctgggtctttactcctgggatggcttcaggggcagctccttttccatgcctccccccacccaacatctctcaggttgctgctcaaaggtcacctcttggaggggtctctccctgtcactgtgtttggaacagctccctcagtttctttctagctcatctcactctggtaatgtctttcattaccaccaccatctgacctggtcttacgacctgttagcttccttcatcagacaagagcaccaggatggcaggggcctcatctgtcctgttcctcctgtggcctgggtcctagcaccatgtctggtacagtgtaggtgctcaagggaagtttactttatagaactgtctacctgggagaggttactgttagtctaagctgcactatttggtaaaccccttgctgttttgcagatcctggttggagtaaaacattccatgggaactcgggctgtgagaaatgtcctaaccacctgactgcagaaacatccttatcacatcctgctgggcaaaggcccaacagcctgacttcaggaacatccttatcatcttctactgagcagcaagctatactgtccagagccctccctcccagcgctatgattaccccagcctgtgagcggcagtgggcactgacactaagctggtttccccctccgcagggttttgctagtaataaacctgtgttgctgttg

SEQ ID NO: 292639 - DNA, 1000 bp, Homo Sapiens; identical to SEQ ID NO: 224127

SEQ ID NO: 292640 - DNA, 1000 bp, Homo Sapiens; identical to SEQ ID NO: 291008

SEQ ID NO: 292641 - DNA, 1000 bp, Homo Sapiens
cagaaatatcattactgcatatagacccaaaggaatagaaatcattctattacaaagatacatgcacatgtatgtttattacagcactattcacaatagcaaagacatggaatcaacccaaatgctcatcagtgatagactggaaaaagagaatgtggaacataaacaccatggaatactatgcagcaataaaaaggaatgagatcctgtccttttcagggacatggatggagttggaagctgttatcctcagcaaactaatgcaggaacagaaaaccaaccaccacatgttctcacttataagtgggagctgaacaatagaacacatgggcacagggaggggaataacacacactggggccagtcagggggtggggggtcaagctgagggagagcattagaaaaaatagctaatgcattctgggcttaacccatttatgcctagtgttccatttctggaatgctaagcatgtggaagttctttatatcctgctcaaggtcattgccaaggtctgatttttcacattcaacaaattgcaacctctggcataaatgggttaatacctaggtgatgagttgataggtgcaggaaaccaccatggcacatgtttatctatgtaagaaacctgcacatcctacacatgtaccctggaacttaaaaaatttaaaatatatatgtatatatatttaatatggaattttaaaaattactaatgagttcttttatctgagtaattttgcatcaacatgcttttattatggaagagaagattcagtgagtacaaaattgcagatacatgtgtcagaagatccctgaatataataaggcttagtattctgtgtcataattgcctgtttgtattcctctctggtctttaaacttcattagggcaaggatcaactccatcttactaaccatttgattccctatgtattacacgatatatgaccaataataagccttcaataaatacttgtaaaataaagaatgttatgtaat

SEQ ID NO: 292642 - DNA, 1000 bp, Homo Sapiens; identical to SEQ ID NO: 224128

SEQ ID NO: 292643 - DNA, 1000 bp, Homo Sapiens
atgccacacagctccatgcccaccagccgcagccggctaccacgcctactggaagccagccgcagtcccagcatgcggcccccagtcctgtccagcatcaggcggggcaggccccacacttgggcagtggacagccacagcagaatctgtaccacccaggggccctgacaggcacgccgccctctctgccaccgggaccttctgcccagtcccctcagagcagcttcccccagccagccgctgtgtatgccatccaccaccagcagctgccccacggcttcaccaacatggcccatgttacccaggcccatgtccaaactggaatcacagcagccccgccccctcaccctggggctccccacccgccccaggtgatgctgctgcacccaccccagagtcatggggggcccccccaaggcgcggtgccccagagtggggtgcctgcactctcagcttccacaccctcaccctacccctacatcggacacccccaagctccccttccaccccccggggaactgaagattgtcctggccgcgacctgagacctccatgagtggagggaagagtgatctatgtctcttcccccagcagctcggaccactcccagccccccatccccccgttccccaggggagctggggaattcctgccaagcaccttgaatgggaggggcctcacagagggcagggccagggtccagcaggggtggggggttcctgctctgcccctgcccgtccccacccagtcttgccctcccatcctctcatctattcccccgctggagacggaagatcttttattttctattatttataacttcagacttgggccccctgttctttctttcccattaacttgagtgacctgtgtgagagacagacagatgccccacgaggatggctggacaaggacttttactttttattacataaaaatattaaaaaataaataaaaaaaataaaattttaaactaacttaaaaaaaaaaaaaaaaaaaa

SEQ ID NO: 292644 - DNA, 1000 bp, Homo Sapiens; identical to SEQ ID NO: 118640

SEQ ID NO: 292645 - DNA, 861 bp, Homo Sapiens
ggcaaccaggatagaagatcagttgtgctgggggaggggagccagccaggttgtagaaacagcatccctgactttgttctgctaactgtgcagagagaggtgatagtctccgcccaggccatgagggacctggaaatggctgatgacacggtggagctcggccacaccaggcccagctggccccacagcaaaccagagggtccaagggaagctgggtcctgcccaccaaggtcccagggatcctcctctgaggccccctctctcctttgggtttagtcaacggagagggagatggggagaggactgaaaggtctccccaaaggtacaagctgagagacctggatttgcaatcagacagctcacatggacccaagttggggttaacatgcagattgtgcaggggttccctgcggatgcacccctgtgtgccctgatgtggacctgctccttcctgcttcctgggctccagacagaaacaccgtacccctgcaccagcctctgcctcagctcttcacagtcagcacaccctccgcttcctgtcagggtgttctctgctgagtctggttatgggatccctttctgtgcagagccatgctcccgtgtcactgtgtgtcaccttcaagctgtccccgtgtgtatgcctgtgtgagaatatgtgtgtgtgggtttgccatcgaaggaaaacctttattttggctgctaacatttggaaacatttagagaacaaacaatatcttttaaaaaacatcaaaggttcaaaaaaacaagacaagaaacaaactgttgtaaaatttcaactcctctaaatttgtcttaaattgaacttagaactaatctaataaaaatagtatgaagtttcaa

SEQ ID NO: 292646 - DNA, 1000 bp, Homo Sapiens; identical to SEQ ID NO: 118641

SEQ ID NO: 292647 - DNA, 1000 bp, Homo Sapiens
agaaggattctgtcatgtcggccaatgggaagccagatcctgacactgttccggactcgtagccagcctgtttagccagccctgcgcataaatacactctgcgttattggctgtgctctcctcaatgggacatgtggaagaacttggggtcggggagtgtgtttgtcacttggttttcactagtaatgatattgtcaggtatagggccacttggagatgcagaggattccatttcagatgtcagtcaccggcttcgtccttagttttcccaacttgggacgtgataggagcaaagtctctccattctccaggtccaaggcagagatcctgaaaagatagggctattgtcccctgcctccttggtcactgcctcttgctgcacgggctcctgagcccacccccttggggcacaacctgccactgccacagtagctcaaccaagcagttgtgctgagaatggcacctggtgagagcctgctgtgtgccaggctttgtgctgagtgctgtacatgtattagttcctttactgctgaccacattgtacccatttcacagagaaggagcagagaaattaagtggcttgctcaaggtcatgcagttagtaagtggcagaacagggacttgaaccaagccctctgctctgaagaccgcgtcctgaatttcttcactagagcttcctcatcaggttacccagaagtgggtcccatccaccatccaggtgtgcttggatgttagttctccaccctcgaggtgtacgctgtgaaaagtttgggagcactgctttataataaaatgaaatatattctacttcctttattttgtggtttacacggttgtcctccctctaaacttactctcaggggcttctctgtcatctgactttcctcactcttgcttcccttcctaggaaaatcctcttcccctatacctgttcccacaaatggcatcccgcgcatgcttgccctattaaaggcagctgacagctgtacccactaaaaaa

SEQ ID NO: 292648 - DNA, 1000 bp, Homo Sapiens; identical to SEQ ID NO: 224131

SEQ ID NO: 292649 - DNA, 1000 bp, Homo Sapiens
gagcttacctcaaacccctaccacaccaacggccccagtcaccccgattacccagggaccctcagtaatcaccccagccagtgtgcccaatgtgggagccatacgaaggcgacattcagacaaatacaacattcccatgtcatcagaaattgccccaaactatgaattttataaaaatgcagatgtcagacctccatttacttatgcaactctcataaggcaggctatcatggagtcatctgacaggcagttaacacttaatgaaatttacagctggtttacacggacatttgcttacttcaggcgtaatgcagcaacttggaagaatgcagtacgtcataatcttagcctgcacaagtgttttgttcgagtagaaaatgttaaaggagcagtatggactgtggatgaagtagaataccagaagcgaaggtcacaaaagataacaggaagtccaaccttagtaaaaaatatacctaccagtttaggctatggagcagctcttaatgccagtttgcaggctgccttggcagagagcagtttacctttgctaagtaatcctggactgataaataatgcatccagtggcctactgcaggccgtccacgaagacctcaatggttctctggatcacattgacagcaatggaaacagtagtccgggctgctcacctcagccgcacatacattcaatccacgtcaaggaagagccagtgattgcagaggatgaagactgcccaatgtccttagtgacaacagctaatcacagtccagaattagaagacgacagagagattgaagaagagcctttatctgaagatctggaatgagaactgacttgtgaaacctcagcgtgaagggacatatcactgaccttcataaccactccacaaccatgaatatttgacaaatttttactgtgactatttattaagcatggataaaggagacagccctaaaggaacttactaagccagccctttgggattcagtaccaacaggca

SEQ ID NO: 292650 - DNA, 1000 bp, Homo Sapiens; identical to SEQ ID NO: 220437

SEQ ID NO: 292651 - DNA, 1000 bp, Homo Sapiens
caacaggggaaaatacagtctttgtagataccaagaagttgcctataatcaagaagaaagtgaggaagttggaagatcagaacgagtatgaatcccgcagcctttggaaggatgtcactttcaacttaaaaatcagagacattgatgcagcaactgaagcaaagcacaggcttgaagaaagacaaagagcagaagcccgagaaaggaaggagaaggaaattcagtgggagacaaggttatttcatgaagatggagaatgctgggtttatgatgaaccattactgaaacgtcttggtgctgccaagcattaggttggaagatgcaaagtttatacctgatgatcagggcagtaggcataattcagcaacaaacaatcttcctttgggagaaacctgttcattccaatcttctaattacagtggttcctatctcagggatactggactttctgacgcagatgaacaattaaggggaaaagcttcccttttccctctgtggcagttacgattttgacttcagtcctgagaaaaacttcaggttttgaaaatcagatgatgtcttctccttttccaaacaccacacgttgaaagcatttataaatccaagtctgaaactctgcgctctagtactgctgttaagatacacaacttgtttcttagttcatataatctcgggatacacacacacacacacatatatatacacacacatacgtatacacacacatacatatatataaatatacctgatgccagatttttttcataaatattctgcctactgtaaatatgggttcctctgagttgttttagaaaattagcgcaatgtattaaaatcaagtgttaggaaatttcatggtcttacctacaataacttttattttggaattgaactattattaaattgtatctaatcctggattacagtttaattaattattcttagtgcttaaggcttcataaagtaatttttccaaccttttttttaaaaaaaaaaaaaa

SEQ ID NO: 292652 - DNA, 1000 bp, Homo Sapiens
gctttgtggacgctgctgtgtgctcctgaacacggcaggccctgctatcacaccttgggcttggaggtcattgggagtgagcagatgtgggggtggccagccaggctggccgcactccatcactggcactgcctgccttgggacccgcttcccacctgctgcggtcaccatggtggcgagcacagcaaccccaggtgtccagagcactgccccatgcccaccctgtgtacccaggtccagagggtccgtccaccacagcagccccaggtggagggctggtctccctgggggctccccagtggctctgccctggctgtgggggtggagggaccttgccaggatgaaccccccagtcccaggcaccctctagctccctcagccgaacagcaccctgcatctgggggattgaagcagtcgctgacccccgtccccagcgggcccgggccctcactccctgaaccacacggggtttatttgcggatgttccctggagaggtcgctttgtgaagaaaccatcagcaggctgtgagcatcgccaggctgctgtgggggcgggagcagcctcagtgtcaagggcccgcccactgacccagccgtacctattcgtccacggtgccccgtagcagcaggtcctgcggccaaatctgtctcccttcatgggcctcccagggaaggaggaagccctgctgtgcagacacctctgtggccccccaggagtgtgagtggcctggggagggggccgtggcactgaggccgaaagtgcctgccagacggcacggtctgggtgcgggtgttccctgtgagcccgagtccgcttcaggaggggagcctgcaggtgccggctggtgaggggatgacgcgctgtgggtgggaggaggcagcgcccatctcagcagcaccaggactgcctgggactccctggcaacccagcaccggggaagccgtcagctgctgtgacaataaaacctgccccgtgtctggaaaaaaaaaaaaaaaaaaa

SEQ ID NO: 292653 - DNA, 1000 bp, Homo Sapiens
ttttggagatgaagaaaaaagtcattcacctgggagggatttttaacaaacatgcactaatattacctccctcttccaaactcctactgtcctcacctcacccaccactgtaaaagtattacgtcgtgcattaaagaccagaaaagacttgcttttacccagggaggggacattcccccaatcctgtgtctgggcagcttgcctggtggatgtttctggccctttttccaccatgggaatttctcacctctagctctaagggcagctgaccacctgccagcccctctctggttccagaagattacccttcgcaccggcacaggagagatcttaaatggtctctgggctgctgggacatgcaggctctgagtggggactgcacccactcatgctgttcctgaggctgccctctccagtcccaggagccgtgtctagagttcctgaccagccaccttctgccagaactgcaggcctgcggctgggtcttaggctcccgctgccatttgggtaagccggtggctggtctcgtctgccgggggaagggtggggaggtgcaatgggatgggaggcaggatgcttgcccagaaaggtgctttccttcagacggtgcagggcctgggccagccttacaggtcagtagactagactcgactacttggggtcagtgattcttttgtaacgagtctttcatgatgtgactttgaggccccaacatgacagccactgggccaccgggacccaagaagacagccccctgccccatcttctggcacaggccatcccgagtgcatgtccctgttgcccactgcactgatcatgaagccaccggccactgccacgcatgttgcacctgtgccatcgtgctccctcctgatgggcaccgtggtggaggaagtcacccagctgtttctcagtcccagaggccggtggctggttttgaacttgtgttgactgttgatacttatttactgtataaatataatttatcatttgtaccatg

SEQ ID NO: 292654 - DNA, 1000 bp, Homo Sapiens
gtcaagaactcttaggaacattgccttttggacatgtaaaatatttaggatttgaccacacaatggctatgaaaatgcaagtagtttcctcgcgtgacctcaccatgattcacatacgtgccactgtttgaaatctggtctgtttgcatttctgttatgacagagagatgatgtttgcatttctgttatgacagagagatgatgaaagtaggcagggctgtgttcctttgtgtagcctgtatatattttccatatgtagagccctgattaacttcaaggacaaacactggctggagaaagccagactgatgggaatgagactttggccaaaaatcccaaaacatcattttcaatcagtagagaagtgcttagggttgaaaattgatttcatttgctactgaatttggtaaatcctgggtaacttttatcaagatgaagacattttaccctacctactctagaaatatacaacaatgttatattttacactccttggaaacatttgaggaaaaaaatgcaatttgcacttcactttgttggaatatcccatagcactcaataaactcagctgctagagtgccgatgtcaggagggctgtgtcgggtaatgcgtgtggctgaatgggcataaccactgtggcttcttgtgctgcagaagctcgttgacaagactgaggaggatttcaagagcaaccaagtaaagtcatgaattttctaattttgtgtatatggaatatatttttaaatagagatttttctactttagataatgtgttaatattgctattacctaggttaagcactattgtctgtgctagtaagaaaaagaaaggaaaaccatcattgctttatagtagcttatatcaatttagatttcatcattactattttgcatactggaatttataaatgtgtaaattatcattttcttagttttgtaataccttttttatttgtgaataaaattatcacctggtattcttaaaaaaaaaaaaaaaaaa

SEQ ID NO: 292655 - DNA, 1000 bp, Homo Sapiens
cgggactcagtctccctggccactgcgtatcaggcttctggggaaagcatccatcacagaacctccccttccctgccacgcaccttccttggccagctccattctggcctcctccaccacctgccttgtgaccacatctcccaccacgtccccagatctcaagaacgcagctcagcttctccttcgagcttgactctgagagggaaagtgacggaaaccaagtcagatgagatgactgccatgtacactgcagtcaagggcagggaggggaggaatgacacaaatggcagggagctgctgggggactgacccctcggcgcctggcctggccggtgctgcacatccaccggggcacaacagggacttgtccagcctctggtcagaggatgtggccacctgaccctaaataggttccccagagtcctgcccctctaatgaatgagaactgcaggagtttctcctctgggtgcctgaagctatagtgcaatggttcccaaccctgcatgcacattcgaatcacctgggggcacaatgcctaggctccaaccccagacactcttatttcattggtctgggtggacctggcatcagaagtcatgtagctcctcaggggactgtagtgtgtggtcagcactgagggctcctctatgaggcctcaagcccaggtgactctgtgaggtctgcagagggagaaaagaacccacaagggaagaggtggaggtcaggcacggtggctcacgcttgtaatcccagcactttgggaggccgaggtgggtagatacctgaagtcaggagttcgagactagcctggccaatatggtaaaaccccgtgtctattaaaaatacaaaaattagctggctgtggtggtgggcacctgtaatcccagctactcgggaggctgaggcaggagaatcgcttgaactcgggaggtggaggttgcagtcagccaagatcgtgccactgcacaccatcctggatgacagagcaagactccatcac

SEQ ID NO: 292656 - DNA, 1000 bp, Homo Sapiens
tcggcctcgctccgctggcaccaggcactgtacctgctggagttcttcctgccactggcgctcatcctctttgctattgtgagcattgggctcaccatccggaaccgtggtctgggcgggcaggcaggcccgcagagggccatgcgtgtgctggccatggtggtggccgtctacaccatctgcttcttgcccagcatcatctttggcatggcttccatggtggctttctggctgtccgcctgccgatccctggacctctgcacacagctcttccatggctccctggccttcacctacctcaacagtgtcctggaccccgtgctctactgcttctctagccccaacttcctccaccagagccgggccttgctgggcctcacgcggggccggcagggcccagtgagcgacgagagctcctaccaaccctccaggcagtggcgctaccgggaggcctctaggaaggcggaggccatagggaagctgaaagtgcagggcgaggtctctctggaaaaggaaggctcctcccagggctgagggccagctgcagggctgcagcgctgtgggggtaagggctgccgcgctctggcctggagggacaaggccagcacacggtgcctcaaccaactggacaagggatggcggcagaccaggggccaggccaaagcactggcaggactcaggtgggtggcagggagagaaacccacctaggcctctcagtgtgtccaggatggcattcccagaatgcaggggagagcaggatgccgggtggaggagacaggcaaggtgccgttggcacaccagctcagacaggggcctgcgcagctgcaggggacagacgccaatcactgtcacagcagagtcaccttagaaattggacagctgcatgttctgtgctctccagtttgtcccttccaatattaataaacttcccttttaaatataaaaaaaaaaaaaaaaaaaaaaaaaaaaaaaaaaaaaaaaaaaaaaaaaaaaaaaaag

SEQ ID NO: 292657 - DNA, 1000 bp, Homo Sapiens
aatatttacaagaaacctgaacacacctgttgtgaaatcatccgggggattaagagtctgctatgtgatccttctctgtcatttcctcaattttgccagcacgagctttttcattggagaaccacaagacttcacatgtaaaaccaggcagacaatgtttggagtgagctttactctttgcatctcctgcattttgacgaagtctctgaaaattttgctagccttcagctttgatcccaaattacagaaatttctgaagtgcctctatagaccgatccttattatcttcacttgcacgggcatccaggttgtcatttgcacactctggctaatctttgcagcacctactgtagaggtgaatgtctccttgcccagagtcatcatcctggagtgtgaggagggatccatacttgcatttggcaccatgctgggctacattgccatcctggccttcatttgcttcatatttgctttcaaaggcaaatatgagaattacaatgaagccaaattcattacatttggcatgctcatttacttcatagcttggatcacattcatccctatctatgctaccacatttggcaaatatgtaccagctgtggagattattgtcatattaatatctaactatggaatcctgtattgcacattcatccccaaatgctatgttattatttgtaagcaagagattaacacaaagtctgcctttctcaagatgatctacagttattcttcccatagtgtgagcagcattgccctgagtcctgcttcactggactccatgagcggcaatgtcacaatgaccaatcccagctctagtggcaagtctgcaacctggcagaaaagcaaagatcttcaggcacaagcatttgcacacatatgcagggaaaatgccacaagtgtatctaaaactttgcctcgaaaaagaatgtcaagtatatgaataagccttaggagatgccacattccagaataaaatgtttccagggtctttgcatct

SEQ ID NO: 292658 - DNA, 1000 bp, Homo Sapiens
gtccatcttaatgggtctggatggcatggtgctcctcttaagtgtgctggaattctgcattgctgtgtccctctctgcctttggatgtaaagtgctctgttgtacccctggtggggttgtgttaattctgccatcacattctcacatggcagaaacagcatctcccacaccacttaatgaggtttgaggccaccaaaagatcaacagacaaatgctccagaaatctatgctgactgtgacacaagagcctcacatgagaaattaccagtatccaacttcgatactgatagacttgttgatattattattatatgtaatccaattatgaactgtgtgtgtatagagagataataaattcaaaattatgttctcatttttttccctggaactcaataactcatttcactggctctttatcgagagtactagaagttaaattaataaataatgcatttaatgaggcaacagcacttgaaagtttttcattcatcataagaactttatataaaggcattacattggcaaataaggtttggaagcagaagagcaaaaaaaagatattgttaaaatgaggcctccatgcaaaacacatacttccctcccatttatttaactttttttttctcctacctatggggaccaaagtgctttttccttcaggaagtggagatgcatggccatctccccctccctttttccttctcctgcttttctttccccatagaaagtaccttgaagtagcacagtccgtccttgcatgtgcacgagctatcatttgagtaaaagtatacatggagtaaaaatcatattaagcatcagattcaacttatattttctatttcatcttcttcctttcccttctcccaccttctactgggcataattatatcttaatcatatatggaaatgtgcaacatatggtatttgttaaatacgtttgtttttattgcagagcaaaaataaatcaaattagaagcaataaaaaaaaaaaaaaaaaaaa

SEQ ID NO: 292659 - DNA, 1000 bp, Homo Sapiens; identical to SEQ ID NO: 118493

SEQ ID NO: 292660 - DNA, 1000 bp, Homo Sapiens
gacacctcattctgcaggacagggccagctgtctcccagccatgctgctggacccccgccaggctcccatgtcatggatgcctgtgccaccccaggcaataaagaccagtcacttggctgctcttctgaagaaccaagggaagatctttgcctttgacctggatgccaggcggctggcatccatggccacgctgctggcctgggctggcgtctcctgctgtgagctggctgaggaggacttcctggcggtctcccccttagatccgcgctatcgtgaggtccactatgtcctgctggatccttcctgcagtggctcgggtgagatggtatgccgagcagacagctggaggagcccggggcagggacacctagcccggtgcgtctgcatgccctggcagggttccagcagcgagccctgtgccacgcgctcactttcccttccctgcagcggctcgtctactccatgtgctccctctgccaggaggagaatgaagacatggtacaagatgcgctgcagcagaacccgggcgccttcaggctagctcccgccctgcctgcccggccccaccgaggcctgagcacgttcccgggtgccgagcactgcctccgggcttcccccaagaccacgcttagcggtggcttcttcgttgctgtaattgaacgggtcgagatgccgacctcagcctcacaggccaaagcatcagcaccagaacgcacacccagcccagccccaaagagaaagaagagagcaaaaagctgcagccggtgcttgcacaccgccttgcacatagcagaggctccgggctcactccttcctggtgggaaaggaagatgcctgtcctctccgtggaagaccctgggccctcaccgcaggcagcagtttgcgttttgaaaggttattgggtcccttcctcgggctgtgttcttgctggtgagcaaaagtgttgcctgcagaaataaaatgcagaacgtactctacgataaaaaaaaaaaaaaaaaa

SEQ ID NO: 292661 - DNA, 1000 bp, Homo Sapiens
gactctctggggcacgtgtctggcccagggagacctgagctcctcccgctgaggaccgtctccgagtccgtgcagaggaataagcgggactgtctcgtgcgacgatgtagccagccggtctttgaggctgaccaattccaatatgccaaagaatcgtatatttaggagggaggccatacgccatgccatagcttgtgctatctgtaaatatgagacttgtaaagaactgcctgtagattgtttttaaaaggtcttgaataagctccttgagaaagttgtggaaagccctcctcagtgaggatagctacaccatggccatggcgcatcagatagtctctgtgtacctggatttgtgcaatatgtaaaaatgtatcaaatgtattatagataaggtgttaggtgcaaaggatgtctaataatccctgcacacgttttgaacttgcagtgaagtacactgctgttccttgcttcctggggcacttttctcttggttagtgtttaaaaattatcttcgcttttttaatgtggcctcaaatgtcatgccaattttcacatcttccacaaactccatttagggagaaatgtttaaatctctggtataagtttactccataccagagtaaactatatattactctatataagcagtcttgcaataactaatcaccaccatagaagaaagaaacagactgcaaggaacagagttgagtgtctggagtcatcaaaggcattaaaaactccagtaaaagctggggccgtagcaaaaatcatgaaaaacacttcaacgtgtcctttcaatcatccaattaaatgtgggtagattaatgaaaatgtattacatcaatattaactcatctatagcactttgagtatctttgtagttcatgatatcctatcctataatgtggaggtaaatgattttatatgcattgggggtcatatataaaacttcaatgtaatttcactacaataaattgccttccttatttgaaagtaaaaa

SEQ ID NO: 292662 - DNA, 1000 bp, Homo Sapiens
tcccactaccgcttctggctcttccacatcctgctgctctcggcgcccccggtgctgttcgtcgtctactccatgcaccgggcaggcaaggaggcgggcggcgctgaggcggcggcgcagtgcgcccccggactgcccgaggcccagtgcgcgccgtgcgccctgcgcgcccgccgcgcgcgccgctgctacctgctgagcgtggcgctgcgcctgctggccgagctgaccttcctgggcggccaggcgctgctctacggcttccgcgtggccccgcacttcgcgtgcgccggtccgccctgcccgcacacggtcgactgcttcgtgagccggcccaccgagaagaccgtcttcgtgctcttctatttcgcggtggggctgctgtcggcgctgctcagcgtagccgagctgggccacctgctctggaagggccgcccgcgcgccggggagcgtgacaaccgctgcaaccgtgcacacgaagaggcgcagaagctgctcccgccgccgccgccgccacctattgttgtcacttgggaagaaaacagacaccttcaaggagagggctcccctggtagcccccaccccaagacagagctggatgcccctcgcttccgtagggaaagcacttctcctgcaggatggcattgctctctccccttccatggcacgtagtatgtgctcagtaaatatgtgttggatgagaaactgaaggtgtccccaggcctacaccactgccatgcccgaacactatccatgctatggtgggcaccatctctctgatgacagttctgtgtccacaacccagacccctccacacaaacccagatggggctgtgccgctgttttccagatgtattcattcaacaaatatttgtagggtacctactgtgtgtcagaagatgttcaagatcagcatcatccgatggaaatagcatatgagccatgtatgtagtttcaagtttttcattagccgcattaaaaaagtaaaaggaaacaaatg

SEQ ID NO: 292663 - DNA, 1000 bp, Homo Sapiens; identical to SEQ ID NO: 118645

SEQ ID NO: 292664 - DNA, 1000 bp, Homo Sapiens
tcagcaacctggttatttatgtggggccgtgcaggcatgggcccactgcctgtccatcctgtttctcttatttattgaaactcaccattgccctatccttgtgtctccacccccttccatgtgttgaataataaaaggtgggaaagtgctgtcacgaggagctccttttctctgtgcccttcccagcttatccgcctgttccacttgtacctgtccagccctgccctgtgttgggcaccgtgacaggctgccctcccctcacagttcctgcacctcagcagccagggaagcagggcccagaggagacccatcaactcatctggttctcaccaaagcccctagctagaggcagggctgtcccacagaaatagtgtgagccacatatgtgactttaaattttctgacagtcacatttcaaaaagtaaaaagaagcaggtgaacttaatttttttttaacccagtctatccaaaatattttcatttcaatataaaatcagtataaaaagtgtgaatgagctgtttttgcttttgctttgaaatctggagtgtatcttacacatcttgattggaactcaaatatttcaagggctccatagccacgtggccagcagctaccacactggtcagcgcagcacctgaggaaatgcactgtgtggagcccgggaggtaattgggggtgaggaagatgtgcgggccagggaatgtgttccacagagagggacagcatgtgcaaaggctgagcaccaacacatagtggtcacctgggccttatgcccagggagcctccaaagcattcagctcctgcttggccagtgtggagaggaaaggagccacaggagcgggtgctacacccggcaagacagagcgtctccatctaaaattcctagggcaagcttccaacccggcccaagggccgcatgtggcccaggatatggctttgaatggggcctaacacaaattcataaactttcttaaaacattgaaaaaaaaaaaaaaaaaa

SEQ ID NO: 292665 - DNA, 1000 bp, Homo Sapiens
ggaaaatgtggagtagctgtaataaatctactcctgtattatgctttacagtgcaggtcttagtttttcttttttctcatttcttttgaaatggcatctcgaacaaagtccaccaatccctttacaaaagaatgaactgctcctctgtgtgtacttcatagaaggtggaatcggacagaggcaggttagtgacagttattcctgaaatacaggagcagagtacagtctgttgtggtttcccggattccgcgcctagctcagccaattaagcatgagacataggccattgagccacttagtagttatgcgagtggatagattggtatgtagagggaaagaggtctgctgtaaagaacaacacttgtttgtctgtggggaaagaaaagcagaatacttgagatgaaagttggcatacaaataggatactatcgccagtagttatattacaaacattatcggcctttctagtgtgaatgaacattagacacattattgtcattcctagtttaaagttaaggttgcgtggttggatttttccactatctttttagtttgtttacattttcctgaaccctcctgagcgcccgttcttggtctaatccccagtcgtgatgattccacacttcctcagccgcatgttgtcttgcctcattcatgagctggtcagcgtttcgtctctttaactgacatgttccccagtgctgtttgaactgttgagtttccgttgctggctgagtgcgttttgtccttcacgtaaccttcgctggtaaaaataagcccatgtgatgtccaccagtggatgaatgctggaccgagagccctagcttctggatccaggtctaggcccttcatctgctgctctgtggcccagggcaggtttgcttgacctctgcctcagttctcgactctaaaggacatactgacctacctcacaggggtgttgtgaggattaataaatgttggtactctgctttggaaaaaaaaaaaaaaaaaaaaaaaa

SEQ ID NO: 292666 - DNA, 1000 bp, Homo Sapiens; identical to SEQ ID NO: 118646

SEQ ID NO: 292667 - DNA, 1000 bp, Homo Sapiens
gcctgctgcaaacccctcagcacctgccgcaacccccacgggtcctgctgcaaatcccccagcccctgccgcaagctccacaccccatggacactgtcccaatggggtaacagctgggttgggcccagtggctgaggtgaagtccagcccagtgggagggggtccccgaggacctgctggccctgccctcggcaggcactggggagcaggctgggatggcggccaccactacccagagatggatgcgcggcaggagcgggtggaggtgctgccccaagcccgggcctcctgggagagcctggacgaagagtggagggcgccccaggcaggcagcaggaccccagtgcccagcacagtgcaagcaaacacctttgaatttgcggatgctgaggaggatgatgaggtcaaggtgtgaggggctggggcacggtcccagggccccacctaggtgcagagccggcccctcacctaacagctggttcctaccagaccggagaggggagaagtcatgttgcccctaaacccctccccacctctgcaggacagacatgggagggaggacagggaaggccaggcttgctctgggacttttatgctcccagaggccctgccaaactgaccacctcccccgactgccactctggacctaatagctgttccttaggccccactccatgccacccccaccagctggaggacccagcctcacagtgtgtcctttgtgccagaccaagcggcccgtggggggtggggggcagggagtgtaccacacagggccattgtctcacctcccaaagggaccgcctgcccccagctcatcccagagcgtccctgctgcaaccctgacagccgtctcccaggccgcttccccaacatccccgccccagcctccctcttaccccagaaaggtcaggtatgacctcccggggaggaatcccacctgcctgtataccccagacttgcctctggggcctgattaaataaggctgttttgataaaa

SEQ ID NO: 292668 - DNA, 1000 bp, Homo Sapiens; identical to SEQ ID NO: 118647

SEQ ID NO: 292669 - DNA, 1000 bp, Homo Sapiens
ggactgggtgggctgtcccagctctgactttacaacatcttccagttcaagcccctaggagagactgacacaaatccctgtctcccaattccacatttctgaaagaaggaaactctgattggtgcagctagaggcgagtgtaccccttggtccagtctatggctgggagtggtaccatgtggtctgctgtggggcacagagacatgagaagggctgtgtgtggaatgggctgtgatagactcaaacattctacttttctattattgtacgtttaggtggtttctagtttgtccctactgcaaataatgctgtggtgaacatcttggtgcaaaatcatttttttacatttcagactatttccttaggtataagttgcagaaatgagccactgtgcctggcagcagcacttttgatcattatttctgtttattggtaatagtaaaaaattagaaactacccagatgtacataaaaagtgaattggggccaggcacagtggctcacacctgcgatcccaccactttggaaggccgaggcgggcagatcactagaggtcaggagtttgagcctgaccaacatgctaaaatcccctctctactaaaaatacaaaaattagctaggcatggtggcacacgcttgtaatcttagctacttgggaggctgaggcacaagaatcacttgaatccgtgaggtggaggttgtagtgagtcaagatcgtgccactgcactccagcctggggaacagagcaagattctgtctaaaaaataaaaaaataaaaaaagcgaattgggtatataaatcagttatttctatctagtgaaatggtacagagacactaaaaaagaaggcgatcagccaggcatggtggctcatgcctttgggaggcatgagcacccaaaggtgctaattccagcagtttgggaggctgaggcaggaggatcgcttgagcccaggagttcaagaccagcctgagcaacatagtgagaccctgtctcaaacg

SEQ ID NO: 292670 - DNA, 1000 bp, Homo Sapiens
aggcgccccatcagcagaacttatacacggaagaagctcatgggaacctggctggaggacttatagccacaaacattactgagcccaaaagatcaaggagtcagccaggaccctgtggacataaagaagttggatgcctggtcccaagcctcttttgccatggtcagtgttcagattgccattagaatgccttagggttttctaattccccttatggatccaatccatctcctggccctgccccttgttggggaagttgcaggaggagaggtggatggcaatgtgattggtgctataactcaggcagcctgggagtcaggaacccagacaaggaatcccattccagcctcaccccaaccatgaccttggcaagtcagggggccactctgcctcatttatgcaaatggagaaaggcgccctccctggggtcccttgagctgctgtaaggctgggctgctgcgacacaggcagcgctttgtaaactgtgaagccatatacgtgaaactgaagagtgcattgggcagtggaagctattttttgccttccctgtgtaacagtaaaatcatctctagtgactgagcactcagtacatttttgtttaatgttgggcctgaggttaactgtgaccatggtccagcttgagtggcttctggagcagccacattttcaaggactgtccaaaagccagccagttcagggctcaggcctcacccattgcccactcctggggagaccatcacctggctcatcgtttccaccaagagtgccccacaggagtgccccacagacccgctggaccagcctgctgcgggtcctggccaggggtctggctaacggtgagggctgactctgaactgtctctcagtctccagaaagtgttcaagcctgttgtgttcccaaatctgattcctcctattgtcttgtaaatcaaactctaagtgaaaacttcccatttgtcccttcaaagattttttttttattaaatggttttttaagatcc

SEQ ID NO: 292671 - DNA, 1000 bp, Homo Sapiens
attacattaatgtggaatcaacagatgcagaagaatataacataacttttaaaagctttcataaataccagcagcaattgtaagcaaatctacaaaggttcttgaacctttctattatatacaaaactgaaaagtcattaaggagttcaactaatcaggaattaaatggtcatttatttcatgcagtatgatttaaggtatttcttgagattctggtcaaatgtcataatcagcaaacgggattaaaaaaaaaactccaaaatcactaaataattatctaaataatggtattggagaacttgtttcctgctatttggaagagattgttgcttcattgctagtttgtatttctaacttctacagttatagactccactgtgctttgtgtctgaatttctcagtatagacattttgtttactgtatgcttgcatatttattttcaactttgtttgtctttaaaattgcttgaggaaaaatggttgtaattaatttctgctacagaaaagccacctggtacgttttgtctcatcaggattgttttaaattctaaactataagtttgttcagaggggcttttgcaatgatagcagaaaactgtacaaatgtacagttagttatagaggttcttgttgaaatgaacttaccatctgatgatatgtatgtacagctgtgtacttgagtcttttttagtttacttagaaagactagcagtttgacctgttaaacaggactagttcaagtcaagaaactaaggttgttgtatacacctggaggcatctgttattcagcttatcctttgagtgggtatttggcacaatgaggataaacttatgtgacccacttgaatggctgatctaataatgttgacattatgcattctgtacttagtgaaatgtcagatgaaaataactgatgaataatttttttgtattaaagggatgggaaaagaacacatgaatttgttaataaagcactatgatctgcaaaaaaaaaaaaaaa

SEQ ID NO: 292672 - DNA, 1000 bp, Homo Sapiens
actgccctgcaaaagctggaagaagctgaaaaagctgctgatgagagtgagagaggtatgaaggttattgaaaaccgggccttaaaagatgaagaaaagatggaactccaggaaatccaactcaaagaagctaagcacattgcagaagaggcagataggaagtatgaagaggtggctcgtaagttggtgatcattgaaggagacttggaacgcacagaggaacgagctgagctggcagagtctaagtgttctgagctggaggaggagctgaagaatgtcaccaacaacctcaagtctcttgaggctcaggcggagaagtactctcaaaaagaagataaatatgaggaagaaatcaagattcttactgataaactcaaggaggcagagacccgtgctgagtttgctgagagatcggtagccaagctagaaaagacaattgatgacctggaagatgagctctatgcccagaaactgaagtacaaggccattagcgaggagctggaccacgccctcaatgacatgacctctatataattatcaccgtttctgctctgttctggatctgccccctttactcctcggggaacccaaggccccactctcgctctggattccatttgggtcagcctggctggtccccaaggcattaggatgggggagcaaaaagcaacttatgtattttcttccacccccaccccaaattaaaatgttaagctgctggaagcctcatgccaccctgcatttgtgtcattgacaaagctgttgctgtccctaagaaggagccttgggggtgtgatgtggggaagagctattgtaggctccccctcctctgacttatgtaatcaaagccacttttgtgtgtgtctattttttcttgacatttaaactcagctgatctgattctaccagagtgatggatttagtacaggttactcaggatagtaattttagttatactcctcaagctgaacaagattaaattccttatttccaggttctt

SEQ ID NO: 292673 - DNA, 1000 bp, Homo Sapiens; identical to SEQ ID NO: 118650

SEQ ID NO: 292674 - DNA, 1000 bp, Homo Sapiens; identical to SEQ ID NO: 118651

SEQ ID NO: 292675 - DNA, 1000 bp, Homo Sapiens; identical to SEQ ID NO: 118652

SEQ ID NO: 292676 - DNA, 1000 bp, Homo Sapiens
agagcaaaggaaaccctggaaaaaaagaagctacttaaagaactgtgggagtcaagtaaaaaggtccactgagaaaagaattagagattccaactgacagaatctgccagaagctcccagggaataatggtggcgagttccatcaccagcattattatagtgcttcaaaagaaatatttttgatgaacttaaaagacaacaaatttatttaaatggtgcactaaactgtagtgaacagagacatgcacgattcaagaataaaactcggccgggcacggtggacggtgcctcacatctgtaatcccagcactttgggaggccgaggcgggcggatcacttgaggtcaggagtttgagaccagcctggccaacatggtgaaaccccgtctctactaaaaatacaaaaaattagccaggcatggtggcgggcacctgtaatcccagctactcgggaggccgaggcaggagaattgcgtgaacctgggaggcggaggttgcagtgagctgagatcgcgccactgcactcaagcctgggcaacacctgggtgacagagcaagaccccatctcaaaaaaaaaataaaactaggtcaagtgcaatgacacacgcctataatcccagcaccttgggaggctaagacaggaagatcacctgagcccaggagctcaagattgcagtgagctatgaacaccactgcactccacctgtccacttgtccttgtgtgacagaacaagaccctgtctctaaaaaataagataaaaccataaagaaacacagtcagtactatacaagaataatggctacttctagagggaaggagttgtcattgtgatgaggcacttggaggggttctggggtgcctgacaaagttctgtttcttcacctgggtggtagttagaagggtgtccccgtatttcaaattgtacctttgtgagattgtatgttttgtaataataaaattttttttgtaattagtaaagtcaatttttatggagaactgg

SEQ ID NO: 292677 - DNA, 1000 bp, Homo Sapiens; identical to SEQ ID NO: 224134

SEQ ID NO: 292678 - DNA, 1000 bp, Homo Sapiens; identical to SEQ ID NO: 224135

SEQ ID NO: 292679 - DNA, 1000 bp, Homo Sapiens; identical to SEQ ID NO: 118653

SEQ ID NO: 292680 - DNA, 1000 bp, Homo Sapiens
cttacctgattgccatgtcttcaatttacttggccggcaaagtggaagagcagcacctgcggactcgtgacatcatcaatgtgtccaacaggtactttaacccaagcggtgagcccctggaattggactcccgcttctgggaactccgggacagcatcgtgcagtgtgagcttctcatgctgagagttctgcgcttccaggtctccttccagcatccacacaagtacctgctccactacctggtttccctccagaactggctgaaccgccacagctggcagcggacccctgttgccgtcaccgcctgggccctgctgcgggacagctaccatggggcgctgtgcctccgcttccaggcccagcacatcgccgtggcggtgctctacctggccctgcaggtctacggagttgaggtgcccgccgaggtcgaggctgagaagccgtggtggcaggtgtttaatgacgaccttaccaagccaatcattgataatattgtgtctgatctcattcagatttataccatggacacagagatcccctaaggtcctggcccaggcctgcccaaagagaagcccaggatggtcggctgcctggggacattgtcaccacgtcgccatgacggctggtccccacaggaccagctgggaggactggttgtgctgctggagaagggctggagaaggcaatggcatgctgccgctttgccagtccctagaagtcgcggtgcaggtgatggtgggagccgcgcctccagcgggcaggccgggagtgtactgtgtgcagctgacccaaggcagccacatctgcgtttgtcctttgagaggactttgactacaatacaggcatgacatcaatgaaaggaaagtcatgaaatcgatgagactgaatccctacggatttcttaaaagccagatttgtagggagaatgaatgtgcaacgtggctgaaatctattttgtgtaataaaaggtgatacaagtcaaaaaaaaaaaaaaaaaaaa

SEQ ID NO: 292681 - DNA, 1000 bp, Homo Sapiens
agctgttataatgtgtattttttcctcaattattcttgaaatatttagagcctctcctgcttctaacatgaaggcctttagatgccagtctgccagaaatctggaaacagaggaaccggtgaagtgaagatgtaatggagatttagctaatgatgtacttcacaatccaccttggatctcctgcatgtccaaatctcagtagttaatcaagtgtctgctgccattaacagaacagaagtaatggataacagaatggaaataagagatgccagaactacttccataactaactcaccaaatcaaatcatcagtcctcatattcttgttttatttaatacaaggagaagaggccatgcactttccaaaaggtcaaagccacatagaataggaaggcaatctctagtttaaagctttctcttggagtgttttctccccctgtcttcaaagggtctacttgagagatagtggtgtttactgctgcagcatgtatcacaagataagaaatgaaaaatcaatctttcttaccaccctgttctctttcccttttttatcttttcccttttgtcaattatagaattatagggacatttttctctgatagctggaagttgaacctcaaccaggtataaaagatgcataacaaccttttagcagtaagtgtcaagtgagtgagcactatgattatcaaggtgactttggaaaccttttaaaaatgcatttttgcaaaacaagataacatatattgataaaaagtgactctcagattggtaatgccagaaaaaattttaagaggactcaccaaaagtactagatctatgtaagttgtagaatagagtgaagtttttttatatatttgtggtagcctccatcttttaaactttttgaactcagtagaaaaacagactgaaattttaaagacatgcagtatttgtatcattttaaattctgtaacactgggaattaaatatactcaactttagaggaaaaaaaaaaaaaaaaa

SEQ ID NO: 292682 - DNA, 1000 bp, Homo Sapiens
taaatctgacaggagcattctgaagccccattaggaaaaaatttaaatggttcctcttcatcgccttaatgtctaaagatcagaaatcgctgagcaaacccgcttttgtttccttcccagaaacaatgcaaaacaacaggtggagatagtctggtctttgccctgctgtgtgtgcctctgtagctcctcctgacaaacgtctgggaaaacagcctcaccccactctcctctctcttccccatttccttgtagctttattccttgcatctttgggtctactgagcagtgggtgctgaggtgacaggggaggaaccagttgttctgtagcctaggaactgcctcagtgtctttgccagaaaaaggcaaagaggcggacagtgcagggctcctccctcctacctcaggcctgatccatcgtgcccttgactttgccgtctcaaagtttcttagctgactttggctttcacatttgttctttccagagctaactgataagagtggaggaggaatgccttctcctaagagtcagttgaaagaaagacaagagagtcacatcttagcttttgcacaaggcattcgtggtcaggaataggttagggaatggtcacttctgattttccaacagttgctccttctctgaagagatcttgattcctttgggaagacaagaatttttcttaataacaaaggtcactttatgagttattccttctttcagttcatctcactggagcacagccaagatggacatgtttatggacagtgctctagatgtgaaaacagatagaactggtttgtgggacaggggcagcttgctcaggagagggaataacgcaggtcccttttcttggaaggcttgtactatggccatgacagtgacattgccctcaccatgatccctctccaaagtggttgtctttctttaccttgtgtcttctcttgtaaaaatgaaactcaaaaataaaataaatgtgtcaaatttcgaaaaaaaaaaaaaaaa

SEQ ID NO: 292683 - DNA, 1000 bp, Homo Sapiens
agctgctttggccacatgaagttctggtattcttttgagctaatatggtattgagtaaagtatactttttgcagtagatcatgccctgacctccaataaaaacctcttcaaaacaatgctgatttttgaattcatgattagttttagtaaattaataggtttggccattctaaaatccaaaattatgataactgtatttctaggggtatgtttcaccttgattttggcccggttctttcagtgttccgtttaccctttttactgaaagtaagtgacttaaaaggatggaagaaaaactacatggttggagtgtttttagatcagataaatatagaaaagtaaaatggaaaatgatactcaatacctagttaaactcatttcacttctcctgggagacgtattaagactggaagtcctattttatttaatcagtatcagtaaaaagacaaaaattacagtgtgaacaagagaaaaacaggaatagaagaaaaaagttgcaggttgaattatctatctggatattactagagttgtaaaacacaacttggaaactggaatttatgtgaagaaccaaacaacttaaaccagcatcacttttgtcttcaatttgccttccagtgattttagtttacaacctgcgttttgttatttgaaacacacacacttatatataaacacatgtaattttactattttattgtctttcctttaatcgatgaattgattaaatttagacaattaaaacatttctaaagtgagactgaaaataatatagaaaatctcattgctacttgtgattatcaaaaaaagtatgtattttctttctaaagttatctataaatatgtttttgatatgttggacatgaattaccctgtcatgaagcgtttaaattgttaaaatgctgattttcttattagtttgttaattgcctgttactagtacttgaccaatacattgtgctatatgtaaatgtgtaaataaatattgtaattttctcac

SEQ ID NO: 292684 - DNA, 1000 bp, Homo Sapiens; identical to SEQ ID NO: 224137

SEQ ID NO: 292685 - DNA, 1000 bp, Homo Sapiens; identical to SEQ ID NO: 224138

SEQ ID NO: 292686 - DNA, 1000 bp, Homo Sapiens; identical to SEQ ID NO: 224139

SEQ ID NO: 292687 - DNA, 1000 bp, Homo Sapiens
attcaccaccacaagacctattaacaagacaaaatgcctctatcccacaagccagatgcaggtctggggttcaaaataactctttggatcctacagagatagcctactgagggcaaagaaagtccttagataaagagagaatattgtatgggccatcaaccatttacttttccctgaatgttagaaactacaaaaccactaccttgtacccccatcaaaatcccacctgaaccatctaatcctataaacataaaggggtaaaattggaactctccagatgaacaaagacatctaaatatctgtagatagaaacatttatctatctaaatatattgatagacctgtcattgtattgattaatgacaaaaccctttagataattatcttccattttaaataaaattttatttcacaaatatgagccaagaaagaggaaagttgatttgaagtgaggattagaagtgaatgacaataaagtctggcagccaagcacgaaccaagactggcactatttttcttagtgtatataattgtttaaactgcaaggttgacatttattgtgttgtgtctaagttaatttcgatctaatgtacctgattctagcctctgtgaacaacaagaatatgtttgtgtatgttcacatggtgcttataatatttcactatcaattcaattaattcacataaattccatgtgaaatgtattcaacaatggaatattttctaaaacatttagtatacatttgaatgtattttaaaccatgccaaactactgctttaatgtcaagtttgcagaattgtctctgaaaataaaaaccctgactttagttgtaaaacaataaaagttagctacttggtatacggagatgttaatttgggatatggaggcatttttatcttctgtcactactacttaaaactctgatgattatgttagatttttttgctaactaataaagatttcaaatggcaatttaaaaaaaaaaaaaaaaaaaaaaaaa

SEQ ID NO: 292688 - DNA, 1000 bp, Homo Sapiens; identical to SEQ ID NO: 118655

SEQ ID NO: 292689 - DNA, 1000 bp, Homo Sapiens
ttgaaaacagtctgaatgaatttggtgaaaagtgggagttaaactctggagatggagctttctatggcccaaagattgacatacagattaaagatgcgattgggcggtaccaccagtgtgcaaccatccagctggatttccagttgcccatcagatttaatcttacttatgtaagccatgatggtgatgataagaaaaggccagtgattgttcatcgagccatcttgggatcagtggaaagaatgattgctatcctcacagaaaactatgggggcaaatggcccttttggctgtcccctcgccaggtaatggtagttccagtgggaccaacctgtgatgaatatgcccaaaaggtacgacaacaattccacgatgccaaattcatggcagacattgatctggatccaggctgtacattgaataaaaagattcgaaatgcacagttagcacagtataacttcattttagttgttggtgaaaaagagaaaatcagtggcactgttaatatccgcacaagagacaataaggtccacggggaacgcaccatttctgaaactatcgagcggctacagcagctcaaagagttccgcagcaaacaggcagaagaagaattttaatgaaaaaattacccagattggctccatggaaaaggaggaacagcgtttccgtaaaattgactttgtactctgaaaacgtcaatttatattgaacttggaggagtttggcaaagtctgaataggtcaacctgcaggcgtaactatttttgacctagtcagtttttaaacaatgtgcatttgaaggagttaattaaaagagagccaataaaatgattttactcattcagtatctgagtactggaagtgaaacatgaggaatgctttagtgtaatgtgggagaacttttttgtaaatttaatgcaattgaaaaagttttcaaattcaattaagataactagaattggattatggtgtaaaaataaaaaaaaaatttattcacataa

SEQ ID NO: 292690 - DNA, 1000 bp, Homo Sapiens
ctggcgtacgaggctgccgaaagcgacatcatgaagagacagcccaggaacccgcggacggacaaattggtcaatgagagactcatcagcatggcctacgggcagattggaatgatccaggctctcggtggcttcttctcttactttgtgatcctggcagaaaatggcttcttgcccggcaacctggtgggcatccggctgaactgggatgaccgcaccgtcaatgacctggaagacagttacgggcagcagtggacatacgagcagaggaaggtggtggagttcacctgccacacggccttctttgtgagcatcgttgtcgtccagtgggccgatctgatcatctgcaagacccggaggaactcggtcttccagcagggcatgaagaacaagatcctgatcttcgggctgtttgaggagacggccctggctgccttcctgtcctactgccccggcatggacgtggccctgcgcatgtaccctctcaagcccagctggtggttctgtgccttcccctacagtttcctcatcttcgtctacgacgaaatccgcaaactcatcctgcgcaggaacccagggggttgggtggagaaggaaacctactactgacctcagccccaccacatcgcccatctcttccccgtcccccaggcccaggaccgcccctgtcagtccccccaattttgtattctggggggaggagccctctcttcctgtggccccaccttggcccccaccccctccactatctcctgccgcccccactctggctggcttctctcccctgccccaaacctctctcctctctcttttctgtgtcagtttctctccctctcctcacccctctatccattcctcccgccccagccacctccctgggctcttttttactccccttcagccccccggctgatgccatctctggttctggacaattatcaaatatatcagtggggagagagaaaaaaaaaaaaaaaaaaaaaaaaaaaaaaaaaaaaaa

SEQ ID NO: 292691 - DNA, 1000 bp, Homo Sapiens; identical to SEQ ID NO: 224143

SEQ ID NO: 292692 - DNA, 1000 bp, Homo Sapiens; identical to SEQ ID NO: 224144

SEQ ID NO: 292693 - DNA, 1000 bp, Homo Sapiens
tctaatgaccttcttagagaagttgagcatgcctggcaagatcatttcatggaataagcagatgtttaaagttggatttttttttttttttttttttgagtactagcaatgcacagggaccgtgttcttaggttcttagtctgtgaatctagcaataggcagtccagatttctgagtcgtactatggttttgccttgtcactgtgaggccctactaggtgtaagcattctctctgaattttaatttcctctcattaaaataggaacaaaatttgctatcctttagattaggagctgaagattcatttccctgggaatgtttcccatttagcttcaagtttcagctcaaacatcaccttctttctgactcctttcattcattcctccaggcagtaaggggctaccatagtactttgtttatgcctgtattatatgacatcactgtagttgcttgactgtttctcctactgttctgtaaacttattaatgggtgagaatctaattttactcatcttgatggcttcatgatccagcacagtgcctcacacaaagaactattgggtgggtggatggatggatggaggaatggagacagttggcttaaccagatcctatatacagattattactggctccaaaggatgagtagataagaccataagaattggatcaatgtaaatcctcacctgccctttgaagagccaataagggcatctttgtctttaaatacagcaaatgttattcagattttgtacttgtctatctgtttacctcagtgtagatgatatgaggatggtataactatgtaaattgtttttgaaaataatttgtttccccacaacttttgaaggttttatttgttgttgttattactagttcagtcccaaacttaccctttccttttcagagagctaatggccatgcttttcttcaaggaaagaataatttatttgaatgaagtgggatacttgcataacacaaaaaaaaaaaaaaaaaaaaaa

SEQ ID NO: 292694 - DNA, 1000 bp, Homo Sapiens
aaggcgggcgcttctgctccttctcaccgtgcatcgagcaggtgcaacgcacatgccaggcgctggcagcgcgcggcttctcagagctgagcaccctggaggtgctgccacaggtctacaacgtgcgcactgtcagcctgccaccgcccgacctgggcacaggcacagatggccctgccggctccgacaccagccccttccgcagcggcacgcccatgaaggaggccgtgggccacaccggctacctgaccttggccagaagctggggtgagctgacccagaatccctgccctgctctccccagcgctaggagaccaggccagcccaggaaccagggaggtgaccctgctctctggcctcctggctgatgtcacagcactgagctcagcccaggccttcgtccactcatgtccaagaggcggggcatcccccacccagccagagcccctgacatgggctgcactcgctgaggccaggcagcgctgcggagaggagcggcagagtgggttgtctgccgcaggcaaccaggcaagtgtgtcggggctggggtgtgaatgccagcctgtgagtcccggaactatgtgggtacccctacccctcacagaagccaagggcatggaggaggtccctccacagtgacaacggtgtggggtaggggaggtgcattcaggacaccacccagggacagtgcctatgtgatcacctcttaaaggctaagcttaggggcatttcccaaagtggggacagagggcaggacgcccaggctgggggctctcctcgcccgccctggtgtctgacagcctcaaggaaggagcagtgcctgtgtcagccatggggcccttggagctgccactggtgcctagggggcctgggtttctgcccaggcagccagtggctgttgggagcctctgtttcccctgtgctgggggccttgagtgctatgctagcaggggcctggccccaagtgtgagtgatgagcaataaacgtaccgtccccctc

SEQ ID NO: 292695 - DNA, 1000 bp, Homo Sapiens; identical to SEQ ID NO: 118656

SEQ ID NO: 292696 - DNA, 1000 bp, Homo Sapiens
acctgcaagggcctctcatcctctggtccttctgccttgcaatcttcagtatcctgggggcagtgaggatgtggggcattatggggactgtgctacttaccgggggcctaaagcaaaccgtgtgcttcatcaacttcatcgataattccacagtcaaattctggtcctgggtctttcttctcagcaaggtcatagaactcggagacacagccttcatcatcctgcgtaagcggccactcatctttattcactggtaccaccacagcacagtgctcgtgtacacaagctttggatacaagaacaaagtgcctgcaggaggctggttcgtcaccatgaactttggtgttcatgccatcatgtacacctactacactctgaaggctgccaacgtgaagccccccaagatgctgcccatgctcatcaccagcctgcagatcttgcagatgtttgtaggagccatcgtcagcatcctcacgtacatctggaggcaggatcagggatgccacaccacgatggaacacttattctggtccttcatcttgtatatgacctatttcatcctctttgcccacttcttctgccagacctacatcaggcccaaggtcaaagccaagaccaagagccagtgaaggtttggagagaacaatgaagctccaggctctctcttctccagggcaccaagaggctgggcttagttttgggagaatgattaggttgccttacctgcatggtttccccagaggatgtgtgccccaaggtggctggaatttttgacagacaagaagggtgaccttgggatgggggtgtggtctgttactttaatgtttctgtttttaatgtgaaggccaagcaggccctgggatgggagtggggcggaggagggtcctaagagctgattatttaatttctatccagaaatctttcttcttcttgctctgtttttttaaattaaagatttcaacaaaaaaaaaaaaaaaaaaaaaaaaaaaaaaaaaaaaaa

SEQ ID NO: 292697 - DNA, 1000 bp, Homo Sapiens; identical to SEQ ID NO: 224146

SEQ ID NO: 292698 - DNA, 1000 bp, Homo Sapiens; identical to SEQ ID NO: 224147

SEQ ID NO: 292699 - DNA, 1000 bp, Homo Sapiens; identical to SEQ ID NO: 224148

SEQ ID NO: 292700 - DNA, 1000 bp, Homo Sapiens
tttagtgggatggacctctgtgactgcctggatgaagactgcttaggatgtttctatgcttgtcctgcctgtggttctaccaagtgtggagctgaatgccgctgtgaccgcaagtggctgtatgagcaaattgaaattgaaggaggagaaataattcataataaacatgctggataatctgcggtaccaaactatggagcctttaaaggtctttatttctaaaaatctgttactctaagatacattttaagcttgattatcatatgacaaagattttaaaaccatctcagtgtgccctaatttttcatcttgggtgctttaagattcactatttgatataaattcagataggctatttttcagtagtcagcgttaagcctgtctggatcaatataaacaagtagggtgtaggcagtcctctatttgcatgtttcccatgggcacaaatttcagtgacctagatttagtttaaataccagtttccttaccaggaaggaaagaaaactggtaaggaaactgttgttgttaaaatctaggttaaaattttagttagcacattgtaactgagtaattacatgaagtacaaacctctctgctagctcttcagtctacaaatcgctatgtaaataacagatatgcttcatgattgtgaccagtcatgttatttctttcaaattcttccagtggtttgtccctgtgcatctgttaattcagttcacgtacagcagagcatgtagttatgctgtctctctgtcatctacttgacattctatagaagtgaacactcgaaagaactggtcaacaaagatgaaagtgcagcaaagcaatgaaaaatgataacactggaagtgaaattttaatcaaacataaatgaatttgtagaagaagtcactgaccatgggaatgttgttcttgctgctgtgtattcataggagcttagtgaaggcaaacttaccaacacaaataagcaaagtggttgcaataaagacagatacgtccc

SEQ ID NO: 292701 - DNA, 1000 bp, Homo Sapiens; identical to SEQ ID NO: 224149

SEQ ID NO: 292702 - DNA, 1000 bp, Homo Sapiens
tcgccagattacagaaattacctggctttaatcaaccatcgtcctcatgtcaaaggaaattccagctgctatggagtgttgcctacagaggagcctgtctataattggagaacggtaattaacagtgctgcggacttctattttgaaggaaatattcatcaatctctgcagaacataactgaaaaccagctggtacaacccactcttctccagcaaaaggggggaaaaggcaggaagaagctccgactgtttgaataccttcacgaatccctgtataatccggagatggcatcttgtattcagtgggtagataaaaccaaaggcatctttcagtttgtatcaaaaaacaaagaaaaacttgccgagctttgggggaaaagaaaaggcaacaggaagaccatgacttaccagaaaatggccagggcactcagaaattacggaagaagtggggaaattaccaaaatccggaggaagctgacttaccagttcagtgaggccattctccaaagactctctccatcctatttcctggggaaagagatcttctattcacagtgtgttcaacctgatcaagaatatctcagtttaaataactggaatgcaaattataattatacatatgccaattaccatgagctaaatcaccatgattgctaaatatactttcatatttcatggtttactggcatcggaaatctctacaagttttaatgatttctccctccctctctttttttcctcctctgaagaaatttaggatttttctcttaaagcaaatactaaagaggaaaaaaaattaactttattgttgcttttatcaaagagtatgtaatctatactaacttgttgggaaattctgccaatgaacaacttttttataataaaaaaaaaaaaaaaaaaaaaaaaaaaaaaaaaaaaaaaaaaaaaaaaaaaaaaaaaaaaaaaaaaaaaaaaaaaaaaaaaaaaaaaaaaaaaaaaaaaaaaaaaaaaaaaaaaaaaa

SEQ ID NO: 292703 - DNA, 1000 bp, Homo Sapiens; identical to SEQ ID NO: 224150

SEQ ID NO: 292704 - DNA, 1000 bp, Homo Sapiens; identical to SEQ ID NO: 118659

SEQ ID NO: 292705 - DNA, 1000 bp, Homo Sapiens
ccgagatggtgtttactttatgtatgaggcactccacggcccccccaagaagatcctggtggagggtgccaacgccgccctcctcgacattgacttcgggacctacccctttgtgacttcatccaactgcaccgtgggcggtgtgtgcacgggcctgggcatccccccgcagaacataggtgacgtgtatggcgtggtgaaagcctataccacacgtgtgggcatcggggccttccccaccgagcagatcaacgagattggaggcctgctgcagacccgcggccacgagtggggagtgaccacaggcaggaagaggcgctgcggctggctcgacctgatgattctaagatatgctcacatggtcaacggattcactgcgctggccctgacgaagctggacatcctggacgtactgggtgaggttaaagtcggtgtctcatacaagctgaacgggaaaaggattccctatttcccagctaaccaggagatgcttcagaaggtcgaagttgagtatgaaacgctgcctgggtggaaagcagacaccacaggcgccaggaggtgggaggacctgcccccacaggcccagaactacatccgctttgtggagaatcacgtgggagtcgcagtcaaatgggttggtgttggcaagtcaagagagtcgatgatccagctgttttagtcacagactgagctgatcccaacaggccctggcagcgtctggacttgtgtaaacagcagcagtcacgttcctcggccgccacaaccaacaccaaagcaggaaaaccattttctgtacttttatatttctgttcaacctgttggtttctacaatgattttaaacattggaaagccagccttgtgtatatttttaaaaattatattcaaaatgagccaaagtgctcagagaccttctatgacacattagtgtcacatggttgcgtgtccagccgaagcagtgtaataaacatctccaatggccactgaaaaaaaaaaaaaaaa

SEQ ID NO: 292706 - DNA, 1000 bp, Homo Sapiens
atcctctaagtaagaattttccatattccttggaacatcttcagacttcttactgtgggcttgtccgagttgatatgcgtatgctttgcttaaaaagccttaggaaattagacttgagtcacaaccatataaaaaagcttccagctacaattggagacctcatacaccttcaagaacttaacctgaatgacaatcacttggagtcatttagtgtagccttgtgtcattctacactccagaagtcacttcggagtttggacctcagcaagaacaaaatcaaggcactccctgtgcagttttgccagctccaggaacttaagaatttaaaacttgacgataatgaattgattcaatttccttgcaagataggacaactaataaaccttcgctttttgtcagcagctcgaaataagcttccatttttgcctagtgaatttagaaatttatcccttgaatacttggatctttttggaaatacttttgaacaaccaaaagtccttccagtaataaagctgcaagcaccattaactttattggaatcttctgcacgaaccatattacataataggattccatatggctctcatatcattccattccatctctgccaagatttggataccgcaaaaatttgtgtttgtggaagattctgtctgaactctttcattcaaggaactactaccatgaatctgcattctgttgcccacactgtggtcttagtagataatttgggtggtactgaagcacctattatctcttatttctgttctctaggctgttatgttaattcctctgatatgttaaagtaatgggtgagaccagaaaaagaaatttcaataacagatcagtttggggtgcatgtatgattttgcagcgtcaaattggagtaagggaagatttctgtatacttgctggagaggaggaatgtgtatagttactcatttagatgactccaaaacttttattaaaaccaattttagttttaaaaaaaaaaaaaaaa

SEQ ID NO: 292707 - DNA, 1000 bp, Homo Sapiens
cacttcaggagagaacttcatagcacaatgtctttctataagatatttttaatgatttagtattttacaacatttgtttaccatattttgatataccatttttttctatctgcccagttttattaaaaaaactatatattattttctaaagaaacaatcatatttttatacaaaattatgttttcaggtaacgaaatagatgtagggtacagtggaacataagcagtgttacccctggctgggagtcagtattatacaacaaatggtgagctggaacatgccctgtctgtgctgtccctcctgtgctgggtcgcggatgtgtaggcaacattgccttatcacgctaggttcacctgacactttaaaaggaaaaaaagttccatagagttctgtggtcacaaaattgttttgcttttatcaaatactttaatagaaccaaagttgcagatattggaatgtatggaagtatctcagtctctgcataagaggattaaagtatgaaaggatcatttaatgactgttttacttataagtcattaagtaatccaccatttcttatggatgatgcttaagcctggtgaggtttgtactctaaggagcccagatcataatgcagtgcatttccttagcccttagagtttcttgcaaacatttaaaaaaagacatatttaagaaagaagataaagaaaaaacatatttaattactgtaaacaggtactgctttatgtttattttctctctacttcaaccaaaatcagatctttgaggttttgctgacattgttggtggttttgcacatgttctttctaattggatttatgaatagttctatgggttttcaaagatgaatcatgctaagaacacttctgctttttgatccactgtttgcagcagaattatatatatgtataggaaaaatccactttgaataatccatgttttgtatttggaaattgtttttaaaaataaaaaggaaaggaaatataaaaaaaaaaaaaaa

SEQ ID NO: 292708 - DNA, 1000 bp, Homo Sapiens; identical to SEQ ID NO: 224151

SEQ ID NO: 292709 - DNA, 1000 bp, Homo Sapiens; identical to SEQ ID NO: 224152

SEQ ID NO: 292710 - DNA, 1000 bp, Homo Sapiens
cacttgcctcagtgttctcatctatgaaataaggaccctcatgcccacactgtagagtcacgaagctcagagattattcccagcagcagccagcacctggcctggctgaggccattgcaccgttatcctggaaactgaggcagacactccagcccctttctgggatcctggccacgtcattgtgctcctgccctgcaggctggctcccgggggtctctgatggccaaccaaggggccacccagggacctctaactccacacatccaccacccgggggggtggtgggccacccctctggtctgtgttagggacagaggaaaacttggtgtgcctcctggtgtcacagaactggatcctctgcataccccagctcctccacatgccactgctaggggtaccccagctgctgccactcctgctggagggtgaactggggaccctgcaccctccgggaagccatggagtctgctggaggcaccatatcagcctgcgggactagggtggggagcaaacaggccagcggtggaggtctggacagttcaagtgtgatgcagctgtggcaaggagaaatccttccgcctctgggcctcaggctgcctgtccataaaatggggacatggccagctgacggacaactgagtctccggcccacctaccaccgccagccaggatcccccaaagtgtgcagagggctcagcagagaacagtatgggaccccctcaccaggcctggaacacctccagccacaaagaagccaaaggtcagtccctctgctccccagcaaacggtgcctcccaggcattctcagtgccagggcttcatccctgtgaaggcacagggcctgctagtgggcacaggggtggctagttggggcctggggcagaggagggctgcaccaggcgtcctggggaatgtgctcagtgaagacgacactgggctttgcacagcctggtgtcgctgtacagaaactgtcaagggaataaagtgttctttgtttttt

SEQ ID NO: 292711 - DNA, 1000 bp, Homo Sapiens
gcgaggagccgtcctctgagcccggcccttctcccccgccgctgccatcccagcagcaggtggaggaggccacagtccaggacctgctgtcctccctgtcggaggacccctgcccttcccagaaggccttggacccagcccccctcgcccggcccagcccagcgggctcggcccaaaccagccccgagctggaacacagggtaagtctgttcaaccagaagaaccaggagggcttcactgtctttcagatcaggcctgtcatccacttccagcccactgtgcccatgctggaggacaagttcagatctttggaatccaaagagcaaaagctgcacagggtccctgaggcctagagcctgccatgggctgggtgagatgaggggagacagccatctcaaagctctcctgggaccctggaggctgccaagggccacacgcggggcccaggagcccacctggcctccctcagggtgctgcctgcctccagggaggcgacgccaggccaggaggccacaagcttcagacctcaaagcccagagctggcgcctcttctcgccctgctcaggggagggtggtgctcgtggctgggttttctttttaaccatttttacaaaaaccagcctgtggcccagcttcagcagggtagagtgtgggggggccagctcagcctcttccgttgccttcgttcctgacgcccaccctggactctagggaacagcactgtgagcaggggctgtccagccccacccctaagccgtctttcccaggaatcctgggtggagtccaacacaatcacacggagaccaccatctgagcctatgtcatttgtcctcattctcattccagcatgagcgtttctgagtctcttcaagacgaatctagttttcaccttcacaggatataaagggatcaacctagaggtgggtgggagggtcctagagggcaggggaacaaccattttccaaccttggctttaataataaaaaccagctgcactgag

SEQ ID NO: 292712 - DNA, 1000 bp, Homo Sapiens
ctggcctaccactatccctatacctacacagccctcatgactcatcttgacatcctggaaaagagtgtcaacctcaaagaggtctacttccggcaagatgttctctgccagacgctgggagggaatccgtgtcccttggtgaccatcacggccatgcctgagtccaacagtgatgagcatctagagcagttccgtgagtaaaatgggatcctcttcgtagaagatttgactaagggtgtcctttatagtcttggaagcattctgtctcttttagatcaaaagctccataaagggttggagactgtctgtctttgtagaaatacacccccagcttttcttggtgtgacacaaaggttaaacattaatgttgctttgttgttaaagggagagaaaatgaaatgaattcaaactgtccggcagatgaaatgacagtttgctaatgatggtcacttcctctcttaaaacagaaccaggaccctgaatcatattttccaacttctaatccagggacttttctcactgtgctcactgctgttatgtgactctcagtcagtcaaggtttggaaagaaagaaagttgagtttttaagccctggctaaagaatccccttgataacctgaataccatttgtgtctgaagggctgaagatgtggacaggctctagctaagaactttgaaacaaagtcaaagccaaactcatgcacacacacgcagacacacacaaatatacgcatatggacatatagacaaacacatagacacatgtagacacaaacatatacacagacgtgtagacacaaacatatacgcctagacgtgtatacatgtgtagacacaaacatatacacagatgtgtatacacgtatacagacacgtacacacaaacatctttaaatgttgggcttctgtgcctaagtgcatatgtgcgactgacctgttgacctgttacgaactagcttttgaaaatggcttctgacatcatttcagaccttaggtaggc

SEQ ID NO: 292713 - DNA, 1000 bp, Homo Sapiens; identical to SEQ ID NO: 224153

SEQ ID NO: 292714 - DNA, 1000 bp, Homo Sapiens
gccacaggcacaagggctgcagctgcttcttccaggaaactgacacagggagctcagcggcctcagatcctgggacccctgggccgtgcctgccctccaccttgagtgccatactcccaacagctccaggtacccaccgggggatgtgcctgctcaggaaacctctttgctccacacagcatggggcttcagctgctggcccaaggccaggagcgctgggttctgcagcagggctcagcctcaggggcgttaagaccctggatgacatcaataaagggacaggaagggccatgttgccacatgagcaagcttgggtgctcccaaggttcaaatactttttattagacacggccaggcagagaagaccatgggagttcccgaggggccccagctttcaagggcgacgggagagacacaggataaaaggttaaaagtgcagaggcagagtctggggctcaggttgggtctagggtgtcctcaaacaggctgaggaggttccgaggctcaaaggaggggaaggagccccgaggaggctctgagttgatgtcacttaggtccagggcatccctgggaggagagagtagtgacactcaggatccaaaagctagccctgcccaccccagcccctggacctgcttacctgggtgtgcacctgctccggggggtggaggtgctccccacagtccgggccaggacagcctcaggggagagtgaaggcctgcaggagggcaggcgagacaaggagggtgtccagggctagggagtgccggatgaaaccagctctgtccctgtgcaggctccaggctcccgcctgacaaacaggcagggagccacagtcagggacaataaaaacttggtgcactctgaaagcagcacttggacagccttcaaagtccttccatctggctgcactccaaggccccctctgtccttttcagaacacatggacttggaggcagatttgaaataaacttttagtaaatgtaaaaaaaaaaaaaaa

SEQ ID NO: 292715 - DNA, 1000 bp, Homo Sapiens
aaatatatatatgaaaatatatattaaaatgttctctaaatattttctgcttcttgcaggtctctttttactagatcatggctgttcttcccacctcatccctctgaaaataaaaatgtattgccctccccaccatccatcatagccaggccactaacttgacttggtgcaagagattcttgctgcgaactttgtagagccagtgtgcagatagaatttggctttgagggttcctgatggctttttagtctttaactgtgtgtgtaccagtctcacatttggcccaaacctcaggattctccctctgcctgtcttacttcatggtactagaagaccttcctcgccactctctccacatgagagagtcagctgccctttctcctgtgcctctgcaggaagaactctcttgcatggcacatctcagctcctcattgagggatagttttctttgataagaaacctggagtccatttactctgacctctctttaaatctatatccagagccactagcccaggaaaaacttgggtgacccgtaatttctcttctcctgctgtccttttgctcttacgccccaccccaactccccttaaattttacaggcttatgacagtttgtatgtgctcagccaatgagcagaaaacctggaaagaatttctggactttagcccaccagtttgtctggttgactaacctgctgagagctaaaattggcacccattgccccgtgccttcaggcagtctcctggggcagagtatgccaccatccgaatatcaggcactgagtgggatgtgggtgatgctcacatgactggctagagctttgggggtggggtgggggttaactactatttttttggccatgatctctttccccttcctttttttttttaattaaataaatggatcaaattaaataattcaagccctgccttcaaaatgaaatttttttttagtattatttagcaaaaacaataaaacccaaatttttttaaccatc

SEQ ID NO: 292716 - DNA, 1000 bp, Homo Sapiens; identical to SEQ ID NO: 224154

SEQ ID NO: 292717 - DNA, 1000 bp, Homo Sapiens; identical to SEQ ID NO: 220439

SEQ ID NO: 292718 - DNA, 1000 bp, Homo Sapiens
tatgaaaagatcctcaccagaaatcagatagagacggtgctctcaacaaggatccagctagaagaagacataagcaaaaaaatggacaaagatgaagaggctttgaaggcagctcaagcagaactcaaggaggcccgacgccagtggcaccacctgcaagtggaaattgaatctctccatgctgtggaaaggggccttgaaaactccctacatgccagcgagcagcattaccagatgcagctgcaagacctagagactgtgattgaaggactagaaaaagagctacaggaagtaaggcgcggcatcgaaaagcagcttcaagagcacgagatgcttctcaacacgaagatgaggctggaacaagaaatagcaacttatcgccacctcctagaaaaagaagaaatcagatattatggttgtatccaaggtgggaaaaaagacaaaaagcctaccacaagtagagttggttttgttttaccatcagccattataaatgaaatatcttttactacaaaagtcccacaaaagtatgagaatgaaaatgtagaaacagtaaccaaacaggcaatcttaaatgggagtatcgttaaggagagcactgaagctcatggcactattcagacagagaaagtggatgaagttattaaagaatgggaaggttctttctttaaagataaccctcgattgaggaaaaagtctgtttctcttcgatttgatcttcatttagcagccactgatgaagggtgtttagagactaagcaggataatctaccagatatagaagtcaggcttatcatgagaagatcatgcagtattccctctatcaaacctccatcaacagctaattaatccaaagatagtatttgacttgattggaaaatgttaggatggaccaaggtgggccataccaactccctctgtcccaaaatgtaagttattacgtatgtatggaaaatgttatgatcaatatgtggttctcttcagaaaaaaaaaaaaaaaa

SEQ ID NO: 292719 - DNA, 1000 bp, Homo Sapiens; identical to SEQ ID NO: 224155

SEQ ID NO: 292720 - DNA, 1000 bp, Homo Sapiens
ctcttcactatggacatctggaggcggctgcgtccccgctccggcgagcgggagctcctgctggtgggacgcactgggataccctcaacacccccagcccctcaaagccgtctcagcttcctcctgcccgaaacaccaccattggagcggtatctcctaggcctcgtggtcatggatctctggctggtcatagtggcactcatcggcgtgagtgtggcctggatccccgtcctgcaggactccaacagcgggcaactcttcatctacatgcagtcagtgaccagctccctggccccaccagtgactgcagtctttgtcctgggcgtcttctggcgacgtgccaacgagcagggggccttctggggcctgatagcagggctggtggtgggggccacgaggctggtcctggaattcctgaacccagccccaccgtgcggagagccagacacgcggccagccgtcctggggagcatccactacctgcacttcgctgtcgccctctttgcactcagtggtgctgttgtggtggctggaagcctgctgaccccacccccacagagtgtccagattgagaaccttacctggtggaccctggctcaggatgtgcccttgggaactaaagcaggtgatggccaaacaccccagaaacacgccttctgggcccgtgtctgtggcttcaatgccatcctcctcatgtgtgtcaacatattcttttatgcctacttcgcctgacactgccatcctggacagaaaggcaggagctctgagtcctcaggtccacccatttccctcatggggatcccgaagccccaagaggggcagattcccctcacagctgcacagcagctcggtgcccaagaactggccaagccagcaaagcgggagccctgaaaaattaggggggaaatgggagaaaataatgtgacatttcaaaaacagcaccaaagcagtcagcattggaaggaaaattagatttctgacggacaaaaaaaaaaaaaaa

SEQ ID NO: 292721 - DNA, 1000 bp, Homo Sapiens
gaaatgccctcacagcatatgccttgtttaagattgcaacacctgctcggtataccgtgactttgggaggaacatctgtcactgtgaagtatctgcgcagtcatggctacatgtccacgccgccacccgtcaaggagtatctgcaggacaggatggaagagacaaaggagcttatcacagagaaaatggaagaaacaaaagatagactcactgaaaagttacaagaaaccaaagaaaaagtttcctttaagaaaaaagtggaataaggtgccttatatagcagtatagaaaattcctgcactttaaccctttggaaactatgggcaaagatacatgtgtctgattatttttttggttagttgccgaaatatactagttctctgagggttaaagaagtaaaatacctttttaaagttaaatatcactagaaaaatcagtgttattacaagggaagaaatgaacccagtttaagaatttgccatcagtagcagtattaagcagtggttaatgtcttagaagtcagacttctttttcaaggtcttcagaaccacacttgatttctgttttgttgcagctgtaattgacacacactaggcagctgactccttgaatatccagtgtgacccataaaatagtctgttaataccggatcttaatttttatgttattcattaagattttaactatattcagtacgtaatttggagacaaactagcatcatcaaaactgcctgtaaataaggtgtttagtctttctataaaaacagaatagagcagttacctaccagttaaaatatcttatatgaagaaaatagaataaagatccagtcatatatgtaaataagatgtactgattgtacgtaaatgaaaaatggaccctttaaaaattatttttacctgaagcttgtcataatttttttaaagcaaatatatatatggtgatggtacttttcaaagtgtgtattagtggtgatcacctcaaacataaacctctgttgtg

SEQ ID NO: 292722 - DNA, 1000 bp, Homo Sapiens
ggagagaaaccctatggttgtcagcaatgtgggaaagcattatctgatctctcaagctttcgaagacacatgataacacatactggaaatggacctcataaatgtaagatatgtgggaaaggctttgattatcccagttcagtgcaaagacatgaaagaactcacactggagagaaaccctatgaatgcaaggaatgtggtaaagccttcagtcattcaagttacttacgaatacacgaaagagttcatactggagagaagccgtataaatgtaaggaatgtgggaaaccattccattgtcccagtgcctttcataaacatgaaaggacccacagtatggagaaaccctataagtgtaaagaatgtggggaagcatttcattgtatcagttcctttcataaacatgaaatgactcactagagaaaacccctatgagtgttgaacatgtgagaaagccttaagtactttcagcttcttacaaatacataagagactcacactgaaaaaagttgtatgaatataaaaatatactaaaaccttccatttttttcagtaccttttgaaaacatgaccaaactcatacttcaaaaatatatatataatgaatgtgaggaatatgaaaaaactttctttctctagcaaactttcaaaggtggttattataacatactagcaatggaccttactactgtaaggaatgtagaaatgcatttactagtcctaactcatttcagttacatgaaagatttcaaactgcagagaaccactatgaatgtaaacaatgtggtaaagcatttagtagcttcagtttcttttgaatacagtcttctctagtttctgaggtgaattgattccagcaccctcaggaatacctatattcagagatattcaagtccctgatattaaaaacagcatatttgcatataatctaggcacatttttctgtatatcttaaatcatttctagattacttataatacacaatgcattgtaaattctg

SEQ ID NO: 292723 - DNA, 1000 bp, Homo Sapiens
tgctattttttaatttttattttaatagagacagggtctcactatcttgtccaggttggtcttgaactcctggcctcaagcatccctcccagcttgaagtgtcaataaaggaaggcaataaaatgtagagatggagttaggtgatgccacgctgggattcactggtggcctatcttacatatgatttcgaaggcagacatgaggaaggccttagtcacattttagagccagccaaattcacatgggctgtgtggccccctgattctagcccattttcctgattctctggcttgtcaatcaagagtatcctccaaatctcttgactttccttttttcagaggtgtaggtttccaaagatgtccccagaagctccacattcaagttctatctacagtttggtttttctttaagtattgtaatgtacataccagagagataatgcagactgtcatgggtggggaatgttctctgatgctcaactcccctagtctgcagattgagttggtaggaggtgtgatttgtttacatgcacctttgttcctgctggtagtgaccttgttcttgattcagcctgacagctactatgctgccatcagaaccaacttgatgagagctctgctgccctgtgcagtgactggtctcatccaggactctcatgtgagaagcaacaccttgctctggtcaggaaatgtccagtgtttcctgttatccacaggagaatgtaatgcctcagttcattttcagttatctttgattatatgtgattgacaatgtgtatttttgagggagcaaagatttctgtacatatttcttaaaaatagtttattcagccactgttcccagccacaatttttatcttgaccataatttgtcattcttttataatccccgaagttaaatcttgctgttatggtgctgtgttgcccaaaaccaccagtactaaaaaaactgttgtcaaagaggatgtaataaattgtagtaataaatatgaccacaagcc

SEQ ID NO: 292724 - DNA, 1000 bp, Homo Sapiens; identical to SEQ ID NO: 118661

SEQ ID NO: 292725 - DNA, 1000 bp, Homo Sapiens; identical to SEQ ID NO: 118662

SEQ ID NO: 292726 - DNA, 1000 bp, Homo Sapiens; identical to SEQ ID NO: 224159

SEQ ID NO: 292727 - DNA, 1000 bp, Homo Sapiens
tgtcactgctcagtgtgttcctttgctcacttcattcactcactcactcattgacaaataatgctcattaggcaccgggaacacagcaaagagcaaagtggatgaggacctccccctggggatgccacctaatggtggagacaagaaatgaacgacagataaacacgcacagttattacagatggaagcaagtgcttcaaaggaaataaacagaatgttgaagtagagtccacagaaaggtccccgaaggatgaaaatgcaaatagctgaaggggaaggaaaagtgaccaaaggcaggcatggtggggctggcatgagtcagagcacctggccttgtaaagccaggaaggaatcagtattttattctaagatcaaaggtgtgacatttggcctctccagaagcagaagagtatcacgatctgactgcattttaaacaattgttctggtaactgcatgaagaaggtctggggactcacacaggagctgggcactgagtgctcttgagccacccatttggaatttcacagaggcccacaaggcaacatattctgtgtggcacaaccgatcaggaattctaggagttctcggtgagatcaatggtttttttctggcgtttatgtaatgcttctcaactcaaggggctcctttattacttttgaatgtttttgcccaaatgtctataccaaagataaatttctaaagcatgaactactgattttgttttcatgaaaattcacatttgaaaatgaaaatgattacttttcaaaagtactgtaaacggcaggaaagatccaaaattgacaccctaacatcacaattaaaagaactagaaaagcaagagcaaacacattcaaaagctagcagaaggcaagaaataactaaaatcagagcagaactgaaggaaatagagacacaaaaaacccttcaaaaaattaatagatccaggagctggttttttgaaaggatcaacaaaattgatagaccgctagcaagactaat

SEQ ID NO: 292728 - DNA, 1000 bp, Homo Sapiens
gtacatgtggtcgtaccatttaattggcctcatctggactagtgaattcatccttgcgtgccagcaaatgactatagctggggcagtggttacttgttatttcaacagaagtaaaaatgatcctcctgatcatcccatcctttcgtctctctccattctcttcttctaccatcaaggaaccattgtgaaagggtcatttttaatctctgtggtgaggattccgagaatcattgtcatgtacatgcaaaacgcactgaaagaacagcagcatggtgcattgtccaggtacctgttccgatgctgctactgctgtttctggtgtcttgacaaatacctgctccatctcaaccagaatgcatatactacaactgctattaatgggacagatttctgtacatcagcaaaagatgcattcaaaatcttgtccaagaactcaagtcactttacatctattaactgctttggagacttcataatttttctaggaaaggtgttagtggtgtgtttcactgtttttggaggactcatggcttttaactacaatcgggcattccaggtgtgggcagtccctctgttattggtagctttttttgcctacttagtagcccatagttttttatctgtgtttgaaactgtgctggatgcacttttcctgtgttttgctgttgatctggaaacaaatgatggatcgtcagaaaagccctactttatggatcaagaatttctgagtttcgtaaaaaggagcaacaaattaaacaatgcaagggcacagcaggacaagcactcattaaggaatgaggagggaacagaactccaggccattgtgagatagatacccatttaggtatctgtacctggaaaacatttccttctaagagccatttacagatagaagatgagaccactagagaaaagttagtgaatttttttttaaaagacctaataaaccctattcttcctcaaaaaaaaaaaaaaaaaaaaaaaaaaaaaaaaaaaaaaa

SEQ ID NO: 292729 - DNA, 1000 bp, Homo Sapiens; identical to SEQ ID NO: 224160

SEQ ID NO: 292730 - DNA, 1000 bp, Homo Sapiens
accacatagaattatccgaccccagatgtcaaaagtgccaagggccatgagccctgccataaactgatacatcgcacccctcttttaggatcccatagtttcaattcatgtaagttcaacagacacctgaagtctagcatgtgggaggctaaggatggagctgggaacacaaaggcagctgataagcaggttctgcttgcaaagaggcctcagtccagtgggagaaacagacctgggcgcaaacaactccaggacaaggcaggacatgataaagattataaagcaggtccaaggaaagtgccgccagtggtccaaggagggagacagagggtcgtcccaacagggggaggtagggctttgaaaacaccttcatccaggctgggcgaggtggctcacgcctgtaatcccagtagtttgggaggccaaggcgggcagatcacctgaggtcaggagttttagaccagcctggccaacatgacgaaacccggtctctactaggaatacaaaaattagccaggcgtggtggcaggtgcctgtaatcccggctattcagaaggccgaggtgggagaatccgttgaacctgggaggcggaggttgtgatgagccaagattgagccaaaaaaaaattagcagaattggtgttgggccctgaaaaattagtccgattttgtggtggtaatgggagaaggacatcccaggagcagggtctggtgggaggaaagggaaggaggaggctaaggctgcccaggaggccttggataccaggcttggagctggtaacctccagggcttccagcacggggcctctgcctggtgtgacagataccggctggcctcacttgatggatctcagtactgagctgggcatttctctgccccccaacttttttctttttaaaaataagatggggagtgttcataaaattatagatgtttgttgtaaaattttggaaaaccctggaaattatagagaaaataaacataatctatactcccaac

SEQ ID NO: 292731 - DNA, 1000 bp, Homo Sapiens; identical to SEQ ID NO: 118663

SEQ ID NO: 292732 - DNA, 1000 bp, Homo Sapiens
gcaggctaatcctagtgttttggagagagatgtggatacacaagaatttaacctagaaaaagctcgtttagaagtgcaccggtttggtatcacgggttatggaaaaggaaaggagagaatcctggaacaggaacgtgccattatgctgggcgctaagcctcctaaaaagagttatgtgaattacaaggttttacaggagcaaattaaagaaaaaaaggcagcaaaggaagaagaaaagagactggcccaagaaacagatattttcaagaaaaagaagaggaaaggacaggaggacaggaaatccaaaaagaagtccgctcccagtattttgtcaaatggacggattggacaggttggaaaattcaaaaatggaacactgattctgagcccagttgatatcaagaaaataaattcttccagagtggccaaatgaagtactttgtcaaataaaacgaggatgggaacaactgagtcaactgcagcggccctggaccctgtgcgactctagatagatcgttcttaacacgcatttcacagactgctttttcattttagaaaaaaagtcaaacagaagtaacatttctagttgccgaagtgtctgcttcatggtgctgaacgtgtcaggcccagtgcagcatgaatgtgaagtgaacccactgaaaagtgatttttaatgttctccagcaaacttcactcctgtttcatgttcactggtatttggtgcatttgcttgtaatacagttttttataactttactgttttgtaaatgctagtagtttacattaaattgccttatatttttaatgatttaatgttatgatatcatgaaagaaccaagaatctagtaatttatcagttttgtggaaaagcagttttaatttttagcctaccatgtgtacaaaatctacttcataagaagttatataaataaaataggtttgtagtataaaaaaaaaaaaaaaaaaaaaaaaaaaaaaaaaaaaaaaaaaaaaaaaaaaa

SEQ ID NO: 292733 - DNA, 1000 bp, Homo Sapiens
tcgtcaaattaagatagaaactcgtggtagggactctccacctacaatcacaataccagtaaatataaatcatgctgctagtggttccttcagagaatctgtggacgctcaagaggaaatcaggaaagtggagaagagagctacttatgttcataaagatggactaaattccactgatcacatggtgcccgacactgaaagttatgatgcagttgaaatcatccgcaaggttgcagtgcctcctcgcctgtcagagcacacacagagatatgaagcggccaaccgaactgttcaaatggctgaaaatttcgtgaatgaccctgaaaatgaaataaacagatggttcagggaatttgagcatggcccagtttctgaagcaaagtcaaatagaagagtttatgcaaagggagaaacaaaccataacatacaacaagaaagtcgtacattttgtaaggaggaatttggattaacatctttaggaaacacgagttttacagacttttcttgcaaacatcctagagaactgcgagaaaagattcctgttaagcagcccaggatctgctctgaaaccaggtctctaagtgaacatttctcaggcatggatgcatttgagagtcaaattgttgagtcgaagatgaaaacctcttcatcacatagctcagaagctggcaaatctggctgtgacttcaagcatgccccaccaacctatgaggatgtcattgctggacatattttagatatctctgattcacctaaagaagtaagaaaaaattttcaaaagacgtggcaagagagtggaagagtttttaaaggcctgggatatgcaaccgcagatgcttctgcaactgagatgagaaccaccttccaagaggaatctgcatttataagtggtaaatgagcttgcaatgtgttaaagaagattaaccatttaaaggcatgtgttccatagccaaaatgatgtacagttaaaaagagtgcgtggaaacaaccaaacaatata

SEQ ID NO: 292734 - DNA, 1000 bp, Homo Sapiens
atatctattacatttgcctagaagcagaattttttgaggaactttaaaaaatgtacagatacctaggtcccaactttgtagactgattcaagagtgtttgggatttggtataggaacttaatagacctcacagggtgttctgatgcataatcagagctgagatcaactggagttgatgatagtgacttggattattagttttgtgattagtgcaaaacaaatgtttaatctgatcttgacttttcttgccacccagtatgtcagggtggtttttggtttttgaatgttacaaaataaatattttaatttatacctatgtctaaaccttagcctagttaaagatttcccaactattttttccacctatccctttttttaaaagaaaaattacttaaagaatgaataaatgagatcctaaaagtgttgtcatcgaagacagtgagccattgtgtgtggatctctgcttttgttttgtacctagtaattatattgcagtgtcattgaagaccacataatcttcactgaacataaatgtgttcatctaaagcaatctcttagtacatcaatttggtgcattttaattagagaaaatcattttctctattgaagagaatccatccactcatgtcctataaattatagtaaataaggaaaagcatatataacattctgaatttcctaggtgtctttggaaacaggtaagttactcaggtgaataaaggtgaaaaaagtcttgtcagaaaaggaatgattatattagccaaatttaattaccaggttttgatcttcattaagcaaagcaaagaacttctttactgattccttgtccttcagtaaggaaaaagacaaaactctccttagtttacacattatttatggtcagtttttaataaatcttgttttttttcttaaccagcaagagaattgatacaaagtataaatccagagtcatgtagaaaacttggaagtattaataaaacagattacagtttgtgcactg

SEQ ID NO: 292735 - DNA, 1000 bp, Homo Sapiens
cagagccgcggcgccggaggcttatgtacagaagtacgtcgtgaagaattatttctactattacctattccaattttcagctgctttgggccaagaagtgttctacatcacgtttcttccattcactcactggaatattgacccttatttatccagaagattgatcatcatatgggttttggtgatgtatattggccaagtggccaaggatgtcttgaagtggccccgtccctcctcccctccagttgtaaaactggaaaagagactgatcgctgaatatggaatgccatccacccacgccatggcggccactgccattgccttcaccctccttatctctactatggacagataccagtatccatttgtgttgggactggtgatggccgtggtgttttccaccttggtgtgtctcagcaggctctacactgggatgcatacggtcctggatgtgctgggtggcgtcctgatcaccgcactcctcatcgtcctcacctaccctgcctggaccttcatcgactgcctggactcggccagccccctcttccccgtgtgtgtcatagttgtgccattcttcctgtgttacaattaccctgtttctgattactacagcccaacccgggcggacaccaccaccattctggctgccggggctggagtgaccataggattctggatcaaccatttcttccagcttgtatccaagcccgctgaatctctccctgttattcagaacatcccaccactcaccacctacatgttagttttgggtctgaccaaatttgcagtgggaattgtgttgatcctcttggttcgtcagcttgtacaaaatctctcactgcaagtattatactcatggttcaaggtggtcaccaggaacaaggaggccaggcggagactggagattgaagtgccttacaagtttgttacctacacatctgttggcatctgcgctacaacctttgtgccgatgcttcacaggtttctgggattaccctga

SEQ ID NO: 292736 - DNA, 1000 bp, Homo Sapiens; identical to SEQ ID NO: 224165

SEQ ID NO: 292737 - DNA, 1000 bp, Homo Sapiens
ttatcccaattacaaactctttgccagttatgcgttgtggatatcttctctcatcttatgatttgtctttactccctttattgtgtcttttgaagaataaaagttcaaagttgaattttaaaggtatcaactttatcagtctttttattttatgattggtgcttttttatgcttctcctaagaagtccttctctacccctaggtcattaagatattttcctctagtatcttctaaagactttatatttttgccttttatatttgtcttttgtctatatggaattgatttttatgaatagtaagtcttgatagctggtagtatacgtcctcctacttaattcttcttcaagattgtcttggctattcttggccctccctttgatctcttacataaatattcaaatcagcttatcatacatgcacataaaacacttcttgagattttgattgggatttaattggacctatagatgaatatgaggagaaatgatatcattataatattgagtcttttactccatgaacatgggctatttctgtattcattaggttatctttcctgtctctcaatagagtgtaaagttttctccatagacatttagcacatccttagttagatttattcataagtattttatatttttgctgttgttatatatgacatattttttagttgttttatttctgtttgttgctagtttttaaaatgtcatttttatataggtattatgttcagtgatcttggcaaatcctcttattctaataatttatttgttaattttcttgttttttcatgcacacatttgtattttaaatggaaaatgacatttttttttctttctagtccttacacctttggctttccttactgcattgttaaatagaagagtgttgaacagaagtggttatagaggcatctttgttttgtttatcatctcagagtaaaggactgcaatgtttcactattaaaaaaaaaaaaaaaaaaaaaaaaaaaaaaaaa

SEQ ID NO: 292738 - DNA, 1000 bp, Homo Sapiens
cgtggctggactcctgttcctcatgacagggatattttgcaccatttccctctgtacttatgccgccagtatctcgtatgatttgaaccggctcccaaagctaatttatagcctgcctgctgatgtggaacatggttacagctggtccatcttttgcgcctggtgcagtttaggctttattgtggcagctggaggtctctgcatcgcttatccgtttattagccggaccaagattgcacagctaaagtctggcagagactccacggtatgactgtcctcactgggcctgtccacagtgcgagcgactcctgaggggaacagcgcggagttcaggagtccaagcacaaagcggtcttttacattccaacctgttgcctgccagccctttctggattactgatagaaaatcatgcaaaacctcccaacctttctaaggacaagactactgtggattcaagtgctttaatgactatttatgcgttgactgtgagaatagggagcagtgccatgggacatttctaggtgtagagaaagaagaaactgcaatggaaaaatttgtatgatttccatttatttcagaaagtttgtatgtaacaattacccgagagtcatttctacttgcaaaaggattcgtaacaaagcgagtataattttcttgtcattgtatcatgcttgttaaattttaatgcagcatcttcagaacttgtcctgatggtgtcttattgtgtcagcaccaaatatttgtgcattatttgtggacgttccttgtcacaggaagattcttcttctgttgccttattgtttttttttttttaagtctcttctctgtctttgtactggaatcgaaatcataagataaacagatcaaacgtgcttaagagctaactcgtgacactatgcagtattgtttgaagacctgttgttcaacctctgtctctttatgttaactggatttctgcattaaatgactgcccccttgttaaaaaaaaaaaaaaaaaaa

SEQ ID NO: 292739 - DNA, 1000 bp, Homo Sapiens
cacattggaggttggcaggtttcgaggctgcttgagaggacttgggccgatctgggctgggcttggacgtgaccctggcacccaggcaggtggatcccagctggggcttccattcacgactttctggtccctggcaggacagagcgggatgccaccagcttgcccaaagggaagttccaggagctcctggtgggcatcgttgtggagaatgacgctggccgcggcgagatcaacgagttgaagcaggtggaaggggaggcttcgtgcagcagccgcaaaggaaagctgattttcttctatgagtggaacatcaaactgggctggaaaggcatcgttaaagaatctggagtgaagcacaagggattgattgaaatacccaatctttctgaggaaaatgaagtagatgacactgagaatttacaacgggaatgattttaccaacgaaagctatggcaacccaggaattgactgtcaaaagaaaactgagtgggaataccctgcaggttcaggcctcatctccagtggcactgggtgtaaggattcccactgtggctcttcacatgatggaactgtttgacacaactgtagagcagctgtatagcatcttcactgtaaaggagttaacaaataagaagatcatcatgaaatggagatgtgggaactggccagaagaacactatgccatggttgcactgaattttgtgcctactctagggcaaacagaattacaattgaaggagttcctatctatctgtaaagaagagaacatgaaattctgttggcagaagcagcattttgaagaaataaaaggttcactgcagctgacccccctaaatggttgaattaaaatttattataaggcattactttttgtaagcggaaaaagtgtcacatttacctcttccctatcttttgtttaaaaggactgtctttattttatattggatgaaatctatgaacatatatacaatgtaaagcagaaaaaaaaaaaaaaaaaaaa

SEQ ID NO: 292740 - DNA, 1000 bp, Homo Sapiens; identical to SEQ ID NO: 118666

SEQ ID NO: 292741 - DNA, 1000 bp, Homo Sapiens
cctctttgtggagggttggtgtaggataaagaatgttctattacgctgctccctcatctgtatcatttctctcctctctaattttcctgtcagttatattttggtggagtctgggtttgtgtatttgattcctatagaaagaccatcgctttcatgcatggaggaggggaatctacgcaaagaaaggctaccttactcctttctgtgactccaccaccagtctaggaatatcctgggagaagaattgcctctcaaagctgcttctataagcagcctacatcctagctaagcaaagaagaaacacttcccacatctagggctgtctaaaagaactttctgtgatgacagaaatgttctatatctgcagtgtccaatatggtaaccatataggcacatgtggctagtgaacacttgaaatgtggctagtgtgactgaggaaggaaaatttaaattttgtttaattgtaattaatttaaattcagatagccaaatggggctactagctattgtgttagatagcacggtatactttattctctttcttgtgttgtagaaccagctgggagaggtgtgggtcagtcatgggcttggtatcccctggtcttcactattctagcttgccattgaatttgtctcccagaggaaaagaaagaatggtatttggaattaaattcaagatgttaacttgacatctatatattgcacatattcctgtatagtgaatggatgacctcctgggaatagttcctgtgactgattttagtgataattgatcatgaagaaatggcagtactgctccacttcaccttcctagtgactattatgtgttcctagtcagagtgactcagcagagattattttgttctcttgtgcaatttattctgtgtcattttatttttgtaatattgtggcagctaaatgattattctgtgtatgtttttcaaaatattaggtggcttatattttttaaaaggctatgaaataaaaataaactatacgt

SEQ ID NO: 292742 - DNA, 1000 bp, Homo Sapiens; identical to SEQ ID NO: 224167

SEQ ID NO: 292743 - DNA, 1000 bp, Homo Sapiens
gtcgtccagttgcacgatccaagcctacgtaacatggaacttaattactctctggcttcagaggtgggtagaagattctaatattcaggcctcatgtatgaaaaagaaacggtcgagatcttctaaaaaaagaacagaaaacggagtgggagtggaaacttcaaatagagtagactgtccgccaaagaggaaagagaaatcttcataatctttgcaagcgcattgattaatgtctgcaaaggaatctgctctttgaggtttctttctgcactagagatttttctgtttttgaaaatagttcgtgctcttcggtttttgttattgaactgtttcatgtattttttaaagacatttgaggggaggaggattattatgaatgggaaaaaaagattttggttgagactaaattactcatcgtcaaaataatgtcaaaatagttttggggatcaccactatattttgttttgatttttaacctttcaacattttcctaatgatttgcagagataactgcacaattttgcatatcaatgatactggttcttactcccaccagtgtttcataatactaacaagatggtctctcctagcaagattatgtgtttaatgcttgctttggggtaaaataaaagtacgaaaaaggtggaagtcaaatcagtattctgtaattgttagaatttattttttaagaacttacaactcagaaaagattgctagactcaccaaaataataaatgttctttattttacaggtagtgattattagtgcttcatccccatttaaaaaaacacagtactaatgggtaacacatatggaggtttgctgccatatatattgtatcaaaatatcattaattaatataaaaatattaaaatcattcctgtccattccacttgtaaatgggaattcatgaaattaaatattactttaaaaaggaaaaaaaaaaaaaaaaaaaagaaaaaaaaaaaaaaaaaaaaaaaaacaaaaaaaaaaaaaaaa

SEQ ID NO: 292744 - DNA, 1000 bp, Homo Sapiens
ctccacccgccactgatcctgcaacttgcttctttctattctctgcctctgtttagaaatcttcacacaccactgaggcttcttgacttgccccttgtgacttgaaaccccagctcagatacaaattttcacctgccagccctgcctcctcctttctcccttttcctagacacaggactctgacaacttcatcctccttgtttagatgacttcccagtttccagtccccatttctccttctatcacttttcataaaaaaactcaggaaatatttgacatatcttccatttcaaattcttccattttatgcagatatcttgcccttcctataagctctcctcaaagctcaggaaacctggtctgctctcctgcatttagggaaggagaacccctgccaagacctttgctcactgcctgagaccccttccttagagagcacctcctttgctggtcagacatggagcctgcagttggtcacagatgatactgctttatttcagtttttacagttgccttcttaagattcccgtcttataaatggagtacagggaacctcaagtagtgaagtggaaatccatgtgtaaggctttgtggcttcaggtaccagtggctaaggtagttttaaagactttgttgattttagaaaaagtccatcttccatcccctacatggcagttaatacccttctatatggtaaaaccttagagattaccttaatctgctaggaacagaagcaagaaaaaccatggcgtaaacacccccagagtttttgttcatttgtttcatctttcttgataaagcccgaaggtagcccattcagggctgttgtggttggttgctccatcatgtcatcaatagcccatatcttttcttttttatcttccttagtataacaccaaactacctctctgatagctggtgttcatgaaatattttaccttcaaatgattgtacctttttatttgctttagagttctgaaataaaatgaaattccactgt

SEQ ID NO: 292745 - DNA, 1000 bp, Homo Sapiens
gacagtggcccagagacactggagaaagatctgcctagaaaggaggggaatgagaagaggatcccaaagtcagccagtgccccctcagcacacctctttgacagcagccagctggtcagtgcacggaagaagctcagaaagactgctgaaggtttgcagaggaggagagtgagctcacccatggatgaggtgctagcctccttgaagcgtggtagttttcatctgaaaaaggttgaacagcgaactctgcctccttttcctgatgaagatgatagtaataatatcttggcacaaataaggaaaggggtaaaattgaagaaggtacagaaggatgttttgagagaatccttcacacttctacccgatacagaccctctaacacggagcatccatgaagctcttagaagaattaaagaagcatccccagagtcagaggacgaagaggaggctttaccttgcacagactgggagaactaacaagtgacataacagaagaaaaatatcattcaagattggttctgattcttttggaaaatgacagtttaagcacttggttcctcagttggataacattagatccaaagtgcattggttcagtggtgtgaagaaaggaagcacaattggcaggttatcactttccagtcgttccaatagatgatggttaacatgaattttacatgtgcaatgttcctgactgcaatgaagaaaaggccttctggagatttctgttttttaagcacattctccttccatccacatatttacatccttgtaatggccagttaagctagggcttgctgtaagttggaagaacactgggttgacagagatctactgtgagctgtattgggactgctttgagaaccatctttcaatgcactgaaaagtcatctgaaaaaatagcttcttccatatcagcttatattaaatactgtgacactctgagaaagtttatcatcatgatagctgtaagtcaggcattaaaatcaaatggaaatac

SEQ ID NO: 292746 - DNA, 1000 bp, Homo Sapiens; identical to SEQ ID NO: 224168

SEQ ID NO: 292747 - DNA, 1000 bp, Homo Sapiens; identical to SEQ ID NO: 118667

SEQ ID NO: 292748 - DNA, 1000 bp, Homo Sapiens
aagatagagttgatgagaacattcttccactggcgaatcggccatgtcagagccagacaggatgtttatgaaggtaaactagctgaccagtactaccagagaactttactgaagaaagtctggaaagtctggcgttccgtagtgcaaaagcagtggaaagatgtggtagaaagagcttgtcaagcaagagctgaagaagtttgtatccagatttccaatgattatgaagccaaagttgctatgttatctggagctttggaaaatgcaaaagctgagattcaaagaatgcaacatgaaaaagagcactttgaagattccatgaaaaaagctttcatgaggggtgtatgtgcattaaatcttgaagccatgactatatttcaaaacagaaatgatgcagggatagactccacaaataataaaaaggaagagtatggtcctggtgttcaaggaaaagaacattctgctcatttggatccttcagctcctccgatgcccttaccagttacatcaccactgctgccatccccaccagccgccgtcggaggagccagcgcgactgccgttccctcagctgcttcgatgacttctaccagggctgcttccgcatcttctgttcacgttcctgtttctgctcttggtgcaggatctgcagctactgctgcatcagaagaaatgtatgtgccaagagttgtaacctctgcacaacagaaagcaggaagaactattacagcccggatcacaggaagatgtgattttgcctcaaaaaatagaattagcagcagtttagctataatgggagtttctcctcccatgagctcagttgttgtggaaaaacatcatccagtcacagtgcaaaccattcctcaagcaactgcagcaaaatatccccggaccattcatcctgaaagtagtacctcagcttccagatcacttggaaccagatcagctcacacccagtctctcacaagtgttcattccataaaagtggttgactaaagtg

SEQ ID NO: 292749 - DNA, 1000 bp, Homo Sapiens
tgtcccaggaaaaaaaaatgggaggggcaaatggctacagttgtaaatggataacatcatttagaaagccgaatttactgttcatctgagcggttacctggagtattatatctatgcactggtgagcatctcctgattccacttacttttctccctgtgaacagtttaccggtgccatgctgaagagaaagacatctaagtgataacatgaatgaagtcttaaaatttaaagtatttttactgctatataaactaaagactacattgtgcatattttgttaacactgtctcttgttatgataaacactgaaatagcatgttaaacagttgcctatactttaatataatcagttggggaaaactggccttttctcccccactgtatgattgtttcttgaaaggtaaattgctaattttatacagtgtaattctgttcttcacaaaataggtttcattattctatatttaaactgttggtcagaaaatgatctgcaattcaagtaagtctgcattacttttttctttaaaaagtactttaacatgccttatttattatattagcaaatgagctaataacagatgaaattttcattttttgacagatataaccttgcataagtagtatttagggtgattttgatactatctttagagttttgcattggatattaaaaaatatattggcacaatgtattggaagaaaatgagtagtatctggtttaatttttaatatttagggacattttaaaaaatcaatgttttaattagactaaaaattctttatattttttatttactttttaaagaaacatctgtcaaagtaatattgattccaaactgatgtttgtgtgaatttacatgtctattttcatgaactaagaatagagtttctttgagttgaggagaaaaaaatatatatgtgggtccatttattaggttaaagttgacccattcagtgtaaaaataaccatagtgtgtgagctaaaaaaaaaaaaaaaaa

SEQ ID NO: 292750 - DNA, 1000 bp, Homo Sapiens
cgacatgctggaacacggtgggaacaagatcctacctgtccttccacagctcattatcccgataaaaaatgccttgaacctccgaaaccgacaggtcatctgtgtcactctcaaggtcctccagcatctggttgtgtcagctgagatggtgggcaaggccttggtgccttattaccgtcaaatcctccctgtcctgaacatctttaagaatatgaatgggtcttactctttgcccaggctggagtgcagtggcgcgatcatggctcgttgcaacctcgaccacctgggctcaagtgatcctcccacctcagcctctcaagtagctgagattatagtgaactccggagacggcattgactacagccagcagaagagggagaacattggggacttgatccaggagacactggaggccttcgagcgctacggaggagaaaatgcctttatcaacattaagtacgtggtcccaacctacgagtcttgcttgctaaactaacagtggcagcagctgggacttgaaacctcccgttggtgttgggatcatctgtctctgttgcttttagcatctcattccttgtgacttccacagctttcttttctacagctgctaaaatagtggcttatgggccattggactgttagccctattgagagcaaggctttccaatacataaatagtgcctgtttcttagattacaatagtgtactgtgcttatttgttctaagagaagaattgcttctttatacagctccgacagaagcaggagtccgagttaaaccttcagttgtatagacaataaactataattttcatatgcaattcagcaattgctgttctgtgtgtgcctgccctgggggtgatgtcagaggttgtaagggaagagtttatgctgactgcttactaggtgtttgtcatggaagagaagcatgggttcagcagtgcctctctagcagctgtgcggaataatgtgctttgacgttcaataaaactgttgaatct

SEQ ID NO: 292751 - DNA, 1000 bp, Homo Sapiens; identical to SEQ ID NO: 118668

SEQ ID NO: 292752 - DNA, 1000 bp, Homo Sapiens; identical to SEQ ID NO: 118670

SEQ ID NO: 292753 - DNA, 1000 bp, Homo Sapiens
taggtagaaatgagtacaaactgattcagttctaaagttccaaagcactaaaaacttatctatggtgattacagtttgaatagtaggtatctctgtggaaggaagaaaggatattgtttgtttttttcccttttatttttaggatattgtttggaaagtaacacggggaaactttagaaatgctgttttctttttcttgatccttgatacatacatattttgtatgtctatacacttcacactttatataatacctcaaaaataaaaatatgaaaacagtacactgttgtaggttggtcaggaaagggaatgattgtggcttggacctgactatgagaagtagaaataatcagaaaaatcagaaatgattgcattggaagatcattcgaaggtagtattagtaagatttgctgatgagagtaatctagaaagtgaaagacagcataaagattgcagcttttttgttaactttaggactggtggatggttggtgtcatttactaaaatggggaggatttgaggtgaaaaaattttaggtgaagagaataatgctgagttttaggcaactattaaaatgtccattctgtagattagaggtgatgtcaggacataaatgaggttaatgtaatattacatattgatagaggaataggtcaatagagaagatacaaaagagtggttaggtgcatagatttttgaaatcagttaaattagtttttgatacttgatgtgtgacaggggaaactgtgtaagctgtacttgttatttctttgtaaaatgtcttagataataaaactaaatcataaagtagatattggtttaaaggatgtatacattgtcccttttacattgtaagcattcaataagaactagctgcggatgtaattttttttaaaaaagtccaaaagcagctatgggcagttgacaaaagaaaatgtaatgactacgtaacttgcgaatctgtttaccctcacttgcaaataaaataagtgcaaaaaaa

SEQ ID NO: 292754 - DNA, 1000 bp, Homo Sapiens
ccatagaattgagctatgaggatataaaaaacgttgttctgcagtatggattcaaggtagaggtggaaaaagaatctgtattgtcaacatatactgtgaatgatctctctatgatgaaatactactatgaatgtgtcttgtttgtggtccgtaagccacaataatggtctcaagtgataccacctggaaaaaagtttagtaagaacaaatgctgaaatcaacgactcaaaatcaactatcagtgatgacaggacacaacctcaaatcagtggtgccttcttattcctaacgaaatttagaaatagtgtctattttcttaatatgtctattgctttttcagaaatatactatgccatgcagatttgtactacacaagtaaaaatggaggaaatgtcttgaagtatactttttccttgaagcccagaattgtgtttcagtaggaaaaaaacctaatctccagtgtcttcatgatgctgtccattgcaagtctgccgaattaatgactaatagtattgaagtacataataatcttcctttttttgttgttttgtatgcattgcacatgtaacttttagaagagtctaaggatcctcagtcatattcaacatctggagttgggactttgttcactttcaatctaagaaaactatgcgtaaaatatgtctttttttttttttttcttcagagacaggatcccgctctgtctcccaggccggagtgcagtggcacgatcatagctcactgtaacctcaaactcctggactcaagcgatcttcctgccttagccttagcctcctgagtagctaggactgtaggcatgtaccaccgcgcctggcctgtgtctattttatcattcagattaatttaattttgtattttctggctcagatgaacttaaagaagcatcaaacatttcttttttatgaaatgttaaatttaatagcatcacaggccggtaaaatatattcaagtaaaaaaaaaaaaaaaaaaaaaaaaaaaa

SEQ ID NO: 292755 - DNA, 1000 bp, Homo Sapiens; identical to SEQ ID NO: 118671

SEQ ID NO: 292756 - DNA, 1000 bp, Homo Sapiens
ttttataaaatattgggttttcccttaagatagttgaagtatttttcttgccatgcctatttatttttgcaaaaaaattatctgctatatagaaccaaagatagattcgctttgctatatattataactatacttgcttttgcaataaaacaacttgtaattcaaaaatgaagattatctgcatatagtatttatgtgtgtgaataacatcttggcatgcagaaaataattttggctgctttgaacaggattgttcattctacacttccctgaaattccatttttgggagtgtctatccttcaatggctgaatagttccttaaatcagacaagctcctggctatcttcataaccagcagtgagtagatcttcttaatatagctgtctgaccacatgtggaaggcagctagacttattgtatttacagcctggccactctagacatatgaatccaggctgactgcttaagtgcccatctcgtttgatataaactgtagaaaaggcaagcactttgttctgagtcttttatctccaaatacatagttgtctcaaaccaagcaagctttatcaaaatggcttatttgcagaatagttccaatgatataaatgccaactggcaagtcattccaaactgcttgaaggagtagatgaaccagaatctgagaatttggaaataggtcacagaaaaagcctccatttggctaaatatgacaattatctgagtatggttaaatacatacaattaaatgtctgaagccaatgagttgtttattctaacttgaaatatatttttgtgagaataaatgttagaaaagttagtttattttggaaacctgccgtgaaaggaaattctaaaggcttaacatgaaactgtctgcatttctacctgttagacaatggttgctcttgggctcttgttatacagtcatatggctacacgtttatgtaaagtttgcaaaagtttggtgttttgatttataataaaactgttatattattc

SEQ ID NO: 292757 - DNA, 1000 bp, Homo Sapiens
aaaggattagactgcatttttttggaaactaatatgagcatgaagaaacagtatcacatggtttatgaatgtattcctcttcccaaggaagtgggtgacatggctcccatctattttaagaaagccataatggaatctgatgaagagtggtccatgaacaagaagttgatagatctctcttcaaaagatatcagaaagtctgtacccagagggttaccttacttctctgtggattttggccttcacggagggtttgcccatgtcattgaagatcagcacaaattccctcattactttggaaaggaaatcataggtgggatgctggatatagaaccaagactttggaggaaaggcatccgagaaagctttgaggatcagaggaaaaaagcactgcagtttgctcagtggtggaaaccatatgacttcaccaaaagtaaaaactattgaggtgtaccttccattttaaaatttttcttcagatcccgttcagttttatttccattgcatctaatgaagcaactgaccctcaggtcacaggcagagagaatcacagcagcagactgctctgggtcagtgacaactgtacatcaggagattgtgttgttttcttcttcacctgctcctatctatggacttcattttagtcaccatggagtaaaaacatatattcgatgatctgctcacattcctgctctctacctacttcttggtattccgaattgttcagttaatttagagaaggccttttctgaagggatatctagaaagcataggaaatccttggttcagagggaagtgggtctgcttcatggttgttaagtctactgtctggcttcttttgcatttttaaaaataagacgatttaattttaatttcataggattttatagaaaagctcttaattttctactagcagtatatagtatcacttctattctttttgttaaaggaaaaggaaatgtccccaaagtattaaagaattaaatgatactgaaaattt

SEQ ID NO: 292758 - DNA, 1000 bp, Homo Sapiens
cactagttttttatggtcatgttaatattattcctttgatcagaatgctactattatgttatcaaaggatggttgacacagtatcatctttagatttttctaaactgcagagctttttctgttctatcttaaccctattccttcccctgaggacataccagagtgtcagaaagaaagaatgagaactaacagttatacccttaaaaagcttcacagtttatgcccaaacagcagcctgtttgataataactgctttaaaggatagtatattccaaaatatttatgaagtagcatatatttaatacccttttcttttagtttttcctccaaaaagctgaaatctccaaatatttcaaaagtaaaaagtagaaaatatgtttgattacatttttcttttagtttttccaaacatgagagaatatactccaaaagtataactgtagctaaaatatacaatgcttagaggaatatggtaggagataaatttggataataagtaaatagcatattatgttgttttttaattattatactttaagttctggggtacctgtgcagaacgtgcaggtttgttacataggtatatacatgccatggtggtttgctgcacccatgaacccatcatctacattagatatttctcctaagctattcctcccctagccctgaccccctgacaggccccagtgtgtgatgttcttctccctgtgtccatgtgttctcattgttcaactcccacttatgagtgagaacatgcagtgtttggttttctgttcttgtgatagtttgctgagaatgatggtttgcagcttcatccatgtccctgaaaaggaaatgaactcatccttttttatggctgcatagtattccatggtgtatatgtgccacactttctttatccagtctatcattgatgggcgtttgggttggttccaagtatttgctattgtgaacagtgctgcaataaacatatgtttgcaggtgaaaaaaaaaaaaaaaa

SEQ ID NO: 292759 - DNA, 1000 bp, Homo Sapiens
actcatgtggaggaactcaaggaatgtttagaagaccaaaagtccccaatgacaggaacaaaagcaaccaatttttaactttctcttctcattcctgttttcattgatttcccacatgtagtccttttgctcaggaagtctttggggaaattaaggatctttgaagctctgaaataggtgatcaggttagtggtgtctgtcagctgtctaagaggttggaaaatgaactactcaagatagtcacgaaaatactgaaagtttgatttttctttccatatttgaattaattttttctgtttgactggaaggggtttttgtataactaaaacctcagcgcataaaggagatttaaaaggagcacatgatttagtgggtgggccatgaaactagagatgggatttgggggtgaatttgtcaatatctggattttaatccagacatctctgctaacaagcctttggtaagtcacttcagatacttttcctcctttttacaaagagagggctggcttagttatttgccaaagccccttccaggcctgaattccacaagtacgatttactgtagtgtcttatcactctttcatgtcacaatagcgtggagcattagagaaaagcctagacttttagttgatagccagttgaaatatcattgatagaattttagttttaggaaaaattggtttgatttctagctttattactattaggtatgtgagcttgggcaaatcgcttaatctttgagtctagttttctctcaaaatgagaacattaggctaaatgatttccgagtttccagctagtcctagagttctatatttctacatagttgaattattttatcatgctgttgctggggaatatgactaacccttttgaagctactaattttatgtcgagctttaaagtccataattgttatcttcagaaaatattatttgacctacagtatgtccaaatcaatttaataaaatcgctttataaaaaaaaaaaaaaaaaaa

SEQ ID NO: 292760 - DNA, 1000 bp, Homo Sapiens
accatgtgtctccatggtacagcaaagtagtttcagtattttcccctattttgctatatttcttgtagattgaatatttattgggcttttttttttcccatatgtttttctgttgttctaaacattgtgttctactgcaattccaaacagcctctctgtttccctccttcttggaagagtaatagggatgagatattaaatggcctttttagaattaagaactatatgttttctgtctcataaattagcaaatgaatatggagttagtagatttatgattctgatctacaaattaacatttttgatgccaaaattagggtcttggtaagaaatttctatcagttattgaaactgaaagtgagtcagattggtagcatgacgtaaggttttaacagttcagaagatcctcatggcagctttaatagccatgggttcttttggggtaatgtacacacctaactgcatttgttttgacttctttaatgtttgaatgtttcactctgttgtaaagtcagcataagccatcatgtgggctttcttcattcttcagcatattatccgcttcgctttctgtttatcacttttctgctgaaatgtacatgtttggctctactccttggttatttttaggcttaaaagcatgcagtcggtttttcagccacttttagatactcatgcaacatagcctacttttataaaatcaaaatgaaggtcttcatacgctgtacttgctaaaaatcaactgtgcgcttgaaagacctcttcatagttgagtaatcacctcagtacttaagcacttctgaacttgggtttcatgcctgccccccacaaattatgtttagaagcagcactgcatcttagcacatgctgccttatttctttccttcggcaggtgttcatgggaagtaggtggatcagtgaaggcataatgggctgtggagaccttcacttctagattattgattcaaaataaaaagaagccacaaagagtaaaaaaaaa

SEQ ID NO: 292761 - DNA, 1000 bp, Homo Sapiens
agccaactcaccggcatagacctgtacggctgcacccgaatcaccaagcgcggcctggagcgcatcacgcagctgccgtgcctcaaggtactcaacctgggactctggcagatgacggacagtgagaaggaggcacgaggggatttttctccattattcactgtgagaactcggggaagctccagaaggtgagggagaggggacaacgacatggttcccgtggatctttaacttccagacttgcccgctctgcgcctccggcactctggtgatgacagctcaggtttccctgcctgtcactgctcgggcagaggctgctgcccagggcttctgctccggtaccttgtgaagctgcattctcctgccggtttctccagttctggggacagtggtttgctctgagacctcgcttcctttatggatccaaggagacttgctttttcagtctgttcagctttttacttgctaggatggaattgcaatttgcaagcttcttcgacaggaaactacaagttccacactttaattttatacatataaatatatacatgtacatatatctatgtacaggggtattatatatatacatataagatgatgatatatataatgatgatatgtattactgagaacgtaaaatatcattacatagtgatagctggacacacaaggaattcacaactccccaaagaaaatacatctggatgacctgcctagcagtttccccatgagatagaggaatgtctacgtatttcattccctgttcctgccctgaaacaatttcaatcactgacaaatcattatcattcattaataatgtttactgagtgcccatatgtgaaagaaatccactctacattccacagatgcatttcctctccccacggggtttccattttaatgggaacaatgtagaatatatctgtcttccctttatagattccaaaaaaaaaaaaaaaaaaaaaaaaaaaaaaaaaaaaaaaaaaaaaaaaaaaaaaaa

SEQ ID NO: 292762 - DNA, 1000 bp, Homo Sapiens; identical to SEQ ID NO: 224174

SEQ ID NO: 292763 - DNA, 1000 bp, Homo Sapiens
agctggccaatgtgctttttactcgtgagctggccaagaggctccaaggcaccggggtcaccacctacgcagtgcacccaggcgtcgtccgctctgagctggtccggcactcctccctgctctgcctgctctggcggctcttctccccctttgtcaagacggcacgggagggggcgcagaccagcctgcactgcgccctggctgagggcctggagcccctgagtggcaagtacttcagtgactgcaagaggacctgggtgtctccaagggcccgaaataacaaaacagctgagcgcctatggaatgtcagctgtgagcttctaggaatccggtgggagtagctggtggaagagctgcagctttatcaggcccaatccatgccataatgaacagggaccaaggagaaggccaaccctaaaggattgtcctcttggccagctggtgctgcgaatcctgcctgctctgatcctcttgacccttctgggaatgtttgcacacctgacactcttgtgagactggcttatggcatgagttgtggacacctatagagtgttcttctctaagacctggaaagtcagcaaccctctgggggcagcaggactgggcagatcccaggctgggcatgggggtggcagaagagcccgagaaattgggtcagttccctcatcagcaccagaggctcagctgaggcaagaagagcaccatcactgcctatttctaggggctatacactccaactcttggttgatctctttctttttaaaaatatttgccaccaccctggagtctagaccaacacacaaagatcctggctaaccctggcctatttagattccttcctctcacctggaccttcccatttcaatcatgcagatggtttctttttgtaaagagttccgtttgcctttcaatttttagagaaaataaagactgcattcatctcaaaaaaaaaaaaaaaaaaaaaaaaaaaaaaaaaaaaaaaaaaaaaaaaaaaaaaaaa

SEQ ID NO: 292764 - DNA, 1000 bp, Homo Sapiens
ccttcttgctgaggaccgccaacctgcgccaccctcagcggccctgtgatgctgccaccaccggaaggaggcaggattccccacagccaccagctacacccctgccaaggagtcgttctctgagcggccttgcttccctctctgccaacactctccctgtgcacatcacagatgccaccaggaagagggaatctgcagtcagaagtgcacttgaaaaaaagaacaaagcagatgagagtattcagtggctggagatacacagaaagaagtctcaagcaatgtccaaatctgtgaccttgcgtgcaaaagccatggatccccataaaagcctggaggaagtgttcaaagcaaagctgaaagagaaccggaacaatgaccgtaaaagagcgaaagaatataagaaagaactggaggaaatgaagcagcgaatacaaacaaggccctatctctttgaacaagttgccaaggatctagccaagaaagaagcagaacagtggtatctagacaccctgaagcaggctgggctggaggaagactttgtgagaaacaagggtcaaggcacccgggctgttcaagagaaagagaccaaaatcaaggattttcccaggttccaagaaactacaaaactcagcatcagagatccagagcagggtttagaaggatctctagaacagcctgcaagccccaggaaagtactggaggagctgtctcatcagtcaccagaaaatctcgtatcacttgcttaatcactacacttaaaattactgcttttgaaaaatattaagcagctaacttgggtttgagtcaaggcagggaaaacttgggttttgagtcatggctactgttagaggatggacaaatgaagagtagcagattaacaggccaggcgcagtggctcacgcctgtaatcccaacactttgggaggctgaggcaggcagatcatctgaggtcaggagtttgagaccagtccagccaacacggcaaaactccacctctact

SEQ ID NO: 292765 - DNA, 1000 bp, Homo Sapiens; identical to SEQ ID NO: 224175

SEQ ID NO: 292766 - DNA, 1000 bp, Homo Sapiens; identical to SEQ ID NO: 118672

SEQ ID NO: 292767 - DNA, 1000 bp, Homo Sapiens; identical to SEQ ID NO: 224176

SEQ ID NO: 292768 - DNA, 1000 bp, Homo Sapiens
cacttaaaagctactgtttggcaccgatacattattccagtaatgaataatcattaaagatattattctggatgcagttaccatgcagtgatgtgaataaaatgcattagatggaaaattgtatttcaagtaaatatatgcactggtagaaatgtattaccacccactaatatgtattaattcaaaaccaaatgccaactggagttcgcctacacgggtttgaatggcaggcagtgatttggaagtgggaggaaataggtttggatttggtcaaatagactgagaagtgatagtgggggcgggggtttatgactcaaactttaacaggtgagaagactatgccatggacagaacaggcatgaggggctcccctcctacgcctctttaagagatttttatctctgactaaggattactggtagttgttgacatttctgaagcagtggatctttttcctttttcactatctgcatcttcaaatattcttttctgaagaaagttaaaaggaagcctgtacattttttgctaaggtaaatgccttgccatcttatttcattttctcatttttttcttcagtgcacaacataagcaactgtcctccttgtcatactcaagatgagcttggcatatctgaaatctgcagggattttctcattagcacagggttccaagcccaaaccgtgaagatggagttttcatttttaaatggcacatcttcaagttcttgccctgtcctcactttagtatgccccagaggaagtcaaagatatggacactctaagactcagaagaactttctcaggcattcattttcctatctattttgagccattttatttaaaaggttacaattttaaacctctctttaattaaaagataccagagttacaatgcaatactatttggcaatcaaaactaatgaagcacagatgcatgctacaacacgaatgaactttgaaacgttgtgttaagtgaaataaaccagttattatacaaggcc

SEQ ID NO: 292769 - DNA, 1000 bp, Homo Sapiens; identical to SEQ ID NO: 224178

SEQ ID NO: 292770 - DNA, 1000 bp, Homo Sapiens
gccagctttcgccagcactctcatctatcccgacacatgaatagccacgtaaaggagaagccctatacatgtagcatatgtggtagaggttttatgtggctcccaggattggcacagcatcagaaaagccacagtgctgaaaacacctacgaatctactaactgtgataaacattttaatgagaaaccaaatcttgctttgcctgaggaaacattcgtatcaggcccccagtaccagcacactaagtgcatgaagagcttcaggcagtccttatatcctgccctttccgagaagagccacgacgaggactctgaacgctgcagcgatgatggggacaatttcttctcattctcaaaattcaagcccttacagtgtcctgactgtgacatgacctttccttgtttctctgagcttatttcccatcagaacattcatacagaggaaaggccccataagtgcaaaacatgcgaggaaagttttgctttggactcagaacttgcatgccaccagaagagccacatgctagcggaaccttttaaatgtaccgtgtgtgggaaaactttcaagtcgaatttgcatctcattactcataagcgaactcacataaaaaacaccacgtaaagtaaatataacaaattgttattagtgattgggcttttcagtatctgtatggtgggaagcagttactgtatatgtcccaggcaatgtgctaagcactttacacacattcccatgtaatacttaattctcagcacaaccttgatttaggcagtatcatttccattttataagtagggatgcaaaatccgtgtcactaaactagtgaatgaacccaggatttgaactcagttactgtacaactgtgagccagaagaagatacacaacttttgtttaaattcaattttcattaaaatgaaggctcttgctaaagttaaaaaaaaaaaaaaaaaaaaaaaaaaaaaaaaaaaaaaaaaaaaaaaaaaaaaaaaaaaaaaaaaa

SEQ ID NO: 292771 - DNA, 1000 bp, Homo Sapiens; identical to SEQ ID NO: 118673

SEQ ID NO: 292772 - DNA, 1000 bp, Homo Sapiens; identical to SEQ ID NO: 118674

SEQ ID NO: 292773 - DNA, 1000 bp, Homo Sapiens; identical to SEQ ID NO: 118676

SEQ ID NO: 292774 - DNA, 1000 bp, Homo Sapiens; identical to SEQ ID NO: 118677

SEQ ID NO: 292775 - DNA, 1000 bp, Homo Sapiens; identical to SEQ ID NO: 118679

SEQ ID NO: 292776 - DNA, 1000 bp, Homo Sapiens; identical to SEQ ID NO: 224181

SEQ ID NO: 292777 - DNA, 1000 bp, Homo Sapiens; identical to SEQ ID NO: 224182

SEQ ID NO: 292778 - DNA, 1000 bp, Homo Sapiens; identical to SEQ ID NO: 118680

SEQ ID NO: 292779 - DNA, 1000 bp, Homo Sapiens
ctttcactaagtgctcatatcttaccaaacatttacgaacacacgctggagagaaaccctatgaatgtatgaaatgtgggaaagccttcactgagcgctcataccttactaaacatttacgaagacacagtggagagaagccatatgaatgtaagaaatgtggaaaagccttcacagaacgctcagatcttactaaacatttacgaagacacactggagataagccctatgaatataaggactgtgggaaagcctttgttgtctcctccagtctagttgatcatttaagaactcacactggatataaaccctataaatgtaatgcatgtgaaaaggcttacagtaggtcttgtgtactaactcaacacttaaaaactcatgcagcagagaagacctctgaatgtaacgcatgtggaaattcctttcgaaattccatgtgctttcatgatcgcttaaaaactctcaccaaaataaaaccctataaatgtaaggactgtgggaaagccttcacttgtcattcagatcttactaatcatgtgcgaattcacactggagagaagccctataaatgtaaggaatgtgggaaggccttccgtacatcctcaggacgtattcaacatttaagaactcatatgggagagaaaccctttgaatgtgaccagtgtgggaaagcctttgcttctttctcagctcgtattgcacatttgaaaacacactagagagaagccctgtggatgtgaagaatgtggaaaaacctttgctgtttcctcaagcctaactgaacatgtaaaaattcacaggagaaagtaacactatcaatgtaaggaatgtgagaaagcctgaacagttgaatctttctagatatgtacaaactcacactgtagagaaaccctgtaaatgtaagggatgtaggaaaacactagttcttctctctctcttttttttttttgatgagtctcgctctgcactccagcctggcgactgagtgagactccatctc

SEQ ID NO: 292780 - DNA, 1000 bp, Homo Sapiens; identical to SEQ ID NO: 224184

SEQ ID NO: 292781 - DNA, 1000 bp, Homo Sapiens
tactggagaaaaaccctatatgtgtaaggaatgtaggaaaacatttagccagaatgcaggccttgctcaacatcagagaattcatactggagagaaaccttatgaatgtaatgtttgtgggaaagcgtttagctatagtggatctcttactctacatcagagaattcatactggagaaagaccctatgaatgtaaagattgcaggaaatctttcaggcagcgtgcacatcttgctcatcatgagagaattcatactatggagtcattcttgactctttcctctccctcaccccccacatcaaatcagttgccaagacctgtaggtttcatctcctgaatatttctggaatccacctcttgaatccatttccatcccatcatccttgtccaatgcacattaatatatttgacatgggatactcgagtagctttctaattggtctccttgtactcaccattgtctctgtcagatgtccacattgcaaccaaatttgtatttttaaaaatatgtttaatctcatttctccctcattaaaatccctcagtggcatcccatggtttttaagttaaagcacacattcttcaaaatagcctaaaaacctagcctctaacaccttgttccaggttaccttccacagtttctatcttgtgtcactatccatctcattctctgaatacttatccaggattaagatacatattccaggatcaaaaagacctgggttccaatctttgcacttccatttcctgccctctaatttgggggcagcagtttgtgctttgtaagcttcagtcttatttatagtgtgggaataataatggttctacctcagaagttaatagaagaatgaaataatgcatgtaaattgctcagcagcgtgcctagcataaagtaattactcaaaccataatgtaaagtaaaaagataaccatactatacatagaaagccaatcatctcagccatgattatctcagaaataaaaagagatgcagcagctc

SEQ ID NO: 292782 - DNA, 1000 bp, Homo Sapiens
gatttacgaggccgtcctttccctcatgcaatcgcaatgggaaaaggaggaaactaaggctcggcctcccctactgagcctggttggcggaggggagtcttaaagccgccgccatctggagaaccagctttacaaggaccctcactcactactcttcggcggccccaaagcctctggggggccctctatggccaccacttgctcctcgcccaggagtcatctcatgccgccgcctcccccagccctggtggaagaagccagcgcggacccctgcttctctgccccagaaagtcttcggagggatgaccctctgctgacaagctgggggaagttggcgtacagagacccccgctttgctgctcatcccagggaaatcccggccccactcctgacctcagactcacttccaccctcaagtggatcgaggtgggggtagccaggggcgctgtctccagtgacaaggtctctgggacccctcatgggctcaagaccccctcccccaggcagcagctgtgtgattcatcaccaccccctctgcacctcgggcccccccactacagccgccccactccccgtcagcggcagccggctgctgcgtcagccactcacgcagggtggttattaaaggagagagacatcagcaccgagctcccctgcgcccgccgtccatgcgggaggggccacccacccactggagccccagacgcgggcgccacatgcccagcctgggagcaattcaggcccattctttctgatctgcgcccccagcccccagccccagcagtcagcgcggtggacgttctctgacccagagcagcccttgtagggggggagttggagggggtgcctggtagtcacagcggcccctgcataattgcgtaattcttgccgctccccccagcccatcgttccctggttctgtgagcctctgccttttcctggttttgcgaagcgccgtgttcattcattcattcattcattcaaaaaaaaaaaaaaaaaa

SEQ ID NO: 292783 - DNA, 1000 bp, Homo Sapiens
tgggccctgcacataaagctttcgtgtgtgtctggccgtctgaatggtgcctctgtgagcggctccgtcccggggccccggaagctggggagggatgggtaccggcgaccccgggaaccctgctcagtcctgccgggcactgcatgcagggaccgtccgcctgacccagagacctggggctgcctcaccctctctccagacccacagccagctttgtttcttgaatgtggaagatgtttcttattccctgaagaaagggggcctgccacacacagcctgggaggcgcctcatccagaaactgggacttggctagcccggcctgggccctagggacttctcactggtcatgcttctgaagctgctcacctggccgagggaggtcccggcagtgtcccagggtggaaggtggggagggggccggctcctgccatcccttcccaccctgcacttctgtgctgcttgcagtcatagctttccttgtccccccagctgggccagggctgtgctccctgaagtggctttgacgtggggccgtcccagctcccgcagcccctgtccaccattgactctccccggtagtggctgctgtggctgccccatcccagctgttgcaccagccacagctcctagtggctcatgggtgcctcctgccccacactggggcctgccataataactggcccaggtaccaatgcccaggttggaccccctgtctggggtgctgtgcaccccctggagcctgccctcccttgggaccagggggagactcctggcctcagccagtgcctccccggcccatctgggtggggtgcccacaaaccctgtgcccccagtttctgctttctggctctgcttccagggatctaacctggggggtctcagcaattctgtggcagcacatagacagcgatgaacctacccgcccacagcccattttgaggaagaggtgatggcggcaggcaatgcaagagctcagtttattaaatgtgtgcgagtcgg

SEQ ID NO: 292784 - DNA, 1000 bp, Homo Sapiens
tgtggctcatcccgcaaatcaggctcttcctgtgcatggaggtggagtccctctggaggcagcccgtggccctgttctcgggcaggtggagcatggagacgactgggaacttcactagacacgcatccagccggttcaagggcttgtcgcgccgtgcaccagcttgcaggagaaagcccaacgcctcgccaagcacgaaggcctcccttcccgacttgatgaaggcagagtagcggttgaggttgcggctcacagtgaccgagctcctgcccacgtggggacccagggagccgtcgagctccagcccaggcttggacctgaagaagctggcaacccgcgaacgccaacaggcacagtcgaaaaaagcaaaagaaaaatcccaaacaaaatcctgttctccctagccaaaggaccaggagagggggcagcccagcaagacaaaacacatttacacaattctggctaactcagccagtccttggccgtgagttcgtttttctgccacctcactttggggctgggctggttctccaccctcgcagggtgcgtttctcaatccagacgctggggggcgctagtacctcgcgagctccgcgaggatcattcccgggacgccgcggagtcacctcccctcctagggacccagagcttcccagggccgcgcctgtaggttttccagaggtccccgaaaacgttaaagacctggaaggaaaaaaaaactgtaaaaccacacactttgatatttgacaacgtaaaagcaaggctgcaaaatcaaaatcaatgaacgcttgaaggaaatgtctacttagctagacatagtgccacctggattcactgttggctccagaatcccccccacggtgtcatcacgttggaaagtttttgtgggttagatgttctctgttggcaagaatgcctgtacatgcccaagaagcatatgagtttaatgggaccccaataacttcaaaagcaaaaagataacgatcctttctactttttt

SEQ ID NO: 292785 - DNA, 1000 bp, Homo Sapiens
aagaacacctgaaaaatgatattttgtctgaaaagacttgacattgtaaaaatataatttctctcccaaatcactaagtttaatatacttctgaagtttacatcagttttattttaaggaacttcacaaacttatccaaaaattttatgtggaaaagtaaagaaacacaaatagctgaaacaaacttgacaaagcaagtagagaagacacactctattattagatatatcatgtacttatttaaagctgctgtcatttaaacaatgtattaccaagtgaataaatcaagcagtagtaagatagtgagcattcatacaaaaatccaagaagatacaggaattctgtgtatgacagtgctattgaaatcactggggaatgaatggcttatttaataaatggaaggttcataggagaaaaattttagctttctactttatatcatatacaaaaataaaatccaactaaagaccagaatataaaaagcaaaattttaaaactatgatgaaagtagaatccgttactttagggtaacaagatttctttaaaaaacatgtaaacatggaatagtctgttgaattttggtgtattggcctcacaggcacccacaaatgtacacaaagagatatatatcactgtgttcctgaatcatggtttgtattgcccaaaattggatataacaaatttttatcaattgtggaatagatgaataagtgtgatcatttctgtgataaaatacagaatttagaaacaaaatctacctatagttatatggatagattacaatatataatattgagagaaaaaattaaaatgcacaaaggaacacagtataacatttgtataatttaataagatcttgcaaagaacagtactgtgtattggtcatggatccatatatgacttggttgccttttgggatgtgggaaaggtttggtgggagttgttatatttatctgtaatatttctttaataaaagagtgaaagcaaaaaaaaaaaaaaa

SEQ ID NO: 292786 - DNA, 1000 bp, Homo Sapiens
aggggcttttcccagggtccacactgcccctgggcttcccttatgccgtcagcccctacttccacacaggcgcggtagggggactctccatggatggggaggaggccccagcccctgaggacgtcaccaagtggaccgtggatgacgtctgcagcttcgtggggggcctgtctggctgtggagagtacactcgggtcttcagggagcaggggatcgacggggagaccctgccactgctgacggaggagcacctgctgaccaacatggggctgaagctggggcccgccctcaagatccgggcccaggtggccaggcgcctgggccgagttttctacgtggccagcttccccgtggctctgccactgcagccaccaaccctgcgggccccggagcgagaactcggcacaggagagcagcccttgtcccccacgacggccacgtccccctatggagggggccacgcccttgccggtcaaacttcacccaagcaggagaatgggaccttggctctacttccaggggcccccgacccttcccagcctctgtgttgaggttgccgggggtaggggtggggccacacaaatctccaggagccaccactcaacacaatggccctgcctcccaccgctttatttctttcggtttcggatgcaaaacaaaaaattttaaaagaaaatgtgacttcaaaggaaaagaacaaatttccaaagacttgggggagtgaaggcagagcctggtgcagatggacgaggtctgcagacggagggcagaggtggtggaaggggccaggggcctgcaggcctccccctggaactgggactggtctcggtctgctgacgtcagggtcagctcccccgcggagctgacttcagcagcccacagctgtggggcttcagcagccacaccagcccagcccagcccagctctcgatacgtttggtctttcatgctgaaaaataaataataaagcctgtcccgtgaaaaaaaaaaaaaaaaaaaaa

SEQ ID NO: 292787 - DNA, 1000 bp, Homo Sapiens; identical to SEQ ID NO: 224185

SEQ ID NO: 292788 - DNA, 1000 bp, Homo Sapiens
agtgacccataacttcaaacatctgcctcagagtaaacctgaggcatttggggacaagtgtcagaccctccgctgcctatcatgcacggcagagcttacctcttgctgcacagagacttctgtgatctcaaggagaacaattataagggtatcactgctaagcctgtaagtgaagatatgatggaatgggaagttgaaattgaaggtctacagaattcagtttggcagggtttagtcttccaactgacaatacattttacatcggagtacaactatgctcctccagttgtgaaatttataacaattccgtttcatccaaatgtagacccacacactggtcagccctgtatagactttttggacaaccctgagaagtggaatacaaactatacattgagcagcatcttacttgccctacaggttatgctttctaatccagtgctagagaatccagtgaatttggaagcagccagaatactggttaaagatgaatctctgtacagaacaattctaagacttttcaacaggccattacaaatgaaagatgacagccaggagttacctaaagacccacgtaaatgtatcagaccaattaaaacaacctcatttagtgattactaccagacatggtccagaatagctacatcaaaagccacagaatactacagaactccattgctcaaagttccaaatttcattggacagtattacaaatggaagaaaatggatctacagcatcagaaagaatggaatttaaaatgaaaaatctttctttggaagcagcataggggaagagcatgagcttcagagtcaaacagatgttggagaaattcttaaccactctgaacttgtttttttatctgttaaatggagataaccttacctatcttgcaaagttgttttgcatttgacgcttattattttatatatatgatttcattcgagatataaataaaaattatataaaaatgtgaaaaaaaaaaaaaaaaaaaaaaaaaaa

SEQ ID NO: 292789 - DNA, 1000 bp, Homo Sapiens
tggaaggtgtggagggagttgcaggtggttttatatatactattcaggaaggtgatgctctcttacacaaccttcattctcgccctcaaagacttattgatcatataaggaatctccatgaggaagatgccttactgaaggaggaaagcagcatctatgatgatattgtttttgtggatgttgtcgacacttatcgtaatgttcctgcaaaattattgaacttctatagatggactgtggaaacaacgagcttcaatttgttgctgaagacagatgatgactgttacatagacctcgaagctgtatttaataggattgtccaaaagaatctggatgggcctaatttttggtggggaaatttcagactgaattgggcagttgaccgaaccggaaagtggcaggagttggagtacccgagccccgcttaccctgcctttgcatgtgggtcaggatatgtgatctccaaggacatcgtcaagtggctggcaagcaactcggggaggttaaagacctatcagggtgaagatgtaagcatgggcatctggatggctgccataggacctaaaagataccaggacagtctgtggctgtgtgagaagacctgtgagacaggaatgctgtcttctcctcagtattctccgtgggaactgacggaactgtggaaactgaaggaacggtgcggtgatccttgtcgatgtcaagcaagataacagggacttgaattagcagagtctaaaatcagggcaggcaaacgataatctgagtgcaagtctgaggagtcccagggtttagcagtagactgtatggtctttcaagagagttccagactggcactttcacccagaaccaatgcggtgtttcttaatgtttgcacaaatttccttaaaaatcaacttgtactgtagcataagaaaagtttttatttatctattggaagattatcagaaaaataccaagttattttataaaagaaaaaatatttctaaaaaaaaaaaaaaaa

SEQ ID NO: 292790 - DNA, 1000 bp, Homo Sapiens
accctgtttgtcaatctttggcattcgaattccacacacggggtcctagagcccttctgagcatcagtggtgtgggggagtaggtgacgaaacactagacctctcctgagagagaattgctgcttcctgaatccacttcattgaacagcaccttgcaagttcaaatgagttcctgggagcggaggctggaaggccacaaggtgcttgctaaggaacagaatgacccagagtcaaggccaagtctgcagggacctgttgaaagcctcgagaatgtcttggctgcccaagactcttgttgcctttcttccaagccatggccatgccctttttctcaaatgggaggggctggagggtgtgtgggatttgtcttcagctgcaaccagccttgagcctgctgggctattttcagctgaggaggggtgaatataggaaaaatgcatttttgaaacgtttgcaacatgatcaaggtgttagttctccaccacacaagttgtattcttcttttgccacctcaaaccatcacagagtctttaaatgcaaatcaattggtcaatgctagtcaaagctatgttcttacaaaaaccccagacagctcagagctcagaaaatcctgtggagtggctgctctgtaccgtgggcatccggcagccaggaagtgagacaacataattataactttgttttatgatgctgcatcatttgtactgtttaggtcgacgtgaggacatcatcttatttagaattttccgtttggcattctcttttgggtgggagttatgctgggggttgtaaataatgacaaggctgagatttttatgatgtttaaattgggcacaatgattttgaccttattccccaaacttcttttcttttctactgtttaacatacacaggctatttatacacgtccccagctcccatctgaaacctgtgactcaggtttatgaatggtgtttgtgtagcaacacattgtgtgctatgtttattaaaatgcagcgac

SEQ ID NO: 292791 - DNA, 1000 bp, Homo Sapiens
ggaagggtgtcagggtctgggctcgcatgcaccctgctcccttctgccagcctgcatcctctcctcaggcctccttcccacatcatctgtcttctctaagttagggaaccatatttgagactttcaaaaagggaacttctaggtttaagctcctcccagtagattcctgaacccaattatcaggaaatcatcctgagcactcacaggttcatttaacactcactcatcaagcaccttcctatgtgctaggtgctggggaaaacttgaccaaggaagagttcctgtcctgaagcttccaggacccagctttccttttctggtgtggccttgtagctagtgcctgggcacaggtgtttttctttttgcagttttacctagtgctgggagttcagttctttttcctctagaaaaatacctctgtgctccagagcctaatttttcccagatgcatatttagctctagggagaggactaggaggaaatccccctccctttagctgcctgaactgactgaggcccactcactagagccatgttcagtgctactgtgattagtagtaattaaatatgaactggtattctcaagtaagcattccttttgctctctttaagacctcacagattctgaccttagattctgtgacaaactgatacaggagctgggctggctatggctttaccacaacaagtaggtttgcttaagaaattactaaacaatggctgggcgtggtggctcactcctgtaatcccagcactttgggaggccgagatgggcggatcacgaggtcaggagatcgagaccatcctggctaacagggtgaaaccacgtctctactaaaaatacaaaaaaattagccaggcgtagtggtgggcgcctgtagtcccagctacttgggaggctgaggcaggagaatggcgtgaacccgggaggcggagcttgcagtgagccgagatcacgccactgcactccagcctgggcgacagagcgagactccgtctc

SEQ ID NO: 292792 - DNA, 1000 bp, Homo Sapiens
tcaatgagtaccaggcccatgccggtcctatcaccaaggtgagcaggaccctctccccaggaacccagtcccacacctgcctgctacgtgccttgttcatcccttcaacctcccaatgtcttttctctctccttcttctctcttatttattcatccatcattcattgaatcaccatctattgactatgaatatactctttgtttaaactacttccaggaatttagcctaggaaatcatcagagatacacctaaaaatgtatgtacaacgttttcaccataatattatgcataataaggggccgtttggtggatgccgtagctgccgtgagtgtgggctgcacttgaccacagctgcctcctcctccagagaatgccccagactgaaaggagccatagccctgaagattggcccctacctctccctgagggtacaaaaggccaccccaggggcaataccatgagtacacatttgtaaattgtccttccattcacccttctcataaagtagtatctatgttcaacagtcaaaatgtggaagcaaccaagcatccatcgacagacgaatgcataagcaaaagatggtatatctatacaatggaacaataccctgcctaaaaaggaagggaattctgcaatgtgctaccacatggatgaaccttgaggatgttatgctaaattaaataaggccaaccacaaaaagataagtacagtgtgattccacttttaggagatacttagagcagtcagaatcacaaagacagagtggtggttggcaggggctgcaggaagggggaatgaggaatgattgtttcataggtatagagttttggttttacaagacaaaaggattatgggggtagttggtggcaatggctgcacaacattacaaatgtatttaataacatgaactgtacacttgaaaatggttaagatagcaaattttacagaatatgtattttacgacaattttaaaaatgaaataaaaaagaattatcttgc

SEQ ID NO: 292793 - DNA, 1000 bp, Homo Sapiens
ccagggtcctgcactttgccttggaggagcccaggtgtgatttgccagaacaggagatattccagatgagaggtggtgggcccagcagcggtcacagagatctcagcatcatcaaggaccaactgaacgtgtccaacattgaccaggtggccagacacctgaggggccttctggaggaggagtgtcacaccttggagagggagatcctcatcctgcagcgctgcctggaagaggagtatttgaggccttgccacccctctgaggcagccctggagcccaccctggcagagctaaaggaacagaagaaggccatggagcaggagctgcaggcatctgtggggccttcttgtgtctctcccaaccacaggcagcggcccttggggtcctccacacagggcctcagacccccgcttcccctctgcggggttgcacctctccagtgctgcctgcctgcacctcctctggagccctaccttcgacctcgaggccagtcggctacccaccgctggggacggcagcttcagtgcagccccagggaagggccagcttccacacccatgtccagtgcagcaccccaagccccagcctgaagggctggtcaccgagtaggctctggcttctgccacagcgcacctgtctgccgctgccgcctcagctgctttggcccagccagcttcagatctggtcttggcgagctctcgccaggaccccaaggctgttggtctgtctggcccttgccccacccccttgccagatccctggtgtctggagctgagtggccgggcatcggtcccaagcatcaaagcctttggcctttctcctcccaggcctccacaaaggcctggcagacagaggtctcattccagcctgactcttgtcccctgggggacccagacaaagcacagcagccgctcagagacaggaatagaaatttcattaaaatctatggactttaaaaaaaaaaaaaaaaaaaaaaaaaaaaaaaaaaaaaaaaaaaaaa

SEQ ID NO: 292794 - DNA, 1000 bp, Homo Sapiens
gggggctggggctcagaggggagcgagcggctgctgtcaggctgtctgaaaatgctgtgcggattccccgattttctctcgcctggcaggtcacctggcccacactctcctcccctgatcccctgagtgctcccctccccctgcaggtccccctcccctctgggtgagcctggatgccagcaccctgttccgcccgcccagcatgcagaacaaaagcacaacgcacagaaacacagccggtgcgcgcagggcggcaggctggcttctccctccctcctgccgaggtctccggccccttcccccttccctccttccctcccctctcctcttctattagaaaatgggagtgttagggttgaattgtgtccccccaaaacaggtatgttggggtcctgattcccagtcccctagaatgtgaccgtgcttggagataagacctttacagagtaactgattaaaatgaggtcattagcagggaccctagtgcagcatgactggtgtcctttcaaaaaggagaaatttggatacagacatagacacacactgagggaaggtgaagtaaaggggcaaggagaagacggcctgcaacgggagtgacgcccttacaagccgagggacgcctggcagtgccagctgacaccaggagcagggagaggccaggaagcctggcagtgccagctgacaccaggagcagggagaggcctggaacggttctccctggagacatccgggacacaccttgatttcaggattccatgatagcttccagaactgccaaagaacgcatttctgtgttttcagccacccagtctgtggtatcttgtgactgccgccctaggaaagtaaaacaaggagttaattcatgaagggtgggggaaatacgtaccctttgaaataccacctagaggaaggggtaatagtacacccgatcatgtgctccagtttatgaaatagttgcacgtcactcggaattttgaaaaacaatatattttcaggactc

SEQ ID NO: 292795 - DNA, 1000 bp, Homo Sapiens
tattggctccctccagagcaaagggcaggtttgttactgtctgatgtaacagataatgtctccttctggagccagtgcttgcacccattataaaagattcaggttccctagagttggggttcctcagctcaggtgcagacccactttgtgtgcttcatgcccctggtcccctctgcatcacctctgcgggactcgggtgcaggaaggggaaccggcacagcagcacacgcatgctgcctgctgtgctggagtaatacagtcttccgtctctggcccaggagtctcgtgtcttctgccagcatccatgaaactgtggcagactcacttgttagtttgcagggagggtaaaacctcagactttatgtgattcttggcagtttaggaagtcacttctccctccaatgcaccatctgtggatagatggtgcttcccactggcttgcttctccctggctgtctgctgatgtctccctttagtcacgagggaggaatggatgccatgattgttggtaaatgcttcactaatgaagctaccccatagctggaagccagggccctcagacagaaggttccacagaaaatccaacagtaggagtaagtggtgtacaccatttgaataaaggcacatatcttaaagatggattggcccagtatctggattaagtaccccataaaagcagggggaaagcttttgactaatcactgtgcgatttgggtttggcctcccctgaagctgcagtaacatgtatttttgccacaatcccagaggaagagctgggcaggaattaacggcttgtgtttgatgtcctcactcagaacacccaagaaaagatttctgtctgcattgtggctttacctcgtgaagcagttgtctagaaaagtcctggtactccacactgctgcggttgagtaacttctccgtcaggttgtggtttacaatctttattgtgacttcaaatacctgggcatctgagacagacagtgaaacaaattagcctgtg

SEQ ID NO: 292796 - DNA, 1000 bp, Homo Sapiens; identical to SEQ ID NO: 224187

SEQ ID NO: 292797 - DNA, 1000 bp, Homo Sapiens; identical to SEQ ID NO: 118681

SEQ ID NO: 292798 - DNA, 1000 bp, Homo Sapiens; identical to SEQ ID NO: 224188

SEQ ID NO: 292799 - DNA, 1000 bp, Homo Sapiens; identical to SEQ ID NO: 224189

SEQ ID NO: 292800 - DNA, 1000 bp, Homo Sapiens
atggagaaatacattcctgtgttgatggctcaggcaaaaatctactggaatcttgaaaattatccaatggtggaaaagatcttccgcaaatctgtggaattctgtaacgaccatgatgtgtggaagttgaatgtggctcatgttctgttcatgcaggaaaacaaatacaaagaagccattggtttctatgaacccatagtcaagaagcattatgataacatcctgaatgtcagtgctattgtactggctaatctctgtgtttcctatattatgacaagtcaaaatgaagaagcagaggagttgatgaggaagattgaaaaggaggaagagcagctctcttatgatgacccagataagaaaatgtaccatctctgcattgtgaatttggtgataggaactctttattgtgccaaaggaaattatgactttggtatttctcgagttatcaaaagcttggaaccttacaacaaaaagctgggaacagacacctggtattatgccaaaagatgcttcctgtccttgttagaaaacatgtcaaaacacacaatcatgcttcgtgatagtgttattcaagaatgtgtccagtttctagaacactgtgaacttcatggcagaaacatacctgctgttattgaacaacccctggaagaagaaagaatgcatgttggaaagaatacagtcacatatgagtctaggcagttaaaagctttgatttatgagattataggatggaatatatagtaatagctgatagtggcatttatcaaatggctttgttatgtaaatttgcatcgctttatttaccctttggcatctttatatttgttacatgttgaactttgtacacttatgcattataaaaaaaaaagtagctaaaacttttgctgttaaatttcccagaaagtgacatattctaagaacttttaccccaggagttatgaaaaattccaaacttatgaggaatgtttatatcagaagttgtaatacgtttgtttccttt

SEQ ID NO: 292801 - DNA, 1000 bp, Homo Sapiens
ttgtactacccacataactgaaaatattggccatttggccttatctgtgagatttgacactaagtttttgttagagattggaaattatactagtccttttaaggggtaaaaaattcaattcaatactgacaaacttttgcttgtagttttactgtacatttatttttaaagaaaaagaaaacaaaagccagacaaacccaagttgtccaggcaaataaactcaaatctttgtcacgtctgatattataatcttctatgtaagttttttaattaaagttatttctatatgccgtgtgttgcttgttattaaatgcgacgtattcatggcacaaagctttcccaagctgaataaaaacaaacattaacaaatttttaccttgtaatgcaggaagaaacccaagcaagctctagtctgtgcttaagtgttagcattcttattttttgaaccttatttctcaaaacttatagtagcctcaagaagtctattgatattggtcatgtttatttcttgccatatttataacacagcaagagtatttacaggaatgaagtagctgacacatatttttagactctgtataattcagaacagttataaatatttagtttatggattgactctgtatcctgtcatcttttcgcctacctgatctttcttggaataaaataatatatccttggggtcaagatccatagttccagaattttctcagccatctggttctgctacagcgtaaaattagactggaaataagacaacgttaagtaaaaagcttcttttacctaacccacctcccaagggctccatttgtaaaagtacagaccagaaattctaccacttcccagatcctttccagggtaccaccctattaagcattaatttcttcattttttaaatggggacaaaaatatctgctttattattaccacttacttatagaggtgatttacagatttaatgagaatatatcaaagtactttataactcacaaaaatataa

SEQ ID NO: 292802 - DNA, 1000 bp, Homo Sapiens; identical to SEQ ID NO: 118682

SEQ ID NO: 292803 - DNA, 1000 bp, Homo Sapiens
agactgagaaacctgctgttcattatgtagttcagatatttatcacaatcatcctcattatggaagaccttttaaagcattgttttagaatgtctgagtattaagatacagattaattgggaatatctgagtattaagtactttcttcagagtataagatgtttacctcatctttttacttttgtgtgtgtagttctttcaagttgtaggaaacattttaatggaatttaaactcaaacttgaatacaggacaatgcttgccttttcatgtatgtactacattttttgctaagaaatactgatatttctgtttagttgagctagaaatacttcttatttatacatttaggaaagcaaataatgcctactactccgacttttatagaagctacttttaaatcagaatatttaatttttgatattcatataattaatagaagttgcatttatattttttatggggcatagttccttatgtgtttttttaatgtattttcatactacatactgaatttgtatgtttttaaaattgttacatctagacaactgtaaacattatttttttagctagtgcaaacctagtacctgccatttttactaatttttgtctttaaaaaaagcaaaaaagcacattgacctaagttgaaaattaagtaagtttatttttaacaaaaaatgcctgaaaaaagctaaattatttaagtcattaagatattgagaaaaaatttgaaatttttactatttctgtttccacaattccaaatatttatcttggtgtatatattgttactttaacagaacttgcattattttgtttttaataaatataaacatgaaatttttgtatgtgagaatgattgaactagtttgttcttaatctcaaaaatttagttaccaaagtagaaaaggtattttgatactagatattaaaaactacatatagttaatataattttataatttttgtaattaaatgtgcttctgcaaaaaaaaaaaaaaa

SEQ ID NO: 292804 - DNA, 1000 bp, Homo Sapiens; identical to SEQ ID NO: 224191

SEQ ID NO: 292805 - DNA, 1000 bp, Homo Sapiens
aggattctgaggaaactaatatagatgaggcatctgaaaacacgaaaagtaatcaacctgaagaggagcttgaaaatattgtaggagtagatatccctcttgtaaatgaggaagctgaaactactgcaaatgagttactggataatgattctgagaaaggcctgactataccaactttgaaccaatcggaccaagataattcaactgctgatgcttctaaaaatgatgaatcaacaccttcacccacagaagtgcactcattgtgcactatttctaaccaggaaacaataaaagcaggcagaataccacctttaggtgaacgtcaatcagaaagcatgccagacagaaaaatgaaaaatgtattttttccattagaagtaaaattaaaagataactatccaagcattttaaaagcagactcatctctatcagaggtggctttttcaccaaaagaatataattcaccatctttcagaccagaatatatagaattcaaaccaaaatttcaggattgttcagataaatttgaggatttacatgacatgacctcatttacacaccttaaaaaagtaaaatcaagatcaaggcttttaggaaaaagctcagatgatatccataaccatgccagacactctgcaagaccatatactgctccggaggttaacaagcaacgagaaagctacagtggaaagtttacaagtcgtcgaatggtttcatcaggcttagttcatataaatgataaaacatcagattatgaaatgcataaaatgcggccaaaaaaaattaaaagaggatattgaaaaatgttcgctcatttgtgatattataaaacatgtttaactcagaatgatatgtgaggccagcagtcagaatatcacttctccattaacaaaatggtttggagatctcttcttttgtgtgacagaagtcagcaaccaaatttcatcttgttagaaccattttgttttgattaaaatgaaaaacaaaaaaaaaaaaaaaa

SEQ ID NO: 292806 - DNA, 1000 bp, Homo Sapiens
tgatgctcacgtcacttggtgtaggtttcaggatcgcctctttgaggaaggacttcaggaccaactggggcctgcataagaaaacttatctcattattagagtactcacagcttgtatctcccagctacatcctagaaccccattgtcctttattccaccaaaccagctccaggtgaccagactctactcagaaagcaaattcgtcatcaaagaacagagactggccaccacgaggacatgcaggagaactgtcgggaccaggaagactcattccaaaaaggagcccaggccgggcacagtcgtcaagcctgtaatcccaacactttgggagaccgaggtcgggggatcgattgagcctcggaggtcgagatcagcctgggaaacacagggaggcccccatcgctacaaaatattttaaaaattagccaggtgtggtggcttgtgcttgttgtcccggctacttgggaggctgaagtgggagggtggcttgagtccaggagttcactgcactgagctgtgatcacaccactgcactccagcctggacgacagagtgagacgtccatctcaaaaaaaaaaaaaaaaaccaaaaaggaacccagcaattcccaagtgtgaccatgtgggcttggaagacatgtcactcatgggctagtaagcattctagtttctttgtttaaaaaatccccttatcataccacgttagaccgtagaccttagcagaaattaaagcgtcgtttcttttgatggggcctcctgtacgtaggctgcagacgtgaaagccccaggggtccatttgtatcaattttcatcttgttttgtttgttttgatttcatttacgtttttctttttcccatgagtgaggatagctaataaatcatctttgagaaaaaaaaaaaaaaaaaaaaaaaaaaaaaaaaaaaaaaaaaaaaaaaaaaaaaaaaaaaaaaaaaaaaaaaaaaaaaaaaaaaaaaaaaaaaaaaaaaaaaaaaaaaaaaa

SEQ ID NO: 292807 - DNA, 1000 bp, Homo Sapiens
cacccctacccccacccgccacccagtaataaactatttccttaccccgcagtgagttaaaatttagtaagatgaagatgtggaaaccaatgaaaagtacatttagaaatgcaggctttttagtagaaagaagctcttacagtttttactcatgataaatcttatcacctttcaaaaattgattgtggtgcctcaggtgaaatgagaagctatcagtaacagctactctcatcgaaagcactttattattttacggagctgcaacctccaattttgtgttttctaagtgatttacttaagtcaataacagatggaatcctgtggactaatgtgccaccagttttctaacaagggtgtacataaaatggatttgtgcagacctggctgtggcttgctggtgtgcaagcacacatcactttagaggggctgcgccccaccagataggaaggggaggattttctcctccagtcgaccttgtgacctgtatactaacataacttattaaaggaggggtccctcctcccccagagcagtcctcaacactatgtcagtgctggaaatgcagccactggcagatctggccccccagacgtcaccgcagggcctctgaagagtcaaggtctgctttaatttattgtgtgcctttctgtgtttacctcactcaagctgacaacattgtttatgggaatctatccttcttttagacacacggtaatccttgggctgtattactgaaggctttttattttttgagaggtgaaaaaaagagaaaacaagttagactccaaaggtgaattcctggtcttggcagatggctctgggaacagcgagggagcacagaagtcgtggcctgaggctgttctatgggcacttggggctaaatcgcctcctgagggtgactgttgcttattctgctggacaggtttttacataaagcaaagggcatgtgaggggtgggattccttgttactcttactgcaataaaaatcaattgtttgat

SEQ ID NO: 292808 - DNA, 1000 bp, Homo Sapiens
ctaaggggttgtagccttgctgggcagcctctcagagcaaggttgttcagatctcccttgctattacagtaggttactattaatgagggcagcacctgatgccttttgtactgaggtatgtaactttctccttatttgacaagtagaagttaacttacttgtcagggagggcagacgtttttttgttctgtttcgtttttcaaaataatgctttttgcaaaagaggtaagactgagactaaaggtgttatcttctggtgtgctcctggaagtgtctaccctacatttgtgtcagctcagggttgcagtgttgcccagatgcattttacatcactgtaaagagattacttttgtggttactacctggcttggctggccttgcggttcaccagattaatttacaaactcccccactttattttgtgctatgtagatctggccatacttgcattagtgactgtcttgccttaaccacacttaagcaacccacaaatttcttctcagatttgtttcctagattacttatgatactcatcccatgtctcaataagagtgtcttttctttctggatgtgttctcttactccctcttaccaccatactttttgctctcttctcctgcaagcgtagtcttcacagggagtggcttcctgacatttttttcagttatgtgaatgaatggaaaccaacagctgctgcaaacactgtttttccaagaaggctacactcagaacctaaccattgccaaccatttcagtattgataaaaagctgaatttactttagcattacttatttttttttccatttgatggttcttactttgtaaaaatttaaataaatgaatgtctatactttttataaagaaaagtgaaaataccatgacactgaaaagatgatgctatcagatgctgtttagaaagcatttatcttgcatttctttattctttctaattatctaaaattcaataaaattttattcatataaaaaaaaaaaaaaaaa

SEQ ID NO: 292809 - DNA, 1000 bp, Homo Sapiens
gaccgcagaatgtcagggaaagttaggagaagaagttctgagaagactgactacagattggctggcctggctgacccaggaacttctgagcagactgacctcagattgtatggcctcgttgaccacaaaacatctgtaaagactcaccaccaagtgtacggccaagccactgaactagctgaacaccaggctattgaccaagctcatagtaatgctgatcaacctccagttgacaatgctcactacactgaatctgaccagactgaccacttagcagacagacaagctaatcataaagaccagctgtcttactatgaaacacgtggccagtctgaagacagaatatttccccagttaggcaacagcaaagaggacaaagaggctgactacagagtacaaccctgcaaatttgaggatagccaagtagacctcaattccaagccttcagttgaaatggaaactcagaatgcaaccactatcccaccctacaacccagttgatgccagattcaccagtaacttccaagcaaaagaccaagctcttttcccaagactcccctccatcttatccaaattgaactataccagcagtcaagaaaaaactcaagccatagtaaccaaatctgatgaattttcagaaattgaccaaggaaagggttatcatatacgcaatcaaacttatagaaggttcccttctatagtttatgaagatccttaccaagtttcactccaatacatggaaaaacaccacattctgcaaatattccagcagattactgaaaacttagtctatgaaaagccagaggaccccctgaattttatgctgtgccaggtatagaattggagaaaaagaacaacctttttattctctttattgtaaaatacagcacacatacagcaaagtgtatagaacaaagtacgtacaactctgaattcttatgaagtaaacatacctgtaactaccattcaagtttttaaaaaataaataaaacataaccagc

SEQ ID NO: 292810 - DNA, 1000 bp, Homo Sapiens; identical to SEQ ID NO: 224193

SEQ ID NO: 292811 - DNA, 1000 bp, Homo Sapiens
acatcatgctgatgacagcttcctggtcctcaccacagatggaattaacttcatggtgaatagtcaagagatttgtgactttgtcaatcagtgccatgatcccaacgaagcagcccatgcggtgactgaacaggcaatacagtacggtactgaggataacagtactgcagtagtagtgccttttggtgcctggggaaaatataagaactctgaaatcaacttctcattcagcagaagctttgcctccagtggacgatgggcctgattaccagctgggacttagagtttctgtgcaacagtttttcactgagcatgtcaagaaactgataagatcaaaaaggtctcctaactcactagatcagcgcacaagtcagtgtaaaccacttagatagtagttttttcataaatgctcatcatatttatgttccgctgtacatgttcagtataaatatatgtgtagtgaagctactgtgagtctttaaatggaaagagcaaatgagaagtggtttggatacacttgatgagagatgagagtgtcacattaataatttttaagactcttaggcagctatgggtttcttcttaatcatttttgttctttattcatttgaacacgtttttgaagttcttcaaaactagtcagtttgaattttgacagctattcaatatgtgatctccaagtttaaaaaaatttttttccagacttccctaatcctaaaatgcgagtttttatttttaataactgtaccaaggaataagtatgaaaacagttctctgttaccatattttgtattctggaccacttactggtgaaagcaaccatgcaaaagaaattaatttggccaggcacagtggctcatgcctgtaatcccagcactttgggaggccaaggtgggtagatcatctgaggtcaggaattcaagaccagcctggccaacatggtgaaaccctgtctctagtaaaaatccaaaaaaaaaaaaaaaaaaaaaaaaaaaaaaaa

SEQ ID NO: 292812 - DNA, 1000 bp, Homo Sapiens; identical to SEQ ID NO: 224194

SEQ ID NO: 292813 - DNA, 1000 bp, Homo Sapiens
ctcttaatcaaagatatttatttcctcaatgagggttgtgccaaccgccttcccaatggccatgtcaattttgagaaattttgggaactggccaaacaagtgagtgaatttatgacatggaaacaagtggagtgtccatttgagagggaccggaagatcttgcagtatctgctcacagtaccagtcttcagtgaagatgctctctacttggcttcttatgagagtgaaggacctgaaaatcatatagagaaagacagatggaagtctttaaggtcgagcctcttaggcagagtttaacacatgggagctgcctgcctgctgctgctgctgcttcctgcagatcatggaggggctggcctttgttttctggcatctcgtaccacgaacgctcatgaagaccctgcagtcattggagcacccgggtcagcaaagcacacaagctcactcaagaccagatggagaacttatttcctgcagctgacagatagactcagattttgtgagactgaaatgttcactgaagacacttgagaaagaatcctctaaaaatcccggctctgcacattattcatctcctggaatttccatgtgaatcacagctctgcacctggatggagttttcttttgtgtgtgtgtgttttttttaatttggttgaacatttgctgctaatgggacttgcccagctgagtgctggctctgaggaagcccacgtttcttttgttaacttaaatgaagaaaggagtggagggaggggatctaaaacccccccgtttagatcccaaaccttagctcaaccagtattgccagagaggggtaagactggttggaagctgactgcagactttgtttccccttagtatgtgctgtgttgtaaatttttctcctccctcctcctacaaggttttgagttggctgctggttagcaaactcctttttacccatataagttatttaatataataatgaagctcaacactgtggtaggaaaatagccactag

SEQ ID NO: 292814 - DNA, 1000 bp, Homo Sapiens; identical to SEQ ID NO: 118683

SEQ ID NO: 292815 - DNA, 1000 bp, Homo Sapiens; identical to SEQ ID NO: 224195

SEQ ID NO: 292816 - DNA, 1000 bp, Homo Sapiens
ttcaacagcatgaaaaatggtatcaaaagtttctggctctagaagaaagaaaaaaagagtcaattcagatttggaaaactaaaaagcagcaaaaaagggaggaaattttcaagttaaaggaaaaggcagacaacacacctgtgctttttcataataaacaagaggataatcaaaagcaaaaagaggaacaaagaaagaaacagaaattggcagttgaagcttggaagaaacagaaaagtatagaaatgtcaatgaaatgtgcttcccagttaaaagaagaagaagagaaagagaaaaaacatcagaaagaacgccagcgccagtttaagttaaaattactactagaaagttatacccagcagaagaaagaacaggaagaatttttgaggcttgaaaaggagataagggaaaatgcagaaaaggcagaaaaaaggaaaaatgctgctgatggaatttccagatttcaagaaagagatttacataaacttgaactgaaaattctagatagacaggcaaaggaagatgaaaagtcacaaaaacaaagaagactggcaaaattaaaagaaaaggttgaaaacaatgttagtagagatccctctaggctttacaaacccaccaaaggttgggaagaacgaaccaaaaagataggaccaacaggctctgggccacttctacatatcccacatagggctattccaacctggagacaaggaatacagagaagagtatgagataatcaaattgctactcagttgataagaatgttaacatactaagttataccagggagagagtgactaaccacattctttaaatatcaatagcttagtcagattgattattgtgctatattgtgaattgagaggtattaagtttcatgaggctttgtcattagtattcctgcttctaccaagaaggtatttaatatatgtgttggcctattattgatgtaaaagttatttaaataaaaaaaaaaaaaaaaaagaaaaaaaaaaaaaaa

SEQ ID NO: 292817 - DNA, 1000 bp, Homo Sapiens
cacataagatctagtttttatttctagagtgctgctatgaataattactatagctgctgtccatcttgcccatccattaaggtaccttctcacaaacatttctaatctactggctggagtgcagtggtgcagtctgtagctcactgcagcctcaaactcctaggctcaggcgatcctcttgccctggcctcccatgtagctgcaactataggtgtgtgccactacacctggctaatgtttttagttttttagagatggagtcttgctctgttgcctaggctggtcttgaactcctgggctcagatgatcctcctgtcctcagcctcccaaaatgctgggagccaccaggcaccaggtgtgatctaccacacctgtctaaaaagtatgtatttttaaatttttttgtagagacaggatctcactatgttctccagctggtctcaagctcctggcctcggcctcctaaagtgctgggattacaagtgtgagccactgtgcctagtcactttaattgagatattggcaagtcaactgccatgcagagcccagggcactggttatattcagtaggaaactgaactcagcactcagaattttaaattaaatcaatgatcttcaagtatttgccactttcgagtacagctaattggataatctcaaaccctttagtgaaaatatcttaaatgcattgagaatattttctaattacctgtgtatgctacagtacagacattaattctataaacatgttcataggtcttccccctcgccccgcccgtcttctaagggcattttctgtttctttttagtgagttcatgaatgtttaacggttctggcgcaaagctttcttgcattctgagcataaaaataataaaacccacttatatttgcttgagtgtgtttacaagtcaatttccttttatgtagcttgctttttcatttgctataattgatcctgcaggtgtgtgaattattaaactaacgctcttttaaaccaca

SEQ ID NO: 292818 - DNA, 1000 bp, Homo Sapiens
cttcccagaaacgtccagcaggggaggggtgggaacgagaaagaaagcacccaacgctctggcagggtctgcgcagccgccagactctgtttctagacggtcacggccgacttagtaattcacttagaagatctcctgaaataagcacaaaatgttggcagcaaatggtcaaagggaaatgccccagttttcttaggggacggaccctgttactttatcagatagcagtgtgagctgaagtgtgaagacagggcagacactaatggtattttgttcatcctgaattttttttttggcattaattttgatctttaaaaaatattgcattaggaaatgtaaatgcatatgagtaagtgaaagaaaccaatctggaaagtctacacaccgtacgattccagctatatgacattctggaaaaggcaagaatagagaggcagtaaaaagatcagcaaagagtaaaaaataagtcggaaagggacaaataaggttcttagggtgtggagactacatctgtgtgatagtacgatgggtgggtacatggcattatgcatttgtccaaacccaccgaacggacaacaccaagagggaaccctgctataaactgtggcctctgtgcgatcatgatgtgtcaatatgggttcatcagctgtgacaaatgaaccccacaggttggggatgttgacatgggggaggctgtgcatatgttggggaaggtgatatgtgggaactctctataccttctgcccaatattattgcgaacctaaaactgctctcaaaaatatagcctaagaaaaagtaactttaatcttgggagttattgtttactgggtacagagtttcagttctggaaggtgaaaagagttctggaggtagatggaggtgatatttgtacaacaatgtgaatacttagtgccattgaaccgtacacttaaaaatagttcagacggctaactttatgttgtgtatgttttactgcaattaaaaaatgttacttatctt

SEQ ID NO: 292819 - DNA, 1000 bp, Homo Sapiens
aaagctcatttgacagcatcagacattgggggagagatgtcccccaaagtgtgtattctaattttattagccctatccaataaacaccattgccaaagtagtattttcataactttcttgtatgatttgggccttggtgtgaagtatatttacctgagagttcacttttacttttcttaaacttaggcttcatttacaaaatgttttatttaagcaaggaacaatgtaatactcaataatgacctaaaacacctttttgaaagggtttgcacttggaagagagtttatgttctgttgaaaccaactttgatagggtcctcacctttccgttaaggaggtgccgcactacaagtttcaaattatatggaaaaacctaaaattaaccctctgttggtgatctcataaaatggttttgaccttttggtatcttaatttctatctaaactttatcagaaaattttctttgaatatatcaattagttggctgtgggaattttccctttccacattaataaatgcctttctgtgtttctgaatcagaagcaaatgattagggaaaaatatatgtccaaacaagacaagattagtttaaacagttaagaacatttagtccacattgtcttgtcagccagcaattgtcatggaagctatcatttttaagagtgccactgtgtggatttttttttcaagtggttattacattaaaattacctcatactgaggtttttgcactgaaatatcacagtttcagatttcatggttaatgttgtgcgtatgtttgtatgtttttaaaggaaacttgcattttcaatagttgatcctaaatttcataaactgcacttctttactctggtaaagctgatgtttttgtgcttattgtgaattgccgtagtacctttgaatgtcaaactttatttagaaatataaaacttatcctttatgatataaatggttgagtgtatgtacccagtatttctaattaaatttcacatgctaaatt

SEQ ID NO: 292820 - DNA, 1000 bp, Homo Sapiens; identical to SEQ ID NO: 224198

SEQ ID NO: 292821 - DNA, 1000 bp, Homo Sapiens; identical to SEQ ID NO: 224200

SEQ ID NO: 292822 - DNA, 1000 bp, Homo Sapiens; identical to SEQ ID NO: 220441

SEQ ID NO: 292823 - DNA, 1000 bp, Homo Sapiens
aaaaaaaaagacaaaaaagttagtggaatctatcaggattcaaatcaacttttgcaagcaatatgcccatcatccttcctgagacactaaataaatataatggattcatccaaggaataaacattatgagttctcaaaaaatgttttcgtcacaacctggcgtgaatgcttttctccggagaaacactgaaggcggcgttcttgcgattcaagggtacgctgcgtccaggtttatttcagtttcagactgaggtctgctaagaagcccggcctcaaactcaagataaaaacagaaaagtcccagtgttgacgggagtggaggagcccgtgttcgcttcaaggtgccggcgtgctgctctaacctgtgctatatatactcgagcactctccatataatgcctccatttaccaacttgctcttaaaaaataccaaagcaggccgggcgcggtctcacgcctgtgatcccagcactttgggaggccgaggcgggcgcatcacgaggtcaggagatcgagaccatcctggccaacgtggtgaaaccccgtctctactaaaatacaaaaaattagccgggcgtggtggcgcacgccttagtcccagctacttgggaggctgaggcaggggaatcacttgaacccgggaggcggagcttgcagtgaaccgagatctgccactgcactccagcctggcgacagagcaagtctccgtctaaaagaaaaaaaaaaaaaacaaccaaagcgaagtatttttggttcaaacctgcactatttaatatgatagccactagccacatgtggctattgaccactcggcattatggttagtctgaattgcccactgctggatgtgtaaaatgtacactggaatttaaagacagcgcagaaaacatcgtgtaaaatgtcttgttaatgattttcatgttgattgcatgttaaatgatactttggatataaaaaatatattattaaagttaatttcacctgtttgttttcccctttt

SEQ ID NO: 292824 - DNA, 1000 bp, Homo Sapiens
gtgtgctggcccagacaccatccgtgagaggtctttcaaggatttccatagcactgccctttctttttactttacctgcaaaaaacccaaaatccgtgaaaagaagttgcagcatctgctagtagatgaagggcagacagtccagctagaatgcagtgcagatggagacccgcagcctgtgatttcctgggtgacaccccgaaggcgtttcatcaccaccaagtccaatggaagagccaccgtgttgggtgatggcaccttggaaatccgctttgcccaggatcaagacagcgggatgtatgtttgcatcgctagcaatgctgctgggaatgataccttcacagcctccttaactgtgaaaggattcgcttcagatcgttttctttatgcgaacaggacccctatgtacatgaccgactccaatgacaccatttccaatggcaccaatgccaatactttttccctggaccttaaaacaatactggtgtctacagctatgggctgcttcacattcctgggagtggttttattttgttttcttctcctttttgtgtggagccgagggaaaggcaagcacaaaaacagcattgaccttgagtatgtgcccagaaaaaacaatggtgctgttgtggaaggagaggtagctggacccaggaggttcaacatgaaaatgatttgaaggcccacccctcacattactgtctctttgtcaatgtgggtaatcagtaagacagtatggcacagtaaattactagattaagaggcagccatgtgcagctgcccctgtatcaaaagcagggtctatggaagcaggaggacttccaatggagactctccatcgaaaggcaggcaggcaggcatgtgtcagagcccttcacacagtgggatactaagtgtttgcgttgcaaatattggcgttctggggatctcagtaatgaacctgaatatttggctcacactcacggacaattattcagcattttctaccactgcaaaaaac

SEQ ID NO: 292825 - DNA, 1000 bp, Homo Sapiens; identical to SEQ ID NO: 118686

SEQ ID NO: 292826 - DNA, 1000 bp, Homo Sapiens; identical to SEQ ID NO: 224202

SEQ ID NO: 292827 - DNA, 1000 bp, Homo Sapiens; identical to SEQ ID NO: 224203

SEQ ID NO: 292828 - DNA, 1000 bp, Homo Sapiens
tagcatcagaatctctctttcaggtcatttattaaatatgattgaaatgtttaaaagttcctgaacatgattcatgatgattaaaatatcatacaactgataaaagactttaagaactttatatatttcctgttgcctcaaaatgtaacagaaattattcttagagctttgattttagctatcctaattactgcaaataaatatttgttcttatagttttaaatcaaaaagaaaagtcttgttataaaaccttaagcttgaaatcatattaataaaatgtattgtacatagtggaaaattttcagtagctaatttaaaatttcagaaaatgctattaaagaattttgattcaagtatttaaactgtttagttatgcatgcttcttattaaccgaaaatgataataccatttagtttagtgatcagtatgagaagcaatacctaatcctatgttgctattgtattttttcctagttggtgtgcctgctcagaaaaacatatactgtatgtgtatacatacctgtgtatatataaaaggtcaatttatatatttttctataggaaaatggagtaacaagttccctatctcccatatttatttgtccatagtaaaatggccacattgatgataatttctagaactagtttctgagattgtcagccctttgtctaaaataatggcagtattaatgattgacttctgtcactgccatagttacctggattgtcagccttggtagcctttgtctaaagtcctaaagagttccaaaaaaaatgtgttgaaatttaattgctaaatagtggttggtgattctttacagtaggaattgtaataattttcttgcaaataagttatttactgctattgatattgaataatttgtcttttattcagatatatttcaaaaagcatgaatatatgattattcataaattgtatactttaccagtaagttttcagaggaaataaagacttttaaatccttttaaaaaaaaaaaaa

SEQ ID NO: 292829 - DNA, 1000 bp, Homo Sapiens; identical to SEQ ID NO: 224204

SEQ ID NO: 292830 - DNA, 1000 bp, Homo Sapiens
tcggatgtgactgcccagtcttgaacttcccagccctcaaaactaacatatcttccagtagcttcctgagaaagtgtatatgcaaagcacacttctgagatctttcagatggttttgccacattgcccaggatggccttgaactcctgggctcaagtgatccacttgccttggccccccaaagtgctgggattacaggttgctatgaaaagaaaaatcatgatattaaattttagcatcgatattatggaagctatgcctggactcaacaacacgaacttctactcaccaaggctgatcttgtactaatactaagtgcccaacctgacaacagagaagatgatgagcctttataagacaccattccttaggggcatcagccagtcccatggtgttaggattattacatgggacacctttcatcatcatgaaaacagaaacttttcctcatggaaatgaatatgtattttagacacacatttaccttctttgctgacaatgattctgtcatcaccatctccatggacttccagaatgccttaatcatcatcagagtatcctacacaaagttgtctctgaccaaggaactcatttaatgggactgcatcccccagactccatttgtaattgacttctgcttgggtttggtcaatggaatgccctggcacagctttggagggaagaagagagaagacaatgtatttcttcactgctcccactctgatttgggctatgttttattggcagggactgcatcccttcaagattttagcttcttccagaagtcccctcctccatgactctagctctcactaggctccagaaatactatttcttcctcttgccctcttaggcctagggtaacagctacctgctattgctaacctctgggtgccacaaaattgcttgttgggtctcataatcttgcatatacctctgtaagtagtccctacattaaagtcccttgaaccatcaaaaaaaaaaaaaaaaaaaaaaaaaaa

SEQ ID NO: 292831 - DNA, 1000 bp, Homo Sapiens
tcccgagaaactagggattatgctccaccatctagaggccatgcataccgtgattatggtcattctcgtcgggatgaaagttattctagaggatacagaaatcatcgaagttcccgagaaactagggagtatgctccaccatctagaggccatggataccgtgattatggtcattctcgtcgacatgaaagttattctagaggatatagaaatcatccaagttcccgagaaaccagggattatgctccaccacatagagactatgcataccgtgattatggtcattctagttgggatgaacattcctctagaggatatagttatcatgatggctacggtgaggcccttggtagagatcattctgaacatctaagtggaagttcttatagagatgcacttcagagatacgggacctctcatggtgcaccacctgcaagagggcctcggatgtcttatggtggaagcacctgccacgcatatagtaatacacgagatagatatggcagaagttgggagagttactcgagctgtggtgattttcattattgtgatcgtgagcatgtttgcagaaaagaccaaaggaatccgccttctctgggtagggtgctccctgatcctcgtgaagcatatggtagctcaagttatgtggcatctatagtagatggtggggagagtcgatctgaaaaaggagactcgagcagatattaaagcaagcattgaaaataatagttattgcataccaatccttgtttgcaaatcaaaaattgaaatgttatttctgcattgttacctgcatattactgaaagaaacatgttggttttgtggagagaggtagatactaacttcctccatgaattttttgaggtattcaaaggaaaaggaattgttttcaaagtaatttcatacttgttgatgctatttgaaaagtgtttagatgtaatatctaccttaaaattttcacaataaaattttacatgtactgcaaaaaaaaaaaaaaaa

SEQ ID NO: 292832 - DNA, 1000 bp, Homo Sapiens
gagggtgctgccgtggtgcaggaggagctcagggagctggcagagtcgtggcgggccttgaggctgctggaagaaagtctgctgagcctcatcagaaactggcatctgcagaggatggaagtggattcggggaagaaaatggttttcaccaacaacatcccaaagtcaggatttctcatcaatcccatggatcctattcccaggcatcgtcgacgcgcaaatcttctacaggaagaagaagggagccatgaagatttctcccagctcctgaggaactttgggcagtggttgcaggtggaaaactccaagctggttagaatcatcgcaatgagaacttctacagctgaggacttgaggaccagaaaatcgaagctgcaggagctggaggctcgggtgccagaaggtcagcatctctttgagaacctccttcgtctcgggccagcaagggggacctcggatgagctggaagatctgcgctaccagtggatgctgtacaagtccaagctgaaggactctggccacctgctgacacaaagttctccaggggagccgactggattccaaaagactcggcggtggcgaggactgggctccctcttccggagggtgtgctgtgtggcgctcccactgcagctgcttctgctgctgttcctcctcctgctgttcctgctcccaatcagggaagaggaccgcagctgcaccctggccaacaacttcgcccgctccttcacgctcatgctgcgctacaatggcccaccacccacctaacccactggggcacacaggtgactttctcctccaacctccatcagtcccagggcccctcctggggatgctcgccagggaaactggaaacaggggcagggcaaagactgcagagctgcatccatatcagtgctgtgtcagcgttcccagaagacacttactttttatacagtgttgtcttagtctatttatactaaatgtgtactacatgtgactagggaaaaaaaaaaaaaag

SEQ ID NO: 292833 - DNA, 1000 bp, Homo Sapiens
ttgttgttgttgttttcttaagtgttacattaaaactctaaccaaggaaagggttctttaagaacattcccttagagggataaagttgagaagtgtgccttttttttaatggcttgaagtttcagaggtgataaaaattaaaatcacactactatttgaagctcattttctatgcaggtttttaaacgtcatttatgtatcattctttttatatatcacacttaagcttgtgttagcttttttcttttgccccagatcaaactgaacaatgtatataacactatctgtctgtaaaatactttttttaagaaagcatttatatttatatgacagcttgaactgacaacattgtgtatatagatcatcttgaagtattatttcacattgaaaagaagaaaatatattgataactatagatgttatgaagaagagggtatttctagttttatactaaaaatcaattggatgaactaaatccaaaacatgacactgtaggcagcagttttaagtcttatttttactgtttatatatttgaatgctgctacaacagatgatcttcatccctgaagttttcagctaaacttggtttcctagaacagactgttaactttcaaaatttttattggtgaaatggaaatactgtttttccttgtgaatgaattttcatatttgtaagtgctaagtttataattcaggtttgatcaaggtgtgaataactgaagaaaataacttgctggctatataggaaaatgctgtggaaatgaactgtgtatatacttctgggaggaacaaatttaatcatttcttctgttaagcactaatcagtatagtgcaactcctggttctgtactgtattttatatgcaacatatatgctttaatattttaatgtttgtgcattaatattttcaatttgtttaaccactttgctgctaagattttgccgtcccattcccattttttcctttacaattttaaacaagtttcctcattaaaaact

SEQ ID NO: 292834 - DNA, 1000 bp, Homo Sapiens
ttagagtcagcatcatgggaaagagtaacagcaattgaaaaaagagattcaagagccaagtactcagccctggcaggggatggggacatgatgcccagagccacccctatactccagtctccctggcatcagctactgcagtactggggtacttgccttcatcttttttctgaagatagttacttcttcatatttgatcatcggaaggagcagcattgctcagaaacacacacacacacacacacacttgactttcttgtctgccaaataaatttcttatttgctagggaactggtaatctaggctcaagaagtgtgtggagaaggtttattttcattctttttactttaaaatatgccttagtttttgaatagataagacattcaagtgtcagaaagtaaaagtcagttcaggactgagaaaggaaagatcagtgctgattttaatcagactgtaatgtaccaactagatacagacagggccagtggcaaggccatcagaaaacttcttcccaaggccacaccacacctgcaaaatgcctaacaaccttcttcttttcagtgattaccactttcttaccaatgacttcgctttgttcctcgtgcctctgaacagactgctgagatacccaatcaagagccaatccttgcttccctagactctcctcaatcattcaacagaagcccaaatcttgtaaaagttcctttctgggccgggcacagtggctcacgcctgtaatcccagcactttggaaggccgagatgggcgaatcacaaggtcaggagtttgagactagcctggccaacatggtgaaaccctgtctctactaaaaatacaaaaaaaaattagctgggcatagtggtgggtgcctgtaatcccagctacttgggaggctgagacaggagaatcacttgaacccgggaggcagaggttgcagtgagccaagatcgcaccactgcactccagccctggcgacagagtgagactccatctcaaaaaa

SEQ ID NO: 292835 - DNA, 1000 bp, Homo Sapiens
actgtgtagaaatgttctcagtgaccagagtgcattatttttcataatttgggtttagaggatttgaagaaaggaagaatcttgggcttagtatcaggaagactccatcattttcaaattttgttttgcttcttgacttttggattcctttgaagagacctggtaaaactattaacaattcatttaaaaaattggtacctgataactttaccagtacttttttcctttttatttatttgttttatttatttttttttaccgctccttgtggagcagggctacaccataggcagtgtgcccagagtaaccacttttttcctttttaaaatataatattaactttatgtttgaatgttgaatgttttgtctgtctcttaggcaaataatgttataggaatcaataatttaatttttgttttatttgttttttgatggagtctcactctgtcacccaggctggagtgtagtggtgtaatctctgctcactgcaacctccgcctcccgggttcaagcaattctcctgcctcagcctcctgagtagctgggattacaggtgcgtgccaccacgcccggctaatttttgtatttttagtagagatggggtttcaccatgttggccaggctggtctcgaactcctgactgaccttgtggtccacctgccttggccttccaaagtgctgggattacaggtgtgaggcacggtgcccagccaatatctttattttaatttgtttttatttcctttatttttagctggttttgtccattttcctaacaaagcagggaccctgggtttctttttagtctgtctgttatataaacttgaagcctgactccattctatttgcctggagttagtatactttcttagggtgaaaggaaggcagcttgtattgagccttttaaagtattgaatgcttgcaaattgctaacattcttttgtgtaaaataaccaataaacctgttttgtcatactctacttaaaaaaaaaaaaaaaaa

SEQ ID NO: 292836 - DNA, 1000 bp, Homo Sapiens
atgtgggaaagccttttattctcccagttcacttcaaacacatgaaaaaactcacactggagagaaaccctataaatgcaaccaatgtggtaaagcctttaattcttccagttccttccgatatcatgaaagaactcacactggagagaaaccttacgagtgtaagcaatgtgggaaagccttcagatctgcctcactccttcaaacacatggtaggactcacacgggagagaaaccctatgcatgtaaggaatgtggaaaaccatttagtaatttctctttctttcaaatacatgaaaggatgcacagagaagagaagccgtatgaatgtaagggttatgggaaaacattcagtttgcccagtttatttcatagacatgaaaggactcacactggaggaaaaacctatgaatgcaagcagtgtggcagatccttcaactgttcgagctcctttcgatatcatggaaggactcacactggagagaaaccctatgaatgcaagcaatgtggaaaagccttcagatctgcctcacagcttcaaattcatggaaggactcacactggagagaaaccttatgaatgtaagcagtgtgggaaagcctttggatctgcctcacaccttcaaatgcatggaaggactcacactggagagaaaccctatgaatgtaagcagtgtgggaagtcttttggatgtgcctcgcgacttcaaatgcatggaaggactcacactggagagaaaccgtataaatgtaagcaatgtgggaaagcttttggatgtccctcaaaccttcgaaggcatggaaggactcacactggagagaaaccctataaatgtaaccaatgtggtaaagtctttagatgttcttcacaacttcaagtgcatggaagggctcactgcatagacaccccataaccccaggctttaggaggctgaggtggggggactgcttaagcccaggagttcaagaccagcctgggcaacatagtgagactctgttat

SEQ ID NO: 292837 - DNA, 1000 bp, Homo Sapiens
tgggaagtcctttcgccagaaagcaaccctcactgtacatcagaaaatacataccggccagaaatcctatgaatgtcctcagtgtgggaaagcctttagcaggaagtcatatctcattcatcatcaaagaactcatacgggagagaaaccatataaatgtagtgaatgtggaaagtgcttccgccagaagacaaatcttattgtacatcagagaactcacacaggtgagaaaccctatgtttgtaatgagtgtggtaagtctttcagttataagagaaacctcattgtccatcaaagaactcacaagggagaaaacattgaaatgcaataaatgatgtggtttcttatatgaattctttacaagctgttgtaaacatttagttttaaaaagaaaagcatgctgaaacatgttaatgtaattttaaatcacaagtctaataattattaaagtaccatacggaataactgtctactgtttactagcatataaaataagtatgatcattattattgaactctatcagctatgaagctaaattttaaagtcaactgctcttcctactgactcaaatagtttattttttaaaaatacttatataatacatgcagagacaagatacacaatgattataagtattaatctccataagagaaaatatttatgaactatatttctcattgcactctgtaataaaaagcagttagttgttacttacctaagagttaccacttccgtagcctataacatcaaaacgtagtttttgcatgttttcaattttataaatatatattttatcagacatcatgaattattttgtgtcttgcttatttcactcaattttttaagatctgtacattattgcatgtggcagtagtgtattttcattttgcatactattccattttaagaatatattgctgtttatcctattgatggatatttgtattttttatacttttgtgtaataataaaaatactgctgtaaaaaaaaaaaaaaaa

SEQ ID NO: 292838 - DNA, 1000 bp, Homo Sapiens
aatacatgcccacatttattcaacagacattccttactctccatcaaataattaataatgaagacagaccctatgaatgtaagaaatgtggaaaggcctttagtcagaactcacaatttattcaacatcagagaattcatattggtgaaaaatcttatgaatgtaaagagtgtgggaaattctttagttgtggttcacatgttactcggcatctgaaaattcatactggcgaaaaaccctttgaatgtaaggaatgtggaaaggccttcagttgtagctcatacctttctcaacatcagagaatccataccggtaagaaaccctatgaatgtaaggaatgtgggaaggcctttagttattgctcaaatcttattgaccatcagcgaattcacactggtgaaaaaccttatgaatgtaaagtatgtgggaaagcctttactaagagctcacaactttttcagcatgcacgaattcatacaggtgagaaaccctatgaatgtaaggaatgtggcaaagcctttacccagagctcaaagcttgttcaacatcagagaattcatactggtgagaaaccctatgagtgcaaggaatgtggcaaagcctttagtagtggctcagcacttactaatcatcagagaattcacactggtgagaaaccctatgattgtaaggaatgtggaaaggcttttactcagagctcacagcttcgtcaacatcagagaattcacgctggtgagaaaccctttgaatgtcttgaatgtgggaaggcctttactcagaactcacaacttttccagcatcagagaattcatacagatgaaaaaccatatgaatgtaatgaatgtggaaaggcctttaataaatgctcaaaccttactcgacatctgagaattcacactggtgaaaagccctataactgtaaggaatgtgggaaggcttttagtagtggctcggatctcattcgtcatcagggaattcatactaataaataataaaaatt

SEQ ID NO: 292839 - DNA, 1000 bp, Homo Sapiens; identical to SEQ ID NO: 224209

SEQ ID NO: 292840 - DNA, 1000 bp, Homo Sapiens
tcatgctctatttatagaatatcaaaatatttatggccagaagttctgtcaatgtgttgatgtttttttacacatattaacttaataaatgtatgagtcttaaatacctcttagttctcattaaatttaggaaaattcacactagaaaataaagctgttaatgtaacagttgtggaaaagtgttctagcaacagcatatacttatcatcattgcctttccactactctactatctgtgtgatattagacaaaatatttgcttcttggtacctcagctgtaaaatgaaacacacctaaaagtgtggttgtttccaacatgtataatacagcaacaactatctggcccaaactgctttggattaatattggatattactgtttttattatcatcaacattattattagtggatttcttaataggaagatgcaatggagatgacaaatttggaaaaaccactcatcacttacatttcatgaagtacttctttgataaaatctgttatgggctgaatgtttgtgttcccgtaacaattcctatgttgaaacacgaatcccaaggtgatggtatttgaaggtagggcctttaggaggaaattaggtcatgagggtggagccttcatgagtggaattactgcctttataagaagaagccaaagagccagctagctctttcaaccacatgaggttacagcaagaagtcagcagtctacagtgcaaaagagggccttcaccagaacccaagcatgctggcaccttgaccttggactttcagcctccaaaactgtgagaaataaacctcagttgtttataaaaaaaaaaaaaaaaaaaaaaaaaaaaaaaaaaaaaaaaaaaaaaaaaaaaaaaaaaaaaaaaaaaaaaaaaaaaaaaaaaaaaaaaaaaaaaaaaaaaaaaaaaaaaaaaaaaaaaaaaaaaaaaaaaaaaaaaaaaaaaaaaaaaaaaaaaaaaaaaaaaaaaaaaaaaaaaaaaaaaaaaaaaaaa

SEQ ID NO: 292841 - DNA, 1000 bp, Homo Sapiens; identical to SEQ ID NO: 224210

SEQ ID NO: 292842 - DNA, 1000 bp, Homo Sapiens; identical to SEQ ID NO: 118687

SEQ ID NO: 292843 - DNA, 1000 bp, Homo Sapiens; identical to SEQ ID NO: 224211

SEQ ID NO: 292844 - DNA, 1000 bp, Homo Sapiens; identical to SEQ ID NO: 224214

SEQ ID NO: 292845 - DNA, 1000 bp, Homo Sapiens
caaactgtgaactgcaatgacatccttagttttggatgatgtgtattcttgtttttctttgcagcattttaatgaagattgctttgaagtgtttacgcagtagcacattagtataaaatttagtttagcacagtgggcaaaaagtagttaaattaataacttaaaatcagtctctaatttatacatctgaagtatagcattcctgtatgcacacagtaaataatgggtagcctgggctctgtgttactttcttgtatttttatccaagttgtcagcttcttattgctgtgttgttgtgctaaactttgaaccttatttcttttattaaaaatcagtacactttctataatttagtaagatactggccataatcttccattgttataaccttaattttcactctgggtttacagtggctggtctgtataaataatttacacaaagatgactgaatgctaataccagttgcacttaaatgaacatgcccattctcagtagctgatgcagtaatatattcagtttatctatgcattgctggggtcttgatataagatggaaacagtgtttcttatctaaagttttgattatcagcaagttgaatggacactttagttatttaaataaagatttttgaccaaaatccagaaaatggtatgagagaaaaataaattccagctagtttaatagatttttaaatgtcaatctgattttagcctcttagagagtgctaactagctggtaatgtttacttttaattccttgttaaaatgaggcaataatttgcaagatttttgtatataagtgtaaattcttcatatctttttagatctaattcaatattttctgactacttctgccatgtataataccatttttgtgcatgcttgatgtgacattcataaattgtaccactatgactttatccatgtaaaatagctatttattgaattttcttttaaaagctaaaaaaaaaaaaaaaaaaaagaaaaaaaaaaaaaaa

SEQ ID NO: 292846 - DNA, 1000 bp, Homo Sapiens
ctttttaatactgtgcctatttccaaaagaagacttgatgtggctttttacattatgctttaaagatgttaatggaggatacatagtcttaaaacaatttgtttgggagtaagttttagtcggaaaaaggtgaagatatttatgctgagttatgttaagcaaattattttgagaccttttgctggtagacaaaaactgaggaaatgtttcactaaatatattatggtcaatgaaaaaaccagactttagagtaaatgtgataaccaagtagatttgtgaactttatttctttagtaattatttttatcttatgtgaaatgattcaacctttaatttttgcctagattatagcaatgttttgttttaccttatagggcattttaatgcttggagaaagactataagtgaatctacttcaagggattctgttcatggtggtatacagttcttggtgctcttttggaaattgtcaaacatttactgatagcagaaaaggaaccccaaaacacctgtagtgttcaccttgttataagaacagaaacatttggaacaggtttcattctgtttctagatttatgttgttgtagttgaacagcaactgtttttttccctcagtgttaacgaaaggataaagactacctgtattgttgggtatgactatcaaaggatttccggtgattcatgtttgtgaattggagtttaaatgtttgcaggattactgtacttccaaagacccactagaatgtcagctgtactctgtactctccactgagaaaatgaacaaaatcctatgtcttaacagttatgctctaactttttgaaagctttttgatgtaaataataggttagaaactaaaagccttttaatcttacaaaatacaatttgaacgatggaaggttgttcagatactggctttctgtaaaaacatcattgtgttagattgtttgtaatgtactatcaataaaattggctgcttgggcggttttagttaccacctta

SEQ ID NO: 292847 - DNA, 1000 bp, Homo Sapiens
gaaaaattgtataaagaatatggaaaagccatttatatctgctcacatgtaaaaacatcagttcatacttaataaaatgcaattaccgtcaaatctttcagaaaatataagcctttaatacgaggaagagtattcttaagatgaacattacaaatagaaagagggttgtagtacctttagttttatgatagatcttattgtacacattttgtaccagaggaaaaccctaaagcattagttgctcaaactttgttcgacatcagggaatttgtattggagaaaaaccctgcaaatgtaataaatatggaaaaacattttttcaaaaactacagcttggaaaacatcagagagttcatactaaaatatatttttgcagatgcagtaaatatgaaaaatatttaatcccaaattaagtctatgtaaatatcagaattcacagtagaaatcataaggcataaggcactgatacttcagacattacactaaattagagtgttgagtataggagatccaaaactaaaattgttaggtaagttatttatatataactttaaaagaagtagaagattttttggagatttataattacattcaaagtatacttttttcttgaaaaaaattacagattttttgaaaagcaattgatgtaatttaactctcaaattcatgtttttcttcattcctattatattcacatgtgaaagcaagtgatctgttgttgctgaatcagagatatgagagattcttttttataggtgggcattatttatgcccctttctgtggaagagtaagaaaattaaaatacaagatgcatgaggaaaatgtagagatgctctttgtgattaacttagaatattaagtgctacttgaggtacatgttcagactaacattcttttgcagtatagtgagaaaaaaacattttaaaattaattatcattttgttgattgtgcttttatgtaataaaatgcagtactttaaaacatttaaaaaaaaaaaa

SEQ ID NO: 292848 - DNA, 1000 bp, Homo Sapiens
aatggttctggaaagccctggacattagtaatttgtcatctatataataaaacatttagttaatttgtggatttgaataacaataccatacagctgtgcaactactactgagatcagatacagggttttttgcccctcaaaataagttaaaacgaatgaaaatgaccagctctgaatgtgaaagctttctatcatcatctactacaaagagactctaaatggcaaacaggaaaaaaacaggcagaggtttatagccatagcatttaccattttatggcttatttgaaaaacatctttatgttgagaaacattccatttcagtaagttaaaatattttcattgtaactaaatgaagcaggtttttcattttgcctttaccaaagatcattttctaacatgccactcaagtgcctcttcgtgtgaatttttgcgtaacactataatttattcaacaactgtatacctttacagtatatctaaatatatacttactacatcgagtatactgctagaaaaatctaccagtgggattaaaaatgtattttcttcccataatgaaaataattcatgaccaatattacctgaagtgtcagaagaggagctgtcttaaattaatatggatcaggccattggaaaacttcagtatttccacttggttatgattttttgtgagtttccatttcagtttttattgaccatcacgttttctatcacaacatgacctgacagttgtatcccgataatttgccagttatagactgtgcttatcttcactgtattacaatattggacagaagtacaccaaatacggcattttcaaataaccaatatttctgagatgttttataccacagcacaagtggccatcagtatatttttaaagaattatatatcacagaaccctgaggctttaaaacactatggacttaccactttcttgacaaagaatttgtaattacaataaaatatttagaaatgaaaggcaaaaaaaaaaaaaaaa

SEQ ID NO: 292849 - DNA, 1000 bp, Homo Sapiens
cgaaatcatgggatcttcccattcactctggagatcttcaaggacaatgagtttgaagagccttaccgggaagctctgcccaccctcaagcttcgtgactccctctactttggcattgagcccgtggtgcacgtgagcggcttggaaagcttggtggagagctgctttgccacccccacctccaagatcgacgaggtcctgaaatactacctcatccgggatggctgtgtttcagatgactcggtaaagcagtacacgtcccgggatcacctagcaaagcacttccaggtccctgtcttcaagtttgtgggcaaagaccacaaggaagtgtttctgcactgccgggttcttgtctgtggagtgttggacgagcgttcccgctgtgcccagggttgccaccggcgaatgcgtcgtggggcaggaggagaggactcagccggtctacagggccagacgctaacaggcggcccgatccgcatcgactgggaggactagttcgtagccatacctcgagtccctgcattggacggctctgctctttggagcttctccccccaccgccctctaagaacatctgccaacagctgggttcagacttcacactgtgagttcagactcccagcaccaactcactctgatcctggtccattcagtgggcacaggtcacagcactgctgaacaatgtggcctgggtggggtttcatctttctagggttgaaaactaaactgtccacccagaaagacactcaccccatttccctcatttctttcctacacttaaatacctcgtgtatggtgcaatcagaccacaaaatcagaagctgggtataatatttcaagttacaaaccctagaaaaattaaacagttactgaaattatgacttaaatacccaatgactccttaaatatgtaaattatagttataccttgaaatttcaattcaaatgcagactaattatagggaatttggaagtgtatcaataaaacagtatataatttt

SEQ ID NO: 292850 - DNA, 1000 bp, Homo Sapiens; identical to SEQ ID NO: 224217

SEQ ID NO: 292851 - DNA, 1000 bp, Homo Sapiens; identical to SEQ ID NO: 224218

SEQ ID NO: 292852 - DNA, 1000 bp, Homo Sapiens
ttctcgtggtgtacaaaatgcttccagaactcagaacctgttcgagaaacttcagagtaccccaggggcagcaaacaagtgtgaccctagtacaccagcacctgccagctcagctgccctgaaccgcagcagagctcccacttctgtcacccctgtggctccaggaaagggtctggctcagccaccacaggcctatttcaatggctcccttccacctcagacagtaggacatcaggctcatggaagagaacagtccacactcccaagacaaacactccccatctctggtagtcagactggcagctctggagtgatctcccctcaagagttactgaagaagcttcagattgtacagcaggagcagcagctgcatgcctctaaccggccagccttggccgctaagtttcctgtgctcgctcagagctctggaacagggaaacccttggaatcctggatcaacaagacacccaacacagaacagcagactcctcttttccaggtcatctcacctcagcgcatccctgctacagcagctccgtctctgcttatgtcccccatggtgttcgcacaacccacctccgtcccgccaaaggaaagggagagcggcctcttgcctgtgggaggccaggagccacctgctgctgccaccagcctcctcctgcccatacagagcccggagccctccgtgatcaccagcagcccactcaccaagctccagctccaggaggcactgctgtacctcattcagaatgatgacaacttcttaaatataatctatgaagcctatctcttcagcatgactcaagcagccatgaaaaagactatgtgacagcaaggccttttaaaactgattttcaaggtccttctagaactccggcacaaggttctttcatgttgagtgttgtttccttcaatgtttctgccttttttaaaaaaaaagtatgtgtaatatgaagtaaaatgtttcagacttttttttatactcaaaaaaaaaaaaaaa

SEQ ID NO: 292853 - DNA, 1000 bp, Homo Sapiens; identical to SEQ ID NO: 118690

SEQ ID NO: 292854 - DNA, 1000 bp, Homo Sapiens; identical to SEQ ID NO: 224221

SEQ ID NO: 292855 - DNA, 1000 bp, Homo Sapiens
actgtaatattaacagccaaggtgtgatctgtctggacatcttaaaggacaactggagtccggctttaactatttctaaagttctcctctccatctgctcacttcttacagattgcaaccctgctgaccctctggtgggcagcatcgccacacagtacatgaccaacagagcagagcatgaccggatggccagacagtggaccaagcggtacgccacataggggcctgctgcctgccgccccgcgggacctgtgcaagcacattcaccaagtgcatcggtagccctgcccacccctccagacctcggttcttattttcctatttttattaaatttggaaccattttgtgatggtatgttgtccatcttcccatcccagttcttcctgccccccttcctctctcccacgctctcttttatctctcattttattcccttgttgatttctgttaacttgaaagatttgggatttttttcccacctcatcatagatgggaacttttgttttcagtgcaaacaatgttggagctgtaatagtaagagctttcttacaaagctttgtattactgtgtggttttgttttttttgttgttgtttatttgattttgatttttttttcttttatgtgatctttgggaaaacacattcagaattatatctcgtttctacttaaatgtagtgcttagggttaattttttgtactgaagtctttattggtgggtgcatgctactgggaacaagtttttgtacaaaagcttcaatcagaatcactgtgcattactgagactctgtttatcactagccttctgtccctcccgcagaagactgttggattgaacaaaataatatgtattttgatttacttaaagtgcttgtaaatttcttagggacctgccacttttgactgtggatcagttgatgtacacttgtattattaaagcactcaataaatcactgtggctgataactgcgaaaaaaaaaaaaaaaaaaaaaaaaaaaaa

SEQ ID NO: 292856 - DNA, 1000 bp, Homo Sapiens
taggcagacaggtccccagagtcctcaccctgctccccagacagtagacacagtgcccgtcctggagttgcaccactgatagtcacagcacacaatgattgacaactcactttttttttttttttttgagatggagtctcgctctgtcgcccaggctggagtgcagtggcgcaatctcagctcactgcaagctccacctcccgggtttatgccattctcctgtctcagcctcccgagtagctgggactacaggcacccgccaacacgcccggctaattttttgtatttttagtaaagacagggtttcaccgtgttagccaggatggtctctatctcctgacctcgtgatctgcctgccttggccttattattttttttttttaaggacagagtctctctctgtcacccaggctggagtgcaatggcgcgatcttggctcactgtaacttccacttgccaggctcaagcagttctcctgcctcagcctcctgagtagctgggactacaggcacccgccaccatgcccagctaatttttgtatttttagtagagacagagtttcaccatattagcctggctggtctcaaactcctggcctcaggtgatctgcccacctcggcctcccaaagtgctgggatcaaatccactgttaatcattaggctgaactgtctcttatagaatgaggtcaaagacactcccagttgcagggagggtagatggccccacccagaccgagagacacagtgatgacctcagcctagggacaccaaaaaagaaaaaaaaaaaaacccaaaccaaaaacgcaaaccaaagcaggcaggcagacagctgctgggggaaatcctggggtccttgagacagaggcaggaccctcgtgttcccagctgcctcttgccttgatagtggtgctgtgtccctctcagaccccccacctgagtctccacagagccccacgcctggcatggcattccacagaaaccataaaggttggctgagtcc

SEQ ID NO: 292857 - DNA, 1000 bp, Homo Sapiens
tggtcatatccaaccctcattcagtatttctatcaagaaagagatgctacaaaaaaaaaaagaaaaaacctttatgtatacagacgtaaacctcagaatgtatgttgagtccccactgtcatctaccaagacttgcacccccctcattatctaccatgactgtctctcagcctcacgggccctcagcactttgtgttttgacccccagcaccgtgtcttgtgaactcccatcaccttcaagaaagcttccgaggtaagaattttatggtcatctgggacaacttaaatctcccttctgctgtcatagttcttccaactcagttgcctttttttttttttcgtactcatcactgacttgaagcttagtatctggcttccttaaggatgtaactttcatgtaacagattaataacttatatgaaaaccaacacaaccatatgtttagggctggaaagggccatgacgcctggccatttttcctgttttaccttactcttatgtgtgtcacacttcatcaattccggaaacagtttctggagatctcctcattacctcttttacaatcacctcactccagcatggtgtctgttacctcttcccacttgtgacaatgtctagtaaggtccactctccattctgtgtgatgaccacttattacaaccctcagaataggggacagtggtgtgccccctgcaatacaatggtttctatctcctgatacttttattacacctctagcaggatgtcttgtgatcctccttattgatttttccctcacgatgatgaacaattatctcccgttactcacctagcagtatctaactgtccctaacacagcatgtgggaatgccctcaatacggtggatgctgttaactttcttccttcccctcaggcaatggcggtgacttacaatgaaccataatgtccacatttcccaactgtattttggagcctcttctgtccccttctttctaggaccccagttaaaaaaaaaaaaaa

SEQ ID NO: 292858 - DNA, 1000 bp, Homo Sapiens
caggctcgaagcccaaattcgactgggttagcgctcccgacggccctgaacgccacttccgcttcaacggggctggcggaggcatcggggcgccgcgacggcgtgcggccgcactctctgggccttggggctcccctccgccaccaccagagcagatacactcagctcccgggccccggaggcccgcacctgccctgctggcgccgcctacgttcatcttcccagcacccaccaatggcgagcccatgcgcccggggcctccaggcctgcaggagttaccaccgctgccaccgcccacaccgccgcccacactgcagccaccagcgctccagccaacgccgctgccggtggctcccccgctcaccccgggtctgggccacaaggagtcagccctggctcccaccgcagcccctgctctgcccccagccttagccgccgaccaggccccggccccatccccggctccagctcccaccgtggctgagccctcgccgcctgtgtccgcgcccgcacccgcggctgcgcccatcaagacccgcacgcgcaggaacaagggttcccgtgcagcccggggcgcgacccgtaaggatggcttgcatggagatggtcctcgcgaacgagctacagctaccgtgcctgacagcagtggtggagggggtggtggcagcggggcctctcagactggggcagctaacacccgcgctgcgcgccactggctgcccttccaggtgcttaactcctgtccctgcaagtgttactgccaccaccagccacgccatcgccgcctgccacgcaacgtctctgcctggctgagcacatccaccaaccacctgggcgagccaccctgggttgccaccatcaagctgtccggctctctggtggccaagctggagcactacgacttgcaggccacccattccaactgagtgtagtcggctcaacaccctccaccttcccctccatgccaataaaataaccaatccagaaaaaaaaaaaaaaa

SEQ ID NO: 292859 - DNA, 1000 bp, Homo Sapiens
ttgcagtgggctgaatggaaacacctggtttgtgctgtgttagactgcatgcttgagtgtttgggatttcaagctcgctctctttctctcactattaggacttttctttttcttcttcctcttctctctattttggttctattctttttttttcttttttctttttttttttttttttttttttgtggtggtcactgctcagtgtaatgtgcagaatgatttgttttttgttttttttttttttttttggtccttcattgcatcctgccatacccatgagcaaacagtttggcattaattatatatcactgccaccctctgaactttgaaaactgccatcttcagacttggtataatggaagaggctttctctctccaataaaccttttgcttcagggtatactcttcggtttttttccagatgtattatgtatgaactttgtactatgtatagccagagttttatttattttttaaaaaagaaactttttcttgataaaggaataatggtggtctagctagttcttgtaaaagtgatgcctcttgaaaaaaaacagtcctattcactagcttttagtaaaagaatcagatcttttctttcttgttaccttggagtcttaaaaactgattgctaaggtgaaacaattcaatgcataagtatggagctaagtgccttttggaggatttcttggaagagcatttatggagatacttaagggaggtagcaaagatttgaaccgtctgtctttttaagtaagggcagaaagcaaggttgtccaggttgtactggacacttctctccccacccctttcctgattgttttatgtgattgattttaaattctcacactgccacttctttaaaaaataaaatcctttatttgcttaaaaaaaaaaaaaaaaaaaaaaaaaaaaaaaaaaaaaaaaaaaaaaaaaaaaaaaaaaaaaaaaaaaaaaaaaaaaaaaaaaaaaaaaaaaaaaaaaaaaaaaaaaaaaaaaa

SEQ ID NO: 292860 - DNA, 1000 bp, Homo Sapiens
atagcgtcatggagccccatgcgccatctcgaggccaagctgaaagttctactctttctagtggaatatcaataggtagcagcgatggttctgaactaagtgaagagacctcatggcctgcttttgaaaggaacagattataccattctctcggcccggtgacaagagtggcacgaaatggctatcgaagtcacatgaaggccagcagttctgcagaatcagaagatttggcagtacatttatatccaggagctgttactattcaaggtgttctcaggagaaaaactttgttaaaagaaggcaaaaagcctacagtagcatcttggacaaaatattgggcagctttgtgtgggacacagcttttttactatgctgccaaatctctaaaggctaccgaaagaaaacatttcaaatcaacatccaataagaacgtatctgtgataggatggatggtgatgatggctgatgaccctgaacatcctgatctcttcctgctgactgactctgagaaaggaaattcgtacaagtttcaagctggcaatagaatgaatgcaatgttatggtttaagcatttgagtgcagcctgccaaagtaacaaacaacaggttcctacaaacttgatgacttttgagtagaagcctgagaaaaaaagagaggtgaactgttgcttctacgtgagcatgaggacctgataaaagagcgccagctataaaccatcctgtgccaggaagagcccagaggctctgtctcagtcgttggagttctcaaccaaaaaagcactaatttcagggaatgatttgagatattcccagagaacaaattggagttgcaaaacaaactgccatgaaccatgcttcttatctcagaactgacctgtggaaacccctgccttaaaagaatgaaaggaaaaccaacatgaaacaccaaatagtgtgtgtgaatcttctggcggtgctgtgcttggaatagatcgtagctaatttacaaaaaaaaaaaaaaa

SEQ ID NO: 292861 - DNA, 1000 bp, Homo Sapiens
aaaaagaagctttagaaaaactatggctatataccctgaccaataaatgatagtagaatattcaacatggtatacacaaatgataaataatgtgcctcagtgctgcatataaaagaatactggttttcattttgtacttaataaattgagcagcattcattaagtgcaattattgttacatgtacctgacagttgaaactgctgaggtagaattaatggcttcataacaattatcgtggtcccacgggctgcaagctaaaactagaagctcttgtggcttgcctgcactttacacaattgtgggagaaccgaaagttggctcttcagtaatggaaactataaagtgaataaaggctttttgggacactgaagtagacattgtgatattaaatatacatgatgcttaatactaaatgtgtctgtaacacataaaatcatttattggaaagagacattgcttttaaatatcctaggctaacaaactttttcacaaaatatatggctggcaccttaacaaataaagcatgtgtagttaccattttactcctatgaatttaatactaaagtgacccagtgaggtttttgaatagacgggtgctaaaatttacagggctgaaatagcttattattctgctggttaatgtatcttacgccacggatcatttatttttatgaagctttcaagtctttgtgtgcaagtaaaatgatgttgtggcgttgttcttggatggtaagtggactgcctagaggacatttgttaaaggtcaaagactaattgtacacatatggagaaaattagcaatgctgtagtcttaaggaaaaaatgatttatcattcatatcaaaaagagtttagcaaatggaaaaccagttaatgctttaattttaaaatgttttggtgtcttacttttccctaaaaatgacatgtagtaaaaaatggatacttttaaaatcccttcccttctgctattttctggcttttaaagtgattattcaaaatg

SEQ ID NO: 292862 - DNA, 1000 bp, Homo Sapiens
acctgatttttctgtatgacatttttttttttttcagagggcagggagcaatttttctatggcatgtgacagattcctccagttagaaaaagctgttaaaatcaacacatggtgctcttttaccgtgacattttctcacctgtgcacagtgagccgatagcttccttttagtcttcacctctcaaggaaatgtttttactgtcttttcccagacacacagtggggttgagggagctaggctgttttgctagagataattgcaaggcacgtggcactaaaagtcatttttcttctgtggatccataagaggaacatttcctcagtgtagcctaacaatgcagcccccaatctgttcctttttttttttgaaatgggatctctgtcgcccaggttggagtgccatggcaccatctcggctcactgcaacctctgcctcctgagctcaagtgatcctcccacctcagcctcccaagggtgtgtgtgactacaagtacacactaccacgcccagctaatgtgtttttttgtagagatgggattttgccatgttgcccaggctggtctcgaattcctggattcaagtgatcctcccacctcagcctcctaaagtcctaggattataggcatgagccactgtgcctggccctctcatctgatagaaaattagattttgctatgagccatttcctgagggccaatttaatactcgtgtgactcttcttagagttaccatctgccttaaatttcctctgtttttcacattcttggaaatatatcattgttttgcaaatttctatatctaattcagggtttaccaggagcttaataattaatggctacatagcaaggcatcgtcttggaaccggagaattttctctagactattaggctagacagtctcatgattatactaaccaaacctggagtaaagtggttgaaaaaaaagaaagtataaaggggcttattaaagtggttaataaatatgaaaaaaaaaaaaaaaa

SEQ ID NO: 292863 - DNA, 1000 bp, Homo Sapiens
tttagaggatgatttggcctggcaaagtttgattcatccagattcctcaaatactcctctttcaacaagacttgtatctgtgcaagaggatgctgggaaatctcctgctcgaaatagatcagccagcattactaacctgtcactggatagatctggttctcctatggtaccttcatatgagacatctgtcagtccccaggctaaccgaacatatgttaggacagagaccactgaggatgaacgcaaaattcttctggacagtgtgcagttaaaagacctgtggaaaaaaatctgccatcacagcagtggaatggagtttcaggatcaccgctactggttgagaacgcatcccaactgcattgtaggaaaggaattagtcaactggctaatccgaaatgggcatattgccacaagggcacaagctatagcaattggacaagcaatggttgatggacgttggctggattgtgttagtcatcacgaccagcttttcagagatgagtatgcgctgtatagaccactgcagagtacagaattttctgagacgccttctcccgacagtgactcagtgaactccgtggaaggacactctgagccatcctggtttaaagacataaagtttgatgacagtgacacagaacagatagctgaagaaggtgacgataatttggctaattctgccagtcctagcaagcgcacatcagtcagcagtttccagtccacagtggacagtgactcagccgcttctatcagcctgaacgtggagctggacaacgtgaacttccatatcaagaagccctccaagtacccacatgtgccccctcaccctgctgaccaaaaaggtaggaggtagtcaccatctggaatccaaacacaggctggacagctgggccataggatctcatgccagcctgtccttctggcttcctctgtcccacgtggctgagggtatttggtgtgggttttgttctaccctttctcatttctcccacacctcctc

SEQ ID NO: 292864 - DNA, 1000 bp, Homo Sapiens; identical to SEQ ID NO: 118692

SEQ ID NO: 292865 - DNA, 1000 bp, Homo Sapiens
cttctggccaggccgtagttacaaggaccagactttaatgttcctccatgaacaactagaaaactggacaaagtatatgaaacaactgtttgcagacattggacaactggtcaaacaagaccgagatccccaacaagaccgagaccctggacgagtccgagatcccggacaagaccgccacccttgttggaagggagacaggcaaggtgaaccctggggccctggccttctgcctgaaggccgtttctgggctgccggcacagggagggaagcagggcctgagcaaagctgagcacccttacggagctgagactgcactagggtctggggacacagaaggagccggcatttcagggcagaatcccgcaaggaggaaactgcagaaaagagctccagaaatctgcacagggttctcttgagtctgtactgaggaccagcctgtacatgtatagaagaaaactccacaaagccaggcaaagaggagaaaggagcatgtaaggtgaacaacttccagacctcgcacacggtcatgacatactgaagctccagccagggggatgggtccccagtgatcactgtggacattcagtggagactcaggaggagccacaccgtgggaacagggctgatgctgtctgcagtgaaggctcgtctagaacctgcctgagaaactgcagctacagaaatccaaggcctggcatggcggctcacgcctgtaatcccagaactttgggaagccgaggtgggcagatcacctgaggccaggagttcacaaccagcctggtcaacttggtaaaaccccgtctctactaaaaatacaaaaattagtcaggtgtggtggtgcatgcctgtaatcccagctactcaggaggctgaggcatgagaatcacttgaacctgggaagcagaggttgcagtgagccgagatcgcgccactgcactctagcctgagtgacagagcagactcctgtctcaaaaaaaaaaaaaaaaaaaaaaaaaaa

SEQ ID NO: 292866 - DNA, 1000 bp, Homo Sapiens
caagatacttccttagaaacaggacaaggatatgaagatgaacaagatggctggaacagttcttcgaaaactactcgagtaaatgaaaatattactaatcaaggcaatcaaatagtttccctaatcatcatccaggaagagaacggtcctaggcctgaagagggaggtgtttcttctgacaacccatacaactcaaaaagagcagagctagtcactgctagatctcaggaagggtccataaatggaatcactttccaaggtgtccctatggtgatgggagcagggtgtatctctcaaccagagcagtcctcccctgagtctgcccttacccaccagagcaatgagggaaattccacatgtgaggtacatcagaaaggatcccatggagtccaaaaatcatacaaatgtgaagaatgccccaaggtctttaagtatctctgtcacttattagctcaccagagaagacacaggaatgagaggccatttgtttgtcccgagtgtcaaaaaggcttcttccagatatcagacctacgggtgcatcagataattcacacaggaaagaagcctttcacatgcagcatgtgtaaaaagtccttcagccacaaaaccaacctgcggtctcatgagagaatccacacaggagaaaagccttatacatgtcccttttgtaagacaagctaccgccagtcatccacataccaccgccatatgaggactcatgagaaaattaccctgccaagtgttccctccacaccagaagcttcctaagctgctggtctgataatgtgtataaatatgtatgcaagtatgtatattcctatagtatttatctacttaggatataagatataatctcctgattatgctttcaatttattgtcttgcttcattaaaatgtaaggctaaggagagcatggaatttgtcagttttgttcactaaagtattccaagtggttgggaaagtggaacatttccaagaaccaataaatttctgttgaat

SEQ ID NO: 292867 - DNA, 1000 bp, Homo Sapiens
aataggcacacatgacacagcatgtggttaatagctgtgtcttgaattatcctctaaataaccaaatttagttgtatgtatttgtaaaggatatggcttcagaagctatcttttgttctctgtcgatataactcttaagggcattcctgacccaagaaagactccttgcgtttgtaactgtggtctaatacccaaatgtgccctgttcttatggatacagtctcttgaagcatacctcaaagtcatagagagaatatggcatttgaaagaaatcgtttgccttggatcatatgagttattttgtgaaacaacagctgacttttcagaaaaggagcaactacttttatatgctaaaagtatttcataactttctgggaaaccttatttaggtataaatggtcatcttattatttttcaaaaaggtatattttaataattgtacaatttatatacagtttgtgaccagaatttgtaagttgttggtgtcatatcaaggatcttttaaattatgccactacaggatgtatcatttcaagtctattttgcacagctaaacagtagcaaaagatgccaattagcatgataatggtgtcttcatttttactgtatttaactgaaacctaacacatgttgaaaaccatatcatacctagtttatctcttaatttcaaactatgtacttgtaaaaatgatgtaaatttgcactgggaacctgggaaagagtgactgataatttttggtgcgtgatttttagatttgtcttttttttttaagaagaatttgttactatgtaaaccctgacattaaatgttttatctctaccagcatcaggaggaatcactgctttaagggtattatgtaatgcctagtgccttctatttacagtgaaaaagaggttttgcgaaggcatttatggtcattaccaaaaactaaattaaaggccttggattttaaaaaaaaaaaaaaaaaaaaaaaaaaaaaaaagaaaaaaaaaaaaaaaa

SEQ ID NO: 292868 - DNA, 1000 bp, Homo Sapiens; identical to SEQ ID NO: 224223

SEQ ID NO: 292869 - DNA, 1000 bp, Homo Sapiens; identical to SEQ ID NO: 224225

SEQ ID NO: 292870 - DNA, 1000 bp, Homo Sapiens; identical to SEQ ID NO: 224226

SEQ ID NO: 292871 - DNA, 1000 bp, Homo Sapiens; identical to SEQ ID NO: 118694

SEQ ID NO: 292872 - DNA, 1000 bp, Homo Sapiens; identical to SEQ ID NO: 118695

SEQ ID NO: 292873 - DNA, 1000 bp, Homo Sapiens; identical to SEQ ID NO: 224229

SEQ ID NO: 292874 - DNA, 1000 bp, Homo Sapiens
tcatagcctgtggtctccacataaacagcaacaagacaagtaatagtcctttttttgtttgtttgtttctattctagggataactgctcatgattactcccatatatttctagtatttccctctgtactgttggcgtgacattgacactagtattattttacaaaacagactgaaaaagacattagcaagcatagtctataaacctttcagtaggatgatattctcttggttgtttttcattgttgtgtgtaatcttttttttttctttttctttttttttttttgaggaaaagcatgaatttgttaacagattttgagtctcaaccaactagcagaaactttgtttagggttgctaaaagactgtaatatgatttttgaactagctgataataaagttgtagataagatgttttaacctgtcttttaatatctgttagttagacaaagatgtttgatattaagtttgtaaatttaattttaatgctgttttaatggggttgaaaacaagcagctactgtatgtatgtagctaactgaatttgttcagtgttttaacctgtatttgttaaaaaagaaaaaaaaacacacataaagttccatgtgtaagcttctctaaataggaaaccacaatttgtcaaatatgtttgccataatttgtcaataaagctgaaaacttttgtaaaaattaaatttggaattacttgttttctagctttaaatgcctgctttatttcttcttaagagatgcctaaaatgttttctatttaaaaattacaaaaatgaacccaagtctgttttaagatatttgtgtaatacttaaaaatgtattaataacttatggttgttaaataatttaaaagttaacaaactaaactgttacatgaatcatggttagtaaacactaatgtataacatgttaatggaaaaaaatggatttagaataataaatggattttaaactataaaaaaaaaaaaaaaaaaaaaaaaaaaaaaaaaaaa

SEQ ID NO: 292875 - DNA, 1000 bp, Homo Sapiens
cagagagacggagcaagttgcctgaggtcacagagcagggacttggacaccaggcagccggctccacagaggccctctctcctccctgcctcctgaccctcagacgcctccgccccacgggtgaggctgcttctgcttctttccaacacgactcgaaggaaagccctgagggccgagcccgctctgcgtggacggaaggcagcgtggggcggtccaggccggggctcaacctgcctcgagggggagcgtgggcgcatgtgagcgggagggacggagactagcgtggttccagtgtcgtcatcgctgctaaaaaaggggtttcccggtgacaggccccgacagaggagcaggccatgaggcaggcaggagccacgtatctgggcccagcgcacccgccaagctctctagcctctcctggcctcagtatccttctctgggagatggtccagctgaaaatccccagcatccacaagaaagggtggaagccctgggggccctggcctggcccaggtgcaggctgcatggccgggcggggcggtgtctcctttcacagcttccccgtctgtccgcagcctccaggagccccacacagggctggggctctgtgcccccaactcacacccgtcggctcccccaggaggagcaggctgggcccagagccgcagggtgggctgcagggaggtctgacttagctggggaaagtgccatccctgccattgctagtgacaagctcgggctgctgtggccccagcacagattcaacactcactgcgctacgtgccagctgttgcacactcacctccacacccaactcacaggaagcaaggctggggaggagggaactggccccaggccacacagatgctgcgagttgggattatgatcgggtgcagtggctcacacctgtaattccagcacttggggaggccaaggcgagtggattgcttgagcccaggagtctgagaccagcctgggcaacatggtgaaaccccatctctac

SEQ ID NO: 292876 - DNA, 1000 bp, Homo Sapiens
accaataagaaattaaggaaagaaacaaaccacgacacccaaatgccgtaatcttaaagaaaagcaaatgcagtcccagtcctctgaatgggtcagccccttagatggaggaggtgggacgtttgggcttgggggctcggcaaggcaagcaagacacaccagagctcttccctcgatgccagccattcatcgacagtcagcatgtcatccacaagtatttcctgccccgagcctatgctgtcgccatcccactggctgcaggcctcctgctgctcctgtttgtgggactgttcatctcctatgtgatgctgaagaccaagagagtgaccaagaaggctcagtgaaggtcccgcagggatgaggctgccagccccttctctgcttcccctccagcacagggaccaagtgggggagcctgcagaacctgtccaggcacagtggctcctcaagcctgcctgtcctgcagagtccccatggcatggagcttacacctgactgactggagccccctccccgactcccacttccagaagctaggagggagggatacctggaagactccggtcacctccttcttgctcagggcctaaaagatgctggtcctcccaacctcactctcagactccctgccaccttttcccctgggttctgccgtcttgcctcacttcccctcctgtcacatgctgacgttggacttagcaggttctaaggccacatgtgtgacctctctgacttctcttcctccaccaaggcagctttccttaccctgacacagccccagaccccacaaagccttctggacctggaaagcctggggaaggactgacagaccccaggaccagccctggggctcagggcagccaccccgggccgctgaccgactgacctctcctcacggaggcccagccccaaagccccagggctggcccgtttgggacagctgaccaataaacactgatggtgtgttaaaaaaaaaaaaaaaaaaaaaaaaaaaaaaaaa

SEQ ID NO: 292877 - DNA, 1000 bp, Homo Sapiens; identical to SEQ ID NO: 224231

SEQ ID NO: 292878 - DNA, 1000 bp, Homo Sapiens; identical to SEQ ID NO: 118697

SEQ ID NO: 292879 - DNA, 1000 bp, Homo Sapiens; identical to SEQ ID NO: 118698

SEQ ID NO: 292880 - DNA, 1000 bp, Homo Sapiens
gctctgatcccatgcatgtgcgcatgctcagagccctgctgcccacaacagagcactgcgctgcgtgggagtccccacttcccaggctatcagagtcaacgtcctgcctgtgcagctgcagcaaagccagtgagaggtgggtctcgccatgcagtaaggccaccctggcacctctttatctaaatccgaagtcccctagccccgcactaactaactgctgctgtgggccagggccattttgagcatgaatggcccaggttttttgccttctaggacctttgctgctccaccgaagggccagggactatggttaacttatcaacatcaacccattaactagtcactgtgccagagagtatctgtcaggctgtcaggctgtcaggttgtagcaacctcttcattccagagctagcccagggaccggggtgggacaatgggtttatgcgtgtccacagtacaccctccctctcccagcctccaccccagggtctgcaggtcctccggcatgtagtatttatctagcaaggcggggtggtggaggcagcaccctggcaaagcagctcacacactgcagccacactcatcagctgtggtgaggcggctggagcaaagtcaaagtcatgcagcaaaatgaaaactctgggactcttcggcaaaatcctcattaagccgagcagctttggccaagtaatttttgcctccttccctcgcgtggcctgagtttaggagcaagggtggccagagtcccttacccacagataagcctcccctcatgaaatgccactcaccccgggctaccattgacatcagggctgcatttccagccagcctggaagtaaaatttgagaggaagacaatattaatctgtgtccccacctagtgagctgtggacaggtttaagttgggtctccttcttcttcaccacaaaaacaggctctaagaaatcatgttactaaaaaatcagtgtaaagtctgtttaaaataaaaaagaatgttttct

SEQ ID NO: 292881 - DNA, 1000 bp, Homo Sapiens; identical to SEQ ID NO: 224234

SEQ ID NO: 292882 - DNA, 1000 bp, Homo Sapiens
agctctgcatttgttttcccttaggtgaacaatgtaggaaatcctcaaagtggctttgaatttaatgctccacttcagttaccagaggttaaaaatgggttttgttgtttcctgtgcattctcaaactcatttattagatagaacaatctttctatatttaatttttttaatatataggtcttaagtggtgctttaaaaagaaccctcacaagttaaaaattaagagttgtttcagtgctagatcttgccagctaaagacttgtgataccactatatagtatagttgttccagaaatcttcattttaaatagaagtgtttacaatgccttttttcccccagtattggttttcaatacctgttttcatatacaattacaaacctttcaaacctgtattccttctttatactcaggaaaatgtcaccaagcaccctcctccccagttcacaaaaggaagaagatgaagattctgtctccctgttccccctccccagttttccaaagtgtctgagcatatgcctggctgtcctcagatcatcaccatgccacatccctgctccctacttcctggcagccaagaaaagccctttctacatgctagaaggaaatacatccaaaaagttagcattggagtgttagaaactagaatagacctctccgccaccgagctgctgtgtcacgccctcagcctgctagggagtgacaagcccaagtcattcttgatccaccccttctcccaccccagatcccagggactcatcctgtgactttgtaaccacactcattcctttcaaacacagaggaggaattattgcttcatctgactttattcaaatctagttatgtattggcctaaattatttgtgcaaaatttgaaatgttttttatttaaatattagaaatagcacaaagtcatggagtttttaaaaattgttataattaagtaaaaataaagctgaattgtgtcaaaaaaaaaaaaaaaaaaaaaaaaaaaaaaaaa

SEQ ID NO: 292883 - DNA, 1000 bp, Homo Sapiens; identical to SEQ ID NO: 224235

SEQ ID NO: 292884 - DNA, 1000 bp, Homo Sapiens; identical to SEQ ID NO: 224236

SEQ ID NO: 292885 - DNA, 1000 bp, Homo Sapiens
gcacctactgctttggacgcctcagtcaccactccttcttctcccggcaccacccacacccccagcacgtgacccacatccaagatctcaccgggaagcctgtctgtgtcgtcagggattttccagcccccttgcctgagtcaactgtcttttccggctgtcaaatggggatacccaccatctctgtccccattggagacccacagtctaatcggaacccccagctttcttctgaagcctggaagaaggagttgaaggagctagcttcccgggtggccttcctcaccaaggaggatgaactgaagaagaaagagaaggagcagaaggaggagcctctgcgggagcagggggcaaagtactcagcagagactgggaggctcatccccgcttccacccgggctgtcggccgccgcagatctcaccagggccagcagagtcagtcttccagcagacatgaaggagtccaggccttcctccttcaggatcaggagctgctggtcctggagctcctgtgtcagatcctggaaacagacttgctaagcgcaatccagttctggctgctctacgctccgcccaaggaaaaagacctcgctctgggactcctgcagacagcagtggctcagctccttccccagcccctagtctccatccctacagaaaagctcctaagccagcttccagaagtgcatgaacctcctcaagagaagcaagagccaccctgcagtcaatccccgaagaaaacgaagatatcaccttttacaaaaagcgaaaaaccagagtacattggagaagctcaagtcctccagatgcattcaagccagaacacagagaagaagacatcgaagccgagggcagagagctgaggggccctaacacttgcacctgccttgctcaagagcagccccaagggttcaggggtgtttctgtctccaccaccttcacagcagtacctgattccctaccgtgaaaactcttactaaataaaaccgtcttccctgag

SEQ ID NO: 292886 - DNA, 1000 bp, Homo Sapiens
gtttccttcactggataccctcgtcctggccaacaatcatttgaatgctattgaggagcctgatgattcattggccaggttggttcctaatcttcgatccatcagcctccacaggtcaggtttgcagtcctgggaagacattgataaactaaattcatttcccaaactggaagaagtgagattgttaggaattcctcttctgcagccatataccaccgaggagcgaaggaaattggtaatagccagattgccatcagtttccaaacttaatggcagcgttgttactgatggtgaacgagaagattctgagagattttttattcgttactatgtggatgttccacaggaagaagtgccattcaggtatcatgaactgatcactaaatatgggaagttggagcctttgacagaagtggacctaagaccccagagcagtgcaaaagtagaagtccactttaacgatcaggtggaagaaatgagcattcgtctggaccaaacagtggcagaactaaagaaacagttaaaaactctagtacaattacccacaagcaacatgcttctctactattttgaccatgaagcaccctttggcccagaggaaatgaagtacagctctcgggcattgcattcctttggcattagggatggagataaaatttacgtggaatccaaaacaaaataacctctaccagccttgtgaaaaacatacacataaggacttgttgcagggcatttgtttttaatgtggttttctttaggagggagaggttgtttttgttttgttttgttctgtttaggtttgggaaggattttgtatatttttccccctggagtgagtaggggccatttttgggtgttttctaccacagattgatttggctcagccagcggaattggccacatttccagtgtatgtgccctctctaaggaaagatgacaaagaaatcaccgacttcttactgtgttcactgggatttgcctgccacgttggtatcagtac

SEQ ID NO: 292887 - DNA, 1000 bp, Homo Sapiens
ataaaatcagaactcttaattggcttatgcccaggtctaggctgagaagtcctttttcttcttcccacctttatttccttagtttctgtccaccttaatcgaaacaacacatggttatgtctttttcctgctacaactacagggtacttgagcctttcccctcaagtgcattcgaagtcacccaggatgatcctcactagtagcctgctttggcagtgtggctttttgcacacttgccctgtcttcctgagactacttcagtaagccatgcttccttcttccccacttttatttggtgtcatgaatagaaacttccaaatgtaaccatggaagctaagtttggcctgctttgctttttagtctccacaccatgggcagaactgctgtctttactacttcatctcacccaagtcccgttcccaggcagccaggggcctgggtttgaataattgcagggccagcctgccatgatctttctcacttactcctctcccattcagcaatcaaccagactaaggagttttgatccctagtgattacagccctgaagaaaattaaatctgaattaattttacatggccttcgtgatctttctgctgttcttactttttcgaatgtagttggggggtgggagggacaggttatggtatttaaagagaataaacattttgcacatacatgtattgtacaacagtaagatcctctgttaaaaccagctgtcctgttctccatctccatttcttcccatgctgtaaccccaggctccaccagctgttccccagtgatgttacctagcttccctctaccgttgtctactgaccatttccactacatgcctttcctaccttcccttcacaaccaatcaagtgaatacttgattattatctcttccttactgtgctttatcttttttgtttggattggttctaattaatgaaaataaaagtttctaaatttacatttttatagggtattgtaaataaaaacaaattgtatactt

SEQ ID NO: 292888 - DNA, 1000 bp, Homo Sapiens
gcaggggctctcccctcacggaaatgtggcattcagcaaagctggtcggagcctgcatggagacactgaggcccctgtcaactgtagctcctgtcctgggcccccgacagcatcaccctcgaggccggtgcttcatctcctccagctccttttaagaacgaacttgatgaaaacacagactttacctacaagcccggcaggagctcatggtccacactcactcgctttggggctgacagccactttcccaggggagcctggggcctcccctcgactctcaccagggccttcgacccctccaggagcccccactctacctctagcttccccaggggctcctcagccacctcctgtgactccagagcgctcgttctcagcctctggggcccagatagtgtccaggtggcctcctctgcctggcaccctcctgacggaagcttcagcactttccatgatggaccccagcccctcgaagacccccatcaccctcctcgggcctcgcgtgctttctcccaccacctctagactctccacagcccttgcagccaccacccaccctggcccccagcagcccccagtgggggcttctcggggggaagagtccaccatgtaaggaggtcactgtgtccgggagactctggagagaggacctctgccagtggcccagggtgtgtgcagggcagctccaaggatgaacctggtggggatgcctgggctccctcctgcaggggccctggtgaggatggaagacccccaaggctggatgtaaccttgttcccaagaagtgtttggaatgtgctgtaagaatggaggaagtcgtttccactgtcagcatcctccctggaccgcgtggctggctcatcttttgagaagggttgggactgccaagttctcctggaggaagagttgcgtccggctgggattccactcactgggactgtaccgccaggtgtcatgcgtctctctgaggtttcctgattaaaggttgtctcggtttccc

SEQ ID NO: 292889 - DNA, 1000 bp, Homo Sapiens
gaagaaaaaggtaataagtcagtccatctgaggaaagccagttcaccaaatcttcatagacgacagtgggagaaaaatgtacccaatacagctcttacagctttggaaaatgcatccatactcacctccagtttaacagcagaggacgatagaggtggttctgtaataaagtacagcaaaaatactactcgtaagcagtggctcaaagagacccctgacactttgttgaacatccttaagaatgctgatctcagcttggcttttcaaacatacacaatatatagaccaggttcagaagggttcttgaaaggccccctgtctgaagaaacagaagcatcggacagtgttgatggaggtcacgattctgtcattttggatccagagcgacttgagcctgggctagatgaggaggacacggactttgaggaggaagatgacaaccccgactgggtgtcagagctgaagaagcgagctggatggcaaggcctgtgcgacagataatgcctgaggaaatgttcctgagtcacgctgaggagaggcttcactcaggagttcatgctgagatgatcatgagttcatgcgacgtatattttcctttggaaacagaatgaagcagaggaaactcttaatacttaaaatcgttcttgattagtatcgtgagtttgaaaagtctagaactcctgtaagtttttgaactcaagggagaaggtatagtggaatgagtgtgagcatcgggctttgcagtcccatagaacagaaatgggatgctagcgtgccactacctacttgtgtgattgtgggaaattacttaacctcttcaagccccaatttcctcaaccataaaatgaagataataatgcctacctcagagggatgctgaccacagacctttatagcagcccgtatgatattattcacattatgatatgtgtttattattatgtgactctttttacatttcctaaaggtttgagaattaaatatatttaattatgattta

SEQ ID NO: 292890 - DNA, 1000 bp, Homo Sapiens
aagtcctaatctccagagaaatggtggggggaggaggaggcttattgcttcccagcatttggggggaacatgatccaacccctggcctcctgccacccatctgccctgctcccacatgctcaggtcccagggcacagaaaaagggcagactccctaatcacactaacatcaaaataaagaggctgggccgctgtgtagccaggacatgcccatgccaccgcctattgaacagttcataggagtggcagtaatctactgtgtgaggagagagggcaattaaaaagctgaaagagaaggaggccctctgtgtattccattccctcctccttaatgcctccaagggtccttgcatccctagtctcctaaactccagctctgattcgccatcaacccatggagcaattccaaggccccagttacccatcacctccacaccaggtcaagttttgtctcagccccaaaggcactgacatttctagtttgccccctctgccctgaaccccacagcatgcctgtctcagctccctgtccctcggcacttccccaggctcatttgagcaggtgtgccttcgcagctcccctaaacttcccaggtgcctcatccataatgagataatgcatgtaggggaaaagtttctcaagaaggtggaagaggcagcaggacttggataaggagtacctgctggtcagccttgagatgcacaggtgaaggttagggtgagatgagaacatgccataccctggtgctgaatccctgaggggccagcttgccaggcttaagccaaatctgccttaaattgggggtggggaggggtaagtaaggaagtggggtttgtttttgtgttgttttcatcttcatctttgtattactagcatccagcagagtgcctagcacatactggatgctcaataaacttttgatgaaatgaaatgacaactttattccacataaacaagggtaacaaaacaagctgcttaaatacaaaaaaaaaaaaaaaaa

SEQ ID NO: 292891 - DNA, 1000 bp, Homo Sapiens
cgggaatcccctcgacccttcctctttgcactatatcaaccctatgggcaccaacgaatatctgtcggccatctgggctgttgggcagatcattcaggactacgacagtgataagatgtttccagctctgggattcggggcccagttacccccagactggaaggtctcccatgagtttgccatcaacttcaaccccaccaaccccttctgctcaggtgtggatggtattgcccaggcgtactcagcttgcctgccccacatccgcttctacggtcctaccaatttctcccccatcgtcaaccacgtggcccggtttgcggcccaggccacacaacagcggacggccacgcagtacttcatcctcctcatcatcacggacggggtcatcagtgacatggaggagacacggcatgccgtggtgcaggcttccaagctgcccatgtccatcatcatcgtgggcgtgggcaatgcggacttcgctgccatggagttcctggatggggacagccgcatgctgcgctcccacacgggggaggaggcagcccgcgatattgtgcagttcgttccctttcgagagttccgcaacgcagcaaaagagaccttggccaaagctgtgctggcggagctgccccaacaagttgtgcagtatttcaagcataaaaacctgccccccaccaactcggagcccgcctgagctccagtgcccagcagcagcatgtcagctgagcctcctgccctcccccaggaacatgcacgctcactctgcttccttgtgggtggcctttttttaccgatccccttttttattttttacaaccggacctccacccccaacttcctccagcccagctgggcttcctttgttggagtcaactgttgatgcttccaggccaaactggcttcctctcctcctctccccacctttgccattcttaagtattgaatgtactttgtataattttagtggaattgttattgagaataaaatttttacaatcat

SEQ ID NO: 292892 - DNA, 1000 bp, Homo Sapiens; identical to SEQ ID NO: 118700

SEQ ID NO: 292893 - DNA, 1000 bp, Homo Sapiens
ggaaataagcatttcccaatccccaaatacccctctgtacagttaatctaacaggatagtcagagctcttatcatagcagccaaaacttcagcccataggttagtcattgtcctaaccaatcattgtacattgattattaccagtgacttcccattatagtttttggatctttagcataagcacatgcttgcaaaagtaaacagtgaaataattaatgttggcaaatatgagaacaacaaagtcagcccaaaatctgataatcatgtctaaccaagtaataatgttttagcaataaaattacaggattattctgttatctaaaaatgtataaaatgggaatatgaaaaaaatgacaacagcaagatgttttattttaatgttaagcaattccaccacacttctgaagaataaacctaagtttttgtgattgttaaaacaatgcatcaattttcagggaaatctttttgtttgtttatttaccagacatgttctaactttgtattgcccaaagtatattaaatacagatgtgtaatataaagcatcaatatcacctaacacatcgtatataagatataacatgatagatagttggtcgattacattgctatactgcttagttttaactggtttatttttattgtagcagaaatgaactgaaaaaaaatatgggtttgataatcacacacatgaaagtaccattttgtaactcaacaaaagataaaacattcttcatcaaaaggcttctcgcttggtgtcaggttgtcacatgtgaccactgtgcaatgcgaagccatacttcttcagtgcacaaagtcatgtttaaacttggaaaagaggatgctacagtagtttcaaagtttagtgttgtggacccaggaaattttccataagtcttgcttgataacaatgtgattgtacaaaataaatgttcttaaggaaacaacttatgtaacatttgctacctttatgtaaacataaataaatcccatttaaaagat

SEQ ID NO: 292894 - DNA, 931 bp, Homo Sapiens
gggcgttgagcggagccgctgacctgatggacgccgacagcctcctgctgtctctggagctggcgtccggcagtgggcagggcctcagcccggaccgtcgggcctcgctgctcacgtctcttatgctggttaagcgcgactaccgctatgatcgggttctcttctggggccgcatccttggcctcgtcgccgattactacatcgcgcagggcctgagtgaggaccagctcgcaccgcgcaagacgctctatagcctgaactgcacagagtggagcctcttgccccctgccacagaggagatggtggcgcagtcgtctgtggtgaagggccgcttcatgggggacccatcatacgaatatgaacacactgagctgcagaaggtgaatgaaggtgaaaaagtctttgaagaagaaatagtggtccagatcaaggaagagacccgcttggtgtctgtcattgaccagattgacaaggctgtggccatcatcccccgaggcgccctcttcaagaccccttttggacccacccatgtcaatcggacctttgaaggactgtccttgtctgaggccaagaagctcagctcctacttccatttcagggagcctgttgagctaaagaataagaccttgcttgagaaggctgacctggacccctccctggatttcatggactccttggagcatgacattcccaaagggtcctggagcatccagatggagaggggcaatgccctggtggtgctgcgcagcctgctctggccgggcctcaccttctaccatgctccccgcaccaagaactatggctacgtctacgtgggcactggcgagaagaacatggacttgcccttcatgctatagaatgggagccagcctggatgtttttaaacagagtctaaacatgattttcttaagcttccaaaaaaaaaaaaaaa

SEQ ID NO: 292895 - DNA, 1000 bp, Homo Sapiens; identical to SEQ ID NO: 224239

SEQ ID NO: 292896 - DNA, 1000 bp, Homo Sapiens; identical to SEQ ID NO: 224241

SEQ ID NO: 292897 - DNA, 1000 bp, Homo Sapiens
taattgtaaatcatcacagattttgaagtcacacctgaagacatgctctcacatatagaggtacacaaacacaccgtcatgcacatttcagcttgcgtctatcatgattcctgttgagagggctttcattgtctgactcataatggttcaggatcaactatcatcaaacggaaggattaactagacagagaatgtttctaacagttgctgttatggaaatctcttttaaagtcttgagtacatgctaatcaataatctccactcatgcattcctactgcttggagtagctgtactggtaaatactactgtaggagtatctgcttgttaaaatggaaaaatgtgtctttagagctcagtattctttattttacaaacacaacaaaatgtagtaacttttttccagcatacagtaggcacattcaaagtggtccaagatggctcttttttctttgaaaggggcctgttctcagtaaagatgagcaaacatttggaatttacatgtgggcagacattgggataacaactttcatcaccaatcattggacttttgtgaagtcgacaccagctaaggctgcttaaaataagttctgatcattatataagaagggaaatgcctggcagacaccatgtaagttataagtgtctgtcttatctttactacacatattgtaacaaattcaatatcctagtcttcatttgtatgaatggtttgtattgtacatagtttaaccaagtgttatttgagctgcttattaatattaacttgtacttgtctctctgcttgttattggttaagaaaaaaggatatgaggaattcattttatcaatgtagctgtgaaggccattaaaaagacaaacttaatgtacagagcatttattcagatcaagtattgttgaaagctatacatatacaacattacagtctgtctgtatttagatattttatttctggaaaaaatgaaatgtacataaaaataaaacacttaaagttgagtttca

SEQ ID NO: 292898 - DNA, 1000 bp, Homo Sapiens; identical to SEQ ID NO: 224243

SEQ ID NO: 292899 - DNA, 1000 bp, Homo Sapiens; identical to SEQ ID NO: 118704

SEQ ID NO: 292900 - DNA, 1000 bp, Homo Sapiens
gcacttggcgagcctcctgcccaccctgtccacacctaataagtgcaatcattttgagtctttctatgttgtctagacggaggggtttttgttttctgggtttgttttttgtttttgtttcttcttcctctattagcaaaaccctatttatagctgcccaagagaaaagagtgtatgtttggagtggaagaaaatcggttttgaatctcatgaaccttgagtgctggagcatctgatctgtctctatgccaccactggccacctagagcccttggctgtggtaatccagggtaattgcgcagaggcatctgatgtgtaggaaagtaattctggggatttgatggagcagaaaggagagagacctatgtttgctaaaccaatcttgctatccctatgcctctccatggagtcagtgtggacctcatgattatagaggccaatggaactggtcagtgattctctaccccaagtagggaaaacctccatcttttccctgtcttcatcctgttatcccctggtgtacacatggaagaggaccaggacataccacctggggatgggctgactcagggtcccgaggccagagacaaagctgtgggagccaagaataagacagaaggcatcagatatttgcctggctctggtcacttccctttgaagttgacttcaagcttagcttcctcaactactgtttttcagaaggaagaaagaatcaaatggaagaagaatcaagtccatgcccaagcccaaagcctgcacacattctgcccttaatccaagtgttgcctataaaattattttctgttttctcactctagttcccccaaagctgtagtcccaatcaatcaaaggctaccaactgagtcctcaggttcatttcttttttttttttttttctttttaactctcctggtaactcacagaacagctcaggttcatttctaggtgactgtcctaggctactgctcccccaggagactcaacactaaataaaggagtc

SEQ ID NO: 292901 - DNA, 1000 bp, Homo Sapiens; identical to SEQ ID NO: 224244

SEQ ID NO: 292902 - DNA, 1000 bp, Homo Sapiens; identical to SEQ ID NO: 224245

SEQ ID NO: 292903 - DNA, 1000 bp, Homo Sapiens; identical to SEQ ID NO: 118705

SEQ ID NO: 292904 - DNA, 1000 bp, Homo Sapiens
gcagcattcctttggaaaaaaaaatctttttattttcaagtgataattttgtgtttttctcatataagttttctccagagcacccaccttctcttccttcttggtctgtcattatattgcaaaatatttttcctctgaatgaaattatcacaggttgtctcaagcacaaccaactgaatgtctcttaactgtggggaccaaaagggagagagcctggggtctacaagaggagacacatcatcaaatgtttgaatgatcacaaattaagacattatcagcccagtaaatttcttgcttaatgtttttccaagttctggcttgaatatttcttattaaagctattttatgtgggtattttattttgaaaggtattatagtttgtatatttaacagtaaggaggaaactgtaaccaaaattagtatttctctatacgtattggtacttgaagattcctttcaaaagaaatccagcgttttcctaattttagtacttaatttctctttttaatttaagtgatctttctaattcgaaagctgtgttctttttgaataccatgcatgggggttaagctgatgttaaaacagtttgcaataaaaaaaaatgaatcagcttaagtcatttaatcatttcaagtgcattctgcatcctttaaaaataagtttaagaaatttaagagaattgtgttttcattaagttttgcatatcttttgttatgccatgtaaattccctttttcgtatgattaaaggaaggttatgataaaatgattagttcatttacattcacttgtagcaattacatgagaatttgaattttgtcgtgtttgggtttgttcattcctgtaaatgatggtacagttaggtgagattttctgttatggtacccaaactcaccatttggtcctctttaatctttgagggtttcaataaaaattgttcactcaaaaaaaaaaaaaaaaaaaaaaaaaaaaaaaaaaaggaaggaaaaaaaaaaaaaaaaa

SEQ ID NO: 292905 - DNA, 1000 bp, Homo Sapiens; identical to SEQ ID NO: 224246

SEQ ID NO: 292906 - DNA, 1000 bp, Homo Sapiens
caggaggcctgcctgagcttgcaagcaggttaacaaggatttcagctgttctacttgaaggcatgaacaaagagacctttaacttgaaggaagtcctgaattctattggtattcagacttgtgttgaggttaacaagaccctgatggaaagaggtttacccactttaaatgctgagattcaagctaatcttataggtcaattttcaagcattgaagaggaggacaatcctatctggtccttgattgataaacgaattaagctttacatgagaaggctactttgtcttccaagccctcaaaaatgcatgcctcctatgccaggaggcctagctgtcattcagcaggagctagaagccctaggctctcaatatgcaaacattgtgaatctcaacaaacaagtgtatggaccattttatgcaaatatacttcgaaagctgctcttcaatgaggaagccatggggaaggtagatgcttcacctcctactaactaaagaagaactgacattggacgagagattggaaatccagtactttggtatccagtccacttccattgatggcattagagatccagcacattctcagtactgtggtgcagtattagcccaaatctgtgtaatgggtaatattagcattacagaagacacacacatcacatagaccctcagaagacgtaaacatcacatagaccctatttgtgcatcattttcaagtttaaaacagatatttgtaatgaacagaaaacaatttgtaattaattatattacctatataatacttgtaaatgttttcttaaccatttatatttggcttatgacatttaacccctaaggagttgtttttctcacttgttattatcaaacctaatggtttttaattttggtacaactccttaaagggttgaaggttgtgacaataactgagggaactgatgttctgaataaatgatgtgaagtaaacacaattgtatttgaaaaaaaaaaaaaaaaaaaaaaaaaaa

SEQ ID NO: 292907 - DNA, 1000 bp, Homo Sapiens
ggctgtcatctattcaacagaaataactggactctgcttgtttggtgcactttttgaagtctcccaattcctttggataacttcattgcctagtagattacagaagttgtccataaatgcaacctcatatagtgaatcaacatcataactattcattcaatgccacaaacaggcatgatctttgccaatgaaaatctaaattacatcatgaagatatttgtgtgtgtatggtcctcctgaattcatgcaaggatgtagttttgtactgaaagaataaacactgactctaattttcagtagcatttctctataaacatgcttgttcaatacaaaattataatacatcagaaaaatgttgtaatgccttttgaactgatctataacataacacattaaaggacaaaaggagacatatcactgctttgatgtatagttaaaaagagatgccatcatcacaattattcaaatagtttacagtgtatgtttaaccaagtatagatatatttttaaatatgattatttctacctagtattttcagaattgagtttagaatgatttacttgggatgtgcggcgattcttttttagataagtgggggatgttaggaagacattgttcaagtgcttgaaactttaatttggacaatacattgaaccacatgctggaatgttttaagtgactaccttatagttttagtatgagcctacccttggaagaaagtaaggtgatactaaattagaaaaactatgtgaaactggagtggtggtatactttggaccatatcaaataggtagagtattataagcataaaagaataaaattgggctcgctttggaaattttaaacatatatgtgtatgtgtgtatatatatgcatatacatacacatatgtgtatatacacacacacaatggtttggaagtggaacaggaaatgataactctactgacatgtctataataaaatgatgtgctttgaaactaaaaaaaaaaaaaaaaaa

SEQ ID NO: 292908 - DNA, 1000 bp, Homo Sapiens; identical to SEQ ID NO: 224248

SEQ ID NO: 292909 - DNA, 1000 bp, Homo Sapiens; identical to SEQ ID NO: 118707

SEQ ID NO: 292910 - DNA, 1000 bp, Homo Sapiens
gagcacggagtgggcttcaggaagagggacgtcctgggctacagcaagccaccgggggccctgcagctcatgcagcagctcaaggccctgctggaccccaagggcatcctcaacccctacaagacgctgcccagccaggcctgacggccactcctgctgctgccaaggcccactgggggtcggcgggtggctctcgggcgggggtgttgcggtggctctgagggatgagccggcagtgggcaggggaccaggcacctggttgaagggactgggagcccgcactggggaactgccggacgcaggccctcgggcaggagcatctggcagagtggggggcgtggcaggcaccctcctttgcagggcgaggtggggcctctgcagccatcctggacaggccggggtggcggcagctttgcccacgtggaagcggggtgggtctcacttgcgtggtggcccctggccccatcttgcctgctgcggcctggggagcaggcgctgggtggtggttctgcctgcttgctgctcgttccccgggcatgcgtgggcagcggggggcatgcgtgggcagcagggggcgtgggcagcgggggcatgggcaggaccacgtgggccgtgatcgtgggttgccgagaggacctgagcgctgcggctctgctgaatggagccgggtccctcaggccgtggacgccctcgggaggggggtgactgtggcttgtgtctggacaggaatgtgtcatttcccacatcttctagagggctgccagctgggaagacagttatcagggcaagctgtgctctgagtttcgggttctgctcctacaaagaacgtgcggtgctgcgggcgagggccccggcacggacaagggccactgcagagtgtgtttctgctcgtcagctgccctgggcagcggatgggctgggcgatgcagctggatgcacatctcattctgtcatgaatgtccagtaaaaatctgaattggttgcaaaaaaaaaaaaaaaa

SEQ ID NO: 292911 - DNA, 1000 bp, Homo Sapiens; identical to SEQ ID NO: 224250

SEQ ID NO: 292912 - DNA, 1000 bp, Homo Sapiens
ggaacttttgccaggtggaaagcaaaccatgctctgtccagagatgaagataaaattggccatgatgaaaaagaatcttcccttggaaaagaaccgacctgacagtgtgatttcttctaagatgtttctatctatacaccgcctcaccctggaaagaccagcactgcgatatcctgaacgtttgaagaaattacataacctgaagacagaaggttacaggaaacagcagcagcggcagcagcagcagcagcagcaacagaagaaggtgaaaacacctattaagaaacaggaggctaaaaagaaagccaagagtgatccagggatccagagcacttcacataaacatccagttaccaccgttcatgaccgtctctatggttacagaactctgccaggtcagaacagtgacatgaagcagcagcagcagatggaaaaaggaaccacttcgaaacaggattccacggagagaccaaagatgaactactatgaccatgcggatttccaccacagtgtaaaaagtcctgaattgtatgaaacagaacccactaacaaggacattagtgctccagtggacgctgtgccagaagcccaggctgccaggcaaaagaagatctcctttaacttttcagaaattatggctagcacaggctggaactctgagctcaaactacttaggattcttcaggacactgatgatgaggatgaggaggaccagtcctctggggcagagtgagaagcctctggaggaatagactgaaggcatcccctggggcagccgtgttccaaagcgggatggctggtatcctgagggcagcaacgtttcacataagggcaagaggagaggggcttctgctctctggagcctttaccagggcctgagctctgagcttagggattccattttctttgttcacctctacttgcctctaaaataaatgtaggagaaaaaaaaaaaaaaaaaaaaaaaaaaaaaaaaaaaaaaaaaaaaaaaaaaaaaaaa

SEQ ID NO: 292913 - DNA, 1000 bp, Homo Sapiens; identical to SEQ ID NO: 224626

SEQ ID NO: 292914 - DNA, 1000 bp, Homo Sapiens; identical to SEQ ID NO: 118709

SEQ ID NO: 292915 - DNA, 1000 bp, Homo Sapiens
acacatgataacacacactggagagaaaccctacgaatgcaaacaatgtgggaaaaccttcatttatctccagtcctttcgaagacatgaaaggattcacactggagagaaaccctacgaatgcaaacagtgtgggaagaccttcatttatccccagtcctttcgaagacatgaaaggactcatggtggagagaaaccctatgaatgcaaccagtgcgggaaagcattcagtcacccctcctcctttcgaggacacatgagggtgcacactggagagaaaccctatgagtgcaagcaatgtgggaaaactttcaattggcccatatctttacgaaaacatatgagaacacatactagagagaaaccctatgaatgtaagcagtgtgggaaagccttcagcttgtctgcttgctttcgagaacatgtgagaatgcaccctgaagacaaatcctatgaatgcaagctatgtgggaaagctttctattgccacatatccttacaaaaacatatgagaagacataccgcagagaaactctataaatgcaagcagtgtgggacagctttcagttggcctgaacttttgcaacaacatgtgagaacgcacactgtagagaagccctatgaatgtaaggaatgtgggaaggtcttcaaatggccatcatctttaccaatacatatgagactgcacactggagagaaaccttatcaatgtaagcattgtgggaaagcattcaattgttcctcatccttaaggcgacatgtgagaatacacactacagaaaaacagtataagtgtaatgtaggacatcctcctgcaaatgaattcatgtgcagtgcttcagaaaagtcacaccaggagagagatctgatcaaagttgtaaatatggtgttgcctttatgagttccttatcctgaaagtggacactcaaggagtgtgtctgtagttcatttgcaaataaacatttagttgaaaaataattctccaaaaaaaaaaaaaaaa

SEQ ID NO: 292916 - DNA, 1000 bp, Homo Sapiens; identical to SEQ ID NO: 118710

SEQ ID NO: 292917 - DNA, 1000 bp, Homo Sapiens
tcccgatgacctgatcggctgttccgcctacgagtacatccacgcgctggactccgatgcggtcagcaagagcatccacaccttgctgagcaagggccaggcagtaacagggcagtatcgcttcctggcccggagtggtggctacctgtggacccagacccaggccacagtggtgtcagggggacggggcccccagtcggagagtatcgtctgtgtccattttttaatcagccaggtggaagagaccggagtggtgctgtccctggagcaaacggagcaacactctcgcagacccattcagcggggcgccccctctcagaaggacacccctaaccctggggacagccttgacacccctggcccccggatccttgccttcctgcacccgccttccctgagcgaggctgccctggccgctgacccccgccgtttctgcagccctgacctccgtcgcctcctgggacccatcctggatggggcttcagtagcagccactcccagcaccccgctggccacacggcacccccaaagtcctctttcggctgatctcccagatgaactacctgtgggcaccgagaatgtgcacagactcttcacctccgggaaagacactgaggcagtggagacagatttagatatagctcaggaccccagcaccccactcctgaacctgaatgagcccctgggttttcactttgtcacccagtctggagtgcagtggcacaaacacagctcaccgcagcctcgacctcctgggctcaagtgatcctcctacttcagctcccacaagtagctgggactgcagctatgtgccatcatgcctggctgatgtttatatgttttgtagagacgaggtttcaccatgttgcccaggctggtcttgaactcctgagttcaagcgatccacctgccttggcctcccaaagtgctgggattactggtatgaaccaccacgcccgacagtaaatatgttttgaatgaataaactctcataaatgaa

SEQ ID NO: 292918 - DNA, 1000 bp, Homo Sapiens
ttagtgtactgaatggaaagatgagcattcctagttctacacttcttttttccccctcatgtgtaaaatgaaaagaaaactaaatttgccctaataccaaggcgctacgtttattgcctcgtcttattcactgacctttgtaatgatacacagtgaattctttttgacaaagagaaatgcagtgtagtatgcagagctgctgttttaatgcctatgcatttactctttcctgatttaggcagaggtggcattttctttattgcatttctctatttttttaatgtaccctaccttcagtattctctttgtaagttggtgacttgcatctgtggccttgaatattttattatcacatgtggcataacagtatccacactttttagttctttatttttttttttttattttgagcaattctcctgcctcagcctcccaaatagctgggattacaggtgcatgccaccacacccagctaatttttgtatttttagtagagacaggttttcaccatgttagccaggctggtctcaaactcctgacctcagatgatccgcctgccttggcctcccaaagtgctgggattacaggtgtgggagccaccatgcctgacccacacactttttacttgtatagatgatttttggcttggacataaaagccaagccacccatttgcttttaatccaaagaacatgtatagtttttgtacccagagactatgatttatattgattgcacttgcctgccatgatttagataagattttttttgcatggtttttattctttcctaatggatcctgttttataatacttccaagcctgtccatggatatatcaaatgtcttcacttgtatattttcatggctaggtatttctaatgtttattcttccctgtgtacttctacacatagctatgcactatgaaaattaaatggaatgaatgatatgtatattactcaaaataaagtttctttcactttaaaaaaaaaaaaaaaaaaa

SEQ ID NO: 292919 - DNA, 1000 bp, Homo Sapiens; identical to SEQ ID NO: 118712

SEQ ID NO: 292920 - DNA, 1000 bp, Homo Sapiens
gaaggaagctcttggaaaatacgttgtatctcagtttgatgaaccaattcacaagaggctaggccctctctagcaaagttatgggctgctttactgaaaacagaatggaagccctgaagtcaacactccatggagaagcgtgtctttcctaatgtcctggtgttctgttgatttaggtgcttgggaacacaatgctcccagttctgttaggacaggcatactgttactttgcaatatccactttataaaatagctcctgcccagtggctcttggttcctgtcaaatgtggacctgtagtttaagaatgacaggtggttagagacccagatatttaaaaataggtgttcaataagggaatactgattgtgcattgtatctggatagcatgcctaattgtgcatttctgaaagttaccaattcaaaatgtaattggaacagttatctttgattagacaagcctgggaagagaatgttgaggtgcagagctcaccagccaagttcatgcccctctcgggcctttgtggctgagaagtgggacagaaagatgattaaggtaatgtgtcctccctgtagcattgtccagggccgttgtgtagatatttgacttcactgacagaaaagaaaccagggagtttgtagagactgtgcatttttagtataacattttcaccatctgatatggtttggctttgtgtccccacccaaattgcatctcaaattgtaatccccatgtgtcaagggagggacctgatgggaggtgatgggatcatgggggtggtttcccctatgttgttatcataatagagagggagttctcacaagatctgctggttttaaagacagcagtttcccctgctgtcactgtctctctcctgctgccttgtgaagaaggtgcttgtttctccctctgccatgattgtaagtttcccgaggcctccccggccatgtggaactgagtcaattaaacttcttgtttataaagtaaaaaaaaaaaaaaaa

SEQ ID NO: 292921 - DNA, 1000 bp, Homo Sapiens
cttggagccacagtttcctaagcgcatagtttttggtcctgcctcatgtaaaatagttaatgattatcatttacttggaaagattttacctgtgaagtgaaattctttcattgggggtaagggtatgaggtgatcaggaagtttcttctggaattttatcaagtccttgtattctaaaatagccaagcaaaatgatagtaaattctttgtctttgttctttcagtcagaggtatttattaagtacctactgtgtgctcagcactaaaggtttgttgataaaatgacaattaaaaaatggcatttagccaaaggccttttcagccaggagtaagaaaagatggttagtgatatttggaaatacctggatatttgctagaggaaaaatgaaagcaaaacttcgtacacagtgccttgcccataataggtactcaataagcaattgttcctcatagagtcttttgccatgatttatggtgttttttgaaatttgtcttaattgaaaaaagaccaaatatttcaaatgagcttataggcagctgtggccagtgaaaatatggggttgtacagttagttcctagaatgttattttgcactagttgtcacttagaaagatggggttcctgtagattttttggtgctaagggatactttgtcattatgatgaagtaagtgttaagtgtcagataaatagcacacagaatagttctttctgctggtctgttttttctcttcgttgttgttgtttttaattgtaaattgttatcaatcaaactattgtagcagctacaaagtaattcaccagcatgacaaaatggtcaaaaaataagtcatcagcacttaagaaatgaaagcaacttttgaaattttctgttaaaattgtcaaatatattttatgaagaatttataaaaggggaaaatgattgtaatttattgttcatgacttttttttttaaataaagtgagtttcaacaaaaaaaaaaccgaaaaaaaaaaaaaaaa

SEQ ID NO: 292922 - DNA, 1000 bp, Homo Sapiens; identical to SEQ ID NO: 224255

SEQ ID NO: 292923 - DNA, 1000 bp, Homo Sapiens; identical to SEQ ID NO: 118713

SEQ ID NO: 292924 - DNA, 1000 bp, Homo Sapiens; identical to SEQ ID NO: 118713

SEQ ID NO: 292925 - DNA, 1000 bp, Homo Sapiens; identical to SEQ ID NO: 224256

SEQ ID NO: 292926 - DNA, 1000 bp, Homo Sapiens
cgagaggcgggagtcagccactgcagatgctggctatgccatcctcgagaagaagggagcactagccgagagacagcacaccagcatggatctcccgaaattggccagtgacgaccgcccaagccctccgcgaggactggtggcagcctacagcggggagagtgacagtgaggaggagcaggagcgtgggggccctgagcgggaggagaagctcaccgactggcagaagctggcctgtctgctctgccgacgccagttccccagcaaagaggcgctcatccggcaccagcagctctcagggctccacaagcaaaaccttgagattcaccggcgagcccacttgtcagaaaacgagctagaagcactagagaagaatgacatggagcaaatgaagtaccgggaccgtgcagctgaacgcagagaaaagtatggcatccccgagccgccagagcccaagaggaggaagtacggcggcatatccacagcctctgtagacttcgagcagcctactcgggacgggctgggcagtgacaacattggcagtcggatgctgcaggccatgggctggaaagagggcagcggcctgggccgcaagaagcagggcattgtaacgcctatcgaggcccaaacacgggtgcggggctccggcctgggtgcacggggcagctcctacggggtcacctcaaccgagtcctacaaggagacactgcacaagacaatggtgacccgcttcaacgaggcccagtgagcagcttcaagagcaacttctccacatgttgggtgtccatcctggggcagggaaggacagagtgttggatggctgggacggggccttgctcttgtcggccagcccactccccagccagagagggcttgaccaaatcaaattgaggtggtgacttttgttggaaaattgggctgggatcacgtcctgttttgtaataaaagctgaaaagtctgcaaaaaaaaaaaaaaaaaaaaaaaaaaaaaaaaaaaaaaa

SEQ ID NO: 292927 - DNA, 1000 bp, Homo Sapiens
agggtcagggaggctgcccccaggcctgtatatttaacccctatgtaccaggagtaatgaatagtaataattctatttatgtaagttatgatgacgggtcaggtagagtgagctggggagggaagtggatccatttctgctaaggaaattctagtcaaatgcatctctgtatagacaaaatgttagtggagaagatcttgttaatagaatgtctatcatcagaatctcagttgatagggtttctcttgtaatgaagtctctacaaattgggttagctacatctctgctaaacagttgatggggtatctcttgattagggggatccctaatatccccagccccagccagaagctgtgaaacctcaagtcctatggaggggagaaggactggaatgtaccccatctcccttgactgcagagcaggttcctccactgccccaccccttagacaccatgaccccatcaggttaatcccctgttgccatggttatggagagcttgcagctgccatcttagatgtgctctttggggaagcccatctaacaggaggacattggtttgggggtgcacctcctgaagaatgggtggggaaggctttctctaggatcagattcaaataagtatgtattgagtgcctactctgtgcaaggcactatgctagatctggtgcctagaagccctgagaaagaacttaaagagctaggaggacagaggcccccaagctgatctggtggtgcatccacgcacccccaccctgggactttggatgctcccatctccacctccagtgacttttaaagccgcttcgtgcctttcctgtaacgttggatcctccttttctgtcccctgctgtctcaaggccccaagttaaagggttaaagccgctggagcttggggagagaacattgtggaatggaagggatcatgccctttgtggagtcttttttttttaatttaataaataaaagttggatttgaaaaaaaaaaaaaaaaaaaaaaaa

SEQ ID NO: 292928 - DNA, 1000 bp, Homo Sapiens
cccgctttatggcatgggcaaggaggagctggagtcggaggactttgagatcgtggtcatcctggagggcatggtggaggccacggccatgaccacccaggcccgcagctcctacctggccagcgagatcctgtggggccaccgctttgagcctgtggtcttcgaggagaagagccactacaaggtggactactcacgttttcacaagacctacgaggtggccggcacgccctgctgctcggcccgggagctgcaggagagtaagatcaccgtgctgcccgccccaccgccccctcccagtgccttctgctacgagaacgagctggcccttatgagccaggaggaagaggagatggaggaggaggcagctgcggcggccgcggtggccgcaggcctgggcctggaggcgggttccaaggaggaggcgggcatcatccggatgctggagttcggcagccacctggacctggagcgcatgcaggcttccctcccgctggacaacatctcctaccgcagggagtctgccatctgacctccaggcccggccctcaccactgcccacaagagcctctgccgggggtgggatgccaggacaccccctcccacactcaggacagagccaaccctggctccgtggaccttctggaggaaggtgggggtttcaaagactgggggaccccttcctcctgactccagcacccaggcctgggaagagctcggccccgatcagcctgagttccgccagcgcctacttctggtggctctaggtccccggatccaccacccttcccccactgactcttcaaggacgtgccctctttgctctcagaaccttggggaaggtggctggactgctgggcgggggacatctcggggtttcagggtgggcagggggttagtttggggaggggggggtgcgtttcttttgcatgactgtggcctgttgctcatgactttcttttgtaaatatctataaatggagacagatggagacaccaaa

SEQ ID NO: 292929 - DNA, 1000 bp, Homo Sapiens; identical to SEQ ID NO: 224258

SEQ ID NO: 292930 - DNA, 1000 bp, Homo Sapiens
gatttgcaggctgggaaggctagacttcctcagcccgagggctgcccttccaaactctatcggctgatgcagcgctgctgggccctcagccccaaggaccggccctccttcagtgagattgccagcgccctgggagacagcaccgtggacagcaagccgtgaggagggagcccgctcaggatggcctgggcaggggaggacatctctagagggaagctcacagcatgatgggcaagatccctgtcctcctgggccctgaggcccctgccctagtgcaacaggcattgctgaggtctgagcagggcctggcctttcctcctcttcctcaccctcatcctttgggaggctgacttggacccaaactgggcgactagggctttgagctgggcagttttccctgccacctcttcctctatcagggacagtgtgggtgccacaggtaaccccaatttctggccttcaacttctccccttgaccgggtccaactctgccactcatctgccaactttgcctggggagggctaggcttgggatgagctgggtttgtggggagttccttaatattctcaagttctgggcacacagggttaatgagtctcttggcccactggtcccacttgggggtctagaccaggattatagaggacacagcaagtgagtcctccccactctgggcttgtgcacactgacccagacccacgtcttccccacccttctctcctttcctcatcctaagtgcctggcagatgaaggagttttcaggagcttttgacactatataaaccgccctttttgtatgcaccacgggcggcttttatatgtaattgcagcgtggggtgggtgggcatgggaggtaggggtgggccctggagatgaggagggtgggccatccttaccccacacttttattgttgtcgttttttgtttgttttgtttttttgtttttgtttttgtttttacactcgctgctctcaataaataagccttttttacaacctg

SEQ ID NO: 292931 - DNA, 1000 bp, Homo Sapiens
aaacttgaactcagagcccagtgggaagccagaggtcttgaaagacttcagccatgtgttccttttttttttctttcttttatcgtttgctttttgttttattttcttgagagacctcaaaattattaaatccaacagacgctgccggtcggtcagattattattaatattattgttgttgttaattattattattatttcatatgctgatgctttgtgagttcttttccactcctttaaagttgggaaaacttgattcgtggggcaggagattgtttcttcattcttctgacagcccccatctgacgcgtaactgcccattttaaggaaactcttggtgctacaaaaccctgaccagacacttggcaaatttacctctttcttcaaaagaaaaactttaagaaaatgagccaatgggcttcattctcagtcatgcccggagatcacccaggagaaataatacaaacaccaccactgtccagagagagtaaagaagcagaaagagaaagaatttgcaaccatgaggaatgttcccacctcccgacgggacgtgcatttggaaaacacagaatcagccctcagggtgcactccagccacctcagtgctctaagctcacagaagtgaaataatgtctgtgggttggcaatggctttgtgggatcatatgtcttggccaaagatgggaaaacctatgttgaagaggcagcccttgagtgttaatttgtcttctaaactgtgtaaggccccttcaagttcctcttgttggtttcaattatattaattataaaacaagtggatgtggtgaccatccacttgtgtttccctaatgatgggcagttggccagggcactgaccagagctgggaaatttgtatctccaaggcggctctgtctctgaaataaatggcatcaagtgcatgtgtgtatgcgacatgccctgcctgaacaggtgctcaataaatccaagtttccttctcttgaaaaaaaaaaaaaaaaaaaaa

SEQ ID NO: 292932 - DNA, 1000 bp, Homo Sapiens
gcgcacgcgctctgccacccgtgtcgcctccgctacgacgtcgtgggcaagttcgagacgctggcggaggacgcggccttcgtgctgggcctggcgggcgcatccgacctgagcttccctgggccgccgcggccccggggagccgccgcctcccgcgacctggcagcgcgcctcttccgggacatcagccccttctaccagcggcgcctcttcgacctctacaagatggacttcctgcttttcaactactccgccccctcctacctgcggctgctctagcggtcctggaggtcctgtggccacgcggggcaagtgcctttccgacaagacccccggggaatgcaggtgctgccggccccaggacccctcttcaagagccactgcgtgcactcacctggccgccgggccagcgggcgcagggcacacctggccaggcttgggggcagcccatctcaggtggccctgcacgcgtgtgcctgcctcggcctgtcgcctgaggcctgcttcctccacttgctccagctgacaggcacctctccaggccccgtagatgggcaaggacttgataaccagggttttaggcttttaaaggccattttgggggtcagccctgcccctgaacctgttcatggtgcatcagaacataatgctgacaccggtgtcagtgtggcccgagcctgtgtcctccccacctcgcccaccctggcaaggacagctgcggccaaggacgaaagccctcccttggctggcctcacgatggggccgtcccgggagccaggtgggagctgccttccactgccatcgggtctcctctcctctcccacgcggctggccctacccaggcgccaccttcggtctcagtctggcaagacgctgggtcttcaggctccatgccaacagagcccctggtgcaatgcggtcacaggttttatgggactttggtgagctgggcggtcatggttttgaaataaatgtattttgttactttctgaaaaaaaaa

SEQ ID NO: 292933 - DNA, 1000 bp, Homo Sapiens
acagctggagatgcagagcactatggagcaatactggctaatgcttccagatgtgcactgcttctgtctaaaaattacaagccacagtctaatatgtcttattttccaaaacactaagctgtattcaggtccccgatgggcatatacatcttagccggtgatacactacctcttacgtgttgcctctttgtgttgcttggtgctctttcgaaaacaaggtgcttatggctttcatagactatttcctttttcatctttgtcattctttaaaagtgtatgtactggttacatcaagatatgttttggttgttagtacttattttaatttgtttggtcacacacttaataacacgtgaaactatttatgtgaagtccttgttttattttaaaattctctttgtgtatttggaatcaaagccagcacattgtaacctgtgcttgtacgcaaaagaattagatttctttgtttttgttttattttttaaattgttgtaaaaattattataggccagctacatctagtagtaggtttggggtacagattgggggttgtgccatactgtttttaaagttcatgatcatctggaatgatacttagtgtatatatattttgtaaagttttaattcagcaaattttttgaaattgctgctgttttaaattataaaacctttatatttctgctttgtagaaattatatgttttgtagtattcattgattttctttcactgtacttaaatttagtgttagtactttaaaatttttaatttaccagtctttaaagcaacatccagaaaaaaaaagtcttttcccatttaaaataggctcagccagttcaatgtctccttgttatcagagaaatgttagttcaatactgaaagaaaaatattatacctcttggtatctagaaaagcttgttcatccattataaatatatctttagccacagcaaaccacacttaacctatctataataaaaatgtgctttaaataaaaaaaaa

SEQ ID NO: 292934 - DNA, 1000 bp, Homo Sapiens
ttaaggcacaggttttctcctgccctgcttgccggcatgatcttggccagaattacatcatgattcccaatgagattctgcagactctacttgaccttttcttccctggctacagcaaaggacgatgatctgcctgctttcactgtgttgttcatggtggctttttggacaataaagaatctaaaatgggtggggagggtggaagaaatggtggactgtatctctcacgttctgaagcagctaatcctctttcccacatagccatcatcttgtgtgtgtagtaagaggcccatttctcaactgtcttttaaatatctaaaggtagttcctgtaacaactagttttaatgagtaaaaagtcaaagcctcagctctagttgatatccaagttatgatttattttgcaactacctcaggacagaaaagatttatggggattttaaaaatcattgaataactagttaaatgaaattttagctacacactgcctcccaaatattagttgtgcctggttcttgtaatttgattttacagaaaaggaaatgacacttgagatccttggaatgaacacagcttctaaagtgtgcatatacttttttaacgtctcttcttccattacaatgtgtgttttgcaaggacaggttcattttttttagcccactttgtgaactccattgtgcttttttctggtgttttatgcaagttgactactaatgactaatgagaacaataatgaatgcattgttgctgcattagtgtaatgtggtgtggttttgcacttaaaagaggtattcatatgctctagttgtaaatgttcatgaaaatccacttctctactagtcgaactgcttttagtgtctcaccagtggttttacatctgcagagttttgagggctgtgctgacctttgagaggatttgaaattgcttcatattgtgatcctaaattttatattcactatattccctaaagtataccttaataaatattttatgatcagaa

SEQ ID NO: 292935 - DNA, 1000 bp, Homo Sapiens; identical to SEQ ID NO: 291833

SEQ ID NO: 292936 - DNA, 1000 bp, Homo Sapiens
gaaccgggcagaggtcccagccaggcctgcaccccaggagccctatgatgttgtcttgcaacgaaaagaaaatgaaggatttggctttgtcatcctcacctccaaaaacaaaccacctccaggagttattcctcataaaattggccgagtcatagaaggaagtccggctgaccgctgtggaaaactgaaagttggagatcatatctctgcagtgaatgggcagtccattgttgaactgtctcatgataacattgttcagctgatcaaagatgctggtgtcaccgtcacactaacggtcattgctgaagaagagcatcatggtccaccatcaggaacaaactcagccaggcaaagcccagccctgcagcacaggcccatgggacagtcacaggccaaccacatacctggggacagaagtgccctagaaggtgaaattggaaaagatgtctccacttcttacagacattcttggccagaccacaagcaccttgcacagcctgacaccgcagtaatttcagttgtaggcagtcggcacaatcagaaccttggttgttatccagtagagctggagagaggcccccggggctttggattcagcctccgaggggggaaggagtacaacatggggctgttcatccttcgtcttgctgaagatggtcctgccatcaaagatggcagaattcatgttggtgaccagattgttgaaatcaatggggaacctacacaaggaatcacacatactcgagcaattgagctcattcaggctggtggaaataaagttcttcttcttttgaggccaggaactggcttgatacctgaccatggtttggctccttccggtctgtgctcctacgtgaaacccgagcaacattaaggctttcagggcttttcttggtctttccttaaaaagacttggtaaatttgcatgtcttgtaaatcactttcttcttttgttttcttttaaattaaaaatgatgctattaaatacatctatttctat

SEQ ID NO: 292937 - DNA, 587 bp, Homo Sapiens
ggctcgagctgatggctccaggccctcggaggctcagaggcgcagggctgagccatgggaacgaagcgcgaggccatcctgaaggtgctggagaacctgacaccggaggagctcaagaagttcaagatgaagctggggacggtgccgctgcgcgagggctttgagcgcatcccgcggggcgcgctcgggcagctagatatcgtggacctcaccgacaagctggtcgcctcctactacgaggactacgcagccgagctcgtcgtggccgtgctgcgcgacatgcgcatgttggaggaggccgcacggctgcagcgggctgcgtgagggccactctgagctggaggcgggtcaaggcaaaaggagtaatgcaacgcctgtgaagccagccccacgcgcgcaccagtcgcgtaagacaacagcagtgtctccacctcggggaccaaggacgcctccgtgcctccagaccccgcctcctccagcccctgcacctgtcatttattcttccactgcccaataaatattcatggcagactttaaaaaaaaaaaaaaaaaaaaaaaaaaaaaaaaaaaaaaaaaaaaaaaaaaaa

SEQ ID NO: 292938 - DNA, 1000 bp, Homo Sapiens; identical to SEQ ID NO: 118715

SEQ ID NO: 292939 - DNA, 1000 bp, Homo Sapiens; identical to SEQ ID NO: 118716

SEQ ID NO: 292940 - DNA, 1000 bp, Homo Sapiens
agtctcatttgcagggtgagaagcagaaagccacagaggccagtgctgtggagcagacggcagagagctgcgaagttcaagaaatgttgaaagtagcccgagcagagaaagatctactggaactgtcttgcaatgagctcagacaagaattactaaaggcaaacggtgaaattaaacatgtttccagtctgctggccaaggtggaaaaggattattcatacctgaaggagatatgtgatcaccaagccgaacagctgagcagaaccagcctaaagctgcaagaaaaagcatcagagagtgatgcagagatcaaagacatgaaagaaaccatatttgaattggaagatcaggtggaacagcaccgggctgtcaagttacacaataatcaactcatcagtgagctagaaagtagtgtgatcaagctggaggaacagaagtcagacctggagaggcagctgaagactctgaccaagcagatgaaggaggagaccgaggaatggaggcggttccaggcggatctgcagaccgcagtggtggtggccaatgacatcaagtgtgaggcccagcaggagctgcgcaccgtgaagaggaaactgctggaggaggaggagaagaatgcccggttgcagaaggagctgggggatgtgcagggccacggcagggtggtcaccagcagagccgcccctccctccctgggctctgtcagctagcagagcatttggtggaagaaagacagcccagctcttgccatgattgggagccgcagccatctctagatgaaagggggaatgtgtagaggagaaattgcctctttataaagagcccagttgtctccttgtgacattctctgtttctcagagtcattgccgtcgagtctctgctttttgtccacattttgggatcagcttactgcatgatcaaagatgatgtttccctctttttacttttcctcagaagattgagctgtcttttatttggagaataaaatgaagttctgaaa

SEQ ID NO: 292941 - DNA, 1000 bp, Homo Sapiens
aaagtagtttaggtgacatgttctcacctatcagagatgatgctgtagttaacaagggaagtgatgagtccataggcaaaggagatggctttgactttctaccgcagttgaactcagtgtttcctccaagaaaaaatccagtaacttcaagtacttcagtattgcattctagtcctcttaatgtttttatgggatctccagggaaagaggaaaatgaaaaccgtgatctaacagctgagtctaagaaaatatatatgggaaaacaggaatctaaagactccttcaaacagttagcaaagttggtcacatctggtgctgaaagtggaaatctaaatacctctccatcatctaaccaaacaagaaattctgagaaatttgaaaagccagagaatgaaattgaagcccagttgatatgtgaacccccaatcaatggatcctcaactccaaatccaaagatagcatcttctgtcactgctggagttgccagttcactctcagaaaaaatagccgacagcattggaaataaccggcaaaatgcaccattgacttccattcaaattcgttttattcagaacatgatacaggaaacgttggatgactttagagaagcatgccatagggacattgtgaatttgcaagtggagatgattaaacagtttcatatgcaactgaatgaaatgcattctttgctggaaagatactcagtgaatgaaggtttagtggctgaaattgaaagactacgagaagaaaacaaaagattacgggcccacttttgaaatttcagtgaataccttaatgttctgtaatttgggaagtttctggcaacacagaactacatagaatcagtattgttttcatggcctccagggaaaaaatgtttttcaagtaagagtaaaagggtgatgggattttataccaacaactgtttcatcttaaaaatatgtatatttttatattaaaaattgtacagtatgtcatctacccaaaaaaaaaaaaaaaa

SEQ ID NO: 292942 - DNA, 1000 bp, Homo Sapiens; identical to SEQ ID NO: 224259

SEQ ID NO: 292943 - DNA, 1000 bp, Homo Sapiens; identical to SEQ ID NO: 224260

SEQ ID NO: 292944 - DNA, 1000 bp, Homo Sapiens; identical to SEQ ID NO: 224261

SEQ ID NO: 292945 - DNA, 1000 bp, Homo Sapiens
gctgtacttgcgtccgctacagtatgtcaatcgcttgccccagcacagctgtcattcttctctacagaagagcttctcctcatcaactggggatgattacagttcttcctaaaaaaggatggctgctctttttctaaagaggttaacactacaaactgtaaagtctgaaaatagttgcattagatgttttggtaaacacatcctgcaaaagacagcaccagcacagttgtcccctattgcttctgccccaagactctccttcctaattcatgcaaaagcctttagtaccgctgaagacacccagaatgaaggaaaaaagataaaaaagaataaaacagcttttagtaacgttggaagaaaaattagtcagcgagttattcacttatttgatgagaagggcaatgatttgggaaacatgcaccgagcaaatgtgattagacttatggatgagcgagacctgcgactggttcaaaggaacaccagcacagaacctgcagagtatcagctcatgacaggattgcagatcctccaggagcggcagaggctgagggagatggagaaggcgaaccccaaaactggaccaaccctgagaaaggaactgattttgtcttcaaatattggacaacatgatttggacacaaagactaaacagattcagcagtggattaagaaaaaacacctagtccagattaccataaagaaaggaaaaaatgtagacgtgtcagaaaatgaaatggaggagatatttcatcaaatactccagactatgcctggaatagctacattctcatctaggccacaagctgttcaaggaggaaaagctttaatgtgtgttcttcgtgctttgagcaaaaatgaggagaaggcatataaagaaactcaagagacccaggaaagagacactttgaacaaagaccatggaaatgataaggaatcaaatgttctgcatcagtaattttaataaagaaaagcatgctctgagagaaaaaaaaaaaaaaaa

SEQ ID NO: 292946 - DNA, 928 bp, Homo Sapiens
actttcagcgccgccgcctgcggtctcccaggccgtaactaccccaccgcctgccgcctgcgcccgcgctccagccccgccgcgcgcctgacctttccacgcgcgccccggcccccgccggcgccgcgccgcagccccgcgcgcagatggcgcactcggctgccgccgtgccgctgggcgcgctggagcagggctgccccatccgcgtggagcacgaccgccggcgccgccagttcactgtccggctcaacggatgtcatgaccgggccgtcctgctctatgagtacgtgggcaagcggatcgtggacctgcagcacaccgaggtcccagatgcctacagtgggcgtggcatcgccaagcaccttgccaaggccgccctggacttcgtggtggaggaggacctgaaggcccatctcacctgctggtacatccagaagtacgtcaaggagaaccccctgccgcagtacctggagcgcctgcagccgtaaccctggcctgcaggcgggagcgctccctgccggactcttccacgtggcctttgcctggccccacgtgctctcaggaacctggtcccactgggaacagactcagagttatttttgtaaggacactcatctgtgccccacgtccagatccctggaggcagctgaccaatgatgggcggtgacccggtaaccgaggcggcaaggaggccaggtagtcccggcacctctcactctgcagagaccagcggcttcgtgggaggcctgtgggtcacacgtaggggctagagccagcctgcatcctgcccaccgggctccacttggagatcagcaggagggccagtgtgggacccctgctgccacctctcctgggcctgtgtcctttctggaaattaagaaggtgtgctccagagccaagaggagcaataagaaaaaaaaaaaaaaaa

SEQ ID NO: 292947 - DNA, 1000 bp, Homo Sapiens
cctccaccttcctctgtgcccgagctgttttatctgcattttactgtctgctttttttggctgcttatagtttttaaaaaagtaatttccttaaatccagaaggctaaaaatgaagctgaaacttaaagtggcggtgtttgtccaaaataacggggctcctgctctgccagtcagtaccctcaagtcactcctgatcctcaacctccatgcctaaggctggttcaagagaccacataatatctgccttttattacatacatgatgggtgcatgggattctgcgtgccctttgcttgatatagactgctaaggtgagatggggaatatcagagtcagctgctgcttgaggaagcagaacacacagctggaggcttggaacatgtgggtccctatgagtgtagagcccatatccccatagagtctacctagagcaggggtcgccaaatgttttcttaaagagcctgatagtgtatatgttaggctttgtgagccaggtatttacagcaactcaattctaccactgtggtatgaaaacagctatagacaatcataaatgaatgatcatggctatgttttaataaaactttacagacactgaacttgaacttccattgtgatatgaaaacagctatagacaatcataaatgaatgatcatggctatgttttaataaaactttatggacactgagcttgaacttcatatatcagtcatgtgacacaaaatatcattcttctttttatttgttttcacccatttgaaaaatgtaaaaactattcttagctgtacagaaacagatggtgggtcagatttgactcactgcccatagtttccagaccatgatgttcaggttcatggaagcacttcactctacactaatttattcatccattcatcacatatgtgatgagcacatacagacacacctcagagatattgcaggctccactccagatcaccacaataatgtgaatattgcaataaagcaagtcatacacatt

SEQ ID NO: 292948 - DNA, 1000 bp, Homo Sapiens; identical to SEQ ID NO: 118717

SEQ ID NO: 292949 - DNA, 1000 bp, Homo Sapiens
gcacctcactgcatctgcagctctcgctctgcctcttcctggcccacctcctcttcctcgtggggattgatcgaactgaacccaaggtgctgtgctccatcatcgccggtgctttgcactatctctacctggccgccttcacctggatgctgctggagggtgtgcacctcttcctcactgcacggaacctgacagtggtcaactactcaagcatcaatagactcatgaagtggatcatgttcccagtcggctatggcgttcccgctgtgactgtggccatttctgcagcctcctggcctcacctttatggaactgctgatcgatgctggctccacctggaccagggattcatgtggagtttccttggcccagtctgtgccattttctctgcgaatttagtattgtttatcttggtcttttggattttgaaaagaaaactttcctccctcaatagtgaagtgtcaaccatccagaacacaaggatgctggctttcaaagcaacagctcagctcttcatcctgggctgcacatggtgtctgggcttgctacaggtgggtccagctgcccaggtcatggcctacctcttcaccatcatcaacagcctccaaggcttcttcatcttcttggtctactgcctcctcagccagcaggtccagaaacaatatcaaaagtggtttagagagatcgtaaaatcaaaatctgagtctgagacatacacactttccagcaagatgggtcctgactcaaaacccagtgagggggatgtttttccaggacaagtgaagagaaaatattaaaactagaatattcaactccatatggaaaatcatatccatggatctctttggcattatgaagaatgaagctaaggaaaagggaattcattaaacatatcatccttggagaggaagtaatcaacctttacttcccaagctgtttgttctccacaataggctctcaacaaatgtgtggtaaattgcatttctcttcaaaaaaaaaa

SEQ ID NO: 292950 - DNA, 1000 bp, Homo Sapiens; identical to SEQ ID NO: 224263

SEQ ID NO: 292951 - DNA, 1000 bp, Homo Sapiens; identical to SEQ ID NO: 118719

SEQ ID NO: 292952 - DNA, 1000 bp, Homo Sapiens; identical to SEQ ID NO: 118720

SEQ ID NO: 292953 - DNA, 1000 bp, Homo Sapiens
gatacagctgaaaaaggacggctcctctaaccatgtttacaactatcaaccctgtgatcatccacggcagccttgtgacagttcgtgcccttgtgtgatagcacaaaatttttgtgaaaagttttgtcaatgtagttcagagtgtcaaaaccgctttccgggatgccgctgcaaagcacagtgcaacaccaagcagtgcccgtgctacctggctgtccgagagtgtgaccctgacctctgtcttacttgtggagccgctgaccattgggacagtaaaaatgtgtcctgcaagaactgcagtattcagcggggctccaaaaagcatctattgctggcaccatctgacgtggcaggctgggggatttttatcaaagatcctgtgcagaaaaatgaattcatctcagaatactgtggagagattatttctcaagatgaagctgacagaagagggaaagtgtatgataaatacatgtgcagctttctgttcaacttgaacaatgattttgtggtggatgcaacccgcaagggtaacaaaattcgttttgcaaatcattcggtaaatccaaactgctatgcaaaagttatgatggttaacggtgatcacaggataggtatttttgccaagagagccatccagactggcgaagagctgttttttgattacagatacagccaggctgatgccctgaagtatgtcggcatcgaaagagaaatggaaatcccttgacatctgctacctcctcccccctcctctgaaacagctgccttagcttcaggaacctcgagtactgtgggcaatttagaaaaagaacatgcagtttgaaattctgaatttgcaaagtactgtaagaataatttatagtaatgagtttaaaaatcaactttttattgccttctcaccagctgcaaagtgttttgtaccagtgaatttttgcaataatgcagtatggtacatttttcaactttgaataaagaatacttgaacttgtcaaaaaaaaaa

SEQ ID NO: 292954 - DNA, 1000 bp, Homo Sapiens
ctttttttttagtatgagaaaattatacagtgcttaattttcagagattctttccatatgttactaaaaaatgttttgttcagcctaacatactgagttttttttaactttctaaattattgaatttccatcatgcattcatccaaaattaaggcagactgtttggattcttccagtggccagatgagctaaattaaatcacaaaagcagatgcttttgtatgatctccaaattgccaactttaaggaaatattctcttgaaattgtctttaaagatcttttgcagctttgcagatacccagactgagctggaactggaatttgtcttcctattgactctacttctttaaaagcggctgcccattacattcctcagctgtccttgcagttaggtgtacatgtgactgagtgttggccagtgagatgaagtctcctcaaaggaaggcagcatgtgtcctttttcatcccttcatcttgctgctgggattgtggatataacaggagccctggcagctgtctccagaggatcaaagccacacccaaagagtaaggcagattagagaccagaaagaccttgactacttccctacttccactgctttttcctgcatttaagccattgtaaatctgggtgtgttacatgaagtgaaaattaattctttctgcccttcagttctttatcctgataccatttaacactgtctgaattaactagactgcaataattctttcttttgaaagcttttaaaggataatgtgcaattcacattaaaattgattttccattgtcaattagttatactcattttcctgccttgatctttcattagatattttgtatctgcttggaatatattatcttctttttaactgtgtaattggtaattactaaaactctgtaatctccaaaatattgctatcaaattacacaccatgttttctatcattctcatagatctgccttataaacatttaaataaaaagtactatttaatgattt

SEQ ID NO: 292955 - DNA, 1000 bp, Homo Sapiens; identical to SEQ ID NO: 224267

SEQ ID NO: 292956 - DNA, 1000 bp, Homo Sapiens; identical to SEQ ID NO: 224268

SEQ ID NO: 292957 - DNA, 1000 bp, Homo Sapiens
gttttctctttcaagatagaaaatccctttagagtaggaactcggctggcactttctttcacatcctgcatagcacttagcaaagttctgtacacagggcacatgtggaaattgcttattgattgattaaaagcatatatcactggcatttgtatcttcagtatttctcttgtatgaagaagggtgattatctgtcaatattcattgcatcattgaaccaatgtacaatgcattaatcatcactgaagataaccagatgaggctttattgtaatctccttctattttgctgagataatttcacttgctttagagtttatgaggccataagtggctcccatctgttgatgaacatatttctaagagtcatttagtctcaagtatggaatacttgaggggaagttaaattgtaacttttatattaagtgtcatcttagtaacagaaccaaaattggaagcatgtgttcaattttggtttttcattttcaaagctttaggtcaggcaaagaattaatttcatttgtttacaaagtagattatgcctaataaaatctattttgtttatggtcacattttaatcaatccactgctttagaaaatgagagaattctgattggctagtcattcaacatagtaaattacattattccacatccacagaacactggcctaactgcattatccagtaatgataaaaatattccttttaatacattttgagcaaggcatataccagtggtgaaacagggaagaatcttgtttattccatccttgtttgatgatcgaccacagaatataacataacacttctgtgtataagaattttttcaacattaaggataataaggacaaggtagttttcactggatccttactggtactctgaattttcactatttgtccgcatttcttctccttcccggaaatttgttttctgcgaaaaacaagtgctactttgtcaaataaagcttaaataaaattggtttcaatttatgcataat

SEQ ID NO: 292958 - DNA, 1000 bp, Homo Sapiens
aaaaattcacagtgcaatttatttgcctggcaagaaaagtttatttcacaaaccaacagccagtaagtgtttttgttctctatgtgtcttctatttagaagaaaagccatgtaagatgtataagaaaccacaaccagccacacctatccttctgaagagctgaaggctaattaatctgtaatggccaagaacttctacttcgatagaaaaatatttctaatgacccagtctacaaattatttcttttacacaaatatatgatgttattctttggacactaggtggtcctacacacagtaggatcaattgctaatctactttgtgaaaaagaactaagcactaatcaataataaggcttacatctaattctcaaaggtgcttatccattttcttgctaaattatccttcttgtaatttggctaaacactaaaacatggaatttttagtttgaatattttgaagtttgaggatgttgggctttccttattgtaaaaaatgttatgtttgaaattattcctgttttcaaaaatggtaattaagtcattaggataaactttctaataaaaaaaaattatgtaaatcattgtaagaccaatgtgaatttaaaccacagtgttggtgccagatattagccagggtcacaggctcttttttaaaatgaagtcaaattagttactgatataagttttatattttgtgattttgccatcatactggttatctgtgctcttgaagtctgctggttctcacaccagcagcaagaggcaaggcatgagacattttaaatatatttccagacatctaaacatctagacaggcctgagtcatgattggctctggtgtgcttccaggtaacatcttgttattgctgtttggggaaaaccaccaatagaattgcagctagacttttggggactgtgcctcgcaggctgtatcacttgctgtaggccaagcaacgagcacttccctcatggtagcaacagtccttaagcccaaagcc

SEQ ID NO: 292959 - DNA, 1000 bp, Homo Sapiens; identical to SEQ ID NO: 224269

SEQ ID NO: 292960 - DNA, 1000 bp, Homo Sapiens; identical to SEQ ID NO: 118722

SEQ ID NO: 292961 - DNA, 1000 bp, Homo Sapiens
cttcagttcctccgcactgcaaacacatatatgtgcgcacatgcatgtatacctgcaccctgttttaactctaaaggaatagtgttgctttacttctttcctgttttgcctggaccacttaaagccacaacacctctatagtgacacacgctagtctctagtggtggccctcactgccacctagaggagccatggtggaaaacacactctctcctttgagcctatctgcacatctctcgagttcttggagcaaaaactaaatgctgaactaagcctggttgagatgcttcccatggaccatgccgcagcacagtgctaatctatccacaaaacataccacctcccaaagtattattattggaaaatcgaggaagtgacgcacatttagggaaaaactactcaccttagaaaagtcactgaaatccttttttttttttttgagatggagttttgctcttgtagcccaggctgggatgcaatggcatggtctcagctcactgtaacctccacctcccggattcaagcaattcttctgcctcagcttcccgactagctgggattacagctgcctgccaccgtgcccagctaatttttgtatttttagtggagagggggtttcaccatgttggccagtctggtctagaactcctgacgtcaggtgatccgcccaccttggcctcccaaagtgctggaattagaggcctgaccccctgctcctggcctgaaatctttaaagccgttttttccctaaaaaacgggaaataataacacctcagaaggtttttgtgaagatcaaagaagctaaatatatgtggcatgatttgtaaagtgttatgcatatgtatgttattcttcctactgtcttctaaccttcccttgcctgctatgacttatctgagagccatgttcccatttatctttttgccaactatgttactgttgtcacacctgaaatggctttgtttttatcaataaatacttgttgattgtggtaaacagc

SEQ ID NO: 292962 - DNA, 1000 bp, Homo Sapiens; identical to SEQ ID NO: 224270

SEQ ID NO: 292963 - DNA, 1000 bp, Homo Sapiens; identical to SEQ ID NO: 118723

SEQ ID NO: 292964 - DNA, 1000 bp, Homo Sapiens; identical to SEQ ID NO: 224274

SEQ ID NO: 292965 - DNA, 1000 bp, Homo Sapiens
ccaccttttggagatttaaccatagctgccaaagctatgcacccagttggccttagaaaaccacaatgtttacagccctgtcttagggccgcggcttctcttatcttccaccaccttccttgcttgcagggttatcttctcacagggctggaatgcaaatttcagaggcttcttttgaagattccccaagtcaagcaggcaagatgcctagatcttctgttatctttgacatgtaacatcctttttagaggctcagaacacctccttggctgctatctcatgtgttagaatccagtttgtggtgaacctctttggaaggggaccccctctctttaaaccctgttcctctgtcctggtaacattctccttctaggagagcctctcttctgagaaggtaaaggaagggctgggtgagacacacagctatcctaggagccgtaggaagacaaaacttcccttttgttttactcctcactcctctatttttgttttactcacttctttatattttgttttactcctcactcctgtatattttggtttacttactcctctatttcagaaattgaaaaagatccccaaggatctgttactactgcatttccttcttgctctgtctacagcctaggccaactagtcagggtctggacatgcatctcctaaaggaagaactgtgtagcaccattgatcacaatgtaacatttccatgctgcattaagggtgtctctctctaatcatgattgtacctgtctcttcctgggtaaagggagattttttttttttaatgtgcaaagaattgatgcgagccaggaacatgtctgtagtcccagctacttgggcacacgcctgtagtccaggccactcgagcacacacctgtagtaccagctactctggaggctgaggcaggaggatcacttgagcccaggagattaagactgtagtatactatgatcgtgcctgtggctagccactgtgctccagcctgggcaacaccatcgt

SEQ ID NO: 292966 - DNA, 1000 bp, Homo Sapiens; identical to SEQ ID NO: 224275

SEQ ID NO: 292967 - DNA, 1000 bp, Homo Sapiens
ttctttctctctgatatttgtttacgtaagtccatctcaaatattatttctaaaatcaatctattagataattgtgccaatctctcattttgaaattttgccaatggtctggtaatgcctagagtggaatgtgaagtcacatggaaatttgcatcttagttctgttacttagtagctgtgtgaaaattaatatttctgagtgccgttttgtcatctgcacattgtagctacctcctagagctattatgagaattaaacatgataatacaaagtgtttagcacagtgtctttcataaaaatagatgctaatgaatgttactttctctctttctcttttgcattccatgtcttctattcaccattttccctgcctctattttctggttttatcagtttctacctttatataatgtccagaacttttcacagcctccccctctttcttcagacctaaatatctgaccttttgggaagcaggacagaaacctctttctaatccagtaacatgtgagggagaagcccatgcaggaagctcttgagttactgtactatagcattttattgttccacagctagttaaatgaaactttttcattaagaacatggtactccctcccctttatgcttaatggatttatgtaattataaaacatataattaaagtcaattatgtgctaatactactttatattttgctaccaaatgcttttggctaccacatcaaaccctggagcttgacatatataaacctgctcctttcttaatttcattagctcctccacgatcccatcatgacctaagttgccaccttcccaggagacaaatacaaaccaatgtgtaaatgtgttttactcagctttctttatgttttccaaagctgaattgtagaaccgcatttatactctgtccttctctgtgtctcttttctctgttctcagtcttccattcattttttgtagaaattctaatgcatgattgtaataaacaacagtgagatttt

SEQ ID NO: 292968 - DNA, 1000 bp, Homo Sapiens
cgggcgtctcctgagagcgcacagtccacagaccccgggagggctgcccgccctaggacacgtactctcccgacccctcactctttcaaaattggggaagaggcggaggagatgaaaaagaagaaagagagaaagagaagaaaagagagaaagaaggaaagaaattttaaaaaataataaaaggagggaagaatggaggtaaaacgcgggggagagaagaggggagaaactctcctcaccacaaccaaagcaggaggcctaagcttcctgaatttctacacatgacttgcattaagttccttcctagaacttaaactttttcatctcccgtcacccaagaaaacacccatttcctcttttaaataaagtttctttttctggagatgaacctttaaataagtcgtacgtttgggagcgagggacaggagaataattttgatccagaaccttggagattggagaagcaggtggaaaaattctaaaaagatgaaaactgaccatctccgacacagaaacccatcgaaaggggccaccgagacccgttgattagctggagggagcatgcggcagaagtgcagacccctcgctaacccgccaacctccaagagccctcttgcagaaagctgcccggctccccacggtggccctgcgcgcgcaccatcctcgcggtctcgcttcttcgccccggaaaactctatgaggggcaccccagcctcagccgggttaagacaagtagccccaagaggaaggagcctcagagagcctttcttcctgttcttcttcgtcttcttttttttctaaacgaaatctaatactatctggctgcaaaaatatattatcaccggctctcagcctaagagactaacatttggatatgtaggaaatgtaatctgcatggctaattgattctcagcgtatcagtttaaaggataaagatcgatatctacatgatggatattgtattaataggggcataaataaaggtcgaagagtcgttacc

SEQ ID NO: 292969 - DNA, 1000 bp, Homo Sapiens; identical to SEQ ID NO: 224277

SEQ ID NO: 292970 - DNA, 1000 bp, Homo Sapiens
tatcactgggcagacgaggaggtggtacagcacatgggtttggagctagacagaaggaagaacagcctaacccttggtgcacccccatccaagctggggagctgcatccttttgagctggctgcaggaggaccctggctgagggctggtggctggccccacagcctcccccaagctcctccactgacccaggagtgcccagacgggtggcccccaaaatcccagcctggggagctaggcacctcactcttggtctgacctctccaggccaggctctcctcaccccatgccctgggccaaggtcctaccagccatgactactgcatgacaagaggtggggggtacagacctcaggtacatttgaccctgaggttaaaaggggttcaggtcaagaggtgggagaggaaaggggtagatgggaggtggaatctgtaggaaagagaaaaagcaaagtcgttcactgactgagtagcccccagggagtggagacgggtccctggggagggagcagctgacaggtcagcagtgcccccagccccacccaagaggagggcagcgtgtgcctgtggtctgggacgtgggctggatggcagcccagggtcacaggcataggataacatgtgctttggacctgacaagggagtaccttgggggtctgatggggtcatggccagccgagcctctgtagagatggaggctacagccctcagaagggaggggaggaaagagactgagggccctggcctggggcgtcgatggggaagcggtggcccccagtcctcttctgctgctcccagccccctcctcctggggccctcagggatctcatgaagtcttccttggcccaaccaggcagatgccccgggctccagtggggggaggggtctggggtctggtccgggttccccgctttctctatgtcccccctccctctttctccgcagtgcggataaaaattggactcgaataaaacccttggtgcccggatggtaggtggtgag

SEQ ID NO: 292971 - DNA, 1000 bp, Homo Sapiens
gatctgggttagggagatgccagaaacacacccaggtttgaaccacaggttagtggtacaaagtcacagtccttgtgccttcagaaaacccagaggccccaaatacgagtgggaagagagttgggaaaaactgaaccagactcttccaatggccattaaagagaaaattcagcaacgcttgcctttgtctttgaccctgagaagttaagggacacagattgtggcgccgtgatggaacatggagggaaggcatggtgtgcttcctgcagagatgcctctggagtccctgtggccacgggatctcactggccccctcttcaggcaccttgatggggctcagtggggccaggccaaagggtggaagtagaaaagcatcaacaggctgtccagatcaattggcaccatccaaggccctgctgcacccacacatggaggtcaccagctcagccccaggggttctttcacacacaagctccttccctaaggagtcctgtggggttccacactcagtgtgctgcccaagtcagagatttaccacagatctgtctccccctcaacctggactcaagttactgtggtgagaaacctcactgtccatggttaactgaagaaatccctccttcagaaagaacttgagtagtagatgaggtggttagacaggatctttttccctcaagctgtttggacgccacagccaggaccaactctgacagctgcgagagagagagcccctccaatgtggaacctcctacacagccccccttttgggtccctggatatgagcccccagcaggaccaccactctagggggaagtctccctcccatccctcagatccccacattgttcctcctgtaggagaaaagtcagccctgcccctggagcttctccaagatggcactggactcgccgttatcttgaggagccaggagctgaaatggctccggcttagcaacccagtatggccaaagtggaaaggttctctgtcctttgcagtcacc

SEQ ID NO: 292972 - DNA, 1000 bp, Homo Sapiens
gacctgatctgccacttcaagctgtgtaatttttggcaagttgctttctttgcctggtcctcagtttgcccatcaatataatgggtggattggatgatttttttttttttaattgagatggagtcttgcactgtcacccaggctggagtgcagtggcgcgatcttggctcactgcaacccccgccacctaggttcaagtgattctcatgcctcagcctcccaagtagctgggactacaggtgtgcaccactactcctggatatttttttgtgtttttagtagagatggggtttcgccatgttggccaagctggtcttgaactcctgacctcaggtgatccacccgcctcgggctcccaaagtgctgggattacagacgtgaggcaccacaaccagcctggatgattcttaagggcccttctaggaccaaagttctgggaatttctagcttattctgccccctcatagcccttggcctatctatctttatccacatgcagaaacatctggcaaccccacatggctgagatgacctggtcctaggacacccttggacagaagactggcctacctagcagacctggatttttcttcctgatctgctgcttccaagttgtgtgaccttggctaagtcacttaacctttctgattgtcatttcgctttttaataaagtgggtctggtgaacaagaaatgtaataaacacgtggcttgccattcaagagatgagtctgaccattcactttctgtgtgccagagaagagagatcatgggtatagaccagcccctggaaaggctgctttggtcaaggctgagagcagctttgctcaaggaaattattcacgaaggtgaccactgtctttcggacctggcacagaggaaatgttggctgtgaatgtgaccaatagaaagaagcccgtatttctcagtcagtcctagaaccccggtaagtaattaacagagaataaaaatgtgtttgttaaatgaaaaaaaaaaaaaaaa

SEQ ID NO: 292973 - DNA, 1000 bp, Homo Sapiens; identical to SEQ ID NO: 118724

SEQ ID NO: 292974 - DNA, 1000 bp, Homo Sapiens
attcagagagatgaccctgcactggccacatactatgggtccctgttcaagctaacagatctggagagtctgtgcagccgggggatgtactatggaagagatgtgaatgtctgccggtgtgtcagtgggaagaagaaggttttaaataaagatggcaaagcacactttcttcagctgagaaaagattttgatcagaaaagggcaacgattcagtttcaccaacctcagagatttaaggatgagctttggaggatccaggagaagctggaatgttactttggctccttggttggctcgaatgtgtacataactcccgcaggatctcagggcctgccgccccattatgatgatgtcgaggttttcatcctgcagctggagggagagaaacactggcgcctctaccaccccactgtgcccctggcacgagagtacagcgtggaggccgaggaaaggatcggcaggccggcgcatgagtttatgctgaagccgggtgatttgttgtactttcccagaggaaccattcatcaagcggacactcctgcggggctggcccactcgactcacgtgaccatcagcacctaccagaacaatgatgctggagctaggatgagaagatgtgacttgagggccattgctccccagaaatgatcctgtgttttgagcctaatgctccttcaggtaccatgtaaagttcatggggagatttccttttggataccatctcggggcttgtatttgatactgcaaaggaagacgtggagttacggaccggcataccccggcagctgctcctgcaggtggaatccacaactgttgctacaagacgattaagtggcttcctgaggacacttgcagaccggctggagggcaccaaagaactgctttcctcagacatgaagaaggattttattatgcacagactccccccttactctgcgggagatggggcagagctgtcaacaccaggtggaaagttaccgaggctggacagtgtagtgag

SEQ ID NO: 292975 - DNA, 1000 bp, Homo Sapiens
cggtggcgatcatgtaccagatggccttcacggtggggctggtggcgcttaccgggctggcctacgccctgcctcactggcgctggctgcagctggcagtctccctgcccaccttcctcttcctgctctactactggtgtgtgccggagtcccctcggtggctgttatcacaaaaaagaaacactgaagcaataaagataatggaccacatcgctcaaaagaatgggaagttgcctcctgctgatttaaagatgctttccctcgaagaggatgtcaccgaaaagctgagcccttcatttgcagacctgttccgcacgccgcgcctgaggaagcgcaccttcatcctgatgtacctgtggttcacggactctgtgctctatcaggggctcatcctgcacatgggcgccaccagcgggaacctctacctggatttcctttactccgctctggtcgaaatcccgggggccttcatagccctcatcaccattgaccgcgtgggccgcatctaccccatggccatgtcaaatttgttggcgggggcagcctgcctcgtcatgatttttatctcacctgacctgcactggttaaacatcataatcatgtgtgttggccgaatgggaatcaccattgcaatacaaatgatctgcctggtgaatgctgagctgtaccccacattcgtcagcggtgttgggcctgcttgccgcgggagtgacgctacttcttccagagaccaagggggtcgctttgccagagaccatgaaggacgccgagaaccttgggagaaaagcaaagcccaaagaaaacacgatttaccttaaggtccaaacctcagaaccctcgggcacctgagagagatgttttgcggcgatgtcgtgttggagggatgaagatggagttatcctctgcagaaattcctagacgccttcacttctctgtattcttcctcatacttgcctacccccaaattaatatcagtcctaaagaaaaaaaaaaaaaaaaa

SEQ ID NO: 292976 - DNA, 1000 bp, Homo Sapiens; identical to SEQ ID NO: 118725

SEQ ID NO: 292977 - DNA, 1000 bp, Homo Sapiens
aactgcaggggcagagccagtgaatcaccggacctccagcacctgcaggcagcttggaagtttcttccccgagtggagcttcgacccacccactccaggaacccagagccacattagaagttcctgagggctggagaacactgctgggcacactctccagctcaataaaccatcagtcccagaagcaaaggtcacacagcccctgacctccctcaccagtggaggctgggtagtgctggccatcccaaaagggctctgtcctgggagtctggtgtgtctcctacatgcaatttccacggacccagctctgtggagggcatgactgctggccagaagctagtggtcctggggccctatggttcgactgagtccacactcccctggagcctggctggcctctgcaaacaaacataattttggggaccttccttcctgtttcttcccaccctgtcttctcccctaggtggttcctgagcccccacccccaatcccagtgctacacctgaggttctggagctcagaatctgacagcctctcccccattctgtgtgtgtcggggggacagagggaaccatttaagaaaagataccaaagtagaagtcaaaagaaagacatgttggctataggcgtggtggctcatgcctataatcccagcactttgggaagccggggtaggaggatcaccagaggccagcaggtccacaccagcctgggcaacacagcaagacaccgcatctacagaaaaattttaaaattagctgggcgtggtggtgtgtacctgtaggcctagctgctcaggaggctgaagcaggaggatcacttgagcctgagttcaacactgcagtgagctatggtggcaccactgcactccagcctgggtgacagagcaagaccctgtctctaaaataaattttaaaaagacataaaaaaaaaaaaaaaaaaaaaaaaaaaaaaaaaaaaaaaaaaaaaaaaaaaaaaaaaaaaaaaaaaaaaaaaaaaa

SEQ ID NO: 292978 - DNA, 844 bp, Homo Sapiens
gaactttccttatggtcatctttgggtggagccaccacttccagttctgatcttctcattctggttgagtacctgggcttgccagtgcaccccccaggaacaccgcctagtccagggctcccacaggtctcagactgacaggagactgggtcatatgaccagcactagccaatgagctgtgagtacacgtgacacagggacaagctgggtcatgtgactggcactagccaatgagctgtgaggacgtgagcacaggtccagctaggctgggtcatatgacaagcattagccaatgagctgtgaggacacgtgagtacaggtccagctaggctgggacatgtgactggcactggcccatgggctgtgagcacaggtcaggtcagccccttcctgctgcttcccaccgtgtgtgctccttgtctgacttgatatgagaactaacccaatatggcaggaagccactgacatgtgggagccgtgcatggcagtggccagcgtccttgtcctgcgggggctctgtggacatcactcgccttcagaacactgagccctcctacctcctgatatccagggctgccgatgggaaatcccaggctgccgcggctcctgtgtgctttgaagttttcaggatttttgtcaaacatccggggacccttagctggagaggatggcatgggtgacacgcagctggccagggtgcgcgactctgctctcaagaccccctggaggcccgccccctgccccccaccagctcattcgttagatgattggaagtgactgcctacgtcttctttcaggataaagcctcaagtcctgcaactattaaaaaaaaaaaaaaaaaaaa

SEQ ID NO: 292979 - DNA, 1000 bp, Homo Sapiens
ttcgttactaccacaaactcaggatgtctgcggagtactcccagagctggggccacttccagaatcgtgtgaacctggtgggggacattttccgcaatgacggttccatcatgcttcaaggagtgagggagtcagatggaggaaactacacctgcagtatccacctagggaacctggtgttcaagaaaaccattgtgctgcatgtcagcccggaagagcctcgaacactggtgaccccggcagccctgaggcctctggtcttgggtggtaatcagttggtgatcattgtgggaattgtctgtgccacaatcctgctgctccctgttctgatattgatcgtgaagaagacctgtggaaataagagttcagtgaattctacagtcttggtgaagaacacgaagaagactaatccagagataaaagaaaaaccctgccattttgaaagatgtgaaggggagaaacacatttactccccaataattgtacgggaggtgatcgaggaagaagaaccaagtgaaaaatcagaggccacctacatgaccatgcacccagtttggccttctctgaggtcagatcggaacaactcacttgaaaaaaagtcaggtgggggaatgccaaaaacacagcaagccttttgagaagaatggagagtcccttcatctcagcagcggtggagactctctcctgtgtgtgtcctgggccactctaccagtgatttcagactcccgctctcccagctgtcctcctgtctcattgtttggtcaatacactgaagatggagaatttggagcctggcagagagactggacagctctggaggaacaggcctgctgaggggaggggagcatggacttggcctctggagtgggacactggccctgggaaccaggctgagctgagtggcctcaaaccccccgttggatcagaccctcctgtgggcagggttcttagtggatgagttactgggaagaatcagagataaaaaccaacccaaatcatt

SEQ ID NO: 292980 - DNA, 1000 bp, Homo Sapiens; identical to SEQ ID NO: 118728

SEQ ID NO: 292981 - DNA, 1000 bp, Homo Sapiens; identical to SEQ ID NO: 118729

SEQ ID NO: 292982 - DNA, 1000 bp, Homo Sapiens
aacaccctgacctacgccggccgggccaagaacattaagactagggtgaagcagaacctcctgaacgtctcctaccacatcgcccagtacaccagcatcatcgctgacctgcggggcgagatccagcgactcaagcgcaagattgatgagcagactgggcggggccaggcccggggccggcaggatcggggtgacatccgccacatccaagctgaggtccagctgcacagcgggcagggtgagaaggctggcatgggacagcttcgggagcagctcgccagcgccttccaggagcagatggatgtgcggaggcgcctgctggagctggagaaccgcgccatggaggtccagattgacacctcccgacacctgctcaccatcgccggctggaagcacgagaagtcccgctgggccctcaaatggcgggaggagcagcgaaaggagtgctacgctaaggacgacagcgagaaggactcagacacaggtgatgaccaaccagacatcctggagccacccgaggtggccgcagcccgggagagcattgcagccctggtggacgagcagaagcaactgcgcaagcagaaggtgtccagggtttggggggacaaggagagtgggtttaggggacagggtgagcaggtttgagaggcaaggcggaggggccagggtgggggtagccgtgagacttgggaactcaggccacaaatcctgtgtgactttgctaagctctttaacttctctatgcgtcacattccccacctgtaaaatgggagcagtccatggtgcagccctcatggggttgctgggaagattacataaatgcctggcacataccaaggactcaaaaaatggtaactaatgttataattagggtttttcaggctgggcacagtgactcacacctgtaatctcagcacgttgggaagttgaggtaggcagatcacttgaggccaggagttcgagaccagcctggccaacatggcgaaatcccgtctttacc

SEQ ID NO: 292983 - DNA, 1000 bp, Homo Sapiens; identical to SEQ ID NO: 224280

SEQ ID NO: 292984 - DNA, 1000 bp, Homo Sapiens
tctgccttccaacctgaagacgcccatcacgctcttccgcatggccacagcctctgcccccggccgagctgggcccaacagcctgcggtttgggatcgtgggtgggaacagccgcggccactttgtgatgcagcgttcagaccggcagactggggatctgatccttgtgcagaacctggaggggcctcagacgctggaggtggacgtcgacatgtcggaatacctggaccgctccttccaggccaaccacgtgtccaaggtcaccatctttgtatccccctatgacttctgagggtacacaggggcactggggtgtggagagctgacctcatttctcttccccgaaggctcagcttcgggcaccgactgcgtggagcctcccgcctgttcccgccctctcaccagtgcacccaggcttctagggcagcgttgcacggcgccccatggaatagcacggaagagcagccacaaaactcaactgctgccatcactctttttttttttctgctttgaggcccttcccttagattatgcactaattctcttaaaactttttcatccaggggatgggtggctttccaaaatgctgtgcaaatggccttgtgagtttgaactagctggggagagaaaaggtggcaatgtgtgtcaggtgactatcagcccttctgcctttttgtagccaggcttgctatgaatgaaacggttctagtcgtgcggggggccctagtcatgcctctgcgcatgtggcataggaagtggagtctcctcccatgacccagcacgttgttcttatctgccttttcctctgtgacatgcctgcctgcctgccttctcatcagagagtcacaggagggccttaaaccccacgcagatccttctagaccaaggacccattgttaaaagcatggattctgcctgagttacttcccttttgagaaatcatatctcaaatacataacctggtaatataactgaaaaaataaaagtgattgctccttcc

SEQ ID NO: 292985 - DNA, 1000 bp, Homo Sapiens
agggaggaattcttccacagaatattcaggaccagaaccaagatctcaacctctgtacatcttgccatcctgacaagtttttctcccatgtccgagatggccttaattttggtacacagattggcttcatatcaattaaagaatgagatacttgactggatttttgtataactgcttcctgcctccttccaaactgactgcaagagagaaatttagctgtttgatttacttaaaaccaaatggattacaatggataattcatcttttgggtatatttttactattattcaaagccaaatgattttcatttaattgtaataataactgacaaaaatcagtatgttgtagctaatatgttttatgcatgagaattattcttaaagtttgttctccctgtttattacacagatcaggaatagatttgttcagttcagtatttattggataccctctattggtcaggcattgtgttaagcatatgtgaatcaaaatgaacacaactttttcctttgagtctgatacagtgaaggagataaacacttctacaacttaaatttaattttaatagcagtagaagagaacataaggaatagaggttaattttacccagaagcaggatagagaaaatattacagagaaaatcacatatcacatgggctcgaaagatgtagaggtttttgacaaatgaagaacaaccataacaggtagagggaacaccatgaaccagggcatgaaactgaaagtgcataacatattctagagagagaagggtgtgggcatgagttagggctggaaaaacaggttggaaacagataagtaagggtctcaaatgcaatgtcaaagagcttgcagtttattttccaggcaatgagtaggcagccaaaaaaaaaaagtaaggatgtgttttttttttttcccatggcatcatatttaagaggatggatttaaattgtgtgagaccaaagcatagagactagataagaggcgatcaaaatatttc

SEQ ID NO: 292986 - DNA, 1000 bp, Homo Sapiens
agaaacctctggccttatctcctcctgttccccggggccgccgaggccgtcgtcctgggggagccacctcctcaaatcggacactcaaggcctccctccctcgcaagcggggccgcccccccaagtcagggcaggagcccccactggtgcaggtgcagggggtgacagccccagtaggcagcagtggcgggagcgacctcctcctgatcgatgatcagggtgtgccctatacggtctctgaaggttcagcggctgggcctgagggctctggccccaggaaggccccacacttctgcccggtgtgcctgcgggccttcccctacctctccgacctggagcgccacagcatctcgcactcagagctgaagccgcaccagtgcaaggtttgcggcaagaccttcaagcgctccagccacctgcggcggcactgcaacatccatgccggcctgcggcccttccgctgcccgctgtgcccccgccgcttccgcgaggcgggcgagctggcgcaccaccaccgcgtgcactcgggggagcgcccgtaccagtgccccatctgccggctgcgctttacagaggccaacacgctccggcgccatgcgaagcgcaagcacccggaggccatgggggtacccctgtgtgcaccagatccagggtctgaaccgccgtgggacgaggagggcatcccggccacagcaggggccgaggaagaggaggagacagaggggaaaggggagccggcctgacccacacccccggccatcgctccctgggccaggtttagagcagggagtttggctggtgctgggcctgagccagggggccgggacacccttgtttccggtggtcttcccgttgtgggagcaggtggagggtggagacctaaactttggggtccagctgccttcagcccccctcccccagactaacagacccttggaggcaggggctgtggaaataaatctctgcctgctggcaaaaaaaaaaaaaaaaaaaaaaaaaa

SEQ ID NO: 292987 - DNA, 1000 bp, Homo Sapiens
gtaggtcatgagtaacatttttcttaatgaaatcaaaaagaaagaatactatcacatctagtagggttgaggattgttttgtgaaacttttaattttatatatatatatatatgcacaaactgggtcacagtatacaaggtacttccttttcttttttttcttgttggctacaacaggaaaaaaaaaaaaacagaaaaggaaataaaaaagccactgctttaaatcatggggtctaaatgtggctccacagagggtcctcagcatgttcatgactatctaatactctgtgcaagtggttttgcagggcatagggcgatggggaagccatatgtttccagggaaaggaactgtaattttaatcagattttcaggagggttagccgggcgtcacgcctgtaatcccagcactttgggaggtcgaggcgggcagatcacttgaagtcaggagttcaagaccagcctggccaacatggtggaaccctatctctactaaaaatacaaaaattagccgggcatggtgacacacacctgtaatctcagctactcaggaggctgaggcacaagaatcacttgaactcgggaggaagaggttgcagtgagctgagatcccaccactgcactccagcctgggcgacagagcaatactctttatcaaaaaaaaaaagaaaaaagttgagggggtggtctgtgactctttaaacacgtttccttgttttctttctctctctctttttcaacatttctagaactcctcttggcattgttttcagaactcgtatataacttacatgtggaaatttgcatccaaatataccttacattttaatctaatatgtcatgatctttaacctaaactgtggtgtctaatgactagttgcttgtaaaaataaacaaacaccttcaaagccaaaaaaaaaaaaaaaaaaaaaaaaaaaaaaaaaaaaaaaaaaaaaaaaaaaaaaaaaaaaaaaaaaaaaaaaaaaaaaaaaaaaaaaaaaa

SEQ ID NO: 292988 - DNA, 1000 bp, Homo Sapiens
agtggggacgagctttgaaagaacttgccagacttaaacagagggagcaagaaagtcaaatggctcgtcttaaaaaacagcaggaagaattggaacagatgagactacgttaccttgccgctgaggaaaaagatacagtaaaaaccgagcgacaagaattgttggatataagaaatgaattgaacaggttaaggcaacaagagcaaaaacaataccaggattccacagagattgcaagtggaaaaaaggatggcccccatggcagtgtattggaagaaggtttggatgattatttgactcgcctgatagaagaaagggatactttgatgagaacgggtgtgtataatcacgaggatcgaataataagtgaactcgaccgacagatcagagagattttggcaaaaagcaatgccagtaattaataacatttggaaaagctttatagagactctaagtctaaattttaatttctttgtaaaaacctcaaaagtgaggaaaatggatgttttaaaatggtattttcaattttttataagcaaaattttgtatgttattgtatagtatttatttgatcttatttactttatgctacctctcccacactggttttatttgtaatttgcatttatatactcattttaaatgacttttcagtgtttttcatagtttataatctgatggctaactaactttcaaaacagcttttaactaagtttgttgtaggagaaatgactgcggtaatttccagttctataatgtttcatgttgagccaaaagagtatatcttgcactttaaaaacgctgcgtcctattccatttgaatgtaaattcttaaaagttgagaccaattgtaaccagtttaactcattttagatgacctttttttcttataatatttgcaagtgacaagtttgaaaacaaagcaagatcagtgcagagaagccacatgacatgttgggtgacagattggtcatttatttaaataaagttaatacagatt

SEQ ID NO: 292989 - DNA, 1000 bp, Homo Sapiens; identical to SEQ ID NO: 224283

SEQ ID NO: 292990 - DNA, 1000 bp, Homo Sapiens
gtgagaggagagctcattgtttgaagaaaaaccaaaacattttatggctagtaatattatatgtaatttttaaaatgtatttttggtactgatgggatatgggtggggaggctattttagatattcttttagcagtgtagagcctaagaaacttggttctactaccatgatctttataaactatgccttccagacaattgataatgctgctataattagtattatgttgataattcatttgcaaccttattctatttaggaggatgaagttgaagcttagaataggtgcctgcttaatggtgttaataatacaaatgaattggccttattttcaaggattttataaatgattatcatacttgtaactcatatttgtgccttttcattttaatgctggaatttttattatgtcacctctaaaacacttaaattgccaaatttggctagtagttttgtttcagtggcattagcaactgcagctagcatactataattttaattgtcctcacttttttttgaaactgcactaaatttttcttaacattccaagatttcagatctctaaatcacaaagagaaatcttggcatgaccagtgtgcacgtttccatcctgaagtgttttctcttcactagaaatgtgattttctataaattccccttgaatttatagtgtgatgccaaataaaattttctcaggatcttattaggttgaaccatatgtaattgccaagattttactattttaacttagaaaaaccatcgtttcatatgattcaccctaatagatacctccattattctctaaatgaaatagaagactttggagtatatgtttttaaagtaattttttaaaatatggtaatgtattaaacttatttttatagttatgaaattatgtgtaataacgctttatgttatacattaaatgtaaagacttgtgaatccatgtttgattgactttcatagtttcctgcattgaaataaaatcactatgaattct

SEQ ID NO: 292991 - DNA, 1000 bp, Homo Sapiens
gggactcagacagggctgagtgcctccaccctgatttttgcctctgcactgcgcccccacagcccactcaatgccagcctccttctccaggcagagagccccatgtcaatgctggccaaagctctcaggaggattggaggtagaactggccctggtatgccaacaggggtgcctcttttagtgctctcccaataatgctcatcctgggggcatcaggacgcaggcaggtggcagagctgggggcagcttgatggcacaggcagccccaaagatgccaggaacagggactgtccgggtgtgggttcccagtgagatagggccctggaaggagtgcagcagttactgacaatatagtgccagggttggccataggagaatgagcccaagcgtaagtggaagtttccctttactttcagggattggtcaggggtggcagaaaacatgtgggttctttgtgtagatgtggctagttccaattagagaagtcctgcagctgatgttgccctcaccgtgatagcaggaggatgttgagaaatgggcttgggagacctggaggagaagttaccctcggcccggacgttgccttcctttcatcacagggcctttaactcctcctagggagtagcagagtggccctagggaaagtggccatcctgaaacctagtgttgctgtgacctggtgacagaaatggaaacctctgtggctcttctggtcatccttggtgggagtgggaatggtgtcacctttctagagggccatctggcaccatgtaatcacgccacagatctttacgaagctcctgctatgtaggaaacactatgcctggcactgggtatccattaaaatgtaaaatgcacgtgacctggcaattccacttctagaaatgagccttcagaagtgctcatacaaaagagctcaataagtatcatgcactaattcattgtgccaccagagctccctatgcagccttttaaaagaataaataggatctgtagcacc

SEQ ID NO: 292992 - DNA, 1000 bp, Homo Sapiens; identical to SEQ ID NO: 224284

SEQ ID NO: 292993 - DNA, 1000 bp, Homo Sapiens; identical to SEQ ID NO: 118731

SEQ ID NO: 292994 - DNA, 1000 bp, Homo Sapiens; identical to SEQ ID NO: 224285

SEQ ID NO: 292995 - DNA, 1000 bp, Homo Sapiens
tgaagcgccaaggggaacccaatgtcatttctggggttcttcctgccccaaacagtccatttggttaaactcacgagagtgtgtgcttgtcgatgtagctgattctgtatgggtggggatttggaccagcccttcactactcaaagtggggtctgtacaccagcagcagggttacctccttaaccccgagcttgtaagaaagcacagccaagcatggtggctcatgtttgtaatcctagcactttgggaggctgaggtgggtggatcatctgaggtcaggagtttgagaccagcctggccaacatgatgaaaccccgtttctactaaaaatacaaaaattagccaggcgtggtgatgggtgcctgtaatcccagctacgtgggaggctgaggcaggagaatcacttgaacccagaaggtgcaggttgcagtgagctgagatcgtgccactgcactccagcctgggcgacaagagcgaaactctgtctcaaaaaaaaaaaaaaaaaagaaagaaagaaagaaagaaattaagagtctcgggccctgccccagacctagaatcaggacctgcatgttaacaaaccccacatctgtgatccatgtccacagtaaaggctgagaatgcttaatccaaaacaccttccgcctcccagagcttgtggctttgatgccatttgtctgaacatcacaaggaaccacgtgggaaaacaggacttcgtggcgtgccctggcagacaagccaaagcaactgtgggcatcaggctgtggggcggcatccctaggacccagaataatgcctgcgcacagtaggcacggaagtatttgtggaaggaagaaatggagatcatcatgaaataagcgctattggccgggcacggtggctcacgcctgtaatcccagcacttcgggaggccgaggtaggcggatcacctgaggttaggagttcgagaccagcctggccaacatgatgaaaccttatctctactaaaaaaaaaaaaaaa

SEQ ID NO: 292996 - DNA, 1000 bp, Homo Sapiens; identical to SEQ ID NO: 224286

SEQ ID NO: 292997 - DNA, 1000 bp, Homo Sapiens; identical to SEQ ID NO: 224287

SEQ ID NO: 292998 - DNA, 1000 bp, Homo Sapiens
gagacagagttttgcccttgttgcccaggctggagtgcaatggcgcgaacctggctcactccagccagcgcctcacaggttcaggtgattctcctgcctcagcctccggagtagctggggttacaggcacgggccaccagcccagctaatttttgtatttttagtacagacggtgtttcaccatgttagtcaggctggtctcgaactcctgacctcaggtgatccgcccacctcggccttccaaagtgctgggattacaggcatgagctactgtgcccagcctctatgatttcaattttcatgtttaagtacctatgtagaacctaactgtccataagtaaacacaacaaaaaaaagatttggcttttggtcaaagatcattggaggttacacagggtaaagtgcagtatgatttttatcacaattagaaagattaaaaagagatgacagtgagtttgtgagaacaggtttgtgtttcataaaatgaattgtgtgagttagctatgatgaactgcaagcagcttgcatttccaaagacaaatagagacacaggaatctaattaaaatgctaaagtaatgggaaggagacatccatacgtttttgtccccctaaggttccagatttatagtttgagcatcatctcggcttacattttctctgtggaaaacatcagccattacattacttggctctgggttgaaatcctaacttcatcaactgaagatcttatgacctaggcaagtttattaacctcctctatgacgtgataaaaatagtatctcttgtgcggattagaagacatgttcctctatgctaagatgattattatgtgcggaacacatagttaagtgcttgataaattgaactatggcaaatccagtctcaaccgtggcaaaactaagttaataaaaatgaaacataacctttaaaaaaaaaaaaaaaaaaaaaaaaaaaaaaaaaaaaaaaaaaaaaaaaaaaaaaaaaaaaaaaaaaaaaaaa

SEQ ID NO: 292999 - DNA, 1000 bp, Homo Sapiens
gccccactccctcagggtccagccatgccccaccctggactgaagttctgcaaagtcctccgaggaccggaacacgtttctgcgacccggggctctggccagcactgtgttctgcgtttggtctcatacctgcgtctaccttccatctgtgtccagcggccccggctccagcccagccagcactctgcagggtcacacgcaccgtgtccccacccaggacagcagacacccgccagagtgtgcgcgcccagtgactgcaccccggccctcatcacccaccggcactgatcggggcaccgcctggcccagcctccaccagggacccctcctcatgaactctggagccctgagaggagaggggcagccccccaccttgtcaccctcagggcttccccttctgtcctcattcttagagactgcttctcccaaacataacgcgttagccatgaaggagtcggagccctgggtccgaatggacccgcctgcggtctgcatcagcctctgggaaaccacagcagtgatgccagctgggcacgtcaggacctccccacacacccacacgatgccacaggtcagggggctgtgcctgactagggagccctcccattgccttcctggcccgggatagaagaggggaggtaagtctgggggctacgaagccgggcccccacaccctggctgaagtcagcttgacctaggtcttgaccctcatccagcaagggactcgacagacccaagggtccctggaacgtagggaggggctgggggtcactccagcccgggcctcccagaacaccaggcccgtgtgggtggcaccctgaggtcaggggatcctaagggtgtccttccagagacggtgtttccagggggaggaccgcccccgcttccagatccccggccccggctgtgactgccctgtttcacccctgctgtgtcccatcccccgtctgtctactaactgtaccgcaccggccattaaaagatgaaggcagaccgctgc

SEQ ID NO: 293000 - DNA, 1000 bp, Homo Sapiens; identical to SEQ ID NO: 224288

SEQ ID NO: 293001 - DNA, 1000 bp, Homo Sapiens
taggataaatttcaagctaatttttgagttaccactaaaaatggaaggaaatatgcaatgttattttggtagctctaagaaaatatcttgcaagctccaccttcactttgcatcttagttttgaacaatcctattcaattttctcattctctagtgattaccttcatacttttatgcaggaaaaagtccgtatcatctggcattttatcaagactcagcaactggaatgttaaactaaagagggggatatttcactttaccaagtagatagatggtatagagcttaaggcattttcatgctcataaatctgataggcaacagtagctcctactgaaatttcttaggtagggaatgtttattaatatttggaaaatatacttccatcattgcaatgtggagcttcattcataagttgtaatgattctttagcaagtacacttaaaagcctttgcaggtagaatgtcaagatttgattataaataaagtgacccagggaatttagaaaaaaattattttaaaaaatatgtttgatgctattttgtatttttacagttttgattgggtaatgtttctgttcttctgaaaacagacccttggcttcacacattttaaaaatgtttgctacttgttaagggagtcagattaacttccattgggctaatgaatgctcaaatttctaatgagaaactaacactttaaaatttatcatacaacagaaaatggccaattaatggtcctgtataagtggaaaactgttaaggaggtctcaggttttgaaatataactcaacagtatattaaccattgacaagaatggatttttggaattgagaagggtagacaaacttcaggatactaggcaagaatatataaagaatatttcccatgcgttttaaatccgtatgacccagtgttctagagttctgtataaaatgataccaacaacaaataaagatgcttcccaagtaaaaaaaaaaaaaaaaaaaaaaaaaaaaaaaaa

SEQ ID NO: 293002 - DNA, 1000 bp, Homo Sapiens
gtctccatgatattttggtgaacccaaagtgctttatcctcaacaaaatgttcctctgttcccagttaaagtaatattccctgcttccaagtaagcaagactgttcactaaagaaggaactttttagaaaactaatctcctttatcatccaattttagttctgcatgttccgaggtagccagtcaacagaaggaagcaaaagattcttaaagatccaccgactgtcatgttccacaagcaagatctcagggtagggaaaaaccagtgaatgaggttacacagcaggaaaagaaccggtttcctcccagactatgtcttacacgctgagttatgccacaagcgttatcatcaaaactatttaaggctggagtcttagacctctaaaaatagacaggaagggctgccctgagcagtgacacctttgtgtttttatgtctccgccagcgccgtaacagagcctgtttctttcccgttgagtattacttaaattcaggcttaaatgtgctatgaagggcatttttcatagtatcccatttgccttgtaagttatataaagtgcatgattataattttttccttagaaatgcaatatttagtttcatccagctcttatgaataataacctcatagattcctgatcttaatttaaataggtgctttaattttacagctttcaaaagtagttactgtaaattttactcctgttaatgctggattggtttaaaggatttataagggctgtgtttgctctttacaaggcaagatgccatacagtgttcaataatagaaggtcttgatacaaccgacattttaaatattctttatacatgaggactgcgtctttttcactgaccctatgatttcactgtgagtagggtgaactggactgcatattagtttatttgttgccataatcacatttttgaaaaataaatttaagagttttttcttaaaaaaaaaaaaaaaaaaaaaaaaaaaaaaaaaaaaaaaaaaaaaaaaa

SEQ ID NO: 293003 - DNA, 1000 bp, Homo Sapiens
cagtgaaataaaatgaaaacaatttcctcccttccctcaaatctctgagataaccagtatgtgtatttcttcttcctttatgctcaaacaacctgtacacagaaagcattttttgcatgtgtttggaggagcttttacccccatacagacatttgacagcgtcttgtccttttcataataatcatgaatacttttccaggtcagtacgtaaagatgtaacccattctttgtaaggttcagaatatttctagaatggaatgtatgtccgtattttgggccattacctactacagacattgaagttgtttctaatgttcacctagaactctaattttaccttcttttgtttctattgtgcagattcccaacagtgggattaaagagtatctggcgtatatattttgacattacatttattttttaaaatcttctaaattttttgtttaataaaagcacacattataaaaattcaaaaattaccaaaaatgtgaaaattaattctcccctaacatccagttctgtagccactcactttccacagatgcaacaactgctatcagtttccttttattctaacgggaatatttcatgtaaatttcataaattctttggataaaagtaggttattcataatatgtgatttattacacattctcattattagtccacatttggcctacttcattttttttttttttgagacacacccaggctggagtccagtggtgcgatcttggctcactgcaacctccgccacccaggttaaaaattcttctgcctcagcctcctgagtggctgggactacaggcatgcgcagccactatgcccggccaataagctatatttattcttatttgatgtggatgaaaattatcaaaattggccgggcttggtggctcatgcctgtaatcccagcactttgggaggccgaggcgggcggatcacgaggtcaggagatcgagaccatcctggctaacatggtgaaaccccgtctctacta

SEQ ID NO: 293004 - DNA, 1000 bp, Homo Sapiens; identical to SEQ ID NO: 224291

SEQ ID NO: 293005 - DNA, 1000 bp, Homo Sapiens
atgggcactgaaggactgaattggtaggtaggtcactggttgtaagacctactggggccaggtaagaacagtaattggcccagacaggtaggtgtgataaacagagtagaaaagattgtggccaagaagagtgaatgtgtcccatccaaaggtgcatccagatatgtctgtgttactatggcttcatggtttgggggtatatagaaattctcaggacctcagacctttgattctcctttagcaacacacatcgtcagcataaggcatctaaagattttgtggactcataacttatgtactgtttttgagatgattgctgcacgggcaggaaagcaggatttgagagaacatacaccttgccttccagatatgtggtttttgtgattcacccagatctgttgtgccagttaggaattatctttattacttcccgtttattgccactgctgagaaggctgtccttcctaacttgtgaggagatgaatccttaataataagtaaatcttgtgttatcctatagtctggttttccaaaaggagaggtagatgcatatttttgtgtggaaccatttatcttaaaacattgaggtgcagttttcatacacaaaaccttctatctttttaagaactgtctgtatggtttattgcccagttaatgggttttgatagtcatgttatctcagtaagtgtcttgtcttagaaatatgtgtgtataggctgggtgcggtggctcatgcctgtaatcccagcactttgggaggccaaggcaggtggatcacctgaggtcaggagtttgagaccagcctgaccaacatggtgaaatccagtctctacttaaaatacaaaaattagccaggcgtggtggcgtgcatttgtaatcccagctacacaggaggctgaggcaggagaattgcttgaacctggggggcggaggttgcaatgagccaaggtcgcgccattgcactccagcctgggcgacagagtgacacttctcaaaaaac

SEQ ID NO: 293006 - DNA, 1000 bp, Homo Sapiens
ggatcatcacttggtccaacttggccgaacccacaagccagattggaactatatcatcaagtttgtcaagccatttgtccatttaatcagacgtgccatcaacaaatatcccaccgaagatatgaaagccacatgtgttaacatgacctctcccaacccagagaacggtggcacagaaaacactgtattatggtgaagatacaaggtcatcataggggaaaagaagatagctccactgacatgtataatcccatgtggttctaaccagaatgtataatcatctgttagaggtactgtggtaaatgacagggacttttcacaaaaacaattggctaatagcatgctaaatttgttctccatctcaaatcttgaggagaagaattttcggagtgaagacatcagtaagaagacctgacaaaccaggaatgatttcatttctcctgagaactggggaaaccgacctataagagttaacttttctttgaaagctctgcacagttcaggcatcaattttgatgatgtatctgcctgtaaaagattgtcattattttcaacacatctgtatctcagattggactcctctaaaagcatttggaattggaatttcctaggaatatcttctactaattcttaaaactggaaagccatgcccatgtcatcggttctggggtgaccctaacatttcatctagcagtgattgtcttctaaaacccacctgtcaggctgctatgacccatagttaatgctttctcttcaccaggacattgacaaaagaatggaattggtgaaaaagaaaaaagtgataagaggctaattttatgaaccatattttttgctgtaatcttttgtttaaattttagcatgctttgctttgtgtatactgaatttttgcagcaaaagaattacggaaaagcacagatactctatatgaccagagatgttcttgggaattacaatgtagcaagagataatttctaaaataaaaacaagtctgacttgg

SEQ ID NO: 293007 - DNA, 1000 bp, Homo Sapiens
tcacctgcggccacgaccggcagctctgcctgtgggatggggagagccatgcactggcctggagcatcgacctcaaggagactggtctctgtgctgacttccacccgagtggggcagttgtggccgtaggactgaacacggggaggtggttggttttggacacagagaccagagagatcgtgtctgatgtcattgatggcaatgagcagctctcagtggtccggtacagcccagatgggttgtacctggccattggttcccatgacaacgtgatctacatctatagtgtttccagtgatggtgccaaatccagccgctttggccgctgtatgggtcactccagcttcatcactcatcttgactggtccaaggatgggaatttcatcatgtccaattctggggactatgagattctttactgggacgtggctggaggctgcaagcagctgaagaatcgctatgagagccgagaccgggaatgggctacctacacctgtgtgctgggctttcacgtctacgtacccgtgcgctcgtgccaaggcgccgagccgcatgtacgggggccacggcagccacgtgaccagcgtccgattcacgcacgacgactcgcacctcgtctcgctgggcggcaaggacgccagcatcttccagtggcgagtgctgggcgctgggggcgcggggccggcgcccgccacgccctctcgaaccccctccctgtcccccgcctcctccctcgacgtttgatcgctgcctggcgggaccgactggcccggcggcgtggccccgccccgccctgcccttccctggcccaatcccccacgactaggggccgactctttcctggactgacttcgagacattcccgatcgcgcattttcctggagggcgcgaacggcgcccctgcacacactgtttagacccgctggctgagccgggcagccccagcctaggccttgactcccgctgcctgctgaggggcaataaaccagaaccaaagtcg

SEQ ID NO: 293008 - DNA, 1000 bp, Homo Sapiens
caatcatcaggatattctgaggacttaaatgaaattgagtattaagaaatgatctgcattggatttactagacgaaaaccatacctctcttcaatcaaaatgaaaacaaagcaaatgaatactggacagtcttaacaattttataagttataaaatgactttagagcaccctccttcattacttttgcaaaaacatactgactcagggctctttttttctttttgcatatgacaactgttactagaaatacaggctactggttttgcatagatcattcatcttaattttggtaccagttaaaaatacaaatgtactatattgtagtcattttaaagtacacaaagggcacaatcaaaatgagatgcactcatttaaatctgcattcagtgaatgtattgggagaaaaataggtcttgcaggtttccttttgaattttaagtatcataaatattttttaagtaaataatacggggtgtcagtaatatctgcagaatgaatgcagtctttcatgctaatgagttagtctggaaaaataaagtcttattttctatgttttattcatagaaatggagtattaatttttaatattttcaccatatgtgataacaaaggatctttcatgaatgtccaagggtaagtcagtattaattaatgctgtattacaaggcaatgctaccttctttattccccctttgaactacctttgaagtcactatgagcacatggatagaaatttaacttttttttgtaaagcaagcttaaaatgtttatgtatacatacccagcaacttttataaatgtgttaaacaattttactgatttttataataaatattttggtaagattttgaataatatgaattcaggcagatatactaaactgcttttatttacttgtttagaaaattgtatatatatgtttgtgtatcctaacagctgctatgaaattataaaattacctaataaaaataatttgaaaatcttaaaaaaaaaaaaaaa

SEQ ID NO: 293009 - DNA, 1000 bp, Homo Sapiens; identical to SEQ ID NO: 118733

SEQ ID NO: 293010 - DNA, 1000 bp, Homo Sapiens
aggaccagtactgggatgaggaccagccgcagccaccctacactgtggccacggcggccgagtctctgcggccctcattcctgggctccaccttcaacctgcgcatgagcgacgaccctgagcagagcctgcaggtggaggcgtcccccggatctggtcggcccgcgcccgccgcgcagaccccgttgctcggccgcttcctgggcgtaggggcgccctccccggccatcagcctccggaacttcggccgcgtgcgaggcaccccccgccccccgcatctgctgcgcttccgggcggaggagggcggcgaccccgaggccgcagcccgcatcgaggaggaatcggcggagtccggggacgaggccctggagccctgaggtctcgcctgcccccgcccggtttcccccacccactgccctccttccctcccgtgcccggtcctgccagccagctctattagagcagcttttcctgtgtgccttgaaggccagagcatttagggacagaacttgaaagagaagatggcgaaaagggcctgagccagggctgggaatgtgtccactttggtgggagagaaggtcggttgcttgggggacgtgaagctagaaaaataaatgagcccaggcatagaggactagagcccaggtgcacggttagcttcacagcaacagggagctaggccattggttctcaaacttaaggaaggatcagcatcacggaaggtcttgtcaaaagagtgctgggcaccactcccagcatttctggcacgttagatttgggatggcgcccaataacttgcatttctaacaagttcccaggtgatgctgtgctgcttgtccaggaaacacaatttgagagtcatgtgaaacgtgcttgaaggggtataccttaccctggtaaccttactcaaaagaagggtcagtgtgtgctgggggacttttgccttgtttgtaatgttaaagtttttgtttacattgagaatatattcaagtttttgttt

SEQ ID NO: 293011 - DNA, 1000 bp, Homo Sapiens; identical to SEQ ID NO: 118736

SEQ ID NO: 293012 - DNA, 1000 bp, Homo Sapiens; identical to SEQ ID NO: 118737

SEQ ID NO: 293013 - DNA, 1000 bp, Homo Sapiens; identical to SEQ ID NO: 221892

SEQ ID NO: 293014 - DNA, 1000 bp, Homo Sapiens; identical to SEQ ID NO: 224293

SEQ ID NO: 293015 - DNA, 1000 bp, Homo Sapiens
aattggtactacgaaaaggtgaactcctgggcagaatcttgcctagagcttgcggagtccagccaggcccctgctgaagggccccagaccaccggccacttctcccccgtccatctgaccagctgggcccctgcgcccacctggcctccacgttccctctcctctcacccacacccctggccatggctaactactacgaagtgctgggcgtgcaggccagcgcttccccggaggacatcaagaaagcctaccgcaagctggcccttcgttggcaccccgacaagaaccctgacaataaggaggaggcggagaagaagttcaagctggtgtctgaggcctatgaggttctgtctgactccaagaaacgctccctgtatgaccgtgctggctgtgacagctggcgggctggtggcggggccagcacgccctaccacagccccttcgacaccggctacaccttccgtaaccctgaggacatcttccgggagtttttcggtggcctggaccctttctcctttgagttctgggacagcccattcaatagtgaccgtggtggccggggccatggcctgaggggggccttctcggcaggctttggagaatttccggccttcatggaggccttctcatccttcaacatgctgggctgcagcgggggcagccacaccaccttctcatccacctccttcgggggctccagttctggcagctcggggttcaagtcggtgatgtcgtccaccgagatgatcaatggccacaaggtcaccaccaagcgcatcgtggagaacgggcaggagcgcgtggaggtggaggaagacgggcagctcaagtcggtgactgtgaacggcaaggagcagctcaaatggatggacagcaagtaggcgctggccacccggccctgccttcccaccaccaccaccgtgcatggggcagcaaacacgtggggccgcagacatagcctgatggttaataaatgtgccaagtgagttaaaaaaaaaaa

SEQ ID NO: 293016 - DNA, 1000 bp, Homo Sapiens; identical to SEQ ID NO: 224294

SEQ ID NO: 293017 - DNA, 1000 bp, Homo Sapiens
attccaattgaagttgctatgaagaggtagcagatgaatctcattgaattagtcctgtagtgcaaactttaagcaccttaaaacatttaaaatcttattacaggtgatagagatagatacatgtatgtgaacagattttgtaggaaggcatactgaattctttgtcaccagcacttttgatatgaacagtattcgttacatagtaacagttcctgcttacaactgaattttataatttaaggtgttcaagatatattctttttggttttaaaatgcaaaatcttattggctgttctgttgaatgtcatatcttactggtgtttaaatatgtaatgtgtttctttattaacatcactagatgaaaccatatcttaaaatgcagaaatgattggaaggtagatcttatctagcctttggatttcaagaatatcatagtccttttgattttcaaagtttatatgtgaagttcaccatgtatgtggtgaatttcgtaaggtacttggtatacatatctgcctatgtttcttttcaactcataattggaagaattatgatggattatagggtttggttaaaaatccagttactgaaggaattaatgaaaacgtagaagaaagtactaaaaggaatatcataagggctgtagctcaaacttcataatacataaatcactggggtctttttggatttggttgtttgattcgccttccttttttgacatatgtatgccttaattcttaaatctgagggaccatgctttgaaatagactgaaaattaagggtcaccacctaattttactttgtattcagtatcgtaagtgaggttaataaagtcaatactttctaccatatattacgtttttgttattaaaaaacttcattggccactagtgaagttagtcaataaaagacttgtttttctgaaaaaaaaaaaaaaaaaaaaaaaaaaaaaaaaaaaaaaaaaaaaaaaaaaaaaaaaaaaaaaaaaaaaaaaaaaaaa

SEQ ID NO: 293018 - DNA, 1000 bp, Homo Sapiens; identical to SEQ ID NO: 118738

SEQ ID NO: 293019 - DNA, 1000 bp, Homo Sapiens; identical to SEQ ID NO: 118739

SEQ ID NO: 293020 - DNA, 1000 bp, Homo Sapiens
gtcaactccccgttatctgctcccctgagcccatcctctacaggcacctgcccccgccttccaggtccaaccctgagacctgcctgcccagcctccatgccccccaccaaggacaaccttgtccccagctaccctgcaggctcccccagcgtggcggctgcctgtagccaggcagagtgcatgggggagccaggctatcacctcaccactgcctgccaacacgccatccccgtccttcagcaagctgccgccttccaaggccagcaagtcatccaaaggcaaggacggggtggaggtggaggccccttctcgaaagcggaagttatcccctggccctaccactcttaaacggacctgcatcctggagcccactggaaaagggaaaccctctggctgtaggggcctctcggccaaaactaaaacagccctgagcatggggcttaatgggacaatggggccaagagtgaagcgggcagggcccctggactgtcgtggctcccctcatcagctccccacaccagtcaaggcttctcagctggagaaccggggagcagctggacacccagccaaggccctgccaaccaactgcctctctgaggaggaggtggccaagaagcggaaaaacctggccacttattgccggccagtgaaggccaagcactgtcaggctggtgcccctgctgatgtggcctgctctgtgcgccgcaagaagccaggcccggccctggcctttgaggagaagtgctctacactgaagtcaaaagcccattaacgagaaagtgcctgcccactgcaacggagccgccagcacctcctcccctccagatccgggccccaggctgctgccgctttttataactttatattatttttttttaagaaaaaaagctctttaaaatacctcaaaaaaaaaaaaaaaaaaaaaaaaaaaaaaaaaaaaaaaaaaaaaaaaaaaaaaaaaaaaaaaaaaaaaaaaaaaaaaaaaaaaaaaaaaaaaaaa

SEQ ID NO: 293021 - DNA, 1000 bp, Homo Sapiens; identical to SEQ ID NO: 118740

SEQ ID NO: 293022 - DNA, 1000 bp, Homo Sapiens; identical to SEQ ID NO: 118741

SEQ ID NO: 293023 - DNA, 1000 bp, Homo Sapiens; identical to SEQ ID NO: 224296

SEQ ID NO: 293024 - DNA, 1000 bp, Homo Sapiens
gacttggctcgaggaaattaaactctaatgagtagctcgagaaatgttccgggatggtggatgagcgatcatccttaaaagaaaatgctattctgggagctccaacctgcaattaacctacagaaggaaccttttgagaggctggtgcagcgcttcggggaggcagattaagaactttggcctggttgaagctctgtgaggagcaaagcagccctctccaggtgaactgcttgactttaccacctgaaggagtatttactgcaagaattaacaaagcagactgcagtgcaacggcacgatcttggctcaccacaacctctacctccagggttcaagcgatgctcctacctcagcctcctcagtagctgggattacaggcatgtgccatcaccccggctaattctgtatttttagtagagatggggtttctccatgttggccaggctggtcttgaactcccaacctcaggtgatcctcctgcctccgcctcccaaagtgctgggattacaggtgttcctgatccaagcagaaccctgttatttgaagagcctgagaaatcttatcccgtttacaaatgtcctgggagtgcatccaaagtgaaacttgggtatcctcaatactaagaaatctctgagaatgactgggtcttggctctttgatcttacctctactcctctgaaaaacatgattatctaaaattgtgttaggtggatgaaccgcatcaaagacttccagaagccactccagtgaccataagataaatgtcagaatcgcataacccccaggatcagagatggagtctcgctctgtcacccagcctggaatgtagtggcatcattgtaactcactgcagcctgaaactccttggcttaagtgattctcccacctcagcctcccaagtagctggaactataggcacaagctaccatgcctggctattcttttttgttaattttttttaaactaaggaatgaagaaaataaaacattacatgactggt

SEQ ID NO: 293025 - DNA, 1000 bp, Homo Sapiens; identical to SEQ ID NO: 118742

SEQ ID NO: 293026 - DNA, 1000 bp, Homo Sapiens
taaacatagatcaaaataccacatcataccccataaatacatgcagttattatttgtcaattaaaaataaaatttttttaaaagaaaagtacagttcgaccctaggcaagaagaaatttcaaattgtatatgcatattttgaattttggtttatattttgtggtatctgaaatattccctggactagaagcaaaaccacagaaacaaaactttacatttagaaaaaaatttcaagacttctattgctaactttattacattagtggtttttagaagttatttagagcagtcttgtctgatagaactttccaccatgatggaaatgtaaataaatataccacattaaaaatataaatttgcaatgtccaataggctcgtatggctattgagcatttaagatgtaattaattagacagaggaagtaaatttaacattttctctcattttagctaattagaatttaaagtgaaatagccacaagtggatagtggctactgtgttggatggcacagttcaaaatgcctcttatttataaaaaaaagtgtttaaaagtggttcccatggcttgaagaggaataatatacacataacttctttaaaatcacattttgtttgagatggagatcttgctatattgcccaggcttatctggaactcctgggctcaagagggaggatcacatttgactggacaaaatacattttataaaggtgttttgtattttatgttaaagtggaattgtgtcttcaaaattgtgtcttcaaaatttcacaagttaatactattactgtattagtccaatgttaaacattttaaatgcctgctcataagactcatttttgataaataaatgtatctttaatgttttgtttcccaaatagatacaataaataaacatttaaaatgccttaaaaaaaaaaaaaaaaaaaaaaaaaaaaaaaaaaaaaaaaaaaaaaaaaaaaaaaaaaaaaaaaaaaaaaaaaaaaaaaaaaaaaaaaaa

SEQ ID NO: 293027 - DNA, 1000 bp, Homo Sapiens
gtagtgaaggaataatgagagaaggcaggctcaaagacctcctatccttatttcaagtccagtagcttcttaggttgtgtttttttttgttttgttttgttttggaaggattccactgaaaaacgtaagtttgaaacttagtgagctggatgatcaatcccttctagctctgaaccctggacactaaagagggaagatcttgatcctttcaaacttcagaactctgaacacagacctacctagtgtgaagaaatgggagggagcaggatggagagcaggatgaagtcagcaggacttgcccccaagctctgaggggagggggaaagtgccatgtagatgtggaggaggggaagggaagaccaggcccagtcacaagaaggctggtcactgccttgtgggtgggtttggactaggctttcaggggtccaggtctgggattccctatcatgcaatcacatccatccccttggtccctgctgtatatcaccctcaggaacgggaaaggatgagttacgtttattgccccatcccttcactgaatgtttacattaacaaacaccagagagcaaactgggcttcctacactgggccatgcagaggacaggccaagaaactccacatcataacagcctcctgatgcctgggcttggctggagctcacatgaggtgctttgatttcttctgcagactctcggtgatggatgctacaactgacttatcatctttgtctgaaagagcaaaggaagtattcgttatattaatgatgctggcgaccagggaaattccaaactgctggacttcctatgcaggaaaccaggagctggaccctgggacccttaatcttgggttggcagagtgtgaaggggcaagagctgccatttatctagcacttaatatttgccagacattgtgccaggcagttgtgtactgtctcatttaagcctcatagtcctataaagaagatgagaaaacaggaaaaaaaaaaaaaaaaaaaaaaaaa

SEQ ID NO: 293028 - DNA, 1000 bp, Homo Sapiens
tcttggatacacctgagacattaaactcaattttttaaaactaacacaccattctttagtgcagtgaaattcaaaagttataaattggcatggagcaagttttttctttgatttctatgaagtttcagttattggattaaactactttagaccttagcccattcggatctacatacaccagttccattactgtgtttgcatggatgtctgtaatatacacacacatatacatttgaaaatgatagaggaacaaagagttatcattggaacataaactataaaaaaagattccagcactcatgcttgaatttcctcagtgggttgtatgtttgtccatacatacatgtataaaataaacaattgcaaacatgtcagtgaaacctcatatgacgcttttatagtgacatgcatgtttaatgtatgagaaaaatatttaccaatgtattgtcctttgagtcctaaaatataaatactatacatgccagaaactattctaatgtgacttttaatgtgactattaaaaatgaggtttcactgtacattcatgctgtgatgcgatttcaccttatagtacatgtatatgggtacagaaaataaaccctcatattcctgctttaagttacagccaagttttcaccaaatcacaactatcatcaccaccaaaattttaaaaaacagtagttgactactaaaaagtaatcagtggacaggtcatttatgggatcagtaagcacagtagtgtgattatatctgggaaaacatctacagttgtacagctgtatcctcctcaaaatccggtgaagaatgctatttttctaggctgagcttttgttataaacttaatattcagaaggcaagggttatgatcctgatgtgtcctttttttttgcatttgttaattctgaatgtatttttaacagaatgatttttttgacttactagtgtaatttgcattttaaaaataaatggaaaaatacttaaaagaaaaaaaaaaaaaaaa

SEQ ID NO: 293029 - DNA, 1000 bp, Homo Sapiens; identical to SEQ ID NO: 224297

SEQ ID NO: 293030 - DNA, 1000 bp, Homo Sapiens
ggggccagcgggggtcccctccgccccaggcagctacctcctggagcctcagccctacctcaaggccccggggctgcctccatacccccactaccagcaggcacccggggggccccagtttctcttgccctacttcccgcctgagggccccgggccagaggctctgggttttgtgggggacgcagggcccgccgccttcgtggagctgcccctaccgcccctagaggaaggcccggccccgctgccacccccaccccccaaggagaacaagccgccccctgtactcatcacgctgcctgcagagcccacactgcccccagacgcctacagccacctccagggtcacctcggccacttccctgggcccgaacccctggccttccccgtcaaggagctgcagggcagtggggcccgacctggggtgcccctgtacccaccgggcctcagcgagctcaaggtggccgaggtcaaggagggggccctgctgggagcaggcaaggccaaggcccccaagacggccagagctttggcactgcctgacaaggttctgctggaggacgccatgaagctcttcgactgcctgccaggcgcctctgagcctgagggtaccctgtgcgaggtccctgggccggccctgcctgacagcagtggtgggaactcagccgatgacatccgctcgctgtgcctgcccgaggagctgctgtcctttgactacagcgtgcctgagatcctggacaccgtgtccaacgttgactacttcttcaacttcaaggcgctcgacgaggagcagccgccccacccggggccccctgccaccaacaccccggcccccattctgtctggcaagagaaaggcctcgacggccaagaagggaaagccgggaaggaaggccaggcagccggcaggcccagccagcgccactcccccggggcccagggaggacctgggagccaccccgcattaaagcacatttgacctttcaaaaaaaaaaaaaaaaaaa

SEQ ID NO: 293031 - DNA, 1000 bp, Homo Sapiens
tgatggagtatgcagggggtggggagctcttcggaaaaattagcactgaggggaagctctctgaaccagaaagcaagctcatcttctcccagattgtgtctgccgtgaagcacatgcatgaaaaccaaattattcatagagatctgaaagcagaaaatgtattctataccagtaatacttgtgtgaaggtgggcgattttggattcagcacagtaagcaaaaaaggtgaaatgctgaacactttctgtgggtctcctccctacgctgcgcctgaactcttccgggacgagcactacatcggcatttacgtggatatctgggccttgggggtgcttttgtacttcatggtgactggcaccatgccatttcgggcagaaaccgtggccaaactaaaaaagagcatcctcgagggcacatacagtgtaccgccgcacgtgtcagagccctgccaccgactcatccgaggagtccttcagcagatccccacggagaggtacggaatcgactgcatcatgaatgatgaatggatgcaaggggtgccataccctacacctttggaacctttccaactggatcccaaacatttgtcggaaaccagcactctcaaggaagaagaaaatgaggtcaaaagcactttagaacatttgggcattacagaagagcatattcgaaataaccaagggagagatgctcgcagctcaatcacaggggtctatagaattattttacatagagtccaaaggaagaaggctttggaaagtgtcccagtcatgatgctaccagaccctaaagaaagagacctcaaaaaagggtcccgtgtctacagagggataagacacacatccaaattttgctcgattttataaattgcactagactgcttgtaactaaccaagatgattgttgctgcttctaaatttttttcaaggacaacttgagtggagacatttttgtaatttttaaataaacttaaatttgagatatgcaaaaaaaaaaaaaa

SEQ ID NO: 293032 - DNA, 1000 bp, Homo Sapiens
accagctctgcttaccgtagtgagatcacttcataggttatgcctggacttgaactctgtcaatagcatttcaacatttttcaaaatcaggagattttcgtccatttaaaaaatgtataggtgcagatattgaaactaggtgggcacttcaatgccaagtatatactcttctttacatggtgatgagtttcatttgtagaaaaattttgttgccttcttaaaaattagacacactttaaaccttcaaacaggtattataaataacatgtgactccttaatggacttattctcagggtcctactctaagaagaatctaataggatgctggttgtgtattaaatgtgaaattgcatagataaaggtagatggtaaagcaattagtatcagaatagagacagaaagttacaacacagtttgtactactctgagatggatccattcagctcatgccctcaatgtttatattgtgttatctgttgggtctgggacatttagtttagtttttttgaagaattacaaatcagaagaaaaagcaagcattataaacaaaactaataactgttttactgctttaagaaataacaattacaatgtgtattatttaaaaatgggagaaatagtttgttctatgaaataaacctagtttagaaatagggaagctgagacattttaagatctcaagtttttatttaactaatactcaaaatatggacttttcatgtatgcatagggaagacacttcacaaattatgaatgatcatgtgttgaaagccacattattttatgctatacattctatgtatgaggtgctacatttttaggacaaagaattctgtaatctttttcaagaaagagtctttttctccttgacaaaatccagcttttgtatgaggactatagggtgaattctctgattagtaattttagatatgtcctttcctaaaaatgaataaaatttatgaatatgacttaaaaaaaaaaaaaaaaaaaaaaaaaaaa

SEQ ID NO: 293033 - DNA, 1000 bp, Homo Sapiens
attcactccaaaaagtaataccaagaagatatggaaaaagtggacatgacaatttacaagtaaaaacatgtaaaagcatgggtgagtgtgaggtgcaaaaaggaggttgtaatgaagttaaccaatgtttgtcaactacccaaaacaaaatatttcagactcataaatgtgtcaaagtcttcggcaaattttcaaattccaatagacataagacaagacatactggaaagaaacatttcaaatgtaaaaaatatggcaaatcattttgcatggtttcacaactacatcaacatcagataattcatactagggagaattcctaccaatgtgaagaatgcggcaaacccttcaactgctcttcaaccctttctaaacataaaagaattcatactggagagaaaccctacagatgtgaggaatgtggcaaagcttttacctggtcctcaacccttactaaacataggagaattcatactggagaaaaaccctacacatgtgaagaatgtggccaagcctttagccgctcctcaacacttgctaaccacaagagaattcatactggagagaaaccatacacatgtgaagaatgtggcaaagcctttagcttatcctcatccctcacttaccacaagagaattcatactggagagaaaccctacacatgtgaaaaatgtggcaaagcctttaactgctcctcaacccttaagaaacataagataattcatactggagagaaaccctacaaatgtaaagaatgtgggaaagcctttgccttctcctcaactcttaatactcataagaggattcatactggagaggaaccctacaaatgtgaagaatgtgacaaagcttttaagtggtcctcaagtcttgctaatcataagagtatgcatactggagagaaaccctacaaatgtgaataatgtgataaagtccagccttcagaccttataatacataaaataatttatacttgaaaaaatcaaaaaaaaaaaaaaaa

SEQ ID NO: 293034 - DNA, 1000 bp, Homo Sapiens
cacaacagcgtaaaaaaacagctccacctgaagcttgccacgggccgctctttttatcttcagctgtgtcctccatcggatgcaagtgaagacctttttgttcactgggaaaaccttgtttacatcctgagaccaccagtggaggcttacagtgataccagggctatcctagctgggaacacattggactcatctgtgttggaggaagtgcagaggagcccagtgggatatgccatgaagttttgtgaagagaaggagcaattcagaatcagtagacttcacatgaatgctgaaatgtttgggtccacctattgtgattatacaatagagatatgaatccaacatacctcccacatatactacgttcaagagttcacacacccctgcagtcataaaacctatagtgcctgatgaaggggcagggtagcaacagcagtagtgatgacagtaagcaccaccacaggtaccatggatgtggctgcaaccaagtctgcagactcaggagagaaacacagcactggcaaaagcagccttcagaggtccaggaggaagtatagccagcatggctattagtgggtgcttccatgtcttaatcttgttatagcaagggctgcatgcacattcttgtcctaaaagggtacttcaagcatatcagtaagtgctactggcctctccctagagggcagtatgaatgtggtggctacaggagcagagagatactgagaaggctgttgcattgacagtatctctctgctactcaaaggctgactctctgctactcagcattgggagtcagttatctcagctctgcaggatgaggccacatgcgtgaatgggatggaagccagagggtctctacctagctggattgactctgcagtaataacctcaaagcccagtactacacatggtgcagaggtggacatctcacctaagactgtggaggggaacaatgtgattcaccataataaaatccatcaactcaaaaaaaaaaaaaaaa

SEQ ID NO: 293035 - DNA, 1000 bp, Homo Sapiens
aaaaaaatctttgcaattctttaagccatattgttgtttttctgtgttgttttccctggatgaaaatatcagtattaagtagacagcatattattcaagtgtttagacttattaatatgttcttgtcctgtatttatacatatgtgtattttggaaagtattgccttttttaagggaagctataattcgatacatagtgaaaaagggaatggtgacccctttgtgcctcttccactgaggataacaaacagcattgtaatccattctcttgcaccttcttcttcttatcttgttattacggttttattaattttgtagagggacagggagtgggcaaggggaagaagcagcttatttgactaaccagcccctctgtggtccaccagcgtcttggcttggtgggagggctctcaatcagcagggccccaggagggaagaagaagtggggcaaagcctggcctcgccgctcgggagctttgccatctgagccacgcctcctccaggccatgctccttgaacttggaaatgtcaaccggagcccttacaccagccctccagcatctaatagacttgaatctactctaaacgaatatttaatccaacctcactacattgtagctcagtccaacgactaaccctgaaatgggggtgttccagccttcagcgagatggccaagcggtcccctgggggctgtggcagcgggcttatccttctctgttgccaaccttgccgtccgacctcctccgcccccatgcggtgaccccgtccgtgtctgtgtctgtccatacgtgtgagtccagctaaaaagacaaaacagaacccgtgggcccagctcggaaggtgcgtggagaaggctccgacgtctccgaagtgcagcccttgggatggcattccgttgtgtgccttattcctggagaatctgtatacggctcgcctatagaaatatagcctcttcatgctgtattaaaaggacttttaaaagcaaaaaaaaaaaaaaaa

SEQ ID NO: 293036 - DNA, 1000 bp, Homo Sapiens; identical to SEQ ID NO: 118744

SEQ ID NO: 293037 - DNA, 1000 bp, Homo Sapiens; identical to SEQ ID NO: 224300

SEQ ID NO: 293038 - DNA, 1000 bp, Homo Sapiens
tgttggctgcaggactcagagcatggacaggtggatagtaaatcaccaccacggggacagccgtgcccagactgtgcgtttgcttagctcggggacagcacttggcccggggtctcctgctcgcctcccttcagagcatctgccaaacttcgggcatctaccctgcaattcccgcttggctgagaggagggggagaaggaggggaagagagaggagccccacttcactccggcaggcagacctgctggagctgctttgcagaatgacttgggtcttgctggcccctgggtgtgcctggaggggggtcttcctatccccctccacctctccccttggtgcctaacccaggactttgtccccagagacccactgtgtgccccctggagctcctcctagagcagagtctgctgctgtctgttctgcagagagtagcctgaggcccaaggaggttgtcagggacacagagcagggggaggcagcccagatccctgctcatgcgtggtttgggcctctgctaacagctgggccacatgtgtgtatctagagcctgggtcccctctgtcctcatttccctgtgcatattcagggacatgcctcgtcagggtttggcaagaaaatggggcatttaataatctccccagtttcattccttggtccttactccatgccaggacttgtgcacatctttttggagccctgtctcacttgattgacagccggccaggcgcggtggctcacgcctgtaatcccagcactttgggaggacgaggcaggcggatcatgaggtcaggagatggagaccatcctggctaacacggtgaaaccccgtctctactaaaagtacaaaaaaaatagccgggcctggtggcgggcgcctgtagtcccagctacttggtaggctgaggcaggagaatggcgggaacccaggaggcagaggttgcagtgagctgagatcacgccactgcactccagcctgggcgacagagcgagactccgtctc

SEQ ID NO: 293039 - DNA, 1000 bp, Homo Sapiens
ctgcgcagaaagaagggcctggaggccgctgaggtggctgaccggggcgcagaggccgaggcccccgagaaagagcaagcgtacctgcgccatctgggcatgctggaggagctgaagaagcagcaggcagacgacctgcagtggtaccaccaggagctgggccagttgaagcggcagtgccaggagaagctcaccagggtggagaaggagtggcgacgcttccaggcactcaagaagcaggtggtgatgcaggccatgggcagctgtcggatgaggggcgggcgccaggctgctctgcgagaggtggagcagatccaggcgttggaggataaaaaggagaaggagatgagcgccgtgcggctggagaacattcagctgaagcagagcctggtgcattttgaaaccaggatgaggacccaggaggacctgacccagggtctgcttcttattgactttgaacagctgaagattgagaaccaaaccttcaatgagaaaattgaggaacgaaatgaggaacttttaaaacttcgcagcaaggtgaccaacagtgtgcaagtaataacccacgtgaaggaaaagctgcacttcatggacatggagaacgcgtgcaaaaagacacagctggcagaaatcgaggcccaggccgccctaggaagagacatcctgaccaagacgaagcaagcccgagaggggctgcggacggacaacatcagactgaatcagaagtgcggccttctaggcaaggactcacttcttcgggacttggaagaaaaggtggacaagaccgaactgcttcaccggcgcctggaatccctgaagcgccaccacgctagcctcactttgtcctgcagaggcgtgaggcagaagatcagggaggccaaagcctttctcccttcttgaccagatcgatgagaagagtctgcaaaacacttcatcctcaggacgtgctgtcctgctttattttaccttcgttgctattaaaaaggcctgtgtcatttgg

SEQ ID NO: 293040 - DNA, 1000 bp, Homo Sapiens
tggctcagatccttttgaaacatatcatacaggttgcagtcctgacccaagaacagttttaatggaccactatgagcccagttacataaagaaaaaggagtgctacccatgttctcatccttcagaagaatcctgcgaacggagcttcagtaatatatcgtggccttcacatgtgaggaagctacttaacactagttactctcacaatgaaggacctggaatgaaaaatctgtgtctaaacaagtcctctttagattttagtgcaaatccagagccagcgtcggttgcctcgagtaattctttcatgggtacctttggaaaagctctcaggagacctcacctagatgcctattcaagctttggacagccatcagattgtcagccaagagccttttatttgaaagctcattcttccccagacttggactctgggtcagaggaagatgggaaagaaaggacagattttcaggaagaaaatcacatttgtacctttaaacagactttagaaaactacaggactccaaattttcagtcttatgacttggacacatagactgaatgagaccaaaggaaaagcttaacatactacctcaagtgaacttttatttaaaagagagagaatcttatgttttttaaatggagttatgaattttaaaaggataaaaatgctttatttatacagatgaaccaaaattacaaaaagttatgaaaatttttatactgggaatgatgctcatataagaatacctttttaaactattttttaactttgttttatgcaaaaaagtatcttacgtaaattaatgatataaatcatgattattttatgtatttttataatgccagatttctttttatggaaaatgagttactaaagcattttaaataatacctgccttgtaccattttttaaatagaagttacttcattatattttgcacattatatttaataaaatgtgtcaatttgaaaaaaaaaaaaaaaaaaaaaaaaaaaaaaa

SEQ ID NO: 293041 - DNA, 1000 bp, Homo Sapiens; identical to SEQ ID NO: 224301

SEQ ID NO: 293042 - DNA, 1000 bp, Homo Sapiens
catgcagattaagaatctggagcgcagcgggaatcagcataaggcagaagtggaggccatcatggagcagctgaaggagttgaagcagaagggagaccgagacaaagagagcttgaagaaggccatccgagcccagaaggagcgagccgagaagagcgaggagtatgctgagcagctacacgtgcaactcgctgacaaggatctttatgtcgctgaagctttatccactctggaatcctggaggagccgctacaaccaagttgtaaaagaaaagggagaccttgagctggaaattattgtcctgaatgaccgggtaacagatcttgtaaaccaacaacaaaccctggaggagaagatgcgggaagaccgggatagcctggtggagagactacaccgtcagactgctgagtattccgcattcaagctggagaatgagaggctgaaggccagctttgctccaatggaggacaaactcaaccaggcacacctcgaggtccagcagctgaaggcctcagtgaagaactatgaggggatgattgacaactataagagtcaggtgatgaagaccagattggaggctgatgaagtagctgcccagctagaacgctgtgacaaagagaacaagatccttaaagatgagatgaacaaagagattgaggcggcacgaaggcagttccagtctcagctggctgacctgcagcagctccctgacatcctgaagatcacggaggcgaagctggctgagtgccaagaccaactgcagggctatgagcggaagaacatcgacctcacagccatcatatcagacctgcgcagccgggtaagggactggcagaaagggtcccacgaactgacccgagcaggggcccgcataccaagatgagctgcacgccccccaagggaggactacttcctttttcttggctgctgctttttaaaaggagtgagctatcatcagtgctgtgaaataaaagtctggtgtgccaaaaaaaaaaaaaaa

SEQ ID NO: 293043 - DNA, 1000 bp, Homo Sapiens
tattagcccccaaaaagttagtccaaccccaggccagctgcctttgctctgctgtggcctaagttctggcctggtcaaaggaaggtggcaggaactccaggcttgctcctgcctcctcacacctcattccacaaatgcggagtgaaagagcaggagccagacacatttgggggttgactgtctagaaaggaggaatcagaggtcccaaggaacacaatcgtgcaacttcctagggaatctgcatcaggagaaagaagcggctaggacacacagtggcttcgctcagcctggccacgacatcactgtgcagaagaagagatctgtcaggggtccagaggagcggagtcctggagcctctgggagggtggcatgtggcagctgcaggctgtggtccagaactatgagcagacttgcctgtcactctccaaacatttactgaacacctactgtgtgccaggccctgtgctttgtcaggctctgggggagacaggtcattactctgcagtgtgggaagcggggctgccctggaagtgtgtactcagtgctgtgggggtacagagggagggctggagaacttagctggtgggaaaggagggttctggaaggcttctcagaggtagtggcattgggccagaacttacagtagggaagagcatgtggcaaggcacagaggagatgggagcctgcctggtgaggggtccagtggtgacagagctcagtgtgggtccagagatggtgtcaggtgagggctgagaggggagggcaagtgccccttgagatgggctgaacgtgatgatgatctgtggccagtgggagatgatagaagtcttgaggttgggaatataagaattaggtctcttttagaaagagaggacatggagaaaatccatatatttttagctaccaaaaaagagaaggaagaaagaaaagaaataagaagagaagcaagacagaaaagaaggaagagagaaggaagaatggcaaaggaaggaagaaggag

SEQ ID NO: 293044 - DNA, 1000 bp, Homo Sapiens
cgcctgaatttgactgaagacagagtgcaggtttggtttcagaacagaagagccaagtggaaacgaaatcagagggtgctaatgttgagaaacactgctactgctgacctggcccaccctttggacatgttcttgggtggggcctattatgctgctcctgctctggatcctgctttgtgtgttcatctggtgccacaactacctagaccacctgtgctgcctgtgccacctatgccacccaggccacccatggtccctatgccacccaggccacccatagcacctatgccacccatggcgcctgtgccacccggctcacgcatggcgcctgtgccacccgggccacgcatggcgcctgtgccaccctggccgcccatggcgcctgtgccaccctggccgcccatggcgcctgtgccaaccgggccgcccatggcgcctgtgccacccgggccgcccatggcgcgtgtgccacccgggccgcccatggcgcgtgtgccacccgggccgcccatggcgcctctgccacccgggccgcccatggcgcctctgccacccgggccgcccatggcgcctctgccacccgggccgcccatggcgcctctgccacccaggtcacatgtgcctcacactggcctggctcctgtacacatcacatgggcccctgtcatcaacagttattatgcatgtccctttttctaaagtaaggtattcataacagtttttccaaagttctttcctgccagatagaaattgtgcacagcacagcatcaagtaattcgttagatgcttgttaaatgaagtgggtaggtgaacaaagttaacgaatgccctgttatttttgtaggccacataattgtagtattttcaataaagatgtgacttaatagtaaaaaaaaaaaaaaaaaaaaaaaaaaaaaaaaaaaaaaaaaaaaaaaaaaaaaaaaaaaaaaaaaaaaaaaaaaaaaaaaaaaaaaaaaaaaaaaaaaaaaaaaaaaaaaaa

SEQ ID NO: 293045 - DNA, 1000 bp, Homo Sapiens
aagttccgtatggagctctggactcctaaattcccctgaagaagaaaccaatgtactgtggtctcttgggacttgggacagggactctagcagcacctctgtatcctttctggccatttggacaaaagcagttgccccgacttgggattttcctgtagtcttcagtggttcataacagtagaggattttgagctttacaggtgataggtacctaatgtctcctacagaaacaccatctgattcagatcacaagaagaagaaaaagaaaaaagaagaggatcctgaacggaaaaggaagaagaaagagaagaagaaaaagaaggtagagtagaggcctattgccacaacccagtgagtttccccagatctcacccctgtcctaaataccctagagttctttgcctcaagttggacccaagattgaaaacccaaggcaggttgcaggtttctcctgtacagcctgatcaaagccaaggctagttcctagttgttcttaccctgcttctttctcccccagaatcgacatagtccagaccacccaggtatgggcagctcccaggccagcagcagcagcagcctacgctaataggaccactggactctttgccaggatggcttttcctgctgtactgaacctgctgataaaagctgccttccaggctcttggacactgccttgggagcatcctgcagctgggacagaggccagctcctgttgggctcagttgagactaagtaaattaggagagagagggacatgcttttgtaggctcatcccagttggttttctcatggacatctcttcctctcccaggaagcttacaattttcttctctctcttttgtgcaatttgtctgatttaggacttgttctgtgttttctttaaaaaaaaaaaaattacatttatcaaaaaaaaaaaaaaaaaaaaaaaaaaaaaaaaaaaaaaaaaaaaaaaaaaaaaaaaaaaaaaaaaaaaaaaaaaaaaaaaaaaaaaaaaaaaa

SEQ ID NO: 293046 - DNA, 1000 bp, Homo Sapiens; identical to SEQ ID NO: 118745

SEQ ID NO: 293047 - DNA, 1000 bp, Homo Sapiens
actccgtggatgaggacatgggggaaggcagagacttcagacttctcagtgtgttgggaaaaccaaaaaccacaactacagaaattcatctaaaaataagtcctgctgctgaaagagcaaatccaaagactgagttatgtttaatgacttttggccgaatcactggaaatatctgtggtgagattgctgagtcaggtgatgtgatatcataagctttcttggaacgggggaaagaaaatgaaactttttggtgtgaatattttttatgctgatgtgaattattttgttaggtagtgtgattatagcactactactgtcagattttaaattgtatgtgtacttgcatctaagactgtggtagagaagtaaagagaagtcaattccttcttcctcacctctcagcctccagatcccttcctgcccatcccttccctacaatgcccactccagacgcaaagatacacttttttcctttggactgtgaacatggaagcctcagcctgaatgtgagtggcaagtggcttatctggagccacctgcccaagtcttactaaaatgcagctgttgttagacaactgttgaaaactccagaaatacatcacccaaggtggcagttctcagtatttggcagaacaattgcaattgcactgggtatattatatatatatatgtatgcatatatatcatattttttacaaggaacattttatgatgaaagaagaaacccttctctgccttctctcccacgaattctgtccctgtatcctctggatgtaaaaagcaaggagagaccccaactgtctccatggagaagaactaggaatcaccacaaggggaagaaatgtacatgaagtctccattacctcgaatttttttctcagtctcactggttgtgatttggtcactttagtgttgggacaggggaaagggtctgtgcgtgggcaaagctgaaggtgatgaggaagaagagacgaacattaaagatgtctatttactatga

SEQ ID NO: 293048 - DNA, 1000 bp, Homo Sapiens
cccagcaaagcctccacgagggcagctcgccttggagagtacttactacaagacctgcagtcaggccagtgtctgcagctatgggacgatgacttgggagcgctatgggcctgccccatggacaaatacatccacaagcgctgggccctcgtgtggctggcctgcctactctttgccgctgcgctttccctcatcctccttctcaaaaaggatcacgcgaaagggtggctgaggctcttgaaacaggacgtccgctcgggggcggccgccaggggccgcgcggctctgctcctctactcagccgatgactcgggtttcgagcgcctggtgggcgccctggcgtcggccctgtgccagctgccgctgcgcgtggccgtagacctgtggagccgtcgtgaactgagcgcgcaggggcccgtggcttggtttcacgcgcagcggcgccagaccctgcaggagggcggcgtggtggtcttgctcttctctcccggtgcggtggcgctgtgcagcgagtggctacaggatggggtgtccgggcccggggcgcacggcccgcacgacgccttccgcgcctcgctcagctgcgtgctgcccgacttcttgcagggccgggcgcccggcagctacgtgggggcctgcttcgacaggctgctccacccggacgccgtacccgcccttttccgcaccgtgcccgtcttcacactgccctcccaactgccagacttcctgggggccctgcagcagcctcgcgccccgcgttccgggcggctccaagagagagcggagcaagtgtcccgggcccttcagccagccctggatagctacttccatcccccggggactcccgcgccgggacgcggggtgggaccaggggcgggacctggggcgggggacgggacttaaataaaggcagacgctgtttttctacccatgtggcccaaaaaaaaaaaaaaaaaaaaaaaaaaaaaaaaaaaaaaaaaaaaaaaaaaaaaaaaaaaaa

SEQ ID NO: 293049 - DNA, 1000 bp, Homo Sapiens
cgaggcccccaggacaacagatccctctgtgccttggaacccagtggctgtacttcactacccagcaaagcctccacgctatgggacgatgacttgggagcgctatgggcctgccccatggacaaatacatccacaagcgctgggccctcgtgtggctggcctgcctactctttgccgctgcgctttccctcatcctccttctcaaaaaggatcacgcgaaagggtggctgaggctcttgaaacaggacgtccgctcgggggcggccgccaggggccgcgcggctctgctcctctactcagccgatgactcgggtttcgagcgcctggtgggcgccctggcgtcggccctgtgccagctgccgctgcgcgtggccgtagacctgtggagccgtcgtgaactgagcgcgcaggggcccgtggcttggtttcacgcgcagcggcgccagaccctgcaggagggcggcgtggtggtcttgctcttctctcccggtgcggtggcgctgtgcagcgagtggctacaggatggggtgtccgggcccggggcgcacggcccgcacgacgccttccgcgcctcgctcagctgcgtgctgcccgacttcttgcagggccgggcgcccggcagctacgtgggggcctgcttcgacaggctgctccacccggacgccgtacccgcccttttccgcaccgtgcccgtcttcacactgccctcccaactgccagacttcctgggggccctgcagcagcctcgcgccccgcgttccgggcggctccaagagagagcggagcaagtgtcccgggcccttcagccagccctggatagctacttccatcccccggggactcccgcgccgggacgcggggtgggaccaggggcgggacctggggcgggggacgggacttaaataaaggcagacgctgtttttctacccatgtggcccaaaaaaaaaaaaaaaaaaaaaaaaaaaaaaaaaaaaaaaaaaaaaaaaaaaaaaaaaaaaa

SEQ ID NO: 293050 - DNA, 1000 bp, Homo Sapiens; identical to SEQ ID NO: 118746

SEQ ID NO: 293051 - DNA, 675 bp, Homo Sapiens
acttccctgggttcacagcaggggtggaactggattcttcctggatggggatccagatggaggtggagggttgatttgggaagcagagcacagcagcccaaatttgcttgtaatgtcggcgactacagtttctagcctgctggcctgccttcactgtcctgggggaagctcggggagaccaggtggactggagtagactgtacagagacactggtctggtgaagatgtccaggaaaccacgagcctccagcccattttccaacaaccacccatcaacaccaaagaggttcccaagacaacccaaaagggaaaagggacccgtcaaggaagttccaggaacaaaaggctctccctaaaagaccaccgcttcaaaaaaacctgaggaatggagtgggccaacactatccagccactctgaccagccgaaccaggaactcaatcaaaatgcgccacagcaggaccacaagggcaaggagaccaccgccttctccagtgcttccttgggcagccagtaattcccaggcaaggccagagacttcaagtctatctgaaaagtctccagaagtctaaccccagataaatagccaacagggtgtagagtacgttttacaccccaaagggtatgccccatggtgatagaaataaaatgaacatgttgtaaaatgaaaaaaaaaa

SEQ ID NO: 293052 - DNA, 1000 bp, Homo Sapiens; identical to SEQ ID NO: 286339

SEQ ID NO: 293053 - DNA, 1000 bp, Homo Sapiens
gagtttgccaagcagacctccctggacgcagtggcccaggccgtcgtggaccgggtgaagcgcatccacagcgacaccttcgccagtggtggggagcgtgccaggttctgcccccggcacgaggacatgaccctgctagtgaggaactttggctacccgctgggcgaaatgagccagcccacaccgagcccagccccagctgcaggaggacgagtgtaccctgtgtctgtgccatactccagcgcccagagcaccagcaagaccagcgtgaccctctcccttgtcatgccctcccagggccagatggtcaacggggctcacagtgcttccaccctggacgaagccacccccaccctcaccaaagacccttccaggcctgcaagcgatttgacagccatccctcagtgccaactaaacctcctgggcagcctgaccccagggtaggaaggaagcgcctacaccaaggggccctctgggagctgagatcatcctggggttttgtcgcctggtctgacttgtgcactgggatcttctcgtgccaggccaggccccgccccctccccgggactgggcagaccccctccctcatgcatctgtgtccactgaggcttccctcacctagaatggcccatccttcaggacccagctcactctcatcttctttccagggacttatcccccaaggctgtcctctgttctggtgagctcagggctcttggaacttggtctgcagtgactctggggttcctggttaggacccatgttctctaggtcccagcaccctgcacggggcagtgtttgtgacactgggcccagctattctgagagaaggactccaaccttccatcaggtgtggcccgagatgtgggtggccctgggcatggggcatggatgcattgtgactttcatgggcctcttctgcaaaaaaaaaattaaaattatactttatgactattggtagaaagataaatatattaatacattaaaatttctctttgag

SEQ ID NO: 293054 - DNA, 1000 bp, Homo Sapiens
gagcagcctcagtttggccagccaaaaagactgtctggcaccttccacgctctgtagtttcatttcttcttcgtcgggggtctcaggagttggagccgagcggagacccaggcccaccactgtgacggcagtgcactctggaagcaagtgactggccctggaggtggggcccggggtcggggctggggaaggggagccccagggtcgccagagccgcgagccactccagcgagaccccaccttgcatggtgccccttcctgcataggactggaagaccgaagtttttttatggccatattttctactgcaattctgaagtgttcatttctcacaaactgtactgactcgaggggcgctgatttcataggatctggtgctgtatatacgaatcttgcaaagctctaactgaacggaccttcttattcctctcccctaacaccatcgtttccactcttctcagtgtaggtaaccgtctatggtgtgttttttcattaatgacaaaaaaaaaaaggtttcaactggattatttaaatattggtaaatattgtgcattagggtttgtttttccttttaagaagtatgtcctttgtatctctaagttacatgacctatatcttttcctctttaatagtagttttatgttaacctttaagagatttgtttttcctcaaaggagaatttaaaggtattttttaaaattctaataagaggatcagccgggtgcaatgactcatgcctgtaatcccagcacgttgggaggccaagtcgggcggatcacaaggtcaggagatcaaggccatcctggccaacatggtgaaaccccacgtctactaaaaatacaaaaaattagccgggcgtggtggcacacacctgtagtcccggctactcgggaggctgaggcaggagaattgcttgaacccgggagacggaggttgcagtgagctgagatcgtgccactgcactccagcctgggtgacagagcaagactctgtctcaaaa

SEQ ID NO: 293055 - DNA, 1000 bp, Homo Sapiens
agaaagataaccctgctgaatatgccagtttaatggaaatactttatacccttaaggaaaaagggtcaagcaaccacaacctgctggctgcacctcgagcagcgctgactcggcttaaccagcaggcccaccagctggctttcgattccgtgttcctgcgcatcaaacaacagctgttgcttatttcgaagatggacagctggaatacggctggcatcggagaaaccctcacagatgaactgcccgcctttagtctcacccctctcgagtacatcagcaacatcgggcagtacatcatgtccctccccctgaatcttgagccatttgtgactcaggaggactctgccttagagttggcattgcacgctggaaagctgccatttcctcctgagcagggggatgaattgcccgagctggacaacatggctgacaactggctgggctcgatcgccagagccacaatgcagacctactgtgatgcgatcctacagatccctgagctgagcccacactctgccaagcagctggccactgacatcgactatctgatcaacgtgatggatgccctgggcctgcagccgtcccgcaccctccagcacatcgtgacgctactgaagaccaggcctgaggactatagacaggtcagcaaaggcctgccccgtcgcctggccaccaccgtggccaccatgcggagtgtgaattactgaccccaccacacaccggaccaccaagagagccagggctgctgtttcgcgactcaccagcacagatttgctcagaaactctgcccaagattgggcagaagttactttaaaaagacttggttcagctggtcacggtggctcacgcctgtaatcccagcactttgggaggccaagccagatggatcatgaagccaggagttcgagaccagcctgaccaacatggtgaaaccccatctctactaaaaatacaaaaattaacagcagagcgagactctgtctcaaaaaaaaaaaaaaaa

SEQ ID NO: 293056 - DNA, 1000 bp, Homo Sapiens
tgcactgctggattacgggctggggcgccttgcgcgagggcggccccatcagcaacgctctgcagaaagtggatgtgcagttgatcccacaggacctgtgcagcgaggtctatcgctaccaggtgacgccacgcatgctgtgtgccggctaccgcaagggcaagaaggatgcctgtcagggtgactcaggtggtccgctggtgtgcaaggcactcagtggccgctggttcctggcggggctggtcagctggggcctgggctgtggccggcctaactacttcggcgtctacacccgcatcacaggtgtgatcagctggatccagcaagtggtgacctgaggaactgcccccctgcaaagcagggcccacctcctggactcagagagcccagggcaactgccaagcagggggacaagtattctggcggggggtgggggagagagcaggccctgtggtggcaggaggtggcatcttgtctcgtccctgatgtctgctccagtgatggcaggaggatggagaagtgccagcagctgggggtcaagacgtcccctgaggacccaggcccacacccagcccttctgcctcccaattctctctcctccgtccccttcctccactgctgcctaatgcaaggcagtggctcagcagcaagaatgctggttctacatcccgaggagtgtctgaggtgcgccccactctgtacagaggctgtttgggcagccttgcctccagagagcagattccagcttcggaagcccctggtctaacttgggatctgggaatggaaggtgctcccatcggaggggaccctcagagccctggagactgccaggtgggcctgctgccactgtaagccaaaaggtggggaagtcctgactccagggtccttgccccacccctgcctgccacctgggccctcacagcccagaccctcactgggaggtgagctcagctgccctttggaataaagctgcctgatcaaaaaaaaaaaaaaaaaaaaa

SEQ ID NO: 293057 - DNA, 1000 bp, Homo Sapiens; identical to SEQ ID NO: 224302

SEQ ID NO: 293058 - DNA, 1000 bp, Homo Sapiens
ttgcagaaagggggagtggcggcccacgcagcttctgctgaggagctgaccgctctgagctgttctgtttcgtattgctgctctgtgtctgcatgtattgtgaccgtgcggctccacctcttccagctgctgctacagctgaggcctggatcccggcctttccctgtgacttacgtgtctgtcaccggcaggcagccctacaaatcctggtgacctgctctcccaagaacagagcctgtccccagatgtcccagtagcgatgagtaacagaggtggctgtggacttcctctacttctccttgctggatcagggccttcctgcctcccgctgggcaggtctggccttgctctcttggcagggccccagcccctctgaccactctgcagctcaccatgcagctgatgccaaagttgtggtgtccagtgtgcagcagccctgggagccactgccaccttcagaggggttccttgctgagacccacattgcttcacctggccccaccatggctgcttgcctggcccaacctagcgttctgtgccatgctagagcttgagctgttgctcttcttcaggggaggaaatagggtggagagcgggaagggtcttgctcctaagtgttgctgctgtggcttttttgccttctccaaagacgcactgccaggtcccaagcttcagactgctgtgcttagtaagcaagtgagaagcctggggtttggagcccacctactctctggcagcatcagcatcctactcctggcaacatcaggccaacgtccaccccagcctcacattgccagatgttggcagaagggctaatattgaccgtcttgactggctggagccttcaaagccactgggatgtcctccaggcacctgggtcccatgaccagctccccgtctccataggggtaggcatttcactggtttatgaagctcgagtttcattaaatatgttaagaatcaaaaaaaaaaaaaaaaaaaaaaaaaaaaaaaaaaaaaa

SEQ ID NO: 293059 - DNA, 1000 bp, Homo Sapiens; identical to SEQ ID NO: 118750

SEQ ID NO: 293060 - DNA, 1000 bp, Homo Sapiens
cagagattttcaggcaaatagcagaggcctacgacgtgctgagtgaccccatgaagagaggcatctacgacaagtttggagaagagggcctgaagggtgggattcctttggagtttggatcccagaccccatggacaactggttacgtcttccacggcaaacctgaaaaggtgttccacgagttctttggtggaaacaaccccttcagtgagttttttgatgcagaaggaagtgaggtagatttgaactttggggggctccagggccgaggggtcaagaagcaggacccccaagtcgaacgggatctctacctgtccctggaggacttattctttggctgcaccaaaaaaattaagatctccagaagggtgctgaacgaggatgggtactcctccaccatcaaggacaagatcctgaccattgatgtgaagcccggttggaggcagggcacacgcatcacctttgagaaggaaggggaccagggccccaacatcatcccagcagacatcattttcatcgtaaaggagaagctacaccctcgcttccgcagggagaatgacaacctcttcttcgtgaaccccatccctcttggcaaggctctcacctgctgcactgtggaggtgaggaccctagatgaccgtctgctcaacatccccatcaatgacatcatccaccccaaatacttcaagaaggtgccaggggaggggatgccattgccggaggaccccactaagaaaggggatctcttcatcttcttcgacatccagttccccacccgcctcacaccccagaagaagcagatgctgcgccaggcattgctgacatgactgtggtgggctggagcaggggtgagaggaggctagccgggcctcaccccacccctacccgccacagcctcagggtgtgcaggggagcctgctgcacagatatgatacaagggtgggatggcgcagggcttaaactgacataataaagatctatttcctgtcctccagctaca

SEQ ID NO: 293061 - DNA, 1000 bp, Homo Sapiens; identical to SEQ ID NO: 224304

SEQ ID NO: 293062 - DNA, 1000 bp, Homo Sapiens
ctaaatttagactgcagttggtttgtattttgtaacactaagtagaaattataaaaagtcaaacattgtgatctataaatgcacagaaaatactttgtaaaaagtagcatccttatataataatgctatttagaaagactgaaaccaagactatttaactgtgaactatgtagcagatgttttaaactttttattccattatatcttgtctagatattttaattcaaagggatactggctctcttgatcggaatttcttgttatcaccattccacgttgccacacaaggtgcacaggctggaagtcttttgtgaaattcccagttaaatatatacaactatgtgacttagtgcacaacacatttgtgaaataacctactcctatatactgacctgcctgtccacgaataattgtaaagggtttttgcatgtacagtttttacaagaattacagttttgtgaagttgtgtctaaattaaagcatttctttagaacaaatggccttaaattctcacggaattcctggaaatgattgtgaattgccttcaaataatagaaaagtgtatttatttgtgtgtgtgtgtgtgtcaaaaatgtaactgctttataatattttttccttacctatatattctatttaatacttggtttatttctactgtacattgttttctttgtcccaagttgacctagggtgacttttataagcatgaaactattttactggaaagaaaaatatatacatccacatatctaacagtatcaatgttatataactatgtaataattgttgatttttaattatgtattaaaatctttaaatcataactatttgctttgtacgtttcatgtatgaatgacaatagtttgatgatttcctttactgatcttaaatatttatgccactacagtgtattacctacagatttttaaatttagctttatttatcaacccaaaaaacaaataaataagatcaatattctttaaaaaaaaaaaaaaa

SEQ ID NO: 293063 - DNA, 1000 bp, Homo Sapiens
tgaagttccctgttgcatgagcctgcgacaggacctcacccccaccaccaggcttctatttgggattcacatcagtattagtatcgtagctacaccaagttcaggcttctctttttgtttttttacctagaaattgggctcagtggtcttcaacttgaggacgagggtgattttcctaagaaatcagcaaagagggaaggcagggcccctgtagattcaccagtataaacttcagctgcagggattccagagccctcgggaccactctgtcaccttaatagccaagttctcctggttcctccgatcttacaggctcatccaggttccaaagtgcttctgtctctgttttgattctccaaactgctctgtgatgtatgtagggattattctccccacttaacagaaagtagtgtcttggagaggtcaagggtctctagttcaatggccagtcatagcagaagggaggccaagcaccagtccatcacccctcccaggccagcctctgtaagttggccacacttggggagtgagtgtgggtatgactttaccctcctggttggttcttactgtttgagtcaaaacctcatcaatatatcattgactcctgggttcctcaggtcatttcctaatatctgtccctatccaatgcctctattttatcttgaaaaaaggaccaaaaattatttttagctatggcaaggcacaggccacatggcccctgatggcgtccctgctggttttcaattctctgaagccttgtgtagctttcagagcacacgtatcctaattaccctcctcttcctcagcagaacccatttgagattctaaatgaatactcttagtctctaaagttgcagttagaaactaaaataatgttttttaatatgtaatatgctcctcttggctaattttcttttgactttaatgtgccaatgtaacttcctttaaaggatctatgcatttattaaatctggaaaactaaaaaaaaaaaaaaaaaaaa

SEQ ID NO: 293064 - DNA, 1000 bp, Homo Sapiens
accttttttgttgttttgtagcaaccatttgtaaaacattccaaataattccacagtcctgaagcagcaatcgaatccctttctcacttttggaaggtgacttttcaccttaatgcatattcccctctccatagaggagaggaaaaggtgtaggcctgccttaccgagagccaaacagagcccagggagactccgctgtgggaaacctcattgttctgtacaaagtactagctaaaccagaaaggtgattccaggaggagttagccaaacaacaacaaaaacaaaaaatgtgctgttcaagttttcagctttaagatatctttggataatgttatttctattttttatttttttcattagaagttaccaaattaagatggtaagacctctgagaccaaaattttgtcccatctctaccccctcacaactgcttacagaatggatcatgtcccccttatgttgaggtgaccacttaattgctttcctgcctccttgaaagaaagaaagaaagaagactgtgtttttgccactgatttagccatgtgaaactcatctcattacccttttctgggtttgaagctgctgtctctagaagtgccatctcaattgtgctttgtatcagtcagtgctggagaaatcttgaatagcttatgtacaaaactttttaaattttatattattttgaaactttgctttgggtttgtggcaccctggccaccccatctggctgtgacagcctctgcagtccgtgggctggcagtttgttgatcttttaagtttccttccctacccagtccccattttctggtaaggtttctaggaggtctgttaggtgtacatcctgcagcttattggcttaaaatgtactctccttttatgtggtctctttggggccgattgggagaaagagaaatcaatagtgcaactgttttgatactgaatattgacaagtgtctttttgaaataaagaaccagtccctccaaaaaaaaaaaaaaaaaa

SEQ ID NO: 293065 - DNA, 1000 bp, Homo Sapiens
cccacctgctgggcccgccccaccacccgggcctgccgcctgaggcccacctgaagccggaacaccactacgccttcaaccacccgttctccatcaacaacctcatgtcctcggagcagcagcaccaccacagccaccaccaccaccaaccccacaaaatggacctcaaggcctacgaacaggtgatgcactaccccggctacggttcccccatgcctggcagcttggccatgggcccggtcacgaacaaaacgggcctggacgcctcgcccctggccgcagatacctcctactaccagggggtgtactcccggcccattatgaactcctcttaagaagacgacggcttcaggcccggctaactctggcaccccggatcgaggacaagtgagagagcaagtgggggtcgagactttggggagacggtgttgcagagacgcaagggagaagaaatccataacacccccaccccaacacccccaagacagcagtcttcttcacccgctgcagccgttccgtcccaaacagagggccacacagataccccacgttctatataaggaggaaaacgggaaagaatataaagttaaaaaaaagcctccggtttccactactgtgtagactcctgcttcttcaagcacctgcagattctgatttttttgttgttgttgttctcctccattgctgttgttgcagggaagtcttacttaaaaaaaaaaaaaaattttgtgagtgactcggtgtaaaaccatgtagttttaacagaaccagagggttgtactattgtttaaaaacaggaaaaaaaataatgtaagggtctgttgtaaatgaccaagaaaaagaaaaaaaaagcattcccaatcttgacacggtgaaatccaggtctcgggtccgattaatttatggtttctgcgtgctttatttatggcttataaatgtgtattctggctgcaagggccagagttccacaaatctatattaaagtgttatacccggtttt

SEQ ID NO: 293066 - DNA, 1000 bp, Homo Sapiens
gctccgctcagctgactctcatgttctctcgtctcacatttgcactctctccttcccacattctgtgctcagctcactcagtggtcagcgtttcctgcacactttacctctcatgtgcgtttcccggcctgatgttgtggtggtgtgcggcgtgctcactctctccctcatgaacacccacccacctcgtttccgcagcccctgcgtgctgctccagaggtgggtgggaggtgagctgggggctccttgggccctcatcggtcatggtctcgtcccattccacaccatttgtttctctgtctccccatcctactccaaggatgccggcatcaccctgagggctcccccttgggaatggggtagtgaggccccagacttcacccccagcccactgctaaaatctgttttctgacagatgggttttggggagtcgcctgctgcactacatgagaaagggactcccatttgcccttccctttctcctacagtcccttttgtcttgtctgtcctggctgtctgtgtgtgtgccattctctggacttcagagccccctgagccagtcctcccttcccagcctccctttgggcctccctaactccacctaggctgccagggaccggagtcagctggttcaaggccatcgggagctctgcctccaagtctacccttcccttcccggactccctcctgtcccctcctttcctccctccttccttccactctccttccttttgcttccctgccctttccccctcctcaggttcttccctccttctcactggtttttccaccttcctccttcccttcttccctggctcctaggctgtgatatatatttttgtattatctctttcttcttcttgtggtgatcatcttgaattactgtgggatgtaagtttcaaaattttcaaataaagcctttgcaagataaaaaaaaaaaaaaaaaaaaaaaaaaaaaaaaaaaaaaaaaaaaaaaaaaaaaaaaaaaaaaaaaaaaaaa

SEQ ID NO: 293067 - DNA, 1000 bp, Homo Sapiens; identical to SEQ ID NO: 224306

SEQ ID NO: 293068 - DNA, 1000 bp, Homo Sapiens; identical to SEQ ID NO: 118753

SEQ ID NO: 293069 - DNA, 1000 bp, Homo Sapiens; identical to SEQ ID NO: 118755

SEQ ID NO: 293070 - DNA, 1000 bp, Homo Sapiens; identical to SEQ ID NO: 224308

SEQ ID NO: 293071 - DNA, 1000 bp, Homo Sapiens; identical to SEQ ID NO: 224309

SEQ ID NO: 293072 - DNA, 1000 bp, Homo Sapiens
ggatacagggaccagaagcgcaggcccgctcaggaggaattacaacttcatcgccgcggtggtggagaaggtggcgccatcggtggttcacgtgcagctgtggggcaggttacttcacggcagcaggcttgttcctgtgtacagtggctctgggttcatagtgtctgaggacgggctcattattaccaatgcccatgttgtcaggaaccagcagtggattgaggtggtgctccagaatggggcccgttatgaagctgttgtcaaggatattgaccttaaattggatcttgcggtgattaagattgaatcaaatgctgaacttcctgtactgatgctgggaagatcatctgaccttcgggctggagagtttgtggtggctttgggcagcccattttctctgcagaacacagctactgcaggaattgtcagcaccaaacagcgagggggcaaagaactggggatgaaggattcagatatggactacgtccagattgatgccacaattaactatgggaattctggtggtcctctggtgaacttggatggtgatgtgattggcgtcaattcattgagggtgactgatggaatctcctttgcaattccttcagatcgagttaggcagttcttggcagaataccatgagcaccagatgaaaggaaaggcgttttcaaataagaaatatctgggtctgcaaatgctgtccctcactgtgccccttagtgaagaattgaaaatgcattatccagatttccctgatgtgagttctggggtttatgtatgtaaagtggttgaaggaacagctgctcaaagctctggattgagagatcacgatgtaattgtcaacataaatgggaaacctattactactacaactgatgttgttaaagctcttgacagtgattccctttccatggctgttcttcggggaaaagataatttgctcctgacagtcatacctgaaacaatcaattaaatatcttgttttaaagtgggcttatct

SEQ ID NO: 293073 - DNA, 1000 bp, Homo Sapiens
ctggttccagaaccgccggatgaagtggaaaaaagaatctaatctcacatccactctctcggggggcggcggaggggccaccgccgacagcctgggcggaaaagaggaaaagcgggaagagacagaagaggagaagcagaaagagtgaccaggactgtccctgccacccctctctccctttctccctcgctccccaccaactctcccctaatcacacactctgtatttatcactggcacaattgatgtgttttgattccctaaaacaaaattagggagtcaaacgtggacctgaaagtcagctctggaccccctccctcaccgcacaactctctttcaccacgcgcctcctcctcctcgctcccttgctagctcgttctcggcttgtctacaggcccttttccccgtccaggccttgggggctcggaccctgaactcagactctacagattgccctccaagtgaggacttggctcccccactccttcgacgcccccacccccgccccccgtgcagagagccggctcctgggcctgctggggcctctgctccagggcctcagggcccggcctggcagccggggagggccggaggcccaaggagggcgcgccttggccccacaccaacccccagggcctccccgcagtccctgcctagcccctctgccccagcaaatgcccagcccaggcaaattgtatttaaagaatcctgggggtcattatggcattttacaaactgtgaccgtttctgtgtgaagatttttagctgtatttgtggtctctgtatttatatttatgtttagcaccgtcagtgttcctatccaatttcaaaaaaggaaaaaaaagagggaaaattacaaaaagagagaaaaaaagtgaatgacgtttgtttagccagtaggagaaaataaataaataaataaatcccttcgtgttaccctcctgtataaatccaacctctgggtccgttctcgaatatttaataaaactgatattattttt

SEQ ID NO: 293074 - DNA, 1000 bp, Homo Sapiens
ctaaatatggtgtcctccggaaaaaagtattccaggaaatctgggaagccgtctgtggaagatcagtttacgagagcctatgactttgagactgaagataagaaagatctgagtggatcagaggaagatgttattgaagggaagactgcagtcattgagaaacgtaggaagaaaaggtcttctgcaggagtagttgaagatatggggggtgaagtgcagaatatgctggaaggagttggagttgacattaacaaggctcttcttgccaagagaaagagactagaaatgtataccaaggcttctctcaaaactagtaaccagaaaattgaacatgtttggaaaacacaacaagatcaaaggcagaagcttaaccaagaatattctcagcagtttctgactttgtttcagcagtgggatttagatatgcagaaagctgaggaacaagaagaaaaaatacttaatatgtttcgacagcaacaaaagattcttcaacaatctagaattgttcagagccagagattgaaaacaattaaacagttatatgagcagttcataaagagtatggaagagttggagaagaatcatgataatctacttactggtgcacaaaatgaatttaaaaaagaaatggctatgttgcaaaaaaaaattatgatggaaactcagcagcaagagatagcaagtgttcggaagtctcttcaatccatgttattctgatgactctttgaagaaagaacttgaacctaagtaatatgatacaattataacgttagctaagaagcatattgtaagtctttagaatagtttaattgtaacatctttaatcataaacctgtttcattgtaagacctccctttctgttaagtcaaatctaaatagttatgagttagttagcaactattcctaaagaatatgtattaagctttcagctctttagtaatgatagtgaatttttctctctaacactgtcaattaaataaagacgatttaattttaaaaa

SEQ ID NO: 293075 - DNA, 1000 bp, Homo Sapiens
ccgcccgccgcctcggcctccgccgccgcctcgggaggtgaggacgaggaggaagcgagcagcccagacagcggccacctcaaggatggaatccgacgtggtaggcccagagcagatactgtccgcgatttaataaatgaaggagagcattcatccagcagaatccgttgtaacatctgtaatagggtgtttccacgggagaaatcgctccaggctcacaaaaggactcatacaggtgagaggccctatctgtgtgactatccagactgtggaaaagcctttgttcaaagtggacagctcaaaacacatcagcgtcttcacaccggagagaaaccttttgtttgttcagaaaatggctgcctgagcagattcacccatgcaaaccgccactgtccgaagcacccctacgccaggctgaagagagaggagcccacggacacactcagcaaacatcaggctgccgacaacaaggccgcggccgagtggctggcgaggtattgggaaatgagagagcagcgcacccccactttgaaaggcaagctggttcagaaggctgatcaggagcagcaggaccctctggaataccttcagtctgatgaagaggacgacgagaagagaggggcccagcgccggctgcaggagcagcgggagcgcctgcatggagccctcgcgctcatagagcttgccaacctgactggggcgccactccgacagtagcttggacactgactcttccactgtacaaaagtactgcccagcatacttaaaaagtagatccttgggcataagctaagcaccttatttgcttatcataggctgctattctgtagaaatttatgaagaatgttattgccccagaatatggggtgagagagaactgcacttttttaatatggaaatgaattcatcgtaaagtttaaaatattttgtaaatatggactgcacagtacagggtagaaaactacatattgtgggaagctagattttgcaagtttaatgc

SEQ ID NO: 293076 - DNA, 1000 bp, Homo Sapiens
ccaggctgatctgactgtaaaggataaggacttgaatacacccttacatttggcttgtagtaaaggtcatgaaaaatgtgccttgttaatacttgacaagatacaagacgagagccttattaatgaaaaaaataatgcactgcagacgtaagtgtaactactaaagttggacttgaacccagggtcatagtcatttattcaataagtattaagagcctgctgtgtgccagactagctctggggagcacagtggtgaaagatgcagtcctggcttcccctgcatgaaggtgacagtcacatacctacaagtgctgaccaagctgggcagttttagttagaatcctccttttgatatgtcttcatttaattttgtgaagtctctgtttttctttgctgatatttctggggtaatattataaatttagtgggctgttagaaaaattttatggactgacatatttggggaaactatttgtattatgtattagcattatgtattctgactggaaaatgacagttttgcaaatcaggttcccagaatacatttgaagagtttctaagctatttgtcttgattatattttaatataattcagtgtaacccttggtgtgaaagatctaaaagctgtttcattttccgctttaggaaattatttatgcatttgttttaaaggcaaaggaatttttttcatttaagattcttaagccgggcgtggtggctcatgcctttaatcccagcactttgggaggccgaggcagttggattacttgaggccaggagttcatgacccgcctggccaacatggtgaaaccccgtctctactaaaaatacaacaacaacaaaattagctgggcatgatggtgggtgcctgtaacctcagctacttgggaggctgaggcaggagaatcacttgaacctgggaggtggaggttgctgtgagctgagatcgtgccactgcaccactccagcctgggcaacaagagcgagactgtccccccac

SEQ ID NO: 293077 - DNA, 1000 bp, Homo Sapiens; identical to SEQ ID NO: 118756

SEQ ID NO: 293078 - DNA, 845 bp, Homo Sapiens
agttgcccagccacgacagtgacagagtttaacaaactaagcttagagaaacctccaggagactgctatcatggcagagaagcccaagctccactactccaatgcacggggcagtatggagtccattcggtggctcctggctgcagctggagtagagttggaagagaaatttctagaatctgcagaagatttggacaagttaagaaatgatgggagtttgctgttccagcaagtaccaatggttgagattgacgggatgaagctggtgcagaccagagccattcttaactacattgccagcaaatacaacctttatgggaaagacatgaaggagagagccctgattgatatgtacacagaaggtatagtagatttgactgaaatgatccttcttctgctcatatgtcaaccagaggaaagagatgccaagactgccttggtcaaagagaaaataaaaaatcgctacttccctgcctttgaaaaagtcttaaagagccacagacaagactaccttgttggcaacaagctgagctgggctgacattcacctggtggaacttttctactacgtggaagagcttgactcgagtcttatctccagcttccctctgctgaaggccctgaaaaccagaatcagcaacctgcccacggtgaagaagtttctgcagcctggcagccagagaaagcctcccatggatgagaaatctttagaagaagcaaggaagattttcaggttttaataaagcagctatggaggccaagaacatgccagaccaatattctacagtttgcaacaatgaagtgctttacctaagtgtggattgtgcctcttgtaaagctaataaa

SEQ ID NO: 293079 - DNA, 1000 bp, Homo Sapiens
ggctggcgcctggcacggaggtcacttaccgactacagctccacatgctgtcctgcccgtgtaaggccaaggccaccaggaccctgcacctggggaagatgccctatctctcgggtgctgcctacaacgtggctgtcatctcctcgaaccaatttggtcctggcctgaaccagacgtggcacattcctgccgacacccacacagatggcatgatctcagctcactgcaacctccgccttccagattcaagagattctcctgcttcagcctcccgagtagctgggattacaggcatctgccaccatacccggctaattttgtatttttagtagagacggggtttcaccacgttggccaggctggtctcgaactcctgacctcaagtgatccacctgccttggcctcccaaagtgttgggattataggcgtgagccaccatgcccagcctaatttttgtatttttagtagagatggagtttcaccatgttgcccaggctggtctcaaactcctgccctcaggtgatccacccacctcagcctctcaaagtgctgggattacaggtgtgagccactgtggccgacctactatttttattatttttgagctaggttctcagtctgttggcagactggagtgcaatcatggctcactgcagccttgaactcccagactcaagtgatccttccacctcagcctctggagtagctgggactacagacatgcaccaccacacctggttaattttttatttttattttttgtagagacaggtgtctctctacgttgcccaggctggtctcgaactcctgggctcaagtgatccacccatctccacctcccaaagtgctaggattacaggcgtgagccaccgtacccagcctggtcccatatcatagtgaaatggtgcctgtaaagctctcagcattggcttggcacatgcagttggtactcaataaacggctgttgctatccccaaaaaaaaaaaaaaaaaaaaaaaaa

SEQ ID NO: 293080 - DNA, 1000 bp, Homo Sapiens; identical to SEQ ID NO: 224312

SEQ ID NO: 293081 - DNA, 1000 bp, Homo Sapiens
ggacgatggaccgccggactcttttctgcagcacacgcctgtgtgctgtgagccccccactctgccgtgctcacacagacacacccagctgcacacatgaggcatcccacatgacacgggctgacacagtctcatatccccaccccttcccacggcgtgtcccacggccagacacatgcacacacatcacaccctcaaacacccagctcagccacacacaactaccctccaaaccaccacagtctctgtcacacccccactaccgctgccacgccctctgaatcatgcagggaagggtctgcccctgccctggcacacacaggcacccattccctccccctgctgacatgtgtatgcgtatgcatacacaccacacacacacacatgcacaagtcatgtgcgaacagccctccaaagcctatgccacagacagctcttgccccagccagaatcagccatagcagctcgccgtctgccctgtccatctgtccgtccgttccctggagaagacacaagggtatccatgctctgtggccaggtgcctgccaccctctggaactcacaaaagctggcttttattcctttcccatcctatggggacaggagccttcaggactgctggcctggcctggcccaccctgctcctccaggtgctgggcagtcactctgctaagagtccctccctgccacgccctggcaggacacaggcacttttccaatgggcaagcccagtggaggcaggatgggagagccccctgggtgctgctggggccttggggcaggagtgaagcagaggtgatggggctgggctgagccagggaggaaggacccagctgcacctaggagacacctttgttcttcaggcctgtgggggaagttccgggtgcctttattttttattcttttctaaggaaaaaaatgataaaaatctcaaagctgatttttcttgttatagaaaaactaatataaaagcattatccctatccctgcaaaaaaaaaa

SEQ ID NO: 293082 - DNA, 1000 bp, Homo Sapiens; identical to SEQ ID NO: 118757

SEQ ID NO: 293083 - DNA, 1000 bp, Homo Sapiens
ccagcctgggtgacagagtgagactccatctcaaaaactgaaaataaaaataaaaatatgtattctcctaactgaaatatttacttaatctggaaaacaatgtaactatttttaaagtggttacatctattcttgctgaagaacaataaacagaattttttgactaagcataaccaaatttcagaacagtctaatcaatgccaagtatccaaggcaaactctaatacccatccattgtgcaaaaccacaagcacgcaagtattaaataagagcaagctgtcctgagcccatacctaatgaatttgtgtcttaaatattgtacattgtgtttgaggcttgtcaaaactgggattatggcaagaaaggttgcctaactcatacctttctgcctcaaattccaggtgctaaaggctaatggcattttaaacatcttacatttttaaaaatttatattgcctctgccaaacaggcctaatagttaaaagcaagttgagacaaaccaggcagattcagtgtgtggaacaggaaggatgtgctttaaaaaaaggtggaatccctcaaaaaattctatagggagacagcagccttaatctacataattcttcatctcgccaattcagccgcagcctttaaagagttagtgttaatggctttctggtttgaaaacaaaaatgcatctatgtggttgaaagtttgggaggagattcaccaatatctgaggagaagatggagtgaagggaatttttactttttgctttatacctttctataatatttagatttttttttactgtaagtatggatcaaattgcaaaataaagaaaaatgccaaccttagaaaagacaataaatgcacaaaagatataaacaggaacagcaaatatttatattttttccattttgctctttttaaatctatgtttagaactttatatcttgggacttatgtatatatataccttttaaataaaataaattttctaaataaaaaaaaaaaaaa

SEQ ID NO: 293084 - DNA, 1000 bp, Homo Sapiens; identical to SEQ ID NO: 118758

SEQ ID NO: 293085 - DNA, 1000 bp, Homo Sapiens
gccaaggctggaatgcagtggcgagatcatagctcactgcagcctcaaactcctgggctcaggccatcctcctgcctcggcctcctgagtagctgggacgacaggcgtgcaccactgcgcctagctccagtaccatgtttaaacggtgctcagaaaacgtgctaaacttggtggatgggaattgaaaagagatttaatgttttaaaaatcaaagtcactcagctgcagtgccacatgggaaggaggcctggatgtgaatgttcctgggagctgagagctcctgtgactgtcgccagtttcctgtggtctcccacagactcaggacatctccctctgctccaggacacctcaggaccaccagagggcactcatcgcaccttcacccctggaagggagctggtcctggggccaaaacccactgtgcctgggaagcccttcctggcttctgctctcctcaatgtatgacagccctgatttacccccagggactgttgccactcggggttgtagagtaatatgtaaccagactggagaaccacagcaatgctctctcctctgcccatcacctccccttggcccctccctcttcatcagccccattttggagaagggagaaagaagggagaggcagcagtctcctcccaggtggggccggactccagggaaggagaattttcagaagttgctggagttgccgaatctgtcagggcccagggttcccagagcagtgatggaggagaaaggagaggaagcagatctaagcacacatgggcatcaaaccagaggaacaaagtcacatgcagagggctgcacatagacacagggaaacacacacacggagatgcacagaaacacgcagaccccatgcagggacctgctttcccgccacagaggaaagcaatctgatcaaacagacccactgtgcacccagccctccatgcttggggacaacacacctacaaaaatataagaaaaaaaaggaaaaaaaaaaaaaaaaaaa

SEQ ID NO: 293086 - DNA, 1000 bp, Homo Sapiens
aacaagctgagcgagaggaacctgaaatgtttttttgaaaacaagaggccagatccttttcccatgcctacgtttgctgcctgggaggctgcttcagagctgcattctttccaccaaagccagcaacactatagcaccctccacagagtggtggacaatggtctgcaacttagccctgaggatgatgagacgacaatggtccttgtgggtactgcccacaatatgtagctcatccaccatcaatgactcatggtgttgagtggcatgctcattctgtgatcctcctaacgtatcaccagcaacctgtgtgtctctgtattttcttacatttggagtatgtttacaagacaataacacaaaggaaactgctttgaagctctcaagtagaacatcaggatgtgctcaaattgatgctgaggggtgacaaaggtgctcttgcattggtggagaggggctcagtaggcctaaatgttgctccaagatctaagattttatcattcaacagacagactcatgtgagagggctcatcagtctctgtaaatattggttgcagaatttaggggcagaagcaatggcttgtgagtgagcaagttactcttaacataggttgccctacacagtggctcctgcagtgtgatcagcaggagtctctgtcctacaaatctacacttttaaggatgtatgaaattgtggaattcattccctcaggatctgaagatctcagttctcaaaaatcacaagttgcaagaatatgatacctaaaattgaaagtttttcacatgttttcactgtatactgaaaatactcccctggaagcagggctgcatcataatttttgtgggctttatgtacttttgcctttgcgaaccatttcctacattcaaaatagtagtaacaaatatatatatatatatacacacacacacacagaaatatatatttataactgcattgataaaaggtgaatatattagcattttcttcaaaaaaaaaaaaaaa

SEQ ID NO: 293087 - DNA, 1000 bp, Homo Sapiens; identical to SEQ ID NO: 224313

SEQ ID NO: 293088 - DNA, 1000 bp, Homo Sapiens
cggctgcagcaggggagatatggccagggctgtacactctactaagctggcaggagccaggaacaagcaggagcggtgctcaccttctgagttggtgatgggggagctccacgctcctagaggcagctgcagctgcccagccatggctgcagacccaggcatccctgtgctcttgggggcctaggaagcccccctgctcccacaggctcggaagtgcctactcctgctgcctggcctctcctcactcctggcacccactctgattctgaagcaaagttgtggccaagcccaggcgctgttatgacccagccaggtgtgtgtgtgcttgggatggtgctgacacaccagccctctgctgccttggccccctccagagtttgggtgccaacaagcatgggagggaggccaagggggcactgagggtggcacagcacaggcctgcaggtgtcccttggcatgaacagcctgggcaccatgaacagcagcaggaagcgacaggctcccgagtggaaagggatgtgtcgctggtgaagccccaccttcaacccaggggtggcctgaagcctgggggccaggctgccagttccacagactggagtgagaacttatggtgcttttttcaggcccacctatggctgcccattgaccaatcagcatgagcttcctcccctctgaagcccataaaaaccctagactcagccagactctggcagaagtggggatgacctgcctgcagagaggagttatttgctgtggggtcttctctcagctaagagctgaacagatatcaggatgacctgcctgcagaaaggagctacccactgtgggtcttctcttagctgggagctgagcagatgctgggatgacctgcttgcagaaaggagctacccacttcagatctcctgcaagctgtactgttgctcaataaagcacctctttgccttaaaaaaaaaaaaaaaaaaaaaaaaaaaaaaaaaaaaaaaaaaaaaaaaaaaaaaaa

SEQ ID NO: 293089 - DNA, 1000 bp, Homo Sapiens; identical to SEQ ID NO: 289831

SEQ ID NO: 293090 - DNA, 417 bp, Homo Sapiens
cgcgcggggaaggggagacgtggggtagagtgaccatgacgaaattagcgcagtggctttggggactagcgatcctgggctccacctgggtggccctgaccacgggagccttgggcctggagctgcccttgtcctgccaggaagtcctgtggccactgcccgcctacttgctggtgtccgccggctgctatgccctgggcactgtgggctatcgtgtggccacttttcatgactgcgaggacgccgcacgcgagctgcagagccagatacaggaggcccgagccgacttagcccgcagggggctgcgcttctgacagcctaaccccattcctgtgcggacagcccttcctcccatttcccattaaagagccagtttattttctaaaaaaaaaaaaaaaaaaaaaaaaaaaaaaaaaa

SEQ ID NO: 293091 - DNA, 1000 bp, Homo Sapiens; identical to SEQ ID NO: 118760

SEQ ID NO: 293092 - DNA, 1000 bp, Homo Sapiens
gctgctgaatgtgccctgatgtgaccaggttgcacttggaagagatcctcgcgtcttcatgaggcacttaaagcttataaaagaactgcggctggaactcatctggtgctccccatgagagtgctctgcttgtagactggccagtgtccatgaaacaactgtaaataccaacatgtgtgcatgggtcaacagtcttggccatttctcatcaaaagaagccaaattcatgatcaacatctctgaagtttcaagtaaggcccacacttctttgaattactcttcatgggcccacattaggttgtgctgtgaattacttaaggcagtgatactgatgtagtatagttttgtcttaatttcccttatttctacttctttggttgaatctatgaacttgattgtataattttcttataaattactgatgtaatcagcttgtcaattatgttgtgaaattgttagtattcatttatcaaaaatgacctatgtttagtcacatatttgtttagttctgggaaattgttatagcttaaatggaactcaccaacattattcatagtttaagtcttttatcattattacctcaattataaatattacaaaaacataattctggcaatgagagtatttttttattcaatgatcaaggagcaatgtcagtatatagtagaatatcaattaaattatatcctaaaatgtatattttgcataaaagagatattctttaatcaattacttttttgtgagttttgtggcaaatgaagcttgtacgtgtctttaaaactgttgtagatgaaactgtataagatttttacatcttgcttaatcaatattttcagagtctattagttcccctgggattctgaatataacatatagcctattataaatccctgtatcgtggaccttttgtgaacatttcaaggcgcatgcacaaccttgatgataaccagtggaaatgtaactaactgaaatgaagaataaaaggcaaatgagctgggga

SEQ ID NO: 293093 - DNA, 1000 bp, Homo Sapiens
tggagcgcagccagcgcacagcgtttccgcaggaatcttgagaatggcaaggcccgcacacccgcggtggttcccaggcccgccccctctcgcagctgcagccccacctgccagtgcgtgccgcctccgagcgacttccgggagccgggcggccaccgcggtgcaggcgcgcgcccaaaggctttgcgaggctcactcggtctgagaggtcggaggctgcgagtgtcgctgctgaaggctgtggtggaccgggctggatcgcggattttggattagataatagatttgggatcgccgattgggggttggattgcggatttggggttggataggggatttggggctgggtcggcgggggcaggggcggggaggtgaaaaggtgacagggagctgcctcctctcaagagcagttggttgggagtctgagaagtcaccaccatgaagttgttcggcttcaggagccacaggggccagacggtcctgggcaccatagaccacctgtacacgggttccgggtaccgaatccggtactcggaactgcagaagatccacaaggcagctgtcaagggcgacgccgcggagatggagcgctgtctggcgcgcaggagcggagacctggacgccctggacaagcagcacagcagtgtgtccccaagaaagtgtcagagcctttacgtggaccttcccatggaaaaggaaacagaatagtcaatggaaaaggagaaggacctcctgcaaaacatccttccttgaagcctagcactgaaatggaagatcctgctgtgaaaggagcagtacaaagaaagaatgtacagacattgagagcagaaaaagccttaccagtggcttcagaggaagagcaacaaaggcgtgaaagaagtgaaaagaagcaaccacagctaattttagaacatgcactctgacagaaaagacatctgagaaacaaaacaagcaaatttgttttcctttttgcacctgccaaaaaaaaaaaaaaaaaaaa

SEQ ID NO: 293094 - DNA, 1000 bp, Homo Sapiens; identical to SEQ ID NO: 118762

SEQ ID NO: 293095 - DNA, 1000 bp, Homo Sapiens
aaagggtgttagcagatgcgaagtaaagaacgtcactttgaaacccattcatcacacagcatacgctacacatggaacacccaagccatgactgaacacgttctcagtgcttaattcttaaatttctttactcatgacatttcgcagtgcagagaaggcagaacccaagaaaaacgtcatctttgagactttgcttttgtaacgcagacatcagctttacacttcacaggagattgatggcattgaggaagattgcaatggagatcatgacactactgttaataaggccaggaaaactgccatttcaagttctgaaaaatgttttgagtatttgaatttagagaaacaacatggttccaagaaggagggtgtaaaacctgtaaaatactgtcaacatgtattcattagttacaatctcatgtttgtgttttcttagtactgtctatttacaaacacgtaaaaaataccccaaatatgtttaagtattaaatcactttacctagcgttttagaaatattaatttacttgaagagatgtagaatgtagcaaattatgtaaagcatgtgtatccagcgttatgtactttgcgccttgtgacgtctttctgtcatgtagcttttagggtgtagctgtgaaaatcatcagaactcttcactgaagctaatgtttggaaaaaatatatacttgaagaaccaatccaagtgtgtgcccctacccccagctcagaagtagaaagggtttaagtttgcttgtattagctgtgccttcattattttgctatgtaaatgtgacatattaattataaaatggtgcataatcaaattttactgcttgaggacagatgcatacagtaaggatttttaggaagaatatatttaatgtaaagactcttagcttctgtgtgggttttgaattatgtgtgagccagtgatctataaagaaacataagcttaaagttgtttatcactgtagtgttaataaaacagtattttcaaaaaat

SEQ ID NO: 293096 - DNA, 1000 bp, Homo Sapiens
ttcaaagtctaccagcacaaagacccctgagccccgcaattgtgatcccacaagacatgcatctccacaaggctactgtattagaacgtgcaatgcatttatatgaaactggtgtatggaagacataggtgctctcttgaaatcttaaatatgattatttgagctcatataaggtggattggagcagataaaattatcaaaagtttcatgaacaggccaaacaaaatattttttaaagtttccttaaagaagttatgaactttagaaaggatcaggggacaataataatctcattttgattctactgataagaatgactccacttttaatgtggacttttactcatggaaaaattgtctcctaatttggggagatgaaccaaccaatcaatgacaagaaaacgcttacacaaagaacaatttgaggctctaagcttctcatgtggtacgtttagacagaggctaaatctgcacactagaatcttgatgataccttcctgcaagacagaatgctttagttaaaagtggtgatgatatttctttcaatctgtattggatggcttaaagggctataaatctgtttataaagagcatttcctgctcttcgaagacagcaatgaggagttggaaggtgcaaagtcagtagagaagggaatgtatcattaatgcacctgagaagaaacagtttcatgtgttcctccacctagagtttgtactggaatgctatttctaaagaagaagtgggaaagagagaggaatgggatggagccccacagtcagaatgttactatgtctttctttccctgacagcccatcttcctaaaagggaccagcttatggaaggctcgaccttgaggggaaagttttactgtgaaagtcttcttcagatccccacctgcatcattccgaatgtgtcctggaaaaaaactggtactcaaagctgcttaggaatcaaaatgttttcagtgtgttgattaatatagtaaatttctgaaactgtg

SEQ ID NO: 293097 - DNA, 1000 bp, Homo Sapiens; identical to SEQ ID NO: 224316

SEQ ID NO: 293098 - DNA, 1000 bp, Homo Sapiens
taggctgggtgaggaagactctgatgtggatgttgaagggtatgatgatgaggaggaggatgggaaacctaagcctccagccccagaagggggagatggtgatcttgcagatgaagaggaaggaactgtacaacaacctgaagccagtgtcctgtatgaggatttgcttatatctgaaggagaagatgatgaggaagatgctgggagtgacgaagaaggagacaatcctttctctgctatccagctgagtgaaagtggaagtgactctgatgtgggatatggtggaataagacccaaacaacccttcatgcttcagcatgcttcaggagaacacaaggatgggcacggaaaatgaagaaagcatgatgtcccatgagggagacggtggggaggcttcccatgatttggaggatagcaacatcagttatgggagctgtgaggagcctgatcccaagttgaacacccaagacacaagcttcagcagcatcggaaatttccagctgggcatggtggctcacacctgtaatctcagcactctgggaggccgaggcgggtggatcacctgaggtcagttcgagaccagcttggccaacatgtcgaaacttcatctctactaaaaatacaaaaattagccaggtgtggtggtgcacgcctgtaatccccagatactcgggaggctgaagcaggagaattgcttgaacccgggaggcagaggttgcagtgagtggagatcacgccactgcgctccagcctgggcgaaagagtgagactccatctcaaaaaaaaagaaaatttccaagcatggtatcatctcacttttctaatttacaggctggaacagatgagagccctcctgctgggacagagaattgggttctagtggactctgctacacttaaacctatgtgacaaaccgcccattattttattgtttatttaattatacaatgcctcgttcctatatggatttgaggcaaattaccataaattttgaaacagc

SEQ ID NO: 293099 - DNA, 1000 bp, Homo Sapiens; identical to SEQ ID NO: 118763

SEQ ID NO: 293100 - DNA, 1000 bp, Homo Sapiens; identical to SEQ ID NO: 118764

SEQ ID NO: 293101 - DNA, 1000 bp, Homo Sapiens
agggaagaatgctcaagcaagtcatgtttgttttcagtgggatgggcccgcgttctcactgctgggggcttccccttcatgtggcacctttgtgccaggccaccaggcagactcttcccaccttctcccactgaagcaccaagaggcttgaaccgtaatttggctaatcagaggcattttttttgtcctagtatctttcacacttgtccaaccgtcttatttttttaaaagttctgttgcttgtattaacacgaaactagagagaaatagtttctgaagccagtttattgtgaagatccccaagggggaggttcggtagagaaaaatagtaagctggtttagaaactgacgagggcaaacagccaggacgcattggagaggaatttgccaaagatctaccctgagataacgcctgtccagtgtcttcaccacgtgaataaccagcgctccaaagtgtttttctgctttgaaaaaaaaaattccacaagcttttaaaggtgcatttaagaatccatgtgactttagaatggaactgccggccctggcaactgtcacgtgtgctagaaggttcgatgcctctggaatgcatgtgatactcatctccattttgtttccttgattgcatttttgttcttttagcagatctgtccctgtgggtggtgtctaagaagtcggacaccttggtttttgtgttagattgagctgggcagctgcaatcagcttctttatatgcaaattaggcacgacccatctgtggttcctggttggtggctaatgaagtgaggggagggagggatgtcaccccaaaagtaggccctcccattggctttggccaggccagacacttcacatcgtttacatggttctgtgtaattttaaagtttatgtgtataaagcgaagctgtttctgtgaaactgtatattttgtaaataaatatattgctactttgaggttcatgaaaaaaaaaaaaaaaaaaaaaaaagaaaaaaaaaaaaaaaa

SEQ ID NO: 293102 - DNA, 1000 bp, Homo Sapiens
cactggtgcatttttccttttggataagggaaaacattattccacttactgtttttgctttaagcagcctgcatatattggttagtttgttcagatgttgtgcacagacatcatcaaaattagctaacatgggtatttttgaacatatttttgccaggaagatgaaaatcacatagtatgataaacaggtgtattcccctctacttgcccatgtgctcatttttctgagtctgaaattccagacttactggctttaacaataatttttgttgttaatttaagaaatagacttacttaagactattttaagaaatagagatgtcatagcctgaagatttactgaagcttctgaacatgccaccatgccaaagctatgtttctcaaacccagctctgtggatcatgttcctaaaagatgctcatggggagaaaatgtttacagacaaataattttgggagctgcctttgcaaacctgcctgttggcatattgaaggctctaagaattccttcactaaataacccagttttaatatatccttatccaaagagaaactcatttttttaaagtgaaatatttgttaacagcccattgaacatacttttaaaaacactatggtagagaatgctgtgttgccttctgggctgcatttttcttattgatttggaattgtaacctatgtatgagaaagggattttctggtattttggtgacgttgtacattgtcccagactgtttgtaaacatgaggtcagacatgtgtaaggtagacgcctatggccactggcttgaccaccttggaagtcaatgactattttgagatgaagtatttaactatgaatatcatgaaggttatttaaaaatgtatttattttatctttggggttcaaacattaaaaaaatttacataggtgtagtaactcatttcaagggaataaatgctggattaaaaagtgaaaaaaaaaaaaaaaaaaaaaaaaaaaaaaaaaaaaaaaaaaaaaaa

SEQ ID NO: 293103 - DNA, 1000 bp, Homo Sapiens
caggtctcctgaatctgaaaagccaggcccgagccacggcggtgtcccaccaggaggcccgagccacagcagcctcccggtgggacgccgccaccccccggtgctacgcatggtgctggaggcgctgcaggctggggagcagcgccggggcacgtcggtggcagctatcaagctctacatcctgcacaagtacccaacagtggacgtcctccgcttcaagtacctgctgaagcaggcgctggccactggcatgcgccgtggcctcctcgccaggcccctcaactccaaagccaggggggccactggcagcttcaaattagttcccaagcacaagaagaaaatccagcccaggaagatggcccccgcgacggctcccaggagagcgggtgaggccaaggggaagggccccaagaaaccaagtgaggccaaggaggaccctcccaacgtgggcaaggtgaaaaaggcagccaagaggccagcaaaggtgcagaagcctcctcccaagccaggcgcagccacagagaaggctcgcaagcaaggcggcgcggccaaggacaccagggcacagtcgggagaggctaggaaggtgccccccaagccagacaaggccatgcgggcaccttccagtgctggtgggctcagcaggaaggcaaaggccaaaggcagcaggagcagccaaggagatgctgaggcctacaggaaaaccaaagctgagagtaagagttcaaaacccacggccagcaaggtcaagaatggtgctgcttccccgaccaaaaagaaggtggtggccaaggccaaggcccctaaagctgggcaggggccaaacaccaaggctgctgctcctgctaagggcagtgggtccaaggtggtacctgcacatttgtccaggaagacagaggcccccaagggccctagaaaggctgggctgcccatcaaggcctcatcatccaaagtgtccagccagagggctgaagcttagggccagaggcaggggcggaga

SEQ ID NO: 293104 - DNA, 1000 bp, Homo Sapiens
ccaacaactccgttttgttggattaaagatgattctatcttttacatctcagtggtggcttatttttgcctcatatttctcatgaatctctccatgttctgcactgttcttgttcaactgaattctgtgaaatcccaaatccagaagactcggcggaagatgatcctgcatgacctcaaaggcacaatgagcctgacattcttacttggcctcacctgggggtttgcattttttgcttggggacccatgaggaactttttcttgtatttgtttgccatttttaacactttgcaaggattcttcatttttgtgtttcactgtgtgatgaaggagagtgtgcgggagcagtggcagatacacctctgctgtgggtggttgcgattggataactcttctgatgggagcagccggtgtcagataaaggttggatataaacaggagggactaaagaaaatctttgagcacaaactgttgacgccatctctcaagtcaactgcaactagctccactttcaaatctttaggctctgcacaaggcacaccttcagaaataagctttccaaatgatgactttgacaaagatccttactgttcctctccttgatttgtgaagttgtgcctaattatgtaaaaagaatataatacctgtggaaataaaaatgaattccaagtgtatacttgctcgggtgatgggtgcaccaaaatctcacaaatcaccactaaataatgtactcatgtaaccaaatgctacctgttccaccaaaacctatggaaatttaaaaaaaacaaaaataaaaagcaaaacaaaaatcccaaaatgaattccattcacaaacagaatttttcaataaatcccagtagagatacttgcctcctcccaacccctgattggggaaaaggttgaatttgtgaaacaatctgctccaaccttctattttaattattattttgtaaggggaagaataacatttgataaatattaaagtcagaataattctcct

SEQ ID NO: 293105 - DNA, 1000 bp, Homo Sapiens; identical to SEQ ID NO: 224318

SEQ ID NO: 293106 - DNA, 1000 bp, Homo Sapiens; identical to SEQ ID NO: 224319

SEQ ID NO: 293107 - DNA, 1000 bp, Homo Sapiens; identical to SEQ ID NO: 224320

SEQ ID NO: 293108 - DNA, 1000 bp, Homo Sapiens; identical to SEQ ID NO: 224321

SEQ ID NO: 293109 - DNA, 1000 bp, Homo Sapiens
caacagaaacatggtggagccatcccaacacatattcgatgatgctcaacttcagatttacaccctgatgcacagagactcatatcctcgattcatgaactctgctgtctataaggacttgcttcagtccttatcggagaaatctattgaagcataggatttttcaaatatatttattattaataaaataataaaagaattcatgggctacaactagcacagggaatttagaggttgtagcatcttctgctggagtaatactcaggctattctaataacagatgattccttcaacagactgctatatattcaccatgtaaactgcagccacctttagtgatacttttaaaaaaaaaaataaagggatatggctgttgtagaaagatagcgtatttgcatttacaataacagtagcatgttgtcagtggccaaggctacacagaaggctccctgctgcccggagcaggtacatccacagagcaaagggaaccacttttattttgcatgagtttggtaactgattactctcccctcaaagaaaagacattcaggtgtttctcaacgacatcttctgtccagcaagctcggtttgaatacgtcacttaccagtgccattgcaggacccaaattcacagttcataaaagatgtgaccactacatgtaaaaatagcattctacttgatcttacagtatgtatgtatgtatgtatggagacatatgtgtgcgtgtggatgtctacatggttaatggaaagcactgtgctctgaagtggatcagtctcaagtgtctggtaacagcagcaatgcttagaaaattcttttgttgaaaagagttactgttattatcagaatttgccaacctaaagaatgaatttttaaattcataacttggtcatgttcacaacaaaactgtcaaataagcatatttccatttttattactgaaagaaatatgggcattttcattctttaaagaaataaagcacaagaattttatctcaa

SEQ ID NO: 293110 - DNA, 1000 bp, Homo Sapiens
tgttttcttaataagtatagtttttctagggaaagttaattcatttttgtctagtacatatatgtaaatatattaatgttgtttttgtgtttgtgatgtagtaaggagatgtacatagaaattcattgaggtatatagatactcatctgtctaggcagttcccaattttctgaagaatgttttacagcaaaattttctattttcttttattaaatagtgacacgtcaaacaatgtcacatccaaaacactagtttcatcaatttctagcagtaataatagacttgctgtaagtattgttttctgatgccatacccttgtcatacatattattaaatgaccaatattatgtatgaagtagacaaaaaaatttactcaaacttcattcaaatcctaattgtgataatttttgttttatatttaattataaaccaaaatacatttgcatttttaagctaatttgtctcaaaattttgctttatatttttggatcaggttaaagtcctgtggatcccctgaatgttattgtccctcttgattggtttttacttctgagctatacgtcaaaagacacataagcttcaaaagtcaagacaaacctcatttgccataaaaatcaagatatagatgttctgttccgtaaactccttgaaaaacattttaaagtcatcaatatgatctgtttcccatgaaacttaagttagctttcttattggagttatttcttttctgtaagtctgaaaagtagagattttgttttacgcattttagtaacctgcaacaaccaactctaaaaaagatttggcttgtaatgacggtctctgcttttttgggtttggagtacacaattgtaatatttacttagttatttgtgtttttctttgttcaaggtattgactagtttcataaattttttgaaagtttttctttcattggttggaaagcagattacattttgcactattaaaataagtttattactttaaaaaaaaaaaaaaaaaa

SEQ ID NO: 293111 - DNA, 1000 bp, Homo Sapiens
cttgctttttgttccctagttggtctaagggtctgtattggactaattctgaactacagacaaattggacctcaatgtcatttacttccctcatattaatgggagtgaaatgtctaatacttttgcccctttttatccagagttgtgggaatctcaggattggaagagattttaaaggccacataggccagctagtgttcatgtgttctttataaaatttctcccatccaagtactaaccaggcccgaccctgcttagcttccgagatcagatgagatcaggcgcgttcagggtgatatggccgtagacgtctttacaaaattcctgacaggtggttactgaatctctctatgaactttccattcaaaactttccaagtttttccttatgtggaaccgaaatctttctttctcccgtgaaactttactactatcagataattgaagacagatctctttgtattctcttcaagcccaaaccaattctgttccttcaatctaaatagtggtaatatgaatgtttaagaaatgaaataagaaacatgtgcaggcactttggaaggtgctaagtgactgccctaaggaatgaaaagcaagggccaggtgggagtagcccagcgaaggcacttgggctgccaggaacaggaggcgtgggaaactctggcttaggaaaacatgaacacaggggcaacagaggcaaactgttgttcgagttaaatataaatctcaggctctttaaaggtaaaaggtttaaggataatccatttggaagaagaaaagagtgaggctgaaagtaaagccacatgacaagcatataaaaaaaaatgcagatgatacaaatatgaaagaggccttcagtgtttgtttattaagaatcttaatgcagtttactgatggattaaaaacagctaacattgtctgaaaattatgttacctataagaagttggaaataaataaaagcataatcactaaaaaaaaaaaaaaaaaaaaaaaaaaaaaa

SEQ ID NO: 293112 - DNA, 1000 bp, Homo Sapiens
tgttcaagaattatgaccctgaaggccgaggaacaatctctcaggaggactttgagcgactctcgggcaattttcccttcgcctgccatgggcttcacccacccccacgccaggggagaggatccttcagcagagaggagctgacagggtacctgctccgggccagcgccatctgctccaagttgggcctggccttcctgcacaccttccatgaggtcaccttccgaaagcctaccttctgcgacagctgcagtggcttcctctggggtgtcaccaagcaaggctaccgctgtcgggagtgcgggctgtgttgccacaaacactgcagagaccaggtgaaggtagaatgtaagaagaggccaggggccaagggcgatgcaggaccccccggagctcctgtcccatccacaccagctccccatgccagctgtggctccgaggaaaatcactcctacacgctatccctggagcctgagactgggtgccagcttcgccatgcctggacccagactgaatccccacacccttcctgggaaacagatacggtcccctgcccggtgatggacccaccatcaactgcatcctccaagctggattcctagacatctcttggtctcctctcttcctcactcccttcccccagtcagtcctgagtcctgccgtcagactctggcagggctcccagaggagcatcaactccaggagaacagggatttctatcaatgtcattcactgctgcatccccagtgcctagaacagggctggcaggtggtaggcgcctgacagatgcttgtctgatgcctgaatgtctccttacccatgcccacggcacaggatagatgtgctatagggcaaagaactttgagggtcgagcagcaggggcccattcagtcccagggagcagagacccccccaaccccttcacaaaccccaacacccctgacttggcccccacagagagaggtcctacagctgtcataaattaaatttattctctgga

SEQ ID NO: 293113 - DNA, 1000 bp, Homo Sapiens
agaaggggcagcagccagagatggaagactttgggctggtgaccagatattagaggttaatggggttgacctgaggaactccagccacgaagaagccatcacagccctgaggcagaccccccagaaggtgcggctggtggtgtatagagatgaggcacactaccgggatgaggagaacttggagattttccctgtggatctgcagaagaaagctggccggggcctgggcctgagcatcgttgggaaacgaaatggaagcggagtgtttatttctgacatcgtgaaaggcggagccgcagacctggatgggagattgattcagggagatcagatcttatctgtgaatggggaggacatgagaaatgcctcacaggagacagtggccaccatcctcaagtgtgcacagggacttgtgcagctagagattggaagactccgagctggttcctggacctccgcaaggacgacatcacagaacagtcagggtagtcagcagagtgcacacagcagctgtcatccctccttcgctcctgtcatcactggcctgcaaaacctggttggcacaaaaagagtttcagatccttcccagaaaaattcaggcacagatatggaaccaaggactgttgagataaacagggagctcagtgatgcccttggaatcagtattgctggaggaagaggaagtcccttaggagatatccccgtatttattgccatgattcaggctagcggagtggccgcacggacacagaagcttaaagttggagatcggattgtcagcattaacgggcaacctttggatgggctgtctcacgcggatgtggttaatctgctgaagaacgcctacgggcgcattatcctgcaggttgtagcagataccaatataagcgccatagcagctcagcttgaaaacatgtctacaggctaccaccttggttcgcccactgctgaacaccatccagaagacacagaggagcagctgcagatgacggccgattaa

SEQ ID NO: 293114 - DNA, 1000 bp, Homo Sapiens
gtcttttgctatagttcagtagcttctgctaaatttcactgattttaatcatgctggagaccttaactcccatcctgatacatcctgaagtaacactgttttaaactttcttagtgctggagtaaaaggtcaagtccaacacctgccttaaatttaaatcatgtgatttatagtttttaagttggcataattcaacttatggtataactgggtccctcaacagtaacctgggctaaaataggtcttatgtggttcaactcccacccccgccttccccatattttcaaccactctgattatcttccctgcacaactaacatccagtaataattcttcacttttaaaattttacttctactttaaatcaatcattaaaggaatccacaaagcaaacagagttcagtctcatcttgcaaggtaaatatcatttaattggaagtagtttaaatgtctcattgttttattgacacatctatatatacatttgtgaagcaagaaacaataaaaaagcttcgtatgccattaatttaacaaaatatgtattcagtactgattgcatacaagatgcatgtttatatatatggaaggaatatagtttcatttcattgcaaaggcagtataaaagatatataaaatagcataatatgagaaattaagtccctaaagacatataggtcacatattattattgccagatgagcataaatagcttctgtttggagattcaggaaagccttagggtggaatgaggaacatcttctgagtaaacagggttgcaaaggttatgattatttcaacacaatggaagagcacagttaaggccaactaacgtaaaatgcactgaagccttagggaatattgaagggcctgacatggggaaagggaaggctaaaaatacttggtcaaattttaacattataccaaagttatacccagttctacctacttgtatatttctttactcatttcaataaagtgtttgaaaaaaaaaaaaaaaaaa

SEQ ID NO: 293115 - DNA, 1000 bp, Homo Sapiens
atcacaggactatgatcagcttccttcatgttcagatggttcacaggcaccagccagaccccctaaaccacgaccgcgcaggactgcaccagaaattcaccacagaaaaccccatgggcctgaggcggcattggaaaatgtcgatgcaaaaattgcaaaactcatgggagagggttatgcctttgaagaggtgaagagagccttagagatagcccagaataatgtcgaagttgcccggagcatcctccgagaatttgccttccctcctccagtatccccacgtctaaatctatagcagccagaactgtagacaccaaaatggaaagcaatcgatgtattccaagagtgtggaaataaagagaactgagatggaattcaagagagaagtgtctcctcctcgtgtagcagcttgagaagaggcttgggagtgcagcttctcaaaggagaccgatgcttgctcaggatgtcgacagctgtggcttccttgtttttgctagccatatttttaaatcagggttgaactgacaaaaataatttaaagacgtttacttcccttgaactttgaacctgtgaaatgctttaccttgtttacagtttggcaaagttgcagtttgttcttgtttttagtttagttttgttttggtgttttgatacctgtactgtgttcttcacagaccctttgtagcgtggtcaggtctgctgtaacatttcccaccaactctcttgctgtccacatcaacagctaaatcatttattcatatggatctctaccatccccatgccttgcccaggtccagttccatttctctcattcacaagatgctttgaaggttctgattttcaactgatcaaactaatgcaaaaaaaaaaaagtatgtattcttcactactgagtttcttctttggaaaccatcactattgagagatgggaaaaacctgaatgtataaagcatttatttgtcaataaactgccttttgtaaggggttttcacataacata

SEQ ID NO: 293116 - DNA, 1000 bp, Homo Sapiens
tcctggccgtttgtgctgctcataatgcccctggtgatctgggtctatagcacagacactaactttagcgatatgttctggtcttgactgacagttttccataaagaagatgtttaacttaatcaattaatttttttattgtttaaagcaactgtctatttctgctgaattttcacatgaacatactggctggtgatggaggtttcatactctagattttgttttgctttttctgactccagtggggcaagattttccttttttatacacataattaaagtgtccattgacatgtacagagaactaacactattttatgcaaatatttttttgtagatgaaaaagcatgtacagtgttctgtttaatactcatccttgtataaaaaaaatagttgagccagcagacattgtcagcaaattaattggcagcagattttaggaaatgaatgtgtgtggttttttttctaaaactaaatagcatgtattgtgtcttttgcatgatgatccggatttaatttgatatcacagtctaatttttattcataagccaatttttctgcactgagcagagtcttgctacctcagtcagtattgttttggtttgctacttccctcacccactttggcctccgttcaccccaccccaccccacctctccccaccttacccccgccccgcttggcttcttctttaggattgtgatggttcgttctgtttacatcagttttaacgagaggtatgcctgtactcgcttgtgcagaaaacattgttccagattcaatcgactgggtttatgtcccttcacatagtttttaaggttatttatttaaatgtctaatgtattttattgtaacagacattgttttgccaacattgcctatttcagtggcacgtcatctagttttaaaaaaataaaacattttaaatggacagagaaaaaaaaaaaaaaaaaaaaaaaaaaaaaaaaaaaaaaaaaaaaaaaaaaaaaaaaaaaaaaaaa

SEQ ID NO: 293117 - DNA, 1000 bp, Homo Sapiens
taaaagagaacccttgttcccttcctaagaaactgccttccacaattaaagaatactcatagaaagaaaataatcataaatcatatttgattaacatttcatttaagcttttaaaatatcaattttttaaatagctcccatttacccaaaataactagttatgggtctatttcttccatgattagaggagagagaacttgattcaagatactgaaaaatagagctgggactgagcctgtgaatgacaggaatgatctattaccaggtgactagtcggaaactacacagacgtgcactggtctgcatttgggggctaaagtgtatatattccatttaaaatggaatttgtttgtatttggggcagtcttcagtaaagcctttctcctttcttttctccattgaggacagttctgctcagcaaaattgttgagtacctgttctgggcaggtcccacgctatatgcacaaagttaagaaaaacttggtcttagcccttgggagctgacagcccatgggcattaaggcaaagtagttccagtgatttaaaatacggttccaaatacgctaaaaccaacttgtgccaaccagatttacagattggaaatactgcagatgatgtgaagttatcagttggaggagctgtgattaagctggataataagagaacgtgccatctgtaaagcactcagaaggcagccatccctagatgttggtttcatgtatattacactatctactactatccataaatgcaataatatgcatgttaacaacattaaaaacagcaaacagcaatctaagtacagaaaagctttttgtgtgtttaaaaaaattgaagaaaattcaggaagaaacgtgttaataaacattgtactgttcttaaaaaaaaaaaaaaaaaaaaaaaaaaaaaaaaaaaaaaaaaaaaaaaaaaaaaaaaaaaaaaaaaaaaaaaaaaaaaaaaaaaaaaaaaaaaaaaaaaaaaaaaaaaaaaaaaaaaaaaa

SEQ ID NO: 293118 - DNA, 1000 bp, Homo Sapiens; identical to SEQ ID NO: 118765

SEQ ID NO: 293119 - DNA, 1000 bp, Homo Sapiens
ccccatccccaggggccgcctcccccggggcggcctccaggctgccgagacctataaaggcgccaggttttctcaatgaagccgggacgcactccggagcgcactgcgtggtcgcaccctacccgggctgccttggaagtcgtccccgccgcccctccgcaccggcatgaagctcatcgtgggcatcggaggcatgaccaacggcggcaagaccacgctgaccaacagcctgctcagagccctgcccaactgctgcgtgatccatcaggatgacttcttcaagccccaagaccaaatagcagttggggaagacggcttcaaacagtgggacgtgctggagtctctggacatggaggccatgctggacaccgtgcaggcctggctgagcagcccgcagaagtttgcccgtgcccacggggtcagcgtccagccagaggcctcggacacccacatcctcctcctggaaggcttcctgctctacagctacaagcccctggtggacttgtacagccgccggtacttcctgaccgtcccgtatgaagagtgcaagtggaggagaagtacccgcaactacacagtccctgatccccccggcctcttcgatggccacgtgtggcccatgtaccagaagtataggcaggagatggaggccaacggtgtggaagtggtctacctggacggcatgaagtcccgagaggagctcttccgtgaagtcctggaagacattcagaactcgctgctgaaccgctcccaggaatcagccccctccccggctcgcccagccaggacacagggacccggacgcggatgcggccacagaacggccaggcctgcagcgtcccagcaggacagcatgtgagcgtttccctatgggggtgtctgtacgtaggagagtggaggccccactcccagttgggcgtcccggagctcagggactgagccccaagacgcctctgtaacctcgctgcagcttcagtagtaaactgggtcctgttttttt

SEQ ID NO: 293120 - DNA, 1000 bp, Homo Sapiens; identical to SEQ ID NO: 118766

SEQ ID NO: 293121 - DNA, 1000 bp, Homo Sapiens; identical to SEQ ID NO: 118768

SEQ ID NO: 293122 - DNA, 1000 bp, Homo Sapiens; identical to SEQ ID NO: 118769

SEQ ID NO: 293123 - DNA, 1000 bp, Homo Sapiens; identical to SEQ ID NO: 287981

SEQ ID NO: 293124 - DNA, 1000 bp, Homo Sapiens; identical to SEQ ID NO: 224324

SEQ ID NO: 293125 - DNA, 1000 bp, Homo Sapiens; identical to SEQ ID NO: 118771

SEQ ID NO: 293126 - DNA, 1000 bp, Homo Sapiens; identical to SEQ ID NO: 224325

SEQ ID NO: 293127 - DNA, 1000 bp, Homo Sapiens
gattgaggactgggaggagattgatggcagccagaatggagaggatggtacagatcaaagaaatacaaaagagaggaaatagagtttgcttactcctgactttggggactgtggagagggtgtcaacagtgacaccattgtccgtagtcaggatatctttgggaatggaagttccagtagcagatatgggggagtaggaaagaagaggatggttgcttaagctttgcctttagtgagtttggggtacccactatatgagagaggagcaattcagatattaaattggtggtgttgaaatctttggaattagagctttggagataaattgcagctagatataaattatctggaataaagtgataggtgaaataatatggtagagaagccttattttatttctctcttctttaccaattatattgagatattattattattggcatattaatatattattattggtatattaataatataataatataggtatattatcaataatatactaatactaatataccaataatagtgggttattgttaataatattggtaaagaaagaacataaatgtaagtttattaccaagaatattggtgtggtaaagataacccatttatgctggaggttgcaattttttgaattgcaaaatcagaccttggccatgaccttaagcagtaggatataaataactcccatgtgcccagtgttccattattggaacagtgtgccattcttgtgcactgatggaggaaatagttacagatacagtgtgatttgaggaattggttcccccagagccttattgaccctcaaatacttcccttacccatgttatcatttcctttctatcctaaaattgctacctttgctgccagatcttttccttcataaagtcaatgtgacatttactcatttattaactcatttcttcaacagatacttattgggcatttactgtatgccaagtattgtaataaatgctgtatgtacaaaatgaca

SEQ ID NO: 293128 - DNA, 1000 bp, Homo Sapiens; identical to SEQ ID NO: 118773

SEQ ID NO: 293129 - DNA, 1000 bp, Homo Sapiens
agtcactttaaactttataaatcaaagagatattaggaacattcagaattatttgtgttttgtttttgttttacattgttgctgcactggcaataagtatgtggcactgtttttatttgtttatgttatttaaatacacacccagacacacacacacacagtttttgctttttctggaaaatctttctttctcttctctctccatgaaaattaaaacacacaagtgaatgaagtaattacatagtccaagattagaaatacaagtaaaatatataggtataggtagatagagtgcctttctgtttcttttcttttcttttttctttttttgttcttccttcctttcttccctcctccccctcatccttccctttctccttcttttcccttttttttttttttttgacctgggagtaataaagttactttttaaatgcacgtatgcaatcttttattcctcttgttttatggataagagatttgttcaggtcaaaagttgcaaaactgttctgaagcttaatattagagacccaagtaagattgtttttagtcttgcttgaggaatgcacactccatttaaaaaattgtgcgctctgtagatttggattttacagcagcaattacttggctaaattagagtactgcaatcttgtaagtagaaaacagccaccatgacaataaacaaaaacacttaaaaatatttttagcttgttttacctacatctagtttcatttcatcttgctttgctttgttgactctgctaccgctgatgtttgccttgtcaatatcagaataggggcatcagtgtcccgtgaaatacattttgttgtgctatgagcctctgtaatcaaatgcttgtactcagaagagagtgtaaaatcagcatttctatgtaacatatatctctaattatctgtgtaattttataacatactttgacaaccccagtgagttacttaataataaagatcttaaaataatgcaaaaaaaaaaaaaaaa

SEQ ID NO: 293130 - DNA, 1000 bp, Homo Sapiens; identical to SEQ ID NO: 118774

SEQ ID NO: 293131 - DNA, 1000 bp, Homo Sapiens
tccgccccccacccaccagtcccgctgcattctcggccgggctctaggcgccatggctccccgcgggaggaagcgtaaggctgaggccgcggtggtcgccgtagccgagaagcgagagaagctggcgaacggcggggagggaatggaggaggcgaccgttgttatcgagcattgcactagctgacgcgtctatgggcgcaacgccgcggccctgagccaggcgctgcgcctggaggccccagagcttccagtaaaggtgaacccgacgaagccccggaggggcagcttcgaggtgacgctgctgcgcccggacggcagcagtgcggagctctggactgggattaagaaggggcccccacgcaaactcaaattccctgagcctcaagaggtggtggaagagttgaagaagtacctgtcgtagggagatttgggtagaagccctcatgctgagctttgtgtccctggtgatgttggaacattaatgatggaacatggccaaacttcagtcatgatcctgaagccatggtttcttccctgccagaaatgaaggttcagttatgaggcaaccctctagtaaggcattgtaaaagttactggatttggtttaataaaagttgaaataaagtatttgagtaatagagtaaaacttaatcttaagggatggacaaagccagccttgtggagttggtagtccttgtgtttttcatagcccaagatagccatgtgacctggaacttttaaaaaaaaatttttttttaagagccagagtctcactttgtcacccatgctggagtatagtggtgctatctcggctcactgcaaccattgtctcccaggttcaagcgatactcctgcctcagtctcctgagtagctgggatcacaggtgcacaccaccacgcctggctaatttttttatttttatttttagtaaaggcggggtttcaccatgttggccaggctggtctcaaactcctgacctcaagtgatatgcctgccttg

SEQ ID NO: 293132 - DNA, 1000 bp, Homo Sapiens
tttagcctggggggtgtgatttgtgtgcgtgcttgcatgtgctgcaggtgtaagagagtgggagcagggacaacgtccttccacttcagggttctaacctttctaacccactaagtaacctctacaggcatttaactgccttacagacagaatatacatatgttaattctagtcctggatgactcggtctgagaagattcaatttaaaatcagactctttagttgatttaaactcttagagaataagaataataatggctaacttttattatcttctatattaaggcagtatgccaagggtctttatgtatattatgtacagcgtttacaaccttgtgagcaaggtggtgttactcccattaggtagatgagaaaacaggctcacagagatttggttaagctcacacagctaacaagtagcacactgagtttgaacacagatcattctccttgtaaaagcctatgtgcctttcactttagaggcttgatcatgaatcactgcacctctttgtcacagggtgttggaagatgcatccatgtaatctattcccatcgctggaaaacagctgctgttagatgtcctcagaagtcagttgcaaattttagcgttaaagtcaggatttattgttcatacttggcggtgaggagggcagctggagatcttaagattccattttggaaaatgattaggcccgccaaacttctgaactttggaagctggggatgtttagtaatacagcctggttttcaagtactcactaaaagttctcaaatattgggttgggcacggcttataccaggttacctcacttttaattagtgatgcaggcagtgtaacccaagcatttgtggacaatgagtggaatactaaagttaaaaagtcaaactttcacctcagattttctggacttagtcatgaggagagggtgaggcccactctgttcctactggagataccagagactctgaaactatagaataaagcctctgtgctgcacaa

SEQ ID NO: 293133 - DNA, 1000 bp, Homo Sapiens
gcctggctgcaggcatcagttgttcaatgtggtagatgaaaatcatggcatgaattccagctatgccttgacttggcagaaggttatctctagcttatcctcagttcttagtaactttacccactagtgaagagatactgtctattttcaatgtggactcggaaaaaaagacttataagtaggaagatagaacaatgatgccagttgtcaggctcctcccaggttatgttttcatagtgtttctttcatcatcttcattgaactcttgggaatctccagataatcagattatttcatttggtaaattttaaaaaatatgcaatcaggcacagtgcctcatgcctataatcccagcactttgggaggccaaggtgggtggatcacttgagttcaggagttcgagatcagcctaggcaacatggtgaaatcctgtctttaccaaaagtttaaaaattagcttggtgtggtgccctctgcctatagccccagctacttgggaggctgaggtgggaggatcgcttgagcccaggcggttgaggctgcagtgagccatgatcattccactgcatttcagcctgggggatacagtgagaccttgtctttaaaaaaaaaatgctgcaaaaccaaaaataaatagccataatttgccatctttggagagattatggagataatctccttgtctattagccactagcatggctaattgatcattgattggacctcattacataagggggctgtggacgtctttggaatttgttaggggaaggctatgtggtaagctctactaaatgtatctgtacaaggatgaagaaaaacaaaataactactacttttggaggaaacttggaacaagaagagtacatagtttgatccattcctacggtcgagtctaatcaattccatttcttagtgtatgcatctaatgaggcttacaacttgctaaccccaaaagaagcaataaatgttaagcaattttagtaaccagtaaaaaaaa

SEQ ID NO: 293134 - DNA, 1000 bp, Homo Sapiens; identical to SEQ ID NO: 224328

SEQ ID NO: 293135 - DNA, 1000 bp, Homo Sapiens; identical to SEQ ID NO: 290364

SEQ ID NO: 293136 - DNA, 1000 bp, Homo Sapiens; identical to SEQ ID NO: 292308

SEQ ID NO: 293137 - DNA, 1000 bp, Homo Sapiens
tttgttcccatccagccgatgaaggagcaaacgtctggctatgtgaagcctaatttacctgcaggaactggcagggatagtcactggctggactcctgtttacttctagacctggtcaggctccatcccctcccccacctgcccctgattcccctcgtcggtgcctgtcaactgcttttcagcagtggactgcaggggaaagagcagtgatttggggtgagtaggcttcaattcccagctctgaccagacttgctgtgtgaccttgggcaagttcctttccctctttggagcttggtttccctgccagaggaaactgagctggaggagcctgaggtcctgcctttcattggctgacacacctcctgtccactgtgtcactctccaagtgccagagaagtggaggcagatcgctaccccaggctgagatggcccccactgtgaaggccacgcctgtgggtgggcagccacctggtgccaccacagggcaccagggatgatcctgatgtggcaggcaggggagactcacagaaaaatctgcccagagcctaccctcaccagacaaactctgtgctcctccaaaacatcctttagatgcaaaataataataataataataataaataaataaataaaaatccaaacccaagtcaaaaccttggctccagcatgaaaacacgtttacaggaaagtgttctcctgggtttgtgcccaccatggtgcgaatcctgacccaaggcctcctgtctcccttcaaagggagacccttttgggggatgagtttgccagactccccgtgctggtttctttgttactatttgtttggggttttgttttagttctttttttttttcttttcttttttaaaaatatgtggctgtgaacttgaatgaacactgctcaaactttctgctattggggggggcgggtgggatgggaagaaggggcgtttgttttattcttggtgttttcagtgcaataaatagctacaaacttctgtgc

SEQ ID NO: 293138 - DNA, 1000 bp, Homo Sapiens
accgtaccatgtcctaagctgaggcaggcggcaggcgtggtgcacaggaagtctgagtgtgaggggctcttttctctccactgccaatgacagcctttcctgcctcagggaagaagagagagacagactacagtgatggagacccactagatgtgcacaagaggctgccatccagtgctggagaggaccgagccgtgatgctggggtttgccatgatgggcttctcagtcctaatgttcttcttgctcggaacaaccattctaaagccttttatgctcagcattcagagagaagaatcgacctgcactgccatccacacagatatcatggacgactggctggactgtgccttcacctgtggtgtgcactgccacggtcaggggaagtacccgtgtcttcaggtgtttgtgaacctcagccatccaggtcagaaagctctcctacattataatgaagaggctgtccagataaatcccaagtgcttttacacacctaagtgccaccaagatagaaatgatttgctcaacagtgctctggacataaaagaattcttcgatcacaaaaatggaacccccttttcatgcttctacagtccagccagccaatctgaagatgtcattcttataaaaaagtatgaccaaatggctatcttccactgtttattttggccttcactgactctgctaggtggtgccctgattgttggcatggtgagattaacacaacacctgtccttactgtgtgaaaaatatagcactgtagtcagagatgaggtaggtggaaaagtaccttatatagaacagcatcagttcaaactgtgcattatgaggaggagcaaaggaagagcagagaaatcttaagacggtggccaaattaaagtgctggccttcagatgtctgtgatttctgcaactgaggacctaattatgcctgtctgcaaactaataatgtaaaaggtaataattaaagtatcatattttcatgtgggaaaaaatttaaaa

SEQ ID NO: 293139 - DNA, 1000 bp, Homo Sapiens
gagattatccctccagtccccatggattggaaatgttcccccttctttatgagctcactgcagtatctccttctccctttccccaaaggacagcctttcctgcctcagggaagaagagagagacagactacagtgatggagacccactagatgtgcacaagaggctgccatccagtgctggagaggaccgagccgtgatgctggggtttgccatgatgggcttctcagtcctaatgttcttcttgctcggaacaaccattctaaagccttttatgctcagcattcagagagaagaatcgacctgcactgccatccacacagatatcatggacgactggctggactgtgccttcacctgtggtgtgcactgccacggtcaggggaagtacccgtgtcttcaggtgtttgtgaacctcagccatccaggtcagaaagctctcctacattataatgaagaggctgtccagataaatcccaagtgcttttacacacctaagtgccaccaagatagaaatgatttgctcaacagtgctctggacataaaagaattcttcgatcacaaaaatggaacccccttttcatgcttctacagtccagccagccaatctgaagatgtcattcttataaaaaagtatgaccaaatggctatcttccactgtttattttggccttcactgactctgctaggtggtgccctgattgttggcatggtgagattaacacaacacctgtccttactgtgtgaaaaatatagcactgtagtcagagatgaggtaggtggaaaagtaccttatatagaacagcatcagttcaaactgtgcattatgaggaggagcaaaggaagagcagagaaatcttaagacggtggccaaattaaagtgctggccttcagatgtctgtgatttctgcaactgaggacctaattatgcctgtctgcaaactaataatgtaaaaggtaataattaaagtatcatattttcatgtgggaaaaaatttaaaa

SEQ ID NO: 293140 - DNA, 1000 bp, Homo Sapiens; identical to SEQ ID NO: 224330

SEQ ID NO: 293141 - DNA, 1000 bp, Homo Sapiens; identical to SEQ ID NO: 118776

SEQ ID NO: 293142 - DNA, 1000 bp, Homo Sapiens
atcatgcctgccaactgaggcatatttcctagatcattttgcctctacgatgttttttcttggtccacctttaggaaggtattgagaagcaagaaactggaggcccaatatctaacctgcaaatcgtttttgagtttggcaataaaggctaatctaccataaaactcttgaagcttaagctttaggtcaacacttgcaagagccccttccaaagctcagcacagtttcctcctgggatgaggagaggaatcagaaaccccactttggcatagagacaagcagcactgttccagtccagggatgctgtgtgtgccctggtggtggtcttaaggacctaccacatcaacatctggacaaccctcactgattacctgcccttggttgcactcatcaggctaattgatcccatatttaacctcaaggagaaatatcaaccagacactgcatggcaacctccttggggccagccttcaaggcttcatggccatatcatgaacccaggacaggcacagtgggggtggtgaggacctgatagagttggatcagtgactaagaggctgcaataaggtgccatgaaatcaaaatcaaagggctagaactctccaaggtcttgcccccggcatgtagcaccacctgagccagaaactgcagaggacatgacagtgtggcattactgataagttatggaaatggaaataatctttcctaaactaccaataataactttaaatttttgatcaaccatgctagagcaaagattgaattatccttctgttctctctacagaaatgatataaaaactatagtcataagaagagacaatcaaaaataatcagccataaaatattaaaaaggtattataaaggtatttaaaataataataataaagtgttattttcctgggattcatgatatttgatatattcgtaagcttttgttaagtttgtaatttgttgcaatttctttttcatttcaaataaatattcacttacgtgtctaa

SEQ ID NO: 293143 - DNA, 632 bp, Homo Sapiens
agagcccaagaacactggtggccaaaggatggtgtcttgtgaaaggagggcaagcaaaagtgtaggacaaattttgctttgggattttggttacacctgcagactatcccacagaaggaggaacagcactgaaatcctttctcgcaatcttcctgcattgtacacaggcagctctgcagggaagtctgtgactgcctggccagacttagggctcacgctctggtcagagttatggcaccccagactctgctgcttgtcctggttctctgtgtgctgctgctgcaggcccagggaggataccgtgacaagatgaggatgcagagaatcaaggtctgtgagaagcgacccagcatagatctatgcatccaccactgttcatatttccaaaagtgtgaaacaaataagatatgctgttcagccttctgtgggaacatttgtatgagcatcctatgagtgggagagtgggctgggatgtgcatcctgctccctgaacccttccatccgagactgtgcccacatccgaagcacaaggacatcaaatcatcagcacaagaacatcaacaggaatgccaccctccccagtgtctgaactccctgtccctgtcaaataaaccagaacaaatgcccatgga

SEQ ID NO: 293144 - DNA, 1000 bp, Homo Sapiens; identical to SEQ ID NO: 224331

SEQ ID NO: 293145 - DNA, 1000 bp, Homo Sapiens; identical to SEQ ID NO: 118777

SEQ ID NO: 293146 - DNA, 1000 bp, Homo Sapiens
gaggtggatgtattgcttatgaaaacattttataattttaaatggatcaaagattaacaatatatattgacatggaaacatgtcaatcatattttaaagcaaaaaggagattaaatatatgcatgtatatcatacatatgtgtagctatatcattgatccattattaaaatgtgaatatacctatacacatgtgtgtaatggagaggtaaatagatgaagatacatagctataaatatatttgcataagcatagaagtaatctagagataaagcatcagtctttaaagaatagttacctgtaaagtagaattagacagaaggaggatagatttttacttctgactttaataccccaagtgactaaaaattgtatagtattttatatttttcttaatttttcaaataaaagatgactggtttttaaacataaaaactagaaaatagcatatatttatgaagtaaaggtacttagcatgctagtgtttagaataacagatttgtttataacaaatatttttaactagttttaaaaaatatattctggattttaaaaactgctatttaaaggcacattattaagaatggaaaaatattttttgaaccttaatctagagtcctataaccttcaaagatatttcaatattatatccaaatatactaaataaaaaatatgactttaggcccggcgcagtggctcatgcctgtaatcccagcactttgggaggccgaggcgggcagatgacctaaggtcgggagttcgagactaaactgaccaacatggagaaaccccgtctctactaaaatataagattagccgggcatggtggcacgtgcctgtaatctcagctactcaggaggatgaggcaggagaatcacttgaacctgtaaggcggaggttgcagtgagccgagttcatgcaattgcactccagcctgggcaacaagaacaaaactccgtctcaaaaaaaaaaaaaaaaagaaaaagaaaaagaaaagaaaa

SEQ ID NO: 293147 - DNA, 1000 bp, Homo Sapiens
aagtaaatgatgtctgagtgttacagtaaaggtgaccaagtctctttcttaaagtcacaatgactaaagtattagttgaatttttttttttttttttttttgatggagtctcgctctgtcaccaggctggagtgcagtagcacaatcacggctcactgcaatctctgcctcccggtttcaagtgattctgctgtctcagcctcccaagtagctgggactacaggcatgcgccaccacgcccagctaatttttgtatttttagtagagacggggtttcaccatgttggtcaggatggtctccatctcttgacattgtgatccacctgcctcggcctcccaaagtgctgggattacaggcatgagccactgcacccagccttgaatttttaattttatctctgatatacttcattaagtgtctggagacctaattatcctaaaagatcatacattttctacctatgaattttgctgcatacagaaagtgccctttcctcaggaagttgctgtgtttcatttctttggatggactcttatctagaatacatagcagctctgcaaagaaacagtttttaaaaatgggaacttctacattgaaaagtccccatttttgtgccaactatgattagtgagaggaagaaatcttattctatggcatatgtatggaagggtgtaaagattcttttgaaaggtttattcacattgtagaacagcaaatgacatttttacagtatttttttgtaaagcaaactattttgtgccttgaatttggtatatgtgtattagtgaaacattgtaaaggtgaacttctacctctgtatctaaatgtataccatccacttgtaaatgactataaactattatgtgattgcttttttttttagaatgtcttgtttaaatagtggccaatgtttaaggctgttaaaataagccaacttttactaattggggagttttataaatgactgattaaatttaaagaattaaaaaaaaaaaaaaa

SEQ ID NO: 293148 - DNA, 1000 bp, Homo Sapiens; identical to SEQ ID NO: 118778

SEQ ID NO: 293149 - DNA, 1000 bp, Homo Sapiens; identical to SEQ ID NO: 220569

SEQ ID NO: 293150 - DNA, 1000 bp, Homo Sapiens
gataagacatgaaaattatattattaaaatgttcaattgtaatggtaatcatgagtatacttaattttatttatgtatagaatatttgtatttattttttggacatatatttatcactttgtcattttttttaaccaatttgagaaatgttagctgctgaattaattttttgcccgagccttcatattttcttctttgctgccttctccctgtggcaatgtactgttctcacattaagccttttaaaaatgttccatactgtattagcatccttagaagggacagaactaagaaatacattgctcaaataatattttactttattgataatgacaaaaagaatattttttaaaccccatcaaaatagatttcaattgactgtttcccctacatcttttgagccacagtcgcccatcgaataagcaaatttgtttttgagaataaactggtaaccagtttgtgatgactctcagaagccttttggctgggttacagaagagtttctaagttcctagagagccatttaataattagttggtgagccagaggcttgacagagctgttacttatgtgtgagggctttattctcaggcagtagtttattcatcatttggtaagcccctccccacactcctctaatttaaacaagtagtgaaggcttatcttaaactgtgtagtaccttagacttggcatttatttttgatagagcagagataaaatattttgatggaaggaaatcaattttctgtaactgatgatgtgaaaattttattttctgggaaattatatagccattcaaaaattcaaagtatgttattatgattggttacaagagaataatgttacatgtttaattgtaatatttgtctcctatcattttcttccctttcagtcataataaatgatttacaaaacccaaaaaaaaaaaaaaaaaaaaaaaaaaaaaaaaaaaaaaaaaaaaaaaaaaaaaaaaaaaaaaaaaaaaaaaaaaaaaaaaaa

SEQ ID NO: 293151 - DNA, 1000 bp, Homo Sapiens; identical to SEQ ID NO: 224333

SEQ ID NO: 293152 - DNA, 1000 bp, Homo Sapiens; identical to SEQ ID NO: 224334

SEQ ID NO: 293153 - DNA, 1000 bp, Homo Sapiens
agatcaaggctggtgcctatgacttcccgtcccctgagtgggacaccgtcactcctgaagccaaaaacctcatcaaccagatgctgaccatcaaccctgccaagcgcatcacagcccatgaggccctgaagcacccgtgggtctgccaacgctccacggtagcatccatgatgcacagacaggagactgtggagtgtctgaaaaagttcaatgccaggagaaagctcaagggagccatcctcaccaccatgctggccacacggaatttctcagcagccaagagtttactcaacaagaaagcagatggagtcaaggagtcttctgacagtgccaataccaccatagaggatgaagacgctaaagcccggaagcaggagatcattaagaccacggagcagctcatcgaggccgtcaacaacggtgactttgaggcctacgcgaaaatctgtgacccagggctgacctcgtttgagcctgaagcactgggcaacctggttgaagggatggacttccacagattctacttcgagaacctgctggccaagaacagcaagccgatccacacgaccatcctgaacccacacgtgcacgtcattggagaggatgccgcctgcatcgcttacatccggctcacgcagtacattgacgggcagggccggccccgcaccagccagtctgaggagacccgcgtgtggcaccgccgcgacggcaagtggcagaacgtgcacttccactgctcgggcgcgcctgtggccccgctgcagtgaagagctgcgccctggtttcgccggacagagttggtgtttggagcccgactgccctcgggcacacggcctgcctgtcgcatgtttgtgtctgcctcgttccctcccctggtgcctgtgtctgcagaaaaacaagaccagatgtgatttgttaaaaaaaaacaaaaaaaaaaaaaaaaaaaacaagatgacgacgacaaccacaaaaaaaattgacatcagatgaaatgaaaaaa

SEQ ID NO: 293154 - DNA, 1000 bp, Homo Sapiens; identical to SEQ ID NO: 118779

SEQ ID NO: 293155 - DNA, 1000 bp, Homo Sapiens
tgatgttgctgctcatcttcttctacatttttgctgtgactggtgtctacgtcttctcagagtacacccgttcacctcgtcaggacctggagtaccatgtgttcttctcggacctcccgaattccctggtaacagtgttcattctcttcaccttggatcattggtatgcactgcttcaggacgtctggaaggtgcctgaagtcagtcgcatcttcagcagcatctatttcatcctttggttgttgcttggctccattatctttcgaagtatcatagtagccatgatggttactaactttcagaatatcaggaaagagctgaatgaggagatggcgcgtcgggaggttcagctcaaagctgacatgttcaagcggcagatcatccagaggagaaaaaacatgtcacatgaagcactgacgtcaagccatagcaaaatagaggacagttcaagaggagctagtcaacaaagggaaagtttggacttatcagaagtgtctgaagtagagtctaattatggtgccactgaagaggatttaataacatctgcatcaaaaacagaagagaccttgtcaaaaaagagagagtaccagtcttcctcctgtgtctcctccacatcctcttcctattcttcctcttctgaatccagattttctgaatctattggtcgtttggactgggagactcttgtgcacgaaaatctgcccgggctaatggaaatggatcaggatgaccgtgtttggcccagagactcactcttccgatattttgagttgctagaaaagcttcagtataacctagaggaacgtaagaagttacaagagtttgcagtgcaggcactgatgaacttggaagacaagtaaagcaatggatggcttcaatatccttgggcccagcaaaagataatgaagggaattgttggaaatagagaattgaaaatataaacattcagatagaacaatgtctgttcattaaaattaaaaagtataaaaaaaaaaaaaaa

SEQ ID NO: 293156 - DNA, 1000 bp, Homo Sapiens
ttattttcatcctggagatccttcttaagtggctatccaacttttctgttttctggaagagtgcctggaatgtctttgactttgttgttaccatgttggtaaggatagagatcctgagggttcgtttagtgggatgaagaatgtgcctaggtgaatcgaaagaacaagttaacatgataataggaagaaacaaaaatttacttaacttctttcttttgattttttttccctaaaactaaacatcaatcattgcaggagttgttggtattaggagcaaagtagactaactacaacatcaatgccaacaagagcatctgccggttactgagcacttactaagtgccaagcattattttaagtgttttccttacattatctcatttatgctccacaacaacccaattaaataaccatgaattttatccccctttttatatctgaacaagtttaagtatagtgtttaagcaacttaatatagaaaggctgaatagtaagcacttctcagagaatgctattcaagggataacgcccagggaacaatgaagaggataagatgaagaagctgcaattctgcctgggtgccttggggtgtattttacttataacctgtgtgttttccacagtccctgcttcccgaggttgtggtattggtaggggtaacaggccaatcggtgtggcttcagcttctgaggatctgccgggtgctgaggtctctcaaactccttgcacaattccgtcaaattcaaattattattttggtcctggtcagggccctcaaggtgatttgactgttgcaagctaaagcagggggcaaggtagataaatgtgagggcttaacatagaatatgaaacaaattggccgggtgcggtggctcacgcctgtaatcccagcactttgggaagccgagggggatgggtcatgaggtcaggagttcgagaccagcctgaccaacatggtgaaaccctgtctctactaaaaataccaaaaaaaaaaaaaaaa

SEQ ID NO: 293157 - DNA, 1000 bp, Homo Sapiens
ctaattcctgccctggccaaagtcctgctatatggcctggggtctgtgtttcctattgagaacatctacagtgcaaccaagacagggaaggagagctgcttcgagaggataatgcagagattcggcagaaaagctgtctacgtggtgatcggtgatggtgtggaagaggagcaaggagcgaaaaagcacaacatgcctttctggcggatatcctgccacgcagacctggaggcactgaggcacgccctggagctggagtatttatagcaggatcagcagcatctccacctgccatctcaccctcagaccccctcgccttccccacctccccaccgagaactccagagacccagatgttggacaccaggaaggggccccacagccgagacgacgtgtccagtgaccatctcagaagccgtccatcagtccaaatgggggttctgagaaggaaagtacccaacattggcttcggagtatttgactttggggaaaagggctggctcggagtctagactcttctgtaagactcacagaacaaaagcaaggaattgctgatttggggggtgcctggtgatgaggaggggatgggtttgtcttgtcttctttttaatttatggactagtctcattactccggaattatgctcttgtacctgtgtggctgggtttcttagtcgttggtttggtttggttttttgaactggtatgtggggtggttcacagttctaatgtaagcactctattctccaagttgtgctttgtggggacaatcattctttgaacattagagaggaaggcagttcaagctgttgaaaagactattgcttatttttgtttttaaagacctacttgacgtcatgtggacagtgcacgtgccttacgctacatcttgttttctaggaagagggggatgctgggaaggaatgggtgctttgtgatggataaaaggcattaaataaaaccacgtttacattttgaaaaaaaaaaaaaaaaaaaaaaaa

SEQ ID NO: 293158 - DNA, 1000 bp, Homo Sapiens; identical to SEQ ID NO: 293157

SEQ ID NO: 293159 - DNA, 1000 bp, Homo Sapiens; identical to SEQ ID NO: 118780

SEQ ID NO: 293160 - DNA, 595 bp, Homo Sapiens
agacatgaccggggactgcatgccagtgctggtgctgatggccgcagtgctgaccgtgactggagcagttcctgtcgccaggctccgcggggctctcccggatgcaaggggctgccacatagcccagttcaagtccctgtctccacaggagctgcaggcctttaagagggccaaagatgccttagaagagtcgcttctgctgaaggactgcaagtgccgctcccgcctcttccccaggacctgggacctgaggcagctgcaggtgagggagcgccccgtggctttggaggctgagctggccctgacgctgaaggttctggaggccaccgctgacactgacccagccctgggggatgtcttggaccagccccttcacaccctgcaccatatcctctcccagctccgggcctgtatccagcctcagcccacggcagggcccaggacccggggccgcctccaccattggctgcaccggctccaggaggccccaaaaaaggagtcccctggctgcctcgaggcctctgtcaccttcaacctcttccgcctcctcacgcgagacctgaattgtgttgccagcggggacctgtgtgtctga

SEQ ID NO: 293161 - DNA, 1000 bp, Homo Sapiens
aaatgttcattgtttaattagcactgggattttataatataatgtttggtatttttgaggcattgttaacatgaaagtcaaccactggctttgtgaaaaatgctatgtcactattcagaatatgctgggtaaattgacttgcctagtgaaaagcaaaatgttaaagaaagaacttctggttctataatcatattatatgcactaaactatatgcatgaaagttctttgcatggattaatggggcttacccttgttgcactcgaaatctgaggtgtatctagccctgccactattggctacttaccctcattaatatcccacttgagaaaaattgtgagactatactgtgtcaatatctgtaaaaagagagaaaacatgttttgtttttttttgaagggggtggtgtgggagtggccctttaactctatttggctatctgaggatgtacaaaattctcatttaattttctggtcagcaagttccccacacagaaatcactctgaggtttacagaagaactgtaatattattttaaaatgcgatttttctgtcattagttctagatatgtacttcatggttaaattctaaatctgaaaatgctagtgggagatatcaagaaattttctttttgattactagtacctgtattctaacagagagtttgaattttttgcccgtgttatcagaatgatggaaattgatcattttcagttgttcattgtgtattcaatccagcgaactgctgtatgtatagaggagctgaggtgctgtctaatgggaaatgtgatttgattgatttatttgcttagagtaataaaagcattttgtgcattcaatcttacaatagattttatctgatctttcactgtaaggcttatgtgtattttccatatatgtaaaacatacacatgtaaaatatatgtggccataaattaggcaataatcatctaaataaaaattatattggcagctaagctgcactgaatactcaaaaaaaaaa

SEQ ID NO: 293162 - DNA, 1000 bp, Homo Sapiens
tgaacggaggcagtggggatgctgtccccagtggaaatgaagtttcggaaaacatggaggaggaggctgagaatcaggctgaaagccgggcagcagtggaggggacagtggaggctggagctacagttgaaagcactgcatgttaagagggggcacagccctcctcccaagggaaagtgtttttgtatataatgtattttttcacttttggaggattctttttgtataacttcaataaagattgtaagcaaaggttgaggctttgatggtttttttcttaattattggctgaatctgccttggagcactgctggttttatatattagccaaaggttttgttctggccttctgtactgatctgtgttcctgatcctaattcctatctgtctaacgtggaggtgatcaagtgtggctgtaggcctttgttttccaatggtgctatattctgttttcaaacacttcactgaacccagctgtcttgcaaactttcagtggtgctgtccctggatgggggctacaaaaacaagaattggtgaagatcttgctcttcagtgctgaaaatggatgatggactttggctgtgagccaggcctaggatggttcttgtcctatatccacctagtcttcacctggggctataattctgtcctggaaaaagaactctgaaaacctgggtcaggggaatgattcctaaggaaaacggtctgcatttgagctctggtttgaaagtagccaaggggactgatggtggacactccagatgtggttggaagcatatgtggggaggctggctggttgagttttgttattttctgtatagaaaggttgagatatatcaacacttggaattgttacccatctgcagaattgacttctcaaataaagatgctaaaaatctcaaaaaaaaaaaaaaaaaaaaaaaaaaaaaaaaaaaaaaaaaaaaaaaaaaaaaaaaaaaaaaaaaaaaaaaaaaaaaaaaaaaaaaaaaaaaaaaaaaaa

SEQ ID NO: 293163 - DNA, 1000 bp, Homo Sapiens
ccagcctcagacagacacagcaggaaggggcctgagaggctgacagaggcaggatgggtgcaaggcaggggtggaggggagggaccagcccgggctgcaccagtgggagtggctccacccttcccacctcagagccatggggagccagggctctggcggggtgcccttggtgcaggctccctacacagtcctgctgctgccgctggggacaagccgccaagacccaggggcccagagcttcttcctttggctacgcaggatgcaggctctggagagagaacaggatgccctgtggcagggtctggagctgctacagcatggccaggcctggtttgaagaccatctgagggaggcacagcgacagcagctgcatctaggggcccttggtgagaattttctaacagatttacactcagagcctggtcgccccccgttagcccagattcaaaaggtgaacatctgtttgcagaatctgattcatgagaagttctccccaagtccactgaacaaggctagttcctgcaccacccaggattcaaaggaaagacgaagggagcagaacttgtggcagcaacaggagttgtcaaggcagcagaaaggagtcacccagccaaaggaggagatggctcagcggggctgcaccaaggggccaagaggccctacccgtgtctaaaccctcctctcactcccctaagcctggtgaaagagtcagaagccccaggctcctttttctgtttcttaactcaacagctaaaaaatggctccaggtagtgagtcaatgaagttcagacatgttggtgtaaagtttctcctctgctcctgaaaacttcatcttcttggtgtctcatgtcctcattctcccctatatgacatgcaaaaacgatctttctttgaaatccctctgggaagaagacatgtttattgaaactgtccttcagccttaaatacaaaaataaaactgaaactgctccagaaagcagctttctccaaaaaaaaaaaa

SEQ ID NO: 293164 - DNA, 1000 bp, Homo Sapiens
acgttcttcttgaataactaatacagtgggtcaaatattataaaataggcaaacaccaaaatggtattaaatattgaactcctgaccttttcgacacttacctagtaaagtattcttaggcatcatcataacttttcctcacctttattcgaatagaggaataaatgtcttcagttgtctctccattacccctaagttattagtttgtctagtttatatataaagaccatgttttaaagtacataaagtggaggtttatttatcatacaggctttgaaacattaagaagcagtatttttattaactttttgagacatattaaaatacattttgccttagaagactgcttctaaagtaatttttgtaagtaatgagatgggatggtaatctagtaatttgactttatagaaatccctcagtttggcccccaccattctacagagttgtactcaagacagatactgaaaaaatctaataccttcccttgtattttcagcattaccatctatacagaaatggaacactgtatctttatattcctaaaaatggtacttttggcataattaagaaatttttcttcatattatcacaatcatgcccttccattgaattattaattacaattaattactaaaaagcttggtatgtaaaattattctccacaatattaccatgcaagttatctctgaaatttaaaatgttaaagaaaaacatttctatattgaaatatatataatttataatgaaaattatagtagtttgtagtatttcattgaattttagagagatatttcatatatatgtactgtattttggatgtgtaaagcttctatgtattgaaatatttttttacgttttatttattgtacaaagtgtatataattactgttttcttttttgtcagtgtaaagcagtcattagaattgattatacaaaaaaaaaaaaaaaaaaaaaaaaaaaaccaaaaaaaaaaaaaaaaaaaaaaaaaaaaaaaaaaaaa

SEQ ID NO: 293165 - DNA, 1000 bp, Homo Sapiens
tttggccagtgcccattcatggacgagcggatcatgtgtttacacagtaagatcaagagtcaggccctggaatttccagaccagcccgacatagctgaggacttgaaggacctgatcacccgtatgctggacaagaaccccgagtcgaggatcgtggtgccggaaatcaagctgcacccctgggtcacgaggcatggggcggagccgttgccgtcggaggatgagaactgcacgctggtcgaagtgactgaagaggaggtcgagaactcagtcaaacacattcccagcttggcaaccgtgatcctggtgaagaccatgatacgtaaacgctcctttgggaacccattcgagggcagccggcgggaggaacgctcactgtcagcgcctggaaacttgctcaccaaaaaaccaaccagggaatgtgagtccctgtctgagctcaagacctagaaaataagtccccttcctgcctgttgcaaagtaacgtaagagttccctcacccgagtggatgcagaccttcttgctgtcagccacccttccttcatacacatagccagcccaggtgaccagaacctcccaggacagatgaggctttgtgtccttatgagactgggagaacctgctgggcacccctgctgcaggtgctgtggtgggtggggaccccactgcccttcccactgagcacatcgtggctacctgacttggtgggagctccaggcagtcacttctgtttcttaaacatagctttactgaggtacaattcacataccatgtaattcacccacgggaagtgtatgattcagtggtttctaatacagacttctgcagccattaccaccgtcaactttacgacattttcatcagcccaagaagacaccctacactccttagctgtccccatccaactcccccaccccagtaaccactcagaataggtatggatttgcctattctggacgtttcgtataaatggcgtcatacactaaaaaaaaaaaaaaa

SEQ ID NO: 293166 - DNA, 1000 bp, Homo Sapiens; identical to SEQ ID NO: 118781

SEQ ID NO: 293167 - DNA, 1000 bp, Homo Sapiens
gtctgatgatttcttgaaaagggtgttagctaaaggatcttaggcatgactgtagaatttgtagttgcaatagaacagagaaagaggaagctttctgtctccttaacactgagctgtcatgttttaaagcttgctcacatcttggcacatttaagagacagtcaccccaggactcaaaaatagggaagtaacagtaacgcaggggaaacgttttctgtttggaggagcaaaggctgagaacactgtgaaaacattttgcgcgcacaatagtaacctgggtaaatgcagcgtgaagggattttagtcacacgtggtctttcttacaaggaaggtggtgggggtgcagatgaggttgctagagaatgttagaggatccctctctggattggagatagggaaagaaagttgcacggctgctgaggccccttctaggtggcaaggctgtgctccctggttctgatgatgtgcctgggtggacatggcccctgtgagtttgtacagtcttgcagcaggatctagaggggggatttccagccagggctgctagacggaggcctactcttccatctttcctgatggcaggatggcctggccagggcctggaagacagagacctcctgcctccgcctcagtaagacgacaaggaaaggcaaatgcccaagggaaagaaaaggaaggctcttctccccagagttccccatgcagacatgagtgcgtgctcagttcagaatcacttctgagaactcatccctaatgctgcagatttgggctggaacagattcacactgtctggtttcaccgaggacatgaaactccaccttgcggggataaagagagaaaaacaaattcatcaaatggaagacacattgaaagtgtttttccttaatgcttatcctgtttttaaaccattatttccaagttgacaccttttttaaggaaaaataaatattttgcggcattaaagccataaaaaaaaaaaaaaaaaaaaaaaaaaaaaaaa

SEQ ID NO: 293168 - DNA, 1000 bp, Homo Sapiens; identical to SEQ ID NO: 224337

SEQ ID NO: 293169 - DNA, 1000 bp, Homo Sapiens; identical to SEQ ID NO: 118781

SEQ ID NO: 293170 - DNA, 1000 bp, Homo Sapiens
gcggcatcccctaggccaagtggaaagaggctggggttcccatttgactccagtcccaggcagccatggggatctcgggtcagttccagccttcctctccaactcttcagccctgtgttctgctggggccatgaaggcagaaggtttagcctctgagaagccctcttcttcccccacccctttccaggagaaggggctgcccctccaagccctacttgtatgtgcggagtcacactgcagtgccgaacagtattagctcccgttcccaagtgtggactccagaggggctggaggcaagctatgaacttgctcgctggcccacccctaagactggtacccatttccttttcttaccctgatctccccagaagcctcttgtggtggtggctgtgccccctatgccctgtggcatttctgcgtcttactggcaaccacacaactcagggaaaggaatgcctgggagtgggggtgcaggcgggcagcactgagggaccctgccccgcccctccccccaggcccctttcctctgcagcttctcaagtgagactgacctgtctcacccagcagccactgcccagccgcactccaggcaagggccagtgcgcctgctcctgaccactgcaatcccagcgcccaaggaaggccacttctcaactggcagaacttctgaagtttagaattggaattacttccttactagtgtcttttggcttaaattttgtcttttgaagttgaatgcttaatcccgggaaagaggaacaggagtgccagactcctggtctttccagtttagaaaaggctctgtgccaaggagggaccacaggagctgggacctgcctgcccctgtcttttccccttggttttgtgttacaagagttgttggagacagtttcagatgattatttaatttgtaaatattgtacaaattttaatagcttaaattgtatatacagccaaataaaaacttgcattaacaaaaaaaaaaaaaaaaaaaaaaaaa

SEQ ID NO: 293171 - DNA, 1000 bp, Homo Sapiens
cagctgcccccgggaagccagcctccgcagccaccgtgaagaggaagcggaagagccggtgggggcctgaagaggataaggtagagctcccacctgctgaactggtgcagagggacgtggatgcctctccctcgcctctgtcagttcaggacctcaaggggctcggctatgagaaggggaagcctgtgggtctagtgggcgtcacagagctttcagacgcccagaagaagcagctgaaggagcagcaggagatgcagcagatgtacgacatgatcatgcagcacaagcgggccatgcaggacatgcagctgctgtgggagaaggcagtccaacagcaccagcacggctatgacagtgatgaggaggtggacagcgagctgggcacctgggagcaccagctgcggcgcatggagatggataagaccagggaatgggccgagcagctgacaaagatgggccggggcaagcacttcatcggagacttcctgcctccagacgagctggaaaagtttatggagaccttcaaggccctgaaggagggccgtgagcctgactactcagagtacaaggagttcaagctgactgtggagaacatcggctaccagatgctgatgaagatgggctggaaggagggcgaggggctgggctcagagggccagggcatcaagaacccagtgaacaagggcaccaccacagtggacggcgctggcttcggcattgaccggccggcggagctctccaaggaggacgacgagtatgaggcgttccgcaagaggatgatgctggcctaccgcttccggcccaaccccctgaacaatcccagacggccttactactgagtgttctggaaatacatactttctgaatgaccaaccgtccctggactgtggaatgttccggcctgcatttctgcccaccccttccgttgtcacgagtgccgtgccgtgtaataaagtcccagtgctcatccaccaaaaaaaaaaaaaaaaaaaaaaaaaaa

SEQ ID NO: 293172 - DNA, 1000 bp, Homo Sapiens; identical to SEQ ID NO: 289808

SEQ ID NO: 293173 - DNA, 1000 bp, Homo Sapiens
tcaacaagtcggagctttttacaggcatttccttcagtgcttcctacagagaacaatggagccagaggcgtgagaatcactcctgtgttaccttactcttcccaaggtgaaactggaagcagcttctagagaacagcttcaggtgcagaccgagaaatgacgtcatcctgataattattggacgtgtttattaattgcaccccattagcccctgtttttaaaaaatataggttagcaggacgtgggcacaggccgtgaaacatttatagggcgcctgtcacgtgtgagacatagtaatcagaggccaatggtgatgtgtgaaaatgaggatgaccagctctggttttctaggagctatggtctcataatgacaataatcagcatagtgtacttgtccttaatgttatagcatggcaggaaagaccatgggcttagaaggcagacattggttaggaggtgcagggaacatactaattcatgtgcggtcaaagcacttggcatttaatagggcaaaggtaaacagatgtagagaaatgagtctcatgcctgtaatcccagcactttgggaggccaaggtgggtggatcacttgagcctaagagatcaaggctgcagtgagccatgatggtacccctgcactccagcccaggttacagagcaagggcctgtctcagcaaaacaaaacaagcacaggccaaggagtgagatagccagcgctgatggtatctgcctcgtagtgcatgaagtgcatgtcatacactaagcagccagccagtgttggctgtcagtgttattactcacatgctttattttatttaagactttgagatagttcatgaagtgggtattattatcaatttccattttataggtgaggaaactgagcccagtgaagttaaataacttcccaaggtcattgagctgttgagtggacagctcaggtctgtttgtaaatctttaataaataacaacagctaagattcaaaaaaaaaaaaaaaaaa

SEQ ID NO: 293174 - DNA, 1000 bp, Homo Sapiens
gacttgcagggctctgtggaggcccagtgtgggcttgttctcaatggccaaggtggagtgataagaagaggtggcacctgtgtggtcaaccccacagacttattttgctctgtccctggccgtttgtcccttcttagttctacttccaaatacaaggtgaccattgctgaggtaaagaggcgcctctccccacctgagtgcctcaatgcttcactcttgggaggcattttgagaagagcaaaatcaaagaatgggggccgctgcctgagagagaaattggataggcttggcttaaacttaccagcaggaagacggaaagcagctaatgtcaccctccttacttccttggttgaaggggaggctttgcacttggctcgggattttggctacacttgtgaaacagagtttccagccaaagcagtaggagaacatcttgccagacaacatatggaacagaaagaacagacagcaagaaaaaagatgatcctggcgaccaaacaaatctgtaaagaattccaagacctcttgagccaagatagatcaccactgggatcctccagacccactccaattctagaccttgacatccagagacatttaacacatttcagtttgatcactcatggctttgggactccggcaatatgtgcagctctaagcactttccaaacagttctcagtgaaatgctgaactacttggaaaaacacactactcacaagaacggcggagcggcggattctggccaaggacatgccaactcggagaaagctcccctgcggaaaacttcagaggctgccgtgaaagagggcaaaacagaaaagacagactagctacatcaaacagaatctatttccagagagtcttgctgctgatattttttctaatatatatatcattgagggtgactaatcttcagtggaccaaatctctacccttccccaaccctccataaaaaaacaaaaatggaaatgaaaaatgaaacaaaaaaggacaaaacca

SEQ ID NO: 293175 - DNA, 1000 bp, Homo Sapiens
caatcttccacccaagcttcaccataaatttgatgtttcctcttgctgcaattttcgtggaattcatgttgctctgacgggagtccttttcagtggatgtctaaaccttcttagtgcctcaaactagatctagttcagaaaggttatcagaagttagacaagtttattttagtgcaaaccagtggaaatccatgcatagtttcttcaccatgtgcattttctatgaacctttggaagaccacctgtgttgaacattgcccaagtcctgggagagaagtgggtgcggtccgcttcctgtcctcaatttgcccgcagcggcgagtgcacagagcagggaaaggcagccccagaggatcccgccctccagcatgcagcagactgctggcccagtcctggctccaaggggtgctgtgtgggcccaagcaagttgaccaacctccctgaaccttaatttaatcctaggtagcccaattccagtagccattataggactgccctgcagggacagttacttaactcaggaaaagcaacctagctccaagtttagcaaccgggagttccagttgattccattagcgcaccccctgaggcattcccaagctggagtctggtggaagatgaggctcagtgtgattggactgaagcaccaacctatcaaggagaagtcccacccagtctgccctgtgcctatataaaggcgacaagtggcggccgcagcactcattgaagccgccagttgggagaggagcagagccaggccggtgctcccgaaggcagcaagatgttgcgagccacagctccctgctggttcccccctggatacccagaagctaagaaggtggccgaggaggcggccctggaggcaagccgccatttgggaggggagcagagccaggccggtgctcccgaaggcagcaagatgttgcgagccacagctccctgctggttccgccctggatacccagaagctaagaaggtggccgaggaggcggccctcgag

SEQ ID NO: 293176 - DNA, 1000 bp, Homo Sapiens
tattgatctgactagttgtatgtctttctgttcaaaatagaaattatcctttcttactaatgccttgaaagaatgaacaaataaaaattcccagaccacagaatttccacagcaagaatacacttattttaattaacaatagcacagatatagcatagggcagtgggttttttagttaatttatggcgtactttgtttatccattggccaacctgaaggaaatgaaactcacctatctttctatcacagatgaatgtgctagatgaatgatttgggttgtatctgatcatggttcacaaaaattatgttagtgtgttttcagtatgctaaaaagtcagagtgatacaaaagtgatatttaaaaatatacacacatgtatgtacacatgcttcagaaatattgttgcttagggtgatttgggcagctaaatagtaagtactttttaaaatttttgcatcatcatcttcctatttaatgaattgtgatttaaaacaaaatgaaaataagccaggtattctaaaagatcctggatacaaattaagaattttgctttattttaaaccaaattgagattaaattgaagaaaagcaagcaaattaatttcagcttgattatcaacctgtatcaagaacaaaaatgggaggaggtgtccacatttatggtgtgtataggtaacatggggaaaatgctattctgtgttttggaaaagaagaaatagtgccgtcctatttatttctatatttagaaatttttctcaaagaaatttcaattgtatctatgagatgggtttctaagtatcttattgtgtgttataagtgccctttaatatcatactaagtgtgagcttctggacattttcaagagcttacaaaaactaagtggcattgtatttttataaccccattgagaagactaagtaagaaatgaaatgtcctatcaattttattttgtcatgcttcaaacaataaagacatttctgctttaaaaaaaaaaaaaaaaa

SEQ ID NO: 293177 - DNA, 1000 bp, Homo Sapiens
attctgttaaaagatgaaatgtatcgtgttccctgagagacgccctcaaattttggattagtccttcatgcaagctgggccaccaagccattgcttcttttggggacaacctgccctcacttttaaaaagcatcctagctcacatgcctcccctagcagttaatgccactccagtctctgcttgaatgtaataaaataaaagaaaagtaactatttgagacatgaggtgcccttattgtacactggggcttcctatacattttccgtcttcccttgaaccaccactatcctcagctactttatgcttctgttctgttaaagccctatttgctagtggaaaaatttaactcctggtgatttttttaatactaggcctcttgccttccttccagtgagagaaaaatagaatggtaagcctagtggtttcttccttcactgttgaatactatttatccaaggtatcaaggaagaacttctaatcagaaaagacatgtattattttcacaactgggtagcatatctcactcccagaatggaagttaggtgggaattgcaagattaaggagatttttctggatttctgtctatgtatcatatccacagaactctttctagaggaattttatattgagccaggcatccatttccacagtcttgcatttctagatacttccaaagttatagcactgttcctaaatcatttttggctttatttattaatttattgttcacttcatttcattaggttcagtatgaaacaggtattgtcatctctttgtgtctactttgccacctttccccagaataggcctgaatgagattgaaaacgttacttcagttccttgtgtctgacattgcttgtttgtaactaagaaaaataatatttgcttttgttgaatgactactaatttttttccatgaacctaataaactaaaaagaaagttgaaataataaagagtgaataagtataaaaaaaaaaaaaaaaaaaaaaaaaaaaaa

SEQ ID NO: 293178 - DNA, 1000 bp, Homo Sapiens
ctcccagcaatgtcaccgtacgttgcaacacgacgcactgcctcgtacggtggaaacagcccaggacctatcagaagctgtcgtacctggactttcagtaccagctggacgtccacagaaagaatacccagcctggcacggaaaacctactgattaatgtttctggtgatttggaaaatagatacaactttccaagctctgagcccagagcaaaacacagtgtgaagatcagagctgcagacgtccgcatcttgaattggagctcctggagtgaagccattgaatttggttctgacgacgggaacctcggctctgtgtacatttatgtgctcctaatcgtgggaacccttgtctgtggcatcgtcctcggcttcctctttaaaaggttccttaggatacagcggctgttcccgccagttccacagatcaaagacaaactgaatgataaccatgaggtggaagacgagatcatctgggaggaattcaccccagaggaagggaaaggctaccgcgaagaggtcttgaccgtgaaggaaattacctgagacccagagggtgtaggaatggcatggacatctccgcctccgcgacacgggggaactgttttcttgatgatgctgtgaacctttatatcattttctatgtttttatttaaaaacatgacatttggggccaggcgcggtggctcacgcctgtaatcccagcactttgggaggccaaggcaggcggatcacctgaggtcaggagttcaagaccagcctgcccaacatggtgaaaccccatctggactaaaaatgcagaaatttacccaggcacggcggcggacgcccatcatcccagctacttgggaggctgaggcaggagaattgcttgaacccgtgaggcggaggttgtagtgagccaagatcgcaccattgcacaccaacctgggtgacagagcaagattgcatctcaaaacaaacaataataataaataataaaaacctgatatttggctggg

SEQ ID NO: 293179 - DNA, 1000 bp, Homo Sapiens; identical to SEQ ID NO: 118782

SEQ ID NO: 293180 - DNA, 615 bp, Homo Sapiens
gcacttgcaagctgcccgcaatacgtcatggcgaccaaacgccttttcggggctacccggacgtgggccggctggggggcctgggagctcctaaaccccgccacttccggaagactcctggcccgggattatgccaagaaaccagttatgaagggggccaaatcgggaaaaggtgcagtgaccagcgaggccctcaaggaccccgacgtatgcacagatcctgtccagctcaccacatatgccatgggcgtcaacatctacaaggaagggcaggatgtacccctgaaaccggatgctgagtaccctgaatggctgttcgagatgaacttgggtcccccaaagaccctggaggagctggaccccgagagccgggagtactggcggcggctgcggaaacagaacatctggcgccacaaccggctgagcaagaacaagaggttgtagcatggagggcccggcatcgctgacccccacgccgagggcttgccgttttcccggaggacgtggacttttgtgagacaagaggcggctccccagcctgggtttccatgtgaccccacagtggggctggaccaggccctggaggccaataaagagctttctgggtaaaaaaaa

SEQ ID NO: 293181 - DNA, 1000 bp, Homo Sapiens; identical to SEQ ID NO: 118783

SEQ ID NO: 293182 - DNA, 1000 bp, Homo Sapiens
gcgcgagcaatagcaacaagacctggaggatggaacagaatgggagagccacggggtttctgctgaaggagaacatcaggccctttcagctctatgagatcatcgtgactcccttgtaccaggacaccatgggaccctcccagcatgtctatgcctactctcaagaaatggctccctcccatgccccagagctgcatctaaagcacattggcaagacctgggcacagctggagtgggtgcctgagccccctgagctggggaagagcccccttacccactacaccatcttctggaccaacgctcagaaccagtccttctccgccatcctgaatgcctcctcccgtggctttgtcctccatggcctggagcccgccagtctgtatcacatccacctcatggctgccagccaggctggggccaccaacagtacagtcctcaccctgatgaccttgaccccagaggggtcggagctacacatcatcctgggcctgttcggcctcctgctgttgctcacctgcctctgtggaactgcctggctctgttgcagccccaacaggaagaatcccctctggccaagtgtcccagacccagctcacagcagcctgggctcctgggtgcccacaatcatggaggaggatgccttccagctgcccggccttggcacgccacccatcaccaagctcacagtgctggaggaggatgaaaagaagccggtgccctgggagtcccataacagctcagagacctgtggcctccccactctggtccagacctatgtgctccagggggacccaagagcagtttccacccagccccaatcccagtctggcaccagcgatcaggctgggcctcccaggcgatctgcatactttaaggaccagatcatgctccatccagccccacccaatggccttttgtgcttgtttcctataacttcagtattgtaaactagtttttggtttgcagtttttgttgttgtttatagacactcttgggtgta

SEQ ID NO: 293183 - DNA, 1000 bp, Homo Sapiens
cctggaggtgtatgctgccgtcaaggggctcaggaaagcggacgcgaggctcgccatcgcaagattagtgagtgctttcaaactgcatgagcagctgaatgttcctgtgcagaaattaacagcaggaatcacgagaaagttgtgttttgtgctgagcctcctgggaaactcacctgtcttgctcctggatgaaccatctacgggcatagaccccacagggcagcagcaaatgtggcaggcaatccaggcagtcgttaaaaacacagagagaggtgtcctcctgaccacccataacctggctgaggcggaagccttgtgtgaccgtgtggccatcatggtgtctggaaggcttagatgcattggctccatccaacacctgaaaaacaaacttggcaaggattacattctagagctaaaagtgaaggaaacgtctcaagtgactttggtccacactgagattctgaagcttttcccacaggctgcagggcaggaaaggtattcctctttgttaacctataagctgcccgtggcagacgtttaccctctatcacagacctttcacaaattagaagcagtgaagcataactttaacctggaagaatacagcctttctcagtgcacactggagaaggtattcttagagctttctaaagaacaggaagtaggaaattttgatgaagaaattgatacaacaatgagatggaaactcctccctcattcagatgaaccttaaaacctcaaacctagtaattttttgttgatctcctataaactcatgttttatgtaataattaatagtatgtttaattttaaagatcatttaaaattaacatcaggtatattttgtaaatttagttaacaaatacataaattttaaaattattcttcctctcaaacataggggtgatagcaaacctgtgataaaggcaatacaaaatattagtaaagtcacccaaagagtcaggcactgggtattgtggaaataaaactatataaactt

SEQ ID NO: 293184 - DNA, 1000 bp, Homo Sapiens; identical to SEQ ID NO: 224341

SEQ ID NO: 293185 - DNA, 1000 bp, Homo Sapiens
cctttggggctggtgttcctacgtcagtccccacctggggaataaactccagcctctcctgctcatacagaagggactggttgggtttgctttatgggatctttgagaccaaaacagatgctcctgtttgctgggggagggtgtgagcacggagtatttctgtccctcgtgaagtcacgtcacacaggggagaggcgaggtcgatggaactggccacgcacaggctctggctctggaaggagggatgatgagtgggcgttttcccggcaggcccccggggtcctcagcctcagcaacccagggagaggacagaaatgaaccgatggttgagggattgtcacgggaggaacatgacacccgaagggactctaggtgcccttggagtgccacacatgcccagaccttctcacacccacacaaataggctctgccgtgcactcctacacacacacacacacacacacacgcttgttcacactcagaacccaggacagccacagccaccgcttaggggaagccactgcagatgcccctggaatgggcacagcacagccagggcgctcttccaggcaggcgaggataacttgagagtttcctagggcaccagggacagagctcagaggcccccgaggtgtgtgtaggaggcggaggcccgcagagcacagagcaggagaagggcttgggccctggaggagaaagccattctgaacaccaggggacctggacggagggtccccacagcccgtgccccacgccgcctggaggccagaggggtcagtggccctgctgtcccggctccatcttggttctagccgccacctgcatgaacacagtggcccggcttaacgcactaacccagcctctccctgtgtcccacagggagtagcaagacccaccccacactgccttcaccatctacaccagtgacgccgctgtgtgtcttagcatggaaataaataaacctgaatgtacgtgctcgcaaaaaaaaaaaaaaaaaaaa

SEQ ID NO: 293186 - DNA, 1000 bp, Homo Sapiens
acgggatcccagggatgcccggcctgcccggggcaccagggaaggatgggtacgacggactgccggggcccaagggggagccaggaatcccagccattcccgggatccgaggacccaaagggcagaagggagaacccggcttacccggccatcctgggaaaaatggccccatgggaccccctgggatgccaggggtgcccggccccatgggcatccctggagagccaggtgaggagggcagatacaagcagaaattccagtcagtgttcacggtcactcggcagacccaccagccccctgcacccaacagcctgatcagattcaacgcggtcctcaccaacccgcagggagattatgacacgagcactggcaagttcacctgcaaagtccccggcctctactactttgtctaccacgcgtcgcatacagccaacctgtgcgtgctgctgtaccgcagcggcgtcaaagtggtcaccttctgtggccacacgtccaaaaccaatcaggtcaactcgggcggtgtgctgctgaggttgcaggtgggcgaggaggtgtggctggctgtcaatgactactacgacatggtgggcatccagggctctgacagcgtcttctccggcttcctgctcttccccgactagggcgggcagatgcgctcgagccccacgggccttccacctccctcagcttcctgcatggacccaccttactggccagtctgcatccttgcctagaccattctccccaccagatggacttctcctccagggagcccaccctgacccacccccactgcaccccctccccatgggttctctccttcctctgaacttctttaggagtcactgcttgtgtggttcctgggacacttaaccaatgccttctggtactgccattcttttttttttttttttcaagtattggaaggggtggggagatatataaataaatcatgaaatcaatacataaaaaaaaaaaaaaaaaaaaaaaaaaaaaaaaa

SEQ ID NO: 293187 - DNA, 1000 bp, Homo Sapiens; identical to SEQ ID NO: 118787

SEQ ID NO: 293188 - DNA, 1000 bp, Homo Sapiens
ctcagcttcgccgaggccctccgggcccacagctgcctcagcgacagactccagtacagccgcatcgtgggtggctgggacctgctgccgcgcgcgctgctgagctcgctgtccgggcttgtgctgttgaacgcgcccgtggtggcgatgacccagggaccgcacgatgtgcacgtgcagatcgagacctctcccccggcgcggaatctgaaggtgctgaaggccgacgtggtgctgctgacggcgagcggaccggcggtgaagcgcatcaccttctcgccgccgctgccccgccacatgcaggaggcgctgcggaggctgcactacgtgccggccaccaaggtgttcctaagcttccgcaggcccttctggcgcgaggagcacattgaaggcggccactcaaacaccgatcgcccgtcgcgcatgattttctacccgccgccgcgcgagggcgcgctgctgctggcctcgtacacgtggtcggacgcggcggcagcgttcgccggcttgagccgggaagaggcgttgcgcttggcgctcgacgacgtggcggcattgcacgggcctgtcgtgcgccagctctgggacggcaccggcgtcgtcaagcgttgggcggaggaccagcacagccagggtggctttgtggtacagccgccggcgctctggcaaaccgaaaaggatgactggacggtcccttatggccgcatctactttgccggcgagcacaccgcctacccgcacggctgggtggagacggcggtcaagtcggcgctgcgcgccgccatcaagatcaacagccggaaggggcctgcatcggacacggccagccccgaggggcacgcatctgacatggaggggcaggggcatgtgcatggggtggccagcagcccctcgcatgacctggcaaaggaagaaggcagccaccctccagtccaaggccagttatctctccaaaacacgacccacacgaggacctcgcattaaagtattttcggaaaaa

SEQ ID NO: 293189 - DNA, 1000 bp, Homo Sapiens
aatgcatttgaaactcatgcaataattatcctcagtagtatttcttacagtgagacaacaggcgatgtcagtgagggcgatcatagggcataagcctaagccataccatgcagcctttgtgccagcaaccaaatcccatgtttcctactgtgttaagtttaaaaatgcatttattatagaattgtctacatttctgaggatgtcatggagaatgcttaattttctttctctgaacttcaaaatattaaatattttcttatttatttttttgattaaagtataaattaagacaccctattgacttccgggtaaggggagtcaattgattacccagcagcacagtatttgctttttataattccctttttaaatacttgttcttaattcactggttttccttttctgtcatttttcagagtttagattgtgagtccatgttttgtctgttgtgcctataaaggaaatttgaaatctgtatcattctactataaagacacatgcacacgtatgtttattgcagcactgtttacaatagcaaagacttggaaccaaccaaaatacccacaaatgatagaccggataaagaaaacgtgacacatatacaccatggaatactatgcagccatagaaaaggatgagttcatattcttcacagggacatggatgaagctggaaaccatcatcctcagcaaactaacacaggaacagaaaaccaaacaccgcatgttctcactcataagtgggaattgaacaatgagaatacatggacacagggaggggaacaccacaccctggggcctgttggggggatgggggctaggggagggatagcattaggagaaatacctgatgtagatgatgggttgatgggtgcagcaaagtaccatggcacatgtatacctgtgtaacaaacctgcacattcagcacatgtatcccagaacttaaagtataataaaaataaataaataatttcagtaagaaaaaaaaaaaaaaaaaaaa

SEQ ID NO: 293190 - DNA, 1000 bp, Homo Sapiens; identical to SEQ ID NO: 118788

SEQ ID NO: 293191 - DNA, 1000 bp, Homo Sapiens
cgaacagcaccccgcgcaccccacctggacgctgacgctcgtctacttcttctcgcttgtgcatggcctgactctggtgggcacgtccagcaacccgtgcggcgtgatgatgcagatgatgctggggggcatgtcccccgagacgggtgcggtgaggctattggctcagctggttagtgccctgtgcagcaggtactgcacaagcgccttgtggagcttgggtctgacccagtatcacgtcagcgagaggagcttcgcttgcaagaatcccatccgagtcgacttgctcaaagcggtcatcacagaggccgtctgctcctttctcttccacagcgctctgctgcacttccaggaagtccgaaccaagcttcgtatccacctgctggctgcactcatcacctttttggtctatgcaggaggaagtctaacaggagctgtatttaatccagctttggcactttcgctacatttcatgtgttttgatgaagcattccctcagttttttatagtatactggctggctccttctttaggtatattgttgatgattttgatgttcagctttttccttccatggctgcataacaaccatacaattaataaaaaggaataactgttccaaagactcagactaacatacaggacagtccagctggatgtgataaagattttatcacctcatatggaaaacaccggctgcactggattcatcagtgttaacttcctttgaggaagctgccttatagttttcatcactgggactttaaaaaaaaattactgtgaaaatgaggtattctgtacttctcagttaagacttgttctttgagtgatgtattaaatgctgctagaaaagcctcattacattaaatataaatcaatcttaaaaaaaaaaaaaaaaaaaaaaaaaaaaaaaaaaaaaaaaaaaaaaaaaaaaaaaaaaaaaaaaaaaaaaaaaaaaaaaaaaaaaaaaaaaaaaaaaaaaaaaaaaaaaaaaaaaaaa

SEQ ID NO: 293192 - DNA, 1000 bp, Homo Sapiens; identical to SEQ ID NO: 118789

SEQ ID NO: 293193 - DNA, 1000 bp, Homo Sapiens
aaggccagctcagttgcacaccgtgccccagcagcgacgggcttggtctgcctggtgcccgcaacgtgtcggaatgtggaggccagtgttctccaggcttcttctcggccgatggcttcaagccctgccaggcctgccccgtgggcacgtaccagcctgagcccgggcgcaccggctgcttcccctgtggagggggtttgctcaccaaacacgaaggcaccacctccttccaggactgcgaggctaaagtgcactgctcccccggccaccactacaacaccaccacccaccgctgcatccgctgccccgtcggcacctaccagcccgagtttggccagaaccactgcatcacctgtccgggcaacaccagcacagacttcgatggctccaccaacgtcacacactgcaaaaaccagcactgcggcggcgagcttggtgactacaccggctacatcgagtcccccaactaccctggcgactacccagccaacgctgaatgcgtctggcacatcgcacctcccccaaagcgcaggatcctcatcgtggtccctgagatcttcctgcccatcgaggatgagtgcggcgatgttctggtcatgaggaagagtgcctctcccacgtccatcaccacctatgagacctgccagacctacgagaggcccatcgccttcacctcccgctcccgcaagctctggatccagttcaaatccaatgaaggcaacagcggcaaaggcttccaagtgccctatgtcacctacgatgaggactaccagcaactcatagaggacatcgtgcgcgatgggcgcctgtacgcctcggagaaccaccaggaaattttgaaagacaagaagctgatcaaggccctcttcgacgtgctggcgcatccccagaactacttcaagtacacagcccaggaatccaaggagatgttcccacggtccttcatcaaactgctgcgctccaaagtgtctcggttcctgcggccctacaaataaccggg

SEQ ID NO: 293194 - DNA, 1000 bp, Homo Sapiens
ggtcgtcagctttggtggaaggaaaaatgcagtgatctccctacccagcatgtacgaggggcttgtgagtggcctgtgcggaaactacgacaagaaccgcaagaatgacatgatgctgcccagtggcgccctgacccagaacctcaacacctttggcaacagctgggaggtgaagaccgaggacgcactcctgcgcttccccagggctataccagcggaggaggagggacaaggggcggagctgggcctccgcacgggcctccaagtgtccgaatgtagcccggagcagctggcgagcaacagcacccaggcctgtagggtgctggcagacccccagggcccctttgctgcctgtcaccagacggtggccccagagcccttccaagagcactgcgtgctggatctgtgctctgctcaggacccaagagagcaagaggagctgcgttgccaggtcctcagtggctgggcagcagctttctgactgaggactgctctcagcggtgcacctgtgccagctcacggatcctgctgtgtgagcccttcagctgcagagcgggggaggtctgcaccctggggaaccacacccaaggctgctttccagaaagcccgtgtctgcagaacccctgtcagaatgacgggcagtgtcgggagcagggagccaccttcacctgcgagtgtgaagttggttacgggggaggcctgtgtatggagcctcgagatgcgccacctcccagaaagccagcatctaacctggtggccgtcctactgggactgctggtgcctgtggtggtcgtactactggccgtgaccagagagtgcatttacagaacgaggaggaagagagagaaaacgcaggagggagacagactggccaggctggtggacacagatactgttctggactgtgcctgttaagttgctcagttttgagctgtcttcagacaagaagattaaataaatttatatatttatttatttgaaaaaaaaaaaaaaaaaaaaa

SEQ ID NO: 293195 - DNA, 1000 bp, Homo Sapiens; identical to SEQ ID NO: 118790

SEQ ID NO: 293196 - DNA, 1000 bp, Homo Sapiens; identical to SEQ ID NO: 224342

SEQ ID NO: 293197 - DNA, 1000 bp, Homo Sapiens
gagggagagttagctagccatccaagaaaacaccatgaaagataacgatatcaagagactactgtatacccatcttttatgcatattttcaattatcctaagtgtcttcattccatcactcttcttggagaacttctcaatattggaaacacacttgacatggttgtgcatctgttctggttttgtaactgctgtcaatctagtactatatttagtagtgaaaccaaatacatcctctaaaagaagttcattatcacacaaggtaactggatttttgaaatgctgtatctactttcttatgtcttgtttctcctttcatgtaatttttgttctgtatggagcaccactgatagagttggcattggaaacatttttatttgcagttattttgtctacttttactactgtgccttgcttatgtttgttaggaccaaacctcaaagcatggctaagagtgttcagtagaaatggagttacatccatatgggagaatagtctccagatcactacaatttctagctttgtaggagcatggcttggagcacttcctattccactggattgggaaagaccatggcagatgacagtagaaagaaaacgtagcacttatagatctctccatgtaccctgcagggggcttggtactgtgaaatgagtaacttaatcctgacaaccgtagtgcaaggtatggcccatctcctgtacgcttggagcgacctttggctacgtggctggccttgttatttcaccactctggatatactggaatagaaagcaacttacatacaagaacaattaactggagcaaagggagatatttctttgtgcagattctgtaagggctgggcagaaatgtgtatggtcaaagccaagcagttccatttacagctctgttttttacgtagttacaacatgatgtgattgtagctttttaaactatgaaacccctgagagattgtaccttctagttgaaataaagtatttataatagattgtggct

SEQ ID NO: 293198 - DNA, 1000 bp, Homo Sapiens
actcctcatcagcctttcatccttagtttgagaattagctgatatgcaatttgaagttgaggaaatatcattgatatttctatcatgcacgattattttagatttctaccaccgtgtgatttttgctagtccatgtgctagaggtaaacgttctgctggaattctgcatccagctctatccccctctgatgctttttgcccagaaagctgtctgtccatcatgtattgtccatggcaacaaattacattaggttgaacctttccttgattttatgtatttaatattagaatttgttggactcaactagatatattttttaatttatattttttccattttactttgaagatttgaaatgttcatacctgagcaaagtctacacaggagtaatggactgtttaacaagtttcccaaaacagcattttcctgctccttcgtatgtaggtgagaaacttagctggaaagacatacaaatttagactctcgttgacattgtcgttttaaaaggaagttgctaaggcgatcaatctcaatattagtcttgtttacttcttcttaatgtcaaaattaacatttacaacatccaattataaaagtaatgctttatgtttatacactgctatgtacttgtcaaaatggtttccacattcttatcacatctgagccttaccaggtagagaaggtactaaatacactttagaagtaaaaatatgaagtaccgagaggctaaacccactggcctaagatctcaccaaagttcatgaaaaccaggactaggacccacggctcccaaagcccgttcttgctgtgttgtgctgcctccatatccgtcaggaagagcctttccagaatgattctgggcatatactaagaagagcaggtatggaaagatctattgtcagggaatcttagaattccctacacgagtgggagaaagatgtccaaattccttacgcagtggtattcatgatggtgccctatctaagtccaggactgttt

SEQ ID NO: 293199 - DNA, 1000 bp, Homo Sapiens; identical to SEQ ID NO: 118791

SEQ ID NO: 293200 - DNA, 1000 bp, Homo Sapiens
accccaaggtcagaggagactatatattccatggctgcctctaagactaggaataggaatatctgaaaacagcatttctaagggtggtaaccacaggtcgattttaatacgagtcctttttcttgtagaggtaagtaaaatcttcctgacaaggtagtcctcttttcacggcacagacaatgggctttctgtttatgaggggtgagaagtgatgtttgttactatgttctccagcaagtaaacattcctctgctcacctcccaacaagactaacagtctttttagaagtaaatatattcaagacaaacgagaaaatcctggctacccaagtcgagtatatacaggaatacaaatcggtaaccagcagctgttcctcaggttgtgactcactgagcgccacttgtcctggaggctggatgatggaggacatctggttataggtactgtagcagggataggtgccacaggaggataggaactacagcagatcgctgtttccagaacggggaggagtatctcattgtgaaacagactctagagtggttctatttggtcttcagtgttttagcctcattagttcatatttggcatgcagcttgtggtgagtactgttctaggactggccaaaaatgggcaaaatgtatcactccaaacactactgattcagcattgttttcatgtcttaaaattgccacctgcactttgtttctgcactattatgtagtgcattttaacttaaattttttccagcaacatgttacttatttaagatacattactgatatttcattataattagttcaccttccctgtgaaacaagagaattgtaaaatgttgtggaaaatgatacatatgtggatgctaatgaaatcatagtattttgtgtagcttctctgaagaccttagagacctgcagctttggtttataagtgtttgggccttatcagcccatctgatccagatcaatatttttttgaaaactgaaaaaaaaaaaaaaaa

SEQ ID NO: 293201 - DNA, 1000 bp, Homo Sapiens
tagactttttagccagtgatatctgaattcatggtagagttgttatttcactccagttgttcctcccttaagcacgagtctttgaccttttgaacaagagaatgccatgttcacataagcaaatcgttgcaagtgataataacgaagtgtttcttcttctgtgaggaattaatggactttgaaattgctgaataaggagtagcttgttacatcctagccatttgatgtaatacaaatgttcttatttggcttccttttctttgagccttcagagttttaaaggaccctctttgaccctcaggacttattagctcccagttagctgcctggaaaactcatagaaccattccctagatcccatttgtccgagaggctttggtgcttagttaaggtgcattttcttactctaggtttatagagtgatgtaattcaactgaagaaaacacacacatgcttttggtgcttattcttcagttaaaaggaggtatccattgattcttttatatgaaattaaatcaaactgttatttttatagctcttcacatattaaaaagagctttcatgtacatttacgtgtttaatttacccaacaatcttgtgaagttgatataattaatatctttactgttttaaaggtagagaactgaagttcagatatattgaaactttcttaggacatgtagcaagtaaacagtggagcccaggtcccctgactccatatcttacattcttttactaataacatgtcatgctgagattcagaaggcccatgcttataatttaaaaatgagactatttcagtatttctttgtgtttgttttctactattcctttctgagctatgttttagagaaaacaatttgatatgcttcaattttgtaaaatcaaattacatatatataaaaaaacctatctgtattagacaaaaactgtttttatttatttctgtagatatccattaaataaatattttagtggaaaaaaaaaaaaaaaaaaaaaa

SEQ ID NO: 293202 - DNA, 1000 bp, Homo Sapiens
cttaacacagtcgtgaacaaacacaaggacctgaagacacacgggttcacactggagtcctgccgtagcatgattgcgctcatggatacagatggctctggaaagctcaacctgcaggagttccaccacctctggaacaagattaaggcctggcagaaaattttcaaacactatgacacagaccagtccggcaccatcaacagctacgagatgcgaaatgcagtcaacgacgcaggattccacctcaacaaccagctctatgacatcattaccatgcggtacgcagacaaacacatgaacatcgactttgacagtttcatctgctgcttcgttaggctggagggcatgttcagagcttttcatgcatttgacaaggatggagatggtatcatcaagctcaacgttctggagtggctgcagctcaccatgtatgcctgaaccaggctggcctcatccaaagccatgcaggatcactcaggatttcagtttcaccctctatttccaaagccatttacctcaaaggacccagcagctacacccctacaggcttccaggcacctcatcagtcatgctcctcctccattttaccccctacccatccttgatcggtcatgcctagcctgaccctttagtaaagcaatgaggtaggaagaacaaacccttgtccctttgccatgtggaggaaagtgcctgcctctggtccgagccgcctcggttctgaagcgagtgctcctgcttaccttgctctaggctgtctgcagaagcacctgccggtggcactcagcacctccttgtgctagagccctccatcaccttcacgctgtcccaccatgggccaggaaccaaaccagcactgggttctactgctgtggggtaaactaactcagtggaatagggctggttactttgggctgtccaactcataagtttggctgcattttgaaaaaagctgatctaaataaaggcatgtgtatggctggtcaaaaaaaaaaaaaaaaaa

SEQ ID NO: 293203 - DNA, 1000 bp, Homo Sapiens; identical to SEQ ID NO: 118793

SEQ ID NO: 293204 - DNA, 1000 bp, Homo Sapiens; identical to SEQ ID NO: 118794

SEQ ID NO: 293205 - DNA, 1000 bp, Homo Sapiens
ggtctgtcaactagtccaaccccttaaaattcatagaggagcaaactggggcccattgaagggtgaagagttactcaaggtcaaacagctggtaacagaatcaagactaagacctaatttacctttccatactctttttttttctcaacttcatctatataaaatcaggcttttaaacataaccactaatatttacctgaagataaccatgagtaaagtatacttttgcattaattttttgagcttatatgcaaacataataaatattattaaatatcaggaaagctaacatttcatacaagatagcttcagaccaaattcaaattgaatttgaataaattagaaatactgtgcatacataaccttcttgtgcaccatgagtatttggaaagttaatccttgtttttgtcgtgtctataaaggaagaacaaaacaaaataaaaacagagccctagagaaatgctgttactttttatttttacacccatcagatttaaggaaaagactttttagccattataatctagtggttggaaggaatgaagaagcttttttagtaataggtccagatatgagtgctaaaaataaagatgatagcatgttcttctgtcttccatagttattacaactatgagagcctcccaagtcatcttatcaactcaactcccttttttttgtcttaatgttgcacataagtttatacagagtggatgaccacactagcacagaagagaacaacatgtattaaagcaggtgattcctccccttggcgggagagctctctcagtgtgaacatgccttctgtgggcggaaatcaggaagccaccagctgttaatggagagtgccttgcttttatttcagacagcagagttttccaaagtttctctgctcctctaacagcattgctctttagtgtgtgttaacctgtggtttgaaagaaatgctcttgtacattaacaatgtaaatttaaatgattaaattacattttatcaatggca

SEQ ID NO: 293206 - DNA, 1000 bp, Homo Sapiens
ctggcgagggcacgtgtgccgtgtgcggggacaacgccgcctgccagcactacggcgtgcgaacctgcgagggctgcaagggctttttcaagagaacagtgcagaaaaatgcaaaatatgtttgcctggcaaataaaaactgcccagtagacaagagacgtcgaaaccgatgtcagtactgtcgatttcagaagtgtctcagtgttggaatggtaaaagaagttgtccgtacagatagtctgaaagggaggagaggtcgtctgccttccaaaccaaagagcccattacaacaggaaccttctcagccctctccaccttctcctccaatctgcatgatgaatgctcttgtccgagctttaacagactcaacacccagagatcttgattattccagagtaagttttatgatttcctgctttcaaatgaatgatcagggtctctatttatggctactagtaataagagttgattgaatgattttgtgtctggcaccatgttagacagttttcatactttttctatatttctcgcttcatttagcaattcagtgcatccattgcagcaaataatttttgccttattgaatctctaaatgccttaacaagtgaccctgacagtgctgcacctgtcatacacattgttgcaggattcctggtggttgtgccaatgaaaatctgcacagacaaactacaatttgtagatttatctcgtgatctagacaaagtgactactgttttttttcatattgtgttcaaaccatctgggtgagcctcaagttattactaagcagtttatccaattgcatcagcattgattgacctgctgcttattcagagggattagaccattggtggagagaagcgagctctggctgtgacatcagttgtcaggagaactgggatggaacgccacctctgctacttcctgcctgtgtcacctggttcctgcttttggctctctcctgcctacagtggaaatggctacaatatttaacctcaga

SEQ ID NO: 293207 - DNA, 1000 bp, Homo Sapiens; identical to SEQ ID NO: 224347

SEQ ID NO: 293208 - DNA, 1000 bp, Homo Sapiens
gaccaatgctcagattattcttctcattgacaatgccaggatggcagtggatgacttcaacctcaagaaatggagaagcatcatgtgccaagtgacttcaatgtcaatgtgaaggtggatacaggtcccagggaagatctgattaaggtcctggaggatatgagacaagaatatgagcttataataaagaagaagcatcgagacttggacacttggtataaagaacagtctgcagccatgtcccaggaggcagccagtccagccactgtgcagagcagacaaggtgacatccacgaactgaagcgcacattccaggccctggagattgacctgcagacacagtacagcacgaaatctgctttggaaaacatgttatccgagacccagtctcggtactcctgcaagctccaggacatgcaagagatcatctcccactatgaggaggaactgacgcagctacgccatgaactggagcggcagaacaatgaataccaagtgctgctgggcatcaaaacccacctggagaaggaaatcaccacgtaccgacggctcctggagggagagagtgaagggacacgggaagaatcaaagtcgagcatgaaagtgtctgcaactccaaagatcaaggccataacccaggagaccatcaacggaagattagttctttgtcaagtgaatgaaatccaaaagcacgcatgagaccaatgaaagtttccgcctgttgtaaaatctattttcccccaaggaaagtccttgcacagacaccagtgagtgagttctaaaagatacccttggaattatcagactcagaaacttttattttttttttctgtaacagtctcaccagacttctcataatgctcttaatatattgcacttttctaatcaaagtgcgagtttatgagggtaaagctctactttcctactgcagccttcagattctcatcattttgcatctattttgtagccaataaaactccgcactagcaaaaaaaaaaaa

SEQ ID NO: 293209 - DNA, 1000 bp, Homo Sapiens
tcaccaacaaagtaacatggccccaatgaatcaagagcaacagcccatgcaatttcagagtcagtccacagtttcctcacttcagaacccaggtcctacccagtcggaatcatcacagacccccttgttccatagctctcctcagattcagttggtacaagggtcacctagttctcaagagcagcaagtaactctcttcttatctccagcatccatgtctgccttgcagaccagtataaatcaacaagatatgcaacagtctcctctttattcccctcagaacaacatgcctggaattcaaggagccacatcttcgcctcaaccacaggctactttatttcacaacacagcaggaggcacaatgaaccaactgcagaattctcctggctcatctcagcagacatcaggaatgttcttatttggcattcaaaataactgtagtcagcttttaacctctggaccagctacattgcctgatcagttgatggccataagtcagccaggccaaccacaaaacgagggccagccacctgtgacaacacttctttctcagcaaatgccagagaattctccactggcatcctctataaacaccaaccagaacatcgaaaagattgatttgcttgtttcattgcaaaaccaagggaacaacttgactggctccttttaactggatatgtaagtattgcattttggcttcttattgaaaagcatcagattttattcttcttaacagatttaggttaagtaatagtagttctaatcttttaaaatgtggctttctcacaagatgatacttttttactctgaataaaattattctgaatgatagcttatggtcatatagttaatacagaccaggccgggcgtggtggctcatgcctgtaatcccagcactttgagagaccaaggtgggcggatcacgaggtcaggcgatcgagaccatcctggctaacatggtgaaaccccgtctctactaaaaaatacaaaaaaaaaaaaa

SEQ ID NO: 293210 - DNA, 1000 bp, Homo Sapiens; identical to SEQ ID NO: 118795

SEQ ID NO: 293211 - DNA, 1000 bp, Homo Sapiens; identical to SEQ ID NO: 224349

SEQ ID NO: 293212 - DNA, 1000 bp, Homo Sapiens
gttgaagaacttttctggaagaatcgaggggatccagaaagcaatcatggaccttgtagatgagtttaaagatgaatttcccaccatcctaagattatcacagtctaatcagaaaagagaacctgcgcagaaaacatccaaaatcaggatggctattgctttagctaagattaatcgagcaacattaattcgtggattaaacagcatatccagatcctccaaatcagtggccaaacttctgcatcctcagcttgcatgcagacttttagagctaagggacatatctggtcgtctgctgagggaagttaatgcgccgaggcaacccctatataacattcaggtcagaaagggttctttgtttgaaatcatctcctttccagcaaagactgctttaactagcataatatatgcttcatatgcagcactaatttatttggcagtctgtgttaatgctgtgctgaagaaggtaaagaacatcttccaggaagaagaatccataaggcaaaacagagaggagagtgaaaattgtagaaaagccttttctgagcctgtgctttcggagcctatgtttgctgaaggtgaaatcaaagcaaaaccttataggtcattgccggagaagccagacatttcagattaccccaagcttcttgctaataagcagagtaataacatccaagttttacattctgtgtttgaccaatcagctgaaatgaatgagcaaatctgaatacaggtatcactgaacagaacttaagagttatctatttaatggcacatttcatctgacaaaactcagagtctagtttacatattctgaattgctctgctttcttaaaaaaaagagaagggggctactattaaaatgtcattttctagtatttacatgatagagtaaataaaatgaatattgatgtggaataaaaaaaaaaaaaaaaaaaaaaaaaaaaaaaaaaaaaaaaaaaaaaaaaaaaaaaaaaaaaaaaaaaaaaaaaaaaaaaaa

SEQ ID NO: 293213 - DNA, 1000 bp, Homo Sapiens
gccctccctgtggcttctcctgcttggggggcctgcctgcctgaagacccaggaacaccccagctgcccaggacccagggaactggaagccagcaaagttgtcctcctgcccagttgtcccggagctccaggaagtcctggggagaagggagccccaggtcctcaagggccacctggaccaccaggcaagatgggccccaagggtgagccaggccccagaaactgccgggagctgttgagccagggcgccaccttgagcggctggtaccatctgtgcctacctgagggcagggccctcccagtcttttgtgacatggacaccgaggggggcggctggctggtgtttcagaggcgccaggatggttctgtggatttcttccgctcttggtcctcctacagagcaggttttgggaaccaagagtctgaattctggctgggaaatgagaatttgcaccagcttactctccagggtaactgggagctgcgggtagagctggaagactttaatggtaaccgtactttcgcccactatgcgaccttccgcctcctcggtgaggtagaccactaccagctggcactgggcaagttctcagagggcactgcaggggattccctgagcctccacagtgggaggccctttaccacctatgacgctgaccacgattcaagcaacagcaactgtgcagtgattgtccacggtgcctggtggtatgcatcctgttaccgatcaaatctcaatggtcgctatgcagtgtctgaggctgccgcccacaaatatggcattgactgggcctcaggccgtggtgtgggccacccctaccgcagggttcggatgatgcttcgatagggcactctggcagccagtgcccttatctctcctgtacagcttccggatcgtcagccaccttgcctttgccaaccacctctgcttgcctgtccacatttaaaaataaaatcattttagccctttcaaaaaaaaaaaaaaaaaaaaaaaaaaaaa

SEQ ID NO: 293214 - DNA, 1000 bp, Homo Sapiens
ttgcctcagtttctggtaaaacacaaggtctggagtgcccctgcaaagggtattgatggacttcctgccagtgacagagcatgtctattgcaaacaattctctcagttacgttcagcacttaagaacggctaatggcaataggatctttagcaactttttcacatcatagaaggtgcaatcgctcacttgggaacactactgagagtgacttctcttttaaaattgagtagcagatgaaaaattaaaatttgaacttgattattaatatcaattaaaatgttttatttattttattaaaagctcaatattttctatgaattcaaaaatacttcagagccaaagccaacttcaaataccgtgaccaaatttacatgattcatattcattatgcattacttggtatacagacttattttcataatgcaaattaataaaatgacacttttactgcactatagaaatattcatgtatgttaaacttttctgattgaggctaactggaaaaagctggggtcgtattctaagtgctaaagaaggctgcttctactgtatagaacccagggctctgaaacagctctagccgcctaatgcacttcacaggtaactccccaaggtaaaactagactctcttgttggttcgcaaagaaaagttaggacttaacacttttttctaaaattttataattcaatttccaaaagtctactctattttatactgtttctacaaaatattccttataaaaacaaagaacaaaaattgaatatttaatgaattgacattttataaccaacctgtttttatctacggtgggaatctttgatgccagaaatttataaagaggttctgtatcttcacaccttgaataagcataataccataaaaaatgacacttgacatgtcaatgtatttgtcatttcattttaaactcgtatttgtggtttttttcccagataaaaatgaaattaaaccatttctttttaagaaaaaaaaaaaaaaaa

SEQ ID NO: 293215 - DNA, 1000 bp, Homo Sapiens
acgtgttcttttgtgctcttttataacttgcattacatgttgtaagcatggtccgttctatacctttttctggtcataatgaacactcattttgttagcgagggtggtaaagtgaacaaaaaggggaagtatcaaactactgccatttcagtgagaaaatcctaggtgctactttataataagacatttgttaggccattcttgcattgatataaagaaatacctgagactgggtgatttatatgaaaagaggtttaattggctcacagttctgcaggctgtatgggaagcatggcggcatctgcttctggggacacctcaggagctttactcatggcagaaggcaaagcaaaggcaggcacttcacacagtaaaagcaggagcgagagagaggtgccacactgaaacagccagatctcatgagaagtcactcactattgcaaggacagcatcaaagagatggtgctaaaccattcatgatgaactcacccccatgatccaatcacctcccaccaggctccacctcgaatactggggattaccattcagcatgagatttgggcaggaacacagacccaaaccataccacacacattatcattgttaaactttgtaaagtatttaaggtacatggaacacacgggaagtctggtagctcagcccatttctttattgcatctgttattcaccatgtaattcaggtaccacgtattccagggagcctttcttggccctcagtttgcagtatacacactttccaagtactcttgtagcatcctgtttgtatcatagcactggtcacattgccttacctaaatctgtttgacagtctgctcaacacgactgcaagctccatgagggcagggacatcatctcttccatctttgggtccttagtgcaatacctggcagctagccagtgctcagctaaatatttgttgactgaataaatgaatgcacaaccaaaaaaaaaaaaaaaaaaaaaaaaaaaaaaaaaaaaa

SEQ ID NO: 293216 - DNA, 1000 bp, Homo Sapiens
aatgatttcaaagttaacacctgtttgttttctaaagggcatgccaagtcctgctgtatcagggaagtattctgtgctaaaatcagcgatggttcattgctctagtctctctcacccttctaggcagtgcatcagtcagctctaaatctggtgcagagggttaacagcataacccttgttggcaaaatggaatagatgttaagacctcaaatagggatttgggatgaaacagctgcagttagcactgttatctgagcatgaaagaactggaaacgctccttacgtcgagatgttggaccttgaagccctcctgaggccaacatgcaaatctggctgtgacggttcatctgacacctgtgtaaagctgaccagcctgctctgtacagtgacaatgaggagcccctctcttccttaagtaggaatctgtgaagcaaaatgtttgctgccaaagacaaatcagactgtcagtcattaaaaacagcattagcaggatgaggatagcaatggggaagggttgtgggcaatgcagtaacagggaaatggcttcagaaatggtttgagttggaagacaacattcttcatctctcaggacttctaattccttgatgctaaaagaagaggcatggattctatgagcttccaagtccctttccactttaaccttctacaaatctttcagaggactgcctagtagcaaaggttattcctggacacaggaaagacgggcattacagggaccaaagctctgaaaggtgacttttattaccaacacactggctggaaaagggacaaaccacatcacgggtgagtgatacttctcagtcttctctactcattcaacaaaggaaatgtgggctggggcagaggtcttttttcatttaatactggaaaaatattgaagagcatccatgttcacttatggctggttttgctatagaaattggaaaataaaggccacttttttgaaatccccagtttaattaaaaaaaaaaaaaaaaaa

SEQ ID NO: 293217 - DNA, 1000 bp, Homo Sapiens
ttctcccagactaggatttttgctagctatttgttctatcacccagaattttgagaaggcttaaaagcatattattgatttgtgcatttggtgcaaaattcaacaggtataagggggtatctctccctgaacctgatcctcagccttcagtttcctcccttggaataatcactgtatacttctcttgtgtgtctttctaaaaatatgttctgtttatttaaatatatgtgtgtatgtgtatttacacaagtgatggcataccacatacattgttaaacagtttcctcgtgtcctttagcaataaaatctgacgagcagttcttaacacatggagcggcacactataagtgaccagtccctgcccatggccatctggatggttttcatgttgctgtgtaaaggaggcttcaaagtgtcttctgtaggtgtcagcttgactggaaaataaaaagtgtcttctgtactcatcactcatgcttgtgagaatctacaggatagattctgtgtgtgaatctatcctattctaatccttttcggcatttcctcagctacccttactcgttcatttttccaaatgaactttaatatcagtttttctggtacaacttttttccattccagttggttaatttttggattgcaataaatttatgatttaacttttaattttaccctttgtgaacttgaccatagtaagctgttcccatactcaaatatttcctgtcctgtaattgcattttaagttttcctttatgtagaacttgcgtccttcttacgaagtttattcctaagcagtttatcgtttttgttgctgcaataaatggacgtatttcttccttgatgtcctccacctaagattgtctgtatggaaagattgtatatttctgtgtattacatttaatcctgccactgtaatctcttctaatttgtaatttttttcatgtaattattttgggtttctaggtaaataaacatgtcacctacaaaaaaaaaaaaaaaa

SEQ ID NO: 293218 - DNA, 1000 bp, Homo Sapiens; identical to SEQ ID NO: 224354

SEQ ID NO: 293219 - DNA, 1000 bp, Homo Sapiens
aggcaaagcagtgtaaaactgtatcaattaaggcttgtgagtagtgatttccactggggcatcagagtcttggctgggctgaatctgctgcttgttggttcagtgtttcttatgaacaagagccacagtacagagcttcaagttatttaaaatactaagtcatcttacgtttccattttattaacgggatgttgcaatcgtttgtaaactaataaacttataaagtgattggcacaaagactccttgagcaaaagctgtgcagttaagtacaaaaagatacttaatttggagactcttacagtaatttttgccatgtcaaaacaatggcttttacattgaaagattaatagaaactctacatatgttaatttttttatagaacctgactcaaatcaaggtactctccattttattgccttacctgaatcagtcctttttggttggtaatagatttttttatacacccacgtttgatttaaaagtaaattctagttcttaagcacttttaacaagaaatccagaagcacatttttctgcacaaacaagttacaaagttcaaaagtgtttcttgtgcattagctttgagattcagtttttaactttgtaaaccacatctgagagacttgtcatttctacattgtgtgtgtttaatttcttttgattccattttggttaagagagcagtaaatagattttctggtattcttgttcacttgattacatttgtataaagttctgattgccagttgctcagataacaagtgacaaggcagaattctttaaatcagtaaagttccttaagcctaaggctaaatcttgaatacattgttgaattctttaatatcctgatggcaagcagactgatagctgcacatttggcatgctttgtttaatggattttatttttaattgcagatttatttggcaatgtacagtaaattttgtaaacttgcatcaagtttatgaataaagaaccatttaaaaaaaaaaaaaaaaaaa

SEQ ID NO: 293220 - DNA, 1000 bp, Homo Sapiens
aaatatgattttctatatggagtgagaaaattcttctcatcttgagaactcttattgctgtgaaagggagtggttggtaaaatcaatagatttcaggcaagagggccagatacctaacaggtttttctccgtgaatcttatgctgagtagtttttcctcataaccaagcatttatgatatattactacttataatactgtggctagtctctagaatggatgttgaaatctttgcctcctcagtcgggaagagtcctgctaaaaatcaggctaaaaatcaggccaaaaatcaggccaaatgacttggcaaataattgacaaagtggttttcacgtgtgtctatctttgctagcagcttgtatacctcaggccaggtgagctccccaaatttcttttttcatttactccagtgagtttctgctgtctttttcaagtatgtaccataggacttaaaggtgatttggatgcgttgtaacactgctaaatatgctaagtacagaattttatctacagtactgtgagacagtcaattattgcctagggtagttcaaaaatatgatgtgagctagttaagcctttgcttgactgatttcagtgatattcagaagtgtgtaccaatcaaggctctttaaaatacggaacgactcacttaataaccagggaaccagccaaatactgtgcagccgcagaatatgcatatcaatgagttggaggtgattattctctgtaactccctaatgattgttttctaagcattgtggcttctcagtggcttgacagcatcttcctggttgtatgtggcctgtttacatgatgtattgaataatgttgtttgttgtgagcatcaatgcctgtaacaccaaactaaacacgtgtttttgggatatgtttccaatctttaaatgaccttgccctgtccaataaataaatgattgtctcaccctgaaaaaaaaaaaaaaaaaaaaaaaaaaaaaaaaaaaaaaaaaaaaaaaaaaaaaaaa

SEQ ID NO: 293221 - DNA, 1000 bp, Homo Sapiens; identical to SEQ ID NO: 118800

SEQ ID NO: 293222 - DNA, 1000 bp, Homo Sapiens; identical to SEQ ID NO: 224355

SEQ ID NO: 293223 - DNA, 1000 bp, Homo Sapiens; identical to SEQ ID NO: 118801

SEQ ID NO: 293224 - DNA, 1000 bp, Homo Sapiens
gatagttttctttctttgatgaagtttctgtattttcatgttgtaagtggaaatacttttttttgtttgtttgtttcatttgccttggagccaaagtttctgttcctggtggtcgggaaactgcctgccggccaactgacttgaaggaaaactgtggtatggagctctgcttgaatttttttttttttaatatttttatttttttctttgaatatcatcagcttacttgtctggcaagggcagaagcctggggttggcctgaactctgccaaacaaatatcaaagtgtatttaatagttaaatttgtgccctttcccttcttgctgcacccatgttgtcacttaacccccaggagttatttattatctttttgttaaagtcaggctcatttggggtaatgtgatgactgtttaggtttacatgaccctcctctcctttccctacccccaaatatgtatatatacatatataaaatatgtatatattttacctatataaaatatatatatatacacatatatgtatctatattcctttgtttctttgcctgcttatactggccataaaagagggagctgccttcaatgtataaagtataagaagagtgccagggaatgccataatggaggcttttggatctgaatttggaccatttcactaaagagaacatgagtttgctcagccctttcctcacaagagggagggccccggttccccagacttctccacgcgctggctccataaaggccagctttggccaggctgccacaggggcctgaggagctcactctgggcctacctggtttcagttagagggtcctcctgttatttttccatttaaaaagtatgtcctcagaaaactgtactggaaggatgggtggcaggaacttgtatagttcagcttccaacactttggaacagattaaaaagggaatcttttaaataaaaacgtataaaaataaaaaaaaaaaaaaaaaaaaaaaaaaaaaaaaaaaaaaaa

SEQ ID NO: 293225 - DNA, 1000 bp, Homo Sapiens
tgagacctggaggacgcgaggggtgggagcagggcgcctggtgaccgggccagcccttgcctctgggcctccatgttcccagctgtacaatgggcagggctccccaaggaccatttcctggggtttagggcacacccgtgtgggggtggcatccctgttgatgctggagtcactgtctgggctggccttgtggtttagccctcccccagcagccagcagaacccctgggcccgggctgtccctatatacggatggctccaaggcctgggggggggcgccacaggagcacgggggggcccatgcctccctcactcactcccaggtgtcccctcccggctctgggaacctgactcagcacggtcacgtctgtccctgtgtcaccatgccagctctcaaaaccactcctcctttcctctcccctcacaggggcctggacgctgcatcctgggcccagatccaccagaagctccgggacttctcccgcagcacccaggtaggaggcaagggctggcccaggcccatcctcacgccatgccccagctcatggcttacatccccatgccaggcagagctggaacgggagcgggcacagctgctggtccgggccacgatggctgaagagcaactttctgagctacaggagtacgtggaccagcacctgggcaggtgggcagagggagctgggtgtgaccccagggccctggtctggttggaatgaaggatgatggctgcctcaggcgctaaaggcagacctgtccacagctgggcaagtcacttaagcatggttcctctgagcaggtacaagcacgaaatcctgaggctgaggaagctggcaggtgcaggggacccctggaaagtgggggctgtgcctccagccaagccccagcatccaaggaccggcagccactaggccgtctcccaaggagcagagcagagcagagctcctcagccagcacagaaccctcccacccagccccccataaaacatgagtcaggatag

SEQ ID NO: 293226 - DNA, 1000 bp, Homo Sapiens
ttgtgtgcatgtatgcgtgtgtgcatgcatgtgtgtgtaagtatgtggtatgtgtgagcacgggtgtgtgcttgggtgtgtgtgtgttcttgcatacatgtgtacgtgtgtgtgcacgtgaacgcgtgcgtgtttgtgtgtgtgcatgcatgtgtgtgcatgtgtgtgtgtgcatgcatgtgtgtgtgtgtgcatgtgtgcgtgtgtgcacactcacgttgggtggtgtttggtaggtttccctccaggtctggtagggactgggctgttgcgtgattctgcgtggatcgggggtaagagagctcacctgtgtcccagccctctgatggtggtgagaccaggggaaaggccagctcagagggtggtcacagcatgtgtcctctgacgtatgcccccaaagctctccagccagactgaggtcacagatgtgggagagtccctgatgagcccgctgacacgtgtgcgcccctttgcaccccatgcagaggtgctctcctcctttctcagccatggccccccatccctgacctcagcttgggaagcagctcctgctgggagcatggcctcagcccccagcatctcctggggcccccatggctggggcaggggaaagagagccctcaaaggcctctttctggtctgtctgggggttcccattcccacacatgtgcccagagtagggggcatggaggagatggtccctgtcctactgcaggacactgagggcttggctgcctgccaccgccatctggagcccaccacagctcttctccctgttctctgggcctgagcctggggccacccccaagtgccgacttgtttctcccagagccccaggtgctgccccttctctcctgttcctcgtccgtttactgccgcagcccctcctggttcttctggtgctggggtggagcaggctctgtgctcccaccactgtaccccgaatccctcctgcaggctcattgccacttttgtagagaatgttctctatcagtatcgt

SEQ ID NO: 293227 - DNA, 1000 bp, Homo Sapiens
ttgaactgtattttgtatgccaatttcatgcttatttttcctttatcagagagagttaaggtggacgagcatgccctttttgtcatatcagcctgaaaatgttaaaaagctaggtggagacagattagttgtttcatttttgtttaacaaggtatttatacttttagcttaatttcattaagaggaacatcaggcattgcaatcagtattaatcaggggctcaaatacagactatctgggtgaccttgactaagcatcaaggaggtagcctttatttccccttaaaattagtttaacatctctgttccattattcagatctacacaaacaaggcttcctcaacagctatctatttttactagagtctttttttaaaactaaaactaactctaaagaagtttcaacagaatttccacatacctgcattcattagaacttgattctcccagaatacaaagtactctattttaaagaaaaacccaacagtgcacccctgggcagttttcagactgcagcaaatcttttattacaaataattaaatctctccataatgtctcaaacagtatcaaacaccatttcatatctctaacacagagcagagtcggcattcagtataagaaccaagtgaaaagtgttaaatttcaagcatctgatcacatcacatggtgaccaggtaaagcttagatgtcattttcccacattatccaactgtgcatctcaaacatatcctcatctcagtaaagacaaaagtttctatttcatattgttaagtgcaggaagttgagagagataaaaatccagtgaaaacacatcaatctcaattcaactcagttaaaaaaaagaaaagcaaatttaaattagtttttttcagagaagaaagggaaaggagtccatggggttaagaatcaaaactgaccagggctggcaactatagatggcatgttgtagctctggaaagtatctgtcacatgatattttaaaataaagtggcttttgtgg

SEQ ID NO: 293228 - DNA, 1000 bp, Homo Sapiens; identical to SEQ ID NO: 224356

SEQ ID NO: 293229 - DNA, 1000 bp, Homo Sapiens
cgctacctgtttgagaacagcgatcagcccattgacctgaccaagtccaaaagcaagaaagccgagtcctcgcaagcacaatcttgtatgtccccacctcagaagcacgctctgtctgacatcgccgacatggtcaaagtcctccccaaagccaccaccccaaagccagcctcctcctccagggtcccccccatgaagctggaaatggatgtcaggcgctttgaggatgtctccagtgaagtctcaactttgcataaaagaaaaggccggcagtccaactggaatcctcagcatcttctgattctacaagcccagtttgcctcgagcctcttccagacatcagagggcaaatacctgctgtctgatctgggcccacaagagcgtatgcaaatctctaagtttacgggactctcaatgaccactatcagtcactggctggccaacgtcaagtaccagcttaggaaaacgggcgggacaaaatttccgaaaaacatggacaaaggccaccccatcttttattgcagtgactgtgcctcccagttcagaaccccttctacctacatcagtcacttagaatctcacctgggtttccaaatgaaggacatgacccgcttgtcagtggaccagcaaagcaaggtggagcaagagatctcccgggtatcgtcggctcagaggtctccagaaacaatagctgccgaagaggacacagactctaaattcaagtgtaagttgtgctgtcggacatttgtgagcaaacatgcggtaaaactccacctaagcaaaacgcacagcaagtcacccgaacaccattcacagtttgtaacagacgtggatgaagaatagctctgcaggacgaatgccttagtttccactttccagcctggatcccctcacactgaacccttcttcgttgcaccatcctgcttctgacattgaactcattgaactcctcctgacaccctggctctgagaagactgccgaaaaaaaaaaaaaaaaaaa

SEQ ID NO: 293230 - DNA, 1000 bp, Homo Sapiens
taaaaatctaatccctggaatatagggaaatttcacaatcatcatcttggccctcacatttacttttctgttatcagtaacttcagaacatacaatttatgtaaatggaaaaagagaaaaaagacaattaaaatacaaccaaatgttattaataagagtggtctccaataagtggagtgagacattatttctatgtcacattctttatgaacacaactttgttttgcacaacacatgatcgtaattaacaaatataatacttttagaagagaggccctgttagacatgagtggacagctttggaatcaaacaaactagagttggaatgttgccttcacttcattccttgagctgtgtgaccttgggtaagtaacttaacctctctagacttcagttttctcaactgtaaaattaggaaaatagcaacttcgtaagattattgaggatgtgattatgcacattgatcagtaagtggtcaatgtaatcatatcatcactgctactataattcaattttcaatttaaggataatgttctcttatatatttaatttttcctcattattctaaaacttagaactcctccatatataattaaaagtgtgaaaatctaaaaatacttctgccagtacaagatgcacagacacatacacacttaattcaaagacatatgggtacttagaatattgaagtattttctaaattgttttctattttactcagatcatttctagcaccaactcaacctttgctttttggatgagtttggtaaggattaattctacttccaatttggtgtgtttggtgtgccaaaatgtatctattataagatatgttatattgcatacaagtggaagtaggtggagtattcctctgttataaagagtatttacaaatttccattgggaaatatcagctgctcactattatctgcagtattgataagactacagctatatctttatccatttattctccattaaagaaattgtgataaactgc

SEQ ID NO: 293231 - DNA, 1000 bp, Homo Sapiens; identical to SEQ ID NO: 118803

SEQ ID NO: 293232 - DNA, 1000 bp, Homo Sapiens
catctcttacctcctcctcggagaactaccggataaccggcgcagctttcttctctgagctcatgaaggaaccaatcctttggaagcatgggaatctgcgaaatgtgctgatcttgatggatcaaagtgcctgggactccaacgccactctgaggcagatggccatccgagggctcggcaacacagcatccggggctcctcacaaggtgaagaaacataagcagttaatgctagaatctatcatcagaggcctgtatcacctagctcgcactgaagtcgtctgtgaaagcttgaaggctctaaaaaaaatcctggagctgctgacagaccgagacgtgagcttctacttcaaggaaatagtgctgcaaacaaggaccttctttgaagatgagcaggatgatgtgagattgactgccatcttcttatttgaggacctggcacccctaacaggaagaaggtggaagattttttttgctgaagaaataaaaaagagcctgatttcattccttctgcacctttgggatcccaaccccaagattggagttgcttgccgtgatgtcttgatggtctgcattccctttttgggcctccaggagctctatggggtattagaccgtctccttgatcaggatctaccaagggccagggatttctataggcaattctgtgtgaaactggccaagaaaaaccaggaaattctgtggatcctccacacacactccttcaccttcttcaccagcacctgggaggtgatcaggagtgcagctgtcaaactcacagatgccgttgttctcaatttgaccagccaatatgtggagttactagacagagaacaactgaccacacgactccaagcacttcgtcaagatccatgtattagtgtccagagagcagctgaggctgctttgcagaccctcctgagaaggtgtaaagagacaagcattcctctgtaagccatcaagaaataaactgctggcttttcccaaaaaaaaaaaaaaaa

SEQ ID NO: 293233 - DNA, 1000 bp, Homo Sapiens
tttgtcttcggcgccgtcttgttgtgtgtgggagtcctgctctccatctttgggttccaggcatgccaatataagcccctcccagactgccccatggtgctcaaggtggcggggcctgcatgtgccgtggttgggcttggggctgtgatcctggcccgctcccgggcgcaacttcagctccgtgcagggctgcagagaggtcagcagatggaccccgaccgagccttcatctgtggagagagccgccagtttgcccagtgccttatctttgggtttctgttcttgacaagcggcatgctcatcagcgtcctgggcatttgggtccctggatgtggctccaactgggcgcaggaaccgctaaacgagacagacactggcgactcagagccccggatgtgtgggttcctttctctgcagatcatggggcccttgattgtgcttgtgggattgtgtttcttcgtggttgcccatgttaagaagagaaacacgctgaatgctggccaggatgcctctgagagagaagagggacagatccagattatggagcctgtccaggtcactgtaggtgactcggtaataatatttccaccccctccaccaccttactttcctgaatcttcagcttctgcggtcgctgagagtcctggaactaacagtctgcttccgaatgaaaaccccccttcatattacagtattttcaactatggcaggaccccaacttcagagggtgcagcctctgaaagagactgtgaatctatatataccatttctgggacgaattcatcttctgaggcctcacacactccacatcttccatctgaattgcctcctagatatgaagaaaaagaaaatgctgcagctacattcttgcctctatcttctgagccttccccaccgtaaactatggactctagttcagttttatatgcaatggatcactattttatttaattttttttaaataaaaaatacaatagcattggcgaaaaaaaaaaaaaaa

SEQ ID NO: 293234 - DNA, 1000 bp, Homo Sapiens; identical to SEQ ID NO: 224359

SEQ ID NO: 293235 - DNA, 1000 bp, Homo Sapiens; identical to SEQ ID NO: 224360

SEQ ID NO: 293236 - DNA, 1000 bp, Homo Sapiens; identical to SEQ ID NO: 224361

SEQ ID NO: 293237 - DNA, 1000 bp, Homo Sapiens
acaaaaacatgaagtgactgcccagaggtagagttagtgtttaggtggaaagggagatgacagctttccaaagaaggacctaaaacacaccaagattgtcttctacaggaattgctgggcaggtctccgactaaaggtcttatgatgaaaaggaagaaacaagcccccaacacaaggctctgatactactggtaaatgtaggagagaattaagaatctgttaattaaaatccaaacagagcttatttcagtagtcaagttacctgacatgataattatttctgcaggataattgatgttttatgttcttttttggactttatcttcttgcaaaaatttctacaaaaattgttttcttcatccttgtggtgcttattcatctgagccgtctccacagtcccaatgcctctgctttttgttttacttttgtagcataaggtttttgcttttgctttgccttaagagttccctagggagttaccagggcttttcgttttgtgtagcttttgcagcatggatcaaacattggcttactgtgctaatgtgtgaagagaaaaaattctctaaagcaggtgagctttaatgaacaaatgtgtattttatctgagtttgagtagggtgcgttgtggattttgttttttgggtttttttttttttttgtaattatatgaagaaagtccagttctcataaatattgatcacttaaaaaacttactctttcttgaaaaggtacacatgtaaaatttaggaaaataactaaagtaggggctggaaccataagaagaatgtttatcagcacgttcatttattattttggatttggaacttggctttgtttttcaatagtgacaagaatggttcagttctaggaatgttctggaagatgctgttaattttactttaaaatgagaatctggtgttactgtattttatcgttttcaataaaacttcttaagtgttaaaaaaaaaaaaaaaaaaaaaaaataaaaaaaaaaaaaaaa

SEQ ID NO: 293238 - DNA, 1000 bp, Homo Sapiens; identical to SEQ ID NO: 224363

SEQ ID NO: 293239 - DNA, 1000 bp, Homo Sapiens
aaagcttggaaaggtctccctcatctctacaggtttaacaactctgattcttggaattgtaatggcaagggcaatttcactgggtccacacataccaaaaacagaagacgcttgggtatttgcaaagcccaatgccattcaagcggtcggggttatgtcttttgcatttatttgccaccataactccttcttagtttacagttctctagaagaacccacagtagctaagtggtcccgccttatccatatgtccatcgtgatttctgtatttatctgtatattctttgctacatgtggatacttgacatttactggcttcacccaaggggacttatttgaaaattactgcagaaatgatgacctggtaacatttggaagattttgttatggtgtcactgtcattttgacataccctatggaatgctttgtgacaagagaggtaattgccaatgtgttttttggtgggaatctttcatcggttttccacattgttgtaacagtgatggtcatcactgtagccacgcttgtgtcattgctgattgattgcctcgggatagttctagaactcaatggtgtgctctgtgcaactcccctcatttttatcattccatcagcctgttatctgaaactgtctgaagaaccaaggacacactccgataagattatgtcttgtgtcatgcttcccattggtgctgtggtgatggtttttggattcgtcatggctattacaaatactcaagactgcacccatgggcaggaaatgttctactgctttcctgacaatttctctctcacaaatacctcagagtctcatgttcagcagacaacacaactttctactttaaatattagtatctttcaatgagttgactgctttaaaaatatgtatgttttcatagactttaaaacacataacatttacgcttgctttagtctgtatttatgttatataaaattattattttggcttttatcaagacttggcttttatgagtagtgc

SEQ ID NO: 293240 - DNA, 1000 bp, Homo Sapiens
caaaggaggtagaagatggggaagatgagatgtcagaagctaaggacaatggcagtagagatgaggttcttgtccctcataagaattgcaggaagaataccactgtcccgggaaagaaaggggaggaaaagtctctggctcctgtgtttgctgagaagttaatatcaccaagcaggaggggagccaagctcaaggaccgtgagagccaccaggagaatgaagacaggaacagtgagttggaccaggatgaggaagataaagaatccttctgtagggggttcccgatgagtggctgtgagttagagacaagctgctgtgtgtgccattctacagcacttggggagaggttctgttaaaaatccatccctctgaaaactgccttggcaattcccggctgattcttcgggatgggcctcattgatggggagtctcagtggatgtttgacttttgctttctacctgaccctagtcagagattttttctttttcctttttttttttttttttttttctgagacagagtcttgctctgtcacccaggttggagtgcattggtgtggtcttggctcactgcagcctctgcctcctgagtagctgggactacaggcgcacaccaccacactggctaatttttgtatttttagtagagatggggtttcgccatgttggccaggccatcttgaactcctgacctgaagtgaccttcccaccttggccccccaaagtgctgggattacaggcatgagccaccatgcctagcccagaaattttctctttgaatactatacattgatgagttctgtctttatgcttatgatccacgcaggtaggtcgtctcagatttaattttcagtggtttttttctgtcttgatggagtctgtgtaacatttaaaatattgctaccaaagcagtaattcttactatagttattaaaatgcaagaacaatatatttaaaattatttcataataaagttaaaatgagaaaaaaaaaaaaaaaa

SEQ ID NO: 293241 - DNA, 1000 bp, Homo Sapiens
ggatattcctgctgttccagatgatgactgtatacccactcttaggctacctggctcgtgtccagcttttgggccatatcttcggtgacatttatcctagcattttccatgtgctgattcttaatctaattattgtgggagctggagtgatcatggcctgtttctacccaaacataggagggatcataagatattcaggagcagcatgtggactggcctttgtattcatatacccatctctcatctatataatttccctccaccaagaagagcgtctgacatggcctaaattaatcttccacgttttcatcatcattttgggcgtggctaacctgattgttcagttttttatgtgaaatacctcaactgtttttttcaagagctctcatgatattttgagccttgacaacagttctatataaattcacttgtaaatgctgctgttgtgtaattctaaatattttctaagataatttgaaagcaagggaaatagtggccccttaatgagtatttttttattggggtggggaaaggggcaaaaagaatgatcttagtgtctttacctttctcatattaactcacctctttattctgtggtcttttctgaatagaaatgtatgccctaggaagaaatcatgctgggttttgcttttagagataaaaggtggtggatttattttgcctgcagtaaagattctcagggtgtcagagcagcatattgtcaaatcctgcttctgttttatgtttcagtgtattcactttcattttcttacttactagaccatttctgcagtttgcccaaacctctactgtttgggacagtaagccaaatacctcatttttaaaaagaagttttcatggcatcagtgttaataaagtacatttttaactgagtcttaatctctatttgaagaaaaagtagagacaaaagtaatgtcaatgtaatccccaggatcatgaaatgtatacaaaataaataaagtaggagagtttgttgctg

SEQ ID NO: 293242 - DNA, 1000 bp, Homo Sapiens; identical to SEQ ID NO: 118805

SEQ ID NO: 293243 - DNA, 1000 bp, Homo Sapiens; identical to SEQ ID NO: 224365

SEQ ID NO: 293244 - DNA, 1000 bp, Homo Sapiens
tgaggaagacagcataaagaaagccaaggtctgactgcttctttttgatgatcaattaatctagaatattaatcagggaactacctcctccctcttgcttctagcagcactaaacaaaaggttccctttttgtgtttttatcatcaggaaccagggtcctttcaaggaggttgaatgagacaaaatacatttgaatgcatgattgtcagcttctgagctggggaatatgcaacaatatgccttctgggctggggatgggtgagcaaagggagaactgcctcattctggctttggtagagtctcctcttgtgtttcatttgatgcagaggaactttgggccagaatgattcctatttccctatgtcctccacagaaagggaggatagtgaacagaatttgcaatatactagatagatgtttggctgccaccttcccataaagccctatgagtagcttcttcggaagattcctttagactacagggttgtgtctaagctcttcagcataaatggagatgggccctgtcttgaaacacactgttcttttactagggactttccccacccccattttgcatatgtatgtatgtgagccgtacagggcgtattggtgattgaggaatgtcagctcataaaatgaggcttccttgtaattctgtttaaatgacttttcctttgaaattcttatccataccttatttggcacacaaaacagatatacagttgacccttgaacaacacaggttagagctgcatatgtccacttatatgtggattttttttcaataaatagaattggccccccatatccacaggtttcacacctgcaaccaaatgcagatcaaaaatacagtattcgtgggatgcaaaacctgcagataggtaaggccaactttttgtatacttggattctgcaggttcaagtgtggggcttgagtatgcatggattttggtatctgcaggggtcctgggaaccaatgtttacaaggaattcacaactt

SEQ ID NO: 293245 - DNA, 1000 bp, Homo Sapiens
ttagatgtataaattggatatttcatgcctaattaaatgttgcgttggattgcagtgcctatcatacagtgattggagtaaattgaggcctaatcctgaacacatatagagcatattgttagatatttttcctgtgacatttgaagttattattctcccatttcctttttctttttttgtttataatcatatgtccctaagattgttttccttttttggaccaaaaaaaagaaaaaaaaaatcttagcttttcatcctcccagtgtattctgcattgtccttaccctagatcagccccttctgtgtaacagtttttctcacaatgtagcaacttttatccacccttcaggaccttcactgggactagttcattcattttcaaatagctatttcaacctttaacatctactgtcttagtcttttacacagaagccagagtgactggtcttggcaagactctgttgtgtatcaccactctaaccttactgatttgtttcagcaaatttgctttagttaaattgctttactcagattcccccaaactttatatgtgtattgtcatctttgtgcatattatttctcatgcatgaaatactcaatttttattcttttatctaacgcttactcttacatttctttaaagctctggccaagtattttatttcgtccctaaacattctaactatccaccaaactggtaagttggcttttctttttcctccccctgtcattcatttagctgttatatttcattttaatgttttgggtggtgcctcttatactatgttgtattcctagacaaggaaatgtatatcaaaatatgttagatgattgattgttttatctccttgatgatagcacctcttatactgctttacagaatcaggaaaaagtaaactgcattttacatagtggttttaaatattgattgattgatattctaaacctggtttcctatataaagttgtaagttcaagataaaaaaaaaaaaaaaaaaaca

SEQ ID NO: 293246 - DNA, 1000 bp, Homo Sapiens; identical to SEQ ID NO: 224367

SEQ ID NO: 293247 - DNA, 1000 bp, Homo Sapiens; identical to SEQ ID NO: 118807

SEQ ID NO: 293248 - DNA, 1000 bp, Homo Sapiens
gcaaggctggaagttcaatggtggaagcttatattatttttctagtgtcaagaagtcttggcatgaggctgagcagttctgcgtgtcccagggagcccatctggcatctgtggcctccaaggaggagcaggcatttctggtagagttcacaagtaaagtgtactactggatcggtctcactgacaggggcacagagggctcctggcgctggacagatgggacaccattcaacgccgcccagaacaaagcgcctggttccaagggatcctgcccactcagaaagtatattattgtgaattctgggatgggagcttgcagcttcatagacacccctccctgtccctggatcctcagtaactaagagcaacctgagcacagacaccctcagggtactccttctcccagccctgtcctcatcctagggccactaggggatgaaggacccatctcaagtcagctccctagactcatcccatgtcagctccctaggagccacagcaccaggaagggatgctgccttcatctaacagtataaagccctgttgtcttcgggttttgggaaaagaatcagtctgacaactggcggcacaagaatgggcagactgaagactgtgtccaaattcagcagaagtggaatgacatgacctgtgacaccccctatcagtgggtgtgcaagaagcccatgggccagggtgtggcctgagggcaggccagagctgaggggctgctcctgcttgccaatactgaccctcctcctcgatgccttcggagcctctgagctctgcttgttctctgggaccttccgttggccttgtggacttcctgccttgttctttgattcagccctttcaaacatgcttacctcgagtgacccagtgacatcagtggcttctcaagggaagagccttgctgtgcccctgtagcctcagcacccagcacaggcctgtcagacagcaggtcctcaataaatactcgctggatcaacaaaaaaaaaaaaaaa

SEQ ID NO: 293249 - DNA, 1000 bp, Homo Sapiens
tgtgtgtgatggtttggaatataacaagccagttaggcgtataagcttatagtggctaatatgaggatgaaatccgtactcttgtgacacaagtcttcagcggagatgggggatgataggcccaaatagaaagaaaagtggcagacattaagctttgactaacagacaacataactgagagacatggtgtgttgggtggaagggatcctgtagtagatacttgcttgcatgtagatgggtacaaagacaccataaggaaattctgaatgtaatacaaaggcttatttttcctgttgatttatctttttcacacataaaagatgaagaaaaaaataatctgaaatgtaaatcctaaagtgatctgtctagattcttattttttgaaaaatgttcctcactaaaagagttttctattcaaataaccatttccagttttctaactgagacatacatacatatatatatgtataaaattatatatatatttggacaaagagaataagagaattgcaggtagaaatagtctactgtgtgtagacaaatccagaaagttgatttctgttcctcaaacaatttctgaaatatttatgtcagaataaataaaagaattgttattgttggacaatgaaacatacctggaccctttgagtgtgtgaatagtaaaggctgtgataactgaaatgcagctaagcaaaaagggctaattagaagacttttgagacatgatttacctaaatggaaatagtttggttttcaatccttcactgtaataacaattatttgcatctattaagtgtttgtagtcactttgtataataaagttttatggcttgtgattataatggcttctgttattctgctactgcctcattgttttgaggaacatttgtaattttgtggcaaaggtgtctcaatttttcagtgttctttactctcatgatccttagaacaaaaaaaataccagtaacttgttataaataaagagtcacattctcttaaa

SEQ ID NO: 293250 - DNA, 1000 bp, Homo Sapiens; identical to SEQ ID NO: 118808

SEQ ID NO: 293251 - DNA, 1000 bp, Homo Sapiens; identical to SEQ ID NO: 224369

SEQ ID NO: 293252 - DNA, 1000 bp, Homo Sapiens; identical to SEQ ID NO: 224370

SEQ ID NO: 293253 - DNA, 1000 bp, Homo Sapiens; identical to SEQ ID NO: 224371

SEQ ID NO: 293254 - DNA, 1000 bp, Homo Sapiens
catggaccgactgtcccaccgcctgcgccagagcccctcaggcacgcggctgcgcagggaggtttactcatttggggagatgccgtgggacttggcgctgatgcagacatgctaccgtgaggccgagcggagccgggggcgcttggggcagctggcagcaccgtttggctttctggggatgcagagcctcgtgtttggggcccaagatcttgcacagcagctcatggctgacgccgtggccaccttcctgcagctggctgaccagtgtctgacgacggccctcaactgtgaccaggctgcccagaggctggagagagtcagggggcgcgtgctgaagaaattcaaatcggacagcgggttggcgcagaggaggttcatccgaggctggggtctctgcatctttttaccttttgtgctgagccaactcgagccaggctgcaaaaaggagctgcctgagttcgagggggatgtccttgccgtgggcagccaggctctgaccactgagggcatctatgaggacgtcatccgggggtgcttgctgcagaggattgaccaagaattgaaaaagacccttggtgccaatgatgtatcctgcactctggacggctgcttggaggtcccatgggaacaggagggagcagctccaaatcttaacttggtgtcaagtttcctggctgggagacaagcttttaccgacttcctctgcttgccagcaaagtcatctgctaactggatattggcagcttctctgctgtcttgcagctgcttccggagtgggttccacagggattcccgtgtgttcttggttcagcttgcagagggactttcacactccctggagaccgtttcctcccattctgtctggagttttcggcctaccccaagacaatgagatattcctgccctttcctcctatttccctccaacccccccttccgaaatacatttgctcaatcatttgcacttcataggccaaaaaaaaaaaaaaaaaaaaaaaaaa

SEQ ID NO: 293255 - DNA, 1000 bp, Homo Sapiens; identical to SEQ ID NO: 224373

SEQ ID NO: 293256 - DNA, 1000 bp, Homo Sapiens; identical to SEQ ID NO: 224374

SEQ ID NO: 293257 - DNA, 1000 bp, Homo Sapiens
gtgttttttttgagacaggatctccatctgtcacccaggctggtgtgcaggggtgcggtcatgggctcatgggattctcctacctcagcctcctgagtagctgggattacaggtgtatgccaccacgcctggcttatgatgaatatttctgagtgggatgtttggccacatttatggtcatgtatgtaggctgttacctcaagtgagtcactcagggaacaatgagcacttgaagatttttttatacaaaaggccacagtgaggccaccttgagtcaagccgactaaggcccctcaaccctgtcactaagcagcacgtgacactggcaggaccttcatctccagcatcccacccctgggtgtgggactttggggcagccgtgtgtgcaggtgtcggcacaggctagctcctcctggtttggtgtggtgtttgccattgcagagcaagctgccacgaagacccctgggcatgattttgcttgtatttccggaagtggggttgctgggtcatagggcaggtgtaattttttttacttgaaatgttccacttcttgttctgggaggtggttccaagggtgtctgcttttggccaggcgcagtggctcacgcttgtaatcccagcactttgggaggccgaggcaggcggatcacaaggtcaggagttcgagaccagcctggccaacaaggcaaaaccccgtctctactaaaaatacaaaaattagccgggcatggtggtgtgcgcctgtaatcccagctactggggaggctgaggcagaagaatcgcttgaacccaggaggtgaggttgcagtgagctgagattgcaccactggactacagcctgggtgacagagcgagactctgtctcaaaaaaaaaaaaaaaaagggagggctgtctgctttttgtaacttgaaaaactggacatctatgttatatgtactcatggataaatatttcacaataaaactttttaaaaggataaaaaaaaaaaaaaaaaaaaaa

SEQ ID NO: 293258 - DNA, 1000 bp, Homo Sapiens
ttctgtctaccctcattcggcaccggaaagtgcacattggagaaaggccctatgagtgtacagaatgtgggaagttctttaaatacaataatagcttcattcttcaccagagagttcacactggagaaaggccttttgaatgcaagcaatgtgggaaaggctacgtgacccgttcaggcctctatcagcactggaaagtccacactggggaacggccctatgaatgtagcctgtgtgggaaaaccttcactaccagatcctaccgcaatcggcaccagcagttccacactgaagagaggtcttatgaatgtacagagtgtgggaaggccttcaaacatagttccaccctccttcagcacaagaaagtccatactccagaaaggcgtcaggaggacagggcacatgggaaggtcgttagctgctagcaccgtgttcatcaggaaaggtcttattccagaaaggaggttaaggagagtggccgtgagagtgccatccgaaagaagctaaaccttgcacatcccaacacccaccccagggagagttcccgtgtgtgcctggtgtgtgggacgctttcgggacccatattgcactctgacttgcctggggctgttggcagtgtcacatcactgagtttatccaccgccatccacctctatccaccccataaggtccctacagcaagtgggacagcagaccttgtgctccttgctctaaacagtagagaatcgttaatagtggagcccaaaacaggcctcattccctacccttgactggtttagctgtggacatgacccacctctggccggaggagctgagctggtatctgctgggggcttcctgggaaggtttaccattttcatggaaatggttgacattacacatggtatttgtcatgccctagcatggactgtctcatactgctctggactatgtggtaataaaggctttattgtttaagccgcttaaaaaaaaaaaaaaaaaaaaaaaaaaaaaaaaaaaa

SEQ ID NO: 293259 - DNA, 1000 bp, Homo Sapiens
gggtctgcaaatgcaattaaatgaatttaagcagtctaaattgatcacccatgagaagtttgaaagtgcatgtgaagaactaaataatgcattacttcgggaagagcaggcacaaatgctattgaatgaacaggcacaacaactacaggaattgaattataaacttgaattgcactccagtgaggaagctgacaaaaaccaaactcttggagaagctgttaagagtctctccgaggcaaagatggagctgagaagaaaagatcaatctctgcgtcagctcaatagacatcttacccagctggagcaggacaagcgtcgactggaggagaacatccatgatgcagagagtgccctccgcatggcagccaaagacaaagaatgtgttgctaatcacatgagagcagtagaaaatacgcttcacaaggtcagagatcagatctcgctgtcatggtctgcggcaagtaggaatgacttcaccctacagctacccaaactgcacctggagacctttgcaatggaggggctcaagggcgggccagaggtggtagcatgccaggctatgattaaaagtttcatggatgtctaccagcttgcaagcactagaatcatgacattagagaaggaaatgacatctcatcgaagtcacattgcagccttgaaatcagaacttcacacagcttgtttacgtgaaaatgcaagtttacaatcaataggatcacgagaccattcaaatctctccattccttcaagagctcctcttcctgctgacacaactggtattggggatttcttaccattgaaagctgaacttgatactacttacactttcttaaaggagacatttataaatactgtgccccatgctctgacatcatctcactcctctccagtgactatgtctgctaatgccaacagaccaactcagattggattatgacttcatgaaattaaaaaatggaggaagagttaacagtacaattaaaattgttttgaatgggaa

SEQ ID NO: 293260 - DNA, 1000 bp, Homo Sapiens; identical to SEQ ID NO: 224376

SEQ ID NO: 293261 - DNA, 1000 bp, Homo Sapiens; identical to SEQ ID NO: 118809

SEQ ID NO: 293262 - DNA, 1000 bp, Homo Sapiens
tcatctgctgctgctgcctttggaatcatgtctaatctctgccaggcgttgctggcgactatatcttacccaagctgctggactagaagtgccacctgaagaaatgtctttggaattgccagaaacacatatagaagagaagtcagaattgcaacccacagaagtagaaagtagagacttgatgtcctcatcagatgagagcactatcttacatcttagtcatgaaaatagcatcgaagatctccagtatgtgaagatagataaagaggaaaactcaggcacagagtttggggacactgatatgaagtacttactatatgaggatgagaaggatttcaaggattatgtaaacttgggccccctgggagtgaagcttatgagtgtggagagcaagaaaatgcccattcattttcaagagaaggaaattccagtcaaactctataaagatgtcaggagcccagaaagccacatcacatataagatgatgaagtcttttctctaagacggaaagctgcaaaggaaacacaacttttccttataaatgttctttgggaactgaagtatatccgttgcccattttacttacactttggctcatttttaaaccagctgttatttctaaaggtcatatttacatttaaaatcaaaggtattcagctattcatttacttgcatggtatgagtgaccaaaacggaagcacgctttgtatttctacactgaagtattcagaagcatgacagtgggttcaaggtagtctctgaggttccttttcacacacaaaaaattcactgattaatctgtgattccagtatgaaatagttccattagaaatgtttctaagaaaaacttagaagtttgcatagcattgtctacacatctttccctctgaggatgctcaatgtgatagacagccagtctataatgcaagccaattctccgtagtttaaccctgtgtattagtctgttctcatgctgctaataaagacataattgaaactg

SEQ ID NO: 293263 - DNA, 1000 bp, Homo Sapiens; identical to SEQ ID NO: 118811

SEQ ID NO: 293264 - DNA, 1000 bp, Homo Sapiens
agcagcattcgttcactgcccccctacagtgacatccacgatccacttaacattttagatgacagtggtagaaaacagaccagctcgttttacacagacacatcatctccagttgcatgtcgaactccagtcctagcttccagtttgcaaaccccaattccttcttcctcatcccaatgtatgtatggaacttccaaccagtatccagctcaagaaaccctggactcccatggaacaagcagtagagaaatggtgtcctctttaccacctatcaacactgtgttcatgggaacagcagctggaggcacttaaaccaccaatgtgggagggggtgctaaaactttaaaaaaaatctctactgtgcaaatatcattattcactcagacttccataagagtaaataaaaatgaatatgcagtggctgacattgttttaaagtcactggtactatggacaactccatagtgaatggagatacttgcagagcttgtcatgcacactaagagtttaaaatgtgagctcattattaatcatagtttcaaaattatcaaataaaaccagtgaagatctgaagatgcaaacatttcaactatgaagatttacatttcactttctaatttattaaacatctgtgtgcctttttatctttggtttcttttaaaaagtatatttaatgcctttacaatacctttaatttattaggatctcagaatcattgtttactatcccttatttgacaaaaagtcaaatgtgtatgttctacctccaacggaaatgtttacaaggtcaagacttaattcaattcagacaagaccaaagttgcttgacttcaattcctgtgcattagtgtgatgatttctgtcacatagcagcattccgattctatgtaactgaatggagatgataagtgctttcccctctttatttaaaaaagattaaaaggaataaaagaaataaaaaaaaaaaaaaaaaaaaaaaaaaaagaaaaaaaaaaaaaaaa

SEQ ID NO: 293265 - DNA, 1000 bp, Homo Sapiens; identical to SEQ ID NO: 224378

SEQ ID NO: 293266 - DNA, 1000 bp, Homo Sapiens
ccacctagagctcacccaagcctgctccagtcccaggggcaggccattctgcaaaagcaggacctcacagaaacaagggctgggttgaggtcacccccttcagagttggttcctggccagatgggtaagaggcatttgtaattttaaaaatgtgaaacttgggtttggtgttttcttctaagtgcctaaataagcaagccaggctgttgatattttagccagagaaatcggcaagccaagattaacccgaatctgaagtttagaatcttgagtttgcatctgcatcatatcatgctgttttgatgaggaaacatttgccactgaggagttggagggagggcaagacgacagtgttaagtcagatcatttaatggtttcccctaagccctggaaaaatatttgaaagaatggcagcaaaaaggttaagaaagcaagccagatttactgcacaatatgcagtacccagtactactttaaatcccaagagaacagtgtgatgtctaatatatacaggtctatgaaaatactgtggaataagcccaggaaggttagatgtgtttgcaaataagttgcccaaagggtccccctctaagtaaaacaaatattcagaccacaggctttaatgtaaactgtcaaaaagtgggatgtggaggatttttgttaagtgtcaatcgaagttaaaaagcaagggtttttggccaggcgtggtggctcacgcctgtaatcccagcactttgggaggccgaggccggcaaatcacctaaggtcaggagttcgagaccagcctggccaacatggtgaaaccccgtctctactaaaaatacaaaaaaattagcccggtgtggtggcaagtgcctgtagtcccagctacttgggaggctgaggcaggagaactgcttgaacccgggaggtagaggttgcagtgagccacgatcatgccactgcactccagcctgggcaacagagcaagactccatctcaaaaaaaaaaaaaaaaaaaa

SEQ ID NO: 293267 - DNA, 1000 bp, Homo Sapiens
aactttgaacctgagctggttttcctggaattctttgaagctctcttaagctttgcattcatctgtgttactgaccaaatgactaaatcctatacaaatgttccagctgatgatgtgtctggaaataaacatgaaactatttatacaatactaaatcaggacgcccagaacaagagtcccagcgcggtcatgagccacgaatcggatgctgctcactctgacagtgccaggtcatcttccagcaagttagaactctcgcctgatgttaacaaaataaggaaatcagagcccaagatcaagaagtctgtaagtcatgaaagagtctccaaaatgaattttaaattgactggaaaagggatcacctttttctcatctgagagcaagaaatatgagagacccaaggatgatcgagaggaagagttcaacacgtgggtcaataatatgtacgtcttctttgtgaacacgctctttcatgcgtataaacgtgaagaagctatcaaggagaaaataagggcagacaggttacgtagcacagcacaggcccagcagcggaagatggaagatgacgaactggaagcaaggctgaacatcttcatcttgagagaggaagaggccaagagacatgactatgaggtggacatcacagtgctcaagaagccggcagacgtgtcatcctctcacctcatactggaccctcccaaggaggatgtgaccgtgtccccatccagcaagaccatcaccagcaagaagaagaaaaagtagagagacacgaggacacacacacaggcttaggatggcacgtgctgtaagatttcctgagcattacagttcttagcactgaactcgtcacagtgttttaacataccccttggcccactgcatctcaggtttcctacatggctggattacgggagttcgagaccagcctgggcaacatagtgagacccccccatctctgcaaaattaaaacatcagccgaccgtgaaaaaaaaaaaaaaaa

SEQ ID NO: 293268 - DNA, 1000 bp, Homo Sapiens; identical to SEQ ID NO: 224379

SEQ ID NO: 293269 - DNA, 1000 bp, Homo Sapiens
ggtaagtttatatgacctaacttaattgtagccatattctggtaccttccattttgaaaagtagaggttgcttaagcaagcaatggataataagagacttttcctgaggcacctgtttggaatctggttttctcagcggcagcttgacatgtgcacccttttgtattaaacactgcaagggtgatgcaggggagcaggaaagccatcctaaactcactactgagtacgattcagtatgttcctgtggatgtctgctgtgactaatataaatttcttgcagaatcagctacacttaattatgttgctgatagacaagcatccacgcttcagctggcactaagtgttttcattgtaggatcagcagcaggttaaagactgaacggttagtgaagacaaatgtcttaagaggctgcgatgtctaggttgggcttgtgacttcttagtggcctagccttcttgatggcaccttgaaagtgaacttctagaaatctacatttaaaaggcaaagctttaaaagcagagctagtctattctagttactgatgcaactaaaattctgtatttcttaagatggagccactgacgagatgtcacagtatagagcctgcagtctcaactcattgtgatcctaatggtctgggtgattggatggtttgagttgttagggattttgagtttttcattttattgcatatctgggttggatgttagactaaaggaaacccaggaatatttacctggtgttacatttaatatttaatgtaactggtctagcaacattaagggggatttctgaagccaactccggaggctgtgggctgcacattttgcactgtttttatatacttgtattcatatcctcttatcacctcagactcagacacaaggccttttacatggaaattttacaaattacttccatttatgtaaaataacgtcctgtgaccaagttgtttaaatggaaaataaagtgctttctttaaggaaaaaaaaaaaaaaa

SEQ ID NO: 293270 - DNA, 1000 bp, Homo Sapiens
ccggaactcctgcagagcccgacaggcctgaagatcgtggctgtgagctgccgggagaagttcgtccgcatcttcaacccgtcgcaggagagcacggccgacctgagcggcatggtgctgaagcagctggtgcgcggcttcccggagcgcctgtaccgcttcccgccgggcacgctgctggccccgcggcaccacgtcacggtctggggcgaggcgacccgcagcgccaagaagccgctgcgcgcgtcctcgagccgggagcccgttcccctcctctccatccgcggctgcgcgacgctgctcctgagccccaagggcgaggtcctcagtgagcaccggatcccacgccgcgagactccggccccgagggtcttcgccgacggcaccgacttgtccatcgaccgcttcccgctccctgaggccgggcccggcgccgacacccgcaagccgccgcgcccacctcgacccctgcgcaaaggccgggtgcgggagccccgggtcagtcgccggagaccagggacgcggggcctgctgcccccagtgagctcggggaagctcttccacgcgcgggaggggcctgcgcggcccgagaaccccgagatccccgcgccgcagcacctgcccgccatcccgggtgaccccaccctgccgtcgcctcccgcagaggccgggctgggcctggaggactgtcggctccagaaagaacaccgagttcgggtgtgccggaagagcgtggaccgtagctgccccctggtggccctgtcggtgcagaacacggcggagagcagattcggcttccgcttcctcagctgcctgccggtcaccgcggacacctgccgcggcgcctaggggcggaggagtggggccgggaccgcgagggagggcgcgggcgggcgccggggctgggcgggctgtgtccgctgcatcatttattgaaccaacgtggcctacaaagtaaaccgcatttctgtaaaaaaaaaaaaaaaaaaaaaaaaaaaaa

SEQ ID NO: 293271 - DNA, 1000 bp, Homo Sapiens
tgtgaaccccgagcaccggctctccagcctccaggacgtgcaggcagccccggcgctggccggcgtgctgtgggaccacctgagcgagaagagggtggagccgggcttcgtgcccaacaaaggccgtctgcactgcgaccccacctttgagctggaggagatgatcctggagtccaggcccctgcacaagaagaagaagcgtctggccaagaacaagtcccgggacaacagcagggacagctcccagtccgagaatgactatcttcaagactgcctcgatgccatccagcaagacttcgtgatttttaacagagaaaagctgaagaggagccaggacctcccgagggagcctctccccgcccctgagtccagggatgctgcggagcctgtggaggacgaggcggaacgctccgccctgcccatgtgcggccccatttgcccctcggccgggagcggctaggccgggacgcccgtggtcctcaccccttgagctgctttggagactcggctgccagagggagggccatgggccgaggcctggcattcacgttcccacccagcctggctggcggtgcccacagtgccccggacacatttcacacctcaggctcgtggtggtgcaggggacaagaggctgtgggtgcaggggacacctgtggagggcatttcccgtgggcccccgagacccgcctagatggaggaagcgctgctgggcgccctcttaccgctcacggggagctggggccatggatgggacaggagtctttgtccctgctcagcccggaggctgtgcacggccctcgtcacaaggtgacccttgcagcacaggccgcgggtgccccaggctcggctcaggtcttggaggtcaagggcatgggttggggtagtgggtggggaggtgaatgttttctagagattcaaactgctccagcaatttctgtagttttcacctctgagaattacaatgtgagaaccgctaaaaaaaaaaaaaaaaaaaaaa

SEQ ID NO: 293272 - DNA, 1000 bp, Homo Sapiens
atgctgggcacattgtttaatctccctgaacttcagctttctcttctgtaaataatagtaataacaaagacttccaagaattgtaaacagaacaaaatgagtgatgtgtgtagagtgcttcgtgccctttttgtatgtagtcatgggccgcagtagatattgaggatcactctatttgttctggatgcacagcctccctgaggatgctcttttcctcgggatgctcttttcctcgggatttctagtatcatcattcttgtgactactatccacacccttcagaaaagccatcattttctcctggattaatctctttcttgaattttgaattcccctaaaagccaaaacctccattctgtcagggcagaacagagccccaatgtttctaaagaaataacttacaaccagaaagtatcagtaaattcccttttccatgttgcttcattctctcaagcatgcatgaaatttagccttaataagtggttattgtccacttactaataactgcttatgaaaaccatgcctggggtctgcggtacaggcatacagccccaagaacagctccaacctccccttcaccttctcctccacctgctacctaacagccaaagtctgtgcttctccaagaggactgtaggaaccgttatcattgcaggaaaggagcctgtctaggctgcttcttccaactccatcccagtaatgaacttgaccctaagatgcaaggcgtctaatcccttgaacccgcttgaacccgcttgaacatatctgctggactgatgtcttctgcaggttgcagatcctgaccatgggctgcatgtgctgccggatggaggcagggccatgccctgagtgttttcttcacatggcaccagtagcgttgtgtgtgatttctgataaaattgtagaatagctaatgacatttgacatttgttcagagttttgcagttcacaaaacattttcatatgtcagtaaaaatagcgaggataatactaaccatgt

SEQ ID NO: 293273 - DNA, 1000 bp, Homo Sapiens; identical to SEQ ID NO: 220443

SEQ ID NO: 293274 - DNA, 1000 bp, Homo Sapiens; identical to SEQ ID NO: 224381

SEQ ID NO: 293275 - DNA, 1000 bp, Homo Sapiens; identical to SEQ ID NO: 118813

SEQ ID NO: 293276 - DNA, 1000 bp, Homo Sapiens; identical to SEQ ID NO: 224383

SEQ ID NO: 293277 - DNA, 1000 bp, Homo Sapiens
gggccgagagacaattaccaagagcaaaaaccactcccagttcctcattaatagcaccaagcgctctgactcaggggtgtaccgaaccttgcttcagaatgagtttggagaagcacgctatgacatccatgtgcgcgtggcagatttccctcggccccccacaaacctacggttgtttgaggaagtccccaacacagtgactctgacctggaaccacagcccagatgtgcaggaggacggtgaggctcactacatcatcatgaagcgggatgcaagcacagccacctggtacacggcagccgagcgtgtcttcagcaacaagtacacagtgacggggctgctcccaggcaggaagtactacttcagagtggtggctcggaatgaaatcggtgacagtgagccacttgactccagggacacctggctcatcaataaggaccagatccaggacctgagcgccaagctcaagccctacgagaagaaggactggcgccacgcgccgcgcttcgtgacgcccctcaagccacacacggtgctccgcggccaggactgcaccatgacctgcgcctcccttgggaacccgcggcccacagtgaccctctacaagggcgacgtcaacatcacggccaactccaagttctggtacaactccaccagcggcgtgtgcaccctcgtcatccccacctgcacgctcaaggacagcggcgattacagcgtgctggtggagaacgagctgggcaaggaccgcagcagctgcacgctcaccgtctatgacaaagatgataagtcagttgtagcatccatcaccgagagtctgcagaagaaatcaaagcacctcatgtgagctccagccaagcccaggcatcaggaggctgttatgatgtggagtttcttggcctgtcctctgcatggcccagtgtaggaagcccagtttgctctctggtgtttgttaatgtaaacattcagtgaagggatggggcaataaacgtaactcatcctt

SEQ ID NO: 293278 - DNA, 1000 bp, Homo Sapiens
gcccgcctggttgactacatgatttgtcagagcctcatttctgtcttggaagagcagataacctcttttgtggccaacatccttcaagccccaaggcagaaaccctttctctcatcagagctggtctttgatgatcatggtcaactgtctcatgtgccctgtgttgaaaatatgatccagactctaactggaggcctacagtctgtcaagacctctgccttgcaggtattctgaattgggcagagagctggctgtgggaattcccagttcctatcctctgagtaatcagaagctcacaacctggtttgaatccctcattgctttcccatttctgccccttctccatatcctggcatgaaggtagtgcagtctgcagacctgaagacctcctcggattccctgtattctgaaggtatttagggagacctaggcagggggtaggaaggctgaaggagggaaagggcacaagtacgaatggcatgggaagaaggcaggaggtccaggctatagagtcaggcactgggtgtggatggagcagctctaacctgggtactgcacatatgtgttgtgggtagaaaggtcagggaatgtttttgctcacaaattcacgtggttatgtgtatgtgcgtgcaatgagagggtgtatgaaagagtgtgagtacattgtccttccaaacctgattcatcccaaactctgtgaggtttttctccagtgccataattgcatttcatttactactgaattttattgctaagtaaatttgtacttgtttgaagagctctgcttgctcaacacttgctttatgtcatatagctctttttcatttcatatggattaattcattgtattgaaatattttatggttaccaattattattggttatcagtcttcacacttattaaccatcagcgtggaaacacatcttcacatttcccttatttaggatactaatgctgtcacaaataaaatcattaaatgcaaaaaaaaaaaaaaaaaaa

SEQ ID NO: 293279 - DNA, 1000 bp, Homo Sapiens
atagaattaacttttattgctattacttaggcatgtggcagatttatgctgtttaacaatactgtatttttcagacttggaatgtggaaatttagcaatttgtacaaaatatatacagtttcaatagcaaaattaaatttattgctttactctattttagaaaatcaaatgactgtaagttgttcagctggaatgctgttatgtatttaattacaacttggtgcagatacagtatattctcatcaactggaaggttattttgcaaaattccttcaatttcactcagtagctctttttttcttaatttgcaaagtctgctatagctatccaaattaaggtaccctttaatatgtactccttaatctggtaaatgtgatcagttaaaattgtcatctagatagcaataaagagtgatatgcttagagatagataatggattatttaaaacctgaatggtttatagagaagtcattataaattcccctcattttgcaggtgtaacagataaccagagaagctgtgtgactcgtacaaatttattcagtgtaataatatagtaaattcatgttaacagttggattaaatcctagctctctcttattccagtactatatcacttttaaaatcctgagcagtatgtagtaagagtatatcacagaatctttcattcttaaagagtttgcattggatagaattaagtattttaagtttaacatatttgaaaaatgccccccatacattgttattccaatagtaaggagcagggaaatatagcatcatttgctaaatagaggagatagatcttgaactgttattttttatataattaaaactgctattaaatgtgttgtcagtatttaacatttagttactgtctcattaatatttaattttgaggatgtacttgcatactgttgaagttgagtgctgttttgctgttaatgctgctgctttgccaatgaagaatgaaataaatttatctgaatgtatcaataacttt

SEQ ID NO: 293280 - DNA, 1000 bp, Homo Sapiens
ggtcaccggtgacccacacttcaacatcgtcatcactgactatagcagtgaggacatggatgttgagatggcactgaagaggtccaagctgcggagctaccagtacgtgaagctaagtggaaactttgaacgctcagctggacttcaggctggcatagacctcgtgaaggacccgcacagcatcatcttcctctgtgacctccacatccacttcccagctggagtcatcgatgccattcggaagcactgtgtggagggaaagatggcctttgcccccatggtgatgaggctgcattgtggggccaccccccagtggcctgagggctactgggaggtgaatgggttcgggctgcttggcatctacaagtctgacctggacaggattgggggcatgaacaccaaggagttccgagaccgctggggcggggaagactgggagctgctggacaggatactccaagcgggcctggacgtggagcgtctctccctcaggaatttcttccatcatttccattccaagcgaggcatgtggagccgtcgccagatgaagacgctgtagccggagggtgtccgcggggcccagcactccccgctctggactagcagtggctccccagggccctgctactgttcagggatggggagtggggtgacggctggaccccaagaggcctcgaagctgacggcccactccacctggagctgtcccctcacagaggcaggttccggggctcctgtctctgcctcctgggccttcagaagggaggactttgagagagaggccaggagggaccacttgctcagtcgagaacgggaagagctcctgagaaggacgggtcaggaaggagagatctgactgagcgacaccatcctcatccatgaaggtgcacgcccacatcccccaagcgctcctcacgccaagcgctgaccaccagaccctcttctagtggacatattttattggggggcggggattttaaaaacagaaaaccgaaactgc

SEQ ID NO: 293281 - DNA, 1000 bp, Homo Sapiens
acactgccaaaatgttaagttgaccaccgtgaaacttctctattggagtgtctgtttctttaagctgtgaatactgaaattatgccttgtctcctccccaccccagggggatgccgttttgcagtgtggacacgtgtttgaagcagttactaaactcgtcatgctggttaagaaggagaacattgtcaatgttgttcaaggaagtttacagttttttattagtccgggaaaagaaggcacaatagttttcgacactggaccggaagaacaagtctataaaaataaaaatggacaattaacagtggtgtcagtccggaggaagtcctgatagaggatgacgtctgacctctaccatcgccatttttgctccaactgaggaaactacaggggaagtggggattggatccagttagctacctcttcaaggtaccaggcccgcagcactaacagatcacatctgcaaccctgaacgtgcaggttggagaacgaatgaatacaaattttattgtaaaataaaaatgtatataaagcatatgagcacacaaatggacaataaatgccacagcgcaaaagcgtgtagcgagcctgccacgcttgtgactggggaggggctccgtataatctcacctttgcaagcgtttatttactgatgtatgcggccaccactgtgaccaccatcacttaccgattcaccaaaacttaggtaatatggtcttatttttgatttaattaaatatacgtgtagctcatgtatttcacagtttaatatgagaagtgctttggtctttatttagaaattgggtgatgtttttgtgcccagcaacatgctgtaggaatttaactcttgtttacatccattagcctcatggttttgcttcaagtctcagcttccaagaacctatcgatgacttactgtgcatggtctgagactaagtaaaggaaatttcctaaagctgtgaaatttgaattttgctttaaataaatggaactcacatgtgtc

SEQ ID NO: 293282 - DNA, 1000 bp, Homo Sapiens; identical to SEQ ID NO: 118814

SEQ ID NO: 293283 - DNA, 1000 bp, Homo Sapiens
agatccacaaggttgtctgctaaacctgctcctccaaagccacagccgaagcccagaaaggcctctgcaaagaagagagagaaggtacctacagagaagaagggaaaagctgatgctggcaaggaggggaataaccctgcagaaaatggagatgccaaaacagactaggcacagaaagctaaaggtgctggagatgccaagtgaagtgtgtgcatttttgataactgtgtacttctggtgactgtacagtttgaaatactattttttaatcaagttttataaaaatgcagattttgtttagcttttttttttttttttaagctatgttagtacacagaatacttcattgttgttttggggagaagggccatatgtcactaatagaaagcccctgaagctggactgatgtggggaaaacaccttttccttctggttttgagagacttcctcttgggtcccaggaagagggattccctgactttgatacacatggccaccttggtataaaagccttgtggtatggaaaaacaaattcgttttttatgtcctcttctctgtttctacctttcagaatggacttaaatcccttaaacccagacatcttctgggacctgacccccaataattggttaccagtgtgtcaggcaatctggactttgccctcaaaagagcagtggttcctgtttctaggttgtggatcttcagataaattctgtcattttcctttcacttcctgaaagccagggtcggttcatgaaaagctatgaaacagcatgctaaatgtgaaatgtcaaccctcactaaactttgccggttcagagcatcagatgaagacttcattgggttttacagtggctttctgatttttggtagtccattgaagaagggagtttgaaagttgttgtatactgttaacgattgtctgcccatgtcctgcccaaaataccatgattctttatggaaattatctttaataaagctggatacagtttggcttggg

SEQ ID NO: 293284 - DNA, 1000 bp, Homo Sapiens; identical to SEQ ID NO: 224385

SEQ ID NO: 293285 - DNA, 1000 bp, Homo Sapiens
cccagtaaagcaggtacggagtggaagttagagcagtccatgcgggaggaggcactactgaaagtgcagctgacacagttgaaggagtcatttcaacaactccaattagaaagacatgaatatgctgaacatctaaaaggagagagggcccggtggcagcagaggatgagaaaaatgtcgcaggagatttgcacattaaagaaagagaagcagcaagatatgcgtcgggtagagaagctggagaggagcttgtccaaactcaaaaaccagatggctgaacccttgcccccggagcccccagcagtgccctctgaggtggagctgcagcacctgaggaaggaactagagagagtggcaggagcgctccaggcccaggtcaaaaacaatcagcgcataagtctcctgaaccggggacaagaagagaggattcgggagcaggaagagaggcttcggaagcaggaagagaggattcaggagcagcacaagagccttcagcagctggccaagccacagagcgtcttcgaggagccaaacaatgagaacaagagcgcactgcagttggagcagcaagtaaaggagctacaggagaagcttggtgaggtgaaggagtcggaaacctccaccccatccaagaagggctgggaggcgggcagcagcctctggggaggggaggtaccaggccagaggcagcttccagcctgggggctggtgaccacagcaccccccagggcagtcctgtttcttgcttcctgcctctgacttttaaaggtgggtagccctgggctcctctcaggtctggacatcatcatcctagctagaggcatggagcccccaatcacaggggaagagacagtggtataacaggctccttatgccaggtgcagtggctcatgcctataatcccagcactttgggaggctgaggcaggagaatcacttgaggtcgggagtttgagatcagcctggccaatgtggtaaaacctcatctctactaaaattac

SEQ ID NO: 293286 - DNA, 1000 bp, Homo Sapiens
attgcacagaggattgtgctgagaaattatctctaagtctaggagaatatccttttgatgaaaatgaaacacagcaattaaaggacataagtgtgaaggagaataatcttgaagagcactggaggaaagcaaaggaaattctacacagaatagaacagcttgaaagagaaggaaatgaggaagaaatacaaagagaaaactatcaggataacatttcatctatgaacataagtattcagaatacatggaaacatctccatgcagatcggattggtcgaggtagcaaagcagaagatgaggataaaagccattctagacagttacagagttataagtcccatggagtcatgtctaaagcatgtacaaatgatgaccaaatgaagacaccgttaaagagcgcaaatccagtccatgcttgttacagggagagtgagcaaaataagactttatataaagccaagtcaagctgcaatcaaaacttacatgaagaaactacttttgaaaagaattttgtttctcaatcaagatccatttacattatgttcagatataataaataaagaagtagtcagttttctagcaactcccagttgttccgaaatgttgacgtataggtgctcaggttgcatagcagtagaaaaatccctgaatagccgaaactttagcaagctcttgcactcttgcccataccaatgtgatcgtcacaaagtcattgtggaagctgaagacagatataaaagtgaactaaggaaatcacttatctgtaacaaaaaaattctgctgaccccacgtagaagacaacgactcagtaatgaatctactacccctggaggaataagtgaatatatttaatttttaaatgaacttaaatttcatatatttctgagaaagaacagctgagtggttgttctcagtcttattattaatggatcttaaatgataaaccttgcctctgatgagggtcagaccttctaataaaagagactttcctcttcccttc

SEQ ID NO: 293287 - DNA, 1000 bp, Homo Sapiens; identical to SEQ ID NO: 118817

SEQ ID NO: 293288 - DNA, 1000 bp, Homo Sapiens; identical to SEQ ID NO: 220444

SEQ ID NO: 293289 - DNA, 1000 bp, Homo Sapiens; identical to SEQ ID NO: 118818

SEQ ID NO: 293290 - DNA, 1000 bp, Homo Sapiens; identical to SEQ ID NO: 224390

SEQ ID NO: 293291 - DNA, 1000 bp, Homo Sapiens; identical to SEQ ID NO: 118819

SEQ ID NO: 293292 - DNA, 1000 bp, Homo Sapiens; identical to SEQ ID NO: 224391

SEQ ID NO: 293293 - DNA, 1000 bp, Homo Sapiens; identical to SEQ ID NO: 224392

SEQ ID NO: 293294 - DNA, 1000 bp, Homo Sapiens; identical to SEQ ID NO: 224393

SEQ ID NO: 293295 - DNA, 1000 bp, Homo Sapiens
aggccttcgtgaaagggctgatccagggtgctatctatgcgggaattgtaattgcgctgctcttcctctgcctcctccctctcatagtgaaacatatcagaaagaagcaggcgaagaaagctgcagcgatcagagcaaaaaagagctctaaagtcagagcaagccaagaacttgagatgtctctgaagcctgaggaaccaggaaaacccgtagtcgccacattttctgagagccggatattggaaaagcaagataaacgagccagctaagcctgtggaacatgcctcatacctggagtcgccattatccctggaattacaaagatctgcaaaatttatagcgctcacagaaaccctggaggctgtaataaacctggagccccctggactctcctcagctcacaaaaccctctcaattcctacacatcccttgacactcattctccattgaataggtggttactcttagacctagtcttagaacctctgaagacacactttgtaatttgttgtttggctaaatgagaagaaatctgtgccaccctgggaaggtgtcaaaagaaggaaaaatacatgtgacaatatgaatcaagtccatcagcaagttacttttgagcgcctactgtgtgtcagtgcctgagatacacctacaagagcgccaggctttcaagccttcatatctggatagaatcccaacttcagtgcttggtggctgtctatctttggacaagatctttcattccccatcctttgaacatcacatgacccatatctgggtggagaatgggtgaaaagtactgttcagagatgcaggtgagaaaaaacatgacgatgggccctgaatgccaagattcattggagctttggagctttatcttgtaggaccttatcctgactcccttagaatgtaagttccaagagaacagggactttgtctgccttgttttctacttttatcaccagcacccagaatgatgcctaaaatacaataagatctcaag

SEQ ID NO: 293296 - DNA, 1000 bp, Homo Sapiens
cacagtccttcagcctccaattggtgtcagtacttaggaagaccacagctagatggacaaacagcattgggaggccttagccctgctcctctcaattccatcctgtagagaacaggagtcaggagccgctggcaggagacagcatgtcacccaggactctgccggtgcagaatatgaacaatgccatgttcttgcagaaaacgcttagcctgagtttcataggaggtaatcaccagacaactgcagaatgtagaacactgagcaggacaactgacctgtctccttcacatagtccatatcaccacaaatcacacaacaaaaaggagaagagatattttgggttcaaaaaaagtaaaaagataatgtagctgcatttctttagttattttgaaccccaaatatttcctcatctttttgttgttgtcatggatggtggtgacatggacttgtttatagaggacaggtcagctgtctggctcaatgatctacattctgaagttgtctgaaaatgtcttcatgattaaattcagcctaaacattttgccgggaacactgcagagacaatgctgtgagtttccaacctcagcccatctgcgggcagagaaggtctagtttgtccatcaccattatgatatcaggactggttacttggttaaggaggggtctaggagatctgtcccttttagagacaccttacttataatgaagtacttgggaaagcggttttcaagagtataaatatcctgtattctaatgatcatcctctaaacattttatcatttattaatcctccctgcctgtgtctattattatattcatatctctacactgcaaattttgggtctcaatttttactgtgcctttgtttttactagtgtctgctgttgcaaaaagaagaaaacattctctgcctgagttttaatttttgtccaaagttaattttaatctatacaattaaaaccttttgcctatcaaaaaaaaaaaaaaaaaaaaaaaaaaa

SEQ ID NO: 293297 - DNA, 1000 bp, Homo Sapiens
tgtatatagttttgcttttttttggtaggggacagagtctcactattatccagtgcagtggtgcaatcacagctcactgtagcctctaactcccaggctcaagtgatcctcccacttcagcttcctgagttcctgagaccgtgggcacataccccatgcctggctattttttttttttaatttattttttgtagagacagggtcccactatgttgctcaggctggttttgaacccctgggttcaaatgatcctcctgcctcagcctcccaaattactgggattacaggcatgaggcatcacagccggccagagctgctgcctttgacagtccctatgagctgggaaagtcaggatggggagacagaagacttctgtgctatggagacttggaaagtgacataacatgtttggctcagactccccgcctataaaatggaactaaaacactcttgttttaggttaagaaactagaacagatctttgacatctctaatgagccctagattattcctggtgtcagggagattaggaaacaccttcatataccgtactctattcttgccaaaaacctcaatgaatgcttaaagtaagatctattcatgaaactgacttcacattacttcctaaataaaagaaggctattcccacattgcccccagcactgtgtttgaacaccctggtgactaggaacacagccttacctaaagcagctccttagcagtgcaggtctaataaggtggaactgaaatctgactttgacctatgagtctcagacatctttaaacatctttaaacattaactaagggcttactcttctgagtgcccatctgaaggtacctgaacgtgtcgggtttcccactagaccatgatctccttggaagcagggacagtaacttccccctcttagcatttgcagagcctagcacagcattaggcctggagtgagagtttcctaaacacttgtctgacaaagaaattaataaaacactctaacattc

SEQ ID NO: 293298 - DNA, 1000 bp, Homo Sapiens
accagccactgtggcagatgggagccaagcttgaggactgctggtgacctgggaagaaaccttcttcccatcctgttcagcactcccagctgtgtgactttatcgttggagagtattgttacccttccaggatacatatcagggttaacctgactttgaaaactgcttaaaggtttatttcaaattaaaacaaaaaaatcaacgacagcagtagacacaggcaccacattcctttgcagggtgtgagggtttggcgaggtatgcgtaggagcaagaagggacagggaatttcaagagaccccaaatagcctgctcagtagagggtcatgcagacaaggaagaaaacttaggggctgctctgacggtggtaaacaggctgtctatatccttgttactcagagcatggcccggcagcagtgttgtcacagggcagcttgttaggaatgagaatctcaggtctcattccagacctggtgagccagagtctaaattttaagattcctgatgattggcatgttacccaaatttgagaagtgctgctgtaattccccttaaaggacgggagaaagggccccggccatcttgcagcaggagggattctggtcagctataaaggaggactttccatctgggagaggcagaatctatatactgaagggctagtggcactgccaggggaagggagtgcgtaggcttccagtgatggttggggacaatcctgcccaaaggcagggcagtggatggaataactccttgtggcattctgaagtgtgtgccaggctctggactaggtgctaggtttccagggaggagccaaacacgggccttgctcttgtggagcttagaggttggtggggaagaaaataggcatgcaccaaggaatcgtacaaacacatatataactacaaaaggatggtgccaagggcaggtgaccactggcatctatgcttagctatgaaagtgaataaagcagaataaaaataaaatactttctctcagg

SEQ ID NO: 293299 - DNA, 1000 bp, Homo Sapiens
actctggagcccaaggagagccctgaagtcttgtggagtttccagtgagtccagtcagggccaatgagtgaacttactagatgaaattgactggctaaggaggcattagggatctatatcttaggcaccttgcacaggccttctcgtttatttattttcatggcaataaaggaagtcattgttttttttttttttttaaataaggagtctctcttgctctgttgcccaggctggagtgcactggcttgatcttggctaactgcaacttccacctcctgggttcaagcaattctcctgcctcagcctcctgagtagctgggattataggcgtgcaccaccatgcccagctaatttttgtatttttagtagagacggggtttcaccatgttggccaggctggtctcaaactcctgacctcaagtgatccacctacctaggccttccagagtgctgggattataggcgtgagccaccgtgcctggcctaaaggaagtcattcttatctctatttcacagatgaagaaacagagcctcagagagattagtaccccacttgcaaagttaggaaatggggagctaggatttgaattcaggcttgcccaactcacattctatgacatcatgaggtctcctcagtgcataaggaagaactctacagcagcccaatcttcaggctagtgggattggttgcattacagagaggaatctcccagtcacggaccaaatacttgcaagttagaggctggcaggggggatttttatgctggagagagggattgggaagttgcactagatgattacgaagatcacatcccactctctgaactacaatcactgtgctccctgggggagatccttcatgttgagggttttgctgggttctcaggctagtgggggcattaggaacagacctctcattctctctcttgcctgtggctttggatacagagggtgatgatggggttattaatgtgtgtacttaatatagaaagatcaaggt

SEQ ID NO: 293300 - DNA, 1000 bp, Homo Sapiens
gtcctgagtgtgggaaaaccttctatgaaaagtcagccctcacaaaacatgagcgaattcacacaggggaaaaaccctatgaatgtaatgaatgtagaaaaaccttcagccagaggtcagccctcaccaaacatcaaaggaaaacacacaagaagaaaactattatcaacaccctccatgtgcagaaacctgcatcttcaaggcaaatttgtcaaacatcagcaaaatcatagggcagaaacactaagccctagaggtggtagatgctttctgcagtcgctacccccatgagaccttagagttcttttgatcctttccagagacctacttaacaactttatacctggttaacaattctttatattgacttatgtctgttcaaataactggtgtggtttctctctcctgactcaaccccgaatgacacattcccttgaaggggcagaacatcccgagacaagatgcaacggtacacctaaataaagacataaaatcttcaaagaaagataatgtccttcagaaaagggtttgtcagccataggcgcctggcccagggagggtcagagaataaaccccaggatgacatcctcagcagtgacaagagaacagaccaccaccatccatagcctggatgactgtaaagactcctgctatagactggataactgcttcatgtgccccctaccctccaccccactgcccattcatatgttgaaaactaatccccaatgtgattgtatttagagtggggcttttaggatgtgattaggtcatgagtgtggaaccttcatgaatgggattggtgcccttaaaaaaagagacttcagagagctcctttccccttctgccacgtgaagacacagtgagaagatggccatctgtgaactaataaggcagccctcattagacatcaaatctgatgacactttgatcttggacttcccagcccctagaactgtaagaaataaatatttgttgtttataaaaaaaaaaaaaaaaa

SEQ ID NO: 293301 - DNA, 1000 bp, Homo Sapiens
tatgcttcctcgtcaaagcaagaaaaaagtggatgccattatctttgaggcacaagatgcagagtataaacttgagtttgttccaactactaccacagaatatgttcatagcttattatttcttgatgaaattcaggaacggattgaaagccttgaagatgaggggaatatagtgactcaaatgtacaagcttatggaacaatatcaggtgcccacacctcctgaagactttgctgtttttgcaactatgaagccatccattgttgctgttcggaatgccattgataaatcagtgggtgatagagaatcaagcattaagcaattttgtgtgcatttgggtagtgatcttgaagaattaaacaacgaagtgaatgaagtaaaactgcaagcacaggtaagctaaatcattattttgtaaaaataatctatgcaaagttttactattacatttgtttattaaagtataatcaacagataaaaattgtatatatttacaatatataatgtgatgttttgatatacgtatacattgtgaaattgttaatcaagctaattaatgtgtccatcacgtcacatacatcattttttgtggtgagaataattaagactactcttcaaaccatttagagaacacatttaactgatgtagctttagttttttatagtatcattctaaccaatcaacaatgtctttgagctgctacacttaaaaattaatgtttcaaaatctctgtttaagtagtgaatacatttcagactatcacaaagcatatatgtaatattaaaattgaatttagccaattaaattctagtcctaacttgtatttattattttgaagagtgttttaatgacttgctagcacattttacagctattgtcacaattttaaagtttgcttaatacctgggtgatgaaataattcatacaacaaacccccatgacacaagtttacctgtataacaaacctgcacatgtatccctgaacttaaaataaaagct

SEQ ID NO: 293302 - DNA, 1000 bp, Homo Sapiens; identical to SEQ ID NO: 118820

SEQ ID NO: 293303 - DNA, 1000 bp, Homo Sapiens
attcaatctcacatcagacccctctcattttagtagcagcatagttaatacctttaagaaaaataaaaggtaaccatataaagtactaataatttaacaaatttccaaagcactgtaggttggttgtgcttgttttcttctgtgtttaacattccacatttctaaagattgtgggttgaaattattttttattgtctatttccatataagcatggcatctgcttgctttaactacctttatgcaattgaaaatataagaatttgtttttatttccctttactctcatttacctctttcatctttttcctctttccaacagagtcacacgtgtcatctttgtaacattttgttttactaggatttctttttacaaattttttcaatgtgagaggtggaatataaatatttctgtcacagttcctccaggtgacaggcaataaactcatttttgaaaggtagtataataactgagctgtaaacaatatgatttcactctggagacatcattattttttagcctctttttttcagtaaaagcaaactgtagaatactggttttggatcacctactattggtaacaaaagcagttctttctcaatatgtgggttacttttaaacatttagaaaattctcatccttaagtaaatttatttcaggacaaagttacaaatctgcaaaagccagtttatacttataaactaagattaagtaaaatagcatttattgatcacaatgtttcagtagatattaaatgatcagtttcagttattgtgtgtgcccattgatggtacttgaaatatgaaccagttatctaaggaacttatgagaaaactttggtttctcaaattatttaaaaaactgcacttgtgctatattagtgcagtcacttttgctttttgttttattgtctttactgttgcatgttttttacaaatcaagagtgtcatatttatgaattttaaagatatttaattcattattaaatctcagttcactcc

SEQ ID NO: 293304 - DNA, 1000 bp, Homo Sapiens
tgtagtatagtttgaagtcaggtagtgtgatgcctccagctttgttcttttggcttaggattgaattggtgatgcgggctcttttttggttccatatgaactttaaagtagttttttccaattctgtgaagaaagtcatcggtagcttgatggggatggcattgaatctataaattaccttgggcagtatggccattttcacgatattgattcttcctacccatgagcatggaatgttcttctatttgtttgtatcctcttttatttccttgagcagcggtttgtagttctccttgaagaggtccttcacatcccttgtaagttggattcctaggtattttattctctttgaagcaattgtgaatgggagttcactcatgatttggctctctgtttgtctgttgttggtgtataagaatgcttgtgatttttgtacattgattttgtatcctgagactttgctgaagttgcttatcagcttaaggagattttgggctgagacaatggggttttctagatatacagtcatgtcgtctgcaaacagggacaatttgacttcctcttttcctaattgaataacctggatcccttccttacaccttatacaaaaatcaattcaagatggattaaagacttaaacgttagacctaaaaccataaaaaccctagaagaaaacctaggcattaccattcgggacataggcatgggcaaggacttcatgtctaaaacaccaaaagcaatggcaacaaaagccaaaattgacaaatgggatctaattaaactaaagagcttctgcacagcaaaagaaactaccatcagagtgaacaggcaacctacaaaatgggagaaaattttcgcaacctactcatctgacaaagggctaataaccagaatctacaatgaactcaaacaaatttacaagaaaaaaacaaacaaccccatcaaaaagtgggtgaaggacatgaacagacacttctcaaaagaagacatttatgcagcc

SEQ ID NO: 293305 - DNA, 1000 bp, Homo Sapiens
gaccccagggcagagcccagagaagtgttccgtacccactgctgatggtttcccagagcccacactgagttgaagaacctattgttcttcttggcatccttcttatgctacttctcccatcgctcaaaggggttgcctatggctgggtgtgccctgccctaaatgcagcaccactttcaagcttagtaggaccattccaagaaaaccaggtttcttctccccataccacgttgtgcctgaagaacaagccttcccgtccttgcctgcatgtgagtcacttcttggctgtgcagcaggtcccccccctccccgcgatatgctggagggtaggattctgcagcctgtgttgctctctacctggcagcagactgtgcaggagccccaacctgtcctccaattccagcattcacagctgatgagcagtgcaggagcagggcgagaggaacagagccaatgatgtgtgggttacactgaggagccaaggacagggcctcaggtctcccccttacaaggcgtggctcatggcctgcattccagagaccaacatgatagcttttaattcagctgcatgacctgtgccttttaagccataaagatacctcaagcctagcacctcttgaaatccagatgttcatattagactcgaaaaaataggctccaggcctaggtgcccaggctatgatgagtctgcttttgaaggaggtagggaatgacatcttccttggacccaaagcttaaaagtaatgtatgctttgctgaccactgtttgttaggccttaaacaacattcactgtggtggtatcaggcacactgctatgtgcatcaattatttttttgctttccaaacagaatctctggggcacaagttttacactcaagctaagtataactttgtcatttcaggtaaatatgacaagtggtggagcatgaagttttctaatttgacttaatcctaataaatttttgttacaaagtaaaaaaaaaaaaaaaaaaaaaaaaa

SEQ ID NO: 293306 - DNA, 1000 bp, Homo Sapiens; identical to SEQ ID NO: 224394

SEQ ID NO: 293307 - DNA, 1000 bp, Homo Sapiens
tgtggtaaaaccttcagttataattcaaaactgattcggcatcagagaatccatactggggagaagccctttaaatgtaaggaatgtgggaaagccttcagttgtagctatgactgcatcatccatgaacgaattcacaatggggagaagccctatgaatgtaaggagtgtgggaagagtttgagttctaattcagttctgattcagcatcagagaatccacactggggagaaaccttatgaatgtaaagagtgtggcaaggccttccaccgcagttcggtatttcttcagcaccagaggttccacactggggaacaactctacaaatgtaatgaatgttggaaaactttcagctgtagctcccgcttcatagtgcatcagagaatccacaatggggagaaaccctatgaatgccaggaatgtgggaagacattcagtcaaaagatcactctggttcagcatcagcgagttcacactggggagaaaccttatgagtgtaaggagtgcgggaaagccttcagatggaatgcaagtttcatccagcatcagaagtggcatactaggaagaaactcatcaatggaacagggctatccgcagttaagccctactgtccctgcgccatcctctctcctctgcctccccaacatacctgctctgccctagccccaccagggcctcccttatcttcttcacatgcagtggtacttcctccctctgtgcctttcttcctgctgcttccctcatctgaaaaggccaacccttcacctgtccaaatagcacatttttttcaggatctcgcttttcctgggaagtcatcccttcagagcccgaatcctttgtctcactccctgtaagccccgtcacgttctcaaaatcctttgcacctcaagttagggattccactggtctcctgattgtgtctattgatattcctctggtcttgtcttgtataagttgttactgttttcctaacttcattttaaattctcacgcttaagg

SEQ ID NO: 293308 - DNA, 1000 bp, Homo Sapiens
cttatgaaatatggaaagacaacatgaacaactgctccttaatactgaagttcagagaacttataagtcgcataaactttcgtagaaaagggtgaaacggtcaagaaatctagaggtaaccttctccaaagagtgaaatatgtaaatatatggacgtttttcattgaatcaaaatggaagttttgccaaatgatcaaagtgttagtccaatggtatttaaatattaaaaagagatgattattataagcataatgtcagaattaatttgaacaaattataattaatgtaatatgattttaggaaggatgaaacactttatgagaagttaccaggctgaatgatttacatatatagtgctaatgtgtgaagagaaagtttaactcttcacccactatgttgtttttagttattttgggctgccatattgaattttttgtttgtttgttttgagaaggcgtttcgctcttgttgcccaggctggagtgcaatggcgtgatcttggctcactgcaacctcctgcttcctgggttcaagcgattctcctgcctcagcctcctgagtagctgggattacaggcatgcaccaccatgcccggctaattttgcatttttagtagagacggggtttctccatgttggtcaggctggtctcaaactcttgacttcagatgatctacccaccttggcatcctaaagtgctgggattacaggcgtgagctaccaagcccggctttttttgttttgacatggagtttcgctcttgtcacccaggcaggagtgcagtggcgttatcttggttcactgcaacctccgcctcctggattcaagtgattctcctgcctgagcctcccaagtacctgggattacaggagctcccaccaagcctggctaagttttgtattgccatattgaatttttgtttagaaaagatatgtgtttatgtttccagttttattacctttcactatttataataaaggaattctttatgctttatgtcc

SEQ ID NO: 293309 - DNA, 1000 bp, Homo Sapiens; identical to SEQ ID NO: 224396

SEQ ID NO: 293310 - DNA, 1000 bp, Homo Sapiens; identical to SEQ ID NO: 118821

SEQ ID NO: 293311 - DNA, 1000 bp, Homo Sapiens
gcatgggagatgggttttgaagagttccatctgtatctgaggcctgttcactttgaatttgcatcacacggggacagggcagaccagccacctcctgtgtttataacctctctgctggaggacagtggtcgggtagacagatattctcctactgctcttgtcttagccatctctgaggtggatgataaccaaattggcaaatttagtttttacacaaaggaagccattcttaagcttttgctgcattcaggagtggaaaatatgcaggtgactcttgcatgccaagctgctcagaaaaatgctttgatggcggctgtccagcaggtgtacttctattgcacccctcaagggagctgtcctgctaatgtcaaggtcagcctgcatgacagagaagccagaggcatctcatcacctccaccagctaatgtcaggctgcccctttcttccttccttttttcccttctccctttctccctttctttctcccctgccccctactttctctttcctatctctttatcttccttactttccttttttcttcctttccttgtttcctgtttgtgaatcaatgtatgaccaaatccttattggatttcttaattttcagttatacttttttctgtatttcttattttttggttattgagacataattcatgtgatataaaacataccacaggctgggcatggtggctcacacctgtaatcactgcactccaacctggcaacagagtgagactccttctcaaaacaaacaaacaaacaccatattatagtatataattcagtggtttttagtatattcacaagattgtgcaaccatcatcactacctaattccaaaacatttttatcactcactctcaaaagaaacgttgtacccattagcagttacttactttttctccctcccctcagtccctagcaaccactaatctactttctgtttctatagatttgcttattctggacattgtatataaatggaatcatacaac

SEQ ID NO: 293312 - DNA, 1000 bp, Homo Sapiens; identical to SEQ ID NO: 118822

SEQ ID NO: 293313 - DNA, 1000 bp, Homo Sapiens
aagcattaaatgaaataaagactcaatatagctgcactaatctgtgctttctaaatttactgatggacgtgaagaaagtaggttggcatggagtttatacaatttatggatcacactgatctgaattcagacagtgtgtgctcagataaaaatattgtttcctcccatgaggtttccaattttgcagagaagaatacctctgtttagctcattacttaacacaatgggtagctgggtggccttgcattctggaagtgaaatgacacaagaatgtctccactgcattctccagaggtaaagattctctggcacaaaatcacaaccaaggtggggttccaaaactatagaacaaatggcagcagccatgcagccagccttggttcgggtgggctgtaaaagcagaggttgtcctcgtgttatcagcactgacttcctgttgtggccacactgacagagatgagatggcagaaagcaggaaagagaccagagctgcaattgacagatggctggccaaagttgaagggtcagagactacaccaaagacttctcagaaaatacttgcctaggaggctctcacttggaaagatattcagggttgttaaacatatcctgttattaggaaaacgagagttttatctttctcttactcagaaagaaaaaacaaaaagaaaattagtgctcttaagaaaagctattttaatgttatccattataaaattagaaaaccttgaaaggcaaatgtttcttctgaccatttacactgagcttctttcattatctcatatgcaaccttgtggattgaaggtggagagtccttaggattacccaggaacatccctgtctgctccccctgctaggcaggaggagatttgaaaccacatgtgtctacttcatttctgtcacgggtaggacagtgtcatatactttgtaggtaactcaaagatattataggtaactcatagatattgattgaattaatgtttaataaaatgagaacacc

SEQ ID NO: 293314 - DNA, 1000 bp, Homo Sapiens
acaatggcgtccaagttcagcctttgtagacatatagagtgaacattacccttgctgttataggttttattctccactgagggccacagagcctcaccattggtttgccccacacacaacagggtaaattcctactcctttgtcaattaggaattttccaggcaatgtgtttacctcttgggtaaatacattactttcatcagtgtaacttaactataaagtatttttagaggatcagattatttgagtatggctgtgataagtctctccttaaatggaccttaacaaagtagaaagaaaacgttagcagacatttcagactaatgatgttttctttttttcaagtgggttatttagagttgaatagcaattacttaaagctagtagcaaaggaacattttctgtaatgatgtttatttatgccttttcattctataacattcagcatgtgacaaaggaattagagaaaagactagtcgaatctggagccatgcaattaatgaaatccatatgtttgaagaaatcgtcttatataactcccatgcttctgatatttcctagaacgtcttagattgaggtcattgtgcactattaacagagtcctggttaataatgtacaatgaccttaattcagcatgtttttaatgaatagctgaacttcatgcttataacatcctgactatgcttacaaatatttttctaaattgctggtctgtttgcagatgcattatcagtgcatgcaaaaaataagattatgcctcgtttaggattctctttcttgtaaagtccaatcactgctgcattaagataggtatgggaatgtgtaggcaaagtcacatatagtgacacacattggataaaaaatataaacttcagccacatgattctttcactcaaaaacataatgtggctctcctttatatctttttttaatgatttgcatagctttccattgtgtgtatgtgctataatttgttttaataaacccccactaattgat

SEQ ID NO: 293315 - DNA, 1000 bp, Homo Sapiens
tgctgaagactcaaactgggtgaataaggtcttcaagaagaacaagcaaaagacaagtggcaccagaaaaggcttcccaagacattcgggatccaaaaaaccaagcagcaaagtgcagtgagcatgtctaatgttccttaaatcccacggagaggagcagctttgggaactgtgttcagagagattccgaggaatagaggagagtgtaagggagtagggggtgcagtgggagattgggctttggaacagacacatccgacataaaattcctgctctgccacagctccactcagggatcatggttgggacacttgctctccctgagcctccatttcctgtaaaatggggatgataccacttcataaagttgtgagagttaaatgtgatcgatgatgtaaattgcttcatagaatgcagaatgtgtaatagctcacaataagtaggtattatgtttacatattatgtttgtatttatgctacttaaatacaaaactggacaggccaggcatggtggctcatgcctgtaatcccagcactttgggaggctgaggtaggtggaaaacctgaggtcaggagttcaagaacagcctgaccaacatggtgaaactccatctctactaaaaatacaaaaattaaccaggcttgatggtgtgcacctgtaatctcagctactcgggaggctgaggcaagagaatcgcttgaacccaggaggcagaggttgcagtgcaccaagactgcgccattgcactccagcccgggcaacaagagcgaaaccccatctcgaaaaaaaacaaaacaaaactagacaagtgagtgcctacgtgacactcaaatgttgccagcatacagttaagggccctagtcaatgtaggcctgcttcttatagctttttgactatattatgctgtctttgacttagtcagtcaacacttattgagcacctactaagtgccaaacactctcctggactctggcaaaataaaaaatgaattaaaactct

SEQ ID NO: 293316 - DNA, 1000 bp, Homo Sapiens
ggggctgatctggaagacaagtaacatcttccttttcttggtgctcgcctgccgtgctctaggtgcttttagagatgctggtctgtgtgctagggaagcgatgaaccatactgttagtctattaaacataactcaacctggctggctttccatgactaccaaacgctgggaatatgccagacctgtgcccgtggaagactctggcctcccagcacacctccaggaacaaactccctggcctgcaggatagggatagcagccccaaccgtcaatacaaagggattttactgagtgggctcatgggttctttaagttccccctcttaacgatcaacggtaattcaaacgtcccaaaaggagaaatgctttcttagcatatcttttacctggagtatttccccttctgcctttacagcaatcatgccagttctaccacttttgcaagaaagctccaagagagtcagtgtagctgaaactttgtcactgggtcacctatctagtccatatgtctgcaggaattatactgataaatggacaactcaccatgcaatcaatctcccgctctatcctgttccctgaccggcatggtttctacttcctgtcagcacaactaggacgtctggtttctgctgggctgccctctcatgggaagcctttaatcactctagctcaatatatcctctggggaccatcaacatttcctattaaagataactacacctggccgagcgcggtggctaacgcctgtaatcccagaactttgggaagccaaggcgggtggatcacaaagtcgggagatcaagaccatcctggctaacacagtgaaacccctcctctactaaaaatacaaaaaattagccaggcgtggtggtgggtgcctgtaatcccagctacttgggaggctgaggcaagagaatggcgaacctaggaggcagagtttgcagtgagctgagatggtgccactgcactccagcctgggggacagagctacactccatccc

SEQ ID NO: 293317 - DNA, 1000 bp, Homo Sapiens
tcttacctggaatttccactaaattcaccaatttatgatttgtgaaatctgattttactttttgaaaattttcatgtgaatttcccattttcagtgttgtagcacctctctcttcctctaagatcctccaagctcatcaaaagccatgatcttattataccagcagttttatttattcaatctttcaacaagtagttattgaacttctataatgtgccaggctctggagctcgccttacaccaaacagacacaatcgatccattcgaagtgtcgtaattacacattgagggaccaactagaccttttctcattgtaaacttggagcaaaagtaaattcattaaaataaatttacattatagtgccacaaaaaaatgaacagaaccagaaagcattttttacaaaaattaacagaacagtgtgatagaggggaaaaggatgtgagatcatggtgccctaccttcaatagggtggccagaaaacacctctctgaagaagcagcatttgagctgagacctgaagaacgaggagtcagtgatgcagagaacctcaggagatgccttccaatctgagaaaagaggtgtacaagcaacatggtgccggcacctgctcagcttttggaaaggactcaggaagcttttactcatgatggaaggcaaagcgggaggaggcacatcacatagcaagagtggaagcaagagagacgtcatgctcttttaagcaatcagctctcaggtgaactaatagagtgagaactcactcatttctgtggggagggcatcaagctatttataatggatccatcctcatgacacaaacactgctatctcccacctctaacactggagatgacacttgaacatgagatttggaggagacaaatatcaaaactatatcatatggtttgcagatattttcttccatccttgagttatcttttcattttgttaattgtttcctttgctgtgctgaagctttgtttaatgaaatcccatttgtct

SEQ ID NO: 293318 - DNA, 1000 bp, Homo Sapiens
ccgtatgttacatgaaactactgccaaaatcttagtaagattgttgttgaaaagattgttgtcttaagcattaatattgaatttatatagaagttaaatgtagatgataatgacatcattgatcttcctgtgtccgtattttcctacaatttggtgccttgtatctgttgctgattcacttttaccactagtgtaaaaataagtgaaaaaatatttttactttacatttttatatatcagagtaacataaattataaatttgtgtctcaaaaccacctgtgatggaggatgtgctaattgtaatgtcataggtacaaagtattttggcatgatgaaaagctcaatagctattgtttttcaatagcagattttatctcggctaccttcaatcacaagtaaaattataaagataaaaaacatctacataaacatgttggctgccaaattttttgcattggaaatactggaatctctcattaaagttcttggaacattatagtgatgccatgttagattaccttggagcttcataactttagctttttcctaaaaatatatgtttatgctgataaaaactattacatttatgggatattttgtatccatatagagtttttcagaattgttcattaaaatgctttttataagcttatattatttgtagaatatggcaaaagcatttacagctcatcatgtatctatctgctcctgttcacttccaaacctcttgtagttaggcaatgccatttgactacttcaagcagagggattgtaaacagaagtgattttctatttccatgttggactgtaaaaagttctgcatgaccctccagttttcttttgcctgtcatggtgacctgaaagcaagatgttccaaatggcatacttacaagacggatgcaacctgggtccttaggtcgctgtttagaagggacctgactggagtgctgatggacttgcagtaaactttttaagtgtaagaaataaactgttatgtgtt

SEQ ID NO: 293319 - DNA, 1000 bp, Homo Sapiens
tagaagatttagaaagatgtctttttattttaaacttttgttatgaaattgctgaaatgtttctttaattttcaatgtatagaaactgctttgaataaatttgttttcatttggaacgtcttttaaaaggaaaatataatgaggaaaaagagcctcacctacctacctattgacttttttccacacaaagctctgatgacagagatcattgacatttataaataatgtcatcaaaattgagtgtttgggagaataaatttggtaaaagcatttgatattgtaacttctttgttttgtttgctgcgtatcttcttatgccaggtatatgctattgggtatatttcaacttaaaattacactgaaacacaactaattgtatgagatttataacctaacttaaaggttgtaaattagtttctatgaaccaatctcaaatattttatgatcttctaatgaagaaactttaatttattttcctcctcctccttcttcttctccttttttcttttctttctttctttctttctttttttttttttttgaggcaatgtctcactgttatccaggctggagtgcagaggcacagtcagaactcactgcagcctctacatccctgggctcagtggtcctcccacaatcagcctctggagaagctaggactataggcctgtgtaaacatgcttcgttaattttttttttttttttttttttgtagagacagtgtttagccatgttgcccaggctgttctaaaccacctgggctcaagtgatccgcctgcctctacctcccaaagtgctgggattacagacatgagcagccatgcccagcctgtttttctgttcactataaaatattgaaaattaaggacagttgagtttgcttgaaaatgtaaatattttaattctgtgcttataatttctttcaactttgttagatttatgcttctgtaacacttttacagaaattttctgaagatgcaataaaactgttgaggaaagg

SEQ ID NO: 293320 - DNA, 1000 bp, Homo Sapiens; identical to SEQ ID NO: 224400

SEQ ID NO: 293321 - DNA, 1000 bp, Homo Sapiens; identical to SEQ ID NO: 224401

SEQ ID NO: 293322 - DNA, 1000 bp, Homo Sapiens
ctggcatctccctctgccacaggagaaggacgagtgacaagcatccctgccattggcctgtgcagcttcctcagtctgtttcaagttgctgttgcacagccctggggactgtgaccagcctacacagtctggtgggtccctgtgagctcttgctcacaggaacatggagcaggacattgctagccctacttgcccacccctcacctgcatgcaggataccctgacactgcgatgttctgcaggacaattgcaccgctttagagcttccaggaggccaagcattatggcaggtacttgtgagcagccaggtcaggctgggcatggtagcataggagatggtggtcctgaggtctaggcttctcaggtaaactgaagggtagccctgacctgtgtggacacacaggtgggtcataatgaggtagctaaacggttgtgccactgtgaatgtctttcctagtccttgggaaactgcctgccacgtcccaggtttggtgagcattgtgagtgctcacactctgctccactcgctcagttccactgcacatgcaggcaggtgtgccgagcaggtagggcttgctggcccctctgcaccagcaggcttcacttcttaggctcccaggtcggcccctggagactctggtttttaagaaatgcacacagctacagaacacacaaccttgcataaagagggtttgtggactcagctgaagaaatccaagtccaagacatatggaattaagcactccttccctcaaaatttcccctggtggttaatgtatcaaaagccatttcatctgatttcaaatagaagctgaaaattaagttcacacttgttagattttgtgtgtaacagtgttgtacctggacagtattagaaatttgtatgcttattctcttgttaagtgttttaaaatgtatgaaccaccaaaaaaaaaaaaaaaaaaaaaaaaaaaaaaaaaaaaaaaaaaaaaaaaaaaaaaaaaaaaaaaaaaaaaaaaaa

SEQ ID NO: 293323 - DNA, 1000 bp, Homo Sapiens
agactatgaaagtgatgacgactcttatgaagtgttggatttaactgagtatgcaagaagacaccagtggtggaatcgagtgtttggccacagttcgggacctatggtagaaaaatactcagtagctacacagattgtaatgggtggcgttactggctggtgtgcaggatttctgttccagaaagttggaaaacttgcagcaactgcagtaggtggtggctttcttcttcttcagattgctagtcatagtggctatgtgcagattgactggaagagagttgaaaaagatgtaaataaagcaaaaagacagattaagaaacgagcgaacaaagcagcacctgaaatcaacaatttaattgaagaagcaacagaatttatcaagcagaacattgtgatatccagtggatttgtgggaggctttttgctcggacttgcatcttaaggacatgaatattctcccataacggattcaactatgagaagagaagtggcagcaataaggcagtctctcaaaagtcatactgccagagtctctagggcaaggagaaacaactagctggacaatactcaattcacaacttagcattttgccatctgaagcttggcaaactagtatctgctgtaaaacaacctatatggtatgtgaaccgtagtattcctgagcaaaacgtggctttcatcgctttgtaaaaatttgcatctgtttagaaactagcctataaaatatcaccattggatgtagatatggagagaaaagaaatatgttgggtttattgcttagcgaaatattctctttttatttaaataaaatgttcttcattgtgttttatggtatgtgtccataatttaaaattcatgttatagtttcagtattaaagctgacttttttttttttaagatatgtttgcaataagttaaaaaactgtaatacccttttgtggaaagctttagaaatgatataattattaaagatattaaacaggcaaaaaaaaaaaaaaaa

SEQ ID NO: 293324 - DNA, 1000 bp, Homo Sapiens; identical to SEQ ID NO: 118825

SEQ ID NO: 293325 - DNA, 1000 bp, Homo Sapiens
tggcctctatttcttaataaattcttccaagaaataaagaacaatagtttcatcataatacattatgtttacctccatcatagttgcttttttcatagttcttgttttcatgttttatttttaaaaagacatataaagattgcatattttattatgacatttcctaataaacccctttgatttaaaaatgtatttttaaaaatgtttacattgatgatgagtaatattgcatgtgttttcaggtgatcagataaaatatattttgggaaattaacaaataaaaagtttttgatataacttcaattaattgtaccacatgctaatcctgaagagatgtgtagaattttggaaagggtctaattcatacatgcttaaagtataacctacgttagatagtttgttgtcaaagtctgttctagtaaagtgaagattcaagtcagttgttcatttacttgaagcaaaacgaaatctttcatttcagtcaaatcactgcagtcatgaaatactgaacaattgccttaagtctttgcttgactcactgggatagactgaggctttgggtgtgtctgtattagcatttcattagtacttcacatgcttttgatgtactcttgagattgctttaaattttgtattgaaacaacaatacattttgcactgtagtaatgggagcactaactcttacaacagttagtgaatcgttttaaagaatcagttcagtgtagacattttgaaaagattgtttcctgtgctttacgatagcttagtgcaatgtgcacttctgttttacttgccattttcctgctctgttttctctgtgacatgaagcaacagaaactgagatcaaagttaagattatatcctgtttgtagtatcagatatttttctgtgtacaattataggattgtaatctaaactggaatttttaggcagtaagtcaccacaaaatgttttagataagacacaataaaattattataaataaaagcttaatgtttgt

SEQ ID NO: 293326 - DNA, 1000 bp, Homo Sapiens
actagaagacagtggagccaaagaaaagcaagttgaaaaagaaagaggagacaatttaacgagccctaaaggcaagaagtgtgtcttctcctgcccatttctctctcccacagtacatcctgcattgaaccacgtgttgctggttactaaactttatggtgtcacaaaaagacaaatgattgtaggatccatggaagtgcacttaggcttgctgtggtggaggccatagtggagatgaaggctctgctctgaagctcttaattgtgtattcaccagtgggatggacaccctttcagcctaagcgtacgagtgaaaacaatgatgtcaaaagacaatagcaagtataggctactatttagggcaaaaggaatcttgaaatgaaagaaacagaactaaaaggctaactggagcataatccttacagttttgcactcaggggattaagtttgaaacatagtgtcttttggccaaattgaacctacttgtaatgtggaccaacttactttacacattttcatcagtcccaatgtatggaattagcttagttttctcatgcttgattaaaacaagacaactaaagctaatcattcctcttctagactttgtgtatatgatttaatcttttatttttatttttgtagaatgggggtaaaactacaaatctcctcctcagggtgatatttttaaagattaaggagtatgacatcaattaacagtctttaaagatgttacatacgctcaaagcaatgtgattaagactttttgcctatttcttgtataagttaaggcagccataaatgaaaatacaaaacaaacgtttgcttttgtatttgattcacaagaggattctccctgagtgtcaggggaggctgtgggacttcaccacgtggacaaacgaaagcacaggctactcagacttggccacaggtcataggtcagagaattttttcttcaaatgtagaaatgtaaattttcagcaataaaatatctgcatgcctac

SEQ ID NO: 293327 - DNA, 1000 bp, Homo Sapiens
gttgtcaaagtgcttccaagtatgaatatagtaatgtttggatctgactctaaaagttttctctataggagatactctccagtttaatgaatgtaattcttgttaaatggaaaatcttgtttttaaaatatgaaggtttagagttttgtttacttttgtcatgtaactggttctgtatttctatgcatgccaattatacacatctctatctgcatttttttttctattttaaccgctgaaggaatatgattatacaatgccatactcaatggtggcagcatttaatttaagtaatggagaagaattaaacattgtagctggatctgtttctgtagttgaggacaactgtgatgtaactttgaattaaacaaacaaaacaaaacagaagaagactatatatatattttttctttttttagagacagtctcactttgctcccaggctggaatgcagtggctattcagaggcttaatcattgggcactgcagccttgaactctgggctttttttttttttgagatggagtctcagctctgtcgtccaggctggagtgcagtgactcatgtctcggctcactgtagcctccacctcccccaatcaagcgattgtcctgtctcagcctccagagtagctgggattttaggtgtgcaccaccatgcctggctaatttttgtatttttagtagagacggggttttgccatgttggccaggccggtctcaaactcctgacctcaggtgatccacccgccttggcctcccaaagtgctaggattacaggtgtgagccaccacgccagcctgacgatgttttttacttctatcacttccttttgattttttcttatagcttctatctctgcttacgtcacccatcattcttgcgtgttgtatgcttttcgcattagagccctttgcatgttaatcagttattttaaatttatgatctggtaattctaaaatgtctgccataactgaaaaaaaaaaaaaaaaaaaaaaaaa

SEQ ID NO: 293328 - DNA, 1000 bp, Homo Sapiens
ctccatcctctgggttcaagcaattctcctgcctcaggctcctgagtagctgggattacaggcacgtgacaccaggcccagctgatttttgtatttttgttcatttgcttttgtttttgacacagagtctcgctctgtcgcccaggctggaatgcagttgtgagatctcggctcactgcaagctccgcctcccgggttcacgccattctgcgtcagcctcccaagtagctgggactacaggcacctgccacgatgcctagctaattttttgtatttttagtagagatgaagtttcaccgtgttggccaggatggtcttgatctcctgaccgcataatccacccacctcggcctcccaaagtgctgggattacaggcgtgagccaccacaaccgacttttttttttttttttttgagacagagactcgctctgtcacccaggctggagtgcagtggcatgatttcggctcactgcaacctctgtctcctgggttcaaacgatcctactgcctcatccttcggagtagctgggattacaggcaggtgccaccatgcctggctcatttttgtatttttagtagagagggcgttttgccatgttggctaggctggtctctgtccgtcctctgagctcaagctaagccatcatatcccagtgacctgcacatatacatccagatggcctgaagttactgaagatccacagaagtgaaaatagccttaactgatgacattgcaccattgtgatatgttactgccccaccctaactgatcaatgtactttgtaatcctcccacccttaagaaggttctttttaattctccccacccttgagaatgtactttgtgagatccacccctgcccgcaaaacattgctccaaactccaccacctatccccaaacctgtaagaactaatgataatccaccaccctttgctgactccttttttggactcagcccgcctgcactcaggtgaaataaacagccatgttgctcatac

SEQ ID NO: 293329 - DNA, 1000 bp, Homo Sapiens
ttattgaagtatgtggatgtacagtatttcaatagatatgaatatgaataaatggtatgccttaagattctttgaatatgtatttactttaaagactggaaaaagctcttcctgtcttttagtaaaacatccatatttcataacctgatgtaaaatatgttgtactgtttccaataggtgaatataaactcagtttatcaattaaaatatgtatttgactcattttaaaactctattagcttaagagaaagaaggaagaaataataatttgaagatatttctgctattctctttatttcctgtattacactcatctttctgcttactctaaagcagtacagggtaaaaattctagatgctacagtttcaaatgactccacactatattctttcttgctgttgctgattcctaaaaggtttgatgagctgaactacatctaaactaaaaataaattttctggaaacattttattattaattatttagaacctttacctggtaaaatacagcagagttagcaacagagactaaatatcctgttgataaaatcctgatgatcttacaggctaaacaactgaaaactcaaacgcttgtaagagccaggcagagtgtaatttcttaacagctgggtataaaacaacgggcacctgaaggtattcagatacaatttccttaaaaataccttggtttccaagcaaaacacgttatttggctgagaacctttagtttgtaaataccaaaccataatatacaaatgagatctcaagccaaatgaattttttaagccctctttcccatatctgttcatctatgatagtcaactgaataaatgagaacaatgtgatagataaaacaacaaagcataaaaaagattcatgcttggttttataagctattttgaaatataagtatcattgctattctgagaaatctatatacaccaaagccctccctccacaaaaaaactggaaatgttctaataaatgtctgatttccccca

SEQ ID NO: 293330 - DNA, 1000 bp, Homo Sapiens
cataatattgcaaataacataaaatcttaaaataattccaagctgagtcttctagattgagcagaaatggtgaaaggagtattgataacttggcgtatgtgatgggcccctcttgtttattttctatgtgagtcacattgacatgcgatcagtttgggaaatgtgatgaaaacaaagactagatgggtatgtgtgtttatgtgttgggtagggaggtgacgattgccactcataaaataaaggattttataaaataccttcctactgtgtatgtaggatttggggggatcttagggacctaatcgacttctttgcacactaaaaacatcagacaatgggacatactgactgaccagtctaggttgaaagataggcagccttacccagaacacaacattagcagctgggaaggtgtctgaggtccccaattacatatcccaaagagtttcttacttctgtttctgtcatttcccctctgttccagacagtcatcatttatcctctgttcttcctggactgttgctgtggtctcttctcatcttaactgtcccttccaaccaccctccacactgctgccagagcaatcttaaaaatgtaaactggccctattactcctgcttagaaccctgtagtgacttatcatggcctctgaaaaatctagactttcattatgcatacaagtcccttgtgtttttttgtttgtttatagacagggtctctattgtcacccaggctggagtgtggtggtgtgataatagctcaccttgacctcctaggctcaactgatcttcccacctcagcctcctgaatagctgggactaccagcacgctccaccatgccttgctaattattttttatacagatggagtctcactatgttgtccaggctggtcttgaactggcctcaagtgattctcttaccacagcctgccagagtgctgagattgtaggcatgaaccaccgtgcctaacataaggcccctatttaaacatttttctt

SEQ ID NO: 293331 - DNA, 1000 bp, Homo Sapiens; identical to SEQ ID NO: 224404

SEQ ID NO: 293332 - DNA, 1000 bp, Homo Sapiens; identical to SEQ ID NO: 118827

SEQ ID NO: 293333 - DNA, 1000 bp, Homo Sapiens
acagttcgcgctcaggagtcttcggaggatgtctcaggaggcttgccctttctggtagacctggctttaggtctgtctgtgttagcttgttccatgttaagaatcctgtacaatggaccagaaattaccaaagaagaagaagcctgtcaggagctattgcggtccaaacttttacaaaggtgccagtggcaggtggaggccaatggcgtgatctcccctgcccttactccgagcccctctccactgcctctgaccatagaggaagacagagaattcacctacccctctgatgtcctcgtgcctcctgttggaaactactttgatctgcctcggatcagactgcctccaggaatcatgataaagctcagggaaatttctgggcgtgctagacctcaatttagaccaagtataaagtatgttgctgtgtagtgttttacttttcccaatgggaaaaaaaagtttaaacaattgaaatgggtatatttcttctgtggtctagtaaatgaaactttaattttatgtttactccatgaatgttaaaattaactgagtctagagggcccaccaggcagtattccagactaggggctctcaaaatttggcccaccagtcagcagcattggcatcacttgggaacttgttggttcttggaccccattttgcacctattgaatcagaaggtctgaggatggggcgcagcttaacaagtttcccatttgactgatgcatgctaaagtgtgacaagtgctaggtttatctctagtattttgaccttctactagcagtcagcctctactttactttccagagtctagagacatgtgtttatttttgatgcctagagaaatggtgaggagttctctaatgtagaatgtacatacagttacaaatgtctgtggtattcttgcttaaagtcaagtctgttttgcaggcctctgctctgcctcctgaggcaggttttcagagagaaaactttagagaatatatgaaatttaaaatg

SEQ ID NO: 293334 - DNA, 1000 bp, Homo Sapiens; identical to SEQ ID NO: 224405

SEQ ID NO: 293335 - DNA, 1000 bp, Homo Sapiens
ccatggtctccgtattccaatttattatgaaacaaagttacatctgtgccctcatagctatgatgaggcctggagcatcacctatcacagctggctgaccttcgtgctgctgatctggtcgtgcactctttggatgattcgcaacagaagaaaatatgccatgatcagctctcccttcatggtggtttatggaaacctattgttgatattacagtatatatggagttttgaacttcctgaaattaaaaaagttccaggatttttagaaaagaaagagccaggagaacttgcttccaaagtaagtgaatagaatacaataaaacaaaacaatgacacaaaaccacaatcatcatcataatcgtatccaagagaaaccttataaaaacaggttccaaatattcactgctttgtaaaaatgaacaaacatgagactgtaagaaacagtttgcggtgcttagaggcctctataatttaaacatgaacatatattacaccatgatttagcttttacttaggaatgacaatgttttccactcaaagaaaacttgtataaatgtttttaagtataaatcctactagagtaaaaattaggtgtgaaaataggaaaatacagtgcaaaatgtgttaagggattataggactgtctttgattatcattttataaaacatgcttagtgcattagtgtcacagataagtattgattattcatgacgtttttctccaattctttcctaaagaacatttttagcagcaaaaatgaagtatgacacttgctgtttttcttctactgattatatgatatgttcttatctgagttagaatgttcatactcttctcattacttatttgctttcatgggccattttaacagttttatttcaaaagattaggtttcccaacttactgtttgttttgttaacagaatggcagactaaacacacattccctttgtgttaataatttagttttaagacagtaaaaataaacgtgtttatattg

SEQ ID NO: 293336 - DNA, 1000 bp, Homo Sapiens
ttgatttctcctacaaggaccacactgcctttgtgtttaatgtaatgcaatttgtgtaccttctaatcatatatctgcagttcctcatttttataaaactttgatatcatgccagtaagctagatgttgaatgtatgtaagtagcatttggtaactgctaagaggttacaaaaacattattggtaaaaaaaatttccttagttctgatctggttggataagattttatcataacttttctgggtctcaggctctgatgtttgaaaaagaagggaatatattgggttttaaaaaagtgtattgtgacttaaactgttataagttatccttccacagaacacatcagagctatcagtgctttgtacatttagatgtttttacttgattattgtttaagaaaaatatactgaatttatagaaagcaagtattctcctaattagcaaaagttaaaattttatctctaccattaaaattacaatagattttgataaataaccagaaaaaacgcctttttttttttcacacctagcaatcctcccgtttttattgtaaggactttcttttttccctaagagactttctgttagactctttatatatgagatgcttgtttaaatatggtggtctgtaacatttttccagctcatgtgaaaatggaaaattagaacctgaactagtatctacaacattgccaaagtccagggtaaagctaaaagttgataagtagacaatttattgttttgtgtgtgtctgtgtgtgtgtgtgtgtgtgtgtgtgtgtgtatggtgtgtatatgtatatatcacaaagttgtattttaaatattttaaataccctttcttttaatttaagggatgtcaaataaatgaaaggagtttaaaaatagccaaaataaatgagctataaaggcccataacatactaaaacaggcagtttcaggtatgtaaggaaaggaacattatacttacctagaaagtgagatccaaaaaaaaaaaaaaaa

SEQ ID NO: 293337 - DNA, 1000 bp, Homo Sapiens
agattactggcaaaagcaaccacaactgaaattgaaggaaacgccagagccagttacaaagacagaggacatccacctatttcaacagcaggtgaaagaagataaaaaagctgaaaaagttgattttcgtcgcctaggagaagaattctgtcattggttctttggacttcttaattctcagaatccttttctaggaccacctcaagatgaatggggaccacagcacttctggcatgatgtgaagcttaggttttattacaacacatcagaacaaaatgttatggactaccatggagcagaaatcgtgagccttcgtttgctgtcactagtaaaagaagaatttctttttctcagccccaacctagattcacatggactgaaatgtgcatcttctcctcatgggctggttatggttggagttgctgggactgtccatcgaggaaacacttgtttgggcatttttgaacaaatttttggactcatccgctgcccttttgtggagaatacttggaaaatcaaatttatcaacctgaaaattatgggagagagttcccttgctcctggaacattaccgaaaccatctgttaaatttgaacaaagtgatctagaggccttttataatgtaatcactgtatgtggtaccaatgaagtacgacataatgtaaagcaggcttcggatagtggaactggggaccaagtttgaggtagtggaaatgagacattgctgaacaaaagagaactgggtttacctgaccctctaaagcgctaagtactgtcagcctgaaaaaaatcttctatacagaaactcttccaaatactatatcagtaatgtctgaatgatttcagatgtgaaaattgacatattttagttgaaatacctttctggactacagacttacatatcatgtgaatacttacctatttctacccgagttgcagcaagtattctgaaagcttaatgcaaataaatcccactttagatcctaaaaaaaaaaaaaaa

SEQ ID NO: 293338 - DNA, 1000 bp, Homo Sapiens; identical to SEQ ID NO: 224406

SEQ ID NO: 293339 - DNA, 1000 bp, Homo Sapiens
ataaccagtttattgaaacgtgtgcattaacagagaatttaattttaaacccataatttctcctatccattaaaatattataattgttagtagtatgaaaccaacaggaaatgttttttaatcatttagtgaggtgattcatttgtttcatgggcaaacactatccaggaaaagccttgcttgcctgtttcccaaagagctctaagaaatagaatcaagtgtaaaatggttcagaccattcaggatttcttgtcactcttctcaaccccgatcttcctgttattactgatgtttgaaaccctgtcattagccccggcctggttaaagcccctcagagtcacctctcattcatagcaatagaattcaaccccaagtggttgatggtgtccccagcacagccgagagacctgatctctggattcagtgcttttagctcttcgagtttaccctaagataccttcgggcaatatttttaaccaacccaaaagctcttcaggtcatttctgaagaggacaaggtgaatcttggcttggaacaccatttttgggctcttgctactgaatgaatcagaaaggaattttttctgaagagcattagaaagtaaaggagatgttaaaataagttcttgaagtatgttttatatttatctaaaacactgattttaaaagtttacattcaaatgtgtattcaaaagaagtactgatttgtaattattatagtttgtgtgtatcatcccttttaaccgtgcctaacaactgtacttaaattttgttttctagtgtaacaaatgtttcccataagattttctagagccaaataatgggagtgaaaaattccttaagtgttatataagaaaatatattagaaaatcagctttggattatacgatttctaaaatatactaatacagaatcctcagtaatatgttttgaattggattttttctcagaactgttacataataaataatacatcaaccagaaaaaaaaaaaaaaaaaaa

SEQ ID NO: 293340 - DNA, 1000 bp, Homo Sapiens; identical to SEQ ID NO: 224407

SEQ ID NO: 293341 - DNA, 1000 bp, Homo Sapiens
tgccacctccagcctgcaggacggagccccctcccatcatcacacagtgcacctgggctctgcagccccttgcatccattgcagccgcagcaagaggcctccacttgtccgtcagggacgctccaaggaaggaaaaagccgcccccggacaggggagaccactgtgttctctgtgggcaggttccgggtgacacacattgagaagcgctatggactgcacgaacaccgtgatggctcccccacagacaggagctggggctctcgtgggggacaggacccagggggtggtcaggggtctgggggagggcagcccaaggcagggatgcctgccatggagaggctgccccctgagaggccacagccccaggtcctagccagccccccagtacagaatggaggactcagggacagcagcctaacccctcgtgcacttgaagggaaccccagagcttctgcagagccaacactgagggccggagggaggggcccaagcccagggctgcccactcaagaggcaaatggggagccaagcaaaccagacacttctgatcaccaggtgtctctaccacagggagcagggagtatgtgagtctccttcattgtgctgatggactaccagctggcagggccagggggtgggtgggcgtgaaagccctcccctccactggacagcactgccccccagctgagggaccagctctacttccacctggagttgcacagtctcaggctgggggcctcaggagaggtcacagcccctcagtctcttctccttcccctgcctgcaacaggctgcctgccccgccttccccaacacctcgctccatatgatagagcgtggcagctgggagcaggcccctgcccgtggtgggcccctaaagcaatagcaccgtaggccccctgccctcttagcacaagaggcccaggccctggcctggccttcgtgccctttattcattgtcaataaatccgctcagaccattaaaaaaaaaaaaaaaaa

SEQ ID NO: 293342 - DNA, 1000 bp, Homo Sapiens; identical to SEQ ID NO: 224408

SEQ ID NO: 293343 - DNA, 1000 bp, Homo Sapiens
tgaaattgagaagagatgatatcatgtgggaacagtaacaaaacagcaaaactgtcaccttaatgaactttgtcagtgagaccttgaattgtctaaagtggttttaatttaatataactttgtgacattttgaatcatgtttctagtttctataaaacatgaagttgcagtatttaaaaattaatgcctaatgacctggtgggttccaaataataaattaattgcttttttatttttcttattgattgaagcccgtaacctcatcttgtcttagaaacattgttggctttgcagatatcttaagctaaatttaagaaattgtactagattgacaatattcaaaattgagttaaatccaagctacaagtaccattcattccacttttcatttagtaggtttggaaccttaaaaaccaatgttcaatgaacagagttcagaaagatcatttagctttcctggtgccttctttctattttgttttagagctgtgaaatgtttttctcttttggaaaaggaaaaacttaatagttacacagttttgtgaagaagcctttaatccaagttttatgagacagtaggaacctatagctacttaatttttaggagacagtaattcagttgcagaagctttcctctgctattcccattctcttttacaaaactagttttttttaaaaaatcaatgatcaattttatcttactactttataacttttgctgacttttattctttgcattgtatgtaatgtccatcagtataaattgagactgtgaatttctaggacccacaaaagtggtattttttttttgtacaagaaagtatagaggaagaggaagctgggcattaaattacctcatccagcagaaattcacggtagtatggtatatttttattttttatattttaaaatcaataatgtcaaatgtcattgtgtatgcatgctttataataaatttacacttgatccttaaaaaaaaaaaaaaaaaaaaaaaaaaaaa

SEQ ID NO: 293344 - DNA, 1000 bp, Homo Sapiens
gtgcggcaagtccttccggtggcccaagggcttcagcatccaccggaggctgcacctgacgaagaggttctacgagtgcggccactgtgggaaaggcttccgtcacctggggttcttcacgcggcatcagaggactcacaggcacggggaggtgtaggggcgcccgaagcgtggggtgctgcgcctctgcgggagtactgggtcctgagggagagctgcagtgagaagttgctcttcagcctggaaaatcaacctgaattcagagaagccttcttagtcctcagagctccccagtcccccgagaagtttactgggaaaactgccaggtgggagaagcagagccatgggtacgccggagatggcgggggctctggagatggcgggggctgcgccccggcgccgggcatcctggggatgtgctgagagtgtgcgcgaccccggagccacgtgccaggccgggctcagaggcggagaagcctgcctggtgcccacagccgtctggctcagggactccaccctggccccgagtcgccgtctgctgggcctttccttcctggctctgcaccccatgctggctgcccggtctggcttcccttcttgtctctgtcttgggcgaggcagctgtgagcattgcacagaggcaaagaccctcctgcagcctctgcgctgggccgtagaaacaagagcctttgtaatactgaacctcattcaaggattaggagtggtggttaggtcagggccacccccagtgctgcaggaacggcctccacccagctctgttggtcagagcctgggtcatgcacctggagttgggagatcaagctgggtctcagggcagtgaggtggccatatccaccacatcgcatttcgtgggggaagaggtgacctctttgttttaaacttaaggtgtctgcttatccagccagaaataaaaatctgccagtggtgttcccaagggaagacccccgtgggaatggatcgggaaaaaaaaaaaaaaaaa

SEQ ID NO: 293345 - DNA, 1000 bp, Homo Sapiens
ctggatacagccttacctccaggtagcacttaattggtccattcacctagactgcaagtaagaagacaaaatgactgagaccgtgtgcccacctgaacttattgtctttacttggcctgagctaaaagcttgggtgcaggacctgtgtaactagaaagttgcctacttcagaacctccagggcgtgagtgcaaggtcaaacatgactggcttccaggccgaccatcaatgtaggaggagagctgatgtggagggtgacatgggggctgcccatgttaaacctgagtccagtgctctggcattgggcagtcacggttaaagccaagtcatgtgtgtctcagctgtttggaggtgatgattttgcatcttccaagcctcttcaggtgtgaatctgtggtcaggaaaacacaagtcctaatggaacccttaggggggaaggaaatgaagattccctataacctctgggggtggggagtaggaataaggggccttgggcctccataaatctgcaatctgcaccctcctcctagagacagggagatcgtgttctgctttttacatgaggagcagaactgggccatacacgtgttcaagaactaggggagctacctggtagcaagtgagtgcagacccacctcaccttgggggaatctcaaactcataggcctcagatacacgatcacctgtcatatcaggtgagcactggcctgcttggggagagacctgggcacctccaggtataggaacagcaacactcctggctgacaactaagccaatatggccctaggtcattcttgcttccaatatgcttgccactccttaaatgtcctaatgatgagaaactctctttctgaccaattgctatgtttacataacacgcatgtactcatgcatcccttgccagagcccatatatgtatgcatatataaacatagcactttttactacatagctcagcacattgcaaggtttgcatttaagttaaaaaaaaaaaaaaaaa

SEQ ID NO: 293346 - DNA, 1000 bp, Homo Sapiens; identical to SEQ ID NO: 118830

SEQ ID NO: 293347 - DNA, 1000 bp, Homo Sapiens
atcaagcaggggttcaacttcagaaagatgccagaaaaagatcttcatgagggcttccattacatcatccacgagctgacccagaagacccaggacctcaaactgagcattgggaacacgctgttcattgaccagaggctgcagccacagcgtaagtttttggaagatgccaagaacttttacagtgccgaaaccatccttaccaactttcagaatttggaaatggctcagaagcagatcaatgactttatcagtcaaaaaacccatgggaaaattaacaacctgatcgagaatatagaccccggcactgtgatgcttcttgcaaattatattttctttcgagccaggtggaaacatgagtttgatccaaatgtaactaaagaggaagatttctttctggagaaaaacagttcagtcaaggtgcccatgatgttccgtagtggcatataccaagttggctatgacgataagctctcttgcaccatcctggaaataccctaccagaaaaatatcacagccatcttcatccttcctgatgagggcaagctgaagcacttggagaagggattgcaggtggacactttctccagatggaaaacattactgtcacgcagggtcgtagacgtgtctgtacccagactccacatgacgggcaccttcgacctgaagaagactctctcctacataggtgtctccaaaatctttgaggaacatggtgatctcaccaagatcgcccctcatcgcagcctgaaagtgggcgaggctgtgcacaaggctgagctgaagatggatgagaggggtacggaaggggccgctggcaccggagcacagactctgcccatggagacaccactcgtcgtcaagatagacaaaccctatctgctgctgatttacagcgagaaaataccttccgtgctcttcctgggaaagattgttaaccctattggaaaataaaggagaattcctgcttgccaaaaaaaaaaaaaaaaaaaaaaaaaaa

SEQ ID NO: 293348 - DNA, 1000 bp, Homo Sapiens; identical to SEQ ID NO: 224412

SEQ ID NO: 293349 - DNA, 876 bp, Homo Sapiens; identical to SEQ ID NO: 31474

SEQ ID NO: 293350 - DNA, 1000 bp, Homo Sapiens
cccttcctcacattcccttccctccacctctccttaccaagcacccaaaagaggatttagaactagcagggtggacatcatctggttgtttctacttttctctgcctagcacaaaattgggagaaaactggagcctccatccgcagtcacacgtgtacagatctggggatttggatgtaggctttttctaacttctctctcagaagcttctacagaaacccttccatctgtagcctcaagggcccacctccaagggaaggcttaggcaatgatcctgtttctaccaacactgcaccttatcccaggaacctgccctagacctccagagaccatattttctctccctccatttctacccagacctccaggcctccttctggaatcatagaaccgtagaattggaaggaattttagaggttttctagttggagttgtgtccaacagaattcattaacaccagcctgggcttgtttttcctcctccctctggacttttttcatcttttcctccacctcaaaaaatacttacacacagattcttcttgtacaggcatcaaaaccaactcctctgcccctaaggctgtgtccctgtggtctccagccacccctaccccagtcactcgccccttcctcatctctggaatttggccaggcagtcccagaagactctggagtgacctcctttgcctaaaaagcagacagataggcatgccccaggccctgagtgagcagaggaggactgtagggtgagagggaaagaaaatgaaggtgactttcatggaagtttcatttcttttccccgattgtaccaactgcatgtacttttggcctggctgcaaggagcaatattggtttactctcgtatccttaaaaagttacagaactgtgtcttaagagaattatttatagttactataactgaattgacaaatgtcaacttaactgataaattatatttggtaaaataaagaggacgtttatttagaaaaaaaaaaaaaaaa

SEQ ID NO: 293351 - DNA, 1000 bp, Homo Sapiens; identical to SEQ ID NO: 118831

SEQ ID NO: 293352 - DNA, 1000 bp, Homo Sapiens
gagagtgtggcgggagtggtggagagcctgaagatcatcaccaaggccaagtccctgcgcattgccgagtatgccttcaagctggcgcaggagagcgggcgcaagaaagtgacggccgtgcacaaggccaacatcatgaaactgggcgatgggcttttcctccagtgctgcagggaggtggcagcccgctaccctcagatcaccttcgagaacatgattgtggataacaccaccatgcagctggtgtcccggccccagcagtttgatgtcatggtgatgcccaatctctatggcaacatcgtcaacaatgtctgcgcgggactggtcgggggcccaggccttgtggctggggccaactatggccatgtgtacgcggtgtttgaaacagctacgaggaacaccggcaagagtatcgccaataagaacatcgccaaccccacggccaccctgctggccagctgcatgatgctggaccacctcaagctgcactcctatgccacctccatccgtaaggctgtcctggcatccatggacaatgagaatgtgaggttcccctcgcaccctaccctgctgccccgcccagtctccccctgcagcctcctgtagcccgcctcatgcactgaccacagcccccaggggaggatggtactggatctggccccatcttctggcccttagctggtgccacttccctcctgtggcaatcccagtcctgcacgtcacaggagacagcggggggtggcagggcctggtgtgtgccgagcctgcctgtgtcctacagatgcacactccggacatcgggggccagggcacaacatctgaagccatccaggacgtcatccgccacatccgcgtcatcaacggccgggccgtggaggcctaggctggccctaggaccttcttggtttgctccttggattccccttcccactccagcaccccagccagcctggtacgcagatcccagaataaagcaccttctccctagaaaaaaaaaaaa

SEQ ID NO: 293353 - DNA, 1000 bp, Homo Sapiens; identical to SEQ ID NO: 118832

SEQ ID NO: 293354 - DNA, 746 bp, Homo Sapiens
cacagaacgaccgacggaccgagggttcgagggagggacacggaccaggaacctgagctaggtcaaagacgcccgggccaggtgccccgtcgcaggtgcccctggccggagatgcggtaggaggggcgagcgcgagaagccccttcctcggcgctgccaacccgccacccagcccatggcgaaccccgggctggggctgcttctggcgctgggcctgccgttcctgctggcccgctggggccgagcctgggggcaaatacagaccacttctgcaaatgagaatagcactgttttgccttcatccaccagctccagctccgatggcaacctgcgtccagaagccatcactgctatcatcgtggtcttctccctcttggctgccttgctcctggctgtggggctggcactgttggtgcggaagcttcgggagaagcggcagacggagggcacctaccggcccagtagcgaggagcagttctcccatgcagccgaggcccgggcccctcaggactccaaggagacggtgcagggctgcctgcccatctaggtcccctctcctgcatctgtctcccttcattgctgtgtgaccttggggaaaggcagtgccctctctgggcagtcagatccacccagtgcttaatagcagggaagaaggtacttcaaagactctgcccctgaggtcaagagaggatggggctattcacttttatatatttatataaaattagtagtgagatgtaacaaaa

SEQ ID NO: 293355 - DNA, 1000 bp, Homo Sapiens
atccgtggcagcggccgtggcaggctggctgggtaccggctgtcgctgacccaggagaagctgcctgtctacatcagcctgggctgcagcgcgctgccgccgcggggccggcagccatggccaaggacatcctgggtgaagcagggctacactttgatgaactgaacaagctgagggtgttggacccagaggttacccagcagaccatagagctgaaggaagagtgcaaagactttgtggacaaaattggccagtttcagaaaatagttggtggtttaattgagcttgttgatcaacttgcaaaagaagcagaaaatgaaaagatgaagagtcttgctgtgtcacccaggctggagtgcactggtgcaatctcggctcactgcaagctctgcctctcagattcaagcgattctcccacctcaccctcccgagtaggtgggactacaggccatcggtgctcggaacttgctcaaatctatagcaaagcagagagaagctcaacagcagcaacttcaagccctaatagcagaaaagaaaatgcagctagaaaggtatcgggttgaatatgaagctttgtgtaaagtagaagcagaacaaaatgaatttattgaccaatttatttttcagaaatgaactgaaaatttcgcttttatagtaggaaggcaaaacaaaaaaaagcctctcaaaaccaaaaaaacctctgtagcattccagcggcttgaccaatgacctatgtcacaagaggtggcgtgtaaggaatgcagccccctgaagacagcactacaagtctgggggagccagttttaacatcagtgcacagctgctgctggtggccctgcagtgtacgttctcacctcttatgcttagttggaactaagcagtttgtaaactttcatccttttttttgtaaattcacaaagctttggaaggagaagcaataaatttttgttttcaaatgaaaaaaaaaaaaaaaaaaaaaaaaaaaaaaaaaaaaaaaaaa

SEQ ID NO: 293356 - DNA, 1000 bp, Homo Sapiens
gaatgcagatgtggaaacaacttctgtgcatctcatcgttatgcagaaactcatggctgtacctatgattacaagagtgcagggaggagatacttgcacgaggcaaatcctgtggttaatgcaccaaagcttccaaaaatctaactcttcctctacatcttactgttctgcccgggattcgtattataatgacagaagaaatgttgtttagactattatttttgttcgactctaaaagatttgccaaataacaaaagcatacaatgcatactgttggagaacaagaatgctactgtattttacatctttatttcttggtgaaacaaaagttttaaaagtagttttaacaactttacactggaatgatttagctttgttattgcatgtcttgtgttaagtgttttgtatatgatattgcagttttactaggcaaatcttcaaaagatgcactttaggaaacgaaatatttcctaaataaccaggcttccacattgtacagaatgagcagtcatgtaatgaatggctctactcagattgaccatatgggttttttctttttctttcttttattcttctccttctttttttttcagaggtgggatgggtggagattttttaaaaatcccacgtgtgaaagtttactggctttattagcaagttcctttttacttcaagctactttttataaaaaagaacatttttccagtgtggtttttaacagataatacatttcttccacattcagattagattcggacatgaatccattctataaaacacatcgtgttcatgatagtgtatattttactactttttgaatgttaattttaaaatagaagatgtcccacttgccattaaatatagaagccaactttttaccttttgaaatatggctacatttaaaacaaaatctcacagctcggtttttcttatttgttgagtgctattaccaggagaaatacaaataaatattcaatttcattaaaaaaaaaaaaaaaaa

SEQ ID NO: 293357 - DNA, 1000 bp, Homo Sapiens
aggactcctcactgtcagcagcttctgtctccagcattgcaaagccctgatccagaccaagctctcggggccgcctggcagcaaacaggggaggctgatgacatgcagccgcttcctgaagaccccctcatgcggaggtggccagcacatcactattccaaggaaaaggatgttcactccacgcaagctcaaattgacactctttaatagcgacgtttgctaaaatcaggaggactttgtacctttatgaggaatttttcattttcttcctggctgggttgatgtggaaaccagagctgtctgtggagctgttttccagaccccaggcccattcctgggatctctccaacaggacctgtcctgtgttctgggcttgtctcgggtctgaccaggagatggaggatgtgtccttggcagagccaaggggagacagaggtttctggatgccatgacaggctgtcggggtccaggtggcactcatgggccccctgccccatgtgaatgctgctggcacctggtggggggttgcccagggatggaccctgggcatggcttctgggctgcttagtccagggggagcaacttgtggccaaatccatgagttcagaggaaaaggggaaggcactgaaacgtcaccagagagacagctgttgagaccgctcagaaaccctctgtctgtcacactctgccctggctgctgtgtggtcagggcaccatgagggtgtacagatgtgctgtgtcctcagagcctcgcaggtgccctcacttactgcctgggcccctgcccagcagcctcaaggacaggcctttgtccctcacggttgtggacaggaggtcgcaccactggcctgcgagagcctctggtgggcccgtggcttcccccagttatctgctaaggaaaactgtgctcttcgaagggcagagccaagaagtcagccctgacttttgtaaaattttactaaataaaaccacctggataagcaaaaaaaaaaaaaaaaaa

SEQ ID NO: 293358 - DNA, 946 bp, Homo Sapiens; identical to SEQ ID NO: 26221

SEQ ID NO: 293359 - DNA, 1000 bp, Homo Sapiens
attatctgttggattattggatataagacttattttcatgtactataaatatgaaaataactttgatttttaattgtgtagtttccatttcttagcttttgccttttaaatttatacttcagccaggcatagtgactgatgcctgtaatcccaacactttgttgggaggccaaagcaggaggatagcttgaggccaggagttccagaccagcctgggcaacatagtgagatcctgtctctacaaaaaaaattgtttttatttgtatttatatatttttatttttgtttttgttggtaggcgtctcgctctgtcacccaggctggagtctagtgtcgtgatcttggctcactgcaacctccacctcccgggttcaagtgattctctggcctcagcctcccaagtagctgggactacaggtgtgtgtcaccacgcccggctaatttttgtatttttagtagagatggggtttcaccatgttggccaggctagtctcaaactcctgacctccagtgatctgcccacctcggcctcccaaagtgctgggattacaggtgtgagccactgtgcctggccccccacaacatgtttaaacttagctaggcctggttgcatacacctgtgttcccagctactcaggaggctgaagcaggaggatagcttgagcccaggagtttgaggctacagtgagctgtgattgcaccactgtactccagactggataacagcaagagcccatcttttaaaaaaagtaaaaattaaaaatatacttcatggttcatgtcatagccctagagaatgaaaaatttgcagtagatagtcaataaatgaatcagtagttaaatattccttaaagtcaactgtatttcattgtgatttttgttttctttttatcattgtatcaaactatatggaaatcatatggttagatgtgattatttgataatgttagtccatttgaatccattttagatatttcacaattaaagaatatgaaacttc

SEQ ID NO: 293360 - DNA, 1000 bp, Homo Sapiens
ctgacctggctgtatgtccctgtggcccacacccagcctgtcttgctcattcatgcagcctcaacactggcctccaaagttcccttaacacttgcaaagtcctttttacctgtgcatttggacttgaggacactggtttctatcacaggtgagagccatgttcaatacctccagcaagctctcctggctccctgcactgtgcacgctcctcttcccaaggtcccaataccagcacctctagttagagttagggtcagggtcaggcctctcccaacatcccagtagtttctcctctgagacacatgggcaagagacaatttggagtcaagattttccatttggatctattttaaatcttttagaaatgcatttgaaacagtgtgtttgttttttcccttctagttaagggactatttatatgtgtataggaaagctgtctctttttttgtttttcctttaacaaggtccaaagaaagatgcaaaaggagatcacacccttgccccgctgagccccgtgataacaagtcactccagactaacctgtgtgccagacatttgtgcattgttgcactttgaggttattatttatcaagttcttgaaggaagcagaaagagggactcctctctccctccgtgtatagtctctatgtttgtgctagtttttcttttttttctctgtgtccagtcagccacagggcccgcctccctgcaggaataaggggtaaaacgttaggtgttgtttggcaagaaaccacactgactgatgaggggtaaaatggaaccaggtagagccactccgggcagctgtcacccattcagaacttctttccgcagctgaagaaatgttcagtaacctgtttgacgctaattaaaacagagcctgcaggaagtggggctaaagtggcattcagtgatcctgttctgtagacttttctttctttttttaaccaaatccaaaggatgttacagaaaagctagccactggtattttgttttgttt

SEQ ID NO: 293361 - DNA, 1000 bp, Homo Sapiens
cagaagtcctggcagggataagcaggacatcgactggaacgtatgctaaatgaaagcagacaaatttctattttcttacctgagcaaatattttattgaaactgcttatgtatgtcaaaggagcccacaacttcagctacacaactttttgtattgaaagaactcatactttttgtagcttttatttcacatttaatttaaagtgacttttagcactaaaatgcctagaagattttactccagacctataaggaaatgtttagtttttatgaaaaatgacaagtcgatggttaaacttctcatgtctttggtgctttggccctaatagcactggacaacaccacgaccacatggaaacatatttttggaagcaaaactttaattttatataacgtatgctatggagagctaagacaatttaaggactacttgttttctattttttttcttaataaaatggaatccactgtgttgaagactcttgatatcatgtgcttgtctaaccattttttgttttataaattagaataaaatatagttgtgataatggtcatcgaatggatttgtttggaaagctacatcttatttgtgaaatgttttttaaatcagagtaactatcaactgattcagctttttgttgttttgttcttggctataatacttgtgactcatgaagaattatgttgacaaacaggataaattccacatgcattttatttcccagtgagttgtataaactttatttttgttgaaggtcgtatgttaaatcaatgttacattcttatatcacttcttgagaaggaagttccgatttgaaattgtatcatttccttcaaaatgaagggcagtgcttagttaaataaaagattgatgatatcttttaagccatttcctcttcactatgtcttattaaaataaaacctgtcaagttcttttcaaaagatgctatgagcgtttccaataaaccatctattagagttcacaaaaaaaaaaaaaaaaa

SEQ ID NO: 293362 - DNA, 1000 bp, Homo Sapiens; identical to SEQ ID NO: 118835

SEQ ID NO: 293363 - DNA, 1000 bp, Homo Sapiens; identical to SEQ ID NO: 224415

SEQ ID NO: 293364 - DNA, 1000 bp, Homo Sapiens
ttgggatgaccctgttgatctgcagccttcttcagttagttcttcctataaccacctttatctcttccatttgatcaccatggcacacatgcttcagatactacttacagtagacacaggcctaccccttgctcaggttcaagaagacagtgaagaggctcattccgcatcttctttctttgcagaaatttctcaatatacaagtggctccattgggtgtgatattcctggctggtatttgtgggtctcactgaagaatggcatcaccccttatcttcgctgtgctgcattgtttttccactatttacttggggtaactccgcctgaggaactgcataccaattctgcagaaggagagtacagtgcactctgtagctatctatctttacctacaaatttgttcctgctcttccaggaatattgggatactgtaaggcccttgctccagaggtggtgtgcagatcctgccttactaaactgtttgaagcaaaaaaacaccgtggtcaggtaccctagaaaaagaaatagtttgatagagcttcctgatgactatagctgcctcctgaatcaagcttctcatttcaggtgcccacggtctgcagatgatgagcgaaagcatcctgtcctctgccttttctgtggggctatactatgttctcagaacatttgctgccaggaaattgtgaacggggaagaggttggagcttgcatttttcacgcacttcactgtggagccggagtctgcattttcctaaaaatcagagaatgccgagtggtcctggttgaaggtaaagccagaggctgtgcctatccagctccttacttggatgaatatggagaaacagaccctggcctgaagaggggcaacccccttcatttatctcgtgagcggtatcggaagctccatttggtctggcaacaacactgcattatagaagagattgctaggagccaagagactaatcagatgttatttggattcaactggcagttactgtga

SEQ ID NO: 293365 - DNA, 1000 bp, Homo Sapiens
ctcttggaggagagcagctcccactgtggggacacctgccaccctgcacactactgtgtgtccatcagcatgtgtcacagaaagtgcgtggacggatggccccggagctgctctgccctgaccctgcctcaccccccagcgcagggactttccaggtcatctccacaccagcccctcagccggtgaaccctctctcccatcaccgtctccacccagacccccacctgccccatggcccccatttcatgtctgtggctcaccagcttttccccagacccagctccggagcccacaggcgtggccgatgcagaaacctcaggaaggtgtgttgtgaatgttgggtgcacccacgttgcatttacttagcggggccaattcagatgcacaggggccacatgcagaatccagaagtttctggacaattttcagaagaataggctgcctcctccccacagcctgggggaagtaacagtcatcgcccagcagtgtctggcctgaacttacccagaacattctgcccccggaatgcacgtctgaaagagtggccagaaacgagtgtgccgggcaggaggccagccccatctcaggctcacgtgcctctgacaggagaccagccccatctcagactcacatgcctcgcggacagttggacgtggcctggggcccctgctcacttgagcatgtcgcccaccaagcttgtctgaggccacagagcagcgtcccagccctgttttccaggactggtgggtgccccagtccacggccctgccccacccgaactcctgcctcacggtgtggccttgtgcatccccatggcctgaccccgggaacagtcagaggaaggggtcccgccctcccgccagaggcctggacccaagggaacggcagtcagagactacagtccagacgtttgtgtctaggccttgctggtagctaaggaaatgccttctgttgggaaaaggtcaaatttaacatagcaaaatttttacttaattccact

SEQ ID NO: 293366 - DNA, 1000 bp, Homo Sapiens
cctgtcagccttcatcatggtgaagaatgctgagatgtccaaggagctgctgggctttaaaagggagctttggaatgtctcaaactccgtacaagcatgcgaagagagacagaagagaggctgggattccgttcagcagagcatcaccatggtcaggagcaagattgatagattagagacgacattagcaggcataaaaaacgttgacacaaaggtacagaaaatcttggaggtgctgcagaaaatgccacagtcctcacctcaataaatgagaggacattgtggcagccaaagccacaacttggaagatggggctgcacctgccaacgaagacgggaaatgaccccccccccagcctagtgtgaacctgcccctcgtcccacgtatagaaaaacctcgagtcatggtgaatgagtgtctcggagttgctcgtgtgtgtgtacacctgcgtgcgtgtgtgtgcgtgtgtgcgcgtgtgttcgtgtgtgtgcgtgtgtgcgtgcgcgtgtgtgtgcattttgcaaagggtggacatttcagtgtatctcccagaaaggtgatgaatgaataggactgagagtcacagtgaatgtggcatgcatgcctgtgtcatgtgacatatgtgagtctcggcatgtcacggtgggtggctgtgtctgagcacctccagcagatgtcactctgagtgtgggtgttggtgacatgcattgcacgggcctgtctccctgtttgtgtaaacatactagagtatactgcggcgtgttttctgtctacccatgtcatggtgggggagatttatctccgtacatgtgggtgtcgccatgtgtgccctgtcactatctgtggctgggtgaacggctgtgtcattatgagtgtgccgagttatgccaccctgtgtgctcagggcacatgcacacagacatttatctctgcactcacattttgtgacttatgaagataaataaagtcaagggaaaaaaaaaaaaaaaaaaaaaaaaaa

SEQ ID NO: 293367 - DNA, 1000 bp, Homo Sapiens
taaaaagttacatggggcttttttggttgtcctaaacttacaaacattccactcattctgtttgtaactgtgattataatttttgtgataatttctggcctgattgaaggaaatttgagaggtctgcatttatatattttaaatagatttgataggtttttaaattgctttttttcataaggtatttataaagttatttggggttgtctgggattgtgtgaaagaaaattagaaccacgctgtatttacatttaccttggtagtttatttgtggatggcagttttctgtagttttggggactgtggtagctcttggattgttttgcaaattacagctgaaatctgtgtcatggattaaactggcttatgtggctagaataggaagagagaaaaaatgaaatggttgtttactaattttatactcccattaaaaatctctaatgttaagaaaaccttaaataaacatgattgatcaatatggcagatgatttacagtccattatatgacatttgtaagccactcaacactagccttacaaggttcatgaaaggaggaaaacattaattctttctgcctttgctgatataatccacatagtaataatttaagctataatttatttttaaaatgagtgcctcttgggaagcttcttttctgttctaacagttccctgttaaaatgaaaatcttaggccagtgcagtggctcacacctgtaatctcagcactttgggaggctgaggtgggtggatcacttgaggtcaggagttcgagaccagcctggccaacatggtgaaaccctgtctctactaaaaatacagaaaaattagccagggttggtgcatgtgcctgtaatcccagctactcaggaggccaaagcaggagaattgcttgaacccgggaggtggaggttgcagtgaaccaagatcgcaccactgcattccagcctaagcaatagagcgagactccctcccaaaaaaaaaaaaaaaaaaaaaaaaaaa

SEQ ID NO: 293368 - DNA, 1000 bp, Homo Sapiens; identical to SEQ ID NO: 118836

SEQ ID NO: 293369 - DNA, 885 bp, Homo Sapiens
atgcgcagcgcgcgctctacggcgctgaaccggggcgagcagagagctgtcagatactatagccatatgaagttgaacatggcagaagaagaggactatatgtctgattccttcattaatgtccaggaaaagtggcattggtcatgaggcatcattaaaacggaaagcagaggaaaaattggaaagctacagaaaaaagattcacatgaaaaaccaagctgaagaaaaagctgcagaacagtttcgaatgcgacttaaaaataagcaagatgaaatgaagctagaaggagatctcagaagaagccagcgagcctgtcaacaactggatgtccagaaaaatattcaggttcccagggaagcatggtactggttgaggcttgaagaggagactgaagaagatgaagaagaaaaagaacaggatgaagatgaatataagagtgaagatttaagcgtactggaaaaattacaaatattgactagttatttaagagaagaacatctatattgtatttggtgtggaacagcctatgaagataaagaagacctatcttcaaattgtccaggaccaacttctgcagatcatgactaagattattcccaataaagtggaaacttgaaaaatgttattacttcctagggatagacaatttagcagttggaaatctcaaattttttatgccagtaaagaaagggggactttatataatgttttgttctttttgtactttagaatatgaatgttcattgacttgaaaaaaataatgcaatggcatttcagaacacaagtatcacagagatggacagttacaatttattgctatattgtgatacgtgaggggtttaaggacaccaacaggtaacttcttattcccctcttcactttgg

SEQ ID NO: 293370 - DNA, 1000 bp, Homo Sapiens
gcaaatctctgatggtggcttccagggcttgtgggctagagagagccacttacaaagtcgatcttgagagacctggccacatgcagctgggctgagtgatgtcagcgagactaaagacaaagttctgagctcctcatcaactacaaaatatgaaatcagcattccaggttctgggcttctccccatgtcgtaattgaacagaaggcagcccgaataaacccctgatgttagagaggcctggggagagcagccgatggggctcagactacatatggcaggccgatcagagctcttgtggagcgagggcttgagagcatgcttgtgagatggcaggaggtggggtgtgcttgtgtggagtgtgcgtgtgcaggcagtgtgggtgcatggcagcgtaactgtggagtggatgggctctgcatgtaaggggtgatgcatgatgggcagatgctggacatttgaggagccgtctttcttggcctgagctatgcctgttgaggcatctggagactgagaaagaatcaaaggcagagaagaccagccgtgctcctgcattccgtcactccatgacttcatctcagtgtcacagacagctgccatcagagggctggcagtagggagttccaggagcggggacttctcgggaaaatcctataacttgctttactttactttgtcccaggttggagtccctaccctcccacctcccacctgatatgcagtgcttttgactatcttatgcatggtttattcctctggcttggatgacaacaatacccatagtcaattttcctatgtaactatagatcaaatgatgcaacaacaggccttgggaggcctcaggtgtgcgagtgcctctgggaggcgcagatgcccacacagccagcactgacttgtgttcgagcacagaacggatataatcagtctggcctctacaacaagttttgcattgtagaattgtatttagctttgccttggatgaaataaaaattatgtttaataa

SEQ ID NO: 293371 - DNA, 1000 bp, Homo Sapiens; identical to SEQ ID NO: 224419

SEQ ID NO: 293372 - DNA, 891 bp, Homo Sapiens
aagctccaaagttaaaatgcggagcagtggcgcatatcagcagacggcggtcactactgtggctcatttaaatctgtgttcagctccgggcctcttttttcaggaatccttgtttcgggacacccagtggacagcgaaaggagagaaaccaccacaggcaaacggccggaaagccgcgcagtcgcagcccgcgcgcttcactccgcccaaataagccactaccgtcaccaaccccatctcgttcgcccgcaagatgctcacgcgaaaaacccactcttcagtgtctgagaccactccgcagctttcggcctcggtgagcgggtgaactaaacccgggaaaccgctgaaagaccccagcttcgactaggcctagtcgtagcggcggccagcgggagggcgtagccgtagtcttggcccacgtcattctgtgccccgggtcaggtcaccgcccggagggtatgggaagagaaatgaagaagactggtactcccagacccttccgtatcgaggaccccaatcaacaacccacctggcatgatcaaccagagatggggtcccactattttgcccaggctggtcttgaactgctgggctcaagcaatcctcctgcctcagcctcccaaagtgctgggattacaggtgtgagccactgtgcccggcccggagaacatgatcttaaccatactgtcttccaagtgaaagattctacctttctaagacatctggagtcagacagacctgagttcaagtcgtgccttcctccccactttactgaaccttcagtgagtctttctacctcagaaggctgtgaggatgccatggggtaatgaatgtaaagtgtttaagtgcttggctgacactgagtactaaataaatatcaatttattcttc

SEQ ID NO: 293373 - DNA, 1000 bp, Homo Sapiens; identical to SEQ ID NO: 116358

SEQ ID NO: 293374 - DNA, 1000 bp, Homo Sapiens
tcgcgtcatcactgatctaagcagtggcatctgagtgggcccagcacatggccatagaggcccaggcaccaccaggagcagcagccagcaccacctacacaggagtcttcagacccagagaaggacggtgccaagggccccaggggcagcaaggccttggtggagcagccagagctgtgcctgctcagcagccagtctcagagaccagcactcagcctcattcagcatgggtccttgatgccagagggccagcaggctcctggctgtgcccagcaggcccagcatgcaggtggtgggacactgggcagcaaggctgctgccggaatcacttctccaatcagtgtttggtgtattatcattttgtgaatttgggtaggggggagggtagggataatttatttttaaataaggttggagatgtcaagttgggttcacttgccatgcaggaagaggcccactagagggcccatcaggcagtgttacctgttagctccctgtggggcaggagtgccaggaccagcctgtaccttgctgtggggctacaggatggtgggcaggatctcaagccagccccctccagctcatgacactgtttggcctttcttggggagaaggcggggtattcccactcaccagccctagctgtcccatggggaaaccctggagccatcccttcggagccaacaagaccgccccagggctatagcagaaagaactttaaagctcaggagggtgacgcccagctccgcctgctgggaagagctcccctccacagctgcagctgatccataggactaccgcaggcccggactcaccaacttgccacatgttctaggtttcagcaacaagactgccaggtggttgggttctgcctttagcctggaccaaagggaagtgaggcccaaggagcttacccaagctgtggcagccgtcccaggccacccccatggaagcaataaagctcttccctgaaaaaaaaaaaaaaaaaaaaaaaaaaaaa

SEQ ID NO: 293375 - DNA, 1000 bp, Homo Sapiens
ggagatgacagatgttctacccagccagcgctataacgcccacatggtgcccgaggatgggaacctcacctgctcagaggccggcgtctatgtcctacgcttcgacaacacctatagctttgtccacgccaagaaggtcagcttcacagtggaggtcctgctccctgacgagggcatgcagaaatatgataaggagctcacccctgtctaggtggctccctcatttctcagagacctcctaaccctttgatttctctgtttatatcctacactccctccctccctgaaattgattgttagtcctcctgactctgtgacgttagtgagtacagaaagagatgccctggggaaaactcatctactgtggtcagatcaagaaaggtatgagaggcacaaccttggagggtaccaaggttgcagaagaggaaaaagcaagggtaaaggcaagaagtgggtgtcatgaaactcaataaatagcaaaatgaatcccctagcctttgtcctcacctaccctaaggcaggtgtgtatgcttgaattccttccgtatggctgtgagcaacttgggttggagacatatctaaatcctttttacttccactccctatatatagtagatgctcagtgtatatttgtggcattgaatggaggaccagaaggtagggtgcaggtgactcaacagctgtacatgattaggaggagcctatgtggggtggatttcagcaccttggacaggagcagatgtgtggtggggttggactctcttctggagacccagacaattcagtctccagatttctggcagtggctgtcttttgagggccccagccacaaaggccacatgcctctgataggagctgcctacatcaggctttgtctgacttgcacgctcagcttcccaccctaacccacttcccttgttgcacatagcttatgttttagggactttcctggaagcaaaggcagtcacatctggcataatcataataaagaaaacaacta

SEQ ID NO: 293376 - DNA, 1000 bp, Homo Sapiens
agattcagacaggaacctctttccctgttcccagagaatgcggctgagaatgagaacgctgaagatgatccagtccactgaggatgggtcctgcttgcagaagctgccctttcacccatcttgacaagatccagccacccaggactcacccatgcctggtgttccagcttcagggggtgtgcgtggttcctaggtcctgtggacatcacagcttcaggcctgaagagcagagaagccctgttctctgcatgtaggaggtcagcaggggtgggcaggcccagctggaggcagctgggtgagggtcctggttccagcagagcactggggcccatccaagtttgttctgccaccactggatggaaaattggaaatggactgggcgtggtggctcacgcctataatcccagcagtttgggaggctgagttgggcagatcacctgagatcaggagttcgggaccagcctgggcaacatggtgaaaccctgtctctactaaaaatacaaaaattagccgggcatggtggcgtgcacctgtaatcccagctactcaggaggctgaggcaggagaatcgcttgtacccaggaggcggaggttgtagtgagctgagatcgtgccactgcactccagcctgggcaacagagccagactccgtctctaaacaaacaaacaaacaaacaaacaaataaagaaagaacattggacatggagaggtggggcctggcatgggtaaccatcagaggaaaaagccatgctcagccttccagttgagtgggtaacgactgagtctccagggaattcccagtgacctcccctccacacctgctgtgatcctgccaacatttagctttggttctcttggcagctgcaccattcatgggtgcatatacgtagagtctgaacaggtgctctgctgctagaaacagcaaaccatctagattaaactcctaaagccagtgccacgaggcattcctgttccaactgggtgtttgagcagattggc

SEQ ID NO: 293377 - DNA, 1000 bp, Homo Sapiens
atgattttagttttccattttcatttggacagggtcaaaattcaataccttcttcttctttaaaaggtttttcatcttcctcacaaaatacaacacagtttacttttttttgagctagtcattaattccttaaattattttactgttctgtgttcatgagggcataaatttacattattgcttaaaacatgaagactgctttcttttattgataaagcagtaatgtttacattatttgattatatttattgaaatattgaaatactgaatattttgggttttgtgtgtgctattaactaatcattatttattttggttttgattttgcgagccgtggtcaggtagaacttttattaatcttaatagaatttgatgcttttttcattactctttatttaaatattaagcctgcttctccttggaacctaaggtttttttctggaagtattgttggtactttgataagaacaagaactgcagtagtaactccagagttagtgctgaagcgtactttagctactaaaaatttctattaaaattattgggtttcacttctgcttcactatgtagtatacagagtggtactgtaataataatttcaaataatttatgttaataacaaaatctgtgttattttcttctaatataacacatggtacaattctaattttatgagttatgctaatgctttcaatggctaaaaattaaatgtaaagggcaagagtaatttctgaaaattggattgttgtatcagtggtgatcctgttaatattcttttttgcttaaatattttttgaagaacatttacaattttgtctccttcaataacaaaaatttcttctttatgttttgtgttcagtatttgtcaattaattatatagcttaagtgaagatatttaagatttgatgaacttctgtaaacattttgctcaatatcattgtattttgtgctttgtaaattagctgtactgagttaccaagtaataaagggtttgactcc

SEQ ID NO: 293378 - DNA, 1000 bp, Homo Sapiens; identical to SEQ ID NO: 224422

SEQ ID NO: 293379 - DNA, 1000 bp, Homo Sapiens
aaaccatgagcccttccactgcatttcaagttaaagtcaaggccttcaacaacaaaggagatggaccttacagcctagtagcagtcattaattcagcacaagacgctcccagtgaagccccaacagaagtaggtgtaaaagtcttatcatcttctgagatatctgttcattgggaacatgttttagaaaaaatagtggaaagctatcagattcggtattgggctgcccatgacaaagaagaagctgcaaacagagttcaagtcaccagccaagagtactcggccaggctcgagaaccttctgccagacacccagtattttatagaagtcggggcctgcaatagtgcagggtgtggacctccaagtgacatgattgaggctttcaccaagaaagcacctcctagccagcctccaaggatcatcagttcagtaaggtctggttcacgctatataatcacctgggatcatgtcgttgcactatcaaatgaatctacagtgacgggatataaggtactctacagacctgatggccagcatgatggcaagctgtattcaactcacaaacactccatagaagtcccaatccccagagatggagaatacgttgtggaggttcgcgcgcacagtgatggaggagatggagtggtgtctcaagtcaaaatttcaggtgcacccaccctatccccaagtcttctcggcttactgctgcctgcctttggcatccttgtctacttggaattctgaatgtgttgtgacagctgctgttcccatcccagctcagaagacacccttcaaccctgggatgaccacaattccttccaatttctgcggctccatcctaagccaaataaattatactttaacaaactattcaactgatttacaacacacatgatgactgaggcattcgggaaccccttcatccaaaagaataaacttttaaatggatataaatgatttttaactcgttccaatatgccttataaaccacttaacctgat

SEQ ID NO: 293380 - DNA, 1000 bp, Homo Sapiens
ctgctgctgcgcaactattcacactacttccagaaggcccgagacacgctctacatggtgtggggccagggcaggcacatggaccgggtgctcggcggccgcacctaccgcacgctgctgcagctcaccaggatgtaccccggcctgcaggtgtacaccttcacggagcgcatgatggcctactgcgaccagatcttccaggacgagacgggcaagaaccggaggcagtcgggctccttcctcagcaccggctggttcaccatgatcctcgcgctggagctgtgtgaggagatcgtggtctatgggatggtcagcgacagctactgcagggagaagagccacccctcagtgccttaccactactttgagaagggccggctagatgagtgtcagatgtacctggcacacgagcaggcgccccgaagcgcccaccgcttcatcactgagaaggcggtcttctcccgctgggccaagaagaggcccatcgtgttcgcccatccgtcctggaggactgagtagcttccgtcgtcctgccagccgccatgccgttgcgaggcctccgggatgtcccatcccaagccatcacactccacaaaaacatttaatttatggatcctgcctcctgccacgtgctgggtggacctaaggttccttcccaccccattctggcgacacttggagccatctcaggctccactccctgagtaattcatggcatttgggggctcaccccacctccaggtctgtcaagtggcctttgtccctggggctgatggcccccaactcaccagcatcatgaccttgtgccagtcctggtcctccctccccagccgcccctaccaccttttggtgccacacttctcaggctggccgccctggttggggcagccgagagcctggggttcattggtgaaggggccttggagttgtgactgccggggccgtatcaggaacgtacgggtaaacgtgtgttttctggaaaaaaaaaaaaaaaaaaaaa

SEQ ID NO: 293381 - DNA, 1000 bp, Homo Sapiens; identical to SEQ ID NO: 224424

SEQ ID NO: 293382 - DNA, 1000 bp, Homo Sapiens
gtgcagaggcctcagggtgtctgggattgctggggaggcctgtgctgccccctggtggcgcttcctggcgctgcgccctgtccacagtcaccttaggtccctttggaaacattccatttgacttttccctgttgtttgaaatcccatgtttccctaaacctctagcctgattgttctttccctaattcattgcacaagctcctttgcttttagtgttaccgctcattgcctctctaatcctgcctgattgtgtttacagaagcttctgatttgcactgaacatgctctaactggcctgtgctacttattaccgggcttgtaatagcggttcttgtctccatagcctgttgagtgttcccagatgtgactcacctttctgctgccctcttcatgcaggcctactgactcataattcacttgtcccaaaagccaccccacaagcctgagccaacctgctgcctgacgccacagtcattggcagaggtctgggcattattaatttataaaaatccatgctttacacctggacagtagacagggacttcagagattgcacgtttgaatacattctcccaagactgaggttgttcggttttaattcctgtagtccaatcacacaatttcttatggaaaaccttttgtgtttctggtatttaataacttgaagggatagcaaaatatactgtgtattcagagggcctctctgcagctgctagctcagacaccaaaggggtaaggcccaggacattcatatctttaaaagctgcaaacctggtaacctttaaacttttaaaacaaatgtcatatggggtaacactgaccttttataatttgatgtctcaaatgtagagattatctaaaaatcgtaacttgaataccttgtaatttttctcttaaaaaagaagacttgtgtaagtctctgcatcaacgccaataaacatgttgcttaataaaaaaaaaaaaaaaaaaaaaaaaaaaaaaaaaaaaaaaaaaaaaaaaa

SEQ ID NO: 293383 - DNA, 1000 bp, Homo Sapiens; identical to SEQ ID NO: 224425

SEQ ID NO: 293384 - DNA, 1000 bp, Homo Sapiens; identical to SEQ ID NO: 118840

SEQ ID NO: 293385 - DNA, 1000 bp, Homo Sapiens; identical to SEQ ID NO: 224426

SEQ ID NO: 293386 - DNA, 1000 bp, Homo Sapiens
tctacatccccaccattaaccaggccccacccacaaggtagaaacaacccctagagtcaacgagaaagtcattttcagaaaatctacaagtctcgttgagaccaccaccatacctcagaaggtaggactgtggcctagaagggaaaggaaagctgagatgatgtcttaccgtagcagcagatcttggatggtccaggctctatgtgacctccagagcaaagagaaagacttcggacagtctaggtcctcaaatgtcccccattgaggacaacagccccagctctttttcttttttttgagacggagtcttgccctgttgcccatgctggagtgcaatggcacgatctcagctcactgcaacctccatctcctggattcaaacaattctcctgcctcagcctccagaatagctgggattacaggcgtacaccaccatgcctggctaatttttttgtatttttagtagacatggggtttcaccacattggccaggctggtgtcgaactcctgacctcaggtgatccacccaccttggcctcccaaagtgctgggattacaggtgtgagccacggcacccagcctagctctcagatctctatttcattttgtggcttaccattccctagcacactggccttgccatcttgtggccgaataaaaaataacacctcttaagtctagcacactgcagtgaggccaggcacctcagtgctgggcaggggcatcagaaggtgctaagccctctctccacaatgccaagacggagaccacagcctacaccaaatccagcccttgatttccctgctgcctccataaacagaaagaggtctgctggatccgctaagggatcagggagaggaagaaagagggatggggtgggaggcaccccctccagtgctcctactggttcccaagctacaggtggggtgggaaaggctttatcaggtatcatcaacaggttctcaattaaagatttgatttattcaagtatgtgaaaaaa

SEQ ID NO: 293387 - DNA, 1000 bp, Homo Sapiens; identical to SEQ ID NO: 224428

SEQ ID NO: 293388 - DNA, 1000 bp, Homo Sapiens; identical to SEQ ID NO: 118842

SEQ ID NO: 293389 - DNA, 819 bp, Homo Sapiens
acctaggactccctgagctgggactagcgaaatctgtctgcactgatcgcagtcgtcctcagtttcaccctctaggaatcggcctggggatgcacgtgctactctcttcctccaggccggtccccggcgcgtgcgcgcgatccatgtccatgtccgcgcctatcaataaagttgctcacttgttgccggcccgctagcccgaaaggttgcgcgcgcagaccgagaagtctcgcgatagccagccgcggctgcccttgcgcttcccgagctggcggggtccgtggtgcgggatcgagattgcgggctatggcgccgaaggtttttcgtcagtactgggatatccccgatggcaccgattgccaccgcaaagcctacagcaccaccagtattgccagcgtcgctggcctgaccgccgctgcctacagagtcacactcaatcctccgggcaccttccttgaaggagtggctaaggttggacaatacacgttcactgcagctgctgtcggggccgtgtttggcctcaccacctgcatcagcgcccatgtccgcgagaagcccgacgaccccctgaactacttcctcggtggctgcgccggaggcctgactctgggagcacgcacgcacaactacgggattggcgccgccgcctgcgtgtactttggcatagcggcctccctggtcaagatgggccggctggagggctgggaggtgtttgcaaaacccaaggtgtgagccctgtgcctgccgggacctccagcctgcagaatgcgtccagaaataaattctgtgtctgtgtgtgaaaaaaaaaaaaaaaaaaaa

SEQ ID NO: 293390 - DNA, 1000 bp, Homo Sapiens; identical to SEQ ID NO: 224430

SEQ ID NO: 293391 - DNA, 1000 bp, Homo Sapiens
ggtggcggctctttctcccagcagccatcccgtcgaggcctggagcagggcagcccccagaacggcgccccgcggcccatgcgcttcccgcgcaccgtcgccgtgtactcgcccctggccttgcgccgtctcaccgccttcctggaggggcccgggcccgcggcgggcgagcagaggtccggggcgtcggacggagagagggggccgccgcccgcgcggcttcaaggcccagaggagggggaggtgtggacgaagaaggcgccccggcggccgcagtccgacgacgacggcgaggcccaggccgcagtccgagcgagctgggagcagccggccgacggtcccgagctgccgccgcgagaggcccaggagggcgaggcggctccgcggtcggcgctaaggagcccggggcaacctccgtcggcggggagggcccgagacggcggcgacggacgggaggcggccgtcgcgggagaggggccgtcgccacggagcccggagctgggcaaggagcggctgcgcttccagttcttagagcagaaatatggctattaccactgcaaggactgcaacatccgctgggagagtgcttatgtgtggtgtgtacagggaactaacaaggtttacttcaaacagttttgcagaacttgtcagaagtcttataacccttaccgagtggaggatatcacctgtcaaagttgtaaacaaacgagatgttcctgcccagtaaaacttcgccacgtggaccctaaacggccccaccgtcaagatttgtgcggtagatgcaaaggcaaacgcctgtcctgtgacagcactttcagcttcaaatacatcatttaggtgaaagtcagtgttgctgtgcatgcgctgatggagtagacgagtgagcttttccgtgcctctcctccacctctcccttctcaaaatacttcatgaaaggcagtgtattctgaaaaagccttcaaataaaggtattgcaacacgatttatacattgcataaaa

SEQ ID NO: 293392 - DNA, 1000 bp, Homo Sapiens; identical to SEQ ID NO: 224431

SEQ ID NO: 293393 - DNA, 1000 bp, Homo Sapiens
gatagtctgtctcgtttacgaagcccatctgttttggaagttagagaaaagggctatgaacgattaaaagaagaactcgcaaaagctcagagggaactgaagttaaaagatgaagaatgtgagaggctttcaaaagtgcgagatcaacttggacaggaattggaagaactcacagctagtctatttgaggaagctcataaaatggtgagagaagcaaatatcaagcaggcaacagcagaaaaacagctaaaagaagcacaaggaaaaattgatgtacttcaagctgaagtagctgcattgaagacacttgtattgtccagttctccaacatcacctacgcaggagcctttgccaggtggaaagacaccttttaaaaaggggcatacaagaaataaaagcacaagcagtgctatgagtggcagtcatcaggacctcagtgtgatacagccaattgtcaaagactgcaaagagaaaatgtgctctcactggccagagtaagtcctgtaaacacagaattaaattaggggactcaagcaactattattatatttctcctttttgcagatacaggatcacttctgtatgtaacttttttacatacattcgatacattcagcagggactcgtgaaacagcaggatgttgatcagatgtttgggaggttatgcagttgaaaaaagagatgtcattggcaaagctgggttatttcaaaaaggaactctgatgctctgcgtgggaccatgcctgaactccccgaataactgaaaaatggctgaatatttttatggttacttgatatttatttccaaggagtgagcctaagacttttttccccttttgcaaattgctctaagaagtaccatgatttcttttaaactgatctatgctgtgtttgcttattctttagttgaacacactatgaagaattccaggtgtactagtgaatgtaatttatagttgccaaaaaaaaaaaaaacctgaaataaataaatgttagattg

SEQ ID NO: 293394 - DNA, 1000 bp, Homo Sapiens; identical to SEQ ID NO: 221472

SEQ ID NO: 293395 - DNA, 1000 bp, Homo Sapiens
ttcctggtcactttcaaagaactatttgcgcaatctgtgggtctgtggattcacggggctttctgtgtgggtgctgcagttgcttttgtctgcagcagcaggacacatctttcctcttactcagccctttatggcccatggggaactccgtggctcagggagagctgaactccaggggtgtgacctgggacgggtgggcctgaggtgcccagctcagggcagccaggtggctcatgggctgtagtgagccagctccctgggggaaaaggctgtgggccgttaggaccatcctccaggacaggtgacctctatgaggtcacctacggctgtggccgtgcaggcctccttccagcccagagtggcccagtagagcaaggcagacagtgacctccacccccgcagccctcttaaaaggccagtactcttgggggtggggggagggtttagaaagcatttgcccatctgcctttctttcccccagcccccacccgctttgaatgtagagacccgtgggcacttttccttttgtggtggggggtgcggaggaggtacccccacccctggcacagccgcctggaatgcaggactgtcactgctgttcgggtgatgacctcgttgccaagctcctcctgtccccttgttctgggggcaggcgctgtgcttctgtgaggtggtttagcttttgctttcgaagtggccagctgcggccaccaggtctcagcacaagagcgcttcctttgcacagaatgagcttcgagctttgttcagactaaatgaatgtatctgggaggggtcgggggcacgagttgattccaagcacatgcctttgctgagtgtgtgtgtgctgggagagtcagagtggatgtagagcgcggttttatttttgtactgacattggtaagagactgtatagcatctatttatttagatgatttatctggtaaatgaggcaaaaaaattattaaaaatacattaaagatgatttaaaaaaaagaaaaaa

SEQ ID NO: 293396 - DNA, 1000 bp, Homo Sapiens
gggtcgcagacttccaggggaatgattttgataatgaccctaaccgtgggaatcaggttgaacatcctcagatgactttcggcaggctccagggaatcttcccgaagatcacgcccgagaagccagcagaggaaggaaatgattcgaagggagtgccagaagcatctggcccacagaacaatgggaaacagctgcgcccctcaggaaaactaaatacctctgagaaggttaacaagacatctggacccaaaagggggaaacatgcctggacccacagagtgcgtgagagaaagcaactggtgatttatgaagagatcagcgaccctcaggaagatgacgagtaactcccctcggggatatgacacatgcccatgatgagaagcagaacgtggtgacctttcacgaacatgggcatggctgcggatccctcgtcatcaggtgtatagcaagtgaaagcaagtgttcacaacagtgaaaagttgagcgtcatttttcttagtgtgccaagagttcgatgttagtgtttctgttgtattttgttacagtgtgccattctgttagatattagcgttttcactgatgagcaagacatacttaatgcatatttcagtttgtgtatccatgcacctacctcagaaaacaagtatcgtcaggtattctctgcatagaacaacactaccctcctctcttcccagatgtgaccactgagggcagttctgagtgtttaatttcagattttttcctctgcatttacacaaacacacacacatgccacacagacacacatgcgcgcgcgcgcgcacacacacacacacacacacacacacacacacacacaccaagtaccagtataggcatctcccaactgcttttccccatgtgtcctggtcaagcccccctcactctgtttcctgttcagcatgtactcccctcatccgattcccctctatcagtcactgccagttaataaacctttgcaaacgttaaaaaaaaaaaaaaa

SEQ ID NO: 293397 - DNA, 1000 bp, Homo Sapiens
aacactacagaagacaattattcacgtttaaggtcataccaagtttcccttcactgcacctggcttgttggcacagatgcccctgaggacacgcagtattttctctactataggtatggctcttggactgaagaatgccaagaatacagcaaagacacactggggagaaatatcgcatgctggtttcccaggacttttatcctcagcaaagggcgtgactggcttgcggtgcttgttaacggctccagcaagcactctgctatcaggccctttgatcagctgtttgcccttcacgccattgatcaaataaatcctccactgaatgtcacagcagagattgaaggaactcgtctctctatccaatgggagaaaccagtgtctgcttttccaatccattgctttgattatgaagtaaaaatacacaatacaaggaatggatatttgcagatagaaaaattgatgaccaatgcattcatctcaataattgatgatctttctaagtacgatgttcaagtgagagcagcagtgagctccatgtgcagagaggcagggctctggagtgagtggagccaacctatttatgtgggtaagtagcttatgtttattttacattggcagccttccttgtgatcaaaaaaggtaatcccagaaacgtacccgttcactcgtgggtcttaaaatggtttcatatctctattgtgactaattttctctcggtctactgccttttcaatcaggaatagatttgccatgaagccagtgaagtttttaagtgtctaggcttctcattagcgccaactctcctagacctggtgcctgttttttttccaagttttgtttctacttctatccattttttaaattaaactttttattttgaaataattatcacactcacaagctgtgggaagaaataatagagatcctgtgtctctttcatccagttttcctcaagggtaacatcttacaaaactatagtacaatagtggaatagaatatt

SEQ ID NO: 293398 - DNA, 1000 bp, Homo Sapiens
tcctctctgtcccattataggtgcaaggcaccccatccacacatttgcaccactactccaagatagtatttttcttttcacacaatctctttacagcagaatccagagttggattgtagtttaccttcctggaaagctcattatctttgtttgaattaacatttcagcatggaactaactgggcggaggaaggatcgttatacgtcttcagaaagttctcattgccccagctgcctagtactatacaagaagctctactttgatggcagatctaagaaggctataggcctttgtttgtaggaagcagtgtcattacattcaagcttcacttctctgattggcttccaaccactgggattcaaagagaatccaaggttctgcctatgtctgatgacataaggaaaacttggcttcctctgctcaaggttcccctctgctcatccctcctcattcagacatcctccaccataccagtgtttagaagcaaaacatgaagggctagcgccaccaggatagttagcagaactattgtctgtaaagctaggcagatgagcccagaagaatggtcccagagaaagcagactggctccaatagatatcaggcagcaatcccaataaattctgacatgtccttggcaatggaagcctgggttggagatcctgaggcagctgtgcctactgttccccacctcagaagcttcctgcccagagagccagcagccttgggatactaatgaggatgcaactggcttattggtatgaaatagaaggtggctttgtaggggcaagcaggcaaagagtactatccacatggcaggcaggtggctttgtgtctggaaagctttgcctagccagtacagctgtgagcagaggctggttataaatttgaactccctcagcccatttgcaactctgcctctgttctcttgcattctgtttggttgccctttagtttcctagtaaatgctccttttgaaaaaaaaaaaaaaaaaaaaaaaaa

SEQ ID NO: 293399 - DNA, 1000 bp, Homo Sapiens
ggcagttcaggccctcacagcgcggggccgtgtcgctgtcgctgcacgcggactgggcggaacccgccaacccctatgctgactcgcactggagggcggccgagcgcttcctgcagttcgagatcgcctggttcgccgagccgctcttcaagaccggggactaccccgcggccatgagggaatacattgcctccaagcaccgacgggggctttccagctcggccctgccgcgcctcaccgaggccgaaaggaggctgctcaagggcacggtcgacttctgcgcgctcaaccacttcaccactaggttcgtgatgcacgagcagctggccggcagccgctacgactcggacagggacatccagtttctgcaggacatcacccgcctgagctcccccacgcgcctggctgtgattccctggggggtgcgcaagctgctgcggtgggtccggaggaactacggcgacatggacatttacatcaccgccagtggcatcgacgaccaggctctggaggatgaccggctccggaagtactacctagggaagtaccttcaggaggtgctgaaagcatacctgattgataaagtcagaatcaaaggctattatgcattcaaactggctgaagagaaatctaaacccagatttggattcttcacatctgattttaaagctaaatcctcaatacaattttacaacaaagtgatcagcagcaggggcttcccttttgagaacagtagttctagatgcagtcagacccaagaaaatacagagtgcactgtctgcttattccttgtgcagaagaaaccactgatattcctgggttgttgcttcttctccaccctggttctactcttatcaattgccatttttcaaaggcagaagagaagaaagttttggaaagcaaaaaacttacaacacataccattaaagaaaggcaagagagttgttagctaaactgatctgtctgcatgatagacagtttaaaaattcatcccagttcc

SEQ ID NO: 293400 - DNA, 1000 bp, Homo Sapiens
agctggtgatcgttggggatggtgcctgtgggaagacctgcctcctcatcgtcttcagcaaggatcagtttccggaggtctacgtccctactgtctttgagaactatattgcggacattgaggtggacggcaagcaggtggagctggctctgtgggacacagcagggcaggaagactatgatcgactgcggcctctctcctacccggacactgatgtcatcctcatgtgcttctccatcgacagccctgacagcctggaaaacattcctgagaagtggaccccagaggtgaagcacttctgccccaacgtgcccatcatcctggtggggaataagaaggacctgaggcaagacgagcacaccaggagagagctggccaagatgaagcaggagcccgttcggtctgaggaaggccgggacatggcgaaccggatcagtgcctttggctaccttgagtgctcagccaagaccaaggagggagtgcgggaggtgtttgagatggccactcgggctggcctccaggtccgcaagaacaagcgtcggaggggctgtcccattctctgagatccccaaggcctttcctacatgccccctcccttcacaggggtacagaaattatccccctacaaccccagcctcctgagggctccatgctgaaggctcccattttcagttccctcctgcccaggactgcattgttttctagccccgaggtggtggcacgggccctccctcccagcgctctgggagccacgcctatgccctgcccttcctcagggcccctggggatcttgccccctttgaccttccccaaaggatggtcacacaccagcactttatacacttctggctcacaggaaagtgtctgcagtaggggacccagagtcccaggcccctggagttgttttcggcaggggccttgtctctcactgcatttggtcaggggggcatgaataaaggctacaggctccaaaaaaaaaaaaaaaaaaaaaaaaaaaaaa

SEQ ID NO: 293401 - DNA, 1000 bp, Homo Sapiens; identical to SEQ ID NO: 285388

SEQ ID NO: 293402 - DNA, 1000 bp, Homo Sapiens
tggagtcaacaaccatcgagtttgttacccagcggaactgtaacctgacacagattggcggccttatagactctaaaggttatggcgttggcactcccatgggttctccatatcgagacaaaattaccatagcaattcttcagctgcaagaggaaggcaaactgcatatgatgaaggagaaatggtggaggggcaatggttgcccagaagaggagagcaaagaggccagtgccctgggggttcagaatattggtggcatcttcattgttctggcagccggcttggtgctttcagtttttgtggcagtgggagaatttttatacaaatccaaaaaaaacgctcaattggaaaaggaatcttctatttggttagtgccaccataccatccagacactgtttagtaatcttttgaaacttactaaaagaggtttttaataatgaggtccttctgtagtgccatggtagaagaattgaggatgtccctgaagtgccagcgtcggttaaaacataagccacaggccccagttattgtgaaaacagaagaagttatcaacatgcacacatttaacgacagaaggttgccaggtaaagaaaccatggcataaagctgggaggccaaacacccaagcacaaactgtcgtctttttccaaacaatttagccagaatgtttcctgtggaaatatgcaacctgtgcaaaataaaatgagttacctcatgccgctgtgtctatgaactagagactctgtgatctaagcagttgcaatgatcagacttgatttacaagcatcatggatcaaccaagttacacggggttacactgttaatcatgggttcctcccttcttctgagtgaatgttaacatgcgcattttgtggctgatttcaaatgcagtccagtgagaaattacaggttccttttgaagctcaactgttgccaggagatggaatatcaatgcccaacagggcaaccaataaaagtgtcactaagaatataaatatt

SEQ ID NO: 293403 - DNA, 1000 bp, Homo Sapiens; identical to SEQ ID NO: 224433

SEQ ID NO: 293404 - DNA, 1000 bp, Homo Sapiens; identical to SEQ ID NO: 224434

SEQ ID NO: 293405 - DNA, 1000 bp, Homo Sapiens
agtgtggtggtgtaggaggccacagtgagcaggtggccccagctgggtttcccaggtcaggaatgtgggccccaggcaaggtgcagcctttgctcacagctccatccatgtctagaccttcaggccagtctgcagatgaggttccctacctttttcttctcttcattgaccaaatcaaccaatcactacagctgctctgcttctgctttccaaagtagcccaggtcctgggccagatgcaggggaggtgcctatccatgagtgaaggccagtgtcttcctcacctgggtgggtcccacacttgtgacctcagttttaggaccaagatctgtgttggtttcttagattgctagcttttcctccaggggaccacagcaggtgaagctcaagagcgcatggctctgctaatagtaaattgttttcagggccttgtccagctgagagcttcatgtccaccagattctgagaggtgtcagcagcactttttttttttatttgttgtttgttttccatgaggttatcggaccatgggctgagctcaggcactttctgtaggagactgttatttctgtaaagatggttatttaaccctcctccaccccatcacggtggccctgagggctgacccggaggccagtggagctgcctggtgtccacgggggagggccaaggcctgctgagctgattctccagctgctgccccagcctttccgccttgcacagcacagaggtggtcaccccagggacagccaggcacctgctcctcttgcccttcctgggggaagggagctgccttctgtccctgtaactgctttccttatggcccagcccggccactcagacttgtttgaagctgcactggcagcttttttgtctcctttgggtattcacaacagccagggacttgattttgatgtattttaaaccacattaaataaagagtctgttgccttaaaaaaaaaaaaaaaaaaaaaaaaaaaaaaaaaaaaaaaaaaaaaaaa

SEQ ID NO: 293406 - DNA, 1000 bp, Homo Sapiens; identical to SEQ ID NO: 118845

SEQ ID NO: 293407 - DNA, 1000 bp, Homo Sapiens; identical to SEQ ID NO: 118846

SEQ ID NO: 293408 - DNA, 1000 bp, Homo Sapiens; identical to SEQ ID NO: 118848

SEQ ID NO: 293409 - DNA, 1000 bp, Homo Sapiens
tcctccaggatggggtcaaccgtcatcctttccctcgtcctggctgttctccaaggtgtctttgccgaggtgcagctgttgcagtctgcagcagaggtgaaaagacccggggagtctctgaggatctcctgtaagacttctggatacagctttaccagctactggatccactgggtgcgccagatgcccgggaaagaactggagtggatggggagcatctatcctgggaactctgataccagatacagcccatccttccaaggccacgtcaccatctcagccgacagctccagcagcaccgcctacctgcagtggagcagcctgaaggcctcggacgccgccatgtattattgtgtgagagggaccatctaaaaccttccgcggtgcaggtgcagagtgagctgccagacacaccctccccaggggcctctctattcatccggggaggaaacactggctgtttgtgtcctcaggagcaaaaaccagagaacaacatgggagcgttcctaacccctaaggcaactggatgggagacctgacccatccagttctctgagggggctcttgtgtgttctacaaggttgttcatggtgtatattacatggttaacatcaaaaggctgcctaataggcacctcttcaatataatagtcttttaattagtgaaaattttacacagttcatcattgcttgcttgccttcctcccttctgtccgctcttactccctccttcttttattttctacttacttttccaaaatcatttaacccctttttgtaccattaataagttatcttgtttttgttgttgttttccttttaacaatatgcactgaataattcatctttgtgccaattcgtaaatattttgatataacaaagacttctgtcataaatagatttcctgtgagtaatcttgcaaatattttagaacctgtttggttaagaataaattaaaataaatagacaaatttttaaaaaaaaaaaaaaaaaaaaaaaaa

SEQ ID NO: 293410 - DNA, 1000 bp, Homo Sapiens; identical to SEQ ID NO: 118849

SEQ ID NO: 293411 - DNA, 1000 bp, Homo Sapiens; identical to SEQ ID NO: 118850

SEQ ID NO: 293412 - DNA, 1000 bp, Homo Sapiens
caaagtgcttagacattttcaattttttttttgctaaatactttggaattctatttaaaaaatagatgatcaagatctaaaggaaattaatcccaaccaacaaacttaaaagtttatctacctcgttttaggcaatcaagattctggagagtcttgaacacagaataacgattgtgaccattatgaatgtaactaatttcagttgtactgtgaatgctaaatatttgcaaacaagtacatcttgaaagtaaaggtgacttagagaaaagagacattttgacagatacttttaatttgtggttgtctccatcatgaaatagaaacgtgtttggcacttgtgggtggctattttgatttggcatgactacttaattttttaaaaaaattgtggtttgtgaattgcacctttgtgccatgtttctgaatctggttttcaaatccagtggagcctttcagtgaaataggtgactattaaaaaagtaatagtattacagaaaaatgagcgattaaatagtaatggatacaattaaggagcaactattttatatgactgttctgtacaaacaaaaagtatgtaatacccattttaaaaaaccatttgaaagtagacaacttattccaaaatagcaaatgcagaatctctgctcagtgagcttggatgagtggcttaacttctctgggcctttgttcctatctgtaaatgagaaagtttgtagatattgccaagatttcccaggctcaatacagtgtaattattttatgttttaaagatatgaaatctgtttactcaaccaattttttaaatgtcatattgtgataatgctctgcttttgcaaattgtgtttgcatgtcattagttatatcaaatagttttgtggcatggggtagtggagcttccctccccacccccatatgtatcagtgaagcctttgaaattacttaaggcagtctttcatggaatgttttgattgagcaatgaaataaacagtcctccattttg

SEQ ID NO: 293413 - DNA, 1000 bp, Homo Sapiens
aacttcccggcgcccccaccagaggggctgatgttgtcacccgcggccgtgcctgtctggtcagcagggctggaactaagcgcaggaacagaggggctgctggaagcggaaaaggggctggggacacaggccccccacaccgtgctgaggctgccagaccccgaccctgaggggctgctcctgggggccaccgcagggggtgaggttgacgaggggttggaagctgaggccaaggttctgacccagctccagtcggtgcctgtggaggagcccttggaactgtgacccagtgtggccccgtggcctctcccgacattggtgctgaagacgcagggacaggaatgggaggggggagccccagaaatgcggttgctgaagaccccagtcaccacatccttctgcctgggtggcctctccaagccctggtggtgctgggggttgtatccccggccacctcctgtccaggtctccatccccctttggatgggaggcctctctgttacagccctccccatgctgtgccctgccatatacgtgggggactcagggtcctgactcaggggccctgccccctccacttggtactagctgtaagcggaacaccctgccccagggccggacttccagcccccagagccctctccctgtcactccctgaaacactattaatagctctgccgatagctggtgttgtcacaactgcctggaatccgaaggtggaggacaggcagccccgcgcccctgagactggagaccctccccagtgtggcatttcctgccaggggcggggggtggggcagctgtggggagacgggggtcttccttcaccagctcccctcgactcaagcccttgtcctcattatccggcccagaccaaagattccctcatccctgggggcagccctgccgctgtgtctcctttgtatcctaaatctttatttttctaggacatgttatgcctccattttcaattaaaataaagttatcggattacaccacc

SEQ ID NO: 293414 - DNA, 1000 bp, Homo Sapiens
tttctttgactaatttttttcacataactttaggattttcgaaagttgtaaccataactggatatcttagctgagcaaaggcggttataatttgtctttttaagatcactggaaattgataaaattttgtgataattatgattattctgtgccatttacagtttctaatactatactgtatgaaatatgtataaatatatgatgctgagtctgtggaatgatacttctgaaatcaaaattcctcataaggcatgaagttgtaaaaacttgaatgtgtatagttagatatttaaatggttgcttcttcatagaattgtctgctttttaaaactggaagtacaggattttcttcaggtaaaatctgtgtgttccaattacagttgtagctgaaggaagtatgctttggtgagtcaattagtatgggaacttgactaaagacccccagtgttgtaacgtacctttgtacccagacaaaacaattatgttacattcctcaaagtggcatgggctttcttctctaattcttctgttttattagacccaagacaagttctaaaaattgaatgcaatgagagattgtccagaaatgtaatatatactaaaatataccacttaagcattgattgccttttcttgtttgcttcaagaatataaaacttgttacttgagcttggaatcatgggcttgattgaattaattactcttggggaaaaaagacaccttgtggcattaagtcttgctttggttaaagccttatttcacataattgctaaaaactcatttttgtttaatatactacctatagtttaattatcggcacttgtattttgtaacttgatatcttacctaggattgggaatttgggacatgacatgtactataaaagtcagtctatgtacatactgcttattgatgtgctgtgatatgagggaatctgaaatgtttcataaaaataaagcttaaaaattgtcttacactggataaaagtgatattaagaaa

SEQ ID NO: 293415 - DNA, 1000 bp, Homo Sapiens
ctgtgtactttgcacagcacccagaaaaggagccattgccctcaaggcaggaggtcaagcagacccctgtcatcatggccaagatcaaaggtccggggcccgccaagtacctccggccatcctgcacgggctacatagatcatgacatctccatgttcaaggcaccagcttataccctgcatagccggcactcagagaagcggatggtgtgccacagcagccctgggccttgctatctcttggatcccaaaataactcggtttggaatgtccagctgcccgcaggtccccatggaggagcgcatctccaacctgcgcctgaaccccaccctcgcatcctgccagtactactttgagaagatccacccaccgggggaacgcagggctccccagtacacgtttggctaccggcgcccatacagagtgatggacctcaacccggctcccaaccagtaccagatgccactcttgctggggcccaacacccctgtcagccgagctgctccctgctacagtctggcctccagggacaagaactggttctacaaggaggatgtggcaggaggccctggacctaccacgtacgcccgacctgagccatccatctatcagaaccgcagccctacttacagcatggccaagcgcttcgcctaccctctggacctcacgccacggcctggccccggctcccacgaggtccagcaggtcactgtgcacaagccccacatccctgctttcaccatgggcatcaagcactcactccacctgtgcccactggtcatcgacattcgtgactgaggcccctcttggggcactcactgcccctcatccccagaaattatttttctacaccaaattgagcaatttgaccaagatttctagtagcagagccggtacctgctgagtgtccggcacacagaagacattagagatacattttcatgcaaaaaaaaaaaaaaaaaaaaaaaaaaaaaaaaaaaaaaaaaaaaaaaaaaaaaaaa

SEQ ID NO: 293416 - DNA, 1000 bp, Homo Sapiens
gtaatgacctccagttccatccaagttgctacaaaagacattatttggttcctttttatggataagtagtattccatgctgtacatataccacaatctttatcactcattggttgatgggcacttaggttggttccatgcctttgtaattgctaattatgttgctataaacatgcaggtgtatgtgtcttttttacataatgactttgtttcctttgggtagatacccagtagtggaactgctggactgaaaggtagttctacttttagttcttttttttgtttttttttttaagacagagtctcactctgttgcccaggctggagtgcagtggcgcgatctcatctcactgcaacctccacctcccaggttcaagcgattctcctgcctcaacctcctgagtagctgggactacaggcacctgccaccccacccagctaattcttctatttttagtagagacagggtttcaccatgttggccaggctggtcttgaactcctgacctcaggtgatacgcccacctcggcctcccaaagtgctgggattacaggtgtgagccactgtgcctggccttctagttctttaagataccactttaaaaaaagtccagtcctccattgatggacacgtaggttgattccatatctttgctaatgtgaatagtgccgtgataaacatgggggtgtaagttaacaattaatctccaagtaatttccttgatggcacttctgtcctatgtgctattcaaaaattgtgtccttgatcatcgttcttaattctccattagtgagttctgaacttgggtttgaagcatttgctatagctttgttatctcaagtggtggcacagagttcttaagctattgattgttcactgactttatttctatgtgtttgcatgtgggtttttgttgtttgtgtgttcgatcatgaacagatcaacagtgtttatttgttttcctactggatgaagtatgattaaaatacgtatttaaatat

SEQ ID NO: 293417 - DNA, 1000 bp, Homo Sapiens
aacatgtggtgttgcactagtttgtgctcagggtattctgaagcccactcgtttcctaatttttactggattccaaagctttgatcgaggatattttttaagaggttcaagcttgtgactgttagtagtgcaaggatttgtatgggctcagtgattacaaacaaagacatgcaaaatacaactgtttaaacattttcaaggtatttttaaaggttttgtattgaaacaatgtttatatttactgagctcctaaaaatggtagaatacacatgaaaacttttgtttaggaaaagttaacttgttaaattcttttgaattgaataaaaaaatgcattgaaaccatatggtgtgtgattaaaaaaaatgaataaattgtgaagaactggttttggttacaggagtcactggaatccgactggagatgatttggccccctgtcctggtctaacatacaaatctaggaatattatgcgttaaagtattttaaaatacattatccttgtaatgtattttacaaggataatgtattttaaaatgggagttgcataggagagatggatgtgtgtaaacattatcactaaaatgataaacagaatacccattagaattcttagaactattaatgatcaagaggggtggaggcatttcttggtatcaaataactggttaaggttactttgggcgaaatctatttcctttttgtttttgttgttggataacaagaaatgtctagactaatattcatcagttttacaaacataatgaaaattagttgatttttagttgatttttttgtcccaacattttttttaacctttttgccactcattatatgtttgcagttctaggtctttgacagctgaagaccacaggaatcaaacaggcgagacacacagaatactgacccttctttacgcttttatagtgtttataccatatggcccagtgtggaattcttgattatccaagtgcctttggtcatttgtggcaggaaaactta

SEQ ID NO: 293418 - DNA, 1000 bp, Homo Sapiens; identical to SEQ ID NO: 224437

SEQ ID NO: 293419 - DNA, 1000 bp, Homo Sapiens
ttgcagctcaagtttcactgtccatcagcgaatgcacactggggagaaaccttatgaatgtaaagagtgtggaaaacgattaagctccaacacagccttgactcagcatcagcgaattcacactggggagaagccctttgaatgtaaggagtgtgggaaggcattcaatcagaaaataaccctgattcagcaccagcgagttcacactggcgagaaaccttatgagtgtaaagtgtgtggtaaaaccttcagctggtgtggaagattcattctgcatcagaaactacacactcagaagacacctgtccaagcatagggctatccatagttaggcccactgtgcctctccttttttctctttattttcatgctttttatcagtgtcctcgctgtccttcctggttagacacttggctttcatcatgaactcttctttaagttttttgaacctgtttccccaacatgaagtctctttatggttagagaagaccaaaaaacaaacaaacaaacttagaaacaaaaaggaaatgtaagtttccagatttaaaggacatgctgggtgcccagcaggatggattcaagggaaacctacattaaggaaaattgctgtgaattatgaaaacaccaagtttgaataagaggatcatggagaaaaaatgagaccctaaaaagtttctagagagagaaaacaaaagatcagaaatgaaagcggggccaggcgcggtggctcgtgcctgtaatcccagcactttgggaggctgaggcgggtggatcatgaggtcaggagttcgagaccagcccgcccaatatggtgaaaccccgtctctcctgaaaaaaaaaaaacacaaaaattagccaggcatggtggcgcatgcctgtaatcccagctactagagaggctgaggcaggagaatcacttgaatccctgaggcagaggttgcagtgagctgagatcgcaccactgcactccagcctgggcgacagagtgagactttgtctc

SEQ ID NO: 293420 - DNA, 1000 bp, Homo Sapiens
tcatcgtcccttccagcttgctggagtgtccagagagacagatttgccacaagctaggcttacttataatgctccaccctacagaaatgggaccccaagtacccaatcttccctttaggggaggcaggcaggtgggtgagcagcagatgtagtttccatttccctgggggtttaattttccaaactttgccttttttttttttttttttttttttttgagacagaatctcaactctgtcacccagactggagtgcagtggcacaatctcaactcactacagcctcgaactcctaggctcaagcgatcctcccacctcaacctctagaatagctgggactgcaggtgcataccaccacgcccagctaatttttgtattttttttgtagagacacggtctcaccatactgcctgggcaggtttccaactcctgggctcaagtgatccagcagccttagcctcccaaaatgctgggattacaggtatgagcactgcacccggccacttttttttgtttttgaaacagggtctcactctgttgcccaggctggactacagtggcacaatctcagctcactgcggccttgaactcctgggcttaagtgatcctcccacctcagtctccctagtaggtggaactacaggcatgtaccaccacacctggctattttttttttttagagacagggtcttgctatgttgcccaggctggtctttaattcctgggctcgagagagccactcatccccatctctcagagtgttgggattacagccatgagccaccatgcccggccaaacttcagccttgaatattagtgattttgccatattagtttaccatctgtacaattatttgctttatatttttctttaaattggctcattattcacttaatgaaattattgcaacaggaatcttttgtatcacttctgtaaatggaaaaccagtctcatttgccatcaatagaaggtaaaacatgaaaataaatacaatgtaaac

SEQ ID NO: 293421 - DNA, 1000 bp, Homo Sapiens
attgagcctgcagtgagctatgacgatgccactcgctgcattcaagtctagatgacagagcaagaccctgctcctggacatactactaagtgctttcagcatttcatgtggtcctcataaaaatcttgagggccgggcatggtggctcacgcctgtaatctcagcactttgggaggccaaggcaggtgggtcacctggggtcaggagttcgagaccagcctgaccaatatggtgaaaccccatctctactaaaaatagaaaaattagccaggtgtagtggtgtgcacctgtagtcccagctcttcaggaggctgagaaaagagaattgtttgaacctggaaggcggaggttgcagtgagccaagatcacagcactgcactgctgcctgggcgacagcgagactctatctcaaaaaaaaaaaaacccacacaaccttatgaggtagaattccattttagagacgaggaaactgggaccctcaattatgcagaatggatgagtggtaccgccaaaattcaaaccccagactcccgaactcatgctcagaactattacaacatgcagaaacaacaaatccagtcatgtgtgcatttaatttggcatagcaacaacaacacatttctcaggcaaaatggatttccagcttctcttgaaaagtcctgaaatctagtccaggaccgtggattgtatttaaaaaaataaaaatagaagaagaaaaggccgggcatggtggctcatgcctgtaatcccaacactttgggaggctaaggcagctggatcacttgaggccaggagttcaagaccagcctggcaaacatggtgaaaccccgtctctattaaaaatacaaaaattagctgggcgtggtggcgtgcacctgtagtcccagctactcaggatcctgaggcatgagaattgcttgaacctgggaggcagaggctgcagtgagccaagacaatgccactacactccagcctggacaacagagcgagactcagtctc

SEQ ID NO: 293422 - DNA, 1000 bp, Homo Sapiens; identical to SEQ ID NO: 118852

SEQ ID NO: 293423 - DNA, 1000 bp, Homo Sapiens
cataagaaaattcatactggagagaaaccctatgattgtgaaaaatatggcaaaggctttaactagtcctcagttcttaacacacatacgataattcttactgcagagaaactctacaaaccagtaagatgtgacagtgcttctgacaacatctcaaacttttctaatcataaaagaaatcatattggtgagaaatcctagaaatgtggagaatgtaacaaagtatttaaatggttgtcacacttgattataggtaatattcatattggaaaaatttcctacaagtaagaacaatgtggcaaagtttttaactaatacaccttattgcacagaaaatcatttatatttgagaaaaattgtagaaatatagactgtgaaaaagacgtcaatatctgctcacatcttactaaacaccagagagttcatgcttaataaaagcatgataagtgcaattactgccaaaagatctttcagaaaatattatcctttaaagtgaaggagagtatttatattaaagatgaacattacaaccataaagagggttgaagtacctttacttgtatcagatcttattgtccacattttgtactacagaaaaactctgaagaggtcactcaaactttgttcaacatcagggaatttatattggagagctgtcttgcaaatgtaataaatttgggaaaacaaattttcaaaaactacagcttagaaaacaccagagtttatacgaaaatatattttcaaaggtgtagtaaaaataaaaaaaattttaatccaaatttgtctatgtaaataccagaatttatagtagaaatatatgaggaagcgacacttcgaatattctactaaatgagagttctgagtatagaaaataaaactaaagttggtagaaaaattatttgtatataatgttaagaggagtaaaagattttttgtagaataataactatattcagattatactttgtttcttgaaaaaattacagattttttgaaaagc

SEQ ID NO: 293424 - DNA, 1000 bp, Homo Sapiens; identical to SEQ ID NO: 118853

SEQ ID NO: 293425 - DNA, 1000 bp, Homo Sapiens
agggtattagacatccctgaaactcagttaaccgaatttccagtctccaaagcggaagggtaggcatcgccaggcgctggtgagccctggtcaatgagcgcttccatggaaaccgctcggctgattacattttttctgtgtattatttgaatagagagtaaagctcctccgctgtttcgtaaccatatcctttcccccgctaactggaggctgatttctacatatttcttccatgtatctgagaatatctaactagaaggatgagaaggaaataaaatgttataatcagataaggctggttataaaagagtaatgtattacctcaatttttgactgactttgtaaaagccaataactggtttaatgtttatcttgatagactttaaatgtatcaagtcttaattgtattttaaattgaagccttacatttttaaaacagattttgtatttttcttgtggaggtctttgctctaataacacacacacactgtctctctctctctctctctctaattctaggcacacatttagttagatgtgaagcatttaattcattgggagctaggtcagctgccagatgagttgcaaaaacagaaaaaaacctacccattgaataacttctttgaatttggagataagttttcttttacttaaaatgaatatattaattctagaggggcaaaactagcaatgcttatgcaagtgacggtgctgctcttgttccacccccacccagatggtctctgagtgcgccgtcctgggcagggcacacggtctggagctgagagggtggagcaagagtgcactgactccgagccgagggcaggagtggctcaacttggtctcgtcttgcacttagtgcaaataccaataattaagatgcctagacttctgcccttggtcacagtaacaacaacattttgaagacttttccctggtggcatcctagagggaccgactttctgcagcctctgtcttccaagctgagcttctgctgcag

SEQ ID NO: 293426 - DNA, 1000 bp, Homo Sapiens
caagagtttgagattgggtatagtggctcacacctgtaatcacagcactttgggaggctaagaatcacttgagactaggagttcaagatcagcctgggaaacatagtgagaccccgtctctacaaaaaatataaaaattagttaggtgtggtggcatgcacttgtagtcccagctactcaagaggctgaggcagaaggatcccttgagcccaggagtgcaaggctgcaatgagccaggatcccatgatcacacatctgtattccagcctgggcaatagagcaagtccccattactaaaaaacccaaaaggccaaaaaacaaaaaagttagagttcgaggaattaccaactgtagttttagccttggttcatgctctcttgcatatttatataatctctgacttgtaatggaccctgactggaatgtgatccctcaggaacttagtagcctgagtctttcagtagactacactgcccagaaccctggccattctcaaaatgagaacttgggaatgtttaagaagaaatcaaacatgtttcaggaaaaggaaatctatggagtattatagggacattcccatgggaatgtatcttcctccatggcatgtcttgagggtcctttcttgttaggagtttatcctgccagcccataaatggactatttattgtaagtgtagaaaatcacagagaagcagttttgcaccagccttattcctgtgccttgttttcctcttgctctttttttacctgtatatctaatttatattttcatatatattgtgtattgattgaagtcactttaaatccttcttgggaatgacacagtatataaataaggaagaaagaaaacatgccaagctgagcatgctgctccaaataaatatctgctttcctaaaaaaaaaaaaaaaaaaaaaaaaaaaaaaaaaaaaaaaaaaaaaaaaaaaaaaaaaaaaaaaaaaaaaaaaaaaaaaaaaaaaaaaaaaaaaaaaaaaaaaaaaaa

SEQ ID NO: 293427 - DNA, 1000 bp, Homo Sapiens; identical to SEQ ID NO: 221486

SEQ ID NO: 293428 - DNA, 1000 bp, Homo Sapiens
ctgctgtccaccaagtctactatgacatctttgagcctctcctgtcacagttcaagcagctggccttgaatgccacacggaaaccaatgtactacacgggaggcagcctgatccctcttctccagctgcctggggatgacggtctgaatgtggagtggctggttcctgacgtccagggcagcggtaaaacagcaacaatgaccctcccagacacagaaggcatgatcctgctgaacactggcctcgagggaactgtggctgaaaaccccgtgcccattgttcatactccaagtggcaacatcctgacgctggagtcctgcctgcagcagctggccacacatcccggacactggggcatccatttgcaaatagtggagcccgcagccctccggccatccctggccttgctggcacgcctctccagccttggcctcttgcattggcctgtgtgggttggggccaaaatctcccacgggagtttttcggtccccggccatgtggctggcagagagctgcttacagctgtggctgaggtcttcccccacgtgactgtggcaccaggctggcctgaggaggtgctgggcagtggctacagggaacagctgctcacagatatgctagagttgtgccaggggctctggcaacctgtgtccttccagatgcaggccatgctgctgggccacagcacagctggagccataggcaggctgctggcatcctccccccgggccaccgtcacagtggagcacaacccagctgggggcgactatgcctctgtgaggacagcattgctggcagctagggctgtggacaggacccgagtctactacaggctaccccagggctaccacaaggacttgctggctcatgttggtagaaactgagcacccaggggtggtgggccagcggacctcagggcggaggcttcccacggggaggcaggaagaaataaaggtctttggctttctccaaaaaaaaaaaaaaaaaaaaaaaaaaaaaa

SEQ ID NO: 293429 - DNA, 1000 bp, Homo Sapiens
ggccggtgtgctgttgagccaggactgtgctggcaccccacagggagccttggagccctgcgtccaggaggccactgcactgctcacttgtggcccagcgcgtccttggaaatctgtggccctggaggaggaacaggagggccctgggaccaggctcccggggaacctgagctcagaggatgtgctgccagcagggtgtacggagtggagggtacagacgcttgcctatctgccacaggaggactgggcccccacgtccctgactaggccggctcccccagactcagagggcagcaggagcagcagcagcagcagcagcagcaacaacaacaactactgtgccttgggctgctatgggggatggcacctctcagccctcccaggaaacacacagagctctgggcccatcccagccctggcctgtggcctttcttgtgaccatcagggcctggagacccagcaaggagttgcctgggtgctggctggtcactgccagaggcctgggctgcatgaggacctccagggcatgttgctcccttctgtcctcagcaaggctcggtcctggacattctaggtccctgactcgccagatgcatcatgtccattttgggaaaatggactgaagtttctggagcccttgtctgagactgaacctcctgagaaggggcccctagcagcggtcagaggtcctgtctggatggaggctggaggctcccccctcaacccctctgctcagtgcctgtggggagcagcctctaccctcagcatcctggccacaagttcttccttccattgtcccttttctttatccctgacctctctgagaagtggggtgtggtctctcagctgttctgccctcatacccttaaagggccagcctgggcccagtggacacaggtaaggcaccatgaccacctggtgtgacctctctgtgccttactgaggcacctttctagagattaaaaggggcttgatggctgttaaaaaaaaaaaaaaaaaa

SEQ ID NO: 293430 - DNA, 1000 bp, Homo Sapiens; identical to SEQ ID NO: 287891

SEQ ID NO: 293431 - DNA, 1000 bp, Homo Sapiens; identical to SEQ ID NO: 118856

SEQ ID NO: 293432 - DNA, 1000 bp, Homo Sapiens
gctgacccctcacttgacaacacacaggaatggaatggacaggctcacctggggatttgggggtggggtggtcagctggccaagggagtaaaaatgaagaaatagtcccctaccccccatcatcctgtgcctcatcctcctaaccattgagccaatgcattggtgtctcctcagttctcagggagtgtgggtggcggctccggcggatgtcaggaatgctccggaattcatacctagtggctgtgtagaggcctccatctggcgtggggatattccaggcatgagagacatgtcatattcaacagggcacatgacatatacatggtggcaggtcctagagatgagatccacatcctaaaaataccatgtctgtgatagggaagaaggcctgctcaccaatgatgaggcctgtgaagccacgggctgggtcataaggacacttctccttcccctcctcgaagctggttggcaaggtgaaggcctcagcatcctagggaacaaggaaccagcagtaagtggttccgaagacaggcagggacagtggctcaaagtcagatcagtctggggtcagggatcagcgatcagggataggggcaggttgtatggcagatgcacctgacagcaataacttaagcatcccctgagaatgaccttatggcctcaaaacaatgtatgtttggagttccaaatctgcaagtggccaacctagagattcactccttatctatgaagaacatctgagcccctagcccatcctgtggaacacatgctgtccaggggatcaaggccctttgttttgggttaaatgaagtttgccaggtggaggtgattagggggaggatgctaagtgaaaatgctataaaaactgcatggtttttacaaaggggaatggttctccagtgcagcccgccgccactggagtgccctgtatggaagtccccttaataaaccatccgtctccttaaaaaaaaaaaaaaaaaaaaaaaaaaaaaaaaaaaaa

SEQ ID NO: 293433 - DNA, 1000 bp, Homo Sapiens; identical to SEQ ID NO: 118857

SEQ ID NO: 293434 - DNA, 1000 bp, Homo Sapiens; identical to SEQ ID NO: 224444

SEQ ID NO: 293435 - DNA, 1000 bp, Homo Sapiens; identical to SEQ ID NO: 118858

SEQ ID NO: 293436 - DNA, 1000 bp, Homo Sapiens
gtttcctaggtatttctaaattttaggaggtcacttaaatcaaatattttctacattttctttttcttcttttgagatggagtcttgctctgtcacccaggttggagtgcagtggtgtgatctcggttcactgcaacctccgcctcccggttcaggcaattctcctgcctcagcctcccgagtgactcggattacaggcatgtgccatctctactaaaaatacaaaaaattggctgggcctagtggcgcatgcctgtaatcccagctgcttgggaggctgaggtaggagagtcgcttgagcctgggaggcgggggttgtggtgagccgagactgtgtcattgcactccagcctgggcgacaagagcgaaactctgtctcaaaaaaaaaaaaaaaacacattacagtgtttgccaacatcctaaaactaaaaaataatgatttttgggaaaaacaaaaaattatttaactattttgattgagtatagggatcttagcttggctaaatcaccaatatagcaatgtatcttaatgctctaaaaagtaacaatacctaggactgactgaatgttaatttctggaattcatttatcttgttttatttgccttgttcagtatttttcatttaccatatgaagtttagaaataacaatttccttaagttaacttcaataagacagttttgatggtgggaccttggcagaagtatattgagtcagtgccggctgcgttcatggcttcttgtcagggtagtaacattttgcaaccaaatctgcacagatttgtagccaagtctacaaagtgcttaacagctcttttcattgcatcctgtgagatggttgtgatgatccaggaaatggggtctcaggaatctgaagaagctgcctgagccaaggtgatttctaggagtttttttgtttgtggtatgtgaattggggtgtgtgggggtggggtgtgtgtgtagacagggtcccactgtgttgctcaggctggtgccaaact

SEQ ID NO: 293437 - DNA, 1000 bp, Homo Sapiens
gttgactctaactcgcatccgcactgtgtcctatgaagtcaggagtacatttctgttcatttcagtcctggagtttgcagtggggtttctgaccaatgccttcgttttcttggtgaatttttgggatgtagtgaagaggcaggcactgagcaacagtgattgtgtgctgctgtgtctcagcatcagccggcttttcctgcatggactgctgttcctgagtgctatccagcttacccacttccagaagttgagtgaaccactgaaccacagctaccaagccatcatcatgctatggatgattgcaaaccaagccaacctctggcttgctgcctgcctcagcctgctttactgctccaagctcatccgtttctctcacaccttcctgatctgcttggcaagctgggtctccaggaagatctcccagatgctcctgggtattattctttgctcctgcatctgcactgtcctctgtgtttggtgcttttttagcagacctcacttcacagtcacaactgtgctattcatgaataacaatacaaggctcaactggcagaataaagatctcaatttattttattcctttctcttctgctatctgtggtctgtgcctcctttcctattgtttctggtttcttctgggatgctgactgtctccctgggaaggcacatgaggacaatgaaggtctataccagaaactctcgtgaccccagcctggaggcccacattaaagccctcaagtctcttgtctcctttttctgcttctttgtgatatcatcctgtgttgccttcatctctgtgcccctactgattctgtggcgcgacaaaataggggtgatggtttgtgttgggataatggcagcttgtccctctgggcatgcagccatcctgatctcaggcaatgccaagttgaggagagctgtgatgaccattctgctctgggctcagagcagcctgaaggtaagagccgaccacaaggcagattcccggacactgtgctga

SEQ ID NO: 293438 - DNA, 1000 bp, Homo Sapiens; identical to SEQ ID NO: 118860

SEQ ID NO: 293439 - DNA, 1000 bp, Homo Sapiens
ccagagctccagtcaccagatagaaaattgatttgatttcatccaatattccttcgaaagagtgtcaaggaatagggtggggcaatgtgtcattctgcattggaaggaggacattttagagcaaggcctaagggcacaggtattagtgtcatattgatcagaattcaacctttgttctaacacatactagagcaagaatttacttgatttggaataattaatagctactggacattatattggtactaaagagaaagaatacttgacagctctatgcccacactcacattacagctgatgtgaaagagattctggaaatccaaatgttccccagaaattctgatatcaaaacattccaataacttttttttttcaggcgcagtctcactctgtcgcccgggctggagtgctgtgagctgtccgtggtgctgaattcactgtgacgtcactcctgtctctctttgctttcttctgactgacatttattcagccttctctacaggaatctcttatgttcccccacatgcaggtggtttttcagtaggctcctgaagagtgatctcaactttccaggaagaaaagagggcaaagggaacaatgtgaaaagaagcagaaaatcataaaagaccatgtgtttgataaacaaccagattgtttctggttccctgccactataaaaacaccatgagagcatactcatacatgttcccttataaatctgcgaggtagtttctttggtattcttgcccaggaaatgggttgattcatcacagattttatatatatacttttttttaactaagtgtgagataatatcttattgtttttgtaacttgcattttacaagagttctgaccagcaccagataagcttcagtgctctcctttctttggccttaatattattggattaaagaattactgcctctcactaggagcatcatttatttaccattattttcaatttcatattaaaactcaatttctagtagagtcaaaaa

SEQ ID NO: 293440 - DNA, 1000 bp, Homo Sapiens; identical to SEQ ID NO: 224447

SEQ ID NO: 293441 - DNA, 1000 bp, Homo Sapiens
gaaggaacactttgagggaaaccctggtgcagccagccctgaggaaacatggcctgagtgccctcactggtgggtgggaataaaatggaagtgcacagaggagatgtcagaagaccaaaacttggtgaatagtcccagtgctaggtcatataggaaacagaaagcatgacagtggccttttgggaacccaagttacgtcctggtgaaagcagaaaggaggagacaggatggctgtcaacaacgtcagcatgggcatggctcccaggcatggaggtaattgggtcttggcttcaatgccacccttttgggaagccctaaaccaagtgaggtgttcttttcccttgcttcccatatttgtcccagttgcagccctgttgttatgtatttactcttcaatttcttatttatacctctcactcaattgttaattctttgggttcagtctcatgccatatttactcctagtacctaatgcagtgcctggcacacagcaagtgcccttgagaacttgtagagggagtaaaaaagtgcatggataaatgactgcagcaaatcacaaattttgaactttgacccttttcttttagtcccaaatagtggcattccatagctgagggtagtaggagcagttcaccctgggagcagacaataagaggaagaatgaagccaactaaaattctgaatgctttttgttggatttcgtagggtattttttttaaaatagggtcttgctatgttgcccaggctggtcttaactgactgctttttattattaccatgcactggcaattccaaacaatgtcagtgttaaaatgcttctccctgaaaaagagaaaaaaaaaaggaaaaaaagaaaagaaaagtgaaaagaaaaactcttattggcctaagttctaaataatagctaggttaccactgagttttaactatatgtatatgagcttcaaataagcacctttttattatgtaaataaataaaagttatctgtatccccaaaaa

SEQ ID NO: 293442 - DNA, 1000 bp, Homo Sapiens
ccgtctctactaaaatacaaaaaattatccaggcatggtggcgtacgcctgtagtcccagctactcaggaggctgaggcaggagaattgcttgaacccaggaggaagaggttgcagtgagccaagatcatgccacatcactccaacctgggcaacagaacaagaacccatctcaaacaaacaaacaaacaaaaaaaaaaaactcttgtctccttaggatatgttacctgctccactgcagactagagaaataaatgtgtattgaaccttttactgcaaacttgaaaatgctagaaaaccaagcatgaagaataaatacatggtgggaaacacacaggcatgtgcatatgcatatacattgtaagttagtaagttagaaagctagctttgttgtatctgaacacatgaatcttttttggtcagtgtaggaagcacagccagatcctataggaatgaatacctcaaatctgttgtctgagattctagagattaaaccactgtgccatttttaacccaggctgtactgttgtttcttaccaacagcataggttttcatcactggaaggagcctgtgttcatttcctagggctgctgtagcaaagtagtacaaactggattgtttaaaccaacaaaaactcattgtctctcagttctggaggccagaagttcaaaatcaaggtgttgaccaaggccattctcctgaaagtgctagggaaggagctgtccacgcctccctcctggcttctgggagcctcaggtgttccttggcttctagatgcatcattccagtcctccatcttcacatggcattccctctgtgtgtctccacagtgtcttccctctgtgcagatctatctctgtgtccaagtctcctctttttataaggaaaccagtcataatggacccacctgaatgacctcattttaacttgattacctctgtaaaaaatgtatttccaaataaagtgaccttatgaggtattgaaaaaaaaaaaaaaaaaa

SEQ ID NO: 293443 - DNA, 1000 bp, Homo Sapiens
ggtcactacatttccccctttcatgatattcctctgaaggtgaactctaaagaggaaaatggcattcctatgaagaaagcacgaaatgatgaatatgagaatctgtttaatatgattgtagaaatacctcggtggacaaatgctaaaatggagattgccaccaaggagccaatgaatcccattaaacaatatgtaaaggatggaaagctacgctatgtggcgaatatcttcccttacaagggttatatatggaattatggtaccctccctcagacttgggaagatccccatgaaaaagataagagcacgaactgctttggagataatgatcctattgatgtttgcgaaataggctcaaagattctttcttgtggagaagttattcatgtgaagatccttggaattttggctcttattgatgaaggtgaaacagattggaaattaattgctatcaatgcgaatgatcctgaagcctcaaagtttcatgatattgatgatgttaagaagttcaaaccgggttacctggaagctactcttaattggtttagattatataaggtaccagatggaaaaccagaaaaccagtttgcttttaatggagaattcaaaaacaaggcttttgctcttgaagttattaaatccactcatcaatgttggaaagcattgcttatgaagaagtgtaatggaggagctataaattgcacaaacgtgcagatatctgatagccctttccgttgcactcaagaggaagcaagatcattagttgaatcggtatcatcttcaccaaataaagaaagtaatgaagaagagcaagtgtggcacttccttggcaagtgattgaaacatctgaaattctgctgtcaagattcccatctctaaggactccaagtgctagagacaagggggtctatgagcatttactgacttcctgttaaaacttcattttttcaaactttttgagctatgcaatatataaataaacagtaagaattttaaatta

SEQ ID NO: 293444 - DNA, 1000 bp, Homo Sapiens; identical to SEQ ID NO: 118861

SEQ ID NO: 293445 - DNA, 1000 bp, Homo Sapiens
tcgaaccaaggctgtgcccaatcctaagccctgcgaggtcttgtggaaccgacatgacccactctttggtttgtccagagacagtgagcagggtgagttcagtgctgaatcgcaacactcggcagtttggaaaaaaacatcttttcgaccaggatgaggagacatgttggaactcagaccagggcccctcccagtgggtgacgctggagtttccccagctcatccgtgtctcccagctgcagatccagtttcagggtggcttctccagtcgccggggctgcctggaaggttcacagggcactcaggctctccacaagattgtagatttctaccctgaggacaacaactcgcttcagactttccccataccagctgctgaagtggaccggctgaaggtgacgtttgaggatgccactgacttttttggccgtgtggtcatctaccacctgcgggtgcttggggagaaggtgtgagacctctaggggctgtctcctccaggaagccctccgggaagcacagcaaagtccctcattctgcacagaaggtttattggttcctcttgggaagggtcccctcccaccacctgtccagaagctgcctttgaagtcagttctgggtttccccagctctggctgaccattttgttccctgagtgtctgagtccccggcaggcggccttcactcagggtcagcgggcaccaggttgctctggaagagcttgaggatgtggttctcgatcacctgttgcactgagatggggcagggaaaaggtgggctgtgagcttgaatcgggagtggggtggaggcacaggccaacctgcgctctccccttaggggacaaacagggacccttgcagagacctgcattacagagcaaagctgggagaaccgaggactcaccccaggaacctcaacttcccctaagtttgtaaaaatgcacttttgtagcttttcagaattaatataaaaatatttcctaccaaaaaaaaaaaaaaaaaaa

SEQ ID NO: 293446 - DNA, 1000 bp, Homo Sapiens; identical to SEQ ID NO: 224449

SEQ ID NO: 293447 - DNA, 1000 bp, Homo Sapiens
tcacttggcaaaggagggtacatagggttgcagagcaggagggctcctgaactccagagggcagttctgcctgctgaagtccctctgcaaagcctgtgctgaaggagacaccagctcagagcagttcagagggatcccagagtcccagagtggggaggaggtgaaggctgaggggatagaggagggcctggtggtgttctagagcagggttgggcaaactcctgcttgcgggcctgctttctatggcttgccagcaaagaatggtttttactttttttttgaggtcattaaaaaaaaggagaagaagaatatataacaggctgtctgtggcctggaaagcctgaaatatttgctatctgtattgtctggcccttacagaaaaagtttggggccccttgttttagagggtctgtttctaaagaacctcatggcgctcatagaggcagaaggttccagtggaaacccttggctcttccttccaactcactcctctgatcctcggcacagaagacccagcagccattgtacatggggacagttccacaccctggtctccagttgcggtgctaggatggtattgttctgtgctaggaagtctcctgggaacccagaatgagttggtggggaagacagcgggtcactgtggacccatccaggaggggccaggataggcttggcctcatttctggggacatcattggagacttgaacacagagacacgtccctatcactctggcaaggccagagggaacatgtccccttatggtagagtctatgttgtgtgatttttgtgctcttgtttataatttatgcaaaccaccaagaaacccaaaccagtctgatgagtgaaaattatgcagatgctgtatggccccacaggtttctgtggtaaagaccagttggagaatgtaggagatactatgtgagtgaaaatgaatagagatccttattccactccttaatggcataccaagatgaaattaaaatctcttacaaatg

SEQ ID NO: 293448 - DNA, 1000 bp, Homo Sapiens
gagccaatagtggttggggaactcttgaaaaaggggagagaatggctgggtgctggggagttcccccctccgagccctccttcccggcccaacctgagggatgtggatttgggactgtctgggggcccctcctgcagcgaggatgggagggggtgctgagctgtgaatcccctgggcagggggcgacaactccgtgtagcattaacccccgtggcggggtccgctgctggtctaatttggaccccctgcctctcagtgcccctgccctaggggtgtctgtctccagaggggagggacaaatcccctactggggccatttcaatggggtagtttttggatttttttccccactcactttttattttttaatgataatggagatgtctggacccttcctcaccccacctgtcggtcttgtcctggctctgcctgtcccccaccgttgttctcgtaggtgaaccccaggtcctcaactccccccctttatgtgttgaaagttaatggtttcagatgtgaacatcacgtgttataactgtagcgctgtaaatttttttgtgggagggtgggcagggaggggtcccagagggtagagctcaaggattttgggttttgttttgttttcatttttccaaaaaaaaaagaaaaaaaaatagaaaaaaaaggagtaaaaggggcgggtttgttttttgaagaactgtcttggatacctatttaaatgtgtgttctgttttgttttttaacgatttttaaataacgtctgtgcctccactggttgagggtggaacctccaggcaggaaccggctcgccaccctctgcccggtaagggctgcccaagaaagcattacccgccctcggggggtcgggctgtgggggtcccggcacctggcgtgagtttcatgtatgaaaacataaaattgaaaaaaaaaaaaaaacctacacgagcaccgtgatttcaagtaataaacagaaaatgaaacacaaaaaaaaaaaaaaaaaaaa

SEQ ID NO: 293449 - DNA, 1000 bp, Homo Sapiens; identical to SEQ ID NO: 224451

SEQ ID NO: 293450 - DNA, 1000 bp, Homo Sapiens; identical to SEQ ID NO: 286097

SEQ ID NO: 293451 - DNA, 1000 bp, Homo Sapiens; identical to SEQ ID NO: 224452

SEQ ID NO: 293452 - DNA, 1000 bp, Homo Sapiens; identical to SEQ ID NO: 118862

SEQ ID NO: 293453 - DNA, 1000 bp, Homo Sapiens
gatcagcgtgcacgtcttctaccgctgccagtgcaccacagtggagaccgtgcgggagctcactgagttcgccaagagcatccccagcttcagcagcctcttcctcaacgaccaggttacccttctcaagtatggcgtgcacgaggccatcttcgccatgctggcctctatcgtcaacaaggacgggctgctggtagccaacggcagtggctttgtcacccgtgagttcctgcgcagcctccgcaaacccttcagtgatatcattgagcctaagtttgaatttgctgtcaagttcaacgccctggaacttgatgacagtgacctggccctattcattgcggccatcattctgtgtggaggtgagtgagagtggggcaggtgggctggcctggcacacccagtcgtcctgggggttggccctcactgcagggcactgtgcctgagctctgacagtgtggggaagtgtccctgtgatcttggcagtggaacatgcaaggcactgactgagcatgcaggatcagctccatctcattatgtacgtagatagaggtggagacaggaaaaagactaagccagacgtggtggctcacacctgtaatcccagcactttggcaggccgaggcgggtggatcacttgaggtcaggagttcgaaaccagcctggccaacatggtgaaaccccgtctctactaaaaatacaaaaaattagccagatgtggtggcacgcgcctgtaatcccagctacttgggaggctgagccaggagaatcgcttgaacccgagaggtggaggttgcagtgagccaaaatcccaccactgcactccagcctgggtgacagagtgagaccctgtctcaaaaaaaaggaaaaggactaacaggcagtatgctgtcatgttaatgtggggtggaaaaattgtctgcattttttctgcatttttaaaattccaacacaataaatacaataataactatgctaaaaaaaaaaaaaaaaaaaaaaaaaa

SEQ ID NO: 293454 - DNA, 1000 bp, Homo Sapiens
tgcatgtgcccagcttcaataattaccaatatcttgccagttttgtttcgtttctccttttattctctgtattgagcaagtcttagacatcatacgtttcacgcgtaagtaccttattctacatcattaaccagtaaggactttttaattaaccacaataccactatcacacctaataatagtaattccttatggatcttttctttagacctatttttgaaggcataaaagcagttgagtttctggagaatttttggatggtgattaatgacttgactggctgctcttcccagagctgtggcagctctcccgtagaagatggggtttgtattggcgcaccaagatctccaacagccagtgtgtgtttcccatctcttgtaggttccatcaatggtgagcaccagcctgaatgcagaagcgctccagtatctccaagggtaccttcaggcagccagtgtgacactgctttaaactgcatttttctaatgggctaaacccagatggtttcctaggaaatcacaggcttctgagcacagctgcattaaaacaaaggaagttctccttttgaacttgtcacgaattccatcttgtaaaggatattaaatgttgctttaacctgaaccttgagcaaattagttggtttgtgtgatcatacagttatgtgggtggcttctagtttgcaacttcaagggacaagtattaatagttcagtgtatggcgttggtttgtgttgagcgtttgcacggtttggataatcttaaattttgacggacactgtggagactttctgttactaaatccttttgttttgaagctgttgctatttgtatttctcttgtcctttatattttttgtctgtttatttacgcttttattggaaatgtgaataagtaaagaattacttgtgttacttgccaagcagtgcacatttcatagtttcaaatctgtaatcagcaataaaaatcctaaaatatgtacctaaaaaaaaaaaaaaaaaaaa

SEQ ID NO: 293455 - DNA, 1000 bp, Homo Sapiens
aagattctgataccctgccttgacaacatgaaacttgaggctgctttggttcatgaatccaggtgttcccccggcagtcggcttcttcagtcgctccctggaggcaggtgggcactgcagaggatcactggaatccagatcgagcgcagttcatgcacaaggccccgttgatttaaaatattggatcttgctccgttagggtgcctaatccctttacacaagattgaagccaccaaactgagaccttgatacctttttttaactgcatctgaaattatgttaagagtctttaacccatttgcattatctgcagaagagaaactcatgtcatgtttattacctatatggttgttttaattacatttgaataattatatttttccaaccactgattacttttcaggaatttaattatttccagataaatttctttattttatattgtacatgaaaagttttaaagatatgtttaagaccaagactattaaaatgatttttaaagttgttggagacgccaatagcaatatctaggaaatttgcattgagaccattgtattttccactagcagtgaaaatgatttttcacaactaacttgtaaatatattttaatcattacttctttttttctagtccatttttatttggacatcaaccacagacaatttaaattttatagatgcactaagaattcactgcagcagcaggttacatagcaaaaatgcaaaggtgaacaggaagtaaatttctggcttttctgctgtaaatagtgaaggaaaattactaaaatcaagtaaaactaatgcatattatttgattgacaataaaatatttaccatcacatgctgcagctgttttttaaggaacatgatgtcattcattcatacagtaatcatgctgcagaaatttgcagtctgcaccttatggatcacaattacctttagttgttttttttgtaataattgtagccaagtaaatctccaataaagttatcgtctgttc

SEQ ID NO: 293456 - DNA, 1000 bp, Homo Sapiens
ctggtacttccgaatcaattaccgccaattcttcacagcacctgccactgtctccctggtgggagtcaccgtcttcttcagcttcctagtatttgggatgtatggacgataaggacataggaagaaaatgaaaggcatggtctttctcctttatggcctccccacttttcctggccagagctgggcccaagggccggggagggaggggtggaaaggatgtgatggaaatctcctccataggacacaggaggcaagtatgcggcctccccttctcatccacaggagtacagatgtccctcccgtgcgagcacaactcaggtagaaatgaggatgtcatcttccttcacttttagggtcctctgaaggagttcaaagctgctggccaagctcagtggggagcctgggctctgagattccctcccacctgtgttctgactcttcccagtgtcctgcatgtctgcccccagcacccagggctgcctgcaagggcagctcagcatggccccagcacaactccgtagggagcctggagtatccttccatttctcagccaaatactcatcttttgagactgaaatcacactggcgggagtgaagattgtgccagccttctcctatgggcacctagccgccttcaccttcttcctctaccccttagcaggaatagggtgtcctcccttctttcaaagcactttgcttgcattttattttatttttttaagagtccttcatagagctcagtcaggaaggggatggggcaccaagccaagcccccagcattgggagcggccaggccacagctgctgctcccgtagtcctcaggctgtaagcaagagacagcactggcccttggccagcgtcctaccctgcccaactccaaggactgggtatggattgctgggccctaggctcttgcttctggggctattggagggtcagtgtctgtgactgaataaagttccattttgtggtcaaaagaaaaaaaaaaaaaaaaaaaaaa

SEQ ID NO: 293457 - DNA, 1000 bp, Homo Sapiens; identical to SEQ ID NO: 118863

SEQ ID NO: 293458 - DNA, 1000 bp, Homo Sapiens
atgcatttctcagaatgtatcccctttgctaagcaatgcatgactgcaatcctaattctcacatgttttggggaaaaaattttaattttgaaaaaatttaggaaagttcctaccaaatatacatgtataaagtttattaaaagtcataatgacccaggaatagctaatgacacagaagtagatcaaaatagaacacaatagagaacttcaaaataaaacaggtgtgagaattgtgtgtgtgaaaaagctgggttcaaataagttggtttgttagacattcatatgcctacccatcagccatttcgttctcccttccttgctgacaaagccccattttttttttctttttttttggcctaaaactctgtatggctgccttgtgctatagaatagggtgcttccctagcctagagagggtgagtgttgattagattctgtgccaatcatggtaattggcttacttgatcatttgatggaatctaggctaacgagacaaaggaagtctgaaggctttgaataagaaattttctgttgctcttaacaattgatacaagttagggatttgccagcatccctcttctgcttctcagtgaagatatgtgatatggatgtttgaagctaatctgcaacagccttctgatggccatgaaaggacaagtatggagatgaaagctatcacactgagaatagtgggatgtagatagaaagcacctgaattgtgcttctgaattaaccaatccaggaactgctttacctttggactttttgttatgtgagatattctttatattgttccatttgctttgggtatatgtatattgttacttgtagccaaaaagaaacctctcttagtagaaacaaagggagagttaggttattcaaaaattagtatgggacaattgaatatgcctttttctgcgggagtaggtggggagaaacttaaaggttcacttgtaaaacaataaagtactaaagaaaatgtgataaaaaaaaaaaaaaa

SEQ ID NO: 293459 - DNA, 1000 bp, Homo Sapiens; identical to SEQ ID NO: 118864

SEQ ID NO: 293460 - DNA, 1000 bp, Homo Sapiens; identical to SEQ ID NO: 224455

SEQ ID NO: 293461 - DNA, 1000 bp, Homo Sapiens
ctgatgacctgctcatcagcacctaccccaagtccggcactacctgggtaagccagattctggacatgatctaccagggtggtgacctggagaagtgtcaccgagctcccatcttcatgcgggtgcccttccttgagttcaaagccccagggattccctcagggatggagactctgaaagacacaccggccccacgactcctgaagacacacctgcccctggctctgctcccccagactctgttggatcagaaggtcaaggtggtctatgttgcccgcaacgcaaaggatgtggcagtttcctactaccacttctaccacatggccaaggtgcaccctgagcctgggacctgggacagcttcctggagaagttcatggtcggagaagtgtcctacggatcctggtaccagcacgtgcaggagtggtgggagctgagccgcacccaccctgttctctacctcttctatgaagacatgaaggagaacccgaaaagggagattcaaaagatcctggagtttgtggggcgctccctgccagaggagaccgtggacttcgtggttcagcacacgtcgttcaaggagatgaagaagaaccctatgaccaactacaccaccgtcccccaggagttcatggaccacagcatctcccccttcatgaggaaaggcatggctggggactggaagaccaccttcaccgtggcgcagaatgagcgcttcgatgcggactatgcggagaagatggcaggctgcagcctcagcttccgctctgagctgtgagaggggctcctggagtcactgcagagggagtgtgcgaatcaaacctgaccaagcggctcaagaataaaatatgaattgagggcccgggacggtaggtcatgtctgtaatcccagcaatttggaggctgaggtgggaggatcatttgagcccaggagttcgagaccaacctgggcaacatagtgagattctgttaaaaaaataaaataaaataaaaccaattttt

SEQ ID NO: 293462 - DNA, 1000 bp, Homo Sapiens
tggagaccctcctattcagttcataagcaatggcaccacaggtcagatgcagttatctgaactccaggaaattgctggttctcttggacaagctgtaattttaggaaacatcagtagtatccttggatttaacatttcgtccatgtctattactaatcccctccccagcccaagtgactctgggtggattaaggtgactgcccagccagttgaaaggtctgcatttcctgttcatcacgtggccttcgtgtcctcactcttagtgatcactcagccggtggcagcacagccaggacagccatttcctcagcagccttcggtaaaggcaacagattctgacggtaactgtgtatcagttggaattactgcactaactttgagggccatactcaaggactccaataataaccaagtcaatggccttagtggaaatacaacaattccgtttagcagctgttgggccaactacacagaccttactccccttagaacaggaaaaaattataagattgaatttatactggataatgttgttggggtagaatccagaactttcagcctgctggcagagtctgtctctagcagtggcagcagcagcagcagcaacagcaaagcatcaactgtgggtacatatgcccagataatgactgtagtaattagctgtctggttggaagaatgtggctcttggaaatatttatggctgcagtttcaactttgaatataactttaagaagctactaaagtgctgttccgaagaataggctgaaacaaaaatataagaattattagctactttgttgggcaataggcaaaagtctatagcattttcatgaaaatatactaaaaatatttttatgatatataaaatgtactaattagctttaaacactaaaatcagatttcttcaaaatataaatttgttttgattctttatatttatatgtttttatttcatttcaataaacttccagaaatttgtcatttggaaaaaaaaaaaaa

SEQ ID NO: 293463 - DNA, 1000 bp, Homo Sapiens
gaaatggagagcagcaattggagcttcaggaccggcttgcactgtggctccaggttataccaccactgcccaaagcaaaagctagagaagcaagtggagaaatgctggagaaagctgcaccctacaggcaaccagcactgcagaaaccactccaggcaaagtagtgaaggaaaaaagcctgctctccagtagcctggcctgtcagcctggaggaatcaggaaagaccccttcctcttgcagtgtgtctccagcgccctctactgacaaagtatgccatcatgcaagctgcaaaggaaacatttcaagagtctatatctattttcacggagcgggcaaccaacagtgaatgtggagctgagagacagtaaaataataactgacatgccaccgaagtacaaagtaaaataaataaataaatacacattttggcctattagcaaagattaagaaatgataacattaaatactcaataaatcaccatgagatggggactcaaacttctggtaaaaatacaaatagatataatttttcttgaaggcaatttagtagtctgtttatcctataattctacttgtaagatcctatcatatgaaaataaccagagatacaaagacattctgcaaagatatgttttatattgttatttattgtgacaaaaggaaataaaaagcctaaatgttcagaaaattattttaaaagatgaaagagggaaataggccatggacggtggctcacgcctgtaatcccagcactttaggaggccaaggtaggtggatcacttgaggttgggatttcgagaccagcctggccaacatggtgaaaccctgcctctactaaaaatacaaaaaatgagccgggtgcaatggcaggcgcctataatgccagctactcgggaggctgaggcaggagaatcgcttgaacccgggaggcggaggttgcatgagccgagatggcgccactgctctccagcctggacgacagagcaagactccgtctct

SEQ ID NO: 293464 - DNA, 1000 bp, Homo Sapiens
catcgccaatccatcaatagcctcccggttgagatgacttcagctctgatttggaagagctatgatattgtttataggagtgaattaatatgtgtaaaggttacaaagtaaacagttaaattaaattaattgtgctggagcaggtcaaacaggcttctgagagatgaacatacacatctctattaactccacattcggtgagtgtgggtaacttgaaattggctgggtcaccatttacatcatagaaattggcaaatagtacaaattagggctccctcacccctactcgggcatagagctggtacactagcacacctctggttatacatgcatgcgtgtgccaccagaacaaaacacctaacagcaggcacgttgcctctgttgcccaccattacagctcccgcacggagcagacagactcatggcaggaattgaatgcatgtttgtcgagtggaagcatgaacaaatccacaaaatgcccaagatgaggcaaagaaggacattggctcaaatgttaaacataagttaggagctgagataatgcccagaggaaaaatgttctgtaattctaagtaaaacccatctctaaggcaggatgctgcttatgagggctccacagacagatgggggaggcctgggtcctgcccttggaaagagtctgacagctcgacttctggaaacagccatctgcacaggtcaacatcttcttagctgacagggagcagatttgcagaccacatcacatttgaaattccagaagaaacttcttggagtctgctcttgtgcaaatgagcctagaaagcccgttaactttgggtggaggcttccactgtttggctatcccaagtgggcccaaagctaaggaaaacccaccagccctttgcttcctgcttcctctatttgtttgccccaggaaatcagaggtgatgacatgatttggcttgggcacgacaggaataaacgatatttaagagacgtcaaaaaaaaaaaaaaaaaaaaa

SEQ ID NO: 293465 - DNA, 1000 bp, Homo Sapiens; identical to SEQ ID NO: 224457

SEQ ID NO: 293466 - DNA, 1000 bp, Homo Sapiens
aaaaccagaggcgctccagaggcgttaatggccaactccggtgagccatggagcccctcttatctgggcccaacctctccttaaataaccatgccaagaagggacattgtcaccaagaaccaggatctctggagaaacagttgggctgttgcatcgagtaatgtcactggactcggcctaaggtttcctggaacttccagattcagagaatgcgatttagggaaacggtggcagatgagtgggagactggttgcaaggtgtgaccgcaggaatcctggaggaatagagagtaaagcttctaggcatctgaaacttttgcttcatctctgacgctcgcaggactgaagatgggcaaattgtaggcatttctgctgagcagagttggagccagagatctacttgtgacttgttggccttcttcccacatctgcctcagactggagggggctcagctcctggggtgatatctagcctgcttgtgagctctagcagggataaggagagctgagattggagggaattgtgttgctcctggagggagcccaggcatcattaaacaagccagtaggtcacctggcttccgtggaccaattcatctttcagacaagctttagcagaaatggactcagggaagagactcacacgctttggttaatatctgtgtttccggtgggtgtaataggggattagccccagaagggactgagctaaacagtgttattatgggaaaggaaatggcattgctgctttcaaccagcgactaatgcaatccattcctctcttgtttatagtaatctaagggttgggcagttaaaacggcttcaggatagaaagctgtttcccacctctgtttgcttttaacattaaaagggaaatgtgcctctgccccacagttagaggggtgcacgttcctcctggttccttcgcttgtgtttctgtacttaccaaaaatctaccatttcaataaattttgataggagacaaaaaaaaaaaaaaaaaa

SEQ ID NO: 293467 - DNA, 1000 bp, Homo Sapiens
tgtatattctcatcagcactcaggaatcctctgcaggcatactgggaacgaccaaggacacacccaagctgggtctcctcatggtgattctgagtgtcatttttatgaatggcaacaaggccagtgaggctgtcatctgggaggtgctgcgcaagttggggctgcgccctggggtgaggcattcactctttggggaagtgaggaagctcatcacagacgagtttgtgaagcagaagtacctggagtacaagagggtccctaacagcagaccacctgaatatgagttcttctggggcttgcgctcctaccacgagactagcaagatgaaagtcctcaagtttgcatgcagggtgcagaagaaagaccccaaggactgggctgtgcagtaccgcgaggcagtggagatggaagtccaagctgcagctgtggctgtggctgaggctgaagccagggctgagtggttccaacaccagcactggctttactggcgaacccagcaccagcacgggcttcagtagtggacccagttctattgttggcttcagcggtggaccaagcactggtgttggcttctgcagtggaccaagcaccagtggcttcagcggtggaccgagcacaggagctggcttcggcggtggaccaaacactggtgctggctttggtggtggaccgagcaccagtgctggctttggcagtggagccgccagtcttggtgcctgtggcttctcgtatggctagtgaggtttcagatttattccccatgtttacagataccgctaataaattgcagtagtccttcccatggagccaaagtacatccttggaatctttgtccacacagcagtcaaggcagttatggccaatcagctgagggtgtcatgtgatggaaaaatctgtttgctgttcctgctttattgtttgctttctgtgtgctgtcatattttggtatcagagttacattaaatttgcaaaatgaaaaaaaaaaaaaaaaaaaaaaaaa

SEQ ID NO: 293468 - DNA, 1000 bp, Homo Sapiens
gaatatgtattagatttctatgataaatattacccattggagagtacagagtgtaaacacgcattctttctgaggctccggcgctgatgcgaatacagctcacagagaaacgcatgtgctattggagaacaggtctttgtggagatctaaaggcagtgattgatttcacagggagctctaatctctgtgattacatggtccttcaaactcccaaccaaagtgagaaaagcggcatgcagtgaaatgagcagtgagcagccctttagcaaaatcgccctccagtccttcctggagatgccttcagccagcatcccagactccacagttatttatgaatgatgtcgtgattctccctccacctgacagtttgtaagagtgaaagagcatctaacctgatgctcttggagagagataacctgtctgtcataacttaaaggatgagaaaatgtggtgtagctattaaagattcatgcagtcccaaaaggcactgtcctgggatgatgagagattataaggtgatttcataaaaggaatccaaccctgtgcccggccattgatgtgttgtcattgaatccaggaggatttctagggcactgaagttttgttgtttcttttgctgactttggttacagtcagaaaaaataaactagatgtttgtgtctacatgttctacctgttgtacctattagcatcttcctgcagggacttgggcccatggcctgggaggttggtttgggattggggttgttgggcagcctgccattcacctggcctatcctggcccttctcatgcccaagacagttgtttcacaggagtggaagtgtgggtgatgcaagtagaaccctctagatgtaccctgtgtggtctgcaggactggactgtttgctgtgtttgtggatgttggcgatagactgtcaattaggttgtttgtgatccaacaagaacatttccaaaagtatctaggtgttctcaaataaaaagctttctttgcacaaccca

SEQ ID NO: 293469 - DNA, 1000 bp, Homo Sapiens
aagctgggtgaagccagttgtggagaattgtttgaatattatcccattgaatacccagagccactaaatctttttttactagaaaataattggggtccatatgaaagtctctattactgagtagtgtcaatgagggtgtggcaaaatggagcctttcacatcctagtggtggccatttggtaatacagatataagccttaaactatgtaaacccttgtcctaaggaagtaattgaataattgcccaaagattgtatgtatgaggctgttcatcccagcactgtctaagctagtaaaaattggaaacaatttaagtatctagcacattggattggttataaagcaaggaatgttcacacagtaggatattataagtatgctgatggaaatctatattgccaggaaaagctattcattatgcgttgtgaagtcagaaagtaaaaaagggtagatagaagtattcgaagtatagttccattttttgagactaataaaacatatgtttaaaaggacactaaaaactggagttatagatatccagatagaaacagtagttatctttgggtagaagaataatgagtgatctttacttttttactttttattcatctttgtgtttttatttatctaaaatgggtattgatttttaggacggttttgaaaaagaaaagtgttgggaatgaagcaagtgattgattggaaaacatactgaatggaagaaatatttagattaaaaatgaggtaggttgaagtttcttctctgaaatgatagataaatggtgaagataaggcttattgtgaggattcagtgaggtaatatatgcaaagtacttacaatgttctggcacatagtaattaattaagaaaatcgagcacccttaattacctagaatgcagggttgttagttttttggttgacttttgttttgctggggcattctgccatgttttagtgtcatttaataaataatagtaacaataaaggttaacatttattaagt

SEQ ID NO: 293470 - DNA, 1000 bp, Homo Sapiens
gttggacaagtacctggaatgcagagtagaaggtggatcatttaacaaaaaataagtagctttattaaagaaaaatcttcaacacaatcaaactttaacattttagcttttagatttttatgtgtctttgacagctagtgtctagtgtatgaaagtggaaaaggacatttctgtagtagctgttaagatgtatgcagttgtcctatcacagttatattagaaataacaactagtgtggaaagtaacccacattctgttcaggatacttttgttttaaaaggctaaaatgtttgtgtgctttaaaattcttaatgaattcactggcatgagtaattttatgccgggaaaatctgatttgtggtctatttaattacaaagagattgtgatggtgataatttgaataccatctttctatgaaaagctgtgtatattaattttaatctctagggccttttttcaataacttgaaaatcacagcctcatcattagcaactttatatacacagctttaaaaaatttgctttaaactgtttcagagcttcttccctaagccataaactgtctcacctaaacaagatagacctcaataaaagacataatatttctccacctggcagaaaagtaactgccaagtaagattaagaaataagttgagcatttctggagtatatttctcataattctgcagagacttccagtttattgcatatatgcagtaaagtgtatatattatgcagtttctctaagtggaaaaacttgacatgactttaatagtgttaaaacatgaaaatgctggtgagctgaggtagaaaaaaaacaagaaaaaaattttaaaaatagcgttaaaatgcattttaggctcctaatgtcgttaatttgcacgttaaagacctctaatcgcatgcaagcattgacctaccacacctacatcccactgtgcctgcattattgaaattactactcactttaattttttttcccctttttactgtttgatac

SEQ ID NO: 293471 - DNA, 1000 bp, Homo Sapiens
gtgctgcttttttgtatactcatggggctgattgcaccatagctgagaacgtggaatgcagaatgagcccacctggctttgaatctgggccctacttaacttatcagctatgtggttttgggcataagccactttctctgttaagttttctcatttgtaaaatgtgggtcataattctgccttcctctaggggaagcttttagaatagtgcctggcatgaaatgcctatgaatgtctcagttagtgtgtgtgtgtctttaacttgcgtcccattctcagggcccccacatcagtgtctcgtttacatctcacacagtgaccctgcgaggcaagggtttgcccagtttgcagatgagaaacccaaagctgagagaggtgtggggaaccgcccaaggtcacccagctgtgaatgaacgtggtcagaacacagaatctgagttggtcacacttcccactgatccatggggcctttaagccctctggaagcttccattaaagatgattatttgaggataattgtattgggatgcctatgatcttatctagggttttcctacccatccccaacattcagctcagctgcctctttcttgaggacaccctcactgatcaccccagcccagccagagtggttgctcctgctcctgcccctgaacctatgacatacccaagtcccaatactttcgagccatctgccactgccttttgacatctctgccttggctagattcaaatggtgtttcataataaaagtctgagtttaagcagctttaccgaaaacgcaagggaagtttcattccatttatacttctccagaccccctgccatcctctgctgctacccacacaggcagaataaaaggcttaaatgtgtaagtcccatgaaggcaaagattggtctcttgtgttcactgctgtctgtagtacttaggatggtgttggcccagagttggtgtttgattaaagtatctgttgaattttttaaaaaaaaaaaaaaaaaa

SEQ ID NO: 293472 - DNA, 1000 bp, Homo Sapiens
ggggattctggggcaagtagtttcttgcgggtgagtgttctcagagaaacttaccagatcaagaaagggagctcaggctggatggaggaagccacgcaagtgtggcttcaagatccatcgccttggcctgatcgctgtgggggcaggggcctggagtacgaggggcaccctgggggctcccacccagaagcagaggggctgggctgttgcacctctactggcatcagtctttggttaccccccagccccagtaggaggagagcaggcagagcttgtcatccccagcctggtgtcccgcagtcccaggaagccgcttcttgccttcatggctgagtgctgggaagggctgagctcacccaggccagcaggtggggtatcatctgctcggtggggccacccacaggtgacagcatggaccctcaggctggctgcccctgttccttggtccataactggtgagctatggagacccaggccaacaaattatccccagtgatatggggggaggaggggctagaacaagggcccaggggactggaggcaggatggtggctttccctacctgacacagccatggcccagccccaaggccaggctgtctaccctatggccacagcaggaggtcagcccagggccaggagacacatggctggacaaggctttgcagcctgggagaccccgactttctctaacccagtggctgtgcggtgcaggccactgactccccccctgccctctcccctctctccctccccctaactgcatgacatgttaactgtgtgcccaggacagccgtggtggggaccgggtatgccaactggaatgattctagaaccaaaataaagttggggcaggaagagggggcttccagggagccctgctcggccctgaatcaccttcgtctcttctctaaaaaaaaaaaaaaaaaaaaaaaaaaaaaaaaaaaaaaaaaaaaaaaaaaaaaaaaaaaaaaaaaaaaaaaaaaaaaaaaaaaaaaaaa

SEQ ID NO: 293473 - DNA, 1000 bp, Homo Sapiens
acttctataatgtgaggcctcctctcgaccctacaccatttccaaatagcttcaagtgctttacttgtgaaaacgcaggggataattataactgcaatcgatgggcagaagacaaatggtgtccacaaaatacacagtactgtttgacagttcatcacttcaccagccacggaagaagcacatccatcaccaaaaagtgtgcctccagaagtgaatgtcattttgtcggttgccaccacagccgagattctgaacatacggagtgtaggtcttgctgtgaaggaatgatctgcaatgtagaattacccaccaatcacactaatgcagtgtttgccgtaatgcacgctcagagaacatctggcagcagtgcccccacactctacctaccagtgcttgcctgggtctttgtgcttccattgctgtgatgccaccattcctaggagaggcagagaccagcctctaaagcacaagccaaaaactgtgtgaacggtgaactttggagtgaagatcaatcttgcacttggtgaagagtgcacattggacctcaaggcgaaagccagtggtttgcttggataaaatgttcccgcatgaggccacaggactgaggatgggaatttggcagggcctgagaagatggtctgacttccaggcttcctggtcaaagagagctacgtttgggcagttctgcagagaggatcctggcaactagtcccacctgactaggcctttagctgaaaggatttcttgacctccttgactgcctcagaggctgccaggtcaaaccctcttgtttatgtgattagctcagagcatctctatgaaatctaacccttcccctcatgagaaagcagttttccccaccaacagcatagtcaatgagaaaggcgactgtacgaagaaaacttccagtggaactaatatgaaatctatttgcaaattatggggggaaataaagcttttaaattatacaatgaaaaaaaaaaaaaaaaaaaaaaaaaaa

SEQ ID NO: 293474 - DNA, 1000 bp, Homo Sapiens
ttttagtttttagtgtatggtacaaatgaacacagtttatattctaattcttactgcagctcattttaatttttaggatgcaagcacaatttagtattcaaagtgagtagcaacatattcaacttgatcccattgtcttcagttactcttgcccatgaaaaatgttcataaatgaacagggtatttgaccatatgatattagaaaatacagcacattactttatgagaaactacctactgatatgggcttgaaattttggatgaatcattgagcatttctacactagaagtaatttcaaaattgttggtttttataaacaggaaaaaggttgagtagtgggacttttaagcatctctgaaataaaaaacttctttttacagacaagcattatagtttgagttacagacaacagtgtgtatatatgtaatatatatatagtaaaatgaaatttaaatatgaagccaaactttttaaaattagaaactacaaatggttatactgattagtgtctagcctagagtggtaaccatgctttactaattcagttatgaaatacattatttataatgcattagctgtattagctgttgcttttttgatgttcaggataactatgttatctcatttctgcatttaattaatagctcgagtattaaaagcccactcccttcaagaaaagctttgattttccccagtcatgaaagcccttgtttcaaattctttaatctctgaacctagtatcataagaatttcctcttttgataacatctgtactttcatattctgctcactatcaaatgtattgttaacacttagtaagtttgaaaatgaaggggttttatctgcatttgacattgaaccttgaagtactttaagtactccaaggggaaaattaaagtggaagtttcttcggatcttgtttagaaaaaactataaataaaaaattgatgctaccaaaaaaaaaaaaaaaaaaaaaaaaagaaaaaaaaaaaaaaaaaa

SEQ ID NO: 293475 - DNA, 1000 bp, Homo Sapiens; identical to SEQ ID NO: 224458

SEQ ID NO: 293476 - DNA, 1000 bp, Homo Sapiens
agcttggcggagaacacccaagatgtgcgggacgacgacatctttatcatcacctaccccaagtcaggcacgacctggatgatcgagatcatctgcttaatcctgaaggaaggggatccatcctggatccgctccgtgcccatctgggagcgggcaccctggtgtgagaccattgtgggtgccttcagcctcccggaccagtacagcccccgcctcatgagctcccatcttcccatccagatcttcaccaaggccttcttcagctccaaggccaaggtgatctacatgggccgcaacccccgggacgttgtggtctccctctatcattactccaagatcgccgggcagttaaaggacccgggcacacccgaccagttcctgagggacttcctcaaaggcgaagtgcagtttggctcctggttcgaccacattaagggctggcttcggatgaagggcaaagacaacttcctatttatcacctacgaggagctgcagcaggacttacagggctccgtggagcgcatctgtgggttcctgggccgtccgctgggcaaggaggcactgggctccgtcgtggcacactcaaccttcagcgccatgaaggccaacaccatgtccaactacacgctgctgcctcccagcctgctggaccaccgtcgcggggccttcctccggaaaggggtctgcggcgactggaagaaccacttcacggtggcccagagcgaagccttcgatcgtgcctaccgcaagcagatgcgggggatgccgaccttcccctgggatgaagacccggaggaggacggcagcccagatcctgagcccagccctgagcctgagcccaagcccagccttgagcccaacaccagcctggagcgtgagcccagacccaactccagccccagccccagccccggccaggcctctgagaccccgcacccacgaccctcataataaacacgtcgattctgtccaaaaaaaaaaaaaaaaaaaaaaaaaaaaa

SEQ ID NO: 293477 - DNA, 1000 bp, Homo Sapiens; identical to SEQ ID NO: 118867

SEQ ID NO: 293478 - DNA, 1000 bp, Homo Sapiens; identical to SEQ ID NO: 282015

SEQ ID NO: 293479 - DNA, 1000 bp, Homo Sapiens
tcttcccgatcgttaataactcctcaggtccctgcctgcacagggagcagcatggacctgtcagcaactaaggaacaaaagtaatgaagatttacacaaactttggtatgtcttactgaaagaaagaaacatgcttctaaccctagagcaggaggccaagcggcagagattgccaatgccaagtccagagcggttagataaggtagtagattccatggatgcattagataaagttgtccaggaaagagaagatgccctaaggcttcttcagactggtcaagaaagagctagacctggtgcttggagaagagacatctttggaagaatcatctggcacaagttcaagcagtgggttataccttggcacctaaataaaagatacaataggaaacgattctttgccttgccttatgtggaccattttctcagactggaacgtgagaaacgagcccgcatcaaagcacggaaggaaaatttagagagaaagaaagcaaaaattcttttaaaaaagtttccacatcttgctgaagcccaaaagtcaagtcttgtctaagatgtctgaactattaaatttaccattttgtttttcttgaatagtctgtgtacaggagtaaatatgttaagtggtttataaagaaattctgtttttagtcaagtgactttactaatcagttgttctaagtgtgaatatggcatgctaattagctaatttggtagaagctaatttgcttctaaaaatcaggtataaagttcagatgagattcccactttataaattctgacatttaagcaggctttaaatgtcacctgctaccttagagtgtgaaggtgatggtaactgccacagcaaaggcaataccgtagtttttgaatttgaataatagttttacctctgttgttaataggctatgaagaggatgtgggtattgctgttaataaacggaggactttgattcaaaaaaaaaaaaaaaaaaaaaaaaaaaaaaaaaaaaaaaaaaaa

SEQ ID NO: 293480 - DNA, 1000 bp, Homo Sapiens; identical to SEQ ID NO: 118868

SEQ ID NO: 293481 - DNA, 1000 bp, Homo Sapiens
ctgctctctcagatgccacagccactctgcagaggtgactcttggagctggaggaagtcaaaactgggccactgtttgtactgatggtgtattagcatgagcagcgtggccctggccccacactcccaaatctgccactccatagacccacttgcctcaaggctttatatttggctgctttcttacaatgagaattaagatttttaaactgaagttgaccatacaggttgcattagccctaactggcttcatgtaagaagggtgactgcctaaactagttccttgtaagctgaaccatcaattatcagttgaagccatacttttatttaaattaatatacgtagataccagaggccaagccacagagaggataatagttcttcccaataaaggtgatattaatcagactaatttcgaactaaagaagttactgcttaaagacggaatttcaggggaagcaagactcatttagaacaaatgaaatttctccagtcctacatttctgaattgacttctagcacatcaaaaatatttcagtcattatcagtctcattaactgaaatgccaaatgctaaatgcagtgttctttcacactgttttaattttcttgggaaattgagtccagtggatgttaatggagtgggttgcccatccctgaaatgtcttattttcaagtgcctggcctgggaaagaaggggaagaaacaattgcattatatccaaagatacactataaaaatagagtttttaccaaaaaaagatgtttgttctcatctcagtaggcctcatttgggcaagtgacccacaggtcttttggcgagtttgctatttgcctgttgaaatacttgtttcaacttagagaacagttatgatgtgaccatagcatggcacaactaaaaatctaagcctgaaacctgaaaaaagagatatgacaagggaaattaatcaggctatacataagtattgtatttatttgaataaaaataaaaagagcaacccat

SEQ ID NO: 293482 - DNA, 1000 bp, Homo Sapiens; identical to SEQ ID NO: 118869

SEQ ID NO: 293483 - DNA, 943 bp, Homo Sapiens; identical to SEQ ID NO: 224461

SEQ ID NO: 293484 - DNA, 1000 bp, Homo Sapiens
tgcacgatttttattatgcttactgcgtagaattttatctacttgttccagaaataatacattaaccaaaaaggatttaattgttcagacttgtaagaggttcttcaattacataggcaggtttttcttaaaaatgaaaaaaaaatcaaagatttttttaacagttctcagacttaactgttgccttgaattacagcctagtttctaagcagtgaaatgtaatgataaagagggatattttaacatatttccgaatgaatgactcattatttcattcttttgagtaaccattgttaagggttgggggaaagcatggacaaaacatcactggaaacaaaggccgtaaccacagcaacagactttgtgatacagttaaaaggtgcagctgccagtgacaaataaaaacttttgttacatctcattattttcaggccaaggtgggagtatagtgcataataattgtacagtagcaatttttatcctaattaacccattgcggtttacctaaaagtaaccatcagtcagtgcaaaatgtgcctggttcttaagacaactttttatttagaactgtgagaccggtattttggaaacatttcaaaggaaacatatgaatttgttttgcgttgtgcactacatcatttctctcctgaggaagaattttaaacatgtacagctcattcaatatagatatgagccatggtggagaactttatcactcaagtagacggtaaacatccttaatatgttctaaattgtttatattgctatccataatgggattcacctccaaattatcaaagaaataactcagagtaatttgacaccagcccagatcatatattgattatacaattgtattataaagttcattcaaatcaaattaagaaaacctgagtctttagaagctgaaataatcaacttgtttgtgctgtttgcttgacataggttattgtttgaaaatattgttactttatcaataggaaaaaaaaaaaaaaaaaaa

SEQ ID NO: 293485 - DNA, 1000 bp, Homo Sapiens
ccagccggggcagccagcagtaccgggcgctcacggtgcccgagctcacccagcagatgttcgactccaagaacatgatggccgcctgcgacccgcgccacggccgctacctgacggtggctgccatcttccggggccgcatgtccatgaaggaggtggacgagcagatgctcaacgtgcagaacaagaacagcagctacttcgtggagtggatccccaacaacgtgaagacggccgtgtgcgacatcccgccccgcggcctgaagatgtcggccaccttcatcggcaacagcacggccatccaggagctgttcaagcgcatctccgagcagttcacggccatgttccggcgcaaggccttcctgcactggtacacgggcgagggcatggacgagatggagttcaccgaggccgagagcaacatgaacgacctggtgtccgagtaccagcagtaccaggacgccacggccgacgaacaaggggagttcgaggaggaggagggcgaggacgaggcgtagatgcccccgcgagacgggttagggaaagcggaggaggaaagcgagggggtggggggcttcccgggacgataacctggcagtggaaggaaagaagcatggtctactttaggtgtgcgctgggtctctggtgctcttcactgttgcctgtcacttttttttccttttttgtaatattgatgacatcaatgtaacatttgagatatttctgaattactgttgtaatggctaaaatcacataaacgtttgtgtcggaatggtgtcctctctttctcttcctttttctctttattaacgatttaaatgtaactttctgaacacattgcattgaattcttcctttaacaaaaagcaaaggcgtaggtaaaagctcaaatgaatttattctttcggtatggtaaaattgaaccaatcacagttaagatgagagatcaacctgagttttaaaatacctttaataaatattagttgaaaaaaaaaaaaaaa

SEQ ID NO: 293486 - DNA, 1000 bp, Homo Sapiens; identical to SEQ ID NO: 118871

SEQ ID NO: 293487 - DNA, 1000 bp, Homo Sapiens; identical to SEQ ID NO: 118873

SEQ ID NO: 293488 - DNA, 1000 bp, Homo Sapiens
aatgccttttatttatttttcccaattgccctgagcagtacaatgatgaacacacgtttcaagagcagacatcttgtcttgttcctgactctgacaagaaagcataagtctctcaccatttagtgtgattttagctgtgggtttttcttggacatccttatcaggttgagaaagttctcttttatttctagtttattgagtgttttatgatgaaacggtgttaggttttgtcaagtgatttttctgtgtctatgggcatgatcatgtggttttgtcgtgtattttattaatgtactctattgcattaattggtttttggatattaaaccaactttgcattcctggggcagtttccatttgattatggtatataaacctttttgtttattgctggcacatttctttttctttttctttcttttttttttttttttgagacagaatctcatcacactctgtcacccaggccaagttcaatggtgcaatctggctcactgcatcctcaacttcctgggctcaagtgatccttccacttcagcctcccaagtagctgggactacaggcatgtaacaccatacttggctaaattaaaaaaatggttttttgtagagatgaggtctcaccatgttgcccaggctggtcttgaactcctgaactcaagcaatcctcctgcctcagcctcccaaagtgctgggattactggtgtgagccaccacggccagctgctagcacattttttacctccctcatgcaagggtgcgtgtacacatacacacacacacacacctggccccaggtgggggttgtagtgagagcttcgggacagaccttggctcagggactgccctcatttgatgtcctttttcagcttccttccctgtgccttttttgcatttggctttattttgatttttcactttttccctttatcatggacttttatttttttaacagtgatatgggaattgaaaaaaaaaaaaaaaaaaaaaaaaaaaaaaaa

SEQ ID NO: 293489 - DNA, 1000 bp, Homo Sapiens; identical to SEQ ID NO: 224463

SEQ ID NO: 293490 - DNA, 1000 bp, Homo Sapiens; identical to SEQ ID NO: 224463

SEQ ID NO: 293491 - DNA, 1000 bp, Homo Sapiens
cctcattctgcggcctcagcaaaaagccacaaggtctgagcggcccgggtcctgccgggctgaccatctccggatcctgggacactctgcctgaccatctgtgtagctggtgtgggaatctgggggcattggagggagggggttttatttattgagaaatggacttcgcctgaggctgtttgccaattcagggttctgctgggcgcaaggaacgcactgttcaaacgcactgtttactttaagcgcacggggagaaacgaataaggaggacgtggtgatttttaatttatacagtaacttttgtacttctctggtatggagagtttggagccgaatgatttgcattttttacatgtccgacattatttaataaataatttttaaaagaaaagaacgataaatgaagccaacatgattttctcatttcgggaggaactctgttgcttcgcctggacaagaaggaaaatgctgatttcctccttgggtagaaagagggagcgagggcaaatggggagtagagagaaaacaggcgagaacaagcactctaattccagtgggctttaaaataagacaaaatcagctttacaacaatccctagaggctcgaccacagaataatgccagtcaccaccctgaacgcacaatctccagtgcaggatctaatgactgtacatattattgttattattattattgttattattgttgttctgtaaacatgttgcacaagcttagcctttttgcgttctgttgtgtgtggctgtaaaaccccatgctttgtgaaatgagaatcttgacatttttcttgtgaaatttggaaaatgtgatcaattgaaatcaactgtgttttgtgttctctatgtcaaagtttagttttatattgagaatgttaacttattgctttgtatcttgggaaaaaaactttgtaaataagttataaagtttctttgagacagtaaaattatgatttcttgaaaaaaaaaaaaaaaaaaaaaaaaaaa

SEQ ID NO: 293492 - DNA, 1000 bp, Homo Sapiens
caaaataagtctcatttctttttatgacacatttctctttacatgttaacaccttactactaccaaggcataattacttaacatgcttcgaggctgtagattccaagtatcttaaaagaaggaactataaacattgcactgaaaacttgctttaaagctttacctgacctgtcagtttgtagacaaacaactgataataagctttgaatggtgctaataagagtaggaattctctctattaaaaagaaaaaaaaaaagttgcccttcctccacaggtgatttagtaaatttagacagtagttaaactcttgttagtagacagtggtgtcctcaaaattttactttgtaattcttcagaattgattatttttattgtgtcaatacagagaaagcctttcagatctttgatatatcatagtcattaaaagaccttttcctatttgtattgataatgtattaaaagttgtttgtgcttaataaaagacttctttaaacatcttatttaatttagtagttacatcctatttccaaacatgagtgccttatttaaaagggcattcttaggactgtgaggatggtttaatatttgttttttcatggtggttgcatgtattttagacaggaaatacatatgtaagcatgtgtatataataaataagcatgttttatcatgaaaaattattgtgaacaatttagatctttaagaacttattaataatggaatactatttctaatttttctctttttcaacttgaaaaatattctcaaaattattaactaccctgaagatactttgtctttaggggaggagggctgaggaagaaggcatacataattacttcagtgtaatcctttatatcagagtaatctttcaggaactaaaatagcaattgttaataaaatttagtttctcattatagtctaaaagcaaaataaattctgaagtagtccaataacagaactgtatgacccctttagaaataaaatttatcatgaaat

SEQ ID NO: 293493 - DNA, 1000 bp, Homo Sapiens
ccccaaagactccatgggatggacctgagtcagccgaatcccagccccttcccttgggcctgctgtggtgctggacatcagtgacagacggaagcaggagaccatcaaggctacgggaggcccggggcgcttgcgaagatgaagtttggctgcctctccttccggcagccttatgctggctttgtcttaaatggaatcaagactgtggagacgcgctggcgtcccctgctgagcagccagcggaactgtaccatcgccgtccacattgctcacagggactgggaaggcgatgcctggcgggagctgctggtggagagactcgggatgactcctgctcagattcaggccttgctcaggaaaggggaaaagtttggtcgaggagtgatagcgggactcgttgacattggggaaactttgcaatgccccgaagacttaactcccgatgaggttgtggaactagaaaatcaagctgtactgaccaacctgaagcagaagtacctgactgtgatttcaaaccccaggtggttactggagcccatacctaggaaaggaggcaaggatgtattccaggtagacatcccagagcacctgatccctttggggcatgaagtgtgacaagtgtgggctcctgaaaggaatgttccagagaaaccagctaaatcatgacaccttcaatttgccatcatgacgcagacctgtatacattaggttaaatctgaatttccactgctttggagagtcccacccactaagcactgtgcatgtaaacaggttcctttgctcagatgaaggaagtagggggtggggctttccttgtgtgatgcctccttaggcacacaggcaatgtctcaagtactttgaccttagggtagaaggcaaagctgccagtaaatgtctcagcattgctgctaattttggtcctgctagtttctggattgtacaaataaatgtgttgtagatgaaaaaaaaaaaaaaaaaaaaaaaaaaaaaaaaaaaaaaa

SEQ ID NO: 293494 - DNA, 1000 bp, Homo Sapiens
aatcttcggtttctgataacccctgggtccatctggccatcagcctcagcagtgagcaaagcaataccatactcatttctatgttcctgttccttcctctgctcctcctttggagaagcaataattcatgggggatgatacagtagcactttacaaatggctccatgtcattcatcccaggggccataatctcttgcaccacctattcttacttcctgttcagctcctttacagcttttattttcaactgcttcccaacttggtggggcctcctttaaggatgagccaatagtaagaatgtggctgtaatcagcagagacccctctgaggggtatctgttctgcagcccctagtgaaatcatgtgatgtgagacagaaacctaaacatggtacttgattctaaacctgtgccagtctatagcctctgcctccccaagcagagctcaagccaaacgcttctgtcctctttccttctgcattaaccctttgctgatcctcaggggccactcccccaacacccctgtacttgggtgagggatgttggacagagcctgttttcatgtactgcaggtgggggtgtgctgacatgtttgctcttggttgatggagaaggtacagaggccagggagtgaaaatggttgacagaagagggaagagttaggtgtctcatagtcactcatagtggggtggtcaggggtaatggcatctccccactttaggcttctcaaacagacttttgacacctctcaagttcagagctctgatgtggaaagacaggaggtgtggggaaggagggggatttcgtgtgtttgcatgagtgtgcgcttcaggccttgggagttggcaagagggagggaaggaaggagagcaaaatcttcggaatgtgtttcttgtacctgagggatcctgccctgaatctccatagtctccactgtgaactgaggaggggaggggtgtgctggggaataaatcttgtatgagaacaaaaaaaaaaaaaaaa

SEQ ID NO: 293495 - DNA, 1000 bp, Homo Sapiens
tgtggggctgtaatgaggccgggccggtgcagccaccctgcccctccctggcctggccctggccctcctgctgctgctggtccagggggtgtggctcagtggctggtggtggacctggagagtggaggcaccggccaggcaggggggcaggggagctcaggcctggggtctgggggccacctgccttgcgtgcttttctgggttttgaggggtgtctgggggaagcggtaatggtggctgtgcattctggtcagtctggacctcagcaacttcatctcaggactaaagagctgggtccttccccctgctccatctgagccttggtagggttaaagggaggtgacagggtgaagagggatcctgtgcaggggccacctgggagatagcagggggcacagagagagcagggtcagctccctcggctgggacctccctggcattgggagagccccacacggccttggctattgcttccttcaggctctgcccaccaaggtgccctctccccggggaccttagggtgagcttgcttttggcaggccttcctcgatcctcagccaaaggaacctgtgcaagacactggctcagcagttccccaggccacagtatcagcaagataaaagtgagtgtgttttgtcgggagggaactccaggggaagtgaggggagaaggttccccagggacagagttagggaaagagtataaatagccagccaggggcggtggctcatgcctgtaatcccagcactttgggaggccaaggcgggtggatcgcgagatcaggagctcgagaccaccctggccaacatggtgaaaccccgtctctactaaaaatacaaaaaattagctggatgtggtggcatacacttgtagtcccagctacttggcaggctgaggcagaagaatcacctgaacccgggaggtggaggttgcagtgagccaagattgcaccattgcattccagcctgggtgacagagcgagactccatctcaaaaaaat

SEQ ID NO: 293496 - DNA, 1000 bp, Homo Sapiens; identical to SEQ ID NO: 224465

SEQ ID NO: 293497 - DNA, 1000 bp, Homo Sapiens
tgatcagggaaaatatcatctattaagaacagggaaccacattttagctgtagattaggaatggtaatttttatctggtgttttagtttccaaaacatttacatattgatctactcctcgccctagaccaaacctaattccattcttactgatatgcacaatcactctctgtcctcattgtcacctctagcccctaaattcctccctttctcagtctacctactctttgtgactccctcatatcttttccccctggcatggatgtcctgctcagacactccacttagaagacagtttccctttttcactgtcctcccaccattcattactcctcctccagataccaactgctgatgttgctctagaaaaaccaccaaacatgactgttctttccgtgtaagctatcccacctcagcggcaccctcactgctggtgaccagccttgtaaccccctggagatgcccatgttccttatggtagctacctcttacttcaaattcttctgcctccctcatgctcgcagccactctgtgcccacctcatcttcgtagggaccttgattttggggacacacattgcaacttcccacttctgacgaaaggtctccatgcttttgctgttttctttactcttgtcaaggttgggtacttcaagctcaaagcctatctaccttgatccaaaaactacctttccataatgttctcacatctttactctgtcctacctctcattttcaatcctgtttaaaagacgtttaagtgtccaaactttaacctcttgaagctagtcctctccccactttccatctttaaatgggcatatatacaataaaggctctgtccatctccatctcttatatataacaatactgtgacttaaaaaccaactcagtattggaaattttctaaagttctgtcctagagttctttcctgacctctagctccatacttctgattgcctaataaatatgacatggatgttcagtggaacttcccatct

SEQ ID NO: 293498 - DNA, 1000 bp, Homo Sapiens
cagatctccaggctgaagtgaaaacgttcatgtttgcaggacatgacaccacatccagtgctatctcctggatcctttactgcttggcaaagtaccctgagcatcagcagagatgccgagatgaaatcagggaactcctaggggatgggtcttctattacctgggaacacctgagccagatgccttacaccacgatgtgcatcaaggaatgcctccgcctctacgcaccggtagtaaacatatcccggttactcgacaaacccatcacctttccagatggacgctccttacctgcaggaataactgtgtttatcaatatttgggctcttcaccacaacccctatttctgggaagaccctcaggtctttaaccccttgagattctccagggaaaattctgaaaaaatacatccctatgccttcataccattctcagctggattaaggaactgcattgggcagcattttgccataattgagtgtaaagtggcagtggcattaactctgctccgcttcaagctggctccagaccactcaaggcctccccagcctgttcgtcaagttgtcctcaagtccaagaatggaatccatgtgtttgcaaaaaaagtttgctaattttaagtcctttcgtataagaattaatgagacaattttcctaccaaaggaagaacaaaaggataaatataatacaaaatatatgtatatggttgtttgacaaattatataacttaggatacttctgactggttttgacatccattaacagtaattttaatttctttgctgtatctggtgaaacccacaaaaacacctgaaaaaactcaagctgacttccactgcgaagggaaattattggtttgtgtaactagtggtagagtggctttcaagcatagtttgatcaaaactccactcagtatctgcattacttttatctctgcaaatatctgcatgatagctttattctcagttatctttccccataataaaaaatatctgccacc

SEQ ID NO: 293499 - DNA, 1000 bp, Homo Sapiens
taagagatcaagtttcagcaggcagctttatctcaacctggacatattttaagattcagcatttgaaagatttccctagcctcttcctttttcattagcccaaaacggtgcaactctattctggactttattacttgattctgtcttctgtataactctgaagtccaccaaaagtggaccctctatatttcctccctttttatagtcttataagatacattatgaaaggtgaccgactctattttaaatctcagaattttaagttctagccccatgataacctttttctttgtaatttatgctttcatatatccttggtcccagagatgtttagacaattttaggctcaaaaattaaagctaacacaggaaaaggaactgtactggctattacataagaaacaatggacccaagagaagaaaaggaagaaagaaaggttttttggtttttgttttgttttgttttgttttttgtttttttgagatggagtctcactctttcgcccaggctggagtgcagtggtatgatctcagctcactgcaagctccacctcccgggttcacgccattctcctgcctcagcctcctgagtagctgggactacaggcgcccgccaccacacccggctaattttttgtattttttgtagagacggggtttcaccatgttagccaagatggtctcgatctcctgacctcgtgatccacctgcctcggcctcccaaagtgctgggattacgggtgtgagccaccgtgcccagcctttttttttttaatagaaaaaataatccgactcccactacatcaagactaatcttgttttgtgtgtttttcacatgtattatagaatgcttttgcatggactatcctcttgtttttattaaaaacaaatgatttttttaaaagtcacaaaaacaattcactaaaaataaatatgtcattgtgctttaaaaaaataacctcttgtagttataaaataaaacgtttgacttctaaactctg

SEQ ID NO: 293500 - DNA, 1000 bp, Homo Sapiens; identical to SEQ ID NO: 224466

SEQ ID NO: 293501 - DNA, 1000 bp, Homo Sapiens
cacgctgccccacaggaatgctgctgggaaaagcagggcctgccagcaggtatgagatctagcctgctttcagccatcaccttgccacagtgtccccggcttctaagcctccaatatcaccctgtgagcctcgcacagctcagccccaacacagaggtgagaccaggaataaggccacaagtatctcactttctctgcagaaatcaatctttacttcatcagagagacctaaagcgattcttacaaggagcttgctgcaagaaacacggtcattcaatcacattgaggagggtccacatggcattgagagggtgctgcccgctcaatgcccagcagcagctctggaaggcagtgctcagccccatcaccactgtcccgtggatgcctgtgtacctcttgccttttctgggcttgcgtttctctcctctagtgggtggggatgactttcaatgactttcaatacttcccctgaaggaagaatgataaggagaaatgtctgttttgaggaaagggctttgaattccccagatactgaacaatttgtgtttgtgactgatggagaatttcaggaatgaatgagaaagcctttgcgaaactatgcaacagtttacatcagtcatgtgaagtatttgtctaaaacagagcaaactgaagaccaaattattctcctgttgaggtccgtggatggcagatttaaagggaagaaccacaaaggcttgcaaagataggagaggctccatctctaatgcatgtagaagctccttacgggtgcccatcaagagcatagcttggaagccaccatgctgtgcggaactgcgtcagggcaaatgtcacagcaggatttccccaacccagctccatcatcacagacacagagagctgcaggggaggcctgcccactgttttgtcgactctgccctcctctggcagcatagatccttaggtgctcaataaaggtgtgctgtattgaactgaagaagtgagaaaaaaaaaaaaaaaa

SEQ ID NO: 293502 - DNA, 1000 bp, Homo Sapiens
cctcttcacagtgggctcactgctagaacagggggccctactggagggaacccgcttcatggggcgacacagtgagtttgctgcccatgccctgctactctccatctgctccgcatgtggccagctcttcatcttttacaccattgggcagtttggggctgccgtcttcaccatcatcatgaccctccgccaggcctttgccatccttctttcctgccttctctatggccacactgtcactgtggtgggagggctgggggtggctgtggtctttgctgccctcctgctcagagtctacgcgcggggccgtctaaagcaacggggaaagaaggctgtgcctgttgagtctcctgtgcagaaggtttgagggtggaaagggcctgaggggtgaagtgaaataggaccctcccaccatccccttctgctgtaacctctgagggagctggctgaaagggcaaaatgcaggtgttttctcagtatcacagaccagctctgcagcaggggattggggagcccaggaggcagccttcccttttgccttaagtcacccatcttccagtaagcagtttattctgagccccgggggtagacagtcctcagtgaggggttttggggagtttggggtcaagagagcataggtaggttccacagttactcttcccacaagttcccttaagtcttgccctagctgtgctctgccaccttccagactcactcccctctgcaaatacctgcatttcttaccctggtgagaaaagcacaagcggtgtaggctccaatgctgctttcccaggagggtgaagatggtgctgtgctgaggaaaggggatgcagagccctgcccagcaccaccacctcctatgctcctggatccctaggctctgttccatgagcctgttgcaggttttggtactttagaaatgtaactttttgctcttataattttattttattaaattaaattactgcaaaaaaaaaaaaaaaaaaaaaaaaaaaaaaaa

SEQ ID NO: 293503 - DNA, 1000 bp, Homo Sapiens
gaaggctttagtggcttcaagaggtatgtgaccgctgccgaggacaaggagcttgaagccaagatcgcagttgttgaaaagtataacatcaggattccagagctggtgcaaaggatagaaaaatgccatatagaagatttggactttgcagagtacattctgggcactgtgcacaaagccaaaggcctggagtttgacactgtgcatgttttggatgattttgtgaaagtgccttgtgcccggcataacctgccccagcttccgcacttcagagttgagtcattttctgaggatgaatggaatttactgtatgttgcagtaactcgagccaagaagcgtctcatcatgaccaaatcattggaaaacattttgactttggctggggagtacttcttgcaagcagagctgacaagcaacgtcttaaaaacaggcgtggtgcgctgctgcgtgggacagtgcaacaatgccatccctgttgacaccgtccttaccatgaagaagctgcccatcacctatagcaacaggaaggaaaacaaggggggctacctctgccactcctgtgcggagcagcgcatcgggcccctggcgttcctgacagcctccccggagcaggtgcgcgccatggagcgcactgtggagaacatcgtactgccccggcatgaggccctgctcttcctcgtcttctgaggacaaggcgcacgttctccgcagtgcagagcagcttgccgaggaccccgcgtgaagaaagccagcgaggggggcttctgctccctgagactctgggttcacccacagcactttctgaggaagaggacaccagcccaagctggacctgccatttctccactccctacagacagccagtctccacttgcctcccctctggatgtatctggtcagggaagtgggggatgttcttttgataaaaaaaaaaaaaaaaatttatgtatttaaacttttattacaagatttcaattaaacaggcaccatagcactggca

SEQ ID NO: 293504 - DNA, 1000 bp, Homo Sapiens
tgtacatcacatttcttaactcgttttaacctctgaaaagaatatattcttctttgtagtccttcttcccacccccttgccctctccctctccctgctcccagttgtcttacagttgtaaatatctgatttgaggcccaataactcttgccaagtaaagtcagcaaacaacaaacaaaccaaaatgtggggaaaaggcatttctcaaccatctctcagcagttattgatcatttcttaaggaacagcattgtgatcaaagactcaactttacgtaaaaatcagtggtaaattggggttgtatttggccatttgattacatttcaggattgaatagttttcagaatcacatgtaatccaaagacagtaggtagtgatgtcccttatccctgcagctgttttaagatagagacctcagaagactctgcttgaccgatgaccaataattatttgaaaaaaaaagaaaaaatgagagaaataaaacagatatttaagaactttagccacctatttagaatagttatagccagaaaaaaaaacaagggcatgagttcaaatgcattactatcagtgtcctaggcaatacctaacctactctgaaattgtgattcaaaagcagtatttcaagaggcattctccttttttggtttgctgaccccacttggactggtaggtttggtgaggcccccataaaccagctggagcagacccttttcatctcctgtgcctgtaacacccctcttcccccaccccctccgcaattcaatgagggctttcttgggtcagaggacttcaaggttgtctagagaagtttgccatgtgtgtaaggtgctgtgaactgtgagtgctgaagattcgcagcattcaataccaggcagccaaagagctgctcttgcaattattttggctctcaagctctgttcttcatcgcattctcatttctgtgtacatttgcaagatgtgtgtaatgtcattttccaaaaataaaatttgatttcaata

SEQ ID NO: 293505 - DNA, 1000 bp, Homo Sapiens
tgtggctggaaatcattgggatggctattctaaaggtgtcaacaggaaattgggaaggacgggcctatatccctcctacaaagttcgagagaagatagaaacggtcaagtaccccacatatcctgaggctgagaaataaagctcagatggaagagataaacgaccaaactcagttcgaccaaactcagttcaaaccatttcagccaaactgtagatgaagagggctctgatctaacaaaataaggttatatgagtagatactctcagcaccaagagcagctgggaactgacataggcttcaattggtggaattcctctttaacaagggctgcaatgccctcatacccatgcacagtacaataatgtactcacatataacatgcaaacaggttgttttctactttgcccctttcagtatgtccccataagacaaacactgccatattgtgtaatttaagtgacacagacattttgtgtgagacttaaaacatggtgcctatatctgagagacctgtgtgaactattgagaagatcggaacagctccttactctgaggaagttgattcttatttgatggtggtattgtgaccactgaattcactccagtcaacagattcagaatgagaatggacgtttggtttttttttgtttttgtttttgttttttcctttataaggttgtctgtttttttttttttaaataattgcatcagttcattgacctcatcattaataagtgaagaatacatcagaaaataaaatattcactctccattagaaaattttgtaaaacaatgccatgaacaaattctttagtactcaatgtttctggacattctctttgataacaaaaaataaattttaaaaaggaattttgtaaagtttctagaattttatatcattggatgatatgttgatcagccttatgtggaagaactgtgataaaaagaggagctttttagtttttcagcttaaaaaaaaaaaaaaaaaaaaaaaaaaaa

SEQ ID NO: 293506 - DNA, 1000 bp, Homo Sapiens
caccaccacaaaagcacccaggctgctgcctgccccacgggcgtacctagtccccgagaacttccgggagaggaaccttcagctcatccagtccatcagggacttcctgcagagcgacgaggcccgcttcagcgagttcaagagccactcaggggagttcagacagggcctgatctccgcagcccagtattacaagagttgccgggacctgctgggggagaatttccagaaggtctttaatgagctgctggtcctgctgcccgacacggccaagcagcaggagctcctgtctgcacacacggacttctgcaaccgcgagaagcctctgagcaccaagtccaagaagaacaagaagagcgcgtggcaggccaccacccagcaggcgggcctggactgccgtgtgtgccccacctgccagcaggtgctcgcgcatggcgatgccagcagccaccaggcgctgcatgctgcccgggacgacgacttcccctccctgcaagccatcgccaggatcatcacgtagctcccgccagcgtggccagagctgtcgcaccgtgagcgtccttcctccttcctctccgggctgccaggcagccaggtaaggcctggtgaggccacttggcctcttggttggccaggcccaccaggaagtcaccaggacagtccacccgccctgttggcacactcaagcgggagtccacccctgcctcagtggtgggccagtctcggtttgcattcttgtgcttttgggaggtgccaggggagggaagggctgggatgctgggacctgttgttgctggcaaagccagaggtcacagtggcctgatctgggccctcccaaagctgagggctgcagcccgtggggcctcagagctgaaagctgcggcgccactggtgccagagtcagatgtcacagatgtgttgtgtaaacagttggctgtttcgtgcttcaagaatgttcaggattaaaagcagacaagaaattgtgaaaaaaaaaaaaaaa

SEQ ID NO: 293507 - DNA, 1000 bp, Homo Sapiens
tgaattcaaatgggatttacactggcttcattaaagtacagatggaactctgcaaacctccacagacttctccaaattctggaaaactctctcccagtagcaatggctgtatgaatacacttcatatcagcagcacaaacactgtcggggaagtgatcgaggccctgctcaaaaagtttctcgtgactgagagccctgccaagtttgcactttataagcgttgtcacagggaagaccaagtctacgcctgcaagctctcagaccgggaacatccactctacctgcgtttggtagcagggcccagaacagacacacttagttttgttcttcgtgaacatgaaattggagagtgggaagccttcagccttccagaactacagaatttcttgcgcatcttggacaaggaagaagatgaacagctgcagaacctgaagaggcgctacacagcctacaggcagaagctggaagaagccctccgtgaggtgtggaagcctgattaaagcggggctccctgcccgtgaggcccggtgcaggaccgatgtacaaaacagcagcaagtgcctctcttctcagagggctgctgtcttgccccactatgctagggtcttcgcctttctatctgtagattttgttccccaaacctggtcacacagcatcctgcaccttagcgtcccatgtaagggactctgcaagcttgttgttcagcaccgcagtgttacctcttggcaagctgtgaacctgtcgcctcatcaggagcattcgagggtgcttggaagcatgaactctgggggtgtttttttttttggttattttaattatgtgatgatgctgttaagcttacagatatgcagttgattttttaaaaagcttaactaggaatctttctgaatacttgtcctattttgaaactacctgtctggttttttgtttggttttgttttctttttttaatgtcagaggaatctatccatgtgaatcgaaaggcacaggaatctaggaa

SEQ ID NO: 293508 - DNA, 1000 bp, Homo Sapiens; identical to SEQ ID NO: 224468

SEQ ID NO: 293509 - DNA, 1000 bp, Homo Sapiens
tggtgaaatccatggagaaaaagatcctacccgtgcagctaaagctggtggagagcacgatggaacagaacttcctgctggataaagagggtgttttccccctgcaacctgagctgctctcctcccttggggacgaggagctgaccctcacggaggctctagtcgggctgagtggcctggaagtgcagagatcgggcccccaatatatgtgggacccagacaccctccctcgcctctgtgctctttatgcaggcctctctcaccttcagcagcttaccaaggcctcctaatttgccttttacgtctgcttcatgactccctaatgccttcccaacctcgtggtgctgtgtccttaccacctaagggcatttcagagccatcagctgaagacatctgaaatctcagctggtcacccatgataaccaacttccacctgcccaaccatatatcaccccctacccctccagctccgcaacccactaagcccatctgctgatgcttaaattttctttacttttcttttttttttttttttttttttttgagatggaggctcgctctgtcacccaggctggagtgcagtggcttgatcttggctcactgcaacctccgcctcccaggttcaagcagttctcctgcctcagcctctcgagcagctggaattacaggcacgtgccacgacacccagctaatttttgtatttttagtagagacggggtttcgccatgttgcccaggttggtctcgaactcctggcctcaagtgatctgcccgcctcggcctcccaaagtgctgggattacaggcgtgagccaccgtgcccggcctgtgcttaaatattctaggagtagaagcactcagacttttaaaactatgagccgtttcagcaaaactgagaaaaaaagaagattaattaatttcctatcctaatccctcctacttatacttccccaaaaaacaagctttactggaattaatggaaaatattatgtcaatcttagg

SEQ ID NO: 293510 - DNA, 1000 bp, Homo Sapiens
tatggcgtgagcaccgctatgggagaccctggcttggaaagtgaacttgcagccttggatggggaagggccagatgctgggtgggtgcctgtcaccttgaggtgaccatctagggtcagtacctgctgggcttaggacagcgcctgaggctgggaatacctgtctctgctctagcagaggctaaagcaggctagagcagtggaggggtggagttgatgaaaggagaggagtagatgagatggaatttttccagcctcatcctggcctgccctctagactccagtccccaagccctcagcctagtgggtgtcatggatggatctgggggtgtcagacaggctaccctgtgccagggagggggcagaatgggcctgcagcttcctgcagaggaagcaggactgggtagcagagccgggaaggtgggtggcccattacaggggggtccccagggtgtcctctggcagggctgtgactgctgcaagctctgccttcaccagtagctggtgccaggacagagctctgggacagcaggcagaggccgagcctgggccacagctcagccactgacttgggtatcagtttccccttctgagaagtacagagtgagacttaaagaacccctagatccccaccagttcaacactccattaactgggaagcccagagtcctgtccggcctgccaagttcatcctggtggacagcgggaggcctccgctaactgttctcttcttttccttattaataaaacacacaatgcctagctggggggtcggaaggcaaatgccctagatggtggggtcacgtctttctccttctccttcctccttctgctggctgaagtgatgactggagctcagcaaccactttgcaccatgaggcagcactgagcacggtagggcagcctggtgagaggggcctagctcgctgccgacagaagtcactgcctacctcagggtccccttacctgggtgggaaataaatttctgctgtgttgaagct

SEQ ID NO: 293511 - DNA, 980 bp, Homo Sapiens
cagtgcccaggcaggcccaggagttgacatttctctgcccagccatgggcctcaccctgctcttgctgctgctcctgggactagaaggtcagggcatagttggcagcctccctgaggtgctgcaggcacccgtgggaagctccattctggtgcagtgccactacaggctccaggatgtcaaagctcagaaggtgtggtgccggttcttgccggaggggtgccagcccctggtgtcctcagctgtggatcgcagagctccagcgggcaggcgtacgtttctcacagacctgggtgggggcctgctgcaggtggaaatggttaccctgcaggaagaggatgctggcgagtatggctgcatggtggatggggccagggggccccagattttgcacagagtctctctgaacatactgcccccagaggaagaagaagagacccataagattggcagtctggctgagaacgcattctcagaccctgcaggcagtgccaaccctttggaacccagccaggatgagaagagcatccccttgatctggggtgctgtgctcctggtaggtctgctggtggcagcggtggtgctgtttgctgtgatggccaagaggaaacaagggaacaggcttggtgtctgtggccgattcctgagcagcagagtttcaggcatgaatccctcctcagtggtccaccacgtcagtgactctggaccggctgctgaattgcctttggatgtaccacacattaggcttgactcaccaccttcatttgacaataccacctacaccagcctacctcttgattccccatcaggaaaaccttcactcccagctccatcctcattgccccctctacctcctaaggtcctggtctgctccaagcctgtgacatatgccacagtaatcttcccgggagggaacaagggtggagggacctcgtgtgggccagcccagaatccacctaacaatcagactccatccagctaa

SEQ ID NO: 293512 - DNA, 1000 bp, Homo Sapiens
atgcaaacatgtgggaatgtctccaatcaatttcagttaggtacctgtcggcttggctgggcctattactgtgctggaggtggagcagctgcagccatgttgatctgcacctggctctcttgctttgctggaagaaaccccaagcctgtcatattggtggagagcatcatgaggaataccaattcttatgctatggagcttgaccattgcctcaaaccttgagctttgaaagaagattggagagggtgggaaaggggaggagggagccctgaaaagaggtactaaggattaggccatttgtcatctgactgtcattagcatagcctagtgtttgcatgctttttaaactaattgtcgttcattttcacttatctttaagccagtaggtcactggctgtttataaaattcatcagaggaaacattctcagacatttacccaactggcaagtcgtgctaacccgaagacccaaagtacccctttatgcaaaataggatccaaagctaaggctgggtaagaatagttgtgcagggagggagcacgagatgggcagagctggttcctaccactccattcacacagttcatcagttcattcccaagtatttattgtcacccccaaacatctctggagtactactgctcaatttttgtgtcgttatcaggagtataccttggctcttccttttttttctcctgcttccccccgcaccttgtggggaagcttcaggggagcgggggagggtgattcccagtggtggggaaaacattaatcaaggatacttgcatttagcctggagccccttcctcattatgctttagaatattcataggagttccatttgtattctggctgggtgatgagcaaaaaaaatatatagtagcaaatattctctcatcctttagagataaagaaatggtgttcatcaaatgtactgagaatagactagcatttgtggggcactcaataaatttaaattcatggtgacagtgaaaaaaaaa

SEQ ID NO: 293513 - DNA, 1000 bp, Homo Sapiens
tttggagacaactaagggattattatcctgtcaagctggtgaaaacagcagagctgcccccggatcggaactacgtgctgggcgcccaccctcatgggatcatgtgtacaggcttcctctgtaatttctccaccgagagcaatggcttctcccagctcttcccggggctccggccctggttagccgtgctggctggcctcttctacctcccggtctatcgcgactacatcatgtcctttggactctgtccggtgagccgccagagcctggacttcatcctgtcccagccccagctcgggcaggccgtggtcatcatggtggggggtgcgcacgaggccctgtattcagtccccggggagcactgccttacgctccagaagcgcaaaggcttcgtgcgcctggcgctgaggcacggggcgtccctggtgcccgtgtactcctttggggagaatgacatctttagacttaaggcttttgccacaggctcctggcagcattggtgccagctcaccttcaagaagctcatgggcttctctccttgcatcttctggggtcgcggtctcttctcagccacctcctggggcctgctgccctttgctgtgcccatcaccactgtggtgggccgccccatccccgtcccccagcgcctccaccccaccgaggaggaagtcaatcactatcacgccctctacatgacggccctggagcagctcttcgaggagcacaaggaaagctgtggggtccccgcttccacctgcctcaccttcatctaggcctggccgcggcctttcgctgagcccctgagcccaaggcactgagacctccacccactgtggactccatgcctccaataaaaggtagttctgggcccagcgcagtgcctcgtgcctgtgatcccagcactttgggaggccagggtgggaggatcgtttgagcccaggagttgaagaccagcctgggcaacacagtgagacttcatttctacaaaaaaaaaaaaaaa

SEQ ID NO: 293514 - DNA, 1000 bp, Homo Sapiens
gatccagaaaaatattgactgtatgtcaggcccatgtccttttggggaggttcagcttcagccctcgacatcgttgttgcctaccctcaacagaactttcatctgggatgtcaaagctcataagagcatcggtttagagctgcagttttccatccctcgcctgaggcagatcggtccgggtgagagctgcccagacggagtcactcactccatcagcggccgaatcgatgccaccgtggtcaggatcggaaccttctgcagcaatggcactgtgtcccggatcaagatgcaagaaggagtgaaaatggccttacacctcccatggttccaccccagaaatgtctccggcttcagcattgcaaaccgctcatctataaaacgtctgtgcatcatcgagtctgtgtttgagggtgaaggctcagcaaccctgatgtctgccaactacccagaaggcttccctgaggatgagctcatgacgtggcagtttgtcgttcctgcacacctgcgggccagcgtctccttcctcaacttcaacctctccaactgtgagaggaaggaggagcgggttgaatactacatcccgggctccaccaccaaccccgaggtgttcaagctggaggacaagcagcctgggaacatggcggggaacttcaacctctctctgcaaggctgtgaccaagatgcccaaagtccagggatcctccggctgcagttccaagttttggtccaacatccacaaaatgaaagcagtgagtgagccccactttcctttttcttcctcctccagcaccttcgttgtttcctgggtagtctgcctgggtgaggctcccttcctgtttctcatctgtggcttctgaaacacttagactctggacccagcaagagtttcaggaagtgggttgctaggcagttagacaggcttgttggtgaacacccggtatgtagttccatttcagcacaataaaaagaaatcttgcattcaaaaaaaaaaaaaaaaaaa

SEQ ID NO: 293515 - DNA, 1000 bp, Homo Sapiens
gtggctctgtggaaatccccttctccttctattacccctgggagttagccatagttcccaacgtgagaatatcctggagacggggccacttccacgggcagtccttctacagcacaaggccgccttccattcacaaggattatgtgaaccggctctttctgaactggacagagggtcaggagagcggcttcctcaggatctcaaacctgcggaaggaggaccagtctgtgtatttctgccgagtcgagctggacacccggagatcagggaggcagcagttgcagtccatcaaggggaccaaactcaccatcacccaggctgtcacaaccaccaccacctggaggcccagcagcacaaccaccatagccggcctcagggtcacagaaagcaaagggcactcagaatcatggcacctaagtctggacactgccatcagggttgcattggctgtcgctgtgctcaaaactgtcattttgggactgctgtgcctcctcctcctgtggtggaggagaaggaaaggtagcagggcgccaagcagtgacttctgaccaacagagtgtggggagaagggatgtgtattagccccggaggacgtgatgtgagacccgcttgtgagtcctccacactcgttccccattggcaagatacatggagagcaccctgaggacctttaaaaggcaaagccgcaaggcagaaggaggctgggtccctgaatcaccgactggaggagagttacctacaagagccttcatccaggagcatccacactgcaatgatataggaatgaggtctgaactccactgaattaaaccactggcatttgggggctgtttattatagcagtgcaaagagttcctttatcctccccaaggatggaaaaatacaatttattttgcttaccatacaccccttttctcctcgtccacattttccaatctgtatggtggctgtcttctatggcagaaggttttggggaataaatagcgtgaaatgctgctga

SEQ ID NO: 293516 - DNA, 1000 bp, Homo Sapiens; identical to SEQ ID NO: 224473

SEQ ID NO: 293517 - DNA, 1000 bp, Homo Sapiens; identical to SEQ ID NO: 224473

SEQ ID NO: 293518 - DNA, 1000 bp, Homo Sapiens
accacttcagggtggtggccaagaatgagctgggggccagcaaaccctcggacaccagccagccctggtgcatcccccggcagcgcgacaggttcacagtgaaggctccgtgctaccgggagcccgacctgagccagaagccccggttcctggtgggcctgcggtcccacctgctgccccagggctgcgagtgctgcatgagctgtgccgtgcagggctcgccccggccccacgtcacctggttcaagaatgaccgcagcctggaaggaaaccccgcggtgtacagcactgacctgctgggcgtgtgctccctcaccatccccagcgtatccccgaaggacagcggggagtacaaggctgtggctgagaacacgctgggccaggcagtcagcactgccaccctcattgtcatagaacccagcacctagcctcacctcaccctgggatggtcctggacccttgaagcttcacttccgacacctgcactggcccgggaagccaatcccaaggatggaggctgtgcccagagccccaggaaaatgggagtgagaagatgcctggcgaggttttggccaggaggacgtgaagtccttggggaagaaaaacaagggaggagggcattccacctcctggctccaagctaagtcactcaacagaatgacagcgaacctcctggaccctcaccatatgggtttctttcttcttcgcatcaggagatccagagggcacctgcctgcaggatgggccggctccttattttcctgggctgagccgtttggagggagggtgggcacagctgggcctgctgtgaccactgggagggaagaggagaggaggtcagaggacctgggtgaggactagggcatcaaggtcgtgtgtgtgggtgggggcagcctccacctcctggattcaagagattccaggggtgcagcaagtgctttctatgcgtttcttcattaaaacattaggctaataaaaaaaaaaaaaaaaaaaaaaaaaa

SEQ ID NO: 293519 - DNA, 1000 bp, Homo Sapiens
gggctcttacaatcaggggtcataagctgctatgtcacctacctcaccttctcagctctgtccagcaaacctgcagaagtagttctagatgaacatgggaaaaatgttacaatctgtgtgcctgactttggtcaagacctgtacagagatgaaaacttggtgactatactggggaccagcctcttaatcggatgtatcttgtattcatgtttgacatcaacaacaagatcgagttctgacgctctgcaggggcgatacgcagctcctgaattggagatagctcgctgttgtttttgcttcagtcctggtggagaggacactgaagagcagcagccggggaaggagggaccacgggtcatttatgacgagaagaaaggcaccgtctacatctactcctacttccacttcgtgttcttcctagcttccctgtatgtgatgatgaccgtcaccaactggttcaaccatgtaagaagtgcctttcacctcctgccatgattctgaggcctccccagccatgtggaactctgagaaacctgaacggactccatttggctccttcatttgcaagacatcaagggctccttacccacccccttcctcaaggaattaacttgtgcaagctgactcccagcacatcaaagaatgcaattaactgataacatgctgtggcaagctatgtccgcagttcccaggaatttgtccagttgatattaccctaagcccctgtgtttttgtctggttgatagcacccaaagcccagcgtctatcaccttgtgatggatttaaagcccctgcacctggaactgtttgctttcctgtaaccatttgtctttttaacttcttttgcctgttttacttctgtaagactgctacagctaggctccccctcccctctttaaaccaaagtataaaacaaaatctagccccttcttcagggccgagagaattttgagcactagccgtctctcggtcgctggctaataaaggactcctcaattcg

SEQ ID NO: 293520 - DNA, 1000 bp, Homo Sapiens
ttgatgcacgtaatgacagtttcacaacctgcattgaacttgggaaatccctgttggcgagaaaacactatgcatctgaggagatcaaggaaaaattactgcagttgacggaaaagaggaaagaaatgatcgacaagtgggaagaccgatgggaatggttaagactgattctggaggtccatcagttctcaagagacgccagtgtggccgaggcctggctgcttggacaggagccgtacctatccagccgagagataggccagagcgtggacgaggtggagaagctcatcaagcgccacgaggcatttgaaaagtctgcagcaacctgggatgagaggttctctgccctggaaaggctgactacattggagttactggaagtgcgcagacagcaagaggaagaggagaggaagaggcggccgccttctcccgagccgagcacgaaggtttcagaggaagccgagtcccagcagcagtgggatacttcaaaaggagaacaagtttcccaaaacggtttgccagctgaacagggatctccacgggttagttaccgctctcaaacctaccaaaactacaaaaactttaatagcagacggacagccagtgaccagccatggtctggactgtgaagtttactaccatttgtcaagaatcaccctttccaaatcctctgggttttgactttttggcttccacttcacccaaaatgttaaaatttttacttaattcatagccttccttggtttcatatttgtttgcatttaattcatgtttgagtctcttaactgatggatgcccacttgccttaaagcagcatacttattttttgtttatttattgtgagctttttactttattaagattttacagcgaaacccttacatgagtaattgaaatgaaattaaatgagattacagcataatgaagaagacaactagaatctaacaggtatgacacattcagttattctaacagggcacagtactgtgctatatgtagc

SEQ ID NO: 293521 - DNA, 1000 bp, Homo Sapiens
ccacccgaggacgtccccccagccggagtcgggcatcaagcgactgatctttacagccataatgcctatggtagcagcgggactgataatagatgaccccacactgcagcctgtccgacgacttgtttcccttgtttagcttcttctcccgagataagaagcgcctggccaacacacagagaaacgtgcacatccaggagtcctttggacagtgggcaaacacccaccgcgatgacggttacacagagcaaggacaggaagccctgcagcatctgtgaccttggcccatctccaccctccaacctggactgcccgccaccagcgcctgcaaccgaactgcagcccaggggtcattgctgcctcaagcctctcggtgcagatgcaccctgaaaactgacccctcaaacagactgtctgatttgaggatggacattgaaaaactgacgccaaactctaaagaaatgtttatttatacccagggctatcactgtttctaatagatgactctgatcccgtaggatatatatttaataatcccacaaacggaggccagacttctgcgttaacttcagtaacacaagcttctttaagccaaatacatcacttgccactaccattgctgtttgacttgctttgtataaaatgctatgtgtagaggttttattatcacaggtgacatagttcagcaggaggcatggaagggctagatcttcattagttacattcatgaaattgtgatggtaacgtattatacagaatgtatccatcaggcagacaaggggtctgaagtcacaggctcagtagcccaactcagacacaaagccacagacaatatggatgatggtcctcttacccagaaactggagacaactttgcaggcaccctggctgcgttcctgataatgcctagagcatgtagcaatgttcaaggcaggtgccttggaatctgctgtgagttatgcagtactaaccaaacaaagttgctaaggatgagatgttgc

SEQ ID NO: 293522 - DNA, 1000 bp, Homo Sapiens; identical to SEQ ID NO: 118877

SEQ ID NO: 293523 - DNA, 589 bp, Homo Sapiens
gatgttggataagcagctcagcatgttccccaacatgtaagggaatcaggtcgagttctacactctccttcttggtacacatcctcagaatgcaggaagtgcctgtgcttgctgtgagtctttgtggacagaggcaggatcatgctggctagaatctagtggacaagggcaggcacattccccctgttcccaggtgggtccagagatgtcgcctgggagccagggcctggagttctgttactgtggctgagcttgcacccaagctacaagatgacatcctactcttccctcacctttctacaagtagaggagtctcttctcatggccaccattgtcccaggatgtgaggtctggaacagctgcagccattttgccaccatgggaaacctgggacatctgaactgactccatgaagcctgaagagaaagctaataagaaggcagagagaagaggaagagtcttggtctttggaaatatcttttggagctgctggatcaagtatcacttgaaggtagaactaaatctgcactttaaatttacatatccaataaaaagttctttatgttgtaaaaaaaaaaaaaaaaaaaaa

SEQ ID NO: 293524 - DNA, 981 bp, Homo Sapiens
ctgatcattgagagagtgacacctggtcttaggcttagaagaggagtagaagagagccagtgaagtcagggaaggcttccaaggcaaaaggaccagcaaaagggcagcacattccccctgttcccaggtgggtccagagatgtcgcctgggagccagggcctggagttctgttactgtggctgagcttgcacccaagctacaagatgacatcctactcttccctcacctttctacaagtagaggagtctcttctcatggccaccattgtcccaggatgtgaggtctggaacagctgcagccattttgccaccatgggaaacctgggacatctgaactgactccatgaagcctgaagagaaagctaataagaaggcagagagaagaggaagagtcttggtctttggaaatatcttttggagctgctggatcaagtatcacttgaagtattattgaatttattccccgaaggagagcggctaagagtattgcccggccacaggctctcaaccaccaacccgagcctcagattctcctcacacagccacagctgtaccacatggcccacgtggtatggtgctaattcctctgacatctaattttcactttttggcaatatttggtctcatcaagctttacacataaatattttcagcaaagtgctccaaatgcctttttcagaaatttgaatccacatgaaaacaatggcaacaagaaaaaggtgtaaactttccagaacaggcccagaatttgaaaatgtgataaagaggttattgtgcgcccgaacttttcacacaagaattggaggagatttaacacatggaataataaacagaggaaggcgggctaatgcagagcagatgggcctgcagggcagtgctcagcatttcaacatctttcccctggacctttggacccaaggtgattgcatgctggtgtctttagctaaaaataaagttaatgtctttggggcaatcaaaaaa

SEQ ID NO: 293525 - DNA, 1000 bp, Homo Sapiens
gctccagctctgggggcagctgtggctccagctctgggggctgctgcagctctgggggaggtggctgctgcctgagccaccacaggcaccacaggtcccaccgtcacagaccccagagctctgactgctgcagccagccctcagggggctccagctgctgtggagggggcagcggccagcactctggaggctgctgctgaagtggaccttgacttcctcttccttctgattctgcctgaatagctgagaggttccagcaaaagcttgaagtcttgcctggagaatccctctgctctggtgtcaggaaacccaaaatctttctccttaatggcatttagagactttcttctgcagatccatggctgccctgggaactccaaagcacacacctacttcctccccagctcacgctgctgtattctgtgctgcctgaactgaagaaataaaatccagaatctgccccccaacttgctaccagcctgcttgattttcctgtttgtgtcatccttgttctgctcccctgtgtctgctggtggctgctgaggccttggtggacagaggatggggaaaggggtcaggaggaaaaagcttgcatttctgtgtgttttgtgttttttcttctttcggtgttttccttttaaaccaagggactgaaatagcattgagaaatatttttctttcaaattctggttcctttcacctatgtaaccgcatccctcaggcatggccaggaggccgacttcatcctccttcccactatcacctcttcattcttgtgttcctcgttccccactccttccactaacaatctccctggactcctcctccatactgtatgtgcatgcattcacacacacatatgtacatgcacatagatgagatgaatctgcattgtaaaaaaattaaatcacatttagtgctgtataatttgcatgcaataaaattcaataaaattaaatgtaaaattaaaaaaaaaaaaaaaaaaaaaaaaaaaaaaaaa

SEQ ID NO: 293526 - DNA, 1000 bp, Homo Sapiens; identical to SEQ ID NO: 224474

SEQ ID NO: 293527 - DNA, 1000 bp, Homo Sapiens; identical to SEQ ID NO: 118878

SEQ ID NO: 293528 - DNA, 1000 bp, Homo Sapiens; identical to SEQ ID NO: 224478

SEQ ID NO: 293529 - DNA, 1000 bp, Homo Sapiens; identical to SEQ ID NO: 224478

SEQ ID NO: 293530 - DNA, 1000 bp, Homo Sapiens; identical to SEQ ID NO: 118879

SEQ ID NO: 293531 - DNA, 1000 bp, Homo Sapiens
gaaagcttgccaaagatggtgaatactgctggcgttggacaggttttaacttcggcttcgacctacttgtaacttacaccaatcgatacatcattttcaaacgcaatacactgaatcagccatgtagcggatctgtcagtttacagcctcgaaggagcatagcatttagattacgtttggcttcttttgatagtagtggaaaactaatatgtagtagaacaactggctatcaaatacttacacttgaaaaggatcaggaacaagtggtgatgaacttggacagcaggcttctgatcttccctttatatatctgctgtaacttcttgtatatatcaccagaaaaaaagaattgaaaataatcgtcacccagaaaatccagaaaactgaagatttcatcagttggaaacagtagcactttgaaaactttttaggccagctttaatttaatggccctactgatattcacatcgaaggtgactaacaatgacaaaggccttatgaactgtacagacaatacagaagattattcttatcctcattgcatttctatgcatatgcgtaagaacattttaaagccaagaaaatatctgtcaaaccatttctgttagaacgatgtcaattcatgcttttaatttagcatcaatagaaaattgctgtaggtaaatctcacatttatctgcaacaaaatatagatttaatttttagcttaaactttgtttctaccttatgttagtggacctcagttatccatctgtaaatttctttttatttggctaaaataatctaaaagaataatttggttggccaattagaaatgcctttttcagttggtgtattgaaagctttcctttaacattttcacctgctcattgtgattcctccttttagtctaatatctttccaggtcatacttgtttttaatcattaaatattttcttcctggtaaaaaaaaaaaaaaaaaaaaaaaaaaaaaaaaaaaaaaaaaaaaaaaaaaaaaaaa

SEQ ID NO: 293532 - DNA, 1000 bp, Homo Sapiens; identical to SEQ ID NO: 118880

SEQ ID NO: 293533 - DNA, 1000 bp, Homo Sapiens
ctacaccagcgaggtgcaggccatcctggccttcctcagcctgcagcgcacgggcagtgggggcccgggcaaccacccccacggccctgatgcctctgccgagggcctcaacccctacggccttgttgccccccgtttccagcgaaagttcaaggccaagcagctcaccccacggatcctggaagcccaccagaatgtggcccagttgtcgctggcagaggcccagctgcgcttcatccaggcctggcagtccctgcccgacttcggcatctcctatgtcatggtcaggttcaagggcagcaggaaagacgagatcctgggcatcgccaacaaccgactgatccgcatcgacttggccgtgggcgacgtggtcaagacctggcgtttcagcaacatgcgccagtggaatgtcaactgggacatccggcaggtggccatcgagtttgatgaacacatcaatgtggccttcagctgcgtgtctgccagctgccgaattgtacacgagtatatcgggggctacattttcctgtcgacgcgggagcgggcccgtggggaggagctggatgaagacctcttcctgcagctcaccgggggccatgaggccttctgagggctgtctgattgcccctgccctgctcaccaccctgtcacagccactcccaagcccacacccacaggggctcactgccccacacccgctccaggcaggcacccagctgggcatttcacctgctgtcactgactttgtgcaggccaaggacctggcagggccagacgctgtaccatcacccaggccagggatgggggtgggggtccctgagctcatgtggtgccccctttccttgtctgagtggctgaggctgatacccctgacctatctgcagtcccccagcacacaaggaagaccagatgtagctacaggatgatgaaacatggtttcaaacgagttctttcttgttactttttaaaatttcttttttataaattaatattttattgt

SEQ ID NO: 293534 - DNA, 1000 bp, Homo Sapiens; identical to SEQ ID NO: 224479

SEQ ID NO: 293535 - DNA, 1000 bp, Homo Sapiens
agagccacattccctgctgcacctggtctgcaggggtgccccaggacaggcccaagtcagcccagcatgcagctgccctcctaccctgaagatgggagtgggctttccaggggacataaggatgtcaggcctggacctcctgggcaggaaagggtgcaggtcctgagggcctgtgccccacagccccagcaccaggtggactgcagcgcagtgggtgggccagtggcagccagggagaagccccccgtcagcaggctggggtctgcccaccagggcctccccacgtctgcctttgagggtgcctgccatgccctgggggatcctggcatctttactggactggaagcaggagacagaacagtgtctgtcccggggtgacttcatcaggagaccgcccacatagagctggaccccgcagctgaagcggaaatgtgagacaggctggcacctccggaaaaactgcctttcagccttggtgttccgtgcaaggtgaaaagaaataggtcctcccagtttacagcttgaaatcaggctagtgagtggccctggagaccacgaggggagaatttaaaggccccggctggcagggtctaggtggctggcagaggcacatgcagaccctgcctggagcctgccctaggacgctgggcgggtcagtctccgtgcaggatgtgagcagcgtccctgggctctatccgcgaggtgccagtagcgtgtgcaggtacatacacgtgcgtgcacactgtgatgacacccggaaatgtctcaggatgttgaaatgtgtccttgggggcagaagtgtccccagttgagaatctgccccagaggaacacacccacaccaggcctcaggattttgtgttgatcaagttccaaggaaaaggaacatctcagccgggcgtggtggttcacgcctggaatcccagcacttgaggccaggagttccagagcagcctgggcaacgcagtgagagaccccatctctacaaaaaaaaaaaaaaa

SEQ ID NO: 293536 - DNA, 1000 bp, Homo Sapiens
cgtcacctgtggaggttaaaggagaggacggagatggagagccagaggggaccctcccagctgaggccccaccacccccgccacctgtggaggttaaaggagaggatggagatcaagagccagaggggaccctcccagctgagaccctgctactgtcaccgcctgtgaaggttaaaggagaggatggagatcgagagccagaggggaccctcccagctgaggccccaccaccactgcccctgggagctgccagggaagaaccgactccccaggctgtggccactgagggtgtattcgttacagaacttgatggaacgagaacggaagatttagaaaccattagactggagacaaaggagacatgctgcattgatgacctacctgacttggaagatgatgatgaaacaggcaaatctctggaagaccagaatatgtgctttccgaagattgaggtcatctcgagcttgagtgatgacagtgaccctgaactggactacacgtcactccctgtgctggaaaacctgcccacagacactctgtcaaatatatttgcagtctctaaagacacctcaaaggcggctcgggtgcccttcacagacatctttaaaaaagaagctaagagggactcggaaatccgaaaacaagacaccaagtccccaagacccctgatccaggagctcagcgacgaggacccctctggccagccactgatgccccccacctgccaaagagatgctgcaccactcacttccactggagacagggacagcgacttccttgcagcctcttctccggtgccgactgagagcgccgccacacccccagagacgtgtgtcggagttgcccagcccagccaagctctgcccacgtgggacctcactgcattcccagcaccgaaagcatcatagttttccccagttatatgtagcataaatggtttaattataaatgtctcccttaggcatgataaacattttaacacccaaaaaaaaaaaaaaaa

SEQ ID NO: 293537 - DNA, 1000 bp, Homo Sapiens
tgcagcagaatggtctatgtcattttccttctttgtttttttcctgacttacattcgtgattttcagaaaatttctttacgggtggaagccaatttacatggattaaccctctatgacactgcaccttgccctattaacaatgaacgaacacggctactttccagagatatttgatgaaaggataaaatatttctgtaatgattatgattctcagggattggggaaaggttcacagaagttgcttattcttctctgaaattttcaaccacttaatcaaggctgacagtaacactgatgaatgctgataatcaggaaacatgaaagaagccatttgatagattattctaaaggatatcatcaagaagactattaaaaacacctatgcctatacttttttatctcagaaaataaagtcaaaagactatgatatcatagtttttttataccttatttaagagaaacaacctgacgtgcaccaatcagtctgcacatcccaacccttcacattttataaattattgtagatcatgttttgttaggagcacttttatgagagacattttccatgactaaataatcagcattagtcagtaaatcctttagaactgggttttgaaatgggagttttatcatattaaatcatttcttgtagtcttacattttttgttgttgttctggaatctacctgtaaaggaaagtagacctggattcatgtgggctcttccatggcttaagtgttgcccaagagattttgtaggtaacgatttttttttttctggccacaatgccagatactaagctaattggtctatcatacacatgcttgcagtagtttcatgaagtttagtctctggcgtgaaattttaatcaccaatgaaggagagaggcacctgtaggtaaatttactttagtcatattttatataaaacaagggttagtattcatgtaacattgagaagtttgggaataacagcagatatgattaataaaagtcataac

SEQ ID NO: 293538 - DNA, 1000 bp, Homo Sapiens
tactatcaagacttgtgaatatatttgaatgtatgttgtttgaaaaacttgcacagggcattggagccatcatgaaaagcaggaaatgtaaacgtggaatgtatggcaggctgggcagaatgtatactgatccagggtatagactagatatttttgctgttgctgtttttattataaaatgttatatttgaggatatttaacattttccaattctgcttaagaggtaattcacaataaaaaaaacaaagaccaaaaatagcacattctgaaaaaaagattcttaataagattttattttgtgaagttcaaagattctttcctaaagtataacgtgttgttaaaaagtagtggtgttataactctcaatgtaatagtatgcaatatcaagaacacaggaagttcgtttcaagataggtgagatttaaaataaataggatgaggttgaagaaaagtatattggagcgcagataaatataaattgtggactgctatgaaaacaggttgtacttctccatatgtgagactactggaagtgagaagcaatatttgtcatttctaaaactggccaggctgtgctgacccaggattagtaatttgttatgtctgttttcccttagatgtttgggcactcagatgctatcttggtgcacacacacaacattgctgttcagtcacaaatccgaacaacttaatataataaattgtactaaaagtcatttaagaaataccaaaaagtaagcttttgtttctaaccattgttataaaggctaatataattgttgttatatagcagtaagatatatttgtgtgcatgcgtctccaagtcagttgtaaatgtcttgagaacagagaatacaattgtcatctttatattgcctcatttctccactaatacttagcaaataaaaggcaataagtaaatatgtactggttgaatgcctctggagacctagagtttaaagttttaagtcaataaataaataaatatttactcttaaa

SEQ ID NO: 293539 - DNA, 754 bp, Homo Sapiens
cttgagcccttcatggggctagcacaccaacaccatccccccagatgcttcagttgttggcttcgaatggcttactatttccatttctacggagaactgccatctcaggaatcacctcaccctggagtttattcccctcacccacagggtggctggcagccaacagctgactcgtacagagagtggcacaatgaagatttgaacccacgtatgtctcactggacgtatgcccaggaactggtaagctataaaaagacctcctttattgtctggagacatagaattagtccaaacggtgtcacctccaggaagccttactgtcacttccatggaggacagtggcctgggcccacaccaccctcctgcctgtcttcagcctttgctagtggatccttttcccacttcgaagactccccttacatcctcctccatgttgtcctccaaatgtgctggctgagagcccagcgcctgaatcagagggacctgggtttgaatcccacctctgccattgaacaccagctgtctgaccttgactgcgttcctttgcttctctgggcttcagattccccatctgaataataatagaagctaccttgggattgcctcaaggatcaaatgcgagagagttcaccttaaacaatgagtggagggcctggtgtgtaataaagcactcaataaatgttaactattattgatcttcaaaaaaaaaaaaaaaaaaaaaaaaaaaaaaaaaaaaaaaaaaaaaaaaaaaaaa

SEQ ID NO: 293540 - DNA, 1000 bp, Homo Sapiens
cttctttggctacaaggtctacccgaccctgcgctgccctgtgttcgtggtgcagtggctgtttgacgaggcacagctgacggtggacaacgtgcacctgacggggcagccggtgcaggagggcctgcggctgtacatccagaacctcggccgcgagctgcgccacacactcaaggacgtgccggccagctttgcccccgcctgcctctcccatgagatcatcatccggagccactggacggatgtccaggtgaaggggacgtcgctgccccgagcactgcactgctgggacaggagcctccatgacagccacaaggccagcaagacccccctcaagggctgccccgtccacctggtggacagctgcccctggccccactgcaacccctcatgccccaccgtccgagaccagttcacggggcaagagatgaacgtggcccagttcctcatgcacatgggcttcgacatgcagacggtggcccagccgcagggactggagcccagtgagctgctggggatgctgagcaacggaagctaggcagactgtctggaggaggagccggcactgaggggcccagacacccgctgccccagtgccacctcaccccccaccagcaggccctcccgtctcttcgggacagggccccagccgtcccccctgtctgggtctgcccactgccctcctgccccggctttccctgcccctctcccacagcccagccagagacaagggacctgctgtcatccccatctgtggcctgggggtccttcctgacaacgagggggtagccagaagagaagcactggattcctcagtccaccagctcagacagcacccaccggccccacccatcaagcccttttatattattttataaagtgacttttttattactttaattttttaaaaaaaggaaaataagaatatatgatgaatgatattgttttgtaactttttaaaaatgattttaaagagacaaaaaagaaaaaaaaaaaaaaa

SEQ ID NO: 293541 - DNA, 1000 bp, Homo Sapiens; identical to SEQ ID NO: 224480

SEQ ID NO: 293542 - DNA, 744 bp, Homo Sapiens
atcaggttcaacgcagtgactgctcagtagaagccatggctcgcagacactgcttctcctactggttactggtatgctggttggtggtaactgtggcagaaggacaagaagaggtatttacgcttcctggagattcacaaaataatgcggacgctaccgactgccagatctttacactcacccctccacctgccccgaggagtccggtcacaagggcccagcccatcacaaagacacccaggtgtcccttccatttttttccacgaaggcccagaatccattttaggtttccaaacagacctttcgtcccttcaaggtgtaaccaccgttttccattccagccattttattggccacaccgttaccttacttataggtatttccccagaagaagactccagagaggaagctcatctgaggaaagctgagagggaagagaaacccaaacatactgaagcaaaaaaaagcctatccttcagaaaaaagcaacaaaaagatttctgttttatctttcgaaactaaaactattggatttgaagattaagtatcctaaacatcactgactagaaactgttctctttgtcagcagtgaagatattggatcataggttattgatggttgcaaaattggacaataaccacgttatttttatcctcaacctcttatggtcacaggatatttatgcaaataaaatctttaaatgggaaaaaaaaaaaaaaaaaaaaaaaaaaaaaaaaaaaaaa

SEQ ID NO: 293543 - DNA, 1000 bp, Homo Sapiens
attctgcttataaggaaatgcagaccactctcaaatcaagtgagagatccagcagtacaagtgcagaaagccacatccaaccagtccagaagaagtctaaaaaccgcactaattgtgacatcaacatccactacaagagtggggtgtgtaacaccatgagggccaagttttacagcgtagcccaggaggctggcttctgcctgcaggacaagatggaaatcctcatgaagcgccaagaagagagaggtatccagaagttccgtgcttttgtccttgtctcaaattttcaaaaggacatagcaaaaatgagacatcacatatctgtagtaaaaggagatgcagaagaaattgcagaccactggtactttgatctgttgtccaaactgccagaggatctaaagaacttccgccccgccaaaaagatcctggtgaaactgcagaagtttggagaaaacctggacttgcggattcgaccccatgtcctcctgaaggtgctgcaggatctgaggatttgggaactgtgctcccctgacatcgctgtggctattgagtttgtgcgagaacacatcatccatatgcctcaagaggattacatcagctggctgcagagccggatcaacatacccattgggccctacagcgccctgaggtaggctgggcctgggttgaccagctgtctcagtggaggagtgtttgcctatatcatgttcctgtatcctgcctgtgttcctgcctcctgactaccctcatggatgctctttatggatgaccctttacagtagggtcatctggagactgacttccagcaacatttttagagggggatggccccggtggccctcccctcaattccacaccccagacccaacctaccagtctctgttcttcaatgatccagcctgactctacctacttcctcttcagattccttcaccctatttaccttcctcaagtactggagaattaaattgaactgaatgtttgaaaaaaaaaaaaaaaa

SEQ ID NO: 293544 - DNA, 1000 bp, Homo Sapiens; identical to SEQ ID NO: 224481

SEQ ID NO: 293545 - DNA, 1000 bp, Homo Sapiens
accctgagatatttggattacatgaaaacgttgacatctccaaggatcttcaacaaacaaaaaccctctttgagtccttgctcctcacccagggaggctccaaacagacaggagcctcaggaagtactgatcagattctgttagaaattaccaaagatatcctcaacaagctccctagtgatttcgacattgaaatggcactacggaagtatcctgtgagatatgaagaaagcatgaatactgtgttagtacaagaaatggaaagatttaacaatttaattataactatacgtaacactctacgggaccttgaaaaagctattaagggtgtggttgtgatggattctgcattggaggcactctccggtagcttacttgttggaaaggttccagaaatatgggccaaacgttcatacccaagccttaagcccctgggaagttacatcacagatttcctagcccggttgaactttttacaggactggtataattcaggaaaaccttgtgtgttttggctgtcaggtttctttttcactcaggcctttttaactggagctatgcagaattatgccagaaaatataccacccctattgatttgctaggatatgaatttgaggttatcccatctgatacatctgacacatcaccagaagatggtgtttatatccacggactgtatctcgatggcgcacgctgggaccgagaaagtggattgcttgctgaacaatatcccaaacttctgtttgacctgatgcccatcatatggataaaaccaactcaaaaatctcggattataaagtcggatgcctatgtctgtcccctctacaagacaagtgaacgtaaaggaactctttccactacgggacattctactaactttgtcattgcaatgttgttaaaaacagaccaacctactcggcactggatcaagcgcggggttgctttgctttgtcagttggatgactaaattggacaaatttataaaacatccaaaagttt

SEQ ID NO: 293546 - DNA, 1000 bp, Homo Sapiens; identical to SEQ ID NO: 224482

SEQ ID NO: 293547 - DNA, 1000 bp, Homo Sapiens
gccctacaagtgtggcatccgcagctgccagaagagctacagcttcgacttctacgtgccccagaggcagctgtgtctctgggatgaggatccctacccaggctagggtgggagcaacctggcgggtggctgctctgggcccactgctcttcaccagccactagagggggtggcaacccccacctgaggccttatttccctccctccccactcccctggccctagagcctgggcccctctggccccatctcacatgactgtgaagggggtgtggcatggcagggggtctcatgaaggcacccccattcccaccctgtgccttccttgcgggcagagagggagagaagggctccccagatctacacccctccctcctgcatctcccctggagtgttcacttgcaagctgccaaaacatgatggcctctggttgttctgttgaactccttgaacgtttagaccctaaaaggagtctatacctggacacccacctccccagacacaactcccttccccatgcacacatctggaaggagctggcccctcagtcccttcctactccccaacaaggggctcactatccccaaagaaggagctgttggggacccacgacgcagcccctgtactggattacagcatattctcatctctggccccgaggctgcctgtggggcgagtggagacctcccatcactgagacagatcacagaccacgagtgcctttcccggacctggacgttgcctccagagcaggcaccagctctttccctctctacacagaaatatttttgtaaggttctggggcagggagggagcatgaagtacgaggaaaacttgaattccagatttttagtgcaaagtatttatcatttctaccagaaataaacgttttaagtttttacttgaaaaaaaaaaaaaaaaaaaaaaaaaaaaaaaaaaaaaaaaaaaaaaaaaaaaaaaaaaaaaaaaaaaaaaaaaaaaaaaaaaaaaaaaaaaaaaaa

SEQ ID NO: 293548 - DNA, 1000 bp, Homo Sapiens
atccgcatcccccaacacccccacctccggcctgagcctcccagcgccgtgggaaccacctcctgtccgctgttgctggcccgcatcctagcagcggcctgacgccctccccaccctggcatgcccccttgacctgggacgatgagcatacgactggggagcccagtggaggcgccctcccgaagcgccactgcccatgctgaccacccagccctccggctgctgatgtcatgagtaacaccactgtgcccaatgccccccaggccaacagcgactccatggtgggctatgtgttggggcccttcttcctcatcaccctggtcggggtggtggtggctgtggtaatgtatgtacagaagaaaaagcgggtggaccggctgcgccatcacctgctccccatgtacagctatgacccagctgaggaactgcatgaggctgagcaggagctgctctctgacatgggagaccccaaggtggtacatggctggcagagtggctaccagcacaagcggatgccactgctggatgtcaagacgtgacctgacccccttgccccacccttcagagcctggggtcctggactgcctggggccctgccatctgcttcccctgctgtcacctggctccccctgctgggtgctgggtctccatttctccctccacccaccctcagcagcatctgcttcccatgccctcaccatcacctcactgcccccaggccttctgccctttgtgggtgttgagctcaccgcccacccacaggcactcatgggaagaggctttccttctgggatgggggcggctggtagacacctttgctttctctagccctcctgggctgggcttgggcacaaatccccaggcaggctttggagttgtttccatggtgatggggccagatgtatagtattcagtatatattttgtaaataaaatgttttgtggctaggggttttgatttcaaaaaaaaaaaaaaaaaaaaaaaaaaaaaaaaaaaaaaa

SEQ ID NO: 293549 - DNA, 1000 bp, Homo Sapiens; identical to SEQ ID NO: 118884

SEQ ID NO: 293550 - DNA, 1000 bp, Homo Sapiens
atagcccctttgttttggccaatttctcccatttgaaatggaatcatttacctaatgcctgtacgcccattgtatcttggaagtaactaacttggttttgattttacaggctcataggtggaagggacttgccttgtctcagatgagactttggacttggacttttgagttaagactttgggggacagttggaagggcattattgtgttttgaaatgggaggacatgagattggggaggggccaggggcagaatgataatggtttggctgtttctccacccaaatctcatcttgaattgtaatccccataatccccatatatcgagggagggacatgttgggaggtgactggatcttaggggtggtttcccccagttgttctcatagtaatgagttctcacaagatctgatggttttataaggcagttttccctcctcttgctcgctctgtcttgcctgccgccctgtaagacgtgcctcttccccttctgccataatggtaagttccttgaggcctccccagccatgcagagccatgagtcaattaaacctcttttctttataaattacccagtctcgggtagtatctttacagcagtgagagaacagactaagacaatcagcttctatgttgttggcagttttaccatgagcatggattcctatattccttctgaaattttctttaaaagtgtaagcttatatagaaagtatattcgacactcacaacccttcccagccataaaagacagtggggtgtgagtgtgtgggatgggatgcagcaatggcagcccagtaacaacagcagtgcgtgccgggaacagctcagcagcagggcaggtcagggctaacccagttaactcaatgcaggctccctacaccaagtgatttggtttgcaaataaatattatttgtttctgttttaatgtgtaaacagagcacctgaattacacagtaatgtaactctgaaaattgctaaatttcaagaaaaaaaaaaaaa

SEQ ID NO: 293551 - DNA, 1000 bp, Homo Sapiens; identical to SEQ ID NO: 224484

SEQ ID NO: 293552 - DNA, 1000 bp, Homo Sapiens; identical to SEQ ID NO: 224485

SEQ ID NO: 293553 - DNA, 1000 bp, Homo Sapiens
gtgccggggagcagatgtgggtggcccaacccagccccttgttcttgttccccacctcccaggaaagggggagggtgggcggagccggccctcctgggctctctccttgggtcccggagccacctggggaggggaggctcaaccccctaccttggccagctggctgcaggtctctcagggctggcacagaacagctgggctttgccaggtgtcccccatcctgatgcacggcccggtggtgcggtctccaggcctcccaggattctcagctgcgccgtctccccagtccccaaaccccagtggtggccgccaggggactggaccgtcagtctgtggagctggggctgcagctggtggtgtttccaacaagggtcttttggctgcctggccccagggagaggcctctggaggcaaggggtaacctaccgggaaagcctcaaaggcacccccatccccgccccgcacagactccaccggccccccatggttcctccaggccctcttcagtcatgacaggcagtgcctgggtgcccggcctgctcagtacaccctgggcctcagccccacccaagccttggcctagcatgggagccaccacgggaacacacacacgggctggagggtgtctgagccaggctggtgccggggagcagatgcgtcagatggaggagaaaagccctggggcagcggcttctggagctctggccaaggatgggctctgagcacacccctgcccggcccagagcaccaggccggggcagggtcaggaacagcttgaagccccctgcaaagtctgtccctcctcctggagcctcagctgcccctccaacacagccctctgtgggagcctagatggcccccgtgtggccatgagacatgggcgggcgctggtggattcctctgtgtcaggtgacatggtggcaccccggccgcaggctgtgccccggctgtggcgttaagaagggctatggatctaaataaaatccagtctctttgctgg

SEQ ID NO: 293554 - DNA, 1000 bp, Homo Sapiens
caccgcgccgggcccttttcctgcctcctaaacaagtggccaggaattctcctcctgcaccgggtccccagattgtgtggcaagccctgcagatggcacaggggactggttcttcctcgtggaaagccaggcccggacacctctcgggcatcgcctgttggggtgaccctcccacacccagcctggaaccctagccagctcagcctccgtccgctgagaaatcaaggtgaccttgtggctcagccctcagggggcactcaccacacaagagttccctttcaagaccccctgttcggggctggggcccccaggaacggttggggcaccttcctggggccctgtttttccccaggagcggggcctgggagctgagggcgtctcatctccccacaggcatctgctgctgctcctggctgccactcacccctgtgagatgctgagggcaggatacctgtctgtgcggggcgtgggaaaaagggagaaagcctggcagagggttgggggctaagaagcaaagggcgtggaagggccaccgtgcacttttgaagtctctacttgccagtggccaccccacctctccctgccctcatccaaggacggacaggcctggcaggtggaccggagccgtggggcagaagcatcccaggcctggcctcagaggagggaggccatggtgaaagtggaggctgtctgcatccacctccccagcctttgtcaccgggacctcagcctgaccccaggcccaccccaggctgctcaccgaggtgggtaccctgcccaccgccagctcagatgcggtgtgtggactcccttctctctgggggtgagcgggagttccctcccctccacatcaggagctgggggagagctggagggccctgggatccccttgaccctggtcatcagccccagccctgacaggccctgcgtgtgccatgtgtggcctgggtttggagctcagcaccctgcgggaattctattaaatctccgattttatctg

SEQ ID NO: 293555 - DNA, 1000 bp, Homo Sapiens
aagagttcatactggagagaaaccatacaaatgtcatgaatgtggcaaagcctttaatcagggctccacactcaatagacatcagagaattcataccggagagaaaccttacaaatgcaatcagtgtgggaattcctttagtcagcgtgtccatcttagacttcatcagactgttcatactggagacagaccttacaaatgtaatgagtgtggcaaaacctttaaacggagctcaaacctcactgcacatcagataattcatgcaggaaagaaaccatataaatgtgatgaatgtggcaaggtattcaggcatagttcacatcttgtaagtcaccagagaatccacactggagagaaaagatacaaatgtattgaatgtggcaaagcctttgggcggttgttttccctcagcaaacaccaaagaattcattctggcaaaaaaccttataaatgtaatgagtgtgggaaatcttttatttgtcgctcaggcctcactaaacatcgaataagacatactggagagagccttacaactaaactcaatgtgacaaggccttagacgttgtcctagtttctggaatcaccgaataattcctacttactgatataccttgtatatttaccccttctcttgaaatccctgtggaattgtaatctccagtattggaggtggggcccattgggaggtgattgaatcatggaagtggatttctcaaactgagaaagatgtagcgtcatccccttggtgctgtcctggcaatagtgacttctcttgaggtctggctgtttagaagtgcatagcacttccctgtcgcttgccctcattctcaccatgtgaaataccgacacccgctttgccttccaccatgattttaaccttcctgaggcttccctagagggtgatcagatgccagcaccatgttttcatttaagccttcagaaatatgagccaattaaactcttttctttatacattaaaaaaaaaaaaaaaaaaaaaaaa

SEQ ID NO: 293556 - DNA, 1000 bp, Homo Sapiens
gagtatagcttgggggtgggaggtgaggaaaatctgaggtacccaggggaacccccagctaactggtctctcagaggagtcccccagggcccgccagctatcacagggactcagaaacacccatttcctaatgacatggtgagtttcttgatttcttttttttgtttgttttgttttggttttcaacttggctgaccccgggtctatgatctattcacatcgaacccctgactggtctgcctggtgccagggtgagcgtgaccgtgagtgttgctttcgacagctggctcagcacacgctgtgtgaagggatctgagcttgttcatctccagtcgtgacttcatttcccttccttctgtcctcctcctgttcttgccttggacctgcaggtgtgcagaccgctctctctgccttccttgcatgtggccaccagccatccctgatcttgtccccagaggcccaggcagcctgtgatggctgtgaggggctgtcccactgtgtgggtatcccttacccagcacttaaacttggcaggagaggcagggcaaccctcacagggagatgggagggcacccaactcccacaagcatgcaacagcagtaggaattgggggtctgccccaggtgggtgagaccaaatgagtggatttggggccacaggctaggcaggagagacaaggggtaggtgggagggtcccccagtccatgctgaccccagtgtgtctccccggagatggctcctagctgagtgggacccggcaggagttggggacagtgctgtcccccacccctgcacacagccaggccctcaggctctgcggtcactcgcctccctgctggtcactggtcttggtctggagttatattttgatgccatgaagacactgtttatatctaatgtttatatattttaaagatttgtgccaagagagtatatttaataaaaacttaaatgacttctaaaaaaaaaaaaaaaaaaaaaaagaaaaaaaaaaaaaaaa

SEQ ID NO: 293557 - DNA, 1000 bp, Homo Sapiens
aactgtgtgatgttcaatcaagcatatgtggaaactttatcaagctatagtgacatgattattgataatatgaccatgaaatttgttatcattgtgtatggcagtgtaattgatactaagacagaggaaccatattttgcaccttgcattatacctacaacctgtgagcaggttcagggaacttctgatttaagcaagctgctgataatccaagcatctgagcttacccaaagaaatagtaacaccaatgtcatggcctcagtcaacacggtctttgaacaaccaggaaagaatataaatggaagacaaaagatgagttgaaaactggataccattttagaaaagggtattaatgatacaaatatgatgtgtggagtcaggttaaagaccaaactactttcctcgctcaaatactaaaggattatctgcaaggagtttacttagaagccactgaaacaggttactgctgcatttagtttataagcaatggatggacttctgtaaaacttcttaattttaagtagttgcattatacttgggatgttaaaaaagtcttcaggataatataaaatacactgaaacatatgtcctaccaaatgaaaccctgtttccagctaagagcaaattttaacatagtgcattataaaaagtgttgtataactgatatgttactctctaaagcatagaacctgtaattttcatttgtgaaattgttataattagtgcctccctaatattttcccgagtatagctattctccccttcccagtttggtaaatattgaaaaacagaattatattccacaatcttagtaactttcagtaagtaagtaacttttgctttcagtgaaatttaggagaaattaatattctcatattgcatagtactgtttgatgtcacctttcattttatttttaaaaatcaaataaagttgagttttatggttgtctaaaaaaaaaaaaaaaaaaaaaaaaaaaaaaaaaaaacaaaaaaaaaaaaa

SEQ ID NO: 293558 - DNA, 1000 bp, Homo Sapiens; identical to SEQ ID NO: 118885

SEQ ID NO: 293559 - DNA, 1000 bp, Homo Sapiens
ttcggggaacctgcagctgccggaggcggaggccgtggacgtgaccgctcagtacatggagcggctgaacgcgcgccacggcgggcgcttcgcgcttctgcgcatcgtgaacgtggagaagcgccgggactcggcgcgagggagtcgcttcctgctggagctggagctgcaggagcgcgggggcggccgcctgcgactgtccgagtacgtcttcctgcggctgccgggagcccgcgtaggggatgcagacggagaaagtcccgaacccgctcccgccgcctccgtgcgccccgacggccgccccgagctctgccggccactgcgcctggcctggcgccaggacgtgatggttcacttcatcgtgccagtgaaaaaccaggcacggtgggtggcacagttcctggcggacatggctgcgctgcacgcgcgcaccggggactcgcgtttcagcgtcgtcctggtggatttcgagagcgaggatatggacgtggagcgggccctgcgcgccgcgcgcctgccccggtaccagtacctgagacgaaccgggaacttcgagcgctccgccgggctgcaggcgggagtggacgcggtagaggacgccagcagcatcgtgttcctctgcgacctgcacatccacttcccacccaacatcctggacggcatccgcaagcactgcgtggagggcaggctggccttcgcgcccgtggtcatgcgcctgagctgcgggagctcgccccgggacccccacggttactgggaggtgaacggctttggcctttttgggatctacaagtcggactttgaccgggttggaggaatgaacacggaggagttccgagaccagtgggggggtgaagactgggagctcctggacagggtcctgcaggcagggctggaggtggagcggctccgactgcggaatttctatcaccactaccactccaagaggggcatgtggagcgtccgcagcaggaagggctctcgcacgggggcgtcttga

SEQ ID NO: 293560 - DNA, 1000 bp, Homo Sapiens
tttaacgtttatggttttggttctacaggaaagtcataaatatttaaaggccttaaacatgtatgtactttttttttctaagttatagaatgtataattttgtactacatttattttgtttcatttgtgatatgaagggagagaagaaagaaaagtgcatagccattctgtaacaatattgtgtaaacctatagtttgaaggaatgcaaggagaaggatttctgtgttttactcattttaggctgttcagaagatgcttcaaaaattgtcctgttagaatttccatcatggaaggtggtatggaagaaggtatggaaatactttgtattctaaaaactcactgacgtggtcagttagacatacgttggtttccaggatagaggcccatatatcctggggagctttggtctattagtttgtgacaatattcaaaggccaaaacactactcagacactttcctgggaagagcaactaaaaatgtaaaattggttaaaaataaaatctgaaaagtatgtatctcacattgaactaaaatccactgtctcataagttcatggaatgaaatggctttctgcctccattttaatcatgcataaaatgaattagatggctttgagtggattttcacaatggctcaagactatatgaaattataaaaaaaaagttgccctggggtttctgcatcaattagaatatcattaatttctttgtaaccaagtgaaaaactatactttttggaaattatgaatttgtcctaggtttgtttgagatttgaaattatacatcatgcttctcattttttaaactatgttctttaaatcaacactggaaactctgtattatatacaagtgtaatacatgcatataatagaaaaaaaacatggaatttcaaatatactaactagattatccccagtagattaatgttgtgactattcagaaaaggtgaataaaattgggatataaaatggactctctttcataaaaaaaaaaaaaaaa

SEQ ID NO: 293561 - DNA, 1000 bp, Homo Sapiens; identical to SEQ ID NO: 118886

SEQ ID NO: 293562 - DNA, 717 bp, Homo Sapiens; identical to SEQ ID NO: 118887

SEQ ID NO: 293563 - DNA, 1000 bp, Homo Sapiens
accagtggttctcagctaggagcaaatgtgccccctgtccccagaaaacatccagcactgtccagagatatttctggttgtcataactgaggtgagggggctgccactggagtctagtaggtagggaccataaattctataatacatggggcagccctctaaaacaaagaattaacaagcccgaaacatcaatagcgccaagattggaaactccaccctgtgccattacattaaatattcacagaaccttctgagacagaaaatcagggagatacttgctgccattttacagataaagaaattgaggctcatgataagtaaaatagctttctccataccagaatgtggatgaggaacaaagaccagggtactcttttcccatactctcctctcaaagaagatggggaagggcatgtgtccgatggctcctgccctcgttttcagttaagaaatgctttcaaccctcaaatacaaatctttaacattcaaattagtaacacatggttagaagggataatttatacttcaattttgaggaaacattttttattacattcattcattcattcattcattcagagatgtactggggacagatgatcccttccccatttcctcccccatgaggaagaaggggcttttgacttgttgccttaactcattcaatgggaaaagattccatttttcacctacaggcagaggcagctggaaactcccagaagtagaggctcagtctctctggaggctactgaagagcaccctgaagggtgtcacaatcctcagtgttgggggaaagttgggtaagtttttaccatgaacactggagggaccagctcctctcagggtgaaatgagccttgaaggaaggacagagggaatcacgcttgggcaagtgttttgccctcacaccaagagtaccagggaagcagagggtaccagtccaaacagatgtcagcagctctatctcaccaatgacagccagaatagcaagcaaccactgc

SEQ ID NO: 293564 - DNA, 1000 bp, Homo Sapiens
ccttctcataggctccactctaacaggcagacatggcgctggcatcagtacagggacactgggtccgggtcccctggagtggtggagggatgcgtgccaagcgagaaggatcctgcacagttcagggacccaggggccctggcccaggccctggtggtccagctggggcaccgccgcatcgcacacgacctgcggctactgcttttgcagcacctgtggctaggcagaaccggccaggccccagtcgtggagtatcctatatgcctggtgtgcctccggccccgcagcccctcctgccccctccccaggtacaggactggaccccggctgcttgctttccctcaactactgccctgtgtgcagggccaggaatctgggccactccggataggcatcggcttcggcctccgcctgcctcagggccaggccagggccttgcatctgctgcccgagaaaaggccgaaggaagcagggcctcagggcaaggctactcaggcctgtgggcatcaattgccagcatctcagcctccagcagctcaggcccgggccgacccagtcccaggcacaccctcccagaccaggagcttcaggtctgcaggccttcaatcaccaaactccccacgatgtttctccgggcctccacctcgggcaccaaaacaggtcactacctccctgaagcccaggccttgccctggcccaaagaggccagtttctctggagctcattctccaaaagtcatcagtctagttccagggccacggaggccccctggaacaccccctccaaacccaaccctcccaaccaggcaccagatctcggggagtccccgagacaccctgaggggctggctggccggaggtcaggtgtgttctcctgctctgaaccctgggagccccttgtggagtctgctgtctccaggctgaagaggaccaagggcaccaaggccccattcagccctccgtgtatctaataaagtctgacccaaaaaaaaaaaaaaaaa

SEQ ID NO: 293565 - DNA, 1000 bp, Homo Sapiens
gaacaaaatagaactacttctgcaacaacaccaagataggattgagcagttaataagtgaacatgaagttgaaataacaggacttactgagaaagctagcagtgctcgaagccaagccaatagtatccagagtcaaatggaaatcattcaagagcaagcaagaaaccaaaactctatgtatatgcgtcagctcagcgatctggaatctactgtttctcagctacgttctgaattaagggaagccaaaaggatgtatgaagacaagacagaagagctggaaaagcagttagtccttgccaactcagagctaactgaagcccggacagagcgtgatcaatccagcctgagatcagacatgtgccatagaagcaacaactcgttgagggactccactgaaggaagcaaatcaagtgaaactcttagtagagagccagtcacattacacgcaggagacagggaagatccctctggttgcttcacattcacatctgcagcaagtccatctgtgaaaaactcagcttctcgttcattcaattcttctcctaagaagtctccagtgcactcactcctaactagttcagttgaaggttcaataggttccacatcacagtatagatctgccaaacctattcattcatctgattctgttaaagattcacagtctccgccaatagaaacaacaggaaaaacatgcaggaagcttcagaacagactagaaagcttgcaaactctggtagaagatttacagctgaagaaccaagcaatgtcttcaatgatcagaaatcaagaaaagaggatacagaaagtaaaagaccaggaaaaaatgttactaaaatgactcgttgcttgcctattctttacagaggaatgaggcccaattaattgtggtgttactcgtaattagtgccctgtgtactttttctttttatgtgaaaatttaataaaagataccctgtcttgtaaactctattttgaaataaactattcttgaatccctcac

SEQ ID NO: 293566 - DNA, 1000 bp, Homo Sapiens; identical to SEQ ID NO: 224489

SEQ ID NO: 293567 - DNA, 1000 bp, Homo Sapiens
ccatgcctttatatattttgcctatgcagcagggtttcgatttggagcctatttaattcaagctggacgaatgaccccagagggcatgttcatagtttttactgcaattgcatatggagctatggccatcggaaaaacgctcgttttggctcctgaatattccaaagccaaatcgggggctgcgcatctgtttgccttgttggaaaagaaaccaaatatagacagccgcagtcaagaagggaaaaagccagacacatgtgaagggaatttagagtttcgagaagtctctttcttctatccatgtcgcccagatgttttcatcctccgtggcttatccctcagtattgagcgaggaaagacagtagcatttgtggggagcagcggctgtgggaaaagcacttctgttcaacttctgcagagactttatgaccccgtgcaaggacaagtgctgtttgatggtgtggatgcaaaagaattgaatgtacagtggctccgttcccaaatagcaatcgttcctcaagagcctgtgctcttcaactgcagcattgctgagaacatcgcctatggtgacaacagccgtgtggtgccattagatgagatcaaagaagccgcaaatgcagcaaatatccattcttttattgaaggtctccctgagaaatacaacacacaagttggactgaaaggagcacagctttctggcggccagaaacaaagactagctattgcaagggctcttctccaaaaacccaaaattttattgttggatgaggccacttcagccctcgataatgacagtgagaaggtggttcagcatgcccttgataaagccaggacgggaaggacatgcctagtggtcactcacaggctctctgcaattcagaacgcagatttgatagtggttctgcacaatggaaagataaaggaacaaggaactcatcaagagctcctgagaaatcgagacatatattttaagttagtgaatgcacagtcagtgcagtga

SEQ ID NO: 293568 - DNA, 1000 bp, Homo Sapiens
attccaaacttagtgaaatggccttaagcattttaaactgtatgtatacattagcgcattcatgcctttctaaacgcatttcaaatgtcaaccaggaaggcacaccactgtattagttttatactgccgctgtaaaatttaccacaaacttagtgacttaacacaaatttattgcaattctgtaggctggaagtctgactatgggtctcactggactagaatcaaggctggcaggctgccttccttcctggaggttctaggggagactctgtctcctgctccttcaggctgctggcagaatccacatcctttcggtggcagggccaaggtccccactttcttgctgactgtaaactaaggccacttccagcttgtagaggctgcctacattccttggctcttggccccctcctccatcttcagagctagcaggttcagtctgtgtcacgaaccatttctctggttccctgcagacaggaaaggttgtccctaaggactcatgagattaggttgggcccagccagataatacatgataatctccctcctcaaggtttttaatattaaacacatctgcaggacacattttgccatgtaaactaacattcactggttccagggattaaggaatgaacctcttttgttggggaagggtggcattctgctgaccacagcactccaaccaaaagccaaaaaccaaagcaagacttactaacgcatatcaaataaattaaaggtacaaaatcgtgaatctcagttatcttaaatattccaatactatttacaaaattattcaaattctcacgccttccaactcaaaattagcaatctaaagtaatttccatatcctagatggaaaccctcatgctaaactgtctgattatgcatggttctaaatggtttcagtggcaaatacataacattgtactactgattaaactgaacttaaaagcaaaaaaaaaaaaaaaaaaaaaaaaaaaaaaaaaaaaaaaaaaaaaaaa

SEQ ID NO: 293569 - DNA, 1000 bp, Homo Sapiens
aatgaccagtgtcaaagagtttgcatattgggtagaccttctccactccacatgtcccacacatatagataaagcagcaggcggcatctggcaatcagaagcccaaactgcctttgagtctaagatgtgatgactttgatgaaacacaactgaaaacatgagggactatatccagtcacttgtagccagtttcacaggccagctacagaattgtccaaacaaacattatttctgactgcaatttttttcccccaaatttaaagcaatccctggctttaaatgacaaggcacctaccaatgttcttgggtcactgaagaagctactaccatgagcctgtgcatagaattttaggagataaaaggatgaatttctgtgactgccagtcagatcttaacaggtttctgttgagccagaatctgtttcagatccaagatggagaggaacactatggaaacttcccaggtgactttcagagcagttgtttcaaacacatcattgtccttttaggggaaccagtttttagaaggttgtgaattggctttttcacaaagcatgattatcttcctggctgatccaggagaaaattagaacagaaaaataatggttgtggattttgaaacaaagcaaggtaaagccttttttttttcaccttgcattggcaaaactacctcttcagtgtttttaacttttgattcaaaagcatcttaccaataaggataaatatcatatacatcgttatgaaaatattgctatgagataataagccacatatgaatgttgtatacaactttagggtttacatttaatcctgaagtgttacctcctttcatgtctatttacactattttcccatttactaagtggggagggggtctccttatatagtgcttcatcgttaataagtcaatacctgttgttcctgggatgttcttttttgtgcattaaaaacttcaaaattaaaaaaaaaaaaaaaaaaaaaaaaaaaaaaaaaaaaaaaag

SEQ ID NO: 293570 - DNA, 1000 bp, Homo Sapiens; identical to SEQ ID NO: 224490

SEQ ID NO: 293571 - DNA, 1000 bp, Homo Sapiens
gagaaaaataatagtgcccttcccatggggtcatgtggaaagcttttagcacagtatctggtgatttaaagtgttcagtaactattagctgttactgtcattatctgtgttaacctgccagacaaccttatatgggttgcttttgctttcacacctgtatgatagtcatggaaactgaagcccagagaggttaagaaatttgctaggatcacaccactaataagcaacagagccaggattcaaacccaggtgtggctccagagcccatcctcttcccactgctaccctaactcaaactgccacatgctcgtgtcctttcagtggggagagtggttcattagagggggttgctacttttattttggacaggccagttctccattctgcaggactatcccatgtattacaaacagttggcaaccttgccctgctcaccaaatgggagttgcataccagtattccccagcttgtgactacagagatgtcccagtatgtttctttctgccccgttgaagaggtgcagcctcaggctgagaaacactgatagaccaagaggtggccagggttcccagaaggaaggaactcaccttgaacttagctttctttgaagggtaggaaacctggaagacgtacaaaggagggagaggtcaggtgctagaaagtttgtgcacattgagggcatgggcagaatctgctcccaaaagcattgaaagccaatatgaggccaggtggtggctcatgcctgtaatcccagcactttgggaggccaaggcaggcggatcacaaggtcaggagattgagaccatcctggccaacatggtgaaaccccgtctctactaaaaatacaaaaaaattagctgggcatggtggtgcatgcctgtagtcccagctactcaggaggctgaggtaggagaatcattgaacctgggaggcggaggttgcagtgagccgagattgcaccactgcattccagcctggcgacagagtgagactccatctc

SEQ ID NO: 293572 - DNA, 1000 bp, Homo Sapiens
ctgctccttgtgcagctctggtacctcctgcccactgctgtcacttcaagccactggcaatgcttctgtcctcgtgtcttggaggaaaatcacctggggggaggggacttcttgtggtaagagcaagtgcaggtatgaaatgcgaagattgccccagctaaaagtggacaagtccgctttgtgagatgaatacttcctgagaaacttgacaagtatctctccattttaccattatgaaaactatcattaaaaaaaacagtttagatgccttctccttttgagggaaaaagggtgctttttattgtataaagcagcgtcttatgtattttgatataccattgtttgaacttccgtctttagctgatagattctcaaatatccttgattttggatgttcagtatgtttgtgagagaggtttctgggaagactctctttttgccctcgggaaaaagcaaaatatcaatgtttgggtgactgtgtaaagctcagtgtgtaagaacatctttttgtctaggttttctttctgctctttattgaagacaaacactcaccaaaaagaaaaataaaagttttcagagaaactaattttctttggcaagagtattacttaatattttggcctcctaaagtttccctagttagtactcggactcctgtgctaattgtcagcttacatatcattgtatagagactgtttattctgtaccaaactgatttcaaaagtactacattgaaaataaaccggtgactgtttttcttcataaagttctgcgtttggcatcttcactctttccaaaatgtatctgtacatcagaaatgtcactattccaagtgtctttttagtgtggctttagtatggcttccttttaatattgtacatacattgtatctttgttttatggtaataagtaataaaaatgtagacttcatattttgtacaaaatgtcctatgtacagaataaaaaagttcatagaaacagcaaaaaaaaaaaaaaaaaa

SEQ ID NO: 293573 - DNA, 1000 bp, Homo Sapiens; identical to SEQ ID NO: 224492

SEQ ID NO: 293574 - DNA, 1000 bp, Homo Sapiens
atcgatatggatggtttgtggtgtgtgtgggatgtgggggaattaagaaaatgccatttacctaagcacagtttgcctgaatttctgcttggttgtgttgtttaccgtaagtactgagggtagtttccctaagtctgtcctgagaaaaagcatacttagtactcctgtatttgttcttatgaaatgactatctgccttcttgtatctagtaagattggctggctcaattttcttctgtcaaattatatggttattttttatattaccacatcagcattatattaaaagtgtttttaatagttgattgtattttgccaactactagtatagactcaaatttgctatttaatttttaaaatacaatttattttgtaaatcctttaaaaaatatttggttagttttggattagaaatgatttatgttagccatgtgttgaagatgaaattggcatcagtgtagacggtgctgattgggaaaagttcatgattaggaaattcatgtaagactttttaagagtattttttaggttttcactcaatctttcctgtcacagtaacgtgaaaactgattattctttactccaagagaatgttttaacccaagcaagtatctaatactagagcattggttctgacattcattgtaaatcagtgaactgtaagatactgtctaaaaaatgtacatttgtaattagtgcctttattcatattttgaaataagttcttagttttatattatacctgttctttagaagtcatgttagcagctaattatttcagtgatgaaataatttgtgttttatatcccccttcacctccatgtattggttagcacagtttatagtaagtgaaaagcaagggacccacctacattaccttcaggagactgttctaccttttaatttgaaaacaaggaaattaaattttaacagaaatcttttaagtatgttataaccaaagtgttcaattatccttgcaagttcaaatacagcatttttct

SEQ ID NO: 293575 - DNA, 1000 bp, Homo Sapiens
tcatttccccctgaaaggtgagaaagtgactgagagagggctgataaactagggtcctccaggtcgggattgggaaaattcagaatatacatggataaagaaccagggactggccatgataggacctacacctattacttcatatgacttgctaataggagtcaatgctgacagccatagaccttcctgggcttctccctggggcctcaatttcagtccagcgttaagaacttagttttggtctcagggagaaggatagggagatggaaattttacctgagtttaaaaacctgaatttatgcagatatgacattttctggatacattttgacaagagtagaactaggggaatcaaaatagagattatgttgagtaacagggaaatagagttacagttcttgcctatcatctgagtatatggactgaaatactgtacctgctacatacattgtaagcaaagtgaggtcatggccagagcccaagggtttgaggagccttctatgacgtgatgagatggtcttgggtcccctatatgattagcttgtggtggtacattaggactaaatattccaaatgcattaacataaagctgaagtgatgtccttagtgaacttggtcttaaaaattaagagcattttggttgggtgacctaccaacaacatacagggaagagatacaggatcttggttgactctcactgcagtagacattgattttgtggtgtagcagcttgtaaaattaatgcaaatttgagatgaactaataaaaatatagttcatgaaggtgccccactacttgccctacctctcctctcctgttacaatagatcacccatctttgttcccatctgaggactcaggtaatggacttcatctcttcttgtcttctcaaggattttgcatctgccattatcctttctccctcctgtatcctcagttgttttcttctctactggatcaatgtcatcaacatacaaatattatctagtatttctcatatt

SEQ ID NO: 293576 - DNA, 1000 bp, Homo Sapiens
tgtgtgggctggagggactttgcagatgtgattaaggattgtgagatggaaaaattatccttgattacctgcacggacccagtataatcacaactgtccttataagaagaggagctttggaagaagagagagttgactacggaagagggaaaagtgccacagacatggccaacgggaccaacgcctctgccccatactacagctatgaatactacctggactatctggacctcattcccgtggacgagaagaagctgaaagcccacaaacattccatcgtgatcgcattctgggtgagcctggctgccttcgtggtgctgctcttcctcatcttgctctacatgtcctggtccgcctccccgcagatgaggaacagccccaagcaccaccaaacatgcccctggagtcacggcctcaacctccacctctgcatccagaagtgcctgccgtgccacagggaacccctggcaacctcacaggctcaggcgagctcagtggagccagggagcagaactggccctgaccagccgctacgacaggagagctcctccaccttgcccctcgggggtttccagacccaccccactctcctctgggaactgaccctcaatgggggtcccctcgtcaggagcaagcccagcgagcctccccctggagacaggacctctcaattgcagagctgatgtcagtaaatcgtggccatagctgagtgaactggtgaaatcaagccaacctggacacatacgttcctcgttcttcttagaggccatttgcatgtagcagaaagggcacctaggtcaagtgcaactagagcaggagcatcctatgcctttgacaaagattgcagtggcccctcgagtgcagaggtcatcccaggtgttgctgagtttattgagcacacctagcctgcttgcttactgcttatatttgctcagggaagagtaggaaaataaaatatatgcaaatcaagaggaaaaaaaaaaaaaaaaaaaaaaaaaaa

SEQ ID NO: 293577 - DNA, 1000 bp, Homo Sapiens
tgggctggtgaactgagcccaagtgtattctctggcctgggccccttccagaatcagtgcgagcgtcctgcagaggcatggccttcctgccactgcagagtgggaagcttcctgggggacctcagccagctccggggctctcatcttccactcggatctcagattggttcgttgtggatgctctggctaggctcggcggccttttccaggcttcaggcctgaacaaaacaggctgtttgctgtgaggagctagatgacaccaagacacagacacgtactcttcaccggctccttttgcttctccttcctgcaggacgtgagttatgtctggtcccaaaacccttgagtaaactagctgagccattgcaaatgaaggtacagatggattgaaacataaaattgtagcttttggtgtccttctgaagggtcagaatatgtaattatttgataaccaaggaagtcaagtcagatggctaagtagtaactttccaatatgatttctccgtggtacttcacctggtggcacttttggggggcaatgttaacaactatcacattttactcatcaagtctctttcatttcggcagtttaaagacacaactgtgggctttctgaggcgatgcccgttgggcaaacttaggtttatgtgtttggtttttcagctgacgtggaagccctgggtgggcgtcccctggctggcctggcttttgggttcaagtctgtatgtatggagtgggttggggccccaaagctttgctgctattgatttgtccccgacagcaggcaaagcctcacattgccctcaattttccccctttcatttgaaggaccagtttttcatggtacttgtcttgatctttttcatagtgttcaaatctgtatttttgtatgtagagggaaataattttctcaacactaatcgttaataactattgtattaaattgtcatgaaggaacttgtttaataaatggacgtgtaaggaaaaaaaaaaaaaaaaa

SEQ ID NO: 293578 - DNA, 1000 bp, Homo Sapiens
ccacagggacttccttggtcccttcagggaagccctcaactcatctctgaacttagaatctcatccttagggctcagagagtcccagccctaagggtgtgaacctcacctcctggggcttccgagctacagggctgggaccaggtcatgcagctgaaagtctacgttaaaaaaaaaaagtttgggccaggcacagtggctcatgcctgtaatcccagcactttgggaggctgaggcaggcggatcacctgaggtcaggagttcaagaccagcctggccaacatggtgaaaccccgtctctactaaaaatccaaaaaattagctgggcttggtggtgtgcgcctgtaattccagctactcgggaggctgaggcaggagaattgcttgagcccgggaggcagaggctgcagtgaaccaagatcatgccactgcactccagcctgggcaacacagcgagactccgtctcaaaaagaaaaagtttggatcaggcagggtggctcacacctgtaatccctgcactttgggaggccaaggtgggaggatcagttgagccccagagttcaagaccagcctgggcaatgtagtaagacccccatcgctacaaaaaatacaaaagttagccaggtacagtagtacacacctgtagtccaagctacttgggaggctgaagtgggaggatcatttgtgcccaggttgaggctatagtgagccatgatcataccactgcactccagcctgggtgacagagcgagaccctgtctcaaaaaaaaaaaagaatttggagatggttctgcccactctgatttctctgaaaaaacgaggtaattccctgagcccaaccctgatcctcaaggacctgtaattgtgtggtatttaaaattaaaataacattatttttattttgactttttttcaaacagtaagaataatatatcagcagcatgtatctgccaatcatatgtaataaatttcttattttgccaaaaaaaaaaaaaaaaaa

SEQ ID NO: 293579 - DNA, 1000 bp, Homo Sapiens; identical to SEQ ID NO: 224493

SEQ ID NO: 293580 - DNA, 1000 bp, Homo Sapiens
gcagggtcaatattttatgaatttatgacatttaaaaatatagttaatttaaaagttgtattttgttgtagaatgcttcccaggtccacacagagagagtcagatgagggtctttacaggttgtctgaaagggattcatatctgaagatgaaaactaattgaatcaaagaataatgaaaacaggatatggagtcaaattgatgaattaggaaatggggaaaatctgaatcagaacaacttcattgacttataaataattgaagctgcagtatatttctgtatctgaaattggaggagctcaacacagataacacagatagtaacttatactcagagctgcaaaacaatttaacaggtttaaattgtagtagtctgaaaggccacagaatggatctcaaggtgggtttcttgtatgtctgtgcctattgattaattcattcatcttatttagtaagccacttattgtgtgtcagtaattattcttggcataagggatttcatgaaacaaaacagataaaaatctctaccggtttggaactcacatttgaatgccgtatattctaatgttcttcctctttgtctctcattttcgttgttcatctctttttttgttctttttagaggcaaggtctcactctgtcacccaggatggagagcactggcacaatcatagcttactgtaccttccaactcctgggttcaagggatcgtcttgcctcagtctcccaagtagctgggactacaggcaggtgccaccatgcctggctaatttttttaaaaaacttttttgtagagatggggtctcgccatgttgcccgggctggtctcaaacttgtggcttcaagttatcctcccgccttggcatcccaaagtgttgggattataggcacgagccaccatgccaagcctgttgttcatctcttaagtggtctttctttctctcctgtctcttgttgaattcctctcttttaaactcactaaaatgaaaacattttgaaat

SEQ ID NO: 293581 - DNA, 1000 bp, Homo Sapiens
agctgctcgattagcttttatcattgtctttgagcacctcgtgttttgtataaagcacctcatttcatatctgatcccagacctcccaaaagacctaagggatcgaatgagaagagagaagtacttgattcaggagatgatgtatgaagcagaactggaacgtctccagaaggaacgaaaggagaggaagaagaatggaaaagcacaccacaacgagtggccgtgaccataaaatagtccctttccaggccaaggacctgaattctgtttacttcttctggctgtgcaaaagcacactcaagtgaatgactaaaaatgcaaccacagtgcatgttgcagataccggcggccgcaggaggggcagcatccagtagaggactggcgttggagtcacactgctgtgaaatcacgttgcagtccagcgcacaattgctatctatccatagaccattcttgaccaagcaagcatgcacattatgggcagttacattctcaagtttttaaaatcaaggggaacttgtatactgggcctgtttttcagcctgtttgctaccttttttgcattctatcccatgtgaattttacagacactgggctaaaaagggtattcagacacatggacacacattcctagaatgtcatcatatggtcctaattccatgtcaccaacaacacagacaagaccctgtttacaactttttctttccttttttttaattttagacctttctgagaagattattatatatgacatatctatagctatgtgtatggccatagatgtatttctgtgtgtacatatgtatagtcatgtattcctgcatatgtacatacaaatacagagatatataaagtacatagaaattccttacttgtaaatagccaaaaagtactgacatgagtgaattttcacatttaaatagtcatcaatatgaagccatgattaatgcttgtataatgtgatgcaataaaatttaaaataaatttctgcacatggaat

SEQ ID NO: 293582 - DNA, 1000 bp, Homo Sapiens
tggatacgcagttcaccatcagagccagagagctgcaaaatatctataagtgcattatgctgaaaaatatctcccaagatgagaggctggatgtgctgttaactcttaaacacactgtaaaggaacatgaatgtaaactaactcaggaaattctagaattgattgacagagaggttgaccttatgatgagaggagtcaaacatcataaccttgaaggactcagaaaaagaattgcgacactcttttttcattatatcaaaacacctctgtttaatcctgaagttgcaaaataccttaaggtccctcaagacccattgaaattttataagaagatttacttttgccacagttgccagctttatttgccttctacagaattttctgtatcatccacctcacgccgcatataccggtgtcgtaactgcattaaccttcagaatgaggctcaaaaacgagaatcatttttgaagtacaaatgtttacttcaacagctctactatacagaagctgattatgaagatgattctaaaattgctttcttgatgcagctacaagacattcagtacctgacagagaacatctgggcgtcccagtcagtcctcagtgcttgcgacaatctcagtgatctggtcatggtcagatggaataaatccctggagtggtccccctggaactgcattcttcttaccaaagatgaagcagctgctcatctcaagctaacaagtattgaagagggatatgaacgctcatttattcacaagatcaaacacaaacatatcctggctaagaactatttttctcaggttccagtgctggcttcatttatacttgatgatggtgaaattgatgagatcagatggaagtatcactcagacacaacacctaagattatagaatcccagaggcctcctcattaggtgatccaggagtatttgtttgatgatcggcattttgttcactgctaatagggtaatacagaggtcacagagtatggaaatgg

SEQ ID NO: 293583 - DNA, 1000 bp, Homo Sapiens; identical to SEQ ID NO: 224494

SEQ ID NO: 293584 - DNA, 1000 bp, Homo Sapiens; identical to SEQ ID NO: 224495

SEQ ID NO: 293585 - DNA, 1000 bp, Homo Sapiens; identical to SEQ ID NO: 118892

SEQ ID NO: 293586 - DNA, 1000 bp, Homo Sapiens
ggcagctggcagcttcgatgacattctggccatcactggcttcaacacatgcttgggcatagccttttccacaggctctactgtctttaatgtcctcagaggagttttggaggtggtaattggtgtggcaactggatctgttcttggatttttcattcagtactttccaagccgtgaccaggacaaacttgtgtgtaagagaacattccttgtgttggggttgtctgtgctagctgtgttcagcagtgtgcattttggtttccctggatcaggaggactgtgcacgttggtcatggctttccttgcaggcatgggatggaccagcgaaaaggcagaggttgaaaagataattgcagttgcctgggacatttttcagccccttctttttggactaattggagcagaggtatctattgcatctctcagaccagaaactgtaggcctttgtgttgccaccgtaggcattgcagtattgatacgaattttgactacatttctgatggtgtgttttgctggttttaacttaaaagaaaagatatttatttcttttgcatggcttccaaaggccacagttcaggctgcaataggatctgtggctttggacacagcaaggtcacatggagagaaacaattagaggactatggaatggatgtgttgacagtggcatttttgtccatcctcatcacagccccaattggaagtctgcttattggtttactgggccccaggcttctgcagaaagttgaacatcaaaataaagatgaagaagttcaaggagagacttctgtgcaagtttagaggtgaaaagagagagtgctgaacataatgtttagaaagctgctacttttttcaagatgcatattgaaatatgtaatgtttaagcttaaaatgtaatagaaccaaaagtgtagctgtttctttaaacagcatttttagcccttgctctttccatgtgggtggtaatgattctatatccccaaaaaaaaaaaaaaaaaaaaa

SEQ ID NO: 293587 - DNA, 1000 bp, Homo Sapiens
ttgtatgttgggtttggatctgtagaaaaagaaaacgggagcagccagaccctagcacaaagaagcaacacaccatctggccctctcctcaccagggaaacagcccggacctagaggtctacaatgtcataagaaaacaaagcgaagctgacttagctgagacccggccagacctgaagaatatttcattccgagtgtgttcgggagaagccactcccgatgacatgtcttgtgactatgacaacatggctgtgaacccatcagaaagtgggtttgtgactctggtgagcgtggagagtggatttgtgaccaatgacatttatgagttctccccagaccaaatggggaggagtaaggagtctggatgggtggaaaatgaaatatatggttattaggacatataaaaaactgaaactgacaacaatggaaaagaaatgataagcaaaatcctcttattttctataaggaaaatacacagaaggtctatgaacaagcttagatcaggtcctgtggatgagcatgtggtccccacgacctcctgttggacccccacgttttggctgtatcctttatcccagccagtcatccagctcgaccttatgagaaggtaccttgcccaggtctggcacatagtagagtctcaataaatgtcacttggttggttgtatctaacttttaagggacagagctttacctggcagtgataaagatgggctgtggagcttggaaaaccacctctgttttccttgctctatacagcagcacatattatcatacagacagaaaatccagaatcttttcaaagcccacatatggtagcacaggctggcctgtgcatcggcaattctcatatctgtttttttcaaagaataataaaatcaaataaagagcaggaaacagagtgttagtctgtgtctacagcccttcctctgcatgtggccacaggggacctttttttgtttctcctgacatccagacttggaaatatctaactacttgc

SEQ ID NO: 293588 - DNA, 1000 bp, Homo Sapiens; identical to SEQ ID NO: 224496

SEQ ID NO: 293589 - DNA, 1000 bp, Homo Sapiens
ggagtctcactctgtggcccaggctggagtgcagtggcgcaacctcggctcactgcatcctctgcctcctgggttcaaacgattgtcctgcctcagcctcccgagtagctgggattacaggtgcctgccacaacacctggctgattttttttttggtatttttagtagagacagggtttcaccatgttggttaggctggtctcaaactcctgacctcaagtgatccaccacttccgcctcccaaagtgctgggattacaggtgtgagccgccatgccaggccgggcttttaacttttaatgtcataatgttaaggtaattttgttgtgtgtttagaagtgaccttacctttaacacctgtggagttagtgcgtgcacattgctggctcagcgtaacccatcacgggaccggaggagaggagagcggggaagaggagagcagcttcaggccgtggtgtctcccatgtctgtgttcttatttgcagctcagggtttgcattcccaggtagaacaggtgtcgtacactgtgaaatgttccaggttatttgtttataatgtgtgtgtcatatacagatagctccgatgacatctgaagttgtgacttcatcatcttgtcatatttctgtatgatgagccccagggcccatcctgaggtctgctagccatgtgcttagtctcacctccccagcccacgctggcattaccacccagagacccttcagtgctgtgtgtttttcctttttagggttacttttgactcacagtgttaggcaagccagcttggaagttaacttttaaaaaaattcaattgaagctgtaaagtataatatatagattggaagtcaccagaaattgttttagtttgtgaattcccccagtgtatgttctgaaaagaaaatgggagagcttgtaaagcatctcctaaatgcgaagccgggtgaccctggacttctggcacatctgaataaacatgttcttattctggaaaaaaaaaaaaaaaa

SEQ ID NO: 293590 - DNA, 1000 bp, Homo Sapiens
cttcccacagagggtgctaatctcattatgctgtgctatctgaaaagaacttaaggccacaattcacgtctcgtcctgggcattgtgatggattgaccctccatttgcagtaccttcccagctgattaaagttcagcagtggtattgaggtttttcgaatatttatatagaaaaaaagtcttttcacatgacaaatgacactctcacaccagtcttagccctagtagttttttaggttggaccagaggaagcaggttaaatgagacctgtcctctgctgcactcagaaaaaataggcagtccctgatgctcagatcttagccttgatattaatagttgagaccacctacccacaatgcagcctatactcccaagactacaaagttaccatcgcaaaggaaaggttattccagtaaaaggaaatagttttctcaaccatttaaaaatattcttctgaactcatcaaagtagaagagcccccaaccttttctctctgccttcaagaaggcagacatttggtatgatttagcatcaacaacacatttatgagtatatgtaagtaatcagaggggcaaatgccacttgttattcctcccaagttttccaagcaagtacacacagatctctggtaggattaggggccacttgtgtttccggcttattttagtcgacttgtcagcaagtttgatgcctagtctatctgacatggcccagtagaacagggcattgatggatcacatgagatggtagaaggaacatcatcacatacccctctcacagagaaaattatcaaagaaccagaaattatatctgttttggagcaagagtgtcataatgtttcagggtagtcaaaataaacataaattatctcctctagatgagtggcgatgttggctgatttgggtctgccattgacagaatgtcaaataaaaaggaattagctagaatatgaccattaaatgtgcttctgaaatatattttgagataggtttagaatgtca

SEQ ID NO: 293591 - DNA, 1000 bp, Homo Sapiens
cgttagggatgatggtgccaggtccatggctgaggccttggcctccaaccggaccctctccatgctgcacctgcagaagaacagcatcgggcccatgggagcccagcggatggcagatgccttgaagcagaacaggagtctgaaagagctcatgttctccagtaatagtattggtgatggaggtgccaaggccctggctgaggccctgaaggtgaaccagggcctggagagcctggacctgcagagcaattccatcagtgacgcaggagtggcagcactgatgggggccctctgcaccaaccagaccctcctcagcctcagccttcgagaaaactccatcagtcccgagggagcccaggccatcgctcatgccctctgcgccaacagcaccctgaagaacctggacctgacagccaacctcctccacgaccagggtgcccgggccatcgcagtggcagtgagagaaaaccgcaccctcacctcccttcacctgcagtggaacttcatccaggccggcgctgcccaggccctgggacaagcactacagctcaacaggagcctcaccagcttagatttacaggagaacgccatcggggatgacggagcgtgtgcggtggcccgtgcactgaaggtcaacacagccctcactgctctctatctccaggtggcctcaattggtgcttcaggcgcccaggtgctaggggaagccttggctgtgaacagaaccttggagattctcgacttaagaggaaatgccattggggtggctggagccaaagccctggcaaatgctctgaaggtaaactcaagtctccggagactcaatcttcaagagaattctctggggatggacggggcgatatgcattgccacagcactgtctggaaaccacaggctccagcatatcaatctccagggaaaccacattggggactccggggccaggatgatctcagaggccatcaagacaaatgctcccacgtgcactgttgaaatgtga

SEQ ID NO: 293592 - DNA, 1000 bp, Homo Sapiens
ctgaaggccttcaacccgagaaaacaaacccaggttggcgactgcaacaggaacttggagtggagaggaaaagcatcagaaagaggcagaccatccaccaggcctttgagaaagggtagaattctggctggtagagcaggtgagatgggacattccaaagaacagcctgagccaaggcctagtggtagtaagaatctagcaagaattgaggaagaatggtgtgggagagggatgatgaagagagagagggcctgctggagagcatagggtctggaacaccaggctgaggtcctgatcagcttcaaggagtatgcagggagctgggcttccagaaaatgaacacagcagttctgcagaggacgggaggctggaagctgggaggtcaggtggggtggatgatataatgcgggtgagagtaatgaggcttggggctggagaggacaagatgggtaaaccctcacatcagagtgacatccaggaggaataagctcccagggcctgtctcaagctcttccttactcccaggcactgtcttaaggcatctgacatgcatcatctcatttaatcctcccttcctccctattaacctagagattgtttttgttttttattctcctcctccctccccgccctcacccgccccactccctcctaacctagagattgttacagaagctgaaattgcgttctaagaggtgaagtgattttttttctgaaactcacacaactaggaagtggctgagtcaggacttgaacccaggtctccctggatcagaacaggagctcttaactacagtggctgaatagcttctccaaaggctccctgtgttctcaccgtgatcaagttgaggggcttccggctcccttctacagcctcagaaaccagactcgttcttctgggaaccctgcccactcccaggaccaagattggcctgaggctgcactaaaattcacttagggtcgagcatcctgtttgctgataaatattaaggagaattca

SEQ ID NO: 293593 - DNA, 1000 bp, Homo Sapiens
aaggactctgtccccttggggctcatcacccttccacatcctcctcctcgttgccccctggtcaggcagcttctttttttttttttcaagatggagtcttgctctgtcgcccaggctggaatgcagtggcgcgatctcggctcactgcaaactctgcctcctggattcaagcgattctcctgcctcagcctctcaagtagctgggattacagggcacctgccaccacgcctggctaatttttgtattttagtggagacggggtttcaccatgctggccagactggtctcgaactcctgacctcaggtgatccgcccgcctcagcctctgaaattgctgggattacaggcatgagccaccacacccagcccggacagcttctttgggagtgctgctaaccttgaaattatcagacacttaggagttattagtgctaaaaaggggaccgtgcaaggcagcagagttacatggttcttcaaatcatgtctgaacctattcttggaatcttctctataataagggaagttctcttaccccactgccacatacctctgttttaaaagataagtccactaactgtgagtaaaaatgatatatataggcattaaccacacactttaatgggtataatttcctggctgcctcccttcctcagcccattaggttaaacaccaaagaaagactggtgtgtactgaataggaaagggaagttttatttggaaccttctaagaggaaatcaaccaggaccaaagagccttaaaggacacacagcaatgcacagccacttcccttccccagcttggctgccctaggtgatttctcaagctccttgggggactgttgtttctcatctggaatcaatgtgtgtatgagttttgtctggtaggattgctgactctgtccaacagatatcactgtgaattgaataaatttgttgaaagagcacacaggcacacataaaaaaaaaaaaaaaaaaaaaaaaaaaaaaaaaaaaaaaaaa

SEQ ID NO: 293594 - DNA, 454 bp, Homo Sapiens; identical to SEQ ID NO: 31543

SEQ ID NO: 293595 - DNA, 1000 bp, Homo Sapiens; identical to SEQ ID NO: 224499

SEQ ID NO: 293596 - DNA, 1000 bp, Homo Sapiens; identical to SEQ ID NO: 118895

SEQ ID NO: 293597 - DNA, 1000 bp, Homo Sapiens
atgtaaaaatcgaaagagattgttgtaggaaatctcaacctaatgctgccggggaggaagtgcacctagaaagattaatgagaaacaatgaaaccagctaacatgaacgattggatgcccatcgccaaggagtatgatccactcaaagcgggcagcattgatggcaccgatgaagacccacacgaccgcgcggtctggagggcaatgctggcacgatatgtccccaacaaaggtgtcataggagatcccctcctcaccctgtttgtggccagactaaacttgcagaccaaggaggacaaattaaaggaagtcttttcccgctatggtgacatccggcggcttcggctggtcagggacttggtcacaggtttttcaaagggctacgccttcatcgaatacaaggaggagcgtgccgtgatcaaagcttaccgagatgctgatggcctggttattgaccagcatgagatatttgtggactacgagctggaaaggactctcaaagggtggatccctcggcgacttggaggcggtcttgggggaaaaaaggagtctgggcaactgagatttgggggacgggaccggccttttcgaaaacctattaacttgccagttgttaaaaacgacctctatagagagggaaaacgggaaaggcgggagcgatctcgatcccgagaaagacactgggactcgaggacaagggatcgagaccatgacaggggccgggagaagagatggcaagaaagagagccgaccagggtgtggcccgacaatgactgggagagagagagggacttcagagatgacaggatcaaggggagggagaagaaggaaagaggcaagtagaggcccaacagcagaaccccaaagtgaagttacagtggaaatgagtggagggggattgtctttcaacgcagcgtgagtctaatggttgaataaaacttactgatgatcatgggaaaaaaaaaaaaaaaaaaaaaaaaaaaaaaaaaaaaaaaaaaaa

SEQ ID NO: 293598 - DNA, 1000 bp, Homo Sapiens
tccctactggctgtcttgggggaaggcagcgcctctctagctactcaagggagggggatgtgggcacttgaagcagggacacccacagaatggtccctcttctccccaaaaggtgttcatgcctccctgtggctagtacaggctgagcactaagatgcttagtgctcagacaacctggggatgcctgtcccctacctgctcctcacccacagctacctgaggctgctctgagaagtacacacaggaatacatacgctcctctattcttcccttcatcctcatttgaacgccaggtatctcccctcctctctctcccctgcagaggcatgtagggaacagcaggagattattctcaccaaagttatgtcaagccccattggtcccagagtagctgaagggaagccaacccccctgcagcacaaataggccccccagtcccagccgtgtgctggcagatagggttgtattatttcttcttaccccatgcctgaccaagggaggtcaaaaggagaaaagtataggctgtggacaataactgatgaatatagggcccagatggaccaagtggggccggggagggatgaataaacaccctaccccgtgccctgtctttggtgagcagcagccctggggtcacagacatggaagggaccaccctggggctgactgcttttctgtgctgttggttcccaaaactagaaagaaggaagcagggagcggtgccccaagcatggctcctgccaacacctatttatttccttgtttgtgctatgctgggcaggccttctcttgtcccttataggtaccttggaggggccaggggctgaggaaggccggacccaggttccaggggcgcaggcagtgcggcttttggctgtgtacatagggtgctttattctccacagagtgatacatgctaaggtgggttgggcttggaccgatgtccccatatgtacagaactgaataaagtgggtctctgagaaaaaaaaaaaaaaaaaa

SEQ ID NO: 293599 - DNA, 1000 bp, Homo Sapiens
aaatcacttagtacattagagctacaggttaagactagaaagtctgagttatgttttaggtatacatgatcgtctgagtggtcataaccttttcttttatcatgtctcgctaataaccccagctattgtctgttgtgttcagctgagatgcaaaaaagaaattaagcaaaaaagaaaaagatgaagacttttcatgaattttgtgaacttgccaaaaggggaagggaaaaatctttgtgttacttcactcaaagaacataagtaactgcaattaacatatatgaaatttattactctgcttgcatttatgaaactaaccagttttttaaactttaattcttaaatttatggttggaaatgctgataatttattttgttatttaagagctgttgttaagtggaggaaagtagttgttaataaatgtataaaactgttcttgactagtaatcagggacaaaatttatagttcataagtcatgacacagtattcgctctttttctgaatgtttacatagagattcatcactgcagattacagaaagttaagtgtatactacaaactctaattaaagataaaaatcttttctacttttctttgtcagataatgcttttttatgtgtttttacattttttgaaagaagataaatggttcatccagagctttattaagaagcatttcttttcttcccttaaaaaatagatgcttatttttattgacatgtgtataataagatgggtgcctactgtgatgcattttaccaggcattttaccttcattattactcatctctattgtgataaccaggctcccatttaactgagtataagagagaataaatgatttctctaaggtcatcaaactatttagtttttccactttaccttcatgatttaaggaacatgtattagctgtgttttagtgagaatgaattgctatccatcataatttttgctgttgatttgaacattaaaactggaattgtgctaaaatcagaaaa

SEQ ID NO: 293600 - DNA, 1000 bp, Homo Sapiens
cggaagccaaataggtagccaaaaatccagatatttgagaagcaggaaatttatagcaaccaaagaaatagggcaagagaggcaggtgaacacacatgatacctcaattgacaatcttcctcccaccaagccagacacgttgtaaatgctgcttcctattggagcccagaaaaaaggaaaaggaaagtttaggctttctttgtcctttgtgtggaagcagggaattggattgaagactttcatagttgtaacataaaggcaaatcctgaggaactcactgatggagatgtgaaatggcagtaaggaagaaaacagaataactgaacaaatatattagtctagggccacttaatttagaggaagaaaaaaaatcaacccatccatagaaatagtttgataaacaggtcactaaatcattggcgtttataaagattcttagctatcaagggctgcattgtattttatatactcagttttataaggtgatactttttaaataagcgctttaatgaaaatggttagactgaaaataattttggtccttaaaaggagtcaggagcttttatatataaggtacatattttaaaagaatacctcctttataacagggttttacagacactaccataatttataatcattattttttacttttgggttcacctagatcatatgagttgatgtgatacttctagaacaaaattattcatagtgcgttttttgtaatttatgattgttaagtaagcttgacttataaattgacattgtaattgtgtacataattggatatatgtgttaaaatttaacatttagatttacttaattgtagaaaatacaaatgtaaaacttacacatggaaagaactgtatgcagttgactttactatgtaaattggagggaaacaaagttttagatccattttctttcaaaattttctttattgtaaagtatgcaaaatatatattcataccatttattaaatcagaatgtttatacaaaa

SEQ ID NO: 293601 - DNA, 1000 bp, Homo Sapiens
gaagagatgggagaagaagatagtgaggtcattgaacctccttctctacctcagcttcagacccccctggccagtgagctggacctcatgccctacacacccccacagtctaccccaaagtctgccaaaggcagtgcaaagaaggaaggctccaaacggaaaatcaacatgagtggctacatcctgttcagcagtgagatgagggctgtgattaaggcccaacacccagactactctttcggggagctcagccgcctggtggggacagaatggagaaatcttgagacagccaagaaagcagaatatgaaggcatgatgggtggctatccgccaggccttccacctttgcagggcccagttgatggccttgttagcatgggcagcatgcagccacttcaccctggggggcctccaccccaccatcttccgccaggtgtgcctggcctcccgggcatcccaccaccgggtgtgatgaaccaaggagtggcccctatggtagggactccagcaccaggtggaagtccatatggacaacaggtgggagttttggggcctccagggcagcaggcaccacctccatatcccggcccacatccagctggaccccctgtcatacagcagccaacaacacccatgtttgtagctcccccaccaaagacccagcggcttcttcactcagaggcctacctgaaatacattgaaggactcagtgcggagtccaacagcattagcaagtgggatcagacactggcagctcgaagacgcgacgtccatttgtcgaaagaacaggagagccgcctaccctctcactggctgaaaagcaaaggggcccacaccaccatggcagatgccctctggcgccttcgagatttgatgctccgggacaccctcaacattcgccaagcatacaacctagaaaatgtttaatcacatcattacgtttcttttatatagaagcataaagagttgtggatcagtagccattttagttactgggggt

SEQ ID NO: 293602 - DNA, 1000 bp, Homo Sapiens
tttgaaaatcaaggagaagtttatgcaacttaaaatgtttacacactgtggtgcaatctactgtttgtgaatgtctgtattatcaggaaacatgtctatacgatcgcagagttgtatttcctcacaaacttctttacgaagagtgaaatacgtttttgtacctctcattttcagtcagggacatactttgtgcaatatttctgtgattgtgcctatgcatgatgaatgaatgcatttcaatcatacattgcctaaatcataacttgatgatgcttgggaaagaatcaacagttaaaacttcatgaagttctaatgtctgtgttccaaaacacatcacattattaggttgtagggagatatgtaggtgtgctccctggggtggggagttttctagttactagaccatctccatttttagcacttggcagcctcatgatccttttataaatgtgagattaacaggagagcagcaatacgattttgccaatggaataacagatttgccggcattcactgaaagagggcagatattgggtccttgtaacttcaactgactcttccaaattgtatgaatttatcaatgtattacacaaatccagtttcagaatgataaaaaatgttagaccaaataatgcggctaattaacagtcgtatgatttctagcccatgggtttaaaactgtatcttaaagagtcattttaaaataatataaatattaaaaaatgtaactgctatcttaatgttctgaaataaaacattttaaaatataaatcctgtagtttaaaaggaagaaatggtgggaaggaaaagtagagaaagaaatgccaattccaggccaaagcgttatttgccaagttttcttagaatgaattttaccaatgtatgagttcttgttaacagaatgtgtaacggaaatactgaaagacttttgcttaaagtggcattattgactgctgatgtgatgctactgtaatgcaataaatttttaaattgttgcaaa

SEQ ID NO: 293603 - DNA, 1000 bp, Homo Sapiens; identical to SEQ ID NO: 293602

SEQ ID NO: 293604 - DNA, 1000 bp, Homo Sapiens; identical to SEQ ID NO: 118897

SEQ ID NO: 293605 - DNA, 1000 bp, Homo Sapiens
agtaaacccaggaggtggaatcactgctacaaaacctgttacctcaggggagcagaagcctattcctgctttgctttcactcactgaagagtctacgccttggaaatcaagcttaccccgaaagattagccttgtacaaaggggggatgacgcagaccaaatcgagccgccaaaagtgtcatcacaagaaaggccccttaaggttccatcagaacttggtttaggagaggaattcaccattcaagtaaaaaagaagccagtaaaagatcctgagatggattggtttgctgatatgatcccagaaattaagccttctgctgcttttcttatattacctgaactgaggacagaaatggtcccaaaaaaggatgatgtctccccagtgatgcagttttcctcaaaatttgctgcagcagaaattactgagggagaggctgaaggctgggaagaagaaggggagctgaactgggaagataataactggtgacaatggatgtgagttaaactttgggaaaaaggattccctttttttaaaaaaaatcaatacctcaaaagcaggctttgggacaagaaaaccccaaagtggcctgcttttcccatcccaggagctcattatccagtctgtgccaactgaagtaggagactgactgtgagtgctggctaaaagccctgggtggtgaggctcacagtactggtttccaggaggaagagcctttgtgcatttgactgaggccagtttctatgaagagcaagtagctgaggagaggtcgaatttactgctttttccaggacaattctggaagtaaagaaaatgtaattcaagctggttagcttaattttgtgccattctttaacataagagtaagctctattatgaaatacaactttaaaaaattttagctataaattatataaatgattttaaattgctgaggtttccttaggcagcttatttatttgtttacagttagactatctgagtaaatggttctttgtggac

SEQ ID NO: 293606 - DNA, 1000 bp, Homo Sapiens
aattttgcaagtctttaagcacataaatacaacagaatagccacccaatttctgtctgaaatctaaattggatggatttgaccatcattctattatctttgatttctacaatgtctatatcttattacctataactattaatttttcatagaattataaatgtcatttgactatgtcaatctgtatatattgtaccttaatatgaaaaacaaattttttaattcataaaagtatttttattagatttcatatgcatgaaacccaagcaaattatatgaatttattttactatttgaaaatgttcatattaccaataatgtggacaaattactttgcaggtttaaatatgcctctgtaaaggaagagtctcattagacaatgatttttaaagcattggaaaaatattttgcctgtaaaagttagtaactaggtggttcacaaaattacaacatcaaaatagttacatcttgtgaaaatatatgatttttatgtcaatcaagacaaatgaaatatatatgtatgtgtatatatatacatgtatgtatgaaatatatatatgtgcgtgtgtgtgtgtatatatatatatatatatatatatttctatgaaattgtccagatgtgttcaggaacatgattgcattagagcaatgactgtattttgttgtccttataacatttatattatttcagttttaagtcaaaaggtattctgaatataataaaagcctcacaaattatttgtaaaatttagtagttcatatttagtatatcagtaatatagaagacatctttatagtcaactcttaattaatgcttattgtaccaaatctttgagatatttgtacataaatgaaatatgtactttcatgctaaaattatatatcatgactgtgctataatttggcatgtcattatctagatttatatgtatgtacgtatttcaggtccttgaaattttaataaatattacagttaaatcctgaaaaaaaaaaaaaaaaaa

SEQ ID NO: 293607 - DNA, 1000 bp, Homo Sapiens; identical to SEQ ID NO: 224500

SEQ ID NO: 293608 - DNA, 943 bp, Homo Sapiens
agagccgggtgcacgcgccggggaggtagccaacagccgttgggacgcgacgctggttcccaggggagagccagccgctgccgcggcactggttcagacggccaggccctagggacccaccatggatcctgaacacgccaaacctgagtcatccgaggcaccttcagggaacttgaaacaaccggagactgccgcagccctggaagcagacaaagcaaatatgagcaactttaattgaacatgtggaagacccttttagttatggagaggtttctcaggggaaactcaaatctctgtccgtggaaattttcaagaagggaaggtgtaagcttcctgcaaagctgcaaaccactgtacctgcctcagtcaggcctgcccactatgggcagacctctcgctcagcctgcagaacccagctgggacttacttccaacctccaccagccctgctacatacccctgttccagcattaactaccaggcaccaaaacagtaggcattagtgcctttccaagaggcaagatcttaccaacagtatcattacagctgtgttcctttcagtagttgccatcttggccatgcaagaaaagaaaagaaggcatttactctatgtcggggggtccctgtgtctcacagcggtaatcgtgtgttgcatcgatgcgtttgtggtcaccacgaagatgaggaccaacttgaaaagattcctgggagtcgaagttgaaaggaagctttcccccgccaaggacgcctaccccgaaaccggccccgacgccccgcagaggcccgcctgaagccagcccggcgccctagcagatgcacgtgtctgtcgaatcgctgcctccgagcccacccccgagctcgcatgctgtcacccattccagcctaaatgtgaccataaaattagggctgctgcttttatcgagaaaaaaaaaaaaaaaaaaaaa

SEQ ID NO: 293609 - DNA, 1000 bp, Homo Sapiens
aaaggaaacctcattactcaatccttctggccaagagtgtcttgcttgtggcgccttcctcatctctatataggaggatcccatgaatgatggtttattgggaactgctggggtcgaccccatacagagaactcagcttgaagctggaagcacacagtgggtagcaggagaaggaccggtgttggtaggtgcctacagagactatagagctagacaaagccctccaaactggcccctcctgctcactgcctctcctgagtagaaatctggtgacctaaggctcagtgtggtcaacagaaagctgccttcttcacttgaggctaagtcttcatatatgtttaaggttgtctttctagtgaggagatacatatcagagaacatttgtacaattccccatgaaaattgctccaaagttgataacaatatagtcggtgcttctagttatatgcaagtactcagtgataaatggattaaaaaatattcagaaatgtattggggggtggaggagaataagaggcagagcaagagctagagaattggtttccttgcttccctgtatgctcagaaaacattgatttgagcatagacgcagagactgaaaaaaaaatttactttgatctctgtttttgaattcttattatttatattttgcttactaccttttttgccttttgtccttttgtggagagggcgatgaattaagagtagtggggtgggtggcgagtaagtaaaatttcaaatagcattttagtgaatgcaattcagtagtcctgaagcctgacttaataaaacaaaattcatttatggttgtttcatgaaagttattagataggatcaagttttgtttgtatattgtttgccttgctctgtttttgcttttgtgcttaggcaagtgcaaaatactctatggaaatcataattgtcatcttcttcatggtgttagggatatattgtcacatgatttcaataaatcctttttttgctttaaaaaaaaaaaaaa

SEQ ID NO: 293610 - DNA, 1000 bp, Homo Sapiens
aaccccatcatcctgcccctgtggcatgtcggaatgaatgacgtccttcctaacagtccgccctacttcccccgctttggacagaaaatcactgtgctgatcgggaagcccttcagtgccctgcctgtactcgagcggctccgggcggagaacaagtcggctgtggagatgcggaaagccctgacggacttcattcaagaggaattccagcatctgaagactcaggcagagcagctccacaaccacctccagcctgggagataggccttgcttgctgccttctggattcttggcccgcacagagctggggctgagggatggactgatgcttttagctcaaacgtggcttttagacagatttgttcatagaccctctcaagtgccctctccgagctggtaggcattccagctcctccgtgcttcctcagttacacaaaggacctcagctgcttctcccacttggccaagcagggaggaagaagcttaggcagggctctctttccttcttgccttcagatgttctctcccaggggctggcttcaggagggagcatagaaggcaggtgagcaaccagttggctaggggagcagggggcccaccagagctgtggagaggggaccctaagactcctcggcctggctcctacccaccgcccttgccgaaccaggagctgctcactacctcctcagggatggccgttggccacgtcttccttctgcctgagcttcccccccaccacaggccctttcctcaggcaaggtctggcctcaggtgggccgcaggcgggaaaagcagcccttggccagaagtcaagcccagccacgtggagcctagagtgagggcctgaggtctggctgcttgcccccatgctggcgccaacaacttctccatcctttctgcctctcaacatcacttgaatcctagggcctgggttttcatgtttttgaaacagaaccataaagcatatgtgttggcttgttgtaaaaaaaaaaaaaaaaaa

SEQ ID NO: 293611 - DNA, 1000 bp, Homo Sapiens; identical to SEQ ID NO: 224501

SEQ ID NO: 293612 - DNA, 1000 bp, Homo Sapiens; identical to SEQ ID NO: 118899

SEQ ID NO: 293613 - DNA, 1000 bp, Homo Sapiens; identical to SEQ ID NO: 118900

SEQ ID NO: 293614 - DNA, 1000 bp, Homo Sapiens
gtgtcaacctctaccccccaactgcaacgagagttttgaggggcatcaatcacaccgagaagtcacagcccctcaaccactgaggtgtgggggggtagggatctgcatttcttcatatcaaccccacactatagggcacctaaatgggtgggcggtgggggagaccgactcacttgagtttcttgaaggcttcctggcctccagccacgtaattgcccccgctctggatctggtctagcttccggattcggtggccagtccgcggggtgtagatgttcctgacggccccaaagggtgcctgaacgccgccggtcacctccttcaggaagacttcgaagctggacaccttcttctcatggatgacgacgcggcgccccgcgtagaaggggtccccgttgcggtacacaagcacgctcttcacgacgggctgagacaggtggctggacctggcgctgctgccgctcatcttccccgctggccgccgcctcagctcgctgcttcgcgtcgggaggcacctccgctgtcccagcggcctcaccgcacccagggcgcgggatcgcctcctgaaacgaacgagaaactgacgaatccacaggtgaaagagaagtaacggccgtgcgcctaggcgtccacccagaggagacactaggagcttgcaggactcggagtagacgctcaagtttttcaccgtggcgtgcacagccaatcaggacccgcagtgcgcgcaccacaccaggttcacctgctacgggcagaatcaaggtggacagcttctgagcaggagccggaaacgcgcggggccttcaaacaggcacgcctagtgagggcaggagagaggaggacgcacacacacacacacacacaaatatggtgaaacccaatttcttacatcatatctgtgctaccctttccaaacagcctaatttttcttttctctcttcttgcacctttacccctcaatctcctgcttcctcccaaattaaagcaattaagttcctgg

SEQ ID NO: 293615 - DNA, 1000 bp, Homo Sapiens
caagcaagaagggagacctactaaatgcccattatgacggctacctggctaaagacggctcgaaattctactgcagccggacacaaaatgaaggccaccccaaatggtttgttcttggtgttgggcaagtcataaaaggcctagacattgctatgacagatatgtgccctggagaaaagcgaaaagtagttatacccccttcatttgcatacggaaaggaaggctatgcagaaggcaagattccaccggatgctacattgatttttgagattgaactttatgctgtgaccaaaggaccacggagcattgagacatttaaacaaatagacatggacaatgacaggcagctctctaaagccgagataaacctctacttgcaaagggaatttgaaaaagatgagaagccacgtgacaagtcatatcaggatgcagttttagaagatatttttaagaagaatgaccatgatggtgatggcttcatttctcccaaggaatacaatgtataccaacacgatgaactatagcatatttgtatttctactttttttttttagctatttactgtactttatgtataaaacaaagtcacttttctccaagttgtatttgctatttttcccctatgagaagatattttgatctccccaatacattgattttggtataataaatgtgaggctgttttgcaaacttaacttgcaggaatggtatgactgtgtttcctactgctttattctgtaaacaagaattgtagcaccatgaaacagacctctgggtcccagtgggcattttttcccctttcaggatgtaggaggacatgtatagtatgtcaaaaactgcaagcttttcccaactttaaccttaccagcatgttaatatccagtttttttatagtttaaaagttaaagtgcctcatattttgaaaatatccattaaggacccaggaattagcatttcacttgtttatacatttttataacattatgaagacgatataaaa

SEQ ID NO: 293616 - DNA, 1000 bp, Homo Sapiens
gttaaaaaatcaaacaaaaggaccccaaattaagaatctaggaagctcagaaacgaaatctaggttcaggaagaccacacttggtgttacccgattggcacagaccagtttcagagaaatactttcaggcactaagactaatcgaatgaacaaagtccacagtttatttttatactttcagtcaagtttgaactctgtaaaacctcataaataagttataatttctgttcactttgtatttgttcagtatgcaaagtgtgtcaccctttctagctgaattcaattcccacgtagactcttattttataggacgaatgccaaattgcagcttctgggggtagatctcaatttgcagtattcagacttctttttctttcttttacattcttttttctttctttctttctgccaactttgttttccagtgtttacaaggtgacaaatgtttgactttggttgtgtttaaatgtccgtgtaaaatagctgccttttattttttaaggtaacaaataccacctagaggtaggtaggatcatcccacgcttgctttagcacaggacaactttacaaaacatgattgtttacagctgctcttcccctcttttctgatctgcagtttttgcctgggtcccactcaggtgaaaatccatctcattctggaatggttttgcttttgaatttttggttatttttgtgtttctttgggggttagaccactttctgattagccgccacctgcctgcatctgtgaaaagggatctgctcccaggcgttctcacccttcttttgaaggactccttaggctttgttgaatgaagcagagaagattgtatagttggggctggtcttggtgaacacacattattaccccacacatcccctttgtgtagaaagccaaataaaatctatacataccaaaaaaaaaaaaaaaaaaaaaaaaaaaaaaaaaaaaaaaaaaaaaaaaaaaaaaaaaaaaaaaaaaaaaaaaaaaaaaaaaaaa

SEQ ID NO: 293617 - DNA, 1000 bp, Homo Sapiens
tgtgtagcttagtaaggcattaacataagtacaaaaactatgaaacagatgcatatttcctcaacatactgtgtcaggtatactgttttataatttggttgttttagccttattgcacaccaactcccaaaatataggttactcttgttcaaaaggaaaaaaaaaattgtgattttctttgagtggtatatgttattaattaccattagcatttgctcttataaagggcaatgattatagtagacaatattgtaactcagtagacttgttgaatatgcaaacttactgtcaagtgacctcaaaaaaaaaatgaaaagatagaatacactagtagttcttatcctcttttgtaggaaaccaataatagccattgtggcaataattcatcagttgattttaaagcttcatgttatgcaaaaaagaatcctgctgttatacatgtgacagtgactttgtgctgaaatttcagctattccagataaacattgtatatcttgtaaattaatgtttaaaggtgtagttttgttcttacagaaagtgttgattgccaggttgcttatagcactttaagttattctaaaaatgaaattataagccaaatatttggcttaagtagatttagttgtatagcacttacatatttagttcttttgaaagtttagataattatttaaagaaagcataatgctaatggaaaagaaaatctgatgttctattataatatgctattgctgaatatgaatagaaatacagggcatcatttccttgtctcattataagttagtaacaatatatagattaaatgtttacaatatagggaattgtaaataaatatatcagtttttttccccttcggtcttccacagcagtattattgtctttgtggagttgactaatgataatttaaaaatcctgtaatggatttctactaaaataaggtcatagtggcatataccaaataaaatcaaatacagaaatacaagaaaaaaaaaaaaaaaaa

SEQ ID NO: 293618 - DNA, 1000 bp, Homo Sapiens
tagagtgtgcctgaagtcccagatacttggggggctgaggtgggaggatctcttgagcctgggaggtcaaggctgcagtgagccgagattgcaccactgcactccagcctgggtgacagagcaagtgagaccctgtctcaaaaaaagaaaaagaaaaagaaaaaatattttccctattagagaagagattgtggtttcattctgtattttgtttttgtcttaaaaagtggaaaaatagcctgcctcttctctactctagggaaaaaccagcgtgtgactactcccccaggtggttatggagagggtgtccggtccctgtcccagtgccgagaaggaagcctcccacgactgcccggcagggtcctagaaattccccaccctgaaagccctgagctttctgctatcaaagaggttttaaaaaaatcccatttaaaaaaaatcccttacctcggtgccttcctctttttatttagttccttgagttgattcagctctgcaagaattgaagcaggactaaatgtctagttgtaacaccatgattaaccacttcagctgacttttctgtccgagctttgaaaattcagtggtgttagtggttacccagttagctctcaagttatcagggtattccagagtggggatatgatttaaatcagccgtgtaaccatggacccaatatttaccagaccacaaaacttttctaatactctaccctcttagaaaaaccaccaccatcaccagacaggtgcgaaaggatgaaagtgaccatgttttgtttacggttttccaggtttaagctgttactgtcttcagtaagccgtgattttcattgctgggcttgtctgtagattttagaccctattgctgcttgaggcaactcatcttaggttggcaaaaaggcaggatggccgggcgcggtggctcacgcctgtaatcctagcactttgggaggccaaggtgggaggattgcttgagctcaggagtttgagaccaacctggg

SEQ ID NO: 293619 - DNA, 1000 bp, Homo Sapiens
tcttgtattttttaccatatcactgtaaagaagaggggaaacccagccagctactttttttcatcactttttattcataacttcagatttgtaaaactaatttccaaaatataagctgttttcattagccagttctataatatcttcctgtgatttatgtagaaaatgaacacaccccttttccatttaagaccctgctactgtgtgaagagatgatacttacaaggagtgtcattacctgtgagctgactgaatgttggtaggtgctccattacaatccaggaaagtctgtgttactgatatttgtgtggaaatctttatttcacttcaatttaaccattagatggtaaaattaagatgctacttgttggtaaaaattggtggactggtttcaatgggtaaatgtgttgtggcaaattaatgtgttggaatattgctctttgtgaatttgtgcttaagtcaatgaatgtgtagtatctccttctgacaagcattccctattgggattttaaagctatgtgcacagaatattagtctcttctacatgttttatttttctatttataattcccttttttgttgttatattttatacacagaatagatcttttttctaacacatatttgaactgaataacagacttaaagaaagcctttgttcacattgctatttacttttgtgtttgggggaaaatacgagggattgattttaaataaaaaacattccatctttcatttaatatcaatatcaaaagaagaagacaaacatctatctttctcatctatatttaagtacctttttgtaatgtagtatcaaagttttttaggtaatgcaaaattttacaaatcatttgtggaatgaatggtaaaactaatctgatgaaatggaaaattattctgcaatattgtaattcatagtttgacttttcataagcaaataaatccctaggatgtaatcaggacttcaaatgtgtaattaaatttttttaaaaaaaatcta

SEQ ID NO: 293620 - DNA, 1000 bp, Homo Sapiens; identical to SEQ ID NO: 118901

SEQ ID NO: 293621 - DNA, 1000 bp, Homo Sapiens; identical to SEQ ID NO: 118903

SEQ ID NO: 293622 - DNA, 1000 bp, Homo Sapiens; identical to SEQ ID NO: 224503

SEQ ID NO: 293623 - DNA, 873 bp, Homo Sapiens
tgccagtgacgtcgtgggctgcagcgcagcagcacccaacgcagtgagtaccttgatctcctgcgtggcctcgtccctggtcttagttccaccgggcagcgggagtcaggaccgcctgtcctcagacccctccgcagcgactgtggcggccgcagtctagcaggaaaggagagggagctttccccgaagaccctcctggaccagccccaggctcctgtgctggttgcacgccagggcctgtactgaccacctccacgtgccactggggctgtaaggaggaatggcggccgtgggcagcctgcttggcctggcagcctcttcctggctagggggccagaacgcctctgaccacagcctgtggctcctgaggaagccccgaggctcatcctgccccggcacgggtcaccagctctgccggctgaggcagagcaccgtgaaggccaccggacctgcactccgccgcctgcacacatcctcctggcgagctgacagcagcagggcctcactcactcgtgtgcaccgccaggcttatgcacgactctaccccgtgctgctggtgaagcaggatggctccaccatccacatccgctacagggagccacggcgcatgctggcgatgcccatagatctggacaccctgtctcctgaggagcgccgggccaggctgcggaagcgtgaggctcagctccagtcgaggaaggagtacgagcaggagctcagtgatgacttgcatgtggagcgctaccgacagttctggaccaggaccaagaagtgaccgtggctccagccaccccgggacattgctaagatgggagggctgttcttaaatcactcgttcttgaagctgccacctggaaaaaaaaaaaaaaaaaa

SEQ ID NO: 293624 - DNA, 1000 bp, Homo Sapiens; identical to SEQ ID NO: 115907

SEQ ID NO: 293625 - DNA, 1000 bp, Homo Sapiens; identical to SEQ ID NO: 115258

SEQ ID NO: 293626 - DNA, 1000 bp, Homo Sapiens
gacccatattatcagcttattctgccaccagagtagagtctaataaattccaaagtttttatttgctccatggtgtatgttctgactttgaaaatgtcagattctataatcatacccctaacatccaggaaacaaatgacagattatctttaaactgaaattgactctacaatgcaacccttaatgctgaatggattaaaaaagtcagcccttttagtatctgtttgaaagggccgtaaaaagttgacacttttgttgttgtggatcctgcgtgtctagacccacgtgttgtttccatcgtatactgtagggtgcaccccttgggattcatcattaagaactgaggctcactgttgtcagaaacaaagctcccaccccccaggttcaaccttgtgggagaactgttgagcatgagaatgttctagactcagaggtactaaaatttgttaccacatcattgcttcctttctacaggacgaattgaggcttaaactttactgttaatgatactggttcattttaatgtgcttgttggtatgttgctatttttcatttcatagctttcaaaaatcatgctaattgtatacttgtctagtttaaggctattttaaaatatgtacaatactattcacagcatttagttcgtttaatttttattataaagcaatctactaaaaaagtacaactgtatttgaacttttcaatagttgtttgtgagctatgataatcaaaagtcattaaagtcttttttaacaaacattcgtgcttacttttcaacataattcccagttatatacagaaaaagatttccacctgtcacgtatctgcctcttttacctgagcaatggtgtagttcttagacctaaggtctgtaattgcaatacttttaaagaaagatgttgctctaagtgctgtttgttagttatgaaatcagatttttctgcttgttcttaatgctgtggtcaaaccatagcacaaaatcattaaaaataatcagcgg

SEQ ID NO: 293627 - DNA, 1000 bp, Homo Sapiens
cgtggtggagggggacggcatcctgcccccactgcgcacagaggccacagagtccgactcagacagcgacggtacgggtgactccagctatgccagagtggtggggtcagatgctgtggactctgggacctgcagctctgcctttgctggctgggaggtgcacacgcgaggtataggctccagactcctcaccaagatgggctatgagtttggcaagggtttgggccgacacgcggaaggccgggtggagcccatccatgctgtggtgttgcctcgagggaagtcgctggaccagtgtgtggagaccctgcagaagcagaccagggttggcaaggctggcaccaacaagccccccaggtgccggggaagaggggccaggcctgggggccgcccagctcctcggaatgtgtttgacttcctcaatgaaaagctgcaaggtcaggctcctggggccctagaagccggggcggccccagcggggaggaggagcaaggacatgtaccatgccagcaagagtgccaagcgggccctgagcctgcggctcttccagactgaggagaagatcgagcgaacccagcgggacatcaggagcatccaggaggctctcgcccgcaacgctggccggcatagcgtggcgtcagcccagctgcaggagaagctggcaggagcccagcgccagctggggcagctccgggctcaggaagccggcctgcagcaggagcagaggaaggcagacacccacaagaagatgactgagttctagagaccccacaagcactatggacgaagcgtgggaccccagcacgggctgccctcaggaagaccagtgttgcccgaggaggggccggcctgctggcctggggcgtgcggacactgctgagtggagacagagctgcggggtcccatctggacacttacttgcccacctgccagtgtcttgggcatttccttggcaaggacattaaagtgatttcatcacagtgtcaaaaaaaaaaaaaaa

SEQ ID NO: 293628 - DNA, 1000 bp, Homo Sapiens; identical to SEQ ID NO: 118904

SEQ ID NO: 293629 - DNA, 1000 bp, Homo Sapiens; identical to SEQ ID NO: 118905

SEQ ID NO: 293630 - DNA, 1000 bp, Homo Sapiens
gctctcaccactggccgcctctccttgccaggcctgccaactcaggggacagatggagcaggagtggagaaagggaaaggcaggtctggggtgtggtcgtgttttcttaactctgcttctgtcttgctctcccctcccctggctttcctctctgcctgctcctgtctctccctggggtttctggtggtggaaaagctcaagcctttgcgaagctaatgacctgcctctgtgcgaagcttacgggaggctggacctcgacacagactctgctgatggcctctcggcccctctgctggcgtccccggagcccagtgctggccccctacaggtggcagcccctgcccactcccatgctggtggccctggccccactgagcacgcctgagcctccggggccacgcttcgttctcaggaacaaaacctgaggcagccctttggatgccctcacagccttgcttctctcagcctaggttcccatttggggacttcaggaccccagagccactaggacttccttgggaagcccgttagcccagggtgggtcccgccaggacagtagggaaacagttgtttccctagccatttccgaatagcccatcattccgagtcatcatctctgtttgctgccttcctggccagccaggtggaagaaagtttccaagctaggtctggcccgttggggatctcagcagtggggcaggagggtgcctgatttcggggagtcctgacccgagcctgttgtcagagttgggaggggctctgagcagtgttgggcaggccgggtctcccatcccgaggccagcgttcctgtgcagagccccatccactggttcttgccctgagccacatatgtctgtgccatgggctgagtgccacgacaggcccgtgtgacagctgctgcccacgcatgtggaagctaggtgggactcattcctaattctgccgttgtaatgagacttgattaaaacaccgccacttttttgcaaaaaaaaaaaaaaaa

SEQ ID NO: 293631 - DNA, 1000 bp, Homo Sapiens; identical to SEQ ID NO: 224505

SEQ ID NO: 293632 - DNA, 1000 bp, Homo Sapiens
ctagaaactaaccctgggaaaagggcatgggtgcaggtagtttgtttgagagatttcccaggacatacaagatggggagtgagatgagtaattcagggaagagaagggaagagagaagagtctattatgagctggttactactgtggctcaatcctattggggaccttttaaagaatcatgtaaaacaggcttacaaattttctttttaaaaatattttattttattttacgttccgggatacatgtgcaggacctgcaggtttgttacataggtaagcctgtgccatggtggtttgctgcacctatcaacccattacctgggtattaagccccgcatgcattagctatttatcctgatgctttccctccccctgccccctcaacagtccacgtgttctcattgttcatctcccacttgcaagtgagaacatgtggtatttacttttgttcctgcgttactttgctgaggataacggcttccagcttcatccatgtccctgcaaaggacgtgatctcatttctttttatggctgcatagtattccatggcatatatgtaccacattttctttatccagcctatcgttgatggatatttggtttgattccatgtttttgctattgtaaatagtgctgcagtgaacatacacatgcatgtatctttataaaagaatgatttatattcctttgagtgtatacccagtaatgggattgctgggtcaaatggtatttctggttctagatctttcaggaattggcacactctcttccacaatggttgaaccaatttacattcccaacagtgtaaaagcattcatgtttctccacagctttaccagcatctgttgtttctggactttttaataatcaccattctgactggcatgagatggtatctcattgtggttttgatttgcatttctctgatgatcactggtgttgagctttttttcatatgtttgttggccgcataaatgtcttcttttgagaaaaaaaaaaa

SEQ ID NO: 293633 - DNA, 986 bp, Homo Sapiens
gcaggcgcagacgcgcgggcgggaagatggcggctgggttcaaaaccgtggaacctctggagtattacaggagatttctgaaagagaactgccgtcctgatggaagagaacttggtgaattcagaaccacaactgtcaacatcggttcaattagtaccgcagatggttctgctttagtgaagttgggaaatactacagtaatctgtggagttaaagcagaatttgcagcaccatcaacagatgcccctgataaaggatacgttgttcctaatgtggatctaccacccctgtgttcatcgagattccggtctggacctcctggagaagaggcccaagtggctagccaattcattgcagatgtcattgaaaattcacagataattcagaaagaggacttatgcatttctccaggaaagcttgtctgggttctatactgtgatctcatttgcctcgactacgatggaaacattttggatgcctgcacatttgctttgctagcggctttaaaaaatgtacagttgcctgaagttactataaatgaagaaactgctttagcagaagttaatttaaagaagaaaagttatttgaatattagaactcatccagttgcaacttcctttgctgtgtttgatgacactttgcttatagttgaccctactggagaggaggaacatctggcaacaggaaccttaacaatagtaatggatgaggaaggcaaactctgttgtcttcacaaaccaggtggaagtgggctaactggagctaaacttcaggactgtatgagccgagcagttacaagacacaaagaagttaaaaaactgatggatgaagtaattaagagtatgaaacccaaataaacagccaccacattttcaaaacagatttgtaaaaattgtatttgttaacactgtgcacaaacgttttatactaaataaatatcaaactacattcttccgaaaaaaaaaaaaaaaaaaaaaaaaaaaaaa

SEQ ID NO: 293634 - DNA, 1000 bp, Homo Sapiens; identical to SEQ ID NO: 224506

SEQ ID NO: 293635 - DNA, 1000 bp, Homo Sapiens
tctttggcttttttgtgtttttaaaagttactccttttagggagctggtctgatgacttgcttagcttggaaatccttgttttcagtgtgtcgagtcaaaatgtgtttatgtgagctgtcactgtggggaaccaattgctttgtcatatagctggttatgaactagtaacatgtttgggaagtcctactgatgttcctttggaagaaaaaatctgctggttttaacaactgtgcttttgctatgtatggtatccaagttagttgaaacgcagacactgagatctgtttgagtttagggtcatttttagaaaggggcagtttaaagcacaatgtctcacatgggacaaagttccaaaatgccaaattcttattttttaaaaagctagttctataaaatactggtattatgggtggggaggaaatagaattgagtcaattggaaagactatccaacttaacatgaaacttgtcaccatgagatagcattagctgcccaggatgctgctatatatatatatatatatatatatgtgtgtgtgtgtgtgtgtgtgtgtgtatatatatatatatatatatatatatatatatatatatatgtgtgtgtatatatatatatatgtgtatatatatatgtatatacatatatgtatatatatgcacatatatatatgtatttaaaaaaatcaaaacaaaaaaaaactcatttatacctgtgtattttttaaagctacaatctgttcaatgtttttaaaaatctgtttatatgacattgttaaaataaagttggtcttttgacgagagggaggatgtcacggtcagttgtaactttgccttcacaaggcaactggggtggggggtgggggtagtgtgcctccttgacatttcgttcaagttatagattcaatggagctatgtcttgttttaagttgctttaatgcattgtattagatcttcaaacagaataaaggttgttttgaaactgaaaaaaaaaaaaaaaaaa

SEQ ID NO: 293636 - DNA, 764 bp, Homo Sapiens
gcgacgctggagctgcggggttaccatgggaaccgaaccgccgcgcctcgcccaggacagttacacttagaggccttcaaaagagggagaatgccctccccataagaacccatgcaaagagctgtgccagggtgatgaattgtgtccggctgaacagaagtgctgcaccacaggctgtggtcggatctgccgagacattcctaaggcagagtttggtggtgaatgtcccgctgacccccttccgtgtgaggagctgtgtgatggggatgcatcctgtccccaggggcataaatgctgcagcaccggctgtggccgcacctgcctcggagacattgagggagggcggggcggtgattgtccaaaagttctggtgggcctgtgcattgttggctgtgtgatggatgagaattgtcaagctggagaaaaatgttgcaagtcaggctgtggccgcttctgtgtcccaccagtcctgcccccaaaactgaccatgaaccccaactggactgtgaggtctgattccgaattagagatcccggtgccctagctgtgctgatttgtctggagcttctttggtaattctggaagcttttcctggcagtcaagagagggtgacatcctggggcttgtgacatttccaggggcactcatggccctctctgctctgcttctcctcctgccgctgaccagagcatgggaaatagccctggattgggtagtgggtgtgtggtgcttctctttcccgataaaggctggtgctgacctct

SEQ ID NO: 293637 - DNA, 1000 bp, Homo Sapiens
tggacttcatctaaggaggttcagttacatctgttcacccaggcccatggtgctgattcccactgatgagcttcacgaaaggctgacaagcaagaatgagaatggattcagttacatcatgagaggtgctttcttcacctctttgagactggaaagcttcacttcccttcagatgtcaaagaagggctgtgtctggtctatcatctcacaagtcatctattatctactggtctgttactatgccttcatacagggttgtcagctgaaacagcagaagtggaggttcttcactgggaaaagaaacattctggacacaagtataatcctcattagcttcatcctcctggggcttgacatgaagagtatttctctacataagaaaaacatggcacgataccgcgatgaccaggacagattcatcagcttctatgaggcagtaaaagtgaactctgctgcgactcaccttgtgggcttcccggttctcctggcaactgttcagttatggaacctgctgcgtcatagccccaggctgcgggtcatcagcaggacactgagccgagcctgggacgaggtggtgggctttctgctgatcatcctaatcctgctgacaggctatgccattgcctttaacctgctgtttggatgcagcatctctgactaccggacatttttcagctcagcagtgactgttgttggtctcctgatgggaatttctcaccaagaggaggttttcgctttagacccagtcctgggcacctttctgatcctcaccagtgtcatcttgatggtacttgtggtaattaatcttttcgtttcggccattctcatggcctttggaaaagaaagaaagtcgcttaagaaagaagctgcactaatagatacactgctacagaagctctcaaatttgttaggaatcagttggccccaaaaaacctcatctgagcaagcagccacgacagcagtgggcagtgacactgaagttttagatgaactaccttaa

SEQ ID NO: 293638 - DNA, 1000 bp, Homo Sapiens; identical to SEQ ID NO: 224507

SEQ ID NO: 293639 - DNA, 1000 bp, Homo Sapiens
cgtctctgccaaaaaccagcacaaggagacaaagcagagccttgtctgtatctgggcagcaggtgttccatgctgctaggtggcgggggtcgggggtcttctgtttcactaacaggaacaaagacagaaaccatgacagggctgccccgccaggccccggtgggtttgtctgcacttggtgctcctgcccacaccagccactttggtgacaatgacccttccaagaatctttggttcaaggagcaccagttccctcttcattcttgaagcagggagaaattgacctttgccttgtcgcccaggaagtggggctcggcacccataactaacacctcccacccttggaaaccatgtcttctgggggtgagatgaccattctgggtctaagactgtttcaaagaagagctcatagactgactggtccagaagacagagggtacaacagtggcatcacagtgacagtgtcatggggagctgggcgggcccagccaaaccctccttcttcctagagcccagccagcaggcaggagttcctggaccctcaggacagtgaacttccagacctcagggcaggtctatgggccactgcaggagatgagaccagccttctgtgttcacctaacgatttatactgtgtatctgtctttgatggaattttgtaactttttatatttttttatgcaaaagcagcttcttaacagatggcattttctgtgactctaggcctcacaaaagagccagagttctggacccatgtttggagcatttgtagccttattctcttgcgtgtgaatctcttaccctgaaaaaaagccataatgaattaagccagactgaccacttgcttggagtgtgtgcttgaaaaaaccagagcaatactgttgggtattgtatcaggcttcagtacaaactggtaacaccaatgtggatcctgacagctttcagttttagcaaaaatacacgtgaaatctgactaccatttaaaaaaaaaaaaaaaaaa

SEQ ID NO: 293640 - DNA, 1000 bp, Homo Sapiens
gcagatcttcctaatctcttgttttacggaccacctggaactggaaaaacatccactattttggcagcagctagagaactctttgggcctgaacttttccgattaagagttcttgagttaaatgcatctgatgaacgtggaatacaagtagttcgagagaaagtgaaaaattttgctcaattaactgtgtcaggaagtcgctcagatgggaagccgtgtccgccttttaagattgtgattctggatgaagcagattctatgacctcagctgctcaggcagctttaagacgtaccatggagaaggagtcgaaaaccacccgattctgtcttatctgtaactatgtcagtcgaataattgaacccctgacctctagatgttcaaaattccgcttcaagcctctgtcagataaaattcaacagcagcgattactagacattgccaagaaggaaaatgtcaaaattagtgatgagggaatagcttatcttgttaaagtgtcagaaggagacttaagaaaagccattacatttcttcaaagcgctactcgattaacaggtggaaaggagatcacagagaaagtgattacagacattgccggggtaataccagctgagaaaattgatggagtatttgctgcctgtcagagtggctcttttgacaaactagaagctgtggtcaaggatttaatagatgagggtcatgcagcaactcagctcgtcaatcaactccatgatgtggttgtagaaaataacttatctgataaacagaagtctattatcacagaaaaacttgccgaagttgacaaatgcctagcagatggtgctgatgaacatttgcaactcatcagcctttgtgcaactgtgatgcagcagttatctcagaattgttaacgtgaatatatctggatggggggttttgtaaataatgaagttgtaataaaaataaaatgaccaaaagcacctttaaaaaaaaaaaaaaaaaaaaaaaaaaaaaaaaaaaaaa

SEQ ID NO: 293641 - DNA, 1000 bp, Homo Sapiens
gattctgtgcttccacgaggcttccccccactcctctgctgctattccctgaggaagaggccaccaatggccgggaggggctcctgcgcttcagttcctggccattttctatccaagatgtggtacaacctcttaccctgcaagttcagagacccctggtctctgtgacggtgtcagatgcctcctgggtctcagaactgctgtggtcacttttcgtccctttcacggtgtatcaagtaaggtggcttcgtcctgttcatcgccaactaggggaagcgaatgaggagtttgcactccgtgtacaacagctggtggccaaggaattgggccagacagggacacggctcactccagctgacaaagcagagcacatgaagcgacaaagacaccccagattgcgcccccagtcagcccagtcttctttccctccctcccctggtccttctcctgatgtgcaactggcaactctggctcagagagtcaaggaagttttgccccatgtgccattgggtgtcatccagagagacctggccaagactggctgtgtagacttgactatcactaatctgcttgagggggccgtagctttcatgcctgaagacatcaccaagggaactcagtccctacccacagcctctgcctccaagtttcccagctctggcccggtgacccctcagccaacagccctaacatttgccaagtcttcctgggcccggcaggagagcctgcaggagcgcaagcaagcactatatgaatacgcaagaaggagattcacagagagacgagcccaggaggctgactgagctcaaaggaacaggatggcacccagagccgcaggacggagactgggggcagccctcacccaactcacaacaggctggatgggtgggtggtaaaaagggaaggatgaggctcccccaatgtcacattaaattcatggttttcattcaaggcaaaaaaaaaaaaaaaaaaaaaaaaaaaaaaaaaaaaaaaaaaaaaa

SEQ ID NO: 293642 - DNA, 1000 bp, Homo Sapiens; identical to SEQ ID NO: 118907

SEQ ID NO: 293643 - DNA, 1000 bp, Homo Sapiens; identical to SEQ ID NO: 224508

SEQ ID NO: 293644 - DNA, 1000 bp, Homo Sapiens
tgggcattccttctatctcaatcatgttgcatgagctcataaagctgctgtactatgcccggtgctccaacgtcactatcatccgcattggcacttctggtgggataggtctggagcccggcactgtggtcataacagagcaggcagtggatacctgcttcaaggcagagtttgagcagattgtcctggggaagcgggtcatccggaaaacggaccttaacaagaagctggtgcaggagctgttgctgtgttctgcagagctgagcgagttcaccacagtggtggggaacaccatgtgcaccttggacttctatgaagggcaaggccgtctggatggggctctctgctcctacacggagaaggacaagcaggcgtatctggaggcagcctatgcagccggcgtccgcaatatcgagatggagtcctcggtgtttgccgccatgtgcagcgcctgcggcctccaagcggccgtggtgtgtgtcaccctcctgaaccgcctggaaggggaccagatcagcagccctcgcaatgtgctcagcgagtaccagcagaggccgcagcggctggtgagctacttcatcaagaagaaactgagcaaggcctgagcgctgccctgcacctccgcagacctgctgtgatgacttgccattaaaagcattgtccaaaatcccctgttgtgtggactttgagcacactttacacaagaatctagaaaatcagatcgcgattaagagacagagaatcttggattaaccgcatgggagatgttcttccttttgaagtttcattggagcattttcaatgatgttagcctgatttggggtttcttcaagaacattctaccaaatttttgtactatttctagggaaatttttcagactttaaaattctaatggtagtcagatttcatgtcactaaacaagaaatctgacaatagtgccaggaaactaatttcctgatacattaaaaaaattccatgcaaaaaaaaaaaaaaaaaaaa

SEQ ID NO: 293645 - DNA, 1000 bp, Homo Sapiens
accacatcccaaatccatgttacaggccacagcagaagctaacaatttagcagccgtggcaactgccaaggacacatacaacaaaaaaatggaagagatttgtggtggtgacaaaccatttctggccccaaatgacttgcagaccaaacacctgcaacttaaggaagaatctgtgaagctattccgaggggtgaagaagatgggtggggaagaatttagccggcgttacctgcagcagttggagagtgaaatagatgaactttacatccaatatatcaagcacaatgatagcaaaaatatcttccatgcagctcgtaccccagccacactgtttgtagtcatctttatcacatatgtgattgctggtgtgactggattcattggtttggacatcatagctagcctatgcaatatgataatgggactgacccttatcaccctgtgcacttgggcatatatccggtactctggagaataccgagagctgggagctgtaatagaccaggtggctgcagctctgtgggaccaggctttgtacaagctttacagtgcagcagcaacccacagacatctgtatcatcaagctttccctacaccaaagtcggaatctactgaacaatcagaaaagaaaaaaatgtaatgcaaattttaagaaatacaggtgcatgaccaattgtcaattaaatattcagttttatgtctccatgcaaacattcaaagtgcttccatcagaacggagtaaaatactaaacacctctgaagactgcaaactggattagttcttttacttcagtgtttaataagcagatgtatgtatgcatggttatactattttgttaacatgtacaatttcctgatttttcttcaaaaatgctgttataaagtatttgtctatttatgataacagtacacgtgttctgcttgaatttactaaattctactactgggttataattaaatcatgtgatattccaaaaaaaaaaaaaaaaaaaaaaaaaaa

SEQ ID NO: 293646 - DNA, 1000 bp, Homo Sapiens; identical to SEQ ID NO: 224510

SEQ ID NO: 293647 - DNA, 1000 bp, Homo Sapiens
agcagacactgattgtgataaccatctttctaaaggtataattcacctagtaacagagtctcagtcactaaacataaaaagggatgcaacaacaaaagaacaatcaaaacctttaattagtgaaatccaaccttttattcaaagctgtgacccagtaccaaatgaattccctggtgcttttccgtctaataaatatactggtgtgactgattcaacagagacccaagaagaccaaataaatctagacttacaggatgtaagcatgcatataaatcatgtagagggaaatataaactcttactatgacagaactatgcagaaacctgacaaagtcgaagacggattagaaatgtgtcataaatctatctctccccctttaattcaacagcccataacattttctcctgacgaaatagataaatataagatcctacagctacaagcccagcagcatatgcagaagcaactcctatcaaagcatcttcgagttttgcctgctgcagggcctactgccttctctccggcctcaaccgtacagacagttccagttcaccagcacacttctatcaccaccatccaccacacgttcctgcagcattttgctgtttctgcttccttaagttctcatagcagtcacctccctattgctcatctacatcctctttcacaggcacatttcagtcctatttcattttcgactctgactccaaccattatccctgcacaccccactttcttagcaggtcatcccctgcatttagtagctgctacccccttccacccatctcacataacacttcagcctctgccccctacagcatttattcctacattgtttggtcctcacttaaatccagccacaacttctatcatccacttgaatcctttaatccaaccagtattccaaggtcaagatttttgccatcattcttgctctagccagatgcaacagctaaatgaagtgaaagaggccttaaatgtgtccacacacttgaactaa

SEQ ID NO: 293648 - DNA, 1000 bp, Homo Sapiens
gctccaggtcctgagaggccgcctccgtccaggggatggactgctaaggagcagcagcagctatgtgaaaaggtttaatcgaaaaagggaagggcagattcaaggtgcagttcatacccaatgcatttgaaacaaccatcctggcatttctggaccgcaagagacttggacgtcggcaacaagacatgaaaggtctaccttcatgtaatgggtcctccttcagaagagagccctcagctactctgtgaatgacttgcatagctgcaactgtaatctcgaaggtgtcactttgttatttacaagatgcttcttaaatgggctgctcctgagctcagtgtcaaggtgattcaactgtagtgccagacaatgatttacacagctcagataattgacctgtccagttaacagatcattgcttcataagtttttaaattattttaatttaatattctttagtagaaatagtccacaaaaacattttcttgaatttaaatatacaacttttatatcatgtatcaaaccagattttatattcaaacgatcacattttaaattctgtacataacagtaagcgcactagtcaaaagacatttatgtttgaaatgtcatttagatcaaacacaagggtcaaagcccaggacaagtaaagttttatacttaaagagtactaaagggccagtgtgcagatgggtggattaaaaaaataaataaaataaaaaatagtactaaagggcttacttcaggcaaaagtgttcctgacgtaccaaaaagtaagatatagtttattttcatgcctccctgctcctagtaatgtatgttttgtgctgaactggcagctatcccaatgtgaaatgtattttggatgtatctggtgtcatttttctattaagaccaagtataatgtttgtttgtaaagcaataaatcttgacttgaaatcaaaaaaaaaaaaaaaaaaaaaaaaaaaaaaaaaaaaaaaaaaaaaaaaaaaaaaaaaaaaaa

SEQ ID NO: 293649 - DNA, 1000 bp, Homo Sapiens
ctgctaaggagcagcagcagctatgtgaaaaggtttaatcgaaaaagggaagggcagattcaaggtgcaattcatacccaatgcatttgaaacaaccatcctggcatttctggaccgcaagagacttggacgtcggcaacaagacatgaaaggtctaccttcatgtaatgggtcctccttcagaagagagccctcagctactctgtgaatgacttgcatagctgcaactgtaatctcgaaggtgtcactttgttatttacaagatgcttcttaaatgggctgctcctgagctcagtgtcaaggtgattcaactgtagtgccagacaatgatttacacagctcagataattgacctgtccagttaacagatcattgcttcataagtttttaaattattttaatttaatattctttagtagaaatagtccacaaaaacattttcttgaatttaaatatacaacttttatatcatgtatcaaaccagattttatattcaaacgatcacattttaaattctgtacataacagtaagcgcactagtcaaaagacatttatgtttgaaatgtcatttagatcaaacacaagggtcaaagcccaggacaagtattaaagttttatacttaaagagtactaaagggccagtgtgcagatgggtggattaaaaaaataaataaaataaaaaatagtactaaagggcttacttcaggcaaaagtgttcctgacgtaccaaaaagtaagatatagtttattttcatgcctccctgctcctagtaatgtatgttttgtgctgaactggcagctatcccaatgtgaaatgtattttggatgtatctggtgtcatttttctattaagaccaagtataatgtttgtttgtaaagcaataaatcttgacttgaaatcaaaaaaaaaaaaaaaaaaaaaaaaaaaaaaaaaaaaaaaaaaaaaaaaaaaaaaaaaaaaaaaaaaaaaaaaaaaaaaaaaaaaaaaaaaaaaaaaaaa

SEQ ID NO: 293650 - DNA, 1000 bp, Homo Sapiens
gccagcgtcctgcttatcacggccatgagtctagaccgctcactggcggtggcccgcccctttgtgtcccagaagctacgcaccaaggcgatggcccggcgggtgctggcaggcatctgggtgttgtcctttctgctggccacacccgtcctcgcgtaccgcacagtagtgccctggaaaacgaacatgagcctgtgcttcccgcggtaccccagcgaagggcaccgggccttccatctaatcttcgaggctgtcacgggcttcctgctgcccttcctggctgtggtggccagctactcggacatagggcgtcggctacaggcccggcgcttccgccgcagccgccgcaccggccgcctggtggtgctcatcatcctgaccttcgccgccttctggctgccctaccacgtggtgaacctggctgaggcgggccgcgcgctggccggccaggccgccgggttagggctcgtggggaagcggctgagcctggcccgcaacgtgctcatcgcactcgccttcctgagcagcagcgtgaaccccgtgctgtacgcgtgcgccggcggcggcctgctgcgctcggcgggcgtgggcttcgtcgccaagctgctggagggcacgggctccgaggcgtccagcacgcgccgcgggggcagcctgggccagaccgctaggagcggccccgccgctctggagcccggcccttccgagagcctcactgcctccagccctctcaagttaaacgaactgaactaggcctggtggaaggaggcgcactttcctcctggcagaatgctagctctgagccagttcagtacctggaggaggagcaggggcgtggagggcgtggagggcgtgggagcgtgggaggcgggagtggagtggaagaagagggagaggtggagcaaagtgagggccgagtgagagcgtgctccagcctggctcccacaggcagctttaaccattaaaactgaagtctgaaatttggtcaaaaaaaaaaaaa

SEQ ID NO: 293651 - DNA, 1000 bp, Homo Sapiens
atagagagtcatgcccaaacaagtacatgacaatggatgaagtccgagaatttgaacgagccactcaggaagccaccaacaagaaaatcggcattttcccacctgcaatttctatctccagcatccccctgctgccttcttccgtccgcagtgcgccttctagtgctccatccacccctctctccacagacgcacccgaatttctgtccgttcccaaagatcggccccggaaaaagtctgccccagaaactctcacacttccagaccctgagaaaaaagccaccctgaatttacccggcatgcactcttcagataagccatgtcggcccaaatctgagtaactttatataaatatctcatggggttttatattttcatttgttgttgttgtttttttttaagaatcttctgatagagaaaaagactgctttgtcactcaaacatgttccttcgacctttcagtgtgcatgtgactcagtaacttcacatagaatatgattccctaagtatgctacacagcatcatattagatgtaagatgtaagacttgcaaaggacagaaggaatcttctgtaaccacatagctgtatgccagagaggaagccttgttattgggcatttgatgaggtttggcatggacttcaaggataaatgaatgaaaactttgcaccacttttgttacaaggtacggtagaaaatagtgaagtcagtttcctctcatcaaatctaaaattctccaaaatactctcaggcataacatacttagctgttaaattttgaactgctaattactaatacttgaataccaatagttactgagattcctattttgtggttagtctgactcaggatttggagcctaattaactctaaacttttgaaaattttaatcatcaagctatagaggctccaagtgcaattaataataactcatttataccttccacagaatttaataaagattctacttgtttctgtcttttaaaaaaaaaaaaaaaaaa

SEQ ID NO: 293652 - DNA, 1000 bp, Homo Sapiens; identical to SEQ ID NO: 224511

SEQ ID NO: 293653 - DNA, 1000 bp, Homo Sapiens
ttctgtaattatgggattgtctactattttgggcaaagaaaataccattgaacatcttctacctcttttcttagctcagttaaaggatgagtgtcctgacgttcgtttgaatatcatctccaatttggattgtgtaaatgaagtgattggaatccgtcagctctctcagtctctccttcctgccatagtggagctggcagaagatgccaaatggagggtccgcctggccatcattgagtatatgccgctgctggcaggccagctgggtgtggaattctttgatgaaaagctgaattctttatgtatggcttggctcgtggaccatgtatacgccatccgagaagctgccaccaacaacctcatgaaactagttcagaagtttggtacagagtgggcccaaaatactattgttcccaaagtgttagtaatggcaaatgatcctaattacttgcatagaatgaccactttattctgcattaatgcactgtctgaggcctgtggtcaggaaataactactaagcaaatgctgcccatcgtattaaaaatggcaggagaccaagtagcaaatgttcgcttcaatgtggccaaatctctacaaaagattggaccaattctagataccaatgctttacagggagaagtgaagccagtactacagaagttaggtcaagatgaagacatggatgtcaaatactttgcacaggaagctataagtgtggtggcacaaaggctgaggaagctagaatttcctgtgaaggacagtggagaacccagtgtccctcgggctgacaagaaccacttcccaagacccacagtgcctggagaggacatggggaagggaccagtgtatcagttgcgtggagatactagagacacacttgcccagctgggaattgcagagctagtgcatttctcccaaagcacagactaataccccagatttaaaaaaagaacataaaaaataaagtaccacacatattgcacaaaaaaaaaaaaaaaa

SEQ ID NO: 293654 - DNA, 1000 bp, Homo Sapiens; identical to SEQ ID NO: 224512

SEQ ID NO: 293655 - DNA, 1000 bp, Homo Sapiens
ctacctccttgacctgatcaccctccctcctccaaggaagagctcaaagttcccagccaatagacagcatgaatcaaggaacttgcattatatgtgctcttgaatctgttgtctccatggaccattcctcggagtagtggtgagatggccttgggttgcccttggcttctcctccctctactcagccttaaaaagggcttcttggaactttaccagcagcctcagctttacaaatgccttggtatgtacctctggcaaatgccccaccttggtgatgttgcaacctttccttctgctagggtgtacacctagcctgtgcaggtgtcagccctgctagggagtcactgtacacacaaactctactggaattcctgccaacatctgtcaccctgcagctcctttacagttcaatccaatgatagaaaccatcccttccctttctcccttggctgttcacccagccattccctgaaggccttaccaacaggaatatccaagaagctgttgtcccctctcgaaccctgaccagatcatcagccactgaggccagtggaatttccccaggccttgttaaaacaaagaaagcattgtacctctcagattccccttgtggaaaaaaaaattctgctgtgaagatgaaaataaaaatggagagaaaacactggaaaactattttcccctcctatttacttcctttgctgactgccaacttagtgccaagaggaggtgtgatgacagctatggaggcccccagatctctctctcctggaggctttagcaggggcaaggaaatagtaggggaatctccagctctcttggcagggcctttatttaaagagcgcagagattcctatgtctccctagtgcccctaatgagactgccaagtgggggctgtagaaaagccttgccttccccagggattggcctggtctctgtattcactggatccataatgggttgctgttgttttggatgaaggtaaacgatgcttggaattgg

SEQ ID NO: 293656 - DNA, 1000 bp, Homo Sapiens
gcctgtatttatgaagacagggccattgcactgctgctatgctgaaatgaacttttataaagtattattgactatagccaactacagatggcatatgccttaaagatgcatttttctatgtatttaatattttgtgtacagtaaaagtcagaactcatttaaagaactttaagggatcctttagaaacatttttacttaatttcaaatgagtgggctgagcatgtagactagcagctttttatcaaacctggcattgtcaggttgaacttataaatacgaatagttactactctgatttgtaaatgtagctgctaaagtatgaggtatatttaagaagaatagattagtttcattatacctataagaacaagaattcaaaagtgaggtagtcatccaggttccccctcccacaatatttttgtatcataaaatttagatgacttttttgggttacatttttatccatatattttgaactaacagaacttggcagaatgtgtgttgaatattctttacatttaacaattaaaaacaactaaaactgaatagcaaatagtttattggtaagtacacggtttcaacgggagtaataaattcacatgaaaaggagacaataatcaagtcaaaagaataaatgcttactaatcatcagaaaatctgtggccattagggctggcacgtaaaaatccaaaatcactcagaggccaaatctgtaaaatcaaaatgaggttgaagacaattagtgaaagtaatgttatagtatcatcatattcccttttgctatctgtcccttttctctatgccagataaacactttctccttactcatcaatcaagaataaaattttctacatcaaagtaagacttgagaaaataaacttatgtgtatatatgtttaaactccaaagtttgggacattcaaacaatgtacatgaaattatatgtgtgtggtgtgtgaataaatatgtatgaatataaaaaaaaaaaaaaaaaaaaaaa

SEQ ID NO: 293657 - DNA, 1000 bp, Homo Sapiens; identical to SEQ ID NO: 224514

SEQ ID NO: 293658 - DNA, 1000 bp, Homo Sapiens
gcccccgccgcccccggcccgcgccttcggcccgggccccgccgagacccctgccgtggggccgggccctgggccgcgggccgcgctgagccgcagcgccagtgtgcggtgcgcgggccctggcgggggcggaggcgggggcgcgccgggcgcgctctggactgaggctcgcgagcaggccctatgcggccccggcctgcgcaaaaccaagtaccgcagcttccgccggcggctgctcaagttcatccccggactcaaccgctccctggaggaggaggagagccagctgtaggggcgggggcgggcagggaggtatttatttatttattcgcaacagccagcgctaaaagagggggaggccgagccaagaggaccccaggagcccagagcagcgggagagggtccttcctagcctcggcccgccgggtcggttcctggctggtgtctgctgagggagtggggggcccagccccttctcttctcccccgccaaaccacagtgggagctggggcagggggagagccaggcaatcgggggccaaagatgggggtgctcgcctacagtctgcatctgtagtgccttgtggggtatccaggaacaccctcccagcaggggatgggaaccctgtcccatgaagccctctcctcagctttacttgctcccccgcccttagccttggggagaaatggcccgtggtgggctgaccccccaccctccacacacacagttccatgacccagcgggcccccaggggcatcaggtgctggtcctcctccctcctggcctcgacccctaagggcttcgcccctcccaggggcctgtaactaagtcgggtcctgccaggcagggggcctgtgttctgtgccccttgggagacaggaactggcgagttcaggtggggtggggacagcacagactgttccaccgttgtgcatattgttgcttctgaaccacaaactgtataaatggatggttttttgacaaaaaaaaaaaaaaaaaa

SEQ ID NO: 293659 - DNA, 1000 bp, Homo Sapiens; identical to SEQ ID NO: 224516

SEQ ID NO: 293660 - DNA, 1000 bp, Homo Sapiens
atcttttagagaactttcagagcactgatttttgatagactaagtggaaaatttgcagagaaatgatggttgtaagtggacatgcaaaccaaaattggggattggagaagtcagactcactagacttttggttcgagtactattgaactctctcctgatgagaagatgtttagataagtacaagttaagaaagtagcatatgactggaaactatattcagtgcactttctccaaaagactacccagaaaaatagacttattttcaaataccagttatcaagatatattaaatagctgtattgtttagaatcttaatatggtataaattagcatatgtattcacaatattcattcagacatcattcccagacagcagggatttatttaaatgttagctgtctgagtttttaaatagctaatacgaccgggtacagtggttcatgcctgtaatcccagaacttcgggaggccgagacaggcagatcacgaggtcaacagattgagaccatcctggcaaacatggtgaaaccccatctctagtaaaaatacaaaaattagctgggcgtggcggtgcgcaactgtagtcccagctactcgggaggctgaggcaggagaatctcttgaacctggcaagtgtaggttgcagtgagctgagattgagcaactgtactccagcttggcgacagagcaagaccccctctcaaaaataaataaaataaagtaaaataaatataaataattgtggccgggtgcaatggctcatgcctgtaatcccagcactttgggaggctgagatgggaggatcacttgaagccaggagtttaaaaccagaatgatcaacagagtgagacccctgtctatatatttttttaatttaaaaaataaaagaataaaattgtgtagctcagtatagtatcaagattaatctgcctactcacatttctacactttataaaaatgtaataaaagaaaattatctttctaaaaaaaaaaaaaaaaaa

SEQ ID NO: 293661 - DNA, 1000 bp, Homo Sapiens; identical to SEQ ID NO: 224517

SEQ ID NO: 293662 - DNA, 1000 bp, Homo Sapiens
tgccctctcagtcttgttcagtgcagtcctcaggtgggcagcccccaggcaggcagtctcattatgggacaccgtacccacctgggcccagtgggcatgggcaacagtcttaccaccggccaatgagtgacttcaacctggggaatctggagcagttcagcatggagagcccatcagccagcctggtgctggatccccctggcttttctgaagggcctggatttttagggggtgaggggccaatgggtggcccccaggatccccacaccttcaaccaccagaacttgacccactgttcccgccatggctcagggcctaacatcatcctcacaggggactcctctccaggtttctctaaggagattgcagcagccctggccggagtgcctggctttgaggtgtcagcagctggattggagctagggcttgggctagaagatgagctgcgcatggagccactgggcctggaagggctaaacatgctgagtgacccctgtgccctgctgcctgatcctgctgtggaggagtcattccgcagtgaccggctccaatgagggcacctcatcaccatccctcttcttggccccatcccccaccaccattcctttcctcccttccccctggcaggtagagactctactctctgtccccagatcctctttctagcatgaatgaaggatgccaagaatgagaaaaagcaaggggtttgtccaggtggcccctgaattctgcgcaagggatgggcctgggggaactcaagggagggcctaaagcacttgtaactttgaaccgtctgtctggaggtcagagcctgttggaaagcaggggtagaggggagccctggaagcagggcttttccggatgcctaggggtgggcagtgccagcccctcctcaccactcttccccttgcagtggaggagagagccagagtggatactattttttattaaatatattattatatgttaataaaaaaatcatatcaaaaaaaaaaaaaaa

SEQ ID NO: 293663 - DNA, 1000 bp, Homo Sapiens; identical to SEQ ID NO: 118912

SEQ ID NO: 293664 - DNA, 1000 bp, Homo Sapiens; identical to SEQ ID NO: 224520

SEQ ID NO: 293665 - DNA, 1000 bp, Homo Sapiens
tgcctgtgctcagagctccagcagcagaagtgtgtgtggttaattaggacacttctgtgagaggacccctgcacacattacgacaggtccctaaatgagcattccccaaactaggttccccgaggcactctacggaaacaagatttttttttttgagacggagtctcggtctgtcacccaggctggagtgcagtggtgcaatcttggtgcaatcttggctcagtgcaatccgcctcccaggttcaagcgattctcccgcctcagtagctgggattacaggtgcccaccactgcgcccagctaaattttgtatttttagtagagatggggcttcaccatgttggccaggctggtctggaactcctgaccttcaggtgatccacctgcctctgcctcccaaggtgctgggattacaggcgtgagccaccgtgcccggcccaaactactttttaaaacagctacagggtaaaatcctgcagcacccactctggaaaatactgctcttaattttcctgaaggtggccccctgtttctagttggtccaggattagggatgtggggtatagggcatttaaatcctctcaagcgctctccaagcacccccggcctgggggtgagtttctcatcccgctactgctgctgggatcaggttgaatgaatggaactcttcctgtctggcctccaaagcagcctagaagctgaggggctgtgtttgaggggacctccaccctggggaagtccgaggggctggggaagggtttctgacgcccagcctggagcaggggggccctggccaccccctgttgctcacacattgtctggcagcctgtgtccacaatattcgtcagtcctcgacagggagcctgggctccgtcctgctttagggaggctctggcaggaggtcctctcccccatccctccatctggggctcccccaacctctgcacagctctccaggtgctgagatataatgcaccagcacaataaacctttattccggc

SEQ ID NO: 293666 - DNA, 1000 bp, Homo Sapiens
atgaagaaatcaagattcagaaaggttaagttactggcacaaggtcacacaatccagatctcatactcttagcccccggggaaccttcactgtattaaatgacatcaattgatcaatcaatcgatcaatcaatgaaagagtgggaggcatgcatctcctgatccccgatcctatacattttcatctctttattgtttctatcaaagcctgctaagtaattactttccctctgggtaagtgccactaggtgatgaggtgaggtaatcaaatgacatagaagaggaaggagtccactgccagggtaggtgcagtggagcaagtcttacaatgtgcaggattataactccagcaatgacccctaggctcatgctcattccccaggtggcagtttcagaacacattgctcaggtctcaccctgtaaatgtaggtaccagccttctagttgaccatcagaacacacaacgccaagatcttactccagccacctgccaggacctggagggcaggaggagagttctgcctacattgtctcattttccctccccttctgcagtgagatagaccatgtccagtgctcaggagttgactggccacactggggagtttgaccacaacattgggctccatatgcatggaatgaggttgcatgcaattgtccatgaggctgctccctcatttgtctgggtttctgctccaatgctatctcctcagaaagaccttctctgactgaagccagctctgcctccatcccatcactctggatctccttccccagcttcatctccattacactggccactctccctcacatcttattactgatctagttgtctactgtccatctccaccactgggatgtaaactccacaagggaggaatgctgtcagtttctttgactgctgtgtggtcagtaccagggcaatgcctcgcacagagtagccctctctccctaaatgtttttgaataaatgaaataaatgagcaaaaaaaaaaaaaaaaa

SEQ ID NO: 293667 - DNA, 1000 bp, Homo Sapiens
cttcaaaaggctatgtctgctcttcagtaatgacatgaaatctttgttcatctccactttgtgctaacccattcatagttggcagttaaacacatactccaaaagactgctactatctactattttaagaatgtaattgattgttcggtatttcctatcgacgtttatttacctctttagcacttatactttagcataaaaaatgttgagttatcaccacctttcaattccatggacctgatttttccagaaagatgttttcctctttcagatttttgtacaaggctaaaatgtctttcccatccataaccaagtcctcctatgggtacataaacccaaagtccccacttcttttaaagggatatgatcaagttataacatgtaccctgcttcccccaaccctgccttcttcactaaataagcatgtagctcagtggtttccaaatttggctgcacattcataccaatcaccaggggatttttttaaaatcctgatgcccaacttgcactccacattaattaacatgtctaggagtgggagcctgacagacaccactattaaaaaaaaaaaaaatccccaaaatgattccaatagacaacaaagttgaggaaccactggcacatcccaagctaagatacaaggttaaatggcctttttaagtatgtcatactggatctttaaataaagcaaggcttttgttacactttgtcatgttattaaaagcagacctttgggctgtttaaccgtgtaacaaaaatgccacgtgaaaaataaaaatttttattgtatagcaattctctataaatagtagataatctaagtccttattttctgatggctcttgttccactattaacattgtttttaatttttaaaatcctatcagcagcctcctaattagcagtgttaggaatttgccttatgttttccatctcatctcctgaacctgttattctgagaactcataaataaaattcagccaagattaatcaatcaatc

SEQ ID NO: 293668 - DNA, 886 bp, Homo Sapiens; identical to SEQ ID NO: 56780

SEQ ID NO: 293669 - DNA, 1000 bp, Homo Sapiens
cgtgctggtgctcatctttgcagtgtcgctgctgggcaacgtgtgcgccctggtgctggtggcgcgccgacgacgccgcggcgcgactgcctgcctggtactcaacctcttctgcgcggacctgctcttcatcagcgctatccctctggtgctggccgtgcgctggactgaggcctggctgctgggccccgttgcctgccacctgctcttctacgtgatgaccctgagcggcagcgtcaccatcctcacgctggccgcggtcagcctggagcgcatggtgtgcatcgtgcacctgcagcgcggcgtgcggggtcctgggcggcgggcgcgggcagtgctgctggcgctcatctggggctattcggcggtcgccgctctgcctctctgcgtcttcttccgagtcgtcccgcaacggctccccggcgccgaccaggaaatttcgatttgcacactgatttggcccaccattcctggagagatctcgtgggatgtctcttttgttactttgaacttcttggtgccaggactggtcattgtgatcagttactccaaaattttacagacctcggaacacctcctggatgcaagagctgtcgtgactcacagtgagatcacaaaggcatcaaggaagaggctcacggtaagcctggcctactcggagagccaccagatccgcgtgtcccagcaggacttccggctcttccgcaccctcttcctcctcatggtctccttcttcatcatgtggagccccatcatcatcaccatcctcctcatcctgatccagaacttcaagcaagacctggtcatctggccgtccctcttcttctgggtggtggccttcacatttgctaattcagccctaaaccccatcctctacaacatgacactgtgcaggaatgagtggaagaaaattttttgctgcttctggttcccagaaaagggagccattttaacagacacatctgtcaaaagaaatgacttgtcgattatttctggctaa

SEQ ID NO: 293670 - DNA, 1000 bp, Homo Sapiens
caacaaacatttcaaacgattagataacattttctcccaactcaaagatcccaacaatgaataggaggcatggaagtagatgtgccaatggggagggatgaggagtgaacatgaatattatttgaatagactttacctcttaattcttgcaacatgcattcttgattacctactgtgtgccaaacaagattttgtagaatattgcaaaaatgaccataaattcctcgtgataatgtgactttgcacctgctcctatgaaaagatgaagtctgtatctgtatcccttaaatttttttgcttgtttgtcggttttgttttgggttttgtttttttgagatgaagtctcgctctgttgcccaggctggagtgcaatggcacaatctcggctcactgcaacctccacctcctgggttcaagcgattcttctgcctcagcctcccaagtagctaggattacaagtgcctgccactatgcctggctaatttttgtttttcgtagagatggggttttaccatgttggccaggctggtctcaaactcctgacctcaggtgatccacttgcctcggcctcccaaagtgctgagattacaagtgtgagccaccacgcccagcctctcccctttaaatttgatcttggccttgtaacttgctttggccaatgggacattagtaaatgtgatgcagtcagaggtttggtaataacctatgcatcaggacttacatcacttgctgctctatggagttgagaccaccaagtaaagcatcctgggctagcctaccggaggatcagagaccatgtggaacataaatgaatcatcccagttgagccctgtccgcagatcaaccagcctaccaacttccagacacgagtaaagccatcctagactatatccaaccccagtcaggctgacacagaccataagaattgtacagataatccacagaactgtgataaataataaagatgtttgtaattttaataaaaaaaaaaaaaaaaaaa

SEQ ID NO: 293671 - DNA, 1000 bp, Homo Sapiens; identical to SEQ ID NO: 118914

SEQ ID NO: 293672 - DNA, 1000 bp, Homo Sapiens; identical to SEQ ID NO: 224524

SEQ ID NO: 293673 - DNA, 1000 bp, Homo Sapiens; identical to SEQ ID NO: 224525

SEQ ID NO: 293674 - DNA, 1000 bp, Homo Sapiens; identical to SEQ ID NO: 118915

SEQ ID NO: 293675 - DNA, 1000 bp, Homo Sapiens; identical to SEQ ID NO: 118916

SEQ ID NO: 293676 - DNA, 1000 bp, Homo Sapiens
atattataaaacacaagcaatgttatttatgaaactgtgatgcagtcttcaacatcaagaaaaaatgacaactataataaaatttacaacacagtttcacagtctaaatgctatgttcctttaagtattttcatatttttaatcatttattaagagaaaattgtgaaaagttaatttggccttatagagagattcaggatagatgtagcctatagatgtgtcattttaataagttgggatacgtgtttagtttttccttatattcctgttcagtgaacagattttcataattctcacttgttaaagtgctgcaaaaattgcattttcagtactctaaattactacattagaagagagcatttctccattgtctttattttctgttatatatgtgttgtaaaagtacactacattagaagggagcttttccgttgtctttattttctgttatacatgtgttgttaaagtacatgcattcttagactaactctcagatgctttgctcttttggagctgaagaattgtttgatggtgatgtcatatatctgatagattagtttcagtggttctcatttcacttttatacgtaatttcttaactatattaagatagttgcaggcagtgtacctcaggttgactctgtacatctgaatagtgagtcactagtattttgcttcaagccttctgaaaatataaccatagttacctaagcacacagtgaatagtcacatggtagtacttgtgattagagcatgtaaaacaatgtaattgaaaagtcagcttccatattttgtaggggaaatagaacaccctactttttatctagtgtgaaatatttaatcgaatttttgttgatttatattatgttacctgtgctgaattaggtttggtacttgtgttttgtttgacatattagtaagttgcttttgcttctttctgtcaacttattttttaaataaaattgatctggaaaaattaaaaaaaaaagaaaaaaaaaaaa

SEQ ID NO: 293677 - DNA, 1000 bp, Homo Sapiens; identical to SEQ ID NO: 224527

SEQ ID NO: 293678 - DNA, 1000 bp, Homo Sapiens
ccccaataccccatggaccatgctgtctggcacagcctgcacttgggggctcagcaaggccacctcttcctggccggtgtgggggccccgtctcaggtctgagttgttaccccaagcgccctggcccccacatggtgatgttgacatcactggcatggtggttgggacccagtggcagggcacagggcctggcccatgtatggccaggaagtagcacaggctgagtgcaggcccaccctgcttggcccagggggcttcctgaggggagacagagcaacccctggaccccagcctcaaatccaggaccctgccaggcacaggcagggcaggaccagcccacgctgactacagggccgccggcaataaaagcccaggagcccatttggagggcctgggcctggctccctcactctcaggaaatgctgacccatgggcaggagactgtggagactgctcctgagcccccagcttccagcaggagggacagtctcaccatttccccagggcacgtggttgagtggggggaacgcccacttccctgggttagactgccagctcttcctagctggagaggagccctgcctctccgcccctgagcccactgtgcgtggggctcccgcctccaacccctcgcccagtcccagcagccagccaaacacacagaaggggactgccacctccccttgccagctgctgagccgcagagaagtgacggttcctacacaggacaggggttccttctgggcattacatcgcatagaaatcaataatttgtggtgatttggatctgtgttttaatgagtttcacagtgtgattttgattattaattgtgcaagcttttcctaataaacgtggagaatcacaggctgggctgggcactgctctcaccttggttcctggggcatccatggggtctctcacagacaggacccctgcagttcccctggaagcagtgcccaggtggctgtggaataggaacgctaaaaaaaaaaaaaaaaa

SEQ ID NO: 293679 - DNA, 1000 bp, Homo Sapiens
acagattttgggagatcgaattgaatcctcagcatgtgtatctaagtgtggaaactttattgtggtgggctgttataatggattagtttatgttctgaaaagtaatagtggagaaaaatactggatgtttactactgaagatgctgtcaaaagctcggcaaccatggatccaaccacaggactcatttacattggatctcatgaccagcacgcatatgctttagatatttatagaaagaagtgtgtttggaagtcaaaatgtggaggaactgtcttttcctctccgtgtttgaacctgattccacatcatttgtattttgctacattgggaggacttttactggctgtaaatcctgctactgggaacgttatttggaaacattcctgtggaaaaccactcttctcttccccacaatgttgctcacagtatatttgtattggctgtgtagatgggaatttactctgctttactcactttggagaacaggtttggcagttctctaccagtggaccaatcttttcatccccgtgtacctcaccatcagagcaaaaaatattttttggttcccatgattgctttatctactgttgtaacatgaaaggtcacctgcagtggaaatttgaaactacttcaagggtctatgcaacaccgtttgctttccataactacaatggcagcaatgaaatgttgctggcagcagcatctactgatgggaaagtgtggatcttggaatctcagagtggacaattgcaaagtgtttatgaacttcctggagaagtcttctcttctcctgtggtcctggaatcaatgctcattattgggtgtagagataattatgtttattgtctggatttattgggtggcaatcaaaaataatcaaatacagtccttatttgtataacaaatgtgagatatttgaaaatattttaccattatacatcatgtggacttattttatattaaagaagattatattttggctaagaaaaaaaaaaaaaa

SEQ ID NO: 293680 - DNA, 1000 bp, Homo Sapiens
tgattaaagtaacagcttacaaaaatggatctagaacagtctttgccagagttactgcaccaaccatcaccttgctgctggaagagtgcacagaaaagctgaatctgaacatggccgcaagacgagtgttcttggcagacggcaaggaagccctcgaacctgaagatataccccatgaagccgatgtttatgtttcaacgggagagccctttttaaatccattcaaaaaaattaaagaccatctgttgttaattaagaaagtaacttggacaatgaatgggttgatgcttcctactgatatcaaaagacggaaaaccaagcctgttctttctattagaatgaagaaacttactgagaggacctcagtccgaattctgttctttaagaatggcatggggcaggatgggcatgagattacagtgggaaaagaaacaatgaaaaaggttttagatacttgtacaataagaatgaatctaaatttaccagccagatatttttatgatttgtatggcagaaaaattgaagatatttcaaaaggaaagcactgactctgagacgtgatacttcatggatgccagaggcattcggattcatgactcgtgcttcacgtatcccagaagtgtgctattatcacattttaatgcatgccttgccctctgtttttgcatccttataaaagcttatgccagctgagattagcctgtgcaaccactaacatgtggaagcattacaagttcactggacttaaaatatttaaagaagctaatcctgttggaggaacttccagtctgtagcaccctagtcacttaacattaggtttttgaacttcttttttctttgtttctatgatgttgtgcatcaaatgattgagatccctaaacttttgtgttggatggttttctgaacttcaacttgggaaaggtcaagttttatgtgaaagttatcttttaatttaaacaaataaatgctgatactcttttgattcgaaaaaaaaaaaaaa

SEQ ID NO: 293681 - DNA, 1000 bp, Homo Sapiens
gtgccctgggccaccaggagccccattggaaggagttccgctttgacctgacccagatcccggctggggaggcggtcacagctgcggagttccggatttacaaggtgcccagcatccacctgctcaacaggaccctccacgtcagcatgttccaggtggtccaggagcagtccaacagggagtctgacttgttctttttggatcttcagacgctccgagctggagacgagggctggctggtgctggatgtcacagcagccagtgactgctggttgctgaagcgtcacaaggacctgggactccgcctctatgtggagactgaggatgggcacagcgtggatcctggcctggccggcctgctgggtcaacgggccccacgctcccaacagcctttcgtggtcactttcttcagggccagtccgagtcccatccgcacccctcgggcagtgaggccactgaggaggaggcagccgaagaaaagcaacgagctgccgcaggccaaccgactcccagggatctttgatgacgtccacggctcccacggccggcaggtctgccgtcggcacgagctctacgtcagcttccaggaccttggctggctggactgggtcatcgccccccaaggctactcagcctattactgtgagggggagtgctccttcccgctggactcctgcatgaacgccaccaaccacgccatcctgcagtccctggtgcacctgatgaagccaaacgcagtccccaaggcgtgctgtgcacccaccaagctgagcgccacctctgtgctctactatgacagcagcaacaacgtcatcctgcgcaagcaccgcaacatggtggtcaaggcctgcggctgccactgagtcagcccgcccagccctactgcagccacccttctcatctggatcgggccctgcagaggcagaaaacccttaaatgctgtcacagctcaagcaggagtgtcaggggccctcactctcggtgcctacttcctgtcagg

SEQ ID NO: 293682 - DNA, 1000 bp, Homo Sapiens
gaaaaaggatgcccagttgatgctattgtcttggaagctccatttaccaacatgtgggttgcaagtatcaattatcccttgttaaagatttaccggaacattccaggatttttacgtacacttatggatgccctgagaaaagacaaaataatctttcctaatgatgaaaatgttaaattcctttcttctcctcttctcatcttacatggagaggatgacaggacagtgcctttggagtatgggaaaaagctctatgaaattgcacgcaatgcatacaggaacaaagagagggtcaagatggttatctttcctcctggcttccaacacaacctgctttgtaaaagccccacactgttaataaccgtgagagatttcctgagcaagcagtggtcatgagtctgggaggagtggaaatcttcaatgaagacttggcccaaacaccacctgtgatgtatattgttctaatgtaaaattgtactgggctggtcggatgagctgaggccattgacttctctacaaatcacttgccattttaacaacagaaagtacgaatgttaggcagtatggaatgttcttatttagcttatcataatctactttgtaaaacatgctgaaacctcactgtggagaaccagaatttggtaaaatctagatcctatctaaaaatatgtagttattaaacattctgtggatatttgtgaataaggtagttgctatggtccgaatatctgggcctgcccccccaaattatgctgaaacctaatcaccagtgtgatggtaataggaggtgggactgagctctgatgaatgagattagtgcccttataaattatgaccaaaagagctcttcactcctcctaccatttgaggatacagtgagaagccttcatctatgaaccacaaagtagccctcatcagacactgaatcagccagtgccttgctcttggacttcccagcccccagaactgtgagaaataaatttctgttgtttataagcta

SEQ ID NO: 293683 - DNA, 1000 bp, Homo Sapiens; identical to SEQ ID NO: 224529

SEQ ID NO: 293684 - DNA, 1000 bp, Homo Sapiens; identical to SEQ ID NO: 118918

SEQ ID NO: 293685 - DNA, 1000 bp, Homo Sapiens; identical to SEQ ID NO: 118918

SEQ ID NO: 293686 - DNA, 1000 bp, Homo Sapiens
cctttatatttaaatttgaaagttgtaagcactgatgttaatgtgattggtcagcatgggcatatgtaaaatgtccttttctggttgcctctctatgctattgtgttcagatacttacaccataattaaacagtaagttatagacttgctgagtttggcatagatagtgcactcatttaatctgtgcctctcaaaacttcagaatattagcatattaccacaaataatttttggtgaaactattgagatattaaaatttttgaaatcactactgttacctgttatagaaaatagtgttggcttagtctagtctctgtgtaactggttacattttgatggttgtctatactcaactggatatgtgtatgtaaattagaaaatacatacctatccagacataaatgctaagtaacatttttttcttcctccaactacataatttgtagctcatcatttttccttaatcctttcctaacttgttgcagcagtttgaatttcccagatatttatgtttgaacataatggctcagaatacatatttgaacatcatagttgtatatatttttaaagtagaataaataatggaaagcaacttgatatacaagtttatactaaaatttcaactgtgtgaagatacattttaaggcattactttgctaataatctacacattcttttttctattaaataaacaaatggtttgtggttcacagctttcatccaagcttggtgataatcaattttgaaaatacagtggactgaaaagcaaatttattctttcgaagatttcatttaaatctctgtactatgcatttttgtttcagtttgtaaatgtgtaacatttatagttaaataggacaaagcaggccctatgactattgttttcaaaaaattaatatataaataattcagaggggtttttcatttacttttgaaaagaaatttctttaacaggattgcacctatcaatttcttgtagaataaaaaaaaatctttcaac

SEQ ID NO: 293687 - DNA, 1000 bp, Homo Sapiens; identical to SEQ ID NO: 118919

SEQ ID NO: 293688 - DNA, 1000 bp, Homo Sapiens
cgctccatgggggagagatcagacattccttatcagagatgatgtgaccttttctgactctgcccagtctctatgaatgttatggcctagggaagaatcatgaaactctttagcttgattagatggtaaacagtgttaacccatcctttactacagaggcatatgggtttgaatgttacctggggttctctctattgagttgagccccttcttcctttagtgggttttggacatcttctggcaagtgtccagatgccagaaccttcttttcctctagaagggatggtgcttggtaaccttaccttttaaaagctgggtctgtgacctggtcttcccatccctgcattcctgtctggaaccagtgaatgcattagaaccttccataggaaaagaaaaggggctgagttccattctgggtttgctgtagtttggttgggattattgttggcattacagatgtaaaagattgactagcccataggccaaaggcctgttctagttgaccaagtttcaagtaggattaagaggttggttgaggggtgcagtttctggtgtaggccaggtaggtagaaagtgaggaacagggttgcctcttggctgggtggagtctctgaaatgttagaagaagcgctgaagccttgattgatagttctgccccttgttgccctggggcttatctgattatgggacgagggtagaaagtaagaagcacttttgaatttgtggggtagaacttcaacaataagtcagttctagtggctgtcgcctggggactagtgagaaagctactcttctccctcttccctctttctccccatggccccactgcagaattaaagaaggaagaagggaaggcggaggagtctataagaaggaatcatgatttctatttagcagattggatgggcaggtggagaatgcctgggggtagaaatgttagatcttgcaacatcagatccttggaataaagaagcctctctgtgcaaaaaaaaaaaaaaaa

SEQ ID NO: 293689 - DNA, 1000 bp, Homo Sapiens; identical to SEQ ID NO: 220446

SEQ ID NO: 293690 - DNA, 1000 bp, Homo Sapiens
cttcttaaatccctgttctagcaaactaatattggttcatgtgcttgtgtatatgtaaatcttaaattatgtgaactattaaatagaccctactgtactgtgctttggacatttgaattaatgtaaatatatgtaatctgtgacttgatattttgttttatttggctatttaaaaacataaatctaaaatgtcttatgttatcagattatgctattttgtataaagcaccactgatagcaaatctctctccaaaattcttatagtaaagttgatttttttaaagggggaggggaaggctttaatgtgttctagatcaatttataccttccgtatgacgttttactctgatatcattgtgcactttagccagatccagaaaacactcaaatttattttgcaacaagtgagagcccaggagacctccttattatcctgtctctgctttgaggcaatcaagtaccctctctgaacctaggttccctcatctgtaaaacaaaggtttcagaccagatggtgtttaaggtttctccccatactggaatgaatgatttcttggtggtattagcatcatcacagacctatacttgctttctgaaactctaccacatactgaaggaatacaggaatgggattaagatgactagcatagcagtgtacagcttgaagagatgttccacatcatcactccagctccttctcttttctcagggacaaatgaggcccagagagaatacgacctgtgtaaggtcaaacagtggcagggaaagaaggagagctggggtttagcattctccctggtgaagattggaggtccaaagaaatgactcctttttaagggatgggcataaaaaagtgatcaaaacattgcaaaggagaatcaaagattgattgtcctggggctaagaaagaagataatttttaaagaatgggagtgggcaacagtgaaaaatattgcagataagtagataaggatagaagatcaaccactgactggtagta

SEQ ID NO: 293691 - DNA, 1000 bp, Homo Sapiens
taccgacctcgggcagcagtcattgctgtcacccgctctgcccaggctgcccgccaggtccacttatgccgaggagtcttccccttgctttaccgtgaacctccagaagccatctgggcagatgatgtagatcgccgggtgcaatttggcattgaaagtggaaagctccgtggcttcctccgtgttggagacctggtgattgtggtgacaggctggcgacctggctccggctacaccaacatcatgcgggtgctaagcatatcctgagacgcccctccctcctctggcccagcctacccttgtaccccatcccttcctccccagtctacgttctccagcccacacccctccaaagccccacctttaagtcctctcttctctattcctgaccctccctacctgaggcctatctgagactataactgtcatctagccccttcgaggttgccccttccccatctccatttcacacaggtcctgaaagtctgtgtccaattatgcactggccacccaacagcaccaattgtacattccctgcatccaatctgctcagcaggccctaagatgccttgagtctttaatcccagtttggctggttaattccataaccccaggcatcccatcccttggggtgggggagaggggagacagggcaatcttgtccacagtctcccattctcatatgtagccctcatgataatctgggcatctcgtgccagggcaggctaccccttcatggtgactaacagttacatgaaagtccacgcttttgggaaaactgggtgggatggatgctggggagaagtgagggctgggcagctgattttgtcactgtcttcacaacctccgtgctgggcttgtagaccactgtcctggctgctctcatgcctgcctgataccctgcttggtcaaatccccggctgcttccttctgcacccagaaattccttcccactcatgttgttcccacacacaaaccaagagccaaaaatgagtgtgtc

SEQ ID NO: 293692 - DNA, 1000 bp, Homo Sapiens; identical to SEQ ID NO: 224532

SEQ ID NO: 293693 - DNA, 573 bp, Homo Sapiens; identical to SEQ ID NO: 224533

SEQ ID NO: 293694 - DNA, 1000 bp, Homo Sapiens; identical to SEQ ID NO: 118923

SEQ ID NO: 293695 - DNA, 1000 bp, Homo Sapiens
tgctgatctgagtctgcctgtggcatggacctgcatcttccctgaagcatctccagggctgaaaaatcactgaccatggcaccatggtctcatccatctgcacagctgcagccagtgggaggagacgccgtgagccctgccctcatggttctgctctgcctcgggaacctctccaaagccaccctctgggctgagccaggctctgtgatcagccgggggaactctgtgaccatccggtgtcaggggaccctggaggcccaggaataccgtctggttaaagagggaagcccagaaccctgggacacacagaacccactggagcccaagaacaaggccagattctccatcccatccatgacagagcaccatgcagggagataccgctgttactactacagccctgcaggctggtcagagcccagcgaccccctggagctggtggtgacaggattctacaacaaacccaccctctcagccctgcccagtcctgtggtgacctcaggagagaacgtgaccctccagtgtggctcacggctgagattcgacaggttcattctgactgaggaaggagaccacaagctctcctggaccttggactcacagctgacccccagtgggcagttccaggccctgttccctgtgggccctgtgacccccagccacaggtggatgctcagatgctatggctctcgcaggcatatcctgcaggtatggtcagaacccagtgacctcctggagattccggtctcaggtgaggaagccacagtcttctctagtacaattcagggaagccagacaggttgtggagagctttacaggcagggcagcccctgctaagaaagacaaaaaggggaaggagaacacagaaatcctagggacacaaattcagggtgaggaaaacaaagcaagggctgggcacagtggctcacacgtgtaatctcagcactttgggaggccgaggcaggtggatcacctgatgtcaggagttcaagaccagcct

SEQ ID NO: 293696 - DNA, 1000 bp, Homo Sapiens
tactgctgtaaatactatgtttacttcatgctgaatgtttgcaaagacttgatataagtattaatagtaatgaatcaatgaataaataatgagctagggtttgtgaggctttctacaaataggtcagctccacctggagtgcgaattgccagagacaccttggtagtgcccatcggcaaatcgcaatggcagcatgtgagtggaccattcagaaacttctgcttggtggaaagtaaacagagaggatggaggtttggggcgaatgtcctgaggcagagatggtctttattgtgtgtggtggtggttgtggtatttataataatgcaagcataccctcccttgagtctcaattgaagataaaagaatgtactgagcaagcaaagccaatggagagtatttcacaaaaatactttgtaaatgagatgccagtagtgttcaaagttgtatttttaaaagataaatattcctttttatacctcagttttgtgtcctgtttttaatgacttacgctctaagtaatccattagtagttatctcagttccttcctttgggttactagaatgttggaaaaagatgccaagtctgtcttgacaactggaaacagggttccacagcagcccattcgtgctgaaaactggcttccccctgaagcaccctgctgtggcaccagcaggaagctcaggttaattttacactagcttgctcactgatgcatctctcatcaatgctacggaaggctttgattcatcagtctcgggctcttggaatacctaattttaataatatctatgaaatcaagggaaactttccatttacagttatttcttgtttaaataaactaaattaatttttaggggagagcagtaggaaaaagagctaatgcatgcggggtttaatacctaggtgatgggttgaggtgcagcaaaaccaccatggcacacgttcacctatgtaacaaacctgcacatcctgcacatgtaccccggaacttacttaaaa

SEQ ID NO: 293697 - DNA, 1000 bp, Homo Sapiens; identical to SEQ ID NO: 118925

SEQ ID NO: 293698 - DNA, 1000 bp, Homo Sapiens; identical to SEQ ID NO: 224537

SEQ ID NO: 293699 - DNA, 1000 bp, Homo Sapiens
cagctggaattacaaggagacgtacgtgcacattatgcataaccagaaagaggctgtcatcctgtacgcgcagcccagcgagcgcagcatcatgcagagccagagtgtgatgctggacctggcctacggggaccgcgtctgggtgcggctcttcaagcgccagcgcgagaacgccatctacagcaacgacttcgacacctacatcaccttcagcggccacctcatcaaggccgaggacgactgagggcctctgggccaccctcccggctggagagctcagctgatacggcatcctgcgagaagacctgccctcctcactgggatccccttcctgcctcctcccagggctctgccagggccttgctcagtcccttccaccaaagtcatctgaacttccgtttccccagggcctccagctgccctcagacactgatgtctgtccccaggtgctctctgcccctcatgcccctctcaccggcccagtgccccgactctccaggctttatcaaggtgctaaggcccgggtgggcagctcctcgtctcagagccctcctccggcctggtgctgcctttacaaacacctgcaggagaagggccacggaagccccaggctttagagccctcagcaggtctggggagctagagcaaaggagggacctcaggccttccgtttcttcttccagggtggggtggcctggtgttcccctagccttccaaacccaggtggcctgcccttctccccagagggaggcggcctccgcccattggtgctcatgcagactctggggctgaggtgccccggggggtgatctctggtgctcacagccgaggagccgtggctccatggccagatgacggaaacagggtctgaccaagtgccaggaagacctgtgctataaaccaccctgcctgatcctgcccctgcctgaccccgccacgccctgccgtccagcatgattaaagaatgctgtctcctcttggcaaaaaaaaaaaaaaaaaa

SEQ ID NO: 293700 - DNA, 1000 bp, Homo Sapiens; identical to SEQ ID NO: 224538

SEQ ID NO: 293701 - DNA, 1000 bp, Homo Sapiens
cactttctgcctcatttcttctctggttattttggaaaggatcaagcactgatttttcaagaaaagagaaatgcaggaagctcagggggcagtagcacactttgcacacgataaagcaaagacgatggattgacaagcccttccgatcatggtagttgatttatttgctcaggtatcatgctgtctgtacagttccatacaacaaggaggtgaaatcagagataccagctcctcttttaaaacagccttccagtcattggcacgcattttctctttattaattgcaccaataatgctttgaattccttgggggtgcagtagaaagaatcggaatctgtgccgtattgataaggagatgatgttgaacacactgcataaatttgcctggttcagtatgtatagaagcatattcagtggtcttttcaagagtaaaccagaaatacttttgggcccaacacttgcagttgccttcctgatgtaaaaactaacatgctagataatccagtgtcgggaagacaaagatgttttgcttctctgaagaagcttataataatatacagtatatgtatatgtagggagcaattggtcaaaagtggctttttgtttccccaaggggaaagactggctttgtaattataattttttccttatttattttacttaaaactggtagagtctaagtattatatgaagtgcccatgattctgtcagtaaatttgaacatatttttattagttaatgtcagtttaagttgtccttttgtttgtttctatttttaaggtgaattttaatttctatctgaaatcagttaagataccttgagaaaaactgcagtgagaggagataaatatcctttttcaggaggaactgatatctctggctaaatatttgtccttttattatggtttctaaatcagttattttcttcagctttaatttcataaaattaaaaaactattttaaaaaaaaaaaaaaaaaaaaaaaaaaaaaaaaaaaaaaa

SEQ ID NO: 293702 - DNA, 1000 bp, Homo Sapiens
gagtccatactggagagaagccatacaaatgtggtgtctgtggtaagggcttcagtcagtcctctggtcttcaatcccatcagagagtccacacgggggaaaagccatacaaatgtgatgtgtgtggaaagggctttagatacagttcgcagtttatataccatcagagaggccacactggagaaaaaccttacaaatgtgaagagtgtgggaaaggctttggtaggagcttgaatcttcgccatcatcagagggtccacacgggagagaaaccccatatatgtgaggagtgtggtaaggccttcagtctcccctcaaatcttcgagtccacctgggtgttcacaccagggaaaaactctttaaatgtgaagagtgtggtaaaggcttcagtcagagtgcacgtcttgaagcccatcagagagtccacactggagaaaaaccatacaaatgtgacatatgtgataaggacttccgtcaccgttcacgtcttacatatcatcagaaagtccatactggtaaaaagctttagaaatgagaaatgtgttaccaacttttgtctgaatgcacatcttcaagtttttggctagtccatgctggtggtaaaccctgtaaaactactgagagtggaagggggtttgttcacacttggaatctttctaacaaatccatcaagatgataacacagaaccatgaacaggaatagaactcgtatttaggggagaaatagggctggtggctctcttggtaagatctagttaatataaatgatcacctttcattgtgaatatatgcctgaagataatgtgtggaaggatatttgccatatgctaactggttttttggccagggagagttttgggttattatcccttttctttaattttcattttatacttacagtgatcattattttcataaaagctgtaaagctatgaaaaatgaataaaattactaaaaattttctgtaaaaaaaaaaaaaaaagaaaaaaaaaaaaaaaa

SEQ ID NO: 293703 - DNA, 1000 bp, Homo Sapiens
ccgaagcctctattggacccacacaggcactgaacacatcgaggtgacgtgcctcaacagcacctcccacaagatcctggtgtcagaggacatggacgagccccgtgccattgcactgcatcccgagatgggcctcacgtactggatagactggggagagaaccctgaaatcaagcgtgccaacctggacaggcaggagctgcgcgtgctggtcaatgcttccctcgggtggcccaacggcctggccctggacctgcaggaagggaagctctactggggagatgccaagacagataagatcgaggcgatcagtgtcgatgagacgaagaggcagaccctcctgaaggacaagctcccacacattttcaggttcaccctgctgggggacttcatctactggaccgcctggcagcaccacagcatcaagcgggtacacaaggtcaaggccaaccgggacgtcatcattgaccagctgcccgacctgatggggctcaaagctgtgaacgtggacaaggtcgtcggaaccaaccctcatgcggacaggaatgggggtgcagccacctgtgcttcttcacgccccacacaacccggtttggctgccccatctagggcctggaactgctgagtgacatgaagacctgcatcatgcccaaggccttcttggtcttcaccagtagagccgccatccacaggatctccctcgagaccaacaacaacgatgtggccatcctgctctcggcgtcaaggaggcctcggccctggactttgatgtgtccagcaaccacatctactggacagacatcagcctgaaggtagcgtgggcccgaacatgcacacgtgcagcctatatgggaaaaccttccctctgtacctgcctcaaaggtttcagacatttttcttaaagcactataatatttattgtaacacaattcaagctaattaaatatgagcaagcctatttcaaaaaaaaaaaaaaaaaaaaacaaaaaaaaaaaaaaaa

SEQ ID NO: 293704 - DNA, 1000 bp, Homo Sapiens
atttttaacattccaaaaagaaacttggtacctattaaacaataactccccattcgctcctgtccttggcccatggcaaccgccattgtattttctgtccttctgaatttgactattttaggtagctcatataagtgggaacatgcagcatttgtccttttctgtctggcgtatttcacttagcatatgtctttaaggttcatccatattgtagcatttgtcagaattttccttcatttttaagactgaataatattccgttgtaagtatgtactacattttgttcatccattcatttgttgatcgacatttgggttgtttccccttttggctactgtaaatagtgcttctaggaagagaaaaccaaatttaaaggcatgtctccagtgctgagcatgatgattgaatagcaaatcatcatcacccataatttgaagacatgtgcagcccagaaatgcatagattaaatgattcaagtttagagaaaatgtgatgtatacaggaaaacttagtgggatcataatagcagtcttcttgcttaggaaaattatttggaacttagtaaccagttgttctctagattccagtaagaatcatggatcacacttcaaaacccacaggctcattgagagaaaacaacttagtattatgttaacgtacagaccccaaaaccttgattcttggatatcctaaaatatgatttgggatcccctccagagggcctcaaatgacaaattttgtctctaaatcttcctctcattagaaagatatacaccctttctattaatatactctaggtctcaagagtaggaatattgttattaaggatacttcccctcttgggactgtgtttcttagttagaggaagtgaagttataatgctataacatcagtacaaagtttgggtcgtcaggaggtggaggttgcggtgagccaggattgcaccaccacactccagcctgggtgacagagcgagactctgtctcaaaaaacaaaaaag

SEQ ID NO: 293705 - DNA, 1000 bp, Homo Sapiens; identical to SEQ ID NO: 220447

SEQ ID NO: 293706 - DNA, 1000 bp, Homo Sapiens
aacagtgtgatcttggctcaccgcaacctccgcctcctaggtccaggcaattctcctgcttctgcctcctgagtagctggaattacaggcatgtgccgccatgcctggctagttttttgtatttttagtagagatggggtttctccatgttggtcaggctggtctgaaactcccaacttcaggtgatccgcctgcctcagcctcccaaagtgctgggattacaggtgtgagccactgcgcccggccatgcctggctaatttttaaaattttatgtagagatagggtctcactatgttgaccaggctggtcttgaacttttgggctcaaatgatcctcccaccttggcctcccaaagcactgggattacaggcatctggtttcacttcctccaccttttaaggacccttgtgattatatcacaacctttatatttaagcaaaaaaatgcagaaaaggcttagttcctctttgttggttaaaacacaaatggattcattctttcaaacatccgcattctcctcttcttcctgggtgctctgccaggctgtggtttcccttggtttgggtggagcatgtgacagagccatggccagtggaatgggagcaaaaaccctaggtctcccttccaggcctggtccatgagacactccaggtattggcttgttctcctttccccatcagctgaagaagggagaggacttggaggatgcagggaagagaggggcacaagatggagggagcatgtcaggaccaagcctggagccctgagtgagctcgtggagcagaatctcccgacacccacactgacacacaaacaaaataaacaaaaactggccaaaacaaaaacaatagcccacacttctagggtaaagcattttaaatttattttctcaacaacccaagagaatcaacaggcagggatttcgtattcatttaatacaggcaaaacctgagattcagagaggtgaaataaaatcccaaacatataactgaactcctc

SEQ ID NO: 293707 - DNA, 1000 bp, Homo Sapiens
gcaaaagctaccctagggaagagccggtgacgtgcacaggccgagcagcacggctggtgagctgcaggctgcggccttgcccggacacttggtaatgccaaacaagtacgtgtggctactcattggtctatgaggacgatgacaggcttcgactctgtggtttctaaagcatataatattctcacgtacttctttcagcaaacgccaaacagtagtaattcttgtaactaccttgaaccctttgtggaaagaacctgggtgtgagtgaataaaaagtaaagagcgacgcgctatatcggccattaaatactcggggctgtccgtaacaccctgtgcttcccaattgtagcaccatgttctgtgtgaatatgcataaccagagtgaccccccccagcacccagcatgcccggctgtgcccctctgggtatgctcacatgcacatatatggacatacagtttcgtagcagaacgtggctgcccaggggctgcctatctgggcgagtagaccgcctggctcagcccacaggcctgcagcatcccatagcaccccgcccttgccccatcaccctgtgggctacatgcaggacacggcatgggcctgctccccagaggcacctgtttggggtcttcttgaggcttgtgctttcacagctctctttgaagcagatgtcttggtgaactcggtagactcttttatacctgttgtcacaagaaagctttgtaaaaccagacagtgaagcaaaatgttgccaactgcttaacctaggctatgtgaacccacagtaaacctgaaggtgtttgagggaaaaactgctattttctgaatgaaacgtgacctcctattgatgtattaaaatgtctaacataaaggtcatgtgatttgtaataaatttattgtggtacagtaatatgcataaaataaacccattttaatgtgcattctgatgagcactgacaaaggatatggtactaaaaataaaatgtgaaatgtcaaagaaa

SEQ ID NO: 293708 - DNA, 1000 bp, Homo Sapiens; identical to SEQ ID NO: 224540

SEQ ID NO: 293709 - DNA, 1000 bp, Homo Sapiens; identical to SEQ ID NO: 118927

SEQ ID NO: 293710 - DNA, 1000 bp, Homo Sapiens
accgggctttggtgcaccaggccttggagacccctggtcccacccctgccgtgaagccccaggcccacttcccaagaatctcacttctcagggcctctgttctcctctccactgggccaaatagcctggccctcccctccttggcattcatgggggagcccaggaaccccccacacctatggggttagagctcctcctttcttctcactccttccccttcctccctccatgcccactccccctgcctccagcaggccaggaagaaggcacagtccaggcaagtctgggagcttccaagcccttgaggtccagctgtggggcccaaatgacagccttacaagggttctaccagagaggaaaattccacatcccaccagaagacaggggtgttggcaggcatactcctatctcctcctcttggctctcaatgctgaggcttgcagaggcatcccagcggcaccagcctcccactgcacagcttccttccctccttcactctcctctcccctccctgccccttgcctcacctcctcttctagactgcattagattcattcatctcattttccaggacatgttggccagaggtctgggcccatcccaggcctcaaggccctccaggcctgtggggagcactggagggttactgactctctggccatgggaactcagagattctcatccccaaagtcccaaaagagggtgctgattggtgcttttcctcaggctcttcattggtttccaagggagcaaatcctcagtggggatacaagacatataaagtatatattattttttcataacttatgtggcttttaacttattgcttcccttcctgtttctgcatgatcagtctgtatgtactatctggaaagataacacatactccagccacctcacctgattggctatcttggggccatgtccccttcttgctgccacaggatgaataaagtgttgagatttgtctatggagaaaaaaaaaaaaaaaaaaaaaaaa

SEQ ID NO: 293711 - DNA, 1000 bp, Homo Sapiens
ggttctcccttctaagatgataatatgcccctgcacttgagaccttacttgaaacttaaagaaatgtgattggttatggtgctgggagaaaggggtgcacctgggaggacactgagaaagataaacaaaggggaaggaagagaggacaacctgtaacttttagaaaaggctactacttttaactgttggagaaaatgctattgcttgcactcacaatgtcaatatacattatcagaacttaagtcctggagatcagagactgtttcacctgaaattgctagcacctagaatgggccccggttgcggtaggcaatcaataatactctttgaataataatgaggttttcaaagattctgcaagtcagactggcctctggctttgtgatattattctagagtcccagtaacccacaattgttgatgaggagtagcagtagaatatcaaggacaggtgatgagacaacaagtctatcccgcaaagggcagggaatagagggtacactggaaagaatttgaaaacaataataaagctgactacaagttggtctattttttattaccaccatgagccagcaattctaaataatatcagtgataaagtattcatcccccaaaatattttattgaactaggttctaaacaatttctgaggttactgttgagttttaaataatacatatatgtaagcttcaaagtagcacatttgtactgtttttcttcaataatcattttactccacatggaaactaattcagggaatatcctgctatatagttggctctcagtacatatggtgtcagctcatgtgtctccagcccctgtagtactatatattattgcatttaaatgatggatttgaaataaacaatgattataccatgattgtaaagacaagaaacagaacctgaaatacttcaatttttgattctatgtggcagtttagagttttttaaaacaatttttatgtataatttatatgcaataaatgccctcaaagttc

SEQ ID NO: 293712 - DNA, 1000 bp, Homo Sapiens; identical to SEQ ID NO: 224542

SEQ ID NO: 293713 - DNA, 1000 bp, Homo Sapiens; identical to SEQ ID NO: 224543

SEQ ID NO: 293714 - DNA, 1000 bp, Homo Sapiens; identical to SEQ ID NO: 118928

SEQ ID NO: 293715 - DNA, 1000 bp, Homo Sapiens; identical to SEQ ID NO: 118929

SEQ ID NO: 293716 - DNA, 1000 bp, Homo Sapiens
ctgaagagcagagaggttaagtacccccctaccctgccccccaggggacacaacctgctggagtgcaatggcacgatctcggctcactgcaacctctgcctcccgggttcaagcgattctcctgcctcggcctcccgggtggctgagattacagatgcaaggtagagagtggaaggaatgaaggggtgggcgagggcatgaagaagcctccccagctctaatggccactgtctgaaagtgatgcagctcacttccacccacattcgccagatttcaatccatagcctcacttaactgtagggcaggctaggacatatcatctttccatgtgctgagaaaaaatagaaaagaccaagattggtgaaaaggagcaaactagtgacgagaaccttgccatagccatttttttgccactcacagaagccggtctgtaccaagcgagaagtggctataggagaagtggtcctgaggctcatctgccttctcctggtcaccctcccaatatatccctcctgtgctgagctagttttctattacttttcatcacctacatctaaaagagacctacctatctaacacagtctttgtcttactatcataatgctattaatgcaagctaaataataatctttcatcttctttttttctttatctttttcacttgaattgctttaaattcaaatcttcctgctatagtgtgaatgtttgtgttccccccaaatttatgtttaaactttaacctccaagctgatggtattaggaagtggggcttggggaggtgattaggtcatgagggtggaatatttgagaatgagattagtgcccttgtgaattaggcctgagagagatcccctcatctcaccatgtaaggacacagcagaaggtgctatctttgaaccaggaagtgagccctggccagacactgaacctgccgatacctcaatcttgtccttctcagtctccagaactgtgagaaataaatttctgttgtttataaacc

SEQ ID NO: 293717 - DNA, 1000 bp, Homo Sapiens
agaggagaagccctttacatgtacggtatgcaggaaatccttcagaaattcctcgtgcctgaataagcacattcatattcacactggaataaaaccttatgaatgtaaggactgtgggaaaacattcactgtttcttcgagcctaactgagcacatacgaactcacactggagagaaaccttatgaatgtaaagtatgcggaaaggccttcaccacatcctcacaccttatcgtgcacataagaacccacaccggtgagaaaccctacatatgtaaggagtgtgggaaagcctttgcttcctcctcacaccttatcgaacacagaaggactcatacaggagagaaaccttacatatgtaacgagtgtgggaaagccttccgtgcctcctctcacctgcataaacatggaagaattcacactgggcagaaaccctataaatgtaaggaatgtgggaaagcatacaataggttttatctactaaaagaacatttaaaaacttacactgaagagcaggtttttgtatgtaaggactgtggaaaatcttttaagaattcctcatgccttaaccatcacactcaaattcacactgatgagaaacctttctaatgtaaagaatgtggggaagctgtcagctacactcattcacgttgaagacatgaaagacctctcgttctccagatgtccatgacttgaggaatgtggctaggcaatcagcatctcatcacaacccggcaggcaggaactcaccctggagccctatgcagcagacacagagaaagccctcagtgttctctaaggtcttgctgaatatggatggtatccagtagagagaactctattgatgtgtgatatgcagcagcattgttgctgttctgctcagtactttgatgatcccttgtgatctcacaatgaagaaaaaccttaggagggtgagaattgttgggaagtcattttttacattacatctttcctcaccctttagtaaacgtggtgattgac

SEQ ID NO: 293718 - DNA, 1000 bp, Homo Sapiens
ggccaggcccctccgcccctaacacccgcgcctcctgcagacccgagggtcgccgctggtagggtcgctcagccctgccgtccttcaccaccacaccttcacctgcgcccagctccctgcgcgcctggacagcgcctgctgcccgcctcccgatggccctgccccagatgtgtgacgggagccacttggcctccaccctccgctattgcatgacagtcagcggcacagtggttctggtggccgggacgctctgcttcgcttggtggagcgaaggggatgcaaccgcccagcctggccagctggccccacccacggagtatccggtgcctgagggccccagccccctgctcaggtccgtcagcttcgtctgctgcggtgcaggtggcctgctgctgctcattggcctgctgtggtccgtcaaggccagcatcccagggccacctcgatgggacccctatcacctctccagagacctgtactacctcactgtggagtcctcagagaaggagagctgcaggacccccaaagtggttgacatccccacttacgaggaagccgtgagcttcccagtggccgaggggcccccaacaccacctgcataccctacggaggaagccctggagccaagtggatcgagggatgccctgctcagcacccagcccgcctggcctccacccagctatgagagcatcagccttgctcttgatgccgtttctgcagagacgacaccgagtgccacacgctcctgctcaggcctggttcagactgcacggggaggaagttaaaggctcctagcaggtcctgaatccagagacaaaaatgctgtgccttctccagagtcttatgcagtgcctgggacacagtaggcactcagcaaacgttcgttgttgaaggctgttctatttatctattgctgtataacaaaccaccccagaatttagtggcttaaaataaatcccattttattatgtctcaaaaaaaaaaaaaaaaaaaaaaaaaa

SEQ ID NO: 293719 - DNA, 1000 bp, Homo Sapiens; identical to SEQ ID NO: 118932

SEQ ID NO: 293720 - DNA, 1000 bp, Homo Sapiens; identical to SEQ ID NO: 224547

SEQ ID NO: 293721 - DNA, 1000 bp, Homo Sapiens
gcgggcgatggggcggcaggccctgctgcttctcgcgctgtgcgccacaggcgcccaggggctctacttccacatcggcgagaccgagaagcgctgtttcatcgaggaaatccccgacgagaccatggtcatcggcaactatcgtacccagatgtgggataagcagaaggaggtcttcctgccctcgacccctggcctgggcatgcacgtggaagtgaaggaccccgacggcaaggtggtgctgtcccggcagtacggctcggagggccgcttcacgttcacctcccacacgcccggtgaccatcaaatctgtctgcactccaattctaccaggatggctctcttcgctggtggcaaactgcgtgtgcatctcgacatccaggttggggagcatgccaacaactaccctgagattgctgcaaaagataagctgacggagctacagctccgcgcccgccagttgcttgatcaggtggaacagattcagaaggagcaggattaccaaaggtatcgtgaagagcgcttccgactgacgagcgagagcaccaaccagagggtcctatggtggtccattgctcagactgtcatcctcatcctcactggcatctggcagatgcgtcacctcaagagcttctttgaggccaagaagctggtgtagtgccctctttgtatgacccttcctttttacctcatttatttggtactttccccacacagtcctttatccgcctggatttttagggaaaaaaatgaaaaagaataagtcacattggttccatggccacaaaccattcagatcagccacttgctgaccctggttcttaaggacacatgacattagtccaatctttcaaaatcttgtcttagggcttgtgaggaatcagaactaacccaggactcagtcctgcttcttttgcctcgagtgattttcctctgtttttcactaaataagcaaatgaaaactctctccattaaaaaaaaaaaaaaaaaaaaaaaaaaa

SEQ ID NO: 293722 - DNA, 1000 bp, Homo Sapiens; identical to SEQ ID NO: 220448

SEQ ID NO: 293723 - DNA, 1000 bp, Homo Sapiens
gtggctgaggccagagactttcccaaggatttcttggtccagtttaagggcatgtgctacttcaccaacgggacagagcgcgtgcggggtgtggccagatacatctataaccgcgaggagtacgggcgcttcgacagcgacgttggggagttccaggcggtgaccgagctggggcggagcatcgaggactggaacaactataaggacttcttggagcaggagcgggccgcggtggacaaggtgtgcagacacaactacgaggcggagctacgcacgaccttgcagcggcaagtggagcccacagtgaccatctccccatccaggacagaggccctcaaccaccacaacctgctggtctgctcagtgacagatttctatccagcccagatcaaagtccagtggtttcggaatgaccaggaggagacagccggtgttgtgtccacctccctcattaggaatggtgactggaccttccagattctggtgatgctggaaataactccccagcgtggagacatctacacctgccaagtggagcaccccagcctccagagccccatcaccgtggagtggcgacctcgagggcctccacctgcaggactcctgcactgactcctgaggacttttgtctgggattggtcatcactcttctgtaatgcccacctgcccctgcccagaattcctagctgcctgtgtcatcctgtcccactgaggtcagagtcctacagtggctcatgcagccacaggtcaccttctgtgatccccatcccaaggcactggcggtgactctgcttcctgtactgacccagagcctctgcctgtgcactgcaagctgtgtctactcaggccccaaggggcatctctgtttccattctccccccacagacctgtcaagagaagcatgacaaacaaaatcatttacctaactttagtgctttttcccataattaaacctgattctgagttaaaaaaaaaaaaaaaaaaaaaaaaaaaaaaaaaa

SEQ ID NO: 293724 - DNA, 1000 bp, Homo Sapiens; identical to SEQ ID NO: 118933

SEQ ID NO: 293725 - DNA, 1000 bp, Homo Sapiens
tcaacgacttttattcccacatcgtactcgcagctggccggaacaggaccgtggaagtgtttgacctcaacgccggctgcagtgcagcggtgatagcggaagcccactcacggcctgtccatcaaatctgccaaaataaaggttcatcatttacaacccaacagcctcaggcttataaccttttcctgaccacggccattggcgatgggatgagactgtgggacctgagaaccctgaggtgtgagcgccactttgaagggcatccaacccgcggctatccatgtggaatcgctttcagtccttgtggacgattcgcggcttgtggggccgaggacagacacgcttacgtgtatgaaatgggctcaagcacgttttctcaccggctggctgggcacacagacactgtcactggagtggccttcaacccatcagcgccccaggtacagtcttgctctgtcgcccacgctggagtgcagtggcacgatctcggttcactgcaacctccgccttccaggttcaagcaattcttctgcctcagcctcccgagtagctgggattacagcttgccacagctaccttggatggtaaactccagctctttctagctgagtaaccactgacctgtgagctgggtccaggaatgctgtgaggaacaacttaaaagtaagaagtagtggttcatccatcagggggccagaagcagcaactgtttttcatattttgagacttgcctcagatttcccccgtttgcaagctcctcccctctgtgtgtgccatgtcagagttttatgtctttctgctcctcaaaagggatccccttcattgggaaaatggaaatggcgtccagtacttctgcacagaatttggtaaagttaaaacaaaatatctttcaataaaacataatatagtatttgtttgataattagagttggaagaaaaaagagagaatttcttttgggcagtgaaaataaagcagttaacagtcaaaaaaaaaaaaaaa

SEQ ID NO: 293726 - DNA, 1000 bp, Homo Sapiens
catcgaacgcatctgctgcctcctgaggaagctggtggtcccagaatactccatccacggcctcttctgtctgatgtttctgtgtgcagcagagtgggtgaccctgggcctcaacatccccctcctcttctaccacctctggaggtacttccaccgtcctgcagatggctctgaggtcatgtatgatgcggtctccatcatgaatgctgacattctcaactactgccagaaggagtcctggtgcaaacttgccttctacctgctctccttcttctattacctgtacagtatggtttatacgttggtgagtttctaagggggaagccggccagggagcgagcccagaacggaccggacgcctgtgcacccccagccctgccccttggccgcagaggcctcagccctggggagggagggggcactggtgcccccagcctctccaacccccaaactgctgctgcggggaaccccccccaccccgccttcagagccctcccccttggactagagcggctgggcagagctctaaacaggggcaggggctcctctgccagcctgtgggcatggcagtcattcctggaaggggcaggacctccggccttgtccatttcgggggaaacttgggccctgccaaggggcagagcttgaccctggaaattctgggccatccccctccacccccaccctgaggctccccctgcaggtgggggggtacccgcaccgggaatgagcaggctcagcaggggggcagccccacccctagtctgccctcccctctcccccaggctctttctccagccctgtctccatctgccccaacctcagcccaccttgtctcttggacctattttctatgtcgcctggaggagtccggcaccccctccccggccatttgtgacaaaatatgaataaactactgcaaatatgtgggaaaaaaaaaaaaaaaaaaaaaaaaaaaaaaaaaaaaaaaaaaaaaaaaaaaaaaaaaaaaaaaaaaaaa

SEQ ID NO: 293727 - DNA, 1000 bp, Homo Sapiens
gtaagagaaggaatgatgtgttctgtggctctggcagcggcagctacatccagcttctggggtcagccagggcaatcatgccagctacaacatccagcatctagcaaggttaatggggtaagctgccgtttctggcctcggcagcatgaccatgggctccttccaggcctggttttgtggtatgacacggcctgaacctctggcttcagagcctctccttgtgtccctgtattttatccagcctgcttctccagccttctaggccagtccttgagatcctggtttcctctcaaacaattccttttgagcccatctcagccagaaccagctctgttgctcacagctataaaccttgactgagacactcctgtgtggtttcaggagaaaatttaaactcttcagccaggcataagagaccctttatgatctgagcctcactcacctgttccctggcccactgcccaccccacagccctaagtgattagcaaagcaggcctttcacatttacaggcctctgccctcctggcatccccttctccacctggtaaatgctgcccaactcaagcagcaactcctaccataatctttccccttctcccttctctcccagcagaacggtgggctcccctctctggttccctgcagccttgctctgcataggctctgatgaatgcctggcaccctatatctgtgtgtgtgtgtgtgtgtgtgtgtgtgtctgtgtgtcttgggagggtcatagagctcctcaaagcagcagcatgtcacctcccccacgccccacgtctttgtgcctcctaccctagagcccagcatagcacttgtcccatagtgagccctcaacaaacacacagttaacaaaggatggcaatcaatgctccatcctgccagccctggacacaacacccaacagttgctcaagggccagtgtggcattcttacttaataaaacatgttggaaaatgaaaaaaaaaaaaaaaaaaaaaaaaaaaaaaaaaa

SEQ ID NO: 293728 - DNA, 1000 bp, Homo Sapiens
tttttttttttttttgggatggagtctttctctgtcacccaggctggagtgcagtggcgtgatctcggctcactgcaacctccgcctttccaccttccgggttcgggcaactctcctgcctcagcctcccaagtggctgggactataggcgcccgccaccacgcccggctaaatttttgtatttttagtagagacagggtttcaccgtgtcagccagggtggtcttgatctcctgactttgtgatccgcccgcgtcggcctctcaaggtgctgggattacaggcgtgagccaccgcgcccggctgccttcacctcttaaggagctctgagactccacttctgagagtccctgcggcctcccacctccctgcctttcaaagctctctcccccatgacccaggataaccctatgtctcctcccccagaatccttcagtggctctcatcaccttcaggaaaagcccaaactccttccaccctccaggttcctccctccccacgaggctttgttctcctggggttgcttcctggaccctgaacaagttgtgctctcattggccgggcctggccagcagtgcacagtgcctggcaggttgactctaccatccccggggctggccccgctctcctccgagacccaggctgagcccagtcccctcacccttccttgacttacctccccacctgaggctgactttggggttcccagacaccctacccacacacatgccttgatcatagcacttgcctgcgcttcttcagagtcattaatttgcttctcggcttccccactggactgtgagctgcctgaggtcagggattgcgctttggatggtttccagcctgagcctggtgcttgaacagacgtgtgcaataaatgctcgttaaatgatgaaaaaaaaaaaaaaaaaaaaaaaaaaaaaaaaaaaaaaaaaaaaaaaaaaaaaaaaaaaaaaaaaaaaaaaaaaaaaaaaaaaaaaaaaaaaaaaaaaaaaaaaaaa

SEQ ID NO: 293729 - DNA, 1000 bp, Homo Sapiens; identical to SEQ ID NO: 224550

SEQ ID NO: 293730 - DNA, 1000 bp, Homo Sapiens
cacaggaaaatgatgctcccgcctcagattcaaacacagttttatctcacactgcaagctccctggcatgggcaaagtcctcgatgcctttcctggtggtttccaacattaaggacatacttgttcctcctcctagctctctccctcagccaagtccttccttacaatgaattgtcctgcagaactccctcttaagcttggcttctgggacagaaaacctactttctgaaagggtatggggactgtcagagcatgaactggactcaagctcccaattacagagcagacacaaggctctgcctgcaccaggccatccctggatttctgcagctccaggactctcttccagcatctagatgcagctactctcattccagctttgtgtcctgtttgatgcaaaatctttattccttcctgtttcaatccctgttgcatattctgtgtgacaaagcaagaagctggaaatcgagttctgagctttatacccagctctgccacaaatgtgccatgaccttgaataagtcacatgacttatctggacctggattctctcatctgtaaaagaggaagctgagctatactacttttaaaatgtctccagctttaattttattagaatatcagctgcttcctcctctggtttctcatggcaggttgtgcattcttctctggagacaccaaatttcattggagtatctctccttacaagtgtatttccccactagattggcccctcaagaacaaggattgtattttagttacctctgttatctctgtacctggggaggagtgagaaaaggagagcaggaaagggaatggtatagtaccaacatttgttgagcttctattatgaggaattgtctatgctacacattgtacgtaaagtatgtatgattcacagtataaacattataatctggaatcaacctaaatgttcattagcagatgaatggataaagaaaatgtggtatatagacgcaacacaatactatacagccat

SEQ ID NO: 293731 - DNA, 1000 bp, Homo Sapiens; identical to SEQ ID NO: 118934

SEQ ID NO: 293732 - DNA, 1000 bp, Homo Sapiens
aaaagatatagaatggcagaatgggtaagaattcaccaaccaagttgctgctgtcttcaggagactcacctaacacatacggactcacataaacttaaggcaaagggttggaaaaagacacttcgtctaaatggacacatcaaaagcgagcaggagtagctgttcttatatcagacaaaacggactttaagacaacagcagttttaaaaagacaaagagggacattatataatgataaaaggactagttcaacaggaaaatatcacagtcctaaatatatatgcacctaatactggagatcccaaatttataaaacaattactactagacataagaaatgaggtagttggcaacacaataatagtgggggatgttaatactccgctggcagcactaggcagatcaccaagacagaaagtcaacaaagaaacaatggacttaaactataccctagaacaaatggacttaacagatacttacagaacattctacccaacaagcatagaatatacattgtatacatcagaacacgggacattctccaaaatagaccatatgatagggcacaaaacaagtctcagtaaatttaagaaaatcagaattatatcaagtactctctcagaccacagtggaataaaattggaaattaattccgaaaggaacactcaaaagcatgcaaatacatggtaattaaataacctactcctgaatgattgttgggtcaacaatgatatcaagagggaaatttaaaaattctttgaactgaacgataatagtgacacagcctatcaaaaactctgggatacagcaaaagtggaggtaagaagaaaattcatagcattaaatgcctatatcaaaaagtctgaaagagcacaaataaacaatctaaggtcacacctcacagaattggagaaactagaacagtccaaatccaaacccagcagaagaaaagaaataacaaaatcagaacaaaactaaatgaaaaaaaaaaaaaaaaaaa

SEQ ID NO: 293733 - DNA, 1000 bp, Homo Sapiens
atcccaatgccttctattatactgaagctaaaagaaccacacaccatgtccagaagtcaaaagtttctcatctggctttctgatctcttactaatgaggaaagctttgtttgaccacctaactgctcgaggcattcaagtgtatatttgggtattaaatgaagaacaagaatacaaaagagcttttgatttgggagcaactggggtgatgacagactatccaacaaagcttagggattttttacataacttttcagcatagaaaaagaggtacttagaagtattgaaggaaaaaatgaagacctaagaaaaaaatatttcatgatcatttccctaagccatttccagaatggtaaaaggtttaatcagtttttattacctcatttttaagcctgtatgagaatgtagaaactatatattatatgtatatttattttaaataatattgtatattttatgtttgtaaattgtttagaaagataattggttatgagatgtaagttttaatttcttaatgtgcatttttgtttctagatcttatacagaaatcttgattaataacatacacagaaatgtacatactgcatcgtctgcagagatcttgatcaataacctagaaactaggttatctgggttattgatcaagatttctgtagatgatgcagtgttctatcataagtaattctggaatcaaagactattggatacatttggcattgggctgagtgtggtggctcatgcctgtaatcccagcactttgggaggctgagacgggcggatcatctgaagtcaggagttgaagaccagcctggccaacatggcaaaaccccatctctaccaaaaatacaaaaattaaccatgcgtggtggtacacgtctgtcatcccagcagctcttaaggctgaggcacaagaattgcttgaacccgggaggcagaggctgtagttagccaagatagcaccactgcactccagcctgggagacagggtgagactccgtctc

SEQ ID NO: 293734 - DNA, 1000 bp, Homo Sapiens; identical to SEQ ID NO: 224552

SEQ ID NO: 293735 - DNA, 1000 bp, Homo Sapiens
ctcaaaagttaagtggtgttcattaggcaggcaggggagaggaggatatcccaggcagaagggaagtaagaagtaagacaaaggtgcagaggtgtgaaagtgtacagggactttggagaagagcaaggtgttgaggagggcaggcgtttagggaaagagaaggtgggcaggagcaaaccacaggaaggcttcataatccctgctggagagctggaactttgtcttgcaggcaacagggagcctccaaagggcttgggctggggagtgacagagctttgttatttagaaagatgactcagtggcagtaaggcgtcagcaagactgaaggcaggagtactagttaggagatccccacaggctttacactagagacagtaagggcctgcaggggtcagagctgcgaagctgagagatatgagaaaatgttacaaatacaggaagtgcaggactgtgccactagttatacaatgtggatctgtgaagacgagctccaagtttctggcttatgagtttccaggtggttatcactggaaatacagaaagaggtgggggtaaacaatgagctcagttttacatgcatcgagcttgaagtgcccatggaacttgtaccatgtggcaagtgccagcaggaacgtggatattgtgatatggagcttggagagataagctactgactcaaatcgtgagccaatataaaatgtgacatgaggccggacacggtggctcatgcctgtaatcccagcactttgggaggccgatgcgggctgatcacttgagcgattcgagagtcgagaggctggtcgggagttcgagaccagcctgaccaacatggagaaaccctatctctactaaaaacacaaaaaattagccgggtgtggtggcgcatgcctgtaatcccagcatttggatcctccacttgaacccgagaggcggaggttgcagtgagccgagatcacaccattgcactccagcctgggcaacaagagcaaaactccgtccc

SEQ ID NO: 293736 - DNA, 1000 bp, Homo Sapiens
ggaggcagacggcaagacctccttccatgaaaggaggctgggaccaggggaccaggtagtgcaacgcggtgagggggctgtcagggcgactgaccggaggagtcagaggcaggaggcaccaccaggttacagacaaggaccttctacaagagggaaacgtgtcatgggctctggagcccctgtccaggttcaaattgtgaccctgtgccagggacagcttctttgtgcctcagtttttcccataaaatgaggataataatacttcattcatgcctttttttcccctcaacaaacatttgttgtatgtctgctgtgggcccaggacaggaggctgagaaggagctgaccacagtggtcacacagccaagccctgctgctgagatctgaccccagttcgcctgtcgcaagttctatttgtgcctcgttgtctgcctcctggggctgttatgagggctgaagaaggggcaggcacagaggagacacttactatatgatcattgtcctcctagagtatcatcaccatcaggtggacttcagtggccatcccaggcctccacggatcaaccacaagatcttggagaatgtccttaccctccaagcctcagtttacctttagggtgaccaaccatcctggtttgtccaaaactgagggttttcctggcacagtcccaggcaaactgggatggtgagtcactgatatagtttgactctgtgtccccaccaaatctcaccttgaattttaataatccctaggtgtcaagagcaggaccaagtagagataattgaataatggtggcagtttcccccatgctgttctcatgatagtgagtgagttctcacgagatctgatggttttataagcagcttccccctttgctcagtatcactctccctcctgccgccctgtgaagagctgccttccaccatgattgtaagtttcctgaggcctccccagccacgcagaactgtgagtcaattaaacctcttttctttataaatt

SEQ ID NO: 293737 - DNA, 1000 bp, Homo Sapiens; identical to SEQ ID NO: 224553

SEQ ID NO: 293738 - DNA, 1000 bp, Homo Sapiens; identical to SEQ ID NO: 224554

SEQ ID NO: 293739 - DNA, 1000 bp, Homo Sapiens
tcaataacatgatcgtaaagcgactcaaccaactcaaccaactggactctgaacaaaactaaaggactgattttctgaaagcacctgctaacaccttgagctttttactttcctgggagtgtacagggttaggaactgagaaagtgcacttcctcaggcaacagatgatctggtcaggcaacccacccctggggcccactttctgcagcaagatgggagcaattccaaggcaagtgggtatgggaatagcaactaaaaaggggtgaacttgtctcagcccccttttatggtagggcacttcaactttaatggggtgggcggctagcagggaggagaatcaacaaagcaagagaacttgactatgtacgtccaacttcttacagaaggagctttgctaccagaacaagttcactgtgtcaatgaagttcatgacacctcatgcacctttacagatatctgggaaagcctgagaaattcattgagttttatgtattgaagggaaccaggtgattactcttttcaataagagggattctgctcaggtgattagactttgactctatttccccagggacagtgatgggtgggccccagagctagttgctgtctggtgtttgctggtgaaaacatgagcagtagttatgtggggctgagagtcaaaagggaaagcctaattaattcaactaatgtttattaagctcctactctgtgcaaatcactctactcaagaggagctcacataagagtgcaggataaagaaaggagatggacagttatatgtaattatataaactttgtgtattttgtttctcatgaaaaaacccctttggcaccctgctgattgatttggaagaaatctgatagatttgtggcctttcctaaattgcactaggaaattatgtagttagaatatttggaacctgcattagttccagcaatgaaagtaagacacacagcatatgacataagacacagtgtgaaataaatgagtttaaaaagc

SEQ ID NO: 293740 - DNA, 1000 bp, Homo Sapiens; identical to SEQ ID NO: 118935

SEQ ID NO: 293741 - DNA, 1000 bp, Homo Sapiens
gccagctggagtatgaacgactacgtagagaaaaattagaatgtcagcttgatgaatatcgagcagaagttgatcaactcagggaaacactggaaaaaattcaagtcccaaactttgtggctatggttggtgtcctttttaatacatttatttttctcaagaagtatatacaagagtggccaagagtacaagctttgggctggggctctttggacttgaatcctggctatagtctttttttgatttgggctactcatttaacctttttgtgcctcaactataaactggagatgataacttatactttctagagctgatgacaggattaaaggaatacacacacacacacacacacacacacacactctatatgtaactataactttctagatacatacacacatctgtctatctatcttcaaacagcagcctagttcataagtattattgttaacattgtaccatagaaggagaaaatgttttcataagtaatcaatcagaattctaagacagctagaggatatgtatattttaatattctaaataaccaaaataaagtgctttgaatggaatccatattttctttccatagggaagtttcttcatcaatcatcatggatgaattaattctgtttgaggcttgtgtcacctcaaatctgatctattaatattatagaatcttcctggcttctttttattttgcacaaactagtcattggtctctttaataaccactttaaaaatattaaaataataaaacatgtttgttgtatagtgttaaaaacaagatagatgttccttctgacactaagttccactctccagaggaagctattgttaacaatttagtacataccatattagacaaaattctatttatctgcaaacatgtatgtgtatttctatgcatatgcaaatataaccacttcctcagtttctctgggttttggtgtctcaccagtggttgattttccaagaaatataattaactataataatt

SEQ ID NO: 293742 - DNA, 1000 bp, Homo Sapiens
gcctccctgccccgaacccataggtgccaggcttctcactgctcacgacctccgtgccgggctcatacctgccgcgccagcccctcttcagcagagcacaagtctggcagcaggagggcaccagccaggggccccgcgcccccgcctctgtacagcagggtcaccgtggggtgacatgagaacaccgacccagggaatgggctcctgccacacctgcctgggaacctgggctgtgagtcctgcccgctgcaccctctagcctgacgttgaagtaacctcgccagcggggccctctgtggcactgggcactcagggagagcacgtggcattggagaaggtcccacccccaaatgcaaagctgggaaaaccaggctgagccggggatcaggccacctccgcagggacccactgctgcctcttccaggagcccaggagacccagtgggtctcctgcccccgactccaactccctcctggcaggacacacccagctcacagtggcctttccatcctgggaaagggagtgagaggaggctcaggccagggacccgcccagctctggccggcaaccgcccttcagcctttgttcctgaaccactgtgtgggccccaacccatccgctgcctgccggagggagcccatggggaatggactattcttgccacccctatccatggcaggggaggggctcagcatggctcttgcccacccagaagaaggtgcagggggcctggcgtggtggttcacacctttgggaggccgaggtgggtggatcacctcaggtcaggagtttgagaccagcctggccaacatggtgaaaccctgtttctactgaaaatacaaaaattagccaggcgtggtgatgggcacctgtaatctcagctactcaggaggctgaggcaggagaatcactttcacttaaacccaggaggcggaggttgcagtgagttgagatcgcgccactgcactccagcctgggcaacagaacaagactccgtctc

SEQ ID NO: 293743 - DNA, 1000 bp, Homo Sapiens
atatgcatgagaattcaactatttagtgggtgtagtacaacaaagtgatattaaattactggatctagtaacatgaaacacacaacgtaagttatttagaatcactttaatcaaccaataatccttagccaatttataagggacttttatttgtaaagtaatggatctggcttgaaaaatacggtagagatacttagctctttaaatcacgaatgttgaagtaccagtgagactcaatacatatttttgaagatagtccatgggatttttagaatgtcgttgtcaagggtctccttttaactgagaaactttttgaactcacaaagtgttcaagaaacccttgtataattccctacatttctctcgagctcacaaatacttttttttctttttccttattcaatcagattttccaaagtacctttccaccataagaaatgaattttctacttctacacccatttgagagacaccaataaaagaaagtcatatgtaggaaacaaagtctgatagtaaaacaagccagagatcttctaactttttttagttataaaacctctaattttttggtgacttttctacacacacacacacatacagtcacatagatattcttatcctacagatataatcagaaaaatcccgattaatgaattatatatagatagatagagtgattagttaatcaaaactatatatttgttaaaaatttgggagaaggtgatggtaatttcattagtcccaaaacaccggcataagaaatttgacatttcacagatgcacttacatattttgaccacaagggggaaattttgtgcattattattgtagggttaaatgcctgaaaaaaataagcatttactaataccttgaaaaaccaaagaacattatgttcctctgtagcaagaaaaattttatgccctcgcattgctacagccaaatagcttataaggcttatggcaatgtcccaactattgcaatcataaaaccctagttttag

SEQ ID NO: 293744 - DNA, 1000 bp, Homo Sapiens
aaagtatgaaatctgttgctgttaaatcttcatggcatgcttttcatttatcatgattgtctcaaggaatggatgtaagatggaagggactacttccttaggtgtggcttctttatattactgaaacctggaaaaagcaagaacactaattttttctttttttggagacagagtcttgctctgtcacccaggctggagtgcagtggcaccatctcagctcactgcaacctctgtctcccgggttcaagcaattctcctgcctcagcctcacgagtagctgggattacaggcatgcgccatcatgcctggctagttttttgtttttttgtttttatatttttagtagagacagagtttcgccatgttggccaggctgatcttgaactcctgacctcaggtgatccacctgccttggcctcccaaagtgctgggattacaggcatgagccaccgtgcccagccaagaacactaatatacaatatactataagagcatgggggtttgtgccagaagagaggtaaaactattgtctaacatatatgctttatgtggtcaggaccccttagaattgttgatgtgactggggacctttgtcgattataggagagattggttacagtacaagatgaccatgaaacaagaagagtagggtgggacattgagagattttcatggaagtgaaatggtcggttactagagactgcatatgtggtagaaagaaatggagggggaatgatagtcaccctctcttgaaaggtagttactgttgcatatcacagattattgaacatagataggtcttatttttggaaactgaagagagaatggttaccatagaggacagttccatcaaaagaaccagagtagtgttcttataggggattcacatttggcccctgagattgcatttgataccattttatttagaatatattatacttcttatgtcttaattagtaaaatataatcatttttagtaacccgaaaaaaaaaaaaaaaa

SEQ ID NO: 293745 - DNA, 1000 bp, Homo Sapiens
cttctgcaaccacagcaccagctttgccatcctgctgcaaatctatgaagtacagagaggccctgaggaggagtcgctgctgaggactctgtcatttgtgggctgtggcgtgtccttctgcgccctcaccaccaccttcttgctcttcctggtggccggggtccccaagtcagagcgaaccacagtccacaagaacctcaccttctccctggcctctgccgagggcttcctcatgaccagcgagtgggccaaggccaatgaggtggcatgtgtggctgtcacagtcgcaatgcacttcctctttctggtggcattctcctggatgctggtggaggggctgctgctgtggaggaaggtggtagctgtgagcatgcacccgggcccaggcatgcggctctaccacgccacaggctggggcgtgcctgtgggcatcgtggcggtcaccctggccatgctcccccatgactacgtggcccccggacattgctggctcaatgtgcacacaaatgccatctgggccttcgtggggcctgtgctcttcgtgctgactgccaacacctgcatcctggcccgtgtggtaatgatcaccgtgtccagtgcccgccgccgtgcccgcatgttgagcccacagccctgcctgcagcagcagatctggacccagatatgggccacggtgaagcccgtgctggtcctgctgcccgtcctaggcctgacctggctggcaggcatcctggtgcacctgagccccgcctgggcctacgctgccgtgggcctcaactccatccaggggctgtacatcttcctggtttatgctgcctgcaatgaggaggtgcggagcgccctgcagaggatggctgagaagaaggtggccgaggtgctcagggcactgggggtgtgggggggcgctgccaaggagcacagcctgcctttctctgtcctccccctctttctgccccctaagcccagcaccccccgtcaccctctgaaggccccggcctga

SEQ ID NO: 293746 - DNA, 1000 bp, Homo Sapiens; identical to SEQ ID NO: 118936

SEQ ID NO: 293747 - DNA, 1000 bp, Homo Sapiens
ggcccacgacccaagtcccactgggactatctgctggaggagatgcagtggatggccacagactttgcccaggagaggtggaaggtggcctctgtgaagaagatggtcagagctgtggcccggcagctgcaggacaggacgcgcagggaggccggggccaggagggaggagccgagcaggctgaggcagacgtcacctgtactaccagagaaatcgagcgtccctggtctagtactgcgcaggtaaagattccagcatcttggaagcaagtgctccactggaaaataaaagccacgtggagcacttgattagactccagaaacagaaactgcagctgctcccaccacccccaccaccacaggccctgcccggggcacagccaaccacacaagtgcaagtgcagccgtcacccgcctaccacagcagagcccccagctcaccacagtcacggccccgagacccagagccctgttgatgggcaccaccatggccaacctccaggtagcccggcttactcgagtttccacctcccacctgcaaggcccaagactgacgtcagcgctgacgtaccagatggcccaggttgctgtggccacgccccctgtggtgtctgtcctggcagttgtggtgctgtcagccagggtcacagtgcttccatcaacgcaacgggatcagtgttgtgataaggcagctgcaaaaagcggcaggtaggcagccaccttcgcctcaccaaactcgaaacaactcacttgagtgagttgcatcaaacctttctaaatttctcattctagaagttgctgagttgttctgccatgtgttaacttttttttcttatcagtaaaatcttttatttggtttatatttcaaatgtaatttaaaaagtctataagacaggaaattcgataatatgaaagcagggagaaactaagtcgcaccatttagctaagctcagggacaacgttcatttataataaatcaaacatttgatttttttcatgcc

SEQ ID NO: 293748 - DNA, 1000 bp, Homo Sapiens
ctcactgtgttgcccaggctgatctcgaactcctggactcaagcgatccacccacctccacctcccaaggtgttgggattacaggcgtgagccaccgcacccagcctcatgttgaccctggccctggatagcagctttgtttgtagaggcaggtggtgggagagaccctaggacagcctgagagtaactggacctggtattggtgcggagtggggaatatcccttgtctaaatgcagagcagctgagagaagttagcggggctcttcctccgttctcattgtttcctgctttccttccccacccaccccttcctcagcactctgtgttgtagcctgtactatcctgcttcaagcctccgtgtcccttgtaccttccccctaccttgagttgccagttctttactccctcaaatgttcccatgccacctctggggtttctgttatctgacatccctggctgctttcctggtagatgccattcccagagaggccaacagcgttcccaggcgtggctggctggtccgcatctctcagactcactctgccaggctacagttttgagaataccttttttgttgttgttttgtacctggagaactttttatgaatgagtaaatcttcagaaaggaattcctccacccttactgggttattgtcaggtgtaaacggcctttcagctgagcaatgttcctatgagaaggaagccatttctcttggctcatgaacactgccttttgggtagtatacccacacccagatctgtgaagagacctggaattgaagtctccatgtcgtcaggacttggtggcatgtggatcttgcttgacttgggaaaagagagggtggtggtgaactaataattatggagtccccctaatgtgtcgaacacaatgctagatgattaaaaaaaaaaaaaaaaaaaaaaaaaaaaaaaaaaaaaaaaaaaaaaaaaaaaaaaaaaaaaaaaaaaaaaaaaaaaaaaaaaaaaaaaaaaaaaaaa

SEQ ID NO: 293749 - DNA, 1000 bp, Homo Sapiens
atccgctcctactctggactccaatctatgccctaccccagctcttggatttggcctttggatcaggttcttctggtaatgaagcctcacctttcccccaactaactctgatctggcctaccctgctcctgactaacctcaaggatcctgagtctccttcagcctaacagctccagaagctgaactccagccctaagagccccagctgcagacaggcctctggccaagagcttagtcaggctaccctgactaagccacagggttggcatgccctctgggcagcccctgaaccgggctctgaaaacacaggaatggacaaggtaatctacccgagtcctgagcctgcaaggtagttgagacagatcttgaaggagagtgggcacagtcagaaaggaaaaagtggctcagtgtaaaataaaactgacacaagcccatgtaccagcagccaattggatctttttttttttttttttttttgagatggggcttctcttattgcccaggctggtcttgaacttctgagctcaagcgatcctcccaccttggcctaccaaagtgctgggattacaggcgtgaaccaccaattggatctttactggacccctacagggcactgagctagggaatgttggagattcagaggctgaatcagatagcagcccaaccctgagatacaactgagctacaggcaagaggatactaccgggcgcagtggctcacacctgtaatcccagcactttgggaggccgaggcgggtggatcatgtgaggccaggagttcgagaataccctggccaacatggtgaaaccccatctctgttaaaaatacaaaaattagctggggttggtggcacatgcctgtaaacctagctacttgagaggctgagacacgagaatcacttgaacctgggaggtggaggttgcagtgagctgtgatcacgccactgcaccccagcctgggtgacagagcgagactctgtctcaaaaaaaaaaaaaaaaaa

SEQ ID NO: 293750 - DNA, 1000 bp, Homo Sapiens
gactgaatgcctgtgtcccctgggttcatatgttgaacccctaactcccaatgtgatggtgtcaggaggtggagcctttgggaggtggttaggccgtgagggtggagacccatgctggggttggtgcccttatggttctcccatgtgaggacacagagggcaaccatctacaagccaagaagagaggcctcaccagacaccaaacctgccggcaccttgctgtgagatttccagcccccagagctgtgagaaataaatttctgttgtttaaggcactcaatattttgttacagtagcccaagctgactgagcagatattcatatggaaagtgaattttgatctctacttcatgccgtacataaaagccaattccagattgactgtagatacagattggcaaagcaaaacagtacagtttctagaaagaaacaggaaaatatctgcatgaggtggtcaaatatttcctagagaggacacaaaaagcactaactacaaaataaacaatgataaattggactgcattaaaattaagaacatctgtttaacaaaagaccccacgaagagcgtgagaagccagagtgcagagtgggaggagaaatctgacctgagatgggaaattagaatatgaagaactccttcaagtcagcaagaagacaggcaagccgagaggaggacgggcaaacgacctcaacagacactttacagaagagatatccaggccaggtgcagtggctcgtgcctgtaatcccagcactttgggaggctgaggccggtggatcgcctgggatcaggagtccaggatcagcctggccaacatgtcgaagtgccatctctactaaaaatacaaaaatttgctgggcttggtggtgtgcacttgtagtcccagctacatgggaggcggaggtgggagaatttcttgaacccgggaggcaggctttgcagtgagctgggatcgtgccactgcactccggcctgcgggacagagtgagactccgtatc

SEQ ID NO: 293751 - DNA, 1000 bp, Homo Sapiens; identical to SEQ ID NO: 118937

SEQ ID NO: 293752 - DNA, 1000 bp, Homo Sapiens
gcccttcattgcactctgtctttccaatgttgcttttatgcttccctggcaatttgctcagtttatactttttacacagatagcatcattatttcccatgtatgttgtgggatacattgaaccaagcaaatttcagaagatcatttatatgaacatgatttcagttacccttagtttcattttgatgtttggaaattcaatgtacttatcttcttattattcttcatctttgttaatgacatgggcaataattctaaagagaaatgaaattcaaaaactgggagtatctaaactcaactgctggctaattcaaggtagtgcctggtggtgtggaacaatcattttgaaatttctgacatctaaaatcttaggcgtttcagaccatatttgcctgagtgatcttatagcagccggaatcttaaggtatacagattttgatactttaaaatacacctgttctcccgaatttgacttcatggaaaaagcgactctgctgatatacacaaagacattattgcttccagttgttatggtgattacatgttttatctttaaaaagactgttggtgatatttcgcgtgttttagctacaaacgtttatctaagatgctgtctttgcaggtgccatgcctacaatggcaagtgtcaagctgtctacacttcatcccattgtgaatcatccacattacgaagatgcagacttgaggcctggttgcagcatgcttgaaatctgggatgtggaagacccttccaatgcagctaaccctcccttatgtagcgtcctccttgagccgagattgtgccactgcactccagcctgggcgacaaatcaagaccccgtctccaaaaaaaaaaaaaaaaaaacttgattgggatccaaaatcatacaactatacactaaaatcagtgaatattaccttatgtaaattaaaaattaggaaatcaaaagaaaagcatacatataaaaaacagttttttctaagcaaaaaaaaaaaaaaaa

SEQ ID NO: 293753 - DNA, 1000 bp, Homo Sapiens
tgagtatcgctgctctgtcctctcctcagcagggaacaagacttcgaaggtgcaggttgctgtgatgagacctgaagtgacccaccaggagaggtggaccagagagctctctgcctggagggctgtggctggggagcacgaccggatgatgcagagctggaggaaggcgtgggaaagctgtagcaaggacaccctgtagccaccaggaaggagtccctgacaccgacctcaaccccaacaagaccctgctgccactgaccacagccacccccggagaaggcctggtcccccacaactgtgaactgtcttgcccaagcctgctctgaacacagccattgggccaccacctgatgggcagaggcgggacagtggagaagcctggaacccaagtgggcctgtgacaggaactaagacttaaaaaattaggtgcttacctgggacagtaagttctgtctggcacaagcaggtaaccaggatggctaacaggctttgatagctgctcgtgaactaaaacagcagggtgtgtgcaggttcctcctctacggtcaggcagcaggctctgaaggctgatcctacaccgtcccagtgactccccttgacagagtgcccccaccccctaatagccaacagggttagcatggccagcacagatcgctgcttttattgatgcaaatcaagcctgctgcttctcctccctgcagacttagccaaggaactccaagatgcatgactgggacaagaaaaggtgagactccacatggaaatgccttgccctaaaccttgaatgactgtgagatgcgatctgggagtgcatctgtcaagtctttgtgttttcttcactaacctcagaatactgggctctattttatcaagcgctgcagtttatgcctctgtcccgtcaatgctcagcttctgcaacaggacaccaaacttgatgcagaaagccaaataggtcaattatgcaaatctcctggtgccatattaaatttcttgacaatgg

SEQ ID NO: 293754 - DNA, 1000 bp, Homo Sapiens
ctgtggacggtcatcttatccgaaaggagctgcggcccccagacctggcgcagcgtgtccagctgtgggagcacttccagagcctgctgtggacctacagccgcctgcgggagcaggagcagtgcttcgccgtggaggccctggagcgactgattcacccccagctctgtgagctgtgcatagaggcgctggagcggcacgtcatccaggctgtcaacaccagccccgagcggggaggcgaggaggccctgcatgccttcctgctcgtgcactccaagctgctggcattctactctagccacagtgccagctccctgcgcccggccgacctgcttgccctcatcctcctggttcaggacctctaccccagcgagagcacagcagaggacgacattcagccttccccgcggagggcccggagcagccagaacatccccgtgcagcaggcctggagccctcactccacgggcccaactggggggagctctgcagagacggagacagacagcttctccctccctgaggagtacttcacaccagctccttcccctggcgatcagagctcaggtgaggaccggaggaaagcaggaggaaacaatagctagctgcgagcgacaggcagcccaggacatctgtcttaggctccagtggacccccgtgcctcctaaggcttgagtgcaggtacccgtgttcctagagcacaggacgctgtctgcggctccccatcttccctgccagctccagcctgaactcaaggattgttaagaccactccactgatccctaaagctgttgatgacaagttgattcatttaaaacttctgtacatgcattctcagactcatcttttttgtaattaaaattaaaaattaagttaaatttagtaataatcatctaatttctatacattctaaaatatattcagcatctgtagtttatactttgtttctccaaagtatgtgggtaaacaataaaaaaaaactataaatattcaaaaaaaa

SEQ ID NO: 293755 - DNA, 1000 bp, Homo Sapiens; identical to SEQ ID NO: 118940

SEQ ID NO: 293756 - DNA, 1000 bp, Homo Sapiens; identical to SEQ ID NO: 118941

SEQ ID NO: 293757 - DNA, 1000 bp, Homo Sapiens
cagaaggatgcaatactggcagctgcagacaagtggttaactggtttggcagaatggcatgttcctgctgctggaatgtttttatggattaaagttaaaggcattaatgatgtaaaagaactgattgaagaaaaggccgttaagatgggggtattaatgctccctggaaatgctttctacgtcgatagctcagctcctagcccttacttgagagcatccttctcttcagcttctccagaacagatggatgtggccttccaggtattagcacaacttataaaagaatctttatgaagaaattaaactaggttgggcatggtggctcacacctataatcccagcactttgggaggcagaggagggaggatcacttgaacccaggaattcaaggctgcagtaagctacgatcacaccactgcactctggcctgcatgcactctggcctgcatggcagaacaagaccctgtctctaaaaaaagagaaagaaatcaaactaatcatgctgctcatggatttttccaataaatttcttgttttggcaggaagaaatgaacactggtattagacttaaagattaaatttcctcaaacatgtcctatctgtagtagttcaactagacaccttttaaagtgcctctaaattcatcagatggccaaactgtatttataatccacttaggcattttgaaaaactttcaacctgtaaaaagttacttttatcttggatttattatgaagaactttgtagttgctttgtaatttcccataaattgtctttgaaactaacattttacactgaattattttgagattttaaagaagtaattaagtgcaaaatggtatataatgtgtactttttctacttttaggaaaatttaatgagagcttattgcaaaaattgttataatttggtcattataagtgacttttagtaaaagtaccataaaccttatgttatgccacagaaattcctttaaaataaaattcttaaactaaacata

SEQ ID NO: 293758 - DNA, 1000 bp, Homo Sapiens; identical to SEQ ID NO: 116002

SEQ ID NO: 293759 - DNA, 1000 bp, Homo Sapiens
acgctgcccctgtctccggaccagctgccctgtggcgaccccatggcgggcagcggaggcgcccccgtgctgcgggtgggccatgaccacggctgccaccagcagcccttctgcaacgcgcccctccctggccctggaccctatcgggtgaagttcctcctgatggacaccaggggctcacccagggctgagaccaagtggtcagaccccatcactctccaccaagggaagacccccggatccatcgacacctggccagggcggcgaagtggcagcatgatcgtcattacctccatcctctcttctctggccggcctcctactcttggccttcttggcagcctctaccatgcgcttctccagcctgtggtggccggaggaggccccggagcagctgcggatcggctccttcatgggcaagcgctacatgacccaccacatcccacccagcgaggccgccacactgccggtgggctgcaagcctggcctggaccccctccccagcctcagcccctagcctggcctctttgcatggggctgggggagatggggcgccgggagtgagtgcatggtgctttgtcccagctcctgcacccacaggccccctcagggctccttgcctttcccccccaccagcacaccccgtaccctgcctggaatcccagcaccagcccccctgcctctcctctgcctttctggtttctctccctctccaagcatctgtaagttgcactcaggagggtttaggggagggccatgggcaggctggtctcgtgatagtgagtgagtgctcatgggatctggttgtttagaagcatgcagccctcctgcttcactctctctgtctctcctgctccaccatggccagacgtgcctgcttccccttcgccttctgccgtgattgtcagtttcttgagggctccccagccatgcttcctgtacagcctgcaaaactgtgagtcaattaaacctcttttcttcataaaaaaaaaaaaaaaaaa

SEQ ID NO: 293760 - DNA, 1000 bp, Homo Sapiens; identical to SEQ ID NO: 224560

SEQ ID NO: 293761 - DNA, 1000 bp, Homo Sapiens
cttcctggggccccggggccgctgcaagctgggtgacttcggactgctggtggagctgggtacagcaggagctggtgaggtccaggagggagacccccgctacatggcccccgagctgctgcagggctcctatgggacagcagcggatgtgttcagtctgggcctcaccatcctggaagtggcatgcaacatggagctgccccacggtggggagggctggcagcagctgcgccagggctacctgccccctgagttcactgccggtctgtcttccgagctgcgttctgtccttgtcatgatgctggagccagaccccaagctgcgggccacggccgaggccctgctggcactgcctgtgttgaggcagccgcgggcctggggtgtgctgtggtgcatggcagcggaggccctgagccgagggtgggccctgtggcaggccctgcttgccctgctctgctggctctggcatgggctggctcaccctgccagctggctacagcccctgggcccgccagccaccccgcctggctcaccaccctgcagtttgctcctggacagcagcctctccagcaactgggatgacgacagcctaggccctggacaccctccttgtctcgcctgccctcctgcaggccttcactctcccctgaggctgtcctggcccggactgtggggagcacctccaccccccggagcaggtgcacacccagggatgccctggacctaagtgacatcaactcagagcctcctcggggctccttcccctcctttgagcctcggaacctcctcagcctgtttgaggacaccctagacccaacctgagccccagactctgcctctgcacttttaaccttttatcctgtgtctctcccgtcgcccttgaaagctggggcccctcgggaactcccatggtcttctctgcctggccgtgtctaataaaaagtatttgaaccttgggagcacccaagcttgctcatgtggcaaaaaaaaaaaaaaaaaa

SEQ ID NO: 293762 - DNA, 1000 bp, Homo Sapiens; identical to SEQ ID NO: 118945

SEQ ID NO: 293763 - DNA, 1000 bp, Homo Sapiens
cctcggctcccctctgcgcgggggctccagcctccgccacgtagtctactggaactccagtaaccccaggttgcttcgaggagacgccgtggtggagctgggcctcaacgattacctagacattgtctgcccccactacgaaggcccagggccccctgagggccccgagacgtttgctttgtacatggtggactggccaggctatgagtcctgccaggcagagggcccccgggcctacaagcgctgggtgtgctccctgccctttggccatgttcaattctcagagaagattcagcgcttcacacccttctccctcggctttgagttcttacctggagagacttactactacatctcggtgcccactccagagagttctggccagtgcttgaggctccaggtgtctgtctgctgcaaggagaggagaccttccctctcatcccaaggagccagagtcctcccaagatcccctggaggaggagggatccctgctgcctgcactgggggtgccaattcagaccgacaagatggagcattgatgggggagatcagagggtctgaggtgactcttgcaggagcctgtcccctcatcacaggctaaagaagagcagtagacagccctggacactctgaagcagaggcaagacaaacacaggcgctttgcaggctgctctgagggtctcagcccatcccccaggaggactgggatttggtatgatcaaatcctcaagccagctgggggcccaggctgaagacctggggacaggtcgattgctggaccagggcaaagaagaagccctgccatctgtgccctgtgggccttttccctggggcagcaccttgccctccccaggggatcactcacttgtcttctatgaagacggactcttcatgaggttgaatttcatgccagtttgtatttttataagtatctagaccaaaccttcaataaaccactcatctttttgttgccctccccaaaaaaaaaaaaaaaaaaaaa

SEQ ID NO: 293764 - DNA, 1000 bp, Homo Sapiens
accctgtaaatgttactttccattaaatatgggagggggactcaaatttcagaaaagctaccaagtcttgagtgctttgtagcctatgttgcatgtagcggactttaactgctccaaggagttgtgcaaacttttcattccataacagtcttttcacattggattttaaacaaagtggctctgggttataagatgtcattctctatatggcactttaaaggaagaaaagatatgtttctcattctaaaatatgcattataatttagcagtcccatttgtgattttgcatatttttaaaagtacttttaaagaagagcaatttccctttaaaaatgtgatggctcagtaccatgtcatgttgcctcctctgggcgctgtaagttaagctctacatagattaaattggagaaacgtgttaattgtgtggaatgaaaaaatacatatatttttggaaaagcatgatcatgcttgtctagaacacaaggtatggtatatacaatttgcagtgcagtgggcagaatacttctcacagctcaaagataacagtgatcacattcattccataggtagctttacgtgtggctacaacaaattttactagctttttcattgtctttccatgaaacgaagttgagaaaatgattttccctttgcaggttgcacacagttttgtttatgcatttccttaaaattaattgtagactccaggatacaaaccatagtaggcaatacaattttagaatgtaatatatagaggtatatttagcctcttttagaagtcagtggattgaatgtctttttattttaaattttacattcattaaggtgcctcgtttttgactttgtccattaacatttatccatatgcctttgcaataactagattgtgaaaagctaacaagtgttgtaacaataatccattgtttgaggtgcttgcagttgtcttaaaaattaaagtgttttggtttttttttttccaaaaaaaaaaaaaaaaaaaaaa

SEQ ID NO: 293765 - DNA, 1000 bp, Homo Sapiens; identical to SEQ ID NO: 118946

SEQ ID NO: 293766 - DNA, 1000 bp, Homo Sapiens; identical to SEQ ID NO: 224561

SEQ ID NO: 293767 - DNA, 875 bp, Homo Sapiens
gtctgcgcccctcgctgtcccgcgaccccggcgcgggtgcctcgggcccccctcgcgcgccgccatggtgggccggctgagcctacaggatgtgcccgagctcgtggacgcgaagaagaagggcgacggcgtcctggacagcccggactcggggctgccccccagccccagccccagccactgggggctcgcggcgggcggaggcggcggagagcgcgcggcggcaccggggacgctggagcccgacgcggcggcggcgacccccgcggctccgagtccagcgtctctccccctggctcccggctgtgcgctgaggctttgtcccctgtcctttggcgaaggagtggagtttgaccccttaccaccaaaggaagtaaggtacacctccttggtcaagtacgactccgagaggcacttcatcgacgacgtgcagctgcccctgggcctggcggtggcctcctgcagccagacggtcacctgtgtccccaatggcacgtggcgcaactacaaggccgaggtgcgcttcgagccacgccacaggcccacccgcttcctcagtaccaccatcgtgtaccccaagtaccccaaggccgtctacaccaccaccctggattacaactgccgcaagacgctgaggaggtttctgtccagcgtggagctcgaagccgcggagctcccgggcagcgacgacctctctgatgaatgctgacccagcaggctgggctggggtcggaccggctctcccgctgtcctgcccccgactgccctggccaagctgggcgaccttacccttcacgtcattccagccccagaggagtctaacctagagatacctccaagcgcggccgggggaagagaaaaaaaaaaaaaaaaaa

SEQ ID NO: 293768 - DNA, 1000 bp, Homo Sapiens
catcgcagagcactacatggcttccgacgtcgaatgggatcctactgggcgctacgtcgtcacctctgtgtcctggtggagccataaggtggacaacgcgtactggctgtggactttccagggacgcctcctgcagaagaacaacaaggaccgcttctgccagctgctgtggcggccccggcctcccacactcctgagccaggaacagatcaagcaaattaaaaaggatctgaagaaatactctaagatctttgaacagaaggatcgtttgagtcagtccaaagcctcaaaggaattggtggagagaaggcgcaccatgatggaagatttccggaagtaccggaaaatggcccaggagctctatatggagcagaaaaacgagcgcctggagttgcgaggaggggtggacactgacgagctggacagcaacgtggacgactgggaagaggagaccattgagttcttcgtcactgaagaaatcattcccctcgggaatcaggagtgacctggagcactgtgcgcagccgtgtgtgctgtggagccgaggccgtcctgcaggaagccgcgtgactcccgcctcctccctgtgctctctggctctggactgtgactgcgcctggattctgccattgcgacacatttttgtgcctttcagcccctggtgtctgcagtgggggatttaaggcacccgcttccacttctttcttgtttggagttttctgttggaaccgccggcgttggctccgaagacttagcgacgccactggcggcaccttctcctgcgcccagtgatgtttccacggtgcctgtacacagccgagcagcatttccgttgaaggacttgcatccccattgcgggcagtgctggacgtgtcccggagacccaccgggagggcgccgccatgccttgtacccccaccgtgcaggttgtggccggttttctccgcaggttgaacatggaaataaaagcaaacttgtatgaaaaaaaaaaaaaaaaaaa

SEQ ID NO: 293769 - DNA, 817 bp, Homo Sapiens; identical to SEQ ID NO: 118948

SEQ ID NO: 293770 - DNA, 1000 bp, Homo Sapiens
atgagtaaagagacgtggggctatttctgcagcaagtggaaccttctggagctggccatcatcctggccagctggagcgccctggcggtgtttgtgaagagggctgtcctggccgaaagggacctccagcgctgccggaaccacagggaggaaggcatcagcttcagtgagacagcagcagccgatgccgcccttggctacatcattgccttcctggtactcctgtccacagtgaagctttggcatctgctcaggttgaatcccaaaatgaacatgatcacggcagccctacgccgtgcctggggcgacatttcaggctttatgattgtcatccttaccatgctcctggcttactccatcgcgtcaaacttgatatttggttggaaactccgttcctacaaaaccctctttgatgcggcggagacgatggtcagccttcagctgggaatcttcaactacgaggaggtcctggactatagcccagtgcttggctccttcctcattggatcctgcattgtttttatgacatttgtggtgctgaacctgtttatctctgtcatcctggtggccttcagtgaggagcaaaaatactatcagctgtcggaggaaggggagatcgtagatttgctgctgatgaaaatactcagtttcctgggcattaagtctaagagagaggagcctggaagcagcagggagcagcctgggtctctgtcccagactcgccactctcgaccagcacaagctttgcccaaggactaagctgttcgtccacacgccaccatctaccagtggggacgcccagggcctcgggcgtacgcttaccagcgactctatagtctctctaggtcatagctttcatgtccattgaagaattaccaagcccagcaagtaaaaaaaattacaataacagagatatatgtaaaattgccaatactatgagagcttctttgttcaaatgtatttcctcttattataaataaaacaaatattacatggaaaa

SEQ ID NO: 293771 - DNA, 1000 bp, Homo Sapiens
ttgtttaaaagtttttctggtagctttagctttatgctaaaaaaaataatgacattgggtatctatttctttctaagactacattagtaggaaaataagtcttttcatgcttatgatttagctgttttgtggtaattgctttttaaaggaagttattaatatcataagttattattaatattttgaacacaggtggatgtgaaggattttcatttaaaaaccaagtggttttgactttttctgttgaatgaacaactgtgccttgtggaatttttgcagaagtgtttatgctttgttagcatttcaacttgcattattataaagaggtattaatgcctcagttatgtgtttgtcaatgtactggctgaggattctatctcagctgtcttttctaactgtgtaggttgagttttgaacacgtgcttgtggacatcaggcctcctgccagcagttcttgaagcttctttttcattcctgctactctacctgtatttctcagttgcagcactgagtggtcaaaatacatttctgggccacctcagggaacccatgcatctgcctggcatttaggcagcagagcccctgaccgtcccccacagggctctgcctcacgtcctcatctcatttggctgtgtaaagaaatgggaaaagggaaaaggagagagcaattgaggcagttgaccatattcagttttatttatttatttttaatttgtttttttctccaagtccaccagtctctgaaattagaacagtaggcggtatgagataatcaggcctaatcatgttgtgattctcttttcttagtggagtggaatgttctatccccacaagaaggattatatcttatagacttgtcttgttcagattctgtatttacccattttattgaaacatatactaagttccatgtatttttgttacaaatcttctgaaaaaaaacaaaacaatgtgaaacattaaaattaaaaggcattaataataaaaaaaaaaaaaaaaa

SEQ ID NO: 293772 - DNA, 840 bp, Homo Sapiens
acgcgcatggaacgcagcgaaggactatggcaggggagaacttcgctacgccgttccacgggcacgtgggccgcggcgccttcagcgacgtgtacgagcccgcggaggacacgtttctgcttttggacgcgctcgaggcagcggctgccgaactggcaggagtggaaatatgcctggaagtagggtcagggtctggtgtagtatctgcattcctagcctctatgataggccctcaggctttgtacatgtgcactgatatcaaccctgaggcagcagcttgtaccctagagacagcacgctgtaacaaagttcacattcaaccagttattacagatttggtaggaagtcacggaatagaggcagcttgggctggtggcagaaatggtcgggaagtcatggacaggttttttcccctggttccagatctcctttcaccaagaggattattctatttagttaccattaaagaaaacaacccagaagaaattttgaaaataatgaagacaaaaggtctgcaaggaaccactgcactttccagacaagcaggccaagaaactctttcagtcctcaagttcaccaagtcttagcatacagtgtgtgcccagaactactggaaactgaatgcatttagcatattttgaaactgaagtcattcattaggtaacaaggaattttatcagaaatttgtcattaaaaaaaggtagaaaggtggaacattccctttcagtcaggcctatagaattatttgcacaagtacaagtaaatatgtgtattatatttatagtttgcattttaaatataaaaattatgtatgaaataaaaaaaaaaaaaaaaaaaaaa

SEQ ID NO: 293773 - DNA, 1000 bp, Homo Sapiens
ggtctgtggctgtgggccccttggtgacccgctgctcttttggaaatgggtgacctgaagtgacactttttccacaattaacccaagttgtgttaatacttcaggtctgtttcccagacccagaaagctttacagaaaatcattgtaagacaatttattaatttgagaaagtcaccttgacagttctttgcacacaagttttacacctctctggattcgaagtttgtattgtattcatagttaaagggaatcgggtactttgcttgttgaataatgcactttaaaacaaggaaccgtatcaggccagcatggtggctcatgcctgtaatcccagcattttgggaggctcaggcagacaaatcgctctagctcagaagttgcagagcagcctgggcaacatggtgaaacccgtctctaccaaacagacaaaaagcagccaggcgtggtggcacatctgtggtcccagctacttgagaggctgagccaggaggatcgcttgagcccaggaggcggaggttgcagtgagctgagatggcaccacttattgcactccagcccgggcgacagagcgagactccatctaccagatccttatgacgcagctgatgcctgccttggttcctaccactctggtgtagacagaggactttgtccaagtctcacactaaacatgcccgggcttcgatgtgcctggaggatttccccacagggacccacgcacctccctgtatctgcgcagcttgctcgtgtggctggaagcgctgtcgataagcttcacgcactggcttgccagttcttcagctctaggacttgtagctttaagcaaacggtgtggcatgggttgagtgtggccacctgcaggatgtgcagggctgcctcagaagctggctggggactctagcctctgtgttcataaagacattaagaagtggatggatgttgttccttttttgaagttgtcattaaagtaggtgcaacaaccaagaaaaaaaaaaaaaaa

SEQ ID NO: 293774 - DNA, 1000 bp, Homo Sapiens; identical to SEQ ID NO: 224562

SEQ ID NO: 293775 - DNA, 1000 bp, Homo Sapiens; identical to SEQ ID NO: 118949

SEQ ID NO: 293776 - DNA, 1000 bp, Homo Sapiens; identical to SEQ ID NO: 118950

SEQ ID NO: 293777 - DNA, 1000 bp, Homo Sapiens; identical to SEQ ID NO: 118951

SEQ ID NO: 293778 - DNA, 1000 bp, Homo Sapiens
ttcttgctatgcttcctgcacccaaccagcagaattcttccagggtggaggaactaatcagcttgttctccaacagttctgaagccaacccacaaatctttgaggaaaaggggtcactttgtttactattctcttggagatggaagtgattctgctcttccatttgggtatattatttcaagggtatttcttcttaaaaatcttggaaagcctaagagagttaaaggcatcctggttttgtttcattttgctctgttttaaatccatatgcaaataaaactgcttctctcttacactgcttgaactagaaaatcagctttttaatgtaggttaccacttataagcacaaaagaaacatgtataagaaaccagatttaagtgttttaaataaaatgtaaacagtttttatttggtagagatgactcatggaaaaattgtgttggcttggtctgcatgtttaatgatgtgcttgtatatcgattagctgtgtcacttttaaataagaagtccacacaagcaagccaaatttttagatgacgaagtccataaataactagagaatttttgttatctgttgttaagttgaaatgtataatcatttatcactaaattgcacattgcctttatttatttgtgctctgtttttggtttacagtgtaataatacctcatttaaaaaataaaaaccactactgttacattttattaatttaaaaagctagaaaattcatgtagttactttttttacatatataatctgttaatgaattattgatttttgtatctgccacagtaaattaaagcattacacagtatttatcagtattttttaaacatcctgtccttttttaaaatctttgcttagtcagtcatatttttgtctgtatgattagaagtttttacgtccttccttttttgtacaaatctgtattgtattaatttctggatgcaatttttcaaatattaaaattatacagtcagtcagaaaaaaaaaaaaaaaa

SEQ ID NO: 293779 - DNA, 1000 bp, Homo Sapiens
agctttattcctgttgggcctcagtttctcttccccacacagtttatcttccgtcacattgtgccgggtgacgtgcacggtctccctctgccctagccggagatgcatgatgacaggcagtgtgatgtgttctgaaagtgtccagggcaaagcgtagggagagggtggatttgtgcagggtgcagctctggagaagaagctggatcactcttggtcccattccctaggccctgagcaagtcaggctcctggctctgggtgtggctcccccaaacgaagtactgacttcagcctgtgaggggagggttgagggaggctctggaaagcccagccacacctgagtccctggcagtagccttggggcagagggcacccgcagagtcccagagatgatgtgggcagtgggcagagagagccttggcgcctctgtttgccaccacttccccaggaaggagggacagcatttctctggctggttccactaaatgtgccagcccaaatgcagggcatgggctctggttctgccaggagcctgtgacacccccaggaagggggtggaactgaggaagagcgaggatatgcaggcactcatgcttaccgggactggggcagctcactaggattctatcctttccaatcggcatcagccagctcttgtcccctgataagtgaggacagcctgaccctggcctcaaatgcagccatccctgagttcatgcgatgctgacgggaccccagcacacttccctgcctcctttgagatctgcgagcccttgctgcagttcagattcaacaaggccctctgcccaccctctcactaggcctcacccaacaccagtggaactggagcctctggctgggcacagtggctcactttgggaggctgaggcaggaaggctgctggaaactgagagttcaagaccagcctgggcaacatagtgagaccctgtctctacaaatacaaaataaaataattagctgggaaaaaaaaaaaaaaaaaa

SEQ ID NO: 293780 - DNA, 1000 bp, Homo Sapiens
gaccagggtgtgtgctgcattgatgagttcgacaagatggctgaggccgaccgcacagccatccacgaggtcatggagcagcagaccatctccattgccaaggccggcattctcaccacactcaatgcccgctgctccatcctggctgccgccaaccctgcctacgggcgctacaaccctcgccgcagcctggagcagaacatacagctacctgctgcactgctctcccggtttgacctcctctggctgattcaggaccggcccgaccgagacaatgacctacggttggcccagcacatcacctatgtgcaccagcacagccggcagcccccctcccagtttgaacctctggacatgaagctcatgaggcgttacatagccatgtgccgcgagaagcagcccatggtgccagagtctctggctgactacatcacagcagcatacgtggagatgaggcgagaggcttgggctagtaaggatgccacctatacttctgcccggaccctgctggctatcctgcgcctttccactgctctggcacgtctgagaatggtggatgtggtggagaaagaagatgtgaatgaagccatcaggctaatggagatgtcaaaggactctcttctaggagacaaggggcagacagctaggactcagagaccagcagatgtgatatttgccaccgtccgtgaactggtctcagggggccgaagtgtccggttctctgaggcagagcagcgctgtgtatctcgtggcttcacacccgcccagttccaggcggctctggatgaatatgaggagctcaatgtctggcaggtcaatgcttcccggacacggatcacttttgtctgattccagcctgcttgcaaccctggggtcctcttgttccctgctggcctgccccttgggaaggggcagtgatgcctttgaggggaaggaggagcccctctttctcccatgctgcacttactccttttgctaataaaagtgtttgtagattgtc

SEQ ID NO: 293781 - DNA, 1000 bp, Homo Sapiens; identical to SEQ ID NO: 118952

SEQ ID NO: 293782 - DNA, 1000 bp, Homo Sapiens
atgacaagattagtaaacaggaatactagaactatgtttgcatgatacacaagcaccaataaagactaatccatacacagttaacctaatgccaaataaatactggttaaataaatgtatggcacagaatataatttgactatcaagacttttagcataatgaaaaaccctctctctatatatatatgtgtatatgaattatgtgggcattcttgatacttcaagttctagtttgaaaaaaatacataactaatttaattttacacaaaaatatttatgcagattttcagaatttcatatcaggaaatgacctttttatgtctgttaaatatcaaaacaatttgctacagtgttaatctgcatggtctttaagcctgctgtagttgagttgcagacagtgcatgaaaaagtattccgctgggaattgagccatgccaccaaagccaagaggagcgcatggaaacccggtagtctagaactaatcagattactgattttagggcacagcaccagatgaattgttgtatatgcttgtaaaaattgattctgtgtgttcctctgaacaaagcggagaaaatgatgataccatcaatattgaaattaaacttccaacttctctaataaaaaattaaaacacgcataacactcgtcaagagtatttgctcccaagacacattctagcaaatgttttgcctttttcatatacatgatatcatcgttattttcaaagggggcttattaataccctcagcatgtttttcacccaaatgatgcaaaacatgcagattctagttgacttcagttgtaatagacttgtttttctcctatttatgatttgaagtggattctgtaaaatatctcttgttcttagtttccttatctgtaaaacagtggagttagactacatatcttttggcactaacatctcatgaaaaattatggttaataaaatatcaccacatttggattgccaattttcaaaaaaaaaaaaaaaaaaaaa

SEQ ID NO: 293783 - DNA, 1000 bp, Homo Sapiens
ggattgttcggattaaccccttccactcctcactggctggttcactgtgttctgactagtccataaaaataaagatggaaggagatcaaacacagaatcataatcataatgcggccccctcccccagagcttacctcgaatgtgaaatccctacttcttataatgcagagttaaggagctgagcccccatgattttgtagctgtacttttgtatgtgtatatttttatagctgcagattgtccacacagtatacttttggaagtttgggtggatgactctgaattcttgcacacctttcctaaaaatttctcccaagagagacttgtttgggccttttgtggtgtcagtggaatggataggtaacttgggtgggcaacttggggagctgaccattctcttttggtaaatgttgacggctcaagaggatgaatatgaagctttccaagataagcagattaaaaggaacatgtgttaccgaggtaggtcactgtcatttttgttttaagagttggggggagtatctatagtaaacttgaataaaggggacaaagctagaacttattcattcattcattcacttatggagttgttactgattttgcggaggtcaggttcataccaatggacactaatacaatcagtgttcccaaggctgtgcaggggtggggggacatgctgtcaggatggtctgagcatctgggtgagaaccagagaaacaggacttcttccttctgtaccatgagctgtgtccctttactatgcaagcacatgaccccagagacagctggttcactggcagatccccatgatggacttactaagggaaaggtgagatgaacactgcccccaaggagggggtgaaatatgatctaacttatgcaagagcctataattagtcccagtctcgactctacatttgtttgtgcagcattcattcagcaaagacttttggggtttgtgcaaggcacagttttaagcacataatgtaattctaaaaga

SEQ ID NO: 293784 - DNA, 1000 bp, Homo Sapiens; identical to SEQ ID NO: 224564

SEQ ID NO: 293785 - DNA, 1000 bp, Homo Sapiens; identical to SEQ ID NO: 223641

SEQ ID NO: 293786 - DNA, 1000 bp, Homo Sapiens
tgggttctccagcgacaaggctaaggcgggctcctccgaatggctggctgtggatgggttggtcagtccctccaacaacagcaaggaggatgccttctccgggacagattggatgttggagaaaatggatttgaaggagttcgacttggatgccctgttgggtatagatgacctggaaaccatgccagatgaccttctgaccacgttggatgacacttgtgatctctttgcccccctagtccaggagactaataagcagcccccccagacggtgaacccaattggccatctcccagaaagtttaacaaaacccgaccaggttgcccccttcaccttcttacaacctcttcccctttccccaggggtcctgtcctccactccagatcattcctttagtttagagctgggcagtgaagtggatatcactgaaggagataggaagccagactacactgcttacgttgccatgatccctcagtgcataaaggaggaagacaccccttcagataatgatagtggcatctgtatgagcccagagtcctatctggggtctcctcagcacagcccctctaccaggggctctccaaataggagcctcccatctccaggtgttctctgtgggtctgcccgtcccaaaccttacgatcctcctggagagaagatggtagcagcaaaagtaaagggtgagaaactggataagaagctgaaaaaaatggagcaaaacaagacagcagccactaggtaccgccagaagaagagggcggagcaggaggctcttactggtgagtgcaaagagctggaaaagaagaacgaggctctaaaagagagggcggattccctggccaaggagatccagtacctgaaagatttgatagaagaggtccgcaaggcaagggggaagaaaagggtcccctagttgaggatagtcaggagcgtcaatgtgcttgtacatagagtgctgtagctgtgtgttccaataaattattttgtagggaaagta

SEQ ID NO: 293787 - DNA, 1000 bp, Homo Sapiens; identical to SEQ ID NO: 115843

SEQ ID NO: 293788 - DNA, 1000 bp, Homo Sapiens; identical to SEQ ID NO: 118956

SEQ ID NO: 293789 - DNA, 1000 bp, Homo Sapiens
acagaaggcctgggtttgcagtcagaggacaggatgcacattccttcaagatacagacccagattgttgggcatctagttcttgggttttctgttgttgctgttccgttttgtctgtcttccctcctttgtttactagcagcctggaatttgccactttttctaaacgaagatttatggaacacttaccacacggctgacgctgcgcgaggctaaggttctaatacaccgcagctcacttaactctcgcaataccataaacgcacactgtttcatcttgaccctttcttgggaaggtgacagagaggtaggagggcaaacatcttgtgtgccccgtcccaagggtattactggtggaataatatccgccccccaccccagtttctaatttgctgtaggctgtgacgctgtggggcaagactaggagtcctgttgaaattaggaataagtgtgctgtgagggaagggctgccttattttagagcacagattttctgaatatctattttgacaggttcgatcctctccccttcctgccttccttctgtcgattttcaatgtcttgatggtgtcccacctgagtggcctttagagatgtgagttgtgaggcactggggaggcaggcacacgtcctccagcccaagactgcctaatttaacagggatttctgcattctggaactagcctccattttccccaagcaggattactccagagggcaaaacacagcccaatagtatcacatttcctttctgctttagcaaaaataaccactgtctcattcatgggaaaaggccgccaaacaaatttgttactggaaccatttgtaacaacttctagtttgcactgccttggagcaagcacactttgtagaggagggatttgcagttacttgggcaacaaggtaaccactgatcattacaggaagcttcagaaaccgtgggaccagtgtagaagaatggagtatctgtccaaactaagaataaaaagaatgacacttgt

SEQ ID NO: 293790 - DNA, 1000 bp, Homo Sapiens
ggcttttctcactggcctggtgctccaggattaactcagtgaccacagacaacattgggctcctgagtcagcttgatcaccctcacttcttcatgacaccaaagttctatgtgttcatgtggctccttgcagatatcatttctgtgctttttattgttgccatattttgttttcactggcggagagagactgaaaaagaaaaattgtttgaaacctccagcactcgcacagatactcagagtggaagtaagaatgaggaagatagatagatagatagatttgcacatagccatgaaacctcctgtccgagttgtggaaggtccttggactctagcagccctctacccggctctacccaagagtggaaaggaacaccaaggccatttcaattttgcagcaccatccaagaaactactacctatcaagaatgctgtcacacctttgaagcctggcaagcatgagattcaaccaccgatgcccaccgtggtctttgaactcacccaagcacccaccaggcaggctacaagtgaggctacctttcaaactacattgcccaccctgaaggtggataagccaaccatgccctccatagaggtcccctatccttaaataagagacctctaagagatccccatggctgaatactccaaataatcctatgtcacaatatattccattgcatctgacatagccttctgtgtttccaaagaagaattagccacatctcccctgcttcttcctctctctgcctaagggtggtgatggtggggagtggttgataaaggcacacagaagggccacggaggctctcaggggaaccattgtgctctcgctatcaagaatgcatctcaaggggctaggcaaggggaaaactgctgtgtgtggtcttggaactggttgctgtcaggtttatctcatcctaacacctccataatattttctgctaaaggagtgactgtgcatataagtaaaggcaacctctcaggaaaaaaaaaaaaaa

SEQ ID NO: 293791 - DNA, 1000 bp, Homo Sapiens
ttatcgaaagtgtcgcatcaaactctctggctatgcatgggtcactgcctgctctcacatcttctgtgatcagcatggcagtggtgagtttagtcgctcaccagctatctgtcctgcctgcaacagtaccctttctggaaagctagatattgtccgcacagaactcagtccatcagaggaatataaagctatggtattggcaggactgcgaccagagatcgtgttggacattagctcccgagcgctggccttctggacatatcaggtacatcaggaacgtctctatcaagaatacaatttcagcaaggctgagggccatctgaaacagatggagaagatatatactcagcaaatacaaagcaaggatgtagaattgacctctatgaaaggggaggttacctccatgaagaaagtactagaagaatacaagaaaaagttcagtgacatctctgagaaacttatggagcgcaatcgtcagtatcaaaagctccaaggcctctatgatagccttaggctacgaaacatcactattgctaaccatgaaggcacccttgaaccatccatgattgcacagtctggtgttcttggcttcccattaggtaacaactccaagtttcctttggataatacacctgttcgaaatcggggcgatggagatggagattttcagttcagaccattttttgcgggttctcccacagcacctgaacccagcaacagcttttttagttttgtctctccaagtcgtgaattagagcagcagcaagtttctagcagggccttcaaagtaaaaagaatttgagccacgcatagtgtcacgcacctgtgatcccagctacttaggaggttgaggctgggaggatcacttgagcccaggagtctgaggctttagtgatctaagatcatgccactgcactccagcctgggcaacagagtgagaccctgtttctaaaaaaaaataaagataatttagctaactttaaaaaaaaaaaaaaaaaaa

SEQ ID NO: 293792 - DNA, 1000 bp, Homo Sapiens; identical to SEQ ID NO: 224565

SEQ ID NO: 293793 - DNA, 1000 bp, Homo Sapiens
tgaagacgttcagggaggagatcgaagacgtggagtttcccaggaagcacctgactgggaacttcgctgaggagatgatctgtgagcgtcggcgcgccctgcaggagtacctgggcctgctctacgccatccgctgcgtgcgccgctcccgggagttcctggacttcctcacgcggccggagctgcgcgaggctttcggctgcctgcgggccggccagtacccgcgcgccctggagctgctgctgcgcgtgctgccgctgcaggagaagctcaccgcccactgccctgcggccgccgtcccggccctgtgcgccgtgctgctgtgccaccgcgacctcgaccgccccgccgaggccttcgcggccggagagagggccctgcagcgcctgcaggcccgggagggccatcgctactatgcgcctctgctggacgccatggtccgcctggcctacgcgctgggcaaggacttcgtgactctgcaggagaggctggaggagagccagctccggaggcccacgccccgaggcatcaccctgaaggagctcactgtgcgagaatacctgcactgagccggcctgggaccccgcagggacgctggagatttggggtcaccatggctcacagtgggctgtttggggttctttttttttatttttccttttcttttttgttatttgagacagtcttgctctgtcacccagactgaagtgcagtggctcaattatgtctcactgcagcctcaaactcctgggcacaagcaatcctcccacctcagcctcccaagtagctgggattacaggtgcacaccaccacaccaggctaatttttaattttttagtagagacagggtctctctgttgcccaggctggtctctaacttctgaccttaaatgatcttcctgcctcagcttcccaaaacactggggttacaagtgtgagccaccacccctggcctggggttcatttttaatgggaaaagccactgggggctctaactcgc

SEQ ID NO: 293794 - DNA, 1000 bp, Homo Sapiens; identical to SEQ ID NO: 292479

SEQ ID NO: 293795 - DNA, 1000 bp, Homo Sapiens
gttgaccatcactgccatcacatcacctttttttaagtagtaagaataaagccactgtatgattctcttaatagctatacattaatcctgtttttagtgctgactgggtcagccttccgggaactggagtctgtctctttcagtgcttttttgtttgtttggttggttgttttttgagacagtctcgctctgttgcccgggctggagtgcagtggcgtgatctcggctcaccgcaagttccgcctcccgggttcacaccattctcctgcctcagcctcccgagtagctggcactacaggcacccgccaccatgcccggctattttttttgtatttttagtagagacggggtttcaccatgttggccaggatggtctcgatctcttgacctcgtgatccacccaccttggcctcccaaagtgttgggattacaggcgtgagccaccgcgccccacctaacccttccttatttagcctaggagtaagagaacacaatctctgtttcttcaatggttctcttcccttttccatcctccaaacctggcctgagcctcctgaagttgctgctgtgaatctgaaagacttgaaaagcctccgcctgctgtgtggacttcatctcaaggggcccagcctcctctggactccaccttggacctcagtgactcagaacttctgcctctaagctgctctaaagtccagactatggatgtgttctctaggccttcaggactctagaatgtccatatttatttttatgttcttggctttgtgttttaggaaaagtgaatcttgctgttttcaataatgtgaatgctatgttctgggaaaatccactatgacatctaagttttgtgtacagagagatatttttgcaactatttccacctcctcccacaaccccccacactccactccacactcttgagtctctttacctaatggtctctacctaatggacctccgtggccaaaaagtaccattaaaaccagaaaggtgattgg

SEQ ID NO: 293796 - DNA, 1000 bp, Homo Sapiens
ggtggttctgagccaacaggaacaggaagtggagtccactttgcgcaggaagtacaccctcattgacaggaatgactttgcagccatttctgctatccagaaggcggggcttgtggatgttgatggccacctagtgggtgagcctgaaggacaaaactttggactcggagtcgcccctttctctaccaaacctgggaagaaagccaagtccaagaagacattcaaagagccactcagctccttggcaagaaaggaaggtgccagcagccctgtgaatgggaaggacttggattacgtttccacctccaagacccagctggtcccatcctccaaagatggggatgtcaaagacatgctttcgcgggaccgggaaacttccagcattgagccccttccctcagactccccgaaggaggaattacgcccaattaggcccgacaccccaccctccaaaccagtggcctttgaggagtttaagaatgagcaaggtagtgagatcaaccgaattttcaaagaaaacaaatccatcttgaatgaacggaggaaaagggccagcgagaccacacagcacatcaatgccatcaagcgggagattgatgtgaccaaggaggccctgaatttccagaagtcactatgggagaagcaagacaggaaacaccacaggttactgggctttccctcgctaaatcacaaccctgttccaggccagcttccatgagtgatctccagatgtcacttggtttattcctgcaagtcagatgcatcatctcactcacagggggtgcattttactcatttatttctcagaggagcagggcgtggtggcacacacttgtaatcctagcatcttgggaggctgaggcatgaaaatcgcttgagcccaggaggcagaggttgtagtgaggcaagattgcgccactgcactccagtctgggtgacagatgaagactgtcttggaaaaaaaatataataacaattaaacaattatttctcagagggc

SEQ ID NO: 293797 - DNA, 1000 bp, Homo Sapiens; identical to SEQ ID NO: 118957

SEQ ID NO: 293798 - DNA, 1000 bp, Homo Sapiens; identical to SEQ ID NO: 224567

SEQ ID NO: 293799 - DNA, 1000 bp, Homo Sapiens; identical to SEQ ID NO: 224568

SEQ ID NO: 293800 - DNA, 1000 bp, Homo Sapiens
aaggtcttacaagtcccagatttctaccttacataaatctgttgtaaaaatggaagaggagcttcagaaggttcagtttgaaaaagtgtccgctcttgcagatttgtcttctactagggaactctgtattaaacttgactcaagcaaagaacttcttaatcgacagctggttgctaaagatcaagaaatagaaatgagggagaatgagttagattctgctcattctgaaattgaactcctgaggagtcagatggcaaatgagagaatctccatgcagaatctagaagctttgctggtggccaatcgagacaaagaatatcagtctcagatagcacttcaagaaaaagaatctgaaattcagcttcttaaagaacacctttgtttggcagaaaataaaatggccatccagagtagagatgtggcccagttcagaaatgttgtcacacaattggaagctgatttagacattaccaaaagacaactaggaacagagcgctttgaaagggagagggccgtacaagaacttcgccgccaaaattattcaagtaatgcttatcatatgagttctacaatgaagccaaatacaaaatgtcattcaccagaacgtgctcaccatcgatctcctgaccgaggcctagatcgatcattagaagagaatctttgctacagagatttctgacacctgaaatgattcttcacatccctgagaaaggtcaaagttacaaactgatttttttttttttgctacatgagtgcatttatcttttaaatgcttggcaatgttaaatgtatttattaactttgtgtctctgaatctctgttctaatgtgccatgttgcagtgatctgagatgacttataaaaacaaaaatgtatatggctctttctatccatgcagtgatagtgagtgtaaaatctgcttacttcactattgaacactattatgttcactatctggagtaaataaagaagcttattaaaacagaaaaaaaaaaaaaaaa

SEQ ID NO: 293801 - DNA, 1000 bp, Homo Sapiens; identical to SEQ ID NO: 224568

SEQ ID NO: 293802 - DNA, 1000 bp, Homo Sapiens; identical to SEQ ID NO: 118958

SEQ ID NO: 293803 - DNA, 1000 bp, Homo Sapiens; identical to SEQ ID NO: 220742

SEQ ID NO: 293804 - DNA, 1000 bp, Homo Sapiens
accaaatggaaaaagatgaacttctgagttacataaagaagacctaaaactgatggctactaaaaagcagagcatttctggtaagactaaattttctcccctccctcttaatgaggttttagagactacaccagaataaaagacagtttaggggacctctgtagaacaacaagggtcttattttgtgaattatatatttcaagaactaaacagagatccacctttctggatctgatttatatcactgaaatgtacagttcttttggaatagtttcacctgagaaaacatagttggctattatctatcttaacctgttcaggcttttaaaaaaaactgtttttgcatagggtagtactaagatcttaaaaagtggtaactgtcttgaagaaaaaacgtttattgtttgtttgcaattgaaataacagggttaccttaacaatgactgtctatgatgtgtcagttcttatctgaattccaaaataaacctgtgcttaaaaaagaaataattgaccaagtaagtttgcataaaatgtgaatactaaatgtgtccccagttgctggcattcatatgtacaggatttgttctagcaagctatgcttcagtatgtggttgatatttttctgtcacaatgatttctttatgcatgcagagcctgggaaagtcatgggattaacttgagggtcactattgagcctattaattaattaattattgttttaataaaacaaacattggtattggaagataaatatgtttatgtggtatctgacaatgtgtattaggtgtcatatacaatggtaatatgcctgtctttaaagtgttattttattaattaaaaggatatggctattattatatattctctaaagatttattctctaaagatttgagtcctaaatgctttcatcaggtaaataaaatgtataatacaaaaaaaaaaaaaaaaaaaaaaaaaaaaaaaaaaaaaaaaaaaaaaaaaaaaaaaaaaaaaaaaaaaa

SEQ ID NO: 293805 - DNA, 1000 bp, Homo Sapiens; identical to SEQ ID NO: 224570

SEQ ID NO: 293806 - DNA, 1000 bp, Homo Sapiens
caccaggtgaaccaagccatgatgagcaacctcacgcgacaggggtcgccagactgtgtcatccccttcctgcccctggagagctccccggcccagctcagctccgacacggccagcctgctctccgggctggtgcggctggacgaacactcccagatcttcgccaggaaggtggccaacaccttcaagccccacaggcttcaggcccgaaaggccatgtggaggaaggaacaggacacccgagccctgcgggaacagagccaacacctggacggtgagcggatgcaggcggcggcactgaacgcagcctactcagcctacctccagagctacttgtcctaccaggcacagatggagcagctccaggtggcttttgggagccacatgtcatttgggactggggcgccctatggggctcgaatgccctttgggggccaggtgcccctgggagccccgccaccctttcccacttggccggggtgcccgcagccgccacccctgcacgcatggcaggctggcacccccccaccgccctccccacagccagcagcctttccacagtcactgcccttcccgcagtccccagccttccctacggcctcacccgcaccccctcagagcccagggctgcaacccctcattatccaccacgcacagatggtacagctggggctgaacaaccacatgtggaaccagagagggtcccaggcgcccgaggacaagacgcaggaggcagaatgaccgcgtgtccttgcctgaccacctggggaacacccctggacccaggcatcggccaggaccccatagagcaccccggtctgccctgtgccctgtggacagtggaagatgaggtcatctgccactttcaggacattgtccgggagcccttcatttaggacaaaacgggcgcgatgatgccctggctttcagggtggtcagaactggatacggtgtttacaattccaatctctctatttctgggtgaagggtcttggtggtg

SEQ ID NO: 293807 - DNA, 1000 bp, Homo Sapiens
tgatatcacagattgtaccaactattaactatgttaaataagtattcagtttcatgtgatctctgggaaaaaaatatgctgccttggtgctaatattgtatgtatttaaatgatcatccgactcagaaatataaacacttttaatgaaagggaggaacggaaggacaatttccagtgcacagaatcacttggatgaaataagaccagctctttacccttatttttggatatgccttttttggaagagacttagactttatccttattgttgttagtgttgttaatattcgttgcttcagcccacggtgccttggtctctccacaatcaaatggaggatcccccaagcagcttcattacagagtgatattgggaaagtgagatcctctcaccattttgccaagatactctaaaatgacatccaagtttaccagtagaaagacacaggatgcacagaatgggcatgaccttcagctcacgagcacacctggagaaattcagaaccaggttctgaatcatcacgattgccttttgcatgaaaacatcggctggtgatgtgacttctcttcaggccatgagcctaacaccctgccggttttcatgcccgctgcagtaatggacgtttgtgtgaagaaatgaactgtggagtacaaaatgctttgagtctttccgattgctcattaattcacttttttgttacttctttccaaaatggaagtgctgaagccatggtctttctgcccctccaagctgatgaagggaagcctttgccaatggcccatggaagacacttggtttgagaaaccctgcccacttccaaagaccaaagagattaggaaaagcctggcagtattctccaactccaaacaagctctagagtgctccaggaaaagttatattcagtatatgaataagtgttattctccattattaatgtgttctgaaaatatattatgaataaatacatcaccacacccaaaaaaaaaaaaaaaaaaaaaaaaa

SEQ ID NO: 293808 - DNA, 1000 bp, Homo Sapiens
aatggaactagaaaaggcagagatggaacgatctacctatgttacagaagtcagagagctgaaagatctgttgactgaattgcagaaaaaacttgatgattcatattctgaagcagtaagacagaatgaagagctaaatttgttgaaggcacagttaaatgaaacactcacaaaacttagaactgaacaaaatgaaagacagaaggtagctggtgatttgcataaggctcaacagtcactggagcttatccagtcaaaaatagtaaaagctgctggagacactactgttattgaaaatagtgatgtttccccagaaacggagtcttctgagaaggagacaatgtctgtaagtctaaatcagactgtaacacagttacagcagttgcttcaggcggtaaaccaacagctcacaaaggagaaagagcactaccaggtgttagagtgatcatcctctggcctaccttgacacatgctctccttcaaaatgctaattcagagtgaagtaattgggaaactgttcatttgaggataaaaaaggcattgtattatattttgccaaattaaagccttatttatgttttcaccctttctactttgtcagaaacactgaacagagttttgtcttttctaatccttgttagactactgatttaaagaaggaaaaaaaaaagccaactctgtagacaccttcagagtttagttttataataaaaactgtttgaataattagacctttacattcctgaagataaacatgtaatcttttatcttattttgctcaataaaattgttcagaagatcaaagtggtaaagacaatgtaaaatttaacattttaatactgatgttgtacactgttttacttaacattttgggaagtaactgcctctgacttcaactcaagaaaacacttttttgttgctaatgtaatcggtttttgtaatggcgtcagcaaataaaaggatgcttattattcaaaaaaaaaaaaaaaaaaaaaaaaaa

SEQ ID NO: 293809 - DNA, 1000 bp, Homo Sapiens
gttctgtaagataaactgtatatttcatatgtacctgttaaggtactttttaaagcttgtacatgaacctttgtataaaaaacaccagtgctctttcgttgtatttttctcatttttgctttttaaaattcctttaaaaaatgtgctgttaagccagtattaggtatctttattttgtaagtgaacattccagctgtttttttctggcagatctgatgctgatttgatgctgtatgatcttttttttttttttagttaaattcatttagtgaatgttctattattttatacatacacattaagtactcagctaagtaatggcactatgaggattttttttttctttcctgtcagcagcagttctgtgaatgcatcttaggtataaaaatgcaatacagatttttatattttggtgtggacatggctcattttgttttaccagttatttgcaagcaaaatgtaatttaatgtatagatgatttctaatgtctcctgacaaactgtaaatactgcatttcttttgcgtatataattgcttacagcttttctcatttgatatatagcattgtacatatgacaagtcttttgcaaaactgtgtgatctttgtgaaagtagtacagtatatgacctttaatttcttttttattttaaatatactgtcacactgaagcactggttgggcattttaattcatgttaataaatcacaattatgtcagttttaccagattgtcctgtacaacttctaagatcgggatctgtgtgtttctacagaagttctagttttcaaatatagattgtaaggagccttcaattttctttagcgactactacctcagcaacaggaggcagcaaggggctgttcctgtggtggtttctgtttgcatttttgcaggagccataggaaactactgaaatgattgtgctgggtaaattaaggatctggcatcatacaaaatgaagccagaccactaatgcattacagtagttcttgaataca

SEQ ID NO: 293810 - DNA, 1000 bp, Homo Sapiens
cccgggagaaggtccgtcagttggaatccaatcttcttcccaagcaccaaaaacatctaaacccatcaggtaccatgaatcccacagagcaagaaaaattgagcttaaagagagagtgtgatcagtttcagaaagaacaatctcctgctaacaggaaggtcagtcagatgaattcccttgaacaagaattagaaacaattcatttggaaaatgaaggcctgaaaaagaaacaagtaaaactggatgagcagctcatggagatgcagcacctgaggtccactgcgacgcctagcccgtcccctcatgcttgggatttgcagctgctccagcagcaagcctgtccgatggtgcccagggagcagtttctgcagcttcaacgccagctgctgcaggcagaaaggataaaccagcacctgcaggaggaacttgaaaacaggacctccgaaaccaacacaccacaggccttgctaccggagcagcgagcagtgcacgcagattcctacagaaggattgggcacctgtgaaaactgggctgctattgatggcatttcttaccatggcagacagatgcacacacccacccatgcacacacaccacacacagagacataagctaagatatgttggaattaagtgctcttttaaattattttattatttttactgttaaacctttgcagtattatgtctcttatttatttatgtagaaatgacagatcttgtgaatcaaattcacaaacatcagcttgttacaaatcattttatttataccctttaaagagtgtggatttaagattcttgaaaggatgtagtctatatattttctcattccatatgttgtaactatttttaaccaaaggtactacttttatatatggaatttgaagaaaaccaggggtatttatactgttttgtataagatgtacaaatctttttgacaggaaatttttgatgaaacaataaaataaattttaagtataaaaaaaaaaaaaaaaaaaaa

SEQ ID NO: 293811 - DNA, 1000 bp, Homo Sapiens; identical to SEQ ID NO: 224571

SEQ ID NO: 293812 - DNA, 1000 bp, Homo Sapiens
ggctattcagccattccattttactctctatttaaaggccgtgagcaagcttgtcatgagcaaatatgtcaagggagtcaatttctgaccaatcaagtacactaaattagaatatttttaaagtatgtaacattcccagtttcagccacaatttagccaagaataagataaaaacttgaataagaagtaagtagcataaatcagtatttaacctaaaattacatatttgaaacagaagatattatgttatgctcagtaaataattaagagatggcattgtgtaagaaggagccctagactgaaagtcaagacatctgaatttcaggctggaaaactatcagtatgatctcagcctcagttctcttgtctgtaaaatggaagaactggattaggcagtttgtaagattcctcctaactttcacagtcgatgacaagattgtctttttatctgatattttgaagggtatattgctttgaagtaagtctcaataaggcaatatattttagggcatctttcttcttatctctgacagtgttcttaaaattatttgaatatcataagagccttggtgtctgtcctaattcctttctcactcaccgatgctgaatacccagttgaatcaaactgtcaacctaccaaaaacgatattgtggcttatgggtattgctgtctcattcttggtatattcttgtgttaactgcccattggcctgaaaatactcattgtaagcctgaaaaaaaaaatctttcccactgttttttctgcttgttgtaagaatcaaatgaaataatgtatgtgaaagcaccttgtaaactgtaacctatcaatgtaaaatgttaaggtgtgttgttatttcattaattacttctttgtttagaatggaatttcctatgcactactgtagctaggaaatgctgaaaacaactgtgttttttaattaatcaataactgcaaaattaaagtaccttcaatggataagacaaaaaaaaaaaaaaaaaa

SEQ ID NO: 293813 - DNA, 1000 bp, Homo Sapiens; identical to SEQ ID NO: 222448

SEQ ID NO: 293814 - DNA, 1000 bp, Homo Sapiens; identical to SEQ ID NO: 220957

SEQ ID NO: 293815 - DNA, 1000 bp, Homo Sapiens
ctggagggagagttaggaaacaccagctcctgcctggggcagtgagggaatgggagcagctgtgggcgcctcatttcaggcaagtcctccccaaaccttcagatgcagtgagacctggccttcctgttgtgcttttcagactttgttttcagaatgcttttatctcgagtgtgcccttcggccctcacaagagcccctggggagtaggtggtggcctgtgccgtcatccccatttcaaagcagggagctgaggtcctgggaggggaaagtgcttgcctgaggtcccactgtgttagtgggtgggcaggactggaactcggttctccaacagcccagagctcactcttttacacccagaggtggagcaggtggcttagggggtggttatgtacttcacaagccaattcccttcagccaggagctcctgggtgcatttccgtgtcagaaacagtaccgagtcccaccccctctggaggcacagctgttgcgtcaggcaaggtcacctgcatttatttattgagcagcagtgctgtgtcaggcccagggaccgagcccctctccctgttcccctatggtgtctccgaggccctctgggagggccccacatctggagcagcacctcagagtggacagaaagcattagcgtccacgagctcacccgacgccgagcctgtgaggtgggctgatggtgcccgtctaacccagcgcttcagggaggtcagaatggagccgaacccagggctgtgagcatcacctctggagccctttcactttatgactgcttcctggacgggtggtgggaaggcaggagcctgggtccttaggctgggggcctctctccatccacccacctttccctcattccctctcttggagcagcagccgcccaggcctttagggagggagggtttctggggcccttgggttggagtggggtcgcgttgcattgtgttcatgaccatgtagctcatgttgaaattaaagtttttggcttttctaa

SEQ ID NO: 293816 - DNA, 1000 bp, Homo Sapiens
atcatgtcaatataatagagtaagatacactttttagcagtgaacttttaaaaaattcttttacttttaacttcttgtcaatcaaagtatcctgaaaaatgatataaaaatgttattgaaaatattatttatgaagctttttcttaataattaaaaaaaatcttttctaatgtggggtgctatgtaaattagcaaagcagtctaactagaatggattttactgaaccagtctaacatttactttccaagaaacattcaggacatattcctttaattctaattttaaaggaagagcatattgcaataataaaaatatttttaaaattatgttcaggttatttattgacaggtactacttacaccaaagcacttgtgctctaggctagaagcattgtattaaagccatgaatactatacctttgactagtcgagattgtatttatattttcctgttactactgtataaagcttaaacctacttaaacaactacaagctttaaggttgaccatatttcaggagaaggggtgtctactttttgaggcacaaaggttcctgctgaatataagtaaaactagttagtagacatgtgaaacagtcatccttctgcataaattgaaggatccggattccttaatgatggactgaatgatgcttactttccttctttctgcttccagtgtaccactatggtttatagtaaagaaaaattaagaaagtgaacagttgcaactattttgcttatgtgatagatgttttgaaaaatgtagttggaaataggaataatttttatatggttactaggattcagaagtaaatctatttagtgatctgtaaataattgaagtaatgtaacacttaatgttttaatatgtcagttattgcccttttatattgtgaatgtaatgtgcataagctatatccgtagatgttattgttttatctcatgtgtaattgtgggcctttataaaattgtgttgtaagataaaaaaaaaaaaaaaa

SEQ ID NO: 293817 - DNA, 1000 bp, Homo Sapiens
aaagggaagcaggcttataaggaacaaataaaaagagagagtgtcttgactgctacaagcattttaaataatccaatagtgaaggcgcgatatgaacgttttgttaagggtgagaatccttttgaaattcaagaccattctcaggatcagcaaatagaaggagatgaggaggatgaagagaagattgatgaacctattgaagaagaggaggatgaagatgaggaagaagaagcagaggaagtgggggaagtagaggaagtggaagaagtagaggaagtgagagaaggaggaatagagggcgagggaaatatacagggagtaggggaaggaggggaagtaggggtagtgggagaagtagagggagtgggggaagtagaggaagtagaggaattagaggaagagacagcaaaggaagaacctgctgacttccctgttgagcaacctgaagaaaattaaatataaggtattagatttaaaaggagctttacatttcggttctaatgtaaaaaagggtaagaaatttaatagcttaaaatatgaattaacacccatgttgcatgcattccacatattaaaatttgttttatataatttctaaatgtttaacatttgtttaataaaatgaaggcaaaactattttagtttagtttttatagctaccagacttagatccgataaattgtttgtataatttttaagcttaatttttattactttattggtgttaaggataacaaatgtgtattgttagtatatctattctaatcattttatcttaaatgctgctcttgggagtgaatattcaagtgtgcatcaattttttgaatacttaccctggaagatataaactgggcaagtattttgtgctctgtgtatttttttactgcattagacattgaatagtaatttgcgttaagatacgcttaaaggctctttgtgaccatgtttccctttgtagcaataaaatgttttttacgaaaaaaaaaaaaaaaaaaaaaaa

SEQ ID NO: 293818 - DNA, 1000 bp, Homo Sapiens; identical to SEQ ID NO: 224574

SEQ ID NO: 293819 - DNA, 1000 bp, Homo Sapiens
cttcccacctcagcctcccaagtagctgggactacaggattttcaaaatggctgcagctcctcaagcaccggggcggggatctctccgtaagacgagacctctggttgtgaagacgtcgttgaacaacccatacatcatccgctggagcgctctggagagcgaggatatgcacttcatcctacagacgcttgaggacaggcttaaagctattggacttcagaagattgaagataagaagaaaaagaacaaaacaccttttctgaaaaaagaaagcagagagaaatgcagcattgctgttgatattagtgagaatctgaaggagaagaaaacagatgctaagcagcaagtgtcagggtggacgcctgcacacgtcaggaagcagcttgccattggcgttaacgaagttaccagagccctggaaaggagggaactgctgttagttctggtgtgtaaatcagtcaagcctgccatgatcacctcacacttgattcagttaagcctaagcagaagtgtccctgcctgtcaggtcccccggctcagtgagagaatcgcccccgtcattggcttaaaatgtgttctagccttggcgttcaaaaagaacaccactgactttgtggacgaagtaagagccatcatccccagagtccccagtttaagtgtaccatggcttcaagacagaattgaagattctggggaaaatttagagactgaacctctggaaagccaagacagagagcttttggacacttcatttgaagatctgtcaaaacctaagagaaagcttgctgacggtcggcaggcttctgtaacattacaaccccttaaaataaagaaactgattccaaaccctaataagataaggaaaccacccaaaagtaaaaaagctactccaaagtaatcttgcataaacttgtcatgtcatacagtttgtgaaaggacaccttgtaaagaagccttgaaactaataaaatgagttatacccagaaaaaaaaaaaaaaa

SEQ ID NO: 293820 - DNA, 1000 bp, Homo Sapiens
cctcacgcgcacacacacacacgcagatggaggcgcctcactgggaggtgccccgccagccctgggcagtgtcaggcaggactcactcaccgctgagcagatgagagaagttttagtcttggcgggtggaaatgagacgaagccacagttatcacactccagactcctgcccttttattttctccagccccttcttccttcagcaaaatctaggactcccgagtggcttccagggggccgtcagtcctcagccgcgcctgtgtccggtgcccgaggggcgggcggcggtgtctgtatgtatgtgtacatatgcacatagaccttagagtgtatagttaacaaacgcccatctgctcacccatgcccacccagcgccgccgccgctggctctcggggcacctggcaggaggcgggtgtgtgaatagcatatatttttacatgtactatatctaggtgtgtgtacaagtgtgtgtaaaaatatataccttgtgtgtaagcagccctttttttttttggtctccacccccctccccccgccccgcactcctaagggcccatctgcccagcctctgagttttctgttctattttttttttaaccccaattatccttctctctctcctgcccccgcatcccactcccagggtgtcacgagccctgagctgcaatggcccgggcctgcagggcggggtaggggagggcaggggctcagccccgaagccagctcagtacctgaggggctgctctatgctgtgtatgcgcctctctggcatccgagacatcctcttggctggcgcttgctgcaggggggaccccccccccgtccccaggtgaaccaagggtctgctccggggcccatttccagcttggccgccgtctgtgaccttgggcaagtcacttgacctctgtgtgcctcaacttcctcctctgtaaaacggggacagtccctgcccctccctacctcacaggcatgttgtgagaataaatgaggtaacgtgta

SEQ ID NO: 293821 - DNA, 1000 bp, Homo Sapiens
gccaggggactcattggcgccccctgaggtggactttgacaggctgctggccagcctgcaggatcttagtgagctggtggtagagggtgacacccaagtgacaccagtgcccggcggggcacggctgcgtaccctcgagcccatcccgctgaagctctaccggaatggcatcatgatgttcgacgggcccttccagcccttctacgatccctccacacagcgctgcctccgagacatattggatggcttctttccctcagagctccagcgactgtaccccaatggggtcccctttaaggtgagtgacttgcgcaatcaggtctacctggaggatggactggaccccttcccaggcgagggccgtgtggtgggcaggcagcggatgcacaaggccttggacagggtggaggagcacccaggctccaggatgactgctgagaaatttctgaacaggctccccaagtttgtgatccggcaaggcgaggtgattgacatccggggccccatcagggacaccttgcagaactgctgcccattgcctgcccggatccaggagattgtggtggagacgcccaccttggccgctgagcgagagaggagccaggagtcacccaacacaccggcacccccgctctccatgctgcgcatcaagtctgagaatggggaacaggccttcctactgatgatgcagcctgacaacaccattggggacgtgcgagctctgctagcgcaggccagggtcatggatgcctctgcctttgagatcttcagcacattcccgcccaccctctaccaggacgatacactcacgctgcaggctgcaggccttgtgcccaaagcagcactgctgctgcgggcacgccgagccccgaagtccagcctgaaattcagtcctggtccctgtcccggtcccggtcccggccccagtcccggtcccggtcccggctccagtccctgtcccggacccagtcccagcccccaataaagcacccgccccctc

SEQ ID NO: 293822 - DNA, 1000 bp, Homo Sapiens
gagaagagaacactgtgctgtcccccgccttaggtagggttgacaaacttgcattagctgaaccagggcagtatcgatgccactcccctccaaaggtgagacgtgagaaccatctgccagtcacttacgcataaacccccaagctcacagccagctcctggctccctaaccccacggttccacacggctgtgtggcagctgcaacagtggtgtggttccgtcatgaattcttctcaaagatttgacatgctccactccggtaactttggtgagttgagagctttcttgtttgttttccctcctttaccacccagaaatccatttgagtctgctccttgtggttaaggactggcgtttgcagggaggtgcggactctcctgcggggctcacgggaaactcttccctcttcgtgcgacaggcatttaggggcgtgcctgccatgggcaaagccatggtgtgtgttcagctcttggcctgtgttgtaaacttagttgcacttcagttcctttcatcccttcacaaaattttgtttcacattcatgcagcaaatatgggctgaggtgccagacctgtacctgggcttggtgcgtttcaaatttcagaccagttctttgggctgggtcaaggcaaagctcagtcgtcccagcagcacctcagccatctgtagaaggttctaccattaccacggtttcagcttcctctaaacttctcacccgcttctcctggcaatctgtcagaacggtgtcatcctggggaagagaaggagcttgggtgcatttgccctcatcctgagaaggccagaatactggagaccagcgtgaaccctcacccagagtcaggggaagatttagaaacagtgacacctgcatatagaattttgattccttgaagagcctatttagttccataaaattggagaactgctgaaggtcagtaattccgactttctcagcagtggtgtctctgaattactgcaaagggtaaaaaaaaaaaaaagaaa

SEQ ID NO: 293823 - DNA, 1000 bp, Homo Sapiens
ttgtgattagctaaccaggatgaaaaataacagattatatatagtttgaactatttttcgtgtgcttttttaaacttgttaaaaagaaatttatataaaatttaaaatacaaatgttaaattatccagaaatacagaatagttaatattgctagaaccaaataacctctaaaatgtttttattttggtaattttgtcatgctaagcacttttgtatctgcacaattcagtaggttaagaatcaatcttctttttcttaatagtacagcagactttagcttcaagtttcataggcttagtacttatatctagacatttgtgtctaaataagcttttcattaactttttattttaaggacagtatcttttcatgaaagagtatttggctgaatgtttgctatatatatgttacttgaaatgttaaatttaatatgcagcataccataggtgtatatataggtatataattttaaggttaaaatattcagtctacaagtttggttcttatttaagcttttgggctaatactgcatatggcacaatgtttaatattggcaagttcatctcagagaaaggggattcagatataattttaaagtagagataatttactgaagcgtctctgacaatctaacttattagacagcaagcaatatataatactgaaaaagtattcagaaatggaaaatttacatcatataggttatttaacttgtgttcagcctttttgtaacttttttgaaagtgcaaacaattctttggattattaaataaggtatacagtatgcatggtttctcaaatttagttttaaaatctaaaagtctataaagaatcagatgcataggcaatatgttaagttcacttggaggctaaaaatctccagtgaaaacaaaacgaaaacctttaagagaatgtagagtttatataaacacaaagtatgcattgaagatctgtttctaccaataaacattaaaacaaagactgtaaaaaaaaaaaaaaa

SEQ ID NO: 293824 - DNA, 1000 bp, Homo Sapiens; identical to SEQ ID NO: 118960

SEQ ID NO: 293825 - DNA, 1000 bp, Homo Sapiens
gagacatgttttattcccaaaactcacttgtatgatgcttttgagcaatgctctcctctcattaaacaaaaaatgtggctaaaacttggactcgctattacagccagaaaaatcagagaacacttatcttatgaggattggaactacaatatgcaactaaagctctctaatatttatgtagtagatataccaatgagtaccaaaactgatatttatgatgaaaatctaatctatgttatcctcatacatggagctgtagaagattgtctgttacgaaaaacttatagagcacctttcttaattcctataacatgccatcagatacaaagtattgaagatttcacaaaagtagtgattattcaaactccgattaacatgaaaacattcagaaggaatattagaaagtttgttcctaaacataaaagttatcttacaccaggattaataggttcagttggaacattggaagaaggcattcaagaagaaagaaatgttaaggaggatggagcacacagtgccgccactgccaggagtccccagccttgctccctgctggggacaaagttcaactgtaaggagtcccctagaataaacctaaggaaagtcaggaaagagtaagactgttaagaagaccgaagcatgtattaatgctgtggctatgagaggcctcctgctgcagaaacacacttccctacatcaagaaggagtaacttcaggttggatcctgtgtggatgatcttggtgctaagcagaaaagaaatttggaccttgaaaccagcagttcaacatatatactttttgcaaaatttccttgatttaaaatatttgttattttaaatatacaaaacattttagaaaatcttagagtaaattttagtcttaaagccagaaaataagtttatagccatctagatattttgcatattgctcttacagcaataatggtttggttcactttatgaaaaataaaatgtattaaaatataaaaaaaaaaaaaaaa

SEQ ID NO: 293826 - DNA, 1000 bp, Homo Sapiens; identical to SEQ ID NO: 291488

SEQ ID NO: 293827 - DNA, 1000 bp, Homo Sapiens
gaaaagatccagagtggctgttactttgaaaattaaacgaaagatgaaattctgaacttaaaacacttctgtttggccttctataactgatcacccttctttgctctgttttccagataaatggagacaccagatctccctaacctctgacttctgccgttagccatactctgtgtagttagatctcagtctgggaatggcattccagggcaattgtgaacatgaggctagatttttcctttgatttagcacattcctaggcagacttttgcaagctcaaaaaatgaaaataatatctgcttaaccaaaacataatcataggaagaagaaaaattttaaaatgattgatttttgactctacattctttatctaccatactgctcttttcctttttagaaatattactaagcactttccgtatagataaatgaaatacaggctaatctttaggtgtcttaggaatttttgctttttgaaaaagaaaagctaatagcctaactgcagaggaactgagtggatggggtagctgctgtatagatttttagatgagatgatacagtgtggattacactgtaccttgggcgggagagtttgttcttgatatggaattcatatgcttttgaattgcactaataactcagcattaacaagtatattactccttaaattatacatgcattttcaatattcctaaccaaatagtttatagcttattgagaagaagtctgttcttggagagatgttgaaattagatgtttattaaactttaaaatataatgccttaagctgtggcactttaaaaacatctttatatataaattgctaaaaggactgttaatgcttttctcagacacattggcattttacaattttgcacatggtttatttgaaatcaaaaaataactatactttgttttataagtctacctaatatctcatttttgattctcatcgttagcacagttttgttgcttttattaaactattttaaaaaaaaaa

SEQ ID NO: 293828 - DNA, 1000 bp, Homo Sapiens; identical to SEQ ID NO: 221412

SEQ ID NO: 293829 - DNA, 1000 bp, Homo Sapiens; identical to SEQ ID NO: 224577

SEQ ID NO: 293830 - DNA, 1000 bp, Homo Sapiens; identical to SEQ ID NO: 224578

SEQ ID NO: 293831 - DNA, 1000 bp, Homo Sapiens
tgttaccatctgctacatatataaatagacttgcagttattactaagctcctcttcagtaatagaaagacttatgaagtcttttactacctctgggttagccaaacaaccttcaaaaagcattgttatttaggttaaatatctgtggacaagaaacaagataatcagttactgagtgaagaaagacgggaatgatgtcccatacttcccagctctctaaagtgttatgctgtacaattaaaatacccctgacccatcatctgctaccattcgttgtggataattcatgtaatctctaacctgtgggcaagtctttacccttcagtagtcaagattacgttagagacttcgtccacgaatccacaccacctttcccatcagttctcaccggaaatatgctgccaaaaagaaaatcagcttttctaagatcaagccagagttgcttctcttacaaccttacggcgctaatgcattaagttgaagtcgactgccaaagaggcccagcagagggcagcacccccatcatttttttgaatttctcccttaggaattttgccttcctttgtcttctgtccaccaggccttctctccagctggacacaaacctcctttgacgggaaataattgccgttaggcttcacagtagtgctttttcctttcacttggatttgcattttaacctgcatttcgaagatttttatacatgttttctatttccgacaatgccaggaggcttcattgacgttgtagtctgtgttaataaacttgtgtatcactctgctctgatcttttaggaattaacttgcaaatgaaatgaatatgttgggactttggcataatttgaatatagcattgtgtgagttgtgattgtctcttcctaattgtgctgtaataacctgtgtatgagaataaaatgatttccaccaaaaaaaaaaaaaaaaaaaaaaaaaaaaaaaaaaaaaaaaaaaaaaaaaaaaaaaaaaaaaaaaaaaaaaaaaaaa

SEQ ID NO: 293832 - DNA, 579 bp, Homo Sapiens
atgactgccgtcggcgtgcatgcccagaggcctttgggccaaaggcagccccgccggtccttctttgaatccttcatccggaccctcatcatcacgtgtgtggccctggctgtggtcctgtcctcggtctccatttgtgatgggcactggctcctggctgaggaccgactcttcgggctctggcacttctgcaccaccaccaaccagagtgtgccgatctgcttcagagacctgggccaggcccatgtgcccgggctggccgtgggcatgggcctggtacgcagcgtgggcgccttggccgtggtggccgccatttttggcctggagttcctcatggtgtcccagttgtgcgaggacaaacactcacagtgcaagtgggtcatgggttccatcctcctcctggtgtctttcgtcctctcctccggcgggctcctgggttttgtgatcctcctcaggaaccaagtcacactcatcggcttcaccctaatgttttggtgcgaattcactgcctccttcctcctcttcctgaacgccatcagcggccttcacatcaacagcatcacccatccctgggaatga

SEQ ID NO: 293833 - DNA, 1000 bp, Homo Sapiens
actttgttcaaagcacacaaagcagtccttttagcaagagttcctgacttctattttcatactattggacagacatcaaatagtttaacaaatcaggagcctattgctgtggagaatgttgaagctttagaatttagaacgtttttacagattatatattcatcaaacagaaacataaaaaactatgaagaggaaattcttaggaaaaagataatggagattgggatatcacaaaagcaacttgacatcagttttccaaagtgtgaaaactcatctgattgttctcttcagaagcatgaaattccagaggatatcagtgacagagatgatgatttcatttccaatgataattatgacttggagcctgcatctgaattaggagaagatttattgaagctttatgtgaaacctggttgcccagatattgatatttttgttgatggaaaacgttttaaagctcacagggccattttgagtgccagatctagttattttgctgcaatgctgagtggctgttgggctgaaagctcccaagagtacgttactcttcaaggtataagccatgtagaactgaatgttatgatgcattttatatatggaggaactctggacattccagacaaaactaatgttggtcagatactcaatatggctgatatgtatggactagaaggattaaaagaagtagcaatctatattttaagaagagattactgtaatttctttcagaagcctgttcccagaacattgacgtctatactagaatgcctgattattgctcattcagttggagtggaaagtctttttgctgactgcatgaagtggattgtaaagcattttgcaaggttttggtctgagagaagctttgcaaatatacctcctgagattcagaaaagttgtcttaatatgttgattcagtccttagtaaatataacctgaatactcttttgtgtgtttgccattaaaaagtttatgcaaaaaaaaaaaaaaaaaaaaaaaa

SEQ ID NO: 293834 - DNA, 1000 bp, Homo Sapiens
ttgtggccctgggggtggagatggggtggcctagtggacctggcccatctgccactctagtccctgcagctcaacgtcctgcgtgaatgcagcagccacccccgtcttggcccaggtcctgggggctgctgaacccagcaccagtgtccccttgtgcccagggggcccagtcttctgtggggtgcacagcctccctccctccagcaagccctccctgcccagaaggaatgggtccaggtgtggattcccagggagggggttcattggctcagcttgggtcagggcagagcctgttacctgaagagaggtgagaccaaggccacagggagctccaccttctctggtcttcagtccagcactgggtgcccatccccatctctaaaaccagtaaatcagccagcgaatacccggaagcaagatgcacaggcgggcggcttcccacacacccgtcacaagacgcggacatgcaggtctcggcgcgagctctgccccgtccaagagcctctccgctgtcgcccagtgtgagcctggaagaggacccaagagagtgccgtgctgaggctgcctcgaggtcactgccttccggagctgcgcctattcctccctcgccaaacgcgttccagaatttgtccacaggtgcgccggcacctgctttcccacctcgaggccgcggcctcccccccgatttatagacaactctgacattgtcaccccactgacgaggcccgattccatagggtggatccttgccaggcgtccctgatcctccctgcccaagtcttccttcgtgagctggccttgctccccatcccccaagtgcctcaccagtcccccagactgggtgaaggtacagctggctcctttcgggggtgcagcttcaactctctcggcggtagggcggtgccatccccacccatagggctggctcacatccagtcactcccaacagcgtccagcacacaaataaaagacccttgggccctggctctgagaaaaaaaa

SEQ ID NO: 293835 - DNA, 1000 bp, Homo Sapiens
taaggaagaggatcaaggagaaggctacttgtcagaaatggataatgaacctcctgtgagcgagagtgatgatggcttcagcatacacaatgctacactgcagtcacacacactggcagactccatccccagcagccctgcttcttcacagttctctgtctgtagtgaggatcaggaagctattcaggcacagaaaatttggaagaaagccatcatgcttgtatggagagctgcagctaatcataggtatgccaatgtcttcctgcagcctgttacagatgacatagcacctggctaccacagcattgtgcagaggcctatggatttgtcaactattaagaaaaacatagaaaatggactgatccgaagcacagctgaatttcagcgtgacattatgctgatgtttcagaatgctgtaatgtacaatagctcagaccatgatgtctatcacatggcagtggagatgcagcgagatgtcttggaacagatccagcaattcttggccacgcagttgattatgcaaacatccgagtctgggatcagtgctaaaagtcttcgagggagagattctacccgcaaacaggatgcttcagagaaggatggaggaaccaggggacgccgctgtgccattgaagcagatatgaagatgaaaaagtgaagcctcagagttaccctctttgagccgaacctaaaataaaagtaaacaagatagagcttgggcttgcgggcccagttccagaggtggaagttacagaagaggaggtacctgggccacacgacatgagctggaaaatctctcttagagagttggagtagcacaattgcctgttttagggcagaaaccatgggctatgttaatgtcctaatgtgtagctagcagatcgtagctagtttgtattgtcttgtcaattgtacagactttttaaaaaaaacaaccaccagtgaaatgtgtgtgtatacaataaactgaaaaaaaaaactaaaaaaaaaaaaaaaaaaa

SEQ ID NO: 293836 - DNA, 1000 bp, Homo Sapiens
agaagccacagtccttcagcctccaattggtgtcagtacttaggaagaccacagctagatggacaaacagcattgggaggccttagccctgctcctctcaattccatcctgtagagaacaggagtcaggagccgctggcaggagacagcatgtcacccaggactctgccggtgcagaatatgagcaatgccatgttcttgcagaaaacgcttagcctgagtttcataggaggtaatcaccagacaactgcagaatgtagaacactgagcaggacaactgacctgtctccttcacatagtccatatcaccacaaatcacacaacaaaaaggagaagagatattttgggttgaaaaaaagtaaaaagataatgtagctgcatttctttagttattttgaaccccaaatatttcctcatctttttgttgttgtcatggatggtggtgacatggacttgtttatagaggacaggtcagctgtctggctcaatgatctacattctgaagttgtctgaaaatgtcttcatgattaaattcagcctaaactttttgacgggaacactgcagagacaatgctgtgagtttccaacctcagcccatctgcgggcagagaaggtctagtttgtccaacaccattatgatatcaggactggttacttggttaaggaggggtctaggagatctgtcccttttagagacaccttacttataatgaagtacttgggaaagtggttttcaagagtataaatatcctgtattctaatgatcatcctctaaacattttatcatttattaatcctccctgcctgtgtctattattatattcatatctctacgctgcaaattttgggtctcaatttttactgtgcctttgtttttactagtgtctgctgttgcaaaaagaagaaaacattctttgcctgagttttaatttttgtccaaagttaattttaatctatacaattaaaaccttttgcctatcaaaaaaaaaaaaaaaaaaaaa

SEQ ID NO: 293837 - DNA, 1000 bp, Homo Sapiens
gcctcccccgcctcagctgttcactgccagctctgatgctgtccactgtgctggcccccatggtcacagctgctgacccagctctggaactcccagacgtcccaggccccactgacgccaggaggcctgggtgtcctgcaagtggagcagcaggggctcctagtgggccaggctgaccgcagagtctccagcaagctgaggtcacagccggaggccacagggcctgtgttctgagggtcttcactccctgcttggtgcccacagggctgcgcactgccagggcagggacagttcctgtggggctcgctctcactgctactgcttcctgggaggtgcatccctcttggtgaagtggcctagtgccccccagccaccctgactccccaccattccctcccacggcaaacgcacaaaacgtcttgagggagattttgacaagtcacccattccaggtgccacaggcaggggatgtttagtaatccaggatttctctgagaactgggatatgtggcctttttttttttctttttatcttttatctggaaactgggtttgggtcaaccccaggagtatttgcagaaggcccagcacagtggggggtattggctgcagggcagggaaggcattgccgactagataaccgtgtgagcttggactgagcgttggtggttcttcccaaaggaaaggaatttctcccggcctgccaggtctctgggccttcagcgcgggtcctggtgctgcggccacaccaccctggggtgctcattgacagagctgccataatgaacttgaaaggacgggaatcacgagggaagctggggctcccctgcccacaggagaggatccccgttcttcaagcttctctgctcagtgtctactaacgaccgacatttgctaatgtaaataatagtaaattattgagaattctaattcttttacacagtctgtttttaatctattttaattaaataaaatctatgactctaaaaaaaaaaaaaaa

SEQ ID NO: 293838 - DNA, 1000 bp, Homo Sapiens
atgtatgcttttcatcctctgggcttacctctctcctctgcaatcctggaagcattgtgcatagttctttcattgtaagccgctatttaaattcccacaatgcaaaactgttagaccagtaattgtgctactgaaattgtcacaaaacgttattccttgatttggtttttaaattttgcttttgtgtgtgtgtctttaaacaggtaatgtgtatttaagtgttgtctaaacagttgatttttactttagaaaagatcatcttcaactgtttattgacttctgagttatatagttcatgccctgccaaggcattgttcgactccatgatactaaaacataatgaaagaaacaaactccagtatggagaagagaaagtttaattatttggttccatctagaaaagcaacaacttaaaggaatccttcactaggattgtcttatcacctttattagataaatcatgtagtgtccctgtgaaattgaagtgaaactatctctgtaggacttaagagaatagctaaaaggtgtgacttgccttattgaactgatactggcatatctgactgtaagcagtaggttgaagatatcattttatgaatgtggagaattctacattgaaacagaaaatacctgggaatgaagattaaaaatgtagctgctgttatttgcttggtgattcccctcttgctcttctttagtttgaaaaaacaaaaacgtggccttggaattttcattttgatgcagaaattttgaaattgaaaatgtgcatgttttggtgcacaaaatccttctgtgggcaaaactttgtttttgttttgcacagtaagaaacaataggcaagcgttatgtttttggtaagttaactatgaaagctttcttatttttattattaaaaatgtaacaatttaacccacaggaaaaaaaattactttgtatgcttgtttgaaccctatgggttcgttttattaataaaattattacacaaaaaaaaaaaaaaaaa

SEQ ID NO: 293839 - DNA, 1000 bp, Homo Sapiens; identical to SEQ ID NO: 224580

SEQ ID NO: 293840 - DNA, 1000 bp, Homo Sapiens; identical to SEQ ID NO: 118962

SEQ ID NO: 293841 - DNA, 1000 bp, Homo Sapiens; identical to SEQ ID NO: 224581

SEQ ID NO: 293842 - DNA, 1000 bp, Homo Sapiens
tctcacgcacctttacctgcgaggcaacactctcggagacaaggggatcaaactactctgtgagggactcttgcaccccgactgcaagcttcaggtgttggaattagacaactgcaacctcacgtcacactgctgctgggatctttccacacttctgacctccagccagagcctgcgaaagctgagcctgggcaacaatgacctgggcgacctgggggtcatgatgttctgtgaagtgctgaaacagcagagctgcctcctgcagaacctggggttgtctgaaatgtatttcaattatgagacaaaaagtgcgttagaaacacttcaagaagaaaagcctgagctgaccgtcgtctttgagccttcttggtaggagtggaaacggggctgccagacgccagtgttctccggtccctccagctgggggccctcaggtggagagagctgcgatccatccaggccaagaccacagctctgtgatccttccggtggagtgtcggagaagagagcttgccgacgatgccttcctgtgcagagcttgggcatctcctttacgccagggtgaggaagacaccaggacaatgacagcatcgggtgttgttgtcatcacagcgcctcagttagaggatgttcctcttggtgacctcatgtaattagctcattcaataaagcactttctttatttttctcttctctgtctaactttctttttcctatcttttttcttctttgttctgtttacttttgctcatatcatcattcccgctatctttctattaactgaccataacacagaactagttgactatatattatgttgaaattttatggcagctatttatttatttaaattttttgtaacagttttgttttctaataagaaaaatccatgctttttgtagctggttgaaaattcaggaatatgtaaaactttttggtatttaattaaattgattccttttcttaattttaaaaaaaaaaaaaaaaaaaaaaaaaaaaa

SEQ ID NO: 293843 - DNA, 1000 bp, Homo Sapiens; identical to SEQ ID NO: 224582

SEQ ID NO: 293844 - DNA, 1000 bp, Homo Sapiens; identical to SEQ ID NO: 118362

SEQ ID NO: 293845 - DNA, 1000 bp, Homo Sapiens; identical to SEQ ID NO: 224583

SEQ ID NO: 293846 - DNA, 1000 bp, Homo Sapiens; identical to SEQ ID NO: 288753

SEQ ID NO: 293847 - DNA, 1000 bp, Homo Sapiens
cattttcatcactgaaagtcagaggccaaggaaatcatttctacttctttaaaaactccttctaagcatattaaaatgtgaaattttgcgtactctctctctctatatatatagttcaaaaatactttaggtggtcagctccacattctttgttgacgtgacactaacggccaataatatgcttcttaattatcaaattatagtttcccaattgggaaactaattgggggtgggttacaaaacatttgatccttgtaaatacattgtacagaatatttattttttctcaaaatgcattttaactactacattggctgtgcccaaatgagtcctctttgaatagaaagtgaacccagggcaatgacagccattcttgtcttagggattatggatcggggtatgaagtgtgcacacgcagcccaacaacgggcagtggtctctgtgctcctaggcatccagcacaggttctggcagggcacccctgctggggttgggggctggtctgtgcataatcctggactgtgatgggaacagcccagtgcagtctaaacttcaattgtgttgaaactactttaatagacaaagtaataaatcatgtttatctattgatttaaacttcatcagttttgcatcctactgagaaatgttagtgattttgatacttaaatccttaaaagattgcttcgtttttaaaataacgcatgtccattttagaaaattagaaaatcagtcccaccacccaaagattattgtgcatgctgaaaagagtatgaaaaatcccctcagcaggcataggatagaaacgtattgttgtatatttccatttttgaatagggtcaaggagcccaagcaaatcatttctactttttcctttaagcataataataaaagtatacttttatggcgttataaaaaaaaaaaaaaaaaaaaaaaaaaaaaaaaaaaaaaaaaaaaaaaaaaaaaaaaaaaaaaaaaaaaaaaaaaaaaaaaaaaaaaaaaa

SEQ ID NO: 293848 - DNA, 1000 bp, Homo Sapiens; identical to SEQ ID NO: 118964

SEQ ID NO: 293849 - DNA, 1000 bp, Homo Sapiens
cctgttggagtcccattttctccatcagggcacgtgggcggcttcctcaagcccggaggagctcccaggcgcacaggggccgccggtaacaggggccgccggccaaaggcccctttccagtcatagcactgaagttgcaacttttttcttgtaattgttttgctactaagataatttcagaagttcagtctattttttcagcggatactgccgccaccaagaatccaaaacctatttttgacttggagagacttgcttttgttggttccgcccgtggagacgacgatagtgtttctgtataataaagtgtctgccggctcgcgggccaggatcctctcggtgggatgggcaccacagacaggaggcccctcaggcccgtgcgggccactgtctgctgccgcctgccggggtggcagagtgagttgtctcaggaccccgtcactgcgacgttgacactcctctcccttcccttcctccccaactccccaaacactgtggaaggggagaaggaagtgatccacagcattcaggccacttggggtctagaccatggtggtgccagcctggggggggcagtggccctcagctctgcccgctggagcggttgagtgcagaagggtgcgcctcttccctctacccccgcaccacctgctgtgtgccagcctgagacggttcctgcctgtcttgggggttggtggagggtggaggcagttctgccagccgtggcagggctgctatggggcatccagggctgtgggggtctggaggaggggacatgaggtgagaggtatcctggccgagggcggggggcagcggggggtctccctccggacctacctcagggagctgagcgtgcaggcgctccagggcaggcctgggacagagtcaaggctcagagaataaaggtagctaatctcatcataatatttttattagaatgttctgatgataaaaataaaacttgttttctttaaagaaaaaaaaaaaaaaaaaaaaaaaa

SEQ ID NO: 293850 - DNA, 1000 bp, Homo Sapiens
ccacacagacatgatggctctcattgacatcactgtgcggcacatcgcagacctgtcaccaggagacaagctgcgcatggagtacctctccctgatgcatgctatagtccgcaccacaccctacctgcagcaccgccaccggctacccgacctgcaggccatactgcgacgcatcctgaatgaggaggagacctcaccccagtgccagatggaccgcatgattgtccgagagatgtgcaaggaattcctggtgctgggggaggctcccagctagcaccttgctgtcctcccttccctgcagctccagtcagtgtgcaggggactcaggggcttggccctaagaatgttttgcactgacagtgggaggggataaggtggcagaaggaacctgagcaggacccccacctgaagtagaacttaagagaggggccaagtgtaggattggggaccatggtctgggagctgttctggggcagggggaatatgcaagctaaagcccctctataccctggtaggcttcctcttcagcatgcccccctcttcaccccacacccatgtgtacactcagagtcctgctgccgctccaggctggaccagacccccatccccacccctcctggtctgtatcctgggcctcagcaagccatgcccctggggtgaggggaggcatctcccaccagctctattctttgccttagctttgcagtgagtgctgctcatgtcctcccctccacccgcacatgggggtcgctgcccttcactcctacccccagaggccttggccaagctgctgctttgaaagcgggatcttggagacaggccatccatcctggagcctcatggaacaggatgatggcactgagaaagccaatgaccgaatctcttttctctgtaaaaatgtagactgaaaagccatgtgtattttcctatgtgctgtagctctcctttggaaataaatcacaggcatctggaaaaaaaaaaaaaaaaaaaaaaaaaaaaa

SEQ ID NO: 293851 - DNA, 1000 bp, Homo Sapiens
gaggtttgagagcctgtgcgcagtgctggaggagcgcaagggtgagctgctgcaggcgctggcccgggagcaagaggagaagctgcagcgcgtccgcggcctcatccgtcagtatggcgaccacctggaggcctcctctaagctggtggagtctgccatccagtccatggaagagccacaaatggcgctgtatctccagcaggccaaggagctgatcaataaggtcggggccatgtcgaaggtggagctggcagggcggccggagccaggctatgagagcatggagcaattcaccgtaagggtggagcacgtggccgaaatgctgcggaccatcgacttccagccaggcgcttccggggaggaagaggaggtggccccagacggagaggagggcagcgcggggccggaggaagagcggccggatgggccttaaggcctgcgccgacccgaccctgctcgagagcccgcgctagagtcggggaggatctgcgcagagaccgcagcatcacccaaatcggcgccggccccgggaggatctcaataaagaactcgagcgtcccagacccgtatctcctttcgctgcccaaccccgcagcctgggcttcgaaggcgacccgcccaccatcctgcccttcccagaacctgagaccgtctggggggcggaagccaaatgaacccctattgggcacctctgtgatgccaggagcgaactggtgagcccagcgccctgggaagagggccgagggcggggcggtggtgccgggacctctgaggtcctggggatttggggacccttggggtccacatgcacctggctgacctggctgaaagccgctgtctcggagccccccacagcattttgttcccctcccgctggcccgggggccccaccttcccacgggttcccacgctgctgtgactgccctgcctctacgacaaaagccaacgggtcttcagtacttttattaaaaaatagtcacgcagacaaaaaaaaaaaaaa

SEQ ID NO: 293852 - DNA, 1000 bp, Homo Sapiens
ttaatgttccatgcctttgtggtcaaagggtcagcacttaacacaggaaaaaactaggtgttgttttgttttgttattttggacaacataaaattcaggaatgttttatttagccttggtttctagaaggaagggaaataatatttcttgagcatttactagggtgttgcgtgctgtgctaagtaaattttaagtctttcagttttatagatacggaaaacaagggtgactctttaccacaggatgaataaagaactaagtaatatgggaaatgcagcaatttctggactagctgagccgattccttcctgtgagcacactgtaagctttcaagttctctgggcaggaattacagcacctgtcccctgcaatggccctgctgtgtgatgctcatcgcttcccttcgtgctggagcagtcccccaggtgtccatctcctatctttttgttccaatcttctgtgagttccagctagcaggctttacatctggggaaaggaaaaccaggggttttagctctgttctctgctcccatccttcgctcaccagctgagtgagaacatgaactttttgcaccatgtacccatggcttacactacttagaaaatcaccttttcagataaaacagtttatgagttcatagagaacaccagcactctttgacaaaactgtgagtgaccctttttaaacaatgctgagcaggccctgagctataatcaacggtgagctttaatgtctatgctgacagttaggttttgctctcttttgtaacaggttacgtagaccagcagtgtttaaatctaaatacgttgtgagtctgttatctgtcctatcgcgttttttaaatgactttttattctttatcatagctaagtaaataccaaaaaaaaaaaaaagctttgtaggacacttgtacttagtttgggaaaaaaaaataaattgaaattgttatgcttttgtatttccatttcttgcaaataaatattttttcttaaatagtaa

SEQ ID NO: 293853 - DNA, 1000 bp, Homo Sapiens
tggagtggctcaagccagacctgaagcagcgacttcgccagcagcttgtgggtcccttcttgcggtccccacagccagagggcagccagttggctttggcaagggacaagttagggttccaaggggctcgggctaccctgcagttgctgtgccaacgaatgaagctgggcagccctgtgttcctcaccaagtgtttgggcataggacctgctggctggcaccgcttctggtaccaggtggtgattcctgggcatccggtgcccttcagcggcctcatctgggttgtgctgaccctagatggccgggatgggcatgaggtggccaaggatgctgtgtctgtacggctgctgcaggcactcagtgagtctggggccaacctcctgtggtctgctggggctgaggcaggtaccatggttaaacagtgactccattctttctccacaggcaccctgaatgggcatgcagagcctgtgtcaggccccatcccagcaggcctgggtggccactttctgacccccaaaggtggggaggggcatgggcccaggcccatcagcctccctgctgggacagggacctatggcacctgggggcagcttgggtttgggttaagttgtggtgaggggccttgccctcccgctcccagcccagggtccaacctgacccagtgatcttccatggccgttccttgtcccacccccacccgatcataccttcccccctctgccacagcttagcatgaatcttctttattgtcctgatttgtcctctttgttggtttttatttgtggggaagggcagctgagccaaaggggtcagaaattctgccctttgcctccaccacatggcattctggttttggtttctgtatagttttgggtctttctatgctggttgtatttatattaaacccctggttagtataaaaaaaaaaaaaaaaaaaaaaaaaaaaaaaaaaaaaaaaaaaaaaaaaaaaaaaaaaaaaaaaaaaaaaaaaaaaaaa

SEQ ID NO: 293854 - DNA, 1000 bp, Homo Sapiens
cctgctgttttctgcacctatccgagctacggcgtactccaaaagtgtttgggatctaggctggtttgtctgcaagtcctctgactggtttatccacacatgcatggcagccaagagcctgacaatcgttgtggtggccaaagtatgcttcatgtatgcaagtgacccagccaagcaagtgagtatccacaactacaccatctggtcagtgctggtggccatctggactgtggctagcctgttacccctgccggaatggttctttagcaccatcaggcatcatgaaggtgtggaaatgtgcctcgtggatgtaccagctgtggctgaagagtttatgtcgatgtttggtaagctctacccactcctggcatttggccttccattattttttgccagcttttatttctggagagcttatgaccaatgtaaaaaacgaggaactaagactcaaaatcttagaaaccagatacgctcaaagcaagtcacagtgatgctgctgagcattgccatcatctctgctctcttgtggctccccgaatgggtagcttggctgtgggtatggcatctgaaggctgcaggcccggccccaccacaaggtttcatagccctgtctcaagtcttgatgttttccatctcttcagcaaatcctctcatttttcttgtgatgtcggaagagttcagggaaggcttgaaaggtgtatggaaatggatgataaccaaaaaacctccaactgtctcagagtctcaggaaacaccagctggcaactcagagggtcttcctgacaaggttccatctccagaatccccagcatccataccagaaaaagagaaacccagctctccctcctctggcaaagggaaaactgagaaggcagagattcccatccttcctgacgtagagcagttttggcatgagagggacacagtcccttctgtacaggacaatgaccctatcccctgggaacatgaagatcaagagacaggggaaggtgttaaatag

SEQ ID NO: 293855 - DNA, 1000 bp, Homo Sapiens
ccaacaggctttcgtaccttcataaggagctgcaaactcagcagcagcagcctgtccatggctgccgtggacatcctctacattgacatcacacggaggtggaactccatgaccctggaccagcgggactcagggatgtgtctgcaggccttcgtagaagctttctttttcctggctcagaggaagttcaagatgctgccacttcatgagcaggtggcctcactgattgacctttgcgagtaccacctgtccctgctggatgaaaaacgcctggtgtgtggccggggcgtcccgtcggggggccggcccccacaccgtggccctccccaggagccctccccctcggcccagccagcaggggacaaccccccaccccgcaccagctgtgccgataagctctcccatcccagacataccctgtcctgagggccactctgtcctcctggaaaacggaagacgagagcagctttcagggctggagcgccccaggcattctgcctgcagaggaatggcaggcaggctgccgaggggcccagctgaggtccccacgaactgtctctgtgtgcggctgagctgtgcttcaccaggctggctggttctcacctgccttcctcctcacacctcctggtgatacaccctgtttctgagtcatcagtcatcggacatatgacatctaaaacgtgacagatggcaccttctattctgggctcacaggaagcaccaactggggcaaatctgttgtatttggggcacaggacacaatcgatcccaaggcccggagctgtggagaggaagccgagtgttaggatctgctgccggggcctccacgcgcccaccgggaaaagcctgagaacatcgtgtttatttcctgccgcccgttccgagagaaggaagtggaaatatcaagtaggcatctgcgaatctcccatcccagtcatgtgctacatgggtgtagtgaacagattaacctcatttagttcattagcttgcctgttgctgc

SEQ ID NO: 293856 - DNA, 1000 bp, Homo Sapiens
tggctgtcccaacaaaaaatcccgatggcacgatgaacctcatgaactgggagtgcgccattccaggaaagaaagggactccgtgggaaggaggcttgtttaaactacggatgcttttcaaagatgattatccatcttcgccaccaaaatgtaaattcgaaccaccattatttcacccgaatgtgtacccttcggggacagtgtgcctgtccatcttagaggaggacaaggactggaggccagccatcacaatcaaacagatcctattaggaatacaggaacttctaaatgaaccaaatatccaagacccagctcaagcagaggcctacacgatttactgccaaaacagagtggagtacgagaaaagggtccgagcacaagccaagaagtttgcgccctcataagcagcgaccttgtggcatcgtcaaaaggaagggattggtttggcaagaacttgtttacaacatttttgcaaatctaaagttgctccatacaatgactagtcacctgggggggttgggcgggcgccatcttccattgccgccgcgggtgtgcggtctcgattcgctgaattgcccgtttccatacagggtctcttccttcggtcttttgtatttttgattgttatgtaaaactcgcttttattttaatattgatgtcagtatttcaactgctgtaaaattataaacttttatacttgggtaagtcccccaggggcgagttcctcgctctgggatgcaggcatgcttctcaccgtgcagagctgcacttggcctcagctggctgtatggaaatgcaccctccctcctgccgctcctctctagaaccttctagaacctgggctgtgctgcttttgagcctcagaccccaggtcagcatctcggttctgcgccacttcctttgtgtttatatggcgttttgtctgtgttgctgtttagagtaaataaactgtttatataaaggttttggttgcattattatcattgaaagtgagaggagg

SEQ ID NO: 293857 - DNA, 694 bp, Homo Sapiens; identical to SEQ ID NO: 224584

SEQ ID NO: 293858 - DNA, 1000 bp, Homo Sapiens
cctatggcgagcggctgcagctgcaggatgaggaagacgacagcctgtgtcgcatctgcatggatgccgtcatcgactgtgtcctactggagtgtgggcacatggttacctgcaccaagtgcggcaagcgcatgagtgagtgtcccatctgccggcagtatgtggtgcgagccgtgcacgtgttcaagtcctgaaacaggctcccctcaccaggacagtcacccccaaacttgacccccaacatttcaatgcacagaagggactggaaagttatgttcaaaggctgaagctattttaaaacattattttgactactaagtggggacagaaagatccatcctgagttgtggaaacattggtccatgccgtgagcctgtctgcctgtggacacgtgagcttcccgggctcagctgggctttatcacacatcccgtgaacactcattgaagtcagcctgtttgcgccatgtgggcatcagccactgctgtcttgggaggacacttatcctgttctcttatttccccttcatcctatttttaacttaaactgctcagatgtttgaaacttctgtcctctttggatgagatcagtgtccacaagtggccgacatggaacatgctgagcagtggctcctctgaatgttcactttattagtcatgtatattttaaatgctaacatttgatgaatgtaagtttccacattgttgctgtttctgcatttaaacataattgggaacaactgacattctctagtcgactgccagggccttagactccacatgtccatttttgttcaggtatagctttttatagcaagggctgcatctagcttcttttattagaagtgtgtgtgctaaattccttattaatgtgtaatcagtttacattgttttgtatagtgaaggtgtattttcagtgctacccgctagctgattttaactttaggaataaaattagttttaaaagcttttaaaaaaaaaaaaaaaaaaaaaaaaaaaaaa

SEQ ID NO: 293859 - DNA, 1000 bp, Homo Sapiens
cccctatattcagagctccttgagaagtgataaacacctccagctttctaacatcctccccacaccatctcaccatatccatctcccagcatccatctgcattcagctaagggcgggaaactgacctagtgcctgtgttgcagaccatttctgaggtctccaccatccaaggaggcacagccgtcattactgtcctccatgccttcagcagcccccctcacagctaaggtacataccaccccttctgccgcgcctccacccctggcaccaaggtcttctgctgcttatgtctaaagggatcacctatatttaactgcctcagtgacctaacctctttcttctcatgtgccagatgttaagatgaaggaggaatacaacacatactcaagcctcagcctgtttagttgttttcactggggctcgcttttctgggacggtatttattatcagactggcaagcctaactccataggtttacaggaagtagggatatttttataaaacaattgtgtcctccccacattttgctatgttaatatttgcttctaacaatttgcagctgtttcactttttcctcatttgtctctaagttgaaggctttgttggaggggacagagcacaggaacagccttgacagtctgtaattattgtacagatattttaatagcatataaataagtatattccttttattttgaaacaaaaatgatcagacactgccttttgtgtgtttgctgcctgtggcatccttttttaaaaagactgttacatattaaaatagtgtacatatataaatattacctcttttgctgtacagttgtgatagagactgaagattttattttttgtgtgctttttataagaaaaaaattaatacactaaagaatcttgctgatgtgattgtaatgtacctatgtaacttatttacttttgaatgttcttctgtatctttaaaccttttattaaataaggttttaaaaattcaaaaaaaaaaaaaaaa

SEQ ID NO: 293860 - DNA, 1000 bp, Homo Sapiens; identical to SEQ ID NO: 224587

SEQ ID NO: 293861 - DNA, 1000 bp, Homo Sapiens; identical to SEQ ID NO: 118966

SEQ ID NO: 293862 - DNA, 1000 bp, Homo Sapiens; identical to SEQ ID NO: 224589

SEQ ID NO: 293863 - DNA, 1000 bp, Homo Sapiens
tcataaaactcatggctctgattgcacagtcccacttgcttttgatattgctatgtcaaagcaaagggcacttcttttaaggctactttcagaactttgtattttcgctaaactataaatgcagttgtgtccagttggaggccagggtaccacatgtcacaggcggccttacatgtgtgccgtgaaaaggttcaaagaccgttaacaaaaaagtaagtctggccgggcatggtggctcaagcctgtaatcccagcactttgggaggccgaggcgggcggatcacttgagaccaggagttcgagaccagcctggccaacatggtgtgagaccccgtctctactaaaaataaaaaaattagccgggtgcggtggcacacacctgtaatcccagctaccggggaggctgaggcaggagaatcgctagaacctgggaggcggaggttgcagtcagccaagatagcaccactgcactccaggctgggtgacagagcgagactccatgtcaaaaaaaaaagaatgtgggaactcaaattttcatttttaatgtaatccccaagattttctccaagaaataaattgttgttttgtattttgtaacttaaaagcagctattggtaaatttctgagatatagcaggagaccaaaacatgtttggaaagagaataaatatatgaagagagactggttgttttattttcaatgtattgaatatattagactactatttattttctgagtggatgtgattaaatattcagacgtttagtgtatgattaagagtgagatagagatttctttggagtaattaaatccatcctgtcttttacacaatggacaaatcaagttaaaaaaatttttagatagcttagcttgttttctggtgctgttgacctgcaagagaatatacttttgcatatacaggtgaaagttttgcaatttatgtatacaagaaattgtaggcattaaaaatattttattgataaaaaaaaaaaaaaaaaaa

SEQ ID NO: 293864 - DNA, 1000 bp, Homo Sapiens
ttgtcatctgtaaaatggggcttgtcctatatattatctgcaagacgtgggaaatgggggctcaagccctgatgctatggactccatactgttggatatattgtctcttgtgtcttctgctgactgcagattaaagggtgtcaaccaaggaaggaaacaaaaaagtagggcctggacttcatttgcagaatgaggtcatagtcgttgagtcccacagtcatatatgggagacctcaagttgctgtcaccttgataactcttgtatcctgggttaaagccctctgtatttagtttgaacttctctctaagccccgtggtccaaagtcatcacgggagagaccaagatgggcttaccttgccctgctctggatttaaccattgttcattgtcaggctatatttttgtacaatcattcaaataacccagtgacataggtcatattgccacttttcagaggagaaaactgaggctcaggagggggagttgacatgcccaagctcccttgagctcagatcagcttgactcaatgtccaacattcccttggtagctttttctccggggtcctgtgctataagaacttctctctgcactgtatttttttttctcccaattcttagctatttcctcaagcaatgattggccaaggacctagcataatccaccacattggccaaggggacgtggtgcaccccaaggccatttctctgcattggaggctgcgaatctcctctggaaaattcccaacccgaggacccaccatgagcccagctcagcctgaccagacagcctctgcctggagcattcacatcagatggaaagaagctgctgtgtcctccagcatcctgggaccctgtcctctgcccagtgacacagcagccatggctagcttgatttctggtctccaaagctaagcataaccttcccggggtttctggtttttcagcctgtacgaaacatgtctctgttctaattaaagttcccatggtatggtgttctcat

SEQ ID NO: 293865 - DNA, 1000 bp, Homo Sapiens
actcagggaacctgagctgaggactttggtacaaggaagggaatgttttctcttccggacctaaagacgataccaaattaaaagaagacatgtatatcatatgttttgagcagaggaccctccaattcatgggatcaggggcaaaaatccacagctcatcccaggggccctggcaggttctcagagcctacctcttccttgtatatttgcatacagcctggtaacccccaggcatgcatatgtacaatgtgaccacacacagcctgacatctttcacctgtcaagtccaatttaaccaggaattggcatttgttaccataccctgcctcttgctttgcagagagcttctacagcaaggctgagtccttcccacagtcctccatgcctgctctttagggtctaccccagcccatgttttttgggaaggatagagaagcagaggaccctctttgctttcctgaaagtagccatgcccttgctggagggttcaccacagcaattggtgggaaagggtcttaaccaatctccaacacttttcttctcctgaaactgagaaggggtaaggaagtagctaggtccccttggacggagcatggacatgagacctgtgagtactggtgtctctccttcagagctttcatctttggttcgctgtagactctgggactatcagaagagaactgacccatacctgtctagccctgcccttccaaaaaaagagcctcccattaaagaggagttagagctgggccttgaggctcttcacttctttcaacagatatttaatatgtacctactaaatgccaggtactataaaaggtatagagagccatccttgctctccaagactccagggaagggatgggcaaacattttcttaaaagccagatagcaaatactttaagctttgtaaactacatagttttttaaaaaatattttctaacattgactaataaaaattgcctatgtttactgtgtacaaaaaaaaaaaaaaaaaaa

SEQ ID NO: 293866 - DNA, 1000 bp, Homo Sapiens; identical to SEQ ID NO: 224590

SEQ ID NO: 293867 - DNA, 1000 bp, Homo Sapiens; identical to SEQ ID NO: 224591

SEQ ID NO: 293868 - DNA, 1000 bp, Homo Sapiens
atgaatattcatttatttttatagtatcagaacttgggttgatttcaatgttaataaactaggcaaaacaaataactgttagaaggtacaattttcttctcttccctgtaactgaaagttttaagaattgttccttggggaaaaatttttttaaaattcacctagaatcatagggcctcattttgttttcttattgacaaacaatacctggtagcattctctaaagagtcttctagatcaatttttataaagtactaatgctcatgtgataatttaaaattattttcaactactttattacacagatgaagaaacatttcaagatattgatgtaataacattactgagtcccatggtaagaaagaatctttgctaattttttttttttttttacgaagccagtatcttgaaactattggcaattgcaagtgtctttaaactagggatctaatctgaaaattcagtaactaatattaggcagttgatactcccccacctcccccatttagatacactactgtattagtgagaatacttggtacagtaacttgaaagcacttgctattctggaaagaagcctcttggtgattttggaaggagctttattgtaaatactatggaaggggctttgttgtaaatactatgtaatatatataaaatattgtgacatgttttggatgggatgcatgacatacaggtagctctcttttttaaaatataggtatctctttgcatatatatacacaaggaaagttgaattttcaggagagatcattctgatatcttgcaaatttgtattaaatgtatacagacttccaagtgtgctaattctttacctcctaaacttttagttgcaattgttttgcagtgtaaaattgtacatgtgttaataatcaaaaagtgttgcatttaatgttatttctgtaaactttgagctttgttaataaactattatgcagcatctacactttgaaaatcttgtacttcaaaaaaaaaaaaa

SEQ ID NO: 293869 - DNA, 1000 bp, Homo Sapiens
ggtggcaaaagagtgttctggagctacagacggggccagggagctcacaacactatggagccatgagaaccgtgactgaacagtatgaggaggtggaccagtttgggaacacagtcctcatgtcttccaccacagtcaccgagcaggcagagccacccaggaacccaggctcccacctcgggctccacgcctcccccttgctgaggcagttcctgcacagcccagctgggttcagcagtgacctgacagaagctgagacggtgcaggtgtcctgcagctactcccagccagctgcccagtgaggcccaccgcctcccaccacacctgccacctgttcctggcctccactgccccaggactgaagtgggtacctgcctcctgtacactggagcaaggaccaagaggaaatggcatcttcagaggattactgtgggccatttccctttcgcagttctttcaataggcccagttcttccaaatggaaaaagaaaggtctggaagaggcccacagagttgcacaggcgtgggggtaggatgggggctcccagctgcttgtggaggatgtaatatatacagacacacacatgtttttcacacaggcctggcccacgcatcgacatgtgtgaatttgcacaccactgcctgaattggagccccccagagtgtccctctacccagagtttttatttctttaattagtctgagtgttcccagccatctgctccttaatccctggagaggaacagagccaactggacacagcgttggtctctgtttggaatcactgtgaggtctccagaaggacctggccgccagccccttcatcaccatctccatcattcagctggtcatctggtggcccaaaggtcacccaaagagtcagcaatcagcatgtccctagaagccaaatgcactgcctttctctgtccccatgactgtcccccactctgcaccccaaatgggaagcatacggtctgaataaatccaagttttattctct

SEQ ID NO: 293870 - DNA, 1000 bp, Homo Sapiens
gtggggagggaggcggggttggggccacgtgagcaaaatcccagtgagcactgatgaacacctccacttgcctaccaggcagctgtgtgactgagcccgaggaggcacaactagggcccccatagaatgcagaacaggggcgtggccttaatgctccaagcccattggtcaatgacaaagatgaaagggaaagggggtgtggccaggcagcagtatgtccagagggacctgtggctcacaaggaaagctgtccatgcaactgctgtccccgcctactctgaggggaggggccgccccctctgggagaggggaggggccggcttttgctttaaaagctttaaaactttaaaaaatatatgtgtgtatactttatgtatatgtgtgtgtgtgtgtatctatgtgttcctccagagctgtcttcattatccagcttctatgcaaggtctacgattttggcctatatttttcatcttcaaacacagtacaaaaattaccagtattaccataactgagataaagatcctataaaaatggaaaatccatagcatgcttgatgattaacgaagcagactatattatccaacattccaataagataaaataatcacaagtttcttttttttggaaaaaggtttctcttattctcctatgttattgttaaaaaattttttcttaaacaagaaacatgtctaatatctgtaacaacacaaagcttttgggccagatgcggtggcttgcgcctgtaatcccagcactttgggagcccgaggcgggtggatcacctgaagtcaggagttcgagaccagcctggccaacatggtgaaaccccatctctactaataatacaaaaactagccaggtgaggtagtgggtgcctgtaatcccagctattcaggaggctgaggcagtagaatcacttgaacccgggagacggagtttgcagtgagccaagctcacaccactgcagtccagcctgggtgacagagcgaaactccatctc

SEQ ID NO: 293871 - DNA, 1000 bp, Homo Sapiens; identical to SEQ ID NO: 118967

SEQ ID NO: 293872 - DNA, 1000 bp, Homo Sapiens; identical to SEQ ID NO: 118968

SEQ ID NO: 293873 - DNA, 1000 bp, Homo Sapiens
cccagttggctgccttcactccacccaccttggagaacagcaccaggatgtctccttcatcatcagcttgggcaaagttaggtccaacccctttgtcaaattgtcctgttggagaaaaggatgcagatgtcttcctctagatcagagcaggtttgttaaccttcatacaaaatataaaggcccagaacagatgtagcaaggaaatttcaattttccccaaggagaagggtctgccaacccattgtcagctatatctctcatattctaccctttggttaaacccaagaggagtttagaatactctaatactcattcagtatagaataactgagcacctagtatgtgcctggcacagagtatgcaacagtgactaaatagtatacggtctctgccctgctagaacttacagtgtagtgggggagatagaattgcaaacaaaaagtatctgagacagacctcagtcaatatagaagtttattttgccaaggttaaggatacacacccagaagacaggtctgtgcctttctccaaagatgattttgaggccttcaacatttagtggggaaagggtgctaatggggaaagaggtgtgggtacataggaggcaaacagttgcatttttttgagtctgatcagcttttctcatgagagaaggggtagaggaacagtcacttatgcattcacctagctcagtggatctgcacttttacagaaggtaaaataaacatagggcagaggaagcaatcagatatgcatttgtctcgggggagcagagggatggctttgagttctgttctttgtcctgtacctattaagagaagctatcaatatactttgtcaggataaaattcaacagaactgttttagactaaagattttagggaccacaaggaatttcccagtgggcaaattgtgagggaggtatttagcttttaaaaaaatctttgtagctatctcatttagaaataaaatgggaggcagattgcctgatgcagctcct

SEQ ID NO: 293874 - DNA, 1000 bp, Homo Sapiens
atgccaccgactactttctggctaacttcttctcagggtttccctgccactttttgcaccgggagctgccaaagaggaaggcccccagggaagagtcagagacttctgaggaaaaatcccctaacaagtggggccctgtttccaagcagaagaagcagctcctggttgacattctcaccacaataatcaggggcctgctggaagacaagaacttccatgaggctgtggaccaaagcctggtggagcaggtgccgtacttccgccaattctggaatgagcagtcaactaagttcatggaccagaaaaacagcctgtacttaatgccaatcctgcctgtaccctccagcagctgggaggatgggaagggcaagcagccgaaggaagacagaccagagcactatccagggttgggaaagaaggaagagggggaggaggagaagggtgaagaggaagaagaagagttggaggaggaagaggaggaagaagaggagacagaagaggaggagttgggcaaggaggagatagaggagaaggaggaggagagggatgagaaggaagagaaagtgagctgggcgggcatcgggcccacaccacagcctgagtcccaggagtccatgcaatggcagtggcaacagcagctgaatgtcatggtgaaggaggagcaagaacaggacgagaaggaggccatcagaaggctcccggccttcgccaacctgcaggaggcgctgctggagaacatgatccagaacatcctggtggaggcgagccgcggggaggtggtactcacctcgcggccacgcgtcatcgccctgccgccgttctgcgtgcccaggagtctgaccccggacacgctgctgccgacgcagcaagcagaggtactccacccggtggtgccacttcctaccgaccttccgtaaatgcccgcgcccagcctctccgacatgccgctaggggtcacgcctggccccctctccaccgccagtaaaagcatctagtcttt

SEQ ID NO: 293875 - DNA, 1000 bp, Homo Sapiens; identical to SEQ ID NO: 220451

SEQ ID NO: 293876 - DNA, 1000 bp, Homo Sapiens
ctggtcacacaccgatgcccgccaggccagtgccccagcccagggtgctccggaggccctgcttcctcaaaggaggctccccatggggcccctgtcctccagcctgaccagccctggcctagtcgtgggccccagcaaggctggagagcagggacgtgggagtagcagtggctgagagagtcctccaggcagggtggctggtgcccactctcaaaggctgctgcacacagaggagaatgccggcaggggtgggcagcagccagacctcagtggggcgtggatactccgtgagggcacctgggtgtcacccacagtgcacctcttcacaggggcctgggtactggagggagggatacaggaagggagatggagtccgtcctcgggggctctgggtgctgcggagtattcctgggcatggtgctgggcatggctggcatagggtgtggcttgtccccagcttctgatggcagccaggagaatgggtcatcacccaggctctggggctgaggagggctgggcccaagcccacagggactttggaggtggggctctgcagctgtgagatggcccagcagggagtggcagggacgggaggcttcaggaatattcctcctggcatccaggccccctgggacagaggagggtgcagtcaggcgacaggcttatctggactccctgcctcaatccctggggattgtccaggcaaaacctggagggcagcgggcaagctgttggatggaacagagagaccctcgcagctgactagggcccaaggggacggacactcaagaagatgtaaaattgggaggggtggtattggccattggggcaggcagggccgggaagggaagtagcaccggccgcagccccaagccagtggcttttccacaagggcctaccctgcagccggcccgctccggcttcctccactgctgaagaccctgctgtagagctgaagctgaacatgtgtttgctaaataaagattcccattcctagcgc

SEQ ID NO: 293877 - DNA, 1000 bp, Homo Sapiens
ttgagggtagagggaatcccctccttatttcctctaaaattgtttttacttaagataccttttccctataatcttagcatgctttctgctctttctctttggaagtagcattaataagatagatgtaataggattaagatgtgtggaagatgagaaaaagaaggtttttgtagagagagtgcttatgttttgtttactcatgtttcaacttgctgtgtatgatcataaatctatgatcttgagaaaaatcctaaaacaatttaaatttagcctatgcagccaattacataaagagaaattaaggattatattcagaggagaaattaaggattatatttagagcacagaggttatacaaagaatataaccttgtttggtcaaattcttaggtaaagaaaagtaatcaatgcttgcattgctgttggagattctaaaagatgtattgaatgaagaggatgtacacatctcattgttactgcgtatttttttgcttggtattcctgcttgcattaaagctggacaatgtactgtgatgtaattacaaaatttttattccttctaacgattgaactcttcttatccctattgataaaactgtattacaattgatgagtgtggctgccagaaaataatacaaaactgggcatttagctgttccacattgtgtagtaaatgttttgattatggggatttacagtgtatattaaagtagaaatgcttttgcacttgttttcagtctcaaataataatttttgtttttaattaaggatactttaaaagcaatgacagaaaaatctaaaatatcagaattaattattgtgaactgtgtgtaaaatatcttgtgagttttatacatactttggttgtctgatgtttcctaagtataaatgtctttatagaaaatttcagttctctgtgaagagtaggaagtgtactgtatattgaactagttctttgtgttactttgatatttaaaataaatataaagttctttggtcct

SEQ ID NO: 293878 - DNA, 1000 bp, Homo Sapiens
tttattagatgtggtcacttagaaatgcaaacttgctgccgaccgcgggctgctcctgcgttcttggagctcctggcgcgtttctcggagctcccggctcctcagcgggtgggaacctcggggcccaggggtggagctggcgtccgcgggtgctggtctggcctggccgtgtggtgatgaggcttagcggggccagtgacggccgtggctcaggatccataagtcggggtttggtctcagcatttacaaatgtgtttacagtcagaatgaaacacattccttctagaaagtgcttgggggtttttgctgccctggaagccaggagcctgctcactccaaccacaagtcgcccttgactgcggcggccgcgagcggggcgggggctgccggtgccctccgcaggccgggcctcctgggcgcccctcggtgctgcaggctggggggccttgggtacctgcagagccttttctctgaattccttatgtccggtgggccagaagcccgtcctcctatgctggtggaaggcggaggaccggagtccctgcagaaggccccgtgcactcgggggcctccctcacatcccgtgccccctgcgctggccttcacagtaggtaatggctccggcccgggtgttcgctgtccacggaacatggcagaggggcaccccggcccggaaagacgccagagccagcaggggctgtttcgggccgcgtggctccccgggtctcggccgtctcccctcttctgcgtctgttccgtgacttcgcctgggtgggatgtaccgcaggtgcatcgcgtcgaggtggggcacggccgccggcaagaaacccaccctgtccggaggcgggcgtgagacaagcccagcccgcacgcgctcatctttcttcgttttttgatcagtttattcagaattgctctataatttaccaattgtatgtatttaacctattcttgtggaaaaaaaaggtctttcattatatctttatttctgaaaaaaaaa

SEQ ID NO: 293879 - DNA, 1000 bp, Homo Sapiens; identical to SEQ ID NO: 224595

SEQ ID NO: 293880 - DNA, 1000 bp, Homo Sapiens
ttttttttgaatgttacttaatgactctctcctgactcaggagagaaaccccttgtggaaggacagcatggtgatcaggcaatttctctgggttcccaaagaatgacatttgaacacagtattttgaaacagctctagttttcaaattatatctttaatatatagtaatgtaacatattcagtattaatgtataaaaagcactctaattatataattcagtttttgtaaaggtatttgcataaaatttaatatgtcttaaactaattttggtaaattacttcttttttttctttttaataaaaactgttactcattaactttgcttataatgctttttatagcccagcacagaatttaaagccataccaccaaaagtacctgtgtgtgttaatatgtttttcttgtagcatagattgactatttgcaatagtattagtatttaccatttttccaaattagcaactaccagacctcacgtgttgcagtgataacacaatgcattggattcagttttgtgaaaatggattctgtggccatccaagggatgtatcagggatgatcagctgatgagaggctccagaaggatttctagatcgcttcaagcctatactgatggccttagctttgttcagtcattgtaactgggattgttgtcattgctaccgtggtagtcaccttcatgtcatctataatagtactcctggagagccctggctgcctacaccagtggaaaagagtctccagttctgctctggcctactaactgttaccactgagagaacaacatgttcatttgacatgattgaagctggcatccgtatatgaagatccttgtcaagctttcttctgtggtctgattagtgttgataccggggcacctcctctggtacttttaagtgttttgttatttatgtttactttttggaatggtgtaagcctaaccacaaataaaagatctttgcctaaaaaaaaaaaaaaaaaagaaaaaaaaaaaaaaaa

SEQ ID NO: 293881 - DNA, 1000 bp, Homo Sapiens; identical to SEQ ID NO: 224596

SEQ ID NO: 293882 - DNA, 1000 bp, Homo Sapiens
gtatacatcctctctcactaatcacaagaggattcactccggggagaggccctttgtatgtcaggagtgtgggcgaggctttcgccagaagatagccctccttctacaccagaggacgcacttggaggagaagcccttcgtgtgtcctgagtgtgggagaggcttttgccagaaggcatcactcctccagcaccagagctcacacacaggggagaggcccttcctgtgccttgagtgtgggcgtagcttcaggcagcagtcactcctccttagtcaccaggtcacacactcaggagagaagccttatgtctgtgctgagtgtgggcacagctttcgccaaaaggtcactctcatcaggcaccagaggacacacacaggggagaagccttacctgtgcccccagtgtgggcggggttttagccagaaggtcaccctcattggacaccagaggacacacacaggggagaagccctacctgtgccctgattgtgggcgtggctttggtcagaaggtcaccctcatcagacaccagaggacacacacaggggagaagccttatctgtgccccaagtgtgggcgtgcatttggctttaagtcgctcctcacccgacaccagaggacacactcagaggaggagctttacgtagacagggtgtgtggacaaggacttggccagaagtcacaccttatctctgaccaaaggacacactcaggagagaagccctgcatttgcgatgaatgtgggcgcggctttggctttaagtctgccctcatccgacatcagcggacccattctggggagaagccgtatgtctgcagggagtgtgggcgtggctttagccagaagtctcacttgcatagacacaggaggaccaagtctggtcatcagctcctaccccaagaggtcttctgacctttcctttccccgtgagtgtgaagctggcagaaatcactagtaaatgcttcagtttcctgaaatggaatgaaaaaaaaaaaaaaa

SEQ ID NO: 293883 - DNA, 1000 bp, Homo Sapiens
gagagaaaccctatgagtgtaaggaatgtggcaaggccttcagagtgcacgtacatctcacacagcatcggaaaattcatactgatgtaaagccctatgaatgtaaggaatgtggaaagactcttagtcgagcctcgtaccttgtacaacatagcagaatccatactggtaagaagccctatgagtgtaaggagtgtggcaaggccttcagttctggctcataccttgttcagcatcaaagaattcatactggggagaaaccctatgaatgtaacaaatgtgggaaagcctttactgtttatggacaacttattggacatcagagtgttcacactggtgagaaaccttttgaatgtaaggaatgcgggaaggcctttagacttaattcattccttactgaacatcagcgggtacacactggtgagaaaccctttaaatgcaaaaaatgtgggaagacctttagatacagttcagcccttaaagtgcatctgagaaaacatatgagtgttataccctaagagtctgaggagtgtgggaagtgcttcgtgtgtggctcaaacattgttgaacatcggggaatttatgctggtaggaaactttcaaatgtgaagaatattggcaggtctattctcatcttataattcataatataactcagaaaacataagaatattcctttgtcatttataggtttgtaataccaatatttatactggtggaccattcagaaaaagtgggaaacgttattacttaatggttacagcactgacagcatgaacttttatatgatgcatttattctaatgtgattgtatgaacaagtgaataaaaaaccttggacctcctaaaaaaaaaaaaaaaaaaaaaaaaaaaaaaaaaaaaaaaaaaaaaaaaaaaaaaaaaaaaaaaaaaaaaaaaaaaaaaaaaaaaaaaaaaaaaaaaaaaaaaaaaaaaaaaaaaaaaaaaaaaaaaaaaaaaaaaaaaaaaaaaaaaaaaaaaaa

SEQ ID NO: 293884 - DNA, 952 bp, Homo Sapiens
ccacgcgtccggcacttccgcccatccccctccggatccctctgttcgggctcgggtttccgccgagacgacagggactgccaggtcggaagtagtgtgaggctcgtgggcggagccaagcgccgccatgtccgccgccctgctgcggcggggcctggagctgctggcggcgtccgaggccccccgggaccctccaggtcaggccaagccgagaggggctccggtgaaacggccccggaagacgaaggcaattcaggcccagaaactgcggaactcggccaagggaaaggtgcccaagtcggcactggacgagtaccggaagcgagagtgtcgagaccacctcagagtaaacctgaagtttctgaccaggacgagaagcaccgtggctgagtctgtgagccagcagattttgcgccagaaccggggccgcaaggcctgtgaccggcctgtggccaagaccaagaagaagaaggctgagggcaccgtgttcaccgaggaagacttccagaagttccagcaggaatacttcggcagctaggctccctggagggcacggtgaagaggccttcaagccctgcagcctccgactcctgctggctccaggaaccggccgtgccgcgcggccagcagatggcgatgcaggaccagcctggctcgaggaagccgcggagctgagccgagtggaggctggaatggagctggtgggccggaagtcctggggaggatttacacacagaccggagctggcttccgcaggcctgggcagagcatctgcacctgccggaaaggaacgtatctgttttgtttgcttttgcccaggtggggcctctgggctgtttgctgtggagcaaggctaattcctgagcccttggggacgacagctccaggagtaggaagaagggtgggcttccaagttacaataaatgtgaacccaagaaaaaaaaaaaaaaaa

SEQ ID NO: 293885 - DNA, 1000 bp, Homo Sapiens; identical to SEQ ID NO: 118969

SEQ ID NO: 293886 - DNA, 1000 bp, Homo Sapiens; identical to SEQ ID NO: 118970

SEQ ID NO: 293887 - DNA, 1000 bp, Homo Sapiens; identical to SEQ ID NO: 287616

SEQ ID NO: 293888 - DNA, 1000 bp, Homo Sapiens; identical to SEQ ID NO: 224598

SEQ ID NO: 293889 - DNA, 1000 bp, Homo Sapiens
aacggagcctctgacttctcctgggccaaggaggccgaggagcgcagccggctttggacagcacggcacaatgcctggtacgcagccctggccacgcggccaggctgcaagggctactccacggatgtgtgtgtgcccatctcccggctgccggagatcgtggtgcagaccaaggaggatctgaatgcctcaggactcacaggaagcattgtcgggcatgtgggtgacggcaacttccactgcatcctgctggtcaaccctgatgacgccgaggaactgggcagggtcaaggcttttgcagaacagctgggcaggcgggcactggctctccacggaacgtgcacgggggagcatggcatcggaatgggcaagcggcagctgctgcaggaggaggtgggcgccgtgggcgtggagaccatgcggcagctcaaggccgtgctagacccccaaggcctcatgaatccaggcaaagtgctgtgaagggggtctgagcacttagcccacaagttccctgactacggagccggttctggaacttttcttcatgccacggcccctgcaaggaaatagatgctgaggcagtcttcctgccagcgagcccactgtatctgggcccaaggccagagggcccagagagaagcctgagcaccgtgttacctccctggccctctggctggccccaggagcctttggttcagtaaacgacccagggtggttcccagcaaagctgcttcctctctgctcctacgcatcctgtcctggcgggaagagagcgtctgggtccattcaagactctgatgacacccctccccgaggcctcccactgccggggtcccaggacccttcccccttcacctggtgacaggaacactcctttcctggtatggaacgtgagctcccgtgacatgatgataggtcttctccttggggcctcccccaataaatctgtaataaacctgaaacccacctacagctaaaaaaaaaaaaaaaaaaaaaaaaa

SEQ ID NO: 293890 - DNA, 1000 bp, Homo Sapiens
catcatcctcatcctccaccagagcagtccatgtgttaaaactgatgatcctacttgaatacatcattatcacccaacgtccatggtttacattagggttcactctaggtgtcgaatgttctatgggtttgaacaaatatctagtgacaggtgtccccatcgtagcagcatatggaatagtgccacaccctaaaaatcctctgtgcgccacctgttcatccttcccccacctcccaccaacccttgacagccactgatctttttacggtccctttttcagactctcctggagttggaattgtacagtatgtggcttctcagattgactcctttcacttagcaatacacacttatggttcccccatctcttctcatggtttgctagctcattttttcagtcactgaataatattccattatctggatgtatcatagttcatccattcacctactgaagggcatcttggttgcttccaagttttggcaattatgaattaagctgctatagatgtccatgtgccagggttttgtgtagacatgttttcagctcctttgggtaaatactaaggagtgtgaatgctggatcagatggtgagagggtgtttagttttgaaagaaattgccaaactaccttccaaagtggcagcagcttttcgcattcccactagcaacgaatgagagttcctgttgctccacgtcctcacatttgatgatgtcagtgttctggattttggccagctgataggtatgtagtggtatcttgctgttttattttgcatttcattgataacatatgactaggagcatcttatgctgatttttcatctgcatatcttctttgctgaagtgtctgttaaggtatttggcccattttttaattggattgttttcttattgttgagttttaagagtcctgtgtatattttggatgacatttcttttttgtgtgtcttttttttggatgacatttccttatcagataaatatgtatcttgaaaat

SEQ ID NO: 293891 - DNA, 1000 bp, Homo Sapiens
ttctgtgcttggaccctctgggcccatcctggccatggtgggtgaagacgctgatctgccctgtcacctgttcccgaccatgagtgcagagaccatggagctgaagtgggtgagttccagcctaaggcaggtggtgaacgtgtatgcagatggaaaggaagtggaagacaggcagagtgcaccgtatcgagggagaacttcgattctgcgggatggcatcactgcagggaaggctgctctccgaatacacaacgtcacagcctctgacagtggaaagtacttgtgttatttccaagatggtgacttctatgaaaaagccctggtggagctgaaggttgcagcactgggttctgatcttcacgttgatgtgaagggttacaaggatggagggatccatctggagtgcaggtccactggctggtacccccaaccccaaatacagtggagcaacaacaagggagagaacatcccgactgtggaagcacctgtggttgcagacggagtgggcctgtatgcagtagcagcatctgtgatcatgagaggcagctctggggagggtgtatcctgtaccatcagaagttccctcctcggcctggaaaagacagccagcatttccatcgcagaccccttcttcaggagcgcccagaggtggatcgccgccctggcagggaccctgcctgtcttgctgctgcttcttgggggagccggttacttcctgtggcaacagcaggaggaaaaaaagactcagttcagaaagaaaaagagagagcaagagttgagagaaatggcatggagcacaatgaagcaagaacaaagcacaagagtgaagctcctggaggaactcagatggagaagtatccagtatgcatctcggggagagagacattcagcctataatgaatggaaaaaggccctcttcaagcctggtgaggaaatgcttcagatgaggctccactttgttaaataaaatggatgaatgaaaaaaaaaaaaaaaaaaaaa

SEQ ID NO: 293892 - DNA, 1000 bp, Homo Sapiens; identical to SEQ ID NO: 118971

SEQ ID NO: 293893 - DNA, 1000 bp, Homo Sapiens
tttaagaaagatttgaaacagattttctgaagaaagcagaagctctcttcccattatgacttcggaaatcacttatgctgaagtgaggttcaaaaatgaattcaagtcctcaggcatcaacacagcctcttctgcagcttccaaggagaggactgcccctcacaaaagtaataccggattccccaagctgctttgtgcctcactgttgatatttttcctgctattggcaatctcattctttattgcttttgtcaagacagcctggagctgttgcccaaagaattggaagtcatttagttccaactgctactttatttctactgaatcagcatcttggcaagacagtgagaaggactgtgctagaatggaggctcacctgctggtgataaacactcaagaagagcaggatttcatcttccagaatctgcaagaagaatctgcttattttgtggggctctcagatccagaaggtcagcgacattggcaatgggttgatcagacaccatacaatgaaagttccacattctggcatccacgtgagcccagtgatcccaatgagcgctgcgttgtgctaaattttcgtaaatcacccaaaagatggggctggaatgatgttaattgtcttggtcctcaaaggtcagtttgtgagatgatgaagatccacttatgaactgaacattctccatgaacaggtggttggattggtatctgtcattgtagggatagataataagctcttcttattcatgtgtaagggaggtccatagaatttaggtggtctgtcaactattctacttatgagagaattggtctgtacattgactgattcactttttcataaagtgagcatttattgagcattttttcatgtgccagagcctgtactggaggcccccattgtgcacacatggagagaacatgagtctctcttaatttttatctggttgctaaagaattatttaccaataaaattatatgatgtggtgtctcaaaaaaaaaa

SEQ ID NO: 293894 - DNA, 1000 bp, Homo Sapiens
gatgggggagctgaacacattgcaaagaccgtatcatatttaaaggaaaggaatccaaaaatccttgtggagtgtcttactcctgattttcgaggtgatctcaaagcaatagaaaaagttgctctgtcaggattagatgtgtatgcacataatgtagaaacagtcccggaattacagagtaaggttcgtgatcctcgggccaattttgatcagtccctacgtgtactgaaacatgccaagaaggttcagcctgatgttatttctaaaacatctataatgttgggtttaggcgagaatgatgagcaagtatatgcaacaatgaaagcacttcgtgaggcagatgtagactgcttgactttaggacaatatatgcagccaacaaggcgtcaccttaaggtgaatttttcctgaaaaatctagtggctaaaagaaaaacaaaagacctctaaaacttcaacaagaccttcaagatcacagaaatttttaaaatttgattccagttaataacagaggtggtgccagaatgcctggactgcagtggatgtgccccacctctttgcttaaaaaaaaaaatgtcaatagccaggcatagtggctcacgcctgtaatcccagcactttaggaggccaaggcgggtggatcacctgaggtcaggagttcgagaccagcctggccaacatggtgaaatcctgtctccactaaaaacacaaaaattagtcaggcgtggtagtgggtgcctgtaatcccagctactcgggaggctaaggcaggagaatcacttgaacctgggagggggaggttgcagtgagccaagatcgctccattgccctccagcctgggtgacaagagcaaaactccatctcaaataaataaaaaggaaaaaaaagtcaataaactgtacaaatttaattacagtaattcatttggcttttagtgtatcttctttgtcccaattaaacagttgcttgctgtgatgtaatcttaaaaaaaaaaaaaaaaa

SEQ ID NO: 293895 - DNA, 1000 bp, Homo Sapiens; identical to SEQ ID NO: 224599

SEQ ID NO: 293896 - DNA, 1000 bp, Homo Sapiens
taaaatgtggagtagctgtaatcactttattttatgatagtatcttaatgaaaaatactacttctttagcttgggctacatgtgtcagggtttttctccaggtgcttatattgatctggaattgtaatgtaaaaagcaatgcaaacttaggcgagtacttcttgaaatgtctatttaagctgctttaagttaatagaaaagattaaagcaaaatattcatttttactttttcttatttttaaaattaggctgaatgtacttcatgtgatttgtcaaccatagtttatcagagattatggacttaattgattggtatattagtgacatcaacttgacacaagattagacaaaaaattccttacaaaaatactgtgtaactatttctcaaacttgtgggatttttcaaaagctcagtatatgaatcatcatactgtttgaaattgctaatgacagagtaagtaacactaatattggtcattgatcttcgttcatgaattagtctacagaaaaaaaatgttctgtaaaattagtctgttgaaaatgttttccaaacaatgttactttgaaaattgagtttatgtttgacctaaatgggctaaaattacattagataaactaaaattctgtccgtgtaactataaattttgtgaatgcattttcctggtgtttgaaaaagaagggggggagaattccaggtgccttaatataaagtttgaagcttcatccaccaaagttaaatagagctatttaaaaatgcactttatttgtactctgtgtggcttttgttttagaattttgttcaaattatagcagaatttaggcaaaaataaaacagacatgtatttttgtttgctgaatggatgaaaccattgcattcttgtacactgatttgaaatgctgtaaatatgtcccaatttgtattgattctctttaaatataaaatgtaaataaaatattccaataaaagtttgtgtctggtgttagtttaaaaaaaaaaaaa

SEQ ID NO: 293897 - DNA, 1000 bp, Homo Sapiens
actagccagctctctgcatggcacatggtcaaggaaactgtccttggctcagacagacctggggtggtgggcatctggctgaaccttgaggagggaaagcttgccttctattcagtggacaatcaggagaagcttctgtatgagtgtaccatctctgcctcctctcctttgtaccctgccttctggctgtatggcttacatcctggaaattacctgataataaagcaagtaaaggtgtaaggtttcctaagggattacaacacagtggtttcctggtctctctccctgtcatcaatcagggtagtaacttgacttaagaataccactttttagaaaaattacgatagagatgggatctcactaggttgcccaggctggtgtcgaattcctggtctcaagcagtcctcccacctcagcctcccaaggtgctgggattacaggtgtgagccaccacacctggccaagaataccacttttgaagttaatccttttgtgtgatacaggatgaacttgggatgtttgaaccctggacattccaaataaagaataggcccctgcctggctcctgggagataacctctaagccattagaatatcttgcctgataagagtgtttttgtttacctgtgggccttgggccatgcagtatcagcttgaccttgcaaggtcaagctgaggagactaagttagccatgtgggcagtgaagcatgccaatgtgatcaatccctagtaaaagccctggacacctaggcatgggtgagctactctggttggtaatactctgtgcacacatcattgtagccacacatcattgctgggagaattaagcattatcctgaagactctgccaggagaggataattggaagttctcttggaccttaccttatgtgcctttcttcattgctgattttaatctgtatcctttcactgtaataaactgtaactatgagtgcaaaaaaaaaaaaaaaaaaaaaaaaaaaaaaaaaaaaaaaaaaaa

SEQ ID NO: 293898 - DNA, 1000 bp, Homo Sapiens
ctgtggcattttaggcataggtttgcaatccagatctgattttctccaacataaatatcagctcatgttcttatttcaaaaagatttcttattaccgactaaaagctattttttacctcacctggaaactaccattgtgagggccatcccccaggcactgcacagcaccttggctgatgctggaagaggagggcagtcagtgtcacttctgggatgtgccccagcactgagaacaaaatgcaggcatcccccggggcagcatcagagtgcctttctagagggagccacgcacagaatgtaacaggatgaaacagtttcaagtaagccttgaattgaaacctgagtaggttaaaacaattctatttcatagcacatcacaatactgctgctactctgtagccacccccatggctacatgatgccctattcctaaataataacaatagcattgtcagtggaggctgggccaccatggcagaccttccaaaagtagtgagctacatagactacttagggaaccccagggaaactggtaccctacacctgggagcagtatctgccactgggataaagtcctactaaaaaaggaacggtaaatgtaccctaatgattaaaccccgtgagatacatatgatttccaaatagtccatttcattaggaacttttttgtttgaatgaatgtcacataggtatcctcagtaacacagaacgaaattacctttgtattattgtgattagttgttgcttattattttatactcagtaataatgtggtacactgttaatttttttgcttttgtaaattatattctaatttattgccatgtttcctaacacttgtcctacattcattctcctgcttgtaatgaaaatgaaaaaatcattgtaacacttgatggagtgaaattccacgccaggcacagaatttttttgacatagataatttagtaaaataaaaattcagcttataataatgataaaaaaaaaaaaaaaaaaaaaa

SEQ ID NO: 293899 - DNA, 1000 bp, Homo Sapiens; identical to SEQ ID NO: 224600

SEQ ID NO: 293900 - DNA, 815 bp, Homo Sapiens
cggttgtggtcgctatatataaggtggggaggccgccggcccgttcggttccgggcgttaccatcgtccgtgcgcaccgcccggcgtccagatttggcaattcttcgctgaagtcatcatgagctttttccaactcctgatgaaaaggaaggaactcattcccttggtggtgttcatgactgtggcggcgggtggagcctcatctttcgctgtgtattctctttggaaaaccgatgtgatccttgatcgaaaaaaaaatccagaaccttgggaaactgtggaccctactgtacctcaaaagcttataacaatcaaccaacaatggaaacccattgaagagttgcaaaatgtccaaagggtgaccaaatgacgagccctcgcctctttcttctgaagagtactctataaatctagtggaaacatttctgcacaaactagattctggacaccagtgtgcggaaatgcttctgctacatttttagggtttgtctacattttttgggctctggataaggaattaaaggagtgcagcaataactgcactgtctaaaagtttgtgcttattttcttgtaaatttgaatattgcatattgaaatttttgtttatgatctatgaatgtttttcttaaaatttacaaagctttgtaaattagattttctttaataaaatgccatttgtgcaagatttctcaaagattaggtatatatttaaatggaagagaaaatatttttatgggagaaaaatacatttgaaccatgaaatttcatcttttaaataacatccagtacagatttctgtgtaaaaaaaaaaaaaa

SEQ ID NO: 293901 - DNA, 1000 bp, Homo Sapiens
tcaagagatcaagaccatcctggccaacatgatgaaaccccgtctctactaaaaacacaaaaattagctgggcgtggtggcacacgcctgtagtcccagctacccgggaggctgaggcaggagaatcgcttgaacccaggaggcggagattgcagtgagccgagattgcaccgctgcactccagcctggcgacagagcgagactctgtctcaaaaaaaaaaacaaagaaaaaaccaaaaaaacaaatgggaccctttggattctatgctcagggaagagcaggcagagccttggagtgctgaaggaggtgctgttccctgttccatctttacactttctcttctgagatgtctgtaaggattttacccagatgccatttgtctgtttcattttcagactcaccatcaattaccaaggcccttgcatctccccagatcgtttcccaagtttggcgatttgctgtcggtgcctcagccacatatgaccaatggttacaactcagggctccagacctcagctaaaaagagaagacgctgccctcctgggcacgaacgtttagaatgctcaactcctctattgtgaccacaggaaggtggccctgaagatgcaccgaagacagctgggaggtgactgctgtactgtcagcctctctgtggaggcattcgtgcagtgccagctaaaagggaggtgaagggggatatcggacccagcgagggagttgctggtagaaggaaagctcttctcagtgtggctggattaagagcagcctagcagcttgggcacctccactctgtgcggtctgatggccccagcaaggtcgctgcagggacttcctgaggacttggtttggtttttttctggggttggaaatctgagccaatattgtgtctgttccatttgggtatgaagaggaagtctggatcacttaaactgactagttatttccgggtcataattttaaattaaagacatatcactttttcaaaaaaaaaaaaaaaaa

SEQ ID NO: 293902 - DNA, 452 bp, Homo Sapiens
ggtggttcttgcccgtgttgtgtgtgtgtgtgagtgagagagcgagtgagtgagtgagtgagtgtgtgtgtgggggggactcggcttgttgttgtcggtgacttccccctccccttcaccccttcccctccccgccgccgctgcagtggccgctccctgggccgtaggaaatgagcgataacgatgacatcgaggtggagagcgacgaagagcaaccgaggtttcaatctgcggctgacaaacgggctcatcataatgcactggaacgaaaacgtagggaccacatcaaagacagctttcacagtttgcgggactcagtcccatcactccaaggagagaagggaacaaagatgaagttaaccctcccacctgtctttccttatgaacacttgccttttccaactgttttctgccatggctaatcagaaaaagtttcttaaggaaatggtggc

SEQ ID NO: 293903 - DNA, 1000 bp, Homo Sapiens; identical to SEQ ID NO: 118973

SEQ ID NO: 293904 - DNA, 735 bp, Homo Sapiens
gcggtgtccggcagtagagctcgctgcagatccgggctctgaccatgatttggcgccgcgcggcgctggcggggacgcggctggtttggagcaggagcggctcggcaggctggcttgacagggcggcgggagctgcgggagctgcggcagctgcggcctctgggatggagagcaatacatcatcatctttggagaatttagcgacggcgcctgtgaaccagatccaagaaacaatttctgataattgtgtggtgattttctcaaaaacatcctgttcttactgtacaatggcaaaaaagcttttccatgacatgaatgttaactataaagtggtggaactggacctgcttgaatatggaaaccagttccaagatgctctttacaaaatgactggtgaaagaactgttccaagaatatttgtcaatggtacttttattggaggtgcaactgacactcataggcttcacaaagaaggaaaattgctcccactagttcatcagtgttatttaaaaaaaagtaagaggaaagaatttcagtgatgtttatactaataagtttgctagtacagtgtcagttatttaaagtggtaatgcccgataatgtcttttaaatgtttgaggatgttttaaatacatgcattgtcttcacgaagaagatgtaaaaataatgaacaataaattgcggtggaaacctcaaaaaaaaaaaaaaaaaaaaaaaaaaaaaaaaaaaaaaaaa

SEQ ID NO: 293905 - DNA, 1000 bp, Homo Sapiens
aaggaacataccccttacaaatgaaaaattccactcaaaatagggactatctatcttaatactaaggaaccaacaatcttcctgtttaaaaaaccacatggcacagagattctgaactaaagtgctgcactcaaatgatgggaagtccggccccagtacacaggggcttgactttttcaacttcgtttcctttgttggagtcaaaaagaaccacttgtggttctaaaaggtgtgaaggtgatttaagggcccaggtcagccactgtttgtttacaaaatcaggtaactaactgcatacactttttctctttccatgacatcaagactttgctaaagacatgaagccacgggtgccagaagctactgcgatgccccgggagttagccccctggtaatagctgtaaacttccaatttctagccatacgctcagctcatccatgcctcagaagtgcatctggagagaacaggtttctaagcataaaagatgaaagagcagttggactttttaaaaattcagcaaagtggttccctctcttagggacagtcaaaaccaagtcacttaggtagtaccaaaataaataaggaaaagcttagctttagaaacagtgcaacactggtctgctgttccagtggtaagctatgtcccaggaatcagtttaaaagcacgacagtggatgctgggtccatatcacacacattgctgtgaacaggaaactcctgtgaccacaacatgaggccactggagacgcatatgagtaagggcactgacggactcatgatttcttcttaccagatgctttcctgttctttaagagtttaaaatcatcagaaaggaaaaacaaactctatattgttcagcatgcaatacataccacgctagggctggctcaattgaaagtgggcaaaagcttacaaatactaaaaagaagtgctgccgcgcagtgtggaggccactgtttggaaataaatcttcctaacactacaaaaaaaaaaaaaaaa

SEQ ID NO: 293906 - DNA, 1000 bp, Homo Sapiens; identical to SEQ ID NO: 118974

SEQ ID NO: 293907 - DNA, 1000 bp, Homo Sapiens
ctccagtgtttgagacaatattgaaatcttcctataacataatttatttggtatcaaattttataaaatatggatccacctttggaattttgataaaagggttcatctctgacatgatcccataacactgactgaaattccaccaaattactgttctttgaatgctttaatccttaaaccttttcttctgatatgcaaccaatatattcaattatatatgtgattaatttttaaaaggacaattgttttcataaaatgcaaaactattttttacaccaaaggaaaattttagattctgattctaaatccgatttttactataaaattggaaaatagatgggaggggtgtcattcattgttcaaaaggtacagaacaaatcataggggtttttaatctctaaaatttctacagtagtacaggaaatattcctctttacattcatttgcagttctttcactgacctcctaattttaggtggagggggcagggggagccataaaagttggtattaccctaataaatctatctctttcctcccctgtttcaaccccacatgtattccatgctcagcagcagcagcagaaatagtaggatatagatcacaaaggtttttctggtgagtcaaatagggtgttttcttttgaaactgtaatgaatatgtttgccagtcaaatggcttcatgagaacagtagaaccttatgaatgtatactagcatacaaggatctcaaatacattaattattctcagttttaggaatgtaaatagattaagtcccacaatgaaatttcagaagtttttgttctgtaagtaaaaaattactaaccactgatgttcaagattttcttttaatagcactatccttgagaaccaaaaagtttatgttttgattttcaaatgttaaacaagatgctaaacaaatcctggactgttaataaaaattaattatgtattattggataaaaaaaaaaaaaaaaaaaaaaaaaaaaaaaaaaaaaaa

SEQ ID NO: 293908 - DNA, 1000 bp, Homo Sapiens; identical to SEQ ID NO: 118975

SEQ ID NO: 293909 - DNA, 1000 bp, Homo Sapiens
ccaagaaactcctgggtctgaaaaatattcacctgaaacgtatcaagaaatacctgggcttgaagaatattcacctgaaatataccaagaaacatcccagcttgaagaatattcacctgaaatataccaagaaacaccggggcctgaagacctctctactgagacatataaaaataaggatgtgcctaaagaatgctttccagaaccacaccaagaaacaggtgggccccaaggccaggatcctaaagcacaccaggaagatgctaaagatgcttatacttttcctcaagaaatgaaagaaaaacccaaagaagagccaggaataccagcaattctgaatgagagtcatccagaaaatgatgtctatagttatgttttgttttaacaatgctcaaccataaagttgtggtccaatggaacatacagcttaatagtttatgcgtgattttctcaaaatattgtaaaacttttgacaatgctcattaatattattttttctatttgtagaccatatctgaaagaaataacattttttaaggctctaccacatagacaatatcatgctagaatgtgtgtgtgtgtgtgtgtgtgtgtgtgtgtatgtatgtataggtcggggagaggatagtggtgggaacagacaaataaggaagcggggaggactggataattggttttcccccctaagaacatttatttacgtcttaagagcagataagtgactaagactgaacacatacattttgtggagtatatagttttcttgtaaatgctgttcaattattaatgtaacagtagcatcaaaattttattcaggctttagttgactcttttggtcagttttaacaattctccttaaaagatattttggagtgatgaatgtagtttacttttgtatttgaattttgattttctatttttattttttaaatattgtatttgtgcacaatgtacattaaatcattattacatgcttaaaaaaaaaaaaaaaaaaaaaaaa

SEQ ID NO: 293910 - DNA, 1000 bp, Homo Sapiens
ctgggctgtgtctactgcagctatggaagttgggaccttttccgggaggcttatgctgccattgagaaaatgaaacagctcgacaagaacaaactacaggcggttgccaaccagacttatcaccagaccccaccacccaccttctcctttcgagaaaggatgactcacaagagtcttgtctacctctggttcctgtgcagttctgtggcacttgccctgggtgccctaactgtatggcatgctgttctcatcagtcgaggtgagactagcatcgaaaggcacatcaacaagaaggagagacgtcggctacaggccaagggcagagtatttaggaatccttacaactacggctgcttggacaactggaaggtattcctgggtgtggatacaggaaggcactggcttactcgggtgctcttaccttctagtcacttgccccatgggaatggaatgagctgggagccccctccctgggtgactgctcactcagcctctgtgatggcagtgtgagctggactgtgtcagccacgactcgagcactcattctgctccctatgttatttcaagggcctccaagggcagcttttctcagaatccttgatcaaaaagagccagtgggcctgccttagggtaccatgcaggacaattcaaggaccagcctttttaccactgcagaagaaagacacaatgtggagaaatcttaggactgacatccctttactcaggcaaacagaagttccaaccccagactaggggtcaggcagctagctacctaccttgcccagtgctgacccggacctcctccaggatacagcactggagttggccaccacctcttctacttgctgtctgaaaaaacacctgactagtacagctgagatcttggcttctcaacagggcaaagataccaggcctgctgctgaggtcactgccacttctcacatgctgcttaagggagcacaaataaaggtattcgatttttaaagataaaaaaaaaaaa

SEQ ID NO: 293911 - DNA, 1000 bp, Homo Sapiens; identical to SEQ ID NO: 118977

SEQ ID NO: 293912 - DNA, 1000 bp, Homo Sapiens; identical to SEQ ID NO: 118979

SEQ ID NO: 293913 - DNA, 1000 bp, Homo Sapiens
cgggatcctgatggcacccacacagaggacctctttggggcaagatccaggtggtcccataggtcttgtgaaaaggctttttcagggaaaaatattttactagtccaatcacccccaggacctcttcagctgctgacaatcctatttagcatatgcaaatcttttaacatagagaactgtcaccctgaggtaacagggtcaactggcgaagcctgagcaggcaggggcttggctgccccattccagctctcccatggagcccctccaccgggcgcatgcctcccaggccacctcagtctcacctgccggctctgggctggctgctcctaacctacctcgccgagctgtcggagggctggacatttgtggcagtgctgaagggggcattgccggcgagtaaagtattatgtttcttcttgtcaccccagttcccttggtggcaaccccagacccaacccatgcccctgacagatctagttctcttctcctgtgttccctttgagtccagtgtgggacacggtttaactgtcccagcgacatttctccaagtggaaatcctatttttgtagatctccatgctttgctctcaaggcttggagaggtatgtgcccctcctgggtgctcaccgcctgctacacaggcaggaatgcggttgggaggcaggtcgggctgccagcccagctggccggaaggagactgtggtttttgtgtgtgtggacagcccgggagctttgagacaggtgcctggggctggctgcagacggtgtggttgggggtgggaggtgagctagacccaacccttagcttttagcctggctgtcacctttttaatttccagaactgcacaatgaccagcaggagggaaggacagacatcaagtgccagatgttgtctgaactaatcgagcacttctcaccaaacttcatgtataaataaaatacatatttttaaaacaaaccaataaatggcttacatgaaaaaaaaaaaaaaaaaaaaaaaa

SEQ ID NO: 293914 - DNA, 1000 bp, Homo Sapiens; identical to SEQ ID NO: 118980

SEQ ID NO: 293915 - DNA, 1000 bp, Homo Sapiens
tatcaagttcaccacagtggttgactccccagacctggttcatgccaagaacagctatatgcactgcaatgagcgcatgtatagatctggagatgcagaatccctgcacagatacaccctgatccccgaccatcccgatttcacccgagctcgcctcaatgcgctgcatctgagtgacaaagtctacagaaactcctgggagcagacccgggctggcagttatgacttcaggctggatgccatccccttccagactgcccgggcatctagggagatcgccagtgatttccggtacaaagaggctttcctgcgggaccgaggcctgcagatcgggtaccgcagtgtcgacgatgacccaaggatgaagcatttcctcaacgttggcaggctccagagtgacaatgagtacaagaaggactttgccaagagtcggtcccagtttcacagcagcacagaccagcccggcctccttcaggccaagaggagccagcagctggccagtgatgtgcactacaggcagcccctgccccagcccacctgcgacccggagcagctgggcctcaggcatgctcagaaggcccaccagctgcagagtgatgtcaagtataaatcagacttgaacctgaccagaggtgttggctggacccctcctggctcctacaaagtggaaatggctcggcgggctgcggaactggccaacgcaaggggcctgggtctccagggagcttaccggggggcagaagcagtggaggctggagatcatcagagtggggaggtgaacccagatgccactgagattctgcacgtcaaaaagaagaaggccctgctgttgtgagccatgtccaccctgattcctgagaggccagagaggaagtttgttcaccagagacaggcttcagatggctttgatttcggcaagctggaatggcccaccagcccatcccagatcttcctttattaaaataataactctgaaagcagatggaaaaaaaaaaaaaaa

SEQ ID NO: 293916 - DNA, 1000 bp, Homo Sapiens; identical to SEQ ID NO: 224603

SEQ ID NO: 293917 - DNA, 1000 bp, Homo Sapiens; identical to SEQ ID NO: 224604

SEQ ID NO: 293918 - DNA, 1000 bp, Homo Sapiens
tccctccagccccccaagcctggcctcagagccctccgggacctcgagccagcacctggtcccttcacctcccaagcacccaaggccacgagattctggcagcagctccccgcggtggtcgacagacctgcagtccagggggcgtcggctccgagtcctgggcagctgggggcctggcctgggtgatggggtggctgcagtgcctgtcctgagagccctggaggtggcctcacgcctgagccctcgagcccagggatgtcctggcccaaagccagcaccagatgcagcagctagacctcccagggcagctgaactctctcaccccagccccgtccccacttaatatagcccccactgccaggcttccctgtgctggggccacgacttgcccacatatgtggtcacagagcacagaataccagggcgggtgtgttggggggtggaaggagtgcctggccctggggaggaccctcttggtggaggggagtgggggactgggaccagccagggaggcagcagaggctggaacccagtttaggcccccaactgggtttggcctggggagggagggtccggctccccagcccttccttagggccaggctttcccgcgggcacgggggtggggggtggtcacccgagcaggcctgtgagaggcctctcctgctagaattgggcatggccgaggggcaggggctggagctgcgagtccaccactcccttgccggccccagggtaagagccacctcctaggccgcagtggcccaaggtcccagctgctcgcctgaggccgccgggggtgcggtccaggcctcccgtctccgggggatctgtagggttcccgcactgcgatagggcggcccgttccctcctcttggcgcaggacgccccggaacccaaaccaacatttccagctctcaggtgtacagaaatgcggtttactttgtaggccacgttggttcaataaatgatgcagcggacaaataaaaaaaaaaaaaaaa

SEQ ID NO: 293919 - DNA, 1000 bp, Homo Sapiens
gggcgaaggtaacagcagtcaacaggattgtggccattactggtcctattattttgatgtaccatggaaggcacagaaatcgagcaaggaagaaaatattagttattttgatctacatctttttctaaagaaaagtggagcttgcctccagttcaattcacaagagcattttccctcccatgcccaccttttcttgtggctgtcgctaggaaggatgcagaggctgtgtggtttaccaaatgccttaacttagcagtgaatgacaactgtcaaacacatgttgagggaaaatttttactgattcacaaaaaggaagacagtttgcccactcttagtggcacaaatcaaagctgcatgcactacattatccaaattagtcgtaaccaaatagttaaaaaattctgctgggcacggtggctcatacctgtaatcccagcactttgggaggccgaggcagttggatcacctgaggttaggagtttgagaccagcctggccaacagggtgaaaccctgtctcgtctaaaaatacaaaaattagccgggcgtggtggtgcatgcctgtagtcccaggtactcaggaggctgaggcaggagaatcacttgaacccgaggtggggcaggcggaggttgcagtaagccaagatcgcgccattgcactctagcctaggtgacagagtgagactccatctcaaaaaaaaaaaaaaattccataggatgttcaaccatgttttcagaggccgcactgcatgaatgcgggaaaatgttgatgatcactaatcaataatctgatatttaacaaaatatggacaggccacttatgctcagttttaccttagttattccttggtatccacaggcccaagtccctttaaataaaataccctcatatttccatataatctacatacattctcccatatactttaaatcatctctagattacttataatgtctaatacaaaataaatgctatgtaaatgtaaaaaaaaaaaaaaaaaa

SEQ ID NO: 293920 - DNA, 1000 bp, Homo Sapiens
gaggagaggctgtgtgaacaggaggagaggctgtgtgaacaggaggagaggctacgtgaacaggaggagaggctgtgtgaacaggaggagaggctacgtgaacaggaggagaggctgtgtgaacaggaggagaggctacgtgaacaggaggagaggctgtgtgaacaggaggagaggctacgtgaacaggaggagaggctgtgtgaacaggagaagctgccagggcaggagaggctgctggaagaggtggagaagctgttagaacaggagaggcggcaggaggagcaggagaggctgctggagagggagaggctgctggaagaggtggagaagctgttagaacaggagaggcggcaggaggagcaggagaggctgctggagagggagaggctgctggaagaggtggagaagctgttagaacaggagaggcggcaggaggagcaggagaggctgctggagagggagaggctgctggacgaggtggaggagctcctggacgaggtggaggagctcctggagcaggagaggcttcggtaacaggatgagaggctgtggcagcaggagactctgcgggagctggagaggctgcgggagctggagaggatgctggagctggggtgggaagccctgtacaagcagcgggccgagccacgcagcggcttcgaggagctgaacaacgagaacaagagcacactgcagttggagcagcaagtaaaggagctggagaagtcgggtggagctgaagagccaagaggctccgagtctgcagcagcagccagaccagtagctggagccccagtcccacaaggagcttggatgtgcggacaagcagggtggactccccaggagcacccaggcttgggtggagaagctgttggtacaggagaggcggcaggaggagcaggagaggctgcatgccattcttttcgggctgccgagaacagggagctaaacatcaccatcatctaagagcgggtcaaggaattaaaaaaaaaacaac

SEQ ID NO: 293921 - DNA, 1000 bp, Homo Sapiens; identical to SEQ ID NO: 118982

SEQ ID NO: 293922 - DNA, 1000 bp, Homo Sapiens; identical to SEQ ID NO: 221329

SEQ ID NO: 293923 - DNA, 1000 bp, Homo Sapiens
cttttcccaaggcacatcgaacctgagttagcaggaagggattctccaataagagcagaaatgccaggaaatcttcaacactatggaagatttcttaccggacccttgaacctcaatgatccagatgcaaaatgcagattccccaaaatttttgtaaatacagatgacacttatgaagagctccatttaatcgtttataaggccatgagtgcggctgtgtgctttatgatcgacgcctctgtccacccaacgttggatttttgccgaagactggacagcatcgttgggccccagctcacagtgctggcctctgacatctgtgaacagtttaacatcaacaagaggatgtctgggtctgagaaagaaccccagtttaagtttatctacttcaaccacatgaatctcgccgagaagagcacagttcacatgaggaaaacgcccagcgtgtcgctcacttccgtgcacccggatttaatgaagattctcggtgacatcaacagtgactttaccagagtggatgaagatgaggagatcattgtgaaggccatgagtgattactgggttgttggaaagaagtctgatcggcgggagctctatgttattttgaatcaaaaaaatgcaaacctgattgaagtaaatgaagaggtcaagaaactttgtgcaacgcagttcaacaacatcttcttcttggattgacggatgacggctcaccgagagcatatctaaaaaacactctgcaaacatttggtcacatgcaagttagtggtcatatgacggactgcattcaggacaagggtaaagcaatacttgctttgaagaatcagatttcgactcggtctgctgatctgaggtttttagattttaaatatttatgtggaattaattaaaggtagttggctatatcgctatcatttcattcttttgacattatttgaatattttactggaaaataagactaataaattgttaaaagttttttaaaaaaaaaaaaaaaaaaaa

SEQ ID NO: 293924 - DNA, 1000 bp, Homo Sapiens
ttacttctctgagttttagttggtctttccatctatcactgcattatcttgctcattcttcagttctctactccctcttgtcagtgtagacacaggtcaccattatgctggtgtatgtttatcaaagagcacttgagctgtctgaagcccaaagcctgaggacagaaagaccctgatgcaggtcagcccatggaggcagatgcccttgctgggcctgggggttttccaagccctcagctggtcctgaccaggatggagcaagctcttcccttgctcatgagctcctgatcagaggcatttgagcagctgaataacctgcacaggcttgctgtatgacccctggccacagccttccctctgcattgacctggaggggagaggtcagccttgacctaatgaggtagctatagttgcagcccaaggacagttcagagatcaggatcagctttgaaggctggattctatctacataagtcctttcaattccaccagggccagagcagctccaccactgtgcacttagccatgatggcaacagaaaccaagagacacaattacgcaggtatttagaagcagagggacaaccagaaggcccttaactatcaccagtgcatcacatctgcacactctcttctccattccctagcaggaacttctagctcatttaacagataaagaaactgaggcccacggtttcagctagacaatgatttggccaggcctagtaaccaaggccctgtctctggctactccctggaccacgaggctgattcctctcatttccagcttctcagtttctgcctgggcaatggccaggggccaggagtggggagagttgtgatggaggggagaggggtcacacccaccccctgcctggttctaggctgctgcacaccaaggccctgcatctgtctgctctgcatatatgtctctttggagttggaatttcattatatgttaagaaaataaaggaaaatgacttgtaaggtcaaaaaaaaaa

SEQ ID NO: 293925 - DNA, 1000 bp, Homo Sapiens
ttattttgcagttatctgagacaccaaacttaccatcctttattttacaatatttttgatcgaccaaataaaatgtcctaataatctactctatttatatctacatttccttccagctgagtcttcaaatttagcattattttgacacttttaattttcatttaacaatggattagaaaaatattttggtctagccactaaacataatgactgaaaaaaattattattataaatcaccaatataaatttattgcctacaattgtggacttatcatatttttatatatttttaaatttctgtacctttattgttaaacaccaagtttcacatacaagaggtttctttcattgtcaaattaagatatgtatttgtaagttattggtggctcatttaaactgtatcatacagtaatgccagcatttttatttaataggtcatcgtcttccttttatagctgttttacttcattgaatacgatcatgtacccagtgttaactctttgttgttgtccctttcaaatatggataactctgtgaacagtcttgactttttgtatcatgagacagagtgcctaagagaaacccttgcacctgggagcgctgcttggctctatctctacaacatttaatgaatttcttgtaaaccactttgagatacattgttttggaaattcatacaattttctcaacatggtactctactggcaggatgcagttttaaattttatgccatcagttatttattcttgtttattcaaatgactgcaataacaatgattcattcattaatgttaaggctaatacatttaagatcttgtttaaacaatgtttcttctgcaactggctactcctcttatattaatgcatacacttttgtaaagaagtatatttttatgaaaagaaactttgtaaaagtatgatgtaaattttcagtgcaatgtaaacaaaataaaaatggataattgcttttgtaaaaaaaaaaaaaaaaaaaaaaaaaaaa

SEQ ID NO: 293926 - DNA, 1000 bp, Homo Sapiens; identical to SEQ ID NO: 118983

SEQ ID NO: 293927 - DNA, 1000 bp, Homo Sapiens; identical to SEQ ID NO: 118984

SEQ ID NO: 293928 - DNA, 1000 bp, Homo Sapiens
tctcttgctaggaggccacttctgctgttacataactcctccctgcagaagaggggacttctgcaacagattctgtttctttttcccgactcttttccttgctgccaggtatgtgatgctgtaggcttggctccaaaccagctgagtgcctgctttttactcctttatgtctggccttctaggatctgtccaagacactctcaggcctggaggcagggcatagaatcagttcttcactctccctaatactacactctgtaaggacctggggcaggatatcttctcccccagggatcttctatttaagtggcttctgagagggtgaacaggattgttacttttaagcctacctctgctgtgacccatcatgtgggtcttttgtttctcccttctgtggtttatgagcctgcccttaccttttccctgcctctgacttggtatttccaggtccgtatttctctgtagcccagggtctggggtagagctgactgctgttcaccctttgaacaactcatggacgtgagggatgggtgctgagcagaaccaagagaggaaactttggcgctgttaaaatggaatttctcatctgccggcattattaagggtgggctaggttggatggaaggtgaaagggatgaactgccttttgctggaagctgtcttaggctgtgagacaggagcaggggaaccacagcctatggggaactgcccttgactccacctatgttggagccttagcccaaggccattccttctgtgatgataaagcccagttctggaattggagccatattaaggaatgattctcttccagcgctgctcctcaagggttgggggtccttctccctcgcagccaccacatgtctcagggctaccttctccgattggatttgcatttgtggcactgtctttgatgcagtgatgtacttaatggtgcaataaagctgcttcgatttggtaaaaaaaaaaaaaaaaaaaaaaaaaaaaaaaaaaaaaaaaa

SEQ ID NO: 293929 - DNA, 1000 bp, Homo Sapiens; identical to SEQ ID NO: 118985

SEQ ID NO: 293930 - DNA, 1000 bp, Homo Sapiens
aagccaaaggatagcactttttcaatccatggactcaggagaaaatgccctcttactggcagtggctagagggatgagacgtttgtgtatgtcactgggcagtgaccccgattctcaagctggagccatttgatgtcatgaggacaggatgtttgtgtctcggccccacttccctcatttgctctgtggttgtggcgccctgctttgaccgaatgctctggcaactgcggcagcaggcttgtgtgtgtgagaagggcggcagaggcagtggggctggctcgctgagggctgagcaggtagagaatgtgaatgtccatctcaaggaatgcgaagttccaatctctcagaggagctctgcaagtctcagctaggaatggggctgatctggcccccaagcctcactggagagatcccaagggtattttacaaataggaagcgctctcatgcaggatctgagggctttgctagaccatggttcaaggagtcagaatcttggctaccctacatgctccctctggcaccatttcaggggattactccagagagctgcagccagaactgtttatctcctgagatatggactttctctaagtcaggaaaagcacaaacctcataacttaggtgttttctggttggttgctcccttttctgatcctactactggcctctccctttccagagccaggagacacatctgggaccagaggaaacaaaagcaccaagaggttgactagagctgaccagtgatttacaaatatttcatattccaatgcttcgtctgctcaattattcaaaaggccatccctgtaaaggcagaaaagcttcctcttagatctggccactcagcaaataagtgggtatttggttttatgaagaataatgctgaggactagagatatagtatatcagagataatatatagtatacaggttgatctaaatattctggtttggattaggcaattaaaatttttttggcaacaggaaaaaaaaaaaaaaa

SEQ ID NO: 293931 - DNA, 1000 bp, Homo Sapiens; identical to SEQ ID NO: 118986

SEQ ID NO: 293932 - DNA, 1000 bp, Homo Sapiens
tgtaaaatttccagaaattacttattctttggatcagaagcttcattccattataaactaccctaaagtttctgcttctgtccaccagtataataaagagcagtttatcaagtggaaacaaagtataggacagaattattcaaacgttatagcaaatcttaggtggcaccaagactggcagaaggaaccaaggaagtatgaaaatgcaattgatcagtggcttaaaacccatatgaatccaagagcagtttgaacaaaaagtttaaaaatagtgttctagagatacatataaatatattacaagatcataattatgtattttaaatgaaacagttttaataattaccaagttttggccgggcacagtggctcacacctgtaatcccaggactttgggaggctgaggaaagcagatcacaaggtcaagagattgagaccatcctggccaacatggtgaaaccctgtctctactaaaaatacaaaaattagctgggcgcggtggtgcacacctatagtctcagctactcagaggctgaggcaggaggatcgcttgaacccgggaggcagcagttgcagtgagctgagattgcgccactgtactccagcctggcaacagagtgagactgtgtcgcaaaaaaataaaaataaaataataataattaccaatttttcattattttgtaagaatgtagtgtattttaagataaaatgccaatgattataaaatcacatattttcaaaaatggttattatttaggcctttgtacaatttctaacaatttagtggaagtatcaaaaggattgaagcaaatactgtaacagttatgttcctttaaataatagagaatataaaatattgtaataatatgtatcataaaatagttgtatgtgagcatttgatggtgaaaaaaaaaaaaaaaaaaaaaaaaaaaaaaaaaaaaaaaaaaaaaaaaaaaaaaaaaaaaaaaaaaaaaaaaaaaaaaaaaaaaaaaaaaaaaaa

SEQ ID NO: 293933 - DNA, 1000 bp, Homo Sapiens
ttgattatatccatgtgtcttctcttcctatggaaaaaatatcaaccctacaaagttataaaacagaaactagaaggcaggccagaaacagaatacaggaaagctcaaacattttcaggccatgaagatgctctggatgacttcggaatatatgaatttgttgcttttccagatgtttctggtgtttccaggattccaagcaggtctgttccagcctctgattgtgtatcggggcaagatttgcacagtacagtgtatgaagttattcagcacatccctgcccagcagcaagaccatccagagtgaactttcatgggctaaacagtacattcgagtgaaattctgaagaaacattttaaggaaaaacagtggaaaagtatattaatctggaatcagtgaagaaaccaggaccaacacctcttactcattattcctttacatgcagaatagaggcatttatgcaaattgaactgcaggtttttcagcatatacacaatgtcttgtgcaacagaaaaacatgttggggaaatattcctcagtggagagtcgttctcatgctgacggggagaacgaaagtgacaggggtttcctcataagttttgtatgaaatatctctacaaacctcaattagttctactctacactttcactatcatcaacactgagactatcctgtctcacctacaaatgtggaaactttacattgttcgatttttcagcagactttgttttattaaatttttattagtgttaagaatgctaaatttatgtttcaattttatttccaaatttctatcttgttatttgtacaacaaagtaataaggatggttgtcacaaaaacaaaactatgccttctcttttttttcaatcaccagtagtatttttgagaagacttgtgaacacttaaggaaatgactattaaagtcttatttttatttttttcaaggaaagatggattcaaataaattattctgtttttgcttttaaaaaaaaaaaaaa

SEQ ID NO: 293934 - DNA, 1000 bp, Homo Sapiens
acaaactggaagaacttaaccagctggaaaagctaaaagaacagctagtggaggagaaggattctgagacgtcctatgctgtagatggtctattctcttctcatcctagcaaacgagcttgcttttggaaatactgtgtttaaagctttttctctggatgcaaaaaaagataagaatatcaggaaaatatatgtatctactcactctgctgtaggcagaccccctgaaactattgctgtggaataaaagatgaaatgctcctgattattgtaaatacaaaattgcatgcgggattgtgtaaagacaatgccaggttggactgccagaatgagccaacagcacttgcttccccctgtagagagcctatgaatggacgtgcagtcagggaggtttcatatcaccaagattcctatcccagaaaagcagatgttcatagctctgggaatggaatgcgcccctcgtggagagcctataaacggatgcatggaaggcgcctgtccatatggataagatagggttgtaaacgtcctcatcttgccatggctcttctaggcctctttagggttaaggcatatttccttctgagaatttctggtctaagcggttgtctagcttcatgtcctgtttccatggattgtttgtaaccagcttttgttacaattgttactgctgattaatatcttgctaatcataggttatggaaagattgtgtttctgttttaaggctctgttagaaattacacacacagtatattgtaaattcttatctctgtatactgtacttctacatacaaatgtactgtacttctacatacaaatgttatgttaaagaattacttcatccccatgtgaccatctcacctcataatcaaatgaccctaaatccctcattaacctacccctgcccttgctaaacttaataataaatgctggtatatccagtgcattgttggcaccatgggaccagaaggtggtgacccccctggacccagctttccct

SEQ ID NO: 293935 - DNA, 1000 bp, Homo Sapiens; identical to SEQ ID NO: 118988

SEQ ID NO: 293936 - DNA, 1000 bp, Homo Sapiens
aaccacgtgggtcccgggcgcgtttcgggtgctggcggctgcagccggagttcaaacctaagcagctggaagggccctgtggctaggtaccatagagtctctacacaggactaagtcagcctggtgtgcaggggaggcagacacacaaacagaaaattggactacagtgctaagatgctgtaagaagaggttaactaaaggacaggaagatggggccaagagatggtgctactgtctactttagggatcgtctttcaaggcgaggggcctcctatctcaagctgtgatacaggaaccatggccaactgtgagcgtaccttcattgcgatcaaaccagatggggtccagcggggtcttgtgggagagattatcaagcgttttgagcagaaaggattccgccttgttggtctgaaattcatgcaagcttccgaagatcttctcaaggaacactacgttgacctgaaggaccgtccattctttgccggcctggtgaaatacatgcactcagggccggtagttgccatggtctgggaggggctgaatgtggtgaagacgggccgagtcatgctcggggagaccaaccctgcagactccaagcctgggaccatccgtggagacttctgcatacaagttggcaggaacattatacatggcagtgattctgtggagagtgcagagaaggagatcggcttgtggtttcaccctgaggaactggtagattacacgagctgtgctcagaactggatctatgaatgacaggagggcagaccacattgcttttcacatccatttcccctccttcccatgggcagaggaccaggctgtaggaaatctagttatttacaggaacttcatcataatttggagggaagctcttggagctgtgagttctccctgtacagtgttaccatccccgaccatctgattaaaatgcttcctcccagcataggattcattgagttggttacttcatattgttgcattgcttttttttccttct

SEQ ID NO: 293937 - DNA, 1000 bp, Homo Sapiens
catatcaactgcctttctcatgaagaattttaatgggttacagtatgaaatcagttaagataaagctgcattgtatataagtgcaatatatttttgaaggtctgtaaatgtgtacatacatgtcttatataaatatataatatataaatatggtgtctgtgtacatatagtgaagatatgcagtaagagctaccttaaagactttccctagacaaaggttaagttattttttgatcgtgtataccaagcagatagaatactgtgcttagtggaacccgctaaaaacctttttctctgtttttccaaacacaggcattctgtagcatagcaaaaccttctcaaatgacagagattctgtttgctgttgagaatgttgttatttggatttctgcactgtttaacaaatgaagtaaaagaaaaacactactgcaatcacgtcttttgttatgctagtatcagtcagatgcacttagagtgaagaaacactgtaattacagcacacagattgcaagtattgcgtaccaagtgatacaactcgaaatgcagttctcatcttcctgttttgagaaatgattattttatcacgcatcagagccttcgtgctttgattatcttgtatgttaacaattctagaaaacattcatgaattcacaaaaatatgttactatggcaggggaacattttgtacacatttaagtatataaaaatactaaaatatgtaattttataacaaagtcacgggtatctttaggttcagggaactagactaggtcattcgtgtaaatggactggtagttacagtcttaggttaaagtattctaatgaagtatgggaactaaattgctggttttctaagataagatatgggatatgggtcatataacttttgtattttttatgaagttgattttgtcttgcgtgttatttttaattgtatcattgaagatgtattttaaaccaaaggaattaaattttatatgtctatttcgtaaaaaaaaaa

SEQ ID NO: 293938 - DNA, 1000 bp, Homo Sapiens
acacactgatggaggtctcagcctcgatgctgttccgagtccagcaccactacaactctcactatgaaaagtttggcgacttcgtctggagaagtgaggatgagctggggcccaggaaggcccacctgattctacggcgactggagagggtgagtagccactgctccagcctcctgcggagtgcctacatccagagccgcgtggaaacagtgccctatcttttctgccgcagcgaggaggtccggcctgcaggcatggtgtggtatagcatcctcaaggacaccaaaatcacgtgtgaggagaagatggtgtcaatggcccgaaacacgtacggggagtccaagggccggtgagggagggtattgccctccgtgagcacagagactctccatgggagggggagcagtattctcctggatcctggggcctgggtgggctgggggacagctgaggatgggcctagcagatgaagcttgccagcaaggccaaagcaaacggtttctcctgtggatagtggacagagacctttgtaaccaatggaattattcatttttctctatcttttattttttcaaagatattatttgactctatcaaaagtctctcctttttaaaccttttcttatggatggctgtcaatcccgaggcagaagttttcaggtggagaccaagcggcctttgctcttcttccttcttcctgccacactctgctttcttcctgccatggacccctggaggagacctatggagggacagttttgacctgacccctagaggagacagttttgacctcttcagcaccaggaaggaagctctgaggatggttgcagtgaggaagcatgggtctttaaggacttctctctcttttttgctggacattattgagtttgtgggaccctgcctcttcctgctacctgtgggtctgcccagagtccctgcaggcctgtccatgcattaaaaattcctattgtctctcaaaaaaaaaaaaaaaaaaaaaaaa

SEQ ID NO: 293939 - DNA, 1000 bp, Homo Sapiens; identical to SEQ ID NO: 287464

SEQ ID NO: 293940 - DNA, 1000 bp, Homo Sapiens; identical to SEQ ID NO: 221750

SEQ ID NO: 293941 - DNA, 1000 bp, Homo Sapiens; identical to SEQ ID NO: 118990

SEQ ID NO: 293942 - DNA, 1000 bp, Homo Sapiens; identical to SEQ ID NO: 118991

SEQ ID NO: 293943 - DNA, 1000 bp, Homo Sapiens; identical to SEQ ID NO: 224612

SEQ ID NO: 293944 - DNA, 1000 bp, Homo Sapiens; identical to SEQ ID NO: 224613

SEQ ID NO: 293945 - DNA, 1000 bp, Homo Sapiens
gctgcagagaaatttcgtgaaacatcggccaactaagctgaagagcctcctgcgcctggtgaaacactggtaccagcaggcccatcatcctggatccggccgaccccaccctcaacgtggcagaagggtacagatgggacatcgttgctcagagggcctcccagtgcctgaaacaggactgttgctatgacaacagggagaaccccatctccagctggaacgtgaagagggcacgagacatccacttgacagtggagcagaggggttacccagatttcaacctcatcgtgaacccttatgagcccataaggaaggttaaagagaaaatccggaggaccaggggctactctggcctgcagcgtctgtccttccaggttcctggcagtgagaggcagcttctcagcagcaggtgctccttagccaaatatgggatcttctcccacactcacatctatctgctggagaccatcccctccgagatccaggtcttcgtgaagaatcctgatggtgggagctacgcctatgccatcaaccccaacagcttcatcctgggtctgaagcagcagattgaagaccagcaggggcttcctaaaaagcagcagcagctggaattccaaggccaagtcctgcaggactggttgggtctggggatctatggcatccaagacagtgacactctcatcctctcgaagaagaaaggagaggctctgtttccagccagttagttttctctgggagacttctctgtacatttctgccatgtactccagaactcatcctgtcaatcactctgtcccattgtctactgggaaggtcccaggtcttcaccagttttacaatgagttatcccaggccagacgtggtagctcacacctgtaatcccagaactttgggaggccgaggtgggaggagcgcttgagccgaggagttcaagaccagcctgggtatcacagggagaccccgtctctacaaaataaaaaaataattcactgggaaaaaa

SEQ ID NO: 293946 - DNA, 1000 bp, Homo Sapiens; identical to SEQ ID NO: 224615

SEQ ID NO: 293947 - DNA, 1000 bp, Homo Sapiens
attgaagagatccctatatgccctgttttctcagtttggtcatgtggtggacattgtggctttaaagaccatgaagatgagggggcaggcctttgtcatatttaaggaactgggctcatccacaaatgccttgagacagctacaaggatttccattttatggtaaaccaatgcgaatacagtatgcaaaaacagattcggatataatatcaaaaatgcgtggaacttttgctgacaaagaaaagaaaaaagaaaagaaaaaagccaaaactgtggaacagactgcaacaaccacaaacaaaaagcctggccagggaactccaaattcagctaatacccaaggaaattcaacaccaaatcctcaggtccctgattaccctccaaactatattttattccttaataacttaccagaagagactaatgagatgatgttatccatgctgtttaatcagttccctggcttcaaggaagtacgtctggtaccagggaggcatgacattgcttttgttgaatttgaaaatgatgggcaggctggagctgccagggatgctttacagggatttaagatcacaccgtcccatgctatgaagatcacctatgccaagaaataacatttgggatagtcgtctttaaaagacttggtgttatttacagtgtttgttttgataacatttggctgggtcattttaatagttagagatgaggaggagtaaaagtgaaatttttgtgaaggacttaaattatccagtgtttctttagccttggtgaactatgaaatacgaaggccttaattttgtacaataaacttttatttgtattctgtgtatataatgctttcttgattgacccatctccctatcatcaaatgacttctagtctagaacacacttaaggtttataaacttgtgtaataggatgcttttctagtgttactttggaggagctaattatacaacatcattgaaccattcaataaaagttaagtaaaattagatcac

SEQ ID NO: 293948 - DNA, 1000 bp, Homo Sapiens; identical to SEQ ID NO: 224616

SEQ ID NO: 293949 - DNA, 1000 bp, Homo Sapiens; identical to SEQ ID NO: 224616

SEQ ID NO: 293950 - DNA, 1000 bp, Homo Sapiens; identical to SEQ ID NO: 118994

SEQ ID NO: 293951 - DNA, 1000 bp, Homo Sapiens
ctcatttaaagtattttattcttattcaaagaaatatctgagctctttgcactacctgttatcagtagtgcctttacttcaggcttgataatacttaggtgtgattataaaatcatgaagcaggtaaagggaggggcaagcccccaaactgctgtggggacattttataatctatatgctgcacccacttaatctactgtggtgttttgtttattagttttgcataatttcagcttctatatattgtatgtatatattttttaaaaatctatattttgggaaaaaaacatacacaatgtgtctttctttttggacatttacctttttgaaaaagaaaacacttaaaatgatcattaggacataacagactaggccagacatagcatcttgtggctttgcaaccattttcatttgtttgttttccttttatttcttcaccagatttaaataactggaggaattttctccaatttttttttccttctctggcaggtatccccagcagtcaattaacaataagccagtataaaacacctaaataaccaatctacaatctcccttcacaagtttttttactgtttttagatgaatgtacgatgagaaattcaacgttaataattctggattttcttatcacaaaaaagaaaatgaaggacctcaaagcacctgaacagtttatcgaccagtttgaatctatttatcttcatttgaatgtcttctagaatatgtaaaaagtcataaaatgtatcttccatgctacatgtacaataagaacttctataattgtatatatgcctttgatgtattttcccctcaagattatcaactgtgtgttcgacagtgaatattcaatctggtaccagttgaaatttttggttataaatgtaatacgaattgtttcacaaacagaaaacatgtaaagcagtattaaaatttggccaaacaagtgttctgtatctactttaataaatggttattctttaaaaaaaaaaaaaaaaaa

SEQ ID NO: 293952 - DNA, 1000 bp, Homo Sapiens; identical to SEQ ID NO: 118995

SEQ ID NO: 293953 - DNA, 1000 bp, Homo Sapiens; identical to SEQ ID NO: 118996

SEQ ID NO: 293954 - DNA, 1000 bp, Homo Sapiens
gcatttgtaatcaggtatcttatggtgagatggtgggatgtgataaccaagattgccctatagaatggttccattatggctgcgttggattgacagaggcaccaaaaggcaaatggtactgtccacagtgcactgctgcaatgaagagaagaggcagcagacacaaataaaggtggtccttttgtttgatgaagaaataaacttcagctgaagattttatataggactttaaaaagaagagaagagaaagaagaaacaatgcatttccaggcaaccacttaaaggatttacatagacaatcctataagatcttgaacttgaattttatgggttgtattttaataatgtaagtaaattatttatgcactcctggtgtgctatgaatattattccagttagccttggattatttcagtggccaacatatgcagacatttgtactcctcaaccattttctcaaagtaatgggcattctatgatttagacttcaaggaattccaatgatgaagattttaaggaaagtattttatattcaacaggtatattctgctgcatgtactgtactccagagctgttatgtaacactgtatataaatggttgcaaaaaaaaaaaaaagtcagtgcttctaaaaagaatttaagataatggtttttaaaatgcctttataataagctttgtttctttgtgaaactaattcagcaggctgaaggaaatggttcatgtgataatgtgggctggtatcctctagagtacctgggtacataaacagaaactcctgtaggtaaaaagtaatttgtgccattagtctttctatgtttctgcatccagatagagtgcagttcatgagggagggggcgggggactgaaggggaaagggcgttaaagtgatacatttttataccaaatgtgtttatttttttgtgcaagtaatccttaaaattgcaattgtattaggtgttaaaataaagtttttaaaaaattaaaaaaaaaaaaaaaaaa

SEQ ID NO: 293955 - DNA, 1000 bp, Homo Sapiens
caaaccagcttaaggctttaagtcctctctcagaacttggcatttccaacttcttcctttccgggtgagagaagaagcggagaagggttcagtgtagccactctgggctcatagggacacttggtcactccagagtttttaatagctcccaggaggtgatattattttcagtgctcagctgaaataccaaccccaggaataagaactccatttcaaacagttctggccattctgagcctgcttttgtgattgctcatccattgtcctccactagaggggctaagcttgactgcccttagccaggcaagcacagtaatgtgtgttttgttcagcattattatgcaaaaattcactagttgagatggtttgttttaggataggaaatgaaattgcctctcagtgacaggagtggcccgagcctgcttcctattttgattttttttttttttaactgatagatggtgcagcatgtctacatggttgtttgttgctaaactttatataatgtgtggtttcaattcagcttgaaaaataatctcactacatgtagcagtacattatatgtacattatatgtaatgttagtatttctgctttgaatccttgatattgcaatggaattcctactttattaaatgtatttgatatgctagttattgtgtgcgatttaaactttttttgctttctccctttttttggttgtgcgctttcttttacaacaagcctctagaaacagatagtttctgagaattactgagctatgtttgtaatgcagatgtacttagggagtatgtaaaataatcattttaacaaaagaaatagatatttaaaatttaatactaactatgggaaaagggtccattgtgtaaaacatagtttatctttggattcaatgtttgtctttggttttacaaagtagcttgtattttcagtattttctacataatatggtaaaatgtagagcaattgcaatgcatcaataaaatgggtaaattttctga

SEQ ID NO: 293956 - DNA, 1000 bp, Homo Sapiens; identical to SEQ ID NO: 293955

SEQ ID NO: 293957 - DNA, 1000 bp, Homo Sapiens
ttccaagttcctagaggccttaattattcattctagccactaggtgcatagaatttgagatttttgtaataatagaagtagtgtgaaccctagaaattagaaaatcaagctttgggccaggtgcggtggctcatgcctgtaatcccagcactatgggaggccagggagggaggatctccagaggtcaggagttcgagaccagcctggccaacatggtgaaaccccgtctctattaaaaatacaaaaattagctgggcatgatggcaggcacctgtaatcccagctactcgggaggctgaggcaggagaattgcttgaactggggaggcagaggttgcagtgagacaagatcacgtcactgtactccagcctgggtgacagagtgatactccatctcaaaaaaaaaaaaaaaaaaaaaaaaaaaaaaaaaaaaaaacctttggtgccttttctctcttctttacctgagtaaataattggcacctgccttctttctccttttatgttatcataagtggcatgtatcaaaccaaacaggctaggggagaataggtctaattgtgacagacttaaaaacaacacattatttggaaagacaagccatgggaaagaaatatggcgtttctatttttttaagataatttagtatgtacaaaagtatccaaatttaaatatagttttcaatggctgatagttttgttttctcacccttcaatatttctagaaaacatccttgcatacaaagcaggatagctaagaaagggctgtaacaaacaaaacttcaagtgtctagcacatactacatctaagaggctaaactctgataggaaaagcactttaaacataattaaaagcttaatgtaaattagtagttgaaattctaggccggtgcggtggctcatgcctgtaatcccagcactgtaggcggccgaggtgggtgaatcacatgaggtcaggagttcaagaccagcctgaccaacatggtgaaaccccatttctac

SEQ ID NO: 293958 - DNA, 1000 bp, Homo Sapiens; identical to SEQ ID NO: 224620

SEQ ID NO: 293959 - DNA, 983 bp, Homo Sapiens; identical to SEQ ID NO: 224621

SEQ ID NO: 293960 - DNA, 1000 bp, Homo Sapiens
cacatgaagtattcaatcttgcctgactactacaaattcattgtgatcactgttatcatcctaataaccttaattgaagccatccggttgtatctgggctacgtgggtaacctacaggagaaggttcctgagttggctggcttttggcttttgagccttctattgcagttacctttaattcttttcttgctctttaatgaaggcctaacaaatctgcccttggaaaaagcgatacatatcatcttcactctcttccttgctttccaagttgttgcagcatttcttaccttaaggaaaatggttaatcagttggcagttcgtttccacctccaagactttgaccggctctctgcaaacagaggagacatgagaaggatgaggtcatgtatagaagagatctgatccagtgttgttgagtgaaaatctgacagatcattctagagactgtaagagttaggaaaatatcagagctctgagaaaagggacaaagcaagtgttttgaattgtatatgctctcactctgaaattccaaggttgggggcaatgatgaaactttgtacagtatatgaaacagtatattaaccctaaaacctagatgttgtccacctgatgccaaatttcttaattttttttgatgttgttgtctttttcaggagtgtagaaatctatgtattggtggttgtcatttgccagctctctcgtagcatttctggttagaatctttaactagagatgtatacatttctttaaaacttgttggttatccatgtcttgtctgtacatatgaccatgtttcttgacatggaaataccagtcagtgttcctatgtatttgtctatatttgtaaaccaagagaccggctgggtgtggtggctcacgcctgtaatcccagcactttgggaggccgaggtgggcagatcatgaggtcagaagatcgagaccatcctggctaacacggtgaaacccagcctctactaaaaatacaaaaaaaaaaaaaaaa

SEQ ID NO: 293961 - DNA, 1000 bp, Homo Sapiens
cagcccagaccccagggctgcctaaggacacagagattctccatgggaaggggactgccaagcatgaggaaatagaagattcaggggcctgagctctggaagctgcaagcaaaagggatgggactagggctgagttgtgtctccattttgataaggaaaggatatgctcacactcttgcttgttcagattccaagacagaaggcttcacaaggccaacgcctggaaaatgggcatctctccctcccatgttaagctttaacctctgtaatctgcctgtatctataggtgggcatctcactccatcaaaggagcccagcctctctttgtccctctatccatgcaacagtcttctctgtgcatttccccaagctgggccctcttctactctccatttaggcctgttgataactccattacccacccatcactgctgttcctccagggccagcactcgggcgaggcaggggagctgccttcggtacataatttgaaggggcactccctcttgggcacatgccggccctgagtgcctcccttgcctcactctgatcccggccccataatgtcctcagtggaaggtgactgggggccggtgctgtggggagagtagaaagaggggttggcatgactaaaaataccagtatgtgtattaagtattttgagaatgaaatgccaaggagtgcctactgtatgccagctctgctctaggaatggagtagacagtggacacaagaaggacttacgccctgagcacaggtgccaacggtgacaagactggcaagacgtgagggcatgaatggttcattcaggcagctgctgcaggtgtggtcacctggtgccatctgctgctcccttttccacttttctatgtcctccttccaccccaagtcccggatcactcgctgttttctggctagctcttggcatctccatctgagcctaaagttgcccactggcaccaatagattctgtttgacctgcaaaaaaaaaaaaaaaaaa

SEQ ID NO: 293962 - DNA, 1000 bp, Homo Sapiens; identical to SEQ ID NO: 118998

SEQ ID NO: 293963 - DNA, 1000 bp, Homo Sapiens; identical to SEQ ID NO: 224625

SEQ ID NO: 293964 - DNA, 1000 bp, Homo Sapiens; identical to SEQ ID NO: 118999

SEQ ID NO: 293965 - DNA, 1000 bp, Homo Sapiens
tggcctccttccccgtactttgtcccgtggcatttcaattcctggccctgttctcctccccaagtcggcaccctttaactcatgaggagggaaaagagtgcctaagcgggggtgaaagaggacgtgttacccactgccatgcaccaggactggctgtgtaaccttgggtggcccctgctgtctctctgggctgcagagtctgccccacatgtggccatggcctctgcaactgctcagctctggtccaggccctgtggcaggacacacatggtgagcctagccctgggacatcaggagactgggctctggctctgttcggcctttgggtgtgtggtggattctccctgggcctcagtgtgcccatctgtaaaggggcagctgacagtttgtggcatcttgccaagggtccctgtgtgtgtgtatgtgtgtgcatgtgtgcgtgtctccatgtgcgtccatatttaacatgtaaaaatgtcccccccgctccgtcccccaaacatgttgtacatttcaccatggccccctcatcatagcaataacattcccactgccaggggttcttgagccagccaggccctgccagtggggaaggaggccaagcagtgcctgcctatgaaatttcaacttttcctttcatacgtctttattacccaagtcttctcccgtccattccagtcaaatctgggctcactcaccccagcgagctctcaaatccctctccaactgcctaaggccctttgtgtaaggtgtcttaatactgtcctttttttttttttaacagtgttttgtagatttcagatgactatgcagaggcctgggggacccctggctctgggccgggcctggggctccgaaattccaaggcccagacttgcggggggtgggggggtatccagaattggttgtaaatactttgcatattgtctgattaaacacaaacagacctcagaaaaaaaaaaaaaaaaaaaaaaaaaaaaaaaaaaaaaaaaaaaaaaaa

SEQ ID NO: 293966 - DNA, 1000 bp, Homo Sapiens; identical to SEQ ID NO: 224626

SEQ ID NO: 293967 - DNA, 1000 bp, Homo Sapiens
tgcgcattcccagcaaagatcctctggaagagaccccagaggctccagtgcccaccaacatgagcacagcggcagacctcctgcgtcagggtgctgcctgcagcgtgctctacttgacctcagtggagacagagtcactgacgggcccccaagctgtggcccgggccagctctgcagctctgagctgtagcccccgcccgacaccagctgttgtccacttcaaggtgtcagcccagggcattacactgacggacaaccaaaggaagctcttctttcgccgccattatccagtgaacagcatcaccttctccagcactgaccctcaagaccggagatggaccaacccagacgggaccacctccaagatctttggtttcgtggccaagaagccgggaagcccctgggagaatgtgtgtcacctctttgcagagcttgacccagatcagcctgctggcgccattgtcaccttcatcaccaaagttctactgggccagagaaaatgaaggaaggccacaagctcagagcccacatcaacactgcccccctcccagcaccccacagccctcacatcccctggcctggacccaggagacccaggagaaagcaccctcccttaggaatgaggagtgggcatcaggcctgggacactgctctccttccccgcccccagcctgctaagttaagtggacaggcccacaagatgaccttgcatgtgagcagatggcagagatgggtgtgtgaggggtgaggaggcatcagcagttgagccccgaaggagatcaggcagccccacctgcaggagaacgtcagccctccaggggatcagcccctgccagttccacccagctgcaggtgccagcacggcagggatgggagaggggtggggagcgagtcactgcctcctctgagcagagattcagagtaggatcacatgaataggggaaaaaagagagtctatttttgtctaataataaagaatttctataaactttagccgaaa

SEQ ID NO: 293968 - DNA, 1000 bp, Homo Sapiens; identical to SEQ ID NO: 119000

SEQ ID NO: 293969 - DNA, 1000 bp, Homo Sapiens
gccaaggccggggcccgcaaggtcatcgggatcgtgtgttccagtatctctgattatgcggtgaagatcgtcaaagccaacaagttagaccacgtggtgaccatcatcaaggggaaggtggaggaggtggagctcccagtggagaaggtggacatcatcatcagcgagtggatgggctactgcctcttctacgagtccatgctcaacaccgtgctctatgcccgggacaagtggctggcgcccgatggcctcatcttcccagaccgggccacgctgtatgtgacggccatcgaggaccggcagtacaaagactacaagatccactggtgggagaacgtgtatggcttcgacatgtcttgcatcaaagatgtggccattaaggagcccctagtggatgtcgtggaccccaaacagctggtcaccaacgcctgcctcataaaggaggtggacatctataccgtcaaggtggaagacctgaccttcacctccccgttctgcctgcaagtgaagcggaatgactacgtgcacgccctggtggcctacttcaacatcgagttcacacgctgccacaagaggaccggcttctccaccagccccgagtccccgtacacgcactggaagcagacggtgttctacatggaggactacctgaccgtgaagacgggcgaggagatcttcggcaccatcggcatgcggcccaacgccaagaacaaccgggacctggacttcaccatcgacctggacttcaagggccagctgtgcgagctgtcctgctccaccgactaccggatgcgctgaggcccggctctcccgccctgcacgagcccaggggctgagcgttcctaggcggtttcggggctcccccttcctctccctccctcccgcagaagggggttttaggggcctgggctggggggatggggagggcacatcgtgactgtgtttttcataacttatgtttttatatggttgcatttacgccaataaatcctcagctggg

SEQ ID NO: 293970 - DNA, 1000 bp, Homo Sapiens; identical to SEQ ID NO: 119001

SEQ ID NO: 293971 - DNA, 1000 bp, Homo Sapiens; identical to SEQ ID NO: 286248

SEQ ID NO: 293972 - DNA, 1000 bp, Homo Sapiens; identical to SEQ ID NO: 118070

SEQ ID NO: 293973 - DNA, 1000 bp, Homo Sapiens
cctgtgtgttcttacctctacaaagtaaattacacatttagtttttagtgactttaacatgttactgaagcatttgaatataaagctattttagttttgatggcttaactgttccctgaggagttgagggttattgacactagagaaatgaattctcatttgatcctaattttccccgtattctacttgaacacattaaaaatactctgctgcctatacaatgtaaacctaggagcattaagacttgtcacacagtaaacctgatacatcagaggtgaataccagcacctattaggtttcattttgctgttttcaggaatgtaagaacacccatattggctactggaaattctagaagtcagtcaggttttaatttattccaggaggggcatcctcgacatcttatgtagatgatccacaacttcaaaatttagtctgggcctagtgcagtggctcacacctataatcccaacactttgggaggccaggagttttgagaccagcctgggaaacatctgtctctacaaaaaaatacaaaaattagctgggcatagtggtgcatgcctgtgtttctagctacgcaggaggattgcttgagcccatgagattgaggctgcagtgagctgtgatcgtgccactgacctccagcctgggggacagagcaagaccgtgtctcaaaaacaatttagtctgaaacacaattgtgctgaatctgtctgactataactctgaccacacagaaccagggctgcccctgtaatccccacagtaagaaagttgtatggcatattccaacaagtattggttcgtctggtgtctttagagctttactctgttgaagtgactgattctcaactgaacattatgtcgttactttgataagcattccacttttgttatttattagtgctatcttttttttttacgtgttaaatcttgtgattattaaaataaagtaccattgtaatttaaagtgaaaaaaaaaaaaaaaaaaaaaaaa

SEQ ID NO: 293974 - DNA, 1000 bp, Homo Sapiens
agacctaatttgcaagtattgggtcttaaacttcaagtgcaatgtatatgaaaaccaatctgagccttgtatctcttaaatatttattttttttaacgtgtgagatgttcgagagaaggttctccattcatttcagtgctgcctggaggaaactcggcaatgatttctttcagttgtgaagttcctttcgtgttacaccctccactgaaccctcaaccttcgaaatactccagttttgtgggtttggtcatttttacttataaatttacctttttgtattttgcaatttacatgtgtttggtttgttttaaattctgtgaaagtggcttgattaaaagactccttttaaatggaagccaccagtcagcagaatggaagcttagaggaacttgcctgtgagcgctggtctttgtgtttggttttgtgatgtaacgatctttgctggggttttttgctttgttttgagggaaatgtcttggagtaaattttaagttcctggagttaatttgttttacaggaattttgttttttaaaaaaataggatcattctgaactttggaatgacccccttatatattttctgaaaatgaaaacagttacatgaaaaaaatttccaatgaagatgtcagcattttatgaaaaaccagaagttattagatgaaagcagcgagtgaatctttaaaacagacttgatcacgcacacacaataagtctttctctccgaaaccggaagtaaatctatatctgttagaaataatgtagccaaaagaatgtaaatttgaggatttttttgccaatagtttatagaaaatatatgaaccaaagtgatttgagtttgtaaaaatgtaaaatagtatgaacaaaatttgcactctaccagatttgaacatctagtgaggttcacattcatactaagttttcaacattgtgttctttttgcattcattttttacttttattaaaggttcaaaaccaaaaaaaaaaaaaaaaaaaaaaaaaa

SEQ ID NO: 293975 - DNA, 1000 bp, Homo Sapiens; identical to SEQ ID NO: 224629

SEQ ID NO: 293976 - DNA, 1000 bp, Homo Sapiens; identical to SEQ ID NO: 224630

SEQ ID NO: 293977 - DNA, 1000 bp, Homo Sapiens; identical to SEQ ID NO: 119002

SEQ ID NO: 293978 - DNA, 1000 bp, Homo Sapiens
gactggtcttaaaagattgtcttcatttattggggctggatcccccagccttgttaaggcatgtgactcatcaccaccccatgccacccagagaaggagcctgcctaaagtagaagccttctcacagcatcacattgatgagctgccaccaccatctcaggagctacttgatgacattgagctcttgaaacagcagcagggctcatccacggtgttgcatgagaacacagcaagtgatggaggaggcactgcaaatgatcaaaggcacttagaagaacaagaaactgacagtaaaaaagaagatagtagtatgcttttgtccaaagaaactgaagatcttggagaggacacagagagagctcactctactctggatgaggacctggaaagatggctgcagccacctgaggagagcgtggagctacaagaccttcccaagggctctgaaagggagacaaatatcaaagatcaaaaagttggtgaagagaaaagaaaaagggaagatagcattacaccagaaagaaggaaatcagagggtgttctagggacttctgaagaagatgaactaaaatcctgtttttggaagcgactaggttggtccgaatcatccaggataatcgtgctggatcagagtgacttgtcagactgattggaattggatcatagacggactcctggcctgagtttgagtgtcctggttgtaagctcctttcttctctttctgcttcagttgctgtcagggcagcagttccagttctgtaagtctcactttgttcagctgccacaatagacatcatcgtttggccctctctgttagcagcacattcaaccatttgttttcagtcagatttctgaaaagtgagaggtagttttgatagtaaaaatttttggttgtgcctagaatggctttggttttgttgatgttaattttcaaaaactttaactcttgttatataataaaatgtttaattttaataacagaaaaaaaaaaaaaaaaaaa

SEQ ID NO: 293979 - DNA, 1000 bp, Homo Sapiens
ttcggcgatgagctcccagaaaggcaacgtggctcgttccagacctcagaagcaccagaatacgtttagcttcaaaaatgacaagttcgataaaagtgtgcagaccaagtgttaaatgtttacaaaagacagtgaaggattcttatcacataatgtgcaggccatgtgcctgtgaacttgaagtttgcgcaaaatgtggaaagaaagaagacattgttattccgttgaataaagaaacagaaaaaatagaacatactgaaaataatctaagttccaaccatagaagaagctgcagaagaaatgaagaaagtgatgatgatttagattttgatattgatttagaagacacaggaggagaccatcaaatgaattaatatcactgtattaaaagtctgccgggcacagtggctcacgcctgtaatcccaacactttgggaggccaaggagggtggatcacctgaggtcaggagttcgagaccagcctggccaacatggcggaaccccatctccactaaaagtacaaaaaattagctgggcgtggtggctcatgcctgtaatcccagctactcaggaggctgaggcaggaggattgcttgaaccctggaggcggagattgaagtgagctgagttcgtgccattacactccagcctgggtgacagagtgagactctgtctcaaaaaaaataaaataaaaagtcaatttagaatgtgaaattctgaccaccttttggctttgagtattttccaaaagatatttgaaatcctaatgaggaaatcagaaaaagctatggaaaaatagacaaatttcatacatgaacaatataaattgtgtatattacttaacatcaaactaaacaagattcagaattgatggttgtataagaactagctcatgtaaaaataaaataacattattacattgcctcaaaaattggtcctcggtaagtgccttttgataaatgatctcaaataaatgactcatagcaaaaaaaaaaaaaaa

SEQ ID NO: 293980 - DNA, 1000 bp, Homo Sapiens
tcaccatcgccatggagcgccccaaaattgacccccacagcgctgaacgcatcttcctgaccctctccaattacatcttcaccgcagtctttctggctgaaatgacagtgaaggtggtggcactgggctggtgcttcggggagcaggcgtacctgcggagcagttggaacgtgctggacgggctgttggtgctcatctccgtcatcgacattctggtgtccatggtctctgacagcggcaccaagatcctgggcatgctgagggtgctgcggctgctgcggaccctgcgcccgctcagggtgatcagccgggcgcaggggctgaagctggtggtggagacgctgatgtcctcactgaaacccatcggcaacattgtagtcatctgctgtgccttcttcatcattttcggcatcttgggggtgcagctcttcaaagggaagtttttcgtgtgccagggcgaggataccaggaacatcaccaataaatcggactgtgccgaggccagttaccggtgggtccggcacaagtacaactttgacaaccttggccaggtgagccccaggctcagaggtggggctgtggtgaaggaggctggagggggcacagggccatgcttagtgatacctgctgactccggtggaggtgggctccacgaagagatcagcccttcacaccctctgctgtctaaccaccagcatgtcgcaaagcccagtccatcccacagtgccccaaaaagtgggcccatggggtctctagccgtccttaaagatgaagaaacagaggctcagagagggtaaggggcttgcccagggccacagagctacatggtggagcaggaagcacacgtggcagtgggggcaggcagccctggatgtgaatcctgtgcaaatcctgaccccaccattgtcagctcagtgacctggagcagctgacttaccagggcctcagtttcattaactggtgaatggagtcataatagaatctcctcggaggtcacaat

SEQ ID NO: 293981 - DNA, 1000 bp, Homo Sapiens
tgtgctgaccgtcagattgtgtcaagtcaggtgtgcaaattgaccacactcccaaagaatcatttaaaagtaaagtgacttctaagagacaaggaagtaggaacatttctgatattaaatatataaataatatggatacacatgtgtatatctgtatatggatcttaccatcataattcattttcttcatatcagcaaagtaatagtaatgtgggccaatgcattttggaaatgtcctcattatgtagaatggaatgtgaaaattatttttgttaaaacaggattttgccacaattatttaaatattatgtttgtgaactatctaagcatgagaaaatacaaagctttctttgtatctggctgatactcatttggatgattctgtgactcatagaacatgatgttaaatgagaccagactcaactgccaccagtccccagctgcagaccttcatccccttcatctcccactaggggctcatggtctggaagaaacatgtatcaagcaacacagccccttatcccagatagaaaagtgtctcaaatgcattctactgcgggacagtcagtaggatcattttcataaagcaaggacatcatatgtttctagaaattacaagcatataactttagcctacaatctcttattaaaaatttttaacaaaattgtattacaaatgcatttcatcagaactcaaatttaaatggtgtttgttttgggtttttatttataatgctgaagttattccatataagtatcaagttaaacacaattcattttgattataaactatttgactttttaaaatcttctgacacagtaaatatatatatcaagattgatgtatcaaaatttattgcacactttaaagtgtaaaatcattttttaaaatcttgaatccacaaataaagttctattctgattttaaaaaaaaaaaaaaaaaaaaaaaaaaaaaaaaaaaaaaaaaaaaaaaaaaaaaaaaaaaaaaaaaaaaaaaaaa

SEQ ID NO: 293982 - DNA, 1000 bp, Homo Sapiens
ggcatgtcactgtgtccttcagtaacctctctcagtaactggtttctttatccctaacatgaattcatttctcctttgaagtcatttattattttataaattgagaacaaccacaccaccaaatgtcacaccttcttataaagtgtgaacaaggaaggtcatgtttttgtgggtattttgtcagacttagaggtttcatttcagggcatagtcaaaggcatcatcctcccaactacccacttgattatgtatttcagatccctccgtgggggccttcttctgacagagaattctttgaggtccgcagtagtgcttttgtcagcacagactgctaatctacatcttgctgcgttctgtttgctgaggttgggcttattcatttaacacataccaaccattatccagaggcaccatggagagttagtcatggaataaagcactgtccttgcagatgaaaaaagtctccagagcagacttctgacaggaaaggtttagatgctggagagttgaagaggtgtaagaagagatcgtgccctcatttttcacttatttttttggttattcatttataataaaaggttggcattgatatggtacaacctgcaaattacttgcagttctgagtttcagataaaacattataaaacattaaattcaatacatactgctcctttgaaatttgggtaaaaaattgtacaaccgtatatatagtcatttttgtattttttctatgttgtgaaaaccaaaattgtaattttataagtctttgattcactaaaattatataatttaaatgtattttttgtatatttagaaataaggagtccagagactacgcttaactttctatgcatgcatttgaaagctgtttttacctgataatgtagtaataagttgtattcataaaatactgatctgtgttgcatttcaaaataaactggtgtgtgctctgcctggatttgaaaaaaaaaaaaaaaaaaaaaaaaaaaaaaaaaaaaaa

SEQ ID NO: 293983 - DNA, 1000 bp, Homo Sapiens; identical to SEQ ID NO: 224633

SEQ ID NO: 293984 - DNA, 1000 bp, Homo Sapiens; identical to SEQ ID NO: 119003

SEQ ID NO: 293985 - DNA, 1000 bp, Homo Sapiens
gaaccccaatccctaatcagagctctgcctctgccccacatggggccctaccccacttccagggagcacagcagcctctgaccctagccctgccctggcagcatgggacctgccaacagctgagggtggcagcagtctgtgctgggatctgtgcccggatctgtgcccattctcttcagtaaggctggagctgcgagccagtttgctgccctcccagatcctgtgtccattctgaagaatggggacacctccctattacagatgagaacagaggggacatgaactccttggaggcagggctgggaagggaccctgggctgtgtctcctccctgtaccgtgtcaactccaagagctggcaccaggccgggagggctattcccatattcctcacagctggcttgtaaggcaggagctggcccaggccacagcacctgctggggtgggaaagggccccagctgacctggctatgggtgccactggagctagaacagccctcctgcacccaggctggcgacagcccagcagtgcccacacaggactgggccctccgcaggggacttcagagcagcaaggccccagctggcagtagcctgaccatctggacacagcagagccagggcggcccagggacggcaggagagctcgcggcaccttcctgaggccaagcaaggggagcagggttagggctgttcctgaaaggcagagagcctctgccctgagcctcacagctactcttctcagctctctgggtctggaaggagaacaggctgaggggagctgagaggagctgaggtgctacccggagccccattcacccccacctgcccacttgggaatctgaggcagaggagggtgaggcctgtgtgccaaccttgttcacataccaccttcgtccccccaggccccggccccactcctggctctcattatttttatgttaaaactttgaagaaattgaacatgacctgttgaagaaattgaaaaaaaaaaaaaaaaaa

SEQ ID NO: 293986 - DNA, 1000 bp, Homo Sapiens; identical to SEQ ID NO: 119004

SEQ ID NO: 293987 - DNA, 1000 bp, Homo Sapiens
gccctgggcgtcatctcctacatcctgtgagtgaccgctgggaaggcttgtctcctgcctgcctgcccctgctgggttggggagggtgggacagctggatgattcatctgtgggtgccaggctgtgtgggtacccccccttctacgacgagagcgaccctgagctcttcagccagatcctgagggccagctatgagtttgactctcctttctgggatgacatctcagaatcagccaaagacttcatccggcaccttctggagcgagacccccagaagaggttcacctgccaacaggccttgcggcacctttggatctctggggacacagccttcgacagggacatcttaggctctgtcagtgagcagatccggaagaactttgctcggacacactggaagcgagccttcaatgccacctcgttcctgcgccacatccggaagctggggcagatcccagagggcgagggggcctctgagcagggcatggcccgccacagccactcaggcctccgtgctggccagccccccaagtggtgatgcccaggcagatgccgaggccaagtggactgacccccagatttccttcccttggatgctttcggtcccctcccccaacccctccccctggggctggcctctgctggattttgagatttgagggtgtggcgcatggcgctggggttggaatggggcacccccaagtctgtccccaggctctgccctgcctgggggcagtggctcccctcccctgttgcctctcccgcccctgccccccccgccccgccaaaagccgagggggtgctggcaggcgggcctcaggggctgtctttcctgcacggctgttgtgtgcttcgctgagtgtgggtggtcctgcttgtgtcatggtcatggccttccagccccctccagttttccccaaaccaataaagaaagatacagcaaaaaaaaaaaaaaaaaaaaaaaaaaaaaaaaaaaaaaaaaaaaaaaaaaaaaaaaaaa

SEQ ID NO: 293988 - DNA, 1000 bp, Homo Sapiens
aattcatttttgagataactgttcccaatgcagtgagtatagcaaaccatcaagcattaattgacactagagtcagtccagcattgacttgagtttgtgttgacttaacattgagttcaacccttaattgacattcaagtgtttatgttaagaggattgggccaggtgtggtttctcacacctgtaattccagcacggttggaggccaaggcacataggtcacttgaggtcagaagtttgaaaccagcatggccaacagatgtcagccacttttcccagcctgttttttgattcttattttctatttttcttttttgagatagtactttttaaagagatagtacttttttgatatagtactttataaaagggagatcaggccgggcacggaggctcatgtaggtgatcccggcactttgggaggccgagacgggcccatggcagggtcaggagatcgagaccgtcctggctagcacggtgaggccccgtctctgctgaaaatatagaatattggccgggcgtggtggcgggtgcctgtggtcctagctgcttgggaggctgaggcgggagaatggtgtggatcctggagacggagcttgcagggagccggcatcgtgccactgcactccggcctgggcgacggtgagaatctgtctcaaagagaaaggaaaagaagggatatcaaagctggatggtggctcatccctgcaatcacaacactttggtagactgatgtgagtggatcacctaaggtcagaagttcaagagcaccctggctaacatggtgaaaccccatctctactaaaagtgcagaggttagccggggggtggtggtgtgcacctttggttccagctacttgggaggctgaggcacgggagtcgcttggacctgggaggtagaggttgccgtgaggcaagatcgtgccactgccctcagcctgggcagtagagtcagtctccatctcaaagaaaccagcaaacaaaaaaaaaaaaaaaaaaa

SEQ ID NO: 293989 - DNA, 1000 bp, Homo Sapiens
taaaattttttgtaaggacagtgtctcaccatgttgcctaggcgggtctcaaaactcctgggctcaagtgatcctcctgcctcagcctcccaaagcgttgggattataggcgtgagccaccgcacctggccagggaaccttctttataccaagtaccacaccagtcagagtcaagtcaggaaatagaaaccacactaggtatttcaaacagaggggatataagttagggactgattgtgcaggttttgcaaggctcagagagcaaaagtggatgttgcagaatctcagagctggatacttgcaggaagctgctaccacccttagggctggagaacccagggaagctaagaggagggtgcaacgaggctggtgttgggactgccaaaggaaacacagaatgacagctccatctctgcagacctcagatttgaccaggcctctggctgcctgggcagcctcattgccaatgggctgaaaggttctgtcactgttcagtggtctgacttctgagttctgtgcacaccctgagctctgctcctctggcctggccaccagtccttgtctgagtgccccaggtctggttatgacttcaggcctcagcacctggttgtctcttctgcaaagaatgcattctcccccagtccacccagaacacacagcctccatccaggtattggctctgagcaggacagagagcatgcagcaggtgctcagcaatatggaaatgggaccaaacagagggagtctccacagctccccgtccctcacagcagaagccagagccgctgcagtgcccagctggtcttcatcacgtctatgagctctgcaatcgctctgcagtcgcctcaactcctggtctcctctgctccttctcactgcacccgcatctcccatgtttgcactggctgttccctctgcctggaatgctccttacccagttatcccactgtcttctttgcatctggcacacagtagatgctcaataaatgcctgtggaatg

SEQ ID NO: 293990 - DNA, 1000 bp, Homo Sapiens
gcaagatcccatctctacaaaaacattttaaaaataagtaaataaatttaaactttgtgaaattatagctaatatgaaaatgtcctttcaagggcatgggagccacctttattttttagtgtccaccatgtgccatgcactgtggtatatgtatgcatatcatctcaaccaatccttaaatcaaccttatgagatagatatttgcatctccattttactaataaactgaggctgggattacaggcatgagtcactgcacccggcctgtgtgtgtgtgtgtgtgtgtgtgtgtgtgttttcaaactcatgggcaaattcaagttcagatggtgcacttttcattgattaatgttatagcaaatgtcagtttgttttcttcagtttctgctgatggttttaactggcacagaaagtatttattcaaccttacaaaactgtgtaagttgtattgtgatacagtttattgacttgtacagtattgtcattacaacccattcaggtatgcatgaatctgaagcagaacaccatttaagactggtgctgtataatataattcctacagatgtgggtccagggaatagaactgagcctgtcttttttttaatgttaagcaggttacccccagtggggcttctactagacatctctccatttggtctcttcttacactccaacccagcaggaacagttaataattggatgtttataaaatgggggtaaaagggtttactgtgatggatcctggctatccctctaggaggagacctttgcttcagcaatggtgtcttcatcctcgcagcctgaagctgcttcatttccttaggtctgttgtgttttctgtaaagtgttaggaattctggatatttttgtaaaagaatcaagatttgtataaaatgttgtttacagatcttttaatgaataaatacataaaccccccacagaaaaaaaaaaaaaaaaaaaaaaaaaaaaaaaaaaaaaaagaaaaaaaaaaaaaaaaaaa

SEQ ID NO: 293991 - DNA, 1000 bp, Homo Sapiens; identical to SEQ ID NO: 224639

SEQ ID NO: 293992 - DNA, 1000 bp, Homo Sapiens
ctgaatctacaatgatgtcccaaagtaaccaagtaagagagattgtaaatgataaaccgagctttaaaggataaagtgttaataaagaaaggaagctgggcacatgtcaaaaagggagatcgaaatgttaggtaatcatttagaaaggacagaaaatatttaaagtggctcataggtaatgaatatttctgacttagatgtaaatccatctggaatctttacatcctttgccagctgaaacaagaaagtgaagggacaatgatatttcatggtcagtttattttgtaagagacagaagaaattatatctatacattaccttgtagcagcagtacctggaagccccagcccgtcacagaagtgtggaggggggctcctgactagacaatttccctagcccttgtgatttgaagcatgaaagttctggcaggttatgagcagcactagggataaagtatggttttattttggtgtaatttaggtttttcaacaaagcccttgtctaaaataaaaggcattattggaaatatttgaaaactagaaaatgatggataaaagggctgataagaaaatttctggctgtcagtagaagtgagataagatcctcagaggaaacagtaagaagggataatcattaagatagtaaaacaggcaaagcagaatcacatgtgcacacacacatacacatgtaaacattggaatgcataagttttaatattttagcgctatcagtttctaaatgcattaattactaactgccctctcccaagattcatttagttcaaacagtatccgtaaactaggaataatgccacatgcattcaatgggaccttttaagtactcttcagtttgttccaagaaatgtgcctactgaaatcaaattaatttgtattcaatgtgtacttcaagactgctaattgtttcatctgaaagcctacaatgaatcattgttcaaccttgaaaaataaaattttgtaaatcaaaaaaaaaaaaaaaaaaa

SEQ ID NO: 293993 - DNA, 1000 bp, Homo Sapiens; identical to SEQ ID NO: 224640

SEQ ID NO: 293994 - DNA, 1000 bp, Homo Sapiens; identical to SEQ ID NO: 224641

SEQ ID NO: 293995 - DNA, 762 bp, Homo Sapiens; identical to SEQ ID NO: 224642

SEQ ID NO: 293996 - DNA, 1000 bp, Homo Sapiens; identical to SEQ ID NO: 224643

SEQ ID NO: 293997 - DNA, 1000 bp, Homo Sapiens
ctgctgggtgttcgggctgtgcccagtctcggctacactgaggaccctgagctgccgggcctgttccacccagtgctgggcacgccctgccaaccaccatccctgccagaggagggctccccgggagctgtctacctgctgtccaagcagggcaagagttggcactatcagctgtgggactacgaccaggtccgggagagcaacctgcagctgacggacttctcgccctcacgggccactgacggccgggtttttaaagcccatctgggagcagttacctgtgccagcccctctacctgtgttagcagatctggcaaccctgtaaggggggtgctagatggacccgatttgacagatggcaagactgaggcctggagaagtggaatcactggcctgaggtcacatgactagcacatggcaagatggagtctcgttctgtcgtccaggctggagtgcggtggcgtgatctcagctcactccagcctccacttcccaggttcaagtgattctcctgcctcagccccccaagtaactgggattacaggcatgcaccaccatgcctggctaattttttgtatttttagtagagacggggctttgccatgttggccaggctggtctcgaactcctgaccttgagtaatccacccgcctcggcctcccaaagtgctgggattacaggtgtgagccactgagcccggccacagtgcagtatttctaaccagtgatcagggtaaagaggatgcgtgtccaccatcccagccctgatcagcctgtctgtgcatcccccatcccagccagggcttggagcagccttgctcaccactgtgtcccctgcattgtaacacatccaggcacaagaatagccgcccagtgactgccaagtgagtgaaccagcctgcttggagcctgcctctttcccaaactgctcattatcctgttaccccacccagcccacgtgtccaaatacactccagatgcaaaataaaaagctctacgac

SEQ ID NO: 293998 - DNA, 1000 bp, Homo Sapiens; identical to SEQ ID NO: 119006

SEQ ID NO: 293999 - DNA, 1000 bp, Homo Sapiens
caagagtggggcagagaaccagagtgtcagagcaaaacctcctctatctgcacatcctggggacgaaccgggcagccggagagctgcggccggcccagtcccgctccgcctttgaagggtaaaacccaaggcggggccttggttctggcagaagggacgctatgaccgcagaattcctctccctgctttgcctcgggctgtgtctgggctacgaagatgagaaaaagaatgagaaaccgcccaagccctccctccacgcctggcccagctcggtggttgaagccgagagcaatgtgaccctgaagtgtcaggctcattcccagaatgtgacatttgtgctgcgcaaggtgaacgactctgggtacaagcaggaacagagctcggcagaaaacgaagctgaattccccttcacggacctgaagcctaaggatgctgggaggtacttttgtgcctacaagacaacagcctcccatgagtggtcagaaagcagtgaacacttgcagctggtggtcacagataaacacgatgaacttgaagctccctcaatgaaaacagacaccagaaccatctttgtcgccatcttcagctgcatctccatccttctcctcttcctctcagtcttcatcatctacagatgcagccagcacggttcatcatctgaggaatccaccaagagaaccagccattccaaacttccggagcargaggctgccgaggcagatttatccaatatggaaagggtatctctctcgacggcagacccccaaggagtgacctatgctgagctaagcaccagcgccctgtctgaggcagcttcagacaccacccaggagcccccaggatctcatgaatatgcggcactgaaagtgtagcaagaagacagccctggccactaaaggaggggggatcgtgctggccaaggttatcggaaatctggagatgcagatactgtgtttccttgctcttcgtccatatcaataaaattaagtttctcgtctta

SEQ ID NO: 294000 - DNA, 1000 bp, Homo Sapiens; identical to SEQ ID NO: 224645

SEQ ID NO: 294001 - DNA, 1000 bp, Homo Sapiens; identical to SEQ ID NO: 224646

SEQ ID NO: 294002 - DNA, 1000 bp, Homo Sapiens; identical to SEQ ID NO: 119007

SEQ ID NO: 294003 - DNA, 1000 bp, Homo Sapiens
cgccgctcaggtggagcgctatgtgcccgaacacgagcgatgctgctggtgcctgtgctgcggctgtgaggtgcgggaacacctgagccatggaaacctgacggtgctgtacggggggctgctggagcatctggccagcccagagcacaagaaagcaaccaacaaattctggtgggagaacaaagctgaggtccagatgaaagagaagtttctggtcactccccaggattatgcgcgattcaagaaatccatggtgaaaggtttggattcctatgaagaaaaggaggataaagtgatcaaggagatggcagctcagatccgtgaggtggagcagagccgacaggaggtggttcggtctgtcttagagcctcaggcagtgccagacccagaagagggctcttcagcacctagaagctggaaagggatgaacagccaagtagcttccagcttacagcagccctcaaatttggacctgccaccagctccagagcttgactggatggagacaggaccatctctgacattcattggccatcaggatataccaggagttggtaacatccactcaggtgccacacctccctggatgatccaagatgaagaatacattgctgggaaccaagaaataggaccatcctatgaagaatttcttaaagaaaaggaaaaacagaagttgaaaaaactccccccagaccgagttggggccaactttgatcacagctccaggaccagtgcaggctggctgccctcttttggccgcgtctggaataatggacgccgctggcagtccagacatcaattcaaaactgaagctgcagcaatgaagaagcagtcacatacagaaaaaagctaatcatgctctctaccaactaccatgaggctaaaagcaaagtcaacaaacccctattataccttccaccaaattctttatcattgtctttcttaggaaacagacatactcattcatttgatttaataaagttttatttttccaaatgta

SEQ ID NO: 294004 - DNA, 1000 bp, Homo Sapiens; identical to SEQ ID NO: 119009
